United States Patent Application Publication US 2011/0183924 A1 - sequence listing, part 113

SEQ ID NO: 329212 - DNA, 2843 bp, Homo sapiens
  misc_feature (2533)..(2537): n is a, c, g, or t
  misc_feature (2728)..(2728): n is a, c, g, or t
tggatctgggaagggggatagggatggatgggttcatttgagagccacggcttaaagcggttgcgatcaggatgggacacaggtttgtttggggacaacaaagatggcatttgtgagtgttttgaagcaacccgtactgattacatctttctcccttgtgttccttttatcccaggtttgaattttctcggagaaagacaggccggccacgaggaaaacagaaacaagccgcagcaacatctaagcccttgaaaggatcctgagagaggggggaaagggaaaacagcagccaccagcccaaccacttgtgtcttctgccccttcccacctatcttgcccaccccaccagcccacgctgcttgggacttgaaatctgtggccgaaggaccgtcactacataacttcaaaaataatcaaccaccctcccttcccaaaccacccaaattcactcatccagcgtttacttttttgaatccactcagaacttttttctgcgacccccctccctaaatggagttgggtgggggggaaatgaatactgagttggcctttattttttaaaagactttttgatccaatgaggccccctaaataattgagttttgggtcctggttggttgttttattttttttcctccaaaattttaccccctcccccctgagcccgaggtgctgacgtcgcaaaaaaattggataaaaccaccatcatgggttcgggtcccatagaccccaaagaacttctcaagggcctggacagcttccttaaccgagatggggaagtcaaaagtgtggatgggatttccaagatcttcagtttgatgaaggaagcacgaaagatggtgagtcgatgcacttacttgaacattctcctgcagacccgttcaccagaaatattggtcaaatttattgacgttggcggctacaaacttcttaacaattggctgacgtattcaaagacaaccaacaacattcccctcctccagcaaattctactgaccctgcagcatctaccgctcactgtagaccatctcaagcagaacaacacagctaaactggtgaagcagctgagcaagtcaagtgaggatgaagagctccggaaattggcctcagtccttgtcagcgactggatggctgtcatccgctctcagagcagtacccagcctgctgagaaagataagaagaaacgtaaagatgaaggaaaaagtcgaactacccttcctgagcgacctttgacagaggtgaaggctgagacccgggctgaggaggccccagagaagaagagggagaagcccaagtctcttcgcaccacagcacccagtcatgccaagttccgttccactggactagagctggagacaccatccttggtgcctgtgaagaagaatgccagcacagtggtggtttctgacaagtacaaccttaaacccatccccctcaaacgtcagagcaacgtagctgctccaggagatgccactccccctgcagagaagaaatacaagccactcaacacaacacctaatgccaccaaagagatcaaagtgaagatcatcccgccacagcctatggagggcctgggctttctggatgctcttaattcagcccctgttccaggcatcaaaattaagaagaaaaaaaaagtactgtcacctacggctgccaagccaagcccctttgaagggaaaacgagcacagaaccaagcacagccaaaccttcttccccagaaccagcaccaccttctgaggcaatggacgcagaccgtccaggcaccccggttccccctgttgaagtcccggagctcatggatacagcctctttggagccaggagctctggatgccaagccagtggagagtcctggagatcctaaccaactgacccggaaaggcaggaagaggaaaagtgtgacatggcctgaggaaggcaaactgagagaatatttctattttgaattggatgaaactgaacgagtaaatgtgaataagatcaaggactttggtgaggcggctaagcgagagatactgtcagaccgacatgcatttgagacagcgcggcgtctgagccatgataacatggaggagaaggtgccctgggtgtgcccccggcccctggttctgccctcacctcttgtcacccctggaagcaatagtcaggagcgatatatccaggctgagcgggagaagggaatccttcaggagctcttcctgaacaaggagagtcctcatgagcctgatcctgagccctacgagcccataccccctaaactcatccccctagatgaggagtgttccatggatgagactccgtatgttgagactctggaacctggggggtcaggtggctcacctgatggggcaggaggctccaagttgcctccagttctggccaatcttatgggaagcatgggtgctggaaagggcccccaaggccctggaggaggaggcattaatgtccaagagatcctcacctccatcatgggtagcccaaacagtcatccttcagaggaactactgaaacaaccagactattcggacannnnngccatagcggtcgtaaatctcccgcttgtgcttgtcagacagcacttcatatgcctcggccacctccttaaatttcttctcagcaaactctttattatctgggtttttgtctgggtgccactggagagccttgcgccgatacgccttcttgatgtcatcagcggacgcacttagcggaacgtctgggatcncgtagtaggatcccatggcaactggtcagtcgtcaggcgggcctccttggggctcctccgccaggagtcccggcctcctgcggcgcaccgcccctgcccccaccgggaaccgtcg

SEQ ID NO: 329213 - DNA, 1815 bp, Homo sapiens
tggatctgggaagggggatagggatggatgggttcatttgagagccacggcttaaagcggttgcgatcaggatgggacacaggtttgtttggggacaacaaagatggcatttgtgagtgttttgaagcaacccgtactgattacatctttctcccttgtgttccttttatcccaggtttgaattttctcggagaaagacaggccggccacgaggaaaacagaaacaagccgcagcaacatctaagcccttgaaaggatcctgagagaggggggaaagggaaaacagcagccaccagcccaaccacttgtgtcttctgccccttcccacctatcttgcccaccccaccagcccacgctgcttgggacttgaaatctgtggccgaaggaccgtcactacataacttcaaaaataatcaaccaccctcccttcccaaaccacccaaattcactcatccagcgtttacttttttgaatccactcagaacttttttctgcgacccccctccctaaatggagttgggtgggggggaaatgaatactgagttggcctttattttttaaaagactttttgatccaatgaggccccctaaataattgagttttgggtcctggttggttgttttattttttttcctccaaaattttaccccctcccccctgagcccgaggtgctgacgtcgcaaaaaaattggataaaaccaccatcatgggttcgggtcccatagaccccaaagaacttctcaagggcctggacagcttccttaaccgagatggggaagtcaaaagtgtggatgggatttccaagatcttcagtttgatgaaggaagcacgaaagatggtgagtcgatgcacttacttgaacattctcctgcagacccgttcaccagaaatattggtcaaatttattgacgttggcggctacaaacttcttaacaattggctgacgtattcaaagacaaccaacaacattcccctcctccagcaaattctactgaccctgcagcatctaccgctcactgtagaccatctcaagcagaacaacacagctaaactggtgaagcagctgagcaagtcaagtgaggatgaagagctccggaaattggcctcagtccttgtcagcgactggatggctgtcatccgctctcagagcagtacccagcctgctgagaaagataagaagaaacgtaaagatgaaggaaaaagtcgaactacccttcctgagcgacctttgacagaggtgaaggctgagacccgggctgaggaggccccagagaagaagagggagaagcccaagtctcttcgcaccacagcacccagtcatgccaagttccgttccactggactagagctggagacaccatccttggtgcctgtgaagaagaatgccagcacagtggtggtttctgacaagtacaaccttaaacccatccccctcaaacgtcagagcaacgtagctgctccaggagatgccactccccctgcagagaagaaatacaagccactcaacacaacacctaatgccaccaaagagatcaaagtgaagatcatcccgccacagcctatggagggcctgggctttctggatgctcttaattcagcccctgttccaggcatcaaaattaagaagaaaaaaaaagtactgtcacctacggctgccaagccaagcccctttgaagggaaaacgagcacagaaccaagcacagccaaacctgtgtctgtgcaattgaagtggcacctctgaatcgtcttcattctctgtaaagggagagataggaaagaaggaatgaggaatgtaggctttttgctgtccctgc

SEQ ID NO: 329214 - DNA, 955 bp, Homo sapiens
  misc_feature (50)..(50): n is a, c, g, or t
  misc_feature (56)..(56): n is a, c, g, or t
  misc_feature (63)..(63): n is a, c, g, or t
gagagagagagagagagagagagagagagagagagagagagagagagagngagagngagaganagagagagaggggcgacgagaacccctttccagtattacccttaatgcttgagaacctaaagctggttatcctggcgaacacccctacccttctattgcgggtccccacatgcacacagaactctgacacaggatcagctgcacttaagaaatcatcccagctaagttcattattcctcatggggtggggagatgctgaaaggggtattgtatatcccactgcactgagagggctcaatcagctggatttgagttctggaacacacatcatccccacccctcccccagcgtgggctcaccattcttagtcctttctcaagtgggaccttcaactttctgtgaacacccagtctgcgtcctgggtctgctaggttcgatgatggcgaactcgtatctgcatccggtgcaagttttagctggcagaggtgagaccggtggtgctggtctgcctttgccaactatagccagtctggagacttgataaaatacttcagtgagaccagcttctcatcaacttgggcccggcgtgctgggcctgaaagtcacactacatgcactgcctttgggagtcagctcactccctgctcccacctggaaccttgccagcgtgaaggaggcttccaggtacttcaccctgtcaaccacctctgaatccccaccaggcgccttcctgggtggattcaacaagatgattttgccctttcccagttctctccttcactttggcatcagttgttttctatgaaaacagtggattggttgggttttgtgcagggtcttgggttagagccaaaatggatttgaggatgagtatttttttttttggttttgtatattttgtacattaataataaacagtggaaagagaaagcagcttatttaaaaaaaaaag

SEQ ID NO: 329215 - DNA, 800 bp, Homo sapiens
gtagtagtttgatgaataatttaaagaaaaacacctacatatacaagctatccaagaatgcaaacaaggtgacattgagatgggtagtggctgcattcttggatagcttgtatatgtagtagtttgatgaataatttaaagaaaaacacctaaaatttgaaaaatgattgtaggatcaaaaaaggcagatgaaattacttaatactcagtgttttggagagtattccttttagtttgttggttggctggtttgaacgatagaaatatgcagcatgcaatatatgcttatatttcattttaatttctgatatataatgaacttcttgggagaggtactgaatctttgatgttttttgtcattgttctcaagtgcaatataacaatgtaaccaaatctagataatttcaaagttgtcattaatttagtaagcctaatataaacaaatatttgtattatttttgttagcaggaaagagtgattaagtgaggttatttacccctaaatggtccattctgcattgtatttcaggctggaaatgaattattctttaccagttttgaaacactttgaaatatcctaaggtaacttggaagctgtgtagtatatcaaattaatttgctacctaataacatagaaagtaaatatctttgtggtcacccacattgggtgagacagaaaatgaatctgttctaaaatttgtaatttgctaacttgatttgagttagtgaaaactggtacagtgttctgcttgatttacaacatgtaacttgtgactgtacaataaacataagcatatggta

SEQ ID NO: 329216 - DNA, 7452 bp, Homo sapiens
gataaaaagctttcctcatttttaaacaacagtcgcacggaagttcccggcgggacaagggaacgtgggtgcccttgctactcccgtggacgcgggtagattgggacgctggaccgtatctccccgcccccgcccccacgcctcctcaggtgctcagcctgaggccttcgtccaggagcgctgccgctgacccaggctcaggagctgggggcccctgcacagacgcccaggtctcgggacaggcggcgactgcactcacggaagtacgctgagctctcccctgtagaagggcgcctctcctcccccacttcctcctccagctccacagcagcctcccgggccggctcctcctccttccaggtctcctcccagtgccgccgcggctctcaggcctgaggtgcggcgctcaccccggcagtccccagcctcagacgctgcgtggagcggcggagccggagggaagcaaaggaccgtctgcgctgctgtccccgccccgcgcgctctgcgcccctcgtccctggcggtcgctccgaagctcagccctcttgcctgccccggagctgtcccgggctagccgagaagagagcggccggcaagtttgggcgcgcgcaggcggcgggccgcgggcactgggcgcctcgctggggcggggggaggtggctaccgctcccggcttggcgtcccgcgcgcacttcggcgatggcttttccgccgcggcgacggctgcgcctcggtccccgcggcctcccgcttcttctctcgggactcctgctacctctgtgccgcgccttcaacctagacgtggacagtcctgccgagtactctggccccgagggaagttacttcggcttcgccgtggatttcttcgtgcccagcgcgtcttcccggatgtttcttctcgtgggagctcccaaagcaaacaccacccagcctgggattgtggaaggagggcaggtcctcaaatgtgactggtcttctacccgccggtgccagccaattgaatttgatgcaacaggcaatagagattatgccaaggatgatccattggaatttaagtcccatcagtggtttggagcatctgtgaggtcgaaacaggataaaattttggcctgtgccccattgtaccattggagaactgagatgaaacaggagcgagagcctgttggaacatgctttcttcaagatggaacaaagactgttgagtatgctccatgtagatcacaagatattgatgctgatggacagggattttgtcaaggaggattcagcattgattttactaaagctgacagagtacttcttggtggtcctggtagcttttattggcaaggtcagcttatttcggatcaagtggcagaaatcgtatctaaatacgaccccaatgtttacagcatcaagtataataaccaattagcaactcggactgcacaagctatttttgatgacagctatttgggttattctgtggctgtcggagatttcaatggtgatggcatagatgactttgtttcaggagttccaagagcagcaaggactttgggaatggtttatatttatgatgggaagaacatgtcctccttatacaattttactggcgagcagatggctgcatatttcggattttctgtagctgccactgacattaatggagatgattatgcagatgtgtttattggagcacctctcttcatggatcgtggctctgatggcaaactccaagaggtggggcaggtctcagtgtctctacagagagcttcaggagacttccagacgacaaagctgaatggatttgaggtctttgcacggtttggcagtgccatagctcctttgggagatctggaccaggatggtttcaatgatattgcaattgctgctccatatgggggtgaagataaaaaaggaattgtttatatcttcaatggaagatcaacaggcttgaacgcagtcccatctcaaatccttgaagggcagtgggctgctcgaagcatgccaccaagctttggctattcaatgaaaggagccacagatatagacaaaaatggatatccagacttaattgtaggagcttttggtgtagatcgagctatcttatacagggccagaccagttatcactgtaaatgctggtcttgaagtgtaccctagcattttaaatcaagacaataaaacctgctcactgcctggaacagctctcaaagtttcctgttttaatgttaggttctgcttaaaggcagatggcaaaggagtacttcccaggaaacttaatttccaggtggaacttcttttggataaactcaagcaaaagggagcaattcgacgagcactgtttctctacagcaggtccccaagtcactccaagaacatgactatttcaagggggggactgatgcagtgtgaggaattgatagcgtatctgcgggatgaatctgaatttagagacaaactcactccaattactatttttatggaatatcggttggattatagaacagctgctgatacaacaggcttgcaacccattcttaaccagttcacgcctgctaacattagtcgacaggctcacattctacttgactgtggtgaagacaatgtctgtaaacccaagctggaagtttctgtagatagtgatcaaaagaagatctatattggggatgacaaccctctgacattgattgttaaggctcagaatcaaggagaaggtgcctacgaagctgagctcatcgtttccattccactgcaggctgatttcatcggggttgtccgaaacaatgaagccttagcaagactttcctgtgcatttaagacagaaaaccaaactcgccaggtggtatgtgaccttggaaacccaatgaaggctggaactcaactcttagctggtcttcgtttcagtgtgcaccagcagtcagagatggatacttctgtgaaatttgacttacaaatccaaagctcaaatctatttgacaaagtaagcccagttgtatctcacaaagttgatcttgctgttttagctgcagttgagataagaggagtctcgagtcctgatcatatctttcttccgattccaaactgggagcacaaggagaaccctgagactgaagaagatgttgggccagttgttcagcacatctatgagctgagaaacaatggtccaagttcattcagcaaggcaatgctccatcttcagtggccttacaaatataataataacactctgttgtatatccttcattatgatattgatggaccaatgaactgcacttcagatatggagatcaaccctttgagaattaagatctcatctttgcaaacaactgaaaagaatgacacggttgccgggcaaggtgagcgggaccatctcatcactaagcgggatcttgccctcagtgaaggagatattcacactttgggttgtggagttgctcagtgcttgaagattgtctgccaagttgggagattagacagaggaaagagtgcaatcttgtacgtaaagtcattactgtggactgagacttttatgaataaagaaaatcagaatcattcctattctctgaagtcgtctgcttcatttaatgtcatagagtttccttataagaatcttccaattgaggatatcaccaactccacattggttaccactaatgtcacctggggcattcagccagcgcccatgcctgtgcctgtgtgggtgatcattttagcagttctagcaggattgttgctactggctgttttggtatttgtaatgtacaggatgggcttttttaaacgggtccggccacctcaagaagaacaagaaagggagcagcttcaacctcatgaaaatggtgaaggaaactcagaaacttaactgcagtttttaagttatgctacatcttgacccactagaattagcaactttattatagatttaaactttcttcatgaggagtaaaaatccaaggctttactgctgatagtgctaattggcattaaccacaaaatgagaattatatttgtcaaccttctccttataaataagttcagacatacatttaataacatagggtgacttgtgtttttaggtatttaaataataaaatttcaagggatagtttttattcaatgtatataagacaggtagtgcctgatttactactttatataaaatagtacctccttcagttactgtttctgatttaatgtacggaactttatttgttgttgttgttgttgttgttgttgttgttttaaagcagtccaaatttggaccttagcaatcatgtcttttgtataggtacttaatgttaatacatattacactacagtttacttttcagaatactaaagactttataactgcatgaacttggatttttttaatcactcatatggtagaattttataaacacatacatgataccatccaaattcttgcttttaataacaaaggtacaatattttgttttagtatgaaaatctggtagatcctattacacttctgtttatattaaatccacaatattttattacatttttaacttgtataaattttaggtcaaatccttcaagccaacctatactaaaaattagttccataatcacaaatggctcttttgtgtaattgtttaatttcacctgaatatcataatgcttaaagccatatggagttggaaattatttccaaagcatatttattccattgttttagtctggctatttacagtataaaaaaagcatttttattaaaatactgtgtagttctttgagatagttgcttatgcatatagtaagtattacattcttagagtagagcagagtttttagttagtattaatttattttcctccattcatgtacttttccttatatttccaaaactgttactgagaatgggtcaagatcagtgagaaatctttacagttgacaggaacctggaccccttaccccaactttatgagtaatgcttggaataaaaactcttaaggcaactcactgatttacttctagcaatagcatgatgttacaggaatattacctctgtttaagcaaggtaatgtgtaaaatcagtctcggctgtcagaataacttctaaaaggtatttttataagcagttcaagttactgaaaaccttttaaacctttctgaagttcgttagtataaattacttttctaggattattaataaaagccacataggtggcaagttgtagttttatatggctctgtagagtggtgaaccttctagaggaatatatgatttattcacagttcctcaaggcctggggatgatgatcagttatacctatttttgtgcaattacatcatgttgtacattagaaatggagagtttaatagctctttaactgctgtcctcattaggtaatgataaatatttcccttaaataattgactattttgctgtgttttaaaaatgattgaaatttatcttgccatatctcataatttcatgcacaagttgactgagctaatcttgagaatatattcgtaaaataggagcacatttagttgaggtatacaaggtaggactctagacaaaaccttctattttagctttagtgaatttcaaaagtaatgggtcttggagtatagatttttattagtagcttgaaagagcttaatcatatgcagtaagtatttttattaccaataaatttaaaattttttaagaaaaatatttttatcctagggccaagtgttgcctgccaccaatcagtaagttagtctataacaaattttaccctaacagttttaccacctagtaacagtcatttctgaaaatatgttggatagaaagtcactctttggcaaaagtgttagaatttgcttttgtgccatctattccttttatggcatctatcttgaaagtaatcttgtattggagattgaaagatgctgtaatttagaaattaacatgatatcttaaattacctttatgaaatatagttttgtataatagcatagattttccttcaaaaaatgaacatttatatatctacaaaaatatggagaagagtaatttgaaagcctactttctgaagaaaatggtgggatttttttttatcatgattaaatatcaaaaaattgccctatgaaaactttaaatctctaaaacatttgaaatactaccatatttgtgatttattgagaataaaaatccattttgaaatgtaaaatttttatgatctgattcagttttaagaaaacatgaatgaactagaagatattaaaaacatttgacattggtaagaaatattgatactgatattgatttttatataggtatttatttcagaattgatattttgagaaaaatacatgtgagtcattttttctgtttctcttttctcttaacgattatcactgtaattctgaatctgaaaggtaaaacaattagtcaaaatattattgccatcattctacctgtgttatgaaactacttattcatagttaattctcattaacacttacatttccataaagaaaactcaagtattaataaaagagactttactggcttaagagggctgtgaaagatttttgatagtgaatcatgaccctaagggagagatttgtgtgataaaagtattgtatataatagatcagcgatttttgtaaggcaaacagaatttgtaagttggcagatcttcctaagttgcaaaatgtaatgatgagcttggtggagaagaatgagtcgttcttggaatacctatgtgcagccactacccatctcaatgtcaccttgtttgcattcttggatagcttgtatatgtagtagtttgatgaataatttaaagaaaaacacctaaaatttgaaaaatgattgtaggatcaaaaaaggcagatgaaattacttaatactcagtgttttggagagtattccttttagtttgttggttggctggtttgaacgatagaaatatgcagcatgcaatatatgcttatatttcattttaatttctgatatataatgaacttcttgggagaggtactgaatctttgatgttttttgtcattgttctcaagtgcaatataacaatgtaaccaaatctagataatttcaaagttgtcattaatttagtaagcctaatataaacaaatatttgtattatttttgttagcaggaaagagtgattaagtgaggttatttacccctaaatggtccattctgcattgtatttcaggctggaaatgaattattctttaccagttttgaaacactttgaaatatcctaaggtaacttggaagctgtgtagtatatcaaattaatttgctacctaataacatagaaagtaaatatctttgtggtcacccacattgggtgagacagaaaatgaatctgttctaaaatttgtaatttgctaacttgatttgagttagtgaaaactggtacagtgttctgcttgatttacaacatgtaacttgtgactgtacaataaacataagcatatggta

SEQ ID NO: 329217 - DNA, 7623 bp, Homo sapiens
gataaaaagctttcctcatttttaaacaacagtcgcacggaagttcccggcgggacaagggaacgtgggtgcccttgctactcccgtggacgcgggtagattgggacgctggaccgtatctccccgcccccgcccccacgcctcctcaggtgctcagcctgaggccttcgtccaggagcgctgccgctgacccaggctcaggagctgggggcccctgcacagacgcccaggtctcgggacaggcggcgactgcactcacggaagtacgctgagctctcccctgtagaagggcgcctctcctcccccacttcctcctccagctccacagcagcctcccgggccggctcctcctccttccaggtctcctcccagtgccgccgcggctctcaggcctgaggtgcggcgctcaccccggcagtccccagcctcagacgctgcgtggagcggcggagccggagggaagcaaaggaccgtctgcgctgctgtccccgccccgcgcgctctgcgcccctcgtccctggcggtcgctccgaagctcagccctcttgcctgccccggagctgtcccgggctagccgagaagagagcggccggcaagtttgggcgcgcgcaggcggcgggccgcgggcactgggcgcctcgctggggcggggggaggtggctaccgctcccggcttggcgtcccgcgcgcacttcggcgatggcttttccgccgcggcgacggctgcgcctcggtccccgcggcctcccgcttcttctctcgggactcctgctacctctgtgccgcgccttcaacctagacgtggacagtcctgccgagtactctggccccgagggaagttacttcggcttcgccgtggatttcttcgtgcccagcgcgtcttcccggatgtttcttctcgtgggagctcccaaagcaaacaccacccagcctgggattgtggaaggagggcaggtcctcaaatgtgactggtcttctacccgccggtgccagccaattgaatttgatgcaacaggcaatagagattatgccaaggatgatccattggaatttaagtcccatcagtggtttggagcatctgtgaggtcgaaacaggataaaattttggcctgtgccccattgtaccattggagaactgagatgaaacaggagcgagagcctgttggaacatgctttcttcaagatggaacaaagactgttgagtatgctccatgtagatcacaagatattgatgctgatggacagggattttgtcaaggaggattcagcattgattttactaaagctgacagagtacttcttggtggtcctggtagcttttattggcaaggtcagcttatttcggatcaagtggcagaaatcgtatctaaatacgaccccaatgtttacagcatcaagtataataaccaattagcaactcggactgcacaagctatttttgatgacagctatttgggttattctgtggctgtcggagatttcaatggtgatggcatagatgactttgtttcaggagttccaagagcagcaaggactttgggaatggtttatatttatgatgggaagaacatgtcctccttatacaattttactggcgagcagatggctgcatatttcggattttctgtagctgccactgacattaatggagatgattatgcagatgtgtttattggagcacctctcttcatggatcgtggctctgatggcaaactccaagaggtggggcaggtctcagtgtctctacagagagcttcaggagacttccagacgacaaagctgaatggatttgaggtctttgcacggtttggcagtgccatagctcctttgggagatctggaccaggatggtttcaatgatattgcaattgctgctccatatgggggtgaagataaaaaaggaattgtttatatcttcaatggaagatcaacaggcttgaacgcagtcccatctcaaatccttgaagggcagtgggctgctcgaagcatgccaccaagctttggctattcaatgaaaggagccacagatatagacaaaaatggatatccagacttaattgtaggagcttttggtgtagatcgagctatcttatacagggccagaccagttatcactgtaaatgctggtcttgaagtgtaccctagcattttaaatcaagacaataaaacctgctcactgcctggaacagctctcaaagtttcctgttttaatgttaggttctgcttaaaggcagatggcaaaggagtacttcccaggaaacttaatttccaggtggaacttcttttggataaactcaagcaaaagggagcaattcgacgagcactgtttctctacagcaggtccccaagtcactccaagaacatgactatttcaagggggggactgatgcagtgtgaggaattgatagcgtatctgcgggatgaatctgaatttagagacaaactcactccaattactatttttatggaatatcggttggattatagaacagctgctgatacaacaggcttgcaacccattcttaaccagttcacgcctgctaacattagtcgacaggctcacattctacttgactgtggtgaagacaatgtctgtaaacccaagctggaagtttctgtagatagtgatcaaaagaagatctatattggggatgacaaccctctgacattgattgttaaggctcagaatcaaggagaaggtgcctacgaagctgagctcatcgtttccattccactgcaggctgatttcatcggggttgtccgaaacaatgaagccttagcaagactttcctgtgcatttaagacagaaaaccaaactcgccaggtggtatgtgaccttggaaacccaatgaaggctggaactcaactcttagctggtcttcgtttcagtgtgcaccagcagtcagagatggatacttctgtgaaatttgacttacaaatccaaagctcaaatctatttgacaaagtaagcccagttgtatctcacaaagttgatcttgctgttttagctgcagttgagataagaggagtctcgagtcctgatcatatctttcttccgattccaaactgggagcacaaggagaaccctgagactgaagaagatgttgggccagttgttcagcacatctatgagctgagaaacaatggtccaagttcattcagcaaggcaatgctccatcttcagtggccttacaaatataataataacactctgttgtatatccttcattatgatattgatggaccaatgaactgcacttcagatatggagatcaaccctttgagaattaagatctcatctttgcaaacaactgaaaagaatgacacggttgccgggcaaggtgagcgggaccatctcatcactaagcgggatcttgccctcagtgaaggagatattcacactttgggttgtggagttgctcagtgcttgaagattgtctgccaagttgggagattagacagaggaaagagtgcaatcttgtacgtaaagtcattactgtggactgagacttttatgaataaagaaaatcagaatcattcctattctctgaagtcgtctgcttcatttaatgtcatagagtttccttataagaatcttccaattgaggatatcaccaactccacattggttaccactaatgtcacctggggcattcagccagcgcccatgcctgtgcctgtgtgggtgatcattttagcagttctagcaggattgttgctactggctgttttggtatttgtaatgtacaggatgggcttttttaaacgggtccggccacctcaagaagaacaagaaagggagcagcttcaacctcatgaaaatggtgaaggaaactcagaaacttaactgcagtttttaagttatgctacatcttgacccactagaattagcaactttattatagatttaaactttcttcatgaggagtaaaaatccaaggctttactgctgatagtgctaattggcattaaccacaaaatgagaattatatttgtcaaccttctccttataaataagttcagacatacatttaataacatagggtgacttgtgtttttaggtatttaaataataaaatttcaagggatagtttttattcaatgtatataagacaggtagtgcctgatttactactttatataaaatagtacctccttcagttactgtttctgatttaatgtacggaactttatttgttgttgttgttgttgttgttgttgttgttttaaagcagtccaaatttggaccttagcaatcatgtcttttgtataggtacttaatgttaatacatattacactacagtttacttttcagaatactaaagactttataactgcatgaacttggatttttttaatcactcatatggtagaattttataaacacatacatgataccatccaaattcttgcttttaataacaaaggtacaatattttgttttagtatgaaaatctggtagatcctattacacttctgtttatattaaatccacaatattttattacatttttaacttgtataaattttaggtcaaatccttcaagccaacctatactaaaaattagttccataatcacaaatggctcttttgtgtaattgtttaatttcacctgaatatcataatgcttaaagccatatggagttggaaattatttccaaagcatatttattccattgttttagtctggctatttacagtataaaaaaagcatttttattaaaatactgtgtagttctttgagatagttgcttatgcatatagtaagtattacattcttagagtagagcagagtttttagttagtattaatttattttcctccattcatgtacttttccttatatttccaaaactgttactgagaatgggtcaagatcagtgagaaatctttacagttgacaggaacctggaccccttaccccaactttatgagtaatgcttggaataaaaactcttaaggcaactcactgatttacttctagcaatagcatgatgttacaggaatattacctctgtttaagcaaggtaatgtgtaaaatcagtctcggctgtcagaataacttctaaaaggtatttttataagcagttcaagttactgaaaaccttttaaacctttctgaagttcgttagtataaattacttttctaggattattaataaaagccacataggtggcaagttgtagttttatatggctctgtagagtggtgaaccttctagaggaatatatgatttattcacagttcctcaaggcctggggatgatgatcagttatacctatttttgtgcaattacatcatgttgtacattagaaatggagagtttaatagctctttaactgctgtcctcattaggtaatgataaatatttcccttaaataattgactattttgctgtgttttaaaaatgattgaaatttatcttgccatatctcataatttcatgcacaagttgactgagctaatcttgagaatatattcgtaaaataggagcacatttagttgaggtatacaaggtaggactctagacaaaaccttctattttagctttagtgaatttcaaaagtaatgggtcttggagtatagatttttattagtagcttgaaagagcttaatcatatgcagtaagtatttttattaccaataaatttaaaattttttaagaaaaatatttttatcctagggccaagtgttgcctgccaccaatcagtaagttagtctataacaaattttaccctaacagttttaccacctagtaacagtcatttctgaaaatatgttggatagaaagtcactctttggcaaaagtgttagaatttgcttttgtgccatctattccttttatggcatctatcttgaaagtaatcttgtattggagattgaaagatgctgtaatttagaaattaacatgatatcttaaattacctttatgaaatatagttttgtataatagcatagattttccttcaaaaaatgaacatttatatatctacaaaaatatggagaagagtaatttgaaagcctactttctgaagaaaatggtgggatttttttttatcatgattaaatatcaaaaaattgccctatgaaaactttaaatctctaaaacatttgaaatactaccatatttgtgatttattgagaataaaaatccattttgaaatgtaaaatttttatgatctgattcagttttaagaaaacatgaatgaactagaagatattaaaaacatttgacattggtaagaaatattgatactgatattgatttttatataggtatttatttcagaattgatattttgagaaaaatacatgtgagtcattttttctgtttctcttttctcttaacgattatcactgtaattctgaatctgaaaggtaaaacaattagtcaaaatattattgccatcattctacctgtgttatgaaactacttattcatagttaattctcattaacacttacatttccataaagaaaactcaagtattaataaaagagactttactggcttaagagggctgtgaaagatttttgatagtgaatcatgaccctaagggagagatttgtgtgataaaagtattgtatataatagatcagcgatttttgtaaggcaaacagaatttgtaagttggcagatcttcctaagttgcaaaatgtaatgatgagcttggtggagaagaatgagtcgttcttggaatacctatgtgcagccactacccatctcaatgtcaccttgtttgcattcttggatagcttgtatatgtagtagtttgatgaataatttaaagaaaaacacctaaaatttgaaaaatgattgtaggatcaaaaaaggcagatgaaattacttaatactcagtgttttggagagtattccttttagtttgttggttggctggtttgaacgatagaaatatgcagcatgcaatatatgcttatatttcattttaatttctgatatataatgaacttcttgggagaggtactgaatctttgatgttttttgtcattgttctcaagtgcaatataacaatgtaaccaaatctagataatttcaaagttgtcattaatttagtaagcctaatataaacaaatatttgtattatttttgttagcaggaaagagtgattaagtgaggttatttacccctaaatggtccattctgcattgtatttcaggctggaaatgaattattctttaccagttttgaaacactttgaaatatcctaaggtaacttggaagctgtgtagtatatcaaattaatttgctacctaataacatagaaagtaaatatctttgtggtcacccacattgggtgagacagaaaatgaatctgttctaaaatttgtaatttgctaacttgatttgagttagtgaaaactggtacagtgttctgcttgatttacaacatgtaacttgtgactgtacaataaacataagcatatggtactaaaaaacacaaccgacacacaccaaacacacagaggacagacgaacccgcaaaacgacagagcaagaaagaaaacggcgacacgcgcaccaagaagcggacaagaaagagggcgcagcaacatgaataagacgcagaaaaggcacggagaacacggacgcaacgacgcg

SEQ ID NO: 329218 - DNA, 6846 bp, Homo sapiens
gataaaaagctttcctcatttttaaacaacagtcgcacggaagttcccggcgggacaagggaacgtgggtgcccttgctactcccgtggacgcgggtagattgggacgctggaccgtatctccccgcccccgcccccacgcctcctcaggtgctcagcctgaggccttcgtccaggagcgctgccgctgacccaggctcaggagctgggggcccctgcacagacgcccaggtctcgggacaggcggcgactgcactcacggaagtacgctgagctctcccctgtagaagggcgcctctcctcccccacttcctcctccagctccacagcagcctcccgggccggctcctcctccttccaggtctcctcccagtgccgccgcggctctcaggcctgaggtgcggcgctcaccccggcagtccccagcctcagacgctgcgtggagcggcggagccggagggaagcaaaggaccgtctgcgctgctgtccccgccccgcgcgctctgcgcccctcgtccctggcggtcgctccgaagctcagccctcttgcctgccccggagctgtcccgggctagccgagaagagagcggccggcaagtttgggcgcgcgcaggcggcgggccgcgggcactgggcgcctcgctggggcggggggaggtggctaccgctcccggcttggcgtcccgcgcgcacttcggcgatggcttttccgccgcggcgacggctgcgcctcggtccccgcggcctcccgcttcttctctcgggactcctgctacctctgtgccgcgccttcaacctagacgtggacagtcctgccgagtactctggccccgagggaagttacttcggcttcgccgtggatttcttcgtgcccagcgcgtcttcccggatgtttcttctcgtgggagctcccaaagcaaacaccacccagcctgggattgtggaaggagggcaggtcctcaaatgtgactggtcttctacccgccggtgccagccaattgaatttgatgcaacaggcaatagagattatgccaaggatgatccattggaatttaagtcccatcagtggtttggagcatctgtgaggtcgaaacaggataaaattttggcctgtgccccattgtaccattggagaactgagatgaaacaggagcgagagcctgttggaacatgctttcttcaagatggaacaaagactgttgagtatgctccatgtagatcacaagatattgatgctgatggacagggattttgtcaaggaggattcagcattgattttactaaagctgacagagtacttcttggtggtcctggtagcttttattggcaaggtcagcttatttcggatcaagtggcagaaatcgtatctaaatacgaccccaatgtttacagcatcaagtataataaccaattagcaactcggactgcacaagctatttttgatgacagctatttgggttattctgtggctgtcggagatttcaatggtgatggcatagatgactttgtttcaggagttccaagagcagcaaggactttgggaatggtttatatttatgatgggaagaacatgtcctccttatacaattttactggcgagcagatggctgcatatttcggattttctgtagctgccactgacattaatggagatgattatgcagatgtgtttattggagcacctctcttcatggatcgtggctctgatggcaaactccaagaggtggggcaggtctcagtgtctctacagagagcttcaggagacttccagacgacaaagctgaatggatttgaggtctttgcacggtttggcagtgccatagctcctttgggagatctggaccaggatggtttcaatgatattgcaattgctgctccatatgggggtgaagataaaaaaggaattgtttatatcttcaatggaagatcaacaggcttgaacgcagtcccatctcaaatccttgaagggcagtgggctgctcgaagcatgccaccaagctttggctattcaatgaaaggagccacagatatagacaaaaatggatatccagacttaattgtaggagcttttggtgtagatcgagctatcttatacagggccagaccagttatcactgtaaatgctggtcttgaagtgtaccctagcattttaaatcaagacaataaaacctgctcactgcctggaacagctctcaaagtttcctgttttaatgttaggttctgcttaaaggcagatggcaaaggagtacttcccaggaaacttaatttccaggtggaacttcttttggataaactcaagcaaaagggagcaattcgacgagcactgtttctctacagcaggtccccaagtcactccaagaacatgactatttcaagggggggactgatgcagtgtgaggaattgatagcgtatctgcgggatgaatctgaatttagagacaaactcactccaattactatttttatggaatatcggttggattatagaacagctgctgatacaacaggcttgcaacccattcttaaccagttcacgcctgctaacattagtcgacaggctcacattctacttgactgtggtgaagacaatgtctgtaaacccaagctggaagtttctgtagatagtgatcaaaagaagatctatattggggatgacaaccctctgacattgattgttaaggctcagaatcaaggagaaggtgcctacgaagctgagctcatcgtttccattccactgcaggctgatttcatcggggttgtccgaaacaatgaagccttagcaagactttcctgtgcatttaagacagaaaaccaaactcgccaggtggtatgtgaccttggaaacccaatgaaggctggaactcaactcttagctggtcttcgtttcagtgtgcaccagcagtcagagatggatacttctgtgaaatttgacttacaaatccaaagctcaaatctatttgacaaagtaagcccagttgtatctcacaaagttgatcttgctgttttagctgcagttgagataagaggagtctcgagtcctgatcatatctttcttccgattccaaactgggagcacaaggagaaccctgagactgaagaagatgttgggccagttgttcagcacatctatgagctgagaaacaatggtccaagttcattcagcaaggcaatgctccatcttcagtggccttacaaatataataataacactctgttgtatatccttcattatgatattgatggaccaatgaactgcacttcagatatggagatcaaccctttgagaattaagatctcatctttgcaaacaactgaaaagaatgacacggttgccgggcaaggtgagcgggaccatctcatcactaagcgggatcttgccctcagtgaaggagatattcacactttgggttgtggagttgctcagtgcttgaagattgtctgccaagttgggagattagacagaggaaagagtgcaatcttgtacgtaaagtcattactgtggactgagacttttatgaataaagaaaatcagaatcattcctattctctgaagtcgtctgcttcatttaatgtcatagagtttccttataagaatcttccaattgaggatatcaccaactccacattggttaccactaatgtcacctggggcattcagccagcgcccatgcctgtgcctgtgtgggtgatcattttagcagttctagcaggattgttgctactggctgttttggtatttgtaatgtacaggatgggcttttttaaacgggtccggccacctcaagaagaacaagaaagggagcagcttcaacctcatgaaaatggtgaaggaaactcagaaacttaactgcagtttttaagttatgctacatcttgacccactagaattagcaactttattatagatttaaactttcttcatgaggagtaaaaatccaaggctttactgctgatagtgctaattggcattaaccacaaaatgagaattatatttgtcaaccttctccttataaataagttcagacatacatttaataacatagggtgacttgtgtttttaggtatttaaataataaaatttcaagggatagtttttattcaatgtatataagacaggtagtgcctgatttactactttatataaaatagtacctccttcagttactgtttctgatttaatgtacggaactttatttgttgttgttgttgttgttgttgttgttgttttaaagcagtccaaatttggaccttagcaatcatgtcttttgtataggtacttaatgttaatacatattacactacagtttacttttcagaatactaaagactttataactgcatgaacttggatttttttaatcactcatatggtagaattttataaacacatacatgataccatccaaattcttgcttttaataacaaaggtacaatattttgttttagtatgaaaatctggtagatcctattacacttctgtttatattaaatccacaatattttattacatttttaacttgtataaattttaggtcaaatccttcaagccaacctatactaaaaattagttccataatcacaaatggctcttttgtgtaattgtttaatttcacctgaatatcataatgcttaaagccatatggagttggaaattatttccaaagcatatttattccattgttttagtctggctatttacagtataaaaaaagcatttttattaaaatactgtgtagttctttgagatagttgcttatgcatatagtaagtattacattcttagagtagagcagagtttttagttagtattaatttattttcctccattcatgtacttttccttatatttccaaaactgttactgagaatgggtcaagatcagtgagaaatctttacagttgacaggaacctggaccccttaccccaactttatgagtaatgcttggaataaaaactcttaaggcaactcactgatttacttctagcaatagcatgatgttacaggaatattacctctgtttaagcaaggtaatgtgtaaaatcagtctcggctgtcagaataacttctaaaaggtatttttataagcagttcaagttactgaaaaccttttaaacctttctgaagttcgttagtataaattacttttctaggattattaataaaagccacataggtggcaagttgtagttttatatggctctgtagagtggtgaaccttctagaggaatatatgatttattcacagttcctcaaggcctggggatgatgatcagttatacctatttttgtgcaattacatcatgttgtacattagaaatggagagtttaatagctctttaactgctgtcctcattaggtaatgataaatatttcccttaaataattgactattttgctgtgttttaaaaatgattgaaatttatcttgccatatctcataatttcatgcacaagttgactgagctaatcttgagaatatattcgtaaaataggagcacatttagttgaggtatacaaggtaggactctagacaaaaccttctattttagctttagtgaatttcaaaagtaatgggtcttggagtatagatttttattagtagcttgaaagagcttaatcatatgcagtaagtatttttattaccaataaatttaaaattttttaagaaaaatatttttatcctagggccaagtgttgcctgccaccaatcagtaagttagtctataacaaattttaccctaacagttttaccacctagtaacagtcatttctgaaaatatgttggatagaaagtcactctttggcaaaagtgttagaatttgcttttgtgccatctattccttttatggcatctatcttgaaagtaatcttgtattggagattgaaagatgctgtaatttagaaattaacatgatatcttaaattacctttatgaaatatagttttgtataatagcatagattttccttcaaaaaatgaacatttatatatctacaaaaatatggagaagagtaatttgaaagcctactttctgaagaaaatggtgggatttttttttatcatgattaaatatcaaaaaattgccctatgaaaactttaaatctctaaaacatttgaaatactaccatatttgtgatttattgagaataaaaatccattttgaaatgtaaaatttttatgatctgattcagttttaagaaaacatgaatgaactagaagatattaaaaacatttgacattggtaagaaatattgatactgatattgatttttatataggtatttatttcagaattgatattttgagaaaaatacatgtgagtcattttttctgtttctcttttctcttaacgattatcactgtaattctgaatctgaaaggtaaaacaattagtcaaaatattattgccatcattctacctgtgttatgaaactacttattcatagttaattctcattaacacttacatttccataaagaaaactcaagtattaataaaagagactttactggcttaagagggctgtgaaagatttttgatagtgaatcatgaccctaagggagagatttgtgtgataaaagtattgtatataatagatcagcgatttttgtaaggcaaacagaatttgtaagttggcagatcttcctaagttgcaaaatgtaatgatgagcttggtggagaagaatgagtcgttcttggaatacctatgtgcagccactacccatctcaatgtcaccttgtttgcattcttggatagcttgtatatgtagtagtttctgactgagcatggtcatcgcttgtttatgtaaacgacggtcggttcatgtagtacacgtgttaactgt

SEQ ID NO: 329219 - DNA, 5141 bp, Homo sapiens
gggaggcagaacccaggaagtactgtttttatatgtcatttgtgtgatccccaagaagccttcttttttgtacctggtggttcaattgttttatttaaaatctaccaattttctgcctgcaggaattaggatatttggtgttgggagtgttatgagaggtgtgtggagaaattctggttgtggccctactcatgccttctttagccatgttcccttactctagtaaaccatccatttcttctttcctggcctatgaacacagcacatactttggtggttagcttcgtgttatcaaattattgtacccagttgctagactttcactggatcaacaaacatttacttttgcactttttagaaagatggttagtattataaggaggtataattatgattaataattgttgttaaataggctctcttatggattggtccaggtatattaagtaaaataggtttgatagaaaataagatttagttatctttgttcagttttattgtaagctcataattagacattgactagcattactatcttttcctctctcctttagctcttagctggtcttcgtttcagtgtgcaccagcagtcagagatggatacttctgtgaaatttgacttacaaatccaaagctcaaatctatttgacaaagtaagcccagttgtatctcacaaagttgatcttgctgttttagctgcagttgagataagaggagtctcgagtcctgatcatatctttcttccgattccaaactgggagcacaaggagaaccctgagactgaagaagatgttgggccagttgttcagcacatctatgagctgagaaacaatggtccaagttcattcagcaaggcaatgctccatcttcagtggccttacaaatataataataacactctgttgtatatccttcattatgatattgatggaccaatgaactgcacttcagatatggagatcaaccctttgagaattaagatctcatctttgcaaacaactgaaaagaatgacacggttgccgggcaaggtgagcgggaccatctcatcactaagcgggatcttgccctcagtgaaggagatattcacactttgggttgtggagttgctcagtgcttgaagattgtctgccaagttgggagattagacagaggaaagagtgcaatcttgtacgtaaagtcattactgtggactgagacttttatgaataaagaaaatcagaatcattcctattctctgaagtcgtctgcttcatttaatgtcatagagtttccttataagaatcttccaattgaggatatcaccaactccacattggttaccactaatgtcacctggggcattcagccagcgcccatgcctgtgcctgtgtgggtgatcattttagcagttctagcaggattgttgctactggctgttttggtatttgtaatgtacaggatgggcttttttaaacgggtccggccacctcaagaagaacaagaaagggagcagcttcaacctcatgaaaatggtgaaggaaactcagaaacttaactgcagtttttaagttatgctacatcttgacccactagaattagcaactttattatagatttaaactttcttcatgaggagtaaaaatccaaggctttactgctgatagtgctaattggcattaaccacaaaatgagaattatatttgtcaaccttctccttataaataagttcagacatacatttaataacatagggtgacttgtgtttttaggtatttaaataataaaatttcaagggatagtttttattcaatgtatataagacaggtagtgcctgatttactactttatataaaatagtacctccttcagttactgtttctgatttaatgtacggaactttatttgttgttgttgttgttgttgttgttgttgttttaaagcagtccaaatttggaccttagcaatcatgtcttttgtataggtacttaatgttaatacatattacactacagtttacttttcagaatactaaagactttataactgcatgaacttggatttttttaatcactcatatggtagaattttataaacacatacatgataccatccaaattcttgcttttaataacaaaggtacaatattttgttttagtatgaaaatctggtagatcctattacacttctgtttatattaaatccacaatattttattacatttttaacttgtataaattttaggtcaaatccttcaagccaacctatactaaaaattagttccataatcacaaatggctcttttgtgtaattgtttaatttcacctgaatatcataatgcttaaagccatatggagttggaaattatttccaaagcatatttattccattgttttagtctggctatttacagtataaaaaaagcatttttattaaaatactgtgtagttctttgagatagttgcttatgcatatagtaagtattacattcttagagtagagcagagtttttagttagtattaatttattttcctccattcatgtacttttccttatatttccaaaactgttactgagaatgggtcaagatcagtgagaaatctttacagttgacaggaacctggaccccttaccccaactttatgagtaatgcttggaataaaaactcttaaggcaactcactgatttacttctagcaatagcatgatgttacaggaatattacctctgtttaagcaaggtaatgtgtaaaatcagtctcggctgtcagaataacttctaaaaggtatttttataagcagttcaagttactgaaaaccttttaaacctttctgaagttcgttagtataaattacttttctaggattattaataaaagccacataggtggcaagttgtagttttatatggctctgtagagtggtgaaccttctagaggaatatatgatttattcacagttcctcaaggcctggggatgatgatcagttatacctatttttgtgcaattacatcatgttgtacattagaaatggagagtttaatagctctttaactgctgtcctcattaggtaatgataaatatttcccttaaataattgactattttgctgtgttttaaaaatgattgaaatttatcttgccatatctcataatttcatgcacaagttgactgagctaatcttgagaatatattcgtaaaataggagcacatttagttgaggtatacaaggtaggactctagacaaaaccttctattttagctttagtgaatttcaaaagtaatgggtcttggagtatagatttttattagtagcttgaaagagcttaatcatatgcagtaagtatttttattaccaataaatttaaaattttttaagaaaaatatttttatcctagggccaagtgttgcctgccaccaatcagtaagttagtctataacaaattttaccctaacagttttaccacctagtaacagtcatttctgaaaatatgttggatagaaagtcactctttggcaaaagtgttagaatttgcttttgtgccatctattccttttatggcatctatcttgaaagtaatcttgtattggagattgaaagatgctgtaatttagaaattaacatgatatcttaaattacctttatgaaatatagttttgtataatagcatagattttccttcaaaaaatgaacatttatatatctacaaaaatatggagaagagtaatttgaaagcctactttctgaagaaaatggtgggatttttttttatcatgattaaatatcaaaaaattgccctatgaaaactttaaatctctaaaacatttgaaatactaccatatttgtgatttattgagaataaaaatccattttgaaatgtaaaatttttatgatctgattcagttttaagaaaacatgaatgaactagaagatattaaaaacatttgacattggtaagaaatattgatactgatattgatttttatataggtatttatttcagaattgatattttgagaaaaatacatgtgagtcattttttctgtttctcttttctcttaacgattatcactgtaattctgaatctgaaaggtaaaacaattagtcaaaatattattgccatcattctacctgtgttatgaaactacttattcatagttaattctcattaacacttacatttccataaagaaaactcaagtattaataaaagagactttactggcttaagagggctgtgaaagatttttgatagtgaatcatgaccctaagggagagatttgtgtgataaaagtattgtatataatagatcagcgatttttgtaaggcaaacagaatttgtaagttggcagatcttcctaagttgcaaaatgtaatgatgagcttggtggagaagaatgagtcgttcttggaatacctatgtgcagccactacccatctcaatgtcaccttgtttgcattcttggatagcttgtatatgtagtagtttgatgaataatttaaagaaaaacacctaaaatttgaaaaatgattgtaggatcaaaaaaggcagatgaaattacttaatactcagtgttttggagagtattccttttagtttgttggttggctggtttgaacgatagaaatatgcagcatgcaatatatgcttatatttcattttaatttctgatatataatgaacttcttgggagaggtactgaatctttgatgttttttgtcattgttctcaagtgcaatataacaatgtaaccaaatctagataatttcaaagttgtcattaatttagtaagcctaatataaacaaatatttgtattatttttgttagcaggaaagagtgattaagtgaggttatttacccctaaatggtccattctgcattgtatttcaggctggaaatgaattattctttaccagttttgaaacactttgaaatatcctaaggtaacttggaagctgtgtagtatatcaaattaatttgctacctaataacatagaaagtaaatatctttgtggtcacccacattgggtgagacagaaaatgaatctgttctaaaatttgtaatttgctaacttgatttgagttagtgaaaactggtacagtgttctgcttgatttacaacatgtaacttgtgactgtacaataaacataagcatatggta

SEQ ID NO: 329220 - DNA, 1228 bp, Homo sapiens
cggccgctccaacatcagaatcaatatttcttaccaatgtcaaatgtttttaatgtatttatttcagaattgatattttgagaaaaatacatgtgagtcattttttctgtttctcttttctcttaacgattatcactgtaattctgaatctgaaaggtaaaacaattagtcaaaatattattgccatcattctacctgtgttatgaaactacttattcatagttaattctcattaacacttacatttccataaagaaaactcaagtattaataaaagagactttactggcttaagagggctgtgaaagatttttgatagtgaatcatgaccctaagggagagatttgtgtgataaaagtattgtatataatagatcagcgatttttgtaaggcaaacagaatttgtaagttggcagatcttcctaagttgcaaaatgtaatgatgagcttggtggagaagaatgagtcgttcttggaatacctatgtgcagccactacccatctcaatgtcaccttgtttgcattcttggatagcttgtatatgtagtagtttgatgaataatttaaagaaaaacacctaaaatttgaaaaatgattgtaggatcaaaaaaggcagatgaaattacttaatactcagtgttttggagagtattccttttagtttgttggttggctggtttgaacgatagaaatatgcagcatgcaatatatgcttatatttcattttaatttctgatatataatgaacttcttgggagaggtactgaatctttgatgttttttgtcattgttctcaagtgcaatataacaatgtaaccaaatctagataatttcaaagttgtcattaatttagtaagcctaatataaacaaatatttgtattatttttgttagcaggaaagagtgattaagtgaggttatttacccctaaatggtccattctgcattgtatttcaggctggaaatgaattattctttaccagttttgaaacactttgaaatatcctaaggtaacttggaagctgtgtagtatatcaaattaatttgctacctaataacatagaaagtaaatatctttgtggtcacccacattgggtgagacagaaaatgaatctgttctaaaatttgtaatttgctaacttgatttgagttagtgaaaactggtacagtgttctgcttgatttacaacatgtaacttgtgactgtacaataaacataagcatatggta

SEQ ID NO: 329221 - DNA, 4518 bp, Homo sapiens
gataaaaagctttcctcatttttaaacaacagtcgcacggaagttcccggcgggacaagggaacgtgggtgcccttgctactcccgtggacgcgggtagattgggacgctggaccgtatctccccgcccccgcccccacgcctcctcaggtgctcagcctgaggccttcgtccaggagcgctgccgctgacccaggctcaggagctgggggcccctgcacagacgcccaggtctcgggacaggcggcgactgcactcacggaagtacgctgagctctcccctgtagaagggcgcctctcctcccccacttcctcctccagctccacagcagcctcccgggccggctcctcctccttccaggtctcctcccagtgccgccgcggctctcaggcctgaggtgcggcgctcaccccggcagtccccagcctcagacgctgcgtggagcggcggagccggagggaagcaaaggaccgtctgcgctgctgtccccgccccgcgcgctctgcgcccctcgtccctggcggtcgctccgaagctcagccctcttgcctgccccggagctgtcccgggctagccgagaagagagcggccggcaagtttgggcgcgcgcaggcggcgggccgcgggcactgggcgcctcgctggggcggggggaggtggctaccgctcccggcttggcgtcccgcgcgcacttcggcgatggcttttccgccgcggcgacggctgcgcctcggtccccgcggcctcccgcttcttctctcgggactcctgctacctctgtgccgcgccttcaacctagacgtggacagtcctgccgagtactctggccccgagggaagttacttcggcttcgccgtggatttcttcgtgcccagcgcgtcttcccggatgtttcttctcgtgggagctcccaaagcaaacaccacccagcctgggattgtggaaggagggcaggtcctcaaatgtgactggtcttctacccgccggtgccagccaattgaatttgatgcaacaggcaatagagattatgccaaggatgatccattggaatttaagtcccatcagtggtttggagcatctgtgaggtcgaaacaggataaaattttggcctgtgccccattgtaccattggagaactgagatgaaacaggagcgagagcctgttggaacatgctttcttcaagatggaacaaagactgttgagtatgctccatgtagatcacaagatattgatgctgatggacagggattttgtcaaggaggattcagcattgattttactaaagctgacagagtacttcttggtggtcctggtagcttttattggcaaggtcagcttatttcggatcaagtggcagaaatcgtatctaaatacgaccccaatgtttacagcatcaagtataataaccaattagcaactcggactgcacaagctatttttgatgacagctatttgggttattctgtggctgtcggagatttcaatggtgatggcatagatgactttgtttcaggagttccaagagcagcaaggactttgggaatggtttatatttatgatgggaagaacatgtcctccttatacaattttactggcgagcagatggctgcatatttcggattttctgtagctgccactgacattaatggagatgattatgcagatgtgtttattggagcacctctcttcatggatcgtggctctgatggcaaactccaagaggtggggcaggtctcagtgtctctacagagagcttcaggagacttccagacgacaaagctgaatggatttgaggtctttgcacggtttggcagtgccatagctcctttgggagatctggaccaggatggtttcaatgatattgcaattgctgctccatatgggggtgaagataaaaaaggaattgtttatatcttcaatggaagatcaacaggcttgaacgcagtcccatctcaaatccttgaagggcagtgggctgctcgaagcatgccaccaagctttggctattcaatgaaaggagccacagatatagacaaaaatggatatccagacttaattgtaggagcttttggtgtagatcgagctatcttatacagggccagaccagttatcactgtaaatgctggtcttgaagtgtaccctagcattttaaatcaagacaataaaacctgctcactgcctggaacagctctcaaagtttcctgttttaatgttaggttctgcttaaaggcagatggcaaaggagtacttcccaggaaacttaatttccaggtggaacttcttttggataaactcaagcaaaagggagcaattcgacgagcactgtttctctacagcaggtccccaagtcactccaagaacatgactatttcaagggggggactgatgcagtgtgaggaattgatagcgtatctgcgggatgaatctgaatttagagacaaactcactccaattactatttttatggaatatcggttggattatagaacagctgctgatacaacaggcttgcaacccattcttaaccagttcacgcctgctaacattagtcgacaggctcacattctacttgactgtggtgaagacaatgtctgtaaacccaagctggaagtttctgtagatagtgatcaaaagaagatctatattggggatgacaaccctctgacattgattgttaaggctcagaatcaaggagaaggtgcctacgaagctgagctcatcgtttccattccactgcaggctgatttcatcggggttgtccgaaacaatgaagccttagcaagactttcctgtgcatttaagacagaaaaccaaactcgccaggtggtatgtgaccttggaaacccaatgaaggctggaactcaactcttagctggtcttcgtttcagtgtgcaccagcagtcagagatggatacttctgtgaaatttgacttacaaatccaaagctcaaatctatttgacaaagtaagcccagttgtatctcacaaagttgatcttgctgttttagctgcagttgagataagaggagtctcgagtcctgatcatatctttcttccgattccaaactgggagcacaaggagaaccctgagactgaagaagatgttgggccagttgttcagcacatctatgagctgagaaacaatggtccaagttcattcagcaaggcaatgctccatcttcagtggccttacaaatataataataacactctgttgtatatccttcattatgatattgatggaccaatgaactgcacttcagatatggagatcaaccctttgagaattaagatctcatctttgcaaacaactgaaaagaatgacacggttgccgggcaaggtgagcgggaccatctcatcactaagcgggatcttgccctcagtgaaggagatattcacactttgggttgtggagttgctcagtgcttgaagattgtctgccaagttgggagattagacagaggaaagagtgcaatcttgtacgtaaagtcattactgtggactgagacttttatgaataaagaaaatcagaatcattcctattctctgaagtcgtctgcttcatttaatgtcatagagtttccttataagaatcttccaattgaggatatcaccaactccacattggttaccactaatgtcacctggggcattcagccagcgcccatgcctgtgcctgtgtgggtgatcattttagcagttctagcaggattgttgctactggctgttttggtatttgtaatgtacaggatgggcttttttaaacgggtccggccacctcaagaagaacaagaaagggagcagcttcaacctcatgaaaatggtgaaggaaactcagaaacttaactgcagtttttaagttatgctacatcttgacccactagaattagcaactttattatagatttaaactttcttcatgaggagtaaaaatccaaggctttactgctgatagtgctaattggcattaaccacaaaatgagaattatatttgtcaaccttctccttataaataagttcagacatacatttaataacatagggtgacttgtgtttttaggtatttaaataataaaatttcaagggatagtttttattcaatgtatataagacaggtagtgcctgatttactactttatataaaatagtacctccttcaaaaaaaaaaaaaaaaaaaaaaaaaaaaaaaaaaaaaaaaaaaaaaaaaaaaaaaaaaaaaaaaaaaaaaaaaaaaaaaaagagggggggagccagacgcgcaagaaagaaagattgagcaacaaccactggggggaccggcgcggacacaaggaaagaagagaacagccggacagagaagggacaaaagagaacaccagggagcgacaacagagagggaggggcgaccgcaaagaaaaaaacaggccggaggaggacaagagacgtttcgacaaacaagagagagggagcaaggaggaccaagagagaagacacaagggaggaagaagagacgaagaaaaaaaaccgccgaaggggggg

SEQ ID NO: 329222 - DNA, 1956 bp, Homo sapiens
gataaaaagctttcctcatttttaaacaacagtcgcacggaagttcccggcgggacaagggaacgtgggtgcccttgctactcccgtggacgcgggtagattgggacgctggaccgtatctccccgcccccgcccccacgcctcctcaggtgctcagcctgaggccttcgtccaggagcgctgccgctgacccaggctcaggagctgggggcccctgcacagacgcccaggtctcgggacaggcggcgactgcactcacggaagtacgctgagctctcccctgtagaagggcgcctctcctcccccacttcctcctccagctccacagcagcctcccgggccggctcctcctccttccaggtctcctcccagtgccgccgcggctctcaggcctgaggtgcggcgctcaccccggcagtccccagcctcagacgctgcgtggagcggcggagccggagggaagcaaaggaccgtctgcgctgctgtccccgccccgcgcgctctgcgcccctcgtccctggcggtcgctccgaagctcagccctcttgcctgccccggagctgtcccgggctagccgagaagagagcggccggcaagtttgggcgcgcgcaggcggcgggccgcgggcactgggcgcctcgctggggcggggggaggtggctaccgctcccggcttggcgtcccgcgcgcacttcggcgatggcttttccgccgcggcgacggctgcgcctcggtccccgcggcctcccgcttcttctctcgggactcctgctacctctgtgccgcgccttcaacctagacgtggacagtcctgccgagtactctggccccgagggaagttacttcggcttcgccgtggatttcttcgtgcccagcgcgtcttcccggatgtttcttctcgtgggagctcccaaagcaaacaccacccagcctgggattgtggaaggagggcaggtcctcaaatgtgactggtcttctacccgccggtgccagccaattgaatttgatgcaacaggcaatagagattatgccaaggatgatccattggaatttaagtcccatcagtggtttggagcatctgtgaggtcgaaacaggataaaattttggcctgtgccccattgtaccattggagaactgagatgaaacaggagcgagagcctgttggaacatgctttcttcaagatggaacaaagactgttgagtatgctccatgtagatcacgtatgtataggatattgtaccagcttttaagaagaggggtgggaagcctagtttgtgaaaaatatgtgtgtgtgtgtgtgtgtgtgtgtgtgtgtgagagagagagagatattaaaagatatagacatattatgatgataacaaaatgaaaacaatcctactaatgtaaagatattacaaatgtgaagtaaacaggtttactttttctaagaactcattttcatcttccttcgtgagtataataatagttactacctgattttaagaatctgtatttttgatgactaacagtcaaaagatgcttagttgaacttctcttaacagagaagatgtagaccccacaactaaagattctgattcagtaggtctaggtcaggcctgggtacctgcacttttaacagactctacaaggcaattctgatagataccaaagtttgagaactcctgctttatattaataatgatgttgaaaataaagaatattatgtcttaaagagccaaagtttatataggaagatgaacattgaactcaggagtcttgactctgaattttcctgctcttaatcagaatttctttgttaacctgctaccaagcccacccctttttggtgatccagaggattttatgctctttgctaatattacttgaaatttcaaaaggaattaatatcatggctaaagatgacttcaagcaattataattttgattatgcttttccaaaatctctacatcc

SEQ ID NO: 329223 - DNA, 1855 bp, Homo sapiens
gataaaaagctttcctcatttttaaacaacagtcgcacggaagttcccggcgggacaagggaacgtgggtgcccttgctactcccgtggacgcgggtagattgggacgctggaccgtatctccccgcccccgcccccacgcctcctcaggtgctcagcctgaggccttcgtccaggagcgctgccgctgacccaggctcaggagctgggggcccctgcacagacgcccaggtctcgggacaggcggcgactgcactcacggaagtacgctgagctctcccctgtagaagggcgcctctcctcccccacttcctcctccagctccacagcagcctcccgggccggctcctcctccttccaggtctcctcccagtgccgccgcggctctcaggcctgaggtgcggcgctcaccccggcagtccccagcctcagacgctgcgtggagcggcggagccggagggaagcaaaggaccgtctgcgctgctgtccccgccccgcgcgctctgcgcccctcgtccctggcggtcgctccgaagctcagccctcttgcctgccccggagctgtcccgggctagccgagaagagagcggccggcaagtttgggcgcgcgcaggcggcgggccgcgggcactgggcgcctcgctggggcggggggaggtggctaccgctcccggcttggcgtcccgcgcgcacttcggcgatggcttttccgccgcggcgacggctgcgcctcggtccccgcggcctcccgcttcttctctcgggactcctgctacctctgtgccgcgccttcaacctagacgtggacagtcctgccgagtactctggccccgagggaagttacttcggcttcgccgtggatttcttcgtgcccagcgcgtcttcccggatgtttcttctcgtgggagctcccaaagcaaacaccacccagcctgggattgtggaaggagggcaggtcctcaaatgtgactggtcttctacccgccggtgccagccaattgaatttgatgcaacaggcaatagagattatgccaaggatgatccattggaatttaagtcccatcagtggtttggagcatctgtgaggtcgaaacaggataaaattttggcctgtgccccattgtaccattggagaactgagatgaaacaggagcgagagcctgttggaacatgctttcttcaagatggaacaaagactgttgagtatgctccatgtagatcacaagatattgatgctgatggacagggattttgtcaaggaggattcagcattgattttactaaagctgacagagtacttcttggtggtcctggtagcttttattggcaaggtcagcttatttcggatcaagtggcagaaatcgtatctaaatacgaccccaatgtttacagcatcaagtataataaccaattagcaactcggactgcacaagctatttttgatgacagctatttgggttattctgtggctgtcggagatttcaatggtgatggcatagatgactttgtttcaggagttccaagagcagcaaggactttgggaatgagctattgataatggccagagatatccacagcttggaggagcccagagaccgtttgctttatacccacacagcaactggtccactgctttactgtctgttggataatggctgtaaaatgtttaaaaacaaaacaaaacaaaaaagaggcactagtctatctgcaattactcaacgaggcattttcataggaaacagactatgattaatccatttattcttcccacacacttaccttactaagtctttgctttaataaatgagcaaccctgggtatagtcttaaaattctgcacaataaattttgagaaag

SEQ ID NO: 329224 - DNA, 691 bp, Homo sapiens
actggattggattatttaaaaatcatttcaagctgggtgtggttgcctcacacctgtaatcccagcattttgggaggctgagacaggtggatcatttgaggccaggatttcaagaccagcctggccaacatggtgaaaccccttctctacgaaaaatacagaaaaattagctgggtatagtggcgcaggcctgtaattccaactactggggaggctgaagcatggaggttgcagtgagccgagttcatgcccctgcattccagcttggcctacatactgggcgagactctgtcaaaaaaaaggaaaacaaatcatgtcagatgcaatcagaagtcagcctatcattgggagtttcatgtgtgtatgtgcatgctcttgatatcaaatgtgaaaccactataattatcatatgcaggaaaagaatatactgtgaattccattaaaataaaatataatatttactcagatatttgttgattaagtcaatggactgtttttaaaactaaaagcttttttcctcgataggttaccactaatgtcacctggggcattcagccagcgcccatgcctgtgcctgtgtgggtgatcattttagcagttctagcaggattgttgctactggctgttttggtatttgtaatgtacagggtaagtaacggacttagaaagaaggagagagggaaagcagaag

SEQ ID NO: 329225 - DNA, 7403 bp, Homo sapiens
gataaaaagctttcctcatttttaaacaacagtcgcacggaagttcccggcgggacaagggaacgtgggtgcccttgctactcccgtggacgcgggtagattgggacgctggaccgtatctccccgcccccgcccccacgcctcctcaggtgctcagcctgaggccttcgtccaggagcgctgccgctgacccaggctcaggagctgggggcccctgcacagacgcccaggtctcgggacaggcggcgactgcactcacggaagtacgctgagctctcccctgtagaagggcgcctctcctcccccacttcctcctccagctccacagcagcctcccgggccggctcctcctccttccaggtctcctcccagtgccgccgcggctctcaggcctgaggtgcggcgctcaccccggcagtccccagcctcagacgctgcgtggagcggcggagccggagggaagcaaaggaccgtctgcgctgctgtccccgccccgcgcgctctgcgcccctcgtccctggcggtcgctccgaagctcagccctcttgcctgccccggagctgtcccgggctagccgagaagagagcggccggcaagtttgggcgcgcgcaggcggcgggccgcgggcactgggcgcctcgctggggcggggggaggtggctaccgctcccggcttggcgtcccgcgcgcacttcggcgatggcttttccgccgcggcgacggctgcgcctcggtccccgcggcctcccgcttcttctctcgggactcctgctacctctgtgccgcgccttcaacctagacgtggacagtcctgccgagtactctggccccgagggaagttacttcggcttcgccgtggatttcttcgtgcccagcgcgtcttcccggatgtttcttctcgtgggagctcccaaagcaaacaccacccagcctgggattgtggaaggagggcaggtcctcaaatgtgactggtcttctacccgccggtgccagccaattgaatttgatgcaacaggcaatagagattatgccaaggatgatccattggaatttaagtcccatcagtggtttggagcatctgtgaggtcgaaacaggataaaattttggcctgtgccccattgtaccattggagaactgagatgaaacaggagcgagagcctgttggaacatgctttcttcaagatggaacaaagactgttgagtatgctccatgtagatcacaagatattgatgctgatggacagggattttgtcaaggaggattcagcattgattttactaaagctgacagagtacttcttggtggtcctggtagcttttattggcaaggtcagcttatttcggatcaagtggcagaaatcgtatctaaatacgaccccaatgtttacagcatcaagtataataaccaattagcaactcggactgcacaagctatttttgatgacagctatttgggttattctgtggctgtcggagatttcaatggtgatggcatagatgactttgtttcaggagttccaagagcagcaaggactttgggaatggtttatatttatgatgggaagaacatgtcctccttatacaattttactggcgagcagatggctgcatatttcggattttctgtagctgccactgacattaatggagatgattatgcagatgtgtttattggagcacctctcttcatggatcgtggctctgatggcaaactccaagaggtggggcaggtctcagtgtctctacagagagcttcaggagacttccagacgacaaagctgaatggatttgaggtctttgcacggtttggcagtgccatagctcctttgggagatctggaccaggatggtttcaatgatattgcaattgctgctccatatgggggtgaagataaaaaaggaattgtttatatcttcaatggaagatcaacaggcttgaacgcagtcccatctcaaatccttgaagggcagtgggctgctcgaagcatgccaccaagctttggctattcaatgaaaggagccacagatatagacaaaaatggatatccagacttaattgtaggagcttttggtgtagatcgagctatcttatacagggccagaccagttatcactgtaaatgctggtcttgaagtgtaccctagcattttaaatcaagacaataaaacctgctcactgcctggaacagctctcaaagtttcctgttttaatgttaggttctgcttaaaggcagatggcaaaggagtacttcccaggaaacttaatttccaggtggaacttcttttggataaactcaagcaaaagggagcaattcgacgagcactgtttctctacagcaggtccccaagtcactccaagaacatgactatttcaagggggggactgatgcagtgtgaggaattgatagcgtatctgcgggatgaatctgaatttagagacaaactcactccaattactatttttatggaatatcggttggattatagaacagctgctgatacaacaggcttgcaacccattcttaaccagttcacgcctgctaacattagtcgacaggctcacattctacttgactgtggtgaagacaatgtctgtaaacccaagctggaagtttctgtagatagtgatcaaaagaagatctatattggggatgacaaccctctgacattgattgttaaggctcagaatcaaggagaaggtgcctacgaagctgagctcatcgtttccattccactgcaggctgatttcatcggggttgtccgaaacaatgaagccttagcaagactttcctgtgcatttaagacagaaaaccaaactcgccaggtggtatgtgaccttggaaacccaatgaaggctggaactcaactcttagctggtcttcgtttcagtgtgcaccagcagtcagagatggatacttctgtgaaatttgacttacaaatccaaagctcaaatctatttgacaaagtaagcccagttgtatctcacaaagttgatcttgctgttttagctgcagttgagataagaggagtctcgagtcctgatcatatctttcttccgattccaaactgggagcacaaggagaaccctgagactgaagaagatgttgggccagttgttcagcacatctatgagctgagaaacaatggtccaagttcattcagcaaggcaatgctccatcttcagtggccttacaaatataataataacactctgttgtatatccttcattatgatattgatggaccaatgaactgcacttcagatatggagatcaaccctttgagaattaagatctcatctttgcaaacaactgaaaagaatgacacggttgccgggcaaggtgagcgggaccatctcatcactaagcgggatcttgccctcagtgaaggagatattcacactttgggttgtggagttgctcagtgcttgaagattgtctgccaagttgggagattagacagaggaaagagtgcaatcttgtacgtaaagtcattactgtggactgagacttttatgaataaagaaaatcagaatcattcctattctctgaagtcgtctgcttcatttaatgtcatagagtttccttataagaatcttccaattgaggatatcaccaactccacattggttaccactaatgtcacctggggcattcagccagcgcccatgcctgtgcctgtgtgggtgatcattttagcagttctagcaggattgttgctactggctgttttggtatttgtaatgtacaggatgggcttttttaaacgggtccggccacctcaagaagaacaagaaagggagcagcttcaacctcatgaaaatggtgaaggaaactcagaaacttaactgcagtttttaagttatgctacatcttgacccactagaattagcaactttattatagatttaaactttcttcatgaggagtaaaaatccaaggctttactgctgatagtgctaattggcattaaccacaaaatgagaattatatttgtcaaccttctccttataaataagttcagacatacatttaataacatagggtgacttgtgtttttaggtatttaaataataaaatttcaagggatagtttttattcaatgtatataagacaggtagtgcctgatttactactttatataaaatagtacctccttcagttactgtttctgatttaatgtacggaactttatttgttgttgttgttgttgttgttgttgttgttttaaagcagtccaaatttggaccttagcaatcatgtcttttgtataggtacttaatgttaatacatattacactacagtttacttttcagaatactaaagactttataactgcatgaacttggatttttttaatcactcatatggtagaattttataaacacatacatgataccatccaaattcttgcttttaataacaaaggtacaatattttgttttagtatgaaaatctggtagatcctattacacttctgtttatattaaatccacaatattttattacatttttaacttgtataaattttaggtcaaatccttcaagccaacctatactaaaaattagttccataatcacaaatggctcttttgtgtaattgtttaatttcacctgaatatcataatgcttaaagccatatggagttggaaattatttccaaagcatatttattccattgttttagtctggctatttacagtataaaaaaagcatttttattaaaatactgtgtagttctttgagatagttgcttatgcatatagtaagtattacattcttagagtagagcagagtttttagttagtattaatttattttcctccattcatgtacttttccttatatttccaaaactgttactgagaatgggtcaagatcagtgagaaatctttacagttgacaggaacctggaccccttaccccaactttatgagtaatgcttggaataaaaactcttaaggcaactcactgatttacttctagcaatagcatgatgttacaggaatattacctctgtttaagcaaggtaatgtgtaaaatcagtctcggctgtcagaataacttctaaaaggtatttttataagcagttcaagttactgaaaaccttttaaacctttctgaagttcgttagtataaattacttttctaggattattaataaaagccacataggtggcaagttgtagttttatatggctctgtagagtggtgaaccttctagaggaatatatgatttattcacagttcctcaaggcctggggatgatgatcagttatacctatttttgtgcaattacatcatgttgtacattagaaatggagagtttaatagctctttaactgctgtcctcattaggtaatgataaatatttcccttaaataattgactattttgctgtgttttaaaaatgattgaaatttatcttgccatatctcataatttcatgcacaagttgactgagctaatcttgagaatatattcgtaaaataggagcacatttagttgaggtatacaaggtaggactctagacaaaaccttctattttagctttagtgaatttcaaaagtaatgggtcttggagtatagatttttattagtagcttgaaagagcttaatcatatgcagtaagtatttttattaccaataaatttaaaattttttaagaaaaatatttttatcctagggccaagtgttgcctgccaccaatcagtaagttagtctataacaaattttaccctaacagttttaccacctagtaacagtcatttctgaaaatatgttggatagaaagtcactctttggcaaaagtgttagaatttgcttttgtgccatctattccttttatggcatctatcttgaaagtaatcttgtattggagattgaaagatgctgtaatttagaaattaacatgatatcttaaattacctttatgaaatatagttttgtataatagcatagattttccttcaaaaaatgaacatttatatatctacaaaaatatggagaagagtaatttgaaagcctactttctgaagaaaatggtgggatttttttttatcatgattaaatatcaaaaaattgccctatgaaaactttaaatctctaaaacatttgaaatactaccatatttgtgatttattgagaataaaaatccattttgaaatgtaaaatttttatgatctgattcagttttaagaaaacatgaatgaactagaagatattaaaaacatttgacattggtaagaaatattgatactgatattgatttttatataggtatttatttcagaattgatattttgagaaaaatacatgtgagtcattttttctgtttctcttttctcttaacgattatcactgtaattctgaatctgaaaggtaaaacaattagtcaaaatattattgccatcattctacctgtgttatgaaactacttattcatagttaattctcattaacacttacatttccataaagaaaactcaagtattaataaaagagactttactggcttaagagggctgtgaaagatttttgatagtgaatcatgaccctaagggagagatttgtgtgataaaagtattgtatataatagatcagcgatttttgtaaggcaaacagaatttgtaagttggcagatcttcctaagttgcaaaatgtaatgatgagcttggtggagaagaatgagtcgttcttggaatacctatgtgcagccactacccatctcaatgtcaccttgtttgcattcttggatagcttgtatatgtagtagtttgatgaataatttaaagaaaaacacctaaaatttgaaaaatgattgtaggatcaaaaaagtttgttggttggctggtttgaacgatagaaatatgcagcatgcaatatatgcttatatttcattttaatttctgatatataatgaacttcttgggagaggtactgaatctttgatgttttttgtcattgttctcaagtgcaatataacaatgtaaccaaatctagataatttcaaagttgtcattaatttagtaagcctaatataaacaaatatttgtattatttttgttagcaggaaagagtgattaagtgaggttatttacccctaaatggtccattctgcattgtatttcaggctggaaatgaattattctttaccagttttgaaacactttgaaatatcctaaggtaacttggaagctgtgtagtatatcaaattaatttgctacctaataacatagaaagtaaatatctttgtggtcacccacattgggtgagacagaaaatgaatctgttctaaaatttgtaatttgctaacttgatttgagttagtgaaaactggtacagtgttctgcttgatttacaacatgtaacttgtgactgtacaataaacataagcatatggta

SEQ ID NO: 329226 - DNA, 5957 bp, Homo sapiens
tgaggatcccccagcgcagcaagcccgggatatggctttatatttgttcatcgcgagatgaactatttctaccgatgatacattttctatctcggtcatcagattgctgcatttttcggcttgcctgtctctgccatcgacattaatggacatgattatgtacatgtgttgctcggagcgcctctcgatcaatggtctctgtgactcgagaagcctctcgcgaagaggtggggcaggtctcagtgtctctacagagagcttcaggagacttccagacgacaaagctgaatggatttgaggtctttgcacggtttggcagtgccatagctcctttgggagatctggaccaggatggtttcaatgatattgcaattgctgctccatatgggggtgaagataaaaaaggaattgtttatatcttcaatggaagatcaacaggcttgaacgcagtcccatctcaaatccttgaagggcagtgggctgctcgaagcatgccaccaagctttggctattcaatgaaaggagccacagatatagacaaaaatggatatccagacttaattgtaggagcttttggtgtagatcgagctatcttatacagggccagaccagttatcactgtaaatgctggtcttgaagtgtaccctagcattttaaatcaagacaataaaacctgctcactgcctggaacagctctcaaagtttcctgttttaatgttaggttctgcttaaaggcagatggcaaaggagtacttcccaggaaacttaatttccaggtggaacttcttttggataaactcaagcaaaagggagcaattcgacgagcactgtttctctacagcaggtccccaagtcactccaagaacatgactatttcaagggggggactgatgcagtgtgaggaattgatagcgtatctgcgggatgaatctgaatttagagacaaactcactccaattactatttttatggaatatcggttggattatagaacagctgctgatacaacaggcttgcaacccattcttaaccagttcacgcctgctaacattagtcgacaggctcacattctacttgactgtggtgaagacaatgtctgtaaacccaagctggaagtttctgtagatagtgatcaaaagaagatctatattggggatgacaaccctctgacattgattgttaaggctcagaatcaaggagaaggtgcctacgaagctgagctcatcgtttccattccactgcaggctgatttcatcggggttgtccgaaacaatgaagccttagcaagactttcctgtgcatttaagacagaaaaccaaactcgccaggtggtatgtgaccttggaaacccaatgaaggctggaactcaactcttagctggtcttcgtttcagtgtgcaccagcagtcagagatggatacttctgtgaaatttgacttacaaatccaaagctcaaatctatttgacaaagtaagcccagttgtatctcacaaagttgatcttgctgttttagctgcagttgagataagaggagtctcgagtcctgatcatatctttcttccgattccaaactgggagcacaaggagaaccctgagactgaagaagatgttgggccagttgttcagcacatctatgagctgagaaacaatggtccaagttcattcagcaaggcaatgctccatcttcagtggccttacaaatataataataacactctgttgtatatccttcattatgatattgatggaccaatgaactgcacttcagatatggagatcaaccctttgagaattaagatctcatctttgcaaacaactgaaaagaatgacacggttgccgggcaaggtgagcgggaccatctcatcactaagcgggatcttgccctcagtgaaggagatattcacactttgggttgtggagttgctcagtgcttgaagattgtctgccaagttgggagattagacagaggaaagagtgcaatcttgtacgtaaagtcattactgtggactgagacttttatgaataaagaaaatcagaatcattcctattctctgaagtcgtctgcttcatttaatgtcatagagtttccttataagaatcttccaattgaggatatcaccaactccacattggttaccactaatgtcacctggggcattcagccagcgcccatgcctgtgcctgtgtgggtgatcattttagcagttctagcaggattgttgctactggctgttttggtatttgtaatgtacaggatgggcttttttaaacgggtccggccacctcaagaagaacaagaaagggagcagcttcaacctcatgaaaatggtgaaggaaactcagaaacttaactgcagtttttaagttatgctacatcttgacccactagaattagcaactttattatagatttaaactttcttcatgaggagtaaaaatccaaggctttactgctgatagtgctaattggcattaaccacaaaatgagaattatatttgtcaaccttctccttataaataagttcagacatacatttaataacatagggtgacttgtgtttttaggtatttaaataataaaatttcaagggatagtttttattcaatgtatataagacaggtagtgcctgatttactactttatataaaatagtacctccttcagttactgtttctgatttaatgtacggaactttatttgttgttgttgttgttgttgttgttgttgttttaaagcagtccaaatttggaccttagcaatcatgtcttttgtataggtacttaatgttaatacatattacactacagtttacttttcagaatactaaagactttataactgcatgaacttggatttttttaatcactcatatggtagaattttataaacacatacatgataccatccaaattcttgcttttaataacaaaggtacaatattttgttttagtatgaaaatctggtagatcctattacacttctgtttatattaaatccacaatattttattacatttttaacttgtataaattttaggtcaaatccttcaagccaacctatactaaaaattagttccataatcacaaatggctcttttgtgtaattgtttaatttcacctgaatatcataatgcttaaagccatatggagttggaaattatttccaaagcatatttattccattgttttagtctggctatttacagtataaaaaaagcatttttattaaaatactgtgtagttctttgagatagttgcttatgcatatagtaagtattacattcttagagtagagcagagtttttagttagtattaatttattttcctccattcatgtacttttccttatatttccaaaactgttactgagaatgggtcaagatcagtgagaaatctttacagttgacaggaacctggaccccttaccccaactttatgagtaatgcttggaataaaaactcttaaggcaactcactgatttacttctagcaatagcatgatgttacaggaatattacctctgtttaagcaaggtaatgtgtaaaatcagtctcggctgtcagaataacttctaaaaggtatttttataagcagttcaagttactgaaaaccttttaaacctttctgaagttcgttagtataaattacttttctaggattattaataaaagccacataggtggcaagttgtagttttatatggctctgtagagtggtgaaccttctagaggaatatatgatttattcacagttcctcaaggcctggggatgatgatcagttatacctatttttgtgcaattacatcatgttgtacattagaaatggagagtttaatagctctttaactgctgtcctcattaggtaatgataaatatttcccttaaataattgactattttgctgtgttttaaaaatgattgaaatttatcttgccatatctcataatttcatgcacaagttgactgagctaatcttgagaatatattcgtaaaataggagcacatttagttgaggtatacaaggtaggactctagacaaaaccttctattttagctttagtgaatttcaaaagtaatgggtcttggagtatagatttttattagtagcttgaaagagcttaatcatatgcagtaagtatttttattaccaataaatttaaaattttttaagaaaaatatttttatcctagggccaagtgttgcctgccaccaatcagtaagttagtctataacaaattttaccctaacagttttaccacctagtaacagtcatttctgaaaatatgttggatagaaagtcactctttggcaaaagtgttagaatttgcttttgtgccatctattccttttatggcatctatcttgaaagtaatcttgtattggagattgaaagatgctgtaatttagaaattaacatgatatcttaaattacctttatgaaatatagttttgtataatagcatagattttccttcaaaaaatgaacatttatatatctacaaaaatatggagaagagtaatttgaaagcctactttctgaagaaaatggtgggatttttttttatcatgattaaatatcaaaaaattgccctatgaaaactttaaatctctaaaacatttgaaatactaccatatttgtgatttattgagaataaaaatccattttgaaatgtaaaatttttatgatctgattcagttttaagaaaacatgaatgaactagaagatattaaaaacatttgacattggtaagaaatattgatactgatattgatttttatataggtatttatttcagaattgatattttgagaaaaatacatgtgagtcattttttctgtttctcttttctcttaacgattatcactgtaattctgaatctgaaaggtaaaacaattagtcaaaatattattgccatcattctacctgtgttatgaaactacttattcatagttaattctcattaacacttacatttccataaagaaaactcaagtattaataaaagagactttactggcttaagagggctgtgaaagatttttgatagtgaatcatgaccctaagggagagatttgtgtgataaaagtattgtatataatagatcagcgatttttgtaaggcaaacagaatttgtaagttggcagatcttcctaagttgcaaaatgtaatgatgagcttggtggagaagaatgagtcgttcttggaatacctatgtgcagccactacccatctcaatgtcaccttgtttgcattcttggatagcttgtatatgtagtagtttgatgaataatttaaagaaaaacacctaaaatttgaaaaatgattgtaggatcaaaaaaggcagatgaaattacttaatactcagtgttttggagagtattccttttagtttgttggttggctggtttgaacgatagaaatatgcagcatgcaatatatgcttatatttcattttaatttctgatatataatgaacttcttgggagaggtactgaatctttgatgttttttgtcattgttctcaagtgcaatataacaatgtaaccaaatctagataatttcaaagttgtcattaatttagtaagcctaatataaacaaatatttgtattatttttgttagcaggaaagagtgattaagtgaggttatttacccctaaatggtccattctgcattgtatttcaggctggaaatgaattattctttaccagttttgaaacactttgaaatatcctaaggtaacttggaagctgtgtagtatatcaaattaatttgctacctaataacatagaaagtaaatatctttgtggtcacccacattgggtgagacagaaaatgaatctgttctaaaatttgtaatttgctaacttgatttgagttagtgaaaactggtacagtgttctgcttgatttacaacatgtaacttgtgactgtacaataaacataagcatatggta

SEQ ID NO: 329227 - DNA, 5088 bp, Homo sapiens
gggaggcagaacccaggaagtactgtttttatatgtcatttgtgtgatccccaagaagccttcttttttgtacctggtggttcaattgttttattgttatgagaggtgtgtggagaaattctggttgtggccctactcatgccttctttagccatgttcccttactctagtaaaccatccatttcttctttcctggcctatgaacacagcacatactttggtggttagcttcgtgttatcaaattattgtacccagttgctagactttcactggatcaacaaacatttacttttgcactttttagaaagatggttagtattataaggaggtataattatgattaataattgttgttaaataggctctcttatggattggtccaggtatattaagtaaaataggtttgatagaaaataagatttagttatctttgttcagttttattgtaagctcataattagacattgactagcattactatcttttcctctctcctttagctcttagctggtcttcgtttcagtgtgcaccagcagtcagagatggatacttctgtgaaatttgacttacaaatccaaagctcaaatctatttgacaaagtaagcccagttgtatctcacaaagttgatcttgctgttttagctgcagttgagataagaggagtctcgagtcctgatcatatctttcttccgattccaaactgggagcacaaggagaaccctgagactgaagaagatgttgggccagttgttcagcacatctatgagctgagaaacaatggtccaagttcattcagcaaggcaatgctccatcttcagtggccttacaaatataataataacactctgttgtatatccttcattatgatattgatggaccaatgaactgcacttcagatatggagatcaaccctttgagaattaagatctcatctttgcaaacaactgaaaagaatgacacggttgccgggcaaggtgagcgggaccatctcatcactaagcgggatcttgccctcagtgaaggagatattcacactttgggttgtggagttgctcagtgcttgaagattgtctgccaagttgggagattagacagaggaaagagtgcaatcttgtacgtaaagtcattactgtggactgagacttttatgaataaagaaaatcagaatcattcctattctctgaagtcgtctgcttcatttaatgtcatagagtttccttataagaatcttccaattgaggatatcaccaactccacattggttaccactaatgtcacctggggcattcagccagcgcccatgcctgtgcctgtgtgggtgatcattttagcagttctagcaggattgttgctactggctgttttggtatttgtaatgtacaggatgggcttttttaaacgggtccggccacctcaagaagaacaagaaagggagcagcttcaacctcatgaaaatggtgaaggaaactcagaaacttaactgcagtttttaagttatgctacatcttgacccactagaattagcaactttattatagatttaaactttcttcatgaggagtaaaaatccaaggctttactgctgatagtgctaattggcattaaccacaaaatgagaattatatttgtcaaccttctccttataaataagttcagacatacatttaataacatagggtgacttgtgtttttaggtatttaaataataaaatttcaagggatagtttttattcaatgtatataagacaggtagtgcctgatttactactttatataaaatagtacctccttcagttactgtttctgatttaatgtacggaactttatttgttgttgttgttgttgttgttgttgttgttttaaagcagtccaaatttggaccttagcaatcatgtcttttgtataggtacttaatgttaatacatattacactacagtttacttttcagaatactaaagactttataactgcatgaacttggatttttttaatcactcatatggtagaattttataaacacatacatgataccatccaaattcttgcttttaataacaaaggtacaatattttgttttagtatgaaaatctggtagatcctattacacttctgtttatattaaatccacaatattttattacatttttaacttgtataaattttaggtcaaatccttcaagccaacctatactaaaaattagttccataatcacaaatggctcttttgtgtaattgtttaatttcacctgaatatcataatgcttaaagccatatggagttggaaattatttccaaagcatatttattccattgttttagtctggctatttacagtataaaaaaagcatttttattaaaatactgtgtagttctttgagatagttgcttatgcatatagtaagtattacattcttagagtagagcagagtttttagttagtattaatttattttcctccattcatgtacttttccttatatttccaaaactgttactgagaatgggtcaagatcagtgagaaatctttacagttgacaggaacctggaccccttaccccaactttatgagtaatgcttggaataaaaactcttaaggcaactcactgatttacttctagcaatagcatgatgttacaggaatattacctctgtttaagcaaggtaatgtgtaaaatcagtctcggctgtcagaataacttctaaaaggtatttttataagcagttcaagttactgaaaaccttttaaacctttctgaagttcgttagtataaattacttttctaggattattaataaaagccacataggtggcaagttgtagttttatatggctctgtagagtggtgaaccttctagaggaatatatgatttattcacagttcctcaaggcctggggatgatgatcagttatacctatttttgtgcaattacatcatgttgtacattagaaatggagagtttaatagctctttaactgctgtcctcattaggtaatgataaatatttcccttaaataattgactattttgctgtgttttaaaaatgattgaaatttatcttgccatatctcataatttcatgcacaagttgactgagctaatcttgagaatatattcgtaaaataggagcacatttagttgaggtatacaaggtaggactctagacaaaaccttctattttagctttagtgaatttcaaaagtaatgggtcttggagtatagatttttattagtagcttgaaagagcttaatcatatgcagtaagtatttttattaccaataaatttaaaattttttaagaaaaatatttttatcctagggccaagtgttgcctgccaccaatcagtaagttagtctataacaaattttaccctaacagttttaccacctagtaacagtcatttctgaaaatatgttggatagaaagtcactctttggcaaaagtgttagaatttgcttttgtgccatctattccttttatggcatctatcttgaaagtaatcttgtattggagattgaaagatgctgtaatttagaaattaacatgatatcttaaattacctttatgaaatatagttttgtataatagcatagattttccttcaaaaaatgaacatttatatatctacaaaaatatggagaagagtaatttgaaagcctactttctgaagaaaatggtgggatttttttttatcatgattaaatatcaaaaaattgccctatgaaaactttaaatctctaaaacatttgaaatactaccatatttgtgatttattgagaataaaaatccattttgaaatgtaaaatttttatgatctgattcagttttaagaaaacatgaatgaactagaagatattaaaaacatttgacattggtaagaaatattgatactgatattgatttttatataggtatttatttcagaattgatattttgagaaaaatacatgtgagtcattttttctgtttctcttttctcttaacgattatcactgtaattctgaatctgaaaggtaaaacaattagtcaaaatattattgccatcattctacctgtgttatgaaactacttattcatagttaattctcattaacacttacatttccataaagaaaactcaagtattaataaaagagactttactggcttaagagggctgtgaaagatttttgatagtgaatcatgaccctaagggagagatttgtgtgataaaagtattgtatataatagatcagcgatttttgtaaggcaaacagaatttgtaagttggcagatcttcctaagttgcaaaatgtaatgatgagcttggtggagaagaatgagtcgttcttggaatacctatgtgcagccactacccatctcaatgtcaccttgtttgcattcttggatagcttgtatatgtagtagtttgatgaataatttaaagaaaaacacctaaaatttgaaaaatgattgtaggatcaaaaaaggcagatgaaattacttaatactcagtgttttggagagtattccttttagtttgttggttggctggtttgaacgatagaaatatgcagcatgcaatatatgcttatatttcattttaatttctgatatataatgaacttcttgggagaggtactgaatctttgatgttttttgtcattgttctcaagtgcaatataacaatgtaaccaaatctagataatttcaaagttgtcattaatttagtaagcctaatataaacaaatatttgtattatttttgttagcaggaaagagtgattaagtgaggttatttacccctaaatggtccattctgcattgtatttcaggctggaaatgaattattctttaccagttttgaaacactttgaaatatcctaaggtaacttggaagctgtgtagtatatcaaattaatttgctacctaataacatagaaagtaaatatctttgtggtcacccacattgggtgagacagaaaatgaatctgttctaaaatttgtaatttgctaacttgatttgagttagtgaaaactggtacagtgttctgcttgatttacaacatgtaacttgtgactgtacaataaacataagcatatggta

SEQ ID NO: 329228 - DNA, 3379 bp, Homo sapiens
gataaaaagctttcctcatttttaaacaacagtcgcacggaagttcccggcgggacaagggaacgtgggtgcccttgctactcccgtggacgcgggtagattgggacgctggaccgtatctccccgcccccgcccccacgcctcctcaggtgctcagcctgaggccttcgtccaggagcgctgccgctgacccaggctcaggagctgggggcccctgcacagacgcccaggtctcgggacaggcggcgactgcactcacggaagtacgctgagctctcccctgtagaagggcgcctctcctcccccacttcctcctccagctccacagcagcctcccgggccggctcctcctccttccaggtctcctcccagtgccgccgcggctctcaggcctgaggtgcggcgctcaccccggcagtccccagcctcagacgctgcgtggagcggcggagccggagggaagcaaaggaccgtctgcgctgctgtccccgccccgcgcgctctgcgcccctcgtccctggcggtcgctccgaagctcagccctcttgcctgccccggagctgtcccgggctagccgagaagagagcggccggcaagtttgggcgcgcgcaggcggcgggccgcgggcactgggcgcctcgctggggcggggggaggtggctaccgctcccggcttggcgtcccgcgcgcacttcggcgatggcttttccgccgcggcgacggctgcgcctcggtccccgcggcctcccgcttcttctctcgggactcctgctacctctgtgccgcgccttcaacctagacgtggacagtcctgccgagtactctggccccgagggaagttacttcggcttcgccgtggatttcttcgtgcccagcgcgtcttcccggatgtttcttctcgtgggagctcccaaagcaaacaccacccagcctgggattgtggaaggagggcaggtcctcaaatgtgactggtcttctacccgccggtgccagccaattgaatttgatgcaacaggcaatagagattatgccaaggatgatccattggaatttaagtcccatcagtggtttggagcatctgtgaggtcgaaacaggataaaattttggcctgtgccccattgtaccattggagaactgagatgaaacaggagcgagagcctgttggaacatgctttcttcaagatggaacaaagactgttgagtatgctccatgtagatcacaagatattgatgctgatggacagggattttgtcaaggaggattcagcattgattttactaaagctgacagagtacttcttggtggtcctggtagcttttattggcaaggtcagcttatttcggatcaagtggcagaaatcgtatctaaatacgaccccaatgtttacagcatcaagtataataaccaattagcaactcggactgcacaagctatttttgatgacagctatttgggttattctgtggctgtcggagatttcaatggtgatggcatagatgactttgtttcaggagttccaagagcagcaaggactttgggaatggtttatatttatgatgggaagaacatgtcctccttatacaattttactggcgagcagatggctgcatatttcggattttctgtagctgccactgacattaatggagatgattatgcagatgtgtttattggagcacctctcttcatggatcgtggctctgatggcaaactccaagaggtggggcaggtctcagtgtctctacagagagcttcaggagacttccagacgacaaagctgaatggatttgaggtctttgcacggtttggcagtgccatagctcctttgggagatctggaccaggatggtttcaatgatattgcaattgctgctccatatgggggtgaagataaaaaaggaattgtttatatcttcaatggaagatcaacaggcttgaacgcagtcccatctcaaatccttgaagggcagtgggctgctcgaagcatgccaccaagctttggctattcaatgaaaggagccacagatatagacaaaaatggatatccagacttaattgtaggagcttttggtgtagatcgagctatcttatacagggccagaccagttatcactgtaaatgctggtcttgaagtgtaccctagcattttaaatcaagacaataaaacctgctcactgcctggaacagctctcaaagtttcctgttttaatgttaggttctgcttaaaggcagatggcaaaggagtacttcccaggaaacttaatttccaggtggaacttcttttggataaactcaagcaaaagggagcaattcgacgagcactgtttctctacagcaggtccccaagtcactccaagaacatgactatttcaagggggggactgatgcagtgtgaggaattgatagcgtatctgcgggatgaatctgaatttagagacaaactcactccaattactatttttatggaatatcggttggattatagaacagctgctgatacaacaggcttgcaacccattcttaaccagttcacgcctgctaacattagtcgacaggctcacattctacttgactgtggtgaagacaatgtctgtaaacccaagctggaagtttctgtagatagtgatcaaaagaagatctatattggggatgacaaccctctgacattgattgttaaggctcagaatcaaggagaaggtgcctacgaagctgagctcatcgtttccattccactgcaggctgatttcatcggggttgtccgaaacaatgaagccttagcaagactttcctgtgcatttaagacagaaaaccaaactcgccaggtggtatgtgaccttggaaacccaatgaaggctggaactcaactcttagctggtcttcgtttcagtgtgcaccagcagtcagagatggatacttctgtgaaatttgacttacaaatccaaagctcaaatctatttgacaaagtaagcccagttgtatctcacaaagttgatcttgctgttttagctgcagttgagataagaggagtctcgagtcctgatcatatctttcttccgattccaaactgggagcacaaggagaaccctgagactgaagaagatgttgggccagttgttcagcacatctatgaggtttgcagttgttagattttactcaaacctcgtgagcaagccaacgaagagaggaacaactaagctactttaaaaaaaaaattctatgtaatttttatgtaaactctacattggttaagtatgtgtcagagatttctttgaatattttccctatacataaattcatttttatttgacaaatagacttgtttaaataaagcagtttatataatttgttgtttaaaataaattagttctacttgaataa

SEQ ID NO: 329229 - DNA, 1566 bp, Homo sapiens
gataaaaagctttcctcatttttaaacaacagtcgcacggaagttcccggcgggacaagggaacgtgggtgcccttgctactcccgtggacgcgggtagattgggacgctggaccgtatctccccgcccccgcccccacgcctcctcaggtgctcagcctgaggccttcgtccaggagcgctgccgctgacccaggctcaggagctgggggcccctgcacagacgcccaggtctcgggacaggcggcgactgcactcacggaagtacgctgagctctcccctgtagaagggcgcctctcctcccccacttcctcctccagctccacagcagcctcccgggccggctcctcctccttccaggtctcctcccagtgccgccgcggctctcaggcctgaggtgcggcgctcaccccggcagtccccagcctcagacgctgcgtggagcggcggagccggagggaagcaaaggaccgtctgcgctgctgtccccgccccgcgcgctctgcgcccctcgtccctggcggtcgctccgaagctcagccctcttgcctgccccggagctgtcccgggctagccgagaagagagcggccggcaagtttgggcgcgcgcaggcggcgggccgcgggcactgggcgcctcgctggggcggggggaggtggctaccgctcccggcttggcgtcccgcgcgcacttcggcgatggcttttccgccgcggcgacggctgcgcctcggtccccgcggcctcccgcttcttctctcgggactcctgctacctctgtgccgcgccttcaacctagacgtggacagtcctgccgagtactctggccccgagggaagttacttcggcttcgccgtggatttcttcgtgcccagcgcgtcttcccggatgtttcttctcgtgggagctcccaaagcaaacaccacccagcctgggattgtggaaggagggcaggtcctcaaatgtgactggtcttctacccgccggtgccagccaattgaatttgatgcaacaggcaatagagattatgccaaggatgatccattggaatttaagtcccatcagtggtttggagcatctgtgaggtcgaaacaggataaaattttggcctgtgccccattgtaccattggagaactgagatgaaacaggagcgagagcctgttggaacatgctttcttcaagatggaacaaagactgttgagtatgctccatgtagatcacaagatattgatgctgatggacagggattttgtcaaggaggattcagcattgattttactaaagctgacagagtacttcttggtggtcctggtagcttttattggcaaggtcagcttatttcggatcaagtggcagaaatcgtatctaaatacgaccccaatgtttacagcatcaagtataataaccaattagcaactcggactgcacaagctatttttgatgacagctatttgggttattctgtggctgtcggagatttcaatggtgatggcatagatgactttgtttcaggagttccaagagcagcaaggactttgggaatggtaggacagttaaaaggtatt

SEQ ID NO: 329230 - DNA, 1232 bp, Homo sapiens
tttttttttaagacagagtctcgctctgttgcccaggctggagtgcagtggcgccatctcagctcactgcaagctccgcctcctgggttcacgccattctcttgcctcagcctcccgagtagctgggactacaggtgcccgccaacacgacctaattttttgtatttttttttagtagagacagggtttcactgtgtcagccaggatggtcttgatctctggcccaagcttttaaaagtgaaaacggtggccaggcacggcagcacacgcttgtaattctagcacttcaggaggccgagatagaaggatcactcgagcccaggaattcgagaccagccctgacgatataaatagggaaagagagagagagagagagagagcgcgtgcacgcgagggagaatgcctgcccctctccagcctggccaacagaaggagatcctgtctcaaagaaagtgaaaatgcttcagctagaattataggataatcctgtgtgagataatttacatagtgactggaagagttattaaatattgctttcttgttgctaagttctgtagttgggttagatatctaatgcgtaactattgtgaaagtcaagagattctaatttttccagaaaataatgttgagtttccatgaagaacaggaagtactgccagaaactttccttgctaatttcccttctctgataaagatggacattcacaaaaaagtaactgacccaagtgtggccaaaagcatgatggcttgcctcctgtcttcactgaaggctaatggctcccggggagctttctgtgaagtgagaccagatgataaaagaattctggaattttacagcaagttaggatgttttgaaattgcaaaaatggaaggatttccaaaggatgtggttatacttggtcggagcctgtgacatttgttgacactgtgaactgtccaaaagtctcttaactgcaccttgtgaatggtagttgaggtcttcatacagttcagcctctagaatggtaacaaatcagccaattggattcgaaacaaagaagactatgtaaaactcacccatcacactttgagactactcactggttggaagaatatagtattgcagcaaatcctgtatgaaagagagatgtgggcttcctttttgagtcttgtgttaggtgctgagaccttttacatgggcttatacagggagagagtcttcaataaatgtagtcagcactattttctgcatc

SEQ ID NO: 329231 - DNA, 579 bp, Homo sapiens
  misc_feature (118)..(118): n is a, c, g, or t
  misc_feature (122)..(122): n is a, c, g, or t
ggccattagatgtacatgacggtagcgcttctctgttactgatggtttttcactagacggagagcgtgagccagtgtggctagagcatgatggcttgcagcgtgtcttcactgaaggntaanggctcccggggagctttctgtgaagtgagaccagatgataaaagaattctggaattttacagcaagttaggatgttttgaaattgcaaaaatggaaggatttccaaaggatgtggttatacttggtcggagcctgtgacatttgttgacactgtgaactgtccaaaagtctcttaactgcaccttgtgaatggtagttgaggtcttcatacagttcagcctctagaatggtaacaaatcagccaattggattcgaaacaaagaagactatgtaaaactcacccatcacactttgagactactcactggttggaagaatatagtattgcagcaaatcctgtatgaaagagagatgtgggcttcctttttgagtcttgtgttaggtgctgagaccttttacatgggcttatacagggagagagtcttcaataaatgtagtcagcactattttctgcatc

SEQ ID NO: 329232 - DNA, 694 bp, Homo sapiens
tttttttttaagacagagtctcgctctgttgcccaggctggagtgcagtggcgccatctcagctcactgcaagctccgcctcctgggttcacgccattctcttgcctcagcctcccgagtagctgggactacaggtgcccgccaacacgacctaattttttgtatttttttttagtagagacagggtttcactgtgtcagccaggatggtcttgatctctggcccaagcttttaaaagtgaaaacggtggccaggcacggcagcacacgcttgtaattctagcacttcaggaggccgagatagaaggatcactcgagcccaggaattcgagaccagccctgacgatataaatagggaaagagagagagagagagagagagcgcgtgcacgcgagggagaatgcctgcccctctccagcctggccaacagaaggagatcctgtctcaaagaaagtgaaaatgcttcagctagaattataggataatcctgtgtgagataatttacatagtgactggaagagttattaaatattgctttcttgttgctaagttctgtagttgggttagatatctaatgcgtaactattgtgaaagtccatctttatcagagaagggaaatgagtatggaaagtttctggcagtacttcctgtttttcatggaaactcaacattatgttatggaaaaattagaatct

SEQ ID NO: 329233 - DNA, 774 bp, Homo sapiens
tgtggtggctcacacctgtaatctcagcactttgggaggccgaggcaggcggatcacctgaggtcaggagttcgagaccagcctgacctcaagtgatccacccaccttggactcccaaaatgctgggattacacacatgagccactgtgcccggcccaggaggagaatctgaagcttaggatctactagaaagaacactggatcaggaggattctagtctcgaccactcctgaagaataatcccagctaatccctaacttttatgcctcagctttctcagctataaaatggcggccaaagctagctccatctaagaacaaggataatgtaaagtataaaagagaatgccataggccggttatgatggctcatgcctgtagtcccagaactttgggaggcagaggcgggcagatcacctgaggtcaggagtttgagatcagcctggccaacatggtgaaaccccatctgtactaaaaatacaaaaattagccgggcgtggtggcgcatgcctgtaatcccagctacttgagaggctgaggcaggagaattgcttgaactcaggaggcagaggttgcagtgagctgagatcacaccattgcactccagcctgggcgatagagggagactccatctcaaaataaatacaataaataaaggaaatactgaccgtgcgcagcggctcaaacctgtagtcccagcacttagggaggcctaggcgggcagaccacaaggtcaggagtttgagaccagcctggccaatatggtgaaacccca

SEQ ID NO: 329234 - DNA, 5088 bp, Homo sapiens
agcaagatccagtaccatggctcatgcctgcaatcccaacactgtaagaggctaaggcaggcggatcacttgaggccaggagttcgagaccagcctgggcaatatggcaaaaccctcatctctactaaacaaaaattagccgggtatgcctgtaatcccacctactcaggaggtggaggttgcagtgagtcaggatcgtgccactgcactccagccttgggcaacagagcaaggctctcaaaataaaaaagcagcggctgcattttatgcctttcaaatgctgcaggaaatagaaatggcttaagttcagtaagagaattgacaattcagtgtttttgagaagtggcaatgaaagggaggaaaatgtttattgattttagcctgtttccccaaaaggataagaaactatttggaagtgaaaaagaagggcctcttattttctgttggttcagatttcaaaggtgtgaaaactattctttttcccttactgtgacattaaatcacttcaggcttgtaccattttgtatggcctgttgttaagttggacatgacaatttgtaaaatgtgaggatcttttcctttcttgtaagttagaagaaataacctcttcagttaaaccttcagtgaaggttcttttagttttctgttctgctttctaaaaacatagactctgttctttagagcaacttatgactctcatctctgctgcacgagaatatgagatagagttcatctatgcgatctcacctggattggatatcactttttctaaccccaaggaagtatccacattgaaacgtaaattggaccaggtttctcagtttgggtgcagatcatttgctttgctttttgatgatatagaccataatatgtgtgcagcagacaaagaggtattcagttcttttgctcatgcccaagtctccatcacaaatgaaatctatcagtacctaggagagccagaaactttcctcttctgtcccacagaatactgtggcactttctgttatccaaatgtgtctcagtctccatatttaaggactgtgggtgaaaagcttctacctggaattgaagtgctttggacaggtcccaaagttgtttctaaagaaattccagtagagtccatcgaagaggtttctaagattattaagagagctccagtaatctgggataacattcatgctaatgattatgatcagaagagactgtttctgggcccgtacaaaggaagatccacagaactcatcccacggttaaaaggagtcctcactaatccaaattgtgaatttgaagccaactacgttgctatccacacccttgccacctggtacaaatcaaacatgaatggagtgagaaaagatgtagtgatgactgacagtgaagatagtactgtgtccatccagataaaattagaaaatgaaggcagtgatgaagatattgaaactgatgtactctatagtccacagatggctctaaagctagcattaacagaatggttgcaagagtttggtgtgcctcatcaatacagcagtaggcaagttgcacacagtggagctaaagcaagtgtagttgatgggactcctttagttgcagcaccctctttaaatgccacaaccgtagtaacaacagtttatcaggagcccattatgagccagggagcagccttgagtggtgagcctactactctgaccaaggaagaagaaaagaaacagcctgatgaagaacccatggacatggtggtggaaaaacaagaagaaacggaccacaagaatgacaatcaaatactgagtgaaattgttgaagcgaaaatggcagaggaattgaaaccaatggacactgataaagagagcatagctgaatcaaaatccccagagatgtccatgcaagaagattgtattagtgacattgcccccatgcaaactgatgaacagacaaacaaggagcagtttgtgccaggtccaaatgaaaagcctttgtacactgcggaaccagtgaccctggaggatttgcagttacttgctgatctattctaccttccttacgagcatggacccaaaggagcacagatgttacgggaatttcaatggcttcgagcaaatagtagtgttgtcagtgtcaattgcaaaggaaaagactctgaaaaaattgaagaatggcggtcacgagcagccaagtttgaagagatgtgtggactagtgatgggaatgttcactcggctctccaattgtgccaacaggacaattctttatgacatgtactcctatgtttgggatatcaagagtataatgtctatggtgaagtcttttgtacagtggttagggtgtcgtagtcattcttcagcacaattcttaattggagaccaagaaccctgggcctttagaggtggtctagcaggagagttccagcgtttgctgccaattgatggggcaaatgatctcttttttcagccacctccactgactcctacctccaaagtttatactatcagaccttattttcctaaggatgaggcatccgtgtacaagatttgcagagaaatgtatgacgatggagtgggtttaccctttcaaagtcagcctgatcttattggagacaagttagtaggagggctgctttccctcagcctggattactgctttgtcctagaagatgaagatggcatatgtggttatgccttgggcactgtagatgtgaccccctttattaaaaaatgtaaaatttcctggatccccttcatgcaggagaagtataccaagccaaatggtgacaaggaactctctgaggctgagaaaataatgttgagtttccatgaagaacaggaagtactgccagaaactttccttgctaatttcccttctctgataaagatggacattcacaaaaaagtaactgacccaagtgtggccaaaagcatgatggcttgcctcctgtcttcactgaaggctaatggctcccggggagctttctgtgaagtgagaccagatgataaaagaattctggaattttacagcaagttaggatgttttgaaattgcaaaaatggaaggatttccaaaggatgtggttatacttggtcggagcctgtgacatttgttgacactgtgaactgtccaaaagtctcttaactgcaccttgtgaatggtagttgaggtcttcatacagttcagcctctagaatggtaacaaatcagccaattggattcgaaacaaagaagactatgtaaaactcacccatcacactttgagactactcactggttggaagaatatagtattgcagcaaatcctgtatgaaagagagatgtgggcttcctttttgagtcttgtgttaggtgctgagaccttttacatgggcttatacagggagagagtcttcaataaatgtagtcagcactattttctgcatccagtgtggttgcgtttctcacctgagagtaatcaagataacatctgtcatcttccttggtttattgagtgaaatgcctctcagtcttaggggacatggcagagatgaaagaaagaaagagtgggtttcagaagtgtcagggtggagtgattccaagtgggatggttgtggcattagtttaagctgaataaataatttcaatttggggcagttattctgctttttgtaaagccgtggccaattgtctcctgtaatgactgttggttcaggcatgttgtactttgtagggacaaatgtgcatttgtttgtggcaaaagcctacaattgacaaacttgtaaatttctttgtatataaactagctgtaacctgactatcctttgtgtttactgtttttgtaaatttttttcctctataaatgaaagggtgttggttcagaatggcactttgaataatgtaaaccagtgaaaagtggattttctttacttttgtctttgggtttggggttgtttttgttctttttgaagttttattatttttaaagtgcctcccacctaggcgtaggccatgaccatttggggtacgagagcctaattttgtaggacttaatctgttgaaaagtgcagttacttctggaaattaacctcaatattaggtcagcatgtgaaatgttggatttgacatgtcaggtagggttcagggactgattggtcccatttgccctcaggtcagttgtttaatctcaagacctgttactactgattttattaaatcagagtctttaattcttgcatgtttgtatctaatttctgaacgaatgagcacactttaaccagttatttacagttacctttttcctttaaccggattgtgaaagcttcatgtattttaatttagattctgtgtttttaagggttctgagcatgaagctggcagatagtcggcaggactcattttttcatcatggctggctgatttctccatagattgataacagtattttgttatcttgcttctctgtagttttgcatcagctgtttaactttgagctgagtgaggggagaggggtaaagagaaagaaacttaagttttctttcacagaactccaccattgtgggctttgagagagccctaaagcattgtacctagtggtacctagtgacttccaaccaaagcctttgagtatgcactaaataggtgagaagaaaggagagaaggtttttaggttagaaacctttaaccgatagaaggatatggtatgttgtaaagctggaaccaagtttgcatttttgagggcttgagatgaagggaagactcttaccagatagtaagacagctgagttttcctcagttttctcgtcttaacactagtggacaattctagcattttgtttggaggatttcagagttaacctcatggaattcaggattttttagcaagtttgcttttggttttatcttggcttttagtaatcatgttggctggtctggtcacaggtgactgtgaaacagatgccctggtcttgctttcatcactctaggatcatgaagtgctatgctatttcctggttatgaatattaaggttggaattacatttttattgattgtttggatcagagctcagttcctgtagaaaacgaactgtaaaagaccatgcaagaggcaaaataaaacttgaagtgaatgct

SEQ ID NO: 329235 - DNA, 5093 bp, Homo sapiens
cagcgcaagcgcagtgcggataaacaggaagcgggcggtggaggcagcagcagagggagagctcggggcttggaggggaaacagcggaagacctaagattatcgggagggcagcagaggcagagaacgaggacaggacccttggccgtcttcttccagggaacgagaggtcacagcctcgctctccgcttatgcttctggcgccccagcttaaagccgaggctgcggctgacaaagggctcgcgccggtgccgccgcccttctcatccgggcattcgggtccctgcgagaaggagggggaaggacagagggggaggggaaggagccggaggggcgcacacttggagctgaagccctctccagggctccgggccggtgccccaacggacagaggtcgaggaggacccgcagaggtggcagcggccgggggcaggaggatggtgcagaaggagagtcaagcgacgttggaggagcgggagagcgagctcagctccaaccctgccgcctctgcgggggcatcgctggagccgccggcagctccggcacccggagaagacaaccccgccggggctgggggagcggcggtggccggggctgcaggaggggctcggcggttcctctgcggtgtggtggaaggattttatggaagaccttgggttatggaacagagaaaagaactctttagaaggctccagaaatgggaattaaatacatacttgtatgccccaaaagatgactacaaacataggatgttttggcgagagatgtattcagtggaggaagctgagcaacttatgactctcatctctgctgcacgagaatatgagatagagttcatctatgcgatctcacctggattggatatcactttttctaaccccaaggaagtatccacattgaaacgtaaattggaccaggtttctcagtttgggtgcagatcatttgctttgctttttgatgatatagaccataatatgtgtgcagcagacaaagaggtattcagttcttttgctcatgcccaagtctccatcacaaatgaaatctatcagtacctaggagagccagaaactttcctcttctgtcccacaggtcccaaagttgtttctaaagaaattccagtagagtccatcgaagaggtttctaagattattaagagagctccagtaatctgggataacattcatgctaatgattatgatcagaagagactgtttctgggcccgtacaaaggaagatccacagaactcatcccacggttaaaaggagtcctcactaatccaaattgtgaatttgaagccaactacgttgctatccacacccttgccacctggtacaaatcaaacatgaatggagtgagaaaagatgtagtgatgactgacagtgaagatagtactgtgtccatccagataaaattagaaaatgaaggcagtgatgaagatattgaaactgatgtactctatagtccacagatggctctaaagctagcattaacagaatggttgcaagagtttggtgtgcctcatcaatacagcagtaggcaagttgcacacagtggagctaaagcaagtgtagttgatgggactcctttagttgcagcaccctctttaaatgccacaaccgtagtaacaacagtttatcaggagcccattatgagccagggagcagccttgagtggtgagcctactactctgaccaaggaagaagaaaagaaacagcctgatgaagaacccatggacatggtggtggaaaaacaagaagaaacggaccacaagaatgacaatcaaatactgagtgaaattgttgaagcgaaaatggcagaggaattgaaaccaatggacactgataaagagagcatagctgaatcaaaatccccagagatgtccatgcaagaagattgtattagtgacattgcccccatgcaaactgatgaacagacaaacaaggagcagtttgtgccaggtccaaatgaaaagcctttgtacactgcggaaccagtgaccctggaggatttgcagttacttgctgatctattctaccttccttacgagcatggacccaaaggagcacagatgttacgggaatttcaatggcttcgagcaaatagtagtgttgtcagtgtcaattgcaaaggaaaagactctgaaaaaattgaagaatggcggtcacgagcagccaagtttgaagagatgtgtggactagtgatgggaatgttcactcggctctccaattgtgccaacaggacaattctttatgacatgtactcctatgtttgggatatcaagagtataatgtctatggtgaagtcttttgtacagtggttagggtgtcgtagtcattcttcagcacaattcttaattggagaccaagaaccctgggcctttagaggtggtctagcaggagagttccagcgtttgctgccaattgatggggcaaatgatctcttttttcagccacctccactgactcctacctccaaagtttatactatcagaccttattttcctaaggatgaggcatccgtgtacaagatttgcagagaaatgtatgacgatggagtgggtttaccctttcaaagtcagcctgatcttattggagacaagttagtaggagggctgctttccctcagcctggattactgctttgtcctagaagatgaagatggcatatgtggttatgccttgggcactgtagatgtgaccccctttattaaaaaatgtaaaatttcctggatccccttcatgcaggagaagtataccaagccaaatggtgacaaggaactctctgaggctgagaaaataatgttgagtttccatgaagaacaggaagtactgccagaaactttccttgctaatttcccttctctgataaagatggacattcacaaaaaagtaactgacccaagtgtggccaaaagcatgatggcttgcctcctgtcttcactgaaggctaatggctcccggggagctttctgtgaagtgagaccagatgataaaagaattctggaattttacagcaagttaggatgttttgaaattgcaaaaatggaaggatttccaaaggatgtggttatacttggtcggagcctgtgacatttgttgacactgtgaactgtccaaaagtctcttaactgcaccttgtgaatggtagttgaggtcttcatacagttcagcctctagaatggtaacaaatcagccaattggattcgaaacaaagaagactatgtaaaactcacccatcacactttgagactactcactggttggaagaatatagtattgcagcaaatcctgtatgaaagagagatgtgggcttcctttttgagtcttgtgttaggtgctgagaccttttacatgggcttatacagggagagagtcttcaataaatgtagtcagcactattttctgcatccagtgtggttgcgtttctcacctgagagtaatcaagataacatctgtcatcttccttggtttattgagtgaaatgcctctcagtcttaggggacatggcagagatgaaagaaagaaagagtgggtttcagaagtgtcagggtggagtgattccaagtgggatggttgtggcattagtttaagctgaataaataatttcaatttggggcagttattctgctttttgtaaagccgtggccaattgtctcctgtaatgactgttggttcaggcatgttgtactttgtagggacaaatgtgcatttgtttgtggcaaaagcctacaattgacaaacttgtaaatttctttgtatataaactagctgtaacctgactatcctttgtgtttactgtttttgtaaatttttttcctctataaatgaaagggtgttggttcagaatggcactttgaataatgtaaaccagtgaaaagtggattttctttacttttgtctttgggtttggggttgtttttgttctttttgaagttttattatttttaaagtgcctcccacctaggcgtaggccatgaccatttggggtacgagagcctaattttgtaggacttaatctgttgaaaagtgcagttacttctggaaattaacctcaatattaggtcagcatgtgaaatgttggatttgacatgtcaggtagggttcagggactgattggtcccatttgccctcaggtcagttgtttaatctcaagacctgttactactgattttattaaatcagagtctttaattcttgcatgtttgtatctaatttctgaacgaatgagcacactttaaccagttatttacagttacctttttcctttaaccggattgtgaaagcttcatgtattttaatttagattctgtgtttttaagggttctgagcatgaagctggcagatagtcggcaggactcattttttcatcatggctggctgatttctccatagattgataacagtattttgttatcttgcttctctgtagttttgcatcagctgtttaactttgagctgagtgaggggagaggggtaaagagaaagaaacttaagttttctttcacagaactccaccattgtgggctttgagagagccctaaagcattgtacctagtggtacctagtgacttccaaccaaagcctttgagtatgcactaaataggtgagaagaaaggagagaaggtttttaggttagaaacctttaaccgatagaaggatatggtatgttgtaaagctggaaccaagtttgcatttttgagggcttgagatgaagggaagactcttaccagatagtaagacagctgagttttcctcagttttctcgtcttaacactagtggacaattctagcattttgtttggaggatttcagagttaacctcatggaattcaggattttttagcaagtttgcttttggttttatcttggcttttagtaatcatgttggctggtctggtcacaggtgactgtgaaacagatgccctggtcttgctttcatcactctaggatcatgaagtgctatgctatttcctggttatgaatattaaggttggaattacatttttattgattgtttggatcagagctcagttcctgtagaaaacgaactgtaaaagaccatgcaagaggcaaaataaaacttgaagtgaatgct

SEQ ID NO: 329236 - DNA, 4245 bp, Homo sapiens
cttttggggcatacaagtatgtatttaattcccatttctggagccttctaaagagttcttttgctcatgcccaagtctccatcacaaatgaaatctatcagtacctaggagagccagaaactttcctcttctgtcccacagaatactgtggcactttctgttatccaaatgtgtctcagtctccatatttaaggactgtgggtgaaaagcttctacctggaattgaagtgctttggacaggtcccaaagttgtttctaaagaaattccagtagagtccatcgaagaggtttctaagattattaagagagctccagtaatctgggataacattcatgctaatgattatgatcagaagagactgtttctgggcccgtacaaaggaagatccacagaactcatcccacggttaaaaggagtcctcactaatccaaattgtgaatttgaagccaactacgttgctatccacacccttgccacctggtacaaatcaaacatgaatggagtgagaaaagatgtagtgatgactgacagtgaagatagtactgtgtccatccagataaaattagaaaatgaaggcagtgatgaagatattgaaactgatgtactctatagtccacagatggctctaaagctagcattaacagaatggttgcaagagtttggtgtgcctcatcaatacagcagtaggcaagttgcacacagtggagctaaagcaagtgtagttgatgggactcctttagttgcagcaccctctttaaatgccacaaccgtagtaacaacagtttatcaggagcccattatgagccagggagcagccttgagtggtgagcctactactctgaccaaggaagaagaaaagaaacagcctgatgaagaacccatggacatggtggtggaaaaacaagaagaaacggaccacaagaatgacaatcaaatactgagtgaaattgttgaagcgaaaatggcagaggaattgaaaccaatggacactgataaagagagcatagctgaatcaaaatccccagagatgtccatgcaagaagattgtattagtgacattgcccccatgcaaactgatgaacagacaaacaaggagcagtttgtgccaggtccaaatgaaaagcctttgtacactgcggaaccagtgaccctggaggatttgcagttacttgctgatctattctaccttccttacgagcatggacccaaaggagcacagatgttacgggaatttcaatggcttcgagcaaatagtagtgttgtcagtgtcaattgcaaaggaaaagactctgaaaaaattgaagaatggcggtcacgagcagccaagtttgaagagatgtgtggactagtgatgggaatgttcactcggctctccaattgtgccaacaggacaattctttatgacatgtactcctatgtttgggatatcaagagtataatgtctatggtgaagtcttttgtacagtggttagggtgtcgtagtcattcttcagcacaattcttaattggagaccaagaaccctgggcctttagaggtggtctagcaggagagttccagcgtttgctgccaattgatggggcaaatgatctcttttttcagccacctccactgactcctacctccaaagtttatactatcagaccttattttcctaaggatgaggcatccgtgtacaagatttgcagagaaatgtatgacgatggagtgggtttaccctttcaaagtcagcctgatcttattggagacaagttagtaggagggctgctttccctcagcctggattactgctttgtcctagaagatgaagatggcatatgtggttatgccttgggcactgtagatgtgaccccctttattaaaaaatgtaaaatttcctggatccccttcatgcaggagaagtataccaagccaaatggtgacaaggaactctctgaggctgagaaaataatgttgagtttccatgaagaacaggaagtactgccagaaactttccttgctaatttcccttctctgataaagatggacattcacaaaaaagtaactgacccaagtgtggccaaaagcatgatggcttgcctcctgtcttcactgaaggctaatggctcccggggagctttctgtgaagtgagaccagatgataaaagaattctggaattttacagcaagttaggatgttttgaaattgcaaaaatggaaggatttccaaaggatgtggttatacttggtcggagcctgtgacatttgttgacactgtgaactgtccaaaagtctcttaactgcaccttgtgaatggtagttgaggtcttcatacagttcagcctctagaatggtaacaaatcagccaattggattcgaaacaaagaagactatgtaaaactcacccatcacactttgagactactcactggttggaagaatatagtattgcagcaaatcctgtatgaaagagagatgtgggcttcctttttgagtcttgtgttaggtgctgagaccttttacatgggcttatacagggagagagtcttcaataaatgtagtcagcactattttctgcatccagtgtggttgcgtttctcacctgagagtaatcaagataacatctgtcatcttccttggtttattgagtgaaatgcctctcagtcttaggggacatggcagagatgaaagaaagaaagagtgggtttcagaagtgtcagggtggagtgattccaagtgggatggttgtggcattagtttaagctgaataaataatttcaatttggggcagttattctgctttttgtaaagccgtggccaattgtctcctgtaatgactgttggttcaggcatgttgtactttgtagggacaaatgtgcatttgtttgtggcaaaagcctacaattgacaaacttgtaaatttctttgtatataaactagctgtaacctgactatcctttgtgtttactgtttttgtaaatttttttcctctataaatgaaagggtgttggttcagaatggcactttgaataatgtaaaccagtgaaaagtggattttctttacttttgtctttgggtttggggttgtttttgttctttttgaagttttattatttttaaagtgcctcccacctaggcgtaggccatgaccatttggggtacgagagcctaattttgtaggacttaatctgttgaaaagtgcagttacttctggaaattaacctcaatattaggtcagcatgtgaaatgttggatttgacatgtcaggtagggttcagggactgattggtcccatttgccctcaggtcagttgtttaatctcaagacctgttactactgattttattaaatcagagtctttaattcttgcatgtttgtatctaatttctgaacgaatgagcacactttaaccagttatttacagttacctttttcctttaaccggattgtgaaagcttcatgtattttaatttagattctgtgtttttaagggttctgagcatgaagctggcagatagtcggcaggactcattttttcatcatggctggctgatttctccatagattgataacagtattttgttatcttgcttctctgtagttttgcatcagctgtttaactttgagctgagtgaggggagaggggtaaagagaaagaaacttaagttttctttcacagaactccaccattgtgggctttgagagagccctaaagcattgtacctagtggtacctagtgacttccaaccaaagcctttgagtatgcactaaataggtgagaagaaaggagagaaggtttttaggttagaaacctttaaccgatagaaggatatggtatgttgtaaagctggaaccaagtttgcatttttgagggcttgagatgaagggaagactcttaccagatagtaagacagctgagttttcctcagttttctcgtcttaacactagtggacaattctagcattttgtttggaggatttcagagttaacctcatggaattcaggattttttagcaagtttgcttttggttttatcttggcttttagtaatcatgttggctggtctggtcacaggtgactgtgaaacagatgccctggtcttgctttcatcactctaggatcatgaagtgctatgctatttcctggttatgaatattaaggttggaattacatttttattgattgtttggatcagagctcagttcctgtagaaaacgaactgtaaaagaccatgcaagaggcaaaataaaacttgaagtgaatgct

SEQ ID NO: 329237 - DNA, 3943 bp, Homo sapiens
caccccttatgttctgccccccccttaggttcctgaccccccatcgattggaagagactgtttctgggcccgtacaaaggaagatccacagaactcatcccacggttaaaaggagtcctcactaatccaaattgtgaatttgaagccaactacgttgctatccacacccttgccacctggtacaaatcaaacatgaatggagtgagaaaagatgtagtgatgactgacagtgaagatagtactgtgtccatccagataaaattagaaaatgaaggcagtgatgaagatattgaaactgatgtactctatagtccacagatggctctaaagctagcattaacagaatggttgcaagagtttggtgtgcctcatcaatacagcagtaggcaagttgcacacagtggagctaaagcaagtgtagttgatgggactcctttagttgcagcaccctctttaaatgccacaaccgtagtaacaacagtttatcaggagcccattatgagccagggagcagccttgagtggtgagcctactactctgaccaaggaagaagaaaagaaacagcctgatgaagaacccatggacatggtggtggaaaaacaagaagaaacggaccacaagaatgacaatcaaatactgagtgaaattgttgaagcgaaaatggcagaggaattgaaaccaatggacactgataaagagagcatagctgaatcaaaatccccagagatgtccatgcaagaagattgtattagtgacattgcccccatgcaaactgatgaacagacaaacaaggagcagtttgtgccaggtccaaatgaaaagcctttgtacactgcggaaccagtgaccctggaggatttgcagttacttgctgatctattctaccttccttacgagcatggacccaaaggagcacagatgttacgggaatttcaatggcttcgagcaaatagtagtgttgtcagtgtcaattgcaaaggaaaagactctgaaaaaattgaagaatggcggtcacgagcagccaagtttgaagagatgtgtggactagtgatgggaatgttcactcggctctccaattgtgccaacaggacaattctttatgacatgtactcctatgtttgggatatcaagagtataatgtctatggtgaagtcttttgtacagtggttagggtgtcgtagtcattcttcagcacaattcttaattggagaccaagaaccctgggcctttagaggtggtctagcaggagagttccagcgtttgctgccaattgatggggcaaatgatctcttttttcagccacctccactgactcctacctccaaagtttatactatcagaccttattttcctaaggatgaggcatccgtgtacaagatttgcagagaaatgtatgacgatggagtgggtttaccctttcaaagtcagcctgatcttattggagacaagttagtaggagggctgctttccctcagcctggattactgctttgtcctagaagatgaagatggcatatgtggttatgccttgggcactgtagatgtgaccccctttattaaaaaatgtaaaatttcctggatccccttcatgcaggagaagtataccaagccaaatggtgacaaggaactctctgaggctgagaaaataatgttgagtttccatgaagaacaggaagtactgccagaaactttccttgctaatttcccttctctgataaagatggacattcacaaaaaagtaactgacccaagtgtggccaaaagcatgatggcttgcctcctgtcttcactgaaggctaatggctcccggggagctttctgtgaagtgagaccagatgataaaagaattctggaattttacagcaagttaggatgttttgaaattgcaaaaatggaaggatttccaaaggatgtggttatacttggtcggagcctgtgacatttgttgacactgtgaactgtccaaaagtctcttaactgcaccttgtgaatggtagttgaggtcttcatacagttcagcctctagaatggtaacaaatcagccaattggattcgaaacaaagaagactatgtaaaactcacccatcacactttgagactactcactggttggaagaatatagtattgcagcaaatcctgtatgaaagagagatgtgggcttcctttttgagtcttgtgttaggtgctgagaccttttacatgggcttatacagggagagagtcttcaataaatgtagtcagcactattttctgcatccagtgtggttgcgtttctcacctgagagtaatcaagataacatctgtcatcttccttggtttattgagtgaaatgcctctcagtcttaggggacatggcagagatgaaagaaagaaagagtgggtttcagaagtgtcagggtggagtgattccaagtgggatggttgtggcattagtttaagctgaataaataatttcaatttggggcagttattctgctttttgtaaagccgtggccaattgtctcctgtaatgactgttggttcaggcatgttgtactttgtagggacaaatgtgcatttgtttgtggcaaaagcctacaattgacaaacttgtaaatttctttgtatataaactagctgtaacctgactatcctttgtgtttactgtttttgtaaatttttttcctctataaatgaaagggtgttggttcagaatggcactttgaataatgtaaaccagtgaaaagtggattttctttacttttgtctttgggtttggggttgtttttgttctttttgaagttttattatttttaaagtgcctcccacctaggcgtaggccatgaccatttggggtacgagagcctaattttgtaggacttaatctgttgaaaagtgcagttacttctggaaattaacctcaatattaggtcagcatgtgaaatgttggatttgacatgtcaggtagggttcagggactgattggtcccatttgccctcaggtcagttgtttaatctcaagacctgttactactgattttattaaatcagagtctttaattcttgcatgtttgtatctaatttctgaacgaatgagcacactttaaccagttatttacagttacctttttcctttaaccggattgtgaaagcttcatgtattttaatttagattctgtgtttttaagggttctgagcatgaagctggcagatagtcggcaggactcattttttcatcatggctggctgatttctccatagattgataacagtattttgttatcttgcttctctgtagttttgcatcagctgtttaactttgagctgagtgaggggagaggggtaaagagaaagaaacttaagttttctttcacagaactccaccattgtgggctttgagagagccctaaagcattgtacctagtggtacctagtgacttccaaccaaagcctttgagtatgcactaaataggtgagaagaaaggagagaaggtttttaggttagaaacctttaaccgatagaaggatatggtatgttgtaaagctggaaccaagtttgcatttttgagggcttgagatgaagggaagactcttaccagatagtaagacagctgagttttcctcagttttctcgtcttaacactagtggacaattctagcattttgtttggaggatttcagagttaacctcatggaattcaggattttttagcaagtttgcttttggttttatcttggcttttagtaatcatgttggctggtctggtcacaggtgactgtgaaacagatgccctggtcttgctttcatcactctaggatcatgaagtgctatgctatttcctggttatgaatattaaggttggaattacatttttattgattgtttggatcagagctcagttcctgtagaaaacgaactgtaaaagaccatgcaagaggcaaaataaaacttgaagtgaatgct

SEQ ID NO: 329238 - DNA, 5903 bp, Homo sapiens
gttcttataattcattcttatagggatttaaacttaagtttctaaggcccttaggaattttgaacctgaaatctggattattgagcttgaaatgtattacagaaaacatttgatattcagtttttaatttaagaattattaaaagttaaattcttaatgatacacagtattgtttctttctcttctcagggtttatctctgcactgagcatttatggtggtagctttccaaaattatatagatacctcttacacaatctcaagctcttacagcaagcttgtccagcctgtggctcaacacaagtttataaactttcttaaaacattgtgagtttttttattttttattttttttaagctcatcaactatcattagtgtattttatgtgtggcccaagacagttcttccagtgtggcccagggaagccaaaagattggacaccccttataacatcttagaagttttaaataattatcttcatatccacatagctttacaaaagctcacgacagggagagtattttcttggttctgtagtaatttcagggggtttactgattggaacccttccttttcctcctctctccagtccagctggcattcagtcctttaaacaatgtggctatgcagtacttttgattactaatgacttctattatcttcttccccattgtgtacagatgggagaatcctcagcacaagtgtctactactattggatggacagcggcagatgttcacagcgcgtcatgattaattagtttaaattgcaaggttctatctgtgaggtagctcaggtagatttaagggcggtagacatgaactgaagtcacgtttgcgcagcgactgaggcattaaccatgttttcatttacacagctcttcgtacatgcagctttttattgtaatagttggaagtgctagttatgttgtagtctcaaagtagggggtaggggaaattggctgatcttaaagtttgagaggtatagtttttttcctgcagtgtaaattacactgagttacggaatgggacaggttctcgtatagtctaaattttgaccctgtttcatatttattttacaaatactacattttatgttttttaaaagtacccctacccttgaaaaatgacaaaccagatacaaactcttaatgggcctgaattgttaacaaaaaattggtttgctttgggactgtctgactagcacactatatttgtactgatgagactgttaacttgaacaggaggtagaatgctgtcttccaatggaaaagaactatattgcgctgctttatcttgtcagaagactaggcaagtgattttgatttggcctccaaacatttgcctttatgtcttactgttagctagcgttattgcctattaagttagttaactggtgaccttaaatagagacttctgtattccatgtgtatgttcagtgtattgcaaagattattataatggctggtcagaggaaccagatactgtcatacttttaagaaaagtatatttagctctgggcaaaataacatcaattggctctccttagttctcagaatctgtcagactggtattattagccaagtctgattttgaattgtttttgtccaaaaaaatttttctcattatgtttcattttgtcaacttaatttcttgtattttattctactgaccttagttttctgacaagattaatccttctcccccgcccttttcccttacctgtacccttcctcaaaatgtaaaatgtgacttcagacaggttgaattccttcatgggctgtgataataaagtgtctaattatcagtcattttagttaatagttactataattttatgacagagcaagcagctagcttgatttgtataatatctagggaatatataaagttgactcagacaaacttgggacttactttccttccagtaattaaagagtagaactgataatactgattattcattaattggaggaaggaacattagtattgaaatgccgttaacattttaaaaaataataattattatcatagccttgccctgaaaccctgattattgttagagagttatttccacgaagtgtttgtcagtttgttggacatttgagaccccaggaaatcccctttctcgtaacgttctccgcttggatctgatctcaacagggtgtcgtagtcattcttcagcacaattcttaattggagaccaagaaccctgggcctttagaggtggtctagcaggagagttccaggtatcaatatgaattcacaactgaattgacattttctttgttttatgagaaaccttatgttgcgcatcagatggctggaaggattggtctgccgaaggctttctagtcccaaattcaatttagttacatagctggatttttaaatcaaattttcctcctctttcacagtaatttctgaaggagatgctgccaatcccccccgcgcctgcgaagcgcagcggctctaggtatacacttcacattgtttctttgcaggtcgcacagcattttaatctgcgcccgcaatgcacaatgcgcgcatgcttgtctgccagtggaagctccatgaacaaaagatagtaattatgccaataaatggtgaaagagcttttggatatttatccaattattttataaatataatgtgcttgaaagaattgtccattgctgaaaatatgaacaaaataggaagtttttttgctgctggaatttgttcatggactttctaggtgctctacttttctccccccaacaggtgctctgctgcgcacagcaaactgaagcgcattgctttggggataaagcgtctcctggacagataaccctcttcagaccaaacctctcctcctgacattctgttctgccatcttatcgtagggagatggtctatctaagataggttttaaaaaaaaatagatttgtcataattggaataggtttgtttttgtttttgtttttgtttttactgtaaatttaaatccccattaatatgccactaaagctgtaactcagagtgggtaatttctattcagaagcactcccctcccccagcaaagaggtatttctattagtaaagcatagtacacccctcttctttaggtctgcctgcagtagccagttaatataagttggtaatctgcagtgcacacccatttaaaaaaatggataccttccccaaactaatccatctccttttttttcttcccacagcgtttgctgccaattgatggggcaaatgatctcttttttcagccacctccactgactcctacctccaaagtttatactatcagaccttattttcctaaggatgaggcatccgtgtacaagatttgcagagaaatgtatgacgatggagtgggtttaccctttcaaagtcagcctgatcttattggagacaagttagtaggagggctgctttccctcagcctggattactgctttgtcctagaagatgaagatggcatatgtggttatgccttgggcactgtagatgtgaccccctttattaaaaaatgtaaaatttcctggatccccttcatgcaggagaagtataccaagccaaatggtgacaaggaactctctgaggctgagaaaataatgttgagtttccatgaagaacaggaagtactgccagaaactttccttgctaatttcccttctctgataaagatggacattcacaaaaaagtaactgacccaagtgtggccaaaagcatgatggcttgcctcctgtcttcactgaaggctaatggctcccggggagctttctgtgaagtgagaccagatgataaaagaattctggaattttacagcaagttaggatgttttgaaattgcaaaaatggaaggatttccaaaggatgtggttatacttggtcggagcctgtgacatttgttgacactgtgaactgtccaaaagtctcttaactgcaccttgtgaatggtagttgaggtcttcatacagttcagcctctagaatggtaacaaatcagccaattggattcgaaacaaagaagactatgtaaaactcacccatcacactttgagactactcactggttggaagaatatagtattgcagcaaatcctgtatgaaagagagatgtgggcttcctttttgagtcttgtgttaggtgctgagaccttttacatgggcttatacagggagagagtcttcaataaatgtagtcagcactattttctgcatccagtgtggttgcgtttctcacctgagagtaatcaagataacatctgtcatcttccttggtttattgagtgaaatgcctctcagtcttaggggacatggcagagatgaaagaaagaaagagtgggtttcagaagtgtcagggtggagtgattccaagtgggatggttgtggcattagtttaagctgaataaataatttcaatttggggcagttattctgctttttgtaaagccgtggccaattgtctcctgtaatgactgttggttcaggcatgttgtactttgtagggacaaatgtgcatttgtttgtggcaaaagcctacaattgacaaacttgtaaatttctttgtatataaactagctgtaacctgactatcctttgtgtttactgtttttgtaaatttttttcctctataaatgaaagggtgttggttcagaatggcactttgaataatgtaaaccagtgaaaagtggattttctttacttttgtctttgggtttggggttgtttttgttctttttgaagttttattatttttaaagtgcctcccacctaggcgtaggccatgaccatttggggtacgagagcctaattttgtaggacttaatctgttgaaaagtgcagttacttctggaaattaacctcaatattaggtcagcatgtgaaatgttggatttgacatgtcaggtagggttcagggactgattggtcccatttgccctcaggtcagttgtttaatctcaagacctgttactactgattttattaaatcagagtctttaattcttgcatgtttgtatctaatttctgaacgaatgagcacactttaaccagttatttacagttacctttttcctttaaccggattgtgaaagcttcatgtattttaatttagattctgtgtttttaagggttctgagcatgaagctggcagatagtcggcaggactcattttttcatcatggctggctgatttctccatagattgataacagtattttgttatcttgcttctctgtagttttgcatcagctgtttaactttgagctgagtgaggggagaggggtaaagagaaagaaacttaagttttctttcacagaactccaccattgtgggctttgagagagccctaaagcattgtacctagtggtacctagtgacttccaaccaaagcctttgagtatgcactaaataggtgagaagaaaggagagaaggtttttaggttagaaacctttaaccgatagaaggatatggtatgttgtaaagctggaaccaagtttgcatttttgagggcttgagatgaagggaagactcttaccagatagtaagacagctgagttttcctcagttttctcgtcttaacactagtggacaattctagcattttgtttggaggatttcagagttaacctcatggaattcaggattttttagcaagtttgcttttggttttatcttggcttttagtaatcatgttggctggtctggtcacaggtgactgtgaaacagatgccctggtcttgctttcatcactctaggatcatgaagtgctatgctatttcctggttatgaatattaaggttggaattacatttttattgattgtttggatcagagctcagttcctgtagaaaacgaactgtaaaagaccatgcaagaggcaaaataaaacttgaagtgaatgct

SEQ ID NO: 329239 - DNA, 4280 bp, Homo sapiens
gttcttataattcattcttatagggatttaaacttaagtttctaaggcccttaggaattttgaacctgaaatctggattattgagcttgaaatgtattacagaaaacatttgatattcagtttttaatttaagaattattaaaagttaaattcttaatgatacacagtattgtttctttctcttctcagggtttatctctgcactgagcatttatggtggtagctttccaaaattatatagatacctcttacacaatctcaagctcttacagcaagcttgtccagcctgtggctcaacacaagtttataaactttcttaaaacattgtgagtttttttattttttattttttttaagctcatcaactatcattagtgtattttatgtgtggcccaagacagttcttccagtgtggcccagggaagccaaaagattggacaccccttataacatcttagaagttttaaataattatcttcatatccacatagctttacaaaagctcacgacagggagagtattttcttggttctgtagtaatttcagggggtttactgattggaacccttccttttcctcctctctccagtccagctggcattcagtcctttaaacaatgtggctatgcagtacttttgattactaatgacttctattatcttcttccccattgtgtacagatgggagaatcctcagcacaagtgtctactactattggatggacagcggcagatgttcacagcgcgtcatgattaattagtttaaattgcaaggttctatctgtgaggtagctcaggtagatttaagggcggtagacatgaactgaagtcacgtttgccgcagcggctctaggtatacacttcacattgtttctttgcaggtcgcacagcattttaatctgcgcccgcaatgcacaatgcgcgcatgcttgtctgccagtggaagctccatgaacaaaagatagtaattatgccaataaatggtgaaagagcttttggatatttatccaattattttataaatataatgtgcttgaaagaattgtccattgctgaaaatatgaacaaaataggaagtttttttgctgctggaatttgttcatggactttctaggtgctctacttttctccccccaacaggtgctctgctgcgcacagcaaactgaagcgcattgctttggggataaagcgtctcctggacagataaccctcttcagaccaaacctctcctcctgacattctgttctgccatcttatcgtagggagatggtctatctaagataggttttaaaaaaaaatagatttgtcataattggaataggtttgtttttgtttttgtttttgtttttactgtaaatttaaatccccattaatatgccactaaagctgtaactcagagtgggtaatttctattcagaagcactcccctcccccagcaaagaggtatttctattagtaaagcatagtacacccctcttctttaggtctgcctgcagtagccagttaatataagttggtaatctgcagtgcacacccatttaaaaaaatggataccttccccaaactaatccatctccttttttttcttcccacagcgtttgctgccaattgatggggcaaatgatctcttttttcagccacctccactgactcctacctccaaagtttatactatcagaccttattttcctaaggatgaggcatccgtgtacaagatttgcagagaaatgtatgacgatggagtgggtttaccctttcaaagtcagcctgatcttattggagacaagttagtaggagggctgctttccctcagcctggattactgctttgtcctagaagatgaagatggcatatgtggttatgccttgggcactgtagatgtgaccccctttattaaaaaatgtaaaatttcctggatccccttcatgcaggagaagtataccaagccaaatggtgacaaggaactctctgaggctgagaaaataatgttgagtttccatgaagaacaggaagtactgccagaaactttccttgctaatttcccttctctgataaagatggacattcacaaaaaagtaactgacccaagtgtggccaaaagcatgatggcttgcctcctgtcttcactgaaggctaatggctcccggggagctttctgtgaagtgagaccagatgataaaagaattctggaattttacagcaagttaggatgttttgaaattgcaaaaatggaaggatttccaaaggatgtggttatacttggtcggagcctgtgacatttgttgacactgtgaactgtccaaaagtctcttaactgcaccttgtgaatggtagttgaggtcttcatacagttcagcctctagaatggtaacaaatcagccaattggattcgaaacaaagaagactatgtaaaactcacccatcacactttgagactactcactggttggaagaatatagtattgcagcaaatcctgtatgaaagagagatgtgggcttcctttttgagtcttgtgttaggtgctgagaccttttacatgggcttatacagggagagagtcttcaataaatgtagtcagcactattttctgcatccagtgtggttgcgtttctcacctgagagtaatcaagataacatctgtcatcttccttggtttattgagtgaaatgcctctcagtcttaggggacatggcagagatgaaagaaagaaagagtgggtttcagaagtgtcagggtggagtgattccaagtgggatggttgtggcattagtttaagctgaataaataatttcaatttggggcagttattctgctttttgtaaagccgtggccaattgtctcctgtaatgactgttggttcaggcatgttgtactttgtagggacaaatgtgcatttgtttgtggcaaaagcctacaattgacaaacttgtaaatttctttgtatataaactagctgtaacctgactatcctttgtgtttactgtttttgtaaatttttttcctctataaatgaaagggtgttggttcagaatggcactttgaataatgtaaaccagtgaaaagtggattttctttacttttgtctttgggtttggggttgtttttgttctttttgaagttttattatttttaaagtgcctcccacctaggcgtaggccatgaccatttggggtacgagagcctaattttgtaggacttaatctgttgaaaagtgcagttacttctggaaattaacctcaatattaggtcagcatgtgaaatgttggatttgacatgtcaggtagggttcagggactgattggtcccatttgccctcaggtcagttgtttaatctcaagacctgttactactgattttattaaatcagagtctttaattcttgcatgtttgtatctaatttctgaacgaatgagcacactttaaccagttatttacagttacctttttcctttaaccggattgtgaaagcttcatgtattttaatttagattctgtgtttttaagggttctgagcatgaagctggcagatagtcggcaggactcattttttcatcatggctggctgatttctccatagattgataacagtattttgttatcttgcttctctgtagttttgcatcagctgtttaactttgagctgagtgaggggagaggggtaaagagaaagaaacttaagttttctttcacagaactccaccattgtgggctttgagagagccctaaagcattgtacctagtggtacctagtgacttccaaccaaagcctttgagtatgcactaaataggtgagaagaaaggagagaaggtttttaggttagaaacctttaaccgatagaaggatatggtatgttgtaaagctggaaccaagtttgcatttttgagggcttgagatgaagggaagactcttaccagatagtaagacagctgagttttcctcagttttctcgtcttaacactagtggacaattctagcattttgtttggaggatttcagagttaacctcatggaattcaggattttttagcaagtttgcttttggttttatcttggcttttagtaatcatgttggctggtctggtcacaggtgactgtgaaacagatgccctggtcttgctttcatcactctaggatcatgaagtgctatgctatttcctggttatgaatattaaggttggaattacatttttattgattgtttggatcagagctcagttcctgtagaaaacgaactgtaaaagaccatgcaagaggcaaaataaaacttgaagtgaatgct

SEQ ID NO: 329240 - DNA, 2918 bp, Homo sapiens
tttttttttaagacagagtctcgctctgttgcccaggctggagtgcagtggcgccatctcagctcactgcaagctccgcctcctgggttcacgccattctcttgcctcagcctcccgagtagctgggactacaggtgcccgccaacacgacctaattttttgtatttttttttagtagagacagggtttcactgtgtcagccaggatggtcttgatctctggcccaagcttttaaaagtgaaaacggtggccaggcacggcagcacacgcttgtaattctagcacttcaggaggccgagatagaaggatcactcgagcccaggaattcgagaccagccctgacgatataaatagggaaagagagagagagagagagagagcgcgtgcacgcgagggagaatgcctgcccctctccagcctggccaacagaaggagatcctgtctcaaagaaagtgaaaatgcttcagctagaattataggataatcctgtgtgagataatttacatagtgactggaagagttattaaatattgctttcttgttgctaagttctgtagttgggttagatatctaatgcgtaactattgtgaaagtcaagagattctaatttttccagaaaataatgttgagtttccatgaagaacaggaagtactgccagaaactttccttgctaatttcccttctctgataaagatggacattcacaaaaaagtaactgacccaagtgtggccaaaagcatgatggcttgcctcctgtcttcactgaaggctaatggctcccggggagctttctgtgaagtgagaccagatgataaaagaattctggaattttacagcaagttaggatgttttgaaattgcaaaaatggaaggatttccaaaggatgtggttatacttggtcggagcctgtgacatttgttgacactgtgaactgtccaaaagtctcttaactgcaccttgtgaatggtagttgaggtcttcatacagttcagcctctagaatggtaacaaatcagccaattggattcgaaacaaagaagactatgtaaaactcacccatcacactttgagactactcactggttggaagaatatagtattgcagcaaatcctgtatgaaagagagatgtgggcttcctttttgagtcttgtgttaggtgctgagaccttttacatgggcttatacagggagagagtcttcaataaatgtagtcagcactattttctgcatccagtgtggttgcgtttctcacctgagagtaatcaagataacatctgtcatcttccttggtttattgagtgaaatgcctctcagtcttaggggacatggcagagatgaaagaaagaaagagtgggtttcagaagtgtcagggtggagtgattccaagtgggatggttgtggcattagtttaagctgaataaataatttcaatttggggcagttattctgctttttgtaaagccgtggccaattgtctcctgtaatgactgttggttcaggcatgttgtactttgtagggacaaatgtgcatttgtttgtggcaaaagcctacaattgacaaacttgtaaatttctttgtatataaactagctgtaacctgactatcctttgtgtttactgtttttgtaaatttttttcctctataaatgaaagggtgttggttcagaatggcactttgaataatgtaaaccagtgaaaagtggattttctttacttttgtctttgggtttggggttgtttttgttctttttgaagttttattatttttaaagtgcctcccacctaggcgtaggccatgaccatttggggtacgagagcctaattttgtaggacttaatctgttgaaaagtgcagttacttctggaaattaacctcaatattaggtcagcatgtgaaatgttggatttgacatgtcaggtagggttcagggactgattggtcccatttgccctcaggtcagttgtttaatctcaagacctgttactactgattttattaaatcagagtctttaattcttgcatgtttgtatctaatttctgaacgaatgagcacactttaaccagttatttacagttacctttttcctttaaccggattgtgaaagcttcatgtattttaatttagattctgtgtttttaagggttctgagcatgaagctggcagatagtcggcaggactcattttttcatcatggctggctgatttctccatagattgataacagtattttgttatcttgcttctctgtagttttgcatcagctgtttaactttgagctgagtgaggggagaggggtaaagagaaagaaacttaagttttctttcacagaactccaccattgtgggctttgagagagccctaaagcattgtacctagtggtacctagtgacttccaaccaaagcctttgagtatgcactaaataggtgagaagaaaggagagaaggtttttaggttagaaacctttaaccgatagaaggatatggtatgttgtaaagctggaaccaagtttgcatttttgagggcttgagatgaagggaagactcttaccagatagtaagacagctgagttttcctcagttttctcgtcttaacactagtggacaattctagcattttgtttggaggatttcagagttaacctcatggaattcaggattttttagcaagtttgcttttggttttatcttggcttttagtaatcatgttggctggtctggtcacaggtgactgtgaaacagatgccctggtcttgctttcatcactctaggatcatgaagtgctatgctatttcctggttatgaatattaaggttggaattacatttttattgattgtttggatcagagctcagttcctgtagaaaacgaactgtaaaagaccatgcaagaggcaaaataaaacttgaagtgaatgct

SEQ ID NO: 329241 - DNA, 2489 bp, Homo sapiens
  misc_feature (10)..(10): n is a, c, g, or t
ttaccaaaanaccatatccttctatggggttaaagggtttctaacctaaaaaccttctctcctttcttctcacctatttagtgcatactcaaaggctttggttggaagtcactaggtaccactaggtacaatgctttagggctctctcaaagcccacaatggtgacaaggaactctctgaggctgagaaaataatgttgagtttccatgaagaacaggaagtactgccagaaactttccttgctaatttcccttctctgataaagatggacattcacaaaaaagtaactgacccaagtgtggccaaaagcatgatggcttgcctcctgtcttcactgaaggctaatggctcccggggagctttctgtgaagtgagaccagatgataaaagaattctggaattttacagcaagttaggatgttttgaaattgcaaaaatggaaggatttccaaaggatgtggttatacttggtcggagcctgtgacatttgttgacactgtgaactgtccaaaagtctcttaactgcaccttgtgaatggtagttgaggtcttcatacagttcagcctctagaatggtaacaaatcagccaattggattcgaaacaaagaagactatgtaaaactcacccatcacactttgagactactcactggttggaagaatatagtattgcagcaaatcctgtatgaaagagagatgtgggcttcctttttgagtcttgtgttaggtgctgagaccttttacatgggcttatacagggagagagtcttcaataaatgtagtcagcactattttctgcatccagtgtggttgcgtttctcacctgagagtaatcaagataacatctgtcatcttccttggtttattgagtgaaatgcctctcagtcttaggggacatggcagagatgaaagaaagaaagagtgggtttcagaagtgtcagggtggagtgattccaagtgggatggttgtggcattagtttaagctgaataaataatttcaatttggggcagttattctgctttttgtaaagccgtggccaattgtctcctgtaatgactgttggttcaggcatgttgtactttgtagggacaaatgtgcatttgtttgtggcaaaagcctacaattgacaaacttgtaaatttctttgtatataaactagctgtaacctgactatcctttgtgtttactgtttttgtaaatttttttcctctataaatgaaagggtgttggttcagaatggcactttgaataatgtaaaccagtgaaaagtggattttctttacttttgtctttgggtttggggttgtttttgttctttttgaagttttattatttttaaagtgcctcccacctaggcgtaggccatgaccatttggggtacgagagcctaattttgtaggacttaatctgttgaaaagtgcagttacttctggaaattaacctcaatattaggtcagcatgtgaaatgttggatttgacatgtcaggtagggttcagggactgattggtcccatttgccctcaggtcagttgtttaatctcaagacctgttactactgattttattaaatcagagtctttaattcttgcatgtttgtatctaatttctgaacgaatgagcacactttaaccagttatttacagttacctttttcctttaaccggattgtgaaagcttcatgtattttaatttagattctgtgtttttaagggttctgagcatgaagctggcagatagtcggcaggactcattttttcatcatggctggctgatttctccatagattgataacagtattttgttatcttgcttctctgtagttttgcatcagctgtttaactttgagctgagtgaggggagaggggtaaagagaaagaaacttaagttttctttcacagaactccaccattgtgggctttgagagagccctaaagcattgtacctagtggtacctagtgacttccaaccaaagcctttgagtatgcactaaataggtgagaagaaaggagagaaggtttttaggttagaaacctttaaccgatagaaggatatggtatgttgtaaagctggaaccaagtttgcatttttgagggcttgagatgaagggaagactcttaccagatagtaagacagctgagttttcctcagttttctcgtcttaacactagtggacaattctagcattttgtttggaggatttcagagttaacctcatggaattcaggattttttagcaagtttgcttttggttttatcttggcttttagtaatcatgttggctggtctggtcacaggtgactgtgaaacagatgccctggtcttgctttcatcactctaggatcatgaagtgctatgctatttcctggttatgaatattaaggttggaattacatttttattgattgtttggatcagagctcagttcctgtagaaaacgaactgtaaaagaccatgcaagaggcaaaataaaacttgaagtgaatgct

SEQ ID NO: 329242 - DNA, 2265 bp, Homo sapiens
  misc_feature (118)..(118): n is a, c, g, or t
  misc_feature (122)..(122): n is a, c, g, or t
ggccattagatgtacatgacggtagcgcttctctgttactgatggtttttcactagacggagagcgtgagccagtgtggctagagcatgatggcttgcagcgtgtcttcactgaaggntaanggctcccggggagctttctgtgaagtgagaccagatgataaaagaattctggaattttacagcaagttaggatgttttgaaattgcaaaaatggaaggatttccaaaggatgtggttatacttggtcggagcctgtgacatttgttgacactgtgaactgtccaaaagtctcttaactgcaccttgtgaatggtagttgaggtcttcatacagttcagcctctagaatggtaacaaatcagccaattggattcgaaacaaagaagactatgtaaaactcacccatcacactttgagactactcactggttggaagaatatagtattgcagcaaatcctgtatgaaagagagatgtgggcttcctttttgagtcttgtgttaggtgctgagaccttttacatgggcttatacagggagagagtcttcaataaatgtagtcagcactattttctgcatccagtgtggttgcgtttctcacctgagagtaatcaagataacatctgtcatcttccttggtttattgagtgaaatgcctctcagtcttaggggacatggcagagatgaaagaaagaaagagtgggtttcagaagtgtcagggtggagtgattccaagtgggatggttgtggcattagtttaagctgaataaataatttcaatttggggcagttattctgctttttgtaaagccgtggccaattgtctcctgtaatgactgttggttcaggcatgttgtactttgtagggacaaatgtgcatttgtttgtggcaaaagcctacaattgacaaacttgtaaatttctttgtatataaactagctgtaacctgactatcctttgtgtttactgtttttgtaaatttttttcctctataaatgaaagggtgttggttcagaatggcactttgaataatgtaaaccagtgaaaagtggattttctttacttttgtctttgggtttggggttgtttttgttctttttgaagttttattatttttaaagtgcctcccacctaggcgtaggccatgaccatttggggtacgagagcctaattttgtaggacttaatctgttgaaaagtgcagttacttctggaaattaacctcaatattaggtcagcatgtgaaatgttggatttgacatgtcaggtagggttcagggactgattggtcccatttgccctcaggtcagttgtttaatctcaagacctgttactactgattttattaaatcagagtctttaattcttgcatgtttgtatctaatttctgaacgaatgagcacactttaaccagttatttacagttacctttttcctttaaccggattgtgaaagcttcatgtattttaatttagattctgtgtttttaagggttctgagcatgaagctggcagatagtcggcaggactcattttttcatcatggctggctgatttctccatagattgataacagtattttgttatcttgcttctctgtagttttgcatcagctgtttaactttgagctgagtgaggggagaggggtaaagagaaagaaacttaagttttctttcacagaactccaccattgtgggctttgagagagccctaaagcattgtacctagtggtacctagtgacttccaaccaaagcctttgagtatgcactaaataggtgagaagaaaggagagaaggtttttaggttagaaacctttaaccgatagaaggatatggtatgttgtaaagctggaaccaagtttgcatttttgagggcttgagatgaagggaagactcttaccagatagtaagacagctgagttttcctcagttttctcgtcttaacactagtggacaattctagcattttgtttggaggatttcagagttaacctcatggaattcaggattttttagcaagtttgcttttggttttatcttggcttttagtaatcatgttggctggtctggtcacaggtgactgtgaaacagatgccctggtcttgctttcatcactctaggatcatgaagtgctatgctatttcctggttatgaatattaaggttggaattacatttttattgattgtttggatcagagctcagttcctgtagaaaacgaactgtaaaagaccatgcaagaggcaaaataaaacttgaagtgaatgct

SEQ ID NO: 329243 - DNA, 2078 bp, Homo sapiens
ccctgctgtgactatttgttgcacgtattatattgtgcaacaatgaaagaggagggttggtcggagcctgtgacatttgttgacactgtgaactgtccaaaagtctcttaactgcaccttgtgaatggtagttgaggtcttcatacagttcagcctctagaatggtaacaaatcagccaattggattcgaaacaaagaagactatgtaaaactcacccatcacactttgagactactcactggttggaagaatatagtattgcagcaaatcctgtatgaaagagagatgtgggcttcctttttgagtcttgtgttaggtgctgagaccttttacatgggcttatacagggagagagtcttcaataaatgtagtcagcactattttctgcatccagtgtggttgcgtttctcacctgagagtaatcaagataacatctgtcatcttccttggtttattgagtgaaatgcctctcagtcttaggggacatggcagagatgaaagaaagaaagagtgggtttcagaagtgtcagggtggagtgattccaagtgggatggttgtggcattagtttaagctgaataaataatttcaatttggggcagttattctgctttttgtaaagccgtggccaattgtctcctgtaatgactgttggttcaggcatgttgtactttgtagggacaaatgtgcatttgtttgtggcaaaagcctacaattgacaaacttgtaaatttctttgtatataaactagctgtaacctgactatcctttgtgtttactgtttttgtaaatttttttcctctataaatgaaagggtgttggttcagaatggcactttgaataatgtaaaccagtgaaaagtggattttctttacttttgtctttgggtttggggttgtttttgttctttttgaagttttattatttttaaagtgcctcccacctaggcgtaggccatgaccatttggggtacgagagcctaattttgtaggacttaatctgttgaaaagtgcagttacttctggaaattaacctcaatattaggtcagcatgtgaaatgttggatttgacatgtcaggtagggttcagggactgattggtcccatttgccctcaggtcagttgtttaatctcaagacctgttactactgattttattaaatcagagtctttaattcttgcatgtttgtatctaatttctgaacgaatgagcacactttaaccagttatttacagttacctttttcctttaaccggattgtgaaagcttcatgtattttaatttagattctgtgtttttaagggttctgagcatgaagctggcagatagtcggcaggactcattttttcatcatggctggctgatttctccatagattgataacagtattttgttatcttgcttctctgtagttttgcatcagctgtttaactttgagctgagtgaggggagaggggtaaagagaaagaaacttaagttttctttcacagaactccaccattgtgggctttgagagagccctaaagcattgtacctagtggtacctagtgacttccaaccaaagcctttgagtatgcactaaataggtgagaagaaaggagagaaggtttttaggttagaaacctttaaccgatagaaggatatggtatgttgtaaagctggaaccaagtttgcatttttgagggcttgagatgaagggaagactcttaccagatagtaagacagctgagttttcctcagttttctcgtcttaacactagtggacaattctagcattttgtttggaggatttcagagttaacctcatggaattcaggattttttagcaagtttgcttttggttttatcttggcttttagtaatcatgttggctggtctggtcacaggtgactgtgaaacagatgccctggtcttgctttcatcactctaggatcatgaagtgctatgctatttcctggttatgaatattaaggttggaattacatttttattgattgtttggatcagagctcagttcctgtagaaaacgaactgtaaaagaccatgcaagaggcaaaataaaacttgaagtgaatgct

SEQ ID NO: 329244 - DNA, 4928 bp, Homo sapiens
cagcgcaagcgcagtgcggataaacaggaagcgggcggtggaggcagcagcagagggagagctcggggcttggaggggaaacagcggaagacctaagattatcgggagggcagcagaggcagagaacgaggacaggacccttggccgtcttcttccagggaacgagaggtcacagcctcgctctccgcttatgcttctggcgccccagcttaaagccgaggctgcggctgacaaagggctcgcgccggtgccgccgcccttctcatccgggcattcgggtccctgcgagaaggagggggaaggacagagggggaggggaaggagccggaggggcgcacacttggagctgaagccctctccagggctccgggccggtgccccaacggacagaggtcgaggaggacccgcagaggtggcagcggccgggggcaggaggatggtgcagaaggagagtcaagcgacgttggaggagcgggagagcgagctcagctccaaccctgccgcctctgcgggggcatcgctggagccgccggcagctccggcacccggagaagacaaccccgccggggctgggggagcggcggtggccggggctgcaggaggggctcggcggttcctctgcggtgtggtggaaggattttatggaagaccttgggttatggaacagagaaaagaactctttagaaggctccagaaatgggaattaaatacatacttgtatgccccaaaagatgactacaaacataggatgttttggcgagagatgtattcagtggaggaagctgagcaacttatgactctcatctctgctgcacgagaatatgagatagagttcatctatgcgatctcacctggattggatatcactttttctaaccccaaggaagtatccacattgaaacgtaaattggaccaggtttctcagtttgggtgcagatcatttgctttgctttttgatgatatagaccataatatgtgtgcagcagacaaagaggtattcagttcttttgctcatgcccaagtctccatcacaaatgaaatctatcagtacctaggagagccagaaactttcctcttctgtcccacagaatactgtggcactttctgttatccaaatgtgtctcagtctccatatttaaggactgtgggtgaaaagcttctacctggaattgaagtgctttggacaggtcccaaagttgtttctaaagaaattccagtagagtccatcgaagaggtttctaagattattaagagagctccagtaatctgggataacattcatgctaatgattatgatcagaagagactgtttctgggcccgtacaaaggaagatccacagaactcatcccacggttaaaaggagtcctcactaatccaaattgtgaatttgaagccaactacgttgctatccacacccttgccacctggtacaaatcaaacatgaatggagtgagaaaagatgtagtgatgactgacagtgaagatagtactgtgtccatccagataaaattagaaaatgaaggcagtgatgaagatattgaaactgatgtactctatagtccacagatggctctaaagctagcattaacagaatggttgcaagagtttggtgtgcctcatcaatacagcagtaggcaagttgcacacagtggagctaaagcaagtgtagttgatgggactcctttagttgcagcaccctctttaaatgccacaaccgtagtaacaacagtttatcaggagcccattatgagccagggagcagccttgagtggtgagcctactactctgaccaaggaagaagaaaagaaacagcctgatgaagaacccatggacatggtggtggaaaaacaagaagaaacggaccacaagaatgacaatcaaatactgagtgaaattgttgaagcgaaaatggcagaggaattgaaaccaatggacactgataaagagagcatagctgaatcaaaatccccagagatgtccatgcaagaagattgtattagtgacattgcccccatgcaaactgatgaacagacaaacaaggagcagtttgtgccaggtccaaatgaaaagcctttgtacactgcggaaccagtgaccctggaggatttgcagttacttgctgatctattctaccttccttacgagcatggacccaaaggagcacagatgttacgggaatttcaatggcttcgagcaaatagtagtgttgtcagtgtcaattgcaaaggaaaagactctgaaaaaattgaagaatggcggtcacgagcagccaagtttgaagagatgtgtggactagtgatgggaatgttcactcggctctccaattgtgccaacaggacaattctttatgacatgtactcctatgtttgggatatcaagagtataatgtctatggtgaagtcttttgtacagtggttagggtgtcgtagtcattcttcagcacaattcttaattggagaccaagaaccctgggcctttagaggtggtctagcaggagagttccagcgtttgctgccaattgatggggcaaatgatctcttttttcagccacctccactgactcctacctccaaagtttatactatcagaccttattttcctaaggatgaggcatccgtgtacaagatttgcagagaaatgtatgacgatggagtgggtttaccctttcaaagtcagcctgatcttattggagacaagttagtaggagggctgctttccctcagcctggattactgctttgtcctagaagatgaagatggcatatgtggttatgccttgggcactgtagatgtgaccccctttattaaaaaatgtaaaatttcctggatccccttcatgcaggagaagtataccaagccaaatggtgacaaggaactctctgaggctgagaaaataatgttgagtttccatgaagaacaggaagtactgccagaaactttccttgctaatttcccttctctgataaagatggacattcacaaaaaagtaactgacccaagtgtggccaaaagcatgatggcttgcctcctgtcttcactgaaggctaatggctcccggggagctttctgtgaagtgagaccagatgataaaagaattctggaattttacagcaagttaggatgttttgaaattgcaaaaatggaaggatttccaaaggatgtggttatacttggtcggagcctgtgacatttgttgacactgtgaactgtccaaaagtctcttaactgcaccttgtgaatggtagttgaggtcttcatacagttcagcctctagaatggtaacaaatcagccaattggattcgaaacaaagaagactatgtaaaactcacccatcacactttgagactactcactggttggaagaatatagtattgcagcaaatcctgtatgaaagagagatgtgggcttcctttttgagtcttgtgttaggtgctgagaccttttacatgggcttatacagggagagagtcttcaataaatgtagtcagcactattttctgcatccagtgtggttgcgtttctcacctgagagtaatcaagataacatctgtcatcttccttggtttattgagtgaaatgcctctcagtcttaggggacatggcagagatgaaagaaagaaagagtgggtttcagaagtgtcagggtggagtgattccaagtgggatggttgtggcattagtttaagctgaataaataatttcaatttggggcagttattctgctttttgtaaagccgtggccaattgtctcctgtaatgactgttggttcaggcatgttgtactttgtagggacaaatgtgcatttgtttgtggcaaaagcctacaattgacaaacttgtaaatttctttgtatataaactagctgtaacctgactatcctttgtgtttactgtttttgtaaatttttttcctctataaatgaaagggtgttggttcagaatggcactttgaataatgtaaaccagtgaaaagtggattttctttacttttgtctttgggtttggggttgtttttgttctttttgaagttttattatttttaaagtgcctcccacctaggcgtaggccatgaccatttggggtacgagagcctaattttgtaggacttaatctgttgaaaagtgcagttacttctggaaattaacctcaatattaggtcagcatgtgaaatgttggatttgacatgtcaggtagggttcagggactgattggtcccatttgccctcaggtcagttgtttaatctcaagacctgttactactgattttattaaatcagagtctttaattcttgcatgtttgtatctaatttctgaacgaatgagcacactttaaccagttatttacagttacctttttcctttaaccggattgtgaaagcttcatgtattttaatttagattctgtgtttttaagggttctgagcatgaagctggcagatagtcggcaggactcattttttcatcatggctggctgatttctccatagattgataacagtattttgttatcttgcttctctgtagttttgcatcagctgtttaactttgagctgagtgaggggagaggggtaaagagaaagaaacttaagttttctttcacagaactccaccattgtgggctttgagagagccctaaagcattgtacctagtggtacctagtgacttccaaccaaagcctttgagtatgcactaaataggtgagaagaaaggagagaaggtttttaggttagaaacctttaaccgatagaaggatatggtatgttgtaaagctggaaccaagtttgcatttttgagggcttgagatgaagggaagactcttaccagatagtaagacagctgagttttcctcagttttctcgtcttaacactagtgacttatctagctgataatctgggtcctctagatacgccgcggcatcgctcct

SEQ ID NO: 329245 - DNA, 4694 bp, Homo sapiens
cagcgcaagcgcagtgcggataaacaggaagcgggcggtggaggcagcagcagagggagagctcggggcttggaggggaaacagcggaagacctaagattatcgggagggcagcagaggcagagaacgaggacaggacccttggccgtcttcttccagggaacgagaggtcacagcctcgctctccgcttatgcttctggcgccccagcttaaagccgaggctgcggctgacaaagggctcgcgccggtgccgccgcccttctcatccgggcattcgggtccctgcgagaaggagggggaaggacagagggggaggggaaggagccggaggggcgcacacttggagctgaagccctctccagggctccgggccggtgccccaacggacagaggtcgaggaggacccgcagaggtggcagcggccgggggcaggaggatggtgcagaaggagagtcaagcgacgttggaggagcgggagagcgagctcagctccaaccctgccgcctctgcgggggcatcgctggagccgccggcagctccggcacccggagaagacaaccccgccggggctgggggagcggcggtggccggggctgcaggaggggctcggcggttcctctgcggtgtggtggaaggattttatggaagaccttgggttatggaacagagaaaagaactctttagaaggctccagaaatgggaattaaatacatacttgtatgccccaaaagatgactacaaacataggatgttttggcgagagatgtattcagtggaggaagctgagcaacttatgactctcatctctgctgcacgagaatatgagatagagttcatctatgcgatctcacctggattggatatcactttttctaaccccaaggaagtatccacattgaaacgtaaattggaccaggtttctcagtttgggtgcagatcatttgctttgctttttgatgatatagaccataatatgtgtgcagcagacaaagaggtattcagttcttttgctcatgcccaagtctccatcacaaatgaaatctatcagtacctaggagagccagaaactttcctcttctgtcccacagaatactgtggcactttctgttatccaaatgtgtctcagtctccatatttaaggactgtgggtgaaaagcttctacctggaattgaagtgctttggacaggtcccaaagttgtttctaaagaaattccagtagagtccatcgaagaggtttctaagattattaagagagctccagtaatctgggataacattcatgctaatgattatgatcagaagagactgtttctgggcccgtacaaaggaagatccacagaactcatcccacggttaaaaggagtcctcactaatccaaattgtgaatttgaagccaactacgttgctatccacacccttgccacctggtacaaatcaaacatgaatggagtgagaaaagatgtagtgatgactgacagtgaagatagtactgtgtccatccagataaaattagaaaatgaaggcagtgatgaagatattgaaactgatgtactctatagtccacagatggctctaaagctagcattaacagaatggttgcaagagtttggtgtgcctcatcaatacagcagtaggcaagttgcacacagtggagctaaagcaagtgtagttgatgggactcctttagttgcagcaccctctttaaatgccacaaccgtagtaacaacagtttatcaggagcccattatgagccagggagcagccttgagtggtgagcctactactctgaccaaggaagaagaaaagaaacagcctgatgaagaacccatggacatggtggtggaaaaacaagaagaaacggaccacaagaatgacaatcaaatactgagtgaaattgttgaagcgaaaatggcagaggaattgaaaccaatggacactgataaagagagcatagctgaatcaaaatccccagagatgtccatgcaagaagattgtattagtgacattgcccccatgcaaactgatgaacagacaaacaaggagcagtttgtgccaggtccaaatgaaaagcctttgtacactgcggaaccagtgaccctggaggatttgcagttacttgctgatctattctaccttccttacgagcatggacccaaaggagcacagatgttacgggaatttcaatggcttcgagcaaatagtagtgttgtcagtgtcaattgcaaaggaaaagactctgaaaaaattgaagaatggcggtcacgagcagccaagtttgaagagatgtgtggactagtgatgggaatgttcactcggctctccaattgtgccaacaggacaattctttatgacatgtactcctatgtttgggatatcaagagtataatgtctatggtgaagtcttttgtacagtggttagggtgtcgtagtcattcttcagcacaattcttaattggagaccaagaaccctgggcctttagaggtggtctagcaggagagttccagcgtttgctgccaattgatggggcaaatgatctcttttttcagccacctccactgactcctacctccaaagtttatactatcagaccttattttcctaaggatgaggcatccgtgtacaagatttgcagagaaatgtatgacgatggagtgggtttaccctttcaaagtcagcctgatcttattggagacaagttagtaggagggctgctttccctcagcctggattactgctttgtcctagaagatgaagatggcatatgtggttatgccttgggcactgtagatgtgaccccctttattaaaaaatgtaaaatttcctggatccccttcatgcaggagaagtataccaagccaaatggtgacaaggaactctctgaggctgagaaaataatgttgagtttccatgaagaacaggaagtactgccagaaactttccttgctaatttcccttctctgataaagatggacattcacaaaaaagtaactgacccaagtgtggccaaaagcatgatggcttgcctcctgtcttcactgaaggctaatggctcccggggagctttctgtgaagtgagaccagatgataaaagaattctggaattttacagcaagttaggatgttttgaaattgcaaaaatggaaggatttccaaaggatgtggttatacttggtcggagcctgtgacatttgttgacactgtgaactgtccaaaagtctcttaactgcaccttgtgaatggtagttgaggtcttcatacagttcagcctctagaatggtaacaaatcagccaattggattcgaaacaaagaagactatgtaaaactcacccatcacactttgagactactcactggttggaagaatatagtattgcagcaaatcctgtatgaaagagagatgtgggcttcctttttgagtcttgtgttaggtgctgagaccttttacatgggcttatacagggagagagtcttcaataaatgtagtcagcactattttctgcatccagtgtggttgcgtttctcacctgagagtaatcaagataacatctgtcatcttccttggtttattgagtgaaatgcctctcagtcttaggggacatggcagagatgaaagaaagaaagagtgggtttcagaagtgtcagggtggagtgattccaagtgggatggttgtggcattagtttaagctgaataaataatttcaatttggggcagttattctgctttttgtaaagccgtggccaattgtctcctgtaatgactgttggttcaggcatgttgtactttgtagggacaaatgtgcatttgtttgtggcaaaagcctacaattgacaaacttgtaaatttctttgtatataaactagctgtaacctgactatcctttgtgtttactgtttttgtaaatttttttcctctataaatgaaagggtgttggttcagaatggcactttgaataatgtaaaccagtgaaaagtggattttctttacttttgtctttgggtttggggttgtttttgttctttttgaagttttattatttttaaagtgcctcccacctaggcgtaggccatgaccatttggggtacgagagcctaattttgtaggacttaatctgttgaaaagtgcagttacttctggaaattaacctcaatattaggtcagcatgtgaaatgttggatttgacatgtcaggtagggttcagggactgattggtcccatttgccctcaggtcagttgtttaatctcaagacctgttactactgattttattaaatcagagtctttaattcttgcatgtttgtatctaatttctgaacgaatgagcacaccataaaaaaaaaaaaaaaaaaaaaaacaaaaaaaaaaaaaaagggggggggggaaaaaaaaaccccgggggggccccaattatgggtcccgctttttgtaaaaagggggcccccaaagggcgcgggaaaaaaaaggaacacgggcgggggttcacacccgcgccgggggacacagcgcgtccggcgcctttggggacgcctccccctcgtcgcgggcgccaatcggcccccacaaagaattcagcccggaaaaacattccgtagtcggggcccccccgccactcgcggtgaaccgctctggtattctagccgctcatcatcatctcatcaccaagcacacggcagcacagccacaccccctctg

SEQ ID NO: 329246 - DNA, 3876 bp, Homo sapiens
cagcgcaagcgcagtgcggataaacaggaagcgggcggtggaggcagcagcagagggagagctcggggcttggaggggaaacagcggaagacctaagattatcgggagggcagcagaggcagagaacgaggacaggacccttggccgtcttcttccagggaacgagaggtcacagcctcgctctccgcttatgcttctggcgccccagcttaaagccgaggctgcggctgacaaagggctcgcgccggtgccgccgcccttctcatccgggcattcgggtccctgcgagaaggagggggaaggacagagggggaggggaaggagccggaggggcgcacacttggagctgaagccctctccagggctccgggccggtgccccaacggacagaggtcgaggaggacccgcagaggtggcagcggccgggggcaggaggatggtgcagaaggagagtcaagcgacgttggaggagcgggagagcgagctcagctccaaccctgccgcctctgcgggggcatcgctggagccgccggcagctccggcacccggagaagacaaccccgccggggctgggggagcggcggtggccggggctgcaggaggggctcggcggttcctctgcggtgtggtggaaggattttatggaagaccttgggttatggaacagagaaaagaactctttagaaggctccagaaatgggaattaaatacatacttgtatgccccaaaagatgactacaaacataggatgttttggcgagagatgtattcagtggaggaagctgagcaacttatgactctcatctctgctgcacgagaatatgagatagagttcatctatgcgatctcacctggattggatatcactttttctaaccccaaggaagtatccacattgaaacgtaaattggaccaggtttctcagtttgggtgcagatcatttgctttgctttttgatgatatagaccataatatgtgtgcagcagacaaagaggtattcagttcttttgctcatgcccaagtctccatcacaaatgaaatctatcagtacctaggagagccagaaactttcctcttctgtcccacagaatactgtggcactttctgttatccaaatgtgtctcagtctccatatttaaggactgtgggtgaaaagcttctacctggaattgaagtgctttggacaggtcccaaagttgtttctaaagaaattccagtagagtccatcgaagaggtttctaagattattaagagagctccagtaatctgggataacattcatgctaatgattatgatcagaagagactgtttctgggcccgtacaaaggaagatccacagaactcatcccacggttaaaaggagtcctcactaatccaaattgtgaatttgaagccaactacgttgctatccacacccttgccacctggtacaaatcaaacatgaatggagtgagaaaagatgtagtgatgactgacagtgaagatagtactgtgtccatccagataaaattagaaaatgaaggcagtgatgaagatattgaaactgatgtactctatagtccacagatggctctaaagctagcattaacagaatggttgcaagagtttggtgtgcctcatcaatacagcagtaggcaagttgcacacagtggagctaaagcaagtgtagttgatgggactcctttagttgcagcaccctctttaaatgccacaaccgtagtaacaacagtttatcaggagcccattatgagccagggagcagccttgagtggtgagcctactactctgaccaaggaagaagaaaagaaacagcctgatgaagaacccatggacatggtggtggaaaaacaagaagaaacggaccacaagaatgacaatcaaatactgagtgaaattgttgaagcgaaaatggcagaggaattgaaaccaatggacactgataaagagagcatagctgaatcaaaatccccagagatgtccatgcaagaagattgtattagtgacattgcccccatgcaaactgatgaacagacaaacaaggagcagtttgtgccaggtccaaatgaaaagcctttgtacactgcggaaccagtgaccctggaggatttgcagttacttgctgatctattctaccttccttacgagcatggacccaaaggagcacagatgttacgggaatttcaatggcttcgagcaaatagtagtgttgtcagtgtcaattgcaaaggaaaagactctgaaaaaattgaagaatggcggtcacgagcagccaagtttgaagagatgtgtggactagtgatgggaatgttcactcggctctccaattgtgccaacaggacaattctttatgacatgtactcctatgtttgggatatcaagagtataatgtctatggtgaagtcttttgtacagtggttagggtgtcgtagtcattcttcagcacaattcttaattggagaccaagaaccctgggcctttagaggtggtctagcaggagagttccagcgtttgctgccaattgatggggcaaatgatctcttttttcagccacctccactgactcctacctccaaagtttatactatcagaccttattttcctaaggatgaggcatccgtgtacaagatttgcagagaaatgtatgacgatggagtgggtttaccctttcaaagtcagcctgatcttattggagacaagttagtaggagggctgctttccctcagcctggattactgctttgtcctagaagatgaagatggcatatgtggttatgccttgggcactgtagatgtgaccccctttattaaaaaatgtaaaatttcctggatccccttcatgcaggagaagtataccaagccaaatggtgacaaggaactctctgaggctgagaaaataatgttgagtttccatgaagaacaggaagtactgccagaaactttccttgctaatttcccttctctgataaagatggacattcacaaaaaagtaactgacccaagtgtggccaaaagcatgatggcttgcctcctgtcttcactgaaggctaatggctcccggggagctttctgtgaagtgagaccagatgataaaagaattctggaattttacagcaagttaggatgttttgaaattgcaaaaatggaaggatttccaaaggatgtggttatacttggtcggagcctgtgacatttgttgacactgtgaactgtccaaaagtctcttaactgcaccttgtgaatggtagttgaggtcttcatacagttcagcctctagaatggtaacaaatcagccaattggattcgaaacaaagaagactatgtaaaactcacccatcacactttgagactactcactggttggaagaatatagtattgcagcaaatcctgtatgaaagagagatgtgggcttcctttttgagtcttgtgttaggtgctgagaccttttacatgggcttatacagggagagagtcttcaataaatgtagtcagcactattttctgcatccagtgtggttgcgtttctcacctgagagtaatcaagataacatctgtcatcttccttggtttattgagtgaaatgcctctcagtcttaggggacatggcagagatgaaagaaagaaagagtgggtttcagaagtgtcagggtggagtgattccaagtgggatggttgtggcattagtttaagctgaataaataatttcaatttggggcagttattctgctttttgtaaagccgtggccaattgtctcctgtaatgactgttggttcaggcatgttgtactttgtagggacaaatgtgcatttgtttgtggcaaaagcctacaattgacaaacttgtaaatttctttgtatataaactagctgtaacctga

SEQ ID NO: 329247 - DNA, 1748 bp, Homo sapiens
agttacaacagctccagttacaacagtcttcaataaatgtagtcagcactattttctgcatccagtgtggttgcgtttctcacctgagagtaatcaagataacatctgtcatcttccttggtttattgagtgaaatgcctctcagtcttaggggacatggcagagatgaaagaaagaaagagtgggtttcagaagtgtcagggtggagtgattccaagtgggatggttgtggcattagtttaagctgaataaataatttcaatttggggcagttattctgctttttgtaaagccgtggccaattgtctcctgtaatgactgttggttcaggcatgttgtactttgtagggacaaatgtgcatttgtttgtggcaaaagcctacaattgacaaacttgtaaatttctttgtatataaactagctgtaacctgactatcctttgtgtttactgtttttgtaaatttttttcctctataaatgaaagggtgttggttcagaatggcactttgaataatgtaaaccagtgaaaagtggattttctttacttttgtctttgggtttggggttgtttttgttctttttgaagttttattatttttaaagtgcctcccacctaggcgtaggccatgaccatttggggtacgagagcctaattttgtaggacttaatctgttgaaaagtgcagttacttctggaaattaacctcaatattaggtcagcatgtgaaatgttggatttgacatgtcaggtagggttcagggactgattggtcccatttgccctcaggtcagttgtttaatctcaagacctgttactactgattttattaaatcagagtctttaattcttgcatgtttgtatctaatttctgaacgaatgagcacactttaaccagttatttacagttacctttttcctttaaccggattgtgaaagcttcatgtattttaatttagattctgtgtttttaagggttctgagcatgaagctggcagatagtcggcaggactcattttttcatcatggctggctgatttctccatagattgataacagtattttgttatcttgcttctctgtagttttgcatcagctgtttaactttgagctgagtgaggggagaggggtaaagagaaagaaacttaagttttctttcacagaactccaccattgtgggctttgagagagccctaaagcattgtacctagtggtacctagtgacttccaaccaaagcctttgagtatgcactaaataggtgagaagaaaggagagaaggtttttaggttagaaacctttaaccgatagaaggatatggtatgttgtaaagctggaaccaagtttgcatttttgagggcttgagatgaagggaagactcttaccagatagtaagacagctgagttttcctcagttttctcgtcttaacactagtggacaattctagcattttgtttggaggatttcagagttaacctcatggaattcaggattttttagcaagtttgcttttggttttatcttggcttttagtaatcatgttggctggtctggtcacaggtgactgtgaaacagatgccctggtcttgctttcatcactctaggatcatgaagtgctatgctatttcctggttatgaatattaaggttggaattacatttttattgattgtttggatcagagctcagttcctgtagaaaacgaactgtaaaagaccatgcaagaggcaaaataaaacttgaagtgaatgct

SEQ ID NO: 329248 - DNA, 1664 bp, Homo sapiens
tcgtctttgttgtcgaatccatttggctgattttttaccattctagaggctgaactgtatgaagaatatagtattgcagcaatacctgtatgaaagagtgggtttcagaagtgtcagggtggagtgattccaagtgggatggttgtggcattagtttaagctgaataaataatttcaatttggggcagttattctgctttttgtaaagccgtggccaattgtctcctgtaatgactgttggttcaggcatgttgtactttgtagggacaaatgtgcatttgtttgtggcaaaagcctacaattgacaaacttgtaaatttctttgtatataaactagctgtaacctgactatcctttgtgtttactgtttttgtaaatttttttcctctataaatgaaagggtgttggttcagaatggcactttgaataatgtaaaccagtgaaaagtggattttctttacttttgtctttgggtttggggttgtttttgttctttttgaagttttattatttttaaagtgcctcccacctaggcgtaggccatgaccatttggggtacgagagcctaattttgtaggacttaatctgttgaaaagtgcagttacttctggaaattaacctcaatattaggtcagcatgtgaaatgttggatttgacatgtcaggtagggttcagggactgattggtcccatttgccctcaggtcagttgtttaatctcaagacctgttactactgattttattaaatcagagtctttaattcttgcatgtttgtatctaatttctgaacgaatgagcacactttaaccagttatttacagttacctttttcctttaaccggattgtgaaagcttcatgtattttaatttagattctgtgtttttaagggttctgagcatgaagctggcagatagtcggcaggactcattttttcatcatggctggctgatttctccatagattgataacagtattttgttatcttgcttctctgtagttttgcatcagctgtttaactttgagctgagtgaggggagaggggtaaagagaaagaaacttaagttttctttcacagaactccaccattgtgggctttgagagagccctaaagcattgtacctagtggtacctagtgacttccaaccaaagcctttgagtatgcactaaataggtgagaagaaaggagagaaggtttttaggttagaaacctttaaccgatagaaggatatggtatgttgtaaagctggaaccaagtttgcatttttgagggcttgagatgaagggaagactcttaccagatagtaagacagctgagttttcctcagttttctcgtcttaacactagtggacaattctagcattttgtttggaggatttcagagttaacctcatggaattcaggattttttagcaagtttgcttttggttttatcttggcttttagtaatcatgttggctggtctggtcacaggtgactgtgaaacagatgccctggtcttgctttcatcactctaggatcatgaagtgctatgctatttcctggttatgaatattaaggttggaattacatttttattgattgtttggatcagagctcagttcctgtagaaaacgaactgtaaaagaccatgcaagaggcaaaataaaacttgaagtgaatgct

SEQ ID NO: 329249 - DNA, 4314 bp, Homo sapiens
cagcgcaagcgcagtgcggataaacaggaagcgggcggtggaggcagcagcagagggagagctcggggcttggaggggaaacagcggaagacctaagattatcgggagggcagcagaggcagagaacgaggacaggacccttggccgtcttcttccagggaacgagaggtcacagcctcgctctccgcttatgcttctggcgccccagcttaaagccgaggctgcggctgacaaagggctcgcgccggtgccgccgcccttctcatccgggcattcgggtccctgcgagaaggagggggaaggacagagggggaggggaaggagccggaggggcgcacacttggagctgaagccctctccagggctccgggccggtgccccaacggacagaggtcgaggaggacccgcagaggtggcagcggccgggggcaggaggatggtgcagaaggagagtcaagcgacgttggaggagcgggagagcgagctcagctccaaccctgccgcctctgcgggggcatcgctggagccgccggcagctccggcacccggagaagacaaccccgccggggctgggggagcggcggtggccggggctgcaggaggggctcggcggttcctctgcggtgtggtggaaggattttatggaagaccttgggttatggaacagagaaaagaactctttagaaggctccagaaatgggaattaaatacatacttgtatgccccaaaagatgactacaaacataggatgttttggcgagagatgtattcagtggaggaagctgagcaacttatgactctcatctctgctgcacgagaatatgagatagagttcatctatgcgatctcacctggattggatatcactttttctaaccccaaggaagtatccacattgaaacgtaaattggaccaggtttctcagtttgggtgcagatcatttgctttgctttttgatgatatagaccataatatgtgtgcagcagacaaagaggtattcagttcttttgctcatgcccaagtctccatcacaaatgaaatctatcagtacctaggagagccagaaactttcctcttctgtcccacagaatactgtggcactttctgttatccaaatgtgtctcagtctccatatttaaggactgtgggtgaaaagcttctacctggaattgaagtgctttggacaggtcccaaagttgtttctaaagaaattccagtagagtccatcgaagaggtttctaagattattaagagagctccagtaatctgggataacattcatgctaatgattatgatcagaagagactgtttctgggcccgtacaaaggaagatccacagaactcatcccacggttaaaaggagtcctcactaatccaaattgtgaatttgaagccaactacgttgctatccacacccttgccacctggtacaaatcaaacatgaatggagtgagaaaagatgtagtgatgactgacagtgaagatagtactgtgtccatccagataaaattagaaaatgaaggcagtgatgaagatattgaaactgatgtactctatagtccacagatggctctaaagctagcattaacagaatggttgcaagagtttggtgtgcctcatcaatacagcagtaggcaagttgcacacagtggagctaaagcaagtgtagttgatgggactcctttagttgcagcaccctctttaaatgccacaaccgtagtaacaacagtttatcaggagcccattatgagccagggagcagccttgagtggtgagcctactactctgaccaaggaagaagaaaagaaacagcctgatgaagaacccatggacatggtggtggaaaaacaagaagaaacggaccacaagaatgacaatcaaatactgagtgaaattgttgaagcgaaaatggcagaggaattgaaaccaatggacactgataaagagagcatagctgaatcaaaatccccagagatgtccatgcaagaagattgtattagtgacattgcccccatgcaaactgatgaacagacaaacaaggagcagtttgtgccaggtccaaatgaaaagcctttgtacactgcggaaccagtgaccctggaggatttgcagttacttgctgatctattctaccttccttacgagcatggacccaaaggagcacagatgttacgggaatttcaatggcttcgagcaaatagtagtgttgtcagtgtcaattgcaaaggaaaagactctgaaaaaattgaagaatggcggtcacgagcagccaagtttgaagagatgtgtggactagtgatgggaatgttcactcggctctccaattgtgccaacaggacaattctttatgacatgtactcctatgtttgggatatcaagagtataatgtctatggtgaagtcttttgtacagtggttaggtaggtgcaccaggaataatctcttctcctcaaatatattgtccctttaaaaaaaattatcccacagggagaaaaacatttagggaattggcacatttccaagtctcttcaattcgttgcctaggtttctttcaaaaataggcattattgaagacttgagatgcaagtcttagtaaatacatcaagcacattaatttttctcccttgggctaattcagcataagtatcttatggaaccctgtataccacttttatctgatttggagatgagacactatgaaatgtgactccacaagctttctgctgcttgctgtgtcttgataacattaatgctatgtttaacagaacaattgctgaaatgacctaaagggcctggcaagaggaagccatcctcccagccctgtgcgcatgcgagctttagtgtaaggctattctggtgctattcagtattatttcacgtggctttttctttatccttctaccaagtattggttttaccaggggatagaaattgtaatcccctaaacatctctgctacattaaatggacttttgtatgtctcctttgaacactgattttttttttttaaattgtcaaacttggtaaaaagcaccagcatggccaagtttctctagggacttcatttcattttcaggttttcaatccagctataaggaatatgtaatggacttatatacagcacacagcaggcagcaaggctgactgacatgtcatagttttcatagtagtcacaaatactatgatgggtttcatggtcttggttgtgaaatagatatctgaaacaccgtgagcttagaataaaaagtagtagtgagattttccactttctgcctgtatacctttgagctcttaaatatttaaaaaaaaaaaaaaaaagtttccctgtgatacaactaattagctactaaaagtagagtctcagattgttaatttgaaaatagataactttttttggattgctgtaataacaggtagaagagagtattttgacctcatgttaaaaggctctgtatagcttcgggcgcggttgctcacccctgtaatcccagcgctcttggtggctgaggtgggtggatcacttgagatcaggagttcgagaccagcctggtgaaaaccagcatgagaccagcatggtgaaaccctatctctactaaaaaaatacaaaaattagccaggcgtggtggcgcatgcctgtaatcccagctacttgagaggctgaggcaggagaattgcttgaactcaggaggcagaggttgcagtgagctgagatcacaccattgcactccagcctgggcgatagagggagactccatctcaaaataaatacaataaataaaggaaatactgaccgtgcgcagcggctcaacactcccgacctcaggtgatacagaacctccttcaggctccccacagttgctacggattaatacggcggtgaagccaccacgagcctggacttcatttacctccactagatctattttctactatttcaccctttactgacctataggtcacatggatgtgtaccaaggaggacatggcccaggttgacgacaccacgtcaatagggaattacaactgacacctatggcaggcgagttgaggctgactgaatgtattgcggtcgccccatctgaacacatgacggcactacacacctgtacaacaatggtggaatctatcagtccatgacatcatggacatgcagcgacgcactacgcagcagaactctagctataaaacgaagtcactccagactgcatgtacacaacactgcagacctaagacaattggagcagcgcacgcgggatcaactagaactatcccgacaggagtccagagtacacagctaaacctgtacctcacgaga

SEQ ID NO: 329250 - DNA, 3271 bp, Homo sapiens
cagcgcaagcgcagtgcggataaacaggaagcgggcggtggaggcagcagcagagggagagctcggggcttggaggggaaacagcggaagacctaagattatcgggagggcagcagaggcagagaacgaggacaggacccttggccgtcttcttccagggaacgagaggtcacagcctcgctctccgcttatgcttctggcgccccagcttaaagccgaggctgcggctgacaaagggctcgcgccggtgccgccgcccttctcatccgggcattcgggtccctgcgagaaggagggggaaggacagagggggaggggaaggagccggaggggcgcacacttggagctgaagccctctccagggctccgggccggtgccccaacggacagaggtcgaggaggacccgcagaggtggcagcggccgggggcaggaggatggtgcagaaggagagtcaagcgacgttggaggagcgggagagcgagctcagctccaaccctgccgcctctgcgggggcatcgctggagccgccggcagctccggcacccggagaagacaaccccgccggggctgggggagcggcggtggccggggctgcaggaggggctcggcggttcctctgcggtgtggtggaaggattttatggaagaccttgggttatggaacagagaaaagaactctttagaaggctccagaaatgggaattaaatacatacttgtatgccccaaaagatgactacaaacataggatgttttggcgagagatgtattcagtggaggaagctgagcaacttatgactctcatctctgctgcacgagaatatgagatagagttcatctatgcgatctcacctggattggatatcactttttctaaccccaaggaagtatccacattgaaacgtaaattggaccaggtttctcagtttgggtgcagatcatttgctttgctttttgatgatatagaccataatatgtgtgcagcagacaaagaggtattcagttcttttgctcatgcccaagtctccatcacaaatgaaatctatcagtacctaggagagccagaaactttcctcttctgtcccacagaatactgtggcactttctgttatccaaatgtgtctcagtctccatatttaaggactgtgggtgaaaagcttctacctggaattgaagtgctttggacaggtcccaaagttgtttctaaagaaattccagtagagtccatcgaagaggtttctaagattattaagagagctccagtaatctgggataacattcatgctaatgattatgatcagaagagactgtttctgggcccgtacaaaggaagatccacagaactcatcccacggttaaaaggagtcctcactaatccaaattgtgaatttgaagccaactacgttgctatccacacccttgccacctggtacaaatcaaacatgaatggagtgagaaaagatgtagtgatgactgacagtgaagatagtactgtgtccatccagataaaattagaaaatgaaggcagtgatgaagatattgaaactgatgtactctatagtccacagatggctctaaagctagcattaacagaatggttgcaagagtttggtgtgcctcatcaatacagcagtaggcaagttgcacacagtggagctaaagcaagtgtagttgatgggactcctttagttgcagcaccctctttaaatgccacaaccgtagtaacaacagtttatcaggagcccattatgagccagggagcagccttgagtggtgagcctactactctgaccaaggaagaagaaaagaaacagcctgatgaagaacccatggacatggtggtggaaaaacaagaagaaacggaccacaagaatgacaatcaaatactgagtgaaattgttgaagcgaaaatggcagaggaattgaaaccaatggacactgataaagagagcatagctgaatcaaaatccccagagatgtccatgcaagaagattgtattagtgacattgcccccatgcaaactgatgaacagacaaacaaggagcagtttgtgccaggtccaaatgaaaagcctttgtacactgcggaaccagtgaccctggaggatttgcagttacttgctgatctattctaccttccttacgagcatggacccaaaggagcacagatgttacgggaatttcaatggcttcgagcaaatagtagtgttgtcagtgtcaattgcaaaggaaaagactctgaaaaaattgaagaatggcggtcacgagcagccaagtttgaagagatgtgtggactagtgatgggaatgttcactcggctctccaattgtgccaacaggacaattctttatgacatgtactcctatgtttgggatatcaagagtataatgtctatggtgaagtcttttgtacagtggttagggtgtcgtagtcattcttcagcacaattcttaattggagaccaagaaccctgggcctttagaggtggtctagcaggagagttccagcgtttgctgccaattgatggggcaaatgatctcttttttcagccacctccactgactcctacctccaaagtttatactatcagaccttattttcctaaggatgaggcatccgtgtacaagatttgcagagaaatgtatgacgatggagtgggtttaccctttcaaagtcagcctgatcttattggagacaagttagtaggagggctgctttccctcagcctggattactgctttgtcctagaagatgaagatggcatatgtggttatgccttgggcactgtagatgtgaccccctttattaaaaaatgtaaaatttcctggatccccttcatgcaggagaagtataccaagccaaatggtgacaaggaactctctgaggctgagaaaataatgttgagtttccatgaagaacaggaagtactgccagaaactttccttgctaatttcccttctctgataaagatggacattcacaaaaaagtaactgacccaagtgtggccaaaagcatgatggcttgcctcctgtcttcactgaaggctaatggctcccggggagctttctgtgaagtgagaccagatgataaaagaattctggaattttacagcaagttaggatgttttgaaattgcaaaaatggaaggatttccaaaggatgtggttatacttggtcggagcctgtgacatttgttgacactgtgaactgtccaaaagtctcttaactgcaccttgtgaatggtaggagggggggggatcctaaagagtcgc

SEQ ID NO: 329251 - DNA, 3549 bp, Homo sapiens
cagcgcaagcgcagtgcggataaacaggaagcgggcggtggaggcagcagcagagggagagctcggggcttggaggggaaacagcggaagacctaagattatcgggagggcagcagaggcagagaacgaggacaggacccttggccgtcttcttccagggaacgagaggtcacagcctcgctctccgcttatgcttctggcgccccagcttaaagccgaggctgcggctgacaaagggctcgcgccggtgccgccgcccttctcatccgggcattcgggtccctgcgagaaggagggggaaggacagagggggaggggaaggagccggaggggcgcacacttggagctgaagccctctccagggctccgggccggtgccccaacggacagaggtcgaggaggacccgcagaggtggcagcggccgggggcaggaggatggtgcagaaggagagtcaagcgacgttggaggagcgggagagcgagctcagctccaaccctgccgcctctgcgggggcatcgctggagccgccggcagctccggcacccggagaagacaaccccgccggggctgggggagcggcggtggccggggctgcaggaggggctcggcggttcctctgcggtgtggtggaaggattttatggaagaccttgggttatggaacagagaaaagaactctttagaaggctccagaaatgggaattaaatacatacttgtatgccccaaaagatgactacaaacataggatgttttggcgagagatgtattcagtggaggaagctgagcaacttatgactctcatctctgctgcacgagaatatgagatagagttcatctatgcgatctcacctggattggatatcactttttctaaccccaaggaagtatccacattgaaacgtaaattggaccaggtttctcagtttgggtgcagatcatttgctttgctttttgatgatatagaccataatatgtgtgcagcagacaaagaggtattcagttcttttgctcatgcccaagtctccatcacaaatgaaatctatcagtacctaggagagccagaaactttcctcttctgtcccacagaatactgtggcactttctgttatccaaatgtgtctcagtctccatatttaaggactgtgggtgaaaagcttctacctggaattgaagtgctttggacaggtcccaaagttgtttctaaagaaattccagtagagtccatcgaagaggtttctaagattattaagagagctccagtaatctgggataacattcatgctaatgattatgatcagaagagactgtttctgggcccgtacaaaggaagatccacagaactcatcccacggttaaaaggagtcctcactaatccaaattgtgaatttgaagccaactacgttgctatccacacccttgccacctggtacaaatcaaacatgaatggagtgagaaaagatgtagtgatgactgacagtgaagatagtactgtgtccatccagataaaattagaaaatgaaggcagtgatgaagatattgaaactgatgtactctatagtccacagatggctctaaagctagcattaacagaatggttgcaagagtttggtgtgcctcatcaatacagcagtaggcaagttgcacacagtggagctaaagcaagtgtagttgatgggactcctttagttgcagcaccctctttaaatgccacaaccgtagtaacaacagtttatcaggagcccattatgagccagggagcagccttgagtggtgagcctactactctgaccaaggaagaagaaaagaaacagcctgatgaagaacccatggacatggtggtggaaaaacaagaagaaacggaccacaagaatgacaatcaaatactgagtgaaattgttgaagcgaaaatggcagaggaattgaaaccaatggacactgataaagagagcatagctgaatcaaaatccccagagatgtccatgcaagaagattgtattagtgacattgcccccatgcaaactgatgaacagacaaacaaggagcagtttgtgccaggtccaaatgaaaagcctttgtacactgcggaaccagtgaccctggaggatttgcagttacttgctgatctattctaccttccttacgagcatggacccaaaggagcacagatgttacgggaatttcaatggcttcgagcaaatagtagtgttgtcagtgtcaattgcaaaggaaaagactctgaaaaaattgaagaatggcggtcacgagcagccaagtttgaagagatgtgtggactagtgatgggaatgttcactcggctctccaattgtgccaacaggacaattctttatgacatgtactcctatgtttgggatatcaagagtataatgtctatggtgaagtcttttgtacagtggttagggtgtcgtagtcattcttcagcacaattcttaattggagaccaagaaccctgggcctttagaggtggtctagcaggagagttccagcgtttgctgccaattgatggggcaaatgatctcttttttcagccacctccactgactcctacctccaaagtttatactatcagaccttattttcctaaggatgaggcatccgtgtacaagatttgcagagaaatgtatgacgatggagtgggtttaccctttcaaagtcagcctgatcttattggagacaagttagtaggagggctgctttccctcagcctggattactgctttgtcctagaagatgaagatggcatatgtggttatgccttgggcactgtagatgtgaccccctttattaaaaaatgtaaaatttcctggatccccttcatgcaggagaagtataccaagccaaatggtgacaaggaactctctgaggctgagaaaataatgttgagtttccatgaagaacaggaagtactgccagaaactttccttgctaatttcccttctctgataaagatggacattcacaaaaaagtaactgacccaagtgtggccaaaagcatgatggcttgcctcctgtcttcactgaaggctaatggctcccggggagctctctgtcgaagtgagaccagcatgactacaccagacacttctggcaacttctacacgccacagcttaggcatggcctcacgcaaacttcgccacacaacactgcgccacgcgacttttcccacacagggactgtggcatcatacttgcgatccggcagccctgtgcaccactcacgcacacggaccaactggttgaaacctcggtccccaaatcagttactccctttcaaaccttggccaaccctttgctctgacaacttgggctccaacacaatccaacgcgcgccacccgtcttccccaacttaaccccagggaacatacccagctgcccgcctcccgtctacgcacaccccttggcgcggtaagacccccacccgaagtttccaccatactacccaccaacaacatcaccggctgttcagcttctccctgccgacagatgacccacgacaccgcaactagcggcaagacgtctcaatcttgg

SEQ ID NO: 329252 - DNA, 1761 bp, Homo sapiens
cagcgcaagcgcagtgcggataaacaggaagcgggcggtggaggcagcagcagagggagagctcggggcttggaggggaaacagcggaagacctaagattatcgggagggcagcagaggcagagaacgaggacaggacccttggccgtcttcttccagggaacgagaggtcacagcctcgctctccgcttatgcttctggcgccccagcttaaagccgaggctgcggctgacaaagggctcgcgccggtgccgccgcccttctcatccgggcattcgggtccctgcgagaaggagggggaaggacagagggggaggggaaggagccggaggggcgcacacttggagctgaagccctctccagggctccgggccggtgccccaacggacagaggtcgaggaggacccgcagaggtggcagcggccgggggcaggaggatggtgcagaaggagagtcaagcgacgttggaggagcgggagagcgagctcagctccaaccctgccgcctctgcgggggcatcgctggagccgccggcagctccggcacccggagaagacaaccccgccggggctgggggagcggcggtggccggggctgcaggaggggctcggcggttcctctgcggtgtggtggaaggattttatggaagaccttgggttatggaacagagaaaagaactctttagaaggctccagaaatgggaattaaatacatacttgtatgccccaaaagatgactacaaacataggatgttttggcgagagatgtattcagtggaggaagctgagcaacttatgactctcatctctgctgcacgagaatatgagatagagttcatctatgcgatctcacctggattggatatcactttttctaaccccaaggaagtatccacattgaaacgtaaattggaccaggtttctcagtttgggtgcagatcatttgctttgctttttgatgatatagaccataatatgtgtgcagcagacaaagaggtattcagttcttttgctcatgcccaagtctccatcacaaatgaaatctatcagtacctaggagagccagaaactttcctcttctgtcccacagaatactgtggcactttctgttatccaaatgtgtctcagtctccatatttaaggactgtgggtgaaaagcttctacctggaattgaagtgctttggacaggtcccaaagttgtttctaaagaaattccagtagagtccatcgaagaggtttctaagattattaagagagctccagtaatctgggataacattcatgctaatgattatgatcagaagagactgtttctgggcccgtacaaaggaagatccacagaactcatcccacggttaaaaggagtcctcactaatccaaattgtgaatttgaagccaactacgttgctatccacacccttgccacctggtacaaatcaaacatgaatggagtgagaaaagatgtagtgatgactgacagtgaagatagtactgtgtccatccagataaaattagaaaatgaaggcagtgatgaagatattgaaactgatgtactctatagtccacagatggctctaaagctagcattaacagaatggttgcaagagtttggtgtgcctcatcaatacagcagtagggcaagtgccacagtggagctaagcagtggtactgatggactctttattgcagacctcttaatgccaacgagtaccacagtatcaggccatatagcgggcactgatgggcatatcttacaaaaaaa

SEQ ID NO: 329253 - DNA, 836 bp, Homo sapiens
agcaagatccagtaccatggctcatgcctgcaatcccaacactgtaagaggctaaggcaggcggatcacttgaggccaggagttcgagaccagcctgggcaatatggcaaaaccctcatctctactaaacaaaaattagccgggtatgcctgtaatcccacctactcaggaggtggaggttgcagtgagtcaggatcgtgccactgcactccagccttgggcaacagagcaaggctctcaaaataaaaaagcagcggctgcattttatgcctttcaaatgctgcaggaaatagaaatggcttaagttcagtaagagaattgacaattcagtgtttttgagaagtggcaatgaaagggaggaaaatgtttattgattttagcctgtttccccaaaaggataagaaactatttggaagtgaaaaagaagggcctcttattttctgttggttcagatttcaaaggtgtgaaaactattctttttcccttactgtgacattaaatcacttcaggcttgtaccattttgtatggcctgttgttaagttggacatgacaatttgtaaaatgtgaggatcttttcctttcttgtaagttagaagaaataacctcttcagttaaaccttcagtgaaggttcttttagttttctgttctgctttctaaaaacatagactctgttctttagagcaacttatgactctcatctctgctgcacgagaatatgagatagagttcatctatgcgatctcacctggattggatatcactttttctaaccccaaggaagtatccacattgaaacgtaaattggaccaggtaactcctcacttataatccctt

SEQ ID NO: 329254 - DNA, 854 bp, Homo sapiens
cagcgcaagcgcagtgcggataaacaggaagcgggcggtggaggcagcagcagagggagagctcggggcttggaggggaaacagcggaagacctaagattatcgggagggcagcagaggcagagaacgaggacaggacccttggccgtcttcttccagggaacgagaggtcacagcctcgctctccgcttatgcttctggcgccccagcttaaagccgaggctgcggctgacaaagggctcgcgccggtgccgccgcccttctcatccgggcattcgggtccctgcgagaaggagggggaaggacagagggggaggggaaggagccggaggggcgcacacttggagctgaagccctctccagggctccgggccggtgccccaacggacagaggtcgaggaggacccgcagaggtggcagcggccgggggcaggaggatggtgcagaaggagagtcaagcgacgttggaggagcgggagagcgagctcagctccaaccctgccgcctctgcgggggcatcgctggagccgccggcagctccggcacccggagaagacaaccccgccggggctgggggagcggcggtggccggggctgcaggaggggctcggcggttcctctgcggtgtggtggaaggattttatggaagaccttgggttatggaacagagaaaagaactctttagaaggctccagaaatgggaattaaatacatacttgtatgccccaaaagatgactacaaacataggatgttttggcgagagatgtattcagtggaggaagctggctggagtgcagtggtgcgatctcggctaactgcaaacctcgccctcccgagttcaagagattctgctg

SEQ ID NO: 329255 - DNA, 303 bp, Homo sapiens
tccaggaaaaaacaaaaatgaaaatccaaaacatttttggtcccaagcatttcagataaggaatactcagcctgtagtgcattcaaacccaaatgagaaatgggtcccaaaactgtttaacttacgattttttaattgaaaatgtaaaaacaataaatctgtctttgaacattctagtaaggaaaatactggattttaagtataactgttaacgctgtaatgtttggaattcttaatttttttactcttgattcttttttttttttttctcctaggtttctcagtttgggtgcagatcatttg

SEQ ID NO: 329256 - DNA, 451 bp, Homo sapiens
tatttatgttttgaatatttgttttatttctaggctcccggggagctttctgtgaagtgagaccagatgataaaagaattctggaattttacagcaagttaggatgttttgaaattgcaaaaatggaaggatttccaaaggatgtggttatacttggtcggagcctgtgacatttgttgacactgtgaactgtccaaaagtctcttaactgcaccttgtgaatggtagttgaggtcttcatacagttcagcctctagaatggtaacaaatcagccaattggattcgaaacaaagaagactatgtaaaactcacccatcacactttgagactactcactggttggaagaatatagtattgcagcaaatcctgtatgaaagagagatgtgggcttcctttttgagtcttgtgttaggtgctgagaccttttacatgggcttatacagggagag

SEQ ID NO: 329257 - DNA, 447 bp, Homo sapiens
cttattcttagcatgacatttttcactgtttccccaatattgggacagttttttatttgggagtactattgtaatatttcctcaggtgaaaacacaataaagacaaagaacatttttttcctctgttttaaagtttcatacttaaagatgttatggtcttggtcaggcacagtggctcgtgcctgtaatcccagcactttgggaggccaaggcgggtgtatcacctgaagtcaggagttcaagaccagcccggccaacgtggtgaaactccatctctactaaaaatacaaaaaaaaattagctgggtgtggtggcgggtgcctgtaatgccagctactcaggaggctgaggcaggagaattgcttgaacccgggagcgggaggttgcagtgagctgagatggcgccactgcactccagccggggcagcagagtgaaactctgtctca

SEQ ID NO: 329258 - DNA, 5192 bp, Homo sapiens
cagcgcaagcgcagtgcggataaacaggaagcgggcggtggaggcagcagcagagggagagctcggggcttggaggggaaacagcggaagacctaagattatcgggagggcagcagaggcagagaacgaggacaggacccttggccgtcttcttccagggaacgagaggtcacagcctcgctctccgcttatgcttctggcgccccagcttaaagccgaggctgcggctgacaaagggctcgcgccggtgccgccgcccttctcatccgggcattcgggtccctgcgagaaggagggggaaggacagagggggaggggaaggagccggaggggcgcacacttggagctgaagccctctccagggctccgggccggtgccccaacggacagaggtcgaggaggacccgcagaggtggcagcggccgggggcaggaggatggtgcagaaggagagtcaagcgacgttggaggagcgggagagcgagctcagctccaaccctgccgcctctgcgggggcatcgctggagccgccggcagctccggcacccggagaagacaaccccgccggggctgggggagcggcggtggccggggctgcaggaggggctcggcggttcctctgcggtgtggtggaaggattttatggaagaccttgggttatggaacagagaaaagaactctttagaaggctccagaaatgggaattaaatacatacttgtatgccccaaaagatgactacaaacataggatgttttggcgagagatgtattcagtggaggaagctgagcaacttatgactctcatctctgctgcacgagaatatgagatagagttcatctatgcgatctcacctggattggatatcactttttctaaccccaaggaagtatccacattgaaacgtaaattggaccaggtttctcagtttgggtgcagatcatttgctttgctttttgatgatatagaccataatatgtgtgcagcagacaaagaggtattcagttcttttgctcatgcccaagtctccatcacaaatgaaatctatcagtacctaggagagccagaaactttcctcttctgtcccacagaatactgtggcactttctgttatccaaatgtgtctcagtctccatatttaaggactgtgggtgaaaagcttctacctggaattgaagtgctttggacaggtcccaaagttgtttctaaagaaattccagtagagtccatcgaagaggtttctaagattattaagagagctccagtaatctgggataacattcatgctaatgattatgatcagaagagactgtttctgggcccgtacaaaggaagatccacagaactcatcccacggttaaaaggagtcctcactaatccaaattgtgaatttgaagccaactacgttgctatccacacccttgccacctggtacaaatcaaacatgaatggagtgagaaaagatgtagtgatgactgacagtgaagatagtactgtgtccatccagataaaattagaaaatgaaggcagtgatgaagatattgaaactgatgtactctatagtccacagatggctctaaagctagcattaacagaatggttgcaagagtttggtgtgcctcatcaatacagcagtaggcaagttgcacacagtggagctaaagcaagtgtagttgatgggactcctttagttgcagcaccctctttaaatgccacaaccgtagtaacaacagtttatcaggagcccattatgagccagggagcagccttgagtggtgagcctactactctgaccaaggaagaagaaaagaaacagcctgatgaagaacccatggacatggtggtggaaaaacaagaagaaacggaccacaagaatgacaatcaaatactgagtgaaattgttgaagcgaaaatggcagaggaattgaaaccaatggacactgataaagagagcatagctgaatcaaaatccccagagatgtccatgcaagaagattgtattagtgacattgcccccatgcaaactgatgaacagacaaacaaggagcagtttgtgccaggtccaaatgaaaagcctttgtacactgcggaaccagtgaccctggaggatttgcagttacttgctgatctattctaccttccttacgagcatggacccaaaggagcacagatgttacgggaatttcaatggcttcgagcaaatagtagtgttgtcagtgtcaattgcaaaggaaaagactctgaaaaaattgaagaatggcggtcacgagcagccaagtttgaagagatgtgtggactagtgatgggaatgttcactcggctctccaattgtgccaacaggacaattctttatgacatgtactcctatgtttgggatatcaagagtataatgtctatggtgaagtcttttgtacagtggttagggtgtcgtagtcattcttcagcacaattcttaattggagaccaagaaccctgggcctttagaggtggtctagcaggagagttccagcgtttgctgccaattgatggggcaaatgatctcttttttcagccacctccactgactcctacctccaaagtttatactatcagaccttattttcctaaggatgaggcatccgtgtacaagatttgcagagaaatgtatgacgatggagtgggtttaccctttcaaagtcagcctgatcttattggagacaagttagtaggagggctgctttccctcagcctggattactgctttgtcctagaagatgaagatggcatatgtggttatgccttgggcactgtagatgtgaccccctttattaaaaaatgtaaaatttcctggatccccttcatgcaggagaagtataccaagccaaatggtgacaaggaactctctgaggctgagaaaataatgttgagtttccatgaagaacaggaagtactgccagaaactttccttgctaatttcccttctctgataaagatggacattcacaaaaaagtaactgacccaagtgtggccaaaagcatgatggcttgcctcctgtcttcactgaaggctaatggctcccggggagctttctgtgaagtgagaccagatgataaaagaattctggaattttacagcaagttaggatgttttgaaattgcaaaaatggaaggatttccaaaggatgtggttatacttggtcggagcctgtgacatttgttgacactgtgaactgtccaaaagtctcttaactgcaccttgtgaatggtagttgaggtcttcatacagttcagcctctagaatggtaacaaatcagccaattggattcgaaacaaagaagactatgtaaaactcacccatcacactttgagactactcactggttggaagaatatagtattgcagcaaatcctgtatgaaagagagatgtgggcttcctttttgagtcttgtgttaggtgctgagaccttttacatgggcttatacagggagagagtcttcaataaatgtagtcagcactattttctgcatccagtgtggttgcgtttctcacctgagagtaatcaagataacatctgtcatcttccttggtttattgagtgaaatgcctctcagtcttaggggacatggcagagatgaaagaaagaaagagtgggtttcagaagtgtcagggtggagtgattccaagtgggatggttgtggcattagtttaagctgaataaataatttcaatttggggcagttattctgctttttgtaaagccgtggccaattgtctcctgtaatgactgttggttcaggcatgttgtactttgtagggacaaatgtgcatttgtttgtggcaaaagcctacaattgacaaacttgtaaatttctttgtatataaactagctgtaacctgactatcctttgtgtttactgtttttgtaaatttttttcctctataaatgaaagggtgttggttcagaatggcactttgaataatgtaaaccagtgaaaagtggattttctttacttttgtctttgggtttggggttgtttttgttctttttgaagttttattatttttaaagtgcctcccacctaggcgtaggccatgaccatttggggtacgagagcctaattttgtaggacttaatctgttgaaaagtgcagttacttctggaaattaacctcaatattaggtcagcatgtgaaatgttggatttgacatgtcaggtagggttcagggactgattggtcccatttgccctcaggtcagttgtttaatctcaagacctgttactactgattttattaaatcagagtctttaattcttgcatgtttgtatctaatttctgaacgaatgagcacactttaaccagttatttacagttacctttttcctttaaccggattgtgaaagcttcatgtattttaatttagattctgtgtttttaagggttctgagcatgaagctggcagatagtcggcaggactcattttttcatcatggctggctgatttctccatagattgataacagtattttgttatcttgcttctctgtagttttgcatcagctgtttaactttgagctgagtgaggggagaggggtaaagagaaagaaacttaagttttctttcacagaactccaccattgtgggctttgagagagccctaaagcattgtacctagtggtacctagtgacttccaaccaaagcctttgagtatgcactaaataggtgagaagaaaggagagaaggtttttaggttagaaacctttaaccgatagaaggatatggtatgttgtaaagctggaaccaagtttgcatttttgagggcttgagatgaagggaagactcttaccagatagtaagacagctgagttttcctcagttttctcgtcttaacactagtggacaattctagcattttgtttggaggatttcagagttaacctcatggaattcaggattttttagcaagtttgcttttggttttatcttggcttttagtaatcatgttggctggtctggtcacaggtgactgtgaaacagatgccctggtcttgctttcatcactctaggatcatgaagtgctatgctatttcctggttatgaatattaaggttggaattacatttttattgattgtttggatcagagctcagttcctgtagaaaacgaactgtaaaagaccatgcaagaggcaaaataaaacttgaagtgaatgct

SEQ ID NO: 329259 - DNA, 6161 bp, Homo sapiens
cagcgcaagcgcagtgcggataaacaggaagcgggcggtggaggcagcagcagagggagagctcggggcttggaggggaaacagcggaagacctaagattatcgggagggcagcagaggcagagaacgaggacaggacccttggccgtcttcttccagggaacgagaggtcacagcctcgctctccgcttatgcttctggcgccccagcttaaagccgaggctgcggctgacaaagggctcgcgccggtgccgccgcccttctcatccgggcattcgggtccctgcgagaaggagggggaaggacagagggggaggggaaggagccggaggggcgcacacttggagctgaagccctctccagggctccgggccggtgccccaacggacagaggtcgaggaggacccgcagaggtggcagcggccgggggcaggaggatggtgcagaaggagagtcaagcgacgttggaggagcgggagagcgagctcagctccaaccctgccgcctctgcgggggcatcgctggagccgccggcagctccggcacccggagaagacaaccccgccggggctgggggagcggcggtggccggggctgcaggaggggctcggcggttcctctgcggtgtggtggaaggattttatggaagaccttgggttatggaacagagaaaagaactctttagaaggctccagaaatgggaattaaatacatacttgtatgccccaaaagatgactacaaacataggatgttttggcgagagatgtattcagtggaggaagctgagcaacttatgactctcatctctgctgcacgagaatatgagatagagttcatctatgcgatctcacctggattggatatcactttttctaaccccaaggaagtatccacattgaaacgtaaattggaccaggtttctcagtttgggtgcagatcatttgctttgctttttgatgatatagaccataatatgtgtgcagcagacaaagaggtattcagttcttttgctcatgcccaagtctccatcacaaatgaaatctatcagtacctaggagagccagaaactttcctcttctgtcccacagaatactgtggcactttctgttatccaaatgtgtctcagtctccatatttaaggactgtgggtgaaaagcttctacctggaattgaagtgctttggacaggtcccaaagttgtttctaaagaaattccagtagagtccatcgaagaggtttctaagattattaagagagctccagtaatctgggataacattcatgctaatgattatgatcagaagagactgtttctgggcccgtacaaaggaagatccacagaactcatcccacggttaaaaggagtcctcactaatccaaattgtgaatttgaagccaactacgttgctatccacacccttgccacctggtacaaatcaaacatgaatggagtgagaaaagatgtagtgatgactgacagtgaagatagtactgtgtccatccagataaaattagaaaatgaaggcagtgatgaagatattgaaactgatgtactctatagtccacagatggctctaaagctagcattaacagaatggttgcaagagtttggtgtgcctcatcaatacagcagtaggcaagttgcacacagtggagctaaagcaagtgtagttgatgggactcctttagttgcagcaccctctttaaatgccacaaccgtagtaacaacagtttatcaggagcccattatgagccagggagcagccttgagtggtgagcctactactctgaccaaggaagaagaaaagaaacagcctgatgaagaacccatggacatggtggtggaaaaacaagaagaaacggaccacaagaatgacaatcaaatactgagtgaaattgttgaagcgaaaatggcagaggaattgaaaccaatggacactgataaagagagcatagctgaatcaaaatccccagagatgtccatgcaagaagattgtattagtgacattgcccccatgcaaactgatgaacagacaaacaaggagcagtttgtgccaggtccaaatgaaaagcctttgtacactgcggaaccagtgaccctggaggatttgcagttacttgctgatctattctaccttccttacgagcatggacccaaaggagcacagatgttacgggaatttcaatggcttcgagcaaatagtagtgttgtcagtgtcaattgcaaaggaaaagactctgaaaaaattgaagaatggcggtcacgagcagccaagtttgaagagatgtgtggactagtgatgggaatgttcactcggctctccaattgtgccaacaggacaattctttatgacatgtactcctatgtttgggatatcaagagtataatgtctatggtgaagtcttttgtacagtggttagggtgtcgtagtcattcttcagcacaattcttaattggagaccaagaaccctgggcctttagaggtggtctagcaggagagttccaggtatcaatatgaattcacaactgaattgacattttctttgttttatgagaaaccttatgttgcgcatcagatggctggaaggattggtctgccgaaggctttctagtcccaaattcaatttagttacatagctggatttttaaatcaaattttcctcctctttcacagtaatttctgaaggagatgctgccaatcccccccgcgcctgcgaagcgcagcggctctaggtatacacttcacattgtttctttgcaggtcgcacagcattttaatctgcgcccgcaatgcacaatgcgcgcatgcttgtctgccagtggaagctccatgaacaaaagatagtaattatgccaataaatggtgaaagagcttttggatatttatccaattattttataaatataatgtgcttgaaagaattgtccattgctgaaaatatgaacaaaataggaagtttttttgctgctggaatttgttcatggactttctaggtgctctacttttctccccccaacaggtgctctgctgcgcacagcaaactgaagcgcattgctttggggataaagcgtctcctggacagataaccctcttcagaccaaacctctcctcctgacattctgttctgccatcttatcgtagggagatggtctatctaagataggttttaaaaaaaaatagatttgtcataattggaataggtttgtttttgtttttgtttttgtttttactgtaaatttaaatccccattaatatgccactaaagctgtaactcagagtgggtaatttctattcagaagcactcccctcccccagcaaagaggtatttctattagtaaagcatagtacacccctcttctttaggtctgcctgcagtagccagttaatataagttggtaatctgcagtgcacacccatttaaaaaaatggataccttccccaaactaatccatctccttttttttcttcccacagcgtttgctgccaattgatggggcaaatgatctcttttttcagccacctccactgactcctacctccaaagtttatactatcagaccttattttcctaaggatgaggcatccgtgtacaagatttgcagagaaatgtatgacgatggagtgggtttaccctttcaaagtcagcctgatcttattggagacaagttagtaggagggctgctttccctcagcctggattactgctttgtcctagaagatgaagatggcatatgtggttatgccttgggcactgtagatgtgaccccctttattaaaaaatgtaaaatttcctggatccccttcatgcaggagaagtataccaagccaaatggtgacaaggaactctctgaggctgagaaaataatgttgagtttccatgaagaacaggaagtactgccagaaactttccttgctaatttcccttctctgataaagatggacattcacaaaaaagtaactgacccaagtgtggccaaaagcatgatggcttgcctcctgtcttcactgaaggctaatggctcccggggagctttctgtgaagtgagaccagatgataaaagaattctggaattttacagcaagttaggatgttttgaaattgcaaaaatggaaggatttccaaaggatgtggttatacttggtcggagcctgtgacatttgttgacactgtgaactgtccaaaagtctcttaactgcaccttgtgaatggtagttgaggtcttcatacagttcagcctctagaatggtaacaaatcagccaattggattcgaaacaaagaagactatgtaaaactcacccatcacactttgagactactcactggttggaagaatatagtattgcagcaaatcctgtatgaaagagagatgtgggcttcctttttgagtcttgtgttaggtgctgagaccttttacatgggcttatacagggagagagtcttcaataaatgtagtcagcactattttctgcatccagtgtggttgcgtttctcacctgagagtaatcaagataacatctgtcatcttccttggtttattgagtgaaatgcctctcagtcttaggggacatggcagagatgaaagaaagaaagagtgggtttcagaagtgtcagggtggagtgattccaagtgggatggttgtggcattagtttaagctgaataaataatttcaatttggggcagttattctgctttttgtaaagccgtggccaattgtctcctgtaatgactgttggttcaggcatgttgtactttgtagggacaaatgtgcatttgtttgtggcaaaagcctacaattgacaaacttgtaaatttctttgtatataaactagctgtaacctgactatcctttgtgtttactgtttttgtaaatttttttcctctataaatgaaagggtgttggttcagaatggcactttgaataatgtaaaccagtgaaaagtggattttctttacttttgtctttgggtttggggttgtttttgttctttttgaagttttattatttttaaagtgcctcccacctaggcgtaggccatgaccatttggggtacgagagcctaattttgtaggacttaatctgttgaaaagtgcagttacttctggaaattaacctcaatattaggtcagcatgtgaaatgttggatttgacatgtcaggtagggttcagggactgattggtcccatttgccctcaggtcagttgtttaatctcaagacctgttactactgattttattaaatcagagtctttaattcttgcatgtttgtatctaatttctgaacgaatgagcacactttaaccagttatttacagttacctttttcctttaaccggattgtgaaagcttcatgtattttaatttagattctgtgtttttaagggttctgagcatgaagctggcagatagtcggcaggactcattttttcatcatggctggctgatttctccatagattgataacagtattttgttatcttgcttctctgtagttttgcatcagctgtttaactttgagctgagtgaggggagaggggtaaagagaaagaaacttaagttttctttcacagaactccaccattgtgggctttgagagagccctaaagcattgtacctagtggtacctagtgacttccaaccaaagcctttgagtatgcactaaataggtgagaagaaaggagagaaggtttttaggttagaaacctttaaccgatagaaggatatggtatgttgtaaagctggaaccaagtttgcatttttgagggcttgagatgaagggaagactcttaccagatagtaagacagctgagttttcctcagttttctcgtcttaacactagtggacaattctagcattttgtttggaggatttcagagttaacctcatggaattcaggattttttagcaagtttgcttttggttttatcttggcttttagtaatcatgttggctggtctggtcacaggtgactgtgaaacagatgccctggtcttgctttcatcactctaggatcatgaagtgctatgctatttcctggttatgaatattaaggttggaattacatttttattgattgtttggatcagagctcagttcctgtagaaaacgaactgtaaaagaccatgcaagaggcaaaataaaacttgaagtgaatgct

SEQ ID NO: 329260 - DNA, 4397 bp, Homo sapiens
agtcttgctctgtcgcccagactggagtgcagtggcacaatctcggctcactgcaacctcctccgcctcccgggttcaagtgattctcctgcctcagcttcccgagtagctgggactataggtttctcagtttgggtgcagatcatttgctttgctttttgatgatatagaccataatatgtgtgcagcagacaaagaggtattcagttcttttgctcatgcccaagtctccatcacaaatgaaatctatcagtacctaggagagccagaaactttcctcttctgtcccacagaatactgtggcactttctgttatccaaatgtgtctcagtctccatatttaaggactgtgggtgaaaagcttctacctggaattgaagtgctttggacaggtcccaaagttgtttctaaagaaattccagtagagtccatcgaagaggtttctaagattattaagagagctccagtaatctgggataacattcatgctaatgattatgatcagaagagactgtttctgggcccgtacaaaggaagatccacagaactcatcccacggttaaaaggagtcctcactaatccaaattgtgaatttgaagccaactacgttgctatccacacccttgccacctggtacaaatcaaacatgaatggagtgagaaaagatgtagtgatgactgacagtgaagatagtactgtgtccatccagataaaattagaaaatgaaggcagtgatgaagatattgaaactgatgtactctatagtccacagatggctctaaagctagcattaacagaatggttgcaagagtttggtgtgcctcatcaatacagcagtaggcaagttgcacacagtggagctaaagcaagtgtagttgatgggactcctttagttgcagcaccctctttaaatgccacaaccgtagtaacaacagtttatcaggagcccattatgagccagggagcagccttgagtggtgagcctactactctgaccaaggaagaagaaaagaaacagcctgatgaagaacccatggacatggtggtggaaaaacaagaagaaacggaccacaagaatgacaatcaaatactgagtgaaattgttgaagcgaaaatggcagaggaattgaaaccaatggacactgataaagagagcatagctgaatcaaaatccccagagatgtccatgcaagaagattgtattagtgacattgcccccatgcaaactgatgaacagacaaacaaggagcagtttgtgccaggtccaaatgaaaagcctttgtacactgcggaaccagtgaccctggaggatttgcagttacttgctgatctattctaccttccttacgagcatggacccaaaggagcacagatgttacgggaatttcaatggcttcgagcaaatagtagtgttgtcagtgtcaattgcaaaggaaaagactctgaaaaaattgaagaatggcggtcacgagcagccaagtttgaagagatgtgtggactagtgatgggaatgttcactcggctctccaattgtgccaacaggacaattctttatgacatgtactcctatgtttgggatatcaagagtataatgtctatggtgaagtcttttgtacagtggttagggtgtcgtagtcattcttcagcacaattcttaattggagaccaagaaccctgggcctttagaggtggtctagcaggagagttccagcgtttgctgccaattgatggggcaaatgatctcttttttcagccacctccactgactcctacctccaaagtttatactatcagaccttattttcctaaggatgaggcatccgtgtacaagatttgcagagaaatgtatgacgatggagtgggtttaccctttcaaagtcagcctgatcttattggagacaagttagtaggagggctgctttccctcagcctggattactgctttgtcctagaagatgaagatggcatatgtggttatgccttgggcactgtagatgtgaccccctttattaaaaaatgtaaaatttcctggatccccttcatgcaggagaagtataccaagccaaatggtgacaaggaactctctgaggctgagaaaataatgttgagtttccatgaagaacaggaagtactgccagaaactttccttgctaatttcccttctctgataaagatggacattcacaaaaaagtaactgacccaagtgtggccaaaagcatgatggcttgcctcctgtcttcactgaaggctaatggctcccggggagctttctgtgaagtgagaccagatgataaaagaattctggaattttacagcaagttaggatgttttgaaattgcaaaaatggaaggatttccaaaggatgtggttatacttggtcggagcctgtgacatttgttgacactgtgaactgtccaaaagtctcttaactgcaccttgtgaatggtagttgaggtcttcatacagttcagcctctagaatggtaacaaatcagccaattggattcgaaacaaagaagactatgtaaaactcacccatcacactttgagactactcactggttggaagaatatagtattgcagcaaatcctgtatgaaagagagatgtgggcttcctttttgagtcttgtgttaggtgctgagaccttttacatgggcttatacagggagagagtcttcaataaatgtagtcagcactattttctgcatccagtgtggttgcgtttctcacctgagagtaatcaagataacatctgtcatcttccttggtttattgagtgaaatgcctctcagtcttaggggacatggcagagatgaaagaaagaaagagtgggtttcagaagtgtcagggtggagtgattccaagtgggatggttgtggcattagtttaagctgaataaataatttcaatttggggcagttattctgctttttgtaaagccgtggccaattgtctcctgtaatgactgttggttcaggcatgttgtactttgtagggacaaatgtgcatttgtttgtggcaaaagcctacaattgacaaacttgtaaatttctttgtatataaactagctgtaacctgactatcctttgtgtttactgtttttgtaaatttttttcctctataaatgaaagggtgttggttcagaatggcactttgaataatgtaaaccagtgaaaagtggattttctttacttttgtctttgggtttggggttgtttttgttctttttgaagttttattatttttaaagtgcctcccacctaggcgtaggccatgaccatttggggtacgagagcctaattttgtaggacttaatctgttgaaaagtgcagttacttctggaaattaacctcaatattaggtcagcatgtgaaatgttggatttgacatgtcaggtagggttcagggactgattggtcccatttgccctcaggtcagttgtttaatctcaagacctgttactactgattttattaaatcagagtctttaattcttgcatgtttgtatctaatttctgaacgaatgagcacactttaaccagttatttacagttacctttttcctttaaccggattgtgaaagcttcatgtattttaatttagattctgtgtttttaagggttctgagcatgaagctggcagatagtcggcaggactcattttttcatcatggctggctgatttctccatagattgataacagtattttgttatcttgcttctctgtagttttgcatcagctgtttaactttgagctgagtgaggggagaggggtaaagagaaagaaacttaagttttctttcacagaactccaccattgtgggctttgagagagccctaaagcattgtacctagtggtacctagtgacttccaaccaaagcctttgagtatgcactaaataggtgagaagaaaggagagaaggtttttaggttagaaacctttaaccgatagaaggatatggtatgttgtaaagctggaaccaagtttgcatttttgagggcttgagatgaagggaagactcttaccagatagtaagacagctgagttttcctcagttttctcgtcttaacactagtggacaattctagcattttgtttggaggatttcagagttaacctcatggaattcaggattttttagcaagtttgcttttggttttatcttggcttttagtaatcatgttggctggtctggtcacaggtgactgtgaaacagatgccctggtcttgctttcatcactctaggatcatgaagtgctatgctatttcctggttatgaatattaaggttggaattacatttttattgattgtttggatcagagctcagttcctgtagaaaacgaactgtaaaagaccatgcaagaggcaaaataaaacttgaagtgaatgct

SEQ ID NO: 329261 - DNA, 5457 bp, Homo sapiens
cagcgcaagcgcagtgcggataaacaggaagcgggcggtggaggcagcagcagagggagagctcggggcttggaggggaaacagcggaagacctaagattatcgggagggcagcagaggcagagaacgaggacaggacccttggccgtcttcttccagggaacgagaggtcacagcctcgctctccgcttatgcttctggcgccccagcttaaagccgaggctgcggctgacaaagggctcgcgccggtgccgccgcccttctcatccgggcattcgggtccctgcgagaaggagggggaaggacagagggggaggggaaggagccggaggggcgcacacttggagctgaagccctctccagggctccgggccggtgccccaacggacagaggtcgaggaggacccgcagaggtggcagcggccgggggcaggaggatggtgcagaaggagagtcaagcgacgttggaggagcgggagagcgagctcagctccaaccctgccgcctctgcgggggcatcgctggagccgccggcagctccggcacccggagaagacaaccccgccggggctgggggagcggcggtggccggggctgcaggaggggctcggcggttcctctgcggtgtggtggaaggattttatggaagaccttgggttatggaacagagaaaagaactctttagaaggctccagaaatgggaattaaatacatacttgtatgccccaaaagatgactacaaacataggatgttttggcgagagatgtattcagtggaggaagctgagcaacttatgactctcatctctgctgcacgagaatatgagatagagttcatctatgcgatctcacctggattggatatcactttttctaaccccaaggaagtatccacattgaaacgtaaattggaccaggtttctcagtttgggtgcagatcatttgctttgctttttgatgatatagaccataatatgtgtgcagcagacaaagaggtattcagttcttttgctcatgcccaagtctccatcacaaatgaaatctatcagtacctaggagagccagaaactttcctcttctgtcccacagaatactgtggcactttctgttatccaaatgtgtctcagtctccatatttaaggactgtgggtgaaaagcttctacctggaattgaagtgctttggacaggtcccaaagttgtttctaaagaaattccagtagagtccatcgaagaggtttctaagattattaagagagctccagtaatctgggataacattcatgctaatgattatgatcagaagagactgtttctgggcccgtacaaaggaagatccacagaactcatcccacggttaaaaggagtcctcactaatccaaattgtgaatttgaagccaactacgttgctatccacacccttgccacctggtacaaatcaaacatgaatggagtgagaaaagatgtagtgatgactgacagtgaagatagtactgtgtccatccagataaaattagaaaatgaaggcagtgatgaagatattgaaactgatgtactctatagtccacagatggctctaaagctagcattaacagaatggttgcaagagtttggtgtgcctcatcaatacagcagtaggcaagttgcacacagtggagctaaagcaagtgtagttgatgggactcctttagttgcagcaccctctttaaatgccacaaccgtagtaacaacagtttatcaggagcccattatgagccagggagcagccttgagtggtgagcctactactctgaccaaggaagaagaaaagaaacagcctgatgaagaacccatggacatggtggtggaaaaacaagaagaaacggaccacaagaatgacaatcaaatactgagtgaaattgttgaagcgaaaatggcagaggaattgaaaccaatggacactgataaagagagcatagctgaatcaaaatccccagagatgtccatgcaagaagattgtattagtgacattgcccccatgcaaactgatgaacagacaaacaaggagcagtttgtgccaggtccaaatgaaaagcctttgtacactgcggaaccagtgaccctggaggatttgcagttacttgctgatctattctaccttccttacgagcatggacccaaaggagcacagatgttacgggaatttcaatggcttcgagcaaatagtagtgttgtcagtgtcaattgcaaaggaaaagactctgaaaaaattgaagaatggcggtcacgagcagccaagtttgaagagatgtgtggactagtgatgggaatgttcactcggctctccaattgtgccaacaggacaattctttatgacatgtactcctatgtttgggatatcaagagtataatgtctatggtgaagtcttttgtacagtggttagggtgtcgtagtcattcttcagcacaattcttaattggagaccaagaaccctgggcctttagaggtggtctagcaggagagttccagcgtttgctgccaattgatggggcaaatgatctcttttttcagccacctccactgactcctacctccaaagtttatactatcagaccttattttcctaaggatgaggcatccgtgtacaagatttgcagagaaatgtatgacgatggagtgggtttaccctttcaaagtcagcctgatcttattggagacaagtatgtgataagtatttggatttgagagtagacctttcatagtgaggcttatcaggttgaggggaggtgatgactggaaatatatttatttattttaaatcccactttggctttagtaaaatctgaatatgtgtgcatttctagtttcttacaccaaatgtaggttccgtaagttcatgcaagtacagtgggtcttggatcactgaagtctgaattttatattagcaactgaaaagtttactgtggcctctttccttctgagcaggttagtaggagggctgctttccctcagcctggattactgctttgtcctagaagatgaagatggcatatgtggttatgccttgggcactgtagatgtgaccccctttattaaaaaatgtaaaatttcctggatccccttcatgcaggagaagtataccaagccaaatggtgacaaggaactctctgaggctgagaaaataatgttgagtttccatgaagaacaggaagtactgccagaaactttccttgctaatttcccttctctgataaagatggacattcacaaaaaagtaactgacccaagtgtggccaaaagcatgatggcttgcctcctgtcttcactgaaggctaatggctcccggggagctttctgtgaagtgagaccagatgataaaagaattctggaattttacagcaagttaggatgttttgaaattgcaaaaatggaaggatttccaaaggatgtggttatacttggtcggagcctgtgacatttgttgacactgtgaactgtccaaaagtctcttaactgcaccttgtgaatggtagttgaggtcttcatacagttcagcctctagaatggtaacaaatcagccaattggattcgaaacaaagaagactatgtaaaactcacccatcacactttgagactactcactggttggaagaatatagtattgcagcaaatcctgtatgaaagagagatgtgggcttcctttttgagtcttgtgttaggtgctgagaccttttacatgggcttatacagggagagagtcttcaataaatgtagtcagcactattttctgcatccagtgtggttgcgtttctcacctgagagtaatcaagataacatctgtcatcttccttggtttattgagtgaaatgcctctcagtcttaggggacatggcagagatgaaagaaagaaagagtgggtttcagaagtgtcagggtggagtgattccaagtgggatggttgtggcattagtttaagctgaataaataatttcaatttggggcagttattctgctttttgtaaagccgtggccaattgtctcctgtaatgactgttggttcaggcatgttgtactttgtagggacaaatgtgcatttgtttgtggcaaaagcctacaattgacaaacttgtaaatttctttgtatataaactagctgtaacctgactatcctttgtgtttactgtttttgtaaatttttttcctctataaatgaaagggtgttggttcagaatggcactttgaataatgtaaaccagtgaaaagtggattttctttacttttgtctttgggtttggggttgtttttgttctttttgaagttttattatttttaaagtgcctcccacctaggcgtaggccatgaccatttggggtacgagagcctaattttgtaggacttaatctgttgaaaagtgcagttacttctggaaattaacctcaatattaggtcagcatgtgaaatgttggatttgacatgtcaggtagggttcagggactgattggtcccatttgccctcaggtcagttgtttaatctcaagacctgttactactgattttattaaatcagagtctttaattcttgcatgtttgtatctaatttctgaacgaatgagcacactttaaccagttatttacagttacctttttcctttaaccggattgtgaaagcttcatgtattttaatttagattctgtgtttttaagggttctgagcatgaagctggcagatagtcggcaggactcattttttcatcatggctggctgatttctccatagattgataacagtattttgttatcttgcttctctgtagttttgcatcagctgtttaactttgagctgagtgaggggagaggggtaaagagaaagaaacttaagttttctttcacagaactccaccattgtgggctttgagagagccctaaagcattgtacctagtggtacctagtgacttccaaccaaagcctttgagtatgcactaaataggtgagaagaaaggagagaaggtttttaggttagaaacctttaaccgatagaaggatatggtatgttgtaaagctggaaccaagtttgcatttttgagggcttgagatgaagggaagactcttaccagatagtaagacagctgagttttcctcagttttctcgtcttaacactagtggacaattctagcattttgtttggaggatttcagagttaacctcatggaattcaggattttttagcaagtttgcttttggttttatcttggcttttagtaatcatgttggctggtctggtcacaggtgactgtgaaacagatgccctggtcttgctttcatcactctaggatcatgaagtgctatgctatttcctggttatgaatattaaggttggaattacatttttattgattgtttggatcagagctcagttcctgtagaaaacgaactgtaaaagaccatgcaagaggcaaaataaaacttgaagtgaatgct

SEQ ID NO: 329262 - DNA, 2323 bp, Homo sapiens
tgtaaacgcggcagttctggtcgtagctatagtgtaaaacgcgcagtgcatgcttgctatagagtaaccatgagggcagctcgcttgtctgttgctgatagtgataacacgaaggagaacgcaatgccaagtgtggccaaaagcatgatggcttgcctcctgtcttcactgaaggctaatggctcccggggagctttctgtgaagtgagaccagatgataaaagaattctggaattttacagcaagttaggatgttttgaaattgcaaaaatggaaggatttccaaaggatgtggttatacttggtcggagcctgtgacatttgttgacactgtgaactgtccaaaagtctcttaactgcaccttgtgaatggtagttgaggtcttcatacagttcagcctctagaatggtaacaaatcagccaattggattcgaaacaaagaagactatgtaaaactcacccatcacactttgagactactcactggttggaagaatatagtattgcagcaaatcctgtatgaaagagagatgtgggcttcctttttgagtcttgtgttaggtgctgagaccttttacatgggcttatacagggagagagtcttcaataaatgtagtcagcactattttctgcatccagtgtggttgcgtttctcacctgagagtaatcaagataacatctgtcatcttccttggtttattgagtgaaatgcctctcagtcttaggggacatggcagagatgaaagaaagaaagagtgggtttcagaagtgtcagggtggagtgattccaagtgggatggttgtggcattagtttaagctgaataaataatttcaatttggggcagttattctgctttttgtaaagccgtggccaattgtctcctgtaatgactgttggttcaggcatgttgtactttgtagggacaaatgtgcatttgtttgtggcaaaagcctacaattgacaaacttgtaaatttctttgtatataaactagctgtaacctgactatcctttgtgtttactgtttttgtaaatttttttcctctataaatgaaagggtgttggttcagaatggcactttgaataatgtaaaccagtgaaaagtggattttctttacttttgtctttgggtttggggttgtttttgttctttttgaagttttattatttttaaagtgcctcccacctaggcgtaggccatgaccatttggggtacgagagcctaattttgtaggacttaatctgttgaaaagtgcagttacttctggaaattaacctcaatattaggtcagcatgtgaaatgttggatttgacatgtcaggtagggttcagggactgattggtcccatttgccctcaggtcagttgtttaatctcaagacctgttactactgattttattaaatcagagtctttaattcttgcatgtttgtatctaatttctgaacgaatgagcacactttaaccagttatttacagttacctttttcctttaaccggattgtgaaagcttcatgtattttaatttagattctgtgtttttaagggttctgagcatgaagctggcagatagtcggcaggactcattttttcatcatggctggctgatttctccatagattgataacagtattttgttatcttgcttctctgtagttttgcatcagctgtttaactttgagctgagtgaggggagaggggtaaagagaaagaaacttaagttttctttcacagaactccaccattgtgggctttgagagagccctaaagcattgtacctagtggtacctagtgacttccaaccaaagcctttgagtatgcactaaataggtgagaagaaaggagagaaggtttttaggttagaaacctttaaccgatagaaggatatggtatgttgtaaagctggaaccaagtttgcatttttgagggcttgagatgaagggaagactcttaccagatagtaagacagctgagttttcctcagttttctcgtcttaacactagtggacaattctagcattttgtttggaggatttcagagttaacctcatggaattcaggattttttagcaagtttgcttttggttttatcttggcttttagtaatcatgttggctggtctggtcacaggtgactgtgaaacagatgccctggtcttgctttcatcactctaggatcatgaagtgctatgctatttcctggttatgaatattaaggttggaattacatttttattgattgtttggatcagagctcagttcctgtagaaaacgaactgtaaaagaccatgcaagaggcaaaataaaacttgaagtgaatgct

SEQ ID NO: 329263 - DNA, 3506 bp, Homo sapiens
cagcgcaagcgcagtgcggataaacaggaagcgggcggtggaggcagcagcagagggagagctcggggcttggaggggaaacagcggaagacctaagattatcgggagggcagcagaggcagagaacgaggacaggacccttggccgtcttcttccagggaacgagaggtcacagcctcgctctccgcttatgcttctggcgccccagcttaaagccgaggctgcggctgacaaagggctcgcgccggtgccgccgcccttctcatccgggcattcgggtccctgcgagaaggagggggaaggacagagggggaggggaaggagccggaggggcgcacacttggagctgaagccctctccagggctccgggccggtgccccaacggacagaggtcgaggaggacccgcagaggtggcagcggccgggggcaggaggatggtgcagaaggagagtcaagcgacgttggaggagcgggagagcgagctcagctccaaccctgccgcctctgcgggggcatcgctggagccgccggcagctccggcacccggagaagacaaccccgccggggctgggggagcggcggtggccggggctgcaggaggggctcggcggttcctctgcggtgtggtggaaggattttatggaagaccttgggttatggaacagagaaaagaactctttagaaggctccagaaatgggaattaaatacatacttgtatgccccaaaagatgactacaaacataggatgttttggcgagagatgtattcagtggaggaagctgagcaacttatgactctcatctctgctgcacgagaatatgagatagagttcatctatgcgatctcacctggattggatatcactttttctaaccccaaggaagtatccacattgaaacgtaaattggaccaggtttctcagtttgggtgcagatcatttgctttgctttttgatgatatagaccataatatgtgtgcagcagacaaagaggtattcagttcttttgctcatgcccaagtctccatcacaaatgaaatctatcagtacctaggagagccagaaactttcctcttctgtcccacagaatactgtggcactttctgttatccaaatgtgtctcagtctccatatttaaggactgtgggtgaaaagcttctacctggaattgaagtgctttggacaggtcccaaagttgtttctaaagaaattccagtagagtccatcgaagaggtttctaagattattaagagagctccagtaatctgggataacattcatgctaatgattatgatcagaagagactgtttctgggcccgtacaaaggaagatccacagaactcatcccacggttaaaaggagtcctcactaatccaaattgtgaatttgaagccaactacgttgctatccacacccttgccacctggtacaaatcaaacatgaatggagtgagaaaagatgtagtgatgactgacagtgaagatagtactgtgtccatccagataaaattagaaaatgaaggcagtgatgaagatattgaaactgatgtactctatagtccacagatggctctaaagctagcattaacagaatggttgcaagagtttggtgtgcctcatcaatacagcagtaggcaagttgcacacagtggagctaaagcaagtgtagttgatgggactcctttagttgcagcaccctctttaaatgccacaaccgtagtaacaacagtttatcaggagcccattatgagccagggagcagccttgagtggtgagcctactactctgaccaaggaagaagaaaagaaacagcctgatgaagaacccatggacatggtggtggaaaaacaagaagaaacggaccacaagaatgacaatcaaatactgagtgaaattgttgaagcgaaaatggcagaggaattgaaaccaatggacactgataaagagagcatagctgaatcaaaatccccagagatgtccatgcaagaagattgtattagtgacattgcccccatgcaaactgatgaacagacaaacaaggagcagtttgtgccaggtccaaatgaaaagcctttgtacactgcggaaccagtgaccctggaggatttgcagttacttgctgatctattctaccttccttacgagcatggacccaaaggagcacagatgttacgggaatttcaatggcttcgagcaaatagtagtgttgtcagtgtcaattgcaaaggaaaagactctgaaaaaattgaagaatggcggtcacgagcagccaagtttgaagagatgtgtggactagtgatgggaatgttcactcggctctccaattgtgccaacaggacaattctttatgacatgtactcctatgtttgggatatcaagagtataatgtctatggtgaagtcttttgtacagtggttagggtgtcgtagtcattcttcagcacaattcttaattggagaccaagaaccctgggcctttagaggtggtctagcaggagagttccagcgtttgctgccaattgatggggcaaatgatctcttttttcagccacctccactgactcctacctccaaagtttatactatcagaccttattttcctaaggatgaggcatccgtgtacaagatttgcagagaaatgtatgacgatggagtgggtttaccctttcaaagtcagcctgatcttattggagacaagttagtaggagggctgctttccctcagcctggattactgctttgtcctagaagatgaagatggcatatgtggttatgccttgggcactgtagatgtgaccccctttattaaaaaatgtaaaatttcctggatccccttcatgcaggagaagtataccaagccaaatggtgacaaggaactctctgaggctgagaaaataatgttgagtttccatgaagaacaggaagtactgccagaaactttccttgctaatttcccttctctgataaagatggacattcacaaaaaagtaactgacccaagtgtggccaaaagcatgatggcttgcctcctgtcttcactgaaggctaatggctcccggggagctttctgtgaagtgagaccagatgataaaagaattctggaattttacagcaagttaggatgttttgaaattgcaaaaatggaaggatttccaaaggatgtggttatacttggtcggagcctgtgacatttgttgacactgtgaactgtccaaaagtctcttaactgcaccttgtgaatggtagttgaggtcttcatacagttcagcctctagaatggtaacaaatcagccaattggattcgaaacaaagaagactatgtaaaactcacccatcacactttgagactactcactggttggaagaatatagtattgcagcaaatcctgtatgaaagagagatgtgggcttcctttttgagtcttgtgttaggtgctgagaccttttacatgggcttatacagggagagagtcttcaataaatgtagtcagcactattttctgcatc

SEQ ID NO: 329264 - DNA, 4155 bp, Homo sapiens
cagcgcaagcgcagtgcggataaacaggaagcgggcggtggaggcagcagcagagggagagctcggggcttggaggggaaacagcggaagacctaagattatcgggagggcagcagaggcagagaacgaggacaggacccttggccgtcttcttccagggaacgagaggtcacagcctcgctctccgcttatgcttctggcgccccagcttaaagccgaggctgcggctgacaaagggctcgcgccggtgccgccgcccttctcatccgggcattcgggtccctgcgagaaggagggggaaggacagagggggaggggaaggagccggaggggcgcacacttggagctgaagccctctccagggctccgggccggtgccccaacggacagaggtcgaggaggacccgcagaggtggcagcggccgggggcaggaggatggtgcagaaggagagtcaagcgacgttggaggagcgggagagcgagctcagctccaaccctgccgcctctgcgggggcatcgctggagccgccggcagctccggcacccggagaagacaaccccgccggggctgggggagcggcggtggccggggctgcaggaggggctcggcggttcctctgcggtgtggtggaaggattttatggaagaccttgggttatggaacagagaaaagaactctttagaaggctccagaaatgggaattaaatacatacttgtatgccccaaaagatgactacaaacataggatgttttggcgagagatgtattcagtggaggaagctgagcaacttatgactctcatctctgctgcacgagaatatgagatagagttcatctatgcgatctcacctggattggatatcactttttctaaccccaaggaagtatccacattgaaacgtaaattggaccaggtttctcagtttgggtgcagatcatttgctttgctttttgatgatatagaccataatatgtgtgcagcagacaaagaggtattcagttcttttgctcatgcccaagtctccatcacaaatgaaatctatcagtacctaggagagccagaaactttcctcttctgtcccacagaatactgtggcactttctgttatccaaatgtgtctcagtctccatatttaaggactgtgggtgaaaagcttctacctggaattgaagtgctttggacaggtcccaaagttgtttctaaagaaattccagtagagtccatcgaagaggtttctaagattattaagagagctccagtaatctgggataacattcatgctaatgattatgatcagaagagactgtttctgggcccgtacaaaggaagatccacagaactcatcccacggttaaaaggagtcctcactaatccaaattgtgaatttgaagccaactacgttgctatccacacccttgccacctggtacaaatcaaacatgaatggagtgagaaaagatgtagtgatgactgacagtgaagatagtactgtgtccatccagataaaattagaaaatgaaggcagtgatgaagatattgaaactgatgtactctatagtccacagatggctctaaagctagcattaacagaatggttgcaagagtttggtgtgcctcatcaatacagcagtaggcaagttgcacacagtggagctaaagcaagtgtagttgatgggactcctttagttgcagcaccctctttaaatgccacaaccgtagtaacaacagtttatcaggagcccattatgagccagggagcagccttgagtggtgagcctactactctgaccaaggaagaagaaaagaaacagcctgatgaagaacccatggacatggtggtggaaaaacaagaagaaacggaccacaagaatgacaatcaaatactgagtgaaattgttgaagcgaaaatggcagaggaattgaaaccaatggacactgataaagagagcatagctgaatcaaaatccccagagatgtccatgcaagaagattgtattagtgacattgcccccatgcaaactgatgaacagacaaacaaggagcagtttgtgccaggtccaaatgaaaagcctttgtacactgcggaaccagtgaccctggaggatttgcagttacttgctgatctattctaccttccttacgagcatggacccaaaggagcacagatgttacgggaatttcaatggcttcgagcaaatagtagtgttgtcagtgtcaattgcaaaggaaaagactctgaaaaaattgaagaatggcggtcacgagcagccaagtttgaagagatgtgtggactagtgatgggaatgttcactcggctctccaattgtgccaacaggacaattctttatgacatgtactcctatgtttgggatatcaagagtataatgtctatggtgaagtcttttgtacagtggttagggtgtcgtagtcattcttcagcacaattcttaattggagaccaagaaccctgggcctttagaggtggtctagcaggagagttccagcgtttgctgccaattgatggggcaaatgatctcttttttcagccacctccactgactcctacctccaaagtttatactatcagaccttattttcctaaggatgaggcatccgtgtacaagatttgcagagaaatgtatgacgatggagtgggtttaccctttcaaagtcagcctgatcttattggagacaagttagtaggagggctgctttccctcagcctggattactgctttgtcctagaagatgaagatggcatatgtggttatgccttgggcactgtagatgtgaccccctttattaaaaaatgtaaaatttcctggatccccttcatgcaggagaagtataccaagccaaatggtgacaaggaactctctgaggctgagaaaataatgttgagtttccatgaagaacaggaagtactgccagaaactttccttgctaatttcccttctctgataaagatggacattcacaaaaaagtaactgacccaagtgtggccaaaagcatgatggcttgcctcctgtcttcactgaaggctaatggctcccggggagctttctgtgaagtgagaccagatgataaaagaattctggaattttacagcaagttaggatgttttgaaattgcaaaaatggaaggatttccaaaggatgtggttatacttggtcggagcctgtgacatttgttgacactgtgaactgtccaaaagtctcttaactgcaccttgtgaatggtagttgaggtcttcatacagttcagcctctagaatggtaacaaatcagccaattggattcgaaacaaagaagactatgtaaaactcacccatcacactttgagactactcactggttggaagaatatagtattgcagcaaatcctgtatgaaagagagatgtgggcttcctttttgagtcttgtgttaggtgctgagaccttttacatgggcttatacagggagagagtcttcaataaatgtagtcagcactattttctgcatccagtgtggttgcgtttctcacctgagagtaatcaagataacatctgtcatcttccttggtttattgagtgaaatgcctctcagtcttaggggacatggcagagatgaaagaaagaaagagtgggtttcagaagtgtcagggtggagtgattccaagtgggatggttgtggcattagtttaagctgaataaataatttcaatttggggcagttattctgctttttgtaaagccgtggccaattgtctcctgtaatgactgttggttcaggcatgttgtactttgtagggacaaatgtgcatttgtttgtggcaaaagcctacaattgacaaacttgtaaatttctttgtatataaactagctgtaacctgactatcctttgtgtttactgtttttgtaaatttttttcctctataaatgaaagggtgttggttcagaatggcactttgaataatgtaaaccagtgaaaagtggattttctttacttttgtctttgggtttggggttgtttttgttctttttgaagttttattatttttaaagtgcctcccacctaggcgtaggccatgaccatttggggcccagacccaaatcttattggtctttattttgtctaaaagagccgtctctctgtgtatttaactctcgtat

SEQ ID NO: 329265 - DNA, 4368 bp, Homo sapiens
cagcgcaagcgcagtgcggataaacaggaagcgggcggtggaggcagcagcagagggagagctcggggcttggaggggaaacagcggaagacctaagattatcgggagggcagcagaggcagagaacgaggacaggacccttggccgtcttcttccagggaacgagaggtcacagcctcgctctccgcttatgcttctggcgccccagcttaaagccgaggctgcggctgacaaagggctcgcgccggtgccgccgcccttctcatccgggcattcgggtccctgcgagaaggagggggaaggacagagggggaggggaaggagccggaggggcgcacacttggagctgaagccctctccagggctccgggccggtgccccaacggacagaggtcgaggaggacccgcagaggtggcagcggccgggggcaggaggatggtgcagaaggagagtcaagcgacgttggaggagcgggagagcgagctcagctccaaccctgccgcctctgcgggggcatcgctggagccgccggcagctccggcacccggagaagacaaccccgccggggctgggggagcggcggtggccggggctgcaggaggggctcggcggttcctctgcggtgtggtggaaggattttatggaagaccttgggttatggaacagagaaaagaactctttagaaggctccagaaatgggaattaaatacatacttgtatgccccaaaagatgactacaaacataggatgttttggcgagagatgtattcagtggaggaagctgagcaacttatgactctcatctctgctgcacgagaatatgagatagagttcatctatgcgatctcacctggattggatatcactttttctaaccccaaggaagtatccacattgaaacgtaaattggaccaggtttctcagtttgggtgcagatcatttgctttgctttttgatgatatagaccataatatgtgtgcagcagacaaagaggtattcagttcttttgctcatgcccaagtctccatcacaaatgaaatctatcagtacctaggagagccagaaactttcctcttctgtcccacagaatactgtggcactttctgttatccaaatgtgtctcagtctccatatttaaggactgtgggtgaaaagcttctacctggaattgaagtgctttggacaggtcccaaagttgtttctaaagaaattccagtagagtccatcgaagaggtttctaagattattaagagagctccagtaatctgggataacattcatgctaatgattatgatcagaagagactgtttctgggcccgtacaaaggaagatccacagaactcatcccacggttaaaaggagtcctcactaatccaaattgtgaatttgaagccaactacgttgctatccacacccttgccacctggtacaaatcaaacatgaatggagtgagaaaagatgtagtgatgactgacagtgaagatagtactgtgtccatccagataaaattagaaaatgaaggcagtgatgaagatattgaaactgatgtactctatagtccacagatggctctaaagctagcattaacagaatggttgcaagagtttggtgtgcctcatcaatacagcagtaggcaagttgcacacagtggagctaaagcaagtgtagttgatgggactcctttagttgcagcaccctctttaaatgccacaaccgtagtaacaacagtttatcaggagcccattatgagccagggagcagccttgagtggtgagcctactactctgaccaaggaagaagaaaagaaacagcctgatgaagaacccatggacatggtggtggaaaaacaagaagaaacggaccacaagaatgacaatcaaatactgagtgaaattgttgaagcgaaaatggcagaggaattgaaaccaatggacactgataaagagagcatagctgaatcaaaatccccagagatgtccatgcaagaagattgtattagtgacattgcccccatgcaaactgatgaacagacaaacaaggagcagtttgtgccaggtccaaatgaaaagcctttgtacactgcggaaccagtgaccctggaggatttgcagttacttgctgatctattctaccttccttacgagcatggacccaaaggagcacagatgttacgggaatttcaatggcttcgagcaaatagtagtgttgtcagtgtcaattgcaaaggaaaagactctgaaaaaattgaagaatggcggtcacgagcagccaagtttgaagagatgtgtggactagtgatgggaatgttcactcggctctccaattgtgccaacaggacaattctttatgacatgtactcctatgtttgggatatcaagagtataatgtctatggtgaagtcttttgtacagtggttaggtaggtgcaccaggaataatctcttctcctcaaatatattgtccctttaaaaaaaattatcccacagggagaaaaacatttagggaattggcacatttccaagtctcttcaattcgttgcctaggtttctttcaaaaataggcattattgaagacttgagatgcaagtcttagtaaatacatcaagcacattaatttttctcccttgggctaattcagcataagtatcttaaaagtatgttagaaagtactgactttaacttgctctgactgaatgctttctggatggaaccctgtataccacttttatctgatttggagatgagacactatgaaatgtgactccacaagctttctgctgcttgctgtgtcttgataacattaatgctatgtttaacagaacaattgctgaaatgacctaaagggcctggcaagaggaagccatcctcccagccctgtgcgcatgcgagctttagtgtaaggctattctggtgctattcagtattatttcacgtggctttttctttatccttctaccaagtattggttttaccaggggatagaaattgtaatcccctaaacatctctgctacattaaatggacttttgtatgtctcctttgaacactgattttttttttttaaattgtcaaacttggtaaaaagcaccagcatggccaagtttctctagggacttcatttcattttcaggttttcaatccagctataaggaatatgtaatggacttatatacagcacacagcaggcagcaaggctgactgacatgtcatagttttcatagtagtcacaaatactatgatgggtttcatggtcttggttgtgaaatagatatctgaaacaccgtgagcttagaataaaaagtagtagtgagattttccactttctgcctgtatacctttgagctcttaaatatttaaaaaaaaaaaaaaaaagtttccctgtgatacaactaattagctactaaaagtagagtctcagattgttaatttgaaaatagataactttttttggattgctgtaataacaggtagaagagagtattttgacctcatgttaaaaggctctgtatagcttcgggcgcggttgctcacccctgtaatcccagcgctcttggtggctgaggtgggtggatcacttgagatcaggagttcgagaccagcctggtgaaaaccagcatgagaccagcatggtgaaaccctatctctactaaaaaaatacaaaaattagccaggcgtggtggcgcatgcctgtaatcccagctacttgagaggctgaggcaggagaattgcttgaactcaggaggcagaggttgcagtgagctgagatcacaccattgcactccagcctgggcgatagagggagactccatctcaaaataaatacaataaataaaggaaatactgaccgtgcgcagcggctcaacactcccgacctcaggtgatacagaacctccttcaggctccccacagttgctacggattaatacggcggtgaagccaccacgagcctggacttcatttacctccactagatctattttctactatttcaccctttactgacctataggtcacatggatgtgtaccaaggaggacatggcccaggttgacgacaccacgtcaatagggaattacaactgacacctatggcaggcgagttgaggctgactgaatgtattgcggtcgccccatctgaacacatgacggcactacacacctgtacaacaatggtggaatctatcagtccatgacatcatggacatgcagcgacgcactacgcagcagaactctagctataaaacgaagtcactccagactgcatgtacacaacactgcagacctaagacaattggagcagcgcacgcgggatcaactagaactatcccgacaggagtccagagtacacagctaaacctgtacctcacgaga

SEQ ID NO: 329266 - DNA, 3358 bp, Homo sapiens
  misc_feature (3277)..(3277): n is a, c, g, or t
  misc_feature (3327)..(3327): n is a, c, g, or t
  misc_feature (3330)..(3330): n is a, c, g, or t
cagcgcaagcgcagtgcggataaacaggaagcgggcggtggaggcagcagcagagggagagctcggggcttggaggggaaacagcggaagacctaagattatcgggagggcagcagaggcagagaacgaggacaggacccttggccgtcttcttccagggaacgagaggtcacagcctcgctctccgcttatgcttctggcgccccagcttaaagccgaggctgcggctgacaaagggctcgcgccggtgccgccgcccttctcatccgggcattcgggtccctgcgagaaggagggggaaggacagagggggaggggaaggagccggaggggcgcacacttggagctgaagccctctccagggctccgggccggtgccccaacggacagaggtcgaggaggacccgcagaggtggcagcggccgggggcaggaggatggtgcagaaggagagtcaagcgacgttggaggagcgggagagcgagctcagctccaaccctgccgcctctgcgggggcatcgctggagccgccggcagctccggcacccggagaagacaaccccgccggggctgggggagcggcggtggccggggctgcaggaggggctcggcggttcctctgcggtgtggtggaaggattttatggaagaccttgggttatggaacagagaaaagaactctttagaaggctccagaaatgggaattaaatacatacttgtatgccccaaaagatgactacaaacataggatgttttggcgagagatgtattcagtggaggaagctgagcaacttatgactctcatctctgctgcacgagaatatgagatagagttcatctatgcgatctcacctggattggatatcactttttctaaccccaaggaagtatccacattgaaacgtaaattggaccaggtttctcagtttgggtgcagatcatttgctttgctttttgatgatatagaccataatatgtgtgcagcagacaaagaggtattcagttcttttgctcatgcccaagtctccatcacaaatgaaatctatcagtacctaggagagccagaaactttcctcttctgtcccacagaatactgtggcactttctgttatccaaatgtgtctcagtctccatatttaaggactgtgggtgaaaagcttctacctggaattgaagtgctttggacaggtcccaaagttgtttctaaagaaattccagtagagtccatcgaagaggtttctaagattattaagagagctccagtaatctgggataacattcatgctaatgattatgatcagaagagactgtttctgggcccgtacaaaggaagatccacagaactcatcccacggttaaaaggagtcctcactaatccaaattgtgaatttgaagccaactacgttgctatccacacccttgccacctggtacaaatcaaacatgaatggagtgagaaaagatgtagtgatgactgacagtgaagatagtactgtgtccatccagataaaattagaaaatgaaggcagtgatgaagatattgaaactgatgtactctatagtccacagatggctctaaagctagcattaacagaatggttgcaagagtttggtgtgcctcatcaatacagcagtaggcaagttgcacacagtggagctaaagcaagtgtagttgatgggactcctttagttgcagcaccctctttaaatgccacaaccgtagtaacaacagtttatcaggagcccattatgagccagggagcagccttgagtggtgagcctactactctgaccaaggaagaagaaaagaaacagcctgatgaagaacccatggacatggtggtggaaaaacaagaagaaacggaccacaagaatgacaatcaaatactgagtgaaattgttgaagcgaaaatggcagaggaattgaaaccaatggacactgataaagagagcatagctgaatcaaaatccccagagatgtccatgcaagaagattgtattagtgacattgcccccatgcaaactgatgaacagacaaacaaggagcagtttgtgccaggtccaaatgaaaagcctttgtacactgcggaaccagtgaccctggaggatttgcagttacttgctgatctattctaccttccttacgagcatggacccaaaggagcacagatgttacgggaatttcaatggcttcgagcaaatagtagtgttgtcagtgtcaattgcaaaggaaaagactctgaaaaaattgaagaatggcggtcacgagcagccaagtttgaagagatgtgtggactagtgatgggaatgttcactcggctctccaattgtgccaacaggacaattctttatgacatgtactcctatgtttgggatatcaagagtataatgtctatggtgaagtcttttgtacagtggttagggtgtcgtagtcattcttcagcacaattcttaattggagaccaagaaccctgggcctttagaggtggtctagcaggagagttccagcgtttgctgccaattgatggggcaaatgatctcttttttcagccacctccactgactcctacctccaaagtttatactatcagaccttattttcctaaggatgaggcatccgtgtacaagatttgcagagaaatgtatgacgatggagtgggtttaccctttcaaagtcagcctgatcttattggagacaagttagtaggagggctgctttccctcagcctggattactgctttgtcctagaagatgaagatggcatatgtggttatgccttgggcactgtagatgtgaccccctttattaaaaaatgtaaaatttcctggatccccttcatgcaggagaagtataccaagccaaatggtgacaaggaactctctgaggctgagaaaataatgttgagtttccatgaagaacaggaagtactgccagaaactttccttgctaatttcccttctctgataaagatggacattcacaaaaaagtaactgacccaagtgtggccaaaagcatgatggcttgcctcctgtcttcactgaaggctaatggtgagtacatatttgtggagttggtggtatttgggcaagatagggaaagaactatatatttttggatataaaaggaaagaagtgaattgtaaatttatactgcttttcccaccttttatgatttggtttctgaattaattagtggtgaagaatcgcatgtgtattaataattgagaaatgctggctggtctcaaactcctggactcaagtgatcctcccacttcggnctcccgaagtgctaggattacaagcatgagccactaagccgcgacgcggncgngaatttagtagtaggagtcgacccggga

SEQ ID NO: 329267 - DNA, 3614 bp, Homo sapiens
cagcgcaagcgcagtgcggataaacaggaagcgggcggtggaggcagcagcagagggagagctcggggcttggaggggaaacagcggaagacctaagattatcgggagggcagcagaggcagagaacgaggacaggacccttggccgtcttcttccagggaacgagaggtcacagcctcgctctccgcttatgcttctggcgccccagcttaaagccgaggctgcggctgacaaagggctcgcgccggtgccgccgcccttctcatccgggcattcgggtccctgcgagaaggagggggaaggacagagggggaggggaaggagccggaggggcgcacacttggagctgaagccctctccagggctccgggccggtgccccaacggacagaggtcgaggaggacccgcagaggtggcagcggccgggggcaggaggatggtgcagaaggagagtcaagcgacgttggaggagcgggagagcgagctcagctccaaccctgccgcctctgcgggggcatcgctggagccgccggcagctccggcacccggagaagacaaccccgccggggctgggggagcggcggtggccggggctgcaggaggggctcggcggttcctctgcggtgtggtggaaggattttatggaagaccttgggttatggaacagagaaaagaactctttagaaggctccagaaatgggaattaaatacatacttgtatgccccaaaagatgactacaaacataggatgttttggcgagagatgtattcagtggaggaagctgagcaacttatgactctcatctctgctgcacgagaatatgagatagagttcatctatgcgatctcacctggattggatatcactttttctaaccccaaggaagtatccacattgaaacgtaaattggaccaggtttctcagtttgggtgcagatcatttgctttgctttttgatgatatagaccataatatgtgtgcagcagacaaagaggtattcagttcttttgctcatgcccaagtctccatcacaaatgaaatctatcagtacctaggagagccagaaactttcctcttctgtcccacagaatactgtggcactttctgttatccaaatgtgtctcagtctccatatttaaggactgtgggtgaaaagcttctacctggaattgaagtgctttggacaggtcccaaagttgtttctaaagaaattccagtagagtccatcgaagaggtttctaagattattaagagagctccagtaatctgggataacattcatgctaatgattatgatcagaagagactgtttctgggcccgtacaaaggaagatccacagaactcatcccacggttaaaaggagtcctcactaatccaaattgtgaatttgaagccaactacgttgctatccacacccttgccacctggtacaaatcaaacatgaatggagtgagaaaagatgtagtgatgactgacagtgaagatagtactgtgtccatccagataaaattagaaaatgaaggcagtgatgaagatattgaaactgatgtactctatagtccacagatggctctaaagctagcattaacagaatggttgcaagagtttggtgtgcctcatcaatacagcagtaggcaagttgcacacagtggagctaaagcaagtgtagttgatgggactcctttagttgcagcaccctctttaaatgccacaaccgtagtaacaacagtttatcaggagcccattatgagccagggagcagccttgagtggtgagcctactactctgaccaaggaagaagaaaagaaacagcctgatgaagaacccatggacatggtggtggaaaaacaagaagaaacggaccacaagaatgacaatcaaatactgagtgaaattgttgaagcgaaaatggcagaggaattgaaaccaatggacactgataaagagagcatagctgaatcaaaatccccagagatgtccatgcaagaagattgtattagtgacattgcccccatgcaaactgatgaacagacaaacaaggagcagtttgtgccaggtccaaatgaaaagcctttgtacactgcggaaccagtgaccctggaggatttgcagttacttgctgatctattctaccttccttacgagcatggacccaaaggagcacagatgttacgggaatttcaatggcttcgagcaaatagtagtgttgtcagtgtcaattgcaaaggaaaagactctgaaaaaattgaagaatggcggtcacgagcagccaagtttgaagagatgtgtggactagtgatgggaatgttcactcggctctccaattgtgccaacaggacaattctttatgacatgtactcctatgtttgggatatcaagagtataatgtctatggtgaagtcttttgtacagtggttagggtgtcgtagtcattcttcagcacaattcttaattggagaccaagaaccctgggcctttagaggtggtctagcaggagagttccaggtatcaatatgaattcacaactgaattgacattttctttgttttatgagaaaccttatgttgcgcatcagatggctggaaggattggtctgccgaaggctttctagtcccaaattcaatttagttacatagctggatttttaaatcaaattttcctcctctttcacagtaatttctgaaggagatgctgccaatcccccccgcgcctgcgaagcgcagcggctctaggtatacacttcacattgtttctttgcaggtcgcacagcattttaatctgcgcccgcaatgcacaatgcgcgcatgcttgtctgccagtggaagctccatgaacaaaagatagtaattatgccaataaatggtgaaagagcttttggatatttatccaattattttataaatataatgtgcttgaaagaattgtccattgctgaaaatatgaacaaaataggaagtttttttgctgctggaatttgttcatggactttctaggtgctctacttttctccccccaacaggtgctctgctgcgcacagcaaactgaagcgcattgctttggggataaagcgtctcctggacagataaccctcttcagaccaaacctctcctcctgacattctgttctgccatcttatcgtagggagatggtctatctaagataggttttaaaaaaaaatagatttgtcataattggaataggtttgtttttgtttttgtttttgtttttactgtaaatttaaatccccattaatatgccactaaagctgtaactcagagtgggtaatttctattcagaagcactcccctcccccagcaaagaggtatttctattagtaaagcatagtacacccctcttctttaggtctgcctgcagtagccagttaatataagttggtaatctgcagtgcacacccatttaaaaaaatggataccttccccaaactaatccatctctactaaaaatacaaaaaaaaattagctgggtgtggtggcgggtgcctgtaatgccagctactcaggaggctgaggcaggagaattgcttgaacccgggagcgggaggttgcagtgagctgagatggcgccactgcactccagccggggcagcagagtg

SEQ ID NO: 329268 - DNA, 1537 bp, Homo sapiens
cagcgcaagcgcagtgcggataaacaggaagcgggcggtggaggcagcagcagagggagagctcggggcttggaggggaaacagcggaagacctaagattatcgggagggcagcagaggcagagaacgaggacaggacccttggccgtcttcttccagggaacgagaggtcacagcctcgctctccgcttatgcttctggcgccccagcttaaagccgaggctgcggctgacaaagggctcgcgccggtgccgccgcccttctcatccgggcattcgggtccctgcgagaaggagggggaaggacagagggggaggggaaggagccggaggggcgcacacttggagctgaagccctctccagggctccgggccggtgccccaacggacagaggtcgaggaggacccgcagaggtggcagcggccgggggcaggaggatggtgcagaaggagagtcaagcgacgttggaggagcgggagagcgagctcagctccaaccctgccgcctctgcgggggcatcgctggagccgccggcagctccggcacccggagaagacaaccccgccggggctgggggagcggcggtggccggggctgcaggaggggctcggcggttcctctgcggtgtggtggaaggattttatggaagaccttgggttatggaacagagaaaagaactctttagaaggctccagaaatgggaattaaatacatacttgtatgccccaaaagatgactacaaacataggatgttttggcgagagatgtattcagtggaggaagctgagcaacttatgactctcatctctgctgcacgagaatatgagatagagttcatctatgcgatctcacctggattggatatcactttttctaaccccaaggaagtatccacattgaaacgtaaattggaccaggtttctcagtttgggtgcagatcatttgctttgctttttgatgatatagaccataatatgtgtgcagcagacaaagaggtattcagttcttttgctcatgcccaagtctccatcacaaatgaaatctatcagtacctaggagagccagaaactttcctcttctgtcccacagaatactgtggcactttctgttatccaaatgtgtctcagtctccatatttaaggactgtgggtgaaaagcttctacctggaattgaagtgctttggacaggtcccaaagttgtttctaaagaaattccagtagagtccatcgaagaggtttctaagattattaagagagctccagtaatctgggataacattcatgctaatgattatgatcagaagagactgtttctgggcccgtacaaaggaagatccacagaactcatcccacggttaaaaggagtcctcactaatccaaattgtgaatttgaagccaactacgttgctatccacacccttgccacctggtacaaatcaaacatgaatggagtgagaaaagatgtagtgatgactgacagtgaagatagtgctgtggacacccagataatgttaatagctgtttcctcatctaaagcg

SEQ ID NO: 329269 - DNA, 2789 bp, Homo sapiens
agtgagccgaggagccttcatagggacagccgcccctggtgcacacaccctcgtattctcctgcccttccccagccaggcgggcaccacggcaggggctgagctaccctcatggaagggagaggaccgtaccggatctacgaccctgggggcagcgtgccctcaggagaggcatccgcagcttttgagcgcctagtgaaggagaattcccggctgaaggaaaaaatgcaagggataaagatgttaggggagcttttggaagagtcccagatggaagcgaccaggctccggcagaaggcagaggagctagtgaaggacaacgagctgctcccaccaccttctccctccttgggctccttcgaccccctggctgagctcacaggaaaggactcaaatgtcacagcatctcccacagcccctgcatgccccagtgacaagccagcaccagtccagaagcctccatccagtggcacctcctctgaatttgaagtggtcactcctgaggagcagaattcaccagagagcagcagccatgccaatgcgatggcgctgggccccctgccccgtgaggacggcaacctgatgctgcacctgcagcgcctggagaccacgctgagtgtgtgtgccgaggagccggaccacggccagctcttcacccacctgggccgcatggccctggagttcaaccgactggcatccaaggtgcacaagaatgagcagcgcacctccattctgcagaccctgtgtgagcagcttcggaaggagaacgaggctctgaaggccaagttggataagggcctggaacagcgggatcaggctgccgagaggctgcgggaggaaaatttggagctcaagaagttgttgatgagcaatggcaacaaagagggtgcgtctgggcggccaggctcaccgaagatggaagggacaggcaagaaggcagtggctggacagcagcaggctagtgtgacggcaggtaaggtcccagaggtggtggccttgggcgcagccgagaagaaggtgaagatgctggagcagcagcgcagtgagctgctggaagtgaacaagcagtgggaccagcatttccggtccatgaagcagcagtatgagcagaagatcactgagctgcgtcagaagctggctgatttgcagaagcaggtgactgacctggaggccgagcgggagcagaagcagcgtgactttgaccgcaagctcctcctggccaagtccaagattgaaatggaggagaccgacaaggagcagctgacagcagaggccaaggagctgcgccaaaaggtcaagtacctgcaggatcagctgagcccactcacccgacagcgtgagtaccaggaaaaggagatccagcggctcaacaaggccctggaggaagcactgagcatccaaaccccgccatcatctccaccaacagcatttgggagcccagaaggagcaggggccctcctaaggaaacaggagctggtcacgcagaatgagttgctgaaacagcaggtgaagatcttcgaggaggacttccagagggagcgcagtgatcgtgagcgcatgaatgaggagaaggaagagctgaagaagcaagtggagaagctgcaggcccaggtcaccctgtcaaatgcccagctaaaagcattcaaagatgaggagaaggcaagagaagccctcagacagcagaagaggaaagcaaaggcctcaggagagcgttaccatgtggagccccacccagaacatctctgcggggcctacccctacgcctacccgcccatgccagccatggtgccacaccatggcttcgaggactggtcccagatccgctacccccctccccccatggccatggagcacccgcccccactccccaactcgcgcctcttccatctgccggaatacacctggcgtctaccctgtggaggggttcgaaatccaaatcagagctcccaagtgatggaccctcccacagccaggcctacagaaccagagtctccaaaaaatgaccgtgaggggcctcagtgagaccagattgtgtcatttggctccaccttcatcttgcagagccagctgatctcagattgccaagaaactagaagccacttgcacggtgtggccagagcctcagctggatgagaggctgagatgggtggccagcttgtataccagtccctgaactgagctgtttacaggactggggaggctccacccagaaggctttcatttgtactctgctgggagtgactgggaaaaactccttccctgctgctgagtggagagaggcctcatccggctttgacccaccatccgttgcagaagcctccaggagcagcaatcctaagagtgggaggcagccaagacccccttccttcaaaacctcccggaagtggtttcaggccctctagttgccatgaccaatttgtgtgtgtgtttaatttttgcttcaagctctgtagcaggacctgccccacgcacacccctacccctctgtgaggagctgtgggaagtgtgggtttgtctccagaacagaagagaatgatggatattctggctctggggccctctccaccaccactcacagtagccttgctgaagccatcacagatgggagaaggccatgccagccacgtccgccgaggggcgccagcctgaagctgccaggccctgaggttcagaccctggaccccatagctggaggcctgtggtgccagaagcccagattagggtggctgtccatccctggatagctatttgcacgaatcatggacataaatccaagttgaagaagatcaa

SEQ ID NO: 329270 - DNA, 2715 bp, Homo sapiens
agtgagccgaggagccttcatagggacagccgcccctggtgcacacaccctcgtattctcctgcccttccccagccaggcgggcaccacggcaggggctgagctaccctcatggaagggagaggaccgtaccggatctacgaccctgggggcagcgtgccctcaggagaggcatccgcagcttttgagcgcctagtgaaggagaattcccggctgaaggaaaaaatgcaagggataaagatgttaggggagcttttggaagagtcccagatggaagcgaccaggctccggcagaaggcagaggagctagtgaaggacaacgagctgctcccaccaccttctccctccttgggctccttcgaccccctggctgagctcacaggaaaggactcaaatgtcacagcatctcccacagcccctgcatgccccagtgacaagccagcaccagtccagaagcctccatccagtggcacctcctctgaatttgaagtggtcactcctgaggagcagaattcaccagagagcagcagccatgccaatgcgatggcgctgggccccctgccccgtgaggacggcaacctgatgctgcacctgcagcgcctggagaccacgctgagtgtgtgtgccgaggagccggaccacggccagctcttcacccacctgggccgcatggccctggagttcaaccgactggcatccaaggtgcacaagaatgagcagcgcacctccattctgcagaccctgtgtgagcagcttcggaaggagaacgaggctctgaaggccaagttggataagggcctggaacagcgggatcaggctgccgagaggctgcgggaggaaaatttggagctcaagaagttgttgatgagcaatggcaacaaagagggtgcgtctgggcggccaggctcaccgaagatggaagggacaggcaagaaggcagtggctggacagcagcaggctagtgtgacggcaggtaaggtcccagaggtggtggccttgggcgcagccgagaagaaggtgaagatgctggagcagcagcgcagtgagctgctggaagtgaacaagcagtgggaccagcatttccggtccatgaagcagcagtatgagcagaagatcactgagctgcgtcagaagctggctgatttgcagaagcaggtgactgacctggaggccgagcgggagcagaagcagcgtgactttgaccgcaagctcctcctggccaagtccaagattgaaatggaggagaccgacaaggagcagctgacagcagaggccaaggagctgcgccaaaaggtcaagtacctgcaggatcagctgagcccactcacccgacagcgtgagtaccaggaaaaggagatccagcggctcaacaaggccctggaggaagcactgagcatccaaaccccgccatcatctccaccaacagcatttgggagcccagaaggagcaggggccctcctaaggaaacaggagctggtcacgcagaatgagttgctgaaacagcaggtgaagatcttcgaggaggacttccagagggagcgcagtgatcgtgagcgcatgaatgaggagaaggaagagctgaagaagcaagtggagaagctgcaggcccaggtcaccctgtcaaatgcccagctaaaagcattcaaagatgaggagaaggcaagagaagccctcagacagcagaagaggaaagcaaaggcctcaggagagcgttaccatgtggagccccacccagaacatctctgcggggcctacccctacgcctacccgcccatgccagccatggtgccacaccatggcttcgaggactggtcccagatccgctacccccctccccccatggccatggagcacccgcccccactccccaactcgcgcctcttccatctgccggaatacacctggcgtctaccctgtggaggggttcgaaatccaaatcagagctcccaagtgatggaccctcccacagccaggcctacagaaccagagccagctgatctcagattgccaagaaactagaagccacttgcacggtgtggccagagcctcagctggatgagaggctgagatgggtggccagcttgtataccagtccctgaactgagctgtttacaggactggggaggctccacccagaaggctttcatttgtactctgctgggagtgactgggaaaaactccttccctgctgctgagtggagagaggcctcatccggctttgacccaccatccgttgcagaagcctccaggagcagcaatcctaagagtgggaggcagccaagacccccttccttcaaaacctcccggaagtggtttcaggccctctagttgccatgaccaatttgtgtgtgtgtttaatttttgcttcaagctctgtagcaggacctgccccacgcacacccctacccctctgtgaggagctgtgggaagtgtgggtttgtctccagaacagaagagaatgatggatattctggctctggggccctctccaccaccactcacagtagccttgctgaagccatcacagatgggagaaggccatgccagccacgtccgccgaggggcgccagcctgaagctgccaggccctgaggttcagaccctggaccccatagctggaggcctgtggtgccagaagcccagattagggtggctgtccatccctggatagctatttgcacgaatcatggacataaatccaagttgaagaagatcaa

SEQ ID NO: 329271 - DNA, 773 bp, Homo sapiens
agggtggtacctgggcttctccccttcccagtcagttcatctgtgctttcttgattctccaggaaaggactcaaatgtcacagcatctcccacagcccctgcatgccccagtgacaagccagcaccagtccagaagcctccatccagtgtaagttttatttggagtcatgggtggaggttgcctggatggacctcaagtcctactgacagatacaagaacatgaagaaagagggttgaggtcaagaaactgtgttccgtctcgctgggtgatattgggcaagtccatcgcaaactctctggggcctcagcctccccattttgaaatgaaggtcatagttaaaacttaccaggaagaccctggtatgtacaaggaattcttctcacttactaagttgtatactgttaagtatcactgagtgtgcacagtgctaggaaaacagacagatgtgacatggagctcacattctcaaagagggctcagaaactatcttctacaggctgggcgcagtggctcatgcctataatcccaagtagctgggattacaggcatgcaccaccacgcccggtaattttttgtatttttggtagagacggggtttctccatattggccaggctggtcttgaactcctgacctcaggtgatccacccgccttggcctcccaaagtgctaggattacaggcgtgagccactgcgcctggcctcttttcccttcttatcattcttcttccaaagatctgctgtcacttgtcccattttccccagtcctctg

SEQ ID NO: 329272 - DNA, 429 bp, Homo sapiens
taaaaaatgcaatcctcctgctgctggttcaaggtcagctagtcccacatctcccttctacaaaagaggattggccatcgaggggatatgacctcacattatgcagagggctacgacaggcttgtcgagaatcctgctttgtgatctcatgtgagatgatatgtaacggtccctgtgtactcaaaatgggaagagattttgtcccccttgctgctctcagccacagggccgcagaggaggggtgagctgtttttctctcgggcagcacctaacttcctttctgcacagggcacctcctctgaatttgaagtggtcactcctgaggagcagaattcaccagagagcagcagccatgccaatgcgatgagcagcaggaggaattccgcgagcagcaggaggaattccgcgagcagcaggaggaattccgcg

SEQ ID NO: 329273 - DNA, 2767 bp, Homo sapiens
  misc_feature (3)..(3): n is a, c, g, or t
  misc_feature (5)..(6): n is a, c, g, or t
  misc_feature (8)..(8): n is a, c, g, or t
  misc_feature (11)..(11): n is a, c, g, or t
  misc_feature (13)..(13): n is a, c, g, or t
  misc_feature (53)..(54): n is a, c, g, or t
  misc_feature (56)..(56): n is a, c, g, or t
  misc_feature (59)..(59): n is a, c, g, or t
gtngnncnagngncctgccagtctccggggactttcccaggggtggggcggcnngnccnggcccccggcacttcctcgtcctcggcccgggtgccctgcccccgtccaggagccctaggagtgctacggggggccggagccttgcccgggccgctgccccgtccctggattcggggctggacgcagcaagcggggcgctgtgtccccaagctccccgtcctcgggggagcttttggaagagtcccagatggaagcgaccaggctccggcagaaggcagaggagctagtgaaggacaacgagctgctcccaccaccttctccctccttgggctccttcgaccccctggctgagctcacaggaaaggactcaaatgtcacagcatctcccacagcccctgcatgccccagtgacaagccagcaccagtccagaagcctccatccagtggcacctcctctgaatttgaagtggtcactcctgaggagcagaattcaccagagagcagcagccatgccaatgcgatggcgctgggccccctgccccgtgaggacggcaacctgatgctgcacctgcagcgcctggagaccacgctgagtgtgtgtgccgaggagccggaccacggccagctcttcacccacctgggccgcatggccctggagttcaaccgactggcatccaaggtgcacaagaatgagcagcgcacctccattctgcagaccctgtgtgagcagcttcggaaggagaacgaggctctgaaggccaagttggataagggcctggaacagcgggatcaggctgccgagaggctgcgggaggaaaatttggagctcaagaagttgttgatgagcaatggcaacaaagagggtgcgtctgggcggccaggctcaccgaagatggaagggacaggcaagaaggcagtggctggacagcagcaggctagtgtgacggcaggtaaggtcccagaggtggtggccttgggcgcagccgagaagaaggtgaagatgctggagcagcagcgcagtgagctgctggaagtgaacaagcagtgggaccagcatttccggtccatgaagcagcagtatgagcagaagatcactgagctgcgtcagaagctggctgatttgcagaagcaggtgactgacctggaggccgagcgggagcagaagcagcgtgactttgaccgcaagctcctcctggccaagtccaagattgaaatggaggagaccgacaaggagcagctgacagcagaggccaaggagctgcgccaaaaggtcaagtacctgcaggatcagctgagcccactcacccgacagcgtgagtaccaggaaaaggagatccagcggctcaacaaggccctggaggaagcactgagcatccaaaccccgccatcatctccaccaacagcatttgggagcccagaaggagcaggggccctcctaaggaaacaggagctggtcacgcagaatgagttgctgaaacagcaggtgaagatcttcgaggaggacttccagagggagcgcagtgatcgtgagcgcatgaatgaggagaaggaagagctgaagaagcaagtggagaagctgcaggcccaggtcaccctgtcaaatgcccagctaaaagcattcaaagatgaggagaaggcaagagaagccctcagacagcagaagaggaaagcaaaggcctcaggagagcgttaccatgtggagccccacccagaacatctctgcggggcctacccctacgcctacccgcccatgccagccatggtgccacaccatggcttcgaggactggtcccagatccgctacccccctccccccatggccatggagcacccgcccccactccccaactcgcgcctcttccatctgccggaatacacctggcgtctaccctgtggaggggttcgaaatccaaatcagagctcccaagtgatggaccctcccacagccaggcctacagaaccagagtctccaaaaaatgaccgtgaggggcctcagtgagaccagattgtgtcatttggctccaccttcatcttgcagagccagctgatctcagattgccaagaaactagaagccacttgcacggtgtggccagagcctcagctggatgagaggctgagatgggtggccagcttgtataccagtccctgaactgagctgtttacaggactggggaggctccacccagaaggctttcatttgtactctgctgggagtgactgggaaaaactccttccctgctgctgagtggagagaggcctcatccggctttgacccaccatccgttgcagaagcctccaggagcagcaatcctaagagtgggaggcagccaagacccccttccttcaaaacctcccggaagtggtttcaggccctctagttgccatgaccaatttgtgtgtgtgtttaatttttgcttcaagctctgtagcaggacctgccccacgcacacccctacccctctgtgaggagctgtgggaagtgtgggtttgtctccagaacagaagagaatgatggatattctggctctggggccctctccaccaccactcacagtagccttgctgaagccatcacagatgggagaaggccatgccagccacgtccgccgaggggcgccagcctgaagctgccaggccctgaggttcagaccctggaccccatagctggaggcctgtggtgccagaagcccagattagggtggctgtccatccctggatagctatttgcacgaatcatggacataaatccaagttgaagaagatcaa

SEQ ID NO: 329274 - DNA, 3424 bp, Homo sapiens
  misc_feature (3)..(3): n is a, c, g, or t
  misc_feature (5)..(6): n is a, c, g, or t
  misc_feature (8)..(8): n is a, c, g, or t
  misc_feature (11)..(11): n is a, c, g, or t
  misc_feature (13)..(13): n is a, c, g, or t
  misc_feature (53)..(54): n is a, c, g, or t
  misc_feature (56)..(56): n is a, c, g, or t
  misc_feature (59)..(59): n is a, c, g, or t
gtngnncnagngncctgccagtctccggggactttcccaggggtggggcggcnngnccnggcccccggcacttcctcgtcctcggcccgggtgccctgcccccgtccaggagccctaggagtgctacggggggccggagccttgcccgggccgctgccccgtccctggattcggggctggacgcagcaagcggggcgctgtgtccccaagctccccgtcctcggccaggcgggcaccacggcaggggctgagctaccctcatggaagggagaggaccgtaccggatctacgaccctgggggcagcgtgccctcaggagaggcatccgcagcttttgagcgcctagtgaaggagaattcccggctgaaggaaaaaatgcaagggataaagatgttaggggagcttttggaagagtcccagatggaagcgaccaggctccggcagaaggcagaggagctagtgaaggacaacgagctgctcccaccaccttctccctccttgggctccttcgaccccctggctgagctcacaggaaaggactcaaatgtcacagcatctcccacagcccctgcatgccccagtgacaagccagcaccagtccagaagcctccatccagtggcacctcctctgaatttgaagtggtcactcctgaggagcagaattcaccagagagcagcagccatgccaatgcgatggcgctgggccccctgccccgtgaggacggcaacctgatgctgcacctgcagcgcctggagaccacgctgagtgtgtgtgccgaggagccggaccacggccagctcttcacccacctgggccgcatggccctggagttcaaccgactggcatccaaggtgcacaagaatgagcagcgcacctccattctgcagaccctgtgtgagcagcttcggaaggagaacgaggctctgaaggccaagttggataagggcctggaacagcgggatcaggctgccgagaggctgcgggaggaaaatttggagctcaagaagttgttgatgagcaatggcaacaaagagggtgcgtctgggcggccaggctcaccgaagatggaagggacaggcaagaaggcagtggctggacagcagcaggctagtgtgacggcaggtaaggtcccagaggtggtggccttgggcgcagccgagaagaaggtgaagatgctggagcagcagcgcagtgagctgctggaagtgaacaagcagtgggaccagcatttccggtccatgaagcagcagtatgagcagaagatcactgagctgcgtcagaagctggctgatttgcagaagcaggtgactgacctggaggccgagcgggagcagaagcagcgtgactttgaccgcaagctcctcctggccaagtccaagattgaaatggaggagaccgacaaggagcagctgacagcagaggccaaggagctgcgccaaaaggtcaagtacctgcaggatcagctgagcccactcacccgacagcgtgagtaccaggaaaaggagatccagcggctcaacaaggccctggaggaagcactgagcatccaaaccccgccatcatctccaccaacagcatttgggagcccagaaggagcaggggccctcctaaggaaacaggagctggtcacgcagaatgagttgctgaaacagcaggtgaagatcttcgaggaggacttccagagggagcgcagtgatcgtgagcgcatgaatgaggagaaggaagagctgaagaagcaagtggagaagctgcaggcccaggtcaccctgtcaaatgcccagctaaaagcattcaaagatgaggagaaggcaagagaagccctcagacagcagaagaggaaagcaaaggcctcaggagagcgttaccatgtggagccccacccagaacatctctgcggggcctacccctacgcctacccgcccatgccagccatggtgccacaccatggcttcgaggactggtcccagatccgctacccccctccccccatggccatggagcacccgcccccactccccaactcgcgcctcttccatctgccggaatacacctggcgtctaccctgtggaggggttcgaaatccaaatcagagctcccaagtgatggaccctcccacagccaggcctacagaaccagagtctccaaaaaatgaccgtgaggggcctcagtgagaccagattgtgtcatttggctccaccttcatcttgcagagccagctgatctcagattgccaagaaactagaagccacttgcacggtgtggccagagcctcagctggatgagaggctgagatgggtggccagcttgtataccagtccctgaactgagctgtttacaggactggggaggctccacccagaaggctttcatttgtactctgctgggagtgactgggaaaaactccttccctgctgctgagtggagagaggcctcatccggctttgacccaccatccgttgcagaagcctccaggagcagcaatcctaagagtgggaggcagccaagacccccttccttcaaaacctcccggaagtggtttcaggccctctagttgccatgaccaatttgtgtgtgtgtttaatttttgcttcaagctctgtagcaggacctgccccacgcacacccctacccctctgtgaggagctgtgggaagtgtgggtttgtctccagaacagaagagaatgatggatattctggctctggggccctctccaccaccactcacagtagccttgctgaagccatcacagatgggagaaggccatgccagccacgtccgccgaggggcgccagcctgaagctgccaggccctgaggttcagaccctggaccccatagctggaggcctgtggtgccagaagcccagattagggtggctgtccatccctggatagctatttgcacgaatcatggacataaatccaagttgaagaagatcaaaaaaaaaaaaaaaaaaaaaaaaaaaaaaaaaaaaaaaaaaaaaagcacggtgtgatggtgtatgtctgtggttccagctacttgggaggctggctgaggcagaagggtcgcttgagccccggaggtccaggctgcagtgagccctgttgatgcccccacactcccgcctgggtgacagagtcagaccctctcattaaaaaaaaaaaatctacagatttggctggagaagttttgcttggtatcctacaagggattgcatagttcagcatccttatcctacagatcaggtgcagggaaagaaggacctgttctgaggttacacgggtaatggggaaaatgtagatggaggagggagactttctagggcagggccaagagccagaggtgagttcttggtggccatgagggtcagctggaagctgagcactgactcctctcatctatcctgcacctttctgggacgaagggggatgacacgaatcctg

SEQ ID NO: 329275 - DNA, 2669 bp, Homo sapiens
  misc_feature (3)..(3): n is a, c, g, or t
  misc_feature (5)..(6): n is a, c, g, or t
  misc_feature (8)..(8): n is a, c, g, or t
  misc_feature (11)..(11): n is a, c, g, or t
  misc_feature (13)..(13): n is a, c, g, or t
  misc_feature (53)..(54): n is a, c, g, or t
  misc_feature (56)..(56): n is a, c, g, or t
  misc_feature (59)..(59): n is a, c, g, or t
gtngnncnagngncctgccagtctccggggactttcccaggggtggggcggcnngnccnggcccccggcacttcctcgtcctcggcccgggtgccctgcccccgtccaggagccctaggagtgctacggggggccggagccttgcccgggccgctgccccgtccctggattcggggctggacgcagcaagcggggcgctgtgtccccaagctccccgtcctcggccaggcgggcaccacggcaggggctgagctaccctcatggaagggagaggaccgtaccggatctacgaccctgggggcagcgtgccctcaggagaggcatccgcagcttttgagcgcctagtgaaggagaattcccggctgaaggaaaaaatgcaagggataaagatgttaggggagcttttggaagagtcccagatggaagcgaccaggctccggcagaaggcagaggagctagtgaaggacaacgagctgctcccaccaccttctccctccttgggctccttcgaccccctggctgagctcacaggaaaggactcaaatgtcacagcatctcccacagcccctgcatgccccagtgacaagccagcaccagtccagaagcctccatccagtaccctgtgtgagcagcttcggaaggagaacgaggctctgaaggccaagttggataagggcctggaacagcgggatcaggctgccgagaggctgcgggaggaaaatttggagctcaagaagttgttgatgagcaatggcaacaaagagggtgcgtctgggcggccaggctcaccgaagatggaagggacaggcaagaaggcagtggctggacagcagcaggctagtgtgacggcaggtaaggtcccagaggtggtggccttgggcgcagccgagaagaaggtgaagatgctggagcagcagcgcagtgagctgctggaagtgaacaagcagtgggaccagcatttccggtccatgaagcagcagtatgagcagaagatcactgagctgcgtcagaagctggctgatttgcagaagcaggtgactgacctggaggccgagcgggagcagaagcagcgtgactttgaccgcaagctcctcctggccaagtccaagattgaaatggaggagaccgacaaggagcagctgacagcagaggccaaggagctgcgccaaaaggtcaagtacctgcaggatcagctgagcccactcacccgacagcgtgagtaccaggaaaaggagatccagcggctcaacaaggccctggaggaagcactgagcatccaaaccccgccatcatctccaccaacagcatttgggagcccagaaggagcaggggccctcctaaggaaacaggagctggtcacgcagaatgagttgctgaaacagcaggtgaagatcttcgaggaggacttccagagggagcgcagtgatcgtgagcgcatgaatgaggagaaggaagagctgaagaagcaagtggagaagctgcaggcccaggtcaccctgtcaaatgcccagctaaaagcattcaaagatgaggagaaggcaagagaagccctcagacagcagaagaggaaagcaaaggcctcaggagagcgttaccatgtggagccccacccagaacatctctgcggggcctacccctacgcctacccgcccatgccagccatggtgccacaccatggcttcgaggactggtcccagatccgctacccccctccccccatggccatggagcacccgcccccactccccaactcgcgcctcttccatctgccggaatacacctggcgtctaccctgtggaggggttcgaaatccaaatcagagctcccaagtgatggaccctcccacagccaggcctacagaaccagagtctccaaaaaatgaccgtgaggggcctcagtgagaccagattgtgtcatttggctccaccttcatcttgcagagccagctgatctcagattgccaagaaactagaagccacttgcacggtgtggccagagcctcagctggatgagaggctgagatgggtggccagcttgtataccagtccctgaactgagctgtttacaggactggggaggctccacccagaaggctttcatttgtactctgctgggagtgactgggaaaaactccttccctgctgctgagtggagagaggcctcatccggctttgacccaccatccgttgcagaagcctccaggagcagcaatcctaagagtgggaggcagccaagacccccttccttcaaaacctcccggaagtggtttcaggccctctagttgccatgaccaatttgtgtgtgtgtttaatttttgcttcaagctctgtagcaggacctgccccacgcacacccctacccctctgtgaggagctgtgggaagtgtgggtttgtctccagaacagaagagaatgatggatattctggctctggggccctctccaccaccactcacagtagccttgctgaagccatcacagatgggagaaggccatgccagccacgtccgccgaggggcgccagcctgaagctgccaggccctgaggttcagaccctggaccccatagctggaggcctgtggtgccagaagcccagattagggtggctgtccatccctggatagctatttgcacgaatcatggacataaatccaagttgaagaagatcaa

SEQ ID NO: 329276 - DNA, 1979 bp, Homo sapiens
agtgagccgaggagccttcatagggacagccgcccctggtgcacacaccctcgtattctcctgcccttccccagccaggcgggcaccacggcaggggctgagctaccctcatggaagggagaggaccgtaccggatctacgaccctgggggcagcgtgccctcaggagaggcatccgcagcttttgagcgcctagtgaagaagaaggtgaagatgctggagcagcagcgcagtgagctgctggaagtgaacaagcagtgggaccagcatttccggtccatgaagcagcagtatgagcagaagatcactgagctgcgtcagaagctggctgatttgcagaagcaggtgactgacctggaggccgagcgggagcagaagcagcgtgactttgaccgcaagctcctcctggccaagtccaagattgaaatggaggagaccgacaaggagcagctgacagcagaggccaaggagctgcgccaaaaggtcaagtacctgcaggatcagctgagcccactcacccgacagcgtgagtaccaggaaaaggagatccagcggctcaacaaggccctggaggaagcactgagcatccaaaccccgccatcatctccaccaacagcatttgggagcccagaaggagcaggggccctcctaaggaaacaggagctggtcacgcagaatgagttgctgaaacagcaggtgaagatcttcgaggaggacttccagagggagcgcagtgatcgtgagcgcatgaatgaggagaaggaagagctgaagaagcaagtggagaagctgcaggcccaggtcaccctgtcaaatgcccagctaaaagcattcaaagatgaggagaaggcaagagaagccctcagacagcagaagaggaaagcaaaggcctcaggagagcgttaccatgtggagccccacccagaacatctctgcggggcctacccctacgcctacccgcccatgccagccatggtgccacaccatggcttcgaggactggtcccagatccgctacccccctccccccatggccatggagcacccgcccccactccccaactcgcgcctcttccatctgccggaatacacctggcgtctaccctgtggaggggttcgaaatccaaatcagagctcccaagtgatggaccctcccacagccaggcctacagaaccagagtctccaaaaaatgaccgtgaggggcctcagtgagaccagattgtgtcatttggctccaccttcatcttgcagagccagctgatctcagattgccaagaaactagaagccacttgcacggtgtggccagagcctcagctggatgagaggctgagatgggtggccagcttgtataccagtccctgaactgagctgtttacaggactggggaggctccacccagaaggctttcatttgtactctgctgggagtgactgggaaaaactccttccctgctgctgagtggagagaggcctcatccggctttgacccaccatccgttgcagaagcctccaggagcagcaatcctaagagtgggaggcagccaagacccccttccttcaaaacctcccggaagtggtttcaggccctctagttgccatgaccaatttgtgtgtgtgtttaatttttgcttcaagctctgtagcaggacctgccccacgcacacccctacccctctgtgaggagctgtgggaagtgtgggtttgtctccagaacagaagagaatgatggatattctggctctggggccctctccaccaccactcacagtagccttgctgaagccatcacagatgggagaaggccatgccagccacgtccgccgaggggcgccagcctgaagctgccaggccctgaggttcagaccctggaccccatagctggaggcctgtggtgccagaagcccagattagggtggctgtccatccctggatagctatttgcacgaatcatggacataaatccaagttgaagaagatcaa

SEQ ID NO: 329277 - DNA, 2885 bp, Homo sapiens
  misc_feature (3)..(3): n is a, c, g, or t
  misc_feature (5)..(6): n is a, c, g, or t
  misc_feature (8)..(8): n is a, c, g, or t
  misc_feature (11)..(11): n is a, c, g, or t
  misc_feature (13)..(13): n is a, c, g, or t
  misc_feature (53)..(54): n is a, c, g, or t
  misc_feature (56)..(56): n is a, c, g, or t
  misc_feature (59)..(59): n is a, c, g, or t
gtngnncnagngncctgccagtctccggggactttcccaggggtggggcggcnngnccnggcccccggcacttcctcgtcctcggcccgggtgccctgcccccgtccaggagccctaggagtgctacggggggccggagccttgcccgggccgctgccccgtccctggattcggggctggacgcagcaagcggggcgctgtgtccccaagctccccgtcctcggccaggcgggcaccacggcaggggctgagctaccctcatggaagggagaggaccgtaccggatctacgaccctgggggcagcgtgccctcaggagaggcatccgcagcttttgagcgcctagtgaaggagaattcccggctgaaggaaaaaatgcaagggataaagatgttaggggagcttttggaagagtcccagatggaagcgaccaggctccggcagaaggcagaggagctagtgaaggacaacgagctgctcccaccaccttctccctccttgggctccttcgaccccctggctgagctcacaggaaaggactcaaatgtcacagcatctcccacagcccctgcatgccccagtgacaagccagcaccagtccagaagcctccatccagtggcacctcctctgaatttgaagtggtcactcctgaggagcagaattcaccagagagcagcagccatgccaatgcgatggcgctgggccccctgccccgtgaggacggcaacctgatgctgcacctgcagcgcctggagaccacgctgagtgtgtgtgccgaggagccggaccacggccagctcttcacccacctgggccgcatggccctggagttcaaccgactggcatccaaggtgcacaagaatgagcagcgcacctccattctgcagaccctgtgtgagcagcttcggaaggagaacgaggctctgaaggccaagttggataagggcctggaacagcgggatcaggctgccgagaggctgcgggaggaaaatttggagctcaagaagttgttgatgagcaatggcaacaaagagggtgcgtctgggcggccaggctcaccgaagatggaagggacaggcaagaaggcagtggctggacagcagcaggctagtgtgacggcaggtaaggtcccagaggtggtggccttgggcgcagccgagaagaaggtgaagatgctggagcagcagcgcagtgagctgctggaagtgaacaagcagtgggaccagcatttccggtccatgaagcagcagtatgagcagaagatcactgagctgcgtcagaagctggctgatttgcagaagcaggtgactgacctggaggccgagcgggagcagaagcagcgtgactttgaccgcaagctcctcctggccaagtccaagattgaaatggaggagaccgacaaggagcagctgacagcagaggccaaggagctgcgccaaaaggtcaagtacctgcaggatcagctgagcccactcacccgacagcgtgagtaccaggaaaaggagatccagcggctcaacaaggccctggaggaagcactgagcatccaaaccccgccatcatctccaccaacagcatttgggagcccagaaggagcaggggccctcctaaggaaacaggagctggtcacgcagaatgagttgctgaaacagcaggtgaagatcttcgaggaggacttccagagggagcgcagtgatcgtgagcgcatgaatgaggagaaggaagagctgaagaagcaagtggagaagctgcaggcccaggtcaccctgtcaaatgcccagctaaaagcattcaaagatgaggagaaggcaagagaagccctcagacagcagaagaggaaagcaaaggcctcaggagagcgttaccatgtggagccccacccagaacatctctgcggggcctacccctacgcctacccgcccatgccagccatggtgccacaccatggcttcgaggactggtcccagatccgctacccccctccccccatggccatggagcacccgcccccactccccaactcgcgcctcttccatctgccggaatacacctggcgtctaccctgtggaggggttcgaaatccaaatcagagctcccaagtgatggaccctcccacagccaggcctacagaaccagagtctccaaaaaatgaccgtgaggggcctcagtgagaccagattgtgtcatttggctccaccttcatcttgcagagccagctgatctcagattgccaagaaactagaagccacttgcacggtgtggccagagcctcagctggatgagaggctgagatgggtggccagcttgtataccagtccctgaactgagctgtttacaggactggggaggctccacccagaaggctttcatttgtactctgctgggagtgactgggaaaaactccttccctgctgctgagtggagagaggcctcatccggctttgacccaccatccgttgcagaagcctccaggagcagcaatcctaagagtgggaggcagccaagacccccttccttctgtgtttaatttttgcttcaagctctgtagcaggacctgccccacgcacacccctacccctctgtgaggagctgtgggaagtgtgggtttgtctccagaacagaagagaatgatggatattctggctctggggccctctccaccaccactcacagtagccttgctgaagccatcacagatgggagaaggccatgccagccacgtccgccgaggggcgccagcctgaagctgccaggccctgaggttcagaccctggaccccatagctggaggcctgtggtgccagaagcccagattagggtggctgtccatccctggatagctatttgcacgaatcatggacataaatccaagttgaagaagatcaa

SEQ ID NO: 329278 - DNA, 2211 bp, Homo sapiens
  misc_feature (3)..(3): n is a, c, g, or t
  misc_feature (5)..(6): n is a, c, g, or t
  misc_feature (8)..(8): n is a, c, g, or t
  misc_feature (11)..(11): n is a, c, g, or t
  misc_feature (13)..(13): n is a, c, g, or t
  misc_feature (53)..(54): n is a, c, g, or t
  misc_feature (56)..(56): n is a, c, g, or t
  misc_feature (59)..(59): n is a, c, g, or t
gtngnncnagngncctgccagtctccggggactttcccaggggtggggcggcnngnccnggcccccggcacttcctcgtcctcggcccgggtgccctgcccccgtccaggagccctaggagtgctacggggggccggagccttgcccgggccgctgccccgtccctggattcggggctggacgcagcaagcggggcgctgtgtccccaagctccccgtcctcggccaggcgggcaccacggcaggggctgagctaccctcatggaagggagaggaccgtaccggatctacgaccctgggggcagcgtgccctcaggagaggcatccgcagcttttgagcgcctagtgaaggagaattcccggctgaaggaaaaaatgcaagggataaagatgttaggggagcttttggaagagtcccagatggaagcgaccaggctccggcagaaggcagaggagctagtgaaggacaacgagctgctcccaccaccttctccctccttgggctccttcgaccccctggctgagctcacaggaaaggactcaaatgtcacagcatctcccacagcccctgcatgccccagtgacaagccagcaccagtccagaagcctccatccagtggcacctcctctgaatttgaagtggtcactcctgaggagcagaattcaccagagagcagcagccatgccaatgcgatggcgctgggccccctgccccgtgaggacggcaacctgatgctgcacctgcagcgcctggagaccacgctgagtgtgtgtgccgaggagccggaccacggccagctcttcacccacctgggccgcatggccctggagttcaaccgactggcatccaaggtgcacaagaatgagcagcgcacctccattctgcagaccctgtgtgagcagcttcggaaggagaacgaggctctgaaggccaagttggataagggcctggaacagcgggatcaggctgccgagaggctgcgggaggaaaatttggagctcaagaagttgttgatgagcaatggcaacaaagagggtgcgtctgggcggccaggctcaccgaagatggaagggacaggcaagaaggcagtggctggacagcagcaggctagtgtgacggcaggtaaggtcccagaggtggtggccttgggcgcagccgagaagaaggtgaagatgctggagcagcagcgcagtgagctgctggaagtgaacaagcagtgggaccagcatttccggtccatgaagcagcagtatgagcagaagatcactgagctgcgtcagaagctggctgatttgcagaagcaggtgactgacctggaggccgagcgggagcagaagcagcgtgactttgaccgcaagctcctcctggccaagtccaagattgaaatggaggagaccgacaaggagcagctgacagcagaggccaaggagctgcgccaaaaggtcaagtacctgcaggatcagctgagcccactcacccgacagcgtgagtaccaggaaaaggagatccagcggctcaacaaggccctggaggaagcactgagcatccaaaccccgccatcatctccaccaacagcatttgggagcccagaaggagcaggggccctcctaaggaaacaggagctggtcacgcagaatgagttgctgaaacagcaggtgaagatcttcgaggaggacttccagagggagcgcagtgatcgtgagcgcatgaatgaggagaaggaagagctgaagaagcaagtggagaagctgcaggcccaggtcaccctgtcaaatgcccagctaaaagcattcaaagatgaggagaaggcaagagaagccctcagacagcagaagaggaaagcaaaggcctcaggagagcgttaccatgtggagccccacccagaacatctctgcggggcctacccctacgcctacccgcccatgccagccatggtgccacaccatggcttcgaggactggtcccagatccgctacccccctccccccatggccatggagcacccgcccccactccccaactcgcgcctcttccatctgcagccacgtccgccgaggggcgccagcctgaagctgccaggccctgaggttcagaccctggaccccatagctggaggcctgtggtgccagaagcccagattagggtggctgtccatccctggatagctatttgcacgaatcatggacataaatccaagttgaagaagatcaa

SEQ ID NO: 329279 - DNA, 1384 bp, Homo sapiens
gaaaatgacgtgacaagtagagggccgggttgtagtcggccgaggggccctcctaaggaaacaggagctggtcacgcagaatgagttgctgaaacagcaggtgaagatcttcgaggaggacttccagagggagcgcagtgatcgtgagcgcatgaatgaggagaaggaagagctgaagaagcaagtggagaagctgcaggcccaggtcaccctgtcaaatgcccagctaaaagcattcaaagatgaggagaaggcaagagaagccctcagacagcagaagaggaaagcaaaggcctcaggagagcgttaccatgtggagccccacccagaacatctctgcggggcctacccctacgcctacccgcccatgccagccatggtgccacaccatggcttcgaggactggtcccagatccgctacccccctccccccatggccatggagcacccgcccccactccccaactcgcgcctcttccatctgccggaatacacctggcgtctaccctgtggaggggttcgaaatccaaatcagagctcccaagtgatggaccctcccacagccaggcctacagaaccagagtctccaaaaaatgaccgtgaggggcctcagtgagaccagattgtgtcatttggctccaccttcatcttgcagagccagctgatctcagattgccaagaaactagaagccacttgcacggtgtggccagagcctcagctggatgagaggctgagatgggtggccagcttgtataccagtccctgaactgagctgtttacaggactggggaggctccacccagaaggctttcatttgtactctgctgggagtgactgggaaaaactccttccctgctgctgagtggagagaggcctcatccggctttgacccaccatccgttgcagaagcctccaggagcagcaatcctaagagtgggaggcagccaagacccccttccttcaaaacctcccggaagtggtttcaggccctctagttgccatgaccaatttgtgtgtgtgtttaatttttgcttcaagctctgtagcaggacctgccccacgcacacccctacccctctgtgaggagctgtgggaagtgtgggtttgtctccagaacagaagagaatgatggatattctggctctggggccctctccaccaccactcacagtagccttgctgaagccatcacagatgggagaaggccatgccagccacgtccgccgaggggcgccagcctgaagctgccaggccctgaggttcagaccctggaccccatagctggaggcctgtggtgccagaagcccagattagggtggctgtccatccctggatagctatttgcacgaatcatggacataaatccaagttgaagaagatcaa

SEQ ID NO: 329280 - DNA, 1577 bp, Homo sapiens
  misc_feature (3)..(3): n is a, c, g, or t
  misc_feature (5)..(6): n is a, c, g, or t
  misc_feature (8)..(8): n is a, c, g, or t
  misc_feature (11)..(11): n is a, c, g, or t
  misc_feature (13)..(13): n is a, c, g, or t
  misc_feature (53)..(54): n is a, c, g, or t
  misc_feature (56)..(56): n is a, c, g, or t
  misc_feature (59)..(59): n is a, c, g, or t
gtngnncnagngncctgccagtctccggggactttcccaggggtggggcggcnngnccnggcccccggcacttcctcgtcctcggcccgggtgccctgcccccgtccaggagccctaggagtgctacggggggccggagccttgcccgggccgctgccccgtccctggattcggggctggacgcagcaagcggggcgctgtgtccccaagctccccgtcctcggccaggcgggcaccacggcaggggctgagctaccctcatggaagggagaggaccgtaccggatctacgaccctgggggcagcgtgccctcaggagaggcatccgcagcttttgagcgcctagtgaaggagaattcccggctgaaggaaaaaatgcaagggataaagatgttaggggagcttttggaagagtcccagatggaagcgaccaggctccggcagaaggcaagagaagccctcagacagcagaagaggaaagcaaaggcctcaggagagcgttaccatgtggagccccacccagaacatctctgcggggcctacccctacgcctacccgcccatgccagccatggtgccacaccatggcttcgaggactggtcccagatccgctacccccctccccccatggccatggagcacccgcccccactccccaactcgcgcctcttccatctgccggaatacacctggcgtctaccctgtggaggggttcgaaatccaaatcagagctcccaagtgatggaccctcccacagccaggcctacagaaccagagtctccaaaaaatgaccgtgaggggcctcagtgagaccagattgtgtcatttggctccaccttcatcttgcagagccagctgatctcagattgccaagaaactagaagccacttgcacggtgtggccagagcctcagctggatgagaggctgagatgggtggccagcttgtataccagtccctgaactgagctgtttacaggactggggaggctccacccagaaggctttcatttgtactctgctgggagtgactgggaaaaactccttccctgctgctgagtggagagaggcctcatccggctttgacccaccatccgttgcagaagcctccaggagcagcaatcctaagagtgggaggcagccaagacccccttccttcaaaacctcccggaagtggtttcaggccctctagttgccatgaccaatttgtgtgtgtgtttaatttttgcttcaagctctgtagcaggacctgccccacgcacacccctacccctctgtgaggagctgtgggaagtgtgggtttgtctccagaacagaagagaatgatggatattctggctctggggccctctccaccaccactcacagtagccttgctgaagccatcacagatgggagaaggccatgccagccacgtccgccgaggggcgccagcctgaagctgccaggccctgaggttcagaccctggaccccatagctggaggcctgtggtgccagaagcccagattagggtggctgtccatccctggatagctatttgcacgaatcatggacataaatccaagttgaagaagatcaa

SEQ ID NO: 329281 - DNA, 2490 bp, Homo sapiens
  misc_feature (3)..(3): n is a, c, g, or t
  misc_feature (5)..(6): n is a, c, g, or t
  misc_feature (8)..(8): n is a, c, g, or t
  misc_feature (11)..(11): n is a, c, g, or t
  misc_feature (13)..(13): n is a, c, g, or t
  misc_feature (53)..(54): n is a, c, g, or t
  misc_feature (56)..(56): n is a, c, g, or t
  misc_feature (59)..(59): n is a, c, g, or t
gtngnncnagngncctgccagtctccggggactttcccaggggtggggcggcnngnccnggcccccggcacttcctcgtcctcggcccgggtgccctgcccccgtccaggagccctaggagtgctacggggggccggagccttgcccgggccgctgccccgtccctggattcggggctggacgcagcaagcggggcgctgtgtccccaagctccccgtcctcggccaggcgggcaccacggcaggggctgagctaccctcatggaagggagaggaccgtaccggatctacgaccctgggggcagcgtgccctcaggagaggcatccgcagcttttgagcgcctagtgaaggagaattcccggctgaaggaaaaaatgcaagggataaagatgttaggggagcttttggaagagtcccagatggaagcgaccaggctccggcagaaggcagaggagctagtgaaggacaacgagctgctcccaccaccttctccctccttgggctccttcgaccccctggctgagctcacaggaaaggactcaaatgtcacagcatctcccacagcccctgcatgccccagtgacaagccagcaccagtccagaagcctccatccagtggcacctcctctgaatttgaagtggtcactcctgaggagcagaattcaccagagagcagcagccatgccaatgcgatggcgctgggccccctgccccgtgaggacggcaacctgatgctgcacctgcagcgcctggagaccacgctgagtgtgtgtgccgaggagccggaccacggccagctcttcacccacctgggccgcatggccctggagttcaaccgactggcatccaaggtgcacaagaatgagcagcgcacctccattctgcagaccctgtgtgagcagcttcggaaggagaacgaggctctgaaggccaagttggataagggcctggaacagcgggatcaggctgccgagaggctgcgggaggaaaatttggagctcaagaagttgttgatgagcaatggcaacaaagagggtgcgtctgggcggccaggctcaccgaagatggaagggacaggcaagaaggcagtggctggacagcagcaggctagtgtgacggcaggtaaggtcccagaggtggtggccttgggcgcagccgagaagaaggtgaagatgctggagcagcagcgcagtgagctgctggaagtgaacaagcagtgggaccagcatttccggtccatgaagcagcagtatgagcagaagatcactgagctgcgtcagaagctggctgatttgcagaagcaggtgactgacctggaggccgagcgggagcagaagcagcgtgactttgaccgcaagctcctcctggccaagtccaagattgaaatggaggagaccgacaaggagcagctgacagcagaggccaaggagctgcgccaaaaggtcaagtacctgcaggatcagctgagcccactcacccgacagcgtgagtaccaggaaaaggagatccagcggctcaacaaggccctggaggaagcactgagcatccaaaccccgccatcatctccaccaacagcatttgggagcccagaaggagcaggggccctcctaaggaaacaggagctggtcacgcagaatgagttgctgaaacagcaggtgaagatcttcgaggaggacttccagagggagcgcagtgatcgtgagcgcatgaatgaggagaaggaagagctgaagaagcaagtggagaagctgcaggcccaggtcaccctgtcaaatgcccagctaaaagcattcaaagatgaggagaaggcaagagaagccctcagacagcagaagaggaaagcaaaggtgaggaggcttgagggaggtagcagcactgacatcctcttaccttcctcatggagctagcctgatggatgcacagtgtgtgctcgggcgtggggacatcctctgctaactaactgatgagtaatacaggaaaagccttagagcagtattggtacagaggcagtgcccacaatgcattagctgtcatcactgttgacattctgtgtccaggtagcaaccttccgtgcccatgtgactagccttctttggccgtgtatgagccttccgtgcccatgtatccaactttctatgcccatgttccagccctccgtgcccatgtaccagccttttgtgcccatgcccagccttttgtgcccatgcccagccttccatgcccatgtaccagccttccgtgtccatgtaccagccttccatgcccatgtgctcagccttccgtttccatgtatcagccttccgtgcccatgtgcccagccttctgtgtccatttacccagccttccgtgcccatgtatgagccttctgtgcccatgtgcccagccttccatgcccatgtgcccagccttccgtgcccatgtacccagccttccgtgcccatgtaccagccttctgtgcccatgttctagccttccgtgcccatgtaccag

SEQ ID NO: 329282 - DNA, 938 bp, Homo sapiens
tcccaactcgcgccgttccatctgcgggaactaacgggccggaatacacctggcgtctaccctgtggaggggttcgaaatccaaatcagagctcccaagtgatggaccctcccacagccaggcctacagaaccagagtctccaaaaaatgaccgtgaggggcctcagtgagaccagattgtgtcatttggctccaccttcatcttgcagagccagctgatctcagattgccaagaaactagaagccacttgcacggtgtggccagagcctcagctggatgagaggctgagatgggtggccagcttgtataccagtccctgaactgagctgtttacaggactggggaggctccacccagaaggctttcatttgtactctgctgggagtgactgggaaaaactccttccctgctgctgagtggagagaggcctcatccggctttgacccaccatccgttgcagaagcctccaggagcagcaatcctaagagtgggaggcagccaagacccccttccttcaaaacctcccggaagtggtttcaggccctctagttgccatgaccaatttgtgtgtgtgtttaatttttgcttcaagctctgtagcaggacctgccccacgcacacccctacccctctgtgaggagctgtgggaagtgtgggtttgtctccagaacagaagagaatgatggatattctggctctggggccctctccaccaccactcacagtagccttgctgaagccatcacagatgggagaaggccatgccagccacgtccgccgaggggcgccagcctgaagctgccaggccctgaggttcagaccctggaccccatagctggaggcctgtggtgccagaagcccagattagggtggctgtccatccctggatagctatttgcacgaatcatggacataaatccaagttgaagaagatcaa

SEQ ID NO: 329283 - DNA, 909 bp, Homo sapiens
ccaaaaaaaagacagggtctccctatgttgcccaggctggtctttaactcctgggctaaagggatcctcctgcctcggcctcccacagccaggcctacagaaccagagtctccaaaaaatgaccgtgaggggcctcagtgagaccagattgtgtcatttggctccaccttcatcttgcagagccagctgatctcagattgccaagaaactagaagccacttgcacggtgtggccagagcctcagctggatgagaggctgagatgggtggccagcttgtataccagtccctgaactgagctgtttacaggactggggaggctccacccagaaggctttcatttgtactctgctgggagtgactgggaaaaactccttccctgctgctgagtggagagaggcctcatccggctttgacccaccatccgttgcagaagcctccaggagcagcaatcctaagagtgggaggcagccaagacccccttccttcaaaacctcccggaagtggtttcaggccctctagttgccatgaccaatttgtgtgtgtgtttaatttttgcttcaagctctgtagcaggacctgccccacgcacacccctacccctctgtgaggagctgtgggaagtgtgggtttgtctccagaacagaagagaatgatggatattctggctctggggccctctccaccaccactcacagtagccttgctgaagccatcacagatgggagaaggccatgccagccacgtccgccgaggggcgccagcctgaagctgccaggccctgaggttcagaccctggaccccatagctggaggcctgtggtgccagaagcccagattagggtggctgtccatccctggatagctatttgcacgaatcatggacataaatccaagttgaagaagatcaa

SEQ ID NO: 329284 - DNA, 1307 bp, Homo sapiens
  misc_feature (3)..(3): n is a, c, g, or t
  misc_feature (5)..(6): n is a, c, g, or t
  misc_feature (8)..(8): n is a, c, g, or t
  misc_feature (11)..(11): n is a, c, g, or t
  misc_feature (13)..(13): n is a, c, g, or t
  misc_feature (53)..(54): n is a, c, g, or t
  misc_feature (56)..(56): n is a, c, g, or t
  misc_feature (59)..(59): n is a, c, g, or t
gtngnncnagngncctgccagtctccggggactttcccaggggtggggcggcnngnccnggcccccggcacttcctcgtcctcggcccgggtgccctgcccccgtccaggagccctaggagtgctacggggggccggagccttgcccgggccgctgccccgtccctggattcggggctggacgcagcaagcggggcgctgtgtccccaagctccccgtcctcggccaggcgggcaccacggcaggggctgagctaccctcatggaagggagaggaccgtaccggatctacgaccctgggggcagcgtgccctcaggagaggcatccgcagcttttgagcgcctagtgaaggagaattcccggctgaaggaaaaaatgcaagggataaagatgttaggggagcttttggaagagtcccagatggaagcgaccaggctccggcagaaggcagaggagctagtgaaggacaacgagctgctcccaccaccttctccctccttgggctccttcgaccccctggctgagctcacaggaaaggactcaaatgtcacagcatctcccacagcccctgcatgccccagtgacaagccagcaccagtccagaagcctccatccagtggcacctcctctgaatttgaagtggtcactcctgaggagcagaattcaccagagagcagcagccatgccaatgcgatggcgctgggccccctgccccgtgaggacggcaacctgatgctgcacctgcagcgcctggagaccacgctgagtgtgtgtgccgaggagccggaccacggccagctcttcacccacctgggccgcatggccctggagttcaaccgactggcatccaaggtgcacaagaatgagcagcgcacctccattctgcagaccctgtgtgagcagcttcggaaggagaacgaggctctgaaggccaagttggataagggcctggaacagcgggatcaggctgccgagaggctgcgggaggaaaatttggagctcaagaagttgttgatgagcaatggcaacaaagagggtgcgtctgggcggccaggctcaccgaagatggaagggacaggcaagaaggcagtggctggacagcagcagaagccatcacagatgggagaaggccatgccagccacgtccgccgaggggcgccagcctgaagctgccaggccctgaggttcagaccctggaccccatagctggaggcctgtggtgccagaagcccagattagggtggctgtccatccctggatagctatttgcacgaatcatggacataaatccaagttgaagaagatcaa

SEQ ID NO: 329285 - DNA, 1040 bp, Homo sapiens
  misc_feature (3)..(3): n is a, c, g, or t
  misc_feature (5)..(6): n is a, c, g, or t
  misc_feature (8)..(8): n is a, c, g, or t
  misc_feature (11)..(11): n is a, c, g, or t
  misc_feature (13)..(13): n is a, c, g, or t
  misc_feature (53)..(54): n is a, c, g, or t
  misc_feature (56)..(56): n is a, c, g, or t
  misc_feature (59)..(59): n is a, c, g, or t
gtngnncnagngncctgccagtctccggggactttcccaggggtggggcggcnngnccnggcccccggcacttcctcgtcctcggcccgggtgccctgcccccgtccaggagccctaggagtgctacggggggccggagccttgcccgggccgctgccccgtccctggattcggggctggacgcagcaagcggggcgctgtgtccccaagctccccgtcctcggccaggcgggcaccacggcaggggctgagctaccctcatggaagggagaggaccgtaccggatctacgaccctgggggcagcgtgccctcaggagaggcatccgcagcttttgagcgcctagtgaaggagaattcccggctgaaggaaaaaatgcaagggataaagatgttaggggagcttttggaagagtcccagatggaagcgaccaggctccggcagaaggcagaggagctagtgaaggacaacgagctgctcccaccaccttctccctccttgggctccttcgaccccctggctgagctcacaggaaaggactcaaatgtcacagcatctcccacagcccctgcatgccccagtgacaagccagcaccagtccagaagcctccatccagtggcacctcctctgaatttgaagtggtcactcctgaggagcagaattcaccagagagcagcagccatgccaatgcgatggcgctgggccccctgccccgtgaggacggcaacctgatgctgcacctgcagcgcctggagaccacgctgagtgtgtgtgccgaggagccggaccacggccagctcttcacccacctgggccgcatggccctggagttcaaccgactggcatccaaggtgcacaagaatgagcagcgcacctccattctgcagaccctgtgtgagcagcttcggaaggagaacgaggctctgaaggccaagttggataagggcctggaacagcgggatcaggctgccgagaggctgcgggaggctgatttataactcgtgaagttgctattaagctttgcaacgtggggttcttct

SEQ ID NO: 329286 - DNA, 985 bp, Homo sapiens
agtgagccgaggagccttcatagggacagccgcccctggtgcacacaccctcgtattctcctgcccttccccaggggagcttttggaagagtcccagatggaagcgaccaggctccggcagaaggcagaggagctagtgaaggacaacgagctgctcccaccaccttctccctccttgggctccttcgaccccctggctgagctcacaggaaaggactcaaatgtcacagcatctcccacagcccctgcatgccccagtgacaagccagcaccagtccagaagcctccatccagtggcacctcctctgaatttgaagtggtcactcctgaggagcagaattcaccagagagcagcagccatgccaatgcgatggcgctgggccccctgccccgtgaggacggcaacctgatgctgcacctgcagcgcctggagaccacgctgagtgtgtgtgccgaggagccggaccacggccagctcttcacccacctgggccgcatggccctggagttcaaccgactggcatccaaggtgcacaagaatgagcagcgcacctccattctgcagaccctgtgtgagcagcttcggaaggagaacgaggctctgaaggccaagttggataagggcctggaacagcgggatcaggctgccgagaggctgcgggaggaaaatttggagctcaagaagttgttgatgagcaatggcaacaaagagggtgcgtctgggcggccaggctcaccgaagatggaagggacaggcaagaaggcagtggctggacagcagcagaagccatcacagatgggagaaggccatgccagccacgtccgccgaggggcgccagcctgaagctgccaggccctgaggttcagaccctggaccccatagctggaggcctgtggtgccagaagcccagattagggtggctgtccatccctggatagctatttgcacgaatcatggacataaatccaagttgaagaagatcaa

SEQ ID NO: 329287 - DNA, 1248 bp, Homo sapiens
  misc_feature (3)..(3): n is a, c, g, or t
  misc_feature (5)..(6): n is a, c, g, or t
  misc_feature (8)..(8): n is a, c, g, or t
  misc_feature (11)..(11): n is a, c, g, or t
  misc_feature (13)..(13): n is a, c, g, or t
  misc_feature (53)..(54): n is a, c, g, or t
  misc_feature (56)..(56): n is a, c, g, or t
  misc_feature (59)..(59): n is a, c, g, or t
gtngnncnagngncctgccagtctccggggactttcccaggggtggggcggcnngnccnggcccccggcacttcctcgtcctcggcccgggtgccctgcccccgtccaggagccctaggagtgctacggggggccggagccttgcccgggccgctgccccgtccctggattcggggctggacgcagcaagcggggcgctgtgtccccaagctccccgtcctcggccaggcgggcaccacggcaggggctgagctaccctcatggaagggagaggaccgtaccggatctacgaccctgggggcagcgtgccctcaggagaggcatccgcagcttttgagcgcctagtgaaggagaattcccggctgaaggaaaaaatgcaagggataaagatgttaggggagcttttggaagagtcccagatggaagcgaccaggctccggcagaaggcagaggagctagtgaaggacaacgagctgctcccaccaccttctccctccttgggctccttcgaccccctggctgagctcacaggaaaggactcaaatgtcacagcatctcccacagcccctgcatgccccagtgacaagccagcaccagtccagaagcctccatccagtgtaagttttatttggagtcatgggtggaggttgcctggatggacctcaagtcctactgacagatacaagaacatgaagaaagagggttgaggtcaagaaactgtgttccgtctcgctgggtgatattgggcaagtccatcgcaaactctctggggcctcagcctccccattttgaaatgaaggtcatagttaaaacttaccaggaagaccctggtatgtacaaggaattcttctcacttactaagttgtatactgttaagtatcactgagtgtgcacagtgctaggaaaacagacagatgtgacatggagctcacattctcaaagagggctcagaaactatcttctacaggctgggcgcagtggctcatgcctataatcccagcacttggggaggctgaggcaggaggattgcttgaacccaggagtttgagaccagcctgggcaggatagtgagactccatctctctaagaaaaaaagtagtcaggtgtgatggtgtatgtctgtggttccagctacttgggaggctggctgaggcagaagggtcgcttgagcccaggaggtcaaggctgcagtgagccatgttgatgccaccacactccagcctgggtgacagagtcagaccctctcat

SEQ ID NO: 329288 - DNA, 209 bp, Homo sapiens
gtataagaggagtctgggtacctctgactctccctgtaccccaaactgcccaaatccttcacagtgaactcccttcttatgccaaaacccacattctctcgtttatccttaggtcacaggctacccttccattcatgttttggctgccacatcccccagaaggtcagatttggaagggacttcaaaacaatcttgttaaaaatagccag

SEQ ID NO: 329289 - DNA, 334 bp, Homo sapiens
atcagccggtcagtcctcgtggctggttaggccctggatccaggcctggccagaaaccacctgtgccgacagtcttttctccctcccttcttctctcagctaaaagcattcaaagatgaggagaaggcaagagaagccctcagacagcagaagaggaaagcaaaggtgaggaggcttgagggaggtagcagcactgacatcctcttaccttcctcatggagctagcctgatggatgcacagtgtgtgctcgggcgtggggacatcctctgctaactaactgatgagtaatacaggaaaagccttagagcagtattggtacagaggcagtgccca

SEQ ID NO: 329290 - DNA, 401 bp, Homo sapiens
ctcaaaatttttgtttatttagagtctccaaaaaatgaccgtgaggggcctcagtgagaccagattgtgtcatttggctccaccttcatcttgcagagccagctgatctcagattgccaagaaactagaagccacttgcacggtgtggccagagcctcagctggatgagaggctgagatgggtggccagcttgtataccagtccctgaactgagctgtttacaggactggggaggctccacccagaaggctttcatttgtactctgctgggagtgactgggaaaaactccttccctgctgctgagtggagagaggcctcatccggctttgacccaccatccgttgcagaagcctccaggagcagcaatcctaagagtgggaggcagccaagacccccttcc

SEQ ID NO: 329291 - DNA, 2939 bp, Homo sapiens
  misc_feature (3)..(3): n is a, c, g, or t
  misc_feature (5)..(6): n is a, c, g, or t
  misc_feature (8)..(8): n is a, c, g, or t
  misc_feature (11)..(11): n is a, c, g, or t
  misc_feature (13)..(13): n is a, c, g, or t
  misc_feature (53)..(54): n is a, c, g, or t
  misc_feature (56)..(56): n is a, c, g, or t
  misc_feature (59)..(59): n is a, c, g, or t
gtngnncnagngncctgccagtctccggggactttcccaggggtggggcggcnngnccnggcccccggcacttcctcgtcctcggcccgggtgccctgcccccgtccaggagccctaggagtgctacggggggccggagccttgcccgggccgctgccccgtccctggattcggggctggacgcagcaagcggggcgctgtgtccccaagctccccgtcctcggccaggcgggcaccacggcaggggctgagctaccctcatggaagggagaggaccgtaccggatctacgaccctgggggcagcgtgccctcaggagaggcatccgcagcttttgagcgcctagtgaaggagaattcccggctgaaggaaaaaatgcaagggataaagatgttaggggagcttttggaagagtcccagatggaagcgaccaggctccggcagaaggcagaggagctagtgaaggacaacgagctgctcccaccaccttctccctccttgggctccttcgaccccctggctgagctcacaggaaaggactcaaatgtcacagcatctcccacagcccctgcatgccccagtgacaagccagcaccagtccagaagcctccatccagtggcacctcctctgaatttgaagtggtcactcctgaggagcagaattcaccagagagcagcagccatgccaatgcgatggcgctgggccccctgccccgtgaggacggcaacctgatgctgcacctgcagcgcctggagaccacgctgagtgtgtgtgccgaggagccggaccacggccagctcttcacccacctgggccgcatggccctggagttcaaccgactggcatccaaggtgcacaagaatgagcagcgcacctccattctgcagaccctgtgtgagcagcttcggaaggagaacgaggctctgaaggccaagttggataagggcctggaacagcgggatcaggctgccgagaggctgcgggaggaaaatttggagctcaagaagttgttgatgagcaatggcaacaaagagggtgcgtctgggcggccaggctcaccgaagatggaagggacaggcaagaaggcagtggctggacagcagcaggctagtgtgacggcaggtaaggtcccagaggtggtggccttgggcgcagccgagaagaaggtgaagatgctggagcagcagcgcagtgagctgctggaagtgaacaagcagtgggaccagcatttccggtccatgaagcagcagtatgagcagaagatcactgagctgcgtcagaagctggctgatttgcagaagcaggtgactgacctggaggccgagcgggagcagaagcagcgtgactttgaccgcaagctcctcctggccaagtccaagattgaaatggaggagaccgacaaggagcagctgacagcagaggccaaggagctgcgccaaaaggtcaagtacctgcaggatcagctgagcccactcacccgacagcgtgagtaccaggaaaaggagatccagcggctcaacaaggccctggaggaagcactgagcatccaaaccccgccatcatctccaccaacagcatttgggagcccagaaggagcaggggccctcctaaggaaacaggagctggtcacgcagaatgagttgctgaaacagcaggtgaagatcttcgaggaggacttccagagggagcgcagtgatcgtgagcgcatgaatgaggagaaggaagagctgaagaagcaagtggagaagctgcaggcccaggtcaccctgtcaaatgcccagctaaaagcattcaaagatgaggagaaggcaagagaagccctcagacagcagaagaggaaagcaaaggcctcaggagagcgttaccatgtggagccccacccagaacatctctgcggggcctacccctacgcctacccgcccatgccagccatggtgccacaccatggcttcgaggactggtcccagatccgctacccccctccccccatggccatggagcacccgcccccactccccaactcgcgcctcttccatctgccggaatacacctggcgtctaccctgtggaggggttcgaaatccaaatcagagctcccaagtgatggaccctcccacagccaggcctacagaaccagagtctccaaaaaatgaccgtgaggggcctcagtgagaccagattgtgtcatttggctccaccttcatcttgcagagccagctgatctcagattgccaagaaactagaagccacttgcacggtgtggccagagcctcagctggatgagaggctgagatgggtggccagcttgtataccagtccctgaactgagctgtttacaggactggggaggctccacccagaaggctttcatttgtactctgctgggagtgactgggaaaaactccttccctgctgctgagtggagagaggcctcatccggctttgacccaccatccgttgcagaagcctccaggagcagcaatcctaagagtgggaggcagccaagacccccttccttcaaaacctcccggaagtggtttcaggccctctagttgccatgaccaatttgtgtgtgtgtttaatttttgcttcaagctctgtagcaggacctgccccacgcacacccctacccctctgtgaggagctgtgggaagtgtgggtttgtctccagaacagaagagaatgatggatattctggctctggggccctctccaccaccactcacagtagccttgctgaagccatcacagatgggagaaggccatgccagccacgtccgccgaggggcgccagcctgaagctgccaggccctgaggttcagaccctggaccccatagctggaggcctgtggtgccagaagcccagattagggtggctgtccatccctggatagctatttgcacgaatcatggacataaatccaagttgaagaagatcaa

SEQ ID NO: 329292 - DNA, 443 bp, Homo sapiens
caggtagaggcactggagctttgattactccagagccccccacaagctagatggggcctggctaaggagttgacagtgaccttagtacaggacagacagctcatttggggctacagttgcttagaggggtcaccttcaccgtagctggtcttcccaactccgcagcgttctctcgttttcagcagagggctagtgtgacggcaggtaaggtcccagaggtggtggccttgggcgcagccgagaagaaggtgaagatgctggagcagcagcgcagtgagctgctggaagtgaacaagcagtgggaccagcatttccggtccatgaagcagcagtatgagcagaagatctctgagttgtgtcagaacctgccttgtatgcagaagcacggtgatgactgggtcttcgttcttgatctatccgccggtgaaccaggactgacagtt

SEQ ID NO: 329293 - DNA, 2617 bp, Homo sapiens
agtgagccgaggagccttcatagggacagccgcccctggtgcacacaccctcgtattctcctgcccttccccaggggagcttttggaagagtcccagatggaagcgaccaggctccggcagaaggcagaggagctagtgaaggacaacgagctgctcccaccaccttctccctccttgggctccttcgaccccctggctgagctcacaggaaaggactcaaatgtcacagcatctcccacagcccctgcatgccccagtgacaagccagcaccagtccagaagcctccatccagtggcacctcctctgaatttgaagtggtcactcctgaggagcagaattcaccagagagcagcagccatgccaatgcgatggcgctgggccccctgccccgtgaggacggcaacctgatgctgcacctgcagcgcctggagaccacgctgagtgtgtgtgccgaggagccggaccacggccagctcttcacccacctgggccgcatggccctggagttcaaccgactggcatccaaggtgcacaagaatgagcagcgcacctccattctgcagaccctgtgtgagcagcttcggaaggagaacgaggctctgaaggccaagttggataagggcctggaacagcgggatcaggctgccgagaggctgcgggaggaaaatttggagctcaagaagttgttgatgagcaatggcaacaaagagggtgcgtctgggcggccaggctcaccgaagatggaagggacaggcaagaaggcagtggctggacagcagcaggctagtgtgacggcaggtaaggtcccagaggtggtggccttgggcgcagccgagaagaaggtgaagatgctggagcagcagcgcagtgagctgctggaagtgaacaagcagtgggaccagcatttccggtccatgaagcagcagtatgagcagaagatcactgagctgcgtcagaagctggctgatttgcagaagcaggtgactgacctggaggccgagcgggagcagaagcagcgtgactttgaccgcaagctcctcctggccaagtccaagattgaaatggaggagaccgacaaggagcagctgacagcagaggccaaggagctgcgccaaaaggtcaagtacctgcaggatcagctgagcccactcacccgacagcgtgagtaccaggaaaaggagatccagcggctcaacaaggccctggaggaagcactgagcatccaaaccccgccatcatctccaccaacagcatttgggagcccagaaggagcaggggccctcctaaggaaacaggagctggtcacgcagaatgagttgctgaaacagcaggtgaagatcttcgaggaggacttccagagggagcgcagtgatcgtgagcgcatgaatgaggagaaggaagagctgaagaagcaagtggagaagctgcaggcccaggtcaccctgtcaaatgcccagctaaaagcattcaaagatgaggagaaggcaagagaagccctcagacagcagaagaggaaagcaaaggcctcaggagagcgttaccatgtggagccccacccagaacatctctgcggggcctacccctacgcctacccgcccatgccagccatggtgccacaccatggcttcgaggactggtcccagatccgctacccccctccccccatggccatggagcacccgcccccactccccaactcgcgcctcttccatctgccggaatacacctggcgtctaccctgtggaggggttcgaaatccaaatcagagctcccaagtgatggaccctcccacagccaggcctacagaaccagagtctccaaaaaatgaccgtgaggggcctcagtgagaccagattgtgtcatttggctccaccttcatcttgcagagccagctgatctcagattgccaagaaactagaagccacttgcacggtgtggccagagcctcagctggatgagaggctgagatgggtggccagcttgtataccagtccctgaactgagctgtttacaggactggggaggctccacccagaaggctttcatttgtactctgctgggagtgactgggaaaaactccttccctgctgctgagtggagagaggcctcatccggctttgacccaccatccgttgcagaagcctccaggagcagcaatcctaagagtgggaggcagccaagacccccttccttcaaaacctcccggaagtggtttcaggccctctagttgccatgaccaatttgtgtgtgtgtttaatttttgcttcaagctctgtagcaggacctgccccacgcacacccctacccctctgtgaggagctgtgggaagtgtgggtttgtctccagaacagaagagaatgatggatattctggctctggggccctctccaccaccactcacagtagccttgctgaagccatcacagatgggagaaggccatgccagccacgtccgccgaggggcgccagcctgaagctgccaggccctgaggttcagaccctggaccccatagctggaggcctgtggtgccagaagcccagattagggtggctgtccatccctggatagctatttgcacgaatcatggacataaatccaagttgaagaagatcaa

SEQ ID NO: 329294 - DNA, 3251 bp, Homo sapiens
  misc_feature (3)..(3): n is a, c, g, or t
  misc_feature (5)..(6): n is a, c, g, or t
  misc_feature (8)..(8): n is a, c, g, or t
  misc_feature (11)..(11): n is a, c, g, or t
  misc_feature (13)..(13): n is a, c, g, or t
  misc_feature (53)..(54): n is a, c, g, or t
  misc_feature (56)..(56): n is a, c, g, or t
  misc_feature (59)..(59): n is a, c, g, or t
gtngnncnagngncctgccagtctccggggactttcccaggggtggggcggcnngnccnggcccccggcacttcctcgtcctcggcccgggtgccctgcccccgtccaggagccctaggagtgctacggggggccggagccttgcccgggccgctgccccgtccctggattcggggctggacgcagcaagcggggcgctgtgtccccaagctccccgtcctcggccaggcgggcaccacggcaggggctgagctaccctcatggaagggagaggaccgtaccggatctacgaccctgggggcagcgtgccctcaggagaggcatccgcagcttttgagcgcctagtgaaggagaattcccggctgaaggaaaaaatgcaagggataaagatgttaggggagcttttggaagagtcccagatggaagcgaccaggctccggcagaaggcagaggagctagtgaaggacaacgagctgctcccaccaccttctccctccttgggctccttcgaccccctggctgagctcacaggaaaggactcaaatgtcacagcatctcccacagcccctgcatgccccagtgacaagccagcaccagtccagaagcctccatccagtggcacctcctctgaatttgaagtggtcactcctgaggagcagaattcaccagagagcagcagccatgccaatgcgatggcgctgggccccctgccccgtgaggacggcaacctgatgctgcacctgcagcgcctggagaccacgctgagtgtgtgtgccgaggagccggaccacggccagctcttcacccacctgggccgcatggccctggagttcaaccgactggcatccaaggtgcacaagaatgagcagcgcacctccattctgcagaccctgtgtgagcagcttcggaaggagaacgaggctctgaaggccaagttggataagggcctggaacagcgggatcaggctgccgagaggctgcgggaggaaaatttggagctcaagaagttgttgatgagcaatggcaacaaagagggtgcgtctgggcggccaggctcaccgaagatggaagggacaggcaagaaggcagtggctggacagcagcaggctagtgtgacggcaggtaaggtcccagaggtggtggccttgggcgcagccgagaagaaggtgaagatgctggagcagcagcgcagtgagctgctggaagtgaacaagcagtgggaccagcatttccggtccatgaagcagcagtatgagcagaagatcactgagctgcgtcagaagctggctgatttgcagaagcaggtgactgacctggaggccgagcgggagcagaagcagcgtgactttgaccgcaagctcctcctggccaagtccaagattgaaatggaggagaccgacaaggagcagctgacagcagaggccaaggagctgcgccaaaaggtcaagtacctgcaggatcagctgagcccactcacccgacagcgtgagtaccaggaaaaggagatccagcggctcaacaaggccctggaggaagcactgagcatccaaaccccgccatcatctccaccaacagcatttgggagcccagaaggagcaggggccctcctaaggaaacaggagctggtcacgcagaatgagttgctgaaacagcaggtgaagatcttcgaggaggacttccagagggagcgcagtgatcgtgagcgcatgaatgaggagaaggaagagctgaagaagcaagtggagaagctgcaggcccaggtcaccctgtcaaatgcccagctaaaagcattcaaagatgaggagaaggcaagagaagccctcagacagcagaagaggaaagcaaaggcctcaggagagcgttaccatgtggagccccacccagaacatctctgcggggcctacccctacgcctacccgcccatgccagccatggtgccacaccatggcttcgaggactggtcccagatccgctacccccctccccccatggccatggagcacccgcccccactccccaactcgcgcctcttccatctgccggaatacacctggcgtctaccctgtggaggggttcgaaatccaaatcagagctcccaagtgatggaccctcccacagccaggcctacagaaccagagtctccaaaaaatgaccgtgaggggcctcagtgagaccagattgtgtcatttggctccaccttcatcttgcagagccagctgatctcagattgccaagaaactagaagccacttgcacggtgtggccagagcctcagctggatgagaggctgagatgggtggccagcttgtataccagtccctgaactgagctgtttacaggactggggaggctccacccagaaggctttcatttgtactctgctgggagtgactgggaaaaactccttccctgctgctgagtggagagaggcctcatccggctttgacccaccatccgttgcagaagcctccaggagcagcaatcctaagagtgggaggcagccaagacccccttccttcaaaacctcccggaagtggtttcaggccctctagttgccatgaccaatttgtgtgtgtgtttaatttttgcttcaagctctgtagcaggacctgccccacgcacacccctacccctctgtgaggagctgtgggaagtgtgggtttgtctccagaacagaagagaatgatggatattctggctctggggccctctccaccaccactcacagtagccttgctgaagccatcacagatgggagaaggccatgccagccacgtccgccgaggggcgccagcctgaagctgccaggccctgaggttcagaccctggaccccatagctggaggcctgtggtgccagaagcccagattagggtggctgtccatccctggatagctatttgcacgaatcatggacataaatccaagttgaagaagatcaaaaaaaaaaatcgggggctttttgtcggggtgggcaaacgcgctatgaatggccctggccatacctgttcctgacccagtttcttgtcccaagggtaattgccggcccctatgggagccgattaatacgaaagcagtactggagatcacgccacacaacatctgtcaccacgcatccaccgaggcgcacacctctacacacacacggaggcacacacatcccgcactcacacctacccaccactcgctccacccacacgcccacactccactccccgcaacagcatcacgagcacctccaactgccacacaga

SEQ ID NO: 329295 - DNA, 1777 bp, Homo sapiens
  misc_feature (52)..(52): n is a, c, g, or t
agtgctgcgcagtagctgttcctatgatgtacccccttctactctccgtgangtgctctacatccttgcctcacacactcctctctgcctctgaacccagatcactgagctgcgtcagaagctggctgatttgcagaagcaggtgactgacctggaggccgagcgggagcagaagcagcgtgactttgaccgcaagctcctcctggccaagtccaagattgaaatggaggagaccgacaaggagcagctgacagcagaggccaaggagctgcgccaaaaggtcaagtacctgcaggatcagctgagcccactcacccgacagcgtgagtaccaggaaaaggagatccagcggctcaacaaggccctggaggaagcactgagcatccaaaccccgccatcatctccaccaacagcatttgggagcccagaaggagcaggggccctcctaaggaaacaggagctggtcacgcagaatgagttgctgaaacagcaggtgaagatcttcgaggaggacttccagagggagcgcagtgatcgtgagcgcatgaatgaggagaaggaagagctgaagaagcaagtggagaagctgcaggcccaggtcaccctgtcaaatgcccagctaaaagcattcaaagatgaggagaaggcaagagaagccctcagacagcagaagaggaaagcaaaggcctcaggagagcgttaccatgtggagccccacccagaacatctctgcggggcctacccctacgcctacccgcccatgccagccatggtgccacaccatggcttcgaggactggtcccagatccgctacccccctccccccatggccatggagcacccgcccccactccccaactcgcgcctcttccatctgccggaatacacctggcgtctaccctgtggaggggttcgaaatccaaatcagagctcccaagtgatggaccctcccacagccaggcctacagaaccagagtctccaaaaaatgaccgtgaggggcctcagtgagaccagattgtgtcatttggctccaccttcatcttgcagagccagctgatctcagattgccaagaaactagaagccacttgcacggtgtggccagagcctcagctggatgagaggctgagatgggtggccagcttgtataccagtccctgaactgagctgtttacaggactggggaggctccacccagaaggctttcatttgtactctgctgggagtgactgggaaaaactccttccctgctgctgagtggagagaggcctcatccggctttgacccaccatccgttgcagaagcctccaggagcagcaatcctaagagtgggaggcagccaagacccccttccttcaaaacctcccggaagtggtttcaggccctctagttgccatgaccaatttgtgtgtgtgtttaatttttgcttcaagctctgtagcaggacctgccccacgcacacccctacccctctgtgaggagctgtgggaagtgtgggtttgtctccagaacagaagagaatgatggatattctggctctggggccctctccaccaccactcacagtagccttgctgaagccatcacagatgggagaaggccatgccagccacgtccgccgaggggcgccagcctgaagctgccaggccctgaggttcagaccctggaccccatagctggaggcctgtggtgccagaagcccagattagggtggctgtccatccctggatagctatttgcacgaatcatggacataaatccaagttgaagaagatcaa

SEQ ID NO: 329296 - DNA, 1579 bp, Homo sapiens
ggacgcgtgggtcgcccacgcgtcgatggaggagaccgacaaggagcagctgacagcagaggccaaggagctgcgccaaaaggtcaagtacctgcaggatcagctgagcccactcacccgacagcgtgagtaccaggaaaaggagatccagcggctcaacaaggccctggaggaagcactgagcatccaaaccccgccatcatctccaccaacagcatttgggagcccagaaggagcaggggccctcctaaggaaacaggagctggtcacgcagaatgagttgctgaaacagcaggtgaagatcttcgaggaggacttccagagggagcgcagtgatcgtgagcgcatgaatgaggagaaggaagagctgaagaagcaagtggagaagctgcaggcccaggtcaccctgtcaaatgcccagctaaaagcattcaaagatgaggagaaggcaagagaagccctcagacagcagaagaggaaagcaaaggcctcaggagagcgttaccatgtggagccccacccagaacatctctgcggggcctacccctacgcctacccgcccatgccagccatggtgccacaccatggcttcgaggactggtcccagatccgctacccccctccccccatggccatggagcacccgcccccactccccaactcgcgcctcttccatctgccggaatacacctggcgtctaccctgtggaggggttcgaaatccaaatcagagctcccaagtgatggaccctcccacagccaggcctacagaaccagagtctccaaaaaatgaccgtgaggggcctcagtgagaccagattgtgtcatttggctccaccttcatcttgcagagccagctgatctcagattgccaagaaactagaagccacttgcacggtgtggccagagcctcagctggatgagaggctgagatgggtggccagcttgtataccagtccctgaactgagctgtttacaggactggggaggctccacccagaaggctttcatttgtactctgctgggagtgactgggaaaaactccttccctgctgctgagtggagagaggcctcatccggctttgacccaccatccgttgcagaagcctccaggagcagcaatcctaagagtgggaggcagccaagacccccttccttcaaaacctcccggaagtggtttcaggccctctagttgccatgaccaatttgtgtgtgtgtttaatttttgcttcaagctctgtagcaggacctgccccacgcacacccctacccctctgtgaggagctgtgggaagtgtgggtttgtctccagaacagaagagaatgatggatattctggctctggggccctctccaccaccactcacagtagccttgctgaagccatcacagatgggagaaggccatgccagccacgtccgccgaggggcgccagcctgaagctgccaggccctgaggttcagaccctggaccccatagctggaggcctgtggtgccagaagcccagattagggtggctgtccatccctggatagctatttgcacgaatcatggacataaatccaagttgaagaagatcaa

SEQ ID NO: 329297 - DNA, 2162 bp, Homo sapiens
  misc_feature (3)..(3): n is a, c, g, or t
  misc_feature (5)..(6): n is a, c, g, or t
  misc_feature (8)..(8): n is a, c, g, or t
  misc_feature (11)..(11): n is a, c, g, or t
  misc_feature (13)..(13): n is a, c, g, or t
  misc_feature (53)..(54): n is a, c, g, or t
  misc_feature (56)..(56): n is a, c, g, or t
  misc_feature (59)..(59): n is a, c, g, or t
  misc_feature (1980)..(1980): n is a, c, g, or t
gtngnncnagngncctgccagtctccggggactttcccaggggtggggcggcnngnccnggcccccggcacttcctcgtcctcggcccgggtgccctgcccccgtccaggagccctaggagtgctacggggggccggagccttgcccgggccgctgccccgtccctggattcggggctggacgcagcaagcggggcgctgtgtccccaagctccccgtcctcggccaggcgggcaccacggcaggggctgagctaccctcatggaagggagaggaccgtaccggatctacgaccctgggggcagcgtgccctcaggagaggcatccgcagcttttgagcgcctagtgaaggagaattcccggctgaaggaaaaaatgcaagggataaagatgttaggggagcttttggaagagtcccagatggaagcgaccaggctccggcagaaggcagaggagctagtgaaggacaacgagctgctcccaccaccttctccctccttgggctccttcgaccccctggctgagctcacaggaaaggactcaaatgtcacagcatctcccacagcccctgcatgccccagtgacaagccagcaccagtccagaagcctccatccagtggcacctcctctgaatttgaagtggtcactcctgaggagcagaattcaccagagagcagcagccatgccaatgcgatggcgctgggccccctgccccgtgaggacggcaacctgatgctgcacctgcagcgcctggagaccacgctgagtgtgtgtgccgaggagccggaccacggccagctcttcacccacctgggccgcatggccctggagttcaaccgactggcatccaaggtgcacaagaatgagcagcgcacctccattctgcagaccctgtgtgagcagcttcggaaggagaacgaggctctgaaggccaagttggataagggcctggaacagcgggatcaggctgccgagaggctgcgggaggaaaatttggagctcaagaagttgttgatgagcaatggcaacaaagagggtgcgtctgggcggccaggctcaccgaagatggaagggacaggcaagaaggcagtggctggacagcagcaggctagtgtgacggcaggtaaggtcccagaggtggtggccttgggcgcagccgagaagaaggtgaagatgctggagcagcagcgcagtgagctgctggaagtgaacaagcagtgggaccagcatttccggtccatgaagcagcagtatgagcagaagatcactgagctgcgtcagaagctggctgatttgcagaagcaggtgactgacctggaggccgagcgggagcagaagcagcgtgactttgaccgcaagctcctcctggccaagtccaagattgaaatggaggagaccgacaaggagcagctgacagcagaggccaaggagctgcgccaaaaggtcaagtacctgcaggatcagctgagcccactcacccgacagcgtgagtaccaggaaaaggagatccagcggctcaacaaggccctggaggaagcactgagcatccaaaccccgccatcatctccaccaacagcatttgggagcccagaaggagcaggggccctcctaaggaaacaggagctggtcacgcagaatgagttgctgaaacagcaggtgaagatcttcgaggaggacttccagagggagcgcagtgatcgtgagcgcatgaatgaggagaaggaagagctgaagaagcaagtggagaagctgcaggcccaggtcaccctgtcaaatgcccagctaaaagcattcaaagatgaggagaaggcaagagaagccctcagacagcagaagaggaaagcaaaggcctcaggagagcgttaccatgtggagccccacccagaacatctctgcggggcctacccctacgcctacccgcccatgccagccatggtgccacaccatggcttcgaggactggtcccagatccgctaccctngttcagacggggcacggcgagagtggctgccagataagctgtaggggctcatgccactctccctgctaagcggagacgcacaggccgaacccaaactggggccacctctgaaccctcactttatggcacctgagccaccctcatccaggagtctctgtgtcccctgggtttcaacggccttc

SEQ ID NO: 329298 - DNA, 1592 bp, Homo sapiens
accagccttcactgcccatgtagcagccttctgtgcccatgtactagctttccgtgcccatgtaccagccttccgtgtccatgtaccagccttccatgcccatgtaccagctttccatgcccatgtactagccttctgtgcccatgtaccagccttccgtgcccatgtaccagccttccgtgcccatgtactagccttccatgcccatgtaccagccttccgtgcccatgtaccagccttctgtgcccatgtcacaaccttccatgcatgtgtacccagccttccatgcccatgcagccttccatgctcatatatccagccttctatgcccatgtatccagatttctgtacccatgtagcagcctttcatgaccacataccagcctttggtacccagcctgctagccttcagagagctaacattctatttagagggtgatgagatgggtgtcctttgcagcctgttgcaggccaaagccagacgtcagcctttcttgcaggcctcaggagagcgttaccatgtggagccccacccagaacatctctgcggggcctacccctacgcctacccgcccatgccagccatggtgccacaccatggcttcgaggactggtcccagatccgctacccccctccccccatggccatggagcacccgcccccactccccaactcgcgcctcttccatctgccggaatacacctggcgtctaccctgtggaggggttcgaaatccaaatcagagctcccaagtgatggaccctcccacagccaggcctacagaaccagagtctccaaaaaatgaccgtgaggggcctcagtgagaccagattgtgtcatttggctccaccttcatcttgcagagccagctgatctcagattgccaagaaactagaagccacttgcacggtgtggccagagcctcagctggatgagaggctgagatgggtggccagcttgtataccagtccctgaactgagctgtttacaggactggggaggctccacccagaaggctttcatttgtactctgctgggagtgactgggaaaaactccttccctgctgctgagtggagagaggcctcatccggctttgacccaccatccgttgcagaagcctccaggagcagcaatcctaagagtgggaggcagccaagacccccttccttcaaaacctcccggaagtggtttcaggccctctagttgccatgaccaatttgtgtgtgtgtttaatttttgcttcaagctctgtagcaggacctgccccacgcacacccctacccctctgtgaggagctgtgggaagtgtgggtttgtctccagaacagaagagaatgatggatattctggctctggggccctctccaccaccactcacagtagccttgctgaagccatcacagatgggagaaggccatgccagccacgtccgccgaggggcgccagcctgaagctgccaggccctgaggttcagaccctggaccccatagctggaggcctgtggtgccagaagcccagattagggtggctgtccatccctggatagctatttgcacgaatcatggacataaatccaagttgaagaagatcaa

SEQ ID NO: 329299 - DNA, 1982 bp, Homo sapiens
  misc_feature (3)..(3): n is a, c, g, or t
  misc_feature (5)..(6): n is a, c, g, or t
  misc_feature (8)..(8): n is a, c, g, or t
  misc_feature (11)..(11): n is a, c, g, or t
  misc_feature (13)..(13): n is a, c, g, or t
  misc_feature (53)..(54): n is a, c, g, or t
  misc_feature (56)..(56): n is a, c, g, or t
  misc_feature (59)..(59): n is a, c, g, or t
gtngnncnagngncctgccagtctccggggactttcccaggggtggggcggcnngnccnggcccccggcacttcctcgtcctcggcccgggtgccctgcccccgtccaggagccctaggagtgctacggggggccggagccttgcccgggccgctgccccgtccctggattcggggctggacgcagcaagcggggcgctgtgtccccaagctccccgtcctcggccaggcgggcaccacggcaggggctgagctaccctcatggaagggagaggaccgtaccggatctacgaccctgggggcagcgtgccctcaggagaggcatccgcagcttttgagcgcctagtgaaggagaattcccggctgaaggaaaaaatgcaagggataaagatgttaggggagcttttggaagagtcccagatggaagcgaccaggctccggcagaaggcagaggagctagtgaaggacaacgagctgctcccaccaccttctccctccttgggctccttcgaccccctggctgagctcacaggaaaggactcaaatgtcacagcatctcccacagcccctgcatgccccagtgacaagccagcaccagtccagaagcctccatccagtggcacctcctctgaatttgaagtggtcactcctgaggagcagaattcaccagagagcagcagccatgccaatgcgatggcgctgggccccctgccccgtgaggacggcaacctgatgctgcacctgcagcgcctggagaccacgctgagtgtgtgtgccgaggagccggaccacggccagctcttcacccacctgggccgcatggccctggagttcaaccgactggcatccaaggtgcacaagaatgagcagcgcacctccattctgcagaccctgtgtgagcagcttcggaaggagaacgaggctctgaaggccaagttggataagggcctggaacagcgggatcaggctgccgagaggctgcgggaggaaaatttggagctcaagaagttgttgatgagcaatggcaacaaagagggtgcgtctgggcggccaggctcaccgaagatggaagggacaggcaagaaggcagtggctggacagcagcaggctagtgtgacggcaggtaaggtcccagaggtggtggccttgggcgcagccgagaagaaggtgaagatgctggagcagcagcgcagtgagctgctggaagtgaacaagcagtgggaccagcatttccggtccatgaagcagcagtatgagcagaagatcactgagctgcgtcagaagctggctgatttgcagaagcaggtgactgacctggaggccgagcgggagcagaagcagcgtgactttgaccgcaagctcctcctggccaagtccaagattgaaatggaggagaccgacaaggagcagctgacagcagaggccaaggagctgcgccaaaaggtcaagtacctgcaggatcagctgagcccactcacccgacagcgtgagtaccaggaaaaggagatccagcggctcaacaaggccctggaggaagcactgagcatccaaaccccgccatcatctccaccaacagcatttgggagcccagaaggagcaggggccctcctaaggaaacaggagctggtcacgcagaatgagttgctgaaacagcaggtgaagatcttcgaggaggacttccagagggagcgcagtgatcgtgagcgcatgaatgaggagaaggaagagctgaagaagcaagtggagaagctgcaggcccaggtcaccctgtcaaatgcccagaagccatcacagatgggagaaggccatgccagccacgtccgccgaggggcgccagcctgaagctgccaggccctgaggttcagaccctggaccccatagctggaggcctgtggtgccagaagcccagattagggtggctgtccatccctggatagctatttgcacgaatcatggacataaatccaagttgaagaagatcaa

SEQ ID NO: 329300 - DNA, 1231 bp, Homo sapiens
  misc_feature (3)..(3): n is a, c, g, or t
  misc_feature (5)..(6): n is a, c, g, or t
  misc_feature (8)..(8): n is a, c, g, or t
  misc_feature (11)..(11): n is a, c, g, or t
  misc_feature (13)..(13): n is a, c, g, or t
  misc_feature (53)..(54): n is a, c, g, or t
  misc_feature (56)..(56): n is a, c, g, or t
  misc_feature (59)..(59): n is a, c, g, or t
gtngnncnagngncctgccagtctccggggactttcccaggggtggggcggcnngnccnggcccccggcacttcctcgtcctcggcccgggtgccctgcccccgtccaggagccctaggagtgctacggggggccggagccttgcccgggccgctgccccgtccctggattcggggctggacgcagcaagcggggcgctgtgtccccaagctccccgtcctcggccaggcgggcaccacggcaggggctgagctaccctcatggaagggagaggaccgtaccggatctacgaccctgggggcagcgtgccctcaggagaggcatccgcagcttttgagcgcctagtgaaggagaattcccggctgaaggaaaaaatgcaagggataaagatgttaggggagcttttggaagagtcccagatggaagcgaccaggctccggcagaaggcagaggagctagtgaaggacaacgagctgctcccaccaccttctccctccttgggctccttcgaccccctggctgagctcacaggaaaggactcaaatgtcacagcatctcccacagcccctgcatgccccagtgacaagccagcaccagtccagaagcctccatccagtggcacctcctctgaatttgaagtggtcactcctgaggagcagaattcaccagagagcagcagccatgccaatgcgatggcgctgggccccctgccccgtgaggacggcaacctgatgctgcacctgcagcgcctggagaccacgctgagtgtgtgtgccgaggagccggaccacggccagctcttcacccacctgggccgcatggccctggagttcaaccgactggcatccaaggtgcacaagaatgagcagcgcacctccattctgcagaccctgtgtgagcagcttcggaaggagaacgaggctctgaaggccaagttggataagggcctggaacagcgggatcaggctgccgagaggctgcgggaggaaaatttggagctcaagaagttgttgatgagcaatggcaacaaagagggtgcgtctgggcggccaggctcaccgaagatggaagggacaggcaagaaggcagtggctggacagcagcagggttcagaccctggaccccatagctggaggcctgtggtgccagaagcccagattagggtggctgtccatccctggatagctatttgcacgaatcatggacataaatccaagttgaagaagatcaa

SEQ ID NO: 329301 - DNA, 1242 bp, Homo sapiens
  misc_feature (3)..(3): n is a, c, g, or t
  misc_feature (5)..(6): n is a, c, g, or t
  misc_feature (8)..(8): n is a, c, g, or t
  misc_feature (11)..(11): n is a, c, g, or t
  misc_feature (13)..(13): n is a, c, g, or t
  misc_feature (53)..(54): n is a, c, g, or t
  misc_feature (56)..(56): n is a, c, g, or t
  misc_feature (59)..(59): n is a, c, g, or t
gtngnncnagngncctgccagtctccggggactttcccaggggtggggcggcnngnccnggcccccggcacttcctcgtcctcggcccgggtgccctgcccccgtccaggagccctaggagtgctacggggggccggagccttgcccgggccgctgccccgtccctggattcggggctggacgcagcaagcggggcgctgtgtccccaagctccccgtcctcggccaggcgggcaccacggcaggggctgagctaccctcatggaagggagaggaccgtaccggatctacgaccctgggggcagcgtgccctcaggagaggcatccgcagcttttgagcgcctagtgaaggagaattcccggctgaaggaaaaaatgcaagggataaagatgttaggggagcttttggaagagtcccagatggaagcgaccaggctccggcagaaggcagaggagctagtgaaggacaacgagctgctcccaccaccttctccctccttgggctccttcgaccccctggctgagctcacaggaaaggactcaaatgtcacagcatctcccacagcccctgcatgccccagtgacaagccagcaccagtccagaagcctccatccagtgtaagttttatttggagtcatgggtggaggttgcctggatggacctcaagtcctactgacagatacaagaacatgaagaaagagggttgaggtcaagaaactgtgttccgtctcgctgggtgatattgggcaagtccatcgcaaactctctggggcctcagcctccccattttgaaatgaaggtcatagttaaaacttaccaggaagaccctggtatgtacaaggaattcttctcacttactaagttgtatactgttaagtatcactgagtgtgcacagtgctaggaaaacagacagatgtgacatggagctcacattctcaaagagggctcagaaactatcttctacaggctgggcgcagtggctcatgcctataatcccaagtagctgggattacaggcatgcaccaccacgcccggtaattttttgtatttttggtagagacggggtttctccatattggccaggctggtcttgaactcctgacctcaggtgatccacccgccttggcctcccaaagtgctaggattacaggcgtgagccactgcgcctggcctcttttcccttcttatcattcttcttccaaagatctgctgtcacttgtcccattttccccagtcctctg

SEQ ID NO: 329302 - DNA, 721 bp, Homo sapiens
  misc_feature (3)..(3): n is a, c, g, or t
  misc_feature (5)..(6): n is a, c, g, or t
  misc_feature (8)..(8): n is a, c, g, or t
  misc_feature (11)..(11): n is a, c, g, or t
  misc_feature (13)..(13): n is a, c, g, or t
  misc_feature (53)..(54): n is a, c, g, or t
  misc_feature (56)..(56): n is a, c, g, or t
  misc_feature (59)..(59): n is a, c, g, or t
gtngnncnagngncctgccagtctccggggactttcccaggggtggggcggcnngnccnggcccccggcacttcctcgtcctcggcccgggtgccctgcccccgtccaggagccctaggagtgctacggggggccggagccttgcccgggccgctgccccgtccctggattcggggctggacgcagcaagcggggcgctgtgtccccaagctccccgtcctcggccaggcgggcaccacggcaggggctgagctaccctcatggaagggagaggaccgtaccggatctacgaccctgggggcagcgtgccctcaggagaggcatccgcagcttttgagcgcctagtgaaggagaattcccggctgaaggaaaaaatgcaagggataaagatgttaggggagcttttggaagagtcccagatggaagcgaccaggctccggcagaaggcagaggagctagtgaaggacaacgagctgctcccaccaccttctccctccttgggctccttcgaccccctggctgagctcacaggaaaggactcaaatgtcacagcatctcccacagcccctgcatgccccagtgacaagccagcaccaggttcagaccctggaccccatagctggaggcctgtggtgccagaagcccagattagggtggctgtccatccctggatagctatttgcacgaatcatggacataaatccaagttgaagaagatcaa

SEQ ID NO: 329303 - DNA, 532 bp, Homo sapiens
cccattgatcgccagggttgatcggctgatctggctggctagcgggtgccctcctccctcaccgctccatgtgcgtccctcccgaagctgccgctcggtcgaagaggacgaccatccccgatagaggaggaccggtcttcggtcaagggtatacgagtactgcgctcccctgctagaacctccaaacaagctctcaaggtccatttgtaggagaacgtagggtagtcaagcttccaaaactccagaacacagtcacgaggataatgggaatttaccgaaacccgtggaagcctttaaggaatggaaagagtggataataaaatgcctggctgttctccaaaaatgaggaccttcaaataggagtgattgaaataaataactacttgcatgttatgctttcatttgggtggaatacttcattggaataaactactgatcttgtgctgtgtcaaagtaacagactagaaccttctttcaagtacctgaattgaaatgaaactcattttgaataataaaaactctagaaactctt

SEQ ID NO: 329304 - DNA, 201 bp, Homo sapiens
gcggccgcctactactactactgctcgaattcaagcttctaacgatgtacggggacatgttatgctttcatttgggtggaatacttcattggaataaactactgatcttgtgctgtgtcaaagtaacagactagaaccttctttcaagtacctgaattgaaatgaaactcattttgaataataaaaactctagaaactctt

SEQ ID NO: 329305 - DNA, 2076 bp, Homo sapiens
aaaaaaaaaaaaaaagcaagaaaaagaaagagaatggcgaggcccagagagaccgaaagtcccaccagagggtacagagctagctcagccctaatgccggccccgcggtgcctttccgagctcacggcctcccctcagcatccgggtttcggcctcggagcgccagggacgccacgaggacgcgccccacacttgcgcttctgggttccagcccccgcggcccccaacaaataaagaagggaaagtgctgagggtgacggccccggggagcgctgcggctctacgtcaacctgcggcggccgccgactcatttggggccacgctggttgcattcgtcacgccggcgatgcctctcaaacccgcggcctgccgaggacgttcccacacgggagaccccagcgacgcgggcgcatctgtggctctcgagaaccgggccgcggagccgccgcgagcgcaagcgaggaatcggcgactgcgggggtggacagctggggcttgtagtcccctcgctaccctctattctggaagaggcgggtcgcggccgctgaactccagctctgcgcctgcccaggcggccgcacgctcaggggcgtggcatgggtgggtcgtgagttgggcggggcccacagggcgtgcgcgacgcagcggcgcggcgcgtggcgtaaggggcgtggcgccagtgggcgtggcgtggcgcagtgcgaagggacgcggtgcgcatgcgcgtgagggctgccgcggccaggcccagacatgtccgtccttgtaagttaaaagcttccatgggagccttccttcctaatcaagatgcaaataatacggcactccgaacagacactaaaaacagctctcatctcaaagaacccagtgcttgtatcacagtatgagaaattagatgctggggaacaacgtttaatgaatgaagccttccagccagccagtgatctctttggacccattaccttgcattctccatcagattggatcacctcccaccctgaggctccccaagactttgaacagttcttcagtgatccttacagaaagacaccctctccaaacaaacgcagcatttatatacagtccattggctctctaggaaacaccagaattatcagtgaagaatatattaaatggctcacgggctactgtaaagcatatttctatggcttgagagtaaaactcctagaaccagttcctgtttctgtaacaagatgttcctttagagtcaatgagaacacacacaacctacaaattcatgcaggggacatcctgaagttcttgaaaaagaagaaacctgaagatgccttctgtgttgtgggaataacaatgattgatctttacccaagagactcgtggaattttgtctttggacaggcctctttgacagatggtgtggggatattcagctttgccaggtatggcagtgatttttatagcatgcactataaaggcaaagtgaagaagctcaagaaaacatcttcaagtgactattcaattttcgacaactattatattccagaaataactagtgttttactacttcgatcctgtaagactttaacccatgagatcggacacatatttggactgcgacactgccagtggcttgcatgcctcatgcaaggctccaaccacttggaagaagctgaccggcgccctctaaacctttgccctatctgtttgcacaagttgcagtgtgctgttggcttcagcattgtagaaagatacaaagcactggtgaggtggattgatgatgaatcttctgacacacctggagcaactccagaacacagtcacgaggataatgggaatttaccgaaacccgtggaagcctttaaggaatggaaagagtggataataaaatgcctggctgttctccaaaaatgaggaccttcaaataggagtgattgaaataaataactacttgcatgttatgctttcatttgggtggaatacttcattggaataaactactgatcttgtgctgtgtcaaagtaacagactagaaccttctttcaagtacctgaattgaaatgaaactcattttgaataataaaaactctagaaactctt

SEQ ID NO: 329306 - DNA, 2100 bp, Homo sapiens
aaaaaaaaaaaaaaagcaagaaaaagaaagagaatggcgaggcccagagagaccgaaagtcccaccagagggtacagagctagctcagccctaatgccggccccgcggtgcctttccgagctcacggcctcccctcagcatccgggtttcggcctcggagcgccagggacgccacgaggacgcgccccacacttgcgcttctgggttccagcccccgcggcccccaacaaataaagaagggaaagtgctgagggtgacggccccggggagcgctgcggctctacgtcaacctgcggcggccgccgactcatttggggccacgctggttgcattcgtcacgccggcgatgcctctcaaacccgcggcctgccgaggacgttcccacacgggagaccccagcgacgcgggcgcatctgtggctctcgagaaccgggccgcggagccgccgcgagcgcaagcgaggaatcggcgactgcgggggtggacagctggggcttgtagtcccctcgctaccctctattctggaagaggcgggtcgcggccgctgaactccagctctgcgcctgcccaggcggccgcacgctcaggggcgtggcatgggtgggtcgtgagttgggcggggcccacagggcgtgcgcgacgcagcggcgcggcgcgtggcgtaaggggcgtggcgccagtgggcgtggcgtggcgcagtgcgaagggacgcggtgcgcatgcgcgtgagggctgccgcgggtgggtggtatcgaggcctgtcggccaggcccagacatgtccgtccttgtaagttaaaagcttccatgggagccttccttcctaatcaagatgcaaataatacggcactccgaacagacactaaaaacagctctcatctcaaagaacccagtgcttgtatcacagtatgagaaattagatgctggggaacaacgtttaatgaatgaagccttccagccagccagtgatctctttggacccattaccttgcattctccatcagattggatcacctcccaccctgaggctccccaagactttgaacagttcttcagtgatccttacagaaagacaccctctccaaacaaacgcagcatttatatacagtccattggctctctaggaaacaccagaattatcagtgaagaatatattaaatggctcacgggctactgtaaagcatatttctatggcttgagagtaaaactcctagaaccagttcctgtttctgtaacaagatgttcctttagagtcaatgagaacacacacaacctacaaattcatgcaggggacatcctgaagttcttgaaaaagaagaaacctgaagatgccttctgtgttgtgggaataacaatgattgatctttacccaagagactcgtggaattttgtctttggacaggcctctttgacagatggtgtggggatattcagctttgccaggtatggcagtgatttttatagcatgcactataaaggcaaagtgaagaagctcaagaaaacatcttcaagtgactattcaattttcgacaactattatattccagaaataactagtgttttactacttcgatcctgtaagactttaacccatgagatcggacacatatttggactgcgacactgccagtggcttgcatgcctcatgcaaggctccaaccacttggaagaagctgaccggcgccctctaaacctttgccctatctgtttgcacaagttgcagtgtgctgttggcttcagcattgtagaaagatacaaagcactggtgaggtggattgatgatgaatcttctgacacacctggagcaactccagaacacagtcacgaggataatgggaatttaccgaaacccgtggaagcctttaaggaatggaaagagtggataataaaatgcctggctgttctccaaaaatgaggaccttcaaataggagtgattgaaataaataactacttgcatgttatgctttcatttgggtggaatacttcattggaataaactactgatcttgtgctgtgtcaaagtaacagactagaaccttctttcaagtacctgaattgaaatgaaactcattttgaataataaaaactctagaaactctt

SEQ ID NO: 329307 - DNA, 2629 bp, Homo sapiens
aaaaaaaaaaaaaaagcaagaaaaagaaagagaatggcgaggcccagagagaccgaaagtcccaccagagggtacagagctagctcagccctaatgccggccccgcggtgcctttccgagctcacggcctcccctcagcatccgggtttcggcctcggagcgccagggacgccacgaggacgcgccccacacttgcgcttctgggttccagcccccgcggcccccaacaaataaagaagggaaagtgctgagggtgacggccccggggagcgctgcggctctacgtcaacctgcggcggccgccgactcatttggggccacgctggttgcattcgtcacgccggcgatgcctctcaaacccgcggcctgccgaggacgttcccacacgggagaccccagcgacgcgggcgcatctgtggctctcgagaaccgggccgcggagccgccgcgagcgcaagcgaggaatcggcgactgcgggggtggacagctggggcttgtagtcccctcgctaccctctattctggaagaggcgggtcgcggccgctgaactccagctctgcgcctgcccaggcggccgcacgctcaggggcgtggcatgggtgggtcgtgagttgggcggggcccacagggcgtgcgcgacgcagcggcgcggcgcgtggcgtaaggggcgtggcgccagtgggcgtggcgtggcgcagtgcgaagggacgcggtgcgcatgcgcgtgagggctgccgcgggtgggtggtatcgaggcctgtcgggtcagggcggttcgcgggtgctgtcagagctgggccggggcccctaggcagggtagccgggtcgtagaggcgggggccggtcgcggtcggtggagcgggatgaggatgtaggaggggcggacgtggcggaagccgcggggtccgcggggtcggtgcctctagggagccagggaggcctttcccgaggctcctggggaagaagaggcgaagcgagagtccctggggaacccccactccactcccagctggagactgggttgtgtctgcatggaccagagcccacagtgcgagttgctataggcaaccagccagggtggccagctcctccccgtttgcccgtgatgttctggttttgggaccaaagcatcctaggcctccagcccactgcagtgaccgaattctgcgccccctgcccatcttctcccgcagcttccctagattaggcttgggaggcaagaggaggcctcctgacctttcacactgcctttttaatattaagatgaagtcacactccacaactttcttccagccaggcccagacatgtccgtccttgtaagttaaaagcttccatgggagccttccttcctaatcaagatgcaaataatacggcactccgaacagacactaaaaacagctctcatctcaaagaacccagtgcttgtatcacagtatgagaaattagatgctggggaacaacgtttaatgaatgaagccttccagccagccagtgatctctttggacccattaccttgcattctccatcagattggatcacctcccaccctgaggctccccaagactttgaacagttcttcagtgatccttacagaaagacaccctctccaaacaaacgcagcatttatatacagtccattggctctctaggaaacaccagaattatcagtgaagaatatattaaatggctcacgggctactgtaaagcatatttctatggcttgagagtaaaactcctagaaccagttcctgtttctgtaacaagatgttcctttagagtcaatgagaacacacacaacctacaaattcatgcaggggacatcctgaagttcttgaaaaagaagaaacctgaagatgccttctgtgttgtgggaataacaatgattgatctttacccaagagactcgtggaattttgtctttggacaggcctctttgacagatggtgtggggatattcagctttgccaggtatggcagtgatttttatagcatgcactataaaggcaaagtgaagaagctcaagaaaacatcttcaagtgactattcaattttcgacaactattatattccagaaataactagtgttttactacttcgatcctgtaagactttaacccatgagatcggacacatatttggactgcgacactgccagtggcttgcatgcctcatgcaaggctccaaccacttggaagaagctgaccggcgccctctaaacctttgccctatctgtttgcacaagttgcagtgtgctgttggcttcagcattgtagaaagatacaaagcactggtgaggtggattgatgatgaatcttctgacacacctggagcaactccagaacacagtcacgaggataatgggaatttaccgaaacccgtggaagcctttaaggaatggaaagagtggataataaaatgcctggctgttctccaaaaatgaggaccttcaaataggagtgattgaaataaataactacttgcatgttatgctttcatttgggtggaatacttcattggaataaactactgatcttgtgctgtgtcaaagtaacagactagaaccttctttcaagtacctgaattgaaatgaaactcattttgaataataaaaactctagaaactctt

SEQ ID NO: 329308 - DNA, 2478 bp, Homo sapiens
aaaaaaaaaaaaaaagcaagaaaaagaaagagaatggcgaggcccagagagaccgaaagtcccaccagagggtacagagctagctcagccctaatgccggccccgcggtgcctttccgagctcacggcctcccctcagcatccgggtttcggcctcggagcgccagggacgccacgaggacgcgccccacacttgcgcttctgggttccagcccccgcggcccccaacaaataaagaagggaaagtgctgagggtgacggccccggggagcgctgcggctctacgtcaacctgcggcggccgccgactcatttggggccacgctggttgcattcgtcacgccggcgatgcctctcaaacccgcggcctgccgaggacgttcccacacgggagaccccagcgacgcgggcgcatctgtggctctcgagaaccgggccgcggagccgccgcgagcgcaagcgaggaatcggcgactgcgggggtggacagctggggcttgtagtcccctcgctaccctctattctggaagaggcgggtcgcggccgctgaactccagctctgcgcctgcccaggcggccgcacgctcaggggcgtggcatgggtgggtcgtgagttgggcggggcccacagggcgtgcgcgacgcagcggcgcggcgcgtggcgtaaggggcgtggcgccagtgggcgtggcgtggcgcagtgcgaagggacgcggtgcgcatgcgcgtgagggctgccgcgggtgggtggtatcgaggcctgtcgggtcagggcggttcgcgggtgctgtcagagctgggccggggcccctaggcagggtagccgggtcgtagaggcgggggccggtcgcggtcggtggactggagactgggttgtgtctgcatggaccagagcccacagtgcgagttgctataggcaaccagccagggtggccagctcctccccgtttgcccgtgatgttctggttttgggaccaaagcatcctaggcctccagcccactgcagtgaccgaattctgcgccccctgcccatcttctcccgcagcttccctagattaggcttgggaggcaagaggaggcctcctgacctttcacactgcctttttaatattaagatgaagtcacactccacaactttcttccagccaggcccagacatgtccgtccttgtaagttaaaagcttccatgggagccttccttcctaatcaagatgcaaataatacggcactccgaacagacactaaaaacagctctcatctcaaagaacccagtgcttgtatcacagtatgagaaattagatgctggggaacaacgtttaatgaatgaagccttccagccagccagtgatctctttggacccattaccttgcattctccatcagattggatcacctcccaccctgaggctccccaagactttgaacagttcttcagtgatccttacagaaagacaccctctccaaacaaacgcagcatttatatacagtccattggctctctaggaaacaccagaattatcagtgaagaatatattaaatggctcacgggctactgtaaagcatatttctatggcttgagagtaaaactcctagaaccagttcctgtttctgtaacaagatgttcctttagagtcaatgagaacacacacaacctacaaattcatgcaggggacatcctgaagttcttgaaaaagaagaaacctgaagatgccttctgtgttgtgggaataacaatgattgatctttacccaagagactcgtggaattttgtctttggacaggcctctttgacagatggtgtggggatattcagctttgccaggtatggcagtgatttttatagcatgcactataaaggcaaagtgaagaagctcaagaaaacatcttcaagtgactattcaattttcgacaactattatattccagaaataactagtgttttactacttcgatcctgtaagactttaacccatgagatcggacacatatttggactgcgacactgccagtggcttgcatgcctcatgcaaggctccaaccacttggaagaagctgaccggcgccctctaaacctttgccctatctgtttgcacaagttgcagtgtgctgttggcttcagcattgtagaaagatacaaagcactggtgaggtggattgatgatgaatcttctgacacacctggagcaactccagaacacagtcacgaggataatgggaatttaccgaaacccgtggaagcctttaaggaatggaaagagtggataataaaatgcctggctgttctccaaaaatgaggaccttcaaataggagtgattgaaataaataactacttgcatgttatgctttcatttgggtggaatacttcattggaataaactactgatcttgtgctgtgtcaaagtaacagactagaaccttctttcaagtacctgaattgaaatgaaactcattttgaataataaaaactctagaaactctt

SEQ ID NO: 329309 - DNA, 2071 bp, Homo sapiens
aaaaaaaaaaaaaaagcaagaaaaagaaagagaatggcgaggcccagagagaccgaaagtcccaccagagggtacagagctagctcagccctaatgccggccccgcggtgcctttccgagctcacggcctcccctcagcatccgggtttcggcctcggagcgccagggacgccacgaggacgcgccccacacttgcgcttctgggttccagcccccgcggcccccaacaaataaagaagggaaagtgctgagggtgacggccccggggagcgctgcggctctacgtcaacctgcggcggccgccgactcatttggggccacgctggttgcattcgtcacgccggcgatgcctctcaaacccgcggcctgccgaggacgttcccacacgggagaccccagcgacgcgggcgcatctgtggctctcgagaaccgggccgcggagccgccgcgagcgcaagcgaggaatcggcgactgcgggggtggacagctggggcttgtagtcccctcgctaccctctattctggaagaggcgggtcgcggccgctgaactccagctctgcgcctgcccaggcggccgcacgctcaggggcgtggcatgggtgggtcgtgagttgggcggggcccacagggcgtgcgcgacgcagcggcgcggcgcgtggcgtaaggggcgtggcgccagtgggcgtggcgtggcgcagtgcgaagggacgcggtgcgcatgcgcgtgagggctgccgcgggtgggtggtatcgaggcctgtcgggtcagggcggttcgcgggtgctgtcagagctgggccggggcccctagccaggcccagacatgtccgtccttgtaagttaaaagcttccatgggagccttccttcctaatcaagatgcaaataatacggcactccgaacagacactaaaaacagctctcatctcaaagaacccagtgcttgtatcacagtatgagaaattagatgctggggaacaacgtttaatgaatgaagccttccagccagccagtgatctctttggacccattaccttgcattctccatcagattggatcacctcccaccctgaggctccccaagactttgaacagttcttcagtgatccttacagaaagacaccctctccaaacaaacgcagcatttatatacagtccattggctctctaggaaacaccagaattatcagtgaagaatatattaaatggctcacgggctactgtaaagcatatttctatggcttgagagtaaaactcctagaaccagttcctgtttctgtaacaagatgttcctttagagtcaatgagaacacacacaacctacaaattcatgcaggggacatcctgaagttcttgaaaaagaagaaacctgaagatgccttctgtgttgtgggaataacaatgattgatctttacccaagagactcgtggaattttgtctttggacaggcctctttgacagatggtgtggggatattcagctttgccaggtatggcagtgatttttatagcatgcactataaaggcaaagtgaagaagctcaagaaaacatcttcaagtgactattcaattttcgacaactattatattccagaaataactagtgttttactacttcgatcctgtaagactttaacccatgagatcggacacatatttggactgcgacactgccagtggcttgcatgcctcatgcaaggctccaaccacttggaagaagctgaccggcgccctctaaacctttgccctatctgtttgcacaagttgcagtgtgctgttggcttcagcattgtagaaagatacaaagcactggtgaggtggattgatgatgaatcttctgacacacctggagcaactccagaacacagtcacgaggataatgggaatttaccgaaacccgtggaagcctttaaggaatggaaagagtggataataaaatgcctggctgttctccaaaaatgaggaccttcaaataggagtgattgaaataaataactacttgcatgttatgctttcatttgggtggaatacttcattggaataaactactgatcttgtgctgtgtcaaagta

SEQ ID NO: 329310 - DNA, 1555 bp, Homo sapiens
agcagtagccggaggaagccgccgctggtcccccaagcaccagcgcccgggtggaaggggcgaggaggcggggccgtgaacaaagtggtgtacgatgaccacgggagctaggaggaagaggacggcgacgtcgaggagacccaggagtctgaggacaacgaggagcatgagatggaggaggacgaggctgattccgattatctggaggagctggaagacgacgacgacgccagttactgcacagaaagcagcttcaggagccatagtacctacagcagcactccagatgcaaataatacggcactccgaacagacactaaaaacagctctcatctcaaagaacccagtgcttgtatcacagtatgagaaattagatgctggggaacaacgtttaatgaatgaagccttccagccagccagtgatctctttggacccattaccttgcattctccatcagattggatcacctcccaccctgaggctccccaagactttgaacagttcttcagtgatccttacagaaagacaccctctccaaacaaacgcagcatttatatacagtccattggctctctaggaaacaccagaattatcagtgaagaatatattaaatggctcacgggctactgtaaagcatatttctatggcttgagagtaaaactcctagaaccagttcctgtttctgtaacaagatgttcctttagagtcaatgagaacacacacaacctacaaattcatgcaggggacatcctgaagttcttgaaaaagaagaaacctgaagatgccttctgtgttgtgggaataacaatgattgatctttacccaagagactcgtggaattttgtctttggacaggcctctttgacagatggtgtggggatattcagctttgccaggtatggcagtgatttttatagcatgcactataaaggcaaagtgaagaagctcaagaaaacatcttcaagtgactattcaattttcgacaactattatattccagaaataactagtgttttactacttcgatcctgtaagactttaacccatgagatcggacacatatttggactgcgacactgccagtggcttgcatgcctcatgcaaggctccaaccacttggaagaagctgaccggcgccctctaaacctttgccctatctgtttgcacaagttgcagtgtgctgttggcttcagcattgtagaaagatacaaagcactggtgaggtggattgatgatgaatcttctgacacacctggagcaactccagaacacagtcacgaggataatgggaatttaccgaaacccgtggaagcctttaaggaatggaaagagtggataataaaatgcctggctgttctccaaaaatgaggaccttcaaataggagtgattgaaataaataactacttgcatgttatgctttcatttgggtggaatacttcattggaataaactactgatcttgtgctgtgtcaaagtaacagactagaaccttctttcaagtacctgaattgaaatgaaactcattttgaataataaaaactctagaaactctt

SEQ ID NO: 329311 - DNA, 1567 bp, Homo sapiens
agcagtagccggaggaagccgccgctggtcccccaagcaccagcgcccgggtggaaggggcgaggaggcggggccgtgaacaaagtggtgtacgatgaccacgggagctaggaggaagaggacggcgacgtcgaggagacccaggagtctgaggacaacgaggagcatgagatggaggaggacgaggctgattccgattatctggaggagctggaagacgacgacgacgccagttactgcacagaaagcagcttcaggagccatagtacctacagcagcactccagccaggcccagacatgtccgtccttgtaagttaaaagcttccatgggagccttccttcctaatcaagatgcaaataatacggcactccgaacagacattagatgctggggaacaacgtttaatgaatgaagccttccagccagccagtgatctctttggacccattaccttgcattctccatcagattggatcacctcccaccctgaggctccccaagactttgaacagttcttcagtgatccttacagaaagacaccctctccaaacaaacgcagcatttatatacagtccattggctctctaggaaacaccagaattatcagtgaagaatatattaaatggctcacgggctactgtaaagcatatttctatggcttgagagtaaaactcctagaaccagttcctgtttctgtaacaagatgttcctttagagtcaatgagaacacacacaacctacaaattcatgcaggggacatcctgaagttcttgaaaaagaagaaacctgaagatgccttctgtgttgtgggaataacaatgattgatctttacccaagagactcgtggaattttgtctttggacaggcctctttgacagatggtgtggggatattcagctttgccaggtatggcagtgatttttatagcatgcactataaaggcaaagtgaagaagctcaagaaaacatcttcaagtgactattcaattttcgacaactattatattccagaaataactagtgttttactacttcgatcctgtaagactttaacccatgagatcggacacatatttggactgcgacactgccagtggcttgcatgcctcatgcaaggctccaaccacttggaagaagctgaccggcgccctctaaacctttgccctatctgtttgcacaagttgcagtgtgctgttggcttcagcattgtagaaagatacaaagcactggtgaggtggattgatgatgaatcttctgacacacctggagcaactccagaacacagtcacgaggataatgggaatttaccgaaacccgtggaagcctttaaggaatggaaagagtggataataaaatgcctggctgttctccaaaaatgaggaccttcaaataggagtgattgaaataaataactacttgcatgttatgctttcatttgggtggaatacttcattggaataaactactgatcttgtgctgtgtcaaagtaacagactagaaccttctttcaagtacctgaattgaaatgaaactcattttgaataataaaaactctagaaactctt

SEQ ID NO: 329312 - DNA, 1951 bp, Homo sapiens
aaaaaaaaaaaaaaagcaagaaaaagaaagagaatggcgaggcccagagagaccgaaagtcccaccagagggtacagagctagctcagccctaatgccggccccgcggtgcctttccgagctcacggcctcccctcagcatccgggtttcggcctcggagcgccagggacgccacgaggacgcgccccacacttgcgcttctgggttccagcccccgcggcccccaacaaataaagaagggaaagtgctgagggtgacggccccggggagcgctgcggctctacgtcaacctgcggcggccgccgactcatttggggccacgctggttgcattcgtcacgccggcgatgcctctcaaacccgcggcctgccgaggacgttcccacacgggagaccccagcgacgcgggcgcatctgtggctctcgagaaccgggccgcggagccgccgcgagcgcaagcgaggaatcggcgactgcgggggtggacagctggggcttgtagtcccctcgctaccctctattctggaagaggcgggtcgcggccgctgaactccagctctgcgcctgcccaggcggccgcacgctcaggggcgtggcatgggtgggtcgtgagttgggcggggcccacagggcgtgcgcgacgcagcggcgcggcgcgtggcgtaaggggcgtggcgccagtgggcgtggcgtggcgcagtgcgaagggacgcggtgcgcatgcgcgtgagggctgccgcggccaggcccagacatgtccgtccttgtaagttaaaagcttccatgggagccttccttcctaatcaagatgcaaataatacggcactccgaacagacactaaaaacagctctcatctcaaagaacccagtgcttgtatcacagtatgagaaattagatgctggggaacaacgtttaatgaatgaagccttccagccagccagtgatctctttggacccattaccttgcattctccatcagattggatcacctcccaccctgaggctccccaagactttgaacagttcttcagtgatccttacagaaagacaccctctccaaacaaacgcagcatttatatacagtccattggctctctaggaaacaccagaattatcagtgaagaatatattaaatggctcacgggctactgtaaagcatatttctatggcttgagagtaaaactcctagaaccagttcctgtttctgtaacaagatgttcctttagagtcaatgagaacacacacaacctacaaattcatgcaggggacatcctgaagttcttgaaaaagaagaaacctgaagatgccttctgtgttgtgggaataacaatgattgatctttacccagaaaacatcttcaagtgactattcaattttcgacaactattatattccagaaataactagtgttttactacttcgatcctgtaagactttaacccatgagatcggacacatatttggactgcgacactgccagtggcttgcatgcctcatgcaaggctccaaccacttggaagaagctgaccggcgccctctaaacctttgccctatctgtttgcacaagttgcagtgtgctgttggcttcagcattgtagaaagatacaaagcactggtgaggtggattgatgatgaatcttctgacacacctggagcaactccagaacacagtcacgaggataatgggaatttaccgaaacccgtggaagcctttaaggaatggaaagagtggataataaaatgcctggctgttctccaaaaatgaggaccttcaaataggagtgattgaaataaataactacttgcatgttatgctttcatttgggtggaatacttcattggaataaactactgatcttgtgctgtgtcaaagtaacagactagaaccttctttcaagtacctgaattgaaatgaaactcattttgaataataaaaactctagaaactctt

SEQ ID NO: 329313 - DNA, 2455 bp, Homo sapiens
aaaaaaaaaaaaaaagcaagaaaaagaaagagaatggcgaggcccagagagaccgaaagtcccaccagagggtacagagctagctcagccctaatgccggccccgcggtgcctttccgagctcacggcctcccctcagcatccgggtttcggcctcggagcgccagggacgccacgaggacgcgccccacacttgcgcttctgggttccagcccccgcggcccccaacaaataaagaagggaaagtgctgagggtgacggccccggggagcgctgcggctctacgtcaacctgcggcggccgccgactcatttggggccacgctggttgcattcgtcacgccggcgatgcctctcaaacccgcggcctgccgaggacgttcccacacgggagaccccagcgacgcgggcgcatctgtggctctcgagaaccgggccgcggagccgccgcgagcgcaagcgaggaatcggcgactgcgggggtggacagctggggcttgtagtcccctcgctaccctctattctggaagaggcgggtcgcggccgctgaactccagctctgcgcctgcccaggcggccgcacgctcaggggcgtggcatgggtgggtcgtgagttgggcggggcccacagggcgtgcgcgacgcagcggcgcggcgcgtggcgtaaggggcgtggcgccagtgggcgtggcgtggcgcagtgcgaagggacgcggtgcgcatgcgcgtgagggctgccgcgggtgggtggtatcgaggcctgtcgggtcagggcggttcgcgggtgctgtcagagctgggccggggcccctaggcagggtagccgggtcgtagaggcgggggccggtcgcggtcggtggagcgggatgaggatgtaggaggggcggacgtggcggaagccgcggggtccgcggggtcggtgcctctagggagccagggaggcctttcccgaggctcctggggaagaagaggcgaagcgagagtccctggggaacccccactccactcccagctggagactgggttgtgtctgcatggaccagagcccacagtgcgagttgctataggcaaccagccagggtggccagctcctccccgtttgcccgtgatgttctggttttgggaccaaagcatcctaggcctccagcccactgcagtgaccgaattctgcgccccctgcccatcttctcccgcagcttccctagattaggcttgggaggcaagaggaggcctcctgacctttcacactgcctttttaatattaagatgaagtcacactccacaactttcttccagccaggcccagacatgtccgtccttgtaagttaaaagcttccatgggagccttccttcctaatcaagatgcaaataatacggcactccgaacagacactaaaaacagctctcatctcaaagaacccagtgcttgtatcacagtatgagaaattagatgctggggaacaacgtttaatgaatgaagccttccagccagccagtgatctctttggacccattaccttgcattctccatcagattggatcacctcccaccctgaggctccccaagactttgaacagttcttcagtgatccttacagaaagacaccctctccaaacaaacgcagcatttatatacagtccattggggacatcctgaagttcttgaaaaagaagaaacctgaagatgccttctgtgttgtgggaataacaatgattgatctttacccaagagactcgtggaattttgtctttggacaggcctctttgacagatggtgtggggatattcagctttgccaggtatggcagtgatttttatagcatgcactataaaggcaaagtgaagaagctcaagaaaacatcttcaagtgactattcaattttcgacaactattatattccagaaataactagtgttttactacttcgatcctgtaagactttaacccatgagatcggacacatatttggactgcgacactgccagtggcttgcatgcctcatgcaaggctccaaccacttggaagaagctgaccggcgccctctaaacctttgccctatctgtttgcacaagttgcagtgtgctgttggcttcagcattgtagaaagatacaaagcactggtgaggtggattgatgatgaatcttctgacacacctggagcaactccagaacacagtcacgaggataatgggaatttaccgaaacccgtggaagcctttaaggaatggaaagagtggataataaaatgcctggctgttctccaaaaatgaggaccttcaaataggagtgattgaaataaataactacttgcatgttatgctttcatttgggtggaatacttcattggaataaactactgatcttgtgctgtgtcaaagtaacagactagaaccttctttcaagtacctgaattgaaatgaaactcattttgaataataaaaactctagaaactctt

SEQ ID NO: 329314 - DNA, 1671 bp, Homo sapiens
aaaaaaaaaaaaaaagcaagaaaaagaaagagaatggcgaggcccagagagaccgaaagtcccaccagagggtacagagctagctcagccctaatgccggccccgcggtgcctttccgagctcacggcctcccctcagcatccgggtttcggcctcggagcgccagggacgccacgaggacgcgccccacacttgcgcttctgggttccagcccccgcggcccccaacaaataaagaagggaaagtgctgagggtgacggccccggggagcgctgcggctctacgtcaacctgcggcggccgccgactcatttggggccacgctggttgcattcgtcacgccggcgatgcctctcaaacccgcggcctgccgaggacgttcccacacgggagaccccagcgacgcgggcgcatctgtggctctcgagaaccgggccgcggagccgccgcgagcgcaagcgaggaatcggcgactgcgggggtggacagctggggcttgtagtcccctcgctaccctctattctggaagaggcgggtcgcggccgctgaactccagctctgcgcctgcccaggcggccgcacgctcaggggcgtggcatgggtgggtcgtgagttgggcggggcccacagggcgtgcgcgacgcagcggcgcggcgcgtggcgtaaggggcgtggcgccagtgggcgtggcgtggcgcagtgcgaagggacgcggtgcgcatgcgcgtgagggctgccgcgggtgggtggtatcgaggcctgtcgggtcagggcggttcgcgggtgctgtcagagctgggccggggcccctaggcagggtagccgggtcgtagaggcgggggccggtcgcggtcggtggagcgggatgaggatgtaggaggggcggacgtggcggaagccgcggggtccgcggggtcggtgcctctagggagccagggaggcctttcccgaggctcctggggaagaagaggcgaagcgagagtccctggggaacccccactccactcccagctggagactgggttgtgtctgcatggaccagagcccacagtgcgagttgctataggcaaccagccagggtggccagctcctccccgtttgcccgtgatgttctggttttgggaccaaagcatcctaggcctccagcccactgcagtgaccgaattctgcgccccctgcccatcttctcccgcagcttccctagattaggcttgggaggcaagaggaggcctcctgacctttcacactgcctttttaatattaagatgaagtcacactccacaactttcttccagccaggcccagacatgtccgtccttgtaagttaaaagcttccatgggagccttccttcctaatcaagatgcaaataatacggcactccgaacagacactaaaaacagctctcatctcaaagaacccagtgcttgtatcacagtatgagaaattagatgctggggaacaacgtttaatgaatgaagccttccagccagccagtgatctctttggacccattaccttgcattctccatcagattggatcacctcccaccctgaggctccccaagactttgaacagttcttcagtgatccttacagaagccatggtcaacacaagaccacggtaacccacaagccacggtaacccacaagccacggtaacccaaaagtacg

SEQ ID NO: 329315 - DNA, 1519 bp, Homo sapiens
aaaaaaaaaaaaaaagcaagaaaaagaaagagaatggcgaggcccagagagaccgaaagtcccaccagagggtacagagctagctcagccctaatgccggccccgcggtgcctttccgagctcacggcctcccctcagcatccgggtttcggcctcggagcgccagggacgccacgaggacgcgccccacacttgcgcttctgggttccagcccccgcggcccccaacaaataaagaagggaaagtgctgagggtgacggccccggggagcgctgcggctctacgtcaacctgcggcggccgccgactcatttggggccacgctggttgcattcgtcacgccggcgatgcctctcaaacccgcggcctgccgaggacgttcccacacgggagaccccagcgacgcgggcgcatctgtggctctcgagaaccgggccgcggagccgccgcgagcgcaagcgaggaatcggcgactgcgggggtggacagctggggcttgtagtcccctcgctaccctctattctggaagaggcgggtcgcggccgctgaactccagctctgcgcctgcccaggcggccgcacgctcaggggcgtggcatgggtgggtcgtgagttgggcggggcccacagggcgtgcgcgacgcagcggcgcggcgcgtggcgtaaggggcgtggcgccagtgggcgtggcgtggcgcagtgcgaagggacgcggtgcgcatgcgcgtgagggctgccgcgggtgggtggtatcgaggcctgtcgggtcagggcggttcgcgggtgctgtcagagctgggccggggcccctaggcagggtagccgggtcgtagaggcgggggccggtcgcggtcggtggagcgggatgaggatgtaggaggggcggacgtggcggaagccgcggggtccgcggggtcggtgcctctagggagccagggaggcctttcccgaggctcctggggaagaagaggcgaagcgagagtccctggggaacccccactccactcccagctggagactgggttgtgtctgcatggaccagagcccacagtgcgagttgctataggcaaccagccagggtggccagctcctccccgtttgcccgtgatgttctggttttgggaccaaagcatcctaggcctccagcccactgcagtgaccgaattctgcgccccctgcccatcttctcccgcagcttccctagattaggcttgggaggcaagaggaggcctcctgacctttcacactgcctttttaatattaagatgaagtcacactccacaactttcttccagccaggcccagacatgtccgtccttgtaagttaaaagcttccatgggagccttccttcctaatcaaggtaggtagactacaggaaggtacatcttgttttatattttgtcctgtagaagtcagatttcagcccagttgtgtaggagtgaggatgagcctatgcttatatcagagctttgagtacagagacatttggtctggaattttagtcagcctcttcaacccc

SEQ ID NO: 329316 - DNA, 305 bp, Homo sapiens
agtaagacatttggggaaatgagggattattaagtctttgaaggtctggacagggtgaagttttggtggtaatggtaagggagttgattcctatgtttcttggaaaagcaagaaaaagaagagacgtgtagcctaatgtgatggtggtcttataaagcctcaacatgattgtcttgcagactttaacccatgagatcggacacatatttggactgcgacactgccagtggcttgcatgcctcatgcaaggctccaaccacttggaagaagctgaccggcgccctctaaacctttgccctatctgt

SEQ ID NO: 329317 - DNA, 344 bp, Homo sapiens
attatttcatattcacaccatcattatcaaatgcagcgtcttcatggggtaatatgtcaccctatgatctagaagccaatgcttctctcttgcctgatggtattttgctgtggtttgttgaagtgcgcatctttcatgtttttccaggcactggtgaggtggattgatgatgaatcttctgacacacctggagcaactccagaacacagtcacgaggataatgggaatttaccgaaacccgtggaagcctttaaggaatggaaagagtggataataaaatgcctggctgttctccaaaaatgaggaccttcaaataggagtgattgaaataaataactacttgc

SEQ ID NO: 329318 - DNA, 415 bp, Homo sapiens
gtaaatactggtaatgtgctggttttggttcagttttgcagtggcgctcttgtcaggaatagtccaggctatgggtctgattcagatgggccgttttaggatcgtttttgatattcattgcggcggtacaagttttgtagccaaactgacttaaaagataacattttgtttctttttgtttcatagcaacaccaatgaatgataaaggttattgaaaatttagagttggttttgtttctaatttgaatcttcttactcatagactgggtaaacactgaataatcatcttaaagtctgtttttaaatgttcttccatattgtaggctctctaggaaacaccagaattatcagtgaagaatatattaaatggctcacgggctactgtaaagcatatttctatggcttgagagtaaaa

SEQ ID NO: 329319 - DNA, 456 bp, Homo sapiens
cccattgatcgccagggttgatcggctgatctggctggctagcgggtgccctcctccctcaccgctccatgtgcgtccctcccgaagctgccgctcggtcgaagaggacgaccatccccgatagaggaggaccggtcttcggtcaagggtatacgagtactgcgctcccctgctagaacctccaaacaagctctcaaggtccatttgtaggagaacgtagggtagtcaagcttccaaaactccagaacacagtcacgaggataatgggaatttaccgaaacccgtggaagcctttaaggaatggaaagagtggataataaaatgcctggctgttctccaaaaatgaggaccttcaaataggagtgattgaaataaataactacttgcatgttatgctttcatttgggtggaatacttcattggaataaactactgatcttgtgctgtgtcaaagta

SEQ ID NO: 329320 - DNA, 2000 bp, Homo sapiens
aaaaaaaaaaaaaaagcaagaaaaagaaagagaatggcgaggcccagagagaccgaaagtcccaccagagggtacagagctagctcagccctaatgccggccccgcggtgcctttccgagctcacggcctcccctcagcatccgggtttcggcctcggagcgccagggacgccacgaggacgcgccccacacttgcgcttctgggttccagcccccgcggcccccaacaaataaagaagggaaagtgctgagggtgacggccccggggagcgctgcggctctacgtcaacctgcggcggccgccgactcatttggggccacgctggttgcattcgtcacgccggcgatgcctctcaaacccgcggcctgccgaggacgttcccacacgggagaccccagcgacgcgggcgcatctgtggctctcgagaaccgggccgcggagccgccgcgagcgcaagcgaggaatcggcgactgcgggggtggacagctggggcttgtagtcccctcgctaccctctattctggaagaggcgggtcgcggccgctgaactccagctctgcgcctgcccaggcggccgcacgctcaggggcgtggcatgggtgggtcgtgagttgggcggggcccacagggcgtgcgcgacgcagcggcgcggcgcgtggcgtaaggggcgtggcgccagtgggcgtggcgtggcgcagtgcgaagggacgcggtgcgcatgcgcgtgagggctgccgcggccaggcccagacatgtccgtccttgtaagttaaaagcttccatgggagccttccttcctaatcaagatgcaaataatacggcactccgaacagacactaaaaacagctctcatctcaaagaacccagtgcttgtatcacagtatgagaaattagatgctggggaacaacgtttaatgaatgaagccttccagccagccagtgatctctttggacccattaccttgcattctccatcagattggatcacctcccaccctgaggctccccaagactttgaacagttcttcagtgatccttacagaaagacaccctctccaaacaaacgcagcatttatatacagtccattggctctctaggaaacaccagaattatcagtgaagaatatattaaatggctcacgggctactgtaaagcatatttctatggcttgagagtaaaactcctagaaccagttcctgtttctgtaacaagatgttcctttagagtcaatgagaacacacacaacctacaaattcatgcaggggacatcctgaagttcttgaaaaagaagaaacctgaagatgccttctgtgttgtgggaataacaatgattgatctttacccaagagactcgtggaattttgtctttggacaggcctctttgacagatggtgtggggatattcagctttgccaggtatggcagtgatttttatagcatgcactataaaggcaaagtgaagaagctcaagaaaacatcttcaagtgactattcaattttcgacaactattatattccagaaataactagtgttttactacttcgatcctgtaagactttaacccatgagatcggacacatatttggactgcgacactgccagtggcttgcatgcctcatgcaaggctccaaccacttggaagaagctgaccggcgccctctaaacctttgccctatctgtttgcacaagttgcagtgtgctgttggcttcagcattgtagaaagatacaaagcactggtgaggtggattgatgatgaatcttctgacacacctggagcaactccagaacacagtcacgaggataatgggaatttaccgaaacccgtggaagcctttaaggaatggaaagagtggataataaaatgcctggctgttctccaaaaatgaggaccttcaaataggagtgattgaaataaataactacttgcatgttatgctttcatttgggtggaatacttcattggaataaactactgatcttgtgctgtgtcaaagta

SEQ ID NO: 329321 - DNA, 2048 bp, Homo sapiens
aaaaaaaaaaaaaaagcaagaaaaagaaagagaatggcgaggcccagagagaccgaaagtcccaccagagggtacagagctagctcagccctaatgccggccccgcggtgcctttccgagctcacggcctcccctcagcatccgggtttcggcctcggagcgccagggacgccacgaggacgcgccccacacttgcgcttctgggttccagcccccgcggcccccaacaaataaagaagggaaagtgctgagggtgacggccccggggagcgctgcggctctacgtcaacctgcggcggccgccgactcatttggggccacgctggttgcattcgtcacgccggcgatgcctctcaaacccgcggcctgccgaggacgttcccacacgggagaccccagcgacgcgggcgcatctgtggctctcgagaaccgggccgcggagccgccgcgagcgcaagcgaggaatcggcgactgcgggggtggacagctggggcttgtagtcccctcgctaccctctattctggaagaggcgggtcgcggccgctgaactccagctctgcgcctgcccaggcggccgcacgctcaggggcgtggcatgggtgggtcgtgagttgggcggggcccacagggcgtgcgcgacgcagcggcgcggcgcgtggcgtaaggggcgtggcgccagtgggcgtggcgtggcgcagtgcgaagggacgcgccaggcccagacatgtccgtccttgtaagttaaaagcttccatgggagccttccttcctaatcaagatgcaaataatacggcactccgaacagacactaaaaacagctctcatctcaaagaacccagtgcttgtatcacagtatgagaaattagatgctggggaacaacgtttaatgaatgaagccttccagccagccagtgatctctttggacccattaccttgcattctccatcagattggatcacctcccaccctgaggctccccaagactttgaacagttcttcagtgatccttacagaaagacaccctctccaaacaaacgcagcatttatatacagtccattggctctctaggaaacaccagaattatcagtgaagaatatattaaatggctcacgggctactgtaaagcatatttctatggcttgagagtaaaactcctagaaccagttcctgtttctgtaacaagatgttcctttagagtcaatgagaacacacacaacctacaaattcatgcaggggacatcctgaagttcttgaaaaagaagaaacctgaagatgccttctgtgttgtgggaataacaatgattgatctttacccaagagactcgtggaattttgtctttggacaggcctctttgacagatggtgtggggatattcagctttgccaggtatggcagtgatttttatagcatgcactataaaggcaaagtgaagaagctcaagaaaacatcttcaagtgactattcaattttcgacaactattatattccagaaataactagtgttttactacttcgatcctgtaagactttaacccatgagatcggacacatatttggactgcgacactgccagtggcttgcatgcctcatgcaaggctccaaccacttggaagaagctgaccggcgccctctaaacctttgccctatctgtttgcacaagttgcagtgtgctgttggcttcagcattgtagaaagatacaaagcactggtgaggtggattgatgatgaatcttctgacacacctggagcaactccagaacacagtcacgaggataatgggaatttaccgaaacccgtggaagcctttaaggaatggaaagagtggataataaaatgcctggctgttctccaaaaatgaggaccttcaaataggagtgattgaaataaataactacttgcatgttatgctttcatttgggtggaatacttcattggaataaactactgatcttgtgctgtgtcaaagtaacagactagaaccttctttcaagtacctgaattgaaatgaaactcattttgaataataaaaactctagaaactctt

SEQ ID NO: 329322 - DNA, 2147 bp, Homo sapiens
aaaaaaaaaaaaaaagcaagaaaaagaaagagaatggcgaggcccagagagaccgaaagtcccaccagagggtacagagctagctcagccctaatgccggccccgcggtgcctttccgagctcacggcctcccctcagcatccgggtttcggcctcggagcgccagggacgccacgaggacgcgccccacacttgcgcttctgggttccagcccccgcggcccccaacaaataaagaagggaaagtgctgagggtgacggccccggggagcgctgcggctctacgtcaacctgcggcggccgccgactcatttggggccacgctggttgcattcgtcacgccggcgatgcctctcaaacccgcggcctgccgaggacgttcccacacgggagaccccagcgacgcgggcgcatctgtggctctcgagaaccgggccgcggagccgccgcgagcgcaagcgaggaatcggcgactgcgggggtggacagctggggcttgtagtcccctcgctaccctctattctggaagaggcgggtcgcggccgctgaactccagctctgcgcctgcccaggcggccgcacgctcaggggcgtggcatgggtgggtcgtgagttgggcggggcccacagggcgtgcgcgacgcagcggcgcggcgcgtggcgtaaggggcgtggcgccagtgggcgtggcgtggcgcagtgcgaagggacgcggtgcgcatgcgcgtgagggctgccgcgggtgggtggtatcgaggcctgtcgggtcagggcggttcgcgggtgctgtcagagctgggccggggcccctagccaggcccagacatgtccgtccttgtaagttaaaagcttccatgggagccttccttcctaatcaagatgcaaataatacggcactccgaacagacactaaaaacagctctcatctcaaagaacccagtgcttgtatcacagtatgagaaattagatgctggggaacaacgtttaatgaatgaagccttccagccagccagtgatctctttggacccattaccttgcattctccatcagattggatcacctcccaccctgaggctccccaagactttgaacagttcttcagtgatccttacagaaagacaccctctccaaacaaacgcagcatttatatacagtccattggctctctaggaaacaccagaattatcagtgaagaatatattaaatggctcacgggctactgtaaagcatatttctatggcttgagagtaaaactcctagaaccagttcctgtttctgtaacaagatgttcctttagagtcaatgagaacacacacaacctacaaattcatgcaggggacatcctgaagttcttgaaaaagaagaaacctgaagatgccttctgtgttgtgggaataacaatgattgatctttacccaagagactcgtggaattttgtctttggacaggcctctttgacagatggtgtggggatattcagctttgccaggtatggcagtgatttttatagcatgcactataaaggcaaagtgaagaagctcaagaaaacatcttcaagtgactattcaattttcgacaactattatattccagaaataactagtgttttactacttcgatcctgtaagactttaacccatgagatcggacacatatttggactgcgacactgccagtggcttgcatgcctcatgcaaggctccaaccacttggaagaagctgaccggcgccctctaaacctttgccctatctgtttgcacaagttgcagtgtgctgttggcttcagcattgtagaaagatacaaagcactggtgaggtggattgatgatgaatcttctgacacacctggagcaactccagaacacagtcacgaggataatgggaatttaccgaaacccgtggaagcctttaaggaatggaaagagtggataataaaatgcctggctgttctccaaaaatgaggaccttcaaataggagtgattgaaataaataactacttgcatgttatgctttcatttgggtggaatacttcattggaataaactactgatcttgtgctgtgtcaaagtaacagactagaaccttctttcaagtacctgaattgaaatgaaactcattttgaataataaaaactctagaaactctt

SEQ ID NO: 329323 - DNA, 1574 bp, Homo sapiens
gcaatcctcctatcccaaagtgctgaaattacaggcatgagccaccacacctggccaccactagtttttgtaatgggagcaggttccatatgagatggaggaatggatttcatgattgtctttttaatttcttagatctccaagaaattggacatgaggaaaccactctaagtgtgaccactctaaagcattagcaatcagtcatttcactctagggagaaatcagagctgaaatatagaggataggtaaagtccccaatgtagatatgtatttttatatttgattacttgcttttttttgttagatgcaaataatacggcactccgaacagacactaaaaacagctctcatctcaaagaacccagtgcttgtatcacagtatgagaaattagatgctggggaacaacgtttaatgaatgaagccttccagccagccagtgatctctttggacccattaccttgcattctccatcagattggatcacctcccaccctgaggctccccaagactttgaacagttcttcagtgatccttacagaaagacaccctctccaaacaaacgcagcatttatatacagtccattggctctctaggaaacaccagaattatcagtgaagaatatattaaatggctcacgggctactgtaaagcatatttctatggcttgagagtaaaactcctagaaccagttcctgtttctgtaacaagatgttcctttagagtcaatgagaacacacacaacctacaaattcatgcaggggacatcctgaagttcttgaaaaagaagaaacctgaagatgccttctgtgttgtgggaataacaatgattgatctttacccaagagactcgtggaattttgtctttggacaggcctctttgacagatggtgtggggatattcagctttgccaggtatggcagtgatttttatagcatgcactataaaggcaaagtgaagaagctcaagaaaacatcttcaagtgactattcaattttcgacaactattatattccagaaataactagtgttttactacttcgatcctgtaagactttaacccatgagatcggacacatatttggactgcgacactgccagtggcttgcatgcctcatgcaaggctccaaccacttggaagaagctgaccggcgccctctaaacctttgccctatctgtttgcacaagttgcagtgtgctgttggcttcagcattgtagaaagatacaaagcactggtgaggtggattgatgatgaatcttctgacacacctggagcaactccagaacacagtcacgaggataatgggaatttaccgaaacccgtggaagcctttaaggaatggaaagagtggataataaaatgcctggctgttctccaaaaatgaggaccttcaaataggagtgattgaaataaataactacttgcatgttatgctttcatttgggtggaatacttcattggaataaactactgatcttgtgctgtgtcaaagtaacagactagaaccttctttcaagtacctgaattgaaatgaaactcattttgaataataaaaactctagaaactctt

SEQ ID NO: 329324 - DNA, 2403 bp, Homo sapiens
aaaaaaaaaaaaaaagcaagaaaaagaaagagaatggcgaggcccagagagaccgaaagtcccaccagagggtacagagctagctcagccctaatgccggccccgcggtgcctttccgagctcacggcctcccctcagcatccgggtttcggcctcggagcgccagggacgccacgaggacgcgccccacacttgcgcttctgggttccagcccccgcggcccccaacaaataaagaagggaaagtgctgagggtgacggccccggggagcgctgcggctctacgtcaacctgcggcggccgccgactcatttggggccacgctggttgcattcgtcacgccggcgatgcctctcaaacccgcggcctgccgaggacgttcccacacgggagaccccagcgacgcgggcgcatctgtggctctcgagaaccgggccgcggagccgccgcgagcgcaagcgaggaatcggcgactgcgggggtggacagctggggcttgtagtcccctcgctaccctctattctggaagaggcgggtcgcggccgctgaactccagctctgcgcctgcccaggcggccgcacgctcaggggcgtggcatgggtgggtcgtgagttgggcggggcccacagggcgtgcgcgacgcagcggcgcggcgcgtggcgtaaggggcgtggcgccagtgggcgtggcgtggcgcagtgcgaagggacgcggtgcgcatgcgcgtgagggctgccgcgggtgggtggtatcgaggcctgtcgggtcagggcggttcgcgggtgctgtcagagctgggccggggcccctaggcagggtagccgggtcgtagaggcgggggccggtcgcggtcggtggagcgggatgaggatgtaggaggggcggacgtggcggaagccgcggggtccgcggggtcggtgcctctagggagccagggaggcctttcccgaggctcctggggaagaagaggcgaagcgagagtccctggggaacccccactccactcccagctggagactgggttgtgtctgcatggaccagagcccacagtgcgagttgctataggcaaccagccagggtggccagctcctccccgtttgcccgtgatgttctggttttgggaccaaagcatcctaggcctccagcccactgcagtgaccgaattctgcgccccctgcccatcttctcccgcagcttccctagattaggcttgggaggcaagaggaggcctcctgacctttcacactgcctttttaatattaagatgaagtcacactccacaactttcttccagccaggcccagacatgtccgtccttgtaagttaaaagctccccaagactttgaacagttcttcagtgatccttacagaaagacaccctctccaaacaaacgcagcatttatatacagtccattggctctctaggaaacaccagaattatcagtgaagaatatattaaatggctcacgggctactgtaaagcatatttctatggcttgagagtaaaactcctagaaccagttcctgtttctgtaacaagatgttcctttagagtcaatgagaacacacacaacctacaaattcatgcaggggacatcctgaagttcttgaaaaagaagaaacctgaagatgccttctgtgttgtgggaataacaatgattgatctttacccaagagactcgtggaattttgtctttggacaggcctctttgacagatggtgtggggatattcagctttgccaggtatggcagtgatttttatagcatgcactataaaggcaaagtgaagaagctcaagaaaacatcttcaagtgactattcaattttcgacaactattatattccagaaataactagtgttttactacttcgatcctgtaagactttaacccatgagatcggacacatatttggactgcgacactgccagtggcttgcatgcctcatgcaaggctccaaccacttggaagaagctgaccggcgccctctaaacctttgccctatctgtttgcacaagttgcagtgtgctgttggcttcagcattgtagaaagatacaaagcactggtgaggtggattgatgatgaatcttctgacacacctggagcaactccagaacacagtcacgaggataatgggaatttaccgaaacccgtggaagcctttaaggaatggaaagagtggataataaaatgcctggctgttctccaaaaatgaggaccttcaaataggagtgattgaaataaataactacttgcatgttatgctttcatttgggtggaatacttcattggaataaactactgatcttgtgctgtgtcaaagtaacagactagaaccttctttcaagtacctgaattgaaatgaaactcattttgaataataaaaactctagaaactctt

SEQ ID NO: 329325 - DNA, 1445 bp, Homo sapiens
  misc_feature (164)..(164): n is a, c, g, or t
ggtggtatcgaggcctgtcgggcaggcccagacatgtccgaccttgtaagttaaaagcttccatgggagcctgccttcctaggtcaagatgcaggaataattacgggacatccgcaaagaagatcaactaggaagaagcagcgtcgtcagtcgtcagaagaacnccagctgccttagtcctcagaggtagtgagaagactctagagtgctgggtgagacaatggttggaagagtgaagtgaagcgcttccaagccaagccatgtggatctccctttgggagcccacttaccctgtgcaatttcttcgcattcaagagtggggatcacctcgtcctcagccgcgtgtacggcgtcccccccaaaggaacttttgaggacgaggttctgtcgagatgactcgctttacagaagagacaccgatctccaaataaacgcagcaatttatatacagtccatgtggctctctaggaaacaccagaattatcagtgaagaatatattaaatggctcacgggctactgtaaagcatatttctatggcttgagagtaaaactcctagaaccagttcctgtttctgtaacaagatgttcctttagagtcaatgagaacacacacaacctacaaattcatgcaggggacatcctgaagttcttgaaaaagaagaaacctgaagatgccttctgtgttgtgggaataacaatgattgatctttacccaagagactcgtggaattttgtctttggacaggcctctttgacagatggtgtggggatattcagctttgccaggtatggcagtgatttttatagcatgcactataaaggcaaagtgaagaagctcaagaaaacatcttcaagtgactattcaattttcgacaactattatattccagaaataactagtgttttactacttcgatcctgtaagactttaacccatgagatcggacacatatttggactgcgacactgccagtggcttgcatgcctcatgcaaggctccaaccacttggaagaagctgaccggcgccctctaaacctttgccctatctgtttgcacaagttgcagtgtgctgttggcttcagcattgtagaaagatacaaagcactggtgaggtggattgatgatgaatcttctgacacacctggagcaactccagaacacagtcacgaggataatgggaatttaccgaaacccgtggaagcctttaaggaatggaaagagtggataataaaatgcctggctgttctccaaaaatgaggaccttcaaataggagtgattgaaataaataactacttgcatgttatgctttcatttgggtggaatacttcattggaataaactactgatcttgtgctgtgtcaaagtaacagactagaaccttctttcaagtacctgaattgaaatgaaactcattttgaataataaaaactctagaaactctt

SEQ ID NO: 329326 - DNA, 1984 bp, Homo sapiens
aaaaaaaaaaaaaaagcaagaaaaagaaagagaatggcgaggcccagagagaccgaaagtcccaccagagggtacagagctagctcagccctaatgccggccccgcggtgcctttccgagctcacggcctcccctcagcatccgggtttcggcctcggagcgccagggacgccacgaggacgcgccccacacttgcgcttctgggttccagcccccgcggcccccaacaaataaagaagggaaagtgctgagggtgacggccccggggagcgctgcggctctacgtcaacctgcggcggccgccgactcatttggggccacgctggttgcattcgtcacgccggcgatgcctctcaaacccgcggcctgccgaggacgttcccacacgggagaccccagcgacgcgggcgcatctgtggctctcgagaaccgggccgcggagccgccgcgagcgcaagcgaggaatcggcgactgcgggggtggacagctggggcttgtagtcccctcgctaccctctattctggaagaggcgggtcgcggccgctgaactccagctctgcgcctgcccaggcggccgcacgctcaggggcgtggcatgggtgggtcgtgagttgggcggggcccacagggcgtgcgcgacgcagcggcgcggcgcgtggcgtaaggggcgtggcgccagtgggcgtggcgtggcgcagtgcgaagggacgcgccaggcccagacatgtccgtccttgtaagttaaaagcttccatgggagccttccttcctaatcaagatgcaaataatacggcactccgaacagacactaaaaacagctctcatctcaaagaacccagtgcttgtatcacagtatgagaaattagatgctggggaacaacgtttaatgaatgaagccttccagccagccagtgatctctttggacccattaccttgcattctccatcagattggatcacctcccaccctgaggctccccaagactttgaacagttcttcagtgatccttacagaaagacaccctctccaaacaaacgcagcatttatatacagtccattggctctctaggaaacaccagaattatcagtgaagaatatattaaatggctcacgggctactgtaaagcatatttctatggcttgagagtaaaactcctagaaccagttcctgtttctgtaacaagatgttcctttagagtcaatgagaacacacacaacctacaaattcatgcagaatgattgatctttacccaagagactcgtggaattttgtctttggacaggcctctttgacagatggtgtggggatattcagctttgccaggtatggcagtgatttttatagcatgcactataaaggcaaagtgaagaagctcaagaaaacatcttcaagtgactattcaattttcgacaactattatattccagaaataactagtgttttactacttcgatcctgtaagactttaacccatgagatcggacacatatttggactgcgacactgccagtggcttgcatgcctcatgcaaggctccaaccacttggaagaagctgaccggcgccctctaaacctttgccctatctgtttgcacaagttgcagtgtgctgttggcttcagcattgtagaaagatacaaagcactggtgaggtggattgatgatgaatcttctgacacacctggagcaactccagaacacagtcacgaggataatgggaatttaccgaaacccgtggaagcctttaaggaatggaaagagtggataataaaatgcctggctgttctccaaaaatgaggaccttcaaataggagtgattgaaataaataactacttgcatgttatgctttcatttgggtggaatacttcattggaataaactactgatcttgtgctgtgtcaaagtaacagactagaaccttctttcaagtacctgaattgaaatgaaactcattttgaataataaaaactctagaaactctt

SEQ ID NO: 329327 - DNA, 326 bp, Homo sapiens
agcagtagccggaggaagccgccgctggtcccccaagcaccagcgcccgggtggaaggggcgaggaggcggggccgtgaacaaagtggtgtacgatgaccacgggagctaggaggaagaggacggcgacgtcgaggagacccaggagtctgaggacaacgaggagcatgagatggaggaggacgaggctgattccgattatctggaggagctggaagacgacgacgacgccagttactgcacagaaagcagcttcaggagccatagtacctacagcagcactccaggtacccacccagcccagttgctgcagactccttccccacc

SEQ ID NO: 329328 - DNA, 3041 bp, Homo sapiens
  misc_feature (950)..(951): n is a, c, g, or t
  misc_feature (953)..(954): n is a, c, g, or t
  misc_feature (958)..(958): n is a, c, g, or t
  misc_feature (964)..(965): n is a, c, g, or t
  misc_feature (968)..(968): n is a, c, g, or t
  misc_feature (970)..(970): n is a, c, g, or t
tgtggaagcccaggagaccagatttcgtttcctgcatctccaaacatggcgacctaggagaaagggaagaacaattttttctcctcttttgggaaggtttgcgtctagtagtgcctgtgcccctgggcagattggagagaagagggacgactggagaatcgtcgagaaccagcggagaaaagaaaaagcaacgtttaattctagaaggcctcctgtccctgcctgctctgggtgctcatggaatcagctgctgccctgcacttctcccggccagcctccctcctcctcctcctcctcagcctgtgtgcactggtctcagcccagtttattgtcgtggggcccactgatcccatcttggccacggttggagaaaacactacgttacgctgccatctgtcacccgagaaaaatgctgaggacatggaggtgcggtggttccggtctcagttctcccccgcagtgtttgtgtataaaggtggcagagagagaacagaggagcagatggaggagtaccgaggaagaaccacctttgtgagcaaagacatcagcaggggcagcgtggccctggtcatacacaacatcacagcccaggaaaacggcacctaccgctgttacttccaagaaggcaggtcctacgatgaggccatcctgcacctcgtagtggcaggactaggctctaagcccctcatttcaatgaggggccatgaagacgggggcatccggctggagtgcatatctagagggtggtacccaaagcccctcacagtgtggagggacccctacggtggggttgcgcctgccctgaaagaggtctccatgcctgatgcagacggcctcttcatggtcaccacggctgtgatcatcagagacaagtctgtgaggaacatgtcctgctctatcaacaacaccctgctcggccagaagaaagaaagtgtcatttttattccagnntnntttntgcccnntgngnctccccattgccgtatgcatctattggatcaacaaactccaaaaggaaaaaaagattctgtcaggggaaaaggagtttgaacgggaaacaagagaaattgctctaaaggaactggagaaagaacgtgtgcaaaaagaggaagaacttcaagtaaaagagaaacttcaagaagaattgcgatggagaagaacattcttacatgctgttgatgtggtcctggatccagacaccgctcatcccgatctcttcctgtcagaggaccggagaagtgtgagaaggtgccccttcaggcacctaggggagagcgtgcctgacaacccagagagattcgacagtcagccttgtgtcctaggccgggagagcttcgcttcagggaaacattactgggaggtggaggtggaaaacgtgattgagtggactgtgggggtctgtagagacagtgttgagaggaaaggggaggtcctgctgattcctcagaatggcttctggaccttggagatgcataaagggcaataccgggccgtgtcctcccctgataggattctccctttgaaggagtccctttgccgggtgggcgtcttcctggactatgaagctggagatgtctccttctacaacatgagggacagatcgcacatctacacatgtccccgttcagccttttccagggcctgacacttcacagagtggggacccaccagagcctatagaatcaattccttggtctcacagccatgtagacaagccctggtcatctcagcagccaccgcacaacacccatcttccagctgcctctttcacacccactacagacctcagccccagttttctcctcctcactaggctgtgtttttagtagttcctttgcttgtaactatgggatgggatccaggcatagggaactagttgttacacagctcccagccaagaagaaagtgtgagaagttgatgggcagcaaacctgctgtttaacatcagggtgaccacattaagcccagtattccagttggcaccagaagatatggacttggaatgaggcctacagggttcaccaggatgtaagaggagagaggaatccacaggaccaccagagaggagagggaaccagatatgcagatcagagatagaggaagtggaaccagagagctgggagggaccaaggttgtaagggtggctaagtcccaccataacagctaaggggacctgggagatgatggctcatttccacccagccccaggatttccagagcgcacatccacaggcctggacctgggatgaagatgaatgaagaacatggatgcacgtggatgtagtttggctcaggtgtccctgcagttggcaaggagtcagtactcagtccctgagtgtggctgaaatttgaggtcctggctgagccaaggagtaatggaccagatctacctcagtattcaagttcagtggggacaccagtggcttcaaacttcctggtttcatgatatcttgagacgccttacaaatgatggaggattccaaagagtttttgtttatttgggttaatatttgttggtatttatggcatttgagattgaaactaagaaatgttttaatttattacctttacaacatttatttacattacatacatacatttacaacatttattaatttatattaaaatagcatgaataagccaattataggttaatataagtagaatgtttgtgaaaaataagtatggtatccaaagcaaaataaattttattgtgaagtgtgaaaaaaaaaaaaaaaaaaaaaaaaaaaaaaaaaaaaaaaaaaaaaaaaaaaaaaaaaaaaaaaaaaaaaaaaaaaaaaaaaaaaaaaaaaaaaaaaaaaaaaaaaaagcgggaaaaaaaaaacccgggaggggggaaaaaactggggggctggcccccttttgggccctttccactttttgggacccctttgaaatttggggggacctttaaaaccgggggaacggcaaacaaatttaaaactggcccctttttaaaaacctggggtttggaaaaaacttgggtttaccaaaattaatttttttgcaaaaaatcccct

SEQ ID NO: 329329 - DNA, 3231 bp, Homo sapiens
  misc_feature (1172)..(1172): n is a, c, g, or t
  misc_feature (1177)..(1177): n is a, c, g, or t
tgtggaagcccaggagaccagatttcgtttcctgcatctccaaacatggcgacctaggagaaagggaagaacaattttttctcctcttttgggaaggtttgcgtctagtagtgcctgtgcccctgggcagattggagagaagagggacgactggagaatcgtcgagaaccagcggagaaaagaaaaagcaacgtttaattctagaaggcctcctgtccctgcctgctctgggtgctcatggaatcagctgctgccctgcacttctcccggccagcctccctcctcctcctcctcctcagcctgtgtgcactggtctcagcccagtttattgtcgtggggcccactgatcccatcttggccacggttggagaaaacactacgttacgctgccatctgtcacccgagaaaaatgctgaggacatggaggtgcggtggttccggtctcagttctcccccgcagtgtttgtgtataaaggtggcagagagagaacagaggagcagatggaggagtaccgaggaagaaccacctttgtgagcaaagacatcagcaggggcagcgtggccctggtcatacacaacatcacagcccaggaaaacggcacctaccgctgttacttccaagaaggcaggtcctacgatgaggccatcctgcacctcgtagtggcaggactaggctctaagcccctcatttcaatgaggggccatgaagacgggggcatccggctggagtgcatatctagagggtggtacccaaagcccctcacagtgtggagggacccctacggtggggttgcgcctgccctgaaagaggtctccatgcctgatgcagacggcctcttcatggtcaccacggctgtgatcatcagagacaagtctgtgaggaacatgtcctgctctatcaacaacaccctgctcggccagaagaaagaaagtgtcatttttattccagaatcctttatgcccagtgtgtctccctgtgcagtggccctgcctatcattgtggttattctgatgatacccattgccgtatgcatctattggatcaacaaactccaaaaggaaaaaaagattctgtcaggggaaaaggagtttgaacgggaaacaagagaaattgctctaaaggaactggagaaagaacgtgtgcaaaaagaggaagaacttcaagtaaaagnagagnaaacttcaagaagaattgcgatggagaagaacattcttacatgctgttgatgtggtcctggatccagacaccgctcatcccgatctcttcctgtcagaggaccggagaagtgtgagaaggtgccccttcaggcacctaggggagagcgtgcctgacaacccagagagattcgacagtcagccttgtgtcctaggccgggagagcttcgcttcagggaaacattactgggaggtggaggtggaaaacgtgattgagtggactgtgggggtctgtagagacagtgttgagaggaaaggggaggtcctgctgattcctcagaatggcttctggaccttggagatgcataaagggcaataccgggccgtgtcctcccctgataggattctccctttgaaggagtccctttgccgggtgggcgtcttcctggactatgaagctggagatgtctccttctacaacatgagggacagatcgcacatctacacatgtccccgttcagccttttccgtgcctgtgaggcccttcttcaggttggggtgtgaggacagccccatcttcatctgccctgcactcacaggagccaatggggtcacggtgcctgaagagggcctgacacttcacagagtggggacccaccagagcctatagaatcaattccttggtctcacagccatgtagacaagccctggtcatctcagcagccaccgcacaacacccctggtggaagacacgccctcctcccctctggtcacacaagagaacatcttccagctgcctctttcacacccactacagacctcagccccagttttctcctcctcactaggctgtgtttttagtagttcctttgcttgtaactatgggatgggatccaggcatagggaactagttgttacacagctcccagccaagaagaaagtgtgagaagttgatgggcagcaaacctgctgtttaacatcagggtgaccacattaagcccagtattccagttggcaccagaagatatggacttggaatgaggcctacagggttcaccaggatgtaagaggagagaggaatccacaggaccaccagagaggagagggaaccagatatgcagatcagagatagaggaagtggaaccagagagctgggagggaccaaggttgtaagggtggctaagtcccaccataacagctaaggggacctgggagatgatggctcatttccacccagccccaggatttccagagcgcacatccacaggcctggacctgggatgaagatgaatgaagaacatggatgcacgtggatgtagtttggctcaggtgtccctgcagttggcaaggagtcagtactcagtccctgagtgtggctgaaatttgaggtcctggctgagccaaggagtaatggaccagatctacctcagtattcaagttcagtggggacaccagtggcttcaaacttcctggtttcatgatatcttgagacgccttacaaatgatggaggattccaaagagtttttgtttatttgggttaatatttgttggtatttatggcatttgagattgaaactaagaaatgttttaatttattacctttacaacatttatttacattacatacatacatttacaacatttattaatttatattaaaatagcatgaataagccaattataggttaatataagtagaatgtttgtgaaaaataagtatggtatccaaagcaaaataaattttattgtgaagtgtgaaaaaaaaaaaaaaaaaaaaaaaaaaaaaaaaaaaaaaaaaaaaaaaaaaaaaaaaaaaaaaaaaaaaaaaaaaaaaaaaaaaaaaaaaaaaaaaaaaaaaaaaaaagcgggaaaaaaaaaacccgggaggggggaaaaaactggggggctggcccccttttgggccctttccactttttgggacccctttgaaatttggggggacctttaaaaccgggggaacggcaaacaaatttaaaactggcccctttttaaaaacctggggtttggaaaaaacttgggtttaccaaaattaatttttttgcaaaaaatcccct

SEQ ID NO: 329330 - DNA, 3220 bp, Homo sapiens
  misc_feature (1161)..(1161): n is a, c, g, or t
  misc_feature (1166)..(1166): n is a, c, g, or t
tgtggaagcccaggagaccagatttcgtttcctgcatctccaaacatggcgacctaggagaaagggaagaacaattttttctcctcttttgggaaggtttgcgtctagtagtgcctgtgcccctgggcagattggagagaagagggacgactggagaatcgtcgagaaccagcggagaaaagaaaaagcaacgtttaattctagaagcccagtttattgtcgtggggcccactgatcccatcttggccacggttggagaaaacactacgttacgctgccatctgtcacccgagaaaaatgctgaggacatggaggtgcggtggttccggtctcagttctcccccgcagtgtttgtgtataaaggtggcagagagagaacagaggagcagatggaggagtaccgaggaagaaccacctttgtgagcaaagacatcagcaggggcagcgtggccctggtcatacacaacatcacagcccaggaaaacggcacctaccgctgttacttccaagaaggcaggtcctacgatgaggccatcctgcacctcgtagtggcagagcttctggaagctgaggtctactgagaagtcgtcccagaagcagaaagtgaaatccaaaacctgcctgtttgaagttggagtcgacacacccatctcaaagactaggctctaagcccctcatttcaatgaggggccatgaagacgggggcatccggctggagtgcatatctagagggtggtacccaaagcccctcacagtgtggagggacccctacggtggggttgcgcctgccctgaaagaggtctccatgcctgatgcagacggcctcttcatggtcaccacggctgtgatcatcagagacaagtctgtgaggaacatgtcctgctctatcaacaacaccctgctcggccagaagaaagaaagtgtcatttttattccagaatcctttatgcccagtgtgtctccctgtgcagtggccctgcctatcattgtggttattctgatgatacccattgccgtatgcatctattggatcaacaaactccaaaaggaaaaaaagattctgtcaggggaaaaggagtttgaacgggaaacaagagaaattgctctaaaggaactggagaaagaacgtgtgcaaaaagaggaagaacttcaagtaaaagnagagnaaacttcaagaagaattgcgatggagaagaacattcttacatgctgttgatgtggtcctggatccagacaccgctcatcccgatctcttcctgtcagaggaccggagaagtgtgagaaggtgccccttcaggcacctaggggagagcgtgcctgacaacccagagagattcgacagtcagccttgtgtcctaggccgggagagcttcgcttcagggaaacattactgggaggtggaggtggaaaacgtgattgagtggactgtgggggtctgtagagacagtgttgagaggaaaggggaggtcctgctgattcctcagaatggcttctggaccttggagatgcataaagggcaataccgggccgtgtcctcccctgataggattctccctttgaaggagtccctttgccgggtgggcgtcttcctggactatgaagctggagatgtctccttctacaacatgagggacagatcgcacatctacacatgtccccgttcagccttttccgtgcctgtgaggcccttcttcaggttggggtgtgaggacagccccatcttcatctgccctgcactcacaggagccaatggggtcacggtgcctgaagagggcctgacacttcacagagtggggacccaccagagcctatagaatcaattccttggtctcacagccatgtagacaagccctggtcatctcagcagccaccgcacaacacccctggtggaagacacgccctcctcccctctggtcacacaagagaacatcttccagctgcctctttcacacccactacagacctcagccccagttttctcctcctcactaggctgtgtttttagtagttcctttgcttgtaactatgggatgggatccaggcatagggaactagttgttacacagctcccagccaagaagaaagtgtgagaagttgatgggcagcaaacctgctgtttaacatcagggtgaccacattaagcccagtattccagttggcaccagaagatatggacttggaatgaggcctacagggttcaccaggatgtaagaggagagaggaatccacaggaccaccagagaggagagggaaccagatatgcagatcagagatagaggaagtggaaccagagagctgggagggaccaaggttgtaagggtggctaagtcccaccataacagctaaggggacctgggagatgatggctcatttccacccagccccaggatttccagagcgcacatccacaggcctggacctgggatgaagatgaatgaagaacatggatgcacgtggatgtagtttggctcaggtgtccctgcagttggcaaggagtcagtactcagtccctgagtgtggctgaaatttgaggtcctggctgagccaaggagtaatggaccagatctacctcagtattcaagttcagtggggacaccagtggcttcaaacttcctggtttcatgatatcttgagacgccttacaaatgatggaggattccaaagagtttttgtttatttgggttaatatttgttggtatttatggcatttgagattgaaactaagaaatgttttaatttattacctttacaacatttatttacattacatacatacatttacaacatttattaatttatattaaaatagcatgaataagccaattataggttaatataagtagaatgtttgtgaaaaataagtatggtatccaaagcaaaataaattttattgtgaagtgtgaaaaaaaaaaaaaaaaaaaaaaaaaaaaaaaaaaaaaaaaaaaaaaaaaaaaaaaaaaaaaaaaaaaaaaaaaaaaaaaaaaaaaaaaaaaaaaaaaaaaaaaaaaagcgggaaaaaaaaaacccgggaggggggaaaaaactggggggctggcccccttttgggccctttccactttttgggacccctttgaaatttggggggacctttaaaaccgggggaacggcaaacaaatttaaaactggcccctttttaaaaacctggggtttggaaaaaacttgggtttaccaaaattaatttttttgcaaaaaatcccct

SEQ ID NO: 329331 - DNA, 3409 bp, Homo sapiens
  misc_feature (1350)..(1350): n is a, c, g, or t
  misc_feature (1355)..(1355): n is a, c, g, or t
gggaggagggtgtggtagaatccagcgacaactgaagaaactgcattctggccagagaagtgagccgaggagggcggaaaaaggcccccttgatcttggcattgatggcttacttcatggaatgtttaaggaatccctctctcgggacatacctgagccttcggatgcaggggactccctgaagttggggcactgatgagacctacttgagtgacgggagaggttgggcccgaccagcactgaggtgccaagactcctaggctgattctcctctgtaaccctaggcctcctgtccctgcctgctctgggtgctcatggaatcagctgctgccctgcacttctcccggccagcctccctcctcctcctcctcctcagcctgtgtgcactggtctcagcccagtttattgtcgtggggcccactgatcccatcttggccacggttggagaaaacactacgttacgctgccatctgtcacccgagaaaaatgctgaggacatggaggtgcggtggttccggtctcagttctcccccgcagtgtttgtgtataaaggtggcagagagagaacagaggagcagatggaggagtaccgaggaagaaccacctttgtgagcaaagacatcagcaggggcagcgtggccctggtcatacacaacatcacagcccaggaaaacggcacctaccgctgttacttccaagaaggcaggtcctacgatgaggccatcctgcacctcgtagtggcagagcttctggaagctgaggtctactgagaagtcgtcccagaagcagaaagtgaaatccaaaacctgcctgtttgaagttggagtcgacacacccatctcaaagactaggctctaagcccctcatttcaatgaggggccatgaagacgggggcatccggctggagtgcatatctagagggtggtacccaaagcccctcacagtgtggagggacccctacggtggggttgcgcctgccctgaaagaggtctccatgcctgatgcagacggcctcttcatggtcaccacggctgtgatcatcagagacaagtctgtgaggaacatgtcctgctctatcaacaacaccctgctcggccagaagaaagaaagtgtcatttttattccagaatcctttatgcccagtgtgtctccctgtgcagtggccctgcctatcattgtggttattctgatgatacccattgccgtatgcatctattggatcaacaaactccaaaaggaaaaaaagattctgtcaggggaaaaggagtttgaacgggaaacaagagaaattgctctaaaggaactggagaaagaacgtgtgcaaaaagaggaagaacttcaagtaaaagnagagnaaacttcaagaagaattgcgatggagaagaacattcttacatgctgttgatgtggtcctggatccagacaccgctcatcccgatctcttcctgtcagaggaccggagaagtgtgagaaggtgccccttcaggcacctaggggagagcgtgcctgacaacccagagagattcgacagtcagccttgtgtcctaggccgggagagcttcgcttcagggaaacattactgggaggtggaggtggaaaacgtgattgagtggactgtgggggtctgtagagacagtgttgagaggaaaggggaggtcctgctgattcctcagaatggcttctggaccttggagatgcataaagggcaataccgggccgtgtcctcccctgataggattctccctttgaaggagtccctttgccgggtgggcgtcttcctggactatgaagctggagatgtctccttctacaacatgagggacagatcgcacatctacacatgtccccgttcagccttttccgtgcctgtgaggcccttcttcaggttggggtgtgaggacagccccatcttcatctgccctgcactcacaggagccaatggggtcacggtgcctgaagagggcctgacacttcacagagtggggacccaccagagcctatagaatcaattccttggtctcacagccatgtagacaagccctggtcatctcagcagccaccgcacaacacccctggtggaagacacgccctcctcccctctggtcacacaagagaacatcttccagctgcctctttcacacccactacagacctcagccccagttttctcctcctcactaggctgtgtttttagtagttcctttgcttgtaactatgggatgggatccaggcatagggaactagttgttacacagctcccagccaagaagaaagtgtgagaagttgatgggcagcaaacctgctgtttaacatcagggtgaccacattaagcccagtattccagttggcaccagaagatatggacttggaatgaggcctacagggttcaccaggatgtaagaggagagaggaatccacaggaccaccagagaggagagggaaccagatatgcagatcagagatagaggaagtggaaccagagagctgggagggaccaaggttgtaagggtggctaagtcccaccataacagctaaggggacctgggagatgatggctcatttccacccagccccaggatttccagagcgcacatccacaggcctggacctgggatgaagatgaatgaagaacatggatgcacgtggatgtagtttggctcaggtgtccctgcagttggcaaggagtcagtactcagtccctgagtgtggctgaaatttgaggtcctggctgagccaaggagtaatggaccagatctacctcagtattcaagttcagtggggacaccagtggcttcaaacttcctggtttcatgatatcttgagacgccttacaaatgatggaggattccaaagagtttttgtttatttgggttaatatttgttggtatttatggcatttgagattgaaactaagaaatgttttaatttattacctttacaacatttatttacattacatacatacatttacaacatttattaatttatattaaaatagcatgaataagccaattataggttaatataagtagaatgtttgtgaaaaataagtatggtatccaaagcaaaataaattttattgtgaagtgtgaaaaaaaaaaaaaaaaaaaaaaaaaaaaaaaaaaaaaaaaaaaaaaaaaaaaaaaaaaaaaaaaaaaaaaaaaaaaaaaaaaaaaaaaaaaaaaaaaaaaaaaaaaagcgggaaaaaaaaaacccgggaggggggaaaaaactggggggctggcccccttttgggccctttccactttttgggacccctttgaaatttggggggacctttaaaaccgggggaacggcaaacaaatttaaaactggcccctttttaaaaacctggggtttggaaaaaacttgggtttaccaaaattaatttttttgcaaaaaatcccct

SEQ ID NO: 329332 - DNA, 3227 bp, Homo sapiens
tgtggaagcccaggagaccagatttcgtttcctgcatctccaaacatggcgacctaggagaaagggaagaacaattttttctcctcttttgggaaggtttgcgtctagtagtgcctgtgcccctgggcagattggagagaagagggacgactggagaatcgtcgagaaccagcggagaaaagaaaaagcaacgtttaattctagaaggcctcctgtccctgcctgctctgggtgctcatggaatcagctgctgccctgcacttctcccggccagcctccctcctcctcctcctcctcagcctgtgtgcactggtctcagcccagtttattgtcgtggggcccactgatcccatcttggccacggttggagaaaacactacgttacgctgccatctgtcacccgagaaaaatgctgaggacatggaggtgcggtggttccggtctcagttctcccccgcagtgtttgtgtataaaggtggcagagagagaacagaggagcagatggaggagtaccgaggaagaaccacctttgtgagcaaagacatcagcaggggcagcgtggccctggtcatacacaacatcacagcccaggaaaacggcacctaccgctgttacttccaagaaggcaggtcctacgatgaggccatcctgcacctcgtagtggcaggactaggctctaagcccctcatttcaatgaggggccatgaagacgggggcatccggctggagtgcatatctagagggtggtacccaaagcccctcacagtgtggagggacccctacggtggggttgcgcctgccctgaaagaggtctccatgcctgatgcagacggcctcttcatggtcaccacggctgtgatcatcagagacaagtctgtgaggaacatgtcctgctctatcaacaacaccctgctcggccagaagaaagaaagtgtcatttttattccagaatcctttatgcccagtgtgtctccctgtgcagtggccctgcctatcattgtggttattctgatgatacccattgccgtatgcatctattggatcaacaaactccaaaaggaaaaaaagattctgtcaggggaaaaggagtttgaacgggaaacaagagaaattgctctaaaggaactggagaaagaacgtgtgcaaaaagaggaagaacttcaagtaaaagagaaacttcaagaagaattgcgatggagaagaacattcttacatgctgttgatgtggtcctggatccagacaccgctcatcccgatctcttcctgtcagaggaccggagaagtgtgagaaggtgccccttcaggcacctaggggagagcgtgcctgacaacccagagagattcgacagtcagccttgtgtcctaggccgggagagcttcgcttcagggaaacattactgggaggtggaggtggaaaacgtgattgagtggactgtgggggtctgtagagacagtgttgagaggaaaggggaggtcctgctgattcctcagaatggcttctggaccttggagatgcataaagggcaataccgggccgtgtcctcccctgataggattctccctttgaaggagtccctttgccgggtgggcgtcttcctggactatgaagctggagatgtctccttctacaacatgagggacagatcgcacatctacacatgtccccgttcagccttttccgtgcctgtgaggcccttcttcaggttggggtgtgaggacagccccatcttcatctgccctgcactcacaggagccaatggggtcacggtgcctgaagagggcctgacacttcacagagtggggacccaccagagcctatagaatcaattccttggtctcacagccatgtagacaagccctggtcatctcagcagccaccgcacaacacccctggtggaagacacgccctcctcccctctggtcacacaagagaacatcttccagctgcctctttcacacccactacagacctcagccccagttttctcctcctcactaggctgtgtttttagtagttcctttgcttgtaactatgggatgggatccaggcatagggaactagttgttacacagctcccagccaagaagaaagtgtgagaagttgatgggcagcaaacctgctgtttaacatcagggtgaccacattaagcccagtattccagttggcaccagaagatatggacttggaatgaggcctacagggttcaccaggatgtaagaggagagaggaatccacaggaccaccagagaggagagggaaccagatatgcagatcagagatagaggaagtggaaccagagagctgggagggaccaaggttgtaagggtggctaagtcccaccataacagctaaggggacctgggagatgatggctcatttccacccagccccaggatttccagagcgcacatccacaggcctggacctgggatgaagatgaatgaagaacatggatgcacgtggatgtagtttggctcaggtgtccctgcagttggcaaggagtcagtactcagtccctgagtgtggctgaaatttgaggtcctggctgagccaaggagtaatggaccagatctacctcagtattcaagttcagtggggacaccagtggcttcaaacttcctggtttcatgatatcttgagacgccttacaaatgatggaggattccaaagagtttttgtttatttgggttaatatttgttggtatttatggcatttgagattgaaactaagaaatgttttaatttattacctttacaacatttatttacattacatacatacatttacaacatttattaatttatattaaaatagcatgaataagccaattataggttaatataagtagaatgtttgtgaaaaataagtatggtatccaaagcaaaataaattttattgtgaagtgtgaaaaaaaaaaaaaaaaaaaaaaaaaaaaaaaaaaaaaaaaaaaaaaaaaaaaaaaaaaaaaaaaaaaaaaaaaaaaaaaaaaaaaaaaaaaaaaaaaaaaaaaaaaagcgggaaaaaaaaaacccgggaggggggaaaaaactggggggctggcccccttttgggccctttccactttttgggacccctttgaaatttggggggacctttaaaaccgggggaacggcaaacaaatttaaaactggcccctttttaaaaacctggggtttggaaaaaacttgggtttaccaaaattaatttttttgcaaaaaatcccct

SEQ ID NO: 329333 - DNA, 3332 bp, Homo sapiens
  misc_feature (1273)..(1273): n is a, c, g, or t
  misc_feature (1278)..(1278): n is a, c, g, or t
tgtggaagcccaggagaccagatttcgtttcctgcatctccaaacatggcgacctaggagaaagggaagaacaattttttctcctcttttgggaaggtttgcgtctagtagtgcctgtgcccctgggcagattggagagaagagggacgactggagaatcgtcgagaaccagcggagaaaagaaaaagcaacgtttaattctagaaggcctcctgtccctgcctgctctgggtgctcatggaatcagctgctgccctgcacttctcccggccagcctccctcctcctcctcctcctcagcctgtgtgcactggtctcagcccagtttattgtcgtggggcccactgatcccatcttggccacggttggagaaaacactacgttacgctgccatctgtcacccgagaaaaatgctgaggacatggaggtgcggtggttccggtctcagttctcccccgcagtgtttgtgtataaaggtggcagagagagaacagaggagcagatggaggagtaccgaggaagaaccacctttgtgagcaaagacatcagcaggggcagcgtggccctggtcatacacaacatcacagcccaggaaaacggcacctaccgctgttacttccaagaaggcaggtcctacgatgaggccatcctgcacctcgtagtggcagagcttctggaagctgaggtctactgagaagtcgtcccagaagcagaaagtgaaatccaaaacctgcctgtttgaagttggagtcgacacacccatctcaaagactaggctctaagcccctcatttcaatgaggggccatgaagacgggggcatccggctggagtgcatatctagagggtggtacccaaagcccctcacagtgtggagggacccctacggtggggttgcgcctgccctgaaagaggtctccatgcctgatgcagacggcctcttcatggtcaccacggctgtgatcatcagagacaagtctgtgaggaacatgtcctgctctatcaacaacaccctgctcggccagaagaaagaaagtgtcatttttattccagaatcctttatgcccagtgtgtctccctgtgcagtggccctgcctatcattgtggttattctgatgatacccattgccgtatgcatctattggatcaacaaactccaaaaggaaaaaaagattctgtcaggggaaaaggagtttgaacgggaaacaagagaaattgctctaaaggaactggagaaagaacgtgtgcaaaaagaggaagaacttcaagtaaaagnagagnaaacttcaagaagaattgcgatggagaagaacattcttacatgctgttgatgtggtcctggatccagacaccgctcatcccgatctcttcctgtcagaggaccggagaagtgtgagaaggtgccccttcaggcacctaggggagagcgtgcctgacaacccagagagattcgacagtcagccttgtgtcctaggccgggagagcttcgcttcagggaaacattactgggaggtggaggtggaaaacgtgattgagtggactgtgggggtctgtagagacagtgttgagaggaaaggggaggtcctgctgattcctcagaatggcttctggaccttggagatgcataaagggcaataccgggccgtgtcctcccctgataggattctccctttgaaggagtccctttgccgggtgggcgtcttcctggactatgaagctggagatgtctccttctacaacatgagggacagatcgcacatctacacatgtccccgttcagccttttccgtgcctgtgaggcccttcttcaggttggggtgtgaggacagccccatcttcatctgccctgcactcacaggagccaatggggtcacggtgcctgaagagggcctgacacttcacagagtggggacccaccagagcctatagaatcaattccttggtctcacagccatgtagacaagccctggtcatctcagcagccaccgcacaacacccctggtggaagacacgccctcctcccctctggtcacacaagagaacatcttccagctgcctctttcacacccactacagacctcagccccagttttctcctcctcactaggctgtgtttttagtagttcctttgcttgtaactatgggatgggatccaggcatagggaactagttgttacacagctcccagccaagaagaaagtgtgagaagttgatgggcagcaaacctgctgtttaacatcagggtgaccacattaagcccagtattccagttggcaccagaagatatggacttggaatgaggcctacagggttcaccaggatgtaagaggagagaggaatccacaggaccaccagagaggagagggaaccagatatgcagatcagagatagaggaagtggaaccagagagctgggagggaccaaggttgtaagggtggctaagtcccaccataacagctaaggggacctgggagatgatggctcatttccacccagccccaggatttccagagcgcacatccacaggcctggacctgggatgaagatgaatgaagaacatggatgcacgtggatgtagtttggctcaggtgtccctgcagttggcaaggagtcagtactcagtccctgagtgtggctgaaatttgaggtcctggctgagccaaggagtaatggaccagatctacctcagtattcaagttcagtggggacaccagtggcttcaaacttcctggtttcatgatatcttgagacgccttacaaatgatggaggattccaaagagtttttgtttatttgggttaatatttgttggtatttatggcatttgagattgaaactaagaaatgttttaatttattacctttacaacatttatttacattacatacatacatttacaacatttattaatttatattaaaatagcatgaataagccaattataggttaatataagtagaatgtttgtgaaaaataagtatggtatccaaagcaaaataaattttattgtgaagtgtgaaaaaaaaaaaaaaaaaaaaaaaaaaaaaaaaaaaaaaaaaaaaaaaaaaaaaaaaaaaaaaaaaaaaaaaaaaaaaaaaaaaaaaaaaaaaaaaaaaaaaaaaaaagcgggaaaaaaaaaacccgggaggggggaaaaaactggggggctggcccccttttgggccctttccactttttgggacccctttgaaatttggggggacctttaaaaccgggggaacggcaaacaaatttaaaactggcccctttttaaaaacctggggtttggaaaaaacttgggtttaccaaaattaatttttttgcaaaaaatcccct

SEQ ID NO: 329334 - DNA, 2263 bp, Homo sapiens
tgtggaagcccaggagaccagatttcgtttcctgcatctccaaacatggcgacctaggagaaagggaagaacaattttttctcctcttttgggaaggtttgcgtctagtagtgcctgtgcccctgggcagattggagagaagagggacgactggagaatcgtcgagaaccagcggagaaaagaaaaagcaacgtttaattctagaaggcctcctgtccctgcctgctctgggtgctcatggaatcagctgctgccctgcacttctcccggccagcctccctcctcctcctcctcctcagcctgtgtgcactggtctcagtgtgagaaggtgccccttcaggcacctaggggagagcgtgcctgacaacccagagagattcgacagtcagccttgtgtcctaggccgggagagcttcgcttcagggaaacattactgggaggtggaggtggaaaacgtgattgagtggactgtgggggtctgtagagacagtgttgagaggaaaggggaggtcctgctgattcctcagaatggcttctggaccttggagatgcataaagggcaataccgggccgtgtcctcccctgataggattctccctttgaaggagtccctttgccgggtgggcgtcttcctggactatgaagctggagatgtctccttctacaacatgagggacagatcgcacatctacacatgtccccgttcagccttttccgtgcctgtgaggcccttcttcaggttggggtgtgaggacagccccatcttcatctgccctgcactcacaggagccaatggggtcacggtgcctgaagagggcctgacacttcacagagtggggacccaccagagcctatagaatcaattccttggtctcacagccatgtagacaagccctggtcatctcagcagccaccgcacaacacccctggtggaagacacgccctcctcccctctggtcacacaagagaacatcttccagctgcctctttcacacccactacagacctcagccccagttttctcctcctcactaggctgtgtttttagtagttcctttgcttgtaactatgggatgggatccaggcatagggaactagttgttacacagctcccagccaagaagaaagtgtgagaagttgatgggcagcaaacctgctgtttaacatcagggtgaccacattaagcccagtattccagttggcaccagaagatatggacttggaatgaggcctacagggttcaccaggatgtaagaggagagaggaatccacaggaccaccagagaggagagggaaccagatatgcagatcagagatagaggaagtggaaccagagagctgggagggaccaaggttgtaagggtggctaagtcccaccataacagctaaggggacctgggagatgatggctcatttccacccagccccaggatttccagagcgcacatccacaggcctggacctgggatgaagatgaatgaagaacatggatgcacgtggatgtagtttggctcaggtgtccctgcagttggcaaggagtcagtactcagtccctgagtgtggctgaaatttgaggtcctggctgagccaaggagtaatggaccagatctacctcagtattcaagttcagtggggacaccagtggcttcaaacttcctggtttcatgatatcttgagacgccttacaaatgatggaggattccaaagagtttttgtttatttgggttaatatttgttggtatttatggcatttgagattgaaactaagaaatgttttaatttattacctttacaacatttatttacattacatacatacatttacaacatttattaatttatattaaaatagcatgaataagccaattataggttaatataagtagaatgtttgtgaaaaataagtatggtatccaaagcaaaataaattttattgtgaagtgtgaaaaaaaaaaaaaaaaaaaaaaaaaaaaaaaaaaaaaaaaaaaaaaaaaaaaaaaaaaaaaaaaaaaaaaaaaaaaaaaaaaaaaaaaaaaaaaaaaaaaaaaaaaagcgggaaaaaaaaaacccgggaggggggaaaaaactggggggctggcccccttttgggccctttccactttttgggacccctttgaaatttggggggacctttaaaaccgggggaacggcaaacaaatttaaaactggcccctttttaaaaacctggggtttggaaaaaacttgggtttaccaaaattaatttttttgcaaaaaatcccct

SEQ ID NO: 329335 - DNA, 509 bp, Homo sapiens
tgccccggctgaagagaagggatcctttgcaaccccatggctgtcagtgagcaaacagcccaggattcacccgccctgctgtccccaaaggcaggaatgccagcaggtggaagaggggagactgtgatccacctgggtcccacatgcctgtttccagtttctgcccaccctgattcatagctgggtggaatcataggcagcactggaaataccctccaagatcatgtgtcccaccccgttagacagacagggacactctggcgcgtttcatgtacgactcacccacttccttaagagccagtgtgggtttcttcccctgtgatatcagcttcatggactggatgttaaggcttaatgtgttatctttcccagaaatactttaattccaaagatggatgtgctgagcacataacatttaacacagaacaaggggtaagagagaaggaaccagcacatacggatgtcctattatgagtgagtcactgtgctagtgttcttcttaagaatat

SEQ ID NO: 329336 - DNA, 345 bp, Homo sapiens
atctgggaacaagacccaggggggttggggaataatttcaagggtagcagatgctttttggtaatggtcagatgaggtgttttaagctgtgaaaaaccgaaggccagcagtatggtctgtatgtttcggaaggggatggtcagtttttgtttgtcttcggggagaggtgagatggtatagcaaactgtttttttggagacggattcttactgtattgtccagactggagtgcagtggcacgatctcggctcactgcaacctctgcctcctgggttcaagcgattctcctgccttagcctcctgagtagctgggattacaggtgctcaccaccatgcttggctaat

SEQ ID NO: 329337 - DNA, 536 bp, Homo sapiens
ggaaactaaaacctagggatagacaggaagaagaaagaggcttctttttatactttattgtccctacctccagtaaaacaacctaaattcttcaatttggagctttaacaaggataagtaaatatgaccatgggcatgtaacattgtaaatactaagtcctgctgtgtttgcaaacattgagagtgaaaggtaagattgccagcaagtgcagagtcacagaagagattgaagttacagtacactcatgagaattcctgatgaccctacggtacaacctctaaaggtgggagaagcagatgtatataatgtgattttgtgtgtgagttttttgatgcttttttcattacttatttaccttgtctggagagaaaagcacgagttcatgttgtttcactaccacttttctatccatttcttggcctagagccgtttctttactaccataactgccaacactatctccataaacaaagaatcttatgtctggaggtctgtcatgtcacgtccttttgctattaagacagctctatgaata

SEQ ID NO: 329338 - DNA, 388 bp, Homo sapiens
ctccagtgaaaccatctgagcctggatatttctttttggagtttaaaatgacaaattcaatttctagttatagggctatttaaattattatttcataccaggtgagttgtggtagtttgtgttttttgaggaattggtctatttcatccaagttataaaatttatgtatgtagatgtttgtcgtagtcgcttattatccttttcagattgcagggtctgtagtgatatctctttttcgtttcgagacagaatcttgtggtgtcgcccaggctggagtgcagtgctgcagtctcggctcgagcaattctcgtgtttcagcctcccaagtagctgggactacaggcacctgccaccacgcccagccaagtttttgtatttttagtagaga

SEQ ID NO: 329339 - DNA, 2076 bp, Homo sapiens
  misc_feature (1657)..(1657): n is a, c, g, or t
tatggcgactgacaacaagaggtatagcacttttattttgttgcgttgttttaccactaattgctgtggtttaactaatatagggaaatggcctcagaatggatcattattttacccaattttagaaggtgcccttaaacaagatggcaacctcaggcgcgttaacaaggtgctgaagcagcagcgatgtaacctgttgcttggacaccaggctggagtgggaggactcaccgctaagggttcagaaccgattttcaaccagtcacgcccttctcaaagatggccgacctcacttcccttacgcaacatggacgttttcagtcacttcctgtgattttgaggttattctgatccaggactacttgcatgaccaaagccaagatggcaggtacgtccttttagaatttaaggttagtgaagccatctatttccccgacccccttcagtgaaaatggtctttcgcatctggctcttctttttggaggcgtgcttgccagcagtcaaaatggctccattccggaatagatttaataggaagtgaagctgtgacggcgaggcgttgcccggcctatctttgctaggcgttctcagaattagttctttctgcccacactagacatggcgcttgccagcgtgttggagagaccgctaccggtgaaccagcgcgggtttttcggacttgggggtcgtgcagatctgctggatctaggtccagggagtctcagtgatggtctgagcctggccgcgccaggctggggtgtcccagaagagccaggaatcgaaatgcttcatggaacaaccaccctggccttcaagttccgccatggagtcatagttgcagctgactccagggctacagcgggtgcttacattgcctcccagacggtgaagaaggtgatagagatcaacccatacctgctaggcaccatggctgggggcgcagcggattgcagcttctgggaacggctgttggctcggcaatgtcgaatctatgagcttcgaaataaggaacgcatctctgtagcagctgcctccaaactgcttgccaacatggtgtatcagtacaaaggcatggggctgtccatgggcaccatgatctgtggctgggataagagaggccctggcctctactacgtggacagtgaagggaaccggatttcaggggccaccttctctgtaggttctggctctgtgtatgcatatggggtcatggatcggggctattcctatgacctggaagtggagcaggcctatgatctggcccgtcgagccatctaccaagccacctacagagatgcctactcaggaggtgcagtcaacctctaccacgtgcgggaggatggctggatccgagtctccagtgacaatgtggctgatctacatgagaagtatagtggctctaccccctgaaagagggtggatgcagctgcttgtgtttcttggggtgactgtcattggtaatacggacacagtgacccatcctccatcctatttatagtggaagggccttcaattgtatcagtacttttttttaagctctggcacattgacctctatgtgttaccagtcattaatgagctgctgcagaggtgactatttgttttactttcttggatgttaacattacactactcactactcaaaaaaaaaaaaacanaaaaaaaaacaaaaaaaaaaaaaaaaaaaaacaaaaaaaaacaaacacccgccggcggccttttttgggagggggcgagaaagaagagggaggaagaaagaagggacgcccggtgggcccgcgggggtccgcagccccccctttttgtgacacagggggtggataccttctggggggcgaccaccacactataaaggagggaggggcgaattaatacttccgataataacaccgccggggatacccgctgcggtataaaatgagtagttggcaggaaaaaacgccacgacgaaacatgacacccaccgcccaactaataacgggaggtacatgtgatagcagaccacgaaacgacctgtaaccaatcacctcgacgcgacgagcacccgactcgcactgcacaaaaacaaaacacacgc

SEQ ID NO: 329340 - DNA, 1716 bp, Homo sapiens
tatggcgactgacaacaagaggtatagcacttttattttgttgcgttgttttaccactaattgctgtggtttaactaatatagggaaatggcctcagaatggatcattattttacccaattttagaaggtgcccttaaacaagatggcaacctcaggcgcgttaacaaggtgctgaagcagcagcgatgtaacctgttgcttggacaccaggctggagtgggaggactcaccgctaagggttcagaaccgattttcaaccagtcacgcccttctcaaagatggccgacctcacttcccttacgcaacatggacgttttcagtcacttcctgtgattttgaggttattctgatccaggactacttgcatgaccaaagccaagatggcaggtacgtccttttagaatttaaggttagtgaagccatctatttccccgacccccttcagtgaaaatggtctttcgcatctggctcttctttttggaggcgtgcttgccagcagtcaaaatggctccattccggaatagatttaataggaagtgaagctgtgacggcgaggcgttgcccggcctatctttgctaggcgttctcagaattagttctttctgcccacactagacatggcgcttgccagcgtgttggagagaccgctaccggtgaaccagcgcgggtttttcggacttgggggtcgtgcagatctgctggatctaggtccagggagtctcagtgatggtctgagcctggccgcgccaggctggggtgtcccagaagagccaggaatcgaaatgcttcatggaacaaccaccctggccttcaagttccgccatggagtcatagttgcagctgactccagggctacagcgggtgcttacattgcctcccagacggtgaagaaggtgatagagatcaacccatacctgctaggcaccatggctgggggcgcagcggattgcagcttctgggaacggctgttggctcggcaatgtcgaatctatgagcttcgaaataaggaacgcatctctgtagcagctgcctccaaactgcttgccaacatggtgtatcagtacaaaggcatggggctgtccatgggcaccatgatctgtggctgggataagagaggccctggcctctactacgtggacagtgaagggaaccggatttcaggggccaccttctctgtaggttctggctctgtgtatgcatatggggtcatggatcggggctattcctatgacctggaagtggagcaggcctatgatctggcccgtcgagccatctaccaagccacctacagagatgcctactcaggaggtgcagtcaacctctaccacgtgcgggaggatggctggatccgagtctccagtgacaatgtggctgatctacatgagaagtatagtggctctaccccctgaaagagggtggatgcagctgcttgtgtttcttggggtgactgtcattggtaatacggacacagtgacccatcctccatcctatttatagtggaagggccttcaattgtatcagtacttttttttaagctctggcacattgacctctatgtgttaccagtcattaatgagctgctgcagaggtgactatttgttttactttcttggatgttaacattacactactcactactcaaaaaaaacgaaaaaacacacacacacacaaaaaatcgcggagggccactataatccgggggcgcgggaacaaaa

SEQ ID NO: 329341 - DNA, 2052 bp, Homo sapiens
tatggcgactgacaacaagaggtatagcacttttattttgttgcgttgttttaccactaattgctgtggtttaactaatatagggaaatggcctcagaatggatcattattttacccaattttagaaggtgcccttaaacaagatggcaacctcaggcgcgttaacaaggtgctgaagcagcagcgatgtaacctgttgcttggacaccaggctggagtgggaggactcaccgctaagggttcagaaccgattttcaaccagtcacgcccttctcaaagatggccgacctcacttcccttacgcaacatggacgttttcagtcacttcctgtgattttgaggttattctgatccaggactacttgcatgaccaaagccaagatggcaggtacgtccttttagaatttaaggttagtgaagccatctatttccccgacccccttcagtgaaaatggtctttcgcatctggctcttctttttggaggcgtgcttgccagcagtcaaaatggctccattccggaatagatttaataggaagtgaagctgtgacggcgaggcgttgcccggcctatctttgctaggcgttctcagaattagttctttctgcccacactagacatggcgcttgccagcgtgttggagagaccgctaccggtgaaccagcgcgggtttttcggacttgggggtcgtgcagatctgctggatctaggtccagggagtctcagtgatggtctgagcctggccgcgccaggctggggtgtcccagaagagccaggaatcgaaatgcttcatggaacaaccaccctggccttcaagttccgccatggagtcatagttgcagctgactccagggctacagcgggtgcttacattgcctcccagacggtgaagaaggtgatagagatcaacccatacctgctaggcaccatggctgggggcgcagcggattgcagcttctgggaacggctgttggctcggcaatgtcgaatctatgagcttcgaaataaggaacgcatctctgtagcagctgcctccaaactgcttgccaacatggtgtatcagtacaaaggcatggggctgtccatgggcaccatgatctgtggctgggataagagaggccctggcctctactacgtggacagtgaagggaaccggatttcaggggccaccttctctgtaggttctggctctgtgtatgcatatggggtcatggatcggggctattcctatgacctggaagtggagcaggcctatgatctggcccgtcgagccatctaccaagccacctacagagatgcctactcaggaggtgcagtcaacctctaccacgtgcgggaggatggctggatccgagtctccagtgacaatgtggctgatctacatgagaagtatagtggctctaccccctgaaagagggtggatgcagctgcttgtgtttcttggggtgactgtcattggtaatacggacacagtgacccatcctccatcctatttatagtggaagggccttcaattgtatcagtacttttttttaagctctggcacattgacctctatgtgttaccagtcattaatgagctgctgcagaggtgactatttgttttactttcttggatgttaacattacactactcactactcaaaaaaaaaaaaaaaaaaaaaaacaaaaaaaaacaaacacccgccggcggccttttttgggagggggcgagaaagaagagggaggaagaaagaagggacgcccggtgggcccgcgggggtccgcagccccccctttttgtgacacagggggtggataccttctggggggcgaccaccacactataaaggagggaggggcgaattaatacttccgataataacaccgccggggatacccgctgcggtataaaatgagtagttggcaggaaaaaacgccacgacgaaacatgacacccaccgcccaactaataacgggaggtacatgtgatagcagaccacgaaacgacctgtaaccaatcacctcgacgcgacgagcacccgactcgcactgcacaaaaacaaaacacacgc

SEQ ID NO: 329342 - DNA, 1651 bp, Homo sapiens
  misc_feature (1510)..(1510): n is a, c, g, or t
  misc_feature (1523)..(1523): n is a, c, g, or t
  misc_feature (1537)..(1537): n is a, c, g, or t
  misc_feature (1539)..(1539): n is a, c, g, or t
  misc_feature (1546)..(1546): n is a, c, g, or t
  misc_feature (1548)..(1548): n is a, c, g, or t
tatggcgactgacaacaagaggtatagcacttttattttgttgcgttgttttaccactaattgctgtggtttaactaatatagggaaatggcctcagaatggatcattattttacccaattttagaaggtgcccttaaacaagatggcaacctcaggcgcgttaacaaggtgctgaagcagcagcgatgtaacctgttgcttggacaccaggctggagtgggaggactcaccgctaagggttcagaaccgattttcaaccagtcacgcccttctcaaagatggccgacctcacttcccttacgcaacatggacgttttcagtcacttcctgtgattttgaggttattctgatccaggactacttgcatgaccaaagccaagatggcaggtacgtccttttagaatttaaggttagtgaagccatctatttccccgacccccttcagtgaaaatggtctttcgcatctggctcttctttttggaggcgtgcttgccagcagtcaaaatggctccattccggaatagatttaataggaagtgaagctgtgacggcgaggcgttgcccggcctatctttgctaggcgttctcagaattagttctttctgcccacactagacatggcgcttgccagcgtgttggagagaccgctaccggtgaaccagcgcgggtttttcggacttgggggtcgtgcagatctgctggatctaggtccagggagtctcagtgatggtctgagcctggccgcgccaggctggggtgtcccagaagagccaggaatcgaaatgcttcatggaacaaccaccctggccttcaagttccgccatggagtcatagttgcagctgactccagggctacagcgggtgcttacattgcctcccagacggtgaagaaggtgatagagatcaacccatacctgctaggcaccatggctgggggcgcagcggattgcagcttctgggaacggctgttggctcggcaatgtcgaatctatgagcttcgaaataaggaacgcatctctgtagcagctgcctccaaactgcttgccaacatggtgtatcagtacaaaggcatggggctgtccatgggcaccatgatctgtggctgggataagagaggccctggcctctactacgtggacagtgaagggaaccggatttcaggggccaccttctctgtaggttctggctctgtgtatgcatatggggtcatggatcggggctattcctatgacctggaagtggagcaggcctatgatctggcccgtcgagccatctaccaagccacctacagagatgcctactcaggaggtgcagtcaacctctaccacgtgcgggaggatggctggatccgagtctccagtgacaatgtggctgatctacatgagaagtatagtggctctaccccctgaaagagggtggatgcagctgcttgtgtttcttggggtgactgtcattggtaatacggacacagtgacccatcctccatcctatttatagggaggcccatgntagacttttagcnggcatggccttgtncntaaggcngngagggaatgtacttggggactactctctcaaaaaacggtttggggggaaagggctttcctcttgtagcttaacacagcacggcaaaggataatatgttttagc

SEQ ID NO: 329343 - DNA, 1648 bp, Homo sapiens
  misc_feature (1229)..(1229): n is a, c, g, or t
tatggcgactgacaacaagaggtatagcacttttattttgttgcgttgttttaccactaattgctgtggtttaactaatatagggaaatggcctcagaatggatcattattttacccaattttagaaggtgcccttaaacaagatggcaacctcaggcgcgttaacaaggtgctgaagcagcagcgatgtaacctgttgcttggacaccaggctggagtgggaggactcaccgctaagggttcagaaccgattttcaaccagtcacgcccttctcaaagatggccgacctcacttcccttacgcaacatggacgttttcagtcacttcctgtgattttgaggttattctgatccaggactacttgcatgaccaaagccaagatggcagttccgccatggagtcatagttgcagctgactccagggctacagcgggtgcttacattgcctcccagacggtgaagaaggtgatagagatcaacccatacctgctaggcaccatggctgggggcgcagcggattgcagcttctgggaacggctgttggctcggcaatgtcgaatctatgagcttcgaaataaggaacgcatctctgtagcagctgcctccaaactgcttgccaacatggtgtatcagtacaaaggcatggggctgtccatgggcaccatgatctgtggctgggataagagaggccctggcctctactacgtggacagtgaagggaaccggatttcaggggccaccttctctgtaggttctggctctgtgtatgcatatggggtcatggatcggggctattcctatgacctggaagtggagcaggcctatgatctggcccgtcgagccatctaccaagccacctacagagatgcctactcaggaggtgcagtcaacctctaccacgtgcgggaggatggctggatccgagtctccagtgacaatgtggctgatctacatgagaagtatagtggctctaccccctgaaagagggtggatgcagctgcttgtgtttcttggggtgactgtcattggtaatacggacacagtgacccatcctccatcctatttatagtggaagggccttcaattgtatcagtacttttttttaagctctggcacattgacctctatgtgttaccagtcattaatgagctgctgcagaggtgactatttgttttactttcttggatgttaacattacactactcactactcaaaaaaaaaaaaacanaaaaaaaaacaaaaaaaaaaaaaaaaaaaaacaaaaaaaaacaaacacccgccggcggccttttttgggagggggcgagaaagaagagggaggaagaaagaagggacgcccggtgggcccgcgggggtccgcagccccccctttttgtgacacagggggtggataccttctggggggcgaccaccacactataaaggagggaggggcgaattaatacttccgataataacaccgccggggatacccgctgcggtataaaatgagtagttggcaggaaaaaacgccacgacgaaacatgacacccaccgcccaactaataacgggaggtacatgtgatagcagaccacgaaacgacctgtaaccaatcacctcgacgcgacgagcacccgactcgcactgcacaaaaacaaaacacacgc

SEQ ID NO: 329344 - DNA, 2001 bp, Homo sapiens
  misc_feature (1582)..(1582): n is a, c, g, or t
tatggcgactgacaacaagaggtatagcacttttattttgttgcgttgttttaccactaattgctgtggtttaactaatatagggaaatggcctcagaatggatcattattttacccaattttagaaggtgcccttaaacaagatggcaacctcaggcgcgttaacaaggtgctgaagcagcagcgatgtaacctgttgcttggacaccaggctggagtgggaggactcaccgctaagggttcagaaccgattttcaaccagtcacgcccttctcaaagatggccgacctcacttcccttacgcaacatggacgttttcagtcacttcctgtgattttgaggttattctgatccaggactacttgcatgaccaaagccaagatggcaggtacgtccttttagaatttaaggttagtgaagccatctatttccccgacccccttcagtgaaaatggtctttcgcatctggctcttctttttggaggcgtgcttgccagcagtcaaaatggctccattccggaatagatttaataggaagtgaagctgtgacggcgaggcgttgcccggcctatctttgctaggcgttctcagaattagttctttctgcccacactagacatggcgcttgccagcgtgttggagagaccgctaccggtgaaccagcgcgggtttttcggacttgggggtcgtgcagatctgctggatctaggtccagggagtctcagtgatggtctgagcctggccgcgccaggctggggtgtcccagaagagccaggaatcgaaatgcttcatggaacaaccaccctggccttcaagttccgccatggagtcatagttgcagctgactccagggctacagcgggcgcagcggattgcagcttctgggaacggctgttggctcggcaatgtcgaatctatgagcttcgaaataaggaacgcatctctgtagcagctgcctccaaactgcttgccaacatggtgtatcagtacaaaggcatggggctgtccatgggcaccatgatctgtggctgggataagagaggccctggcctctactacgtggacagtgaagggaaccggatttcaggggccaccttctctgtaggttctggctctgtgtatgcatatggggtcatggatcggggctattcctatgacctggaagtggagcaggcctatgatctggcccgtcgagccatctaccaagccacctacagagatgcctactcaggaggtgcagtcaacctctaccacgtgcgggaggatggctggatccgagtctccagtgacaatgtggctgatctacatgagaagtatagtggctctaccccctgaaagagggtggatgcagctgcttgtgtttcttggggtgactgtcattggtaatacggacacagtgacccatcctccatcctatttatagtggaagggccttcaattgtatcagtacttttttttaagctctggcacattgacctctatgtgttaccagtcattaatgagctgctgcagaggtgactatttgttttactttcttggatgttaacattacactactcactactcaaaaaaaaaaaaacanaaaaaaaaacaaaaaaaaaaaaaaaaaaaaacaaaaaaaaacaaacacccgccggcggccttttttgggagggggcgagaaagaagagggaggaagaaagaagggacgcccggtgggcccgcgggggtccgcagccccccctttttgtgacacagggggtggataccttctggggggcgaccaccacactataaaggagggaggggcgaattaatacttccgataataacaccgccggggatacccgctgcggtataaaatgagtagttggcaggaaaaaacgccacgacgaaacatgacacccaccgcccaactaataacgggaggtacatgtgatagcagaccacgaaacgacctgtaaccaatcacctcgacgcgacgagcacccgactcgcactgcacaaaaacaaaacacacgc

SEQ ID NO: 329345 - DNA, 2161 bp, Homo sapiens
  misc_feature (1742)..(1742): n is a, c, g, or t
tatggcgactgacaacaagaggtatagcacttttattttgttgcgttgttttaccactaattgctgtggtttaactaatatagggaaatggcctcagaatggatcattattttacccaattttagaaggtgcccttaaacaagatggcaacctcaggcgcgttaacaaggtgctgaagcagcagcgatgtaacctgttgcttggacaccaggctggagtgggaggactcaccgctaagggttcagaaccgattttcaaccagtcacgcccttctcaaagatggccgacctcacttcccttacgcaacatggacgttttcagtcacttcctgtgattttgaggttattctgatccaggactacttgcatgaccaaagccaagatggcaggtacgtccttttagaatttaaggttagtgaagccatctatttccccgacccccttcagtgaaaatggtctttcgcatctggctcttctttttggaggcgtgcttgccagcagtcaaaatggctccattccggaatagatttaataggaagtgaagctgtgacggcgaggcgttgcccggcctatctttgctaggcgttctcagaattagttctttctgcccacactagacatggcgcttgccagcgtgttggagagaccgctaccggtgaaccagcgcgggtttttcggacttgggggtcgtgcagatctgctggatctaggtccagggagtctcagtgatggtctgagcctggccgcgccaggctggggtgtcccagaagagccaggaatcgaaatgcttcatggaacaaccaccctggccttcaagttccgccatggagtcatagttgcagctgactccagggctacagcgggtgcttacattgcctcccagacggtgaagaaggtgatagagatcaacccatacctgctaggcaccatggctgggggcgcagcggattgcagcttctgggaacggctgttggctcggcaatgtcgaatctatgagcttcgaaataaggaacgcatctctgtagcagctgcctccaaactgcttgccaacatggtgtatcagtacaaaggcatggggctgtccatgggcaccatgatctgtggctgggataagagaggccctgtgtctgaagttctgtgcttgaaacctaagtcatttggaatgtacttgttttgtgggtgtgctgagaggatcggcaacatggcaaggcctctactacgtggacagtgaagggaaccggatttcaggggccaccttctctgtaggttctggctctgtgtatgcatatggggtcatggatcggggctattcctatgacctggaagtggagcaggcctatgatctggcccgtcgagccatctaccaagccacctacagagatgcctactcaggaggtgcagtcaacctctaccacgtgcgggaggatggctggatccgagtctccagtgacaatgtggctgatctacatgagaagtatagtggctctaccccctgaaagagggtggatgcagctgcttgtgtttcttggggtgactgtcattggtaatacggacacagtgacccatcctccatcctatttatagtggaagggccttcaattgtatcagtacttttttttaagctctggcacattgacctctatgtgttaccagtcattaatgagctgctgcagaggtgactatttgttttactttcttggatgttaacattacactactcactactcaaaaaaaaaaaaacanaaaaaaaaacaaaaaaaaaaaaaaaaaaaaacaaaaaaaaacaaacacccgccggcggccttttttgggagggggcgagaaagaagagggaggaagaaagaagggacgcccggtgggcccgcgggggtccgcagccccccctttttgtgacacagggggtggataccttctggggggcgaccaccacactataaaggagggaggggcgaattaatacttccgataataacaccgccggggatacccgctgcggtataaaatgagtagttggcaggaaaaaacgccacgacgaaacatgacacccaccgcccaactaataacgggaggtacatgtgatagcagaccacgaaacgacctgtaaccaatcacctcgacgcgacgagcacccgactcgcactgcacaaaaacaaaacacacgc

SEQ ID NO: 329346 - DNA, 1769 bp, Homo sapiens
  misc_feature (1350)..(1350): n is a, c, g, or t
tatggcgactgacaacaagaggtatagcacttttattttgttgcgttgttttaccactaattgctgtggtttaactaatatagggaaatggcctcagaatggatcattattttacccaattttagaaggtgcccttaaacaagatggcaacctcaggcgcgttaacaaggtgctgaagcagcagcgatgtaacctgttgcttggacaccaggctggagtgggaggactcaccgctaagggttcagaaccgattttcaaccagtcacgcccttctcaaagatggccgacctcacttcccttacgcaacatggacgttttcagtcacttcctgtgattttgaggttattctgatccaggactacttgcatgaccaaagccaagatggcaggtacgtccttttagaatttaaggttagtgaagccatctatttccccgacccccttcagtgaaaatggtctttcgcatctggctcttctttttggaggcgtgcttgccagcagtcaaaatggctccattccggaatagatttaataggaagtgaagctgtgacggcgaggcgttgcccggcctatctttgctaggcgttctcagaattagttctttctgcccacactagacatggcgcttgccagcgtgttggagagaccgctaccggtgaaccagcgcgggtttttcggacttgggggtcgtgcagatctgctggatctaggtccagggagtctcagtgatggtctgagcctggccgcgccaggctggggtgtcccagaagagccaggaatcgaaatgcttcatggaacaaccaccctggccttcaaggcctctactacgtggacagtgaagggaaccggatttcaggggccaccttctctgtaggttctggctctgtgtatgcatatggggtcatggatcggggctattcctatgacctggaagtggagcaggcctatgatctggcccgtcgagccatctaccaagccacctacagagatgcctactcaggaggtgcagtcaacctctaccacgtgcgggaggatggctggatccgagtctccagtgacaatgtggctgatctacatgagaagtatagtggctctaccccctgaaagagggtggatgcagctgcttgtgtttcttggggtgactgtcattggtaatacggacacagtgacccatcctccatcctatttatagtggaagggccttcaattgtatcagtacttttttttaagctctggcacattgacctctatgtgttaccagtcattaatgagctgctgcagaggtgactatttgttttactttcttggatgttaacattacactactcactactcaaaaaaaaaaaaacanaaaaaaaaacaaaaaaaaaaaaaaaaaaaaacaaaaaaaaacaaacacccgccggcggccttttttgggagggggcgagaaagaagagggaggaagaaagaagggacgcccggtgggcccgcgggggtccgcagccccccctttttgtgacacagggggtggataccttctggggggcgaccaccacactataaaggagggaggggcgaattaatacttccgataataacaccgccggggatacccgctgcggtataaaatgagtagttggcaggaaaaaacgccacgacgaaacatgacacccaccgcccaactaataacgggaggtacatgtgatagcagaccacgaaacgacctgtaaccaatcacctcgacgcgacgagcacccgactcgcactgcacaaaaacaaaacacacgc

SEQ ID NO: 329347 - DNA, 701 bp, Homo sapiens
  misc_feature (282)..(282): n is a, c, g, or t
tattaccaatgacagtcaccccaagaaacacaagcagctgcatccaccctctttcagggggtagagccactatacttctcatgtagatcagccacagtgacccatcctccatcctatttatagtggaagggccttcaattgtatcagtacttttttttaagctctggcacattgacctctatgtgttaccagtcattaatgagctgctgcagaggtgactatttgttttactttcttggatgttaacattacactactcactactcaaaaaaaaaaaaacanaaaaaaaaacaaaaaaaaaaaaaaaaaaaaacaaaaaaaaacaaacacccgccggcggccttttttgggagggggcgagaaagaagagggaggaagaaagaagggacgcccggtgggcccgcgggggtccgcagccccccctttttgtgacacagggggtggataccttctggggggcgaccaccacactataaaggagggaggggcgaattaatacttccgataataacaccgccggggatacccgctgcggtataaaatgagtagttggcaggaaaaaacgccacgacgaaacatgacacccaccgcccaactaataacgggaggtacatgtgatagcagaccacgaaacgacctgtaaccaatcacctcgacgcgacgagcacccgactcgcactgcacaaaaacaaaacacacgc

SEQ ID NO: 329348 - DNA, 298 bp, Homo sapiens
ctgcgcctggccggggattatgttttaaatgttatctttcacagtgtctgaagttctgtgcttgaaacctaagtcatttggaatgtacttgttttgtgggtgtgctgagaggatcggcaacatggcaaggtagttattataatataaggtgagatggggtggtatgttgtagaatcctggagtcttaatattaaattttattccttcaggttttttttttttcctgaagacagcatctcagtctgttgcccaagctggagtgtggtggtgtgattatagcttactgcagcctgcaagt

SEQ ID NO: 329349 - DNA, 1732 bp, Homo sapiens
tatggcgactgacaacaagaggtatagcacttttattttgttgcgttgttttaccactaattgctgtggtttaactaatatagggaaatggcctcagaatggatcattattttacccaattttagaaggtgcccttaaacaagatggcaacctcaggcgcgttaacaaggtgctgaagcagcagcgatgtaacctgttgcttggacaccaggctggagtgggaggactcaccgctaagggttcagaaccgattttcaaccagtcacgcccttctcaaagatggccgacctcacttcccttacgcaacatggacgttttcagtcacttcctgtgattttgaggttattctgatccaggactacttgcatgaccaaagccaagatggcaggtacgtccttttagaatttaaggttagtgaagccatctatttccccgacccccttcagtgaaaatggtctttcgcatctggctcttctttttggaggcgtgcttgccagcagtcaaaatggctccattccggaatagatttaataggaagtgaagctgtgacggcgaggcgttgcccggcctatctttgctaggcgttctcagaattagttctttctgcccacactagacatggcgcttgccagcgtgttggagagaccgctaccggtgaaccagcgcgggtttttcggacttgggggtcgtgcagatctgctggatctaggtccagggagtctcagtgatggtctgagcctggccgcgccaggctggggtgtcccagaagagccaggaatcgaaatgcttcatggaacaaccaccctggccttcaagttccgccatggagtcatagttgcagctgactccagggctacagcgggtgcttacattgcctcccagacggtgaagaaggtgatagagatcaacccatacctgctaggcaccatggctgggggcgcagcggattgcagcttctgggaacggctgttggctcggcaatgtcgaatctatgagcttcgaaataaggaacgcatctctgtagcagctgcctccaaactgcttgccaacatggtgtatcagtacaaaggcatggggctgtccatgggcaccatgatctgtggctgggataagagaggccctggcctctactacgtggacagtgaagggaaccggatttcaggggccaccttctctgtaggttctggctctgtgtatgcatatggggtcatggatcggggctattcctatgacctggaagtggagcaggcctatgatctggcccgtcgagccatctaccaagccacctacagagatgcctactcaggaggtgcagtcaacctctaccacgtgcgggaggatggctggatccgagtctccagtgacaatgtggctgatctacatgagaagtatagtggctctaccccctgaaagagggtggatgcagctgcttgtgtttcttggggtgactgtcattggtaatacggacacagtgacccatcctccatcctatttatagtggaagggccttcaattgtatcagtacttttttttaagctctggcacattgacctctatgtgttaccagtcattaatgagctgctgcagaggtgactatttgttttactttcttggatgttaacattacactactcactactcaaaaaaaacacacaaaaaccccgggcctctaagccggggcgcaccaaaaggtcatacatggccccctggtccaagccggtcccctgaacca

SEQ ID NO: 329350 - DNA, 1642 bp, Homo sapiens
tatggcgactgacaacaagaggtatagcacttttattttgttgcgttgttttaccactaattgctgtggtttaactaatatagggaaatggcctcagaatggatcattattttacccaattttagaaggtgcccttaaacaagatggcaacctcaggcgcgttaacaaggtgctgaagcagcagcgatgtaacctgttgcttggacaccaggctggagtgggaggactcaccgctaagggttcagaaccgattttcaaccagtcacgcccttctcaaagatggccgacctcacttcccttacgcaacatggacgttttcagtcacttcctgtgattttgaggttattctgatccaggactacttgcatgaccaaagccaagatggcaggtacgtccttttagaatttaaggttagtgaagccatctatttccccgacccccttcagtgaaaatggtctttcgcatctggctcttctttttggaggcgtgcttgccagcagtcaaaatggctccattccggaatagatttaataggaagtgaagctgtgacggcgaggcgttgcccggcctatctttgctaggcgttctcagaattagttctttctgcccacactagacatggcgcttgccagcgtgttggagagaccgctaccggtgaaccagcgcgggtttttcggacttgggggtcgtgcagatctgctggatctaggtccagggagtctcagtgatggtctgagcctggccgcgccaggctggggtgtcccagaagagccaggaatcgaaatgcttcatggaacaaccaccctggccttcaagttccgccatggagtcatagttgcagctgactccagggctacagcgggtgcttacattgcctcccagacggtgaagaaggtgatagagatcaacccatacctgctaggcaccatggctgggggcgcagcggattgcagcttctgggaacggctgttggctcggcaatgtcgaatctatgagcttcgaaataaggaacgcatctctgtagcagctgcctccaaactgcttgccaacatggtgtatcagtacaaaggcatggggctgtccatgggcaccatgatctgtggctgggataagagaggccctggcctctactacgtggacagtgaagggaaccggatttcaggggccaccttctctgtaggttctggctctgtgtatgcatatggggtcatggatcggggctattcctatgacctggaagtggagcaggcctatgatctggcccgtcgagccatctaccaagccacctacagagatgcctactcaggaggtgcagtcaacctctaccacgtgcgggaggatggctggatccgagtctccagtgacaatgtggctgatctacatgagaagtatagtggctctaccccctgaaagagggtggatgcagctgcttgtgtttcttggggtgactgtcattggtaatacggacacagtgacccatcctccatcctatttatagtggaagggccttcaattgtatcagtacttttttttaagctctggcacattgacctctatgtgttaccagtcattaatgagctgctgcagaggtgactatttgttttactttcttggtaagtggcaagacgagatcctcgtagaa

SEQ ID NO: 329351 - DNA, 2285 bp, Homo sapiens
  misc_feature (1866)..(1866): n is a, c, g, or t
tatggcgactgacaacaagaggtatagcacttttattttgttgcgttgttttaccactaattgctgtggtttaactaatatagggaaatggcctcagaatggatcattattttacccaattttagaaggtgcccttaaacaagatggcaacctcaggcgcgttaacaaggtgctgaagcagcagcgatgtaacctgttgcttggacaccaggctggagtgggaggactcaccgctaagggttcagaaccgattttcaaccagtcacgcccttctcaaagatggccgacctcacttcccttacgcaacatggacgttttcagtcacttcctgtgattttgaggttattctgatccaggactacttgcatgaccaaagccaagatggcaggtacgtccttttagaatttaaggttagtgaagccatctatttccccgacccccttcagtgaaaatggtctttcgcatctggctcttctttttggaggcgtgcttgccagcagtcaaaatggctccattccggaatagatttaataggaagtgaagctgtgacggcgaggcgttgcccggcctatctttgctaggcgttctcagaattagttctttctgcccacactagacatggcgcttgccagcgtgttggagagaccgctaccggtgaaccagcgcgggtttttcggacttgggggtcgtgcagatctgctggatctaggtccagggagtctcagtgatggtctgagcctggccgcgccaggctggggtgtcccagaagagccaggaatcgaaatgcttcatggaacaaccaccctggccttcaagggtgtggagccagcccccttgccaggctgagtactgaacgcccgcgacttgcctggcctcccagcctgaccggagtttgcggtggccttggccaccaacccaggcggaggctgggtcctctcgttcggaccgcagcagttttgctgtctcattggcccaggaggcccctgtctttgctctggttggaaagggtggcggtggggccggggttccgccatggagtcatagttgcagctgactccagggctacagcgggtgcttacattgcctcccagacggtgaagaaggtgatagagatcaacccatacctgctaggcaccatggctgggggcgcagcggattgcagcttctgggaacggctgttggctcggcaatgtcgaatctatgagcttcgaaataaggaacgcatctctgtagcagctgcctccaaactgcttgccaacatggtgtatcagtacaaaggcatggggctgtccatgggcaccatgatctgtggctgggataagagaggccctggcctctactacgtggacagtgaagggaaccggatttcaggggccaccttctctgtaggttctggctctgtgtatgcatatggggtcatggatcggggctattcctatgacctggaagtggagcaggcctatgatctggcccgtcgagccatctaccaagccacctacagagatgcctactcaggaggtgcagtcaacctctaccacgtgcgggaggatggctggatccgagtctccagtgacaatgtggctgatctacatgagaagtatagtggctctaccccctgaaagagggtggatgcagctgcttgtgtttcttggggtgactgtcattggtaatacggacacagtgacccatcctccatcctatttatagtggaagggccttcaattgtatcagtacttttttttaagctctggcacattgacctctatgtgttaccagtcattaatgagctgctgcagaggtgactatttgttttactttcttggatgttaacattacactactcactactcaaaaaaaaaaaaacanaaaaaaaaacaaaaaaaaaaaaaaaaaaaaacaaaaaaaaacaaacacccgccggcggccttttttgggagggggcgagaaagaagagggaggaagaaagaagggacgcccggtgggcccgcgggggtccgcagccccccctttttgtgacacagggggtggataccttctggggggcgaccaccacactataaaggagggaggggcgaattaatacttccgataataacaccgccggggatacccgctgcggtataaaatgagtagttggcaggaaaaaacgccacgacgaaacatgacacccaccgcccaactaataacgggaggtacatgtgatagcagaccacgaaacgacctgtaaccaatcacctcgacgcgacgagcacccgactcgcactgcacaaaaacaaaacacacgc

SEQ ID NO: 329352 - DNA, 1692 bp, Homo sapiens
  misc_feature (1273)..(1273): n is a, c, g, or t
gagcggagtggttggcttgtgtaggtagagagtgtgggcctagatcggtacacggtgaactcagcgcggatcagtcatcaacttgcaggttcaagggcatttagctgaaaactgggattcagggagtctcagtgatggtctgagcctggccgcgccaggctggggtgtcccagaagagccaggaatcgaaatgcttcatggaacaaccaccctggccttcaagggtgtggagccagcccccttgccaggctgagtactgaacgcccgcgacttgcctggcctcccagcctgaccggagtttgcggtggccttggccaccaacccaggcggaggctgggtcctctcgttcggaccgcagcagttttgctgtctcattggcccaggaggcccctgtctttgctctggttggaaagggtggcggtggggccggggttccgccatggagtcatagttgcagctgactccagggctacagcgggtgcttacattgcctcccagacggtgaagaaggtgatagagatcaacccatacctgctaggcaccatggctgggggcgcagcggattgcagcttctgggaacggctgttggctcggcaatgtcgaatctatgagcttcgaaataaggaacgcatctctgtagcagctgcctccaaactgcttgccaacatggtgtatcagtacaaaggcatggggctgtccatgggcaccatgatctgtggctgggataagagaggccctggcctctactacgtggacagtgaagggaaccggatttcaggggccaccttctctgtaggttctggctctgtgtatgcatatggggtcatggatcggggctattcctatgacctggaagtggagcaggcctatgatctggcccgtcgagccatctaccaagccacctacagagatgcctactcaggaggtgcagtcaacctctaccacgtgcgggaggatggctggatccgagtctccagtgacaatgtggctgatctacatgagaagtatagtggctctaccccctgaaagagggtggatgcagctgcttgtgtttcttggggtgactgtcattggtaatacggacacagtgacccatcctccatcctatttatagtggaagggccttcaattgtatcagtacttttttttaagctctggcacattgacctctatgtgttaccagtcattaatgagctgctgcagaggtgactatttgttttactttcttggatgttaacattacactactcactactcaaaaaaaaaaaaacanaaaaaaaaacaaaaaaaaaaaaaaaaaaaaacaaaaaaaaacaaacacccgccggcggccttttttgggagggggcgagaaagaagagggaggaagaaagaagggacgcccggtgggcccgcgggggtccgcagccccccctttttgtgacacagggggtggataccttctggggggcgaccaccacactataaaggagggaggggcgaattaatacttccgataataacaccgccggggatacccgctgcggtataaaatgagtagttggcaggaaaaaacgccacgacgaaacatgacacccaccgcccaactaataacgggaggtacatgtgatagcagaccacgaaacgacctgtaaccaatcacctcgacgcgacgagcacccgactcgcactgcacaaaaacaaaacacacgc

SEQ ID NO: 329353 - DNA, 1036 bp, Homo sapiens
  misc_feature (617)..(617): n is a, c, g, or t
agaactactgccatggcatatgaattagatatctaaaggggtgatctttttttttttcctgctaacctcatctccctttccaggcctctactacgtggacagtgaagggaaccggatttcaggggccaccttctctgtaggttctggctctgtgtatgcatatggggtcatggatcggggctattcctatgacctggaagtggagcaggcctatgatctggcccgtcgagccatctaccaagccacctacagagatgcctactcaggaggtgcagtcaacctctaccacgtgcgggaggatggctggatccgagtctccagtgacaatgtggctgatctacatgagaagtatagtggctctaccccctgaaagagggtggatgcagctgcttgtgtttcttggggtgactgtcattggtaatacggacacagtgacccatcctccatcctatttatagtggaagggccttcaattgtatcagtacttttttttaagctctggcacattgacctctatgtgttaccagtcattaatgagctgctgcagaggtgactatttgttttactttcttggatgttaacattacactactcactactcaaaaaaaaaaaaacanaaaaaaaaacaaaaaaaaaaaaaaaaaaaaacaaaaaaaaacaaacacccgccggcggccttttttgggagggggcgagaaagaagagggaggaagaaagaagggacgcccggtgggcccgcgggggtccgcagccccccctttttgtgacacagggggtggataccttctggggggcgaccaccacactataaaggagggaggggcgaattaatacttccgataataacaccgccggggatacccgctgcggtataaaatgagtagttggcaggaaaaaacgccacgacgaaacatgacacccaccgcccaactaataacgggaggtacatgtgatagcagaccacgaaacgacctgtaaccaatcacctcgacgcgacgagcacccgactcgcactgcacaaaaacaaaacacacgc

SEQ ID NO: 329354 - DNA, 1395 bp, Homo sapiens
  misc_feature (976)..(976): n is a, c, g, or t
tatggcgactgacaacaagaggtatagcacttttattttgttgcgttgttttaccactaattgctgtggtttaactaatatagggaaatggcctcagaatggatcattattttacccaattttagaaggtgcccttaaacaagatggcaacctcaggcgcgttaacaaggtgctgaagcagcagcgatgtaacctgttgcttggacaccaggctggagtgggaggactcaccgctaagggttcagaaccgattttcaaccagtcacgcccttctcaaagatggccgacctcacttcccttacgcaacatggacgttttcagtcacttcctgtgattttgaggttattctgatccaggactacttgcatgaccaaagccaagatggcaggtacgtccttttagaatttaaggttagtgaagccatctatttccccgacccccttcagtgaaaatggtctttcgcatctggctcttctttttggaggcgtgcttgccagcagtcaaaatggctccattccggaatagatttaataggaagtgaagctgtgacggcgaggcgttgcccggcctatctttgctaggcgttctcagaattagttctttctgcccacactagacatggcgcttgccagcgtgttggagagaccgctaccggtgaaccagcgcgggtttttcggacttgggggtcgtgcagatctgctggatctaggtccagggagtctcagtgatggtctgagcctggccgcgccaggctggggtgtcccagaagagccaggaatcgaaatgcttcatggaacaaccaccctggccttcaaggtggaagggccttcaattgtatcagtacttttttttaagctctggcacattgacctctatgtgttaccagtcattaatgagctgctgcagaggtgactatttgttttactttcttggatgttaacattacactactcactactcaaaaaaaaaaaaacanaaaaaaaaacaaaaaaaaaaaaaaaaaaaaacaaaaaaaaacaaacacccgccggcggccttttttgggagggggcgagaaagaagagggaggaagaaagaagggacgcccggtgggcccgcgggggtccgcagccccccctttttgtgacacagggggtggataccttctggggggcgaccaccacactataaaggagggaggggcgaattaatacttccgataataacaccgccggggatacccgctgcggtataaaatgagtagttggcaggaaaaaacgccacgacgaaacatgacacccaccgcccaactaataacgggaggtacatgtgatagcagaccacgaaacgacctgtaaccaatcacctcgacgcgacgagcacccgactcgcactgcacaaaaacaaaacacacgc

SEQ ID NO: 329355 - DNA, 458 bp, Homo sapiens
agctggaatcctctaaaataagtcacatgggaaaaaattctgatcttattctagacgaagaatgaaaagccaggaagctacataacccaaggtagggtggaaagagttgggtagagagttggcaactgttttggaaaccgaaatagtgttaaagatgtcagaaaaatgtgaagtgacattccactaagactgttcaaagatattttgaaagacactagctacataagctaagtaccttgcgttgacttaagtttgactttgttctcttagttctatagctgagacaagtcccagaaggattaagtaggttttgggaaattaattaatgactaagtcatacttgtatatcttcattcaagtgctctatctgccagaaaacatagtgatccaaatgactattctggtatattaatgcgtgtttaataggttacatctataaaatgatttatttcaatcca

SEQ ID NO: 329356 - DNA, 406 bp, Homo sapiens
gaaacccctaagaactctgcagcaggtggtaaagggattccagcagttgaggcagccttcctaagagaaatgcaggtgcaacagaaaaacaaaagcaaacacaagccaggagaaggatgcagccaaggagaaaaggggattggaggagatttaacagagtatcaacaggatccactgcagaagaggtaacaaattaaaaaattaaaatatcatatcccaaaatggaaataaaacagatagaatgccgagtatatattaaataaggcaagctatttatgatgaggaatgtgctgagctcctgggacaatacagaagtagtaatctacaccatgcctgcatcaagaagcctaaatttgatccactgttactactcagagctgttttattaaagctcatgaacagaaaa

SEQ ID NO: 329357 - DNA, 443 bp, Homo sapiens
agctggaatcctctaaaataagtcacatgggaaaaaattctgatcttattctagacgaagaatgaaaagccaggaagctacataacccaagttctaggattttagcacatggaagaaatgtccctacccatgcatacagaaacgcataagaacaggaagtgacgtattgtttatcaggaaaaacagtattcatgtattatttacaaaaattgaggctgatctccaagctctactgtggaaagagttcatcaagttcctagactgaagaaagctaattaaaaagtcattaaaatgacaaaaatctaggacacctgtgcattttgaaatatctcattttgtatcaaatactttggcagttctggattgataaccaagtttatatttcagcaaacaggggacctcaagagcataacttaatctcagagttgttcacctccgtgcaa

SEQ ID NO: 329358 - DNA, 443 bp, Homo sapiens
aattttatctgcccactagggtggtacaaagaagagaagaccagggaagagaagctcatgaaggaaacaaacatggctgtctggtttggaaaagcacatttgatagtttatgaagtcacagaggagagtgactcttgcctcgccacccacttattcatctggaaggaggcttccatttctaggattttagcacatggaagaaatgtccctacccatgcatacagaaacgcataagaacaggaagtgacgtattgtttatcaggaaaaacagtattcatgtattatttacaaaaattgaggctgatctccaagctctactgtggaaagagttcatcaagttcctagactgaagaaagctaattgtaagaaatacatatgtagtatgcacaagtttcattataaataagagtaaaaacgtgcattgtatatgtacatccttgtga

SEQ ID NO: 329359 - DNA, 482 bp, Homo sapiens
agctggaatcctctaaaataagtcacatgggaaaaaattctgatcttattctagacgaagaatgaaaagccaggaagctacataacccaagaaacaacagtcagatgccaataaccaggaaccacctgcaggacaagctaagcccagaaatgctgccttcacctgaacttctgcctcagtgcgagacctgacctgatttcttgcctctttctcataccaacatttccatccagtggggagaaatgtaccttgctgggtgcaaaaagtgccaatgcaaaagaaaatgcaagactgcgcatacttaacccctcctggaagaacaaacttttttcaaggaatccccacccctgtctccacctacctgcccaaaagtccttaaaaatttccctttactctacttccagggagaaggtgctttgagcatgagctcccgttctccattacttgatcaatgaatggaatttctgcactgttttgccaaa

SEQ ID NO: 329360 - DNA, 409 bp, Homo sapiens
agctggaatcctctaaaataagtcacatgggaaaaaattctgatcttattctagacgaagaatgaaaagccaggaagctacataacccaaggtaacaaattaaaaaattaaaatatcatatcccaaaatggaaataaaacagatagaatgccgagtatatattaaataaggcaagctatttatgatgagctaactcacttgcaagttaccagagagcatggagtaaatcctttatttctcatgtcctcattgtgcctaagactgcgtttctgtacacacattaaaaaaacaggaaatcaatggttcccaatggtgatgtgtgaactcttcaggatctggaggaacattattaaattgctccattagctttctcttgtttgggttgaaaataaaaattgtgatgccattt

SEQ ID NO: 329361 - DNA, 318 bp, Homo sapiens
agctggaatcctctaaaataagtcacatgggaaaaaattctgatcttattctagacgaagaatgaaaagccaggaagctacataacccaagagagaagttatacatactcatgaatcaatgtgtacaatggagaattaatactgaaaacaaatgtattttattctactttttaaaaaattgttgaaatggagcccagccttcccactaccacttgttgcaactcccacacttcatatgtacaccacctctttccttgacccttgaaagacaccatgtggttttcacctgagaatgatataaatatgaacactctaata

SEQ ID NO: 329362 - DNA, 373 bp, Homo sapiens
ggtggagagcggtggactggtctgagctatcagcgatgtggcatggatagggcttttggtgctgggtagggagacagaatgagaaaagtcagagaaacattgatggccactatggctgccacagcagccccactgcctgagaactcacatgtgccaggcactctgcctaacctttccatgcatcgctccatttcatccctgcaacaatctacgacttaggttctgttattctcattttatggatgaagaaactgaggcttagaggttaagtgatttgcccaatgtcatacagcaagtgtggcagagccaagtgtcaaactgagatccagttccaggcatgctgttccaggtcactatgatgcactccccaggc

SEQ ID NO: 329363 - DNA, 359 bp, Homo sapiens
ctgcaattggagtcatctgaggagtttgaaaatataccactgcctgtgttcctcctccagggatttcctgggtctggggtgtggcatgggtttgggtatgtttaaatggtccccagataattgtaatatttagccaagttgggaatccctggtatatttcattgctttgcaaccctggctgtcatcccttggagagctttaaaaaggtcagtgtctgaccccaggccaagccaattatatcagaatctgggggggtgtggtacttgagaaccaatatttgtttaagtctgcccccaggtgatactaatatagacctaggagaaggagtgggtcctgaaacttcctaatttaaagctggg

SEQ ID NO: 329364 - DNA, 353 bp, Homo sapiens
ggggagaaagaaaggggcatggcctgtttgtatccttctcacgtggccatccaccaggtcctgggggagtgggagccagtgcaaggagggaagtccagtgagaatgacaaatggacgatgtcagacccaggggctgaggcccccacctgcagccgggcagcttctggagtggacaaggagcagcagggaaggttgcggcctggtgttctgggatccactgtctcatctcattctttggggcaccagaacttatccaaagacaagactcagtgtctctggcaacagcgggccagaggaataatgtgtttcaggaggaagaaggggttgtaccccatggaaacagtatatagttt

SEQ ID NO: 329365 - DNA, 1096 bp, Homo sapiens
gagccaagatggctgaataggaacagctccagtctgcagctcccagtgagaccaacgcagaagattcttctttggagcagaataaaagatctggcccatcagttcacacaggtccagcgggacatgttcaccctggaggacacgctgctaggctaccttgctgatgacctcacatggtgtggtgaattcaacacttccaaaataaactatcaatcttgcccagactggagaaaggactgcagcaacaaccctgtttcagtattctggaaaacggtttcccgcaggtttgcagaagctgcctgtgatgtggtccatgtgatgctcaatggatcccgcagtaaaatctttgacaaaaacagcacttttgggagtgtggaagtccataatttgcaaccagagaaggttcagacactagaggcctgggtgatacatggtggaagagaagattccagagacttatgccaggatcccaccataaaagagctggaatcgattataagcaaaaggaatattcaattttcctgcaagaatatctacagacctgacaagtttcttcagtgtgtgaaaaatcctgaggattcatcttgcacatctgagatctgagccagtcgctgtggttgttttagctccttgactccttgtggtttatgtcatcatacatgactcagcatacctgctggtgcagagctgaagattttggagggtcctccacaataaggtcaatgccagagacggaagcctttttccccaaagtcttaaaataacttatatcatcagcatacctttattgtgatctatcaatagtcaagaaaaattattgtataagattagaatgaaaattgtatgttaagttacttcactttaattctcatgtgatccttttatgttatttatatattggtaacatcctttctattgaaaaatcaccacaccaaacctctcttattagaacaggcaagtgaagaaaagtgaatgctcaagtttttcagaaagcattacatttccaaatgaatgaccttgttgcatgatgtatttttgtacccttcctacagatagtcaaaccataaacttcatggtcatgggtcaaaaaaaaaaa

SEQ ID NO: 329366 - DNA, 2009 bp, Homo sapiens
gccactttattatttattaaactcccgcatagagtgcagtattattactgtgtgccagaccctgcttcaaacacattccatggactataaaattgcatctctgagcagctcctagagctggtagtaacaacttacatttactgggtgattaccatgtgccaggtattgtgctaaacacgttgtagatattaactcacttaatcctcgtaacaatcccatgaagtaggtactgctactatcccggctttacatctgaagtacagagaggttaagtaacttgccccatgtcatccagcaagaactaaatttgaacccagagcttagccactgatgcctcttgagagaaggagtcagacttaagttgagtctttaaaggtggttgaccaggcatttgtcagagttaagaaagagaggtaggacatccttttccaggcagagggcattgtgtgcacacacgtatagaagcaggcagcccaccctcatgctttccaggaagcaaatgtggctcaggtgtaaagtgcccggttgatgaagggagttagcggagggagtataaggatgtactgtctgcccccttaggacacctgcagaggattaaggtggctgtttctccctggaggtggagtgggtgggtcactgcacaggagcctatagttgttggtcttttaaactcttattggtgtaaccagccacggaactctgaggcaaggggttgggggtgggaagggaaacagagaaaaggcaagtgaaacagaaggggaggtgcagtttcagaacccagccagcctctctcttgctgcctagcctcctgccggcctcatcttcgcccagccaaccccgcctggagccctatggccaactgcgagttcagcccggtgtccggggacaaaccctgctgccggctctctaggagagcccaactctgtcttggcgtcagtatcctggtcctgatcctcgtcgtggtgctcgcggtggtcgtcccgaggtggcgccagcagtggagcggtccgggcaccaccaagcgctttcccgagaccgtcctggcgcgatgcgtcaagtacactgaaattcatcctgagatgagacatgtagactgccaaagtgtatgggatgctttcaagggtgcatttatttcaaaacatccttgcaacattactgaagaagactatcagccactaatgaagttgggaactcagaccgtaccttgcaacaagattcttctttggagcagaataaaagatctggcccatcagttcacacaggtccagcgggacatgttcaccctggaggacacgctgctaggctaccttgctgatgacctcacatggtgtggtgaattcaacacttccaaaataaactatcaatcttgcccagactggagaaaggactgcagcaacaaccctgtttcagtattctggaaaacggtttcccgcaggtttgcagaagctgcctgtgatgtggtccatgtgatgctcaatggatcccgcagtaaaatctttgacaaaaacagcacttttgggagtgtggaagtccataatttgcaaccagagaaggttcagacactagaggcctgggtgatacatggtggaagagaagattccagagacttatgccaggatcccaccataaaagagctggaatcgattataagcaaaaggaatattcaattttcctgcaagaatatctacagacctgacaagtttcttcagtgtgtgaaaaatcctgaggattcatcttgcacatctgagatctgagccagtcgctgtggttgttttagctccttgactccttgtggtttatgtcatcatacatgactcagcatacctgctggtgcagagctgaagattttggagggtcctccacaataaggtcaatgccagagacggaagcctttttccccaaagtcttaaaataacttatatcatcagcatacctttattgtgatctatcaatagtcaagaaaaattattgtataagattagaatgaaaattgtatgttaagttacttc

SEQ ID NO: 329367 - DNA, 1873 bp, Homo sapiens
gccactttattatttattaaactcccgcatagagtgcagtattattactgtgtgccagaccctgcttcaaacacattccatggactataaaattgcatctctgagcagctcctagagctggtagtaacaacttacatttactgggtgattaccatgtgccaggtattgtgctaaacacgttgtagatattaactcacttaatcctcgtaacaatcccatgaagtaggtactgctactatcccggctttacatctgaagtacagagaggttaagtaacttgccccatgtcatccagcaagaactaaatttgaacccagagcttagccactgatgcctcttgagagaaggagtcagacttaagttgagtctttaaaggtggttgaccaggcatttgtcagagttaagaaagagaggtaggacatccttttccaggcagagggcattgtgtgcacacacgtatagaagcaggcagcccaccctcatgctttccaggaagcaaatgtggctcaggtgtaaagtgcccggttgatgaagggagttagcggagggagtataaggatgtactgtctgcccccttaggacacctgcagaggattaaggtggctgtttctccctggaggtggagtgggtgggtcactgcacaggagcctatagttgttggtcttttaaactcttattggtgtaaccagccacggaactctgaggcaaggggttgggggtgggaagggaaacagagaaaaggcaagtgaaacagaaggggaggtgcagtttcagaacccagccagcctctctcttgctgcctagcctcctgccggcctcatcttcgcccagccaaccccgcctggagccctatggccaactgcgagttcagcccggtgtccggggacaaaccctgctgccggctctctaggagagcccaactctgtcttggcgtcagtatcctggtcctgatcctcgtcgtggtgctcgcggtggtcgtcccgaggtggcgccagcagtggagcggtccgggcaccaccaagcgctttcccgagaccgtcctggcgcgatgcgtcaagtacactgaaattcatcctgagatgagacatgtagactgccaaagtgtatgggatgctttcaagggtgcatttatttcaaaacatccttgcaacattactgaagaagactatcagccactaatgaagttgggaactcagaccgtaccttgcaacaagaaataaactatcaatcttgcccagactggagaaaggactgcagcaacaaccctgtttcagtattctggaaaacggtttcccgcaggtttgcagaagctgcctgtgatgtggtccatgtgatgctcaatggatcccgcagtaaaatctttgacaaaaacagcacttttgggagtgtggaagtccataatttgcaaccagagaaggttcagacactagaggcctgggtgatacatggtggaagagaagattccagagacttatgccaggatcccaccataaaagagctggaatcgattataagcaaaaggaatattcaattttcctgcaagaatatctacagacctgacaagtttcttcagtgtgtgaaaaatcctgaggattcatcttgcacatctgagatctgagccagtcgctgtggttgttttagctccttgactccttgtggtttatgtcatcatacatgactcagcatacctgctggtgcagagctgaagattttggagggtcctccacaataaggtcaatgccagagacggaagcctttttccccaaagtcttaaaataacttatatcatcagcatacctttattgtgatctatcaatagtcaagaaaaattattgtataagattagaatgaaaattgtatgttaagttacttc

SEQ ID NO: 329368 - DNA, 1489 bp, Homo sapiens
  misc_feature (1257)..(1257): n is a, c, g, or t
gccactttattatttattaaactcccgcatagagtgcagtattattactgtgtgccagaccctgcttcaaacacattccatggactataaaattgcatctctgagcagctcctagagctggtagtaacaacttacatttactgggtgattaccatgtgccaggtattgtgctaaacacgttgtagatattaactcacttaatcctcgtaacaatcccatgaagtaggtactgctactatcccggctttacatctgaagtacagagaggttaagtaacttgccccatgtcatccagcaagaactaaatttgaacccagagcttagccactgatgcctcttgagagaaggagtcagacttaagttgagtctttaaaggtggttgaccaggcatttgtcagagttaagaaagagaggtaggacatccttttccaggcagagggcattgtgtgcacacacgtatagaagcaggcagcccaccctcatgctttccaggaagcaaatgtggctcaggtgtaaagtgcccggttgatgaagggagttagcggagggagtataaggatgtactgtctgcccccttaggacacctgcagaggattaaggtggctgtttctccctggaggtggagtgggtgggtcactgcacaggagcctatagttgttggtcttttaaactcttattggtgtaaccagccacggaactctgaggcaaggggttgggggtgggaagggaaacagagaaaaggcaagtgaaacagaaggggaggtgcagtttcagaacccagccagcctctctcttgctgcctagcctcctgccggcctcatcttcgcccagccaaccccgcctggagccctatggccaactgcgagttcagcccggtgtccggggacaaaccctgctgccggctctctaggagagcccaactctgtcttggcgtcagtatcctggtcctgatcctcgtcgtggtgctcgcggtggtcgtcccgaggtggcgccagcagtggagcggtccgggcaccaccaagcgctttcccgagaccgtcctggcgcgatgcgtcaagtacactgaaattcatcctgagatgaggtgggttggcgactaaggcgcaccggtgggcactgcggggacagcagggccccgcgcgcagggaagccgcccggatcgcccggaaccgggcatcttccgtggcgggtcagccgagagcccgccgggtggtgctgagtagggagtcccgggctcggggctccgcgggccgcttncaggagcagctggccttggcaccgagcgtgcccgcgggaggcgggggggggcgctgctcggtggctctgctgcgtagccggtgaacacttggcaccgatgcccgccttctgggcaaggtgccctgagcccagcccctcgccgggctgcagcccaccctcggcgcgctcagcccgcttcaccgcttcagggacggaatagaactcgcagatgcagggtgtcgctgacattttc

SEQ ID NO: 329369 - DNA, 1713 bp, Homo sapiens
gccactttattatttattaaactcccgcatagagtgcagtattattactgtgtgccagaccctgcttcaaacacattccatggactataaaattgcatctctgagcagctcctagagctggtagtaacaacttacatttactgggtgattaccatgtgccaggtattgtgctaaacacgttgtagatattaactcacttaatcctcgtaacaatcccatgaagtaggtactgctactatcccggctttacatctgaagtacagagaggttaagtaacttgccccatgtcatccagcaagaactaaatttgaacccagagcttagccactgatgcctcttgagagaaggagtcagacttaagttgagtctttaaaggtggttgaccaggcatttgtcagagttaagaaagagaggtaggacatccttttccaggcagagggcattgtgtgcacacacgtatagaagcaggcagcccaccctcatgctttccaggaagcaaatgtggctcaggtgtaaagtgcccggttgatgaagggagttagcggagggagtataaggatgtactgtctgcccccttaggacacctgcagaggattaaggtggctgtttctccctggaggtggagtgggtgggtcactgcacaggagcctatagttgttggtcttttaaactcttattggtgtaaccagccacggaactctgaggcaaggggttgggggtgggaagggaaacagagaaaaggcaagtgaaacagaaggggaggtgcagtttcagaacccagccagcctctctcttgctgcctagcctcctgccggcctcatcttcgcccagccaaccccgcctggagccctatggccaactgcgagttcagcccggtgtccggggacaaaccctgctgccggctctctaggagagcccaactctgtcttggcgtcagtatcctggtcctgatcctcgtcgtggtgctcgcggtggtcgtcccgaggtggcgccagcagtggagcggtccgggcaccaccaagcgctttcccgagaccgtcctggcgcgatgcgtcaagtacactgaaattcatcctgagatgagacatgtagactgccaaagtgtatgggatgctttcaagggtgcatttatttcaaaacatccttgcaacattactgaagaagactatcagccactaatgaagttgggaactcagaccgtaccttgcaacaagattcttctttggagcagaataaaagatctggcccatcagttcacacaggtccagcgggacatgttcaccctggaggacacgctgctaggctaccttgctgatgacctcacatggtgtggtgaattcaacacttccaaaataaactatcaatcttgcccagactggagaaaggactgcagcaacaaccctgtttcagtattctggaaaacggtttcccgcaggtttgcagaagctgcctgtgatgtggtccatgtgatgctcaatggatcccgcagtaaaatctttgacaaaaacagcacttttgggagtgtggaagtccataatttgcaaccagagaaggttcagacactagaggcctgggtgatacatggtggaagagaagattccagagacttatgccaggatcccaccataaaagagctggaatcgattataagcaaaaggaatattcaattttcctgcaagaatatctacaggtaattaatttcttcttgaagaa

SEQ ID NO: 329370 - DNA, 2247 bp, Homo sapiens
gccactttattatttattaaactcccgcatagagtgcagtattattactgtgtgccagaccctgcttcaaacacattccatggactataaaattgcatctctgagcagctcctagagctggtagtaacaacttacatttactgggtgattaccatgtgccaggtattgtgctaaacacgttgtagatattaactcacttaatcctcgtaacaatcccatgaagtaggtactgctactatcccggctttacatctgaagtacagagaggttaagtaacttgccccatgtcatccagcaagaactaaatttgaacccagagcttagccactgatgcctcttgagagaaggagtcagacttaagttgagtctttaaaggtggttgaccaggcatttgtcagagttaagaaagagaggtaggacatccttttccaggcagagggcattgtgtgcacacacgtatagaagcaggcagcccaccctcatgctttccaggaagcaaatgtggctcaggtgtaaagtgcccggttgatgaagggagttagcggagggagtataaggatgtactgtctgcccccttaggacacctgcagaggattaaggtggctgtttctccctggaggtggagtgggtgggtcactgcacaggagcctatagttgttggtcttttaaactcttattggtgtaaccagccacggaactctgaggcaaggggttgggggtgggaagggaaacagagaaaaggcaagtgaaacagaaggggaggtgcagtttcagaacccagccagcctctctcttgctgcctagcctcctgccggcctcatcttcgcccagccaaccccgcctggagccctatggccaactgcgagttcagcccggtgtccggggacaaaccctgctgccggctctctaggagagcccaactctgtcttggcgtcagtatcctggtcctgatcctcgtcgtggtgctcgcggtggtcgtcccgaggtggcgccagcagtggagcggtccgggcaccaccaagcgctttcccgagaccgtcctggcgcgatgcgtcaagtacactgaaattcatcctgagatgagacatgtagactgccaaagtgtatgggatgctttcaagggtgcatttatttcaaaacatccttgcaacattactgaagaagactatcagccactaatgaagttgggaactcagaccgtaccttgcaacaagattcttctttggagcagaataaaagatctggcccatcagttcacacaggtccagcgggacatgttcaccctggaggacacgctgctaggctaccttgctgatgacctcacatggtgtggtgaattcaacacttccaaaataaactatcaatcttgcccagactggagaaaggactgcagcaacaaccctgtttcagtattctggaaaacggtttcccgcaggtttgcagaagctgcctgtgatgtggtccatgtgatgctcaatggatcccgcagtaaaatctttgacaaaaacagcacttttgggagtgtggaagtccataatttgcaaccagagaaggttcagacactagaggcctgggtgatacatggtggaagagaagattccagagacttatgccaggatcccaccataaaagagctggaatcgattataagcaaaaggaatattcaattttcctgcaagaatatctacagacctgacaagtttcttcagtgtgtgaaaaatcctgaggattcatcttgcacatctgagatctgagccagtcgctgtggttgttttagctccttgactccttgtggtttatgtcatcatacatgactcagcatacctgctggtgcagagctgaagattttggagggtcctccacaataaggtcaatgccagagacggaagcctttttccccaaagtcttaaaataacttatatcatcagcatacctttattgtgatctatcaatagtcaagaaaaattattgtataagattagaatgaaaattgtatgttaagttacttcactttaattctcatgtgatccttttatgttatttatatattggtaacatcctttctattgaaaaatcaccacaccaaacctctcttattagaacaggcaagtgaagaaaagtgaatgctcaagtttttcagaaagcattacatttccaaatgaatgaccttgttgcatgatgtatttttgtacccttcctacagatagtcaaaccataaacttcatggtcatgggtcaaaaaaaaaaa

SEQ ID NO: 329371 - DNA, 2229 bp, Homo sapiens
gccactttattatttattaaactcccgcatagagtgcagtattattactgtgtgccagaccctgcttcaaacacattccatggactataaaattgcatctctgagcagctcctagagctggtagtaacaacttacatttactgggtgattaccatgtgccaggtattgtgctaaacacgttgtagatattaactcacttaatcctcgtaacaatcccatgaagtaggtactgctactatcccggctttacatctgaagtacagagaggttaagtaacttgccccatgtcatccagcaagaactaaatttgaacccagagcttagccactgatgcctcttgagagaaggagtcagacttaagttgagtctttaaaggtggttgaccaggcatttgtcagagttaagaaagagaggtaggacatccttttccaggcagagggcattgtgtgcacacacgtatagaagcaggcagcccaccctcatgctttccaggaagcaaatgtggctcaggtgtaaagtgcccggttgatgaagggagttagcggagggagtataaggatgtactgtctgcccccttaggacacctgcagaggattaaggtggctgtttctccctggaggtggagtgggtgggtcactgcacaggagcctatagttgttggtcttttaaactcttattggtgtaaccagccacggaactctgaggcaaggggttgggggtgggaagggaaacagagaaaaggcaagtgaaacagaaggggaggtgcagtttcagaacccagccagcctctctcttgctgcctagcctcctgccggcctcatcttcgcccagccaaccccgcctggagccctatggccaactgcgagttcagcccggtgtccggggacaaaccctgctgccggctctctaggagagcccaactctgtcttggcgtcagtatcctggtcctgatcctcgtcgtggtgctcgcggtggtcgtcccgaggtggcgccagcagtggagcggtccgggcaccaccaagcgctttcccgagaccgtcctggcgcgatgcgtcaagtacactgaaattcatcctgagatgagacatgtagactgccaaagtgtatgggatgctttcaagggtgcatttatttcaaaacatccttgcaacattactgaagaagactatcagccactaatgaagttgggaactcagaccgtaccttgcaacaagattcttctttggagcagaataaaagatctggcccatcagttcacacaggtccagcgggacatgttcaccctggaggacacgctgctaggctaccttgctgatgacctcacatggtgtgaaataaactatcaatcttgcccagactggagaaaggactgcagcaacaaccctgtttcagtattctggaaaacggtttcccgcaggtttgcagaagctgcctgtgatgtggtccatgtgatgctcaatggatcccgcagtaaaatctttgacaaaaacagcacttttgggagtgtggaagtccataatttgcaaccagagaaggttcagacactagaggcctgggtgatacatggtggaagagaagattccagagacttatgccaggatcccaccataaaagagctggaatcgattataagcaaaaggaatattcaattttcctgcaagaatatctacagacctgacaagtttcttcagtgtgtgaaaaatcctgaggattcatcttgcacatctgagatctgagccagtcgctgtggttgttttagctccttgactccttgtggtttatgtcatcatacatgactcagcatacctgctggtgcagagctgaagattttggagggtcctccacaataaggtcaatgccagagacggaagcctttttccccaaagtcttaaaataacttatatcatcagcatacctttattgtgatctatcaatagtcaagaaaaattattgtataagattagaatgaaaattgtatgttaagttacttcactttaattctcatgtgatccttttatgttatttatatattggtaacatcctttctattgaaaaatcaccacaccaaacctctcttattagaacaggcaagtgaagaaaagtgaatgctcaagtttttcagaaagcattacatttccaaatgaatgaccttgttgcatgatgtatttttgtacccttcctacagatagtcaaaccataaacttcatggtcatgggtcaaaaaaaaaaa

SEQ ID NO: 329372 - DNA, 697 bp, Homo sapiens
  misc_feature (18)..(18): n is a, c, g, or t
  misc_feature (22)..(22): n is a, c, g, or t
agagacgcggtgcactcngtcnagggatgtcgcgggatctctatgaagcaccagaattatcagtgaagaatatattaaatggctcacgggctactgtaaagcatatttctatcgcttgagagtaaaactgctagaaccagttcctgtttctacaacaaggtgttcctttagagtcaatgagaacacacaaaacctacaaattcatgcaggggacatcctgaagttcttgaaaaagaagaaacctgaagatgccttctgtgttgtgggaataacaatgattgatctttacccaagagacttgtggaattttgtctttggacaggcctctttgacagatggcactggtgaggtggattgatgatgaatcttctggcacacctggagcaactccagaacacagtcgtgaggataatgggaatttactgaaacccgtggaaggaagcctttaaggaatggaaagagtggataataaaatgcctgactgttctccaaaaataaggaccttcaaataggagtgattgaaataaatgactacttgcatgttatgctttcatttgggtggaatacttcatcagaataaactattgatcttgtgctgtgtcaaagtaacagactagaaccttctttcaagtacctgaattgaaatgaaactcattttgaataataaaaactctagaaactctttaaaaactcaaaa

SEQ ID NO: 329373 - DNA, 485 bp, Homo sapiens
acacccagctattttattttattttttttgtcgagatgggatctccctgtgttgctcaagctcatcttgaattcctgggctcaagcgagcctcccacctcagcctcccaaagtgctttgataaaaggcactggtgaggtggattgatgatgaatcttctggcacacctggagcaactccagaacacagtcgtgaggataatgggaatttactgaaacccgtggaaggaagcctttaaggaatggaaagagtggataataaaatgcctgactgttctccaaaaataaggaccttcaaataggagtgattgaaataaatgactacttgcatgttatgctttcatttgggtggaatacttcatcagaataaactattgatcttgtgctgtgtcaaagtaacagactagaaccttctttcaagtacctgaattgaaatgaaactcattttgaataataaaaactctagaaactctttaaaaactcaaaa

SEQ ID NO: 329374 - DNA, 1091 bp, Homo sapiens
caggggcgtggcgcgggcgggtcgtgagtggggcggggcccagagagcgtgtgcgatggagcggcgcgtcgcgcggcgcgaaggggcgtggcgccagtgggcgtggcgtagtgcgaagagacgcggtgcgcacgcgcgtgagggatgtcgcggatgcaaatagtacggtattccgaacagacactaaaaatagctgtcatctcaaagaatccagtgcttgtgtcacagtatgagaaagtagatgctggggaacagcgtttaatgaatgaagcattccagccagccagtgatctctttggaccttgcattctccatcagattggatcacctcccaccctgaggccccccaagactttgaacagttcttcagtcatccttacagaaagataccctctccagacaaacgcagtatttatatacggtccattggatctctatgaagcaccagaattatcagtgaagaatatattaaatggctcacgggctactgtaaagcatatttctatcgcttgagagtaaaactgctagaaccagttcctgtttctacaacaaggtgttcctttagagtcaatgagaacacacaaaacctacaaattcatgcaggggacatcctgaagttcttgaaaaagaagaaacctgaagatgccttctgtgttgtgggaataacaatgattgatctttacccaagagacttgtggaattttgtctttggacaggcctctttgacagatggcactggtgaggtggattgatgatgaatcttctggcacacctggagcaactccagaacacagtcgtgaggataatgggaatttactgaaacccgtggaaggaagcctttaaggaatggaaagagtggataataaaatgcctgactgttctccaaaaataaggaccttcaaataggagtgattgaaataaatgactacttgcatgttatgctttcatttgggtggaatacttcatcagaataaactattgatcttgtgctgtgtcaaagtaacagactagaaccttctttcaagtacctgaattgaaatgaaactcattttgaataataaaaactctagaaactctttaaaaactcaaaa

SEQ ID NO: 329375 - DNA, 2022 bp, Homo sapiens
ggtggagagggatgaggatgtggagggacggacgtggcggaagccgcggggacttgcgatggggcgtaggatgtcgcgggtgagtggtgtcgaggcctgttgggtcagggcggttcgcaggtgctgtcagagctgggcggggcagccgggtcgtagaggcgggcgccagtcgcggtcggtggagagggatgaggatgtaggagggacggacgtggcggaagccgcggggactgcgggggcggagtgcctctggggagccaggaggcctttccagaggctcctgggggaagaagaggcgaagcgagagtccccggggaagccctactccacccccagccggagcctgggttgtgcctgcacggaccagagcccacagtgcgagttgctgtaggcaaccagctagggtggccaacttctcccggttggcccgagatgttctggttttgggaccacagcgtcccaggcctccagcccaccacagtgaccatattgtgcgccccctgcccatcttctcccgcagcttccctagattaggcttgggaggcaaggggaggcctcctgacttttctcactgccttcgttaatataaagatgaaggcacactccacaacttccttctggccaggcccagacatgtctgtccttgtgagataaaagcttccatgggagccttccttcctaatcaaggtaggtagaccactggaaggtacatctggttttatattttgtcctgtagaagtcagatttcagcccagttgtgtaggagtgaggatgagcttatgctcttatcagagctttgagtacagagacatttgatctgggaatttcagccagcctcttcaaccccagaattcagaggttcaatcagaacagacattagcttaagttttcccatcagttgtctatcattaaactggcaaaatctagataattagaaaatatgacagagatgatccagacagagatgttcaggtttttccttgtgtaattcaaaaagtctcgtggtggaacatctgacccttttcaagaggaaggatgaaaactctacataggaacacgatgtgaatggaagaaacctgtcattatgcaaatagtacggtattccgaacagacactaaaaatagctgtcatctcaaagaatccagtgcttgtgtcacagtatgagaaagtagatgctggggaacagcgtttaatgaatgaagcattccagccagccagtgatctctttggaccttgcattctccatcagattggatcacctcccaccctgaggccccccaagactttgaacagttcttcagtcatccttacagaaagataccctctccagacaaacgcagtatttatatacggtccattggatctctatgaagcaccagaattatcagtgaagaatatattaaatggctcacgggctactgtaaagcatatttctatcgcttgagagtaaaactgctagaaccagttcctgtttctacaacaaggtgttcctttagagtcaatgagaacacacaaaacctacaaattcatgcaggggacatcctgaagttcttgaaaaagaagaaacctgaagatgccttctgtgttgtgggaataacaatgattgatctttacccaagagacttgtggaattttgtctttggacaggcctctttgacagatggcactggtgaggtggattgatgatgaatcttctggcacacctggagcaactccagaacacagtcgtgaggataatgggaatttactgaaacccgtggaaggaagcctttaaggaatggaaagagtggataataaaatgcctgactgttctccaaaaataaggaccttcaaataggagtgattgaaataaatgactacttgcatgttatgctttcatttgggtggaatacttcatcagaataaactattgatcttgtgctgtgtcaaagtaacagactagaaccttctttcaagtacctgaattgaaatgaaactcattttgaataataaaaactctagaaactctttaaaaactcaaaa

SEQ ID NO: 329376 - DNA, 1797 bp, Homo sapiens
caggggcgtggcgcgggcgggtcgtgagtggggcggggcccagagagcgtgtgcgatggagcggcgcgtcgcgcggcgcgaaggggcgtggcgccagtgggcgtggcgtagtgcgaagagacgcggtgcgcacgcgcgtgagggatgtcgcggggatgtcgcgggtgagtggtgtcgaggcctgttgggtcagggcggttcgcaggtgctgtcagagctgggcggggcagccgggtcgtagaggcgggcgccagtcgcggtcggtggagagggatgaggatgtaggagggacggacgtggcggaagccgcggggactgcgggggcggagtgcctctggggagccaggaggcctttccagaggctcctgggggaagaagaggcgaagcgagagtccccggggaagccctactccacccccagccggagcctgggttgtgcctgcacggaccagagcccacagtgcgagttgctgtaggcaaccagctagggtggccaacttctcccggttggcccgagatgttctggttttgggaccacagcgtcccaggcctccagcccaccacagtgaccatattgtgcgccccctgcccatcttctcccgcagcttccctagattaggcttgggaggcaaggggaggcctcctgacttttctcactgccttcgttaatataaagatgaaggcacactccacaacttccttctggccaggcccagacatgtctgtccttgtgagataaaagcttccatgggagccttccttcctaatcaagtctcgtggtggaacatctgacccttttcaagaggaaggatgaaaactctacataggaacacgatgtgaatggaagaaacctgtcattatgcaaatagtacggtattccgaacagacactaaaaatagctgtcatctcaaagaatccagtgcttgtgtcacagtatgagaaagtagatgctggggaacagcgtttaatgaatgaagcattccagccagccagtgatctctttggaccttgcattctccatcagattggatcacctcccaccctgaggccccccaagactttgaacagttcttcagtcatccttacagaaagataccctctccagacaaacgcagtatttatatacggtccattggatctctatgaagcaccagaattatcagtgaagaatatattaaatggctcacgggctactgtaaagcatatttctatcgcttgagagtaaaactgctagaaccagttcctgtttctacaacaaggtgttcctttagagtcaatgagaacacacaaaacctacaaattcatgcaggggacatcctgaagttcttgaaaaagaagaaacctgaagatgccttctgtgttgtgggaataacaatgattgatctttacccaagagacttgtggaattttgtctttggacaggcctctttgacagatggcactggtgaggtggattgatgatgaatcttctggcacacctggagcaactccagaacacagtcgtgaggataatgggaatttactgaaacccgtggaaggaagcctttaaggaatggaaagagtggataataaaatgcctgactgttctccaaaaataaggaccttcaaataggagtgattgaaataaatgactacttgcatgttatgctttcatttgggtggaatacttcatcagaataaactattgatcttgtgctgtgtcaaagtaacagactagaaccttctttcaagtacctgaattgaaatgaaactcattttgaataataaaaactctagaaactctttaaaaactcaaaa

SEQ ID NO: 329377 - DNA, 1945 bp, Homo sapiens
caggggcgtggcgcgggcgggtcgtgagtggggcggggcccagagagcgtgtgcgatggagcggcgcgtcgcgcggcgcgaaggggcgtggcgccagtgggcgtggcgtagtgcgaagagacgcggtgcgcacgcgcgtgagggatgtcgcggggatgtcgcgggtgagtggtgtcgaggcctgttgggtcagggcggttcgcaggtgctgtcagagctgggcggggcagccgggtcgtagaggcgggcgccagtcgcggtcggtggagagggatgaggatgtaggagggacggacgtggcggaagccgcggggactgcgggggcggagtgcctctggggagccaggaggcctttccagaggctcctgggggaagaagaggcgaagcgagagtccccggggaagccctactccacccccagccggagcctgggttgtgcctgcacggaccagagcccacagtgcgagttgctgtaggcaaccagctagggtggccaacttctcccggttggcccgagatgttctggttttgggaccacagcgtcccaggcctccagcccaccacagtgaccatattgtgcgccccctgcccatcttctcccgcagcttccctagattaggcttgggaggcaaggggaggcctcctgacttttctcactgccttcgttaatataaagatgaaggcacactccacaacttccttctggccaggcccagacatgtctgtccttgtgagataaaagcttccatgggagccttccttcctaatcaaggtaggtagaccactggaaggtacatctggttttatattttgtcctgtagaagtcagatttcagcccagttgtgtaggagtgaggatgagcttatgctcttatcagagctttgagtacagagacatttgatctgggaatttcagccagcctcttcaaccccagaattcagaggttcaatcagaacagacattagcttaagttttcccatcagttgtctatcattaaactggcaaaatctagataattagaaaatatgacagagatgatccagacagagatgttcaggtttttccttgtgtaattcaaaaagtctcgtggtggaacatctgacccttttcaagaggaaggatgaaaactctacataggaacacgatgtgaatggaagaaacctgtcattgtccccaagaaattgattggacatgaggaaaccactctaagtgtgaccactctaaagcattagcagtcagtcatttcactctagggagaaatcagagctgtatatggagaataggatctctatgaagcaccagaattatcagtgaagaatatattaaatggctcacgggctactgtaaagcatatttctatcgcttgagagtaaaactgctagaaccagttcctgtttctacaacaaggtgttcctttagagtcaatgagaacacacaaaacctacaaattcatgcaggggacatcctgaagttcttgaaaaagaagaaacctgaagatgccttctgtgttgtgggaataacaatgattgatctttacccaagagacttgtggaattttgtctttggacaggcctctttgacagatggcactggtgaggtggattgatgatgaatcttctggcacacctggagcaactccagaacacagtcgtgaggataatgggaatttactgaaacccgtggaaggaagcctttaaggaatggaaagagtggataataaaatgcctgactgttctccaaaaataaggaccttcaaataggagtgattgaaataaatgactacttgcatgttatgctttcatttgggtggaatacttcatcagaataaactattgatcttgtgctgtgtcaaagtaacagactagaaccttctttcaagtacctgaattgaaatgaaactcattttgaataataaaaactctagaaactctttaaaaactcaaaa

SEQ ID NO: 329378 - DNA, 1710 bp, Homo sapiens
caggggcgtggcgcgggcgggtcgtgagtggggcggggcccagagagcgtgtgcgatggagcggcgcgtcgcgcggcgcgaaggggcgtggcgccagtgggcgtggcgtagtgcgaagagacgcggtgcgcacgcgcgtgagggatgtcgcggggatgtcgcgggtgagtggtgtcgaggcctgttgggtcagggcggttcgcaggtgctgtcagagctgggcggggcagccgggtcgtagaggcgggcgccagtcgcggtcggtggagagggatgaggatgtaggagggacggacgtggcggaagccgcggggactgcgggggcggagtgcctctggggagccaggaggcctttccagaggctcctgggggaagaagaggcgaagcgagagtccccggggaagccctactccacccccagccggagcctgggttgtgcctgcacggaccagagcccacagtgcgagttgctgtaggcaaccagctagggtggccaacttctcccggttggcccgagatgttctggttttgggaccacagcgtcccaggcctccagcccaccacagtgaccatattgtgcgccccctgcccatcttctcccgcagcttccctagattaggcttgggaggcaaggggaggcctcctgacttttctcactgccttcgttaatataaagatgaaggcacactccacaacttccttctggccaggcccagacatgtctgtccttgtgagataaaagcttccatgggagccttccttcctaatcaagatgcaaatagtacggtattccgaacagacactaaaaatagctgtcatctcaaagaatccagtgcttgtgtcacagtatgagaaagtagatgctggggaacagcgtttaatgaatgaagcattccagccagccagtgatctctttggaccttgcattctccatcagattggatcacctcccaccctgaggccccccaagactttgaacagttcttcagtcatccttacagaaagataccctctccagacaaacgcagtatttatatacggtccattggatctctatgaagcaccagaattatcagtgaagaatatattaaatggctcacgggctactgtaaagcatatttctatcgcttgagagtaaaactgctagaaccagttcctgtttctacaacaaggtgttcctttagagtcaatgagaacacacaaaacctacaaattcatgcaggggacatcctgaagttcttgaaaaagaagaaacctgaagatgccttctgtgttgtgggaataacaatgattgatctttacccaagagacttgtggaattttgtctttggacaggcctctttgacagatggcactggtgaggtggattgatgatgaatcttctggcacacctggagcaactccagaacacagtcgtgaggataatgggaatttactgaaacccgtggaaggaagcctttaaggaatggaaagagtggataataaaatgcctgactgttctccaaaaataaggaccttcaaataggagtgattgaaataaatgactacttgcatgttatgctttcatttgggtggaatacttcatcagaataaactattgatcttgtgctgtgtcaaagtaacagactagaaccttctttcaagtacctgaattgaaatgaaactcattttgaataataaaaactctagaaactctttaaaaactcaaaa

SEQ ID NO: 329379 - DNA, 1632 bp, Homo sapiens
caggggcgtggcgcgggcgggtcgtgagtggggcggggcccagagagcgtgtgcgatggagcggcgcgtcgcgcggcgcgaaggggcgtggcgccagtgggcgtggcgtagtgcgaagagacgcggtgcgcacgcgcgtgagggatgtcgcggggatgtcgcgggtgagtggtgtcgaggcctgttgggtcagggcggttcgcaggtgctgtcagagctgggcggggcagccgggtcgtagaggcgggcgccagtcgcggtcggtggagagggatgaggatgtaggagggacggacgtggcggaagccgcggggactgcgggggcggagtgcctctggggagccaggaggcctttccagaggctcctgggggaagaagaggcgaagcgagagtccccggggaagccctactccacccccagccggagcctgggttgtgcctgcacggaccagagcccacagtgcgagttgctgtaggcaaccagctagggtggccaacttctcccggttggcccgagatgttctggttttgggaccacagcgtcccaggcctccagcccaccacagtgaccatattgtgcgccccctgcccatcttctcccgcagcttccctagattaggcttgggaggcaaggggaggcctcctgacttttctcactgccttcgttaatataaagatgaaggcacactccacaacttccttctggccaggcccagacatgtctgtccttgtgagataaaagcttccatgggagccttccttcctaatcaagtctcgtggtggaacatctgacccttttcaagaggaaggatgaaaactctacataggaacacgatgtgaatggaagaaacctgtcattattggatcacctcccaccctgaggccccccaagactttgaacagttcttcagtcatccttacagaaagataccctctccagacaaacgcagtatttatatacggtccattggatctctatgaagcaccagaattatcagtgaagaatatattaaatggctcacgggctactgtaaagcatatttctatcgcttgagagtaaaactgctagaaccagttcctgtttctacaacaaggtgttcctttagagtcaatgagaacacacaaaacctacaaattcatgcaggggacatcctgaagttcttgaaaaagaagaaacctgaagatgccttctgtgttgtgggaataacaatgattgatctttacccaagagacttgtggaattttgtctttggacaggcctctttgacagatggcactggtgaggtggattgatgatgaatcttctggcacacctggagcaactccagaacacagtcgtgaggataatgggaatttactgaaacccgtggaaggaagcctttaaggaatggaaagagtggataataaaatgcctgactgttctccaaaaataaggaccttcaaataggagtgattgaaataaatgactacttgcatgttatgctttcatttgggtggaatacttcatcagaataaactattgatcttgtgctgtgtcaaagtaacagactagaaccttctttcaagtacctgaattgaaatgaaactcattttgaataataaaaactctagaaactctttaaaaactcaaaa

SEQ ID NO: 329380 - DNA, 1545 bp, Homo sapiens
caggggcgtggcgcgggcgggtcgtgagtggggcggggcccagagagcgtgtgcgatggagcggcgcgtcgcgcggcgcgaaggggcgtggcgccagtgggcgtggcgtagtgcgaagagacgcggtgcgcacgcgcgtgagggatgtcgcggggatgtcgcgggtgagtggtgtcgaggcctgttgggtcagggcggttcgcaggtgctgtcagagctgggcggggcagccgggtcgtagaggcgggcgccagtcgcggtcggtggagagggatgaggatgtaggagggacggacgtggcggaagccgcggggactgcgggggcggagtgcctctggggagccaggaggcctttccagaggctcctgggggaagaagaggcgaagcgagagtccccggggaagccctactccacccccagccggagcctgggttgtgcctgcacggaccagagcccacagtgcgagttgctgtaggcaaccagctagggtggccaacttctcccggttggcccgagatgttctggttttgggaccacagcgtcccaggcctccagcccaccacagtgaccatattgtgcgccccctgcccatcttctcccgcagcttccctagattaggcttgggaggcaaggggaggcctcctgacttttctcactgccttcgttaatataaagatgaaggcacactccacaacttccttctggccaggcccagacatgtctgtccttgtgagataaaagcttccatgggagccttccttcctaatcaagattggatcacctcccaccctgaggccccccaagactttgaacagttcttcagtcatccttacagaaagataccctctccagacaaacgcagtatttatatacggtccattggatctctatgaagcaccagaattatcagtgaagaatatattaaatggctcacgggctactgtaaagcatatttctatcgcttgagagtaaaactgctagaaccagttcctgtttctacaacaaggtgttcctttagagtcaatgagaacacacaaaacctacaaattcatgcaggggacatcctgaagttcttgaaaaagaagaaacctgaagatgccttctgtgttgtgggaataacaatgattgatctttacccaagagacttgtggaattttgtctttggacaggcctctttgacagatggcactggtgaggtggattgatgatgaatcttctggcacacctggagcaactccagaacacagtcgtgaggataatgggaatttactgaaacccgtggaaggaagcctttaaggaatggaaagagtggataataaaatgcctgactgttctccaaaaataaggaccttcaaataggagtgattgaaataaatgactacttgcatgttatgctttcatttgggtggaatacttcatcagaataaactattgatcttgtgctgtgtcaaagtaacagactagaaccttctttcaagtacctgaattgaaatgaaactcattttgaataataaaaactctagaaactctttaaaaactcaaaa

SEQ ID NO: 329381 - DNA, 746 bp, Homo sapiens
agttcctgtttctacaacaaggtgttcctttagagtcaatgagaacacacaaaacctacaaattcatgcaggggacatcctgaagatctctatgaagcaccagaattatcagtgaagaatatattaaatggctcacgggctactgtaaagcatatttctatcgcttgagagtaaaactgctagaaccagttcctgtttctacaacaaggtgttcctttagagtcaatgagaacacacaaaacctacaaattcatgcaggggacatcctgaagttcttgaaaaagaagaaacctgaagatgccttctgtgttgtgggaataacaatgattgatctttacccaagagacttgtggaattttgtctttggacaggcctctttgacagatggcactggtgaggtggattgatgatgaatcttctggcacacctggagcaactccagaacacagtcgtgaggataatgggaatttactgaaacccgtggaaggaagcctttaaggaatggaaagagtggataataaaatgcctgactgttctccaaaaataaggaccttcaaataggagtgattgaaataaatgactacttgcatgttatgctttcatttgggtggaatacttcatcagaataaactattgatcttgtgctgtgtcaaagtaacagactagaaccttctttcaagtacctgaattgaaatgaaactcattttgaataataaaaactctagaaactctttaaaaactcaaaa

SEQ ID NO: 329382 - DNA, 2326 bp, Homo sapiens
caggggcgtggcgcgggcgggtcgtgagtggggcggggcccagagagcgtgtgcgatggagcggcgcgtcgcgcggcgcgaaggggcgtggcgccagtgggcgtggcgtagtgcgaagagacgcggtgcgcacgcgcgtgagggatgtcgcggggatgtcgcgggtgagtggtgtcgaggcctgttgggtcagggcggttcgcaggtgctgtcagagctgggcggggcagccgggtcgtagaggcgggcgccagtcgcggtcggtggagagggatgaggatgtaggagggacggacgtggcggaagccgcggggactgcgggggcggagtgcctctggggagccaggaggcctttccagaggctcctgggggaagaagaggcgaagcgagagtccccggggaagccctactccacccccagccggagcctgggttgtgcctgcacggaccagagcccacagtgcgagttgctgtaggcaaccagctagggtggccaacttctcccggttggcccgagatgttctggttttgggaccacagcgtcccaggcctccagcccaccacagtgaccatattgtgcgccccctgcccatcttctcccgcagcttccctagattaggcttgggaggcaaggggaggcctcctgacttttctcactgccttcgttaatataaagatgaaggcacactccacaacttccttctggccaggcccagacatgtctgtccttgtgagataaaagcttccatgggagccttccttcctaatcaaggtaggtagaccactggaaggtacatctggttttatattttgtcctgtagaagtcagatttcagcccagttgtgtaggagtgaggatgagcttatgctcttatcagagctttgagtacagagacatttgatctgggaatttcagccagcctcttcaaccccagaattcagaggttcaatcagaacagacattagcttaagttttcccatcagttgtctatcattaaactggcaaaatctagataattagaaaatatgacagagatgatccagacagagatgttcaggtttttccttgtgtaattcaaaaagtctcgtggtggaacatctgacccttttcaagaggaaggatgaaaactctacataggaacacgatgtgaatggaagaaacctgtcattatgcaaatagtacggtattccgaacagacactaaaaatagctgtcatctcaaagaatccagtgcttgtgtcacagtatgagaaagtagatgctggggaacagcgtttaatgaatgaagcattccagccagccagtgatctctttggaccttgcattctccatcagattggatcacctcccaccctgaggccccccaagactttgaacagttcttcagtcatccttacagaaagataccctctccagacaaacgcagtatttatatacggtccattggatctctatgaagcaccagaattatcagtgaagaatatattaaatggctcacgggctactgtaaagcatatttctatcgcttgagagtaaaactgctagaaccagttcctgtttctacaacaaggtgttcctttagagtcaatgagaacacacaaaacctacaaattcatgcaggggacatcctgaagttcttgaaaaagaagaaacctgaagatgccttctgtgttgtgggaataacaatgattgatctttacccaagagacttgtggaattttgtctttggacaggcctctttgacagatgatggtattccgtttttggcattgttgttagaagcttcttcaacttgagaatatttgaagatgttaaaagagggaaaaaaattccaaccaagaatcatattgatatttaaaactatagtattttcagttgagacattatgccataatgggaagtgtgctgttggtagattgtgataatctaggttctggttggccactcactacctacaggaccttaaaggcactggtgaggtggattgatgatgaatcttctggcacacctggagcaactccagaacacagtcgtgaggataatgggaatttactgaaacccgtggaaggaagcctttaaggaatggaaagagtggataataaaatgcctgactgttctccaaaaataaggaccttcaaataggagtgattgaaataaatgactacttgcatgttatgctttcatttgggtggaatacttcatcagaataaactattgatcttgtgctgtgtcaaagtaacagactagaaccttctttcaagtacctgaattgaaatgaaactcattttgaataataaaaactctagaaactctttaaaaactcaaaa

SEQ ID NO: 329383 - DNA, 2073 bp, Homo sapiens
caggggcgtggcgcgggcgggtcgtgagtggggcggggcccagagagcgtgtgcgatggagcggcgcgtcgcgcggcgcgaaggggcgtggcgccagtgggcgtggcgtagtgcgaagagacgcggtgcgcacgcgcgtgagggatgtcgcggggatgtcgcgggtgagtggtgtcgaggcctgttgggtcagggcggttcgcaggtgctgtcagagctgggcggggcagccgggtcgtagaggcgggcgccagtcgcggtcggtggagagggatgaggatgtaggagggacggacgtggcggaagccgcggggactgcgggggcggagtgcctctggggagccaggaggcctttccagaggctcctgggggaagaagaggcgaagcgagagtccccggggaagccctactccacccccagccggagcctgggttgtgcctgcacggaccagagcccacagtgcgagttgctgtaggcaaccagctagggtggccaacttctcccggttggcccgagatgttctggttttgggaccacagcgtcccaggcctccagcccaccacagtgaccatattgtgcgccccctgcccatcttctcccgcagcttccctagattaggcttgggaggcaaggggaggcctcctgacttttctcactgccttcgttaatataaagatgaaggcacactccacaacttccttctggccaggcccagacatgtctgtccttgtgagataaaagcttccatgggagccttccttcctaatcaaggtaggtagaccactggaaggtacatctggttttatattttgtcctgtagaagtcagatttcagcccagttgtgtaggagtgaggatgagcttatgctcttatcagagctttgagtacagagacatttgatctgggaatttcagccagcctcttcaaccccagaattcagaggttcaatcagaacagacattagcttaagttttcccatcagttgtctatcattaaactggcaaaatctagataattagaaaatatgacagagatgatccagacagagatgttcaggtttttccttgtgtaattcaaaaagtctcgtggtggaacatctgacccttttcaagaggaaggatgaaaactctacataggaacacgatgtgaatggaagaaacctgtcattatgcaaatagtacggtattccgaacagacactaaaaatagctgtcatctcaaagaatccagtgcttgtgtcacagtatgagaaagtagatgctggggaacagcgtttaatgaatgaagcattccagccagccagtgatctctttggaccttgcattctccatcagattggatcacctcccaccctgaggccccccaagactttgaacagttcttcagtcatccttacagaaagataccctctccagacaaacgcagtatttatatacggtccattggatctctatgaagcaccagaattatcagtgaagaatatattaaatggctcacgggctactgtaaagcatatttctatcgcttgagagtaaaactgctagaaccagttcctgtttctacaacaaggtgttcctttagagtcaatgagaacacacaaaacctacaaattcatgcaggggacatcctgaagttcttgaaaaagaagaaacctgaagatgccttctgtgttgtgggaataacaatgattgatctttacccaagagacttgtggaattttgtctttggacaggcctctttgacagatgatggtattccgtttttggcattgttgttagaagcttcttcaacttgagaatatttgaagatgttaaaagagggaaaaaaattccaaccaagaatcatattgatatttaaaactatagtattttcagttgagacattatgccataatgggaagtgtgctgttggtagattgtgataatctaggttctggttggccactcactacctacaggaccttaaaggtaacaatacccacatcatggagtcatttggagataatttacataaaagtgcctgtacataaaaagtgtggatacacgtcgcgaggggatcctcatagagcgccgc

SEQ ID NO: 329384 - DNA, 1262 bp, Homo sapiens
caggggcgtggcgcgggcgggtcgtgagtggggcggggcccagagagcgtgtgcgatggagcggcgcgtcgcgcggcgcgaaggggcgtggcgccagtgggcgtggcgtagtgcgaagagacgcggtgcgcacgcgcgtgagggatgtcgcggggatgtcgcgggtgagtggtgtcgaggcctgttgggtcagggcggttcgcaggtgctgtcagagctgggcggggcagccgggtcgtagaggcgggcgccagtcgcggtcggtggagagggatgaggatgtaggagggacggacgtggcggaagccgcggggactgcgggggcggagtgcctctggggagccaggaggcctttccagaggctcctgggggaagaagaggcgaagcgagagtccccggggaagccctactccacccccagccggagcctgggttgtgcctgcacggaccagagcccacagtgcgagttgctgtaggcaaccagctagggtggccaacttctcccggttggcccgagatgttctggttttgggaccacagcgtcccaggcctccagcccaccacagtgaccatattgtgcgccccctgcccatcttctcccgcagcttccctagattaggcttgggaggcaaggggaggcctcctgacttttctcactgccttcgttaatataaagatgaaggcacactccacaacttccttctggccaggcccagacatgtctgtccttgtgagataaaagcttccatgggagccttccttcctaatcaaggtaggtagaccactggaaggtacatctggttttatattttgtcctgtagaagtcagatttcagcccagttgtgtaggagtgaggatgagcttatgctcttatcagagctttgagtacagagacatttgatctgggaatttcagccagcctcttcaaccccagaattcagaggttcaatcagaacagacattagcttaagttttcccatcagttgtctatcattaaactggcaaaatctagataattagaaaatatgacagagatgatccagacagagatgttcaggtttttccttgtgtaattcaaaaagtctcgtggtggaacatctgacccttttcaagaggaaggatgaaaactctacataggaacacgatgtgaatggaagaaacctgtcattgtgagtctggcttttgattagtcatctgatgtcttccctaatgtgatgtgactaagccgtagcttctcagcctgcagttaaattgcagaaatg

SEQ ID NO: 329385 - DNA, 643 bp, Homo sapiens
ccatgttgcccaagctgttctcaaactcctggcctcaagcagtcctcctatcccaaagtgctgaaattacaggcatgagccaccacgcctggccaccactagtttttgtaatgggagcaggttccatatgagatggaggaatggatttcatgattgtctttgtaatttcttaggtccccaagaaattgattggacatgaggaaaccactctaagtgtgaccactctaaagcattagcagtcagtcatttcactctagggagaaatcagagctgtatatggagaataggtaaagtccccaatatggatatgtatttttatatttgactgcttgtatttttttgttagatgcaaatagtacggtattccgaacagacatagatgctggggaacagcgtttaatgaatgaagcattccagccagccagtgatctctttggaccttgcattctccatcagattggatcacctcccaccctgaggccccccaagactttgaacagttcttcagtcatccttacagaaagataccctctccagacaaacgcagtatttatatacggtccattgtaaatactggtaatgtgctagttttggttcggttttgcaatggttctgttgtcaggaatagtccgggctattggtc

SEQ ID NO: 329386 - DNA, 695 bp, Homo sapiens
tgcacagaaatgtctacacatgtgttttcacatacatatgtctacccatgcctgtgtggacacttatatatgtatatacatacatgtcaaattaatataatgccttgtagaatattcagcaagttgagaaaaaatatcctatcatgctagaaacaaagtataagaatgagtgtatttctttttcatcttttttcagtgcgtacttttgacatcatttgtaattctgtgtgtatttggtacgtgccatttcactcagtatatcattagcattattcatattcacagcatcattatcaaatgcagcgtcttcatggggtaatatgtcaccctatgatctagaagccaatgcttctctcttgcctgatggtattttgctgtggtttgttgaagtgcgcatctttcaatgcttttccaggcactggtgaggtggattgatgatgaatcttctggcacacctggagcaactccagaacacagtcgtgaggataatgggaatttactgaaacccgtggaaggaagcctttaaggaatggaaagagtggataataaaatgcctgactgttctccaaaaataaggaccttcaaataggagtgattgaaataaatgactacttgcatgttatgctttcatttgggtggaatacttcatcagaataaactattgatcttgtgctgtgtcaaagtaacagactaga

SEQ ID NO: 329387 - DNA, 863 bp, Homo sapiens
caggggcgtggcgcgggcgggtcgtgagtggggcggggcccagagagcgtgtgcgatggagcggcgcgtcgcgcggcgcgaaggggcgtggcgccagtgggcgtggcgtagtgcgaagagacgcggtgcgcacgcgcgtgagggatgtcgcggtctcgtggtggaacatctgacccttttcaagaggaaggatgaaaactctacataggaacacgatgtgaatggaagaaacctgtcattatgcaaatagtacggtattccgaacagacactaaaaatagctgtcatctcaaagaatccagtgcttgtgtcacagtatgagaaagtagatgctggggaacagcgtttaatgaatgaagcattccagccagccagtgatctctttggaccttgcattctccatcagattggatcacctcccaccctgaggccccccaagactttgaacagttcttcagtcatccttacagaaagataccctctccagacaaacgcagtatttatatacggtccattggatctctatgaagcaccagaattatcagtgaagaatatattaaatggctcacgggctactgtaaagcatatttctatcgcttgagagtaaaactgctagaaccagttcctgtttctacaacaaggtgttcctttagagtcaatgagaacacacaaaacctacaaattcatgcaggggacatcctgaagttcttgaaaaagaagaaacctgaagatgccttctgtgttgtgggaataacaatgattgatctttacccaagagacttgtggaattttgtctttggacaggcctctttgacagatgaggcttttgcacgaaggacttgggtggatttgttttttttcccc

SEQ ID NO: 329388 - DNA, 2107 bp, Homo sapiens
caggggcgtggcgcgggcgggtcgtgagtggggcggggcccagagagcgtgtgcgatggagcggcgcgtcgcgcggcgcgaaggggcgtggcgccagtgggcgtggcgtagtgcgaagagacgcggtgcgcacgcgcgtgagggatgtcgcggggatgtcgcgggtgagtggtgtcgaggcctgttgggtcagggcggttcgcaggtgctgtcagagctgggcggggcagccgggtcgtagaggcgggcgccagtcgcggtcggtggagagggatgaggatgtaggagggacggacgtggcggaagccgcggggactgcgggggcggagtgcctctggggagccaggaggcctttccagaggctcctgggggaagaagaggcgaagcgagagtccccggggaagccctactccacccccagccggagcctgggttgtgcctgcacggaccagagcccacagtgcgagttgctgtaggcaaccagctagggtggccaacttctcccggttggcccgagatgttctggttttgggaccacagcgtcccaggcctccagcccaccacagtgaccatattgtgcgccccctgcccatcttctcccgcagcttccctagattaggcttgggaggcaaggggaggcctcctgacttttctcactgccttcgttaatataaagatgaaggcacactccacaacttccttctggccaggcccagacatgtctgtccttgtgagataaaagcttccatgggagccttccttcctaatcaaggtaggtagaccactggaaggtacatctggttttatattttgtcctgtagaagtcagatttcagcccagttgtgtaggagtgaggatgagcttatgctcttatcagagctttgagtacagagacatttgatctgggaatttcagccagcctcttcaaccccagaattcagaggttcaatcagaacagacattagcttaagttttcccatcagttgtctatcattaaactggcaaaatctagataattagaaaatatgacagagatgatccagacagagatgttcaggtttttccttgtgtaattcaaaaagtctcgtggtggaacatctgacccttttcaagaggaaggatgaaaactctacataggaacacgatgtgaatggaagaaacctgtcattatgcaaatagtacggtattccgaacagacactaaaaatagctgtcatctcaaagaatccagtgcttgtgtcacagtatgagaaagtagatgctggggaacagcgtttaatgaatgaagcattccagccagccagtgatctctttggaccttgcattctccatcagattggatcacctcccaccctgaggccccccaagactttgaacagttcttcagtcatccttacagaaagataccctctccagacaaacgcagtatttatatacggtccattggatctctatgaagcaccagaattatcagtgaagaatatattaaatggctcacgggctactgtaaagcatatttctatcgcttgagagtaaaactgctagaaccagttcctgtttctacaacaaggtgttcctttagagtcaatgagaacacacaaaacctacaaattcatgcaggggacatcctgaagttcttgaaaaagaagaaacctgaagatgccttctgtgttgtgggaataacaatgattgatctttacccaagagacttgtggaattttgtctttggacaggcctctttgacagatggcactggtgaggtggattgatgatgaatcttctggcacacctggagcaactccagaacacagtcgtgaggataatgggaatttactgaaacccgtggaaggaagcctttaaggaatggaaagagtggataataaaatgcctgactgttctccaaaaataaggaccttcaaataggagtgattgaaataaatgactacttgcatgttatgctttcatttgggtggaatacttcatcagaataaactattgatcttgtgctgtgtcaaagtaacagactagaaccttctttcaagtacctgaattgaaatgaaactcattttgaataataaaaactctagaaactctttaaaaactcaaaa

SEQ ID NO: 329389 - DNA, 1178 bp, Homo sapiens
caggggcgtggcgcgggcgggtcgtgagtggggcggggcccagagagcgtgtgcgatggagcggcgcgtcgcgcggcgcgaaggggcgtggcgccagtgggcgtggcgtagtgcgaagagacgcggtgcgcacgcgcgtgagggatgtcgcggtctcgtggtggaacatctgacccttttcaagaggaaggatgaaaactctacataggaacacgatgtgaatggaagaaacctgtcattatgcaaatagtacggtattccgaacagacactaaaaatagctgtcatctcaaagaatccagtgcttgtgtcacagtatgagaaagtagatgctggggaacagcgtttaatgaatgaagcattccagccagccagtgatctctttggaccttgcattctccatcagattggatcacctcccaccctgaggccccccaagactttgaacagttcttcagtcatccttacagaaagataccctctccagacaaacgcagtatttatatacggtccattggatctctatgaagcaccagaattatcagtgaagaatatattaaatggctcacgggctactgtaaagcatatttctatcgcttgagagtaaaactgctagaaccagttcctgtttctacaacaaggtgttcctttagagtcaatgagaacacacaaaacctacaaattcatgcaggggacatcctgaagttcttgaaaaagaagaaacctgaagatgccttctgtgttgtgggaataacaatgattgatctttacccaagagacttgtggaattttgtctttggacaggcctctttgacagatggcactggtgaggtggattgatgatgaatcttctggcacacctggagcaactccagaacacagtcgtgaggataatgggaatttactgaaacccgtggaaggaagcctttaaggaatggaaagagtggataataaaatgcctgactgttctccaaaaataaggaccttcaaataggagtgattgaaataaatgactacttgcatgttatgctttcatttgggtggaatacttcatcagaataaactattgatcttgtgctgtgtcaaagtaacagactagaaccttctttcaagtacctgaattgaaatgaaactcattttgaataataaaaactctagaaactctttaaaaactcaaaa

SEQ ID NO: 329390 - DNA, 1284 bp, Homo sapiens
ccatgttgcccaagctgttctcaaactcctggcctcaagcagtcctcctatcccaaagtgctgaaattacaggcatgagccaccacgcctggccaccactagtttttgtaatgggagcaggttccatatgagatggaggaatggatttcatgattgtctttgtaatttcttaggtccccaagaaattgattggacatgaggaaaccactctaagtgtgaccactctaaagcattagcagtcagtcatttcactctagggagaaatcagagctgtatatggagaataggtaaagtccccaatatggatatgtatttttatatttgactgcttgtatttttttgttagatgcaaatagtacggtattccgaacagacactaaaaatagctgtcatctcaaagaatccagtgcttgtgtcacagtatgagaaagtagatgctggggaacagcgtttaatgaatgaagcattccagccagccagtgatctctttggaccttgcattctccatcagattggatcacctcccaccctgaggccccccaagactttgaacagttcttcagtcatccttacagaaagataccctctccagacaaacgcagtatttatatacggtccattggatctctatgaagcaccagaattatcagtgaagaatatattaaatggctcacgggctactgtaaagcatatttctatcgcttgagagtaaaactgctagaaccagttcctgtttctacaacaaggtgttcctttagagtcaatgagaacacacaaaacctacaaattcatgcaggggacatcctgaagttcttgaaaaagaagaaacctgaagatgccttctgtgttgtgggaataacaatgattgatctttacccaagagacttgtggaattttgtctttggacaggcctctttgacagatggcactggtgaggtggattgatgatgaatcttctggcacacctggagcaactccagaacacagtcgtgaggataatgggaatttactgaaacccgtggaaggaagcctttaaggaatggaaagagtggataataaaatgcctgactgttctccaaaaataaggaccttcaaataggagtgattgaaataaatgactacttgcatgttatgctttcatttgggtggaatacttcatcagaataaactattgatcttgtgctgtgtcaaagtaacagactagaaccttctttcaagtacctgaattgaaatgaaactcattttgaataataaaaactctagaaactctttaaaaactcaaaa

SEQ ID NO: 329391 - DNA, 1521 bp, Homo sapiens
caggggcgtggcgcgggcgggtcgtgagtggggcggggcccagagagcgtgtgcgatggagcggcgcgtcgcgcggcgcgaaggggcgtggcgccagtgggcgtggcgtagtgcgaagagacgcggtgcgcacgcgcgtgagggatgtcgcggggatgtcgcgggtgagtggtgtcgaggcctgttgggtcagggcggttcgcaggtgctgtcagagctgggcggggcagccgggtcgtagaggcgggcgccagtcgcggtcggtggagagggatgaggatgtaggagggacggacgtggcggaagccgcggggactgcgggggcggagtgcctctggggagccaggaggcctttccagaggctcctgggggaagaagaggcgaagcgagagtccccggggaagccctactccacccccagccggagcctgggttgtgcctgcacggaccagagcccacagtgcgagttgctgtaggcaaccagctagggtggccaacttctcccggttggcccgagatgttctggttttgggaccacagcgtcccaggcctccagcccaccacagtgaccatattgtgcgccccctgcccatcttctcccgcagcttccctagattaggcttgggaggcaaggggaggcctcctgacttttctcactgccttcgttaatataaagatgaaggcacactccacaacttccttctggccaggcccagacatgtctgtccttgtgagataaaagcttccatgggagccttccttcctaatcaagtctcgtggtggaacatctgacccttttcaagaggaaggatgaaaactctacataggaacacgatgtgaatggaagaaacctgtcattgatctctatgaagcaccagaattatcagtgaagaatatattaaatggctcacgggctactgtaaagcatatttctatcgcttgagagtaaaactgctagaaccagttcctgtttctacaacaaggtgttcctttagagtcaatgagaacacacaaaacctacaaattcatgcaggggacatcctgaagttcttgaaaaagaagaaacctgaagatgccttctgtgttgtgggaataacaatgattgatctttacccaagagacttgtggaattttgtctttggacaggcctctttgacagatggcactggtgaggtggattgatgatgaatcttctggcacacctggagcaactccagaacacagtcgtgaggataatgggaatttactgaaacccgtggaaggaagcctttaaggaatggaaagagtggataataaaatgcctgactgttctccaaaaataaggaccttcaaataggagtgattgaaataaatgactacttgcatgttatgctttcatttgggtggaatacttcatcagaataaactattgatcttgtgctgtgtcaaagtaacagactagaaccttctttcaagtacctgaattgaaatgaaactcattttgaataataaaaactctagaaactctttaaaaactcaaaa

SEQ ID NO: 329392 - DNA, 1203 bp, Homo sapiens
caggggcgtggcgcgggcgggtcgtgagtggggcggggcccagagagcgtgtgcgatggagcggcgcgtcgcgcggcgcgaaggggcgtggcgccagtgggcgtggcgtagtgcgaagagacgcggtgcgcacgcgcgtgagggatgtcgcggtctcgtggtggaacatctgacccttttcaagaggaaggatgaaaactctacataggaacacgatgtgaatggaagaaacctgtcattatgcaaatagtacggtattccgaacagacactaaaaatagctgtcatctcaaagaatccagtgcttgtgtcacagtatgagaaagtagatgctggggaacagcgtttaatgaatgaagcattcccacaattttttccccccccaaaaggagccagccagtgatctctttggaccttgcattctccatcagattggatcacctcccaccctgaggccccccaagactttgaacagttcttcagtcatccttacagaaagataccctctccagacaaacgcagtatttatatacggtccattggatctctatgaagcaccagaattatcagtgaagaatatattaaatggctcacgggctactgtaaagcatatttctatcgcttgagagtaaaactgctagaaccagttcctgtttctacaacaaggtgttcctttagagtcaatgagaacacacaaaacctacaaattcatgcaggggacatcctgaagttcttgaaaaagaagaaacctgaagatgccttctgtgttgtgggaataacaatgattgatctttacccaagagacttgtggaattttgtctttggacaggcctctttgacagatggcactggtgaggtggattgatgatgaatcttctggcacacctggagcaactccagaacacagtcgtgaggataatgggaatttactgaaacccgtggaaggaagcctttaaggaatggaaagagtggataataaaatgcctgactgttctccaaaaataaggaccttcaaataggagtgattgaaataaatgactacttgcatgttatgctttcatttgggtggaatacttcatcagaataaactattgatcttgtgctgtgtcaaagtaacagactagaaccttctttcaagtacctgaattgaaatgaaactcattttgaataataaaaactctagaaactctttaaaaactcaaaa

SEQ ID NO: 329393 - DNA, 1953 bp, Homo sapiens
caggggcgtggcgcgggcgggtcgtgagtggggcggggcccagagagcgtgtgcgatggagcggcgcgtcgcgcggcgcgaaggggcgtggcgccagtgggcgtggcgtagtgcgaagagacgcggtgcgcacgcgcgtgagggatgtcgcggggatgtcgcgggtgagtggtgtcgaggcctgttgggtcagggcggttcgcaggtgctgtcagagctgggcggggcagccgggtcgtagaggcgggcgccagtcgcggtcggtggagagggatgaggatgtaggagggacggacgtggcggaagccgcggggactgcgggggcggagtgcctctggggagccaggaggcctttccagaggctcctgggggaagaagaggcgaagcgagagtccccggggaagccctactccacccccagccggagcctgggttgtgcctgcacggaccagagcccacagtgcgagttgctgtaggcaaccagctagggtggccaacttctcccggttggcccgagatgttctggttttgggaccacagcgtcccaggcctccagcccaccacagtgaccatattgtgcgccccctgcccatcttctcccgcagcttccctagattaggcttgggaggcaaggggaggcctcctgacttttctcactgccttcgttaatataaagatgaaggcacactccacaacttccttctggccaggcccagacatgtctgtccttgtgagataaaagcttccatgggagccttccttcctaatcaaggtaggtagaccactggaaggtacatctggttttatattttgtcctgtagaagtcagatttcagcccagttgtgtaggagtgaggatgagcttatgctcttatcagagctttgagtacagagacatttgatctgggaatttcagccagcctcttcaaccccagaattcagaggttcaatcagaacagacattagcttaagttttcccatcagttgtctatcattaaactggcaaaatctagataattagaaaatatgacagagatgatccagacagagatgttcaggtttttccttgtgtaattcaaaaagtctcgtggtggaacatctgacccttttcaagaggaaggatgaaaactctacataggaacacgatgtgaatggaagaaacctgtcattatgcaaatagtacggtattccgaacagacactaaaaatagctgtcatctcaaagaatccagtgcttgtgtcacagtatgagaaagtagatgctggggaacagcgtttaatgaatgaagcattccagccagccagtgatctctttggaccttgcattctccatcagattggatcacctcccaccctgaggccccccaagactttgaacagttcttcagtcatccttacagaaagataccctctccagacaaacgcagtatttatatacggtccattggatctctatgaagcaccagaattatcagtgaagaatatattaaatggctcacgggctactgtaaagcatatttctatcgcttgagagtaaaactgctagaaccagttcctgtttctacaacaaggtgttcctttagagtcaatgagaacacacaaaacctacaaattcatgcaggggacatcctgaagttcttgaaaaagaagaaacctgaagatgccttctgtgttgtgggaataacaatgattgatctttacccaagagacttgtggaattttgtctttggacaggcctctttgacagatggcactggtgaggtggattgatgatgaatcttctggcacacctggagcaactccagaacacagtcgtgaggataatgggaatttactgaaacccgtggaaggaagcctttaaggaatggaaagagtggataataaaatgcctgactgttctccaaaaataaggaccttcaaataggagtgattgaaataaatgactacttgcatgt

SEQ ID NO: 329394 - DNA, 1677 bp, Homo sapiens
caggggcgtggcgcgggcgggtcgtgagtggggcggggcccagagagcgtgtgcgatggagcggcgcgtcgcgcggcgcgaaggggcgtggcgccagtgggcgtggcgtagtgcgaagagacgcggtgcgcacgcgcgtgagggatgtcgcggggatgtcgcgggtgagtggtgtcgaggcctgttgggtcagggcggttcgcaggtgctgtcagagctgggcggggcagccgggtcgtagaggcgggcgccagtcgcggtcggtggagagggatgaggatgtaggagggacggacgtggcggaagccgcggggactgcgggggcggagtgcctctggggagccaggaggcctttccagaggctcctgggggaagaagaggcgaagcgagagtccccggggaagccctactccacccccagccggagcctgggttgtgcctgcacggaccagagcccacagtgcgagttgctgtaggcaaccagctagggtggccaacttctcccggttggcccgagatgttctggttttgggaccacagcgtcccaggcctccagcccaccacagtgaccatattgtgcgccccctgcccatcttctcccgcagcttccctagattaggcttgggaggcaaggggaggcctcctgacttttctcactgccttcgttaatataaagatgaaggcacactccacaacttccttctggccaggcccagacatgtctgtccttgtgagataaaagcttccatgggagccttccttcctaatcaaggtaggtagaccactggaaggtacatctggttttatattttgtcctgtagaagtcagatttcagcccagttgtgtaggagtgaggatgagcttatgctcttatcagagctttgagtacagagacatttgatctgggaatttcagccagcctcttcaaccccagaattcagaggttcaatcagaacagacattagcttaagttttcccatcagttgtctatcattaaactggcaaaatctagataattagaaaatatgacagagatgatccagacagagatgttcaggtttttccttgtgtaattcaaaaagtctcgtggtggaacatctgacccttttcaagaggaaggatgaaaactctacataggaacacgatgtgaatggaagaaacctgtcattgatctctatgaagcaccagaattatcagtgaagaatatattaaatggctcacgggctactgtaaagcatatttctatcgcttgagagtaaaactgctagaaccagttcctgtttctacaacaaggtgttcctttagagtcaatgagaacacacaaaacctacaaattcatgcaggggacatcctgaagttcttgaaaaagaagaaacctgaagatgccttctgtgttgtgggaataacaatgattgatctttacccaagagacttgtggaattttgtctttggacaggcctctttgacagatggcactggtgaggtggattgatgatgaatcttctggcacacctggagcaactccagaacacagtcgtgaggataatgggaatttactgaaacccgtggaaggaagcctttaaggaatggaaagagtggataataaaatgcctgactgttctccaaaaataaggaccttcaaataggagtgattgaaataaatgactacttgcatgt

SEQ ID NO: 329395 - DNA, 384 bp, Homo sapiens
tctatcgcctaggctggagtgctgtaccttgatctcagctcactgcaacctctacctcccaggttcaagcgattctcctgcctcagcccccagagtagctggggctacaggcatgcaccaccatgcctggctaacttctttggtatttttagtagagacagggtttcaccatgttggccaggctggtctcgaactcctaacctcaagtgatccgcccgtctcggcctcccaaagtgctgggattacaggcatgagccaccgtgcccagccagaatggctattactaaaagtaaaaaaataacagatgctgatgaagctatagggaaaaggaaacacttataccctgttggtagaaatgtaaattagtttatccactgtggaacg

SEQ ID NO: 329396 - DNA, 326 bp, Homo sapiens
tagattataatttcatatgggaaagaactactccttttatttctttggatctctgtcctctaagagtttagaacaaaacctctaaaatagtcaacaaatatgtgttgaggagagaaagaagctgggagaaacgctgaaaagatactgacagtgggttataaaatagcagaaggtctctgcaaggaacacagcaggacagaaatgtagaagtattgctctaaaaactcaacagaaaaaaaaaagctacctaaaaaatgagctattaaaagcaggagatcaaaaccaagtgagctatgactgaaaggtaatttacagcaagtctattt

SEQ ID NO: 329397 - DNA, 222 bp, Homo sapiens
ccatcttgttctgcacagaagtctgactacctagcgagaagacaatctacatctcacgagaaactgaatgaaagtagatcaaactgaagctaacaaaggtaactttctaaaatgggtatttaacatgtagataattttttccttagaagtatttcaggataaacatacaaatgaatatcacaaccctgaattaggttcttctcaaatgctcagattttttaa

SEQ ID NO: 329398 - DNA, 546 bp, Homo sapiens
ctgcaatatatatctgcacacaccagattcctccatacaagcatgcccacaaagggtaataaaatgacacgtgtacacgctggatacaccaatgggaggctccccacaatgcctcacatggggctaagatgtactgccttactattactcactatgctctttcttccttttttttttttttttttggctaattctctgctctgtagtataacgatatggttgaaagtatcaaaaaggcctgcatgatatccacagagtaatgcaaacattccaaaatgtgaaaacaatgtgaaaccgttctctggatctaagcatattgataagggatactcaacctgtaatataacttccaggaagtatccttaaaggaagtgagatgtgtccttctctttctccttctgatgattgcaatgtatgtgaaaaagctgaagctagtagctctcttagaccctaaagtgtctttggaaaataatagaatctgaacacagtggggaaacgtgacaccacggcaaaccacgtgagtcctaaactgactacttctggaat

SEQ ID NO: 329399 - DNA, 233 bp, Homo sapiens
tgttgggtcttgctgctagggttacctgcaaatgagcattcatgcttatgtatttccttctcaacacaagttggaaaagcaagggcacatcactttggggagccataaaatattttaaaactacacactcagtattaaattaattgatgcttcacttttgtgttagtgcactatttcctctctttgtcctatagacgttcttgctatatagcatctaagacactccctaaaac

SEQ ID NO: 329400 - DNA, 116 bp, Homo sapiens
atatcatctattctacataaattttcatgcagcactgcaaagatttctcttagtaccctaagtaatcttaacaagacttttttctgagacagggtcttgctctgtcacccaggctg

SEQ ID NO: 329401 - DNA, 380 bp, Homo sapiens
tttcacaactttttcatcagcctaaaaggaaatccatacccatattaagcagtcagtcctcattcccctgtccctgacatccactaatctactttctgtctctatggatttgcctattctgaatatttcatataaatggaatcatatatgactttttgtgtttgacttctttcacttagcataattttttcaaggttcatccatgtatcagtatttcatttcttttgatggctgaataatattccattgtagagatgttccacattatgtttatccattcatcagttgatagacatctggctggtttctaccttttggctatggtgaacagcgctgctataaacgttcatgtgcaagtttttgtttgaacacttgttttc

SEQ ID NO: 329402 - DNA, 480 bp, Homo sapiens
ctaagaaataaatttcttttatttataaattatccagtctcaggtgtttaaatatagcaacagaaaacagactaagagagcgtttcatgtttctcaggaccatggaaccttttccctccatcaaactgtctaagaggcctgctgtttccagaaatatactttagaaagcaccatataaaatactaaatgggcctagcagcacagtagctcatgcctgtaatcccattgccttgggaggccaaggcaggaagatcacttgagaacagagttcaagaccagtctgggcaacacagtgaaaccccatctctacaaaagatacaaaaattagcagatgtggtagcgtgtgcctatggtcccagctactcagaaggctgaggtgggaggctcccttgagccaggaggtcaaggctgcagtgagctgtgatcataccactgcactccagcctgggcaaaagagcgagaccctgtctccaaacataa

SEQ ID NO: 329403 - DNA, 5941 bp, Homo sapiens
tttctagctggaaagttgcgcgccaggcagcggggggcggagagaggagcccagactggcccccacctcccgcttcctgcccggccgccgcccattggccggaggaatccccaggaatgcgagcgcccctttaaaagcgcgcggctcctccgccttgccagccgctgcgcccgagctggcctgcgagttcagggctcctgtcgctctccaggagcaacctctactccggacgcacaggcattccccgcgcccctccagccctcgccgccctcgccaccgctcccggccgccgcgctccggtacacacaggatccctgctgggcaccaacagctccaccatggggctggcctggggactaggcgtcctgttcctgatgcatgtgtgtggcaccaaccgcattccagagtctggcggagacaacagcgtgtttgacatctttgaactcaccggggccgcccgcaaggggtctgggcgccgactggtgaagggccccgacccttccagcccagctttccgcatcgaggatgccaacctgatcccccctgtgcctgatgacaagttccaagacctggtggatgctgtgcgggcagaaaagggtttcctccttctggcatccctgaggcagatgaagaagacccggggcacgctgctggccctggagcggaaagaccactctggccaggtcttcagcgtggtgtccaatggcaaggcgggcaccctggacctcagcctgaccgtccaaggaaagcagcacgtggtgtctgtggaagaagctctcctggcaaccggccagtggaagagcatcaccctgtttgtgcaggaagacagggcccagctgtacatcgactgtgaaaagatggagaatgctgagttggacgtccccatccaaagcgtcttcaccagagacctggccagcatcgccagactccgcatcgcaaaggggggcgtcaatgacaatttccagggggtgctgcagaatgtgaggtttgtctttggaaccacaccagaagacatcctcaggaacaaaggctgctccagctctaccagtgtcctcctcacccttgacaacaacgtggtgaatggttccagccctgccatccgcactaactacattggccacaagacaaaggacttgcaagccatctgcggcatctcctgtgatgagctgtccagcatggtcctggaactcaggggcctgcgcaccattgtgaccacgctgcaggacagcatccgcaaagtgactgaagagaacaaagagttggccaatgagctgaggcggcctcccctatgctatcacaacggagttcagtacagaaataacgaggaatggactgttgatagctgcactgagtgtcactgtcagaactcagttaccatctgcaaaaaggtgtcctgccccatcatgccctgctccaatgccacagttcctgatggagaatgctgtcctcgctgttggcccagcgactctgcggacgatggctggtctccatggtccgagtggacctcctgttctacgagctgtggcaatggaattcagcagcgcggccgctcctgcgatagcctcaacaaccgatgtgagggctcctcggtccagacacggacctgccacattcaggagtgtgacaagagatttaaacaggatggtggctggagccactggtccccgtggtcatcttgttctgtgacatgtggtgatggtgtgatcacaaggatccggctctgcaactctcccagcccccagatgaacgggaaaccctgtgaaggcgaagcgcgggagaccaaagcctgcaagaaagacgcctgccccatcaatggaggctggggtccttggtcaccatgggacatctgttctgtcacctgtggaggaggggtacagaaacgtagtcgtctctgcaacaaccccacaccccagtttggaggcaaggactgcgttggtgatgtaacagaaaaccagatctgcaacaagcaggactgtccaattgatggatgcctgtccaatccctgctttgccggcgtgaagtgtactagctaccctgatggcagctggaaatgtggtgcttgtccccctggttacagtggaaatggcatccagtgcacagatgttgatgagtgcaaagaagtgcctgatgcctgcttcaaccacaatggagagcaccggtgtgagaacacggaccccggctacaactgcctgccctgccccccacgcttcaccggctcacagcccttcggccagggtgtcgaacatgccacggccaacaaacaggtgtgcaagccccgtaacccctgcacggatgggacccacgactgcaacaagaacgccaagtgcaactacctgggccactatagcgaccccatgtaccgctgcgagtgcaagcctggctacgctggcaatggcatcatctgcggggaggacacagacctggatggctggcccaatgagaacctggtgtgcgtggccaatgcgacttaccactgcaaaaaggataattgccccaaccttcccaactcagggcaggaagactatgacaaggatggaattggtgatgcctgtgatgatgacgatgacaatgataaaattccagatgacagggacaactgtccattccattacaacccagctcagtatgactatgacagagatgatgtgggagaccgctgtgacaactgtccctacaaccacaacccagatcaggcagacacagacaacaatggggaaggagacgcctgtgctgcagacattgatggagacggtatcctcaatgaacgggacaactgccagtacgtctacaatgtggaccagagagacactgatatggatggggttggagatcagtgtgacaattgccccttggaacacaatccggatcagctggactctgactcagaccgcattggagatacctgtgacaacaatcaggatattgatgaagatggccaccagaacaatctggacaactgtccctatgtgcccaatgccaaccaggctgaccatgacaaagatggcaagggagatgcctgtgaccacgatgatgacaacgatggcattcctgatgacaaggacaactgcagactcgtgcccaatcccgaccagaaggactctgacggcgatggtcgaggtgatgcctgcaaagatgattttgaccatgacagtgtgccagacatcgatgacatctgtcctgagaatgttgacatcagtgagaccgatttccgccgattccagatgattcctctggaccccaaagggacatcccaaaatgaccctaactgggttgtacgccatcagggtaaagaactcgtccagactgtcaactgtgatcctggactcgctgtaggttatgatgagtttaatgctgtggacttcagtggcaccttcttcatcaacaccgaaagggacgatgactatgctggatttgtctttggctaccagtccagcagccgcttttatgttgtgatgtggaagcaagtcacccagtcctactgggacaccaaccccacgagggctcagggatactcgggcctttctgtgaaagttgtaaactccaccacagggcctggcgagcacctgcggaacgccctgtggcacacaggaaacacccctggccaggtgcgcaccctgtggcatgaccctcgtcacataggctggaaagatttcaccgcctacagatggcgtctcagccacaggccaaagacgggtttcattagagtggtgatgtatgaagggaagaaaatcatggctgactcaggacccatctatgataaaacctatgctggtggtagactagggttgtttgtcttctctcaagaaatggtgttcttctctgacctgaaatacgaatgtagagatccctaatcatcaaattgttgattgaaagactgatcataaaccaatgctggtattgcaccttctggaactatgggcttgagaaaacccccaggatcacttctccttggcttccttcttttctgtgcttgcatcagtgtggactcctagaacgtgcgacctgcctcaagaaaatgcagttttcaaaaacagactcagcattcagcctccaatgaataagacatcttccaagcatataaacaattgctttggtttccttttgaaaaagcatctacttgcttcagttgggaaggtgcccattccactctgcctttgtcacagagcagggtgctattgtgaggccatctctgagcagtggactcaaaagcattttcaggcatgtcagagaagggaggactcactagaattagcaaacaaaaccaccctgacatcctccttcaggaacacggggagcagaggccaaagcactaaggggagggcgcatacccgagacgattgtatgaagaaaatatggaggaactgttacatgttcggtactaagtcattttcaggggattgaaagactattgctggatttcatgatgctgactggcgttagctgattaacccatgtaaataggcacttaaatagaagcaggaaagggagacaaagactggcttctggacttcctccctgatccccacccttactcatcacctgcagtggccagaattagggaatcagaatcaaaccagtgtaaggcagtgctggctgccattgcctggtcacattgaaattggtggcttcattctagatgtagcttgtgcagatgtagcaggaaaataggaaaacctaccatctcagtgagcaccagctgcctcccaaaggaggggcagccgtgcttatatttttatggttacaatggcacaaaattattatcaacctaactaaaacattccttttctcttttttcctgaattatcatggagttttctaattctctcttttggaatgtagattttttttaaatgctttacgatgtaaaatatttattttttacttattctggaagatctggctgaaggattattcatggaacaggaagaagcgtaaagactatccatgtcatctttgttgagagtcttcgtgactgtaagattgtaaatacagattatttattaactctgttctgcctggaaatttaggcttcatacggaaagtgtttgagagcaagtagttgacatttatcagcaaatctcttgcaagaacagcacaaggaaaatcagtctaataagctgctctgccccttgtgctcagagtggatgttatgggattctttttttctctgttttatcttttcaagtggaattagttggttatccatttgcaaatgttttaaattgcaaagaaagccatgaggtcttcaatactgttttaccccatcccttgtgcatatttccagggagaaggaaagcatatacacttttttctttcatttttccaaaagagaaaaaaatgacaaaaggtgaaacttacatacaaatattacctcatttgttgtgtgactgagtaaagaatttttggatcaagcggaaagagtttaagtgtctaacaaacttaaagctactgtagtacctaaaaagtcagtgttgtacatagcataaaaactctgcagagaagtattcccaataaggaaatagcattgaaatgttaaatacaatttctgaaagttatgttttttttctatcatctggtataccattgctttatttttataaattattttctcattgccattggaatagatatctcagattgtgtagatatgctatttaaataatttatcaggaaatactgcctgtagagttagtatttctatttttatataatgtttgcacactgaattgaagaattgttggttttttcttttttttggttttgttttttttttttttttttttgcttttgacctcccatttttactatttgccaatacctttttctaggaatgtgcttttttttgtacacatttttatccattttacattctaaagcagtgtaagttgtatattactgtttcttatgtacaaggaacaacaataaatcatatggaaattta

SEQ ID NO: 329404 - DNA, 374 bp, Homo sapiens
  misc_feature (110)..(111): n is a, c, g, or t
  misc_feature (355)..(355): n is a, c, g, or t
gaatcacttgaacctgggaggtggaggttgccgcgagcctagatcacaccactgcactccagcctgggcaacagagagacttggtctcagtaaaaaaaaaaaaaaaaaannaggagcgccgcgaatttagtagtagtagggcccgcctactactactaaattcgcggccgcgtcgacggagaaggaaagcatatacacttttttctttcatttttccaaaagagaaaaaaatgacaaaaggtgaaacttacatacaaatattacctcatttgttgtgtgactgagtaaagaatttttaggtactacagtagctttaagtttgttagacacttaaactctttccgcttgatccaanatttctttactcagtcaca

SEQ ID NO: 329405 - DNA, 120 bp, Homo sapiens
gtgtagattgaagaaatgaaaccaaggctcaaagcatttgacaggatgaagggaccaaatgccaacttagacaagatagtgacatttctgacaccagtaataataatagcactttagaat

SEQ ID NO: 329406 - DNA, 656 bp, Homo sapiens
agtactctatccaaataccagcaaagcatgacttgtgttcacaacatctataaagctagagcattacacaaattctgtatgtatatcccccaagaaaagttttattttcttgtcttcccataaaaaaaatatgctgttactgagccaaattctgttctttttctatttggaattccaggtacactccctcgtgcatgagctcagcatgaggaaggcaactgaagcagtgatatatatcttctctttcctaggataattgccccaaccttcccaactcagggcaggaagactatgacaaggatggaattggtgatgcctgtgatgatgacgatgacaatgataaaattccagatgacagggtataaacagttttctatccctttttcatcttttcagttcagcaacagcctgaaacactttgggattcaaggaaattacatggctatagcaaaaaatataccaaatcaatacacaggataattagaaattattcattgtgttccagtagtttaaggatgtagatgttgccaagagaatttttaaatgagggttttgtttttcatcagaactgtttttctctgtacttgagaaattataatgcataaacatatgccactttgttccctagactcatttcaaagtcacatcgtggagtg

SEQ ID NO: 329407 - DNA, 7650 bp, Homo sapiens
tttctagctggaaagttgcgcgccaggcagcggggggcggagagaggagcccagactggcccccacctcccgcttcctgcccggccgccgcccattggccggaggaatccccaggaatgcgagcgcccctttaaaagcgcgcggctcctccgccttgccagccgctgcgcccgagctggcctgcgagttcagggctcctgtcgctctccaggagcaacctctactccggacgcacaggcattccccgcgcccctccagccctcgccgccctcgccaccgctcccggccgccgcgctccggtacacacaggatccctgctgggcaccaacagctccaccatggggctggcctggggactaggcgtcctgttcctgatgcatgtgtgtggcaccaaccgcattccagagtctggcggagacaacagcgtgtttgacatctttgaactcaccggggccgcccgcaaggggtctgggcgccgactggtgaagggccccgacccttccagcccagctttccgcatcgaggatgccaacctgatcccccctgtgcctgatgacaagttccaagacctggtggatgctgtgcgggcagaaaagggtttcctccttctggcatccctgaggcagatgaagaagacccggggcacgctgctggccctggagcggaaagaccactctggccaggtcttcagcgtggtgtccaatggcaaggcgggcaccctggacctcagcctgaccgtccaaggaaagcagcacgtggtgtctgtggaagaagctctcctggcaaccggccagtggaagagcatcaccctgtttgtgcaggaagacagggcccagctgtacatcgactgtgaaaagatggagaatgctgagttggacgtccccatccaaagcgtcttcaccagagacctggccagcatcgccagactccgcatcgcaaaggggggcgtcaatgacaatttccagggggtgctgcagaatgtgaggtttgtctttggaaccacaccagaagacatcctcaggaacaaaggctgctccagctctaccagtgtcctcctcacccttgacaacaacgtggtgaatggttccagccctgccatccgcactaactacattggccacaagacaaaggacttgcaagccatctgcggcatctcctgtgatgagctgtccagcatggtcctggaactcaggggcctgcgcaccattgtgaccacgctgcaggacagcatccgcaaagtgactgaagagaacaaagagttggccaatgagctgaggcggcctcccctatgctatcacaacggagttcagtacagaaataacgaggaatggactgttgatagctgcactgagtgtcactgtcagaactcagttaccatctgcaaaaaggtgtcctgccccatcatgccctgctccaatgccacagttcctgatggagaatgctgtcctcgctgttggcccagcgactctgcggacgatggctggtctccatggtccgagtggacctcctgttctacgagctgtggcaatggaattcagcagcgcggccgctcctgcgatagcctcaacaaccgatgtgagggctcctcggtccagacacggacctgccacattcaggagtgtgacaagagatttaaacaggatggtggctggagccactggtccccgtggtcatcttgttctgtgacatgtggtgatggtgtgatcacaaggatccggctctgcaactctcccagcccccagatgaacgggaaaccctgtgaaggcgaagcgcgggagaccaaagcctgcaagaaagacgcctgccccatcaatggaggctggggtccttggtcaccatgggacatctgttctgtcacctgtggaggaggggtacagaaacgtagtcgtctctgcaacaaccccacaccccagtttggaggcaaggactgcgttggtgatgtaacagaaaaccagatctgcaacaagcaggactgtccaattgatggatgcctgtccaatccctgctttgccggcgtgaagtgtactagctaccctgatggcagctggaaatgtggtgcttgtccccctggttacagtggaaatggcatccagtgcacagatgttgatgagtgcaaagaagtgcctgatgcctgcttcaaccacaatggagagcaccggtgtgagaacacggaccccggctacaactgcctgccctgccccccacgcttcaccggctcacagcccttcggccagggtgtcgaacatgccacggccaacaaacaggtgtgcaagccccgtaacccctgcacggatgggacccacgactgcaacaagaacgccaagtgcaactacctgggccactatagcgaccccatgtaccgctgcgagtgcaagcctggctacgctggcaatggcatcatctgcggggaggacacagacctggatggctggcccaatgagaacctggtgtgcgtggccaatgcgacttaccactgcaaaaaggataattgccccaaccttcccaactcagggcaggaagactatgacaaggatggaattggtgatgcctgtgatgatgacgatgacaatgataaaattccagatgacagggacaactgtccattccattacaacccagctcagtatgactatgacagagatgatgtgggagaccgctgtgacaactgtccctacaaccacaacccagatcaggcagacacagacaacaatggggaaggagacgcctgtgctgcagacattgatggagacggtatcctcaatgaacgggacaactgccagtacgtctacaatgtggaccagagagacactgatatggatggggttggagatcagtgtgacaattgccccttggaacacaatccggatcagctggactctgactcagaccgcattggagatacctgtgacaacaatcaggatattgatgaagatggccaccagaacaatctggacaactgtccctatgtgcccaatgccaaccaggctgaccatgacaaagatggcaagggagatgcctgtgaccacgatgatgacaacgatggcattcctgatgacaaggacaactgcagactcgtgcccaatcccgaccagaaggactctgacggcgatggtcgaggtgatgcctgcaaagatgattttgaccatgacagtgtgccagacatcgatgacatctgtcctgagaatgttgacatcagtgagaccgatttccgccgattccagatgattcctctggaccccaaagggacatcccaaaatgaccctaactgggttgtacgccatcagggtaaagaactcgtccagactgtcaactgtgatcctggactcgctgtaggttatgatgagtttaatgctgtggacttcagtggcaccttcttcatcaacaccgaaagggacgatgactatgctggatttgtctttggctaccagtccagcagccgcttttatgttgtgatgtggaagcaagtcacccagtcctactgggacaccaaccccacgagggctcagggatactcgggcctttctgtgaaagttgtaaactccaccacagggcctggcgagcacctgcggaacgccctgtggcacacaggaaacacccctggccaggtgcgcaccctgtggcatgaccctcgtcacataggctggaaagatttcaccgcctacagatggcgtctcagccacaggccaaagacgggtttcattagagtggtgatgtatgaagggaagaaaatcatggctgactcaggacccatctatgataaaacctatgctggtggtagactagggttgtttgtcttctctcaagaaatggtgttcttctctgacctgaaatacgaatgtagagatccctaatcatcaaattgttgattgaaagactgatcataaaccaatgctggtattgcaccttctggaactatgggcttgagaaaacccccaggatcacttctccttggcttccttcttttctgtgcttgcatcagtgtggactcctagaacgtgcgacctgcctcaagaaaatgcagttttcaaaaacagactcagcattcagcctccaatgaataagacatcttccaagcatataaacaattgctttggtttccttttgaaaaagcatctacttgcttcagttgggaaggtgcccattccactctgcctttgtcacagagcagggtgctattgtgaggccatctctgagcagtggactcaaaagcattttcaggcatgtcagagaagggaggactcactagaattagcaaacaaaaccaccctgacatcctccttcaggaacacggggagcagaggccaaagcactaaggggagggcgcatacccgagacgattgtatgaagaaaatatggaggaactgttacatgttcggtactaagtcattttcaggggattgaaagactattgctggatttcatgatgctgactggcgttagctgattaacccatgtaaataggcacttaaatagaagcaggaaagggagacaaagactggcttctggacttcctccctgatccccacccttactcatcacctgcagtggccagaattagggaatcagaatcaaaccagtgtaaggcagtgctggctgccattgcctggtcacattgaaattggtggcttcattctagatgtagcttgtgcagatgtagcaggaaaataggaaaacctaccatctcagtgagcaccagctgcctcccaaaggaggggcagccgtgcttatatttttatggttacaatggcacaaaattattatcaacctaactaaaacattccttttctcttttttcctgaattatcatggagttttctaattctctcttttggaatgtagattttttttaaatgctttacgatgtaaaatatttattttttacttattctggaagatctggctgaaggattattcatggaacaggaagaagcgtaaagactatccatgtcatctttgttgagagtcttcgtgactgtaagattgtaaatacagattatttattaactctgttctgcctggaaatttaggcttcatacggaaagtgtttgagagcaagtagttgacatttatcagcaaatctcttgcaagaacagcacaaggaaaatcagtctaataagctgctctgccccttgtgctcagagtggatgttatgggattctttttttctctgttttatcttttcaagtggaattagttggttatccatttgcaaatgttttaaattgcaaagaaagccatgaggtcttcaatactgttttaccccatcccttgtgcatatttccagggagaaggaaagcatatacacttttttctttcatttttccaaaagagaaaaaaatgacaaaaggtgaaacttacatacaaatattacctcatttgttgtgtgactgagtaaagaatttttggatcaagcggaaagagtttaagtgtctaacaaacttaaagctactgtagtacctaaaaagtcagtgttgtacatagcataaaaactctgcagagaagtattcccaataaggaaatagcattgaaatgttaaatacaatttctgaaagttatgttttttttctatcatctggtataccattgctttatttttataaattattttctcattgccattggaatagatatctcagattgtgtagatatgctatttaaataatttatcaggaaatactgcctgtagagttagtatttctatttttatataatgtttgcacactgaattgaagaattgttggttttttcttttttttggttttgttttttttttttttttttttgcttttgacctcccatttttactatttgccaatacctttttctaggaatgtgcttttttttgtacacatttttatccattttacattctaaagcagtgtaagttgtatattactgtttcttatgtacaaggaacaacaataaatcatatggaaatttatatttatacttactgtatccatgcttatttgttctctactggctttatgtcatgaagtatatgcgtaaataccattcataaatcaatatagcatatacaaaaataaattacagtaagtcatagcaacattcacagtttgtatgtgattgagaaagactgagttgctcaggcctaggcttagaatttgctgcgtttgtggaataaaagaacaaaatgatacattagcctgccatatcaaaaacatataaaagagaaattatccctaagtcaagggcccccataagaataaaatttcttattaaggtcattagatgtcattgaatccttttcaaagtgcagtatgaaaacaaagggaaaaacactgaagcacacgcaactctcacagcgacattttctgacccacgaatgatgccttgggtgggcaacacgattgcatgttgtggagacacttcggaagtaaatgtggatgagggaggagctgtccttgcaatgttgagccaagcattacagatacctcctcttgaagaaggaataataagtttaatcaaaaaagaagactaaaaaatgtaaaatttggaaggaatccataaatgcgtgtgtgtctaaatacaaattatcatgtgaagaaaaggcccaagtgtaccaataagcagaccttgatttttggatgggctaattatgaatgtggaatactgaccagttaatttccagttttaatgaaaacagatcaaagaagaaattttatgagtaggttaaaggtctggctttgaggtctattaaacactagaaaggactggctgggtgagataaaatcttccttgttgattttcactctcattctataaatactcatctttctgagtagccatgatcacatacaaatgtaaattgccaaatcattttatagtaccaaggtgaagaagcaggaactagaaagtgttgataatagctgtggagttaggaaaactgatgtgaaggaaataattctttgaaatggcaaagaattaaataccatcattcattatcagaagagttcaacgtttgaagtgctgggagataattctaattcattcttggatagtgaagcaaaactgattgaaaataccaagataagacagaaaaagtgactggaaagaggagcttttcttccaggcatgttccagtttcaccctaagactgaccttcaaataatcaggttgtactgaaataaaggacttgttaaaaattaaaattatgtcatcgagatgatagcttttttcctcctccaacagtttattgtcatgtgttgtgggagagctcgagtgaagagcaataaactccaggtcttataagaatgtacatacaataaaggtggtgccagcagtttttttttttctaaagagtcacatgtagaaaagcctccagtattaagctcctgaattcattccttaaataaattggctctctctctcttctataatttctttttctttttatttttgagatgaagtcttgctctgtcgcccaggctggagtgcagtgacacaatctcggctcactgcaacctctgcctccccggttcaagcaattctccctcctgcctcagcctcccaagtagctgggactacaagcgcccgccaccaagcctggctaattctgtatttttagtaaagacggggtttcaccttgttccggacaaacactaagccctaaagggaaatccaaaataa

SEQ ID NO: 329408 - DNA, 6650 bp, Homo sapiens
tttctagctggaaagttgcgcgccaggcagcggggggcggagagaggagcccagactggcccccacctcccgcttcctgcccggccgccgcccattggccggaggaatccccaggaatgcgagcgcccctttaaaagcgcgcggctcctccgccttgccagccgctgcgcccgagctggcctgcgagttcagggctcctgtcgctctccaggagcaacctctactccggacgcacaggcattccccgcgcccctccagccctcgccgccctcgccaccgctcccggccgccgcgctccggtacacacaggatccctgctgggcaccaacagctccaccatggggctggcctggggactaggcgtcctgttcctgatgcatgtgtgtggcaccaaccgcattccagagtctggcggagacaacagcgtgtttgacatctttgaactcaccggggccgcccgcaaggggtctgggcgccgactggtgaagggccccgacccttccagcccagctttccgcatcgaggatgccaacctgatcccccctgtgcctgatgacaagttccaagacctggtggatgctgtgcgggcagaaaagggtttcctccttctggcatccctgaggcagatgaagaagacccggggcacgctgctggccctggagcggaaagaccactctggccaggtcttcagcgtggtgtccaatggcaaggcgggcaccctggacctcagcctgaccgtccaaggaaagcagcacgtggtgtctgtggaagaagctctcctggcaaccggccagtggaagagcatcaccctgtttgtgcaggaagacagggcccagctgtacatcgactgtgaaaagatggagaatgctgagttggacgtccccatccaaagcgtcttcaccagagacctggccagcatcgccagactccgcatcgcaaaggggggcgtcaatgacaatttccagggggtgctgcagaatgtgaggtttgtctttggaaccacaccagaagacatcctcaggaacaaaggctgctccagctctaccagtgtcctcctcacccttgacaacaacgtggtgaatggttccagccctgccatccgcactaactacattggccacaagacaaaggacttgcaagccatctgcggcatctcctgtgatgagctgtccagcatggtcctggaactcaggggcctgcgcaccattgtgaccacgctgcaggacagcatccgcaaagtgactgaagagaacaaagagttggccaatgagctgaggcggcctcccctatgctatcacaacggagttcagtacagaaataacgaggaatggactgttgatagctgcactgagtgtcactgtcagaactcagttaccatctgcaaaaaggtgtcctgccccatcatgccctgctccaatgccacagttcctgatggagaatgctgtcctcgctgttggcccagcgactctgcggacgatggctggtctccatggtccgagtggacctcctgttctacgagctgtggcaatggaattcagcagcgcggccgctcctgcgatagcctcaacaaccgatgtgagggctcctcggtccagacacggacctgccacattcaggagtgtgacaagagatttaaacaggatggtggctggagccactggtccccgtggtcatcttgttctgtgacatgtggtgatggtgtgatcacaaggatccggctctgcaactctcccagcccccagatgaacgggaaaccctgtgaaggcgaagcgcgggagaccaaagcctgcaagaaagacgcctgccccatcaatggaggctggggtccttggtcaccatgggacatctgttctgtcacctgtggaggaggggtacagaaacgtagtcgtctctgcaacaaccccacaccccagtttggaggcaaggactgcgttggtgatgtaacagaaaaccagatctgcaacaagcaggactgtccaattggtgagccacgcagcccaggatgaaacgacccaggagctttgctcttttactgaatgctgcagtcagcattcgaggagattccagcttggttagtcctgagcgatttgattgctctaagatgcaggtggacaacataatcccaacaagttatcggttccctataccctataatatcttacactgtgttaagtgcccagcatggcagtatggcagcttagaccaaccatttactgtgactgtctctctctccttgtctcagatggatgcctgtccaatccctgctttgccggcgtgaagtgtactagctaccctgatggcagctggaaatgtggtgcttgtccccctggttacagtggaaatggcatccagtgcacagatgttgatgagtgcaaagaagtgcctgatgcctgcttcaaccacaatggagagcaccggtgtgagaacacggaccccggctacaactgcctgccctgccccccacgcttcaccggctcacagcccttcggccagggtgtcgaacatgccacggccaacaaacaggtacagtcaactagacgagtaaaccagaggacaggagagctgtccttgaccaaaataactgggagcgggaggaatgtaatttcatacccttcaccaaaaaaaaaagggcgaggagatgaatgtacggtctagttttagaaacgtgattagaaaatccatggtaaatcctgcaggggaaaaacagtcttccatatttaaaaatgctgctctggaataagttgtgagcagatggacttgtaaacgcctaggtgctgagcaaattcaagaaaaataaacataaagcaaagtttgcttatagcctcagggagaatggggagggacagaggtaacccacactcttccaaatggagcctctgtctactcagagatgacagggatctggattcttgtttccatgatatctgaggattctcaaaagctctgtgtaacagcagcatggtgtaccctcaggtgtgcaagccccgtaacccctgcacggatgggacccacgactgcaacaagaacgccaagtgcaactacctgggccactatagcgaccccatgtaccgctgcgagtgcaagcctggctacgctggcaatggcatcatctgcggggaggacacagacctggatggctggcccaatgagaacctggtgtgcgtggccaatgcgacttaccactgcaaaaaggataattgccccaaccttcccaactcagggcaggaagactatgacaaggatggaattggtgatgcctgtgatgatgacgatgacaatgataaaattccagatgacagggacaactgtccattccattacaacccagctcagtatgactatgacagagatgatgtgggagaccgctgtgacaactgtccctacaaccacaacccagatcaggcagacacagacaacaatggggaaggagacgcctgtgctgcagacattgatggagacggtatcctcaatgaacgggacaactgccagtacgtctacaatgtggaccagagagacactgatatggatggggttggagatcagtgtgacaattgccccttggaacacaatccggatcagctggactctgactcagaccgcattggagatacctgtgacaacaatcaggatattgatgaagatggccaccagaacaatctggacaactgtccctatgtgcccaatgccaaccaggctgaccatgacaaagatggcaagggagatgcctgtgaccacgatgatgacaacgatggcattcctgatgacaaggacaactgcagactcgtgcccaatcccgaccagaaggactctgacggcgatggtcgaggtgatgcctgcaaagatgattttgaccatgacagtgtgccagacatcgatgacatctgtcctgagaatgttgacatcagtgagaccgatttccgccgattccagatgattcctctggaccccaaagggacatcccaaaatgaccctaactgggttgtacgccatcagggtaaagaactcgtccagactgtcaactgtgatcctggactcgctgtaggttatgatgagtttaatgctgtggacttcagtggcaccttcttcatcaacaccgaaagggacgatgactatgctggatttgtctttggctaccagtccagcagccgcttttatgttgtgatgtggaagcaagtcacccagtcctactgggacaccaaccccacgagggctcagggatactcgggcctttctgtgaaagttgtaaactccaccacagggcctggcgagcacctgcggaacgccctgtggcacacaggaaacacccctggccaggtgcgcaccctgtggcatgaccctcgtcacataggctggaaagatttcaccgcctacagatggcgtctcagccacaggccaaagacgggtttcattagagtggtgatgtatgaagggaagaaaatcatggctgactcaggacccatctatgataaaacctatgctggtggtagactagggttgtttgtcttctctcaagaaatggtgttcttctctgacctgaaatacgaatgtagagatccctaatcatcaaattgttgattgaaagactgatcataaaccaatgctggtattgcaccttctggaactatgggcttgagaaaacccccaggatcacttctccttggcttccttcttttctgtgcttgcatcagtgtggactcctagaacgtgcgacctgcctcaagaaaatgcagttttcaaaaacagactcagcattcagcctccaatgaataagacatcttccaagcatataaacaattgctttggtttccttttgaaaaagcatctacttgcttcagttgggaaggtgcccattccactctgcctttgtcacagagcagggtgctattgtgaggccatctctgagcagtggactcaaaagcattttcaggcatgtcagagaagggaggactcactagaattagcaaacaaaaccaccctgacatcctccttcaggaacacggggagcagaggccaaagcactaaggggagggcgcatacccgagacgattgtatgaagaaaatatggaggaactgttacatgttcggtactaagtcattttcaggggattgaaagactattgctggatttcatgatgctgactggcgttagctgattaacccatgtaaataggcacttaaatagaagcaggaaagggagacaaagactggcttctggacttcctccctgatccccacccttactcatcacctgcagtggccagaattagggaatcagaatcaaaccagtgtaaggcagtgctggctgccattgcctggtcacattgaaattggtggcttcattctagatgtagcttgtgcagatgtagcaggaaaataggaaaacctaccatctcagtgagcaccagctgcctcccaaaggaggggcagccgtgcttatatttttatggttacaatggcacaaaattattatcaacctaactaaaacattccttttctcttttttcctgaattatcatggagttttctaattctctcttttggaatgtagattttttttaaatgctttacgatgtaaaatatttattttttacttattctggaagatctggctgaaggattattcatggaacaggaagaagcgtaaagactatccatgtcatctttgttgagagtcttcgtgactgtaagattgtaaatacagattatttattaactctgttctgcctggaaatttaggcttcatacggaaagtgtttgagagcaagtagttgacatttatcagcaaatctcttgcaagaacagcacaaggaaaatcagtctaataagctgctctgccccttgtgctcagagtggatgttatgggattctttttttctctgttttatcttttcaagtggaattagttggttatccatttgcaaatgttttaaattgcaaagaaagccatgaggtcttcaatactgttttaccccatcccttgtgcatatttccagggagaaggaaagcatatacacttttttctttcatttttccaaaagagaaaaaaatgacaaaaggtgaaacttacatacaaatattacctcatttgttgtgtgactgagtaaagaatttttggatcaagcggaaagagtttaagtgtctaacaaacttaaagctactgtagtacctaaaaagtcagtgttgtacatagcataaaaactctgcagagaagtattcccaataaggaaatagcattgaaatgttaaatacaatttctgaaagttatgttttttttctatcatctggtataccattgctttatttttataaattattttctcattgccattggaatagatatctcagattgtgtagatatgctatttaaataatttatcaggaaatactgcctgtagagttagtatttctatttttatataatgtttgcacactgaattgaagaattgttggttttttcttttttttggttttgttttttttttttttttttttgcttttgacctcccatttttactatttgccaatacctttttctaggaatgtgcttttttttgtacacatttttatccattttacattctaaagcagtgtaagttgtatattactgtttcttatgtacaaggaacaacaataaatcatatggaaattta

SEQ ID NO: 329409 - DNA, 5887 bp, Homo sapiens
tttctagctggaaagttgcgcgccaggcagcggggggcggagagaggagcccagactggcccccacctcccgcttcctgcccggccgccgcccattggccggaggaatccccaggaatgcgagcgcccctttaaaagcgcgcggctcctccgccttgccagccgctgcgcccgagctggcctgcgagttcagggctcctgtcgctctccaggagcaacctctactccggacgcacaggcattccccgcgcccctccagccctcgccgccctcgccaccgctcccggccgccgcgctccggtacacacaggatccctgctgggcaccaacagctccaccatggggctggcctggggactaggcgtcctgttcctgatgcatgtgtgtggcaccaaccgcattccagagtctggcggagacaacagcgtgtttgacatctttgaactcaccggggccgcccgcaaggggtctgggcgccgactggtgaagggccccgacccttccagcccagctttccgcatcgaggatgccaacctgatcccccctgtgcctgatgacaagttccaagacctggtggatgctgtgcgggcagaaaagggtttcctccttctggcatccctgaggcagatgaagaagacccggggcacgctgctggccctggagcggaaagaccactctggccaggtcttcagcgtggtgtccaatggcaaggcgggcaccctggacctcagcctgaccgtccaaggaaagcagcacgtggtgtctgtggaagaagctctcctggcaaccggccagtggaagagcatcaccctgtttgtgcaggaagacagggcccagctgtacatcgactgtgaaaagatggagaatgctgagttggacgtccccatccaaagcgtcttcaccagagacctggccagcatcgccagactccgcatcgcaaaggggggcgtcaatgacaatttccagggggtgctgcagaatgtgaggtttgtctttggaaccacaccagaagacatcctcaggaacaaaggctgctccagctctaccagtgtcctcctcacccttgacaacaacgtggtgaatggttccagccctgccatccgcactaactacattggccacaagacaaaggacttgcaagccatctgcggcatctcctgtgatgagctgtccagcatggtcctggaactcaggggcctgcgcaccattgtgaccacgctgcaggacagcatccgcaaagtgactgaagagaacaaagagttggccaatgagctgaggcggcctcccctatgctatcacaacggagttcagtacagaaataacgaggaatggactgttgatagctgcactgagtgtcactgtcagaactcagttaccatctgcaaaaaggtgtcctgccccatcatgccctgctccaatgccacagttcctgatggagaatgctgtcctcgctgttggcccagcgactctgcggacgatggctggtctccatggtccgagtggacctcctgttctacgagctgtggcaatggaattcagcagcgcggccgctcctgcgatagcctcaacaaccgatgtgagggctcctcggtccagacacggacctgccacattcaggagtgtgacaagagatttaaacaggatggtggctggagccactggtccccgtggtcatcttgttctgtgacatgtggtgatggtgtgatcacaaggatccggctctgcaactctcccagcccccagatgaacgggaaaccctgtgaaggcgaagcgcgggagaccaaagcctgcaagaaagacgcctgccccatcaatggaggctggggtccttggtcaccatgggacatctgttctgtcacctgtggaggaggggtacagaaacgtagtcgtctctgcaacaaccccacaccccagtttggaggcaaggactgcgttggtgatgtaacagaaaaccagatctgcaacaagcaggactgtccaattgatggatgcctgtccaatccctgctttgccggcgtgaagtgtactagctaccctgatggcagctggaaatgtggtgcttgtccccctggttacagtggaaatggcatccagtgcacagatgttgatgagtgcaaagaagtgcctgatgcctgcttcaaccacaatggagagcaccggtgtgagaacacggaccccggctacaactgcctgccctgccccccacgcttcaccggctcacagcccttcggccagggtgtcgaacatgccacggccaacaaacaggtgtgcaagccccgtaacccctgcacggatgggacccacgactgcaacaagaacgccaagtgcaactacctgggccactatagcgaccccatgtaccgctgcgagtgcaagcctggctacgctggcaatggcatcatctgcggggaggacacagacctggatggctggcccaatgagaacctggtgtgcgtggccaatgcgacttaccactgcaaaaaggataattgccccaaccttcccaactcagggcaggaagactatgacaaggatggaattggtgatgcctgtgatgatgacgatgacaatgataaaattccagatgacagggacaactgtccattccattacaacccagctcagtatgactatgacagagatgatgtgggagaccgctgtgacaactgtccctacaaccacaacccagatcaggcagacacagacaacaatggggaaggagacgcctgtgctgcagacattgatggagacggtatcctcaatgaacgggacaactgccagtacgtctacaatgtggaccagagagacactgatatggatggggttggagatcagtgtgacaattgccccttggaacacaatccggatcagctggactctgactcagaccgcattggagatacctgtgacaacaatcaggatattgatgaagatggccaccagaacaatctggacaactgtccctatgtgcccaatgccaaccaggctgaccatgacaaagatggcaagggagatgcctgtgaccacgatgatgacaacgatggcattcctgatgacaaggacaactgcagactcgtgcccaatcccgaccagaaggactctgacggcgatggtcgaggtgatgcctgcaaagatgattttgaccatgacagtgtgccagacatcgatgacatctgtcctgagaatgttgacatcagtgagaccgatttccgccgattccagatgattcctctggaccccaaagggacatcccaaaatgaccctaactgggttgtacgccatcagggtaaagaactcgtccagactgtcaactgtgatcctggactcgctgtaggttatgatgagtttaatgctgtggacttcagtggcaccttcttcatcaacaccgaaagggacgatgactatgctggatttgtctttggctaccagtccagcagccgcttttatgttgtgatgtggaagcaagtcacccagtcctactgggacaccaaccccacgagggctcagggatactcgggcctttctgtgaaagttgtaaactccaccacagggcctggcgagcacctgcggaacgccctgtggcacacaggaaacacccctggccaggtgcgcaccctgtggcatgaccctcgtcacataggctggaaagatttcaccgcctacagatggcgtctcagccacaggccaaagacgggtttcattagagtggtgatgtatgaagggaagaaaatcatggctgactcaggacccatctatgataaaacctatgctggtggtagactagggttgtttgtcttctctcaagaaatggtgttcttctctgacctgaaatacgaatgtagagatccctaatcatcaaattgttgattgaaagactgatcataaaccaatgctggtattgcaccttctggaactatgggcttgagaaaacccccaggatcacttctccttggcttccttcttttctgtgcttgcatcagtgtggactcctagaacgtgcgacctgcctcaagaaaatgcagttttcaaaaacagactcagcattcagcctccaatgaataagacatcttccaagcatataaacaattgctttggtttccttttgaaaaagcatctacttgcttcagttgggaaggtgcccattccactctgcctttgtcacagagcagggtgctattgtgaggccatctctgagcagtggactcaaaagcattttcaggcatgtcagagaagggaggactcactagaattagcaaacaaaaccaccctgacatcctccttcaggaacacggggagcagaggccaaagcactaaggggagggcgcatacccgagacgattgtatgaagaaaatatggaggaactgttacatgttcggtactaagtcattttcaggggattgaaagactattgctggatttcatgatgctgactggcgttagctgattaacccatgtaaataggcacttaaatagaagcaggaaagggagacaaagactggcttctggacttcctccctgatccccacccttactcatcacctgcagtggccagaattagggaatcagaatcaaaccagtgtaaggcagtgctggctgccattgcctggtcacattgaaattggtggcttcattctagatgtagcttgtgcagatgtagcaggaaaataggaaaacctaccatctcagtgagcaccagctgcctcccaaaggaggggcagccgtgcttatatttttatggttacaatggcacaaaattattatcaacctaactaaaacattccttttctcttttttcctgaattatcatggagttttctaattctctcttttggaatgtagattttttttaaatgctttacgatggaacaggaagaagcgtaaagactatccatgtcatctttgttgagagtcttcgtgactgtaagattgtaaatacagattatttattaactctgttctgcctggaaatttaggcttcatacggaaagtgtttgagagcaagtagttgacatttatcagcaaatctcttgcaagaacagcacaaggaaaatcagtctaataagctgctctgccccttgtgctcagagtggatgttatgggattctttttttctctgttttatcttttcaagtggaattagttggttatccatttgcaaatgttttaaattgcaaagaaagccatgaggtcttcaatactgttttaccccatcccttgtgcatatttccagggagaaggaaagcatatacacttttttctttcatttttccaaaagagaaaaaaatgacaaaaggtgaaacttacatacaaatattacctcatttgttgtgtgactgagtaaagaatttttggatcaagcggaaagagtttaagtgtctaacaaacttaaagctactgtagtacctaaaaagtcagtgttgtacatagcataaaaactctgcagagaagtattcccaataaggaaatagcattgaaatgttaaatacaatttctgaaagttatgttttttttctatcatctggtataccattgctttatttttataaattattttctcattgccattggaatagatatctcagattgtgtagatatgctatttaaataatttatcaggaaatactgcctgtagagttagtatttctatttttatataatgtttgcacactgaattgaagaattgttggttttttcttttttttggttttgttttttttttttttttttttgcttttgacctcccatttttactatttgccaatacctttttctaggaatgtgcttttttttgtacacatttttatccattttacattctaaagcagtgtaagttgtatattactgtttcttatgtacaaggaacaacaataaatcatatggaaattta

SEQ ID NO: 329410 - DNA, 5890 bp, Homo sapiens
tttctagctggaaagttgcgcgccaggcagcggggggcggagagaggagcccagactggcccccacctcccgcttcctgcccggccgccgcccattggccggaggaatccccaggaatgcgagcgcccctttaaaagcgcgcggctcctccgccttgccagccgctgcgcccgagctggcctgcgagttcagggctcctgtcgctctccaggagcaacctctactccggacgcacaggcattccccgcgcccctccagccctcgccgccctcgccaccgctcccggccgccgcgctccggtacacacaggatccctgctgggcaccaacagctccaccatggggctggcctggggactaggcgtcctgttcctgatgcatgtgtgtggcaccaaccgcattccagagtctggcggagacaacagcgtgtttgacatctttgaactcaccggggccgcccgcaaggggtctgggcgccgactggtgaagggccccgacccttccagcccagctttccgcatcgaggatgccaacctgatcccccctgtgcctgatgacaagttccaagacctggtggatgctgtgcgggcagaaaagggtttcctccttctggcatccctgaggcagatgaagaagacccggggcacgctgctggccctggagcggaaagaccactctggccaggtcttcagcgtggtgtccaatggcaaggcgggcaccctggacctcagcctgaccgtccaaggaaagcagcacgtggtgtctgtggaagaagctctcctggcaaccggccagtggaagagcatcaccctgtttgtgcaggaagacagggcccagctgtacatcgactgtgaaaagatggagaatgctgagttggacgtccccatccaaagcgtcttcaccagagacctggccagcatcgccagactccgcatcgcaaaggggggcgtcaatgacaatttccagggggtgctgcagaatgtgaggtttgtctttggaaccacaccagaagacatcctcaggaacaaaggctgctccagctctaccagtgtcctcctcacccttgacaacaacgtggtgaatggttccagccctgccatccgcactaactacattggccacaagacaaaggacttgcaagccatctgcggcatctcctgtgatgagctgtccagcatggtcctggaactcaggggcctgcgcaccattgtgaccacgctgcaggacagcatccgcaaagtgactgaagagaacaaagagttggccaatgagctgaggcggcctcccctatgctatcacaacggagttcagtacagaaataacgaggaatggactgttgatagctgcactgagtgtcactgtcagaactcagttaccatctgcaaaaaggtgtcctgccccatcatgccctgctccaatgccacagttcctgatggagaatgctgtcctcgctgttggcccagcgactctgcggacgatggctggtctccatggtccgagtggacctcctgttctacgagctgtggcaatggaattcagcagcgcggccgctcctgcgatagcctcaacaaccgatgtgagggctcctcggtccagacacggacctgccacattcaggagtgtgacaagagatttaaacaggatggtggctggagccactggtccccgtggtcatcttgttctgtgacatgtggtgatggtgtgatcacaaggatccggctctgcaactctcccagcccccagatgaacgggaaaccctgtgaaggcgaagcgcgggagaccaaagcctgcaagaaagacgcctgccccatcaatggaggctggggtccttggtcaccatgggacatctgttctgtcacctgtggaggaggggtacagaaacgtagtcgtctctgcaacaaccccacaccccagtttggaggcaaggactgcgttggtgatgtaacagaaaaccagatctgcaacaagcaggactgtccaattgatggatgcctgtccaatccctgctttgccggcgtgaagtgtactagctaccctgatggcagctggaaatgtggtgcttgtccccctggttacagtggaaatggcatccagtgcacagatgttgatgagtgcaaagaagtgcctgatgcctgcttcaaccacaatggagagcaccggtgtgagaacacggaccccggctacaactgcctgccctgccccccacgcttcaccggctcacagcccttcggccagggtgtcgaacatgccacggccaacaaacaggtgtgcaagccccgtaacccctgcacggatgggacccacgactgcaacaagaacgccaagtgcaactacctgggccactatagcgaccccatgtaccgctgcgagtgcaagcctggctacgctggcaatggcatcatctgcggggaggacacagacctggatggctggcccaatgagaacctggtgtgcgtggccaatgcgacttaccactgcaaaaaggataattgccccaaccttcccaactcagggcaggaagactatgacaaggatggaattggtgatgcctgtgatgatgacgatgacaatgataaaattccagatgacagggacaactgtccattccattacaacccagctcagtatgactatgacagagatgatgtgggagaccgctgtgacaactgtccctacaaccacaacccagatcaggcagacacagacaacaatggggaaggagacgcctgtgctgcagacattgatggagacggtatcctcaatgaacgggacaactgccagtacgtctacaatgtggaccagagagacactgatatggatggggttggagatcagtgtgacaattgccccttggaacacaatccggatcagctggactctgactcagaccgcattggagatacctgtgacaacaatcaggatattgatgaagatggccaccagaacaatctggacaactgtccctatgtgcccaatgccaaccaggctgaccatgacaaagatggcaagggagatgcctgtgaccacgatgatgacaacgatggcattcctgatgacaaggacaactgcagactcgtgcccaatcccgaccagaaggactctgacggcgatggtcgaggtgatgcctgcaaagatgattttgaccatgacagtgtgccagacatcgatgacatctgtcctgagaatgttgacatcagtgagaccgatttccgccgattccagatgattcctctggaccccaaagggacatcccaaaactgtgctcctgggctcttctgtccaggttatgatgagtttaatgctgtggacttcagtggcaccttcttcatcaacaccgaaagggacgatgactatgctggatttgtctttggctaccagtccagcagccgcttttatgttgtgatgtggaagcaagtcacccagtcctactgggacaccaaccccacgagggctcagggatactcgggcctttctgtgaaagttgtaaactccaccacagggcctggcgagcacctgcggaacgccctgtggcacacaggaaacacccctggccaggtgcgcaccctgtggcatgaccctcgtcacataggctggaaagatttcaccgcctacagatggcgtctcagccacaggccaaagacgggtttcattagagtggtgatgtatgaagggaagaaaatcatggctgactcaggacccatctatgataaaacctatgctggtggtagactagggttgtttgtcttctctcaagaaatggtgttcttctctgacctgaaatacgaatgtagagatccctaatcatcaaattgttgattgaaagactgatcataaaccaatgctggtattgcaccttctggaactatgggcttgagaaaacccccaggatcacttctccttggcttccttcttttctgtgcttgcatcagtgtggactcctagaacgtgcgacctgcctcaagaaaatgcagttttcaaaaacagactcagcattcagcctccaatgaataagacatcttccaagcatataaacaattgctttggtttccttttgaaaaagcatctacttgcttcagttgggaaggtgcccattccactctgcctttgtcacagagcagggtgctattgtgaggccatctctgagcagtggactcaaaagcattttcaggcatgtcagagaagggaggactcactagaattagcaaacaaaaccaccctgacatcctccttcaggaacacggggagcagaggccaaagcactaaggggagggcgcatacccgagacgattgtatgaagaaaatatggaggaactgttacatgttcggtactaagtcattttcaggggattgaaagactattgctggatttcatgatgctgactggcgttagctgattaacccatgtaaataggcacttaaatagaagcaggaaagggagacaaagactggcttctggacttcctccctgatccccacccttactcatcacctgcagtggccagaattagggaatcagaatcaaaccagtgtaaggcagtgctggctgccattgcctggtcacattgaaattggtggcttcattctagatgtagcttgtgcagatgtagcaggaaaataggaaaacctaccatctcagtgagcaccagctgcctcccaaaggaggggcagccgtgcttatatttttatggttacaatggcacaaaattattatcaacctaactaaaacattccttttctcttttttcctgaattatcatggagttttctaattctctcttttggaatgtagattttttttaaatgctttacgatgtaaaatatttattttttacttattctggaagatctggctgaaggattattcatggaacaggaagaagcgtaaagactatccatgtcatctttgttgagagtcttcgtgactgtaagattgtaaatacagattatttattaactctgttctgcctggaaatttaggcttcatacggaaagtgtttgagagcaagtagttgacatttatcagcaaatctcttgcaagaacagcacaaggaaaatcagtctaataagctgctctgccccttgtgctcagagtggatgttatgggattctttttttctctgttttatcttttcaagtggaattagttggttatccatttgcaaatgttttaaattgcaaagaaagccatgaggtcttcaatactgttttaccccatcccttgtgcatatttccagggagaaggaaagcatatacacttttttctttcatttttccaaaagagaaaaaaatgacaaaaggtgaaacttacatacaaatattacctcatttgttgtgtgactgagtaaagaatttttggatcaagcggaaagagtttaagtgtctaacaaacttaaagctactgtagtacctaaaaagtcagtgttgtacatagcataaaaactctgcagagaagtattcccaataaggaaatagcattgaaatgttaaatacaatttctgaaagttatgttttttttctatcatctggtataccattgctttatttttataaattattttctcattgccattggaatagatatctcagattgtgtagatatgctatttaaataatttatcaggaaatactgcctgtagagttagtatttctatttttatataatgtttgcacactgaattgaagaattgttggttttttcttttttttggttttgttttttttttttttttttttgcttttgacctcccatttttactatttgccaatacctttttctaggaatgtgcttttttttgtacacatttttatccattttacattctaaagcagtgtaagttgtatattactgtttcttatgtacaaggaacaacaataaatcatatggaaattta

SEQ ID NO: 329411 - DNA, 6470 bp, Homo sapiens
tttctagctggaaagttgcgcgccaggcagcggggggcggagagaggagcccagactggcccccacctcccgcttcctgcccggccgccgcccattggccggaggaatccccaggaatgcgagcgcccctttaaaagcgcgcggctcctccgccttgccagccgctgcgcccgagctggcctgcgagttcagggctcctgtcgctctccaggagcaacctctactccggacgcacaggcattccccgcgcccctccagccctcgccgccctcgccaccgctcccggccgccgcgctccggtacacacaggatccctgctgggcaccaacagctccaccatggggctggcctggggactaggcgtcctgttcctgatgcatgtgtgtggcaccaaccgcattccagagtctggcggagacaacagcgtgtttgacatctttgaactcaccggggccgcccgcaaggggtctgggcgccgactggtgaagggccccgacccttccagcccagctttccgcatcgaggatgccaacctgatcccccctgtgcctgatgacaagttccaagacctggtggatgctgtgcgggcagaaaagggtttcctccttctggcatccctgaggcagatgaagaagacccggggcacgctgctggccctggagcggaaagaccactctggccaggtcttcagcgtggtgtccaatggcaaggcgggcaccctggacctcagcctgaccgtccaaggaaagcagcacgtggtgtctgtggaagaagctctcctggcaaccggccagtggaagagcatcaccctgtttgtgcaggaagacagggcccagctgtacatcgactgtgaaaagatggagaatgctgagttggacgtccccatccaaagcgtcttcaccagagacctggccagcatcgccagactccgcatcgcaaaggggggcgtcaatgacaatttccagggggtgctgcagaatgtgaggtttgtctttggaaccacaccagaagacatcctcaggaacaaaggctgctccagctctaccagtgtcctcctcacccttgacaacaacgtggtgaatggttccagccctgccatccgcactaactacattggccacaagacaaaggacttgcaagccatctgcggcatctcctgtgatgagctgtccagcatggtcctggaactcaggggcctgcgcaccattgtgaccacgctgcaggacagcatccgcaaagtgactgaagagaacaaagagttggccaatgagctgaggcggcctcccctatgctatcacaacggagttcagtacagaaataacgaggaatggactgttgatagctgcactgagtgtcactgtcagaactcagttaccatctgcaaaaaggtgtcctgccccatcatgccctgctccaatgccacagttcctgatggagaatgctgtcctcgctgttggcccagcgactctgcggacgatggctggtctccatggtccgagtggacctcctgttctacgagctgtggcaatggaattcagcagcgcggccgctcctgcgatagcctcaacaaccgatgtgagggctcctcggtccagacacggacctgccacattcaggagtgtgacaagagatttaaacaggatggtggctggagccactggtccccgtggtcatcttgttctgtgacatgtggtgatggtgtgatcacaaggatccggctctgcaactctcccagcccccagatgaacgggaaaccctgtgaaggcgaagcgcgggagaccaaagcctgcaagaaagacgcctgccccatcaatggaggctggggtccttggtcaccatgggacatctgttctgtcacctgtggaggaggggtacagaaacgtagtcgtctctgcaacaaccccacaccccagtttggaggcaaggactgcgttggtgatgtaacagaaaaccagatctgcaacaagcaggactgtccaattgatggatgcctgtccaatccctgctttgccggcgtgaagtgtactagctaccctgatggcagctggaaatgtggtgcttgtccccctggttacagtggaaatggcatccagtgcacagatgttgatgagtgcaaagaagtgcctgatgcctgcttcaaccacaatggagagcaccggtgtgagaacacggaccccggctacaactgcctgccctgccccccacgcttcaccggctcacagcccttcggccagggtgtcgaacatgccacggccaacaaacaggtgtgcaagccccgtaacccctgcacggatgggacccacgactgcaacaagaacgccaagtgcaactacctgggccactatagcgaccccatgtaccgctgcgagtgcaagcctggctacgctggcaatggcatcatctgcggggaggacacagacctggatggctggcccaatgagaacctggtgtgcgtggccaatgcgacttaccactgcaaaaaggataattgccccaaccttcccaactcagggcaggaagactatgacaaggatggaattggtgatgcctgtgatgatgacgatgacaatgataaaattccagatgacagggacaactgtccattccattacaacccagctcagtatgactatgacagagatgatgtgggagaccgctgtgacaactgtccctacaaccacaacccagatcaggcagacacagacaacaatggggaaggagacgcctgtgctgcagacattgatggagacggtatcctcaatgaacgggacaactgccagtacgtctacaatgtggaccagagagacactgatatggatggggttggagatcagtgtgacaattgccccttggaacacaatccggatcagctggactctgactcagaccgcattggagatacctgtgacaacaatcaggatattgatgaagatggccaccagaacaatctggacaactgtccctatgtgcccaatgccaaccaggctgaccatgacaaagatggcaagggagatgcctgtgaccacgatgatgacaacgatggcattcctgatgacaaggacaactgcagactcgtgcccaatcccgaccagaaggactctgacggcgatggtcgaggtgatgcctgcaaagatgattttgaccatgacagtgtgccagacatcgatgacatctgtcctgagaatgttgacatcagtgagaccgatttccgccgattccagatgattcctctggaccccaaagggacatcccaaaatgaccctaactgggttgtacgccatcagggtaaagaactcgtccagactgtcaactgtgatcctggactcgctgtaggttatgatgagtttaatgctgtggacttcagtggcaccttcttcatcaacaccgaaagggacgatgactatgctggatttgtctttggctaccagtccagcagccgcttttatgttgtgatgtggaagcaagtcacccagtcctactgggacaccaaccccacgagggctcagggatactcgggcctttctgtgaaagttgtaaactccaccacagggcctggcgagcacctgcggaacgccctgtggcacacaggaaacacccctggccagaagcaaagccctggaacagagagagagcttatgggtgcctgactagcactggggatgctgtgctttgaccaagactctgaccagggagtcttagaaagttcccagcatcaccagctgcagcattgaactctgctttgtaaaaacataatagtgttgaaaagggagcttgaccaagaattgccctgcaaatcctaaggtgccttcagccttttcaaacaaaaaaacctccttccctcctctctgtctgctttatatgtgtgctcagtggcacacaacaaatatgagaggacttggaaaaattccccattgcagccctctaacttagatcagctcagtacctttcaagcattgtttctgatggaatgaaatagaaatctttacctgaaggagctgtgtttcaacctttccttttccttttccttcaggtgcgcaccctgtggcatgaccctcgtcacataggctggaaagatttcaccgcctacagatggcgtctcagccacaggccaaagacgggtttcattaggtacgatcatactgattcactttcacttacagtcacactgagggacaaaaagacaaaaagtattaaatagcattgtcactaaacaagattttttttccctgcagagtggtgatgtatgaagggaagaaaatcatggctgactcaggacccatctatgataaaacctatgctggtggtagactagggttgtttgtcttctctcaagaaatggtgttcttctctgacctgaaatacgaatgtagagatccctaatcatcaaattgttgattgaaagactgatcataaaccaatgctggtattgcaccttctggaactatgggcttgagaaaacccccaggatcacttctccttggcttccttcttttctgtgcttgcatcagtgtggactcctagaacgtgcgacctgcctcaagaaaatgcagttttcaaaaacagactcagcattcagcctccaatgaataagacatcttccaagcatataaacaattgctttggtttccttttgaaaaagcatctacttgcttcagttgggaaggtgcccattccactctgcctttgtcacagagcagggtgctattgtgaggccatctctgagcagtggactcaaaagcattttcaggcatgtcagagaagggaggactcactagaattagcaaacaaaaccaccctgacatcctccttcaggaacacggggagcagaggccaaagcactaaggggagggcgcatacccgagacgattgtatgaagaaaatatggaggaactgttacatgttcggtactaagtcattttcaggggattgaaagactattgctggatttcatgatgctgactggcgttagctgattaacccatgtaaataggcacttaaatagaagcaggaaagggagacaaagactggcttctggacttcctccctgatccccacccttactcatcacctgcagtggccagaattagggaatcagaatcaaaccagtgtaaggcagtgctggctgccattgcctggtcacattgaaattggtggcttcattctagatgtagcttgtgcagatgtagcaggaaaataggaaaacctaccatctcagtgagcaccagctgcctcccaaaggaggggcagccgtgcttatatttttatggttacaatggcacaaaattattatcaacctaactaaaacattccttttctcttttttcctgaattatcatggagttttctaattctctcttttggaatgtagattttttttaaatgctttacgatgtaaaatatttattttttacttattctggaagatctggctgaaggattattcatggaacaggaagaagcgtaaagactatccatgtcatctttgttgagagtcttcgtgactgtaagattgtaaatacagattatttattaactctgttctgcctggaaatttaggcttcatacggaaagtgtttgagagcaagtagttgacatttatcagcaaatctcttgcaagaacagcacaaggaaaatcagtctaataagctgctctgccccttgtgctcagagtggatgttatgggattctttttttctctgttttatcttttcaagtggaattagttggttatccatttgcaaatgttttaaattgcaaagaaagccatgaggtcttcaatactgttttaccccatcccttgtgcatatttccagggagaaggaaagcatatacacttttttctttcatttttccaaaagagaaaaaaatgacaaaaggtgaaacttacatacaaatattacctcatttgttgtgtgactgagtaaagaatttttggatcaagcggaaagagtttaagtgtctaacaaacttaaagctactgtagtacctaaaaagtcagtgttgtacatagcataaaaactctgcagagaagtattcccaataaggaaatagcattgaaatgttaaatacaatttctgaaagttatgttttttttctatcatctggtataccattgctttatttttataaattattttctcattgccattggaatagatatctcagattgtgtagatatgctatttaaataatttatcaggaaatactgcctgtagagttagtatttctatttttatataatgtttgcacactgaattgaagaattgttggttttttcttttttttggttttgttttttttttttttttttttgcttttgacctcccatttttactatttgccaatacctttttctaggaatgtgcttttttttgtacacatttttatccattttacattctaaagcagtgtaagttgtatattactgtttcttatgtacaaggaacaacaataaatcatatggaaattta

SEQ ID NO: 329412 - DNA, 5887 bp, Homo sapiens
tttctagctggaaagttgcgcgccaggcagcggggggcggagagaggagcccagactggcccccacctcccgcttcctgcccggccgccgcccattggccggaggaatccccaggaatgcgagcgcccctttaaaagcgcgcggctcctccgccttgccagccgctgcgcccgagctggcctgcgagttcagggctcctgtcgctctccaggagcaacctctactccggacgcacaggcattccccgcgcccctccagccctcgccgccctcgccaccgctcccggccgccgcgctccggtacacacaggatccctgctgggcaccaacagctccaccatggggctggcctggggactaggcgtcctgttcctgatgcatgtgtgtggcaccaaccgcattccagagtctggcggagacaacagcgtgtttgacatctttgaactcaccggggccgcccgcaaggggtctgggcgccgactggtgaagggccccgacccttccagcccagctttccgcatcgaggatgccaacctgatcccccctgtgcctgatgacaagttccaagacctggtggatgctgtgcgggcagaaaagggtttcctccttctggcatccctgaggcagatgaagaagacccggggcacgctgctggccctggagcggaaagaccactctggccaggtcttcagcgtggtgtccaatggcaaggcgggcaccctggacctcagcctgaccgtccaaggaaagcagcacgtggtgtctgtggaagaagctctcctggcaaccggccagtggaagagcatcaccctgtttgtgcaggaagacagggcccagctgtacatcgactgtgaaaagatggagaatgctgagttggacgtccccatccaaagcgtcttcaccagagacctggccagcatcgccagactccgcatcgcaaaggggggcgtcaatgacaatttccagggggtgctgcagaatgtgaggtttgtctttggaaccacaccagaagacatcctcaggaacaaaggctgctccagctctaccagtgtcctcctcacccttgacaacaacgtggtgaatggttccagccctgccatccgcactaactacattggccacaagacaaaggacttgcaagccatctgcggcatctcctgtgatgagctgtccagcatggtcctggaactcaggggcctgcgcaccattgtgaccacgctgcaggacagcatccgcaaagtgactgaagagaacaaagagttggccaatgagctgaggcggcctcccctatgctatcacaacggagttcagtacagaaataacgaggaatggactgttgatagctgcactgagtgtcactgtcagaactcagttaccatctgcaaaaaggtgtcctgccccatcatgccctgctccaatgccacagttcctgatggagaatgctgtcctcgctgttggcccagcgactctgcggacgatggctggtctccatggtccgagtggacctcctgttctacgagctgtggcaatggaattcagcagcgcggccgctcctgcgatagcctcaacaaccgatgtgagggctcctcggtccagacacggacctgccacattcaggagtgtgacaagagatttaaacaggatggtggctggagccactggtccccgtggtcatcttgttctgtgacatgtggtgatggtgtgatcacaaggatccggctctgcaactctcccagcccccagatgaacgggaaaccctgtgaaggcgaagcgcgggagaccaaagcctgcaagaaagacgcctgccccatcaatggaggctggggtccttggtcaccatgggacatctgttctgtcacctgtggaggaggggtacagaaacgtagtcgtctctgcaacaaccccacaccccagtttggaggcaaggactgcgttggtgatgtaacagaaaaccagatctgcaacaagcaggactgtccaattgatggatgcctgtccaatccctgctttgccggcgtgaagtgtactagctaccctgatggcagctggaaatgtggtgcttgtccccctggttacagtggaaatggcatccagtgcacagatgttgatgagtgcaaagaagtgcctgatgcctgcttcaaccacaatggagagcaccggtgtgagaacacggaccccggctacaactgcctgccctgccccccacgcttcaccggctcacagcccttcggccagggtgtcgaacatgccacggccaacaaacaggtgtgcaagccccgtaacccctgcacggatgggacccacgactgcaacaagaacgccaagtgcaactacctgggccactatagcgaccccatgtaccgctgcgagtgcaagcctggctacgctggcaatggcatcatctgcggggaggacacagacctggatggctggcccaatgagaacctggtgtgcgtggccaatgcgacttaccactgcaaaaaggataattgccccaaccttcccaactcagggcaggaagactatgacaaggatggaattggtgatgcctgtgatgatgacgatgacaatgataaaattccagatgacagggacaactgtccattccattacaacccagctcagtatgactatgacagagatgatgtgggagaccgctgtgacaactgtccctacaaccacaacccagatcaggcagacacagacaacaatggggaaggagacgcctgtgctgcagacattgatggagacggtatcctcaatgaacgggacaactgccagtacgtctacaatgtggaccagagagacactgatatggatggggttggagatcagtgtgacaattgccccttggaacacaatccggatcagctggactctgactcagaccgcattggagatacctgtgacaacaatcaggatattgatgaagatggccaccagaacaatctggacaactgtccctatgtgcccaatgccaaccaggctgaccatgacaaagatggcaagggagatgcctgtgaccacgatgatgacaacgatggcattcctgatgacaaggacaactgcagactcgtgcccaatcccgaccagaaggactctgacggcgatggtcgaggtgatgcctgcaaagatgattttgaccatgacagtgtgccagacatcgatgacatctgtcctgagaatgttgacatcagtgagaccgatttccgccgattccagatgattcctctggaccccaaagggacatcccaaaatgaccctaactgggttgtacgccatcagggtaaagaactcgtccagactgtcaactgtgatcctggactcgctgtaggttatgatgagtttaatgctgtggacttcagtggcaccttcttcatcaacaccgaaagggacgatgactatgctggatttgtctttggctaccagtccagcagccgcttttatgttgtgatgtggaagcaagtcacccagtcctactgggacaccaaccccacgagggctcagggatactcgggcctttctgtgaaagttgtaaactccaccacagggcctggcgagcacctgcggaacgccctgtggcacacaggaaacacccctggccaggtgcgcaccctgtggcatgaccctcgtcacataggctggaaagatttcaccgcctacagatggcgtctcagccacaggccaaagacgggtttcattagagtggtgatgtatgaagggaagaaaatcatggctgactcaggacccatctatgataaaacctatgctggtggtagactagggttgtttgtcttctctcaagaaatggtgttcttctctgacctgaaatacgaatgtagagatccctaatcatcaaattgttgattgaaagactgatcataaaccaatgctggtattgcaccttctggaactatgggcttgagaaaacccccaggatcacttctccttggcttccttcttttctgtgcttgcatcagtgtggactcctagaacgtgcgacctgcctcaagaaaatgcagttttcaaaaacagactcagcattcagcctccaatgaataagacatcttccaagcatataaacaattgctttggtttccttttgaaaaagcatctacttgcttcagttgggaaggtgcccattccactctgcctttgtcacagagcagggtgctattgtgaggccatctctgagcagtggactcaaaagcattttcaggcatgtcagagaagggaggactcactagaattagcaaacaaaaccaccctgacatcctccttcaggaacacggggagcagaggccaaagcactaaggggagggcgcatacccgagacgattgtatgaagaaaactattgctggatttcatgatgctgactggcgttagctgattaacccatgtaaataggcacttaaatagaagcaggaaagggagacaaagactggcttctggacttcctccctgatccccacccttactcatcacctgcagtggccagaattagggaatcagaatcaaaccagtgtaaggcagtgctggctgccattgcctggtcacattgaaattggtggcttcattctagatgtagcttgtgcagatgtagcaggaaaataggaaaacctaccatctcagtgagcaccagctgcctcccaaaggaggggcagccgtgcttatatttttatggttacaatggcacaaaattattatcaacctaactaaaacattccttttctcttttttcctgaattatcatggagttttctaattctctcttttggaatgtagattttttttaaatgctttacgatgtaaaatatttattttttacttattctggaagatctggctgaaggattattcatggaacaggaagaagcgtaaagactatccatgtcatctttgttgagagtcttcgtgactgtaagattgtaaatacagattatttattaactctgttctgcctggaaatttaggcttcatacggaaagtgtttgagagcaagtagttgacatttatcagcaaatctcttgcaagaacagcacaaggaaaatcagtctaataagctgctctgccccttgtgctcagagtggatgttatgggattctttttttctctgttttatcttttcaagtggaattagttggttatccatttgcaaatgttttaaattgcaaagaaagccatgaggtcttcaatactgttttaccccatcccttgtgcatatttccagggagaaggaaagcatatacacttttttctttcatttttccaaaagagaaaaaaatgacaaaaggtgaaacttacatacaaatattacctcatttgttgtgtgactgagtaaagaatttttggatcaagcggaaagagtttaagtgtctaacaaacttaaagctactgtagtacctaaaaagtcagtgttgtacatagcataaaaactctgcagagaagtattcccaataaggaaatagcattgaaatgttaaatacaatttctgaaagttatgttttttttctatcatctggtataccattgctttatttttataaattattttctcattgccattggaatagatatctcagattgtgtagatatgctatttaaataatttatcaggaaatactgcctgtagagttagtatttctatttttatataatgtttgcacactgaattgaagaattgttggttttttcttttttttggttttgttttttttttttttttttttgcttttgacctcccatttttactatttgccaatacctttttctaggaatgtgcttttttttgtacacatttttatccattttacattctaaagcagtgtaagttgtatattactgtttcttatgtacaaggaacaacaataaatcatatggaaattta

SEQ ID NO: 329413 - DNA, 6475 bp, Homo sapiens
atcgttccatggcacgttatccctggcttttgttaccagtaaaatgaatgactttgctgagacaatacttagtgtagcaggtacaagttataaaagtgattcattacaactaagataaggaagaaaacaggaaaacagcacttgcccttcacacacacagaaacacacatgcacacacacacaaacacacccttgtcacagctcagaataaccaattccatccagggatcatattagcgatattggcactgtaatggtcgtttttacatttattttctgttccgcattcacttaacatgtgcgttaaaaggaacaaagctagctggaggtagcaaagttttgaacttgaatcagggattgctaagaaaacttacaactaatgaccacagaaagtaagttctttgtcttctgtctgatacagctagatgtgattgtagccgtggtgcctgggcagatggtaaacaaacatgctgtcctcttatgacaatatgtgcagagaaggccccaaacgctggggtgagaggaacaacaaactgactaactcacggccgagttggagccagaaccaacaacagctcggctgccttcacactcatctgtcaaacacatggtgtatggctcccctgacagaaatgactcctataagcttcctcatactcgcgcattcttggaagtctgagactggaaatgcctacccagatatgttaagtcagtaaaggaaaactcatttgcaatgctgagaggagaaagaaaatcaatgaataggagagcatacactgtgggaaggctcagctgtactgagccaggcaaagcatccgattaccccactgctgtacacatcatgacctgggataaacccctgggccgttggcctaagaaatatgttgcttttcatcctgtataactgcaactttgtgccggctcatattatgttctagagagctcatgtacaccatggtgaccatagttaataatactggattgtatgcttaaaatttgctaagagagtagatcttaagtcatcaccaaaaaaagtaactgtaagatgatggagatgtgttaattagcttgacggtggtaatcacaatatatgtgtatatcaaaacatcacattatacaccttaaatgtatataatatttgtcaattatacctcagtaaagccaaaaagaaataaatatattgcttttcaccctctggcaagtggagggccctgaacagagccctctaaagaacagcttgtcctaatcatcacgtacctgatgaacctctgtttcccctgcagccagcgactctgcggacgatggctggtctccatggtccgagtggacctcctgttctacgagctgtggcaatggaattcagcagcgcggccgctcctgcgatagcctcaacaaccgatgtgagggctcctcggtccagacacggacctgccacattcaggagtgtgacaagagatttaaacaggatggtggctggagccactggtccccgtggtcatcttgttctgtgacatgtggtgatggtgtgatcacaaggatccggctctgcaactctcccagcccccagatgaacgggaaaccctgtgaaggcgaagcgcgggagaccaaagcctgcaagaaagacgcctgccccatcaatggaggctggggtccttggtcaccatgggacatctgttctgtcacctgtggaggaggggtacagaaacgtagtcgtctctgcaacaaccccacaccccagtttggaggcaaggactgcgttggtgatgtaacagaaaaccagatctgcaacaagcaggactgtccaattggtgagccacgcagcccaggatgaaacgacccaggagctttgctcttttactgaatgctgcagtcagcattcgaggagattccagcttggttagtcctgagcgatttgattgctctaagatgcaggtggacaacataatcccaacaagttatcggttccctataccctataatatcttacactgtgttaagtgcccagcatggcagtatggcagcttagaccaaccatttactgtgactgtctctctctccttgtctcagatggatgcctgtccaatccctgctttgccggcgtgaagtgtactagctaccctgatggcagctggaaatgtggtgcttgtccccctggttacagtggaaatggcatccagtgcacagatgttgatgagtgcaaagaagtgcctgatgcctgcttcaaccacaatggagagcaccggtgtgagaacacggaccccggctacaactgcctgccctgccccccacgcttcaccggctcacagcccttcggccagggtgtcgaacatgccacggccaacaaacaggtacagtcaactagacgagtaaaccagaggacaggagagctgtccttgaccaaaataactgggagcgggaggaatgtaatttcatacccttcaccaaaaaaaaaagggcgaggagatgaatgtacggtctagttttagaaacgtgattagaaaatccatggtaaatcctgcaggggaaaaacagtcttccatatttaaaaatgctgctctggaataagttgtgagcagatggacttgtaaacgcctaggtgctgagcaaattcaagaaaaataaacataaagcaaagtttgcttatagcctcagggagaatggggagggacagaggtaacccacactcttccaaatggagcctctgtctactcagagatgacagggatctggattcttgtttccatgatatctgaggattctcaaaagctctgtgtaacagcagcatggtgtaccctcaggtgtgcaagccccgtaacccctgcacggatgggacccacgactgcaacaagaacgccaagtgcaactacctgggccactatagcgaccccatgtaccgctgcgagtgcaagcctggctacgctggcaatggcatcatctgcggggaggacacagacctggatggctggcccaatgagaacctggtgtgcgtggccaatgcgacttaccactgcaaaaaggataattgccccaaccttcccaactcagggcaggaagactatgacaaggatggaattggtgatgcctgtgatgatgacgatgacaatgataaaattccagatgacagggacaactgtccattccattacaacccagctcagtatgactatgacagagatgatgtgggagaccgctgtgacaactgtccctacaaccacaacccagatcaggcagacacagacaacaatggggaaggagacgcctgtgctgcagacattgatggagacggtatcctcaatgaacgggacaactgccagtacgtctacaatgtggaccagagagacactgatatggatggggttggagatcagtgtgacaattgccccttggaacacaatccggatcagctggactctgactcagaccgcattggagatacctgtgacaacaatcaggatattgatgaagatggccaccagaacaatctggacaactgtccctatgtgcccaatgccaaccaggctgaccatgacaaagatggcaagggagatgcctgtgaccacgatgatgacaacgatggcattcctgatgacaaggacaactgcagactcgtgcccaatcccgaccagaaggactctgacggcgatggtcgaggtgatgcctgcaaagatgattttgaccatgacagtgtgccagacatcgatgacatctgtcctgagaatgttgacatcagtgagaccgatttccgccgattccagatgattcctctggaccccaaagggacatcccaaaatgaccctaactgggttgtacgccatcagggtaaagaactcgtccagactgtcaactgtgatcctggactcgctgtaggttatgatgagtttaatgctgtggacttcagtggcaccttcttcatcaacaccgaaagggacgatgactatgctggatttgtctttggctaccagtccagcagccgcttttatgttgtgatgtggaagcaagtcacccagtcctactgggacaccaaccccacgagggctcagggatactcgggcctttctgtgaaagttgtaaactccaccacagggcctggcgagcacctgcggaacgccctgtggcacacaggaaacacccctggccaggtgcgcaccctgtggcatgaccctcgtcacataggctggaaagatttcaccgcctacagatggcgtctcagccacaggccaaagacgggtttcattagagtggtgatgtatgaagggaagaaaatcatggctgactcaggacccatctatgataaaacctatgctggtggtagactagggttgtttgtcttctctcaagaaatggtgttcttctctgacctgaaatacgaatgtagagatccctaatcatcaaattgttgattgaaagactgatcataaaccaatgctggtattgcaccttctggaactatgggcttgagaaaacccccaggatcacttctccttggcttccttcttttctgtgcttgcatcagtgtggactcctagaacgtgcgacctgcctcaagaaaatgcagttttcaaaaacagactcagcattcagcctccaatgaataagacatcttccaagcatataaacaattgctttggtttccttttgaaaaagcatctacttgcttcagttgggaaggtgcccattccactctgcctttgtcacagagcagggtgctattgtgaggccatctctgagcagtggactcaaaagcattttcaggcatgtcagagaagggaggactcactagaattagcaaacaaaaccaccctgacatcctccttcaggaacacggggagcagaggccaaagcactaaggggagggcgcatacccgagacgattgtatgaagaaaatatggaggaactgttacatgttcggtactaagtcattttcaggggattgaaagactattgctggatttcatgatgctgactggcgttagctgattaacccatgtaaataggcacttaaatagaagcaggaaagggagacaaagactggcttctggacttcctccctgatccccacccttactcatcacctgcagtggccagaattagggaatcagaatcaaaccagtgtaaggcagtgctggctgccattgcctggtcacattgaaattggtggcttcattctagatgtagcttgtgcagatgtagcaggaaaataggaaaacctaccatctcagtgagcaccagctgcctcccaaaggaggggcagccgtgcttatatttttatggttacaatggcacaaaattattatcaacctaactaaaacattccttttctcttttttcctgaattatcatggagttttctaattctctcttttggaatgtagattttttttaaatgctttacgatgtaaaatatttattttttacttattctggaagatctggctgaaggattattcatggaacaggaagaagcgtaaagactatccatgtcatctttgttgagagtcttcgtgactgtaagattgtaaatacagattatttattaactctgttctgcctggaaatttaggcttcatacggaaagtgtttgagagcaagtagttgacatttatcagcaaatctcttgcaagaacagcacaaggaaaatcagtctaataagctgctctgccccttgtgctcagagtggatgttatgggattctttttttctctgttttatcttttcaagtggaattagttggttatccatttgcaaatgttttaaattgcaaagaaagccatgaggtcttcaatactgttttaccccatcccttgtgcatatttccagggagaaggaaagcatatacacttttttctttcatttttccaaaagagaaaaaaatgacaaaaggtgaaacttacatacaaatattacctcatttgttgtgtgactgagtaaagaatttttggatcaagcggaaagagtttaagtgtctaacaaacttaaagctactgtagtacctaaaaagtcagtgttgtacatagcataaaaactctgcagagaagtattcccaataaggaaatagcattgaaatgttaaatacaatttctgaaagttatgttttttttctatcatctggtataccattgctttatttttataaattattttctcattgccattggaatagatatctcagattgtgtagatatgctatttaaataatttatcaggaaatactgcctgtagagttagtatttctatttttatataatgtttgcacactgaattgaagaattgttggttttttcttttttttggttttgttttttttttttttttttttgcttttgacctcccatttttactatttgccaatacctttttctaggaatgtgcttttttttgtacacatttttatccattttacattctaaagcagtgtaagttgtatattactgtttcttatgtacaaggaacaacaataaatcatatggaaattta

SEQ ID NO: 329414 - DNA, 3413 bp, Homo sapiens
agctcggaccgtcattaggtcatgatgctgtgatgatacatacgtgataaattccagatacaggacaactgtccattccattacaacccagctcagtatgactatgacagagatgatgtgggagaccgctgtgacaactgtccctacaaccacaacccagatcaggcagacacagacaacaatggggaaggagacgcctgtgctgcagacattgatggagacggtatcctcaatgaacgggacaactgccagtacgtctacaatgtggaccagagagacactgatatggatggggttggagatcagtgtgacaattgccccttggaacacaatccggatcagctggactctgactcagaccgcattggagatacctgtgacaacaatcaggatattgatgaagatggccaccagaacaatctggacaactgtccctatgtgcccaatgccaaccaggctgaccatgacaaagatggcaagggagatgcctgtgaccacgatgatgacaacgatggcattcctgatgacaaggacaactgcagactcgtgcccaatcccgaccagaaggactctgacggcgatggtcgaggtgatgcctgcaaagatgattttgaccatgacagtgtgccagacatcgatgacatctgtcctgagaatgttgacatcagtgagaccgatttccgccgattccagatgattcctctggaccccaaagggacatcccaaaatgaccctaactgggttgtacgccatcagggtaaagaactcgtccagactgtcaactgtgatcctggactcgctgtaggttatgatgagtttaatgctgtggacttcagtggcaccttcttcatcaacaccgaaagggacgatgactatgctggatttgtctttggctaccagtccagcagccgcttttatgttgtgatgtggaagcaagtcacccagtcctactgggacaccaaccccacgagggctcagggatactcgggcctttctgtgaaagttgtaaactccaccacagggcctggcgagcacctgcggaacgccctgtggcacacaggaaacacccctggccaggtgcgcaccctgtggcatgaccctcgtcacataggctggaaagatttcaccgcctacagatggcgtctcagccacaggccaaagacgggtttcattagagtggtgatgtatgaagggaagaaaatcatggctgactcaggacccatctatgataaaacctatgctggtggtagactagggttgtttgtcttctctcaagaaatggtgttcttctctgacctgaaatacgaatgtagagatccctaatcatcaaattgttgattgaaagactgatcataaaccaatgctggtattgcaccttctggaactatgggcttgagaaaacccccaggatcacttctccttggcttccttcttttctgtgcttgcatcagtgtggactcctagaacgtgcgacctgcctcaagaaaatgcagttttcaaaaacagactcagcattcagcctccaatgaataagacatcttccaagcatataaacaattgctttggtttccttttgaaaaagcatctacttgcttcagttgggaaggtgcccattccactctgcctttgtcacagagcagggtgctattgtgaggccatctctgagcagtggactcaaaagcattttcaggcatgtcagagaagggaggactcactagaattagcaaacaaaaccaccctgacatcctccttcaggaacacggggagcagaggccaaagcactaaggggagggcgcatacccgagacgattgtatgaagaaaatatggaggaactgttacatgttcggtactaagtcattttcaggggattgaaagactattgctggatttcatgatgctgactggcgttagctgattaacccatgtaaataggcacttaaatagaagcaggaaagggagacaaagactggcttctggacttcctccctgatccccacccttactcatcacctgcagtggccagaattagggaatcagaatcaaaccagtgtaaggcagtgctggctgccattgcctggtcacattgaaattggtggcttcattctagatgtagcttgtgcagatgtagcaggaaaataggaaaacctaccatctcagtgagcaccagctgcctcccaaaggaggggcagccgtgcttatatttttatggttacaatggcacaaaattattatcaacctaactaaaacattccttttctcttttttcctgaattatcatggagttttctaattctctcttttggaatgtagattttttttaaatgctttacgatgtaaaatatttattttttacttattctggaagatctggctgaaggattattcatggaacaggaagaagcgtaaagactatccatgtcatctttgttgagagtcttcgtgactgtaagattgtaaatacagattatttattaactctgttctgcctggaaatttaggcttcatacggaaagtgtttgagagcaagtagttgacatttatcagcaaatctcttgcaagaacagcacaaggaaaatcagtctaataagctgctctgccccttgtgctcagagtggatgttatgggattctttttttctctgttttatcttttcaagtggaattagttggttatccatttgcaaatgttttaaattgcaaagaaagccatgaggtcttcaatactgttttaccccatcccttgtgcatatttccagggagaaggaaagcatatacacttttttctttcatttttccaaaagagaaaaaaatgacaaaaggtgaaacttacatacaaatattacctcatttgttgtgtgactgagtaaagaatttttggatcaagcggaaagagtttaagtgtctaacaaacttaaagctactgtagtacctaaaaagtcagtgttgtacatagcataaaaactctgcagagaagtattcccaataaggaaatagcattgaaatgttaaatacaatttctgaaagttatgttttttttctatcatctggtataccattgctttatttttataaattattttctcattgccattggaatagatatctcagattgtgtagatatgctatttaaataatttatcaggaaatactgcctgtagagttagtatttctatttttatataatgtttgcacactgaattgaagaattgttggttttttcttttttttggttttgttttttttttttttttttttgcttttgacctcccatttttactatttgccaatacctttttctaggaatgtgcttttttttgtacacatttttatccattttacattctaaagcagtgtaagttgtatattactgtttcttatgtacaaggaacaacaataaatcatatggaaattta

SEQ ID NO: 329415 - DNA, 2776 bp, Homo sapiens
agaggatccccggcatcttgctcccatcaggtctgaccaatattacgaccttcatcttgggttagatttaattgtttttgcttttctgatgggacgaagatgcatcttgctgccatcagggtaaagaactcgtccagactgtcaactgtgatcctggactcgctgtaggttatgatgagtttaatgctgtggacttcagtggcaccttcttcatcaacaccgaaagggacgatgactatgctggatttgtctttggctaccagtccagcagccgcttttatgttgtgatgtggaagcaagtcacccagtcctactgggacaccaaccccacgagggctcagggatactcgggcctttctgtgaaagttgtaaactccaccacagggcctggcgagcacctgcggaacgccctgtggcacacaggaaacacccctggccaggtgcgcaccctgtggcatgaccctcgtcacataggctggaaagatttcaccgcctacagatggcgtctcagccacaggccaaagacgggtttcattagagtggtgatgtatgaagggaagaaaatcatggctgactcaggacccatctatgataaaacctatgctggtggtagactagggttgtttgtcttctctcaagaaatggtgttcttctctgacctgaaatacgaatgtagagatccctaatcatcaaattgttgattgaaagactgatcataaaccaatgctggtattgcaccttctggaactatgggcttgagaaaacccccaggatcacttctccttggcttccttcttttctgtgcttgcatcagtgtggactcctagaacgtgcgacctgcctcaagaaaatgcagttttcaaaaacagactcagcattcagcctccaatgaataagacatcttccaagcatataaacaattgctttggtttccttttgaaaaagcatctacttgcttcagttgggaaggtgcccattccactctgcctttgtcacagagcagggtgctattgtgaggccatctctgagcagtggactcaaaagcattttcaggcatgtcagagaagggaggactcactagaattagcaaacaaaaccaccctgacatcctccttcaggaacacggggagcagaggccaaagcactaaggggagggcgcatacccgagacgattgtatgaagaaaatatggaggaactgttacatgttcggtactaagtcattttcaggggattgaaagactattgctggatttcatgatgctgactggcgttagctgattaacccatgtaaataggcacttaaatagaagcaggaaagggagacaaagactggcttctggacttcctccctgatccccacccttactcatcacctgcagtggccagaattagggaatcagaatcaaaccagtgtaaggcagtgctggctgccattgcctggtcacattgaaattggtggcttcattctagatgtagcttgtgcagatgtagcaggaaaataggaaaacctaccatctcagtgagcaccagctgcctcccaaaggaggggcagccgtgcttatatttttatggttacaatggcacaaaattattatcaacctaactaaaacattccttttctcttttttcctgaattatcatggagttttctaattctctcttttggaatgtagattttttttaaatgctttacgatgtaaaatatttattttttacttattctggaagatctggctgaaggattattcatggaacaggaagaagcgtaaagactatccatgtcatctttgttgagagtcttcgtgactgtaagattgtaaatacagattatttattaactctgttctgcctggaaatttaggcttcatacggaaagtgtttgagagcaagtagttgacatttatcagcaaatctcttgcaagaacagcacaaggaaaatcagtctaataagctgctctgccccttgtgctcagagtggatgttatgggattctttttttctctgttttatcttttcaagtggaattagttggttatccatttgcaaatgttttaaattgcaaagaaagccatgaggtcttcaatactgttttaccccatcccttgtgcatatttccagggagaaggaaagcatatacacttttttctttcatttttccaaaagagaaaaaaatgacaaaaggtgaaacttacatacaaatattacctcatttgttgtgtgactgagtaaagaatttttggatcaagcggaaagagtttaagtgtctaacaaacttaaagctactgtagtacctaaaaagtcagtgttgtacatagcataaaaactctgcagagaagtattcccaataaggaaatagcattgaaatgttaaatacaatttctgaaagttatgttttttttctatcatctggtataccattgctttatttttataaattattttctcattgccattggaatagatatctcagattgtgtagatatgctatttaaataatttatcaggaaatactgcctgtagagttagtatttctatttttatataatgtttgcacactgaattgaagaattgttggttttttcttttttttggttttgttttttttttttttttttttgcttttgacctcccatttttactatttgccaatacctttttctaggaatgtgcttttttttgtacacatttttatccattttacattctaaagcagtgtaagttgtatattactgtttcttatgtacaaggaacaacaataaatcatatggaaattta

SEQ ID NO: 329416 - DNA, 2174 bp, Homo sapiens
tcctagaggtaacccggtctcacttctagaatcctcacacatggtgttcttctctgagcctgaaatatgaatgtagatccctaatcatcaaattgttgattgaaagactgatcataaaccaatgctggtattgcaccttctggaactatgggcttgagaaaacccccaggatcacttctccttggcttccttcttttctgtgcttgcatcagtgtggactcctagaacgtgcgacctgcctcaagaaaatgcagttttcaaaaacagactcagcattcagcctccaatgaataagacatcttccaagcatataaacaattgctttggtttccttttgaaaaagcatctacttgcttcagttgggaaggtgcccattccactctgcctttgtcacagagcagggtgctattgtgaggccatctctgagcagtggactcaaaagcattttcaggcatgtcagagaagggaggactcactagaattagcaaacaaaaccaccctgacatcctccttcaggaacacggggagcagaggccaaagcactaaggggagggcgcatacccgagacgattgtatgaagaaaatatggaggaactgttacatgttcggtactaagtcattttcaggggattgaaagactattgctggatttcatgatgctgactggcgttagctgattaacccatgtaaataggcacttaaatagaagcaggaaagggagacaaagactggcttctggacttcctccctgatccccacccttactcatcacctgcagtggccagaattagggaatcagaatcaaaccagtgtaaggcagtgctggctgccattgcctggtcacattgaaattggtggcttcattctagatgtagcttgtgcagatgtagcaggaaaataggaaaacctaccatctcagtgagcaccagctgcctcccaaaggaggggcagccgtgcttatatttttatggttacaatggcacaaaattattatcaacctaactaaaacattccttttctcttttttcctgaattatcatggagttttctaattctctcttttggaatgtagattttttttaaatgctttacgatgtaaaatatttattttttacttattctggaagatctggctgaaggattattcatggaacaggaagaagcgtaaagactatccatgtcatctttgttgagagtcttcgtgactgtaagattgtaaatacagattatttattaactctgttctgcctggaaatttaggcttcatacggaaagtgtttgagagcaagtagttgacatttatcagcaaatctcttgcaagaacagcacaaggaaaatcagtctaataagctgctctgccccttgtgctcagagtggatgttatgggattctttttttctctgttttatcttttcaagtggaattagttggttatccatttgcaaatgttttaaattgcaaagaaagccatgaggtcttcaatactgttttaccccatcccttgtgcatatttccagggagaaggaaagcatatacacttttttctttcatttttccaaaagagaaaaaaatgacaaaaggtgaaacttacatacaaatattacctcatttgttgtgtgactgagtaaagaatttttggatcaagcggaaagagtttaagtgtctaacaaacttaaagctactgtagtacctaaaaagtcagtgttgtacatagcataaaaactctgcagagaagtattcccaataaggaaatagcattgaaatgttaaatacaatttctgaaagttatgttttttttctatcatctggtataccattgctttatttttataaattattttctcattgccattggaatagatatctcagattgtgtagatatgctatttaaataatttatcaggaaatactgcctgtagagttagtatttctatttttatataatgtttgcacactgaattgaagaattgttggttttttcttttttttggttttgttttttttttttttttttttgcttttgacctcccatttttactatttgccaatacctttttctaggaatgtgcttttttttgtacacatttttatccattttacattctaaagcagtgtaagttgtatattactgtttcttatgtacaaggaacaacaataaatcatatggaaattta

SEQ ID NO: 329417 - DNA, 3695 bp, Homo sapiens
tttctagctggaaagttgcgcgccaggcagcggggggcggagagaggagcccagactggcccccacctcccgcttcctgcccggccgccgcccattggccggaggaatccccaggaatgcgagcgcccctttaaaagcgcgcggctcctccgccttgccagccgctgcgcccgagctggcctgcgagttcagggctcctgtcgctctccaggagcaacctctactccggacgcacaggcattccccgcgcccctccagccctcgccgccctcgccaccgctcccggccgccgcgctccggtacacacaggatccctgctgggcaccaacagctccaccatggggctggcctggggactaggcgtcctgttcctgatgcatgtgtgtggcaccaaccgcattccagagtctggcggagacaacagcgtgtttgacatctttgaactcaccggggccgcccgcaaggggtctgggcgccgactggtgaagggccccgacccttccagcccagctttccgcatcgaggatgccaacctgatcccccctgtgcctgatgacaagttccaagacctggtggatgctgtgcgggcagaaaagggtttcctccttctggcatccctgaggcagatgaagaagacccggggcacgctgctggccctggagcggaaagaccactctggccaggtcttcagcgtggtgtccaatggcaaggcgggcaccctggacctcagcctgaccgtccaaggaaagcagcacgtggtgtctgtggaagaagctctcctggcaaccggccagtggaagagcatcaccctgtttgtgcaggaagacagggcccagctgtacatcgactgtgaaaagatggagaatgctgagttggacgtccccatccaaagcgtcttcaccagagacctggccagcatcgccagactccgcatcgcaaaggggggcgtcaatgacaatttccagggggtgctgcagaatgtgaggtttgtctttggaaccacaccagaagacatcctcaggaacaaaggctgctccagctctaccagtgtcctcctcacccttgacaacaacgtggtgaatggttccagccctgccatccgcactaactacattggccacaagacaaaggacttgcaagccatctgcggcatctcctgtgatgagctgtccagcatggtcctggaactcaggggcctgcgcaccattgtgaccacgctgcaggacagcatccgcaaagtgactgaagagaacaaagagttggccaatgagctgaggcggcctcccctatgctatcacaacggagttcagtacagaaataacgaggaatggactgttgatagctgcactgagtgtcactgtcagaactcagttaccatctgcaaaaaggtgtcctgccccatcatgccctgctccaatgccacagttcctgatggagaatgctgtcctcgctgttggcccagcgactctgcggacgatggctggtctccatggtccgagtggacctcctgttctacgagctgtggcaatggaattcagcagcgcggccgctcctgcgatagcctcaacaaccgatgtgagggctcctcggtccagacacggacctgccacattcaggagtgtgacaagagatttaaacaggatggtggctggagccactggtccccgtggtcatcttgttctgtgacatgtggtgatggtgtgatcacaaggatccggctctgcaactctcccagcccccagatgaacgggaaaccctgtgaaggcgaagcgcgggagaccaaagcctgcaagaaagacgcctgccccatcaatggaggctggggtccttggtcaccatgggacatctgttctgtcacctgtggaggaggggtacagaaacgtagtcgtctctgcaacaaccccacaccccagtttggaggcaaggactgcgttggtgatgtaacagaaaaccagatctgcaacaagcaggactgtccaattgatggatgcctgtccaatccctgctttgccggcgtgaagtgtactagctaccctgatggcagctggaaatgtggtgcttgtccccctggttacagtggaaatggcatccagtgcacagatgttgatgagtgcaaagaagtgcctgatgcctgcttcaaccacaatggagagcaccggtgtgagaacacggaccccggctacaactgcctgccctgccccccacgcttcaccggctcacagcccttcggccagggtgtcgaacatgccacggccaacaaacaggtgtgcaagccccgtaacccctgcacggatgggacccacgactgcaacaagaacgccaagtgcaactacctgggccactatagcgaccccatgtaccgctgcgagtgcaagcctggctacgctggcaatggcatcatctgcggggaggacacagacctggatggctggcccaatgagaacctggtgtgcgtggccaatgcgacttaccactgcaaaaaggataattgccccaaccttcccaactcagggcaggaagactatgacaaggatggaattggtgatgcctgtgatgatgacgatgacaatgataaaattccagatgacagggacaactgtccattccattacaacccagctcagtatgactatgacagagatgatgtgggagaccgctgtgacaactgtccctacaaccacaacccagatcaggcagacacagacaacaatggggaaggagacgcctgtgctgcagacattgatggagacggtatcctcaatgaacgggacaactgccagtacgtctacaatgtggaccagagagacactgatatggatggggttggagatcagtgtgacaattgccccttggaacacaatccggatcaggtaggtggatggactcctttcagagtctttcagtaaactgttggaatatccctttcatggcctttgaaaaatgagcttaacaaagttcaaacactttcattactgtggctccctggcttctcatagccaactggaatacgttcatgtaaataatttgcctgatgtgagctccttgcacagagtctcacagatctttagcatgaagatctggtaacttcagtcttaccttctgtaagaagggctactggacttgctcagcatcgtctaccattgttaagacaaattatacaaagcagacatctgtgactgacaactgtacaataatattaatcatatgtaatactaagagatggaaaaataaatgtgcataagcaaaataaccattttcatggctaatgatgtaatctagctataagaaaatcatcaaactaaggatacatccaaaaccaaagtaatttatccctgtcataaacattacccagacagtatacaacacagggaccagtggtctgtttccatcttttcaggacttttcagagaagtcgacgtgtcaacagttttacaactgaaaccttctaaggaaattctctgttataaagtatccagaaaatttcatttaacattaagatgtaaacagttaacatttcatttcatctttagtaattaaatatcactctatttgaccttatttagaaagttttatatgtaaaacatttttaaattatcccttctcagatttttatacgaaaacaaagataaaggaaaaaaacttttaaaatgtaattgctactattgctatctttctgcaggagtgtgtaaatagac

SEQ ID NO: 329418 - DNA, 1970 bp, Homo sapiens
tttctagctggaaagttgcgcgccaggcagcggggggcggagagaggagcccagactggcccccacctcccgcttcctgcccggccgccgcccattggccggaggaatccccaggaatgcgagcgcccctttaaaagcgcgcggctcctccgccttgccagccgctgcgcccgagctggcctgcgagttcagggctcctgtcgctctccaggagcaacctctactccggacgcacaggcattccccgcgcccctccagccctcgccgccctcgccaccgctcccggccgccgcgctccggtacacacaggatccctgctgggcaccaacagctccaccatggggctggcctggggactaggcgtcctgttcctgatgcatgtgtgtggcaccaaccgcattccagagtctggcggagacaacagcgtgtttgacatctttgaactcaccggggccgcccgcaaggggtctgggcgccgactggtgaagggccccgacccttccagcccagctttccgcatcgaggatgccaacctgatcccccctgtgcctgatgacaagttccaagacctggtggatgctgtgcgggcagaaaagggtttcctccttctggcatccctgaggcagatgaagaagacccggggcacgctgctggccctggagcggaaagaccactctggccaggtcttcagcgtggtgtccaatggcaaggcgggcaccctggacctcagcctgaccgtccaaggaaagcagcacgtggtgtctgtggaagaagctctcctggcaaccggccagtggaagagcatcaccctgtttgtgcaggaagacagggcccagctgtacatcgactgtgaaaagatggagaatgctgagttggacgtccccatccaaagcgtcttcaccagagacctggccagcatcgccagactccgcatcgcaaaggggggcgtcaatgacaatttccagggggtgctgcagaatgtgaggtttgtctttggaaccacaccagaagacatcctcaggaacaaaggctgctccagctctaccagtgtcctcctcacccttgacaacaacgtggtgaatggttccagccctgccatccgcactaactacattggccacaagacaaaggacttgcaagccatctgcggcatctcctgtgatgagctgtccagcatggtcctggaactcaggggcctgcgcaccattgtgaccacgctgcaggacagcatccgcaaagtgactgaagagaacaaagagttggccaatgagctgaggcggcctcccctatgctatcacaacggagttcagtacagaaataacgaggaatggactgttgatagctgcactgagtgtcactgtcagaactcagttaccatctgcaaaaaggtgtcctgccccatcatgccctgctccaatgccacagttcctgatggagaatgctgtcctcgctgttggcccagcgactctgcggacgatggctggtctccatggtccgagtggacctcctgttctacgagctgtggcaatggaattcagcagcgcggccgctcctgcgatagcctcaacaaccgatgtgagggctcctcggtccagacacggacctgccacattcaggagtgtgacaagagatttaaacaggatggtggctggagccactggtccccgtggtcatcttgttctgtgacatgtggtgatggtgtgatcacaaggatccggctctgcaactctcccagcccccagatgaacgggaaaccctgtgaaggcgaagcgcgggagaccaaagcctgcaagaaagacgcctgccccatcaatggaggctggggtccttggtcaccatgggacatctgttctgtcacctgtggaggaggggtacagaaacgtagtcgtctctgcaacaaccccacaccccagtttggaggcaaggactgcgttggtgatgctcaaaatctttggtaatcctttgaacag

SEQ ID NO: 329419 - DNA, 1787 bp, Homo sapiens
tttctagctggaaagttgcgcgccaggcagcggggggcggagagaggagcccagactggcccccacctcccgcttcctgcccggccgccgcccattggccggaggaatccccaggaatgcgagcgcccctttaaaagcgcgcggctcctccgccttgccagccgctgcgcccgagctggcctgcgagttcagggctcctgtcgctctccaggagcaacctctactccggacgcacaggcattccccgcgcccctccagccctcgccgccctcgccaccgctcccggccgccgcgctccggtacacacaggatccctgctgggcaccaacagctccaccatggggctggcctggggactaggcgtcctgttcctgatgcatgtgtgtggcaccaaccgcattccagagtctggcggagacaacagcgtgtttgacatctttgaactcaccggggccgcccgcaaggggtctgggcgccgactggtgaagggccccgacccttccagcccagctttccgcatcgaggatgccaacctgatcccccctgtgcctgatgacaagttccaagacctggtggatgctgtgcgggcagaaaagggtttcctccttctggcatccctgaggcagatgaagaagacccggggcacgctgctggccctggagcggaaagaccactctggccaggtcttcagcgtggtgtccaatggcaaggcgggcaccctggacctcagcctgaccgtccaaggaaagcagcacgtggtgtctgtggaagaagctctcctggcaaccggccagtggaagagcatcaccctgtttgtgcaggaagacagggcccagctgtacatcgactgtgaaaagatggagaatgctgagttggacgtccccatccaaagcgtcttcaccagagacctggccagcatcgccagactccgcatcgcaaaggggggcgtcaatgacaatttccaggtgaggcttcttctctgagccctgctccgtgggatcatctgctagacaggtgacctgccaggagggctacaggaaatcctgtctgtaaactaacgcagcagttctcagattttaggcagcatgagcatcacctggagggcttgtgaaagctcaccctgctgcaccccagccccagagtctgggattctgtaaaactgcaactctaacaagtaccaggtgatgctgatgccggtggtctgggaagcacactttgaaaactactcaaggaaacaagaaatggttttcctttagcagtcagcctgttcaagccttagatactccttaggctcttaagaaaagagcttatttcaaatgcattcccccaattttaatcttgtttgaaatggatactttctatgggcagaatcagtaccactttgctattggattcctcatggggatgcagctggtctcacataaaaggttaaaatagcagttagttgttgctgttacagcttcatctgtgccttaacttctagatctttgcaacggtggctttgaactcccacatttaactctttgacactggaaagtgtcattatatcctctaggcttaggatcagattccatttcctgtgtacccaagtaggctgataactgaattctttgtaaaatactcaagacttggcagaagtcacaattaagattttgaagttgtttggcgattaatgttgctgtgttattttgacatagtgatcttaagacagctctttgaagcttttagaacatctattgtatgcttttcctagcatacagacagtctcccccaaccccatccccacc

SEQ ID NO: 329420 - DNA, 1299 bp, Homo sapiens
tttctagctggaaagttgcgcgccaggcagcggggggcggagagaggagcccagactggcccccacctcccgcttcctgcccggccgccgcccattggccggaggaatccccaggaatgcgagcgcccctttaaaagcgcgcggctcctccgccttgccagccgctgcgcccgagctggcctgcgagttcagggctcctgtcgctctccaggagcaacctctactccggacgcacaggcattccccgcgcccctccagccctcgccgccctcgccaccgctcccggccgccgcgctccggtacacacaggatccctgctgggcaccaacagctccaccatggggctggcctggggactaggcgtcctgttcctgatgcatgtgtgtggcaccaaccgcattccagagtctggcggagacaacagcgtgtttgacatctttgaactcaccggggccgcccgcaaggggtctgggcgccgactggtgaagggccccgacccttccagcccagctttccgcatcgaggatgccaacctgatcccccctgtgcctgatgacaagttccaagacctggtggatgctgtgcgggcagaaaagggtttcctccttctggcatccctgaggcagatgaagaagacccggggcacgctgctggccctggagcggaaagaccactctggccaggtcttcagcgtggtgtccaatggcaaggcgggcaccctggacctcagcctgaccgtccaaggaaagcagcacgtggtgtctgtggaagaagctctcctggcaaccggccagtggaagagcatcaccctgtttgtgcaggaagacagggcccagctgtacatcgactgtgaaaagatggagaatgctgagttggacgtccccatccaaagcgtcttcaccagagacctggccagcatcgccagactccgcatcgcaaaggggggcgtcaatgacaatttccagggggtgctgcagaatgtgaggtttgtctttggaaccacaccagaagacatcctcaggaacaaaggctgctccagctcttgaacaatataaaacaagattgctatgtactttccatatctgtactgaaggaaaacttacttgttttagaaaaaccgtttcttgctattttttcctgtcttaatttacatattagtgaaaaaattgcctcatgatatacctcataaggccaaaaaattataatttgatgtcagcatagaatcacaatttcaagaaaataaaagggtcaaaataaaaatgtggcctcgttggcctcagcggtggagctctgcggccg

SEQ ID NO: 329421 - DNA, 364 bp, Homo sapiens
actatgacagagatgatgtgggagaccgctgtgacaactgtccctacaaccacaacccagatcaggcagacacagacaacaatggggaaggagacgcctgtgctgcagacattgatggagacggtaaggtgctgcctgatcagagggcccgcgggagacagggacatgcacagctttccaaacgtacttctgtctagtcctggctattagtatgcactttggtggaaacatccaaggctggagagcccagctcttatttgtcccttgttctcttcaggtatcctcaatgaacgggacaactgccagtacgtctacaatgtggaccagagagacactgatatggatggggttggagatcagtgtg

SEQ ID NO: 329422 - DNA, 570 bp, Homo sapiens
tacctgcatccttcacaccaaatgaaacgtcttctaccactaagaactcaagaggctggttggtaagagtatctatttgaagttttcattttgtttcttgccagctaccagtgtcctcctcacccttgacaacaacgtggtgaatggttccagccctgccatccgcactaactacattggccacaagacaaaggacttgcaagccatctgcggcatctcctgtgatgagctgtccagcatggtcctggaactcaggggcctgcgcaccattgtgaccacgctgcaggacagcatccgcaaagtggtcagtggcctctgcacccagcccgttagcatgaaccctggaaggtttatcgcagatggtcccaaatgactgaaaatgcggggggacactaatgatattctctcccatttagactgaagagaacaaagagttggccaatgagctgaggcggcctcccctatgctatcacaacggagttcagtacagaaataacgaggaatggactgttgatagctgcactgagtgtcactgtcaggtaagggaccttcaccagccagaataagaat

SEQ ID NO: 329423 - DNA, 429 bp, Homo sapiens
ggcacagctgtgtagattgaagaaatgaaaccaaggctcaaagcatttgacaggatgaagggaccaaatgccaacttagacaagatagtgacatttctgacaccagtaataataatagcactttagaattttgctgaactcttgcttttttgacctcaggcgatggtcgaggtgatgcctgcaaagatgattttgaccatgacagtgtgccagacatcgatgacatctgtcctgagaatgttgacatcagtgagaccgatttccgccgattccagatgattcctctggaccccaaagggacatcccaaaatgaccctaactgggttgtacgccatcagggtaaagaactcgtccagactgtcaactgtgatcctggactcgctgtaggtgagtagcgagttcttagatcctaagagactgatgcataca

SEQ ID NO: 329424 - DNA, 7161 bp, Homo sapiens
tttctagctggaaagttgcgcgccaggcagcggggggcggagagaggagcccagactggcccccacctcccgcttcctgcccggccgccgcccattggccggaggaatccccaggaatgcgagcgcccctttaaaagcgcgcggctcctccgccttgccagccgctgcgcccgagctggcctgcgagttcagggctcctgtcgctctccaggagcaacctctactccggacgcacaggcattccccgcgcccctccagccctcgccgccctcgccaccgctcccggccgccgcgctccggtacacacaggatccctgctgggcaccaacagctccaccatggggctggcctggggactaggcgtcctgttcctgatgcatgtgtgtggcaccaaccgcattccagagtctggcggagacaacagcgtgtttgacatctttgaactcaccggggccgcccgcaaggggtctgggcgccgactggtgaagggccccgacccttccagcccagctttccgcatcgaggatgccaacctgatcccccctgtgcctgatgacaagttccaagacctggtggatgctgtgcgggcagaaaagggtttcctccttctggcatccctgaggcagatgaagaagacccggggcacgctgctggccctggagcggaaagaccactctggccaggtcttcagcgtggtgtccaatggcaaggcgggcaccctggacctcagcctgaccgtccaaggaaagcagcacgtggtgtctgtggaagaagctctcctggcaaccggccagtggaagagcatcaccctgtttgtgcaggaagacagggcccagctgtacatcgactgtgaaaagatggagaatgctgagttggacgtccccatccaaagcgtcttcaccagagacctggccagcatcgccagactccgcatcgcaaaggggggcgtcaatgacaatttccagggggtgctgcagaatgtgaggtttgtctttggaaccacaccagaagacatcctcaggaacaaaggctgctccagctctaccagtgtcctcctcacccttgacaacaacgtggtgaatggttccagccctgccatccgcactaactacattggccacaagacaaaggacttgcaagccatctgcggcatctcctgtgatgagctgtccagcatggtcctggaactcaggggcctgcgcaccattgtgaccacgctgcaggacagcatccgcaaagtgactgaagagaacaaagagttggccaatgagctgaggcggcctcccctatgctatcacaacggagttcagtacagaaataacgaggaatggactgttgatagctgcactgagtgtcactgtcagaactcagttaccatctgcaaaaaggtgtcctgccccatcatgccctgctccaatgccacagttcctgatggagaatgctgtcctcgctgttggcccagcgactctgcggacgatggctggtctccatggtccgagtggacctcctgttctacgagctgtggcaatggaattcagcagcgcggccgctcctgcgatagcctcaacaaccgatgtgagggctcctcggtccagacacggacctgccacattcaggagtgtgacaagagatttaaacaggatggtggctggagccactggtccccgtggtcatcttgttctgtgacatgtggtgatggtgtgatcacaaggatccggctctgcaactctcccagcccccagatgaacgggaaaccctgtgaaggcgaagcgcgggagaccaaagcctgcaagaaagacgcctgccccatcaatggaggctggggtccttggtcaccatgggacatctgttctgtcacctgtggaggaggggtacagaaacgtagtcgtctctgcaacaaccccacaccccagtttggaggcaaggactgcgttggtgatgtaacagaaaaccagatctgcaacaagcaggactgtccaattgatggatgcctgtccaatccctgctttgccggcgtgaagtgtactagctaccctgatggcagctggaaatgtggtgcttgtccccctggttacagtggaaatggcatccagtgcacagatgttgatgagtgcaaagaagtgcctgatgcctgcttcaaccacaatggagagcaccggtgtgagaacacggaccccggctacaactgcctgccctgccccccacgcttcaccggctcacagcccttcggccagggtgtcgaacatgccacggccaacaaacaggtgtgcaagccccgtaacccctgcacggatgggacccacgactgcaacaagaacgccaagtgcaactacctgggccactatagcgaccccatgtaccgctgcgagtgcaagcctggctacgctggcaatggcatcatctgcggggaggacacagacctggatggctggcccaatgagaacctggtgtgcgtggccaatgcgacttaccactgcaaaaaggataattgccccaaccttcccaactcagggcaggaagactatgacaaggatggaattggtgatgcctgtgatgatgacgatgacaatgataaaattccagatgacagggacaactgtccattccattacaacccagctcagtatgactatgacagagatgatgtgggagaccgctgtgacaactgtccctacaaccacaacccagatcaggcagacacagacaacaatggggaaggagacgcctgtgctgcagacattgatggagacggtatcctcaatgaacgggacaactgccagtacgtctacaatgtggaccagagagacactgatatggatggggttggagatcagtgtgacaattgccccttggaacacaatccggatcagctggactctgactcagaccgcattggagatacctgtgacaacaatcaggatattgatgaagatggccaccagaacaatctggacaactgtccctatgtgcccaatgccaaccaggctgaccatgacaaagatggcaagggagatgcctgtgaccacgatgatgacaacgatggcattcctgatgacaaggacaactgcagactcgtgcccaatcccgaccagaaggactctgacggcgatggtcgaggtgatgcctgcaaagatgattttgaccatgacagtgtgccagacatcgatgacatctgtcctgagaatgttgacatcagtgagaccgatttccgccgattccagatgattcctctggaccccaaagggacatcccaaaatgaccctaactgggttgtacgccatcagggtaaagaactcgtccagactgtcaactgtgatcctggactcgctgtaggttatgatgagtttaatgctgtggacttcagtggcaccttcttcatcaacaccgaaagggacgatgactatgctggatttgtctttggctaccagtccagcagccgcttttatgttgtgatgtggaagcaagtcacccagtcctactgggacaccaaccccacgagggctcagggatactcgggcctttctgtgaaagttgtaaactccaccacagggcctggcgagcacctgcggaacgccctgtggcacacaggaaacacccctggccaggtgcgcaccctgtggcatgaccctcgtcacataggctggaaagatttcaccgcctacagatggcgtctcagccacaggccaaagacgggtttcattagagtggtgatgtatgaagggaagaaaatcatggctgactcaggacccatctatgataaaacctatgctggtggtagactagggttgtttgtcttctctcaagaaatggtgttcttctctgacctgaaatacgaatgtagagatccctaatcatcaaattgttgattgaaagactgatcataaaccaatgctggtattgcaccttctggaactatgggcttgagaaaacccccaggatcacttctccttggcttccttcttttctgtgcttgcatcagtgtggactcctagaacgtgcgacctgcctcaagaaaatgcagttttcaaaaacagactcagcattcagcctccaatgaataagacatcttccaagcatataaacaattgctttggtttccttttgaaaaagcatctacttgcttcagttgggaaggtgcccattccactctgcctttgtcacagagcagggtgctattgtgaggccatctctgagcagtggactcaaaagcattttcaggcatgtcagagaagggaggactcactagaattagcaaacaaaaccaccctgacatcctccttcaggaacacggggagcagaggccaaagcactaaggggagggcgcatacccgagacgattgtatgaagaaaatatggaggaactgttacatgttcggtactaagtcattttcaggggattgaaagactattgctggatttcatgatgctgactggcgttagctgattaacccatgtaaataggcacttaaatagaagcaggaaagggagacaaagactggcttctggacttcctccctgatccccacccttactcatcacctgcagtggccagaattagggaatcagaatcaaaccagtgtaaggcagtgctggctgccattgcctggtcacattgaaattggtggcttcattctagatgtagcttgtgcagatgtagcaggaaaataggaaaacctaccatctcagtgagcaccagctgcctcccaaaggaggggcagccgtgcttatatttttatggttacaatggcacaaaattattatcaacctaactaaaacattccttttctcttttttcctgaattatcatggagttttctaattctctcttttggaatgtagattttttttaaatgctttacgatgtaaaatatttattttttacttattctggaagatctggctgaaggattattcatggaacaggaagaagcgtaaagactatccatgtcatctttgttgagagtcttcgtgactgtaagattgtaaatacagattatttattaactctgttctgcctggaaatttaggcttcatacggaaagtgtttgagagcaagtagttgacatttatcagcaaatctcttgcaagaacagcacaaggaaaatcagtctaataagctgctctgccccttgtgctcagagtggatgttatgggattctttttttctctgttttatcttttcaagtggaattagttggttatccatttgcaaatgttttaaattgcaaagaaagccatgaggtcttcaatactgttttaccccatcccttgtgcatatttccagggagaaggaaagcatatacacttttttctttcatttttccaaaagagaaaaaaatgacaaaaggtgaaacttacatacaaatattacctcatttgttgtgtgactgagtaaagaatttttggatcaagcggaaagagtttaagtgtctaacaaacttaaagctactgtagtacctaaaaagtcagtgttgtacatagcataaaaactctgcagagaagtattcccaataaggaaatagcattgaaatgttaaatacaatttctgaaagttatgttttttttctatcatctggtataccattgctttatttttataaattattttctcattgccattggaatagatatctcagattgtgtagatatgctatttaaataatttatcaggaaatactgcctgtagagttagtatttctatttttatataatgtttgcacactgaattgaagaattgttggttttttcttttttttggttttgttttttttttttttttttttgcttttgacctcccatttttactatttgccaatacctttttctaggaatgtgcttttttttgtacacatttttatccattttacattctaaagcagtgtaagttgtatattactgtttcttatgtacaaggaacaacaataaatcatatggaaatttatatttatacttactgtatccatgcttatttgttctctactggctttatgtcatgaagtatatgcgtaaataccattcataaatcaatatagcatatacaaaaataaattacagtaagtcatagcaacattcacagtttgtatgtgattgagaaagactgagttgctcaggcctaggcttagaatttgctgcgtttgtggaataaaagaacaaaatgatacattagcctgccatatcaaaaacatataaaagagaaattatccctaagtcaagggcccccataagaataaaatttcttattaaggtcattagatgtcattgaatccttttcaaagtgcagtatgaaaacaaagggaaaaacactgaagcacacgcaactctcacagcgacattttctgacccacgaatgatgccttgggtgggcaacacgattgcatgttgtggagacacttcggaagtaaatgtggatgagggaggagctgtccttgcaatgttgagccaagcattacagatacctcctcttgaagaaggaataataagtttaatcaaaaaagaagactaaaaaatgtaaaatttggaaggaatccataaatgcgtgtgtgtctaaatacaaattatcatgtgaagaaaaggcccaagtgtaccaataagcagaccttgatttttggatgggctaattatgaatgtggaatactgaccagttaatttccagttttaatgaaaacagatcaaagaagaaattttatgagtaggttaaaggtctggctttgaggtctattaaacactagaaaggactggctgggtgagataaaatcttccttgttgattttcactctcattctataaatactcatctttctgagtagccatgatcacatacaaatgtaaattgccaaatcattttatagtaccaaggtgaagaagcaggaactagaaagtgttgataatagctgtggagttaggaaaactgatgtgaaggaaataattctttgaaatggcaaagaattaaataccatcattcattatcagaagagttcaacgtttgaagtgctgggagataattctaattcattcttggatagtgaagcaaaactgattgaaaataccaagataagacagaaaaagtgactggaaagaggagcttttcttccaggcatgttccagtttcaccctaagactgaccttcaaataatcaggttgtactgaaataaaggacttgtt

SEQ ID NO: 329425 - DNA, 6160 bp, Homo sapiens
tttctagctggaaagttgcgcgccaggcagcggggggcggagagaggagcccagactggcccccacctcccgcttcctgcccggccgccgcccattggccggaggaatccccaggaatgcgagcgcccctttaaaagcgcgcggctcctccgccttgccagccgctgcgcccgagctggcctgcgagttcagggctcctgtcgctctccaggagcaacctctactccggacgcacaggcattccccgcgcccctccagccctcgccgccctcgccaccgctcccggccgccgcgctccggtacacacaggatccctgctgggcaccaacagctccaccatggggctggcctggggactaggcgtcctgttcctgatgcatgtgtgtggcaccaaccgcattccagagtctggcggagacaacagcgtgtttgacatctttgaactcaccggggccgcccgcaaggggtctgggcgccgactggtgaagggccccgacccttccagcccagctttccgcatcgaggatgccaacctgatcccccctgtgcctgatgacaagttccaagacctggtggatgctgtgcgggcagaaaagggtttcctccttctggcatccctgaggcagatgaagaagacccggggcacgctgctggccctggagcggaaagaccactctggccaggtcttcagcgtggtgtccaatggcaaggcgggcaccctggacctcagcctgaccgtccaaggaaagcagcacgtggtgtctgtggaagaagctctcctggcaaccggccagtggaagagcatcaccctgtttgtgcaggaagacagggcccagctgtacatcgactgtgaaaagatggagaatgctgagttggacgtccccatccaaagcgtcttcaccagagacctggccagcatcgccagactccgcatcgcaaaggggggcgtcaatgacaatttccagggggtgctgcagaatgtgaggtttgtctttggaaccacaccagaagacatcctcaggaacaaaggctgctccagctctaccagtgtcctcctcacccttgacaacaacgtggtgaatggttccagccctgccatccgcactaactacattggccacaagacaaaggacttgcaagccatctgcggcatctcctgtgatgagctgtccagcatggtcctggaactcaggggcctgcgcaccattgtgaccacgctgcaggacagcatccgcaaagtgactgaagagaacaaagagttggccaatgagctgaggcggcctcccctatgctatcacaacggagttcagtacagaaataacgaggaatggactgttgatagctgcactgagtgtcactgtcagaactcagttaccatctgcaaaaaggtgtcctgccccatcatgccctgctccaatgccacagttcctgatggagaatgctgtcctcgctgttggcccagcgactctgcggacgatggctggtctccatggtccgagtggacctcctgttctacgagctgtggcaatggaattcagcagcgcggccgctcctgcgatagcctcaacaaccgatgtgagggctcctcggtccagacacggacctgccacattcaggagtgtgacaagagatttaaacaggatggtggctggagccactggtccccgtggtcatcttgttctgtgacatgtggtgatggtgtgatcacaaggatccggctctgcaactctcccagcccccagatgaacgggaaaccctgtgaaggcgaagcgcgggagaccaaagcctgcaagaaagacgcctgccccatcaatggaggctggggtccttggtcaccatgggacatctgttctgtcacctgtggaggaggggtacagaaacgtagtcgtctctgcaacaaccccacaccccagtttggaggcaaggactgcgttggtgatgtaacagaaaaccagatctgcaacaagcaggactgtccaattgatggatgcctgtccaatccctgctttgccggcgtgaagtgtactagctaccctgatggcagctggaaatgtggtgcttgtccccctggttacagtggaaatggcatccagtgcacagatgttgatgagtgcaaagaagtgcctgatgcctgcttcaaccacaatggagagcaccggtgtgagaacacggaccccggctacaactgcctgccctgccccccacgcttcaccggctcacagcccttcggccagggtgtcgaacatgccacggccaacaaacaggtgtgcaagccccgtaacccctgcacggatgggacccacgactgcaacaagaacgccaagtgcaactacctgggccactatagcgaccccatgtaccgctgcgagtgcaagcctggctacgctggcaatggcatcatctgcggggaggacacagacctggatggctggcccaatgagaacctggtgtgcgtggccaatgcgacttaccactgcaaaaaggataattgccccaaccttcccaactcagggcaggaagactatgacaaggatggaattggtgatgcctgtgatgatgacgatgacaatgataaaattccagatgacagggacaactgtccattccattacaacccagctcagtatgactatgacagagatgatgtgggagaccgctgtgacaactgtccctacaaccacaacccagatcaggcagacacagacaacaatggggaaggagacgcctgtgctgcagacattgatggagacggtatcctcaatgaacgggacaactgccagtacgtctacaatgtggaccagagagacactgatatggatggggttggagatcagtgtgacaattgccccttggaacacaatccggatcagctggactctgactcagaccgcattggagatacctgtgacaacaatcaggatattgatgaagatggccaccagaacaatctggacaactgtccctatgtgcccaatgccaaccaggctgaccatgacaaagatggcaagggagatgcctgtgaccacgatgatgacaacgatggcattcctgatgacaaggacaactgcagactcgtgcccaatcccgaccagaaggactctgacggcgatggtcgaggtgatgcctgcaaagatgattttgaccatgacagtgtgccagacatcgatgacatctgtcctgagaatgttgacatcagtgagaccgatttccgccgattccagatgattcctctggaccccaaagggacatcccaaaatgaccctaactgggttgtacgccatcagggtaaagaactcgtccagactgtcaactgtgatcctggactcgctgtaggttatgatgagtttaatgctgtggacttcagtggcaccttcttcatcaacaccgaaagggacgatgactatgctggatttgtctttggctaccagtccagcagccgcttttatgttgtgatgtggaagcaagtcacccagtcctactgggacaccaaccccacgagggctcagggatactcgggcctttctgtgaaagttgtaaactccaccacagggcctggcgagcacctgcggaacgccctgtggcacacaggaaacacccctggccaggtgcgcaccctgtggcatgaccctcgtcacataggctggaaagatttcaccgcctacagatggcgtctcagccacaggccaaagacgggtttcattagagtggtgatgtatgaagggaagaaaatcatggctgactcaggacccatctatgataaaacctatgctggtggtagactagggttgtttgtcttctctcaagaaatggtgttcttctctgacctgaaatacgaatgtagagatccctaatcatcaaattgttgattgaaagactgatcataaaccaatgctggtattgcaccttctggaactatgggcttgagaaaacccccaggatcacttctccttggcttccttcttttctgtgcttgcatcagtgtggactcctagaacgtgcgacctgcctcaagaaaatgcagttttcaaaaacagactcagcattcagcctccaatgaataagacatcttccaagcatataaacaattgctttggtttccttttgaaaaagcatctacttgcttcagttgggaaggtgcccattccactctgcctttgtcacagagcagggtgctattgtgaggccatctctgagcagtggactcaaaagcattttcaggcatgtcagagaagggaggactcactagaattagcaaacaaaaccaccctgacatcctccttcaggaacacggggagcagaggccaaagcactaaggggagggcgcatacccgagacgattgtatgaagaaaatatggaggaactgttacatgttcggtactaagtcattttcaggggattgaaagactattgctggatttcatgatgctgactggcgttagctgattaacccatgtaaataggcacttaaatagaagcaggaaagggagacaaagactggcttctggacttcctccctgatccccacccttactcatcacctgcagtggccagaattagggaatcagaatcaaaccagtgtaaggcagtgctggctgccattgcctggtcacattgaaattggtggcttcattctagatgtagcttgtgcagatgtagcaggaaaataggaaaacctaccatctcagtgagcaccagctgcctcccaaaggaggggcagccgtgcttatatttttatggttacaatggcacaaaattattatcaacctaactaaaacattccttttctcttttttcctgaattatcatggagttttctaattctctcttttggaatgtagattttttttaaatgctttacgatgtaaaatatttattttttacttattctggaagatctggctgaaggattattcatggaacaggaagaagcgtaaagactatccatgtcatctttgttgagagtcttcgtgactgtaagattgtaaatacagattatttattaactctgttctgcctggaaatttaggcttcatacggaaagtgtttgagagcaagtagttgacatttatcagcaaatctcttgcaagaacagcacaaggaaaatcagtctaataagctgctctgccccttgtgctcagagtggatgttatgggattctttttttctctgttttatcttttcaagtggaattagttggttatccatttgcaaatgttttaaattgcaaagaaagccatgaggtcttcaatactgttttaccccatcccttgtgcatatttccagggagaaggaaagcatatacacttttttctttcatttttccaaaagagaaaaaaatgacaaaaggtgaaacttacatacaaatattacctcatttgttgtgtgactgagtaaagaatttttggatcaagcggaaagagtttaagtgtctaacaaacttaaagctactgtagtacctaaaaagtcagtgttgtacatagcataaaaactctgcagagaagtattcccaataaggaaatagcattgaaatgttaaatacaatttctgaaagttatgttttttttctatcatctggtataccattgctttatttttataaattattttctcattgccattggaatagatatctcagattgtgtagatatgctatttaaataatttatcaggaaatactgcctgtagagttagtatttctatttttatataatgtttgcacactgaattgaagaattgttggttttttcttttttttggttttgttttttttttttttttttttgcttttgacctcccatttttactatttgccaatacctttttctaggaatgtgcttttttttgtacacatttttatccattttacattctaaagcagtgtaagttgtatattactgtttcttatgtacaaggaacaacaataaatcatatggaaatttatatttatacttactgtatccatgcttatttgttctctactggctttatgtcatgaagtatatgcgtaaataccattcataaatcaatatagcatatacaaaaataaattacagtaagtcatagcaacattcacagtttgtatgtgattgagaaagactgagttgctcaggcctaggcttagaatttgctgcgtttgtggaataaaagaacaaaatgata

SEQ ID NO: 329426 - DNA, 6391 bp, Homo sapiens
tttctagctggaaagttgcgcgccaggcagcggggggcggagagaggagcccagactggcccccacctcccgcttcctgcccggccgccgcccattggccggaggaatccccaggaatgcgagcgcccctttaaaagcgcgcggctcctccgccttgccagccgctgcgcccgagctggcctgcgagttcagggctcctgtcgctctccaggagcaacctctactccggacgcacaggcattccccgcgcccctccagccctcgccgccctcgccaccgctcccggccgccgcgctccggtacacacaggatccctgctgggcaccaacagctccaccatggggctggcctggggactaggcgtcctgttcctgatgcatgtgtgtggcaccaaccgcattccagagtctggcggagacaacagcgtgtttgacatctttgaactcaccggggccgcccgcaaggggtctgggcgccgactggtgaagggccccgacccttccagcccagctttccgcatcgaggatgccaacctgatcccccctgtgcctgatgacaagttccaagacctggtggatgctgtgcgggcagaaaagggtttcctccttctggcatccctgaggcagatgaagaagacccggggcacgctgctggccctggagcggaaagaccactctggccaggtcttcagcgtggtgtccaatggcaaggcgggcaccctggacctcagcctgaccgtccaaggaaagcagcacgtggtgtctgtggaagaagctctcctggcaaccggccagtggaagagcatcaccctgtttgtgcaggaagacagggcccagctgtacatcgactgtgaaaagatggagaatgctgagttggacgtccccatccaaagcgtcttcaccagagacctggccagcatcgccagactccgcatcgcaaaggggggcgtcaatgacaatttccagggggtgctgcagaatgtgaggtttgtctttggaaccacaccagaagacatcctcaggaacaaaggctgctccagctctaccagtgtcctcctcacccttgacaacaacgtggtgaatggttccagccctgccatccgcactaactacattggccacaagacaaaggacttgcaagccatctgcggcatctcctgtgatgagctgtccagcatggtcctggaactcaggggcctgcgcaccattgtgaccacgctgcaggacagcatccgcaaagtgactgaagagaacaaagagttggccaatgagctgaggcggcctcccctatgctatcacaacggagttcagtacagaaataacgaggaatggactgttgatagctgcactgagtgtcactgtcagaactcagttaccatctgcaaaaaggtgtcctgccccatcatgccctgctccaatgccacagttcctgatggagaatgctgtcctcgctgttggcccagcgactctgcggacgatggctggtctccatggtccgagtggacctcctgttctacgagctgtggcaatggaattcagcagcgcggccgctcctgcgatagcctcaacaaccgatgtgagggctcctcggtccagacacggacctgccacattcaggagtgtgacaagagatttaaacaggatggtggctggagccactggtccccgtggtcatcttgttctgtgacatgtggtgatggtgtgatcacaaggatccggctctgcaactctcccagcccccagatgaacgggaaaccctgtgaaggcgaagcgcgggagaccaaagcctgcaagaaagacgcctgccccatcaatggaggctggggtccttggtcaccatgggacatctgttctgtcacctgtggaggaggggtacagaaacgtagtcgtctctgcaacaaccccacaccccagtttggaggcaaggactgcgttggtgatgtaacagaaaaccagatctgcaacaagcaggactgtccaattgatggatgcctgtccaatccctgctttgccggcgtgaagtgtactagctaccctgatggcagctggaaatgtggtgcttgtccccctggttacagtggaaatggcatccagtgcacagatgttgatgagtgcaaagaagtgcctgatgcctgcttcaaccacaatggagagcaccggtgtgagaacacggaccccggctacaactgcctgccctgccccccacgcttcaccggctcacagcccttcggccagggtgtcgaacatgccacggccaacaaacaggtacagtcaactagacgagtaaaccagaggacaggagagctgtccttgaccaaaataactgggagcgggaggaatgtaatttcatacccttcaccaaaaaaaaaagggcgaggagatgaatgtacggtctagttttagaaacgtgattagaaaatccatggtaaatcctgcaggggaaaaacagtcttccatatttaaaaatgctgctctggaataagttgtgagcagatggacttgtaaacgcctaggtgctgagcaaattcaagaaaaataaacataaagcaaagtttgcttatagcctcagggagaatggggagggacagaggtaacccacactcttccaaatggagcctctgtctactcagagatgacagggatctggattcttgtttccatgatatctgaggattctcaaaagctctgtgtaacagcagcatggtgtaccctcaggtgtgcaagccccgtaacccctgcacggatgggacccacgactgcaacaagaacgccaagtgcaactacctgggccactatagcgaccccatgtaccgctgcgagtgcaagcctggctacgctggcaatggcatcatctgcggggaggacacagacctggatggctggcccaatgagaacctggtgtgcgtggccaatgcgacttaccactgcaaaaaggataattgccccaaccttcccaactcagggcaggaagactatgacaaggatggaattggtgatgcctgtgatgatgacgatgacaatgataaaattccagatgacagggacaactgtccattccattacaacccagctcagtatgactatgacagagatgatgtgggagaccgctgtgacaactgtccctacaaccacaacccagatcaggcagacacagacaacaatggggaaggagacgcctgtgctgcagacattgatggagacggtatcctcaatgaacgggacaactgccagtacgtctacaatgtggaccagagagacactgatatggatggggttggagatcagtgtgacaattgccccttggaacacaatccggatcagctggactctgactcagaccgcattggagatacctgtgacaacaatcaggatattgatgaagatggccaccagaacaatctggacaactgtccctatgtgcccaatgccaaccaggctgaccatgacaaagatggcaagggagatgcctgtgaccacgatgatgacaacgatggcattcctgatgacaaggacaactgcagactcgtgcccaatcccgaccagaaggactctgacggcgatggtcgaggtgatgcctgcaaagatgattttgaccatgacagtgtgccagacatcgatgacatctgtcctgagaatgttgacatcagtgagaccgatttccgccgattccagatgattcctctggaccccaaagggacatcccaaaatgaccctaactgggttgtacgccatcagggtaaagaactcgtccagactgtcaactgtgatcctggactcgctgtaggttatgatgagtttaatgctgtggacttcagtggcaccttcttcatcaacaccgaaagggacgatgactatgctggatttgtctttggctaccagtccagcagccgcttttatgttgtgatgtggaagcaagtcacccagtcctactgggacaccaaccccacgagggctcagggatactcgggcctttctgtgaaagttgtaaactccaccacagggcctggcgagcacctgcggaacgccctgtggcacacaggaaacacccctggccaggtgcgcaccctgtggcatgaccctcgtcacataggctggaaagatttcaccgcctacagatggcgtctcagccacaggccaaagacgggtttcattagagtggtgatgtatgaagggaagaaaatcatggctgactcaggacccatctatgataaaacctatgctggtggtagactagggttgtttgtcttctctcaagaaatggtgttcttctctgacctgaaatacgaatgtagagatccctaatcatcaaattgttgattgaaagactgatcataaaccaatgctggtattgcaccttctggaactatgggcttgagaaaacccccaggatcacttctccttggcttccttcttttctgtgcttgcatcagtgtggactcctagaacgtgcgacctgcctcaagaaaatgcagttttcaaaaacagactcagcattcagcctccaatgaataagacatcttccaagcatataaacaattgctttggtttccttttgaaaaagcatctacttgcttcagttgggaaggtgcccattccactctgcctttgtcacagagcagggtgctattgtgaggccatctctgagcagtggactcaaaagcattttcaggcatgtcagagaagggaggactcactagaattagcaaacaaaaccaccctgacatcctccttcaggaacacggggagcagaggccaaagcactaaggggagggcgcatacccgagacgattgtatgaagaaaatatggaggaactgttacatgttcggtactaagtcattttcaggggattgaaagactattgctggatttcatgatgctgactggcgttagctgattaacccatgtaaataggcacttaaatagaagcaggaaagggagacaaagactggcttctggacttcctccctgatccccacccttactcatcacctgcagtggccagaattagggaatcagaatcaaaccagtgtaaggcagtgctggctgccattgcctggtcacattgaaattggtggcttcattctagatgtagcttgtgcagatgtagcaggaaaataggaaaacctaccatctcagtgagcaccagctgcctcccaaaggaggggcagccgtgcttatatttttatggttacaatggcacaaaattattatcaacctaactaaaacattccttttctcttttttcctgaattatcatggagttttctaattctctcttttggaatgtagattttttttaaatgctttacgatgtaaaatatttattttttacttattctggaagatctggctgaaggattattcatggaacaggaagaagcgtaaagactatccatgtcatctttgttgagagtcttcgtgactgtaagattgtaaatacagattatttattaactctgttctgcctggaaatttaggcttcatacggaaagtgtttgagagcaagtagttgacatttatcagcaaatctcttgcaagaacagcacaaggaaaatcagtctaataagctgctctgccccttgtgctcagagtggatgttatgggattctttttttctctgttttatcttttcaagtggaattagttggttatccatttgcaaatgttttaaattgcaaagaaagccatgaggtcttcaatactgttttaccccatcccttgtgcatatttccagggagaaggaaagcatatacacttttttctttcatttttccaaaagagaaaaaaatgacaaaaggtgaaacttacatacaaatattacctcatttgttgtgtgactgagtaaagaatttttggatcaagcggaaagagtttaagtgtctaacaaacttaaagctactgtagtacctaaaaagtcagtgttgtacatagcataaaaactctgcagagaagtattcccaataaggaaatagcattgaaatgttaaatacaatttctgaaagttatgttttttttctatcatctggtataccattgctttatttttataaattattttctcattgccattggaatagatatctcagattgtgtagatatgctatttaaataatttatcaggaaatactgcctgtagagttagtatttctatttttatataatgtttgcacactgaattgaagaattgttggttttttcttttttttggttttgttttttttttttttttttttgcttttgacctcccatttttactatttgccaatacctttttctaggaatgtgcttttttttgtacacatttttatccattttacattctaaagcagtgtaagttgtatattactgtttcttatgtacaaggaacaacaataaatcatatggaaattta

SEQ ID NO: 329427 - DNA, 6957 bp, Homo sapiens
tttctagctggaaagttgcgcgccaggcagcggggggcggagagaggagcccagactggcccccacctcccgcttcctgcccggccgccgcccattggccggaggaatccccaggaatgcgagcgcccctttaaaagcgcgcggctcctccgccttgccagccgctgcgcccgagctggcctgcgagttcagggctcctgtcgctctccaggagcaacctctactccggacgcacaggcattccccgcgcccctccagccctcgccgccctcgccaccgctcccggccgccgcgctccggtacacacaggatccctgctgggcaccaacagctccaccatggggctggcctggggactaggcgtcctgttcctgatgcatgtgtgtggcaccaaccgcattccagagtctggcggagacaacagcgtgtttgacatctttgaactcaccggggccgcccgcaaggggtctgggcgccgactggtgaagggccccgacccttccagcccagctttccgcatcgaggatgccaacctgatcccccctgtgcctgatgacaagttccaagacctggtggatgctgtgcgggcagaaaagggtttcctccttctggcatccctgaggcagatgaagaagacccggggcacgctgctggccctggagcggaaagaccactctggccaggtcttcagcgtggtgtccaatggcaaggcgggcaccctggacctcagcctgaccgtccaaggaaagcagcacgtggtgtctgtggaagaagctctcctggcaaccggccagtggaagagcatcaccctgtttgtgcaggaagacagggcccagctgtacatcgactgtgaaaagatggagaatgctgagttggacgtccccatccaaagcgtcttcaccagagacctggccagcatcgccagactccgcatcgcaaaggggggcgtcaatgacaatttccagggggtgctgcagaatgtgaggtttgtctttggaaccacaccagaagacatcctcaggaacaaaggctgctccagctctaccagtgtcctcctcacccttgacaacaacgtggtgaatggttccagccctgccatccgcactaactacattggccacaagacaaaggacttgcaagccatctgcggcatctcctgtgatgagctgtccagcatggtcctggaactcaggggcctgcgcaccattgtgaccacgctgcaggacagcatccgcaaagtgactgaagagaacaaagagttggccaatgagctgaggcggcctcccctatgctatcacaacggagttcagtacagaaataacgaggaatggactgttgatagctgcactgagtgtcactgtcagaactcagttaccatctgcaaaaaggtgtcctgccccatcatgccctgctccaatgccacagttcctgatggagaatgctgtcctcgctgttggcccagcgactctgcggacgatggctggtctccatggtccgagtggacctcctgttctacgagctgtggcaatggaattcagcagcgcggccgctcctgcgatagcctcaacaaccgatgtgagggctcctcggtccagacacggacctgccacattcaggagtgtgacaagagatttaaacaggatggtggctggagccactggtccccgtggtcatcttgttctgtgacatgtggtgatggtgtgatcacaaggatccggctctgcaactctcccagcccccagatgaacgggaaaccctgtgaaggcgaagcgcgggagaccaaagcctgcaagaaagacgcctgccccagtaagtgtgaggtccgctgcaagggtgagcatgggcagcagctctgcccagctggttgcctggcatctgcagcctgcagttcagtgggtcatagagcaggaaggttacctactagagaaacaaacagaagcaaagtcctgcaggctcagcaacttcttttaatgaaaaacaaactcaccctcttccccagcattctttccatgtgtcagagaagcagaggtttcttgaacgggcttaggagagtctatgacaagggagggatttgaaagttgatcttaattgttgcctgtggttcatcttcttacagtcaatggaggctggggtccttggtcaccatgggacatctgttctgtcacctgtggaggaggggtacagaaacgtagtcgtctctgcaacaaccccacaccccagtttggaggcaaggactgcgttggtgatgtaacagaaaaccagatctgcaacaagcaggactgtccaattggtgagccacgcagcccaggatgaaacgacccaggagctttgctcttttactgaatgctgcagtcagcattcgaggagattccagcttggttagtcctgagcgatttgattgctctaagatgcaggtggacaacataatcccaacaagttatcggttccctataccctataatatcttacactgtgttaagtgcccagcatggcagtatggcagcttagaccaaccatttactgtgactgtctctctctccttgtctcagatggatgcctgtccaatccctgctttgccggcgtgaagtgtactagctaccctgatggcagctggaaatgtggtgcttgtccccctggttacagtggaaatggcatccagtgcacagatgttgatgagtgcaaagaagtgcctgatgcctgcttcaaccacaatggagagcaccggtgtgagaacacggaccccggctacaactgcctgccctgccccccacgcttcaccggctcacagcccttcggccagggtgtcgaacatgccacggccaacaaacaggtacagtcaactagacgagtaaaccagaggacaggagagctgtccttgaccaaaataactgggagcgggaggaatgtaatttcatacccttcaccaaaaaaaaaagggcgaggagatgaatgtacggtctagttttagaaacgtgattagaaaatccatggtaaatcctgcaggggaaaaacagtcttccatatttaaaaatgctgctctggaataagttgtgagcagatggacttgtaaacgcctaggtgctgagcaaattcaagaaaaataaacataaagcaaagtttgcttatagcctcagggagaatggggagggacagaggtaacccacactcttccaaatggagcctctgtctactcagagatgacagggatctggattcttgtttccatgatatctgaggattctcaaaagctctgtgtaacagcagcatggtgtaccctcaggtgtgcaagccccgtaacccctgcacggatgggacccacgactgcaacaagaacgccaagtgcaactacctgggccactatagcgaccccatgtaccgctgcgagtgcaagcctggctacgctggcaatggcatcatctgcggggaggacacagacctggatggctggcccaatgagaacctggtgtgcgtggccaatgcgacttaccactgcaaaaaggataattgccccaaccttcccaactcagggcaggaagactatgacaaggatggaattggtgatgcctgtgatgatgacgatgacaatgataaaattccagatgacagggacaactgtccattccattacaacccagctcagtatgactatgacagagatgatgtgggagaccgctgtgacaactgtccctacaaccacaacccagatcaggcagacacagacaacaatggggaaggagacgcctgtgctgcagacattgatggagacggtatcctcaatgaacgggacaactgccagtacgtctacaatgtggaccagagagacactgatatggatggggttggagatcagtgtgacaattgccccttggaacacaatccggatcagctggactctgactcagaccgcattggagatacctgtgacaacaatcaggatattgatgaagatggccaccagaacaatctggacaactgtccctatgtgcccaatgccaaccaggctgaccatgacaaagatggcaagggagatgcctgtgaccacgatgatgacaacgatggcattcctgatgacaaggacaactgcagactcgtgcccaatcccgaccagaaggactctgacggcgatggtcgaggtgatgcctgcaaagatgattttgaccatgacagtgtgccagacatcgatgacatctgtcctgagaatgttgacatcagtgagaccgatttccgccgattccagatgattcctctggaccccaaagggacatcccaaaatgaccctaactgggttgtacgccatcagggtaaagaactcgtccagactgtcaactgtgatcctggactcgctgtaggttatgatgagtttaatgctgtggacttcagtggcaccttcttcatcaacaccgaaagggacgatgactatgctggatttgtctttggctaccagtccagcagccgcttttatgttgtgatgtggaagcaagtcacccagtcctactgggacaccaaccccacgagggctcagggatactcgggcctttctgtgaaagttgtaaactccaccacagggcctggcgagcacctgcggaacgccctgtggcacacaggaaacacccctggccaggtgcgcaccctgtggcatgaccctcgtcacataggctggaaagatttcaccgcctacagatggcgtctcagccacaggccaaagacgggtttcattagagtggtgatgtatgaagggaagaaaatcatggctgactcaggacccatctatgataaaacctatgctggtggtagactagggttgtttgtcttctctcaagaaatggtgttcttctctgacctgaaatacgaatgtagagatccctaatcatcaaattgttgattgaaagactgatcataaaccaatgctggtattgcaccttctggaactatgggcttgagaaaacccccaggatcacttctccttggcttccttcttttctgtgcttgcatcagtgtggactcctagaacgtgcgacctgcctcaagaaaatgcagttttcaaaaacagactcagcattcagcctccaatgaataagacatcttccaagcatataaacaattgctttggtttccttttgaaaaagcatctacttgcttcagttgggaaggtgcccattccactctgcctttgtcacagagcagggtgctattgtgaggccatctctgagcagtggactcaaaagcattttcaggcatgtcagagaagggaggactcactagaattagcaaacaaaaccaccctgacatcctccttcaggaacacggggagcagaggccaaagcactaaggggagggcgcatacccgagacgattgtatgaagaaaatatggaggaactgttacatgttcggtactaagtcattttcaggggattgaaagactattgctggatttcatgatgctgactggcgttagctgattaacccatgtaaataggcacttaaatagaagcaggaaagggagacaaagactggcttctggacttcctccctgatccccacccttactcatcacctgcagtggccagaattagggaatcagaatcaaaccagtgtaaggcagtgctggctgccattgcctggtcacattgaaattggtggcttcattctagatgtagcttgtgcagatgtagcaggaaaataggaaaacctaccatctcagtgagcaccagctgcctcccaaaggaggggcagccgtgcttatatttttatggttacaatggcacaaaattattatcaacctaactaaaacattccttttctcttttttcctgaattatcatggagttttctaattctctcttttggaatgtagattttttttaaatgctttacgatgtaaaatatttattttttacttattctggaagatctggctgaaggattattcatggaacaggaagaagcgtaaagactatccatgtcatctttgttgagagtcttcgtgactgtaagattgtaaatacagattatttattaactctgttctgcctggaaatttaggcttcatacggaaagtgtttgagagcaagtagttgacatttatcagcaaatctcttgcaagaacagcacaaggaaaatcagtctaataagctgctctgccccttgtgctcagagtggatgttatgggattctttttttctctgttttatcttttcaagtggaattagttggttatccatttgcaaatgttttaaattgcaaagaaagccatgaggtcttcaatactgttttaccccatcccttgtgcatatttccagggagaaggaaagcatatacacttttttctttcatttttccaaaagagaaaaaaatgacaaaaggtgaaacttacatacaaatattacctcatttgttgtgtgactgagtaaagaatttttggatcaagcggaaagagtttaagtgtctaacaaacttaaagctactgtagtacctaaaaagtcagtgttgtacatagcataaaaactctgcagagaagtattcccaataaggaaatagcattgaaatgttaaatacaatttctgaaagttatgttttttttctatcatctggtataccattgctttatttttataaattattttctcattgccattggaatagatatctcagattgtgtagatatgctatttaaataatttatcaggaaatactgcctgtagagttagtatttctatttttatataatgtttgcacactgaattgaagaattgttggttttttcttttttttggttttgttttttttttttttttttttgcttttgacctcccatttttactatttgccaatacctttttctaggaatgtgcttttttttgtacacatttttatccattttacattctaaagcagtgtaagttgtatattactgtttcttatgtacaaggaacaacaataaatcatatggaaattta

SEQ ID NO: 329428 - DNA, 6366 bp, Homo sapiens
tttctagctggaaagttgcgcgccaggcagcggggggcggagagaggagcccagactggcccccacctcccgcttcctgcccggccgccgcccattggccggaggaatccccaggaatgcgagcgcccctttaaaagcgcgcggctcctccgccttgccagccgctgcgcccgagctggcctgcgagttcagggctcctgtcgctctccaggagcaacctctactccggacgcacaggcattccccgcgcccctccagccctcgccgccctcgccaccgctcccggccgccgcgctccggtacacacaggatccctgctgggcaccaacagctccaccatggggctggcctggggactaggcgtcctgttcctgatgcatgtgtgtggcaccaaccgcattccagagtctggcggagacaacagcgtgtttgacatctttgaactcaccggggccgcccgcaaggggtctgggcgccgactggtgaagggccccgacccttccagcccagctttccgcatcgaggatgccaacctgatcccccctgtgcctgatgacaagttccaagacctggtggatgctgtgcgggcagaaaagggtttcctccttctggcatccctgaggcagatgaagaagacccggggcacgctgctggccctggagcggaaagaccactctggccaggtcttcagcgtggtgtccaatggcaaggcgggcaccctggacctcagcctgaccgtccaaggaaagcagcacgtggtgtctgtggaagaagctctcctggcaaccggccagtggaagagcatcaccctgtttgtgcaggaagacagggcccagctgtacatcgactgtgaaaagatggagaatgctgagttggacgtccccatccaaagcgtcttcaccagagacctggccagcatcgccagactccgcatcgcaaaggggggcgtcaatgacaatttccagggggtgctgcagaatgtgaggtttgtctttggaaccacaccagaagacatcctcaggaacaaaggctgctccagctctaccagtgtcctcctcacccttgacaacaacgtggtgaatggttccagccctgccatccgcactaactacattggccacaagacaaaggacttgcaagccatctgcggcatctcctgtgatgagctgtccagcatggtcctggaactcaggggcctgcgcaccattgtgaccacgctgcaggacagcatccgcaaagtgactgaagagaacaaagagttggccaatgagctgaggcggcctcccctatgctatcacaacggagttcagtacagaaataacgaggaatggactgttgatagctgcactgagtgtcactgtcagaactcagttaccatctgcaaaaaggtgtcctgccccatcatgccctgctccaatgccacagttcctgatggagaatgctgtcctcgctgttggcccagcgactctgcggacgatggctggtctccatggtccgagtggacctcctgttctacgagctgtggcaatggaattcagcagcgcggccgctcctgcgatagcctcaacaaccgatgtgagggctcctcggtccagacacggacctgccacattcaggagtgtgacaagagatttaaacaggatggtggctggagccactggtccccgtggtcatcttgttctgtgacatgtggtgatggtgtgatcacaaggatccggctctgcaactctcccagcccccagatgaacgggaaaccctgtgaaggcgaagcgcgggagaccaaagcctgcaagaaagacgcctgccccatcaatggaggctggggtccttggtcaccatgggacatctgttctgtcacctgtggaggaggggtacagaaacgtagtcgtctctgcaacaaccccacaccccagtttggaggcaaggactgcgttggtgatgtaacagaaaaccagatctgcaacaagcaggactgtccaattgatggatgcctgtccaatccctgctttgccggcgtgaagtgtactagctaccctgatggcagctggaaatgtggtgcttgtccccctggttacagtggaaatggcatccagtgcacagatgttgatgagtgcaaagaagtgcctgatgcctgcttcaaccacaatggagagcaccggtgtgagaacacggaccccggctacaactgcctgccctgccccccacgcttcaccggctcacagcccttcggccagggtgtcgaacatgccacggccaacaaacaggtgtgcaagccccgtaacccctgcacggatgggacccacgactgcaacaagaacgccaagtgcaactacctgggccactatagcgaccccatgtaccgctgcgagtgcaagcctggctacgctggcaatggcatcatctgcggggaggacacagacctggatggctggcccaatgagaacctggtgtgcgtggccaatgcgacttaccactgcaaaaaggataattgccccaaccttcccaactcagggcaggaagactatgacaaggatggaattggtgatgcctgtgatgatgacgatgacaatgataaaattccagatgacagggacaactgtccattccattacaacccagctcagtatgactatgacagagatgatgtgggagaccgctgtgacaactgtccctacaaccacaacccagatcaggcagacacagacaacaatggggaaggagacgcctgtgctgcagacattgatggagacggtatcctcaatgaacgggacaactgccagtacgtctacaatgtggaccagagagacactgatatggatggggttggagatcagtgtgacaattgccccttggaacacaatccggatcagctggactctgactcagaccgcattggagatacctgtgacaacaatcaggatattgatgaagatggccaccagaacaatctggacaactgtccctatgtgcccaatgccaaccaggctgaccatgacaaagatggcaagggagatgcctgtgaccacgatgatgacaacgatggcattcctgatgacaaggacaactgcagactcgtgcccaatcccgaccagaaggactctgacggcgatggtcgaggtgatgcctgcaaagatgattttgaccatgacagtgtgccagacatcgatgacatctgtcctgagaatgttgacatcagtgagaccgatttccgccgattccagatgattcctctggaccccaaagggacatcccaaaatgaccctaactgggttgtacgccatcagggtaaagaactcgtccagactgtcaactgtgatcctggactcgctgtaggttatgatgagtttaatgctgtggacttcagtggcaccttcttcatcaacaccgaaagggacgatgactatgctggatttgtctttggctaccagtccagcagccgcttttatgttgtgatgtggaagcaagtcacccagtcctactgggacaccaaccccacgagggctcagggatactcgggcctttctgtgaaagttgtaaactccaccacagggcctggcgagcacctgcggaacgccctgtggcacacaggaaacacccctggccagaagcaaagccctggaacagagagagagcttatgggtgcctgactagcactggggatgctgtgctttgaccaagactctgaccagggagtcttagaaagttcccagcatcaccagctgcagcattgaactctgctttgtaaaaacataatagtgttgaaaagggagcttgaccaagaattgccctgcaaatcctaaggtgccttcagccttttcaaacaaaaaaacctccttccctcctctctgtctgctttatatgtgtgctcagtggcacacaacaaatatgagaggacttggaaaaattccccattgcagccctctaacttagatcagctcagtacctttcaagcattgtttctgatggaatgaaatagaaatctttacctgaaggagctgtgtttcaacctttccttttccttttccttcaggtgcgcaccctgtggcatgaccctcgtcacataggctggaaagatttcaccgcctacagatggcgtctcagccacaggccaaagacgggtttcattagagtggtgatgtatgaagggaagaaaatcatggctgactcaggacccatctatgataaaacctatgctggtggtagactagggttgtttgtcttctctcaagaaatggtgttcttctctgacctgaaatacgaatgtagagatccctaatcatcaaattgttgattgaaagactgatcataaaccaatgctggtattgcaccttctggaactatgggcttgagaaaacccccaggatcacttctccttggcttccttcttttctgtgcttgcatcagtgtggactcctagaacgtgcgacctgcctcaagaaaatgcagttttcaaaaacagactcagcattcagcctccaatgaataagacatcttccaagcatataaacaattgctttggtttccttttgaaaaagcatctacttgcttcagttgggaaggtgcccattccactctgcctttgtcacagagcagggtgctattgtgaggccatctctgagcagtggactcaaaagcattttcaggcatgtcagagaagggaggactcactagaattagcaaacaaaaccaccctgacatcctccttcaggaacacggggagcagaggccaaagcactaaggggagggcgcatacccgagacgattgtatgaagaaaatatggaggaactgttacatgttcggtactaagtcattttcaggggattgaaagactattgctggatttcatgatgctgactggcgttagctgattaacccatgtaaataggcacttaaatagaagcaggaaagggagacaaagactggcttctggacttcctccctgatccccacccttactcatcacctgcagtggccagaattagggaatcagaatcaaaccagtgtaaggcagtgctggctgccattgcctggtcacattgaaattggtggcttcattctagatgtagcttgtgcagatgtagcaggaaaataggaaaacctaccatctcagtgagcaccagctgcctcccaaaggaggggcagccgtgcttatatttttatggttacaatggcacaaaattattatcaacctaactaaaacattccttttctcttttttcctgaattatcatggagttttctaattctctcttttggaatgtagattttttttaaatgctttacgatgtaaaatatttattttttacttattctggaagatctggctgaaggattattcatggaacaggaagaagcgtaaagactatccatgtcatctttgttgagagtcttcgtgactgtaagattgtaaatacagattatttattaactctgttctgcctggaaatttaggcttcatacggaaagtgtttgagagcaagtagttgacatttatcagcaaatctcttgcaagaacagcacaaggaaaatcagtctaataagctgctctgccccttgtgctcagagtggatgttatgggattctttttttctctgttttatcttttcaagtggaattagttggttatccatttgcaaatgttttaaattgcaaagaaagccatgaggtcttcaatactgttttaccccatcccttgtgcatatttccagggagaaggaaagcatatacacttttttctttcatttttccaaaagagaaaaaaatgacaaaaggtgaaacttacatacaaatattacctcatttgttgtgtgactgagtaaagaatttttggatcaagcggaaagagtttaagtgtctaacaaacttaaagctactgtagtacctaaaaagtcagtgttgtacatagcataaaaactctgcagagaagtattcccaataaggaaatagcattgaaatgttaaatacaatttctgaaagttatgttttttttctatcatctggtataccattgctttatttttataaattattttctcattgccattggaatagatatctcagattgtgtagatatgctatttaaataatttatcaggaaatactgcctgtagagttagtatttctatttttatataatgtttgcacactgaattgaagaattgttggttttttcttttttttggttttgttttttttttttttttttttgcttttgacctcccatttttactatttgccaatacctttttctaggaatgtgcttttttttgtacacatttttatccattttacattctaaagcagtgtaagttgtatattactgtttcttatgtacaaggaacaacaataaatcatatggaaattta

SEQ ID NO: 329429 - DNA, 6089 bp, Homo sapiens
tttctagctggaaagttgcgcgccaggcagcggggggcggagagaggagcccagactggcccccacctcccgcttcctgcccggccgccgcccattggccggaggaatccccaggaatgcgagcgcccctttaaaagcgcgcggctcctccgccttgccagccgctgcgcccgagctggcctgcgagttcagggctcctgtcgctctccaggagcaacctctactccggacgcacaggcattccccgcgcccctccagccctcgccgccctcgccaccgctcccggccgccgcgctccggtacacacaggatccctgctgggcaccaacagctccaccatggggctggcctggggactaggcgtcctgttcctgatgcatgtgtgtggcaccaaccgcattccagagtctggcggagacaacagcgtgtttgacatctttgaactcaccggggccgcccgcaaggggtctgggcgccgactggtgaagggccccgacccttccagcccagctttccgcatcgaggatgccaacctgatcccccctgtgcctgatgacaagttccaagacctggtggatgctgtgcgggcagaaaagggtttcctccttctggcatccctgaggcagatgaagaagacccggggcacgctgctggccctggagcggaaagaccactctggccaggtcttcagcgtggtgtccaatggcaaggcgggcaccctggacctcagcctgaccgtccaaggaaagcagcacgtggtgtctgtggaagaagctctcctggcaaccggccagtggaagagcatcaccctgtttgtgcaggaagacagggcccagctgtacatcgactgtgaaaagatggagaatgctgagttggacgtccccatccaaagcgtcttcaccagagacctggccagcatcgccagactccgcatcgcaaaggggggcgtcaatgacaatttccagggggtgctgcagaatgtgaggtttgtctttggaaccacaccagaagacatcctcaggaacaaaggctgctccagctctaccagtgtcctcctcacccttgacaacaacgtggtgaatggttccagccctgccatccgcactaactacattggccacaagacaaaggacttgcaagccatctgcggcatctcctgtgatgagctgtccagcatggtcctggaactcaggggcctgcgcaccattgtgaccacgctgcaggacagcatccgcaaagtgactgaagagaacaaagagttggccaatgagctgaggcggcctcccctatgctatcacaacggagttcagtacagaaataacgaggaatggactgttgatagctgcactgagtgtcactgtcagaactcagttaccatctgcaaaaaggtgtcctgccccatcatgccctgctccaatgccacagttcctgatggagaatgctgtcctcgctgttggcccagcgactctgcggacgatggctggtctccatggtccgagtggacctcctgttctacgagctgtggcaatggaattcagcagcgcggccgctcctgcgatagcctcaacaaccgatgtgagggctcctcggtccagacacggacctgccacattcaggagtgtgacaagagatttaaacaggatggtggctggagccactggtccccgtggtcatcttgttctgtgacatgtggtgatggtgtgatcacaaggatccggctctgcaactctcccagcccccagatgaacgggaaaccctgtgaaggcgaagcgcgggagaccaaagcctgcaagaaagacgcctgccccatcaatggaggctggggtccttggtcaccatgggacatctgttctgtcacctgtggaggaggggtacagaaacgtagtcgtctctgcaacaaccccacaccccagtttggaggcaaggactgcgttggtgatgtaacagaaaaccagatctgcaacaagcaggactgtccaattgatggatgcctgtccaatccctgctttgccggcgtgaagtgtactagctaccctgatggcagctggaaatgtggtgcttgtccccctggttacagtggaaatggcatccagtgcacagatgttgatgagtgcaaagaagtgcctgatgcctgcttcaaccacaatggagagcaccggtgtgagaacacggaccccggctacaactgcctgccctgccccccacgcttcaccggctcacagcccttcggccagggtgtcgaacatgccacggccaacaaacaggtgtgcaagccccgtaacccctgcacggatgggacccacgactgcaacaagaacgccaagtgcaactacctgggccactatagcgaccccatgtaccgctgcgagtgcaagcctggctacgctggcaatggcatcatctgcggggaggacacagacctggatggctggcccaatgagaacctggtgtgcgtggccaatgcgacttaccactgcaaaaaggataattgccccaaccttcccaactcagggcaggaagactatgacaaggatggaattggtgatgcctgtgatgatgacgatgacaatgataaaattccagatgacagggacaactgtccattccattacaacccagctcagtatgactatgacagagatgatgtgggagaccgctgtgacaactgtccctacaaccacaacccagatcaggcagacacagacaacaatggggaaggagacgcctgtgctgcagacattgatggagacggtatcctcaatgaacgggacaactgccagtacgtctacaatgtggaccagagagacactgatatggatggggttggagatcagtgtgacaattgccccttggaacacaatccggatcagctggactctgactcagaccgcattggagatacctgtgacaacaatcaggatattgatgaagatggccaccagaacaatctggacaactgtccctatgtgcccaatgccaaccaggctgaccatgacaaagatggcaagggagatgcctgtgaccacgatgatgacaacgatggcattcctgatgacaaggacaactgcagactcgtgcccaatcccgaccagaaggactctgacggcgatggtcgaggtgatgcctgcaaagatgattttgaccatgacagtgtgccagacatcgatgacatctgtcctgagaatgttgacatcagtgagaccgatttccgccgattccagatgattcctctggaccccaaagggacatcccaaaatgaccctaactgggttgtacgccatcagggtaaagaactcgtccagactgtcaactgtgatcctggactcgctgtaggttatgatgagtttaatgctgtggacttcagtggcaccttcttcatcaacaccgaaagggacgatgactatgctggatttgtctttggctaccagtccagcagccgcttttatgttgtgatgtggaagcaagtcacccagtcctactgggacaccaaccccacgagggctcagggatactcgggcctttctgtgaaagttgtaaactccaccacagggcctggcgagcacctgcggaacgccctgtggcacacaggaaacacccctggccagctgaaggagctgtgtttcaacctttccttttccttttccttcaggtgcgcaccctgtggcatgaccctcgtcacataggctggaaagatttcaccgcctacagatggcgtctcagccacaggccaaagacgggtttcattaggtacgatcatactgattcactttcacttacagtcacactgagggacaaaaagacaaaaagtattaaatagcattgtcactaaacaagattttttttccctgcagagtggtgatgtatgaagggaagaaaatcatggctgactcaggacccatctatgataaaacctatgctggtggtagactagggttgtttgtcttctctcaagaaatggtgttcttctctgacctgaaatacgaatgtagagatccctaatcatcaaattgttgattgaaagactgatcataaaccaatgctggtattgcaccttctggaactatgggcttgagaaaacccccaggatcacttctccttggcttccttcttttctgtgcttgcatcagtgtggactcctagaacgtgcgacctgcctcaagaaaatgcagttttcaaaaacagactcagcattcagcctccaatgaataagacatcttccaagcatataaacaattgctttggtttccttttgaaaaagcatctacttgcttcagttgggaaggtgcccattccactctgcctttgtcacagagcagggtgctattgtgaggccatctctgagcagtggactcaaaagcattttcaggcatgtcagagaagggaggactcactagaattagcaaacaaaaccaccctgacatcctccttcaggaacacggggagcagaggccaaagcactaaggggagggcgcatacccgagacgattgtatgaagaaaatatggaggaactgttacatgttcggtactaagtcattttcaggggattgaaagactattgctggatttcatgatgctgactggcgttagctgattaacccatgtaaataggcacttaaatagaagcaggaaagggagacaaagactggcttctggacttcctccctgatccccacccttactcatcacctgcagtggccagaattagggaatcagaatcaaaccagtgtaaggcagtgctggctgccattgcctggtcacattgaaattggtggcttcattctagatgtagcttgtgcagatgtagcaggaaaataggaaaacctaccatctcagtgagcaccagctgcctcccaaaggaggggcagccgtgcttatatttttatggttacaatggcacaaaattattatcaacctaactaaaacattccttttctcttttttcctgaattatcatggagttttctaattctctcttttggaatgtagattttttttaaatgctttacgatgtaaaatatttattttttacttattctggaagatctggctgaaggattattcatggaacaggaagaagcgtaaagactatccatgtcatctttgttgagagtcttcgtgactgtaagattgtaaatacagattatttattaactctgttctgcctggaaatttaggcttcatacggaaagtgtttgagagcaagtagttgacatttatcagcaaatctcttgcaagaacagcacaaggaaaatcagtctaataagctgctctgccccttgtgctcagagtggatgttatgggattctttttttctctgttttatcttttcaagtggaattagttggttatccatttgcaaatgttttaaattgcaaagaaagccatgaggtcttcaatactgttttaccccatcccttgtgcatatttccagggagaaggaaagcatatacacttttttctttcatttttccaaaagagaaaaaaatgacaaaaggtgaaacttacatacaaatattacctcatttgttgtgtgactgagtaaagaatttttggatcaagcggaaagagtttaagtgtctaacaaacttaaagctactgtagtacctaaaaagtcagtgttgtacatagcataaaaactctgcagagaagtattcccaataaggaaatagcattgaaatgttaaatacaatttctgaaagttatgttttttttctatcatctggtataccattgctttatttttataaattattttctcattgccattggaatagatatctcagattgtgtagatatgctatttaaataatttatcaggaaatactgcctgtagagttagtatttctatttttatataatgtttgcacactgaattgaagaattgttggttttttcttttttttggttttgttttttttttttttttttttgcttttgacctcccatttttactatttgccaatacctttttctaggaatgtgcttttttttgtacacatttttatccattttacattctaaagcagtgtaagttgtatattactgtttcttatgtacaaggaacaacaataaatcatatggaaattta

SEQ ID NO: 329430 - DNA, 5009 bp, Homo sapiens
tttctagctggaaagttgcgcgccaggcagcggggggcggagagaggagcccagactggcccccacctcccgcttcctgcccggccgccgcccattggccggaggaatccccaggaatgcgagcgcccctttaaaagcgcgcggctcctccgccttgccagccgctgcgcccgagctggcctgcgagttcagggctcctgtcgctctccaggagcaacctctactccggacgcacaggcattccccgcgcccctccagccctcgccgccctcgccaccgctcccggccgccgcgctccggtacacacaggatccctgctgggcaccaacagctccaccatggggctggcctggggactaggcgtcctgttcctgatgcatgtgtgtggcaccaaccgcattccagagtctggcggagacaacagcgtgtttgacatctttgaactcaccggggccgcccgcaaggggtctgggcgccgactggtgaagggccccgacccttccagcccagctttccgcatcgaggatgccaacctgatcccccctgtgcctgatgacaagttccaagacctggtggatgctgtgcgggcagaaaagggtttcctccttctggcatccctgaggcagatgaagaagacccggggcacgctgctggccctggagcggaaagaccactctggccaggtcttcagcgtggtgtccaatggcaaggcgggcaccctggacctcagcctgaccgtccaaggaaagcagcacgtggtgtctgtggaagaagctctcctggcaaccggccagtggaagagcatcaccctgtttgtgcaggaagacagggcccagctgtacatcgactgtgaaaagatggagaatgctgagttggacgtccccatccaaagcgtcttcaccagagacctggccagcatcgccagactccgcatcgcaaaggggggcgtcaatgacaatttccagggggtgctgcagaatgtgaggtttgtctttggaaccacaccagaagacatcctcaggaacaaaggctgctccagctctaccagtgtcctcctcacccttgacaacaacgtggtgaatggttccagccctgccatccgcactaactacattggccacaagacaaaggacttgcaagccatctgcggcatctcctgtgatgagctgtccagcatggtcctggaactcaggggcctgcgcaccattgtgaccacgctgcaggacagcatccgcaaagtgactgaagagaacaaagagttggccaatgagctgaggcggcctcccctatgctatcacaacggagttcagtacagaaataacgaggaatggactgttgatagctgcactgagtgtcactgtcagaactcagttaccatctgcaaaaaggtgtcctgccccatcatgccctgctccaatgccacagttcctgatggagaatgctgtcctcgctgttggcccagcgactctgcggacgatggctggtctccatggtccgagtggacctcctgttctacgagctgtggcaatggaattcagcagcgcggccgctcctgcgatagcctcaacaaccgatgtgagggctcctcggtccagacacggacctgccacattcaggagtgtgacaagagatttaaacaggatggtggctggagccactggtccccgtggtcatcttgttctgtgacatgtggtgatggtgtgatcacaaggatccggctctgcaactctcccagcccccagatgaacgggaaaccctgtgaaggcgaagcgcgggagaccaaagcctgcaagaaagacgcctgccccatcaatggaggctggggtccttggtcaccatgggacatctgttctgtcacctgtggaggaggggtacagaaacgtagtcgtctctgcaacaaccccacaccccagtttggaggcaaggactgcgttggtgatgtaacagaaaaccagatctgcaacaagcaggactgtccaattgatggatgcctgtccaatccctgctttgccggcgtgaagtgtactagctaccctgatggcagctggaaatgtggtgcttgtccccctggttacagtggaaatggcatccagtgcacagatgttgatgagtgcaaagaagtgcctgatgcctgcttcaaccacaatggagagcaccggtgtgagaacacggaccccggctacaactgcctgccctgccccccacgcttcaccggctcacagcccttcggccagggtgtcgaacatgccacggccaacaaacaggtgtgcaagccccgtaacccctgcacggatgggacccacgactgcaacaagaacgccaagtgcaactacctgggccactatagcgaccccatgtaccgctgcgagtgcaagcctggctacgctggcaatggcatcatctgcggggaggacacagacctggatggctggcccaatgagaacctggtgtgcgtggccaatgcgacttaccactgcaaaaaggataattgccccaaccttcccaactcagggcaggaagactatgacaaggatggaattggtgatgcctgtgatgatgacgatgacaatgataaaattccagatgacagggacaactgtccattccattacaacccagctcagtatgactatgacagagatgatgtgggagaccgctgtgacaactgtccctacaaccacaacccagatcaggcagacacagacaacaatggggaaggagacgcctgtgctgcagacattgatggagacggtatcctcaatgaacgggacaactgccagtacgtctacaatgtggaccagagagacactgatatggatggggttggagatcagtgtgacaattgccccttggaacacaatccggatcagctggactctgactcagaccgcattggagatacctgtgacaacaatcaggatattgatgaagatggccaccagaacaatctggacaactgtccctatgtgcccaatgccaaccaggctgaccatgacaaagatggcaagggagatgcctgtgaccacgatgatgacaacgatggcattcctgatgacaaggacaactgcagactcgtgcccaatcccgaccagaaggactctgacggcgatggtcgaggtgatgcctgcaaagatgattttgaccatgacagtgtgccagacatcgatgacatctgtcctgagaatgttgacatcagtgagaccgatttccgccgattccagatgattcctctggaccccaaagggacatcccaaaatgaccctaactgggttgtacgccatcagggtaaagaactcgtccagactgtcaactgtgatcctggactcgctgtaggttatgatgagtttaatgctgtggacttcagtggcaccttcttcatcaacaccgaaagggacgatgactatgctggatttgtctttggctaccagtccagcagccgcttttatgttgtgatgtggaagcaagtcacccagtcctactgggacaccaaccccacgagggctcagggatactcgggcctttctgtgaaagttgtaaactccaccacagggcctggcgagcacctgcggaacgccctgtggcacacaggaaacacccctggccaggtgcgcaccctgtggcatgaccctcgtcacataggctggaaagatttcaccgcctacagatggcgtctcagccacaggccaaagacgggtttcattagagtggtgatgtatgaagggaagaaaatcatggctgactcaggacccatctatgataaaacctatgctggtggtagactagggttgtttgtcttctctcaagaaatggtgttcttctctgacctgaaatacgaatgtagagatccctaatcatcaaattgttgattgaaagactgatcataaaccaatgctggtattgcaccttctggaactatgggcttgagaaaacccccaggatcacttctccttggcttccttcttttctgtgcttgcatcagtgtggactcctagaacgtgcgacctgcctcaagaaaatgcagttttcaaaaacagactcagcattcagcctccaatgaataagacatcttccaagcatataaacaattgctttggtttccttttgaaaaagcatctacttgcttcagttgggaaggtgcccattccactctgcctttgtcacagagcagggtgctattgtgaggccatctctgagcagtggactcaaaagcattttcaggcatgtcagagaagggaggactcactagaattagcaaacaaaaccaccctgacatcctccttcaggaacacggggagcagaggccaaagcactaaggggagggcgcatacccgagacgattgtatgaagaaaatatggaggaactgttacatgttcggtactaagtcattttcaggggattgaaagactattgctggatttcatgatgctgactggcgttagctgattaacccatgtaaataggcacttaaatagaagcaggaaagggagacaaagactggcttctggacttcctccctgatccccacccttactcatcacctgcagtggccagaattagggaatcagaatcaaaccagtgtaaggcagtgctggctgccattgcctggtcacattgaaattggtggcttcattctagatgtagcttgtgcagatgtagcaggaaaataggaaaacctaccatctcagtgagcaccagctgcctcccaaaggaggggcagccgtgcttatatttttatggttacaatggcacaaaattattatcaacctaactaaaacattccttttctcttttttcctgaattatcatggagttttctaattctctcttttggaatgtagattttttttaaatgctttacgatgtaaaatatttattttttacttattctggaagatctggctgaaggattattcatggaacaggaagaagcgtaaagactatccatgtcatctttgttgagagtcttcgtgactgtaagattgtaaatacagattatttattaactctg

SEQ ID NO: 329431 - DNA, 4369 bp, Homo sapiens
tagagttcccccccgtccgatggccatgccccgtcccgatggcccctgtgacaacaagatttaaacaggatggtggctggagccactggtccccgtggtcatcttgttctgtgacatgtggtgatggtgtgatcacaaggatccggctctgcaactctcccagcccccagatgaacgggaaaccctgtgaaggcgaagcgcgggagaccaaagcctgcaagaaagacgcctgccccatcaatggaggctggggtccttggtcaccatgggacatctgttctgtcacctgtggaggaggggtacagaaacgtagtcgtctctgcaacaaccccacaccccagtttggaggcaaggactgcgttggtgatgtaacagaaaaccagatctgcaacaagcaggactgtccaattgatggatgcctgtccaatccctgctttgccggcgtgaagtgtactagctaccctgatggcagctggaaatgtggtgcttgtccccctggttacagtggaaatggcatccagtgcacagatgttgatgagtgcaaagaagtgcctgatgcctgcttcaaccacaatggagagcaccggtgtgagaacacggaccccggctacaactgcctgccctgccccccacgcttcaccggctcacagcccttcggccagggtgtcgaacatgccacggccaacaaacaggtgtgcaagccccgtaacccctgcacggatgggacccacgactgcaacaagaacgccaagtgcaactacctgggccactatagcgaccccatgtaccgctgcgagtgcaagcctggctacgctggcaatggcatcatctgcggggaggacacagacctggatggctggcccaatgagaacctggtgtgcgtggccaatgcgacttaccactgcaaaaaggataattgccccaaccttcccaactcagggcaggaagactatgacaaggatggaattggtgatgcctgtgatgatgacgatgacaatgataaaattccagatgacagggacaactgtccattccattacaacccagctcagtatgactatgacagagatgatgtgggagaccgctgtgacaactgtccctacaaccacaacccagatcaggcagacacagacaacaatggggaaggagacgcctgtgctgcagacattgatggagacggtatcctcaatgaacgggacaactgccagtacgtctacaatgtggaccagagagacactgatatggatggggttggagatcagtgtgacaattgccccttggaacacaatccggatcagctggactctgactcagaccgcattggagatacctgtgacaacaatcaggatattgatgaagatggccaccagaacaatctggacaactgtccctatgtgcccaatgccaaccaggctgaccatgacaaagatggcaagggagatgcctgtgaccacgatgatgacaacgatggcattcctgatgacaaggacaactgcagactcgtgcccaatcccgaccagaaggactctgacggcgatggtcgaggtgatgcctgcaaagatgattttgaccatgacagtgtgccagacatcgatgacatctgtcctgagaatgttgacatcagtgagaccgatttccgccgattccagatgattcctctggaccccaaagggacatcccaaaatgaccctaactgggttgtacgccatcagggtaaagaactcgtccagactgtcaactgtgatcctggactcgctgtaggttatgatgagtttaatgctgtggacttcagtggcaccttcttcatcaacaccgaaagggacgatgactatgctggatttgtctttggctaccagtccagcagccgcttttatgttgtgatgtggaagcaagtcacccagtcctactgggacaccaaccccacgagggctcagggatactcgggcctttctgtgaaagttgtaaactccaccacagggcctggcgagcacctgcggaacgccctgtggcacacaggaaacacccctggccaggtgcgcaccctgtggcatgaccctcgtcacataggctggaaagatttcaccgcctacagatggcgtctcagccacaggccaaagacgggtttcattagagtggtgatgtatgaagggaagaaaatcatggctgactcaggacccatctatgataaaacctatgctggtggtagactagggttgtttgtcttctctcaagaaatggtgttcttctctgacctgaaatacgaatgtagagatccctaatcatcaaattgttgattgaaagactgatcataaaccaatgctggtattgcaccttctggaactatgggcttgagaaaacccccaggatcacttctccttggcttccttcttttctgtgcttgcatcagtgtggactcctagaacgtgcgacctgcctcaagaaaatgcagttttcaaaaacagactcagcattcagcctccaatgaataagacatcttccaagcatataaacaattgctttggtttccttttgaaaaagcatctacttgcttcagttgggaaggtgcccattccactctgcctttgtcacagagcagggtgctattgtgaggccatctctgagcagtggactcaaaagcattttcaggcatgtcagagaagggaggactcactagaattagcaaacaaaaccaccctgacatcctccttcaggaacacggggagcagaggccaaagcactaaggggagggcgcatacccgagacgattgtatgaagaaaatatggaggaactgttacatgttcggtactaagtcattttcaggggattgaaagactattgctggatttcatgatgctgactggcgttagctgattaacccatgtaaataggcacttaaatagaagcaggaaagggagacaaagactggcttctggacttcctccctgatccccacccttactcatcacctgcagtggccagaattagggaatcagaatcaaaccagtgtaaggcagtgctggctgccattgcctggtcacattgaaattggtggcttcattctagatgtagcttgtgcagatgtagcaggaaaataggaaaacctaccatctcagtgagcaccagctgcctcccaaaggaggggcagccgtgcttatatttttatggttacaatggcacaaaattattatcaacctaactaaaacattccttttctcttttttcctgaattatcatggagttttctaattctctcttttggaatgtagattttttttaaatgctttacgatgtaaaatatttattttttacttattctggaagatctggctgaaggattattcatggaacaggaagaagcgtaaagactatccatgtcatctttgttgagagtcttcgtgactgtaagattgtaaatacagattatttattaactctgttctgcctggaaatttaggcttcatacggaaagtgtttgagagcaagtagttgacatttatcagcaaatctcttgcaagaacagcacaaggaaaatcagtctaataagctgctctgccccttgtgctcagagtggatgttatgggattctttttttctctgttttatcttttcaagtggaattagttggttatccatttgcaaatgttttaaattgcaaagaaagccatgaggtcttcaatactgttttaccccatcccttgtgcatatttccagggagaaggaaagcatatacacttttttctttcatttttccaaaagagaaaaaaatgacaaaaggtgaaacttacatacaaatattacctcatttgttgtgtgactgagtaaagaatttttggatcaagcggaaagagtttaagtgtctaacaaacttaaagctactgtagtacctaaaaagtcagtgttgtacatagcataaaaactctgcagagaagtattcccaataaggaaatagcattgaaatgttaaatacaatttctgaaagttatgttttttttctatcatctggtataccattgctttatttttataaattattttctcattgccattggaatagatatctcagattgtgtagatatgctatttaaataatttatcaggaaatactgcctgtagagttagtatttctatttttatataatgtttgcacactgaattgaagaattgttggttttttcttttttttggttttgttttttttttttttttttttgcttttgacctcccatttttactatttgccaatacctttttctaggaatgtgcttttttttgtacacatttttatccattttacattctaaagcagtgtaagttgtatattactgtttcttatgtacaaggaacaacaataaatcatatggaaattta

SEQ ID NO: 329432 - DNA, 5434 bp, Homo sapiens
tttctagctggaaagttgcgcgccaggcagcggggggcggagagaggagcccagactggcccccacctcccgcttcctgcccggccgccgcccattggccggaggaatccccaggaatgcgagcgcccctttaaaagcgcgcggctcctccgccttgccagccgctgcgcccgagctggcctgcgagttcagggctcctgtcgctctccaggagcaacctctactccggacgcacaggcattccccgcgcccctccagccctcgccgccctcgccaccgctcccggccgccgcgctccggtacacacaggatccctgctgggcaccaacagctccaccatggggctggcctggggactaggcgtcctgttcctgatgcatgtgtgtggcaccaaccgcattccagagtctggcggagacaacagcgtgtttgacatctttgaactcaccggggccgcccgcaaggggtctgggcgccgactggtgaagggccccgacccttccagcccagctttccgcatcgaggatgccaacctgatcccccctgtgcctgatgacaagttccaagacctggtggatgctgtgcgggcagaaaagggtttcctccttctggcatccctgaggcagatgaagaagacccggggcacgctgctggccctggagcggaaagaccactctggccaggtcttcagcgtggtgtccaatggcaaggcgggcaccctggacctcagcctgaccgtccaaggaaagcagcacgtggtgtctgtggaagaagctctcctggcaaccggccagtggaagagcatcaccctgtttgtgcaggaagacagggcccagctgtacatcgactgtgaaaagatggagaatgctgagttggacgtccccatccaaagcgtcttcaccagagacctggccagcatcgccagactccgcatcgcaaaggggggcgtcaatgacaatttccagggggtgctgcagaatgtgaggtttgtctttggaaccacaccagaagacatcctcaggaacaaaggctgctccagctctaccagtgtcctcctcacccttgacaacaacgtggtgaatggttccagccctgccatccgcactaactacattggccacaagacaaaggacttgcaagccatctgcggcatctcctgtgatgagctgtccagcatggtcctggaactcaggggcctgcgcaccattgtgaccacgctgcaggacagcatccgcaaagtgactgaagagaacaaagagttggccaatgagctgaggcggcctcccctatgctatcacaacggagttcagtacagaaataacgaggaatggactgttgatagctgcactgagtgtcactgtcagaactcagttaccatctgcaaaaaggtgtcctgccccatcatgccctgctccaatgccacagttcctgatggagaatgctgtcctcgctgttggcccagcgactctgcggacgatggctggtctccatggtccgagtggacctcctgttctacgagctgtggcaatggaattcagcagcgcggccgctcctgcgatagcctcaacaaccgatgtgagggctcctcggtccagacacggacctgccacattcaggagtgtgacaagagatttaaacaggatggtggctggagccactggtccccgtggtcatcttgttctgtgacatgtggtgatggtgtgatcacaaggatccggctctgcaactctcccagcccccagatgaacgggaaaccctgtgaaggcgaagcgcgggagaccaaagcctgcaagaaagacgcctgccccatcaatggaggctggggtccttggtcaccatgggacatctgttctgtcacctgtggaggaggggtacagaaacgtagtcgtctctgcaacaaccccacaccccagtttggaggcaaggactgcgttggtgatgtaacagaaaaccagatctgcaacaagcaggactgtccaattgatggatgcctgtccaatccctgctttgccggcgtgaagtgtactagctaccctgatggcagctggaaatgtggtgcttgtccccctggttacagtggaaatggcatccagtgcacagatgttgatgagtgcaaagaagtgcctgatgcctgcttcaaccacaatggagagcaccggtgtgagaacacggaccccggctacaactgcctgccctgccccccacgcttcaccggctcacagcccttcggccagggtgtcgaacatgccacggccaacaaacaggtgtgcaagccccgtaacccctgcacggatgggacccacgactgcaacaagaacgccaagtgcaactacctgggccactatagcgaccccatgtaccgctgcgagtgcaagcctggctacgctggcaatggcatcatctgcggggaggacacagacctggatggctggcccaatgagaacctggtgtgcgtggccaatgcgacttaccactgcaaaaaggataattgccccaaccttcccaactcagggcaggaagactatgacaaggatggaattggtgatgcctgtgatgatgacgatgacaatgataaaattccagatgacagggacaactgtccattccattacaacccagctcagtatgactatgacagagatgatgtgggagaccgctgtgacaactgtccctacaaccacaacccagatcaggcagacacagacaacaatggggaaggagacgcctgtgctgcagacattgatggagacggtatcctcaatgaacgggacaactgccagtacgtctacaatgtggaccagagagacactgatatggatggggttggagatcagtgtgacaattgccccttggaacacaatccggatcagctggactctgactcagaccgcattggagatacctgtgacaacaatcaggatattgatgaagatggccaccagaacaatctggacaactgtccctatgtgcccaatgccaaccaggctgaccatgacaaagatggcaagggagatgcctgtgaccacgatgatgacaacgatggcattcctgatgacaaggacaactgcagactcgtgcccaatcccgaccagaaggactctgacggcgatggtcgaggtgatgcctgcaaagatgattttgaccatgacagtgtgccagacatcgatgacatctgtcctgagaatgttgacatcagtgagaccgatttccgccgattccagatgattcctctggaccccaaagggacatcccaaaatgaccctaactgggttgtacgccatcagggtaaagaactcgtccagactgtcaactgtgatcctggactcgctgtaggttatgatgagtttaatgctgtggacttcagtggcaccttcttcatcaacaccgaaagggacgatgactatgctggatttgtctttggctaccagtccagcagccgcttttatgttgtgatgtggaagcaagtcacccagtcctactgggacaccaaccccacgagggctcagggatactcgggcctttctgtgaaagttgtaaactccaccacagggcctggcgagcacctgcggaacgccctgtggcacacaggaaacacccctggccaggtgcgcaccctgtggcatgaccctcgtcacataggctggaaagatttcaccgcctacagatggcgtctcagccacaggccaaagacgggtttcattagagtggtgatgtatgaagggaagaaaatcatggctgactcaggacccatctatgataaaacctatgctggtggtagactagggttgtttgtcttctctcaagaaatggtgttcttctctgacctgaaatacgaatgtagagatccctaatcatcaaattgttgattgaaagactgatcataaaccaatgctggtattgcaccttctggaactatgggcttgagaaaacccccagggtgtcgaacatgccacggccaacaaacaggtgtgcaagccccgtaacccctgcacggatgggacccacgactgcaacaagaacgccaagtgcaactacctgggccactatagcgaccccatgtaccgctgcgagtgcaagcctggctagctgccattgcctggtcacattgaaattggtggcttcattctagatgtagcttgtgcagatgtagcaggaaaataggaaaacctaccatctcagtgagcaccagctgcctcccaaaggaggggcagccgtgcttatatttttatggttacaatggcacaaaattattatcaacctaactaaaacattccttttctcttttttcctgaattatcatggagttttctaattctctcttttggaatgtagattttttttaaatgctttacgatgtaaaatatttattttttacttattctggaagatctggctgaaggattattcatggaacaggaagaagcgtaaagactatccatgtcatctttgttgagagtcttcgtgactgtaagattgtaaatacagattatttattaactctgttctgcctggaaatttaggcttcatacggaaagtgtttgagagcaagtagttgacatttatcagcaaatctcttgcaagaacagcacaaggaaaatcagtctaataagctgctctgccccttgtgctcagagtggatgttatgggattctttttttctctgttttatcttttcaagtggaattagttggttatccatttgcaaatgttttaaattgcaaagaaagccatgaggtcttcaatactgttttaccccatcccttgtgcatatttccagggagaaggaaagcatatacacttttttctttcatttttccaaaagagaaaaaaatgacaaaaggtgaaacttacatacaaatattacctcatttgttgtgtgactgagtaaagaatttttggatcaagcggaaagagtttaagtgtctaacaaacttaaagctactgtagtacctaaaaagtcagtgttgtacatagcataaaaactctgcagagaagtattcccaataaggaaatagcattgaaatgttaaatacaatttctgaaagttatgttttttttctatcatctggtataccattgctttatttttataaattattttctcattgccattggaatagatatctcagattgtgtagatatgctatttaaataatttatcaggaaatactgcctgtagagttagtatttctatttttatataatgtttgcacactgaattgaagaattgttggttttttcttttttttggttttgttttttttttttttttttttgcttttgacctcccatttttactatttgccaatacctttttctaggaatgtgcttttttttgtacacatttttatccattttacattctaaagcagtgtaagttgtatattactgtttcttatgtacaaggaacaacaataaatcatatggaaattta

SEQ ID NO: 329433 - DNA, 3463 bp, Homo sapiens
tttctagctggaaagttgcgcgccaggcagcggggggcggagagaggagcccagactggcccccacctcccgcttcctgcccggccgccgcccattggccggaggaatccccaggaatgcgagcgcccctttaaaagcgcgcggctcctccgccttgccagccgctgcgcccgagctggcctgcgagttcagggctcctgtcgctctccaggagcaacctctactccggacgcacaggcattccccgcgcccctccagccctcgccgccctcgccaccgctcccggccgccgcgctccggtacacacaggatccctgctgggcaccaacagctccaccatggggctggcctggggactaggcgtcctgttcctgatgcatgtgtgtggcaccaaccgcattccagagtctggcggagacaacagcgtgtttgacatctttgaactcaccggggccgcccgcaaggggtctgggcgccgactggtgaagggccccgacccttccagcccagctttccgcatcgaggatgccaacctgatcccccctgtgcctgatgacaagttccaagacctggtggatgctgtgcgggcagaaaagggtttcctccttctggcatccctgaggcagatgaagaagacccggggcacgctgctggccctggagcggaaagaccactctggccaggtcttcagcgtggtgtccaatggcaaggcgggcaccctggacctcagcctgaccgtccaaggaaagcagcacgtggtgtctgtggaagaagctctcctggcaaccggccagtggaagagcatcaccctgtttgtgcaggaagacagggcccagctgtacatcgactgtgaaaagatggagaatgctgagttggacgtccccatccaaagcgtcttcaccagagacctggccagcatcgccagactccgcatcgcaaaggggggcgtcaatgacaatttccagggggtgctgcagaatgtgaggtttgtctttggaaccacaccagaagacatcctcaggaacaaaggctgctccagctctaccagtgtcctcctcacccttgacaacaacgtggtgaatggttccagccctgccatccgcactaactacattggccacaagacaaaggacttgcaagccatctgcggcatctcctgtgatgagctgtccagcatggtcctggaactcaggggcctgcgcaccattgtgaccacgctgcaggacagcatccgcaaagtgactgaagagaacaaagagttggccaatgagctgaggcggcctcccctatgctatcacaacggagttcagtacagaaataacgaggaatggactgttgatagctgcactgagtgtcactgtcagaactcagttaccatctgcaaaaaggtgtcctgccccatcatgccctgctccaatgccacagttcctgatggagaatgctgtcctcgctgttggcccagcgactctgcggacgatggctggtctccatggtccgagtggacctcctgttctacgagctgtggcaatggaattcagcagcgcggccgctcctgcgatagcctcaacaaccgatgtgagggctcctcggtccagacacggacctgccacattcaggagtgtgacaagagatttaaacaggatggtggctggagccactggtccccgtggtcatcttgttctgtgacatgtggtgatggtgtgatcacaaggatccggctctgcaactctcccagcccccagatgaacgggaaaccctgtgaaggcgaagcgcgggagaccaaagcctgcaagaaagacgcctgccccatcaatggaggctggggtccttggtcaccatgggacatctgttctgtcacctgtggaggaggggtacagaaacgtagtcgtctctgcaacaaccccacaccccagtttggaggcaaggactgcgttggtgatgtaacagaaaaccagatctgcaacaagcaggactgtccaattgatggatgcctgtccaatccctgctttgccggcgtgaagtgtactagctaccctgatggcagctggaaatgtggtgcttgtccccctggttacagtggaaatggcatccagtgcacagatgttgatgagtgcaaagaagtgcctgatgcctgcttcaaccacaatggagagcaccggtgtgagaacacggaccccggctacaactgcctgccctgccccccacgcttcaccggctcacagcccttcggccagggtgtcgaacatgccacggccaacaaacaggtgtgcaagccccgtaacccctgcacggatgggacccacgactgcaacaagaacgccaagtgcaactacctgggccactatagcgaccccatgtaccgctgcgagtgcaagcctggctacgctggcaatggcatcatctgcggggaggacacagacctggatggctggcccaatgagaacctggtgtgcgtggccaatgcgacttaccactgcaaaaaggataattgccccaaccttcccaactcagggcaggaagactatgacaaggatggaattggtgatgcctgtgatgatgacgatgacaatgataaaattccagatgacagggacaactgtccattccattacaacccagctcagtatgactatgacagagatgatgtgggagaccgctgtgacaactgtccctacaaccacaacccagatcaggcagacacagacaacaatggggaaggagacgcctgtgctgcagacattgatggagacggtatcctcaatgaacgggacaactgccagtacgtctacaatgtggaccagagagacactgatatggatggggttggagatcagtgtgacaattgccccttggaacacaatccggatcagctggactctgactcagaccgcattggagatacctgtgacaacaatcaggatattgatgaagatggccaccagaacaatctggacaactgtccctatgtgcccaatgccaaccaggctgaccatgacaaagatggcaagggagatgcctgtgaccacgatgatgacaacgatggcattcctgatgacaaggacaactgcagactcgtgcccaatcccgaccagaaggactctgacggcgatggtcgaggtgatgcctgcaaagatgattttgaccatgacagtgtgccagacatcgatgacatctgtcctgagaatgttgacatcagtgagaccgatttccgccgattccagatgattcctctggaccccaaagggacatcccaaaatgaccctaactgggttgtacgccatcagggtaaagaactcgtccagactgtcaactgtgatcctggactcgctgtaggttatgatgagtttaatgctgtggacttcagtggcaccttcttcatcaacggggaggaacgggacatgaagattggtgtgtaacacctacaccattatcttggaaagatacaacgggagaacggtgcgag

SEQ ID NO: 329434 - DNA, 3119 bp, Homo sapiens
tttctagctggaaagttgcgcgccaggcagcggggggcggagagaggagcccagactggcccccacctcccgcttcctgcccggccgccgcccattggccggaggaatccccaggaatgcgagcgcccctttaaaagcgcgcggctcctccgccttgccagccgctgcgcccgagctggcctgcgagttcagggctcctgtcgctctccaggagcaacctctactccggacgcacaggcattccccgcgcccctccagccctcgccgccctcgccaccgctcccggccgccgcgctccggtacacacaggatccctgctgggcaccaacagctccaccatggggctggcctggggactaggcgtcctgttcctgatgcatgtgtgtggcaccaaccgcattccagagtctggcggagacaacagcgtgtttgacatctttgaactcaccggggccgcccgcaaggggtctgggcgccgactggtgaagggccccgacccttccagcccagctttccgcatcgaggatgccaacctgatcccccctgtgcctgatgacaagttccaagacctggtggatgctgtgcgggcagaaaagggtttcctccttctggcatccctgaggcagatgaagaagacccggggcacgctgctggccctggagcggaaagaccactctggccaggtcttcagcgtggtgtccaatggcaaggcgggcaccctggacctcagcctgaccgtccaaggaaagcagcacgtggtgtctgtggaagaagctctcctggcaaccggccagtggaagagcatcaccctgtttgtgcaggaagacagggcccagctgtacatcgactgtgaaaagatggagaatgctgagttggacgtccccatccaaagcgtcttcaccagagacctggccagcatcgccagactccgcatcgcaaaggggggcgtcaatgacaatttccagggggtgctgcagaatgtgaggtttgtctttggaaccacaccagaagacatcctcaggaacaaaggctgctccagctctaccagtgtcctcctcacccttgacaacaacgtggtgaatggttccagccctgccatccgcactaactacattggccacaagacaaaggacttgcaagccatctgcggcatctcctgtgatgagctgtccagcatggtcctggaactcaggggcctgcgcaccattgtgaccacgctgcaggacagcatccgcaaagtgactgaagagaacaaagagttggccaatgagctgaggcggcctcccctatgctatcacaacggagttcagtacagaaataacgaggaatggactgttgatagctgcactgagtgtcactgtcagaactcagttaccatctgcaaaaaggtgtcctgccccatcatgccctgctccaatgccacagttcctgatggagaatgctgtcctcgctgttggcccagcgactctgcggacgatggctggtctccatggtccgagtggacctcctgttctacgagctgtggcaatggaattcagcagcgcggccgctcctgcgatagcctcaacaaccgatgtgagggctcctcggtccagacacggacctgccacattcaggagtgtgacaagagatttaaacaggatggtggctggagccactggtccccgtggtcatcttgttctgtgacatgtggtgatggtgtgatcacaaggatccggctctgcaactctcccagcccccagatgaacgggaaaccctgtgaaggcgaagcgcgggagaccaaagcctgcaagaaagacgcctgccccatcaatggaggctggggtccttggtcaccatgggacatctgttctgtcacctgtggaggaggggtacagaaacgtagtcgtctctgcaacaaccccacaccccagtttggaggcaaggactgcgttggtgatgtaacagaaaaccagatctgcaacaagcaggactgtccaattgatggatgcctgtccaatccctgctttgccggcgtgaagtgtactagctaccctgatggcagctggaaatgtggtgcttgtccccctggttacagtggaaatggcatccagtgcacagatgttgatgagtgcaaagaagtgcctgatgcctgcttcaaccacaatggagagcaccggtgtgagaacacggaccccggctacaactgcctgccctgccccccacgcttcaccggctcacagcccttcggccagggtgtcgaacatgccacggccaacaaacaggtacagtcaactagacgagtaaaccagaggacaggagagctgtccttgaccaaaataactgggagcgggaggaatgtaatttcatacccttcaccaaaaaaaaaagggcgaggagatgaatgtacggtctagttttagaaacgtgattagaaaatccatggtaaatcctgcaggggaaaaacagtcttccatatttaaaaatgctgctctggaataagttgtgagcagatggacttgtaaacgcctaggtgctgagcaaattcaagaaaaataaacataaagcaaagtttgcttatagcctcagggagaatggggagggacagaggtaacccacactcttccaaatggagcctctgtctactcagagatgacagggatctggattcttgtttccatgatatctgaggattctcaaaagctctgtgtaacagcagcatggtgtaccctcaggtgtgcaagccccgtaacccctgcacggatgggacccacgactgcaacaagaacgccaagtgcaactacctgggccactatagcgaccccatgtaccgctgcgagtgcaagcctggctacgctggcaatggcatcatctgcggggaggacacagacctggatggctggcccaatgagaacctggtgtgcgtggccaatgcgacttaccactgcaaaaaggacaattgccccaaccttccgcaggatccagctccctgcccgaggtcatgactgtcgccacatacagtgctttgacctggagtcgtacctgcagctcaactgtgagcgggggacttggaggtgtcctgtgtgcaacaagacagctttgctggagggcctggaggtggaccagtacatgctgggcat

SEQ ID NO: 329435 - DNA, 2012 bp, Homo sapiens
tttctagctggaaagttgcgcgccaggcagcggggggcggagagaggagcccagactggcccccacctcccgcttcctgcccggccgccgcccattggccggaggaatccccaggaatgcgagcgcccctttaaaagcgcgcggctcctccgccttgccagccgctgcgcccgagctggcctgcgagttcagggctcctgtcgctctccaggagcaacctctactccggacgcacaggcattccccgcgcccctccagccctcgccgccctcgccaccgctcccggccgccgcgctccggtacacacaggatccctgctgggcaccaacagctccaccatggggctggcctggggactaggcgtcctgttcctgatgcatgtgtgtggcaccaaccgcattccagagtctggcggagacaacagcgtgtttgacatctttgaactcaccggggccgcccgcaaggggtctgggcgccgactggtgaagggccccgacccttccagcccagctttccgcatcgaggatgccaacctgatcccccctgtgcctgatgacaagttccaagacctggtggatgctgtgcgggcagaaaagggtttcctccttctggcatccctgaggcagatgaagaagacccggggcacgctgctggccctggagcggaaagaccactctggccaggtcttcagcgtggtgtccaatggcaaggcgggcaccctggacctcagcctgaccgtccaaggaaagcagcacgtggtgtctgtggaagaagctctcctggcaaccggccagtggaagagcatcaccctgtttgtgcaggaagacagggcccagctgtacatcgactgtgaaaagatggagaatgctgagttggacgtccccatccaaagcgtcttcaccagagacctggccagcatcgccagactccgcatcgcaaaggggggcgtcaatgacaatttccagggggtgctgcagaatgtgaggtttgtctttggaaccacaccagaagacatcctcaggaacaaaggctgctccagctctaccagtgtcctcctcacccttgacaacaacgtggtgaatggttccagccctgccatccgcactaactacattggccacaagacaaaggacttgcaagccatctgcggcatctcctgtgatgagctgtccagcatggtcctggaactcaggggcctgcgcaccattgtgaccacgctgcaggacagcatccgcaaagtgactgaagagaacaaagagttggccaatgagctgaggcggcctcccctatgctatcacaacggagttcagtacagaaataacgaggaatggactgttgatagctgcactgagtgtcactgtcagaactcagttaccatctgcaaaaaggtgtcctgccccatcatgccctgctccaatgccacagttcctgatggagaatgctgtcctcgctgttggcccagcgactctgcggacgatggctggtctccatggtccgagtggacctcctgttctacgagctgtggcaatggaattcagcagcgcggccgctcctgcgatagcctcaacaaccgatgtgagggctcctcggtccagacacggacctgccacattcaggagtgtgacaagagatgtaagcatcttagcctctcagggacgtggagaactgacctgtccttgttgtcgtcaccaagggcagctccacagcatgtatattaagaacacgggttctaggatctctggatcccaatcccactgcttagctgtgcacccttgaacacaacttaccctctctgaggctctttcctcatttgcaacttggagataataatagttcttgataagtttatcttgagcattttatttagatactgcatgtaaagcagttagcactgagttttggtttatggtaagcaccctgtaaatgttaggatattaacagcaacccataaaaacagcgaacttatccgttctctggtagaaaacattccatgttgacatttgggcatgtgg

SEQ ID NO: 329436 - DNA, 186 bp, Homo sapiens
cattccactagagcattgacagccctgaccatgttttggcttgtaaaggaaatgttacaggatgtagacttctgtatgcaacatgctcagcagcctgttcccctctcactctcttgccctgcagaactcagttaccatctgcaaaaaggtgtcctgccccatcatgccctgctccaatgccacagt

SEQ ID NO: 329437 - DNA, 486 bp, Homo sapiens
ctgttcctgatgcatgtgtgtggcaccaaccgcattccaggtgagtttgtgtggcacctttaggggaaggagggacaaggaagaggtgctggctatcccaggtgtgccccctcacgtgctgtcctctccctcttgagcctgactggacatcaggacgcagcttcactctgatcctggtatttattcacctctttcagtggttgccaggagttttcaccccaaccctttgtctccacccctaaggactcagccccctactgctggtcccagcctagaaagctcactttgtgttctctcctgtctaacagagtctggcggagacaacagcgtgtttgacatctttgaactcaccggggccgcccgcaaggggtctgggcgccgactggtgaagggccccgacccttccagcccagctttccgcatcgaggatgccaacctgatcccccctgtgcctgatgacaagttccaagacctggtggatgctgt

SEQ ID NO: 329438 - DNA, 553 bp, Homo sapiens
tactgcaacccgcagccacactgaattcccctcactggcctctcctagactctcttggtgactttgcacattctgttctttcagcctgaaacaaccttccctgctgtttccttggtgaggcggttttcagggcttagcccaagcatcacctaatctgtggggattccctgcaccggctcctctctgggctgccctagttctatgccatgcagccctcacagccaggctgggcaggactggttttacttttttgtttgactacccagctaggatggtgttcctggaaggaagggggacgtctcattcctcgctgtgccactgatgtctagcacgcatgcctagcacacagagctgtgtaagggtatgaatagaatacatgacacaggattttattaatcttccagaatgaaaggactggaggccaggcacagtggctcaagcctgtaatcccagcactttgcgaggccgaggcgggcagatcacctggggtcagcagttcaagaccagcctggccaacatggtgaaaccccgtctctactaaaaatacaaaaat

SEQ ID NO: 329439 - DNA, 499 bp, Homo sapiens
aaaaagccaagctccccatacagtgcggcatccctttcttacaacgccctttaaatcaagtttccaaaatggctagaactgagcagtatgatccttacacacacacctgtgtatgatcagacctggaaagcaagggcagggtagtctgcaaattgagaggatgcctccagtggggaggaactcgaaggggagaaggaatggggctgctctagttctggctgctgggttcatgggtgtccatgatattattttaaaatgttcaacaggaataataaagacttttaaagggcccgtcatggaccaatgagtaagttaagttcagtgtgtgatgaaccaaaggtgatactgtatccaactcattgtacataaaggccaggttaaatttttcaaaagccccagggcccccaaatgtgaagtataaaatttggaggccaaaccagggccccaattcctcccggctccacatgggcacaggtagcgccccccaattgcccgcctt

SEQ ID NO: 329440 - DNA, 758 bp, Homo sapiens
ggttaattggtttaatttgcttttccacagcctcctgacactccgcgtgtgcagcctggtgagaaaccctaaccacagcaggtgctgtggagtgccagctgtctgcagtggggaggccctgatgccacctggggaggccgctgaggacccccggggtccggggggcagggcagcagcatgacatttcccagcaggaggccctcgggcatttctcttgacccctccgtcttttaggtgaggaacctgaggagcggacaggctgggcaacttgtcccaggaggcatgcagcaagcccggcaaccctgtggcacccacactgcagtcccattccccataccactgtcgggggcagtggggcgggcgacatgcctgctctagagccaggcaggcgacatgcctgctccagagcccagcaggctagacctggctctccaagcactgtccctggaggacaagcccctgtctatgagatggcgatggcgaggggagccacccccaggcgagaggggcagcgatacccgtgctggtgcaaagagctccagaaactcgccctgttgtttcgtgctcatcatgaccactgccctctatctgcaagagttgcaggcacctcctgggaggtggcagaggagcccttcgcaggtgccatgagggctgaaggggtccgcgcaccccctggagcgagacaggcaaacacgagtcactcccctacccctgacacatcctcctcaccacagggccctggcaatcacgagccctgg

SEQ ID NO: 329441 - DNA, 533 bp, Homo sapiens
ggtgtagaggccctcggtgagcactgaggggagaagcacagagaaggaaggggacaggacccactcaggaaattcaacatccactgagtcaggaaaaccttccccatctgctgtctagctgagagtctttgggaaaccactgtgcctcagcttccctgtctccaaggaaatgattgacatggctgcctgcttcaacaggaacacagggacatgaggaggagaaatgtgggctctggcagcacaggaatagccttcagcaaggacagtgtgctcagaaccctcacctctgtggcaaccaagggtaccttcccaggcctgtctttctctatccagtaaaaatgagattcagggctcaagcagagcctgcgaaggtccaacaactaccattcccaggagacccctggagattatgcgtgaattacatgacaatggcacgtcttaccggctcagaagacttggcgagtgtgcagtgttgggggagggcgtttgctggcagagtcaaggagaggttgaggaggctgtgaggaggaagg

SEQ ID NO: 329442 - DNA, 537 bp, Homo sapiens
tagactaatgtatcgcgacgtgttatcaatctcactgcttctactctgctacccctacaatccattatcctcaaagcagccagaatcatggtactacaatataaatataaactagattatgtcattgcctgctttatactcttccacaacttcccatatttaggtttaaatcttaactcttcaccagaggcccccatgtacccttttgagagcatgttacatcactcctgccctcgattcagacacagattgcctccatttggttcctttaacaggccaagttcattcttacctaagggtcttgagctaacttttcttaatgccacaatattctgctctcagttcttcatgtagctgactcttgctattcacatctcagcttaaaggacaactcctctgagagcatctttaatcatccaatttaaagtagccatctgggagacttatactttggacaagatagagtaacaggaaccagacttatccccctacctgaaacaactataaaaacagacacaatatatggatcaatagtgt

SEQ ID NO: 329443 - DNA, 485 bp, Homo sapiens
gacagtaagacaatagaccattcatctttgtgtcacccaaacaaagaaatattcctttataaccccctttcctccccccacctaatcacatgctactggaactgactgtcttgtgatctactcccatagttggcatagatttaaaaataatcttttttaaattaatctgatagtagttatggaaaggaacaaattgttcaccaattttcatcagctttatcttttcagtccagtaactgagaacttaaaaagactattctagtgattttactatcctgctcagatggcattcaaaaacatttttcacttctcacgtcttggaaaaatttgtaaattcgttaagtctttttgtttgaaagttaatgtgactggaaatattttaatgtaaatatcgggttgggtgcattgtatcattttgctctacaatgactatatcctcatttgggtttatggccagtttataattaaaagtaatctttacttgc

SEQ ID NO: 329444 - DNA, 255 bp, Homo sapiens
gctcagacacttcaggaaacaaatgggtatgatatactacttttgaatgtttacatactctgcaacccagaaatcctacttttggggaatataccccagaaaaacactgatgtgtgtgtaccaagagacatgaataagagcattcacagcaacagtggcagaatactgaggaaaatgaaataggagaacttaactgatcatagatgaggcatattgtggtatattcacacaaatatacaaccgtggaagtaaatg

SEQ ID NO: 329445 - DNA, 327 bp, Homo sapiens
ctgctcccagcaggagggacgggatatgctctgagctcactcagcccttctggcactgactcggttctcatctctcgccttgcatagtatttgtgtggcggtgtggcttatcgctgccctgtcctctgactctggagggtgggggctgtttctgacttacctcttggtggcagcactcaggatgggccttgcctaatgtaggtgctcagaaaattagttgtcgttagttgaacaacagagacagcacagggaagtggtttccctgtggttaaaatataggaccttgaaggctgggtttggatagagaaacgtggggagggtgagatg

SEQ ID NO: 329446 - DNA, 1272 bp, Homo sapiens
  misc_feature (3)..(3): n is a, c, g, or t
  misc_feature (45)..(45): n is a, c, g, or t
ggnggggttgtcttgggccgggcagggcgggtaagttgtcgtagnggcccggtccgtgagggactgctaaggaagaggctgcatggcgcggtagtcccccgagtggaggtcggctgcccctgggaaaccagagagtcggagggagtccatctggagcggccaagtggtgactctcaaaaggaaataggatcatggcagcagatgatgacaatggtgatggaacaagtttatttgatgtcttttctgcttctcctcttaagaacaatgatgaaggctcactggacatatacgctgggttggacagtgctgtttctgacagcgcttccaaatcctgtgtaccatcaagaaattgtttggacttatatgaagagatcctgactgaagaaggaactgcaaaggaggcaacatataatgatttgcaagtagaatatggaaaatgtcaactacaaatgaaagagctgatgaaaaaatttaaagaaatacagacacagaatttcagcttaataaacgaaaaccagtctcttaagaagaatatttcagcacttatcaaaactgccagagtggaaataaaccgcaaggatgaagaaataagtaatcttcaccaaagattgtctgagtttccacattttcgaaataatcataaaactgcaaggacatttgatacagttaaaacaaaagatcttaaatctagatctccacatttggatgattgttcaaagactgatcacagagctaaaagtgatgtttctaaagatgtacatcatagcacttcactgccaaatctggaaaaggaaggaaaaccacattctgataaaaggagtacttcacatttacctacatctgttgagaaacactgcactaatggtgtttggtcacgttctcattatcaggttggcgagggtagctcaaatgaggatagtagaagaggaagaaaagatattagacatagccagtttaacagaggaactgaaagagtacgaaaagacttaagtactggctgtggtgatggtgaaccaaggatattggaggctagtcaaaggctacaaggacatcctgagaaatatggtaaaggtgaaccaaagactgaaagcaaaagttcgaagtttaaaagtaactcagattctgactataaaggtgaacgcattaactcttcttgggagaaagagacccctggagaaaggtcacacagtcgagtagactctcaaagtgacaaaaaactagaaagacaaagtgaaagatcacaaaatataaataggaaagaagttaaatcac

SEQ ID NO: 329447 - DNA, 947 bp, Homo sapiens
  misc_feature (3)..(3): n is a, c, g, or t
  misc_feature (45)..(45): n is a, c, g, or t
ggnggggttgtcttgggccgggcagggcgggtaagttgtcgtagnggcccggtccgtgagggactgctaaggaagaggctgcatggcgcggtagtcccccgagtggaggtcggctgcccctgggaaaccagagagtcggagggagtccatctggagcggccaagtggtgactctcaaaaggaaataggatcatggcagcagatgatgacaatggtgatggaacaagtttatttgatgtcttttctgcttctcctcttaagaacaatgatgaaggctcactggacatatacgctgggttggacagtgctgtttctgacagcgcttccaaatcctgtgtaccatcaagaaattgtttggacttatatgaagagatcctgactgaagaaggaactgcaaaggaggcaacatataatgatttgcaagtagaatatggaaaatgtcaactacaaatgaaagagctgatgaaaaaatttaaagaaatacagacacagaatttcagcttaataaacgaaaaccagtctcttaagaagaatatttcagcacttatcaaaactgccagagtggaaataaaccgcaaggatgaagaaataagtaatcttcaccaaagaaatgatgaccgggaaattttattggagtgtcagaaaagagggccatcatttaaaacatttgcatatttagccgccaagttggataaaaatccaaatcaggtctcagaaagattccagcagctaatgaagctctttgaaaagtcaaaatgcagataagttgctgaattcctgggactcttaactgatattgcatactacacagaagcttcaaattcctcatgttttaaatgagcactagagggagggtttatcacctttttggttaccagatgattatctatatttggttattactcagtgactctctaatttcacatcagcatgttcagcttgtgctag

SEQ ID NO: 329448 - DNA, 4207 bp, Homo sapiens
atggatgtattacaaacagatgtgtctcaaaactttggcttggaattggataccaaaagaaatgataattcagattattgtggtatttctgaaggtatggagatgaaggtggcactttcaacaacagtgagtgaaaccactgaaagcattttgcagccttcaattgaggaagctgatattttgccaataatgctttcagaagataataacccaaaatttgagccttctgttatagttacaccactggttgagagtaagtcgtgtcatctggagccttgcttacctaaagagactctagattcttcacttcagcagactgagttaatggaccacagaatggcaactggtgaaacaaactcagtatatcatgatgatgataactcggttttgagcattgaccttaatcacctgagacctattccagaagccatcagtcctctgaatagtccagtgagacctgtagcaaaagttcttagaaatgaaagcccacctcaagttccagtgtataataacagtcataaagatgtgtttttaccaaattcagctcattctacctctaagagtcagtctgatctcaataaggaaaatcaaaagccaatttacaaatctgacaaatgtacagaagcagacacatgtaagaattcaccattagatgaattagaagaaggagaaattagaagtgatagtgaaacatctaaaccacaagaaagttttgaaaaaaattccaaacgtagagtgtcagctgatgtgcggaagtcaaagactatcccacgacgtgggaaaagtactgtgtgtttagataaagacagtaggaaaacacatgtaagaatccatcagaccaataacaaatggaataaaagacctgataaatctagcagatcttcaaaaacagagaagaaagataaagtgatgagcacttccagcttggaaaaaatagttccaattattgctgtaccctcttctgaacaagagatcatgcacatgttacgaatgataagaaaacatgtaagaaaaaattatatgaaattcaaggcaaaattttcattaatacaatttcacagaattattgagtcagcaattttgagttttacatctttaattaaacatctcaacttacacaaaatctctaagtcagtgactaccttacagaagaatctctgtgatattatagagtctaaacttaagcaagttaaaaagaatggcatagttgatcgtttatttgaacagcaactaccagatatgaaaaaaaaattgtggaagtttgtagatgaccaacttgattatttgtttgcaaagcttaagaaaatcttagtatgtgattccaaaagctttggaagagatagtgatgaaggcaaacttgaaaaaacaagtaaacagaatgcacagtattcaaatagtcagaaaaggagtgtggacaactccaacagagaattgctgaaagaaaaattatcaaaatcagaagaccctgttcattataagtctttagtgggatgtaaaaaatctgaggaaaattatcaagaccaaaataactccagtattaacactgtaaagcatgacattaaaaaaaattttaacatctgctttgataatataaagaactctcaatccgaagagcgctccttggaagtacactgtccaagcaccccaaagtcagaaaaaaacgaaggaagcagcatagaggatgcacagacatcccagcatgcaactttgaagccagaacgaagtttcgagattcttaccgaacagcaagcatcgagccttacttttaatttagtgagtgatgcacaaatgggtgaaatatttaaaagtttgttgcaaggttctgatcttttagacagcagtgttaactgtactgaaaaaagtgagtgggagttaaagactccagagaagcagctgctagagactcttaagtgcgagtctataccagcttgtacaacagaagagctagtttcaggggtggcttctccatgtcctaaaatgattagtgatgataattggtcattattatcatctgaaaaaggtccatctctgtcttcagggctttcattgccggttcatcctgatgtgttggatgaaagttgtatgtttgaagtgtctactaacctacctttaagtaaagataatgtgtgtagtgtagaaaagagcaagccctgcgtttcttccatacttcttgaagatctagcagtctctttaacagtaccatcgcctctgaagtcagatggtcatctcagttttttaaagcctgatatgtcgtccagttcaactcctgaagaagtcattagtgctcattttagtgaagatgccttacttgaggaagaggatgcatctgagcaagatattcatttagctctggagtctgataattcaagcagtaaatcaagttgttcttcttcctggacaagccgatctgttgctccaggctttcagtaccaccctaatctacctatgcatgccgtcataatggaaaagtccaatgatcatttcattgtgaaaatacgacgtgcaacaccatctacctcttctggccttaaacagagtatgatgcctgatgaattattgacatctttgcccagacatggaaaggaagctgatgaaggaccagagaaagaatatatttcatgtcagaacacagtttttaaatctgtggaggaattggaaaactccaacaaaaatgttgatggcagcaagtcaactcatgaagaacagagctctatgatacaaacacaggttcctgatatatatgaatttcttaaagatgcttcagataagatgggtcatagtgatgaagtggctgatgaatgtttcaaattgcatcaagtatgggaaacaaaagtgcctgaaagcattgaagaattgccttcaatggaagaaatctcacactctgttggggaacatcttccaaacacatacgtagatctaacgaaagatccagtcactgaaaccaaaaacttgggggaattcatagaagtaacagttttacatattgatcagttgggatgttctggaggcaatttaaatcagagtgctcaaatattagacaattctttgcaggctgatactgtaggtgcttttattgatttgacacaagatgcttcaagtgaggctaaaagtgaaggtaatcatcctgcattagctgtggaagacttgggatgtggggtgatacaggtagatgaagataattgtaaggaagaaaaggcacaagtggcaaacaggcctttaaaatgcattgttgaggaaacctatatcgacttgaccacagaatctcccagttcatgtgaagtaaaaaaagatgagttaaaatcagagccaggatcaaattgtgataactcggagttgcctgggactttgcataattctcacaaaaagagaagaaacatttctgatctaaatcatcctcataaaaaacaaagaaaggaaacagacttaactaataaggaaaagaccaagaaacctacccaagattcttgtgagaatactgaagctcaccaaaagaaagccagtaagaagaaggcccctcctgtgactaaagatccctcatcattaaaggcaaccccagggattaaggattcatcagcagcacttgccacttctacaagtctttctgcaaaaaatgttattaaaaagaagggagaaattatcattttatggacaagaaatgatgaccgggaaattttattggagtgtcagaaaagagggccatcatttaaaacatttgcatatttagccgccaagttggataaaaatccaaatcaggtctcagaaagattccagcagctaatgaagctctttgaaaagtcaaaatgcaggtagttaatggttacactacaggagactagtgatgtgaatagtgggtgagagacatccagttgagttcctgcttcagtcacaggttggaggatgattgctcgagcaggcatctaaggtgacctcatccacagggacgtgctcagagtgaagcctgctgcagttcagatcagcatggcatctctcctcaaccttctgattgctgatgactctaagataagttgctgaattcctgggactcttaactgatattgcatactacacagaagcttcaaattcctcatgttttaaatgagcactagagggagggtttatcacctttttggttaccagatgattatctatatttggttattactcagtgactctctaatttcacatcagcatgttcagcttgtgctag

SEQ ID NO: 329449 - DNA, 1748 bp, Homo sapiens
  misc_feature (3)..(3): n is a, c, g, or t
  misc_feature (45)..(45): n is a, c, g, or t
ggnggggttgtcttgggccgggcagggcgggtaagttgtcgtagnggcccggtccgtgagggactgctaaggaagaggctgcatggcgcggtagtcccccgagtggaggtcggctgcccctgggaaaccagagagtcggagggagtccatctggagcggccaagtggtgactctcaaaaggaaataggatcatggcagcagatgatgacaatggtgatggaacaagtttatttgatgtcttttctgcttctcctcttaagaacaatgatgaaggctcactggacatatacgctgggttggacagtgctgtttctgacagcgcttccaaatcctgtgtaccatcaagaaattgtttggacttatatgaagagatcctgactgaagaaggaactgcaaaggaggcaacatataatgatttgcaagtagaatatggaaaatgtcaactacaaatgaaagagctgatgaaaaaatttaaagaaatacagacacagaatttcagcttaataaacgaaaaccagtctcttaagaagaatatttcagcacttatcaaaactgccagagtggaaataaaccgcaaggatgaagaaataagtaatcttcaccaaagattgtctgagtttccacattttcgaaataatcataaaactgcaaggacatttgatacagttaaaacaaaagatcttaaatctagatctccacatttggatgattgttcaaagactgatcacagagctaaaagtgatgtttctaaagatgtacatcatagcacttcactgccaaatctggaaaaggaaggaaaaccacattctgataaaaggagtacttcacatttacctacatctgttgagaaacactgcactaatggtgtttggtcacgttctcattatcaggttggcgagggtagctcaaatgaggatagtagaagaggaagaaaagatattagacatagccagtttaacagaggaactgaaagagtacgaaaagacttaagtactggctgtggtgatggtgaaccaaggatattggaggctagtcaaaggctacaaggacatcctgagaaatatggtaaaggtgaaccaaagactgaaagcaaaagttcgaagtttaaaagtaactcagattctgactataaaggtgaacgcattaactcttcttgggagaaagagacccctggagaaaggtcacacagtcgagtagactctcaaagtgacaaaaaactagaaagacaaagtgaaagatcacaaaatataaataggaaagaagttaaatcacaagacaaagaagaaagaaaagttgatcaaaaacctaaatcagtagtaaaggaccaagatcactggagaagatctgaacgagcatcacttcctcattccaagaatgaaataacattttctcataattcaagtaaataccatctagaagagagaagaggatgggaagattgtaaaagagacaagagtgtaaacagtcatagttttcaagatggaagatgtccatcttctctttcaaacagtagaactcacaaaaacattgactctaaggaagttgatgccatgcatcagtgggaaaatacacctttaaaagcagaaagacatagaactgaagataagaggaaaagagaacaagaaagcaaagaagaaaataggcatattagaaatgaaaaaagagtacctacagaacatttgcagaagactaataaggaaactaagaaaaccactactgatttaaagaaacagaatgaaccaaagact

SEQ ID NO: 329450 - DNA, 957 bp, Homo sapiens
aattaaactaaagagcttctgcacagcaaaagaaactatcatcagagtgaacaggcaacctatagaatgggagaacatttttgctatctatccatctgacaaagggctaatatccagaatctataaagaacttaaacaaatttacaagaaaaaaacaaagaaaggaaacagacttaactaataaggaaaagaccaagaaacctacccaagattcttgtgagaatactgaagctcaccaaaagaaagccagtaagaagaaggcccctcctgtgactaaagatccctcatcattaaaggcaaccccagggattaaggattcatcagcagcacttgccacttctacaagtctttctgcaaaaaatgttattaaaaagaagggagaaattatcattttatggacaagaaatgatgaccgggaaattttattggagtgtcagaaaagagggccatcatttaaaacatttgcatatttagccgccaagttggataaaaatccaaatcaggtctcagaaagattccagcagctaatgaagctctttgaaaagtcaaaatgcaggtagttaatggttacactacaggagactagtgatgtgaatagtgggtgagagacatccagttgagttcctgcttcagtcacaggttggaggatgattgctcgagcaggcatctaaggtgacctcatccacagggacgtgctcagagtgaagcctgctgcagttcagatcagcatggcatctctcctcaaccttctgattgctgatgactctaagataagttgctgaattcctgggactcttaactgatattgcatactacacagaagcttcaaattcctcatgttttaaatgagcactagagggagggtttatcacctttttggttaccagatgattatctatatttggttattactcagtgactctctaatttcacatcagcatgttcagcttgtgctag

SEQ ID NO: 329451 - DNA, 948 bp, Homo sapiens
aagctaatgaaccaatgaattaacgaaattcgaggtcggtaacccggtaagaagagcttgtttggtattgagtgttgcctgggactttgcataattctcacaaaaagagaagaaacatttctgatctaaatcatcctcataaaaaacaaagaaaggaaacagacttaactaataaggaaaagaccaagaaacctacccaagattcttgtgagaatactgaagctcaccaaaagaaagccagtaagaagaaggcccctcctgtgactaaagatccctcatcattaaaggcaaccccagggattaaggattcatcagcagcacttgccacttctacaagtctttctgcaaaaaatgttattaaaaagaagggagaaattatcattttatggacaagaaatgatgaccgggaaattttattggagtgtcagaaaagagggccatcatttaaaacatttgcatatttagccgccaagttggataaaaatccaaatcaggtctcagaaagattccagcagctaatgaagctctttgaaaagtcaaaatgcaggtagttaatggttacactacaggagactagtgatgtgaatagtgggtgagagacatccagttgagttcctgcttcagtcacaggttggaggatgattgctcgagcaggcatctaaggtgacctcatccacagggacgtgctcagagtgaagcctgctgcagttcagatcagcatggcatctctcctcaaccttctgattgctgatgactctaagataagttgctgaattcctgggactcttaactgatattgcatactacacagaagcttcaaattcctcatgttttaaatgagcactagagggagggtttatcacctttttggttaccagatgattatctatatttggttattactcagtgactctctaatttcacatcagcatgttcagcttgtgctag

SEQ ID NO: 329452 - DNA, 839 bp, Homo sapiens
  misc_feature (19)..(19): n is a, c, g, or t
gcgggtaagttgtcgtagnggcccggtccgtgagggactgctaaggaagaggctgcatggcgcggtagtcccccgagtggaggtcggctgcccctgggaaaccagagagtcggagggagtccatctggagcggccaagtaggtcggggaagggccgcgcctgacgtctggccgcaggtagccacgttccctccgcccccggtgcagcttcagggcttgcaccctgcgtccctctgtggtccttcgagagggtctgggcggggactatgggtgggcgcgcccaggaattgtcccttcggcctctcgtcctgcccctcccccccaccatccagtctctccttggaatatactcttaaaatctttcggatggagttctttggagaaatgggtttcctggagtgtcaggtgatcattgatgttgattgtttctgaaatgtttatttaggcatcaaaccaacatgcctaaataagtttttcatttctacagcgcctagattcattcctagcacatagtaggccctaactcagatgtgaatgtaggattcgtaggagctgagcatttgtgcttcaggcatcaagttgtctttgactcttcgactcttccttggtctttttccattctccacacctccagcagcaaacctttcgcctctcctcaaggcctttcccccccatctccctcagcgcctctttgactggagggggacagaggctttcatggcagggattctcccatctcccttcctatccccgctatgccctccaattatcttttcctggcgttccgttttacaagagatggccttctttccaaaaacatttatattgtattgaatattc

SEQ ID NO: 329453 - DNA, 4260 bp, Homo sapiens
atggatgtattacaaacagatgtgtctcaaaactttggcttggaattggataccaaaagaaatgataattcagattattgtggtatttctgaaggtatggagatgaaggtggcactttcaacaacagtgagtgaaaccactgaaagcattttgcagccttcaattgaggaagctgatattttgccaataatgctttcagaagataataacccaaaatttgagccttctgttatagttacaccactggttgagagtaagtcgtgtcatctggagccttgcttacctaaagagactctagattcttcacttcagcagactgagttaatggaccacagaatggcaactggtgaaacaaactcagtatatcatgatgatgataactcggttttgagcattgaccttaatcacctgagacctattccagaagccatcagtcctctgaatagtccagtgagacctgtagcaaaagttcttagaaatgaaagcccacctcaagttccagtgtataataacagtcataaagatgtgtttttaccaaattcagctcattctacctctaagagtcagtctgatctcaataaggaaaatcaaaagccaatttacaaatctgacaaatgtacagaagcagacacatgtaagaattcaccattagatgaattagaagaaggagaaattagaagtgatagtgaaacatctaaaccacaagaaagttttgaaaaaaattccaaacgtagagtgtcagctgatgtgcggaagtcaaagactatcccacgacgtgggaaaagtactgtgtgtttagataaagacagtaggaaaacacatgtaagaatccatcagaccaataacaaatggaataaaagacctgataaatctagcagatcttcaaaaacagagaagaaagataaagtgatgagcacttccagcttggaaaaaatagttccaattattgctgtaccctcttctgaacaagagatcatgcacatgttacgaatgataagaaaacatgtaagaaaaaattatatgaaattcaaggcaaaattttcattaatacaatttcacagaattattgagtcagcaattttgagttttacatctttaattaaacatctcaacttacacaaaatctctaagtcagtgactaccttacagaagaatctctgtgatattatagagtctaaacttaagcaagttaaaaagaatggcatagttgatcgtttatttgaacagcaactaccagatatgaaaaaaaaattgtggaagtttgtagatgaccaacttgattatttgtttgcaaagcttaagaaaatcttagtatgtgattccaaaagctttggaagagatagtgatgaaggcaaacttgaaaaaacaagtaaacagaatgcacagtattcaaatagtcagaaaaggagtgtggacaactccaacagagaattgctgaaagaaaaattatcaaaatcagaagaccctgttcattataagtctttagtgggatgtaaaaaatctgaggaaaattatcaagaccaaaataactccagtattaacactgtaaagcatgacattaaaaaaaattttaacatctgctttgataatataaagaactctcaatccgaagagcgctccttggaagtacactgtccaagcaccccaaagtcagaaaaaaacgaaggaagcagcatagaggatgcacagacatcccagcatgcaactttgaagccagaacgaagtttcgagattcttaccgaacagcaagcatcgagccttacttttaatttagtgagtgatgcacaaatgggtgaaatatttaaaagtttgttgcaaggttctgatcttttagacagcagtgttaactgtactgaaaaaagtgagtgggagttaaagactccagagaagcagctgctagagactcttaagtgcgagtctataccagcttgtacaacagaagagctagtttcaggggtggcttctccatgtcctaaaatgattagtgatgataattggtcattattatcatctgaaaaaggtccatctctgtcttcagggctttcattgccggttcatcctgatgtgttggatgaaagttgtatgtttgaagtgtctactaacctacctttaagtaaagataatgtgtgtagtgtagaaaagagcaagccctgcgtttcttccatacttcttgaagatctagcagtctctttaacagtaccatcgcctctgaagtcagatggtcatctcagttttttaaagcctgatatgtcgtccagttcaactcctgaagaagtcattagtgctcattttagtgaagatgccttacttgaggaagaggatgcatctgagcaagatattcatttagctctggagtctgataattcaagcagtaaatcaagttgttcttcttcctggacaagccgatctgttgctccaggctttcagtaccaccctaatctacctatgcatgccgtcataatggaaaagtccaatgatcatttcattgtgaaaatacgacgtgcaacaccatctacctcttctggccttaaacagagtatgatgcctgatgaattattgacatctttgcccagacatggaaaggaagctgatgaaggaccagagaaagaatatatttcatgtcagaacacagtttttaaatctgtggaggaattggaaaactccaacaaaaatgttgatggcagcaagtcaactcatgaagaacagagctctatgatacaaacacaggttcctgatatatatgaatttcttaaagatgcttcagataagatgggtcatagtgatgaagtggctgatgaatgtttcaaattgcatcaagtatgggaaacaaaagtgcctgaaagcattgaagaattgccttcaatggaagaaatctcacactctgttggggaacatcttccaaacacatacgtagatctaacgaaagatccagtcactgaaaccaaaaacttgggggaattcatagaagtaacagttttacatattgatcagttgggatgttctggaggcaatttaaatcagagtgctcaaatattagacaattctttgcaggctgatactgtaggtgcttttattgatttgacacaagatgcttcaagtgaggctaaaagtgaaggtaatcatcctgcattagctgtggaagacttgggatgtggggtgatacaggtagatgaagataattgtaaggaagaaaaggcacaagtggcaaacaggcctttaaaatgcattgttgaggaaacctatatcgacttgaccacagaatctcccagttcatgtgaagtaaaaaaagatgagttaaaatcagagccaggatcaaattgtgataactcggagttgcctgggactttgcataattctcacaaaaagagaagaaacatttctgatctaaatcatcctcataaaaaacaaagaaaggaaacagacttaactaataaggaaaagaccaagaaacctacccaagattcttgtgagaatactgaagctcaccaaaagaaagccagtaagaagaaggcccctcctgtgactaaagatccctcatcattaaaggcaaccccagggattaaggattcatcagcagcacttgccacttctacaagtctttctgcaaaaaatgttattaaaaagaagggagaaattatcattttatggacaagaaatgatgaccgggaaattttattggagtgtcagaaaagagggccatcatttaaaacatttgcatatttagccgccaagttggataaaaatccaaatcaggtctcagaaagattccagcagctaatgaagctctttgaaaagtcaaaatgcaggtagttaatggttacactacaggagactagtaaaataaatgtttgacactgtagttgtgcagttaatggctgttagtcattgaagatgtgaatagtgggtgagagacatccagttgagttcctgcttcagtcacaggttggaggatgattgctcgagcaggcatctaaggtgacctcatccacagggacgtgctcagagtgaagcctgctgcagttcagatcagcatggcatctctcctcaaccttctgattgctgatgactctaagataagttgctgaattcctgggactcttaactgatattgcatactacacagaagcttcaaattcctcatgttttaaatgagcactagagggagggtttatcacctttttggttaccagatgattatctatatttggttattactcagtgactctctaatttcacatcagcatgttcagcttgtgctag

SEQ ID NO: 329454 - DNA, 3993 bp, Homo sapiens
atggatgtattacaaacagatgtgtctcaaaactttggcttggaattggataccaaaagaaatgataattcagattattgtggtatttctgaaggtatggagatgaaggtggcactttcaacaacagtgagtgaaaccactgaaagcattttgcagccttcaattgaggaagctgatattttgccaataatgctttcagaagataataacccaaaatttgagccttctgttatagttacaccactggttgagagtaagtcgtgtcatctggagccttgcttacctaaagagactctagattcttcacttcagcagactgagttaatggaccacagaatggcaactggtgaaacaaactcagtatatcatgatgatgataactcggttttgagcattgaccttaatcacctgagacctattccagaagccatcagtcctctgaatagtccagtgagacctgtagcaaaagttcttagaaatgaaagcccacctcaagttccagtgtataataacagtcataaagatgtgtttttaccaaattcagctcattctacctctaagagtcagtctgatctcaataaggaaaatcaaaagccaatttacaaatctgacaaatgtacagaagcagacacatgtaagaattcaccattagatgaattagaagaaggagaaattagaagtgatagtgaaacatctaaaccacaagaaagttttgaaaaaaattccaaacgtagagtgtcagctgatgtgcggaagtcaaagactatcccacgacgtgggaaaagtactgtgtgtttagataaagacagtaggaaaacacatgtaagaatccatcagaccaataacaaatggaataaaagacctgataaatctagcagatcttcaaaaacagagaagaaagataaagtgatgagcacttccagcttggaaaaaatagttccaattattgctgtaccctcttctgaacaagagatcatgcacatgttacgaatgataagaaaacatgtaagaaaaaattatatgaaattcaaggcaaaattttcattaatacaatttcacagaattattgagtcagcaattttgagttttacatctttaattaaacatctcaacttacacaaaatctctaagtcagtgactaccttacagaagaatctctgtgatattatagagtctaaacttaagcaagttaaaaagaatggcatagttgatcgtttatttgaacagcaactaccagatatgaaaaaaaaattgtggaagtttgtagatgaccaacttgattatttgtttgcaaagcttaagaaaatcttagtatgtgattccaaaagctttggaagagatagtgatgaaggcaaacttgaaaaaacaagtaaacagaatgcacagtattcaaatagtcagaaaaggagtgtggacaactccaacagagaattgctgaaagaaaaattatcaaaatcagaagaccctgttcattataagtctttagtgggatgtaaaaaatctgaggaaaattatcaagaccaaaataactccagtattaacactgtaaagcatgacattaaaaaaaattttaacatctgctttgataatataaagaactctcaatccgaagagcgctccttggaagtacactgtccaagcaccccaaagtcagaaaaaaacgaaggaagcagcatagaggatgcacagacatcccagcatgcaactttgaagccagaacgaagtttcgagattcttaccgaacagcaagcatcgagccttacttttaatttagtgagtgatgcacaaatgggtgaaatatttaaaagtttgttgcaaggttctgatcttttagacagcagtgttaactgtactgaaaaaagtgagtgggagttaaagactccagagaagcagctgctagagactcttaagtgcgagtctataccagcttgtacaacagaagagctagtttcaggggtggcttctccatgtcctaaaatgattagtgatgataattggtcattattatcatctgaaaaaggtccatctctgtcttcagggctttcattgccggttcatcctgatgtgttggatgaaagttgtatgtttgaagtgtctactaacctacctttaagtaaagataatgtgtgtagtgtagaaaagagcaagccctgcgtttcttccatacttcttgaagatctagcagtctctttaacagtaccatcgcctctgaagtcagatggtcatctcagttttttaaagcctgatatgtcgtccagttcaactcctgaagaagtcattagtgctcattttagtgaagatgccttacttgaggaagaggatgcatctgagcaagatattcatttagctctggagtctgataattcaagcagtaaatcaagttgttcttcttcctggacaagccgatctgttgctccaggctttcagtaccaccctaatctacctatgcatgccgtcataatggaaaagtccaatgatcatttcattgtgaaaatacgacgtgcaacaccatctacctcttctggccttaaacagagtatgatgcctgatgaattattgacatctttgcccagacatggaaaggaagctgatgaaggaccagagaaagaatatatttcatgtcagaacacagtttttaaatctgtggaggaattggaaaactccaacaaaaatgttgatggcagcaagtcaactcatgaagaacagagctctatgatacaaacacaggttcctgatatatatgaatttcttaaagatgcttcagataagatgggtcatagtgatgaagtggctgatgaatgtttcaaattgcatcaagtatgggaaacaaaagtgcctgaaagcattgaagaattgccttcaatggaagaaatctcacactctgttggggaacatcttccaaacacatacgtagatctaacgaaagatccagtcactgaaaccaaaaacttgggggaattcatagaagtaacagttttacatattgatcagttgggatgttctggaggcaatttaaatcagagtgctcaaatattagacaattctttgcaggctgatactgtaggtgcttttattgatttgacacaagatgcttcaagtgaggctaaaagtgaaggtaatcatcctgcattagctgtggaagacttgggatgtggggtgatacaggtagatgaagataattgtaaggaagaaaaggcacaagtggcaaacaggcctttaaaatgcattgttgaggaaacctatatcgacttgaccacagaatctcccagttcatgtgaagtaaaaaaagatgagttaaaatcagagccaggatcaaattgtgataactcggagttgcctgggactttgcataattctcacaaaaagagaagaaacatttctgatctaaatcatcctcataaaaaacaaagaaaggaaacagacttaactaataaggaaaagaccaagaaacctacccaagattcttgtgagaatactgaagctcaccaaaagaaagccagtaagaagaaggcccctcctgtgactaaagatccctcatcattaaaggcaaccccagggattaaggattcatcagcagcacttgccacttctacaagtctttctgcaaaaaatgttattaaaaagaagggagaaattatcattttatggacaagaaatgatgaccgggaaattttattggagtgtcagaaaagagggccatcatttaaaacatttgcatatttagccgccaagttggataaaaatccaaatcaggtctcagaaagattccagcagctaatgaagctctttgaaaagtcaaaatgcagataagttgctgaattcctgggactcttaactgatattgcatactacacagaagcttcaaattcctcatgttttaaatgagcactagagggagggtttatcacctttttggttaccagatgattatctatatttggttattactcagtgactctctaatttcacatcagcatgttcagcttgtgctag

SEQ ID NO: 329455 - DNA, 353 bp, Homo sapiens
aacatggtaactgcacaataagcgacagtcaccatcatcagtgttttgcttaatctgatgtgaaaaaaagtcatatcacttagcatggatctacaggctttaggactaaactgaagaagtctgttcctaaagggattttggaagggaatgcaagtgtgttaagcaccattactccaggtcccacagcatgtgctttacatgtgttatctcacacaacaaacctgtgcactacttctgatgctctacactctggggctcagggaaatagcggagtagcttactcagctagcaaggggcaaagggagcttaaagcacaaatctacttatttccaaagcctgggcctcttagggag

SEQ ID NO: 329456 - DNA, 450 bp, Homo sapiens
cccatgatacttctacttgctgattgttcctgctgagtcttatctgtaggacctcttctctctgctgtgtctgcttctgtcaactgtcttaacttcttagttgatctcctcttgttttgtggcctcaaacacctgtatatgttgatgatgctcaaattttcttctcagccaaaacctgttaccaaaactctaggtgcatattgatgtggctgtttgcttgtatgtgcacagaatattagacttctccagttggaaatctgatggtcacctcaagctaaatatgcccccagctaaactcctgaggttagctcagatttgctccttccaaaatctttaccatttcagataatggcatctgtgtctttccagtgctggccagagacctttggtgtcactctggactctgccttctccccctacccctgccaaattccatatctagtcagcaaa

SEQ ID NO: 329457 - DNA, 376 bp, Homo sapiens
taaatatgtcattgtacgtaaatgctccaatttgtttatccattcatctattgatggacatttgggttatttcccctactaatgttccataggttttaattgacttcagctacagcttcccggtaatgaatttactggatttgtatgtttcaagtaaagaaacatttttcataccattgtcattctatcaatatgatcatttaaatgatttaaaatgatattaggctgggcgcggtggctcacgcctgtaatcccagcactttgggaggccgaggcgggtggatcacgaggtcaggagatcaagaccatcttggctaacacggtgaaaccccgtctctactaaaaatacaaaaaattagccaggcgtggtggcagg

SEQ ID NO: 329458 - DNA, 280 bp, Homo sapiens
gtagtcgcttccgcattcatacaagaaacctcatgtctgagggcaagacaggcagggactgccccctgagagcacaagaagaaagtcctgaagcggctgtcgctaagcccagccctgcaggtgcctgggggtctgggcagggggtgtctggggcccagggtccacatggagaagacatgtacgtgtcggccgctgttggcgggggtgatccttggaaggagatcgtccttctgggctcagatgggagaaaagttgagggcaggactgtcaggagatctct

SEQ ID NO: 329459 - DNA, 2287 bp, Homo sapiens
cggcagtgtgtggggagacggacgaggaggccggcgagagtggcggagagggcatcttccgggaacgggacgagttcgtcatccgtgctgaggacatcccttccctcaagctggcgttgcagacggggcgtgaacccccacccatctggcgagtccagaaggcccttctgcagaaattcactccggagatcaaggacggccagaggcagttttgtgccaccagtaattatttggggtattttggggatgcaaaaaatcggtaccagcgcctctatgtaaagttcctggaaaatgtcaataagaaggactacgtgagggtctgtgctcggaaaccctggcatcggcccccagtgccagtcagacgctctgggcaggccaagaaccccgtatctgctgggggtagctctgcacctccccctaaggccccagcaccacctcccaagcctgagacccctgaaaagacgacatctgagaagcccccagagcagactcctgagacggccatgcctgagccccctgcccccgagaagccctccctcctgcggcctgttgagaaggaaaaggagaaggagaaggtgacacgtggagagcggcattgcggggtgagcgggccaccagcggacggcagacacggccagagcggagtctcgccacgggacaacctgccacatcccggctgcccaaagcccggcctaccaaggtgaaggctgaaccgccccctaagaagaggaagaaatggctgaaggaggcaggcggcaacgctacagcaggcgggggcccaccaggcagctcctcggactcggagtcctcccctggagcccccagcgaggacgagcgggcagtacctgggcgtctgctcaaaaccagggcgatgcgggagatgtaccggagctacgtggagatgttggtgagcacagcacttgacccagacatgatccaggccctggaggacacgcatgacgagctgtacctgccccccatgcggaagatagacggcctgctgaatgagcacaagaagaaagtcctgaagcggctgtcgctaagcccagccctgcaggatgctctgcacacgttcccacagctgcaagtggagcagagtggggagggctctccggaagagggggctgtgcggctgcggcctgctggggaaccctacaaccgcaagacgctcagcaagctcaagaggagcgtggtcagagcccaggagttcaaggttgagctggaaaagtcgggatactatacactctaccattcgctccacacactataaataccacaccttcctgcgctgccgggaccagaccctggccatcgagggcggcgccgaggacctgggccaggaggaggtggtccagcagtgcatgcggaaccagccgtggctggaacagctctttgactccttcagtgacctgctggcccaagcacaggcccacagccgctgcgggtgaccccgccccagcttgtgaggggggcgcctcctccatgaaccgagaattgggacagaaccgtgtcctcaggagctaacacctgggctccatcgccggggaaagggggtcatgggtcagggtgtgtctgtgctgccccctccagggcagggttcaaagtccgactccccccctctcccaagccccctccactccctccccattcctcccactgttcggtgtacagagaaattatttatatatatgtataaatgtctatttagtaacggtttccctctccccttgccccgaccccccctccacagccacagcccccgccccctccaccttgtacataatgtataggaaaagtctatgtatggctggggggggtggggtggcttcagagagctgggggaccccttccccccaagtcccccctgcaggccaagatctttgctaaaggccattccctccgcagggcatttggcgtcgggtgggaggggaaaacgcatcttgttaattatttttaatcttatttattgtacatacctggggcaggggcttggggaggtggaggggggagaagggtcccctctctctgcccctcccactccttttctacggcgatttgtctgtgtctggcccccacccactgcccatcccccattgttgtctggatgtggttctattttttatcggtctcctttcccctcctccccgttctcgcccccgccccaccccctgctcccactaccctttgtctcttgctctttcttgggcttctgtacaactcaacttgtatacactgtgtacacacaaccagccaaacgaaaacccaacggcaaacactttaaaaaaag

SEQ ID NO: 329460 - DNA, 1217 bp, Homo sapiens
cggcagtgtgtggggagacggacgaggaggccggcgagagtggcggagagggcatcttccgggaacgggacgagttcgtcatccgtgctgaggacatcccttccctcaagctggcgttgcagacggggcgtgaacccccacccatctggcgagtccagaaggcccttctgcagaaattcactccggagatcaaggacggccagaggcagttttgtgccaccagtaattatttggggtattttggggatgcaaaaaatcggtaccagcgcctctatgtaaagttcctggaaaatgtcaataagaaggactacgtgagggtctgtgctcggaaaccctggcatcggcccccagtgccagtcagacgctctgggcaggccaagaaccccgtatctgctgggggtagctctgcacctccccctaaggccccagcaccacctcccaagcctgagacccctgaaaagacgacatctgagaagcccccagagcagactcctgagacggccatgcctgagccccctgcccccgagaagccctccctcctgcggcctgttgagaaggaaaaggagaaggagaaggtgacacgtggagagcggcattgcggggtgagcgggccaccagcggacggcagacacggccagagcggagtctcgccacgggacaacctgccacatcccggctgcccaaagcccggcctaccaaggtgaaggctgaaccgccccctaagaagaggaagaaatggctgaaggaggcaggcggcaacgctacagcaggcgggggcccaccaggcagctcctcggactcggagtcctcccctggagcccccagcgaggacgagcgggcagtacctgggcgtctgctcaaaaccagggcgatgcgggagatgtaccggagctacgtggagatgttggtgagcacagcacttgacccagacatgatccaggccctggaggacacgcatgacgagctgtacctgccccccatgcggaagatagacggcctgctgaatgagcacaagaagaaagtcctgaagcggctgtcgctaagcccagccctgcaggtgcctgggggtctgggcagggggtgtctggggcccagggtccacatggagaagacatgtacgtgtcggccgctgttggcgggggtgatccttggaaggagatcgtccttctgggctcagatgggagaaaagttgagggcaggactgtcaggagatctct

SEQ ID NO: 329461 - DNA, 262 bp, Homo sapiens
ctggcgttgcagacggggcgtgaacccccacccatctggcgagtccagaaggcccttctgcagaaattcactccggagatcaaggacggccagaggcagttttgtgccaccagtaatgtaagcctgcaaaggggaccaaggacttgggggccccggggcgtggtatctaggagctggggttccccttagtgtggctgtgactcactccacagtgtatctggaagggggccccctgctgccggcaggctccaagcagctgcca

SEQ ID NO: 329462 - DNA, 926 bp, Homo sapiens
cggcagtgtgtggggagacggacgaggaggccggcgagagtggcggagagggcatcttccgggaacgggacgagttcgtcatccgtgctgaggacatcccttccctcaagctggcgttgcagacggggcgtgaacccccacccatctggcgagtccagaaggcccttctgcagaaattcactccggagatcaaggacggccagaggcagttttgtgccaccagtaattatttggggtattttggggatgcaaaaaatcggtaccagcgcctctatgtaaagttcctggaaaatgtcaataagaaggactacgtgagggtctgtgctcggaaaccctggcatcggcccccagtgccagtcagacgctctgggcaggccaagaaccccgtatctgctgggggtagctctgcacctccccctaaggccccagcaccacctcccaagcctgagacccctgaaaagacgacatctgagaagcccccagagcagactcctgagacggccatgcctgagccccctgcccccgagaagccctccctcctgcggcctgttgagaaggaaaaggagaaggagaagcagacacggccagagcggagtctcgccacgggacaacctgccacatcccggctgcccaaagcccggcctaccaaggtgaaggctgaaccgccccctaagaagaggaagaaatggctgaaggaggcaggcggcaacgctacagcaggcgggggcccaccaggcagctcctcggactcggagtcctcccctggagcccccagcgaggacgagcgggcagtacctgggcgtctgctcaaaaccagggcgatgcgggagatgtaccggagctacgtggagatgttggtgagcacagcacttgacccagacatgatccaggccctggaggacacgcatggtgagctgaggcctggg

SEQ ID NO: 329463 - DNA, 2201 bp, Homo sapiens
cggcagtgtgtggggagacggacgaggaggccggcgagagtggcggagagggcatcttccgggaacgggacgagttcgtcatccgtgctgaggacatcccttccctcaagctggcgttgcagacggggcgtgaacccccacccatctggcgagtccagaaggcccttctgcagaaattcactccggagatcaaggacggccagaggcagttttgtgccaccagtaattatttggggtattttggggatgcaaaaaatcggtaccagcgcctctatgtaaagttcctggaaaatgtcaataagaaggactacgtgagggtctgtgctcggaaaccctggcatcggcccccagtgccagtcagacgctctgggcaggccaagaaccccgtatctgctgggggtagctctgcacctccccctaaggccccagcaccacctcccaagcctgagacccctgaaaagacgacatctgagaagcccccagagcagactcctgagacggccatgcctgagccccctgcccccgagaagccctccctcctgcggcctgttgagaaggaaaaggagaaggagaaggtgacacgtggagagcggcattgcggggtgagcgggccaccagcggacggcagacacggccagagcggagtctcgccacgggacaacctgccacatcccggctgcccaaagcccggcctaccaaggtgaaggctgaaccgccccctaagaagaggaagaaatggctgaaggaggcaggcggcaacgctacagcaggcgggggcccaccaggcagctcctcggactcggagtcctcccctggagcccccagcgaggacgagcgggcagtacctgggcgtctgctcaaaaccagggcgatgcgggagatgtaccggagctacgtggagatgttggtgagcacagcacttgacccagacatgatccaggccctggaggacacgcatgacgagctgtacctgccccccatgcggaagatagacggcctgctgaatgagcacaagaagaaagtcctgaagcggctgtcgctaagcccagccctgcaggatgctctgcacacgttcccacagctgcaagtggagcagagtggggagggctctccggaagagggggctgtgcggctgcggcctgctggggaaccctacaaccgcaagacgctcagcaagctcaagaggagcgtggtcagagcccaggagttcaaggttgagctggaaaagtcgggatactatacactctaccattcgctccacacactataaataccacaccttcctgcgctgccgggaccagaccctggccatcgagggcggcgccgaggacctgggccaggaggaggtggtccagcagtgcatgcggaaccagccgtggctggaacagctctttgactccttcagtgacctgctggcccaagcacaggcccacagccgctgcgggtgaccccgccccagcttgtgaggggggcgcctcctccatgaaccgagaattgggacagaaccgtgtcctcaggagctaacacctgggctccatcgccggggaaagggggtcatgggtcagggtgtgtctgtgctgccccctccagggcagggttcaaagtccgactccccccctctcccaagccccctccactccctccccattcctcccactgttcggtgtacagagaaattatttatatatatgtataaatgtctatttagtaacggtttccctctccccttgccccgaccccccctccacagccacagcccccgccccctccaccttgtacataatgtataggaaaagtctatgtatggctggggggggtggggtggcttcagagagctgggggaccccttccccccaagtcccccctgcaggccaagatctttgctaaaggccattccctccgcagggcatttggcgtcgggtgggaggggaaaacgcatcttgttaattatttttaatcttatttattgtacatacctggggcaggggcttggggaggtggaggggggagaagggtcccctctctctgcccctcccactccttttctacggcgatttgtctgtgtctggcccccacccacccctgctcccactaccctttgtctcttgctctttcttgggcttctgtacaactcaacttgtatacactgtgtacacacaaccagccaaacgaaaacccaacggcaaacactttaaaaaaag

SEQ ID NO: 329464 - DNA, 277 bp, Homo sapiens
ctcattgtgtacataggaagttctccattcttttcggcctccagtcagaacacttagatatccaacttattgaaggtgttaatttctgcttaaactctgattcaggatatgagtttggaaatggacatctctcagtattcatggggaatgagctttgatcttcatctcagtatagcattgcactcataaatgtagcaattgtcatatacttaatccactcctgcaaaagactgatcctgtgacatgggagtgagagaggaaagtcacccagagccag

SEQ ID NO: 329465 - DNA, 456 bp, Homo sapiens
cgtgcctgtctggttgtgtatgaccgtgtatgacccatagacactggaagcataattagttccgggtttgcgcactgcagtgctcttacgcgtacaggcactgcaggaggagagtcgctacctacgggcagtcttagccaacgagactggactggctcgcttgctgagccggctgagcggcgtgggactgcggctgaccacctcgctcttcagagactcgcccgccggtgaccacgactacgctctgccggtgggaaagcagaagcaggacctgctggaagaggacgactcggcgggaggagtctgtctccatgtggacaaggataaggtgtcggtggagttctgctcggcgtgcgcccggaaggcgtcgtcttctcttaaaatgtagggtcaagtaatctgctctttatccgcgtatgcgcactggggggtcctctagatctcctcaaaccaagg

SEQ ID NO: 329466 - DNA, 6187 bp, Homo sapiens
actgacttccggctacgccgttgtctgggtggcgcggtcgagtcatcgcagggcctcaccgcttcgttctcccgtccctccccgcgccttggcgcggggggtcgactagccaagtgaggcgggaggcgactcggacctttccctgcatttcgtttcggccagtgccgggggctacccgccctggggcctgggatccttggggcccgtgaggcccactcttagcggccggggcctaccgcggcccgccgctggccctcatgaggcatagcctgaccaagctgctggcagcctcgggcagcaactccccaacccgcagtgagagcccggagccggctgcaacttgttcgctgccctctgacctgacccgggctgcagcgggggaggaggagacggcggcggccggatctcccggccgcaagcagcagtttggcgacgaaggagagttggaagccgggagggggagccgcggcggcgtggccgtgcgcgcgccctcccccgaggagatggaggaggaggcgatcgccagcctcccgggggaagagacggaggatatggactttctgtctgggctggaactggcggatctcctggaccccaggcaaccggactggcacctggaccccgggcttagctcgccggggcctctctcctcgtctggcggaggctcggatagcggcggcctgtggagaggggacgatgacgatgaggccgcggctgctgaaatgcagcgcttctctgacctgctgcaaaggctgttaaacggtatcggaggctgcagcagcagcagtgacagtggcagcgccgaaaagaggcggagaaagtccccaggaggaggcggcggtggcggcagcggtaacgacaacaaccaggcggcgacaaagagtccccggaaggcggcggcggccgctgcccgccttaatcgactgaagaagaaggagtacgtgatggggctggagagtcgagtccggggtctggcagccgagaaccaggagctgcgggccgagaatcgggagctgggcaaacgcgtacaggcactgcaggaggagagtcgctacctacgggcagtcttagccaacgagactggactggctcgcttgctgagccggctgagcggcgtgggactgcggctgaccacctcgctcttcagagactcgcccgccggtgaccacgactacgctctgccggtgggaaagcagaagcaggacctgctggaagaggacgactcggcgggaggagtctgtctccatgtggacaaggataaggtgtcggtggagttctgctcggcgtgcgcccggaaggcgtcgtcttctcttaaaatgtagggtcaagtaatctgctctttatccgcgtttacccctttcaactcccttacaccatgtcaaacttaccttagtgggacatcttcaccggacacatttcagaggagagaaaaaaagtaatattgaatcttaaagtgtttagctaaaagcatgaatgtgacacagtaaccaactcctaatgataacatgtgactattaaatctctctgacagtttcttttttaggtgatttccttcctgccaggctccgttgtaggggttacagaacagtcgttcccgcctcacaacctgtggatacagctgttggggcagaagagacgggaccagctgctggccacatttcctgctttattttaaaaggtagtataagaaatgaggaaaaagaggtaatatcagggcttctgctgttttttatttttaacatgttcataattaaaaagtattttccagcagtccaaagatgtaagttatcttacacataaaatgttttattttgttatttggttatgaaaatggaatccttgttcttgcacaactgtaaatgttttgttgctagataatacgatttgagacctgaattggtctttggtttccagtgcatcacagcatattttgtaaaatcatctactactgcacttgagcatgaatgggtagtagccaaactcacaaattggagtgatgaacctgcttatacctaagggcaggagcaagcccctcacaatgcagctgcatgggtttttagtgcctactgaattatatatatatatacatatatatatatatatataaaccaaaagtagttggaaagattatttgaaatgactaatttgtgctatctttatgaaatatgttaaatgtagcttttttgaaacagaagccttgaattgaaatttaactaatacttgaacattttgtatatatttctttgtatataattttgtgcagtaccaatgacaaaaatatggtgtcataataaaaccaggtttgttgatcttttagttatgggctcaaagaatttattcatctctaacatgatattggaaaataatggatgaaaataggaaaaatgattgttaatgctgactgtgggtcttaaaaggttctggaaagcagtaagttcatttttctaaaaactataacattctgttggagtattttcttccttacgtcaatacttttcctgcattatttgaaattgtgggctggggagaaacagtagtcaaagctttctgaattgagatactttgaaattccaagtgtagatttttagaatgtcattttataaatggcagtttttggaattacttgataagaacttttgaaaatggaaggattagtatggcctatttttaaagctgctttgttaggttccttatgttttattaactgtcttttctcagtttccatttcatttttttttttctagttttggtgacttagtgattttgtcattttttacatcaacttcatggtcttgtttttacatggtaattgcatgtacttaggatctatctaataggggctttaaataaatttggtcatatttatgtgtaagcacattttactgtaaatgtttgggtttctgaatttaaacagatctgtttatttcagtatgtagtaaacaatatcttaaagtgtccgattcactacttgttaattaaaaaagttatgattaatgtgaaactgttgtcttactatttttagaaaattgtgttctggatgattagcacatggataaaggagatttctggaatataaaatggattgtttttgaaatttctaggtttggctctatttactgtaatggttgaaaacaatttagtatttgggtgacccttttgtttttcttctaaatgtgcctctggtaaaatacagaactagactaaagatgtagctttttaatatttgtcttttgatggtggcaggagttcatacattaattgaactaacacatcatattttgacctactatttctatcatattgacttactgtttctgcacttctttgaccagacttatcttaaaaagtccacttttgttaaaatgtagtcacacctctgatataatccaacaagaagtgttcaaaatattttaaatatttgtgcattttataatcactaaattaatctctctctcttctctttgaacagcttagcagtgtctgcaaaaacgaatcttttcctacaacctgttaactgactggactgttggtaacaaagtaattgtgagaaccatgtcggtcaaaaatttggcatctgctgaaaaaaatgaatgccattttcaagttcccaaattacttctatactgatttcactttccagaaatggagatatgaaaagattctctggaatccttgaaagacttaatagagatacatgagactaagttaatcttggaacaaaattatactttttttgtctttcatgggagtgatactcagttattgcatatctttacaataatcaagagcatattctatggaattaacatttagtggactagaattacataagcaggccatcagtgatcacaaggcatatgagtttgtatttatttcctggaacatgagagctaatttggagtacagacagacaccctgctgagtagaatataaaagttaatgtaaagttctgaactataaagagtagtccttttaaatagatgcattgatttgtatatctttgaaaaagttgattatgattaaatgtgtgggtagttaattacaatttagggtaacaaccaggatgtatggattcttgaggttttggcttcttgagctttctcttgagtacttgatactgttttctgaatattttgaggtttctaattaatggtatgctagtttctactgttttatataaaaatttatctagtgttgtataaggactttagtattgtggatgatgggagtggctttttgtggcatatggttgttttaattgaaatattttttcagtttattacaagtgtgaaaaaacactcaaaactctggattgttttatttcatttttgttggattatgttaatacattccttcacgtggtttagattgagtcattttatctcacttacttggaaatgtgcagctgatagaagagggattgggtaggagattggcttttacttcataataaatatacagttggttattgtattattcaaaacttattaaatccattcagtttcttaccattttaagtgtattcagtgcctgtgaagccaggcagcagagtattcccactggcttaaaacttaggcgctgatgctcctacagtacagctagttataattccagaaccaaaggcaccaacattatttggtgaccttaactactactttgatagaacagactgggtaattcactgataatgagtcattacctttttaatatgtgattatctagttcagcattttgaatgtgtagtttaaggtctgatttagtaaaattttaaagctaaataatctgatgactcttgaaagtttaattggtagtatgacatttatgtttttttcccccagactcacagccaatacaaagttttgagactcctaaatgttaatatttttgctgtttttctgagctgtttttttatttacttaccacctaagctgcggatcaaaaagggaattcttccattagaaatttgtagtgttgtgtggccagcacagtatttttcagatttgaatttcagtacctctgtgtagcctcagtactctcaacaccagtcactctttattgtcttaaaatattccatactttttgttgacccaaaattgttgaaaatattttgctcagttttcacaatgaactaattgaaaagtgtagttactgtgttgtaaacatttgtgtagttctgttaatacactgatttgaattttatttatctcaacttcctttagcgtctgcctccaaattttgtctttgctgtatacccactgagatcaattccctagacccctctggctcttagtgtactataatttgggctttataaaatatattgtcttaatttaaatagaatgtgagccctctttttttttttttaagccaaataactacacaaagtaaattataaaagatttaaatagtttgtctacagtgactagactgaaatataaaaattgattgagggtagtttacttcaggtgttagctacaaatgactaaatgtccttaaataatgcagatatctgccctctgaacaaaaattttggcaaagtaaatttgtagcaacagacttaacatgatttattgcttatgttgcccatttctgctaatggaaaagataatttaaaaatatgtggcagaggacagatattagaaatactttttggttacagaaaccattgtaaactcatcctcatttataaatggtattatgctagggagtaattggactaggaatgtttaaagataagtaaggaaacaatgtgtgctcaatcgtcaaagaacttagttatatcattgggctttgaattatctaagttgattacataattctatattcttaaggagtcttaactcggtacttgggttaacgccagaaattacttttaattcattgtttttttcactgggatgagtagaactctgcttttagtaaaagtgacagaatataggtaaaatggatgatttgggatcagagcttttcatcttgatattttagcctgtaaaataaacagctatattgttttgccctttaaatgttatatatatttttctgtctttctttccctagttgtaaaagtaaagcatattctttatagaaaacttggaatatcctgaaaggaatcaagaagaaaagaaaaatcacccttataactctataagccatagaatatccacagtaaacattttggcatgcttcc

SEQ ID NO: 329467 - DNA, 6028 bp, Homo sapiens
actgacttccggctacgccgttgtctgggtggcgcggtcgagtcatcgcagggcctcaccgcttcgttctcccgtccctccccgcgccttggcgcggggggtcgactagccaagtgaggcgggaggcgactcggacctttccctgcatttcgtttcggccagtgccgggggctacccgccctggggcctgggatccttggggcccgtgaggcccactcttagcggccggggcctaccgcggcccgccgctggccctcatgaggcatagcctgaccaagctgctggcagcctcgggcagcaactccccaacccgcagtgagagcccggagccggctgcaacttgttcgctgccctctgacctgacccgggctgcagcgggggaggaggagacggcggcggccggatctcccggccgcaagcagcagtttggcgacgaaggagagttggaagccgggagggggagccgcggcggcgtggccgtgcgcgcgccctcccccgaggagatggaggaggaggcgatcgccagcctcccgggggaagagacggaggatatggactttctgtctgggctggaactggcggatctcctggaccccaggcaaccggactggcacctggaccccgggcttagctcgccggggcctctctcctcgtctggcggaggctcggatagcggcggcctgtggagaggggacgatgacgatgaggccgcggctgctgaaatgcagcgcttctctgacctgctgcaaaggctgttaaacggtatcggaggctgcagcagcagcagtgacagtggcagcgccgaaaagaggcggagaaagtccccaggaggaggcggcggtggcggcagcggtaacgacaacaaccaggcggcgacaaagagtccccggaaggcggcggcggccgctgcccgccttaatcgactgaagaagaaggagtacgtgatggggctggagagtcgagtccggggtctggcagccgagaaccaggagctgcgggccgagaatcgggagctgggcaaacgcgtacaggcactgcaggaggagagtcgctacctacgggcagtcttagccaacgagactggactggctcgcttgctgagccggctgagcggcgtgggactgcggctgaccacctcgctcttcagagactcgcccgccggtgaccacgactacgctctgccggtgggaaagcagaagcaggacctgctggaagaggacgactcggcgggaggagtctgtctccatgtggacaaggataaggtgtcggtggagttctgctcggcgtgcgcccggaaggcgtcgtcttctcttaaaattttcttttttaggtgatttccttcctgccaggctccgttgtaggggttacagaacagtcgttcccgcctcacaacctgtggatacagctgttggggcagaagagacgggaccagctgctggccacatttcctgctttattttaaaaggtagtataagaaatgaggaaaaagaggtaatatcagggcttctgctgttttttatttttaacatgttcataattaaaaagtattttccagcagtccaaagatgtaagttatcttacacataaaatgttttattttgttatttggttatgaaaatggaatccttgttcttgcacaactgtaaatgttttgttgctagataatacgatttgagacctgaattggtctttggtttccagtgcatcacagcatattttgtaaaatcatctactactgcacttgagcatgaatgggtagtagccaaactcacaaattggagtgatgaacctgcttatacctaagggcaggagcaagcccctcacaatgcagctgcatgggtttttagtgcctactgaattatatatatatatacatatatatatatatatataaaccaaaagtagttggaaagattatttgaaatgactaatttgtgctatctttatgaaatatgttaaatgtagcttttttgaaacagaagccttgaattgaaatttaactaatacttgaacattttgtatatatttctttgtatataattttgtgcagtaccaatgacaaaaatatggtgtcataataaaaccaggtttgttgatcttttagttatgggctcaaagaatttattcatctctaacatgatattggaaaataatggatgaaaataggaaaaatgattgttaatgctgactgtgggtcttaaaaggttctggaaagcagtaagttcatttttctaaaaactataacattctgttggagtattttcttccttacgtcaatacttttcctgcattatttgaaattgtgggctggggagaaacagtagtcaaagctttctgaattgagatactttgaaattccaagtgtagatttttagaatgtcattttataaatggcagtttttggaattacttgataagaacttttgaaaatggaaggattagtatggcctatttttaaagctgctttgttaggttccttatgttttattaactgtcttttctcagtttccatttcatttttttttttctagttttggtgacttagtgattttgtcattttttacatcaacttcatggtcttgtttttacatggtaattgcatgtacttaggatctatctaataggggctttaaataaatttggtcatatttatgtgtaagcacattttactgtaaatgtttgggtttctgaatttaaacagatctgtttatttcagtatgtagtaaacaatatcttaaagtgtccgattcactacttgttaattaaaaaagttatgattaatgtgaaactgttgtcttactatttttagaaaattgtgttctggatgattagcacatggataaaggagatttctggaatataaaatggattgtttttgaaatttctaggtttggctctatttactgtaatggttgaaaacaatttagtatttgggtgacccttttgtttttcttctaaatgtgcctctggtaaaatacagaactagactaaagatgtagctttttaatatttgtcttttgatggtggcaggagttcatacattaattgaactaacacatcatattttgacctactatttctatcatattgacttactgtttctgcacttctttgaccagacttatcttaaaaagtccacttttgttaaaatgtagtcacacctctgatataatccaacaagaagtgttcaaaatattttaaatatttgtgcattttataatcactaaattaatctctctctcttctctttgaacagcttagcagtgtctgcaaaaacgaatcttttcctacaacctgttaactgactggactgttggtaacaaagtaattgtgagaaccatgtcggtcaaaaatttggcatctgctgaaaaaaatgaatgccattttcaagttcccaaattacttctatactgatttcactttccagaaatggagatatgaaaagattctctggaatccttgaaagacttaatagagatacatgagactaagttaatcttggaacaaaattatactttttttgtctttcatgggagtgatactcagttattgcatatctttacaaaattgtaacctttggagaattacagtatttcatcaagaaattagagtttttacataatcaagagcatattctatggaattaacatttagtggactagaattacataagcaggccatcagtgatcacaaggcatatgagtttgtatttatttcctggaacatgagagctaatttggagtacagacagacaccctgctgagtagaatataaaagttaatgtaaagttctgaactataaagagtagtccttttaaatagatgcattgatttgtatatctttgaaaaagttgattatgattaaatgtgtgggtagttaattacaatttagggtaacaaccaggatgtatggattcttgaggttttggcttcttgagctttctcttgagtacttgatactgttttctgaatattttgaggtttctaattaatggtatgctagtttctactgttttatataaaaatttatctagtgttgtataaggactttagtattgtggatgatgggagtggctttttgtggcatatggttgttttaattgaaatattttttcagtttattacaagtgtgaaaaaacactcaaaactctggattgttttatttcatttttgttggattatgttaatacattccttcacgtggtttagattgagtcattttatctcacttacttggaaatgtgcagctgatagaagagggattgggtaggagattggcttttacttcataataaatatacagttggttattgtattattcaaaacttattaaatccattcagtttcttaccattttaagtgtattcagtgcctgtgaagccaggcagcagagtattcccactggcttaaaacttaggcgctgatgctcctacagtacagctagttataattccagaaccaaaggcaccaacattatttggtgaccttaactactactttgatagaacagactgggtaattcactgataatgagtcattacctttttaatatgtgattatctagttcagcattttgaatgtgtagtttaaggtctgatttagtaaaattttaaagctaaataatctgatgactcttgaaagtttaattggtagtatgacatttatgtttttttcccccagactcacagccaatacaaagttttgagactcctaaatgttaatatttttgctgtttttctgagctgtttttttatttacttaccacctaagctgcggatcaaaaagggaattcttccattagaaatttgtagtgttgtgtggccagcacagtatttttcagatttgaatttcagtacctctgtgtagcctcagtactctcaacaccagtcactctttattgtcttaaaatattccatactttttgttgacccaaaattgttgaaaatattttgctcagttttcacaatgaactaattgaaaagtgtagttactgtgttgtaaacatttgtgtagttctgttaatacactgatttgaattttatttatctcaacttcctttagcgtctgcctccaaattttgtctttgctgtatacccactgagatcaattccctagacccctctggctcttagtgtactataatttgggctttataaaatatattgtcttaatttaaatagaatgtgagccctctttttttttttttaagccaaataactacacaaagtaaattataaaagatttaaatagtttgtctacagtgactagactgaaatataaaaattgattgagggtagtttacttcaggtgttagctacaaatgactaaatgtccttaaataatgcagatatctgccctctgaacaaaaattttggcaaagtaaatttgtagcaacagacttaacatgatttattgcttatgttgcccatttctgctaatggaaaagataatttaaaaatatgtggcagaggacagatattagaaatactttttggttacagaaaccattgtaaactcatcctcatttataaatggtattatgctagggagtaattggactaggaatgtttaaagataagtaaggaaacaatgtgtgctcaatcgtcaaagaacttagttatatcattgggctttgaattatctaagttgattacataattctatattcttaaggagtcttaactcggtacttgggttaacgccagaaattacttttaattcattgtttttttcactgggatgagtagaactctgcttttagtaaaagtgacagaatataggtaaaatggatgatttgggatcagagcttttcatcttgatattttagcctgtaaaataaacagctatattgttttgccctttaaatgttatatatatttttctgtctttctttccctagttgtaaaagtaaagcatattctttatagaaaacttggaatatcctgaaaggaatcaagaagaaaagaaaaatcacccttataactctataagccatagaatatccacagtaaacattttggcatgcttcc

SEQ ID NO: 329468 - DNA, 5834 bp, Homo sapiens
tcacgtggtttagattgagtcattttatctcacttacttggaaatgtgcagctgatagaagagggattgggtaggagattggcttttacttcataataaatatacagttggttattgtattattcaaaacttattaaatccattcagtttcttaccattttaagtgtattcagtgcctgtgaagccaggcagcaaccggactggcacctggaccccgggcttagctcgccggggcctctctcctcgtctggcggaggctcggatagcggcggcctgtggagaggggacgatgacgatgaggccgcggctgctgaaatgcagcgcttctctgacctgctgcaaaggctgttaaacggtatcggaggctgcagcagcagcagtgacagtggcagcgccgaaaagaggcggagaaagtccccaggaggaggcggcggtggcggcagcggtaacgacaacaaccaggcggcgacaaagagtccccggaaggcggcggcggccgctgcccgccttaatcgactgaagaagaaggagtacgtgatggggctggagagtcgagtccggggtctggcagccgagaaccaggagctgcgggccgagaatcgggagctgggcaaacgcgtacaggcactgcaggaggagagtcgctacctacgggcagtcttagccaacgagactggactggctcgcttgctgagccggctgagcggcgtgggactgcggctgaccacctcgctcttcagagactcgcccgccggtgaccacgactacgctctgccggtgggaaagcagaagcaggacctgctggaagaggacgactcggcgggaggagtctgtctccatgtggacaaggataaggtgtcggtggagttctgctcggcgtgcgcccggaaggcgtcgtcttctcttaaaatgtagggtcaagtaatctgctctttatccgcgtttacccctttcaactcccttacaccatgtcaaacttaccttagtgggacatcttcaccggacacatttcagaggagagaaaaaaagtaatattgaatcttaaagtgtttagctaaaagcatgaatgtgacacagtaaccaactcctaatgataacatgtgactattaaatctctctgacagtttcttttttaggtgatttccttcctgccaggctccgttgtaggggttacagaacagtcgttcccgcctcacaacctgtggatacagctgttggggcagaagagacgggaccagctgctggccacatttcctgctttattttaaaaggtagtataagaaatgaggaaaaagaggtaatatcagggcttctgctgttttttatttttaacatgttcataattaaaaagtattttccagcagtccaaagatgtaagttatcttacacataaaatgttttattttgttatttggttatgaaaatggaatccttgttcttgcacaactgtaaatgttttgttgctagataatacgatttgagacctgaattggtctttggtttccagtgcatcacagcatattttgtaaaatcatctactactgcacttgagcatgaatgggtagtagccaaactcacaaattggagtgatgaacctgcttatacctaagggcaggagcaagcccctcacaatgcagctgcatgggtttttagtgcctactgaattatatatatatatacatatatatatatatatataaaccaaaagtagttggaaagattatttgaaatgactaatttgtgctatctttatgaaatatgttaaatgtagcttttttgaaacagaagccttgaattgaaatttaactaatacttgaacattttgtatatatttctttgtatataattttgtgcagtaccaatgacaaaaatatggtgtcataataaaaccaggtttgttgatcttttagttatgggctcaaagaatttattcatctctaacatgatattggaaaataatggatgaaaataggaaaaatgattgttaatgctgactgtgggtcttaaaaggttctggaaagcagtaagttcatttttctaaaaactataacattctgttggagtattttcttccttacgtcaatacttttcctgcattatttgaaattgtgggctggggagaaacagtagtcaaagctttctgaattgagatactttgaaattccaagtgtagatttttagaatgtcattttataaatggcagtttttggaattacttgataagaacttttgaaaatggaaggattagtatggcctatttttaaagctgctttgttaggttccttatgttttattaactgtcttttctcagtttccatttcatttttttttttctagttttggtgacttagtgattttgtcattttttacatcaacttcatggtcttgtttttacatggtaattgcatgtacttaggatctatctaataggggctttaaataaatttggtcatatttatgtgtaagcacattttactgtaaatgtttgggtttctgaatttaaacagatctgtttatttcagtatgtagtaaacaatatcttaaagtgtccgattcactacttgttaattaaaaaagttatgattaatgtgaaactgttgtcttactatttttagaaaattgtgttctggatgattagcacatggataaaggagatttctggaatataaaatggattgtttttgaaatttctaggtttggctctatttactgtaatggttgaaaacaatttagtatttgggtgacccttttgtttttcttctaaatgtgcctctggtaaaatacagaactagactaaagatgtagctttttaatatttgtcttttgatggtggcaggagttcatacattaattgaactaacacatcatattttgacctactatttctatcatattgacttactgtttctgcacttctttgaccagacttatcttaaaaagtccacttttgttaaaatgtagtcacacctctgatataatccaacaagaagtgttcaaaatattttaaatatttgtgcattttataatcactaaattaatctctctctcttctctttgaacagcttagcagtgtctgcaaaaacgaatcttttcctacaacctgttaactgactggactgttggtaacaaagtaattgtgagaaccatgtcggtcaaaaatttggcatctgctgaaaaaaatgaatgccattttcaagttcccaaattacttctatactgatttcactttccagaaatggagatatgaaaagattctctggaatccttgaaagacttaatagagatacatgagactaagttaatcttggaacaaaattatactttttttgtctttcatgggagtgatactcagttattgcatatctttacaaaattgtaacctttggagaattacagtatttcatcaagaaattagagtttttacataatcaagagcatattctatggaattaacatttagtggactagaattacataagcaggccatcagtgatcacaaggcatatgagtttgtatttatttcctggaacatgagagctaatttggagtacagacagacaccctgctgagtagaatataaaagttaatgtaaagttctgaactataaagagtagtccttttaaatagatgcattgatttgtatatctttgaaaaagttgattatgattaaatgtgtgggtagttaattacaatttagggtaacaaccaggatgtatggattcttgaggttttggcttcttgagctttctcttgagtacttgatactgttttctgaatattttgaggtttctaattaatggtatgctagtttctactgttttatataaaaatttatctagtgttgtataaggactttagtattgtggatgatgggagtggctttttgtggcatatggttgttttaattgaaatattttttcagtttattacaagtgtgaaaaaacactcaaaactctggattgttttatttcatttttgttggattatgttaatacattccttcacgtggtttagattgagtcattttatctcacttacttggaaatgtgcagctgatagaagagggattgggtaggagattggcttttacttcataataaatatacagttggttattgtattattcaaaacttattaaatccattcagtttcttaccattttaagtgtattcagtgcctgtgaagccaggcagcagagtattcccactggcttaaaacttaggcgctgatgctcctacagtacagctagttataattccagaaccaaaggcaccaacattatttggtgaccttaactactactttgatagaacagactgggtaattcactgataatgagtcattacctttttaatatgtgattatctagttcagcattttgaatgtgtagtttaaggtctgatttagtaaaattttaaagctaaataatctgatgactcttgaaagtttaattggtagtatgacatttatgtttttttcccccagactcacagccaatacaaagttttgagactcctaaatgttaatatttttgctgtttttctgagctgtttttttatttacttaccacctaagctgcggatcaaaaagggaattcttccattagaaatttgtagtgttgtgtggccagcacagtatttttcagatttgaatttcagtacctctgtgtagcctcagtactctcaacaccagtcactctttattgtcttaaaatattccatactttttgttgacccaaaattgttgaaaatattttgctcagttttcacaatgaactaattgaaaagtgtagttactgtgttgtaaacatttgtgtagttctgttaatacactgatttgaattttatttatctcaacttcctttagcgtctgcctccaaattttgtctttgctgtatacccactgagatcaattccctagacccctctggctcttagtgtactataatttgggctttataaaatatattgtcttaatttaaatagaatgtgagccctctttttttttttttaagccaaataactacacaaagtaaattataaaagatttaaatagtttgtctacagtgactagactgaaatataaaaattgattgagggtagtttacttcaggtgttagctacaaatgactaaatgtccttaaataatgcagatatctgccctctgaacaaaaattttggcaaagtaaatttgtagcaacagacttaacatgatttattgcttatgttgcccatttctgctaatggaaaagataatttaaaaatatgtggcagaggacagatattagaaatactttttggttacagaaaccattgtaaactcatcctcatttataaatggtattatgctagggagtaattggactaggaatgtttaaagataagtaaggaaacaatgtgtgctcaatcgtcaaagaacttagttatatcattgggctttgaattatctaagttgattacataattctatattcttaaggagtcttaactcggtacttgggttaacgccagaaattacttttaattcattgtttttttcactgggatgagtagaactctgcttttagtaaaagtgacagaatataggtaaaatggatgatttgggatcagagcttttcatcttgatattttagcctgtaaaataaacagctatattgttttgccctttaaatgttatatatatttttctgtctttctttccctagttgtaaaagtaaagcatattctttatagaaaacttggaatatcctgaaaggaatcaagaagaaaagaaaaatcacccttataactctataagccatagaatatccacagtaaacattttggcatgcttcc

SEQ ID NO: 329469 - DNA, 3356 bp, Homo sapiens
actgacttccggctacgccgttgtctgggtggcgcggtcgagtcatcgcagggcctcaccgcttcgttctcccgtccctccccgcgccttggcgcggggggtcgactagccaagtgaggcgggaggcgactcggacctttccctgcatttcgtttcggccagtgccgggggctacccgccctggggcctgggatccttggggcccgtgaggcccactcttagcggccggggcctaccgcggcccgccgctggccctcatgaggcatagcctgaccaagctgctggcagcctcgggcagcaactccccaacccgcagtgagagcccggagccggctgcaacttgttcgctgccctctgacctgacccgggctgcagcgggggaggaggagacggcggcggccggatctcccggccgcaagcagcagtttggcgacgaaggagagttggaagccgggagggggagccgcggcggcgtggccgtgcgcgcgccctcccccgaggagatggaggaggaggcgatcgccagcctcccgggggaagagacggaggatatggactttctgtctgggctggaactggcggatctcctggaccccaggcaaccggactggcacctggaccccgggcttagctcgccggggcctctctcctcgtctggcggaggctcggatagcggcggcctgtggagaggggacgatgacgatgaggccgcggctgctgaaatgcagcgcttctctgacctgctgcaaaggctgttaaacggtatcggaggctgcagcagcagcagtgacagtggcagcgccgaaaagaggcggagaaagtccccaggaggaggcggcggtggcggcagcggtaacgacaacaaccaggcggcgacaaagagtccccggaaggcggcggcggccgctgcccgccttaatcgactgaagaagaaggagtacgtgatggggctggagagtcgagtccggggtctggcagccgagaaccaggagctgcgggccgagaatcgggagctgggcaaacgcgtacaggcactgcaggaggagagtcgctacctacgggcagtcttagccaacgagactggactggctcgcttgctgagccggctgagcggcgtgggactgcggctgaccacctcgctcttcagagactcgcccgccggtgaccacgactacgctctgccggtgggaaagcagaagcaggacctgctggaagaggacgactcggcgggaggagtctgtctccatgtggacaaggataaggtgtcggtggagttctgctcggcgtgcgcccggaaggcgtcgtcttctcttaaaatgtagggtcaagtaatctgctctttatccgcgtttacccctttcaactcccttacaccatgtcaaacttaccttagtgggacatcttcaccggacacatttcagaggagagaaaaaaagtaatattgaatcttaaagtgtttagctaaaagcatgaatgtgacacagtaaccaactcctaatgataacatgtgactattaaatctctctgacagtttcttttttaggtgatttccttcctgccaggctccgttgtaggggttacagaacagtcgttcccgcctcacaacctgtggatacagctgttggggcagaagagacgggaccagctgctggccacatttcctgctttattttaaaaggtagtataagaaatgaggaaaaagaggtaatatcagggcttctgctgttttttatttttaacatgttcataattaaaaagtattttccagcagtccaaagatgtaagttatcttacacataaaatgttttattttgttatttggttatgaaaatggaatccttgttcttgcacaactgtaaatgttttgttgctagataatacgatttgagacctgaattggtctttggtttccagtgcatcacagcatattttgtaaaatcatctactactgcacttgagcatgaatgggtagtagccaaactcacaaattggagtgatgaacctgcttatacctaagggcaggagcaagcccctcacaatgcagctgcatgggtttttagtgcctactgaattatatatatatatacatatatatatatatatataaaccaaaagtagttggaaagattatttgaaatgactaatttgtgctatctttatgaaatatgttaaatgtagcttttttgaaacagaagccttgaattgaaatttaactaatacttgaacattttgtatatatttctttgtatataattttgtgcagtaccaatgacaaaaatatggtgtcataataaaaccaggtttgttgatcttttagttatgggctcaaagaatttattcatctctaacatgatattggaaaataatggatgaaaataggaaaaatgattgttaatgctgactgtgggtcttaaaaggttctggaaagcagtaagttcatttttctaaaaactataacattctgttggagtattttcttccttacgtcaatacttttcctgcattatttgaaattgtgggctggggagaaacagtagtcaaagctttctgaattgagatactttgaaattccaagtgtagatttttagaatgtcattttataaatggcagtttttggaattacttgataagaacttttgaaaatggaaggattagtatggcctatttttaaagctgctttgttaggttccttatgttttattaactgtcttttctcagtttccatttcatttttttttttctagttttggtgacttagtgattttgtcattttttacatcaacttcatggtcttgtttttacatggtaattgcatgtacttaggatctatctaataggggctttaaataaatttggtcatatttatgtgtaagcacattttactgtaaatgtttgggtttctgaatttaaacagatctgtttatttcagtatgtagtaaacaatatcttaaagtgtccgattcactacttgttaattaaaaaagttatgattaaaaaaaaaaaaacaaaaaaaaaacaaaaacaaaaaaaaaaaaaaaccaaaccacacaaacaaaaaaaccacaacacaaaacacaacacccacaaccaacccccacaacaaccaaccacccacacccaccaaccccaaacacccaccccccccccgcaccagtataaaaatgcaggacagagggccgccaaagtagggctgacccagacatcatgcggagcacggacaaggaggacggagaaggggaaagagagtgaagacgaagaagacaaggcgacgcggacgggccaggaacgagagagcgggatgccacaacaacagaaaacgaagccacaacaaccccaccaacacaacaccacacaaa

SEQ ID NO: 329470 - DNA, 5591 bp, Homo sapiens
ggaaggtgggagggaaatctaatttgggccctgtccaccctggaaacagacttgtgctggtcaagaatgtatttaagatgcctcttctggttgaaatagctattaatgtgtccccttattcagacttgcgtgtacctagctcttctgtccccagtgtggacatggccttggatgacatcggttccaactgtacactgaaacctgcttatagagagacagtttggagacagtgaaacaggtgaagttgaatggaagttccgagttgtacaaggtgcaaattggaattccgattttagggcaacttttcagaggttgacagttaagtatttggggcatgcacaaatgtgatagttattttgctggaggtgacaggtatctcttaaatatcaacaatgccttttagttttcagtatgagatatagaaacagtctataatggagtaacattttaatgtctcaccattagagaagttggaaattaacatacatatgagactcctgcgttttagttaattggagaataagaatggctaatgtttctttgaggaccagcagtgattaccctatcactgagattgaataaattgttgaacatctttatttttgttgtattaaaattttaggttaaatttatatatgtatgattagatattgaaggttgtgaaatgtgaatgaaaacgtgtaaagtgaggcttcacaaagaatcttattctctgtgtttcaaaagtatttgtcctattttaaaataattttttaaattgagtggttctggccacttaaatgacacgattggtactattttcctaaggtgggatttattcccttgaatctattaaccagttgtataaattgaattatggtgtccttcagtgtaagaggcattaagaaattctttgtgaaacatcactgcttgataaagtatatacgtatttagcatccttgtttttctttgtgctaaagtggatacagctgttggggcagaagagacgggaccagctgctggccacatttcctgctttattttaaaaggtagtataagaaatgaggaaaaagaggtaatatcagggcttctgctgttttttatttttaacatgttcataattaaaaagtattttccagcagtccaaagatgtaagttatcttacacataaaatgttttattttgttatttggttatgaaaatggaatccttgttcttgcacaactgtaaatgttttgttgctagataatacgatttgagacctgaattggtctttggtttccagtgcatcacagcatattttgtaaaatcatctactactgcacttgagcatgaatgggtagtagccaaactcacaaattggagtgatgaacctgcttatacctaagggcaggagcaagcccctcacaatgcagctgcatgggtttttagtgcctactgaattatatatatatatacatatatatatatatatataaaccaaaagtagttggaaagattatttgaaatgactaatttgtgctatctttatgaaatatgttaaatgtagcttttttgaaacagaagccttgaattgaaatttaactaatacttgaacattttgtatatatttctttgtatataattttgtgcagtaccaatgacaaaaatatggtgtcataataaaaccaggtttgttgatcttttagttatgggctcaaagaatttattcatctctaacatgatattggaaaataatggatgaaaataggaaaaatgattgttaatgctgactgtgggtcttaaaaggttctggaaagcagtaagttcatttttctaaaaactataacattctgttggagtattttcttccttacgtcaatacttttcctgcattatttgaaattgtgggctggggagaaacagtagtcaaagctttctgaattgagatactttgaaattccaagtgtagatttttagaatgtcattttataaatggcagtttttggaattacttgataagaacttttgaaaatggaaggattagtatggcctatttttaaagctgctttgttaggttccttatgttttattaactgtcttttctcagtttccatttcatttttttttttctagttttggtgacttagtgattttgtcattttttacatcaacttcatggtcttgtttttacatggtaattgcatgtacttaggatctatctaataggggctttaaataaatttggtcatatttatgtgtaagcacattttactgtaaatgtttgggtttctgaatttaaacagatctgtttatttcagtatgtagtaaacaatatcttaaagtgtccgattcactacttgttaattaaaaaagttatgattaatgtgaaactgttgtcttactatttttagaaaattgtgttctggatgattagcacatggataaaggagatttctggaatataaaatggattgtttttgaaatttctaggtttggctctatttactgtaatggttgaaaacaatttagtatttgggtgacccttttgtttttcttctaaatgtgcctctggtaaaatacagaactagactaaagatgtagctttttaatatttgtcttttgatggtggcaggagttcatacattaattgaactaacacatcatattttgacctactatttctatcatattgacttactgtttctgcacttctttgaccagacttatcttaaaaagtccacttttgttaaaatgtagtcacacctctgatataatccaacaagaagtgttcaaaatattttaaatatttgtgcattttataatcactaaattaatctctctctcttctctttgaacagcttagcagtgtctgcaaaaacgaatcttttcctacaacctgttaactgactggactgttggtaacaaagtaattgtgagaaccatgtcggtcaaaaatttggcatctgctgaaaaaaatgaatgccattttcaagttcccaaattacttctatactgatttcactttccagaaatggagatatgaaaagattctctggaatccttgaaagacttaatagagatacatgagactaagttaatcttggaacaaaattatactttttttgtctttcatgggagtgatactcagttattgcatatctttacaaaattgtaacctttggagaattacagtatttcatcaagaaattagagtttttacataatcaagagcatattctatggaattaacatttagtggactagaattacataagcaggccatcagtgatcacaaggcatatgagtttgtatttatttcctggaacatgagagctaatttggagtacagacagacaccctgctgagtagaatataaaagttaatgtaaagttctgaactataaagagtagtccttttaaatagatgcattgatttgtatatctttgaaaaagttgattatgattaaatgtgtgggtagttaattacaatttagggtaacaaccaggatgtatggattcttgaggttttggcttcttgagctttctcttgagtacttgatactgttttctgaatattttgaggtttctaattaatggtatgctagtttctactgttttatataaaaatttatctagtgttgtataaggactttagtattgtggatgatgggagtggctttttgtggcatatggttgttttaattgaaatattttttcagtttattacaagtgtgaaaaaacactcaaaactctggattgttttatttcatttttgttggattatgttaatacattccttcacgtggtttagattgagtcattttatctcacttacttggaaatgtgcagctgatagaagagggattgggtaggagattggcttttacttcataataaatatacagttggttattgtattattcaaaacttattaaatccattcagtttcttaccattttaagtgtattcagtgcctgtgaagccaggcagcagagtattcccactggcttaaaacttaggcgctgatgctcctacagtacagctagttataattccagaaccaaaggcaccaacattatttggtgaccttaactactactttgatagaacagactgggtaattcactgataatgagtcattacctttttaatatgtgattatctagttcagcattttgaatgtgtagtttaaggtctgatttagtaaaattttaaagctaaataatctgatgactcttgaaagtttaattggtagtatgacatttatgtttttttcccccagactcacagccaatacaaagttttgagactcctaaatgttaatatttttgctgtttttctgagctgtttttttatttacttaccacctaagctgcggatcaaaaagggaattcttccattagaaatttgtagtgttgtgtggccagcacagtatttttcagatttgaatttcagtacctctgtgtagcctcagtactctcaacaccagtcactctttattgtcttaaaatattccatactttttgttgacccaaaattgttgaaaatattttgctcagttttcacaatgaactaattgaaaagtgtagttactgtgttgtaaacatttgtgtagttctgttaatacactgatttgaattttatttatctcaacttcctttagcgtctgcctccaaattttgtctttgctgtatacccactgagatcaattccctagacccctctggctcttagtgtactataatttgggctttataaaatatattgtcttaatttaaatagaatgtgagccctctttttttttttttaagccaaataactacacaaagtaaattataaaagatttaaatagtttgtctacagtgactagactgaaatataaaaattgattgagggtagtttacttcaggtgttagctacaaatgactaaatgtccttaaataatgcagatatctgccctctgaacaaaaattttggcaaagtaaatttgtagcaacagacttaacatgatttattgcttatgttgcccatttctgctaatggaaaagataatttaaaaatatgtggcagaggacagatattagaaatactttttggttacagaaaccattgtaaactcatcctcatttataaatggtattatgctagggagtaattggactaggaatgtttaaagataagtaaggaaacaatgtgtgctcaatcgtcaaagaacttagttatatcattgggctttgaattatctaagttgattacataattctatattcttaaggagtcttaactcggtacttgggttaacgccagaaattacttttaattcattgtttttttcactgggatgagtagaactctgcttttagtaaaagtgacagaatataggtaaaatggatgatttgggatcagagcttttcatcttgatattttagcctgtaaaataaacagctatattgttttgccctttaaatgttatatatatttttctgtctttctttccctagttgtaaaagtaaagcatattctttatagaaaacttggaatatcctgaaaggaatcaagaagaaaagaaaaatcacccttataactctataagccatagaatatccacagtaaacattttggcatgcttcc

SEQ ID NO: 329471 - DNA, 1415 bp, Homo sapiens
actgacttccggctacgccgttgtctgggtggcgcggtcgagtcatcgcagggcctcaccgcttcgttctcccgtccctccccgcgccttggcgcggggggtcgactagccaagtgaggcgggaggcgactcggacctttccctgcatttcgtttcggccagtgccgggggctacccgccctggggcctgggatccttggggcccgtgaggcccactcttagcggccggggcctaccgcggcccgccgctggccctcatgaggcatagcctgaccaagctgctggcagcctcgggcagcaactccccaacccgcagtgagagcccggagccggctgcaacttgttcgctgccctctgacctgacccgggctgcagcgggggaggaggagacggcggcggccggatctcccggccgcaagcagcagtttggcgacgaaggagagttggaagccgggagggggagccgcggcggcgtggccgtgcgcgcgccctcccccgaggagatggaggaggaggcgatcgccagcctcccgggggaagagacggaggatatggactttctgtctgggctggaactggcggatctcctggaccccaggcaaccggactggcacctggaccccgggcttagctcgccggggcctctctcctcgtctggcggaggctcggatagcggcggcctgtggagaggggacgatgacgatgaggccgcggctgctgaaatgcagcgcttctctgacctgctgcaaaggctgttaaacggtatcggaggctgcagcagcagcagtgacagtggcagcgccgaaaagaggcggagaaagtccccaggaggaggcggcggtggcggcagcggtaacgacaacaaccaggcggcgacaaagagtccccggaaggcggcggcggccgctgcccgccttaatcgactgaagaagaaggagtacgtgatggggctggagagtcgagtccggggtctggcagccgagaaccaggagctgcgggccgagaatcgggagctgggcaaacgcgtacaggcactgcaggaggagagtcgctacctacgggcagtcttagccaacgagactggactggctcgcttgctgagccggctgagcggcgtgggactgcggctgaccacctcgctcttcagagactcgcccgccggtgaccacgactacgctctgccggtgggaaagcagaagcaggacctgctggaagaggacgactcggcgggaggagtctgtctccatgtggacaaggataaggtgtcggtggagttctgctcggcgtgcgcccggaaggcgtcgtcttctcttaaaatgtagggtcaagtaatctgctctttatccgcgtgcgcactgacacgcgatgggttgaatcaagatgaaatagatcaactgaaaagaacagtcactaga

SEQ ID NO: 329472 - DNA, 2994 bp, Homo sapiens
actgacttccggctacgccgttgtctgggtggcgcggtcgagtcatcgcagggcctcaccgcttcgttctcccgtccctccccgcgccttggcgcggggggtcgactagccaagtgaggcgggaggcgactcggacctttccctgcatttcgtttcggccagtgccgggggctacccgccctggggcctgggatccttggggcccgtgaggcccactcttagcggccggggcctaccgcggcccgccgctggccctcatgaggcatagcctgaccaagctgctggcagcctcgggcagcaactccccaacccgcagtgagagcccggagccggctgcaacttgttcgctgccctctgacctgacccgggctgcagcgggggaggaggagacggcggcggccggatctcccggccgcaagcagcagtttggcgacgaaggagagttggaagccgggagggggagccgcggcggcgtggccgtgcgcgcgccctcccccgaggagatggaggaggaggcgatcgccagcctcccgggggaagagacggaggatatggactttctgtctgggctggaactggcggatctcctggaccccaggcaaccggactggcacctggaccccgggcttagctcgccggggcctctctcctcgtctggcggaggctcggatagcggcggcctgtggagaggggacgatgacgatgaggccgcggctgctgaaatgcagcgcttctctgacctgctgcaaaggctgttaaacggtatcggaggctgcagcagcagcagtgacagtggcagcgccgaaaagaggcggagaaagtccccaggaggaggcggcggtggcggcagcggtaacgacaacaaccaggcggcgacaaagagtccccggaaggcggcggcggccgctgcccgccttaatcgactgaagaagaaggagtacgtgatggggctggagagtcgagtccggggtctggcagccgagaaccaggagctgcgggccgagaatcgggagctgggcaaacgcgtacaggcactgcaggaggagagtcgctacctacgggcagtcttagccaacgagactggactggctcgcttgctgagccggctgagcggcgtgggactgcggctgaccacctcgctcttcagagactcgcccgccggtgaccacgactacgctctgccggtgggaaagcagaagcaggacctgctggaagaggacgactcggcgggaggagtctgtctccatgtggacaaggataaggtgtcggtggagttctgctcggcgtgcgcccggaaggcgtcgtcttctcttaaaatgtagggtcaagtaatctgctctttatccgcgtttacccctttcaactcccttacaccatgtcaaacttaccttagtgggacatcttcaccggacacatttcagaggagagaaaaaaagtaatattgaatcttaaagtgtttagctaaaagcatgaatgtgacacagtaaccaactcctaatgataacatgtgactattaaatctctctgacagtttcttttttaggtgatttccttcctgccaggctccgttgtaggggttacagaacagtcgttcccgcctcacaacctgtggatacagctgttggggcagaagagacgggaccagctgctggccacatttcctgctttattttaaaaggtagtataagaaatgaggaaaaagaggtaatatcagggcttctgctgttttttatttttaacatgttcataattaaaaagtattttccagcagtccaaagatgtaagttatcttacacataaaatgttttattttgttatttggttatgaaaatggaatccttgttcttgcacaactgtaaatgttttgttgctagataatacgatttgagacctgaattggtctttggtttccagtgcatcacagcatattttgtaaaatcatctactactgcacttgagcatgaatgggtagtagccaaactcacaaattggagtgatgaacctgcttatacctaagggcaggagcaagcccctcacaatgcagctgcatgggtttttagtgcctactgaattatatatatatatacatatatatatatatatataaaccaaaagtagttggaaagattatttgaaatgactaatttgtgctatctttatgaaatatgttaaatgtagcttttttgaaacagaagccttgaattgaaatttaactaatacttgaacattttgtatatatttctttgtatataattttgtgcagtaccaatgacaaaaatatggtgtcataataaaaccaggtttgttgatcttttagttatgggctcaaagaatttattcatctctaacatgatattggaaaataatggatgaaaataggaaaaatgattgttaatgctgactgtgggtcttaaaaggttctggaaagcagtaagttcatttttctaaaaactataacattctgttggagtattttcttccttacgtcaatacttttcctgcattatttgaaattgtgggctggggagaaacagtagtcaaagctttctgaattgagatactttgaaattccaagtgtagatttttagaatgtcattttataaatggcagtttttggaattacttgataagaacttttgaaaatggaaggattagtatggcctatttttaaagctgctttgttaggttccttatgttttattaactgtcttttctcagtttccatttcatttttttttttctagttttggtgacttagtgattttgtcattttttacatcaacttcatggtcttgtttttacatggtaattgcatgtacttaggatctatctaataggggctttaaataaatttggtcatatttatgtgtaagcacattttactgtaaatgtttgggtttctgaatttaaacagatctgtttatttcagtatgtagtaaacaatatcttaaagtgtccgattcactacttgttaattaaaaaagttatgattaa

SEQ ID NO: 329473 - DNA, 6241 bp, Homo sapiens
actgacttccggctacgccgttgtctgggtggcgcggtcgagtcatcgcagggcctcaccgcttcgttctcccgtccctccccgcgccttggcgcggggggtcgactagccaagtgaggcgggaggcgactcggacctttccctgcatttcgtttcggccagtgccgggggctacccgccctggggcctgggatccttggggcccgtgaggcccactcttagcggccggggcctaccgcggcccgccgctggccctcatgaggcatagcctgaccaagctgctggcagcctcgggcagcaactccccaacccgcagtgagagcccggagccggctgcaacttgttcgctgccctctgacctgacccgggctgcagcgggggaggaggagacggcggcggccggatctcccggccgcaagcagcagtttggcgacgaaggagagttggaagccgggagggggagccgcggcggcgtggccgtgcgcgcgccctcccccgaggagatggaggaggaggcgatcgccagcctcccgggggaagagacggaggatatggactttctgtctgggctggaactggcggatctcctggaccccaggcaaccggactggcacctggaccccgggcttagctcgccggggcctctctcctcgtctggcggaggctcggatagcggcggcctgtggagaggggacgatgacgatgaggccgcggctgctgaaatgcagcgcttctctgacctgctgcaaaggctgttaaacggtatcggaggctgcagcagcagcagtgacagtggcagcgccgaaaagaggcggagaaagtccccaggaggaggcggcggtggcggcagcggtaacgacaacaaccaggcggcgacaaagagtccccggaaggcggcggcggccgctgcccgccttaatcgactgaagaagaaggagtacgtgatggggctggagagtcgagtccggggtctggcagccgagaaccaggagctgcgggccgagaatcgggagctgggcaaacgcgtacaggcactgcaggaggagagtcgctacctacgggcagtcttagccaacgagactggactggctcgcttgctgagccggctgagcggcgtgggactgcggctgaccacctcgctcttcagagactcgcccgccggtgaccacgactacgctctgccggtgggaaagcagaagcaggacctgctggaagaggacgactcggcgggaggagtctgtctccatgtggacaaggataaggtgtcggtggagttctgctcggcgtgcgcccggaaggcgtcgtcttctcttaaaatgtagggtcaagtaatctgctctttatccgcgtttacccctttcaactcccttacaccatgtcaaacttaccttagtgggacatcttcaccggacacatttcagaggagagaaaaaaagtaatattgaatcttaaagtgtttagctaaaagcatgaatgtgacacagtaaccaactcctaatgataacatgtgactattaaatctctctgacagtttcttttttaggtgatttccttcctgccaggctccgttgtaggggttacagaacagtcgttcccgcctcacaacctgtggatacagctgttggggcagaagagacgggaccagctgctggccacatttcctgctttattttaaaaggtagtataagaaatgaggaaaaagaggtaatatcagggcttctgctgttttttatttttaacatgttcataattaaaaagtattttccagcagtccaaagatgtaagttatcttacacataaaatgttttattttgttatttggttatgaaaatggaatccttgttcttgcacaactgtaaatgttttgttgctagataatacgatttgagacctgaattggtctttggtttccagtgcatcacagcatattttgtaaaatcatctactactgcacttgagcatgaatgggtagtagccaaactcacaaattggagtgatgaacctgcttatacctaagggcaggagcaagcccctcacaatgcagctgcatgggtttttagtgcctactgaattatatatatatatacatatatatatatatatataaaccaaaagtagttggaaagattatttgaaatgactaatttgtgctatctttatgaaatatgttaaatgtagcttttttgaaacagaagccttgaattgaaatttaactaatacttgaacattttgtatatatttctttgtatataattttgtgcagtaccaatgacaaaaatatggtgtcataataaaaccaggtttgttgatcttttagttatgggctcaaagaatttattcatctctaacatgatattggaaaataatggatgaaaataggaaaaatgattgttaatgctgactgtgggtcttaaaaggttctggaaagcagtaagttcatttttctaaaaactataacattctgttggagtattttcttccttacgtcaatacttttcctgcattatttgaaattgtgggctggggagaaacagtagtcaaagctttctgaattgagatactttgaaattccaagtgtagatttttagaatgtcattttataaatggcagtttttggaattacttgataagaacttttgaaaatggaaggattagtatggcctatttttaaagctgctttgttaggttccttatgttttattaactgtcttttctcagtttccatttcatttttttttttctagttttggtgacttagtgattttgtcattttttacatcaacttcatggtcttgtttttacatggtaattgcatgtacttaggatctatctaataggggctttaaataaatttggtcatatttatgtgtaagcacattttactgtaaatgtttgggtttctgaatttaaacagatctgtttatttcagtatgtagtaaacaatatcttaaagtgtccgattcactacttgttaattaaaaaagttatgattaatgtgaaactgttgtcttactatttttagaaaattgtgttctggatgattagcacatggataaaggagatttctggaatataaaatggattgtttttgaaatttctaggtttggctctatttactgtaatggttgaaaacaatttagtatttgggtgacccttttgtttttcttctaaatgtgcctctggtaaaatacagaactagactaaagatgtagctttttaatatttgtcttttgatggtggcaggagttcatacattaattgaactaacacatcatattttgacctactatttctatcatattgacttactgtttctgcacttctttgaccagacttatcttaaaaagtccacttttgttaaaatgtagtcacacctctgatataatccaacaagaagtgttcaaaatattttaaatatttgtgcattttataatcactaaattaatctctctctcttctctttgaacagcttagcagtgtctgcaaaaacgaatcttttcctacaacctgttaactgactggactgttggtaacaaagtaattgtgagaaccatgtcggtcaaaaatttggcatctgctgaaaaaaatgaatgccattttcaagttcccaaattacttctatactgatttcactttccagaaatggagatatgaaaagattctctggaatccttgaaagacttaatagagatacatgagactaagttaatcttggaacaaaattatactttttttgtctttcatgggagtgatactcagttattgcatatctttacaaaattgtaacctttggagaattacagtatttcatcaagaaattagagtttttacataatcaagagcatattctatggaattaacatttagtggactagaattacataagcaggccatcagtgatcacaaggcatatgagtttgtatttatttcctggaacatgagagctaatttggagtacagacagacaccctgctgagtagaatataaaagttaatgtaaagttctgaactataaagagtagtccttttaaatagatgcattgatttgtatatctttgaaaaagttgattatgattaaatgtgtgggtagttaattacaatttagggtaacaaccaggatgtatggattcttgaggttttggcttcttgagctttctcttgagtacttgatactgttttctgaatattttgaggtttctaattaatggtatgctagtttctactgttttatataaaaatttatctagtgttgtataaggactttagtattgtggatgatgggagtggctttttgtggcatatggttgttttaattgaaatattttttcagtttattacaagtgtgaaaaaacactcaaaactctggattgttttatttcatttttgttggattatgttaatacattccttcacgtggtttagattgagtcattttatctcacttacttggaaatgtgcagctgatagaagagggattgggtaggagattggcttttacttcataataaatatacagttggttattgtattattcaaaacttattaaatccattcagtttcttaccattttaagtgtattcagtgcctgtgaagccaggcagcagagtattcccactggcttaaaacttaggcgctgatgctcctacagtacagctagttataattccagaaccaaaggcaccaacattatttggtgaccttaactactactttgatagaacagactgggtaattcactgataatgagtcattacctttttaatatgtgattatctagttcagcattttgaatgtgtagtttaaggtctgatttagtaaaattttaaagctaaataatctgatgactcttgaaagtttaattggtagtatgacatttatgtttttttcccccagactcacagccaatacaaagttttgagactcctaaatgttaatatttttgctgtttttctgagctgtttttttatttacttaccacctaagctgcggatcaaaaagggaattcttccattagaaatttgtagtgttgtgtggccagcacagtatttttcagatttgaatttcagtacctctgtgtagcctcagtactctcaacaccagtcactctttattgtcttaaaatattccatactttttgttgacccaaaattgttgaaaatattttgctcagttttcacaatgaactaattgaaaagtgtagttactgtgttgtaaacatttgtgtagttctgttaatacactgatttgaattttatttatctcaacttcctttagcgtctgcctccaaattttgtctttgctgtatacccactgagatcaattccctagacccctctggctcttagtgtactataatttgggctttataaaatatattgtcttaatttaaatagaatgtgagccctctttttttttttttaagccaaataactacacaaagtaaattataaaagatttaaatagtttgtctacagtgactagactgaaatataaaaattgattgagggtagtttacttcaggtgttagctacaaatgactaaatgtccttaaataatgcagatatctgccctctgaacaaaaattttggcaaagtaaatttgtagcaacagacttaacatgatttattgcttatgttgcccatttctgctaatggaaaagataatttaaaaatatgtggcagaggacagatattagaaatactttttggttacagaaaccattgtaaactcatcctcatttataaatggtattatgctagggagtaattggactaggaatgtttaaagataagtaaggaaacaatgtgtgctcaatcgtcaaagaacttagttatatcattgggctttgaattatctaagttgattacataattctatattcttaaggagtcttaactcggtacttgggttaacgccagaaattacttttaattcattgtttttttcactgggatgagtagaactctgcttttagtaaaagtgacagaatataggtaaaatggatgatttgggatcagagcttttcatcttgatattttagcctgtaaaataaacagctatattgttttgccctttaaatgttatatatatttttctgtctttctttccctagttgtaaaagtaaagcatattctttatagaaaacttggaatatcctgaaaggaatcaagaagaaaagaaaaatcacccttataactctataagccatagaatatccacagtaaacattttggcatgcttcc

SEQ ID NO: 329474 - DNA, 6473 bp, Homo sapiens
actgacttccggctacgccgttgtctgggtggcgcggtcgagtcatcgcagggcctcaccgcttcgttctcccgtccctccccgcgccttggcgcggggggtcgactagccaagtgaggcgggaggcgactcggacctttccctgcatttcgtttcggccagtgccgggggctacccgccctggggcctgggatccttggggcccgtgaggcccactcttagcggccggggcctaccgcggcccgccgctggccctcatgaggcatagcctgaccaagctgctggcagcctcgggcagcaactccccaacccgcagtgagagcccggagccggctgcaacttgttcgctgccctctgacctgacccgggctgcagcgggggaggaggagacggcggcggccggatctcccggccgcaagcagcagtttggcgacgaaggagagttggaagccgggagggggagccgcggcggcgtggccgtgcgcgcgccctcccccgaggagatggaggaggaggcgatcgccagcctcccgggggaagagacggaggatatggactttctgtctgggctggaactggcggatctcctggaccccaggcaaccggactggcacctggaccccgggcttagctcgccggggcctctctcctcgtctggcggaggctcggatagcggcggcctgtggagaggggacgatgacgatgaggccgcggctgctgaaatgcagcgcttctctgacctgctgcaaaggctgttaaacggtatcggaggctgcagcagcagcagtgacagtggcagcgccgaaaagaggcggagaaagtccccaggaggaggcggcggtggcggcagcggtaacgacaacaaccaggcggcgacaaagagtccccggaaggcggcggcggccgctgcccgccttaatcgactgaagaagaaggagtacgtgatggggctggagagtcgagtccggggtctggcagccgagaaccaggagctgcgggccgagaatcgggagctgggcaaacgcgtacaggcactgcaggaggagagtcgctacctacgggcagtcttagccaacgagactggactggctcgcttgctgagccggctgagcggcgtgggactgcggctgaccacctcgctcttcagagactcgcccgccggtgaccacgactacgctctgccggtgggaaagcagaagcaggacctgctggaagaggacgactcggcgggaggagtctgtctccatgtggacaaggataaggtgtcggtggagttctgctcggcgtgcgcccggaaggcgtcgtcttctcttaaaatgtagggtcaagtaatctgctctttatccgcgtttacccctttcaactcccttacaccatgtcaaacttaccttagtgggacatcttcaccggacacatttcagaggagagaaaaaaagtaatattgaatcttaaagtgtttagctaaaagcatgaatgtgacacagtaaccaactcctaatgataacatgtgactattaaatctctctgacagtttcttttttaggtgatttccttcctgccaggctccgttgtaggggttacagaacagtcgttcccgcctcacaacctgtggatacagctgttggggcagaagagacgggaccagctgctggccacatttcctgctttattttaaaaggtagtataagaaatgaggaaaaagaggtaatatcagggcttctgctgttttttatttttaacatgttcataattaaaaagtattttccagcagtccaaagatgtaagttatcttacacataaaatgttttattttgttatttggttatgaaaatggaatccttgttcttgcacaactgtaaatgttttgttgctagataatacgatttgagacctgaattggtctttggtttccagtgcatcacagcatattttgtaaaatcatctactactgcacttgagcatgaatgggtagtagccaaactcacaaattggagtgatgaacctgcttatacctaagggcaggagcaagcccctcacaatgcagctgcatgggtttttagtgcctactgaattatatatatatatacatatatatatatatatataaaccaaaagtagttggaaagattatttgaaatgactaatttgtgctatctttatgaaatatgttaaatgtagcttttttgaaacagaagccttgaattgaaatttaactaatacttgaacattttgtatatatttctttgtatataattttgtgcagtaccaatgacaaaaatatggtgtcataataaaaccaggtttgttgatcttttagttatgggctcaaagaatttattcatctctaacatgatattggaaaataatggatgaaaataggaaaaatgattgttaatgctgactgtgggtcttaaaaggttctggaaagcagtaagttcatttttctaaaaactataacattctgttggagtattttcttccttacgtcaatacttttcctgcattatttgaaattgtgggctggggagaaacagtagtcaaagctttctgaattgagatactttgaaattccaagtgtagatttttagaatgtcattttataaatggcagtttttggaattacttgataagaacttttgaaaatggaaggattagtatggcctatttttaaagctgctttgttaggttccttatgttttattaactgtcttttctcagtttccatttcatttttttttttctagttttggtgacttagtgattttgtcattttttacatcaacttcatggtcttgtttttacatggtaattgcatgtacttaggatctatctaataggggctttaaataaatttggtcatatttatgtgtaagcacattttactgtaaatgtttgggtttctgaatttaaacagatctgtttatttcagtatgtagtaaacaatatcttaaagtgtccgattcactacttgttaattaaaaaagttatgattaatgtgaaactgttgtcttactatttttagaaaattgtgttctggatgattagcacatggataaaggagatttctggaatataaaatggattgtttttgaaatttctaggtttggctctatttactgtaatggttgaaaacaatttagtatttgggtgacccttttgtttttcttctaaatgtgcctctggtaaaatacagaactagactaaagatgtagctttttaatatttgtcttttgatggtggcaggagttcatacattaattgaactaacacatcatattttgacctactatttctatcatattgacttactgtttctgcacttctttgaccagacttatcttaaaaagtccacttttgttaaaatgtagtcacacctctgatataatccaacaagaagtgttcaaaatattttaaatatttgtgcattttataatcactaaattaatctctctctcttctctttgaacagcttagcagtgtctgcaaaaacgaatcttttcctacaacctgttaactgactggactgttggtaacaaagtaattgtgagaaccatgtcggtcaaaaatttggcatctgctgaaaaaaatgaatgccattttcaagttcccaaattacttctatactgatttcactttccagaaatggagatatgaaaagattctctggaatccttgaaagacttaatagagatacatgagactaagttaatcttggaacaaaattatactttttttgtctttcatgggagtgatactcagttattgcatatctttacaaaattgtaacctttggagaattacagtatttcatcaagaaattagagtttttacataatcaagagcatattctatggaattaacatttagtggactagaattacataagcaggccatcagtgatcacaaggcatatgagtttgtatttatttcctggaacatgagagctaatttggagtacagacagacaccctgctgagtagaatataaaagttaatgtaaagttctgaactataaagagtagtccttttaaatagatgcattgatttgtatatctttgaaaaagttgattatgattaaatgtgtgggtagttaattacaatttagggtaacaaccaggatgtatggattcttgaggttttggcttcttgagctttctcttgagtacttgatactgttttctgaatattttgaggtttctaattaatggtatgctagtttctactgttttatataaaaatttatctagtgttgtataaggactttagtattgtggatgatgggagtggctttttgtggcatatggttgttttaattgaaatattttttcagtttattacaagtgtgaaaaaacactcaaaactctggattgttttatttcatttttgttggattatgttaatacattccttcacgtggtttagattgagtcattttatctcacttacttggaaatgtgcagctgatagaagagggattgggtaggagattggcttttacttcataataaatatacagttggttattgtattattcaaaacttattaaatccattcagtttcttaccattttaagtgtattcagtgcctgtgaagccaggcagcagagtattcccactggcttaaaacttaggcgctgatgctcctacagtacagctagttataattccagaaccaaaggcaccaacattatttggtgaccttaactactactttgatagaacagactgggtaattcactgataatgagtcattacctttttaatatgtgattatctagttcagcattttgaatgtgtagtttaaggtctgatttagtaaaattttaaagctaaataatctgatgactcttgaaagtttaattggtagtatgacatttatgtttttttcccccagactcacagccaatacaaagttttgagactcctaaatgttaatatttttgctgtttttctgagctgtttttttatttacttaccacctaagctgcggatcaaaaagggaattcttccattagaaatttgtagtgttgtgtggccagcacagtatttttcagatttgaatttcagtacctctgtgtagcctcagtactctcaacaccagtcactctttattgtcttaaaatattccatactttttgttgacccaaaattgttgaaaatattttgctcagttttcacaatgaactaattgaaaagtgtagttactgtgttgtaaacatttgtgtagttctgttaatacactgatttgaattttatttatctcaacttcctttagcgtctgcctccaaattttgtctttgctgtatacccactgagatcaattccctagacccctctggctcttagtgtactataatttgggctttataaaatatattgtcttaatttaaatagaatgtgagccctctttttttttttttaagccaaataactacacaaagtaaattataaaagatttaaatagtttgtctacagtgactagactgaaatataaaaattgattgagggtagtttacttcaggtgttagctacaaatgactaaatgtccttaaataatgcagatatctgccctctgaacaaaaattttggcaaagtaaatttgtagcaacagacttaacatgatttattgcttatgttgcccatttctgctaatggaaaagataatttaaaaatatgtggcagaggacagatattagaaatactttttggttacagaaaccattgtaaactcatcctcatttataaatggtattatgctagggagtaattggactaggaatgtttaaagataagtaaggaaacaatgtgtgctcaatcgtcaaagaacttagttatatcattgggctttgaattatctaagttgattacataattctatattcttaaggagtcttaactcggtacttgggttaacgccagaaattacttttaattcattgtttttttcactgggatgagtagaactctgcttttagtaaaagtgacagaatataggtaaaatggatgatttgggatcagagcttttcatcttgatattttagcctgtaaaataaacagctatattgttttgccctttaaatgttatatatatttttctgtctttctttccctagttgtaaaagtaaagcatattctttatagaaaacttggaatatcctgaaaggaatcaagaagaaaagaaaaatcacccttataactctataagccatagaatatccacagtaaacattttggcatgcttcctttcagtctcttgtgcacatagattcttttgcctcataactgggatcattttttatataagtttggtagataatatattttatgtgcctgttgaaagaacaaatcatctttgctttctgaaaaattgagattgtattttattaatttcacatgagtttttcatctttggcagcacagctttatgtttttctttaaacagaagctaaaggccagtttcactcacaaagatgcc

SEQ ID NO: 329475 - DNA, 6419 bp, Homo sapiens
actgacttccggctacgccgttgtctgggtggcgcggtcgagtcatcgcagggcctcaccgcttcgttctcccgtccctccccgcgccttggcgcggggggtcgactagccaagtgaggcgggaggcgactcggacctttccctgcatttcgtttcggccagtgccgggggctacccgccctggggcctgggatccttggggcccgtgaggcccactcttagcggccggggcctaccgcggcccgccgctggccctcatgaggcatagcctgaccaagctgctggcagcctcgggcagcaactccccaacccgcagtgagagcccggagccggctgcaacttgttcgctgccctctgacctgacccgggctgcagcgggggaggaggagacggcggcggccggatctcccggccgcaagcagcagtttggcgacgaaggagagttggaagccgggagggggagccgcggcggcgtggccgtgcgcgcgccctcccccgaggagatggaggaggaggcgatcgccagcctcccgggggaagagacggaggatatggactttctgtctgggctggaactggcggatctcctggaccccaggcaaccggactggcacctggaccccgggcttagctcgccggggcctctctcctcgtctggcggaggctcggatagcggcggcctgtggagaggggacgatgacgatgaggccgcggctgctgaaatgcagcgcttctctgacctgctgcaaaggctgttaaacggtatcggaggctgcagcagcagcagtgacagtggcagcgccgaaaagaggcggagaaagtccccaggaggaggcggcggtggcggcagcggtaacgacaacaaccaggcggcgacaaagagtccccggaaggcggcggcggccgctgcccgccttaatcgactgaagaagaaggagtacgtgatggggctggagagtcgagtccggggtctggcagccgagaaccaggagctgcgggccgagaatcgggagctgggcaaacgcgtacaggcactgcaggaggagagtcgctacctacgggcagtcttagccaacgagactggactggctcgcttgctgagccggctgagcggcgtgggactgcggctgaccacctcgctcttcagagactcgcccgccggtgaccacgactacgctctgccggtgggaaagcagaagcaggacctgctggaagaggacgactcggcgggaggagtctgtctccatgtggacaaggataaggtgtcggtggagttctgctcggcgtgcgcccggaaggcgtcgtcttctcttaaaatgtagggtcaagtaatctgctctttatccgcgtttacccctttcaactcccttacaccatgtcaaacttaccttagtgggacatcttcaccggacacatttcagaggagagaaaaaaagtaatattgaatcttaaagtgtttagctaaaagcatgaatgtgacacagtaaccaactcctaatgataacatgtgactattaaatctctctgacagtttcttttttaggtgatttccttcctgccaggctccgttgtaggggttacagaacagtcgttcccgcctcacaacctgtggatacagctgttggggcagaagagacgggaccagctgctggccacatttcctgctttattttaaaaggtagtataagaaatgaggaaaaagaggtaatatcagggcttctgctgttttttatttttaacatgttcataattaaaaagtattttccagcagtccaaagatgtaagttatcttacacataaaatgttttattttgttatttggttatgaaaatggaatccttgttcttgcacaactgtaaatgttttgttgctagataatacgatttgagacctgaattggtctttggtttccagtgcatcacagcatattttgtaaaatcatctactactgcacttgagcatgaatgggtagtagccaaactcacaaattggagtgatgaacctgcttatacctaagggcaggagcaagcccctcacaatgcagctgcatgggtttttagtgcctactgaattatatatatatatacatatatatatatatatataaaccaaaagtagttggaaagattatttgaaatgactaatttgtgctatctttatgaaatatgttaaatgtagcttttttgaaacagaagccttgaattgaaatttaactaatacttgaacattttgtatatatttctttgtatataattttgtgcagtaccaatgacaaaaatatggtgtcataataaaaccaggtttgttgatcttttagttatgggctcaaagaatttattcatctctaacatgatattggaaaataatggatgaaaataggaaaaatgattgttaatgctgactgtgggtcttaaaaggttctggaaagcagtaagttcatttttctaaaaactataacattctgttggagtattttcttccttacgtcaatacttttcctgcattatttgaaattgtgggctggggagaaacagtagtcaaagctttctgaattgagatactttgaaattccaagtgtagatttttagaatgtcattttataaatggcagtttttggaattacttgataagaacttttgaaaatggaaggattagtatggcctatttttaaagctgctttgttaggttccttatgttttattaactgtcttttctcagtttccatttcatttttttttttctagttttggtgacttagtgattttgtcattttttacatcaacttcatggtcttgtttttacatggtaattgcatgtacttaggatctatctaataggggctttaaataaatttggtcatatttatgtgtaagcacattttactgtaaatgtttgggtttctgaatttaaacagatctgtttatttcagtatgtagtaaacaatatcttaaagtgtccgattcactacttgttaattaaaaaagttatgattaatgtgaaactgttgtcttactatttttagaaaattgtgttctggatgattagcacatggataaaggagatttctggaatataaaatggattgtttttgaaatttctaggtttggctctatttactgtaatggttgaaaacaatttagtatttgggtgacccttttgtttttcttctaaatgtgcctctggtaaaatacagaactagactaaagatgtagctttttaatatttgtcttttgatggtggcaggagttcatacattaattgaactaacacatcatattttgacctactatttctatcatattgacttactgtttctgcacttctttgaccagacttatcttaaaaagtccacttttgttaaaatgtagtcacacctctgatataatccaacaagaagtgttcaaaatattttaaatatttgtgcattttataatcactaaattaatctctctctcttctctttgaacagcttagcagtgtctgcaaaaacgaatcttttcctacaacctgttaactgactggactgttggtaacaaagtaattgtgagaaccatgtcggtcaaaaatttggcatctgctgaaaaaaatgaatgccattttcaagttcccaaattacttctatactgatttcactttccagaaatggagatatgaaaagattctctggaatccttgaaagacttaatagagatacatgagactaagttaatcttggaacaaaattatactttttttgtctttcatgggagtgatactcagttattgcatatctttacaaaattgtaacctttggagaattacagtatttcatcaagaaattagagtttttacataatcaagagcatattctatggaattaacatttagtggactagaattacataagcaggccatcagtgatcacaaggcatatgagtttgtatttatttcctggaacatgagagctaatttggagtacagacagacaccctgctgagtagaatataaaagttaatgtaaagttctgaactataaagagtagtccttttaaatagatgcattgatttgtatatctttgaaaaagttgattatgattaaatgtgtgggtagttaattacaatttagggtaacaaccaggatgtatggattcttgaggttttggcttcttgagctttctcttgagtacttgatactgttttctgaatattttgaggtttctaattaatggtatgctagtttctactgttttatataaaaatttatctagtgttgtataaggactttagtattgtggatgatgggagtggctttttgtggcatatggttgttttaattgaaatattttttcagtttattacaagtgtgaaaaaacactcaaaactctggattgttttatttcatttttgttggattatgttaatacattccttcacgtggtttagattgagtcattttatctcacttacttggaaatgtgcagctgatagaagagggattgggtaggagattggcttttacttcataataaatatacagttggttattgtattattcaaaacttattaaatccattcagtttcttaccattttaagtgtattcagtgcctgtgaagccaggcagcagagtattcccactggcttaaaacttaggcgctgatgctcctacagtacagctagttataattccagaaccaaaggcaccaacattatttggtgaccttaactactactttgatagaacagactgggtaattcactgataatgagtcattacctttttaatatgtgattatctagttcagcattttgaatgtgtagtttaaggtctgatttagtaaaattttaaagctaaataatctgatgactcttgaaagtttaattggtagtatgacatttatgtttttttcccccagactcacagccaatacaaagttttgagactcctaaatgttaatatttttgctgtttttctgagctgtttttttatttacttaccacctaagctgcggatcaaaaagggaattcttccattagaaatttgtagtgttgtgtggccagcacagtatttttcagatttgaatttcagtacctctgtgtagcctcagtactctcaacaccagtcactctttattgtcttaaaatattccatactttttgttgacccaaaattgttgaaaatattttgctcagttttcacaatgaactaattgaaaagtgtagttactgtgttgtaaacatttgtgtagttctgttaatacactgatttgaattttatttatctcaacttcctttagcgtctgcctccaaattttgtctttgctgtatacccactgagatcaattccctagacccctctggctcttagtgtactataatttgggctttataaaatatattgtcttaatttaaatagaatgtgagccctctttttttttttttaagccaaataactacacaaagtaaattataaaagatttaaatagtttgtctacagtgactagactgaaatataaaaattgattgagggtagtttacttcaggtgttagctacaggcaaagtaaatttgtagcaacagacttaacatgatttattgcttatgttgcccatttctgctaatggaaaagataatttaaaaatatgtggcagaggacagatattagaaatactttttggttacagaaaccattgtaaactcatcctcatttataaatggtattatgctagggagtaattggactaggaatgtttaaagataagtaaggaaacaatgtgtgctcaatcgtcaaagaacttagttatatcattgggctttgaattatctaagttgattacataattctatattcttaaggagtcttaactcggtacttgggttaacgccagaaattacttttaattcattgtttttttcactgggatgagtagaactctgcttttagtaaaagtgacagaatataggtaaaatggatgatttgggatcagagcttttcatcttgatattttagcctgtaaaataaacagctatattgttttgccctttaaatgttatatatatttttctgtctttctttccctagttgtaaaagtaaagcatattctttatagaaaacttggaatatcctgaaaggaatcaagaagaaaagaaaaatcacccttataactctataagccatagaatatccacagtaaacattttggcatgcttcctttcagtctcttgtgcacatagattcttttgcctcataactgggatcattttttatataagtttggtagataatatattttatgtgcctgttgaaagaacaaatcatctttgctttctgaaaaattgagattgtattttattaatttcacatgagtttttcatctttggcagcacagctttatgtttttctttaaacagaagctaaaggccagtttcactcacaaagatgcc

SEQ ID NO: 329476 - DNA, 2316 bp, Homo sapiens
actgacttccggctacgccgttgtctgggtggcgcggtcgagtcatcgcagggcctcaccgcttcgttctcccgtccctccccgcgccttggcgcggggggtcgactagccaagtgaggcgggaggcgactcggacctttccctgcatttcgtttcggccagtgccgggggctacccgccctggggcctgggatccttggggcccgtgaggcccactcttagcggccggggcctaccgcggcccgccgctggccctcatgaggcatagcctgaccaagctgctggcagcctcgggcagcaactccccaacccgcagtgagagcccggagccggctgcaacttgttcgctgccctctgacctgacccgggctgcagcgggggaggaggagacggcggcggccggatctcccggccgcaagcagcagtttggcgacgaaggagagttggaagccgggagggggagccgcggcggcgtggccgtgcgcgcgccctcccccgaggagatggaggaggaggcgatcgccagcctcccgggggaagagacggaggatatggactttctgtctgggctggaactggcggatctcctggaccccaggcaaccggactggcacctggaccccgggcttagctcgccggggcctctctcctcgtctggcggaggctcggatagcggcggcctgtggagaggggacgatgacgatgaggccgcggctgctgaaatgcagcgcttctctgacctgctgcaaaggctgttaaacggtatcggaggctgcagcagcagcagtgacagtggcagcgccgaaaagaggcggagaaagtccccaggaggaggcggcggtggcggcagcggtaacgacaacaaccaggcggcgacaaagagtccccggaaggcggcggcggccgctgcccgccttaatcgactgaagaagaaggagtacgtgatggggctggagagtcgagtccggggtctggcagccgagaaccaggagctgcgggccgagaatcgggagctgggcaaacgcgtacaggcactgcaggaggagagtcgctacctacgggcagtcttagccaacgagactggactggctcgcttgctgagccggctgagcggcgtgggactgcggctgaccacctcgctcttcagagactcgcccgccggtgaccacgactacgctctgccggtgggaaagcagaagcaggacctgctggaagaggacgactcggcgggaggagtctgtctccatgtggacaaggataaggtgtcggtggagttctgctcggcgtgcgcccggaaggcgtcgtcttctcttaaaatgtagggtcaagtaatctgctctttatccgcgtttacccctttcaactcccttacaccatgtcaaacttaccttagtgggacatcttcaccggacacatttcagaggagagaaaaaaagtaatattgaatcttaaagtgtttagctaaaagcatgaatgtgacacagtaaccaactcctaatgataacatgtgactattaaatctctctgacagtttcttttttaggtgatttccttcctgccaggctccgttgtaggggttacagaacagtcgttcccgcctcacaacctgtggatacagctgttggggcagaagagacgggaccagctgctggccacatttcctgctttattttaaaaggtagtataagaaatgaggaaaaagaggtaatatcagggcttctgctgttttttatttttaacatgttcataattaaaaagtattttccagcagtccaaagatgtaagttatcttacacataaaatgttttattttgttatttggttatgaaaatggaatccttgttcttgcacaactgtaaatgttttgttgctagataatacgatttgagacctgaattggtctttggtttccagtgcatcacagcatattttgtaaaatcatctactactgcacttgagcatgaatgggtagtagccaaactcacaaattggagtgatgaacctgcttatacctaagggcaggagcaagcccctcacaatgcagctgcatgggtttttagtgcctactgaattatatatatatatacatatatatatatatatataaaccaaaagtagttggaaagattatttgaaatgactaatttgtgctatctttatgaaatatgttaaatgtagcttttttgaaacagaagccttgaattgaaatttaactaatacttgaacattttgtatatatttctttgtatataattttgtgcagtaccaatgacaaaaatatggtgtcataataaaaccaggtttgttgatctttta

SEQ ID NO: 329477 - DNA, 1390 bp, Homo sapiens
actgacttccggctacgccgttgtctgggtggcgcggtcgagtcatcgcagggcctcaccgcttcgttctcccgtccctccccgcgccttggcgcggggggtcgactagccaagtgaggcgggaggcgactcggacctttccctgcatttcgtttcggccagtgccgggggctacccgccctggggcctgggatccttggggcccgtgaggcccactcttagcggccggggcctaccgcggcccgccgctggccctcatgaggcatagcctgaccaagctgctggcagcctcgggcagcaactccccaacccgcagtgagagcccggagccggctgcaacttgttcgctgccctctgacctgacccgggctgcagcgggggaggaggagacggcggcggccggatctcccggccgcaagcagcagtttggcgacgaaggagagttggaagccgggagggggagccgcggcggcgtggccgtgcgcgcgccctcccccgaggagatggaggaggaggcgatcgccagcctcccgggggaagagacggaggatatggactttctgtctgggctggaactggcggatctcctggaccccaggcaaccggactggcacctggaccccgggcttagctcgccggggcctctctcctcgtctggcggaggctcggatagcggcggcctgtggagaggggacgatgacgatgaggccgcggctgctgaaatgcagcgcttctctgacctgctgcaaaggctgttaaacggtatcggaggctgcagcagcagcagtgacagtggcagcgccgaaaagaggcggagaaagtccccaggaggaggcggcggtggcggcagcggtaacgacaacaaccaggcggcgacaaagagtccccggaaggcggcggcggccgctgcccgccttaatcgactgaagaagaaggagtacgtgatggggctggagagtcgagtccggggtctggcagccgagaaccaggagctgcgggccgagaatcgggagctgggcaaacgcgtacaggcactgcaggaggagagtcgctacctacgggcagtcttagccaacgagactggactggctcgcttgctgagccggctgagcggcgtgggactgcggctgaccacctcgctcttcagagactcgcccgccggtgaccacgactacgctctgccggtgggaaagcagaagcaggacctgctggaagaggacgactcggcgggaggagtctgtctccatgtggacaaggataaggtgtcggtggagttctgctcggcgtgcgcccggaaggcgtcgtcttctcttaaaatgtagggtcaagtaatctgctctttatccgcgtatgcgcactggggggtcctctagatctcctcaaaccaagg

SEQ ID NO: 329478 - DNA, 609 bp, Homo sapiens
aattgccgcaaggagaataaaatattcaggaatagagctaacaagggaagtgaagggcctcttcaaggagaactacaaaccactgctccaggaactcagagaggatacaagcagatgggagaacattccatgctcatggatagaaagaatcaatatcacgaaaatgaccatactgcccaaaacaatttatagattcaatgctatttccattaaatcactgacattcttcacagaattagaaaaaactattttaaaattcatatggaatcaaaaaagagctcggatagccaggacattcctaagcaaaaagaacaaagctggaggcatcacattacccaacttcaaactatactactaatagcaaaaaaatgtgcaatttatatgacaaagtactaatctagctaatacacaaaaataccttaaggactgattttttaaaaaatagccaataaaaaacaaacaaaggacataaaaaggctatctactgaataaaataaattcaatctcactcaaaaattaataaacattggaacaagattttatatttatctatctgataaataaaagtaaaccatattttcaaaaggttcgataagagccattctcaca

SEQ ID NO: 329479 - DNA, 1008 bp, Homo sapiens
cccccgagtcccggggcccaggcgcctcgtgatgtcaccgcagcttgatacaaagagcccttcggcccacgcgggtctcccggcaacgggcgggggcggggccgcgccttccactggtgcccagaagtgcgagcggcagcggcgcggccgcgattgttcctgcgcttcggggctgcccgccgcgtccccgcgcgccgccgacccgcgcccgctggcttccgcgcctctgccggggagcggcccgcggatgcgcaccccgccagctctcgggagccagggcagcgaggtcacaggccccacctttgctgatggcgagctcatccccagggaacccggcttttttcccgaggacgaggaggaggctatgacgctggcgccacctgagggcccccaggagttgtacacagacagccccatggagagcactcagagcctggaggggtctgtcgggagtcctgccgagaaggacgggggacttgggggcctgtttctgccagaagacaagtccctggtccacactccatccatgacgacctcagacctttctacacactccaccacctcgctcatcagcaatgaggagcagtttgaagactatggggagggtgacgatgtggactgtgcccccagcagcccttgccccgatgatgagaccaggaccaacgtctactcggacctggggtcttcggtgtcttccagtgcggggcagacgcctaggaaaatgcggcacgtgtacaacagcgaattgctagatgtttactgctctcaatgctgcaagaaaatcaacctgctcaatgacttggaagcccgactgaaaaacctgaaggccaacagccccaaccgaaagatctccagcacggcctttggacggcagctcatgcacagcagcaacttcagcagcagcaatggcagcaccgaagacctgttccgggacagcattgactcttgcgacaatgacatcacagagaaggtgagctcctggaagacggtgacgagactgaatgcatg

SEQ ID NO: 329480 - DNA, 8205 bp, Homo sapiens
gcggccgcgaccccgacggcttcctgcgcgtggagcgcgtcgcggcgctcggactgcgcttcggccagggcgaggaggtggaaaaacttgtgaaatatttggatcccaacgacctggggagaatcaacttcaaggacttttgccggggggtgttcgccatgaaagggtgcgaggagctgctgaaggatgtgctgtcggtggagagcgcggggacgctgccgtgcgcgccagagatcccagactgcgtggagcagggcagcgaggtcacaggccccacctttgctgatggcgagctcatccccagggaacccggcttttttcccgaggacgaggaggaggctatgacgctggcgccacctgagggcccccaggagttgtacacagacagccccatggagagcactcagagcctggaggggtctgtcgggagtcctgccgagaaggacgggggacttgggggcctgtttctgccagaagacaagtccctggtccacactccatccatgacgacctcagacctttctacacactccaccacctcgctcatcagcaatgaggagcagtttgaagactatggggagggtgacgatgtggactgtgcccccagcagcccttgccccgatgatgagaccaggaccaacgtctactcggacctggggtcttcggtgtcttccagtgcggggcagacgcctaggaaaatgcggcacgtgtacaacagcgaattgctagatgtttactgctctcaatgctgcaagaaaatcaacctgctcaatgacttggaagcccgactgaaaaacctgaaggccaacagccccaaccgaaagatctccagcacggcctttggacggcagctcatgcacagcagcaacttcagcagcagcaatggcagcaccgaagacctgttccgggacagcattgactcttgcgacaatgacatcacagagaaggtaagcttcctggaaaagaaggtgacagagctggagaatgacagcctgaccaatggggacctgaagagcaagctgaagcaagagaacacacagctggtgcacagggtgcatgagctggaggagatggtgaaggatcaggagaccacggccgagcaggctctggaggaggaggcgcggcgccaccgcgaggcctacggcaagctggagagggagaaggctaccgaggtggagctgctcaatgccagggtgcagcagttggaggaagaaaatacagagcttagaacaacagtgactcggctcaagtctcaaacagagaaactggatgaggagcggcagcgcatgtctgaccgtctggaggacaccagcctgcggctcaaagatgagatggacctgtacaagcgcatgatggacaagctgcgacagaaccgccttgagttccagaaggagcgggaggcgacgcaggagctcatcgaggacttgcggaaggagctggagcacctgcagatgtacaagctggactgcgagcggccaggcaggggccgcagtgcctcctctggcctaggcgagttcaatgccagggcccgcgaggtggagctcgagcacgaggtcaagcggctcaagcaggagaattataagctgcgggatcagaacgacgacttgaatgggcagattttgagcctcagcctctacgaagcaaaaaacctctttgctgcccagactaaagcccagtctctggctgcggagatagacaccgcctcgcgcgatgagctaatggaagccctgaaggagcaggaggagatcaacttccggctgaggcagtacatggacaagattatcctcgccatcctggaccacaatccctccatcctcgagatcaaacactaaggcacggggctggctgcagagcagccttaggaccctgggaccaagggcagaccctgcccaaggatgcaggcctaagccgggcctcacactcacactgtaaatgtctctctggccaccatgcgttacgtgtacccgtgtatatgtggggaggctgtgcacacgagcgaggggtgagtggccgtggctgtgggcagcatccacacggttagccgtgcatgcactttgtggcccctttgcaaggggcagagggtactggaagtgggaggaggcaaggtctgctatcaggagttactgtaaaaacaagaactggaagctcgtgtttccggtactgggtaaaatgattctacctctggggataaggattcacattcgctctagtacgatgggctctttcaccccactcctagtccccttgggagtgggagcaaaattgtgatctttcctaggagtttgaatgccccatatttgtgtcctcgccagctctttggccacctttcaagccccagtgttcaagctcagagaggatgaaggggcatctggagggtccatgagatggggccctcaccaaatgccttggccaccggccagcagccctctgtgatgtgtgtgcagagtgaacagaggactcaggtttcatagcagctagtgcggggcatcctcatcctgtacctatagagttcgtgcactcccccatccatgctacctacctccccgtttctgtttcagttttaagacaatgaagcagcattcactgcgtcattgtaacatgaagggataaaaatgaaggagaaggagggtttgggatgggtgtctaaggcaggagttgacatcgggcaaccaaagaaatgagttttggggaggaacacaactcccatcccagtcagtttccttcccatggctgcatcttaagatggatgcacggagaaaccgtctgcctggctccctgtcttcattctccacgcagcctggtgatggcaggcctgggtttggatttcagaatcctagctccgggctccactcgtgtggcagcaagactgcttcgttccagcgtttagaaacacacctgtatttgattctcagccaggggagcactcgctgcactggtgggaggcggttgggaaagttgcaggaaaaccttagtcttccatccttctgacccatggtggaaattcacaccatggatttttaatggatctttgttctaggcagctgggaatagacatggtacttaccttagagttttccaatttatctcaattttatatggcttgtgattcattttcttaatccaaatatatataaacgtgtgtggtcttattcttccccctgcagtttcttgctttcttcagcacatcttatagtatgagaaggaaggtttgggcatgttgggaagggcggtggagggggagttgcagaaagagagggcagtgagggtgaggagaggggatctggggacttgggtgtgacacctgcttgacagaggcagggctgtggccaggaccaaccttcaattccattccaatcagcctttgcatttgttggatctcgtggcttctttttaatcttttgttggggattagtttcatgctgcacataatggggttgcactggtctgacccaggactttggagccacccacactgggaagactaggctaggcagtcggtcttctaggagtttctcagccccttaggacgcgggtctccttgggctcccccaagggttctgcgaagaggcagtggaagaaggcatgaggagagggtctcttgagaatttgccaataggaaggagtggccacggctgaaaggaacaagacagatcctgacatagctttggcctgggtgttaggtcagaaggagtactggtgcgtgggggccttaccccagggttgagtattttatatgtaaaatgttatctgccctttggctgcattggaatttcagagaaggctgcagaggcctgggttacacagcctgagtcacaacgtgggaaggaatctctgccacgggaaaggtgggcggaagcagctggcagcctggggcgtgcttcaggctcctccctctaaggggcgccatgggaacaggctccggagggagccggcgtctgaaaggcccccgggacctgctgcagtgccagaggggcctctggagcaggcctggcttttaaatggggggctgaattccagctcacacacacctcaagtccaaccttactttcttcagccagaatacatttcttgtaaaacctggcttgttgcttggcttttaaagatggtgtatgtttgtaaaaatattcttctgggctcaaaagctagcttgagggggcagatgccccaggtgtcccagctccacagcccctggcagatcccagaccccttggtggcaggtcccagagcctaggtggtaggagcttgatctttgtttctgcccttacccctcagtagtggggctgcgaggtagtagacaggatgcccagttaagtttgaatttcagatagaaaataattttagaataaatatgttctatctaatacatgggacagatgttatttttagagataggatcttgctctgttgcccaggctggagtgtagtggtatgatcatagctcaccacaaccttgaactcccaggctcaagcgatcctcccgccttaactgcctgagtagctgggactacaggcatgcaccaccacgcccagctaatttttcttattttttgtagagacagggtctcactgtgttgcctcactcgagctgctgacctcaagtgatcctcccacctcagcctgccaaagcactgggattacaggcatgagccaccatgcctggccaggacatatttgaaatggggagattttaaaaattctgatgattagactgaatcctcagacgttctggtttgattgttgtgggtgtagcccaggcatgggattttttaaagagctgctcaggtaattccaatttaattgcgtgtcctacttgggttttttgtttgtttttattgtttttgctaaacctggcaaccctaccgagtagggattagcagtaacttatctgaaatttagaggtgttttgggggtggggcgagggtttctgtagtagactcagattttacatggccctgagctgcccttgcgttcagttggaagccacgcaaaatgaactgaaccaggagtgagcttcgtgtacattatctattagaaaatgaagtaccttctggttcagctagtccctgtgcgttgagaggctttaagaaacttctagtaaaaatgtttttttcttttagctttgaattggccagagtttatcctagattattttattttaaattggtagaattctttgcgaactgtcacagagaaattccttttcatgactttatttctgacctattaaaacatgaacaggccaggcatggtggctcacgcctgtaatcctagcacttgggaggcagtggcaggcggatcacttgagctcaggagtcctaaaccagcctgggcaacatagtgataccttgtctctaccaaaagttaaaaaaaaaaaaaaaaaagctcaagaacctgcacgagggcctaaaacagtgggctcagctttggctgtgcattggaatcacctggggagatttgtaagcttctgctgtctgggctgaacccccagaggttcggattgaattggtgtggggtgtggtccaggcatcgagatgtgtaaagacctccccaggtgatgatatgcagtccgaggttgagactgccctgtcctgcaaggtcgttggccagaggtagaggaaactggtcaaagtggctgttgggcttgtcaagcccgtggctgaatgacagtgagctctcttgctgggagggttccttttcctgttgttgaatggtcctggcctgcaggatgggaggccagatgccttcaggagctggtggatccagctgttctcaccagcctggaggttagcagaccagagtgggtgggcaggaccttggcctggtgcccctggaatcagtgggtggcatgtgttgggatatactggctacaggctcatctcaaagagcaggtagaacagagtcagcagggaactgacaggtggggctgtccccctgaaagcagccgcagaaacagctgccacctatttgcatagctgagcaggaggacatactgtctttgtgggttttgcttctggtctgtttcctgactgggttgataaagggagtcccagctcgttccctgttagccaaaccagcatcctgctcacacaccggacactccaggtgctagtccactggtgctggtgttcaggggagttgggggggggggcgcggggacagaagcgcgggttcttggttccaatgagggacttagcagaagcctccaggggccagcagggccaggtgaaacttgggagaaatgaagccctctgtgtcctgtgtgtgtggtggggtttaatgcattagcaaatttaaacttaaaaactaactctaggccgggcacggtggctcacacctgtaatcccagcactttgggaggccaaggcaggtggattgcctgagctcaggagttcgagaccagcctggacaacatggtgaaactcttgtctttatttttttaaaaaaacaaaaagtaactttcgatgtgatcataccaggaaagttttgcgtggtcaccatgccaagaaaatgactttggttgcccagcagatccacagcgactctttctcaagggctactgtggattctagattgaggaaaggggccacttaggactcagtgctggtatcctccacagtcctttctcccagactctggccctccctttgggacccaggaaatcccctctagggtgacgctgctggctaggaagactgaggtctgctgcgccaaggggcctcaagttagaagggccatgccgtcagtggatgactttgagcgctgatcctagggacctgccaggtcctcacttcctgccctgggtgcacacatgaatggggcagccagcaggaagcgggagaggctggaaccaggagcctgccctacctgcatggcaggacaactctgaggcccttctgccatattctctgctacccaccagagaaaataggctgccttctagaaagatttgtttctaaaagcgtagaccctggggaagtataatgtcaccatgctcaccaggcgaggtttcccatatgacctccctgccccgacctcgtcaggttgctcctttccccatctgtaaggtagagatgtctgccccggagctaccagctggggatggcatccaggccatgtctcctgcaggatccaagtgctgttgtccccagggtgaccctgcctcctgctggggcccatccgctttgctgtgctgcacaggctgttttcatctgcatggtttggggtctttgtccttgtgccttttcttccccatcgccactgtacaggattttccacattgcccactgcctccttttctacatcgtctcatctccctggaatcagtgggtggcatgtgttgggatatactggctacaggctcatctcaaagagcaggtagaacagagtcagcagggaactgacaggtggggctgtccccctgaaagcagccacagaaacagctgccacctatttgcatagctgagcaggaggacatactgtctttgtgggtttgcttctggtctgtttcctgactgggttgataaagggagtcccagctcgttccctgttagccaaaccagcatcctgctcacacaccggacactccaggtgctagtccactggtgctggtgttcaggggagttggggggggggtgcggggacagaagcgcgggttcttggttccaatgagggacttagcagaagcctccaggggccagcagggccaggtgaaactgggagaaatgaagccctctgtgtcctgtgtgtgtggtggggtttaatgcattagcaaatttaaacttaaaaactaactctaggccgggcacggtggctcacacctgtaatcccagcactttgggaggccaaggcaggtggattgcctgagctcaggagttcgagaccagcctggacaacatggtgaaagtcttgtcttatgttttaaaaaagcaaaaactaactttcgatgtgatcataccaggaaagtttgtgcggtggtcaccatgccaaagaaaatgacttgggtgtgccagcagatccacagcgactcttgctccagagggctacggggattcccagattggcggaagggcgcgccttaggactcaagggcgggattcccccaagctttttcccaaaatctggcccccttgggaccagaaatcctctagggggagcggcgcttgaaacggtgttgtgcccaggcccataaaggcgcgcacagaaacg

SEQ ID NO: 329481 - DNA, 7600 bp, Homo sapiens
gcggccgcgaccccgacggcttcctgcgcgtggagcgcgtcgcggcgctcggactgcgcttcggccagggcgaggaggtggaaaaacttgtgaaatatttggatcccaacgacctggggagaatcaacttcaaggacttttgccggggggtgttcgccatgaaagggtgcgaggagctgctgaaggatgtgctgtcggtggagagcgcggggacgctgccgtgcgcgccagagatcccagactgcgtggagcagggcagcgaggtcacaggccccacctttgctgatggcgagctcatccccagggaacccggcttttttcccgaggacgaggaggaggctatgacgctggcgccacctgagggcccccaggagttgtacacagacagccccatggagagcactcagagcctggaggggtctgtcgggagtcctgccgagaaggacgggggacttgggggcctgtttctgccagaagacaagtccctggtccacactccatccatgacgacctcagacctttctacacactccaccacctcgctcatcagcaatgaggagcagtttgaagactatggggagggtgacgatgtggactgtgcccccagcagcccttgccccgatgatgagaccaggaccaacgtctactcggacctggggtcttcggtgtcttccagtgcggggcagacgcctaggaaaatgcggcacgtgtacaacagcgaattgctagatgtttactgctctcaatgctgcaagaaaatcaacctgctcaatgacttggaagcccgactgaaaaacctgaaggccaacagccccaaccgaaagatctccagcacggcctttggacggcagctcatgcacagcagcaacttcagcagcagcaatggcagcaccgaagacctgttccgggacagcattgactcttgcgacaatgacatcacagagaaggtaagcttcctggaaaagaaggtgacagagctggagaatgacagcctgaccaatggggacctgaagagcaagctgaagcaagagaacacacagctggtgcacagggtgcatgagctggaggagatggtgaaggatcaggagaccacggccgagcaggctctggaggaggaggcgcggcgccaccgcgaggcctacggcaagctggagagggagaaggctaccgaggtggagctgctcaatgccagggtgcagcagttggaggaagaaaatacagagcttagaacaacagtgactcggctcaagtctcaaacagagaaactggatgaggagcggcagcgcatgtctgaccgtctggaggacaccagcctgcggctcaaagatgagatggacctgtacaagcgcatgatggacaagctgcgacagaaccgccttgagttccagaaggagcgggaggcgacgcaggagctcatcgaggacttgcggaaggagctggagcacctgcagatgtacaagctggactgcgagcggccaggcaggggccgcagtgcctcctctggcctaggcgagttcaatgccagggcccgcgaggtggagctcgagcacgaggtcaagcggctcaagcaggagaattataagctgcgggatcagaacgacgacttgaatgggcagattttgagcctcagcctctacgaagcaaaaaacctctttgctgcccagactaaagcccagtctctggctgcggagatagacaccgcctcgcgcgatgagctaatggaagccctgaaggagcaggaggagatcaacttccggctgaggcagtacatggacaagattatcctcgccatcctggaccacaatccctccatcctcgagatcaaacactaaggcacggggctggctgcagagcagccttaggaccctgggaccaagggcagaccctgcccaaggatgcaggcctaagccgggcctcacactcacactgtaaatgtctctctggccaccatgcgttacgtgtacccgtgtatatgtggggaggctgtgcacacgagcgaggggtgagtggccgtggctgtgggcagcatccacacggttagccgtgcatgcactttgtggcccctttgcaaggggcagagggtactggaagtgggaggaggcaaggtctgctatcaggagttactgtaaaaacaagaactggaagctcgtgtttccggtactgggtaaaatgattctacctctggggataaggattcacattcgctctagtacgatgggctctttcaccccactcctagtccccttgggagtgggagcaaaattgtgatctttcctaggagtttgaatgccccatatttgtgtcctcgccagctctttggccacctttcaagccccagtgttcaagctcagagaggatgaaggggcatctggagggtccatgagatggggccctcaccaaatgccttggccaccggccagcagccctctgtgatgtgtgtgcagagtgaacagaggactcaggtttcatagcagctagtgcggggcatcctcatcctgtacctatagagttcgtgcactcccccatccatgctacctacctccccgtttctgtttcagttttaagacaatgaagcagcattcactgcgtcattgtaacatgaagggataaaaatgaaggagaaggagggtttgggatgggtgtctaaggcaggagttgacatcgggcaaccaaagaaatgagttttggggaggaacacaactcccatcccagtcagtttccttcccatggctgcatcttaagatggatgcacggagaaaccgtctgcctggctccctgtcttcattctccacgcagcctggtgatggcaggcctgggtttggatttcagaatcctagctccgggctccactcgtgtggcagcaagactgcttcgttccagcgtttagaaacacacctgtatttgattctcagccaggggagcactcgctgcactggtgggaggcggttgggaaagttgcaggaaaaccttagtcttccatccttctgacccatggtggaaattcacaccatggatttttaatggatctttgttctaggcagctgggaatagacatggtacttaccttagagttttccaatttatctcaattttatatggcttgtgattcattttcttaatccaaatatatataaacgtgtgtggtcttattcttccccctgcagtttcttgctttcttcagcacatcttatagtatgagaaggaaggtttgggcatgttgggaagggcggtggagggggagttgcagaaagagagggcagtgagggtgaggagaggggatctggggacttgggtgtgacacctgcttgacagaggcagggctgtggccaggaccaaccttcaattccattccaatcagcctttgcatttgttggatctcgtggcttctttttaatcttttgttggggattagtttcatgctgcacataatggggttgcactggtctgacccaggactttggagccacccacactgggaagactaggctaggcagtcggtcttctaggagtttctcagccccttaggacgcgggtctccttgggctcccccaagggttctgcgaagaggcagtggaagaaggcatgaggagagggtctcttgagaatttgccaataggaaggagtggccacggctgaaaggaacaagacagatcctgacatagctttggcctgggtgttaggtcagaaggagtactggtgcgtgggggccttaccccagggttgagtattttatatgtaaaatgttatctgccctttggctgcattggaatttcagagaaggctgcagaggcctgggttacacagcctgagtcacaacgtgggaaggaatctctgccacgggaaaggtgggcggaagcagctggcagcctggggcgtgcttcaggctcctccctctaaggggcgccatgggaacaggctccggagggagccggcgtctgaaaggcccccgggacctgctgcagtgccagaggggcctctggagcaggcctggcttttaaatggggggctgaattccagctcacacacacctcaagtccaaccttactttcttcagccagaatacatttcttgtaaaacctggcttgttgcttggcttttaaagatggtgtatgtttgtaaaaatattcttctgggctcaaaagctagcttgagggggcagatgccccaggtgtcccagctccacagcccctggcagatcccagaccccttggtggcaggtcccagagcctaggtggtaggagcttgatctttgtttctgcccttacccctcagtagtggggctgcgaggtagtagacaggatgcccagttaagtttgaatttcagatagaaaataattttagaataaatatgttctatctaatacatgggacagatgttatttttagagataggatcttgctctgttgcccaggctggagtgtagtggtatgatcatagctcaccacaaccttgaactcccaggctcaagcgatcctcccgccttaactgcctgagtagctgggactacaggcatgcaccaccacgcccagctaatttttcttattttttgtagagacagggtctcactgtgttgcctcactcgactcaggagtcctaaaccagcctgggcaacatagtgataccttgtctctaccaaaagttaaaaaaaaaaaaaaaaaagctcaagaacctgcacgagggcctaaaacagtgggctcagctttggctgtgcattggaatcacctggggagatttgtaagcttctgctgtctgggctgaacccccagaggttcggattgaattggtgtggggtgtggtccaggcatcgagatgtgtaaagacctccccaggtgatgatatgcagtccgaggttgagactgccctgtcctgcaaggtcgttggccagaggtagaggaaactggtcaaagtggctgttgggcttgtcaagcccgtggctgaatgacagtgagctctcttgctgggagggttccttttcctgttgttgaatggtcctggcctgcaggatgggaggccagatgccttcaggagctggtggatccagctgttctcaccagcctggaggttagcagaccagagtgggtgggcaggaccttggcctggtgcccctggaatcagtgggtggcatgtgttgggatatactggctacaggctcatctcaaagagcaggtagaacagagtcagcagggaactgacaggtggggctgtccccctgaaagcagccgcagaaacagctgccacctatttgcatagctgagcaggaggacatactgtctttgtgggttttgcttctggtctgtttcctgactgggttgataaagggagtcccagctcgttccctgttagccaaaccagcatcctgctcacacaccggacactccaggtgctagtccactggtgctggtgttcaggggagttgggggggggggcgcggggacagaagcgcgggttcttggttccaatgagggacttagcagaagcctccaggggccagcagggccaggtgaaacttgggagaaatgaagccctctgtgtcctgtgtgtgtggtggggtttaatgcattagcaaatttaaacttaaaaactaactctaggccgggcacggtggctcacacctgtaatcccagcactttgggaggccaaggcaggtggattgcctgagctcaggagttcgagaccagcctggacaacatggtgaaactcttgtctttatttttttaaaaaaacaaaaagtaactttcgatgtgatcataccaggaaagttttgcgtggtcaccatgccaagaaaatgactttggttgcccagcagatccacagcgactctttctcaagggctactgtggattctagattgaggaaaggggccacttaggactcagtgctggtatcctccacagtcctttctcccagactctggccctccctttgggacccaggaaatcccctctagggtgacgctgctggctaggaagactgaggtctgctgcgccaaggggcctcaagttagaagggccatgccgtcagtggatgactttgagcgctgatcctagggacctgccaggtcctcacttcctgccctgggtgcacacatgaatggggcagccagcaggaagcgggagaggctggaaccaggagcctgccctacctgcatggcaggacaactctgaggcccttctgccatattctctgctacccaccagagaaaataggctgccttctagaaagatttgtttctaaaagcgtagaccctggggaagtataatgtcaccatgctcaccaggcgaggtttcccatatgacctccctgccccgacctcgtcaggttgctcctttccccatctgtaaggtagagatgtctgccccggagctaccagctggggatggcatccaggccatgtctcctgcaggatccaagtgctgttgtccccagggtgaccctgcctcctgctggggcccatccgctttgctgtgctgcacaggctgttttcatctgcatggtttggggtctttgtccttgtgccttttcttccccatcgccactgtacaggattttccacattgcccactgcctccttttctacatcgtctcatctccctggcctttcccgagccctgtaaatgtgtactttttcaacgtgcctcccccaggtgaggccagctctcccgggcacattcgtccacaaggatcaggccccacttacccttggctcgctcagcctgtagacttggtaactttgtacagaatctttcattattgtcttaagcatggggggctaggacccacttagtccctcctccagcctgcagctaatttaggagccttgcattccagaaaagggcaactttgtgtaaagcagcttctcccacagagctttccctgcattgttagtgatgtcgggcaaagcatcactctttaacctggggcattggccccagcagggatatcatgggaccgcagccgctccgtgcactgtctctgcccccagaggaagccctgtccatggttcctggtgcacggccacaggcctgccttgaggccaccacatctggtgtctagaacagctgcgggccccacttgggcagaaggaagaggtgctagctgctgcccctgcctgctgtgaacacctgcccagcccttccttgtctgctgaggtgctcagaccagagtgccattaaataccaactgatgtcacggagcggacggtgcattgccaaggactcacagctgtgggctcccttccagctcctcccactttcttggctgggtcttctgaggcctacgtggaatgaactacacatgtggcctcatgcccaagggtttgttagatggcctctgactctgtgggattcaacttgacttttttgccccaggaggctctgtctggaaacaggcttagctttagtgctggggtgggacctgccctgtgggccccagggaggggacagtgggggtgaggccctgaggctgtccagggtctgagctctttgcctccaacctgcttctgccccaaaaggaacaggctgttggtggcaggctcctcccggggagctgtactgtacagaccaaggtgtaaataaacagtttgctcttctaaaaaaaaaa

SEQ ID NO: 329482 - DNA, 8344 bp, Homo sapiens
cccccgagtcccggggcccaggcgcctcgtgatgtcaccgcagcttgatacaaagagcccttcggcccacgcgggtctcccggcaacgggcgggggcggggccgcgccttccactggtgcccagaagtgcgagcggcagcggcgcggccgcgattgttcctgcgcttcggggctgcccgccgcgtccccgcgcgccgccgacccgcgcccgctggcttccgcgcctctgccggggagcggcccgcggatgcgcaccccgccagctctcgggagccagggcagcgaggtcacaggccccacctttgctgatggcgagctcatccccagggaacccggcttttttcccgaggacgaggaggaggctatgacgctggcgccacctgagggcccccaggagttgtacacagacagccccatggagagcactcagagcctggaggggtctgtcgggagtcctgccgagaaggacgggggacttgggggcctgtttctgccagaagacaagtccctggtccacactccatccatgacgacctcagacctttctacacactccaccacctcgctcatcagcaatgaggagcagtttgaagactatggggagggtgacgatgtggactgtgcccccagcagcccttgccccgatgatgagaccaggaccaacgtctactcggacctggggtcttcggtgtcttccagtgcggggcagacgcctaggaaaatgcggcacgtgtacaacagcgaattgctagatgtttactgctctcaatgctgcaagaaaatcaacctgctcaatgacttggaagcccgactgaaaaacctgaaggccaacagccccaaccgaaagatctccagcacggcctttggacggcagctcatgcacagcagcaacttcagcagcagcaatggcagcaccgaagacctgttccgggacagcattgactcttgcgacaatgacatcacagagaaggtaagcttcctggaaaagaaggtgacagagctggagaatgacagcctgaccaatggggacctgaagagcaagctgaagcaagagaacacacagctggtgcacagggtgcatgagctggaggagatggtgaaggatcaggagaccacggccgagcaggctctggaggaggaggcgcggcgccaccgcgaggcctacggcaagctggagagggagaaggctaccgaggtggagctgctcaatgccagggtgcagcagttggaggaagaaaatacagagcttagaacaacagtgactcggctcaagtctcaaacagagaaactggatgaggagcggcagcgcatgtctgaccgtctggaggacaccagcctgcggctcaaagatgagatggacctgtacaagcgcatgatggacaagctgcgacagaaccgccttgagttccagaaggagcgggaggcgacgcaggagctcatcgaggacttgcggaaggagctggagcacctgcagatgtacaagctggactgcgagcggccaggcaggggccgcagtgcctcctctggcctaggcgagttcaatgccagggcccgcgaggtggagctcgagcacgaggtcaagcggctcaagcaggagaattataagctgcgggatcagaacgacgacttgaatgggcagattttgagcctcagcctctacgaagcaaaaaacctctttgctgcccagactaaagcccagtctctggctgcggagatagacaccgcctcgcgcgatgagctaatggaagccctgaaggagcaggaggagatcaacttccggctgaggcagtacatggacaagattatcctcgccatcctggaccacaatccctccatcctcgagatcaaacactaaggcacggggctggctgcagagcagccttaggaccctgggaccaagggcagaccctgcccaaggatgcaggcctaagccgggcctcacactcacactgtaaatgtctctctggccaccatgcgttacgtgtacccgtgtatatgtggggaggctgtgcacacgagcgaggggtgagtggccgtggctgtgggcagcatccacacggttagccgtgcatgcactttgtggcccctttgcaaggggcagagggtactggaagtgggaggaggcaaggtctgctatcaggagttactgtaaaaacaagaactggaagctcgtgtttccggtactgggtaaaatgattctacctctggggataaggattcacattcgctctagtacgatgggctctttcaccccactcctagtccccttgggagtgggagcaaaattgtgatctttcctaggagtttgaatgccccatatttgtgtcctcgccagctctttggccacctttcaagccccagtgttcaagctcagagaggatgaaggggcatctggagggtccatgagatggggccctcaccaaatgccttggccaccggccagcagccctctgtgatgtgtgtgcagagtgaacagaggactcaggtttcatagcagctagtgcggggcatcctcatcctgtacctatagagttcgtgcactcccccatccatgctacctacctccccgtttctgtttcagttttaagacaatgaagcagcattcactgcgtcattgtaacatgaagggataaaaatgaaggagaaggagggtttgggatgggtgtctaaggcaggagttgacatcgggcaaccaaagaaatgagttttggggaggaacacaactcccatcccagtcagtttccttcccatggctgcatcttaagatggatgcacggagaaaccgtctgcctggctccctgtcttcattctccacgcagcctggtgatggcaggcctgggtttggatttcagaatcctagctccgggctccactcgtgtggcagcaagactgcttcgttccagcgtttagaaacacacctgtatttgattctcagccaggggagcactcgctgcactggtgggaggcggttgggaaagttgcaggaaaaccttagtcttccatccttctgacccatggtggaaattcacaccatggatttttaatggatctttgttctaggcagctgggaatagacatggtacttaccttagagttttccaatttatctcaattttatatggcttgtgattcattttcttaatccaaatatatataaacgtgtgtggtcttattcttccccctgcagtttcttgctttcttcagcacatcttatagtatgagaaggaaggtttgggcatgttgggaagggcggtggagggggagttgcagaaagagagggcagtgagggtgaggagaggggatctggggacttgggtgtgacacctgcttgacagaggcagggctgtggccaggaccaaccttcaattccattccaatcagcctttgcatttgttggatctcgtggcttctttttaatcttttgttggggattagtttcatgctgcacataatggggttgcactggtctgacccaggactttggagccacccacactgggaagactaggctaggcagtcggtcttctaggagtttctcagccccttaggacgcgggtctccttgggctcccccaagggttctgcgaagaggcagtggaagaaggcatgaggagagggtctcttgagaatttgccaataggaaggagtggccacggctgaaaggaacaagacagatcctgacatagctttggcctgggtgttaggtcagaaggagtactggtgcgtgggggccttaccccagggttgagtattttatatgtaaaatgttatctgccctttggctgcattggaatttcagagaaggctgcagaggcctgggttacacagcctgagtcacaacgtgggaaggaatctctgccacgggaaaggtgggcggaagcagctggcagcctggggcgtgcttcaggctcctccctctaaggggcgccatgggaacaggctccggagggagccggcgtctgaaaggcccccgggacctgctgcagtgccagaggggcctctggagcaggcctggcttttaaatggggggctgaattccagctcacacacacctcaagtccaaccttactttcttcagccagaatacatttcttgtaaaacctggcttgttgcttggcttttaaagatggtgtatgtttgtaaaaatattcttctgggctcaaaagctagcttgagggggcagatgccccaggtgtcccagctccacagcccctggcagatcccagaccccttggtggcaggtcccagagcctaggtggtaggagcttgatctttgtttctgcccttacccctcagtagtggggctgcgaggtagtagacaggatgcccagttaagtttgaatttcagatagaaaataattttagaataaatatgttctatctaatacatgggacagatgttatttttagagataggatcttgctctgttgcccaggctggagtgtagtggtatgatcatagctcaccacaaccttgaactcccaggctcaagcgatcctcccgccttaactgcctgagtagctgggactacaggcatgcaccaccacgcccagctaatttttcttattttttgtagagacagggtctcactgtgttgcctcactcgagctgctgacctcaagtgatcctcccacctcagcctgccaaagcactgggattacaggcatgagccaccatgcctggccaggacatatttgaaatggggagattttaaaaattctgatgattagactgaatcctcagacgttctggtttgattgttgtgggtgtagcccaggcatgggattttttaaagagctgctcaggtaattccaatttaattgcgtgtcctacttgggttttttgtttgtttttattgtttttgctaaacctggcaaccctaccgagtagggattagcagtaacttatctgaaatttagaggtgttttgggggtggggcgagggtttctgtagtagactcagattttacatggccctgagctgcccttgcgttcagttggaagccacgcaaaatgaactgaaccaggagtgagcttcgtgtacattatctattagaaaatgaagtaccttctggttcagctagtccctgtgcgttgagaggctttaagaaacttctagtaaaaatgtttttttcttttagctttgaattggccagagtttatcctagattattttattttaaattggtagaattctttgcgaactgtcacagagaaattccttttcatgactttatttctgacctattaaaacatgaacaggccaggcatggtggctcacgcctgtaatcctagcacttgggaggcagtggcaggcggatcacttgagctcaggagtcctaaaccagcctgggcaacatagtgataccttgtctctaccaaaagttaaaaaaaaaaaaaaaaaagctcaagaacctgcacgagggcctaaaacagtgggctcagctttggctgtgcattggaatcacctggggagatttgtaagcttctgctgtctgggctgaacccccagaggttcggattgaattggtgtggggtgtggtccaggcatcgagatgtgtaaagacctccccaggtgatgatatgcagtccgaggttgagactgccctgtcctgcaaggtcgttggccagaggtagaggaaactggtcaaagtggctgttgggcttgtcaagcccgtggctgaatgacagtgagctctcttgctgggagggttccttttcctgttgttgaatggtcctggcctgcaggatgggaggccagatgccttcaggagctggtggatccagctgttctcaccagcctggaggttagcagaccagagtgggtgggcaggaccttggcctggtgcccctggaatcagtgggtggcatgtgttgggatatactggctacaggctcatctcaaagagcaggtagaacagagtcagcagggaactgacaggtggggctgtccccctgaaagcagccgcagaaacagctgccacctatttgcatagctgagcaggaggacatactgtctttgtgggttttgcttctggtctgtttcctgactgggttgataaagggagtcccagctcgttccctgttagccaaaccagcatcctgctcacacaccggacactccaggtgctagtccactggtgctggtgttcaggggagttgggggggggggcgcggggacagaagcgcgggttcttggttccaatgagggacttagcagaagcctccaggggccagcagggccaggtgaaacttgggagaaatgaagccctctgtgtcctgtgtgtgtggtggggtttaatgcattagcaaatttaaacttaaaaactaactctaggccgggcacggtggctcacacctgtaatcccagcactttgggaggccaaggcaggtggattgcctgagctcaggagttcgagaccagcctggacaacatggtgaaactcttgtctttatttttttaaaaaaacaaaaagtaactttcgatgtgatcataccaggaaagttttgcgtggtcaccatgccaagaaaatgactttggttgcccagcagatccacagcgactctttctcaagggctactgtggattctagattgaggaaaggggccacttaggactcagtgctggtatcctccacagtcctttctcccagactctggccctccctttgggacccaggaaatcccctctagggtgacgctgctggctaggaagactgaggtctgctgcgccaaggggcctcaagttagaagggccatgccgtcagtggatgactttgagcgctgatcctagggacctgccaggtcctcacttcctgccctgggtgcacacatgaatggggcagccagcaggaagcgggagaggctggaaccaggagcctgccctacctgcatggcaggacaactctgaggcccttctgccatattctctgctacccaccagagaaaataggctgccttctagaaagatttgtttctaaaagcgtagaccctggggaagtataatgtcaccatgctcaccaggcgaggtttcccatatgacctccctgccccgacctcgtcaggttgctcctttccccatctgtaaggtagagatgtctgccccggagctaccagctggggatggcatccaggccatgtctcctgcaggatccaagtgctgttgtccccagggtgaccctgcctcctgctggggcccatccgctttgctgtgctgcacaggctgttttcatctgcatggtttggggtctttgtccttgtgccttttcttccccatcgccactgtacaggattttccacattgcccactgcctccttttctacatcgtctcatctccctggcctttcccgagccctgtaaatgtgtactttttcaacgtgcctcccccaggtgaggccagctctcccgggcacattcgtccacaaggatcaggccccacttacccttggctcgctcagcctgtagacttggtaactttgtacagaatctttcattattgtcttaagcatggggggctaggacccacttagtccctcctccagcctgcagctaatttaggagccttgcattccagaaaagggcaactttgtgtaaagcagcttctcccacagagctttccctgcattgttagtgatgtcgggcaaagcatcactctttaacctggggcattggccccagcagggatatcatgggaccgcagccgctccgtgcactgtctctgcccccagaggaagccctgtccatggttcctggtgcacggccacaggcctgccttgaggccaccacatctggtgtctagaacagctgcgggccccacttgggcagaaggaagaggtgctagctgctgcccctgcctgctgtgaacacctgcccagcccttccttgtctgctgaggtgctcagaccagagtgccattaaataccaactgatgtcacggagcggacggtgcattgccaaggactcacagctgtgggctcccttccagctcctcccactttcttggctgggtcttctgaggcctacgtggaatgaactacacatgtggcctcatgcccaagggtttgttagatggcctctgactctgtgggattcaacttgacttttttgccccaggaggctctgtctggaaacaggcttagctttagtgctggggtgggacctgccctgtgggccccagggaggggacagtgggggtgaggccctgaggctgtccagggtctgagctctttgcctccaacctgcttctgccccaaaaggaacaggctgttggtggcaggctcctcccggggagctgtactgtacagaccaaggtgtaaataaacagtttgctcttctaaaaaaaaaa

SEQ ID NO: 329483 - DNA, 6772 bp, Homo sapiens
aaagcctacccttcctgccacaccagagtatgcttatgaaagatcaggcctccaaaatgccccggctgcattgtaacatgaattacaagacactctgtcactgagcctcaccctctgcctgggacacggggtgaagagctgacctctgtcctcaaggagctcccagctaatggaagccctgaaggagcaggaggagatcaacttccggctgaggcagtacatggacaagattatcctcgccatcctggaccacaatccctccatcctcgagatcaaacactaaggcacggggctggctgcagagcagccttaggaccctgggaccaagggcagaccctgcccaaggatgcaggcctaagccgggcctcacactcacactgtaaatgtctctctggccaccatgcgttacgtgtacccgtgtatatgtggggaggctgtgcacacgagcgaggggtgagtggccgtggctgtgggcagcatccacacggttagccgtgcatgcactttgtggcccctttgcaaggggcagagggtactggaagtgggaggaggcaaggtctgctatcaggagttactgtaaaaacaagaactggaagctcgtgtttccggtactgggtaaaatgattctacctctggggataaggattcacattcgctctagtacgatgggctctttcaccccactcctagtccccttgggagtgggagcaaaattgtgatctttcctaggagtttgaatgccccatatttgtgtcctcgccagctctttggccacctttcaagccccagtgttcaagctcagagaggatgaaggggcatctggagggtccatgagatggggccctcaccaaatgccttggccaccggccagcagccctctgtgatgtgtgtgcagagtgaacagaggactcaggtttcatagcagctagtgcggggcatcctcatcctgtacctatagagttcgtgcactcccccatccatgctacctacctccccgtttctgtttcagttttaagacaatgaagcagcattcactgcgtcattgtaacatgaagggataaaaatgaaggagaaggagggtttgggatgggtgtctaaggcaggagttgacatcgggcaaccaaagaaatgagttttggggaggaacacaactcccatcccagtcagtttccttcccatggctgcatcttaagatggatgcacggagaaaccgtctgcctggctccctgtcttcattctccacgcagcctggtgatggcaggcctgggtttggatttcagaatcctagctccgggctccactcgtgtggcagcaagactgcttcgttccagcgtttagaaacacacctgtatttgattctcagccaggggagcactcgctgcactggtgggaggcggttgggaaagttgcaggaaaaccttagtcttccatccttctgacccatggtggaaattcacaccatggatttttaatggatctttgttctaggcagctgggaatagacatggtacttaccttagagttttccaatttatctcaattttatatggcttgtgattcattttcttaatccaaatatatataaacgtgtgtggtcttattcttccccctgcagtttcttgctttcttcagcacatcttatagtatgagaaggaaggtttgggcatgttgggaagggcggtggagggggagttgcagaaagagagggcagtgagggtgaggagaggggatctggggacttgggtgtgacacctgcttgacagaggcagggctgtggccaggaccaaccttcaattccattccaatcagcctttgcatttgttggatctcgtggcttctttttaatcttttgttggggattagtttcatgctgcacataatggggttgcactggtctgacccaggactttggagccacccacactgggaagactaggctaggcagtcggtcttctaggagtttctcagccccttaggacgcgggtctccttgggctcccccaagggttctgcgaagaggcagtggaagaaggcatgaggagagggtctcttgagaatttgccaataggaaggagtggccacggctgaaaggaacaagacagatcctgacatagctttggcctgggtgttaggtcagaaggagtactggtgcgtgggggccttaccccagggttgagtattttatatgtaaaatgttatctgccctttggctgcattggaatttcagagaaggctgcagaggcctgggttacacagcctgagtcacaacgtgggaaggaatctctgccacgggaaaggtgggcggaagcagctggcagcctggggcgtgcttcaggctcctccctctaaggggcgccatgggaacaggctccggagggagccggcgtctgaaaggcccccgggacctgctgcagtgccagaggggcctctggagcaggcctggcttttaaatggggggctgaattccagctcacacacacctcaagtccaaccttactttcttcagccagaatacatttcttgtaaaacctggcttgttgcttggcttttaaagatggtgtatgtttgtaaaaatattcttctgggctcaaaagctagcttgagggggcagatgccccaggtgtcccagctccacagcccctggcagatcccagaccccttggtggcaggtcccagagcctaggtggtaggagcttgatctttgtttctgcccttacccctcagtagtggggctgcgaggtagtagacaggatgcccagttaagtttgaatttcagatagaaaataattttagaataaatatgttctatctaatacatgggacagatgttatttttagagataggatcttgctctgttgcccaggctggagtgtagtggtatgatcatagctcaccacaaccttgaactcccaggctcaagcgatcctcccgccttaactgcctgagtagctgggactacaggcatgcaccaccacgcccagctaatttttcttattttttgtagagacagggtctcactgtgttgcctcactcgagctgctgacctcaagtgatcctcccacctcagcctgccaaagcactgggattacaggcatgagccaccatgcctggccaggacatatttgaaatggggagattttaaaaattctgatgattagactgaatcctcagacgttctggtttgattgttgtgggtgtagcccaggcatgggattttttaaagagctgctcaggtaattccaatttaattgcgtgtcctacttgggttttttgtttgtttttattgtttttgctaaacctggcaaccctaccgagtagggattagcagtaacttatctgaaatttagaggtgttttgggggtggggcgagggtttctgtagtagactcagattttacatggccctgagctgcccttgcgttcagttggaagccacgcaaaatgaactgaaccaggagtgagcttcgtgtacattatctattagaaaatgaagtaccttctggttcagctagtccctgtgcgttgagaggctttaagaaacttctagtaaaaatgtttttttcttttagctttgaattggccagagtttatcctagattattttattttaaattggtagaattctttgcgaactgtcacagagaaattccttttcatgactttatttctgacctattaaaacatgaacaggccaggcatggtggctcacgcctgtaatcctagcacttgggaggcagtggcaggcggatcacttgagctcaggagtcctaaaccagcctgggcaacatagtgataccttgtctctaccaaaagttaaaaaaaaaaaaaaaaaagctcaagaacctgcacgagggcctaaaacagtgggctcagctttggctgtgcattggaatcacctggggagatttgtaagcttctgctgtctgggctgaacccccagaggttcggattgaattggtgtggggtgtggtccaggcatcgagatgtgtaaagacctccccaggtgatgatatgcagtccgaggttgagactgccctgtcctgcaaggtcgttggccagaggtagaggaaactggtcaaagtggctgttgggcttgtcaagcccgtggctgaatgacagtgagctctcttgctgggagggttccttttcctgttgttgaatggtcctggcctgcaggatgggaggccagatgccttcaggagctggtggatccagctgttctcaccagcctggaggttagcagaccagagtgggtgggcaggaccttggcctggtgcccctggaatcagtgggtggcatgtgttgggatatactggctacaggctcatctcaaagagcaggtagaacagagtcagcagggaactgacaggtggggctgtccccctgaaagcagccgcagaaacagctgccacctatttgcatagctgagcaggaggacatactgtctttgtgggttttgcttctggtctgtttcctgactgggttgataaagggagtcccagctcgttccctgttagccaaaccagcatcctgctcacacaccggacactccaggtgctagtccactggtgctggtgttcaggggagttgggggggggggcgcggggacagaagcgcgggttcttggttccaatgagggacttagcagaagcctccaggggccagcagggccaggtgaaacttgggagaaatgaagccctctgtgtcctgtgtgtgtggtggggtttaatgcattagcaaatttaaacttaaaaactaactctaggccgggcacggtggctcacacctgtaatcccagcactttgggaggccaaggcaggtggattgcctgagctcaggagttcgagaccagcctggacaacatggtgaaactcttgtctttatttttttaaaaaaacaaaaagtaactttcgatgtgatcataccaggaaagttttgcgtggtcaccatgccaagaaaatgactttggttgcccagcagatccacagcgactctttctcaagggctactgtggattctagattgaggaaaggggccacttaggactcagtgctggtatcctccacagtcctttctcccagactctggccctccctttgggacccaggaaatcccctctagggtgacgctgctggctaggaagactgaggtctgctgcgccaaggggcctcaagttagaagggccatgccgtcagtggatgactttgagcgctgatcctagggacctgccaggtcctcacttcctgccctgggtgcacacatgaatggggcagccagcaggaagcgggagaggctggaaccaggagcctgccctacctgcatggcaggacaactctgaggcccttctgccatattctctgctacccaccagagaaaataggctgccttctagaaagatttgtttctaaaagcgtagaccctggggaagtataatgtcaccatgctcaccaggcgaggtttcccatatgacctccctgccccgacctcgtcaggttgctcctttccccatctgtaaggtagagatgtctgccccggagctaccagctggggatggcatccaggccatgtctcctgcaggatccaagtgctgttgtccccagggtgaccctgcctcctgctggggcccatccgctttgctgtgctgcacaggctgttttcatctgcatggtttggggtctttgtccttgtgccttttcttccccatcgccactgtacaggattttccacattgcccactgcctccttttctacatcgtctcatctccctggcctttcccgagccctgtaaatgtgtactttttcaacgtgcctcccccaggtgaggccagctctcccgggcacattcgtccacaaggatcaggccccacttacccttggctcgctcagcctgtagacttggtaactttgtacagaatctttcattattgtcttaagcatggggggctaggacccacttagtccctcctccagcctgcagctaatttaggagccttgcattccagaaaagggcaactttgtgtaaagcagcttctcccacagagctttccctgcattgttagtgatgtcgggcaaagcatcactctttaacctggggcattggccccagcagggatatcatgggaccgcagccgctccgtgcactgtctctgcccccagaggaagccctgtccatggttcctggtgcacggccacaggcctgccttgaggccaccacatctggtgtctagaacagctgcgggccccacttgggcagaaggaagaggtgctagctgctgcccctgcctgctgtgaacacctgcccagcccttccttgtctgctgaggtgctcagaccagagtgccattaaataccaactgatgtcacggagcggacggtgcattgccaaggactcacagctgtgggctcccttccagctcctcccactttcttggctgggtcttctgaggcctacgtggaatgaactacacatgtggcctcatgcccaagggtttgttagatggcctctgactctgtgggattcaacttgacttttttgccccaggaggctctgtctggaaacaggcttagctttagtgctggggtgggacctgccctgtgggccccagggaggggacagtgggggtgaggccctgaggctgtccagggtctgagctctttgcctccaacctgcttctgccccaaaaggaacaggctgttggtggcaggctcctcccggggagctgtactgtacagaccaaggtgtaaataaacagtttgctcttctaaaaaaaaaa

SEQ ID NO: 329484 - DNA, 5088 bp, Homo sapiens
cagaaacacacacaaaacaaaaaacaccaataagggctagcgcaagtgacgagccctgcgtgtgaatcggacgaggcagaggcagggctgtggccaggaccaaccttcaattccattccaatcagcctttgcatttgttggatctcgtggcttctttttaatcttttgttggggattagtttcatgctgcacataatggggttgcactggtctgacccaggactttggagccacccacactgggaagactaggctaggcagtcggtcttctaggagtttctcagccccttaggacgcgggtctccttgggctcccccaagggttctgcgaagaggcagtggaagaaggcatgaggagagggtctcttgagaatttgccaataggaaggagtggccacggctgaaaggaacaagacagatcctgacatagctttggcctgggtgttaggtcagaaggagtactggtgcgtgggggccttaccccagggttgagtattttatatgtaaaatgttatctgccctttggctgcattggaatttcagagaaggctgcagaggcctgggttacacagcctgagtcacaacgtgggaaggaatctctgccacgggaaaggtgggcggaagcagctggcagcctggggcgtgcttcaggctcctccctctaaggggcgccatgggaacaggctccggagggagccggcgtctgaaaggcccccgggacctgctgcagtgccagaggggcctctggagcaggcctggcttttaaatggggggctgaattccagctcacacacacctcaagtccaaccttactttcttcagccagaatacatttcttgtaaaacctggcttgttgcttggcttttaaagatggtgtatgtttgtaaaaatattcttctgggctcaaaagctagcttgagggggcagatgccccaggtgtcccagctccacagcccctggcagatcccagaccccttggtggcaggtcccagagcctaggtggtaggagcttgatctttgtttctgcccttacccctcagtagtggggctgcgaggtagtagacaggatgcccagttaagtttgaatttcagatagaaaataattttagaataaatatgttctatctaatacatgggacagatgttatttttagagataggatcttgctctgttgcccaggctggagtgtagtggtatgatcatagctcaccacaaccttgaactcccaggctcaagcgatcctcccgccttaactgcctgagtagctgggactacaggcatgcaccaccacgcccagctaatttttcttattttttgtagagacagggtctcactgtgttgcctcactcgagctgctgacctcaagtgatcctcccacctcagcctgccaaagcactgggattacaggcatgagccaccatgcctggccaggacatatttgaaatggggagattttaaaaattctgatgattagactgaatcctcagacgttctggtttgattgttgtgggtgtagcccaggcatgggattttttaaagagctgctcaggtaattccaatttaattgcgtgtcctacttgggttttttgtttgtttttattgtttttgctaaacctggcaaccctaccgagtagggattagcagtaacttatctgaaatttagaggtgttttgggggtggggcgagggtttctgtagtagactcagattttacatggccctgagctgcccttgcgttcagttggaagccacgcaaaatgaactgaaccaggagtgagcttcgtgtacattatctattagaaaatgaagtaccttctggttcagctagtccctgtgcgttgagaggctttaagaaacttctagtaaaaatgtttttttcttttagctttgaattggccagagtttatcctagattattttattttaaattggtagaattctttgcgaactgtcacagagaaattccttttcatgactttatttctgacctattaaaacatgaacaggccaggcatggtggctcacgcctgtaatcctagcacttgggaggcagtggcaggcggatcacttgagctcaggagtcctaaaccagcctgggcaacatagtgataccttgtctctaccaaaagttaaaaaaaaaaaaaaaaaagctcaagaacctgcacgagggcctaaaacagtgggctcagctttggctgtgcattggaatcacctggggagatttgtaagcttctgctgtctgggctgaacccccagaggttcggattgaattggtgtggggtgtggtccaggcatcgagatgtgtaaagacctccccaggtgatgatatgcagtccgaggttgagactgccctgtcctgcaaggtcgttggccagaggtagaggaaactggtcaaagtggctgttgggcttgtcaagcccgtggctgaatgacagtgagctctcttgctgggagggttccttttcctgttgttgaatggtcctggcctgcaggatgggaggccagatgccttcaggagctggtggatccagctgttctcaccagcctggaggttagcagaccagagtgggtgggcaggaccttggcctggtgcccctggaatcagtgggtggcatgtgttgggatatactggctacaggctcatctcaaagagcaggtagaacagagtcagcagggaactgacaggtggggctgtccccctgaaagcagccgcagaaacagctgccacctatttgcatagctgagcaggaggacatactgtctttgtgggttttgcttctggtctgtttcctgactgggttgataaagggagtcccagctcgttccctgttagccaaaccagcatcctgctcacacaccggacactccaggtgctagtccactggtgctggtgttcaggggagttgggggggggggcgcggggacagaagcgcgggttcttggttccaatgagggacttagcagaagcctccaggggccagcagggccaggtgaaacttgggagaaatgaagccctctgtgtcctgtgtgtgtggtggggtttaatgcattagcaaatttaaacttaaaaactaactctaggccgggcacggtggctcacacctgtaatcccagcactttgggaggccaaggcaggtggattgcctgagctcaggagttcgagaccagcctggacaacatggtgaaactcttgtctttatttttttaaaaaaacaaaaagtaactttcgatgtgatcataccaggaaagttttgcgtggtcaccatgccaagaaaatgactttggttgcccagcagatccacagcgactctttctcaagggctactgtggattctagattgaggaaaggggccacttaggactcagtgctggtatcctccacagtcctttctcccagactctggccctccctttgggacccaggaaatcccctctagggtgacgctgctggctaggaagactgaggtctgctgcgccaaggggcctcaagttagaagggccatgccgtcagtggatgactttgagcgctgatcctagggacctgccaggtcctcacttcctgccctgggtgcacacatgaatggggcagccagcaggaagcgggagaggctggaaccaggagcctgccctacctgcatggcaggacaactctgaggcccttctgccatattctctgctacccaccagagaaaataggctgccttctagaaagatttgtttctaaaagcgtagaccctggggaagtataatgtcaccatgctcaccaggcgaggtttcccatatgacctccctgccccgacctcgtcaggttgctcctttccccatctgtaaggtagagatgtctgccccggagctaccagctggggatggcatccaggccatgtctcctgcaggatccaagtgctgttgtccccagggtgaccctgcctcctgctggggcccatccgctttgctgtgctgcacaggctgttttcatctgcatggtttggggtctttgtccttgtgccttttcttccccatcgccactgtacaggattttccacattgcccactgcctccttttctacatcgtctcatctccctggcctttcccgagccctgtaaatgtgtactttttcaacgtgcctcccccaggtgaggccagctctcccgggcacattcgtccacaaggatcaggccccacttacccttggctcgctcagcctgtagacttggtaactttgtacagaatctttcattattgtcttaagcatggggggctaggacccacttagtccctcctccagcctgcagctaatttaggagccttgcattccagaaaagggcaactttgtgtaaagcagcttctcccacagagctttccctgcattgttagtgatgtcgggcaaagcatcactctttaacctggggcattggccccagcagggatatcatgggaccgcagccgctccgtgcactgtctctgcccccagaggaagccctgtccatggttcctggtgcacggccacaggcctgccttgaggccaccacatctggtgtctagaacagctgcgggccccacttgggcagaaggaagaggtgctagctgctgcccctgcctgctgtgaacacctgcccagcccttccttgtctgctgaggtgctcagaccagagtgccattaaataccaactgatgtcacggagcggacggtgcattgccaaggactcacagctgtgggctcccttccagctcctcccactttcttggctgggtcttctgaggcctacgtggaatgaactacacatgtggcctcatgcccaagggtttgttagatggcctctgactctgtgggattcaacttgacttttttgccccaggaggctctgtctggaaacaggcttagctttagtgctggggtgggacctgccctgtgggccccagggaggggacagtgggggtgaggccctgaggctgtccagggtctgagctctttgcctccaacctgcttctgccccaaaaggaacaggctgttggtggcaggctcctcccggggagctgtactgtacagaccaaggtgtaaataaacagtttgctcttctaaaaaaaaaa

SEQ ID NO: 329485 - DNA, 3178 bp, Homo sapiens
cccccgagtcccggggcccaggcgcctcgtgatgtcaccgcagcttgatacaaagagcccttcggcccacgcgggtctcccggcaacgggcgggggcggggccgcgccttccactggtgcccagaagtgcgagcggcagcggcgcggccgcgattgttcctgcgcttcggggctgcccgccgcgtccccgcgcgccgccgacccgcgcccgctggcttccgcgcctctgccggggagcggcccgcggatgcgcaccccgccagctctcgggagccagggcagcgaggtcacaggccccacctttgctgatggcgagctcatccccagggaacccggcttttttcccgaggacgaggaggaggctatgacgctggcgccacctgagggcccccaggagttgtacacagacagccccatggagagcactcagagcctggaggggtctgtcgggagtcctgccgagaaggacgggggacttgggggcctgtttctgccagaagacaagtccctggtccacactccatccatgacgacctcagacctttctacacactccaccacctcgctcatcagcaatgaggagcagtttgaagactatggggagggtgacgatgtggactgtgcccccagcagcccttgccccgatgatgagaccaggaccaacgtctactcggacctggggtcttcggtgtcttccagtgcggggcagacgcctaggaaaatgcggcacgtgtacaacagcgaattgctagatgtttactgctctcaatgctgcaagaaaatcaacctgctcaatgacttggaagcccgactgaaaaacctgaaggccaacagccccaaccgaaagatctccagcacggcctttggacggcagctcatgcacagcagcaacttcagcagcagcaatggcagcaccgaagacctgttccgggacagcattgactcttgcgacaatgacatcacagagaaggtaagcttcctggaaaagaaggtgacagagctggagaatgacagcctgaccaatggggacctgaagagcaagctgaagcaagagaacacacagctggtgcacagggtgcatgagctggaggagatggtgaaggatcaggagaccacggccgagcaggctctggaggaggaggcgcggcgccaccgcgaggcctacggcaagctggagagggagaaggctaccgaggtggagctgctcaatgccagggtgcagcagttggaggaagaaaatacagagcttagaacaacagtgactcggctcaagtctcaaacagagaaactggatgaggagcggcagcgcatgtctgaccgtctggaggacaccagcctgcggctcaaagatgagatggacctgtacaagcgcatgatggacaagctgcgacagaaccgccttgagttccagaaggagcgggaggcgacgcaggagctcatcgaggacttgcggaaggagctggagcacctgcagatgtacaagctggactgcgagcggccaggcaggggccgcagtgcctcctctggcctaggcgagttcaatgccagggcccgcgaggtggagctcgagcacgaggtcaagcggctcaagcaggagaattataagctgcgggatcagaacgacgacttgaatgggcagattttgagcctcagcctctacgaagcaaaaaacctctttgctgcccagactaaagcccagtctctggctgcggagatagacaccgcctcgcgcgatgagctaatggaagccctgaaggagcaggaggagatcaacttccggctgaggcagtacatggacaagattatcctcgccatcctggaccacaatccctccatcctcgagatcaaacactaaggcacggggctggctgcagagcagccttaggaccctgggaccaagggcagaccctgcccaaggatgcaggcctaagccgggcctcacactcacactgtaaatgtctctctggccaccatgcgttacgtgtacccgtgtatatgtggggaggctgtgcacacgagcgaggggtgagtggccgtggctgtgggcagcatccacacggttagccgtgcatgcactttgtggcccctttgcaaggggcagagggtactggaagtgggaggaggcaaggtctgctatcaggagttactgtaaaaacaagaactggaagctcgtgtttccggtactgggtaaaatgattctacctctggggataaggattcacattcgctctagtacgatgggctctttcaccccactcctagtccccttgggagtgggagcaaaattgtgatctttcctaggagtttgaatgccccatatttgtgtcctcgccagctctttggccacctttcaagccccagtgttcaagctcagagaggatgaaggggcatctggagggtccatgagatggggccctcaccaaatgccttggccaccggccagcagccctctgtgatgtgtgtgcagagtgaacagaggactcaggtttcatagcagctagtgcggggcatcctcatcctgtacctatagagttcgtgcactcccccatccatgctacctacctccccgtttctgtttcagttttaagacaatgaagcagcattcactgcgtcattgtaacatgaagggataaaaatgaaggagaaggagggtttgggatgggtgtctaaggcaggagttgacatcgggcaaccaaagaaatgagttttggggaggaacacaactcccatcccagtcagtttccttcccatggctgcatcttaagatggatgcacggagaaaccgtctgcctggctccctgtcttcattctccacgcagcctggtgatggcaggcctgggtttggatttcagaatcctagctccgggctccactcgtgtggcagcaagactgcttcgttccagcgtttagaaacacacctgtatttgattctcagccaggggagcactcgctgcactggtgggaggcggttgggaaagttgcaggaaaaccttagtcttccatccttctgacccatggtggaaattcacaccatggatttttaatggatctttgttctaggcagctgggaatagacatggtacttaccttagagttttccaatttatctcaattttatatggcttgtgattcattttcttaatccaaatatatataaacgtgtgtggtcttattcttc

SEQ ID NO: 329486 - DNA, 872 bp, Homo sapiens
  misc_feature (13)..(13): n is a, c, g, or t
agcggcggaaagnacaactataggctaggtacgaggcctgggtgttggaccacttagtccctcctccagcctgcagctaatttaggagccttgcattccagaaaagggcaactttgtgtaaagcagcttctcccacagagctttccctgcattgttagtgatgtcgggcaaagcatcactctttaacctggggcattggccccagcagggatatcatgggaccgcagccgctccgtgcactgtctctgcccccagaggaagccctgtccatggttcctggtgcacggccacaggcctgccttgaggccaccacatctggtgtctagaacagctgcgggccccacttgggcagaaggaagaggtgctagctgctgcccctgcctgctgtgaacacctgcccagcccttccttgtctgctgaggtgctcagaccagagtgccattaaataccaactgatgtcacggagcggacggtgcattgccaaggactcacagctgtgggctcccttccagctcctcccactttcttggctgggtcttctgaggcctacgtggaatgaactacacatgtggcctcatgcccaagggtttgttagatggcctctgactctgtgggattcaacttgacttttttgccccaggaggctctgtctggaaacaggcttagctttagtgctggggtgggacctgccctgtgggccccagggaggggacagtgggggtgaggccctgaggctgtccagggtctgagctctttgcctccaacctgcttctgccccaaaaggaacaggctgttggtggcaggctcctcccggggagctgtactgtacagaccaaggtgtaaataaacagtttgctcttctaaaaaaaaaa

SEQ ID NO: 329487 - DNA, 2866 bp, Homo sapiens
  misc_feature (2495)..(2495): n is a, c, g, or t
  misc_feature (2500)..(2500): n is a, c, g, or t
  misc_feature (2555)..(2555): n is a, c, g, or t
  misc_feature (2564)..(2564): n is a, c, g, or t
  misc_feature (2570)..(2570): n is a, c, g, or t
  misc_feature (2584)..(2584): n is a, c, g, or t
  misc_feature (2596)..(2596): n is a, c, g, or t
  misc_feature (2601)..(2601): n is a, c, g, or t
  misc_feature (2620)..(2620): n is a, c, g, or t
  misc_feature (2635)..(2635): n is a, c, g, or t
  misc_feature (2642)..(2642): n is a, c, g, or t
  misc_feature (2644)..(2644): n is a, c, g, or t
  misc_feature (2666)..(2666): n is a, c, g, or t
  misc_feature (2672)..(2672): n is a, c, g, or t
  misc_feature (2685)..(2685): n is a, c, g, or t
  misc_feature (2693)..(2693): n is a, c, g, or t
  misc_feature (2695)..(2695): n is a, c, g, or t
  misc_feature (2706)..(2706): n is a, c, g, or t
  misc_feature (2708)..(2708): n is a, c, g, or t
  misc_feature (2714)..(2714): n is a, c, g, or t
  misc_feature (2725)..(2725): n is a, c, g, or t
  misc_feature (2735)..(2735): n is a, c, g, or t
  misc_feature (2745)..(2745): n is a, c, g, or t
  misc_feature (2748)..(2748): n is a, c, g, or t
  misc_feature (2778)..(2778): n is a, c, g, or t
  misc_feature (2781)..(2781): n is a, c, g, or t
  misc_feature (2785)..(2786): n is a, c, g, or t
  misc_feature (2851)..(2851): n is a, c, g, or t
cccccgagtcccggggcccaggcgcctcgtgatgtcaccgcagcttgatacaaagagcccttcggcccacgcgggtctcccggcaacgggcgggggcggggccgcgccttccactggtgcccagaagtgcgagcggcagcggcgcggccgcgattgttcctgcgcttcggggctgcccgccgcgtccccgcgcgccgccgacccgcgcccgctggcttccgcgcctctgccggggagcggcccgcggatgcgcaccccgccagctctcgggagccagggcagcgaggtcacaggccccacctttgctgatggcgagctcatccccagggaacccggcttttttcccgaggacgaggaggaggctatgacgctggcgccacctgagggcccccaggagttgtacacagacagccccatggagagcactcagagcctggaggggtctgtcgggagtcctgccgagaaggacgggggacttgggggcctgtttctgccagaagacaagtccctggtccacactccatccatgacgacctcagacctttctacacactccaccacctcgctcatcagcaatgaggagcagtttgaagactatggggagggtgacgatgtggactgtgcccccagcagcccttgccccgatgatgagaccaggaccaacgtctactcggacctggggtcttcggtgtcttccagtgcggggcagacgcctaggaaaatgcggcacgtgtacaacagcgaattgctagatgtttactgctctcaatgctgcaagaaaatcaacctgctcaatgacttggaagcccgactgaaaaacctgaaggccaacagccccaaccgaaagatctccagcacggcctttggacggcagctcatgcacagcagcaacttcagcagcagcaatggcagcaccgaagacctgttccgggacagcattgactcttgcgacaatgacatcacagagaaggtaagcttcctggaaaagaaggtgacagagctggagaatgacagcctgaccaatggggacctgaagagcaagctgaagcaagagaacacacagctggtgcacagggtgcatgagctggaggagatggtgaaggatcaggagaccacggccgagcaggctctggaggaggaggcgcggcgccaccgcgaggcctacggcaagctggagagggagaaggctaccgaggtggagctgctcaatgccagggtgcagcagttggaggaagaaaatacagagcttagaacaacagtgactcggctcaagtctcaaacagagaaactggatgaggagcggcagcgcatgtctgaccgtctggaggacaccagcctgcggctcaaagatgagatggacctgtacaagcgcatgatggacaagctgcgacagaaccgccttgagttccagaaggagcgggaggcgacgcaggagctcatcgaggacttgcggaaggagctggagcacctgcagatgtacaagctggactgcgagcggccaggcaggggccgcagtgcctcctctggcctaggcgagttcaatgccagggcccgcgaggtggagctcgagcacgaggtcaagcggctcaagcaggagaattataagctgcgggatcagaacgacgacttgaatgggcagattttgagcctcagcctctacgaagcaaaaaacctctttgctgcccagactaaagcccagtctctggctgcggagatagacaccgcctcgcgcgatgagctaatggaagccctgaaggagcaggaggagatcaacttccggctgaggcagtacatggacaagattatcctcgccatcctggaccacaatccctccatcctcgagatcaaacactaaggcacggggctggctgcagagcagccttaggaccctgggaccaagggcagaccctgcccaaggatgcaggcctaagccgggcctcacactcacactgtaaatgtctctctggccaccatgcgttacgtgtacccgtgtatatgtggggaggctgtgcacacgagcgaggggtgagtggccgtggctgtgggcagcatccacacggttagccgtgcatgcactttgtggcccctttgcaaggggcagagggtactggaagtgggaggaggcaaggtctgctatcaggagttactgtaaaaacaagaactggaagctcgtgtttccggtactgggtaaaatgattctacctctggggataaggattcacattcgctctagtacgatgggctctttcaccccactcctagtccccttgggagtgggagcaaaattgtgatctttcctaggagtttgaatgccccatatttgtgtcctcgccagctctttggccacctttcaagccccagtgttcaagctcagagaggatgaaggggcatctggagggtccatgagatggggccctcaccaaatgccttggccaccggccagcagcccctgctgctgtagtgctgctgctgtcagcagctgcaacagcagcgcncctcnagcgcttctctagtagcccagccgtagctgccgcgcgcgccaatccgtctagtanagtgcctanaagtantagcagctgtcgcntgccacagtccnccccnagtcccagtgccgtacccntacccctcccccgcnttgtcgngnttgtcagcgtgttgtaagcacnaaaggnaagcccagcccantgtcactngncgcgtcagtgngntaaacnagtgcaagcgngcaatataanaagtgcaagngcngcaagggcgggcgcctttgcgcgcaatggnccncctnntaagcgccagcgcagcgttgcacaaatcgcgcgccaaacccaaaagcaaaaatgcagcttttttngcgcgcaggcaaaca

SEQ ID NO: 329488 - DNA, 2193 bp, Homo sapiens
cccccgagtcccggggcccaggcgcctcgtgatgtcaccgcagcttgatacaaagagcccttcggcccacgcgggtctcccggcaacgggcgggggcggggccgcgccttccactggtgcccagaagtgcgagcggcagcggcgcggccgcgattgttcctgcgcttcggggctgcccgccgcgtccccgcgcgccgccgacccgcgcccgctggcttccgcgcctctgccggggagcggcccgcggatgcgcaccccgccagctctcgggagccagggcagcgaggtcacaggccccacctttgctgatggcgagctcatccccagggaacccggcttttttcccgaggacgaggaggaggctatgacgctggcgccacctgagggcccccaggagttgtacacagacagccccatggagagcactcagagcctggaggggtctgtcgggagtcctgccgagaaggacgggggacttgggggcctgtttctgccagaagacaagtccctggtccacactccatccatgacgacctcagacctttctacacactccaccacctcgctcatcagcaatgaggagcagtttgaagactatggggagggtgacgatgtggactgtgcccccagcagcccttgccccgatgatgagaccaggaccaacgtctactcggacctggggtcttcggtgtcttccagtgcggggcagacgcctaggaaaatgcggcacgtgtacaacagcgaattgctagatgtttactgctctcaatgctgcaagaaaatcaacctgctcaatgacttggaagcccgactgaaaaacctgaaggccaacagccccaaccgaaagatctccagcacggcctttggacggcagctcatgcacagcagcaacttcagcagcagcaatggcagcaccgaagacctgttccgggacagcattgactcttgcgacaatgacatcacagagaaggtaagcttcctggaaaagaaggtgacagagctggagaatgacagcctgaccaatggggacctgaagagcaagctgaagcaagagaacacacagctggtgcacagggtgcatgagctggaggagatggtgaaggatcaggagaccacggccgagcaggctctggaggaggaggcgcggcgccaccgcgaggcctacggcaagctggagagggagaaggctaccgaggtggagctgctcaatgccagggtgcagcagttggaggaagaaaatacagagcttagaacaacagtgactcggctcaagtctcaaacagagaaactggatgaggagcggcagcgcatgtctgaccgtctggaggacaccagcctgcggctcaaagatgagatggacctgtacaagcgcatgatggacaagctgcgacagaaccgccttgagttccagaaggagcgggaggcgacgcaggagctcatcgaggacttgcggaaggagctggagcacctgcagatgtacaagctggactgcgagcggccaggcaggggccgcagtgcctcctctggcctaggcgagttcaatgccagggcccgcgaggtggagctcgagcacgaggtcaagcggctcaagcaggagaattataagctgcgggatcagaacgacgacttgaatgggcagattttgagcctcagcctctacgaagcaactaatggaagccctgaaggagcaggaggagatcaacttccggctgaggcagtacatggacaagattatcctcgccatcctggaccacaatccctccatcctcgagatcaaacactaaggcacggggctggctgcagagcagccttaggaccctgggaccaagggcagaccctgcccaaggatgcaggcctaagccgggcctcacactcacactgtaaatgtctctctggccaccatgcgttacgtgtacccgtgtatatgtggggaggctgtgcacacgagcgaggggtgagtggccgtggctgtgggcagcatccacacggttagccgtgcatgcactttgtggcccctttgcaaggggcagagggtactggaagtgggaggaggcaaggtctgctatcaggagttactgtaaaaacaagaactggaagcaaaaacacaaaaaacaagcagaaagagagcagagacagaagaacaacaaacaaggggggcggcgccggctccaaaaagatatcaccccacaggag

SEQ ID NO: 329489 - DNA, 6793 bp, Homo sapiens
aagcttggcacgaggcgagcacgaggtcaagcggctcaagcaggagaattataagctgcgggatcagaacgacgacttgaatgggcagattttgagcctcagcctctacgaagcaaaaaacctctttgctgcccagactaaagcccagtctctggctgcggagatagacaccgcctcgcgcgatgagctaatggaagccctgaaggagcaggaggagatcaacttccggctgaggcagtacatggacaagattatcctcgccatcctggaccacaatccctccatcctcgagatcaaacactaaggcacggggctggctgcagagcagccttaggaccctgggaccaagggcagaccctgcccaaggatgcaggcctaagccgggcctcacactcacactgtaaatgtctctctggccaccatgcgttacgtgtacccgtgtatatgtggggaggctgtgcacacgagcgaggggtgagtggccgtggctgtgggcagcatccacacggttagccgtgcatgcactttgtggcccctttgcaaggggcagagggtactggaagtgggaggaggcaaggtctgctatcaggagttactgtaaaaacaagaactggaagctcgtgtttccggtactgggtaaaatgattctacctctggggataaggattcacattcgctctagtacgatgggctctttcaccccactcctagtccccttgggagtgggagcaaaattgtgatctttcctaggagtttgaatgccccatatttgtgtcctcgccagctctttggccacctttcaagccccagtgttcaagctcagagaggatgaaggggcatctggagggtccatgagatggggccctcaccaaatgccttggccaccggccagcagccctctgtgatgtgtgtgcagagtgaacagaggactcaggtttcatagcagctagtgcggggcatcctcatcctgtacctatagagttcgtgcactcccccatccatgctacctacctccccgtttctgtttcagttttaagacaatgaagcagcattcactgcgtcattgtaacatgaagggataaaaatgaaggagaaggagggtttgggatgggtgtctaaggcaggagttgacatcgggcaaccaaagaaatgagttttggggaggaacacaactcccatcccagtcagtttccttcccatggctgcatcttaagatggatgcacggagaaaccgtctgcctggctccctgtcttcattctccacgcagcctggtgatggcaggcctgggtttggatttcagaatcctagctccgggctccactcgtgtggcagcaagactgcttcgttccagcgtttagaaacacacctgtatttgattctcagccaggggagcactcgctgcactggtgggaggcggttgggaaagttgcaggaaaaccttagtcttccatccttctgacccatggtggaaattcacaccatggatttttaatggatctttgttctaggcagctgggaatagacatggtacttaccttagagttttccaatttatctcaattttatatggcttgtgattcattttcttaatccaaatatatataaacgtgtgtggtcttattcttccccctgcagtttcttgctttcttcagcacatcttatagtatgagaaggaaggtttgggcatgttgggaagggcggtggagggggagttgcagaaagagagggcagtgagggtgaggagaggggatctggggacttgggtgtgacacctgcttgacagaggcagggctgtggccaggaccaaccttcaattccattccaatcagcctttgcatttgttggatctcgtggcttctttttaatcttttgttggggattagtttcatgctgcacataatggggttgcactggtctgacccaggactttggagccacccacactgggaagactaggctaggcagtcggtcttctaggagtttctcagccccttaggacgcgggtctccttgggctcccccaagggttctgcgaagaggcagtggaagaaggcatgaggagagggtctcttgagaatttgccaataggaaggagtggccacggctgaaaggaacaagacagatcctgacatagctttggcctgggtgttaggtcagaaggagtactggtgcgtgggggccttaccccagggttgagtattttatatgtaaaatgttatctgccctttggctgcattggaatttcagagaaggctgcagaggcctgggttacacagcctgagtcacaacgtgggaaggaatctctgccacgggaaaggtgggcggaagcagctggcagcctggggcgtgcttcaggctcctccctctaaggggcgccatgggaacaggctccggagggagccggcgtctgaaaggcccccgggacctgctgcagtgccagaggggcctctggagcaggcctggcttttaaatggggggctgaattccagctcacacacacctcaagtccaaccttactttcttcagccagaatacatttcttgtaaaacctggcttgttgcttggcttttaaagatggtgtatgtttgtaaaaatattcttctgggctcaaaagctagcttgagggggcagatgccccaggtgtcccagctccacagcccctggcagatcccagaccccttggtggcaggtcccagagcctaggtggtaggagcttgatctttgtttctgcccttacccctcagtagtggggctgcgaggtagtagacaggatgcccagttaagtttgaatttcagatagaaaataattttagaataaatatgttctatctaatacatgggacagatgttatttttagagataggatcttgctctgttgcccaggctggagtgtagtggtatgatcatagctcaccacaaccttgaactcccaggctcaagcgatcctcccgccttaactgcctgagtagctgggactacaggcatgcaccaccacgcccagctaatttttcttattttttgtagagacagggtctcactgtgttgcctcactcgagctgctgacctcaagtgatcctcccacctcagcctgccaaagcactgggattacaggcatgagccaccatgcctggccaggacatatttgaaatggggagattttaaaaattctgatgattagactgaatcctcagacgttctggtttgattgttgtgggtgtagcccaggcatgggattttttaaagagctgctcaggtaattccaatttaattgcgtgtcctacttgggttttttgtttgtttttattgtttttgctaaacctggcaaccctaccgagtagggattagcagtaacttatctgaaatttagaggtgttttgggggtggggcgagggtttctgtagtagactcagattttacatggccctgagctgcccttgcgttcagttggaagccacgcaaaatgaactgaaccaggagtgagcttcgtgtacattatctattagaaaatgaagtaccttctggttcagctagtccctgtgcgttgagaggctttaagaaacttctagtaaaaatgtttttttcttttagctttgaattggccagagtttatcctagattattttattttaaattggtagaattctttgcgaactgtcacagagaaattccttttcatgactttatttctgacctattaaaacatgaacaggccaggcatggtggctcacgcctgtaatcctagcacttgggaggcagtggcaggcggatcacttgagctcaggagtcctaaaccagcctgggcaacatagtgataccttgtctctaccaaaagttaaaaaaaaaaaaaaaaaagctcaagaacctgcacgagggcctaaaacagtgggctcagctttggctgtgcattggaatcacctggggagatttgtaagcttctgctgtctgggctgaacccccagaggttcggattgaattggtgtggggtgtggtccaggcatcgagatgtgtaaagacctccccaggtgatgatatgcagtccgaggttgagactgccctgtcctgcaaggtcgttggccagaggtagaggaaactggtcaaagtggctgttgggcttgtcaagcccgtggctgaatgacagtgagctctcttgctgggagggttccttttcctgttgttgaatggtcctggcctgcaggatgggaggccagatgccttcaggagctggtggatccagctgttctcaccagcctggaggttagcagaccagagtgggtgggcaggaccttggcctggtgcccctggaatcagtgggtggcatgtgttgggatatactggctacaggctcatctcaaagagcaggtagaacagagtcagcagggaactgacaggtggggctgtccccctgaaagcagccgcagaaacagctgccacctatttgcatagctgagcaggaggacatactgtctttgtgggttttgcttctggtctgtttcctgactgggttgataaagggagtcccagctcgttccctgttagccaaaccagcatcctgctcacacaccggacactccaggtgctagtccactggtgctggtgttcaggggagttgggggggggggcgcggggacagaagcgcgggttcttggttccaatgagggacttagcagaagcctccaggggccagcagggccaggtgaaacttgggagaaatgaagccctctgtgtcctgtgtgtgtggtggggtttaatgcattagcaaatttaaacttaaaaactaactctaggccgggcacggtggctcacacctgtaatcccagcactttgggaggccaaggcaggtggattgcctgagctcaggagttcgagaccagcctggacaacatggtgaaactcttgtctttatttttttaaaaaaacaaaaagtaactttcgatgtgatcataccaggaaagttttgcgtggtcaccatgccaagaaaatgactttggttgcccagcagatccacagcgactctttctcaagggctactgtggattctagattgaggaaaggggccacttaggactcagtgctggtatcctccacagtcctttctcccagactctggccctccctttgggacccaggaaatcccctctagggtgacgctgctggctaggaagactgaggtctgctgcgccaaggggcctcaagttagaagggccatgccgtcagtggatgactttgagcgctgatcctagggacctgccaggtcctcacttcctgccctgggtgcacacatgaatggggcagccagcaggaagcgggagaggctggaaccaggagcctgccctacctgcatggcaggacaactctgaggcccttctgccatattctctgctacccaccagagaaaataggctgccttctagaaagatttgtttctaaaagcgtagaccctggggaagtataatgtcaccatgctcaccaggcgaggtttcccatatgacctccctgccccgacctcgtcaggttgctcctttccccatctgtaaggtagagatgtctgccccggagctaccagctggggatggcatccaggccatgtctcctgcaggatccaagtgctgttgtccccagggtgaccctgcctcctgctggggcccatccgctttgctgtgctgcacaggctgttttcatctgcatggtttggggtctttgtccttgtgccttttcttccccatcgccactgtacaggattttccacattgcccactgcctccttttctacatcgtctcatctccctggcctttcccgagccctgtaaatgtgtactttttcaacgtgcctcccccaggtgaggccagctctcccgggcacattcgtccacaaggatcaggccccacttacccttggctcgctcagcctgtagacttggtaactttgtacagaatctttcattattgtcttaagcatggggggctaggacccacttagtccctcctccagcctgcagctaatttaggagccttgcattccagaaaagggcaactttgtgtaaagcagcttctcccacagagctttccctgcattgttagtgatgtcgggcaaagcatcactctttaacctggggcattggccccagcagggatatcatgggaccgcagccgctccgtgcactgtctctgcccccagaggaagccctgtccatggttcctggtgcacggccacaggcctgccttgaggccaccacatctggtgtctagaacagctgcgggccccacttgggcagaaggaagaggtgctagctgctgcccctgcctgctgtgaacacctgcccagcccttccttgtctgctgaggtgctcagaccagagtgccattaaataccaactgatgtcacggagcggacggtgcattgccaaggactcacagctgtgggctcccttccagctcctcccactttcttggctgggtcttctgaggcctacgtggaatgaactacacatgtggcctcatgcccaagggtttgttagatggcctctgactctgtgggattcaacttgacttttttgccccaggaggctctgtctggaaacaggcttagctttagtgctggggtgggacctgccctgtgggccccagggaggggacagtgggggtgaggccctgaggctgtccagggtctgagctctttgcctccaacctgcttctgccccaaaaggaacaggctgttggtggcaggctcctcccggggagctgtactgtacagaccaaggtgtaaataaacagtttgctcttctaaaaaaaaaa

SEQ ID NO: 329490 - DNA, 2853 bp, Homo sapiens
cccccgagtcccggggcccaggcgcctcgtgatgtcaccgcagcttgatacaaagagcccttcggcccacgcgggtctcccggcaacgggcgggggcggggccgcgccttccactggtgcccagaagtgcgagcggcagcggcgcggccgcgattgttcctgcgcttcggggctgcccgccgcgtccccgcgcgccgccgacccgcgcccgctggcttccgcgcctctgccggggagcggcccgcggatgcgcaccccgccagctctcgggagccagggcagcgaggtcacaggccccacctttgctgatggcgagctcatccccagggaacccggcttttttcccgaggacgaggaggaggctatgacgctggcgccacctgagggcccccaggagttgtacacagacagccccatggagagcactcagagcctggaggggtctgtcgggagtcctgccgagaaggacgggggacttgggggcctgtttctgccagaagacaagtccctggtccacactccatccatgacgacctcagacctttctacacactccaccacctcgctcatcagcaatgaggagcagtttgaagactatggggagggtgacgatgtggactgtgcccccagcagcccttgccccgatgatgagaccaggaccaacgtctactcggacctggggtcttcggtgtcttccagtgcggggcagacgcctaggaaaatgcggcacgtgtacaacagcgaattgctagatgtttactgctctcaatgctgcaagaaaatcaacctgctcaatgacttggaagcccgactgaaaaacctgaaggccaacagccccaaccgaaagatctccagcacggcctttggacggcagctcatgcacagcagcaacttcagcagcagcaatggcagcaccgaagacctgttccgggacagcattgactcttgcgacaatgacatcacagagaaggtaagcttcctggaaaagaaggtgacagagctggagaatgacagcctgaccaatggggacctgaagagcaagctgaagcaagagaacacacagctggtgcacagggtgcatgagctggaggagatggtgaaggatcaggagaccacggccgagcaggctctggaggaggaggcgcggcgccaccgcgaggcctacggcaagctggagagggagaaggctaccgaggtggagctgctcaatgccagggtgcagcagttggaggaagaaaatacagagcttagaacaacagtgactcggctcaagtctcaaacagagaaactggatgaggagcggcagcgcatgtctgaccgtctggaggacaccagcctgcggctcaaagatgagatggacctgtacaagcgcatgatggacaagctgcgacagaaccgccttgagttccagaaggagcgggaggcgacgcaggagctcatcgaggacttgcggaaggagctggagcacctgcagatgtacaagctggactgcgagcggccaggcaggggccgcagtgcctcctctggcctaggcgagttcaatgccagggcccgcgaggtggagctcgagcacgaggtcaagcggctcaagcaggagaattataagctgcgggatcagaacgacgacttgaatgggcagattttgagcctcagcctctacgaagcaaaaaacctctttgctgcccagactaaagcccagtctctggctgcggagatagacaccgcctcgcgcgatgagctaatggaagccctgaaggagcaggaggagatcaacttccggctgaggcagtacatggacaagattatcctcgccatcctggaccacaatccctccatcctcgagatcaaacactaaggcacggggctggctgcagagcagccttaggaccctgggaccaagggcagaccctgcccaaggatgcaggcctaagccgggcctcacactcacactgtaaatgtctctctggccaccatgcgttacgtgtacccgtgtatatgtggggaggctgtgcacacgagcgaggggtgagtggccgtggctgtgggcagcatccacacggttagccgtgcatgcactttgtggcccctttgcaaggggcagagggtactggaagtgggaggaggcaaggtctgctatcaggagttactgtaaaaacaagaactggaagctcgtgtttccggtactgggtaaaatgattctacctctggggataaggattcacattcgctctagtacgatgggctctttcaccccactcctagtccccttgggagtgggagcaaaattgtgatctttcctaggagtttgaatgccccatatttgtgtcctcgccagctctttggccacctttcaagccccagtgttcaagctcagagaggatgaaggggcatctggagggtccatgagatggggccctcaccaaatgccttggccaccggccagcagccctctgtgatgtgtgtgcagagtgaacagaggactcaggtttcatagcagctagtgcggggcatcctcatcctgtacctatagagttcgtgcactcccccatccatgctacctacctccccgtttctgtttcagttttaagacaatgaagcagcattcactgcgtcattgtaacatgaagggataaaaatgaaggagaaggagggtttgggatgggtgtctaaggcaggagttgacatcgggcaaccaaagaaatgagttttggggaggaacacaactcccatcccagtcagtttccttcccatggctgcatcttaagatggatgcacggagaaaccgtctgcctggctccctgccatcaccaggctgcgtggagaatgaagacgtcgagcgccgcaaatttagta

SEQ ID NO: 329491 - DNA, 2036 bp, Homo sapiens
  misc_feature (1849)..(1849): n is a, c, g, or t
gcggccgcgaccccgacggcttcctgcgcgtggagcgcgtcgcggcgctcggactgcgcttcggccagggcgaggaggtggaaaaacttgtgaaatatttggatcccaacgacctggggagaatcaacttcaaggacttttgccggggggtgttcgccatgaaagggtgcgaggagctgctgaaggatgtgctgtcggtggagagcgcggggacgctgccgtgcgcgccagagatcccagactgcgtggagcagagaccgggtctagctatgttgcccaggatggtctcaaactcctggcctcaagcaagtctcccagctgggcctcccaaggcactgggactacagtcatgagcaacctctcctagccctgttttcttgtaataaagtaaatgcagtgttcattttagtaacaaaacaggtcttcactgggagggagaaatgaggaaatttgaccccgcgtggctgaggcctggaatgagctccatgggcaggctccaggaatgatgtaattttgcctcctctcaaggctggcctcaaggaggcctgattccagccctctttgtctggggctgccctgaacctgtaagaatccttctgaccagatcctccagacactgcaaattctcacccaggttgctcagaatcctggaaagagctcaggtttgagtcaaacgggctgagtgtgggttctgcttgaccactttctgtgtgtcatttggcaagtcgcttcacctctctgagcctttttcatttctgcctatctaaaatcagagtcgtcagcctgattttcagtgttgtggtgagaatgcaatggattaatgtttctaaaggttcctgaggagacaggtcccccagtcagtagtacctatgcctgcattctctgtaccactcagaaccctcaggggaatcattcaggacacaggggacagaattccctccccttcccattcccaaagtcaccagcctgcctccacctgcacccacactttcagcttgctgctgggatggtgagtggcatgaccctgctctgacacaggccatgccctccaatcccagctcctcacccgcacaccgcctgaacactggatcccagcccctcctgccaactcaagcactcgccttcacaaacagcccctcacccacagcacccgcaccacgcccctgctgggtcctttccattcgcttctggagctgacataataatgcccttcccatgggcagggaagcacccgcttgaccacacatcctggctttctttcctttggtctatttcctccaaagactggtctcaactccctttcttgcctccctttctctctgttgccactcccaatgatgtcttggcccctctgttctgctgaaacacttctcacagtcaccagggacttctttttgagacaggggtctcactctgtcacccaggctggagtgcagtggtgcagtcctgactcactgcagcctccaacacctgggttcaagcaatcctcccacctcagtctcccaggtagctgggaccacaggcatctgccatcatccccagctatttttattttttgtagagatgggggtcttgttctgttccccaggctggagtgcagtagtgcagtcctagtttgctgcagcctcaaactcctggcctcaagcaatcctccaatctcagacccccaaagtgctggtatggcaggcatgagccaccttgcctggccaccaggaacttctcactggccaaatccaagcatcagttctctagtcacatttttacatagtgatggtgtgtggtgaatagatcagggtaattagcatatccaccatctccggcatttatcatttcttcattttgggaacantcgatagtctcctagctactgaaaactctgtattattgttaatgatagtcatcttacagtgatgtagaacaatggaacttatccctcctctagaactgtaactctgtacttttaacaaacgtctccctactctccttcccctgccattctcagcctctagtgtcctctgctccattcacattttact

SEQ ID NO: 329492 - DNA, 1538 bp, Homo sapiens
cccccgagtcccggggcccaggcgcctcgtgatgtcaccgcagcttgatacaaagagcccttcggcccacgcgggtctcccggcaacgggcgggggcggggccgcgccttccactggtgcccagaagtgcgagcggcagcggcgcggccgcgattgttcctgcgcttcggggctgcccgccgcgtccccgcgcgccgccgacccgcgcccgctggcttccgcgcctctgccggggagcggcccgcggatgcgcaccccgccagctctcgggagccagggcagcgaggtcacaggccccacctttgctgatggcgagctcatccccagggaacccggcttttttcccgaggacgaggaggaggctatgacgctggcgccacctgagggcccccaggagttgtacacagacagccccatggagagcactcagagcctggaggggtctgtcgggagtcctgccgagaaggacgggggacttgggggcctgtttctgccagaagacaagtccctggtccacactccatccatgacgacctcagacctttctacacactccaccacctcgctcatcagcaatgaggagcagtttgaagactatggggagggtgacgatgtggactgtgcccccagcagcccttgccccgatgatgagaccaggaccaacgtctactcggacctggggtcttcggtgtcttccagtgcggggcagacgcctaggaaaatgcggcacgtgtacaacagcgaattgctagatgtttactgctctcaatgctgcaagaaaatcaacctgctcaatgacttggaagcccgactgaaaaacctgaaggccaacagccccaaccgaaagatctccagcacggcctttggacggcagctcatgcacagcagcaacttcagcagcagcaatggcagcaccgaagacctgttccgggacagcattgactcttgcgacaatgacatcacagagaaggtaagcttcctggaaaagaaggtgacagagctggagaatgacagcctgaccaatggggacctgaagagcaagctgaagcaagagaacacacagctggtgcacagggtgcatgagctggaggagatggtgaaggatcaggagaccacggccgagcaggctctggaggaggaggcgcggcgccaccgcgaggcctacggcaagctggagagggagaaggctaccgaggtggagctgctcaatgccagggtgcagcagttggaggaagaaaatacagagcttagaacaacagtgactcggctcaagtctcaaacagagaaactggatgaggagcggcagcgcatgtctgaccgtctggaggacaccagcctgcggctcaaagatgagatggacctgtacaagcgcatgatgggagcaagactgggcatcttcgtcccatcaggctctcctttaagggtaagaataagccctttcaccttccctgtgttttcaacttgcagcagattctccgtgttcactttcaggttctccagagacgacctgttgtaaacgtcactgatgggagcagaca

SEQ ID NO: 329493 - DNA, 6737 bp, Homo sapiens
aagcttggcacgaggcgagcacgaggtcaagcggctcaagcaggagaattataagctgcgggatcagaacgacgacttgaatgggcagattttgagcctcagcctctacgaagcaaaaaacctctttgctgcccagactaaagcccagtctctggctgcggagatagacaccgcctcgcgcgatgagctaatggaagccctgaaggagcaggaggagatcaacttccggctgaggcagtacatggacaagattatcctcgccatcctggaccacaatccctccatcctcgagatcaaacactaaggcacggggctggctgcagagcagccttaggaccctgggaccaagggcagaccctgcccaaggatgcaggcctaagccgggcctcacactcacactgtaaatgtctctctggccaccatgcgttacgtgtacccgtgtatatgtggggaggctgtgcacacgagcgaggggtgagtggccgtggctgtgggcagcatccacacggttagccgtgcatgcactttgtggcccctttgcaaggggcagagggtactggaagtgggaggaggcaaggtctgctatcaggagttactctggggataaggattcacattcgctctagtacgatgggctctttcaccccactcctagtccccttgggagtgggagcaaaattgtgatctttcctaggagtttgaatgccccatatttgtgtcctcgccagctctttggccacctttcaagccccagtgttcaagctcagagaggatgaaggggcatctggagggtccatgagatggggccctcaccaaatgccttggccaccggccagcagccctctgtgatgtgtgtgcagagtgaacagaggactcaggtttcatagcagctagtgcggggcatcctcatcctgtacctatagagttcgtgcactcccccatccatgctacctacctccccgtttctgtttcagttttaagacaatgaagcagcattcactgcgtcattgtaacatgaagggataaaaatgaaggagaaggagggtttgggatgggtgtctaaggcaggagttgacatcgggcaaccaaagaaatgagttttggggaggaacacaactcccatcccagtcagtttccttcccatggctgcatcttaagatggatgcacggagaaaccgtctgcctggctccctgtcttcattctccacgcagcctggtgatggcaggcctgggtttggatttcagaatcctagctccgggctccactcgtgtggcagcaagactgcttcgttccagcgtttagaaacacacctgtatttgattctcagccaggggagcactcgctgcactggtgggaggcggttgggaaagttgcaggaaaaccttagtcttccatccttctgacccatggtggaaattcacaccatggatttttaatggatctttgttctaggcagctgggaatagacatggtacttaccttagagttttccaatttatctcaattttatatggcttgtgattcattttcttaatccaaatatatataaacgtgtgtggtcttattcttccccctgcagtttcttgctttcttcagcacatcttatagtatgagaaggaaggtttgggcatgttgggaagggcggtggagggggagttgcagaaagagagggcagtgagggtgaggagaggggatctggggacttgggtgtgacacctgcttgacagaggcagggctgtggccaggaccaaccttcaattccattccaatcagcctttgcatttgttggatctcgtggcttctttttaatcttttgttggggattagtttcatgctgcacataatggggttgcactggtctgacccaggactttggagccacccacactgggaagactaggctaggcagtcggtcttctaggagtttctcagccccttaggacgcgggtctccttgggctcccccaagggttctgcgaagaggcagtggaagaaggcatgaggagagggtctcttgagaatttgccaataggaaggagtggccacggctgaaaggaacaagacagatcctgacatagctttggcctgggtgttaggtcagaaggagtactggtgcgtgggggccttaccccagggttgagtattttatatgtaaaatgttatctgccctttggctgcattggaatttcagagaaggctgcagaggcctgggttacacagcctgagtcacaacgtgggaaggaatctctgccacgggaaaggtgggcggaagcagctggcagcctggggcgtgcttcaggctcctccctctaaggggcgccatgggaacaggctccggagggagccggcgtctgaaaggcccccgggacctgctgcagtgccagaggggcctctggagcaggcctggcttttaaatggggggctgaattccagctcacacacacctcaagtccaaccttactttcttcagccagaatacatttcttgtaaaacctggcttgttgcttggcttttaaagatggtgtatgtttgtaaaaatattcttctgggctcaaaagctagcttgagggggcagatgccccaggtgtcccagctccacagcccctggcagatcccagaccccttggtggcaggtcccagagcctaggtggtaggagcttgatctttgtttctgcccttacccctcagtagtggggctgcgaggtagtagacaggatgcccagttaagtttgaatttcagatagaaaataattttagaataaatatgttctatctaatacatgggacagatgttatttttagagataggatcttgctctgttgcccaggctggagtgtagtggtatgatcatagctcaccacaaccttgaactcccaggctcaagcgatcctcccgccttaactgcctgagtagctgggactacaggcatgcaccaccacgcccagctaatttttcttattttttgtagagacagggtctcactgtgttgcctcactcgagctgctgacctcaagtgatcctcccacctcagcctgccaaagcactgggattacaggcatgagccaccatgcctggccaggacatatttgaaatggggagattttaaaaattctgatgattagactgaatcctcagacgttctggtttgattgttgtgggtgtagcccaggcatgggattttttaaagagctgctcaggtaattccaatttaattgcgtgtcctacttgggttttttgtttgtttttattgtttttgctaaacctggcaaccctaccgagtagggattagcagtaacttatctgaaatttagaggtgttttgggggtggggcgagggtttctgtagtagactcagattttacatggccctgagctgcccttgcgttcagttggaagccacgcaaaatgaactgaaccaggagtgagcttcgtgtacattatctattagaaaatgaagtaccttctggttcagctagtccctgtgcgttgagaggctttaagaaacttctagtaaaaatgtttttttcttttagctttgaattggccagagtttatcctagattattttattttaaattggtagaattctttgcgaactgtcacagagaaattccttttcatgactttatttctgacctattaaaacatgaacaggccaggcatggtggctcacgcctgtaatcctagcacttgggaggcagtggcaggcggatcacttgagctcaggagtcctaaaccagcctgggcaacatagtgataccttgtctctaccaaaagttaaaaaaaaaaaaaaaaaagctcaagaacctgcacgagggcctaaaacagtgggctcagctttggctgtgcattggaatcacctggggagatttgtaagcttctgctgtctgggctgaacccccagaggttcggattgaattggtgtggggtgtggtccaggcatcgagatgtgtaaagacctccccaggtgatgatatgcagtccgaggttgagactgccctgtcctgcaaggtcgttggccagaggtagaggaaactggtcaaagtggctgttgggcttgtcaagcccgtggctgaatgacagtgagctctcttgctgggagggttccttttcctgttgttgaatggtcctggcctgcaggatgggaggccagatgccttcaggagctggtggatccagctgttctcaccagcctggaggttagcagaccagagtgggtgggcaggaccttggcctggtgcccctggaatcagtgggtggcatgtgttgggatatactggctacaggctcatctcaaagagcaggtagaacagagtcagcagggaactgacaggtggggctgtccccctgaaagcagccgcagaaacagctgccacctatttgcatagctgagcaggaggacatactgtctttgtgggttttgcttctggtctgtttcctgactgggttgataaagggagtcccagctcgttccctgttagccaaaccagcatcctgctcacacaccggacactccaggtgctagtccactggtgctggtgttcaggggagttgggggggggggcgcggggacagaagcgcgggttcttggttccaatgagggacttagcagaagcctccaggggccagcagggccaggtgaaacttgggagaaatgaagccctctgtgtcctgtgtgtgtggtggggtttaatgcattagcaaatttaaacttaaaaactaactctaggccgggcacggtggctcacacctgtaatcccagcactttgggaggccaaggcaggtggattgcctgagctcaggagttcgagaccagcctggacaacatggtgaaactcttgtctttatttttttaaaaaaacaaaaagtaactttcgatgtgatcataccaggaaagttttgcgtggtcaccatgccaagaaaatgactttggttgcccagcagatccacagcgactctttctcaagggctactgtggattctagattgaggaaaggggccacttaggactcagtgctggtatcctccacagtcctttctcccagactctggccctccctttgggacccaggaaatcccctctagggtgacgctgctggctaggaagactgaggtctgctgcgccaaggggcctcaagttagaagggccatgccgtcagtggatgactttgagcgctgatcctagggacctgccaggtcctcacttcctgccctgggtgcacacatgaatggggcagccagcaggaagcgggagaggctggaaccaggagcctgccctacctgcatggcaggacaactctgaggcccttctgccatattctctgctacccaccagagaaaataggctgccttctagaaagatttgtttctaaaagcgtagaccctggggaagtataatgtcaccatgctcaccaggcgaggtttcccatatgacctccctgccccgacctcgtcaggttgctcctttccccatctgtaaggtagagatgtctgccccggagctaccagctggggatggcatccaggccatgtctcctgcaggatccaagtgctgttgtccccagggtgaccctgcctcctgctggggcccatccgctttgctgtgctgcacaggctgttttcatctgcatggtttggggtctttgtccttgtgccttttcttccccatcgccactgtacaggattttccacattgcccactgcctccttttctacatcgtctcatctccctggcctttcccgagccctgtaaatgtgtactttttcaacgtgcctcccccaggtgaggccagctctcccgggcacattcgtccacaaggatcaggccccacttacccttggctcgctcagcctgtagacttggtaactttgtacagaatctttcattattgtcttaagcatggggggctaggacccacttagtccctcctccagcctgcagctaatttaggagccttgcattccagaaaagggcaactttgtgtaaagcagcttctcccacagagctttccctgcattgttagtgatgtcgggcaaagcatcactctttaacctggggcattggccccagcagggatatcatgggaccgcagccgctccgtgcactgtctctgcccccagaggaagccctgtccatggttcctggtgcacggccacaggcctgccttgaggccaccacatctggtgtctagaacagctgcgggccccacttgggcagaaggaagaggtgctagctgctgcccctgcctgctgtgaacacctgcccagcccttccttgtctgctgaggtgctcagaccagagtgccattaaataccaactgatgtcacggagcggacggtgcattgccaaggactcacagctgtgggctcccttccagctcctcccactttcttggctgggtcttctgaggcctacgtggaatgaactacacatgtggcctcatgcccaagggtttgttagatggcctctgactctgtgggattcaacttgacttttttgccccaggaggctctgtctggaaacaggcttagctttagtgctggggtgggacctgccctgtgggccccagggaggggacagtgggggtgaggccctgaggctgtccagggtctgagctctttgcctccaacctgcttctgccccaaaaggaacaggctgttggtggcaggctcctcccggggagctgtactgtacagaccaaggtgtaaataaacagtttgctcttctaaaaaaaaaa

SEQ ID NO: 329494 - DNA, 8273 bp, Homo sapiens
cccccgagtcccggggcccaggcgcctcgtgatgtcaccgcagcttgatacaaagagcccttcggcccacgcgggtctcccggcaacgggcgggggcggggccgcgccttccactggtgcccagaagtgcgagcggcagcggcgcggccgcgattgttcctgcgcttcggggctgcccgccgcgtccccgcgcgccgccgacccgcgcccgctggcttccgcgcctctgccggggagcggcccgcggatgcgcaccccgccagctctcgggagccagggcagcgaggtcacaggccccacctttgctgatggcgagctcatccccagggaacccggcttttttcccgaggacgaggaggaggctatgacgctggcgccacctgagggcccccaggagttgtacacagacagccccatggagagcactcagagcctggaggggtctgtcgggagtcctgccgagaaggacgggggacttgggggcctgtttctgccagaagacaagtccctggtccacactccatccatgacgacctcagacctttctacacactccaccacctcgctcatcagcaatgaggagcagtttgaagactatggggagggtgacgatgtggactgtgcccccagcagcccttgccccgatgatgagaccaggaccaacgtctactcggacctggggtcttcggtgtcttccagtgcggggcagacgcctaggaaaatgcggcacgtgtacaacagcgaattgctagatgtttactgctctcaatgctgcaagaaaatcaacctgctcaatgacttggaagcccgactgaaaaacctgaaggccaacagccccaaccgaaagatctccagcacggcctttggacggcagctcatgcacagcagcaacttcagcagcagcaatggcagcaccgaagacctgttccgggacagcattgactcttgcgacaatgacatcacagagaaggtaagcttcctggaaaagaaggtgacagagctggagaatgacagcctgaccaatggggacctgaagagcaagctgaagcaagagaacacacagctggtgcacagggtgcatgagctggaggagatggtgaaggatcaggagaccacggccgagcaggctctggaggaggaggcgcggcgccaccgcgaggcctacggcaagctggagagggagaaggctaccgaggtggagctgctcaatgccagggtgcagcagttggaggaagaaaatacagagcttagaacaacagtgactcggctcaagtctcaaacagagaaactggatgaggagcggcagcgcatgtctgaccgtctggaggacaccagcctgcggctcaaagatgagatggacctgtacaagcgcatgatggacaagctgcgacagaaccgccttgagttccagaaggagcgggaggcgacgcaggagctcatcgaggacttgcggaaggagctggagcacctgcagatgtacaagctggactgcgagcggccaggcaggggccgcagtgcctcctctggcctaggcgagttcaatgccagggcccgcgaggtggagctcgagcacgaggtcaagcggctcaagcaggagaattataagctgcgggatcagaacgacgacttgaatgggcagattttgagcctcagcctctacgaagcaactaatggaagccctgaaggagcaggaggagatcaacttccggctgaggcagtacatggacaagattatcctcgccatcctggaccacaatccctccatcctcgagatcaaacactaaggcacggggctggctgcagagcagccttaggaccctgggaccaagggcagaccctgcccaaggatgcaggcctaagccgggcctcacactcacactgtaaatgtctctctggccaccatgcgttacgtgtacccgtgtatatgtggggaggctgtgcacacgagcgaggggtgagtggccgtggctgtgggcagcatccacacggttagccgtgcatgcactttgtggcccctttgcaaggggcagagggtactggaagtgggaggaggcaaggtctgctatcaggagttactgtaaaaacaagaactggaagctcgtgtttccggtactgggtaaaatgattctacctctggggataaggattcacattcgctctagtacgatgggctctttcaccccactcctagtccccttgggagtgggagcaaaattgtgatctttcctaggagtttgaatgccccatatttgtgtcctcgccagctctttggccacctttcaagccccagtgttcaagctcagagaggatgaaggggcatctggagggtccatgagatggggccctcaccaaatgccttggccaccggccagcagccctctgtgatgtgtgtgcagagtgaacagaggactcaggtttcatagcagctagtgcggggcatcctcatcctgtacctatagagttcgtgcactcccccatccatgctacctacctccccgtttctgtttcagttttaagacaatgaagcagcattcactgcgtcattgtaacatgaagggataaaaatgaaggagaaggagggtttgggatgggtgtctaaggcaggagttgacatcgggcaaccaaagaaatgagttttggggaggaacacaactcccatcccagtcagtttccttcccatggctgcatcttaagatggatgcacggagaaaccgtctgcctggctccctgtcttcattctccacgcagcctggtgatggcaggcctgggtttggatttcagaatcctagctccgggctccactcgtgtggcagcaagactgcttcgttccagcgtttagaaacacacctgtatttgattctcagccaggggagcactcgctgcactggtgggaggcggttgggaaagttgcaggaaaaccttagtcttccatccttctgacccatggtggaaattcacaccatggatttttaatggatctttgttctaggcagctgggaatagacatggtacttaccttagagttttccaatttatctcaattttatatggcttgtgattcattttcttaatccaaatatatataaacgtgtgtggtcttattcttccccctgcagtttcttgctttcttcagcacatcttatagtatgagaaggaaggtttgggcatgttgggaagggcggtggagggggagttgcagaaagagagggcagtgagggtgaggagaggggatctggggacttgggtgtgacacctgcttgacagaggcagggctgtggccaggaccaaccttcaattccattccaatcagcctttgcatttgttggatctcgtggcttctttttaatcttttgttggggattagtttcatgctgcacataatggggttgcactggtctgacccaggactttggagccacccacactgggaagactaggctaggcagtcggtcttctaggagtttctcagccccttaggacgcgggtctccttgggctcccccaagggttctgcgaagaggcagtggaagaaggcatgaggagagggtctcttgagaatttgccaataggaaggagtggccacggctgaaaggaacaagacagatcctgacatagctttggcctgggtgttaggtcagaaggagtactggtgcgtgggggccttaccccagggttgagtattttatatgtaaaatgttatctgccctttggctgcattggaatttcagagaaggctgcagaggcctgggttacacagcctgagtcacaacgtgggaaggaatctctgccacgggaaaggtgggcggaagcagctggcagcctggggcgtgcttcaggctcctccctctaaggggcgccatgggaacaggctccggagggagccggcgtctgaaaggcccccgggacctgctgcagtgccagaggggcctctggagcaggcctggcttttaaatggggggctgaattccagctcacacacacctcaagtccaaccttactttcttcagccagaatacatttcttgtaaaacctggcttgttgcttggcttttaaagatggtgtatgtttgtaaaaatattcttctgggctcaaaagctagcttgagggggcagatgccccaggtgtcccagctccacagcccctggcagatcccagaccccttggtggcaggtcccagagcctaggtggtaggagcttgatctttgtttctgcccttacccctcagtagtggggctgcgaggtagtagacaggatgcccagttaagtttgaatttcagatagaaaataattttagaataaatatgttctatctaatacatgggacagatgttatttttagagataggatcttgctctgttgcccaggctggagtgtagtggtatgatcatagctcaccacaaccttgaactcccaggctcaagcgatcctcccgccttaactgcctgagtagctgggactacaggcatgcaccaccacgcccagctaatttttcttattttttgtagagacagggtctcactgtgttgcctcactcgagctgctgacctcaagtgatcctcccacctcagcctgccaaagcactgggattacaggcatgagccaccatgcctggccaggacatatttgaaatggggagattttaaaaattctgatgattagactgaatcctcagacgttctggtttgattgttgtgggtgtagcccaggcatgggattttttaaagagctgctcaggtaattccaatttaattgcgtgtcctacttgggttttttgtttgtttttattgtttttgctaaacctggcaaccctaccgagtagggattagcagtaacttatctgaaatttagaggtgttttgggggtggggcgagggtttctgtagtagactcagattttacatggccctgagctgcccttgcgttcagttggaagccacgcaaaatgaactgaaccaggagtgagcttcgtgtacattatctattagaaaatgaagtaccttctggttcagctagtccctgtgcgttgagaggctttaagaaacttctagtaaaaatgtttttttcttttagctttgaattggccagagtttatcctagattattttattttaaattggtagaattctttgcgaactgtcacagagaaattccttttcatgactttatttctgacctattaaaacatgaacaggccaggcatggtggctcacgcctgtaatcctagcacttgggaggcagtggcaggcggatcacttgagctcaggagtcctaaaccagcctgggcaacatagtgataccttgtctctaccaaaagttaaaaaaaaaaaaaaaaaagctcaagaacctgcacgagggcctaaaacagtgggctcagctttggctgtgcattggaatcacctggggagatttgtaagcttctgctgtctgggctgaacccccagaggttcggattgaattggtgtggggtgtggtccaggcatcgagatgtgtaaagacctccccaggtgatgatatgcagtccgaggttgagactgccctgtcctgcaaggtcgttggccagaggtagaggaaactggtcaaagtggctgttgggcttgtcaagcccgtggctgaatgacagtgagctctcttgctgggagggttccttttcctgttgttgaatggtcctggcctgcaggatgggaggccagatgccttcaggagctggtggatccagctgttctcaccagcctggaggttagcagaccagagtgggtgggcaggaccttggcctggtgcccctggaatcagtgggtggcatgtgttgggatatactggctacaggctcatctcaaagagcaggtagaacagagtcagcagggaactgacaggtggggctgtccccctgaaagcagccgcagaaacagctgccacctatttgcatagctgagcaggaggacatactgtctttgtgggttttgcttctggtctgtttcctgactgggttgataaagggagtcccagctcgttccctgttagccaaaccagcatcctgctcacacaccggacactccaggtgctagtccactggtgctggtgttcaggggagttgggggggggggcgcggggacagaagcgcgggttcttggttccaatgagggacttagcagaagcctccaggggccagcagggccaggtgaaacttgggagaaatgaagccctctgtgtcctgtgtgtgtggtggggtttaatgcattagcaaatttaaacttaaaaactaactctaggccgggcacggtggctcacacctgtaatcccagcactttgggaggccaaggcaggtggattgcctgagctcaggagttcgagaccagcctggacaacatggtgaaactcttgtctttatttttttaaaaaaacaaaaagtaactttcgatgtgatcataccaggaaagttttgcgtggtcaccatgccaagaaaatgactttggttgcccagcagatccacagcgactctttctcaagggctactgtggattctagattgaggaaaggggccacttaggactcagtgctggtatcctccacagtcctttctcccagactctggccctccctttgggacccaggaaatcccctctagggtgacgctgctggctaggaagactgaggtctgctgcgccaaggggcctcaagttagaagggccatgccgtcagtggatgactttgagcgctgatcctagggacctgccaggtcctcacttcctgccctgggtgcacacatgaatggggcagccagcaggaagcgggagaggctggaaccaggagcctgccctacctgcatggcaggacaactctgaggcccttctgccatattctctgctacccaccagagaaaataggctgccttctagaaagatttgtttctaaaagcgtagaccctggggaagtataatgtcaccatgctcaccaggcgaggtttcccatatgacctccctgccccgacctcgtcaggttgctcctttccccatctgtaaggtagagatgtctgccccggagctaccagctggggatggcatccaggccatgtctcctgcaggatccaagtgctgttgtccccagggtgaccctgcctcctgctggggcccatccgctttgctgtgctgcacaggctgttttcatctgcatggtttggggtctttgtccttgtgccttttcttccccatcgccactgtacaggattttccacattgcccactgcctccttttctacatcgtctcatctccctggcctttcccgagccctgtaaatgtgtactttttcaacgtgcctcccccaggtgaggccagctctcccgggcacattcgtccacaaggatcaggccccacttacccttggctcgctcagcctgtagacttggtaactttgtacagaatctttcattattgtcttaagcatggggggctaggacccacttagtccctcctccagcctgcagctaatttaggagccttgcattccagaaaagggcaactttgtgtaaagcagcttctcccacagagctttccctgcattgttagtgatgtcgggcaaagcatcactctttaacctggggcattggccccagcagggatatcatgggaccgcagccgctccgtgcactgtctctgcccccagaggaagccctgtccatggttcctggtgcacggccacaggcctgccttgaggccaccacatctggtgtctagaacagctgcgggccccacttgggcagaaggaagaggtgctagctgctgcccctgcctgctgtgaacacctgcccagcccttccttgtctgctgaggtgctcagaccagagtgccattaaataccaactgatgtcacggagcggacggtgcattgccaaggactcacagctgtgggctcccttccagctcctcccactttcttggctgggtcttctgaggcctacgtggaatgaactacacatgtggcctcatgcccaagggtttgttagatggcctctgactctgtgggattcaacttgacttttttgccccaggaggctctgtctggaaacaggcttagctttagtgctggggtgggacctgccctgtgggccccagggaggggacagtgggggtgaggccctgaggctgtccagggtctgagctctttgcctccaacctgcttctgccccaaaaggaacaggctgttggtggcaggctcctcccggggagctgtactgtacagaccaaggtgtaaataaacagtttgctcttctaaaaaaaaaa

SEQ ID NO: 329495 - DNA, 8321 bp, Homo sapiens
gcggccgcgaccccgacggcttcctgcgcgtggagcgcgtcgcggcgctcggactgcgcttcggccagggcgaggaggtggaaaaacttgtgaaatatttggatcccaacgacctggggagaatcaacttcaaggacttttgccggggggtgttcgccatgaaagggtgcgaggagctgctgaaggatgtgctgtcggtggagagcgcggggacgctgccgtgcgcgccagagatcccagactgcgtggagcagggcagcgaggtcacaggccccacctttgctgatggcgagctcatccccagggaacccggcttttttcccgaggacgaggaggaggctatgacgctggcgccacctgagggcccccaggagttgtacacagacagccccatggagagcactcagagcctggaggggtctgtcgggagtcctgccgagaaggacgggggacttgggggcctgtttctgccagaagacaagtccctggtccacactccatccatgacgacctcagacctttctacacactccaccacctcgctcatcagcaatgaggagcagtttgaagactatggggagggtgacgatgtggactgtgcccccagcagcccttgccccgatgatgagaccaggaccaacgtctactcggacctggggtcttcggtgtcttccagtgcggggcagacgcctaggaaaatgcggcacgtgtacaacagcgaattgctagatgtttactgctctcaatgctgcaagaaaatcaacctgctcaatgacttggaagcccgactgaaaaacctgaaggccaacagccccaaccgaaagatctccagcacggcctttggacggcagctcatgcacagcagcaacttcagcagcagcaatggcagcaccgaagacctgttccgggacagcattgactcttgcgacaatgacatcacagagaaggtaagcttcctggaaaagaaggtgacagagctggagaatgacagcctgaccaatggggacctgaagagcaagctgaagcaagagaacacacagctggtgcacagggtgcatgagctggaggagatggtgaaggatcaggagaccacggccgagcaggctctggaggaggaggcgcggcgccaccgcgaggcctacggcaagctggagagggagaaggctaccgaggtggagctgctcaatgccagggtgcagcagttggaggaagaaaatacagagcttagaacaacagtgactcggctcaagtctcaaacagagaaactggatgaggagcggcagcgcatgtctgaccgtctggaggacaccagcctgcggctcaaagatgagatggacctgtacaagcgcatgatggacaagctgcgacagaaccgccttgagttccagaaggagcgggaggcgacgcaggagctcatcgaggacttgcggaaggagctggagcacctgcagatgtacaagctggactgcgagcggccaggcaggggccgcagtgcctcctctggcctaggcgagttcaatgccagggcccgcgaggtggagctcgagcacgaggtcaagcggctcaagcaggagaattataagctgcgggatcagaacgacgacttgaatgggcagattttgagcctcagcctctacgaagcaaaaaacctctttgctgcccagactaaagcccagtctctggctgcggagatagacaccgcctcgcgcgatgagctaatggaagccctgaaggagcaggaggagatcaacttccggctgaggcagtacatggacaagattatcctcgccatcctggaccacaatccctccatcctcgagatcaaacactaaggcacggggctggctgcagagcagccttaggaccctgggaccaagggcagaccctgcccaaggatgcaggcctaagccgggcctcacactcacactgtaaatgtctctctggccaccatgcgttacgtgtacccgtgtatatgtggggaggctgtgcacacgagcgaggggtgagtggccgtggctgtgggcagcatccacacggttagccgtgcatgcactttgtggcccctttgcaaggggcagagggtactggaagtgggaggaggcaaggtctgctatcaggagttactgtaaaaacaagaactggaagctcgtgtttccggtactgggtaaaatgattctacctctggggataaggattcacattcgctctagtacgatgggctctttcaccccactcctagtccccttgggagtgggagcaaaattgtgatctttcctaggagtttgaatgccccatatttgtgtcctcgccagctctttggccacctttcaagccccagtgttcaagctcagagaggatgaaggggcatctggagggtccatgagatggggccctcaccaaatgccttggccaccggccagcagccctctgtgatgtgtgtgcagagtgaacagaggactcaggtttcatagcagctagtgcggggcatcctcatcctgtacctatagagttcgtgcactcccccatccatgctacctacctccccgtttctgtttcagttttaagacaatgaagcagcattcactgcgtcattgtaacatgaagggataaaaatgaaggagaaggagggtttgggatgggtgtctaaggcaggagttgacatcgggcaaccaaagaaatgagttttggggaggaacacaactcccatcccagtcagtttccttcccatggctgcatcttaagatggatgcacggagaaaccgtctgcctggctccctgtcttcattctccacgcagcctggtgatggcaggcctgggtttggatttcagaatcctagctccgggctccactcgtgtggcagcaagactgcttcgttccagcgtttagaaacacacctgtatttgattctcagccaggggagcactcgctgcactggtgggaggcggttgggaaagttgcaggaaaaccttagtcttccatccttctgacccatggtggaaattcacaccatggatttttaatggatctttgttctaggcagctgggaatagacatggtacttaccttagagttttccaatttatctcaattttatatggcttgtgattcattttcttaatccaaatatatataaacgtgtgtggtcttattcttccccctgcagtttcttgctttcttcagcacatcttatagtatgagaaggaaggtttgggcatgttgggaagggcggtggagggggagttgcagaaagagagggcagtgagggtgaggagaggggatctggggacttgggtgtgacacctgcttgacagaggcagggctgtggccaggaccaaccttcaattccattccaatcagcctttgcatttgttggatctcgtggcttctttttaatcttttgttggggattagtttcatgctgcacataatggggttgcactggtctgacccaggactttggagccacccacactgggaagactaggctaggcagtcggtcttctaggagtttctcagccccttaggacgcgggtctccttgggctcccccaagggttctgcgaagaggcagtggaagaaggcatgaggagagggtctcttgagaatttgccaataggaaggagtggccacggctgaaaggaacaagacagatcctgacatagctttggcctgggtgttaggtcagaaggagtactggtgcgtgggggccttaccccagggttgagtattttatatgtaaaatgttatctgccctttggctgcattggaatttcagagaaggctgcagaggcctgggttacacagcctgagtcacaacgtgggaaggaatctctgccacgggaaaggtgggcggaagcagctggcagcctggggcgtgcttcaggctcctccctctaaggggcgccatgggaacaggctccggagggagccggcgtctgaaaggcccccgggacctgctgcagtgccagaggggcctctggagcaggcctggcttttaaatggggggctgaattccagctcacacacacctcaagtccaaccttactttcttcagccagaatacatttcttgtaaaacctggcttgttgcttggcttttaaagatggtgtatgtttgtaaaaatattcttctgggctcaaaagctagcttgagggggcagatgccccaggtgtcccagctccacagcccctggcagatcccagaccccttggtggcaggtcccagagcctaggtggtaggagcttgatctttgtttctgcccttacccctcagtagtggggctgcgaggtagtagacaggatgcccagttaagtttgaatttcagatagaaaataattttagaataaatatgttctatctaatacatgggacagatgttatttttagagataggatcttgctctgttgcccaggctggagtgtagtggtatgatcatagctcaccacaaccttgaactcccaggctcaagcgatcctcccgccttaactgcctgagtagctgggactacaggcatgcaccaccacgcccagctaatttttcttattttttgtagagacagggtctcactgtgttgcctcactcgagctgctgacctcaagtgatcctcccacctcagcctgccaaagcactgggattacaggcatgagccaccatgcctggccaggacatatttgaaatggggagattttaaaaattctgatgattagactgaatcctcagacgttctggtttgattgttgtgggtgtagcccaggcatgggattttttaaagagctgctcaggtaattccaatttaattgcgtgtcctacttgggttttttgtttgtttttattgtttttgctaaacctggcaaccctaccgagtagggattagcagtaacttatctgaaatttagaggtgttttgggggtggggcgagggtttctgtagtagactcagattttacatggccctgagctgcccttgcgttcagttggaagccacgcaaaatgaactgaaccaggagtgagcttcgtgtacattatctattagaaaatgaagtaccttctggttcagctagtccctgtgcgttgagaggctttaagaaacttctagtaaaaatgtttttttcttttagctttgaattggccagagtttatcctagattattttattttaaattggtagaattctttgcgaactgtcacagagaaattccttttcatgactttatttctgacctattaaaacatgaacaggccaggcatggtggctcacgcctgtaatcctagcacttgggaggcagtggcaggcggatcacttgagctcaggagtcctaaaccagcctgggcaacatagtgataccttgtctctaccaaaagttaaaaaaaaaaaaaaaaaagctcaagaacctgcacgagggcctaaaacagtgggctcagctttggctgtgcattggaatcacctggggagatttgtaagcttctgctgtctgggctgaacccccagaggttcggattgaattggtgtggggtgtggtccaggcatcgagatgtgtaaagacctccccaggtgatgatatgcagtccgaggttgagactgccctgtcctgcaaggtcgttggccagaggtagaggaaactggtcaaagtggctgttgggcttgtcaagcccgtggctgaatgacagtgagctctcttgctgggagggttccttttcctgttgttgaatggtcctggcctgcaggatgggaggccagatgccttcaggagctggtggatccagctgttctcaccagcctggaggttagcagaccagagtgggtgggcaggaccttggcctggtgcccctggaatcagtgggtggcatgtgttgggatatactggctacaggctcatctcaaagagcaggtagaacagagtcagcagggaactgacaggtggggctgtccccctgaaagcagccgcagaaacagctgccacctatttgcatagctgagcaggaggacatactgtctttgtgggttttgcttctggtctgtttcctgactgggttgataaagggagtcccagctcgttccctgttagccaaaccagcatcctgctcacacaccggacactccaggtgctagtccactggtgctggtgttcaggggagttgggggggggggcgcggggacagaagcgcgggttcttggttccaatgagggacttagcagaagcctccaggggccagcagggccaggtgaaacttgggagaaatgaagccctctgtgtcctgtgtgtgtggtggggtttaatgcattagcaaatttaaacttaaaaactaactctaggccgggcacggtggctcacacctgtaatcccagcactttgggaggccaaggcaggtggattgcctgagctcaggagttcgagaccagcctggacaacatggtgaaactcttgtctttatttttttaaaaaaacaaaaagtaactttcgatgtgatcataccaggaaagttttgcgtggtcaccatgccaagaaaatgactttggttgcccagcagatccacagcgactctttctcaagggctactgtggattctagattgaggaaaggggccacttaggactcagtgctggtatcctccacagtcctttctcccagactctggccctccctttgggacccaggaaatcccctctagggtgacgctgctggctaggaagactgaggtctgctgcgccaaggggcctcaagttagaagggccatgccgtcagtggatgactttgagcgctgatcctagggacctgccaggtcctcacttcctgccctgggtgcacacatgaatggggcagccagcaggaagcgggagaggctggaaccaggagcctgccctacctgcatggcaggacaactctgaggcccttctgccatattctctgctacccaccagagaaaataggctgccttctagaaagatttgtttctaaaagcgtagaccctggggaagtataatgtcaccatgctcaccaggcgaggtttcccatatgacctccctgccccgacctcgtcaggttgctcctttccccatctgtaaggtagagatgtctgccccggagctaccagctggggatggcatccaggccatgtctcctgcaggatccaagtgctgttgtccccagggtgaccctgcctcctgctggggcccatccgctttgctgtgctgcacaggctgttttcatctgcatggtttggggtctttgtccttgtgccttttcttccccatcgccactgtacaggattttccacattgcccactgcctccttttctacatcgtctcatctccctggcctttcccgagccctgtaaatgtgtactttttcaacgtgcctcccccaggtgaggccagctctcccgggcacattcgtccacaaggatcaggccccacttacccttggctcgctcagcctgtagacttggtaactttgtacagaatctttcattattgtcttaagcatggggggctaggacccacttagtccctcctccagcctgcagctaatttaggagccttgcattccagaaaagggcaactttgtgtaaagcagcttctcccacagagctttccctgcattgttagtgatgtcgggcaaagcatcactctttaacctggggcattggccccagcagggatatcatgggaccgcagccgctccgtgcactgtctctgcccccagaggaagccctgtccatggttcctggtgcacggccacaggcctgccttgaggccaccacatctggtgtctagaacagctgcgggccccacttgggcagaaggaagaggtgctagctgctgcccctgcctgctgtgaacacctgcccagcccttccttgtctgctgaggtgctcagaccagagtgccattaaataccaactgatgtcacggagcggacggtgcattgccaaggactcacagctgtgggctcccttccagctcctcccactttcttggctgggtcttctgaggcctacgtggaatgaactacacatgtggcctcatgcccaagggtttgttagatggcctctgactctgtgggattcaacttgacttttttgccccaggaggctctgtctggaaacaggcttagctttagtgctggggtgggacctgccctgtgggccccagggaggggacagtgggggtgaggccctgaggctgtccagggtctgagctctttgcctccaacctgcttctgccccaaaaggaacaggctgttggtggcaggctcctcccggggagctgtactgtacagaccaaggtgtaaataaacagtttgctcttctaaaaaaaaaa

SEQ ID NO: 329496 - DNA, 866 bp, Homo sapiens
attctggagctggaataatacgtatctggaaattttgtgtaatggtttccttaaatagaccctttattcttggtcccctctaaagtctagcagagacataagtcaggctcttctcaaatagggactctgttcaatcaactcacgccaagaccattgattgggaacatccaacatggggaggcaggctctgggtctggtgtttgcagggggtcccggaggggctcatggacaggaaacaaaggagatgcaagcaatactcacggaggcacctacaaggggatggggtcatttgaactgggtcttaaagggagagtggtctggagtgaccagaagatagaggaggggagaactaaataaaaatgtattcattcattcataactttctgagtgttcaatgagggaaggatgtgaagctcggtgccagaaacacagtgtgaaccaggaaaacggaaatggcccccgcccttgtgtagtgtgaaacctcatgggatagacagatgaggaacacacaggcaaatgcaaaccaccagccatgtcagtgctgaaagggaggccccaggtttctgccccccataagtggggagccaggccagggccctgccaagccctcccagcccagctggcccactggctcctcaggcctgggagagaacaacgacagtggtctgaagatagaggggaactagcgacccatgtgcacctgccacattctaggaacagagctactacagcttcagggttaagcgcataattctggtgttcaaatcctagtttctcccctacccagccctgtagccctaagcaagttaccaaactccacaatgcctcagatgcaaggcggggctcacactcctgtttattccatc

SEQ ID NO: 329497 - DNA, 6016 bp, Homo sapiens
attaaagttggccttatcataaatttcccaatagtatgcctatttcaagtggttctgaaaatgtttgagaatgatgaagatctcttgttatagacagtttttttttcagagcagtattttaagtgcaaagtgtttttttgttgttgttgttgttgggaaaataagaatcttccatattgtagtgtagacagaggacaagtgctcttttgttctcaaacattctattttttcaagtgtattttacccacttatgtgactgagtctgagcctttgctaagggtactgcagctggattatgtagtggaaccaggtccagaaaaagaattgctaaagaatgcaagtaaacaggatgtcagatgttatccttagcctatttccctaaacatagctttttggctgcaaagtaaaatgccattcttctagcttctgcttatacacagtgatggctgacagcaggcataatcttcgtttgcttggcacgttgtcaccatgcaactcaacgtgttttgcaaggaatgatcgtgacacaccatctctgggagatactatgaggacatccggctatttcttggaagaattttctgtctaccttctttgagccctgttgtgccagcacatctccccatgaggctcagatctgtctgacctaagagccagttggcatcgtcctcctaacagaagccagattttcactggggctagactatttattgacagtgttttcccagactggcccatgagtgtctcatttccaaggtcccctgaagtgctggctcacctctgtttcccaaagcacttgcttgcttgtctctcctccctccccagcatccttttcactttcttcccttataacttcttgcactctgtgtgcgtgtgtgtgtatgcgtgtgtgcatgtgcgtttcttctttttttttatcctaacgaatttgttttgcaggttttgaaaaggaaaaaccagcgttatccaggattgttaaattaattcttatctgtttccacatcttggaccgtgatctctgtggttttaaaatcccatattttgagtgggttccgctgttgtttaagaaaagttgctttaaacctttgctctgcaagcacccgaagagaactcataaaaaggaagacaacagcagatgcaatcgcggatgtggcttagtccttgcagctgccccagagtgctgtttggagtgtaccgtcctcagtaatgaatccagaagaacaaatcgtgacatggcttatatctttgggagttttagagtcccctaaaaagaccatctgtgatccggaggagtttttaaagtcctcgctgaaaaatggggtagttctgtgcaaactgatcaacagactcatgcctggctctgtggaaaagttttgtctggatccccaaactgaagctgactgcatcaacaacatcaatgacttcctgaaaggatgtgcaaccctccaagtggaaatatttgatcctgatgacctttattcaggggtcaatttctccaaggtactgagtactcttttagctgtcaacaaagcaacagaagatcagctatcagaaagaccatgtggacgttcctcttctcttagtgctgctaatacttctcagacaaacccacagggagcagtttctagcacagtttcagggctgcaaaggcagtcaaagacagtggagatgacggaaaatggaagtcatcagttgatagtaaaagcaagattcaactttaagcagactaatgaggatgaactgtcagtttgtaagggggacatcatttacgtcacacgagttgaagaaggaggctggtgggaaggcacattaaatgggagaacaggctggttccccagtaattatgtccgtgaaattaaatccagtgagagacctctctccccaaaagccgtcaaaggatttgaaactgctccacttaccaagaattattatactgtggtgttacagaacatcctggacactgaaaaagaatatgctaaagaacttcagtctcttcttgttacttacttaagacccctgcagtccaataacaatctgagtactgtggaggttacatctttactgggaaacttcgaggaagtatgcacatttcaacagacactctgccaagccttggaagaatgttcaaagtttccagaaaaccagcacaaagtaggaggttgtctactgagtctcatgcctcattttaaatctatgtatctggcttactgtgcaaaccatccttcagctgtaaatgtgctcactcagcacagtgatgagttggaacaattcatggaaaatcaaggtgcatcgagcccaggtatcctcattttaacaacaaacctcagcaaaccattcatgcgactggagaaatatgttactctcttgcaagagttagaacggcatatggaggatactcatccagatcatcaggatattctgaaagcaatcgtagcattcaaaactctcatggggcaatgtcaagatctgaggaagagaaaacagctggagttacagatactgtccgaacctattcaggcatgggaaggagaagatattaaaaacttgggaaatgtgatttttatgtcacaagtaatggtgcagtatggagcatgtgaggaaaaagaggagcggtaccttatgttattttcaaatgtcctgataatgttatctgcaagtcctcggatgagtggctttatctatcagggaaaaataccaatagcaggaacggtggtgactagattagatgaaattgaagggaatgactgcacatttgaaatcactggtaacacagtggagagaattgtggtccattgtaacaacaaccaggacttccaggaatggttggagcagctgaacagactgatcagaggacctgcctcttgcagttcattatccaaaacctcatcgtcatcatgtagtgctcattcttcttttagctctaccggacagccccgaggacccttggagcctcctcaaattataaaaccgtggagtttaagttgtctacgacctgcacctccacttagaccatcagcagcactaggttataaagagaggatgtcttatatcttaaaggagtctagtaaaagccctaaaacgatgaagaaatttcttcataaaaggaagactgagagaaaaccatcggaggaggaatatgtgattaggaaaagtacagctgctctggaagaggatgctcaaatccttaaagtgatcgaagcctactgcaccagcgcaaattttcaacaaggccatggctcaagtactcgaaaagattccattccacaagtcctactccctgaggaagagaaactcatcattgaagaaaccagaagcaacggccagaccatcatggaagaaaagagccttgttgatactgtttacgccttgaaggacgaggtcagagaactgaagcaggaaaataaaagaatgaagcaatgcctggaagaagaactgaaatcaagaagggacctagaaaagctggtgcggaggcttttgaagcaaacagatgagtgtattcgaggcgagtccagtagcaagacctcaattcttccataaccatcactgtgccactgggtggagtgtgccttcagggcatcttgaaatgtcccgctgaatgatttgactcagtttgctcacttctttggcttttgttttgtgtttgagtctctctctctctctccctctctcttctctttctctccccgctgtgtgcatatgtgtgtgcgtgcacgtgcgcgcttgggcatttgctgttgtttggttattggttggttgttcattttttttttcaacaggtgaaaaagcaggaagtggtggtagagatggcctcagagtcttttccattcagtaagaaagagaaagggaatgcaggccagttacttaaaaggtcttcagattgccttcagttcacagtgcctctgcaacagccattgccctcaggtcacattctttgggctggctgcccttgcaaagcagctggccaaggcttattaaatgtgaacccaacttttccccagggctttcctgtacctgcaagcctcttagtacttaatttaccgaaggcaaatcttccagactatggcttgagtaggatgaaagacaaacacatctgcccaatgatccagctgcccttccttagaccatcacatgcctcccctcaatcacaggttttaaaattactgccctatgttgtctataagaccaagaaaactgtagtacccttattccttttgtgtcatgtaaattgtaactcaggggggcagaagctctggtcacccacaccaacaccaaatccatcagcaaattctactggacaatcctcccttttagtagcagagttgaccgccttttcccattgcatgataggtttctttccctcattctgcctagtgtgtaagttttctatttccccagtacttttagccaaccttaccaagtggtgtgtaaactagtatgtatgtgctttgcttactttttaaaaaaatgtagttagactgtgaggagttactttatgtacgttgcatattcaaactgtgatgttttatccttcaaaacaatctgcattaagaagatattgtgccctactagacagctttcattcactttattactctctcatatatgctgtgagaagttgtaatattaattggcctctttgggtgggactctaagcagtatttgcagaaatatgcttctggtccaacttgtacatccagaacaaaagggcccctctagtagctgtgtgctggattattcaggactgattaactcaagttgctcattgaatcacatcatccactttatcccagaaactagaactgtgagaaaccaggtttagaagacagtcacagaacagcacacatccaaattcagcgccattgaaagttggcctaaggctcagtgccactcacccctccctccccaaaagacaagagaaatttggccagatggggaaggtcactggaaattgaggccaaagggctgatcagaattgcctttataatatatttgatggatgcctataaatgtgggttttgcaaatattgtttaaaaaccaaacttgaagccaggcatggtggcccacacctgtggtcccagctactcaggaggctgaggtgggaggatcatttgagcccaggaggtcaaggctgcagtgagctgtgatgacaccactgcactccaacctaggtaacagagagacacctctgtctctgaaaaaacaaaacttgaagtttgaaacccccagcttgctgaggagccctttttatttttggtactgagagtctcaaggtcccatagctacatggtacagggctgttgtctgcttgctgcacagcagaaattacaccatccacaggaaatggactatttttgcagtccaacatcagccaaccacacacagccgtgtttggaagctgaagagtaaagaaatttctaggaatggctgttgttctgttttttagcacagccatttagatataacatccttcacttaaaaattaaaaacatcagtactaccaccaccaccaacaacatcaacacagatcttcacatctgcccattctgtggttagtcaatggcttgcaataaatgtgcaaactgcatctataggaaacatttttgtgattacggaatactttagttgattgctgaaaatattgaaaggtcttcattttacagtgatgagtacatatgcatgtttcggggacttggcccttctgatgaggggccctcggtactctggataacgaagcttgtgcagagtggtaaccatgcttacacactaaactataatataaaggaaatgaagccatgttaatctgagagcagtgtcgccatagttgtgttgtttacaatactctataaatgggttcctgttgccctgtaattaaactgctgcccgtagaggcctttcagttccttttctgtccttccccttcttaacacaagctcaaattttctaacttgtttttattttgaagacttttaaaatggacattttcaatacataaaaataaacagtgctttataaaaa

SEQ ID NO: 329498 - DNA, 705 bp, Homo sapiens
acccctttatttgggactaaagtccaggtgcccatagcacatggaccagtcaactcaaccaaccacacacagccgtgtttggaagctgaagagtaaagaaatttctaggaatggctgttgttctgttttttagcacagccatttagatataacatccttcacttaaaaattaaaaacatcagtactaccaccaccaccaacaacatcaacacagatcttcacatctgcccattctgtggttagtcaatggcttgcaataaatgtgcaaactgcatctataggaaacatttttgtgattacggaatactttagttgattgctgaaaatattgaaaggtcttcattttacagtgatgagtacatatgcatgtttcggggacttggcccttctgatgaggggccctcggtactctggataacgaagcttgtgcagagtggtaaccatgcttacacactaaactataatataaaggaaatgaagccatgttaatctgagagcagtgtcgccatagttgtgttgtttacaatactctataaatgggttcctgttgccctgtaattaaactgctgcccgtagaggcctttcagttccttttctgtccttccccttcttaacacaagctcaaattttctaacttgtttttattttgaagacttttaaaatggacattttcaatacataaaaataaacagtgctttataaaaa

SEQ ID NO: 329499 - DNA, 4761 bp, Homo sapiens
agtttcgccctggtggcggccgcgctcagggcagggtcccagctccggctgggttgatctgttcccgcagccttggcacaggcttgcccgcccgctcgccggccccgtgactcgggagggcgaacggcttccaggaggcggcggcggcgcggctggagtgagggagcagctggaggacaggcgggcagcggccgagccagatatttgatcctgatgacctttattcaggggtcaatttctccaaggtactgagtactcttttagctgtcaacaaagcaacagaagatcagctatcagaaagaccatgtggacgttcctcttctcttagtgctgctaatacttctcagacaaacccacagggagcagtttctagcacagtttcagggctgcaaaggcagtcaaagacagtggagatgacggaaaatggaagtcatcagttgatagtaaaagcaagattcaactttaagcagactaatgaggatgaactgtcagtttgtaagggggacatcatttacgtcacacgagttgaagaaggaggctggtgggaaggcacattaaatgggagaacaggctggttccccagtaattatgtccgtgaaattaaatccagtgagagacctctctccccaaaagccgtcaaaggatttgaaactgctccacttaccaagaattattatactgtggtgttacagaacatcctggacactgaaaaagaatatgctaaagaacttcagtctcttcttgttacttacttaagacccctgcagtccaataacaatctgagtactgtggaggttacatctttactgggaaacttcgaggaagtatgcacatttcaacagacactctgccaagccttggaagaatgttcaaagtttccagaaaaccagcacaaagtaggaggttgtctactgagtctcatgcctcattttaaatctatgtatctggcttactgtgcaaaccatccttcagctgtaaatgtgctcactcagcacagtgatgagttggaacaattcatggaaaatcaaggtgcatcgagcccaggtatcctcattttaacaacaaacctcagcaaaccattcatgcgactggagaaatatgttactctcttgcaagagttagaacggcatatggaggatactcatccagatcatcaggatattctgaaagcaatcgtagcattcaaaactctcatggggcaatgtcaagatctgaggaagagaaaacagctggagttacagatactgtccgaacctattcaggcatgggaaggagaagatattaaaaacttgggaaatgtgatttttatgtcacaagtaatggtgcagtatggagcatgtgaggaaaaagaggagcggtaccttatgttattttcaaatgtcctgataatgttatctgcaagtcctcggatgagtggctttatctatcagggaaaaataccaatagcaggaacggtggtgactagattagatgaaattgaagggaatgactgcacatttgaaatcactggtaacacagtggagagaattgtggtccattgtaacaacaaccaggacttccaggaatggttggagcagctgaacagactgatcagaggacctgcctcttgcagttcattatccaaaacctcatcgtcatcatgtagtgctcattcttcttttagctctaccggacagccccgaggacccttggagcctcctcaaattataaaaccgtggagtttaagttgtctacgacctgcacctccacttagaccatcagcagcactaggttataaagagaggatgtcttatatcttaaaggagtctagtaaaagccctaaaacgatgaagaaatttcttcataaaaggaagactgagagaaaaccatcggaggaggaatatgtgattaggaaaagtacagctgctctggaagaggatgctcaaatccttaaagtgatcgaagcctactgcaccagcgcaaattttcaacaaggccatggctcaagtactcgaaaagattccattccacaagtcctactccctgaggaagagaaactcatcattgaagaaaccagaagcaacggccagaccatcatggaagaaaagagccttgttgatactgtttacgccttgaaggacgaggtcagagaactgaagcaggaaaataaaagaatgaagcaatgcctggaagaagaactgaaatcaagaagggacctagaaaagctggtgcggaggcttttgaagcaaacagatgagtgtattcgaggcgagtccagtagcaagacctcaattcttccataaccatcactgtgccactgggtggagtgtgccttcagggcatcttgaaatgtcccgctgaatgatttgactcagtttgctcacttctttggcttttgttttgtgtttgagtctctctctctctctccctctctcttctctttctctccccgctgtgtgcatatgtgtgtgcgtgcacgtgcgcgcttgggcatttgctgttgtttggttattggttggttgttcattttttttttcaacaggtgaaaaagcaggaagtggtggtagagatggcctcagagtcttttccattcagtaagaaagagaaagggaatgcaggccagttacttaaaaggtcttcagattgccttcagttcacagtgcctctgcaacagccattgccctcaggtcacattctttgggctggctgcccttgcaaagcagctggccaaggcttattaaatgtgaacccaacttttccccagggctttcctgtacctgcaagcctcttagtacttaatttaccgaaggcaaatcttccagactatggcttgagtaggatgaaagacaaacacatctgcccaatgatccagctgcccttccttagaccatcacatgcctcccctcaatcacaggttttaaaattactgccctatgttgtctataagaccaagaaaactgtagtacccttattccttttgtgtcatgtaaattgtaactcaggggggcagaagctctggtcacccacaccaacaccaaatccatcagcaaattctactggacaatcctcccttttagtagcagagttgaccgccttttcccattgcatgataggtttctttccctcattctgcctagtgtgtaagttttctatttccccagtacttttagccaaccttaccaagtggtgtgtaaactagtatgtatgtgctttgcttactttttaaaaaaatgtagttagactgtgaggagttactttatgtacgttgcatattcaaactgtgatgttttatccttcaaaacaatctgcattaagaagatattgtgccctactagacagctttcattcactttattactctctcatatatgctgtgagaagttgtaatattaattggcctctttgggtgggactctaagcagtatttgcagaaatatgcttctggtccaacttgtacatccagaacaaaagggcccctctagtagctgtgtgctggattattcaggactgattaactcaagttgctcattgaatcacatcatccactttatcccagaaactagaactgtgagaaaccaggtttagaagacagtcacagaacagcacacatccaaattcagcgccattgaaagttggcctaaggctcagtgccactcacccctccctccccaaaagacaagagaaatttggccagatggggaaggtcactggaaattgaggccaaagggctgatcagaattgcctttataatatatttgatggatgcctataaatgtgggttttgcaaatattgtttaaaaaccaaacttgaagccaggcatggtggcccacacctgtggtcccagctactcaggaggctgaggtgggaggatcatttgagcccaggaggtcaaggctgcagtgagctgtgatgacaccactgcactccaacctaggtaacagagagacacctctgtctctgaaaaaacaaaacttgaagtttgaaacccccagcttgctgaggagccctttttatttttggtactgagagtctcaaggtcccatagctacatggtacagggctgttgtctgcttgctgcacagcagaaattacaccatccacaggaaatggactatttttgcagtccaacatcagccaaccacacacagccgtgtttggaagctgaagagtaaagaaatttctaggaatggctgttgttctgttttttagcacagccatttagatataacatccttcacttaaaaattaaaaacatcagtactaccaccaccaccaacaacatcaacacagatcttcacatctgcccattctgtggttagtcaatggcttgcaataaatgtgcaaactgcatctataggaaacatttttgtgattacggaatactttagttgattgctgaaaatattgaaaggtcttcattttacagtgatgagtacatatgcatgtttcggggacttggcccttctgatgaggggccctcggtactctggataacgaagcttgtgcagagtggtaaccatgcttacacactaaactataatataaaggaaatgaagccatgttaatctgagagcagtgtcgccatagttgtgttgtttacaatactctataaatgggttcctgttgccctgtaattaaactgctgcccgtagaggcctttcagttccttttctgtccttccccttcttaacacaagctcaaattttctaacttgtttttattttgaagacttttaaaatggacattttcaatacataaaaataaacagtgctttataaaaa

SEQ ID NO: 329500 - DNA, 6475 bp, Homo sapiens
  misc_feature (6058)..(6058): n is a, c, g, or t
attaaagttggccttatcataaatttcccaatagtatgcctatttcaagtggttctgaaaatgtttgagaatgatgaagatctcttgttatagacagtttttttttcagagcagtattttaagtgcaaagtgtttttttgttgttgttgttgttgggaaaataagaatcttccatattgtagtgtagacagaggacaagtgctcttttgttctcaaacattctattttttcaagtgtattttacccacttatgtgactgagtctgagcctttgctaagggtactgcagctggattatgtagtggaaccaggtccagaaaaagaattgctaaagaatgcaagtaaacaggatgtcagatgttatccttagcctatttccctaaacatagctttttggctgcaaagtaaaatgccattcttctagcttctgcttatacacagtgatggctgacagcaggcataatcttcgtttgcttggcacgttgtcaccatgcaactcaacgtgttttgcaaggaatgatcgtgacacaccatctctgggagatactatgaggacatccggctatttcttggaagaattttctgtctaccttctttgagccctgttgtgccagcacatctccccatgaggctcagatctgtctgacctaagagccagttggcatcgtcctcctaacagaagccagattttcactggggctagactatttattgacagtgttttcccagactggcccatgagtgtctcatttccaaggtcccctgaagtgctggctcacctctgtttcccaaagcacttgcttgcttgtctctcctccctccccagcatccttttcactttcttcccttataacttcttgcactctgtgtgcgtgtgtgtgtatgcgtgtgtgcatgtgcgtttcttctttttttttatcctaacgaatttgttttgcaggttttgaaaaggaaaaaccagcgttatccaggattgttaaattaattcttatctgtttccacatcttggaccgtgatctctgtggttttaaaatcccatattttgagtgggttccgctgttgtttaagaaaagttgctttaaacctttgctctgcaagcacccgaagagaactcataaaaaggaagacaacagcagatgcaatcgcggatgtggcttagtccttgcagctgccccagagtgctgtttggagtgtaccgtcctcagtaatgaatccagaagaacaaatcgtgacatggcttatatctttgggagttttagagtcccctaaaaagaccatctgtgatccggaggagtttttaaagtcctcgctgaaaaatggggtagttctgtgcaaactgatcaacagactcatgcctggctctgtggaaaagttttgtctggatccccaaactgaagctgactgcatcaacaacatcaatgacttcctgaaaggatgtgcaaccctccaagtggaaatatttgatcctgatgacctttattcaggggtcaatttctccaaggtactgagtactcttttagctgtcaacaaagcaacagaagatcagctatcagaaagaccatgtggacgttcctcttctcttagtgctgctaatacttctcagacaaacccacagggagcagtttctagcacagtttcagggctgcaaaggcagtcaaagacagtggagatgacggaaaatggaagtcatcagttgatagtaaaagcaagattcaactttaagcagactaatgaggatgaactgtcagtttgtaagggggacatcatttacgtcacacgagttgaagaaggaggctggtgggaaggcacattaaatgggagaacaggctggttccccagtaattatgtccgtgaaattaaatccagtgagagacctctctccccaaaagccgtcaaaggatttgaaactgctccacttaccaagaattattatactgtggtgttacagaacatcctggacactgaaaaagaatatgctaaagaacttcagtctcttcttgttacttacttaagacccctgcagtccaataacaatctgagtactgtggaggttacatctttactgggaaacttcgaggaagtatgcacatttcaacagacactctgccaagccttggaagaatgttcaaagtttccagaaaaccagcacaaagtaggaggttgtctactgagtctcatgcctcattttaaatctatgtatctggcttactgtgcaaaccatccttcagctgtaaatgtgctcactcagcacagtgatgagttggaacaattcatggaaaatcaaggtgcatcgagcccaggtatcctcattttaacaacaaacctcagcaaaccattcatgcgactggagaaatatgttactctcttgcaagagttagaacggcatatggaggatactcatccagatcatcaggatattctgaaagcaatcgtagcattcaaaactctcatggggcaatgtcaagatctgaggaagagaaaacagctggagttacagatactgtccgaacctattcaggcatgggaaggagaagatattaaaaacttgggaaatgtgatttttatgtcacaagtaatggtgcagtatggagcatgtgaggaaaaagaggagcggtaccttatgttattttcaaatgtcctgataatgttatctgcaagtcctcggatgagtggctttatctatcagggaaaaataccaatagcaggaacggtggtgactagattagatgaaattgaagggaatgactgcacatttgaaatcactggtaacacagtggagagaattgtggtccattgtaacaacaaccaggacttccaggaatggttggagcagctgaacagactgatcagaggacctgcctcttgcagttcattatccaaaacctcatcgtcatcatgtagtgctcattcttcttttagctctaccggacagccccgaggacccttggagcctcctcaaattataaaaccgtggagtttaagttgtctacgacctgcacctccacttagaccatcagcagcactaggttataaagagaggatgtcttatatcttaaaggagtctagtaaaagccctaaaacgatgaagaaatttcttcataaaaggaagactgagagaaaaccatcggaggaggaatatgtgattaggaaaagtacagctgctctggaagaggatgctcaaatccttaaagtgatcgaagcctactgcaccagcgcaaattttcaacaaggccatggctcaagtactcgaaaagattccattccacaagtcctactccctgaggaagagaaactcatcattgaagaaaccagaagcaacggccagaccatcatggaagaaaagagccttgttgatactgtttacgccttgaaggacgaggtcagagaactgaagcaggaaaataaaagaatgaagcaatgcctggaagaagaactgaaatcaagaagggacctagaaaagctggtgcggaggcttttgaagcaaacagatgagtgtattcgaggcgagtccagtagcaagacctcaattcttccataaccatcactgtgccactgggtggagtgtgccttcagggcatcttgaaatgtcccgctgaatgatttgactcagtttgctcacttctttggcttttgttttgtgtttgagtctctctctctctctccctctctcttctctttctctccccgctgtgtgcatatgtgtgtgcgtgcacgtgcgcgcttgggcatttgctgttgtttggttattggttggttgttcattttttttttcaacaggtgaaaaagcaggaagtggtggtagagatggcctcagagtcttttccattcagtaagaaagagaaagggaatgcaggccagttacttaaaaggtcttcagattgccttcagttcacagtgcctctgcaacagccattgccctcaggtcacattctttgggctggctgcccttgcaaagcagctggccaaggcttattaaatgtgaacccaacttttccccagggctttcctgtacctgcaagcctcttagtacttaatttaccgaaggcaaatcttccagactatggcttgagtaggatgaaagacaaacacatctgcccaatgatccagctgcccttccttagaccatcacatgcctcccctcaatcacaggttttaaaattactgccctatgttgtctataagaccaagaaaactgtagtacccttattccttttgtgtcatgtaaattgtaactcaggggggcagaagctctggtcacccacaccaacaccaaatccatcagcaaattctactggacaatcctcccttttagtagcagagttgaccgccttttcccattgcatgataggtttctttccctcattctgcctagtgtgtaagttttctatttccccagtacttttagccaaccttaccaagtggtgtgtaaactagtatgtatgtgctttgcttactttttaaaaaaatgtagttagactgtgaggagttactttatgtacgttgcatattcaaactgtgatgttttatccttcaaaacaatctgcattaagaagatattgtgccctactagacagctttcattcactttattactctctcatatatgctgtgagaagttgtaatattaattggcctctttgggtgggactctaagcagtatttgcagaaatatgcttctggtccaacttgtacatccagaacaaaagggcccctctagtagctgtgtgctggattattcaggactgattaactcaagttgctcattgaatcacatcatccactttatcccagaaactagaactgtgagaaaccaggtttagaagacagtcacagaacagcacacatccaaattcagcgccattgaaagttggcctaaggctcagtgccactcacccctccctccccaaaagacaagagaaatttggccagatggggaaggtcactggaaattgaggccaaagggctgatcagaattgcctttataatatatttgatggatgcctataaatgtgggttttgcaaatattgtttaaaaaccaaacttgaagccaggcatggtggcccacacctgtggtcccagctactcaggaggctgaggtgggaggatcatttgagcccaggaggtcaaggctgcagtgagctgtgatgacaccactgcactccaacctaggtaacagagagacacctctgtctctgaaaaaacaaaacttgaagtttgaaacccccagcttgctgaggagccctttttatttttggtactgagagtctcaaggtcccatagctacatggtacagggctgttgtctgcttgctgcacagcagaaattacaccatccacaggaaatggactatttttgcagtccaacatcagccaaccacacacagccgtgtttggaagctgaagagtaaagaaatttctaggaatggctgttgttctgttttttagcacagccatttagatataacatccttcacttaaaaattaaaaacatcagtactaccaccaccaccaacaacatcaacacagatcttcacatctgcccattctgtggttagtcaatggcttgcaataaatgtgcaaactgcatctataggaaacatttttgtgattacggaatactttagttgattgctgaaaatattgaaaggtcttcattttacagtgatgagtacatatgcatgtttcggggacttggcccttctgatgaggggccctcggtactctggataacgaagcttgtgcagagtggtaaccatgcttacacactaaactataatataaaggaaatgaagccatgttaatctgagagcagtgtcgccatagttgtgttgtttacaatactctataaatgggttcctgttgccctgtaattaaactgctgcccgtagaggcctttcagttccttttctgtccttccccttcttaacacaagctcaaattttctaacttgtttttattttgaagacttttaaaatggacattttcaatacataaaaataaacagtgctttataaaaaaaaaaaaaaaaaaaaaaaaaaaaaaaaaaaaaaaaaaaaaanaaaaaaaaaaaacactaaacccaaactattaacacctactcatcctctacactcctagtttccccttacttcgccttcttccacaccattcgctctttaaaaccctttccttcactcgaaaaactccctttttaccatatccccttcgcatcaacctctatttctttttagctcctctctaatcctctgctcctttacaccctctcatatatttcagacactccattattttttacatcaagtacctactcttctacgaacctcgttttatctccacaattcttacactctcatcgcatttctctcttttcgcacaatctttcctttcaacaacttcccctctttacatattttctatcctgtttactctctacctcctttttataccactccttatactcctttttccctcgttcc

SEQ ID NO: 329501 - DNA, 1693 bp, Homo sapiens
agtttcgccctggtggcggccgcgctcagggcagggtcccagctccggctgggttgatctgttcccgcagccttggcacaggcttgcccgcccgctcgccggccccgtgactcgggagggcgaacggcttccaggaggcggcggcggcgcggctggagtgagggagcagctggaggacaggcgggcagcggccgagccagatatttgatcctgatgacctttattcaggggtcaatttctccaaggtactgagtactcttttagctgtcaacaaagcaacagaagatcagctatcagaaagaccatgtggacgttcctcttctcttagtgctgctaatacttctcagacaaacccacagggagcagtttctagcacagtttcagggctgcaaaggcagtcaaagacagtggagatgacggaaaatggaagtcatcagttgatagtaaaagcaagattcaactttaagcagactaatgaggatgaactgtcagtttgtaagggggacatcatttacgtcacacgagttgaagaaggaggctggtgggaaggcacattaaatgggagaacaggctggttccccaaaagacaagagaaatttggccagatggggaaggtcactggaaattgaggccaaagggctgatcagaattgcctttataatatatttgatggatgcctataaatgtgggttttgcaaatattgtttaaaaaccaaacttgaagccaggcatggtggcccacacctgtggtcccagctactcaggaggctgaggtgggaggatcatttgagcccaggaggtcaaggctgcagtgagctgtgatgacaccactgcactccaacctaggtaacagagagacacctctgtctctgaaaaaacaaaacttgaagtttgaaacccccagcttgctgaggagccctttttatttttggtactgagagtctcaaggtcccatagctacatggtacagggctgttgtctgcttgctgcacagcagaaattacaccatccacaggaaatggactatttttgcagtccaacatcagccaaccacacacagccgtgtttggaagctgaagagtaaagaaatttctaggaatggctgttgttctgttttttagcacagccatttagatataacatccttcacttaaaaattaaaaacatcagtactaccaccaccaccaacaacatcaacacagatcttcacatctgcccattctgtggttagtcaatggcttgcaataaatgtgcaaactgcatctataggaaacatttttgtgattacggaatactttagttgattgctgaaaatattgaaaggtcttcattttacagtgatgagtacatatgcatgtttcggggacttggcccttctgatgaggggccctcggtactctggataacgaagcttgtgcagagtggtaaccatgcttacacactaaactataatataaaggaaatgaagccatgttaatctgagagcagtgtcgccatagttgtgttgtttacaatactctataaatgggttcctgttgccctgtaattaaactgctgcccgtagaggcctttcagttccttttctgtccttccccttcttaacacaagctcaaattttctaacttgtttttattttgaagacttttaaaatggacattttcaatacataaaaataaacagtgctttataaaaa

SEQ ID NO: 329502 - DNA, 800 bp, Homo sapiens
ggccggaccgacagcatagaatgtcttcctctacggggtcgttctggcttttttgttagaaacttggtctgaggatgtttcttccctgtccattaccattcgatgttcttttattcagagcaatgtttctgtattctgaaactggaaactgaaccagtttgtttctcctagtcaccaagcatactttcctgggtctagccagggaatggctgttgttctgttttttagcacagccatttagatataacatccttcacttaaaaattaaaaacatcagtactaccaccaccaccaacaacatcaacacagatcttcacatctgcccattctgtggttagtcaatggcttgcaataaatgtgcaaactgcatctataggaaacatttttgtgattacggaatactttagttgattgctgaaaatattgaaaggtcttcattttacagtgatgagtacatatgcatgtttcggggacttggcccttctgatgaggggccctcggtactctggataacgaagcttgtgcagagtggtaaccatgcttacacactaaactataatataaaggaaatgaagccatgttaatctgagagcagtgtcgccatagttgtgttgtttacaatactctataaatgggttcctgttgccctgtaattaaactgctgcccgtagaggcctttcagttccttttctgtccttccccttcttaacacaagctcaaattttctaacttgtttttattttgaagacttttaaaatggacattttcaatacataaaaataaacagtgctttataaaaa

SEQ ID NO: 329503 - DNA, 951 bp, Homo sapiens
acgatccatcgtggacacggtctaatatccagaacaaaaggaacttaaacaaatggacaagaaaaatccccattaaaaagtgggcaaaggacaagaacagacacttctgaaaagaagacctcatacagccaacaaacatatgaaaaaaagctcaacagcggccaggcatggtggcccacacctgtggtcccagctactcaggaggctgaggtgggaggatcatttgagcccaggaggtcaaggctgcagtgagctgtgatgacaccactgcactccaacctaggtaacagagagacacctctgtctctgaaaaaacaaaacttgaagtttgaaacccccagcttgctgaggagccctttttatttttggtactgagagtctcaaggtcccatagctacatggtacagggctgttgtctgcttgctgcacagcagaaattacaccaacaacatcaacacagatcttcacatctgcccattctgtggttagtcaatggcttgcaataaatgtgcaaactgcatctataggaaacatttttgtgattacggaatactttagttgattgctgaaaatattgaaaggtcttcattttacagtgatgagtacatatgcatgtttcggggacttggcccttctgatgaggggccctcggtactctggataacgaagcttgtgcagagtggtaaccatgcttacacactaaactataatataaaggaaatgaagccatgttaatctgagagcagtgtcgccatagttgtgttgtttacaatactctataaatgggttcctgttgccctgtaattaaactgctgcccgtagaggcctttcagttccttttctgtccttccccttcttaacacaagctcaaattttctaacttgtttttattttgaagacttttaaaatggacattttcaatacataaaaataaacagtgctttataaaaa

SEQ ID NO: 329504 - DNA, 263 bp, Homo sapiens
atcggaggaggaatatgtgattaggaaaagtatgtgttttgtactttctgaaagttgtttatggataaattaacatgagaatcttcttttatgtgaggatttatttgaaagcagatgattggagcaattttttcttgacatcgtcttttacatataaagaagaatgcatggaaagctttggtcacttcttaaacatttgaataagcttcttacggctgcacttcatgtcatcttaggcagatgtcatctgtatcatttttgtg

SEQ ID NO: 329505 - DNA, 315 bp, Homo sapiens
agttaaattagaagaggatcagggcagggaagaagaatccaaaaggtttcccagagacaggcaggagaatcgacaggctgctttgtcatagatgctgagggagggaaggtcgaggaaagaaagagagtcagtgatgaaagctgccccgaggatgagcaggaggagcccttggaagggcccccctctgtttgataatcaacaaatctttccccatcataggaaaataaaagaatgaagcaatgcctggaagaagaactgaaatcaagaagggacctagaaaagctggtgcggaggcttttgaagcaaacagatgag

SEQ ID NO: 329506 - DNA, 400 bp, Homo sapiens
gacggaaaatggaagtcatcagttgatagtaaaagcaagattcaactttaagcagactaatgaggatgaactgtcagtttgtaagggggacatcatttacgtcacacgagttgaagaaggaggctggtgggaaggcacattaaatgggagaacaggctggttccccagtaattatgtccgtgaaattaaatccagtggtaagtgaagtttttaaaaggctttttgattgtgactcttgtactttcttggtattcttactgaaaattgtgtagttttaattggttaacagaagctgtttatacttgtatgtgtatgccaaaaataagagtagaacagaactgggaaaaatctgtgattagatattttgaaacaaattgtatttagattacattaaggcagc

SEQ ID NO: 329507 - DNA, 7326 bp, Homo sapiens
  misc_feature (6058)..(6058): n is a, c, g, or t
  misc_feature (7313)..(7313): n is a, c, g, or t
attaaagttggccttatcataaatttcccaatagtatgcctatttcaagtggttctgaaaatgtttgagaatgatgaagatctcttgttatagacagtttttttttcagagcagtattttaagtgcaaagtgtttttttgttgttgttgttgttgggaaaataagaatcttccatattgtagtgtagacagaggacaagtgctcttttgttctcaaacattctattttttcaagtgtattttacccacttatgtgactgagtctgagcctttgctaagggtactgcagctggattatgtagtggaaccaggtccagaaaaagaattgctaaagaatgcaagtaaacaggatgtcagatgttatccttagcctatttccctaaacatagctttttggctgcaaagtaaaatgccattcttctagcttctgcttatacacagtgatggctgacagcaggcataatcttcgtttgcttggcacgttgtcaccatgcaactcaacgtgttttgcaaggaatgatcgtgacacaccatctctgggagatactatgaggacatccggctatttcttggaagaattttctgtctaccttctttgagccctgttgtgccagcacatctccccatgaggctcagatctgtctgacctaagagccagttggcatcgtcctcctaacagaagccagattttcactggggctagactatttattgacagtgttttcccagactggcccatgagtgtctcatttccaaggtcccctgaagtgctggctcacctctgtttcccaaagcacttgcttgcttgtctctcctccctccccagcatccttttcactttcttcccttataacttcttgcactctgtgtgcgtgtgtgtgtatgcgtgtgtgcatgtgcgtttcttctttttttttatcctaacgaatttgttttgcaggttttgaaaaggaaaaaccagcgttatccaggattgttaaattaattcttatctgtttccacatcttggaccgtgatctctgtggttttaaaatcccatattttgagtgggttccgctgttgtttaagaaaagttgctttaaacctttgctctgcaagcacccgaagagaactcataaaaaggaagacaacagcagatgcaatcgcggatgtggcttagtccttgcagctgccccagagtgctgtttggagtgtaccgtcctcagtaatgaatccagaagaacaaatcgtgacatggcttatatctttgggagttttagagtcccctaaaaagaccatctgtgatccggaggagtttttaaagtcctcgctgaaaaatggggtagttctgtgcaaactgatcaacagactcatgcctggctctgtggaaaagttttgtctggatccccaaactgaagctgactgcatcaacaacatcaatgacttcctgaaaggatgtgcaaccctccaagtggaaatatttgatcctgatgacctttattcaggggtcaatttctccaaggtactgagtactcttttagctgtcaacaaagcaacagaagatcagctatcagaaagaccatgtggacgttcctcttctcttagtgctgctaatacttctcagacaaacccacagggagcagtttctagcacagtttcagggctgcaaaggcagtcaaagacagtggagatgacggaaaatggaagtcatcagttgatagtaaaagcaagattcaactttaagcagactaatgaggatgaactgtcagtttgtaagggggacatcatttacgtcacacgagttgaagaaggaggctggtgggaaggcacattaaatgggagaacaggctggttccccagtaattatgtccgtgaaattaaatccagtgagagacctctctccccaaaagccgtcaaaggatttgaaactgctccacttaccaagaattattatactgtggtgttacagaacatcctggacactgaaaaagaatatgctaaagaacttcagtctcttcttgttacttacttaagacccctgcagtccaataacaatctgagtactgtggaggttacatctttactgggaaacttcgaggaagtatgcacatttcaacagacactctgccaagccttggaagaatgttcaaagtttccagaaaaccagcacaaagtaggaggttgtctactgagtctcatgcctcattttaaatctatgtatctggcttactgtgcaaaccatccttcagctgtaaatgtgctcactcagcacagtgatgagttggaacaattcatggaaaatcaaggtgcatcgagcccaggtatcctcattttaacaacaaacctcagcaaaccattcatgcgactggagaaatatgttactctcttgcaagagttagaacggcatatggaggatactcatccagatcatcaggatattctgaaagcaatcgtagcattcaaaactctcatggggcaatgtcaagatctgaggaagagaaaacagctggagttacagatactgtccgaacctattcaggcatgggaaggagaagatattaaaaacttgggaaatgtgatttttatgtcacaagtaatggtgcagtatggagcatgtgaggaaaaagaggagcggtaccttatgttattttcaaatgtcctgataatgttatctgcaagtcctcggatgagtggctttatctatcagggaaaaataccaatagcaggaacggtggtgactagattagatgaaattgaagggaatgactgcacatttgaaatcactggtaacacagtggagagaattgtggtccattgtaacaacaaccaggacttccaggaatggttggagcagctgaacagactgatcagaggacctgcctcttgcagttcattatccaaaacctcatcgtcatcatgtagtgctcattcttcttttagctctaccggacagccccgaggacccttggagcctcctcaaattataaaaccgtggagtttaagttgtctacgacctgcacctccacttagaccatcagcagcactaggttataaagagaggatgtcttatatcttaaaggagtctagtaaaagccctaaaacgatgaagaaatttcttcataaaaggaagactgagagaaaaccatcggaggaggaatatgtgattaggaaaagtacagctgctctggaagaggatgctcaaatccttaaagtgatcgaagcctactgcaccagcgcaaattttcaacaaggccatggctcaagtactcgaaaagattccattccacaagtcctactccctgaggaagagaaactcatcattgaagaaaccagaagcaacggccagaccatcatggaagaaaagagccttgttgatactgtttacgccttgaaggacgaggtcagagaactgaagcaggaaaataaaagaatgaagcaatgcctggaagaagaactgaaatcaagaagggacctagaaaagctggtgcggaggcttttgaagcaaacagatgagtgtattcgaggcgagtccagtagcaagacctcaattcttccataaccatcactgtgccactgggtggagtgtgccttcagggcatcttgaaatgtcccgctgaatgatttgactcagtttgctcacttctttggcttttgttttgtgtttgagtctctctctctctctccctctctcttctctttctctccccgctgtgtgcatatgtgtgtgcgtgcacgtgcgcgcttgggcatttgctgttgtttggttattggttggttgttcattttttttttcaacaggtgaaaaagcaggaagtggtggtagagatggcctcagagtcttttccattcagtaagaaagagaaagggaatgcaggccagttacttaaaaggtcttcagattgccttcagttcacagtgcctctgcaacagccattgccctcaggtcacattctttgggctggctgcccttgcaaagcagctggccaaggcttattaaatgtgaacccaacttttccccagggctttcctgtacctgcaagcctcttagtacttaatttaccgaaggcaaatcttccagactatggcttgagtaggatgaaagacaaacacatctgcccaatgatccagctgcccttccttagaccatcacatgcctcccctcaatcacaggttttaaaattactgccctatgttgtctataagaccaagaaaactgtagtacccttattccttttgtgtcatgtaaattgtaactcaggggggcagaagctctggtcacccacaccaacaccaaatccatcagcaaattctactggacaatcctcccttttagtagcagagttgaccgccttttcccattgcatgataggtttctttccctcattctgcctagtgtgtaagttttctatttccccagtacttttagccaaccttaccaagtggtgtgtaaactagtatgtatgtgctttgcttactttttaaaaaaatgtagttagactgtgaggagttactttatgtacgttgcatattcaaactgtgatgttttatccttcaaaacaatctgcattaagaagatattgtgccctactagacagctttcattcactttattactctctcatatatgctgtgagaagttgtaatattaattggcctctttgggtgggactctaagcagtatttgcagaaatatgcttctggtccaacttgtacatccagaacaaaagggcccctctagtagctgtgtgctggattattcaggactgattaactcaagttgctcattgaatcacatcatccactttatcccagaaactagaactgtgagaaaccaggtttagaagacagtcacagaacagcacacatccaaattcagcgccattgaaagttggcctaaggctcagtgccactcacccctccctccccaaaagacaagagaaatttggccagatggggaaggtcactggaaattgaggccaaagggctgatcagaattgcctttataatatatttgatggatgcctataaatgtgggttttgcaaatattgtttaaaaaccaaacttgaagccaggcatggtggcccacacctgtggtcccagctactcaggaggctgaggtgggaggatcatttgagcccaggaggtcaaggctgcagtgagctgtgatgacaccactgcactccaacctaggtaacagagagacacctctgtctctgaaaaaacaaaacttgaagtttgaaacccccagcttgctgaggagccctttttatttttggtactgagagtctcaaggtcccatagctacatggtacagggctgttgtctgcttgctgcacagcagaaattacaccatccacaggaaatggactatttttgcagtccaacatcagccaaccacacacagccgtgtttggaagctgaagagtaaagaaatttctaggaatggctgttgttctgttttttagcacagccatttagatataacatccttcacttaaaaattaaaaacatcagtactaccaccaccaccaacaacatcaacacagatcttcacatctgcccattctgtggttagtcaatggcttgcaataaatgtgcaaactgcatctataggaaacatttttgtgattacggaatactttagttgattgctgaaaatattgaaaggtcttcattttacagtgatgagtacatatgcatgtttcggggacttggcccttctgatgaggggccctcggtactctggataacgaagcttgtgcagagtggtaaccatgcttacacactaaactataatataaaggaaatgaagccatgttaatctgagagcagtgtcgccatagttgtgttgtttacaatactctataaatgggttcctgttgccctgtaattaaactgctgcccgtagaggcctttcagttccttttctgtccttccccttcttaacacaagctcaaattttctaacttgtttttattttgaagacttttaaaatggacattttcaatacataaaaataaacagtgctttataaaaaaaaaaaaaaaaaaaaaaaaaaaaaaaaaaaaaaaaaaaaaanaaaaaaaaaaaagaaaacaaaaaaaaaaacaaaaaaaaaaaaaaaagaaaaagaaagcagagaagaaacaaagaagagaaaaatgagagcaccacgacagacccatgagacgcagaaaacacaccagcagagaagaaatgagggaaaaaacgaggcacgcaagagagagacacacaacgaaggaaaaaccacccagtagagaagaagcgaaagagaggaaccaaagagtcggagacacacaagaaagagggagaagaaggaagcaaacaagaacaaaaaaaaagcagacaacagcaggagacggacacaaaagaaggaaaacaaaaacgagcgcagacacaagccagcaccggaacagcagaagaaagagagaaaacacaagaacacaagagcaggaacaaaagagcaaaagcgaaaaaagaataacaaataaaaagaaaggaagggacaaataaaaaataagaggagtagggggtgagaataggacttaatagaagaagagagaagggatatgggagcagattagaaaacgaagaaaagaatagataggagagagagaggatagggaagggaggaagagatacagagggagtcagaacaggaagaggaaagacgagagaagataaagaataaagagagtgggacaaaaaagaggagaaagaaagaaggaagagaaaggaagagaacaggaagaaagagggagagggacaaaggagaaaaaacgaaaagaacagaaaaaggagaaggaggaggggagaaagacggaaaacaaagaaaacagcagaaagaggagggggaaaaggagaagaacagaaaagagagaaaaagggaggagaggggaaagaaatacagaaaggggaagcggaagcggcaaagacggaaacaaaagagggaggggaacagagagggaacggacgccagcgccgaagacaagcagcgacggagaagaaaaggaacaaacacaggcataaggggaggagaaaagcgagaagagaagaagaagagggcagagagaaacggagaaaaaagaggcacaagaaaaaaggaaacgaaatggaaacgatacacaaaggagggagcagagacgagaacccaggagaccagagaaaacgagagaagaagaaagacgacagaagaacaaacaaagaagaaaggagaacagaggaggggacagaagacggcagagaagtggagagcgacgaacggagatagagcagagagggagcacgagcagagggaagaaacggagagaaanaacaaagcaaaga

SEQ ID NO: 329508 - DNA, 2829 bp, Homo sapiens
attaaagttggccttatcataaatttcccaatagtatgcctatttcaagtggttctgaaaatgtttgagaatgatgaagatctcttgttatagacagtttttttttcagagcagtattttaagtgcaaagtgtttttttgttgttgttgttgttgggaaaataagaatcttccatattgtagtgtagacagaggacaagtgctcttttgttctcaaacattctattttttcaagtgtattttacccacttatgtgactgagtctgagcctttgctaagggtactgcagctggattatgtagtggaaccaggtccagaaaaagaattgctaaagaatgcaagtaaacaggatgtcagatgttatccttagcctatttccctaaacatagctttttggctgcaaagtaaaatgccattcttctagcttctgcttatacacagtgatggctgacagcaggcataatcttcgtttgcttggcacgttgtcaccatgcaactcaacgtgttttgcaaggaatgatcgtgacacaccatctctgggagatactatgaggacatccggctatttcttggaagaattttctgtctaccttctttgagccctgttgtgccagcacatctccccatgaggctcagatctgtctgacctaagagccagttggcatcgtcctcctaacagaagccagattttcactggggctagactatttattgacagtgttttcccagactggcccatgagtgtctcatttccaaggtcccctgaagtgctggctcacctctgtttcccaaagcacttgcttgcttgtctctcctccctccccagcatccttttcactttcttcccttataacttcttgcactctgtgtgcgtgtgtgtgtatgcgtgtgtgcatgtgcgtttcttctttttttttatcctaacgaatttgttttgcaggttttgaaaaggaaaaaccagcgttatccaggattgttaaattaattcttatctgtttccacatcttggaccgtgatctctgtggttttaaaatcccatattttgagtgggttccgctgttgtttaagaaaagttgctttaaacctttgctctgcaagcacccgaagagaactcataaaaaggaagacaacagcagatgcaatcgcggatgtggcttagtccttgcagctgccccagagtgctgtttggagtgtaccgtcctcagtaatgaatccagaagaacaaatcgtgacatggcttatatctttgggagttttagagtcccctaaaaagaccatctgtgatccggaggagtttttaaagtcctcgctgaaaaatggggtagttctgtgcaaactgatcaacagactcatgcctggctctgtggaaaagttttgtctggatccccaaactgaagctgactgcatcaacaacatcaatgacttcctgaaaggatgtgcaaccctccaagtggaaatatttgatcctgatgacctttattcaggggtcaatttctccaaggtactgagtactcttttagctgtcaacaaagcaacagaagatcagctatcagaaagaccatgtggacgttcctcttctcttagtgctgctaatacttctcagacaaacccacagggagcagtttctagcacagtttcagggctgcaaaggcagtcaaagacagtggagatgacggaaaatggaagtcatcagttgatagtaaaagcaagattcaactttaagcagactaatgaggatgaactgtcagtttgtaagggggacatcatttacgtcacacgagttgaagaaggaggctggtgggaaggcacattaaatgggagaacaggctggttccccagtaattatgtccgtgaaattaaatccagtggctggtctcaaactcctgggctccagcgatcctcctgccctggccttccaaagtgctgggattacagagatggagttccgctcttgttgctcgggctggagtgcaatggcgcgatctcagctcaccacacctctgtctctgaaaaaacaaaacttgaagtttgaaacccccagcttgctgaggagccctttttatttttggtactgagagtctcaaggtcccatagctacatggtacagggctgttgtctgcttgctgcacagcagaaattacaccatccacaggaaatggactatttttgcagtccaacatcagccaaccacacacagccgtgtttggaagctgaagagtaaagaaatttctaggaatggctgttgttctgttttttagcacagccatttagatataacatccttcacttaaaaattaaaaacatcagtactaccaccaccaccaacaacatcaacacagatcttcacatctgcccattctgtggttagtcaatggcttgcaataaatgtgcaaactgcatctataggaaacatttttgtgattacggaatactttagttgattgctgaaaatattgaaaggtcttcattttacagtgatgagtacatatgcatgtttcggggacttggcccttctgatgaggggccctcggtactctggataacgaagcttgtgcagagtggtaaccatgcttacacactaaactataatataaaggaaatgaagccatgttaatctgagagcagtgtcgccatagttgtgttgtttacaatactctataaatgggttcctgttgccctgtaattaaactgctgcccgtagaggcctttcagttccttttctgtccttccccttcttaacacaagctcaaattttctaacttgtttttattttgaagacttttaaaatggacattttcaatacataaaaataaacagtgctttataaaaa

SEQ ID NO: 329509 - DNA, 2293 bp, Homo sapiens
attaaagttggccttatcataaatttcccaatagtatgcctatttcaagtggttctgaaaatgtttgagaatgatgaagatctcttgttatagacagtttttttttcagagcagtattttaagtgcaaagtgtttttttgttgttgttgttgttgggaaaataagaatcttccatattgtagtgtagacagaggacaagtgctcttttgttctcaaacattctattttttcaagtgtattttacccacttatgtgactgagtctgagcctttgctaagggtactgcagctggattatgtagtggaaccaggtccagaaaaagaattgctaaagaatgcaagtaaacaggatgtcagatgttatccttagcctatttccctaaacatagctttttggctgcaaagtaaaatgccattcttctagcttctgcttatacacagtgatggctgacagcaggcataatcttcgtttgcttggcacgttgtcaccatgcaactcaacgtgttttgcaaggaatgatcgtgacacaccatctctgggagatactatgaggacatccggctatttcttggaagaattttctgtctaccttctttgagccctgttgtgccagcacatctccccatgaggctcagatctgtctgacctaagagccagttggcatcgtcctcctaacagaagccagattttcactggggctagactatttattgacagtgttttcccagactggcccatgagtgtctcatttccaaggtcccctgaagtgctggctcacctctgtttcccaaagcacttgcttgcttgtctctcctccctccccagcatccttttcactttcttcccttataacttcttgcactctgtgtgcgtgtgtgtgtatgcgtgtgtgcatgtgcgtttcttctttttttttatcctaacgaatttgttttgcaggttttgaaaaggaaaaaccagcgttatccaggattgttaaattaattcttatctgtttccacatcttggaccgtgatctctgtggttttaaaatcccatattttgagtgggttccgctgttgtttaagaaaagttgctttaaacctttgctctgcaagcacccgaagagaactcataaaaaggaagacaacagcagatgcaatcgcggatgtggcttagtccttgcagctgccccagagtgctgtttggagtgtaccgtcctcagtaatgaatccagaagaacaaatcgtgacatggcttatatctttgggagttttagagtcccctaaaaagaccatctgtgatccggaggagtttttaaagtcctcgctgaaaaatggggtagttctgtgcaaactgatcaacagactcatgcctggctctgtggaaaagttttgtctggatccccaaactgaagctgactgcatcaacaacatcaatgacttcctgaaaggatgtgcaaccctccaagtggaaatatttgatcctgatgacctttattcaggggtcaatttctccaaggtactgagtactcttttagctgtcaacaaagcaacagaagatcagctatcagaaagaccatgtggacgttcctcttctcttagtgctgctaatacttctcagacaaacccacagggagcagtttctagcacagtttcagggctgcaaaggcagtcaaagacagtggagatgacggaaaatggaagtcatcagttgatagtaaaagcaagattcaactttaagcagactaatgaggatgaactgtcagtttgtaagggggacatcatttacgtcacacgagttgaagaaggaggctggtgggaaggcacattaaatgggagaacaggctggttccccagtaattatgtccgtgaaattaaatccagtgagagacctctctccccaaaagccgtcaaaggatttgaaactgctccacttaccaagaattattatactgtggtgttacagaacatcctggacactgaaaaagaatatgctaaagaacttcagtctcttcttgttacttacttaagacccctgcagtccaataacaagtaagatgtttattttaaatccctcactaagtaaagcaacataatgtcaacatatggaatcattattcttatgtcactgaataattgattttgccctttagaagaatttccacagatcacaggttgccaagaacatggtcagggcaacagaaattatgcaagatattgcttttggagagcttggctttctttctcttctggctgtgaaaggaatgagcagatctgtgtttcttcctgtcacaatttttatcttgtacatt

SEQ ID NO: 329510 - DNA, 572 bp, Homo sapiens
agttctttacccgttgtagagcccttaggtcccacactggggtcccccaggacaccaggccccctgcgtagaatttggtcttgtcattgggatcctggtacagcaaaggccccaacactggcgccgtgacagctatccatgcccttcgtcgtccttcagcacagatcatctttaggagtgtaaacataggcctccgcatcttctgtgggtttctccacctgcacttctgtgcattgtcttaaaggagctacagtttaccttagatgggaatgtgagtgtggccaccacttgattcagatgtgttcatattgcatttctacatcttggccgctaagcacatgtgcccttcatcttatatatacgtttctgaagatgcttctgtttatactattccaactcttactgaagcagcagtgttagaatgtcagccagatgctatagtctgaagtaatgtcatgagaccgttttagaaatttacctgccactttcacaagcccaggaggcggaggcaggagtattgctgagcccaggagttgaagactgcaatgagctatgatcgcgtcactgcaccc

SEQ ID NO: 329511 - DNA, 2070 bp, Homo sapiens
  misc_feature (2048)..(2048): n is a, c, g, or t
gttgttgccaggggccgggggagggggaaaagggtcattgtttaatgggaatagagtttcagttttgcaagatgaaaaagttctggagattggttgcacaaaaatgtgaatatacttaatactactgaactgtatatacttaaagtggataaaatggtaagaaaaatagagcaacaatatttcactaagtaggcagtttacactgaatatccttggggacatcagaatatccttgagaatattaaaatacagcatcttcaaacaaaagtaagttaaaggactatctttgatgcagcctcccagttctctatatcagggtccagcaaactggcccaagagccaaatctggccaaccgcttgtttttatacagtctgtgagcaaagactgttgtttacattttttaattgttgaaaaaaaatcagaattataaaacttaattacatcaaaattacaagaaattcaagtgtcagtgtccataaataaagttttattggaacacagtcacattcattcatttttttttttattttgagacggagttttgctcttgttggccatgctggagtgcaatggtgtgatcttggctcaccgcaacctccgcctcccgggttcaagtgattctcctgcctcagcctcccaagtagctgggattagaggcatgcgccaccacgcccggctaattttgtatttttagtagagacagggtttctccatgtcggtcaggctggtctcgaactcctgacctcaggtgatccacctgccttggccttccaaagtgctgggattacaggcatgagccaccgcacccggcctcatactcattcttatgtgtgtcatgtatcgctgcttttatgctacagtagcagaatggagtaattgggacagagaccatatagcctacaaatcctaaaatatttgctgcttggccattaataaaacatttaaagtcagactattacaaaagttgccaggtccctcacagcatcatctttgatagctttaaatgcctaattggcagccttgtcatggactagtagggactattatcattctgttctcttatgtttggtggggattcttatttccttactccctactgtgacactttaaccagttccagaaaactcattcttggtgagcttcagttgtggctgaaatccctttagcaatttctataggctcttgtattgttaagaaccagacatctcttgggccagccaagcaattgggaccacctaagcaatttggaccacccatggctgggcttggtcagcctctaagatggacagggatctcataagaattcaagtaaggaatttgagtaaagacaattaaaatttaaagaaaaattttaattcagtttcctgagtttggaaattagttccaagacagatctgggaatgtcagcgcaagagtttgtgtcatccatcctagtataccacctttaacattttttaattcctctgtgtgtttgttcagtgccttcctcattgttgactcaacctttactttacctcctagcttagtctgcattctgcttccccttcaattttcagctattcataattaaatgttgcttgttgccccagtgtatgagatagtgcccaaaggtatttatttcatgttttccagctttcttgcatttcacagattctatttattttgcatttcatagactttattccttagtgtaagaatttcagtggcataactctgccctgcttgggagtcactttttgaatcttttaatgatatataatggcacttggaaagtgtcccccacacctgatactttctgctttggactacaaggcagatcgtattctaaaaatcattgctgtctaggactgcttcccagaactatgttctccagaactataggtggaacagtttaccttagatgggaatgtgagtgtggccaccacttgattcagatgtgttcatattgcatttctacatcttggccgctaagcacatgtgcccttcatcttatatatacgtttctgaagatgcatgaataggtccccccaacctggacctttggaanaaataaaactttatttaatcca

SEQ ID NO: 329512 - DNA, 2210 bp, Homo sapiens
gttgttgccaggggccgggggagggggaaaagggtcattgtttaatgggaatagagtttcagttttgcaagatgaaaaagttctggagattggttgcacaaaaatgtgaatatacttaatactactgaactgtatatacttaaagtggataaaatggtaagaaaaatagagcaacaatatttcactaagtaggcagtttacactgaatatccttggggacatcagaatatccttgagaatattaaaatacagcatcttcaaacaaaagtaagttaaaggactatctttgatgcagcctcccagttctctatatcagggtccagcaaactggcccaagagccaaatctggccaaccgcttgtttttatacagtctgtgagcaaagactgttgtttacattttttaattgttgaaaaaaaatcagaattataaaacttaattacatcaaaattacaagaaattcaagtgtcagtgtccataaataaagttttattggaacacagtcacattcattcatttttttttttattttgagacggagttttgctcttgttggccatgctggagtgcaatggtgtgatcttggctcaccgcaacctccgcctcccgggttcaagtgattctcctgcctcagcctcccaagtagctgggattagaggcatgcgccaccacgcccggctaattttgtatttttagtagagacagggtttctccatgtcggtcaggctggtctcgaactcctgacctcaggtgatccacctgccttggccttccaaagtgctgggattacaggcatgagccaccgcacccggcctcatactcattcttatgtgtgtcatgtatcgctgcttttatgctacagtagcagaatggagtaattgggacagagaccatatagcctacaaatcctaaaatatttgctgcttggccattaataaaacatttaaagtcagactattacaaaagttgccaggtccctcacagcatcatctttgatagctttaaatgcctaattggcagccttgtcatggactagtagggactattatcattctgttctcttatgtttggtggggattcttatttccttactccctactgtgacactttaaccagttccagaaaactcattcttggtgagcttcagttgtggctgaaatccctttagcaatttctataggctcttgtattgttaagaaccagacatctcttgggccagccaagcaattgggaccacctaagcaatttggaccacccatggctgggcttggtcagcctctaagatggacagggatctcataagaattcaagtaaggaatttgagtaaagacaattaaaatttaaagaaaaattttaattcagtttcctgagtttggaaattagttccaagacagatctgggaatgtcagcgcaagagtttgtgtcatccatcctagtataccacctttaacattttttaattcctctgtgtgtttgttcagtgccttcctcattgttgactcaacctttactttacctcctagcttagtctgcattctgcttccccttcaattttcagctattcataattaaatgttgcttgttgccccagtgtatgagatagtgcccaaaggtatttatttcatgttttccagctttcttgcatttcacagattctatttattttgcatttcatagactttattccttagtgtaagaatttcagtggcataactctgccctgcttgggagtcactttttgaatcttttaatgatatataatggcacttggaaagtgtcccccacacctgatactttctgctttggactacaaggcagatcgtattctaaaaatcattgctgtctaggactgcttcccagaactatgttctccagaactataggtggaacagtttaccttagatgggaatgtgagtgtggccaccacttgattcagatgtgttcatattgcatttctacatcttggccgctaagcacatgtgcccttcatcttatatatacgtttctgaagatgcttctgtttatactattccaactcttactgaagcagcagtgttagaatgtcagccagatgctatagtctgaagtaatgtcatgagaccgttttagaaatttacctgccactttcacaagcccaggaggcggaggcaggagtattgctgagcccaggagttgaagactgcaatgagctatgatcgcgtcactgcaccc

SEQ ID NO: 329513 - DNA, 407 bp, Homo sapiens
tccccaagcagagtttagttcagccttttattgctccattaataaataccaacagatagctgagatatttggcatttaaggaaagcctccaacaaggagagatggagagacagagagagggagaagaaaaagaaagcagaaggaaaaaggaagaaggattaaagaagagggaagaagaagaacaagaggaagaggaggaggaagaagaagaagaagaagaaggatgacgacaacgacaacaacaacaacaacaagaagcagccaccaccgccgctgccacctccaggtagaaacaaaaacaaaatagagactagaagactattaagacaaatggacaaatgaaaaataaatagtgcctcaagaagaataggatggagatagtatatgcataaaaaagaatgtggtat

SEQ ID NO: 329514 - DNA, 2409 bp, Homo sapiens
atacttacctggcaggggagataccatgatcacgaaggtggttttcccagggcgaggcttatccattgcactccggatgtgctgacccctgcgatttccccaaatgtgggaaactcgactgcataatttgtggtagtgggggactgcgttcgcgctttccttcccaggcctcggggccgggaggcggagagtcaagtgaagtgccaatgtgaaatttcgggaacacctttctcaaatggggagaagctgaggcctcacagcctcccgcaaccagagcagagaccatatagctgccctcagctgcactgtggcaaggcttttgcttccaaatacaagctgtataggcacatggccacccactcagcccagaaaccccaccagtgtatgtactgtgataagatgtttcaccgcaaggaccatctgcggaaccatctgcagacccatgatcctaacaaagaggccctccactgctctgagtgcggtaagaattacaatacgaagctgggctaccggcgccacctggccatgcatgctgccagcagcggtgacctcagctgcaaggtgtgcctgcagacctttgagagtacccaggccctgctagagcacctgaaggcccactcacgccgggtagcaggcggtgccaaggagaagaagcacccctgtgaccactgcgaccggcggttctatactcgtaaggatgtacggcggcacctagtggtgcacacaggccgtaaggacttcctgtgccagtactgtgcccagcggtttggccgtaaggaccacctgacgcgtcatgtcaagaagagccactcgcaggagctgctcaagatcaagacagagcccgtggacatgttaggcctactcagctgcagctccacagtcagtgtgaaggaagagctgagccctgtgctgtgcatggcctctcgggacgtaatggggaccaaggccttccctggcatgttgcccatgggcatgtatggtgcccacatccctaccatgcccagcacgggcgtgccacactccctggtgcacaacacgctgcccatgggtatgagctaccctctggaatcctcacctatctcttccccagctcagctccctccaaaataccagcttggatctacctcatacttgcccgacaaattgcccaaagtggaggtggatagttttctggcggagcttcctggaagcctgtctctctcatccgctgaaccccagcccgcctcacctcagccggcggcagctgcggccctcctagatgaagcactgcttgccaagagccccgccaacctctctgaggccctctgcgctgctaatgtggacttctcccacctactgggctttcttccactcaacctgcccccgtgtaacccacctggggccacaggaggcctggtcatgggctactcccaggctgaggcacagcccctgcttaccactttgcaagctcagcctcaagattccccaggagctgggggaccactgaactttgggcctctgcactccttgcctcctgtcttcacgtctggcctgagtagcaccaccctgcctcgtttccatcaagcattccagtagcccccacagaggccctcagctcagtttttggctctgttatggagccttagtacccaccccgtctgtgtcccccatgaaggcagctgagctttcagagctgggttcaaaaaaaaaaattccagtgtctgtatacaggagcacttggtttgggggttcaggctctaggatcgattccagaaggagccttgagccccaaccccgtgaaaagatctcataccgtaggacttcaggtattatttacttttatttttttgacctgaatcgggagccacacttggccctcttcctctccaaagcgccagaacctccttctctttggagaatggggaggcctcttggagacacagagggtttcaccttggatgacctctagagaaattgcccaagaagcccaccttctggtcccaacctgcagaccccacagcagtcagttggtcaggccctgctgtagaaggtcacttggctccattgcctgcttccaaccaatgggcaggagagaaggcctttatttctcgcccacccattcctcctgtaccagcacctccgttttcagtcagtgttgtccagcaacggtaccgtttacacagtcacctcagacacaccatttcacctcccttgccaagctgttagccttagagtgattgcagtgaacactgtttacacaccgtgaatccattcccatcagtccattccagttggcaccagcctgaaccatttggtacctggtgttaactggagtcctgtttacaaggtggagtcggggcttgctgacttctcttcatttgaggtcacatttttcccccgtggggaaataaactgactttggactgcttc

SEQ ID NO: 329515 - DNA, 6060 bp, Homo sapiens
atcagagagcagcaggcatcatggcccataacaggggacggacagactggggagaaatatgtctcagtttcagctttcaaagaggaccatacagagtttttagcaagcattcctgtttgggatatggagccctaataatacaagagagtataggaaagtggctctctgcttaagagagaactctggcccaggagatggtgcctggagggaggtaaagtaaggggctctttaaaggggatgtgccgagggttagttgtgagggaaaaggggaagactgcattctgggggagatgttgggaaaggaaggaaactcactctgaggcctgagaagtaacattaaagaggaaaaaaagaagtactattcaggcctcatgcggaaaaagaggcagacacagccgagacctcagagaaggcactgcatgtattcagagcacacattttgtatcagccactttcaagagtattatttcatttaatcctctatacgaatcttacaggtgaagagattgttttctgaaagctgcgttggaggctgtgacagagctgagagcctgtgtggagcggatggggaggctttctcaataacatggccctttgccattagccttgccatgaccacatttttcaccagcgtccccccctggattcaagatgcaaagcaggaggaggaagtgggctggaaactagttcccaggcctcggggccgggaggcggagagtcaagtgaagtgccaatgtgaaatttcgggaacacctttctcaaatggggagaagctgaggcctcacagcctcccgcaaccagagcagagaccatatagctgccctcagctgcactgtggcaaggcttttgcttccaaatacaagctgtataggcacatggccacccactcagcccagaaaccccaccagtgtatgtactgtgataagatgtttcaccgcaaggaccatctgcggaaccatctgcagacccatgatcctaacaaagaggccctccactgctctgagtgcggtaagaattacaatacgaagctgggctaccggcgccacctggccatgcatgctgccagcagcggtgacctcagctgcaaggtgtgcctgcagacctttgagagtacccaggccctgctagagcacctgaaggcccactcacgccgggtagcaggcggtgccaaggagaagaagcacccctgtgaccactgcgaccggcggttctatactcgtaaggatgtacggcggcacctagtggtgcacacaggccgtaaggacttcctgtgccagtactgtgcccagcggtttggccgtaaggaccacctgacgcgtcatgtcaagaagagccactcgcaggagctgctcaagatcaagacagagcccgtggacatgttaggcctactcagctgcagctccacagtcagtgtgaaggaagagctgagccctgtgctgtgcatggcctctcgggacgtaatggggaccaaggccttccctggcatgttgcccatgggcatgtatggtgcccacatccctaccatgcccagcacgggcgtgccacactccctggtgcacaacacgctgcccatgggtatgagctaccctctggaatcctcacctatctcttccccagctcagctccctccaaaataccagcttggatctacctcatacttgcccgacaaattgcccaaagtggaggtggatagttttctggcggagcttcctggaagcctgtctctctcatccgctgaaccccagcccgcctcacctcagccggcggcagctgcggccctcctagatgaagcactgcttgccaagagccccgccaacctctctgaggccctctgcgctgctaatgtggacttctcccacctactgggctttcttccactcaacctgcccccgtgtaacccacctggggccacaggaggcctggtcatgggctactcccaggctgaggcacagcccctgcttaccactttgcaagctcagcctcaagattccccaggagctgggggaccactgaactttgggcctctgcactccttgcctcctgtcttcacgtctggcctgagtagcaccaccctgcctcgtttccatcaagcattccagtagcccccacagaggccctcagctcagtttttggctctgttatggagccttagtacccaccccgtctgtgtcccccatgaaggcagctgagctttcagagctgggttcaaaaaaaaaaattccagtgtctgtatacaggagcacttggtttgggggttcaggctctaggatcgattccagaaggagccttgagccccaaccccgtgaaaagatctcataccgtaggacttcaggtattatttacttttatttttttgacctgaatcgggagccacacttggccctcttcctctccaaagcgccagaacctccttctctttggagaatggggaggcctcttggagacacagagggtttcaccttggatgacctctagagaaattgcccaagaagcccaccttctggtcccaacctgcagaccccacagcagtcagttggtcaggccctgctgtagaaggtcacttggctccattgcctgcttccaaccaatgggcaggagagaaggcctttatttctcgcccacccattcctcctgtaccagcacctccgttttcagtcagtgttgtccagcaacggtaccgtttacacagtcacctcagacacaccatttcacctcccttgccaagctgttagccttagagtgattgcagtgaacactgtttacacaccgtgaatccattcccatcagtccattccagttggcaccagcctgaaccatttggtacctggtgttaactggagtcctgtttacaaggtggagtcggggcttgctgacttctcttcatttgaggtcacatttttcccccgtggggaaataaactgactttggactgcttcagtctctgccatcttccatgactgcatttgttcctgcctgcctcggcggtatccacagaagacaggcaagaggattggagcagttttctcacaggtctgcaattctgtttttctccaagtacattatgaccccctcatccttctcttgaactggagaggggaagaaatgaaaggcatgcccacgtccgtcacctccccatcccctagtccccaccttgaacatcatgagctgttgttattagtcttggaagcagagtctgggttggtgtggatagcaaaggaggaagtctgagcccctcattggtcttcctcccacctgtcccttttccgggaagttgtggaattgttggaagaagagtttgcagaaggttaggaatgggtagatagctaagtcctaatctatgggtacattgttgtgtcccaaaccaaaattttccttatccacaatgtcccttctgtctcttccactttacagtggactcggccactgtgcataggcttctctgctctccatcaaatcacttccactttcctgtgcccccacccccgcctccagttttccgctagtatccggcaaggtttcttgcaacaaatgattagttcttttcttctgactcgtggggctccctgctgcagagagcacagcccttgcctggagcccaggaaccccatccttgcttcatctcagttcttcatgggcttcactcttcccactcacggaagggaggtagctcagggacctccactgtgggacccttgagacgcttccactctgattcagaaacacacttctacctctttactgttaactcttaacagatgcagtcagcagtttctgggcacttctctcagtaggtgcctcatgctgacttctccagtagggtttcaggacaaactaccaaggaattgcctcagcctcctaccagtcctccctcacccaccttctgtctaggttcacttggtttgtcatcaggaactgagcaggtccaggactcagctttctgcttcagcctaagccagtactccttgtttgaggtaaaagccttaaaatttagctccctagctcttgattagaagcaatttggagtaagtgtgttttgatttaggcagggtagcttgggatacctttttaaaaacaccagatattaaaatgtctggcaaggttagaatcagactagatgatttgcttctaaaaattagtttcagtgagtcccagggactaattaaggtttattttaaaaagtgtctaccttggtacgcagccacctcctgcatgctgtgcatgttattgggacttgtattataggcgatggtatgtgagaatccagttgggactcgctgttgccatcctctttgttgtatctggttttcatcactagactcagcaacccttctcaccttaactgccaccttccctacactctcagtttacagaggccactgggcctctggctgcagaatacaaagtcccgggctgttagaggagtcctttcctctctgcctgccctttcctgtccctccctcgaattctctctccccgtaagtgatgctggaaaagtcataggactggcaaagcaactgtttaaaccctttgtaaccggggccttgcccccacctcctgtcttttctccttgccttccccactcctgtgtcctcccatctatcctgtctttcctttcctcctctcagtgtcctcagcacccacaaggaattttcctatcactgtgaactttgctggtacagaggaataatatctgccttcacctttttttttttggaccatagctagccagtcatttcttaaacctcccttcctaaaatctggggggtcggggggaaagaaaaaaaaagccttagtggcctggttgttcaaaggataagaatagctttatcctgcactcagtacccgaactcacttcagtatgcttactgaggccatgagaacctgaggggcatctgcccaggacaggagccatggcatatgacaaagaccaatgagggaccaggaaaaaaagtgatgtcccctttccctgccacctccagcctctgccagcaatgagctgtccccctcccaccctacacagtagctggtcagggctgagtacagtcctgggggtaaggggatgacatgcccaggtgtcagctcaaaggatctctgcatcatcttgaggtgggaggcagggaaaggagcgccaatgaggttccctgcaacccccgccctccagcccaccgcccaaccttttacaaatggcattttcttaattgaaaatccgggaagcaggtgtgattacttttttgctcgtagatattgtcctaagttggaattctcccactgccctaaaactttccctagtagtcctttaaactcccccctccctttttggtagctgttttctccgtcctctctccacctgccctcttatctaggagctgtttgtaagcacgatttttttaacaggttatattgtacaggatcaatattttgctttttaacaaggatatttatgtaataagaaactttgccttaggcaggtgttggccagaaaagtccagattcctctgggatcccaccctggcctctcctggaactctgaacctgctgtggaaggaattggccatgaccttcacctctggagagtagggtctatggcgagggaaaagggtgttcaccatgataacctagtgcctccatagaggggtttggaaaaattccagtccgatttctttgtgtgtcagctgacttccttagctgattgttcccacttgcacctctccacctttggcactagaactcctgagacaccacttctcatgcttctccctccctaccagcggtcaaggctttggagccactcttttgtaactccagattatttaaagagaaaagtacaagacagaaatcttctagcactttgtaaacacagtgaataacctcttggagtatttttggctttatataaaacaaggtttttaattgtaaagtataagtgccattagaaaatgcacagggcatatctttgttaaagtagatttttcaatgttttacagaattacattttcaaaaaaaggtttttataatgaagttgtttattaaaaacttctgaatgatgtgttaaaaaaaaat

SEQ ID NO: 329516 - DNA, 5599 bp, Homo sapiens
caatggcccgaccgccgccactaccggggcctgagggggcctggcggagcccgagcgcggcccggcccgcagcgtggggccccgagcgcggtgaagagattgttttctgaaagctgcgttggaggctgtgacagagctgagagcctgtgtggagcggatggggaggctttctcaataacatggccctttgccattagccttgccatgaccacatttttcaccagcgtccccccctggattcaagatgcaaagcaggaggaggaagtgggctggaaactagttcccaggcctcggggccgggaggcggagagtcaagtgaagtgccaatgtgaaatttcgggaacacctttctcaaatggggagaagctgaggcctcacagcctcccgcaaccagagcagagaccatatagctgccctcagctgcactgtggcaaggcttttgcttccaaatacaagctgtataggcacatggccacccactcagcccagaaaccccaccagtgtatgtactgtgataagatgtttcaccgcaaggaccatctgcggaaccatctgcagacccatgatcctaacaaagaggccctccactgctctgagtgcggtaagaattacaatacgaagctgggctaccggcgccacctggccatgcatgctgccagcagcggtgacctcagctgcaaggtgtgcctgcagacctttgagagtacccaggccctgctagagcacctgaaggcccactcacgccgggtagcaggcggtgccaaggagaagaagcacccctgtgaccactgcgaccggcggttctatactcgtaaggatgtacggcggcacctagtggtgcacacaggccgtaaggacttcctgtgccagtactgtgcccagcggtttggccgtaaggaccacctgacgcgtcatgtcaagaagagccactcgcaggagctgctcaagatcaagacagagcccgtggacatgttaggcctactcagctgcagctccacagtcagtgtgaaggaagagctgagccctgtgctgtgcatggcctctcgggacgtaatggggaccaaggccttccctggcatgttgcccatgggcatgtatggtgcccacatccctaccatgcccagcacgggcgtgccacactccctggtgcacaacacgctgcccatgggtatgagctaccctctggaatcctcacctatctcttccccagctcagctccctccaaaataccagcttggatctacctcatacttgcccgacaaattgcccaaagtggaggtggatagttttctggcggagcttcctggaagcctgtctctctcatccgctgaaccccagcccgcctcacctcagccggcggcagctgcggccctcctagatgaagcactgcttgccaagagccccgccaacctctctgaggccctctgcgctgctaatgtggacttctcccacctactgggctttcttccactcaacctgcccccgtgtaacccacctggggccacaggaggcctggtcatgggctactcccaggctgaggcacagcccctgcttaccactttgcaagctcagcctcaagattccccaggagctgggggaccactgaactttgggcctctgcactccttgcctcctgtcttcacgtctggcctgagtagcaccaccctgcctcgtttccatcaagcattccagtagcccccacagaggccctcagctcagtttttggctctgttatggagccttagtacccaccccgtctgtgtcccccatgaaggcagctgagctttcagagctgggttcaaaaaaaaaaattccagtgtctgtatacaggagcacttggtttgggggttcaggctctaggatcgattccagaaggagccttgagccccaaccccgtgaaaagatctcataccgtaggacttcaggtattatttacttttatttttttgacctgaatcgggagccacacttggccctcttcctctccaaagcgccagaacctccttctctttggagaatggggaggcctcttggagacacagagggtttcaccttggatgacctctagagaaattgcccaagaagcccaccttctggtcccaacctgcagaccccacagcagtcagttggtcaggccctgctgtagaaggtcacttggctccattgcctgcttccaaccaatgggcaggagagaaggcctttatttctcgcccacccattcctcctgtaccagcacctccgttttcagtcagtgttgtccagcaacggtaccgtttacacagtcacctcagacacaccatttcacctcccttgccaagctgttagccttagagtgattgcagtgaacactgtttacacaccgtgaatccattcccatcagtccattccagttggcaccagcctgaaccatttggtacctggtgttaactggagtcctgtttacaaggtggagtcggggcttgctgacttctcttcatttgaggtcacatttttcccccgtggggaaataaactgactttggactgcttcagtctctgccatcttccatgactgcatttgttcctgcctgcctcggcggtatccacagaagacaggcaagaggattggagcagttttctcacaggtctgcaattctgtttttctccaagtacattatgaccccctcatccttctcttgaactggagaggggaagaaatgaaaggcatgcccacgtccgtcacctccccatcccctagtccccaccttgaacatcatgagctgttgttattagtcttggaagcagagtctgggttggtgtggatagcaaaggaggaagtctgagcccctcattggtcttcctcccacctgtcccttttccgggaagttgtggaattgttggaagaagagtttgcagaaggttaggaatgggtagatagctaagtcctaatctatgggtacattgttgtgtcccaaaccaaaattttccttatccacaatgtcccttctgtctcttccactttacagtggactcggccactgtgcataggcttctctgctctccatcaaatcacttccactttcctgtgcccccacccccgcctccagttttccgctagtatccggcaaggtttcttgcaacaaatgattagttcttttcttctgactcgtggggctccctgctgcagagagcacagcccttgcctggagcccaggaaccccatccttgcttcatctcagttcttcatgggcttcactcttcccactcacggaagggaggtagctcagggacctccactgtgggacccttgagacgcttccactctgattcagaaacacacttctacctctttactgttaactcttaacagatgcagtcagcagtttctgggcacttctctcagtaggtgcctcatgctgacttctccagtagggtttcaggacaaactaccaaggaattgcctcagcctcctaccagtcctccctcacccaccttctgtctaggttcacttggtttgtcatcaggaactgagcaggtccaggactcagctttctgcttcagcctaagccagtactccttgtttgaggtaaaagccttaaaatttagctccctagctcttgattagaagcaatttggagtaagtgtgttttgatttaggcagggtagcttgggatacctttttaaaaacaccagatattaaaatgtctggcaaggttagaatcagactagatgatttgcttctaaaaattagtttcagtgagtcccagggactaattaaggtttattttaaaaagtgtctaccttggtacgcagccacctcctgcatgctgtgcatgttattgggacttgtattataggcgatggtatgtgagaatccagttgggactcgctgttgccatcctctttgttgtatctggttttcatcactagactcagcaacccttctcaccttaactgccaccttccctacactctcagtttacagaggccactgggcctctggctgcagaatacaaagtcccgggctgttagaggagtcctttcctctctgcctgccctttcctgtccctccctcgaattctctctccccgtaagtgatgctggaaaagtcataggactggcaaagcaactgtttaaaccctttgtaaccggggccttgcccccacctcctgtcttttctccttgccttccccactcctgtgtcctcccatctatcctgtctttcctttcctcctctcagtgtcctcagcacccacaaggaattttcctatcactgtgaactttgctggtacagaggaataatatctgccttcacctttttttttttggaccatagctagccagtcatttcttaaacctcccttcctaaaatctggggggtcggggggaaagaaaaaaaaagccttagtggcctggttgttcaaaggataagaatagctttatcctgcactcagtacccgaactcacttcagtatgcttactgaggccatgagaacctgaggggcatctgcccaggacaggagccatggcatatgacaaagaccaatgagggaccaggaaaaaaagtgatgtcccctttccctgccacctccagcctctgccagcaatgagctgtccccctcccaccctacacagtagctggtcagggctgagtacagtcctgggggtaaggggatgacatgcccaggtgtcagctcaaaggatctctgcatcatcttgaggtgggaggcagggaaaggagcgccaatgaggttccctgcaacccccgccctccagcccaccgcccaaccttttacaaatggcattttcttaattgaaaatccgggaagcaggtgtgattacttttttgctcgtagatattgtcctaagttggaattctcccactgccctaaaactttccctagtagtcctttaaactcccccctccctttttggtagctgttttctccgtcctctctccacctgccctcttatctaggagctgtttgtaagcacgatttttttaacaggttatattgtacaggatcaatattttgctttttaacaaggatatttatgtaataagaaactttgccttaggcaggtgttggccagaaaagtccagattcctctgggatcccaccctggcctctcctggaactctgaacctgctgtggaaggaattggccatgaccttcacctctggagagtagggtctatggcgagggaaaagggtgttcaccatgataacctagtgcctccatagaggggtttggaaaaattccagtccgatttctttgtgtgtcagctgacttccttagctgattgttcccacttgcacctctccacctttggcactagaactcctgagacaccagtaactccagattatttaaagagaaaagtacaagacagaaatcttctagcactttgtaaacacagtgaataacctcttggagtatttttggctttatataaaacaaggtttttaattgtaaagtataagtgccattagaaaatgcacagggcatatctttgttaaagtagatttttcaatgttttacagaattacattttcaaaaaaaggtttttataatgaagttgtttattaaaaacttctgaatgatgtgttaaaaaaaaat

SEQ ID NO: 329517 - DNA, 5653 bp, Homo sapiens
caatggcccgaccgccgccactaccggggcctgagggggcctggcggagcccgagcgcggcccggcccgcagcgtggggccccgagcgcggtgaagagattgttttctgaaagctgcgttggaggctgtgacagagctgagagcctgtgtggagcggatggggaggctttctcaataacatggccctttgccattagccttgccatgaccacatttttcaccagcgtccccccctggattcaagatgcaaagcaggaggaggaagtgggctggaaactagttcccaggcctcggggccgggaggcggagagtcaagtgaagtgccaatgtgaaatttcgggaacacctttctcaaatggggagaagctgaggcctcacagcctcccgcaaccagagcagagaccatatagctgccctcagctgcactgtggcaaggcttttgcttccaaatacaagctgtataggcacatggccacccactcagcccagaaaccccaccagtgtatgtactgtgataagatgtttcaccgcaaggaccatctgcggaaccatctgcagacccatgatcctaacaaagaggccctccactgctctgagtgcggtaagaattacaatacgaagctgggctaccggcgccacctggccatgcatgctgccagcagcggtgacctcagctgcaaggtgtgcctgcagacctttgagagtacccaggccctgctagagcacctgaaggcccactcacgccgggtagcaggcggtgccaaggagaagaagcacccctgtgaccactgcgaccggcggttctatactcgtaaggatgtacggcggcacctagtggtgcacacaggccgtaaggacttcctgtgccagtactgtgcccagcggtttggccgtaaggaccacctgacgcgtcatgtcaagaagagccactcgcaggagctgctcaagatcaagacagagcccgtggacatgttaggcctactcagctgcagctccacagtcagtgtgaaggaagagctgagccctgtgctgtgcatggcctctcgggacgtaatggggaccaaggccttccctggcatgttgcccatgggcatgtatggtgcccacatccctaccatgcccagcacgggcgtgccacactccctggtgcacaacacgctgcccatgggtatgagctaccctctggaatcctcacctatctcttccccagctcagctccctccaaaataccagcttggatctacctcatacttgcccgacaaattgcccaaagtggaggtggatagttttctggcggagcttcctggaagcctgtctctctcatccgctgaaccccagcccgcctcacctcagccggcggcagctgcggccctcctagatgaagcactgcttgccaagagccccgccaacctctctgaggccctctgcgctgctaatgtggacttctcccacctactgggctttcttccactcaacctgcccccgtgtaacccacctggggccacaggaggcctggtcatgggctactcccaggctgaggcacagcccctgcttaccactttgcaagctcagcctcaagattccccaggagctgggggaccactgaactttgggcctctgcactccttgcctcctgtcttcacgtctggcctgagtagcaccaccctgcctcgtttccatcaagcattccagtagcccccacagaggccctcagctcagtttttggctctgttatggagccttagtacccaccccgtctgtgtcccccatgaaggcagctgagctttcagagctgggttcaaaaaaaaaaattccagtgtctgtatacaggagcacttggtttgggggttcaggctctaggatcgattccagaaggagccttgagccccaaccccgtgaaaagatctcataccgtaggacttcaggtattatttacttttatttttttgacctgaatcgggagccacacttggccctcttcctctccaaagcgccagaacctccttctctttggagaatggggaggcctcttggagacacagagggtttcaccttggatgacctctagagaaattgcccaagaagcccaccttctggtcccaacctgcagaccccacagcagtcagttggtcaggccctgctgtagaaggtcacttggctccattgcctgcttccaaccaatgggcaggagagaaggcctttatttctcgcccacccattcctcctgtaccagcacctccgttttcagtcagtgttgtccagcaacggtaccgtttacacagtcacctcagacacaccatttcacctcccttgccaagctgttagccttagagtgattgcagtgaacactgtttacacaccgtgaatccattcccatcagtccattccagttggcaccagcctgaaccatttggtacctggtgttaactggagtcctgtttacaaggtggagtcggggcttgctgacttctcttcatttgaggtcacatttttcccccgtggggaaataaactgactttggactgcttcagtctctgccatcttccatgactgcatttgttcctgcctgcctcggcggtatccacagaagacaggcaagaggattggagcagttttctcacaggtctgcaattctgtttttctccaagtacattatgaccccctcatccttctcttgaactggagaggggaagaaatgaaaggcatgcccacgtccgtcacctccccatcccctagtccccaccttgaacatcatgagctgttgttattagtcttggaagcagagtctgggttggtgtggatagcaaaggaggaagtctgagcccctcattggtcttcctcccacctgtcccttttccgggaagttgtggaattgttggaagaagagtttgcagaaggttaggaatgggtagatagctaagtcctaatctatgggtacattgttgtgtcccaaaccaaaattttccttatccacaatgtcccttctgtctcttccactttacagtggactcggccactgtgcataggcttctctgctctccatcaaatcacttccactttcctgtgcccccacccccgcctccagttttccgctagtatccggcaaggtttcttgcaacaaatgattagttcttttcttctgactcgtggggctccctgctgcagagagcacagcccttgcctggagcccaggaaccccatccttgcttcatctcagttcttcatgggcttcactcttcccactcacggaagggaggtagctcagggacctccactgtgggacccttgagacgcttccactctgattcagaaacacacttctacctctttactgttaactcttaacagatgcagtcagcagtttctgggcacttctctcagtaggtgcctcatgctgacttctccagtagggtttcaggacaaactaccaaggaattgcctcagcctcctaccagtcctccctcacccaccttctgtctaggttcacttggtttgtcatcaggaactgagcaggtccaggactcagctttctgcttcagcctaagccagtactccttgtttgaggtaaaagccttaaaatttagctccctagctcttgattagaagcaatttggagtaagtgtgttttgatttaggcagggtagcttgggatacctttttaaaaacaccagatattaaaatgtctggcaaggttagaatcagactagatgatttgcttctaaaaattagtttcagtgagtcccagggactaattaaggtttattttaaaaagtgtctaccttggtacgcagccacctcctgcatgctgtgcatgttattgggacttgtattataggcgatggtatgtgagaatccagttgggactcgctgttgccatcctctttgttgtatctggttttcatcactagactcagcaacccttctcaccttaactgccaccttccctacactctcagtttacagaggccactgggcctctggctgcagaatacaaagtcccgggctgttagaggagtcctttcctctctgcctgccctttcctgtccctccctcgaattctctctccccgtaagtgatgctggaaaagtcataggactggcaaagcaactgtttaaaccctttgtaaccggggccttgcccccacctcctgtcttttctccttgccttccccactcctgtgtcctcccatctatcctgtctttcctttcctcctctcagtgtcctcagcacccacaaggaattttcctatcactgtgaactttgctggtacagaggaataatatctgccttcacctttttttttttggaccatagctagccagtcatttcttaaacctcccttcctaaaatctggggggtcggggggaaagaaaaaaaaagccttagtggcctggttgttcaaaggataagaatagctttatcctgcactcagtacccgaactcacttcagtatgcttactgaggccatgagaacctgaggggcatctgcccaggacaggagccatggcatatgacaaagaccaatgagggaccaggaaaaaaagtgatgtcccctttccctgccacctccagcctctgccagcaatgagctgtccccctcccaccctacacagtagctggtcagggctgagtacagtcctgggggtaaggggatgacatgcccaggtgtcagctcaaaggatctctgcatcatcttgaggtgggaggcagggaaaggagcgccaatgaggttccctgcaacccccgccctccagcccaccgcccaaccttttacaaatggcattttcttaattgaaaatccgggaagcaggtgtgattacttttttgctcgtagatattgtcctaagttggaattctcccactgccctaaaactttccctagtagtcctttaaactcccccctccctttttggtagctgttttctccgtcctctctccacctgccctcttatctaggagctgtttgtaagcacgatttttttaacaggttatattgtacaggatcaatattttgctttttaacaaggatatttatgtaataagaaactttgccttaggcaggtgttggccagaaaagtccagattcctctgggatcccaccctggcctctcctggaactctgaacctgctgtggaaggaattggccatgaccttcacctctggagagtagggtctatggcgagggaaaagggtgttcaccatgataacctagtgcctccatagaggggtttggaaaaattccagtccgatttctttgtgtgtcagctgacttccttagctgattgttcccacttgcacctctccacctttggcactagaactcctgagacaccacttctcatgcttctccctccctaccagcggtcaaggctttggagccactcttttgtaactccagattatttaaagagaaaagtacaagacagaaatcttctagcactttgtaaacacagtgaataacctcttggagtatttttggctttatataaaacaaggtttttaattgtaaagtataagtgccattagaaaatgcacagggcatatctttgttaaagtagatttttcaatgttttacagaattacattttcaaaaaaaggtttttataatgaagttgtttattaaaaacttctgaatgatgtgttaaaaaaaaat

SEQ ID NO: 329518 - DNA, 5279 bp, Homo sapiens
caatggcccgaccgccgccactaccggggcctgagggggcctggcggagcccgagcgcggcccggcccgcagcgtggggccccgagcgcggcacatggccacccactcagcccagaaaccccaccagtgtatgtactgtgataagatgtttcaccgcaaggaccatctgcggaaccatctgcagacccatgatcctaacaaagaggccctccactgctctgagtgcggtaagaattacaatacgaagctgggctaccggcgccacctggccatgcatgctgccagcagcggtgacctcagctgcaaggtgtgcctgcagacctttgagagtacccaggccctgctagagcacctgaaggcccactcacgccgggtagcaggcggtgccaaggagaagaagcacccctgtgaccactgcgaccggcggttctatactcgtaaggatgtacggcggcacctagtggtgcacacaggccgtaaggacttcctgtgccagtactgtgcccagcggtttggccgtaaggaccacctgacgcgtcatgtcaagaagagccactcgcaggagctgctcaagatcaagacagagcccgtggacatgttaggcctactcagctgcagctccacagtcagtgtgaaggaagagctgagccctgtgctgtgcatggcctctcgggacgtaatggggaccaaggccttccctggcatgttgcccatgggcatgtatggtgcccacatccctaccatgcccagcacgggcgtgccacactccctggtgcacaacacgctgcccatgggtatgagctaccctctggaatcctcacctatctcttccccagctcagctccctccaaaataccagcttggatctacctcatacttgcccgacaaattgcccaaagtggaggtggatagttttctggcggagcttcctggaagcctgtctctctcatccgctgaaccccagcccgcctcacctcagccggcggcagctgcggccctcctagatgaagcactgcttgccaagagccccgccaacctctctgaggccctctgcgctgctaatgtggacttctcccacctactgggctttcttccactcaacctgcccccgtgtaacccacctggggccacaggaggcctggtcatgggctactcccaggctgaggcacagcccctgcttaccactttgcaagctcagcctcaagattccccaggagctgggggaccactgaactttgggcctctgcactccttgcctcctgtcttcacgtctggcctgagtagcaccaccctgcctcgtttccatcaagcattccagtagcccccacagaggccctcagctcagtttttggctctgttatggagccttagtacccaccccgtctgtgtcccccatgaaggcagctgagctttcagagctgggttcaaaaaaaaaaattccagtgtctgtatacaggagcacttggtttgggggttcaggctctaggatcgattccagaaggagccttgagccccaaccccgtgaaaagatctcataccgtaggacttcaggtattatttacttttatttttttgacctgaatcgggagccacacttggccctcttcctctccaaagcgccagaacctccttctctttggagaatggggaggcctcttggagacacagagggtttcaccttggatgacctctagagaaattgcccaagaagcccaccttctggtcccaacctgcagaccccacagcagtcagttggtcaggccctgctgtagaaggtcacttggctccattgcctgcttccaaccaatgggcaggagagaaggcctttatttctcgcccacccattcctcctgtaccagcacctccgttttcagtcagtgttgtccagcaacggtaccgtttacacagtcacctcagacacaccatttcacctcccttgccaagctgttagccttagagtgattgcagtgaacactgtttacacaccgtgaatccattcccatcagtccattccagttggcaccagcctgaaccatttggtacctggtgttaactggagtcctgtttacaaggtggagtcggggcttgctgacttctcttcatttgaggtcacatttttcccccgtggggaaataaactgactttggactgcttcagtctctgccatcttccatgactgcatttgttcctgcctgcctcggcggtatccacagaagacaggcaagaggattggagcagttttctcacaggtctgcaattctgtttttctccaagtacattatgaccccctcatccttctcttgaactggagaggggaagaaatgaaaggcatgcccacgtccgtcacctccccatcccctagtccccaccttgaacatcatgagctgttgttattagtcttggaagcagagtctgggttggtgtggatagcaaaggaggaagtctgagcccctcattggtcttcctcccacctgtcccttttccgggaagttgtggaattgttggaagaagagtttgcagaaggttaggaatgggtagatagctaagtcctaatctatgggtacattgttgtgtcccaaaccaaaattttccttatccacaatgtcccttctgtctcttccactttacagtggactcggccactgtgcataggcttctctgctctccatcaaatcacttccactttcctgtgcccccacccccgcctccagttttccgctagtatccggcaaggtttcttgcaacaaatgattagttcttttcttctgactcgtggggctccctgctgcagagagcacagcccttgcctggagcccaggaaccccatccttgcttcatctcagttcttcatgggcttcactcttcccactcacggaagggaggtagctcagggacctccactgtgggacccttgagacgcttccactctgattcagaaacacacttctacctctttactgttaactcttaacagatgcagtcagcagtttctgggcacttctctcagtaggtgcctcatgctgacttctccagtagggtttcaggacaaactaccaaggaattgcctcagcctcctaccagtcctccctcacccaccttctgtctaggttcacttggtttgtcatcaggaactgagcaggtccaggactcagctttctgcttcagcctaagccagtactccttgtttgaggtaaaagccttaaaatttagctccctagctcttgattagaagcaatttggagtaagtgtgttttgatttaggcagggtagcttgggatacctttttaaaaacaccagatattaaaatgtctggcaaggttagaatcagactagatgatttgcttctaaaaattagtttcagtgagtcccagggactaattaaggtttattttaaaaagtgtctaccttggtacgcagccacctcctgcatgctgtgcatgttattgggacttgtattataggcgatggtatgtgagaatccagttgggactcgctgttgccatcctctttgttgtatctggttttcatcactagactcagcaacccttctcaccttaactgccaccttccctacactctcagtttacagaggccactgggcctctggctgcagaatacaaagtcccgggctgttagaggagtcctttcctctctgcctgccctttcctgtccctccctcgaattctctctccccgtaagtgatgctggaaaagtcataggactggcaaagcaactgtttaaaccctttgtaaccggggccttgcccccacctcctgtcttttctccttgccttccccactcctgtgtcctcccatctatcctgtctttcctttcctcctctcagtgtcctcagcacccacaaggaattttcctatcactgtgaactttgctggtacagaggaataatatctgccttcacctttttttttttggaccatagctagccagtcatttcttaaacctcccttcctaaaatctggggggtcggggggaaagaaaaaaaaagccttagtggcctggttgttcaaaggataagaatagctttatcctgcactcagtacccgaactcacttcagtatgcttactgaggccatgagaacctgaggggcatctgcccaggacaggagccatggcatatgacaaagaccaatgagggaccaggaaaaaaagtgatgtcccctttccctgccacctccagcctctgccagcaatgagctgtccccctcccaccctacacagtagctggtcagggctgagtacagtcctgggggtaaggggatgacatgcccaggtgtcagctcaaaggatctctgcatcatcttgaggtgggaggcagggaaaggagcgccaatgaggttccctgcaacccccgccctccagcccaccgcccaaccttttacaaatggcattttcttaattgaaaatccgggaagcaggtgtgattacttttttgctcgtagatattgtcctaagttggaattctcccactgccctaaaactttccctagtagtcctttaaactcccccctccctttttggtagctgttttctccgtcctctctccacctgccctcttatctaggagctgtttgtaagcacgatttttttaacaggttatattgtacaggatcaatattttgctttttaacaaggatatttatgtaataagaaactttgccttaggcaggtgttggccagaaaagtccagattcctctgggatcccaccctggcctctcctggaactctgaacctgctgtggaaggaattggccatgaccttcacctctggagagtagggtctatggcgagggaaaagggtgttcaccatgataacctagtgcctccatagaggggtttggaaaaattccagtccgatttctttgtgtgtcagctgacttccttagctgattgttcccacttgcacctctccacctttggcactagaactcctgagacaccacttctcatgcttctccctccctaccagcggtcaaggctttggagccactcttttgtaactccagattatttaaagagaaaagtacaagacagaaatcttctagcactttgtaaacacagtgaataacctcttggagtatttttggctttatataaaacaaggtttttaattgtaaagtataagtgccattagaaaatgcacagggcatatctttgttaaagtagatttttcaatgttttacagaattacattttcaaaaaaaggtttttataatgaagttgtttattaaaaacttctgaatgatgtgttaaaaaaaaat

SEQ ID NO: 329519 - DNA, 4904 bp, Homo sapiens
caatggcccgaccgccgccactaccggggcctgagggggcctggcggagcccgagcgcggcccggcccgcagcgtggggccccgagcgcggtgaagagattgttttctgaaagctgcgttggaggctgtgacagagctgagagcctgtgtggagcggatggggaggctttctcaataacatggccctttgccattagccttgccatgaccacatttttcaccagcgtccccccctggattcaagatgcaaagcaggaggaggaagtgggctggaaactagttcccaggcctcggggccgggaggcggagagtcaagtgaagtgccaatgtgaaatttcgggaacacctttctcaaatggggagaagctgaggcctcacagcctcccgcaaccagagcagagaccatatagctgccctcagctgcactgtggcaaggcttttgcttccaaatacaagctgtataggcacatggccacccactcagcccagaaaccccaccagtgtatgtactgtgataagatgtttcaccgcaaggaccatctgcggaaccatctgcagacccatgatcctaacaaagaggccctccactgctctgagtgcggtaagaattacaatacgaagctgggctaccggcgccacctggccatgcatgctgccagcagcggtgacctcagctgcaaggtgtgcctgcagacctttgagagtacccaggccctgctagagcacctgaaggcccactcacgccgggtagcaggcggtgccaaggagaagaagcacccctgtgaccactgcgaccggcggttctatactcgtaaggatgtacggcggcacctagtggtgcacacaggccgtaaggacttcctgtgccagtactgtgcccagcggtttggccgtaaggaccacctgacgcgtcatgtcaagaagagccactcgcaggagctgctcaagatcaagacagagcccgtggacatgttaggcctactcagctgcagctccacagtcagtgtgaaggaagagctgagccctgtgctgtgcatggcctctcgggacgtaatggggaccaaggccttccctggcatgttgcccatgggcatgtatggtgcccacatccctaccatgcccagcacgggcgtgccacactccctggtgcacaacacgctgcccatgggtatgagctaccctctggaatcctcacctatctcttccccagctcagctccctccaaaataccagcttggatctacctcatacttgcccgacaaattgcccaaagtggaggtggatagttttctggcggagcttcctggaagcctgtctctctcatccgctgaaccccagcccgcctcacctcagccggcggcagctgcggccctcctagatgaagcactgcttgccaagagccccgccaacctctctgaggccctctgcgctgctaatgtggacttctcccacctactgggctttcttccactcaacctgcccccgtgtaacccacctggggccacaggaggcctggtcatgggctactcccaggctgaggcacagcccctgcttaccactttgcaagctcagcctcaagattccccaggagctgggggaccactgaactttgggcctctgcactccttgcctcctgtcttcacgtctggcctgagtagcaccaccctgcctcgtttccatcaagcattccagtagcccccacagaggccctcagctcagtttttggctctgttatggagccttagtacccaccccgtctgtgtcccccatgaaggcagctgagctttcagagctgggttcaaaaaaaaaaattccagtgtctgtatacaggagcacttggtttgggggttcaggctctaggatcgattccagaaggagccttgagccccaaccccgtgaaaagatctcataccgtaggacttcaggtattatttacttttatttttttgacctgaatcgggagccacacttggccctcttcctctccaaagcgccagaacctccttctctttggagaatggggaggcctcttggagacacagagggtttcaccttggatgacctctagagaaattgcccaagaagcccaccttctggtcccaacctgcagaccccacagcagtcagttggtcaggccctgctgtagaaggtcacttggctccattgcctgcttccaaccaatgggcaggagagaaggcctttatttctcgcccacccattcctcctgtaccagcacctccgttttcagtcagtgttgtccagcaacggtaccgtttacacagtcacctcagacacaccatttcacctcccttgccaagctgttagccttagagtgattgcagtgaacactgtttacacaccgtgaatccattcccatcagtccattccagttggcaccagcctgaaccatttggtacctggtgttaactggagtcctgtttacaaggtggagtcggggcttgctgacttctcttcatttgaggtcacatttttcccccgtggggaaataaactgactttggactgcttcagtctctgccatcttccatgactgcatttgttcctgcctgcctcggcggtatccacagaagacaggcaagaggattggagcagttttctcacaggtctgcaattctgtttttctccaagtacattatgaccccctcatccttctcttgaactggagaggggaagaaatgaaaggcatgcccacgtccgtcacctccccatcccctagtccccaccttgaacatcatgagctgttgttattagtcttggaagcagagtctgggttggtgtggatagcaaaggaggaagtctgagcccctcattggtcttcctcccacctgtcccttttccgggaagttgtggaattgttggaagaagagtttgcagaaggttaggaatgggtagatagctaagtcctaatctatgggtacattgttgtgtcccaaaccaaaattttccttatccacaatgtcccttctgtctcttccactttacagtggactcggccactgtgcataggcttctctgctctccatcaaatcacttccactttcctgtgcccccacccccgcctccagttttccgctagtatccggcaaggtttcttgcaacaaatgattagttcttttcttctgactcgtggggctccctgctgcagagagcacagcccttgcctggagcccaggaaccccatccttgcttcatctcagttcttcatgggcttcactcttcccactcacggaagggaggtagctcagggacctccactgtgggacccttgagacgcttccactctgattcagaaacacacttctacctctttactgttaactcttaacagatgcagtcagcagtttctgggcacttctctcagtaggtgcctcatgctgacttctccagtagggtttcaggacaaactaccaaggaattgcctcagcctcctaccagtcctccctcacccaccttctgtctaggttcacttggtttgtcatcaggaactgagcaggtccaggactcagctttctgcttcagcctaagccagtactccttgtttgaggtaaaagccttaaaatttagctccctagctcttgattagaagcaatttggagtaagtgtgttttgatttaggcagggtagcttgggatacctttttaaaaacaccagatattaaaatgtctggcaaggttagaatcagactagatgatttgcttctaaaaattagtttcagtgagtcccagggactaattaaggtttattttaaaaagtgtctaccttggtacgcagccacctcctgcatgctgtgcatgttattgggacttgtattataggcgatggtatgtgagaatccagttgggactcgctgttgccatcctctttgttgtatctggttttcatcactagactcagcaacccttctcaccttaactgccaccttccctacactctcagtttacagaggccactgggcctctggctgcagaatacaaagtcccgggctgttagaggagtcctttcctctctgcctgccctttcctgtccctccctcgaattctctctccccgtaagtgatgctggaaaagtcataggactggcaaagcaactgtttaaaccctttgtaaccggggccttgcccccacctcctgtcttttctccttgccttccccactcctgtgtcctcccatctatcctgtctttcctttcctcctctcagtgtcctcagcacccacaaggaattttcctatcactgtgaactttgctggtacagaggaataatatctgccttcacctttttttttttggaccatagctagccagtcatttcttaaacctcccttcctaaaatctggggggtcggggggaaagaaaaaaaaagccttagtggcctggttgttcaaaggataagaatagctttatcctgcactcagtacccgaactcacttcagtatgcttactgaggccatgagaacctgaggggcatctgcccaggacaggagccatggcatatgacaaagaccaatgagggaccaggaaaaaaagtgatgtcccctttccctgccacctccagcctctgccagcaatgagctgtccccctcccaccctacacagtagctggtcagggctgagtacagtcctgggggtaaggggatgacatgcccaggtgtcagctcaaaggatctctgcatcatcttgaggtgggaggcagggaaaggagcgccaatgaggttccctgcaacccccgccctccagcccaccgcccaaccttttgctaataggttttgttctgttgagactactgtaaaaaagtgtgcttaccttcttgctgtttcaaactgtcctaagacaaaactaaacgagtgctccactggttacgcttttattgctaaactcaggggcctt

SEQ ID NO: 329520 - DNA, 1071 bp, Homo sapiens
cctagtgtgacgtgaaagcaaagttttaaaatttttttctcctctgcaagaaaatatatttcagaaaatctctatctcaaaaatgaagcaattaagaactgtctggctgtgaggatctggcctcaacttgacttaaagcaacaacttcagttacatatcaagatgtgcgtgagaatgaacctgctctgctcagccaacgtgctgagtgacttgatgtttgtaataaataaataaataaacaacaaacaggttgtcatgaaatatcctttgtaattataaacacaggaaactttctgagatgcaagtgggtgttaaatggttcagcaaagccaagccagagcagttggtgtgctttgaaatgaagcaacattggaaaaatgaaatctactgaaagatcactacgtgtttcaaagaactgactagaaccagaactcttcagaaaagaatgtgctaaaggtttgtccttgagaagtttccaagccaagacactcctaggagcacttcccattgaggccgaaaggctcatccacttacagcgattcatgggaaaagaggacagcaccctcatctttggtccaagaacacaatcctgagtgacacaggattgccctgaaagtcaacagcatccgtcttacaaaaatcaacaacactcgcttttcaaacttccaaagaatttactggtctggtttggccttttggtgccacattccattccagaaccccagctaaaatgttctcaagggctgaccagagattcctcctcctttctctgggctggtacaacttgaccgctgcttgacatcaaggtcaactggagactgggaacagttatgtaactgtgttgtaaattgaattagagctgtacatgagcccagaccaagtaaccagtgcagctccaggcaagagcagcaacatgtcccccagagacagcattggaggaacagcttactggggaatggaaaaagggtatcacagggtaaaaaagaaaccatctctttccagtccttctaaagtctgggcagttggctgcccatcacatgtggaataagaggggggcttaagtgcagaggg

SEQ ID NO: 329521 - DNA, 334 bp, Homo sapiens
agatgggatttcaccatgttggtcaggctcaaactcctgacctcaaatgatctgcctcccttggccttccaaagtgctgggattacagacgtgagccactgcaccacatccagaaccagtgttttgttaatcttttgtggatgtttggtattttttgtttgtttgttacagtttagttctgctctgatgtttgttacttcttttcttctgctgggtttgggttcagtttattcttgtttctctagttccttgaagtgtgaccttagattttctgtttgtgctccttcagatgttttggtgtgggttttttttttttttttttgagatgagtctc

SEQ ID NO: 329522 - DNA, 321 bp, Homo sapiens
gccacgcgtgtccgcacaatataatttcattcgacacaacacccagacgtcctcccctttggagacaaggcaggaatggaaagaagagcgaacagcaccagcgtttgagtgaactcctgtcttggacagtgaatccatctcacccccttaagaaatgtcctgcaagaaggacagtcaacaaccccggggactcggatctgcaactcgacctgcgctgggacattaccccacgcaccccggaggagccccaggagaggaagtcccagggaaaacctttaccccgaccctaccaaacacaaaataaaatacctttttcctaca

SEQ ID NO: 329523 - DNA, 349 bp, Homo sapiens
ggtgaagagcttctctccaaagtctccagcatatttttggttttcatgaatttttcagagagcatctgtttttaagtaagtagaaacatactcagggaaaataaggcctgttagaagaagttcaagtcaaagtctataaacatgccctctttgcatgtatgctaaaggaaatttaataccatcaacacttgattatttcctagagtgagagaatccaaaatagcatatcgaaaacaactttcttatctatccctgcaccatgcaaaactactggttctcacaagtccactacggaagccaacagttattttgtttctcattacaaatagctgcacccaatgcccatggg

SEQ ID NO: 329524 - DNA, 2537 bp, Homo sapiens
ggcacgaggcgccctgcagattgtctcttgttgcgtaagtttttttgaccgtcactcgtgtcagcttcaaagtcagatagatttttctcccagcatgttctacttccgaggctgtggccgttgggtcgcggtttccttcaccaagcagcaatttccgttggcacggttgagcagtgacagcgcggcgccccggactccgcacttcgacgtgatagtcattggtggaggacatgccgggactgaggcagccaccgccgccgctcggtgcggctctcggactctgctcctcactcaccgcgtggacacgatcggtcagatgtcatgtaatccttcctttggtggcatcggaaagggacatttaatgagggaagtagatgccttggatggcctgtgttctcgcatctgtgaccagtctggtgtacattataaagtattaaaccggcgtaagggaccagctgtgtggggtctgagagctcagattgataggaaactctataaacagaacatgcagaaagaaatcttgaatacaccactgcttactgttcaggagggagctgtagaagatcttattcttacagaaccagagcctgaacacactgggaaatgccgtgtcagtggggttgttttggtggatggaagcacagtatatgcagagagtgtgattctgactactgggacatttctgagaggcatgattgtaattggattggagacgcatccagcaggacgtttaggggatcagccttctataggattggctcagacactggagaagttagggtttgtggtgggaaggttgaagactgggactccaccccgaattgccaaagagtccattaatttcagtattctaaacaagcatataccggacaatccatccataccattcagctttaccaatgagacagtatggattaagccagaagatcagctgccatgttacttgactcacaccaaccctagagtggatgagattgtccttaagaaccttcaccttaatagtcatgttaaagaaacgacaagaggacctcgatactgtccctccattgaatcaaaagttttgcgttttccaaaccgtctacatcaggtttggttggaacctgaaggaatggattctgaccttatctacccacaggggttatctatgacgctaccagctgagttacaagagaaaatgatcacatgcatcagaggcttggagaaagctaaagtgattcagccaggctacggtgttcagtatgattacttagatccccgtcagatcaccccttccttggagactcatttggttcaacgactcttctttgctggacagatcaatggcaccactggttatgaggaagctgcagctcaaggtgtgatagccggaatcaacgccagtcttcgggtcagtcgcaagcctccctttgtggttagccgaacagaaggttacataggagtcttgattgatgacctcactactctgggcaccagtgaaccataccgcatgtttaccagccgagtagagttccgtttgtcactgcgccctgataatgctgacagccggctcacactgcgagggtataaagacgctggctgtgtgtcccaacaacgatatgaaagagcttgttggatgaagtcttctttagaagaaggcatttctgtgttgaaatctattgagtttttgagctctaaatggaaaaaattaatcccagaggcttctataagtactagtagaagtctgcctgtcagagctctcgatgttctgaagtatgaggaagttgacatggattcattagccaaggctgttccagagcccttgaagaagtatactaaatgtagagagctggctgaaagactgaaaatagaagccacttatgaatcagtgttgttccatcaactacaagaaataaagggagttcagcaagatgaagctctccaactgccaaaagacctagattatttgactatcagggatgtgtctttgtcccatgaagttcgagagaaactacattttagtcgtccacagacgatcggggctgctagtcgcatacccggagtaacacctgccgccatcatcaatctgctgagatttgtgaagaccactcaacgaagacagtcggctatgaatgaatcatccaagactgatcaatacttatgtgatgcagacagacttcaagagagagagttatagctttcaattcataaaagatttttaaagagcatataaataatttgatcaatacaacagtatagataaaagaattatttagcacatgttaaaatagctttattaggttactatgggtttgccattaatttctgagtgggacagaaattataattgtgctttttcgtgtatatgaaaaaactagtcgtaaacaatttgtactctttctttaaggagctgtaatacaaataactttgtgcagtgttcatcaaagagagagacagtgaacctaaaactgaacctggaataaaactcaacatgcagatttgcctactcatagggactttgcctattaagtctaccaaattaaaagtcttatcattcagcg

SEQ ID NO: 329525 - DNA, 2653 bp, Homo sapiens
ggcacgaggcgccctgcagattgtctcttgttgcgtaagtttttttgaccgtcactcgtgtcagcttcaaagtcagatagatttttctcccagcatgttctacttccgaggctgtggccgttgggtcgcggtttccttcaccaagcagcaatttccgttggcacggttgagcagtgacagcgcggcgccccggactccgcacttcgacgtgatagtcattggtggaggacatgccgggactgaggcagccaccgccgccgctcggtgcggctctcggactctgctcctcactcaccgcgtggacacgatcggtcagatgtcatgtaatccttcctttggtggcatcggaaagggacatttaatgagggaagtagatgccttggatggcctgtgttctcgcatctgtgaccagtctggtgtacattataaagtattaaaccggcgtaagggaccagctgtgtggggtctgagagctcagattgataggaaactctataaacagaacatgcagaaagaaatcttgaatacaccactgcttactgttcaggagggagctgtagaagatcttattcttacagaaccagagcctgaacacactgggaaatgccgtgtcagtggggttgttttggtggatggaagcacagtatatgcagagagtgtgattctgactactgggacatttctgagaggcatgattgtaattggattggagacgcatccagcaggacgtttaggggatcagccttctataggattggctcagacactggagaagttagggtttgtggtgggaaggttgaagactgggactccaccccgaattgccaaagagtccattaatttcagtattctaaacaagcatataccggacaatccatccataccattcagctttaccaatgagacagtatggattaagccagaagatcagctgccatgttacttgactcacaccaaccctagagtggatgagattgtccttaagaaccttcaccttaatagtcatgttaaagaaacgacaagaggacctcgatactgtccctccattgaatcaaaagttttgcgttttccaaaccgtctacatcaggtttggttggaacctgaaggaatggattctgaccttatctacccacaggggttatctatgacgctaccagctgagttacaagagaaaatgatcacatgcatcagaggcttggagaaagctaaagtgattcagccaggctacggtgttcagtatgattacttagatccccgtcagatcaccccttccttggagactcatttggttcaacgactcttctttgctggacagatcaatggcaccactggttatgaggaagctgcagctcaaagtgttgctctgttgccaggctggagtgcagtgatatgatctcccagcttcaagcgatcctcctgcctcagccctccctagtagctgggactgcaggcatgcaccacaacacccagggtgtgatagccggaatcaacgccagtcttcgggtcagtcgcaagcctccctttgtggttagccgaacagaaggttacataggagtcttgattgatgacctcactactctgggcaccagtgaaccataccgcatgtttaccagccgagtagagttccgtttgtcactgcgccctgataatgctgacagccggctcacactgcgagggtataaagacgctggctgtgtgtcccaacaacgatatgaaagagcttgttggatgaagtcttctttagaagaaggcatttctgtgttgaaatctattgagtttttgagctctaaatggaaaaaattaatcccagaggcttctataagtactagtagaagtctgcctgtcagagctctcgatgttctgaagtatgaggaagttgacatggattcattagccaaggctgttccagagcccttgaagaagtatactaaatgtagagagctggctgaaagactgaaaatagaagccacttatgaatcagtgttgttccatcaactacaagaaataaagggagttcagcaagatgaagctctccaactgccaaaagacctagattatttgactatcagggatgtgtctttgtcccatgaagttcgagagaaactacattttagtcgtccacagacgatcggggctgctagtcgcatacccggagtaacacctgccgccatcatcaatctgctgagatttgtgaagaccactcaacgaagacagtcggctatgaatgaatcatccaagactgatcaatacttatgtgatgcagacagacttcaagagagagagttatagctttcaattcataaaagatttttaaagagcatataaataatttgatcaatacaacagtatagataaaagaattatttagcacatgttaaaatagctttattaggttactatgggtttgccattaatttctgagtgggacagaaattataattgtgctttttcgtgtatatgaaaaaactagtcgtaaacaatttgtactctttctttaaggagctgtaatacaaataactttgtgcagtgttcatcaaagagagagacagtgaacctaaaactgaacctggaataaaactcaacatgcagatttgcctactcatagggactttgcctattaagtctaccaaattaaaagtcttatcattcagcg

SEQ ID NO: 329526 - DNA, 2664 bp, Homo sapiens
ggcacgaggcgccctgcagattgtctcttgttgcgtcagatgtcatgtaatccttcctttggtggcatcggaaagggacatttaatgagggaagtagatgccttggatggcctgtgttctcgcatctgtgaccagtctggtgtacattataaagtattaaaccggcgtaagggaccagctgtgtggggtctgagagctcagattgataggaaactctataaacagaacatgcagaaagaaatcttgaatacaccactgcttactgttcaggagggagctgtagaagatcttattcttacagaaccagagcctgaacacactgggaaatgccgtgtcagtggggttgttttggtggatggaagcacagtatatgcagagagtgtgattctgactactgggacatttctgagaggcatgattgtaattggattggagacgcatccagcaggacgtttaggggatcagccttctataggattggctcagacactggagaagttagggtttgtggtgggaaggttgaagactgggactccaccccgaattgccaaagagtccattaatttcagtattctaaacaagcatataccggacaatccatccataccattcagctttaccaatgagacagtatggattaagccagaagatcagctgccatgttacttgactcacaccaaccctagagtggatgagattgtccttaagaaccttcaccttaatagtcatgttaaagaaacgacaagaggacctcgatactgtccctccattgaatcaaaagttttgcgttttccaaaccgtctacatcaggtttggttggaacctgaaggaatggattctgaccttatctacccacaggggttatctatgacgctaccagctgagttacaagagaaaatgatcacatgcatcagaggcttggagaaagctaaagtgattcagccagacggagttttgctcttgttgcccaggatggagtgcaatggtgcgatctcggctcaccacaacctccccctgccaggctacggtgttcagtatgattacttagatccccgtcagatcaccccttccttggagactcatttggttcaacgactcttctttgctggacagatcaatggcaccactggttatgaggaagctgcagctcaaggtgtgatagccggaatcaacgccagtcttcgggtcagtcgcaagcctccctttgtggttagccgaacagaaggttacataggagtcttgattgatgacctcactactctgggcaccagtgaaccataccgcatgtttaccagccgagtagagttccgtttgtcactgcgccctgataatgctgacagccggctcacactgcgagggtataaagacgctggctgtgtgtcccaacaacgatatgaaagagcttgttggatgaagtcttctttagaagaaggcatttctgtgttgaaatctattgagtttttgagctctaaatggaaaaaattaatcccagaggcttctataagtactagtagaagtctgcctgtcagagctctcgatgttctgaagtatgaggaagttgacatggattcattagccaaggctgttccagagcccttgaagaagtatactaaatgtagagagctggctgaaagactgaaaatagaagccacttatgaatcagtgttgttccatcaactacaagaaataaagggagttcagcaagatgaagctctccaactgccaaaagacctagattatttgactatcagggatgtgtctttgtcccatgaagttcgagagaaactacattttagtcgtccacagacgatcggggctgctagtcgcatacccggagtaacacctgccgccatcatcaatctgctgagatttgtgaagaccactcaacgaagacagtcggctatgaatgaatcatccaagactgatcaatacttatgtgatgcagacagacttcaagagagagagttatagctttcaattcataaaagatttttaaagagcatataaataatttgatcaatacaacagtatagataaaagaattatttagcacatgttaaaatagctttattaggttactatgggtttgccattaatttctgagtgggacagaaattataattgtgctttttcgtgtatatgaaaaaactagtcgtaaacaatttgtactctttctttaaggagctgtaatacaaataactttgtgcagtgttcatcaaagagagagacagtgaacctaaaactgaacctggaataaaactcaacatgcagatttgcctactcatagggactttgcctattaagtctaccaaattaaaagtcttatcattcagcgagaagaagggaccaaagaaaaaaaaggatgggctcgttgggcctaagggggaggctctggggggcgggttcctgtatgggggggaattactggtccctccttcagtgactcgctgggttcgggccgtggggtggggggagggggttcagggtgcttaagggggggagagggggtttcccccaaggtggggggtaaccgcaggagagacttgtggagcaaaggcgcacataggcccaggacccggaaagggcgcgtcgcgtggtgtttacatgacgcccccccccggggggggtgcaaaaagggcgctcgaggaagggggcgaggcgccg

SEQ ID NO: 329527 - DNA, 3391 bp, Homo sapiens
agcgcgggtgctgtggaacttggcgtaggacgcaggctgcttccttcccgcctcccccggtctgaagcgggggacctcttcctttcctcaaagtcagatgtcatgtaatccttcctttggtggcatcggaaagggacatttaatgagggaagtagatgccttggatggcctgtgttctcgcatctgtgaccagtctggtgtacattataaagtattaaaccggcgtaagggaccagctgtgtggggtctgagagctcagattgataggaaactctataaacagaacatgcagaaagaaatcttgaatacaccactgcttactgttcaggagggagctgtagaagatcttattcttacagaaccagagcctgaacacactgggaaatgccgtgtcagtggggttgttttggtggatggaagcacagtatatgcagagagtgtgattctgactactgggacatttctgagaggcatgattgtaattggattggagacgcatccagcaggacgtttaggggatcagccttctataggattggctcagacactggagaagttagggtttgtggtgggaaggttgaagactgggactccaccccgaattgccaaagagtccattaatttcagtattctaaacaagcatataccggacaatccatccataccattcagctttaccaatgagacagtatggattaagccagaagatcagctgccatgttacttgactcacaccaaccctagagtggatgagattgtccttaagaaccttcaccttaatagtcatgttaaagaaacgacaagaggacctcgatactgtccctccattgaatcaaaagttttgcgttttccaaaccgtctacatcaggtttggttggaacctgaaggaatggattctgaccttatctacccacaggggttatctatgacgctaccagctgagttacaagagaaaatgatcacatgcatcagaggcttggagaaagctaaagtgattcagccagacggagttttgctcttgttgcccaggatggagtgcaatggtgcgatctcggctcaccacaacctccccctgccaggctacggtgttcagtatgattacttagatccccgtcagatcaccccttccttggagactcatttggttcaacgactcttctttgctggacagatcaatggcaccactggttatgaggaagctgcagctcaaggtgtgatagccggaatcaacgccagtcttcgggtcagtcgcaagcctccctttgtggttagccgaacagaaggttacataggagtcttgattgatgacctcactactctgggcaccagtgaaccataccgcatgtttaccagccgagtagagttccgtttgtcactgcgccctgataatgctgacagccggctcacactgcgagggtataaagacgctggctgtgtgtcccaacaacgatatgaaagagcttgttggatgaagtcttctttagaagaaggcatttctgtgttgaaatctattgagtttttgagctctaaatggaaaaaattaatcccagaggcttctataagtactagtagaagtctgcctgtcagagctctcgatgttctgaagtatgaggaagttgacatggattcattagccaaggctgttccagagcccttgaagaagtatactaaatgtagagagctggctgaaagactgaaaatagaagccacttatgaatcagtgttgttccatcaactacaagaaataaagggagttcagcaagatgaagctctccaactgccaaaagacctagattatttgactatcagggatgtgtctttgtcccatgaagttcgagagaaactacattttagtcgtccacagacgatcggggctgctagtcgcatacccggagtaacacctgccgccatcatcaatctgctgagatttgtgaagaccactcaacgaagacagtcggctatgaatgaatcatccaagactgatcaatacttatgtgatgcagacagacttcaagagagagagttatagctttcaattcataaaagatttttaaagagcatataaataatttgatcaatacaacagtatagataaaagaattatttagcacatgttaaaatagctttattaggttactatgggtttgccattaatttctgagtgggacagaaattataattgtgctttttcgtgtatatgaaaaaactagtcgtaaacaatttgtactctttctttaaggagctgtaatacaaataactttgtgcagtgttcatcaaagagagagacagtgaacctaaaactgaacctggaataaaactcaacatgcagatttgcctactcatagggactttgcctattaagtctaccaaattaaaagtcttatcattcagcgtgttttgagagttaataatcttttgcttggttatactaggctaggaagcaatatcaaagcccttaaattctcaagactaaagacttgagattatataaaattatccagaatcattcagctaatactattggaatatagtatgtagggtgaaagttgacagaaatctgtacttcttcaggaaatcctcactggtaattgttttgaacattaatgaaagccctataaaatagaaagattggaaatcaccattgtttcctattatccacagtgtggatggatacttatttggtgacctagttatgggagaattgagtaacgttagttattttatatcataccataaaaatattttcttaagaaattgtcatggccatcatttcttaataatgaagacaggtccatagtaactggtgagtggtgtttccctgtttttaagtcagaatgacagaaaaaacagaatagtggtagtacccctcttcctctccagtacttcaatggtatgtcttcacaggggttagagtgggataatcagctgggccttttgactcagatacctcagatacctcaaccattctaaatagactaagggatgaatacagccaaatgggccagacagccctgcttgtctctggaattccaacccagatctctggtgtcagcctagggagaagctcccgtgtcaccttcgggccaaagcaggtactcaggagagttctaagggccccaaagtcactttggctacagatgtgtatgttaagcctgattatgggtgtgaggcaaccaagtatcttgttactataattgcatatggccacttggaggtagcttagttttcttgggtttattttatctaattttagtctttccagaaagcagtaagattagtagcaagtaaaaagtatttgtagtgctggataatttaggaatgatgaatattttttaatacttgattcagtgatttcaaaaggtcgtaacttttagtcatagctactcctggg

SEQ ID NO: 329528 - DNA, 890 bp, Homo sapiens
tggtagtattggttatggttcattgtccggagagtatattgttgaagaggcttctataagtactagtagaagtctacctgtcagagctctcgatgttctgaagtatgaggaagttgacatggattcattagccaaggctgttccagagcccttgaagaagtatactaaatgtagagagctggctgaaagactgaaaatagaagccacttatgaatcagtgttgttccatcaactacaagaaataaagggagttcagcaagatgaagctctccaactgccaaaagacctagattatttgactatcagggatgtgtctttgtcccatgaagttcgagagaaactacattttagtcgtccacagacgatcggggctgctagtcgcatacccggagtaacacctgccgccatcatcaatctgctgagatttgtgaagaccactcaacgaagacagtcggctatgaatgaatcatccaagactgatcaatacttatgtgatgcagacagacttcaagagagagagttatagctttcaattcataaaagatttttaaagagcatataaataatttgatcaatacaacagtatagataaaagaattatttagcacatgttaaaatagctttattaggttactatgggtttgccattaatttctgagtgggacagaaattataattgtgctttttcgtgtatatgaaaaaactagtcgtaaacaatttgtactctttctttaaggagctgtaatacaaataactttgtgcagtgttcatcaaagagagagacagtgaacctaaaactgaacctggaataaaactcaacatgcagatttgcctactcatagggactttgcctattaagtctaccaaattaaaagtcttatcattcagcg

SEQ ID NO: 329529 - DNA, 2540 bp, Homo sapiens
ggcacgaggcgccctgcagattgtctcttgttgcgtaagtttttttgaccgtcactcgtgtcagcttcaaagtcagatagatttttctcccagcatgttctacttccgaggctgtggccgttgggtcgcggtttccttcaccaagcagcaatttccgttggcacggttgagcagtgacagcgcggcgccccggactccgcacttcgacgtgatagtcattggtggaggacatgccgggactgaggcagccaccgccgccgctcggtgcggctctcggactctgctcctcactcaccgcgtggacacgatcggtcagatgtcatgtaatccttcctttggtggcatcggaaagggacatttaatgagggaagtagatgccttggatggcctgtgttctcgcatctgtgaccagtctggtgtacattataaagtattaaaccggcgtaagggaccagctgtgtggggtctgagagctcagattgataggaaactctataaacagaacatgcagaaagaaatcttgaatacaccactgcttactgttcaggagggagctgtagaagatcttattcttacagaaccagagcctgaacacactgggaaatgccgtgtcagtggggttgttttggtggatggaagcacagtatatgcagagagtgtgattctgactactgggacatttctgagaggcatgattgtaattggattggagacgcatccagcaggacgtttaggggatcagccttctataggattggctcagacactggagaagttagggtttgtggtgggaaggttgaagactgggactccaccccgaattgccaaagagtccattaatttcagtattctaaacaagcatataccggacaatccatccataccattcagctttaccaatgagacagtatggattaagccagaagatcagctgccatgttacttgactcacaccaaccctagagtggatgagattgtccttaagaaccttcaccttaatagtcatgttaaagaaacgacaagaggacctcgatactgtccctccattgaatcaaaagttttgcgttttccaaaccgtctacatcaggtttggttggaacctgaaggaatggattctgaccttatctacccacaggggttatctatgacgctaccagctgagttacaagagaaaatgatcacatgcatcagaggcttggagaaagctaaagtgattcagccaggctacggtgttcagtatgattacttagatccccgtcagatcaccccttccttggagactcatttggttcaacgactcttctttgctggacagatcaatggcaccactggttatgaggaagctgcagctcaaggtgtgatagccggaatcaacgccagtcttcgggtcagtcgcaagcctccctttgtggttagccgaacagaaggttacataggagtcttgattgatgacctcactactctgggcaccagtgaaccataccgcatgtttaccagccgagtagagttccgtttgtcactgcgccctgataatgctgacagccggctcacactgcgagggtataaagacgctggctgtgtgtcccaacaacgatatgaaagagcttgttggatgaagtcttctttagaagaaggcatttctgtgttgaaatctattgagtttttgagctctaaatggaaaaaattaatcccagaggcttctataagtactagtagaagtctgcctgtcaggcgtggtggcagacatcttaatcccagctacttgggaggcagaggcaggagaatcgtttgaacctgggaagcggaggttgcagtgagccgagatcaagccattgcacccaaacctgagggacaagagtgagacttctctcaaaaaaaaagaaaagactcatacaagctctcgatgttctgaagtatgaggaagttgacatggattcattagccaaggctgttccagagcccttgaagaagtatactaaatgtagagagctggctgaaagactgaaaatagaagatcggggctgctagtcgcatacccggagtaacacctgccgccatcatcaatctgctgagatttgtgaagaccactcaacgaagacagtcggctatgaatgaatcatccaagactgatcaatacttatgtgatgcagacagacttcaagagagagagttatagctttcaattcataaaagatttttaaagagcatataaataatttgatcaatacaacagtatagataaaagaattatttagcacatgttaaaatagctttattaggttactatgggtttgccattaatttctgagtgggacagaaattataattgtgctttttcgtgtatatgaaaaaactagtcgtaaacaatttgtactctttctttaaggagctgtaatacaaataactttgtgcagtgttcatcaaagagagagacagtgaacctaaaactgaacctggaataaaactcaacatgcagatttgcctactcatagggactttgcctattaagtctaccaaattaaaagtcttatcattcagcg

SEQ ID NO: 329530 - DNA, 740 bp, Homo sapiens
atttcggggctcggtacccctggctgtacatgagtattgattttgttgaccagccacttatgaatcagtgttgttccatcaactacaagaaataaagggagttcagcaagatgaagctctccaactgccaaaagacctagattatttgactatcagggatgtgtctttgtcccatgaagttcgagagaaactacattttagtcgtccacagacgatcggggctgctagtcgcatacccggagtaacacctgccgccatcatcaatctgctgagatttgtgaagaccactcaacgaagacagtcggctatgaatgaatcatccaagactgatcaatacttatgtgatgcagacagacttcaagagagagagttatagctttcaattcataaaagatttttaaagagcatataaataatttgatcaatacaacagtatagataaaagaattatttagcacatgttaaaatagctttattaggttactatgggtttgccattaatttctgagtgggacagaaattataattgtgctttttcgtgtatatgaaaaaactagtcgtaaacaatttgtactctttctttaaggagctgtaatacaaataactttgtgcagtgttcatcaaagagagagacagtgaacctaaaactgaacctggaataaaactcaacatgcagatttgcctactcatagggactttgcctattaagtctaccaaattaaaagtcttatcattcagcg

SEQ ID NO: 329531 - DNA, 3333 bp, Homo sapiens
ggcacgaggcgccctgcagattgtctcttgttgcgtcagatgtcatgtaatccttcctttggtggcatcggaaagggacatttaatgagggaagtagatgccttggatggcctgtgttctcgcatctgtgaccagtctggtgtacattataaagtattaaaccggcgtaagggaccagctgtgtggggtctgagagctcagattgataggaaactctataaacagaacatgcagaaagaaatcttgaatacaccactgcttactgttcaggagggagctgtagaagatcttattcttacagaaccagagcctgaacacactgggaaatgccgtgtcagtggggttgttttggtggatggaagcacagtatatgcagagagtgtgattctgactactgggacatttctgagaggcatgattgtaattggattggagacgcatccagcaggacgtttaggggatcagccttctataggattggctcagacactggagaagttagggtttgtggtgggaaggttgaagactgggactccaccccgaattgccaaagagtccattaatttcagtattctaaacaagcatataccggacaatccatccataccattcagctttaccaatgagacagtatggattaagccagaagatcagctgccatgttacttgactcacaccaaccctagagtggatgagattgtccttaagaaccttcaccttaatagtcatgttaaagaaacgacaagaggacctcgatactgtccctccattgaatcaaaagttttgcgttttccaaaccgtctacatcaggtttggttggaacctgaaggaatggattctgaccttatctacccacaggggttatctatgacgctaccagctgagttacaagagaaaatgatcacatgcatcagaggcttggagaaagctaaagtgattcagccagacggagttttgctcttgttgcccaggatggagtgcaatggtgcgatctcggctcaccacaacctccccctgccaggctacggtgttcagtatgattacttagatccccgtcagatcaccccttccttggagactcatttggttcaacgactcttctttgctggacagatcaatggcaccactggttatgaggaagctgcagctcaaggtgtgatagccggaatcaacgccagtcttcgggtcagtcgcaagcctccctttgtggttagccgaacagaaggttacataggagtcttgattgatgacctcactactctgggcaccagtgaaccataccgcatgtttaccagccgagtagagttccgtttgtcactgcgccctgataatgctgacagccggctcacactgcgagggtataaagacgctggctgtgtgtcccaacaacgatatgaaagagcttgttggatgaagtcttctttagaagaaggcatttctgtgttgaaatctattgagtttttgagctctaaatggaaaaaattaatcccagaggcttctataagtactagtagaagtctgcctgtcagagctctcgatgttctgaagtatgaggaagttgacatggattcattagccaaggctgttccagagcccttgaagaagtatactaaatgtagagagctggctgaaagactgaaaatagaagccacttatgaatcagtgttgttccatcaactacaagaaataaagggagttcagcaagatgaagctctccaactgccaaaagacctagattatttgactatcagggatgtgtctttgtcccatgaagttcgagagaaactacattttagtcgtccacagacgatcggggctgctagtcgcatacccggagtaacacctgccgccatcatcaatctgctgagatttgtgaagaccactcaacgaagacagtcggctatgaatgaatcatccaagactgatcaatacttatgtgatgcagacagacttcaagagagagagttatagctttcaattcataaaagatttttaaagagcatataaataatttgatcaatacaacagtatagataaaagaattatttagcacatgttaaaatagctttattaggttactatgggtttgccattaatttctgagtgggacagaaattataattgtgctttttcgtgtatatgaaaaaactagtcgtaaacaatttgtactctttctttaaggagctgtaatacaaataactttgtgcagtgttcatcaaagagagagacagtgaacctaaaactgaacctggaataaaactcaacatgcagatttgcctactcatagggactttgcctattaagtctaccaaattaaaagtcttatcattcagcgtgttttgagagttaataatcttttgcttggttatactaggctaggaagcaatatcaaagcccttaaattctcaagactaaagacttgagattatataaaattatccagaatcattcagctaatactattggaatatagtatgtagggtgaaagttgacagaaatctgtacttcttcaggaaatcctcactggtaattgttttgaacattaatgaaagccctataaaatagaaagattggaaatcaccattgtttcctattatccacagtgtggatggatacttatttggtgacctagttatgggagaattgagtaacgttagttattttatatcataccataaaaatattttcttaagaaattgtcatggccatcatttcttaataatgaagacaggtccatagtaactggtgagtggtgtttccctgtttttaagtcagaatgacagaaaaaacagaatagtggtagtacccctcttcctctccagtacttcaatggtatgtcttcacaggggttagagtgggataatcagctgggccttttgactcagatacctcagatacctcaaccattctaaatagactaagggatgaatacagccaaatgggccagacagccctgcttgtctctggaattccaacccagatctctggtgtcagcctagggagaagctcccgtgtcaccttcgggccaaagcaggtactcaggagagttctaagggccccaaagtcactttggctacagatgtgtatgttaagcctgattatgggtgtgaggcaaccaagtatcttgttactataattgcatatggccacttggaggtagcttagttttcttgggtttattttatctaattttagtctttccagaaagcagtaagattagtagcaagtaaaaagtatttgtagtgctggataatttaggaatgatgaatattttttaatacttgattcagtgatttcaaaaggtcgtaacttttagtcatagctactcctggg

SEQ ID NO: 329532 - DNA, 2701 bp, Homo sapiens
ggcacgaggcgccctgcagattgtctcttgttgcgtaagtttttttgaccgtcactcgtgtcagcttcaaagtcagatagatttttctcccagcatgttctacttccgaggctgtggccgttgggtcgcggtttccttcaccaagcagcaatttccgttggcacggttgagcagtgacagcgcggcgccccggactccgcacttcgacgtgatagtcattggtggaggacatgccgggactgaggcagccaccgccgccgctcggtgcggctctcggactctgctcctcactcaccgcgtggacacgatcggtcagatgtcatgtaatccttcctttggtggcatcggaaagggacatttaatgagggaagtagatgccttggatggcctgtgttctcgcatctgtgaccagtctggtgtacattataaagtattaaaccggcgtaagggaccagctgtgtggggtctgagagctcagattgataggaaactctataaacagaacatgcagaaagaaatcttgaatacaccactgcttactgttcaggagggagctgtagaagatcttattcttacagaaccagagcctgaacacactgggaaatgccgtgtcagtggggttgttttggtggatggaagcacagtatatgcagagagtgtgattctgactactgggacatttctgagaggcatgattgtaattggattggagacgcatccagcaggacgtttaggggatcagccttctataggattggctcagacactggagaagttagggtttgtggtgggaaggttgaagactgggactccaccccgaattgccaaagagtccattaatttcagtattctaaacaagcatataccggacaatccatccataccattcagctttaccaatgagacagtatggattaagccagaagatcagctgccatgttacttgactcacaccaaccctagagtggatgagattgtccttaagaaccttcaccttaatagtcatgttaaagaaacgacaagaggacctcgatactgtccctccattgaatcaaaagttttgcgttttccaaaccgtctacatcaggtttggttggaacctgaaggaatggattctgaccttatctacccacaggggttatctatgacgctaccagctgagttacaagagaaaatgatcacatgcatcagaggcttggagaaagctaaagtgattcagccaggctacggtgttcagtatgattacttagatccccgtcagatcaccccttccttggagactcatttggttcaacgactcttctttgctggacagatcaatggcaccactggttatgaggaagctgcagctcaaggtgtgatagccggaatcaacgccagtcttcgggtcagtcgcaagcctccctttgtggttagccgaacagaaggttacataggagtcttgattgatgacctcactactctgggcaccagtgaaccataccgcatgtttaccagccgagtagagttccgtttgtcactgcgccctgataatgctgacagccggctcacactgcgagggtataaagacgctggctgtgtgtcccaacaacgatatgaaagagcttgttggatgaagtcttctttagaagaaggcatttctgtgttgaaatctattgagtttttgagctctaaatggaaaaaattaatcccagaggcttctataagtactagtagaagtctgcctgtcaggcgtggtggcagacatcttaatcccagctacttgggaggcagaggcaggagaatcgtttgaacctgggaagcggaggttgcagtgagccgagatcaagccattgcacccaaacctgagggacaagagtgagacttctctcaaaaaaaaagaaaagactcatacaagctctcgatgttctgaagtatgaggaagttgacatggattcattagccaaggctgttccagagcccttgaagaagtatactaaatgtagagagctggctgaaagactgaaaatagaagccacttatgaatcagtgttgttccatcaactacaagaaataaagggagttcagcaagatgaagctctccaactgccaaaagacctagattatttgactatcagggatgtgtctttgtcccatgaagttcgagagaaactacattttagtcgtccacagacgatcggggctgctagtcgcatacccggagtaacacctgccgccatcatcaatctgctgagatttgtgaagaccactcaacgaagacagtcggctatgaatgaatcatccaagactgatcaatacttatgtgatgcagacagacttcaagagagagagttatagctttcaattcataaaagatttttaaagagcatataaataatttgatcaatacaacagtatagataaaagaattatttagcacatgttaaaatagctttattaggttactatgggtttgccattaatttctgagtgggacagaaattataattgtgctttttcgtgtatatgaaaaaactagtcgtaaacaatttgtactctttctttaaggagctgtaatacaaataactttgtgcagtgttcatcaaagagagagacagtgaacctaaaactgaacctggaataaaactcaacatgcagatttgcctactcatagggactttgcctattaagtctaccaaattaaaagtcttatcattcagcg

SEQ ID NO: 329533 - DNA, 2376 bp, Homo sapiens
ggcacgaggcgccctgcagattgtctcttgttgcgtaagtttttttgaccgtcactcgtgtcagcttcaaagtcagatagatttttctcccagcatgttctacttccgaggctgtggccgttgggtcgcggtttccttcaccaagcagcaatttccgttggcacggttgagcagtgacagcgcggcgccccggactccgcacttcgacgtgatagtcattggtggaggacatgccgggactgaggcagccaccgccgccgctcggtgcggctctcggactctgctcctcactcaccgcgtggacacgatcggtcagatgtcatgtaatccttcctttggtggcatcggaaagggacatttaatgagggaagtagatgccttggatggcctgtgttctcgcatctgtgaccagtctggtgtacattataaagtattaaaccggcgtaagggaccagctgtgtggggtctgagagctcagattgataggaaactctataaacagaacatgcagaaagaaatcttgaatacaccactgcttactgttcaggagggagctgtagaagatcttattcttacagaaccagagcctgaacacactgggaaatgccgtgtcagtggggttgttttggtggatggaagcacagtatatgcagagagtgtgattctgactactgggacatttctgagaggcatgattgtaattggattggagacgcatccagcaggacgtttaggggatcagccttctataggattggctcagacactggagaagttagggtttgtggtgggaaggttgaagactgggactccaccccgaattgccaaagagtccattaatttcagtattctaaacaagcatataccggacaatccatccataccattcagctttaccaatgagacagtatggattaagccagaagatcagctgccatgttacttgactcacaccaaccctagagtggatgagattgtccttaagaaccttcaccttaatagtcatgttaaagaaacgacaagaggacctcgatactgtccctccattgaatcaaaagttttgcgttttccaaaccgtctacatcaggtttggttggaacctgaaggaatggattctgaccttatctacccacaggggttatctatgacgctaccagctgagttacaagagaaaatgatcacatgcatcagaggcttggagaaagctaaagtgattcagccaggctacggtgttcagtatgattacttagatccccgtcagatcaccccttccttggagactcatttggttcaacgactcttctttgctggacagatcaatggcaccactggttatgaggaagctgcagctcaaggtgtgatagccggaatcaacgccagtcttcgggtcagtcgcaagcctccctttgtggttagccgaacagaaggttacataggagtcttgattgatgacctcactactctgggcaccagtgaaccataccgcatgtttaccagccgagtagagttccgtttgtcactgcgccctgataatgctgacagccggctcacactgcgagggtataaagacgctggctgtgtgtcccaacaacgatatgaaagagcttgttggatgaagtcttctttagaagaaggcatttctgtgttgaaatctattgagtttttgagctctaaatggaaaaaattaatcccagaggcttctataagtactagtagaagtctgcctgtcagagctctcgatgttctgaagtatgaggaagttgacatggattcattagccaaggctgttccagagcccttgaagaagtatactaaatgtagagagctggctgaaagactgaaaatagaagatcggggctgctagtcgcatacccggagtaacacctgccgccatcatcaatctgctgagatttgtgaagaccactcaacgaagacagtcggctatgaatgaatcatccaagactgatcaatacttatgtgatgcagacagacttcaagagagagagttatagctttcaattcataaaagatttttaaagagcatataaataatttgatcaatacaacagtatagataaaagaattatttagcacatgttaaaatagctttattaggttactatgggtttgccattaatttctgagtgggacagaaattataattgtgctttttcgtgtatatgaaaaaactagtcgtaaacaatttgtactctttctttaaggagctgtaatacaaataactttgtgcagtgttcatcaaagagagagacagtgaacctaaaactgaacctggaataaaactcaacatgcagatttgcctactcatagggactttgcctattaagtctaccaaattaaaagtcttatcattcagcg

SEQ ID NO: 329534 - DNA, 838 bp, Homo sapiens
ggcacgaggcgccctgcagattgtctcttgttgcgtaagtttttttgaccgtcactcgtgtcagcttcaaagtcagatagatttttctcccagcatgttctacttccgaggctgtggccgttgggtcgcggtttccttcaccaagcagcaatttccgttggcacggttgagcagtgacagcgcggcgccccggactccgcacttcgacgtgatagtcattggtggaggacatgccgggactgaggcagccaccgccgccgctcggtgcggctctcggactctgctcctcactcaccgcgtggacacgatcggtcagatgtcatgtaatccttcctttggtggcatcggaaagggacatttaatgagggaagtagatgccttggatggcctgtgttctcgcatctgtgaccagtctggtgtacattataaagtattaaaccggcgtaagggaccagctgtgtggggtctgagagctcagattgataggaaactctataaacagaacatgcagaaagaaatcttgaatacaccactgcttactgttcaggagggagctgtagaagatcttattcttacagaaccagagcctgaacacactgggaaatgccgtgtcagtggggttgttttgggctggagtgcagtggcatgatcacagctcgctgtagcctcgaccacctggacccaagtgatcttcctgcctcagcctcctgtgtagctgggaccacaggcatgtgtcaccacccctggctaatttattatttttttttgtagagatgggggtctcactatgttgccaggactggtcttgaaccccagggctccagtgatcttcctgccc

SEQ ID NO: 329535 - DNA, 1164 bp, Homo sapiens
atgcttcaaaataaaattaataccgaattacaaacaaaggtagcaatgttaaaggctactgttctgtggctgggaaagcaggtacaaagtttgcaattgtagcagcaattgcactgtcatttcaatcatattcatatttgtgtgaccaatttggaatagaaccaaagtgaatatccatggaaccttgtaaaagctcatttgcagggagcttttacatccaatattacttttgatatcagtaacttacagagtaaaattcttaacttgaataagcaaactcaaaaataacagccctttttagaagcttaaacagaattccagcagggcttagaaagcctcaaccctggccgggtgcggtggctcacgcctataatcccagcactttgggaggccgaggcgggcagatcacgaggtcagaagatcgagaccatcctggctaaaacagtgaaaccccatctctactaaaaatacaaaaaaattagctgggtgtggtggcgggcacctgtggtcccagctaatcaggaggctgaggtgggagaatgacgtgaacccgggaggcagagcttgcagtgagccaagatggcgccactgcactccagcctgggtgacagagcgagactccatctcaaaaataaaaaaaaaaaaaaaaaaaggcctcaacccttgggggacctatctttaaaaagattattcaaagggccccttttatattaaaattttccaacaaataaggggggaaagggtcccgggattttggccgacaaagaacagtccataaaacggccgggtgtatgaacccccaccaaccgcggggtcattgtgtaaaaacgcttctgcaacagcccgtggaaaaattagcgcctttgtatgtatccgatatgaatgggccgcaaaacacccagagggggggcgacaacattgttggcagacggcccacacaggatatggtgagggggtgtctggtacaacaaactcttacgagtttaatcccccagtgtggggagggcctctttgagttgtgagaacaaatcagacggaagaacgttggttcactccatgggaaacgcgagcgattattgtggcgacaactgtgacaaaacagctgtgactgtgccccacaaaaaagagaatattgtgtgggggcggccacatatgttgccccag

SEQ ID NO: 329536 - DNA, 1387 bp, Homo sapiens
gcggggctggtgggccagaggccagacggagaggccccgccgaggtgagcgaggctccaaccggtcactggtgggtcctggcactggcgggtcgcaacgctgtgggcgttccaggaggtggtcgtggcgaacctggcagctgcgggcatcatggtgggaggcttgaagaggaaacactctgatttggaagaggaggaggagaggtgggagtggagtccagcaggccttcagagctaccagcaagccctgctccgcatctccctagacaaagtccagcgcagcctgggcccccgagcacccagcctccgcaggcatgtcctcatccataacaccctccaacagctgcaggctgcacttcgcctggctcccgcccctgccctgccccccgagcccctcttcctgggcgaggaggatttctccctgtcagccaccattggctctatcctcagggagctggacacctccatggatgggactgagccccctcagaatccagtgactccccttggcctccagaatgaagtgccaccccagcctgatccagtcttcttagaagctctgagctcccggtacttgggggactctggcctggatgacttctttctggacattgacacatctgcggtagaaaaggagcctgcacgggccccaccagagcctcctcacaacctcttctgtgccccaggttcttgggagtggaatgaactggatcacatcatggaaatcattctggggtcctaaaactgtgatagaggggatcgatccttcctcatgtcatcttcggtggcctggatccctgaatgcaactctgggtgtgtgtttttgtgggggctcgaagcagtgactatggcctcctttgttcccatttcagggttccacaaactgtcttgcatgtgtgtgtgtgtctggttaccccgaccttctgtgaaggtgggtcttcctgaattaatttatctattccaaatgccttaacgagactctgtttctgggagtctgattttccacttacacatttcttccacctttcctgctagttcccactcccctgtgaccactggggcctcagggaagataaagaaagctgggcctgtcgaaggatgacagggatgtgctgccaggttgctatagaaacccaggctctgcctcttgcaccttgagggggtgggaggggctggtgtcctccctccaggctgaaccccacttcctcggcaggaccccagtctcagcagcctcctgatttcataaccaggccggaccacgtgcaatagggtggaaaccaaactgctccatgccgggttatttaaaagaaaggcagagtttgtggtggcttttttttttttttttggattgtttgtaatttttttaaataaaagtattttggaaggag

SEQ ID NO: 329537 - DNA, 1330 bp, Homo sapiens
gcggggctggtgggccagaggccagacggagaggccccgccgaggtgagcgaggctccaaccggtcactggtgggtcctggcactggcgggtcgcaacgctgtgggcgttccaggaggtggtcgtggcgaacctggcagctgcgggcatcatggtgggaggcttgaagaggaaacactctgatttggaagaggaggaggagaggtgggagtggagtccagcaggccttcagagctaccagcaagccctgctccgcatctccctagacaaagtccagcgcagcctgggcccccgagcacccagcctccgcaggcatgtcctcatccataacaccctccaacagctgcaggctgcacttcgcctggctcccgcccctgccctgccccccgagcccctcttcctgggcgaggaggatttctccctgtcagccaccattggctctatcctcagggagctggacacctccatggatgggactgagccccctcagaatccagtgactccccttggcctccagaatgaagtgccaccccagcctgatccagtcttcttagaagctctgagctcccggtacttgggggactctggcctggatgacttctttctggacattgacacatctgcggtagaaaaggagcctgcacgggccccaccagagcctcctcacaacctcttctgtgccccaggttcttgggagtggaatgaactggatcacatcatggaaatcattctggggtcctaaaactgtgatagaggggatcgatccttcctcatgtcatcttcggtggcctggatccctgaatgcaactctgggtgtgtgtttttgtgggggctcgaagcagtgactatggcctcctttgttcccatttcagggttccacaaactgtcttgcatgtgtgtgtgtgtctggttaccccgaccttctgtgaaggtgggtcttcctgaattaatttatctattccaaatgccttaacgagactctgtttctgggagtctgattttccacttacacatttcttccacctttcctgctagttcccactcccctgtgaccactggggcctcagggaagataaagaaagctgggcctgtcgaaggatgacagggatgtgctgccaggttgctatagaaacccaggctctgcctcttgcaccaggaccccagtctcagcagcctcctgatttcataaccaggccggaccacgtgcaatagggtggaaaccaaactgctccatgccgggttatttaaaagaaaggcagagtttgtggtggcttttttttttttttttggattgtttgtaatttttttaaataaaagtattttggaaggag

SEQ ID NO: 329538 - DNA, 1135 bp, Homo sapiens
gcggggctggtgggccagaggccagacggagaggccccgccgaggtgagcgaggctccaaccggtcactggtgggtcctggcactggcgggtcgcaacgctgtgggcgttccaggaggtggtcgtggcgaacctggcagctgcgggcatcatggtgggaggcttgaagaggaaacactctgatttggaagaggaggaggagaggtgggagtggagtccagcaggccttcagagctaccagcaagccctgctccgcatctccctagacaaagtccagcgcagcctgggcccccgagcacccagcctccgcaggcatgtcctcatccataacaccctccaacagctgcaggctgcacttcgcctggctcccgcccctgccctgccccccgagcccctcttcctgggcgaggaggatttctccctgtcagccaccattggctctatcctcagggagctggacacctccatggatgggactgagccccctcagaatccagtgactccccttggcctccagaatgaagtgccaccccagcctgatccagtcttcttagaagctctgagctcccggtacttgggggactctggcctggatgacttctttctggacattgacacatctgcggtagaaaaggagcctgcacgggccccaccagagcctcctcacaacctcttctgtgccccaggttcttgggagtggaatgaactggatcacatcatggaaatcattctggggtcctaaaactgtgatagaggggatcgatccttcctcatgtcatcttcggtggcctggatccctgaatgcaactctgggtgtgtgtttttgtgggggctcgaagcagtgactatggcctcctttgttcccatttcagggttccacaaactgtcttgcatgtgtgtgtgtgtctggttaccccgaccttctgtgaaggtgggtcttcctgaattaatttatctacaggaccccagtctcagcagcctcctgatttcataaccaggccggaccacgtgcaatagggtggaaaccaaactgctccatgccgggttatttaaaagaaaggcagagtttgtggtggcttttttttttttttttggattgtttgtaatttttttaaataaaagtattttggaaggag

SEQ ID NO: 329539 - DNA, 1579 bp, Homo sapiens
acgtggcatctccttgacagaggtggtgagaagtatttttttacagtccctattttacagatgaggaaactgaggccctgagaattgactcattcagatcacttcccatgatcacgcagctgagcagtttccaatacagaattcagatttggggttccctacttcgaatccaggtctctgtgctccacacttgtctttcgtgctccatgtttgaagaaattaatattgtggaagaacagttttaaggcttagaggaacttgagttaggatccgtacttggcagatgaggaaattgattctcatggatgtaaattcactgtttgaggccacaacaggggcatcatggtgggaggcttgaagaggaaacactctgatttggaagaggaggaggagaggtgggagtggagtccagcaggccttcagagctaccagcaagccctgctccgcatctccctagacaaagtccagcgcagcctgggcccccgagcacccagcctccgcaggcatgtcctcatccataacaccctccaacagctgcaggctgcacttcgcctggctcccgcccctgccctgccccccgagcccctcttcctgggcgaggaggatttctccctgtcagccaccattggctctatcctcagggagctggacacctccatggatgggactgagccccctcagaatccagtgactccccttggcctccagaatgaagtgccaccccagcctgatccagtcttcttagaagctctgagctcccggtacttgggggactctggcctggatgacttctttctggacattgacacatctgcggtagaaaaggagcctgcacgggccccaccagagcctcctcacaacctcttctgtgccccaggttcttgggagtggaatgaactggatcacatcatggaaatcattctggggtcctaaaactgtgatagaggggatcgatccttcctcatgtcatcttcggtggcctggatccctgaatgcaactctgggtgtgtgtttttgtgggggctcgaagcagtgactatggcctcctttgttcccatttcagggttccacaaactgtcttgcatgtgtgtgtgtgtctggttaccccgaccttctgtgaaggtgggtcttcctgaattaatttatctattccaaatgccttaacgagactctgtttctgggagtctgattttccacttacacatttcttccacctttcctgctagttcccactcccctgtgaccactggggcctcagggaagataaagaaagctgggcctgtcgaaggatgacagggatgtgctgccaggttgctatagaaacccaggctctgcctcttgcaccttgagggggtgggaggggctggtgtcctccctccaggctgaaccccacttcctcggcaggaccccagtctcagcagcctcctgatttcataaccaggccggaccacgtgcaatagggtggaaaccaaactgctccatgccgggttatttaaaagaaaggcagagtttgtggtggcttttttttttttttttggattgtttgtaatttttttaaataaaagtattttggaaggag

SEQ ID NO: 329540 - DNA, 1550 bp, Homo sapiens
gcggggctggtgggccagaggccagacggagaggccccgccgaggtgagcgaggctccaaccggtcactggtgggtcctggcactggcgggtcgcaacgctgtgggcgttccaggaggtggtcgtggcgaacctggcagctgcggtctctgtgctccacacttgtctttcgtgctccatgtttgaagaaattaatattgtggaagaacagttttaaggcttagaggaacttgagttaggatccgtacttggcagatgaggaaattgattctcatggatgtaaattcactgtttgaggccacaacaggggcatcatggtgggaggcttgaagaggaaacactctgatttggaagaggaggaggagaggtgggagtggagtccagcaggccttcagagctaccagcaagccctgctccgcatctccctagacaaagtccagcgcagcctgggcccccgagcacccagcctccgcaggcatgtcctcatccataacaccctccaacagctgcaggctgcacttcgcctggctcccgcccctgccctgccccccgagcccctcttcctgggcgaggaggatttctccctgtcagccaccattggctctatcctcagggagctggacacctccatggatgggactgagccccctcagaatccagtgactccccttggcctccagaatgaagtgccaccccagcctgatccagtcttcttagaagctctgagctcccggtacttgggggactctggcctggatgacttctttctggacattgacacatctgcggtagaaaaggagcctgcacgggccccaccagagcctcctcacaacctcttctgtgccccaggttcttgggagtggaatgaactggatcacatcatggaaatcattctggggtcctaaaactgtgatagaggggatcgatccttcctcatgtcatcttcggtggcctggatccctgaatgcaactctgggtgtgtgtttttgtgggggctcgaagcagtgactatggcctcctttgttcccatttcagggttccacaaactgtcttgcatgtgtgtgtgtgtctggttaccccgaccttctgtgaaggtgggtcttcctgaattaatttatctattccaaatgccttaacgagactctgtttctgggagtctgattttccacttacacatttcttccacctttcctgctagttcccactcccctgtgaccactggggcctcagggaagataaagaaagctgggcctgtcgaaggatgacagggatgtgctgccaggttgctatagaaacccaggctctgcctcttgcaccttgagggggtgggaggggctggtgtcctccctccaggctgaaccccacttcctcggcaggaccccagtctcagcagcctcctgatttcataaccaggccggaccacgtgcaatagggtggaaaccaaactgctccatgccgggttatttaaaagaaaggcagagtttgtggtggcttttttttttttttttggattgtttgtaatttttttaaataaaagtattttggaaggag

SEQ ID NO: 329541 - DNA, 1246 bp, Homo sapiens
gcggggctggtgggccagaggccagacggagaggccccgccgaggtgagcgaggctccaaccggtcactggtgggtcctggcactggcgggtcgcaacgctgtgggcgttccaggaggtggtcgtggcgaacctggcagctgcgggcatcatggtgggaggcttgaagaggaaacactctgatttggaagaggaggaggagaggtgggagtggagtccagcaggccttcagagctaccagcaagccctgctccgcatctccctagacaaagtccagcgcagcctgggcccccgagcacccagcctccgcaggcatgtcctcatccataacaccctccaacagctgcaggctgcacttcgcctggctcccgcccctgccctgccccccgagcccctcttcctgggcgaggaggatttctccctgtcagccaccattggctctatcctcagggagctggacacctccatggatgggactgagccccctcagaatccagtgactccccttggcctccagaatgaagtgccaccccagcctgatccagtcttcttagaagctctgagctcccggtacttgggggactctggcctggatgacttctttctggacattgacacatctgcggtagaaaaggagcctgcacgggccccaccagagcctcctcacaacctcttctgtgccccaggttcttgggagtggaatgaactggatcacatcatggaaatcattctggggtcctaaaactgtgatagaggggatcgatccttcctcatgtcatcttcggtggcctggatccctgaatgcaactctgggtgtgtgtttttgtgggggctcgaagcagtgactatggcctcctttgttcccatttcagggttccacaaactgtcttgcatgtgtgtgtgtgtctggttaccccgaccttctgtgaagataaagaaagctgggcctgtcgaaggatgacagggatgtgctgccaggttgctatagaaacccaggctctgcctcttgcaccttgagggggtgggaggggctggtgtcctccctccaggctgaaccccacttcctcggcaggaccccagtctcagcagcctcctgatttcataaccaggccggaccacgtgcaatagggtggaaaccaaactgctccatgccgggttatttaaaagaaaggcagagtttgtggtggcttttttttttttttttggattgtttgtaatttttttaaataaaagtattttggaaggag

SEQ ID NO: 329542 - DNA, 466 bp, Homo sapiens
catacagcctctgtttcaactactaatctctgctgttgtaccatacaaggacctatagacaatacgtaaataaaactttatttatacaaacaggcaacagactggatttagtctgtaggttgtagtttgttcaggcctcttctagaaaagcaagctataatatgattatcttatatattgttacccagaattcctccagcaggaaggtttcacagtgtgactaacaggtctgctgaattaagagaaaactcttatagataagaaggtgcctatagtgatattccattggctcagaatccaaagcctactgagagtattgtcaatgccaactctactttatatagactggaaatggcatgactgaatttgaagggtctgcaacaaagtagagaaatgttaggttctcctgcctttttactgagccattagccatttgaattttttgtttgttttttgtttgcttgtt

SEQ ID NO: 329543 - DNA, 303 bp, Homo sapiens
accccacacagaaagagagagagagagagcctttcacccaaggttacatttttcaataagtatcacatctgctgtcaatatcacttaactaattagggcccagggttctaaatcacaatttcagaatgggttataaatacagagaagtgtcttagtatgctcagcagtttttaatctttcacaagagattatgaaacaaccttgtgtacaatcgaaaaagacataaatctcttgttctgctgtaaaattatttataatagtctttcttttttttcttcctattagtctttccctatcttctgt

SEQ ID NO: 329544 - DNA, 219 bp, Homo sapiens
gggattacaggcgtgaactaccgcgcctggcctggaatggcttttgatgttctcctatgtgcacatgtgggtgaataaacaccaacaaagtccttatgttacctgaagagttgctctcttcttaatatttaagtcgtatttatttaaatactttaatagttgtacactattaaagtattattaggtcaaaatcaaggaagtacaaaagggtatgctgtg

SEQ ID NO: 329545 - DNA, 449 bp, Homo sapiens
ctttttctcgagatctcccaactcccggtttacggtcaggaagaatctataacatgaactcctgcttaaaaacaagggtatagatcccatattcaggtcttagactgggaagaagagaaggcagtcaaaaatattaaatatatgaatttcagtaaattcagttggggatgccatttcagctttgcagtcagttactccagaatgtgtcaatgtatggcaaagcatgtgacagcaggatctctgcaccctctccatttaccagctgtggtggatctcttagccacatctctgtttataatgtgcttattgaaaactaatgtattacttttattatcatagctaccatttactgaatatttacattgtgctaacactggttcagatggcttccatcatatttacctgatttaatcctcacaacaaccttatgtgctaggtccagttattac

SEQ ID NO: 329546 - DNA, 299 bp, Homo sapiens
cttttagggttgggagggcagaggagaaacggcaggtggcactgcggatatttttacacaggataatgtgacctgcccagcctgcacctgcgctcagcatcatcagagttccgtttcttatacttaattaggctacacaaccaattttacgattttaccattttgaaatcacgtgggagttaccaaaatggttaatttaaaacggttttacccagactttggggggcagtcttgattcttaaatggctttgatggctttgataaacaccctgggcccttcctccaaaaaatacacactc

SEQ ID NO: 329547 - DNA, 263 bp, Homo sapiens
cagtgttttgtggaaataaaacttgtaataaagtcagtgccaggagttagttcatactgggctaagctgcatagcaccccccaccccctttttgagccctgatgtgggtggcatgttgtaagtggctgaataatgaagattatttgaataaagacaataaaggccaggaggagggtggcagcaatagaaaggagaaagatcggagattttggaaagagaaatgaaaggccatagtggtatgctgtaggttgtattctagtttt

SEQ ID NO: 329548 - DNA, 344 bp, Homo sapiens
ggttgcatttgctggtgattctaaaaaagagtgctaaaaggaagttactgagggcctaaaccatattattttactgtggatgttctgctgtataactgtttccttatttccacttgttacagacctcgtttatacatcagaaaccccattttctgccatattctgtttattctgctaattacaattatggggaacatcttcatctcaggttcctgttgatgggcacatacaggaactcagaggaaaaaaaatcagctgtgttcttagtctcattgtcttcaaatcctcagttgaatgtaccaggatattacagtgaaactggcaccttataaacctcttcaggg

SEQ ID NO: 329549 - DNA, 339 bp, Homo sapiens
ctcagcctcccaagtagctgggactacaggcatgtaccaccatgcctggctaagttgtttattttgtaaagatggatcttgctgtgttgcccaggctggtctcaaactcatggcctaagtgatcctctcacttaggcatcccaaagtgctgggattatgggcacgagccactgtgcctggtcctttctttttttttcttatgtgtgctatgtgttacatatgtttgtcttttattttgctgatttagtgaggaaaaacaggttttcttgaaggataaaaatctgtatttattccaaaagataattagtaaaattagtttaatttggtttaatttttgtt

SEQ ID NO: 329550 - DNA, 379 bp, Homo sapiens
ctgggattacaggtgcccaccaccatgcccagctaagtttttgtatttttagaagagatgggttttcgtcatgttggccaggctggtctcaaactcccggcctcaggtgatctgcctacctcagcctcccaaaatgctggaattacaggcgtgaggccctgcgactggccaacttctccgtttttattggtaataccaacttctttctaatttccttgaccagaaattttagagtacttttattcttcccctgatgctggggatgtcctttactctatttcattgactgtaagcctagttcagacttttatcacctaattcctggaaaaatgcaacaaagtggctggctggggaataattctggctcaaacgtcttccc

SEQ ID NO: 329551 - DNA, 791 bp, Homo sapiens
gttgtcgactgtgcacacaggctgaagatccagaggaggaaagggagggatactaaaagctttatacagttgaggtatttcctgtggttgtgttagctattgctgtgtaacaaattaccccaaaacttggtggactgaaacaccacttactggctgggcacggtggctcacgcctgttaccccagcactttggtaggccaaggcaggcaggtcacatgaggccaggagttcaagaccagcctggccaacatggtgaaaccccataaattagtcgggcatggtggcatgcacctgtagtcccaagtagctgactctggaggctgaggcatgagaatcacttgaacccaggaggcagaggttggactgagctgagactgcaccactgcactccagcctgggtgacagagtgagactgtctcaaaaaataaaaagaaaaaagaaacaccacttactatttaagtttttgtgggtcaggaatcagtgcagcttagctgggtcctctgattctgtgtttctcacaaggctgcagtcatctcagagattcacttcctagttcactcgtggttattggctggatttggttcctctcaggctattagattgaggcctcagttcctcataagctgatgtccagaagcttctccatagagcatctcacaacatggcagtgtgcttcatcagatgaacaagtaggggagtgatatggtttagatctgtatccctgcccaaatcttgtgtcgaatggtaatgcccgtgttggaggtgggtcctggtgggggggtgactggatc

SEQ ID NO: 329552 - DNA, 220 bp, Homo sapiens
tagggacacggcagtgagctcagacattctcccagagcccacagagtagtgagggagacataaaagaaaggggtgaggccaggcgtggtggctcacgcctgtaatcccaacagtttgggaggccgaggcaggcggatcacaaggtcaagagatcgagaccatcttggccaacatggtgaaaccctgtctctactaaaaatacaaaaattagctgggtgtg

SEQ ID NO: 329553 - DNA, 263 bp, Homo sapiens
attaatgaaataacagaagtgatttccatcatggctcagttgccttgcctctcctccctgaatccaggaatctatgttctcagccccaggacaaccacacaatttaaaacctgttctacaatgccacctccctatctgttgctagaagcctgctcccagcagttatgtgggccatccccctgcctctgcatgagatcccctctctttagcccagcctactctgccttatccccactctccctttcccaaactcagggaaagag

SEQ ID NO: 329554 - DNA, 592 bp, Homo sapiens
ttagatgagaggtaaaaacaagctatattttcagttttaaaactacctacatatgcttctgacatcaatgtccataaataaaaattctagatccttatactttaacagcacaaaaagataaaaatcagtttggacttttcatctttactacagtctataaacaatcattcccaaagatagccagtcagatcattctttatgatcattaccaaccagaataaacctatgtttaatctgtgcataactgtagtcacaattaactggaaagtttataaataagtctcagctacttgggaggctgaggtgagaggatagctttcagtctaggagtctgagtccagcctgagaaagagagagaaattccatctttaaaaaacgaggggggccgggtgcggtggctcacaccttggtaatcccagcactttgggaagccaaggtgggcggatcacctgagcacaggagtttgagaccagcctgggcaacatggcaaaaccctgtctctacaaaaaaaaaaaggaaggaaagaaaaagaaaagtttagcagggcatgggtggctcatgcctacagtcccagcaactggggaggctgagg

SEQ ID NO: 329555 - DNA, 411 bp, Homo sapiens
cggccacagactggaaatgaccctgatagagttagcacgctatgcaaacagctttacgcgctattgctgtgacagttcagacaatggatgcacagtgtaatccaagggaccggtgtttccctttgggcaaatgtcacagaatccagagctggaagtatcagttgaaaaaataaattctgagattcactgtgttacggaataacgtctctctagtagttcagactacactgatttcagatagggtcagagcaagaatttagagcagcaacaaatgaggcttgaataaacctcagaagttgtctagatagatctgcaaaggcgactgtggtctccaaagttagatgagaggtaaaaacaagctatattttcagttttaaaactacctacatatgcttctgacatcaatgtcca

SEQ ID NO: 329556 - DNA, 2064 bp, Homo sapiens
gactatcgttcattgaagttgttgatacaaatgttgaacaggagaaaaaccagtagcttgccaacttggcacctcattctctagcttgacagtaatctcttatctagtagtttttagatatggttatttaatcaaatatcactagcttctaattttgttataattcattcatgtatacagacaatgaagaatcatctttcttcattcaacacatttattgggaaccaatcattgtccaaggcaatatgctaggcattgtgtaatagaaagcgattaagcttttacccctgtcctctttggcctgcaaagagcaggtaagattcatgcacagacaaatgtagtaccaggtaaatagtgaggccaaacacaagaggcaggtcaaagggctttggattcagaggatggagaagctctttctaggctggtgaaatatttgcagaatgagtaggctcataagtggaggtgaggtacaggctaagctgctgtaagaaagagtccaaaatgcaaaggatttaccacaatgcagttaatttttctcacaacggtcgaggtaggcaggtggtccaagtccagttaatcagccctcctcaacacaaggcttccccttgtaagctcaggatgaccgctccagttctcatcatctcccaggcagaaaaacgggagaaagagaactagacgtaccacccagtcattttaaggacatagccaggccaggtgcagtgactcacatctgtaatccaagcactttgggaggtcgaggctggaggatagcttgaagccaggagtttgagaccagcttggataagaaagcaagaccttgtctctacaaaaaatttaaaaattaaccatgtgtggtggtgtgcacctatagtcccagctactcaggaggctgaggtggaaggatcacttgagcacaggagttggaggatacagtgagccatgatcacaccacctcactccagcctgggcaacatagtgagaccccatctctttaaaaaacaaaacaaaaaaacatcaccaggaagttgcttacatgtcttctattcctataacatcggcctgagcttagtcacatggccacacccagcagaaagaactctaggaaatatggtcttatgctaggtaaccccaaacccagctaaaactgttgcttttgaagaagggtgaaacagacaatgtggaggagaattaccagtctgccacaaagagaaagaattctatgtgaggaaaacgctctagaagagggagctgattaattagttatatctcagccgagaggatgttatgagaaacacagatttgggtttaatagaaaaacttagaacccttcaagaaggaatgggcggacttgagagtgtcctccgcttctgaaaatgatcaagaaaaatggtaagaatgtacacctcaagggtggatggtaaaggtcagcctttaagcctcaatggcggtgtggttgtaggtggggtgggggtggaggccccgaagacaggcagactaccacagtagccccgatggaagcagtgagaatgaactggaaggagcggctgtgggagcgacaacgtgatgagaataaacccggcttggctctgccctgtgcacacacaggtgagctgtgtgctcccggatgtgtcagctggtatatgcgtctgtcagaaggcagctggggagcactgttagctcagagactaagaggcagacccaggaagcccttctttgcattggtcagggtttgctgcattttcccaagcccaggaaatggaacccagttcttcttctttctgtgtaaaataataagcatcacaataggctgtgctcatgagaacgcattttgtttccacagaaatgttttttctcactctgtcctgattttgatttctgttaaactcagtaaacacattaccaaattttaaaataaggtgacttgttttccccaactcacagttcaccaaaggtatttcatctgtttgttctgaaaatgcagctgctgtctagatttatgtgtgctctgacaagaaatgttttgtgtaacaataaaaatcatttcctttgatgaaaaaaaaaaaa

SEQ ID NO: 329557 - DNA, 2153 bp, Homo sapiens
tccacaaattcaatggacgatagtccaaataacccttgtgcccgtggaaaacacaacggggagcccaaaaaaaaaaaaaaactagataagagagtcaaaaatcaaaaagatctgtacaaatgttgaacaggagaaaaaccagtagcttgccaacttggcacctcattctctagcttgacagtaatctcttatctagtagtttttagatatggttatttaatcaaatatcactagcttctaattttgttataattcattcatgtatacagacaatgaagaatcatctttcttcattcaacacatttattgggaaccaatcattgtccaaggcaatatgctaggcattgtgtaatagaaagcgattaagcttttacccctgtcctctttggcctgcaaagagcaggtaagattcatgcacagacaaatgtagtaccaggtaaatagtgaggccaaacacaagaggcaggtcaaagggctttggattcagaggatggagaagctctttctaggctggtgaaatatttgcagaatgagtaggctcataagtggaggtgaggtacaggctaagctgctgtaagaaagagtccaaaatgcaaaggatttaccacaatgcagttaatttttctcacaacggtcgaggtaggcaggtggtccaagtccagttaatcagccctcctcaacacaaggcttccccttgtaagctcaggatgaccgctccagttctcatcatctcccaggcagaaaaacgggagaaagagaactagacgtaccacccagtcattttaaggacatagccaggccaggtgcagtgactcacatctgtaatccaagcactttgggaggtcgaggctggaggatagcttgaagccaggagtttgagaccagcttggataagaaagcaagaccttgtctctacaaaaaatttaaaaattaaccatgtgtggtggtgtgcacctatagtcccagctactcaggaggctgaggtggaaggatcacttgagcacaggagttggaggatacagtgagccatgatcacaccacctcactccagcctgggcaacatagtgagaccccatctctttaaaaaacaaaacaaaaaaacatcaccaggaagttgcttacatgtcttctattcctataacatcggcctgagcttagtcacatggccacacccagcagaaagaactctaggaaatatggtcttatgctaggtaaccccaaacccagctaaaactgttgcttttgaagaagggtgaaacagacaatgtggaggagaattaccagtctgccacaaagagaaagaattctatgtgaggaaaacgctctagaagagggagctgattaattagttatatctcagccgagaggatgttatgagaaacacagatttgggtttaatagaaaaacttagaacccttcaagaaggaatgggcggacttgagagtgtcctccgcttctgaaaatgatcaagaaaaatggtaagaatgtacacctcaagggtggatggtaaaggtcagcctttaagcctcaatggcggtgtggttgtaggtggggtgggggtggaggccccgaagacaggcagactaccacagtagccccgatggaagcagtgagaatgaactggaaggagcggctgtgggagcgacaacgtgatgagaataaacccggcttggctctgccctgtgcacacacaggtgagctgtgtgctcccggatgtgtcagctggtatatgcgtctgtcagaaggcagctggggagcactgttagctcagagactaagaggcagacccaggaagcccttctttgcattggtcagggtttgctgcattttcccaagcccaggaaatggaacccagttcttcttctttctgtgtaaaataataagcatcacaataggctgtgctcatgagaacgcattttgtttccacagaaatgttttttctcactctgtcctgattttgatttctgttaaactcagtaaacacattaccaaattttaaaataaggtgacttgttttccccaactcacagttcaccaaaggtatttcatctgtttgttctgaaaatgcagctgctgtctagatttatgtgtgctctgacaagaaatgttttgtgtaacaataaaaatcatttcctttgatgaaaaaaaaaaaa

SEQ ID NO: 329558 - DNA, 1695 bp, Homo sapiens
  misc_feature (1679)..(1680): n is a, c, g, or t
  misc_feature (1687)..(1687): n is a, c, g, or t
gactatcgttcattgaagttgttgatacaaatgttgaacaggagaaaaaccagtagcttgccaacttggcacctcattctctagcttgacagtaatctcttatctagtagtttttagatatggttatttaatcaaatatcactagcttctaattttgttataattcattcatgtatacagacaatgaagaatcatctttcttcattcaacacatttattgggaaccaatcattgtccaaggcaatatgctaggcattgtgtaatagaaagcgattaagcttttacccctgtcctctttggcctgcaaagagcaggtaagattcatgcacagacaaatgtagtaccaggtaaatagtgaggccaaacacaagaggcaggtcaaagggctttggattcagaggatggagaagctctttctaggctggtgaaatatttgcagaatgagtaggctcataagtggaggtgaggtacaggctaagctgctgtaagaaagagtccaaaatgcaaaggatttaccacaatgcagttaatttttctcacaacggtcgaggtaggcaggtggtccaagtccagttaatcagccctcctcaacacaaggcttccccttgtaagctcaggatgaccgctccagttctcatcatctcccaggcagaaaaacgggagaaagagaactagacgtaccacccagtcattttaaggacatagccaggccaggtgcagtgactcacatctgtaatccaagcactttgggaggtcgaggctggaggatagcttgaagccaggagtttgagaccagcttggataagaaagcaagaccttgtctctacaaaaaatttaaaaattaaccatgtgtggtggtgtgcacctatagtcccagctactcaggaggctgaggtggaaggatcacttgagcacaggagttggaggatacagtgagccatgatcacaccacctcactccagcctgggcaacatagtgagaccccatctctttaaaaaacaaaacaaaaaaacatcaccaggaagttgcttacatgtcttctattcctataacatcggcctgagcttagtcacatggccacacccagcagaaagaactctaggaaatatggtcttatgctaggtaaccccaaacccagctaaaactgttgcttttgaagaagggtgaaacagacaatgtggaggagaattaccagtctgccacaaagagaaagaattctatgtgaggaaaacgctctagaagagggagctgattaattagttatatctcagccgagaggatgttatgagaaacacagatttgggtttaatagaaaaacttagaacccttcaagaaggaatgggcggacttgagagtgtcctccgcttctgaaaatgatcaagaaaaatggtaagaatgtacacctcaagggtggatggtaaaggtcagcctttaagcctcaatggcggtgtggttgtaggtggggtgggggtggaggccccgaagacaggcagactaccacagtagccccgatggaagcagtgagaatgaactggaaggagcggctgtgggagcgacaacgtgatgagaataaacccggcttggctctgccctgtgcacacacaggtgagctgtgtgctcccggatgtgtcagctggtatatgcgtctgtcagaaggcagctggggagcactaagcganngggatcntctagaat

SEQ ID NO: 329559 - DNA, 1377 bp, Homo sapiens
tgagccactgcgtctggccttctaagcactgatcttgtgatctccctggacctgggtgacagagcgagactccatctcaaaaaaaaaaaaaaaaaaaaagcacactgtcgattggctcttagagcatatttttaatacaaaatctgtctttgtgaatagagaatagggacgtattttttaaaattgctaccaatcccaaggagcaaggagcatcgatgctttgacttttctgcagggcaggtgacttggcctagctggttttgggtggtgagtgcagtgagtgggccatgacacagtacacgccatgttcacctgtttcccaaaatgtttaggtttttcccctccagtaaatgtgactgtctctccccgttctgaagaaagccatacaacgacggtttctggtggcaatgggagcgtgttccaggcgggcccgcagcttcaggcactggctaacttagaagccaggagggggtctataggtgctgctctctcatcccgggatgtcagtgggctgcctgtttatgctcagtcaggagagcctaggaggctgacccaggcacaggtggcagcgtttcctggagagaatgctttggaacactcttcagaccaggacacctgggacagcctgaggagcccgggtttctgcagccctttgtcatctggtggtggagcagagtccctgccgcctggggggcctggacatgcagaggcaggacacctcggcaaggtttgtgacttccacctgaaccaccagcagcccagccccaccagcgtcctgcctacagaggtggcagcccctccgcttgagaaaattttgtctgtggatagcgtggcagtggactgtgcctacaggactgtgcccaagccagggcctcagcctggcccacatggatcactattgactgaagggtgtctcagaagcctttcgggggacttgaaccggttcccctgtgggatggaggtgcactctggccagagagaactggagagcgtggttgctgtcggcgaagccatggcttttgaaatttccaatgggagccatgagttactgtctcagggacagaagcagatttttattcagacttccgatgggcttatcttgtcccctccaggtacaatagtgtctcaggaggaggacattgtcacagtgactgatgcagaggggcgtgcctgcggatgggcccgctagaaggagttcctctagaagctgtggagtcggtcgtcaccgtggagccagagccctcacagtgaagtggagtcagatcctagattcgtctgattttatccagagaaggtctatggcaagcaatgtatatttttctaatgtgaatattgcacagatgaaccttttatttataaagaataatgtctttctgc

SEQ ID NO: 329560 - DNA, 842 bp, Homo sapiens
acccgggttcgagtccccgcctcggccgccatggcggatgcggagccggaggctgggggcggcagcgaggatggcggcggcggcggcggccggctcctccgggccagagcggcagcgtcgcacgtgtggccccgctgggccccgagcagctgcggcaggtcctggagcaggtgacgaaggcgcagccgccgccgccgccgccccccttcgtgctgcgggacgcggcgcggcggctgcgggacgcgggccaacaggccgccctgcagcggggccggggcaccgagcccccgcgcctgccgcgcctgctcccgccccaggtgaggcgtcgggagggacgtggggaaactgaggcccgaagggggccgacgccccgcggcggggtagctgcttgtccggggaggccagtatccgcccgggttaagactcagggcgtccccaggctgagcttcttagggacggcgttcggcccccacctgtcaccaccctggcattttcaccccaggagcctcactctaggagcggttgctcacgctgggccctgtgcctggaacgccctcgtgccttctctgccttcacagccctgctgggggcttttgcgtgctccctagctcttcttacaggcctttcaccgctggttcagcctttgtggagcacttagagaccgtgttcccagcactccccactatgtgcaggaggtgaagccttgaacacacttgctgaagaacgaacataaggcaggttctgggattgacgggggctgctttagagtgggtggtcccgtaggccagacactggagctgaaacataaatgaattaaaaggaaccaacttagcttttcagtt

SEQ ID NO: 329561 - DNA, 3026 bp, Homo sapiens
aaacacattacatcaacttttatatgtaagatgtaatttagaaaaaatgtcaataatggttttatgacgagactgaaattgcagacatgttcataagcacaatgcttcttttctctttcttgtctttctgtacgtaagcaactagaagccatttgtgtcaaggtaacgtctggagaaacaaaaggtcaggaaaggccaatgctcctaccgaccacaatccagccccaaactgcaagaaagagccagctgccccgggggaattcctgcctggtggggctccatatcgccagccctcagctgctcagggtacagccgcttgtgagaaccgagccacagtcctgcttcctaagtgacttatgccaacctcctgctcaggggtttgtacagagaccactgccagccctccaggtggtccctgcaaagagagtcccagcccccaaggctccagatgaacagggctccatgttgacccctttgtctgcctctgacccgctggcagtaacatctctttcatccagttcagcacatccatttatttccaacttgcatacaagacatactgagaaactaaaaaaatcgttaaaagtaaagacacgttctggacgggtatctcgacctcccaaatataaagctaaagattataagttcataaaaacagaggatctggcggatggtcatctgtcagattctgatgattactcagaactctgtgtggaagaagatgaagatcagagggagaggcacgcactctttgacttatcgagctgctccctgaggcccaaaagctttaagtgtcagacttgtgaaaagtcatatatagggaaggggggactggcccgacattttaaacttaacccaggccacggccagttggaccccgagatggtgctgtctgagaaagccagtggaagcaccctccgggggtgcacggaggaaaggacgctcagcctgacctccctggggctgtccatgccagcggatccatgtgagggaggggcccgctcctgcttggtgacagagtcagcacgcggtggcctgcagttcctccagcagtgtgaccgggaggatctggtggaattggctctgcctcagctggctcaggttgtgaccgtgtatgagtttcttctgatgaaggttgaaaaagatcatctagcaaagccttttttcccagctatatataaggaatttgaagagttgcataaaatggttaagaaaatgtgccaagattacctcagtagttctggtctgtgttcccaggagaccctggaaataaacaatgataaggttgctgagtcattaggaatcacagaattcctacggaagaaagaaatacacccagacaaccttggacccaagcacctcagccgagacatggatggggagcagctagagggagctagcagcgagaagagggaacgtgaggctgcggaggagggactggcctcagtgaaaaggcccagaagagaagccctgtccaacgataccactgaatctcttgctgccaacagcagaggccgggagaagcccaggcccttgcatgctttggccgctggtttttcccctccagtaaatgtgactgtctctccccgttctgaagaaagccatacaacgacggtttctggtggcaatgggagcgtgttccaggcgggcccgcagcttcaggcactggctaacttagaagccaggagggggtctataggtgctgctctctcatcccgggatgtcagtgggctgcctgtttatgctcagtcaggagagcctaggaggctgacccaggcacaggtggcagcgtttcctggagagaatgctttggaacactcttcagaccaggacacctgggacagcctgaggagcccgggtttctgcagccctttgtcatctggtggtggagcagagtccctgccgcctggggggcctggacatgcagaggcaggacacctcggcaaggtttgtgacttccacctgaaccaccagcagcccagccccaccagcgtcctgcctacagaggtggcagcccctccgcttgagaaaattttgtctgtggatagcgtggcagtggactgtgcctacaggactgtgcccaagccagggcctcagcctggcccacatggatcactattgactgaagggtgtctcagaagcctttcgggggacttgaaccggttcccctgtgggatggaggtgcactctggccagagagaactggagagcgtggttgctgtcggcgaagccatggcttttgaaatttccaatgggagccatgagttactgtctcagggacagaagcagatttttattcagacttccgatgggcttatcttgtcccctccaggtacaatagtgtctcaggaggaggacattgtcacagtgactgatgcagaggggcgtgcctgcggatgggcccgctagaaggagttcctctagaagctgtggagtcggtcgtcaccgtggagccagagccctcacagtgaagtggagtcagatcctagattcgtctgattttatccagagaaggtctatggcaagcaatgtatatttttctaatgtgaatattgcacagatgaaccttttatttataaagaataatgtctttctgccctgctgtctacatttttctatggagcttgtcataataatagcagatattacctgatcaggaatccctgtggcgcgtctgacgctcatgagtttttcatgatggtgatgagtagcactgcactgtcacctgatgattggccctgctccgtttcccttctctcctgggagatatgctgcttttccaccagacttgctccatactagaagcttcttttgggttcaattaaaaagaaaataagctagtcattctgggcagcattttattgatagaagggggaaaaagtcatttctacttgcatgattttttaaattaaattaaattaaattaatttaattatttttgagaccaagtcttactctgtagcccaagctggagtgcagtggcgcgatcttggctcactgcaacctctgccgcctgggctcaagcg

SEQ ID NO: 329562 - DNA, 2310 bp, Homo sapiens
tttcaggtgtgagccacggcgcccggccactaaaaggtttttatggggtatataaagcatgattgttttattttacttttgggtgtgcaacactgtctagaatggtcagtctgtagacgttgaagagacattgccatctgaaccagaaaatggagctcttttgcgatcagagagataccaaggacctagaagacgcgcatgctcagagacccttgcagagtcccgcacagctgtcctccagcagagaagagctgctcagctacctggtggccctgctgcggcaggggagcagagggcgtcgccaagcaaagccaggctcaaggagttcctccagcagtgtgaccgggaggatctggtggaattggctctgcctcagctggctcaggttgtgaccgtgtatgagtttcttctgatgaaggttgaaaaagatcatctagcaaagccttttttcccagctatatataaggaatttgaagagttgcataaaatggttaagaaaatgtgccaagattacctcagtagttctggtctgtgttcccaggagaccctggaaataaacaatgataaggttgctgagtcattaggaatcacagaattcctacggaagaaagaaatacacccagacaaccttggacccaagcacctcagccgagacatggatggggagcagctagagggagctagcagcgagaagagggaacgtgaggctgcggaggagggactggcctcagtgaaaaggcccagaagagaagccctgtccaacgataccactgaatctcttgctgccaacagcagaggccgggagaagcccaggcccttgcatgctttggccgctggtttttcccctccagtaaatgtgactgtctctccccgttctgaagaaagccatacaacgacggtttctggtggcaatgggagcgtgttccaggcgggcccgcagcttcaggcactggctaacttagaagccaggagggggtctataggtgctgctctctcatcccgggatgtcagtgggctgcctgtttatgctcagtcaggagagcctaggaggctgacccaggcacaggtggcagcgtttcctggagagaatgctttggaacactcttcagaccaggacacctgggacagcctgaggagcccgggtttctgcagccctttgtcatctggtggtggagcagagtccctgccgcctggggggcctggacatgcagaggcaggacacctcggcaaggtttgtgacttccacctgaaccaccagcagcccagccccaccagcgtcctgcctacagaggtggcagcccctccgcttgagaaaattttgtctgtggatagcgtggcagtggactgtgcctacaggactgtgcccaagccagggcctcagcctggcccacatggatcactattgactgaagggtgtctcagaagcctttcgggggacttgaaccggttcccctgtgggatggaggtgcactctggccagagagaactggagagcgtggttgctgtcggcgaagccatggcttttgaaatttccaatgggagccatgagttactgtctcagggacagaagcagatttttattcagacttccgatgggcttatcttgtcccctccaggtacaatagtgtctcaggaggaggacattgtcacagtgactgatgcagaggggcgtgcctgcggatgggcccgctagaaggagttcctctagaagctgtggagtcggtcgtcaccgtggagccagagccctcacagtgaagtggagtcagatcctagattcgtctgattttatccagagaaggtctatggcaagcaatgtatatttttctaatgtgaatattgcacagatgaaccttttatttataaagaataatgtctttctgccctgctgtctacatttttctatggagcttgtcataataatagcagatattacctgatcaggaatccctgtggcgcgtctgacgctcatgagtttttcatgatggtgatgagtagcactgcactgtcacctgatgattggccctgctccgtttcccttctctcctgggagatatgctgcttttccaccagacttgctccatactagaagcttcttttgggttcaattaaaaagaaaataagctagtcattctgggcagcattttattgatagaagggggaaaaagtcatttctacttgcatgattttttaaattaaattaaattaaattaatttaattatttttgagaccaagtcttactctgtagcccaagctggagtgcagtggcgcgatcttggctcactgcaacctctgccgcctgggctcaagcg

SEQ ID NO: 329563 - DNA, 1551 bp, Homo sapiens
ttaattctatgaagtcgtttaattcttgcatgtgaatgtgcttctgggggtgtgtgctgtttgggtgaagtttattctcttggcccatttcttttcaggttgctgagtcattaggaatcacagaattcctacggaagaaagaaatacacccagacaaccttggacccaagcacctcagccgagacatggatggggagcagctagagggagctagcagcgagaagagggaacgtgaggtgggcatggctgaagtgggtgccaggtgactgtgcacggtgaattagcgtggtttggcttcttctgttcacaccaggaagaggaggtagcggtttgcctattccttcctattctagctgattgggtcttctcttcacaggctgcggaggagggactggcctcagtgaaaaggcccagaagagaagccctgtccaacgataccactgaatctcttgctgccaacagcagaggccgggagaagcccaggcccttgcatgctttggccgctggtttttcccctccagtaaatgtgactgtctctccccgttctgaagaaagccatacaacgacggtttctggtggcaatgggagcgtgttccaggcgggcccgcagcttcaggcactggctaacttagaagccaggagggggtctataggtgctgctctctcatcccgggatgtcagtgggctgcctgtttatgctcagtcaggagagcctaggaggctgacccaggcacaggtggcagcgtttcctggagagaatgctttggaacactcttcagaccaggacacctgggacagcctgaggagcccgggtttctgcagccctttgtcatctggtggtggagcagagtccctgccgcctggggggcctggacatgcagaggcaggacacctcggcaaggtttgtgacttccacctgaaccaccagcagcccagccccaccagcgtcctgcctacagaggtggcagcccctccgcttgagaaaattttgtctgtggatagcgtggcagtggactgtgcctacaggactgtgcccaagccagggcctcagcctggcccacatggatcactattgactgaagggtgtctcagaagcctttcgggggacttgaaccggttcccctgtgggatggaggtgcactctggccagagagaactggagagcgtggttgctgtcggcgaagccatggcttttgaaatttccaatgggagccatgagttactgtctcagggacagaagcagatttttattcagacttccgatgggcttatcttgtcccctccaggtacaatagtgtctcaggaggaggacattgtcacagtgactgatgcagaggggcgtgcctgcggatgggcccgctagaaggagttcctctagaagctgtggagtcggtcgtcaccgtggagccagagccctcacagtgaagtggagtcagatcctagattcgtctgattttatccagagaaggtctatggcaagcaatgtatatttttctaatgtgaatattgcacagatgaaccttttatttataaagaataatgtctttctgc

SEQ ID NO: 329564 - DNA, 2650 bp, Homo sapiens
acccgggttcgagtccccgcctcggccgccatggcggatgcggagccggaggctgggggcggcagcgaggatggcggcggcggcggcggccggctcctccgggccagagcggcagcgtcgcacgtgtggccccgctgggccccgagcagctgcggcaggtcctggagcaggtgacgaaggcgcagccgccgccgccgccgccccccttcgtgctgcgggacgcggcgcggcggctgcgggacgcgggccaacaggccgccctgcagcggggccggggcaccgagcccccgcgcctgccgcgcctgctcccgccccagcaactagaagccatttgtgtcaaggtaacgtctggagaaacaaaaggtcaggaaaggccaatgctcctaccgaccacaatccagccccaaactgcaagaaagagccagctgccccgggggaattcctgcctggtggggctccatatcgccagccctcagctgctcagggtacagccgcttgtgagaaccgagccacagtcctgcttcctaagtgacttatgccaacctcctgctcaggggtttgtacagagaccactgccagccctccaggtggtccctgcaaagagagtcccagcccccaaggctccagatgaacagggctccatgttgacccctttgtctgcctctgacccgctggcagtaacatctctttcatccagttcagcacatccatttatttccaacttgcatacaagacatactgagaaactaaaaaaatcgttaaaagtaaagacacgttctggacgggtatctcgacctcccaaatataaagctaaagattataagttcataaaaacagaggatctggcggatggtcatctgtcagattctgatgattactcagaactctgtgtggaagaagatgaagatcagagggagaggcacgcactctttgacttatcgagctgctccctgaggcccaaaagctttaagtgtcagacttgtgaaaagtcatatatagggaaggggggactggcccgacattttaaacttaacccaggccacggccagttggaccccgagatggtgctgtctgagaaagccagtggaagcaccctccgggggtgcacggaggaaaggacgctcagcctgacctccctggggctgtccatgccagcggatccatgtgagggaggggcccgctcctgcttggtgacagagtcagcacgcggtggcctgcagaatggtcagtctgtagacgttgaagagacattgccatctgaaccagaaaatggagctcttttgcgatcagagagataccaaggacctagaagacgcgcatgctcagagacccttgcagagtcccgcacagctgtcctccagcagagaagagctgctcagctacctggtggccctgctgcggcaggggagcagagggcgtcgccaagcaaagccaggctcaaggagttcctccagcagtgtgaccgggaggatctggtggaattggctctgcctcagctggctcaggttgtgaccgtgtatgagtttcttctgatgaaggttgaaaaagatcatctagcaaagccttttttcccagctatatataaggaatttgaagagttgcataaaatggttaagaaaatgtgccaagattacctcagtagttctggtctgtgttcccaggagaccctggaaataaacaatgataaggttgctgagtcattaggaatcacagaattcctacggaagaaagaaatacacccagacaaccttggacccaagcacctcagccgagacatggatggggagcagctagagggagctagcagcgagaagagggaacgtgaggctgcggaggagggactggcctcagtgaaaaggcccagaagagaagccctgtccaacgataccactgaatctcttgctgccaacagcagaggccgggagaagcccaggcccttgcatgctttggccgctggtacaatagtgtctcaggaggaggacattgtcacagtgactgatgcagaggggcgtgcctgcggatgggcccgctagaaggagttcctctagaagctgtggagtcggtcgtcaccgtggagccagagccctcacagtgaagtggagtcagatcctagattcgtctgattttatccagagaaggtctatggcaagcaatgtatatttttctaatgtgaatattgcacagatgaaccttttatttataaagaataatgtctttctgccctgctgtctacatttttctatggagcttgtcataataatagcagatattacctgatcaggaatccctgtggcgcgtctgacgctcatgagtttttcatgatggtgatgagtagcactgcactgtcacctgatgattggccctgctccgtttcccttctctcctgggagatatgctgcttttccaccagacttgctccatactagaagcttcttttgggttcaattaaaaagaaaataagctagtcattctgggcagcattttattgatagaagggggaaaaagtcatttctacttgcatgattttttaaattaaattaaattaaattaatttaattatttttgagaccaagtcttactctgtagcccaagctggagtgcagtggcgcgatcttggctcactgcaacctctgccgcctgggctcaagcg

SEQ ID NO: 329565 - DNA, 3205 bp, Homo sapiens
acccgggttcgagtccccgcctcggccgccatggcggatgcggagccggaggctgggggcggcagcgaggatggcggcggcggcggcggccggctcctccgggccagagcggcagcgtcgcacgtgtggccccgctgggccccgagcagctgcggcaggtcctggagcaggtgacgaaggcgcagccgccgccgccgccgccccccttcgtgctgcgggacgcggcgcggcggctgcgggacgcgggccaacaggccgccctgcagcggggccggggcaccgagcccccgcgcctgccgcgcctgctcccgccccagcaactagaagccatttgtgtcaaggtaacgtctggagaaacaaaaggtcaggaaaggccaatgctcctaccgaccacaatccagccccaaactgcaagaaagagccagctgccccgggggaattcctgcctggtggggctccatatcgccagccctcagctgctcagggtacagccgcttgtgagaaccgagccacagtcctgcttcctaagtgacttatgccaacctcctgctcaggggtttgtacagagaccactgccagccctccaggtggtccctgcaaagagagtcccagcccccaaggctccagatgaacagggctccatgttgacccctttgtctgcctctgacccgctggcagtaacatctctttcatccagttcagcacatccatttatttccaacttgcatacaagacatactgagaaactaaaaaaatcgttaaaagtaaagacacgttctggacgggtatctcgacctcccaaatataaagctaaagattataagttcataaaaacagaggatctggcggatggtcatctgtcagattctgatgattactcagaactctgtgtggaagaagatgaagatcagagggagaggcacgcactctttgacttatcgagctgctccctgaggcccaaaagctttaagtgtcagacttgtgaaaagtcatatatagggaaggggggactggcccgacattttaaacttaacccaggccacggccagttggaccccgagatggtgctgtctgagaaagccagtggaagcaccctccgggggtgcacggaggaaaggacgctcagcctgacctccctggggctgtccatgccagcggatccatgtgagggaggggcccgctcctgcttggtgacagagtcagcacgcggtggcctgcagttcctccagcagtgtgaccgggaggatctggtggaattggctctgcctcagctggctcaggttgtgaccgtgtatgagtttcttctgatgaaggttgaaaaagatcatctagcaaagccttttttcccagctatatataaggaatttgaagagttgcataaaatggttaagaaaatgtgccaagattacctcagtagttctggtctgtgttcccaggagaccctggaaataaacaatgataaggttgctgagtcattaggaatcacagaattcctacggaagaaagaaatacacccagacaaccttggacccaagcacctcagccgagacatggatggggagcagctagagggagctagcagcgagaagagggaacgtgaggctgcggaggagggactggcctcagtgaaaaggcccagaagagaagccctgtccaacgataccactgaatctcttgctgccaacagcagaggccgggagaagcccaggcccttgcatgctttggccgctggtttttcccctccagtaaatgtgactgtctctccccgttctgaagaaagccatacaacgacggtttctggtggcaatgggagcgtgttccaggcgggcccgcagcttcaggcactggctaacttagaagccaggagggggtctataggtgctgctctctcatcccgggatgtcagtgggctgcctgtttatgctcagtcaggagagcctaggaggctgacccaggcacaggtggcagcgtttcctggagagaatgctttggaacactcttcagaccaggacacctgggacagcctgaggagcccgggtttctgcagccctttgtcatctggtggtggagcagagtccctgccgcctggggggcctggacatgcagaggcaggacacctcggcaaggtttgtgacttccacctgaaccaccagcagcccagccccaccagcgtcctgcctacagaggtggcagcccctccgcttgagaaaattttgtctgtggatagcgtggcagtggactgtgcctacaggactgtgcccaagccagggcctcagcctggcccacatggatcactattgactgaagggtgtctcagaagcctttcgggggacttgaaccggttcccctgtgggatggaggtgcactctggccagagagaactggagagcgtggttgctgtcggcgaagccatggcttttgaaatttccaatgggagccatgagttactgtctcagggacagaagcagatttttattcagacttccgatgggcttatcttgtcccctccaggtacaatagtgtctcaggaggaggacattgtcacagtgactgatgcagaggggcgtgcctgcggatgggcccgctagaaggagttcctctagaagctgtggagtcggtcgtcaccgtggagccagagccctcacagtgaagtggagtcagatcctagattcgtctgattttatccagagaaggtctatggcaagcaatgtatatttttctaatgtgaatattgcacagatgaaccttttatttataaagaataatgtctttctgccctgctgtctacatttttctatggagcttgtcataataatagcagatattacctgatcaggaatccctgtggcgcgtctgacgctcatgagtttttcatgatggtgatgagtagcactgcactgtcacctgatgattggccctgctccgtttcccttctctcctgggagatatgctgcttttccaccagacttgctccatactagaagcttcttttgggttcaattaaaaagaaaataagctagtcattctgggcagcattttattgatagaagggggaaaaagtcatttctacttgcatgattttttaaattaaattaaattaaattaatttaattatttttgagaccaagtcttactctgtagcccaagctggagtgcagtggcgcgatcttggctcactgcaacctctgccgcctgggctcaagcg

SEQ ID NO: 329566 - DNA, 3430 bp, Homo sapiens
acccgggttcgagtccccgcctcggccgccatggcggatgcggagccggaggctgggggcggcagcgaggatggcggcggcggcggcggccggctcctccgggccagagcggcagcgtcgcacgtgtggccccgctgggccccgagcagctgcggcaggtcctggagcaggtgacgaaggcgcagccgccgccgccgccgccccccttcgtgctgcgggacgcggcgcggcggctgcgggacgcgggccaacaggccgccctgcagcggggccggggcaccgagcccccgcgcctgccgcgcctgctcccgccccagcaactagaagccatttgtgtcaaggtaacgtctggagaaacaaaaggtcaggaaaggccaatgctcctaccgaccacaatccagccccaaactgcaagaaagagccagctgccccgggggaattcctgcctggtggggctccatatcgccagccctcagctgctcagggtacagccgcttgtgagaaccgagccacagtcctgcttcctaagtgacttatgccaacctcctgctcaggggtttgtacagagaccactgccagccctccaggtggtccctgcaaagagagtcccagcccccaaggctccagatgaacagggctccatgttgacccctttgtctgcctctgacccgctggcagtaacatctctttcatccagttcagcacatccatttatttccaacttgcatacaagacatactgagaaactaaaaaaatcgttaaaagtaaagacacgttctggacgggtatctcgacctcccaaatataaagctaaagattataagttcataaaaacagaggatctggcggatggtcatctgtcagattctgatgattactcagaactctgtgtggaagaagatgaagatcagagggagaggcacgcactctttgacttatcgagctgctccctgaggcccaaaagctttaagtgtcagacttgtgaaaagtcatatatagggaaggggggactggcccgacattttaaacttaacccaggccacggccagttggaccccgagatggtgctgtctgagaaagccagtggaagcaccctccgggggtgcacggaggaaaggacgctcagcctgacctccctggggctgtccatgccagcggatccatgtgagggaggggcccgctcctgcttggtgacagagtcagcacgcggtggcctgcagaatggtcagtctgtagacgttgaagagacattgccatctgaaccagaaaatggagctcttttgcgatcagagagataccaaggacctagaagacgcgcatgctcagagacccttgcagagtcccgcacagctgtcctccagcagagaagagctgctcagctacctggtggccctgctgcggcaggggagcagagggcgtcgccaagcaaagccaggctcaaggagttcctccagcagtgtgaccgggaggatctggtggaattggctctgcctcagctggctcaggttgtgaccgtgtatgagtttcttctgatgaaggttgaaaaagatcatctagcaaagccttttttcccagctatatataaggaatttgaagagttgcataaaatggttaagaaaatgtgccaagattacctcagtagttctggtctgtgttcccaggagaccctggaaataaacaatgataaggttgctgagtcattaggaatcacagaattcctacggaagaaagaaatacacccagacaaccttggacccaagcacctcagccgagacatggatggggagcagctagagggagctagcagcgagaagagggaacgtgaggctgcggaggagggactggcctcagtgaaaaggcccagaagagaagccctgtccaacgataccactgaatctcttgctgccaacagcagaggccgggagaagcccaggcccttgcatgctttggccgctggtttttcccctccagtaaatgtgactgtctctccccgttctgaagaaagccatacaacgacggtttctggtggcaatgggagcgtgttccaggcgggcccgcagcttcaggcactggctaacttagaagccaggagggggtctataggtgctgctctctcatcccgggatgtcagtgggctgcctgtttatgctcagtcaggagagcctaggaggctgacccaggcacaggtggcagcgtttcctggagagaatgctttggaacactcttcagaccaggacacctgggacagcctgaggagcccgggtttctgcagccctttgtcatctggtggtggagcagagtccctgccgcctggggggcctggacatgcagaggcaggacacctcggcaaggtttgtgacttccacctgaaccaccagcagcccagccccaccagcgtcctgcctacagaggtggcagcccctccgcttgagaaaattttgtctgtggatagcgtggcagtggactgtgcctacaggactgtgcccaagccagggcctcagcctggcccacatggatcactattgactgaagggtgtctcagaagcctttcgggggacttgaaccggttcccctgtgggatggaggtgcactctggccagagagaactggagagcgtggttgctgtcggcgaagccatggcttttgaaatttccaatgggagccatgagttactgtctcagggacagaagcagatttttattcagacttccgatgggcttatcttgtcccctccaggtacaatagtgtctcaggaggaggacattgtcacagtgactgatgcagaggggcgtgcctgcggatgggcccgctagaaggagttcctctagaagctgtggagtcggtcgtcaccgtggagccagagccctcacagtgaagtggagtcagatcctagattcgtctgattttatccagagaaggtctatggcaagcaatgtatatttttctaatgtgaatattgcacagatgaaccttttatttataaagaataatgtctttctgccctgctgtctacatttttctatggagcttgtcataataatagcagatattacctgatcaggaatccctgtggcgcgtctgacgctcatgagtttttcatgatggtgatgagtagcactgcactgtcacctgatgattggccctgctccgtttcccttctctcctgggagatatgctgcttttccaccagacttgctccatactagaagcttcttttgggttcaattaaaaagaaaataagctagtcattctgggcagcattttattgatagaagggggaaaaagtcatttctacttgcatgattttttaaattaaattaaattaaattaatttaattatttttgagaccaagtcttactctgtagcccaagctggagtgcagtggcgcgatcttggctcactgcaacctctgccgcctgggctcaagcg

SEQ ID NO: 329567 - DNA, 2221 bp, Homo sapiens
acccgggttcgagtccccgcctcggccgccatggcggatgcggagccggaggctgggggcggcagcgaggatggcggcggcggcggcggccggctcctccgggccagagcggcagcgtcgcacgtgtggccccgctgggccccgagcagctgcggcaggtcctggagcaggtgacgaaggcgcagccgccgccgccgccgccccccttcgtgctgcgggacgcggcgcggcggctgcgggacgcgggccaacaggccgccctgcagcggggccggggcaccgagcccccgcgcctgccgcgcctgctcccgccccagcaactagaagccatttgtgtcaaggtaacgtctggagaaacaaaaggtcaggaaaggccaatgctcctaccgaccacaatccagccccaaactgcaagaaagagccagctgccccgggggaattcctgcctggtggggctccatatcgccagccctcagctgctcagggtacagccgcttgtgagaaccgagccacagtcctgcttcctaagtgacttatgccaacctcctgctcaggggtttgtacagagaccactgccagccctccaggtggtccctgcaaagagagtcccagcccccaaggctccagatgaacagggctccatgttgacccctttgtctgcctctgacccgctggcagtaacatctctttcatccagttcagcacatccatttatttccaacttgcatacaagacatactgagaaactaaaaaaatcgttaaaagtaaagacacgttctggacgggtatctcgacctcccaaatataaagctaaagattataagttcataaaaacagaggatctggcggatggtcatctgtcagattctgatgattactcagaactctgtgtggaagaagatgaagatcagagggagaggcacgcactctttgacttatcgagctgctccctgaggcccaaaagctttaagtgtcagacttgtgaaaagtcatatatagggaaggggggactggcccgacattttaaacttaacccaggccacggccagttggaccccgagatggtgctgtctgagaaagccagtggaagcaccctccgggggtgcacggaggaaaggacgctcagcctgacctccctggggctgtccatgccagcggatccatgtgagggaggggcccgctcctgcttggtgacagagtcagcacgcggtggcctgcagaatggtcagtctgtagacgttgaagagacattgccatctgaaccagaaaatggagctcttttgcgatcagagagataccaaggacctagaagacgcgcatgctcagagacccttgcagagtcccgcacagctgtcctccagcagagaagagctgctcagctacctggtggccctgctgcggcaggggagcagagggcgtcgccaagcaaagccaggctcaaggagttcctccagcagtgtgaccgggaggatctggtggaattggctctgcctcagctggctcaggttgtgaccgtgtatgagtttcttctgatgaaggttgaaaaagatcatctagcaaagccttttttcccagctatatataaggaatttgaagagttgcataaaatggttaagaaaatgtgccaagattacctcagtagttctggtctgtgttcccaggagaccctggaaataaacaatgataaggttgctgagtcattaggaatcacagaattcctacggaagaaagaaatacacccagacaaccttggacccaagcacctcagccgagacatggatggggagcagctagagggagctagcagcgagaagagggaacgtgaggctgcggaggagggactggcctcagtgaaaaggcccagaagagaagccctgtccaacgataccactgaatctcttgctgccaacagcagaggccgggagaagcccaggcccttgcatgctttggccgctggtacaatagtgtctcaggaggaggacattgtcacagtgactgatgcagaggggcgtgcctgcggatgggcccgctagaaggagttcctctagaagctgtggagtcggtcgtcaccgtggagccagagccctcacagtgaagtggagtcagatcctagattcgtctgattttatccagagaaggtctatggcaagcaatgtatatttttctaatgtgaatattgcacagatgaaccttttatttataaagaataatgtctttctgc

SEQ ID NO: 329568 - DNA, 519 bp, Homo sapiens
attacaagtgagaatgagcatgtggccatgagaccagggaaggcaggaaagtggattcgataaaccagtgacatcaaagagcacctgtcaggtgggtacaatgagaaacactggcagaactcagcagctttcaaactgcccaatttccagggttggctcagagcatgcatatctgataacaaaaatgcacagagcattgcagctcttaagaggcttcctaaactattggtccaagcatgttccttatcacaccttttcttgttttaattttttaaaaaagctgtaccagacacacagaatataatcccataaaaaccttccttggttagaaaagttgcttttctttcaattcattgcctttcaaaactatattaacaaaacacaacaaagatcagttaaaaaaagacataattaaaaaaatctcattaaccaccaagattaaggtttgcatcttaaacagtattcacacagtttcacaaaaagctacatgaatgtgggagggagcactcaagagacaga

SEQ ID NO: 329569 - DNA, 429 bp, Homo sapiens
tctcagatactatacacaagattactctcattaactcagtccttatttatcttaaagctttctgattcaaagtgtggtcctcagaccagcagcatctcaccacctaggatcttgttggaaaatctcaagggctaatatgattaggcaatcagaaaaccctattttaacacaattccgggtgatccagaggtatactgaaatatgaaatcactccattaaggccatcaatgaaaatctgctactataaagtcaataatgaatataaacccagacttgcctgggagtattcagtcctatttttgataatcagaacactcagaagtgacagggtctctacttgcttcatacaccagatgtaccctgcacatactaggtactaagtaaatgtcaggcaatgctctaggctcgggtgttagagtggtaaccagt

SEQ ID NO: 329570 - DNA, 332 bp, Homo sapiens
cttttttttgtgtgtgaaatatcataaaagtgaacacaacatcccaaccccacagttggttgggatgacagaagcattgtaggttggcagggaatatccatattcagaatacatacaccctttttggaaggggtacgatgaaatcaatccttcatgatgtggctggctggtcttcctagggaatagtgttacatcagggctttgcttttagcctctgctattggaggattatgtatttagaagtagcagtcaccagatcagacttggtgaggaagagtccttttggtggttttaaaatttgttcaaaattctttgtcgacgccccttcaaaa

SEQ ID NO: 329571 - DNA, 429 bp, Homo sapiens
tttattcctccgtggcacatggtcttactgctatggtaattacaacatactgtcacgaatgttatttgcttaaatatccataaatctagactgttcttctcaagagaagcagtatctggtagtgcaaaggcactagattggaagcagaaactgaatttgagatctaaatcatgaacttcctagttgctcaactgatctaatgacttgtttctgcatctgtaaaatgagaataatacatgggattgttacaaaggtcaaatcaggtaatatacatgaagctttgtatatactgaaaatatagtacaaatgtagggtggtattgttatcagggtgggtgtttaatatggctcatcgtatgagtgaacacacgagttctcatgattcatgctgaatttagggtctgcccaagggagatggcagtggtgctat

SEQ ID NO: 329572 - DNA, 326 bp, Homo sapiens
ctttcctgtgtcactttctctaatttctaatttctctaatttctaattctctaatttctaattctctaatttctaatttgtgctttctgggatcatctccgaaataaactatctgtaccaatgtcttatggtttcctttgaaaggaatcactaagattgttccttttctctttgtgttgattttaaatgtattcacaaattctttgacaatcttccttttaagagatagagcttaattcccctctccataagtataggctggacttgatgcatttctaattaatagaatagggcagaagtgatggtgtgtggcctctcagactagt

SEQ ID NO: 329573 - DNA, 615 bp, Homo sapiens
tacatcaatatagaaatggattttaaaattggaataaattttaaagattgcctccatctccaatgatgctgattcccagacagaatgtgtagaaagtcgcactgtgatctagtctgaatgcagtctctaaactgctatgcaagtgctctttcaatcatattacaagcactggtcactttttatattagtagaatgcacttctttaattcaaatacctatgtttctggagctaaatgtattatctatattacaaatggaactttcagatttttatcttcatgctagtcctgtcttgctatttgctacctaatggatgaatcacagagattagttcatcttcatctttcgagatctaatagtatgtgaaaacatgactccacatggtaggtgctcaattaatgcttgtttattgcctatatattcttctgagataaatcattgaaggagtggctatgtggtcatcaaagcaggtctcttttataccaaagctatagtaaacaggtcacacattgatgactggaaaatttctctttctattcatgggaggagaggaaatctaactggggattgagatgaaaagaagaaaaaaaggattgaatcctcttttaatatcta

SEQ ID NO: 329574 - DNA, 470 bp, Homo sapiens
tagcatattgattcacttacagtacatacagtataatactacttattttcccaaagtgaccatctgtccagcttgccagcttgtcagctatcatcattcctctgagcttcagatcctcgcccgtaaaatagggagagatacagggttattgtaacaagtagaataaatgacacacaaatcattctaatagagtgcctggtacttcccttatatacccttccaagatcactcctcactccacccttgttccctcgatgatcttatgctttaattgtgagaggcaaaaacaaatacaaaaggaaataaaggatgaagcagtgggcggagaatgtagactagtggaaataaacttgacaggaagcctcctaaattctagtagtcctagttttgctaccaaacagctatgataccttgcttggatcacaaagtctttctatatctacatattgtccatcaaatgaaggtttaat

SEQ ID NO: 329575 - DNA, 898 bp, Homo sapiens
gtgactttgggctccacgtcgcaagctcattatcctcacctaatttggcataaaatgcttatgttacaaagctgtgcaagctttgcatcctagaactttactatggtgtataaagttgtaaacagaaagctcttctatcagtttttggccgttttcagatagtgaaagtgctctgaaatgctgacgttaccttggaggagaaaatattagatgtcaccattttagtttaaattattggacacactaatttcaccagaatgtccttatagaaatagttattggttaagacagtatgagagtgtgtaatgcatagaacgggtgcttgaaagtgaatgccctaactaaatcctttgctaagcacagagaaaatctaatagcactgtttctgctggcacacaattaggattctgatgttgctgtcaattttcagcacagcccattcataaatgtaatgggatctcttttctcacaatctaggccagggatgtccaatattttcactttccttggccacattggaagaagaattgccttgggccacacataaaatacactaacactaacgatagctgatgagaaaaaaaaaaaaaaaaaacctgccaaaaaaaaatctcacaacgttttaagaaagtttatgaatttgtgttgggctgcattcaaagtcatcctgggccacatacagcccagaggccatggattgaccaagtttgatctagggggttttcctttcatttttttcaatatttgtattcggagtataaaaagtatctggctattaaacaaaaaaaaggttgctcatctttaccactcagtaaaaagcattagaaagaaaaagcctacaagttaactttaggttatgcttttaaactcagaaaaatactaatatcctgaaattttc

SEQ ID NO: 329576 - DNA, 602 bp, Homo sapiens
gtctaactgcagagtagaagctggaccctggagttaccaacactcctccccaacagttcttagcaccccgcaggctgggcgctgtggctcacgcctgtaatcccagcactttgggagggcaaggcaggcggattacctggggtcaggagttcatgaccagcctggccaacatggtgaaaccccgtctctactaaaaaaatacgtaaaaattagccaggcgtggtggcacacgcctgtaaacccagctacttgggaggctgaggcaggagaattgcttgagcccgggagagggaggttgcagtgaggcgagatcatgccactgcactccagcctggctgacagagcaagactcccctgtctcaaaaaaaataaaaaaaaacagttcgtagggccccataccccacaacccctgtctcctgcacttaactcccacctgggtcagagaacagccaattcaccagtgaggtagaagtgaacccagaagaaatagccacttgattttaaaattcccagctccattccgtggccttctccccactagacacagcagtcccaggcctcctgttccctcctcacctagaggcagccgggacggaggggga

SEQ ID NO: 329577 - DNA, 422 bp, Homo sapiens
catttcacacaaagatattacaaaatgacaacggcatgaattatcggaatgatggaactatcttctaaaagggtagtaaactcaggttaactcccaaacagaatacacacctattaccttactagtaagagtaataaccaccaattattgagcaccagccacagtgctaagtgctctacctatattgtcttatctaatcctgaaaacacgatcttcctttaatggtagttgtctttatttttaaaatgagaaacctgagctctgcagaggttaataacttgccaagctgttcccagtacccaatctcacatacagatctctgctaagccatgaggccacaaaacagaagctatgtttttggtctggagaaatattctccacctggaagacaacccttacccacaaaaaggcagtagcccaag

SEQ ID NO: 329578 - DNA, 202 bp, Homo sapiens
ggcctgtctttaccttctgacactcctgacttctttccttttgaaacctctctaccactggctcctttaactctgagctctgttggtgttcctgcccctctctcagccattccttctcagtcttttgctgcttcctcttactttgcccatttactaattttggttctcatttcctctatgtttagtctctatgagcaatggc

SEQ ID NO: 329579 - DNA, 304 bp, Homo sapiens
agtttcattattataaagagcaatgctccagatatttttgcatacacagctcttctttactcttgaaatactttgtagaataattagaactcacttggttgcaaattgcaaagctcattggagtagcctaagtgaaagcagttatgttaataagcacatagggcagtcacgaagatacaatgtgcaagacacatagaaattggaaagttgtcagacaatccccctcacccttctctggtctcttatttccttcagacttttgctgcccataccttgttccctgctcccttataactttggcctg

SEQ ID NO: 329580 - DNA, 610 bp, Homo sapiens
aaagctcagcattaaatttgtgactcacctctagcaaatatataacacttaatgatgtgactgtcctgattctaaaactttttctcttggttttttactttttaaataaaaacacatttaacttaccttcttatttgtgcgatgtaatggtcattttaagtttctttttaacgacaagttgaaggattgcttaattaattaacaaataacattaaaacttatgtgcctatagaagatgctgaactataccaaattttgccaggaaatagaattcaaaaggattaatatagttttgggttaataaaatggaatcaaaaatgtaatgtcagcagggcacggtggctcacgcctgtaatcccaacactttgggaggccgaggtgggtggatcacgaggtcaggagatcgagaccatcctggctaacacggtgaaaccccgtctccactaaaaatacaaaaaattagccaggcttggtggcgggcgccttgtagtcccagctacttgggaggctgaggcaggagaatggcgtgaacccaggaggcggagcttgcagtgagccgagatcacgcaactgccctccagtctgggcgacagagcaagactccatctca

SEQ ID NO: 329581 - DNA, 546 bp, Homo sapiens
cttccctctagtgtgtaacctccatgagggtatggcaggtggccttgtttacagacaatggccagagcctaaggcagtatctgacacatggctatcactcattttgaattcatctctactaccactgacactgttctggcctttatcctcttatcctcttttggctgggtcattctttcagtctctctcctaactggtcttcctggctttcatttctcatcctgccaggctctcttccacgctgctactactgcgatttttttcaaacactcacctctgatgtcattcttctgctgctaatgcacaacagatccatacaggataaaatgcaaacatctcagatggcacagaaggccctgcaccacctggctcctcctagtgtgccctttcccacacaaacctacatctgaagcatttctaactgcttgcagttgcctcacacaccatactgtttcacacttccactgctatttttagggtagaacatgcaggaatagagtctggaaattctttcagaattactcaaattctagaatggcacatgca

SEQ ID NO: 329582 - DNA, 959 bp, Homo sapiens
ggagtatgagtaggcatacaataatgtcacttccttagttaggaaaacaatgctatcagttaatgcctgaccatatagcatattggctagacttagagtatattgtaaatttttacccgtattatgtcagaattataagaaagttaatcgttttttctgggggggaatgaagtcttgttctgtcacccatgctggagtgcagtggcacgatctcagctcactacaacctctgcctcccaagttcaagcaattctcctgcctcagcctcccgagtagttgggactacaggcatgtgccaccacacccagctaattttttgtatttttagtagaggcagggtttcaccctgttggccaggatggtctcgatctcctgacctcatgatctgcccagcctcagcctcccaaagtgctgggattacaggcgtgagccaccgcgcccggccctccaccattcttgataattataaagagcctgatgaagatatctcaattcctgtctcagtagcatagtttgcatgatatcaaggaggaggaagttaaaagtttcatgtttacttctgacatactaacattacatcttcaagttaaaaacattttagaagtaagttcatgaatttatattttctgaaacattttcagattcttaagagaaacattttcattaacccttgccagtacatttattattaggttctataaattccatattaattgttttacataggccaaagtctcctgctattgtcactcaaccatttctctgtatcattcattcctaccatatacttaggtttaagttaacagaaatatgttgtagtttttactgtaaataagacacataatcgcctggttggaaggtagtgagttatcttaattgattgttcagtcagttacagatcgaactctttgttctcgtcttccccccgcttctcactgctgcacttgactagtctgaaa

SEQ ID NO: 329583 - DNA, 325 bp, Homo sapiens
tggtaggaagcaacacagaggggttagaaatatgatctttttgattcctagtccagcgcctataatataatactatatgtgatctagaatatgaacttctagatctaggggcataaaataaaatcaagcccccttctaaagagattatactactatatctgctgatataaatgtggacattcatttttccagggctggtctcgaactcctggcctcaaatgatccacctgcctcagcctcccaaactgttgggattacgggcgtgagccaccaagcctggccagaatagtacttcattgtgtataaataccacggtgctataacg

SEQ ID NO: 329584 - DNA, 2740 bp, Homo sapiens
tagccccggtgtggggatccgtgcgcggatgtcccggcgagtcccgggctgaaagaggcggctccgggcggcgcgaagcgctggtggcgggcccgggctgcggcgtgtgcgcgcccgccagctgctccggagatacggaattgcattttgtgaaaaaagaacaagaattttctgcaaggatcatatctaagtgcactttttgctgatacttcatttctaatcttgtagaaaatttcagctgtagcccttggactagaagctgaaataacagaagctgtgtacgatgcattagggtattgaagaaaattaacttttgaattaaatatttggaatataaggaaataaggaaagttgactgaaaatggggcggaagaaaatacaaatcacacgcataatggatgaaaggaaccgacaggtcacttttacaaagagaaagtttggattaatgaagaaagcctatgaacttagtgtgctctgtgactgtgaaatagcactcatcattttcaacagctctaacaaactgtttcaatatgctagcactgatatggacaaagttcttctcaagtatacagaatataatgaacctcatgaaagcagaaccaactcggatattgttgaggctctgaacaagaaggaacacagagggtgcgacagcccagaccctgatacttcatatgtgctaactccacatacagaagaaaaatataaaaaaattaatgaggaatttgataatatgatgcggaatcataaaatcgcacctggtctgccacctcagaacttttcaatgtctgtcacagttccagtgaccagccccaatgctttgtcctacactaacccagggagttcactggtgtccccatctttggcagccagctcaacgttaacagattcaagcatgctctctccacctcaaaccacattacatagaaatgtgtctcctggagctcctcagagaccaccaagtactggcaatgcaggtgggatgttgagcactacagacctcacagtgccaaatggagctggaagcagtccagtggggaatggatttgtaaactcaagagcttctccaaatttgattggagctactggtgcaaatagcttaggcaaagtcatgcctacaaagtctccccctccaccaggtggtggtaatcttggaatgaacagtaggaaaccagatcttcgagttgtcatccccccttcaagcaagggcatgatgcctccactaaacacccaaaggatcagtagttctcaagccactcaacctcttgctaccccagtcgtgtctgtgacaaccccaagcttgcctccgcaaggacttgtgtactcagcaatgccgactgcctacaacactgattattcactgaccagcgctgacctgtcagcccttcaaggcttcaactcgccaggaatgctgtcgctgggacaggtgtcggcctggcagcagcaccacctaggacaagcagccctcagctctcttgttgctggagggcagttatctcagggttccaatttatccattaataccaaccaaaacatcagcatcaagtccgaaccgatttcacctcctcgggatcgtatgaccccatcgggcttccagcagcagcagcagcagcagcagcagcagcagccgccgccaccaccgcagccccagccacaacccccgcagccccagccccgacaggaaatggggcgctcccctgtggacagtctgagcagctctagtagctcctatgatggcagtgatcgggaggatccacggggcgacttccattctccaattgtgcttggccgacccccaaacactgaggacagagaaagcccttctgtaaagcgaatgaggatggacgcgtgggtgacctaaggcttccaagctgatgtttgtacttttgtgttactgcagtgacctgccctacatatctaaatcggtaaataaggacatgagttaaatatatttatatgtacatacatatatatatccctttacatatatatgtatgtgggtgtgagtgtgtgtgtatgtgtgggtgtgtgttacatacacagaatcaggcacttacctgcaaactccttgtaggtctgcagatgtgtgtcccatggcagacaaagcaccctgtaggcacagacaagtctggcacttccttggactacttgtttcgtaaagataaccagtttttgcagagaaacgtgtacccatatataattctcccacactagcttgcagaaacctagagggccccctacttgttttatttaactgtgcagtgactgtagttacttaagagaaaatgctttgtagaacagagcagtagaaaagcaggaaccaagaaagcaatactgtacataaaatgtcatttatattttccaacctggcatgggtgtctgttgcaaaggggtgcatgggaaagggctgttgatattaaaaacaaacaaaacaaaaaagccccacacataactgttttgcacgtgcaaaaatgtattgggtcaagaagtgatctttagctaataaagaaagagaatagaaaacacgcatgagatattcagaaaatactagcctagaaatatagagcattaacaaagtaaaattaatatattaagttataattggaatatgtcagaagtttctttttacattcatatcttaaaaattaaagaaactgattttagctcatgtatattttatatgaaagaaaacacccttatgaattgatgactatatataaaattatattcactacttttg

SEQ ID NO: 329585 - DNA, 5734 bp, Homo sapiens
tagccccggtgtggggatccgtgcgcggatgtcccggcgagtcccgggctgaaagaggcggctccgggcggcgcgaagcgctggtggcgggcccgggctgcggcgtgtgcgcgcccgccagctgctccggagatacggaattgcattttgtgaaaaaagaacaagaattttctgcaaggatcatatctaagtgcactttttgctgatacttcatttctagacattgagtctcactctaccccccaggctgaagtgcagtggtgtgatctcggttcactgcaacctccgcctccaggttcaagtgattctcgtacctcagcctcccgagtagctgggattacaggcgcctgccaccatgcctggctgatatttatatttttagtagagatggagtttcaccatgttggccaggctggtctcgaactctggacctcagatcttgtagaaaatttcagctgtagcccttggactagaagctgaaataacagaagctgtgtacgatgcattagggtattgaagaaaattaacttttgaattaaatatttggaatataaggaaataaggaaagttgactgaaaatggggcggaagaaaatacaaatcacacgcataatggatgaaaggaaccgacaggtcacttttacaaagagaaagtttggattaatgaagaaagcctatgaacttagtgtgctctgtgactgtgaaatagcactcatcattttcaacagctctaacaaactgtttcaatatgctagcactgatatggacaaagttcttctcaagtatacagaatataatgaacctcatgaaagcagaaccaactcggatattgttgaggctctgaacaagaaggaacacagagggtgcgacagcccagaccctgatacttcatatgtgctaactccacatacagaagaaaaatataaaaaaattaatgaggaatttgataatatgatgcggaatcataaaatcgcacctggtctgccacctcagaacttttcaatgtctgtcacagttccagtgaccagccccaatgctttgtcctacactaacccagggagttcactggtgtccccatctttggcagccagctcaacgttaacagattcaagcatgctctctccacctcaaaccacattacatagaaatgtgtctcctggagctcctcagagaccaccaagtactggcaatgcaggtgggatgttgagcactacagacctcacagtgccaaatggagctggaagcagtccagtggggaatggatttgtaaactcaagagcttctccaaatttgattggagctactggtgcaaatagcttaggcaaagtcatgcctacaaagtctccccctccaccaggtggtggtaatcttggaatgaacagtaggaaaccagatcttcgagttgtcatccccccttcaagcaagggcatgatgcctccactatcggaggaagaggaattggagttgaacacccaaaggatcagtagttctcaagccactcaacctcttgctaccccagtcgtgtctgtgacaaccccaagcttgcctccgcaaggacttgtgtactcagcaatgccgactgcctacaacactgattattcactgaccagcgctgacctgtcagcccttcaaggcttcaactcgccaggaatgctgtcgctgggacaggtgtcggcctggcagcagcaccacctaggacaagcagccctcagctctcttgttgctggagggcagttatctcagggttccaatttatccattaataccaaccaaaacatcagcatcaagtccgaaccgatttcacctcctcgggatcgtatgaccccatcgggcttccagcagcagcagcagcagcagcagcagcagcagccgccgccaccaccgcagccccagccacaacccccgcagccccagccccgacaggaaatggggcgctcccctgtggacagtctgagcagctctagtagctcctatgatggcagtgatcgggaggatccacggggcgacttccattctccaattgtgcttggccgacccccaaacactgaggacagagaaagcccttctgtaaagcgaatgaggatggacgcgtgggtgacctaaggcttccaagctgatgtttgtacttttgtgttactgcagtgacctgccctacatatctaaatcggtaaataaggacatgagttaaatatatttatatgtacatacatatatatatccctttacatatatatgtatgtgggtgtgagtgtgtgtgtatgtgtgggtgtgtgttacatacacagaatcaggcacttacctgcaaactccttgtaggtctgcagatgtgtgtcccatggcagacaaagcaccctgtaggcacagacaagtctggcacttccttggactacttgtttcgtaaagataaccagtttttgcagagaaacgtgtacccatatataattctcccacactagcttgcagaaacctagagggccccctacttgttttatttaactgtgcagtgactgtagttacttaagagaaaatgctttgtagaacagagcagtagaaaagcaggaaccaagaaagcaatactgtacataaaatgtcatttatattttccaacctggcatgggtgtctgttgcaaaggggtgcatgggaaagggctgttgatattaaaaacaaacaaaacaaaaaagccccacacataactgttttgcacgtgcaaaaatgtattgggtcaagaagtgatctttagctaataaagaaagagaatagaaaacacgcatgagatattcagaaaatactagcctagaaatatagagcattaacaaagtaaaattaatatattaagttataattggaatatgtcagaagtttctttttacattcatatcttaaaaattaaagaaactgattttagctcatgtatattttatatgaaagaaaacacccttatgaattgatgactatatataaaattatattcactacttttgaacacattctgctatgaattatttatataagccaaagctatatgttgtaacttttttttagagaatagctttatcttggtttaactctttagttttattttaagaggggaaaacaaaaatatcttgcaagcagaaccttggaaaaaaaaagccatgaacacttattctaaatgtaaattaaaagttgagccaaactctttgtgtatatagcatcttaaatatattatcacctttgatgtaagtacctatgtattgtatggtcaccagattaaaaagtatatttttgtggattgccgccaatctggggggaaaaggcgaggtcctttattaagtattcactgtttaatatttactattttgttaaatatactgtactttggattttaattattagcccagttttttcagaggattgtataaaggggtttctcccctcactggtggtgaatgtgtgatgttacattgtaatctttgtgctgtatgggttgagcatcattatatattttgtatgtgtacataaatagcaaagtggcaaaaaaaattggtgttaagttcatcctgcataagtataaaatgtgttgtaacagattttataaggcattatttaaaacttgccttttgtgaggaaaaaatgtagtagaaaaagctgacctaatttaattaatattagagaaaatggcaaaatagtagatgagcacaaaggttttataagtggtaaatgattaggggaaaataatcatggggaaagggatcttttttccttgaccctctgaaaacagaacgatgcagctggttacaaaatcctaccgttatcagctcttctgcacattgcagtgatgctttggtatgcggggagaaacactcttagggtgctggtccttggcatgactcttgccattctaattggaattagtgccaccctcagcttggattttgaacaaggccttattctttcaggaagacaactaatggatgatagcaagttcatccacttactgggcttgtgccatgagcaaaattcaaagtcctgtatatctttcattgtagatttttaaatactccttttcctaaaaaactcaagggtttaaaaattgctattttatattttaaatgatattgagcagctacctacaatttctatgtacattttgttccccccccaccgcccccccccaaattacgttccttttgacgttttcctcatctgctgtttgtgacaagtcatcagccagatttcctgactgacacatacgtatgatcagtgcaggagagacctgcgcaccacaggctgcaaactggaggttctgttctcatggcagtttgggcagtaacttttgagagaggccaaaaaaaggaggatgacatgctgtctcctctcttcagtatagacattaggctcttattcagaaaggatttttctttaaaaatgtacttactttactgaactacttacaggcacatttcttcataaggccacacctaatccaaacaagacagtctcccaacactgaagttccaaaataatccttaccactttgtaaaccatttatagctttgaaagtgttaagtgattccttcgttattatttatgcatgttcatgaacttctgctgtacattggaataggagttaacacattcacatttactgtctattttcttgtgtgccttatgagatggcttttctgactgtatctcaatagtctttctttctatgcaggtttataatcagtacaactactgttttctaaaatactactactcaaggctcggagtttgtatttaaattacactgaccaagtaacaatgtattccatttcaggaactgaatatttgactgttaacctttttcccatacgtccagtgtggcatggagcatatggacttgacagacatctctcacccagacgcccacgtgtgaacacacccacatccacatctctgggtggaaaccagcctagagtggggacgacgctaatggtgttgctttagaaccgtcttttcttacccttttagactcgtgttttgtatgagacaccattgcaagaaaattttatccctccagaagtattttattactaaagaacaaaagcaaaaaaagcttaaattgcactggttaaagtacagtttccaacagctgtccttcctcagtactctaatggccactccaccgcgagtggaagtcactgttgtgtgtacacaggtggtcccaatcaaaactccatcttttgagcccaattatgtccattttgttatagactaaatcaggggtttgttctacaagaacaatacatgttttaccctttcctttaactagaaggataactagtaatgcatcaacataatttctgtattaaccatcatgcgcacaagaaatacatagtaaataaggaagctgaaaactcctggcattggatcttaagctagatgattagaatgtgaaaaagattttacaaatgtaaaacttctatttctctgtagaaactttcttcactttgctgtgcaagaagacactgctttgctatatttaaaatggcttttttaaaagagatttatgtatttggtaaatgtttgtagtcaacagttcacacaagaagctgtacacggtttgatcatgtaaaaccgtttggcggcacaagctggactttgttgccatccttgagatgaaccttttaagaaaaataagttaatctcaatttttccctgaatgtgttgtttttcttcattatacaataaatataatagtgaactttta

SEQ ID NO: 329586 - DNA, 5680 bp, Homo sapiens
tagccccggtgtggggatccgtgcgcggatgtcccggcgagtcccgggctgaaagaggcggctccgggcggcgcgaagcgctggtggcgggcccgggctgcggcgtgtgcgcgcccgccagctgctccggagatacggaattgcattttgtgaaaaaagaacaagaattttctgcaaggatcatatctaagtgcactttttgctgatacttcatttctagacattgagtctcactctaccccccaggctgaagtgcagtggtgtgatctcggttcactgcaacctccgcctccaggttcaagtgattctcgtacctcagcctcccgagtagctgggattacaggcgcctgccaccatgcctggctgatatttatatttttagtagagatggagtttcaccatgttggccaggctggtctcgaactctggacctcagatcttgtagaaaatttcagctgtagcccttggactagaagctgaaataacagaagctgtgtacgatgcattagggtattgaagaaaattaacttttgaattaaatatttggaatataaggaaataaggaaagttgactgaaaatggggcggaagaaaatacaaatcacacgcataatggatgaaaggaaccgacaggtcacttttacaaagagaaagtttggattaatgaagaaagcctatgaacttagtgtgctctgtgactgtgaaatagcactcatcattttcaacagctctaacaaactgtttcaatatgctagcactgatatggacaaagttcttctcaagtatacagaatataatgaacctcatgaaagcagaaccaactcggatattgttgaggctctgaacaagaaggaacacagagggtgcgacagcccagaccctgatacttcatatgtgctaactccacatacagaagaaaaatataaaaaaattaatgaggaatttgataatatgatgcggaatcataaaatcgcacctggtctgccacctcagaacttttcaatgtctgtcacagttccagtgaccagccccaatgctttgtcctacactaacccagggagttcactggtgtccccatctttggcagccagctcaacgttaacagattcaagcatgctctctccacctcaaaccacattacatagaaatgtgtctcctggagctcctcagagaccaccaagtactggcaatgcaggtgggatgttgagcactacagacctcacagtgccaaatggagctggaagcagtccagtggggaatggatttgtaaactcaagagcttctccaaatttgattggagctactggtgcaaatagcttaggcaaagtcatgcctacaaagtctccccctccaccaggtggtggtaatcttggaatgaacagtaggaaaccagatcttcgagttgtcatccccccttcaagcaagggcatgatgcctccactatcggaggaagaggaattggagttgaacacccaaaggatcagtagttctcaagccactcaacctcttgctaccccagtcgtgtctgtgacaaccccaagcttgcctccgcaaggacttgtgtactcagcaatgccgactgcctacaacactgattattcactgaccagcgctgacctgtcagcccttcaaggcttcaactcgccaggaatgctgtcgctgggacaggtgtcggcctggcagcagcaccacctaggacaagcagccctcagctctcttgttgctggagggcagttatctcagggttccaatttatccattaataccaaccaaaacatcagcatcaagtccgaaccgatttcacctcctcgggatcgtatgaccccatcgggcttccagcagcagcagcagcagcagcagcagcagcagccgccgccaccaccgcagccccagccacaacccccgcagccccagccccgacaggaaatggggcgctcccctgtggacagtctgagcagctctagtagctcctatgatggcagtgatcgggaggatccacggggcgacttccattctccaattgtgcttggccgacccccaaacactgaggacagagaaagcccttctgtaaagcgaatgaggatggacgcgtgggtgacctaaggcttccaagctgatgtttgtacttttgtgttactgcagtgacctgccctacatatctaaatcggtaaataaggacatgagttaaatatatttatatgtacatacatatatatatccctttacatatatatgtatgtgggtgtgagtgtgtgtgtatgtgtgggtgtgtgttacatacacagaatcaggcacttacctgcaaactccttgtaggtctgcagatgtgtgtcccatggcagacaaagcaccctgtaggcacagacaagtctggcacttccttggactacttgtttcgtaaagataaccagtttttgcagagaaacgtgtacccatatataattctcccacactagcttgcagaaacctagagggccccctacttgttttatttaactgtgcagtgactgtagttacttaagagaaaatgctttgtagaacagagcagtagaaaagcaggaaccaagaaagcaatactgtacataaaatgtcatttatattttccaacctggcatgggtgtctgttgcaaaggggtgcatgggaaagggctgttgatattaaaaacaaacaaaacaaaaaagccccacacataactgttttgcacgtgcaaaaatgtattgggtcaagaagtgatctttagctaataaagaaagagaatagaaaacacgcatgagatattcagaaaatactagcctagaaatatagagcattaacaaagtaaaattaatatattaagttataattggaatatgtcagaagtttctttttacattcatatcttaaaaattaaagaaactgattttagctcatgtatattttatatgaaagaaaacacccttatgaattgatgactatatataaaattatattcactacttttgaacacattctgctatgaattatttatataagccaaagctatatgttgtaacttttttttagagaatagctttatcttggtttaactctttagttttattttaagaggggaaaacaaaaatatcttgcaagcagaaccttggaaaaaaaaagccatgaacacttattctaaatgtaaattaaaagttgagccaaactctttgtgtatatagcatcttaaatatattatcacctttgatgtaagtacctatgtattgtatggtcaccagattaaaaagtatatttttgtggattgccgccaatctggggggaaaaggcgaggtcctttattaagtattcactgtttaatatttactattttgttaaatatactgtactttggattttaattattagcccagttttttcagaggattgtataaaggggtttctcccctcactggtggtgaatgtgtgatgttacattgtaatctttgtgctgtatgggttgagcatcattatatattttgtatgtgtacataaatagcaaagtggcaaaaaaaattggtgttaagttcatcctgcataagtataaaatgtgttgtaacagattttataaggcattatttaaaacttgccttttgtgaggaaaaaatgtagtagaaaaagctgacctaatttaattaatattagagaaaatggcaaaatagtagatgagcacaaaggttttataagtggtaaatgattaggggaaaataatcatggggaaagggatcttttttccttgaccctctgaaaacagaacgatgcagctggttacaaaatcctaccgttatcagctcttctgcacattgcagtgatgctttggtatgcggggagaaacactcttagggtgctggtccttggcatgactcttgccattctaattggaattagtgccaccctcagcttggattttgaacaaggccttattctttcaggaagacaactaatggatgatagcaagttcatccacttactgggcttgtgccatgagcaaaattcaaagtcctgtatatctttcattgtagatttttaaatactccttttcctaaaaaactcaagggtttaaaaattgctattttatattttaaatgatattgagcagctacctacaatttctatgtacattttgttccccccccaccgcccccccccaaattacgttccttttgacgttttcctcatctgctgtttgtgacaagtcatcagccagatttcctgactgacacatacgtatgatcagtgcaggagagacctgcgcaccacaggctgcaaactggaggttctgttctcatggcagtttgggcagtaacttttgagagaggccaaaaaaaggaggatgacatgctgtctcctctcttcagtatagacattaggctcttattcagaaaggatttttctttaaaaatgtacttactttactgaactacttacaggcacatttcttcataaggccacacctaatccaaacaagacagtctcccaacactgaagttccttccttcgttattatttatgcatgttcatgaacttctgctgtacattggaataggagttaacacattcacatttactgtctattttcttgtgtgccttatgagatggcttttctgactgtatctcaatagtctttctttctatgcaggtttataatcagtacaactactgttttctaaaatactactactcaaggctcggagtttgtatttaaattacactgaccaagtaacaatgtattccatttcaggaactgaatatttgactgttaacctttttcccatacgtccagtgtggcatggagcatatggacttgacagacatctctcacccagacgcccacgtgtgaacacacccacatccacatctctgggtggaaaccagcctagagtggggacgacgctaatggtgttgctttagaaccgtcttttcttacccttttagactcgtgttttgtatgagacaccattgcaagaaaattttatccctccagaagtattttattactaaagaacaaaagcaaaaaaagcttaaattgcactggttaaagtacagtttccaacagctgtccttcctcagtactctaatggccactccaccgcgagtggaagtcactgttgtgtgtacacaggtggtcccaatcaaaactccatcttttgagcccaattatgtccattttgttatagactaaatcaggggtttgttctacaagaacaatacatgttttaccctttcctttaactagaaggataactagtaatgcatcaacataatttctgtattaaccatcatgcgcacaagaaatacatagtaaataaggaagctgaaaactcctggcattggatcttaagctagatgattagaatgtgaaaaagattttacaaatgtaaaacttctatttctctgtagaaactttcttcactttgctgtgcaagaagacactgctttgctatatttaaaatggcttttttaaaagagatttatgtatttggtaaatgtttgtagtcaacagttcacacaagaagctgtacacggtttgatcatgtaaaaccgtttggcggcacaagctggactttgttgccatccttgagatgaaccttttaagaaaaataagttaatctcaatttttccctgaatgtgttgtttttcttcattatacaataaatataatagtgaactttta

SEQ ID NO: 329587 - DNA, 5451 bp, Homo sapiens
ggcgagcagcctccccgggcgcgcaccgcttggggccggggggcggtggtggacgtcgcctccttgaaagttgaaggagttctcgggagaccccggagaaggaattgcattttgtgaaaaaagaacaagaattttctgcaaggatcatatctaagtgcactttttgctgatacttcatttctaatcttgtagaaaatttcagctgtagcccttggactagaagctgaaataacagaagctgtgtacgatgcattagggtattgaagaaaattaacttttgaattaaatatttggaatataaggaaataaggaaagttgactgaaaatggggcggaagaaaatacaaatcacacgcataatggatgaaaggaaccgacaggtcacttttacaaagagaaagtttggattaatgaagaaagcctatgaacttagtgtgctctgtgactgtgaaatagcactcatcattttcaacagctctaacaaactgtttcaatatgctagcactgatatggacaaagttcttctcaagtatacagaatataatgaacctcatgaaagcagaaccaactcggatattgttgagactttaagaaagaaaggccttaatggttgtgagagccctgatgctgacgattactttgagcacagtccactctcggaggacagattcagcaaactaaatgaagatagtgattttattttcaaacgaggccctcctggtctgccacctcagaacttttcaatgtctgtcacagttccagtgaccagccccaatgctttgtcctacactaacccagggagttcactggtgtccccatctttggcagccagctcaacgttaacagattcaagcatgctctctccacctcaaaccacattacatagaaatgtgtctcctggagctcctcagagaccaccaagtactggcaatgcaggtgggatgttgagcactacagacctcacagtgccaaatggagctggaagcagtccagtggggaatggatttgtaaactcaagagcttctccaaatttgattggagctactggtgcaaatagcttaggcaaagtcatgcctacaaagtctccccctccaccaggtggtggtaatcttggaatgaacagtaggaaaccagatcttcgagttgtcatccccccttcaagcaagggcatgatgcctccactaaacacccaaaggatcagtagttctcaagccactcaacctcttgctaccccagtcgtgtctgtgacaaccccaagcttgcctccgcaaggacttgtgtactcagcaatgccgactgcctacaacactgattattcactgaccagcgctgacctgtcagcccttcaaggcttcaactcgccaggaatgctgtcgctgggacaggtgtcggcctggcagcagcaccacctaggacaagcagccctcagctctcttgttgctggagggcagttatctcagggttccaatttatccattaataccaaccaaaacatcagcatcaagtccgaaccgatttcacctcctcgggatcgtatgaccccatcgggcttccagcagcagcagcagcagcagcagcagcagcagccgccgccaccaccgcagccccagccacaacccccgcagccccagccccgacaggaaatggggcgctcccctgtggacagtctgagcagctctagtagctcctatgatggcagtgatcgggaggatccacggggcgacttccattctccaattgtgcttggccgacccccaaacactgaggacagagaaagcccttctgtaaagcgaatgaggatggacgcgtgggtgacctaaggcttccaagctgatgtttgtacttttgtgttactgcagtgacctgccctacatatctaaatcggtaaataaggacatgagttaaatatatttatatgtacatacatatatatatccctttacatatatatgtatgtgggtgtgagtgtgtgtgtatgtgtgggtgtgtgttacatacacagaatcaggcacttacctgcaaactccttgtaggtctgcagatgtgtgtcccatggcagacaaagcaccctgtaggcacagacaagtctggcacttccttggactacttgtttcgtaaagataaccagtttttgcagagaaacgtgtacccatatataattctcccacactagcttgcagaaacctagagggccccctacttgttttatttaactgtgcagtgactgtagttacttaagagaaaatgctttgtagaacagagcagtagaaaagcaggaaccaagaaagcaatactgtacataaaatgtcatttatattttccaacctggcatgggtgtctgttgcaaaggggtgcatgggaaagggctgttgatattaaaaacaaacaaaacaaaaaagccccacacataactgttttgcacgtgcaaaaatgtattgggtcaagaagtgatctttagctaataaagaaagagaatagaaaacacgcatgagatattcagaaaatactagcctagaaatatagagcattaacaaagtaaaattaatatattaagttataattggaatatgtcagaagtttctttttacattcatatcttaaaaattaaagaaactgattttagctcatgtatattttatatgaaagaaaacacccttatgaattgatgactatatataaaattatattcactacttttgaacacattctgctatgaattatttatataagccaaagctatatgttgtaacttttttttagagaatagctttatcttggtttaactctttagttttattttaagaggggaaaacaaaaatatcttgcaagcagaaccttggaaaaaaaaagccatgaacacttattctaaatgtaaattaaaagttgagccaaactctttgtgtatatagcatcttaaatatattatcacctttgatgtaagtacctatgtattgtatggtcaccagattaaaaagtatatttttgtggattgccgccaatctggggggaaaaggcgaggtcctttattaagtattcactgtttaatatttactattttgttaaatatactgtactttggattttaattattagcccagttttttcagaggattgtataaaggggtttctcccctcactggtggtgaatgtgtgatgttacattgtaatctttgtgctgtatgggttgagcatcattatatattttgtatgtgtacataaatagcaaagtggcaaaaaaaattggtgttaagttcatcctgcataagtataaaatgtgttgtaacagattttataaggcattatttaaaacttgccttttgtgaggaaaaaatgtagtagaaaaagctgacctaatttaattaatattagagaaaatggcaaaatagtagatgagcacaaaggttttataagtggtaaatgattaggggaaaataatcatggggaaagggatcttttttccttgaccctctgaaaacagaacgatgcagctggttacaaaatcctaccgttatcagctcttctgcacattgcagtgatgctttggtatgcggggagaaacactcttagggtgctggtccttggcatgactcttgccattctaattggaattagtgccaccctcagcttggattttgaacaaggccttattctttcaggaagacaactaatggatgatagcaagttcatccacttactgggcttgtgccatgagcaaaattcaaagtcctgtatatctttcattgtagatttttaaatactccttttcctaaaaaactcaagggtttaaaaattgctattttatattttaaatgatattgagcagctacctacaatttctatgtacattttgttccccccccaccgcccccccccaaattacgttccttttgacgttttcctcatctgctgtttgtgacaagtcatcagccagatttcctgactgacacatacgtatgatcagtgcaggagagacctgcgcaccacaggctgcaaactggaggttctgttctcatggcagtttgggcagtaacttttgagagaggccaaaaaaaggaggatgacatgctgtctcctctcttcagtatagacattaggctcttattcagaaaggatttttctttaaaaatgtacttactttactgaactacttacaggcacatttcttcataaggccacacctaatccaaacaagacagtctcccaacactgaagttccaaaataatccttaccactttgtaaaccatttatagctttgaaagtgttaagtgattccttcgttattatttatgcatgttcatgaacttctgctgtacattggaataggagttaacacattcacatttactgtctattttcttgtgtgccttatgagatggcttttctgactgtatctcaatagtctttctttctatgcaggtttataatcagtacaactactgttttctaaaatactactactcaaggctcggagtttgtatttaaattacactgaccaagtaacaatgtattccatttcaggaactgaatatttgactgttaacctttttcccatacgtccagtgtggcatggagcatatggacttgacagacatctctcacccagacgcccacgtgtgaacacacccacatccacatctctgggtggaaaccagcctagagtggggacgacgctaatggtgttgctttagaaccgtcttttcttacccttttagactcgtgttttgtatgagacaccattgcaagaaaattttatccctccagaagtattttattactaaagaacaaaagcaaaaaaagcttaaattgcactggttaaagtacagtttccaacagctgtccttcctcagtactctaatggccactccaccgcgagtggaagtcactgttgtgtgtacacaggtggtcccaatcaaaactccatcttttgagcccaattatgtccattttgttatagactaaatcaggggtttgttctacaagaacaatacatgttttaccctttcctttaactagaaggataactagtaatgcatcaacataatttctgtattaaccatcatgcgcacaagaaatacatagtaaataaggaagctgaaaactcctggcattggatcttaagctagatgattagaatgtgaaaaagattttacaaatgtaaaacttctatttctctgtagaaactttcttcactttgctgtgcaagaagacactgctttgctatatttaaaatggcttttttaaaagagatttatgtatttggtaaatgtttgtagtcaacagttcacacaagaagctgtacacggtttgatcatgtaaaaccgtttggcggcacaagctggactttgttgccatccttgagatgaaccttttaagaaaaataagttaatctcaatttttccctgaatgtgttgtttttcttcattatacaataaatataatagtgaactttta

SEQ ID NO: 329588 - DNA, 5671 bp, Homo sapiens
tagccccggtgtggggatccgtgcgcggatgtcccggcgagtcccgggctgaaagaggcggctccgggcggcgcgaagcgctggtggcgggcccgggctgcggcgtgtgcgcgcccgccagctgctccggagatacggaattgcattttgtgaaaaaagaacaagaattttctgcaaggatcatatctaagtgcactttttgctgatacttcatttctagacattgagtctcactctaccccccaggctgaagtgcagtggtgtgatctcggttcactgcaacctccgcctccaggttcaagtgattctcgtacctcagcctcccgagtagctgggattacaggcgcctgccaccatgcctggctgatatttatatttttagtagagatggagtttcaccatgttggccaggctggtctcgaactctggacctcagatcttgtagaaaatttcagctgtagcccttggactagaagctgaaataacagaagctgtgtacgatgcattagggtattgaagaaaattaacttttgaattaaatatttggaatataaggaaataaggaaagttgactgaaaatggggcggaagaaaatacaaatcacacgcataatggatgaaaggaaccgacaggtcacttttacaaagagaaagtttggattaatgaagaaagcctatgaacttagtgtgctctgtgactgtgaaatagcactcatcattttcaacagctctaacaaactgtttcaatatgctagcactgatatggacaaagttcttctcaagtatacagaatataatgaacctcatgaaagcagaaccaactcggatattgttgaggctctgaacaagaaggaacacagagggtgcgacagcccagaccctgatacttcatatgtgctaactccacatacagaagaaaaatataaaaaaattaatgaggaatttgataatatgatgcggaatcataaaatcgcacctggtctgccacctcagaacttttcaatgtctgtcacagttccagtgaccagccccaatgctttgtcctacactaacccagggagttcactggtgtccccatctttggcagccagctcaacgttaacagattcaagcatgctctctccacctcaaaccacattacatagaaatgtgtctcctggagctcctcagagaccaccaagtactggcaatgcaggtgggatgttgagcactacagacctcacagtgccaaatggagctggaagcagtccagtggggaatggatttgtaaactcaagagcttctccaaatttgattggagctactggtgcaaatagcttaggcaaagtcatgcctacaaagtctccccctccaccaggtggtggtaatcttggaatgaacagtaggaaaccagatcttcgagttgtcatccccccttcaagcaagggcatgatgcctccactatcggaggaagaggaattggagttgaacacccaaaggatcagtagttctcaagccactcaacctcttgctaccccagtcgtgtctgtgacaaccccaagcttgcctccgcaaggacttgtgtactcagcaatgccgactgcctacaacactgattattcactgaccagcgctgacctgtcagcccttcaaggcttcaactcgccaggaatgctgtcgctgggacaggtgtcggcctggcagcagcaccacctaggacaagcagccctcagctctcttgttgctggagggcagttatctcagggttccaatttatccattaataccaaccaaaacatcagcatcaagtccgaaccgatttcacctcctcgggatcgtatgaccccatcgggcttccagcagcagcagcagcagcagcagcagcagcagccgccgccaccaccgcagccccagccacaacccccgcagccccagccccgacaggaaatggggcgctcccctgtggacagtctgagcagctctagtagctcctatgatggcagtgatcgggaggatccacggggcgacttccattctccaattgtgcttggccgacccccaaacactgaggacagagaaagcccttctgtaaagcgaatgaggatggacgcgtgggtgacctaaggcttccaagctgatgtttgtacttttgtgttactgcagtgacctgccctacatatctaaatcggtaaataaggacatgagttaaatatatttatatgtacatacatatatatatccctttacatatatatgtatgtgggtgtgagtgtgtgtgtatgtgtgggtgtgtgttacatacacagaatcaggcacttacctgcaaactccttgtaggtctgcagatgtgtgtcccatggcagacaaagcaccctgtaggcacagacaagtctggcacttccttggactacttgtttcgtaaagataaccagtttttgcagagaaacgtgtacccatatataattctcccacactagcttgcagaaacctagagggccccctacttgttttatttaactgtgcagtgactgtagttacttaagagaaaatgctttgtagaacagagcagtagaaaagcaggaaccaagaaagcaatactgtacataaaatgtcatttatattttccaacctggcatgggtgtctgttgcaaaggggtgcatgggaaagggctgttgatattaaaaacaaacaaaacaaaaaagccccacacataactgttttgcacgtgcaaaaatgtattgggtcaagaagtgatctttagctaataaagaaagagaatagaaaacacgcatgagatattcagaaaatactagcctagaaatatagagcattaacaaagtaaaattaatatattaagttataattggaatatgtcagaagtttctttttacattcatatcttaaaaattaaagaaactgattttagctcatgtatattttatatgaaagaaaacacccttatgaattgatgactatatataaaattatattcactacttttgaacacattctgctatgaattatttatataagccaaagctatatgttgtaacttttttttagagaatagctttatcttggtttaactctttagttttattttaagaggggaaaacaaaaatatcttgcaagcagaaccttggaaaaaaaaagccatgaacacttattctaaatgtaaattaaaagttgagccaaactctttgtgtatatagcatcttaaatatattatcacctttgatgtaagtacctatgtattgtatggtcaccagattaaaaagtatatttttgtggattgccgccaatctggggggaaaaggcgaggtcctttattaagtattcactgtttaatatttactattttgttaaatatactgtactttggattttaattattagcccagttttttcagaggattgtataaaggggtttctcccctcactggtggtgaatgtgtgatgttacattgtaatctttgtgctgtatgggttgagcatcattatatattttgtatgtgtacataaatagcaaagtggcaaaaaaaattggtgttaagttcatcctgcataagtataaaatgtgttgtaacagattttataaggcattatttaaaacttgccttttgtgaggaaaaaatgtagtagaaaaagctgacctaatttaattaatattagagaaaatggcaaaatagtagatgagcacaaaggttttataagtggtaaatgattaggggaaaataatcatggggaaagggatcttttttccttgaccctctgaaaacagaacgatgcagctggttacaaaatcctaccgttatcagctcttctgcacattgcagtgatgctttggtatgcggggagaaacactcttagggtgctggtccttggcatgactcttgccattctaattggaattagtgccaccctcagcttggattttgaacaaggccttattctttcaggaagacaactaatggatgatagcaagttcatccacttactgggcttgtgccatgagcaaaattcaaagtcctgtatatctttcattgtagatttttaaatactccttttcctaaaaaactcaagggtttaaaaattgctattttatattttaaatgatattgagcagctacctacaatttctatgtacattttgttccccccccaccgcccccccccaaattacgttccttttgacgttttcctcatctgctgtttgtgacaagtcatcagccagatttcctgactgacacatacgtatgatcagtgcaggagagacctgcgcaccacaggctgcaaactggaggttctgttctcatggcagtttgggcagtaacttttgagagaggccaaaaaaaggaggatgacatgctgtctcctctcttcagtatagacattaggctcttattcagaaaggatttttctttaaaaatgtacttactttactgaactacttacaggcacatttcttcataaggccacacctaatccaaacaagacagtctcccaacactgaagttccaaaataatccttaccactttgtaaaccatttatagctttgaaagtgttaagtgattccttcgttattatttatgcatgttcatgaacttctgctgtacattggaataggagttaacacattcacatttactgtctattttcttgtgtgccttatgagatggcttttctgactgtatctcaatagtctttctttctatgcaggtttataatcagtacaactactgttttctaccatttcaggaactgaatatttgactgttaacctttttcccatacgtccagtgtggcatggagcatatggacttgacagacatctctcacccagacgcccacgtgtgaacacacccacatccacatctctgggtggaaaccagcctagagtggggacgacgctaatggtgttgctttagaaccgtcttttcttacccttttagactcgtgttttgtatgagacaccattgcaagaaaattttatccctccagaagtattttattactaaagaacaaaagcaaaaaaagcttaaattgcactggttaaagtacagtttccaacagctgtccttcctcagtactctaatggccactccaccgcgagtggaagtcactgttgtgtgtacacaggtggtcccaatcaaaactccatcttttgagcccaattatgtccattttgttatagactaaatcaggggtttgttctacaagaacaatacatgttttaccctttcctttaactagaaggataactagtaatgcatcaacataatttctgtattaaccatcatgcgcacaagaaatacatagtaaataaggaagctgaaaactcctggcattggatcttaagctagatgattagaatgtgaaaaagattttacaaatgtaaaacttctatttctctgtagaaactttcttcactttgctgtgcaagaagacactgctttgctatatttaaaatggcttttttaaaagagatttatgtatttggtaaatgtttgtagtcaacagttcacacaagaagctgtacacggtttgatcatgtaaaaccgtttggcggcacaagctggactttgttgccatccttgagatgaaccttttaagaaaaataagttaatctcaatttttccctgaatgtgttgtttttcttcattatacaataaatataatagtgaactttta

SEQ ID NO: 329589 - DNA, 5639 bp, Homo sapiens
tagccccggtgtggggatccgtgcgcggatgtcccggcgagtcccgggctgaaagaggcggctccgggcggcgcgaagcgctggtggcgggcccgggctgcggcgtgtgcgcgcccgccagctgctccggagatacggaattgcattttgtgaaaaaagaacaagaattttctgcaaggatcatatctaagtgcactttttgctgatacttcatttctaatcttgtagaaaatttcagctgtagcccttggactagaagctgaaataacagaagctgtgtacgatgcattagggtattgaagaaaattaacttttgaattaaatatttggaatataaggaaataaggaaagttgactgaaaatggggcggaagaaaatacaaatcacacgcataatggatgaaaggaaccgacaggtcacttttacaaagagaaagtttggattaatgaagaaagcctatgaacttagtgtgctctgtgactgtgaaatagcactcatcattttcaacagctctaacaaactgtttcaatatgctagcactgatatggacaaagttcttctcaagtatacagaatataatgaacctcatgaaagcagaaccaactcggatattgttgagactttaagaaagaaaggccttaatggttgtgagagccctgatgctgacgattactttgagcacagtccactctcggaggacagattcagcaaactaaatgaagatagtgattttattttcaaacgaggccctgtaagtacttttactttacctctactttttatttgttgatcctttttgttaacttcattatttaggctgctctgaacaagaaggaacacagagggtgcgacagcccagaccctgatacttcatatgtgctaactccacatacagaagaaaaatataaaaaaattaatgaggaatttgataatatgatgcggaatcataaaatcgcacctggtctgccacctcagaacttttcaatgtctgtcacagttccagtgaccagccccaatgctttgtcctacactaacccagggagttcactggtgtccccatctttggcagccagctcaacgttaacagattcaagcatgctctctccacctcaaaccacattacatagaaatgtgtctcctggagctcctcagagaccaccaagtactggcaatgcaggtgggatgttgagcactacagacctcacagtgccaaatggagctggaagcagtccagtggggaatggatttgtaaactcaagagcttctccaaatttgattggagctactggtgcaaatagcttaggcaaagtcatgcctacaaagtctccccctccaccaggtggtggtaatcttggaatgaacagtaggaaaccagatcttcgagttgtcatccccccttcaagcaagggcatgatgcctccactaaacacccaaaggatcagtagttctcaagccactcaacctcttgctaccccagtcgtgtctgtgacaaccccaagcttgcctccgcaaggacttgtgtactcagcaatgccgactgcctacaacactgattattcactgaccagcgctgacctgtcagcccttcaaggcttcaactcgccaggaatgctgtcgctgggacaggtgtcggcctggcagcagcaccacctaggacaagcagccctcagctctcttgttgctggagggcagttatctcagggttccaatttatccattaataccaacccatcgggcttccagcagcagcagcagcagcagcagcagcagcagccgccgccaccaccgcagccccagccacaacccccgcagccccagccccgacaggaaatggggcgctcccctgtggacagtctgagcagctctagtagctcctatgatggcagtgatcgggaggatccacggggcgacttccattctccaattgtgcttggccgacccccaaacactgaggacagagaaagcccttctgtaaagcgaatgaggatggacgcgtgggtgacctaaggcttccaagctgatgtttgtacttttgtgttactgcagtgacctgccctacatatctaaatcggtaaataaggacatgagttaaatatatttatatgtacatacatatatatatccctttacatatatatgtatgtgggtgtgagtgtgtgtgtatgtgtgggtgtgtgttacatacacagaatcaggcacttacctgcaaactccttgtaggtctgcagatgtgtgtcccatggcagacaaagcaccctgtaggcacagacaagtctggcacttccttggactacttgtttcgtaaagataaccagtttttgcagagaaacgtgtacccatatataattctcccacactagcttgcagaaacctagagggccccctacttgttttatttaactgtgcagtgactgtagttacttaagagaaaatgctttgtagaacagagcagtagaaaagcaggaaccaagaaagcaatactgtacataaaatgtcatttatattttccaacctggcatgggtgtctgttgcaaaggggtgcatgggaaagggctgttgatattaaaaacaaacaaaacaaaaaagccccacacataactgttttgcacgtgcaaaaatgtattgggtcaagaagtgatctttagctaataaagaaagagaatagaaaacacgcatgagatattcagaaaatactagcctagaaatatagagcattaacaaagtaaaattaatatattaagttataattggaatatgtcagaagtttctttttacattcatatcttaaaaattaaagaaactgattttagctcatgtatattttatatgaaagaaaacacccttatgaattgatgactatatataaaattatattcactacttttgaacacattctgctatgaattatttatataagccaaagctatatgttgtaacttttttttagagaatagctttatcttggtttaactctttagttttattttaagaggggaaaacaaaaatatcttgcaagcagaaccttggaaaaaaaaagccatgaacacttattctaaatgtaaattaaaagttgagccaaactctttgtgtatatagcatcttaaatatattatcacctttgatgtaagtacctatgtattgtatggtcaccagattaaaaagtatatttttgtggattgccgccaatctggggggaaaaggcgaggtcctttattaagtattcactgtttaatatttactattttgttaaatatactgtactttggattttaattattagcccagttttttcagaggattgtataaaggggtttctcccctcactggtggtgaatgtgtgatgttacattgtaatctttgtgctgtatgggttgagcatcattatatattttgtatgtgtacataaatagcaaagtggcaaaaaaaattggtgttaagttcatcctgcataagtataaaatgtgttgtaacagattttataaggcattatttaaaacttgccttttgtgaggaaaaaatgtagtagaaaaagctgacctaatttaattaatattagagaaaatggcaaaatagtagatgagcacaaaggttttataagtggtaaatgattaggggaaaataatcatggggaaagggatcttttttccttgaccctctgaaaacagaacgatgcagctggttacaaaatcctaccgttatcagctcttctgcacattgcagtgatgctttggtatgcggggagaaacactcttagggtgctggtccttggcatgactcttgccattctaattggaattagtgccaccctcagcttggattttgaacaaggccttattctttcaggaagacaactaatggatgatagcaagttcatccacttactgggcttgtgccatgagcaaaattcaaagtcctgtatatctttcattgtagatttttaaatactccttttcctaaaaaactcaagggtttaaaaattgctattttatattttaaatgatattgagcagctacctacaatttctatgtacattttgttccccccccaccgcccccccccaaattacgttccttttgacgttttcctcatctgctgtttgtgacaagtcatcagccagatttcctgactgacacatacgtatgatcagtgcaggagagacctgcgcaccacaggctgcaaactggaggttctgttctcatggcagtttgggcagtaacttttgagagaggccaaaaaaaggaggatgacatgctgtctcctctcttcagtatagacattaggctcttattcagaaaggatttttctttaaaaatgtacttactttactgaactacttacaggcacatttcttcataaggccacacctaatccaaacaagacagtctcccaacactgaagttccaaaataatccttaccactttgtaaaccatttatagctttgaaagtgttaagtgattccttcgttattatttatgcatgttcatgaacttctgctgtacattggaataggagttaacacattcacatttactgtctattttcttgtgtgccttatgagatggcttttctgactgtatctcaatagtctttctttctatgcaggtttataatcagtacaactactgttttctaaaatactactactcaaggctcggagtttgtatttaaattacactgaccaagtaacaatgtattccatttcaggaactgaatatttgactgttaacctttttcccatacgtccagtgtggcatggagcatatggacttgacagacatctctcacccagacgcccacgtgtgaacacacccacatccacatctctgggtggaaaccagcctagagtggggacgacgctaatggtgttgctttagaaccgtcttttcttacccttttagactcgtgttttgtatgagacaccattgcaagaaaattttatccctccagaagtattttattactaaagaacaaaagcaaaaaaagcttaaattgcactggttaaagtacagtttccaacagctgtccttcctcagtactctaatggccactccaccgcgagtggaagtcactgttgtgtgtacacaggtggtcccaatcaaaactccatcttttgagcccaattatgtccattttgttatagactaaatcaggggtttgttctacaagaacaatacatgttttaccctttcctttaactagaaggataactagtaatgcatcaacataatttctgtattaaccatcatgcgcacaagaaatacatagtaaataaggaagctgaaaactcctggcattggatcttaagctagatgattagaatgtgaaaaagattttacaaatgtaaaacttctatttctctgtagaaactttcttcactttgctgtgcaagaagacactgctttgctatatttaaaatggcttttttaaaagagatttatgtatttggtaaatgtttgtagtcaacagttcacacaagaagctgtacacggtttgatcatgtaaaaccgtttggcggcacaagctggactttgttgccatccttgagatgaaccttttaagaaaaataagttaatctcaatttttccctgaatgtgttgtttttcttcattatacaataaatataatagtgaactttta

SEQ ID NO: 329590 - DNA, 4348 bp, Homo sapiens
agttttcacatcatcagtgcttcagaaaatgacagtcatatgaaactgtgaaaaatgtcacttaaattgaaagtgatttttaagtcaacataaataccacatcagaacacattttctcttttttgatctcacagaacacccaaaggatcagtagttctcaagccactcaacctcttgctaccccagtcgtgtctgtgacaaccccaagcttgcctccgcaaggacttgtgtactcagcaatgccgactgcctacaacactgattattcactgaccagcgctgacctgtcagcccttcaaggcttcaactcgccaggaatgctgtcgctgggacaggtgtcggcctggcagcagcaccacctaggacaagcagccctcagctctcttgttgctggagggcagttatctcagggttccaatttatccattaataccaacccatcgggcttccagcagcagcagcagcagcagcagcagcagcagccgccgccaccaccgcagccccagccacaacccccgcagccccagccccgacaggaaatggggcgctcccctgtggacagtctgagcagctctagtagctcctatgatggcagtgatcgggaggatccacggggcgacttccattctccaattgtgcttggccgacccccaaacactgaggacagagaaagcccttctgtaaagcgaatgaggatggacgcgtgggtgacctaaggcttccaagctgatgtttgtacttttgtgttactgcagtgacctgccctacatatctaaatcggtaaataaggacatgagttaaatatatttatatgtacatacatatatatatccctttacatatatatgtatgtgggtgtgagtgtgtgtgtatgtgtgggtgtgtgttacatacacagaatcaggcacttacctgcaaactccttgtaggtctgcagatgtgtgtcccatggcagacaaagcaccctgtaggcacagacaagtctggcacttccttggactacttgtttcgtaaagataaccagtttttgcagagaaacgtgtacccatatataattctcccacactagcttgcagaaacctagagggccccctacttgttttatttaactgtgcagtgactgtagttacttaagagaaaatgctttgtagaacagagcagtagaaaagcaggaaccaagaaagcaatactgtacataaaatgtcatttatattttccaacctggcatgggtgtctgttgcaaaggggtgcatgggaaagggctgttgatattaaaaacaaacaaaacaaaaaagccccacacataactgttttgcacgtgcaaaaatgtattgggtcaagaagtgatctttagctaataaagaaagagaatagaaaacacgcatgagatattcagaaaatactagcctagaaatatagagcattaacaaagtaaaattaatatattaagttataattggaatatgtcagaagtttctttttacattcatatcttaaaaattaaagaaactgattttagctcatgtatattttatatgaaagaaaacacccttatgaattgatgactatatataaaattatattcactacttttgaacacattctgctatgaattatttatataagccaaagctatatgttgtaacttttttttagagaatagctttatcttggtttaactctttagttttattttaagaggggaaaacaaaaatatcttgcaagcagaaccttggaaaaaaaaagccatgaacacttattctaaatgtaaattaaaagttgagccaaactctttgtgtatatagcatcttaaatatattatcacctttgatgtaagtacctatgtattgtatggtcaccagattaaaaagtatatttttgtggattgccgccaatctggggggaaaaggcgaggtcctttattaagtattcactgtttaatatttactattttgttaaatatactgtactttggattttaattattagcccagttttttcagaggattgtataaaggggtttctcccctcactggtggtgaatgtgtgatgttacattgtaatctttgtgctgtatgggttgagcatcattatatattttgtatgtgtacataaatagcaaagtggcaaaaaaaattggtgttaagttcatcctgcataagtataaaatgtgttgtaacagattttataaggcattatttaaaacttgccttttgtgaggaaaaaatgtagtagaaaaagctgacctaatttaattaatattagagaaaatggcaaaatagtagatgagcacaaaggttttataagtggtaaatgattaggggaaaataatcatggggaaagggatcttttttccttgaccctctgaaaacagaacgatgcagctggttacaaaatcctaccgttatcagctcttctgcacattgcagtgatgctttggtatgcggggagaaacactcttagggtgctggtccttggcatgactcttgccattctaattggaattagtgccaccctcagcttggattttgaacaaggccttattctttcaggaagacaactaatggatgatagcaagttcatccacttactgggcttgtgccatgagcaaaattcaaagtcctgtatatctttcattgtagatttttaaatactccttttcctaaaaaactcaagggtttaaaaattgctattttatattttaaatgatattgagcagctacctacaatttctatgtacattttgttccccccccaccgcccccccccaaattacgttccttttgacgttttcctcatctgctgtttgtgacaagtcatcagccagatttcctgactgacacatacgtatgatcagtgcaggagagacctgcgcaccacaggctgcaaactggaggttctgttctcatggcagtttgggcagtaacttttgagagaggccaaaaaaaggaggatgacatgctgtctcctctcttcagtatagacattaggctcttattcagaaaggatttttctttaaaaatgtacttactttactgaactacttacaggcacatttcttcataaggccacacctaatccaaacaagacagtctcccaacactgaagttccaaaataatccttaccactttgtaaaccatttatagctttgaaagtgttaagtgattccttcgttattatttatgcatgttcatgaacttctgctgtacattggaataggagttaacacattcacatttactgtctattttcttgtgtgccttatgagatggcttttctgactgtatctcaatagtctttctttctatgcaggtttataatcagtacaactactgttttctaaaatactactactcaaggctcggagtttgtatttaaattacactgaccaagtaacaatgtattccatttcaggaactgaatatttgactgttaacctttttcccatacgtccagtgtggcatggagcatatggacttgacagacatctctcacccagacgcccacgtgtgaacacacccacatccacatctctgggtggaaaccagcctagagtggggacgacgctaatggtgttgctttagaaccgtcttttcttacccttttagactcgtgttttgtatgagacaccattgcaagaaaattttatccctccagaagtattttattactaaagaacaaaagcaaaaaaagcttaaattgcactggttaaagtacagtttccaacagctgtccttcctcagtactctaatggccactccaccgcgagtggaagtcactgttgtgtgtacacaggtggtcccaatcaaaactccatcttttgagcccaattatgtccattttgttatagactaaatcaggggtttgttctacaagaacaatacatgttttaccctttcctttaactagaaggataactagtaatgcatcaacataatttctgtattaaccatcatgcgcacaagaaatacatagtaaataaggaagctgaaaactcctggcattggatcttaagctagatgattagaatgtgaaaaagattttacaaatgtaaaacttctatttctctgtagaaactttcttcactttgctgtgcaagaagacactgctttgctatatttaaaatggcttttttaaaagagatttatgtatttggtaaatgtttgtagtcaacagttcacacaagaagctgtacacggtttgatcatgtaaaaccgtttggcggcacaagctggactttgttgccatccttgagatgaaccttttaagaaaaataagttaatctcaatttttccctgaatgtgttgtttttcttcattatacaataaatataatagtgaactttta

SEQ ID NO: 329591 - DNA, 3067 bp, Homo sapiens
tagccccggtgtggggatccgtgcgcggatgtcccggcgagtcccgggctgaaagaggcggctccgggcggcgcgaagcgctggtggcgggcccgggctgcggcgtgtgcgcgcccgccagctgctccggagatacggaattgcattttgtgaaaaaagaacaagaattttctgcaaggatcatatctaagtgcactttttgctgatacttcatttctaatcttgtagaaaatttcagctgtagcccttggactagaagctgaaataacagaagctgtgtacgatgcattagggtattgaagaaaattaacttttgaattaaatatttggaatataaggaaataaggaaagttgactgaaaatggggcggaagaaaatacaaatcacacgcataatggatgaaaggaaccgacaggtcacttttacaaagagaaagtttggattaatgaagaaagcctatgaacttagtgtgctctgtgactgtgaaatagcactcatcattttcaacagctctaacaaactgtttcaatatgctagcactgatatggacaaagttcttctcaagtatacagaatataatgaacctcatgaaagcagaaccaactcggatattgttgagactttaagaaagaaaggccttaatggttgtgagagccctgatgctgacgattactttgagcacagtccactctcggaggacagattcagcaaactaaatgaagatagtgattttattttcaaacgaggccctgtaagtacttttactttacctctactttttatttgttgatcctttttgttaacttcattatttaggctgctctgaacaagaaggaacacagagggtgcgacagcccagaccctgatacttcatatgtgctaactccacatacagaagaaaaatataaaaaaattaatgaggaatttgataatatgatgcggaatcataaaatcgcacctggtctgccacctcagaacttttcaatgtctgtcacagttccagtgaccagccccaatgctttgtcctacactaacccagggagttcactggtgtccccatctttggcagccagctcaacgttaacagattcaagcatgctctctccacctcaaaccacattacatagaaatgtgtctcctggagctcctcagagaccaccaagtactggcaatgcaggtgggatgttgagcactacagacctcacagtgccaaatggagctggaagcagtccagtggggaatggatttgtaaactcaagagcttctccaaatttgattggagctactggtgcaaatagcttaggcaaagtcatgcctacaaagtctccccctccaccaggtggtggtaatcttggaatgaacagtaggaaaccagatcttcgagttgtcatccccccttcaagcaagggcatgatgcctccactaaacacccaaaggatcagtagttctcaagccactcaacctcttgctaccccagtcgtgtctgtgacaaccccaagcttgcctccgcaaggacttgtgtactcagcaatgccgactgcctacaacactgattattcactgaccagcgctgacctgtcagcccttcaaggcttcaactcgccaggaatgctgtcgctgggacaggtgtcggcctggcagcagcaccacctaggacaagcagccctcagctctcttgttgctggagggcagttatctcagggttccaatttatccattaataccaaccaaaacatcagcatcaagtccgaaccgatttcacctcctcgggatcgtatgaccccatcgggcttccagcagcagcagcagcagcagcagcagcagcagccgccgccaccaccgcagccccagccacaacccccgcagccccagccccgacaggaaatggggcgctcccctgtggacagtctgagcagctctagtagctcctatgatggcagtgatcgggaggatccacggggcgacttccattctccaattgtgcttggccgacccccaaacactgaggacagagaaagcccttctgtaaagcgaatgaggatggacgcgtgggtgacctaaggcttccaagctgatgtttgtacttttgtgttactgcagtgacctgccctacatatctaaatcgccatttcaggaactgaatatttgactgttaacctttttcccatacgtccagtgtggcatggagcatatggacttgacagacatctctcacccagacgcccacgtgtgaacacacccacatccacatctctgggtggaaaccagcctagagtggggacgacgctaatggtgttgctttagaaccgtcttttcttacccttttagactcgtgttttgtatgagacaccattgcaagaaaattttatccctccagaagtattttattactaaagaacaaaagcaaaaaaagcttaaattgcactggttaaagtacagtttccaacagctgtccttcctcagtactctaatggccactccaccgcgagtggaagtcactgttgtgtgtacacaggtggtcccaatcaaaactccatcttttgagcccaattatgtccattttgttatagactaaatcaggggtttgttctacaagaacaatacatgttttaccctttcctttaactagaaggataactagtaatgcatcaacataatttctgtattaaccatcatgcgcacaagaaatacatagtaaataaggaagctgaaaactcctggcattggatcttaagctagatgattagaatgtgaaaaagattttacaaatgtaaaacttctatttctctgtagaaactttcttcactttgctgtgcaagaagacactgctttgctatatttaaaatggcttttttaaaagagatttatgtatttggtaaatgtttgtagtcaacagttcacacaagaagctgtacacggtttgatcatgtaaaaccgtttggcggcacaagctggactttgttgccatccttgagatgaaccttttaagaaaaataagttaatctcaatttttccctgaatgtgttgtttttcttcattatacaataaatataatagtgaactttta

SEQ ID NO: 329592 - DNA, 1525 bp, Homo sapiens
tagccccggtgtggggatccgtgcgcggatgtcccggcgagtcccgggctgaaagaggcggctccgggcggcgcgaagcgctggtggcgggcccgggctgcggcgtgtgcgcgcccgccagctgctccggagatacggaattgcattttgtgaaaaaagaacaagaattttctgcaaggatcatatctaagtgcactttttgctgatacttcatttctaatcttgtagaaaatttcagctgtagcccttggactagaagctgaaataacagaagctgtgtacgatgcattagggtattgaagaaaattaacttttgaattaaatatttggaatataaggaaataaggaaagttgactgaaaatggggcggaagaaaatacaaatcacacgcataatggatgaaaggaaccgacaggtcacttttacaaagagaaagtttggattaatgaagaaagcctatgaacttagtgtgctctgtgactgtgaaatagcactcatcattttcaacagctctaacaaactgtttcaatatgctagcactgatatggacaaagttcttctcaagtatacagaatataatgaacctcatgaaagcagaaccaactcggatattgttgagactttaagaaagaaaggccttaatggttgtgagagccctgatgctgacgattactttgagcacagtccactctcggaggacagattcagcaaactaaatgaagatagtgattttattttcaaacgaggccctgtaagtacttttactttacctctactttttatttgttgatcctttttgttaacttcattatttaggctgctctgaacaagaaggaacacagagggtgcgacagcccagaccctgatacttcatatgtgctaactccacatacagaagaaaaatataaaaaaattaatgaggaatttgataatatgatgcggaatcataaaatcgcatgaccagccccaatgctttgtcctacactaacccagggagttcactggtgtccccatctttggcagccagctcaacgttaacagattcaagcatgctctctccacctcaaaccacattacatagaaatgtgtctcctggagctcctcagagaccaccaagtactggcaatgcaggtgggatgttgagcactacagacctcacagtgccaaatggagctggaagcagtccagtggggaatggatttgtaaactcaagagcttctccaaatttgattggagctactggtgcaaatagcttaggcaaagtcatgcctacaaagtctccccctccaccaggtggtggtaatcttggaatgaacagtaggaaaccagatcttcgagttgtcatccccccttcaagcaagggcatgatgcctccactagtaagttgaacctttcttcaacttcattctttaaaacacatattttatacatagtcaatctgtagcttcctttggaattttctgtgccaccgtagaatctacacctattcctaataaatatttccattcaaaattaaaaaaaaaaa

SEQ ID NO: 329593 - DNA, 411 bp, Homo sapiens
gagtcaagaacaataatgcatctcaaatttttttcttttttaaggaattgcattttgtgaaaaaagaacaagaattttctgcaaggatcatatctaagtgcactttttgctgatacttcatttctagtaagacattttttcttttctatgttaagtagatacaatggaaatgtattttaaaaatcaggctgttcttgtgagattgaatggcagttattttagaggttttcttgggggcgaggggggcttaatttagacccagttgaggaaatttgtaaaattcggttgaaatgcgtaatattgtgtagtggcagtttctcttatattttgtctgacgctgctgaaatcatctcatattttttcatctttcacacttcttccatattctctatcagttaacctctatttgaa

SEQ ID NO: 329594 - DNA, 761 bp, Homo sapiens
gtgaacattttaaactatttaaaacaagtttagtttattgaaactagtaagttcaataggctatacgcacagtacagataaatataaagcataacatgatacagaggataggaaaatgggacctaggaaaccaatttttgaatctcgcgatgcaaagaatattactgaacatttgagtaatacttcctgaagaaaaaggattcgtaatagtagagatactcagttggctgacgttttgttttattccaaataaatgactttttaaaatttaattttcatttaacagtatttgtggagctttctgctaggaatggtgttgagtgctagaattttgtataatgtatatttaattcagctttggagtcaagaacaataatgcatctcaaatttttttcttttttaaggaattgcattttgtgaaaaaagaacaagaattttctgcaaggatcatatctaagtgcactttttgctgatacttcatttctagtaagacattttttcttttctatgttaagtagatacaatggaaatgtattttaaaaatcaggctgttcttgtgagattgaatggcagttattttagaggttttcttgggggcgaggggggcttaatttagacccagttgaggaaatttgtaaaattcggttgaaatgcgtaatattgtgtagtggcagtttctcttatattttgtctgacgctgctgaaatcatctcatattttttcatctttcacacttcttccatattctctatcagttaacc

SEQ ID NO: 329595 - DNA, 730 bp, Homo sapiens
tagccccggtgtggggatccgtgcgcggatgtcccggcgagtcccgggctgaaagaggcggctccgggcggcgcgaagcgctggtggcgggcccgggctgcggcgtgtgcgcgcccgccagctgctccggagatacggaattgcattttgtgaaaaaagaacaagaattttctgcaaggatcatatctaagtgcactttttgctgatacttcatttctaatcttgtagaaaatttcagctgtagcccttggactagaagctgaaataacagaagctgtgtacgatgcattagggtattgaagaaaattaacttttgaattaaatatttggaatataaggaaataaggaaagttgactgaaaatggggcggaagaaaatacaaatcacacgcataatggatgaaaggaaccgacaggtcacttttacaaagagaaagtttggattaatgaagaaagcctatgaacttagtgtgctctgtgactgtgaaatagcactcatcattttcaacagctctaacaaactgtttcaatatgctagcactgatatggacaaagttcttctcaagtatacagaatataatgaacctcatgaaagcagaaccaactcggatattgttgaggtaacacatatctagtaatacgtgaattgcaagtaatactgaaatattttgtttaatagcattaactgtcagaatgacttgtacatctaaaacataaattaggtgtatatg

SEQ ID NO: 329596 - DNA, 5828 bp, Homo sapiens
tagccccggtgtggggatccgtgcgcggatgtcccggcgagtcccgggctgaaagaggcggctccgggcggcgcgaagcgctggtggcgggcccgggctgcggcgtgtgcgcgcccgccagctgctccggagatacggaattgcattttgtgaaaaaagaacaagaattttctgcaaggatcatatctaagtgcactttttgctgatacttcatttctagacattgagtctcactctaccccccaggctgaagtgcagtggtgtgatctcggttcactgcaacctccgcctccaggttcaagtgattctcgtacctcagcctcccgagtagctgggattacaggcgcctgccaccatgcctggctgatatttatatttttagtagagatggagtttcaccatgttggccaggctggtctcgaactctggacctcagatcttgtagaaaatttcagctgtagcccttggactagaagctgaaataacagaagctgtgtacgatgcattagggtattgaagaaaattaacttttgaattaaatatttggaatataaggaaataaggaaagttgactgaaaatggggcggaagaaaatacaaatcacacgcataatggatgaaaggaaccgacaggtcacttttacaaagagaaagtttggattaatgaagaaagcctatgaacttagtgtgctctgtgactgtgaaatagcactcatcattttcaacagctctaacaaactgtttcaatatgctagcactgatatggacaaagttcttctcaagtatacagaatataatgaacctcatgaaagcagaaccaactcggatattgttgaggctctgaacaagaaggaacacagagggtgcgacagcccagaccctgatacttcatatgtgctaactccacatacagaagaaaaatataaaaaaattaatgaggaatttgataatatgatgcggaatcataaaatcgcacctggtctgccacctcagaacttttcaatgtctgtcacagttccagtgaccagccccaatgctttgtcctacactaacccagggagttcactggtgtccccatctttggcagccagctcaacgttaacagattcaagcatgctctctccacctcaaaccacattacatagaaatgtgtctcctggagctcctcagagaccaccaagtactggcaatgcaggtgggatgttgagcactacagacctcacagtgccaaatggagctggaagcagtccagtggggaatggatttgtaaactcaagagcttctccaaatttgattggagctactggtgcaaatagcttaggcaaagtcatgcctacaaagtctccccctccaccaggtggtggtaatcttggaatgaacagtaggaaaccagatcttcgagttgtcatccccccttcaagcaagggcatgatgcctccactatcggaggaagaggaattggagttgaacacccaaaggatcagtagttctcaagccactcaacctcttgctaccccagtcgtgtctgtgacaaccccaagcttgcctccgcaaggacttgtgtactcagcaatgccgactgcctacaacactgattattcactgaccagcgctgacctgtcagcccttcaaggcttcaactcgccaggaatgctgtcgctgggacaggtgtcggcctggcagcagcaccacctaggacaagcagccctcagctctcttgttgctggagggcagttatctcagggttccaatttatccattaataccaaccaaaacatcagcatcaagtccgaaccgatttcacctcctcgggatcgtatgaccccatcgggcttccagcagcagcagcagcagcagcagcagcagcagccgccgccaccaccgcagccccagccacaacccccgcagccccagccccgacaggaaatggggcgctcccctgtggacagtctgagcagctctagtagctcctatgatggcagtgatcgggaggatccacggggcgacttccattctccaattgtgcttggccgacccccaaacactgaggacagagaaagcccttctgtaaagcgaatgaggatggacgcgtgggtgacctaaggcttccaagctgatgtttgtacttttgtgttactgcagtgacctgccctacatatctaaatcggtaaataaggacatgagttaaatatatttatatgtacatacatatatatatccctttacatatatatgtatgtgggtgtgagtgtgtgtgtatgtgtgggtgtgtgttacatacacagaatcaggcacttacctgcaaactccttgtaggtctgcagatgtgtgtcccatggcagacaaagcaccctgtaggcacagacaagtctggcacttccttggactacttgtttcgtaaagataaccagtttttgcagagaaacgtgtacccatatataattctcccacactagcttgcagaaacctagagggccccctacttgttttatttaactgtgcagtgactgtagttacttaagagaaaatgctttgtagaacagagcagtagaaaagcaggaaccaagaaagcaatactgtacataaaatgtcatttatattttccaacctggcatgggtgtctgttgcaaaggggtgcatgggaaagggctgttgatattaaaaacaaacaaaacaaaaaagccccacacataactgttttgcacgtgcaaaaatgtattgggtcaagaagtgatctttagctaataaagaaagagaatagaaaacacgcatgagatattcagaaaatactagcctagaaatatagagcattaacaaagtaaaattaatatattaagttataattggaatatgtcagaagtttctttttacattcatatcttaaaaattaaagaaactgattttagctcatgtatattttatatgaaagaaaacacccttatgaattgatgactatatataaaattatattcactacttttgaacacattctgctatgaattatttatataagccaaagctatatgttgtaacttttttttagagaatagctttatcttggtttaactctttagttttattttaagaggggaaaacaaaaatatcttgcaagcagaaccttggaaaaaaaaagccatgaacacttattctaaatgtaaattaaaagttgagccaaactctttgtgtatatagcatcttaaatatattatcacctttgatgtaagtacctatgtattgtatggtcaccagattaaaaagtatatttttgtggattgccgccaatctggggggaaaaggcgaggtcctttattaagtattcactgtttaatatttactattttgttaaatatactgtactttggattttaattattagcccagttttttcagaggattgtataaaggggtttctcccctcactggtggtgaatgtgtgatgttacattgtaatctttgtgctgtatgggttgagcatcattatatattttgtatgtgtacataaatagcaaagtggcaaaaaaaattggtgttaagttcatcctgcataagtataaaatgtgttgtaacagattttataaggcattatttaaaacttgccttttgtgaggaaaaaatgtagtagaaaaagctgacctaatttaattaatattagagaaaatggcaaaatagtagatgagcacaaaggttttataagtggtaaatgattaggggaaaataatcatggggaaagggatcttttttccttgaccctctgaaaacagaacgatgcagctggttacaaaatcctaccgttatcagctcttctgcacattgcagtgatgctttggtatgcggggagaaacactcttagggtgctggtccttggcatgactcttgccattctaattggaattagtgccaccctcagcttggattttgaacaaggccttattctttcaggaagacaactaatggatgatagcaagttcatccacttactgggcttgtgccatgagcaaaattcaaagtcctgtatatctttcattgtagatttttaaatactccttttcctaaaaaactcaagggtttaaaaattgctattttatattttaaatgatattgagcagctacctacaatttctatgtacattttgttccccccccaccgcccccccccaaattacgttccttttgacgttttcctcatctgctgtttgtgacaagtcatcagccagatttcctgactgacacatacgtatgatcagtgcaggagagacctgcgcaccacaggctgcaaactggaggttctgttctcatggcagtttgggcagtaacttttgagagaggccaaaaaaaggaggatgacatgctgtctcctctcttcagtatagacattaggctcttattcagaaaggatttttctttaaaaatgtacttactttactgaactacttacaggcacatttcttcataaggccacacctaatccaaacaagacagtctcccaacactgaagttccaaaataatccttaccactttgtaaaccatttatagctttgaaagtgttaagtgattccttcgttattatttatgcatgttcatgaacttctgctgtacattggaataggagttaacacattcacatttactgtctattttcttgtgtgccttatgagatggcttttctgactgtatctcaatagtctttctttctatgcaggtttataatcagtacaactactgttttctaaaatactactactcaaggctcggagtttgtatttaaattacactgaccaagtaacaatgtattccatttcaggaactgaatatttgactgttaacctttttcccatacgtccagtgtggcatggagcatatggacttgacagacatctctcacccagacgcccacgtgtgaacacacccacatccacatctctgggtggaaaccagcctagagtggggacgacgctaatggtgttgctttagaaccgtcttttcttacccttttagactcgtgttttgtatgagacaccattgcaagaaaattttatccctccagaagtattttattactaaagaacaaaagcaaaaaaagcttaaattgcactggttaaagtacagtttccaacagctgtccttcctcagtactctaatggccactccaccgcgagtggaagtcactgttgtgtgtacacaggtggtcccaatcaaaactccatcttttgagcccaattatgtccattttgttatagactaaatcaggggtttgttctacaagaacaatacatgttttaccctttcctttaactagaaggataactagtaatgcatcaacataatttctgtattaaccatcatgcgcacaagaaatacatagtaaataaggaagctgaaaactcctggcattggatcttaagctagatgattagaatgtgaaaaagattttacaaatgtaaaacttctatttctctgtagaaactttcttcactttgctgtgcaagaagacactgctttgctatatttaaaatggcttttttaaaagagatttatgtatttggtaaatgtttgtagtcaacagttcacacaagaagctgtacacggtttgatcatgtaaaaccgtttggcggcacaagctggactttgttgccatccttgagatgaaccttttaagaaaaataagttaatctcaatttttccctgaatgtgttgtttttcttcattatacaataaatataatagtgaacttttaaaaaaatggtgacgacaatgctaaaggttgttgtaaactgtttgtctcccgcactcactccagtaaagacggactggctcttcctgtgcgtcga

SEQ ID NO: 329597 - DNA, 5493 bp, Homo sapiens
tagccccggtgtggggatccgtgcgcggatgtcccggcgagtcccgggctgaaagaggcggctccgggcggcgcgaagcgctggtggcgggcccgggctgcggcgtgtgcgcgcccgccagctgctccggagatacggaattgcattttgtgaaaaaagaacaagaattttctgcaaggatcatatctaagtgcactttttgctgatacttcatttctaatcttgtagaaaatttcagctgtagcccttggactagaagctgaaataacagaagctgtgtacgatgcattagggtattgaagaaaattaacttttgaattaaatatttggaatataaggaaataaggaaagttgactgaaaatggggcggaagaaaatacaaatcacacgcataatggatgaaaggaaccgacaggtcacttttacaaagagaaagtttggattaatgaagaaagcctatgaacttagtgtgctctgtgactgtgaaatagcactcatcattttcaacagctctaacaaactgtttcaatatgctagcactgatatggacaaagttcttctcaagtatacagaatataatgaacctcatgaaagcagaaccaactcggatattgttgaggctctgaacaagaaggaacacagagggtgcgacagcccagaccctgatacttcatatgtgctaactccacatacagaagaaaaatataaaaaaattaatgaggaatttgataatatgatgcggaatcataaaatcgcacctggtctgccacctcagaacttttcaatgtctgtcacagttccagtgaccagccccaatgctttgtcctacactaacccagggagttcactggtgtccccatctttggcagccagctcaacgttaacagattcaagcatgctctctccacctcaaaccacattacatagaaatgtgtctcctggagctcctcagagaccaccaagtactggcaatgcaggtgggatgttgagcactacagacctcacagtgccaaatggagctggaagcagtccagtggggaatggatttgtaaactcaagagcttctccaaatttgattggagctactggtgcaaatagcttaggcaaagtcatgcctacaaagtctccccctccaccaggtggtggtaatcttggaatgaacagtaggaaaccagatcttcgagttgtcatccccccttcaagcaagggcatgatgcctccactaaacacccaaaggatcagtagttctcaagccactcaacctcttgctaccccagtcgtgtctgtgacaaccccaagcttgcctccgcaaggacttgtgtactcagcaatgccgactgcctacaacactgattattcactgaccagcgctgacctgtcagcccttcaaggcttcaactcgccaggaatgctgtcgctgggacaggtgtcggcctggcagcagcaccacctaggacaagcagccctcagctctcttgttgctggagggcagttatctcagggttccaatttatccattaataccaaccaaaacatcagcatcaagtccgaaccgatttcacctcctcgggatcgtatgaccccatcgggcttccagcagcagcagcagcagcagcagcagcagcagccgccgccaccaccgcagccccagccacaacccccgcagccccagccccgacaggaaatggggcgctcccctgtggacagtctgagcagctctagtagctcctatgatggcagtgatcgggaggatccacggggcgacttccattctccaattgtgcttggccgacccccaaacactgaggacagagaaagcccttctgtaaagcgaatgaggatggacgcgtgggtgacctaaggcttccaagctgatgtttgtacttttgtgttactgcagtgacctgccctacatatctaaatcggtaaataaggacatgagttaaatatatttatatgtacatacatatatatatccctttacatatatatgtatgtgggtgtgagtgtgtgtgtatgtgtgggtgtgtgttacatacacagaatcaggcacttacctgcaaactccttgtaggtctgcagatgtgtgtcccatggcagacaaagcaccctgtaggcacagacaagtctggcacttccttggactacttgtttcgtaaagataaccagtttttgcagagaaacgtgtacccatatataattctcccacactagcttgcagaaacctagagggccccctacttgttttatttaactgtgcagtgactgtagttacttaagagaaaatgctttgtagaacagagcagtagaaaagcaggaaccaagaaagcaatactgtacataaaatgtcatttatattttccaacctggcatgggtgtctgttgcaaaggggtgcatgggaaagggctgttgatattaaaaacaaacaaaacaaaaaagccccacacataactgttttgcacgtgcaaaaatgtattgggtcaagaagtgatctttagctaataaagaaagagaatagaaaacacgcatgagatattcagaaaatactagcctagaaatatagagcattaacaaagtaaaattaatatattaagttataattggaatatgtcagaagtttctttttacattcatatcttaaaaattaaagaaactgattttagctcatgtatattttatatgaaagaaaacacccttatgaattgatgactatatataaaattatattcactacttttgaacacattctgctatgaattatttatataagccaaagctatatgttgtaacttttttttagagaatagctttatcttggtttaactctttagttttattttaagaggggaaaacaaaaatatcttgcaagcagaaccttggaaaaaaaaagccatgaacacttattctaaatgtaaattaaaagttgagccaaactctttgtgtatatagcatcttaaatatattatcacctttgatgtaagtacctatgtattgtatggtcaccagattaaaaagtatatttttgtggattgccgccaatctggggggaaaaggcgaggtcctttattaagtattcactgtttaatatttactattttgttaaatatactgtactttggattttaattattagcccagttttttcagaggattgtataaaggggtttctcccctcactggtggtgaatgtgtgatgttacattgtaatctttgtgctgtatgggttgagcatcattatatattttgtatgtgtacataaatagcaaagtggcaaaaaaaattggtgttaagttcatcctgcataagtataaaatgtgttgtaacagattttataaggcattatttaaaacttgccttttgtgaggaaaaaatgtagtagaaaaagctgacctaatttaattaatattagagaaaatggcaaaatagtagatgagcacaaaggttttataagtggtaaatgattaggggaaaataatcatggggaaagggatcttttttccttgaccctctgaaaacagaacgatgcagctggttacaaaatcctaccgttatcagctcttctgcacattgcagtgatgctttggtatgcggggagaaacactcttagggtgctggtccttggcatgactcttgccattctaattggaattagtgccaccctcagcttggattttgaacaaggccttattctttcaggaagacaactaatggatgatagcaagttcatccacttactgggcttgtgccatgagcaaaattcaaagtcctgtatatctttcattgtagatttttaaatactccttttcctaaaaaactcaagggtttaaaaattgctattttatattttaaatgatattgagcagctacctacaatttctatgtacattttgttccccccccaccgcccccccccaaattacgttccttttgacgttttcctcatctgctgtttgtgacaagtcatcagccagatttcctgactgacacatacgtatgatcagtgcaggagagacctgcgcaccacaggctgcaaactggaggttctgttctcatggcagtttgggcagtaacttttgagagaggccaaaaaaaggaggatgacatgctgtctcctctcttcagtatagacattaggctcttattcagaaaggatttttctttaaaaatgtacttactttactgaactacttacaggcacatttcttcataaggccacacctaatccaaacaagacagtctcccaacactgaagttccaaaataatccttaccactttgtaaaccatttatagctttgaaagtgttaagtgattccttcgttattatttatgcatgttcatgaacttctgctgtacattggaataggagttaacacattcacatttactgtctattttcttgtgtgccttatgagatggcttttctgactgtatctcaatagtctttctttctatgcaggtttataatcagtacaactactgttttctaaaatactactactcaaggctcggagtttgtatttaaattacactgaccaagtaacaatgtattccatttcaggaactgaatatttgactgttaacctttttcccatacgtccagtgtggcatggagcatatggacttgacagacatctctcacccagacgcccacgtgtgaacacacccacatccacatctctgggtggaaaccagcctagagtggggacgacgctaatggtgttgctttagaaccgtcttttcttacccttttagactcgtgttttgtatgagacaccattgcaagaaaattttatccctccagaagtattttattactaaagaacaaaagcaaaaaaagcttaaattgcactggttaaagtacagtttccaacagctgtccttcctcagtactctaatggccactccaccgcgagtggaagtcactgttgtgtgtacacaggtggtcccaatcaaaactccatcttttgagcccaattatgtccattttgttatagactaaatcaggggtttgttctacaagaacaatacatgttttaccctttcctttaactagaaggataactagtaatgcatcaacataatttctgtattaaccatcatgcgcacaagaaatacatagtaaataaggaagctgaaaactcctggcattggatcttaagctagatgattagaatgtgaaaaagattttacaaatgtaaaacttctatttctctgtagaaactttcttcactttgctgtgcaagaagacactgctttgctatatttaaaatggcttttttaaaagagatttatgtatttggtaaatgtttgtagtcaacagttcacacaagaagctgtacacggtttgatcatgtaaaaccgtttggcggcacaagctggactttgttgccatccttgagatgaaccttttaagaaaaataagttaatctcaatttttccctgaatgtgttgtttttcttcattatacaataaatataatagtgaactttta

SEQ ID NO: 329598 - DNA, 5681 bp, Homo sapiens
tagccccggtgtggggatccgtgcgcggatgtcccggcgagtcccgggctgaaagaggcggctccgggcggcgcgaagcgctggtggcgggcccgggctgcggcgtgtgcgcgcccgccagctgctccggagatacggaattgcattttgtgaaaaaagaacaagaattttctgcaaggatcatatctaagtgcactttttgctgatacttcatttctagacattgagtctcactctaccccccaggctgaagtgcagtggtgtgatctcggttcactgcaacctccgcctccaggttcaagtgattctcgtacctcagcctcccgagtagctgggattacaggcgcctgccaccatgcctggctgatatttatatttttagtagagatggagtttcaccatgttggccaggctggtctcgaactctggacctcagatcttgtagaaaatttcagctgtagcccttggactagaagctgaaataacagaagctgtgtacgatgcattagggtattgaagaaaattaacttttgaattaaatatttggaatataaggaaataaggaaagttgactgaaaatggggcggaagaaaatacaaatcacacgcataatggatgaaaggaaccgacaggtcacttttacaaagagaaagtttggattaatgaagaaagcctatgaacttagtgtgctctgtgactgtgaaatagcactcatcattttcaacagctctaacaaactgtttcaatatgctagcactgatatggacaaagttcttctcaagtatacagaatataatgaacctcatgaaagcagaaccaactcggatattgttgaggctctgaacaagaaggaacacagagggtgcgacagcccagaccctgatacttcatatgtgctaactccacatacagaagaaaaatataaaaaaattaatgaggaatttgataatatgatgcggaatcataaaatcgcacctggtctgccacctcagaacttttcaatgtctgtcacagttccagtgaccagccccaatgctttgtcctacactaacccagggagttcactggtgtccccatctttggcagccagctcaacgttaacagattcaagcatgctctctccacctcaaaccacattacatagaaatgtgtctcctggagctcctcagagaccaccaagtactggcaatgcaggtgggatgttgagcactacagacctcacagtgccaaatggagctggaagcagtccagtggggaatggatttgtaaactcaagagcttctccaaatttgattggagctactggtgcaaatagcttaggcaaagtcatgcctacaaagtctccccctccaccaggtggtggtaatcttggaatgaacagtaggaaaccagatcttcgagttgtcatccccccttcaagcaagggcatgatgcctccactatcggaggaagaggaattggagttgaacacccaaaggatcagtagttctcaagccactcaacctcttgctaccccagtcgtgtctgtgacaaccccaagcttgcctccgcaaggacttgtgtactcagcaatgccgactgcctacaacactgattattcactgaccagcgctgacctgtcagcccttcaaggcttcaactcgccaggaatgctgtcgctgggacaggtgtcggcctggcagcagcaccacctaggacaagcagccctcagctctcttgttgctggagggcagttatctcagggttccaatttatccattaataccaaccaaaacatcagcatcaagtccgaaccgatttcacctcctcgggatcgtatgaccccatcgggcttccagcagcagcagcagcagcagcagcagcagcagccgccgccaccaccgcagccccagccacaacccccgcagccccagccccgacaggaaatggggcgctcccctgtggacagtctgagcagctctagtagctcctatgatggcagtgatcgggaggatccacggggcgacttccattctccaattgtgcttggccgacccccaaacactgaggacagagaaagcccttctgtaaagcgaatgaggatggacgcgtgggtgacctaaggcttccaagctgatgtttgtacttttgtgttactgcagtgacctgccctacatatctaaatcggtaaataaggacatgagttaaatatatttatatgtacatacatatatatatccctttacatatatatgtatgtgggtgtgagtgtgtgtgtatgtgtgggtgtgtgttacatacacagaatcaggcacttacctgcaaactccttgtaggtctgcagatgtgtgtcccatggcagacaaagcaccctgtaggcacagacaagtctggcacttccttggactacttgtttcgtaaagataaccagtttttgcagagaaacgtgtacccatatataattctcccacactagcttgcagaaacctagagggccccctacttgttttatttaactgtgcagtgactgtagttacttaagagaaaatgctttgtagaacagagcagtagaaaagcaggaaccaagaaagcaatactgtacataaaatgtcatttatattttccaacctggcatgggtgtctgttgcaaaggggtgcatgggaaagggctgttgatattaaaaacaaacaaaacaaaaaagccccacacataactgttttgcacgtgcaaaaatgtattgggtcaagaagtgatctttagctaataaagaaagagaatagaaaacacgcatgagatattcagaaaatactagcctagaaatatagagcattaacaaagtaaaattaatatattaagttataattggaatatgtcagaagtttctttttacattcatatcttaaaaattaaagaaactgattttagctcatgtatattttatatgaaagaaaacacccttatgaattgatgactatatataaaattatattcactacttttgaacacattctgctatgaattatttatataagccaaagctatatgttgtaacttttttttagagaatagctttatcttggtttaactctttagttttattttaagaggggaaaacaaaaatatcttgcaagcagaaccttggaaaaaaaaagccatgaacacttattctaaatgtaaattaaaagttgagccaaactctttgtgtatatagcatcttaaatatattatcacctttgatgtaagtacctatgtattgtatggtcaccagattaaaaagtatatttttgtggattgccgccaatctggggggaaaaggcgaggtcctttattaagtattcactgtttaatatttactattttgttaaatatactgtactttggattttaattattagcccagttttttcagaggattgtataaaggggtttctcccctcactggtggtgaatgtgtgatgttacattgtaatctttgtgctgtatgggttgagcatcattatatattttgtatgtgtacataaatagcaaagtggcaaaaaaaattggtgttaagttcatcctgcataagtataaaatgtgttgtaacagattttataaggcattatttaaaacttgccttttgtgaggaaaaaatgtagtagaaaaagctgacctaatttaattaatattagagaaaatggcaaaatagtagatgagcacaaaggttttataagtggtaaatgattaggggaaaataatcatggggaaagggatcttttttccttgaccctctgaaaacagaacgatgcagctggttacaaaatcctaccgttatcagctcttctgcacattgcagtgatgctttggtatgcggggagaaacactcttagggtgctggtccttggcatgactcttgccattctaattggaattagtgccaccctcagcttggattttgaacaaggccttattctttcaggaagacaactaatggatgatagcaagttcatccacttactgggcttgtgccatgagcaaaattcaaagtcctgtatatctttcattgtagatttttaaatactccttttcctaaaaaactcaagggtttaaaaattgctattttatattttaaatgatattgagcagctacctacaatttctatgtacattttgttccccccccaccgcccccccccaaattacgttccttttgacgttttcctcatctgctgtttgtgacaagtcatcagccagatttcctgactgacacatacgtatgatcagtgcaggagagacctgcgcaccacaggctgcaaactggaggttctgttctcatggcagtttgggcagtaacttttgagagaggccaaaaaaaggaggatgacatgctgtctcctctcttcagtatagacattaggctcttattcagaaaggatttttctttaaaaatgtacttactttactgaactacttacaggcacatttcttcataaggccacacctaatccaaacaagacagtctcccaacactgaagttccaaaataatccttaccactttgtaaaccatttatagctttgaaagtgttaagtgattccttcgttattatttatgcatgttcatgaacttctgctgtacattggaataggagttaacacattcacatttactgtctattttcttgtgtgccttatgagatggcttttctgactgtatctcaatagtctttctttctatgcaggtttataatcagtacaactactgttttctaaaatactactactcaaggctcggagtttgtatttaaattacactgaccaagtaacaatgtattccatttcaggaactgaatatttgactgttaacctttttcccatacgtccagtgtggcatggagcatatggacttgacagacatctctcacccagacgcccacgtgtgaacacacccacatccacatctctgggtggaaaccagcctagagtggggacgacgctaatggtgttgctttagaaccgtcttttcttacccttttagactcgtgttttgtatgagacaccattgcaagaaaattttatccctccagaagtattttattactaaagaacaaaagcaaaaaaagcttaaattgcactggttaaagtacagtttccaacagctgtccttcctcagtactctaatggccactccaccgcgagtggaagtcactgttgtgtgtacacaggtggtcccaatcgggtttgttctacaagaacaatacatgttttaccctttcctttaactagaaggataactagtaatgcatcaacataatttctgtattaaccatcatgcgcacaagaaatacatagtaaataaggaagctgaaaactcctggcattggatcttaagctagatgattagaatgtgaaaaagattttacaaatgtaaaacttctatttctctgtagaaactttcttcactttgctgtgcaagaagacactgctttgctatatttaaaatggcttttttaaaagagatttatgtatttggtaaatgtttgtagtcaacagttcacacaagaagctgtacacggtttgatcatgtaaaaccgtttggcggcacaagctggactttgttgccatccttgagatgaaccttttaagaaaaataagttaatctcaatttttccctgaatgtgttgtttttcttcattatacaataaatataatagtgaactttta

SEQ ID NO: 329599 - DNA, 3515 bp, Homo sapiens
tagccccggtgtggggatccgtgcgcggatgtcccggcgagtcccgggctgaaagaggcggctccgggcggcgcgaagcgctggtggcgggcccgggctgcggcgtgtgcgcgcccgccagctgctccggagatacggaattgcattttgtgaaaaaagaacaagaattttctgcaaggatcatatctaagtgcactttttgctgatacttcatttctagacattgagtctcactctaccccccaggctgaagtgcagtggtgtgatctcggttcactgcaacctccgcctccaggttcaagtgattctcgtacctcagcctcccgagtagctgggattacaggcgcctgccaccatgcctggctgatatttatatttttagtagagatggagtttcaccatgttggccaggctggtctcgaactctggacctcagatcttgtagaaaatttcagctgtagcccttggactagaagctgaaataacagaagctgtgtacgatgcattagggtattgaagaaaattaacttttgaattaaatatttggaatataaggaaataaggaaagttgactgaaaatggggcggaagaaaatacaaatcacacgcataatggatgaaaggaaccgacaggtcacttttacaaagagaaagtttggattaatgaagaaagcctatgaacttagtgtgctctgtgactgtgaaatagcactcatcattttcaacagctctaacaaactgtttcaatatgctagcactgatatggacaaagttcttctcaagtatacagaatataatgaacctcatgaaagcagaaccaactcggatattgttgaggctctgaacaagaaggaacacagagggtgcgacagcccagaccctgatacttcatatgtgctaactccacatacagaagaaaaatataaaaaaattaatgaggaatttgataatatgatgcggaatcataaaatcgcacctggtctgccacctcagaacttttcaatgtctgtcacagttccagtgaccagccccaatgctttgtcctacactaacccagggagttcactggtgtccccatctttggcagccagctcaacgttaacagattcaagcatgctctctccacctcaaaccacattacatagaaatgtgtctcctggagctcctcagagaccaccaagtactggcaatgcaggtgggatgttgagcactacagacctcacagtgccaaatggagctggaagcagtccagtggggaatggatttgtaaactcaagagcttctccaaatttgattggagctactggtgcaaatagcttaggcaaagtcatgcctacaaagtctccccctccaccaggtggtggtaatcttggaatgaacagtaggaaaccagatcttcgagttgtcatccccccttcaagcaagggcatgatgcctccactatcggaggaagaggaattggagttgaacacccaaaggatcagtagttctcaagccactcaacctcttgctaccccagtcgtgtctgtgacaaccccaagcttgcctccgcaaggacttgtgtactcagcaatgccgactgcctacaacactgattattcactgaccagcgctgacctgtcagcccttcaaggcttcaactcgccaggaatgctgtcgctgggacaggtgtcggcctggcagcagcaccacctaggacaagcagccctcagctctcttgttgctggagggcagttatctcagggttccaatttatccattaataccaaccaaaacatcagcatcaagtccgaaccgatttcacctcctcgggatcgtatgaccccatcgggcttccagcagcagcagcagcagcagcagcagcagcagccgccgccaccaccgcagccccagccacaacccccgcagccccagccccgacaggaaatggggcgctcccctgtggacagtctgagcagctctagtagctcctatgatggcagtgatcgggaggatccacggggcgacttccattctccaattgtgcttggccgacccccaaacactgaggacagagaaagcccttctgtaaagcgaatgaggatggacgcgtgggtgacctaaggcttccaagctgatgtttgtacttttgtgttactgcagtgacctgccctacatatctaaatcggtaaataaggacatgagttaaatatatttatatgtacatacatatatatatccctttacatatatatgtatgtgggtgtgagtgtgtgtgtatgtgtgggtgtgtgttacatacacagaatcaggcacttacctgcaaactccttgtaggtctgcagatgtgtgtcccatggcagacaaagcaccctgtaggcacagacaagtctggcacttccttggactacttgtttcgtaaagataaccagtttttgcagagaaacgtgtacccatatataattctcccacactagcttgcagaaacctagagggccccctacttgttttatttaactgtgcagtgactgtagttacttaagagaaaatgctttgtagaacagagcagtagaaaagcaggaaccaagaaagcaatactgtacataaaatgtcatttatattttccaacctggcatgggtgtctgttgcaaaggggtgcatgggaaagggctgttgatattaaaaacaaacaaaacaaaaaagccccacacataactgttttgcacgtgcaaaaatgtattgggtcaagaagtgatctttagctaataaagaaagagaatagaaaacacgcatgagatattcagaaaatactagcctagaaatatagagcattaacaaagtaaaattaatatattaagttataattggaatatgtcagaagtttctttttacattcatatcttaaaaattaaagaaactgattttagctcatgtatattttatatgaaagaaaacacccttatgaattgatgactatatataaaattatattcactacttttgaacacattctgctatgaattatttatataagccaaagctatatgttgtaacttttttttagagaatagctttatcttggtttaactctttagttttattttaagaggggaaaacaaaaatatcttgcaagcagaaccttggaaaaaaaaagccatgaacacttattctaaatgtaaattaaaagttgagccaaactctttgtgtatatagcatcttaaatatattatcacctttgatgtaagtacctatgtattgtatggtcaccagattaaaaagtatatttttgtggattgccgccaatctggggggaaaaggcgaggtcctttattaagtattcactgtttaatatttactattttgttaaatatactgtactttggattttaattattagcccagttttttcagaggattgtataaaggggtttctcccctcactggtggtgaatgtgtgatgttacattgtaatctttgtgctgtatgggttgagcatcattatatattttgtatgtgtacataaatagcaaagtggca

SEQ ID NO: 329600 - DNA, 403 bp, Homo sapiens
ctctgcattaatattctgaagctatatacttatactcacttatccatttttaagttgacatctagtttgataagttgcataaggacataatttccaacttgttataaatatccagatttataaataaaactgttaatcattcccttacattgataaaaatctctctaggtatcacagagatttgaaaaacattactttttttaaaaaaaaaagaacaagcctggtggtgacaaaatctctcagcattagcttgtctgtaaagaattttatttctccttcacttatgaagcttagtttggctggatatgaaattctgggttgaaaattcttttctttaagaatgttgaatattggcccccactctcttctcgcttgtagagtttctgccgagagatccgctgtt

SEQ ID NO: 329601 - DNA, 216 bp, Homo sapiens
atcaatattcaatttgtctagtgacttaatgtgactccttgctattgaaaggaaaatggagtcgctctcattggcccctcttcttcattgcccagttcagctgcagaaaccctcaaagtgctgccctcaactttgggaggtgacccagaggggacacctcccccccacccccaagaccccaaagcaaactctggggcagggggtactgtgcagact

SEQ ID NO: 329602 - DNA, 376 bp, Homo sapiens
cctcctgagtagctgggactacatgcatgtgctacagcacacaacttgtttcatattttttagtgtacaaatttttcacctccttggttaaatttattcctaggtattttattctttcagatgctattgtaaacggaatcactttcttaatttccttttcagattgattatgattgttcattgctgatgaagagaaacacaactgatttttgcatggtgatcttataacctacagctttgctacattcatttcatagttctagtagttttcttgtagattctttgggatcttctatatttaggatcatattatctgtgaagagagactgttttacttcttttccaatttgaatgcattttagttctttttcctgtt

SEQ ID NO: 329603 - DNA, 417 bp, Homo sapiens
aagagagtctttctgagctccttcatggtctgagagttgagattcacatgaaaatcacaaagtgtaactatgatgctatccttttattctttgggagtgggacttgtagttattatgtaggcatcacatttctaataatctttgatcctgaaagaagcagaagtaaaaatcaagacaaaactgcaaagcagaaggtgtgcttatttttggctaagaggaagaggagggaaggcgtgttgacctcacagggcagggagagaaggagtcttatccctgggagatgctgggagcaggggcttcaaaagacctgtgcttttgcagtgagaacattctgcagagacacacctggaagctgatgaaagtaggtgtacatcttttagggcagggacttctgtttgtttttctaatcgcttagaa

SEQ ID NO: 329604 - DNA, 308 bp, Homo sapiens
ggtatgagttccgaaggaaatgtttaaatagctcttggaagcgttagggtttgaagatttcagatcagaggtggaaagtggcccacagaacagcagcatcaacatcacctgtttcagagcaatgcttttcaaattctaatatgcatacacattacctggagatcttgttaacatgaagatgttgactgaggtctgcggagtggcctgagagtctacatttctgagaagctctcaggtgatgctggagctactaatgtgtgtaccccactttgaataagaaggatctaggagatgtgtggagagtgagt

SEQ ID NO: 329605 - DNA, 527 bp, Homo sapiens
caactaacctggtatgcccaccctcaaggcttcagagataacctcacttctttggacaagctttagctcaagatctcacttccttaaaccttttccctagccgtctccttcaatacgtggacaatcttctcctttgcagcccctctctagaagactctcaaactcacacagttactctcttaaaactttctctccatcaaagggtatagagtctccccctccgaagctcaactttccacctccatagtaacttacctaggagttcaactttcccctgggacccgggctatgacccctgccctagcagcactaatagataatctgccctcgccctcctccaaaagcgaagttctttccttcctagaactagcaggcttttttagaatatggattcccaactttgccctcctagctcacccactctatgaagcagccaaaggccctctcagtgagcctctaaatccctcacgtaacatactccccaacttctgcaaacttcaaaccgctcttgtcactgcaccagctct

SEQ ID NO: 329606 - DNA, 3989 bp, Homo sapiens
gacggccgcccgggcaggtcggtgtgaggagctgtgaaattagttgtaactgaaaatgtctgacggtctggataatgaagagaaacccccggctcctccactgaggatgaatagtacaccgggattcttcagcactcaaccacagctcctaccacttcccatggcccctgaagagaagaataagaaagccaggcttcgctctatcttcccaggaggaggggataaaaccaataagaagaaggagaaagagcgcccagagatctctcttccttcagactttgagcatacgattcatgtggggtttgatgcagtcaccggggaattcactggaattccagagcaatgggcacgattactccaaacttccaacataacaaaattggaacagaagaagaacccacaagctgttctagatgttctcaaattctatgattccaaagaaacagtcaacaaccagaaatacatgagctttacatcaggagataaaagtgcacatggatacatagcagcccatccttcgagtacaaaaacagcatctgagcctccattggcccctcctgtgtctgaagaagaagatgaagaggaagaagaagaagatgaaaatgagccaccaccagttatcgcaccaagaccagagcatacaaaatcaatctatactcgttctgtggttgaatccattgcttcaccagcagtaccaaataaagaggtcacaccaccctctgctgaaaatgccaattccagtactttgtacagaaacacagatcggcaaagaaaaaaatccaagatgacagatgaggagatcttagagaagctaagaagcatagtgagtgttgggcgatcctaagaagaaatatacacggtttgagaagattggacaaggtgcttcaggcaccgtgtacacagcaatggatgtggccacaggacaggaggtggccattaagcagatgaatcttcagcagcagcccaagaaagagctgattattaatgagatcctggtcatgagggaaaacaagaacccaaacattgtgaattacttggacagttacctcgtgggagatgagctgtgggttgttatggaatacttggctggaggctccttgacagatgtggtgacagaaacttgcatggatgaaggccaaattgcagctgtgtgccgtgagtgtctgcaggctctggagttcttgcattcgaaccaggtcattcacagagacatcaagagtgacaatattctgttgggaatggatggctctgtcaagctaactgactttggattctgtgcacagataaccccagagcagagcaaacggagcaccatggtaggaaccccatactggatggcaccagaggttgtgacacgaaaggcctatgggcccaaggttgacatctggtccctgggcatcatggccatcgaaatgattgaaggggagcctccatacctcaatgaaaaccctctgagagccttgtacctcattgccaccaatgggaccccagaacttcagaacccagagaagctgtcagctatcttccgggactttctgaaccgctgtctcgagatggatgtggagaagagaggttcagctaaagagctgctacagattattacagcatcctttcctgaaactggccaaaccgttatctagcttgacaccactgatcatggcagctaaagaagcaatgaagagtaaccgttaacatcactgctgtggcctcatactcttttttccattttctacaagaagccttttagtatatgaaaattattactctttttggggttaaagaaatggtctgcataacctgaatggaaggagcaaatgactattctctgaagacaaccaagagaaaattgcaaaaagacaagtatgacttttatatgaaccccttctttagggtccagaaggaattgtggactgaatcactagccttaggtctttcagcaaacagcctatcagggccatttatcatgtgtgagatttgcattttactttgctgactttgttgtaatagatcccattcattgtcccctttgggtatttccaatacttgaatggcagattggagtttttcagagtatgtgtttcatctgctagtctttctctccttcatagcttttcttttcctggacttgctccttttgagttgcttttgcgtttctcatgcctaggcaagtgtaatagaaattatgtagctccttatgttggcaaaggagctctatatagtttcactttgtataaaagttaggaccagctgttgttacatgtaatattttagttcagaacttgacctgaaggaagggaagaaaagtatgtgatttttaccttttttaacaaatgtgaaaaagtcagttttagaaatttcgtggtagtaagttcggcatttgttacatgtatagagagaagactaataatctctatttataactaaatcattgagatagaaaaagattcccattgactgtagacttcttcccattttgtcttcccttctgcctgtttccccttcaggcttggctctaggaaccaaagtgatttgttgttgttccaacctgggctttgtgactttggttagtgccactaccttcttccctcctttcccccttcaatttggaaataaatttctgtatatgttgcaattttaggtttaggtttgttctttttctttttcattaatcctctctcacctcacagataccccctcccatggcaaataatataataaccagtgaattttcaggaatttaaaaattagcttttttccacttaaaggagaaaaatatttgggactagcagcagaggcagtaagagatgtgaaccttggtgagctctgatacagtgagaagagattatactcatgaaagagaatgttagtgttacagagaagcagccgatagcaaatcaactgtagagacttggcggcggtggcattgccccaggtcgtcagcagtgtggtattatctatgagaacttgagcgacagagtatttcttgatgaatttatagatcatttgagatgttgagttactttagtttagttttgttttgttttttcaaataagtagagactattgtaaaaaacgagaaaggaaaatgaaatgtgcgtgttgatagcaataatttgtttcttttaaagattctaaaaggtctgagacctgtagcattaattatttgagtgccctcccttctcccctcccctcccttttctcttctcttttttcctctcctctccttctcctttattcattgttttgcttttggagtaggtgttgttcaagtatctgtggtttggttctggcattttgttcccaccatccccttcccccattaacttcccccctgcttgccatcctgcagtagtataaatcatgaataaaaaataattttgctgttgtagtatacattggagaaactggcaggttttatttccattattttatttccactatatctatgataagatgcaattataaggagagaagtgactgttttttattgataaggcaagattttcagaaaaatgagtaaaataattaatgaaacatatttagagcacttaatggtctctgttttcaatataattcttgatttcatttttctctgggaatatattggccttctacagctattactgaattatagaaactggtttatttctggcagaaagctgcagtgccacctgagttccaaattttaccattctttgtaaacagttggatggattatgataaagaagatgctaccaatgaaatagaaaaccaacgagatgagaagactgtgatcctcatgtactcagaggcacttccctcctaagtcaaagaccatcctcactgactatgtgccaacgcctcgtttcaggcttgtgactcaacaaagggcttttccattgatagaagcagtttgggatttgtagttgcgacttcttcgatagttacctgcacgtccattgctggcaactgacttgtcattaaaacctggctctttggttaaggaaaaa

SEQ ID NO: 329607 - DNA, 643 bp, Homo sapiens
ttttacccacacccctgatgtctcttctgtatggaaaatgcaatcagtgatgaagggccgaaaaaacatcttgccagctgtagctcttttacagagcacaaagtgggaggaagcaatgaatataaatgtgttgggcgataacatctatgttatccccaacaccagtgattgctccacgcccagagcacacaaaatctgtatacacacggtctgtgattgaaccacttcctgtcactccaactcgggacgtggctacatctcccatttcacctactgaaaataacaccactccaccagatgctttgacccggaatactgagaagcagaagaagaagcctaaaatgtctgatgaggagatcttggagaaattacgaagcatagtgagtgttgggcgataacatcgtgatgttatccccaacactacatacagcaaattttggtatttttaatagcgatggggtttcaccatgttggccaggatggtctcgaactcctgatctcaagtgatccgcccacctcagcctcccaaaatgtttggattacaggcatgagccaccacccctggcctggaccctctttttgacatgtgtgagcataggcagcaagcaaggccgtgcagagaaggggtgcttccagactgccc

SEQ ID NO: 329608 - DNA, 547 bp, Homo sapiens
caggatcccgttatcgcccaacacattttctggtgatacccaagaaacatatatcccagatttctgtggcagaagatgatgatgaaagtcttcttggacacttaatgattgtggcaagaaatgtgctgctgatctgggcctgaataagggttatcgaatggtggtgaatgaaggttcagatggtggacagtctgtctatcacgttcatctccatgttcttggaggtcggcaaatgcattggcctcctggctaagcacgtgttggggataacatcacatgttatccccaacaccagtgattgctccacgcccagagcacacaaaatctgtatacacacggtctgtgattgaaccacttcctgtcactccaactcgggacgtggctacatctcccatttcacctactgaaaataacaccactccaccagatgctttgacccggaatactgagaagcagaagaagaagcctaaaatgtctgatgaggagatcttggagaaattacgaagcatagtgagtgttgggcgataacatcacgaatcctctaagc

SEQ ID NO: 329609 - DNA, 3298 bp, Homo sapiens
gccacgaaggccacagacgccttcccccttggactctcattcccttttccacggagccccgcgctttcgtgagccccctcgaggaacctggtctccgcatccagttaccacctcctgcctcagaggccatctgagcccttcgcacctcgcccctcagtccccccttgcccccccgcggagatcgcctcgctccctcccgcccccccatcatcccttccctcgcagttcccctgtcctgaggggagccccgccacggcagcgacagcgggcaggagggagaaagtgaaggttgggcgacacttggccctcactcccggctaggcggcacccaccgccgggaggaggaggaggagccgagaggagctgagcgagcgcggaagtagctgctgctggtggtgacaatgtcaaataacggcctagacattcaagacaaacccccagcccctccgatgagaaataccagcactatgattggagccggcagcaaagatgctggaaccctaaaccatggttctaaacctctgcctccaaacccagaggagaagaaaaagaaggaccgattttaccgatccattttacctggagataaaacaaataaaaagaaagagaaagagcggccagagatttctctcccttcagattttgaacacacaattcatgtcggttttgatgctgtcacaggggagtttacgggaatgccagagcagtgggcccgcttgcttcagacatcaaatatcactaagtcggagcagaagaaaaacccgcaggctgttctggatgtgttggagttttacaactcgaagaagacatccaacagccagaaatacatgagctttacagataagtcagctgaggattacaattcttctaatgccttgaatgtgaaggctgtgtctgagactcctgcagtgccaccagtttcagaagatgaggatgatgatgatgatgatgttatccccaacaccagtgattgctccacgcccagagcacacaaaatctgtatacacacggtctgtgattgaaccacttcctgtcactccaactcgggacgtggctacatctcccatttcacctactgaaaataacaccactccaccagatgctttgacccggaatactgagaagcagaagaagaagcctaaaatgtctgatgaggagatcttggagaaattacgaagcatagtgagtgttgggcgatcctaagaagaaatatacacggtttgagaagattggacaaggtgcttcaggcaccgtgtacacagcaatggatgtggccacaggacaggaggtggccattaagcagatgaatcttcagcagcagcccaagaaagagctgattattaatgagatcctggtcatgagggaaaacaagaacccaaacattgtgaattacttggacagttacctcgtgggagatgagctgtgggttgttatggaatacttggctggaggctccttgacagatgtggtgacagaaacttgcatggatgaaggccaaattgcagctgtgtgccgtgagtgtctgcaggctctggagttcttgcattcgaaccaggtcattcacagagacatcaagagtgacaatattctgttgggaatggatggctctgtcaagctaactgactttggattctgtgcacagataaccccagagcagagcaaacggagcaccatggtaggaaccccatactggatggcaccagaggttgtgacacgaaaggcctatgggcccaaggttgacatctggtccctgggcatcatggccatcgaaatgattgaaggggagcctccatacctcaatgaaaaccctctgagagccttgtacctcattgccaccaatgggaccccagaacttcagaacccagagaagctgtcagctatcttccgggactttctgaaccgctgtctcgagatggatgtggagaagagaggttcagctaaagagctgctacagcatcaattcctgaagattgccaagcccctctccagcctcactccactgattgctgcagctaaggaggcaacaaagaacaatcactaaaaccacactcaccccagcctcattgtgccaagccttctgtgagataaatgcacatttcagaaattccaactcctgatgccctcttctccttgccttgcttctcccatttcctgatctagcactcctcaagactttgatccttggaaaccgtgtgtccagcattgaagagaactgcaactgaatgactaatcagatgatggccatttctaaataaggaatttcctcccaattcatggatatgagggtggtttatgattaagggtttatataaataaatgtttctagtcttccgtgtgtcaaaatcctcacctccttcataaccatctcccacaattaattcttgactatataaatttatggtttgataatattatcaatttgtaatcaattgagatttctttagtgcttgcttttctgtgactcaactgcccagacacctcattgtacttgaaaactggaacagcttgggaatgccatggggtttgataatctgccagggacatgaagaggctcagcttcctggaccatgactttggctcagctgatcctgacatgggagaacaaccacatttttctttgtgtgtgcttctagcagctgttcgggaggaccttgacccaatagtgttcccatgctgtttcttgtgaaatgctctcggctatgtagcagcttttgattccctgcataccctaggctgctgcccctatcctgtcccttgtttataacattgagaggttttctagggcacatactgagtgagagcagtgttgagaagtcggggaaaatggtgactacttttagagcaaggctgggcatcagcacctgtccagctctacttgtgtgatgtttcaggaactcagcccctttttctgcctaggataaggagctgaaagattaacttggatcttctaatggtccaaatcttttggtcacaataaagagtctccaaattagagactgcatgttagttctggatggatttggtggcctgacatgataccctgccagctgtgaggggaccccgtttttaagatgcatggccaagctctctgcaaatggaaatgcttacactgggtgttggggatgtttgctacctcctgctatttttgtggttttggttctcccactatggtaggacccctggccagcattgtggcttgtcatgtcagccccattgactaccttctcatgctctgaggtactactgcctctgcagcacaaatttctatttctgtcaataaaaggagatgaaaatattc

SEQ ID NO: 329610 - DNA, 3227 bp, Homo sapiens
gcgagagcgcgagcgtgctgcacctcgggagctggcggctgagctgccaggagcccagcccagctgaatcgagcggagccggtggagcaggggccttgtgggtacccggttgggcagggagaggtgcggctctgcgacggaaacaatcgccagagatgccggggctagccttccccaccaggttggtggcgatacaaaaattgaaactggcctcagttgttgctctcaaatgcagatcaaggaatgtggacgctcatgtgtagctgctgctggtggtgacaatgtcaaataacggcctagacattcaagacaaacccccagcccctccgatgagaaataccagcactatgattggagccggcagcaaagatgctggaaccctaaaccatggttctaaacctctgcctccaaacccagaggagaagaaaaagaaggaccgattttaccgatccattttacctggagataaaacaaataaaaagaaagagaaagagcggccagagatttctctcccttcagattttgaacacacaattcatgtcggttttgatgctgtcacaggggagtttacgggaatgccagagcagtgggcccgcttgcttcagacatcaaatatcactaagtcggagcagaagaaaaacccgcaggctgttctggatgtgttggagttttacaactcgaagaagacatccaacagccagaaatacatgagctttacagataagtcagctgaggattacaattcttctaatgccttgaatgtgaaggctgtgtctgagactcctgcagtgccaccagtttcagaagatgaggatgatgatgatgatgatgttatccccaacaccagtgattgctccacgcccagagcacacaaaatctgtatacacacggtctgtgattgaaccacttcctgtcactccaactcgggacgtggctacatctcccatttcacctactgaaaataacaccactccaccagatgctttgacccggaatactgagaagcagaagaagaagcctaaaatgtctgatgaggagatcttggagaaattacgaagcatagtgagtgttgggcgatcctaagaagaaatatacacggtttgagaagattggacaaggtgcttcaggcaccgtgtacacagcaatggatgtggccacaggacaggaggtggccattaagcagatgaatcttcagcagcagcccaagaaagagctgattattaatgagatcctggtcatgagggaaaacaagaacccaaacattgtgaattacttggacagttacctcgtgggagatgagctgtgggttgttatggaatacttggctggaggctccttgacagatgtggtgacagaaacttgcatggatgaaggccaaattgcagctgtgtgccgtgagtgtctgcaggctctggagttcttgcattcgaaccaggtcattcacagagacatcaagagtgacaatattctgttgggaatggatggctctgtcaagctaactgactttggattctgtgcacagataaccccagagcagagcaaacggagcaccatggtaggaaccccatactggatggcaccagaggttgtgacacgaaaggcctatgggcccaaggttgacatctggtccctgggcatcatggccatcgaaatgattgaaggggagcctccatacctcaatgaaaaccctctgagagccttgtacctcattgccaccaatgggaccccagaacttcagaacccagagaagctgtcagctatcttccgggactttctgaaccgctgtctcgagatggatgtggagaagagaggttcagctaaagagctgctacaggtgagaaaactgaggtttcaagtgtttagtaacttttccatgatagctgcatcaattcctgaagattgccaagcccctctccagcctcactccactgattgctgcagctaaggaggcaacaaagaacaatcactaaaaccacactcaccccagcctcattgtgccaagccttctgtgagataaatgcacatttcagaaattccaactcctgatgccctcttctccttgccttgcttctcccatttcctgatctagcactcctcaagactttgatccttggaaaccgtgtgtccagcattgaagagaactgcaactgaatgactaatcagatgatggccatttctaaataaggaatttcctcccaattcatggatatgagggtggtttatgattaagggtttatataaataaatgtttctagtcttccgtgtgtcaaaatcctcacctccttcataaccatctcccacaattaattcttgactatataaatttatggtttgataatattatcaatttgtaatcaattgagatttctttagtgcttgcttttctgtgactcaactgcccagacacctcattgtacttgaaaactggaacagcttgggaatgccatggggtttgataatctgccagggacatgaagaggctcagcttcctggaccatgactttggctcagctgatcctgacatgggagaacaaccacatttttctttgtgtgtgcttctagcagctgttcgggaggaccttgacccaatagtgttcccatgctgtttcttgtgaaatgctctcggctatgtagcagcttttgattccctgcataccctaggctgctgcccctatcctgtcccttgtttataacattgagaggttttctagggcacatactgagtgagagcagtgttgagaagtcggggaaaatggtgactacttttagagcaaggctgggcatcagcacctgtccagctctacttgtgtgatgtttcaggaactcagcccctttttctgcctaggataaggagctgaaagattaacttggatcttctaatggtccaaatcttttggtcacaataaagagtctccaaattagagactgcatgttagttctggatggatttggtggcctgacatgataccctgccagctgtgaggggaccccgtttttaagatgcatggccaagctctctgcaaatggaaatgcttacactgggtgttggggatgtttgctacctcctgctatttttgtggttttggttctcccactatggtaggacccctggccagcattgtggcttgtcatgtcagccccattgactaccttctcatgctctgaggtactactgcctctgcagcacaaatttctatttctgtcaataaaaggagatgaaaatattc

SEQ ID NO: 329611 - DNA, 3098 bp, Homo sapiens
atggatagaatggtgctatctgagctgttataatgttggcctcatgcctagctttatattgcagcacgtctgaggcattggtttttcatccttccaaacttttggtctacagagactattagaagattaagtagctgctgctggtggtgacaatgtcaaataacggcctagacattcaagacaaacccccagcccctccgatgagaaataccagcactatgattggagccggcagcaaagatgctggaaccctaaaccatggttctaaacctctgcctccaaacccagaggagaagaaaaagaaggaccgattttaccgatccattttacctggagataaaacaaataaaaagaaagagaaagagcggccagagatttctctcccttcagattttgaacacacaattcatgtcggttttgatgctgtcacaggggagtttacgggaatgccagagcagtgggcccgcttgcttcagacatcaaatatcactaagtcggagcagaagaaaaacccgcaggctgttctggatgtgttggagttttacaactcgaagaagacatccaacagccagaaatacatgagctttacagataagtcagctgaggattacaattcttctaatgccttgaatgtgaaggctgtgtctgagactcctgcagtgccaccagtttcagaagatgaggatgatgatgatgatgatgttatccccaacaccagtgattgctccacgcccagagcacacaaaatctgtatacacacggtctgtgattgaaccacttcctgtcactccaactcgggacgtggctacatctcccatttcacctactgaaaataacaccactccaccagatgctttgacccggaatactgagaagcagaagaagaagcctaaaatgtctgatgaggagatcttggagaaattacgaagcatagtgagtgttgggcgatcctaagaagaaatatacacggtttgagaagattggacaaggtgcttcaggcaccgtgtacacagcaatggatgtggccacaggacaggaggtggccattaagcagatgaatcttcagcagcagcccaagaaagagctgattattaatgagatcctggtcatgagggaaaacaagaacccaaacattgtgaattacttggacagttacctcgtgggagatgagctgtgggttgttatggaatacttggctggaggctccttgacagatgtggtgacagaaacttgcatggatgaaggccaaattgcagctgtgtgccgtgagtgtctgcaggctctggagttcttgcattcgaaccaggtcattcacagagacatcaagagtgacaatattctgttgggaatggatggctctgtcaagctaactgactttggattctgtgcacagataaccccagagcagagcaaacggagcaccatggtaggaaccccatactggatggcaccagaggttgtgacacgaaaggcctatgggcccaaggttgacatctggtccctgggcatcatggccatcgaaatgattgaaggggagcctccatacctcaatgaaaaccctctgagagccttgtacctcattgccaccaatgggaccccagaacttcagaacccagagaagctgtcagctatcttccgggactttctgaaccgctgtctcgagatggatgtggagaagagaggttcagctaaagagctgctacaggtgagaaaactgaggtttcaagtgtttagtaacttttccatgatagctgcatcaattcctgaagattgccaagcccctctccagcctcactccactgattgctgcagctaaggaggcaacaaagaacaatcactaaaaccacactcaccccagcctcattgtgccaagccttctgtgagataaatgcacatttcagaaattccaactcctgatgccctcttctccttgccttgcttctcccatttcctgatctagcactcctcaagactttgatccttggaaaccgtgtgtccagcattgaagagaactgcaactgaatgactaatcagatgatggccatttctaaataaggaatttcctcccaattcatggatatgagggtggtttatgattaagggtttatataaataaatgtttctagtcttccgtgtgtcaaaatcctcacctccttcataaccatctcccacaattaattcttgactatataaatttatggtttgataatattatcaatttgtaatcaattgagatttctttagtgcttgcttttctgtgactcaactgcccagacacctcattgtacttgaaaactggaacagcttgggaatgccatggggtttgataatctgccagggacatgaagaggctcagcttcctggaccatgactttggctcagctgatcctgacatgggagaacaaccacatttttctttgtgtgtgcttctagcagctgttcgggaggaccttgacccaatagtgttcccatgctgtttcttgtgaaatgctctcggctatgtagcagcttttgattccctgcataccctaggctgctgcccctatcctgtcccttgtttataacattgagaggttttctagggcacatactgagtgagagcagtgttgagaagtcggggaaaatggtgactacttttagagcaaggctgggcatcagcacctgtccagctctacttgtgtgatgtttcaggaactcagcccctttttctgcctaggataaggagctgaaagattaacttggatcttctaatggtccaaatcttttggtcacaataaagagtctccaaattagagactgcatgttagttctggatggatttggtggcctgacatgataccctgccagctgtgaggggaccccgtttttaagatgcatggccaagctctctgcaaatggaaatgcttacactgggtgttggggatgtttgctacctcctgctatttttgtggttttggttctcccactatggtaggacccctggccagcattgtggcttgtcatgtcagccccattgactaccttctcatgctctgaggtactactgcctctgcagcacaaatttctatttctgtcaataaaaggagatgaaaatattc

SEQ ID NO: 329612 - DNA, 3279 bp, Homo sapiens
gccacgaaggccacagacgccttcccccttggactctcattcccttttccacggagccccgcgctttcgtgagccccctcgaggaacctggtctccgcatccagttaccacctcctgcctcagaggccatctgagcccttcgcacctcgcccctcagtccccccttgcccccccgcggagatcgcctcgctccctcccgcccccccatcatcccttccctcgcagttcccctgtcctgaggggagccccgccacggcagcgacagcgggcaggagggagaaagtgaaggttgggcgacacttggccctcactcccggctaggcggcacccaccgccgggaggaggaggaggagccgagaggagctgagcgagcgcggaagtagctgctgctggtggtgacaatgtcaaataacggcctagacattcaagacaaacccccagcccctccgatgagaaataccagcactatgattggagccggcagcaaagatgctggaaccctaaaccatggttctaaacctctgcctccaaacccagaggagaagaaaaagaaggaccgattttaccgatccattttacctggagataaaacaaataaaaagaaagagaaagagcggccagagatttctctcccttcagattttgaacacacaattcatgtcggttttgatgctgtcacaggggagtttacgggaatgccagagcagtgggcccgcttgcttcagacatcaaatatcactaagtcggagcagaagaaaaacccgcaggctgttctggatgtgttggagttttacaactcgaagaagacatccaacagccagataagtcagctgaggattacaattcttctaatgccttgaatgtgaaggctgtgtctgagactcctgcagtgccaccagtttcagaagatgaggatgatgatgatgatgatgttatccccaacaccagtgattgctccacgcccagagcacacaaaatctgtatacacacggtctgtgattgaaccacttcctgtcactccaactcgggacgtggctacatctcccatttcacctactgaaaataacaccactccaccagatgctttgacccggaatactgagaagcagaagaagaagcctaaaatgtctgatgaggagatcttggagaaattacgaagcatagtgagtgttgggcgatcctaagaagaaatatacacggtttgagaagattggacaaggtgcttcaggcaccgtgtacacagcaatggatgtggccacaggacaggaggtggccattaagcagatgaatcttcagcagcagcccaagaaagagctgattattaatgagatcctggtcatgagggaaaacaagaacccaaacattgtgaattacttggacagttacctcgtgggagatgagctgtgggttgttatggaatacttggctggaggctccttgacagatgtggtgacagaaacttgcatggatgaaggccaaattgcagctgtgtgccgtgagtgtctgcaggctctggagttcttgcattcgaaccaggtcattcacagagacatcaagagtgacaatattctgttgggaatggatggctctgtcaagctaactgactttggattctgtgcacagataaccccagagcagagcaaacggagcaccatggtaggaaccccatactggatggcaccagaggttgtgacacgaaaggcctatgggcccaaggttgacatctggtccctgggcatcatggccatcgaaatgattgaaggggagcctccatacctcaatgaaaaccctctgagagccttgtacctcattgccaccaatgggaccccagaacttcagaacccagagaagctgtcagctatcttccgggactttctgaaccgctgtctcgagatggatgtggagaagagaggttcagctaaagagctgctacagcatcaattcctgaagattgccaagcccctctccagcctcactccactgattgctgcagctaaggaggcaacaaagaacaatcactaaaaccacactcaccccagcctcattgtgccaagccttctgtgagataaatgcacatttcagaaattccaactcctgatgccctcttctccttgccttgcttctcccatttcctgatctagcactcctcaagactttgatccttggaaaccgtgtgtccagcattgaagagaactgcaactgaatgactaatcagatgatggccatttctaaataaggaatttcctcccaattcatggatatgagggtggtttatgattaagggtttatataaataaatgtttctagtcttccgtgtgtcaaaatcctcacctccttcataaccatctcccacaattaattcttgactatataaatttatggtttgataatattatcaatttgtaatcaattgagatttctttagtgcttgcttttctgtgactcaactgcccagacacctcattgtacttgaaaactggaacagcttgggaatgccatggggtttgataatctgccagggacatgaagaggctcagcttcctggaccatgactttggctcagctgatcctgacatgggagaacaaccacatttttctttgtgtgtgcttctagcagctgttcgggaggaccttgacccaatagtgttcccatgctgtttcttgtgaaatgctctcggctatgtagcagcttttgattccctgcataccctaggctgctgcccctatcctgtcccttgtttataacattgagaggttttctagggcacatactgagtgagagcagtgttgagaagtcggggaaaatggtgactacttttagagcaaggctgggcatcagcacctgtccagctctacttgtgtgatgtttcaggaactcagcccctttttctgcctaggataaggagctgaaagattaacttggatcttctaatggtccaaatcttttggtcacaataaagagtctccaaattagagactgcatgttagttctggatggatttggtggcctgacatgataccctgccagctgtgaggggaccccgtttttaagatgcatggccaagctctctgcaaatggaaatgcttacactgggtgttggggatgtttgctacctcctgctatttttgtggttttggttctcccactatggtaggacccctggccagcattgtggcttgtcatgtcagccccattgactaccttctcatgctctgaggtactactgcctctgcagcacaaatttctatttctgtcaataaaaggagatgaaaatattc

SEQ ID NO: 329613 - DNA, 3448 bp, Homo sapiens
  misc_feature (3312)..(3312): n is a, c, g, or t
gccacgaaggccacagacgccttcccccttggactctcattcccttttccacggagccccgcgctttcgtgagccccctcgaggaacctggtctccgcatccagttaccacctcctgcctcagaggccatctgagcccttcgcacctcgcccctcagtccccccttgcccccccgcggagatcgcctcgctccctcccgcccccccatcatcccttccctcgcagttcccctgtcctgaggggagccccgccacggcagcgacagcgggcaggagggagaaagtgaaggttgggcgacacttggccctcactcccggctaggcggcacccaccgccgggaggaggaggaggagccgagaggagctgagcgagcgcggaagtagctgctgctggtggtgacaatgtcaaataacggcctagacattcaagacaaacccccagcccctccgatgagaaataccagcactatgattggagccggcagcaaagatgctggaaccctaaaccatggttctaaacctctgcctccaaacccagaggagaagaaaaagaaggaccgattttaccgatccattttacctggagataaaacaaataaaaagaaagagaaagagcggccagagatttctctcccttcagattttgaacacacaattcatgtcggttttgatgctgtcacaggggagtttacgggaatgccagagcagtgggcccgcttgcttcagacatcaaatatcactaagtcggagcagaagaaaaacccgcaggctgttctggatgtgttggagttttacaactcgaagaagacatccaacagccagaaatacatgagctttacagataagtcagctgaggattacaattcttctaatgccttgaatgtgaaggctgtgtctgagactcctgcagtgccaccagtttcagaagatgaggatgatgatgatgatgatgttatccccaacaccagtgattgctccacgcccagagcacacaaaatctgtatacacacggtctgtgattgaaccacttcctgtcactccaactcgggacgtggctacatctcccatttcacctactgaaaataacaccactccaccagatgctttgacccggaatactgagaagcagaagaagaagcctaaaatgtctgatgaggagatcttggagaaattacgaagcatagtgagtgttgggcgatcctaagaagaaatatacacggtttgagaagattggacaaggtgcttcaggcaccgtgtacacagcaatggatgtggccacaggacaggaggtggccattaagcagatgaatcttcagcagcagcccaagaaagagctgattattaatgagatcctggtcatgagggaaaacaagaacccaaacattgtgaattacttggacagttacctcgtgggagatgagctgtgggttgttatggaatacttggctggaggctccttgacagatgtggtgacagaaacttgcatggatgaaggccaaattgcagctgtgtgccgtgagtgtctgcaggctctggagttcttgcattcgaaccaggtcattcacagagacatcaagagtgacaatattctgttgggaatggatggctctgtcaagctaactgactttggattctgtgcacagataaccccagagcagagcaaacggagcaccatggtaggaaccccatactggatggcaccagaggttgtgacacgaaaggcctatgggcccaaggttgacatctggtccctgggcatcatggccatcgaaatgattgaaggggagcctccatacctcaatgaaaaccctctgagagccttgtacctcattgccaccaatgggaccccagaacttcagaacccagagaagctgtcagctatcttccgggactttctgaaccgctgtctcgagatggatgtggagaagagaggttcagctaaagagctgctacagcatcaattcctgaagattgccaagcccctctccagcctcactccactgattgctgcagctaaggaggcaacaaagaacaatcactaaaaccacactcaccccagcctcattgtgccaagccttctgtgagataaatgcacatttcagaaattccaactcctgatgccctcttctccttgccttgcttctcccatttcctgatctagcactcctcaagactttgatccttggaaaccgtgtgtccagcattgaagagaactgcaactgaatgactaatcagatgatggccatttctaaataaggaatttcctcccaattcatggatatgagggtggtttatgattaagggtttatataaataaatgtttctagtcttccgtgtgtcaaaatcctcacctccttcataaccatctcccacaattaattcttgactatataaatttatggtttgataatattatcaatttgtaatcaattgagatttctttagtgcttgcttttctgtgactcaactgcccagacacctcattgtacttgaaaactggaacagcttgggaatgccatggggtttgataatctgccagggacatgaagaggctcagcttcctggaccatgactttggctcagctgatcctgacatgggagaacaaccacatttttctttgtgtgtgcttctagcagctgttcgggaggaccttgacccaatagtgttcccatgctgtttcttgtgaaatgctctcggctatgtagcagcttttgattccctgcataccctaggctgctgcccctatcctgtcccttgtttataacattgagaggttttctagggcacatactgagtgagagcagtgttgagaagtcggggaaaatggtgactacttttagagcaaggctgggcatcagcacctgtccagctctacttgtgtgatgtttcaggaactcagcccctttttctgcctaggataaggagctgaaagattaacttggatcttctaatggtccaaatcttttggtcacaataaagagtctccaaattagagactgcatgttagttctggatggatttggtggcctgacatgataccctgccagctgtgaggggaccccgtttttaagatgcatggccaagctctctgcaaatggaaatgcttacactgggtgttggggatgtttgctacctcctgctatttttgtggttttggttctcccactatggtaggacccctggccagcattgtggcttgtcatgtcagccccattgactaccttctcatgctctgaggtactactgcctctgcagcacaaatttctatttctgtcaataaaaggagatgaaaatattcaaaaaaaaaaaaanaaaaaaaaaaaaaaaactcgagactagttctctctctccgagatggatgtggagaagagaggttcagctaaagagctgctacagcatcaattcctgaagattgccaagcccctctccagcctcactccactgattg

SEQ ID NO: 329614 - DNA, 3639 bp, Homo sapiens
gccacgaaggccacagacgccttcccccttggactctcattcccttttccacggagccccgcgctttcgtgagccccctcgaggaacctggtctccgcatccagttaccacctcctgcctcagaggccatctgagcccttcgcacctcgcccctcagtccccccttgcccccccgcggagatcgcctcgctccctcccgcccccccatcatcccttccctcgcagttcccctgtcctgaggggagccccgccacggcagcgacagcgggcaggagggagaaagtgaaggttgggcgacacttggccctcactcccggctaggcggcacccaccgccgggaggaggaggaggagccgagaggagctgagcgagcgcggaagtagctgctgctggtggtgacaatgtcaaataacggcctagacattcaagacaaacccccagcccctccgatgagaaataccagcactatgattggagccggcagcaaagatgctggaaccctaaaccatggttctaaacctctgcctccaaacccagaggagaagaaaaagaaggaccgattttaccgatccattttacctggagataaaacaaataaaaagaaagagaaagagcggccagagatttctctcccttcagattttgaacacacaattcatgtcggttttgatgctgtcacaggggagtttacgggaatgccagagcagtgggcccgcttgcttcagacatcaaatatcactaagtcggagcagaagaaaaacccgcaggctgttctggatgtgttggagttttacaactcgaagaagacatccaacagccagaaatacatgagctttacagataagtcagctgaggattacaattcttctaatgccttgaatgtgaaggctgtgtctgagactcctgcagtgccaccagtttcagaagatgaggatgatgatgatgatgatgttatccccaacaccagtgattgctccacgcccagagcacacaaaatctgtatacacacggtctgtgattgaaccacttcctgtcactccaactcgggacgtggctacatctcccatttcacctactgaaaataacaccactccaccagatgctttgacccggaatactgagaagcagaagaagaagcctaaaatgtctgatgaggagatcttggagaaattacgaagcatagtgagtgttgggcgatcctaagaagaaatatacacggtttgagaagattggacaaggtgcttcaggcaccgtgtacacagcaatggatgtggccacaggacaggaggtggccattaagcagatgaatcttcagcagcagcccaagaaagagctgattattaatgagatcctggtcatgagggaaaacaagaacccaaacattgtgaattacttggacagttacctcgtgggagatgagctgtgggttgttatggaatacttggctggaggctccttgacagatgtggtgacagaaacttgcatggatgaaggccaaattgcagctgtgtgccgtgagtgtctgcaggctctggagttcttgcattcgaaccaggtcattcacagagacatcaagagtgacaatattctgttgggaatggatggctctgtcaagctaactgactttggattctgtgcacagataaccccagagcagagcaaacggagcaccatggtaggaaccccatactggatggcaccagaggttgtgacacgaaaggcctatgggcccaaggttgacatctggtccctgggcatcatggccatcgaaatgattgaaggggagcctccatacctcaatgaaaaccctctgagagccttgtacctcattgccaccaatgggaccccagaacttcagaacccagagaagctgtcagctatcttccgggactttctgaaccgctgtctcgagatggatgtggagaagagaggttcagctaaagagctgctacagcatcaattcctgaagattgccaagcccctctccagcctcactccactgattgctgcagctaaggaggcaacaaagaacaatcactaaaaccacactcaccccagcctcattgtgccaagccttctgtgagataaatgcacatttcagaaattccaactcctgatgccctcttctccttgccttgcttctcccatttcctgatctagcactcctcaagactttgatccttggaaaccgtgtgtccagcattgaagagaactgcaactgaatgactaatcagatgatggccatttctaaataaggaatttcctcccaattcatggatatgagggtggtttatgattaagggtttatataaataaatgtttctagtcttccgtgtgtcaaaatcctcacctccttcataaccatctcccacaattaattcttgactatataaatttatggtttgataatattatcaatttgtaatcaattgagatttctttagtgcttgcttttctgtgactcaactgcccagacacctcattgtacttgaaaactggaacagcttgggaatgccatggggtttgataatctgccagggacatgaagaggctcagcttcctggaccatgactttggctcagctgatcctgacatgggagaacaaccacatttttctttgtgtgtgcttctagcagctgttcgggaggaccttgacccaatagtgttcccatgctgtttcttgtgaaatgctctcggctatgtagcagcttttgattccctgcataccctaggctgctgcccctatcctgtcccttgtttataacattgagaggttttctagggcacatactgagtgagagcagtgttgagaagtcggggaaaatggtgactacttttagagcaaggctgggcatcagcacctgtccagctctacttgtgtgatgtttcaggaactcagcccctttttctgcctaggataaggagctgaaagattaacttggatcttctaatggtccaaatcttttggtcacaataaagagtctccaaattagagactgcatgttagttctggatggattttggttctcccactatggtaggacccctggccagcattgtggcttgtcatgtcagccccattgactaccttctcatgctctgaggtactactgcctctgcagcacaaatttctatttctgtcaataaaaggagatgaaaatattctattggagtatgcctttcttttttctcttcgttttttctttccttttctaattttttatatgaaataatgagtagtttcttcctgaaccatttgagagtggtaagttgcagatagaatgcccctttaccactatatacctgaatgtgtattctttctttttaacacttttattttaaatataaattaagagaaatgggccaaaaccatttgtattgtttaaagaataattataaacacacttgtatccaccaaatcaagaaatggaacactgacagtaagaaccttctctatcttgtccttcctttctcattatagcccccacctaagaggtaaccaccatcttgacttttatttaaataactttcttgcttttctgtatactttcatcacattcaggtgtgttccaatacaagtagattttagttcggccagtttttgaactttaaataaacatatcataatagataaaaact

SEQ ID NO: 329615 - DNA, 3165 bp, Homo sapiens
gccacgaaggccacagacgccttcccccttggactctcattcccttttccacggagccccgcgctttcgtgagccccctcgaggaacctggtctccgcatccagttaccacctcctgcctcagaggccatctgagcccttcgcacctcgcccctcagtccccccttgcccccccgcggagatcgcctcgctccctcccgcccccccatcatcccttccctcgcagttcccctgtcctgaggggagccccgccacggcagcgacagcgggcaggagggagaaagtgaaggttgggcgacacttggccctcactcccggctaggcggcacccaccgccgggaggaggaggaggagccgagaggagctgagcgagcgcggaagtagctgctgctggtggtgacaatgtcaaataacggcctagacattcaagacaaacccccagcccctccgatgagaaataccagcactatgattggagccggcagcaaagatgctggaaccctaaaccatggttctaaacctctgcctccaaacccagaggagaagaaaaagaaggaccgattttaccgatccattttacctggagataaaacaaataaaaagaaagagaaagagcggccagagatttctctcccttcagattttgaacacacaattcatgtcggttttgatgctgtcacaggggagtttacgggaatgccagagcagtgggcccgcttgcttcagacatcaaatatcactaagtcggagcagaagaaaaacccgcaggctgttctggatgtgttggagttttacaactcgaagaagacatccaacagccagaaatacatgagctttacagataagtcagctgaggattacaattcttctaatgccttgaatgtgaaggctgtgtctgagactcctgcagtgccaccagtttcagaagatgaggatgatgatgatgatgatgttatccccaacaccagtgattgctccacgcccagagcacacaaaatctgtatacacacggtctgtgattgaaccacttcctgtcactccaactcgggacgtggctacatctcccatttcacctactgaaaataacaccactccaccagatgctttgacccggaatactgagaagcagaagaagaagcctaaaatgtctgatgaggagatcttggagaaattacgaagcatagtgagtgttgggcgatcctaagaagaaatatacacggtttgagaagattggacaaggtgcttcaggcaccgtgtacacagcaatggatgtggccacaggacaggaggtggccattaagcagatgaatcttcagcagcagcccaagaaagagctgattattaatgagatcctggtcatgagggaaaacaagaacccaaacattgtgaattacttggacagttacctcgtgggagatgagctgtgggttgttatggaatacttggctggaggctccttgacagatgtggtgacagaaacttgcatggatgaaggccaaattgcagctgtgtgccgtgagtgtctgcaggctctggagttcttgcattcgaaccaggtcattcacagagacatcaagagtgacaatattctgttgggaatggatggctctgtcaagctaactgactttggattctgtgcacagataaccccagagcagagcaaacggagcaccatggtaggaaccccatactggatggcaccagaggttgtgacacgaaaggcctatgggcccaaggttgacatctggtccctgggcatcatggccatcgaaatgattgaaggggagcctccatacctcaatgaaaaccctctgagagccttgtacctcattgccaccaatgggaccccagaacttcagaacccagagaagctgtcagctatcttccgggactttctgaaccgctgtctcgagatggatgtggagaagagaggttcagctaaagagctgctacagcatcaattcctgaagattgccaagcccctctccagcctcactccactgattgctgcagctaaggaggcaacaaagaacaatcactaaaaccacactcaccccagcctcattgtgccaagccttctgtgagataaatgcacatttcagaaattccaactcctgatgccctcttctccttgccttgcttctcccatttcctgatctagcactcctcaagactttgatccttggaaaccgtgtgtccagcattgaagagaactgcaactgaatgactaatcagatgatggccatttctaaataaggaatttcctcccaattcatggatatgagggtggtttatgattaagggtttatataaataaatgtttctagtcttccgtgtgtcaaaatcctcacctccttcataaccatctcccacaattaattcttgactatataaatttatggtttgataatattatcaatttgtaatcaattgagatttctttagtgcttgcttttctgtgactcaactgcccagacacctcattgtacttgaaaactggaacagcttgggaatgccatggggtttgataatctgccagggacatgaagaggctcagcttcctggaccatgactttggctcagctgatcctgacatgggagaacaaccacatttttctttgtgtgtgcttctagcagctgttcgggaggaccttgacccaatagtgttcccatgctgtttcttgtgaaatgctctcggctatgtagcagcttttgattccctgcataccctaggctgctgcccctatcctgtcccttgtttataacattgagaggttttctagggcacatactgagtgagagcagtgttgagaagtcggggaaaatggtgactacttttagagcaaggctgggcatcagcacctgtccagctctacttgtgtgatgtttcaggaactcagcccctttttctgcctaggataaggagctgaaagattaacttggatcttctaatggtccaaatcttttggtcacaataaagagtctccaaattagagactgcatgttagttctggatggattttggttctcccactatggtaggacccctggccagcattgtggcttgtcatgtcagccccattgactaccttctcatgctctgaggtactactgcctctgcagcacaaatttctatttctgtcaataaaaggagatgaaaatattc

SEQ ID NO: 329616 - DNA, 2655 bp, Homo sapiens
aaataagatatgctggcccacccccaaacacattctgaaattctccgcagggcccctttctccccacctgtcacccccccagttgaaaatcatagatctaatcttatcccttttatagatgaagagtttgaagccacaagaaattagagccacgtgccaagggtgatggaggagaggagagaagcaagcaggaacaggaaattaatatatattgagcatctgttatatgatatgcagttggctaagtactttacatgaactaatcaatttaaattatcttgtattctcttatgtccactttacaaatgaggaaagtgaagctcaaagaagttaaataactttcttaagatcctacctagtaggtactaggtagaagtaccaggttggaattcaggtctcctggccactagagcctacattctctgtactacctcttatagcttcttaaatgtgagaatggatgctgcagggagaggattatttttactgctcttgtttttgacactcacagattgtgtgtagaactgcatttgacaaatatcactttattgaacactgtgtttttttccctctttctccgccaccttactgttcagtgcttcaggcaccgtgtacacagcaatggatgtggccacaggacaggaggtggccattaagcagatgaatcttcagcagcagcccaagaaagagctgattattaatgagatcctggtcatgagggaaaacaagaacccaaacattgtgaattacttggacagttacctcgtgggagatgagctgtgggttgttatggaatacttggctggaggctccttgacagatgtggtgacagaaacttgcatggatgaaggccaaattgcagctgtgtgccgtgagtgtctgcaggctctggagttcttgcattcgaaccaggtcattcacagagacatcaagagtgacaatattctgttgggaatggatggctctgtcaagctaactgactttggattctgtgcacagataaccccagagcagagcaaacggagcaccatggtaggaaccccatactggatggcaccagaggttgtgacacgaaaggcctatgggcccaaggttgacatctggtccctgggcatcatggccatcgaaatgattgaaggggagcctccatacctcaatgaaaaccctctgagagccttgtacctcattgccaccaatgggaccccagaacttcagaacccagagaagctgtcagctatcttccgggactttctgaaccgctgtctcgagatggatgtggagaagagaggttcagctaaagagctgctacagcatcaattcctgaagattgccaagcccctctccagcctcactccactgattgctgcagctaaggaggcaacaaagaacaatcactaaaaccacactcaccccagcctcattgtgccaagccttctgtgagataaatgcacatttcagaaattccaactcctgatgccctcttctccttgccttgcttctcccatttcctgatctagcactcctcaagactttgatccttggaaaccgtgtgtccagcattgaagagaactgcaactgaatgactaatcagatgatggccatttctaaataaggaatttcctcccaattcatggatatgagggtggtttatgattaagggtttatataaataaatgtttctagtcttccgtgtgtcaaaatcctcacctccttcataaccatctcccacaattaattcttgactatataaatttatggtttgataatattatcaatttgtaatcaattgagatttctttagtgcttgcttttctgtgactcaactgcccagacacctcattgtacttgaaaactggaacagcttgggaatgccatggggtttgataatctgccagggacatgaagaggctcagcttcctggaccatgactttggctcagctgatcctgacatgggagaacaaccacatttttctttgtgtgtgcttctagcagctgttcgggaggaccttgacccaatagtgttcccatgctgtttcttgtgaaatgctctcggctatgtagcagcttttgattccctgcataccctaggctgctgcccctatcctgtcccttgtttataacattgagaggttttctagggcacatactgagtgagagcagtgttgagaagtcggggaaaatggtgactacttttagagcaaggctgggcatcagcacctgtccagctctacttgtgtgatgtttcaggaactcagcccctttttctgcctaggataaggagctgaaagattaacttggatcttctaatggtccaaatcttttggtcacaataaagagtctccaaattagagactgcatgttagttctggatggatttggtggcctgacatgataccctgccagctgtgaggggaccccgtttttaagatgcatggccaagctctctgcaaatggaaatgcttacactgggtgttggggatgtttgctacctcctgctatttttgtggttttggttctcccactatggtaggacccctggccagcattgtggcttgtcatgtcagccccattgactaccttctcatgctctgaggtactactgcctctgcagcacaaatttctatttctgtcaataaaaggagatgaaaatattc

SEQ ID NO: 329617 - DNA, 1417 bp, Homo sapiens
  misc_feature (43)..(44): n is a, c, g, or t
tcactcactatacctacgagacgacgaagaccatcccaaaaannggcgagccgtacatgcaatcccgctgagccatcaattcctgaagattgccaagcccctctccagcctcactccactgattgctgcagctaaggaggcaacaaagaacaatcactaaaaccacactcaccccagcctcattgtgccaagccttctgtgagataaatgcacatttcagaaattccaactcctgatgccctcttctccttgccttgcttctcccatttcctgatctagcactcctcaagactttgatccttggaaaccgtgtgtccagcattgaagagaactgcaactgaatgactaatcagatgatggccatttctaaataaggaatttcctcccaattcatggatatgagggtggtttatgattaagggtttatataaataaatgtttctagtcttccgtgtgtcaaaatcctcacctccttcataaccatctcccacaattaattcttgactatataaatttatggtttgataatattatcaatttgtaatcaattgagatttctttagtgcttgcttttctgtgactcaactgcccagacacctcattgtacttgaaaactggaacagcttgggaatgccatggggtttgataatctgccagggacatgaagaggctcagcttcctggaccatgactttggctcagctgatcctgacatgggagaacaaccacatttttctttgtgtgtgcttctagcagctgttcgggaggaccttgacccaatagtgttcccatgctgtttcttgtgaaatgctctcggctatgtagcagcttttgattccctgcataccctaggctgctgcccctatcctgtcccttgtttataacattgagaggttttctagggcacatactgagtgagagcagtgttgagaagtcggggaaaatggtgactacttttagagcaaggctgggcatcagcacctgtccagctctacttgtgtgatgtttcaggaactcagcccctttttctgcctaggataaggagctgaaagattaacttggatcttctaatggtccaaatcttttggtcacaataaagagtctccaaattagagactgcatgttagttctggatggatttggtggcctgacatgataccctgccagctgtgaggggaccccgtttttaagatgcatggccaagctctctgcaaatggaaatgcttacactgggtgttggggatgtttgctacctcctgctatttttgtggttttggttctcccactatggtaggacccctggccagcattgtggcttgtcatgtcagccccattgactaccttctcatgctctgaggtactactgcctctgcagcacaaatttctatttctgtcaataaaaggagatgaaaatattc

SEQ ID NO: 329618 - DNA, 1405 bp, Homo sapiens
cccgccccccacggcaccacctgcaacagtaaaattctgtccacatccacctgcctgtagccatcaattcctgaagattgccaagcccctctccagcctcactccactgattgctgcagctaaggaggcaacaaagaacaatcactaaaaccacactcaccccagcctcattgtgccaagccttctgtgagataaatgcacatttcagaaattccaactcctgatgccctcttctccttgccttgcttctcccatttcctgatctagcactcctcaagactttgatccttggaaaccgtgtgtccagcattgaagagaactgcaactgaatgactaatcagatgatggccatttctaaataaggaatttcctcccaattcatggatatgagggtggtttatgattaagggtttatataaataaatgtttctagtcttccgtgtgtcaaaatcctcacctccttcataaccatctcccacaattaattcttgactatataaatttatggtttgataatattatcaatttgtaatcaattgagatttctttagtgcttgcttttctgtgactcaactgcccagacacctcattgtacttgaaaactggaacagcttgggaatgccatggggtttgataatctgccagggacatgaagaggctcagcttcctggaccatgactttggctcagctgatcctgacatgggagaacaaccacatttttctttgtgtgtgcttctagcagctgttcgggaggaccttgacccaatagtgttcccatgctgtttcttgtgaaatgctctcggctatgtagcagcttttgattccctgcataccctaggctgctgcccctatcctgtcccttgtttataacattgagaggttttctagggcacatactgagtgagagcagtgttgagaagtcggggaaaatggtgactacttttagagcaaggctgggcatcagcacctgtccagctctacttgtgtgatgtttcaggaactcagcccctttttctgcctaggataaggagctgaaagattaacttggatcttctaatggtccaaatcttttggtcacaataaagagtctccaaattagagactgcatgttagttctggatggatttggtggcctgacatgataccctgccagctgtgaggggaccccgtttttaagatgcatggccaagctctctgcaaatggaaatgcttacactgggtgttggggatgtttgctacctcctgctatttttgtggttttggttctcccactatggtaggacccctggccagcattgtggcttgtcatgtcagccccattgactaccttctcatgctctgaggtactactgcctctgcagcacaaatttctatttctgtcaataaaaggagatgaaaatattc

SEQ ID NO: 329619 - DNA, 1410 bp, Homo sapiens
  misc_feature (33)..(33): n is a, c, g, or t
  misc_feature (51)..(51): n is a, c, g, or t
  misc_feature (63)..(63): n is a, c, g, or t
acgtcctaacagtctactcagcaagaagaaaangttcgtttgttaacctcnctgaagacctcncagcatcaattcctgaagattgccaagcccctctccagcctcactccactgattgctgcagctaaggaggcaacaaagaacaatcactaaaaccacactcaccccagcctcattgtgccaagccttctgtgagataaatgcacatttcagaaattccaactcctgatgccctcttctccttgccttgcttctcccatttcctgatctagcactcctcaagactttgatccttggaaaccgtgtgtccagcattgaagagaactgcaactgaatgactaatcagatgatggccatttctaaataaggaatttcctcccaattcatggatatgagggtggtttatgattaagggtttatataaataaatgtttctagtcttccgtgtgtcaaaatcctcacctccttcataaccatctcccacaattaattcttgactatataaatttatggtttgataatattatcaatttgtaatcaattgagatttctttagtgcttgcttttctgtgactcaactgcccagacacctcattgtacttgaaaactggaacagcttgggaatgccatggggtttgataatctgccagggacatgaagaggctcagcttcctggaccatgactttggctcagctgatcctgacatgggagaacaaccacatttttctttgtgtgtgcttctagcagctgttcgggaggaccttgacccaatagtgttcccatgctgtttcttgtgaaatgctctcggctatgtagcagcttttgattccctgcataccctaggctgctgcccctatcctgtcccttgtttataacattgagaggttttctagggcacatactgagtgagagcagtgttgagaagtcggggaaaatggtgactacttttagagcaaggctgggcatcagcacctgtccagctctacttgtgtgatgtttcaggaactcagcccctttttctgcctaggataaggagctgaaagattaacttggatcttctaatggtccaaatcttttggtcacaataaagagtctccaaattagagactgcatgttagttctggatggatttggtggcctgacatgataccctgccagctgtgaggggaccccgtttttaagatgcatggccaagctctctgcaaatggaaatgcttacactgggtgttggggatgtttgctacctcctgctatttttgtggttttggttctcccactatggtaggacccctggccagcattgtggcttgtcatgtcagccccattgactaccttctcatgctctgaggtactactgcctctgcagcacaaatttctatttctgtcaataaaaggagatgaaaatattc

SEQ ID NO: 329620 - DNA, 1424 bp, Homo sapiens
acgggcgacaacaccatagccgcccgggggtttgcaaaaaaatttgaatatctgcattgaactctctgacccatgccttgcatcaattcctgaagattgccaagcccctctccagcctcactccactgattgctgcagctaaggaggcaacaaagaacaatcactaaaaccacactcaccccagcctcattgtgccaagccttctgtgagataaatgcacatttcagaaattccaactcctgatgccctcttctccttgccttgcttctcccatttcctgatctagcactcctcaagactttgatccttggaaaccgtgtgtccagcattgaagagaactgcaactgaatgactaatcagatgatggccatttctaaataaggaatttcctcccaattcatggatatgagggtggtttatgattaagggtttatataaataaatgtttctagtcttccgtgtgtcaaaatcctcacctccttcataaccatctcccacaattaattcttgactatataaatttatggtttgataatattatcaatttgtaatcaattgagatttctttagtgcttgcttttctgtgactcaactgcccagacacctcattgtacttgaaaactggaacagcttgggaatgccatggggtttgataatctgccagggacatgaagaggctcagcttcctggaccatgactttggctcagctgatcctgacatgggagaacaaccacatttttctttgtgtgtgcttctagcagctgttcgggaggaccttgacccaatagtgttcccatgctgtttcttgtgaaatgctctcggctatgtagcagcttttgattccctgcataccctaggctgctgcccctatcctgtcccttgtttataacattgagaggttttctagggcacatactgagtgagagcagtgttgagaagtcggggaaaatggtgactacttttagagcaaggctgggcatcagcacctgtccagctctacttgtgtgatgtttcaggaactcagcccctttttctgcctaggataaggagctgaaagattaacttggatcttctaatggtccaaatcttttggtcacaataaagagtctccaaattagagactgcatgttagttctggatggatttggtggcctgacatgataccctgccagctgtgaggggaccccgtttttaagatgcatggccaagctctctgcaaatggaaatgcttacactgggtgttggggatgtttgctacctcctgctatttttgtggttttggttctcccactatggtaggacccctggccagcattgtggcttgtcatgtcagccccattgactaccttctcatgctctgaggtactactgcctctgcagcacaaatttctatttctgtcaataaaaggagatgaaaatattc

SEQ ID NO: 329621 - DNA, 1406 bp, Homo sapiens
  misc_feature (42)..(42): n is a, c, g, or t
  misc_feature (48)..(48): n is a, c, g, or t
  misc_feature (53)..(53): n is a, c, g, or t
  misc_feature (56)..(56): n is a, c, g, or t
tatctattctgccttcacaaccaacaaaagcccctctgggtnaacatncctgnaanatctttcatcaattcctgaagattgccaagcccctctccagcctcactccactgattgctgcagctaaggaggcaacaaagaacaatcactaaaaccacactcaccccagcctcattgtgccaagccttctgtgagataaatgcacatttcagaaattccaactcctgatgccctcttctccttgccttgcttctcccatttcctgatctagcactcctcaagactttgatccttggaaaccgtgtgtccagcattgaagagaactgcaactgaatgactaatcagatgatggccatttctaaataaggaatttcctcccaattcatggatatgagggtggtttatgattaagggtttatataaataaatgtttctagtcttccgtgtgtcaaaatcctcacctccttcataaccatctcccacaattaattcttgactatataaatttatggtttgataatattatcaatttgtaatcaattgagatttctttagtgcttgcttttctgtgactcaactgcccagacacctcattgtacttgaaaactggaacagcttgggaatgccatggggtttgataatctgccagggacatgaagaggctcagcttcctggaccatgactttggctcagctgatcctgacatgggagaacaaccacatttttctttgtgtgtgcttctagcagctgttcgggaggaccttgacccaatagtgttcccatgctgtttcttgtgaaatgctctcggctatgtagcagcttttgattccctgcataccctaggctgctgcccctatcctgtcccttgtttataacattgagaggttttctagggcacatactgagtgagagcagtgttgagaagtcggggaaaatggtgactacttttagagcaaggctgggcatcagcacctgtccagctctacttgtgtgatgtttcaggaactcagcccctttttctgcctaggataaggagctgaaagattaacttggatcttctaatggtccaaatcttttggtcacaataaagagtctccaaattagagactgcatgttagttctggatggatttggtggcctgacatgataccctgccagctgtgaggggaccccgtttttaagatgcatggccaagctctctgcaaatggaaatgcttacactgggtgttggggatgtttgctacctcctgctatttttgtggttttggttctcccactatggtaggacccctggccagcattgtggcttgtcatgtcagccccattgactaccttctcatgctctgaggtactactgcctctgcagcacaaatttctatttctgtcaataaaaggagatgaaaatattc

SEQ ID NO: 329622 - DNA, 1352 bp, Homo sapiens
  misc_feature (1)..(1): n is a, c, g, or t
nttctggataccgtactgtagaatgtgaagctactctcacagcacttgcttgactgtttgcgattgctaaggaggcaacaaagaacaatcactaaaaccacactcaccccagcctcattgtgccaagccttctgtgagataaatgcacatttcagaaattccaactcctgatgccctcttctccttgccttgcttctcccatttcctgatctagcactcctcaagactttgatccttggaaaccgtgtgtccagcattgaagagaactgcaactgaatgactaatcagatgatggccatttctaaataaggaatttcctcccaattcatggatatgagggtggtttatgattaagggtttatataaataaatgtttctagtcttccgtgtgtcaaaatcctcacctccttcataaccatctcccacaattaattcttgactatataaatttatggtttgataatattatcaatttgtaatcaattgagatttctttagtgcttgcttttctgtgactcaactgcccagacacctcattgtacttgaaaactggaacagcttgggaatgccatggggtttgataatctgccagggacatgaagaggctcagcttcctggaccatgactttggctcagctgatcctgacatgggagaacaaccacatttttctttgtgtgtgcttctagcagctgttcgggaggaccttgacccaatagtgttcccatgctgtttcttgtgaaatgctctcggctatgtagcagcttttgattccctgcataccctaggctgctgcccctatcctgtcccttgtttataacattgagaggttttctagggcacatactgagtgagagcagtgttgagaagtcggggaaaatggtgactacttttagagcaaggctgggcatcagcacctgtccagctctacttgtgtgatgtttcaggaactcagcccctttttctgcctaggataaggagctgaaagattaacttggatcttctaatggtccaaatcttttggtcacaataaagagtctccaaattagagactgcatgttagttctggatggatttggtggcctgacatgataccctgccagctgtgaggggaccccgtttttaagatgcatggccaagctctctgcaaatggaaatgcttacactgggtgttggggatgtttgctacctcctgctatttttgtggttttggttctcccactatggtaggacccctggccagcattgtggcttgtcatgtcagccccattgactaccttctcatgctctgaggtactactgcctctgcagcacaaatttctatttctgtcaataaaaggagatgaaaatattc

SEQ ID NO: 329623 - DNA, 1872 bp, Homo sapiens
gccacgaaggccacagacgccttcccccttggactctcattcccttttccacggagccccgcgctttcgtgagccccctcgaggaacctggtctccgcatccagttaccacctcctgcctcagaggccatctgagcccttcgcacctcgcccctcagtccccccttgcccccccgcggagatcgcctcgctccctcccgcccccccatcatcccttccctcgcagttcccctgtcctgaggggagccccgccacggcagcgacagcgggcaggagggagaaagtgaaggttgggcgacacttggccctcactcccggctaggcggcacccaccgccgggaggaggaggaggagccgagaggagctgagcgagcgcggaagtagctgctgctggtggtgacaatgtcaaataacggcctagacattcaagacaaacccccagcccctccgatgagaaataccagcactatgattggagccggcagcaaagatgctggaaccctaaaccatggttctaaacctctgcctccaaacccagaggagaagaaaaagaaggaccgattttaccgatccattttacctggagataaaacaaataaaaagaaagagaaagagcggccagagatttctctcccttcagattttgaacacacaattcatgtcggttttgatgctgtcacaggggagtttacgggaatgccagagcagtgggcccgcttgcttcagacatcaaatatcactaagtcggagcagaagaaaaacccgcaggctgttctggatgtgttggagttttacaactcgaagaagacatccaacagccagaaatacatgagctttacagataagtcagctgaggattacaattcttctaatgccttgaatgtgaaggctgtgtctgagactcctgcagtgccaccagtttcagaagatgaggatgatgatgatgatgatgttatccccaacaccagtgattgctccacgcccagagcacacaaaatctgtatacacacggtctgtgattgaaccacttcctgtcactccaactcgggacgtggctacatctcccatttcacctactgaaaataacaccactccaccagatgctttgacccggaatactgagaagcagaagaagaagcctaaaatgtctgatgaggagatcttggagaaattacgaagcatagtgagtgttgggcgatcctaagaagaaatatacacggtttgagaagattggacaaggtgcttcaggcaccgtgtacacagcaatggatgtggccacaggacaggaggtggccattaagcagatgaatcttcagcagcagcccaagaaagagctgattattaatgagatcctggtcatgagggaaaacaagaacccaaacattgtgaattacttggacagttacctcgtgggagatgagctgtgggttgttatggaatacttggctggaggctccttgacagatgtggtgacagaaacttgcatggatgaaggccaaattgcagctgtgtgccgtgagtgtctgcaggctctggagttcttgcattcgaaccaggtcattcacagagacatcaagagtgacaatattctgttgggaatggatggctctgtcaagctaactgactttggattctgtgcacagataaccccagagcagagcaaacggagcaccatggtaggaaccccatactggatggcaccagaggttgtgacacgaaaggcctatgggcccaaggttgacatctggtccctgggcatcatggccatcgaaatgattgaaggggagcctccatacctcaatgaaaaccctctgagaaggctcttggtaccccttcatttggcccaccctaatattgggggaatccccccaag

SEQ ID NO: 329624 - DNA, 2127 bp, Homo sapiens
gccacgaaggccacagacgccttcccccttggactctcattcccttttccacggagccccgcgctttcgtgagccccctcgaggaacctggtctccgcatccagttaccacctcctgcctcagaggccatctgagcccttcgcacctcgcccctcagtccccccttgcccccccgcggagatcgcctcgctccctcccgcccccccatcatcccttccctcgcagttcccctgtcctgaggggagccccgccacggcagcgacagcgggcaggagggagaaagtgaaggttgggcgacacttggccctcactcccggctaggcggcacccaccgccgggaggaggaggaggagccgagaggagctgagcgagcgcggaagtagctgctgctggtggtgacaatgtcaaataacggcctagacattcaagacaaacccccagcccctccgatgagaaataccagcactatgattggagccggcagcaaagatgctggaaccctaaaccatggttctaaacctctgcctccaaacccagaggagaagaaaaagaaggaccgattttaccgatccattttacctggagataaaacaaataaaaagaaagagaaagagcggccagagatttctctcccttcagattttgaacacacaattcatgtcggttttgatgctgtcacaggggagtttacgggaatgccagagcagtgggcccgcttgcttcagacatcaaatatcactaagtcggagcagaagaaaaacccgcaggctgttctggatgtgttggagttttacaactcgaagaagacatccaacagccagaaatacatgagctttacagataagtcagctgaggattacaattcttctaatgccttgaatgtgaaggctgtgtctgagactcctgcagtgccaccagtttcagaagatgaggatgatgatgatgatgatgttatccccaacaccagtgattgctccacgcccagagcacacaaaatctgtatacacacggtctgtgattgaaccacttcctgtcactccaactcgggacgtggctacatctcccatttcacctactgaaaataacaccactccaccagatgctttgacccggaatactgagaagcagaagaagaagcctaaaatgtctgatgaggagatcttggagaaattacgaagcatagtgagtgttgggcgatcctaagaagaaatatacacggtttgagaagattggacaagggttagtaggggcattttctttccctggagaaatgactttaaagtgtgtgtgccggcatatatgattttgctttttttttgcctctcataaaccttgttcttctttctccactttacccctcacccatctggagttgttatgtgagactgacttgagatttggcagaattatgcttaatatgagagagatgccattagctgaccatgttgctaaaaatacccctgcagtgacagtgagagaacggttttttttcttagcacaaaaccaacttcccaaattacaactctgcttttccggatgaaccctgtttgtcctagtgctgagatccaccagcactaatataaaatggaagacccaaaactataaatccttctactactgtgataggacctgtttttctaggtagatgccagaatttatccttcttgcattcatccttctctgtatcttatatgctgccctcagtgtaatgaattcagcaagtcttaactgagttcctattgtgtgcaaggcactatgaattcagagacaatctctgcttccaaggacctcaagtcaacagaaaaagataggcaaacaattgtatagtcatatgttgcctaacaaaggggatatgttctgagaagtgcatccttaggcagttttgtcatgtgagcgtcatagagtgaacacaaaactaaatagtatagcctactacacacctaggctatatggtatagcctcttgctcctaggctacaagcctgtacagcatgttactgtactgaatactgtaggcattttacccatgtggttgttttcaacttgaacataggtaaatcgctaagataaaaagttttagtcggctaatgatgagtgtgatggatgcaaaaaaaggtttataggtttg

SEQ ID NO: 329625 - DNA, 1445 bp, Homo sapiens
gccacgaaggccacagacgccttcccccttggactctcattcccttttccacggagccccgcgctttcgtgagccccctcgaggaacctggtctccgcatccagttaccacctcctgcctcagaggccatctgagcccttcgcacctcgcccctcagtccccccttgcccccccgcggagatcgcctcgctccctcccgcccccccatcatcccttccctcgcagttcccctgtcctgaggggagccccgccacggcagcgacagcgggcaggagggagaaagtgaaggttgggcgacacttggccctcactcccggctaggcggcacccaccgccgggaggaggaggaggagccgagaggagctgagcgagcgcggaagtagctgctgctggtggtgacaatgtcaaataacggcctagacattcaagacaaacccccagcccctccgatgagaaataccagcactatgattggagccggcagcaaagatgctggaaccctaaaccatggttctaaacctctgcctccaaacccagaggagaagaaaaagaaggaccgattttaccgatccattttacctggagataaaacaaataaaaagaaagagaaagagcggccagagatttctctcccttcagattttgaacacacaattcatgtcggttttgatgctgtcacaggggagtttacgggaatgccagagcagtgggcccgcttgcttcagacatcaaatatcactaagtcggagcagaagaaaaacccgcaggctgttctggatgtgttggagttttacaactcgaagaagacatccaacagccagaaatacatgagctttacagataagtcagctgaggattacaattcttctaatgccttgaatgtgaaggctgtgtctgagactcctgcagtgccaccagtttcagaagatgaggatgatgatgatgatgatgttatccccaacaccagtgattgctccacgcccagagcacacaaaatctgtatacacacggtctgtgattgaaccacttcctgtcactccaactcgggacgtggctacatctcccatttcacctactgaaaataacaccactccaccagatgctttgacccggaatactgagaagcagaagaagaagcctaaaatgtctgatgaggagatcttggagaaattacgaagcatagtgagtgttgggcgataacatcgtgatgttatccccaacactacatacagcaaattttggtatttttaatagcgatggggtttcaccatgttggccaggatggtctcgaactcctgatctcaagtgatccgcccacctcagcctcccaaaatgtttggattacaggcatgagccaccacccctggcctggaccctctttttgacatgtgtgagcataggcagcaagcaaggccgtgcagagaaggggtgcttccagactgccc

SEQ ID NO: 329626 - DNA, 886 bp, Homo sapiens
gccacgaaggccacagacgccttcccccttggactctcattcccttttccacggagccccgcgctttcgtgagccccctcgaggaacctggtctccgcatccagttaccacctcctgcctcagaggccatctgagcccttcgcacctcgcccctcagtccccccttgcccccccgcggagatcgcctcgctccctcccgcccccccatcatcccttccctcgcagttcccctgtcctgaggggagccccgccacggcagcgacagcgggcaggagggagaaagtgaaggttgggcgacacttggccctcactcccggctaggcggcacccaccgccgggaggaggaggaggagccgagaggagctgagcgagcgcggaagtagctgctgctggtggtgacaatgtcaaataacggcctagacattcaagacaaacccccagcccctccgatgagaaataccagcactatgattggagccggcagcaaagatgctggaaccctaaaccatggttctaaacctctgcctccaaacccagaggagaagaaaaagaaggaccgattttaccgatccattttacctggagataaaacaaataaaaagaaagagaaagagcggccagagatttctctcccttcagattttgaacacacaattcatgtcggttttgatgctgtcacaggggagtttacgggaatgccagagcagtgggcccgcttgcttcagacatcaaatatcactaagtcggagcagaagaaaaacccgcaggctgttctggatgtgttggagttttacaactcgaagaagacatccaacagccagaaatacatgagctttacaggtatgagaactgcgtccagggcagtctcagcaagagatggttttaa

SEQ ID NO: 329627 - DNA, 1584 bp, Homo sapiens
tttaacttggggaagcataaaatattacaaatgaaggggattcttacctaatagaattgtcttcaactaatttcttttgttacagaatatttcttttagcttggggaatacaggatatttcttttagcttggggaagcataaaatattacagatgaaggggattcttatctaatagaattgtctttaactaatttcttttgatagttgtctagcctctattgaatatctttagtgctgagactctcacttcttttgtttacagtgagagtaaggaaggccattttacccagaatgggtgggcctgggcacagaggaggagtaatatagattttgacataagagaaaggatgagtttattggggtttgctctgtggatgttctaacctcacatctaggagaggttcccctatgctaacaaaggctggtcttgccaaaattttgcactaataatgcaggtatacacacggtctgtgattgaaccacttcctgtcactccaactcgggacgtggctacatctcccatttcacctactgaaaataacaccactccaccagatgctttgacccggaatactgagaagcagaagaagaagcctaaaatgtctgatgaggagatcttggagaaattacgaagcatagtgagtgttgggcgatcctaagaagaaatatacacggtttgagaagattggacaagggttagtaggggcattttctttccctggagaaatgactttaaagtgtgtgtgccggcatatatgattttgctttttttttgcctctcataaaccttgttcttctttctccactttacccctcacccatctggagttgttatgtgagactgacttgagatttggcagaattatgcttaatatgagagagatgccattagctgaccatgttgctaaaaatacccctgcagtgacagtgagagaacggttttttttcttagcacaaaaccaacttcccaaattacaactctgcttttccggatgaaccctgtttgtcctagtgctgagatccaccagcactaatataaaatggaagacccaaaactataaatccttctactactgtgataggacctgtttttctaggtagatgccagaatttatccttcttgcattcatccttctctgtatcttatatgctgccctcagtgtaatgaattcagcaagtcttaactgagttcctattgtgtgcaaggcactatgaattcagagacaatctctgcttccaaggacctcaagtcaacagaaaaagataggcaaacaattgtatagtcatatgttgcctaacaaaggggatatgttctgagaagtgcatccttaggcagttttgtcatgtgagcgtcatagagtgaacacaaaactaaatagtatagcctactacacacctaggctatatggtatagcctcttgctcctaggctacaagcctgtacagcatgttactgtactgaatactgtaggcattttacccatgtggttgttttcaacttgaacataggtaaatcgctaagataaaaagttttagtcggctaatgatgagtgtgatggatgcaaaaaaaggtttataggtttg

SEQ ID NO: 329628 - DNA, 412 bp, Homo sapiens
tcaatgaaaaccctctgagagtgagtgttaccagttctatttcaagttatttgggctgttgtctctagtcccaggaaataagaatccagggtgttctctgtggttttcaacctggagatcccttttctggatacaactagtcactgttgaacttaaagtataaatggccaaagaaaaggaatattagaagtcactcattcatttattcaacaattatttgagtccctgtcaagtgcaagaaactattctaatgaaaataaaataaattaatatgtagtaacagatggtaaatgctgtgagaaaaagcaaagtaagggagttaacagagtaatggaggaacaggtgtgctattttagagtagagagggaagttctctcttataagttattttattctgcagagttgggaagtc

SEQ ID NO: 329629 - DNA, 2331 bp, Homo sapiens
gccacgaaggccacagacgccttcccccttggactctcattcccttttccacggagccccgcgctttcgtgagccccctcgaggaacctggtctccgcatccagttaccacctcctgcctcagaggccatctgagcccttcgcacctcgcccctcagtccccccttgcccccccgcggagatcgcctcgctccctcccgcccccccatcatcccttccctcgcagttcccctgtcctgaggggagccccgccacggcagcgacagcgggcaggagggagaaagtgaaggttgggcgacacttggccctcactcccggctaggcggcacccaccgccgggaggaggaggaggagccgagaggagctgagcgagcgcggaagtagctgctgctggtggtgacaatgtcaaataacggcctagacattcaagacaaacccccagcccctccgatgagaaataccagcactatgattggagccggcagcaaagatgctggaaccctaaaccatggttctaaacctctgcctccaaacccagaggagaagaaaaagaaggaccgattttaccgatccattttacctggagataaaacaaataaaaagaaagagaaagagcggccagagatttctctcccttcagattttgaacacacaattcatgtcggttttgatgctgtcacaggggagtttacgggaatgccagagcagtgggcccgcttgcttcagacatcaaatatcactaagtcggagcagaagaaaaacccgcaggctgttctggatgtgttggagttttacaactcgaagaagacatccaacagccagaaatacatgagctttacagataagtcagctgaggattacaattcttctaatgccttgaatgtgaaggctgtgtctgagactcctgcagtgccaccagtttcagaagatgaggatgatgatgatgatgatgttatccccaacaccagtgattgctccacgcccagagcacacaaaatctgtatacacacggtctgtgattgaaccacttcctgtcactccaactcgggacgtggctacatctcccatttcacctactgaaaataacaccactccaccagatgctttgacccggaatactgagaagcagaagaagaagcctaaaatgtctgatgaggagatcttggagaaattacgaagcatagtgagtgttgggcgatcctaagaagaaatatacacggtttgagaagattggacaaggtgcttcaggcaccgtgtacacagcaatggatgtggccacaggacaggaggtggccattaagcagatgaatcttcagcagcagcccaagaaagagctgattattaatgagatcctggtcatgagggaaaacaagaacccaaacattgtgaattacttggacagttacctcgtgggagatgagctgtgggttgttatggaatacttggctggaggctccttgacagatgtggtgacagaaacttgcatggatgaaggccaaattgcagctgtgtgccgtgagtgtctgcaggctctggagttcttgcattcgaaccaggtcattcacagagacatcaagagtgacaatattctgttgggaatggatggctctgtcaagctaactgactttggattctgtgcacagataaccccagagcagagcaaacggagcaccatggtaggaaccccatactggatggcaccagaggttgtgacacgaaaggcctatgggcccaaggttgacatctggtccctgggcatcatggccatcgaaatgattgaaggggagcctccatacctcaatgaaaaccctctgagagccttgtacctcattgccaccaatgggaccccagaacttcagaacccagagaagctgtcagctatcttccgggactttctgaaccgctgtctcgagatggatgtggagaagagaggttcagctaaagagctgctacagcatcaattcctgaagattgccaagcccctctccagcctcactccactgattgctgcagctaaggaggcaacaaagaacaatcactaaaaccacactcaccccagcctcattgtgccaagccttctgtgagataaatgcacatttcagaaattccaactcctgatgccctcttctccttgccttgcttctcccatttcctgatctagcactcctcaagactttgatccttggaaaccgtgtgtccagcattgaagagaactgcaactgaatgactaatcagatgatggccatttctaaataaggaatttcctcccaattcatggatatgagggtggtttatgattaagggtttatataaataaatgtttctagtcttc

SEQ ID NO: 329630 - DNA, 432 bp, Homo sapiens
  misc_feature (37)..(37): n is a, c, g, or t
tatcgcccaacacacccagacgtatattaagcatgtnttaattctaacaaaataattttgttcttcctataactttattgccaaaaacatgtacaggaagaactaaaaaatataaaaaagacagacaatctatactatatgctggtgttggggataaatacgatgttatccccaacaccagtgattgctccacgcccagagcacacaaaatctgtatacacacggtctgtgattgaaccacttcctgtcactccaactcgggacgtggctacatctcccatttcacctactgaaaataacaccactccaccagatgctttgacccggaatactgagaagcagaagaagaagcctaaaatgtctgatgaggagatcttggagaaattacgaagcatagtgagtgttgggcgatacgtccggggtcccaagagc

SEQ ID NO: 329631 - DNA, 3347 bp, Homo sapiens
gccacgaaggccacagacgccttcccccttggactctcattcccttttccacggagccccgcgctttcgtgagccccctcgaggaacctggtctccgcatccagttaccacctcctgcctcagaggccatctgagcccttcgcacctcgcccctcagtccccccttgcccccccgcggagatcgcctcgctccctcccgcccccccatcatcccttccctcgcagttcccctgtcctgaggggagccccgccacggcagcgacagcgggcaggagggagaaagtgaaggttgggcgacacttggccctcactcccggctaggcggcacccaccgccgggaggaggaggaggagccgagaggagctgagcgagcgcggaagtagctgctgctggtggtgacaatgtcaaataacggcctagacattcaagacaaacccccagcccctccgatgagaaataccagcactatgattggagccggcagcaaagatgctggaaccctaaaccatggttctaaacctctgcctccaaacccagaggagaagaaaaagaaggaccgattttaccgatccattttacctggagataaaacaaataaaaagaaagagaaagagcggccagagatttctctcccttcagattttgaacacacaattcatgtcggttttgatgctgtcacaggggagtttacgggaatgccagagcagtgggcccgcttgcttcagacatcaaatatcactaagtcggagcagaagaaaaacccgcaggctgttctggatgtgttggagttttacaactcgaagaagacatccaacagccagaaatacatgagctttacagataagtcagctgaggattacaattcttctaatgccttgaatgtgaaggctgtgtctgagactcctgcagtgccaccagtttcagaagatgaggatgatgatgatgatgatgttatccccaacaccagtgattgctccacgcccagagcacacaaaatctgtatacacacggtctgtgattgaaccacttcctgtcactccaactcgggacgtggctacatctcccatttcacctactgaaaataacaccactccaccagatgctttgacccggaatactgagaagcagaagaagaagcctaaaatgtctgatgaggagatcttggagaaattacgaagcatagtgagtgttgggcgatcctaagaagaaatatacacggtttgagaagattggacaaggtgcttcaggcaccgtgtacacagcaatggatgtggccacaggacaggaggtggccattaagcagatgaatcttcagcagcagcccaagaaagagctgattattaatgagatcctggtcatgagggaaaacaagaacccaaacattgtgaattacttggacagttacctcgtgggagatgagctgtgggttgttatggaatacttggctggaggctccttgacagatgtggtgacagaaacttgcatggatgaaggccaaattgcagctgtgtgccgtgagtgtctgcaggctctggagttcttgcattcgaaccaggtcattcacagagacatcaagagtgacaatattctgttgggaatggatggctctgtcaagctaactgactttggattctgtgcacagataaccccagagcagagcaaacggagcaccatggtaggaaccccatactggatggcaccagaggttgtgacacgaaaggcctatgggcccaaggttgacatctggtccctgggcatcatggccatcgaaatgattgaaggggagcctccatacctcaatgaaaaccctctgagagccttgtacctcattgccaccaatgggaccccagaacttcagaacccagagaagctgtcagctatcttccgggactttctgaaccgctgtctcgagatggatgtggagaagagaggttcagctaaagagctgctacaggtgagaaaactgaggtttcaagtgtttagtaacttttccatgatagctgcatcaattcctgaagattgccaagcccctctccagcctcactccactgattgctgcagctaaggaggcaacaaagaacaatcactaaaaccacactcaccccagcctcattgtgccaagccttctgtgagataaatgcacatttcagaaattccaactcctgatgccctcttctccttgccttgcttctcccatttcctgatctagcactcctcaagactttgatccttggaaaccgtgtgtccagcattgaagagaactgcaactgaatgactaatcagatgatggccatttctaaataaggaatttcctcccaattcatggatatgagggtggtttatgattaagggtttatataaataaatgtttctagtcttccgtgtgtcaaaatcctcacctccttcataaccatctcccacaattaattcttgactatataaatttatggtttgataatattatcaatttgtaatcaattgagatttctttagtgcttgcttttctgtgactcaactgcccagacacctcattgtacttgaaaactggaacagcttgggaatgccatggggtttgataatctgccagggacatgaagaggctcagcttcctggaccatgactttggctcagctgatcctgacatgggagaacaaccacatttttctttgtgtgtgcttctagcagctgttcgggaggaccttgacccaatagtgttcccatgctgtttcttgtgaaatgctctcggctatgtagcagcttttgattccctgcataccctaggctgctgcccctatcctgtcccttgtttataacattgagaggttttctagggcacatactgagtgagagcagtgttgagaagtcggggaaaatggtgactacttttagagcaaggctgggcatcagcacctgtccagctctacttgtgtgatgtttcaggaactcagcccctttttctgcctaggataaggagctgaaagattaacttggatcttctaatggtccaaatcttttggtcacaataaagagtctccaaattagagactgcatgttagttctggatggatttggtggcctgacatgataccctgccagctgtgaggggaccccgtttttaagatgcatggccaagctctctgcaaatggaaatgcttacactgggtgttggggatgtttgctacctcctgctatttttgtggttttggttctcccactatggtaggacccctggccagcattgtggcttgtcatgtcagccccattgactaccttctcatgctctgaggtactactgcctctgcagcacaaatttctatttctgtcaataaaaggagatgaaaatattc

SEQ ID NO: 329632 - DNA, 3148 bp, Homo sapiens
gcgagagcgcgagcgtgctgcacctcgggagctggcggctgagctgccaggagcccagcccagctgaatcgagcggagccggtggagcaggggccttgtgggtacccggttgggcagggagaggtgcggctctgcgacggaaacaatcgccagagatgccggggctagccttccccaccagtagctgctgctggtggtgacaatgtcaaataacggcctagacattcaagacaaacccccagcccctccgatgagaaataccagcactatgattggagccggcagcaaagatgctggaaccctaaaccatggttctaaacctctgcctccaaacccagaggagaagaaaaagaaggaccgattttaccgatccattttacctggagataaaacaaataaaaagaaagagaaagagcggccagagatttctctcccttcagattttgaacacacaattcatgtcggttttgatgctgtcacaggggagtttacgggaatgccagagcagtgggcccgcttgcttcagacatcaaatatcactaagtcggagcagaagaaaaacccgcaggctgttctggatgtgttggagttttacaactcgaagaagacatccaacagccagaaatacatgagctttacagataagtcagctgaggattacaattcttctaatgccttgaatgtgaaggctgtgtctgagactcctgcagtgccaccagtttcagaagatgaggatgatgatgatgatgatgttatccccaacaccagtgattgctccacgcccagagcacacaaaatctgtatacacacggtctgtgattgaaccacttcctgtcactccaactcgggacgtggctacatctcccatttcacctactgaaaataacaccactccaccagatgctttgacccggaatactgagaagcagaagaagaagcctaaaatgtctgatgaggagatcttggagaaattacgaagcatagtgagtgttgggcgatcctaagaagaaatatacacggtttgagaagattggacaaggtgcttcaggcaccgtgtacacagcaatggatgtggccacaggacaggaggtggccattaagcagatgaatcttcagcagcagcccaagaaagagctgattattaatgagatcctggtcatgagggaaaacaagaacccaaacattgtgaattacttggacagttacctcgtgggagatgagctgtgggttgttatggaatacttggctggaggctccttgacagatgtggtgacagaaacttgcatggatgaaggccaaattgcagctgtgtgccgtgagtgtctgcaggctctggagttcttgcattcgaaccaggtcattcacagagacatcaagagtgacaatattctgttgggaatggatggctctgtcaagctaactgactttggattctgtgcacagataaccccagagcagagcaaacggagcaccatggtaggaaccccatactggatggcaccagaggttgtgacacgaaaggcctatgggcccaaggttgacatctggtccctgggcatcatggccatcgaaatgattgaaggggagcctccatacctcaatgaaaaccctctgagagccttgtacctcattgccaccaatgggaccccagaacttcagaacccagagaagctgtcagctatcttccgggactttctgaaccgctgtctcgagatggatgtggagaagagaggttcagctaaagagctgctacaggtgagaaaactgaggtttcaagtgtttagtaacttttccatgatagctgcatcaattcctgaagattgccaagcccctctccagcctcactccactgattgctgcagctaaggaggcaacaaagaacaatcactaaaaccacactcaccccagcctcattgtgccaagccttctgtgagataaatgcacatttcagaaattccaactcctgatgccctcttctccttgccttgcttctcccatttcctgatctagcactcctcaagactttgatccttggaaaccgtgtgtccagcattgaagagaactgcaactgaatgactaatcagatgatggccatttctaaataaggaatttcctcccaattcatggatatgagggtggtttatgattaagggtttatataaataaatgtttctagtcttccgtgtgtcaaaatcctcacctccttcataaccatctcccacaattaattcttgactatataaatttatggtttgataatattatcaatttgtaatcaattgagatttctttagtgcttgcttttctgtgactcaactgcccagacacctcattgtacttgaaaactggaacagcttgggaatgccatggggtttgataatctgccagggacatgaagaggctcagcttcctggaccatgactttggctcagctgatcctgacatgggagaacaaccacatttttctttgtgtgtgcttctagcagctgttcgggaggaccttgacccaatagtgttcccatgctgtttcttgtgaaatgctctcggctatgtagcagcttttgattccctgcataccctaggctgctgcccctatcctgtcccttgtttataacattgagaggttttctagggcacatactgagtgagagcagtgttgagaagtcggggaaaatggtgactacttttagagcaaggctgggcatcagcacctgtccagctctacttgtgtgatgtttcaggaactcagcccctttttctgcctaggataaggagctgaaagattaacttggatcttctaatggtccaaatcttttggtcacaataaagagtctccaaattagagactgcatgttagttctggatggatttggtggcctgacatgataccctgccagctgtgaggggaccccgtttttaagatgcatggccaagctctctgcaaatggaaatgcttacactgggtgttggggatgtttgctacctcctgctatttttgtggttttggttctcccactatggtaggacccctggccagcattgtggcttgtcatgtcagccccattgactaccttctcatgctctgaggtactactgcctctgcagcacaaatttctatttctgtcaataaaaggagatgaaaatattc

SEQ ID NO: 329633 - DNA, 3076 bp, Homo sapiens
gtagatctcagaggatccctggcatttaggtatctctgcgacggaattcaatcgccagagatgcggggctagccttccccaccagactgtcaaaccatcttttggagagtagctgctgctggtggtgacaatgtcaaataacggcctagacattcaagacaaacccccagcccctccgatgagaaataccagcactatgattggagccggcagcaaagatgctggaaccctaaaccatggttctaaacctctgcctccaaacccagaggagaagaaaaagaaggaccgattttaccgatccattttacctggagataaaacaaataaaaagaaagagaaagagcggccagagatttctctcccttcagattttgaacacacaattcatgtcggttttgatgctgtcacaggggagtttacgggaatgccagagcagtgggcccgcttgcttcagacatcaaatatcactaagtcggagcagaagaaaaacccgcaggctgttctggatgtgttggagttttacaactcgaagaagacatccaacagccagaaatacatgagctttacagataagtcagctgaggattacaattcttctaatgccttgaatgtgaaggctgtgtctgagactcctgcagtgccaccagtttcagaagatgaggatgatgatgatgatgatgttatccccaacaccagtgattgctccacgcccagagcacacaaaatctgtatacacacggtctgtgattgaaccacttcctgtcactccaactcgggacgtggctacatctcccatttcacctactgaaaataacaccactccaccagatgctttgacccggaatactgagaagcagaagaagaagcctaaaatgtctgatgaggagatcttggagaaattacgaagcatagtgagtgttgggcgatcctaagaagaaatatacacggtttgagaagattggacaaggtgcttcaggcaccgtgtacacagcaatggatgtggccacaggacaggaggtggccattaagcagatgaatcttcagcagcagcccaagaaagagctgattattaatgagatcctggtcatgagggaaaacaagaacccaaacattgtgaattacttggacagttacctcgtgggagatgagctgtgggttgttatggaatacttggctggaggctccttgacagatgtggtgacagaaacttgcatggatgaaggccaaattgcagctgtgtgccgtgagtgtctgcaggctctggagttcttgcattcgaaccaggtcattcacagagacatcaagagtgacaatattctgttgggaatggatggctctgtcaagctaactgactttggattctgtgcacagataaccccagagcagagcaaacggagcaccatggtaggaaccccatactggatggcaccagaggttgtgacacgaaaggcctatgggcccaaggttgacatctggtccctgggcatcatggccatcgaaatgattgaaggggagcctccatacctcaatgaaaaccctctgagagccttgtacctcattgccaccaatgggaccccagaacttcagaacccagagaagctgtcagctatcttccgggactttctgaaccgctgtctcgagatggatgtggagaagagaggttcagctaaagagctgctacaggtgagaaaactgaggtttcaagtgtttagtaacttttccatgatagctgcatcaattcctgaagattgccaagcccctctccagcctcactccactgattgctgcagctaaggaggcaacaaagaacaatcactaaaaccacactcaccccagcctcattgtgccaagccttctgtgagataaatgcacatttcagaaattccaactcctgatgccctcttctccttgccttgcttctcccatttcctgatctagcactcctcaagactttgatccttggaaaccgtgtgtccagcattgaagagaactgcaactgaatgactaatcagatgatggccatttctaaataaggaatttcctcccaattcatggatatgagggtggtttatgattaagggtttatataaataaatgtttctagtcttccgtgtgtcaaaatcctcacctccttcataaccatctcccacaattaattcttgactatataaatttatggtttgataatattatcaatttgtaatcaattgagatttctttagtgcttgcttttctgtgactcaactgcccagacacctcattgtacttgaaaactggaacagcttgggaatgccatggggtttgataatctgccagggacatgaagaggctcagcttcctggaccatgactttggctcagctgatcctgacatgggagaacaaccacatttttctttgtgtgtgcttctagcagctgttcgggaggaccttgacccaatagtgttcccatgctgtttcttgtgaaatgctctcggctatgtagcagcttttgattccctgcataccctaggctgctgcccctatcctgtcccttgtttataacattgagaggttttctagggcacatactgagtgagagcagtgttgagaagtcggggaaaatggtgactacttttagagcaaggctgggcatcagcacctgtccagctctacttgtgtgatgtttcaggaactcagcccctttttctgcctaggataaggagctgaaagattaacttggatcttctaatggtccaaatcttttggtcacaataaagagtctccaaattagagactgcatgttagttctggatggatttggtggcctgacatgataccctgccagctgtgaggggaccccgtttttaagatgcatggccaagctctctgcaaatggaaatgcttacactgggtgttggggatgtttgctacctcctgctatttttgtggttttggttctcccactatggtaggacccctggccagcattgtggcttgtcatgtcagccccattgactaccttctcatgctctgaggtactactgcctctgcagcacaaatttctatttctgtcaataaaaggagatgaaaatattc

SEQ ID NO: 329634 - DNA, 3250 bp, Homo sapiens
gccacgaaggccacagacgccttcccccttggactctcattcccttttccacggagccccgcgctttcgtgagccccctcgaggaacctggtctccgcatccagttaccacctcctgcctcagaggccatctgagcccttcgcacctcgcccctcagtccccccttgcccccccgcggagatcgcctcgctccctcccgcccccccatcatcccttccctcgcagttcccctgtcctgaggggagccccgccacggcagcgacagcgggcaggagggagaaagtgaaggttgggcgacacttggccctcactcccggctaggcggcacccaccgccgggaggaggaggaggagccgagaggagctgagcgagcgcggaagtagctgctgctggtggtgacaatgtcaaataccagcactatgattggagccggcagcaaagatgctggaaccctaaaccatggttctaaacctctgcctccaaacccagaggagaagaaaaagaaggaccgattttaccgatccattttacctggagataaaacaaataaaaagaaagagaaagagcggccagagatttctctcccttcagattttgaacacacaattcatgtcggttttgatgctgtcacaggggagtttacgggaatgccagagcagtgggcccgcttgcttcagacatcaaatatcactaagtcggagcagaagaaaaacccgcaggctgttctggatgtgttggagttttacaactcgaagaagacatccaacagccagaaatacatgagctttacagataagtcagctgaggattacaattcttctaatgccttgaatgtgaaggctgtgtctgagactcctgcagtgccaccagtttcagaagatgaggatgatgatgatgatgatgttatccccaacaccagtgattgctccacgcccagagcacacaaaatctgtatacacacggtctgtgattgaaccacttcctgtcactccaactcgggacgtggctacatctcccatttcacctactgaaaataacaccactccaccagatgctttgacccggaatactgagaagcagaagaagaagcctaaaatgtctgatgaggagatcttggagaaattacgaagcatagtgagtgttgggcgatcctaagaagaaatatacacggtttgagaagattggacaaggtgcttcaggcaccgtgtacacagcaatggatgtggccacaggacaggaggtggccattaagcagatgaatcttcagcagcagcccaagaaagagctgattattaatgagatcctggtcatgagggaaaacaagaacccaaacattgtgaattacttggacagttacctcgtgggagatgagctgtgggttgttatggaatacttggctggaggctccttgacagatgtggtgacagaaacttgcatggatgaaggccaaattgcagctgtgtgccgtgagtgtctgcaggctctggagttcttgcattcgaaccaggtcattcacagagacatcaagagtgacaatattctgttgggaatggatggctctgtcaagctaactgactttggattctgtgcacagataaccccagagcagagcaaacggagcaccatggtaggaaccccatactggatggcaccagaggttgtgacacgaaaggcctatgggcccaaggttgacatctggtccctgggcatcatggccatcgaaatgattgaaggggagcctccatacctcaatgaaaaccctctgagagccttgtacctcattgccaccaatgggaccccagaacttcagaacccagagaagctgtcagctatcttccgggactttctgaaccgctgtctcgagatggatgtggagaagagaggttcagctaaagagctgctacagcatcaattcctgaagattgccaagcccctctccagcctcactccactgattgctgcagctaaggaggcaacaaagaacaatcactaaaaccacactcaccccagcctcattgtgccaagccttctgtgagataaatgcacatttcagaaattccaactcctgatgccctcttctccttgccttgcttctcccatttcctgatctagcactcctcaagactttgatccttggaaaccgtgtgtccagcattgaagagaactgcaactgaatgactaatcagatgatggccatttctaaataaggaatttcctcccaattcatggatatgagggtggtttatgattaagggtttatataaataaatgtttctagtcttccgtgtgtcaaaatcctcacctccttcataaccatctcccacaattaattcttgactatataaatttatggtttgataatattatcaatttgtaatcaattgagatttctttagtgcttgcttttctgtgactcaactgcccagacacctcattgtacttgaaaactggaacagcttgggaatgccatggggtttgataatctgccagggacatgaagaggctcagcttcctggaccatgactttggctcagctgatcctgacatgggagaacaaccacatttttctttgtgtgtgcttctagcagctgttcgggaggaccttgacccaatagtgttcccatgctgtttcttgtgaaatgctctcggctatgtagcagcttttgattccctgcataccctaggctgctgcccctatcctgtcccttgtttataacattgagaggttttctagggcacatactgagtgagagcagtgttgagaagtcggggaaaatggtgactacttttagagcaaggctgggcatcagcacctgtccagctctacttgtgtgatgtttcaggaactcagcccctttttctgcctaggataaggagctgaaagattaacttggatcttctaatggtccaaatcttttggtcacaataaagagtctccaaattagagactgcatgttagttctggatggatttggtggcctgacatgataccctgccagctgtgaggggaccccgtttttaagatgcatggccaagctctctgcaaatggaaatgcttacactgggtgttggggatgtttgctacctcctgctatttttgtggttttggttctcccactatggtaggacccctggccagcattgtggcttgtcatgtcagccccattgactaccttctcatgctctgaggtactactgcctctgcagcacaaatttctatttctgtcaataaaaggagatgaaaatattc

SEQ ID NO: 329635 - DNA, 3772 bp, Homo sapiens
gccacgaaggccacagacgccttcccccttggactctcattcccttttccacggagccccgcgctttcgtgagccccctcgaggaacctggtctccgcatccagttaccacctcctgcctcagaggccatctgagcccttcgcacctcgcccctcagtccccccttgcccccccgcggagatcgcctcgctccctcccgcccccccatcatcccttccctcgcagttcccctgtcctgaggggagccccgccacggcagcgacagcgggcaggagggagaaagtgaaggttgggcgacacttggccctcactcccggctaggcggcacccaccgccgggaggaggaggaggagccgagaggagctgagcgagcgcggaagtagctgctgctggtggtgacaatgtcaaataacggcctagacattcaagacaaacccccagcccctccgatgagaaataccagcactatgattggagccggcagcaaagatgctggaaccctaaaccatggttctaaacctctgcctccaaacccagaggagaagaaaaagaaggaccgattttaccgatccattttacctggagataaaacaaataaaaagaaagagaaagagcggccagagatttctctcccttcagattttgaacacacaattcatgtcggttttgatgctgtcacaggggagtttacgggaatgccagagcagtgggcccgcttgcttcagacatcaaatatcactaagtcggagcagaagaaaaacccgcaggctgttctggatgtgttggagttttacaactcgaagaagacatccaacagccagaaatacatgagctttacagataagtcagctgaggattacaattcttctaatgccttgaatgtgaaggctgtgtctgagactcctgcagtgccaccagtttcagaagatgaggatgatgatgatgatgatgttatccccaacaccagtgattgctccacgcccagagcacacaaaatctgtatacacacggtctgtgattgaaccacttcctgtcactccaactcgggacgtggctacatctcccatttcacctactgaaaataacaccactccaccagatgctttgacccggaatactgagaagcagaagaagaagcctaaaatgtctgatgaggagatcttggagaaattacgaagcatagtgagtgttgggcgatcctaagaagaaatatacacggtttgagaagattggacaaggtgcttcaggcaccgtgtacacagcaatggatgtggccacaggacaggaggtggccattaagcagatgaatcttcagcagcagcccaagaaagagctgattattaatgagatcctggtcatgagggaaaacaagaacccaaacattgtgaattacttggacagttacctcgtgggagatgagctgtgggttgttatggaatacttggctggaggctccttgacagatgtggtgacagaaacttgcatggatgaaggccaaattgcagctgtgtgccgtgagtgtctgcaggctctggagttcttgcattcgaaccaggtcattcacagagacatcaagagtgacaatattctgttgggaatggatggctctgtcaagctaactgactttggattctgtgcacagataaccccagagcagagcaaacggagcaccatggtaggaaccccatactggatggcaccagaggttgtgacacgaaaggcctatgggcccaaggttgacatctggtccctgggcatcatggccatcgaaatgattgaaggggagcctccatacctcaatgaaaaccctctgagagccttgtacctcattgccaccaatgggaccccagaacttcagaacccagagaagctgtcagctatcttccgggactttctgaaccgctgtctcgagatggatgtggagaagagaggttcagctaaagagctgctacagcatcaattcctgaagattgccaagcccctctccagcctcactccactgattgctgcagctaaggaggcaacaaagaacaatcactaaaaccacactcaccccagcctcattgtgccaagccttctgtgagataaatgcacatttcagaaattccaactcctgatgccctcttctccttgccttgcttctcccatttcctgatctagcactcctcaagactttgatccttggaaaccgtgtgtccagcattgaagagaactgcaactgaatgactaatcagatgatggccatttctaaataaggaatttcctcccaattcatggatatgagggtggtttatgattaagggtttatataaataaatgtttctagtcttccgtgtgtcaaaatcctcacctccttcataaccatctcccacaattaattcttgactatataaatttatggtttgataatattatcaatttgtaatcaattgagatttctttagtgcttgcttttctgtgactcaactgcccagacacctcattgtacttgaaaactggaacagcttgggaatgccatggggtttgataatctgccagggacatgaagaggctcagcttcctggaccatgactttggctcagctgatcctgacatgggagaacaaccacatttttctttgtgtgtgcttctagcagctgttcgggaggaccttgacccaatagtgttcccatgctgtttcttgtgaaatgctctcggctatgtagcagcttttgattccctgcataccctaggctgctgcccctatcctgtcccttgtttataacattgagaggttttctagggcacatactgagtgagagcagtgttgagaagtcggggaaaatggtgactacttttagagcaaggctgggcatcagcacctgtccagctctacttgtgtgatgtttcaggaactcagcccctttttctgcctaggataaggagctgaaagattaacttggatcttctaatggtccaaatcttttggtcacaataaagagtctccaaattagagactgcatgttagttctggatggatttggtggcctgacatgataccctgccagctgtgaggggaccccgtttttaagatgcatggccaagctctctgcaaatggaaatgcttacactgggtgttggggatgtttgctacctcctgctatttttgtggttttggttctcccactatggtaggacccctggccagcattgtggcttgtcatgtcagccccattgactaccttctcatgctctgaggtactactgcctctgcagcacaaatttctatttctgtcaataaaaggagatgaaaatattctattggagtatgcctttcttttttctcttcgttttttctttccttttctaattttttatatgaaataatgagtagtttcttcctgaaccatttgagagtggtaagttgcagatagaatgcccctttaccactatatacctgaatgtgtattctttctttttaacacttttattttaaatataaattaagagaaatgggccaaaaccatttgtattgtttaaagaataattataaacacacttgtatccaccaaatcaagaaatggaacactgacagtaagaaccttctctatcttgtccttcctttctcattatagcccccacctaagaggtaaccaccatcttgacttttatttaaataactttcttgcttttctgtatactttcatcacattcaggtgtgttccaatacaagtagattttagttcggccagtttttgaactttaaataaacatatcataatagataaaaact

SEQ ID NO: 329636 - DNA, 2512 bp, Homo sapiens
  misc_feature (37)..(37): n is a, c, g, or t
tatcgcccaacacacccagacgtatattaagcatgtnttaattctaacaaaataattttgttcttcctataactttattgccaaaaacatgtacaggaagaactaaaaaatataaaaaagacagacaatctatactatatgctggtgttggggataaatacgatgttatccccaacaccagtgattgctccacgcccagagcacacaaaatctgtatacacacggtctgtgattgaaccacttcctgtcactccaactcgggacgtggctacatctcccatttcacctactgaaaataacaccactccaccagatgctttgacccggaatactgagaagcagaagaagaagcctaaaatgtctgatgaggagatcttggagaaattacgaagcatagtgagtgttgggcgatcctaagaagaaatatacacggtttgagaagattggacaaggtgcttcaggcaccgtgtacacagcaatggatgtggccacaggacaggaggtggccattaagcagatgaatcttcagcagcagcccaagaaagagctgattattaatgagatcctggtcatgagggaaaacaagaacccaaacattgtgaattacttggacagttacctcgtgggagatgagctgtgggttgttatggaatacttggctggaggctccttgacagatgtggtgacagaaacttgcatggatgaaggccaaattgcagctgtgtgccgtgagtgtctgcaggctctggagttcttgcattcgaaccaggtcattcacagagacatcaagagtgacaatattctgttgggaatggatggctctgtcaagctaactgactttggattctgtgcacagataaccccagagcagagcaaacggagcaccatggtaggaaccccatactggatggcaccagaggttgtgacacgaaaggcctatgggcccaaggttgacatctggtccctgggcatcatggccatcgaaatgattgaaggggagcctccatacctcaatgaaaaccctctgagagccttgtacctcattgccaccaatgggaccccagaacttcagaacccagagaagctgtcagctatcttccgggactttctgaaccgctgtctcgagatggatgtggagaagagaggttcagctaaagagctgctacagcatcaattcctgaagattgccaagcccctctccagcctcactccactgattgctgcagctaaggaggcaacaaagaacaatcactaaaaccacactcaccccagcctcattgtgccaagccttctgtgagataaatgcacatttcagaaattccaactcctgatgccctcttctccttgccttgcttctcccatttcctgatctagcactcctcaagactttgatccttggaaaccgtgtgtccagcattgaagagaactgcaactgaatgactaatcagatgatggccatttctaaataaggaatttcctcccaattcatggatatgagggtggtttatgattaagggtttatataaataaatgtttctagtcttccgtgtgtcaaaatcctcacctccttcataaccatctcccacaattaattcttgactatataaatttatggtttgataatattatcaatttgtaatcaattgagatttctttagtgcttgcttttctgtgactcaactgcccagacacctcattgtacttgaaaactggaacagcttgggaatgccatggggtttgataatctgccagggacatgaagaggctcagcttcctggaccatgactttggctcagctgatcctgacatgggagaacaaccacatttttctttgtgtgtgcttctagcagctgttcgggaggaccttgacccaatagtgttcccatgctgtttcttgtgaaatgctctcggctatgtagcagcttttgattccctgcataccctaggctgctgcccctatcctgtcccttgtttataacattgagaggttttctagggcacatactgagtgagagcagtgttgagaagtcggggaaaatggtgactacttttagagcaaggctgggcatcagcacctgtccagctctacttgtgtgatgtttcaggaactcagcccctttttctgcctaggataaggagctgaaagattaacttggatcttctaatggtccaaatcttttggtcacaataaagagtctccaaattagagactgcatgttagttctggatggatttggtggcctgacatgataccctgccagctgtgaggggaccccgtttttaagatgcatggccaagctctctgcaaatggaaatgcttacactgggtgttggggatgtttgctacctcctgctatttttgtggttttggttctcccactatggtaggacccctggccagcattgtggcttgtcatgtcagccccattgactaccttctcatgctctgaggtactactgcctctgcagcacaaatttctatttctgtcaataaaaggagatgaaaatattc

SEQ ID NO: 329637 - DNA, 2755 bp, Homo sapiens
tttaacttggggaagcataaaatattacaaatgaaggggattcttacctaatagaattgtcttcaactaatttcttttgttacagaatatttcttttagcttggggaatacaggatatttcttttagcttggggaagcataaaatattacagatgaaggggattcttatctaatagaattgtctttaactaatttcttttgatagttgtctagcctctattgaatatctttagtgctgagactctcacttcttttgtttacagtgagagtaaggaaggccattttacccagaatgggtgggcctgggcacagaggaggagtaatatagattttgacataagagaaaggatgagtttattggggtttgctctgtggatgttctaacctcacatctaggagaggttcccctatgctaacaaaggctggtcttgccaaaattttgcactaataatgcaggtatacacacggtctgtgattgaaccacttcctgtcactccaactcgggacgtggctacatctcccatttcacctactgaaaataacaccactccaccagatgctttgacccggaatactgagaagcagaagaagaagcctaaaatgtctgatgaggagatcttggagaaattacgaagcatagtgagtgttgggcgatcctaagaagaaatatacacggtttgagaagattggacaaggtgcttcaggcaccgtgtacacagcaatggatgtggccacaggacaggaggtggccattaagcagatgaatcttcagcagcagcccaagaaagagctgattattaatgagatcctggtcatgagggaaaacaagaacccaaacattgtgaattacttggacagttacctcgtgggagatgagctgtgggttgttatggaatacttggctggaggctccttgacagatgtggtgacagaaacttgcatggatgaaggccaaattgcagctgtgtgccgtgagtgtctgcaggctctggagttcttgcattcgaaccaggtcattcacagagacatcaagagtgacaatattctgttgggaatggatggctctgtcaagctaactgactttggattctgtgcacagataaccccagagcagagcaaacggagcaccatggtaggaaccccatactggatggcaccagaggttgtgacacgaaaggcctatgggcccaaggttgacatctggtccctgggcatcatggccatcgaaatgattgaaggggagcctccatacctcaatgaaaaccctctgagagccttgtacctcattgccaccaatgggaccccagaacttcagaacccagagaagctgtcagctatcttccgggactttctgaaccgctgtctcgagatggatgtggagaagagaggttcagctaaagagctgctacagcatcaattcctgaagattgccaagcccctctccagcctcactccactgattgctgcagctaaggaggcaacaaagaacaatcactaaaaccacactcaccccagcctcattgtgccaagccttctgtgagataaatgcacatttcagaaattccaactcctgatgccctcttctccttgccttgcttctcccatttcctgatctagcactcctcaagactttgatccttggaaaccgtgtgtccagcattgaagagaactgcaactgaatgactaatcagatgatggccatttctaaataaggaatttcctcccaattcatggatatgagggtggtttatgattaagggtttatataaataaatgtttctagtcttccgtgtgtcaaaatcctcacctccttcataaccatctcccacaattaattcttgactatataaatttatggtttgataatattatcaatttgtaatcaattgagatttctttagtgcttgcttttctgtgactcaactgcccagacacctcattgtacttgaaaactggaacagcttgggaatgccatggggtttgataatctgccagggacatgaagaggctcagcttcctggaccatgactttggctcagctgatcctgacatgggagaacaaccacatttttctttgtgtgtgcttctagcagctgttcgggaggaccttgacccaatagtgttcccatgctgtttcttgtgaaatgctctcggctatgtagcagcttttgattccctgcataccctaggctgctgcccctatcctgtcccttgtttataacattgagaggttttctagggcacatactgagtgagagcagtgttgagaagtcggggaaaatggtgactacttttagagcaaggctgggcatcagcacctgtccagctctacttgtgtgatgtttcaggaactcagcccctttttctgcctaggataaggagctgaaagattaacttggatcttctaatggtccaaatcttttggtcacaataaagagtctccaaattagagactgcatgttagttctggatggatttggtggcctgacatgataccctgccagctgtgaggggaccccgtttttaagatgcatggccaagctctctgcaaatggaaatgcttacactgggtgttggggatgtttgctacctcctgctatttttgtggttttggttctcccactatggtaggacccctggccagcattgtggcttgtcatgtcagccccattgactaccttctcatgctctgaggtactactgcctctgcagcacaaatttctatttctgtcaataaaaggagatgaaaatattc

SEQ ID NO: 329638 - DNA, 2988 bp, Homo sapiens
gccacgaaggccacagacgccttcccccttggactctcattcccttttccacggagccccgcgctttcgtgagccccctcgaggaacctggtctccgcatccagttaccacctcctgcctcagaggccatctgagcccttcgcacctcgcccctcagtccccccttgcccccccgcggagatcgcctcgctccctcccgcccccccatcatcccttccctcgcagttcccctgtcctgaggggagccccgccacggcagcgacagcgggcaggagggagaaagtgaaggttgggcgacacttggccctcactcccggctaggcggcacccaccgccgggaggaggaggaggagccgagaggagctgagcgagcgcggaagtagctgctgctggtggtgacaatgtcaaataacggcctagacattcaagacaaacccccagcccctccgatgagaaataccagcactatgattggagccggcagcaaagatgctggaaccctaaaccatggttctaaacctctgcctccaaacccagaggagaagaaaaagaaggaccgattttaccgatccattttacctggagataaaacaaataaaaagaaagagaaagagcggccagagatttctctcccttcagattttgaacacacaattcatgtcggttttgatgctgtcacaggggagtttacgggaatgccagagcagtgggcccgcttgcttcagacatcaaatatcactaagtcggagcagaagaaaaacccgcaggctgttctggatgtgttggagttttacaactcgaagaagacatccaacagccagaaatacatgagctttacagataagtcagctgaggattacaattcttctaatgccttgaatgtgaaggctgtgtctgagactcctgcagtgccaccagtttcagaagatgaggatgatgatgatgatgatgttatccccaacaccagtgattgctccacgcccagagcacacaaaatctgtatacacacggtctgtgattgaaccacttcctgtcactccaactcgggacgtggctacatctcccatttcacctactgaaaataacaccactccaccagatgctttgacccggaatactgagaagcagaagaagaagcctaaaatgtctgatgaggagatcttggagaaattacgaagcatagtgagtgttgggcgatcctaagaagaaatatacacggtttgagaagattggacaaggtgcttcaggcaccgtgtacacagcaatggatgtggccacaggacaggaggtggccattaagcagatgaatcttcagcagcagcccaagaaagagctgattattaatgagatcctggtcatgagggaaaacaagaacccaaacattgtgaattacttggacagttacctcgtgggagatgagctgtgggttgttatggaatacttggctggaggctccttgacagatgtggtgacagaaacttgcatggatgaaggccaaattgcagctgtgtgccgtgagtgtctgcaggctctggagttcttgcattcgaaccaggtcattcacagagacatcaagagtgacaatattctgttgggaatggatggctctgtcaagctaactgactttggattctgtgcacagataaccccagagcagagcaaacggagcaccatggtaggaaccccatactggatggcaccagaggttgtgacacgaaaggcctatgggcccaaggttgacatctggtccctgggcatcatggccatcgaaatgattgaaggggagcctccatacctcaatgaaaaccctctgagagccttgtacctcattgccaccaatgggaccccagaacttcagaacccagagaagctgtcagctatcttccgggactttctgaaccgctgtctcgagatggatgtggagaagagaggttcagctaaagagctgctacagcatcaattcctgaagattgccaagcccctctccagcctcactccactgattgctgcagctaaggaggcaacaaagaacaatcactaaaaccacactcaccccagcctcattgtgccaagccttctgtgagataaatgcacatttcagaaattccaactcctgatgccctcttctccttgccttgcttctcccatttcctgatctagcactcctcaagactttgatccttggaaaccgtgtgtccagcattgaagagaactgcaactgaatgactaatcagatgatggccatttctaaataaggaatttcctcccaattcatggatatgagggtggtttatgattaagggtttatataaataaatgtttctagtcttccgtgtgtcaaaatcctcacctccttcataaccatctcccacaattaattcttgactatataaatttatggtttgataatattatcaatttgtaatcaattgagatttctttagtgcttgcttttctgtgactcaactgcccagacacctcattgtacttgaaaactggaacagcttgggaatgccatggggtttgataatctgccagggacatgaagaggctcagcttcctggaccatgactttggctcagctgatcctgacatgggagaacaaccacatttttctttgtgtgtgcttctagcagctgttcgggaggaccttgacccaatagtgttcccatgctgtttcttgtgaaatgctctcggctatgtagcagcttttgattccctgcataccctaggctgctgcccctatcctgtcccttgtttataacattgagaggttttctagggcacatactgagtgagagcagtgttgagaagtcggggaaaatggtgactacttttagagcaaggctgggcatcagcacctgtccagctctacttgtgtgatgtttcaggaactcaccccattgactaccttctcatgctctgaggtactactgcctctgcagcacaaatttctatttctgtcaataaaaggagatgaaaatattc

SEQ ID NO: 329639 - DNA, 1439 bp, Homo sapiens
  misc_feature (1367)..(1367): n is a, c, g, or t
  misc_feature (1430)..(1430): n is a, c, g, or t
gccacgaaggccacagacgccttcccccttggactctcattcccttttccacggagccccgcgctttcgtgagccccctcgaggaacctggtctccgcatccagttaccacctcctgcctcagaggccatctgagcccttcgcacctcgcccctcagtccccccttgcccccccgcggagatcgcctcgctccctcccgcccccccatcatcccttccctcgcagttcccctgtcctgaggggagccccgccacggcagcgacagcgggcaggagggagaaagtgaaggttgggcgacacttggccctcactcccggctaggcggcacccaccgccgggaggaggaggaggagccgagaggagctgagcgagcgcggaagtagctgctgctggtggtgacaatgtcaaataacggcctagacattcaagacaaacccccagcccctccgatgagaaataccagcactatgattggagccggcagcaaagatgctggaaccctaaaccatggttctaaacctctgcctccaaacccagaggagaagaaaaagaaggaccgattttaccgatccattttacctggagataaaacaaataaaaagaaagagaaagagcggccagagatttctctcccttcagattttgaacacacaattcatgtcggttttgatgctgtcacaggggagtttacgggaatgccagagcagtgggcccgcttgcttcagacatcaaatatcactaagtcggagcagaagaaaaacccgcaggctgttctggatgtgttggagttttacaactcgaagaagacatccaacagccagaaatacatgagctttacagataagtcagctgaggattacaattcttctaatgccttgaatgtgaaggctgtgtctgagactcctgcagtgccaccagtttcagaagatgaggatgatgatgatgatgatgttatccccaacaccagtgattgctccacgcccagagcacacaaaatctgtatacacacggtctgtgattgaaccacttcctgtcactccaactcgggacgtggctacatctcccatttcacctactgaaaataacaccactccaccagatgctttgacccggaatactgagaagcagaagaagaagcctaaaatgtctgatgaggagatcttggagaaattacgaagcatagtggtgatgttatcgcccaacacacctgtaatcccaactactgtggagtctgaggtggcagaatcgcttgaacccaagaagcggatgtttcagtgagcagagatggtgccactgcacccagcctgtgtgacaaagcaagaccccatctcagtcaatcaatcaatctcagtggttgaactaccctngatatggttcagctctgtatccccagccaaatctcatgtcaaattgcaattcccagtgttggngataacata

SEQ ID NO: 329640 - DNA, 1218 bp, Homo sapiens
gccacgaaggccacagacgccttcccccttggactctcattcccttttccacggagccccgcgctttcgtgagccccctcgaggaacctggtctccgcatccagttaccacctcctgcctcagaggccatctgagcccttcgcacctcgcccctcagtccccccttgcccccccgcggagatcgcctcgctccctcccgcccccccatcatcccttccctcgcagttcccctgtcctgaggggagccccgccacggcagcgacagcgggcaggagggagaaagtgaaggttgggcgacacttggccctcactcccggctaggcggcacccaccgccgggaggaggaggaggagccgagaggagctgagcgagcgcggaagtagctgctgctggtggtgacaatgtcaaataacggcctagacattcaagacaaacccccagcccctccgatgagaaataccagcactatgattggagccggcagcaaagatgctggaaccctaaaccatggttctaaacctctgcctccaaacccagaggagaagaaaaagaaggaccgattttaccgatccattttacctggagataaaacaaataaaaagaaagagaaagagcggccagagatttctctcccttcagattttgaacacacaattcatgtcggttttgatgctgtcacaggggagtttacgggaatgccagagcagtgggcccgcttgcttcagacatcaaatatcactaagtcggagcagaagaaaaacccgcaggctgttctggatgtgttggagttttacaactcgaagaagacatccaacagccagaaatacatgagctttacagataagtcagctgaggattacaattcttctaatgccttgaatgtgaaggctgtgtctgagactcctgcagtgccaccagtttcagaagatgaggatgatgatgatgatgatgttatccccaacaccagtgattgctccacgcccagagcacacaaaatctgtatacacacggtctgtgattgaaccacttcctgtcactccaactcgggacgtggctacatctcccatttcacctactgaaaataacaccactccaccagatgctttgacccggaatactgagaagcagaagaagaagcctaaaatgtctgatgaggagatcttggagaaattacgaagcatagtgagtgttgggcgatacgtccggggtcccaagagc

SEQ ID NO: 329641 - DNA, 1362 bp, Homo sapiens
gcgagagcgcgagcgtgctgcacctcgggagctggcggctgagctgccaggagcccagcccagctgaatcgagcggagccggtggagcaggggccttgtgggtacccggttgggcagggagaggtgcggctctgcgacggaaacaatcgccagagatgccggggctagccttccccaccaggttggtggcgatacaaaaattgaaactggcctcagttgttgctctcaaatgcagatcaaggaatgtggacgctcatgtggtaagtattgtagaaggaagcacaaggggctgtgataatgcagaagagggcacttttgatttagcaagacagtggcagagctaggacctaaacttaagtcttctctgaaggtgatatctattctcttataccctgttatctcctgagtttgtgtatacatacagtgtacaaagagttttcctatatcctcttttctgcctacttttggggctagactctaggtactgctgacatgaaaaaaagaacaatcccatgtggcaggtcactgtgccatagccaaacaaacactcattaccttggaagggaaacagacttcgtccctgttaacttctggctcgaggccacttgggtgactatatgctgagctccctctctgagtcatttgatctcttccttcctttcctccctgttccatttacttaaattcaatttctggcgggttgcagagtccagagaccagatgcagctaggctaggcattttcgcttccactggcctctatagaatagggatttaacacctcatagggttggtgaggatcagatgaaataatgaatgcgtgaaaatgctttgtaaagtgctatatagatatcattgtggttgttcccgagtgcattttcaagccgtgaaaaattgctcagatgctatagcctgaaagcctagggttgccactgacaggcaagaataggcactcagtatagacaccaagatttactagaccctttctctgccctcgaaaaactcacagactaataggagaggattgaacctcaatcctccgtgagtaaaggaaaaggagtggggtagatagggctttaggactggtaatttagttccatggtcaaacaaaaaccacgaagtatgtgctttatttaaggtcgaacagatagtaggtggcaattataaaagatacttttagtgacttcttatgatgtaacacaaaaaggggaagggggacttaaaagtagattgacttcagttcaaatcctggttctaccacttactgttacctgatttttaatctttttaagcttcatgtataaaaatggaagatattcatacctactttgaagggttattataaagcttaaaaataatcatat

SEQ ID NO: 329642 - DNA, 148 bp, Homo sapiens
tggggcggggtggatcactccaaacttgtgtggtgtggtaactggagctcactgatgaaaccatgaacagttctggctgaaagaaccccacagtacactgaggtctgttggcatcgccgccagcaccgccccggtccctttgtgcgcg

SEQ ID NO: 329643 - DNA, 432 bp, Homo sapiens
gcaatctaggaggatgggacatcaagtgcaaaagctgagagaagagcgagcaaggcatgctggggtctgcatgcagccagagggctggaaccctgatggtaaggagtggagggaagagccagcaggcgcataatcaggaggggcccctgagtaccagggtcaggacttggagctcatctgcaaggtagtggggagttatagaaggagatagagctggagggttgggcgcagtagcttatgcctgtactcccagcactttgggaaggtgaggcaggagaatctctgaagcccagcagcagtccaagaccagcctgtgcaacataatgagaccctgtctactcgaaaatcaaaatcaaaatagccaggcacagtggtgcaagtccatagtcacagctgctctaaagcctgagatggagattgcggtgttcagga

SEQ ID NO: 329644 - DNA, 472 bp, Homo sapiens
caccgtttagcacgtggtatggagagatatgggcgatgttctcaggctgcttcgagcaggattaggggtggtgtgggaacctagagcgagcaaggcatgctggggtctgcatgcagccagagggctggaaccctgatggtaaggagtggagggaagagccagcaggcgcataatcaggaggggcccctgagtaccagggtcaggacttggagctcatctgcaaggtagtggggagttatagaaggagatagagctggagggttgggcgcagtagcttatgcctgtactcccagcactttgggaaggtgaggcaggagaatctctgaagcccagcagcagtccaagaccagcctgtgcaacataatgagaccctgtctactcgaaaatcaaaatcaaaatagccaggcacagtggtgcaagtccatagtcacagctgctctaaagcctgagatggagattgcggtgttcagga

SEQ ID NO: 329645 - DNA, 407 bp, Homo sapiens
caccacctgagtcctgcatgccacttctgtcctccaactaagagcggtggtgtagtttttaacagttcttacgtgtcctctgagggctatttcagaatcttctagactacagagagaaaacctgagatttccgttgttcacctaagggtctgtagagaatcttttttacatgaaggcccagattcttaacaaggtattcatgcctactaacgtacgagaacttcaggtttaggccactgatatcagccttccaatttccaccttaatagtgtgctaagtggagaatttcgagctcataaataaaagtatcgccaacccgactcaggtgaaagagcggatggaggtgtgtgagaatcaccagcactggcacacggtagtcaaagaggtaagagaactcggggggaaag

SEQ ID NO: 329646 - DNA, 3483 bp, Homo sapiens
caccacctgagtcctgcatgccacttctgtcctccaactaagagcggtggtgtagtttttaacagttcttacgtgtcctctgagggctatttcagaatcttctagactacagagagaaaacctgagatttccgttgttcacctaagggtctgtagagaatcttttttacatgaaggcccagattcttaacaaggtattcatgcctactaacgtacgagaacttcaggtttaggccactgatatcagccttccaatttccaccttaatagtgtgctaagtggagaatttcgagctcataaataaaagtatcgccaacccgactcaggtgaaagagcggatggaggtgtgtgagaatcaccagcactggcacacggtagtcaaagaggcatgtctgactcagggaatgaccttatatagctacggcatgctgctcccatgtggggtagaccagttccatggcactgaatatgtgtgctgccctcagacaaagattattggatctgtgtcaaaagaagaggaagaggaagatgaagaggaagaggaagaggaagatgaagaggaagactatgatgtttataaaagtgaatttcctactgaagcagatctggaagacttcacagaagcagctgtggatgaggatgatgaggatgaggaagaaggggaggaagtggtggaggaccgagattactactatgacaccttcaaaggagatgactacaatgaggagaatcctactgaacccggcagcgacggcaccatgtcagacaaggaaattactcatgatgtcaaagctgtctgctcccaggaggcgatgacggggccctgccgggccgtgatgcctcgttggtacttcgacctctccaagggaaagtgcgtgcgctttatatatggtggctgcggcggcaacaggaacaattttgagtctgaggattattgtatggctgtgtgtaaagcgatgattcctccaactcctctgccaaccaatgatgttgatgtgtatttcgagacctctgcagatgataatgagcatgctcgcttccagaaggctaaggagcagctggagattcggcaccgcaaccgaatggacagggtaaagaaggaatgggaagaggcagagcttcaagctaagaacctccccaaagcagagaggcagactctgattcagcacttccaagccatggttaaagctttagagaaggaagcagccagtgagaagcagcagctggtggagacccacctggcccgagtggaagctatgctgaatgaccgccgtcggatggctctggagaactacctggctgccttgcagtctgacccgccacggcctcatcgcattctccaggccttacggcgttatgtccgtgctgagaacaaagatcgcttacataccatccgtcattaccagcatgtgttggctgttgacccagaaaaggcggcccagatgaaatcccaggtgatgacacatctccacgtgattgaagaaaggaggaaccaaagcctctctctgctctacaaagtaccttatgtagcccaagaaattcaagaggaaattgatgagctccttcaggagcagcgtgcagatatggaccagttcactgcctcaatctcagagacccctgtggacgtccgggtgagctctgaggagagtgaggagatcccaccgttccaccccttccaccccttcccagccctacctgagaacgaaggatctggagtgggagagcaggatgggggactgatcggtgccgaagagaaagtgattaacagtaagaataaagtggatgaaaacatggtcattgacgagactctggatgttaaggaaatgattttcaatgccgagagagttggaggcctcgaggaagagcgggaatccgtgggcccactgcgggaggacttcagtctgagtagcagtgctctcattggcctgctggtcatcgcagtggccattgccacggtcatcgtcatcagcctggtgatgctgaggaagaggcagtatggcaccatcagccacgggatcgtggaggttgatccaatgctcaccccagaagagcgtcacctgaacaagatgcagaaccatggctatgagaaccccacctacaaatacctggagcagatgcagatttaggtggcagggagcgcggcagccctggcggagggatgcaggtgggccggaagatcccacgattccgatcgactgccaagcagcagccgctgccaggggctgcgtctgacatcctgacctcctggactgtaggactatataaagtactactgtagaactgcaatttccattcttttaaatgggtgaaaaatggtaatataacaatatatgatatataaaccttaaatgaaaaaaatgatctattgcagatatttgatgtagttttcttttttaaattaatcagaaaccccacttccattgtattgtctgacacatgctctcaatatataataaatgggaaatgtcgattttcaataatagacttatatgcaggctgtcgttccggttatgttgtgtaagtcaactcttcagcctcattcactgtcctggcttttatttaaagaaaaaaaaggcagtattccctttttaaatgagctttcaggaagttgctgagaaatggggtggaatagggaactgtaatggccactgaagcacgtgagagaccctcgcaaaatgatgtgaaaggaccagtttcttgaagtccagtgtttccacggctggatacctgtgtgtctccataaaagtcctgtcaccaaggacgttaaaggcattttattccagcgtcttctagagagcttagtgtatacagatgagggtgtccgctgctgctttccttcggaatccagtgcttccacagagattagcctgtagcttatatttgacattcttcactgtctgttgtttacctaccgtagctttttaccgttcacttccccttccaactatgtccagatgtgcaggctcctcctctctggactttctccaaaggcactgaccctcggcctctactttgtcccctcacctccaccccctcctgtcaccggccttgtgacattcactcagagaagaccacaccaaggaaggcggccgctggcccaggagagaacacggggaggtttgtttgtgtgaaaggaaagtagtccaggctgtccctgaaactgagtctgtggacactgtggaaagctttgaacaattgtgttttcgtcacaggagtctttgtaatgcttgtacagttgatgtcgatgctcactgcttctgctttttctttctttttattttaaatctgaaggttctggtaacctgtggtgtatttttattttcctgtgactgtttttgttttgtttttttcctttttcctcccctttgaccctattcatgtctctacccactatgcacagattaaacttcacctacaaactccttaatatgatctgtggagaatgtacacagtttaaacacatcaataaatactttaacttcca

SEQ ID NO: 329647 - DNA, 3315 bp, Homo sapiens
caccacctgagtcctgcatgccacttctgtcctccaactaagagcggtggtgtagtttttaacagttcttacgtgtcctctgagggctatttcagaatcttctagactacagagagaaaacctgagatttccgttgttcacctaagggtctgtagagaatcttttttacatgaaggcccagattcttaacaaggtattcatgcctactaacgtacgagaacttcaggtttaggccactgatatcagccttccaatttccaccttaatagtgtgctaagtggagaatttcgagctcataaataaaagtatcgccaacccgactcaggtgaaagagcggatggaggtgtgtgagaatcaccagcactggcacacggtagtcaaagaggcatgtctgactcagggaatgaccttatatagctacggcatgctgctcccatgtggggtagaccagttccatggcactgaatatgtgtgctgccctcagacaaagattattggatctgtgtcaaaagaagaggaagaggaagatgaagaggaagaggaagaggaagatgaagaggaagactatgatgtttataaaagtgaatttcctactgaagcagatctggaagacttcacagaagcagctgtggatgaggatgatgaggatgaggaagaaggggaggaagtggtggaggaccgagattactactatgacaccttcaaaggagatgactacaatgaggagaatcctactgaacccggcagcgacggcaccatgtcagacaaggaaattactcatgatgtcaaagttcctccaactcctctgccaaccaatgatgttgatgtgtatttcgagacctctgcagatgataatgagcatgctcgcttccagaaggctaaggagcagctggagattcggcaccgcaaccgaatggacagggtaaagaaggaatgggaagaggcagagcttcaagctaagaacctccccaaagcagagaggcagactctgattcagcacttccaagccatggttaaagctttagagaaggaagcagccagtgagaagcagcagctggtggagacccacctggcccgagtggaagctatgctgaatgaccgccgtcggatggctctggagaactacctggctgccttgcagtctgacccgccacggcctcatcgcattctccaggccttacggcgttatgtccgtgctgagaacaaagatcgcttacataccatccgtcattaccagcatgtgttggctgttgacccagaaaaggcggcccagatgaaatcccaggtgatgacacatctccacgtgattgaagaaaggaggaaccaaagcctctctctgctctacaaagtaccttatgtagcccaagaaattcaagaggaaattgatgagctccttcaggagcagcgtgcagatatggaccagttcactgcctcaatctcagagacccctgtggacgtccgggtgagctctgaggagagtgaggagatcccaccgttccaccccttccaccccttcccagccctacctgagaacgaaggatctggagtgggagagcaggatgggggactgatcggtgccgaagagaaagtgattaacagtaagaataaagtggatgaaaacatggtcattgacgagactctggatgttaaggaaatgattttcaatgccgagagagttggaggcctcgaggaagagcgggaatccgtgggcccactgcgggaggacttcagtctgagtagcagtgctctcattggcctgctggtcatcgcagtggccattgccacggtcatcgtcatcagcctggtgatgctgaggaagaggcagtatggcaccatcagccacgggatcgtggaggttgatccaatgctcaccccagaagagcgtcacctgaacaagatgcagaaccatggctatgagaaccccacctacaaatacctggagcagatgcagatttaggtggcagggagcgcggcagccctggcggagggatgcaggtgggccggaagatcccacgattccgatcgactgccaagcagcagccgctgccaggggctgcgtctgacatcctgacctcctggactgtaggactatataaagtactactgtagaactgcaatttccattcttttaaatgggtgaaaaatggtaatataacaatatatgatatataaaccttaaatgaaaaaaatgatctattgcagatatttgatgtagttttcttttttaaattaatcagaaaccccacttccattgtattgtctgacacatgctctcaatatataataaatgggaaatgtcgattttcaataatagacttatatgcaggctgtcgttccggttatgttgtgtaagtcaactcttcagcctcattcactgtcctggcttttatttaaagaaaaaaaaggcagtattccctttttaaatgagctttcaggaagttgctgagaaatggggtggaatagggaactgtaatggccactgaagcacgtgagagaccctcgcaaaatgatgtgaaaggaccagtttcttgaagtccagtgtttccacggctggatacctgtgtgtctccataaaagtcctgtcaccaaggacgttaaaggcattttattccagcgtcttctagagagcttagtgtatacagatgagggtgtccgctgctgctttccttcggaatccagtgcttccacagagattagcctgtagcttatatttgacattcttcactgtctgttgtttacctaccgtagctttttaccgttcacttccccttccaactatgtccagatgtgcaggctcctcctctctggactttctccaaaggcactgaccctcggcctctactttgtcccctcacctccaccccctcctgtcaccggccttgtgacattcactcagagaagaccacaccaaggaaggcggccgctggcccaggagagaacacggggaggtttgtttgtgtgaaaggaaagtagtccaggctgtccctgaaactgagtctgtggacactgtggaaagctttgaacaattgtgttttcgtcacaggagtctttgtaatgcttgtacagttgatgtcgatgctcactgcttctgctttttctttctttttattttaaatctgaaggttctggtaacctgtggtgtatttttattttcctgtgactgtttttgttttgtttttttcctttttcctcccctttgaccctattcatgtctctacccactatgcacagattaaacttcacctacaaactccttaatatgatctgtggagaatgtacacagtttaaacacatcaataaatactttaacttcca

SEQ ID NO: 329648 - DNA, 3629 bp, Homo sapiens
  misc_feature (591)..(591): n is a, c, g, or t
caccacctgagtcctgcatgccacttctgtcctccaactaagagcggtggtgtagtttttaacagttcttacgtgtcctctgagggctatttcagaatcttctagactacagagagaaaacctgagatttccgttgttcacctaagggtctgtagagaatcttttttacatgaaggcccagattcttaacaaggtattcatgcctactaacgtacgagaacttcaggtttaggccactgatatcagccttccaatttccaccttaatagtgtgctaagtggagaatttcgagctcataaataaaagtatcgccaacccgactcaggtgaaagagcggatggaggtgtgtgagaatcaccagcactggcacacggtagtcaaagaggcatgtctgactcagggaatgaccttatatagctacggcatgctgctcccatgtggggtagaccagttccatggcactgaatatgtgtgctgccctcagacaaagattattggatctgtgtcaaaagaagaggaagaggaagatgaagaggaagaggaagaggaagatgaagaggaagactatgatgtttataaaagtgaatttcntactgaagcagatctggaagacttcacagaagcagctgtggatgaggatgatgaggatgaggaagaaggggaggaagtggtggaggaccccgggaacaagtatgacacatccttacacatccgtaaggataaacgagtgaatttcctactgaagcagatctggaagacttcacagaagcagctgtggatgaggatgatgaggatgaggaagaaggggaggaagtggtggaggaccgagattactactatgacaccttcaaaggagatgactacaatgaggagaatcctactgaacccggcagcgacggcaccatgtcagacaaggaaattactcatgatgtcaaagctgtctgctcccaggaggcgatgacggggccctgccgggccgtgatgcctcgttggtacttcgacctctccaagggaaagtgcgtgcgctttatatatggtggctgcggcggcaacaggaacaattttgagtctgaggattattgtatggctgtgtgtaaagcgatgattcctccaactcctctgccaaccaatgatgttgatgtgtatttcgagacctctgcagatgataatgagcatgctcgcttccagaaggctaaggagcagctggagattcggcaccgcaaccgaatggacagggtaaagaaggaatgggaagaggcagagcttcaagctaagaacctccccaaagcagagaggcagactctgattcagcacttccaagccatggttaaagctttagagaaggaagcagccagtgagaagcagcagctggtggagacccacctggcccgagtggaagctatgctgaatgaccgccgtcggatggctctggagaactacctggctgccttgcagtctgacccgccacggcctcatcgcattctccaggccttacggcgttatgtccgtgctgagaacaaagatcgcttacataccatccgtcattaccagcatgtgttggctgttgacccagaaaaggcggcccagatgaaatcccaggtgatgacacatctccacgtgattgaagaaaggaggaaccaaagcctctctctgctctacaaagtaccttatgtagcccaagaaattcaagaggaaattgatgagctccttcaggagcagcgtgcagatatggaccagttcactgcctcaatctcagagacccctgtggacgtccgggtgagctctgaggagagtgaggagatcccaccgttccaccccttccaccccttcccagccctacctgagaacgaaggatctggagtgggagagcaggatgggggactgatcggtgccgaagagaaagtgattaacagtaagaataaagtggatgaaaacatggtcattgacgagactctggatgttaaggaaatgattttcaatgccgagagagttggaggcctcgaggaagagcgggaatccgtgggcccactgcgggaggacttcagtctgagtagcagtgctctcattggcctgctggtcatcgcagtggccattgccacggtcatcgtcatcagcctggtgatgctgaggaagaggcagtatggcaccatcagccacgggatcgtggaggttgatccaatgctcaccccagaagagcgtcacctgaacaagatgcagaaccatggctatgagaaccccacctacaaatacctggagcagatgcagatttaggtggcagggagcgcggcagccctggcggagggatgcaggtgggccggaagatcccacgattccgatcgactgccaagcagcagccgctgccaggggctgcgtctgacatcctgacctcctggactgtaggactatataaagtactactgtagaactgcaatttccattcttttaaatgggtgaaaaatggtaatataacaatatatgatatataaaccttaaatgaaaaaaatgatctattgcagatatttgatgtagttttcttttttaaattaatcagaaaccccacttccattgtattgtctgacacatgctctcaatatataataaatgggaaatgtcgattttcaataatagacttatatgcaggctgtcgttccggttatgttgtgtaagtcaactcttcagcctcattcactgtcctggcttttatttaaagaaaaaaaaggcagtattccctttttaaatgagctttcaggaagttgctgagaaatggggtggaatagggaactgtaatggccactgaagcacgtgagagaccctcgcaaaatgatgtgaaaggaccagtttcttgaagtccagtgtttccacggctggatacctgtgtgtctccataaaagtcctgtcaccaaggacgttaaaggcattttattccagcgtcttctagagagcttagtgtatacagatgagggtgtccgctgctgctttccttcggaatccagtgcttccacagagattagcctgtagcttatatttgacattcttcactgtctgttgtttacctaccgtagctttttaccgttcacttccccttccaactatgtccagatgtgcaggctcctcctctctggactttctccaaaggcactgaccctcggcctctactttgtcccctcacctccaccccctcctgtcaccggccttgtgacattcactcagagaagaccacaccaaggaaggcggccgctggcccaggagagaacacggggaggtttgtttgtgtgaaaggaaagtagtccaggctgtccctgaaactgagtctgtggacactgtggaaagctttgaacaattgtgttttcgtcacaggagtctttgtaatgcttgtacagttgatgtcgatgctcactgcttctgctttttctttctttttattttaaatctgaaggttctggtaacctgtggtgtatttttattttcctgtgactgtttttgttttgtttttttcctttttcctcccctttgaccctattcatgtctctacccactatgcacagattaaacttcacctacaaactccttaatatgatctgtggagaatgtacacagtttaaacacatcaataaatactttaacttcca

SEQ ID NO: 329649 - DNA, 3351 bp, Homo sapiens
caccacctgagtcctgcatgccacttctgtcctccaactaagagcggtggtgtagtttttaacagttcttacgtgtcctctgagggctatttcagaatcttctagactacagagagaaaacctgagatttccgttgttcacctaagggtctgtagagaatcttttttacatgaaggcccagattcttaacaaggtattcatgcctactaacgtacgagaacttcaggtttaggccactgatatcagccttccaatttccaccttaatagtgtgctaagtggagaatttcgagctcataaataaaagtatcgccaacccgactcaggtgaaagagcggatggaggtgtgtgagaatcaccagcactggcacacggtagtcaaagaggcatgtctgactcagggaatgaccttatatagctacggcatgctgctcccatgtggggtagaccagttccatggcactgaatatgtgtgctgccctcagacaaagattattggatctgtgtcaaaagaagaggaagaggaagatgaagaggaagaggaagaggaagatgaagaggaagactatgatgtttataaaagtgaatttcctactgaagcagatctggaagacttcacagaagcagctgtggatgaggatgatgaggatgaggaagaaggggaggaagtggtggaggaccgagattactactatgacaccttcaaaggagatgactacaatgaggagaatcctactgaacccggcagcgacggcaccatgtcagacaaggaaattactcatgatgtcaaagttcctccaactcctctgccaaccaatgatgttgatgtgtatttcgagacctctgcagatgataatgagcatgctcgcttccagaaggctaaggagcagctggagattcggcaccgcaaccgaatggacagggtaaagaaggaatgggaagaggcagagcttcaagctaagaacctccccaaagcagagaggcagactctgattcagcacttccaagccatggttaaagctttagagaaggaagcagccagtgagaagcagcagctggtggagacccacctggcccgagtggaagctatgctgaatgaccgccgtcggatggctctggagaactacctggctgccttgcagtctgacccgccacggcctcatcgcattctccaggccttacggcgttatgtccgtgctgagaacaaagatcgcttacataccatccgtcattaccagcatgtgttggctgttgacccagaaaaggcggcccagatgaaatcccaggtgatgacacatctccacgtgattgaagaaaggaggaaccaaagcctctctctgctctacaaagtaccttatgtagcccaagaaattcaagaggaaattgatgagctccttcaggagcagcgtgcagatatggaccagttcactgcctcaatctcagagacccctgtggacgtccgggtgagctctgaggagagtgaggagatcccaccgttccaccccttccaccccttcccagccctacctgagaacgaagacactcagccggagttgtaccacccaatgaaaaaaggatctggagtgggagagcaggatgggggactgatcggtgccgaagagaaagtgattaacagtaagaataaagtggatgaaaacatggtcattgacgagactctggatgttaaggaaatgattttcaatgccgagagagttggaggcctcgaggaagagcgggaatccgtgggcccactgcgggaggacttcagtctgagtagcagtgctctcattggcctgctggtcatcgcagtggccattgccacggtcatcgtcatcagcctggtgatgctgaggaagaggcagtatggcaccatcagccacgggatcgtggaggttgatccaatgctcaccccagaagagcgtcacctgaacaagatgcagaaccatggctatgagaaccccacctacaaatacctggagcagatgcagatttaggtggcagggagcgcggcagccctggcggagggatgcaggtgggccggaagatcccacgattccgatcgactgccaagcagcagccgctgccaggggctgcgtctgacatcctgacctcctggactgtaggactatataaagtactactgtagaactgcaatttccattcttttaaatgggtgaaaaatggtaatataacaatatatgatatataaaccttaaatgaaaaaaatgatctattgcagatatttgatgtagttttcttttttaaattaatcagaaaccccacttccattgtattgtctgacacatgctctcaatatataataaatgggaaatgtcgattttcaataatagacttatatgcaggctgtcgttccggttatgttgtgtaagtcaactcttcagcctcattcactgtcctggcttttatttaaagaaaaaaaaggcagtattccctttttaaatgagctttcaggaagttgctgagaaatggggtggaatagggaactgtaatggccactgaagcacgtgagagaccctcgcaaaatgatgtgaaaggaccagtttcttgaagtccagtgtttccacggctggatacctgtgtgtctccataaaagtcctgtcaccaaggacgttaaaggcattttattccagcgtcttctagagagcttagtgtatacagatgagggtgtccgctgctgctttccttcggaatccagtgcttccacagagattagcctgtagcttatatttgacattcttcactgtctgttgtttacctaccgtagctttttaccgttcacttccccttccaactatgtccagatgtgcaggctcctcctctctggactttctccaaaggcactgaccctcggcctctactttgtcccctcacctccaccccctcctgtcaccggccttgtgacattcactcagagaagaccacaccaaggaaggcggccgctggcccaggagagaacacggggaggtttgtttgtgtgaaaggaaagtagtccaggctgtccctgaaactgagtctgtggacactgtggaaagctttgaacaattgtgttttcgtcacaggagtctttgtaatgcttgtacagttgatgtcgatgctcactgcttctgctttttctttctttttattttaaatctgaaggttctggtaacctgtggtgtatttttattttcctgtgactgtttttgttttgtttttttcctttttcctcccctttgaccctattcatgtctctacccactatgcacagattaaacttcacctacaaactccttaatatgatctgtggagaatgtacacagtttaaacacatcaataaatactttaacttcca

SEQ ID NO: 329650 - DNA, 3399 bp, Homo sapiens
caccacctgagtcctgcatgccacttctgtcctccaactaagagcggtggtgtagtttttaacagttcttacgtgtcctctgagggctatttcagaatcttctagactacagagagaaaacctgagatttccgttgttcacctaagggtctgtagagaatcttttttacatgaaggcccagattcttaacaaggtattcatgcctactaacgtacgagaacttcaggtttaggccactgatatcagccttccaatttccaccttaatagtgtgctaagtggagaatttcgagctcataaataaaagtatcgccaacccgactcaggtgaaagagcggatggaggtgtgtgagaatcaccagcactggcacacggtagtcaaagaggcatgtctgactcagggaatgaccttatatagctacggcatgctgctcccatgtggggtagaccagttccatggcactgaatatgtgtgctgccctcagacaaagattattggatctgtgtcaaaagaagaggaagaggaagatgaagaggaagaggaagaggaagatgaagaggaagactatgatgtttataaaagtgaatttcctactgaagcagatctggaagacttcacagaagcagctgtggatgaggatgatgaggatgaggaagaaggggaggaagtggtggaggaccgagattactactatgacaccttcaaaggagatgactacaatgaggagaatcctactgaacccggcagcgacggcaccatgtcagacaaggaaattactcatgatgtcaaagttcctccaactcctctgccaaccaatgatgttgatgtgtatttcgagacctctgcagatgataatgagcatgctcgcttccagaaggctaaggagcagctggagattcggcaccgcaaccgaatggacagggtaaagaaggaatgggaagaggcagagcttcaagctaagaacctccccaaagcagagaggcagactctgattcagcacttccaagccatggttaaagctttagagaaggaagcagccagtgagaagcagcagctggtggagacccacctggcccgagtggaagctatgctgaatgaccgccgtcggatggctctggagaactacctggctgccttgcagtctgacccgccacggcctcatcgcattctccaggccttacggcgttatgtccgtgctgagaacaaagatcgcttacataccatccgtcattaccagcatgtgttggctgttgacccagaaaaggcggcccagatgaaatcccaggtgatgacacatctccacgtgattgaagaaaggaggaaccaaagcctctctctgctctacaaagtaccttatgtagcccaagaaattcaagaggaaattgatgagctccttcaggagcagcgtgcagatatggaccagttcactgcctcaatctcagagacccctgtggacgtccgggtgagctctgaggagagtgaggagatcccaccgttccaccccttccaccccttcccagccctacctgagaacgaagacactcagccggagttgtaccacccaatgaaaaaagcccatgtgatttcattacctgagttgtcggtgtcacgggatcccccaggatctggagtgggagagcaggatgggggactgatcggtgccgaagagaaagtgattaacagtaagaataaagtggatgaaaacatggtcattgacgagactctggatgttaaggaaatgattttcaatgccgagagagttggaggcctcgaggaagagcgggaatccgtgggcccactgcgggaggacttcagtctgagtagcagtgctctcattggcctgctggtcatcgcagtggccattgccacggtcatcgtcatcagcctggtgatgctgaggaagaggcagtatggcaccatcagccacgggatcgtggaggttgatccaatgctcaccccagaagagcgtcacctgaacaagatgcagaaccatggctatgagaaccccacctacaaatacctggagcagatgcagatttaggtggcagggagcgcggcagccctggcggagggatgcaggtgggccggaagatcccacgattccgatcgactgccaagcagcagccgctgccaggggctgcgtctgacatcctgacctcctggactgtaggactatataaagtactactgtagaactgcaatttccattcttttaaatgggtgaaaaatggtaatataacaatatatgatatataaaccttaaatgaaaaaaatgatctattgcagatatttgatgtagttttcttttttaaattaatcagaaaccccacttccattgtattgtctgacacatgctctcaatatataataaatgggaaatgtcgattttcaataatagacttatatgcaggctgtcgttccggttatgttgtgtaagtcaactcttcagcctcattcactgtcctggcttttatttaaagaaaaaaaaggcagtattccctttttaaatgagctttcaggaagttgctgagaaatggggtggaatagggaactgtaatggccactgaagcacgtgagagaccctcgcaaaatgatgtgaaaggaccagtttcttgaagtccagtgtttccacggctggatacctgtgtgtctccataaaagtcctgtcaccaaggacgttaaaggcattttattccagcgtcttctagagagcttagtgtatacagatgagggtgtccgctgctgctttccttcggaatccagtgcttccacagagattagcctgtagcttatatttgacattcttcactgtctgttgtttacctaccgtagctttttaccgttcacttccccttccaactatgtccagatgtgcaggctcctcctctctggactttctccaaaggcactgaccctcggcctctactttgtcccctcacctccaccccctcctgtcaccggccttgtgacattcactcagagaagaccacaccaaggaaggcggccgctggcccaggagagaacacggggaggtttgtttgtgtgaaaggaaagtagtccaggctgtccctgaaactgagtctgtggacactgtggaaagctttgaacaattgtgttttcgtcacaggagtctttgtaatgcttgtacagttgatgtcgatgctcactgcttctgctttttctttctttttattttaaatctgaaggttctggtaacctgtggtgtatttttattttcctgtgactgtttttgttttgtttttttcctttttcctcccctttgaccctattcatgtctctacccactatgcacagattaaacttcacctacaaactccttaatatgatctgtggagaatgtacacagtttaaacacatcaataaatactttaacttcca

SEQ ID NO: 329651 - DNA, 3289 bp, Homo sapiens
caccacctgagtcctgcatgccacttctgtcctccaactaagagcggtggtgtagtttttaacagttcttacgtgtcctctgagggctatttcagaatcttctagactacagagagaaaacctgagatttccgttgttcacctaagggtctgtagagaatcttttttacatgaaggcccagattcttaacaaggtattcatgcctactaacgtacgagaacttcaggtttaggccactgatatcagccttccaatttccaccttaatagtgtgctaagtggagaatttcgagctcataaataaaagtatcgccaacccgactcaggtgaaagagcggatggaggtgtgtgagaatcaccagcactggcacacggtagtcaaagaggcatgtctgactcagggaatgaccttatatagctacggcatgctgctcccatgtggggtagaccagttccatggcactgaatatgtgtgctgccctcagacaaagattattggatctgtgtcaaaagaagaggaagaggaagatgaagaggaagaggaagaggaagatgaagaggaagactatgatgtttataaaagtgaatttcctactgaagcagatctggaagacttcacagaagcagctgtggatgaggatgatgaggatgaggaagaaggggaggaagtggtggaggaccgagattactactatgacaccttcaaaggagatgactacaatgaggagaatcctactgaacccggcagcgacggcaccatgtcagacaaggaaattactcatgatgtcaaagttcctccaactcctctgccaaccaatgatgttgatgtgtatttcgagacctctgcagatgataatgagcatgctcgcttccagaaggctaaggagcagctggagattcggcaccgcaaccgaatggacagggtaaagaaggaatgggaagaggcagagcttcaagctaagaacctccccaaagcagagaggcagactctgattcagcacttccaagccatggttaaagctttagagaaggaagcagccagtgagaagcagcagctggtggagacccacctggcccgagtggaagctatgctgaatgaccgccgtcggatggctctggagaactacctggctgccttgcagtctgacccgccacggcctcatcgcattctccaggccttacggcgttatgtccgtgctgagaacaaagatcgcttacataccatccgtcattaccagcatgtgttggctgttgacccagaaaaggcggcccagatgaaatcccaggtgatgacacatctccacgtgattgaagaaaggaggaaccaaagcctctctctgctctacaaagtaccttatgtagcccaagaaattcaagaggaaattgatgagctccttcaggagcagcgtgcagatatggaccagttcactgcctcaatctcagagacccctgtggacgtccgggtgagctctgaggagagtgaggagatcccaccgttccaccccttccaccccttcccagccctacctgagaacgaaggatctggagtgggagagcaggatgggggactgatcggtgccgaagagaaagtgattaacagtcattgacgagactctggatgttaaggaaatgattttcaatgccgagagagttggaggcctcgaggaagagcgggaatccgtgggcccactgcgggaggacttcagtctgagtagcagtgctctcattggcctgctggtcatcgcagtggccattgccacggtcatcgtcatcagcctggtgatgctgaggaagaggcagtatggcaccatcagccacgggatcgtggaggttgatccaatgctcaccccagaagagcgtcacctgaacaagatgcagaaccatggctatgagaaccccacctacaaatacctggagcagatgcagatttaggtggcagggagcgcggcagccctggcggagggatgcaggtgggccggaagatcccacgattccgatcgactgccaagcagcagccgctgccaggggctgcgtctgacatcctgacctcctggactgtaggactatataaagtactactgtagaactgcaatttccattcttttaaatgggtgaaaaatggtaatataacaatatatgatatataaaccttaaatgaaaaaaatgatctattgcagatatttgatgtagttttcttttttaaattaatcagaaaccccacttccattgtattgtctgacacatgctctcaatatataataaatgggaaatgtcgattttcaataatagacttatatgcaggctgtcgttccggttatgttgtgtaagtcaactcttcagcctcattcactgtcctggcttttatttaaagaaaaaaaaggcagtattccctttttaaatgagctttcaggaagttgctgagaaatggggtggaatagggaactgtaatggccactgaagcacgtgagagaccctcgcaaaatgatgtgaaaggaccagtttcttgaagtccagtgtttccacggctggatacctgtgtgtctccataaaagtcctgtcaccaaggacgttaaaggcattttattccagcgtcttctagagagcttagtgtatacagatgagggtgtccgctgctgctttccttcggaatccagtgcttccacagagattagcctgtagcttatatttgacattcttcactgtctgttgtttacctaccgtagctttttaccgttcacttccccttccaactatgtccagatgtgcaggctcctcctctctggactttctccaaaggcactgaccctcggcctctactttgtcccctcacctccaccccctcctgtcaccggccttgtgacattcactcagagaagaccacaccaaggaaggcggccgctggcccaggagagaacacggggaggtttgtttgtgtgaaaggaaagtagtccaggctgtccctgaaactgagtctgtggacactgtggaaagctttgaacaattgtgttttcgtcacaggagtctttgtaatgcttgtacagttgatgtcgatgctcactgcttctgctttttctttctttttattttaaatctgaaggttctggtaacctgtggtgtatttttattttcctgtgactgtttttgttttgtttttttcctttttcctcccctttgaccctattcatgtctctacccactatgcacagattaaacttcacctacaaactccttaatatgatctgtggagaatgtacacagtttaaacacatcaataaatactttaacttcca

SEQ ID NO: 329652 - DNA, 3162 bp, Homo sapiens
caccacctgagtcctgcatgccacttctgtcctccaactaagagcggtggtgtagtttttaacagttcttacgtgtcctctgagggctatttcagaatcttctagactacagagagaaaacctgagatttccgttgttcacctaagggtctgtagagaatcttttttacatgaaggcccagattcttaacaaggtattcatgcctactaacgtacgagaacttcaggtttaggccactgatatcagccttccaatttccaccttaatagtgtgctaagtggagaatttcgagctcataaataaaagtatcgccaacccgactcaggtgaaagagcggatggaggtgtgtgagaatcaccagcactggcacacggtagtcaaagaggcatgtctgactcagggaatgaccttatatagctacggcatgctgctcccatgtggggtagaccagttccatggcactgaatatgtgtgctgccctcagacaaagattattggatctgtgtcaaaagaagaggaagaggaagatgaagaggaagaggaagaggaagatgaagaggaagactatgatgtttataaaagtgaatttcctactgaagcagatctggaagacttcacagaagcagctgtggatgaggatgatgaggatgaggaagaaggggaggaagtggtggaggaccgagattactactatgacaccttcaaaggagatgactacaatgaggagaatcctactgaacccggcagcgacggcaccatgtcagacaaggaaattactcatgatgtcaaagttcctccaactcctctgccaaccaatgatgttgatgtgtatttcgagacctctgcagatgataatgagcatgctcgcttccagaaggctaaggagcagctggagattcggcaccgcaaccgaatggacagggtaaagaaggaatgggaagaggcagagcttcaagctaagaacctccccaaagcagagaggcagactctgattcagcacttccaagccatggttaaagctttagagaaggaagcagccagtgagaagcagcagctggtggagacccacctggcccgagtggaagctatgctgaatgaccgccgtcggatggctctggagaactacctggctgccttgcagtctgacccgccacggcctcatcgcattctccaggccttacggcgttatgtccgtgctgagaacaaagatcgcttacataccatccgtcattaccagcatgtgttggctgttgacccagaaaaggcggcccagatgaaatcccaggtgatgacacatctccacgtgattgaagaaaggaggaaccaaagcctctctctgctctacaaagtaccttatgtagcccaagaaattcaagaggaaattggatctggagtgggagagcaggatgggggactgatcggtgccgaagagaaagtgattaacagtaagaataaagtggatgaaaacatggtcattgacgagactctggatgttaaggaaatgattttcaatgccgagagagttggaggcctcgaggaagagcgggaatccgtgggcccactgcgggaggacttcagtctgagtagcagtgctctcattggcctgctggtcatcgcagtggccattgccacggtcatcgtcatcagcctggtgatgctgaggaagaggcagtatggcaccatcagccacgggatcgtggaggttgatccaatgctcaccccagaagagcgtcacctgaacaagatgcagaaccatggctatgagaaccccacctacaaatacctggagcagatgcagatttaggtggcagggagcgcggcagccctggcggagggatgcaggtgggccggaagatcccacgattccgatcgactgccaagcagcagccgctgccaggggctgcgtctgacatcctgacctcctggactgtaggactatataaagtactactgtagaactgcaatttccattcttttaaatgggtgaaaaatggtaatataacaatatatgatatataaaccttaaatgaaaaaaatgatctattgcagatatttgatgtagttttcttttttaaattaatcagaaaccccacttccattgtattgtctgacacatgctctcaatatataataaatgggaaatgtcgattttcaataatagacttatatgcaggctgtcgttccggttatgttgtgtaagtcaactcttcagcctcattcactgtcctggcttttatttaaagaaaaaaaaggcagtattccctttttaaatgagctttcaggaagttgctgagaaatggggtggaatagggaactgtaatggccactgaagcacgtgagagaccctcgcaaaatgatgtgaaaggaccagtttcttgaagtccagtgtttccacggctggatacctgtgtgtctccataaaagtcctgtcaccaaggacgttaaaggcattttattccagcgtcttctagagagcttagtgtatacagatgagggtgtccgctgctgctttccttcggaatccagtgcttccacagagattagcctgtagcttatatttgacattcttcactgtctgttgtttacctaccgtagctttttaccgttcacttccccttccaactatgtccagatgtgcaggctcctcctctctggactttctccaaaggcactgaccctcggcctctactttgtcccctcacctccaccccctcctgtcaccggccttgtgacattcactcagagaagaccacaccaaggaaggcggccgctggcccaggagagaacacggggaggtttgtttgtgtgaaaggaaagtagtccaggctgtccctgaaactgagtctgtggacactgtggaaagctttgaacaattgtgttttcgtcacaggagtctttgtaatgcttgtacagttgatgtcgatgctcactgcttctgctttttctttctttttattttaaatctgaaggttctggtaacctgtggtgtatttttattttcctgtgactgtttttgttttgtttttttcctttttcctcccctttgaccctattcatgtctctacccactatgcacagattaaacttcacctacaaactccttaatatgatctgtggagaatgtacacagtttaaacacatcaataaatactttaacttcca

SEQ ID NO: 329653 - DNA, 3084 bp, Homo sapiens
caccacctgagtcctgcatgccacttctgtcctccaactaagagcggtggtgtagtttttaacagttcttacgtgtcctctgagggctatttcagaatcttctagactacagagagaaaacctgagatttccgttgttcacctaagggtctgtagagaatcttttttacatgaaggcccagattcttaacaaggtattcatgcctactaacgtacgagaacttcaggtttaggccactgatatcagccttccaatttccaccttaatagtgtgctaagtggagaatttcgagctcataaataaaagtatcgccaacccgactcaggtgaaagagcggatggaggtgtgtgagaatcaccagcactggcacacggtagtcaaagaggcatgtctgactcagggaatgaccttatatagctacggcatgctgctcccatgtggggtagaccagttccatggcactgaatatgtgtgctgccctcagacaaagattattggatctgtgtcaaaagaagaggaagaggaagatgaagaggaagaggaagaggaagatgaagaggaagactatgatgtttataaaagtgaatttcctactgaagcagatctggaagacttcacagaagcagctgtggatgaggatgatgaggatgaggaagaaggggaggaagtggtggaggaccgagattactactatgacaccttcaaaggagatgactacaatgaggagaatcctactgaacccggcagcgacggcaccatgtcagacaaggaaattactcatgatgtcaaagttcctccaactcctctgccaaccaatgatgttgatgtgtatttcgagacctctgcagatgataatgagcatgctcgcttccagaaggctaaggagcagctggagattcggcaccgcaaccgaatggacagggtaaagaaggaatgggaagaggcagagcttcaagctaagaacctccccaaagcagagaggcagactctgattcagcacttccaagccatggttaaagctttagagaaggaagcagccagtgagaagcagcagctggtggagacccacctggcccgagtggaagctatgctgaatgaccgccgtcggatggctctggagaactacctggctgccttgcagtctgacccgccacggcctcatcgcattctccaggccttacggcgttatgtccgtgctgagaacaaagatcgcttacataccatccgtcattaccagcatgtgttggctgttgacccagaaaaggcggcccagatgaaatcccaggtgatgacacatctccacgtgattgaagaaaggaggaaccaaagcctctctctgctctacaaagtaccttatgtagcccaagaaattcaagaggaaattgatgagctccttcaggagcagcgtgcagatatggaccagttcactgcctcaatctcagagacccctgtggacgtccgggtgagctctgaggagagtgaggagatcccaccgttccaccccttccaccccttcccagccctacctgagaacgaaggatctggagtgggagagcaggatgggggactgatcggtgccgaagagaaagtgattaacagtaagaataaagtggatgaaaacatggttgatccaatgctcaccccagaagagcgtcacctgaacaagatgcagaaccatggctatgagaaccccacctacaaatacctggagcagatgcagatttaggtggcagggagcgcggcagccctggcggagggatgcaggtgggccggaagatcccacgattccgatcgactgccaagcagcagccgctgccaggggctgcgtctgacatcctgacctcctggactgtaggactatataaagtactactgtagaactgcaatttccattcttttaaatgggtgaaaaatggtaatataacaatatatgatatataaaccttaaatgaaaaaaatgatctattgcagatatttgatgtagttttcttttttaaattaatcagaaaccccacttccattgtattgtctgacacatgctctcaatatataataaatgggaaatgtcgattttcaataatagacttatatgcaggctgtcgttccggttatgttgtgtaagtcaactcttcagcctcattcactgtcctggcttttatttaaagaaaaaaaaggcagtattccctttttaaatgagctttcaggaagttgctgagaaatggggtggaatagggaactgtaatggccactgaagcacgtgagagaccctcgcaaaatgatgtgaaaggaccagtttcttgaagtccagtgtttccacggctggatacctgtgtgtctccataaaagtcctgtcaccaaggacgttaaaggcattttattccagcgtcttctagagagcttagtgtatacagatgagggtgtccgctgctgctttccttcggaatccagtgcttccacagagattagcctgtagcttatatttgacattcttcactgtctgttgtttacctaccgtagctttttaccgttcacttccccttccaactatgtccagatgtgcaggctcctcctctctggactttctccaaaggcactgaccctcggcctctactttgtcccctcacctccaccccctcctgtcaccggccttgtgacattcactcagagaagaccacaccaaggaaggcggccgctggcccaggagagaacacggggaggtttgtttgtgtgaaaggaaagtagtccaggctgtccctgaaactgagtctgtggacactgtggaaagctttgaacaattgtgttttcgtcacaggagtctttgtaatgcttgtacagttgatgtcgatgctcactgcttctgctttttctttctttttattttaaatctgaaggttctggtaacctgtggtgtatttttattttcctgtgactgtttttgttttgtttttttcctttttcctcccctttgaccctattcatgtctctacccactatgcacagattaaacttcacctacaaactccttaatatgatctgtggagaatgtacacagtttaaacacatcaataaatactttaacttcca

SEQ ID NO: 329654 - DNA, 3060 bp, Homo sapiens
caccacctgagtcctgcatgccacttctgtcctccaactaagagcggtggtgtagtttttaacagttcttacgtgtcctctgagggctatttcagaatcttctagactacagagagaaaacctgagatttccgttgttcacctaagggtctgtagagaatcttttttacatgaaggcccagattcttaacaaggtattcatgcctactaacgtacgagaacttcaggtttaggccactgatatcagccttccaatttccaccttaatagtgtgctaagtggagaatttcgagctcataaataaaagtatcgccaacccgactcaggtgaaagagcggatggaggtgtgtgagaatcaccagcactggcacacggtagtcaaagaggcatgtctgactcagggaatgaccttatatagctacggcatgctgctcccatgtggggtagaccagttccatggcactgaatatgtgtgctgccctcagacaaagattattggatctgtgtcaaaagaagaggaagaggaagatgaagaggaagaggaagaggaagatgaagaggaagactatgatgtttataaaagtgaatttcctactgaagcagatctggaagacttcacagaagcagctgtggatgaggatgatgaggatgaggaagaaggggaggaagtggtggaggaccgagattactactatgacaccttcaaaggagatgactacaatgaggagaatcctactgaacccggcagcgacggcaccatgtcagacaaggaaattactcatgatgtcaaagctgtctgctcccaggaggcgatgacggggccctgccgggccgtgatgcctcgttggtacttcgacctctccaagggaaagtgcgtgcgctttatatatggtggctgcggcggcaacaggaacaattttgagtctgaggattattgtatggctgtgtgtaaagcgatgattcctccaactcctctgccaaccaatgatgttgatgtgtatttcgagacctctgcagatgataatgagcatgctcgcttccagaaggctaaggagcagctggagattcggcaccgcaaccgaatggacagggtaaagaaggaatgggaagaggcagagcttcaagctaagaacctccccaaagcagagaggcagactctgattcagcacttccaagccatggttaaagctttagagaaggaagcagccagtgagaagcagcagctggtggagacccacctggcccgagtggaagctatgctgaatgaccgccgtcggatggctctggagaactacctggctgccttgcagtctgacccgccacggcctcatcgcattctccaggccttacggcgttatgtccgtgctgagaacaaagatcgcttacataccatccgtcattaccagcatgtgttggctgttgacccagaaaaggcggcccagatgaaatcccaggtgatgacacatctccacgtgattgaagaaaggaggaaccaaagcctctctctgctctacaaagtaccttatgtagcccaagaaattcaagaggaaattgatgagctccttcaggagcagcgtgcagatatggaccagttcactgcctcaatctcagagacccctgtggacgtccgggtgagctctgaggagagtgaggagatcccaccgttccaccccttccaccccttcccagccctacctgagaacgaaggatctggagtgggagagcaggatgggggactgatcggtgccgaagagaaagtgattaacagtaagaataaagtggatgaaaacatggtcattgacgagactctggatgttaaggaaatgattttcaatgccgagagagttggaggcctcgaggaagagcgggaatccgtgggcccactgcgggaggacttcagtctgagtagcagtgctctcattggcctgctggtcatcgcagtggccattgccacggtcatcgtcatcagcctggtgatgctgaggaagaggcagtatggcaccatcagccacgggatcgtggaggttgatccaatgctcaccccagaagagcgtcacctgaacaagatgcagaaccatggctatgagaaccccacctacaaatacctggagcagatgcagatttaggtggcagggagcgcggcagccctggcggagggatgcaggtgggccggaagatcccacgattccgatcgactgccaagcagcagccgctgccaggggctgcgtctgacatcctgacctcctggactgtaggactatataaagtactactgtagaactgcaatttccattcttttaaatgggtgaaaaatggtaatataacaatatatgatatataaaccttaaatgaaaaaaatgatctattgcagatatttgatgtagttttcttttttaaattaatcagaaaccccacttccattgtattgtctgacacatgctctcaatatataataaatgggaaatgtcgattttcaataatagacttatatgcaggctgtcgttccggttatgttgtgtaagtcaactcttcagcctcattcactgtcctggcttttatttaaagaaaaaaaaggcagtattccctttttaaatgagctttcaggaagttgctgagaaatggggtggaatagggaactgtaatggccactgaagcacgtgagagaccctcgcaaaatgatgtgaaaggaccagtttcttgaagtccagtgtttccacggctggatacctgtgtgtctccataaaagtcctgtcaccaaggacgttaaaggcattttattccagcgtcttctagagagcttagtgtatacagatgagggtgtccgctgctgctttccttcggaatccagtgcttccacagagattagcctgtagcttatatttgacattcttcactgtctgttgtttacctaccgtagctttttaccgttcacttccccttccaactatgtccagatgttacactgtaggagttggattcttgtgccaggggttgaggctgcagtgagccacagtcacgccactgcattctatcctgggcaacagatggagaccttgtctca

SEQ ID NO: 329655 - DNA, 3059 bp, Homo sapiens
  misc_feature (2956)..(2956): n is a, c, g, or t
caccacctgagtcctgcatgccacttctgtcctccaactaagagcggtggtgtagtttttaacagttcttacgtgtcctctgagggctatttcagaatcttctagactacagagagaaaacctgagatttccgttgttcacctaagggtctgtagagaatcttttttacatgaaggcccagattcttaacaaggtattcatgcctactaacgtacgagaacttcaggtttaggccactgatatcagccttccaatttccaccttaatagtgtgctaagtggagaatttcgagctcataaataaaagtatcgccaacccgactcaggtgaaagagcggatggaggtgtgtgagaatcaccagcactggcacacggtagtcaaagaggcatgtctgactcagggaatgaccttatatagctacggcatgctgctcccatgtggggtagaccagttccatggcactgaatatgtgtgctgccctcagacaaagattattggatctgtgtcaaaagaagaggaagaggaagatgaagaggaagaggaagaggaagatgaagaggaagactatgatgtttataaaagtgaatttcctactgaagcagatctggaagacttcacagaagcagctgtggatgaggatgatgaggatgaggaagaaggggaggaagtggtggaggaccgagattactactatgacaccttcaaaggagatgactacaatgaggagaatcctactgaacccggcagcgacggcaccatgtcagacaaggaaattactcatgatgtcaaagctgtctgctcccaggaggcgatgacggggccctgccgggccgtgatgcctcgttggtacttcgacctctccaagggaaagtgcgtgcgctttatatatggtggctgcggcggcaacaggaacaattttgagtctgaggattattgtatggctgtgtgtaaagcgatgattcctccaactcctctgccaaccaatgatgttgatgtgtatttcgagacctctgcagatgataatgagcatgctcgcttccagaaggctaaggagcagctggagattcggcaccgcaaccgaatggacagggtaaagaaggaatgggaagaggcagagcttcaagctaagaacctccccaaagcagagaggcagactctgattcagcacttccaagccatggttaaagctttagagaaggaagcagccagtgagaagcagcagctggtggagacccacctggcccgagtggaagctatgctgaatgaccgccgtcggatggctctggagaactacctggctgccttgcagtctgacccgccacggcctcatcgcattctccaggccttacggcgttatgtccgtgctgagaacaaagatcgcttacataccatccgtcattaccagcatgtgttggctgttgacccagaaaaggcggcccagatgaaatcccaggtgatgacacatctccacgtgattgaagaaaggaggaaccaaagcctctctctgctctacaaagtaccttatgtagcccaagaaattcaagaggaaattgatgagctccttcaggagcagcgtgcagatatggaccagttcactgcctcaatctcagagacccctgtggacgtccgggtgagctctgaggagagtgaggagatcccaccgttccaccccttccaccccttcccagccctacctgagaacgaaggatctggagtgggagagcaggatgggggactgatcggtgccgaagagaaagtgattaacagtaagaataaagtggatgaaaacatggtcattgacgagactctggatgttaaggaaatgattttcaatgccgagagagttggaggcctcgaggaagagcgggaatccgtgggcccactgcgggaggacttcagtctgagtagcagtgctctcattggcctgctggtcatcgcagtggccattgccacggtcatcgtcatcagcctggtgatgctgaggaagaggcagtatggcaccatcagccacgggatcgtggaggttgatccaatgctcaccccagaagagcgtcacctgaacaagatgcagaaccatggctatgagaaccccacctacaaatacctggagcagatgcagatttaggtggcagggagcgcggcagccctggcggagggatgcaggtgggccggaagatcccacgattccgatcgactgccaagcagcagccgctgccaggggctgcgtctgacatcctgacctcctggactgtaggactatataaagtactactgtagaactgcaatttccattcttttaaatgggtgaaaaatggtaatataacaatatatgatatataaaccttaaatgaaaaaaatgatctattgcagatatttgatgtagttttcttttttaaattaatcagaaaccccacttccattgtattgtctgacacatgctctcaatatataataaatgggaaatgtcgattttcaataatagacttatatgcaggctgtcgttccggttatgttgtgtaagtcaactcttcagcctcattcactgtcctggcttttatttaaagaaaaaaaaggcagtattccctttttaaatgagctttcaggaagttgctgagaaatggggtggaatagggaactgtaatggccactgaagcacgtgagagaccctcgcaaaatgatgtgaaaggaccagtttcttgaagtccagtgtttccacggctggatacctgtgtgtctccataaaagtcctgtcaccaaggacgttaaaggcattttattccagcgtcttctagagagcttagtgtatacagatgagggtgtccgctgctgctttccttcggaatccagtgcttccacagagattagcctgtagcttatatttgacattcttcactgtctgttgtttacctaccgtagctttttaccgttcacttcgcagtactagttttctgtatgntcataacaaaaaggttccattgactcatggttctacaggctgtaaaaaaaaaagcacagtagcttggggaattgtaagtaaggcatcatcggattttcgagcg

SEQ ID NO: 329656 - DNA, 2993 bp, Homo sapiens
caccacctgagtcctgcatgccacttctgtcctccaactaagagcggtggtgtagtttttaacagttcttacgtgtcctctgagggctatttcagaatcttctagactacagagagaaaacctgagatttccgttgttcacctaagggtctgtagagaatcttttttacatgaaggcccagattcttaacaaggtattcatgcctactaacgtacgagaacttcaggtttaggccactgatatcagccttccaatttccaccttaatagtgtgctaagtggagaatttcgagctcataaataaaagtatcgccaacccgactcaggtgaaagagcggatggaggtgtgtgagaatcaccagcactggcacacggtagtcaaagaggcatgtctgactcagggaatgaccttatatagctacggcatgctgctcccatgtggggtagaccagttccatggcactgaatatgtgtgctgccctcagacaaagattattggatctgtgtcaaaagaagaggaagaggaagatgaagaggaagaggaagaggaagatgaagaggaagactatgatgtttataaaagtgaatttcctactgaagcagatctggaagacttcacagaagcagctgtggatgaggatgatgaggatgaggaagaaggggaggaagtggtggaggaccgagattactactatgacaccttcaaaggagatgactacaatgaggagaatcctactgaacccggcagcgacggcaccatgtcagacaaggaaattactcatgatgtcaaagctgtctgctcccaggaggcgatgacggggccctgccgggccgtgatgcctcgttggtacttcgacctctccaagggaaagtgcgtgcgctttatatatggtggctgcggcggcaacaggaacaattttgagtctgaggattattgtatggctgtgtgtaaagcgatgattcctccaactcctctgccaaccaatgatgttgatgtgtatttcgagacctctgcagatgataatgagcatgctcgcttccagaaggctaaggagcagctggagattcggcaccgcaaccgaatggacagggtaaagaaggaatgggaagaggcagagcttcaagctaagaacctccccaaagcagagaggcagactctgattcagcacttccaagccatggttaaagctttagagaaggaagcagccagtgagaagcagcagctggtggagacccacctggcccgagtggaagctatgctgaatgaccgccgtcggatggctctggagaactacctggctgccttgcagtctgacccgccacggcctcatcgcattctccaggccttacggcgttatgtccgtgctgagaacaaagatcgcttacataccatccgtcattaccagcatgtgttggctgttgacccagaaaaggcggcccagatgaaatcccaggtgatgacacatctccacgtgattgaagaaaggaggaaccaaagcctctctctgctctacaaagtaccttatgtagcccaagaaattcaagaggaaattgatgagctccttcaggagcagcgtgcagatatggaccagttcactgcctcaatctcagagacccctgtggacgtccgggtgagctctgaggagagtgaggagatcccaccgttccaccccttccaccccttcccagccctacctgagaacgaaggatctggagtgggagagcaggatgggggactgatcggtgccgaagagaaagtgattaacagtaagaataaagtggatgaaaacatggtcattgacgagactctggatgttaaggaaatgattttcaatgccgagagagttggaggcctcgaggaagagcgggaatccgtgggcccactgcgggaggacttcagtctgagtagcagtgctctcattggcctgctggtcatcgcagtggccattgccacggtcatcgtcatcagcctggtgatgctgaggaagaggcagtatggcaccatcagccacgggatcgtggaggttgatccaatgctcaccccagaagagcgtcacctgaacaagatgcagaaccatggctatgagaaccccacctacaaatacctggagcagatgcagatttaggtggcagggagcgcggcagccctggcggagggatgcaggtgggccggaagatcccacgattccgatcgactgccaagcagcagccgctgccaggggctgcgtctgacatcctgacctcctggactgtaggactatataaagtactactgtagaactgcaatttccattcttttaaatgggtgaaaaatggtaatataacaatatatgatatataaaccttaaatgaaaaaaatgatctattgcagatatttgatgtacttatatttgacattcttcactgtctgttgtttacctaccgtagctttttaccgttcacttccccttccaactatgtccagatgtgcaggctcctcctctctggactttctccaaaggcactgaccctcggcctctactttgtcccctcacctccaccccctcctgtcaccggccttgtgacattcactcagagaagaccacaccaaggaaggcggccgctggcccaggagagaacacggggaggtttgtttgtgtgaaaggaaagtagtccaggctgtccctgaaactgagtctgtggacactgtggaaagctttgaacaattgtgttttcgtcacaggagtctttgtaatgcttgtacagttgatgtcgatgctcactgcttctgctttttctttctttttattttaaatctgaaggttctggtaacctgtggtgtatttttattttcctgtgactgtttttgttttgtttttttcctttttcctcccctttgaccctattcatgtctctacccactatgcacagattaaacttcacctacaaactccttaatatgatctgtggagaatgtacacagtttaaacacatcaataaatactttaacttcca

SEQ ID NO: 329657 - DNA, 2620 bp, Homo sapiens
caccacctgagtcctgcatgccacttctgtcctccaactaagagcggtggtgtagtttttaacagttcttacgtgtcctctgagggctatttcagaatcttctagactacagagagaaaacctgagatttccgttgttcacctaagggtctgtagagaatcttttttacatgaaggcccagattcttaacaaggtattcatgcctactaacgtacgagaacttcaggtttaggccactgatatcagccttccaatttccaccttaatagtgtgctaagtggagaatttcgagctcataaataaaagtatcgccaacccgactcaggtgaaagagcggatggaggtgtgtgagaatcaccagcactggcacacggtagtcaaagaggcatgtctgactcagggaatgaccttatatagctacggcatgctgctcccatgtggggtagaccagttccatggcactgaatatgtgtgctgccctcagacaaagattattggatctgtgtcaaaagaagaggaagaggaagatgaagaggaagaggaagaggaagatgaagaggaagactatgatgtttataaaagtgaatttcctactgaagcagatctggaagacttcacagaagcagctgtggatgaggatgatgaggatgaggaagaaggggaggaagtggtggaggaccgagattactactatgacaccttcaaaggagatgactacaatgaggagaatcctactgaacccggcagcgacggcaccatgtcagacaaggaaattactcatgatgtcaaagctgtctgctcccaggaggcgatgacggggccctgccgggccgtgatgcctcgttggtacttcgacctctccaagggaaagtgcgtgcgctttatatatggtggctgcggcggcaacaggaacaattttgagtctgaggattattgtatggctgtgtgtaaagcgatgattcctccaactcctctgccaaccaatgatgttgatgtgtatttcgagacctctgcagatgataatgagcatgctcgcttccagaaggctaaggagcagctggagattcggcaccgcaaccgaatggacagggtaaagaaggaatgggaagaggcagagcttcaagctaagaacctccccaaagcagagaggcagactctgattcagcacttccaagccatggttaaagctttagagaaggaagcagccagtgagaagcagcagctggtggagacccacctggcccgagtggaagctatgctgaatgaccgccgtcggatggctctggagaactacctggctgccttgcagtctgacccgccacggcctcatcgcattctccaggccttacggcgttatgtccgtgctgagaacaaagatcgcttacataccatccgtcattaccagcatgtgttggctgttgacccagaaaaggcggcccagatgaaatcccaggtgatgacacatctccacgtgattgaagaaaggaggaaccaaagcctctctctgctctacaaagtaccttatgtagcccaagaaattcaagaggaaattgatgagctccttcaggagcagcgtgcagatatggaccagttcactgcctcaatctcagagacccctgtggacgtccgggtgagctctgaggagagtgaggagatcccaccgttccaccccttccaccccttcccagccctacctgagaacgaaggatctggagtgggagagcaggatgggggactgatcggtgccgaagagaaagtgattaacagtaagaataaagtggatgaaaacatggtcattgacgagactctggatgttaaggaaatgattttcaatgccgagagagttggaggcctcgaggaagagcgggaatccgtgggcccactgcgggaggacttcagtctgagtagcagtgctctcattggcctgctggtcatcgcagtggccattgccacggtcatcgtcatcagcctggtgatgctgaggaagaggcagtatggcaccatcagccacgggatcgtggaggttgatccaatgctcaccccagaagagcgtcacctgaacaagatgcagaaccatggctatgagaaccccacctacaaatacctggagcagatgcagatttaggtggcagggagcgcggcagccctggcggagggatgcaggtgggccggaagatcccacgattccgatcgactgccaagcagcagccgctgccaggggctgcgtctgacatcctgacctcctggactgtaggactatataaagtactactgtagaactgcaatttccattcttttaaatgggtgaaaaatggtaatataacaatatatgatatataaaccttaaatgaaaaaaatgatctattgcagatatttgatgtagttttcttttttaaattaatcagaaaccccacttccattgtattgtctgacacatgctctcaatatataataaatgggaaatgtcgattttcaataatagacttatatgcaggctgtcgttccggttatgttgtgtaagtcaactcttcagcctcattcactgtcctggcttttatttaaagagaggatatggaactgtatgggcactgagcacgtgagagacctcgctgatgtggcc

SEQ ID NO: 329658 - DNA, 2187 bp, Homo sapiens
caccacctgagtcctgcatgccacttctgtcctccaactaagagcggtggtgtagtttttaacagttcttacgtgtcctctgagggctatttcagaatcttctagactacagagagaaaacctgagatttccgttgttcacctaagggtctgtagagaatcttttttacatgaaggcccagattcttaacaaggtattcatgcctactaacgtacgagaacttcaggtttaggccactgatatcagccttccaatttccaccttaatagtgtgctaagtggagaatttcgagctcataaataaaagtatcgccaacccgactcaggtgaaagagcggatggaggtgtgtgagaatcaccagcactggcacacggtagtcaaagaggcatgtctgactcagggaatgaccttatatagctacggcatgctgctcccatgtggggtagaccagttccatggcactgaatatgtgtgctgccctcagacaaagattattggatctgtgtcaaaagaagaggaagaggaagatgaagaggaagaggaagaggaagatgaagaggaagactatgatgtttataaaagtgaatttcctactgaagcagatctggaagacttcacagaagcagctgtggatgaggatgatgaggatgaggaagaaggggaggaagtggtggaggaccgagattactactatgacaccttcaaaggagatgactacaatgaggagaatcctactgaacccggcagcgacggcaccatgtcagacaaggaaattactcatgatgtcaaagttcctccaactcctctgccaaccaatgatgttgatgtgtatttcgagacctctgcagatgataatgagcatgctcgcttccagaaggctaaggagcagctggagattcggcaccgcaaccgaatggacagggtaaagaaggaatgggaagaggcagagcttcaagctaagaacctccccaaagcagagaggcagactctgattcagcacttccaagccatggttaaagctttagagaaggaagcagccagtgagaagcagcagctggtggagacccacctggcccgagtggaagctatgctgaatgaccgccgtcggatggctctggagaactacctggctgccttgcagtctgacccgccacggcctcatcgcattctccaggccttacggcgttatgtccgtgctgagaacaaagatcgcttacataccatccgtcattaccagcatgtgttggctgttgacccagaaaaggcggcccagatgaaatcccaggtgatgacacatctccacgtgattgaagaaaggaggaaccaaagcctctctctgctctacaaagtaccttatgtagcccaagaaattcaagaggaaattgatgagctccttcaggagcagcgtgcagatatggaccagttcactgcctcaatctcagagacccctgtggacgtccgggtgagctctgaggagagtgaggagatcccaccgttccaccccttccaccccttcccagccctacctgagaacgaagacactcagccggagttgtaccacccaatgaaaaaaggatctggagtgggagagcaggatgggggactgatcggtgccgaagagaaagtgattaacagtaagaataaagtggatgaaaacatgtgcaggctcctcctctctggactttctccaaaggcactgaccctcggcctctactttgtcccctcacctccaccccctcctgtcaccggccttgtgacattcactcagagaagaccacaccaaggaaggcggccgctggcccaggagagaacacggggaggtttgtttgtgtgaaaggaaagtagtccaggctgtccctgaaactgagtctgtggacactgtggaaagctttgaacaattgtgttttcgtcacaggagtctttgtaatgcttgtacagttgatgtcgatgctcactgcttctgctttttctttctttttattttaaatctgaaggttctggtaacctgtggtgtatttttattttcctgtgactgtttttgttttgtttttttcctttttcctcccctttgaccctattcatgtctctacccactatgcacagattaaacttcacctacaaactccttaatatgatctgtggagaatgtacacagtttaaacacatcaataaatactttaacttcca

SEQ ID NO: 329659 - DNA, 2074 bp, Homo sapiens
caccacctgagtcctgcatgccacttctgtcctccaactaagagcggtggtgtagtttttaacagttcttacgtgtcctctgagggctatttcagaatcttctagactacagagagaaaacctgagatttccgttgttcacctaagggtctgtagagaatcttttttacatgaaggcccagattcttaacaaggtattcatgcctactaacgtacgagaacttcaggtttaggccactgatatcagccttccaatttccaccttaatagtgtgctaagtggagaatttcgagctcataaataaaagtatcgccaacccgactcaggtgaaagagcggatggaggtgtgtgagaatcaccagcactggcacacggtagtcaaagaggcatgtctgactcagggaatgaccttatatagctacggcatgctgctcccatgtggggtagaccagttccatggcactgaatatgtgtgctgccctcagacaaagattattggatctgtgtcaaaagaagaggaagaggaagatgaagaggaagaggaagaggaagatgaagaggaagactatgatgtttataaaagtgaatttcctactgaagcagatctggaagacttcacagaagcagctgtggatgaggatgatgaggatgaggaagaaggggaggaagtggtggaggaccgagattactactatgacaccttcaaaggagatgactacaatgaggagaatcctactgaacccggcagcgacggcaccatgtcagacaaggaaattactcatgatgtcaaagctgtctgctcccaggaggcgatgacggggccctgccgggccgtgatgcctcgttggtacttcgacctctccaagggaaagtgcgtgcgctttatatatggtggctgcggcggcaacaggaacaattttgagtctgaggattattgtatggctgtgtgtaaagcgatgattcctccaactcctctgccaaccaatgatgttgatgtgtatttcgagacctctgcagatgataatgagcatgctcgcttccagaaggctaaggagcagctggagattcggcaccgcaaccgaatggacagggtaaagaaggaatgggaagaggcagagcttcaagctaagaacctccccaaagcagagaggcagactctgattcagcacttccaagccatggttaaagctttagagaaggaagcagccagtgagaagcagcagctggtggagacccacctggcccgagtggaagctatgctgaatgaccgccgtcggatggctctggagaactacctggctgccttgcagtctgacccgccacggcctcatcgcattctccaggccttacggcgttatgtccgtgctgagaacaaagatcgcttacataccatccgtcattaccagcatgtgttggctgttgacccagaaaaggcggcccagatgaaatcccaggtgatgacacatctccacgtgattgaagaaaggaggaaccaaagcctctctctgctctacaaagtaccttatgtagcccaagaaattcaagaggaaattgatgagctccttcaggagcagcgtgcagatatggaccctcggcctctactttgtcccctcacctccaccccctcctgtcaccggccttgtgacattcactcagagaagaccacaccaaggaaggcggccgctggcccaggagagaacacggggaggtttgtttgtgtgaaaggaaagtagtccaggctgtccctgaaactgagtctgtggacactgtggaaagctttgaacaattgtgttttcgtcacaggagtctttgtaatgcttgtacagttgatgtcgatgctcactgcttctgctttttctttctttttattttaaatctgaaggttctggtaacctgtggtgtatttttattttcctgtgactgtttttgttttgtttttttcctttttcctcccctttgaccctattcatgtctctacccactatgcacagattaaacttcacctacaaactccttaatatgatctgtggagaatgtacacagtttaaacacatcaataaatactttaacttcca

SEQ ID NO: 329660 - DNA, 1905 bp, Homo sapiens
caccacctgagtcctgcatgccacttctgtcctccaactaagagcggtggtgtagtttttaacagttcttacgtgtcctctgagggctatttcagaatcttctagactacagagagaaaacctgagatttccgttgttcacctaagggtctgtagagaatcttttttacatgaaggcccagattcttaacaaggtattcatgcctactaacgtacgagaacttcaggtttaggccactgatatcagccttccaatttccaccttaatagtgtgctaagtggagaatttcgagctcataaataaaagtatcgccaacccgactcaggtgaaagagcggatggaggtgtgtgagaatcaccagcactggcacacggtagtcaaagaggcatgtctgactcagggaatgaccttatatagctacggcatgctgctcccatgtggggtagaccagttccatggcactgaatatgtgtgctgccctcagacaaagattattggatctgtgtcaaaagaagaggaagaggaagatgaagaggaagaggaagaggaagatgaagaggaagactatgatgtttataaaagtgaatttcctactgaagcagatctggaagacttcacagaagcagctgtggatgaggatgatgaggatgaggaagaaggggaggaagtggtggaggaccgagattactactatgacaccttcaaaggagatgactacaatgaggagaatcctactgaacccggcagcgacggcaccatgtcagacaaggaaattactcatgatgtcaaagctgtctgctcccaggaggcgatgacggggccctgccgggccgtgatgcctcgttggtacttcgacctctccaagggaaagtgcgtgcgctttatatatggtggctgcggcggcaacaggaacaattttgagtctgaggattattgtatggctgtgtgtaaagcgatgattcctccaactcctctgccaaccaatgatgttgatgtgtatttcgagacctctgcagatgataatgagcatgctcgcttccagaaggctaaggagcagctggagattcggcaccgcaaccgaatggacagggtaaagaaggaatgggaagaggcagagcttcaagctaagaacctccccaaagcagagaggcagactctgattcagcacttccaagccatggttaaagctttagagaaggaagcagccagtgagaagcagcagctggtggagacccacctggcccgagtggaagctatgctgaatgaccgccgtcggatggctctggagaactacctggctgccttgcagtctgacccgccacggcctcatcgcattctccaggccttacggcgttatgtccgtgctgagaacaaagatcgcttacataccatccgtcattaccagcatgtgttggctgttgacccagaaaaggcggcccagatgaaatcccagcctcctgtcaccggccttgtgacattcactcagagaagaccacaccaaggaaggcggccgctggcccaggagagaacacggggaggtttgtttgtgtgaaaggaaagtagtccaggctgtccctgaaactgagtctgtggacactgtggaaagctttgaacaattgtgttttcgtcacaggagtctttgtaatgcttgtacagttgatgtcgatgctcactgcttctgctttttctttctttttattttaaatctgaaggttctggtaacctgtggtgtatttttattttcctgtgactgtttttgttttgtttttttcctttttcctcccctttgaccctattcatgtctctacccactatgcacagattaaacttcacctacaaactccttaatatgatctgtggagaatgtacacagtttaaacacatcaataaatactttaacttcca

SEQ ID NO: 329661 - DNA, 2338 bp, Homo sapiens
caccacctgagtcctgcatgccacttctgtcctccaactaagagcggtggtgtagtttttaacagttcttacgtgtcctctgagggctatttcagaatcttctagactacagagagaaaacctgagatttccgttgttcacctaagggtctgtagagaatcttttttacatgaaggcccagattcttaacaaggtattcatgcctactaacgtacgagaacttcaggtttaggccactgatatcagccttccaatttccaccttaatagtgtgctaagtggagaatttcgagctcataaataaaagtatcgccaacccgactcaggtgaaagagcggatggaggtgtgtgagaatcaccagcactggcacacggtagtcaaagaggcatgtctgactcagggaatgaccttatatagctacggcatgctgctcccatgtggggtagaccagttccatggcactgaatatgtgtgctgccctcagacaaagattattggatctgtgtcaaaagaagaggaagaggaagatgaagaggaagaggaagaggaagatgaagaggaagactatgatgtttataaaagtgaatttcctactgaagcagatctggaagacttcacagaagcagctgtggatgaggatgatgaggatgaggaagaaggggaggaagtggtggaggaccgagattactactatgacaccttcaaaggagatgactacaatgaggagaatcctactgaacccggcagcgacggcaccatgtcagacaaggaaattactcatgatgtcaaagctgtctgctcccaggaggcgatgacggggccctgccgggccgtgatgcctcgttggtacttcgacctctccaagggaaagtgcgtgcgctttatatatggtggctgcggcggcaacaggaacaattttgagtctgaggattattgtatggctgtgtgtaaagcgatgattcctccaactcctctgccaaccaatgatgttgatgtgtatttcgagacctctgcagatgataatgagcatgctcgcttccagaaggctaaggagcagctggagattcggcaccgcaaccgaatggacagggtaaagaaggaatgggaagaggcagagcttcaagctaagaacctccccaaagcagagaggcagactctgattcagcacttccaagccatggttaaagctttagagaaggaagcagccagtgagaagcagcagctggtggagacccacctggcccgagtggaagctatgctgaatgaccgccgtcggatggctctggagaactacctggctgccttgcagtctgacccgccacggcctcatcgcattctccaggccttacggcgttatgtccgtgctgagaacaaagatcgcttacataccatccgtcattaccagcatgtgttggctgttgacccagaaaaggcggcccagatgaaatcccaggtgatgacacatctccacgtgattgaagaaaggaggaaccaaagcctctctctgctctacaaagtaccttatgtagcccaagaaattcaagaggaaattgatgagctccttcaggagcagcgtgcagatatggaccagttcactgcctcaatctcagagacccctgtggacgtccgggtgagctctgaggagagtgaggagatcccaccgttccaccccttccaccccttcccagccctacctgagaacgaaggatctggagtgggagagcaggatgggggactgatcggtgccgaagagaaagtgattaacagtaagaataaagtggatgaaaacatggtcattgacgagactctggatgttaaggaaatgattttcaatgccgagagagttggaggcctcgaggaagagcgggaatccgtgggcccactgcgggaggacttcagtctgagtagcagtgctctcattggcctgctggtcatcgcagtggccattgccacggtcatcgtcatcagcctggtgatgctgaggaagaggcagtatggcaccatcagccacgggatcgtggaggttgatccaatgctcaccccagaagagcgtcacctgaacaagatgcagaaccatggctatgagaaccccacctacaaatacctggagcagatgcagatttaggtggcagggagcgcggcagccctggcggagggatgcaggtgggccggaagatcccacgattccgatcgactgccaagcagcagccgctgccaggggctgcgtctgacatcctgacctcctggactgtaggactatataaagtactactgtagaactgcaatttccattcttttaaatgggtgaaaaatggtaatataacaatatatgatatat

SEQ ID NO: 329662 - DNA, 1998 bp, Homo sapiens
caccacctgagtcctgcatgccacttctgtcctccaactaagagcggtggtgtagtttttaacagttcttacgtgtcctctgagggctatttcagaatcttctagactacagagagaaaacctgagatttccgttgttcacctaagggtctgtagagaatcttttttacatgaaggcccagattcttaacaaggtattcatgcctactaacgtacgagaacttcaggtttaggccactgatatcagccttccaatttccaccttaatagtgtgctaagtggagaatttcgagctcataaataaaagtatcgccaacccgactcaggtgaaagagcggatggaggtgtgtgagaatcaccagcactggcacacggtagtcaaagaggcatgtctgactcagggaatgaccttatatagctacggcatgctgctcccatgtggggtagaccagttccatggcactgaatatgtgtgctgccctcagacaaagattattggatctgtgtcaaaagaagaggaagaggaagatgaagaggaagaggaagaggaagatgaagaggaagactatgatgtttataaaagtgaatttcctactgaagcagatctggaagacttcacagaagcagctgtggatgaggatgatgaggatgaggaagaaggggaggaagtggtggaggaccgagattactactatgacaccttcaaaggagatgactacaatgaggagaatcctactgaacccggcagcgacggcaccatgtcagacaaggaaattactcatgatgtcaaagttcctccaactcctctgccaaccaatgatgttgatgtgtatttcgagacctctgcagatgataatgagcatgctcgcttccagaaggctaaggagcagctggagattcggcaccgcaaccgaatggacagggtaaagaaggaatgggaagaggcagagcttcaagctaagaacctccccaaagcagagaggcagactctgattcagcacttccaagccatggttaaagctttagagaaggaagcagccagtgagaagcagcagctggtggagacccacctggcccgagtggaagctatgctgaatgaccgccgtcggatggctctggagaactacctggctgccttgcagtctgacccgccacggcctcatcgcattctccaggccttacggcgttatgtccgtgctgagaacaaagatcgcttacataccatccgtcattaccagcatgtgttggctgttgacccagaaaaggcggcccagatgaaatcccaggtgatgacacatctccacgtgattgaagaaaggaggaaccaaagcctctctctgctctacaaagtaccttatgtagcccaagaaattcaagaggaaattgatgagctccttcaggagcagcgtgcagatatggaccagttcactgcctcaatctcagagacccctgtggacgtccgggtgagctctgaggagagtgaggagatcccaccgttccaccccttccaccccttcccagccctacctgagaacgaagacactcagccggagttgtaccacccaatgaaaaaaggatctggagtgggagagcaggatgggggactgatcggtgccgaagagaaagtgattaacagtaagaataaagtggatgaaaacatggtcattgacgagactctggatgttaaggaaatgattttcaatgccgagagagttggaggcctcgaggaagagcgggaatccgtgggcccactgcgggaggacttcagtctgagtagcagtgctctcattggcctgctggtcatcgcagtggccattgccacggtcatcgtcatcagcctggtgatgctgaggaagaggcagtatggcaccatcagccacgggatcgtggagtgattcaatgcttacccccggaggggggtaacttgaccaggtggagaaccatggctatgagaaacccaacttacaattatctgcatctgttccaaggtgctcgagcc

SEQ ID NO: 329663 - DNA, 1962 bp, Homo sapiens
caccacctgagtcctgcatgccacttctgtcctccaactaagagcggtggtgtagtttttaacagttcttacgtgtcctctgagggctatttcagaatcttctagactacagagagaaaacctgagatttccgttgttcacctaagggtctgtagagaatcttttttacatgaaggcccagattcttaacaaggtattcatgcctactaacgtacgagaacttcaggtttaggccactgatatcagccttccaatttccaccttaatagtgtgctaagtggagaatttcgagctcataaataaaagtatcgccaacccgactcaggtgaaagagcggatggaggtgtgtgagaatcaccagcactggcacacggtagtcaaagaggcatgtctgactcagggaatgaccttatatagctacggcatgctgctcccatgtggggtagaccagttccatggcactgaatatgtgtgctgccctcagacaaagattattggatctgtgtcaaaagaagaggaagaggaagatgaagaggaagaggaagaggaagatgaagaggaagactatgatgtttataaaagtgaatttcctactgaagcagatctggaagacttcacagaagcagctgtggatgaggatgatgaggatgaggaagaaggggaggaagtggtggaggaccgagattactactatgacaccttcaaaggagatgactacaatgaggagaatcctactgaacccggcagcgacggcaccatgtcagacaaggaaattactcatgatgtcaaagttcctccaactcctctgccaaccaatgatgttgatgtgtatttcgagacctctgcagatgataatgagcatgctcgcttccagaaggctaaggagcagctggagattcggcaccgcaaccgaatggacagggtaaagaaggaatgggaagaggcagagcttcaagctaagaacctccccaaagcagagaggcagactctgattcagcacttccaagccatggttaaagctttagagaaggaagcagccagtgagaagcagcagctggtggagacccacctggcccgagtggaagctatgctgaatgaccgccgtcggatggctctggagaactacctggctgccttgcagtctgacccgccacggcctcatcgcattctccaggccttacggcgttatgtccgtgctgagaacaaagatcgcttacataccatccgtcattaccagcatgtgttggctgttgacccagaaaaggcggcccagatgaaatcccaggtgatgacacatctccacgtgattgaagaaaggaggaaccaaagcctctctctgctctacaaagtaccttatgtagcccaagaaattcaagaggaaattgatgagctccttcaggagcagcgtgcagatatggaccagttcactgcctcaatctcagagacccctgtggacgtccgggtgagctctgaggagagtgaggagatcccaccgttccaccccttccaccccttcccagccctacctgagaacgaaggatctggagtgggagagcaggatgggggactgatcggtgccgaagagaaagtgattaacagtaagaataaagtggatgaaaacatggtgagcctgttctttcttctgcccaacacgctttacttttgagactcattagagcgagtgacctgatgtcagatgcttccaggtgcacgtctctgtgttcgttttccgcacagtagaaggttggagggctccaacggctcccacagactggctgtggtgtttagcatctgggtatgaaaaggattaaaaagcccttttcagcagtagctcatctcttgctatagagtaggaaaatatatttacaactaaagatatgaataacctgttagagccattttcaagtgagtagagagttaataacttggattagtgttggggatacatcacgggtcctctag

SEQ ID NO: 329664 - DNA, 1720 bp, Homo sapiens
caccacctgagtcctgcatgccacttctgtcctccaactaagagcggtggtgtagtttttaacagttcttacgtgtcctctgagggctatttcagaatcttctagactacagagagaaaacctgagatttccgttgttcacctaagggtctgtagagaatcttttttacatgaaggcccagattcttaacaaggtattcatgcctactaacgtacgagaacttcaggtttaggccactgatatcagccttccaatttccaccttaatagtgtgctaagtggagaatttcgagctcataaataaaagtatcgccaacccgactcaggtgaaagagcggatggaggtgtgtgagaatcaccagcactggcacacggtagtcaaagaggcatgtctgactcagggaatgaccttatatagctacggcatgctgctcccatgtggggtagaccagttccatggcactgaatatgtgtgctgccctcagacaaagattattggatctgtgtcaaaagaagaggaagaggaagatgaagaggaagaggaagaggaagatgaagaggaagactatgatgtttataaaagtgaatttcctactgaagcagatctggaagacttcacagaagcagctgtggatgaggatgatgaggatgaggaagaaggggaggaagtggtggaggaccgagattactactatgacaccttcaaaggagatgactacaatgaggagaatcctactgaacccggcagcgacggcaccatgtcagacaaggaaattactcatgatgtcaaagttcctccaactcctctgccaaccaatgatgttgatgtgtatttcgagacctctgcagatgataatgagcatgctcgcttccagaaggctaaggagcagctggagattcggcaccgcaaccgaatggacagggtaaagaaggaatgggaagaggcagagcttcaagctaagaacctccccaaagcagagaggcagactctgattcagcacttccaagccatggttaaagctttagagaaggaagcagccagtgagaagcagcagctggtggagacccacctggcccgagtggaagctatgctgaatgaccgccgtcggatggctctggagaactacctggctgccttgcagtctgacccgccacggcctcatcgcattctccaggccttacggcgttatgtccgtgctgagaacaaagatcgcttacataccatccgtcattaccagcatgtgttggctgttgacccagaaaaggcggcccagatgaaatcccaggtgatgacacatctccacgtgattgaagaaaggaggaaccaaagcctctctctgctctacaaagtaccttatgtagcccaagaaattcaagaggaaattgatgagctccttcaggagcagcgtgcagatatggaccagttcactgcctcaatctcagagacccctgtggacgtccgggtgagctctgaggagagtgaggagatcccaccgttccaccccttccaccccttcccagccctacctgagaacgaagacactcagccagagagagctctgcacgtcaccaagtaaccaggccccagcctccaggcccccaactccgcccagcctctccccgctctggatcctgcactctaacactcgactctgctgctcatgggaagaacagaattgctcctgcatgcaactaattcaataaaactgtcttgtgagctg

SEQ ID NO: 329665 - DNA, 1576 bp, Homo sapiens
caccacctgagtcctgcatgccacttctgtcctccaactaagagcggtggtgtagtttttaacagttcttacgtgtcctctgagggctatttcagaatcttctagactacagagagaaaacctgagatttccgttgttcacctaagggtctgtagagaatcttttttacatgaaggcccagattcttaacaaggtattcatgcctactaacgtacgagaacttcaggtttaggccactgatatcagccttccaatttccaccttaatagtgtgctaagtggagaatttcgagctcataaataaaagtatcgccaacccgactcaggtgaaagagcggatggaggtgtgtgagaatcaccagcactggcacacggtagtcaaagaggcatgtctgactcagggaatgaccttatatagctacggcatgctgctcccatgtggggtagaccagttccatggcactgaatatgtgtgctgccctcagacaaagattattggatctgtgtcaaaagaagaggaagaggaagatgaagaggaagaggaagaggaagatgaagaggaagactatgatgtttataaaagtgaatttcctactgaagcagatctggaagacttcacagaagcagctgtggatgaggatgatgaggatgaggaagaaggggaggaagtggtggaggaccgagattactactatgacaccttcaaaggagatgactacaatgaggagaatcctactgaacccggcagcgacggcaccatgtcagacaaggaaattactcatgatgtcaaagttcctccaactcctctgccaaccaatgatgttgatgtgtatttcgagacctctgcagatgataatgagcatgctcgcttccagaaggctaaggagcagctggagattcggcaccgcaaccgaatggacagggtaaagaaggaatgggaagaggcagagcttcaagctaagaacctccccaaagcagagaggcagactctgattcagcacttccaagccatggttaaagctttagagaaggaagcagccagtgagaagcagcagctggtggagacccacctggcccgagtggaagctatgctgaatgaccgccgtcggatggctctggagaactacctggctgccttgcagtctgacccgccacggcctcatcgcattctccaggccttacggcgttatgtccgtgctgagaacaaagatcgcttacataccatccgtcattaccagcatgtgttggctgttgacccagaaaaggcggcccagatgaaatcccaggtgatgacacatctccacgtgattgaagaaaggaggaaccaaagcctctctctgctctacaaagtaccttatgtagcccaagaaattcaagaggaaattgatgagctccttcaggagcagcgtgcagatatggaccagttcactgcctcaatctcagagacccctgtggacgtccgggtgagctctgaggagagtgaggagatcccaccgttccaccccttccaccccttcccagccctacctgagaacgaagatctggagtgtagagcagagaagagacaggtcgtggta

SEQ ID NO: 329666 - DNA, 1336 bp, Homo sapiens
caccacctgagtcctgcatgccacttctgtcctccaactaagagcggtggtgtagtttttaacagttcttacgtgtcctctgagggctatttcagaatcttctagactacagagagaaaacctgagatttccgttgttcacctaagggtctgtagagaatcttttttacatgaaggcccagattcttaacaaggtattcatgcctactaacgtacgagaacttcaggtttaggccactgatatcagccttccaatttccaccttaatagtgtgctaagtggagaatttcgagctcataaataaaagtatcgccaacccgactcaggtgaaagagcggatggaggtgtgtgagaatcaccagcactggcacacggtagtcaaagaggcatgtctgactcagggaatgaccttatatagctacggcatgctgctcccatgtggggtagaccagttccatggcactgaatatgtgtgctgccctcagacaaagattattggatctgtgtcaaaagaagaggaagaggaagatgaagaggaagaggaagaggaagatgaagaggaagactatgatgtttataaaagtgaatttcctactgaagcagatctggaagacttcacagaagcagctgtggatgaggatgatgaggatgaggaagaaggggaggaagtggtggaggaccgagattactactatgacaccttcaaaggagatgactacaatgaggagaatcctactgaacccggcagcgacggcaccatgtcagacaaggaaattactcatgatgtcaaagttcctccaactcctctgccaaccaatgatgttgatgtgtatttcgagacctctgcagatgataatgagcatgctcgcttccagaaggctaaggagcagctggagattcggcaccgcaaccgaatggacagggtaaagaaggaatgggaagaggcagagcttcaagctaagaacctccccaaagcagagaggcagactctgattcagcacttccaagccatggttaaagctttagagaaggaagcagccagtgagaagcagcagctggtggagacccacctggcccgagtggaacacattttcaaaaagttaatacataatattgtacatgtttatggggtacatgtgatattttgttacatgcatagaatatgtaatgatcaagtcagggtatttagggtatccatcacctcgagtatttatcatatctatatgttgggaacatttcaagtcctttcttctagctattttgaaatatgtaatacattgttgttaactatagtcacccttctctgctataaaacattagaacttatttctttcgta

SEQ ID NO: 329667 - DNA, 817 bp, Homo sapiens
caccacctgagtcctgcatgccacttctgtcctccaactaagagcggtggtgtagtttttaacagttcttacgtgtcctctgagggctatttcagaatcttctagactacagagagaaaacctgagatttccgttgttcacctaagggtctgtagagaatcttttttacatgaaggcccagattcttaacaaggtattcatgcctactaacgtacgagaacttcaggtttaggccactgatatcagccttccaatttccaccttaatagtgtgctaagtggagaatttcgagctcataaataaaagtatcgccaacccgactcaggtgaaagagcggatggaggtgtgtgagaatcaccagcactggcacacggtagtcaaagaggcatgtctgactcagggaatgaccttatatagctacggcatgctgctcccatgtggggtagaccagttccatggcactgaatatgtgtgctgccctcagacaaagattattggatctgtgtcaaaagaagaggaagaggaagatgaagaggaagaggaagaggaagatgaagaggaagactatgatgtttataaaagtgaatttcctactgaagcagatctggaagacttcacagaagcagctgtggatgaggatgatgaggatgaggaagaaggggaggaagtggtggaggaccgagattactactatgacaccttcaaaggagatgactacaatgaggagaatcctactgaacccggcagcgacgttcctcatcccagtgacgtctcatcccagtgacgttcctcatcccagtgacgtccaaatcccggc

SEQ ID NO: 329668 - DNA, 3642 bp, Homo sapiens
caccacctgagtcctgcatgccacttctgtcctccaactaagagcggtggtgtagtttttaacagttcttacgtgtcctctgagggctatttcagaatcttctagactacagagagaaaacctgagatttccgttgttcacctaagggtctgtagagaatcttttttacatgaaggcccagattcttaacaaggtattcatgcctactaacgtacgagaacttcaggtttaggccactgatatcagccttccaatttccaccttaatagtgtgctaagtggagaatttcgagctcataaataaaagtatcgccaacccgactcaggtgaaagagcggatggaggtgtgtgagaatcaccagcactggcacacggtagtcaaagaggcatgtctgactcagggaatgaccttatatagctacggcatgctgctcccatgtggggtagaccagttccatggcactgaatatgtgtgctgccctcagacaaagattattggatctgtgtcaaaagaagaggaagaggaagatgaagaggaagaggaagaggaagatgaagaggaagactatgatgtttataaaagtgaatttcctactgaagcagatctggaagacttcacagaagcagctgtggatgaggatgatgaggatgaggaagaaggggaggaagtggtggaggaccgagattactactatgacaccttcaaaggagatgactacaatgaggagaatcctactgaacccggcagcgacggcaccatgtcagacaaggaaattactcatgatgtcaaagctgtctgctcccaggaggcgatgacggggccctgccgggccgtgatgcctcgttggtacttcgacctctccaagggaaagtgcgtgcgctttatatatggtggctgcggcggcaacaggaacaattttgagtctgaggattattgtatggctgtgtgtaaagcgatgaggaccgagggtgtcttcagaaaaaagcatttcggcccgctgtcctctccactctggtcccagggaggctggaagcagcctgtgtttgctgttccctttttccagtccagcaatgtgaaccaaaggctccgtctccagcgctcaggcctttatagcacagttcctccaactcctctgccaaccaatgatgttgatgtgtatttcgagacctctgcagatgataatgagcatgctcgcttccagaaggctaaggagcagctggagattcggcaccgcaaccgaatggacagggtaaagaaggaatgggaagaggcagagcttcaagctaagaacctccccaaagcagagaggcagactctgattcagcacttccaagccatggttaaagctttagagaaggaagcagccagtgagaagcagcagctggtggagacccacctggcccgagtggaagctatgctgaatgaccgccgtcggatggctctggagaactacctggctgccttgcagtctgacccgccacggcctcatcgcattctccaggccttacggcgttatgtccgtgctgagaacaaagatcgcttacataccatccgtcattaccagcatgtgttggctgttgacccagaaaaggcggcccagatgaaatcccaggtgatgacacatctccacgtgattgaagaaaggaggaaccaaagcctctctctgctctacaaagtaccttatgtagcccaagaaattcaagaggaaattgatgagctccttcaggagcagcgtgcagatatggaccagttcactgcctcaatctcagagacccctgtggacgtccgggtgagctctgaggagagtgaggagatcccaccgttccaccccttccaccccttcccagccctacctgagaacgaaggatctggagtgggagagcaggatgggggactgatcggtgccgaagagaaagtgattaacagtaagaataaagtggatgaaaacatggtcattgacgagactctggatgttaaggaaatgattttcaatgccgagagagttggaggcctcgaggaagagcgggaatccgtgggcccactgcgggaggacttcagtctgagtagcagtgctctcattggcctgctggtcatcgcagtggccattgccacggtcatcgtcatcagcctggtgatgctgaggaagaggcagtatggcaccatcagccacgggatcgtggaggttgatccaatgctcaccccagaagagcgtcacctgaacaagatgcagaaccatggctatgagaaccccacctacaaatacctggagcagatgcagatttaggtggcagggagcgcggcagccctggcggagggatgcaggtgggccggaagatcccacgattccgatcgactgccaagcagcagccgctgccaggggctgcgtctgacatcctgacctcctggactgtaggactatataaagtactactgtagaactgcaatttccattcttttaaatgggtgaaaaatggtaatataacaatatatgatatataaaccttaaatgaaaaaaatgatctattgcagatatttgatgtagttttcttttttaaattaatcagaaaccccacttccattgtattgtctgacacatgctctcaatatataataaatgggaaatgtcgattttcaataatagacttatatgcaggctgtcgttccggttatgttgtgtaagtcaactcttcagcctcattcactgtcctggcttttatttaaagaaaaaaaaggcagtattccctttttaaatgagctttcaggaagttgctgagaaatggggtggaatagggaactgtaatggccactgaagcacgtgagagaccctcgcaaaatgatgtgaaaggaccagtttcttgaagtccagtgtttccacggctggatacctgtgtgtctccataaaagtcctgtcaccaaggacgttaaaggcattttattccagcgtcttctagagagcttagtgtatacagatgagggtgtccgctgctgctttccttcggaatccagtgcttccacagagattagcctgtagcttatatttgacattcttcactgtctgttgtttacctaccgtagctttttaccgttcacttccccttccaactatgtccagatgtgcaggctcctcctctctggactttctccaaaggcactgaccctcggcctctactttgtcccctcacctccaccccctcctgtcaccggccttgtgacattcactcagagaagaccacaccaaggaaggcggccgctggcccaggagagaacacggggaggtttgtttgtgtgaaaggaaagtagtccaggctgtccctgaaactgagtctgtggacactgtggaaagctttgaacaattgtgttttcgtcacaggagtctttgtaatgcttgtacagttgatgtcgatgctcactgcttctgctttttctttctttttattttaaatctgaaggttctggtaacctgtggtgtatttttattttcctgtgactgtttttgttttgtttttttcctttttcctcccctttgaccctattcatgtctctacccactatgcacagattaaacttcacctacaaactccttaatatgatctgtggagaatgtacacagtttaaacacatcaataaatactttaacttcca

SEQ ID NO: 329669 - DNA, 3512 bp, Homo sapiens
  misc_feature (3496)..(3496): n is a, c, g, or t
  misc_feature (3501)..(3501): n is a, c, g, or t
  misc_feature (3508)..(3508): n is a, c, g, or t
caccacctgagtcctgcatgccacttctgtcctccaactaagagcggtggtgtagtttttaacagttcttacgtgtcctctgagggctatttcagaatcttctagactacagagagaaaacctgagatttccgttgttcacctaagggtctgtagagaatcttttttacatgaaggcccagattcttaacaaggtattcatgcctactaacgtacgagaacttcaggtttaggccactgatatcagccttccaatttccaccttaatagtgtgctaagtggagaatttcgagctcataaataaaagtatcgccaacccgactcaggtgaaagagcggatggaggtgtgtgagaatcaccagcactggcacacggtagtcaaagaggcatgtctgactcagggaatgaccttatatagctacggcatgctgctcccatgtggggtagaccagttccatggcactgaatatgtgtgctgccctcagacaaagattattggatctgtgtcaaaagaagaggaagaggaagatgaagaggaagaggaagaggaagatgaagaggaagactatgatgtttataaaagtgaatttcctactgaagcagatctggaagacttcacagaagcagctgtggatgaggatgatgaggatgaggaagaaggggaggaagtggtggaggaccgagattactactatgacaccttcaaaggagatgactacaatgaggagaatcctactgaacccggcagcgacggcaccatgtcagacaaggaaattactcatgatgtcaaagctgtctgctcccaggaggcgatgacggggccctgccgggccgtgatgcctcgttggtacttcgacctctccaagggaaagtgcgtgcgctttatatatggtggctgcggcggcaacaggaacaattttgagtctgaggattattgtatggctgtgtgtaaagcgatgattcctccaactcctctgccaaccaatgatgttgatgtgtatttcgagacctctgcagatgataatgagcatgctcgcttccagaaggctaaggagcagctggagattcggcaccgcaaccgaatggacagggtaaagaaggaatgggaagaggcagagcttcaagctaagaacctccccaaagcagagaggcagactctgattcagcacttccaagccatggttaaagctttagagaaggaagcagccagtgagaagcagcagctggtggagacccacctggcccgagtggaagctatgctgaatgaccgccgtcggatggctctggagaactacctggctgccttgcagtctgacccgccacggcctcatcgcattctccaggccttacggcgttatgtccgtgctgagaacaaagatcgcttacataccatccgtcattaccagcatgtgttggctgttgacccagaaaaggcggcccagatgaaatcccaggtgatgacacatctccacgtgattgaagaaaggaggaaccaaagcctctctctgctctacaaagtaccttatgtagcccaagaaattcaagaggaaattgatgagctccttcaggagcagcgtgcagatatggaccagttcactgcctcaatctcagagacccctgtggacgtccgggtgagctctgaggagagtgaggagatcccaccgttccaccccttccaccccttcccagccctacctgagaacgaaggatctggagtgggagagcaggatgggggactgatcggtgccgaagagaaagtgattaacagtaagaataaagtggatgaaaacatggtcattgacgagactctggatgttaaggaaatgattttcaatgccgagagagttggaggcctcgaggaagagcgggaatccgtgggcccactgcgggaggacttcagtctgagtagcagtgctctcattggcctgctggtcatcgcagtggccattgccacggtcatcgtcatcagcctggtgatgctgaggaagaggcagtatggcaccatcagccacgggatcgtggaggttgatccaatgctcaccccagaagagcgtcacctgaacaagatgcagaaccatggctatgagaaccccacctacaaatacctggagcagatgcagatttaggtggcagggagcgcggcagccctggcggagggatgcaggtgggccggaagatcccacgattccgatcgactgccaagcagcagccgctgccaggggctgcgtctgacatcctgacctcctggactgtaggactatataaagtactactgtagaactgcaatttccattcttttaaatgggtgaaaaatggtaatataacaatatatgatatataaaccttaaatgaaaaaaatgatctattgcagatatttgatgtagttttcttttttaaattaatcagaaaccccacttccattgtattgtctgacacatgctctcaatatataataaatgggaaatgtcgattttcaataatagacttatatgcaggctgtcgttccggttatgttgtgtaagtcaactcttcagcctcattcactgtcctggcttttatttaaagaaaaaaaaggcagtattccctttttaaatgagctttcaggaagttgctgagaaatggggtggaatagggaactgtaatggccactgaagcacgtgagagaccctcgcaaaatgatgtgaaaggaccagtttcttgaagtccagtgtttccacggctggatacctgtgtgtctccataaaagtcctgtcaccaaggacgttaaaggcattttattccagcgtcttctagagagcttagtgtatacagatgagggtgtccgctgctgctttccttcggaatccagtgcttccacagagattagcctgtagcttatatttgacattcttcactgtctgttgtttacctaccgtagctttttaccgttcacttccccttccaactatgtccagatgtgcaggctcctcctctctggactttctccaaaggcactgaccctcggcctctactttgtcccctcacctccaccccctcctgtcaccggccttgtgacattcactcagagaagaccacaccaaggaaggcggccgctggcccaggagagaacacggggaggtttgtttgtgtgaaaggaaagtagtccaggctgtccctgaaactgagtctgtggacactgtggaaagctttgaacaattgtgttttcgtcacaggagtctttgtaatgcttgtacagttgatgtcgatgctcactgcttctgctttttctttctttttattttaaatctgaaggttctggtaacctgtggtgtatttttattttcctgtgactgtttttgttttgtttttttcctttttcctcccctttgaccctattcatgtctctacccactatgcacagattaaacttcacctacaaactccttaatatgatctgtggagaatgtacacagtttaaacacatcaataaatactttaacttccaaaaaaaaaaaccncgggngtgtttntttt

SEQ ID NO: 329670 - DNA, 4126 bp, Homo sapiens
caccacctgagtcctgcatgccacttctgtcctccaactaagagcggtggtgtagtttttaacagttcttacgtgtcctctgagggctatttcagaatcttctagactacagagagaaaacctgagatttccgttgttcacctaagggtctgtagagaatcttttttacatgaaggcccagattcttaacaaggtattcatgcctactaacgtacgagaacttcaggtttaggccactgatatcagccttccaatttccaccttaatagtgtgctaagtggagaatttcgagctcataaataaaagtatcgccaacccgactcaggtgaaagagcggatggaggtgtgtgagaatcaccagcactggcacacggtagtcaaagaggcatgtctgactcagggaatgaccttatatagctacggcatgctgctcccatgtggggtagaccagttccatggcactgaatatgtgtgctgccctcagacaaagattattggatctgtgtcaaaagaagaggaagaggaagatgaagaggaagaggaagaggaagatgaagaggaagactatgatgtttataaaagtgaatttcctactgaagcagatctggaagacttcacagaagcagctgtggatgaggatgatgaggatgaggaagaaggggaggaagtggtggaggaccgagattactactatgacaccttcaaaggagatgactacaatgaggagaatcctactgaacccggcagcgacggcaccatgtcagacaaggaaattactcatgatgtcaaagctgtctgctcccaggaggcgatgacggggccctgccgggccgtgatgcctcgttggtacttcgacctctccaagggaaagtgcgtgcgctttatatatggtggctgcggcggcaacaggaacaattttgagtctgaggattattgtatggctgtgtgtaaagcgatgattcctccaactcctctgccaaccaatgatgttgatgtgtatttcgagacctctgcagatgataatgagcatgctcgcttccagaaggctaaggagcagctggagattcggcaccgcaaccgaatggacagggtaaagaaggaatgggaagaggcagagcttcaagctaagaacctccccaaagcagagaggcagactctgattcagcacttccaagccatggttaaagctttagagaaggaagcagccagtgagaagcagcagctggtggagacccacctggcccgagtggaagctatgctgaatgaccgccgtcggatggctctggagaactacctggctgccttgcagtctgacccgccacggcctcatcgcattctccaggccttacggcgttatgtccgtgctgagaacaaagatcgcttacataccatccgtcattaccagcatgtgttggctgttgacccagaaaaggcggcccagatgaaatcccaggtgatgacacatctccacgtgattgaagaaaggaggaaccaaagcctctctctgctctacaaagtaccttatgtagcccaagaaattcaagaggaaattgatgagctccttcaggagcagcgtgcagatatggaccagttcactgcctcaatctcagagacccctgtggacgtccgggtgagctctgaggagagtgaggagatcccaccgttccaccccttccaccccttcccagccctacctgagaacgaaggatctggagtgggagagcaggatgggggactgatcggtgccgaagagaaagtgattaacagtaagaataaagtggatgaaaacatggtcattgacgagactctggatgttaaggaaatgattttcaatgccgagagagttggaggcctcgaggaagagcgggaatccgtgggcccactgcgggaggacttcagtctgagtagcagtgctctcattggcctgctggtcatcgcagtggccattgccacggtcatcgtcatcagcctggtgatgctgaggaagaggcagtatggcaccatcagccacgggatcgtggaggttgatccaatgctcaccccagaagagcgtcacctgaacaagatgcagaaccatggctatgagaaccccacctacaaatacctggagcagatgcagatttaggtggcagggagcgcggcagccctggcggagggatgcaggtgggccggaagatcccacgattccgatcgactgccaagcagcagccgctgccaggggctgcgtctgacatcctgacctcctggactgtaggactatataaagtactactgtagaactgcaatttccattcttttaaatgggtgaaaaatggtaatataacaatatatgatatataaaccttaaatgaaaaaaatgatctattgcagatatttgatgtagttttcttttttaaattaatcagaaaccccacttccattgtattgtctgacacatgctctcaatatataataaatgggaaatgtcgattttcaataatagacttatatgcaggctgtcgttccggttatgttgtgtaagtcaactcttcagcctcattcactgtcctggcttttatttaaagaaaaaaaaggcagtattccctttttaaatgagctttcaggaagttgctgagaaatggggtggaatagggaactgtaatggccactgaagcacgtgagagaccctcgcaaaatgatgtgaaaggaccagtttcttgaagtccagtgtttccacggctggatacctgtgtgtctccataaaagtcctgtcaccaaggacgttaaaggcattttattccagcgtcttctagagagcttagtgtatacagatgagggtgtccgctgctgctttccttcggaatccagtgcttccacagagattagcctgtagcttatatttgacattcttcactgtctgttgtttacctaccgtagctttttaccgttcacttccccttccaactatgtccagatgtgcaggctcctcctctctggactttctccaaaggcactgaccctcggcctctactttgtcccctcacctccaccccctcctgtcaccggccttgtgacattcactcagagaagaccacaccaaggaaggcggccgctggcccaggagagaacacggggaggtttgtttgtgtgaaaggaaagtagtccaggctgtccctgaaactgagtctgtggacactgtggaaagctttgaacaattgtgttttcgtcacaggagtctttgtaatgcttgtacagttgatgtcgatgctcactgcttctgctttttctttctttttattttaaatctgaaggttctggtaacctgtggtgtatttttattttcctgtgactgtttttgttttgtttttttcctttttcctcccctttgaccctattcatgtctctacccactatgcacagattaaacttcacctacaaactccttaatatgatctgtggagaatgtacacagtttaaacacatcaataaatactttaacttccaaaaaaaaaaaaaaaaaacaaaaaaaaaaaaaaaaaaaacacgaaacacaaaaaacaacaaaaaaacacacaacaaacaaacacaaacacacaacagacagaaaaaaaaataaagggagcggccccaatacacacaccgagggggcacaccccaaggaagcaacaaatataggatagaaagggagaacaaacaggaggaaaataaacaggcacggcgagcgcaaaaaaaaaacagggagagaaaaaaataaagcgaacatatgagacgaacacacacccacggggggcgacgcacaggcgcgaacacacaaccagaagaaacacatccagagcaaaaaaaaagacgagaagagtgatggcacaacaacgtgagtggggagaaaacacgacgcagggtatataaaaattatcgcggaggacataagagtgaagacaacggacgccgaccgagaggagaggggcgggaggaggcaggatggcgagagaggggagacatggggaagggcgggaagcgtgaaaagagaacaaccacggaagaccgaaggcggagggagccggacgaggggagaaccagaagacagaagagtaagaagcaacgagacgacaccggatggacataacggacaagcacgcacagatctagc

SEQ ID NO: 329671 - DNA, 3778 bp, Homo sapiens
  misc_feature (3498)..(3498): n is a, c, g, or t
  misc_feature (3754)..(3754): n is a, c, g, or t
  misc_feature (3756)..(3756): n is a, c, g, or t
caccacctgagtcctgcatgccacttctgtcctccaactaagagcggtggtgtagtttttaacagttcttacgtgtcctctgagggctatttcagaatcttctagactacagagagaaaacctgagatttccgttgttcacctaagggtctgtagagaatcttttttacatgaaggcccagattcttaacaaggtattcatgcctactaacgtacgagaacttcaggtttaggccactgatatcagccttccaatttccaccttaatagtgtgctaagtggagaatttcgagctcataaataaaagtatcgccaacccgactcaggtgaaagagcggatggaggtgtgtgagaatcaccagcactggcacacggtagtcaaagaggcatgtctgactcagggaatgaccttatatagctacggcatgctgctcccatgtggggtagaccagttccatggcactgaatatgtgtgctgccctcagacaaagattattggatctgtgtcaaaagaagaggaagaggaagatgaagaggaagaggaagaggaagatgaagaggaagactatgatgtttataaaagtgaatttcctactgaagcagatctggaagacttcacagaagcagctgtggatgaggatgatgaggatgaggaagaaggggaggaagtggtggaggaccgagattactactatgacaccttcaaaggagatgactacaatgaggagaatcctactgaacccggcagcgacggcaccatgtcagacaaggaaattactcatgatgtcaaagctgtctgctcccaggaggcgatgacggggccctgccgggccgtgatgcctcgttggtacttcgacctctccaagggaaagtgcgtgcgctttatatatggtggctgcggcggcaacaggaacaattttgagtctgaggattattgtatggctgtgtgtaaagcgatgattcctccaactcctctgccaaccaatgatgttgatgtgtatttcgagacctctgcagatgataatgagcatgctcgcttccagaaggctaaggagcagctggagattcggcaccgcaaccgaatggacagggtaaagaaggaatgggaagaggcagagcttcaagctaagaacctccccaaagcagagaggcagactctgattcagcacttccaagccatggttaaagctttagagaaggaagcagccagtgagaagcagcagctggtggagacccacctggcccgagtggaagctatgctgaatgaccgccgtcggatggctctggagaactacctggctgccttgcagtctgacccgccacggcctcatcgcattctccaggccttacggcgttatgtccgtgctgagaacaaagatcgcttacataccatccgtcattaccagcatgtgttggctgttgacccagaaaaggcggcccagatgaaatcccaggtgatgacacatctccacgtgattgaagaaaggaggaaccaaagcctctctctgctctacaaagtaccttatgtagcccaagaaattcaagaggaaattgatgagctccttcaggagcagcgtgcagatatggaccagttcactgcctcaatctcagagacccctgtggacgtccgggtgagctctgaggagagtgaggagatcccaccgttccaccccttccaccccttcccagccctacctgagaacgaaggatctggagtgggagagcaggatgggggactgatcggtgccgaagagaaagtgattaacagtaagaataaagtggatgaaaacatggtcattgacgagactctggatgttaaggaaatgattttcaatgccgagagagttggaggcctcgaggaagagcgggaatccgtgggcccactgcgggaggacttcagtctgagtagcagtgctctcattggcctgctggtcatcgcagtggccattgccacggtcatcgtcatcagcctggtgatgctgaggaagaggcagtatggcaccatcagccacgggatcgtggaggttgatccaatgctcaccccagaagagcgtcacctgaacaagatgcagaaccatggctatgagaaccccacctacaaatacctggagcagatgcagatttaggtggcagggagcgcggcagccctggcggagggatgcaggtgggccggaagatcccacgattccgatcgactgccaagcagcagccgctgccaggggctgcgtctgacatcctgacctcctggactgtaggactatataaagtactactgtagaactgcaatttccattcttttaaatgggtgaaaaatggtaatataacaatatatgatatataaaccttaaatgaaaaaaatgatctattgcagatatttgatgtagttttcttttttaaattaatcagaaaccccacttccattgtattgtctgacacatgctctcaatatataataaatgggaaatgtcgattttcaataatagacttatatgcaggctgtcgttccggttatgttgtgtaagtcaactcttcagcctcattcactgtcctggcttttatttaaagaaaaaaaaggcagtattccctttttaaatgagctttcaggaagttgctgagaaatggggtggaatagggaactgtaatggccactgaagcacgtgagagaccctcgcaaaatgatgtgaaaggaccagtttcttgaagtccagtgtttccacggctggatacctgtgtgtctccataaaagtcctgtcaccaaggacgttaaaggcattttattccagcgtcttctagagagcttagtgtatacagatgagggtgtccgctgctgctttccttcggaatccagtgcttccacagagattagcctgtagcttatatttgacattcttcactgtctgttgtttacctaccgtagctttttaccgttcacttccccttccaactatgtccagatgtgcaggctcctcctctctggactttctccaaaggcactgaccctcggcctctactttgtcccctcacctccaccccctcctgtcaccggccttgtgacattcactcagagaagaccacaccaaggaaggcggccgctggcccaggagagaacacggggaggtttgtttgtgtgaaaggaaagtagtccaggctgtccctgaaactgagtctgtggacactgtggaaagctttgaacaattgtgttttcgtcacaggagtctttgtaatgcttgtacagttgatgtcgatgctcactgcttctgctttttctttctttttattttaaatctgaaggttctggtaacctgtggtgtatttttattttcctgtgactgtttttgttttgtttttttcctttttcctcccctttgaccctattcatgtctctacccactatgcacagattaaacttcacctacaaactccttaatatgatctgtggagaatgtacacagtttaaacacatcaataaatactttaacttccaaaaaaaaaaaaaaanaaatggagatgttgcccaaaaaaatggatctgttgcagtggtgcaatctgggctcactgaaaccaccacccaggttcaagcaattatcccgccccagcctcccgagtaggtgggattacaggagcgtgccaccatgcccggctactttttgtatttttagtagagacagggttccatcatgttggccaggctagtctcaaacccctgaccccaggtgatcagcccgctcggcctcccagagtgctgggattacagngngaccactgtggccaacctaatg

SEQ ID NO: 329672 - DNA, 3047 bp, Homo sapiens
caccacctgagtcctgcatgccacttctgtcctccaactaagagcggtggtgtagtttttaacagttcttacgtgtcctctgagggctatttcagaatcttctagactacagagagaaaacctgagatttccgttgttcacctaagggtctgtagagaatcttttttacatgaaggcccagattcttaacaaggtattcatgcctactaacgtacgagaacttcaggtttaggccactgatatcagccttccaatttccaccttaatagtgtgctaagtggagaatttcgagctcataaataaaagtatcgccaacccgactcaggtgaaagagcggatggaggtgtgtgagaatcaccagcactggcacacggtagtcaaagaggcatgtctgactcagggaatgaccttatatagctacggcatgctgctcccatgtggggtagaccagttccatggcactgaatatgtgtgctgccctcagacaaagattattggatctgtgtcaaaagaagaggaagaggaagatgaagaggaagaggaagaggaagatgaagaggaagactatgatgtttataaaagtgaatttcctactgaagcagatctggaagacttcacagaagcagctgtggatgaggatgatgaggatgaggaagaaggggaggaagtggtggaggaccgagattactactatgacaccttcaaaggagatgactacaatgaggagaatcctactgaacccggcagcgacggcaccatgtcagacaaggaaattactcatgatgtcaaagttcctccaactcctctgccaaccaatgatgttgatgtgtatttcgagacctctgcagatgataatgagcatgctcgcttccagaaggctaaggagcagctggagattcggcaccgcaaccgaatggacagggtaaagaaggaatgggaagaggcagagcttcaagctaagaacctccccaaagcagagaggcagactctgattcagcacttccaagccatggttaaagctttagagaaggaagcagccagtgagaagcagcagctggtggagacccacctggcccgagtggaagctatgctgaatgaccgccgtcggatggctctggagaactacctggctgccttgcagtctgacccgccacggcctcatcgcattctccaggccttacggcgttatgtccgtgctgagaacaaagatcgcttacataccatccgtcattaccagcatgtgttggctgttgacccagaaaaggcggcccagatgaaatcccaggtgatgacacatctccacgtgattgaagaaaggaggaaccaaagcctctctctgctctacaaagtaccttatgtagcccaagaaattcaagaggaaattgatgagctccttcaggagcagcgtgcagatatggaccagttcactgcctcaatctcagagacccctgtggacgtccgggtgagctctgaggagagtgaggagatcccaccgttccaccccttccaccccttcccagccctacctgagaacgaaggatctggagtgggagagcaggatgggggactgatcggtgccgaagagaaagtgattaacagtaagaataaagtggatgaaaacatggtcattgacgagactctggatgttaaggaaatgattttcaatacctggagcagatgcagatttaggtggcagggagcgcggcagccctggcggagggatgcaggtgggccggaagatcccacgattccgatcgactgccaagcagcagccgctgccaggggctgcgtctgacatcctgacctcctggactgtaggactatataaagtactactgtagaactgcaatttccattcttttaaatgggtgaaaaatggtaatataacaatatatgatatataaaccttaaatgaaaaaaatgatctattgcagatatttgatgtagttttcttttttaaattaatcagaaaccccacttccattgtattgtctgacacatgctctcaatatataataaatgggaaatgtcgattttcaataatagacttatatgcaggctgtcgttccggttatgttgtgtaagtcaactcttcagcctcattcactgtcctggcttttatttaaagaaaaaaaaggcagtattccctttttaaatgagctttcaggaagttgctgagaaatggggtggaatagggaactgtaatggccactgaagcacgtgagagaccctcgcaaaatgatgtgaaaggaccagtttcttgaagtccagtgtttccacggctggatacctgtgtgtctccataaaagtcctgtcaccaaggacgttaaaggcattttattccagcgtcttctagagagcttagtgtatacagatgagggtgtccgctgctgctttccttcggaatccagtgcttccacagagattagcctgtagcttatatttgacattcttcactgtctgttgtttacctaccgtagctttttaccgttcacttccccttccaactatgtccagatgtgcaggctcctcctctctggactttctccaaaggcactgaccctcggcctctactttgtcccctcacctccaccccctcctgtcaccggccttgtgacattcactcagagaagaccacaccaaggaaggcggccgctggcccaggagagaacacggggaggtttgtttgtgtgaaaggaaagtagtccaggctgtccctgaaactgagtctgtggacactgtggaaagctttgaacaattgtgttttcgtcacaggagtctttgtaatgcttgtacagttgatgtcgatgctcactgcttctgctttttctttctttttattttaaatctgaaggttctggtaacctgtggtgtatttttattttcctgtgactgtttttgttttgtttttttcctttttcctcccctttgaccctattcatgtctctacccactatgcacagattaaacttcacctacaaactccttaatatgatctgtggagaatgtacacagtttaaacacatcaataaatactttaacttcca

SEQ ID NO: 329673 - DNA, 3429 bp, Homo sapiens
caccacctgagtcctgcatgccacttctgtcctccaactaagagcggtggtgtagtttttaacagttcttacgtgtcctctgagggctatttcagaatcttctagactacagagagaaaacctgagatttccgttgttcacctaagggtctgtagagaatcttttttacatgaaggcccagattcttaacaaggtattcatgcctactaacgtacgagaacttcaggtttaggccactgatatcagccttccaatttccaccttaatagtgtgctaagtggagaatttcgagctcataaataaaagtatcgccaacccgactcaggtgaaagagcggatggaggtgtgtgagaatcaccagcactggcacacggtagtcaaagaggcatgtctgactcagggaatgaccttatatagctacggcatgctgctcccatgtggggtagaccagttccatggcactgaatatgtgtgctgccctcagacaaagattattggatctgtgtcaaaagaagaggaagaggaagatgaagaggaagaggaagaggaagatgaagaggaagactatgatgtttataaaagtgaatttcctactgaagcagatctggaagacttcacagaagcagctgtggatgaggatgatgaggatgaggaagaaggggaggaagtggtggaggaccgagattactactatgacaccttcaaaggagatgactacaatgaggagaatcctactgaacccggcagcgacggcaccatgtcagacaaggaaattactcatgatgtcaaagctgtctgctcccaggaggcgatgacggggccctgccgggccgtgatgcctcgttggtacttcgacctctccaagggaaagtgcgtgcgctttatatatggtggctgcggcggcaacaggaacaattttgagtctgaggattattgtatggctgtgtgtaaagcgatgattcctccaactcctctgccaaccaatgatgttgatgtgtatttcgagacctctgcagatgataatgagcatgctcgcttccagaaggctaaggagcagctggagattcggcaccgcaaccgaatggacagggtaaagaaggaatgggaagaggcagagcttcaagctaagaacctccccaaagcagagaggcagactctgattcagcacttccaagccatggttaaagctttagagaaggaagcagccagtgagaagcagcagctggtggagacccacctggcccgagtggaagctatgctgaatgaccgccgtcggatggctctggagaactacctggctgccttgcagtctgacccgccacggcctcatcgcattctccaggccttacggcgttatgtccgtgctgagaacaaagatcgcttacataccatccgtcattaccagcatgtgttggctgttgacccagaaaaggcggcccagatgaaatcccaggtgatgacacatctccacgtgattgaagaaaggaggaaccaaagcctctctctgctctacaaagtaccttatgtagcccaagaaattcaagaggaaattgatgagctccttcaggagcagcgtgcagatatggaccagttcactgcctcaatctcagagacccctgtggacgtccgggtgagctctgaggagagtgaggagatcccaccgttccaccccttccaccccttcccagccctacctgagaacgaaggatctggagtgggagagcaggatgggggactgatcggtgccgaagagaaagtgattaacagtaagaataaagtggatgaaaacatggtcattgacgagactctggatgttaaggaaatgattttcaatgccgagagagttggaggcctcgaggaagagcgggaatccgtgggcccactgcgggaggacttcagtctgagtagcagtgctctcattggcctgctggtcatcgcagtggccattgccacggtcatcgtcatcagcctggtgatgctgaggaagaggcagtatggcaccatcagccacgggatcgtggaggttgatccaatgctcaccccagaagagcgtcacctgaacaagatgcagaaccatggctatgagaaccccacctacaaatacctggagcagatgcagatttaggtggcagggagcgcggcagccctggcggagggatgcaggtgggccggaagatcccacgattccgatcgactgccaagcagcagccgctgccaggggctgcgtctgacatcctgacctcctggactgtaggactatataaagtactactgtagaactgcaatttccattcttttaaatgggtgaaaaatggtaatataacaatatatgatatataaaccttaaatgaaaaaaatgatctattgcagatatttgatgtagttttcttttttaaattaatcagaaaccccacttccattgtattgtctgacacatgctctcaatatataataaatgggaaatgtcgattttcaataatagacttatatgcaggctgtcgttccggttatgttgtgtaagtcaactcttcagcctcattcactgtcctggcttttatttaaagaaaaaaaaggcagtattccctttttaaatgagctttcaggaagttgctgagaaatggggtggaatagggaactgtaatggccactgaagcacgtgagagaccctcgcaaaatgatgtgaaaggaccagtttcttgaagtccagtgtttccacggctggatacctgtgtgtctccatagcttagtgtatacagatgagggtgtccgctgctgctttccttcggaatccagtgcttccacagagattagcctgtagcttatatttgacattcttcactgtctgttgtttacctaccgtagctttttaccgttcacttccccttccaactatgtccagatgtgcaggctcctcctctctggactttctccaaaggcactgaccctcggcctctactttgtcccctcacctccaccccctcctgtcaccggccttgtgacattcactcagagaagaccacaccaaggaaggcggccgctggcccaggagagaacacggggaggtttgtttgtgtgaaaggaaagtagtccaggctgtccctgaaactgagtctgtggacactgtggaaagctttgaacaattgtgttttcgtcacaggagtctttgtaatgcttgtacagttgatgtcgatgctcactgcttctgctttttctttctttttattttaaatctgaaggttctggtaacctgtggtgtatttttattttcctgtgactgtttttgttttgtttttttcctttttcctcccctttgaccctattcatgtctctacccactatgcacagattaaacttcacctacaaactccttaatatgatctgtggagaatgtacacagtttaaacacatcaataaatactttaacttcca

SEQ ID NO: 329674 - DNA, 2690 bp, Homo sapiens
caccacctgagtcctgcatgccacttctgtcctccaactaagagcggtggtgtagtttttaacagttcttacgtgtcctctgagggctatttcagaatcttctagactacagagagaaaacctgagatttccgttgttcacctaagggtctgtagagaatcttttttacatgaaggcccagattcttaacaaggtattcatgcctactaacgtacgagaacttcaggtttaggccactgatatcagccttccaatttccaccttaatagtgtgctaagtggagaatttcgagctcataaataaaagtatcgccaacccgactcaggtgaaagagcggatggaggtgtgtgagaatcaccagcactggcacacggtagtcaaagaggcatgtctgactcagggaatgaccttatatagctacggcatgctgctcccatgtggggtagaccagttccatggcactgaatatgtgtgctgccctcagacaaagattattggatctgtgtcaaaagaagaggaagaggaagatgaagaggaagaggaagaggaagatgaagaggaagactatgatgtttataaaagtgaatttcctactgaagcagatctggaagacttcacagaagcagctgtggatgaggatgatgaggatgaggaagaaggggaggaagtggtggaggaccgagattactactatgacaccttcaaaggagatgactacaatgaggagaatcctactgaacccggcagcgacggcaccatgtcagacaaggaaattactcatgatgtcaaagctgtctgctcccaggaggcgatgacggggccctgccgggccgtgatgcctcgttggtacttcgacctctccaagggaaagtgcgtgcgctttatatatggtggctgcggcggcaacaggaacaattttgagtctgaggattattgtatggctgtgtgtaaagcgatgattcctccaactcctctgccaaccaatgatgttgatgtgtatttcgagacctctgcagatgataatgagcatgctcgcttccagaaggctaaggagcagctggagattcggcaccgcaaccgaatggacagggtaaagaaggaatgggaagaggcagagcttcaagctaagaacctccccaaagcagagaggcagactctgattcagcacttccaagccatggttaaagctttagagaaggaagcagccagtgagaagcagcagctggtggagacccacctggcccgagtggaagctatgctgaatgaccgccgtcggatggctctggagaactacctggctgccttgcagtctgacccgccacggcctcatcgcattctccaggccttacggcgttatgtccgtgctgagaacaaagatcgcttacataccatccgtcattaccagcatgtgttggctgttgacccagaaaaggcggcccagatgaaatcccaggtgatgacacatctccacgtgattgaagaaaggaggaaccaaagcctctctctgctctacaaagtaccttatgtagcccaagaaattcaagaggaaattgatgagctccttcaggagcagcgtgcagatatggaccagttcactgcctcaatctcagagacccctgtggacgtccgggtgagctctgaggagagtgaggagatcccaccgttccaccccttccaccccttcccagccctacctgagaacgaaggatctggagtgggagagcaggatgggggactgatcggtgccgaagagaaagtgattaacagtaagaataaagtggatgaaaacatggtcattgacgagactctggatgttaaggaaatgattttcaatgccgagagagttggaggcctcgaggaagagcgggaatccgtgggcccactgcgggaggacttcagtctgagtagcagtgctctcattggcctgctggtcatcgcagtggccattgccacggtcatcgtcatcagcctggtgatgctgaggaagaggcagtatggcaccatcagccacgggatcgtggaggttgatccaatgctcaccccagaagagcgtcacctgaacaagatgcagaaccatggctatgagaaccccacctacaaatacctggagcagatgcagatttaggtggcagggagcgcggcagccctggcggagggatgcagtgcaggctcctcctctctggactttctccaaaggcactgaccctcggcctctactttgtcccctcacctccaccccctcctgtcaccggccttgtgacattcactcagagaagaccacaccaaggaaggcggccgctggcccaggagagaacacggggaggtttgtttgtgtgaaaggaaagtagtccaggctgtccctgaaactgagtctgtggacactgtggaaagctttgaacaattgtgttttcgtcacaggagtctttgtaatgcttgtacagttgatgtcgatgctcactgcttctgctttttctttctttttattttaaatctgaaggttctggtaacctgtggtgtatttttattttcctgtgactgtttttgttttgtttttttcctttttcctcccctttgaccctattcatgtctctacccactatgcacagattaaacttcacctacaaactccttaatatgatctgtggagaatgtacacagtttaaacacatcaataaatactttaacttcca

SEQ ID NO: 329675 - DNA, 2151 bp, Homo sapiens
caccacctgagtcctgcatgccacttctgtcctccaactaagagcggtggtgtagtttttaacagttcttacgtgtcctctgagggctatttcagaatcttctagactacagagagaaaacctgagatttccgttgttcacctaagggtctgtagagaatcttttttacatgaaggcccagattcttaacaaggtattcatgcctactaacgtacgagaacttcaggtttaggccactgatatcagccttccaatttccaccttaatagtgtgctaagtggagaatttcgagctcataaataaaagtatcgccaacccgactcaggtgaaagagcggatggaggtgtgtgagaatcaccagcactggcacacggtagtcaaagaggcatgtctgactcagggaatgaccttatatagctacggcatgctgctcccatgtggggtagaccagttccatggcactgaatatgtgtgctgccctcagacaaagattattggatctgtgtcaaaagaagaggaagaggaagatgaagaggaagaggaagaggaagatgaagaggaagactatgatgtttataaaagtgaatttcctactgaagcagatctggaagacttcacagaagcagctgtggatgaggatgatgaggatgaggaagaaggggaggaagtggtggaggaccgagattactactatgacaccttcaaaggagatgactacaatgaggagaatcctactgaacccggcagcgacggcaccatgtcagacaaggaaattactcatgatgtcaaagttcctccaactcctctgccaaccaatgatgttgatgtgtatttcgagacctctgcagatgataatgagcatgctcgcttccagaaggctaaggagcagctggagattcggcaccgcaaccgaatggacagggtaaagaaggaatgggaagaggcagagcttcaagctaagaacctccccaaagcagagaggcagactctgattcagcacttccaagccatggttaaagctttagagaaggaagcagccagtgagaagcagcagctggtggagacccacctggcccgagtggaagctatgctgaatgaccgccgtcggatggctctggagaactacctggctgccttgcagtctgacccgccacggcctcatcgcattctccaggccttacggcgttatgtccgtgctgagaacaaagatcgcttacataccatccgtcattaccagcatgtgttggctgttgacccagaaaaggcggcccagatgaaatcccaggtgatgacacatctccacgtgattgaagaaaggaggaaccaaagcctctctctgctctacaaagtaccttatgtagcccaagaaattcaagaggaaattgatgagctccttcaggagcagcgtgcagatatggaccagttcactgcctcaatctcagagacccctgtggacgtccgggtgagctctgaggagagtgaggagatcccaccgttccaccccttccaccccttcccagccctacctgagaacgaaggatctggagtgggagagcaggatgggggactgatcggtgccgaagagaaagtgattaacagtaagaataaagtggatgaaaacatgtgcaggctcctcctctctggactttctccaaaggcactgaccctcggcctctactttgtcccctcacctccaccccctcctgtcaccggccttgtgacattcactcagagaagaccacaccaaggaaggcggccgctggcccaggagagaacacggggaggtttgtttgtgtgaaaggaaagtagtccaggctgtccctgaaactgagtctgtggacactgtggaaagctttgaacaattgtgttttcgtcacaggagtctttgtaatgcttgtacagttgatgtcgatgctcactgcttctgctttttctttctttttattttaaatctgaaggttctggtaacctgtggtgtatttttattttcctgtgactgtttttgttttgtttttttcctttttcctcccctttgaccctattcatgtctctacccactatgcacagattaaacttcacctacaaactccttaatatgatctgtggagaatgtacacagtttaaacacatcaataaatactttaacttcca

SEQ ID NO: 329676 - DNA, 1812 bp, Homo sapiens
caccacctgagtcctgcatgccacttctgtcctccaactaagagcggtggtgtagtttttaacagttcttacgtgtcctctgagggctatttcagaatcttctagactacagagagaaaacctgagatttccgttgttcacctaagggtctgtagagaatcttttttacatgaaggcccagattcttaacaaggtattcatgcctactaacgtacgagaacttcaggtttaggccactgatatcagccttccaatttccaccttaatagtgtgctaagtggagaatttcgagctcataaataaaagtatcgccaacccgactcaggtgaaagagcggatggaggtgtgtgagaatcaccagcactggcacacggtagtcaaagaggcatgtctgactcagggaatgaccttatatagctacggcatgctgctcccatgtggggtagaccagttccatggcactgaatatgtgtgctgccctcagacaaagattattggatctgtgtcaaaagaagaggaagaggaagatgaagaggaagaggaagaggaagatgaagaggaagactatgatgtttataaaagtgaatttcctactgaagcagatctggaagacttcacagaagcagctgtggatgaggatgatgaggatgaggaagaaggggaggaagtggtggaggaccgagattactactatgacaccttcaaaggagatgactacaatgaggagaatcctactgaacccggcagcgacggcaccatgtcagacaaggaaattactcatgatgtcaaagttcctccaactcctctgccaaccaatgatgttgatgtgtatttcgagacctctgcagatgataatgagcatgctcgcttccagaaggctaaggagcagctggagattcggcaccgcaaccgaatggacagggtaaagaaggaatgggaagaggcagagcttcaagctaagaacctccccaaagcagagaggcagactctgattcagcacttccaagccatggttaaagctttagagaaggaagcagccagtgagaagcagcagctggtggagacccacctggcccgagtggaagctatgctgaatgaccgccgtcggatggctctggagaactacctggctgccttgcagtctgacccgccacggcctcatcgcattctccaggccttacggcgttatgtccgtgctgagaacaaagatcgcttacataccatccgtcattaccagcatgtgttggctgttgacccagaaaaggcggcccagatgaaatcccagtgcaggctcctcctctctggactttctccaaaggcactgaccctcggcctctactttgtcccctcacctccaccccctcctgtcaccggccttgtgacattcactcagagaagaccacaccaaggaaggcggccgctggcccaggagagaacacggggaggtttgtttgtgtgaaaggaaagtagtccaggctgtccctgaaactgagtctgtggacactgtggaaagctttgaacaattgtgttttcgtcacaggagtctttgtaatgcttgtacagttgatgtcgatgctcactgcttctgctttttctttctttttattttaaatctgaaggttctggtaacctgtggtgtatttttattttcctgtgactgtttttgttttgtttttttcctttttcctcccctttgaccctattcatgtctctacccactatgcacagattaaacttcacctacaaactccttaatatgatctgtggagaatgtacacagtttaaacacatcaataaatactttaacttcca

SEQ ID NO: 329677 - DNA, 1962 bp, Homo sapiens
caccacctgagtcctgcatgccacttctgtcctccaactaagagcggtggtgtagtttttaacagttcttacgtgtcctctgagggctatttcagaatcttctagactacagagagaaaacctgagatttccgttgttcacctaagggtctgtagagaatcttttttacatgaaggcccagattcttaacaaggtattcatgcctactaacgtacgagaacttcaggtttaggccactgatatcagccttccaatttccaccttaatagtgtgctaagtggagaatttcgagctcataaataaaagtatcgccaacccgactcaggtgaaagagcggatggaggtgtgtgagaatcaccagcactggcacacggtagtcaaagaggcatgtctgactcagggaatgaccttatatagctacggcatgctgctcccatgtggggtagaccagttccatggcactgaatatgtgtgctgccctcagacaaagattattggatctgtgtcaaaagaagaggaagaggaagatgaagaggaagaggaagaggaagatgaagaggaagactatgatgtttataaaagtgaatttcctactgaagcagatctggaagacttcacagaagcagctgtggatgaggatgatgaggatgaggaagaaggggaggaagtggtggaggaccgagattactactatgacaccttcaaaggagatgactacaatgaggagaatcctactgaacccggcagcgacggcaccatgtcagacaaggaaattactcatgatgtcaaagttcctccaactcctctgccaaccaatgatgttgatgtgtatttcgagacctctgcagatgataatgagcatgctcgcttccagaaggctaaggagcagctggagattcggcaccgcaaccgaatggacagggtaaagaaggaatgggaagaggcagagcttcaagctaagaacctccccaaagcagagaggcagactctgattcagcacttccaagccatggttaaagctttagagaaggaagcagccagtgagaagcagcagctggtggagacccacctggcccgagtggaagctatgctgaatgaccgccgtcggatggctctggagaactacctggctgccttgcagtctgacccgccacggcctcatcgcattctccaggccttacggcgttatgtccgtgctgagaacaaagatcgcttacataccatccgtcattaccagcatgtgttggctgttgacccagaaaaggcggcccagatgaaatcccaggtgatgacacatctccacgtgattgaagaaaggaggaaccaaagcctctctctgctctacaaagtaccttatgtagcccaagaaattcaagaggaaattgatgagctccttcaggagcagcgtgcagatatggaccagttcactgcctcaatctcagagacccctgtggacgtccgggtgagctctgaggagagtgaggagatcccaccgttccaccccttccaccccttcccagccctacctgagaacgaaggatctggagtgggagagcaggatgggggactgatcggtgccgaagagaaagtgattaacagtaagaataaagtggatgaaaacatggtcattgacgagactctggatgttaaggaaatgattttcaatgccgagagagttggaggcctcgaggaagagcgggaatccgtgggcccactgcgggaggacttcagtctgagtagcagtgctctcattggcctgctggtcatcgcagtggccattgccacggtcatcgtcatcagcctggtgatgctgaggaagaggcagtatggcaccatcagccacgggatcgtggagtgattcaatgcttacccccggaggggggtaacttgaccaggtggagaaccatggctatgagaaacccaacttacaattatctgcatctgttccaaggtgctcgagcc

SEQ ID NO: 329678 - DNA, 2004 bp, Homo sapiens
  misc_feature (1932)..(1932): n is a, c, g, or t
  misc_feature (1970)..(1970): n is a, c, g, or t
caccacctgagtcctgcatgccacttctgtcctccaactaagagcggtggtgtagtttttaacagttcttacgtgtcctctgagggctatttcagaatcttctagactacagagagaaaacctgagatttccgttgttcacctaagggtctgtagagaatcttttttacatgaaggcccagattcttaacaaggtattcatgcctactaacgtacgagaacttcaggtttaggccactgatatcagccttccaatttccaccttaatagtgtgctaagtggagaatttcgagctcataaataaaagtatcgccaacccgactcaggtgaaagagcggatggaggtgtgtgagaatcaccagcactggcacacggtagtcaaagaggcatgtctgactcagggaatgaccttatatagctacggcatgctgctcccatgtggggtagaccagttccatggcactgaatatgtgtgctgccctcagacaaagattattggatctgtgtcaaaagaagaggaagaggaagatgaagaggaagaggaagaggaagatgaagaggaagactatgatgtttataaaagtgaatttcctactgaagcagatctggaagacttcacagaagcagctgtggatgaggatgatgaggatgaggaagaaggggaggaagtggtggaggaccgagattactactatgacaccttcaaaggagatgactacaatgaggagaatcctactgaacccggcagcgacggcaccatgtcagacaaggaaattactcatgatgtcaaagttcctccaactcctctgccaaccaatgatgttgatgtgtatttcgagacctctgcagatgataatgagcatgctcgcttccagaaggctaaggagcagctggagattcggcaccgcaaccgaatggacagggtaaagaaggaatgggaagaggcagagcttcaagctaagaacctccccaaagcagagaggcagactctgattcagcacttccaagccatggttaaagctttagagaaggaagcagccagtgagaagcagcagctggtggagacccacctggcccgagtggaagctatgctgaatgaccgccgtcggatggctctggagaactacctggctgccttgcagtctgacccgccacggcctcatcgcattctccaggccttacggcgttatgtccgtgctgagaacaaagatcgcttacataccatccgtcattaccagcatgtgttggctgttgacccagaaaaggcggcccagatgaaatcccaggtgatgacacatctccacgtgattgaagaaaggaggaaccaaagcctctctctgctctacaaagtaccttatgtagcccaagaaattcaagaggaaattgatgagctccttcaggagcagcgtgcagatatggaccagttcactgcctcaatctcagagacccctgtggacgtccgggtgagctctgaggagagtgaggagatcccaccgttccaccccttccaccccttcccagccctacctgagaacgaagacactcagccggagttgtaccacccaatgaaaaaaggatctggagtgggagagcaggatgggggactgatcggtgccgaagagaaagtgattaacagtaagaataaagtggatgaaaacatggtcattgacgagactctggatgttaaggaaatgattttcaatgccgagagagttggaggcctcgaggaagagcgggaatccgtgggcccactgcgggaggacttcagtctgagtagcagtgctctcattggcctgctggtcatcgcagtggccattgccacggtcatcgtcatcagcctggtgatgctgaggaagaggcagtatggcaccatcagccacgggatcgtggaggttggatccaattgttcaccccaggaagaggggtcaacctnaacaaagatggaaggacccattggggtttttgaagaancccccacccacaaaattaccttggagggaaagtt

SEQ ID NO: 329679 - DNA, 1866 bp, Homo sapiens
caccacctgagtcctgcatgccacttctgtcctccaactaagagcggtggtgtagtttttaacagttcttacgtgtcctctgagggctatttcagaatcttctagactacagagagaaaacctgagatttccgttgttcacctaagggtctgtagagaatcttttttacatgaaggcccagattcttaacaaggtattcatgcctactaacgtacgagaacttcaggtttaggccactgatatcagccttccaatttccaccttaatagtgtgctaagtggagaatttcgagctcataaataaaagtatcgccaacccgactcaggtgaaagagcggatggaggtgtgtgagaatcaccagcactggcacacggtagtcaaagaggcatgtctgactcagggaatgaccttatatagctacggcatgctgctcccatgtggggtagaccagttccatggcactgaatatgtgtgctgccctcagacaaagattattggatctgtgtcaaaagaagaggaagaggaagatgaagaggaagaggaagaggaagatgaagaggaagactatgatgtttataaaagtgaatttcctactgaagcagatctggaagacttcacagaagcagctgtggatgaggatgatgaggatgaggaagaaggggaggaagtggtggaggaccgagattactactatgacaccttcaaaggagatgactacaatgaggagaatcctactgaacccggcagcgacggcaccatgtcagacaaggaaattactcatgatgtcaaagttcctccaactcctctgccaaccaatgatgttgatgtgtatttcgagacctctgcagatgataatgagcatgctcgcttccagaaggctaaggagcagctggagattcggcaccgcaaccgaatggacagggtaaagaaggaatgggaagaggcagagcttcaagctaagaacctccccaaagcagagaggcagactctgattcagcacttccaagccatggttaaagctttagagaaggaagcagccagtgagaagcagcagctggtggagacccacctggcccgagtggaagctatgctgaatgaccgccgtcggatggctctggagaactacctggctgccttgcagtctgacccgccacggcctcatcgcattctccaggccttacggcgttatgtccgtgctgagaacaaagatcgcttacataccatccgtcattaccagcatgtgttggctgttgacccagaaaaggcggcccagatgaaatcccaggtgatgacacatctccacgtgattgaagaaaggaggaaccaaagcctctctctgctctacaaagtaccttatgtagcccaagaaattcaagaggaaattgatgagctccttcaggagcagcgtgcagatatggaccagttcactgcctcaatctcagagacccctgtggacgtccgggtgagctctgaggagagtgaggagatcccaccgttccaccccttccaccccttcccagccctacctgagaacgaagacactcagccggagttgtaccacccaatgaaaaaaggatctggagtgggagagcaggatgggggactgatcggtgccgaagagaaagtgattaacagtaagaataaagtggatgaaaacatgcattgacgagactctgccaaccaatgatgttgatgtgtatttcgagacctctgcagacgataatgagcatgctcgcttccagaaggctaaggagcagctggagattcggcaccgcaaccgaatggacagggtaaagaaggaatgggaagaggcagagcttcaagctaagaacctccccaaagcagatgaggtggcagatgaggggg

SEQ ID NO: 329680 - DNA, 1599 bp, Homo sapiens
caccacctgagtcctgcatgccacttctgtcctccaactaagagcggtggtgtagtttttaacagttcttacgtgtcctctgagggctatttcagaatcttctagactacagagagaaaacctgagatttccgttgttcacctaagggtctgtagagaatcttttttacatgaaggcccagattcttaacaaggtattcatgcctactaacgtacgagaacttcaggtttaggccactgatatcagccttccaatttccaccttaatagtgtgctaagtggagaatttcgagctcataaataaaagtatcgccaacccgactcaggtgaaagagcggatggaggtgtgtgagaatcaccagcactggcacacggtagtcaaagaggcatgtctgactcagggaatgaccttatatagctacggcatgctgctcccatgtggggtagaccagttccatggcactgaatatgtgtgctgccctcagacaaagattattggatctgtgtcaaaagaagaggaagaggaagatgaagaggaagaggaagaggaagatgaagaggaagactatgatgtttataaaagtgaatttcctactgaagcagatctggaagacttcacagaagcagctgtggatgaggatgatgaggatgaggaagaaggggaggaagtggtggaggaccgagattactactatgacaccttcaaaggagatgactacaatgaggagaatcctactgaacccggcagcgacggcaccatgtcagacaaggaaattactcatgatgtcaaagttcctccaactcctctgccaaccaatgatgttgatgtgtatttcgagacctctgcagatgataatgagcatgctcgcttccagaaggctaaggagcagctggagattcggcaccgcaaccgaatggacagggtaaagaaggaatgggaagaggcagagcttcaagctaagaacctccccaaagcagagaggcagactctgattcagcacttccaagccatggttaaagctttagagaaggaagcagccagtgagaagcagcagctggtggagacccacctggcccgagtggaagctatgctgaatgaccgccgtcggatggctctggagaactacctggctgccttgcagtctgacccgccacggcctcatcgcattctccaggccttacggcgttatgtccgtgctgagaacaaagatcgcttacataccatccgtcattaccagcatgtgttggctgttgacccagaaaaggcggcccagatgaaatcccaggtgatgacacatctccacgtgattgaagaaaggaggaaccaaagcctctctctgctctacaaagtaccttatgtagcccaagaaattcaagaggaaattgcctgctttctgtcccctgccctgtcttcatcagatgagctccttcaggagcagcgtgcagatatggaccagttcactgcctcaatctcagagacccctgtggacgtccgggtgagctctgaggagagtgaggagatcccaccgttccaccccttccaccccttcccagccctacctgagaacgaaggtgtgtatgggcgacggtgccacttctg

SEQ ID NO: 329681 - DNA, 948 bp, Homo sapiens
caccacctgagtcctgcatgccacttctgtcctccaactaagagcggtggtgtagtttttaacagttcttacgtgtcctctgagggctatttcagaatcttctagactacagagagaaaacctgagatttccgttgttcacctaagggtctgtagagaatcttttttacatgaaggcccagattcttaacaaggtattcatgcctactaacgtacgagaacttcaggtttaggccactgatatcagccttccaatttccaccttaatagtgtgctaagtggagaatttcgagctcataaataaaagtatcgccaacccgactcaggtgaaagagcggatggaggtgtgtgagaatcaccagcactggcacacggtagtcaaagaggcatgtctgactcagggaatgaccttatatagctacggcatgctgctcccatgtggggtagaccagttccatggcactgaatatgtgtgctgccctcagacaaagattattggatctgtgtcaaaagaagaggaagaggaagatgaagaggaagaggaagaggaagatgaagaggaagactatgatgtttataaaagtgaatttcctactgaagcagatctggaagacttcacagaagcagctgtggatgaggatgatgaggatgaggaagaaggggaggaagtggtggaggaccgagattactactatgacaccttcaaaggagatgactacaatgaggagaatcctactgaacccggcagcgacggcaccatgtcagacaaggaaattactcatgatgtcaaagctgtctgctcccaggaggcgatgacggggccctgccgggccgtgatgcctcgttggtacttcgacctctccaagggaaagtgcgtgcgctttatatatggtggctgcagtcgctggatgacaagtgttacacaagagacagctatgagccatatacg

SEQ ID NO: 329682 - DNA, 510 bp, Homo sapiens
ctcgttgaggccaaaaagacagatttttttttttgtaattttaaaacattgtttatttaatagtacataattattacaaaaagcagaaatgtaaatattattgtaatcaccaactacaaacttgcaggcaatctagaggtcatttgcaaaatatttgtcagttctagggtatagactgaaattagtagtcttaagggatttcttgtagatggtcttcagaaggtcttgaggtgactgtattcatactctggcaatcctcataataatgtcctagttaataaaattgctgcaatccattgtcctttaagaaaagaaagtaggctggacatggtggctcacacctgtaatcccagtgctttgagagaccgaggcaggaggattgcttgaggccaggagttcaagaccagtttgggcagtataatgagaccccatcttgtagcggggttaataagagagccaggcagctcaacctcccctcccctccccaccgcccgctcccgcctcccccct

SEQ ID NO: 329683 - DNA, 512 bp, Homo sapiens
ctcgttgaggccaaaaagacagatttttttttttgtaattttaaaacattgtttatttaatagtacataattattacaaaaagcagaaatgtaaatattattgtaatcaccaactacaaacttgcaggcaatctagaggtcatttgcaaaatatttgtcagttctagggtatagactgaaattagtagtcttaagggatttcttgtagatggtcttcagaaggtcttgaggtgactgtattcatactctggcaatcctcataataatgtcctagttaataaaattgctgcaatccattgtcctttaagaaaagaaagtaggctggacatggtggctcacacctgtaatcccagtgctttgagagaccgaggcaggaggattgcttgaggccaggagttcaagaccagtttgggcagtataatgagaccccatctgtgtagcggtggaaataagagagtcgtgcagctaacccttccccccccctcccgtacacagccgctccaacctccgcc

SEQ ID NO: 329684 - DNA, 355 bp, Homo sapiens
gagccccctgggagtcctggtggcctgagaggcagggaagagtcagtgagtggaggaagagcatgaatgaattttcccgagggcaggagaggcagttgtgtgtccctggggttgtcttgcatgggatcaccaatgcctgcatgaagacaggaagatgggattagaagacttggcctccctcaaatcggagcagctgctccagctcaccatagaagtgggcaagaaggagagaacacgaaggaggaaagagacatgggttctcattagacaagtgggtcagattcttcctcttttttgttctgcaccaatgtctttccttgcggtcttcattaacctgtgactctgatgaccctgc

SEQ ID NO: 329685 - DNA, 136 bp, Homo sapiens
atcaacctccataaactatgacctcctcaccacccagccctgggcatcacaacccccaactcactcctcttccatgacaatcgcaaagtcactggcatgtgttccttccatccctgtcccatgatccctgtgcccc

SEQ ID NO: 329686 - DNA, 3416 bp, Homo sapiens
cgttgcggcagcgggatcgtaaagctgttgatatcgattcgggcggtgcgggccggggggggacgcaggcgagcgtgcgggttccaaccctcgacccgtgccctgagcgtgcagacttcgcaagcgctcggacgtcgtcgcgccatggcggagaccaagattatctaccacatggacgaggaggagacgccgtacctggtcaagctgcccgtggcccccgagcgcgtcacgctggccgacttcaagaacgtgctcagcaaccggcccgtgcacgcctacaaattcttctttaagtccatggaccaggacttcggggtggtgaaggaggagatctttgatgacaatgccaagcttccctgcttcaacggccgcgtggtctcctggctggtcctggctgagggtgctcactcggatgcggggtcccagggcacggacagccacacagacctgcccccgcctcttgagcggacaggcggcatcggggactcccggcccccctccttccacccgaatgtggccagcagccgtgacgggatggacaacgagacaggcacggagtccatggtcagtcaccggcgggagcgtgcccgacgccggaaccgcgaggaggccgcccggaccaatgggcacccaaggggagaccgacggcgggatgtggggctgcccccagacagcgcgtccaccgccctcagcagcgagcttgagtccagcagctttgtggactcggacgaggatggcagcacgagcaggctcagcagctccacggagcagagcacctcatccagactcatccggaagcacaaacgccggcggaggaagcagcgccttcggcaggcggaccgggcctcctccttcagcagcataaccgactccaccatgtccctcaacatcgtcactgtcacgctcaacatggaaagacatcactttctgggcatcagcatcgtggggcagagcaacgaccgtggagacggcggcatctacattggctccatcatgaagggcggggctgtggccgctgacggccgcatcgagcccggcgacatgttgctgcaggtgaatgacgtgaactttgagaacatgagcaatgacgatgccgtgcgggtgctgcgggagatcgtttcccagacggggcccatcagcctcactgtggccaagtgctgggacccaacgccccgaagctacttcaccgtcccacgggctgacccggtgcggcccatcgaccccgccgcctggctgtcccacacggcggcactgacaggagccctgccccgctacgagctggaagaggcgccgctgacggtgaagagtgacatgagcgccgtcgtccgggtcatgcagctgccagactcgggactggagatccgcgaccgcatgtggctcaagatcaccatcgccaatgccgtcatcggggcggacgtggtggactggctgtacacacacgtggagggcttcaaggagcggcgggaggcccggaagtacgccagcagcttgctgaagcacggcttcctgcggcacacggtcaacaagatcaccttctccgagcagtgctactacgtcttcggggatctctgcagcaatctcgccaccctgaacctcaacagtggctccagtgggacttcggatcaggacacgctggccccgctgccccacccggctgccccctggcctctgggtcagggctacccctaccagtacccgggacccccaccctgcttcccgcctgcctaccaggacccgggctttagctatggcagcggcagcaccgggagtcagcagagtgaagggagcaaaagcagtgggtccacccggagcagccgccgggccccgggccgtgagaaggagcgtcgggcggcgggagctgggggcagtggcagtgaatcggatcacacggcaccgagtggggtggggagcagctggcgagagcgtccggccggccagctcagccgtggcagcagcccacgcagtcaggcctcggctaccgccccggggctccccccgccccaccccacgaccaaggcctatacagtggtgggggggccacccgggggaccccctgtccgggagctggctgccgtccccccggaattgacaggcagccgccagtccttccagaaggctatggggaacccctgcgagttcttcgtggacatcatgtgactcgtggcgcatgccccagccctgcctgaggtggggagctggcggtcctgccgcatgcagagctcgcgtgggcttgccttcgtgggggccaggacgggaggcagggtggggggcaggctggaccaccaccatctgccctggcagcctggctgctccagctcctgacagcacctgtgtctgagcagccgtgttgggggcgctccctctctgcccctcagcgagagcctcggacctcccaaccccttgtgtctggtggggatccctcctgggatgaggaagaccccctcgggctctcggctgacccccacctcctgcacagctgtgcccaggcccccagggtggtccacgcggggcaaccccctgcggtgcacaggccccctgtctggagtagggatctaatttatttatttattgcctggccggtgactcgggggaggaggcgaccctgtcatctgtcccacctgctgctgccccttggagcagcctgcaccttctctcctcccatccggcaacagtctgaaagtacgtggaggacgggaccggaagacgagagagggctggacatcctgcccaccgtgtcccagccagggcagggagggaccatggcccgcagggtcaaggggccccgatgtgcacagctgccacagggagggaggtcttggggagatgggcagtcaggtggcccgtccttggtgagtgcacacactgcgcgcacacatcgcggccttcctggcttctctggcccccacgtgtctgtgctgtagatactgtatcaaagtcccagcgtttagatggttaacatagagctgcttctgtgtaaatgctgcttattttaaacactaaaaagcgtttaattttatgggaaaaaaaaaaaaaaaaaaaaaaaaaaaaaaaaaaaaaaaaaaaaaaaaaaaaaaaaaaagaggggggggcgcacaagaagaagacacaaccccacgagagggccccaacaagacaaacaagcacaaacccaacatgcaggagaacacaggagggccccccacacgagacacgaaccaagataacaaacaaaacagagcagacagggcccagcaactacccaacgcaagagagagaaaggacacaacaccgggagccaagacgagcgagaccacagaggagaagaaccagacccacaacaaccgagagagggagaaaaacaagaggcacacaccaacacccaccacacacaaaaaaagagacacaagaagaaaaaaaaaaccgacacaaagcagcac

SEQ ID NO: 329687 - DNA, 3375 bp, Homo sapiens
cgttgcggcagcgggatcgtaaagctgttgatatcgattcgggcggtgcgggccggggggggacgcaggcgagcgtgcgggttccaaccctcgacccgtgccctgagcgtgcagacttcgcaagcgctcggacgtcgtcgcgccatggcggagaccaagattatctaccacatggacgaggaggagacgccgtacctggtcaagctgcccgtggcccccgagcgcgtcacgctggccgacttcaagaacgtgctcagcaaccggcccgtgcacgcctacaaattcttctttaagtccatggaccaggacttcggggtggtgaaggaggagatctttgatgacaatgccaagcttccctgcttcaacggccgcgtggtctcctggctggtcctggctgagggtgctcactcggatgcggggtcccagggcacggacagccacacagacctgcccccgcctcttgagcggacaggcggcatcggggactcccggcccccctccttccacccgaatgtggccagcagccgtgacgggatggacaacgagacaggcacggagtccatggtcagtcaccggcgggagcgtgcccgacgccggaaccgcgaggaggccgcccggaccaatgggcacccaaggggagaccgacggcgggatgtggggctgcccccagacagcgcgtccaccgccctcagcagcgagcttgagtccagcagctttgtggactcggacgaggatggcagcacgagcaggctcagcagctccacggagcagagcacctcatccagactcatccggaagcacaaacgccggcggaggaagcagcgccttcggcaggcggaccgggcctcctccttcagcagcataaccgactccaccatgtccctcaacatcgtcactgtcacgctcaacatggaaagacatcactttctgggcatcagcatcgtggggcagagcaacgaccgtggagacggcggcatctacattggctccatcatgaagggcggggctgtggccgctgacggccgcatcgagcccggcgacatgttgctgcaggtgaatgacgtgaactttgagaacatgagcaatgacgatgccgtgcgggtgctgcgggagatcgtttcccagacggggcccatcagcctcactgtggccaagtgctgggacccaacgccccgaagctacttcaccgtcccacgggctgacccggtgcggcccatcgaccccgccgcctggctgtcccacacggcggcactgacaggagccctgccccgctacgagctggaagaggcgccgctgacggtgaagagtgacatgagcgccgtcgtccgggtcatgcagctgccagactcgggactggagatccgcgaccgcatgtggctcaagatcaccatcgccaatgccgtcatcggggcggacgtggtggactggctgtacacacacgtggagggcttcaaggagcggcgggaggcccggaagtacgccagcagcttgctgaagcacggcttcctgcggcacacggtcaacaagatcaccttctccgagcagtgctactacgtcttcggggatctctgcagcaatctcgccaccctgaacctcaacagtggctccagtgggacttcggatcaggacacgctggccccgctgccccacccggctgccccctggcctctgggtcagggctacccctaccagtacccgggacccccaccctgcttcccgcctgcctaccaggacccgggctttagctatggcagcggcagcaccgggagtcagcagagtgaagggagcaaaagcagtgggtccacccggagcagccgccgggccccgggccgtgagaaggagcgtcgggcggcgggagctgggggcagtggcagtgaatcggatcacacggcaccgagtggggtggggagcagctggcgagagcgtccggccggccagctcagccgtggcagcagcccacgcagtcaggcctcggctaccgccccggggctccccccgccccaccccacgaccaaggcctatacagtggtgggggggccacccgggggaccccctgtccgggagctggctgccgtccccccggaattgacaggcagccgccagtccttccagaaggctatggggaacccctgcgagttcttcgtggacatcatgtgactcgtggcgcatgccccagccctgcctgaggtggggagctggcggtcctgccgcatgcagagctcgcgtgggcttgccttcgtgggggccaggacgggaggcagggtggggggcaggctggaccaccaccatctgccctggcagcctggctgctccagctcctgacagcacctgtgtctgagcagccgtgttgggggcgctccctctctgcccctcagcgagagcctcggacctcccaaccccttgtgtctggtggggatccctcctgggatgaggaagaccccctcgggctctcggctgacccccacctcctgcacagctgtgcccaggcccccagggtggtccacgcggggcaaccccctgcggtgcacaggccccctgtctggagtagggatctaatttatttatttattgcctggccggtgactcgggggaggaggcgaccctgtcatctgtcccacctgctgctgccccttggagcagcctgcaccttctctcctcccatccggcaacagtctgaaagtacgtggaggacgggaccggaagacgagagagggctggacatcctgcccaccgtgtcccagccagggcagggagggaccatggcccgcagggtcaaggggccccgatgtgcacagctgccacagggagggaggtcttggggagatgggcagtcaggtggcccgtccttggtgagtgcacacactgcgcgcacacatcgcggccttcctggcttctctggcccccacgtgtctgtgctgtagatactgtatcaaagtcccagcgtttagatggttaacatagagctgcttctgtgtaaatgctgcttattttaaacactaaaaagcgtttaattttatgggacagatgtggggcctgggccccttctctccggctgggctgccttggaatgaggcacagggagctggtccagcctcccctaggccctgctgggagctgaccctgggactctgaccggaaaccctgtgtgggcctggcggcgtgctggcgtcaaatcctggtgggcagttttctgtccatggtgctggctccggggtcctgggggtcggggctggccgtggggctggaccccgcccccaccccacctgggctctgtccctggtactggtgacagtcatgatgctgtctacccactgggcaaagggcagagtaggaagctgggtgccacccctacctcggcgggctctgccctgggca

SEQ ID NO: 329688 - DNA, 3099 bp, Homo sapiens
cgttgcggcagcgggatcgtaaagctgttgatatcgattcgggcggtgcgggccggggggggacgcaggcgagcgtgcgggttccaaccctcgacccgtgccctgagcgtgcagacttcgcaagcgctcggacgtcgtcgcgccatggcggagaccaagattatctaccacatggacgaggaggagacgccgtacctggtcaagctgcccgtggcccccgagcgcgtcacgctggccgacttcaagaacgtgctcagcaaccggcccgtgcacgcctacaaattcttctttaagtccatggaccaggacttcggggtggtgaaggaggagatctttgatgacaatgccaagcttccctgcttcaacggccgcgtggtctcctggctggtcctggctgagggtgctcactcggatgcggggtcccagggcacggacagccacacagacctgcccccgcctcttgagcggacaggcggcatcggggactcccggcccccctccttccacccgaatgtggccagcagccgtgacgggatggacaacgagacaggcacggagtccatggtcagtcaccggcgggagcgtgcccgacgccggaaccgcgaggaggccgcccggaccaatgggcacccaaggggagaccgacggcgggatgtggggctgcccccagacagcgcgtccaccgccctcagcagcgagcttgagtccagcagctttgtggactcggacgaggatggcagcacgagcaggctcagcagctccacggagcagagcacctcatccagactcatccggaagcacaaacgccggcggaggaagcagcgccttcggcaggcggaccgggcctcctccttcagcagcataaccgactccaccatgtccctcaacatcgtcactgtcacgctcaacatggaaagacatcactttctgggcatcagcatcgtggggcagagcaacgaccgtggagacggcggcatctacattggctccatcatgaagggcggggctgtggccgctgacggccgcatcgagcccggcgacatgttgctgcaggtgaatgacgtgaactttgagaacatgagcaatgacgatgccgtgcgggtgctgcgggagatcgtttcccagacggggcccatcagcctcactgtggccaagtgctgggacccaacgccccgaagctacttcaccgtcccacgggctgacccggtgcggcccatcgaccccgccgcctggctgtcccacacggcggcactgacaggagccctgccccgctacgacggtacgagtccctgctccagcgccgtcacgcgcaccagctcctcctcactaaccagctccgtgcctggtgctccacagctggaagaggcgccgctgacggtgaagagtgacatgagcgccgtcgtccgggtcatgcagctgccagactcgggactggagatccgcgaccgcatgtggctcaagatcaccatcgccaatgccgtcatcggggcggacgtggtggactggctgtacacacacgtggagggcttcaaggagcggcgggaggcccggaagtacgccagcagcttgctgaagcacggcttcctgcggcacacggtcaacaagatcaccttctccgagcagtgctactacgtcttcggggatctctgcagcaatctcgccaccctgaacctcaacagtggctccagtgggacttcggatcaggacacgctggccccgctgccccacccggctgccccctggcctctgggtcagggctacccctaccagtacccgggacccccaccctgcttcccgcctgcctaccaggacccgggctttagctatggcagcggcagcaccgggagtcagcagagtgaagggagcaaaagcagtgggtccacccggagcagccgccgggccccgggccgtgagaaggagcgtcgggcggcgggagctgggggcagtggcagtgaatcggatcacacggcaccgagtggggtggggagcagctggcgagagcgtccggccggccagctcagccgtggcagcagcccacgcagtcaggcctcggctaccgccccggggctccccccgccccaccccacgaccaaggcctatacagtggtgggggggccacccgggggaccccctgtccgggagctggctgccgtccccccggaattgacaggcagccgccagtccttccagaaggctatggggaacccctgcgagttcttcgtggacatcatgtgactcgtggcgcatgccccagccctgcctgaggtggggagctggcggtcctgccgcatgcagagctcgcgtgggcttgccttcgtgggggccaggacgggaggcagggtggggggcaggctggaccaccaccatctgccctggcagcctggctgctccagctcctgacagcacctgtgtctgagcagccgtgttgggggcgctccctctctgcccctcagcgagagcctcggacctcccaaccccttgtgtctggtggggatccctcctgggatgaggaagaccccctcgggctctcggctgacccccacctcctgcacagctgtgcccaggcccccagggtggtccacgcggggcaaccccctgcggtgcacaggccccctgtctggagtagggatctaatttatttatttattgcctggccggtgactcgggggaggaggcgaccctgtcatctgtcccacctgctgctgccccttggagcagcctgcaccttctctcctcccatccggcaacagtctgaaagtacgtggaggacgggaccggaagacgagagagggctggacatcctgcccaccgtgtcccagccagggcagggagggaccatggcccgcagggtcaaggggccccgatgtgcacagctgccacagggagggaggtcttggggagatgggcagtcaggtggcccgtccttggtgagtgcacacactgcgcgcacacatcgcggccttcctggcttctctggcccccacgtgtctgtgctgtagatactgtatcaaagtcccagcgtttagatggttaacatagagctgcttctgtgtaaatgctgcttattttaaacactaaaaagcgtttaattttatggga

SEQ ID NO: 329689 - DNA, 2996 bp, Homo sapiens
cgttgcggcagcgggatcgtaaagctgttgatatcgattcgggcggtgcgggccggggggggacgcaggcgagcgtgcgggttccaaccctcgacccgtgccctgagcgtgcagacttcgcaagcgctcggacgtcgtcgcgccatggcggagaccaagattatctaccacatggacgaggaggagacgccgtacctggtcaagctgcccgtggcccccgagcgcgtcacgctggccgacttcaagaacgtgctcagcaaccggcccgtgcacgcctacaaattcttctttaagtccatggaccaggacttcggggtggtgaaggaggagatctttgatgacaatgccaagcttccctgcttcaacggccgcgtggtctcctggctggtcctggctgagggtgctcactcggatgcggggtcccagggcacggacagccacacagacctgcccccgcctcttgagcggacaggcggcatcggggactcccggcccccctccttccacccgaatgtggccagcagccgtgacgggatggacaacgagacaggcacggagtccatggtcagtcaccggcgggagcgtgcccgacgccggaaccgcgaggaggccgcccggaccaatgggcacccaaggggagaccgacggcgggatgtggggctgcccccagacagcgcgtccaccgccctcagcagcgagcttgagtccagcagctttgtggactcggacgaggatggcagcacgagcaggctcagcagctccacggagcagagcacctcatccagactcatccggaagcacaaacgccggcggaggaagcagcgccttcggcaggcggaccgggcctcctccttcagcagcataaccgactccaccatgtccctcaacatcgtcactgtcacgctcaacatggaaagacatcactttctgggcatcagcatcgtggggcagagcaacgaccgtggagacggcggcatctacattggctccatcatgaagggcggggctgtggccgctgacggccgcatcgagcccggcgacatgttgctgcaggtgaatgacgtgaactttgagaacatgagcaatgacgatgccgtgcgggtgctgcgggagatcgtttcccagacggggcccatcagcctcactgtggccaagtgctgggacccaacgccccgaagctacttcaccgtcccacgggctgacccggtgcggcccatcgaccccgccgcctggctgtcccacacggcggcactgacaggagccctgccccgctacgagctggaagaggcgccgctgacggtgaagagtgacatgagcgccgtcgtccgggtcatgcagctgccagactcgggactggagatccgcgaccgcatgtggctcaagatcaccatcgccaatgccgtcatcggggcggacgtggtggactggctgtacacacacgtggagggcttcaaggagcggcgggaggcccggaagtacgccagcagcttgctgaagcacggcttcctgcggcacacggtcaacaagatcaccttctccgagcagtgctactacgtcttcggggatctctgcagcatggctccagtgggacttcggatcaggacacgctggccccgctgccccacccggctgccccctggcctctgggtcagggctacccctaccagtacccgggacccccaccctgcttcccgcctgcctaccaggacccgggctttagctatggcagcggcagcaccgggagtcagcagagtgaagggagcaaaagcagtgggtccacccggagcagccgccgggccccgggccgtgagaaggagcgtcgggcggcgggagctgggggcagtggcagtgaatcggatcacacggcaccgagtggggtggggagcagctggcgagagcgtccggccggccagctcagccgtggcagcagcccacgcagtcaggcctcggctaccgccccggggctccccccgccccaccccacgaccaaggcctatacagtggtgggggggccacccgggggaccccctgtccgggagctggctgccgtccccccggaattgacaggcagccgccagtccttccagaaggctatggggaacccctgcgagttcttcgtggacatcatgtgactcgtggcgcatgccccagccctgcctgaggtggggagctggcggtcctgccgcatgcagagctcgcgtgggcttgccttcgtgggggccaggacgggaggcagggtggggggcaggctggaccaccaccatctgccctggcagcctggctgctccagctcctgacagcacctgtgtctgagcagccgtgttgggggcgctccctctctgcccctcagcgagagcctcggacctcccaaccccttgtgtctggtggggatccctcctgggatgaggaagaccccctcgggctctcggctgacccccacctcctgcacagctgtgcccaggcccccagggtggtccacgcggggcaaccccctgcggtgcacaggccccctgtctggagtagggatctaatttatttatttattgcctggccggtgactcgggggaggaggcgaccctgtcatctgtcccacctgctgctgccccttggagcagcctgcaccttctctcctcccatccggcaacagtctgaaagtacgtggaggacgggaccggaagacgagagagggctggacatcctgcccaccgtgtcccagccagggcagggagggaccatggcccgcagggtcaaggggccccgatgtgcacagctgccacagggagggaggtcttggggagatgggcagtcaggtggcccgtccttggtgagtgcacacactgcgcgcacacatcgcggccttcctggcttctctggcccccacgtgtctgtgctgtagatactgtatcaaagtcccagcgtttagatggttaacatagagctgcttctgtgtaaatgctgcttattttaaacactaaaaagcgtttaattttatggga

SEQ ID NO: 329690 - DNA, 1844 bp, Homo sapiens
cgttgcggcagcgggatcgtaaagctgttgatatcgattcgggcggtgcgggccggggggggacgcaggcgagcgtgcgggttccaaccctcgacccgtgccctgagcgtgcagacttcgcaagcgctcggacgtcgtcgcgccatggcggagaccaagattatctaccacatggacgaggaggagacgccgtacctggtcaagctgcccgtggcccccgagcgcgtcacgctggccgacttcaagaacgtgctcagcaaccggcccgtgcacgcctacaaattcttctttaagtccatggaccaggacttcggggtggtgaaggaggagatctttgatgacaatgccaagcttccctgcttcaacggccgcgtggtctcctggctggtcctggctgagggtgctcactcggatgcggggtcccagggcacggacagccacacagacctgcccccgcctcttgagcggacaggcggcatcggggactcccggcccccctccttccacccgaatgtggccagcagccgtgacgggatggacaacgagacaggcacggagtccatggtcagtcaccggcgggagcgtgcccgacgccggaaccgcgaggaggccgcccggaccaatgggcacccaaggggagaccgacggcgggatgtggggctgcccccagacagcgcgtccaccgccctcagcagcgagcttgagtccagcagctttgtggactcggacgaggatggcagcacgagcaggctcagcagctccacggagcagagcacctcatccagactcatccggaagcacaaacgccggcggaggaagcagcgccttcggcaggcggaccgggcctcctccttcagcagcataaccgactccaccatgtccctcaacatcgtcactgtcacgctcaacatggaaagacatcactttctgggcatcagcatcgtggggcagagcaacgaccgtggagacggcggcatctacattggctccatcatgaagggcggggctgtggccgctgacggccgcatcgagcccggcgacatgttgctgcaggtgaatgacgtgaactttgagaacatgagcaatgacgatgccgtgcgggtgctgcgggagatcgtttcccagacggggcccatcagcctcactgtggccaagtgctgggacccaacgccccgaagctacttcaccgtcccacgggctgacccggtgcggcccatcgaccccgccgcctggctgtcccacacggcggcactgacaggagccctgccccgctacgacggtacgagtccctgctccagcgccgtcacgcgcaccagctcctcctcactaaccagctccgtgcctggtgctccacagctggaagaggcgccgctgacggtgaagagtgacatgagcgccgtcgtccgggtcatgcagctgccagactcgggactggagatccgcgaccgcatgtggctcaagatcaccatcgccaatgccgtcatcggggcggacgtggtggactggctgtacacacacgtggagggcttcaaggagcggcgggaggcccggaagtacgccagcagcttgctgaagcacggcttcctgcggcacacgcaaggggccccgatgtgcacagctgccacagggagggaggtcttggggagatgggcagtcaggtggcccgtccttggtgagtgcacacactgcgcgcacacatcgcggccttcctggcttctctggcccccacgtgtctgtgctgtagatactgtatcaaagtcccagcgtttagatggttaacatagagctgcttctgtgtaaatgctgcttattttaaacactaaaaagcgtttaattttatggga

SEQ ID NO: 329691 - DNA, 1414 bp, Homo sapiens
cgttgcggcagcgggatcgtaaagctgttgatatcgattcgggcggtgcgggccggggggggacgcaggcgagcgtgcgggttccaaccctcgacccgtgccctgagcgtgcagacttcgcaagcgctcggacgtcgtcgcgccatggcggagaccaagattatctaccacatggacgaggaggagacgccgtacctggtcaagctgcccgtggcccccgagcgcgtcacgctggccgacttcaagaacgtgctcagcaaccggcccgtgcacgcctacaaattcttctttaagtccatggaccaggacttcggggtggtgaaggaggagatctttgatgacaatgccaagcttccctgcttcaacggccgcgtggtctcctggctggtcctggctgagggtgctcactcggatgcggggtcccagggcacggacagccacacagacctgcccccgcctcttgagcggacaggcggcatcggggactcccggcccccctccttccacccgaatgtggccagcagccgtgacgggatggacaacgagacaggcacggagtccatggtcagtcaccggcgggagcgtgcccgacgccggaaccgcgaggaggccgcccggaccaatgggcacccaaggggagaccgacggcgggatgtggggctgcccccagacagcgcgtccaccgccctcagcagcgagcttgagtccagcagctttgtggactcggacgaggatggcagcacgagcaggctcagcagctccacggagcagagcacctcatccagactcatccggaagcacaaacgccggcggaggaagcagcgccttcggcaggcggaccgggcctcctccttcagcagcataaccgactccaccatgtccctcaacatcgtcactgtcacgctcaacatggaaagacatcactttctgggcatcagcatcgtggggcagagcaacgaccgtggagacggcggcatctacattggctccatcatgaagggcggggctgtggccgctgacggccgcatcgagcccggcgacatgttgctgcaggtgaatgacgtgaactttgagaacatgagcaatgacgatgccgtgcgggtgctgcgggagatcgtttcccagacggggcccatcagcctcactgtggccaagtgctgggacccaacgccccgaagctacttcaccgtcccacgggctgacacggtgcgttggcccaacacggtgcgttggcccaacacggtgcgttggcccaacacggtgcgttgggttgggccaacgcaccgtgttagccaggatggtctctatctcctgacctcatgatccacccgcctcggcctcctaaagtgctgggattacaggcgtgagccacggcgccccgcctgcttttctcctttctggctacattgtgaat

SEQ ID NO: 329692 - DNA, 3021 bp, Homo sapiens
cgttgcggcagcgggatcgtaaagctgttgatatcgattcgggcggtgcgggccggggggggacgcaggcgagcgtgcgggttccaaccctcgacccgtgccctgagcgtgcagacttcgcaagcgctcggacgtcgtcgcgccatggcggagaccaagattatctaccacatggacgaggaggagacgccgtacctggtcaagctgcccgtggcccccgagcgcgtcacgctggccgacttcaagaacgtgctcagcaaccggcccgtgcacgcctacaaattcttctttaagtccatggaccaggacttcggggtggtgaaggaggagatctttgatgacaatgccaagcttccctgcttcaacggccgcgtggtctcctggctggtcctggctgagggtgctcactcggatgcggggtcccagggcacggacagccacacagacctgcccccgcctcttgagcggacaggcggcatcggggactcccggcccccctccttccacccgaatgtggccagcagccgtgacgggatggacaacgagacaggcacggagtccatggtcagtcaccggcgggagcgtgcccgacgccggaaccgcgaggaggccgcccggaccaatgggcacccaaggggagaccgacggcgggatgtggggctgcccccagacagcgcgtccaccgccctcagcagcgagcttgagtccagcagctttgtggactcggacgaggatggcagcacgagcaggctcagcagctccacggagcagagcacctcatccagactcatccggaagcacaaacgccggcggaggaagcagcgccttcggcaggcggaccgggcctcctccttcagcagcataaccgactccaccatgtccctcaacatcgtcactgtcacgctcaacatggaaagacatcactttctgggcatcagcatcgtggggcagagcaacgaccgtggagacggcggcatctacattggctccatcatgaagggcggggctgtggccgctgacggccgcatcgagcccggcgacatgttgctgcaggtgaatgacgtgaactttgagaacatgagcaatgacgatgccgtgcgggtgctgcgggagatcgtttcccagacggggcccatcagcctcactgtggccaagtgctgggacccaacgccccgaagctacttcaccgtcccacgggctgacccggtgcggcccatcgaccccgccgcctggctgtcccacacggcggcactgacaggagccctgccccgctacgagctggaagaggcgccgctgacggtgaagagtgacatgagcgccgtcgtccgggtcatgcagctgccagactcgggactggagatccgcgaccgcatgtggctcaagatcaccatcgccaatgccgtcatcggggcggacgtggtggactggctgtacacacacgtggagggcttcaaggagcggcgggaggcccggaagtacgccagcagcttgctgaagcacggcttcctgcggcacacggtcaacaagatcaccttctccgagcagtgctactacgtcttcggggatctctgcagcaatctcgccaccctgaacctcaacagtggctccagtgggacttcggatcaggacacgctggccccgctgccccacccggctgccccctggcctctgggtcagggctacccctaccagtacccgggacccccaccctgcttcccgcctgcctaccaggacccgggctttagctatggcagcggcagcaccgggagtcagcagagtgaagggagcaaaagcagtgggtccacccggagcagccgccgggccccgggccgtgagaaggagcgtcgggcggcgggagctgggggcagtggcagtgaatcggatcacacggcaccgagtggggtggggagcagctggcgagagcgtccggccggccagctcagccgtggcagcagcccacgcagtcaggcctcggctaccgccccggggctccccccgccccaccccacgaccaaggcctatacagtggtgggggggccacccgggggaccccctgtccgggagctggctgccgtccccccggaattgacaggcagccgccagtccttccagaaggctatggggaacccctgcgagttcttcgtggacatcatgtgactcgtggcgcatgccccagccctgcctgaggtggggagctggcggtcctgccgcatgcagagctcgcgtgggcttgccttcgtgggggccaggacgggaggcagggtggggggcaggctggaccaccaccatctgccctggcagcctggctgctccagctcctgacagcacctgtgtctgagcagccgtgttgggggcgctccctctctgcccctcagcgagagcctcggacctcccaaccccttgtgtctggtggggatccctcctgggatgaggaagaccccctcgggctctcggctgacccccacctcctgcacagctgtgcccaggcccccagggtggtccacgcggggcaaccccctgcggtgcacaggccccctgtctggagtagggatctaatttatttatttattgcctggccggtgactcgggggaggaggcgaccctgtcatctgtcccacctgctgctgccccttggagcagcctgcaccttctctcctcccatccggcaacagtctgaaagtacgtggaggacgggaccggaagacgagagagggctggacatcctgcccaccgtgtcccagccagggcagggagggaccatggcccgcagggtcaaggggccccgatgtgcacagctgccacagggagggaggtcttggggagatgggcagtcaggtggcccgtccttggtgagtgcacacactgcgcgcacacatcgcggccttcctggcttctctggcccccacgtgtctgtgctgtagatactgtatcaaagtcccagcgtttagatggttaacatagagctgcttctgtgtaaatgctgcttattttaaacactaaaaagcgtttaattttatggga

SEQ ID NO: 329693 - DNA, 3268 bp, Homo sapiens
cgttgcggcagcgggatcgtaaagctgttgatatcgattcgggcggtgcgggccggggggggacgcaggcgagcgtgcgggttccaaccctcgacccgtgccctgagcgtgcagacttcgcaagcgctcggacgtcgtcgcgccatggcggagaccaagattatctaccacatggacgaggaggagacgccgtacctggtcaagctgcccgtggcccccgagcgcgtcacgctggccgacttcaagaacgtgctcagcaaccggcccgtgcacgcctacaaattcttctttaagtccatggaccaggacttcggggtggtgaaggaggagatctttgatgacaatgccaagcttccctgcttcaacggccgcgtggtctcctggctggtcctggctgagggtgctcactcggatgcggggtcccagggcacggacagccacacagacctgcccccgcctcttgagcggacaggcggcatcggggactcccggcccccctccttccacccgaatgtggccagcagccgtgacgggatggacaacgagacaggcacggagtccatggtcagtcaccggcgggagcgtgcccgacgccggaaccgcgaggagggtacagtggtcatgtctgcccagctgtggacccccagcctccctgggacccccatgagccatgttcctactacagcagttcctgtcccccagccagtggcggtgcttgggtggaggcacaggcccagcgagcctacagttgagctgccagctcccagacccacaggcatgcagcactgcccaggcagccccaaacccatgacctctgggagaccctgcagtcagttcccaacctgctgcccccacagccgcccggaccaatgggcacccaaggggagaccgacggcgggatgtggggctgcccccagacagcgcgtccaccgccctcagcagcgagcttgagtccagcagctttgtggactcggacgaggatggcagcacgagcaggctcagcagctccacggagcagagcacctcatccagactcatccggaagcacaaacgccggcggaggaagcagcgccttcggcaggcggaccgggcctcctccttcagcagcataaccgactccaccatgtccctcaacatcgtcactgtcacgctcaacatggaaagacatcactttctgggcatcagcatcgtggggcagagcaacgaccgtggagacggcggcatctacattggctccatcatgaagggcggggctgtggccgctgacggccgcatcgagcccggcgacatgttgctgcaggtgaatgacgtgaactttgagaacatgagcaatgacgatgccgtgcgggtgctgcgggagatcgtttcccagacggggcccatcagcctcactgtggccaagtgctgggacccaacgccccgaagctacttcaccgtcccacgggctgacccggtgcggcccatcgaccccgccgcctggctgtcccacacggcggcactgacaggagccctgccccgctacgagctggaagaggcgccgctgacggtgaagagtgacatgagcgccgtcgtccgggtcatgcagctgccagactcgggactggagatccgcgaccgcatgtggctcaagatcaccatcgccaatgccgtcatcggggcggacgtggtggactggctgtacacacacgtggagggcttcaaggagcggcgggaggcccggaagtacgccagcagcttgctgaagcacggcttcctgcggcacacggtcaacaagatcaccttctccgagcagtgctactacgtcttcggggatctctgcagcaatctcgccaccctgaacctcaacagtggctccagtgggacttcggatcaggacacgctggccccgctgccccacccggctgccccctggcctctgggtcagggctacccctaccagtacccgggacccccaccctgcttcccgcctgcctaccaggacccgggctttagctatggcagcggcagcaccgggagtcagcagagtgaagggagcaaaagcagtgggtccacccggagcagccgccgggccccgggccgtgagaaggagcgtcgggcggcgggagctgggggcagtggcagtgaatcggatcacacggcaccgagtggggtggggagcagctggcgagagcgtccggccggccagctcagccgtggcagcagcccacgcagtcaggcctcggctaccgccccggggctccccccgccccaccccacgaccaaggcctatacagtggtgggggggccacccgggggaccccctgtccgggagctggctgccgtccccccggaattgacaggcagccgccagtccttccagaaggctatggggaacccctgcgagttcttcgtggacatcatgtgactcgtggcgcatgccccagccctgcctgaggtggggagctggcggtcctgccgcatgcagagctcgcgtgggcttgccttcgtgggggccaggacgggaggcagggtggggggcaggctggaccaccaccatctgccctggcagcctggctgctccagctcctgacagcacctgtgtctgagcagccgtgttgggggcgctccctctctgcccctcagcgagagcctcggacctcccaaccccttgtgtctggtggggatccctcctgggatgaggaagaccccctcgggctctcggctgacccccacctcctgcacagctgtgcccaggcccccagggtggtccacgcggggcaaccccctgcggtgcacaggccccctgtctggagtagggatctaatttatttatttattgcctggccggtgactcgggggaggaggcgaccctgtcatctgtcccacctgctgctgccccttggagcagcctgcaccttctctcctcccatccggcaacagtctgaaagtacgtggaggacgggaccggaagacgagagagggctggacatcctgcccaccgtgtcccagccagggcagggagggaccatggcccgcagggtcaaggggccccgatgtgcacagctgccacagggagggaggtcttggggagatgggcagtcaggtggcccgtccttggtgagtgcacacactgcgcgcacacatcgcggccttcctggcttctctggcccccacgtgtctgtgctgtagatactgtatcaaagtcccagcgtttagatggttaacatagagctgcttctgtgtaaatgctgcttattttaaacactaaaaagcgtttaattttatggga

SEQ ID NO: 329694 - DNA, 2158 bp, Homo sapiens
gttgggggcaggggcaggggcttggccgcggctcatggctcttcctgcagaaagacatcactttctgggcatcagcatcgtggggcagagcaacgaccgtggagacggcggcatctacattggctccatcatgaagggcggggctgtggccgctgacggccgcatcgagcccggcgacatgttgctgcaggtgaatgacgtgaactttgagaacatgagcaatgacgatgccgtgcgggtgctgcgggagatcgtttcccagacggggcccatcagcctcactgtggccaagtgctgggacccaacgccccgaagctacttcaccgtcccacgggctgacccggtgcggcccatcgaccccgccgcctggctgtcccacacggcggcactgacaggagccctgccccgctacgagctggaagaggcgccgctgacggtgaagagtgacatgagcgccgtcgtccgggtcatgcagctgccagactcgggactggagatccgcgaccgcatgtggctcaagatcaccatcgccaatgccgtcatcggggcggacgtggtggactggctgtacacacacgtggagggcttcaaggagcggcgggaggcccggaagtacgccagcagcttgctgaagcacggcttcctgcggcacacggtcaacaagatcaccttctccgagcagtgctactacgtcttcggggatctctgcagcaatctcgccaccctgaacctcaacagtggctccagtgggacttcggatcaggacacgctggccccgctgccccacccggctgccccctggcctctgggtcagggctacccctaccagtacccgggacccccaccctgcttcccgcctgcctaccaggacccgggctttagctatggcagcggcagcaccgggagtcagcagagtgaagggagcaaaagcagtgggtccacccggagcagccgccgggccccgggccgtgagaaggagcgtcgggcggcgggagctgggggcagtggcagtgaatcggatcacacggcaccgagtggggtggggagcagctggcgagagcgtccggccggccagctcagccgtggcagcagcccacgcagtcaggcctcggctaccgccccggggctccccccgccccaccccacgaccaaggcctatacagtggtgggggggccacccgggggaccccctgtccgggagctggctgccgtccccccggaattgacaggcagccgccagtccttccagaaggctatggggaacccctgcgagttcttcgtggacatcatgtgactcgtggcgcatgccccagccctgcctgaggtggggagctggcggtcctgccgcatgcagagctcgcgtgggcttgccttcgtgggggccaggacgggaggcagggtggggggcaggctggaccaccaccatctgccctggcagcctggctgctccagctcctgacagcacctgtgtctgagcagccgtgttgggggcgctccctctctgcccctcagcgagagcctcggacctcccaaccccttgtgtctggtggggatccctcctgggatgaggaagaccccctcgggctctcggctgacccccacctcctgcacagctgtgcccaggcccccagggtggtccacgcggggcaaccccctgcggtgcacaggccccctgtctggagtagggatctaatttatttatttattgcctggccggtgactcgggggaggaggcgaccctgtcatctgtcccacctgctgctgccccttggagcagcctgcaccttctctcctcccatccggcaacagtctgaaagtacgtggaggacgggaccggaagacgagagagggctggacatcctgcccaccgtgtcccagccagggcagggagggaccatggcccgcagggtcaaggggccccgatgtgcacagctgccacagggagggaggtcttggggagatgggcagtcaggtggcccgtccttggtgagtgcacacactgcgcgcacacatcgcggccttcctggcttctctggcccccacgtgtctgtgctgtagatactgtatcaaagtcccagcgtttagatggttaacatagagctgcttctgtgtaaatgctgcttattttaaacactaaaaagcgtttaattttatggga

SEQ ID NO: 329695 - DNA, 1406 bp, Homo sapiens
cgttgcggcagcgggatcgtaaagctgttgatatcgattcgggcggtgcgggccggggggggacgcaggcgagcgtgcgggttccaaccctcgacccgtgccctgagcgtgcagacttcgcaagcgctcggacgtcgtcgcgccatggcggagaccaagattatctaccacatggacgaggaggagacgccgtacctggtcaagctgcccgtggcccccgagcgcgtcacgctggccgacttcaagaacgtgctcagcaaccggcccgtgcacgcctacaaattcttctttaagtccatggaccaggacttcggggtggtgaaggaggagatctttgatgacaatgccaagcttccctgcttcaacggccgcgtggtctcctggctggtcctggctgagggtgctcactcggatgcggggtcccagggcacggacagccacacagacctgcccccgcctcttgagcggacaggcggcatcggggactcccggcccccctccttccacccgaatgtggccagcagccgtgacgggatggacaacgagacaggcacggagtccatggtcagtcaccggcgggagcgtgcccgacgccggaaccgcgaggaggccgcccggaccaatgggcacccaaggggagaccgacggcgggatgtggggctgcccccagacagcgcgtccaccgccctcagcagcgagcttgagtccagcagctttgtggactcggacgaggatggcagcacgagcaggctcagcagctccacggagcagagcacctcatccagactcatccggaagcacaaacgccggcggaggaagcagcgccttcggcaggcggaccgggcctcctccttcagcagcataaccgactccaccatgtccctcaacatcgtcactgtcacgctcaacatggaaagacatcactttctgggcatcagcatcgtggggcagagcaacgaccgtggagacggcggcatctacattggctccatcatgaagggcggggctgtggccgctgacggccgcatcgagcccggcgacatgttgctgcaggtgaatgacgtgaactttgagaacatgagcaatgacgatgccgtgcgggtgctgcgggagatcgtttcccagacggggcccatcagcctcactgtggccaagtgctgggacccaacgccccgaagctacttcaccgtcccacgggctgacccggtgcggcccatcgaccccgccgcctggctgtcccacacggcggcactgacaggagccctgccccgctacggcacctgtaatcctagctactcaggaggctgaggcaggggaatcgcctgaccccagaaggtggaagttgcagtgagccgagatcgcgccactgcactccagcctgggcaacagagcgagactctgtctca

SEQ ID NO: 329696 - DNA, 995 bp, Homo sapiens
gccccgggccgggccctgagcgcgcgggctccgcgccgccgccgcgccatggcggagaccaagattatctaccacatggacgaggaggagacgccgtacctggtcaagctgcccgtggcccccgagcgcgtcacgctggccgacttcaagaacgtgctcagcaaccggcccgtgcacgcctacaaattcttctttaagtccatggaccaggacttcggggtggtgaaggaggagatctttgatgacaatgccaagcttccctgcttcaacggccgcgtggtctcctggctggtcctggctgagggtgctcactcggatgcggggtcccagggcacggacagccacacagacctgcccccgcctcttgagcggacaggcggcatcggggactcccggcccccctccttccacccgaatgtggccagcagccgtgacgggatggacaacgagacaggcacggagtccatggtcagtcaccggcgggagcgtgcccgacgccggaaccgcgaggaggccgcccggaccaatgggcacccaaggggagaccgacggcgggatgtggggctgcccccagacagcgcgtccaccgccctcagcagcgagcttgagtccagcagctttgtggactcggacgaggatggcagcacgagcaggctcagcagctccacggagcagagcacctcatccagactcatccggaagcacaaacgccggcggaggaagcagcgccttcggcaggcggaccggcaaggggccccgatgtgcacagctgccacagggagggaggtcttggggagatgggcagtcaggtggcccgtccttggtgagtgcacacactgcgcgcacacatcgcggccttcctggcttctctggcccccacgtgtctgtgctgtagatactgtatcaaagtcccagcgtttagatggttaacatagagctgcttctgtgtaaatgctgcttattttaaacactaaaaagcgtttaattttatggga

SEQ ID NO: 329697 - DNA, 514 bp, Homo sapiens
cggtgtctgggtagtcgtgcgtggttttctgcgctggtgtcttggtttggtgctgtgtgttctgcctgaatgcgtatctgatgagctggtgtgggtggttggtcgcagaggcgtagtgctacggtcgttctatggtctagtctggtgggttggtgtggatgggcgagatgccgcgttgctggtggaccgatgtagctgcggggttgcgtgcgcccccgtcgagtgttgtttttgtgtgccccatggtccgcgtcgctgttcgccgggccgtaggtagcgttgtcaggcaccgacttcgcgctttggtttcaacgaagctcgactggttcgcccgtccggcattcccgcgaatcgtcgacccacgcgtccgctttgaaagctgaatataaggagaaaactggccaggaatataaacctggaaaccctcctgctgaaataggacagaatatttcagcaggagggtttccaggtttatattcctggccagttttctccttatattcagctttcaaag

SEQ ID NO: 329698 - DNA, 4887 bp, Homo sapiens
agtagctgcggcgcaggggcggagcgaaggctgcggcggcgtcgggtacgcgcacacgttgcatcttcttcctttcgcggggtcctccgtagttctggcacgagccaggcgtactgacaggtggaccagcggactggtggagatggcgacgctctctctgaccgtgaattcaggagaccctccgctaggagctttgctggcagtagaacacgtgaaagacgatgtcagcatttccgttgaagaagggaaagagaatattcttcatgtttctgaaaatgtgatattcacagatgtgaattctatacttcgctacttggctagagttgcaactacagctgggttatatggctctaatctgatggaacatactgagattgatcactggttggagttcagtgctacaaaattatcttcatgtgattcctttacttctacaattaatgaactcaatcattgcctgtctctgagaacatacttagttggaaactccttgagtttagcagatttatgtgtttgggccaccctaaaaggaaatgctgcctggcaagaacagttgaaacagaagaaagctccagttcatgtaaaacgttggtttggctttcttgaagcccagcaggccttccagtcagtaggtaccaagtgggatgtttcaacaaccaaagctcgagtggcacctgagaaaaagcaagatgttgggaaatttgttgagcttccaggtgcggagatgggaaaggttaccgtcagatttcctccagaggccagtggttacttacacattgggcatgcaaaagctgctcttctgaaccagcactaccaggttaactttaaagggaaactgatcatgagatttgatgacacaaatcctgaaaaagaaaaggaagattttgagaaggttatcttggaagatgttgcaatgttgcatatcaaaccagatcaatttacttatacttcggatcattttgaaactataatgaagtatgcagagaagctaattcaagaagggaaggcttatgtggatgatactcctgctgaacagatgaaagcagaacgtgagcagaggatagaatctaaacatagaaaaaaccctattgagaagaatctacaaatgtgggaagaaatgaaaaaagggagccagtttggtcagtcctgttgtttgcgagcaaaaattgacatgagtagtaacaatggatgcatgagagatccaaccctttatcgctgcaaaattcaaccacatccaagaactggaaataaatacaatgtttatccaacatatgattttgcctgccccatagttgacagcatcgaaggtgttacacatgccctgagaacaacagaataccatgacagagatgagcagttttactggattattgaagctttaggcataagaaaaccatatatttgggaatatagtcggctaaatctcaacaacacagtgctatccaaaagaaaactcacatggtttgtcaatgaaggactagtagatggatgggatgacccaagatttcctacggttcgtggtgtactgagaagagggatgacagttgaaggactgaaacagtttattgctgctcagggctcctcacgttcagtcgtgaacatggagtgggacaaaatctgggcgtttaacaaaaaggttattgacccagtggctccacgatatgttgcattactgaagaaagaagtgatcccagtgaatgtacctgaagctcaggaggagatgaaagaagtagccaaacacccaaagaatcctgaggttggcttgaagcctgtgtggtatagtcccaaagttttcattgaaggtgctgatgcagagactttttcggagggtgagatggttacatttataaattggggcaacctcaacattacaaaaatacacaaaaatgcagatggaaaaatcatatctcttgatgcaaagttgaatttggaaaacaaagactacaagaaaaccactaaggtcacttggcttgcagagactacacatgctcttcctattccagtaatctgtgtcacttatgagcacttgatcacaaagccagtgctaggaaaagacgaggactttaagcagtatgtcaacaagaacagtaagcatgaagagctaatgctaggggatccctgccttaaggatttgaaaaaaggagatattatacaactccagagaagaggattcttcatatgtgatcaaccttatgaacctgttagcccatatagttgcaaggaagccccgtgtgttttgatatacattcctgatgggcacacaaaggaaatgccaacatcagggtcaaaggaaaagaccaaagtagaagccacaaaaaatgagacctctgctccttttaaggaaagaccaacaccttctctgaataataattgtactacatctgaggattccttggtcctttacaatagagtggctgttcaaggagatgtggttcgtgaattaaaagccaagaaagcaccaaaggaagatgtagatgcagctgtaaaacagcttttgtctttgaaagctgaatataaggagaaaactggccaggaatataaacctggaaaccctcctgctgaaataggacagaatatttcttctaattcctcagcaagtattctggaaagtaaatctctgtatgatgaagttgctgcacaaggggaggtggttcgtaagctaaaagctgaaaaatcccctaaggctaaaataaatgaagctgtagaatgcttactgtccctgaaggctcagtataaagaaaaaactgggaaggagtacatacctggtcagcccccattatctcaaagttcggattcaagcccaaccagaaattctgaacctgctggtttagaaacaccagaagcgaaagtactttttgacaaagtagcttctcaaggggaagtagttcggaaacttaaaactgaaaaagcccctaaggatcaagtagatatagctgttcaagaactccttcagctaaaggcacagtacaagtctttgataggagtagagtataagcctgtgtcggccactggagctgaggacaaagataagaagaagaaagaaaaagaaaataaatctgaaaagcagaataagcctcagaaacaaaatgatggccaaaggaaagacccttctaaaaaccaaggaggtgggctctcatcaagtggagcaggagaagggcaggggcctaagaaacagaccaggttgggtcttgaggcaaaaaaagaagaaaatcttgctgattggtattctcaggtcatcacaaagtcagaaatgattgaataccatgacataagtggctgttatattcttcgtccctgggcctatgccatttgggaagccatcaaggacttttttgatgctgagatcaagaaacttggtgttgaaaactgctacttccccatgtttgtgtctcaaagtgcattagagaaagagaagactcatgttgctgactttgccccagaggttgcttgggttacaagatctggcaaaaccgagctggcagaaccaattgccattcgtcctactagtgaaacagtaatgtatcctgcatatgcaaaatgggtacaatcacacagagacctgcccatcaagctcaatcagtggtgcaatgtggtgcgttgggaattcaagcatcctcagcctttcctacgtactcgtgaatttctttggcaggaagggcacagtgcttttgctaccatggaagaggcagcggaagaggtcttgcagatacttgacttatatgctcaggtatatgaagaactcctggcaattcctgttgttaaaggaagaaagacggaaaaggaaaaatttgcaggaggagactatacaactacaatagaagcatttatatctgctagtggaagagctatccagggaggaacatcacatcatttagggcagaatttttccaaaatgtttgaaatcgtttttgaagatccaaagataccaggagagaagcaatttgcctatcaaaactcctggggcctgacaactcgaactattggtgttatgaccatggttcatggggacaacatgggtttagtattaccaccccgtgtagcatgtgttcaggtggtgattattccttgtggcattaccaatgcactttctgaagaagacaaagaagcgctgattgcaaaatgcaatgattatcgaaggcgattactcagtgttaacatccgcgttagagctgatttacgagataattattctccaggttggaaattcaatcactgggagctcaagggagttcccattagacttgaagttgggccacgtgatatgaagagctgtcagtttgtagccgtcagacgagatactggagaaaagctgacagttgctgaaaatgaggcagagactaaacttcaagctattttggaagacatccaggtcacccttttcacaagggcttctgaagaccttaagactcatatggttgtggctaatacaatggaagactttcagaagatactagattctggaaagattgttcagattccattctgtggggaaattgactgtgaggactggatcaaaaagaccactgccagggatcaagatcttgaacctggtgctccatccatgggagctaaaagcctttgcatccccttcaaaccactctgtgaactgcagcctggagccaaatgtgtctgtggcaagaaccctgccaagtactacaccttatttggtcgcagctactgagggatgaacgaaagccccctcttcaactcctctcactttttaaagcattgatattagtatcttctcagatacagaccgttttatgattttttaaaaagtaaaagttctaaaatgaagtcacacaggacaattattcttatgcctaagttaacagtggataaaagacttttctgtaaacaactccagtaataaatatcatgaactaa

SEQ ID NO: 329699 - DNA, 5126 bp, Homo sapiens
gccgtcgtctgtctcacaaccccaacttccttcttgcctttggagctgatcttattcctgataaagaagtccccatcccatttatgttagcacctctcctacttcagctattattttactccagacacttgtctctgacttgaaaaaagccattattgctcagtgggtgtgtgactgggaggttagggagtagtgggatgatgtggagttgtggtttttcttggaggtcacttccttcttctacaactagtttggaacaagtaagaatatgctttttccaacttggaaagacagttttttcaaaaacaactttcttgaggtataattgacatacagaaaatcacacttatttaaaaatgtatattttgataaattttgacatatatatgtgtgtgtatatatacatacacacacacacacagctgtggaactatggttacaatcaagataataaatatatccaccacccccaaaagttcctcatgctgctttgtaatcatccaccctcaccaggtcccaagaaaccagcatgcccagctttgcatatttttcgtcttccagttgggttgtatctacggttatggaacccatggacacagagagctaactgttttagaaaacagttcagtgtatatccagatatttaacatttcatttgctttagaagcacaactttaagccatctcaattactttaattagtcacaactggaactttgcttttgaagctgcagatttattgaatagtttaaaattatctttgctcataggaaatgctgcctggcaagaacagttgaaacagaagaaagctccagttcatgtaaaacgttggtttggctttcttgaagcccagcaggccttccagtcagtaggtaccaagtgggatgtttcaacaaccaaagctcgagtggcacctgagaaaaagcaagatgttgggaaatttgttgagcttccaggtgcggagatgggaaaggttaccgtcagatttcctccagaggccagtggttacttacacattgggcatgcaaaagctgctcttctgaaccagcactaccaggttaactttaaagggaaactgatcatgagatttgatgacacaaatcctgaaaaagaaaaggaagattttgagaaggttatcttggaagatgttgcaatgttgcatatcaaaccagatcaatttacttatacttcggatcattttgaaactataatgaagtatgcagagaagctaattcaagaagggaaggcttatgtggatgatactcctgctgaacagatgaaagcagaacgtgagcagaggatagaatctaaacatagaaaaaaccctattgagaagaatctacaaatgtgggaagaaatgaaaaaagggagccagtttggtcagtcctgttgtttgcgagcaaaaattgacatgagtagtaacaatggatgcatgagagatccaaccctttatcgctgcaaaattcaaccacatccaagaactggaaataaatacaatgtttatccaacatatgattttgcctgccccatagttgacagcatcgaaggtgttacacatgccctgagaacaacagaataccatgacagagatgagcagttttactggattattgaagctttaggcataagaaaaccatatatttgggaatatagtcggctaaatctcaacaacacagtgctatccaaaagaaaactcacatggtttgtcaatgaaggactagtagatggatgggatgacccaagatttcctacggttcgtggtgtactgagaagagggatgacagttgaaggactgaaacagtttattgctgctcagggctcctcacgttcagtcgtgaacatggagtgggacaaaatctgggcgtttaacaaaaaggttattgacccagtggctccacgatatgttgcattactgaagaaagaagtgatcccagtgaatgtacctgaagctcaggaggagatgaaagaagtagccaaacacccaaagaatcctgaggttggcttgaagcctgtgtggtatagtcccaaagttttcattgaaggtgctgatgcagagactttttcggagggtgagatggttacatttataaattggggcaacctcaacattacaaaaatacacaaaaatgcagatggaaaaatcatatctcttgatgcaaagttgaatttggaaaacaaagactacaagaaaaccactaaggtcacttggcttgcagagactacacatgctcttcctattccagtaatctgtgtcacttatgagcacttgatcacaaagccagtgctaggaaaagacgaggactttaagcagtatgtcaacaagaacagtaagcatgaagagctaatgctaggggatccctgccttaaggatttgaaaaaaggagatattatacaactccagagaagaggattcttcatatgtgatcaaccttatgaacctgttagcccatatagttgcaaggaagccccgtgtgttttgatatacattcctgatgggcacacaaaggaaatgccaacatcagggtcaaaggaaaagaccaaagtagaagccacaaaaaatgagacctctgctccttttaaggaaagaccaacaccttctctgaataataattgtactacatctgaggattccttggtcctttacaatagagtggctgttcaaggagatgtggttcgtgaattaaaagccaagaaagcaccaaaggaagatgtagatgcagctgtaaaacagcttttgtctttgaaagctgaatataaggagaaaactggccaggaatataaacctggaaaccctcctgctgaaataggacagaatatttcttctaattcctcagcaagtattctggaaagtaaatctctgtatgatgaagttgctgcacaaggggaggtggttcgtaagctaaaagctgaaaaatcccctaaggctaaaataaatgaagctgtagaatgcttactgtccctgaaggctcagtataaagaaaaaactgggaaggagtacatacctggtcagcccccattatctcaaagttcggattcaagcccaaccagaaattctgaacctgctggtttagaaacaccagaagcgaaagtactttttgacaaagtagcttctcaaggggaagtagttcggaaacttaaaactgaaaaagcccctaaggatcaagtagatatagctgttcaagaactccttcagctaaaggcacagtacaagtctttgataggagtagagtataagcctgtgtcggccactggagctgaggacaaagataagaagaagaaagaaaaagaaaataaatctgaaaagcagaataagcctcagaaacaaaatgatggccaaaggaaagacccttctaaaaaccaaggaggtgggctctcatcaagtggagcaggagaagggcaggggcctaagaaacagaccaggttgggtcttgaggcaaaaaaagaagaaaatcttgctgattggtattctcaggtcatcacaaagtcagaaatgattgaataccatgacataagtggctgttatattcttcgtccctgggcctatgccatttgggaagccatcaaggacttttttgatgctgagatcaagaaacttggtgttgaaaactgctacttccccatgtttgtgtctcaaagtgcattagagaaagagaagactcatgttgctgactttgccccagaggttgcttgggttacaagatctggcaaaaccgagctggcagaaccaattgccattcgtcctactagtgaaacagtaatgtatcctgcatatgcaaaatgggtacaatcacacagagacctgcccatcaagctcaatcagtggtgcaatgtggtgcgttgggaattcaagcatcctcagcctttcctacgtactcgtgaatttctttggcaggaagggcacagtgcttttgctaccatggaagaggcagcggaagaggtcttgcagatacttgacttatatgctcaggtatatgaagaactcctggcaattcctgttgttaaaggaagaaagacggaaaaggaaaaatttgcaggaggagactatacaactacaatagaagcatttatatctgctagtggaagagctatccagggaggaacatcacatcatttagggcagaatttttccaaaatgtttgaaatcgtttttgaagatccaaagataccaggagagaagcaatttgcctatcaaaactcctggggcctgacaactcgaactattggtgttatgaccatggttcatggggacaacatgggtttagtattaccaccccgtgtagcatgtgttcaggtggtgattattccttgtggcattaccaatgcactttctgaagaagacaaagaagcgctgattgcaaaatgcaatgattatcgaaggcgattactcagtgttaacatccgcgttagagctgatttacgagataattattctccaggttggaaattcaatcactgggagctcaagggagttcccattagacttgaagttgggccacgtgatatgaagagctgtcagtttgtagccgtcagacgagatactggagaaaagctgacagttgctgaaaatgaggcagagactaaacttcaagctattttggaagacatccaggtcacccttttcacaagggcttctgaagaccttaagactcatatggttgtggctaatacaatggaagactttcagaagatactagattctggaaagattgttcagattccattctgtggggaaattgactgtgaggactggatcaaaaagaccactgccagggatcaagatcttgaacctggtgctccatccatgggagctaaaagcctttgcatccccttcaaaccactctgtgaactgcagcctggagccaaatgtgtctgtggcaagaaccctgccaagtactacaccttatttggtcgcagctactgagggatgaacgaaagccccctcttcaactcctctcactttttaaagcattgatattagtatcttctcagatacagaccgttttatgattttttaaaaagtaaaagttctaaaatgaagtcacacaggacaattattcttatgcctaagttaacagtggataaaagacttttctgtaaacaactccagtaataaatatcatgaactaa

SEQ ID NO: 329700 - DNA, 4993 bp, Homo sapiens
agtagctgcggcgcaggggcggagcgaaggctgcggcggcgtcgggtacgcgcacacgttgcatcttcttcctttcgcggggtcctccgtagttctggcacgagccaggcgtactgacaggtggaccagcggactggtggagatggcgacgctctctctgaccgtgaattcaggagaccctccgctaggagctttgctggcagtagaacacgtgaaagacgatgtcagcatttccgttgaagaagggaaagagaatattcttcatgtttctgaaaatgtgatattcacagatgtgaattctatacttcgctacttggctagagttgcaactacagctgggttatatggctctaatctgatggaacatactgagattgatcactggttggagttcagtgctacaaaattatcttcatgtgattcctttacttctacaattaatgaactcaatcattgcctgtctctgagaacatacttagttggaaactccttgagtttagcagatttatgtgtttgggccaccctaaaaggaaatgctgcctggcaagaacagttgaaacagaagaaagctccagttcatgtaaaacgttggtttggctttcttgaagcccagcaggccttccagtcagtaggtaccaagtgggatgtttcaacaaccaaagctcgagtggcacctgagaaaaagcaagatgttgggaaatttgttgagcttccaggtgcggagatgggaaaggttaccgtcagatttcctccagaggccagtggttacttacacattgggcatgcaaaagctgctcttctgaaccagcactaccaggttaactttaaagggaaactgatcatgagatttgatgacacaaatcctgaaaaagaaaaggaagattttgagaaggttatcttggaagatgttgcaatgttgcatatcaaaccagatcaatttacttatacttcggatcattttgaaactataatgaagtatgcagagaagctaattcaagaagggaaggcttatgtggatgatactcctgctgaacagatgaaagcagaacgtgagcagaggatagaatctaaacatagaaaaaaccctattgagaagaatctacaaatgtgggaagaaatgaaaaaagggagccagtttggtcagtcctgttgtttgcgagcaaaaattgacatgagtagtaacaatggatgcatgagagatccaaccctttatcgctgcaaaattcaaccacatccaagaactggaaataaatacaatgtttatccaacatatgattttgcctgccccatagttgacagcatcgaaggtgttacacatgccctgagaacaacagaataccatgacagagatgagcagttttactggattattgaagctttaggcataagaaaaccatatatttgggaatatagtcggctaaatctcaacaacacagtgctatccaaaagaaaactcacatggtttgtcaatgaaggactagtagatggatgggatgacccaagatttcctacggttcgtggtgtactgagaagagggatgacagttgaaggactgaaacagtttattgctgctcagggctcctcacgttcagtcgtgaacatggagtgggacaaaatctgggcgtttaacaaaaaggttattgacccagtggctccacgatatgttgcattactgaagaaagaagtgatcccagtgaatgtacctgaagctcaggaggagatgaaagaagtagccaaacacccaaagaatcctgaggttggcttgaagcctgtgtggtatagtcccaaagttttcattgaaggtgctgatgcagagactttttcggagggtgagatggttacatttataaattggggcaacctcaacattacaaaaatacacaaaaatgcagatggaaaaatcatatctcttgatgcaaagttgaatttggaaaacaaagactacaagaaaaccactaaggtcacttggcttgcagagactacacatgctcttcctattccagtaatctgtgtcacttatgagcacttgatcacaaagccagtgctaggaaaagacgaggactttaagcagtatgtcaacaagaacagtaagcatgaagagctaatgctaggggatccctgccttaaggatttgaaaaaaggagatattatacaactccagagaagaggattcttcatatgtgatcaaccttatgaacctgttagcccatatagttgcaaggaagccccgtgtgttttgatatacattcctgatgggcacacaaaggaaatgccaacatcagggtcaaaggaaaagaccaaagtagaagccacaaaaaatgagacctctgctccttttaaggaaagaccaacaccttctctgaataataattgtactacatctgaggattccttggtcctttacaatagagtggctgttcaaggagatgtggttcgtgaattaaaagccaagaaagcaccaaaggaagatgtagatgcagctgtaaaacagcttttgtctttgaaagctgaatataaggagaaaactggccaggaatataaacctggaaaccctcctgctgaaataggacagaatatttcttctaattcctcagcaagtattctggaaagtaaatctctgtatgatgaagttgctgcacaaggggaggtggttcgtaagctaaaagctgaaaaatcccctaaggctaaaataaatgaagctgtagaatgcttactgtccctgaaggctcagtataaagaaaaaactgggaaggagtacatacctggtcagcccccattatctcaaagttcggattcaagcccaaccagaaattctgaacctgctggtttagaaacaccagaagcgaaagtactttttgacaaagtagcttctcaaggggaagtagttcggaaacttaaaactgaaaaagcccctaaggatcaagtagatatagctgttcaagaactccttcagctaaaggcacagtacaagtctttgataggagtagagtataagcctgtgtcggccactggagctgaggacaaagataagaagaagaaagaaaaagaaaataaatctgaaaagcagaataagcctcagaaacaaaatgatggccaaaggaaagacccttctaaaaaccaaggaggtgggctctcatcaagtggagcaggagaagggcaggggcctaagaaacagaccaggttgggtcttgaggcaaaaaaagaagaaaatcttgctgattggtattctcaggtcatcacaaagtcagaaatgattgaataccatgacataagtggctgttatattcttcgtccctgggcctatgccatttgggaagccatcaaggacttttttgatgctgagatcaagaaacttggtgttgaaaactgctacttccccatgtttgtgtctcaaagtgcattagagaaagagaagactcatgttgctgactttgccccagaggttgcttgggttacaagatctggcaaaaccgagctggcagaaccaattgccattcgtcctactagtgaaacagtaatgtatcctgcatatgcaaaatgggtacaatcacacagagacctgcccatcaagctcaatcagtggtgcaatgtggtgcgttgggaattcaagcatcctcagcctttcctacgtactcgtgaatttctttggcaggaagggcacagtgcttttgctaccatggaagaggcagcggaagaggtcttgcagatacttgacttatatgctcaggtatatgaagaactcctggcaattcctgttgttaaaggaagaaagacggaaaaggaaaaatttgcaggaggagactatacaactacaatagaagcatttatatctgctagtggaagagctatccagggaggaacatcacatcatttagggcagaatttttccaaaatgtttgaaatcgtttttgaagatccaaagataccaggagagaagcaatttgcctatcaaaactcctggggcctgacaactcgaactattggtgttatgaccatggttcatggggacaacatgggtttagtattaccaccccgtgtagcatgtgttcaggtggtgattattccttgtggcattaccaatgcactttctgaagaagacaaagaagcgctgattgcaaaatgcaatgattatcgaaggcgattactcagtgttaacatccgcgttagagctgatttacgagataattattctccaggttggaaattcaatcactgggagctcaagggagttcccattagacttgaagttgggccacgtgatatgaagagctgtcagtttgtagccgtcagacgagatactggagaaaagctgacagttgctgaaaatgaggcagagactaaacttcaagctattttggaagacatccaggtcacccttttcacaagggcttctgaagaccttaagactcatatggttgtggctaatacaatggaagactttcagaagatactagattctggaaagattgttcagattccattctgtggggaaattgactgtgaggactggatcaaaaagaccactgccagggatcaagatcttgaacctggtgctccatccatgggagctaaaagcctttgcatccccttcaaaccactctgtgaactgcagcctggagccaaatgtgtctgtggcaagaaccctgccaagtactacaccttatttggtcgcagctactgagggatgaacgaaagccccctcttcaactcctctcactttttaaagcattgatattagtatcttctcagatacagaccgttttatgattttttaaaaagtaaaagttctaaaatgaagtcacacaggacaattattcttatgcctaagttaacagtggataaaagacttttctgtaaacaactccagtaataaatatcatgaactaagaaaaaaatcataaaaacttgaggttggggcccgttaccccaattcgccctaatgggagtcgaattacaattcactggcccggcgtttacaacgatcggacttgga

SEQ ID NO: 329701 - DNA, 3126 bp, Homo sapiens
taggctagtcgaggctggtgtgaatcggccgaggattgaaggtgctgatgcagagactttttcggagggtgagatggttacatttataaattggggcaacctcaacattacaaaaatacacaaaaatgcagatggaaaaatcatatctcttgatgcaaagttgaatttggaaaacaaagactacaagaaaaccactaaggtcacttggcttgcagagactacacatgctcttcctattccagtaatctgtgtcacttatgagcacttgatcacaaagccagtgctaggaaaagacgaggactttaagcagtatgtcaacaagaacagtaagcatgaagagctaatgctaggggatccctgccttaaggatttgaaaaaaggagatattatacaactccagagaagaggattcttcatatgtgatcaaccttatgaacctgttagcccatatagttgcaaggaagccccgtgtgttttgatatacattcctgatgggcacacaaaggaaatgccaacatcagggtcaaaggaaaagaccaaagtagaagccacaaaaaatgagacctctgctccttttaaggaaagaccaacaccttctctgaataataattgtactacatctgaggattccttggtcctttacaatagagtggctgttcaaggagatgtggttcgtgaattaaaagccaagaaagcaccaaaggaagatgtagatgcagctgtaaaacagcttttgtctttgaaagctgaatataaggagaaaactggccaggaatataaacctggaaaccctcctgctgaaataggacagaatatttcttctaattcctcagcaagtattctggaaagtaaatctctgtatgatgaagttgctgcacaaggggaggtggttcgtaagctaaaagctgaaaaatcccctaaggctaaaataaatgaagctgtagaatgcttactgtccctgaaggctcagtataaagaaaaaactgggaaggagtacatacctggtcagcccccattatctcaaagttcggattcaagcccaaccagaaattctgaacctgctggtttagaaacaccagaagcgaaagtactttttgacaaagtagcttctcaaggggaagtagttcggaaacttaaaactgaaaaagcccctaaggatcaagtagatatagctgttcaagaactccttcagctaaaggcacagtacaagtctttgataggagtagagtataagcctgtgtcggccactggagctgaggacaaagataagaagaagaaagaaaaagaaaataaatctgaaaagcagaataagcctcagaaacaaaatgatggccaaaggaaagacccttctaaaaaccaaggaggtgggctctcatcaagtggagcaggagaagggcaggggcctaagaaacagaccaggttgggtcttgaggcaaaaaaagaagaaaatcttgctgattggtattctcaggtcatcacaaagtcagaaatgattgaataccatgacataagtggctgttatattcttcgtccctgggcctatgccatttgggaagccatcaaggacttttttgatgctgagatcaagaaacttggtgttgaaaactgctacttccccatgtttgtgtctcaaagtgcattagagaaagagaagactcatgttgctgactttgccccagaggttgcttgggttacaagatctggcaaaaccgagctggcagaaccaattgccattcgtcctactagtgaaacagtaatgtatcctgcatatgcaaaatgggtacaatcacacagagacctgcccatcaagctcaatcagtggtgcaatgtggtgcgttgggaattcaagcatcctcagcctttcctacgtactcgtgaatttctttggcaggaagggcacagtgcttttgctaccatggaagaggcagcggaagaggtcttgcagatacttgacttatatgctcaggtatatgaagaactcctggcaattcctgttgttaaaggaagaaagacggaaaaggaaaaatttgcaggaggagactatacaactacaatagaagcatttatatctgctagtggaagagctatccagggaggaacatcacatcatttagggcagaatttttccaaaatgtttgaaatcgtttttgaagatccaaagataccaggagagaagcaatttgcctatcaaaactcctggggcctgacaactcgaactattggtgttatgaccatggttcatggggacaacatgggtttagtattaccaccccgtgtagcatgtgttcaggtggtgattattccttgtggcattaccaatgcactttctgaagaagacaaagaagcgctgattgcaaaatgcaatgattatcgaaggcgattactcagtgttaacatccgcgttagagctgatttacgagataattattctccaggttggaaattcaatcactgggagctcaagggagttcccattagacttgaagttgggccacgtgatatgaagagctgtcagtttgtagccgtcagacgagatactggagaaaagctgacagttgctgaaaatgaggcagagactaaacttcaagctattttggaagacatccaggtcacccttttcacaagggcttctgaagaccttaagactcatatggttgtggctaatacaatggaagactttcagaagatactagattctggaaagattgttcagattccattctgtggggaaattgactgtgaggactggatcaaaaagaccactgccagggatcaagatcttgaacctggtgctccatccatgggagctaaaagcctttgcatccccttcaaaccactctgtgaactgcagcctggagccaaatgtgtctgtggcaagaaccctgccaagtactacaccttatttggtcgcagctactgagggatgaacgaaagccccctcttcaactcctctcactttttaaagcattgatattagtatcttctcagatacagaccgttttatgattttttaaaaagtaaaagttctaaaatgaagtcacacaggacaattattcttatgcctaagttaacagtggataaaagacttttctgtaaacaactccagtaataaatatcatgaactaa

SEQ ID NO: 329702 - DNA, 5409 bp, Homo sapiens
agtagctgcggcgcaggggcggagcgaaggctgcggcggcgtcgggtacgcgcacacgttgcatcttcttcctttcgcggggtcctccgtagttctggcacgagccaggcgtactgacaggtggaccagcggactggtggagatggcgacgctctctctgaccgtgaattcaggagaccctccgctaggagctttgctggcagtagaacacgtgaaagacgatgtcagcatttccgttgaagaagggaaagagaatattcttcatgtttctgaaaatgtgatattcacagatgtgaattctatacttcgctacttggctagagttgcaactacagctgggttatatggctctaatctgatggaacatactgagattgatcactggttggagttcagtgctacaaaattatcttcatgtgattcctttacttctacaattaatgaactcaatcattgcctgtctctgagaacatacttagttggaaactccttgagtttagcagatttatgtgtttgggccaccctaaaaggaaatgctgcctggcaagaacagttgaaacagaagaaagctccagttcatgtaaaacgttggtttggctttcttgaagcccagcaggccttccagtcagtaggtaccaagtgggatgtttcaacaaccaaagctcgagtggcacctgagaaaaagcaagatgttgggaaatttgttgagcttccaggtgcggagatgggaaaggttaccgtcagatttcctccagaggccagtggttacttacacattgggcatgcaaaagctgctcttctgaaccagcactaccaggttaactttaaagggaaactgatcatgagatttgatgacacaaatcctgaaaaagaaaaggaagattttgagaaggttatcttggaagatgttgcaatgttgcatatcaaaccagatcaatttacttatacttcggatcattttgaaactataatgaagtatgcagagaagctaattcaagaagggaaggcttatgtggatgatactcctgctgaacagatgaaagcagaacgtgagcagaggatagaatctaaacatagaaaaaaccctattgagaagaatctacaaatgtgggaagaaatgaaaaaagggagccagtttggtcagtcctgttgtttgcgagcaaaaattgacatgagtagtaacaatggatgcatgagagatccaaccctttatcgctgcaaaattcaaccacatccaagaactggaaataaatacaatgtttatccaacatatgattttgcctgccccatagttgacagcatcgaaggtgttacacatgccctgagaacaacagaataccatgacagagatgagcagttttactggattattgaagctttaggcataagaaaaccatatatttgggaatatagtcggctaaatctcaacaacacagtgctatccaaaagaaaactcacatggtttgtcaatgaaggactagtagatggatgggatgacccaagatttcctacggttcgtggtgtactgagaagagggatgacagttgaaggactgaaacagtttattgctgctcagggctcctcacgttcagtcgtgaacatggagtgggacaaaatctgggcgtttaacaaaaaggttattgacccagtggctccacgatatgttgcattactgaagaaagaagtgatcccagtgaatgtacctgaagctcaggaggagatgaaagaagtagccaaacacccaaagaatcctgaggttggcttgaagcctgtgtggtatagtcccaaagttttcattgaaggtgctgatgcagagactttttcggagggtgagatggttacatttataaattggggcaacctcaacattacaaaaatacacaaaaatgcagatggaaaaatcatatctcttgatgcaaagttgaatttggaaaacaaagactacaagaaaaccactaaggtcacttggcttgcagagactacacatgctcttcctattccagtaatctgtgtcacttatgagcacttgatcacaaagccagtgctaggaaaagacgaggactttaagcagtatgtcaacaagaacagtaagcatgaagagctaatgctaggggatccctgccttaaggatttgaaaaaaggagatattatacaactccagagaagaggattcttcatatgtgatcaaccttatgaacctgttagcccatatagttgcaaggaagccccgtgtgttttgatatacattcctgatgggcacacaaaggaaatgccaacatcagggtcaaaggaaaagaccaaagtagaagccacaaaaaatgagacctctgctccttttaaggaaagaccaacaccttctctgaataataattgtactacatctgaggattccttggtcctttacaatagagtggctgttcaaggagatgtggttcgtgaattaaaagccaagaaagcaccaaaggaagatgtagatgcagctgtaaaacagcttttgtctttgaaagctgaatataaggagaaaactggccaggaatataaacctggaaaccctcctgctgaaataggacagaatatttcttctaattcctcagcaagtattctggaaagtaaatctctgtatgatgaagttgctgcacaaggggaggtggttcgtaagctaaaagctgaaaaatcccctaaggctaaaataaatgaagctgtagaatgcttactgtccctgaaggctcagtataaagaaaaaactgggaaggagtacatacctggtcagcccccattatctcaaagttcggattcaagcccaaccagaaattctgaacctgctggtttagaaacaccagaagcgaaagtactttttgacaaagtagcttctcaaggggaagtagttcggaaacttaaaactgaaaaagcccctaaggatcaagtagatatagctgttcaagaactccttcagctaaaggcacagtacaagtctttgataggagtagagtataagcctgtgtcggccactggagctgaggacaaagataagaagaagaaagaaaaagaaaataaatctgaaaagcagaataagcctcagaaacaaaatgatggccaaaggaaagacccttctaaaaaccaaggaggtgggctctcatcaagtggagcaggagaagggcaggggcctaagaaacagaccaggttgggtcttgaggcaaaaaaagaagaaaatcttgctgattggtattctcaggtcatcacaaagtcagaaatgattgaataccatgacataagtggctgttatattcttcgtccctgggcctatgccatttgggaagccatcaaggacttttttgatgctgagatcaagaaacttggtgttgaaaactgctacttccccatgtttgtgtctcaaagtgcattagagaaagagaagactcatgttgctgactttgccccagaggttgcttgggttacaagatctggcaaaaccgagctggcagaaccaattgccattcgtcctactagtgaaacagtaatgtatcctgcatatgcaaaatgggtacaatcacacagagacctgcccatcaagctcaatcagtggtgcaatgtggtgcgttgggaattcaagcatcctcagcctttcctacgtactcgtgaatttctttggcaggaagggcacagtgcttttgctaccatggaagaggcagcggaagaggtcttgcagatacttgacttatatgctcaggtatatgaagaactcctggcaattcctgttgttaaaggaagaaagacggaaaaggaaaaatttgcaggaggagactatacaactacaatagaagcatttatatctgctagtggaagagctatccagggaggaacatcacatcatttagggcagaatttttccaaaatgtttgaaatcgtttttgaagatccaaagataccaggagagaagcaatttgcctatcaaaactcctggggcctgacaactcgaactattggtgttatgaccatggttcatggggacaacatgggtttagtattaccaccccgtgtagcatgtgttcaggtggtgattattccttgtggcattaccaatgcactttctgaagaagacaaagaagcgctgattgcaaaatgcaatgattatcgaaggcgattactcagtgttaacatccgcgttagagctgatttacgagataattattctccaggttggaaattcaatcactgggagctcaagggagttcccattagacttgaagttgggccacgtgatatgaagagctgtcagtttgtagccgtcagacgagatactggagaaaagctgacagttgctgaaaatgaggcagagactaaacttcaagctattttggaagacatccaggtcacccttttcacaagggcttctgaagaccttaagactcatatggttgtggctaatacaatggaagactttcagaagatactagattctggaaagattgttcagattccattctgtggggaaattgactgtgaggactggatcaaaaagaccactgccaggtaaacctaattaactggcaaaacttttgaaaaattgcaatggaaaggaatagcaatttgcagcataaatgagtggaattcttatttgttattaatttcagggatcaagatcttgaacctggtgctccatccatgggagctaaaagcctttgcatccccttcaaaccactctgtgaactgcagcctggagccaaatgtgtctgtggcaagaaccctgccaagtactacaccttatttggtcgcagctactgagggatgaacgaaagccccctcttcaactcctctcactttttaaagcattgatattagtatcttctcagatacagaccgttttatgattttttaaaaagtaaaagttctaaaatgaagtcacacaggacaattattcttatgcctaagttaacagtggataaaagacttttctgtaaacaactccagtaataaatatcatgaactaaaaaaaaaaaaaaaaaaaaaaaaaaaaaaaaaaaaaaaaaaaaaaaaaaaaaaaaaaaaaataaaaaaaagaaacatccaacaaaatgaaagaaccaaaccataaaaatggataaaatataaacagatgcataacaacaatcaagtagtgactatcgacaaaacaccaatgataagaccagtttgacatacgggattggcgggcgtcgctacgtcactgtcactggcaagacgaagcccttacggaccatgttggaacgcctttcatatttcatgtatcgctatcctagtgcgggtccatcctcacacatactctgatgaacaccactaacccgcagtggtggagtagcagacaatttcaatgcggcacatggatccgcgcctctctcactccacaacatcttgtttggtcattcccacgtt

SEQ ID NO: 329703 - DNA, 4277 bp, Homo sapiens
agtagctgcggcgcaggggcggagcgaaggctgcggcggcgtcgggtacgcgcacacgttgcatcttcttcctttcgcggggtcctccgtagttctggcacgagccaggcgtactgacaggtggaccagcggactggtggagatggcgacgctctctctgaccgtgaattcaggagaccctccgctaggagctttgctggcagtagaacacgtgaaagacgatgtcagcatttccgttgaagaagggaaagagaatattcttcatgtttctgaaaatgtgatattcacagatgtgaattctatacttcgctacttggctagagttgcaactacagctgggttatatggctctaatctgatggaacatactgagattgatcactggttggagttcagtgctacaaaattatcttcatgtgattcctttacttctacaattaatgaactcaatcattgcctgtctctgagaacatacttagttggaaactccttgagtttagcagatttatgtgtttgggccaccctaaaaggaaatgctgcctggcaagaacagttgaaacagaagaaagctccagttcatgtaaaacgttggtttggctttcttgaagcccagcaggccttccagtcagtaggtaccaagtgggatgtttcaacaaccaaagctcgagtggcacctgagaaaaagcaagatgttgggaaatttgttgagcttccaggtgcggagatgggaaaggttaccgtcagatttcctccagaggccagtggttacttacacattgggcatgcaaaagctgctcttctgaaccagcactaccaggttaactttaaagggaaactgatcatgagatttgatgacacaaatcctgaaaaagaaaaggaagattttgagaaggttatcttggaagatgttgcaatgttgcatatcaaaccagatcaatttacttatacttcggatcattttgaaactataatgaagtatgcagagaagctaattcaagaagggaaggcttatgtggatgatactcctgctgaacagatgaaagcagaacgtgagcagaggatagaatctaaacatagaaaaaaccctattgagaagaatctacaaatgtgggaagaaatgaaaaaagggagccagtttggtcagtcctgttgtttgcgagcaaaaattgacatgagtagtaacaatggatgcatgagagatccaaccctttatcgctgcaaaattcaaccacatccaagaactggaaataaatacaatgtttatccaacatatgattttgcctgccccatagttgacagcatcgaaggtgttacacatgccctgagaacaacagaataccatgacagagatgagcagttttactggattattgaagctttaggcataagaaaaccatatatttgggaatatagtcggctaaatctcaacaacacagtgctatccaaaagaaaactcacatggtttgtcaatgaaggactagtagatggatgggatgacccaagatttcctacggttcgtggtgtactgagaagagggatgacagttgaaggactgaaacagtttattgctgctcagggctcctcacgttcagtcgtgaacatggagtgggacaaaatctgggcgtttaacaaaaaggttattgacccagtggctccacgatatgttgcattactgaagaaagaagtgatcccagtgaatgtacctgaagctcaggaggagatgaaagaagtagccaaacacccaaagaatcctgaggttggcttgaagcctgtgtggtatagtcccaaagttttcattgaaggtgctgatgcagagactttttcggagggtgagatggttacatttataaattggggcaacctcaacattacaaaaatacacaaaaatgcagatggaaaaatcatatctcttgatgcaaagttgaatttggaaaacaaagactacaagaaaaccactaaggtcacttggcttgcagagactacacatgctcttcctattccagtaatctgtgtcacttatgagcacttgatcacaaagccagtgctaggaaaagacgaggactttaagcagtatgtcaacaagaacagtaagcatgaagagctaatgctaggggatccctgccttaaggatttgaaaaaaggagatattatacaactccagagaagaggattcttcatatgtgatcaaccttatgaacctgttagcccatatagttgcaaggaagccccgtgtgttttgatatacattcctgatgggcacacaaaggaaatgccaacatcagggtcaaaggaaaagaccaaagtagaagccacaaaaaatgagacctctgctccttttaaggaaagaccaacaccttctctgaataataattgtactacatctgaggattccttggtcctttacaatagagtggctgttcaaggagatgtggttcgtgaattaaaagccaagaaagcaccaaaggaagatgtagatgcagctgtaaaacagcttttgtctttgaaagctgaatataaggagaaaactggccaggaatataaacctggaaaccctcctgctgaaataggacagaatatttcttctaattcctcagcaagtattctggaaagtaaatctctgtatgatgaagttgctgcacaaggggaggtggttcgtaagctaaaagctgaaaaatcccctaaggctaaaataaatgaagctgtagaatgcttactgtccctgaaggctcagtataaagaaaaaactgggaaggagtacatacctggtcagcccccattatctcaaagttcggattcaagcccaaccagaaattctgaacctgctggtttagaaacaccagaagcgaaagtactttttgacaaagtagcttctcaaggggaagtagttcggaaacttaaaactgaaaaagcccctaaggatcaagtagatatagctgttcaagaactccttcagctaaaggcacagtacaagtctttgataggagtagagtataagcctgtgtcggccactggagctgaggacaaagataagaagaagaaagaaaaagaaaataaatctgaaaagcagaataagcctcagaaacaaaatgatggccaaaggaaagacccttctaaaaaccaaggaggtgggctctcatcaagtggagcaggagaagggcaggggcctaagaaacagaccaggttgggtcttgaggcaaaaaaagaagaaaatcttgctgattggtattctcaggtcatcacaaagtcagaaatgattgaataccatgacataagtggctgttatattcttcgtccctgggcctatgccatttgggaagccatcaaggacttttttgatgctgagatcaagaaacttggtgttgaaaactgctacttccccatgtttgtgtctcaaagtgcattagagaaagagaagactcatgttgctgactttgccccagaggttgcttgggttacaagatctggcaaaaccgagctggcagaaccaattgccattcgtcctactagtgaaacagtaatgtatcctgcatatgcaaaatgggtacaatcacacagagacctgcccatcaagctcaatcagtggtgcaatgtggtgcgttgggaattcaagcatcctcagcctttcctacgtactcgtgaatttctttggcaggaagggcacagtgcttttgctaccatggaagaggcagcggaagaggtcttgcagatacttgacttatatgctcaggtatatgaagaactcctggcaattcctgttgttaaaggaagaaagacggaaaaggaaaaatttgcaggaggagactatacaactacaatagaagcatttatatctgctagtggaagagctatccagggaggaacatcacatcatttagggcagaatttttccaaaatgtttgaaatcgtttttgaagatccaaagataccaggagagaagcaatttgcctatcaaaactcctggggcctgacaactcgaactattggtgttatgaccatggttcatggggacaacatgggtttagtattaccaccccgtgtagcatgtgttcaggtggtgattattccttgtggcattaccaatgcactttctgaagaagacaaagaagcgctgattgcaaaatgcaatgattatcgaaggcgattactcagtgttaacatccgcgttagagctgatttacgagataattattctccaggttggaaattcaatcactgggagctcaagggagtcccattgattgaatttccaacctggagagcctacataatggagggac

SEQ ID NO: 329704 - DNA, 1643 bp, Homo sapiens
gggctggtacggtcggaagttttgggatgtggctgttatattcttcgtccctgggcctatgccatttgggaagccatcaaggacttttttgatgctgagatcaagaaacttggtgttgaaaactgctacttccccatgtttgtgtctcaaagtgcattagagaaagagaagactcatgttgctgactttgccccagaggttgcttgggttacaagatctggcaaaaccgagctggcagaaccaattgccattcgtcctactagtgaaacagtaatgtatcctgcatatgcaaaatgggtacaatcacacagagacctgcccatcaagctcaatcagtggtgcaatgtggtgcgttgggaattcaagcatcctcagcctttcctacgtactcgtgaatttctttggcaggaagggcacagtgcttttgctaccatggaagaggcagcggaagaggtcttgcagatacttgacttatatgctcaggtatatgaagaactcctggcaattcctgttgttaaaggaagaaagacggaaaaggaaaaatttgcaggaggagactatacaactacaatagaagcatttatatctgctagtggaagagctatccagggaggaacatcacatcatttagggcagaatttttccaaaatgtttgaaatcgtttttgaagatccaaagataccaggagagaagcaatttgcctatcaaaactcctggggcctgacaactcgaactattggtgttatgaccatggttcatggggacaacatgggtttagtattaccaccccgtgtagcatgtgttcaggtggtgattattccttgtggcattaccaatgcactttctgaagaagacaaagaagcgctgattgcaaaatgcaatgattatcgaaggcgattactcagtgttaacatccgcgttagagctgatttacgagataattattctccaggttggaaattcaatcactgggagctcaagggagttcccattagacttgaagttgggccacgtgatatgaagagctgtcagtttgtagccgtcagacgagatactggagaaaagctgacagttgctgaaaatgaggcagagactaaacttcaagctattttggaagacatccaggtcacccttttcacaagggcttctgaagaccttaagactcatatggttgtggctaatacaatggaagactttcagaagatactagattctggaaagattgttcagattccattctgtggggaaattgactgtgaggactggatcaaaaagaccactgccagggatcaagatcttgaacctggtgctccatccatgggagctaaaagcctttgcatccccttcaaaccactctgtgaactgcagcctggagccaaatgtgtctgtggcaagaaccctgccaagtactacaccttatttggtcgcagctactgagggatgaacgaaagccccctcttcaactcctctcactttttaaagcattgatattagtatcttctcagatacagaccgttttatgattttttaaaaagtaaaagttctaaaatgaagtcacacaggacaattattcttatgcctaagttaacagtggataaaagacttttctgtaaacaactccagtaataaatatcatgaactaa

SEQ ID NO: 329705 - DNA, 3647 bp, Homo sapiens
  misc_feature (3630)..(3630): n is a, c, g, or t
agtagctgcggcgcaggggcggagcgaaggctgcggcggcgtcgggtacgcgcacacgttgcatcttcttcctttcgcggggtcctccgtagttctggcacgagccaggcgtactgacaggtggaccagcggactggtggagatggcgacgctctctctgaccgtgaattcaggagaccctccgctaggagctttgctggcagtagaacacgtgaaagacgatgtcagcatttccgttgaagaagggaaagagaatattcttcatgtttctgaaaatgtgatattcacagatgtgaattctatacttcgctacttggctagagttgcaactacagctgggttatatggctctaatctgatggaacatactgagattgatcactggttggagttcagtgctacaaaattatcttcatgtgattcctttacttctacaattaatgaactcaatcattgcctgtctctgagaacatacttagttggaaactccttgagtttagcagatttatgtgtttgggccaccctaaaaggaaatgctgcctggcaagaacagttgaaacagaagaaagctccagttcatgtaaaacgttggtttggctttcttgaagcccagcaggccttccagtcagtaggtaccaagtgggatgtttcaacaaccaaagctcgagtggcacctgagaaaaagcaagatgttgggaaatttgttgagcttccaggtgcggagatgggaaaggttaccgtcagatttcctccagaggccagtggttacttacacattgggcatgcaaaagctgctcttctgaaccagcactaccaggttaactttaaagggaaactgatcatgagatttgatgacacaaatcctgaaaaagaaaaggaagattttgagaaggttatcttggaagatgttgcaatgttgcatatcaaaccagatcaatttacttatacttcggatcattttgaaactataatgaagtatgcagagaagctaattcaagaagggaaggcttatgtggatgatactcctgctgaacagatgaaagcagaacgtgagcagaggatagaatctaaacatagaaaaaaccctattgagaagaatctacaaatgtgggaagaaatgaaaaaagggagccagtttggtcagtcctgttgtttgcgagcaaaaattgacatgagtagtaacaatggatgcatgagagatccaaccctttatcgctgcaaaattcaaccacatccaagaactggaaataaatacaatgtttatccaacatatgattttgcctgccccatagttgacagcatcgaaggtgttacacatgccctgagaacaacagaataccatgacagagatgagcagttttactggattattgaagctttaggcataagaaaaccatatatttgggaatatagtcggctaaatctcaacaacacagtgctatccaaaagaaaactcacatggtttgtcaatgaaggactagtagatggatgggatgacccaagatttcctacggttcgtggtgtactgagaagagggatgacagttgaaggactgaaacagtttattgctgctcagggctcctcacgttcagtcgtgaacatggagtgggacaaaatctgggcgtttaacaaaaaggttattgacccagtggctccacgatatgttgcattactgaagaaagaagtgatcccagtgaatgtacctgaagctcaggaggagatgaaagaagtagccaaacacccaaagaatcctgaggttggcttgaagcctgtgtggtatagtcccaaagttttcattgaaggtgctgatgcagagactttttcggagggtgagatggttacatttataaattggggcaacctcaacattacaaaaatacacaaaaatgcagatggaaaaatcatatctcttgatgcaaagttgaatttggaaaacaaagactacaagaaaaccactaaggtcacttggcttgcagagactacacatgctcttcctattccagtaatctgtgtcacttatgagcacttgatcacaaagccagtgctaggaaaagacgaggactttaagcagtatgtcaacaagaacagtaagcatgaagagctaatgctaggggatccctgccttaaggatttgaaaaaaggagatattatacaactccagagaagaggattcttcatatgtgatcaaccttatgaacctgttagcccatatagttgcaaggaagccccgtgtgttttgatatacattcctgatgggcacacaaaggaaatgccaacatcagggtcaaaggaaaagaccaaagtagaagccacaaaaaatgagacctctgctccttttaaggaaagaccaacaccttctctgaataataattgtactacatctgaggattccttggtcctttacaatagagtggctgttcaaggagatgtggttcgtgaattaaaagccaagaaagcaccaaaggaagatgtagatgcagctgtaaaacagcttttgtctttgaaagctgaatataaggagaaaactggccaggaatataaacctggaaaccctcctgctgaaataggacagaatatttcttctaattcctcagcaagtattctggaaagtaaatctctgtatgatgaagttgctgcacaaggggaggtggttcgtaagctaaaagctgaaaaatcccctaaggctaaaataaatgaagctgtagaatgcttactgtccctgaaggctcagtataaagaaaaaactgggaaggagtacatacctggtcagcccccattatctcaaagttcggattcaagcccaaccagaaattctgaacctgctggtttagaaacaccagaagcgaaagtactttttgacaaagtagcttctcaaggggaagtagttcggaaacttaaaactgaaaaagcccctaaggatcaagtagatatagctgttcaagaactccttcagctaaaggcacagtacaagtctttgataggagtagagtataagcctgtgtcggccactggagctgaggacaaagataagaagaagaaagaaaaagaaaataaatctgaaaagcagaataagcctcagaaacaaaatgatggccaaaggaaagacccttctaaaaaccaaggaggtgggctctcatcaagtggagcaggagaagggcaggggcctaagaaacagaccaggttgggtcttgaggcaaaaaaagaagaaaatcttgctgattggtattctcaggtcatcacaaagtcagaaatgattgaataccatgacataagtggctgttatattcttcgtccctgggcctatgccatttgggaagccatcaaggacttttttgatgctgagatcaagaaacttggtgttgaaaactgctacttccccatgtttgtgtctcaaagttcggattcaagcccaaccagaaattctgaacctgctggtttagaaacaccagaagcgaaagtactttttgacaaagtagcttctcaaggggaagtagttcggaaacttaaaactgaaaaagcccctaaggatcaagtagatatagctgttcaagaactccttcagctaaaggcacagtacaagtctttgataggagtagagtataagcctgtgtcggccactggagctgaggncaaagataaaaaaaaga

SEQ ID NO: 329706 - DNA, 1287 bp, Homo sapiens
agtagctgcggcgcaggggcggagcgaaggctgcggcggcgtcgggtacgcgcacacgttgcatcttcttcctttcgcggggtcctccgtagttctggcacgagccaggcgtactgacaggtggaccagcggactggtggagatggcgacgctctctctgaccgtgaattcaggagaccctccgctaggagctttgctggcagtagaacacgtgaaagacgatgtcagcatttccgttgaagaagggaaagagaatattcttcatgtttctgaaaatgtgatattcacagatgtgaattctatacttcgctacttggctagagttgcaactacagctgggttatatggctctaatctgatggaacatactgagattgatcactggttggagttcagtgctacaaaattatcttcatgtgattcctttacttctacaattaatgaactcaatcattgcctgtctctgagaacatacttagttggaaactccttgagtttagcagatttatgtgtttgggccaccctaaaaggaaatgctgcctggcaagaacagttgaaacagaagaaagctccagttcatgtaaaacgttggtttggctttcttgaagcccagcaggccttccagtcagtaggtaccaagtgggatgtttcaacaaccaaagctcgagtggcacctgagaaaaagcaagatgttgggaaatttgttgagcttccaggtgcggagatgggaaaggttaccgtcagatttcctccagaggccagtggttacttacacattgggcatgcaaaagctgctcttctgaaccagcactaccaggttaactttaaagggaaactgatcatgagatttgatgacacaaatcctgaaaaagaaaaggaagattttgagaaggttatcttggaagatgttgcaatgttgcatatcaaaccagatcaatttacttatacttcggatcattttgaaactataatgaagtatgcagagaagctaattcaagaagggaaggcttatgtggatgatactcctgctgaacagatgaaagcagaacgtgagcagaggatagaatctaaacatagaaaaaaccctattgagaagaatctacaaatgtgggaagaaatgaaaaaagggagccagtttggtcagtcctgttgtttgcgagcaaaaattgacatgagtagtaacaatggatgcatgagagatccaaccctttatcgctgcaaaattcaaccacatccaagaactggaaataaatacaatggtttaccccaccataatggatttttgcc

SEQ ID NO: 329707 - DNA, 1157 bp, Homo sapiens
cagagtaagactgtgtctcaaaaaaaaaatttttttttaatgcttgtctagtctgacatccacaatttattaaaagaaaacccagagctagagattttcaaacacatggcaaatttcaaaattaaaataaaatcctaagtatcttgattcggcctttgttttatgtagtctaagaatgaaaaattgaaaggtttttttttttttccttacacaaaatgattttaggactttaaaaatgatccacttacctatataacatgttaggaacattgtggcataaagtgaaatttgcgtgattgttaattgttgctgttaacaacacattaaaaatcagtttgctatttttgatgttccttttctcctcctgataactatttagataggtagagcaggtgtagtccaggtttgaaatgagggagatataactggagttcaacttcttttcagccactgtgttttagccagtttatgggagatttgagggtactgcaaagatgtctttgttgtgtcttgatgtgctgtgagcgtgggttttggatagtggaaaaacattctttcctatcttttataactgagcaaagttcctaataggtttgcaaaggtatcatagcctgaaaaaaggttgggagacctatcctttttgcttgccagtttaatatagaactcaaatgttccttctgcagaatagaattgaaggagttataaatactgattacttttccttttcttaattagattgttcagattccattctgtggggaaattgactgtgaggactggatcaaaaagaccactgccagggatcaagatcttgaacctggtgctccatccatgggagctaaaagcctttgcatccccttcaaaccactctgtgaactgcagcctggagccaaatgtgtctgtggcaagaaccctgccaagtactacaccttatttggtcgcagctactgagggatgaacgaaagccccctcttcaactcctctcactttttaaagcattgatattagtatcttctcagatacagaccgttttatgattttttaaaaagtaaaagttctaaaatgaagtcacacaggacaattattcttatgcctaagttaacagtggataaaagacttttctgtaaacaactccagtaataaatatcatgaactaa

SEQ ID NO: 329708 - DNA, 1258 bp, Homo sapiens
cagagtaagactgtgtctcaaaaaaaaaatttttttttaatgcttgtctagtctgacatccacaatttattaaaagaaaacccagagctagagattttcaaacacatggcaaatttcaaaattaaaataaaatcctaagtatcttgattcggcctttgttttatgtagtctaagaatgaaaaattgaaaggtttttttttttttccttacacaaaatgattttaggactttaaaaatgatccacttacctatataacatgttaggaacattgtggcataaagtgaaatttgcgtgattgttaattgttgctgttaacaacacattaaaaatcagtttgctatttttgatgttccttttctcctcctgataactatttagataggtagagcaggtgtagtccaggtttgaaatgagggagatataactggagttcaacttcttttcagccactgtgttttagccagtttatgggagatttgagggtactgcaaagatgtctttgttgtgtcttgatgtgctgtgagcgtgggttttggatagtggaaaaacattctttcctatcttttataactgagcaaagttcctaataggtttgcaaaggtatcatagcctgaaaaaaggttgggagacctatcctttttgcttgccagtttaatatagaactcaaatgttccttctgcagaatagaattgaaggagttataaatactgattacttttccttttcttaattagattgttcagattccattctgtggggaaattgactgtgaggactggatcaaaaagaccactgccaggtaaacctaattaactggcaaaacttttgaaaaattgcaatggaaaggaatagcaatttgcagcataaatgagtggaattcttatttgttattaatttcagggatcaagatcttgaacctggtgctccatccatgggagctaaaagcctttgcatccccttcaaaccactctgtgaactgcagcctggagccaaatgtgtctgtggcaagaaccctgccaagtactacaccttatttggtcgcagctactgagggatgaacgaaagccccctcttcaactcctctcactttttaaagcattgatattagtatcttctcagatacagaccgttttatgattttttaaaaagtaaaagttctaaaatgaagtcacacaggacaattattcttatgcctaagttaacagtggataaaagacttttctgtaaacaactccagtaataaatatcatgaactaa

SEQ ID NO: 329709 - DNA, 236 bp, Homo sapiens
atagccggaccggaaggtagctgttactgagggatgaacgaaagccccctcttcaactcctctcactttttaaagcattgatattagtatcttctcagatacagaccgttttatgattttttaaaaagtaaaagttctaaaatgaagtcacacaggacaattattcttatgcctaagttaacagtggataaaagacttttctgtaaacaactccagtaataaatatcatgaactaa

SEQ ID NO: 329710 - DNA, 207 bp, Homo sapiens
tatatggctctaatctgatggaacatactgaggtaagcaatgaacattttgttgtgtgtgttttgtcttatgcttctgtttttttatgggaacctcatcatttattgttggcttatgaactattctacttaagtatattaacagagtgttaattatatagaccaaggtacagaatgctcatcttgtttttttgtcacaaaaaaattc

SEQ ID NO: 329711 - DNA, 380 bp, Homo sapiens
ataccttgtcccctctgtgagattttacatttgaagttgtttcttataattgttttatatatggtatagtcttttttttttttcctgtcagggtcagattttctatcacagtactttttgttagaaaataaaatatgacttgggtaccaattagaaggacttttgtttagttctcatctcctcaaaaaggttaagtttaagtatttagttaaaacatgttaatgagtttctttgtgaaatgtttttgttttagttacttacacattgggcatgcaaaagctgctcttctgaaccagcactaccaggttaactttaaagggaaactgatcatgagatttgatgacacaaatcctgaaaaagaaaaggaagattttgagaag

SEQ ID NO: 329712 - DNA, 619 bp, Homo sapiens
atgggagctaaaagcctttgcatccccttcaaaccactctgtgaactgcagcctggagccaaatgtgtctgtggcaagaaccctgccaagtactacaccttatttggtcgcagctactgagggatgaacgaaagccccctcttcaactcctctcactttttaaagcattgatattagtatcttctcagatacagaccgttttatgattttttaaaaagtaaaagttctaaaatgaagtcacacaggacaattattcttatgcctaagttaacagtggataaaagacttttctgtaaacaactccagtaataaatatcatgaactaaatatggtttttgtattcatttgtttctgaaaaatgtgcattatgtactatgaggaaatttctacaaagagatgaagacaattgaaagccagatatctgttattgatctaagcactcccaacatgtctcagaccctgaaccgccagttataccctacactgataggtctcgaagcactttctttccatagctcctaatacagaatctgaaattgtcctaaatctttctgtttaaaaaacaaagcaaacccacaaatggaaaaagcaacaataataaagatttcccttgaacttc

SEQ ID NO: 329713 - DNA, 455 bp, Homo sapiens
gattcggcacgagggcgcgaagaggtcttgcagatacttgacttatatgctcaggtatatgaagaactcctggcaattcctgttgttaaaggaagaaagacggaaaaggaaaaatttgcaggaggagactatacaactacaatagaagcatttatatctgctagtggaagagctatccagggaggaacatcacatcatttagggcagagattgcagtgagccaagatcaagccattgtactccagcctggacaacaagagcgaaactctgtctaaaaaaaaaaaaaaaaacacacacacacacaacacaatgttttcacgcctgtaaacctagcacattgggaagccaaggtgggaggattgcttgaggccaggggttcaaggctgcagtgagctatgattgcacactgtactctagcctgggagacagagtgagacactgtctctaaaaaaaaa

SEQ ID NO: 329714 - DNA, 5003 bp, Homo sapiens
agtagctgcggcgcaggggcggagcgaaggctgcggcggcgtcgggtacgcgcacacgttgcatcttcttcctttcgcggggtcctccgtagttctggcacgagccaggcgtactgacaggtggaccagcggactggtggagatggcgacgctctctctgaccgtgaattcaggagaccctccgctagtttcgctgtgtcattcaggcaggaacgcagtggtgcaatcagggctcactgcggccatgacttcccaggctcaagcagtcctgccacctcagccccctgggtagctgggaccacaggagctttgctggcagtagaacacgtgaaagacgatgtcagcatttccgttgaagaagggaaagagaatattcttcatgtttctgaaaatgtgatattcacagatgtgaattctatacttcgctacttggctagagttgcaactacagctgggttatatggctctaatctgatggaacatactgagattgatcactggttggagttcagtgctacaaaattatcttcatgtgattcctttacttctacaattaatgaactcaatcattgcctgtctctgagaacatacttagttggaaactccttgagtttagcagatttatgtgtttgggccaccctaaaaggaaatgctgcctggcaagaacagttgaaacagaagaaagctccagttcatgtaaaacgttggtttggctttcttgaagcccagcaggccttccagtcagtaggtaccaagtgggatgtttcaacaaccaaagctcgagtggcacctgagaaaaagcaagatgttgggaaatttgttgagcttccaggtgcggagatgggaaaggttaccgtcagatttcctccagaggccagtggttacttacacattgggcatgcaaaagctgctcttctgaaccagcactaccaggttaactttaaagggaaactgatcatgagatttgatgacacaaatcctgaaaaagaaaaggaagattttgagaaggttatcttggaagatgttgcaatgttgcatatcaaaccagatcaatttacttatacttcggatcattttgaaactataatgaagtatgcagagaagctaattcaagaagggaaggcttatgtggatgatactcctgctgaacagatgaaagcagaacgtgagcagaggatagaatctaaacatagaaaaaaccctattgagaagaatctacaaatgtgggaagaaatgaaaaaagggagccagtttggtcagtcctgttgtttgcgagcaaaaattgacatgagtagtaacaatggatgcatgagagatccaaccctttatcgctgcaaaattcaaccacatccaagaactggaaataaatacaatgtttatccaacatatgattttgcctgccccatagttgacagcatcgaaggtgttacacatgccctgagaacaacagaataccatgacagagatgagcagttttactggattattgaagctttaggcataagaaaaccatatatttgggaatatagtcggctaaatctcaacaacacagtgctatccaaaagaaaactcacatggtttgtcaatgaaggactagtagatggatgggatgacccaagatttcctacggttcgtggtgtactgagaagagggatgacagttgaaggactgaaacagtttattgctgctcagggctcctcacgttcagtcgtgaacatggagtgggacaaaatctgggcgtttaacaaaaaggttattgacccagtggctccacgatatgttgcattactgaagaaagaagtgatcccagtgaatgtacctgaagctcaggaggagatgaaagaagtagccaaacacccaaagaatcctgaggttggcttgaagcctgtgtggtatagtcccaaagttttcattgaaggtgctgatgcagagactttttcggagggtgagatggttacatttataaattggggcaacctcaacattacaaaaatacacaaaaatgcagatggaaaaatcatatctcttgatgcaaagttgaatttggaaaacaaagactacaagaaaaccactaaggtcacttggcttgcagagactacacatgctcttcctattccagtaatctgtgtcacttatgagcacttgatcacaaagccagtgctaggaaaagacgaggactttaagcagtatgtcaacaagaacagtaagcatgaagagctaatgctaggggatccctgccttaaggatttgaaaaaaggagatattatacaactccagagaagaggattcttcatatgtgatcaaccttatgaacctgttagcccatatagttgcaaggaagccccgtgtgttttgatatacattcctgatgggcacacaaaggaaatgccaacatcagggtcaaaggaaaagaccaaagtagaagccacaaaaaatgagacctctgctccttttaaggaaagaccaacaccttctctgaataataattgtactacatctgaggattccttggtcctttacaatagagtggctgttcaaggagatgtggttcgtgaattaaaagccaagaaagcaccaaaggaagatgtagatgcagctgtaaaacagcttttgtctttgaaagctgaatataaggagaaaactggccaggaatataaacctggaaaccctcctgctgaaataggacagaatatttcttctaattcctcagcaagtattctggaaagtaaatctctgtatgatgaagttgctgcacaaggggaggtggttcgtaagctaaaagctgaaaaatcccctaaggctaaaataaatgaagctgtagaatgcttactgtccctgaaggctcagtataaagaaaaaactgggaaggagtacatacctggtcagcccccattatctcaaagttcggattcaagcccaaccagaaattctgaacctgctggtttagaaacaccagaagcgaaagtactttttgacaaagtagcttctcaaggggaagtagttcggaaacttaaaactgaaaaagcccctaaggatcaagtagatatagctgttcaagaactccttcagctaaaggcacagtacaagtctttgataggagtagagtataagcctgtgtcggccactggagctgaggacaaagataagaagaagaaagaaaaagaaaataaatctgaaaagcagaataagcctcagaaacaaaatgatggccaaaggaaagacccttctaaaaaccaaggaggtgggctctcatcaagtggagcaggagaagggcaggggcctaagaaacagaccaggttgggtcttgaggcaaaaaaagaagaaaatcttgctgattggtattctcaggtcatcacaaagtcagaaatgattgaataccatgacataagtggctgttatattcttcgtccctgggcctatgccatttgggaagccatcaaggacttttttgatgctgagatcaagaaacttggtgttgaaaactgctacttccccatgtttgtgtctcaaagtgcattagagaaagagaagactcatgttgctgactttgccccagaggttgcttgggttacaagatctggcaaaaccgagctggcagaaccaattgccattcgtcctactagtgaaacagtaatgtatcctgcatatgcaaaatgggtacaatcacacagagacctgcccatcaagctcaatcagtggtgcaatgtggtgcgttgggaattcaagcatcctcagcctttcctacgtactcgtgaatttctttggcaggaagggcacagtgcttttgctaccatggaagaggcagcggaagaggtcttgcagatacttgacttatatgctcaggtatatgaagaactcctggcaattcctgttgttaaaggaagaaagacggaaaaggaaaaatttgcaggaggagactatacaactacaatagaagcatttatatctgctagtggaagagctatccagggaggaacatcacatcatttagggcagaatttttccaaaatgtttgaaatcgtttttgaagatccaaagataccaggagagaagcaatttgcctatcaaaactcctggggcctgacaactcgaactattggtgttatgaccatggttcatggggacaacatgggtttagtattaccaccccgtgtagcatgtgttcaggtggtgattattccttgtggcattaccaatgcactttctgaagaagacaaagaagcgctgattgcaaaatgcaatgattatcgaaggcgattactcagtgttaacatccgcgttagagctgatttacgagataattattctccaggttggaaattcaatcactgggagctcaagggagttcccattagacttgaagttgggccacgtgatatgaagagctgtcagtttgtagccgtcagacgagatactggagaaaagctgacagttgctgaaaatgaggcagagactaaacttcaagctattttggaagacatccaggtcacccttttcacaagggcttctgaagaccttaagactcatatggttgtggctaatacaatggaagactttcagaagatactagattctggaaagattgttcagattccattctgtggggaaattgactgtgaggactggatcaaaaagaccactgccagggatcaagatcttgaacctggtgctccatccatgggagctaaaagcctttgcatccccttcaaaccactctgtgaactgcagcctggagccaaatgtgtctgtggcaagaaccctgccaagtactacaccttatttggtcgcagctactgagggatgaacgaaagccccctcttcaactcctctcactttttaaagcattgatattagtatcttctcagatacagaccgttttatgattttttaaaaagtaaaagttctaaaatgaagtcacacaggacaattattcttatgcctaagttaacagtggataaaagacttttctgtaaacaactccagtaataaatatcatgaactaa

SEQ ID NO: 329715 - DNA, 5070 bp, Homo sapiens
agtagctgcggcgcaggggcggagcgaaggctgcggcggcgtcgggtacgcgcacacgttgcatcttcttcctttcgcggggtcctccgtagttctggcacgagccaggcgtactgacaggtggaccagcggactggtggagatggcgacgctctctctgaccgtgaattcaggagaccctccgctaggagctttgctggcagtagaacacgtgaaagacgatgtcagcatttccgttgaagaagggaaagagaatattcttcatgtttctgaaaatgtgatattcacagatgtgaattctatacttcgctacttggctagagttgcaactacagctgggttatatggctctaatctgatggaacatactgagattgatcactggttggagttcagtgctacaaaattatcttcatgtgattcctttacttctacaattaatgaactcaatcattgcctgtctctgagaacatacttagttggaaactccttgagtttagcagatttatgtgtttgggccaccctaaaaggaaatgctgcctggcaagaacagttgaaacagaagaaagctccagttcatgtaaaacgttggtttggctttcttgaagcccagcaggccttccagtcagtaggtaccaagtgggatgtttcaacaaccaaagctcgagtggcacctgagaaaaagcaagatgttgggaaatttgttgagcttccaggtgcggagatgggaaaggttaccgtcagatttcctccagaggccagtggttacttacacattgggcatgcaaaagctgctcttctgaaccagcactaccaggttaactttaaagggaaactgatcatgagatttgatgacacaaatcctgaaaaagaaaaggaagattttgagaaggttatcttggaagatgttgcaatgttgcatatcaaaccagatcaatttacttatacttcggatcattttgaaactataatgaagtatgcagagaagctaattcaagaagggaaggcttatgtggatgatactcctgctgaacagatgaaagcagaacgtgagcagaggatagaatctaaacatagaaaaaaccctattgagaagaatctacaaatgtgggaagaaatgaaaaaagggagccagtttggtcagtcctgttgtttgcgagcaaaaattgacatgagtagtaacaatggatgcatgagagatccaaccctttatcgctgcaaaattcaaccacatccaagaactggaaataaatacaatgtttatccaacatatgattttgcctgccccatagttgacagcatcgaaggtgttacacatgccctgagaacaacagaataccatgacagagatgagcagttttactggattattgaagctttaggcataagaaaaccatatatttgggaatatagtcggctaaatctcaacaacacagtgctatccaaaagaaaactcacatggtttgtcaatgaaggactagtagatggatgggatgacccaagatttcctacggttcgtggtgtactgagaagagggatgacagttgaaggactgaaacagtttattgctgctcagggctcctcacgttcagtcgtgaacatggagtgggacaaaatctgggcgtttaacaaaaaggttattgacccagtggctccacgatatgttgcattactgaagaaagaagtgatcccagtgaatgtacctgaagctcaggaggagatgaaagaagtagccaaacacccaaagaatcctgaggttggcttgaagcctgtgtggtatagtcccaaagttttcattgaaggtgctgatgcagagactttttcggagggtgagatggttacatttataaattggggcaacctcaacattacaaaaatacacaaaaatgcagatggaaaaatcatatctcttgatgcaaagttgaatttggaaaacaaagactacaagaaaaccactaaggtcacttggcttgcagagactacacatgctcttcctattccagtaatctgtgtcacttatgagcacttgatcacaaagccagtgctaggaaaagacgaggactttaagcagtatgtcaacaagaacagtaagcatgaagagctaatgctaggggatccctgccttaaggatttgaaaaaaggagatattatacaactccagagaagaggattcttcatatgtgatcaaccttatgaacctgttagcccatatagttgcaaggaagccccgtgtgttttgatatacattcctgatgggcacacaaaggaaatgccaacatcagggtcaaaggaaaagaccaaagtagaagccacaaaaaatgagacctctgctccttttaaggaaagaccaacaccttctctgaataataattgtactacatctgaggattccttggtcctttacaatagagtggctgttcaaggagatgtggttcgtgaattaaaagccaagaaagcaccaaaggaagatgtagatgcagctgtaaaacagcttttgtctttgaaagctgaatataaggagaaaactggccaggaatataaacctggaaaccctcctgctgaaataggacagaatatttcttctaattcctcagcaagtattctggaaagtaaatctctgtatgatgaagttgctgcacaaggggaggtggttcgtaagctaaaagctgaaaaatcccctaaggctaaaataaatgaagctgtagaatgcttactgtccctgaaggctcagtataaagaaaaaactgggaaggagtacatacctggtcagcccccattatctcaaagttcggattcaagcccaaccagaaattctgaacctgctggtttagaaacaccagaagcgaaagtactttttgacaaagtagcttctcaaggggaagtagttcggaaacttaaaactgaaaaagcccctaaggatcaagtagatatagctgttcaagaactccttcagctaaaggcacagtacaagtctttgataggagtagagtataagcctgtgtcggccactggagctgaggacaaagataagaagaagaaagaaaaagaaaataaatctgaaaagcagaataagcctcagaaacaaaatgatggccaaaggaaagacccttctaaaaaccaaggaggtgggctctcatcaagtggagcaggagaagggcaggggcctaagaaacagaccaggttgggtcttgaggcaaaaaaagaagaaaatcttgctgattggtattctcaggtcatcacaaagtcagaaatgattgaataccatgacataagtggctgttatattcttcgtccctgggcctatgccatttgggaagccatcaaggacttttttgatgctgagatcaagaaacttggtgttgaaaactgctacttccccatgtttgtgtctcaaagtgcattagagaaagagaagactcatgttgctgactttgccccagaggttgcttgggttacaagatctggcaaaaccgagctggcagaaccaattgccattcgtcctactagtgaaacagtaatgtatcctgcatatgcaaaatgggtacaatcacacagagacctgcccatcaagctcaatcagtggtgcaatgtggtgcgttgggaattcaagcatcctcagcctttcctacgtactcgtgaatttctttggcaggaagggcacagtgcttttgctaccatggaagaggcagcggaagaggtcttgcagatacttgacttatatgctcaggtatatgaagaactcctggcaattcctgttgttaaaggaagaaagacggaaaaggaaaaatttgcaggaggagactatacaactacaatagaagcatttatatctgctagtggaagagctatccagggaggaacatcacatcatttagggcagaatttttccaaaatgtttgaaatcgtttttgaagatccaaagataccaggagagaagcaatttgcctatcaaaactcctggggcctgacaactcgaactattggtgttatgaccatggttcatggggacaacatgggtttagtattaccaccccgtgtagcatgtgttcaggtggtgattattccttgtggcattaccaatgcactttctgaagaagacaaagaagcgctgattgcaaaatgcaatgattatcgaaggcgattactcagtgttaacatccgcgttagagctgatttacgagataattattctccaggttggaaattcaatcactgggagctcaagggagttcccattagacttgaagttgggccacgtgatatgaagagctgtcagtttgtagccgtcagacgagatactggagaaaagctgacagttgctgaaaatgaggcagagactaaacttcaagctattttggaagacatccaggtcacccttttcacaagggcttctgaagaccttaagactcatatggttgtggctaatacaatggaagactttcagaagatactagattctggaaagattgttcagattccattctgtggggaaattgactgtgaggactggatcaaaaagaccactgccagggatcaagatcttgaacctggtgctccatccatgggagctaaaagcctttgcatccccttcaaaccactctgtgaactgcagcctggagccaaatgtgtctgtggcaagaaccctgccaagtactacaccttatttggtcgcagctactgagggatgaacgaaagccccctcttcaactcctctcactttttaaagcattgatattagtatcttctcagatacagaccgttttatgattttttaaaaagtaaaagttctaaaatgaagtcacacaggacaattattcttatgcctaagttaacagtggataaaagacttttctgtaaacaactccagtaataaatatcatgaactaaaaaaaaaaaaaaaaaaaaaaaaaaaaaaaggggggggcgaaaaagtttccttgaggggggccaggttagggtaaaccagttttttggtaaagaggggcctaatgaggagtggatataaagaaaggacggcggggttaaaaagttgggcgggaaagtgacggatttgggaaagaccattcgggg

SEQ ID NO: 329716 - DNA, 3073 bp, Homo sapiens
cggccgcgcgacatttttttttgtgtatttttgtaatgttgaggttgccccaatttataaaaatacacaaaaatgcagatggaaaaatcatatctcttgatgcaaagttgaatttggaaaacaaagactacaagaaaaccactaaggtcacttggcttgcagagactacacatgctcttcctattccagtaatctgtgtcacttatgagcacttgatcacaaagccagtgctaggaaaagacgaggactttaagcagtatgtcaacaagaacagtaagcatgaagagctaatgctaggggatccctgccttaaggatttgaaaaaaggagatattatacaactccagagaagaggattcttcatatgtgatcaaccttatgaacctgttagcccatatagttgcaaggaagccccgtgtgttttgatatacattcctgatgggcacacaaaggaaatgccaacatcagggtcaaaggaaaagaccaaagtagaagccacaaaaaatgagacctctgctccttttaaggaaagaccaacaccttctctgaataataattgtactacatctgaggattccttggtcctttacaatagagtggctgttcaaggagatgtggttcgtgaattaaaagccaagaaagcaccaaaggaagatgtagatgcagctgtaaaacagcttttgtctttgaaagctgaatataaggagaaaactggccaggaatataaacctggaaaccctcctgctgaaataggacagaatatttcttctaattcctcagcaagtattctggaaagtaaatctctgtatgatgaagttgctgcacaaggggaggtggttcgtaagctaaaagctgaaaaatcccctaaggctaaaataaatgaagctgtagaatgcttactgtccctgaaggctcagtataaagaaaaaactgggaaggagtacatacctggtcagcccccattatctcaaagttcggattcaagcccaaccagaaattctgaacctgctggtttagaaacaccagaagcgaaagtactttttgacaaagtagcttctcaaggggaagtagttcggaaacttaaaactgaaaaagcccctaaggatcaagtagatatagctgttcaagaactccttcagctaaaggcacagtacaagtctttgataggagtagagtataagcctgtgtcggccactggagctgaggacaaagataagaagaagaaagaaaaagaaaataaatctgaaaagcagaataagcctcagaaacaaaatgatggccaaaggaaagacccttctaaaaaccaaggaggtgggctctcatcaagtggagcaggagaagggcaggggcctaagaaacagaccaggttgggtcttgaggcaaaaaaagaagaaaatcttgctgattggtattctcaggtcatcacaaagtcagaaatgattgaataccatgacataagtggctgttatattcttcgtccctgggcctatgccatttgggaagccatcaaggacttttttgatgctgagatcaagaaacttggtgttgaaaactgctacttccccatgtttgtgtctcaaagtgcattagagaaagagaagactcatgttgctgactttgccccagaggttgcttgggttacaagatctggcaaaaccgagctggcagaaccaattgccattcgtcctactagtgaaacagtaatgtatcctgcatatgcaaaatgggtacaatcacacagagacctgcccatcaagctcaatcagtggtgcaatgtggtgcgttgggaattcaagcatcctcagcctttcctacgtactcgtgaatttctttggcaggaagggcacagtgcttttgctaccatggaagaggcagcggaagaggtcttgcagatacttgacttatatgctcaggtatatgaagaactcctggcaattcctgttgttaaaggaagaaagacggaaaaggaaaaatttgcaggaggagactatacaactacaatagaagcatttatatctgctagtggaagagctatccagggaggaacatcacatcatttagggcagaatttttccaaaatgtttgaaatcgtttttgaagatccaaagataccaggagagaagcaatttgcctatcaaaactcctggggcctgacaactcgaactattggtgttatgaccatggttcatggggacaacatgggtttagtattaccaccccgtgtagcatgtgttcaggtggtgattattccttgtggcattaccaatgcactttctgaagaagacaaagaagcgctgattgcaaaatgcaatgattatcgaaggcgattactcagtgttaacatccgcgttagagctgatttacgagataattattctccaggttggaaattcaatcactgggagctcaagggagttcccattagacttgaagttgggccacgtgatatgaagagctgtcagtttgtagccgtcagacgagatactggagaaaagctgacagttgctgaaaatgaggcagagactaaacttcaagctattttggaagacatccaggtcacccttttcacaagggcttctgaagaccttaagactcatatggttgtggctaatacaatggaagactttcagaagatactagattctggaaagattgttcagattccattctgtggggaaattgactgtgaggactggatcaaaaagaccactgccagggatcaagatcttgaacctggtgctccatccatgggagctaaaagcctttgcatccccttcaaaccactctgtgaactgcagcctggagccaaatgtgtctgtggcaagaaccctgccaagtactacaccttatttggtcgcagctactgagggatgaacgaaagccccctcttcaactcctctcactttttaaagcattgatattagtatcttctcagatacagaccgttttatgattttttaaaaagtaaaagttctaaaatgaagtcacacaggacaattattcttatgcctaagttaacagtggataaaagacttttctgtaaacaactccagtaataaatatcatgaactaa

SEQ ID NO: 329717 - DNA, 2028 bp, Homo sapiens
gctcgcgacccttcctctcctcccacctcgggaacttaaaactgaaaaagcccctaaggatcaagtagatatagctgttcaagaactccttcagctaaaggcacagtacaagtctttgataggagtagagtataagcctgtgtcggccactggagctgaggacaaagataagaagaagaaagaaaaagaaaataaatctgaaaagcagaataagcctcagaaacaaaatgatggccaaaggaaagacccttctaaaaaccaaggaggtgggctctcatcaagtggagcaggagaagggcaggggcctaagaaacagaccaggttgggtcttgaggcaaaaaaagaagaaaatcttgctgattggtattctcaggtcatcacaaagtcagaaatgattgaataccatgacataagtggctgttatattcttcgtccctgggcctatgccatttgggaagccatcaaggacttttttgatgctgagatcaagaaacttggtgttgaaaactgctacttccccatgtttgtgtctcaaagtgcattagagaaagagaagactcatgttgctgactttgccccagaggttgcttgggttacaagatctggcaaaaccgagctggcagaaccaattgccattcgtcctactagtgaaacagtaatgtatcctgcatatgcaaaatgggtacaatcacacagagacctgcccatcaagctcaatcagtggtgcaatgtggtgcgttgggaattcaagcatcctcagcctttcctacgtactcgtgaatttctttggcaggaagggcacagtgcttttgctaccatggaagaggcagcggaagaggtcttgcagatacttgacttatatgctcaggtatatgaagaactcctggcaattcctgttgttaaaggaagaaagacggaaaaggaaaaatttgcaggaggagactatacaactacaatagaagcatttatatctgctagtggaagagctatccagggaggaacatcacatcatttagggcagaatttttccaaaatgtttgaaatcgtttttgaagatccaaagataccaggagagaagcaatttgcctatcaaaactcctggggcctgacaactcgaactattggtgttatgaccatggttcatggggacaacatgggtttagtattaccaccccgtgtagcatgtgttcaggtggtgattattccttgtggcattaccaatgcactttctgaagaagacaaagaagcgctgattgcaaaatgcaatgattatcgaaggcgattactcagtgttaacatccgcgttagagctgatttacgagataattattctccaggttggaaattcaatcactgggagctcaagggagttcccattagacttgaagttgggccacgtgatatgaagagctgtcagtttgtagccgtcagacgagatactggagaaaagctgacagttgctgaaaatgaggcagagactaaacttcaagctattttggaagacatccaggtcacccttttcacaagggcttctgaagaccttaagactcatatggttgtggctaatacaatggaagactttcagaagatactagattctggaaagattgttcagattccattctgtggggaaattgactgtgaggactggatcaaaaagaccactgccagggatcaagatcttgaacctggtgctccatccatgggagctaaaagcctttgcatccccttcaaaccactctgtgaactgcagcctggagccaaatgtgtctgtggcaagaaccctgccaagtactacaccttatttggtcgcagctactgagggatgaacgaaagccccctcttcaactcctctcactttttaaagcattgatattagtatcttctcagatacagaccgttttatgattttttaaaaagtaaaagttctaaaatgaagtcacacaggacaattattcttatgcctaagttaacagtggataaaagacttttctgtaaacaactccagtaataaatatcatgaactaa

SEQ ID NO: 329718 - DNA, 1698 bp, Homo sapiens
ggcacgaggaaaactgctacttccccatgtttcttgatctcaggtcatcacaaagtcagaaatgattgaataccatgacataagtggctgttatattcttcgtccctgggcctatgccatttgggaagccatcaaggacttttttgatgctgagatcaagaaacttggtgttgaaaactgctacttccccatgtttgtgtctcaaagtgcattagagaaagagaagactcatgttgctgactttgccccagaggttgcttgggttacaagatctggcaaaaccgagctggcagaaccaattgccattcgtcctactagtgaaacagtaatgtatcctgcatatgcaaaatgggtacaatcacacagagacctgcccatcaagctcaatcagtggtgcaatgtggtgcgttgggaattcaagcatcctcagcctttcctacgtactcgtgaatttctttggcaggaagggcacagtgcttttgctaccatggaagaggcagcggaagaggtcttgcagatacttgacttatatgctcaggtatatgaagaactcctggcaattcctgttgttaaaggaagaaagacggaaaaggaaaaatttgcaggaggagactatacaactacaatagaagcatttatatctgctagtggaagagctatccagggaggaacatcacatcatttagggcagaatttttccaaaatgtttgaaatcgtttttgaagatccaaagataccaggagagaagcaatttgcctatcaaaactcctggggcctgacaactcgaactattggtgttatgaccatggttcatggggacaacatgggtttagtattaccaccccgtgtagcatgtgttcaggtggtgattattccttgtggcattaccaatgcactttctgaagaagacaaagaagcgctgattgcaaaatgcaatgattatcgaaggcgattactcagtgttaacatccgcgttagagctgatttacgagataattattctccaggttggaaattcaatcactgggagctcaagggagttcccattagacttgaagttgggccacgtgatatgaagagctgtcagtttgtagccgtcagacgagatactggagaaaagctgacagttgctgaaaatgaggcagagactaaacttcaagctattttggaagacatccaggtcacccttttcacaagggcttctgaagaccttaagactcatatggttgtggctaatacaatggaagactttcagaagatactagattctggaaagattgttcagattccattctgtggggaaattgactgtgaggactggatcaaaaagaccactgccagggatcaagatcttgaacctggtgctccatccatgggagctaaaagcctttgcatccccttcaaaccactctgtgaactgcagcctggagccaaatgtgtctgtggcaagaaccctgccaagtactacaccttatttggtcgcagctactgagggatgaacgaaagccccctcttcaactcctctcactttttaaagcattgatattagtatcttctcagatacagaccgttttatgattttttaaaaagtaaaagttctaaaatgaagtcacacaggacaattattcttatgcctaagttaacagtggataaaagacttttctgtaaacaactccagtaataaatatcatgaactaa

SEQ ID NO: 329719 - DNA, 3020 bp, Homo sapiens
  misc_feature (2951)..(2951): n is a, c, g, or t
  misc_feature (2954)..(2954): n is a, c, g, or t
agtagctgcggcgcaggggcggagcgaaggctgcggcggcgtcgggtacgcgcacacgttgcatcttcttcctttcgcggggtcctccgtagttctggcacgagccaggcgtactgacaggtggaccagcggactggtggagatggcgacgctctctctgaccgtgaattcaggagaccctccgctaggagctttgctggcagtagaacacgtgaaagacgatgtcagcatttccgttgaagaagggaaagagaatattcttcatgtttctgaaaatgtgatattcacagatgtgaattctatacttcgctacttggctagagttgcaactacagctgggttatatggctctaatctgatggaacatactgagattgatcactggttggagttcagtgctacaaaattatcttcatgtgattcctttacttctacaattaatgaactcaatcattgcctgtctctgagaacatacttagttggaaactccttgagtttagcagatttatgtgtttgggccaccctaaaaggaaatgctgcctggcaagaacagttgaaacagaagaaagctccagttcatgtaaaacgttggtttggctttcttgaagcccagcaggccttccagtcagtaggtaccaagtgggatgtttcaacaaccaaagctcgagtggcacctgagaaaaagcaagatgttgggaaatttgttgagcttccaggtgcggagatgggaaaggttaccgtcagatttcctccagaggccagtggttacttacacattgggcatgcaaaagctgctcttctgaaccagcactaccaggttaactttaaagggaaactgatcatgagatttgatgacacaaatcctgaaaaagaaaaggaagattttgagaaggttatcttggaagatgttgcaatgttgcatatcaaaccagatcaatttacttatacttcggatcattttgaaactataatgaagtatgcagagaagctaattcaagaagggaaggcttatgtggatgatactcctgctgaacagatgaaagcagaacgtgagcagaggatagaatctaaacatagaaaaaaccctattgagaagaatctacaaatgtgggaagaaatgaaaaaagggagccagtttggtcagtcctgttgtttgcgagcaaaaattgacatgagtagtaacaatggatgcatgagagatccaaccctttatcgctgcaaaattcaaccacatccaagaactggaaataaatacaatgtttatccaacatatgattttgcctgccccatagttgacagcatcgaaggtgttacacatgccctgagaacaacagaataccatgacagagatgagcagttttactggattattgaagctttaggcataagaaaaccatatatttgggaatatagtcggctaaatctcaacaacacagtgctatccaaaagaaaactcacatggtttgtcaatgaaggactagtagatggatgggatgacccaagatttcctacggttcgtggtgtactgagaagagggatgacagttgaaggactgaaacagtttattgctgctcagggctcctcacgttcagtcgtgaacatggagtgggacaaaatctgggcgtttaacaaaaaggttattgacccagtggctccacgatatgttgcattactgaagaaagaagtgatcccagtgaatgtacctgaagctcaggaggagatgaaagaagtagccaaacacccaaagaatcctgaggttggcttgaagcctgtgtggtatagtcccaaagttttcattgaaggtgctgatgcagagactttttcggagggtgagatggttacatttataaattggggcaacctcaacattacaaaaatacacaaaaatgcagatggaaaaatcatatctcttgatgcaaagttgaatttggaaaacaaagactacaagaaaaccactaaggtcacttggcttgcagagactacacatgctcttcctattccagtaatctgtgtcacttatgagcacttgatcacaaagccagtgctaggaaaagacgaggactttaagcagtatgtcaacaagaacagtaagcatgaagagctaatgctaggggatccctgccttaaggatttgaaaaaaggagatattatacaactccagagaagaggattcttcatatgtgatcaaccttatgaacctgttagcccatatagttgcaaggaagccccgtgtgttttgatatacattcctgatgggcacacaaaggaaatgccaacatcagggtcaaaggaaaagaccaaagtagaagccacaaaaaatgagacctctgctccttttaaggaaagaccaacaccttctctgaataataattgtactacatctgaggattccttggtcctttacaatagagtggctgttcaaggagatgtggttcgtgaattaaaagccaagaaagcaccaaaggaagatgtagatgcagctgtaaaacagcttttgtctttgaaagctgaatataaggagaaaactggccaggaatataaacctggaaaccctcctgctgaaataggacagaatatttcttctaattcctcagcaagtattctggaaagtaaatctctgtatgatgaagttgctgcacaaggggaggtggttcgtaagctaaaagctgaaaaatcccctaaggctaaaataaatgaagctgtagaatgcttactgtccctgaaggctcagtataaagaaaaaactgggaaggagtacatacctggtcagcccccattatctcaaagttcggattcaagcccaaccagaaattctgaacctgctggtttagaaacaccagaagcgaaagtactttttgacaaagtagcttctcaaggggaagtagttcggaaacttaaaactgaaaaagcccctaaggatcaagtagatatagctgttcaagaactccttntcncttggtgatcatgtcttttccatgtgtacctgtaatatttttccatcatatctcaaagtaaagtca

SEQ ID NO: 329720 - DNA, 3797 bp, Homo sapiens
cgcccagtccgcgcgtcagtcggtccctagcgcggctgcggggcggagagctgcggctggcccagcgcgcccacctgaggaggcggcggggtccgcaggcgtcgcgggacgaggagatcggagccgggagactcgcgcagcgccatggcccccattggcctcaaagctgttgtcggagagaagattatgcatgatgtgataaagaaggtcaagaagaagggggaatggaaggtgctggtggtggatcagttaagcatgaggatgctgtcctcctgctgcaagatgacagacatcatgaccgagggcataacgattgtggaagatatcaataagcgcagagagccgctccccagcctggaggctgtgtatctcatcactccatccgagaagtccgtccactctctcatcagtgactttaaggacccgccgactgctaaataccgggctgcacacgtcttcttcactgactcttgtccagatgccctgtttaatgaactggtaaaatcccgagcagccaaagtcatcaaaactctgacggaaatcaatattgcatttctcccgtatgaatcccaggtctattccttggactctgctgactctttccaaagcttctacagtccccacaaggctcagatgaagaatcctatactggagcgcctggcagagcagatcgcgaccctttgtgccaccctgaaggagtacccggctgtgcggtatcggggggaatacaaggacaatgccctgctggctcagctaatccaggacaagctcgatgcctataaagctgatgatccaacaatgggggagggcccagacaaggcacgctcccagctcctgatcctggatcgaggctttgaccccagctcccctgtgctccatgaattgacttttcaggctatgagttatgatctgctgcctatcgaaaatgatgtatacaagtatgagaccagcggcatcggggaggcacgggtgaaggaggtgctcctggacgaggacgacgacctgtggatagcactgcgccacaagcacatcgcagaggtgtcccaggaagtcacccggtctctgaaagatttttcttctagcaagagaatgaatactggagagaagaccaccatgcgggacctgtcccagatgctgaagaagatgcctcagtaccagaaagagctcagcaagtactccacccacctgcaccttgctgaggactgtatgaagcattaccaaggcaccgtagacaaactctgccgagtggagcaggacctggccatgggcacagatgctgagggagagaagatcaaggaccctatgcgagccatcgtccccattctgctggatgccaatgtcagcacttatgacaaaatccgcatcatccttctctacatctttttgaagaatggcatcacggaggaaaacctgaacaaactgatccagcacgcccagatacccccggaggatagtgagatcatcaccaacatggctcacctcggcgtgcccatcgtcaccgattccacgctgcgtcgccggagcaagccggagcggaaggaacgcatcagcgagcagacctaccagctctcacggtggactccgattatcaaggacatcatggaggacactattgaggacaaacttgacaccaaacactacccttatatctctacccgttcctctgcctccttcagcaccaccgccgtcagcgcccgctatgggcactggcataagaacaaggccccaggcgagtaccgcagtggcccccgcctcatcattttcatccttgggggtgtgagcctgaatgagatgcgctgcgcctacgaggtgacccaggccaacggaaagtgggaggtgctgataggatccacacacatcctcaccccacagaaactgctggacacactgaagaaactgaataaaacagatgaagaaataagcagttaaaaaaataagtcgcccctccaaaacacgcccccatcccacagcgctccgcagcttcccaccaccgcccgcctcagttcctttgcgtctgttgcctccccagccctgcacgccctggctggcactgttgccgctgcattctcgtgttcagtgatgccctcttcttgtttgaaacaaaagaaaataatgcattgtgttttttaaaaagagtatcttatacatgtatcctaaaaagagaagctcatgtgcaattggtgcacagcaggagaaatttctggactgttaggatgaatggacgccttctccccgttatttaagatttgtgaccttgtacataaccctgggtgacgtgcacattgcttgggtatggaacggtagaaatttgggtgtttttaaaaccttgtttggggttgttcctgtccttgttgagaatcatagagatgtctgtgttcttggagtatttcacactgaggactaatctgctatcttcattccagtccctacccctcagtgcctgctctcatccaaataacctgggaggtgacaatcaggatatctcaggaggtccaaggtggaacagacctctttgcctttcccagcgtctcatacccccggtagtgcagctgtgggtggaggctggggtgtctgcacgaagtcaggccagcgtcctcctccacagcctgtcactgccccctccccagcctgtgtccacagtgctgtgatcccgagggaagtcctccagtctaagtcacagtgccctgacaggtgagaagcaaactcccgctggaagcctccatctctttggaaaaacagttagtctggagcctgtggcccaggcccttctgtccccaggcatcatcccaacagctcattttccctagtccgccttcgttcaagggtcaggaatggaccagaacagatgggttctggaggcccctgaacagagggctatggctgtggagaaggttcttggcccgttggactcacacagaccctgtaccctctcggcaagcatcttcagtcagattatcctcagtttcagatacttcataataccttgtgttgtgtggggtcatacatcatcgtgtttgtaagagaagatggtcattttattctctgtataaaacttagctctaaagcagaaactaaagcagcaaatgcaggaaggctgtctcgccatcctcaagactcagcagctctcattctccagtggtgagcacaccatttgtgctgctgctgttgtcgtgaaatataataacagtggaagtcacaaaaatgtcccctgcccagccccctcgccgcccttgacctcctgcaggccatgtgtgtattacttgtctagtgatgtcctctcaaagtgctgtacgcgagctcggcgccacctccgcctccctttcagagcctgctccccgccctctctgctcgctgcattgtggtgttctcttctcaaggctttgaaatctccccttgcactgagattagtcgtcagatctctccccgtctccctcccaacttatacgacctgatttccttaggacggaaccgcaggcacctgcgccgggcgtcttactcccgctgcttgttctgtcccctccctcggaccaaacagtgctcatgcttcaggaccttgtttgtcgaagatgttggtttccctttctctgttatttatataaaaataatttatcaaaaggatattttaaaaaagctagtctgtcttgaaacttgtttaccttaaaattatcagaatctcagtgtttgaaagtactgaagcacaaacatatatcatctctgtaccattctgtactaaagcacttgagtctaataaataaagaaatcagcaccccttcccggtgtccagggggaaaaaaaaa

SEQ ID NO: 329721 - DNA, 1092 bp, Homo sapiens
cgcccagtccgcgcgtcagtcggtccctagcgcggctgcggggcggagagctgcggctggcccagcgcgcccacctgaggaggcggcggggtccgcaggcgtcgcgggacgaggagatcggagccgggagactcgcgcagcgccatggcccccattggcctcaaagctgttgtcggagagaagattatgcatgatgtgataaagaaggtcaagaagaagggggaatggaaggtgctggtggtggatcagttaagcatgaggatgctgtcctcctgctgcaagatgacagacatcatgaccgagggcataacgattgtggaagatatcaataagcgcagagagccgctccccagcctggaggctgtgtatctcatcactccatccgagaagtccgtccactctctcatcagtgactttaaggacccgccgactgctaaataccgggctgcacacgtcttcttcactgactcttgtccagatgccctgtttaatgaactggtaaaatcccgagcagccaaagtcatcaaaactctgacggaaatcaatattgcatttctcccgtatgaatcccaggtctattccttggactctgctgactctttccaaagcttctacagtccccacaaggctcagatgaagaatcctatactggagcgcctggcagagcagatcgcgaccctttgtgccaccctgaaggagtacccggctgtgcggtatcgggggtaaggcagtgcaccagtctgctggagtggcctcccgtgtgtcccccaagtgaggagctggcctggactcctcctccggccttaaggttcctctgacagttgtctcaagaagatcaggatttgagcatctcttacttcaaattattcttccagtggttttgttatcttctcaatgttatagtgaaatataataatacatgcagaaaaaagcataaatcaactattgaataacgaaaatgtgaacctctatgtaactgcaactcaggctgcctaccgtttttaatttctttctaatctttaaaaacaaatactatctttactaaagatgtttcagagtaagataaaatacaaagagagtaattctccaaag

SEQ ID NO: 329722 - DNA, 741 bp, Homo sapiens
cgcccagtccgcgcgtcagtcggtccctagcgcggctgcggggcggagagctgcggctggcccagcgcgcccacctgaggaggcggcggggtccgcaggcgtcgcgggacgaggagatcggagccgggagactcgcgcagcgccatggcccccattggcctcaaagctgttgtcggagagagtaagtggagccgggatccttccagcaggcggggactgcggctcccgaggagccccgcgcggcccctgccggcagcgcccaggcctccgagcgggctgccggccctgcgccccgggcctgaggctcctggtccgtggggtcccgttattcaggcgccgcccgcgcgagaggaaggctttgcacctgaatactgcacgataacatcaacctgcagtgctacagcaacgcggcaggacagcaacagcgcacaagaggcacaagacaccaggcggaaggcgaacgccacagtgccgaagcgcgccggcgcaaagagtgcgtggcagtgataccaaggccataagcagcaccccagtggaccggttaagcgacgcacagacagctgtgacctcaccgatcggttatgggccttgccaccgcgtgtgtctatccgggggactatagtcctgggaacgacagagcacacgcacggagtgactaacgaggcccgaacgaggctgtctgcgaaccagtccagatgagcacacgctcagtgcccgcactccgtaagtgagcggggatga

SEQ ID NO: 329723 - DNA, 417 bp, Homo sapiens
gactcttaacataaaatgctcaaagcaggaagttaaacatgccagacacatcatcagcaccatgtggagccaagcatttgctaaagccgcagcttaaatttgggtgtttttaaaaccttgtttggggttgttcctgtccttgttgagaatcatagagatgtctgtgttcttggagtatttcacactgaggactaatctgctatcttcattccagtccctacccctcagtgcctgctctcatccaaataacctgggaggtgacaatcaggatatctcaggaggtccaaggtggatcgtgaacaacctatattttcgccattttacaatggagagttgtgacaagtacaggttatcaagtttgcacttaactatgccaaaaaaagtttgaagcgctctattctcagacatgctgtatta

SEQ ID NO: 329724 - DNA, 3733 bp, Homo sapiens
cgcccagtccgcgcgtcagtcggtccctagcgcggctgcggggcggagagctgcggctggcccagcgcgcccacctgaggaggcggcggggtccgcaggcgtcgcgggacgaggagatcggagccgggagactcgcgcagcgccatggcccccattggcctcaaagctgttgtcggagagaagattatgcatgatgtgataaagaaggtcaagaagaagggggaatggaaggtgctggtggtggatcagttaagcatgaggatgctgtcctcctgctgcaagatgacagacatcatgaccgagggcataacgattgtggaagatatcaataagcgcagagagccgctccccagcctggaggctgtgtatctcatcactccatccgagaagtccgtccactctctcatcagtgactttaaggacccgccgactgctaaataccgggctgcacacgtcttcttcactgactcttgtccagatgccctgtttaatgaactggtaaaatcccgagcagccaaagtcatcaaaactctgacggaaatcaatattgcatttctcccgtatgaatcccaggtctattccttggactctgctgactctttccaaagcttctacagtccccacaaggctcagatgaagaatcctatactggagcgcctggcagagcagatcgcgaccctttgtgccaccctgaaggagtacccggctgtgcggtatcggggggaatacaaggacaatgccctgctggctcagctaatccaggacaagctcgatgcctataaagctgatgatccaacaatgggggagggcccagacaaggcacgctcccagctcctgatcctggatcgaggctttgaccccagctcccctgtgctccatgaattgacttttcaggctatgagttatgatctgctgcctatcgaaaatgatgtatacaagtatgagaccagcggcatcggggaggcacgggtgaaggaggtgctcctggacgaggacgacgacctgtggatagcactgcgccacaagcacatcgcagaggtgtcccaggaagtcacccggtctctgaaagatttttcttctagcaagagaatgaatactggagagaagaccaccatgcgggacctgtcccagatgctgaagaagatgcctcagtaccagaaagagctcagcaagtactccacccacctgcaccttgctgaggactgtatgaagcattaccaaggcaccgtagacaaactctgccgagtggagcaggacctggccatgggcacagatgctgagggagagaagatcaaggaccctatgcgagccatcgtccccattctgctggatgccaatgtcagcacttatgacaaaatccgcatcatccttctctacatctttttgaagaatggcatcacggaggaaaacctgaacaaactgatccagcacgcccagatacccccggaggatagtgagatcatcaccaacatggctcacctcggcgtgcccatcgtcaccgattccacgctgcgtcgccggagcaagccggagcggaaggaacgcatcagcgagcagacctaccagctctcacggtggactccgattatcaaggacatcatggaggacactattgaggacaaacttgacaccaaacactacccttatatctctacccgttcctctgcctccttcagcaccaccgccgtcagcgcccgctatgggcactggcataagaacaaggccccaggcgagtaccgcagtggcccccgcctcatcattttcatccttgggggtgtgagcctgaatgagatgcgctgcgcctacgaggtgacccaggccaacggaaagtgggaggtgctgataggatccacacacatcctcaccccacagaaactgctggacacactgaagaaactgaataaaacagatgaagaaataagcagttaaaaaaataagtcgcccctccaaaacacgcccccatcccacagcgctccgcagcttcccaccaccgcccgcctcagttcctttgcgtctgttgcctccccagccctgcacgccctggctggcactgttgccgctgcattctcgtgttcagtgatgccctcttcttgtttgaaacaaaagaaaataatgcattgtgttttttaaaaagagtatcttatacatgtatcctaaaaagagaagctcatgtgcaattggtgcacagcaggagaaatttctggactgttaggatgaatggacgccttctccccgttatttaagatttgtgaccttgtacataaccctgggtgacgtgcacattgcttgggtatggaacggtagaaatttgggtgtttttaaaaccttgtttggggttgttcctgtccttgttgagaatcatagagatgtctgtgttcttggagtatttcacactgaggactaatctgctatcttcattccagtccctacccctcagtgcctgctctcatccaaataacctgggaggtgacaatcaggatatctcaggaggtccaaggtggaacagacctctttgcctttcccagcgtctcatacccccggtagtgcagctgtgggtggaggctggggtgtctgcacgaagtcaggccagcgtcctcctccacagcctgtcactgccccctccccagcctgtgtccacagtgctgtgatcccgagggaagtcctccagtctaagtcacagtgccctgacaggtgagaagcaaactcccgctggaagcctccatctctttggaaaaacagttagtctggagcctgtggcccaggcccttctgtccccaggcatcatcccaacagctcattttccctagtccgccttcgttcaagggtcaggaatggaccagaacagatgggttctggaggcccctgaacagagggctatggctgtggagaaggttcttggcccgttggactcacacagaccctgtaccctctcggcaagcatcttcagtcagattatcctcagtttcagatacttcataataccttgtgttgtgtggggtcatacatcatcgtgtttgtaagagaagatggtcattttattctctgtataaaacttagctctaaagcagaaactaaagcagcaaatgcaggaaggctgtctcgccatcctcaagactcagcagctctcattctccagtggtgagcacaccatttgtgctgctgctgttgtcgtgaaatataataacagtggaagtcacaaaaatgtcccctgcccagccccctcgccgcccttgacctcctgcaggccatgtgtgtattacttgtctagtgatgtccctctctgctcgctgcattgtggtgttctcttctcaaggctttgaaatctccccttgcactgagattagtcgtcagatctctccccgtctccctcccaacttatacgacctgatttccttaggacggaaccgcaggcacctgcgccgggcgtcttactcccgctgcttgttctgtcccctccctcggaccaaacagtgctcatgcttcaggaccttgtttgtcgaagatgttggtttccctttctctgttatttatataaaaataatttatcaaaaggatattttaaaaaagctagtctgtcttgaaacttgtttaccttaaaattatcagaatctcagtgtttgaaagtactgaagcacaaacatatatcatctctgtaccattctgtactaaagcacttgagtctaataaataaagaaatcagcaccccttcccggtgtccagggggaaaaaaaaa

SEQ ID NO: 329725 - DNA, 2021 bp, Homo sapiens
cgcccagtccgcgcgtcagtcggtccctagcgcggctgcggggcggagagctgcggctggcccagcgcgcccacctgaggaggcggcggggtccgcaggcgtcgcgggacgaggagatcggagccgggagactcgcgcagcgccatggcccccattggcctcaaagctgttgtcggagagaagattatgcatgatgtgataaagaaggtcaagaagaagggggaatggaaggtgctggtggtggatcagttaagcatgaggatgctgtcctcctgctgcaagatgacagacatcatgaccgagggcataacgattgtggaagatatcaataagcgcagagagccgctccccagcctggaggctgtgtatctcatcactccatccgagaagtccgtccactctctcatcagtgactttaaggacccgccgactgctaaataccgggctgcacacgtcttcttcactgactcttgtccagatgccctgtttaatgaactggtaaaatcccgagcagccaaagtcatcaaaactctgacggaaatcaatattgcatttctcccgtatgaatcccaggtctattccttggactctgctgactctttccaaagcttctacagtccccacaaggctcagatgaagaatcctatactggagcgcctggcagagcagatcgcgaccctttgtgccaccctgaaggagtacccggctgtgcggtatcggggggaatacaaggacaatgccctgctggctcagctaatccaggacaagctcgatgcctataaagctgatgatccaacaatgggggagggcccagacaaggcacgctcccagctcctgatcctggatcgaggctttgaccccagctcccctgtgctccatgaattgacttttcaggctatgagttatgatctgctgcctatcgaaaatgatgtatacaagtatgagaccagcggcatcggggaggcacgggtgaaggaggtgctcctggacgaggacgacgacctgtggatagcactgcgccacaagcacatcgcagaggtgtcccaggaagtcacccggtctctgaaagatttttcttctagcaagagaatgaatactggagagaagaccaccatgcgggacctgtcccagatgctgaagaagatgcctcagtaccagaaagagctcagcaagtactccacccacctgcaccttgctgaggactgtatgaagcattaccaaggcaccgtagacaaactctgccgagtggagcaggacctggccatgggcacagatgctgagggagagaagatcaaggaccctatgcgagccatcgtccccattctgctggatgccaatgtcagcacttatgacaaaatccgcatcatccttctctacatctttttgaagaatggcatcacggaggaaaacctgaacaaactgatccagcacgcccagatacccccggaggatagtgagatcatcaccaacatggctcacctcggcgtgcccatcgtcaccgattccacgctgcgtcgccggagcaagccggagcggaaggaacgcatcagcgagcagacctaccagctctcacggtggactccgattatcaaggacatcatggaggacactattgaggacaaacttgacaccaaacactacccttatatctctacccgttcctctgcctccttcagcaccaccgccgtcagcgcccgctatgggcactggcataagaacaaggccccaggcgagtaccgcagtggcccccgcctcatcattttcatccttgggggtgtgagcctgaatgagatgcgctgcgcctacgaggtgacccaggccaacggaaagtgggaggtgctgataggttctactcacattcttactcccaccaaatttctcatggacctgagacaccccgacttcagggagtcctctagggtatcttttgaggatcaggctccaacaatggagtgagagccaaagaaacaaagtaaaagcagcttattacagaaaagaaactcttccactctgaagggctt

SEQ ID NO: 329726 - DNA, 1059 bp, Homo sapiens
gttgggatgatgcctggggacagaagggcctgggccacaggctccagactaactgctcattttccctagtccgccttcgttcaagggtcaggaatggaccagaacagatgggttctggaggcccctgaacagagggctatggctgtggagaaggttcttggcccgttggactcacacagaccctgtaccctctcggcaagcatcttcagtcagattatcctcagtttcagatacttcataataccttgtgttgtgtggggtcatacatcatcgtgtttgtaagagaagatggtcattttattctctgtataaaacttagctctaaagcagaaactaaagcagcaaatgcaggaaggctgtctcgccatcctcaagactcagcagctctcattctccagtggtgagcacaccatttgtgctgctgctgttgtcgtgaaatataataacagtggaagtcacaaaaatgtcccctgcccagccccctcgccgcccttgacctcctgcaggccatgtgtgtattacttgtctagtgatgtcctctcaaagtgctgtacgcgagctcggcgccacctccgcctccctttcagagcctgctccccgccctctctgctcgctgcattgtggtgttctcttctcaaggctttgaaatctccccttgcactgagattagtcgtcagatctctccccgtctccctcccaacttatacgacctgatttccttaggacggaaccgcaggcacctgcgccgggcgtcttactcccgctgcttgttctgtcccctccctcggaccaaacagtgctcatgcttcaggaccttgtttgtcgaagatgttggtttccctttctctgttatttatataaaaataatttatcaaaaggatattttaaaaaagctagtctgtcttgaaacttgtttaccttaaaattatcagaatctcagtgtttgaaagtactgaagcacaaacatatatcatctctgtaccattctgtactaaagcacttgagtctaataaataaagaaatcagcaccccttcccggtgtccagggggaaaaaaaaa

SEQ ID NO: 329727 - DNA, 1099 bp, Homo sapiens
cgcccagtccgcgcgtcagtcggtccctagcgcggctgcggggcggagagctgcggctggcccagcgcgcccacctgaggaggcggcggggtccgcaggcgtcgcgggacgaggagatcggagccgggagactcgcgcagcgccatggcccccattggcctcaaagctgttgtcggagagaagattatgcatgatgtgataaagaaggtcaagaagaagggggaatggaaggtgctggtggtggatcagttaagcatgaggatgctgtcctcctgctgcaagatgacagacatcatgaccgagggcataacgattgtggaagatatcaataagcgcagagagccgctccccagcctggaggctgtgtatctcatcactccatccgagaagtccgtccactctctcatcagtgactttaaggacccgccgactgctaaataccgggctgcacacgtcttcttcactgactcttgtccagatgccctgtttaatgaactggtaaaatcccgagcagccaaagtcatcaaaactctgacggaaatcaatattgcatttctcccgtatgaatcccaggtctattccttggactctgctgactctttccaaagcttctacagtccccacaaggctcagatgaagaatcctatactggagcgcctggcagagcagatcgcgaccctttgtgccaccctgaaggagtacccggctgtgcggtatcggggggaatacaaggacaatgccctgctggctcagctaatccaggacaagctcgatgcctataaagctgatgatccaacaatgggggagggcccagacaaggcacgctcccagctcctgatcctggatcgaggctttgaccccagctcccctgtgctccatgaattgacttttcaggctatgagttatgatctgctgcctatcgaaaatgatgtatacaagtatgagaccagcggcatcggggaggcacgggtgaaggaggtgctcctggacgaggacgacgacctgtggatagcactgcgccacaagcacatcgcagaggtgtcccagaaagtcagacagtctctgtataatttttcgtatcactatagagtgtagttcg

SEQ ID NO: 329728 - DNA, 166 bp, Homo sapiens
gtaagagccccctgcccccttctccagcgaggcgcctctacccagctgctattgatgatgcgttcactctgggcacctcgcgggggctcatcactgtgtgaattcgttttcttggcagagtcaccaacatgctaacccgtaatgataaatcccttctgttctctga

SEQ ID NO: 329729 - DNA, 370 bp, Homo sapiens
tagagatgaggtttcaccatgttggccaggctggtcttgaactcctgacatcaagtgatgtgcccacctcagcctcccaaagtgctgggattacaggcatgagccaccatgcccagcccagatttcagattctaacatcttgggcatgttgagaccatggaattcactcccaaggaacgtggtaaccttaaggaatgagtgaatgattccccccggtcccccactgtagatatttatctgcaacagtctgaaggtagcctgtctatattgcttctggttttatggtcacccatcatgttttcttattcactgtgggttgttttgttgtctagttgtggaagatatcaataagcgcagagagccgctcccc

SEQ ID NO: 329730 - DNA, 3923 bp, Homo sapiens
cgcccagtccgcgcgtcagtcggtccctagcgcggctgcggggcggagagctgcggctggcccagcgcgcccacctgaggaggcggcggggtccgcaggcgtcgcgggacgaggagatcggagccgggagactcgcgcagcgccatggcccccattggcctcaaagctgttgtcggagagaagattatgcatgatgtgataaagaaggtcaagaagaagggggaatggaaggtgctggtggtggatcagttaagcatgaggatgctgtcctcctgctgcaagatgacagacatcatgaccgagggcataacgattgtggaagatatcaataagcgcagagagccgctccccagcctggaggctgtgtatctcatcactccatccgagaagtccgtccactctctcatcagtgactttaaggacccgccgactgctaaataccgggctgcacacgtcttcttcactgactcttgtccagatgccctgtttaatgaactggtaaaatcccgagcagccaaagtcatcaaaactctgacggaaatcaatattgcatttctcccgtatgaatcccaggtctattccttggactctgctgactctttccaaagcttctacagtccccacaaggctcagatgaagaatcctatactggagcgcctggcagagcagatcgcgaccctttgtgccaccctgaaggagtacccggctgtgcggtatcggggggaatacaaggacaatgccctgctggctcagctaatccaggacaagctcgatgcctataaagctgatgatccaacaatgggggagggcccagacaaggcacgctcccagctcctgatcctggatcgaggctttgaccccagctcccctgtgctccatgaattgacttttcaggctatgagttatgatctgctgcctatcgaaaatgatgtatacaagtatgagaccagcggcatcggggaggcacgggtgaaggaggtgctcctggacgaggacgacgacctgtggatagcactgcgccacaagcacatcgcagaggtgtcccaggaagtcacccggtctctgaaagatttttcttctagcaagagaatgaatactggagagaagaccaccatgcgggacctgtcccagatgctgaagaagatgcctcagtaccagaaagagctcagcaagtactccacccacctgcaccttgctgaggactgtatgaagcattaccaaggcaccgtagacaaactctgccgagtggagcaggacctggccatgggcacagatgctgagggagagaagatcaaggaccctatgcgagccatcgtccccattctgctggatgccaatgtcagcacttatgacaaaatccgcatcatccttctctacatctttttgaagaatggcatcacggaggaaaacctgaacaaactgatccagcacgcccagatacccccggaggatagtgagatcatcaccaacatggctcacctcggcgtgcccatcgtcaccgattccacgctgcgtcgccggagcaagccggagcggaaggaacgcatcagcgagcagacctaccagctctcacggtggactccgattatcaaggacatcatggaggacactattgaggacaaacttgacaccaaacactacccttatatctctacccgttcctctgcctccttcagcaccaccgccgtcagcgcccgctatgggcactggcataagaacaaggccccaggcgagtaccgcagtggcccccgcctcatcattttcatccttgggggtgtgagcctgaatgagatgcgctgcgcctacgaggtgacccaggccaacggaaagtgggaggtgctgataggttctactcacattcttactcccaccaaatttctcatggacctgagacaccccgacttcagggagtcctctagggtatcttttgaggatcaggctccaacaatggagtgagagccaaagaaacaaagatccacacacatcctcaccccacagaaactgctggacacactgaagaaactgaataaaacagatgaagaaataagcagttaaaaaaataagtcgcccctccaaaacacgcccccatcccacagcgctccgcagcttcccaccaccgcccgcctcagttcctttgcgtctgttgcctccccagccctgcacgccctggctggcactgttgccgctgcattctcgtgttcagtgatgccctcttcttgtttgaaacaaaagaaaataatgcattgtgttttttaaaaagagtatcttatacatgtatcctaaaaagagaagctcatgtgcaattggtgcacagcaggagaaatttctggactgttaggatgaatggacgccttctccccgttatttaagatttgtgaccttgtacataaccctgggtgacgtgcacattgcttgggtatggaacggtagaaatttgggtgtttttaaaaccttgtttggggttgttcctgtccttgttgagaatcatagagatgtctgtgttcttggagtatttcacactgaggactaatctgctatcttcattccagtccctacccctcagtgcctgctctcatccaaataacctgggaggtgacaatcaggatatctcaggaggtccaaggtggaacagacctctttgcctttcccagcgtctcatacccccggtagtgcagctgtgggtggaggctggggtgtctgcacgaagtcaggccagcgtcctcctccacagcctgtcactgccccctccccagcctgtgtccacagtgctgtgatcccgagggaagtcctccagtctaagtcacagtgccctgacaggtgagaagcaaactcccgctggaagcctccatctctttggaaaaacagttagtctggagcctgtggcccaggcccttctgtccccaggcatcatcccaacagctcattttccctagtccgccttcgttcaagggtcaggaatggaccagaacagatgggttctggaggcccctgaacagagggctatggctgtggagaaggttcttggcccgttggactcacacagaccctgtaccctctcggcaagcatcttcagtcagattatcctcagtttcagatacttcataataccttgtgttgtgtggggtcatacatcatcgtgtttgtaagagaagatggtcattttattctctgtataaaacttagctctaaagcagaaactaaagcagcaaatgcaggaaggctgtctcgccatcctcaagactcagcagctctcattctccagtggtgagcacaccatttgtgctgctgctgttgtcgtgaaatataataacagtggaagtcacaaaaatgtcccctgcccagccccctcgccgcccttgacctcctgcaggccatgtgtgtattacttgtctagtgatgtcctctcaaagtgctgtacgcgagctcggcgccacctccgcctccctttcagagcctgctccccgccctctctgctcgctgcattgtggtgttctcttctcaaggctttgaaatctccccttgcactgagattagtcgtcagatctctccccgtctccctcccaacttatacgacctgatttccttaggacggaaccgcaggcacctgcgccgggcgtcttactcccgctgcttgttctgtcccctccctcggaccaaacagtgctcatgcttcaggaccttgtttgtcgaagatgttggtttccctttctctgttatttatataaaaataatttatcaaaaggatattttaaaaaagctagtctgtcttgaaacttgtttaccttaaaattatcagaatctcagtgtttgaaagtactgaagcacaaacatatatcatctctgtaccattctgtactaaagcacttgagtctaataaataaagaaatcagcaccccttcccggtgtccagggggaaaaaaaaa

SEQ ID NO: 329731 - DNA, 463 bp, Homo sapiens
  misc_feature (11)..(11): n is a, c, g, or t
  misc_feature (14)..(14): n is a, c, g, or t
  misc_feature (17)..(17): n is a, c, g, or t
  misc_feature (21)..(21): n is a, c, g, or t
  misc_feature (420)..(420): n is a, c, g, or t
gagccactcgnagnggngtcnaggaagtcacccggtctctgaaagatttttcttctagcaagagaatgaatactggagagaagaccaccatgcgggacctgtcccagatgctgaagaagatgcctcagtaccagaaagagctcagcaagtactccacccacctgcaccttgctgaggactgtatgaagcattaccaaggcaccgtagacaaactctgccgagtggagcaggacctggccatgggcacagatgctgagggagagaagatcaaggaccctatgcgagccatcgtccccattctgctggatgccaatgtcagcacttatgacaaaatccgcatcatccttctctacatctttttgaagaatggcatcacggagggaaacctgaacaatccctttcctccgacagtcccacgtntgcttccaggaatcaaagagcatgccagtggcagctatctgtg

SEQ ID NO: 329732 - DNA, 3625 bp, Homo sapiens
cgcccagtccgcgcgtcagtcggtccctagcgcggctgcggggcggagagctgcggctggcccagcgcgcccacctgaggaggcggcggggtccgcaggcgtcgcgggacgaggagatcggagccgggagactcgcgcagcgccatggcccccattggcctcaaagctgttgtcggagagaagattatgcatgatgtgataaagaaggtcaagaagaagggggaatggaaggtgctggtggtggatcagttaagcatgaggatgctgtcctcctgctgcaagatgacagacatcatgaccgagggcataacgattgtggaagatatcaataagcgcagagagccgctccccagcctggaggctgtgtatctcatcactccatccgagaagtccgtccactctctcatcagtgactttaaggacccgccgactgctaaataccgggctgcacacgtcttcttcactgactcttgtccagatgccctgtttaatgaactggtaaaatcccgagcagccaaagtcatcaaaactctgacggaaatcaatattgcatttctcccgtatgaatcccaggtctattccttggactctgctgactctttccaaagcttctacagtccccacaaggctcagatgaagaatcctatactggagcgcctggcagagcagatcgcgaccctttgtgccaccctgaaggagtacccggctgtgcggtatcggggggaatacaaggacaatgccctgctggctcagctaatccaggacaagctcgatgcctataaagctgatgatccaacaatgggggagggcccagacaaggcacgctcccagctcctgatcctggatcgaggctttgaccccagctcccctgtgctccatgaattgacttttcaggctatgagttatgatctgctgcctatcgaaaatgatgtatacaagtatgagaccagcggcatcggggaggcacgggtgaaggaggtgctcctggacgaggacgacgacctgtggatagcactgcgccacaagcacatcgcagaggtgtcccaggaagtcacccggtctctgaaagatttttcttctagcaagagaatgaatactggagagaagaccaccatgcgggacctgtcccagatgctgaagaagatgcctcagtaccagaaagagctcagcaagtactccacccacctgcaccttgctgaggactgtatgaagcattaccaaggcaccgtagacaaactctgccgagtggagcaggacctggccatgggcacagatgctgagggagagaagatcaaggaccctatgcgagccatcgtccccattctgctggatgccaatgtcagcacttatgacaaaatccgcatcatccttctctacatctttttgaagaatggcatcacggaggaaaacctgaacaaactgatccagcacgcccagatacccccggaggatagtgagatcatcaccaacatggctcacctcggcgtgcccatcgtcaccgattccacgctgcgtcgccggagcaagccggagcggaaggaacgcatcagcgagcagacctaccagctctcacggtggactccgattatcaaggacatcatggaggacactattgaggacaaacttgacaccaaacactacccttatatctctacccgttcctctgcctccttcagcaccaccgccgtcagcgcccgctatgggcactggcataagaacaaggccccaggcgagtaccgcagtggcccccgcctcatcattttcatccttgggggtgtgagcctgaatgagatgcgctgcgcctacgaggtgacccaggccaacggaaagtgggaggtgctgataggatccacacacatcctcaccccacagaaactgctggacacactgaagaaactgaataaaacagatgaagaaataagcagttaaaaaaataagtcgcccctccaaaacacgcccccatcccacagcgctccgcagcttcccaccaccgcccgcctcagttcctttgcgtctgttgcctccccagccctgcacgccctggctggcactgttgccgctgcattctcgtgttcagtgatgccctcttcttgtttgaaacaaaagaaaataatgcattgtgttttttaaaaagagtatcttatacatgtatcctaaaaagagaagctcatgtgcaattggtgcacagcaggagaaatttctggactgttaggatgaatggacgccttctccccgttatttaagatttgtgaccttgtacataaccctgggtgacgtgcacattgcttgggtatggaacggtagaaatttgggtgtttttaaaaccttgtttggggttgttcctgtccttgttgagaatcatagagatgtctgtgttcttggagtatttcacactgaggactaatctgctatcttcattccagtccctacccctcagtgcctgctctcatccaaataacctgggaggtgacaatcaggatatctcaggaggtccaaggtggaacagacctctttgcctttcccagcgtctcatacccccggtagtgcagctgtgggtggaggctggggtgtctgcacgaagtcaggccagcgtcctcctccacagcctgtcactgccccctccccagcctgtgtccacagtgctgtgatcccgagggaagtcctccagtctaagtcacagtgccctgacaggtgagaagcaaactcccgctggaagcctccatctctttggaaaaacagttagtctggagcctgtggcccaggcccttctgtccccaggcatcatcccaacagctcattttccctagtccgccttcgttcaagggtcaggaatggaccagaacagatgggttctggaggcccctgaacagagggctatggctgtggagaaggttcttggcccgttggactcacacagaccctgtaccctctcggcaagcatcttcagtcagattatcctcagtttcagatacttcataataccttgtgttgtgtggggtcatacatcatcgtgtttgtaagagaagatggtcattttattctctgtataaaacttagctctaaagcagaaactaaagcagcaaatgcaggaaggctgtctcgccatcctcaagactcagcagctctcattctccagtggtgagcacaccatttgtgctgctgctgttgtcgtgaaatataataacagtggaagtcacaaaaatgtcccctgcccagccccctcgccgcccttgacctcctgcaggccatgtgtgtattacttgtctagtgatgtcctctcaaagtgctgtacgcgagctcggcgccacctccgcctccctttcagagcctgctccccgccctctctgctcgctgcattgtggtgttctcttctcaaggctttgaaatctccccttgcactgagattagtcgtcagatctctccccgtctccctcccaacttatacgacctgatttccttaggacggaaccgcaggcacctgcgccgggcgtcttactcccgctgcttgttctgtcccctccctcggaccaaacagtgctcatgcttcaggaccttgtttgtcgaagatgttggtttccctttctctgttatttatataaaaataatttatcaaaaggatatttta

SEQ ID NO: 329733 - DNA, 3642 bp, Homo sapiens
cgcccagtccgcgcgtcagtcggtccctagcgcggctgcggggcggagagctgcggctggcccagcgcgcccacctgaggaggcggcggggtccgcaggcgtcgcgggacgaggagatcggagccgggagactcgcgcagcgccatggcccccattggcctcaaagctgttgtcggagagaagattatgcatgatgtgataaagaaggtcaagaagaagggggaatggaaggtgctggtggtggatcagttaagcatgaggatgctgtcctcctgctgcaagatgacagacatcatgaccgagggcataacgattgtggaagatatcaataagcgcagagagccgctccccagcctggaggctgtgtatctcatcactccatccgagaagtccgtccactctctcatcagtgactttaaggacccgccgactgctaaataccgggctgcacacgtcttcttcactgactcttgtccagatgccctgtttaatgaactggtaaaatcccgagcagccaaagtcatcaaaactctgacggaaatcaatattgcatttctcccgtatgaatcccaggtctattccttggactctgctgactctttccaaagcttctacagtccccacaaggctcagatgaagaatcctatactggagcgcctggcagagcagatcgcgaccctttgtgccaccctgaaggagtacccggctgtgcggtatcggggggaatacaaggacaatgccctgctggctcagctaatccaggacaagctcgatgcctataaagctgatgatccaacaatgggggagggcccagacaaggcacgctcccagctcctgatcctggatcgaggctttgaccccagctcccctgtgctccatgaattgacttttcaggctatgagttatgatctgctgcctatcgaaaatgatgtatacaagtatgagaccagcggcatcggggaggcacgggtgaaggaggtgctcctggacgaggacgacgacctgtggatagcactgcgccacaagcacatcgcagaggtgtcccaggaagtcacccggtctctgaaagatttttcttctagcaagagaatgaatactggagagaagaccaccatgcgggacctgtcccagatgctgaagaagatgcctcagtaccagaaagagctcagcaagtactccacccacctgcaccttgctgaggactgtatgaagcattaccaaggcaccgtagacaaactctgccgagtggagcaggacctggccatgggcacagatgctgagggagagaagatcaaggaccctatgcgagccatcgtccccattctgctggatgccaatgtcagcacttatgacaaaatccgcatcatccttctctacatctttttgaagaatggcatcacggaggaaaacctgaacaaactgatccagcacgcccagatacccccggaggatagtgagatcatcaccaacatggctcacctcggcgtgcccatcgtcaccgattccacgctgcgtcgccggagcaagccggagcggaaggaacgcatcagcgagcagacctaccagctctcacggtggactccgattatcaaggacatcatggaggacactattgaggacaaacttgacaccaaacactacccttatatctctacccgttcctctgcctccttcagcaccaccgccgtcaggatccacacacatcctcaccccacagaaactgctggacacactgaagaaactgaataaaacagatgaagaaataagcagttaaaaaaataagtcgcccctccaaaacacgcccccatcccacagcgctccgcagcttcccaccaccgcccgcctcagttcctttgcgtctgttgcctccccagccctgcacgccctggctggcactgttgccgctgcattctcgtgttcagtgatgccctcttcttgtttgaaacaaaagaaaataatgcattgtgttttttaaaaagagtatcttatacatgtatcctaaaaagagaagctcatgtgcaattggtgcacagcaggagaaatttctggactgttaggatgaatggacgccttctccccgttatttaagatttgtgaccttgtacataaccctgggtgacgtgcacattgcttgggtatggaacggtagaaatttgggtgtttttaaaaccttgtttggggttgttcctgtccttgttgagaatcatagagatgtctgtgttcttggagtatttcacactgaggactaatctgctatcttcattccagtccctacccctcagtgcctgctctcatccaaataacctgggaggtgacaatcaggatatctcaggaggtccaaggtggaacagacctctttgcctttcccagcgtctcatacccccggtagtgcagctgtgggtggaggctggggtgtctgcacgaagtcaggccagcgtcctcctccacagcctgtcactgccccctccccagcctgtgtccacagtgctgtgatcccgagggaagtcctccagtctaagtcacagtgccctgacaggtgagaagcaaactcccgctggaagcctccatctctttggaaaaacagttagtctggagcctgtggcccaggcccttctgtccccaggcatcatcccaacagctcattttccctagtccgccttcgttcaagggtcaggaatggaccagaacagatgggttctggaggcccctgaacagagggctatggctgtggagaaggttcttggcccgttggactcacacagaccctgtaccctctcggcaagcatcttcagtcagattatcctcagtttcagatacttcataataccttgtgttgtgtggggtcatacatcatcgtgtttgtaagagaagatggtcattttattctctgtataaaacttagctctaaagcagaaactaaagcagcaaatgcaggaaggctgtctcgccatcctcaagactcagcagctctcattctccagtggtgagcacaccatttgtgctgctgctgttgtcgtgaaatataataacagtggaagtcacaaaaatgtcccctgcccagccccctcgccgcccttgacctcctgcaggccatgtgtgtattacttgtctagtgatgtcctctcaaagtgctgtacgcgagctcggcgccacctccgcctccctttcagagcctgctccccgccctctctgctcgctgcattgtggtgttctcttctcaaggctttgaaatctccccttgcactgagattagtcgtcagatctctccccgtctccctcccaacttatacgacctgatttccttaggacggaaccgcaggcacctgcgccgggcgtcttactcccgctgcttgttctgtcccctccctcggaccaaacagtgctcatgcttcaggaccttgtttgtcgaagatgttggtttccctttctctgttatttatataaaaataatttatcaaaaggatattttaaaaaagctagtctgtcttgaaacttgtttaccttaaaattatcagaatctcagtgtttgaaagtactgaagcacaaacatatatcatctctgtaccattctgtactaaagcacttgagtctaataaataaagaaatcagcaccccttcccggtgtccagggggaaaaaaaaa

SEQ ID NO: 329734 - DNA, 616 bp, Homo sapiens
cgcccagtccgcgcgtcagtcggtccctagcgcggctgcggggcggagagctgcggctggcccagcgcgcccacctgaggaggcggcggggtccgcaggcgtcgcgggacgaggagatcggcgccacctccgcctccctttcagagcctgctccccgccctctctgctcgctgcattgtggtgttctcttctcaaggctttgaaatctccccttgcactgagattagtcgtcagatctctccccgtctccctcccaacttatacgacctgatttccttaggacggaaccgcaggcacctgcgccgggcgtcttactcccgctgcttgttctgtcccctccctcggaccaaacagtgctcatgcttcaggaccttgtttgtcgaagatgttggtttccctttctctgttatttatataaaaataatttatcaaaaggatattttaaaaaagctagtctgtcttgaaacttgtttaccttaaaattatcagaatctcagtgtttgaaagtactgaagcacaaacatatatcatctctgtaccattctgtactaaagcacttgagtctaataaataaagaaatcagcaccccttcccggtgtccagggggaaaaaaaaa

SEQ ID NO: 329735 - DNA, 7537 bp, Homo sapiens
agccgagtgcgccgtgcggtctccggacgctcgctgctcagcccgatccccgccaactgtgcaggcggctgacccgcagcggcagcggcagcagcgaggactcgagcgctggctgcagcgacaccatggatctctcctttatggccgcgcagctgcccatgatggggggagctttcatggactcgcccaacgaggacttcagcaccgagtactccctgtttaactcctctgccaatgtccacgcggctgccaatggccagggccagccggaagatcctcctcggtcctccaacgacgccgtcttgctatggattgccatcatagctacgctggggaacatcgtggtggtgggcgtggtgtatgccttcaccttctgaggacggcacaccctgcaccaccatggggtgaggcttggcacgtagctctgacttgctgtcggcctttggcttctcctgtgttctagaaccaggagttttgaccaggggcggcggccgtccttctggaatttctccccagcagccctgatttcaaatatcccatgttgtggtcaagctgagtcagaagacatggaagtatgggcctcctgcccctagaggcatgacggggcaaggccttcagagggcagattggggatccttgaaactacattccaggaacatgggaccagatgagacagctagttaagtttaaaacatagacatgatttgatgatcgcttgctggtggtaaataatcactcgtgtgtcttgtttttatgcaaacttatcgaacctagggcgtggggtgctggggcaagagcagccctcagaacttcagtgttcctgacccaattctggtttcacattcagtcccttggccatctagtagggccattggatgttcctagtttgactttgaaatggcacctttgccaccagacacctggtcccttccaagacccaagtgcattgggagacccagggatggggggttactggtaataggtggggtttctgggggtgttgttggtggtttttatctcctggtcggactttctcttctttttaagaagaggagaggatgtctttaagagctagatgtgccaggcagtggactcttcaggccacccacgtgagaatgctgtttcttctctgaggaatcgtggaattttaaagatgaacaagattcacatccactgaattattcaacggatgggtcagaaaggggggtgatttgcctgtggtcaccaggcaggtttgtggaggagtcggaacagaaagatgtgtcctcactctcagctcactgagctctctgccccaactaagcacttccctgaggaggttgctgagaagctgccctcaggagaatgtccaggcatcttgaaggtgggtgcgagattggcaggctgctcagatacccgtcctttacattcagtgtggataccgtgcattctcctgaagctgtgaaagtgcttctgcccaagccacttccttaaattctgaaatatcagcatctggggtcctggcaagcaaggaagcttccaagtaaaaaccagagagaagggcacacttttctttcttcattaggaaatcttattgcacaggaaccacccccacccccaccccccacaccttcccaaggcagcatcccagtgcagatagagtgggaaaggtcccagaagggggctcactcacctctaggcccagagaggctttctcctcactttatacactgcaaaaacagaagaattgtgtcaataacaccctctgtagtggagaaacttaaaaagctggttaggaagctctcgtgtatatttagagacaattacaagaaagctggacttgccgctgtggtctcaggagaaatgagtgttcttgatgacaggcaaagggacatcttagttgtccagaagcggcactcttccctggaagccgccatgttaataggattactagcctggctccagacagtgcctgctcatggctgccagttcttaccgatcacatctgtcactgccaccgtatatcatctgccagtgcatcagcttaaggggaggtcacgagtgcaaaagaacctgacccttgacaatgagggagaagggacatggaccacctgtctggaattcctggaatcactggcagggtggaggctgggctggggagttagccgcggtgtgcgtgaatggctctgtctccagcaagtctctctccatcaaaccccaggtctgccccataagcaagatctttaacagatggatgtctccatgagaaaacccaaggcgagaagcccagagccatggcggggttgcttgacgtcctcatggagtcactctgccccacatgctcaaatcttccctctggccccacatccctaggagggcctgacccctgtaaagatacaggaggcagctccctggcctccaaatggcccatggagatggcagtcgggagacagggttctgtgtttgctgcggtgaagggaggagaaggcaggaggaaaaaggatggcttctagccctgaagaggactccagcatcccaggcaccgggtgcttctggctgcagttttccctatggaggcccctcagcctccagccctaacataaatgtcggttaaattcagttttcaagcctctctcccttttcagtgtcagagcagtagatggtccagggcattggaggcctcgaccactctgcattgcagattacagtgacttcctcggggttgccccatcttggtctcctgtggtttcttcatcagctttttttttaccagcatctctcaaataacaatgaagatagatatgcccattagtgtctgattaaggagcaaaggctggatttctggccacagcgagctgcactctccctcctgcctcagccggggtccgtcttagcagtttggaaaggggaaaaagatgccggtcctcactgcttaagttttgtgtccaggtgccactagacttgcatgcacactaactccttacaatcaccacacagcatcatcgccccagtgcacagatgaggaaccagaggctcagaggagtgaagttgccttcctgaggtcacacagcatgaaagtgatgagctaggatttgaatctgggaagttgggctctagagccagactgtactgccttctgccacactgtactgccttctgtgactgggtggcacctccagggcacatttacacaaggccctgaatctgcagaggctgtttctcaagatgcccgtcatggtgtggcctgggccagctctggcttccacaggtccctgactgtcctcagagtggaacatgctcaacctcccgcccactgctctctctctgcccagatttcaggggtgccggtccccaaggcctgcccccttctttaagactgaactcaagtctccttggaaggccccggtgaagctcccagagactggttttcttgggatgcaggcagaaggggaccctccctggccaacacccaggagcccagcagaagcacccacacgtagaaagaggctcactacagccagaagtgcagagtcagagtcctgggaccatcttgttctgcaaggtgaccccaggctccccaggacaggggagagggatcgtcctcattcagactctagctggggcctctgtactggcttctccctgggtggggttgcctgttacatagctgtgcctcagagaaagggtcctgcattttctggaatgttctctgtgcttacccctctgtgtgcccctccattgctcctctacaagcaattaggtgattcaaaagagcaacttaggctgggtgcagtgactcacacccgtaatcccggcactttgggaggccgaggcgggcagggacaggagttcaagaccagcctggccaacatggtgaaaccctgtctctacaaaaaatacaaaaattaaccagacattgtggcatgtgcctgtaatcccagctactcaggaggctgacacaggagaattgcttgaaccaggaggcggaggctgcagtgagctgagattgtgccactgcactccagcctgggcaacagaacgagactctgtctcaaaaaaaaaaaaaaagaaaagagaaaaaaaaaaagagcaacttactgctttgtgaggttgtgagtggccaccactgaaggtctttgagaagaggccagacgctgctgtagccaggcctgtcttaagaggacttgtgcttccagggacccaggcaggatgatggcgcagctcttcctactccaagccaacgctgtccttcccctttcccatgaaatcaaggtcaagaggcaaataagactccctgctccactctaccccccagagagaaatgattctcgctcctttcagatcccccaggatctgagggagaaaggatgggaggaggggcagcagcatttcgctggaaaggcagcagatgcttttccagccccggttcagctggaaggcttggaggccggccagaccactctggcgtctcctgaagtgggtccctggagaccgaagaggctcagtggagtctgtctgttgtcagcactgctgcctgatccctgcaagacaaatggcactttccttcttcagaagcatcatctgccttcattattagcagtaatattattcccagttattattcttaccggtgccagttttgcacatctttttgttgctctatttgtgtctcatttacttctcaaattgcccctgggggcaggaatgaggatgcagagagatgcacgttaattactgtcgcatttttctgtggagaaaactgaggccagggctgaacgctcacagctaaggagctgtgattcagacccagttctgtcagctctagaggcaccctgcatcatgcccaccagggtgatccccctgggatggaccatctcgggatatgaggcctcggaggctggggttgagatttggtcctgaagagcttatagccagattgccacattcaagtgtaagtccaggaaaggggcaggcggcagtgcacagggatttatcagttccagaacctcacagtgataagaggctttagagagcatctaatcgagacctttaatttttcggggagagcagctgaggccgtgtggaaaattagtggagagctgacaagtgtctgggctcctggcccaggggtccgtggtccagcacgttgtgcgttcagtgggaagcaaagggcttgcccgggattacctgccccagccccgaggtgggttgtgctccctgcagctgccatcggcccgctttgcttcgtcctggcagatgcccagtgattgtccccgagcaagtgccagggttgggctgagctgctatgacagggaggcccagggagttctgctcagggagccaaagggaacagccagatcctgaatgttctatgttcacctgccccagccccacccaccctggcccactccacaggcccctgaccatggtcactcacggagagggatggaggagaaggtggttgaactgagtactgagaacccagaggacagagcccacagcttccaagcaggaaaagggacctctctgaaaaatctggataaccagaattatcacagcaccttctcattcccagcgcgtccttctgagctcagaccttgagcatttactgggtttctttttgaggaagagggaaagtgacaaaggacaaaacaatgcaaatcttcatgactgaagacgatcaaagactccctggagcgagaaaacagttactgccagaagcagaatggaagagccaaaaagtacacaaaatggacgccataaattctgaaataaaagtgtatgatgtgttctgagtcactgtagaagtcatgcatttattatcaagatagaaaagagcagagaatgacgtggacattggtcctcggagaggctgcataggtggtgcggtccccgggggattctggatgctggtcttttgaccgtggcggcagcctcgcgcctgcccggatggctccatccagacatttggcaaggctgtcatctgctcttgggtcctttttcaagctgatttcctgcctccccaagaggaggtttgagccccattctgccttggaaataaatcctgacagatgtgcacagcatatttgcagggaatttgcaggcctcgattattgggggaatcagagcccattccacaccgagccccatccacgtggctgagcaacacccctgtgtcccctgtatctgtctcactggctgtctttctgccagtttcttaaagaaccacaccattactgcgtttgccgttcgaagcgttgtcccaacaatgcagatggttctgacaagggctctatatgctggcagaagggagcttccaaccttttaacttgaggaaaatgaatctctgagaggcttgagagtgttgccaggtggagcttttcaggagacaggggtcttgagcccaggacacctaactatcgagttttcactaggagacttagtggtggctttcatgaggccagtcgttctcaaggaagggctgggggccatcagcaatgtctggagacatttttgattctcacagcttggtggggactgctattggtatctcatgggtggaggccagggatgccaccgaacatcctacaatgcacagggcagccccccacaaataagaattatccagccccaaaatgccaatagtgccgaggtcaggggaccctgtgctggccatcctatctctgattctgaaactatgcatgctttccacttttccccatttgtgagtcattgagtaaattaaagctcttctgagcagcagcagtgatcatggtcactgccctgcgttcaaataatgcgagctgaggacagtgatctgcaactcccagcatgtcatgtggtctcttagaaatccatgtgactgtttccaccatcttgggcatttgtggggacccccagactggagggagaaagccctacaaagtggatgggagtgtggggctgaacttttccctacccttaactttgtgtctctgggacctccagggacctggcccctcaccaatgcatatgaagagtatgcttggggaagagcttaggaatggggtgggcatgggagtgctgggtagcagcctttgagcaaatctgcatcttctcttatttctgacctttttccatgtgcccagtcctatttctgccagttgaaggcatactaatattctttatactatttaatcttttgcagaaaccttactattataacttgctactctccagataccaattcttcatgccgagagcatcggaaatgtttttgtgtcttactgatgttttcatgatcaacttgtaaatgtaagcagttgacttcataaaaggtattttaactattcttggagtcctttgctacccaagcacctggtttcaccatgcgatcactgacttctctacagtgaagactctttcttaataaaggatttcgctgtgctcttttgattaaaaatatctaaccttaaaagacgtaaaaatgtatctgtgaaatctcactttgttagcgttgctgctgttgtcattttctattatgataactgaaaagagaaaagaagaaaacatgaaaaaa

SEQ ID NO: 329736 - DNA, 7440 bp, Homo sapiens
agccgagtgcgccgtgcggtctccggacgctcgctgctcagcccgatccccgccaactgtgcaggcggctgacccgcagcggcagcggcagcagcgaggactcgagcgctggctgcagcgacaccatggatctctcctttatggccgcgcagctgcccatgatggggggagctttcatggactcgcccaacgaggacttcagcaccgagtactccctgtttaactcctctgccaatgtccacgcggctgccaatggccagggccagccggaagatcctcctcggtcctccaacgacgccgtcttgctatggattgccatcatagctacgctggggaacatcgtggtggtgggcgtggtgtatgccttcaccttctgaggacggcacaccctgcaccaccatggggtgaggcttggcacgtagctctgacttgctgtcggcctttggcttctcctgtgttctagaaccaggagttttgaccaggggcggcggccgtccttctggaatttctccccagcagccctgatttcaaatatcccatgttgtggtcaagctgagtcagaagacatggaagtatgggcctcctgcccctagaggcatgacggggcaaggccttcagagggcagattggggatccttgaaactacattccaggaacatgggaccagatgagacagctagttaagtttaaaacatagacatgatttgatgatcgcttgctggtggtaaataatcactcgtgtgtcttgtttttatgcaaacttatcgaacctagggcgtggggtgctggggcaagagcagccctcagaacttcagtgttcctgacccaattctggtttcacattcagtcccttggccatctagtagggccattggatgttcctagtttgactttgaaatggcacctttgccaccagacacctggtcccttccaagacccaagtgcattgggagacccagggatggggggttactggtaataggtggggtttctgggggtgttgttggtggtttttatctcctggtcggactttctcttctttttaagaagaggagaggatgtctttaagagctagatgtgccaggcagtggactcttcaggccacccacgtgagaatgctgtttcttctctgaggaatcgtggaattttaaagatgaacaagattcacatccactgaattattcaacggatgggtcagaaaggggggtgatttgcctgtggtcaccaggcaggtttgtggaggagtcggaacagaaagatgtgtcctcactctcagctcactgagctctctgccccaactaagcacttccctgaggaggttgctgagaagctgccctcaggagaatgtccaggcatcttgaaggtgggtgcgagattggcaggctgctcagatacccgtcctttacattcagtgtggataccgtgcattctcctgaagctgtgaaagtgcttctgcccaagccacttccttaaattctgaaatatcagcatctggggtcctggcaagcaaggaagcttccaagtaaaaaccagagagaagggcacacttttctttcttcattaggaaatcttattgcacaggaaccacccccacccccaccccccacaccttcccaaggcagcatcccagtgcagatagagtgggaaaggtcccagaagggggctcactcacctctaggcccagagaggctttctcctcactttatacactgcaaaaacagaagaattgtgtcaataacaccctctgtagtggagaaacttaaaaagctggttaggaagctctcgtgtatatttagagacaattacaagaaagctggacttgccgctgtggtctcaggagaaatgagtgttcttgatgacaggcaaagggacatcttagttgtccagaagcggcactcttccctggaagccgccatgttaataggattactagcctggctccagacagtgcctgctcatggctgccagttcttaccgatcacatctgtcactgccaccgtatatcatctgccagtgcatcagcttaaggggaggtcacgagtgcaaaagaacctgacccttgacaatgagggagaagggacatggaccacctgtctggaattcctggaatcactggcagggtggaggctgggctggggagttagccgcggtgtgcgtgaatggctctgtctccagcaagtctctctccatcaaaccccaggtctgccccataagcaagatctttaacagatggatgtctccatgagaaaacccaaggcgagaagcccagagccatggcggggttgcttgacgtcctcatggagtcactctgccccacatgctcaaatcttccctctggccccacatccctaggagggcctgacccctgtaaagatacaggaggcagctccctggcctccaaatggcccatggagatggcagtcgggagacagggttctgtgtttgctgcggtgaagggaggagaaggcaggaggaaaaaggatggcttctagccctgaagaggactccagcatcccaggcaccgggtgcttctggctgcagttttccctatggaggcccctcagcctccagccctaacataaatgtcggttaaattcagttttcaagcctctctcccttttcagtgtcagagcagtagatggtccagggcattggaggcctcgaccactctgcattgcagattacagtgacttcctcggggttgccccatcttggtctcctgtggtttcttcatcagctttttttttaccagcatctctcaaataacaatgaagatagatatgcccattagtgtctgattaaggagcaaaggctggatttctggccacagcgagctgcactctccctcctgcctcagccggggtccgtcttagcagtttggaaaggggaaaaagatgccggtcctcactgcttaagttttgtgtccaggtgccactagacttgcatgcacactaactccttacaatcaccacacagcatcatcgccccagtgcacagatgaggaaccagaggctcagaggagtgaagttgccttcctgaggtcacacagcatgaaagtgatgagctaggatttgaatctgggaagttgggctctagagccagactgtactgccttctgccacactgtactgccttctgtgactgggtggcacctccagggcacatttacacaaggccctgaatctgcagaggctgtttctcaagatgcccgtcatggtgtggcctgggccagctctggcttccacaggtccctgactgtcctcagagtggaacatgctcaacctcccgcccactgctctctctctgcccagatttcaggggtgccggtccccaaggcctgcccccttctttaagactgaactcaagtctccttggaaggccccggtgaagctcccagagactggttttcttgggatgcaggcagaaggggaccctccctggccaacacccaggagcccagcagaagcacccacacgtagaaagaggctcactacagccagaagtgcagagtcagagtcctgggaccatcttgttctgcaaggtgaccccaggctccccaggacaggggagagggatcgtcctcattcagactctagctggggcctctgtactggcttctccctgggtggggttgcctgttacatagctgtgcctcagagaaagggtcctgcattttctggaatgttctctgtgcttacccctctgtgtgcccctccattgctcctctacaagcaattaggtgattcaaaagagcaacttaggctgggtgcagtgactcacacccgtaatcccggcactttgggaggccgaggcgggcagggacaggagttcaagaccagcctggccaacatggtgaaaccctgtctctacaaaaaatacaaaaattaaccagacattgtggcatgtgcctgtaatcccagctactcaggaggctgacacaggagaattgcttgaaccaggaggcggaggctgcagtgagctgagattgtgccactgcactccagcctgggcaacagaacgagactctgtctcaaaaaaaaaaaaaaagaaaagagaaaaaaaaaaagagcaacttactgctttgtgaggttgtgagtggccaccactgaaggtctttgagaagaggccagacgctgctgtagccaggcctgtcttaagaggacttgtgcttccagggacccaggcaggatgatggcgcagctcttcctactccaagccaacgctgtccttcccctttcccatgaaatcaaggtcaagaggcaaataagactccctgctccactctaccccccagagagaaatgattctcgctcctttcagatcccccaggatctgagggagaaaggatgggaggaggggcagcagcatttcgctggaaaggcagcagatgcttttccagccccggttcagctggaaggcttggaggccggccagaccactctggcgtctcctgaagtgggtccctggagaccgaagaggctcagtggagtctgtctgttgtcagcactgctgcctgatccctgcaagacaaatggcactttccttcttcagaagcatcatctgccttcattattagcagtaatattattcccagttattattcttaccggtgccagttttgcacatctttttgttgctctatttgtgtctcatttacttctcaaattgcccctgggggcaggaatgaggatgcagagagatgcacgttaattactgtcgcatttttctgtggagaaaactgaggccagggctgaacgctcacagctaaggagctgtgattcagacccagttctgtcagctctagaggcaccctgcatcatgcccaccagggtgatccccctgggatggaccatctcgggatatgaggcctcggaggctggggttgagatttggtcctgaagagcttatagccagattgccacattcaagtgtaagtccaggaaaggggcaggcggcagtgcacagggatttatcagttccagaacctcacagtgataagaggctttagagagcatctaatcgagacctttaatttttcggggagagcagctgaggccgtgtggaaaattagtggagagctgacaagtgtctgggctcctggcccaggggtccgtggtccagcacgttgtgcgttcagtgggaagcaaagggcttgcccgggattacctgccccagccccgaggtgggttgtgctccctgcagctgccatcggcccgctttgcttcgtcctggcagatgcccagtgattgtccccgagcaagtgccagggttgggctgagctgctatgacagggaggcccagggagttctgctcagggagccaaagggaacagccagatcctgaatgttctatgttcacctgccccagccccacccaccctggcccactccacaggcccctgaccatggtcactcacggagagggatggaggagaaggtggttgaactgagtactgagaacccagaggacagagcccacagcttccaagcaggaaaagggacctctctgaaaaatctggataaccagaattatcacagcaccttctcattcccagcgcgtccttctgagctcagaccttgagcatttactgggtttctttttgaggaagagggaaagtgacaaaggacaaaacaatgcaaatcttcatgactgaagacgatcaaagactccctggagcgagaaaacagttactgccagaagcagaatggaagagccaaaaagtacacaaaatggacgccataaattctgaaataaaagtgtatgatgtgttctgagtcactgtagaagtcatgcatttattatcaagatagaaaagagcagagaatgacgtggacattggtcctcggagaggctgcataggtggtgcggtccccgggggattctggatgctggtcttttgaccgtggcggcagcctcgcgcctgcccggatggctccatccagacatttggcaaggctgtcatctgctcttgggtcctttttcaagctgatttcctgcctccccaagaggaggtttgagccccattctgccttggaaataaatcctgacagatgtgcacagcatatttgcagggaatttgcaggcctcgattattgggggaatcagagcccattccacaccgagccccatccacgtggctgagcaacacccctgtgtcccctgtatctgtctcactggctgtctttctgccagtttcttaaagaaccacaccattactgcgtttgccgttcgaagcgttgtcccaacaatgcagatggttctgacaagggctctatatgctggcagaagggagcttccaaccttttaacttgaggaaaatgaatctctgagaggcttgagagtgttgccaggtggagcttttcaggagacaggggtcttgagcccaggacacctaactatcgagttttcactaggagacttagtggtggctttcatgaggccagtcgttctcaaggaagggctgggggccatcagcaatgtctggagacatttttgattctcacagcttggtggggactgctattggtatctcatgggtggaggccagggatgccaccgaacatcctacaatgcacagggcagccccccacaaataagaattatccagccccaaaatgccaatagtgccgaggtcaggggaccctgtgctggccatcctatctctgattctgaaactatgcatgctttccacttttccccatttgtgagtcattgagtaaattaaagctcttctgagcagcagcagtgatcatggtcactgccctgcgttcaaataatgcgagctgaggacagtgatctgcaactcccagcatgtcatgtggtctcttagaaatccatgtgactgtttccaccatcttgggcatttgtggggacccccagactggagggagaaagccctacaaagtggatgggagtgtggggctgaacttttccctacccttaactttgtgtctctgggacctccagggacctggcccctcaccaatgcatatgaagagtatgcttggggaagagcttaggaatggggtgggcatgggagtgctgggtagcagcctttgagcaaatctgcatcttctcttatttctgacctttttccatgtgcccagtcctatttctgccagttgaaggcatactaatattctttatactatttaatcttttgcagaaaccttactattataacttgctactctccagataccaattcttcatgccgagagcatcggaaatgtttttgtgtcttactgatgttttcatgatcaacttgtaaatgtaagcagttgacttcataaaaggtattttaactattcttggagtcctttgctacccaagcacctggtttcaccatgcgatcactgacttctctacagtgaagactctttcttaataaaggatttcgctgtgctcttttgattaaaaatatctaaccttaaaagacgt

SEQ ID NO: 329737 - DNA, 776 bp, Homo sapiens
agccgagtgcgccgtgcggtctccggacgctcgctgctcagcccgatccccgccaactgtgcaggcggctgacccgcagcggcagcggcagcagcgaggactcgagcgctggctgcagcgacaccatggatctctcctttatggccgcgcagctgcccatgatggggggagctttcatggactcgcccaacgaggacttcagcaccgagtactccctgtttaactcctctgccaatgtccacgcggctgccaatggccagggccagccggaagatcctcctcggtcctccaacgacgccgtcttgctatggattgccatcatagctacgctggggaacatcgtggtggtgggcgtggtgtatgccttcaccttctgaggacggcacaccctgcaccaccatgggaaaccttactattataacttgctactctccagataccaattcttcatgccgagagcatcggaaatgtttttgtgtcttactgatgttttcatgatcaacttgtaaatgtaagcagttgacttcataaaaggtattttaactattcttggagtcctttgctacccaagcacctggtttcaccatgcgatcactgacttctctacagtgaagactctttcttaataaaggatttcgctgtgctcttttgattaaaaatatctaaccttaaaagacgtaaaaatgtatctgtgaaatctcactttgttagcgttgctgctgttgtcattttctattatgataactgaaaagagaaaagaagaaaacatgaaaaaa

SEQ ID NO: 329738 - DNA, 679 bp, Homo sapiens
agccgagtgcgccgtgcggtctccggacgctcgctgctcagcccgatccccgccaactgtgcaggcggctgacccgcagcggcagcggcagcagcgaggactcgagcgctggctgcagcgacaccatggatctctcctttatggccgcgcagctgcccatgatggggggagctttcatggactcgcccaacgaggacttcagcaccgagtactccctgtttaactcctctgccaatgtccacgcggctgccaatggccagggccagccggaagatcctcctcggtcctccaacgacgccgtcttgctatggattgccatcatagctacgctggggaacatcgtggtggtgggcgtggtgtatgccttcaccttctgaggacggcacaccctgcaccaccatgggaaaccttactattataacttgctactctccagataccaattcttcatgccgagagcatcggaaatgtttttgtgtcttactgatgttttcatgatcaacttgtaaatgtaagcagttgacttcataaaaggtattttaactattcttggagtcctttgctacccaagcacctggtttcaccatgcgatcactgacttctctacagtgaagactctttcttaataaaggatttcgctgtgctcttttgattaaaaatatctaaccttaaaagacgt

SEQ ID NO: 329739 - DNA, 5778 bp, Homo sapiens
agccgagtgcgccgtgcggtctccggacgctcgctgctcagcccgatccccgccaactgtgcaggcggctgacccgcagcggcagcggcagcagcgaggactcgagcgctggctgcagcgacaccatggatctctcctttatggccgcgcagctgcccatgatggggggagctttcatggactcgcccaacgaggacttcagcaccgagtactccctgtttaactcctctgccaatgtccacgcggctgccaatggccagggccagccggaagatcctcctcggtcctccaacgacgccgtcttgctatggattgccatcatagctacgctggggaacatcgtggtggtgggcgtggtgtatgccttcaccttctgaggacggcacaccctgcaccaccatggggtgaggcttggcacgtagctctgacttgctgtcggcctttggcttctcctgtgttctagaaccaggagttttgaccaggggcggcggccgtccttctggaatttctccccagcagccctgatttcaaatatcccatgttgtggtcaagctgagtcagaagacatggaagtatgggcctcctgcccctagaggcatgacggggcaaggccttcagagggcagattggggatccttgaaactacattccaggaacatgggaccagatgagacagctagttaagtttaaaacatagacatgatttgatgatcgcttgctggtggtaaataatcactcgtgtgtcttgtttttatgcaaacttatcgaacctagggcgtggggtgctggggcaagagcagccctcagaacttcagtgttcctgacccaattctggtttcacattcagtcccttggccatctagtagggccattggatgttcctagtttgactttgaaatggcacctttgccaccagacacctggtcccttccaagacccaagtgcattgggagacccagggatggggggttactggtaataggtggggtttctgggggtgttgttggtggtttttatctcctggtcggactttctcttctttttaagaagaggagaggatgtctttaagagctagatgtgccaggcagtggactcttcaggccacccacgtgagaatgctgtttcttctctgaggaatcgtggaattttaaagatgaacaagattcacatccactgaattattcaacggatgggtcagaaaggggggtgatttgcctgtggtcaccaggcaggtttgtggaggagtcggaacagaaagatgtgtcctcactctcagctcactgagctctctgccccaactaagcacttccctgaggaggttgctgagaagctgccctcaggagaatgtccaggcatcttgaaggtgggtgcgagattggcaggctgctcagatacccgtcctttacattcagtgtggataccgtgcattctcctgaagctgtgaaagtgcttctgcccaagccacttccttaaattctgaaatatcagcatctggggtcctggcaagcaaggaagcttccaagtaaaaaccagagagaagggcacacttttctttcttcattaggaaatcttattgcacaggaaccacccccacccccaccccccacaccttcccaaggcagcatcccagtgcagatagagtgggaaaggtcccagaagggggctcactcacctctaggcccagagaggctttctcctcactttatacactgcaaaaacagaagaattgtgtcaataacaccctctgtagtggagaaacttaaaaagctggttaggaagctctcgtgtatatttagagacaattacaagaaagctggacttgccgctgtggtctcaggagaaatgagtgttcttgatgacaggcaaagggacatcttagttgtccagaagcggcactcttccctggaagccgccatgttaataggattactagcctggctccagacagtgcctgctcatggctgccagttcttaccgatcacatctgtcactgccaccgtatatcatctgccagtgcatcagcttaaggggaggtcacgagtgcaaaagaacctgacccttgacaatgagggagaagggacatggaccacctgtctggaattcctggaatcactggcagggtggaggctgggctggggagttagccgcggtgtgcgtgaatggctctgtctccagcaagtctctctccatcaaaccccaggtctgccccataagcaagatctttaacagatggatgtctccatgagaaaacccaaggcgagaagcccagagccatggcggggttgcttgacgtcctcatggagtcactctgccccacatgctcaaatcttccctctggccccacatccctaggagggcctgacccctgtaaagatacaggaggcagctccctggcctccaaatggcccatggagatggcagtcgggagacagggttctgtgtttgctgcggtgaagggaggagaaggcaggaggaaaaaggatggcttctagccctgaagaggactccagcatcccaggcaccgggtgcttctggctgcagttttccctatggaggcccctcagcctccagccctaacataaatgtcggttaaattcagttttcaagcctctctcccttttcagtgtcagagcagtagatggtccagggcattggaggcctcgaccactctgcattgcagattacagtgacttcctcggggttgccccatcttggtctcctgtggtttcttcatcagctttttttttaccagcatctctcaaataacaatgaagatagatatgcccattagtgtctgattaaggagcaaaggctggatttctggccacagcgagctgcactctccctcctgcctcagccggggtccgtcttagcagtttggaaaggggaaaaagatgccggtcctcactgcttaagttttgtgtccaggtgccactagacttgcatgcacactaactccttacaatcaccacacagcatcatcgccccagtgcacagatgaggaaccagaggctcagaggagtgaagttgccttcctgaggtcacacagcatgaaagtgatgagctaggatttgaatctgggaagttgggctctagagccagactgtactgccttctgccacactgtactgccttctgtgactgggtggcacctccagggcacatttacacaaggccctgaatctgcagaggctgtttctcaagatgcccgtcatggtgtggcctgggccagctctggcttccacaggtccctgactgtcctcagagtggaacatgctcaacctcccgcccactgctctctctctgcccagatttcaggggtgccggtccccaaggcctgcccccttctttaagactgaactcaagtctccttggaaggccccggtgaagctcccagagactggttttcttgggatgcaggcagaaggggaccctccctggccaacacccaggagcccagcagaagcacccacacgtagaaagaggctcactacagccagaagtgcagagtcagagtcctgggaccatcttgttctgcaaggtgaccccaggctccccaggacaggggagagggatcgtcctcattcagactctagctggggcctctgtactggcttctccctgggtggggttgcctgttacatagctgtgcctcagagaaagggtcctgcattttctggaatgttctctgtgcttacccctctgtgtgcccctccattgctcctctacaagcaattaggtgattcaaaagagcaacttaggctgggtgcagtgactcacacccgtaatcccggcactttgggaggccgaggcgggcagggacaggagttcaagaccagcctggccaacatggtgaaaccctgtctctacaaaaaatacaaaaattaaccagacattgtggcatgtgcctgtaatcccagctactcaggaggctgacacaggagaattgcttgaaccaggaggcggaggctgcagtgagctgagattgtgccactgcactccagcctgggcaacagaacgagactctgtctcaaaaaaaaaaaaaaagaaaagagaaaaaaaaaaagagcaacttactgctttgtgaggttgtgagtggccaccactgaaggtctttgagaagaggccagacgctgctgtagccaggcctgtcttaagaggacttgtgcttccagggacccaggcaggatgatggcgcagctcttcctactccaagccaacgctgtccttcccctttcccatgaaatcaaggtcaagaggcaaataagactccctgctccactctaccccccagagagaaatgattctcgctcctttcagatcccccaggatctgagggagaaaggatgggaggaggggcagcagcatttcgctggaaaggcagcagatgcttttccagccccggttcagctggaaggcttggaggccggccagaccactctggcgtctcctgaagtgggtccctggagaccgaagaggctcagtggagtctgtctgttgtcagcactgctgcctgatccctgcaagacaaatggcactttccttcttcagaagcatcatctgccttcattattagcagtaatattattcccagttattattcttaccggtgccagttttgcacatctttttgttgctctatttgtgtctcatttacttctcaaattgcccctgggggcaggaatgaggatgcagagagatgcacgttaattactgtcgcatttttctgtggagaaaactgaggccagggctgaacgctcacagctaaggagctgtgattcagacccagttctgtcagctctagaggcaccctgcatcatgcccaccagggtgatccccctgggatggaccatctcgggatatgaggcctcggaggctggggttgagatttggtcctgaagagcttatagccagattgccacattcaagtgtaagtccaggaaaggggcaggcggcagtgcacagggatttatcagttccagaacctcacagtgataagaggctttagagagcatctaatcgagacctttaatttttcggggagagcagctgaggccgtgtggaaaattagtggagagctgacaagtgtctgggctcctggcccaggggtccgtggtccagcacgttgtgcgttcagtgggaagcaaagggcttgcccgggattacctgccccagccccgaggtgggttgtgctccctgcagctgccatcggcccgctttgcttcgtcctggcagatgcccagtgattgtccccgagcaagtgccagggttgggctgagctgctatgacagggaggcccagggagttctgctcagggagccaaagggaacagccagatcctgaatgttctatgttcacctgccccagccccacccaccctggcccactccacaggcccctgaccatggtcactcacggagagggatggaggagaaggtggttgaactgagtactgagaacccagaggacagagcccacagcttccaagcaggaaaagggacctctctgaaaaatctggataaccagaattatcacagcaccttctcattcccagcgcgtccttctgagctcagaccttgagcatttactgggtttctttttgaggaagagggaaagtgacaaaggacaaaacaatgcaaatcttcatgactgaagacgatcaaagactccctggagcgagaaaacagttactgccagaagcagaatggaagagccaaaaagtacacaaaatggacgccataaattctgaaataaaagtgtatgatgtgttctgagtca

SEQ ID NO: 329740 - DNA, 8286 bp, Homo sapiens
caaggcggccggcggcgaccatggcagcgggccggcggcggccgtagtggcccaggcctgggcttcagcctcccggggccccagagggcggggcggtccgggccgcggcggtggcggcgccacttccctgctcccgcccgaggactcctgcgggcactcgctgaggaccagcggaccggcggcgcgaatctgactgaggggcggggacgccgtctgttccccgccgctcccggcagggccgggccgggccgggctgggccgggctgggccgggcgggcccctgggagcagcccccaggcgggggaccgccttggagacccgaagccggagctagaggcaggcggtgggcccgggtggagtcccggccggagctggtggttcgggggcggtgctaggccccgaggctgcgggacctgagcgcgaggagcctgagtgcgggtccagcggtggcggcatgagccggcccccgccgacggggaaaatgcccggcgcccccgagaccgcgccgggggacggggcaggcgcgagccgccagaggaagctggaggcgctgatccgagaccctcgctcccccatcaacgtggagagcttgctggatggcttaaattccttggtccttgatttagattttcctgctttgaggaaaaacaagaacatagataatttcttaaatagatatgagaaaattgtgaaaaaaatcagaggtctacagatgaaggcagaagactatgatgttgtaaaagttattggaagaggtgcttttggtgaagtgcagttggttcgtcacaaggcatcgcagaaggtttatgctatgaagcttcttagtaagtttgaaatgataaaaagatcagattctgcctttttttgggaagaaagagatattatggcctttgccaatagcccctgggtggttcagcttttttatgcctttcaagatgataggtatctgtacatggtaatggagtacatgcctggtggagaccttgtaaaccttatgagtaattatgatgtgcctgaaaaatgggccaaattttacactgctgaagttgttcttgctctggatgcaatacactccatgggtttaatacacagagatgtgaagcctgacaacatgctcttggataaacatggacatctaaaattagcagattttggcacgtgtatgaagatggatgaaacaggcatggtacattgtgatacagcagttggaacaccggattatatatcacctgaggttctgaaatcacaagggggtgatggtttctatgggcgagaatgtgattggtggtctgtaggtgttttcctttatgagatgctagtgggggatactccattttatgcggattcacttgtaggaacatatagcaaaattatggatcataagaattcactgtgtttccctgaagatgcagaaatttccaaacatgcaaagaatctcatctgtgctttcttaacagatagggaggtacgacttgggagaaatggggtggaagaaatcagacagcatcctttctttaagaatgatcagtggcattgggataacataagagaaacggcagctcctgtagtacctgaactcagcagtgacatagacagcagcaatttcgatgacattgaagatgacaaaggagatgtagaaaccttcccaattcctaaagcttttgttggaaatcagctgcctttcatcggatttacctactatagagaaaatttattattaagtgactctccatcttgtagagaaaatgattccatacaatcaaggaaaaatgaagaaagtcaagagattcagaaaaaactgtatacattagaagaacatcttagcaatgagatgcaagccaaagaggaactggaacagaagtgcaaatctgttaatactcgcctagaaaaaacagcaaaggagctagaagaggagattaccttacggaaaagtgtggaatcagcattaagacagttagaaagagaaaaggcgcttcttcagcacaaaaatgcagaatatcagaggaaagctgatcatgaagcagacaaaaaacgaaatttggaaaatgatgttaacagcttaaaagatcaacttgaagatttgaaaaaaagaaatcaaaactctcaaatatccactgagaaagtgaatcaactccagagacaactggatgaaaccaatgctttactgcgaacagagtctgatactgcagcccggttaaggaaaacccaggcagaaagttcaaaacagattcagcagctggaatctaacaatagagatctacaagataaaaactgcctgctggagactgccaagttaaaacttgaaaaggaatttatcaatcttcagtcagctctagaatctgaaaggagggatcgaacccatggatcagagataattaatgatttacaaggtagaatatgtggcctagaagaagatttaaagaacggcaaaatcttactagcgaaagtagaactggagaagagacaacttcaggagagatttactgatttggaaaaggaaaaaagcaacatggaaatagatatgacataccaactaaaagttatacagcagagcctagaacaagaagaagctgaacataaggccacaaaggcacgactagcagataaaaataagatctatgagtccatcgaagaagccaaatcagaagccatgaaagaaatggagaagaagctcttggaggaaagaactttaaaacagaaagtggagaacctattgctagaagctgagaaaagatgttctctattagactgtgacctcaaacagtcacagcagaaaataaatgagctccttaaacagaaagatgtgctaaatgaggatgttagaaacctgacattaaaaatagagcaagaaactcagaagcgctgccttacacaaaatgacctgaagatgcaaacacaacaggttaacacactaaaaatgtcagaaaagcagttaaagcaagaaaataaccatctcatggaaatgaaaatgaacttggaaaaacaaaatgctgaacttcgaaaagaacgtcaggatgcagatgggcaaatgaaagagctccaggatcagctcgaagcagaacagtatttctcaaccctttataaaacacaagttagggagcttaaagaagaatgtgaagaaaagaccaaacttggtaaagaattgcagcagaagaaacaggaattacaggatgaacgggactctttggctgcccaactggagatcaccttgaccaaagcagattctgagcaactggctcgttcaattgctgaagaacaatattctgatttggaaaaagagaagatcatgaaagagctggagatcaaagagatgatggctagacacaaacaggaacttacggaaaaagatgctacaattgcttctcttgaggaaactaataggacactaactagtgatgttgccaatcttgcaaatgagaaagaagaattaaataacaaattgaaagatgttcaagagcaactgtcaagattgaaagatgaagaaataagcgcagcagctattaaagcacagtttgagaagcagctattaacagaaagaacactcaaaactcaagctgtgaataagttggctgagatcatgaatcgaaaagaacctgtcaagcgtggtaatgacacagatgtgcggagaaaagagaaggagaatagaaagctacatatggagcttaaatctgaacgtgagaaattgacccagcagatgatcaagtatcagaaagaactgaatgaaatgcaggcacaaatagctgaagagagccagattcgaattgaactgcagatgacattggacagtaaagacagtgacattgagcagctgcggtcacaactccaagccttgcatattggtctggatagttccagtataggcagtggaccaggggatgctgaggcagatgatgggtttccagaatcaagattagaaggatggctttcattgcctgtacgaaacaacactaagaaatttggatgggttaaaaagtatgtgattgtaagcagtaagaagattcttttctatgacagtgaacaagataaagaacaatccaatccttacatggttttagatatagacaagttatttcatgtccgaccagttacacagacagatgtgtatagagcagatgctaaagaaattccaaggatattccagattctgtatgccaatgaaggagaaagtaagaaggaacaagaatttccagtggagccagttggagaaaaatctaattatatttgccacaagggacatgagtttattcctactctttatcatttcccaaccaactgtgaggcttgtatgaagcccctgtggcacatgtttaagcctcctcctgctttggagtgccgccgttgccatattaagtgtcataaagatcatatggacaaaaaggaggagattatagcaccttgcaaagtatattatgatatttcaacggcaaagaatctgttattactagcaaattctacagaagagcagcagaagtgggttagtcggttggtgaaaaagatacctaaaaagcccccagctccagacccttttgcccgatcatctcctagaacttcaatgaagatacagcaaaaccagtctattagacggccaagtcgacagcttgccccaaacaaacctagctaactgccttctatgaaagcagtcattattcaaggtgatcgtattcttccagtgaaaacaagactgaaatatgatggcccaaaatttattaaaaagctatattttcctgagagactgatacatacactcatacatatatgtgttccccttttccctgtaatataaattacaaatctgggctcctttgaagcaacaggttgaaccaacaatgattggttgatagactaaggatatatgcaactcttccagacttttccataaagctctctcggcagtcgctcacactacagtgcacacaaggattgagaagagttaaaggctaaagaaaacatcttttctagcttcaacagagaggtttcaccagcacatttaccagaagaatctgggaatggattccactacagtgatattgactgcatctttaagaagtgaccattatactgtgtatatatatataaacacacacacatatatatatatatatagtactctaatactgcaagaaggttttttaaacttcccactttattttttatacacattaatcagatatcattacttgctgcagttgcaactatgcacttgtataaagccataatgttggagtttatatcactcattcctgtgtacctgatggaagttgcatgttcatgtttaagcagttactgtaacaagaagtttaaagttaattatatcagtttcctaatgcttcatgataggcaactttacccattttgaatgccttaatttaatttttttcaaagtctcagccctgtctgtattaaaaaacaaaaaaagcgtttaccagctcttaggatgtaaactagctttgtggaagataaatcgtgcactatttttacacataaatagttatatcaatgtcagcctattttgattaacaaatgtttttaaagtattattggttatagaaacaataatggatggtgttggaactaatatatccttgatgtctgtctattattcattcaactctttttacagacctcagtattagtctgtgactacaaaatattttatttgctttaaatttgctggctaccctagatgtgtttttattcctggtaaagacatttgtgattacattttcacacttaagattcaaaatttttcccaaatataaagaaaactaagacagactgtagatgcattttaaatatttaaatatgatcctcagacatgcagctgtgtgtggcagtattttagtaccgggttaagaaaactggcaactgggaagaagtggcctcaaaggcacttaatttgatttttattttttaaatgctgtcaaagttacagtttacgcaggacattcttgccgtattctcatgatcccagataagtgtgtgttttatactgcaacaatatgcagcaatggtaagcgtaaagtttttttttgtttttgtttttgtttttttttatattatgaagtcttttaacagtctctctttatataaatacacagagtttggtatgatatttaaatacatcatctggccaggcatggtggcttacgcctgtaatcctagcactttgggaggccaagacgggcggatcacctgaggtgaggagttcaagaccagcctgcccaacatagtgaaactccgtctctaccaatatacaaaaattagccgggcatgatggtggtggcctgtaatcccagctacttgggaggctgagacaggagaatcgcttgaacccaggagacggtggttgcagtgagcgaagatcgagccactgcactccagcctgggcagctgaacaagactccgtctcaaaaaaaaaaaaaaaaaaaagtcatctaatatttcgatgaaggaaatagacatttttcattgattccctctgatgtcagttagagatatttaaaaagttagatccccataatagatactattgtggaaactgaagagtagctactggcctactgatagactgaaactggttttgttattcttaacgttctccagtctgcactctgctgtgctgtctgtgctcagactagacgtgcatgccgtttcctttgcaggtgtgttctgcagctctggttttgggggatagctcttttttaagtaagattaaaaaatgaaaaatatataaatttatatagaataaatatttccattcattagagttgttaaaaggagactgaattaatattttatataaagattttgttacattatgggaggttctatcctattctgaattggagagtatatatatatatatatatatatatatttttaataaactttattaaggtgaaataatttcaagtttacatatgagtaactgaaatatttgagtaaaaaaggcaaaagtttaaatttggaatgctgtatatattagagaatatggggaatcatggtgtgaccaactgtacaaggaagattcatatgaaggtcttaggggaaaaagataattctgaagggtgaaaaaaaaatctctcccatggagattcttcacattatatggtttgacataagggtttataaggttgtttgtccaactaatgaaaatgcgcttaataaaaaattctgaccttgggtaagaattcgctttttaccgcattgccgctttcatgtacatacatgagtgcatgcacctatcaatgtgttttcttcccaacacttattaaatataaaacaacctgattttgtgctcgtttctcgtttttcttgaggccctgaagcttccaagataaatataagactaaaatttgcttgttccttcacacctgatttctcctagaaccataaatacctcctatggggaactaagaaatcatgaatactgggattttcttattggattttttacttttgttttgtggggataacgagacagaagtgaaaggaaaactggtgccggtattactgttgaaattaatgtacagtgaatgtttttaaagtattaattttaaaaaaccatgttctctagaaacaagttttaaaaatctatatgaaagttttaaaatgttccagctaactaatggataagcataccagtaaagccaaagtaaaggttagtgcctttaaaactaacctgtgttagagttacatgaatctggctctaaagtatctattttgcatccatttatatatagatcttaaacagaaatactctaggttgccacaccacagttttaagaagttatgctgctgctgttactctcttctaggattctggtggtaaagtagagaaactcggacactatattaaccttactgaaacatgctttaaatcgtgtctaaaatctgatttgagcaagtcactgccgagcttctgagtctgcattgacactgctactgactcacctctccttccctggaataaggcttcagcttccctatgctgtgaagacaccatttgtaagcactttgaacataagcactgtgtgacagcgctggatatcatgcttgggggggggcctctccctgactcccatccccataataatgagttttgtttggaattgtaataagtaatgaactgcatggtttagaaaattataaatatttgatcagctgtcctctctgaaaaaaattgcacccctttttcttttttaaaattttgttgcatcttcgtagtaatgtaattgtattttatgcctgcttttttataaaaaaataaaataaaataaatggaga

SEQ ID NO: 329741 - DNA, 8660 bp, Homo sapiens
caaggcggccggcggcgaccatggcagcgggccggcggcggccgtagtggcccaggcctgggcttcagcctcccggggccccagagggcggggcggtccgggccgcggcggtggcggcgccacttccctgctcccgcccgaggactcctgcgggcactcgctgaggaccagcggaccggcggcgcgaatctgactgaggggcggggacgccgtctgttccccgccgctcccggcagggccgggccgggccgggctgggccgggctgggccgggcgggcccctgggagcagcccccaggcgggggaccgccttggagacccgaagccggagctagaggcaggcggtgggcccgggtggagtcccggccggagctggtggttcgggggcggtgctaggccccgaggctgcgggacctgagcgcgaggagcctgagtgcgggtccagcggtggcggcatgagccggcccccgccgacggggaaaatgcccggcgcccccgagaccgcgccgggggacggggcaggcgcgagccgccagaggaagctggaggcgctgatccgagaccctcgctcccccatcaacgtggagagcttgctggatggcttaaattccttggtccttgatttagattttcctgctttgaggaaaaacaagaacatagataatttcttaaatagatatgagaaaattgtgaaaaaaatcagaggtctacagatgaaggcagaagactatgatgttgtaaaagttattggaagaggtgcttttggtgaagtgcagttggttcgtcacaaggcatcgcagaaggtttatgctatgaagcttcttagtaagtttgaaatgataaaaagatcagattctgcctttttttgggaagaaagagatattatggcctttgccaatagcccctgggtggttcagcttttttatgcctttcaagatgataggtatctgtacatggtaatggagtacatgcctggtggagaccttgtaaaccttatgagtaattatgatgtgcctgaaaaatgggccaaattttacactgctgaagttgttcttgctctggatgcaatacactccatgggtttaatacacagagatgtgaagcctgacaacatgctcttggataaacatggacatctaaaattagcagattttggcacgtgtatgaagatggatgaaacaggcatggtacattgtgatacagcagttggaacaccggattatatatcacctgaggttctgaaatcacaagggggtgatggtttctatgggcgagaatgtgattggtggtctgtaggtgttttcctttatgagatgctagtgggggatactccattttatgcggattcacttgtaggaacatatagcaaaattatggatcataagaattcactgtgtttccctgaagatgcagaaatttccaaacatgcaaagaatctcatctgtgctttcttaacagatagggaggtacgacttgggagaaatggggtggaagaaatcagacagcatcctttctttaagaatgatcagtggcattgggataacataagagaaacggcagctcctgtagtacctgaactcagcagtgacatagacagcagcaatttcgatgacattgaagatgacaaaggagatgtagaaaccttcccaattcctaaagcttttgttggaaatcagctgcctttcatcggatttacctactatagagaaaatttattattaagtgactctccatcttgtagagaaaatgattccatacaatcaaggaaaaatgaagaaagtcaagagattcagaaaaaactgtatacattagaagaacatcttagcaatgagatgcaagccaaagaggaactggaacagaagtgcaaatctgttaatactcgcctagaaaaaacagcaaaggagctagaagaggagattaccttacggaaaagtgtggaatcagcattaagacagttagaaagagaaaaggcgcttcttcagcacaaaaatgcagaatatcagaggaaagctgatcatgaagcagacaaaaaacgaaatttggaaaatgatgttaacagcttaaaagatcaacttgaagatttgaaaaaaagaaatcaaaactctcaaatatccactgagaaagtgaatcaactccagagacaactggatgaaaccaatgctttactgcgaacagagtctgatactgcagcccggttaaggaaaacccaggcagaaagttcaaaacagattcagcagctggaatctaacaatagagatctacaagataaaaactgcctgctggagactgccaagttaaaacttgaaaaggaatttatcaatcttcagtcagctctagaatctgaaaggagggatcgaacccatggatcagagataattaatgatttacaaggtagaatatgtggcctagaagaagatttaaagaacggcaaaatcttactagcgaaagtagaactggagaagagacaacttcaggagagatttactgatttggaaaaggaaaaaagcaacatggaaatagatatgacataccaactaaaagttatacagcagagcctagaacaagaagaagctgaacataaggccacaaaggcacgactagcagataaaaataagatctatgagtccatcgaagaagccaaatcagaagccatgaaagaaatggagaagaagctcttggaggaaagaactttaaaacagaaagtggagaacctattgctagaagctgagaaaagatgttctctattagactgtgacctcaaacagtcacagcagaaaataaatgagctccttaaacagaaagatgtgctaaatgaggatgttagaaacctgacattaaaaatagagcaagaaactcagaagcgctgccttacacaaaatgacctgaagatgcaaacacaacaggttaacacactaaaaatgtcagaaaagcagttaaagcaagaaaataaccatctcatggaaatgaaaatgaacttggaaaaacaaaatgctgaacttcgaaaagaacgtcaggatgcagatgggcaaatgaaagagctccaggatcagctcgaagcagaacagtatttctcaaccctttataaaacacaagttagggagcttaaagaagaatgtgaagaaaagaccaaacttggtaaagaattgcagcagaagaaacaggaattacaggatgaacgggactctttggctgcccaactggagatcaccttgaccaaagcagattctgagcaactggctcgttcaattgctgaagaacaatattctgatttggaaaaagagaagatcatgaaagagctggagatcaaagagatgatggctagacacaaacaggaacttacggaaaaagatgctacaattgcttctcttgaggaaactaataggacactaactagtgatgttgccaatcttgcaaatgagaaagaagaattaaataacaaattgaaagatgttcaagagcaactgtcaagattgaaagatgaagaaataagcgcagcagctattaaagcacagtttgagaagcagctattaacagaaagaacactcaaaactcaagctgtgaataagttggctgagatcatgaatcgaaaagaacctgtcaagcgtggtaatgacacagatgtgcggagaaaagagaaggagaatagaaagctacatatggagcttaaatctgaacgtgagaaattgacccagcagatgatcaagtatcagaaagaactgaatgaaatgcaggcacaaatagctgaagagagccagattcgaattgaactgcagatgacattggacagtaaagacagtgacattgagcagctgcggtcacaactccaagccttgcatattggtctggatagttccagtataggcagtggaccaggggatgctgaggcagatgatgggtttccagaatcaagattagaaggatggctttcattgcctgtacgaaacaacactaagaaatttggatgggttaaaaagtatgtgattgtaagcagtaagaagattcttttctatgacagtgaacaagataaagaacaatccaatccttacatggttttagatatagacaagttatttcatgtccgaccagttacacagacagatgtgtatagagcagatgctaaagaaattccaaggatattccagattctgtatgccaatgaaggagaaagtaagaaggaacaagaatttccagtggagccagttggagaaaaatctaattatatttgccacaagggacatgagtttattcctactctttatcatttcccaaccaactgtgaggcttgtatgaagcccctgtggcacatgtttaagcctcctcctgctttggagtgccgccgttgccatattaagtgtcataaagatcatatggacaaaaaggaggagattatagcaccttgcaaagtatattatgatatttcaacggcaaagaatctgttattactagcaaattctacagaagagcagcagaagtgggttagtcggttggtgaaaaagatacctaaaaagcccccagctccagacccttttgcccgatcatctcctagaacttcaatgaagatacagcaaaaccagtctattagacggccaagtcgacagcttgccccaaacaaacctagctaactgccttctatgaaagcagtcattattcaaggtgatcgtattcttccagtgaaaacaagactgaaatatgatggcccaaaatttattaaaaagctatattttcctgagagactgatacatacactcatacatatatgtgttccccttttccctgtaatataaattacaaatctgggctcctttgaagcaacaggttgaaccaacaatgattggttgatagactaaggatatatgcaactcttccagacttttccataaagctctctcggcagtcgctcacactacagtgcacacaaggattgagaagagttaaaggctaaagaaaacatcttttctagcttcaacagagaggtttcaccagcacatttaccagaagaatctgggaatggattccactacagtgatattgactgcatctttaagaagtgaccattatactgtgtatatatatataaacacacacacatatatatatatatatagtactctaatactgcaagaaggttttttaaacttcccactttattttttatacacattaatcagatatcattacttgctgcagttgcaactatgcacttgtataaagccataatgttggagtttatatcactcattcctgtgtacctgatggaagttgcatgttcatgtttaagcagttactgtaacaagaagtttaaagttaattatatcagtttcctaatgcttcatgataggcaactttacccattttgaatgccttaatttaatttttttcaaagtctcagccctgtctgtattaaaaaacaaaaaaagcgtttaccagctcttaggatgtaaactagctttgtggaagataaatcgtgcactatttttacacataaatagttatatcaatgtcagcctattttgattaacaaatgtttttaaagtattattggttatagaaacaataatggatggtgttggaactaatatatccttgatgtctgtctattattcattcaactctttttacagacctcagtattagtctgtgactacaaaatattttatttgctttaaatttgctggctaccctagatgtgtttttattcctggtaaagacatttgtgattacattttcacacttaagattcaaaatttttcccaaatataaagaaaactaagacagactgtagatgcattttaaatatttaaatatgatcctcagacatgcagctgtgtgtggcagtattttagtaccgggttaagaaaactggcaactgggaagaagtggcctcaaaggcacttaatttgatttttattttttaaatgctgtcaaagttacagtttacgcaggacattcttgccgtattctcatgatcccagataagtgtgtgttttatactgcaacaatatgcagcaatggtaagcgtaaagtttttttttgtttttgtttttgtttttttttatattatgaagtcttttaacagtctctctttatataaatacacagagtttggtatgatatttaaatacatcatctggccaggcatggtggcttacgcctgtaatcctagcactttgggaggccaagacgggcggatcacctgaggtgaggagttcaagaccagcctgcccaacatagtgaaactccgtctctaccaatatacaaaaattagccgggcatgatggtggtggcctgtaatcccagctacttgggaggctgagacaggagaatcgcttgaacccaggagacggtggttgcagtgagcgaagatcgagccactgcactccagcctgggcagctgaacaagactccgtctcaaaaaaaaaaaaaaaaaaaagtcatctaatatttcgatgaaggaaatagacatttttcattgattccctctgatgtcagttagagatatttaaaaagttagatccccataatagatactattgtggaaactgaagagtagctactggcctactgatagactgaaactggttttgttattcttaacgttctccagtctgcactctgctgtgctgtctgtgctcagactagacgtgcatgccgtttcctttgcaggtgtgttctgcagctctggttttgggggatagctcttttttaagtaagattaaaaaatgaaaaatatataaatttatatagaataaatatttccattcattagagttgttaaaaggagactgaattaatattttatataaagattttgttacattatgggaggttctatcctattctgaattggagagtatatatatatatatatatatatatatttttaataaactttattaaggtgaaataatttcaagtttacatatgagtaactgaaatatttgagtaaaaaaggcaaaagtttaaatttggaatgctgtatatattagagaatatggggaatcatggtgtgaccaactgtacaaggaagattcatatgaaggtcttaggggaaaaagataattctgaagggtgaaaaaaaaatctctcccatggagattcttcacattatatggtttgacataagggtttataaggttgtttgtccaactaatgaaaatgcgcttaataaaaaattctgaccttgggtaagaattcgctttttaccgcattgccgctttcatgtacatacatgagtgcatgcacctatcaatgtgttttcttcccaacacttattaaatataaaacaacctgattttgtgctcgtttctcgtttttcttgaggccctgaagcttccaagataaatataagactaaaatttgcttgttccttcacacctgatttctcctagaaccataaatacctcctatggggaactaagaaatcatgaatactgggattttcttattggattttttacttttgttttgtggggataacgagacagaagtgaaaggaaaactggtgccggtattactgttgaaattaatgtacagtgaatgtttttaaagtattaattttaaaaaaccatgttctctagaaacaagttttaaaaatctatatgaaagttttaaaatgttccagctaactaatggataagcataccagtaaagccaaagtaaaggttagtgcctttaaaactaacctgtgttagagttacatgaatctggctctaaagtatctattttgcatccatttatatatagatcttaaacagaaatactctaggttgccacaccacagttttaagaagttatgctgctgctgttactctcttctaggattctggtggtaaagtagagaaactcggacactatattaaccttactgaaacatgctttaaatcgtgtctaaaatctgatttgagcaagtcactgccgagcttctgagtctgcattgacactgctactgactcacctctccttccctggaataaggcttcagcttccctatgctgtgaagacaccatttgtaagcactttgaacataagcactgtgtgacagcgctggatatcatgcttgggggggggcctctccctgactcccatccccataataatgagttttgtttggaattgtaataagtaatgaactgcatggtttagaaaattataaatatttgatcagctgtcctctctgaaaaaaattgcacccctttttcttttttaaaattttgttgcatcttcgtagtaatgtaattgtattttatgcctgcttttttataaaaaaataaaataaaataaatggagaaaaaaaaaaaaaaaaaaaaaaaaaaaaaaaaaaaaaaaaaaaaaaaaaaaaaaaaaaaaaaaaaaaaaaaaaaaaaaaaaaaaaaaaaaagggaaaaaaaaaaaaaaaaaaaaaaattgggcccaaattggggcctatttggccaatttccccttatggggggcgtattaacaatcattggcgcgcggttaaaaacgtcgagatgtggaaaaccctggcgttacccaacttaaagccctttgaagacatatccctttttccacattgggcaaatccaaaaagccccccccgatcgcctttcccaacaatgccacccttaatggccaagggaaattgcacgcctaaaatcttgtaaaaatcgcgtttttgtgccc

SEQ ID NO: 329742 - DNA, 8232 bp, Homo sapiens
caaggcggccggcggcgaccatggcagcgggccggcggcggccgtagtggcccaggcctgggcttcagcctcccggggccccagagggcggggcggtccgggccgcggcggtggcggcgccacttccctgctcccgcccgaggactcctgcgggcactcgctgaggaccagcggaccggcggcgcgaatctgactgaggggcggggacgccgtctgttccccgccgctcccggcagggccgggccgggccgggctgggccgggctgggccgggcgggcccctgggagcagcccccaggcgggggaccgccttggagacccgaagccggagctagaggcaggcggtgggcccgggtggagtcccggccggagctggtggttcgggggcggtgctaggccccgaggctgcgggacctgagcgcgaggagcctgagtgcgggtccagcggtggcggcatgagccggcccccgccgacggggaaaatgcccggcgcccccgagaccgcgccgggggacggggcaggcgcgagccgccagaggaagctggaggcgctgatccgagaccctcgctcccccatcaacgtggagagcttgctggatggcttaaattccttggtccttgatttagattttcctgctttgaggaaaaacaagaacatagataatttcttaaatagatatgagaaaattgtgaaaaaaatcagaggtctacagatgaaggcagaagactatgatgttgtaaaagttattggaagaggtgcttttggtgaagtgcagttggttcgtcacaaggcatcgcagaaggtttatgctatgaagcttcttagtaagtttgaaatgataaaaagatcagattctgcctttttttgggaagaaagagatattatggcctttgccaatagcccctgggtggttcagcttttttatgcctttcaagatgataggtatctgtacatggtaatggagtacatgcctggtggagaccttgtaaaccttatgagtaattatgatgtgcctgaaaaatgggccaaattttacactgctgaagttgttcttgctctggatgcaatacactccatgggtttaatacacagagatgtgaagcctgacaacatgctcttggataaacatggacatctaaaattagcagattttggcacgtgtatgaagatggatgaaacaggcatggtacattgtgatacagcagttggaacaccggattatatatcacctgaggttctgaaatcacaagggggtgatggtttctatgggcgagaatgtgattggtggtctgtaggtgttttcctttatgagatgctagtgggggatactccattttatgcggattcacttgtaggaacatatagcaaaattatggatcataagaattcactgtgtttccctgaagatgcagaaatttccaaacatgcaaagaatctcatctgtgctttcttaacagatagggaggtacgacttgggagaaatggggtggaagaaatcagacagcatcctttctttaagaatgatcagtggcattgggataacataagagaaacggcagctcctgtagtacctgaactcagcagtgacatagacagcagcaatttcgatgacattgaagatgacaaaggagatgtagaaaccttcccaattcctaaagcttttgttggaaatcagctgcctttcatcggatttacctactatagagaaaatttattattaagtgactctccatcttgtagagaaaatgattccatacaatcaaggaaaaatgaagaaagtcaagagattcagaaaaaactgtatacattagaagaacatcttagcaatgagatgcaagccaaagaggaactggaacagaagtgcaaatctgttaatactcgcctagaaaaaacagcaaaggagctagaagaggagattaccttacggaaaagtgtggaatcagcattaagacagttagaaagagaaaaggcgcttcttcagcacaaaaatgcagaatatcagaggaaagctgatcatgaagcagacaaaaaacgaaatttggaaaatgatgttaacagcttaaaagatcaacttgaagatttgaaaaaaagaaatcaaaactctcaaatatccactgagaaagtgaatcaactccagagacaactggatgaaaccaatgctttactgcgaacagagtctgatactgcagcccggttaaggaaaacccaggcagaaagttcaaaacagattcagcagctggaatctaacaatagagatctacaagataaaaactgcctgctggagactgccaagttaaaacttgaaaaggaatttatcaatcttcagtcagctctagaatctgaaaggagggatcgaacccatggatcagagataattaatgatttacaaggtagaatatgtggcctagaagaagatttaaagaacggcaaaatcttactagcgaaagtagaactggagaagagacaacttcaggagagatttactgatttggaaaaggaaaaaagcaacatggaaatagatatgacataccaactaaaagttatacagcagagcctagaacaagaagaagctgaacataaggccacaaaggcacgactagcagataaaaataagatctatgagtccatcgaagaagccaaatcagaagccatgaaagaaatggagaagaagctcttggaggaaagaactttaaaacagaaagtggagaacctattgctagaagctgagaaaagatgttctctattagactgtgacctcaaacagtcacagcagaaaataaatgagctccttaaacagaaagatgtgctaaatgaggatgttagaaacctgacattaaaaatagagcaagaaactcagaagcgctgccttacacaaaatgacctgaagatgcaaacacaacaggttaacacactaaaaatgtcagaaaagcagttaaagcaagaaaataaccatctcatggaaatgaaaatgaacttggaaaaacaaaatgctgaacttcgaaaagaacgtcaggatgcagatgggcaaatgaaagagctccaggatcagctcgaagcagaacagtatttctcaaccctttataaaacacaagttagggagcttaaagaagaatgtgaagaaaagaccaaacttggtaaagaattgcagcagaagaaacaggaattacaggatgaacgggactctttggctgcccaactggagatcaccttgaccaaagcagattctgagcaactggctcgttcaattgctgaagaacaatattctgatttggaaaaagagaagatcatgaaagagctggagatcaaagagatgatggctagacacaaacaggaacttacggaaaaagatgctacaattgcttctcttgaggaaactaataggacactaactagtgatgttgccaatcttgcaaatgagaaagaagaattaaataacaaattgaaagatgttcaagagcaactgtcaagattgaaagatgaagaaataagcgcagcagctattaaagcacagtttgagaagcagctattaacagaaagaacactcaaaactcaagctgtgaataagttggctgagatcatgaatcgaaaagaacctgtcaagcgtggtaatgacacagatgtgcggagaaaagagaaggagaatagaaagctacatatggagcttaaatctgaacgtgagaaattgacccagcagatgatcaagtatcagaaagaactgaatgaaatgcaggcacaaatagctgaagagagccagattcgaattgaactgcagatgacattggacagtaaagacagtgacattgagcagctgcggtcacaactccaagccttgcatattggtctggatagttccagtataggcagtggaccaggggatgctgaggcagatgatgggtttccagaatcaagattagaaggatggctttcattgcctgtacgaaacaacactaagaaatttggatgggttaaaaagtatgtgattgtaagcagtaagaagattcttttctatgacagtgaacaagataaagaacaatccaatccttacatggttttagatatagacaagttatttcatgtccgaccagttacacagacagatgtgtatagagcagatgctaaagaaattccaaggatattccagattctgtatgccaatgaaggagaaagtaagaaggaacaagaatttccagtggagccagttggagaaaaatctaattatatttgccacaagggacatgagtttattcctactctttatcatttcccaaccaactgtgaggcttgtatgaagcccctgtggcacatgtttaagcctcctcctgctttggagtgccgccgttgccatattaagtgtcataaagatcatatggacaaaaaggaggagattatagcaccttgcaaagtatattatgatatttcaacggcaaagaatctgttattactagcaaattctacagaagagcagcagaagtgggttagtcggttggtgaaaaagatacctaaaaagcccccagctccagacccttttgcccgatcatctcctagaacttcaatgaagatacagcaaaaccagtctattagacggccaagtcgacagcttgccccaaacaaacctagctaactgccttctatgaaagcagtcattattcaaggtgatcgtattcttccagtgaaaacaagactgaaatatgatggcccaaaatttattaaaaagctatattttcctgagagactgatacatacactcatacatatatgtgttccccttttccctgtaatataaattacaaatctgggctcctttgaagcaacaggttgaaccaacaatgattggttgatagactaaggatatatgcaactcttccagacttttccataaagctctctcggcagtcgctcacactacagtgcacacaaggattgagaagagttaaaggctaaagaatctgggaatggattccactacagtgatattgactgcatctttaagaagtgaccattatactgtgtatatatatataaacacacacacatatatatatatatatagtactctaatactgcaagaaggttttttaaacttcccactttattttttatacacattaatcagatatcattacttgctgcagttgcaactatgcacttgtataaagccataatgttggagtttatatcactcattcctgtgtacctgatggaagttgcatgttcatgtttaagcagttactgtaacaagaagtttaaagttaattatatcagtttcctaatgcttcatgataggcaactttacccattttgaatgccttaatttaatttttttcaaagtctcagccctgtctgtattaaaaaacaaaaaaagcgtttaccagctcttaggatgtaaactagctttgtggaagataaatcgtgcactatttttacacataaatagttatatcaatgtcagcctattttgattaacaaatgtttttaaagtattattggttatagaaacaataatggatggtgttggaactaatatatccttgatgtctgtctattattcattcaactctttttacagacctcagtattagtctgtgactacaaaatattttatttgctttaaatttgctggctaccctagatgtgtttttattcctggtaaagacatttgtgattacattttcacacttaagattcaaaatttttcccaaatataaagaaaactaagacagactgtagatgcattttaaatatttaaatatgatcctcagacatgcagctgtgtgtggcagtattttagtaccgggttaagaaaactggcaactgggaagaagtggcctcaaaggcacttaatttgatttttattttttaaatgctgtcaaagttacagtttacgcaggacattcttgccgtattctcatgatcccagataagtgtgtgttttatactgcaacaatatgcagcaatggtaagcgtaaagtttttttttgtttttgtttttgtttttttttatattatgaagtcttttaacagtctctctttatataaatacacagagtttggtatgatatttaaatacatcatctggccaggcatggtggcttacgcctgtaatcctagcactttgggaggccaagacgggcggatcacctgaggtgaggagttcaagaccagcctgcccaacatagtgaaactccgtctctaccaatatacaaaaattagccgggcatgatggtggtggcctgtaatcccagctacttgggaggctgagacaggagaatcgcttgaacccaggagacggtggttgcagtgagcgaagatcgagccactgcactccagcctgggcagctgaacaagactccgtctcaaaaaaaaaaaaaaaaaaaagtcatctaatatttcgatgaaggaaatagacatttttcattgattccctctgatgtcagttagagatatttaaaaagttagatccccataatagatactattgtggaaactgaagagtagctactggcctactgatagactgaaactggttttgttattcttaacgttctccagtctgcactctgctgtgctgtctgtgctcagactagacgtgcatgccgtttcctttgcaggtgtgttctgcagctctggttttgggggatagctcttttttaagtaagattaaaaaatgaaaaatatataaatttatatagaataaatatttccattcattagagttgttaaaaggagactgaattaatattttatataaagattttgttacattatgggaggttctatcctattctgaattggagagtatatatatatatatatatatatatatttttaataaactttattaaggtgaaataatttcaagtttacatatgagtaactgaaatatttgagtaaaaaaggcaaaagtttaaatttggaatgctgtatatattagagaatatggggaatcatggtgtgaccaactgtacaaggaagattcatatgaaggtcttaggggaaaaagataattctgaagggtgaaaaaaaaatctctcccatggagattcttcacattatatggtttgacataagggtttataaggttgtttgtccaactaatgaaaatgcgcttaataaaaaattctgaccttgggtaagaattcgctttttaccgcattgccgctttcatgtacatacatgagtgcatgcacctatcaatgtgttttcttcccaacacttattaaatataaaacaacctgattttgtgctcgtttctcgtttttcttgaggccctgaagcttccaagataaatataagactaaaatttgcttgttccttcacacctgatttctcctagaaccataaatacctcctatggggaactaagaaatcatgaatactgggattttcttattggattttttacttttgttttgtggggataacgagacagaagtgaaaggaaaactggtgccggtattactgttgaaattaatgtacagtgaatgtttttaaagtattaattttaaaaaaccatgttctctagaaacaagttttaaaaatctatatgaaagttttaaaatgttccagctaactaatggataagcataccagtaaagccaaagtaaaggttagtgcctttaaaactaacctgtgttagagttacatgaatctggctctaaagtatctattttgcatccatttatatatagatcttaaacagaaatactctaggttgccacaccacagttttaagaagttatgctgctgctgttactctcttctaggattctggtggtaaagtagagaaactcggacactatattaaccttactgaaacatgctttaaatcgtgtctaaaatctgatttgagcaagtcactgccgagcttctgagtctgcattgacactgctactgactcacctctccttccctggaataaggcttcagcttccctatgctgtgaagacaccatttgtaagcactttgaacataagcactgtgtgacagcgctggatatcatgcttgggggggggcctctccctgactcccatccccataataatgagttttgtttggaattgtaataagtaatgaactgcatggtttagaaaattataaatatttgatcagctgtcctctctgaaaaaaattgcacccctttttcttttttaaaattttgttgcatcttcgtagtaatgtaattgtattttatgcctgcttttttataaaaaaataaaataaaataaatggaga

SEQ ID NO: 329743 - DNA, 2475 bp, Homo sapiens
caaggcggccggcggcgaccatggcagcgggccggcggcggccgtagtggcccaggcctgggcttcagcctcccggggccccagagggcggggcggtccgggccgcggcggtggcggcgccacttccctgctcccgcccgaggactcctgcgggcactcgctgaggaccagcggaccggcggcgcgaatctgactgaggggcggggacgccgtctgttccccgccgctcccggcagggccgggccgggccgggctgggccgggctgggccgggcgggcccctgggagcagcccccaggcgggggaccgccttggagacccgaagccggagctagaggcaggcggtgggcccgggtggagtcccggccggagctggtggttcgggggcggtgctaggccccgaggctgcgggacctgagcgcgaggagcctgagtgcgggtccagcggtggcggcatgagccggcccccgccgacggggaaaatgcccggcgcccccgagaccgcgccgggggacggggcaggcgcgagccgccagaggaagctggaggcgctgatccgagaccctcgctcccccatcaacgtggagagcttgctggatggcttaaattccttggtccttgatttagattttcctgctttgaggaaaaacaagaacatagataatttcttaaatagatatgagaaaattgtgaaaaaaatcagaggtctacagatgaaggcagaagactatgatgttgtaaaagttattggaagaggtgcttttggtgaagtgcagttggttcgtcacaaggcatcgcagaaggtttatgctatgaagcttcttagtaagtttgaaatgataaaaagatcagattctgcctttttttgggaagaaagagatattatggcctttgccaatagcccctgggtggttcagcttttttatgcctttcaagatgataggtatctgtacatggtaatggagtacatgcctggtggagaccttgtaaaccttatgagtaattatgatgtgcctgaaaaatgggccaaattttacactgctgaagttgttcttgctctggatgcaatacactccatgggtttaatacacagagatgtgaagcctgacaacatgctcttggataaacatggacatctaaaattagcagattttggcacgtgtatgaagatggatgaaacaggcatggtacattgtgatacagcagttggaacaccggattatatatcacctgaggttctgaaatcacaagggggtgatggtttctatgggcgagaatgtgattggtggtctgtaggtgttttcctttatgagatgctagtgggggatactccattttatgcggattcacttgtaggaacatatagcaaaattatggatcataagaattcactgtgtttccctgaagatgcagaaatttccaaacatgcaaagaatctcatctgtgctttcttaacagatagggaggtacgacttgggagaaatggggtggaagaaatcagacagcatcctttctttaagaatgatcagtggcattgggataacataagagaaacggcagctcctgtagtacctgaactcagcagtgacatagacagcagcaatttcgatgacattgaagatgacaaaggagatgtagaaaccttcccaattcctaaagcttttgttggaaatcagctgcctttcatcggatttacctactatagagaaaatttattattaagtgactctccatcttgtagagaaaatgattccatacaatcaaggaaaaatgaagaaagtcaaggaaagtcaagaggtatgttgatgttgtcagatatattgaaaaactgagaaaagctcatcactctcgcaaagtttaaatatagtcatatcctacctagcatttggagtactacatctacccaagagagaagttcccaacctttcttctaccaagtatctcttttattattgttctgtggatctgtttaaaatatatattatgtaattttgtttttatttatcaaggacatataactggcagcaaaaatttctgattagcatataataactggtgtgctcaaattattgtaatgcagtagtagccaaaagcaattaaacttgactagttcattagcctgtatatttttattaagggaaaacagagttttgcttaagatagatgcagtatttaaaaccatggagaacctgatcactagaaggaataatggaaagtacattgccatgggagtctaatagacctgcattgatttttgccactgcgacttattagctatgccatcttggcctgattatttaccttttttgaatttcattttctgtatcaagtagatacaatgctaccatctttgtaggatttttgttaatattaacaagacaacatttgtaaagtgcctgatattttaccaaaggcaccacaggagctcaaaaagttaaatcctttaaaaagtaaataatgttccaaaaatggatta

SEQ ID NO: 329744 - DNA, 263 bp, Homo sapiens
gaacacacaaacacgttattttagccatcagaatgatgtaattacaagtcatgtggcctcaggaaaagtacatacggtatataacgagggaatgagagttttaaaaaaaaccatggtgctcagtattatgaaaatgatttgaccttatgggttctgtggaagaacctcagagactcccagggcttcccccagaccatactttgagagctgctcgtttaaaatatgtgtaagttatttaaacctttgattcattgtcctcacag

SEQ ID NO: 329745 - DNA, 296 bp, Homo sapiens
ctgatagaaagcaagagatgggggagtttttccttttatcaatataagtcacattaaggaggtacaaatactgtaccattatagaggacattatgtttagtggaaagacaaaataagcttatcattgttttctttaagcctctcatctttaaatatgaccaaaatacgtaattacagtttcttgttttttgacagattcagaaaaaactgtatacattagaagaacatcttagcaatgagatgcaagccaaagaggaactggaacagaagtgcaagtatgttttgtagataattaa

SEQ ID NO: 329746 - DNA, 171 bp, Homo sapiens
tacttttttgataataactttaagcattatttcagattaccttacggaaaagtgtggaatcagcattaagacagttagaaagagaaaaggcgcttcttcagcacaaaaatgcagaatatcagaggaaagctgatcatgaagcagacaaaaaacgaaatttggaaaatgatg

SEQ ID NO: 329747 - DNA, 428 bp, Homo sapiens
tttttttgggaagaaagagatattatggcctttgccaatagcccctgggtggttcaggtaagcatactaacttttataagtttatttcctttttttatgagtgctttattattcatgagttgatttttgtgtgccaagtcttatgcttcatttacatggtaacagtgcagttatttttaggagatttgattcaaaacatttgtttaatgttccaaaacagtatgtccacatagatatgacatgtaatacttacttaaattgttgtatggaagcaagtattacttgcagctttttcttcttgataaagaattggcttgaataccagtatgccattgtttcatacccacttattcttgtgatttacatagtaggaacatagtaaattcattgaatcatctggaaggatatatacatattaatattccaac

SEQ ID NO: 329748 - DNA, 4719 bp, Homo sapiens
caaggcggccggcggcgaccatggcagcgggccggcggcggccgtagtggcccaggcctgggcttcagcctcccggggccccagagggcggggcggtccgggccgcggcggtggcggcgccacttccctgctcccgcccgaggactcctgcgggcactcgctgaggaccagcggaccggcggcgcgaatctgactgaggggcggggacgccgtctgttccccgccgctcccggcagggccgggccgggccgggctgggccgggctgggccgggcgggcccctgggagcagcccccaggcgggggaccgccttggagacccgaagccggagctagaggcaggcggtgggcccgggtggagtcccggccggagctggtggttcgggggcggtgctaggccccgaggctgcgggacctgagcgcgaggagcctgagtgcgggtccagcggtggcggcatgagccggcccccgccgacggggaaaatgcccggcgcccccgagaccgcgccgggggacggggcaggcgcgagccgccagaggaagctggaggcgctgatccgagaccctcgctcccccatcaacgtggagagcttgctggatggcttaaattccttggtccttgatttagattttcctgctttgaggaaaaacaagaacatagataatttcttaaatagatatgagaaaattgtgaaaaaaatcagaggtctacagatgaaggcagaagactatgatgttgtaaaagttattggaagaggtgcttttggtgaagtgcagttggttcgtcacaaggcatcgcagaaggtttatgctatgaagcttcttagtaagtttgaaatgataaaaagatcagattctgcctttttttgggaagaaagagatattatggcctttgccaatagcccctgggtggttcagcttttttatgcctttcaagatgataggtatctgtacatggtaatggagtacatgcctggtggagaccttgtaaaccttatgagtaattatgatgtgcctgaaaaatgggccaaattttacactgctgaagttgttcttgctctggatgcaatacactccatgggtttaatacacagagatgtgaagcctgacaacatgctcttggataaacatggacatctaaaattagcagattttggcacgtgtatgaagatggatgaaacaggcatggtacattgtgatacagcagttggaacaccggattatatatcacctgaggttctgaaatcacaagggggtgatggtttctatgggcgagaatgtgattggtggtctgtaggtgttttcctttatgagatgctagtgggggatactccattttatgcggattcacttgtaggaacatatagcaaaattatggatcataagaattcactgtgtttccctgaagatgcagaaatttccaaacatgcaaagaatctcatctgtgctttcttaacagatagggaggtacgacttgggagaaatggggtggaagaaatcagacagcatcctttctttaagaatgatcagtggcattgggataacataagagaaacggcagctcctgtagtacctgaactcagcagtgacatagacagcagcaatttcgatgacattgaagatgacaaaggagatgtagaaaccttcccaattcctaaagcttttgttggaaatcagctgcctttcatcggatttacctactatagagaaaatttattattaagtgactctccatcttgtagagaaaatgattccatacaatcaaggaaaaatgaagaaagtcaagagattcagaaaaaactgtatacattagaagaacatcttagcaatgagatgcaagccaaagaggaactggaacagaagtgcaaatctgttaatactcgcctagaaaaaacagcaaaggagctagaagaggagattaccttacggaaaagtgtggaatcagcattaagacagttagaaagagaaaaggcgcttcttcagcacaaaaatgcagaatatcagaggaaagctgatcatgaagcagacaaaaaacgaaatttggaaaatgatgttaacagcttaaaagatcaacttgaagatttgaaaaaaagaaatcaaaactctcaaatatccactgagaaagtgaatcaactccagagacaactggatgaaaccaatgctttactgcgaacagagtctgatactgcagcccggttaaggaaaacccaggcagaaagttcaaaacagattcagcagctggaatctaacaatagagatctacaagataaaaactgcctgctggagactgccaagttaaaacttgaaaaggaatttatcaatcttcagtcagctctagaatctgaaaggagggatcgaacccatggatcagagataattaatgatttacaaggtagaatatgtggcctagaagaagatttaaagaacggcaaaatcttactagcgaaagtagaactggagaagagacaacttcaggagagatttactgatttggaaaaggaaaaaagcaacatggaaatagatatgacataccaactaaaagttatacagcagagcctagaacaagaagaagctgaacataaggccacaaaggcacgactagcagataaaaataagatctatgagtccatcgaagaagccaaatcagaagccatgaaagaaatggagaagaagctcttggaggaaagaactttaaaacagaaagtggagaacctattgctagaagctgagaaaagatgttctctattagactgtgacctcaaacagtcacagcagaaaataaatgagctccttaaacagaaagatgtgctaaatgaggatgttagaaacctgacattaaaaatagagcaagaaactcagaagcgctgccttacacaaaatgacctgaagatgcaaacacaacaggttaacacactaaaaatgtcagaaaagcagttaaagcaagaaaataaccatctcatggaaatgaaaatgaacttggaaaaacaaaatgctgaacttcgaaaagaacgtcaggatgcagatgggcaaatgaaagagctccaggatcagctcgaagcagaacagtatttctcaaccctttataaaacacaagttagggagcttaaagaagaatgtgaagaaaagaccaaacttggtaaagaattgcagcagaagaaacaggaattacaggatgaacgggactctttggctgcccaactggagatcaccttgaccaaagcagattctgagcaactggctcgttcaattgctgaagaacaatattctgatttggaaaaagagaagatcatgaaagagctggagatcaaagagatgatggctagacacaaacaggaacttacggaaaaagatgctacaattgcttctcttgaggaaactaataggacactaactagtgatgttgccaatcttgcaaatgagaaagaagaattaaataacaaattgaaagatgttcaagagcaactgtcaagattgaaagatgaagaaataagcgcagcagctattaaagcacagtttgagaagcagctattaacagaaagaacactcaaaactcaagctgtgaataagttggctgagatcatgaatcgaaaagaacctgtcaagcgtggtaatgacacagatgtgcggagaaaagagaaggagaatagaaagctacatatggagcttaaatctgaacgtgagaaattgacccagcagatgatcaagtatcagaaagaactgaatgaaatgcaggcacaaatagctgaagagagccagattcgaattgaactgcagatgacattggacagtaaagacagtgacattgagcagctgcggtcacaactccaagccttgcatattggtctggatagttccagtataggcagtggaccaggggatgctgaggcagatgatgggtttccagaatcaagattagaaggatggctttcattgcctgtacgaaacaacactaagaaatttggatgggttaaaaagtatgtgattgtaagcagtaagaagattcttttctatgacagtgaacaagataaagaacaatccaatccttacatggttttagatatagacaagttatttcatgtccgaccagttacacagacagatgtgtatagagcagatgctaaagaaattccaaggatattccagattctgtatgccaatgaaggagaaagtaagaaggaacaagaatttccagtggagccagttggagaaaaatctaattatatttgccacaagggacatgagtttattcctactctttatcatttcccaaccaactgtgaggcttgtatgaagcccctgtggcacatgtttaagcctcctcctgctttggagtgccgccgttgccatattaagtgtcataaagatcatatggacaaaaaggaggagattatagcaccttgcaaagtatattatgatatttcaacggcaaagaatctgttattactagcaaattctacagaagagcagcagaagtgggttagtcggttggtgaaaaagatacctaaaaagcccccagctccagacccttttgcccgatcatctcctagaacttcaatgaagatacagcaaaaccagtctattagacggccaagtcgacagcttgccccaaacaaacctagctaactgccttctatgaaagcagtcattattcaaggtgatcgtattcttccagtgaaaacaagactgaaatatgatggccccatggtacccggatcctcgaa

SEQ ID NO: 329749 - DNA, 8227 bp, Homo sapiens
caaggcggccggcggcgaccatggcagcgggccggcggcggccgtagtggcccaggcctgggcttcagcctcccggggccccagagggcggggcggtccgggccgcggcggtggcggcgccacttccctgctcccgcccgaggactcctgcgggcactcgctgaggaccagcggaccggcggcgcgaatctgactgaggggcggggacgccgtctgttccccgccgctcccggcagggccgggccgggccgggctgggccgggctgggccgggcgggcccctgggagcagcccccaggcgggggaccgccttggagacccgaagccggagctagaggcaggcggtgggcccgggtggagtcccggccggagctggtggttcgggggcggtgctaggccccgaggctgcgggacctgagcgcgaggagcctgagtgcgggtccagcggtggcggcatgagccggcccccgccgacggggaaaatgcccggcgcccccgagaccgcgccgggggacggggcaggcgcgagccgccagaggaagctggaggcgctgatccgagaccctcgctcccccatcaacgtggagagcttgctggatggcttaaattccttggtccttgatttagattttcctgctttgaggaaaaacaagaacatagataatttcttaaatagatatgagaaaattgtgaaaaaaatcagaggtctacagatgaaggcagaagactatgatgttgtaaaagttattggaagaggtgcttttggtgaagtgcagttggttcgtcacaaggcatcgcagaaggtttatgctatgaagcttcttagtaagtttgaaatgataaaaagatcagattctgcctttttttgggaagaaagagatattatggcctttgccaatagcccctgggtggttcagcttttttatgcctttcaagatgataggtatctgtacatggtaatggagtacatgcctggtggagaccttgtaaaccttatgagtaattatgatgtgcctgaaaaatgggccaaattttacactgctgaagttgttcttgctctggatgcaatacactccatgggtttaatacacagagatgtgaagcctgacaacatgctcttggataaacatggacatctaaaattagcagattttggcacgtgtatgaagatggatgaaacaggcatggtacattgtgatacagcagttggaacaccggattatatatcacctgaggttctgaaatcacaagggggtgatggtttctatgggcgagaatgtgattggtggtctgtaggtgttttcctttatgagatgctagtgggggatactccattttatgcggattcacttgtaggaacatatagcaaaattatggatcataagaattcactgtgtttccctgaagatgcagaaatttccaaacatgcaaagaatctcatctgtgctttcttaacagatagggaggtacgacttgggagaaatggggtggaagaaatcagacagcatcctttctttaagaatgatcagtggcattgggataacataagagaaacggcagctcctgtagtacctgaactcagcagtgacatagacagcagcaatttcgatgacattgaagatgacaaaggagatgtagaaaccttcccaattcctaaagcttttgttggaaatcagctgcctttcatcggatttacctactatagagaaaatttattattaagtgactctccatcttgtagagaaaatgattccatacaatcaaggaaaaatgaagaaagtcaagagattcagaaaaaactgtatacattagaagaacatcttagcaatgagatgcaagccaaagaggaactggaacagaagtgcaaatctgttaatactcgcctagaaaaaacagcaaaggagctagaagaggagattaccttacggaaaagtgtggaatcagcattaagacagttagaaagagaaaaggcgcttcttcagcacaaaaatgcagaatatcagaggaaagctgatcatgaagcagacaaaaaacgaaatttggaaaatgatgttaacagcttaaaagatcaacttgaagatttgaaaaaaagaaatcaaaactctcaaatatccactgagaaagtgaatcaactccagagacaactggatgaaaccaatgctttactgcgaacagagtctgatactgcagcccggttaaggaaaacccaggcagaaagttcaaaacagattcagcagctggaatctaacaatagagatctacaagataaaaactgcctgctggagactgccaagttaaaacttgaaaaggaatttatcaatcttcagtcagctctagaatctgaaaggagggatcgaacccatggatcagagataattaatgatttacaaggtagaatatgtggcctagaagaagatttaaagaacggcaaaatcttactagcgaaagtagaactggagaagagacaacttcaggagagatttactgatttggaaaaggaaaaaagcaacatggaaatagatatgacataccaactaaaagttatacagcagagcctagaacaagaagaagctgaacataaggccacaaaggcacgactagcagataaaaataagatctatgagtccatcgaagaagccaaatcagaagccatgaaagaaatggagaagaagctcttggaggaaagaactttaaaacagaaagtggagaacctattgctagaagctgagaaaagatgttctctattagactgtgacctcaaacagtcacagcagaaaataaatgagctccttaaacagaaagatgtgctaaatgaggatgttagaaacctgacattaaaaatagagcaagaaactcagaagcgctgccttacacaaaatgacctgaagatgcaaacacaacaggttaacacactaaaaatgtcagaaaagcagttaaagcaagaaaataaccatctcatggaaatgaaaatgaacttggaaaaacaaaatgctgaacttcgaaaagaacgtcaggatgcagatgggcaaatgaaagagctccaggatcagctcgaagcagaacagtatttctcaaccctttataaaacacaagttagggagcttaaagaagaatgtgaagaaaagaccaaacttggtaaagaattgcagcagaagaaacaggaattacaggatgaacgggactctttggctgcccaactggagatcaccttgaccaaagcagattctgagcaactggctcgttcaattgctgaagaacaatattctgatttggaaaaagagaagatcatgaaagagctggagatcaaagagatgatggctagacacaaacaggaacttacggaaaaagatgctacaattgcttctcttgaggaaactaataggacactaactagtgatgttgccaatcttgcaaatgagaaagaagaattaaataacaaattgaaagatgttcaagagcaactgtcaagattgaaagatgaagaaataagcgcagcagctattaaagcacagtttgagaagcagctattaacagaaagaacactcaaaactcaagctgtgaataagttggctgagatcatgaatcgaaaagaacctgtcaagcgtggtaatgacacagatgtgcggagaaaagagaaggagaatagaaagctacatatggagcttaaatctgaacgtgagaaattgacccagcagatgatcaagtatcagaaagaactgaatgaaatgcaggcacaaatagctgaagagagccagattcgaattgaactgcagatgacattggacagtaaagacagtgacattgagcagctgcggtcacaactccaagccttgcatattggtctggatagttccagtataggcagtggaccaggggatgctgaggcagatgatgggtttccagaatcaagattagaaggatggctttcattgcctgtacgaaacaacactaagaaatttggatgggttaaaaagtatgtgattgtaagcagtaagaagattcttttctatgacagtgaacaagataaagaacaatccaatccttacatggttttagatatagacaagttatttcatgtccgaccagttacacagacagatgtgtatagagcagatgctaaagaaattccaaggatattccagattctgtatgccaatgaaggagaaagtaagaaggaacaagaatttccagtggagccagttggagaaaaatctaattatatttgccacaagggacatgagtttattcctactctttatcatttcccaaccaactgtgaggcttgtatgaagcccctgtggcacatgtttaagcctcctcctgctttggagtgccgccgttgccatattaagtgtcataaagatcatatggacaaaaaggaggagattatagcaccttgcaaagtatattatgatatttcaacggcaaagaatctgttattactagcaaattctacagaagagcagcagaagtgggttagtcggttggtgaaaaagatacctaaaaagcccccagctccagacccttttgcccgatcatctcctagaacttcaatgaagatacagcaaaaccagtctattagacggccaagtcgacagcttgccccaaacaaacctagctaactgccttctatgaaagcagtcattattcaaggtgatcgtattcttccagtgaaaacaagactgaaatatgatggcccaaaatttattaaaaagctatattttcctgagagactgatacatacactcatacatatatgtgttccccttttccctgtaatataaattacaaatctgggctcctttgaagcaacaggttgaaccaacaatgattggttgatagactaaggatatatgcaactcttccagacttttccataaagctctctcggcagtcgctcacactacagtgcacacaaggattgagaagagttaaaggctaaagaaaacatcttttctagcttcaacagagaggtttcaccagcacatttaccagaagaatctgggaatggattccactacagtgatattgactgcatctttaagaagtgaccattatactgtgtatatatatataaacacacacacatatatatatatatatagtactctaatactgcaagaaggttttttaaacttcccactttattttttatacacattaatcagatatcattacttgctgcagttgcaactatgcacttgtataaagccataatgttggagtttatatcactcattcctgtgtacctgatggaagttgcatgttcatgtttaagcagttactgtaacaagaagtttaaagttaattatatcagtttcctaatgcttcatgataggcaactttacccattttgaatgccttaatttaatttttttcaaagtctcagccctgtctgtattaaaaaacaaaaaaagcgtttaccagctcttaggatgtaaactagctttgtggaagataaatcgtgcactatttttacacataaatagttatatcaatgtcagcctattttgattaacaaatgtttttaaagtattattggttatagaaacaataatggatggtgttggaactaatatatccttgatgtctgtctattattcattcaactctttttacagacctcagtattagtctgtgactacaaaatattttatttgctttaaatttgctggctaccctagatgtgtttttattcctggtaaagacatttgtgattacattttcacacttaagattcaaaatttttcccaaatataaagaaaactaagacagactgtagatgcattttaaatatttaaatatgatcctcagacatgcagctgtgtgtggcagtattttagtaccgggttaagaaaactggcaactgggaagaagtggcctcaaaggcacttaatttgatttttattttttaaatgctgtcaaagttacagtttacgcaggacattcttgccgtattctcatgatcccagataagtgtgtgttttatactgcaacaatatgcagcaatggtaagcgtaaagtttttttttgtttttgtttttgtttttttttatattatgaagtcttttaacagtctctctttatataaatacacagagtttggtatgatatttaaatacatcatctggccaggcatggtggcttacgcctgtaatcctagcactttgggaggccaagacgggcggatcacctgaggtgaggagttcaagaccagcctgcccaacatagtgaaactccgtctctaccaatatacaaaaattagccgggcatgatggtggtggcctgtaatcccagctacttgggaggctgagacaggagaatcgcttgaacccaggagacggtggttgcagtgagcgaagatcgagccactgcactccagcctgggcagctgaacaagactccgtctcaaaaaaaaaaaaaaaaaaaagtcatctaatatttcgatgaaggaaatagacatttttcattgattccctctgatgtcagttagagatatttaaaaagttagatccccataatagatactattgtggaaactgaagagtagctactggcctactgatagactgaaactggttttgttattcttaacgttctccagtctgcactctgctgtgctgtctgtgctcagactagacgtgcatgccgtttcctttgcaggtgtgttctgcagctctggttttgggggatagctcttttttaagtaagattaaaaaatgaaaaatatataaatttatatagaataaatatttccattcattagagttgttaaaaggagactgaattaatattttatataaagattttgttacattatgggaggttctatcctattctgaattggagagtatatatatatatatatatatatatatttttaataaactttattaaggtgaaataatttcaagtttacatatgagtaactgaaatatttgagtaaaaaaggcaaaagtttaaatttggaatgctgtatatattagagaatatggggaatcatggtgtgaccaactgtacaaggaagattcatatgaaggtcttaggggaaaaagataattctgaagggtgaaagttgtttgtccaactaatgaaaatgcgcttaataaaaaattctgaccttgggtaagaattcgctttttaccgcattgccgctttcatgtacatacatgagtgcatgcacctatcaatgtgttttcttcccaacacttattaaatataaaacaacctgattttgtgctcgtttctcgtttttcttgaggccctgaagcttccaagataaatataagactaaaatttgcttgttccttcacacctgatttctcctagaaccataaatacctcctatggggaactaagaaatcatgaatactgggattttcttattggattttttacttttgttttgtggggataacgagacagaagtgaaaggaaaactggtgccggtattactgttgaaattaatgtacagtgaatgtttttaaagtattaattttaaaaaaccatgttctctagaaacaagttttaaaaatctatatgaaagttttaaaatgttccagctaactaatggataagcataccagtaaagccaaagtaaaggttagtgcctttaaaactaacctgtgttagagttacatgaatctggctctaaagtatctattttgcatccatttatatatagatcttaaacagaaatactctaggttgccacaccacagttttaagaagttatgctgctgctgttactctcttctaggattctggtggtaaagtagagaaactcggacactatattaaccttactgaaacatgctttaaatcgtgtctaaaatctgatttgagcaagtcactgccgagcttctgagtctgcattgacactgctactgactcacctctccttccctggaataaggcttcagcttccctatgctgtgaagacaccatttgtaagcactttgaacataagcactgtgtgacagcgctggatatcatgcttgggggggggcctctccctgactcccatccccataataatgagttttgtttggaattgtaataagtaatgaactgcatggtttagaaaattataaatatttgatcagctgtcctctctgaaaaaaattgcacccctttttcttttttaaaattttgttgcatcttcgtagtaatgtaattgtattttatgcctgcttttttataaaaaaataaaataaaataaatggaga

SEQ ID NO: 329750 - DNA, 8338 bp, Homo sapiens
caaggcggccggcggcgaccatggcagcgggccggcggcggccgtagtggcccaggcctgggcttcagcctcccggggccccagagggcggggcggtccgggccgcggcggtggcggcgccacttccctgctcccgcccgaggactcctgcgggcactcgctgaggaccagcggaccggcggcgcgaatctgactgaggggcggggacgccgtctgttccccgccgctcccggcagggccgggccgggccgggctgggccgggctgggccgggcgggcccctgggagcagcccccaggcgggggaccgccttggagacccgaagccggagctagaggcaggcggtgggcccgggtggagtcccggccggagctggtggttcgggggcggtgctaggccccgaggctgcgggacctgagcgcgaggagcctgagtgcgggtccagcggtggcggcatgagccggcccccgccgacggggaaaatgcccggcgcccccgagaccgcgccgggggacggggcaggcgcgagccgccagaggaagctggaggcgctgatccgagaccctcgctcccccatcaacgtggagagcttgctggatggcttaaattccttggtccttgatttagattttcctgctttgaggaaaaacaagaacatagataatttcttaaatagatatgagaaaattgtgaaaaaaatcagaggtctacagatgaaggcagaagactatgatgttgtaaaagttattggaagaggtgcttttggtgaagtgcagttggttcgtcacaaggcatcgcagaaggtttatgctatgaagcttcttagtaagtttgaaatgataaaaagatcagattctgcctttttttgggaagaaagagatattatggcctttgccaatagcccctgggtggttcagcttttttatgcctttcaagatgataggtatctgtacatggtaatggagtacatgcctggtggagaccttgtaaaccttatgagtaattatgatgtgcctgaaaaatgggccaaattttacactgctgaagttgttcttgctctggatgcaatacactccatgggtttaatacacagagatgtgaagcctgacaacatgctcttggataaacatggacatctaaaattagcagattttggcacgtgtatgaagatggatgaaacaggcatggtacattgtgatacagcagttggaacaccggattatatatcacctgaggttctgaaatcacaagggggtgatggtttctatgggcgagaatgtgattggtggtctgtaggtgttttcctttatgagatgctagtgggggatactccattttatgcggattcacttgtaggaacatatagcaaaattatggatcataagaattcactgtgtttccctgaagatgcagaaatttccaaacatgcaaagaatctcatctgtgctttcttaacagatagggaggtacgacttgggagaaatggggtggaagaaatcagacagcatcctttctttaagaatgatcagtggcattgggataacataagagaaacggcagctcctgtagtacctgaactcagcagtgacatagacagcagcaatttcgatgacattgaagatgacaaaggagatgtagaaaccttcccaattcctaaagcttttgttggaaatcagctgcctttcatcggatttacctactatagagaaaatttattattaagtgactctccatcttgtagagaaaatgattccatacaatcaaggaaaaatgaagaaagtcaagagattcagaaaaaactgtatacattagaagaacatcttagcaatgagatgcaagccaaagaggaactggaacagaagtgcaaatctgttaatactcgcctagaaaaaacagcaaaggagctagaagaggagattaccttacggaaaagtgtggaatcagcattaagacagttagaaagagaaaaggcgcttcttcagcacaaaaatgcagaatatcagaggaaagctgatcatgaagcagacaaaaaacgaaatttggaaaatgatgttaacagcttaaaagatcaacttgaagatttgaaaaaaagaaatcaaaactctcaaatatccactgagaaagtgaatcaactccagagacaactggatgaaaccaatgctttactgcgaacagagtctgatactgcagcccggttaaggaaaacccaggcagaaagttcaaaacagattcagcagctggaatctaacaatagagatctacaagataaaaactgcctgctggagactgccaagttaaaacttgaaaaggaatttatcaatcttcagtcagctctagaatctgaaaggagggatcgaacccatggatcagagataattaatgatttacaaggtagaatatgtggcctagaagaagatttaaagaacggcaaaatcttactagcgaaagtagaactggagaagagacaacttcaggagagatttactgatttggaaaaggaaaaaagcaacatggaaatagatatgacataccaactaaaagttatacagcagagcctagaacaagaagaagctgaacataaggccacaaaggcacgactagcagataaaaataagatctatgagtccatcgaagaagccaaatcagaagccatgaaagaaatggagaagaagctcttggaggaaagaactttaaaacagaaagtggagaacctattgctagaagctgagaaaagatgttctctattagactgtgacctcaaacagtcacagcagaaaataaatgagctccttaaacagaaagatgtgctaaatgaggatgttagaaacctgacattaaaaatagagcaagaaactcagaagcgctgccttacacaaaatgacctgaagatgcaaacacaacaggttaacacactaaaaatgtcagaaaagcagttaaagcaagaaaataaccatctcatggaaatgaaaatgaacttggaaaaacaaaatgctgaacttcgaaaagaacgtcaggatgcagatgggcaaatgaaagagctccaggatcagctcgaagcagaacagtatttctcaaccctttataaaacacaagttagggagcttaaagaagaatgtgaagaaaagaccaaacttggtaaagaattgcagcagaagaaacaggaattacaggatgaacgggactctttggctgcccaactggagatcaccttgaccaaagcagattctgagcaactggctcgttcaattgctgaagaacaatattctgatttggaaaaagagaagatcatgaaagagctggagatcaaagagatgatggctagacacaaacaggaacttacggaaaaagatgctacaattgcttctcttgaggaaactaataggacactaactagtgatgttgccaatcttgcaaatgagaaagaagaattaaataacaaattgaaagatgttcaagagcaactgtcaagattgaaagatgaagaaataagcgcagcagctattaaagcacagtttgagaagcagctattaacagaaagaacactcaaaactcaagctgtgaataagttggctgagatcatgaatcgaaaagaacctgtcaagcgtggtaatgacacagatgtgcggagaaaagagaaggagaatagaaagctacatatggagcttaaatctgaacgtgagaaattgacccagcagatgatcaagtatcagaaagaactgaatgaaatgcaggcacaaatagctgaagagagccagattcgaattgaactgcagatgacattggacagtaaagacagtgacattgagcagctgcggtcacaactccaagccttgcatattggtctggatagttccagtataggcagtggaccaggggatgctgaggcagatgatgggtttccagaatcaagattagaaggatggctttcattgcctgtacgaaacaacactaagaaatttggatgggttaaaaagtatgtgattgtaagcagtaagaagattcttttctatgacagtgaacaagataaagaacaatccaatccttacatggttttagatatagacaagttatttcatgtccgaccagttacacagacagatgtgtatagagcagatgctaaagaaattccaaggatattccagattctgtatgccaatgaaggagaaagtaagaaggaacaagaatttccagtggagccagttggagaaaaatctaattatatttgccacaagggacatgagtttattcctactctttatcatttcccaaccaactgtgaggcttgtatgaagcccctgtggcacatgtttaagcctcctcctgctttggagtgccgccgttgccatattaagtgtcataaagatcatatggacaaaaaggaggagattatagcaccttgcaaagtatattatgatatttcaacggcaaagaatctgttattactagcaaattctacagaagagcagcagaagtgggttagtcggttggtgaaaaagatacctaaaaagcccccagctccagacccttttgcccgatcatctcctagaacttcaatgaagatacagcaaaaccagtctattagacggccaagtcgacagcttgccccaaacaaacctagctaactgccttctatgaaagcagtcattattcaaggtgatcgtattcttccagtgaaaacaagactgaaatatgatggcccaaaatttattaaaaagctatattttcctgagagactgatacatacactcatacatatatgtgttccccttttccctgtaatataaattacaaatctgggctcctttgaagcaacaggttgaaccaacaatgattggttgatagactaaggatatatgcaactcttccagacttttccataaagctctctcggcagtcgctcacactacagtgcacacaaggattgagaagagttaaaggctaaagaaaacatcttttctagcttcaacagagaggtttcaccagcacatttaccagaagaatctgggaatggattccactacagtgatattgactgcatctttaagaagtgaccattatactgtgtatatatatataaacacacacacatatatatatatatatagtactctaatactgcaagaaggttttttaaacttcccactttattttttatacacattaatcagatatcattacttgctgcagttgcaactatgcacttgtataaagccataatgttggagtttatatcactcattcctgtgtacctgatggaagttgcatgttcatgtttaagcagttactgtaacaagaagtttaaagttaattatatcagtttcctaatgcttcatgataggcaactttacccattttgaatgccttaatttaatttttttcaaagtctcagccctgtctgtattaaaaaacaaaaaaagcgtttaccagctcttaggatgtaaactagctttgtggaagataaatcgtgcactatttttacacataaatagttatatcaatgtcagcctattttgattaacaaatgtttttaaagtattattggttatagaaacaataatggatggtgttggaactaatatatccttgatgtctgtctattattcattcaactctttttacagacctcagtattagtctgtgactacaaaatattttatttgctttaaatttgctggctaccctagatgtgtttttattcctggtaaagacatttgtgattacattttcacacttaagattcaaaatttttcccaaatataaagaaaactaagacagactgtagatgcattttaaatatttaaatatgatcctcagacatgcagctgtgtgtggcagtattttagtaccgggttaagaaaactggcaactgggaagaagtggcctcaaaggcacttaatttgatttttattttttaaatgctgtcaaagttacagtttacgcaggacattcttgccgtattctcatgatcccagataagtgtgtgttttatactgcaacaatatgcagcaatggtaagcgtaaagtttttttttgtttttgtttttgtttttttttatattatgaagtcttttaacagtctctctttatataaatacacagagtttggtatgatatttaaatacatcatctggccaggcatggtggcttacgcctgtaatcctagcactttgggaggccaagacgggcggatcacctgaggtgaggagttcaagaccagcctgcccaacatagtgaaactccgtctctaccaatatacaaaaattagccgggcatgatggtggtggcctgtaatcccagctacttgggaggctgagacaggagaatcgcttgaacccaggagacggtggttgcagtgagcgaagatcgagccactgcactccagcctgggcagctgaacaagactccgtctcaaaaaaaaaaaaaaaaaaaagtcatctaatatttcgatgaaggaaatagacatttttcattgattccctctgatgtcagttagagatatttaaaaagttagatccccataatagatactattgtggaaactgaagagtagctactggcctactgatagactgaaactggttttgttattcttaacgttctccagtctgcactctgctgtgctgtctgtgctcagactagacgtgcatgccgtttcctttgcaggtgtgttctgcagctctggttttgggggatagctcttttttaagtaagattaaaaaatgaaaaatatataaatttatatagaataaatatttccattcattagagttgttaaaaggagactgaattaatattttatataaagattttgttacattatgggaggttctatcctattctgaattggagagtatatatatatatatatatatatatatttttaataaactttattaaggtgaaataatttcaagtttacatatgagtaactgaaatatttgagtaaaaaaggcaaaagtttaaatttggaatgctgtatatattagagaatatggggaatcatggtgtgaccaactgtacaaggaagattcatatgaaggtcttaggggaaaaagataattctgaagggtgaaaaaaaaatctctcccatggagattcttcacattatatggtttgacataagggtttataaggttgtttgtccaactaatgaaaatgcgcttaataaaaaattctgaccttgggtaagaattcgctttttaccgcattgccgctttcatgtacatacatgagtgcatgcacctatcaatgtgttttcttcccaacacttattaaatataaaacaacctgattttgtgctcgtttctcgtttttcttgaggccctgaagcttccaagataaatataagactaaaatttgcttgttccttcacacctgatttctcctagaaccataaatacctcctatggggaactaagaaatcatgaatactgggattttcttattggattttttacttttgttttgtggggataacgagacagaagtgaaaggaaaactggtgccggtattactgttgaaattaatgtacagtgaatgtttttaaagtattaattttaaaaaaccatgttctctagaaacaagttttaaaaatctatatgaaagttttaaaatgttccagctaactaatggataagcataccagtaaagccaaagtaaaggttagtgcctttaaaactaacctgtgttagagttacatgaatctggctctaaagtatctattttgcatccatttatatatagatcttaaacagaaatactctaggttgccacaccacagttttaagaagttatgctgctgctgttactctcttctaggattctggtggtaaagtagagaaactcggacactatattaaccttactgaaacatgctttaaatcgtgtctaaaatctgatttgagcaagtcactgccgagcttctgagtctgcattgacactgctactgactcacctctccttccctggaataaggcttcagcttccctatgctgtgaagacaccatttgtaagcactttgaacataagcactgtgtgacagcgctggatatcatgcttgggggggggcctctccctgactcccatccccataataatgagttttgtttggaattgtaataagtaatgaactgcatggtttagaaaattataaatatttgatcagctgtcctctctgaaaaaaattgcacccctttttcttttttaaaattttgttgcatcttcgtagtaatgtaattgtattttatgcctgcttttttataaaaaaataaaataaaataaatggagaggcggccgaaaccccacgatatataacaccaacccgggggaaaacaaaaaca

SEQ ID NO: 329751 - DNA, 4569 bp, Homo sapiens
ttttgcattgcataactttttactactgatcctgtactattactgtatcctagatgatgtatagtgataaattctaaaggatatattttatttgttttataaatttcatattaaaattttattaagttctttgttatctaaggagaattgttatctttagcctcacatgttgtgcttatttgtagaatcaagattagaaggatggctttcattgcctgtacgaaacaacactaagaaatttggatgggttaaaaagtatgtgattgtaagcagtaagaagattcttttctatgacagtgaacaagataaagaacaatccaatccttacatggttttagatatagacaagttatttcatgtccgaccagttacacagacagatgtgtatagagcagatgctaaagaaattccaaggatattccagattctgtatgccaatgaaggagaaagtaagaaggaacaagaatttccagtggagccagttggagaaaaatctaattatatttgccacaagggacatgagtttattcctactctttatcatttcccaaccaactgtgaggcttgtatgaagcccctgtggcacatgtttaagcctcctcctgctttggagtgccgccgttgccatattaagtgtcataaagatcatatggacaaaaaggaggagattatagcaccttgcaaagtatattatgatatttcaacggcaaagaatctgttattactagcaaattctacagaagagcagcagaagtgggttagtcggttggtgaaaaagatacctaaaaagcccccagctccagacccttttgcccgatcatctcctagaacttcaatgaagatacagcaaaaccagtctattagacggccaagtcgacagcttgccccaaacaaacctagctaactgccttctatgaaagcagtcattattcaaggtgatcgtattcttccagtgaaaacaagactgaaatatgatggcccaaaatttattaaaaagctatattttcctgagagactgatacatacactcatacatatatgtgttccccttttccctgtaatataaattacaaatctgggctcctttgaagcaacaggttgaaccaacaatgattggttgatagactaaggatatatgcaactcttccagacttttccataaagctctctcggcagtcgctcacactacagtgcacacaaggattgagaagagttaaaggctaaagaaaacatcttttctagcttcaacagagaggtttcaccagcacatttaccagaagaatctgggaatggattccactacagtgatattgactgcatctttaagaagtgaccattatactgtgtatatatatataaacacacacacatatatatatatatatagtactctaatactgcaagaaggttttttaaacttcccactttattttttatacacattaatcagatatcattacttgctgcagttgcaactatgcacttgtataaagccataatgttggagtttatatcactcattcctgtgtacctgatggaagttgcatgttcatgtttaagcagttactgtaacaagaagtttaaagttaattatatcagtttcctaatgcttcatgataggcaactttacccattttgaatgccttaatttaatttttttcaaagtctcagccctgtctgtattaaaaaacaaaaaaagcgtttaccagctcttaggatgtaaactagctttgtggaagataaatcgtgcactatttttacacataaatagttatatcaatgtcagcctattttgattaacaaatgtttttaaagtattattggttatagaaacaataatggatggtgttggaactaatatatccttgatgtctgtctattattcattcaactctttttacagacctcagtattagtctgtgactacaaaatattttatttgctttaaatttgctggctaccctagatgtgtttttattcctggtaaagacatttgtgattacattttcacacttaagattcaaaatttttcccaaatataaagaaaactaagacagactgtagatgcattttaaatatttaaatatgatcctcagacatgcagctgtgtgtggcagtattttagtaccgggttaagaaaactggcaactgggaagaagtggcctcaaaggcacttaatttgatttttattttttaaatgctgtcaaagttacagtttacgcaggacattcttgccgtattctcatgatcccagataagtgtgtgttttatactgcaacaatatgcagcaatggtaagcgtaaagtttttttttgtttttgtttttgtttttttttatattatgaagtcttttaacagtctctctttatataaatacacagagtttggtatgatatttaaatacatcatctggccaggcatggtggcttacgcctgtaatcctagcactttgggaggccaagacgggcggatcacctgaggtgaggagttcaagaccagcctgcccaacatagtgaaactccgtctctaccaatatacaaaaattagccgggcatgatggtggtggcctgtaatcccagctacttgggaggctgagacaggagaatcgcttgaacccaggagacggtggttgcagtgagcgaagatcgagccactgcactccagcctgggcagctgaacaagactccgtctcaaaaaaaaaaaaaaaaaaaagtcatctaatatttcgatgaaggaaatagacatttttcattgattccctctgatgtcagttagagatatttaaaaagttagatccccataatagatactattgtggaaactgaagagtagctactggcctactgatagactgaaactggttttgttattcttaacgttctccagtctgcactctgctgtgctgtctgtgctcagactagacgtgcatgccgtttcctttgcaggtgtgttctgcagctctggttttgggggatagctcttttttaagtaagattaaaaaatgaaaaatatataaatttatatagaataaatatttccattcattagagttgttaaaaggagactgaattaatattttatataaagattttgttacattatgggaggttctatcctattctgaattggagagtatatatatatatatatatatatatatttttaataaactttattaaggtgaaataatttcaagtttacatatgagtaactgaaatatttgagtaaaaaaggcaaaagtttaaatttggaatgctgtatatattagagaatatggggaatcatggtgtgaccaactgtacaaggaagattcatatgaaggtcttaggggaaaaagataattctgaagggtgaaaaaaaaatctctcccatggagattcttcacattatatggtttgacataagggtttataaggttgtttgtccaactaatgaaaatgcgcttaataaaaaattctgaccttgggtaagaattcgctttttaccgcattgccgctttcatgtacatacatgagtgcatgcacctatcaatgtgttttcttcccaacacttattaaatataaaacaacctgattttgtgctcgtttctcgtttttcttgaggccctgaagcttccaagataaatataagactaaaatttgcttgttccttcacacctgatttctcctagaaccataaatacctcctatggggaactaagaaatcatgaatactgggattttcttattggattttttacttttgttttgtggggataacgagacagaagtgaaaggaaaactggtgccggtattactgttgaaattaatgtacagtgaatgtttttaaagtattaattttaaaaaaccatgttctctagaaacaagttttaaaaatctatatgaaagttttaaaatgttccagctaactaatggataagcataccagtaaagccaaagtaaaggttagtgcctttaaaactaacctgtgttagagttacatgaatctggctctaaagtatctattttgcatccatttatatatagatcttaaacagaaatactctaggttgccacaccacagttttaagaagttatgctgctgctgttactctcttctaggattctggtggtaaagtagagaaactcggacactatattaaccttactgaaacatgctttaaatcgtgtctaaaatctgatttgagcaagtcactgccgagcttctgagtctgcattgacactgctactgactcacctctccttccctggaataaggcttcagcttccctatgctgtgaagacaccatttgtaagcactttgaacataagcactgtgtgacagcgctggatatcatgcttgggggggggcctctccctgactcccatccccataataatgagttttgtttggaattgtaataagtaatgaactgcatggtttagaaaattataaatatttgatcagctgtcctctctgaaaaaaattgcacccctttttcttttttaaaattttgttgcatcttcgtagtaatgtaattgtattttatgcctgcttttttataaaaaaataaaataaaataaatggaga

SEQ ID NO: 329752 - DNA, 704 bp, Homo sapiens
cccccacccgcccctctctctgcagtcaagccaagccagaccccgcagccgaaggacaagtgaagcagccccctgagcctcacaaggacctcctggctggtgaggagggggccgcgccaggctcccaggcctccacagagtcttcagcgcatcccccaacagcagcccctgccagtccctcgggtccaggcaaggccctgggggtctccttaaatgccacctcgggcaagtcccagtcccagtcctcggccacccccagctctggatcccagggccagctgccctctggctctggctgtggctcccgcctgtccggcagggcccagggccagcgtcgggcacagggcagctcccactggtctcggcaacacacccagccgcctggtacttcctccagcccctcccagtcagccctcccgtcctcggggcccctgcagccacccaacgtcacctccagcccggtctcacccatggtccagtctcccagcagcagcaacatccccacgcagccccccagcaagtcctctggcaagccggaggacgcagcccccaagaccagcggacagcgccagaaggaatcgtcgaaacagcctgccagcagcgcctcagtgcccgagctggtcccctgccattccgggacctctctggagtacacttcggagtccaccaccgagatcacctgcagctggccacaccacaggccc

SEQ ID NO: 329753 - DNA, 1531 bp, Homo sapiens
ctcccggcggggtctgggcagcggcggccgtggcggagggctatgcggcgggggagacggggcaggcccctcctcctttgtccgccctgccctcccattggtcctagcggggggccgggggcggacaccggcgcggggccggagcatcgcggctcaggctgcgggaaagcggtgcgcgtgcagcggggtgggtgccctggtccgcgggcgagctcgagcagccaaccccgggcgcgtcggggccatggacggcctgaggcagcgcgtggagcacttcctggagcaaaggaacctggtcaccgaagtgctgggggcgctggaggccaagaccggggtggagaagcggtatctggctgcaggagccgtcactctgctaagcctgtatctgctgttcggctacggagcgtctctgctgtgcaatctcatcggatttgtgtaccccgcatatgcctcaatcaaagctatcgagagcccaagcaaggacgacgacactgtgtggctcacctactgggtggtgtacgccctgtttgggctggccgagttcttcagcgatctactcctgtcctggttccctttctactacgtgggcaagtgcgccttcctgttgttctgcatggctcccaggccctggaacggggctctcatgctgtatcagcgcgtcgtgcgtccgctgttcctaaggcaccacggggccgtagacagaatcatgaacgacctcagcgggcgagccctggacgcggcggccggaataaccaggaacgtcaagccaagccagaccccgcagccgaaggacaagtgaagcagccccctgagcctcacaaggacctcctggctggtgaggagggggccgcgccaggctcccaggcctccacagagtcttcagcgcatcccccaacagcagcccctgccagtccctcgggtccaggcaaggccctgggggtctccttaaatgccacctcgggcaagtcccagtcccagtcctcggccacccccagctctggatcccagggccagctgccctctggctctggctgtggctcccgcctgtccggcagggcccagggccagcgtcgggcacagggcagctcccactggtctcggcaacacacccagccgcctggtacttcctccagcccctcccagtcagccctcccgtcctcggggcccctgcagccacccaacgtcacctccagcccggtctcacccatggtccagtctcccagcagcagcaacatccccacgcagccccccagcaagtcctctggcaagccggaggacgcagcccccaagaccagcggacagcgccagaaggaatcgtcgaaacagcctgccagcagcgcctcagtgcccgagctggtcccctgccattccgggacctctctggagtacacttcggagtccaccaccgagatcacctgcagctggccacaccacaggcccccgtgcctgcagcactactggtgcctgaaacacctggcctgctaggaggctccaataaagctaacccggacaaagacctgtgtgccacgtg

SEQ ID NO: 329754 - DNA, 146 bp, Homo sapiens
gggagatgcaggtgggagctatggagaaaagagctccagaaatctgcaaaagggtgcccttgagtctttgctgaggactaaatccttagaatggaattcagaggacacatcctatgaaaagggggacacatccttagaatgaaatt

SEQ ID NO: 329755 - DNA, 1656 bp, Homo sapiens
ttttagtaaacagaatattatcaaacaatttattttggctttattgaaaaaagagtatttggtctaaatgtgccaccataggtgttaaattctcctatctgcaattgtctttatcctatattgtgttcatttcttttcttaataatttactttgttgtgtgtttctacactttcatccctgttttttatcttgtatatcatcaggaaattgtgatttaatcattaacattggtttttttgtgtgtgtggtaaaaatcaacactaggctcatggtacatatttttattctgtacatttgcttgtaactatcaatttgtaactctgtttatctactacatgtgtatatatacttagagcattttctctaacacattttaatgttagtattttttaaaaggtctgaccagtctagcaaattgtcagtccaacgtcattactttaaattaagaagcagtcttcttctggtaaaccttgttggtatttgtaaaataattttgaaggtcttaatttcttcctttgtaaaaggaaaaggttttttttaaagtttttaggttggcatggaggcagaagttggtgattacttgatttacaacagattttttccagatcatacaaaaggccatacagtaagtatagaagtaggtatggggagggcttactaatatcaaataggcaaggccttagtgagtgggcaggataccacctgagagtggccagatctggggaggttactctgctctgggtgctctcattcatgaatcgacaaggatacattagattattttgaaacatttttttaagaagcagaattctttaataattccttcctagacattgaatatacttataaaattaaagacttggggaaggagacactgagagacttgccagtttggttcctcatgaacaaaagaggacagtttgataactaccagaatagaatatccctagttttaaaatagtgagaatctctgaagttcatcaacatcttaagatgcacttacttgaaagtttgagattctgtttatcatttgaaaacacattttgctttaattctttctttgacatgttgttttttcatatcaagaaatatatgaacaaaataataaccttttgaccctgaccttgctgggtgaattagctctgaaacactctctacaaccagtaatgcatttgtcccacatttcattctgatagaaaatgaacaccatagcaccaaacaaaaatccgaggcgttagataatgtctggattaaataatttaagactctctaggattttggttgtcattttttatttataacagactttaagtcactttctgttgcctcataggtcacattttagacaggtttgtgtctgttccttgcatctgaattcctgattgtaaagacacctatgaggtctcttagtttttgtcattcattttcttggtttatcacccctcccttctttttgttgtttttccctgactgttaagcagtttcatctttgcttttgttaaatatttgacagcagttagtttgtgttaagctcttgaaacttgtgattgtactttctgtgtagatatacatgtaattattttttatttttcaatcatagattcaagcttccttcttttttaccacaaatcattaaagttatttgtgtttccata

SEQ ID NO: 329756 - DNA, 2393 bp, Homo sapiens
  misc_feature (2356)..(2356): n is a, c, g, or t
ttttagtaaacagaatattatcaaacaatttattttggctttattgaaaaaagagtatttggtctaaatgtgccaccataggtgttaaattctcctatctgcaattgtctttatcctatattgtgttcatttcttttcttaataatttactttgttgtgtgtttctacactttcatccctgttttttatcttgtatatcatcaggaaattgtgatttaatcattaacattggtttttttgtgtgtgtggtaaaaatcaacactaggctcatggtacatatttttattctgtacatttgcttgtaactatcaatttgtaactctgtttatctactacatgtgtatatatacttagagcattttctctaacacattttaatgttagtattttttaaaaggtctgaccagtctagcaaattgtcagtccaacgtcattactttaaattaagaagcagtcttcttctggtaaaccttgttggtatttgtaaaataattttgaaggtcttaatttcttcctttgtaaaaggaaaaggttttttttaaagtttttaggttggcatggaggcagaagttggtgattacttgatttacaacagattttttccagatcatacaaaaggccatacagtaagtatagaagtaggtatggggagggcttactaatatcaaataggcaaggccttagtgagtgggcaggataccacctgagagtggccagatctggggaggttactctgctctgggtgctctcattcatgaatcgacaaggatacattagattattttgaaacatttttttaagaagcagaattctttaataattccttcctagacattgaatatacttataaaattaaagacttggggaaggagacactgagagacttgccagtttggttcctcatgaacaaaagaggacagtttgataactaccagaatagaatatccctagttttaaaatagtgagaatctctgaagttcatcaacatcttaagatgcacttacttgaaagtttgagattctgtttatcatttgaaaacacattttgctttaattctttctttgacatgttgttttttcatatcaagaaatatatgaacaaaataataaccttttgaccctgaccttgctgggtgaattagctctgaaacactctctacaaccagtaatgcatttgtcccacatttcattctgatagaaaatgaacaccatagcaccaaacaaaaatccgaggcgttagataatgtctggattaaataatttaagactctctaggattttggttgtcattttttatttataacagactttaagtcactttctgttgcctcataggtcacattttagacaggtttgtgtctgttccttgcatctgaattcctgattgtaaagacacctatgaggtctcttagtttttgtcattcattttcttggtttatcacccctcccttctttttgttgtttttccctgactgttaagcagtttcatctttgcttttgttaaatatttgacagcagttagtttgtgttaagctcttgaaacttgtgattgtactttctgtgtagatatacatgtaattattttttatttttcaatcatagattcaagcttccttcttttttaccacaaatcattaaagttatttgtgtttccataaaaaaaaaaaaaaaaaaaaaaaaaaaaaaaaaaaaaaaaaaaaaaaaaaaaaaaaaaaaaaaaaaaaaaaaaaaaaaagaagagagagaaagaaaacaaaataaatatataattataatatgaaggagggggcgcgacgcatgatatagatgatgtcgcgtggttgtggttgtggtgggggggtggtccccgtcattgtggttgttgttattattgtgtgcgtcgcgacgagcgtgcttcttatttatatatatctaagtgaggagcatcggggcggaagtagattgtgttcatagtagaaggagacggagatctttgtgtagagaagaagagaagctcaagattagtaatgtgaatagagcgatagtaagagaaagaaagtagagtgggaggaaataataaagttattagaaataagagcagaaatatatataacatacgacagatcaccacagacggcgagatacatacaaccttagcgacaatcatgacacaagcgagacgagagcgaggacagagagagagagaggagcaataacaacaaacaacaacgaggagagcgagagaatagagtagcagagaggagagagaacagagcaaaaagagagagtaggtgaggcgcgccggcaactgagggagacaacaggacagaaaaagaaagagaaaaccaaaaataactacacaacaacccaaccggganaggacataacgagaaaccaaaaaaaaagaaagcaagg

SEQ ID NO: 329757 - DNA, 892 bp, Homo sapiens
ggacgcgtgggtgacccacgcgtccgatttttttaagaagcagaattctttaataattccttcctagacattgaatatacttataaaattaaagacttggggaaggagacactgagagacttgccagtttggttcctcatgaacaaaagaggacagtttgataactaccagaatagaatatccctagttttaaaatagtgagaatctctgaagttcatcaacatcttaagatgcacttacttgaaagtttgagattctgtttatcatttgaaaacacattttgctttaattctttctttgacatgttgttttttcatatcaagaaatatatgaacaaaataataaccttttgaccctgaccttgctgggtgaattagctctgaaacactctctacaaccagtaatgcatttgtcccacatttcattctgatagaaaatgaacaccatagcaccaaacaaaaatccgaggcgttagataatgtctggattaaataatttaagactctctaggattttggttgtcattttttatttataacagactttaagtcactttctgttgcctcataggtcacattttagacaggtttgtgtctgttccttgcatctgaattcctgattgtaaagacacctatgaggtctcttagtttttgtcattcattttcttggtttatcacccctcccttctttttgttgtttttccctgactgttaagcagtttcatctttgcttttgttaaatatttgacagcagttagtttgtgttaagctcttgaaacttgtgattgtactttctgtgtagatatacatgtaattattttttatttttcaatcatagattcaagcttccttcttttttaccacaaatcattaaagttatttgtgtttccata

SEQ ID NO: 329758 - DNA, 337 bp, Homo sapiens
cgcagaggcaccaaagggtctttgtcaacattccttttttctttttcttgtttttggttatcccaaggctctgtcatctgtctctgtccgcattctatctggagagcatggttggctggagcagctcccgctctaaaacactcactctggcttccttctccttcctccagccctgcccaacttgggctcctctgactgccccatctttgctgggttccatgaggctttgccctgtgacaacctctcctcggggtccttgttgccctgcctcagtcgtgctgctgtgcccattctcctggcccggccagggctggcaagaccagctgcctcctctgag

SEQ ID NO: 329759 - DNA, 632 bp, Homo sapiens
tgtagaaaatttaggcagtcctcaacctctctaggtatgctgaattaaaaaaaaaaaagaatgacatttttaattcccatggcaaatggagttctcctctttcttctgttcctcttcttcaccttgcaatgactgtcattttgtaaaactttctctctgtctctgtctctcttactcacacatacactcacaatgttccttaatatcttctaatcctgaatttcctttctcaatttgtttagttagatcttcactagaaataagtattagaaattgggaaaagtttatactggttgtattagggttctccaaataaacagaactattaggagatggatagatagatagatacattgattgatagatgacagatagatgaatggatggataggtggataataggctggtagatgatagatggatgatagacagattagatagatagatagatagataatagattagatgatagacagaaagaataagagatttattatgaagaattggcttacgtgattatgggaggctgcaaagtcccagtatctgtgagctgcagatccatgatatagttcactttgagtccaaaggccagagaatcacgggagctgatggtacaaaccacagttcaagaa

SEQ ID NO: 329760 - DNA, 652 bp, Homo sapiens
tgtagaaaatttaggcagtcctcaacctctctaggtatgctgaattaaaaaaaaaaaagaatgacatttttaattcccatggcaaatggagttctcctctttcttctgttcctcttcttcaccttgcaatgactgtcattttgtaaaactttctctctgtctctgtctctcttactcacacatacactcacaatgttccttaatatcttctaatcctgaatttcctttctcaatttgtttagttagatcttcactagaaataagtattagaaattgggaaaagtttatactggttgtattagggttctccaaataaacagaactattaggagatggatagatagatagatacattgattgatagatgacagatagatgaatggatggataggtggataataggctggtagatgatagatggatgatagacagattagatagatagatagatagatagatagatagatagatagataatagattagatgatagacagaaagaataagagatttattatgaagaattggcttacgtgattatgggaggctgcaaagtcccagtatctgtgagctgcagatccatgatatagttcactttgagtccaaaggccagagaatcacgggagctgatggtacaaaccacagttcaagaa

SEQ ID NO: 329761 - DNA, 2334 bp, Homo sapiens
gcggccgcgccacctgcggcggcggcggcggcctcgggcgggtgggggcagcgctcccgctccgcccccggcccccgctgcccgcgtcccctgccaggcccctcctcccggcggcgcggcagagccaggccccagcgctcggccggccgcgagcccgccggccggggacgagcgtcgcagctcatgctgatcgctgtcctcctcctccccctcaggcggcgctggcggcggccctgggacccgcggaagccggcatgctggagaagctggagttcgaggacgaagcagtagaagactcagaaagtggtgtttacatgcgattcatgaggtcacacaagtgttatgacatcgttccaaccagttcaaagcttgttgtctttgatactacattacaagttaaaaaggccttctttgctttggtagccaacggtgtccgagcagcgccactgtgggagagtaaaaaacaaagttttgtaggaatgctaacaattacagatttcataaatatactacatagatactataaatcacctatggtacagatttatgaattagaggaacataaaattgaaacatggagggagctttatttacaagaaacatttaagcctttagtgaatatatctccagatgcaagcctcttcgatgctgtatactccttgatcaaaaataaaatccacagattgcccgttattgaccctatcagtgggaatgcactttatatacttacccacaaaagaatcctcaagttcctccagctttttatgtctgatatgccaaagcctgccttcatgaagcagaacctggatgagcttggaataggaacgtaccacaacattgccttcatacatccagacactcccatcatcaaagccttgaacatatttgtggaaagacgaatatcagctctgcctgttgtggatgagtcaggaaaagttgtagatatttattccaaatttgatgtaattaatcttgctgctgagaaaacatacaataacctagatatcacggtgacccaggcccttcagcaccgttcacagtattttgaaggtgttgtgaagtgcaataagctggaaatactggagaccatcgtggacagaatagtaagagctgaggtccatcggctggtggtggtaaatgaagcagatagtattgtgggtattatttccctgtcggacattctgcaagccctgatcctcacaccagcaggtgccaaacaaaaggagacagaaacggagtgaccgccgtgaatgtagacgccctaggaggagaacttgaacaaagtctctgggtcacgttttgcctcatgaacactggctgcaagtggttaagaatgtatatcagggtttaacgataggtatttcttccagtgatgttgaaattaagcttaaaaaagaaagattttatgtgcttgaagattcaggcttgcattaaaagactgttttcagacctttgtctgaaggattttaaatgctgtatgtcattaaagtgcactgtgtcctgaagttttcattatttttcatttcaaagaattcactggtatggaacaggtgatgtggcataaggtgagtgcacggtatgttcagatcacagtgccttatgtccgaatacagcaatatgtcaccgccgcagccggggcgcacgcgtgtgaaacaacaccgagcttgaatgtggaagtctttgaaccttttaccaaatcagtttgttttctttagatttgtcaaaaagttgtaatttgaatataaataattactttaaaattgtaatgacacttttacacgtaagtgttttgttctgggctaccgtgtcaacgaggctgctttacaacagctttatttatttttactttcatgcaatttttttacacatcttttggtggagtaaacttcaccacatccatgaataaactctcagttattttgaaatggcaaatttctcattatttaagtttggatctggaaaggacatgacttctgaaatagccgctgctgggttttaaaagctgaggtctctcaaagtgtggaggagacgttgccgtcaggcgggagccaagtgccgggaagatgtctattttttttcttgtgtattgaaatgtaaaatcatgatgtttgttatgactgctgatgcgattgtttttgtaaattttattgtggcatatacagtattgtcatacagttgaagagaaacaatgtttcctaatgtaagtgctctgaaaatgttgacactgtatatatatatatgaggatagtttgtttttttttgttttgggttttttttttttcagattgaaaaattaaaataaatcctactatctaccattttgttaaaaaaaaa

SEQ ID NO: 329762 - DNA, 2893 bp, Homo sapiens
gcggctccagtccgaaggcagcggccgggggagggaaggaggggaccgaacccccgaggagtttcgcagaatcaacttctggttagagttatgggaagcgcggttatggacaccaagaagaaaaaagatgtttccagccccggcgggagcggcggcaagaaaaatgccagccagaagaggcgttcgctgcgcgtgcacattccggacctgagctccttcgccatgccgctcctggacggagacctggagggttccggaaagcattcctctcgaaaggtggacagccccttcggcccgggcagcccctccaaagggttcttctccagaggcccccagccccggccctccagccccatgtctgcacctgtgaggcccaagaccagccccggctctcccaaaaccgtgttcccgttctcctaccaggagtccccgccacgctcccctcgacgcatgagcttcagtgggatcttccgctcctcctccaaagagtcttcccccaactccaaccctgctacctcgcccgggggcatcaggtttttctcccgctccagaaaaacctccggcctctcctcctctccgtcaacacccacccaagtgaccaagcagcacacgtttcccctggaatcctataagcacgagcctgaacggttagagaatcgcatctatgcctcgtcttcccccccggacacagggcagaggttctgcccgtcttccttccagagcccgaccaggcctccactggcatcaccgacacactatgctccctccaaagccgcggcgctggcggcggccctgggacccgcggaagccggcatgctggagaagctggagttcgaggacgaagcagtagaagactcagaaagtggtgtttacatgcgattcatgaggtcacacaagtgttatgacatcgttccaaccagttcaaagcttgttgtctttgatactacattacaagttaaaaaggccttctttgctttggtagccaacggtgtccgagcagcgccactgtgggagagtaaaaaacaaagttttgtaggaatgctaacaattacagatttcataaatatactacatagatactataaatcacctatggtacagatttatgaattagaggaacataaaattgaaacatggagggagctttatttacaagaaacatttaagcctttagtgaatatatctccagatgcaagcctcttcgatgctgtatactccttgatcaaaaataaaatccacagattgcccgttattgaccctatcagtgggaatgcactttatatacttacccacaaaagaatcctcaagttcctccagctttttatgtctgatatgccaaagcctgccttcatgaagcagaacctggatgagcttggaataggaacgtaccacaacattgccttcatacatccagacactcccatcatcaaagccttgaacatatttgtggaaagacgaatatcagctctgcctgttgtggatgagtcaggaaaagttgtagatatttattccaaatttgatgtaattaatcttgctgctgagaaaacatacaataacctagatatcacggtgacccaggcccttcagcaccgttcacagtattttgaaggtgttgtgaagtgcaataagctggaaatactggagaccatcgtggacagaatagtaagagctgaggtccatcggctggtggtggtaaatgaagcagatagtattgtgggtattatttccctgtcggacattctgcaagccctgatcctcacaccagcaggtgccaaacaaaaggagacagaaacggagtgaccgccgtgaatgtagacgccctaggaggagaacttgaacaaagtctctgggtcacgttttgcctcatgaacactggctgcaagtggttaagaatgtatatcagggtttaacgataggtatttcttccagtgatgttgaaattaagcttaaaaaagaaagattttatgtgcttgaagattcaggcttgcattaaaagactgttttcagacctttgtctgaaggattttaaatgctgtatgtcattaaagtgcactgtgtcctgaagttttcattatttttcatttcaaagaattcactggtatggaacaggtgatgtggcataaggtgagtgcacggtatgttcagatcacagtgccttatgtccgaatacagcaatatgtcaccgccgcagccggggcgcacgcgtgtgaaacaacaccgagcttgaatgtggaagtctttgaaccttttaccaaatcagtttgttttctttagatttgtcaaaaagttgtaatttgaatataaataattactttaaaattgtaatgacacttttacacgtaagtgttttgttctgggctaccgtgtcaacgaggctgctttacaacagctttatttatttttactttcatgcaatttttttacacatcttttggtggagtaaacttcaccacatccatgaataaactctcagttattttgaaatggcaaatttctcattatttaagtttggatctggaaaggacatgacttctgaaatagccgctgctgggttttaaaagctgaggtctctcaaagtgtggaggagacgttgccgtcaggcgggagccaagtgccgggaagatgtctattttttttcttgtgtattgaaatgtaaaatcatgatgtttgttatgactgctgatgcgattgtttttgtaaattttattgtggcatatacagtattgtcatacagttgaagagaaacaatgtttcctaatgtaagtgctctgaaaatgttgacactgtatatatatatatgaggatagtttgtttttttttgttttgggttttttttttttcagattgaaaaattaaaataaatcctactatctaccattttgttaaaaaaaaa

SEQ ID NO: 329763 - DNA, 2717 bp, Homo sapiens
ttcaggacttcctctttcaggcccggcttgcaagagcgctagggccaagctcctttcagccctaatcggtactggagctaatcgcattcgcggcgcccgtgcactctgcagggatgggccgtggggccagggacctcagtcccctctcggcctgtcctgcccttccaggaggctagcggctgctggccgcgcagcctgccaacctgagttggccatagtagagtctcagatacccagctcctgagcggccagggccagattcagggtgtgtacgtttttggcagcggctccccaaccgagaagacactcggctgcgaagagaggacgcgaattaagagttccatgctggaaaaaaaaaaatggatagcgacaaagtgcatctacaatacgtgtagcccacggaacgatttttgttaagggggccgaggatgggcagttacatctaaaatttggaaagggaagaggaaagcgagaaaggatcccctagctggcgccccggggcgttctgcagcctccagcccctctccccctccccgcgccgcggagcccacacctgcgcaggtggagcctgccgagcgcggccgccggtgctgggaaggcggcgctggcggcggccctgggacccgcggaagccggcatgctggagaagctggagttcgaggacgaagcagtagaagactcagaaagtggtgtttacatgcgattcatgaggtcacacaagtgttatgacatcgttccaaccagttcaaagcttgttgtctttgatactacattacaagttaaaaaggccttctttgctttggtagccaacggtgtccgagcagcgccactgtgggagagtaaaaaacaaagttttgtaggaatgctaacaattacagatttcataaatatactacatagatactataaatcacctatggtacagatttatgaattagaggaacataaaattgaaacatggagggagctttatttacaagaaacatttaagcctttagtgaatatatctccagatgcaagcctcttcgatgctgtatactccttgatcaaaaataaaatccacagattgcccgttattgaccctatcagtgggaatgcactttatatacttacccacaaaagaatcctcaagttcctccagctttttatgtctgatatgccaaagcctgccttcatgaagcagaacctggatgagcttggaataggaacgtaccacaacattgccttcatacatccagacactcccatcatcaaagccttgaacatatttgtggaaagacgaatatcagctctgcctgttgtggatgagtcaggaaaagttgtagatatttattccaaatttgatgtaattaatcttgctgctgagaaaacatacaataacctagatatcacggtgacccaggcccttcagcaccgttcacagtattttgaaggtgttgtgaagtgcaataagctggaaatactggagaccatcgtggacagaatagtaagagctgaggtccatcggctggtggtggtaaatgaagcagatagtattgtgggtattatttccctgtcggacattctgcaagccctgatcctcacaccagcaggtgccaaacaaaaggagacagaaacggagtgaccgccgtgaatgtagacgccctaggaggagaacttgaacaaagtctctgggtcacgttttgcctcatgaacactggctgcaagtggttaagaatgtatatcagggtttaacgataggtatttcttccagtgatgttgaaattaagcttaaaaaagaaagattttatgtgcttgaagattcaggcttgcattaaaagactgttttcagacctttgtctgaaggattttaaatgctgtatgtcattaaagtgcactgtgtcctgaagttttcattatttttcatttcaaagaattcactggtatggaacaggtgatgtggcataaggtgagtgcacggtatgttcagatcacagtgccttatgtccgaatacagcaatatgtcaccgccgcagccggggcgcacgcgtgtgaaacaacaccgagcttgaatgtggaagtctttgaaccttttaccaaatcagtttgttttctttagatttgtcaaaaagttgtaatttgaatataaataattactttaaaattgtaatgacacttttacacgtaagtgttttgttctgggctaccgtgtcaacgaggctgctttacaacagctttatttatttttactttcatgcaatttttttacacatcttttggtggagtaaacttcaccacatccatgaataaactctcagttattttgaaatggcaaatttctcattatttaagtttggatctggaaaggacatgacttctgaaatagccgctgctgggttttaaaagctgaggtctctcaaagtgtggaggagacgttgccgtcaggcgggagccaagtgccgggaagatgtctattttttttcttgtgtattgaaatgtaaaatcatgatgtttgttatgactgctgatgcgattgtttttgtaaattttattgtggcatatacagtattgtcatacagttgaagagaaacaatgtttcctaatgtaagtgctctgaaaatgttgacactgtatatatatatatgaggatagtttgtttttttttgttttgggttttttttttttcagattgaaaaattaaaataaatcctactatctaccattttgttaaaaaaaaa

SEQ ID NO: 329764 - DNA, 2115 bp, Homo sapiens
gcggccgcgccacctgcggcggcggcggcggcctcgggcgggtgggggcagcgctcccgctccgcccccggcccccgctgcccgcgtcccctgccaggcccctcctcccggcggcgcggcagagccaggccccagcgctcggccggccgcgagcccgccggccggggacgagcgtcgcagctcatgctgatcgctgtcctcctcctccccctcaggcggcgctggcggcggccctgggacccgcggaagccggcatgctggagaagctggagttcgaggacgaagcagtagaagactcagaaagtggtgtttacatgcgattcatgaggtcacacaagtgttatgacatcgttccaaccagttcaaagcttgttgtctttgatactacattacaagttaaaaaggccttctttgctttggtagccaacggtgtccgagcagcgccactgtgggagagtaaaaaacaaagttttgtaggaatgctaacaattacagatttcataaatatactacatagatactataaatcacctatggtacagatttatgaattagaggaacataaaattgaaacatggagggagctttatttacaagaaacatttaagcctttagtgaatatatctccagatgcaagcctcttcgatgctgtatactccttgatcaaaaataaaatccacagattgcccgttattgaccctatcagtgggaatgcactttatatacttacccacaaaagaatcctcaagttcctccagctttttatgtctgatatgccaaagcctgccttcatgaagcagaacctggatgagcttggaataggagcgatctctaaaagtttgttgaattgaattgaatggaaaagtcctggtatcataggtgaatccaataaactggtccatcggctggtggtggtaaatgaagcagatagtattgtgggtattatttccctgtcggacattctgcaagccctgatcctcacaccagcaggtgccaaacaaaaggagacagaaacggagtgaccgccgtgaatgtagacgccctaggaggagaacttgaacaaagtctctgggtcacgttttgcctcatgaacactggctgcaagtggttaagaatgtatatcagggtttaacgataggtatttcttccagtgatgttgaaattaagcttaaaaaagaaagattttatgtgcttgaagattcaggcttgcattaaaagactgttttcagacctttgtctgaaggattttaaatgctgtatgtcattaaagtgcactgtgtcctgaagttttcattatttttcatttcaaagaattcactggtatggaacaggtgatgtggcataaggtgagtgcacggtatgttcagatcacagtgccttatgtccgaatacagcaatatgtcaccgccgcagccggggcgcacgcgtgtgaaacaacaccgagcttgaatgtggaagtctttgaaccttttaccaaatcagtttgttttctttagatttgtcaaaaagttgtaatttgaatataaataattactttaaaattgtaatgacacttttacacgtaagtgttttgttctgggctaccgtgtcaacgaggctgctttacaacagctttatttatttttactttcatgcaatttttttacacatcttttggtggagtaaacttcaccacatccatgaataaactctcagttattttgaaatggcaaatttctcattatttaagtttggatctggaaaggacatgacttctgaaatagccgctgctgggttttaaaagctgaggtctctcaaagtgtggaggagacgttgccgtcaggcgggagccaagtgccgggaagatgtctattttttttcttgtgtattgaaatgtaaaatcatgatgtttgttatgactgctgatgcgattgtttttgtaaattttattgtggcatatacagtattgtcatacagttgaagagaaacaatgtttcctaatgtaagtgctctgaaaatgttgacactgtatatatatatatgaggatagtttgtttttttttgttttgggttttttttttttcagattgaaaaattaaaataaatcctactatctaccattttgttaaaaaaaaa

SEQ ID NO: 329765 - DNA, 2588 bp, Homo sapiens
  misc_feature (2074)..(2074): n is a, c, g, or t
  misc_feature (2077)..(2078): n is a, c, g, or t
  misc_feature (2081)..(2082): n is a, c, g, or t
  misc_feature (2089)..(2089): n is a, c, g, or t
  misc_feature (2106)..(2106): n is a, c, g, or t
  misc_feature (2111)..(2113): n is a, c, g, or t
  misc_feature (2116)..(2118): n is a, c, g, or t
  misc_feature (2121)..(2121): n is a, c, g, or t
  misc_feature (2135)..(2136): n is a, c, g, or t
  misc_feature (2143)..(2144): n is a, c, g, or t
  misc_feature (2146)..(2146): n is a, c, g, or t
  misc_feature (2151)..(2152): n is a, c, g, or t
  misc_feature (2157)..(2157): n is a, c, g, or t
  misc_feature (2163)..(2163): n is a, c, g, or t
  misc_feature (2167)..(2167): n is a, c, g, or t
  misc_feature (2169)..(2169): n is a, c, g, or t
  misc_feature (2470)..(2470): n is a, c, g, or t
  misc_feature (2475)..(2476): n is a, c, g, or t
  misc_feature (2484)..(2486): n is a, c, g, or t
  misc_feature (2491)..(2491): n is a, c, g, or t
  misc_feature (2499)..(2499): n is a, c, g, or t
  misc_feature (2516)..(2516): n is a, c, g, or t
  misc_feature (2523)..(2523): n is a, c, g, or t
  misc_feature (2540)..(2541): n is a, c, g, or t
  misc_feature (2549)..(2550): n is a, c, g, or t
  misc_feature (2559)..(2560): n is a, c, g, or t
  misc_feature (2563)..(2563): n is a, c, g, or t
  misc_feature (2570)..(2571): n is a, c, g, or t
gcggccgcgccacctgcggcggcggcggcggcctcgggcgggtgggggcagcgctcccgctccgcccccggcccccgctgcccgcgtcccctgccaggcccctcctcccggcggcgcggcagagccaggccccagcgctcggccggccgcgagcccgccggccggggacgagcgtcgcagctcatgctgatcgctgtcctcctcctccccctcaggcggcgctggcggcggccctgggacccgcggaagccggcatgctggagaagctggagttcgaggacgaagcagtagaagactcagaaagtggtgtttacatgcgattcatgaggtcacacaagtgttatgacatcgttccaaccagttcaaagcttgttgtctttgatactacattacaagttaaaaaggccttctttgctttggtagccaacggtgtccgagcagcgccactgtgggagagtaaaaaacaaagttttgtaggaatgctaacaattacagatttcataaatatactacatagatactataaatcacctatggtacagatttatgaattagaggaacataaaattgaaacatggaggggtaagcactattggatgtttaaaatcttttagtatcgggaaagctatgtttagtatgaaaagtatgttttcattttgcagatccttttctctctgctccataaaatgttatataaaacattctctttatttctgttaattttgatagtatgctactgtactaaagctgaacaatataagtattgtcccttctgtttatagacatgtataggacaccttcagcaggcaaggccttatcctagggccaggaatgtgaagatgaatgagctaaccaagccccacctcgctgcccacaatggggccaccgctcactactaagtctaagccctcagagatttgccttggtattaagaaatgcatcagaggcatgcctaacttgaaccaaagcaagcatctgttcttatttaaacctagtaattgtttctttacaaattgtggagaaacttaggacaaatgaacctcaaactagatggtttggagcaaatagcatggaagtaatttgaagaccatattctcttcattgtcacattgacattcaccctgtaaaatcatgatactcttttctgccatagaaccatttcttaaattcgcatttcatgattgtaaggtggtggtctcactgacacttgtcatggtgggttggtggagaggaccgggggtgggaatcacggcagacccagtctgtctgcaacagcggagcctttggagggtgctcaaggaaacactggtagaaatggagggaccaactgaaggaaaattttgaattcaaaattgaagagtttggttctgtgtttcccataatatgcttgataggagaagcaacctttgtaactggctgtgaaatcagaatacatcttggagttctcttacacccccaggggccctttcaaatccatacgatttagaagtttcactgagtgatgggtttggtttattacggctttgtcaaaccaagctaaacaaatttggcatgggatctgtacagtctgttgtgcagtgattgtgtaacaccagcttcttgtccagttctactgtacaagtactgatagaccaaggtttaagtatgtttacgttttgacattacatgatattttgtagtaataataatgccaaaatattcttaaacgccttctgtatagaaactttggtaaagcaaggccaggtgcggtggctcacacctgtaatcccagcactttgggaggccaaagcaggtggatcacttgagatcaggagttcaagaccagcctgaccaacatggtgaaaccctctctctactaaaaatacaaaattagagccaggcgcagtagctcacgcctataatcccagcactttgggaagccgaggcgggtggatcacctgaggtcaggagttcgagaccagcctagccaacatggtgaaaccctgtctctactaaaaatacaaaaaagtagccaggcgtggtggtgcgcacctgtactcccagctactcgggaggctgaggcaggagactcgcntgnnccnnggaggcngaggttgcagtgagccnagatnnngcnnntgnactccagcctgggnnacagagnnanactcnntctcnaaaaanaaananaaccatactcttaggaagttttaccaaagattttgtaaatatcctgtatttatttcccatgaagtgtattatttcttcaatattaccaatgcaagtgaacacgggctttccttatagtggtcatatctctgcttttgaactagcaaaatcagcatgagtgtgatttttgaatagatagatttctgtgaaatgcagcaaatcccatataagaaatcttagcagtagaatatgaaatcaaaattgcaaaaaagcagttatgtctaaatatgcagcccaaagtttttcttaatatctgtagatnaggcnnggcacagnnnctcangcctgtantcccagcactttgggangctgagnaggtggatcacttgagnncaggagtnngagaccagnnggncaacatnntgaaaccccatctctac

SEQ ID NO: 329766 - DNA, 364 bp, Homo sapiens
atcacttgaggtcaggagttcgagacgagcttagccaacatggtgaaaccctgtttctaccaaaaatacaaaaattagccgggcatggtggcacatgcctgtcatcccagctactcgggaggctgaggtgagagaatcaattgagcccaggaagcagaggttgctgtgagccaagatggtgccactgcactccagcctgggcaacagagtgaaaccttgtctcaaaaaaaaaaggtatttttcttcctggactttgaaagtatgttttgtttctcctctttttcttcaggttaaaaaggccttctttgctttggtagccaacggtgtccgagcagcgccactgtgggagagtaaaaaacaaagt

SEQ ID NO: 329767 - DNA, 545 bp, Homo sapiens
aataaaatccacagattgcccgttattgaccctatcagtgggaatgcactttatatacttacccacaaaagaatcctcaagttcctccagctttttgtaagtagtttttagcgtttctaaagacataattgcatttacttattaaataatgtacttcaagtaaattggctcctgttaccctcagtagaagaaattgttagttttgaggtctccctttctaaacttcagtttctcaacttactactctctgaattgtacattcttaaagttgattccaatttaaaagaatcaccttttagtgcaagtatcaaaacaattttaacaacaaaactcggcattctctctttaaattaaaacatttgtcaccagcatatgaggggaaataaggcaatctgcaagtctaattgaggactgttgtacaagataaactgaactaatatctagagcaaaaattgctttatgttgcttttactggtgtcatggttttagaaacatgttccaaaaaatgctttcctcaagattatcttataaactgcagcagtgat

SEQ ID NO: 329768 - DNA, 509 bp, Homo sapiens
ccttgttccccagggagcttgttgagaaggtccgttgctgcagcatttctagccctgtggcactcaccaccctttacagatgtcagcccaccttgccagagatttcatccatgcatggtagagagcattagagggtaaaaattggggggcagtctttggcaggatatactgtcaaagtttaacaatgttgcttcgtaaggaaggtagaccttgtaacatggttatctttaattgtgattgatatgttgacaaaataacagtagcaatggcatgtcgtaagccagaaagaacgtctgatgtatgcaggtactaaattcagataagcattaaagtttttagaaatcaggctctcttaagctcactaattttggtcattgaagtgaactgaaatgaaaggatataatttattctcttgcttcattacagaatcttgctgctgagaaaacatacaataacctagatatcacggtgacccaggcccttcagcaccgttcacagtattttgaagg

SEQ ID NO: 329769 - DNA, 1964 bp, Homo sapiens
acgcatcgagctcggcaccctacaagttaaaaaggccttctttgctttggtagccaacggtgtccgagcagcgccactgtgggagagtaaaaaacaaagttttgtaggaatgctaacaattacagatttcataaatatactacatagatactataaatcacctatggtacagatttatgaattagaggaacataaaattgaaacatggagggagctttatttacaagaaacatttaagcctttagtgaatatatctccagatgcaagcctcttcgatgctgtatactccttgatcaaaaataaaatccacagattgcccgttattgaccctatcagtgggaatgcactttatatacttacccacaaaagaatcctcaagttcctccagctttttatgtctgatatgccaaagcctgccttcatgaagcagaacctggatgagcttggaataggaacgtaccacaacattgccttcatacatccagacactcccatcatcaaagccttgaacatatttgtggaaagacgaatatcagctctgcctgttgtggatgagtcaggaaaagttgtagatatttattccaaatttgatgtaattaatcttgctgctgagaaaacatacaataacctagatatcacggtgacccaggcccttcagcaccgttcacagtattttgaaggtgttgtgaagtgcaataagctggaaatactggagaccatcgtggacagaatagtaagagctgaggtccatcggctggtggtggtaaatgaagcagatagtattgtgggtattatttccctgtcggacattctgcaagccctgatcctcacaccagcaggtgccaaacaaaaggagacagaaacggagtgaccgccgtgaatgtagacgccctaggaggagaacttgaacaaagtctctgggtcacgttttgcctcatgaacactggctgcaagtggttaagaatgtatatcagggtttaacgataggtatttcttccagtgatgttgaaattaagcttaaaaaagaaagattttatgtgcttgaagattcaggcttgcattaaaagactgttttcagacctttgtctgaaggattttaaatgctgtatgtcattaaagtgcactgtgtcctgaagttttcattatttttcatttcaaagaattcactggtatggaacaggtgatgtggcataaggtgagtgcacggtatgttcagatcacagtgccttatgtccgaatacagcaatatgtcaccgccgcagccggggcgcacgcgtgtgaaacaacaccgagcttgaatgtggaagtctttgaaccttttaccaaatcagtttgttttctttagatttgtcaaaaagttgtaatttgaatataaataattactttaaaattgtaatgacacttttacacgtaagtgttttgttctgggctaccgtgtcaacgaggctgctttacaacagctttatttatttttactttcatgcaatttttttacacatcttttggtggagtaaacttcaccacatccatgaataaactctcagttattttgaaatggcaaatttctcattatttaagtttggatctggaaaggacatgacttctgaaatagccgctgctgggttttaaaagctgaggtctctcaaagtgtggaggagacgttgccgtcaggcgggagccaagtgccgggaagatgtctattttttttcttgtgtattgaaatgtaaaatcatgatgtttgttatgactgctgatgcgattgtttttgtaaattttattgtggcatatacagtattgtcatacagttgaagagaaacaatgtttcctaatgtaagtgctctgaaaatgttgacactgtatatatatatatgaggatagtttgtttttttttgttttgggttttttttttttcagattgaaaaattaaaataaatcctactatctaccattttgttaaaaaaaaa

SEQ ID NO: 329770 - DNA, 1841 bp, Homo sapiens
gcggccgcgccacctgcggcggcggcggcggcctcgggcgggtgggggcagcgctcccgctccgcccccggcccccgctgcccgcgtcccctgccaggcccctcctcccggcggcgcggcagagccaggccccagcgctcggccggccgcgagcccgccggccggggacgagcgtcgcagctcatgctgatcgctgtcctcctcctccccctcaggcggcgctggcggcggccctgggacccgcggaagccggcatgctggagaagctggagttcgaggacgaagcagtagaagactcagaaagtggtgtttacatgcgattcatgaggtcacacaagtgttatgacatcgttccaaccagttcaaagcttgttgtctttgatactacattacaagttaaaaaggccttctttgctttggtagccaacggtgtccgagcagcgccactgtgggagagtaaaaaacaaagttttgtaggaatgctaacaattacagatttcataaatatactacatagatactataaatcacctatggtacagatttatgaattagaggaacataaaattgaaacatggagggagctttatttacaagaaacatttaagcctttagtgaatatatctccagatgcaagcctcttcgatgctgtatactccttgatcaaaaataaaatccacagattgcccgttattgaccctatcagtgggaatgcactttatatacttacccacaaaagaatcctcaagttcctccagctttttatgtctgatatgccaaagcctgccttcatgaagcagaacctggatgagcttggaataggaacgtaccacaacattgccttcatacatccagacactcccatcatcaaagccttgaacatatttgtggaaagacgaatatcagctctgcctgttgtggatgagtcaggaaaagttgtagatatttattccaaatttgatgtaattaatcttgctgctgagaaaacatacaataacctagatatcacggtgacccaggcccttcagcaccgttcacagtattttgaaggtgttgtgaagtgcaataagctggaaatactggagaccatcgtggacagaatagtaagagctgaggtccatcggctggtggtggtaaatgaagcagatagtattgtgggtattatttccctgtcggacattctgcaagccctgatcctcacaccagcaggtgccaaacaaaaggagacagaaacggagtgaccgccgtgaatgtagacgccctaggaggagaacttgaacaaagtctctgggtcacgttttgcctcatgaacactggctgcaagtggttaagaatgtatatcagggtttaacgataggtatttcttccagtgatgttgaaattaagcttaaaaaagaaagattttatgtgcttgaagattcaggcttgcattaaaagactgttttcagacctttgtctgaaggattttaaatgctgtatgtcattaaagtgcactgtgtcctgaagttttcattatttttcatttcaaagaattcactggtatggaacaggtgatgtggcataaggtgagtgcacggtatgttcagatcacagtgccttatgtccgaatacagcaatatgtcaccgccgcagccggggcgcacgcgtgtgaaacaacaccgagcttgaatgtggaagtctttgaaccttttaccaaatcagtttgttttctttagatttgtcaaaaagttgtaatttgaatataaataattactttaaaattgtaatgacacttttacacgtaagtgttttgttctgggctgccttgggcggctgccattgggcacggctgccattggtgt

SEQ ID NO: 329771 - DNA, 544 bp, Homo sapiens
cctcagacatcatctaaaaggactggacctacatctgcagttaactgcacaatggaagaaacggcctctcctgggcagcctcatggatggggtgaagagacaaagcttgggagtgtagcatgttgagcacatctgctcagaggtaacatttaagcatttaggttgtctccaagcataaaaatggaaatactgatcctgtgacaacacagcctgaattttctgctttgcagatgccagatttatttttaaatggtgtgaatcaaatctgtgctgagaggccaacttcaaaatataaaagaaaaattggcaatgggaggattgtgctggtttggctgaaatgaagtgctctacggcatttcattctagtggagcgtctgactgtgaaaatccttccaattgtaattttctttggcttgtcaaaagaggattatgaactaaagtcagtgttgcaggaaatgtcacctgtcctttgaaagaaaataataaatcaaaatggcttttgttcatcatgtttaaaatgaaaaaaaaaaaaaagttgatccac

SEQ ID NO: 329772 - DNA, 2162 bp, Homo sapiens
cctgcggcaaagaaccgggctgtgtccaaagtgttctctggaagttgtagttcctgtattggtgaggcaaggaggaggcggagtgactcggcggccattagctgtgtgtagttgcccgggactaggagcttaagtgaagaggtacgccttgttcggtggaaatcagccgtagccatgagtttctgccggggctagccctagagtacggagcaggcggacttttcggttccccgccccgccaggtggcggggcctactaggcctccgggcatccccggtctcaagtaggcctcatctgccggcaagggcgcccgaaacgcgggaggcgccatgtcgctggttgcttacgccagcagcgatgagagcgagccggatgaggctgagcccgagccggaggaagaggaggcggtggctcctacatctgggcccgctttagggggcttgttcgcttctctccctgcgcccaagggtccggccttgctgcctccgccccctcagatgctggcgccagcctttcccccgccgctgttgcttcccccacccaccggagaccccaggcttcagcctcctccccccttgcccttcggcctgggaggcttccccccacctccaggcgtgagcccggctgaagcggcgggagttggggagggactgggattggggttgccctcgccccgaggccctggcctcaatctgccccctccaattggcggtgccggtcccccgctggggcttcccaagccaaagaagaggaaagagcccgtgaagatcgcggcgccggagttgcataagggagattcagattctgaggaagatgaacccacaaagaagaaaactatccttcagggatccagtgaggggactggtttgtctgccttgcttccccaacctaaaaacctgactgtgaaagagactaacaggttgctcctgccccatgccttctcccgcaaaccctcggatggctcccctgatactaagccctccagactggcttctaagaccaagacttcctctcttgcccctgttgtgggcaccacaaccaccactccgtcgccctctgctatcaaggctgctgccaagagtgctgccctgcaggtgacaaagcagatcacgcaggaagaagacgacagtgatgaggaagtagcccccgaaaactttttctccctccctgaaaaggctgagccacctggagttgagccatacccttaccccatccccactgtccctgaagagctgcctccaggcacggaaccagagccggctttccaggacgatgcagccaatgccccccttgaattcaagatggcagcaggttcaagtggggccccttggatgcctaagcctggggacgactacagctacaatcagttttccacatatggcgatgccaatgccgctggtgcttattatcaggattattacagtggtggctactatcctgcacaggacccggccctggtccccccccaggaaattgccccagatgcctccttcatcgatgacgaagcatttaagcggctgcagggcaagaggaaccgagggagagaagaaatcaactttgtggagatcaaaggtgatgaccagctcagtggggcccagcaatggatgactaagtcattgacagaagagaaaaccatgaagtcattcagcaaaaagaaaggtgagcagccaacaggccagcagcggcggaaacaccagatcacatatcttattcatcaggccaaggagcgggagctggaactgaagaacacctggtcagagaacaagctcagccgccgtcagacccaagccaaatatggattctagggctctggaactgattgctcccaggatctcctgccagcccagctggcctggcccccagcttcacctctgggaccccagctgctctaagcccaggatctctttccccaaggacccagccctcgcctctgcgagaatgaacatatttgatagatttttcttaacaagttagaaaattcagctcctttctgtcctggagctagcaaagacttgtgtgatgcctccgaaggggctctgagttctggggtgggagttttgctctctgtcaggtgtgataaaatgttgaaccctccccaccaccacttttttttttttaaaccagggatgtctgttgaaataaaacattcagtctgacaaaca

SEQ ID NO: 329773 - DNA, 669 bp, Homo sapiens
cctgcggcaaagaaccgggctgtgtccaaagtgttctctggaagttgtagttcctgtattggtgaggcaaggaggaggcggagtgactcggcggccattagctgtgtgtagttgcccgggactaggagcttaagtgaagaggtacgccttgttcggtggaaatcagccgtagccatgagtttctgccggggctagccctagagtacggagcaggcggacttttcggttccccgccccgccaggtggcggggcctactaggcctccgggcatccccggtctcaagtaggcctcatctgccggcaagggcgcccgaaacgcgggaggcgccatgtcgctggttgcttacgccagcagcgatgagagcgagccggatgaggctgagcccgagccggaggaagaggaggcggtggctcctacatctgggcccgctttagggggcttgttcgcttctctccctgcgcccaagggtccggccttgctgcctccgccccctcagatgctggcgccagcctttcccccggcgtttgtgctcccatcaggctacatctatatcattactggaaccgagttttcatttgcacattcaccttacatgtttaagggcctaaccaatcctgggaagttttactgtgtcctttaccttttattggttaaggctttttactttg

SEQ ID NO: 329774 - DNA, 2335 bp, Homo sapiens
cctgcggcaaagaaccgggctgtgtccaaagtgttctctggaagttgtagttcctgtattggtgaggcaaggaggaggcggagtgactcggcggccattagctgtgtgtagttgcccgggactaggagcttaagtgaagaggtacgccttgttcggtggaaatcagccgtagccatgagtttctgccggggctagccctagagtacggagcaggcggacttttcggttccccgccccgccaggtggcggggcctactaggcctccgggcatccccggtctcaagtaggcctcatctgccggcaagggcgcccgaaacgcgggaggcgccatgtcgctggttgcttacgccagcagcgatgagagcgagccggatgaggctgagcccgagccggaggaagaggaggcggtggctcctacatctgggcccgctttagggggcttgttcgcttctctccctgcgcccaagggtccggccttgctgcctccgccccctcagatgctggcgccagcctttcccccgccgctgttgcttcccccacccaccggagaccccaggcttcagcctcctccccccttgcccttcggcctgggaggcttccccccacctccaggcgtgagcccggctgaagcggcgggagttggggagggactgggattggggttgccctcgccccgaggccctggcctcaatctgccccctccaattggcggtgccggtcccccgctggggcttcccaagccaaagaagaggaaagagcccgtgaagatcgcggcgccggagttgcataagggagattcagattctgaggaagatgaacccacaaagaagaaaactatccttcagggatccagtgaggggactggtttgtctgccttgcttccccaacctaaaaacctgactgtgaaagagactaacaggttgctcctgccccatgccttctcccgcaaaccctcggatggctcccctgatactaagccctccagactggcttctaagaccaagacttcctctcttgcccctgttgtgggcaccacaaccaccactccgtcgccctctgctatcaaggctgctgccaagagtgctgccctgcaggtgacaaagcagatcacgcaggaagaagacgacagtgatgaggaagtagcccccgaaaactttttctccctccctgaaaaggctgagccacctggagttgagccatacccttaccccatccccactgtccctgaagagctgcctccaggcacggaaccagagccggctttccaggacgatgcagccaatgccccccttgaattcaagatggcagcaggttcaagtggggccccttggatgcctaagcctggggacgactacagctacaatcagttttccacatatggcgatgccaatgccgctggtgcttattatcaggattattacagtggtggctactatcctgcacaggacccggccctggtccccccccaggaaattgccccagatgcctccttcatcgatgacgaagcatttaagcggctgcagggcaagaggaaccgagggagagaagaaatcaactttgtggagatcaaaggtgatgaccagctcagtggggcccagcaatggatgactaagtcattgacagaagagaaaaccatgaagtcattcagcaaaaagaaaggtgagcagccaacaggccagcagcggcggaaacaccagatcacatatcttattcatcaggccaaggagcgggagctggaactgaagaacacctggtcagagaacaagctcagccgccgtcagacccaagccaaatatggattctagggctctggaactgattgctcccaggatctcctgccagcccagctggcctggcccccagcttcacctctgggaccccagctgctctaagcccaggatctctttccccaaggacccagccctcgcctctgcgagaatgaacatatttgatagatttttcttaacaagttagaaaattcagctcctttctgtcctggagctagcaaagacttgtgtgatgcctccgaaggggctctgagttctggggtgggagttttgctctctgtcaggtgtgataaaatgttgaaccctccccaccaccacttttttttttttaaaccagggatgtctgttgaaataaaacattcagtctgacaaacaaaaaagatacaagacaaagcaaccgagagaacaacaaacaaagcgggcggggcgacaaaaaagttccaccgggggggggcccaatttacggcggcacccagtttttcttggcaaaaagggggggcccaaaagaggggctattaaaacaagagcaggggcggtgttacacaccg

SEQ ID NO: 329775 - DNA, 2426 bp, Homo sapiens
cctgcggcaaagaaccgggctgtgtccaaagtgttctctggaagttgtagttcctgtattggtgaggcaaggaggaggcggagtgactcggcggccattagctgtgtgtagttgcccgggactaggagcttaagtgaagaggtacgccttgttcggtggaaatcagccgtagccatgagtttctgccggggctagccctagagtacggagcaggcggacttttcggttccccgccccgccaggtggcggggcctactaggcctccgggcatccccggtctcaagtaggcctcatctgccggcaagggcgcccgaaacgcgggaggcgccatgtcgctggttgcttacgccagcagcgatgagagcgagccggatgaggctgagcccgagccggaggaagaggaggcggtggctcctacatctgggcccgctttagggggcttgttcgcttctctccctgcgcccaagggtccggccttgctgcctccgccccctcagatgctggcgccagcctttcccccgccgctgttgcttcccccacccaccggagaccccaggcttcagcctcctccccccttgcccttcggcctgggaggcttccccccacctccaggcgtgagcccggctgaagcggcgggagttggggagggactgggattggggttgccctcgccccgaggccctggcctcaatctgccccctccaattggcggtgccggtcccccgctggggcttcccaagccaaagaagaggaaagagcccgtgaagatcgcggcgccggagttgcataagggagattcagattctgaggaagatgaacccacaaagaagaaaactatccttcagggatccagtgaggggactggtttgtctgccttgcttccccaacctaaaaacctgactgtgaaagagactaacaggttgctcctgccccatgccttctcccgcaaaccctcggatggctcccctgatactaagccctccagactggcttctaagaccaagacttcctctcttgcccctgttgtgggcaccacaaccaccactccgtcgccctctgctatcaaggctgctgccaagagtgctgccctgcaggtgacaaagcagatcacgcaggaagaagacgacagtgatgaggaagtagcccccgaaaactttttctccctccctgaaaaggctgagccacctggagttgagccatacccttaccccatccccactgtccctgaagagctgcctccaggcacggaaccagagccggctttccaggacgatgcagccaatgccccccttgaattcaagatggcagcaggttcaagtggggccccttggatgcctaagcctggggacgactacagctacaatcagttttccacatatggcgatgccaatgccgctggtgcttattatcaggattattacagtggtggctactatcctgcacaggacccggccctggtccccccccaggaaattgccccagatgcctccttcatcgatgacgaagcatttaagcggctgcagggcaagaggaaccgagggagagaagaaatcaactttgtggagatcaaaggtgatgaccagctcagtggggcccagcaatggatgactaagtcattgacagaagagaaaaccatgaagtcattcagcaaaaagaaaggtgagcagccaacaggccagcagcggcggaaacaccagatcacatatcttattcatcaggccaaggagcgggagctggaactgaagaacacctggtcagagaacaagctcagccgccgtcagacccaagccaaatatggattctagggctctggaactgattgctcccaggatctcctgccagcccagctggcctggcccccagcttcacctctgggaccccagctgctctaagcccaggatctctttccccaaggacccagccctcgcctctgcgagaatgaacatatttgatagatttttcttaacaagttagaaaattcagctcctttctgtcctggagctagcaaagacttgtgtgatgcctccgaaggggctctgagttctggggtgggagttttgctctctgtcaggtgtgataaaatgttgaaccctccccaccaccacttttttttttttaaaccagggatgtctgttgaaataaaacattcagtctgacaaacaaaaaacaaaaaaaaaaacaaacaaaaaaacaacaaaaaaaaaaaaacacaaaaaaaaaaaaacaaaaaacacacctcaaaaaaagagaaaaaaaacaacacgcaaaagcaaacgggggagggcgcctaccacggcgaccccacgagtgacagaaacacgaaacggagacagcgaagaacacaaagcaacgaagagaagaagccacaagaaacggacaaatgacacacaagcaaagagaagaagaaaaaaacaggagcgagaaag

SEQ ID NO: 329776 - DNA, 2258 bp, Homo sapiens
cctgcggcaaagaaccgggctgtgtccaaagtgttctctggaagttgtagttcctgtattggtgaggcaaggaggaggcggagtgactcggcggccattagctgtgtgtagttgcccgggactaggagcttaagtgaagaggtacgccttgttcggtggaaatcagccgtagccatgagtttctgccggggctagccctagagtacggagcaggcggacttttcggttccccgccccgccaggtggcggggcctactaggcctccgggcatccccggtctcaagtaggcctcatctgccggcaagggcgcccgaaacgcgggaggcgccatgtcgctggttgcttacgccagcagcgatgagagcgagccggatgaggctgagcccgagccggaggaagaggaggcggtggctcctacatctgggcccgctttagggggcttgttcgcttctctccctgcgcccaagggtccggccttgctgcctccgccccctcagatgctggcgccagcctttcccccgccgctgttgcttcccccacccaccggagaccccaggcttcagcctcctccccccttgcccttcggcctgggaggcttccccccacctccaggcgtgagcccggctgaagcggcgggagttggggagggactgggattggggttgccctcgccccgaggccctggcctcaatctgccccctccaattggcggtgccggtcccccgctggggcttcccaagccaaagaagaggaaagagcccgtgaagatcgcggcgccggagttgcataagggagattcagattctgaggaagatgaacccacaaagaagaaaactatccttcagggatccagtgaggggactggtttgtctgccttgcttccccaacctaaaaacctgactgtgaaagagactaacaggttgctcctgccccatgccttctcccgcaaaccctcggatggctcccctgatactaagccctccagactggcttctaagaccaagacttcctctcttgcccctgttgtgggcaccacaaccaccactccgtcgccctctgctatcaaggctgctgccaagagtgctgccctgcaggtgacaaagcagatcacgcaggaagaagacgacagtgatgaggaagtagcccccgaaaactttttctccctccctgaaaaggctgagccacctggagttgagccatacccttaccccatccccactgtccctgaagagctgcctccaggcacggaaccagagccggctttccaggacgatgcagccaatgccccccttgaattcaagatggcagcaggttcaagtggggccccttggatgcctaagcctggggacgactacagctacaatcagttttccacatatggcgatgccaatgccgctggtgcttattatcagggtctgcagcaacatctgggccactcgcctctaaggggaatcatgagattcctgaactcaaaatctggtaaacgaacctgctttgttcccagctttgattattacagtggtggctactatcctgcacaggacccggccctggtccccccccaggaaattgccccagatgcctccttcatcgatgacgaagcatttaagcggctgcagggcaagaggaaccgagggagagaagaaatcaactttgtggagatcaaaggtgatgaccagctcagtggggcccagcaatggatgactaagtcattgacagaagagaaaaccatgaagtcattcagcaaaaagaaaggtgagcagccaacaggccagcagcggcggaaacaccagatcacatatcttattcatcaggccaaggagcgggagctggaactgaagaacacctggtcagagaacaagctcagccgccgtcagacccaagccaaatatggattctagggctctggaactgattgctcccaggatctcctgccagcccagctggcctggcccccagcttcacctctgggaccccagctgctctaagcccaggatctctttccccaaggacccagccctcgcctctgcgagaatgaacatatttgatagatttttcttaacaagttagaaaattcagctcctttctgtcctggagctagcaaagacttgtgtgatgcctccgaaggggctctgagttctggggtgggagttttgctctctgtcaggtgtgataaaatgttgaaccctccccaccaccacttttttttttttaaaccagggatgtctgttgaaataaaacattcagtctgacaaaca

SEQ ID NO: 329777 - DNA, 1878 bp, Homo sapiens
cctgcggcaaagaaccgggctgtgtccaaagtgttctctggaagttgtagttcctgtattggtgaggcaaggaggaggcggagtgactcggcggccattagctgtgtgtagttgcccgggactaggagcttaagtgaagaggtacgccttgttcggtggaaatcagccgtagccatgagtttctgccggggctagccctagagtacggagcaggcggacttttcggttccccgccccgccaggtggcggggcctactaggcctccgggcatccccggtctcaagtaggcctcatctgccggcaagggcgcccgaaacgcgggaggcgccatgtcgctggttgcttacgccagcagcgatgagagcgagccggatgaggctgagcccgagccggaggaagaggaggcggtggctcctacatctgggcccgctttagggggcttgttcgcttctctccctgcgcccaagggtccggccttgctgcctccgccccctcagatgctggcgccagcctttcccccgccgctgttgcttcccccacccaccggagaccccaggcttcagcctcctccccccttgcccttcggcctgggaggcttccccccacctccaggcgtgagcccggctgaagcggcgggagttggggagggactgggattggggttgccctcgccccgaggccctggcctcaatctgccccctccaattggcggtgccggtcccccgctggggcttcccaagccaaagaagaggaaagagcccgtgaagatcgcggcgccggagttgcataagggagattcagattctgaggaagatgaacccacaaagaagaaaactatccttcagggatccagtgaggggactggtttgtctgccttgcttccccaacctaaaaacctgactgtgaaagagactaacaggttgctcctgccccatgccttctcccgcaaaccctcggatggctcccctgatactaagccctccagactggcttctaagaccaagacttcctctcttgcccctgttgtgggcaccacaaccaccactccgtcgccctctgctatcaaggctgctgccaagagtgctgccctgcaggtgacaaagcagatcacgcaggaagaagacgacagtgatgaggaagtagcccccgaaaactttttctccctccctgaaaaggctgagccacctggagttgagccatacccttaccccatccccactgtccctgaagagctgcctccaggcacggaaccgagggagagaagaaatcaactttgtggagatcaaaggtgatgaccagctcagtggggcccagcaatggatgactaagtcattgacagaagagaaaaccatgaagtcattcagcaaaaagaaaggtgagcagccaacaggccagcagcggcggaaacaccagatcacatatcttattcatcaggccaaggagcgggagctggaactgaagaacacctggtcagagaacaagctcagccgccgtcagacccaagccaaatatggattctagggctctggaactgattgctcccaggatctcctgccagcccagctggcctggcccccagcttcacctctgggaccccagctgctctaagcccaggatctctttccccaaggacccagccctcgcctctgcgagaatgaacatatttgatagatttttcttaacaagttagaaaattcagctcctttctgtcctggagctagcaaagacttgtgtgatgcctccgaaggggctctgagttctggggtgggagttttgctctctgtcaggtgtgataaaatgttgaaccctccccaccaccacttttttttttttaaaccagggatgtctgttgaaataaaacattcagtctgacaaaca

SEQ ID NO: 329778 - DNA, 1963 bp, Homo sapiens
cctgcggcaaagaaccgggctgtgtccaaagtgttctctggaagttgtagttcctgtattggtgaggcaaggaggaggcggagtgactcggcggccattagctgtgtgtagttgcccgggactaggagcttaagtgaagaggtacgccttgttcggtggaaatcagccgtagccatgagtttctgccggggctagccctagagtacggagcaggcggacttttcggttccccgccccgccaggtggcggggcctactaggcctccgggcatccccggtctcaagtaggcctcatctgccggcaagggcgcccgaaacgcgggaggcgccatgtcgctggttgcttacgccagcagcgatgagagcgagccggatgaggctgagcccgagccggaggaagaggaggcggtggctcctacatctgggcccgctttagggggcttgttcgcttctctccctgcgcccaagggtccggccttgctgcctccgccccctcagatgctggcgccagcctttcccccgccgctgttgcttcccccacccaccggagaccccaggcttcagcctcctccccccttgcccttcggcctgggaggcttccccccacctccaggcgtgagcccggctgaagcggcgggagttggggagggactgggattggggttgccctcgccccgaggccctggcctcaatctgccccctccaattggcggtgccggtcccccgctggggcttcccaagccaaagaagaggaaagagcccgtgaagatcgcggcgccggagttgcataagggagattcagattctgaggaagatgaacccacaaagaagaaaactatccttcagggatccagtgaggggactggtttgtctgccttgcttccccaacctaaaaacctgactgtgaaagagactaacaggttgctcctgccccatgccttctcccgcaaaccctcggatggctcccctgatactaagccctccagactggcttctaagaccaagacttcctctcttgcccctgttgtgggcaccacaaccaccactccgtcgccctctgctatcaaggctgctgccaagagtgctgccctgcaggtgacaaagcagatcacgcaggaagaagacgacagtgatgaggaagtagcccccgaaaactttttctccctccctgaaaaggctgagccacctggagttgagccatacccttaccccatccccactgtccctgaagagctgcctccaggcacggaaccagagccggctttccaggacgatgcagccaatgccccccttgaattcaagatggcagcaggttcaagtggggccccttggatgcctaagcctggggacgactacagctacaatcagttttccacatatggcgatgccaatgccgctggtgcttattatcaggattattacagtggtggctactatcctgcacaggacccggccctggtccccccccaggaaattgccccagatgcctccttcatcgatgacgaagcatttaagcggctgcagggcaagaggaaccgagggagagaagaaatcaactttgtggagatcaaaggtgatgaccagctcagtggggcccagcaatggatgactaagtcattgacagaagagaaaaccatgaagtcattcagcaaaaagaaaggtgagcagccaacaggccagcagcggcggaaacaccagatcacatatcttattcatcaggccaaggagcgggagctggaactgaagaacacctggtcagagaacaagctcagccgccgtcagacccaagccaaatatggattctagggctctggaactgattgctcccaggatctcctgccagcccagctggcctggcccccgttcctctgggtccgtcgggttctgccgggtctctttccaaggggccgcctgtccttgcgggatgtgttttggtggttgtgttcgtggatctccctcgtgcg

SEQ ID NO: 329779 - DNA, 1487 bp, Homo sapiens
ggacttcctaataccacaagggaatctgccacctcaatcctaaatttgagttggcagcatatggaggaatatttctgtggagctgagggctgatgggttctgacggataatttccaagccagtcagattctgaggaagatgaacccacaaagaagaaaactatccttcagggatccagtgaggggactggtttgtctgccttgcttccccaacctaaaaacctgactgtgaaagagactaacaggttgctcctgccccatgccttctcccgcaaaccctcggatggctcccctgatactaagccctccagactggcttctaagaccaagacttcctctcttgcccctgttgtgggcaccacaaccaccactccgtcgccctctgctatcaaggctgctgccaagagtgctgccctgcaggtgacaaagcagatcacgcaggaagaagacgacagtgatgaggaagtagcccccgaaaactttttctccctccctgaaaaggctgagccacctggagttgagccatacccttaccccatccccactgtccctgaagagctgcctccaggcacggaaccagagccggctttccaggacgatgcagccaatgccccccttgaattcaagatggcagcaggttcaagtggggccccttggatgcctaagcctggggacgactacagctacaatcagttttccacatatggcgatgccaatgccgctggtgcttattatcaggattattacagtggtggctactatcctgcacaggacccggccctggtccccccccaggaaattgccccagatgcctccttcatcgatgacgaagcatttaagcggctgcagggcaagaggaaccgagggagagaagaaatcaactttgtggagatcaaaggtgatgaccagctcagtggggcccagcaatggatgactaagtcattgacagaagagaaaaccatgaagtcattcagcaaaaagaaaggtgagcagccaacaggccagcagcggcggaaacaccagatcacatatcttattcatcaggccaaggagcgggagctggaactgaagaacacctggtcagagaacaagctcagccgccgtcagacccaagccaaatatggattctagggctctggaactgattgctcccaggatctcctgccagcccagctggcctggcccccagcttcacctctgggaccccagctgctctaagcccaggatctctttccccaaggacccagccctcgcctctgcgagaatgaacatatttgatagatttttcttaacaagttagaaaattcagctcctttctgtcctggagctagcaaagacttgtgtgatgcctccgaaggggctctgagttctggggtgggagttttgctctctgtcaggtgtgataaaatgttgaaccctccccaccaccacttttttttttttaaaccagggatgtctgttgaaataaaacattcagtctgacaaaca

SEQ ID NO: 329780 - DNA, 1884 bp, Homo sapiens
cctgcggcaaagaaccgggctgtgtccaaagtgttctctggaagttgtagttcctgtattggtgaggcaaggaggaggcggagtgactcggcggccattagctgtgtgtagttgcccgggactaggagcttaagtgaagaggtacgccttgttcggtggaaatcagccgtagccatgagtttctgccggggctagccctagagtacggagcaggcggacttttcggttccccgccccgccaggtggcggggcctactaggcctccgggcatccccggtctcaagtaggcctcatctgccggcaagggcgcccgaaacgcgggaggcgccatgtcgctggttgcttacgccagcagcgatgagagcgagccggatgaggctgagcccgagccggaggaagaggaggcggtggctcctacatctgggcccgctttagggggcttgttcgcttctctccctgcgcccaagggtccggccttgctgcctccgccccctcagatgctggcgccagcctttcccccgccgctgttgcttcccccacccaccggagaccccaggcttcagcctcctccccccttgcccttcggcctgggaggcttccccccacctccaggcgtgagcccggctgaagcggcgggagttggggagggactgggattggggttgccctcgccccgaggccctggcctcaatctgccccctccaattggcggtgccggtcccccgctggggcttcccaagccaaagaagaggaaagagcccgtgaagatcgcggcgccggagttgcataagggagattcagattctgaggaagatgaacccacaaagaagaaaactatccttcagggatccagtgaggggactggtttgtctgccttgcttccccaacctaaaaacctgactgtgaaagagactaacaggttgctcctgccccatgccttctcccgcaaaccctcggatggctcccctgatactaagccctccagactggcttctaagaccaagacttcctctcttgcccctgttgtgggcaccacaaccaccactccgtcgccctctgctatcaaggctgctgccaagagtgctgccctgcaggtgacaaagcagatcacgcaggaagaagacgacagtgatgaggaagtagcccccgaaaactttttctccctccctgaaaaggctgagccacctggagttgagccatacccttaccccatccccactgtccctgaagagctgcctccaggcacggaaccagagccggctttccaggacgatgcagccaatgccccccttgaattcaagatggcagcaggttcaagtggggccccttggatgcctaagcctggggacgactacagctacaatcagttttccacatatggcgatgccaatgccgctggtgcttattatcaggattattacagtggtggctactatcctgcacaggacccggccctggtccccccccaggaaattgccccagatgcctccttcatcgatgacgaagcatttaagcggctgcagggcaagaggaaccgagggagagaagaaatcaactttgtggagatcaaaggtgatgaccagagcttcacctctgggaccccagctgctctaagcccaggatctctttccccaaggacccagccctcgcctctgcgagaatgaacatatttgatagatttttcttaacaagttagaaaattcagctcctttctgtcctggagctagcaaagacttgtgtgatgcctccgaaggggctctgagttctggggtgggagttttgctctctgtcaggtgtgataaaatgttgaaccctccccaccaccacttttttttttttaaaccagggatgtctgttgaaataaaacattcagtctgacaaaca

SEQ ID NO: 329781 - DNA, 1378 bp, Homo sapiens
cctgcggcaaagaaccgggctgtgtccaaagtgttctctggaagttgtagttcctgtattggtgaggcaaggaggaggcggagtgactcggcggccattagctgtgtgtagttgcccgggactaggagcttaagtgaagaggtacgccttgttcggtggaaatcagccgtagccatgagtttctgccggggctagccctagagtacggagcaggcggacttttcggttccccgccccgccaggtggcggggcctactaggcctccgggcatccccggtctcaagtaggcctcatctgccggcaagggcgcccgaaacgcgggaggcgccatgtcgctggttgcttacgccagcagcgatgagagcgagccggatgaggctgagcccgagccggaggaagaggaggcggtggctcctacatctgggcccgctttagggggcttgttcgcttctctccctgcgcccaagggtccggccttgctgcctccgccccctcagatgctggcgccagcctttcccccgccgctgttgcttcccccacccaccggagaccccaggcttcagcctcctccccccttgcccttcggcctgggaggcttccccccacctccaggcgtgagcccggctgaagcggcgggagttggggagggactgggattggggttgccctcgccccgaggccctggcctcaatctgccccctccaattggcggtgccggtcccccgctggggcttcccaagccaaagaagaggaaagagcccgtgaagatcgcggcgccggagttgcataagggagattcagattctgaggaagatgaacccacaaagaagaaaactatccttcagggatccagtgaggggactggtttgtctgccttgcttccccaacctaaaaacctgactgtgaaagagactaacaggttgctcctgccccatgccttctcccgcaaaccctcggatggctcccctgatactaagccctccagactggcttctaagaccaagacttcctctcttgcccctgttgtgggcaccacaaccaccactccgtcgccctctgctatcaaggctgctgccaagagtgctgccctgcaggtgacaaagcagatcacgcaggaagaagacgacagtgatgaggaagtagcccccgaaaactttttctccctccctgaaaaggctgagccacctggagttgagccatacccttaccccatccccactgtccctgaagagctgcctccaggcacggaaccagagccggctttccaggacgatgcagccaatgccccccttgaattcaagatgaagttgcgccgaatgaaccgcttcactgtggctgagctcaagcagctggtggctcggcctgatgtcgtgaagat

SEQ ID NO: 329782 - DNA, 964 bp, Homo sapiens
  misc_feature (420)..(420): n is a, c, g, or t
  misc_feature (440)..(440): n is a, c, g, or t
  misc_feature (458)..(458): n is a, c, g, or t
  misc_feature (508)..(508): n is a, c, g, or t
  misc_feature (522)..(522): n is a, c, g, or t
  misc_feature (525)..(525): n is a, c, g, or t
  misc_feature (529)..(529): n is a, c, g, or t
  misc_feature (544)..(544): n is a, c, g, or t
  misc_feature (566)..(566): n is a, c, g, or t
  misc_feature (568)..(568): n is a, c, g, or t
  misc_feature (570)..(571): n is a, c, g, or t
  misc_feature (576)..(576): n is a, c, g, or t
  misc_feature (592)..(598): n is a, c, g, or t
  misc_feature (601)..(601): n is a, c, g, or t
  misc_feature (603)..(603): n is a, c, g, or t
  misc_feature (607)..(607): n is a, c, g, or t
  misc_feature (615)..(616): n is a, c, g, or t
  misc_feature (619)..(620): n is a, c, g, or t
  misc_feature (624)..(624): n is a, c, g, or t
  misc_feature (636)..(639): n is a, c, g, or t
  misc_feature (659)..(659): n is a, c, g, or t
  misc_feature (662)..(663): n is a, c, g, or t
  misc_feature (666)..(666): n is a, c, g, or t
  misc_feature (672)..(672): n is a, c, g, or t
  misc_feature (677)..(677): n is a, c, g, or t
  misc_feature (682)..(682): n is a, c, g, or t
  misc_feature (700)..(700): n is a, c, g, or t
  misc_feature (703)..(703): n is a, c, g, or t
  misc_feature (709)..(709): n is a, c, g, or t
  misc_feature (713)..(713): n is a, c, g, or t
  misc_feature (720)..(720): n is a, c, g, or t
  misc_feature (731)..(731): n is a, c, g, or t
  misc_feature (735)..(735): n is a, c, g, or t
  misc_feature (777)..(777): n is a, c, g, or t
  misc_feature (783)..(783): n is a, c, g, or t
  misc_feature (800)..(800): n is a, c, g, or t
  misc_feature (807)..(807): n is a, c, g, or t
  misc_feature (819)..(819): n is a, c, g, or t
  misc_feature (870)..(870): n is a, c, g, or t
  misc_feature (884)..(884): n is a, c, g, or t
  misc_feature (921)..(921): n is a, c, g, or t
cctgcggcaaagaaccgggctgtgtccaaagtgttctctggaagttgtagttcctgtattggtgaggcaaggaggaggcggagtgactcggcggccattagctgtgtgtagttgcccgggactaggagcttaagtgaagaggtacgccttgttcggtggaaatcagccgtagccatgagtttctgccggggctagccctagagtacggagcaggcggacttttcggttccccgccccgccaggtggcggggcctactaggcctccgggcatccccggtctcaagtaggcctcatctgccggcaagggcgcccgaaacgcgggaggcgccatgtcgctggttgcttacgccagcagcgatgagagcgagccggatgaggctgagccccgcagcccgcgcaggcaagcaggcagcgcgtgtnggctctcttaccatcctggngccccgcctttttagggnggccttgctttcgcctttcttcttccctcgccgcccccaaaggggttccnggccctttgtcttnccntccnccccccccctccagnaatgcctgggcgcccagcctgngngnnccccncccgcctgctttgcgnnnnnnnccnancccnaacgggtnnaanncccnagggctttttannnnttctctttttcccccctttnccnnctnttcggnctctnggggnaggccttttccccccccnacncttccnaggngcgctgnagccccgcgcnctgnaaagcgcgccgggggcagtttggggcgcaggggcactggggnatttgnggggtttgcccccttcnccccccncagggccccctnggcccttcaaattcttgccccccctcccaaatttgggccgggtggccgggnttcccccccgcctnggggggcttttccccaaagccccaaaagcaaagcagngcaaaagcagcccccgttgcaaagcattcgccgggccgccccg

SEQ ID NO: 329783 - DNA, 360 bp, Homo sapiens
actaagtcattgacagaagagaaaaccatgaagtcattcagcaaagtaagtgggaaacgtctattgagtggtcagcttgggaagctgcaaagcaaaatcttgtcttactccccgtcttgaccccacaccccattgttattgtcacagcacctttagcaaacacattttgcccatggtactggagtatgcactaaacctcacagatacagctcctgccctctagaactttgcaggactttaacagctctgcagctggatggggggtctggttgctgagatcgagtagttggtgaggcctcccagcctgtggttgtggcttcttctcaggctgcacagaatccacagctgctctactcttgc

SEQ ID NO: 329784 - DNA, 550 bp, Homo sapiens
ctatgtaaattaaagcactttaaatacactaggggactctgaaatttaaatgtatcttattgtgaataccattataaaaaaaatccatactctaattgctctggatttttatatattattttatgtagtgaatattaaacctattttcatttagctcatcataaaacaaatgttcttagaagggcatttcttggagtttaagacgaagtggaagaattaggaaaaagtataggcaaggaggaaacagtttattggccctgtggctgcctgacttcaccaagcagaggccttgcccttgccttcaccctcctcttcctctagggtctgcagcaacatctgggccactcgcctctaaggggaatcatgagattcctgaactcaaaatctggtaaacgaacctgctttgttcccagctttgtaagtttcattgtatcctaatagtggttattttaaatcagagatctataacctccccacccggtttagactgtttccctgtatccacaggaccaaactagaatgaggagcaggaatggcatgacgtatacct

SEQ ID NO: 329785 - DNA, 666 bp, Homo sapiens
cctgcggcaaagaaccgggctgtgtccaaagtgttctctggaagttgtagttcctgtattggtgaggcaaggaggaggcggagtgactcggcggccattagctgtgtgtagttgcccgggactaggagcttaagtgaagaggtacgccttgttcggtggaaatcagccgtagccatgagtttctgccggggctagccctagagtacggagcaggcggacttttcggttccccgccccgccaggtggcggggcctactaggcctccgggcatccccggtctcaagtaggcctcatctgccggcaagggcgcccgaaacgcgggaggcgccatgtcgctggttgcttacgccagcagcgatgagagcgagccggatgaggctgagcccgagccggaggaagaggaggcggtggctcctacatctgggcccgctttagggggcttgttcgcttctctccctgcgcccaagggtccggccttgctgcctccgccccctcagatgctggcgccagcctttcccccgccgctgttgcttcccccacccaccggagaccccaggcttcagcctcctccccccttgcccttatgggagggggggcttacctcttattgtagtaatgaactcggccttaatctatgggacataggtgaatgtattggacctgtgt

SEQ ID NO: 329786 - DNA, 1053 bp, Homo sapiens
cctgcggcaaagaaccgggctgtgtccaaagtgttctctggaagttgtagttcctgtattggtgaggcaaggaggaggcggagtgactcggcggccattagctgtgtgtagttgcccgggactaggagcttaagtgaagaggtacgccttgttcggtggaaatcagccgtagccatgagtttctgccggggctagccctagagtacggagcaggcggacttttcggttccccgccccgccaggtggcggggcctactaggcctccgggcatccccggtctcaagtaggcctcatctgccggcaagggcgcccgaaacgcgggaggcgccatgtcgctggttgcttacgccagcagcgatgagagcgagccggatgaggctgagcccgagccggaggaagaggaggcggtggctcctacatctgggcccgctttagggggcttgttcgcttctctccctgcgcccaagggtccggccttgctgcctccgccccctcagatgctggcgccagcctttcccccgcttagcgcggcgactcgccgaacgcctcgcgctcgatgcaccacctcatgctatataataagagccgggtcacgaggaccgcctgcttgccctccgaacaccaccccacacgcaccccacccacaccaccacgacacgaaaagcaccagccaccccccaccacacaacaatgcgaaacccatcacgcgccggcgggcgcgccgccaccccctcacaccaccccacggcggagagccagccctgccgccacccaccagcggccgtccccccaccgccgcgcctgccggccacgcgcaccccaccacccccacccctccgccagcagccaccgagccacccgacaccacaaccccccggctagcgaggccgcacccacaccaccccaccgacgacgcagagcgcgcgagaagacagacatcccggccgagccctgcacccgcactggcccgccgcgagccaccgcccccgccgcccgccgacgccacccccacccccgcccacccccaccccaacgccgccccagcgacgcccc

SEQ ID NO: 329787 - DNA, 2792 bp, Homo sapiens
cctgcggcaaagaaccgggctgtgtccaaagtgttctctggaagttgtagttcctgtattggtgaggcaaggaggaggcggagtgactcggcggccattagctgtgtgtagttgcccgggactaggagcttaagtgaagaggtacgccttgttcggtggaaatcagccgtagccatgagtttctgccggggctagccctagagtacggagcaggcggacttttcggttccccgccccgccaggtggcggggcctactaggcctccgggcatccccggtctcaagtaggcctcatctgccggcaagggcgcccgaaacgcgggaggcgccatgtcgctggttgcttacgccagcagcgatgagagcgagccggatgaggctgagcccgagccggaggaagaggaggcggtggctcctacatctgggcccgctttagggggcttgttcgcttctctccctgcgcccaagggtccggccttgctgcctccgccccctcagatgctggcgccagcctttcccccgccgctgttgcttcccccacccaccggagaccccaggcttcagcctcctccccccttgcccttcggcctgggaggcttccccccacctccaggcgtgagcccggctgaagcggcgggagttggggagggactgggattggggttgccctcgccccgaggccctggcctcaatctgccccctccaattggcggtgccggtcccccgctggggcttcccaagccaaagaagaggaaagagcccgtgaagatcgcggcgccggagttgcataagggagattcagattctgaggaagatgaacccacaaagaagaaaactatccttcagggatccagtgaggggactggtttgtctgccttgcttccccaacctaaaaacctgactgtgaaagagactaacaggttgctcctgccccatgccttctcccgcaaaccctcggatggctcccctgatactaagccctccagactggcttctaagaccaagacttcctctcttgcccctgttgtgggcaccacaaccaccactccgtcgccctctgctatcaaggctgctgccaagagtgctgccctgcaggtgacaaagcagatcacgcaggaagaagacgacagtgatgaggaagtagcccccgaaaactttttctccctccctgaaaaggctgagccacctggagttgagccatacccttaccccatccccactgtccctgaagagctgcctccaggcacggaaccagagccggctttccaggacgatgcagccaatgccccccttgaattcaagatggcagcaggttcaagtggggccccttggatgcctaagcctggggacgactacagctacaatcagttttccacatatggcgatgccaatgccgctggtgcttattatcagggtctgcagcaacatctgggccactcgcctctaaggggaatcatgagattcctgaactcaaaatctggtaaacgaacctgctttgttcccagctttgtaagtttcattgtatcctaatagtggttattttaaatcagagatctataacctccccacccggtttagactgtttccctgtatccacaggaccaaactagaatgaggagcaggaatggcatgacgtataccttctcgtccctgctcgcatcgtagctcattggggtcttatgagcaggaggagcagggctgagggcatggtagaggtaagaggtgagagtctctcttaggaagtagctgagggagcaaggtatagattgaagcaggagagactgtctttgtttcttgttaccctttcctaaaaaatatccatctgtctggatagtgtagatgagaaaagctgtagggactgttcttgagttgtaggtcggtccttgggatctatgcctttaactggtctgtttgaggaagctgtagtatagctatctcaccattgcctctttgatgacaattttctgtttctggacagaccttaccttcccctctccaactgtgccctcagttggtgtgtttttctttcctgtttggctgcaggattattacagtggtggctactatcctgcacaggacccggccctggtccccccccaggaaattgccccagatgcctccttcatcgatgacgaagcatttaagcggctgcagggcaagaggaaccgagggagagaagaaatcaactttgtggagatcaaaggtgatgaccagctcagtggggcccagcaatggatgactaagtcattgacagaagagaaaaccatgaagtcattcagcaaaaagaaaggtgagcagccaacaggccagcagcggcggaaacaccagatcacatatcttattcatcaggccaaggagcgggagctggaactgaagaacacctggtcagagaacaagctcagccgccgtcagacccaagccaaatatggattctagggctctggaactgattgctcccaggatctcctgccagcccagctggcctggcccccagcttcacctctgggaccccagctgctctaagcccaggatctctttccccaaggacccagccctcgcctctgcgagaatgaacatatttgatagatttttcttaacaagttagaaaattcagctcctttctgtcctggagctagcaaagacttgtgtgatgcctccgaaggggctctgagttctggggtgggagttttgctctctgtcaggtgtgataaaatgttgaaccctccccaccaccacttttttttttttaaaccagggatgtctgttgaaataaaacattcagtctgacaaaca

SEQ ID NO: 329788 - DNA, 1506 bp, Homo sapiens
cctgcggcaaagaaccgggctgtgtccaaagtgttctctggaagttgtagttcctgtattggtgaggcaaggaggaggcggagtgactcggcggccattagctgtgtgtagttgcccgggactaggagcttaagtgaagagtcagattctgaggaagatgaacccacaaagaagaaaactatccttcagggatccagtgaggggactggtttgtctgccttgcttccccaacctaaaaacctgactgtgaaagagactaacaggttgctcctgccccatgccttctcccgcaaaccctcggatggctcccctgatactaagccctccagactggcttctaagaccaagacttcctctcttgcccctgttgtgggcaccacaaccaccactccgtcgccctctgctatcaaggctgctgccaagagtgctgccctgcaggtgacaaagcagatcacgcaggaagaagacgacagtgatgaggaagtagcccccgaaaactttttctccctccctgaaaaggctgagccacctggagttgagccatacccttaccccatccccactgtccctgaagagctgcctccaggcacggaaccagagccggctttccaggacgatgcagccaatgccccccttgaattcaagatggcagcaggttcaagtggggccccttggatgcctaagcctggggacgactacagctacaatcagttttccacatatggcgatgccaatgccgctggtgcttattatcaggattattacagtggtggctactatcctgcacaggacccggccctggtccccccccaggaaattgccccagatgcctccttcatcgatgacgaagcatttaagcggctgcagggcaagaggaaccgagggagagaagaaatcaactttgtggagatcaaaggtgatgaccagctcagtggggcccagcaatggatgactaagtcattgacagaagagaaaaccatgaagtcattcagcaaaaagaaaggtgagcagccaacaggccagcagcggcggaaacaccagatcacatatcttattcatcaggccaaggagcgggagctggaactgaagaacacctggtcagagaacaagctcagccgccgtcagacccaagccaaatatggattctagggctctggaactgattgctcccaggatctcctgccagcccagctggcctggcccccagcttcacctctgggaccccagctgctctaagcccaggatctctttccccaaggacccagccctcgcctctgcgagaatgaacatatttgatagatttttcttaacaagttagaaaattcagctcctttctgtcctggagctagcaaagacttgtgtgatgcctccgaaggggctctgagttctggggtgggagttttgctctctgtcaggtgtgataaaatgttgaaccctccccaccaccacttttttttttttaaaccagggatgtctgttgaaataaaacattcagtctgacaaaca

SEQ ID NO: 329789 - DNA, 1936 bp, Homo sapiens
cctgcggcaaagaaccgggctgtgtccaaagtgttctctggaagttgtagttcctgtattggtgaggcaaggaggaggcggagtgactcggcggccattagctgtgtgtagttgcccgggactaggagcttaagtgaagaggtacgccttgttcggtggaaatcagccgtagccatgagtttctgccggggctagccctagagtacggagcaggcggacttttcggttccccgccccgccaggtggcggggcctactaggcctccgggcatccccggtctcaagtaggcctcatctgccggcaagggcgcccgaaacgcgggaggcgccatgtcgctggttgcttacgccagcagcgatgagagcgagccggatgaggctgagcccgagccggaggaagaggaggcggtggctcctacatctgggcccgctttagggggcttgttcgcttctctccctgcgcccaagggtccggccttgctgcctccgccccctcagatgctggcgccagcctttcccccgccgctgttgcttcccccacccaccggagaccccaggcttcagcctcctccccccttgcccttcggcctgggaggcttccccccacctccaggcgtgagcccggctgaagcggcgggagttggggagggactgggattggggttgccctcgccccgaggccctggcctcaatctgccccctccaattggcggtgccggtcccccgctggggcttcccaagccaaagaagaggaaagagcccgtgaagatcgcggcgccggagttgcataagggagattcagattctgaggaagatgaacccacaaagaagaaaactatccttcagggatccagtgaggggactggtttgtctgccttgcttccccaacctaaaaacctgactgtgaaagagactaacaggttgctcctgccccatgccttctcccgcaaaccctcggatggctcccctgatactaagccctccagactggcttctaagaccaagacttcctctcttgcccctgttgtgggcaccacaaccaccactccgtcgccctctgctatcaaggctgctgccaagagtgctgccctgcaggtgacaaagcagatcacgcaggaagaagacgacagtgatgaggaagtagcccccgaaaactttttctccctccctgaaaaggctgagccacctggagttgagccatacccttaccccatccccactgtccctgaagagctgcctccaggcacggaaccagagccggctttccaggacgatgcagccaatgccccccttgaattcaagatggcagcaggttcaagtggggccccttggatgcctaagcctggggacgactacagctacaatcagttttccacatatggcgatgccaatgccgctggtgcttattatcaggattattacagtggtggctactatcctgcacaggacccggccctggtccccccccaggaaattgccccagatgcctccttcatcgatgacgaagcatttaagcggctgcagggcaagaggaaccgagggagagaagaaatcaactttgtggagatcaaaggtgatgaccagctcagtggggcccagcaatggatgactaagtcattgacagaagagaaaaccatgaagtcattcagcaaaaagaaaggtgagcagccaacaggccagcagcggcggaaacaccagatcacatatcttattcatcagatatttgatagatttttcttaacaagttagaaaattcagctcctttctgtcctggagctagcaaagacttgtgtgatgcctccgaaggggctctgagttctggggtgggagttttgctctctgtcaggtgtgataaaatgttgaaccctccccaccaccacttttttttttttaaaccagggatgtctgttgaaataaaacattcagtctgacaaaca

SEQ ID NO: 329790 - DNA, 1857 bp, Homo sapiens
cctgcggcaaagaaccgggctgtgtccaaagtgttctctggaagttgtagttcctgtattggtgaggcaaggaggaggcggagtgactcggcggccattagctgtgtgtagttgcccgggactaggagcttaagtgaagaggtacgccttgttcggtggaaatcagccgtagccatgagtttctgccggggctagccctagagtacggagcaggcggacttttcggttccccgccccgccaggtggcggggcctactaggcctccgggcatccccggtctcaagtaggcctcatctgccggcaagggcgcccgaaacgcgggaggcgccatgtcgctggttgcttacgccagcagcgatgagagcgagccggatgaggctgagcccgagccggaggaagaggaggcggtggctcctacatctgggcccgctttagggggcttgttcgcttctctccctgcgcccaagggtccggccttgctgcctccgccccctcagatgctggcgccagcctttcccccgccgctgttgcttcccccacccaccggagaccccaggcttcagcctcctccccccttgcccttcggcctgggaggcttccccccacctccaggcgtgagcccggctgaagcggcgggagttggggagggactgggattggggttgccctcgccccgaggccctggcctcaatctgccccctccaattggcggtgccggtcccccgctggggcttcccaagccaaagaagaggaaagagcccgtgaagatcgcggcgccggagttgcataagggagattcagattctgaggaagatgaacccacaaagaagaaaactatccttcagggatccagtgaggggactggtttgtctgccttgcttccccaacctaaaaacctgactgtgaaagagactaacaggttgctcctgccccatgccttctcccgcaaaccctcggatggctcccctgatactaagccctccagactggcttctaagaccaagacttcctctcttgcccctgttgtgggcaccacaaccaccactccgtcgccctctgctatcaaggctgctgccaagagtgctgccctgcaggtgacaaagcagatcacgcaggaagaagacgacagtgatgaggaagtagcccccgaaaactttttctccctccctgaaaaggctgagccacctggagttgagccatacccttaccccatccccactgtccctgaagagctgcctccaggcacggaaccagagccggctttccaggacgatgcagccaatgccccccttgaattcaagatggcagcaggttcaagtggggccccttggatgcctaagcctggggacgactacagctacaatcagttttccacatatggcgatgccaatgccgctggtgcttattatcaggattattacagtggtggctactatcctgcacaggacccggccctggtccccccccaggaaattgccccagatgcctccttcatcgatgacgaagcatttaagcggctgcagggcaagaggaaccgagggagagaagaaatcaactttgtggagatcaaaggtgatgaccagctaagcccaggatctctttccccaaggacccagccctcgcctctgcgagaatgaacatatttgatagatttttcttaacaagttagaaaattcagctcctttctgtcctggagctagcaaagacttgtgtgatgcctccgaaggggctctgagttctggggtgggagttttgctctctgtcaggtgtgataaaatgttgaaccctccccaccaccacttttttttttttaaaccagggatgtctgttgaaataaaacattcagtctgacaaaca

SEQ ID NO: 329791 - DNA, 1243 bp, Homo sapiens
cctgcggcaaagaaccgggctgtgtccaaagtgttctctggaagttgtagttcctgtattggtgaggcaaggaggaggcggagtgactcggcggccattagctgtgtgtagttgcccgggactaggagcttaagtgaagaggtacgccttgttcggtggaaatcagccgtagccatgagtttctgccggggctagccctagagtacggagcaggcggacttttcggttccccgccccgccaggtggcggggcctactaggcctccgggcatccccggtctcaagtaggcctcatctgccggcaagggcgcccgaaacgcgggaggcgccatgtcgctggttgcttacgccagcagcgatgagagcgagccggatgaggctgagcccgagccggaggaagaggaggcggtggctcctacatctgggcccgctttagggggcttgttcgcttctctccctgcgcccaagggtccggccttgctgcctccgccccctcagatgctggcgccagcctttcccccgccgctgttgcttcccccacccaccggagaccccaggcttcagcctcctccccccttgcccttcggcctgggaggcttccccccacctccaggcgtgagcccggctgaagcggcgggagttggggagggactgggattggggttgccctcgccccgaggccctggcctcaatctgccccctccaattggcggtgccggtcccccgctggggcttcccaagccaaagaagaggaaagagcccgtgaagatcgcggcgccggagttgcataagggagattcagattctgaggaagatgaacccacaaagaagaaaactatccttcagggatccagtgaggggactggtttgtctgccttgcttccccaacctaaaaacctgactgtgaaagagactaacaggttgctcctgccccatgccttctcccgcaaaccctcggatggctcccctgctaagcccaggatctctttccccaaggacccagccctcgcctctgcgagaatgaacatatttgatagatttttcttaacaagttagaaaattcagctcctttctgtcctggagctagcaaagacttgtgtgatgcctccgaaggggctctgagttctggggtgggagttttgctctctgtcaggtgtgataaaatgttgaaccctccccaccaccacttttttttttttaaaccagggatgtctgttgaaataaaacattcagtctgacaaaca

SEQ ID NO: 329792 - DNA, 863 bp, Homo sapiens
tctccacaaagttgatttcttctctcccttggatgcctaagcctggggacgactacagctacaatcagttttccacatatggcgatgccaatgccgctggtgcttattatcaggattattacagtggtggctactatcctgcacaggacccggccctggtccccccccaggaaattgccccagatgcctccttcatcgatgacgaagcatttaagcggctgcagggcaagaggaaccgagggagagaagaaatcaactttgtggagatcaaaggtgatgaccagctcagtggggcccagcaatggatgactaagtcattgacagaagagaaaaccatgaagtcattcagcaaaaagaaaggtgagcagccaacaggccagcagcggcggaaacaccagatcacatatcttattcatcaggccaaggagcgggagctggaactgaagaacacctggtcagagaacaagctcagccgccgtcagacccaagccaaatatggattctagggctctggaactgattgctcccaggatctcctgccagcccagctggcctggcccccagcttcacctctgggaccccagctgctctaagcccaggatctctttccccaaggacccagccctcgcctctgcgagaatgaacatatttgatagatttttcttaacaagttagaaaattcagctcctttctgtcctggagctagcaaagacttgtgtgatgcctccgaaggggctctgagttctggggtgggagttttgctctctgtcaggtgtgataaaatgttgaaccctccccaccaccacttttttttttttaaaccagggatgtctgttgaaataaaacattcagtctgacaaaca

SEQ ID NO: 329793 - DNA, 359 bp, Homo sapiens
acaataggtacacatggggagcaatagatattggagactccaaaagatgggaggatgggaggagggtgaggggtgaaaatttcctattgagtacaatgttcactatttgaatcatggctacacacaaagcccagacctcagcactccacaatatatgcatatagcactccacaatatttgcccctggtccagttgtgaagtctcatacagagtatcaatcagtcaatgttctcccttggttttgaatgtatttcttttacttcaagagtaagttgtcaagcgtggtggctcacacctgtaatcccagcactttgggaggccgaggcgggcagatcacttgaggtcaggagatcaagacc

SEQ ID NO: 329794 - DNA, 464 bp, Homo sapiens
taaggaaagggccactgtgctgagtgttgggggacctgtttcctgtctttagctgtagggtttatgtgagtctccctacagtaaaagacagggttggatgatggtttcttaaggcagatcctccctggacagtctgtggctccttagctgctgtgagcccagaccagagcctccagtacaattgggagcctccagggggacatctctgagctgttggttcaggtacctaagattccaagatgggtgtactttgcctctcattcgcacatcagaggctgtggcatggaaccccattatagcataaggtgtgccacccccctgtggtgactggccacttaataaacattccagaactcactcctccagatggctgttgtcaccaccaaaagcagtcaccagagaggctggaagtctgttccaaacccttcctgggaatttccctcagagtctgaatcatattctct

SEQ ID NO: 329795 - DNA, 669 bp, Homo sapiens
ccagtttcaagtatatccaaaactgagtgttttggataaccctggctataaatgaaactaccattcttagaaaattactggaaggaaatcatcacaggacagtttgagaatgtcagaatatcagggggtggcagatggccttcagagaagcaattatttcctgatcattctcaacttaatcaccctggaaagccatagaaaaaccaagtaatatgggatattgaatgttgatgtattatttgagtctaatatcttaatagctacttatcagcaactcaagaaaatatgagtgatataccatgcagaaatcaagcaggtgaacagcttgtgagtaggttgtacttggaaaatgcttggtacttccaaaagcaaaataatgtcctggtgagaatattaatatatgtggttttagtggaattggtattgtcattagcagactgatgacgtagggagaaagacaaggtaagacactgaggaaaaatatagttcatttatacagaaaaagccaaattttaagtgaaagcatcatgggagaaagattatatatggaaatgcaggagagctaaaagtggtctggtgaaccacatattagctgagcatgagtcattcatggattgatattttaaaaagctagagacacttgaatttgagaaactaggacaaggatat

SEQ ID NO: 329796 - DNA, 1338 bp, Homo sapiens
caacaagagcgaaactccgtctcaggaaaaaaaaaaaaaagcagaactccttactggcctcaaaacatactgtgacatttccgtaacctacaggtctagaaatcctgtgccaaatatggttaacttgtttgctgagaaggatgtggaagaactggaaccctcatacacagctgatgggaaaacagtctggaactttcttaaaacattctggtaaatgggggcccggcaagctagaaagtgtggctataatcccttgcttttttccttttttaaactttttctctctcagtcctgacctaaagatgaccctagtcaggctggacacggtggctcacgcctgtcatcccagcactttgggaggccaagacgggtggatcacctgaagtcaggagttcaagaccagcctgaccaacatggagaaaccctgtctctactaaaaacacaaaattagctgggcgtggtggtgcatgcctataattccagctactcgggaggctgaggcaggagaatcgcttgaacctgggaggtggaggttgcagtgagccgagatcgcgccattgcactccagcctggacagcaagagcaaaactccgtctcaaaaaacaaaaacaaaaacaaacaaaaaaattcccctgagagaaaacctgtctttccagccagaggagcaggaaaaaatgaccctatggtctgaagaatgtggaaataatccatctttttttctctctctgctttctgcctgaggggcgttccttttggcaaaatgagcaggcagtgtaggcaggtaatcatcagagagaaagcccatctttctaagccagaggatgaggaaaaggggccccctgggtgccagggagtctggggggaaatcctgaagagcaaagacctgaaaagaggattctctaattctgtacatgagctgaattccgtgctcagcccagagctgcacatacaagagacagagcccaggcaacacagccacactctgaactgacactcggaccaccaccaccaaacagaaggcaacgcaggacctgcagactaaggctaacgaggctgattgcctgacaaaacagaaaaaaaagaaacattcttcagggaattttagcagaacacagagtctcccaacataaaacagacagtcctcactgcacagcagttcagaactgtaaaaatgaccttccaacctgaaactgccatgtgctgttcataatcattaatgggtaaaattgtgatttttttcctgtcttttgaaaattgtcaaaacattgataatcttgtactgttagaaatgtataaggaaacaataaagtaaatatttttgtacactgtaatttaaaa

SEQ ID NO: 329797 - DNA, 486 bp, Homo sapiens
attcagttagcaaacccagggtaccgtatcaacagcatggggactggcataggcttcccagtgctgaagtcccgaagttctttctgctttgggacaagatacagacagaagaacaagatgagctggccactcctggagaccagatgaagtggccacagatatcaagaggggaggcactggggggaaagaagccaagtgggactgactctagacattagctaattgaggcagatcttttgtgatagatgaaaaccctttggtacctctccccagattttgatagctgctaagtctccaagtaatgtaccttgggatagatttcgacttcagctttttttttatttttattttttgaggcggagtctttactctgtcgcccaggctggagtgcagtggtgtgatctcagctcactgcaacttctgcctcccaggttcaagcgatttgcctgcctcagcctcctgagtagctgggattacaggcgtgca

SEQ ID NO: 329798 - DNA, 118 bp, Homo sapiens
tttatacatatcctatgagagagcttctgttgtagttgatacattatgctcactttcacaagtaagcaggactgtttcaaatccaataaatgctttttaagtatgactctgcaggttg

SEQ ID NO: 329799 - DNA, 476 bp, Homo sapiens
gtatacatctataaaaatgtttatatgaagggattttttaaaactgggcttacattaaatgaaaacacaggagcaacagtgtggtgtatgggaaaggacactgcaatcagccagacctagatcaaaccttttgggtgagtgcataagttattttacctgtctaagaatctcagctttctcatcaaaaaaggagagaacagccattatctccaaattcctcaataatttggaagctatttccagtatagtgcctgggatgtagaaggtgcttaataaatggtaatagtgttaatagatttttaaaatagaaaacaattacaggcatcaatgtatacgtgtgaaagcttaagacaggatggacatctggttcttcattactgtaaaatattaactgcttaataagactaatgtcttcagctgtttttctttgataaaataaaagtatttaaaaaaagctattgcatatgggggagccc

SEQ ID NO: 329800 - DNA, 183 bp, Homo sapiens
ggcctgctaggtctgaaggggtaaggtggggagggctgctggagcccagaaggctgctggaaggggagcaagaccagctgcggctgaacaggatgcagccacacccatcccacagcccagtggggagggagccgtgggaagagaaacccaacctcagttttccccaggcctccggcgccctgt

SEQ ID NO: 329801 - DNA, 684 bp, Homo sapiens
tggagagggcacgtgtagcctctgcaagaaggagcaccagggcaaggaaagcttgggcagctcggggcagcctgggaggggaggccacccacatgttcaagcccacagcacctccaggtctgtctgggcattgggaatctagaagatttgccaagaatgctgcttccagacctttctgttctactggttgctctcctgcactggtgtcctcaacacacttctgaacacacctcgctaacagatcagaatcctatagcccacagaaccatcagagccagaccttgagggcctgagctggtgtttctggagaccaggctcctggggacagatgtcaagagtacattccaccaaagcctgtgatgagaacactcaactcccactgaaccatgagctcagttaagcctgctcacagcatccctccttctccagtggcacacctcttacagcccgaacccaaatcatcctcctctcctcctccaggcctgaggctgatggtcctggtatctatcaaggaactggttttctttcgtaataaaaatgggcaaaggtgagcaagagaagcctggggggactgcttggcaggcctccgccctgacgaggaagttcatctccacagggatgcgagtcaggaactccagcatgagccaggaccattcccctcatcaatggacacttcttgaacta

SEQ ID NO: 329802 - DNA, 521 bp, Homo sapiens
ccatgaaggacattactgagcacccactaagcgtgagatgaagctgccacgaggcactgtgcacccaggcgctgcgcccagcaggcctgcagaaaaagcacaaggccaggtacccttaagacgacagcaaagtgcaggcgcactgccagctgtgggctgggacagatgtcaagagtacattccaccaaagcctgtgatgagaacactcaactcccactgaaccatgagctcagttaagcctgctcacagcatccctccttctccagtggcacacctcttacagcccgaacccaaatcatcctcctctcctcctccaggcctgaggctgatggtcctggtatctatcaaggaactggttttctttcgtaataaaaatgggcaaaggtgagcaagagaagcctggggggactgcttggcaggcctccgccctgacgaggaagttcatctccacagggatgcgagtcaggaactccagcatgagccaggaccattcccctcatcaatggacacttcttgaacta

SEQ ID NO: 329803 - DNA, 411 bp, Homo sapiens
tggagagggcacgtgtagcctctgcaagaaggagcaccagggcaaggaaagcttgggcagctcggggcagcctgggaggggaggccacccacatgttcaagcccacagcacctccaggtctgtctgggcattgggaatctagaagatttgccaagaatgctgcttccagacctttctgttctactggttgctctcctgcactggtgtcctcaacacacttctgaacacacctcgctaacagatcagaatcctatagcccacagaaccatcagagccagaccttgagggcctgagctggtgtttctggagaccaggctcctggggacagatgtcaagagtacattccaccaaagccacctcggtccatgccccgccaccacggaagccacctctgtctccaccacagcgcga

SEQ ID NO: 329804 - DNA, 321 bp, Homo sapiens
tatggcaggataagagagaagaatgagacttgtggaggtgactctattaatttaaataaggttgtttggtgtgttttgagaaaccctagtcctgagagatctatgagaaatggattctggggacaaattagtttgagaaacgttaccctattaagttctgccataaagaaacttatgtaattgtggattaaagccagttaaacaagttattagacaagaaaacccccgatcatcactaggattttgtgagctaaagttccaaagagcacattgcaggagaagctggaccagagtatgaggatccagtggccaggtaggaca

SEQ ID NO: 329805 - DNA, 684 bp, Homo sapiens
gcagtagagctcgctgcagatccgggctctgaccatgatttggcgccgcgcggcgctggcggggacgcggctggtttggagcaggagcggctcggcaggctggcttgacagggcggcgggagctgcgggagctgcggcagctgcggcctctgggatggagagcaatacatcatcatctttggagaatttagcgacggcgcctgtgaaccagatccaagaaacaatttctgataattgtgtggtgattttctcaaaaacatcctgttcttactgtacaatggcaaaaaagcttttccatgacatgaatgttaactataaagtggtggaactggacctgcttgaatatggaaaccagttccaagatgctctttacaaaatgactggtgaaagaactgttccaagaatatttgtcaatggtacttttattggaggtgcaactgacactcataggcttcacaaagaaggaaaattgctcccactagttcatcagtgttatttaaaaaaaagtaagaggaaagaatttcagtgatgtttatactaataagtttgctagtacagtgtcagttatttaaagtggtaatgcccgataatgtcttttaaatgtttgaggatgttttaaatacatgcattgtcttcacgaagaagatgtaaaaataatgaacaataaattgcggtggaaacctc

SEQ ID NO: 329806 - DNA, 1037 bp, Homo sapiens
gcagtagagctcgctgcagatccgggctctgaccatgatttggcgccgcgcggcgctggcggggacgcggctggtttggagcaggagcggctcggcaggctggcttgacagggcggcgggagctgcgggagctgcggcagctgcggcctctgggatggagagcaatacatcatcatctttggagaatttagcgacggcgcctgtgaaccagatccaagaaacaatttctgataattgtgtggtgattttctcaaaaacatcctgttcttactgtacaatggcaaaaaagcttttccatgacatgaatgttaactataaagtggtggaactggacctgcttgaatatggaaaccagttccaagatgctctttacaaaatgactggtgaaagaactgttccaagaatatttgtcaatggtacttttattggaggtgcaactgacactcataggcttcacaaagaaggaaaattgctcccactagttcatcagtgttatttaaaaaaaagtaagaggaaagaatttcagtgatgtttatactaataagtttgctagtacagtgtcagttatttaaagtggtaatgcccgataatgtcttttaaatgtttgaggatgttttaaatacatgcattgtcttcacgaagaagatgtaaaaataatgaacaataaattgcggtggaaacctcaaaaaaaaacaaaattaacaacccccctctccacagcaacccgcaccaccccactccgaacacaccaccctgggcctctttggcttaaggggggaaccttcgcgcccgctctcttttagggggggtaaatcaagaaccctgcttcactaactacttcactctgagcctcgcgtggcgggcaggggttcaaccaccttaaagggggatatccggttttccactacatcaggggaaaccccagaagaaaattgtggcacaaaggcccacaaagggccgaaaacctaaaaagggcgccgtcgggcgggttatcataaggcctcccccctgtgcagatcaaaaaattgcactttaag

SEQ ID NO: 329807 - DNA, 727 bp, Homo sapiens
  misc_feature (685)..(685): n is a, c, g, or t
  misc_feature (720)..(720): n is a, c, g, or t
  misc_feature (727)..(727): n is a, c, g, or t
gcagtagagctcgctgcagatccgggctctgaccatgatttggcgccgcgcggcgctggcggggacgcggctggtttggagcaggagcggctcggcaggctggcttgacagggcggcgggagctgcgggagctgcggcagctgcggcctctgggatggagagcaatacatcatcatctttggagaatttagcgacggcgcctgtgaaccagatccaagaaacaatttctgataattgtgtggtgattttctcaaaaacatcctgttcttactgtacaatggcaaaaaagcttttccatgacatgaatgttaactataaagtggtggaactggacctgcttgaatatggaaaccagttccaagatgctctttacaaaatgactggtgaaagaactgttccaagaatatttgtcaatggtacttttattggaggtgcaactgacactcataggcttcacaaagaaggaaaattgctcccactagttcatcagtgttatttaaaaaaaagtaagaggaaagaatttcagtgatgtttatactaataagtttgctagtacagtgtcagttatttaaagtggtaatgcccgataatgtcttttaaatgtttgaggatgttttaaatacatgcattgtcttcacgaagaagatgtaaaaataatgaacaataaattgcggtggaaacctcncgatggcctcgttggcctcagcggtggagctctcngccggan

SEQ ID NO: 329808 - DNA, 701 bp, Homo sapiens
  misc_feature (660)..(660): n is a, c, g, or t
  misc_feature (668)..(668): n is a, c, g, or t
  misc_feature (672)..(672): n is a, c, g, or t
  misc_feature (674)..(674): n is a, c, g, or t
gcagtagagctcgctgcagatccgggctctgaccatgatttggcgccgcgcggcgctggcggggacgcggctggtttggagcaggagcggctcggcaggctggcttgacagggcggcgggagctgcgggagctgcggcagctgcggcctctgggatggagagcaatacatcatcatctttggagaatttagcgacggcgcctgtgaaccagatccaagaaacaatttctgataattgtgtggtgattttctcaaaaacatcctgttcttactgtacaatggcaaaaaagcttttccatgacatgaatgttaactataaagtggtggaactggacctgcttgaatatggaaaccagttccaagatgctctttacaaaatgactggtgaaagaactgttccaagaatatttgtcaatggtacttttattggaggtgcaactgacactcataggcttcacaaagaaggaaaattgctcccactagttcatcagtgttatttaaaaaaaagtaagaggaaagaatttcagtgatgtttatactaataagtttgctagtacagtgtcagttatttaaagtggtaatgcccgataatgtcttttaaatgtttgaggatgttttaaatacatgcattgtcttcacgaagaagagttttatctcccgncaagatcncatncngagtcacacaaagaaacctcttttcct

SEQ ID NO: 329809 - DNA, 1129 bp, Homo sapiens
aaggctattattaccaccactgagtggcttaaataatcctgtcaacagcaatcgcccatttccaaagccatggtgaaacatctctgtgctaatttcttttgttttgtttcctaattttttttttttggcaggtggtgggaaataatctttgtcttctttggagtaaaccttcaacaccggattttttcttttaattatggatgtaaaccccaatatccccataatttacattgggtctcgaccaattgcctaattataagaggatatatttaggctcttatttcatccacacaaaaacttgtgtaacaggtagttggaaacatctgaggcaccactttgattctgttttggatggtcatgttttttctcctccgtttccccagcatgtctgccaccatcctcatgcactgcttccaagtgcctgggagcctttatgagcgtccctaaacctaaaagaatccagaggcggggctcggatgaaccctcgagataagcaagtgagccgcttctcccctctaaaggatgtttacacgtgggtggcactcgctggaatccagcgctcgggcagccctgggaggacgcgctcagctgcgaggaggatggagagcaatacatcatcatctttggagaatttagcgacggcgcctgtgaaccagatccaagaaacaatttctgataattgtgtggtgattttctcaaaaacatcctgttcttactgtacaatggcaaaaaagcttttccatgacatgaatgttaactataaagtggtggaactggacctgcttgaatatggaaaccagttccaagatgctctttacaaaatgactggtgaaagaactgttccaagaatatttgtcaatggtacttttattggaggtgcaactgacactcataggcttcacaaagaaggaaaattgctcccactagttcatcagtgttatttaaaaaaaagtaagaggaaagaatttcagtgatgtttatactaataagtttgctagtacagtgtcagttatttaaagtggtaatgcccgataatgtcttttaaatgtttgaggatgttttaaatacatgcattgtcttcacgaagaagatgtaaaaataatgaacaataaattgcggtggaaacctc

SEQ ID NO: 329810 - DNA, 535 bp, Homo sapiens
  misc_feature (1)..(1): n is a, c, g, or t
  misc_feature (28)..(28): n is a, c, g, or t
  misc_feature (39)..(39): n is a, c, g, or t
ntcttttgttcatcgcaaacatccttanctgtaggactngagcgacggcgcctgtgaaccagatccaagaaacaatttctgataattgtgtggtgattttctcaaaaacatcctgttcttactgtacaatggcaaaaaagcttttccatgacatgaatgttaactataaagtggtggaactggacctgcttgaatatggaaaccagttccaagatgctctttacaaaatgactggtgaaagaactgttccaagaatatttgtcaatggtacttttattggaggtgcaactgacactcataggcttcacaaagaaggaaaattgctcccactagttcatcagtgttatttaaaaaaaagtaagaggaaagaatttcagtgatgtttatactaataagtttgctagtacagtgtcagttatttaaagtggtaatgcccgataatgtcttttaaatgtttgaggatgttttaaatacatgcattgtcttcacgaagaagatgtaaaaataatgaacaataaattgcggtggaaacctc

SEQ ID NO: 329811 - DNA, 587 bp, Homo sapiens
  misc_feature (49)..(49): n is a, c, g, or t
  misc_feature (55)..(55): n is a, c, g, or t
acagacaaactgattattataatcatcataaataaaaaatattctcagnaggcanagatggagagcaatacatcatcatctttggagaatttagcgacggcgcctgtgaaccagatccaagaaacaatttctgataattgtgtggtgattttctcaaaaacatcctgttcttactgtacaatggcaaaaaagcttttccatgacatgaatgttaactataaagtggtggaactggacctgcttgaatatggaaaccagttccaagatgctctttacaaaatgactggtgaaagaactgttccaagaatatttgtcaatggtacttttattggaggtgcaactgacactcataggcttcacaaagaaggaaaattgctcccactagttcatcagtgttatttaaaaaaaagtaagaggaaagaatttcagtgatgtttatactaataagtttgctagtacagtgtcagttatttaaagtggtaatgcccgataatgtcttttaaatgtttgaggatgttttaaatacatgcattgtcttcacgaagaagatgtaaaaataatgaacaataaattgcggtggaaacctc

SEQ ID NO: 329812 - DNA, 392 bp, Homo sapiens
cactctattcaggtcaacagaaacacttttaaaatggcattttcaatgcattatctcttaacatttacaaaccagcttatactttccttaattcagttcattacataataatataaatgaagcaaaaattataaaatgtagtagcaatcactgaggctgctatgaaaggtagttttataggttgcaaagtttatggtttgcaaagtaaaataaagccaaaaacggtaagtaataactaaactctataaaacagtctctctctagatgtgatttttcctttgacactgcacaaccaaatggtttcatttggcaaatactgatactggagttgactattacatagttggttctttagtttttgttttgctcatatacattttcaagttgtatga

SEQ ID NO: 329813 - DNA, 166 bp, Homo sapiens
tctacttgccaaattaacttggttagttttccttttatattcatcagaaccgaagacattttcattctgttctgaaaccataattaagtcagtaagtcttcagtgtttcagtcatacattgatttcaaaaatgaaagctcgggccgggtgcggtggctcacacctg

SEQ ID NO: 329814 - DNA, 207 bp, Homo sapiens
ttccctttatgttttagtggaaagacaaatgctttttaatataaatcaaataactatgataattgctaaatactagccaatggtctcttctgtctcaaacattattcaatacaacaagaaggaaataaaaacgttggattagatattgaggctgaagtccctgctgtaagggacatgctggaaggctggtattctagatacttacct

SEQ ID NO: 329815 - DNA, 245 bp, Homo sapiens
atgataatggaaattttttggtagagtgacatgattagatttttgcctcagaaggaagtctgtagttctgtggaggtcacatatgttggagtaagagaccagggacagtgaaacctgtcttgaggagcaaagataagtggtctgaatttctgtcgtgacagcaggataggaagaaaacagaatgatttccagctgatgaatcaggaggcccaggaggtttagtgaggggtggagatgagaacgta

SEQ ID NO: 329816 - DNA, 518 bp, Homo sapiens
gcggccgcccagagcggcggcgggggcggcggggcgcggggcgcgggggcccagctgagccggccgtcggagtgagaccctgcggcagagacgacggaggcggaagcaacccgatcccggaggcggcggcggcggggggagccggagccgcctgggatgttcagtcatgaaacgagtgcgtaccgagcagattcagatggcagtgtcctgctacctcaaacgccggcagtacgtggactcagatggtcccctgaagcaaggactgcggctgtcacagactgctgaagagatggcggccaatctaacagtgcaatcagaatctggttgtgccaacatagtgtctgcagccccttgccaggcagaaccccagcaatatgaagtacagtttggacgactgcggaattttctcactggtctctgaagagcagttaaccaaatcaaatgaatagttatttcctgatcaccaagataaagtgttgtctgtagatgagagattctgtgagctcacctattgccgt

SEQ ID NO: 329817 - DNA, 441 bp, Homo sapiens
gcggccgcccagagcggcggcgggggcggcggggcgcggggcgcgggggcccagctgagccggccgtcggagtgagaccctgcggcagagacgacggaggcggaagcaacccgatcccggaggcggcggcggcggggggagccggagccgcctgggatgttcagtcatgaaacgagtgcgtaccgagcagattcagatggcagtgtcctgctacctcaaacgccggcagtacgtggactcagatggtcccctgaagcaaggactgcggctgtcacagactgctgaagagatggcggccaatctaacaggtaatggtgggggctcgtctggtggggtgagcctggagcaggagaactcacgtcaatatccatgtggaattacttctcctcttctcaagacagtgccagagagagcagactgaccaaaaacctcagtgagcta

SEQ ID NO: 329818 - DNA, 2931 bp, Homo sapiens
aatccgagctcgatacccgtctgtaggaggcaagcaatagatgtgatttatctcagcctgggttaataatcgtctctctgtttcccgccctgacttgtgtatcttctcctctttagtgcaatcagaatctggttgtgccaacatagtgtctgcagccccttgccaggcagaaccccagcaatatgaagtacagtttggacgactgcggaattttctcactgattctgattcccagcatagccacgaagtgatgcctctcctctatcctctctttgtctacctccatctcaacctggtccaaaacagtccgaagagcacagtggaaagtttttacagccgcttccatggaatgtttctgcagaatgctagccagaaggatgtcattgagcagctacagaccactcaaaccatccaggacatcctatctaacttcaagcttcgagcattcctagataacaagtacgtggtccgtctccaagaagacagctacaactaccttatccgctacctccaaagtgacaacaatactgccctgtgcaaagtcctcaccttacatattcatcttgacgtgcagcctgccaagagaacagactatcagctgtatgccagtggcagctcctcccgcagtgagaacaacggtttggagccccctgacatgcccagccctattctgcagaacgaggctgccctagaggtcttacaggagagcattaagcgcgtcaaggatgggcctccctccctcactaccatctgcttctatgccttctataacacagagcagctgttgaacactgcagaaatctcccccgatagcaagctgcttgctgctgggtttgacaactcctgtataaaactttggagtttacgatccaagaagttaaaatcagagccccaccaagtagacgtgtcccgcatccatttggcttgtgatattctggaggaggaggatgatgaggatgataatgcaggcacggagatgaagatactgcggggccactgcggaccagtgtacagcacgaggttcctcgcggacagctcagggttgctctcttgttctgaagacatgtccatcagatactgggatctggggagtttcaccaacactgtgttgtaccaaggacatgcctatcctgtgtgggatctggacatcagtccatatagcctgtacttcgccagcgggtcccacgaccgcaccgccaggctgtggtcatttgatcggacgtacccgctgaggatatatgcaggacacctgcgcagatgtggactgtgtcaaattccaccctaattcaaactacttggccacgggctcaaccgacaagaccgtccggctgtggagcgctcagcaggggaactcggtgaggcttttcacaggccaccgtggccccgtgctttctctcgccttttctcccaacggtaagtacttggcgtctgctggcgaggaccagcggttgaagctgtgggacttggcctctgggaccctttataaagagttgagaggccacacagacaatatcaccagcctcaccttcagtccagacagcggcttgattgcctctgcctccatggacaactcggtgcgcgtctgggacatcaggaacacttactgcagtgcacctgccgacggctcctccagcgagctcgtgggcgtgtacaccgggcagatgagcaacgtcctgagcgtgcagttcatggcctgtaaccttcttctggtgactggaattacacaagaaaatcaggaacattaattttttaactttgttggaacggactggggtaacagtggaaagcctccagttgcaatccttcaatgagctgagattgaatcattgactgtgaaagagccccctcctcccctctctcctgggccctcattccgggcaggtcccccttcactcagccccccagtgtcgaaggccaaggttggggaggggaacaggagagaggcaatgatgagtgatcaagaattagagtgccctggaggtcactcacaagtcctcatggagactctgccgtgacctcgcgcatgcgagcaccttcctgtctctcattttcaccatctgactggggctaggtttggttagagggcggctgtagagcaccctcaggagaagtggcgccgcaggggtcacgcatggtccagccctcaggtgggagggaagtccttgttggcagagggatgtggggcgggaatgaggaaaggggagggcatgatcctggcaaatagtctttccttttccgtaattacagagaaccaggattttttttaattattgttattataattataattattattattattgacatgaggaaacctagcactggcagagggcaccttctctgcttttaatctttcaggtttgactcctggcactggttttgatacttggaattttgaggttcagggaattcagagaatttggtagcacagtgtattgggagaaagggaaatttcgggtgacagattgatcaccctggctgacatgtttctggaagtgggtgggtgggtttgattgagaacactttgggctcctgcagtgatggtgggaaagaaaaattctttccaaagctgcacttctcttaataattctctcccctcaaaagaaagattatgataaagaataatttggagtaataagtaacaagatagaattagaaaaatgttgaatttctgaatgaccattcagaggtgtggctttttccacgtctttttctcctgcaatgaactgctcccacgtcctgcactgcaataccagtctaatgaacactttgtgaaacaaatcgtaagtatgtacgcacgcatatcaaactatgctctgaggataaagcaagttctaatttgtggaaaaaggattaaatatttctgttttctgaaaagagttattttgtattttgttttctattaaaatgtatttagtttcaaaaaaaaaa

SEQ ID NO: 329819 - DNA, 795 bp, Homo sapiens
gcggccgcccagagcggcggcgggggcggcggggcgcggggcgcgggggcccagctgagccggccgtcggagtgagaccctgcggcagagacgacggaggcggaagcaacccgatcccggaggcggcggcggcggggggagccggagccgcctgggatgttcagtcatgaaacgagtgcgtaccgagcagattcagatggcagtgtcctgctacctcaaacgccggcagtacgtggactcagatggtcccctgaagcaaggactgcggctgtcacagactgctgaagagatggcggccaatctaacagtgcaatcagaatctggttgtgccaacatagtgtctgcagccccttgccaggcagaaccccagcaatatgaagtacagtttggacgactgcggaattttctcactgattctgattcccagcatagccacgaagtgatgcctctcctctatcctctctttgtctacctccatctcaacctggtccaaaacagtccgaagagcacagtggaaagtttttacagccgcttccatggaatgtttctgcagaatgctagccagaaggatgtcattgagcagctacagaccactcaaaccatccaggacatcctatctaacttcaagcttcgagcattcctagataacaagtacgtggtccgtctccaagaagacagctacaactaccttatccgctacctccaaagtgacaacaatactgccctgtcgggctagtcggggccccgactagcccgacagcccccctagccccccctgtcgggctagtcgggggg

SEQ ID NO: 329820 - DNA, 373 bp, Homo sapiens
caggcccctgatgtctctgtatcctgtcgttgcctcccttgaaggtcatgaaacgagtgcgtaccgagcagattcagatggcagtgtcctgctacctcaaacgccggcagtacgtggactcagatggtcccctgaagcaaggactgcggctgtcacagactgctgaagagatggcggccaatctaacaggtaatggtgggggctcgtctggtggggtgagcctggagcaggagaactcacgtcaatatccatgtggaattacttctcctcttctcaagacagtgccagagagagcagactgaccaaaaacctcagtgagctacgttaagtgaatgatgttggcctcagagaccctgtctgtcatttagagcgg

SEQ ID NO: 329821 - DNA, 3123 bp, Homo sapiens
gcggccgcccagagcggcggcgggggcggcggggcgcggggcgcgggggcccagctgagccggccgtcggagtgagaccctgcggcagagacgacggaggcggaagcaacccgatcccggaggcggcggcggcggggggagccggagccgcctgggatgttcagtcatgaaacgagtgcgtaccgagcagattcagatggcagtgtcctgctacctcaaacgccggcagtacgtggactcagatggtcccctgaagcaaggactgcggctgtcacagactgctgaagagatggcggccaatctaacagtgcaatcagaatctggttgtgccaacatagtgtctgcagccccttgccaggcagaaccccagcaatatgaagtacagtttggacgactgcggaattttctcactgattctgattcccagcatagccacgaagtgatgcctctcctctatcctctctttgtctacctccatctcaacctggtccaaaacagtccgaagagcacagtggaaagtttttacagccgcttccatggaatgtttctgcagaatgctagccagaaggatgtcattgagcagctacagaccactcaaaccatccaggacatcctatctaacttcaagcttcgagcattcctagataacaagtacgtggtccgtctccaagaagacagctacaactaccttatccgctacctccaaagtgacaacaatactgccctgtgcaaagtcctcaccttacatattcatcttgacgtgcagcctgccaagagaacagactatcagctgtatgccagtggcagctcctcccgcagtgagaacaacggtttggagccccctgacatgcccagccctattctgcagaacgaggctgccctagaggtcttacaggagagcattaagcgcgtcaaggatgggcctccctccctcactaccatctgcttctatgccttctataacacagagcagctgttgaacactgcagaaatctcccccgatagcaagctgcttgctgctgggtttgacaactcctgtataaaactttggagtttacgatccaagaagttaaaatcagagccccaccaagtagacgtgtcccgcatccatttggcttgtgatattctggaggaggaggatgatgaggatgataatgcaggcacggagatgaagatactgcggggccactgcggaccagtgtacagcacgaggttcctcgcggacagctcagggttgctctcttgttctgaagacatgtccatcagatactgggatctggggagtttcaccaacactgtgttgtaccaaggacatgcctatcctgtgtgggatctggacatcagtccatatagcctgtacttcgccagcgggtcccacgaccgcaccgccaggctgtggtcatttgatcggacgtacccgctgaggatatatgcaggacacctgcgcagatgtggactgtgtcaaattccaccctaattcaaactacttggccacgggctcaaccgacaagaccgtccggctgtggagcgctcagcaggggaactcggtgaggcttttcacaggccaccgtggccccgtgctttctctcgccttttctcccaacggtaagtacttggcgtctgctggcgaggaccagcggttgaagctgtgggacttggcctctgggaccctttataaagagttgagaggccacacagacaatatcaccagcctcaccttcagtccagacagcggcttgattgcctctgcctccatggacaactcggtgcgcgtctgggacatcaggaacacttactgcagtgcacctgccgacggctcctccagcgagctcgtgggcgtgtacaccgggcagatgagcaacgtcctgagcgtgcagttcatggcctgtaaccttcttctggtgactggaattacacaagaaaatcaggaacattaattttttaactttgttggaacggactggggtaacagtggaaagcctccagttgcaatccttcaatgagctgagattgaatcattgactgtgaaagagccccctcctcccctctctcctgggccctcattccgggcaggtcccccttcactcagccccccagtgtcgaaggccaaggttggggaggggaacaggagagaggcaatgatgagtgatcaagaattagagtgccctggaggtcactcacaagtcctcatggagactctgccgtgacctcgcgcatgcgagcaccttcctgtctctcattttcaccatctgactggggctaggtttggttagagggcggctgtagagcaccctcaggagaagtggcgccgcaggggtcacgcatggtccagccctcaggtgggagggaagtccttgttggcagagggatgtggggcgggaatgaggaaaggggagggcatgatcctggcaaatagtctttccttttccgtaattacagagaaccaggattttttttaattattgttattataattataattattattattattgacatgaggaaacctagcactggcagagggcaccttctctgcttttaatctttcaggtttgactcctggcactggttttgatacttggaattttgaggttcagggaattcagagaatttggtagcacagtgtattgggagaaagggaaatttcgggtgacagattgatcaccctggctgacatgtttctggaagtgggtgggtgggtttgattgagaacactttgggctcctgcagtgatggtgggaaagaaaaattctttccaaagctgcacttctcttaataattctctcccctcaaaagaaagattatgataaagaataatttggagtaataagtaacaagatagaattagaaaaatgttgaatttctgaatgaccattcagaggtgtggctttttccacgtctttttctcctgcaatgaactgctcccacgtcctgcactgcaataccagtctaatgaacactttgtgaaacaaatcgtaagtatgtacgcacgcatatcaaactatgctctgaggataaagcaagttctaatttgtggaaaaaggattaaatatttctgttttctgaaaagagttattttgtattttgttttctattaaaatgtatttagtttcaaaaaaaaaa

SEQ ID NO: 329822 - DNA, 1326 bp, Homo sapiens
gcggccgcccagagcggcggcgggggcggcggggcgcggggcgcgggggcccagctgagccggccgtcggagtgagaccctgcggcagagacgacggaggcggaagcaacccgatcccggaggcggcggcggcggggggagccggagccgcctgggatgttcagtcatgaaacgagtgcgtaccgagcagattcagatggcagtgtcctgctacctcaaacgccggcagtacgtggactcagatggtcccctgaagcaaggactgcggctgtcacagactgctgaagagatggcggccaatctaacagtgcaatcagaatctggttgtgccaacatagtgtctgcagccccttgccaggcagaaccccagcaatatgaagtacagtttggacgactgcggaattttctcactgattctgattcccagcatagccacgaagtgatgcctctcctctatcctctctttgtctacctccatctcaacctggtccaaaacagtccgaagagcacagtggaaagtttttacagccgcttccatggaatgtttctgcagaatgctagccagaaggatgtcattgagcagctacagaccactcaaaccatccaggacatcctatctaacttcaagcttcgagcattcctagataacaagtacgtggtccgtctccaagaagacagctacaactaccttatccgctacctccaaagtgacaacaatactgccctgtgcaaagtcctcaccttacatattcatcttgactcctggcactggttttgatacttggaattttgaggttcagggaattcagagaatttggtagcacagtgtattgggagaaagggaaatttcgggtgacagattgatcaccctggctgacatgtttctggaagtgggtgggtgggtttgattgagaacactttgggctcctgcagtgatggtgggaaagaaaaattctttccaaagctgcacttctcttaataattctctcccctcaaaagaaagattatgataaagaataatttggagtaataagtaacaagatagaattagaaaaatgttgaatttctgaatgaccattcagaggtgtggctttttccacgtctttttctcctgcaatgaactgctcccacgtcctgcactgcaataccagtctaatgaacactttgtgaaacaaatcgtaagtatgtacgcacgcatatcaaactatgctctgaggataaagcaagttctaatttgtggaaaaaggattaaatatttctgttttctgaaaagagttattttgtattttgttttctattaaaatgtatttagtttcaaaaaaaaaa

SEQ ID NO: 329823 - DNA, 393 bp, Homo sapiens
caggtataatgttgcccaaaaatgtcagtcttctcccagcctcttgccccaccaggcctttattccatcagcctggtcctgacatttattaagtacttatgtcactcagcactctggactgtgcctcatgctagatgagaatgtcttcaaataaaataacgtagttgtggaagaatcacctgagcccaggaggtcgaggctgcagtgagctgtgattgtgccactgcactccagcctaggtggtgggagcctgtcttgaggccaccctggccaacacagtgaaaccccctatctactaaaaatacaaaaattagcagggtgtggtggcgggcacctgtaatcccagcaactcgggaggctgaggcaggagaatcacttgaacccgggaggcag

SEQ ID NO: 329824 - DNA, 298 bp, Homo sapiens
tcatctcccagggtcatttcaatgacaaatgcacaagaaggaaaagaccccaaaagcactgaaacccccactctaccactcccactggcaactagagaaaaggggtccaaaggcagtcttgaggggtggggcaacctccctctagctagacagcatgcagggagcttggagcccagcagaccccaaagctgagcgaggcaggcacccactcagtgagaggactcgtgattacagtctgttccagggaagatcaatatagcaggaaaagtcaagacagataccagggcatgggtcgacg

SEQ ID NO: 329825 - DNA, 903 bp, Homo sapiens
tcttaaaggaaggaacaaaatcaaaggctgagatttcttaacttcatcacctttaatgaggctcaccattacattttctgaatgtgcttgtgttaattattagtaatggtaacagagtacagacagtatactaattacaatattaagcagggctggctggttaattctctcttgagaatttgaactaggacatatcaacagccttgggatctgaagctataataacatgagatagagaggttcccaaaacccattagagtcatgtagaagccgtgtgatcttaagcaagttatttaatttctctgtacctcactttcttcagctaaaaaaagtaaggatgatagtttccatgtcaagactttttgatttaatgagttaatatctgtggagtctttaaaacattgcttgatgtactggtaagtgctatttatgttaaataagctaataaacaatcaaataaatgcctgaaatcatcaggaattagggaacaatgtatgaacagaagaggccagccaacagagagagaagaatggagcagatgtgcagaaactgtgcaagagtgcccccgctggtcctaagggactaggccaagatgcaatttctagagctaactcttgggactgggggatgaggaatgggaggcagtgctggcaccttcattcaccttcattcactagaactgtcactgagtgtaaataaaggtcatttgtttgtgtgactgtttttgtaagagagtgtgtcagaatggaagttggtggctgattgagacttagagggggtgattgggaatgatggatgctaaggctcagtacccaacattgcccttacttagctatgtcaatcaatgacctctcgtattcttaccagaaataaccccacttttaaaaaagtgctttttaaaga

SEQ ID NO: 329826 - DNA, 471 bp, Homo sapiens
gcattgttgatacagcatttcttaggaatgccactgttgtctacagaattttcttccaagctactgacactcattctgtaagttctatgggtatgcacaggcaatgaggatacatcacaaccgccatctgctcagcaatgattgtaggatacattccaattttggagattcattgtagaatcaaaacttagtattgtactcttaaaggaaggaacaaaatcaaaggctgagatttcttaacttcatcacctttaatgaggctcaccattacattttctgaatgtgcttgtgttaattattagtaatggtaacagagtacagacagtatactaattacaatattaagcagggctggctggttaattctctcttgagaatttgaactaggacatatcaacagccttgggatctgaagctataataacatgagatagagaggttcccaaaacccattagagtcatgtagaagcc

SEQ ID NO: 329827 - DNA, 737 bp, Homo sapiens
tcccttcagggagcagaggcaggggcctggacttgggagcctagagggtgggggcttggagccacttgaggttagaaccttggctccccctcttgtgacaggatataaggacaaaggaaaccagatttgtgcaaacagaggaggcgtttgtggggtcaccaggctaggactggccatgcaagggccttatgtcatctgggctctctgaggcctcccctctggagcataaccatcagacagccagagatgtccccacgcccccaccatgttttctgtgccagggaggaggagcacacaggcagagaggcagatgagtactgactgacagtcagctgcaccggttgttaaaatgtttccaccctacagccctgagctccccaggcgctttcactcaccttacccaggacctcccaacctcccagcaactaaacactccagcaacgaaagggttaatactgcccatcaggagcctccctgtttctcctccaagcttaccagtatgcatctccatggcgaacaggttgttaaatattttgaatattgcccctgctcccaaacaggactcagacaccaacacacaaaagctggagtaagcaggagagggaggtccaactgacagaaagtaacggcctggattttagctttgtaggtttattagtttgtgcaggagtggtcaggtctagggggactgattcacattaaccaagatcaccagatgctgatgtacaaactgaaag

SEQ ID NO: 329828 - DNA, 2122 bp, Homo sapiens
agaattcagcggccgctgaattctagcaaaggcaccatgcctctgcgggatgaaaccctccgagaggtgtgggcctctgacagtgggcatgaagaagaaagcctgagcccggaggccccgcggcgccccaaacagcgacccgccccggcacagaggctaaggaagaagaggacggaggcccccgaatccccctgccccacgggatccaagccccggaagcccggagaggaggaggaggaagaggaggacgaggaggacgaggaagaggaggcagaggaaaagaaagagaaaatccttctgcctcccaagaagcccctgagagagaagagctccgcagacctgaaggagaggagggccaaggcccagggcccaaggggagacctgggaagccctgaccccccaccgaaacctctgcgtgttaggaataaggaagctccagcaggggaggggaccaagatgagaaagaccaagaagaaagggtctggggaggccgacaaggacccctcagggagcccagccagtgcgaggaagagcccagcagccatgtttctggttggggaaggcagtcctgacaagaaagccctgaagaagaaaggcactcccaaaggcgcgaggaaggaggaagaagaggaggaggaggcagctacggtgataaagaacagcaatcaaaagggcaaagccaaaggaaaaggcaaaaagaaagcgaaggaggagagggccccgtctccccccgtggaggtggacgaaccccgggagtttgtgctccggcctgccccccagggccgcacggtgcgctgccggctgacccgggacaaaaagggcatggatcgaggcatgtatccctcctacttcctgcacctggacacggagaagaaggtgttcctcttggctggcaggaaacgaaaacggagcaagacagccaattacctcatctccatcgaccctaccaatctgtcccgaggaggggagaatttcatcgggaagctgaggtccaacctcctggggaaccgcttcacggtctttgacaacgggcagaacccacagcgtgggtacagcactaatgtggcaagccttcggcaggagctggcagctgtgatctatgaaaccaacgtgctgggcttccgtggcccccggcgcatgaccgtcatcattcctggcatgagtgcggagaacgagagggtccccatccggccccgaaatgctagtgacggcctgctggtgcgctggcagaacaagacgctggagagcctcatagaactgcacaacaagccacctgtctggaacgatgacagtggctcctacaccctcaacttccaaggccgggtcacccaggcctcagtcaagaacttccagattgtccacgctgatgaccccgactatatcgtgctgcagttcggccgcgtggcggaggacgccttcaccctagactaccggtacccgctgtgcgccctgcaggccttcgccatcgccctctccagtttcgacgggaagctggcctgcgagtgaccccagcagcccctcagcgcccccagagcccgtcagcgtgggggaaaggattcagtggaggctggcagggtccctccagcaaagctcccgcggaaaactgctcctgtgtcggggctgacctctcactgcctctcggtgacctccgtcctctccccagcctggcacaggccgaggcaggaggagcccggacggcgggtaggacggagatgaagaacatctggagttggagccgcacatctggtctcggagctcgcctgcgccgctgtgcccccctcctccccgcgccccagtcacttcctgtccgggagcagtagtcattgttgttttaacctcccctctccccgggaccgcgctagggctccgaggagctggggcgggctaggaggagggggtaggtgatgggggacgagggccaggcacccacatccccaataaagccgcgtccttggccaagcggagcggtggttcctcagcgcgtgcggagaacgaggcggcaggaggcgtccgaggcgcgagctggaagtctcaacccccgtcccactcctgcccaggccccgggcgctcccgcgtcccctccccgcgcccgtcgcgggtcctaccgaaactcggcggccgc

SEQ ID NO: 329829 - DNA, 2281 bp, Homo sapiens
agaattcagcggccgctgaattctagcaaaggcaccatgcctctgcgggatgaaaccctccgagaggtgtgggcctctgacagtgggcatgaagaagaaagcctgagcccggaggccccgcggcgccccaaacagcgacccgccccggcacagaggctaaggaagaagaggacggaggcccccgaatccccctgccccacgggatccaagccccggaagcccggagctgggcggacggggaggccgcgggaggagccttccccagacccagcccaggcccgggcgccgcagacggtctacgccaggttcctcagggaccccgaggccaagaagcgcgacccccgggaaacctttctggtagcccgtgccccagacgcggaggacgaggaggaggaggaagaggaggacgaggaggacgaggaagaggaggcagaggaaaagaaagagaaaatccttctgcctcccaagaagcccctgagagagaagagctccgcagacctgaaggagaggagggccaaggcccagggcccaaggggagacctgggaagccctgaccccccaccgaaacctctgcgtgttaggaataaggaagctccagcaggggaggggaccaagatgagaaagaccaagaagaaagggtctggggaggccgacaaggacccctcagggagcccagccagtgcgaggaagagcccagcagccatgtttctggttggggaaggcagtcctgacaagaaagccctgaagaagaaaggcactcccaaaggcgcgaggaaggaggaagaagaggaggaggaggcagctacggtgataaagaacagcaatcaaaagggcaaagccaaaggaaaaggcaaaaagaaagcgaaggaggagagggccccgtctccccccgtggaggtggacgaaccccgggagtttgtgctccggcctgccccccagggccgcacggtgcgctgccggctgacccgggacaaaaagggcatggatcgaggcatgtatccctcctacttcctgcacctggacacggagaagaaggtgttcctcttggctggcaggaaacgaaaacggagcaagacagccaattacctcatctccatcgaccctaccaatctgtcccgaggaggggagaatttcatcgggaagctgaggtccaacctcctggggaaccgcttcacggtctttgacaacgggcagaacccacagcgtgggtacagcactaatgtggcaagccttcggcaggagctggcagctgtgatctatgaaaccaacgtgctgggcttccgtggcccccggcgcatgaccgtcatcattcctggcatgagtgcggagaacgagagggtccccatccggccccgaaatgctagtgacggcctgctggtgcgctggcagaacaagacgctggagagcctcatagaactgcacaacaagccacctgtctggaacgatgacagtggctcctacaccctcaacttccaaggccgggtcacccaggcctcagtcaagaacttccagattgtccacgctgatgaccccgactatatcgtgctgcagttcggccgcgtggcggaggacgccttcaccctagactaccggtacccgctgtgcgccctgcaggccttcgccatcgccctctccagtttcgacgggaagctggcctgcgagtgaccccagcagcccctcagcgcccccagagcccgtcagcgtgggggaaaggattcagtggaggctggcagggtccctccagcaaagctcccgcggaaaactgctcctgtgtcggggctgacctctcactgcctctcggtgacctccgtcctctccccagcctggcacaggccgaggcaggaggagcccggacggcgggtaggacggagatgaagaacatctggagttggagccgcacatctggtctcggagctcgcctgcgccgctgtgcccccctcctccccgcgccccagtcacttcctgtccgggagcagtagtcattgttgttttaacctcccctctccccgggaccgcgctagggctccgaggagctggggcgggctaggaggagggggtaggtgatgggggacgagggccaggcacccacatccccaataaagccgcgtccttggccaagcggagcggtggttcctcagcgcgtgcggagaacgaggcggcaggaggcgtccgaggcgcgagctggaagtctcaacccccgtcccactcctgcccaggccccgggcgctcccgcgtcccctccccgcgcccgtcgcgggtcctaccgaaactcggcggccgc

SEQ ID NO: 329830 - DNA, 2285 bp, Homo sapiens
ctagacctgcagagaaaggggtgcgataggcaaaggcaccatgcctctgcgggatgaaaccctccgagaggtgtgggcctctgacagtgggcatgaagaagaaagcctgagcccggaggccccgcggcgccccaaacagcgacccgccccggcacagaggctaaggaagaagaggacggaggcccccgaatccccctgccccacgggatccaagccccggaagcccggagctgggcggacggggaggccgcgggaggagccttccccagacccagcccaggcccgggcgccgcagacggtctacgccaggttcctcagggaccccgaggccaagaagcgcgacccccgggaaacctttctggtagcccgtgccccagacgcggaggacgaggaggaggaggaagaggaggacgaggaggacgaggaagaggaggcagaggaaaagaaagagaaaatccttctgcctcccaagaagcccctgagagagaagagctccgcagacctgaaggagaggagggccaaggcccagggcccaaggggagacctgggaagccctgaccccccaccgaaacctctgcgtgttaggaataaggaagctccagcaggggaggggaccaagatgagaaagaccaagaagaaagggtctggggaggccgacaaggacccctcagggagcccagccagtgcgaggaagagcccagcagccatgtttctggttggggaaggcagtcctgacaagaaagccctgaagaagaaaggcactcccaaaggcgcgaggaaggaggaagaagaggaggaggaggcagctacggtgataaagaacagcaatcaaaagggcaaagccaaaggaaaaggcaaaaagaaagcgaaggaggagagggccccgtctccccccgtggaggtggacgaaccccgggagtttgtgctccggcctgccccccagggccgcacggtgcgctgccggctgacccgggacaaaaagggcatggatcgaggcatgtatccctcctacttcctgcacctggacacggagaagaaggtgttcctcttggctggcaggaaacgaaaacggagcaagacagccaattacctcatctccatcgaccctaccaatctgtcccgaggaggggagaatttcatcgggaagctgaggtccaacctcctggggaaccgcttcacggtctttgacaacgggcagaacccacagcgtgggtacagcactaatgtggcaagccttcggcaggagctggcagctgtgatctatgaaaccaacgtgctgggcttccgtggcccccggcgcatgaccgtcatcattcctggcatgagtgcggagaacgagagggtccccatccggccccgaaatgctagtgacggcctgctggtgcgctggcagaacaagacgctggagagcctcatagaactgcacaacaagccacctgtctggaacgatgacagtggctcctacaccctcaacttccaaggccgggtcacccaggcctcagtcaagaacttccagattgtccacgctgatgaccccgactatatcgtgctgcagttcggccgcgtggcggaggacgccttcaccctagactaccggtacccgctgtgcgccctgcaggccttcgccatcgccctctccagtttcgacgggaagctggcctgcgagtgaccccagcagcccctcagcgcccccagagcccgtcagcgtgggggaaaggattcagtggaggctggcagggtccctccagcaaagctcccgcggaaaactgctcctgtgtcggggctgacctctcactgcctctcggtgacctccgtcctctccccagcctggcacaggccgaggcaggaggagcccggacggcgggtaggacggagatgaagaacatctggagttggagccgcacatctggtctcggagctcgcctgcgccgctgtgcccccctcctccccgcgccccagtcacttcctgtccgggagcagtagtcattgttgttttaacctcccctctccccgggaccgcgctagggctccgaggagctggggcgggctaggaggagggggtaggtgatgggggacgagggccaggcacccacatccccaataaagccgcgtccttggccaagcggagcggtggttcctcagcgcgtgcggagaacgaggcggcaggaggcgtccgaggcgcgagctggaagtctcaacccccgtcccactcctgcccaggccccgggcgctcccgcgtcccctccccgcgcccgtcgcgggtcctaccgaaactcggcggccgc

SEQ ID NO: 329831 - DNA, 502 bp, Homo sapiens
actctcttgtggttgtggggagcatccaagtgagacatgggtgttggaagcactttgcaaaccagggtgaggagttcacagccttgtttccccctccacgctcaggcactcccaaaggcgcgaggaaggaggaagaagaggaggaggaggcagctacggtgataaagaacagcaatcaaaagggcaaagccaaaggaaaaggcaaaaaggttggggcccagaggggcagggggctgaggtcccttcagggagcagaggcaggggcctggacttgggagcctagagggtgggggcttggagccacttgaggttagaaccttggctccccctcttgtgacaggatataaggacaaaggaaaccagatttgtgcaaacagaggaggcgtttgtggggtcaccaggctaggactggccatgcaagggccttatgtcatctgggctctctgaggcctcccctctggagcataaccatcagacagccagagatgtccccacgccccca

SEQ ID NO: 329832 - DNA, 217 bp, Homo sapiens
aggatcctgtcctagggtgcttcccatatcctgctctcctccttcctcaacacactccaaacatatgtgctacatttccaggatgaccccaaacactttcctgccacagcacctttgcgtttgtgagactctcttccaagtacaccattctcctctagtcaggactggtttcttgtcagctccaatattccccctcctacccccacaaaaggccttt

SEQ ID NO: 329833 - DNA, 200 bp, Homo sapiens
cacaaatgttcaacagcaaaagaatgggtaaaagagttgaggtatattcacataccatgttaccacgtagcaacaaataaatgaacgagagctacacacagcaaaatgaatcttaggatttcgttgacataaagttaaaaatattcataaataatctgtggtgttagaagacagcttgggtggaagcaggtggggtagtg

SEQ ID NO: 329834 - DNA, 450 bp, Homo sapiens
tctggaggtgacctgtggagggcccttgtagaactgggcatggcatttttgaagggggtgttcatggatgtttgccgctgaccagtggctggcagctatgagctggagatcaggagccggcagtgggcagaacatggagaggcatcagctgtggccctgacggtatctaaatagctgtcacaacccaaggcaatgtcagtgctccactgaattctaagctggagcctagtgggtgagcctctggcctctaggatcgctcccaggccctattccatatccttcctatagtctgtctccatgcagtgggtgttccccactaccaggagctcacacatggactcctgccctccttgaagtctagagcattgcttcaagaccaccagcatcaggaccacctggagcgcttgttaaaaggggcaatgcctggcgccaccgctatttaaccagaat

SEQ ID NO: 329835 - DNA, 218 bp, Homo sapiens
tgtgaggaatgtttggagggaatggggtttggttttggatatgctaagctctttatcacactctcaagtggaaagctttcccattctccacatagctctcttttctaaaatgtctgcttagaattcctttacccccatcctggctaacacagtgaaactccgtctctactaaaaatacaaaaattagccgggcgtgggggtgggggcgcctgtagtcc

SEQ ID NO: 329836 - DNA, 344 bp, Homo sapiens
acctcagcctccagagttcaagcaattcttctgtgtcagcctcccaagtagctgggattacaggtgcacaccaccacgcccagccaatttatgtatttttagtagagactgggttttaccatattggccaggctggtctcgaactcctgaccttgtgatctgcccgcctcaggctcccaaagtgctgggattactgatgcgagccaccgcgtccagctgcctcacttgttgttttaggacttaggctccacctcaccagtgtagtcccagcaggtagataggagttaatagttgactatctcagctcaccaccctccaaacctttttttttttttttttttttt

SEQ ID NO: 329837 - DNA, 2757 bp, Homo sapiens
  misc_feature (2)..(2): n is a, c, g, or t
  misc_feature (66)..(66): n is a, c, g, or t
  misc_feature (77)..(78): n is a, c, g, or t
angctgataatgccagtaaactagctgcaatgctaaatacctgttcctttcagaaaccagaacaantacaacaacannaatcagtttttgagatatgcccatctcctgcagaaaataacatccagggaaccacaaagctagcgtctggtgaagaattctgttcaggttccagcagcaatttgcaagctcctggtggcagctctgaacggtatttaaaacaaaatgaaatgaatggtgcttacttcaagcaaagctcagtgttcactaaggattccttttctgccactaccacaccaccaccaccatcacaattgcttctttctccccctcctcctcttccacaggttcctcagcttccttcagaaggaaaaagcactctgaatggtggagttttagaagaacaccaccactaccccaaccaaagtaacacaacacttttaagggaagtgaaaatagagggtaaacctgaggcaccaccttcccagagtcctaatccatctacacatgtatgcagcccttctccgatgctttctgaaaggcctcagaataattgtgtgaacaggaatgacatacagactgcagggacaatgactgttccattgtgttctgagaaaacaagaccaatgtcagaacacctcaagcataacccaccaatttttggtagcagtggagagctacaggacaactgccagcagttgatgagaaacaaagagcaagagattctgaagggtcgagacaaggagcaaacacgagatcttgtgcccccaacacagcactatctgaaaccaggatggattgaattgaaggcccctcgttttcaccaagcggaatcccatctaaaacgtaatgaggcatcactgccatcaattcttcagtatcaacccaatctctccaatcaaatgacctccaaacaatacactggaaattccaacatgcctggggggctcccaaggcaagcttacacccagaaaacaacacagctggagcacaagtcacaaatgtaccaagttgaaatgaatcaagggcagtcccaaggtacagtggaccaacatctccagttccaaaaaccctcacaccaggtgcacttctccaaaacagaccatttaccaaaagctcatgtgcagtcactgtgtggcactagatttcattttcaacaaagagcagattcccaaactgaaaaacttatgtccccagtgttgaaacagcacttgaatcaacaggcttcagagactgagccattttcaaactcacaccttttgcaacataagcctcataaacaggcagcacaaacacaaccatcccagagttcacatctccctcaaaaccagcaacagcagcaaaaattacaaataaagaataaagaggaaatactccagacttttcctcacccccaaagcaacaatgatcagcaaagagaaggatcattctttggccagactaaagtggaagaatgttttcatggtgaaaatcagtattcaaaatcaagcgagttcgagactcataatgtccaaatgggactggaggaagtacagaatataaatcgtagaaattccccttatagtcagaccatgaaatcaagtgcatgcaaaatacaggtttcttgttcaaacaatacacacctagtttcagagaataaagaacagactacacatcctgaactttttgcaggaaacaagacccaaaacttgcatcacatgcaatattttccaaataatgtgatcccaaagcaagatcttcttcacaggtgctttcaagaacaggagcagaagtcacaacaagcttcagttctacagggatataaaaatagaaaccaagatatgtctggtcaacaagctgcgcaacttgctcagcaaaggtacttgatacataaccatgcaaatgtttttcctgtgcctgaccagggaggaagtcacactcagacccctccccagaaggacactcaaaagcatgctgctctaaggtggcatctcttacagaagcaagaacagcagcaaacacagcaaccccaaactgagtcttgccatagtcagatgcacaggccaattaaggtggaacctggatgcaagccacatgcctgtatgcacacagcaccaccagaaaacaaaacatggaaaaaggtaactaagcaagagaatccacctgcaagctgtgataatgtgcagcaaaagagcatcattgagaccatggagcagcatctgaagcagtttcacgccaagtcgttatttgaccataaggctcttactctcaaatcacagaagcaagtaaaagttgaaatgtcagggccagtcacagttttgactagacaaaccactgctgcagaacttgatagccacaccccagctttagagcagcaaacaacttcttcagaaaagacaccaaccaaaagaacagctgcttctgttctcaataattttatagagtcaccttccaaattactagatactcctataaaaaatttattggatacacctgtcaagactcaatatgatttcccatcttgcagatgtgtaggtaagtgccagaaatgtactgagacacatggcgtttatccagaattagcaaatttatcttcagatatgggattttccttctttttttaaatcttgagtctggcagcaatttgtaaaggctcataaaaatctgaagcttacattttttgtcaagttaccgatgcttgtgtcttgtgaaagagaacttcacttacatgcagtttttccaaaagaattaaataatcgtgcatgtttatttttccctctc

SEQ ID NO: 329838 - DNA, 284 bp, Homo sapiens
tcacatgttcgacaaaggtcttgcatctaacatatacaaagaactcccaaaactcaaatctttgtaaaaccacaaacagcctagtttctaagaacaggcaaaatacttggacacctacttacttccccaaagaggatgtgttaaaggaaaacatccacatgaaaatatgctcaacatcattactcattaggaaaatgcaaattaagaccatgatgaaatattctgcatccttgtgaacagccacagtaaagaatcatgacagtatgacatgctgcccagggtgc

SEQ ID NO: 329839 - DNA, 376 bp, Homo sapiens
gtactggggagctgccaaggcaaccaagacttgagagtccaagatctcagtgagaagggaactgcagaaaggtgagcaaataccctataagatgctgaggcagagcttttgtccatcttcagatggactagagagatgtaagtaaatagacagacatgtaaataaataaacaaatggagttcacaaagcagaactcctgggcttaagagatcttcccacctcagcctcccaagtagctgggactacaggcatgtgctaccacacccatctaatttttgtgtttttttgtagcaatgaggtcgcccaggctggtctcaaactcctagcctcaagcaatcctcctgcctcagcctcccaagtagctgggattacaggc

SEQ ID NO: 329840 - DNA, 493 bp, Homo sapiens
ttgtactcctgcctgtgggtagcacaagagcgaaactccgtctcaagaaaacaaaacaaaataaaaaataaagactacatctaaccaggtaaggtcacaaacaaggaaactcttccactatcagttctcaccagagtattctgtaactgtaaaagattaggccttcagcagctcaaaactcagcatctgctgcctaaggctctgccacctcaaagactcttccttgtaagactgcaggccaattgcccaccaactggcccagaccaagatgccttttgtcttccttgctccctctaaactggttccataacgtttgctcctatatctttttcctcttgatgctaagcattattttgttccttgtgttgtaatgcccaaccttgttttcactaatcctgtttttagactctcccttttgctctcttaatcacctagcctcgtttccacatgaatagactctcgcttagctgagaaagccagacgagctccacct

SEQ ID NO: 329841 - DNA, 505 bp, Homo sapiens
agttgcatgatacaatcgagctcggtacctgtgtgtagcagtatagcgaaaatcgtcagaaaacaaaacaaaataaaaaataaagactacatctaaccaggtaaggtcacaaacaaggaaactcttccactatcagttctcaccagagtattctgtaactgtaaaagattaggccttcagcagctcaaaactcagcatctgctgcctaaggctctgccacctcaaagactcttccttgtaagactgcaggccaattgcccaccaactggcccagaccaagatgccttttgtcttccttgctccctctaaactggttccataacgtttgctcctatatctttttcctcttgatgctaagcattattttgttccttgtgttgtaatgcccaaccttgttttcactaatcctgtttttagactctcccttttgctctcttaatcacctagcctcgtttccacatgaatagactctcgcttagctgagaaagccagacgagctccacct

SEQ ID NO: 329842 - DNA, 424 bp, Homo sapiens
tgttgggtcccagaggatacctgacgcacacactatctcttccatcagtgccttagcctgatccctggttgcaaaaactgtaaaagattaggccttcagcagctcaaaactcagcatctgctgcctaaggctctgccacctcaaagactcttccttgtaagactgcaggccaattgcccaccaactggcccagaccaagatgccttttgtcttccttgctccctctaaactggttccataacgtttgctcctatatctttttcctcttgatgctaagcattattttgttccttgtgttgtaatgcccaaccttgttttcactaatcctgtttttagactctcccttttgctctcttaatcacctagcctcgtttccacatgaatagactctcgcttagctgagaaagccagacgagctccacct

SEQ ID NO: 329843 - DNA, 413 bp, Homo sapiens
actttctataaagcccagaaagattagatcagagaagtgccaccaacttggactctactgacttccaaccagccacagtctcaggtccccgattctgctctatcaactttccttcaccctgcagtacttcctccaccggagtgaaggatctcagctattttccatccatctcttgctaaagtggaaatatctgagccccaccttcctctccaatgaaaggacaagatgataaagcacaaagaatcagcaccctctccccttgccttgactcatcgcctcaaactctccgcaagcactggccttccacctaagcacagaacatccactggaagtcagtctggaaaaacaataaagtgtttgaaggctttaaaagcgtttaaagtgctggttgtcacgggggagttcccagcaat

SEQ ID NO: 329844 - DNA, 163 bp, Homo sapiens
ggtcctatgctagttttgaagttctgctattgctgtctttaaattcttgatttttgtttgtttgtttgtttttaatagagacagagactggagtcaggctggagtgcagtagtgtgatcatagctcactgtagccttgaacgaacttttgggctcaagcagtt

SEQ ID NO: 329845 - DNA, 651 bp, Homo sapiens
cccggtggcgcccgttttaaagaagtgtatctctgggttgcggaaatttggcacgagcggctccaagccaacctggggcctatcaaccaagaccaggttttacttcacttcctggaagtaccatgacccctcctccaagtgggcctaatccttatgcgcgtaaccgtcctccctttggtcagggctatacccaacctggacctggttatcgataaggaggctcctctacaccaattaatgtagctgctagctattggcctcccaaaagactccagtactattttaatttgtattgaagaagttcagaaatttaaaagcagagcattttttatgatatcattgttggtgttaattgaaagtataatttgctggaacacaaagaccaaaatgaaagttttttcctccctgcttaaaaatgtagcagcttcttagttactttggaacactactcttacatgtataaagtgattgacttgactttctagcttcccttgtccggaggatattaaaatgctagggtgaggtttagccatcttacttggctttttactattaacatgatgtactaaagtagagccctttgagaatacaagatattatgtataaaatgtaacactgatgataggttaataaagatgattgaatccatta

SEQ ID NO: 329846 - DNA, 1013 bp, Homo sapiens
  misc_feature (594)..(594): n is a, c, g, or t
  misc_feature (694)..(694): n is a, c, g, or t
ggatactaaactgacttttttttgactatccaggccacccagtgctcctgcagaagatcgttcaggaacacccgacagcattgcttcctcctcctcagcagctcacccaccaggcgttcagccacagcagccaccatatacaggagctcagactcaagcaggtcagattgacggtcagatgtccccatcatttccacgcccaggcacgggtatggtgcacagcttctcgcctgctccaccctcacatgcctcagaagtataggttttcactcattcaccctgctctcaacccgcacaccgagaccggcgaaacactacagaggtaatcgggcgctccggccagcacctcatttttacaagatactgacatccttgcctttcctggtatagtttcatcaatttggctccgcaagtcccttcgccgacatgcccgcaacgtctatctcgtttactcatatctccctccttacaaatcatcctttatagtatatattagttattgacggtacttagcatgccatctcagtaaacgaactcaccagccgcgaatcgcaacgaaaccacttagtagtcatcatctcgaatggctccaancggttgtccgcactttttcccttctcatcccggcacgctacgtatttgatgcatcagctggtctgtccttcacgccgcagtattacatacccctcacctntgccgtgtgtcatctctccattctggtcaactcgatctcgcggcacgctaacttcaccctctcagcgatcactgtaaagaccaaactcccccaccgatcactaacgtcccaccccatctatctccttcactcccttgctactcccgattccaggccaaactaaaccttagcgccccgatgtctctctttcccaccgctcctgtcgcttatggtcgcccaccttcttattctcactactccggctcgccatccgggcgccacctgtacttcattttttatcccccgctgtaactactgcccgggcacgctcgcgcaagtg

SEQ ID NO: 329847 - DNA, 150 bp, Homo sapiens
gcggccgcctactactactactgctcgaattcaagcttctaacgatgtacggggacatgatgtactaaagtagagccctttgagaatacaagatattatgtataaaatgtaacactgatgataggttaataaagatgattgaatccatta

SEQ ID NO: 329848 - DNA, 2094 bp, Homo sapiens
gtgcatcggggcagctcacgcttcctaaatcccgtcatccagtgagaaagcagggactcttcggcctaggcagccgggacccagccagccctgcgcctcgcgccgtcgcgcatgcgtcctgggtatgtccacgcgcaataaggaggggcgaaaggacatttttttttttcttgctcccgcctctgttcttcccccacctgccacgtacagagcccaagttctcgctaggcttgttgggtcagcgcgattggccggggcccgcgcgagcctgcgagcgaggtgcggcggtcgcgaagggcaaccgagcgggccgtgaccaccgcctccccgcgacgccccagtccagtggcctcgcgtccgcccattcagcggagacctgcggagaggcggcggccgcggcctccgcaagccgtctttctctagagttgtatatatagaacatcctggagtccaccatgaacggacagttggatctaagtgggaagctaatcatcaaagctcaacttggggaggatattcggcgaattcctattcataatgaagatattacttatgatgaattagtgctaatgatgcaacgagttttcagaggaaaacttctgagtaatgatgaagtaacaataaagtataaagatgaagatggagatcttataacaatttttgatagttctgacctttcctttgcaattcagtgcagtaggatactgaaactgacattatttgttaatggccagccaagaccccttgaatcaagtcaggtgaaatatctccgtcgagaactgatagaacttcgaaataaagtgaatcgtttattggatagcttggaaccacctggagaaccaggaccttccaccaatattcctgaaaatgatactgtggatggtagggaagaaaagtctgcttctgattcttctggaaaacagtctactcaggttatggcagcaagtatgtctgcttttgatcctttaaaaaaccaagatgaaatcaataaaaatgttatgtcagcgtttggcttaacagatgatcaggtttcagggccacccagtgctcctgcagaagatcgttcaggaacacccgacagcattgcttcctcctcctcagcagctcacccaccaggcgttcagccacagcagccaccatatacaggagctcagactcaagcaggtcagattgaaggtcagatgtaccaacagtaccagcaacaggccggctatggtgcacagcagccgcaggctccacctcagcagcctcaacagtatggtattcagtattcagcaagctatagtcagcagactggacctcaacaacctcagcagttccagggatatggccagcaaccaacttcccaggcaccagctcctgccttttctggtcagcctcaacaactgcctgctcagccgccacagcagtaccaggcgagcaattatcctgcacaaacttacactgcccaaacttctcagcctactaattatactgtggctcctgcctctcaacctggaatggctccaagccaacctggggcctatcaaccaagaccaggttttacttcacttcctggaagtaccatgacccctcctccaagtgggcctaatccttatgcgcgtaaccgtcctccctttggtcagggctatacccaacctggacctggttatcgataaggaggctcctctacaccaattaatgtagctgctagctattggcctcccaaaagactccagtactattttaatttgtattgaagaagttcagaaatttaaaagcagagcattttttatgatatcattgttggtgttaattgaaagtataatttgctggaacacaaagaccaaaatgaaagttttttcctccctgcttaaaaatgtagcagcttcttagttactttggaacactactcttacatgtataaagtgattgacttgactttctagcttcccttgtccggaggatattaaaatgctagggtgaggtttagccatcttacttggctttttactattaacatgatgtactaaagtagagccctttgagaatacaagatattatgtataaaatgtaacactgatgataggttaataaagatgattgaatccatta

SEQ ID NO: 329849 - DNA, 1804 bp, Homo sapiens
gtgcatcggggcagctcacgcttcctaaatcccgtcatccagtgagaaagcagggactcttcggcctaggcagccgggacccagccagccctgcgcctcgcgccgtcgcgcatgcgtcctggtctttctctagagttgtatatatagaacatcctggagtccaccatgaacggacagttggatctaagtgggaagctaatcatcaaagctcaacttggggaggatattcggcgaattcctattcataatgaagatattacttatgatgaattagtgctaatgatgcaacgagttttcagaggaaaacttctgagtaatgatgaagtaacaataaagtataaagatgaagatggagatcttataacaatttttgatagttctgacctttcctttgcaattcagtgcagtaggatactgaaactgacattatttgttaatggccagccaagaccccttgaatcaagtcaggtgaaatatctccgtcgagaactgatagaacttcgaaataaagtgaatcgtttattggatagcttggaaccacctggagaaccaggaccttccaccaatattcctgaaaatgatactgtggatggtagggaagaaaagtctgcttctgattcttctggaaaacagtctactcaggttatggcagcaagtatgtctgcttttgatcctttaaaaaaccaagatgaaatcaataaaaatgttatgtcagcgtttggcttaacagatgatcaggtttcagggccacccagtgctcctgcagaagatcgttcaggaacacccgacagcattgcttcctcctcctcagcagctcacccaccaggcgttcagccacagcagccaccatatacaggagctcagactcaagcaggtcagattgaaggtcagatgtaccaacagtaccagcaacaggccggctatggtgcacagcagccgcaggctccacctcagcagcctcaacagtatggtattcagtattcagcaagctatagtcagcagactggacctcaacaacctcagcagttccagggatatggccagcaaccaacttcccaggcaccagctcctgccttttctggtcagcctcaacaactgcctgctcagccgccacagcagtaccaggcgagcaattatcctgcacaaacttacactgcccaaacttctcagcctactaattatactgtggctcctgcctctcaacctggaatggctccaagccaacctggggcctatcaaccaagaccaggttttacttcacttcctggaagtaccatgacccctcctccaagtgggcctaatccttatgcgcgtaaccgtcctccctttggtcagggctatacccaacctggacctggttatcgataaggaggctcctctacaccaattaatgtagctgctagctattggcctcccaaaagactccagtactattttaatttgtattgaagaagttcagaaatttaaaagcagagcattttttatgatatcattgttggtgttaattgaaagtataatttgctggaacacaaagaccaaaatgaaagttttttcctccctgcttaaaaatgtagcagcttcttagttactttggaacactactcttacatgtataaagtgattgacttgactttctagcttcccttgtccggaggatattaaaatgctagggtgaggtttagccatcttacttggctttttactattaacatgatgtactaaagtagagccctttgagaatacaagatattatgtataaaatgtaacactgatgataggttaataaagatgattgaatccatta

SEQ ID NO: 329850 - DNA, 2192 bp, Homo sapiens
gtgcatcggggcagctcacgcttcctaaatcccgtcatccagtgagaaagcagggactcttcggcctaggcagccgggacccagccagccctgcgcctcgcgccgtcgcgcatgcgtcctgggtatgtccacgcgcaataaggaggggcgaaaggacatttttttttttcttgctcccgcctctgttcttcccccacctgccacgtacagagcccaagttctcgctaggcttgttgggtcagcgcgattggccggggcccgcgcgagcctgcgagcgaggtgcggcggtcgcgaagggcaaccgagcgggccgtgaccaccgcctccccgcgacgccccagtccagtggcctcgcgtccgcccattcagcggagacctgcggagaggcggcggccgcggcctccgcaagccgatgactgcaagagcaaacgacagctttaggaaagaagcactggttcctggccacaagatgtttacagtcaataggaaacacaaaaagtgaatttgcagtctttctctagagttgtatatatagaacatcctggagtccaccatgaacggacagttggatctaagtgggaagctaatcatcaaagctcaacttggggaggatattcggcgaattcctattcataatgaagatattacttatgatgaattagtgctaatgatgcaacgagttttcagaggaaaacttctgagtaatgatgaagtaacaataaagtataaagatgaagatggagatcttataacaatttttgatagttctgacctttcctttgcaattcagtgcagtaggatactgaaactgacattatttgttaatggccagccaagaccccttgaatcaagtcaggtgaaatatctccgtcgagaactgatagaacttcgaaataaagtgaatcgtttattggatagcttggaaccacctggagaaccaggaccttccaccaatattcctgaaaatgatactgtggatggtagggaagaaaagtctgcttctgattcttctggaaaacagtctactcaggttatggcagcaagtatgtctgcttttgatcctttaaaaaaccaagatgaaatcaataaaaatgttatgtcagcgtttggcttaacagatgatcaggtttcagggccacccagtgctcctgcagaagatcgttcaggaacacccgacagcattgcttcctcctcctcagcagctcacccaccaggcgttcagccacagcagccaccatatacaggagctcagactcaagcaggtcagattgaaggtcagatgtaccaacagtaccagcaacaggccggctatggtgcacagcagccgcaggctccacctcagcagcctcaacagtatggtattcagtattcagcaagctatagtcagcagactggacctcaacaacctcagcagttccagggatatggccagcaaccaacttcccaggcaccagctcctgccttttctggtcagcctcaacaactgcctgctcagccgccacagcagtaccaggcgagcaattatcctgcacaaacttacactgcccaaacttctcagcctactaattatactgtggctcctgcctctcaacctggaatggctccaagccaacctggggcctatcaaccaagaccaggttttacttcacttcctggaagtaccatgacccctcctccaagtgggcctaatccttatgcgcgtaaccgtcctccctttggtcagggctatacccaacctggacctggttatcgataaggaggctcctctacaccaattaatgtagctgctagctattggcctcccaaaagactccagtactattttaatttgtattgaagaagttcagaaatttaaaagcagagcattttttatgatatcattgttggtgttaattgaaagtataatttgctggaacacaaagaccaaaatgaaagttttttcctccctgcttaaaaatgtagcagcttcttagttactttggaacactactcttacatgtataaagtgattgacttgactttctagcttcccttgtccggaggatattaaaatgctagggtgaggtttagccatcttacttggctttttactattaacatgatgtactaaagtagagccctttgagaatacaagatattatgtataaaatgtaacactgatgataggttaataaagatgattgaatccatta

SEQ ID NO: 329851 - DNA, 2017 bp, Homo sapiens
gtgcatcggggcagctcacgcttcctaaatcccgtcatccagtgagaaagcagggactcttcggcctaggcagccgggacccagccagccctgcgcctcgcgccgtcgcgcatgcgtcctgggtatgtccacgcgcaataaggaggggcgaaaggacatttttttttttcttgctcccgcctctgttcttcccccacctgccacgtacagagcccaagttctcgctaggcttgttgggtcagcgcgattggccggggcccgcgcgagcctgcgagcgaggtgcggcggtcgcgaagggcaaccgagcgggccgtgaccaccgcctccccgcgacgtctttctctagagttgtatatatagaacatcctggagtccaccatgaacggacagttggatctaagtgggaagctaatcatcaaagctcaacttggggaggatattcggcgaattcctattcataatgaagatattacttatgatgaattagtgctaatgatgcaacgagttttcagaggaaaacttctgagtaatgatgaagtaacaataaagtataaagatgaagatggagatcttataacaatttttgatagttctgacctttcctttgcaattcagtgcagtaggatactgaaactgacattatttgttaatggccagccaagaccccttgaatcaagtcaggtgaaatatctccgtcgagaactgatagaacttcgaaataaagtgaatcgtttattggatagcttggaaccacctggagaaccaggaccttccaccaatattcctgaaaatgatactgtggatggtagggaagaaaagtctgcttctgattcttctggaaaacagtctactcaggttatggcagcaagtatgtctgcttttgatcctttaaaaaaccaagatgaaatcaataaaaatgttatgtcagcgtttggcttaacagatgatcaggtttcagggccacccagtgctcctgcagaagatcgttcaggaacacccgacagcattgcttcctcctcctcagcagctcacccaccaggcgttcagccacagcagccaccatatacaggagctcagactcaagcaggtcagattgaaggtcagatgtaccaacagtaccagcaacaggccggctatggtgcacagcagccgcaggctccacctcagcagcctcaacagtatggtattcagtattcagcaagctatagtcagcagactggacctcaacaacctcagcagttccagggatatggccagcaaccaacttcccaggcaccagctcctgccttttctggtcagcctcaacaactgcctgctcagccgccacagcagtaccaggcgagcaattatcctgcacaaacttacactgcccaaacttctcagcctactaattatactgtggctcctgcctctcaacctggaatggctccaagccaacctggggcctatcaaccaagaccaggttttacttcacttcctggaagtaccatgacccctcctccaagtgggcctaatccttatgcgcgtaaccgtcctccctttggtcagggctatacccaacctggacctggttatcgataaggaggctcctctacaccaattaatgtagctgctagctattggcctcccaaaagactccagtactattttaatttgtattgaagaagttcagaaatttaaaagcagagcattttttatgatatcattgttggtgttaattgaaagtataatttgctggaacacaaagaccaaaatgaaagttttttcctccctgcttaaaaatgtagcagcttcttagttactttggaacactactcttacatgtataaagtgattgacttgactttctagcttcccttgtccggaggatattaaaatgctagggtgaggtttagccatcttacttggctttttactattaacatgatgtactaaagtagagccctttgagaatacaagatattatgtataaaatgtaacactgatgataggttaataaagatgattgaatccatta

SEQ ID NO: 329852 - DNA, 2156 bp, Homo sapiens
  misc_feature (2117)..(2117): n is a, c, g, or t
gtgcatcggggcagctcacgcttcctaaatcccgtcatccagtgagaaagcagggactcttcggcctaggcagccgggacccagccagccctgcgcctcgcgccgtcgcgcatgcgtcctgggtatgtccacgcgcaataaggaggggcgaaaggacatttttttttttcttgctcccgcctctgttcttcccccacctgccacgtacagagcccaagttctcgctaggcttgttgggtcagcgcgattggccggggcccgcgcgagcctgcgagcgaggtgcggcggtcgcgaagggcaaccgagcgggccgtgaccaccgcctccccgcgacgccccagtccagtggcctcgcgtccgcccattcagcggagacctgcggagaggcggcggccgcggcctccgcaagccgtctttctctagagttgtatatatagaacatcctggagtccaccatgaacggacagttggatctaagtgggaagctaatcatcaaagctcaacttggggaggatattcggcgaattcctattcataatgaagatattacttatgatgaattagtgctaatgatgcaacgagttttcagaggaaaacttctgagtaatgatgaagtaacaataaagtataaagatgaagatggagatcttataacaatttttgatagttctgacctttcctttgcaattcagtgcagtaggatactgaaactgacattatttgttaatggccagccaagaccccttgaatcaagtcaggtgaaatatctccgtcgagaactgatagaacttcgaaataaagtgaatcgtttattggatagcttggaaccacctggagaaccaggaccttccaccaatattcctgaaaatgatactgtggatggtagggaagaaaagtctgcttctgattcttctggaaaacagtctactcaggttatggcagcaagtatgtctgcttttgatcctttaaaaaaccaagatgaaatcaataaaaatgttatgtcagcgtttggcttaacagatgatcaggtttcagggccacccagtgctcctgcagaagatcgttcaggaacacccgacagcattgcttcctcctcctcagcagctcacccaccaggcgttcagccacagcagccaccatatacaggagctcagactcaagcaggtcagattgaaggtcagatgtaccaacagtaccagcaacaggccggctatggtgcacagcagccgcaggctccacctcagcagcctcaacagtatggtattcagtattcagcaagctatagtcagcagactggacctcaacaacctcagcagttccagggatatggccagcaaccaacttcccaggcaccagctcctgccttttctggtcagcctcaacaactgcctgctcagccgccacagcagtaccaggcgagcaattatcctgcacaaacttacactgcccaaacttctcagcctactaattatactgtggctcctgcctctcaacctggaatggctccaagccaacctggggcctatcaaccaagaccaggttttacttcacttcctggaagtaccatgacccctcctccaagtgggcctaatccttatgcgcgtaaccgtcctccctttggtcagggctatacccaacctggacctggttatcgataaggaggctcctctacaccaattaatgtagctgctagctattggcctcccaaaagactccagtactattttaatttgtattgaagaagttcagaaatttaaaagcagagcattttttatgatatcattgttggtgttaattgaaagtataatttgctggaacacaaagaccaaaatgaaagttttttcctccctgcttaaaaatgtagcagcttcttagttactttggaacactactcttacatgtataaagtgattgacttgactttctagcttcccttgtccggaggatattaaaatgctagggtgaggtttagccatcttacttggctttttactattaacatgatgtactaaagtagagccctttgagaatacaagatattatgtataaaatgtaacactgatgataggttaataaagatgattgaatccattagatccgcgccaccccccccttcnctccactccgaaatgcccctcctggttcgttccctgctt

SEQ ID NO: 329853 - DNA, 1963 bp, Homo sapiens
  misc_feature (1856)..(1856): n is a, c, g, or t
  misc_feature (1867)..(1867): n is a, c, g, or t
  misc_feature (1887)..(1887): n is a, c, g, or t
  misc_feature (1892)..(1892): n is a, c, g, or t
  misc_feature (1894)..(1894): n is a, c, g, or t
  misc_feature (1897)..(1897): n is a, c, g, or t
  misc_feature (1917)..(1917): n is a, c, g, or t
gtgcatcggggcagctcacgcttcctaaatcccgtcatccagtgagaaagcagggactcttcggcctaggcagccgggacccagccagccctgcgcctcgcgccgtcgcgcatgcgtcctgggtatgtccacgcgcaataaggaggggcgaaaggacatttttttttttcttgctcccgcctctgttcttcccccacctgccacgtacagagcccaagttctcgctaggcttgttgggtcagcgcgattggccggggcccgcgcgagcctgcgagcgaggtgcggcggtcgcgaagggcaaccgagcgggccgtgaccaccgcctccccgcgacgccccagtccagtggcctcgcgtccgcccattcagcggagacctgcggagaggcggcggccgcggcctccgcaagccgtctttctctagagttgtatatatagaacatcctggagtccaccatgaacggacagttggatctaagtgggaagctaatcatcaaagctcaacttggggaggatattcggcgaattcctattcataatgaagatattacttatgatgaattagtgctaatgatgcaacgagttttcagaggaaaacttctgagtaatgatgaagtaacaataaagtataaagatgaagatggagatcttataacaatttttgatagttctgacctttcctttgcaattcagtgcagtaggatactgaaactgacattatttgttaatggccagccaagaccccttgaatcaagtcaggtgaaatatctccgtcgagaactgatagaacttcgaaataaagtgaatcgtttattggatagcttggaaccacctggagaaccaggaccttccaccaatattcctgaaaatgatactgtggatggtagggaagaaaagtctgcttctgattcttctggaaaacagtctactcaggttatggcagcaagtatgtctgcttttgatcctttaaaaaaccaagatgaaatcaataaaaatgttatgtcagcgtttggcttaacagatgatcaggtttcagggccacccagtgctcctgcagaagatcgttcaggaacacccgacagcattgcttcctcctcctcagcagctcacccaccaggcgttcagccacagcagccaccatatacaggagctcagactcaagcaggtcagattgaaggtcagatgtaccaacagtaccagcaacaggccggctatggtgcacagcagccgcaggctccacctcagcagcctcaacagtatggtattcagtattcagcaagctatagtcagcagactggacctcaacaacctcagcagttccagggatatggccagcaaccaacttcccaggcaccagctcctgccttttctggtcagcctcaacaactgcctgctcagccgccacagcagtaccaggcgagcaattatcctgcacaaacttacactgcccaaacttctcagcctactaattatactgtggctcctgcctctcaacctggaatggctccaagccaacctggggcctatcaaccaagaccaggttttacttcacttcctggaagtaccatgacccctcctccaagtgggcctaatccttatgcgcgtaaccgtcctccctttggtcagggctatacccaacctggacctggttatcgataaggaggctcctctacaccaattaatgtagctgctagctattggcctcccaaaagactccagtactattttaatttgtattgaagaagttcagaaatttaaaagcagagcattttttatgatatcattgttggtgttaattgaaagtataatttgctggaacacaaagaccaaaatgaaagttttttcctccctgcttangagcacttttnatacttggaactccttaacngtaangntgnctgcttttactcctgccggngattaaacccaggcggccagcccctctggctttcttcaccacggcg

SEQ ID NO: 329854 - DNA, 1880 bp, Homo sapiens
gtgcatcggggcagctcacgcttcctaaatcccgtcatccagtgagaaagcagggactcttcggcctaggcagccgggacccagccagccctgcgcctcgcgccgtcgcgcatgcgtcctgggtatgtccacgcgcaataaggaggggcgaaaggacatttttttttttcttgctcccgcctctgttcttcccccacctgccacgtacagagcccaagttctcgctaggcttgttgggtcagcgcgattggccggggcccgcgcgagcctgcgagcgagtctttctctagagttgtatatatagaacatcctggagtccaccatgaacggacagttggatctaagtgggaagctaatcatcaaagctcaacttggggaggatattcggcgaattcctattcataatgaagatattacttatgatgaattagtgctaatgatgcaacgagttttcagaggaaaacttctgagtaatgatgaagtaacaataaagtataaagatgaagatggagatcttataacaatttttgatagttctgacctttcctttgcaattcagtgcagtaggatactgaaactgacattatttgttaatggccagccaagaccccttgaatcaagtcaggtgaaatatctccgtcgagaactgatagaacttcgaaataaagtgaatcgtttattggatagcttggaaccacctggagaaccaggaccttccaccaatattcctgaaaatgatactgtggatggtagggaagaaaagtctgcttctgattcttctggaaaacagtctactcaggttatggcagcaagtatgtctgggccacccagtgctcctgcagaagatcgttcaggaacacccgacagcattgcttcctcctcctcagcagctcacccaccaggcgttcagccacagcagccaccatatacaggagctcagactcaagcaggtcagattgaaggtcagatgtaccaacagtaccagcaacaggccggctatggtgcacagcagccgcaggctccacctcagcagcctcaacagtatggtattcagtattcagcaagctatagtcagcagactggacctcaacaacctcagcagttccagggatatggccagcaaccaacttcccaggcaccagctcctgccttttctggtcagcctcaacaactgcctgctcagccgccacagcagtaccaggcgagcaattatcctgcacaaacttacactgcccaaacttctcagcctactaattatactgtggctcctgcctctcaacctggaatggctccaagccaacctggggcctatcaaccaagaccaggttttacttcacttcctggaagtaccatgacccctcctccaagtgggcctaatccttatgcgcgtaaccgtcctccctttggtcagggctatacccaacctggacctggttatcgataaggaggctcctctacaccaattaatgtagctgctagctattggcctcccaaaagactccagtactattttaatttgtattgaagaagttcagaaatttaaaagcagagcattttttatgatatcattgttggtgttaattgaaagtataatttgctggaacacaaagaccaaaatgaaagttttttcctccctgcttaaaaatgtagcagcttcttagttactttggaacactactcttacatgtataaagtgattgacttgactttctagcttcccttgtccggaggatattaaaatgctagggtgaggtttagccatcttacttggctttttactattaacatgatgtactaaagtagagccctttgagaatacaagatattatgtataaaatgtaacactgatgataggttaataaagatgattgaatccatta

SEQ ID NO: 329855 - DNA, 1111 bp, Homo sapiens
taattattacacttaatatttctaccttattttgattgtttttttttgtctgggccacccagtgctcctgcagaagatcgttcaggaacacccgacagcattgcttcctcctcctcagcagctcacccaccaggcgttcagccacagcagccaccatatacaggagctcagactcaagcaggtcagattgaaggtcagatgtaccaacagtaccagcaacaggccggctatggtgcacagcagccgcaggctccacctcagcagcctcaacagtatggtattcagtattcagcaagctatagtcagcagactggacctcaacaacctcagcagttccagggatatggccagcaaccaacttcccaggcaccagctcctgccttttctggtcagcctcaacaactgcctgctcagccgccacagcagtaccaggcgagcaattatcctgcacaaacttacactgcccaaacttctcagcctactaattatactgtggctcctgcctctcaacctggaatggctccaagccaacctggggcctatcaaccaagaccaggttttacttcacttcctggaagtaccatgacccctcctccaagtgggcctaatccttatgcgcgtaaccgtcctccctttggtcagggctatacccaacctggacctggttatcgataaggaggctcctctacaccaattaatgtagctgctagctattggcctcccaaaagactccagtactattttaatttgtattgaagaagttcagaaatttaaaagcagagcattttttatgatatcattgttggtgttaattgaaagtataatttgctggaacacaaagaccaaaatgaaagttttttcctccctgcttaaaaatgtagcagcttcttagttactttggaacactactcttacatgtataaagtgattgacttgactttctagcttcccttgtccggaggatattaaaatgctagggtgaggtttagccatcttacttggctttttactattaacatgatgtactaaagtagagccctttgagaatacaagatattatgtataaaatgtaacactgatgataggttaataaagatgattgaatccatta

SEQ ID NO: 329856 - DNA, 1727 bp, Homo sapiens
gtgcatcggggcagctcacgcttcctaaatcccgtcatccagtgagaaagcagggactcttcggcctaggcagccgggacccagccagccctgcgcctcgcgccgtcgcgcatgcgtcctgggtatgtccacgcgcaataaggaggggcgaaaggacatttttttttttcttgctcccgcctctgttcttcccccacctgccacgtacagagcccaagttctcgctaggcttgttgggtcagcgcgattggccggggcccgcgcgagcctgcgagcgaggtgcggcggtcgcgaagggcaaccgagcgggccgtgaccaccgcctccccgcgacgccccagtccagtggcctcgcgtccgcccattcagcggagacctgcggagaggcggcggccgcggcctccgcaagccgtctttctctagagttgtatatatagaacatcctggagtccaccatgaacggacagttggatctaagtgggaagctaatcatcaaagctcaacttggggaggatattcggcgaattcctattcataatgaagatattacttatgatgaattagtgctaatgatgcaacgagttttcagaggaaaacttctgagtaatgatgaagtaacaataaagtataaagatgaagatggagatcttataacaatttttgatagttctgacctttcctttgcaattcagtgcagtaggatactgaaactgacattatttgttaatggccagccaagaccccttgaatcaagtcaggtgaaatatctccgtcgagaactgatagaacttcgaaataaagtgaatcgtttattggatagcttggaaccacctggagaaccaggaccttccaccaatattcctgaaaatgatactgtggatggtagggaagaaaagtctgcttctgattcttctggaaaacagtctactcaggttatggcagcaagtatgtctgcttttgatcctttaaaaaaccaagatgaaatcaataaaaatgttatgtcagcgtttggcttaacagatgatcaggtttcagggccacccagtgctcctgcagaagatcgttcaggaacacccgacagcattgcttcctcctcctcagcagctcacccaccaggcgttcagccacagcagccaccatatacaggagctcagactcaagcaggtcagattgaaggtcagatgtaccaacagtaccagcaacaggccggctatggtgcacagcagccgcaggctccacctcagcagcctcaacagtatggtattcagtattcagcaagctatagtcagcagactggacctcaacaacctcagcagttccagggatatggccagcaaccaacttcccaggcaccagctcctgccttttctggtcagcctcaacaactgcctgctcagccgccacagcagtaccaggcgagcaattatcctgcacaaacttacactgcccaaacttctcagcctactaattatactgtggctcctgcctctcaacctggaatgttaggtctaccccaggtagacctaacgtctttacgtgggtacttgcgcttactttgtagccttcatcagggtttgctgaagatggcggtatgtaggctgagcaagaggtggtgaggttgatcggggtttatcgattacagaacaggctcctctagaggggtatgaagcaccgacaggtcctttgagttttaagctgtggctcgtagtgttctggcgccagttttg

SEQ ID NO: 329857 - DNA, 1239 bp, Homo sapiens
gtgcatcggggcagctcacgcttcctaaatcccgtcatccagtgagaaagcagggactcttcggcctaggcagccgggacccagccagccctgcgcctcgcgccgtcgcgcatgcgtcctgggtatgtccacgcgcaataaggaggggcgaaaggacatttttttttttcttgctcccgcctctgttcttcccccacctgccacgtacagagcccaagttctcgctaggcttgttgggtcagcgcgattggccggggcccgcgcgagcctgcgagcgaggtgcggcggtcgcgaagggcaaccgagcgggccgtgaccaccgcctccccgcgacgccccagtccagtggcctcgcgtccgcccattcagcggagacctgcggagaggcggcggccgcggcctccgcaagccgtctttctctagagttgtatatatagaacatcctggagtccaccatgaacggacagttggatctaagtgggaagctaatcatcaaagctcaacttggggaggatattcggcgaattcctattcataatgaagatattacttatgatgaattagtgctaatgatgcaacgagttttcagaggaaaacttctgagtaatgatgaagtaacaataaagtataaagatgaagatggagatcttataacaatttttgatagttctgacctttcctttgcaattcagtgcagtaggatactgaaactgacattatttgttaatggccagccaagaccccttgaatcaagtcaggtgaaatatctccgtcgagaactgatagaacttcgaaataaagtgaatcgtttattggatagcttggaaccacctggagaaccaggaccttccaccaatattcctgaaaatgatactgtggatggtagggaagaaaagtctgcttctgattcttctggaaaacagtctactcaggttatggcagcaagtatgtctgcttttgatcctttaaaaaaccaagatgaaatcaataaaaatgttatgtcagcgtttggcttaacagatgatcaggtttcagggccacccagtgctcctgcagaagatcgttcaggaacacccgacagcattgcttcctcctcctcagcagctcacccaccaggcgttcagccacagcagccaccatatacaggagctcagactcaagcaggtcagattgacaacagttcagcacagggcggtatggtgccagcaagcgagctcacttcaggctcaaagttgttta

SEQ ID NO: 329858 - DNA, 844 bp, Homo sapiens
cctagatatcccgctgatccgcttacaagctatagtcagcagactggacctcaacaacctcagcagttccagggatatggccagcaaccaacttcccaggcaccagctcctgccttttctggtcagcctcaacaactgcctgctcagccgccacagcagtaccaggcgagcaattatcctgcacaaacttacactgcccaaacttctcagcctactaattatactgtggctcctgcctctcaacctggaatggctccaagccaacctggggcctatcaaccaagaccaggttttacttcacttcctggaagtaccatgacccctcctccaagtgggcctaatccttatgcgcgtaaccgtcctccctttggtcagggctatacccaacctggacctggttatcgataaggaggctcctctacaccaattaatgtagctgctagctattggcctcccaaaagactccagtactattttaatttgtattgaagaagttcagaaatttaaaagcagagcattttttatgatatcattgttggtgttaattgaaagtataatttgctggaacacaaagaccaaaatgaaagttttttcctccctgcttaaaaatgtagcagcttcttagttactttggaacactactcttacatgtataaagtgattgacttgactttctagcttcccttgtccggaggatattaaaatgctagggtgaggtttagccatcttacttggctttttactattaacatgatgtactaaagtagagccctttgagaatacaagatattatgtataaaatgtaacactgatgataggttaataaagatgattgaatccatta

SEQ ID NO: 329859 - DNA, 226 bp, Homo sapiens
  misc_feature (16)..(16): n is a, c, g, or t
  misc_feature (20)..(20): n is a, c, g, or t
  misc_feature (42)..(42): n is a, c, g, or t
cccctcccccccctgngttngggggtgtggggctctggcgcnttctctctttatttgatagtgctgggccacccagtgctcctgcagaagatcgttcaggaacacccgacagcattgcttcctcctcctcagcagctcacccaccaggcgttcagccacagcagccaccatatacaggagctcagactcaagcaggtcagattgaaggtaaaatagagtttagaac

SEQ ID NO: 329860 - DNA, 2169 bp, Homo sapiens
gtgcatcggggcagctcacgcttcctaaatcccgtcatccagtgagaaagcagggactcttcggcctaggcagccgggacccagccagccctgcgcctcgcgccgtcgcgcatgcgtcctgggtatgtccacgcgcaataaggaggggcgaaaggacatttttttttttcttgctcccgcctctgttcttcccccacctgccacgtacagagcccaagttctcgctaggcttgttgggtcagcgcgattggccggggcccgcgcgagcctgcgagcgaggtgcggcggtcgcgaagggcaaccgagcgggccgtgaccaccgcctccccgcgacgccccagtccagtggcctcgcgtccgcccattcagcggagacctgcggagaggcggcggccgcggcctccgcaagccgctttaggaaagaagcactggttcctggccacaagatgtttacagtcaataggaaacacaaaaagtgaatttgcagtctttctctagagttgtatatatagaacatcctggagtccaccatgaacggacagttggatctaagtgggaagctaatcatcaaagctcaacttggggaggatattcggcgaattcctattcataatgaagatattacttatgatgaattagtgctaatgatgcaacgagttttcagaggaaaacttctgagtaatgatgaagtaacaataaagtataaagatgaagatggagatcttataacaatttttgatagttctgacctttcctttgcaattcagtgcagtaggatactgaaactgacattatttgttaatggccagccaagaccccttgaatcaagtcaggtgaaatatctccgtcgagaactgatagaacttcgaaataaagtgaatcgtttattggatagcttggaaccacctggagaaccaggaccttccaccaatattcctgaaaatgatactgtggatggtagggaagaaaagtctgcttctgattcttctggaaaacagtctactcaggttatggcagcaagtatgtctgcttttgatcctttaaaaaaccaagatgaaatcaataaaaatgttatgtcagcgtttggcttaacagatgatcaggtttcagggccacccagtgctcctgcagaagatcgttcaggaacacccgacagcattgcttcctcctcctcagcagctcacccaccaggcgttcagccacagcagccaccatatacaggagctcagactcaagcaggtcagattgaaggtcagatgtaccaacagtaccagcaacaggccggctatggtgcacagcagccgcaggctccacctcagcagcctcaacagtatggtattcagtattcagcaagctatagtcagcagactggacctcaacaacctcagcagttccagggatatggccagcaaccaacttcccaggcaccagctcctgccttttctggtcagcctcaacaactgcctgctcagccgccacagcagtaccaggcgagcaattatcctgcacaaacttacactgcccaaacttctcagcctactaattatactgtggctcctgcctctcaacctggaatggctccaagccaacctggggcctatcaaccaagaccaggttttacttcacttcctggaagtaccatgacccctcctccaagtgggcctaatccttatgcgcgtaaccgtcctccctttggtcagggctatacccaacctggacctggttatcgataaggaggctcctctacaccaattaatgtagctgctagctattggcctcccaaaagactccagtactattttaatttgtattgaagaagttcagaaatttaaaagcagagcattttttatgatatcattgttggtgttaattgaaagtataatttgctggaacacaaagaccaaaatgaaagttttttcctccctgcttaaaaatgtagcagcttcttagttactttggaacactactcttacatgtataaagtgattgacttgactttctagcttcccttgtccggaggatattaaaatgctagggtgaggtttagccatcttacttggctttttactattaacatgatgtactaaagtagagccctttgagaatacaagatattatgtataaaatgtaacactgatgataggttaataaagatgattgaatccatta

SEQ ID NO: 329861 - DNA, 1747 bp, Homo sapiens
gctggtacaggtccggggtgttagggatcagccctgcgcctcgcgccgtcgcgcatgcgtcctggtctttctctagagttgtatatatagaacatcctggagtccaccatgaacggacagttggatctaagtgggaagctaatcatcaaagctcaacttggggaggatattcggcgaattcctattcataatgaagatattacttatgatgaattagtgctaatgatgcaacgagttttcagaggaaaacttctgagtaatgatgaagtaacaataaagtataaagatgaagatggagatcttataacaatttttgatagttctgacctttcctttgcaattcagtgcagtaggatactgaaactgacattatttgttaatggccagccaagaccccttgaatcaagtcaggtgaaatatctccgtcgagaactgatagaacttcgaaataaagtgaatcgtttattggatagcttggaaccacctggagaaccaggaccttccaccaatattcctgaaaatgatactgtggatggtagggaagaaaagtctgcttctgattcttctggaaaacagtctactcaggttatggcagcaagtatgtctgcttttgatcctttaaaaaaccaagatgaaatcaataaaaatgttatgtcagcgtttggcttaacagatgatcaggtttcagggccacccagtgctcctgcagaagatcgttcaggaacacccgacagcattgcttcctcctcctcagcagctcacccaccaggcgttcagccacagcagccaccatatacaggagctcagactcaagcaggtcagattgaaggtcagatgtaccaacagtaccagcaacaggccggctatggtgcacagcagccgcaggctccacctcagcagcctcaacagtatggtattcagtattcagcaagctatagtcagcagactggacctcaacaacctcagcagttccagggatatggccagcaaccaacttcccaggcaccagctcctgccttttctggtcagcctcaacaactgcctgctcagccgccacagcagtaccaggcgagcaattatcctgcacaaacttacactgcccaaacttctcagcctactaattatactgtggctcctgcctctcaacctggaatggctccaagccaacctggggcctatcaaccaagaccaggttttacttcacttcctggaagtaccatgacccctcctccaagtgggcctaatccttatgcgcgtaaccgtcctccctttggtcagggctatacccaacctggacctggttatcgataaggaggctcctctacaccaattaatgtagctgctagctattggcctcccaaaagactccagtactattttaatttgtattgaagaagttcagaaatttaaaagcagagcattttttatgatatcattgttggtgttaattgaaagtataatttgctggaacacaaagaccaaaatgaaagttttttcctccctgcttaaaaatgtagcagcttcttagttactttggaacactactcttacatgtataaagtgattgacttgactttctagcttcccttgtccggaggatattaaaatgctagggtgaggtttagccatcttacttggctttttactattaacatgatgtactaaagtagagccctttgagaatacaagatattatgtataaaatgtaacactgatgataggttaataaagatgattgaatccatta

SEQ ID NO: 329862 - DNA, 1961 bp, Homo sapiens
gtgcatcggggcagctcacgcttcctaaatcccgtcatccagtgagaaagcagggactcttcggcctaggcagccgggacccagccagccctgcgcctcgcgccgtcgcgcatgcgtcctgggtatgtccacgcgcaataaggaggggcgaaaggacatttttttttttcttgctcccgcctctgttcttcccccacctgccacgtacagagcccaagttctcgctaggcttgttgggtcagcgcgattggccggggcccgcgcgagcctgcgagcgagtctttctctagagttgtatatatagaacatcctggagtccaccatgaacggacagttggatctaagtgggaagctaatcatcaaagctcaacttggggaggatattcggcgaattcctattcataatgaagatattacttatgatgaattagtgctaatgatgcaacgagttttcagaggaaaacttctgagtaatgatgaagtaacaataaagtataaagatgaagatggagatcttataacaatttttgatagttctgacctttcctttgcaattcagtgcagtaggatactgaaactgacattatttgttaatggccagccaagaccccttgaatcaagtcaggtgaaatatctccgtcgagaactgatagaacttcgaaataaagtgaatcgtttattggatagcttggaaccacctggagaaccaggaccttccaccaatattcctgaaaatgatactgtggatggtagggaagaaaagtctgcttctgattcttctggaaaacagtctactcaggttatggcagcaagtatgtctgcttttgatcctttaaaaaaccaagatgaaatcaataaaaatgttatgtcagcgtttggcttaacagatgatcaggtttcagggccacccagtgctcctgcagaagatcgttcaggaacacccgacagcattgcttcctcctcctcagcagctcacccaccaggcgttcagccacagcagccaccatatacaggagctcagactcaagcaggtcagattgaaggtcagatgtaccaacagtaccagcaacaggccggctatggtgcacagcagccgcaggctccacctcagcagcctcaacagtatggtattcagtattcagcaagctatagtcagcagactggacctcaacaacctcagcagttccagggatatggccagcaaccaacttcccaggcaccagctcctgccttttctggtcagcctcaacaactgcctgctcagccgccacagcagtaccaggcgagcaattatcctgcacaaacttacactgcccaaacttctcagcctactaattatactgtggctcctgcctctcaacctggaatggctccaagccaacctggggcctatcaaccaagaccaggttttacttcacttcctggaagtaccatgacccctcctccaagtgggcctaatccttatgcgcgtaaccgtcctccctttggtcagggctatacccaacctggacctggttatcgataaggaggctcctctacaccaattaatgtagctgctagctattggcctcccaaaagactccagtactattttaatttgtattgaagaagttcagaaatttaaaagcagagcattttttatgatatcattgttggtgttaattgaaagtataatttgctggaacacaaagaccaaaatgaaagttttttcctccctgcttaaaaatgtagcagcttcttagttactttggaacactactcttacatgtataaagtgattgacttgactttctagcttcccttgtccggaggatattaaaatgctagggtgaggtttagccatcttacttggctttttactattaacatgatgtactaaagtagagccctttgagaatacaagatattatgtataaaatgtaacactgatgataggttaataaagatgattgaatccatta

SEQ ID NO: 329863 - DNA, 2262 bp, Homo sapiens
gtgcatcggggcagctcacgcttcctaaatcccgtcatccagtgagaaagcagggactcttcggcctaggcagccgggacccagccagccctgcgcctcgcgccgtcgcgcatgcgtcctgggtatgtccacgcgcaataaggaggggcgaaaggacatttttttttttcttgctcccgcctctgttcttcccccacctgccacgtacagagcccaagttctcgctaggcttgttgggtcagcgcgattggccggggcccgcgcgagcctgcgagcgaggtgcggcggtcgcgaagggcaaccgagcgggccgtgaccaccgcctccccgcgacgccccagtccagtggcctcgcgtccgcccattcagcggagacctgcggagaggcggcggccgcggcctccgcaagccgtctttctctagagttgtatatatagaacatcctggagtccaccatgaacggacagttggatctaagtgggaagctaatcatcaaagctcaacttggggaggatattcggcgaattcctattcataatgaagatattacttatgatgaattagtgctaatgatgcaacgagttttcagaggaaaacttctgagtaatgatgaagtaacaataaagtataaagatgaagatggagatcttataacaatttttgatagttctgacctttcctttgcaattcagtgcagtaggatactgaaactgacattatttgttaatggccagccaagaccccttgaatcaagtcaggtgaaatatctccgtcgagaactgatagaacttcgaaataaagtgaatcgtttattggatagcttggaaccacctggagaaccaggaccttccaccaatattcctgaaaatgatactgtggatggtagggaagaaaagtctgcttctgattcttctggaaaacagtctactcaggttatggcagcaagtatgtctgcttttgatcctttaaaaaaccaagatgaaatcaataaaaatgttatgtcagcgtttggcttaacagatgatcaggtttcagggccacccagtgctcctgcagaagatcgttcaggaacacccgacagcattgcttcctcctcctcagcagctcacccaccaggcgttcagccacagcagccaccatatacaggagctcagactcaagcaggtcagattgaaggtcagatgtaccaacagtaccagcaacaggccggctatggtgcacagcagccgcaggctccacctcagcagcctcaacagtatggtattcagtattcagcaagctatagtcagcagactggacctcaacaacctcagcagttccagggatatggccagcaaccaacttcccaggcaccagctcctgccttttctggtcagcctcaacaactgcctgctcagccgccacagcagtaccaggcgagcaattatcctgcacaaacttacactgcccaaacttctcagcctactaattatactgtggctcctgcctctcaacctggaatggctccaagccaacctggggcctatcaaccaagaccaggttttacttcacttcctggaagtaccatgacccctcctccaagtgggcctaatccttatgcgcgtaaccgtcctccctttggtcagggctatacccaacctggacctggttatcgataaggaggctcctctacaccaattaatgtagctgctagctattggcctcccaaaagactccagtactattttaatttgtattgaagaagttcagaaatttaaaagcagagcattttttatgatatcattgttggtgttaattgaaagtataatttgctggaacacaaagaccaaaatgaaagttttttcctccctgcttaaaaatgtagcagcttcttagttactttggaacactactcttacatgtataaagtgattgacttgactttctagcttcccttgtccggaggatattaaaatgctagggtgaggtttagccatcttacttggctttttactattaacatgatgtactaaagtagagccctttgagaatacaagatattatgtataaaatgtaacactgatgataggttaataaagatgattgaatccattacaacacaaacaaaaaaaaaaaaaaaaaacaacacaacaccacaaaaccacaagaacacaaaaacaacaacaacaaagaaacaaccaaacccacatccaacacaaacaacaaagaaacaataaacaagcaacaaccgtaaaaacaggcatcataacaaaaataacatcc

SEQ ID NO: 329864 - DNA, 2114 bp, Homo sapiens
gtgcatcggggcagctcacgcttcctaaatcccgtcatccagtgagaaagcagggactcttcggcctaggcagccgggacccagccagccctgcgcctcgcgccgtcgcgcatgcgtcctgggtatgtccacgcgcaataaggaggggcgaaaggacatttttttttttcttgctcccgcctctgttcttcccccacctgccacgtacagagcccaagttctcgctaggcttgttgggtcagcgcgattggccggggcccgcgcgagcctgcgagcgaggtgcggcggtcgcgaagggcaaccgagcgggccgtgaccaccgcctccccgcgacgccccagtccagtggcctcgcgtccgcccattcagcggagacctgcggagaggcggcggccgcggcctccgcaagccgtctttctctagagttgtatatatagaacatcctggagtccaccatgaacggacagttggatctaagtgggaagctaatcatcaaagctcaacttggggaggatattcggcgaattcctattcataatgaagatattacttatgatgaattagtgctaatgatgcaacgagttttcagaggaaaacttctgagtaatgatgaagtaacaataaagtataaagatgaagatggagatcttataacaatttttgatagttctgacctttcctttgcaattcagtgcagtaggatactgaaactgacattatttgttaatggccagccaagaccccttgaatcaagtcaggtgaaatatctccgtcgagaactgatagaacttcgaaataaagtgaatcgtttattggatagcttggaaccacctggagaaccaggaccttccaccaatattcctgaaaatgatactgtggatggtagggaagaaaagtctgcttctgattcttctggaaaacagtctactcaggttatggcagcaagtatgtctgcttttgatcctttaaaaaaccaagatgaaatcaataaaaatgttatgtcagcgtttggcttaacagatgatcaggtttcagggccacccagtgctcctgcagaagatcgttcaggaacacccgacagcattgcttcctcctcctcagcagctcacccaccaggcgttcagccacagcagccaccatatacaggagctcagactcaagcaggtcagattgaaggtcagatgtaccaacagtaccagcaacaggccggctatggtgcacagcagccgcaggctccacctcagcagcctcaacagtatggtattcagtattcagcaagctatagtcagcagactggacctcaacaacctcagcagttccagggatatggccagcaaccaacttcccaggcaccagctcctgccttttctggtcagcctcaacaactgcctgctcagccgccacagcagtaccaggcgagcaattatcctgcacaaacttacactgcccaaacttctcagcctactaattatactgtggctcctgcctctcaacctggaatggctccaagccaacctggggcctatcaaccaagaccaggttttacttcacttcctggaagtaccatgacccctcctccaagtgggcctaatccttatgcgcgtaaccgtcctccctttggtcagggctatacccaacctggacctggttatcgataaggaggctcctctacaccaattaatgtagctgctagctattggcctcccaaaagactccagtactattttaatttgtattgaagaagttcagaaatttaaaagcagagcattttttatgatatcattgttggtgttaattgaaagtataatttgctggaacacaaagaccaaaatgaaagttttttcctccctgcttaaaaatgtagcagcttcttagttactttggaacactactcttacatgtataaagtgattgacttgactttctagcttcccttgtccggaggatattaaaatgctagggtgaggtttagccatcttacttggctttttactattaacatgatgtactaaagtagagccctttgagaatacaagatattatgtataaaatgtaacactgatgataggttaataaagatgattgaatccattaaatccattaaggtcttgaaa

SEQ ID NO: 329865 - DNA, 2011 bp, Homo sapiens
gtgcatcggggcagctcacgcttcctaaatcccgtcatccagtgagaaagcagggactcttcggcctaggcagccgggacccagccagccctgcgcctcgcgccgtcgcgcatgcgtcctgggtatgtccacgcgcaataaggaggggcgaaaggacatttttttttttcttgctcccgcctctgttcttcccccacctgccacgtacagagcccaagttctcgctaggcttgttgggtcagcgcgattggccggggcccgcgcgagcctgcgagcgaggtgcggcggtcgcgaagggcaaccgagcgggccgtgaccaccgcctccccgcgacgccccagtccagtggcctcgcgtccgcccattcagcggagacctgcggagaggcggcggccgcggcctccgcaagccgtctttctctagagttgtatatatagaacatcctggagtccaccatgaacggacagttggatctaagtgggaagctaatcatcaaagctcaacttggggaggatattcggcgaattcctattcataatgaagatattacttatgatgaattagtgctaatgatgcaacgagttttcagaggaaaacttctgagtaatgatgaagtaacaataaagtataaagatgaagatggagatcttataacaatttttgatagttctgacctttcctttgcaattcagtgcagtaggatactgaaactgacattatttgttaatggccagccaagaccccttgaatcaagtcaggtgaaatatctccgtcgagaactgatagaacttcgaaataaagtgaatcgtttattggatagcttggaaccacctggagaaccaggaccttccaccaatattcctgaaaatgatactgtggatggtagggaagaaaagtctgcttctgattcttctggaaaacagtctactcaggttatggcagcaagtatgtctgcttttgatcctttaaaaaaccaagatgaaatcaataaaaatgttatgtcagcgtttggcttaacagatgatcaggtttcagggccacccagtgctcctgcagaagatcgttcaggaacacccgacagcattgcttcctcctcctcagcagctcacccaccaggcgttcagccacagcagccaccatatacaggagctcagactcaagcaggtcagattgaaggtcagatgtaccaacagtaccagcaacaggccggctatggtgcacagcagccgcaggctccacctcagcagcctcaacagtatggtattcagtattcagcaagctatagtcagcagactggacctcaacaacctcagcagttccagggatatggccagcaaccaacttcccaggcaccagctcctgccttttctggtcagcctcaacaactgcctgctcagccgccacagcagtaccaggcgagcaattatcctgcacaaacttacactgcccaaacttctcagcctactaattatactgtggctcctgcctctcaacctggaatggctccaagccaacctggggcctatcaaccaagaccaggttttacttcacttcctggaagtaccatgacccctcctccaagtgggcctaatccttatgcgcgtaaccgtcctccctttggtcagggctatacccaacctggacctggttatcgataaggaggctcctctacaccaattaatgtagctgctagctattggcctcccaaaagactccagtactattttaatttgtattgaagaagttcagaaatttaaaagcagagcattttttatgatatcattgttggtgttaattgaaagtataatttgctggaacacaaagaccaaaatgaaagttttttcctccctgcttaaaaatgtagcagcttcttagttactttggaacactactcttacttggctttttactattaacatgatgtactaaagtagagccctttgagaatacaagatattatgtataaaatgtaacactgatgataggttaataaagatgattgaatccatta

SEQ ID NO: 329866 - DNA, 1940 bp, Homo sapiens
gtgcatcggggcagctcacgcttcctaaatcccgtcatccagtgagaaagcagggactcttcggcctaggcagccgggacccagccagccctgcgcctcgcgccgtcgcgcatgcgtcctgggtatgtccacgcgcaataaggaggggcgaaaggacatttttttttttcttgctcccgcctctgttcttcccccacctgccacgtacagagcccaagttctcgctaggcttgttgggtcagcgcgattggccggggcccgcgcgagcctgcgagcgaggtgcggcggtcgcgaagggcaaccgagcgggccgtgaccaccgcctccccgcgacgccccagtccagtggcctcgcgtccgcccattcagcggagacctgcggagaggcggcggccgcggcctccgcaagccgtctttctctagagttgtatatatagaacatcctggagtccaccatgaacggacagttggatctaagtgggaagctaatcatcaaagctcaacttggggaggatattcggcgaattcctattcataatgaagatattacttatgatgaattagtgctaatgatgcaacgagttttcagaggaaaacttctgagtaatgatgaagtaacaataaagtataaagatgaagatggagatcttataacaatttttgatagttctgacctttcctttgcaattcagtgcagtaggatactgaaactgacattatttgttaatggccagccaagaccccttgaatcaagtcaggtgaaatatctccgtcgagaactgatagaacttcgaaataaagtgaatcgtttattggatagcttggaaccacctggagaaccaggaccttccaccaatattcctgaaaatgatactgtggatggtagggaagaaaagtctgcttctgattcttctggaaaacagtctactcaggttatggcagcaagtatgtctgcttttgatcctttaaaaaaccaagatgaaatcaataaaaatgttatgtcagcgtttggcttaacagatgatcaggtttcagggccacccagtgctcctgcagaagatcgttcaggaacacccgacagcattgcttcctcctcctcagcagctcacccaccaggcgttcagccacagcagccaccatatacaggagctcagactcaagcaggtcagattgaaggtcagatgtaccaacagtaccagcaacaggccggctatggtgcacagcagccgcaggctccacctcagcagcctcaacagtatggtattcagtattcagcaagctatagtcagcagactggacctcaacaacctcagcagttccagggatatggccagcaaccaacttcccaggcaccagctcctgccttttctggtcagcctcaacaactgcctgctcagccgccacagcagtaccaggcgagcaattatcctgcacaaacttacactgcccaaacttctcagcctactaattatactgtggctcctgcctctcaacctggaatggctccaagccaacctggggcctatcaaccaagaccaggttttacttcacttcctggaagtaccatgacccctcctccaagtgggcctaatccttatgcgcgtaaccgtcctccctttggtcagggctatacccaacctggacctggttatcgataaggaggctcctctacaccaattaatgtagctgctagctattggcctcccaaaagactccagtactattttaatttgtattgaagaagttcagaaatttaaaagcagagcattttttatgatatcattgttggtgttaattgaaagtataatttgctggaacacaaagaccaaaatgaaagttttttcctccctgcttaagcggggaaccatcacttttgctaggccacctagccaaagtgaaccaataggattacctgaagtgaaaaagcttatgtacagcca

SEQ ID NO: 329867 - DNA, 1111 bp, Homo sapiens
  misc_feature (40)..(40): n is a, c, g, or t
  misc_feature (52)..(52): n is a, c, g, or t
cggaggggagaaagtaatttaaaaggggtgaaaaataaanaagaaaatttanggccacccagtgctcctgcagaagatcgttcaggaacacccgacagcattgcttcctcctcctcagcagctcacccaccaggcgttcagccacagcagccaccatatacaggagctcagactcaagcaggtcagattgaaggtcagatgtaccaacagtaccagcaacaggccggctatggtgcacagcagccgcaggctccacctcagcagcctcaacagtatggtattcagtattcagcaagctatagtcagcagactggacctcaacaacctcagcagttccagggatatggccagcaaccaacttcccaggcaccagctcctgccttttctggtcagcctcaacaactgcctgctcagccgccacagcagtaccaggcgagcaattatcctgcacaaacttacactgcccaaacttctcagcctactaattatactgtggctcctgcctctcaacctggaatggctccaagccaacctggggcctatcaaccaagaccaggttttacttcacttcctggaagtaccatgacccctcctccaagtgggcctaatccttatgcgcgtaaccgtcctccctttggtcagggctatacccaacctggacctggttatcgataaggaggctcctctacaccaattaatgtagctgctagctattggcctcccaaaagactccagtactattttaatttgtattgaagaagttcagaaatttaaaagcagagcattttttatgatatcattgttggtgttaattgaaagtataatttgctggaacacaaagaccaaaatgaaagttttttcctccctgcttaaaaatgtagcagcttcttagttactttggaacactactcttacatgtataaagtgattgacttgactttctagcttcccttgtccggaggatattaaaatgctagggtgaggtttagccatcttacttggctttttactattaacatgatgtactaaagtagagccctttgagaatacaagatattatgtataaaatgtaacactgatgataggttaataaagatgattgaatccatta

SEQ ID NO: 329868 - DNA, 1096 bp, Homo sapiens
  misc_feature (29)..(29): n is a, c, g, or t
  misc_feature (34)..(34): n is a, c, g, or t
cgtacccccctccgcataacaaagaagangactngagggccacccagtgctcctgcagaagatcgttcaggaacacccgacagcattgcttcctcctcctcagcagctcacccaccaggcgttcagccacagcagccaccatatacaggagctcagactcaagcaggtcagattgaaggtcagatgtaccaacagtaccagcaacaggccggctatggtgcacagcagccgcaggctccacctcagcagcctcaacagtatggtattcagtattcagcaagctatagtcagcagactggacctcaacaacctcagcagttccagggatatggccagcaaccaacttcccaggcaccagctcctgccttttctggtcagcctcaacaactgcctgctcagccgccacagcagtaccaggcgagcaattatcctgcacaaacttacactgcccaaacttctcagcctactaattatactgtggctcctgcctctcaacctggaatggctccaagccaacctggggcctatcaaccaagaccaggttttacttcacttcctggaagtaccatgacccctcctccaagtgggcctaatccttatgcgcgtaaccgtcctccctttggtcagggctatacccaacctggacctggttatcgataaggaggctcctctacaccaattaatgtagctgctagctattggcctcccaaaagactccagtactattttaatttgtattgaagaagttcagaaatttaaaagcagagcattttttatgatatcattgttggtgttaattgaaagtataatttgctggaacacaaagaccaaaatgaaagttttttcctccctgcttaaaaatgtagcagcttcttagttactttggaacactactcttacatgtataaagtgattgacttgactttctagcttcccttgtccggaggatattaaaatgctagggtgaggtttagccatcttacttggctttttactattaacatgatgtactaaagtagagccctttgagaatacaagatattatgtataaaatgtaacactgatgataggttaataaagatgattgaatccatta

SEQ ID NO: 329869 - DNA, 1112 bp, Homo sapiens
  misc_feature (47)..(47): n is a, c, g, or t
  misc_feature (53)..(53): n is a, c, g, or t
cacccccccccccctacaccaactcaccaactcaccgccttcgaggnaccccnggccacccagtgctcctgcagaagatcgttcaggaacacccgacagcattgcttcctcctcctcagcagctcacccaccaggcgttcagccacagcagccaccatatacaggagctcagactcaagcaggtcagattgaaggtcagatgtaccaacagtaccagcaacaggccggctatggtgcacagcagccgcaggctccacctcagcagcctcaacagtatggtattcagtattcagcaagctatagtcagcagactggacctcaacaacctcagcagttccagggatatggccagcaaccaacttcccaggcaccagctcctgccttttctggtcagcctcaacaactgcctgctcagccgccacagcagtaccaggcgagcaattatcctgcacaaacttacactgcccaaacttctcagcctactaattatactgtggctcctgcctctcaacctggaatggctccaagccaacctggggcctatcaaccaagaccaggttttacttcacttcctggaagtaccatgacccctcctccaagtgggcctaatccttatgcgcgtaaccgtcctccctttggtcagggctatacccaacctggacctggttatcgataaggaggctcctctacaccaattaatgtagctgctagctattggcctcccaaaagactccagtactattttaatttgtattgaagaagttcagaaatttaaaagcagagcattttttatgatatcattgttggtgttaattgaaagtataatttgctggaacacaaagaccaaaatgaaagttttttcctccctgcttaaaaatgtagcagcttcttagttactttggaacactactcttacatgtataaagtgattgacttgactttctagcttcccttgtccggaggatattaaaatgctagggtgaggtttagccatcttacttggctttttactattaacatgatgtactaaagtagagccctttgagaatacaagatattatgtataaaatgtaacactgatgataggttaataaagatgattgaatccatta

SEQ ID NO: 329870 - DNA, 1111 bp, Homo sapiens
atatcattcattatttttttattgcatttttaactaaaaaaataaatctcgaggccacccagtgctcctgcagaagatcgttcaggaacacccgacagcattgcttcctcctcctcagcagctcacccaccaggcgttcagccacagcagccaccatatacaggagctcagactcaagcaggtcagattgaaggtcagatgtaccaacagtaccagcaacaggccggctatggtgcacagcagccgcaggctccacctcagcagcctcaacagtatggtattcagtattcagcaagctatagtcagcagactggacctcaacaacctcagcagttccagggatatggccagcaaccaacttcccaggcaccagctcctgccttttctggtcagcctcaacaactgcctgctcagccgccacagcagtaccaggcgagcaattatcctgcacaaacttacactgcccaaacttctcagcctactaattatactgtggctcctgcctctcaacctggaatggctccaagccaacctggggcctatcaaccaagaccaggttttacttcacttcctggaagtaccatgacccctcctccaagtgggcctaatccttatgcgcgtaaccgtcctccctttggtcagggctatacccaacctggacctggttatcgataaggaggctcctctacaccaattaatgtagctgctagctattggcctcccaaaagactccagtactattttaatttgtattgaagaagttcagaaatttaaaagcagagcattttttatgatatcattgttggtgttaattgaaagtataatttgctggaacacaaagaccaaaatgaaagttttttcctccctgcttaaaaatgtagcagcttcttagttactttggaacactactcttacatgtataaagtgattgacttgactttctagcttcccttgtccggaggatattaaaatgctagggtgaggtttagccatcttacttggctttttactattaacatgatgtactaaagtagagccctttgagaatacaagatattatgtataaaatgtaacactgatgataggttaataaagatgattgaatccatta

SEQ ID NO: 329871 - DNA, 1115 bp, Homo sapiens
  misc_feature (56)..(56): n is a, c, g, or t
ccccccacaccttacacaccaccacacgaagcacccgccccctttctagggcactnggccacccagtgctcctgcagaagatcgttcaggaacacccgacagcattgcttcctcctcctcagcagctcacccaccaggcgttcagccacagcagccaccatatacaggagctcagactcaagcaggtcagattgaaggtcagatgtaccaacagtaccagcaacaggccggctatggtgcacagcagccgcaggctccacctcagcagcctcaacagtatggtattcagtattcagcaagctatagtcagcagactggacctcaacaacctcagcagttccagggatatggccagcaaccaacttcccaggcaccagctcctgccttttctggtcagcctcaacaactgcctgctcagccgccacagcagtaccaggcgagcaattatcctgcacaaacttacactgcccaaacttctcagcctactaattatactgtggctcctgcctctcaacctggaatggctccaagccaacctggggcctatcaaccaagaccaggttttacttcacttcctggaagtaccatgacccctcctccaagtgggcctaatccttatgcgcgtaaccgtcctccctttggtcagggctatacccaacctggacctggttatcgataaggaggctcctctacaccaattaatgtagctgctagctattggcctcccaaaagactccagtactattttaatttgtattgaagaagttcagaaatttaaaagcagagcattttttatgatatcattgttggtgttaattgaaagtataatttgctggaacacaaagaccaaaatgaaagttttttcctccctgcttaaaaatgtagcagcttcttagttactttggaacactactcttacatgtataaagtgattgacttgactttctagcttcccttgtccggaggatattaaaatgctagggtgaggtttagccatcttacttggctttttactattaacatgatgtactaaagtagagccctttgagaatacaagatattatgtataaaatgtaacactgatgataggttaataaagatgattgaatccatta

SEQ ID NO: 329872 - DNA, 1401 bp, Homo sapiens
gatgtcatatagttccttgctaccaaagagtttgttcatatggtaatagaggcccatacctttagagggcaaatacagtgctttaggaaggacttagatgatataaatggtatttgtcccttttctcatttttatttactgattttcaactcacttggcttttaatgaacattagcgttacttatctgttggcagctgggttggaaaacatttgtttttctagactttatgaaatggtagccactggtgttgcacttaatgtttattgccagttagttctctgcagttaatccacagcagaggaatcacacttctaaaatggttcattctcttcttcatagacatttaaagttgaacaaatactttcttgtatattgttactctgtttggatggagagggaatgtatatgtatcttaaaaatatttctctttgccacattaaacatgccttttttccttgtgtgtgtgtgtgtgtgttttcaggtcagatgtaccaacagtaccagcaacaggccggctatggtgcacagcagccgcaggctccacctcagcagcctcaacagtatggtattcagtattcagcaagctatagtcagcagactggacctcaacaacctcagcagttccagggatatggccagcaaccaacttcccaggcaccagctcctgccttttctggtcagcctcaacaactgcctgctcagccgccacagcagtaccaggcgagcaattatcctgcacaaacttacactgcccaaacttctcagcctactaattatactgtggctcctgcctctcaacctggaatggctccaagccaacctggggcctatcaaccaagaccaggttttacttcacttcctggaagtaccatgacccctcctccaagtgggcctaatccttatgcgcgtaaccgtcctccctttggtcagggctatacccaacctggacctggttatcgataaggaggctcctctacaccaattaatgtagctgctagctattggcctcccaaaagactccagtactattttaatttgtattgaagaagttcagaaatttaaaagcagagcattttttatgatatcattgttggtgttaattgaaagtataatttgctggaacacaaagaccaaaatgaaagttttttcctccctgcttaaaaatgtagcagcttcttagttactttggaacactactcttacatgtataaagtgattgacttgactttctagcttcccttgtccggaggatattaaaatgctagggtgaggtttagccatcttacttggctttttactattaacatgatgtactaaagtagagccctttgagaatacaagatattatgtataaaatgtaacactgatgataggttaataaagatgattgaatccatta

SEQ ID NO: 329873 - DNA, 1868 bp, Homo sapiens
gtgcatcggggcagctcacgcttcctaaatcccgtcatccagtgagaaagcagggactcttcggcctaggcagccgggacccagccagccctgcgcctcgcgccgtcgcgcatgcgtcctgggtatgtccacgcgcaataaggaggggcgaaaggacatttttttttttcttgctcccgcctctgttcttcccccacctgccacgtacagagcccaagttctcgctaggcttgttgggtcagcgcgattggccggggcccgcgcgagcctgcgagcgaggtgcggcggtcgcgaagggcaaccgagcgggccgtgaccaccgcctccccgcgacgccccagtccagtggcctcgcgtccgcccattcagcggagacctgcggagaggcggcggccgcggcctccgcaagccgtctttctctagagttgtatatatagaacatcctggagtccaccatgaacggacagttggatctaagtgggaagctaatcatcaaagctcaacttggggaggatattcggcgaattcctattcataatgaagatattacttatgatgaattagtgctaatgatgcaacgagttttcagaggaaaacttctgagtaatgatgaagtaacaataaagtataaagatgaagatggagatcttataacaatttttgatagttctgacctttcctttgcaattcagtgcagtaggatactgaaactgacattatttgttaatggccagccaagaccccttgaatcaagtcaggtgaaatatctccgtcgagaactgatagaacttcgaaataaagtgaatcgtttattggatagcttggaaccacctggagaaccaggaccttccaccaatattcctgaaaatgatactgtggatggtagggaagaaaagtctgcttctgattcttctggaaaacagtctactcaggttatggcagcaagtatgtctgcttttgatcctttaaaaaaccaagatgaaatcaataaaaatgttatgtcagcgtttggcttaacagatgatcaggtttcagggccacccagtgctcctgcagaagatcgttcaggaacacccgacagcattgcttcctcctcctcagcagcctcaacagtatggtattcagtattcagcaagctatagtcagcagactggacctcaacaacctcagcagttccagggatatggccagcaaccaacttcccaggcaccagctcctgccttttctggtcagcctcaacaactgcctgctcagccgccacagcagtaccaggcgagcaattatcctgcacaaacttacactgcccaaacttctcagcctactaattatactgtggctcctgcctctcaacctggaatggctccaagccaacctggggcctatcaaccaagaccaggttttacttcacttcctggaagtaccatgacccctcctccaagtgggcctaatccttatgcgcgtaaccgtcctccctttggtcagggctatacccaacctggacctggttatcgataaggaggctcctctacaccaattaatgtagctgctagctattggcctcccaaaagactccagtactattttaatttgtattgaagaagttcagaaatttaaaagcagagcattttttatgatatcattgttggtgttaattgaaagtataatttgctggaacacaaagaccaaaatgaaagttttttcctccctgcttaaaaatgtagcagcttcttagttactttggaacactactcttacttggctttttactattaacatgatgtactaaagtagagccctttgagaatacaagatattatgtataaaatgtaacactgatgataggttaataaagatgattgaatccatta

SEQ ID NO: 329874 - DNA, 506 bp, Homo sapiens
tgacagttgatatccatccaggcactctaatggcacgttagtcaggggagatgtgaagaggccctgatcactgaaccaaccaagagaaagcattctgaagaatctgctggggtcaaagaacccttccaagcaggttggagtccagtggcatgatcataactattaacttcaaatctctgggttcaagcaatacttccgcttcagcctccaaagttgcctagaactactgatgcatgccaccatgcccagctaactttttttttcttttttgtggagacagtctcactatgttgcctgggctacaactcctagcctcaagcgatcctcccacgtcctcacctccagtgccacctcacccagaccaatcaggtttattagtataccttcacacataccacattgacatgaaatcatccttgccctcaggaagcctacagtccaatcagggaaacaaaagcaacacatgtcaacaaatgcaatactgtaatgcagaaacgaagcaagta

SEQ ID NO: 329875 - DNA, 557 bp, Homo sapiens
aaaaaaaaaaagttggttttattagattacagagaatactttctctatccaaaatctgtgattttaatctagaacactgaatgtaggtcagtatccaccccattttcagaaatctgggaagatctttttttgtttttcagcttctcagaataaatactttctaggatgttacaaacatggatgaagttcaccagaacagatccagggttaaccttttaaagtcattagatatggctccagtaaaaggcatgagaaggcacccgtgagaccctgcagaggaagcctcactcctgggcagccttacggctgacgagctaccttactgagcatattcctgcctctacaccagagactcactctgtggtccggtgtcacctcgattctaaattccctgcttcctggtgaatgatgctatcacactttagaaacctggccaataaatgctttgaaatttaaggatagctatcctgaaaaaatttaatataacctaaattgatagtctaatgacatcagtattcagaagaggcattctatttcagcaagtggttttcagaaaa

SEQ ID NO: 329876 - DNA, 417 bp, Homo sapiens
gcaggacagaggaggataagaagctggaggtcaaggaagggaatgctggtggggacggtgtagcaacctccaaggagataagtaatagctgcagcgtgggctggtatgggctggtgactgaggagtaccaggtcctggaaacctacacaggacaatcagagcagcgcagcaggtgcacggtgccgagtgaggagcgagtgcaagagctgtccactctttacagaagcttgtcagtgaaagaaagagaagagggactggggaaacatggagtcttcttactaacagaaaactcagcttgtgggggagggaagaagtctgtgggagggaggcagggagggaacctgcctcagagggaggaggagagagctgacttgggagtgtacgtggaaaaggtactctcgccttgttctggaggag

SEQ ID NO: 329877 - DNA, 4813 bp, Homo sapiens
  misc_feature (1822)..(1822): n is a, c, g, or t
  misc_feature (1887)..(1887): n is a, c, g, or t
  misc_feature (1899)..(1899): n is a, c, g, or t
  misc_feature (1951)..(1951): n is a, c, g, or t
  misc_feature (1959)..(1959): n is a, c, g, or t
  misc_feature (2026)..(2026): n is a, c, g, or t
gggattgttcagaggcaaagtattggaatctatcaatgaacagatagtctttgatctctactccgttgacacttccttgaatgtaaaaataatttttagagtgtggtactttttgttttataaaaagtatgtatcagtctgaatgtttgtttgcttcataaatcaaaacatttccatatttttgaaattacatcagtgttttaaaattcaacttcctagattaaattttacagttgaatgttttgtctcagtattttgcctagttcttatttcttgtctaacagaaactaacactttgggaggccgaggtgcgcagatcacctgaggtcaggaatttgagaccagcctggccggcatggcgaaaccctgtctctactaaaagtacaaaaattagccaggagtggtggcgggtgcctgtagtcccagctactcaggaggctgaggcaggacaatcgcttgaacccgggaggcggaggttgcagtgggctgagattgcgccactgtactccagcctgggcgacaagagtgagactccagcgcaaaaaaaaaaaagggcgggggggctaaagcataaagaggtgagcataattttaaagaattactaagttcagtttaactagagtagctaaaatttgaaagacttgctcattatgtgaagataagtgattccagtaaacaagcaaaaatcactgagaaaagtacattaataatgttagaaaaacctaatcttaatttactattaaaaatattcatcttattctgtcctcttttcacagtttttaccaaagtcaaatgtttttgctagctttggagcactgttaactatagtcctatctgtggtaatgctataatgcccaaattgatagttttataatgctagtgcttaagttatttggagaaatttggctggatgggggcagagcaggtcaggcagatcttacactgcctggaactgcaaatctataggtggcaagagggaattgctttctaaattgaatgctccatttccttaacaagactggtccaggaccaagccaagcttaggtaaatgggcttggaatacagcctttctggggaatttgctatggcttttgagtccttgtgatttggaaaacatctggatataaagagatgtttatagctgatctgaatatatatgtgatctccctgaagtaagtaactacagatcagccgaagaacctcctctgactacttaggattctcttcaagcgtgtcaatcagctagaacgtgaccattctctgagcgttgaacactttacattgccagataatttgtgctgttttcgtcaaacctgaccctaatataacttgactaaataatcttgtctgtggcaaataaagaggtagcagtatatttatgtcctcttttcggaaggtgataaaggaattatttgataaagtacgatatgtattgctactttgcagagtagacctcaagtagatacttgagtagacactctgcatttgtgtgcttttttctattcacacactacagtgggtatgtgaatcagtgaaaaattgccaaaaatatgatcaattgaaaacttttgttaggtggtctttatttgaactatatcttgtcatccattagtaatttagcaagatttgatcagaaccagtcaacgctctttaaatcagttaatcccattaaaggtttttatggaaaggaaaaacagtgctcaacaattgagttgatactaaagctttgctttgaccaaattgcagttaataccagtaaactactttttttttttgagacggagtcttgctctgtcacccagactggagtgcagtgacgctntcttggctcactgcaagctctgcctcccgggttcacatcattctcctgcctcagcttcctgagtngctggggctatnggcacccgtcaccacgcctggttaatttttttttagtacagatggggtttcnccgtgttngccaggatggtctcgatctcctgacctcgtgatctgccagcctcggcctcccagagtgctgggattncaggcgtgagccaccgtgcccagcctatcagtcaactactttttgtttttatcttcatatattaagggaatttttagttaaacaggttgccctcacatacattttatgatcttatattagatacctttggatgtctgtattttttagtaggcagatgaaagtgtttttagttaggattatagggattgctttagtaaaataatatttcctcagagaatctgtcttactccaacaaatactaactctaaagactgttttctgtgttttttagtcggccgtatactaacaaggtaattactttatggtaccgtccacctgaactgctactgggagaagaacgatacacaccagccattgatgtatggagctgtggctgtatccttggcgaactcttcactaaaaaacctatatttcaagcaaatcaggaacttgcacaactagaattaataagccgaatatgtgggagtccatgtcctgcagtgtggcctgatgtaatcaaactaccatatttcaacaccatgaaaccaaagaagcaatatcgtcgaaagttaagagaagaatttgtttttattcctgcagctgcgctagacttatttgattacatgcttgccttggatcctagtaagcgctgcactgctgaacaggctcttcagtgcgagttcctccgagatgtggaaccctcaaaaatgcctccaccagatctccctttatggcaagattgtcatgagttatggagtaaaaagcgaagaagacagaagcagatgggcatgactgatgatgtttccacaattaaagcccccaggaaggacttgtctctgggcttggatgacagcagaaccaacacaccccagggtgtgctgccatcttcacagctgaaatctcagggcagctcaaatgtggcacctgtaaaaacaggccctggacagcacttaaaccacagtgaattggcaattctactaaacctactacaatctaaaacaagtgttaatatggctgattttgtccaagtgttgaacattaaggtaaactctgagactcaacagcagctaaataaaataaaccttcctgctggaattttggcaacaggtgaaaaacagacagatccatcaacaccacaacaggagtcttcgaaaccgttgggaggaattcagccttcttctcagaccatccagcctaaagtggagactgatgctgcccaggcggctgtgcagagtgcatttgcagttctgttgactcagttaataaaggctcagcagtcaaagcagaaagatgtgctactagaagagagggaaaatggatcgggacatgaagcgtcattacaactcaggccacctccagaacctagcactccggtgtcgggacaagatgacctcatccagcatcaagatatgaggatcttggagctaacgccagaaccagaccggcctcgaattctgcctcctgaccaacgacctcccgagcctcctgaaccaccaccagtcactgaggaagatctagattatcggacagaaaaccagcatgtacccaccaccagttcttcattaactgaccctcatgccggagtgaaggcagccctgttacagctgcttgctcagcatcagccccaggatgaccccaaaagagaaggtgggattgattatcaagcaggagacacttacgtgtccacttcagactacaaggacaactttggatcctcttctttctcttctgctccttatgttagcaatgatggtctaggaagcagttctgctccaccactagaacgacgtagtttcattggaaattcagatattcagtctttggataactacagtactgcttcatctcattctggtggtccacctcagccttctgccttttctgagtcatttcccagttcagtagctggatatggagacatttacctcaatgctggtcccatgttgtttagtggagacaaggaccatagatttgaatatagccatggtcctattgcagtcctggcaaacagcagtgacccttccacggggccagagagtactcatcctttgccagcaaagatgcacaactataactatggtggtaacttacaggaaaatccgagtggccccagcctcatgcatggacagacctggacttctcctgcccaaggacctggatattcacaaggatacaggggacatattagcacatcaactggcagaggcagaggcagagggttaccatactgagtatctgtttttcctcaggcacatcatttttatctggaaagacttttctagctgcaatttaaggcagcaatccaagagacttgaataataataattcaacaacagctttatttttatgtggagaagggtcttgcatacaatagtttaaaaaagacaaaaaaaacctttgcttaaattcatgctgttctaaaaactagatcgattgtacatcttcacaaattctagttaacaattttattttgtattcttgcagttttaagtggatgctaattttaggggcataagccttttatggccctcttgcagatcttctgaactatgcacatttgtgctttttttgtaagtttggaccaacttttatgtaacaaacagcccctccccacctccagttttacaacaatcagaaagggcactgatttatttggtatttttctttttacaaagctacctttagtcaaaggtcactgtcagtctttgcacctgctttcagtgttattgtgaaaggtgtactttgtgctcatttcagaaaataaaacacaacctttctcttgatgcaacagttttataaaaaaaaaaa

SEQ ID NO: 329878 - DNA, 4013 bp, Homo sapiens
  misc_feature (2530)..(2530): n is a, c, g, or t
gaaaaactggcttgataacatggcaagctgaatgcttgtagctagtaggctgtcactttctagtaagactatgtatttatcccaccagttgaagagtatgctgaacaggaggtagttgttagttttcaatttttatgctttttattattataattacttagtttaagcgtagatacagtgctttacaaaaactttaagacattgctgtctaattagggatggacaagtaattgtgtaagttagaaaagttataaaaatccaagatgtggtattagattgctttgaaagtgtttttaatttctagatttatttaaagaaatcaaaactaaaaatccttgatgatgtgttatgggtgtggtttgtacaagagagctaatacagaattccattcagtgaatcctctgtttaaagagaaagccttggcctttgtcagaagatgggaaaacaaatgtacatttataaactttcagttaaaataaaatgtttaaattatatatctgtgtatcttttttttttaaacgattccttctaacctttttttttaaacgattccttctaacccatttttttttttgttaaacccaaccagccaactcttggtcctgattgtattggaaactagggcttctattaaagatagttaacatctatttagttcatatacaatatcagcattattcgaagagtttcacttgaattatctcagttaagcttcgtaacaaccctatgtcttctctttatagttaagaaaactgaaccttagagaggtgaagaattcgtccagggtcataaaactagcaagtggcaaaattgagatttaaacactgctaggtgttaccttaggatctaaacttttaaccattactccaaagtacaggctgggtgcggtggctcacgcctgtaatcgcagcactttgggaggccaagacgggtggatcacttgagcccaggagttcaagaccagactaggcaacatgacaaaaccccgtatatactaaaaacaaaaattagccgggcatggtagcacacacctgcaatcccagctccttgggaggctgaggcatgagaattgcttgaacctgggaggcagaggttgcagtcagccaagatcgcaccactccactacagcctgggtgacagagtgagaattggtctcaaaaaataaataaataaactacataggaaataaaactacctggaatcttttcttttacaaaatcaatatgacacacatatcggtacttgacaaagacaacatgaaaaattttataagatattaggccgggaacggtggctcatgcctgtaatcccagcactttgggaggccgaggtgggagggtcacttgaggccaggagtctgaaaccatgcctggccaacatggtgaacgcccccatcccccatatctactaaaaatataaaaattaggctgggcatggtggctcatgcctgtaatcccagcactttgggaggctgaggcgggtggatcacttgaggtcaggagtttgagaccagcccggccagcatggcgaaaccctatctctactaaaaatacaaaaactaaccgggcgtggtggtaggcgcctgtagtcccagctcctcaggaggctgaaacacaataattgcttgaacccagaaggcggaggttgcagtgagccgagattgctctgccgcgctccagcctgggcgattgagactgtctcaaaaaaaaaaaaaaagaaaaattgtataagatattaatccaagaattctaagggaggtactagcaaatagtatccagctttttatcacaaagttaacctgcagaaaaatgatgggagctaagatgatacagagggtcaagaaaggtatctccctttaagtgacatttgagcagagatctgaatgaagaaatggcaaagtaataaagactctgaggcatatttggttttttttttttaggaatatgttctcagtgaaccatatggggggaaagcttggtttatccattttatagcatgctgtactgttactaagaaggaaatagttggtcaggcacaatggctcacgcctctagtcccaacactttgggaggccaaggcgggcggatcacttgaggtcgagttcaggaccagccttgccaacatggtgaatccctgtctctactaaaaatacaaaaattacctgggcgcagtggtgtgtgcctgtaatcccagctacttggaaggctgaggcaggaacatcctgcctcaggtagcttgaacctgggaggcagaggttgcagtgagtcgagattgtgccactgcactccagcctgggtgacagagtgagactatgtctcagaaaaaaaaaaaaaaaaaaggaaacagttgatttggagataaagaaatggaaaagcagcatgaatagttacagaaggctatattgagattgatctcatttaggtaaaacaaaagactcaaattgttaatctgaacatggactttcaagaagactagggaggagaaattttcattttctagtttatatatttcagcatgtttttattttgtnaagatacttataattttataaagagattgaccgggcacagtggctcacacctgtaatctcagcactttggaaggccaaggcaggtggatcactagagcccaggagtttgagaccagcctgggcaacgtggccaaaccccgtctctacaaaaaatacaaaaattaggtgggtgtggtagcacacacctatagcctgagctattgggaggctgcggtacaaggatcacccgaacccaagggaggtcgaggctacagtgaactgtgattgcaccactgccctttagtctgggcagcagagcgagaccttgtctcaaaaaaacagaaataaaacaacaaaacataaaaagatgcttcaattttgatttcatagcattaatttcttttcagacatgaagaaaatgaagtttctgataaacaaatctgactataatgaggcaacggagtataccgaaaagtgtgtggcctttagaatcttacagggttgggttctaatgccagctcagctacttcctgcgcttatggtttagggtcccatatgctcttaagtttttttcttcaaaagtaaaagaggactgataacatgcttagggttgtgagaattaaatgtaaataagttttcagtacatatttcttccctcaccttatttacagtaatgctaggttgtttataggctcaggaatgatgagacctagtgtcagtatagtacagatacatgtaaaactgatcaagagtgataacactaatttgctttaaatggctttacaccatagtgaatgagttattttatttataatttgctttgttccagaaagtattttaggcagattacaaatattttataatagaagtagcatagattaaaaagtgatggagggaggccgggcacggtggctcatacctataatcccagcacttcgggaggccgaggcaggtagatcatctgaggtcagcagtttgagaccagcctggccaacatagtgaaaccccgtctctgctaaaatacaaaacaagccgggcacagtggctcatgcctgtaatcctagcactttgggaggccgaggcggacaggtcatgaggtcatgaggtcaggagatcaagaccatccgggctaacacggtgaaaccccgtctctaccaaaactacaaaaaaaaaaaaaaaaaaaaaaaaaaagccgggcatggcggcgggcacctgtagtcccagctactcaggaggctgaggcaggagaatggcatgaacccaggaggcagagcttgcagtcagccgagatggcgccactgcactccagcctgggcaagagagcgacactccatctcaaaaataaataaaaaaacaattagctgagtgtggtggcacacacctgtaatcccaggtacttgggagtctgaggcaggagaactgcttgaacctgggaggtggaggttgcagtaagcggagattgtgccactgcactccagcctgggcaacagcaagactccatccc

SEQ ID NO: 329879 - DNA, 2878 bp, Homo sapiens
agccccgcgggccgcagagtgcgcgaggccctaggccgggagttgttgtcaggcccaggccacttccgaggcgcctgcggtgtgtcgccgccaccacaggaggacgacgtcgacgccgaggaggaggcggtggaggcgtgttgttgtctcgcccactcccctcccctgaacttgcacccaacgtcagggcgcgatggagtgaagcggcgacgaaggtggtacttccgcgttgcgctgcccgagccgagagcgcggccaaggccgctcccccacccccgggggcacttggaggactcgggactcccccgcaggtcagcgcccggcgcatctggtgttttcgctgccgaggataggacgacgagcgcaatcgggagctccgccgcccggattcctgcttccctggggcccggaggctgctgcgtaccccactgtgacctggaacccagggacccgagtcccgacccggattatcgtggcgcttttcccggccggctctggtgctcggtgtccctccgccgccgctcccgtttccggcgggggagatggccaggatctgacccgggaggaggccgcacccgcgccgcgctctgcggctggctctaggcgatgccgagcagctcggacacggcgctggggggaggcgggggcctgagctgggcggagaagaggttggaggaacgccgcaagcggaggcgattcctgtcccctcagcagccgccgctgctgttgccgctcctgcagccgcagctcctgcaaccgccgccgcccccgccgcctctgctcttcctggctgctcccggcacggccgccgccgcagccgccgccgccgcggcctcctcctcttgcttcagcccgggcccccctctggaggtcaagcggctggcgagaggcaagaggcgcgcaggagggcggcagaagcggcgtcgcgggccccgcgccgggcaggaggcggagaagcgtcgggtcttctcgctgccccagccgcagcaggacggcggtggcggtgctagtagcggcgggggtgtgaccccgctggtggaatacgaggatgtgagctcccagtccgagcaggggctgctgctggggggggccagcgcggcaacggcggcgacggctgccgggggaacggggggcagcggcgggagtccggcctcctcctccggcacccagcggcgcggggaggggtcggagcgcaggccccgccgggaccgccgcagcagcagtggccgcagcaaggagcgccaccgcgagcaccggcggcgggatgggcagcgcggtggcagcgaggcctccaagtcccgcagccgccacagccacagcggcgaggaacgggccgaggtcgccaagagcggcagcagcagcagcagcggcggccgccggaaaagcgcttcggccacatccagcagcagtagcagccgcaaggaccgggactcgaaggcccaccgcagccggactaagtcgtccaaggagccgccttcggcctacaaggaaccgcccaaggcctaccgggaggacaagaccgagcctaaggcctacaggcggcggcggtccctcagcccactgggaggccgggacgacagcccggtgtcccacagggcctctcagagcctgaggagccgcaagtcccccagcccggcaggaggtggcagcagcccctattctcggcggctgccgcgctccccgagcccctacagtcgccgccgctcccccagctacagccgccacagctcctacgagcggggcggcgacgtgtcccctagtccctacagcagcagcagctggcgccgctctcgcagtccctacagccctgtgctcaggtgagttctgccgttctgcctgtgtgtgccttggctgcgctggccagatccccaggaggaagggaaagtggtgcccgggtcctcagaacgactcaggtccaccaccgagacgagacaacaccgcctgagcctcccaggaaggataggcgttttcgcgcgcgtgacacttttttagggggtcgaagggacaaagcaactgggcgaagggaacttttctcctagctgtggcagggaagatttctaaggaagaattaaaagtttcagacttgttgcattaatgtgttaacaggtttctctcagttgctctttgcttttctggtacaatttgggtaaacctagaggtggtttaagtcttaattttgaaagttctgtgaagaggtttcattgttgggaatttaggaatggactgcaacttaagatctagtattgtacaggggaataagaatcaggtactgatgtcagagttagatgtggattgcagatgtttcttatgattattacagaaatgggagaagcagcctttctgtaaagtttattcttttagtatgttaaaaaagcttaggtggaagccgatagttctgaatactgaagttaaaaaaggtatctatttagtgatattcttgtgtgggatagtttttacctgatctttcaaagtcataattatagaaggtagaaaaaatgacaagactgtggtttctttgttggtttgtgatgacacccagttgctaataacattataaatctgggtggtgtaacctagtgtaaccaagtgaatggctgagtacattcttatactattataagcctgtaactgcttactttaaaagctaagtagactttttcttagatatatacccgaaggataaaaacacaatataactagacctttaaatatcaggatctttgtccagaaatctttaaaaggtgtaatttaatttaatgaaattggagtaaaacttttctgtagctttcttgccttgttatataatattctttttaaaaagtgtgccttaaaatatacttatccactaagcaaagtgcattaaaaacaactttcgagt

SEQ ID NO: 329880 - DNA, 1195 bp, Homo sapiens
tatacagatttccttagtttttacctaattctatatcatttttactccaaattttgcattatacagttgagtatagtgtattactttagctggaaagaaacttggacaatagtcttataatgtgaaatactgttgaatattcatgactattgctacttaaatgtaagtcataagcatatttttattagtcaacaaaatttttgttttatttgtctgacttctttcactttcagcttacgaggaaatatttcagtaaaagcagttaaaaaagaagtagaaaagaaactccgatgtcttcttgctgatttaccgctgccccctgagctaccaggaggagatgatctttcaaagagtccagaggaaaagaaaacagcaacacagttacatagtaaaaggaggcctaagtatgtgcttgctttctacctgctcttaaattgaccagcagtgattctgggtcatcagaagttcataaaacactaaattaaggtttaaaataaaaaatgtacttattctttcaacttaaatatatgaattctattagagttttgaaaaaaatcataattgcttgcattcctattcacaatgactaataaaaccaaatttaattttctctcgtaatttgtaatgtattaatttcctggggtattgtatatgttaaagatactttctgttattaagagattgaaataacacaaacactgaaattgggcagagtagaagtcagcatttagtgagaccaaataaaattagtaatgggcaagctgctgtttcctttgcttttagctccattttctcccataaacaaatatattcttcactttgcaagagatggagtagaagaagttttgaaatttgtatcctaaattagcttcaagtaagtgcctaaagagacctctttcccttaaaacctgttaatcagttaaaggcggggaacactggtgcctttttttttttttttttttaacttcttaaccaagggacagtgaagactttaagttagatctgattttagaattgcagttgaggtagtgcctagtgtgtgaatttgaggtcattttctaaactggccgggcacagtggctcatgcctgtaatcccagcactttgggaggcccaggtgggagaatcacttgagtccaggagtttgataccagcctgagcaacacagggagaccccatctctaccaaaaaaaaaa

SEQ ID NO: 329881 - DNA, 6140 bp, Homo sapiens
agccccgcgggccgcagagtgcgcgaggccctaggccgggagttgttgtcaggcccaggccacttccgaggcgcctgcggtgtgtcgccgccaccacaggaggacgacgtcgacgccgaggaggaggcggtggaggcgtgttgttgtctcgcccactcccctcccctgaacttgcacccaacgtcagggcgcgatggagtgaagcggcgacgaaggtggtacttccgcgttgcgctgcccgagccgagagcgcggccaaggccgctcccccacccccgggggcacttggaggactcgggactcccccgcaggtcagcgcccggcgcatctggtgttttcgctgccgaggataggacgacgagcgcaatcgggagctccgccgcccggattcctgcttccctggggcccggaggctgctgcgtaccccactgtgacctggaacccagggacccgagtcccgacccggattatcgtggcgcttttcccggccggctctggtgctcggtgtccctccgccgccgctcccgtttccggcgggggagatggccaggatctgacccgggaggaggccgcacccgcgccgcgctctgcggctggctctaggcgatgccgagcagctcggacacggcgctggggggaggcgggggcctgagctgggcggagaagaggttggaggaacgccgcaagcggaggcgattcctgtcccctcagcagccgccgctgctgttgccgctcctgcagccgcagctcctgcaaccgccgccgcccccgccgcctctgctcttcctggctgctcccggcacggccgccgccgcagccgccgccgccgcggcctcctcctcttgcttcagcccgggcccccctctggaggtcaagcggctggcgagaggcaagaggcgcgcaggagggcggcagaagcggcgtcgcgggccccgcgccgggcaggaggcggagaagcgtcgggtcttctcgctgccccagccgcagcaggacggcggtggcggtgctagtagcggcgggggtgtgaccccgctggtggaatacgaggatgtgagctcccagtccgagcaggggctgctgctggggggggccagcgcggcaacggcggcgacggctgccgggggaacggggggcagcggcgggagtccggcctcctcctccggcacccagcggcgcggggaggggtcggagcgcaggccccgccgggaccgccgcagcagcagtggccgcagcaaggagcgccaccgcgagcaccggcggcgggatgggcagcgcggtggcagcgaggcctccaagtcccgcagccgccacagccacagcggcgaggaacgggccgaggtcgccaagagcggcagcagcagcagcagcggcggccgccggaaaagcgcttcggccacatccagcagcagtagcagccgcaaggaccgggactcgaaggcccaccgcagccggactaagtcgtccaaggagccgccttcggcctacaaggaaccgcccaaggcctaccgggaggacaagaccgagcctaaggcctacaggcggcggcggtccctcagcccactgggaggccgggacgacagcccggtgtcccacagggcctctcagagcctgaggagccgcaagtcccccagcccggcaggaggtggcagcagcccctattctcggcggctgccgcgctccccgagcccctacagtcgccgccgctcccccagctacagccgccacagctcctacgagcggggcggcgacgtgtcccctagtccctacagcagcagcagctggcgccgctctcgcagtccctacagccctgtgctcagacggtctggaaaatcccgaagcagaagcccgtattcatctaggcattcaagatctcgtagcaggcacagattgtctagatccagaagtcgtcattctagtatttctcctagcacactaactctgaagagtagcctggcagctgaattgaacaagaataaaaaagcacgagcagcagaggcagcaagagccgcagaagcagcgaaagctgcagaagcaactaaggctgctgaggctgctgccaaggctgcaaaagcttcaaacacttctacacctaccaaggggaacacggaaactagtgccagtgcatcacaaacaaaccatgtgaaggatgtgaagaaaattaaaattgaacatgcaccttctccctcaagtggtggaactttaaaaaatgacaaagcaaaaacaaagccacctcttcaggtaacgaaggtggaaaataatttgattgtagataaagccaccaagaaagcagtcatagttggaaaggagagtaaatctgctgctacaaaggaggaatcagtatctcttaaagagaaaaccaaaccacttacaccaagcataggagccaaggagaaggagcaacatgtagctttagtcacctctacattaccaccgttacctttgcctcccatgctgcctgaagataaagaagctgatagcttacgaggaaatatttcagtaaaagcagttaaaaaagaagtagaaaagaaactccgatgtcttcttgctgatttaccgctgccccctgagctaccaggaggagatgatctttcaaagagtccagaggaaaagaaaacagcaacacagttacatagtaaaaggaggcctaaaatatgtgggcctcgctatggtgaaaccaaagaaaaagatattgactggggaaaacgctgcgtggataaatttgatatcatcggaattattggagaaggtacttacggacaagtttacaaagccagggataaagacactggagaaatggtagccttaaaaaaagtacgtctggataatgaaaaggaaggctttccaattacagcaattcgagaaattaaaattctccggcagcttacccatcagagtattatcaatatgaaggaaatagtgactgataaagaagatgctttggatttcaagaaggacaaaggtgcattttatctggtgtttgaatatatggaccatgatctgatgggactactggaatcaggcttggttcattttaatgaaaatcacataaagtcatttatgagacagctcatggagggtctggattattgtcataagaagaactttttgcatagagatattaaatgttccaatatccttctaaataatagagggcagataaaacttgcagactttggacttgctcgattgtatagctcagaagaaagtcggccgtatactaacaaggtaattactttatggtaccgtccacctgaactgctactgggagaagaacgatacacaccagccattgatgtatggagctgtggctgtatccttggcgaactcttcactaaaaaacctatatttcaagcaaatcaggaacttgcacaactagaattaataagccgaatatgtgggagtccatgtcctgcagtgtggcctgatgtaatcaaactaccatatttcaacaccatgaaaccaaagaagcaatatcgtcgaaagttaagagaagaatttgttttgtaagaaggggatgtgtaaacatccttattgcatgaatgttttactttaattctagtgaattataaatgttagtctattctctagtgatctgaggtaaacctataattcttctagggcatttaattttgagttctgtttgctacatgcagattaccattttaccattattatggaatcagtgatttgagattgtgtgtttggtttggtgcttacgtgaaagaactttaataagatcatttaaatgttactggaacagctttcaagttacttgagctcaagttttcattttgctttagaaaaaactatactgttcagttcttaatttgtataataacagcaaattaccgataagtaacaatatatactattgtttagaaagtggttacaaaaattatgtaaaaatgaaatatttattcaaaggaaaattcggatttattgaagtaaagtattatgcacatattaaaaaagtatttacaattatttttaaatgatcttagttttagttttaaaatttaattaaaaataatttaagctcctaaagaaacataagcttgtgtctaaagaacacatctaacttttgtaatcctctcatgctagtattcctgcagctgcgctagacttatttgattacatgcttgccttggatcctagtaagcgctgcactgctgaacaggctcttcagtgcgagttcctccgagatgtggaaccctcaaaaatgcctccaccagatctccctttatggcaagattgtcatgagttatggagtaaaaagcgaagaagacagaagcagatgggcatgactgatgatgtttccacaattaaagcccccaggaaggacttgtctctgggcttggatgacagcagaaccaacacaccccagggtgtgctgccatcttcacagctgaaatctcagggcagctcaaatgtggcacctggtgaaaaacagacagatccatcaacaccacaacaggagtcttcgaaaccgttgggaggaattcagccttcttctcagaccatccagcctaaagtggagactgatgctgcccaggcggctgtgcagagtgcatttgcagttctgttgactcagttaataaaggctcagcagtcaaagcagaaagatgtgctactagaagagagggaaaatggatcgggacatgaagcgtcattacaactcaggccacctccagaacctagcactccggtgtcgggacaagatgacctcatccagcatcaagatatgaggatcttggagctaacgccagaaccagaccggcctcgaattctgcctcctgaccaacgacctcccgagcctcctgaaccaccaccagtcactgaggaagatctagattatcggacagaaaaccagcatgtacccaccaccagttcttcattaactgaccctcatgccggagtgaaggcagccctgttacagctgcttgctcagcatcagccccaggatgaccccaaaagagaaggtgggattgattatcaagcaggagacacttacgtgtccacttcagactacaaggacaactttggatcctcttctttctcttctgctccttatgttagcaatgatggtctaggaagcagttctgctccaccactagaacgacgtagtttcattggaaattcagatattcagtctttggataactacagtactgcttcatctcattctggtggtccacctcagccttctgccttttctgagtcatttcccagttcagtagctggatatggagacatttacctcaatgctggtcccatgttgtttagtggagacaaggaccatagatttgaatatagccatggtcctattgcagtcctggcaaacagcagtgacccttccacggggccagagagtactcatcctttgccagcaaagatgcacaactataactatggtggtaacttacaggaaaatccgagtggccccagcctcatgcatggacagacctggacttctcctgcccaaggacctggatattcacaaggatacaggggacatattagcacatcaactggcagaggcagaggcagagggttaccatactgagtatctgtttttcctcaggcacatcatttttatctggaaagacttttctagctgcaatttaaggcagcaatccaagagacttgaataataataattcaacaacagctttatttttatgtggagaagggtcttgcatacaatagtttaaaaaagacaaaaaaaacctttgcttaaattcatgctgttctaaaaactagatcgattgtacatcttcacaaattctagttaacaattttattttgtattcttgcagttttaagtggatgctaattttaggggcataagccttttatggccctcttgcagatcttctgaactatgcacatttgtgctttttttgtaagtttggaccaacttttatgtaacaaacagcccctccccacctccagttttacaacaatcagaaagggcactgatttatttggtatttttctttttacaaagctacctttagtcaaaggtcactgtcagtctttgcacctgctttcagtgttattgtgaaaggtgtactttgtgctcatttcagaaaataaaacacaacctttctcttgatgcaacagttttataaaaaaaaaaa

SEQ ID NO: 329882 - DNA, 6566 bp, Homo sapiens
agccccgcgggccgcagagtgcgcgaggccctaggccgggagttgttgtcaggcccaggccacttccgaggcgcctgcggtgtgtcgccgccaccacaggaggacgacgtcgacgccgaggaggaggcggtggaggcgtgttgttgtctcgcccactcccctcccctgaacttgcacccaacgtcagggcgcgatggagtgaagcggcgacgaaggtggtacttccgcgttgcgctgcccgagccgagagcgcggccaaggccgctcccccacccccgggggcacttggaggactcgggactcccccgcaggtcagcgcccggcgcatctggtgttttcgctgccgaggataggacgacgagcgcaatcgggagctccgccgcccggattcctgcttccctggggcccggaggctgctgcgtaccccactgtgacctggaacccagggacccgagtcccgacccggattatcgtggcgcttttcccggccggctctggtgctcggtgtccctccgccgccgctcccgtttccggcgggggagatggccaggatctgacccgggaggaggccgcacccgcgccgcgctctgcggctggctctaggcgatgccgagcagctcggacacggcgctggggggaggcgggggcctgagctgggcggagaagaggttggaggaacgccgcaagcggaggcgattcctgtcccctcagcagccgccgctgctgttgccgctcctgcagccgcagctcctgcaaccgccgccgcccccgccgcctctgctcttcctggctgctcccggcacggccgccgccgcagccgccgccgccgcggcctcctcctcttgcttcagcccgggcccccctctggaggtcaagcggctggcgagaggcaagaggcgcgcaggagggcggcagaagcggcgtcgcgggccccgcgccgggcaggaggcggagaagcgtcgggtcttctcgctgccccagccgcagcaggacggcggtggcggtgctagtagcggcgggggtgtgaccccgctggtggaatacgaggatgtgagctcccagtccgagcaggggctgctgctggggggggccagcgcggcaacggcggcgacggctgccgggggaacggggggcagcggcgggagtccggcctcctcctccggcacccagcggcgcggggaggggtcggagcgcaggccccgccgggaccgccgcagcagcagtggccgcagcaaggagcgccaccgcgagcaccggcggcgggatgggcagcgcggtggcagcgaggcctccaagtcccgcagccgccacagccacagcggcgaggaacgggccgaggtcgccaagagcggcagcagcagcagcagcggcggccgccggaaaagcgcttcggccacatccagcagcagtagcagccgcaaggaccgggactcgaaggcccaccgcagccggactaagtcgtccaaggagccgccttcggcctacaaggaaccgcccaaggcctaccgggaggacaagaccgagcctaaggcctacaggcggcggcggtccctcagcccactgggaggccgggacgacagcccggtgtcccacagggcctctcagagcctgaggagccgcaagtcccccagcccggcaggaggtggcagcagcccctattctcggcggctgccgcgctccccgagcccctacagtcgccgccgctcccccagctacagccgccacagctcctacgagcggggcggcgacgtgtcccctagtccctacagcagcagcagctggcgccgctctcgcagtccctacagccctgtgctcagacggtctggaaaatcccgaagcagaagcccgtattcatctaggcattcaagatctcgtagcaggcacagattgtctagatccagaagtcgtcattctagtatttctcctagcacactaactctgaagagtagcctggcagctgaattgaacaagaataaaaaagcacgagcagcagaggcagcaagagccgcagaagcagcgaaagctgcagaagcaactaaggctgctgaggctgctgccaaggctgcaaaagcttcaaacacttctacacctaccaaggggaacacggaaactagtgccagtgcatcacaaacaaaccatgtgaaggatgtgaagaaaattaaaattgaacatgcaccttctccctcaagtggtggaactttaaaaaatgacaaagcaaaaacaaagccacctcttcaggtaacgaaggtggaaaataatttgattgtagataaagccaccaagaaagcagtcatagttggaaaggagagtaaatctgctgctacaaaggaggaatcagtatctcttaaagagaaaaccaaaccacttacaccaagcataggagccaaggagaaggagcaacatgtagctttagtcacctctacattaccaccgttacctttgcctcccatgctgcctgaagataaagaagctgatagcttacgaggaaatatttcagtaaaagcagttaaaaaagaagtagaaaagaaactccgatgtcttcttgctgatttaccgctgccccctgagctaccaggaggagatgatctttcaaagagtccagaggaaaagaaaacagcaacacagttacatagtaaaaggaggcctaaaatatgtgggcctcgctatggtgaaaccaaagaaaaagatattgactggggaaaacgctgcgtggataaatttgatatcatcggaattattggagaaggtacttacggacaagtttacaaagccagggataaagacactggagaaatggtagccttaaaaaaagtacgtctggataatgaaaaggaaggctttccaattacagcaattcgagaaattaaaattctccggcagcttacccatcagagtattatcaatatgaaggaaatagtgactgataaagaagatgctttggatttcaagaaggacaaaggtgcattttatctggtgtttgaatatatggaccatgatctgatgggactactggaatcaggcttggttcattttaatgaaaatcacataaagtcatttatgagacagctcatggagggtctggattattgtcataagaagaactttttgcatagagatattaaatgttccaatatccttctaaataatagagggcagataaaacttgcagactttggacttgctcgattgtatagctcagaagaaagtcggccgtatactaacaaggtaattactttatggtaccgtccacctgaactgctactgggagaagaacgatacacaccagccattgatgtatggagctgtggctgtatccttggcgaactcttcactaaaaaacctatatttcaagcaaatcaggaacttgcacaactagaattaataagccgaatatgtgggagtccatgtcctgcagtgtggcctgatgtaatcaaactaccatatttcaacaccatgaaaccaaagaagcaatatcgtcgaaagttaagagaagaatttgtttttattcctgcagctgcgctagacttatttgattacatgcttgccttggatcctagtaagcgctgcactgctgaacaggctcttcagtgcgagttcctccgagatgtggaaccctcaaaaatgcctccaccagatctccctttatggcaagattgtcatgagttatggagtaaaaagcgaagaagacagaagcagatgggcatgactgatgatgtttccacaattaaagcccccaggaaggacttgtctctgggcttggatgacagcagaaccaacacaccccagggtgtgctgccatcttcacagctgaaatctcagggcagctcaaatgtggcacctggtgaaaaacagacagatccatcaacaccacaacaggagtcttcgaaaccgttgggaggaattcagccttcttctcagaccatccagcctaaagtggagactgatgctgcccaggcggctgtgcagagtgcatttgcagttctgttgactcagttaataaaggctcagcagtcaaagcagaaagatgtgctactagaagagagggaaaatggatcgggacatgaagcgtcattacaactcaggccacctccagaacctagcactccggtgtcgggacaagatgacctcatccagcatcaagatatgaggatcttggagctaacgccagaaccagaccggcctcgaattctgcctcctgaccaacgacctcccgagcctcctgaaccaccaccagtcactgaggaagatctagattatcggacagaaaaccagcatgtacccaccaccagttcttcattaactgaccctcatgccggagtgaaggcagccctgttacagctgcttgctcagcatcagccccaggatgaccccaaaagagaaggtgggattgattatcaagcaggagacacttacgtgtccacttcagactacaaggacaactttggatcctcttctttctcttctgctccttatgttagcaatgatggtctaggaagcagttctgctccaccactagaacgacgtagtttcattggaaattcagatattcagtctttggataactacagtactgcttcatctcattctggtggtccacctcagccttctgccttttctgagtcatttcccagttcagtagctggatatggagacatttacctcaatgctggtcccatgttgtttagtggagacaaggaccatagatttgaatatagccatggtcctattgcagtcctggcaaacagcagtgacccttccacggggccagagagtactcatcctttgccagcaaagatgcacaactataactatggtggtaacttacaggaaaatccgagtggccccagcctcatgcatggacagacctggacttctcctgcccaaggacctggatattcacaaggatacaggggacatattagcacatcaactggcagaggcagaggcagagggttaccatactgagtatctgtttttcctcaggcacatcatttttatctggaaagacttttctagctgcaatttaaggcagcaatccaagagacttgaataataataattcaacaacagctttatttttatgtggagaagggtcttgcatacaatagtttaaaaaagacaaaaaaaacctttgcttaaattcatgctgttctaaaaactagatcgattgtacatcttcacaaattctagttaacaattttattttgtattcttgcagttttaagtggatgctaattttaggggcataagccttttatggccctcttgcagatcttctgaactatgcacatttgtgctttttttgtaagtttggaccaacttttatgtaacaaacagcccctccccacctccagttttacaacaatcagaaagggcactgatttatttggtatttttctttttacaaagctacctttagtcaaaggtcactgtcagtctttgcacctgctttcagtgttattgtgaaaggtgtactttgtgctcatttcagaaaataaaacacaacctttctcttgatgcaacagttttataaaaaaaaaaatggtcaacgttatttttgttttgttttgcagattatcaaagcctagcaaaatgcatttaaatgaaatagtgggttttatatgaaaactatgggtggggtggggagggaaagtaagtgccttaacaggtaagcttaaggtctgaaaaaaatagttaacttttacccccatttgtcttttaaagggaatcaatgcattaaaaaggcaagaaactctgaagtttcaggggctgcctgttcagttcctgttaggtccattccctctgcttgtcacactttctccttttctgcctgtctttgggctgtgttgcctttcactaccaccttctcttgataggggagtgagagcaaagaaagggagtagaactgcaatcagtacatattgtttgagaagttctacaaagttttgtcatttaaatggttgaaagtaatagctccaggagaattttagagtaccattttctttcaggctgccatattatccctgtttccatttgccatggataattggagggtcatggtatagaagcaagagttaataacagaacttgcctaaatgtgttaaagttcatgggggaggggtggcaaataccgtattttaagttatgcaattgcccttttaagaaagtcaattctattcacttgttaactagaaacattgcttagattgaatttattgaagcaaaaagaaaaggcaatgagagagaacttttatcttccttcctgtcacattctgtaaagttgattatgacttctgccagacttagagcaacaactttagttcattttaacatttttttttaatgaagagcatcaagaatggggtagtccttatttaaactgtaagggggtccgcctcccctgtgtgcggcctctctcctttttctcccacttttctatctctcgaaagggcccgggggtacacgggcgcccctttctcccgcggacatgtcgggcgccaggcgtgccgcccacactggtggcccaggtcgggcgcccttttggaggccacgcgacgccgcccgcg

SEQ ID NO: 329883 - DNA, 4801 bp, Homo sapiens
agccccgcgggccgcagagtgcgcgaggccctaggccgggagttgttgtcaggcccaggccacttccgaggcgcctgcggtgtgtcgccgccaccacaggaggacgacgtcgacgccgaggaggaggcggtggaggcgtgttgttgtctcgcccactcccctcccctgaacttgcacccaacgtcagggcgcgatggagtgaagcggcgacgaaggtggtacttccgcgttgcgctgcccgagccgagagcgcggccaaggccgctcccccacccccgggggcacttggaggactcgggactcccccgcaggtcagcgcccggcgcatctggtgttttcgctgccgaggataggacgacgagcgcaatcgggagctccgccgcccggattcctgcttccctggggcccggaggctgctgcgtaccccactgtgacctggaacccagggacccgagtcccgacccggattatcgtggcgcttttcccggccggctctggtgctcggtgtccctccgccgccgctcccgtttccggcgggggagatggccaggatctgacccgggaggaggccgcacccgcgccgcgctctgcggctggctctaggcgatgccgagcagctcggacacggcgctggggggaggcgggggcctgagctgggcggagaagaggttggaggaacgccgcaagcggaggcgattcctgtcccctcagcagccgccgctgctgttgccgctcctgcagccgcagctcctgcaaccgccgccgcccccgccgcctctgctcttcctggctgctcccggcacggccgccgccgcagccgccgccgccgcggcctcctcctcttgcttcagcccgggcccccctctggaggtcaagcggctggcgagaggcaagaggcgcgcaggagggcggcagaagcggcgtcgcgggccccgcgccgggcaggaggcggagaagcgtcgggtcttctcgctgccccagccgcagcaggacggcggtggcggtgctagtagcggcgggggtgtgaccccgctggtggaatacgaggatgtgagctcccagtccgagcaggggctgctgctggggggggccagcgcggcaacggcggcgacggctgccgggggaacggggggcagcggcgggagtccggcctcctcctccggcacccagcggcgcggggaggggtcggagcgcaggccccgccgggaccgccgcagcagcagtggccgcagcaaggagcgccaccgcgagcaccggcggcgggatgggcagcgcggtggcagcgaggcctccaagtcccgcagccgccacagccacagcggcgaggaacgggccgaggtcgccaagagcggcagcagcagcagcagcggcggccgccggaaaagcgcttcggccacatccagcagcagtagcagccgcaaggaccgggactcgaaggcccaccgcagccggactaagtcgtccaaggagccgccttcggcctacaaggaaccgcccaaggcctaccgggaggacaagaccgagcctaaggcctacaggcggcggcggtccctcagcccactgggaggccgggacgacagcccggtgtcccacagggcctctcagagcctgaggagccgcaagtcccccagcccggcaggaggtggcagcagcccctattctcggcggctgccgcgctccccgagcccctacagtcgccgccgctcccccagctacagccgccacagctcctacgagcggggcggcgacgtgtcccctagtccctacagcagcagcagctggcgccgctctcgcagtccctacagccctgtgctcagacggtctggaaaatcccgaagcagaagcccgtattcatctaggcattcaagatctcgtagcaggcacagattgtctagatccagaagtcgtcattctagtatttctcctagcacactaactctgaagagtagcctggcagctgaattgaacaagaataaaaaagcacgagcagcagaggcagcaagagccgcagaagcagcgaaagctgcagaagcaactaaggctgctgaggctgctgccaaggctgcaaaagcttcaaacacttctacacctaccaaggggaacacggaaactagtgccagtgcatcacaaacaaaccatgtgaaggatgtgaagaaaattaaaattgaacatgcaccttctccctcaagtggtggaactttaaaaaatgacaaagcaaaaacaaagccacctcttcaggtaacgaaggtggaaaataatttgattgtagataaagccaccaagaaagcagtcatagttggaaaggagagtaaatctgctgctacaaaggaggaatcagtatctcttaaagagaaaaccaaaccacttacaccaagcataggagccaaggagaaggagcaacatgtagctttagtcacctctacattaccaccgttacctttgcctcccatgctgcctgaagataaagaagctgatagcttacgaggaaatatttcagtaaaagcagttaaaaaagaagtagaaaagaaactccgatgtcttcttgctgatttaccgctgccccctgagctaccaggaggagatgatctttcaaagagtccagaggaaaagaaaacagcaacacagttacatagtaaaaggaggcctaaaatatgtgggcctcgctatggtgaaaccaaagaaaaagatattgactggggaaaacgctgcgtggataaatttgatatcatcggaattattggagaaggtacttacggacaagtttacaaagccagggataaagacactggagaaatggtagccttaaaaaaagtacgtctggataatgaaaaggaaggctttccaattacagcaattcgagaaattaaaattctccggcagcttacccatcagagtattatcaatatgaaggaaatagtgactgataaagaagatgctttggatttcaagaaggacaaaggtgcattttatctggtgtttgaatatatggaccatgatctgatgggactactggaatcaggcttggttcattttaatgaaaatcacataaagtcatttatgagacagctcatggagggtctggattattgtcataagaagaactttttgcatagagatattaaatgttccaatatccttctaaataatagagggcagataaaacttgcagactttggacttgctcgattgtatagctcagaagaaagtcggccgtatactaacaaggtaattactttatggtaccgtccacctgaactgctactgggagaagaacgatacacaccagccattgatgtatggagctgtggctgtatccttggcgaactcttcactaaaaaacctatatttcaagcaaatcaggaacttgcacaactagaattaataagccgaatatgtgggagtccatgtcctgcagtgtggcctgatgtaatcaaactaccatatttcaacaccatgaaaccaaagaagcaatatcgtcgaaagttaagagaagaatttgtttttattcctgcagctgcgctagacttatttgattacatgcttgccttggatcctagtaagcgctgcactgctgaacaggctcttcagtgcgagttcctccgagatgtggaaccctcaaaaatgcctccaccagatctccctttatggcaagattgtcatgagttatggagtaaaaagcgaagaagacagaagcagatgggcatgactgatgatgtttccacaattaaagcccccaggaaggacttgtctctgggcttggatgacagcagaaccaacacaccccagggtgtgctgccatcttcacagctgaaatctcagggcagctcaaatgtggcacctggtgaaaaacagacagatccatcaacaccacaacaggagtcttcgaaaccgttgggaggaattcagccttcttctcagaccatccagcctaaagtggagactgatgctgcccaggcggctgtgcagagtgcatttgcagttctgttgactcagttaataaaggctcagcagtcaaagcagaaagatgtgctactagaagagagggaaaatggatcgggacatgaagcgtcattacaactcaggccacctccagaacctagcactccggtgtcgggacaagatgacctcatccagcatcaagatatgaggatcttggagctaacgccagaaccagaccggcctcgaattctgcctcctgaccaacgacctcccgagcctcctgaaccaccaccagtcactgaggaagatctagattatctggaaagacttttctagctgcaatttaaggcagcaatccaagagacttgaataataataattcaacaacagctttatttttatgtggagaagggtcttgcatacaatagtttaaaaaagacaaaaaaaacctttgcttaaattcatgctgttctaaaaactagatcgattgtacatcttcacaaattctagttaacaattttattttgtattcttgcagttttaagtggatgctaattttaggggcataagccttttatggccctcttgcagatcttctgaactatgcacatttgtgctttttttgtaagtttggaccaacttttatgtaacaaacagcccctccccacctccagttttacaacaatcagaaagggcactgatttatttggtatttttctttttacaaagctacctttagtcaaaggtcactgtcagtctttgcacctgctttcagtgttattgtgaaaggtgtactttgtgctcatttcagaaaataaaacacaacctttctcttgatgcaacagttttataaaaaaaaaaa

SEQ ID NO: 329884 - DNA, 5002 bp, Homo sapiens
agccccgcgggccgcagagtgcgcgaggccctaggccgggagttgttgtcaggcccaggccacttccgaggcgcctgcggtgtgtcgccgccaccacaggaggacgacgtcgacgccgaggaggaggcggtggaggcgtgttgttgtctcgcccactcccctcccctgaacttgcacccaacgtcagggcgcgatggagtgaagcggcgacgaaggtggtacttccgcgttgcgctgcccgagccgagagcgcggccaaggccgctcccccacccccgggggcacttggaggactcgggactcccccgcaggtcagcgcccggcgcatctggtgttttcgctgccgaggataggacgacgagcgcaatcgggagctccgccgcccggattcctgcttccctggggcccggaggctgctgcgtaccccactgtgacctggaacccagggacccgagtcccgacccggattatcgtggcgcttttcccggccggctctggtgctcggtgtccctccgccgccgctcccgtttccggcgggggagatggccaggatctgacccgggaggaggccgcacccgcgccgcgctctgcggctggctctaggcgatgccgagcagctcggacacggcgctggggggaggcgggggcctgagctgggcggagaagaggttggaggaacgccgcaagcggaggcgattcctgtcccctcagcagccgccgctgctgttgccgctcctgcagccgcagctcctgcaaccgccgccgcccccgccgcctctgctcttcctggctgctcccggcacggccgccgccgcagccgccgccgccgcggcctcctcctcttgcttcagcccgggcccccctctggaggtcaagcggctggcgagaggcaagaggcgcgcaggagggcggcagaagcggcgtcgcgggccccgcgccgggcaggaggcggagaagcgtcgggtcttctcgctgccccagccgcagcaggacggcggtggcggtgctagtagcggcgggggtgtgaccccgctggtggaatacgaggatgtgagctcccagtccgagcaggggctgctgctggggggggccagcgcggcaacggcggcgacggctgccgggggaacggggggcagcggcgggagtccggcctcctcctccggcacccagcggcgcggggaggggtcggagcgcaggccccgccgggaccgccgcagcagcagtggccgcagcaaggagcgccaccgcgagcaccggcggcgggatgggcagcgcggtggcagcgaggcctccaagtcccgcagccgccacagccacagcggcgaggaacgggccgaggtcgccaagagcggcagcagcagcagcagcggcggccgccggaaaagcgcttcggccacatccagcagcagtagcagccgcaaggaccgggactcgaaggcccaccgcagccggactaagtcgtccaaggagccgccttcggcctacaaggaaccgcccaaggcctaccgggaggacaagaccgagcctaaggcctacaggcggcggcggtccctcagcccactgggaggccgggacgacagcccggtgtcccacagggcctctcagagcctgaggagccgcaagtcccccagcccggcaggaggtggcagcagcccctattctcggcggctgccgcgctccccgagcccctacagtcgccgccgctcccccagctacagccgccacagctcctacgagcggggcggcgacgtgtcccctagtccctacagcagcagcagctggcgccgctctcgcagtccctacagccctgtgctcagacggtctggaaaatcccgaagcagaagcccgtattcatctaggcattcaagatctcgtagcaggcacagattgtctagatccagaagtcgtcattctagtatttctcctagcacactaactctgaagagtagcctggcagctgaattgaacaagaataaaaaagcacgagcagcagaggcagcaagagccgcagaagcagcgaaagctgcagaagcaactaaggctgctgaggctgctgccaaggctgcaaaagcttcaaacacttctacacctaccaaggggaacacggaaactagtgccagtgcatcacaaacaaaccatgtgaaggatgtgaagaaaattaaaattgaacatgcaccttctccctcaagtggtggaactttaaaaaatgacaaagcaaaaacaaagccacctcttcaggtaacgaaggtggaaaataatttgattgtagataaagccaccaagaaagcagtcatagttggaaaggagagtaaatctgctgctacaaaggaggaatcagtatctcttaaagagaaaaccaaaccacttacaccaagcataggagccaaggagaaggagcaacatgtagctttagtcacctctacattaccaccgttacctttgcctcccatgctgcctgaagataaagaagctgatagcttacgaggaaatatttcagtaaaagcagttaaaaaagaagtagaaaagaaactccgatgtcttcttgctgatttaccgctgccccctgagctaccaggaggagatgatctttcaaagagtccagaggaaaagaaaacagcaacacagttacatagtaaaaggaggcctaaaatatgtgggcctcgctatggtgaaaccaaagaaaaagatattgactggggaaaacgctgcgtggataaatttgatatcatcggaattattggagaaggtacttacggacaagtttacaaagccagggataaagacactggagaaatggtagccttaaaaaaagtacgtctggataatgaaaaggaaggctttccaattacagcaattcgagaaattaaaattctccggcagcttacccatcagagtattatcaatatgaaggaaatagtgactgataaagaagatgctttggatttcaagaaggacaaaggtgcattttatctggtgtttgaatatatggaccatgatctgatgggactactggaatcaggcttggttcattttaatgaaaatcacataaagtcatttatgagacagctcatggagggtctggattattgtcataagaagaactttttgcatagagatattaaatgttccaatatccttctaaataatagagggcagataaaacttgcagactttggacttgctcgattgtatagctcagaagaaagtcggccgtatactaacaaggtaattactttatggtaccgtccacctgaactgctactgggagaagaacgatacacaccagccattgatgtatggagctgtggctgtatccttggcgaactcttcactaaaaaacctatatttcaagcaaatcaggaacttgcacaactagaattaataagccgaatatgtgggagtccatgtcctgcagtgtggcctgatgtaatcaaactaccatatttcaacaccatgaaaccaaagaagcaatatcgtcgaaagttaagagaagaatttgtttttattcctgcagctgcgctagacttatttgattacatgcttgccttggatcctagtaagcgctgcactgctgaacaggctcttcagtgcgagttcctccgagatgtggaaccctcaaaaatgcctccaccagatctccctttatggcaagattgtcatgagttatggagtaaaaagcgaagaagacagaagcagatgggcatgactgatgatgtttccacaattaaagcccccaggaaggacttgtctctgggcttggatgacagcagaaccaacacaccccagggtgtgctgccatcttcacagctgaaatctcagggcagctcaaatgtggcacctggtgaaaaacagacagatccatcaacaccacaacaggagtcttcgaaaccgttgggaggaattcagccttcttctcagaccatccagcctaaagtggagactgatgctgcccaggcggctgtgcagagtgcatttgcagttctgttgactcagttaataaaggctcagcagtcaaagcagaaagatgtgctactagaagagagggaaaatggatcgggacatgaagcgtcattacaactcaggccacctccagaacctagcactccggtgtcgggacaagatgacctcatccagcatcaagatatgaggatcttggagctaacgccagaaccagaccggcctcgaattctgcctcctgaccaacgacctcccgagcctcctgaaccaccaccagtcactgaggaagatctagattatcggacagaaaaccagcatgtacccaccaccagttcttcattaactgaccctcatgccggagtgaaggcagccctgttacagctgcttgctcagcatcagccccaggatgaccccaaaagagaaggtgggattgattatcaagcaggagacacttacgtgtccacttcagactacaaggacaactttggatcctcttctttctcttctgctccttatgttagcaatgatggtctaggaagcagttctgctccaccactagaacgacgtagtttcattggaaattcagatattcagtctttggataactacagtactgcttcatctcattctggtggtccacctcagccttctgccttttctgagtcatttcccagttcagtagctggatatggagacatttacctcaatgctggtcccatgttgtttagtggagacaaggaccatagatttgaatatagccatggtcctattgcagtcctggcaaacagcagtgacccttccacggggccagagagtactcatcctttgccagcaaagatgcacaactataactatggtggtaacttacaggaaaatccgagtggccccagcctcatgcatggacagacctggacttctcctgcccaaggacctggatattcacaaggatacaggagaattgcttgaacgcaggaagcaaaggttgcagtgagctgagatcacgccactgcactccagcctgggcaacagacctcgactccatcta

SEQ ID NO: 329885 - DNA, 4949 bp, Homo sapiens
  misc_feature (2138)..(2138): n is a, c, g, or t
  misc_feature (2203)..(2203): n is a, c, g, or t
  misc_feature (2215)..(2215): n is a, c, g, or t
  misc_feature (2267)..(2267): n is a, c, g, or t
  misc_feature (2275)..(2275): n is a, c, g, or t
  misc_feature (2342)..(2342): n is a, c, g, or t
tgaatttgtttagtttctctacgattcaacatacttttaatttttaagattttttaaaaaatacaagacactaaaaatattttttaaagtaaaataaaaattaactatttgtagatagatttatataaatttaaacatttccttgagcctagttatccagttgcacttttataacaccattgtataggtttgatatactcatagatccttgatgtgtttgagaaactagttgtcataatttttacaaattttgttcttccacccagtaaatcatgtgtcatctaaagttagagggcaatatacattaaggtgcctgacctgtgcccagcattgtttgggctttgtgtgtggggttcataataaagaatgttacgaggttttttaactttctgggaaaatacaaaatagggagttaagacaggtaagtatgatgtaaatttaagaatgtgaagataaatatattattaatagagattagactttatgaatatgcatcttttactgtgttgtaaaggaagtatagcacttgaatgagaaaaatagggaaaggattttattaaaaggggataaggcagctgggcacagtggctcacgcctataatcccagcactttgggaggccgaggtgcgcagatcacctgaggtcaggaatttgagaccagcctggccggcatggcgaaaccctgtctctactaaaagtacaaaaattagccaggagtggtggcgggtgcctgtagtcccagctactcaggaggctgaggcaggacaatcgcttgaacccgggaggcggaggttgcagtgggctgagattgcgccactgtactccagcctgggcgacaagagtgagactccagcgcaaaaaaaaaaaagggcgggggggctaaagcataaagaggtgagcataattttaaagaattactaagttcagtttaactagagtagctaaaatttgaaagacttgctcattatgtgaagataagtgattccagtaaacaagcaaaaatcactgagaaaagtacattaataatgttagaaaaacctaatcttaatttactattaaaaatattcatcttattctgtcctcttttcacagtttttaccaaagtcaaatgtttttgctagctttggagcactgttaactatagtcctatctgtggtaatgctataatgcccaaattgatagttttataatgctagtgcttaagttatttggagaaatttggctggatgggggcagagcaggtcaggcagatcttacactgcctggaactgcaaatctataggtggcaagagggaattgctttctaaattgaatgctccatttccttaacaagactggtccaggaccaagccaagcttaggtaaatgggcttggaatacagcctttctggggaatttgctatggcttttgagtccttgtgatttggaaaacatctggatataaagagatgtttatagctgatctgaatatatatgtgatctccctgaagtaagtaactacagatcagccgaagaacctcctctgactacttaggattctcttcaagcgtgtcaatcagctagaacgtgaccattctctgagcgttgaacactttacattgccagataatttgtgctgttttcgtcaaacctgaccctaatataacttgactaaataatcttgtctgtggcaaataaagaggtagcagtatatttatgtcctcttttcggaaggtgataaaggaattatttgataaagtacgatatgtattgctactttgcagagtagacctcaagtagatacttgagtagacactctgcatttgtgtgcttttttctattcacacactacagtgggtatgtgaatcagtgaaaaattgccaaaaatatgatcaattgaaaacttttgttaggtggtctttatttgaactatatcttgtcatccattagtaatttagcaagatttgatcagaaccagtcaacgctctttaaatcagttaatcccattaaaggtttttatggaaaggaaaaacagtgctcaacaattgagttgatactaaagctttgctttgaccaaattgcagttaataccagtaaactactttttttttttgagacggagtcttgctctgtcacccagactggagtgcagtgacgctntcttggctcactgcaagctctgcctcccgggttcacatcattctcctgcctcagcttcctgagtngctggggctatnggcacccgtcaccacgcctggttaatttttttttagtacagatggggtttcnccgtgttngccaggatggtctcgatctcctgacctcgtgatctgccagcctcggcctcccagagtgctgggattncaggcgtgagccaccgtgcccagcctatcagtcaactactttttgtttttatcttcatatattaagggaatttttagttaaacaggttgccctcacatacattttatgatcttatattagatacctttggatgtctgtattttttagtaggcagatgaaagtgtttttagttaggattatagggattgctttagtaaaataatatttcctcagagaatctgtcttactccaacaaatactaactctaaagactgttttctgtgttttttagtcggccgtatactaacaaggtaattactttatggtaccgtccacctgaactgctactgggagaagaacgatacacaccagccattgatgtatggagctgtggctgtatccttggcgaactcttcactaaaaaacctatatttcaagcaaatcaggaacttgcacaactagaattaataagccgaatatgtgggagtccatgtcctgcagtgtggcctgatgtaatcaaactaccatatttcaacaccatgaaaccaaagaagcaatatcgtcgaaagttaagagaagaatttgtttttattcctgcagctgcgctagacttatttgattacatgcttgccttggatcctagtaagcgctgcactgctgaacaggctcttcagtgcgagttcctccgagatgtggaaccctcaaaaatgcctccaccagatctccctttatggcaagattgtcatgagttatggagtaaaaagcgaagaagacagaagcagatgggcatgactgatgatgtttccacaattaaagcccccaggaaggacttgtctctgggcttggatgacagcagaaccaacacaccccagggtgtgctgccatcttcacagctgaaatctcagggcagctcaaatgtggcacctggtgaaaaacagacagatccatcaacaccacaacaggagtcttcgaaaccgttgggaggaattcagccttcttctcagaccatccagcctaaagtggagactgatgctgcccaggcggctgtgcagagtgcatttgcagttctgttgactcagttaataaaggctcagcagtcaaagcagaaagatgtgctactagaagagagggaaaatggatcgggacatgaagcgtcattacaactcaggccacctccagaacctagcactccggtgtcgggacaagatgacctcatccagcatcaagatatgaggatcttggagctaacgccagaaccagaccggcctcgaattctgcctcctgaccaacgacctcccgagcctcctgaaccaccaccagtcactgaggaagatctagattatcggacagaaaaccagcatgtacccaccaccagttcttcattaactgaccctcatgccggagtgaaggcagccctgttacagctgcttgctcagcatcagccccaggatgaccccaaaagagaaggtgggattgattatcaagcaggagacacttacgtgtccacttcagactacaaggacaactttggatcctcttctttctcttctgctccttatgttagcaatgatggtctaggaagcagttctgctccaccactagaacgacgtagtttcattggaaattcagatattcagtctttggataactacagtactgcttcatctcattctggtggtccacctcagccttctgccttttctgagtcatttcccagttcagtagctggatatggagacatttacctcaatgctggtcccatgttgtttagtggagacaaggaccatagatttgaatatagccatggtcctattgcagtcctggcaaacagcagtgacccttccacggggccagagagtactcatcctttgccagcaaagatgcacaactataactatggtggtaacttacaggaaaatccgagtggccccagcctcatgcatggacagacctggacttctcctgcccaaggacctggatattcacaaggatacaggggacatattagcacatcaactggcagaggcagaggcagagggttaccatactgagtatctgtttttcctcaggcacatcatttttatctggaaagacttttctagctgcaatttaaggcagcaatccaagagacttgaataataataattcaacaacagctttatttttatgtggagaagggtcttgcatacaatagtttaaaaaagacaaaaaaaacctttgcttaaattcatgctgttctaaaaactagatcgattgtacatcttcacaaattctagttaacaattttattttgtattcttgcagttttaagtggatgctaattttaggggcataagccttttatggccctcttgcagatcttctgaactatgcacatttgtgctttttttgtaagtttggaccaacttttatgtaacaaacagcccctccccacctccagttttacaacaatcagaaagggcactgatttatttggtatttttctttttacaaagctacctttagtcaaaggtcactgtcagtctttgcacctgctttcagtgttattgtgaaaggtgtactttgtgctcatttcagaaaataaaacacaacctttctcttgatgcaacagttttataaaaaaaaaaa

SEQ ID NO: 329886 - DNA, 4799 bp, Homo sapiens
agccccgcgggccgcagagtgcgcgaggccctaggccgggagttgttgtcaggcccaggccacttccgaggcgcctgcggtgtgtcgccgccaccacaggaggacgacgtcgacgccgaggaggaggcggtggaggcgtgttgttgtctcgcccactcccctcccctgaacttgcacccaacgtcagggcgcgatggagtgaagcggcgacgaaggtggtacttccgcgttgcgctgcccgagccgagagcgcggccaaggccgctcccccacccccgggggcacttggaggactcgggactcccccgcaggtcagcgcccggcgcatctggtgttttcgctgccgaggataggacgacgagcgcaatcgggagctccgccgcccggattcctgcttccctggggcccggaggctgctgcgtaccccactgtgacctggaacccagggacccgagtcccgacccggattatcgtggcgcttttcccggccggctctggtgctcggtgtccctccgccgccgctcccgtttccggcgggggagatggccaggatctgacccgggaggaggccgcacccgcgccgcgctctgcggctggctctaggcgatgccgagcagctcggacacggcgctggggggaggcgggggcctgagctgggcggagaagaggttggaggaacgccgcaagcggaggcgattcctgtcccctcagcagccgccgctgctgttgccgctcctgcagccgcagctcctgcaaccgccgccgcccccgccgcctctgctcttcctggctgctcccggcacggccgccgccgcagccgccgccgccgcggcctcctcctcttgcttcagcccgggcccccctctggaggtcaagcggctggcgagaggcaagaggcgcgcaggagggcggcagaagcggcgtcgcgggccccgcgccgggcaggaggcggagaagcgtcgggtcttctcgctgccccagccgcagcaggacggcggtggcggtgctagtagcggcgggggtgtgaccccgctggtggaatacgaggatgtgagctcccagtccgagcaggggctgctgctggggggggccagcgcggcaacggcggcgacggctgccgggggaacggggggcagcggcgggagtccggcctcctcctccggcacccagcggcgcggggaggggtcggagcgcaggccccgccgggaccgccgcagcagcagtggccgcagcaaggagcgccaccgcgagcaccggcggcgggatgggcagcgcggtggcagcgaggcctccaagtcccgcagccgccacagccacagcggcgaggaacgggccgaggtcgccaagagcggcagcagcagcagcagcggcggccgccggaaaagcgcttcggccacatccagcagcagtagcagccgcaaggaccgggactcgaaggcccaccgcagccggactaagtcgtccaaggagccgccttcggcctacaaggaaccgcccaaggcctaccgggaggacaagaccgagcctaaggcctacaggcggcggcggtccctcagcccactgggaggccgggacgacagcccggtgtcccacagggcctctcagagcctgaggagccgcaagtcccccagcccggcaggaggtggcagcagcccctattctcggcggctgccgcgctccccgagcccctacagtcgccgccgctcccccagctacagccgccacagctcctacgagcggggcggcgacgtgtcccctagtccctacagcagcagcagctggcgccgctctcgcagtccctacagccctgtgctcagacggtctggaaaatcccgaagcagaagcccgtattcatctaggcattcaagatctcgtagcaggcacagattgtctagatccagaagtcgtcattctagtatttctcctagcacactaactctgaagagtagcctggcagctgaattgaacaagaataaaaaagcacgagcagcagaggcagcaagagccgcagaagcagcgaaagctgcagaagcaactaaggctgctgaggctgctgccaaggctgcaaaagcttcaaacacttctacacctaccaaggggaacacggaaactagtgccagtgcatcacaaacaaaccatgtgaaggatgtgaagaaaattaaaattgaacatgcaccttctccctcaagtggtggaactttaaaaaatgacaaagcaaaaacaaagccacctcttcaggtaacgaaggtggaaaataatttgattgtagataaagccaccaagaaagcagtcatagttggaaaggagagtaaatctgctgctacaaaggaggaatcagtatctcttaaagagaaaaccaaaccacttacaccaagcataggagccaaggagaaggagcaacatgtagctttagtcacctctacattaccaccgttacctttgcctcccatgctgcctgaagataaagaagctgatagcttacgaggaaatatttcagtaaaagcagttaaaaaagaagtagaaaagaaactccgatgtcttcttgctgatttaccgctgccccctgagctaccaggaggagatgatctttcaaagagtccagaggaaaagaaaacagcaacacagttacatagtaaaaggaggcctaaaatatgtgggcctcgctatggtgaaaccaaagaaaaagatattgactggggaaaacgctgcgtggataaatttgatatcatcggaattattggagaaggtacttacggacaagtttacaaagccagggataaagacactggagaaatggtagccttaaaaaaagtacgtctggataatgaaaaggaaggctttccaattacagcaattcgagaaattaaaattctccggcagcttacccatcagagtattatcaatatgaaggaaatagtgactgataaagaagatgctttggatttcaagaaggacaaaggtgcattttatctggtgtttgaatatatggaccatgatctgatgggactactggaatcaggcttggttcattttaatgaaaatcacataaagtcatttatgagacagctcatggagggtctggattattgtcataagaagaactttttgcatagagatattaaatgttccaatatccttctaaataatagagggcagataaaacttgcagactttggacttgctcgattgtatagctcagaagaaagtcggccgtatactaacaaggtaattactttatggtaccgtccacctgaactgctactgggagaagaacgatacacaccagccattgatgtatggagctgtggctgtatccttggcgaactcttcactaaaaaacctatatttcaagcaaatcaggaacttgcacaactagaattaataagccgaatatgtgggagtccatgtcctgcagtgtggcctgatgtaatcaaactaccatatttcaacaccatgaaaccaaagaagcaatatcgtcgaaagttaagagaagaatttgtttttattcctgcagctgcgctagacttatttgattacatgcttgccttggatcctagtaagcgctgcactgctgaacaggctcttcagtgcgagttcctccgagatgtggaaccctcaaaaatgcctccaccagatctccctttatggcaagattgtcatgagttatggagtaaaaagcgaagaagacagaagcagatgggcatgactgatgatgtttccacaattaaagcccccaggaaggacttgtctctgggcttggatgacagcagaaccaacacaccccagggtgtgctgccatcttcacagctgaaatctcagggcagctcaaatgtggcacctggtgaaaaacagacagatccatcaacaccacaacaggagtcttcgaaaccgttgggaggaattcagccttcttctcagaccatccagcctaaagtggagactgatgctgcccaggcggctgtgcagagtgcatttgcagttctgttgactcagttaataaaggctcagcagtcaaagcagaaagatgtgctactagaagagagggaaaatggatcgggacatgaagcgtcattacaactcaggccacctccagaacctagcactccggtgtcgggacaagatgacctcatccagcatcaagatatgaggatcttggagctaacgccagaaccagaccggcctcgaattctgcctcctgaccaacgacctcccgagcctcctgaaccaccaccagtcactgaggaagatctagattatcggacagaaaaccagcatgtacccaccaccagttcttcattaactgaccctcatgccggagtgaaggcagccctgttacagctgcttgctcagcatcagccccaggatgaccccaaaagagaaggtgggattgattatcaagcaggagacacttacgtgtccacttcagactacaaggacaactttggatcctcttctttctcttctgctccttatgttagcaatgatggtctaggaagcagttctgctccaccactagaacgacgtagtttcattggaaattcagatattcagtctttggataactacagtactgcttcatctcattctggtggtccacctcagccttctgccttttctgagtcatttcccagttcagtagctggatatggagacatttacctcaatgctggtcccatgttgtttagtggagacaaggaccatagatttgaatatagccatggtcctattgcagtcctggcgaggaaccttccaggggccaagaaacccccctggccaggtgccatatactatgggactcg

SEQ ID NO: 329887 - DNA, 1395 bp, Homo sapiens
agagcatcacggcggtcataatgggtgagagatctcacactaatagtactagcatttgagctagttcgagggcgaaatgtactccagttatcaaagtcatcattgctgtgagagccagggcttgcaggccatttggaaaactgtgatccagggctgtccccagcaccctcctgggtctagccagcctggggtgtgttggttctgctgtcatccaagcccagagacaagtcctccgtgggattgattatcaagcaggagacacttacgtgtccacttcagactacaaggacaactttggatcctcttctttctcttctgctccttatgttagcaatgatggtctaggaagcagttctgctccaccactagaacgacgtagtttcattggaaattcagatattcagtctttggataactacagtactgcttcatctcattctggtggtccacctcagccttctgccttttctgagtcatttcccagttcagtagctggatatggagacatttacctcaatgctggtcccatgttgtttagtggagacaaggaccatagatttgaatatagccatggtcctattgcagtcctggcaaacagcagtgacccttccacggggccagagagtactcatcctttgccagcaaagatgcacaactataactatggtggtaacttacaggaaaatccgagtggccccagcctcatgcatggacagacctggacttctcctgcccaaggacctggatattcacaaggatacaggggacatattagcacatcaactggcagaggcagaggcagagggttaccatactgagtatctgtttttcctcaggcacatcatttttatctggaaagacttttctagctgcaatttaaggcagcaatccaagagacttgaataataataattcaacaacagctttatttttatgtggagaagggtcttgcatacaatagtttaaaaaagacaaaaaaaacctttgcttaaattcatgctgttctaaaaactagatcgattgtacatcttcacaaattctagttaacaattttattttgtattcttgcagttttaagtggatgctaattttaggggcataagccttttatggccctcttgcagatcttctgaactatgcacatttgtgctttttttgtaagtttggaccaacttttatgtaacaaacagcccctccccacctccagttttacaacaatcagaaagggcactgatttatttggtatttttctttttacaaagctacctttagtcaaaggtcactgtcagtctttgcacctgctttcagtgttattgtgaaaggtgtactttgtgctcatttcagaaaataaaacacaacctttctcttgatgcaacagttttataaaaaaaaaaa

SEQ ID NO: 329888 - DNA, 4483 bp, Homo sapiens
agccccgcgggccgcagagtgcgcgaggccctaggccgggagttgttgtcaggcccaggccacttccgaggcgcctgcggtgtgtcgccgccaccacaggaggacgacgtcgacgccgaggaggaggcggtggaggcgtgttgttgtctcgcccactcccctcccctgaacttgcacccaacgtcagggcgcgatggagtgaagcggcgacgaaggtggtacttccgcgttgcgctgcccgagccgagagcgcggccaaggccgctcccccacccccgggggcacttggaggactcgggactcccccgcaggtcagcgcccggcgcatctggtgttttcgctgccgaggataggacgacgagcgcaatcgggagctccgccgcccggattcctgcttccctggggcccggaggctgctgcgtaccccactgtgacctggaacccagggacccgagtcccgacccggattatcgtggcgcttttcccggccggctctggtgctcggtgtccctccgccgccgctcccgtttccggcgggggagatggccaggatctgacccgggaggaggccgcacccgcgccgcgctctgcggctggctctaggcgatgccgagcagctcggacacggcgctggggggaggcgggggcctgagctgggcggagaagaggttggaggaacgccgcaagcggaggcgattcctgtcccctcagcagccgccgctgctgttgccgctcctgcagccgcagctcctgcaaccgccgccgcccccgccgcctctgctcttcctggctgctcccggcacggccgccgccgcagccgccgccgccgcggcctcctcctcttgcttcagcccgggcccccctctggaggtcaagcggctggcgagaggcaagaggcgcgcaggagggcggcagaagcggcgtcgcgggccccgcgccgggcaggaggcggagaagcgtcgggtcttctcgctgccccagccgcagcaggacggcggtggcggtgctagtagcggcgggggtgtgaccccgctggtggaatacgaggatgtgagctcccagtccgagcaggggctgctgctggggggggccagcgcggcaacggcggcgacggctgccgggggaacggggggcagcggcgggagtccggcctcctcctccggcacccagcggcgcggggaggggtcggagcgcaggccccgccgggaccgccgcagcagcagtggccgcagcaaggagcgccaccgcgagcaccggcggcgggatgggcagcgcggtggcagcgaggcctccaagtcccgcagccgccacagccacagcggcgaggaacgggccgaggtcgccaagagcggcagcagcagcagcagcggcggccgccggaaaagcgcttcggccacatccagcagcagtagcagccgcaaggaccgggactcgaaggcccaccgcagccggactaagtcgtccaaggagccgccttcggcctacaaggaaccgcccaaggcctaccgggaggacaagaccgagcctaaggcctacaggcggcggcggtccctcagcccactgggaggccgggacgacagcccggtgtcccacagggcctctcagagcctgaggagccgcaagtcccccagcccggcaggaggtggcagcagcccctattctcggcggctgccgcgctccccgagcccctacagtcgccgccgctcccccagctacagccgccacagctcctacgagcggggcggcgacgtgtcccctagtccctacagcagcagcagctggcgccgctctcgcagtccctacagccctgtgctcagacggtctggaaaatcccgaagcagaagcccgtattcatctaggcattcaagatctcgtagcaggcacagattgtctagatccagaagtcgtcattctagtatttctcctagcacactaactctgaagagtagcctggcagctgaattgaacaagaataaaaaagcacgagcagcagaggcagcaagagccgcagaagcagcgaaagctgcagaagcaactaaggctgctgaggctgctgccaaggctgcaaaagcttcaaacacttctacacctaccaaggggaacacggaaactagtgccagtgcatcacaaacaaaccatgtgaaggatgtgaagaaaattaaaattgaacatgcaccttctccctcaagtggtggaactttaaaaaatgacaaagcaaaaacaaagccacctcttcaggtaacgaaggtggaaaataatttgattgtagataaagccaccaagaaagcagtcatagttggaaaggagagtaaatctgctgctacaaaggaggaatcagtatctcttaaagagaaaaccaaaccacttacaccaagcataggagccaaggagaaggagcaacatgtagctttagtcacctctacattaccaccgttacctttgcctcccatgctgcctgaagataaagaagctgatagcttacgaggaaatatttcagtaaaagcagttaaaaaagaagtagaaaagaaactccgatgtcttcttgctgatttaccgctgccccctgagctaccaggaggagatgatctttcaaagagtccagaggaaaagaaaacagcaacacagttacatagtaaaaggaggcctaaaatatgtgggcctcgctatggtgaaaccaaagaaaaagatattgactggggaaaacgctgcgtggataaatttgatatcatcggaattattggagaaggtacttacggacaagtttacaaagccagggataaagacactggagaaatggtagccttaaaaaaagtacgtctggataatgaaaaggaaggctttccaattacagcaattcgagaaattaaaattctccggcagcttacccatcagagtattatcaatatgaaggaaatagtgactgataaagaagatgctttggatttcaagaaggacaaaggtgcattttatctggtgtttgaatatatggaccatgatctgatgggactactggaatcaggcttggttcattttaatgaaaatcacataaagtcatttatgagacagctcatggagggtctggattattgtcataagaagaactttttgcatagagatattaaatgttccaatatccttctaaataatagagggcagataaaacttgcagactttggacttgctcgattgtatagctcagaagaaagtcggccgtatactaacaaggtaattactttatggtaccgtccacctgaactgctactgggagaagaacgatacacaccagccattgatgtatggagctgtggctgtatccttggcgaactcttcactaaaaaacctatatttcaagcaaatcaggaacttgcacaactagaattaataagacatgaagaaaatgaagtttctgataaacaaatctgactataatgaggcaacggagtataccgaaaagtgtgtggcctttagaatcttacagggttgggttctaatgccagctcagctacttcctgcgcttatggtttagggtcccatatgctcttaagtttttttcttcaaaagtaaaagaggactgataacatgcttagggttgtgagaattaaatgtaaataagttttcagtacatatttcttccctcaccttatttacagtaatgctaggttgtttataggctcaggaatgatgagacctagtgtcagtatagtacagatacatgtaaaactgatcaagagtgataacactaatttgctttaaatggctttacaccatagtgaatgagttattttatttataatttgctttgttccagaaagtattttaggcagattacaaatattttataatagaagtagcatagattaaaaagtgatggagggaggccgggcacggtggctcatacctataatcccagcacttcgggaggccgaggcaggtagatcatctgaggtcagcagtttgagaccagcctggccaacatagtgaaaccccgtctctgctaaaatacaaaacaagccgggcacagtggctcatgcctgtaatcctagcactttgggaggccgaggcggacaggtcatgaggtcatgaggtcaggagatcaagaccatccgggctaacacggtgaaaccccgtctctaccaaaactacaaaaaaaaaaaaaaaaaaaaaaaaaaagccgggcatggcggcgggcacctgtagtcccagctactcaggaggctgaggcaggagaatggcatgaacccaggaggcagagcttgcagtcagccgagatggcgccactgcactccagcctgggcaagagagcgacactccatctcaaaaataaataaaaaaacaattagctgagtgtggtggcacacacctgtaatcccaggtacttgggagtctgaggcaggagaactgcttgaacctgggaggtggaggttgcagtaagcggagattgtgccactgcactccagcctgggcaacagcaagactccatccc

SEQ ID NO: 329889 - DNA, 3439 bp, Homo sapiens
agccccgcgggccgcagagtgcgcgaggccctaggccgggagttgttgtcaggcccaggccacttccgaggcgcctgcggtgtgtcgccgccaccacaggaggacgacgtcgacgccgaggaggaggcggtggaggcgtgttgttgtctcgcccactcccctcccctgaacttgcacccaacgtcagggcgcgatggagtgaagcggcgacgaaggtggtacttccgcgttgcgctgcccgagccgagagcgcggccaaggccgctcccccacccccgggggcacttggaggactcgggactcccccgcaggtcagcgcccggcgcatctggtgttttcgctgccgaggataggacgacgagcgcaatcgggagctccgccgcccggattcctgcttccctggggcccggaggctgctgcgtaccccactgtgacctggaacccagggacccgagtcccgacccggattatcgtggcgcttttcccggccggctctggtgctcggtgtccctccgccgccgctcccgtttccggcgggggagatggccaggatctgacccgggaggaggccgcacccgcgccgcgctctgcggctggctctaggcgatgccgagcagctcggacacggcgctggggggaggcgggggcctgagctgggcggagaagaggttggaggaacgccgcaagcggaggcgattcctgtcccctcagcagccgccgctgctgttgccgctcctgcagccgcagctcctgcaaccgccgccgcccccgccgcctctgctcttcctggctgctcccggcacggccgccgccgcagccgccgccgccgcggcctcctcctcttgcttcagcccgggcccccctctggaggtcaagcggctggcgagaggcaagaggcgcgcaggagggcggcagaagcggcgtcgcgggccccgcgccgggcaggaggcggagaagcgtcgggtcttctcgctgccccagccgcagcaggacggcggtggcggtgctagtagcggcgggggtgtgaccccgctggtggaatacgaggatgtgagctcccagtccgagcaggggctgctgctggggggggccagcgcggcaacggcggcgacggctgccgggggaacggggggcagcggcgggagtccggcctcctcctccggcacccagcggcgcggggaggggtcggagcgcaggccccgccgggaccgccgcagcagcagtggccgcagcaaggagcgccaccgcgagcaccggcggcgggatgggcagcgcggtggcagcgaggcctccaagtcccgcagccgccacagccacagcggcgaggaacgggccgaggtcgccaagagcggcagcagcagcagcagcggcggccgccggaaaagcgcttcggccacatccagcagcagtagcagccgcaaggaccgggactcgaaggcccaccgcagccggactaagtcgtccaaggagccgccttcggcctacaaggaaccgcccaaggcctaccgggaggacaagaccgagcctaaggcctacaggcggcggcggtccctcagcccactgggaggccgggacgacagcccggtgtcccacagggcctctcagagcctgaggagccgcaagtcccccagcccggcaggaggtggcagcagcccctattctcggcggctgccgcgctccccgagcccctacagtcgccgccgctcccccagctacagccgccacagctcctacgagcggggcggcgacgtgtcccctagtccctacagcagcagcagctggcgccgctctcgcagtccctacagccctgtgctcagacggtctggaaaatcccgaagcagaagcccgtattcatctaggcattcaagatctcgtagcaggcacagattgtctagatccagaagtcgtcattctagtatttctcctagcacactaactctgaagagtagcctggcagctgaattgaacaagaataaaaaagcacgagcagcagaggcagcaagagccgcagaagcagcgaaagctgcagaagcaactaaggctgctgaggctgctgccaaggctgcaaaagcttcaaacacttctacacctaccaaggggaacacggaaactagtgccagtgcatcacaaacaaaccatgtgaaggatgtgaagaaaattaaaattgaacatgcaccttctccctcaagtggtggaactttaaaaaatgacaaagcaaaaacaaagccacctcttcaggtaacgaaggtggaaaataatttgattgtagataaagccaccaagaaagcagtcatagttggaaaggagagtaaatctgctgctacaaaggaggaatcagtatctcttaaagagaaaaccaaaccacttacaccaagcataggagccaaggagaaggagcaacatgtagctttagtcacctctacattaccaccgttacctttgcctcccatgctgcctgaagataaagaagctgatagcttacgaggaaatatttcagtaaaagcagttaaaaaagaagtagaaaagaaactccgatgtcttcttgctgatttaccgctgccccctgagctaccaggaggagatgatctttcaaagagtccagaggaaaagaaaacagcaacacagttacatagtaaaaggaggcctaagtatgtgcttgctttctacctgctcttaaattgaccagcagtgattctgggtcatcagaagttcataaaacactaaattaaggtttaaaataaaaaatgtacttattctttcaacttaaatatatgaattctattagagttttgaaaaaaatcataattgcttgcattcctattcacaatgactaataaaaccaaatttaattttctctcgtaatttgtaatgtattaatttcctggggtattgtatatgttaaagatactttctgttattaagagattgaaataacacaaacactgaaattgggcagagtagaagtcagcatttagtgagaccaaataaaattagtaatgggcaagctgctgtttcctttgcttttagctccattttctcccataaacaaatatattcttcactttgcaagagatggagtagaagaagttttgaaatttgtatcctaaattagcttcaagtaagtgcctaaagagacctctttcccttaaaacctgttaatcagttaaaggcggggaacactggtgcctttttttttttttttttttaacttcttaaccaagggacagtgaagactttaagttagatctgattttagaattgcagttgaggtagtgcctagtgtgtgaatttgaggtcattttctaaactggccgggcacagtggctcatgcctgtaatcccagcactttgggaggcccaggtgggagaatcacttgagtccaggagtttgataccagcctgagcaacacagggagaccccatctctaccaaaaaaaaaa

SEQ ID NO: 329890 - DNA, 3592 bp, Homo sapiens
  misc_feature (2109)..(2109): n is a, c, g, or t
gaaaaactggcttgataacatggcaagctgaatgcttgtagctagtaggctgtcactttctagtaagactatgtatttatcccaccagttgaagagtatgctgaacaggaggtagttgttagttttcaatttttatgctttttattattataattacttagtttaagcgtagatacagtgctttacaaaaactttaagacattgctgtctaattagggatggacaagtaattgtgtaagttagaaaagttataaaaatccaagatgtggtattagattgctttgaaagtgtttttaatttctagatttatttaaagaaatcaaaactaaaaatccttgatgatgtgttatgggtgtggtttgtacaagagagctaatacagaattccattcagtgaatcctctgtttaaagagaaagccttggcctttgtcagaagatgggaaaacaaatgtacatttataaactttcagttaaaataaaatgtttaaattatatatctgtgtatcttttttttttaaacgattccttctaacctttttttttaaacgattccttctaacccatttttttttttgttaaacccaaccagccaactcttggtcctgattgtattggaaactagggcttctattaaagatagttaacatctatttagttcatatacaatatcagcattattcgaagagtttcacttgaattatctcagttaagcttcgtaacaaccctatgtcttctctttatagttaagaaaactgaaccttagagaggtgaagaattcgtccagggtcataaaactagcaagtggcaaaattgagatttaaacactgctaggtgttaccttaggatctaaacttttaaccattactccaaagtacaggctgggtgcggtggctcacgcctgtaatcgcagcactttgggaggccaagacgggtggatcacttgagcccaggagttcaagaccagactaggcaacatgacaaaaccccgtatatactaatttttttgtagatatggggttttgccatgatgcccaggctgatctcaaactcctaggctcaagtaatccttctgccttggcttcccaaagtgctgggattataagcatgagcccccatgccaggccaatattattccccaaaagaaggaaattgggtgtgaggtcctgctcctatggtcaccatgagatttttttgtttgttttggactcttgcccaggctggagttgcagtgagccgagattgctctgccgcgctccagcctgggcgattgagactgtctcaaaaaaaaaaaaaaagaaaaattgtataagatattaatccaagaattctaagggaggtactagcaaatagtatccagctttttatcacaaagttaacctgcagaaaaatgatgggagctaagatgatacagagggtcaagaaaggtatctccctttaagtgacatttgagcagagatctgaatgaagaaatggcaaagtaataaagactctgaggcatatttggttttttttttttaggaatatgttctcagtgaaccatatggggggaaagcttggtttatccattttatagcatgctgtactgttactaagaaggaaatagttggtcaggcacaatggctcacgcctctagtcccaacactttgggaggccaaggcgggcggatcacttgaggtcgagttcaggaccagccttgccaacatggtgaatccctgtctctactaaaaatacaaaaattacctgggcgcagtggtgtgtgcctgtaatcccagctacttggaaggctgaggcaggaacatcctgcctcaggtagcttgaacctgggaggcagaggttgcagtgagtcgagattgtgccactgcactccagcctgggtgacagagtgagactatgtctcagaaaaaaaaaaaaaaaaaaggaaacagttgatttggagataaagaaatggaaaagcagcatgaatagttacagaaggctatattgagattgatctcatttaggtaaaacaaaagactcaaattgttaatctgaacatggactttcaagaagactagggaggagaaattttcattttctagtttatatatttcagcatgtttttattttgtnaagatacttataattttataaagagattgaccgggcacagtggctcacacctgtaatctcagcactttggaaggccaaggcaggtggatcactagagcccaggagtttgagaccagcctgggcaacgtggccaaaccccgtctctacaaaaaatacaaaaattaggtgggtgtggtagcacacacctatagcctgagctattgggaggctgcggtacaaggatcacccgaacccaagggaggtcgaggctacagtgaactgtgattgcaccactgccctttagtctgggcagcagagcgagaccttgtctcaaaaaaacagaaataaaacaacaaaacataaaaagatgcttcaattttgatttcatagcattaatttcttttcagacatgaagaaaatgaagtttctgataaacaaatctgactataatgaggcaacggagtataccgaaaagtgtgtggcctttagaatcttacagggttgggttctaatgccagctcagctacttcctgcgcttatggtttagggtcccatatgctcttaagtttttttcttcaaaagtaaaagaggactgataacatgcttagggttgtgagaattaaatgtaaataagttttcagtacatatttcttccctcaccttatttacagtaatgctaggttgtttataggctcaggaatgatgagacctagtgtcagtatagtacagatacatgtaaaactgatcaagagtgataacactaatttgctttaaatggctttacaccatagtgaatgagttattttatttataatttgctttgttccagaaagtattttaggcagattacaaatattttataatagaagtagcatagattaaaaagtgatggagggaggccgggcacggtggctcatacctataatcccagcacttcgggaggccgaggcaggtagatcatctgaggtcagcagtttgagaccagcctggccaacatagtgaaaccccgtctctgctaaaatacaaaacaagccgggcacagtggctcatgcctgtaatcctagcactttgggaggccgaggcggacaggtcatgaggtcatgaggtcaggagatcaagaccatccgggctaacacggtgaaaccccgtctctaccaaaactacaaaaaaaaaaaaaaaaaaaaaaaaaaagccgggcatggcggcgggcacctgtagtcccagctactcaggaggctgaggcaggagaatggcatgaacccaggaggcagagcttgcagtcagccgagatggcgccactgcactccagcctgggcaagagagcgacactccatctcaaaaataaataaaaaaacaattagctgagtgtggtggcacacacctgtaatcccaggtacttgggagtctgaggcaggagaactgcttgaacctgggaggtggaggttgcagtaagcggagattgtgccactgcactccagcctgggcaacagcaagactccatccc

SEQ ID NO: 329891 - DNA, 1348 bp, Homo sapiens
gaaaaactggcttgataacatggcaagctgaatgcttgtagctagtaggctgtcactttctagtaagactatgtatttatcccaccagttgaagagtatgctgaacaggaggtagttgttagttttcaatttttatgctttttattattataattacttagtttaagcgtagatacagtgctttacaaaaactttaagacattgctgtctaattagggatggacaagtaattgtgtaagttagaaaagttataaaaatccaagatgtggtattagattgctttgaaagtgtttttaatttctagatttatttaaagaaatcaaaactaaaaatccttgatgatgtgttatgggtgtggtttgtacaagagagctaatacagaattccattcagtgaatcctctgtttaaagagaaagccttggcctttgtcagaagatgggaaaacaaatgtacatttataaactttcagttaaaataaaatgtttaaattatatatctgtgtatcttttttttttaaacgattccttctaacctttttttttaaacgattccttctaacccatttttttttttgttaaacccaaccagccaactcttggtcctgattgtattggaaactagggcttctattaaagatagttaacatctatttagttcatatacaatatcagcattattcgaagagtttcacttgaattatctcagttaagcttcgtaacaaccctatgtcttctctttatagttaagaaaactgaaccttagagaggtgaagaattcgtccagggtcataaaactagcaagtggcaaaattgagatttaaacactgctaggtgttaccttaggatctaaacttttaaccattactccaaagtacaggctgggtgcggtggctcacgcctgtaatcgcagcactttgggaggccaagacgggtggatcacttgagcccaggagttcaagaccagactaggcaacatgacaaaaccccgtatatactaaaaacaaaaattagccgggcatggtagcacacacctgcaatcccagctccttgggaggctgaggcatgagaattgcttgaacctgggaggcagaggttgcagtcagccaagatcgcaccactccactacagcctgggtgacagagtgagaattggtctcaaaaaataaataaataaactacataggaaataaaactacctggaatcttttcttttacaaaatcaatatgacacacatatcggtacttgacaaagacaacatgaaaaattttataagttacaggcatgagccactgcacctcacttaacaagtacattcttaagtgaaactggcttttctccccaccctgaa

SEQ ID NO: 329892 - DNA, 179 bp, Homo sapiens
tattcctgcagctgcgctagacttatttgattacatgcttgccttggatcctagtaagcgctgcactgctgaacaggctcttcagtgcgagttcctccgagatgtggaaccctcaaaaatgcctccaccagagtaagtgactttttatcctattattattatatattattattatattt

SEQ ID NO: 329893 - DNA, 5542 bp, Homo sapiens
agccccgcgggccgcagagtgcgcgaggccctaggccgggagttgttgtcaggcccaggccacttccgaggcgcctgcggtgtgtcgccgccaccacaggaggacgacgtcgacgccgaggaggaggcggtggaggcgtgttgttgtctcgcccactcccctcccctgaacttgcacccaacgtcagggcgcgatggagtgaagcggcgacgaaggtggtacttccgcgttgcgctgcccgagccgagagcgcggccaaggccgctcccccacccccgggggcacttggaggactcgggactcccccgcaggtcagcgcccggcgcatctggtgttttcgctgccgaggataggacgacgagcgcaatcgggagctccgccgcccggattcctgcttccctggggcccggaggctgctgcgtaccccactgtgacctggaacccagggacccgagtcccgacccggattatcgtggcgcttttcccggccggctctggtgctcggtgtccctccgccgccgctcccgtttccggcgggggagatggccaggatctgacccgggaggaggccgcacccgcgccgcgctctgcggctggctctaggcgatgccgagcagctcggacacggcgctggggggaggcgggggcctgagctgggcggagaagaggttggaggaacgccgcaagcggaggcgattcctgtcccctcagcagccgccgctgctgttgccgctcctgcagccgcagctcctgcaaccgccgccgcccccgccgcctctgctcttcctggctgctcccggcacggccgccgccgcagccgccgccgccgcggcctcctcctcttgcttcagcccgggcccccctctggaggtcaagcggctggcgagaggcaagaggcgcgcaggagggcggcagaagcggcgtcgcgggccccgcgccgggcaggaggcggagaagcgtcgggtcttctcgctgccccagccgcagcaggacggcggtggcggtgctagtagcggcgggggtgtgaccccgctggtggaatacgaggatgtgagctcccagtccgagcaggggctgctgctggggggggccagcgcggcaacggcggcgacggctgccgggggaacggggggcagcggcgggagtccggcctcctcctccggcacccagcggcgcggggaggggtcggagcgcaggccccgccgggaccgccgcagcagcagtggccgcagcaaggagcgccaccgcgagcaccggcggcgggatgggcagcgcggtggcagcgaggcctccaagtcccgcagccgccacagccacagcggcgaggaacgggccgaggtcgccaagagcggcagcagcagcagcagcggcggccgccggaaaagcgcttcggccacatccagcagcagtagcagccgcaaggaccgggactcgaaggcccaccgcagccggactaagtcgtccaaggagccgccttcggcctacaaggaaccgcccaaggcctaccgggaggacaagaccgagcctaaggcctacaggcggcggcggtccctcagcccactgggaggccgggacgacagcccggtgtcccacagggcctctcagagcctgaggagccgcaagtcccccagcccggcaggaggtggcagcagcccctattctcggcggctgccgcgctccccgagcccctacagtcgccgccgctcccccagctacagccgccacagctcctacgagcggggcggcgacgtgtcccctagtccctacagcagcagcagctggcgccgctctcgcagtccctacagccctgtgctcagacggtctggaaaatcccgaagcagaagcccgtattcatctaggcattcaagatctcgtagcaggcacagattgtctagatccagaagtcgtcattctagtatttctcctagcacactaactctgaagagtagcctggcagctgaattgaacaagaataaaaaagcacgagcagcagaggcagcaagagccgcagaagcagcgaaagctgcagaagcaactaaggctgctgaggctgctgccaaggctgcaaaagcttcaaacacttctacacctaccaaggggaacacggaaactagtgccagtgcatcacaaacaaaccatgtgaaggatgtgaagaaaattaaaattgaacatgcaccttctccctcaagtggtggaactttaaaaaatgacaaagcaaaaacaaagccacctcttcaggtaacgaaggtggaaaataatttgattgtagataaagccaccaagaaagcagtcatagttggaaaggagagtaaatctgctgctacaaaggaggaatcagtatctcttaaagagaaaaccaaaccacttacaccaagcataggagccaaggagaaggagcaacatgtagctttagtcacctctacattaccaccgttacctttgcctcccatgctgcctgaagataaagaagctgatagcttacgaggaaatatttcagtaaaagcagttaaaaaagaagtagaaaagaaactccgatgtcttcttgctgatttaccgctgccccctgagctaccaggaggagatgatctttcaaagagtccagaggaaaagaaaacagcaacacagttacatagtaaaaggaggcctaaaatatgtgggcctcgctatggtgaaaccaaagaaaaagatattgactggggaaaacgctgcgtggataaatttgatatcatcggaattattggagaaggtacttacggacaagtttacaaagccagggataaagacactggagaaatggtagccttaaaaaaagtacgtctggataatgaaaaggaaggctttccaattacagcaattcgagaaattaaaattctccggcagcttacccatcagagtattatcaatatgaaggaaatagtgactgataaagaagatgctttggatttcaagaaggacaaaggtgcattttatctggtgtttgaatatatggaccatgatctgatgggactactggaatcaggcttggttcattttaatgaaaatcacataaagtcatttatgagacagctcatggagggtctggattattgtcataagaagaactttttgcatagagatattaaatgttccaatatccttctaaataatagagggcagataaaacttgcagactttggacttgctcgattgtatagctcagaagaaagtcggccgtatactaacaaggtaattactttatggtaccgtccacctgaactgctactgggagaagaacgatacacaccagccattgatgtatggagctgtggctgtatccttggcgaactcttcactaaaaaacctatatttcaagcaaatcaggaacttgcacaactagaattaataagccgaatatgtgggagtccatgtcctgcagtgtggcctgatgtaatcaaactaccatatttcaacaccatgaaaccaaagaagcaatatcgtcgaaagttaagagaagaatttgtttttattcctgcagctgcgctagacttatttgattacatgcttgccttggatcctagtaagcgctgcactgctgaacaggctcttcagtgcgagttcctccgagatgtggaaccctcaaaaatgcctccaccagatctccctttatggcaagattgtcatgagttatggagtaaaaagcgaagaagacagaagcagatgggcatgactgatgatgtttccacaattaaagcccccaggaaggacttgtctctgggcttggatgacagcagaaccaacacaccccagggtgtgctgccatcttcacagctgaaatctcagggcagctcaaatgtggcacctggtgaaaaacagacagatccatcaacaccacaacaggagtcttcgaaaccgttgggaggaattcagccttcttctcagaccatccagcctaaagtggagactgatgctgcccaggcggctgtgcagagtgcatttgcagttctgttgactcagttaataaaggctcagcagtcaaagcagaaagatgtgctactagaagagagggaaaatggatcgggacatgaagcgtcattacaactcaggccacctccagaacctagcactccggtgtcgggacaagatgacctcatccagcatcaagatatgaggatcttggagctaacgccagaaccagaccggcctcgaattctgcctcctgaccaacgacctcccgagcctcctgaaccaccaccagtcactgaggaagatctagattatcggacagaaaaccagcatgtacccaccaccagttcttcattaactgaccctcatgccggagtgaaggcagccctgttacagctgcttgctcagcatcagccccaggatgaccccaaaagagaaggtgggattgattatcaagcaggagacacttacgtgtccacttcagactacaaggacaactttggatcctcttctttctcttctgctccttatgttagcaatgatggtctaggaagcagttctgctccaccactagaacgacgtagtttcattggaaattcagatattcagtctttggataactacagtactgcttcatctcattctggtggtccacctcagccttctgccttttctgagtcatttcccagttcagtagctggatatggagacatttacctcaatgctggtcccatgttgtttagtggagacaaggaccatagatttgaatatagccatggtcctattgcagtcctggcaaacagcagtgacccttccacggggccagagagtactcatcctttgccagcaaagatgcacaactataactatggtggtaacttacaggaaaatccgagtggccccagcctcatgcatggacagacctggacttctcctgcccaaggacctggatattcacaaggatacaggggacatattagcacatcaactggcagaggcagaggcagagggttaccatactgagtatctgtttttcctcaggcacatcatttttatctggaaagacttttctagctgcaatttaaggcagcaatccaagagacttgaataataataattcaacaacagctttatttttatgtggagaagggtcttgcatacaatagtttaaaaaagacaaaaaaaacctttgcttaaattcatgctgttctaaaaactagatcgattgtacatcttcacaaattctagttaacaattttattttgtattcttgcagttttaagtggatgctaattttaggggcataagccttttatggccctcttgcagatcttctgaactatgcacatttgtgctttttttgtaagtttggaccaacttttatgtaacaaacagcccctccccacctccagttttacaacaatcagaaagggcactgatttatttggtatttttctttttacaaagctacctttagtcaaaggtcactgtcagtctttgcacctgctttcagtgttattgtgaaaggtgtactttgtgctcatttcagaaaataaaacacaacctttctcttgatgcaacagttttataaaaaaaaaaa

SEQ ID NO: 329894 - DNA, 5722 bp, Homo sapiens
agccccgcgggccgcagagtgcgcgaggccctaggccgggagttgttgtcaggcccaggccacttccgaggcgcctgcggtgtgtcgccgccaccacaggaggacgacgtcgacgccgaggaggaggcggtggaggcgtgttgttgtctcgcccactcccctcccctgaacttgcacccaacgtcagggcgcgatggagtgaagcggcgacgaaggtggtacttccgcgttgcgctgcccgagccgagagcgcggccaaggccgctcccccacccccgggggcacttggaggactcgggactcccccgcaggtcagcgcccggcgcatctggtgttttcgctgccgaggataggacgacgagcgcaatcgggagctccgccgcccggattcctgcttccctggggcccggaggctgctgcgtaccccactgtgacctggaacccagggacccgagtcccgacccggattatcgtggcgcttttcccggccggctctggtgctcggtgtccctccgccgccgctcccgtttccggcgggggagatggccaggatctgacccgggaggaggccgcacccgcgccgcgctctgcggctggctctaggcgatgccgagcagctcggacacggcgctggggggaggcgggggcctgagctgggcggagaagaggttggaggaacgccgcaagcggaggcgattcctgtcccctcagcagccgccgctgctgttgccgctcctgcagccgcagctcctgcaaccgccgccgcccccgccgcctctgctcttcctggctgctcccggcacggccgccgccgcagccgccgccgccgcggcctcctcctcttgcttcagcccgggcccccctctggaggtcaagcggctggcgagaggcaagaggcgcgcaggagggcggcagaagcggcgtcgcgggccccgcgccgggcaggaggcggagaagcgtcgggtcttctcgctgccccagccgcagcaggacggcggtggcggtgctagtagcggcgggggtgtgaccccgctggtggaatacgaggatgtgagctcccagtccgagcaggggctgctgctggggggggccagcgcggcaacggcggcgacggctgccgggggaacggggggcagcggcgggagtccggcctcctcctccggcacccagcggcgcggggaggggtcggagcgcaggccccgccgggaccgccgcagcagcagtggccgcagcaaggagcgccaccgcgagcaccggcggcgggatgggcagcgcggtggcagcgaggcctccaagtcccgcagccgccacagccacagcggcgaggaacgggccgaggtcgccaagagcggcagcagcagcagcagcggcggccgccggaaaagcgcttcggccacatccagcagcagtagcagccgcaaggaccgggactcgaaggcccaccgcagccggactaagtcgtccaaggagccgccttcggcctacaaggaaccgcccaaggcctaccgggaggacaagaccgagcctaaggcctacaggcggcggcggtccctcagcccactgggaggccgggacgacagcccggtgtcccacagggcctctcagagcctgaggagccgcaagtcccccagcccggcaggaggtggcagcagcccctattctcggcggctgccgcgctccccgagcccctacagtcgccgccgctcccccagctacagccgccacagctcctacgagcggggcggcgacgtgtcccctagtccctacagcagcagcagctggcgccgctctcgcagtccctacagccctgtgctcagacggtctggaaaatcccgaagcagaagcccgtattcatctaggcattcaagatctcgtagcaggcacagattgtctagatccagaagtcgtcattctagtatttctcctagcacactaactctgaagagtagcctggcagctgaattgaacaagaataaaaaagcacgagcagcagaggcagcaagagccgcagaagcagcgaaagctgcagaagcaactaaggctgctgaggctgctgccaaggctgcaaaagcttcaaacacttctacacctaccaaggggaacacggaaactagtgccagtgcatcacaaacaaaccatgtgaaggatgtgaagaaaattaaaattgaacatgcaccttctccctcaagtggtggaactttaaaaaatgacaaagcaaaaacaaagccacctcttcaggtaacgaaggtggaaaataatttgattgtagataaagccaccaagaaagcagtcatagttggaaaggagagtaaatctgctgctacaaaggaggaatcagtatctcttaaagagaaaaccaaaccacttacaccaagcataggagccaaggagaaggagcaacatgtagctttagtcacctctacattaccaccgttacctttgcctcccatgctgcctgaagataaagaagctgatagcttacgaggaaatatttcagtaaaagcagttaaaaaagaagtagaaaagaaactccgatgtcttcttgctgatttaccgctgccccctgagctaccaggaggagatgatctttcaaagagtccagaggaaaagaaaacagcaacacagttacatagtaaaaggaggcctaaaatatgtgggcctcgctatggtgaaaccaaagaaaaagatattgactggggaaaacgctgcgtggataaatttgatatcatcggaattattggagaaggtacttacggacaagtttacaaagccagggataaagacactggagaaatggtagccttaaaaaaagtacgtctggataatgaaaaggaaggctttccaattacagcaattcgagaaattaaaattctccggcagcttacccatcagagtattatcaatatgaaggaaatagtgactgataaagaagatgctttggatttcaagaaggacaaaggtgcattttatctggtgtttgaatatatggaccatgatctgatgggactactggaatcaggcttggttcattttaatgaaaatcacataaagtcatttatgagacagctcatggagggtctggattattgtcataagaagaactttttgcatagagatattaaatgttccaatatccttctaaataatagagggcagataaaacttgcagactttggacttgctcgattgtatagctcagaagaaagtcggccgtatactaacaaggtaattactttatggtaccgtccacctgaactgctactgggagaagaacgatacacaccagccattgatgtatggagctgtggctgtatccttggcgaactcttcactaaaaaacctatatttcaagcaaatcaggaacttgcacaactagaattaataagccgaatatgtgggagtccatgtcctgcagtgtggcctgatgtaatcaaactaccatatttcaacaccatgaaaccaaagaagcaatatcgtcgaaagttaagagaagaatttgtttttattcctgcagctgcgctagacttatttgattacatgcttgccttggatcctagtaagcgctgcactgctgaacaggctcttcagtgcgagttcctccgagatgtggaaccctcaaaaatgcctccaccagatctccctttatggcaagattgtcatgagttatggagtaaaaagcgaagaagacagaagcagatgggcatgactgatgatgtttccacaattaaagcccccaggaaggacttgtctctgggcttggatgacagcagaaccaacacaccccagggtgtgctgccatcttcacagctgaaatctcagggcagctcaaatgtggcacctgtaaaaacaggccctggacagcacttaaaccacagtgaattggcaattctactaaacctactacaatctaaaacaagtgttaatatggctgattttgtccaagtgttgaacattaaggtaaactctgagactcaacagcagctaaataaaataaaccttcctgctggaattttggcaacaggtgaaaaacagacagatccatcaacaccacaacaggagtcttcgaaaccgttgggaggaattcagccttcttctcagaccatccagcctaaagtggagactgatgctgcccaggcggctgtgcagagtgcatttgcagttctgttgactcagttaataaaggctcagcagtcaaagcagaaagatgtgctactagaagagagggaaaatggatcgggacatgaagcgtcattacaactcaggccacctccagaacctagcactccggtgtcgggacaagatgacctcatccagcatcaagatatgaggatcttggagctaacgccagaaccagaccggcctcgaattctgcctcctgaccaacgacctcccgagcctcctgaaccaccaccagtcactgaggaagatctagattatcggacagaaaaccagcatgtacccaccaccagttcttcattaactgaccctcatgccggagtgaaggcagccctgttacagctgcttgctcagcatcagccccaggatgaccccaaaagagaaggtgggattgattatcaagcaggagacacttacgtgtccacttcagactacaaggacaactttggatcctcttctttctcttctgctccttatgttagcaatgatggtctaggaagcagttctgctccaccactagaacgacgtagtttcattggaaattcagatattcagtctttggataactacagtactgcttcatctcattctggtggtccacctcagccttctgccttttctgagtcatttcccagttcagtagctggatatggagacatttacctcaatgctggtcccatgttgtttagtggagacaaggaccatagatttgaatatagccatggtcctattgcagtcctggcaaacagcagtgacccttccacggggccagagagtactcatcctttgccagcaaagatgcacaactataactatggtggtaacttacaggaaaatccgagtggccccagcctcatgcatggacagacctggacttctcctgcccaaggacctggatattcacaaggatacaggggacatattagcacatcaactggcagaggcagaggcagagggttaccatactgagtatctgtttttcctcaggcacatcatttttatctggaaagacttttctagctgcaatttaaggcagcaatccaagagacttgaataataataattcaacaacagctttatttttatgtggagaagggtcttgcatacaatagtttaaaaaagacaaaaaaaacctttgcttaaattcatgctgttctaaaaactagatcgattgtacatcttcacaaattctagttaacaattttattttgtattcttgcagttttaagtggatgctaattttaggggcataagccttttatggccctcttgcagatcttctgaactatgcacatttgtgctttttttgtaagtttggaccaacttttatgtaacaaacagcccctccccacctccagttttacaacaatcagaaagggcactgatttatttggtatttttctttttacaaagctacctttagtcaaaggtcactgtcagtctttgcacctgctttcagtgttattgtgaaaggtgtactttgtgctcatttcagaaaataaaacacaacctttctcttgatgcaacagttttataaaaaaaaaaa

SEQ ID NO: 329895 - DNA, 5488 bp, Homo sapiens
agccccgcgggccgcagagtgcgcgaggccctaggccgggagttgttgtcaggcccaggccacttccgaggcgcctgcggtgtgtcgccgccaccacaggaggacgacgtcgacgccgaggaggaggcggtggaggcgtgttgttgtctcgcccactcccctcccctgaacttgcacccaacgtcagggcgcgatggagtgaagcggcgacgaaggtggtacttccgcgttgcgctgcccgagccgagagcgcggccaaggccgctcccccacccccgggggcacttggaggactcgggactcccccgcaggtcagcgcccggcgcatctggtgttttcgctgccgaggataggacgacgagcgcaatcgggagctccgccgcccggattcctgcttccctggggcccggaggctgctgcgtaccccactgtgacctggaacccagggacccgagtcccgacccggattatcgtggcgcttttcccggccggctctggtgctcggtgtccctccgccgccgctcccgtttccggcgggggagatggccaggatctgacccgggaggaggccgcacccgcgccgcgctctgcggctggctctaggcgatgccgagcagctcggacacggcgctggggggaggcgggggcctgagctgggcggagaagaggttggaggaacgccgcaagcggaggcgattcctgtcccctcagcagccgccgctgctgttgccgctcctgcagccgcagctcctgcaaccgccgccgcccccgccgcctctgctcttcctggctgctcccggcacggccgccgccgcagccgccgccgccgcggcctcctcctcttgcttcagcccgggcccccctctggaggtcaagcggctggcgagaggcaagaggcgcgcaggagggcggcagaagcggcgtcgcgggccccgcgccgggcaggaggcggagaagcgtcgggtcttctcgctgccccagccgcagcaggacggcggtggcggtgctagtagcggcgggggtgtgaccccgctggtggaatacgaggatgtgagctcccagtccgagcaggggctgctgctggggggggccagcgcggcaacggcggcgacggctgccgggggaacggggggcagcggcgggagtccggcctcctcctccggcacccagcggcgcggggaggggtcggagcgcaggccccgccgggaccgccgcagcagcagtggccgcagcaaggagcgccaccgcgagcaccggcggcgggatgggcagcgcggtggcagcgaggcctccaagtcccgcagccgccacagccacagcggcgaggaacgggccgaggtcgccaagagcggcagcagcagcagcagcggcggccgccggaaaagcgcttcggccacatccagcagcagtagcagccgcaaggaccgggactcgaaggcccaccgcagccggactaagtcgtccaaggagccgccttcggcctacaaggaaccgcccaaggcctaccgggaggacaagaccgagcctaaggcctacaggcggcggcggtccctcagcccactgggaggccgggacgacagcccggtgtcccacagggcctctcagagcctgaggagccgcaagtcccccagcccggcaggaggtggcagcagcccctattctcggcggctgccgcgctccccgagcccctacagtcgccgccgctcccccagctacagccgccacagctcctacgagcggggcggcgacgtgtcccctagtccctacagcagcagcagctggcgccgctctcgcagtccctacagccctgtgctcagacggtctggaaaatcccgaagcagaagcccgtattcatctaggcattcaagatctcgtagcaggcacagattgtctagatccagaagtcgtcattctagtatttctcctagcacactaactctgaagagtagcctggcagctgaattgaacaagaataaaaaagcacgagcagcagaggcagcaagagccgcagaagcagcgaaagctgcagaagcaactaaggctgctgaggctgctgccaaggctgcaaaagcttcaaacacttctacacctaccaaggggaacacggaaactagtgccagtgcatcacaaacaaaccatgtgaaggatgtgaagaaaattaaaattgaacatgcaccttctccctcaagtggtggaactttaaaaaatgacaaagcaaaaacaaagccacctcttcaggtaacgaaggtggaaaataatttgattgtagataaagccaccaagaaagcagtcatagttggaaaggagagtaaatctgctgctacaaaggaggaatcagtatctcttaaagagaaaaccaaaccacttacaccaagcataggagccaaggagaaggagcaacatgtagctttagtcacctctacattaccaccgttacctttgcctcccatgctgcctgaagataaagaagctgatagcttacgaggaaatatttcagtaaaagcagttaaaaaagaagtagaaaagaaactccgatgtcttcttgctgatttaccgctgccccctgagctaccaggaggagatgatctttcaaagagtccagaggaaaagaaaacagcaacacagttacatagtaaaaggaggcctaaaatatgtgggcctcgctatggtgaaaccaaagaaaaagatattgactggggaaaacgctgcgtggataaatttgatatcatcggaattattggagaaggtacttacggacaagtttacaaagccagggataaagacactggagaaatggtagccttaaaaaaagtacgtctggataatgaaaaggaaggctttccaattacagcaattcgagaaattaaaattctccggcagcttacccatcagagtattatcaatatgaaggaaatagtgactgataaagaagatgctttggatttcaagaaggacaaaggtgcattttatctggtgtttgaatatatggaccatgatctgatgggactactggaatcaggcttggttcattttaatgaaaatcacataaagtcatttatgagacagctcatggagggtctggattattgtcataagaagaactttttgcatagagatattaaatgttccaatatccttctaaataatagagggcagataaaacttgcagactttggacttgctcgattgtatagctcagaagaaagtcggccgtatactaacaaggtaattactttatggtaccgtccacctgaactgctactgggagaagaacgatacacaccagccattgatgtatggagctgtggctgtatccttggcgaactcttcactaaaaaacctatatttcaagcaaatcaggaacttgcacaactagaattaataagccgaatatgtgggagtccatgtcctgcagtgtggcctgatgtaatcaaactaccatatttcaacaccatgaaaccaaagaagcaatatcgtcgaaagttaagagaagaatttgtttttattcctgcagctgcgctagacttatttgattacatgcttgccttggatcctagtaagcgctgcactgctgaacaggctcttcagtgcgagttcctccgagatgtggaaccctcaaaaatgcctccaccagatctccctttatggcaagattgtcatgagttatggagtaaaaagcgaagaagacagaagcagatgggcatgactgatgatgtttccacaattaaagcccccaggaaggacttgtctctgggcttggatgacagcagaaccaacacaccccagggtgtgctgccatcttcacagctgaaatctcagggcagctcaaatgtggcacctggtgaaaaacagacagatccatcaacaccacaacaggagtcttcgaaaccgttgggaggaattcagccttcttctcagaccatccagcctaaagtggagactgatgctgcccaggcggctgtgcagagtgcatttgcagttctgttgactcagttaataaaggctcagcagtcaaagcagaaagatgtgctactagaagagagggaaaatggatcgggacatgaagcgtcattacaactcaggccacctccagaacctagcactccggtgtcgggacaagatgacctcatccagcatcaagatatgaggatcttggagctaacgccagaaccagaccggcctcgaattctgcctcctgaccaacgacctcccgagcctcctgaaccaccaccagtcactgaggaagatctagattatcggacagaaaaccagcatgtacccaccaccagttcttcattaactgaccctcatgccggagtgaaggcagccctgttacagctgcttgctcagcatcagccccaggatgaccccaaaagagaaggtgggattgattatcaagcaggagacacttacgtgtccacttcagactacaaggacaactttggatcctcttctttctcttctgctccttatgttagcaatgatggtctaggaagcagttctgctccaccactagaacgacgtagtttcattggaaattcagatattcagtctttggataactacagtactgcttcatctcattctggtggtccacctcagccttctgccttttctgagtcatttcccagttcagtagctggatatggagacatttacctcaatgctggtcccatgttgtttagtggagacaaggaccatagatttgaatatagccatggtcctattgcagtcctggcaaacagcagtgacccttccacggggccagagagtactcatcctttgccagcaaagatgcacaactataactatggtggtaacttacaggaaagacctggatattcacaaggatacaggggacatattagcacatcaactggcagaggcagaggcagagggttaccatactgagtatctgtttttcctcaggcacatcatttttatctggaaagacttttctagctgcaatttaaggcagcaatccaagagacttgaataataataattcaacaacagctttatttttatgtggagaagggtcttgcatacaatagtttaaaaaagacaaaaaaaacctttgcttaaattcatgctgttctaaaaactagatcgattgtacatcttcacaaattctagttaacaattttattttgtattcttgcagttttaagtggatgctaattttaggggcataagccttttatggccctcttgcagatcttctgaactatgcacatttgtgctttttttgtaagtttggaccaacttttatgtaacaaacagcccctccccacctccagttttacaacaatcagaaagggcactgatttatttggtatttttctttttacaaagctacctttagtcaaaggtcactgtcagtctttgcacctgctttcagtgttattgtgaaaggtgtactttgtgctcatttcagaaaataaaacacaacctttctcttgatgcaacagttttataaaaaaaaaaa

SEQ ID NO: 329896 - DNA, 5868 bp, Homo sapiens
agccccgcgggccgcagagtgcgcgaggccctaggccgggagttgttgtcaggcccaggccacttccgaggcgcctgcggtgtgtcgccgccaccacaggaggacgacgtcgacgccgaggaggaggcggtggaggcgtgttgttgtctcgcccactcccctcccctgaacttgcacccaacgtcagggcgcgatggagtgaagcggcgacgaaggtggtacttccgcgttgcgctgcccgagccgagagcgcggccaaggccgctcccccacccccgggggcacttggaggactcgggactcccccgcaggtcagcgcccggcgcatctggtgttttcgctgccgaggataggacgacgagcgcaatcgggagctccgccgcccggattcctgcttccctggggcccggaggctgctgcgtaccccactgtgacctggaacccagggacccgagtcccgacccggattatcgtggcgcttttcccggccggctctggtgctcggtgtccctccgccgccgctcccgtttccggcgggggagatggccaggatctgacccgggaggaggccgcacccgcgccgcgctctgcggctggctctaggcgatgccgagcagctcggacacggcgctggggggaggcgggggcctgagctgggcggagaagaggttggaggaacgccgcaagcggaggcgattcctgtcccctcagcagccgccgctgctgttgccgctcctgcagccgcagctcctgcaaccgccgccgcccccgccgcctctgctcttcctggctgctcccggcacggccgccgccgcagccgccgccgccgcggcctcctcctcttgcttcagcccgggcccccctctggaggtcaagcggctggcgagaggcaagaggcgcgcaggagggcggcagaagcggcgtcgcgggccccgcgccgggcaggaggcggagaagcgtcgggtcttctcgctgccccagccgcagcaggacggcggtggcggtgctagtagcggcgggggtgtgaccccgctggtggaatacgaggatgtgagctcccagtccgagcaggggctgctgctggggggggccagcgcggcaacggcggcgacggctgccgggggaacggggggcagcggcgggagtccggcctcctcctccggcacccagcggcgcggggaggggtcggagcgcaggccccgccgggaccgccgcagcagcagtggccgcagcaaggagcgccaccgcgagcaccggcggcgggatgggcagcgcggtggcagcgaggcctccaagtcccgcagccgccacagccacagcggcgaggaacgggccgaggtcgccaagagcggcagcagcagcagcagcggcggccgccggaaaagcgcttcggccacatccagcagcagtagcagccgcaaggaccgggactcgaaggcccaccgcagccggactaagtcgtccaaggagccgccttcggcctacaaggaaccgcccaaggcctaccgggaggacaagaccgagcctaaggcctacaggcggcggcggtccctcagcccactgggaggccgggacgacagcccggtgtcccacagggcctctcagagcctgaggagccgcaagtcccccagcccggcaggaggtggcagcagcccctattctcggcggctgccgcgctccccgagcccctacagtcgccgccgctcccccagctacagccgccacagctcctacgagcggggcggcgacgtgtcccctagtccctacagcagcagcagctggcgccgctctcgcagtccctacagccctgtgctcagacggtctggaaaatcccgaagcagaagcccgtattcatctaggcattcaagatctcgtagcaggcacagattgtctagatccagaagtcgtcattctagtatttctcctagcacactaactctgaagagtagcctggcagctgaattgaacaagaataaaaaagcacgagcagcagaggcagcaagagccgcagaagcagcgaaagctgcagaagcaactaaggctgctgaggctgctgccaaggctgcaaaagcttcaaacacttctacacctaccaaggggaacacggaaactagtgccagtgcatcacaaacaaaccatgtgaaggatgtgaagaaaattaaaattgaacatgcaccttctccctcaagtggtggaactttaaaaaatgacaaagcaaaaacaaagccacctcttcaggtaacgaaggtggaaaataatttgattgtagataaagccaccaagaaagcagtcatagttggaaaggagagtaaatctgctgctacaaaggaggaatcagtatctcttaaagagaaaaccaaaccacttacaccaagcataggagccaaggagaaggagcaacatgtagctttagtcacctctacattaccaccgttacctttgcctcccatgctgcctgaagataaagaagctgatagcttacgaggaaatatttcagtaaaagcagttaaaaaagaagtagaaaagaaactccgatgtcttcttgctgatttaccgctgccccctgagctaccaggaggagatgatctttcaaagagtccagaggaaaagaaaacagcaacacagttacatagtaaaaggaggcctaaaatatgtgggcctcgctatggtgaaaccaaagaaaaagatattgactggggaaaacgctgcgtggataaatttgatatcatcggaattattggagaaggtacttacggacaagtttacaaagccagggataaagacactggagaaatggtagccttaaaaaaagtacgtctggataatgaaaaggaaggctttccaattacagcaattcgagaaattaaaattctccggcagcttacccatcagagtattatcaatatgaaggaaatagtgactgataaagaagatgctttggatttcaagaaggacaaaggtgcattttatctggtgtttgaatatatggaccatgatctgatgggactactggaatcaggcttggttcattttaatgaaaatcacataaagtcatttatgagacagctcatggagggtctggattattgtcataagaagaactttttgcatagagatattaaatgttccaatatccttctaaataatagagggcagataaaacttgcagactttggacttgctcgattgtatagctcagaagaaagtcggccgtatactaacaaggtaattactttatggtaccgtccacctgaactgctactgggagaagaacgatacacaccagccattgatgtatggagctgtggctgtatccttggcgaactcttcactaaaaaacctatatttcaagcaaatcaggaacttgcacaactagaattaataagccgaatatgtgggagtccatgtcctgcagtgtggcctgatgtaatcaaactaccatatttcaacaccatgaaaccaaagaagcaatatcgtcgaaagttaagagaagaatttgtttttattcctgcagctgcgctagacttatttgattacatgcttgccttggatcctagtaagcgctgcactgctgaacaggctcttcagtgcgagttcctccgagatgtggaaccctcaaaaatgcctccaccagatctccctttatggcaagattgtcatgagttatggagtaaaaagcgaagaagacagaagcagatgggcatgactgatgatgtttccacaattaaagcccccaggaaggacttgtctctgggcttggatgacagcagaaccaacacaccccagggtgtgctgccatcttcacagctgaaatctcagggcagctcaaatgtggcacctggtgaaaaacagacagatccatcaacaccacaacaggagtcttcgaaaccgttgggaggaattcagccttcttctcagaccatccagcctaaagtggagactgatgctgcccaggcggctgtgcagagtgcatttgcagttctgttgactcagttaataaaggctcagcagtcaaagcagaaagatgtgctactagaagagagggaaaatggatcgggacatgaagcgtcattacaactcaggccacctccagaacctagcactccggtgtcgggacaagatgacctcatccagcatcaagatatgaggatcttggagctaacgccagaaccagaccggcctcgaattctgcctcctgaccaacgacctcccgagcctcctgaaccaccaccagtcactgaggaagatctagattatcggacagaaaaccagcatgtacccaccaccagttcttcattaactgaccctcatgccggagtgaaggcagccctgttacagctgcttgctcagcatcagccccaggatgaccccaaaagagaaggtgggattgattatcaagcaggagacacttacgtgtccacttcagactacaaggacaactttggatcctcttctttctcttctgctccttatgttagcaatgatggtctaggaagcagttctgctccaccactagaacgacgtagtttcattggaaattcagatattcagtctttggataactacagtactgcttcatctcattctggtggtccacctcagccttctgccttttctgagtcatttcccagttcagtagctggatatggagacatttacctcaatgctggtcccatgttgtttagtggagacaaggaccatagatttgaatatagccatggtcctattgcagtcctggcaaacagcagtgacccttccacggggccagagagtactcatcctttgccagcaaagatgcacaactataactatggtggtaacttacaggaaaatccgagtggccccagcctcatgcatggacagacctggacttctcctgcccaaggacctggatattcacaaggatacaggggacatattagcacatcaactggcagaggcagaggcagagggttaccatactgagtatctgtttttcctcaggcacatcatttttatctggaaagacttttctagctgcaatttaaggcagcaatccaagagacttgaataataataattcaacaacagctttatttttatgtggagaagggtcttgcatacaatagtttaaaaaagacaaaaaaaacctttgcttaaattcatgctgttctaaaaactagatcgattgtacatcttcacaaattctagttaacaattttattttgtattcttgcagttttaagtggatgctaattttaggggcataagccttttatggccctcttgcagatcttctgaactatgcacatttgtgctttttttgtaagtttggaccaacttttatgtaacaaacagcccctccccacctccagttttacaacaatcagaaagggcactgatttatttggtatttttctttttacaaagctacctttagtcaaaggtcactgtcagtctttgcacctgctttcagtgttattgtgaaaggtgtactttgtgctcatttcagaaaataaaacacaacctttctcttgatgcaacagttttataaaaaaaaaaaaaaaaacaaagaaaaaaaacttttggggcgggcctgggccccggaaaaggttttcaaacccaattggtgtggggggcgggggccgcacgatgggatagggtgacagggggcaaacagagggtgtcccaagagaaaaccgcgggggcccaagacaaacaagggcgcgggaacgtcctccccgaattaaaaaaagccccgggggggaaaccacgagagtgttcttgagacaaatcccgaggaggagggtacaaggagggccaaactaaggggctctattcacaccaagggagtcctacaggagaggccccgatataaatataccgcgg

SEQ ID NO: 329897 - DNA, 6512 bp, Homo sapiens
agccccgcgggccgcagagtgcgcgaggccctaggccgggagttgttgtcaggcccaggccacttccgaggcgcctgcggtgtgtcgccgccaccacaggaggacgacgtcgacgccgaggaggaggcggtggaggcgtgttgttgtctcgcccactcccctcccctgaacttgcacccaacgtcagggcgcgatggagtgaagcggcgacgaaggtggtacttccgcgttgcgctgcccgagccgagagcgcggccaaggccgctcccccacccccgggggcacttggaggactcgggactcccccgcaggtcagcgcccggcgcatctggtgttttcgctgccgaggataggacgacgagcgcaatcgggagctccgccgcccggattcctgcttccctggggcccggaggctgctgcgtaccccactgtgacctggaacccagggacccgagtcccgacccggattatcgtggcgcttttcccggccggctctggtgctcggtgtccctccgccgccgctcccgtttccggcgggggagatggccaggatctgacccgggaggaggccgcacccgcgccgcgctctgcggctggctctaggcgatgccgagcagctcggacacggcgctggggggaggcgggggcctgagctgggcggagaagaggttggaggaacgccgcaagcggaggcgattcctgtcccctcagcagccgccgctgctgttgccgctcctgcagccgcagctcctgcaaccgccgccgcccccgccgcctctgctcttcctggctgctcccggcacggccgccgccgcagccgccgccgccgcggcctcctcctcttgcttcagcccgggcccccctctggaggtcaagcggctggcgagaggcaagaggcgcgcaggagggcggcagaagcggcgtcgcgggccccgcgccgggcaggaggcggagaagcgtcgggtcttctcgctgccccagccgcagcaggacggcggtggcggtgctagtagcggcgggggtgtgaccccgctggtggaatacgaggatgtgagctcccagtccgagcaggggctgctgctggggggggccagcgcggcaacggcggcgacggctgccgggggaacggggggcagcggcgggagtccggcctcctcctccggcacccagcggcgcggggaggggtcggagcgcaggccccgccgggaccgccgcagcagcagtggccgcagcaaggagcgccaccgcgagcaccggcggcgggatgggcagcgcggtggcagcgaggcctccaagtcccgcagccgccacagccacagcggcgaggaacgggccgaggtcgccaagagcggcagcagcagcagcagcggcggccgccggaaaagcgcttcggccacatccagcagcagtagcagccgcaaggaccgggactcgaaggcccaccgcagccggactaagtcgtccaaggagccgccttcggcctacaaggaaccgcccaaggcctaccgggaggacaagaccgagcctaaggcctacaggcggcggcggtccctcagcccactgggaggccgggacgacagcccggtgtcccacagggcctctcagagcctgaggagccgcaagtcccccagcccggcaggaggtggcagcagcccctattctcggcggctgccgcgctccccgagcccctacagtcgccgccgctcccccagctacagccgccacagctcctacgagcggggcggcgacgtgtcccctagtccctacagcagcagcagctggcgccgctctcgcagtccctacagccctgtgctcagacggtctggaaaatcccgaagcagaagcccgtattcatctaggcattcaagatctcgtagcaggcacagattgtctagatccagaagtcgtcattctagtatttctcctagcacactaactctgaagagtagcctggcagctgaattgaacaagaataaaaaagcacgagcagcagaggcagcaagagccgcagaagcagcgaaagctgcagaagcaactaaggctgctgaggctgctgccaaggctgcaaaagcttcaaacacttctacacctaccaaggggaacacggaaactagtgccagtgcatcacaaacaaaccatgtgaaggatgtgaagaaaattaaaattgaacatgcaccttctccctcaagtggtggaactttaaaaaatgacaaagcaaaaacaaagccacctcttcaggtaacgaaggtggaaaataatttgattgtagataaagccaccaagaaagcagtcatagttggaaaggagagtaaatctgctgctacaaaggaggaatcagtatctcttaaagagaaaaccaaaccacttacaccaagcataggagccaaggagaaggagcaacatgtagctttagtcacctctacattaccaccgttacctttgcctcccatgctgcctgaagataaagaagctgatagcttacgaggaaatatttcagtaaaagcagttaaaaaagaagtagaaaagaaactccgatgtcttcttgctgatttaccgctgccccctgagctaccaggaggagatgatctttcaaagagtccagaggaaaagaaaacagcaacacagttacatagtaaaaggaggcctaaaatatgtgggcctcgctatggtgaaaccaaagaaaaagatattgactggggaaaacgctgcgtggataaatttgatatcatcggaattattggagaaggtacttacggacaagtttacaaagccagggataaagacactggagaaatggtagccttaaaaaaagtacgtctggataatgaaaaggaaggctttccaattacagcaattcgagaaattaaaattctccggcagcttacccatcagagtattatcaatatgaaggaaatagtgactgataaagaagatgctttggatttcaagaaggacaaaggtgcattttatctggtgtttgaatatatggaccatgatctgatgggactactggaatcaggcttggttcattttaatgaaaatcacataaagtcatttatgagacagctcatggagggtctggattattgtcataagaagaactttttgcatagagatattaaatgttccaatatccttctaaataatagagggcagataaaacttgcagactttggacttgctcgattgtatagctcagaagaaagtcggccgtatactaacaaggtaattactttatggtaccgtccacctgaactgctactgggagaagaacgatacacaccagccattgatgtatggagctgtggctgtatccttggcgaactcttcactaaaaaacctatatttcaagcaaatcaggaacttgcacaactagaattaataagccgaatatgtgggagtccatgtcctgcagtgtggcctgatgtaatcaaactaccatatttcaacaccatgaaaccaaagaagcaatatcgtcgaaagttaagagaagaatttgtttttattcctgcagctgcgctagacttatttgattacatgcttgccttggatcctagtaagcgctgcactgctgaacaggctcttcagtgcgagttcctccgagatgtggaaccctcaaaaatgcctccaccagatctccctttatggcaagattgtcatgagttatggagtaaaaagcgaagaagacagaagcagatgggcatgactgatgatgtttccacaattaaagcccccaggaaggacttgtctctgggcttggatgacagcagaaccaacacaccccagggtgtgctgccatcttcacagctgaaatctcagggcagctcaaatgtggcacctggtgaaaaacagacagatccatcaacaccacaacaggagtcttcgaaaccgttgggaggaattcagccttcttctcagaccatccagcctaaagtggagactgatgctgcccaggcggctgtgcagagtgcatttgcagttctgttgactcagttaataaaggctcagcagtcaaagcagaaagatgtgctactagaagagagggaaaatggatcgggacatgaagcgtcattacaactcaggccacctccagaacctagcactccggtgtcgggacaagatgacctcatccagcatcaagatatgaggatcttggagctaacgccagaaccagaccggcctcgaattctgcctcctgaccaacgacctcccgagcctcctgaaccaccaccagtcactgaggaagatctagattatcggacagaaaaccagcatgtacccaccaccagttcttcattaactgaccctcatgccggagtgaaggcagccctgttacagctgcttgctcagcatcagccccaggatgaccccaaaagagaaggtgggattgattatcaagcaggagacacttacgtgtccacttcagactacaaggacaactttggatcctcttctttctcttctgctccttatgttagcaatgatggtctaggaagcagttctgctccaccactagaacgacgtagtttcattggaaattcagatattcagtctttggataactacagtactgcttcatctcattctggtggtccacctcagccttctgccttttctgagtcatttcccagttcagtagctggatatggagacatttacctcaatgctggtcccatgttgtttagtggagacaaggaccatagatttgaatatagccatggtcctattgcagtcctggcaaacagcagtgacccttccacggggccagagagtactcatcctttgccagcaaagatgcacaactataactatggtggtaacttacaggaaaatccgagtggccccagcctcatgcatggacagacctggacttctcctgcccaaggacctggatattcacaaggatacaggggacatattagcacatcaactggcagaggcagaggcagagggttaccatactgagtatctgtttttcctcaggcacatcatttttatctggaaagacttttctagctgcaatttaaggcagcaatccaagagacttgaataataataattcaacaacagctttatttttatgtggagaagggtcttgcatacaatagtttaaaaaagacaaaaaaaacctttgcttaaattcatgctgttctaattcttgcagttttaagtggatgctaattttaggggcataagccttttatggccctcttgcagatcttctgaactatgcacatttgtgctttttttgtaagtttggaccaacttttatgtaacaaacagcccctccccacctccagttttacaacaatcagaaagggcactgatttatttggtatttttctttttacaaagctacctttagtcaaaggtcactgtcagtctttgcacctgctttcagtgttattgtgaaaggtgtactttgtgctcatttcagaaaataaaacacaacctttctcttgatgcaacagttttataaaaaaaaaaatggtcaacgttatttttgttttgttttgcagattatcaaagcctagcaaaatgcatttaaatgaaatagtgggttttatatgaaaactatgggtggggtggggagggaaagtaagtgccttaacaggtaagcttaaggtctgaaaaaaatagttaacttttacccccatttgtcttttaaagggaatcaatgcattaaaaaggcaagaaactctgaagtttcaggggctgcctgttcagttcctgttaggtccattccctctgcttgtcacactttctccttttctgcctgtctttgggctgtgttgcctttcactaccaccttctcttgataggggagtgagagcaaagaaagggagtagaactgcaatcagtacatattgtttgagaagttctacaaagttttgtcatttaaatggttgaaagtaatagctccaggagaattttagagtaccattttctttcaggctgccatattatccctgtttccatttgccatggataattggagggtcatggtatagaagcaagagttaataacagaacttgcctaaatgtgttaaagttcatgggggaggggtggcaaataccgtattttaagttatgcaattgcccttttaagaaagtcaattctattcacttgttaactagaaacattgcttagattgaatttattgaagcaaaaagaaaaggcaatgagagagaacttttatcttccttcctgtcacattctgtaaagttgattatgacttctgccagacttagagcaacaactttagttcattttaacatttttttttaatgaagagcatcaagaatggggtagtccttatttaaactgtaagggggtccgcctcccctgtgtgcggcctctctcctttttctcccacttttctatctctcgaaagggcccgggggtacacgggcgcccctttctcccgcggacatgtcgggcgccaggcgtgccgcccacactggtggcccaggtcgggcgcccttttggaggccacgcgacgccgcccgcg

SEQ ID NO: 329898 - DNA, 2915 bp, Homo sapiens
ccagatcgacgaatgagcaccgagttacactgcttccttagatataattcacacaaaatgttatttctgcctagaaataaactccacttgatctgcctcagagaacacaagtaaaaggccattttctgtgctactttatcaagagattacctattaatacgccgaatatgtgggagtccatgtcctgcagtgtggcctgatgtaatcaaactaccatatttcaacaccatgaaaccaaagaagcaatatcgtcgaaagttaagagaagaatttgttttgtaagaaggggatgtgtaaacatccttattgcatgaatgttttactttaattctagtgaattataaatgttagtctattctctagtgatctgaggtaaacctataattcttctagggcatttaattttgagttctgtttgctacatgcagattaccattttaccattattatggaatcagtgatttgagattgtgtgtttggtttggtgcttacgtgaaagaactttaataagatcatttaaatgttactggaacagctttcaagttacttgagctcaagttttcattttgctttagaaaaaactatactgttcagttcttaatttgtataataacagcaaattaccgataagtaacaatatatactattgtttagaaagtggttacaaaaattatgtaaaaatgaaatatttattcaaaggaaaattcggatttattgaagtaaagtattatgcacatattaaaaaagtatttacaattatttttaaatgatcttagttttagttttaaaatttaattaaaaataatttaagctcctaaagaaacataagcttgtgtctaaagaacacatctaacttttgtaatcctctcatgctagtattcctgcagctgcgctagacttatttgattacatgcttgccttggatcctagtaagcgctgcactgctgaacaggctcttcagtgcgagttcctccgagatgtggaaccctcaaaaatgcctccaccagatctccctttatggcaagattgtcatgagttatggagtaaaaagcgaagaagacagaagcagatgggcatgactgatgatgtttccacaattaaagcccccaggaaggacttgtctctgggcttggatgacagcagaaccaacacaccccagggtgtgctgccatcttcacagctgaaatctcagggcagctcaaatgtggcacctggtgaaaaacagacagatccatcaacaccacaacaggagtcttcgaaaccgttgggaggaattcagccttcttctcagaccatccagcctaaagtggagactgatgctgcccaggcggctgtgcagagtgcatttgcagttctgttgactcagttaataaaggctcagcagtcaaagcagaaagatgtgctactagaagagagggaaaatggatcgggacatgaagcgtcattacaactcaggccacctccagaacctagcactccggtgtcgggacaagatgacctcatccagcatcaagatatgaggatcttggagctaacgccagaaccagaccggcctcgaattctgcctcctgaccaacgacctcccgagcctcctgaaccaccaccagtcactgaggaagatctagattatcggacagaaaaccagcatgtacccaccaccagttcttcattaactgaccctcatgccggagtgaaggcagccctgttacagctgcttgctcagcatcagccccaggatgaccccaaaagagaaggtgggattgattatcaagcaggagacacttacgtgtccacttcagactacaaggacaactttggatcctcttctttctcttctgctccttatgttagcaatgatggtctaggaagcagttctgctccaccactagaacgacgtagtttcattggaaattcagatattcagtctttggataactacagtactgcttcatctcattctggtggtccacctcagccttctgccttttctgagtcatttcccagttcagtagctggatatggagacatttacctcaatgctggtcccatgttgtttagtggagacaaggaccatagatttgaatatagccatggtcctattgcagtcctggcaaacagcagtgacccttccacggggccagagagtactcatcctttgccagcaaagatgcacaactataactatggtggtaacttacaggaaaatccgagtggccccagcctcatgcatggacagacctggacttctcctgcccaaggacctggatattcacaaggatacaggggacatattagcacatcaactggcagaggcagaggcagagggttaccatactgagtatctgtttttcctcaggcacatcatttttatctggaaagacttttctagctgcaatttaaggcagcaatccaagagacttgaataataataattcaacaacagctttatttttatgtggagaagggtcttgcatacaatagtttaaaaaagacaaaaaaaacctttgcttaaattcatgctgttctaaaaactagatcgattgtacatcttcacaaattctagttaacaattttattttgtattcttgcagttttaagtggatgctaattttaggggcataagccttttatggccctcttgcagatcttctgaactatgcacatttgtgctttttttgtaagtttggaccaacttttatgtaacaaacagcccctccccacctccagttttacaacaatcagaaagggcactgatttatttggtatttttctttttacaaagctacctttagtcaaaggtcactgtcagtctttgcacctgctttcagtgttattgtgaaaggtgtactttgtgctcatttcagaaaataaaacacaacctttctcttgatgcaacagttttataaaaaaaaaaa

SEQ ID NO: 329899 - DNA, 3513 bp, Homo sapiens
agccccgcgggccgcagagtgcgcgaggccctaggccgggagttgttgtcaggcccaggccacttccgaggcgcctgcggtgtgtcgccgccaccacaggaggacgacgtcgacgccgaggaggaggcggtggaggcgtgttgttgtctcgcccactcccctcccctgaacttgcacccaacgtcagggcgcgatggagtgaagcggcgacgaaggtggtacttccgcgttgcgctgcccgagccgagagcgcggccaaggccgctcccccacccccgggggcacttggaggactcgggactcccccgcaggtcagcgcccggcgcatctggtgttttcgctgccgaggataggacgacgagcgcaatcgggagctccgccgcccggattcctgcttccctggggcccggaggctgctgcgtaccccactgtgacctggaacccagggacccgagtcccgacccggattatcgtggcgcttttcccggccggctctggtgctcggtgtccctccgccgccgctcccgtttccggcgggggagatggccaggatctgacccgggaggaggccgcacccgcgccgcgctctgcggctggctctaggcgatgccgagcagctcggacacggcgctggggggaggcgggggcctgagctgggcggagaagaggttggaggaacgccgcaagcggaggcgattcctgtcccctcagcagccgccgctgctgttgccgctcctgcagccgcagctcctgcaaccgccgccgcccccgccgcctctgctcttcctggctgctcccggcacggccgccgccgcagccgccgccgccgcggcctcctcctcttgcttcagcccgggcccccctctggaggtcaagcggctggcgagaggcaagaggcgcgcaggagggcggcagaagcggcgtcgcgggccccgcgccgggcaggaggcggagaagcgtcgggtcttctcgctgccccagccgcagcaggacggcggtggcggtgctagtagcggcgggggtgtgaccccgctggtggaatacgaggatgtgagctcccagtccgagcaggggctgctgctggggggggccagcgcggcaacggcggcgacggctgccgggggaacggggggcagcggcgggagtccggcctcctcctccggcacccagcggcgcggggaggggtcggagcgcaggccccgccgggaccgccgcagcagcagtggccgcagcaaggagcgccaccgcgagcaccggcggcgggatgggcagcgcggtggcagcgaggcctccaagtcccgcagccgccacagccacagcggcgaggaacgggccgaggtcgccaagagcggcagcagcagcagcagcggcggccgccggaaaagcgcttcggccacatccagcagcagtagcagccgcaaggaccgggactcgaaggcccaccgcagccggactaagtcgtccaaggagccgccttcggcctacaaggaaccgcccaaggcctaccgggaggacaagaccgagcctaaggcctacaggcggcggcggtccctcagcccactgggaggccgggacgacagcccggtgtcccacagggcctctcagagcctgaggagccgcaagtcccccagcccggcaggaggtggcagcagcccctattctcggcggctgccgcgctccccgagcccctacagtcgccgccgctcccccagctacagccgccacagctcctacgagcggggcggcgacgtgtcccctagtccctacagcagcagcagctggcgccgctctcgcagtccctacagccctgtgctcagacggtctggaaaatcccgaagcagaagcccgtattcatctaggcattcaagatctcgtagcaggcacagattgtctagatccagaagtcgtcattctagtatttctcctagcacactaactctgaagagtagcctggcagctgaattgaacaagaataaaaaagcacgagcagcagaggcagcaagagccgcagaagcagcgaaagctgcagaagcaactaaggctgctgaggctgctgccaaggctgcaaaagcttcaaacacttctacacctaccaaggggaacacggaaactagtgccagtgcatcacaaacaaaccatgtgaaggatgtgaagaaaattaaaattgaacatgcaccttctccctcaagtggtggaactttaaaaaatgacaaagcaaaaacaaagccacctcttcaggtaacgaaggtggaaaataatttgattgtagataaagccaccaagaaagcagtcatagttggaaaggagagtaaatctgctgctacaaaggaggaatcagtatctcttaaagagaaaaccaaaccacttacaccaagcataggagccaaggagaaggagcaacatgtagctttagtcacctctacattaccaccgttacctttgcctcccatgctgcctgaagataaagaagctgatagcttacgaggaaatatttcagtaaaagcagttaaaaaagaagtagaaaagaaactccgatgtcttcttgctgatttaccgctgccccctgagctaccaggaggagatgatctttcaaagagtccagaggaaaagaaaacagcaacacagttacatagtaaaaggaggcctaaaatatgtgggcctcgctatggtgaaaccaaagaaaaagatattgactggggaaaacgctgcgtggataaatttgatatcatcggaattattggagaaggtacttacggacaagtttacaaagccagggataaagacactggagaaatggtagccttaaaaaaagtacgtctggataatgaaaaggaaggctttccaattacagcaattcgagaaattaaaattctccggcagcttacccatcagagtattatcaatatgaaggaaatagtgactgataaagaagatgctttggatttcaagaaggacaaaggtgcattttatctggtgtttgaatatatggaccatgatctgatgggactactggaatcaggcttggttcattttaatgaaaatcacataaagtcatttatgagacagctcatggagggtctggattattgtcataagaagaactttttgcatagagatattaaatgttccaatatccttctaaataatagagggcagataaaacttgcagactttggacttgctcgattgtatagctcagaagaaaggtaagcataccttcaaatgaatattgtagatactagagtttagtattagaagctatactaagaataccttattgatagttttattttttaaaagagaagtttacttttcatggttagtacataaaacattgaaattttataccatattgggttgattattgtaattacaatattttatacattatctcaatttaaaaattgatcttcaacaggtaaaaatgatttttttaaatgaacatctttaagtgtaactgaagtgaacttaaatttctaatacgtattcagatattaaatattcttaatgaaa

SEQ ID NO: 329900 - DNA, 394 bp, Homo sapiens
tctccctttatggcaagattgtcatgagttatggagtaaaaagcgaagaagacagaagcagatgggcatgactgatgatgtttccacaattaaagcccccaggaaggacttgtctctgggcttggatgacagcagaaccaacacaccccagggtgtgctgccatcttcacagctgaaatctcagggcagctcaaatgtggcacctggtcagtaatgcttccatgggttggttttcttcacattgttttgcagttaattctgatcatattgctctaatgttaaagcatcttgtggctaacaatgaaaattaacatttattcactgaactagacatttctttgtgccagtacagaagtttcattgctattggcaccacaattttaagtaatcttaa

SEQ ID NO: 329901 - DNA, 85 bp, Homo sapiens
ccaccactctacagaggtaactatttgtcactatgaagaatgccaaagaaaatatttcctcgtaaaatttaactgcttactgtga

SEQ ID NO: 329902 - DNA, 511 bp, Homo sapiens
atatttgtagtcagtatgtgtgctcttaaccagaatcctttatgacttttcaacttccgttgtcttttaggaaataggtcaacaattatttgcttccattacaatatgataagaaaatggaactgccagtgaagacagaaaagaccttacatgtttattcaaatgctttgttacataccctgaatttttatccatataaaggcacagctggtaaaatatatggtatttgtaaaaggatgaatgtatttgcattttgcatgtaatatcacaagactctatgtatcgttaaaagagtcagtctctgcattattccatattgaattccttaattatgtatctctgtataataaaaggaaaagtgctgacagaatgcagtagaaaaatctaaattcttttcttgcaataaatgtgacacagattgtataaagcaatatttttgcccttgaaatgtttagaagcattgacattctgtccactaaattgtcagcttgtctttaaggttagagcttct

SEQ ID NO: 329903 - DNA, 437 bp, Homo sapiens
cccgccagctaataaacacctgggtcctgtcactgctaacagaaaacttacggcaattggaagagagtggccatgtatttccgaagctctagattgtaacattccaaaaataaaaacctagagttggggaggaccaaaagaggctgccttttaaaatcaaccctaagtcccaacatcaccgttcacaagatggtaacatcactggtgctggcggaacgcaggtcagctatattttcactaattccctctattcccaagtggtgagagaagctaagtgtttgcggcagttagcaggttcaaggacatttactgcataataaactgcgagcttagccattgcttctgatttggggggatctctttaccaccaatcaagaacttgactttcagtttgtagacaagttcttgagtggtggcatcgataaacaccgggtacc

SEQ ID NO: 329904 - DNA, 339 bp, Homo sapiens
ggagagaatggctacactgctgctgaatccaaagcccaccctggaggggaagcaggcggcggccacctctgctgctcacgtcgcggggcctgcctctctgcctctctgctgctcctcctggcaactgtggcggccctcatcgccttggtcaccattcttggactcccatcatgcaccccaggagcccaagcttgtataacactgacaaacaggacaggcttcttgtgccatgaccagaggagctgcattccagccagtggggtctgtgatggcgttcgcacctgtacccacggcgaggacgaggatgagagcttgtgccgtgagtacccgctcggtgct

SEQ ID NO: 329905 - DNA, 460 bp, Homo sapiens
gggaaggggaaacagaaacaataggacaaataggaagcatgtgttaagatatagatttaaacccaaatatatcagaaattacattaaatgtaaaggtaaagatttcagttaagagtcaaagaatctcaaagtatgtaaaaagattaaaaacccaactctaggccaggcgaggtggctcacacctgtaatctcagcactttgggaggccgaggcaggcggatcaactgaggtcaggagttcgagaccagcctggccaacatggcgaaaccccgtctctactaaaaatacaaaaaaattagccaggcgtggtgttggtcacctgtaatcccagctacttgggaggctgaggcaagagaatcgcttgaacccgggagtcggaggttgcagtgagctgaggtagtgctgttgcactccagcctgcgcgatagagcaggactgcatctcaaaaaaaaaaaaaaag

SEQ ID NO: 329906 - DNA, 197 bp, Homo sapiens
atataagtcaatctgatcccaatttacagttttagtctgacattcacagggcatctgagtaattatttgtacgtgtaaacattcacatttattagaaatatcagaaccagaaagttaaggaatatattctagacattaaaaataatgccttatttacattgtatatagtagttgcttgataaatatttgctagatgg

SEQ ID NO: 329907 - DNA, 108 bp, Homo sapiens
tttttctatcacaatttccctaccctttccctgtcctcactaaccttccttccttccagccaattcaaaccccattttcctttccctcaccaatttcccccaactcca

SEQ ID NO: 329908 - DNA, 360 bp, Homo sapiens
gtcctctatatcctggctaatggaaatggcaatgaaacccacaaggtagtaaaccataagctgtttgttccttaggaaatgggtaaagaacactgcacagaaggcacaagagattcttactgagaccctcaaattgggaattccgactttctggttaagtttttctgcccttcctgggacccctaaaaacatcgagctgtcggaggaagcagtgagtagtaccctccagtttttgttttttagacagtttagctcttgttgcccaggctggcgtgcaatggcacaatattggctcactgtgacctgtgcctcccaggttcaagcaattctgtctcagcctcccaagtagctgggattaca

SEQ ID NO: 329909 - DNA, 241 bp, Homo sapiens
gtcactgacatcgaacacctttaaacatccactgtcagcaaaatatcagtcaccgtttgaattattggcagaacggagtgaactcacagtgagcgagcagtcagtggacatgtcggaggtgcataacatccgaaagttatttaaaataaaccaaatgtgtttgttaattgaggagagtggacgacaaatggggaacgggtgggcgtgggtgagtgagtccgtggtggtgttgacggccaca

SEQ ID NO: 329910 - DNA, 424 bp, Homo sapiens
atactctgcatgctgcatactcttagttttctgttgtattcttttccattattttttaaatgctgggtcatggcttaaacttctcccttgccattcatttgattgttaacagaccataacagctatttggtggcttagccaaagaacctgcaaacacgtggggccatgatggggctaaaaggcaagattgaccttggaaagctaagattttattcttatcagtggttcatatacagcaaggtttcttagtgtcagctctactgacattttcttgtaggaaactgtcctgtgttgtagtatggttagcggcatctctggcctctaccaagtaccatccccccacccccagttgtgacaacaaaaaatgtcttcaggcattgctagtttctttgtattctttgtagtcttcttcccacttaaattg

SEQ ID NO: 329911 - DNA, 1792 bp, Homo sapiens
agcccgggggcgtgtcctggtgctggccgcacccgcgccccgccccgccccgcccggtcgcggagctgcggccagctttgggagggccggccccgggatgctacacacaacccagctgtaccagcatgtgccagagacacgctggccaatcgtgtactcgccgcgctacaacatcaccttcatgggcctggagaagctgcatccctttgatgccggaaaatggggcaaagtgatcaatttcctaaaagaagagaagcttctgtctgacagcatgctggtggaggcgcgggaggcctcggaggaggacctgctggtggtgcacacgaggcgctatcttaatgagctcaagtggtcctttgctgttgctaccatcacagaaatcccccccgttatcttcctccccaacttccttgtgcagaggaaggtgctgaggccccttcggacccagacaggaggaaccataatggcggggaagctggctgtggagcgaggctgggccatcaacgtggggggtggcttccaccactgctccagcgaccgtggcgggggcttctgtgcctatgcggacatcacgctcgccatcaagtttctgtttgagcgtgtggagggcatctccagggctaccatcattgatcttgatgcccatcagggcaatgggcatgagcgagacttcatggacgacaagcgtgtgtacatcatggatgtctacaaccgccacatctacccaggggaccgctttgccaagcaggccatcaggcggaaggtggagctggagtggggcacagaggatgatgagtacctggataaggtggagaggaacatcaagaaatccctccaggagcacctgcccgacgtggtggtatacaatgcaggcaccgacatcctcgagggggaccgccttggggggctgtccatcagcccagcgggcatcgtgaagcgggatgagctggtgttccggatggtccgtggccgccgggtgcccatccttatggtgacctcaggcgggtaccagaagcgcacagcccgcatcattgctgactccatacttaatctgtttggcctggggctcattgggcctgagtcacccagcgtctccgcacagaactcagacacaccgctgcttccccctgcagtgccctgacccttgctgccctgcctgtcacgtggccctgcctatccgccccttagtgctttttgttttctaacctcatggggtggtggaggcagccttcagtgagcatggaggggcagggccatccctggctggggcctggagctggcccttcctctacttttccctgctggaagccagaagggcttgaggcctctatgggtgggggcagaaggcagagcctgtgtcccagggggacccacacgaagtcaccagcccataggtccagggaggcaggcagttaactgagaattggagaggacaggctaggtcccaggcacagcgagggccctgggcttggggtgttctggttttgagaacggcagacccaggtcggagtgaggaagcttccacctccatcctgactaggcctgcatcctaactgggcctccctccctccccttggtcatgggatttgctgccctctttgccccagagctgaagagctataggcactggtgtggatggcccaggaggtgctggagctaggtctccaggtgggcctggttcccaggcagcaggtgggaaccctgggcctggatgtgaggggcggtcaggaaggggtacaggtgggttccctcatctggagttccccctcaataaagcaaggtctggacctgc

SEQ ID NO: 329912 - DNA, 2874 bp, Homo sapiens
agcccgggggcgtgtcctggtgctggccgcacccgcgccccgccccgccccgcccggtcgcggagctgcggccagctttgggagggccggccccgggatgctacacacaacccagctgtaccagcatgtgccagagacacgctggccaatcgtgtactcgccgcgctacaacatcaccttcatgggcctggagaagctgcatccctttgatgccggaaaatggggcaaagtgatcaatttcctaaaagaagagaagcttctgtctgacagcatgctggtggaggcgcgggaggcctcggaggaggacctgctggtggtgcacacgaggcgctatcttaatgagctcaagtggtcctttgctgttgctaccatcacagaaatcccccccgttatcttcctccccaacttccttgtgcagaggaaggtgctgaggccccttcggacccagacaggaggaaccataatggcggggaagctggctgtggagcgaggctgggccatcaacgtggggggtggcttccaccactgctccagcgaccgtggcgggggcttctgtgcctatgcggacatcacgctcgccatcaagtttctgtttgagcgtgtggagggcatctccagggctaccatcattgatcttgatgcccatcagggcaatgggcatgagcgagacttcatggacgacaagcgtgtgtacatcatggatgtctacaaccgccacatctacccaggggaccgctttgccaagcaggccatcaggcggaaggtggagctggagtggggcacagaggatgatgagtacctggataaggtggagaggaacatcaagaaatccctccaggagcacctgcccgacgtggtggtatacaatgcaggcaccgacatcctcgagggggaccgccttggggggctgtccatcagcccagcgggcatcgtgaagcgggatgagctggtgttccggatggtccgtggccgccgggtgcccatccttatggtgacctcaggcgggtaccagaagcgcacagcccgcatcattgctgactccatacttaatctgtttggcctggggctcattgggcctgagtcacccagcgtctccgcacagaactcagacacaccgctgcttccccctgcagtgccctgacccttgctgccctgcctgtcacgtggccctgcctatccgccccttagtgctttttgttttctaacctcatggggtggtggaggcagccttcagtgagcatggaggggcagggccatccctggctggggcctggagctggcccttcctctacttttccctgctggaagccagaagggcttgaggcctctatgggtgggggcagaaggcagagcctgtgtcccagggggacccacacgaagtcaccagcccataggtccagggaggcaggcagttaactgagaattggagaggacaggctaggtcccaggcacagcgagggccctgggcttggggtgttctggttttgagaacggcagacccaggtcggagtgaggaagcttccacctccatcctgactaggcctgcatcctaactgggcctccctccctccccttggtcatgggatttgctgccctctttgccccagagctgaagagctataggcactggtgtggatggcccaggaggtgctggagctaggtctccaggtgggcctggttcccaggcagcaggtgggaaccctgggcctggatgtgaggggcggtcaggaaggggtacaggtgggttccctcatctggagttccccctcaataaagcaaggtctggacctgccttcccaggcccttctgtgggggtgaaggtggggaaggcctgcggcgcccagatcactgccttagcagtagtcttgcctgttcagtgcaaggggcaggttttggggggaggaattcttagcgcaaggacgggcctcagccctgtcgcctccagggggccgctgacccaggtggggagagggcagaagaagggtgggggacgtgggcaggccaggctcacaggtggaaatcagggatgcagggtggtgcccaagccaggtcctgcaggaacccaggcccagggagggacccagacactggtgaggcggggcaggggttcctggagagagggcagcgaggatctctatcctggcctggggattatgaacataggtagccggggcagggccctgggtgggactgtggcctccactggcctcaccaaagtgcctgggccccaatccttctccatgcccaggggccccaggtgggccagacctctggcctgttcctcagccctactcatggggacattcagggacctccaggaagtgggcgggggagcatccacccctgctagccggcagctgtggccctgatcaaatcaggggctggggagggaaagtgggtccattgaggtggccctgctccatcagccccctacgggacttgtgttcattacagtgagggggtgctcccactgtctcccggcctccctaatgctccctctgctgcagggagaagggttccaagatcacaaaatgtcaacaatgctggcctcctggaccagaccccgaggctctaacaatgcactctgagatccctacccttgccgttggtctctgtcgctgactcgaggcacctaacatccattcacacccaacacaggccagcgacttctggggctcagccacagacatggtttgtcactgttgagcttctgttcctagagaatcctagaggcttgattggcccaggctgctgtgtgtgctggaggcaaagaatccctacctcctaggggtgaaaggaaatgaaaatggaaagttcttgtagcgcaaggcctgacatgggtagctgctcaataaatgctagtgtgttatttca

SEQ ID NO: 329913 - DNA, 2574 bp, Homo sapiens
agcccgggggcgtgtcctggtgctggccgcacccgcgccccgccccgccccgcccggtcgcggagctgcggccagctttgggagggccggccccgggatgctacacacaacccagctgtaccagcatgtgccagagacacgctggccaatcgtgtactcgccgcgctacaacatcaccttcatgggcctggagaagctgcatccctttgatgccggaaaatggggcaaagtgatcaatttcctaaaagaagagaagcttctgtctgacagcatgctggtggaggcgcgggaggcctcggaggaggacctgctggtggtgcacacgaggcgctatcttaatgagctcaagggcaatgggcatgagcgagacttcatggacgacaagcgtgtgtacatcatggatgtctacaaccgccacatctacccaggggaccgctttgccaagcaggccatcaggcggaaggtggagctggagtggggcacagaggatgatgagtacctggataaggtggagaggaacatcaagaaatccctccaggagcacctgcccgacgtggtggtatacaatgcaggcaccgacatcctcgagggggaccgccttggggggctgtccatcagcccagcgggcatcgtgaagcgggatgagctggtgttccggatggtccgtggccgccgggtgcccatccttatggtgacctcaggcgggtaccagaagcgcacagcccgcatcattgctgactccatacttaatctgtttggcctggggctcattgggcctgagtcacccagcgtctccgcacagaactcagacacaccgctgcttccccctgcagtgccctgacccttgctgccctgcctgtcacgtggccctgcctatccgccccttagtgctttttgttttctaacctcatggggtggtggaggcagccttcagtgagcatggaggggcagggccatccctggctggggcctggagctggcccttcctctacttttccctgctggaagccagaagggcttgaggcctctatgggtgggggcagaaggcagagcctgtgtcccagggggacccacacgaagtcaccagcccataggtccagggaggcaggcagttaactgagaattggagaggacaggctaggtcccaggcacagcgagggccctgggcttggggtgttctggttttgagaacggcagacccaggtcggagtgaggaagcttccacctccatcctgactaggcctgcatcctaactgggcctccctccctccccttggtcatgggatttgctgccctctttgccccagagctgaagagctataggcactggtgtggatggcccaggaggtgctggagctaggtctccaggtgggcctggttcccaggcagcaggtgggaaccctgggcctggatgtgaggggcggtcaggaaggggtacaggtgggttccctcatctggagttccccctcaataaagcaaggtctggacctgccttcccaggcccttctgtgggggtgaaggtggggaaggcctgcggcgcccagatcactgccttagcagtagtcttgcctgttcagtgcaaggggcaggttttggggggaggaattcttagcgcaaggacgggcctcagccctgtcgcctccagggggccgctgacccaggtggggagagggcagaagaagggtgggggacgtgggcaggccaggctcacaggtggaaatcagggatgcagggtggtgcccaagccaggtcctgcaggaacccaggcccagggagggacccagacactggtgaggcggggcaggggttcctggagagagggcagcgaggatctctatcctggcctggggattatgaacataggtagccggggcagggccctgggtgggactgtggcctccactggcctcaccaaagtgcctgggccccaatccttctccatgcccaggggccccaggtgggccagacctctggcctgttcctcagccctactcatggggacattcagggacctccaggaagtgggcgggggagcatccacccctgctagccggcagctgtggccctgatcaaatcaggggctggggagggaaagtgggtccattgaggtggccctgctccatcagccccctacgggacttgtgttcattacagtgagggggtgctcccactgtctcccggcctccctaatgctccctctgctgcagggagaagggttccaagatcacaaaatgtcaacaatgctggcctcctggaccagaccccgaggctctaacaatgcactctgagatccctacccttgccgttggtctctgtcgctgactcgaggcacctaacatccattcacacccaacacaggccagcgacttctggggctcagccacagacatggtttgtcactgttgagcttctgttcctagagaatcctagaggcttgattggcccaggctgctgtgtgtgctggaggcaaagaatccctacctcctaggggtgaaaggaaatgaaaatggaaagttcttgtagcgcaaggcctgacatgggtagctgctcaataaatgctagtgtgttatttca

SEQ ID NO: 329914 - DNA, 3920 bp, Homo sapiens
agcccgggggcgtgtcctggtgctggccgcacccgcgccccgccccgccccgcccggtcgcggagctgcggccagctttgggagggccggccccgggatgtgagtgccgcggggcgagggcgggggtgggctcccagggtcccggtgggcgggcgcgctagggcgagggcggggacggccgggcgggcgcgccaggctacacacaacccagctgtaccagcatgtgccagagacacgctggccaatcgtgtactcgccgcgctacaacatcaccttcatgggcctggagaagctgcatccctttgatgccggaaaatggggcaaagtgatcaatttcctaaaagaagagaagcttctgtctgacagcatgctggtggaggcgcgggaggcctcggaggaggacctgctggtggtgcacacgaggcgctatcttaatgagctcaagtggtcctttgctgttgctaccatcacagaaatcccccccgttatcttcctccccaacttccttgtgcagaggaaggtgctgaggccccttcggacccagacaggaggaaccataatggcggggaagctggctgtggagcgaggctgggccatcaacgtggggggtggcttccaccactgctccagcgaccgtggcgggggcttctgtgcctatgcggacatcacgctcgccatcaagtttctgtttgagcgtgtggagggcatctccagggctaccatcattgatcttgatgcccatcaggtgagtgccctgcaggggctggactcttaggggacctgccacccccagttccagaatcttcccggggcaggagagtctccctcctcatgtccccacggctctcacggcttctgtcttctgtctctcgggctacaaatgcagggtctgtctttgtcactctgtccaggacagcgggtcctcctcattgctcccgagggtcctccctccctcctcctgactgcccccacatgaggctcttcctgaagcccactctgatgggactgctctcgtgtgcagagctctgctgtgggtccccattgcttatgaataatttggggcactgccccctgcccagagctgctgagcactggccacctgcccctcaggcggatgcccacacacatggcttggctcgggcacctggggtcaccatttaagaactcggcgcctagggagtaaagtgtcaaagcagagggttacctcctcctcaggacccctaatgaggccagtgcctctggtcagacagggaggggacccagtgggctccggaaggcacccccctgcaccattactgctgtggctttgtgctagttggggccctgccttgggttcttgcgaccccgaactcctgagccaggtcacatgtggacagtcctttacagtttgcttttcacatccctgatcccaaccagtcccaccacagacttgagagggtggcagagcgggatttcttcctctgatagggaacctaagagcactgggcttgctcaagcccatgctagaaggtgtcggggcctggttttaaggttgaatcccagctctgccccttaacagtcatgagacctgctgcccccgagagcaggccgtgctgccctggcaaatggggagtttcctgaggggtgggtgggtggcagagccccagccttgcctagggcacctacccgagagcggctactgtgacctccccacagggcaatgggcatgagcgagacttcatggacgacaagcgtgtgtacatcatggatgtctacaaccgccacatctacccaggggaccgctttgccaagcaggccatcaggcggaaggtggagctggagtggggcacagaggatgatgagtacctggataaggtggagaggaacatcaagaaatccctccaggagcacctgcccgacgtggtggtatacaatgcaggcaccgacatcctcgagggggaccgccttggggggctgtccatcagcccagcgggcatcgtgaagcgggatgagctggtgttccggatggtccgtggccgccgggtgcccatccttatggtgacctcaggcgggtaccagaagcgcacagcccgcatcattgctgactccatacttaatctgtttggcctggggctcattgggcctgagtcacccagcgtctccgcacagaactcagacacaccgctgcttccccctgcagtgccctgacccttgctgccctgcctgtcacgtggccctgcctatccgccccttagtgctttttgttttctaacctcatggggtggtggaggcagccttcagtgagcatggaggggcagggccatccctggctggggcctggagctggcccttcctctacttttccctgctggaagccagaagggcttgaggcctctatgggtgggggcagaaggcagagcctgtgtcccagggggacccacacgaagtcaccagcccataggtccagggaggcaggcagttaactgagaattggagaggacaggctaggtcccaggcacagcgagggccctgggcttggggtgttctggttttgagaacggcagacccaggtcggagtgaggaagcttccacctccatcctgactaggcctgcatcctaactgggcctccctccctccccttggtcatgggatttgctgccctctttgccccagagctgaagagctataggcactggtgtggatggcccaggaggtgctggagctaggtctccaggtgggcctggttcccaggcagcaggtgggaaccctgggcctggatgtgaggggcggtcaggaaggggtacaggtgggttccctcatctggagttccccctcaataaagcaaggtctggacctgccttcccaggcccttctgtgggggtgaaggtggggaaggcctgcggcgcccagatcactgccttagcagtagtcttgcctgttcagtgcaaggggcaggttttggggggaggaattcttagcgcaaggacgggcctcagccctgtcgcctccagggggccgctgacccaggtggggagagggcagaagaagggtgggggacgtgggcaggccaggctcacaggtggaaatcagggatgcagggtggtgcccaagccaggtcctgcaggaacccaggcccagggagggacccagacactggtgaggcggggcaggggttcctggagagagggcagcgaggatctctatcctggcctggggattatgaacataggtagccggggcagggccctgggtgggactgtggcctccactggcctcaccaaagtgcctgggccccaatccttctccatgcccaggggccccaggtgggccagacctctggcctgttcctcagccctactcatggggacattcagggacctccaggaagtgggcgggggagcatccacccctgctagccggcagctgtggccctgatcaaatcaggggctggggagggaaagtgggtccattgaggtggccctgctccatcagccccctacgggacttgtgttcattacagtgagggggtgctcccactgtctcccggcctccctaatgctccctctgctgcagggagaagggttccaagatcacaaaatgtcaacaatgctggcctcctggaccagaccccgaggctctaacaatgcactctgagatccctacccttgccgttggtctctgtcgctgactcgaggcacctaacatccattcacacccaacacaggccagcgacttctggggctcagccacagacatggtttgtcactgttgagcttctgttcctagagaatcctagaggcttgattggcccaggctgctgtgtgtgctggaggcaaagaatccctacctcctaggggtgaaaggaaatgaaaatggaaagttcttgtagcgcaaggcctgacatgggtagctgctcaataaatgctagtgtgttatttca

SEQ ID NO: 329915 - DNA, 2376 bp, Homo sapiens
agcccgggggcgtgtcctggtgctggccgcacccgcgccccgccccgccccgcccggtcgcggagctgcggccagctttgggagggccggccccgggatgctacacacaacccagctgtaccagcatgtgccagagacacgctggccaatcgtgtactcgccgcgctacaacatcaccttcatgggcctggagaagctgcatccctttgatgccggaaaatggggcaaagtgatcaatttcctaaaagaggccatcaggcggaaggtggagctggagtggggcacagaggatgatgagtacctggataaggtggagaggaacatcaagaaatccctccaggagcacctgcccgacgtggtggtatacaatgcaggcaccgacatcctcgagggggaccgccttggggggctgtccatcagcccagcgggcatcgtgaagcgggatgagctggtgttccggatggtccgtggccgccgggtgcccatccttatggtgacctcaggcgggtaccagaagcgcacagcccgcatcattgctgactccatacttaatctgtttggcctggggctcattgggcctgagtcacccagcgtctccgcacagaactcagacacaccgctgcttccccctgcagtgccctgacccttgctgccctgcctgtcacgtggccctgcctatccgccccttagtgctttttgttttctaacctcatggggtggtggaggcagccttcagtgagcatggaggggcagggccatccctggctggggcctggagctggcccttcctctacttttccctgctggaagccagaagggcttgaggcctctatgggtgggggcagaaggcagagcctgtgtcccagggggacccacacgaagtcaccagcccataggtccagggaggcaggcagttaactgagaattggagaggacaggctaggtcccaggcacagcgagggccctgggcttggggtgttctggttttgagaacggcagacccaggtcggagtgaggaagcttccacctccatcctgactaggcctgcatcctaactgggcctccctccctccccttggtcatgggatttgctgccctctttgccccagagctgaagagctataggcactggtgtggatggcccaggaggtgctggagctaggtctccaggtgggcctggttcccaggcagcaggtgggaaccctgggcctggatgtgaggggcggtcaggaaggggtacaggtgggttccctcatctggagttccccctcaataaagcaaggtctggacctgccttcccaggcccttctgtgggggtgaaggtggggaaggcctgcggcgcccagatcactgccttagcagtagtcttgcctgttcagtgcaaggggcaggttttggggggaggaattcttagcgcaaggacgggcctcagccctgtcgcctccagggggccgctgacccaggtggggagagggcagaagaagggtgggggacgtgggcaggccaggctcacaggtggaaatcagggatgcagggtggtgcccaagccaggtcctgcaggaacccaggcccagggagggacccagacactggtgaggcggggcaggggttcctggagagagggcagcgaggatctctatcctggcctggggattatgaacataggtagccggggcagggccctgggtgggactgtggcctccactggcctcaccaaagtgcctgggccccaatccttctccatgcccaggggccccaggtgggccagacctctggcctgttcctcagccctactcatggggacattcagggacctccaggaagtgggcgggggagcatccacccctgctagccggcagctgtggccctgatcaaatcaggggctggggagggaaagtgggtccattgaggtggccctgctccatcagccccctacgggacttgtgttcattacagtgagggggtgctcccactgtctcccggcctccctaatgctccctctgctgcagggagaagggttccaagatcacaaaatgtcaacaatgctggcctcctggaccagaccccgaggctctaacaatgcactctgagatccctacccttgccgttggtctctgtcgctgactcgaggcacctaacatccattcacacccaacacaggccagcgacttctggggctcagccacagacatggtttgtcactgttgagcttctgttcctagagaatcctagaggcttgattggcccaggctgctgtgtgtgctggaggcaaagaatccctacctcctaggggtgaaaggaaatgaaaatggaaagttcttgtagcgcaaggcctgacatgggtagctgctcaataaatgctagtgtgttatttca

SEQ ID NO: 329916 - DNA, 751 bp, Homo sapiens
aggatatctatacttgcgtggcgggaaaaaaaaaaaaaaaggaaccggcagagggccctgggtgggactgtggcctccactggcctcaccaaagtgcctgggccccaatccttctccatgcccaggggccccaggtgggccagacctctggcctgttcctcagccctactcatggggacattcagggacctccaggaagtgggcgggggagcatccacccctgctagccggcagctgtggccctgatcaaatcaggggctggggagggaaagtgggtccattgaggtggccctgctccatcagccccctacgggacttgtgttcattacagtgagggggtgctcccactgtctcccggcctccctaatgctccctctgctgcagggagaagggttccaagatcacaaaatgtcaacaatgctggcctcctggaccagaccccgaggctctaacaatgcactctgagatccctacccttgccgttggtctctgtcgctgactcgaggcacctaacatccattcacacccaacacaggccagcgacttctggggctcagccacagacatggtttgtcactgttgagcttctgttcctagagaatcctagaggcttgattggcccaggctgctgtgtgtgctggaggcaaagaatccctacctcctaggggtgaaaggaaatgaaaatggaaagttcttgtagcgcaaggcctgacatgggtagctgctcaataaatgctagtgtgttatttca

SEQ ID NO: 329917 - DNA, 2016 bp, Homo sapiens
agcccgggggcgtgtcctggtgctggccgcacccgcgccccgccccgccccgcccggtcgcggagctgcggccagctttgggagggccggccccgggatgtgagtgccgcggggcgagggcgggggtgggctcccagggtcccggtgggcgggcgcgctagggcgagggcggggacggccgggcgggcgcgccaggctacacacaacccagctgtaccagcatgtgccagagacacgctggccaatcgtgtactcgccgcgctacaacatcaccttcatgggcctggagaagctgcatccctttgatgccggaaaatggggcaaagtgatcaatttcctaaaagaagagaagcttctgtctgacagcatgctggtggaggcgcgggaggcctcggaggaggacctgctggtggtgcacacgaggcgctatcttaatgagctcaagtggtcctttgctgttgctaccatcacagaaatcccccccgttatcttcctccccaacttccttgtgcagaggaaggtgctgaggccccttcggacccagacaggaggaaccataatggcggggaagctggctgtggagcgaggctgggccatcaacgtggggggtggcttccaccactgctccagcgaccgtggcgggggcttctgtgcctatgcggacatcacgctcgccatcaagtttctgtttgagcgtgtggagggcatctccagggctaccatcattgatcttgatgcccatcaggtgagtgccctgcaggggctggactcttaggggacctgccacccccagttccagaatcttcccggggcaggagagtctccctcctcatgtccccacggctctcacggcttctgtcttctgtctctcgggctacaaatgcagggtctgtctttgtcactctgtccaggacagcgggtcctcctcattgctcccgagggtcctccctccctcctcctgactgcccccacatgaggctcttcctgaagcccactctgatgggactgctctcgtgtgcagagctctgctgtgggtccccattgcttatgaataatttggggcactgccccctgcccagagctgctgagcactggccacctgcccctcaggcggatgcccacacacatggcttggctcgggcacctggggtcaccatttaagaactcggcgcctagggagtaaagtgtcaaagcagagggttacctcctcctcaggacccctaatgaggccagtgcctctggtcagacagggaggggacccagtgggctccggaaggcacccccctgcaccattactgctgtggctttgtgctagttggggccctgccttgggttcttgcgaccccgaactcctgagccaggtcacatgtggacagtcctttacagtttgcttttcacatccctgatcccaaccagtcccaccacagacttgagagggtggcagagcgggatttcttcctctgatagggaacctaagagcactgggcttgctcaagcccatgctagaaggtgtcggggcctggttttaaggttgaatcccagctctgccccttaacagtcatgagacctgctgcccccgagagcaggccgtgctgccctggcaaatggggagtttcctgaggggtgggtgggtggcagagccccagccttgcctagggcacctacccgagagcggctactgtgacctccccacagggcaatgggcatgagcgagacttcatggacgacaagcgtgtgtacatcatggatgtctacaaccgccacatctacccaggggaccgctttgccaagcgtaagctgctgcccctaccctcatcttgggtgtgtccttgtggatgaggctctctcctgagtgtctcctgtctgctaggccctgcagaagccactgcagtggttcatagcatccctgtgaggtgatcctttccattttacagatgaggaaaccgagacctggagaagtcactcgacccacccaagatcacataacccttacaataaacatgcatttgtctggca

SEQ ID NO: 329918 - DNA, 280 bp, Homo sapiens
tcactgttgagcttctgttcctagagaatcctagaggcttgattggcccaggctgctgtgtgtgctggaggcaaagaatccctacctcctaggggtgaaaggaaatgaaaatggaaagttcttgtagcgcaaggcctgacatgggtagctgctcaataaatgctagtgtgttatttcatcttctgagtcctgtggagttggtaatgattcccatttcacagatgaggaaactgaggcttggcaggggtgagaaatttgccccaggccacacctcccagca

SEQ ID NO: 329919 - DNA, 373 bp, Homo sapiens
cctgagtcaccctcctcttcccctaacagggcatcgtgaagcgggatgagctggtgttccggatggtccgtggccgccgggtgcccatccttatggtgacctcaggcgggtaccagaagcgcacagcccgcatcattgctgactccatacttaatctgtttggcctggggctcattgggcctgagtcacccagcgtctccgcacagaactcagacacaccgctgcttccccctgcagtgccctgacccttgctgccctgcctgtcacgtggccctgcctatccgccccttagtgctttttgttttctaacctcatggggtggtggaggcagccttcagtgagcatggaggggcagggccatccctggctgggg

SEQ ID NO: 329920 - DNA, 678 bp, Homo sapiens
atgccctccacgctgcttcggttgcatcttaagggccaagtgttgacgacagggggcagagggctggagcagcgcactagggcctggcagagcagaaacggcacgagaagcacaggcaagttcgacttcgcgccatccctgaccaccgaagagaccagcgcgagaaaagtcccggcagccagcgatcgccgagttgttctgattgggataattcagaaattcctaatattatctttcggcagaatggccaccctaaaacaaatactgaatgcctttaaaaaaaaaaaaagttgtggttttttgtttttttttttttttttttttggtcgagaactactaatttcatgctatttctttctctctccctttgttgttatttgatttgggggaagggagtgaggcttgtgcagatttgagctatctgaagacatgaacagaagtcaaataccagccatatcagtagagccttccattcaaaagtgaacacacttggtagctgaaccatatctgagcagcgtgattctgttgtcttgcatatgttattctctcaggctgctgtgtgtgctggaggcaaagaatccctacctcctaggggtgaaaggaaatgaaaatggaaagttcttgtagcgcaaggcctgacatgggtagctgctcaataaatgctagtgtgttatttca

SEQ ID NO: 329921 - DNA, 2970 bp, Homo sapiens
agcccgggggcgtgtcctggtgctggccgcacccgcgccccgccccgccccgcccggtcgcggagctgcggccagctttgggagggccggccccgggatgtgagtgccgcggggcgagggcgggggtgggctcccagggtcccggtgggcgggcgcgctagggcgagggcggggacggccgggcgggcgcgccaggctacacacaacccagctgtaccagcatgtgccagagacacgctggccaatcgtgtactcgccgcgctacaacatcaccttcatgggcctggagaagctgcatccctttgatgccggaaaatggggcaaagtgatcaatttcctaaaagaagagaagcttctgtctgacagcatgctggtggaggcgcgggaggcctcggaggaggacctgctggtggtgcacacgaggcgctatcttaatgagctcaagtggtcctttgctgttgctaccatcacagaaatcccccccgttatcttcctccccaacttccttgtgcagaggaaggtgctgaggccccttcggacccagacaggaggaaccataatggcggggaagctggctgtggagcgaggctgggccatcaacgtggggggtggcttccaccactgctccagcgaccgtggcgggggcttctgtgcctatgcggacatcacgctcgccatcaagtttctgtttgagcgtgtggagggcatctccagggctaccatcattgatcttgatgcccatcagggcaatgggcatgagcgagacttcatggacgacaagcgtgtgtacatcatggatgtctacaaccgccacatctacccaggggaccgctttgccaagcaggccatcaggcggaaggtggagctggagtggggcacagaggatgatgagtacctggataaggtggagaggaacatcaagaaatccctccaggagcacctgcccgacgtggtggtatacaatgcaggcaccgacatcctcgagggggaccgccttggggggctgtccatcagcccagcgggcatcgtgaagcgggatgagctggtgttccggatggtccgtggccgccgggtgcccatccttatggtgacctcaggcgggtaccagaagcgcacagcccgcatcattgctgactccatacttaatctgtttggcctggggctcattgggcctgagtcacccagcgtctccgcacagaactcagacacaccgctgcttccccctgcagtgccctgacccttgctgccctgcctgtcacgtggccctgcctatccgccccttagtgctttttgttttctaacctcatggggtggtggaggcagccttcagtgagcatggaggggcagggccatccctggctggggcctggagctggcccttcctctacttttccctgctggaagccagaagggcttgaggcctctatgggtgggggcagaaggcagagcctgtgtcccagggggacccacacgaagtcaccagcccataggtccagggaggcaggcagttaactgagaattggagaggacaggctaggtcccaggcacagcgagggccctgggcttggggtgttctggttttgagaacggcagacccaggtcggagtgaggaagcttccacctccatcctgactaggcctgcatcctaactgggcctccctccctccccttggtcatgggatttgctgccctctttgccccagagctgaagagctataggcactggtgtggatggcccaggaggtgctggagctaggtctccaggtgggcctggttcccaggcagcaggtgggaaccctgggcctggatgtgaggggcggtcaggaaggggtacaggtgggttccctcatctggagttccccctcaataaagcaaggtctggacctgccttcccaggcccttctgtgggggtgaaggtggggaaggcctgcggcgcccagatcactgccttagcagtagtcttgcctgttcagtgcaaggggcaggttttggggggaggaattcttagcgcaaggacgggcctcagccctgtcgcctccagggggccgctgacccaggtggggagagggcagaagaagggtgggggacgtgggcaggccaggctcacaggtggaaatcagggatgcagggtggtgcccaagccaggtcctgcaggaacccaggcccagggagggacccagacactggtgaggcggggcaggggttcctggagagagggcagcgaggatctctatcctggcctggggattatgaacataggtagccggggcagggccctgggtgggactgtggcctccactggcctcaccaaagtgcctgggccccaatccttctccatgcccaggggccccaggtgggccagacctctggcctgttcctcagccctactcatggggacattcagggacctccaggaagtgggcgggggagcatccacccctgctagccggcagctgtggccctgatcaaatcaggggctggggagggaaagtgggtccattgaggtggccctgctccatcagccccctacgggacttgtgttcattacagtgagggggtgctcccactgtctcccggcctccctaatgctccctctgctgcagggagaagggttccaagatcacaaaatgtcaacaatgctggcctcctggaccagaccccgaggctctaacaatgcactctgagatccctacccttgccgttggtctctgtcgctgactcgaggcacctaacatccattcacacccaacacaggccagcgacttctggggctcagccacagacatggtttgtcactgttgagcttctgttcctagagaatcctagaggcttgattggcccaggctgctgtgtgtgctggaggcaaagaatccctacctcctaggggtgaaaggaaatgaaaatggaaagttcttgtagcgcaaggcctgacatgggtagctgctcaataaatgctagtgtgttatttca

SEQ ID NO: 329922 - DNA, 1706 bp, Homo sapiens
agcccgggggcgtgtcctggtgctggccgcacccgcgccccgccccgccccgcccggtcgcggagctgcggccagctttgggagggccggccccgggatgctacacacaacccagctgtaccagcatgtgccagagacacgctggccaatcgtgtactcgccgcgctacaacatcaccttcatgggcctggagaagctgcatccctttgatgccggaaaatggggcaaagtgatcaatttcctaaaagaagagaagcttctgtctgacagcatgctggtggaggcgcgggaggcctcggaggaggacctgctggtggtgcacacgaggcgctatcttaatgagctcaagtggtcctttgctgttgctaccatcacagaaatcccccccgttatcttcctccccaacttccttgtgcagaggaaggtgctgaggccccttcggacccagacaggaggaaccataatggcggggaagctggctgtggagcgaggctgggccatcaacgtggggggtggcttccaccactgctccagcgaccgtggcgggggcttctgtgcctatgcggacatcacgctcgccatcaagtttctgtttgagcgtgtggagggcatctccagggctaccatcattgatcttgatgcccatcagggcaatgggcatgagcgagacttcatggacgacaagcgtgtgtacatcatggatgtctacaaccgccacatctacccaggggaccgctttgccaagcaggccatcaggcggaaggtggagctggagtggggcacagaggatgatgagtacctggataaggtggagaggaacatcaagaaatccctccaggagcacctgcccgacgtggtggtatacaatgcaggcaccgacatcctcgagggggaccgccttggggggctgtccatcagcccagcgggcatcgtgaagcgggatgagctggtgttccggatggtccgtggccgccgggtgcccatccttatggtgacctcaggcgggtaccagaagcgcacagcccgcatcattgctgactccatacttaatctgtttggcctggggctcattgggcctgagtcacccagcgtctccgcacagaactcagacacaccgctgcttccccctgcagtgccctgacccttgctgccctgcctgtcacgtggccctgcctatccgccccttagtgctttttgttttctaacctcatggggtggtggaggcagccttcagtgagcatggaggggcagggccatccctggctggggcctggagctggcccttcctctacttttccctgctggaagccagaagggcttgaggcctctatgggtgggggcagaaggcagagcctgtgtcccagggggacccacacgaagtcaccagcccagaccccgaggctctaacaatgcactctgagatccctacccttgccgttggtctctgtcgctgactcgaggcacctaacatccattcacacccaacacaggccagcgacttctggggctcagccacagacatggtttgtcactgttgagcttctgttcctagagaatcctagaggcttgattggcccaggctgctgtgtgtgctggaggcaaagaatccctacctcctaggggtgaaaggaaatgaaaatggaaagttcttgtagcgcaaggcctgacatgggtagctgctcaataaatgctagtgtgttatttca

SEQ ID NO: 329923 - DNA, 1223 bp, Homo sapiens
agcccgggggcgtgtcctggtgctggccgcacccgcgccccgccccgccccgcccggtcgcggagctgcggccagctttgggagggccggccccgggatgctacacacaacccagctgtaccagcatgtgccagagacacgctggccaatcgtgtactcgccgcgctacaacatcaccttcatgggcctggagaagctgcatccctttgatgccggaaaatggggcaaagtgatcaatttcctaaaagaagagaagcttctgtctgacagcatgctggtggaggcgcgggaggcctcggaggaggacctgctggtggtgcacacgaggcgctatcttaatgagctcaagtggtcctttgctgttgctaccatcacagaaatcccccccgttatcttcctccccaacttccttgtgcagaggaaggtgctgaggccccttcggacccagacaggaggaaccataatggcggggaagctggctgtggagcgaggctgggccatcaacgtggggggtggcttccaccactgctccagcgaccgtggcgggggcttctgtgcctatgcggacatcacgctcgccatcaagtttctgtttgagcgtgtggagggcatctccagggctaccatcattgatcttgatgcccatcagggcaatgggcatgagcgagacttcatggacgacaagcgtgtgtacatcatggatgtctacaaccgccacatctacccaggggaccgctttgccaagcaggccatcaggcggaaggtggagctggagtggggcacagaggatgatgagtacctggataaggtggagaggaacatcaagaaatccctccaggagcacctgcccgacgtggtggtatacaatgcaggcaccgacatcctcgagggggaccgccttggggggctgtccatcagcccagcgggcatcgtgaagcgggatgagctggtgttccggatggtccgtggccgccgggtgcccatccttatggtgacctcaggcgggtaccagaagcgcacagcccgcatcattgctgactccatacttaatctgtttggcctggggctcattgggcctgagtcacccagcgtctccgcacagaactcagacacaccccgtcgggtggagcaccccgtcgggtggagcaccccgtcgggtggagcaccccgtcgggtggagcaccccgtcgggtggagcaccccgtcgggtggagcggggatcc

SEQ ID NO: 329924 - DNA, 499 bp, Homo sapiens
ctgacaggtgaatgcacaagcagctcttgcagttgttcaggctcacatgaagccctggacaatgctgtgctgctgtggctgcacctgctaccagccttgacactgcatgttctctatacaaatgctactgctcttgaaggggtaaaactggttcttgggaagacatgagaaaatctcactttagaaaatattaatataggccgggcacggtggctcatgcctgtaatcccagcactttgggaggccgaggcgggcagatcacttgaggtcgggagttctagaccagcctggccaacatggtgaaaccccatctctaccaaaaatacatgtataaaaaattagccgggtatggtggtgcatgcctataatcccagctactcgggaggctgaggcaggagaatcacttgaacccaggaagcgaaagttgcagtgagctgagatcacgccactgcactccagcctgggtgacaagactccatctcaaaaaaaaaaaaaaaaa

SEQ ID NO: 329925 - DNA, 417 bp, Homo sapiens
aagagttgttggtagatgaaactgaaaggaaatccttagtgggaaaagagaaaagctagtgaagagtatgatatgggagctaacagatcaagtgtttagggaggaagttcaagaaagaatgttgctgagagatcaaggatgaagaaaaaagtttcttattcatttgatagtatctggtcgtgacaagcggtttaagggaatggtagggaaagccagatggaagtgggttgaagagttactggaatgggaaaagtagagacaatggatgtagatgacattcaagaagtttcgctgtgaaagggagcaagaattggggcagtaactagaaggcaatgtgggatcaaaggagggtttttgtgtttgtttttaaagatgagagagattggagagtatatgttcataggagagggacaaatt

SEQ ID NO: 329926 - DNA, 2224 bp, Homo sapiens
ccaggccgggggcgggtccaggacacagccaggcttccctggccgcagtgcccaactgcccgcagtgcccatggtggctcggatgggaggaaccaccgcggagccggggacagggggagcagggcagtgctctgctgggtgaggggcacccagctccagaggctaggtgggcgtcgctggtgggtggactcctgggcgctgcgcggagccgcgccggctgggttagcgcgggcggggcgcttagtcccacccccagaggaggcggaagaggagcccgagcctggccgcgggctgggccccgccgcagctccagctggccggcttggtcctgcggtcccttctctgggaggcccgaccccggccgcgcccagcccccaccatgccacccgcggggctccgccgggccgcgccgctcaccgcaatcgctctgttggtgctgggggctcccctggtgctggccggcgaggactgcctgtggtacctggaccggaatggctcctggcatccggggtttaactgcgagttcttcaccttctgctgcgggacctgctaccatcggtactgctgcagggacctgaccttgcttatcaccgagaggcagcagaagcactgcctggccttcagccccaagaccatagcaggcatcgcctcagctgtgatcctctttgttgctgtggttgccaccaccatctgctgcttcctctgttcctgttgctacctgtaccgccggcgccagcagctccagagcccatttgaaggccaggagattccaatgacaggcatcccagtgcagccagtatacccatacccccaggaccccaaagctggccctgcacccccacagcctggcttcatgtacccacctagtggtcctgctccccaatatccactctacccagctgggcccccagtctacaaccctgcagctcctcctccctatatgccaccacagccctcttacccgggagcctgaggaaccagccatgtctctgctgccccttcagtgatgccaaccttgggagatgccctcatcctgtacctgcatctggtcctgggggtggcaggagtcctccagccaccaggccccagaccaagccaagccctgggccctactggggacagagccccagggaagtggaacaggagctgaactagaactatgaggggttggggggagggcttggaattatgggctatttttactgggggcaagggagggagatgacagcctgggtcacagtgcctgttttcaaatagtccctctgctcccaagatcccagccaggaaggctggggccctactgtttgtcccctctgggctggggtggggggagggaggaggttccgtcagcagctggcagtagccctcctctctggctgccccactggccacatctctggcctgctagattaaagctgtaaagacataactcatatcagtcgcatcattggacccatccacaccttccaggaacaccgccttcagctgggcccagactgttgcccactccatattccaaaagtaggggagggccagcaccagcatcggagcacagcaccatcctcacccccatccacaagcagaccaaggcggactgttcctggcttcctaaaggcttcctaaagacaatgaggtgaattttgccacagctctgaagagatgctcgtttgcactacagatattccctgctagggatcaacagctctacaacagctgaggcactgctaactgtacaaaggcagttcccattcaggtacccttagattcattctgggccccaccactttctgaccttggccatgtctccaaaggttcccaagcctcaatgtccttatctatagaatggagataggacaggtgcggtagctcatgcctgtaatctcagtactttgagaggccaagggggggggatcgcctgaggtcaggagttcaagaccagcctggccaacatggtgaatccctgtctctgctaatatacaaaaaaaaattagccaggcattgtggcaggcgcctgtaatcccagctactcgggaggctaaggcaggagaatcgcttgaacccaggaggctggggttacattgagccgagattgcgccactgtactccagcctgggcaacagaaccaggatctgtctctaaataaataaataaaaataaataaataaataaatcaaatggggataataccccatggctgtcaggagggtgaaatagtatgtacatg

SEQ ID NO: 329927 - DNA, 2601 bp, Homo sapiens
ccaggccgggggcgggtccaggacacagccaggcttccctggccgcagtgcccaactgcccgcagtgcccatggtggctcggatgggaggaaccaccgcggagccggggacagggggagcagggcagtgctctgctgggtgaggggcacccagctccagaggctaggtgggcgtcgctggtgggtggactcctgggcgctgcgcggagccgcgccggctgggttagcgcgggcggggcgcttagtcccacccccagaggaggcggaagaggagcccgagcctggccgcgggctgggccccgccgcagctccagctggccggcttggtcctgcggtcccttctctgggaggcccgaccccggccgcgcccagcccccaccatgccacccgcggggctccgccgggccgcgccgctcaccgcaatcgctctgttggtgctgggggctcccctgggtaaggggatggggagagatgcggcaggagtgggatgggggcggaggaaggggagggaccgatccgaggggcttgggctcggggcttctccgagaccctccggctgccacgggagccttgggtgttgctgggtcctcaagaagcgggaagagggagctccaggatgctgggccatgggaggctgatcccggggtgcagggtcagcttcaggcagaggcctcgggggctctggggctgagaccctcagggtggagacaaggggcaaccctcagtgttcgggagccgtcaggctggggaccgccgggggagtggggccgagcgcggctggggatgaactggcctggtggccactgggcacccccaatccctgcccgcagtgctggccggcgaggactgcctgtggtacctggaccggaatggctcctggcatccggggtttaactgcgagttcttcaccttctgctgcgggacctgctaccatcggtactgctgcagggacctgaccttgcttatcaccgagaggcagcagaagcactgcctggccttcagccccaagaccatagcaggcatcgcctcagctgtgatcctctttgttgctgtggttgccaccaccatctgctgcttcctctgttcctgttgctacctgtaccgccggcgccagcagctccagagcccatttgaaggccaggagattccaatgacaggcatcccagtgcagccagtatacccatacccccaggaccccaaagctggccctgcacccccacagcctggcttcatgtacccacctagtggtcctgctccccaatatccactctacccagctgggcccccagtctacaaccctgcagctcctcctccctatatgccaccacagccctcttacccgggagcctgaggaaccagccatgtctctgctgccccttcagtgatgccaaccttgggagatgccctcatcctgtacctgcatctggtcctgggggtggcaggagtcctccagccaccaggccccagaccaagccaagccctgggccctactggggacagagccccagggaagtggaacaggagctgaactagaactatgaggggttggggggagggcttggaattatgggctatttttactgggggcaagggagggagatgacagcctgggtcacagtgcctgttttcaaatagtccctctgctcccaagatcccagccaggaaggctggggccctactgtttgtcccctctgggctggggtggggggagggaggaggttccgtcagcagctggcagtagccctcctctctggctgccccactggccacatctctggcctgctagattaaagctgtaaagacataactcatatcagtcgcatcattggacccatccacaccttccaggaacaccgccttcagctgggcccagactgttgcccactccatattccaaaagtaggggagggccagcaccagcatcggagcacagcaccatcctcacccccatccacaagcagaccaaggcggactgttcctggcttcctaaaggcttcctaaagacaatgaggtgaattttgccacagctctgaagagatgctcgtttgcactacagatattccctgctagggatcaacagctctacaacagctgaggcactgctaactgtacaaaggcagttcccattcaggtacccttagattcattctgggccccaccactttctgaccttggccatgtctccaaaggttcccaagcctcaatgtccttatctatagaatggagataggacaggtgcggtagctcatgcctgtaatctcagtactttgagaggccaagggggggggatcgcctgaggtcaggagttcaagaccagcctggccaacatggtgaatccctgtctctgctaatatacaaaaaaaaattagccaggcattgtggcaggcgcctgtaatcccagctactcgggaggctaaggcaggagaatcgcttgaacccaggaggctggggttacattgagccgagattgcgccactgtactccagcctgggcaacagaaccaggatctgtctctaaataaataaataaaaataaataaataaataaatcaaatggggataataccccatggctgtcaggagggtgaaatagtatgtacatg

SEQ ID NO: 329928 - DNA, 1973 bp, Homo sapiens
ccaggccgggggcgggtccaggacacagccaggcttccctggccgcagtgcccaactgcccgcagtgcccatggtggctcggatgggaggaaccaccgcggagccggggacagggggagcagggcagtgctctgctgggtgaggggcacccagctccagaggctaggtgggcgtcgctggtgggtggactcctgggcgctgcgcggagccgcgccggctgggttagcgcgggcggggcgcttagtcccacccccagaggaggcggaagaggagcccgagcctggccgcgggctgggccccgccgcagctccagctggccggcttggtcctgcggtcccttctctgggaggcccgaccccggccgcgcccagcccccaccatgccacccgcggggctccgccgggccgcgccgctcaccgcaatcgctctgttggtgctgggggctcccctggtgctggccggcgaggactgcctgtggtacctggaccggaatggctcctggcatccggggtttaactgcgagttcttcaccttctgctgcgggacctgctaccatcggtactgctgcagggacctgaccttgcttatcaccgagaggcagcagaagcactgcctggccttcagccccaagaccatagcaggcatcgcctcagctgtgatcctctttgttgctgtggttgccaccaccatctgctgcttcctctgttcctgttgctacctgtaccgccggcgccagcagctccagagcccatttgaaggccaggagattccaatgacaggcatcccagtgcagccagtatacccatacccccaggaccccaaagctggccctgcacccccacagccaagccctgggccctactggggacagagccccagggaagtggaacaggagctgaactagaactatgaggggttggggggagggcttggaattatgggctatttttactgggggcaagggagggagatgacagcctgggtcacagtgcctgttttcaaatagtccctctgctcccaagatcccagccaggaaggctggggccctactgtttgtcccctctgggctggggtggggggagggaggaggttccgtcagcagctggcagtagccctcctctctggctgccccactggccacatctctggcctgctagattaaagctgtaaagacataactcatatcagtcgcatcattggacccatccacaccttccaggaacaccgccttcagctgggcccagactgttgcccactccatattccaaaagtaggggagggccagcaccagcatcggagcacagcaccatcctcacccccatccacaagcagaccaaggcggactgttcctggcttcctaaaggcttcctaaagacaatgaggtgaattttgccacagctctgaagagatgctcgtttgcactacagatattccctgctagggatcaacagctctacaacagctgaggcactgctaactgtacaaaggcagttcccattcaggtacccttagattcattctgggccccaccactttctgaccttggccatgtctccaaaggttcccaagcctcaatgtccttatctatagaatggagataggacaggtgcggtagctcatgcctgtaatctcagtactttgagaggccaagggggggggatcgcctgaggtcaggagttcaagaccagcctggccaacatggtgaatccctgtctctgctaatatacaaaaaaaaattagccaggcattgtggcaggcgcctgtaatcccagctactcgggaggctaaggcaggagaatcgcttgaacccaggaggctggggttacattgagccgagattgcgccactgtactccagcctgggcaacagaaccaggatctgtctctaaataaataaataaaaataaataaataaataaatcaaatggggataataccccatggctgtcaggagggtgaaatagtatgtacatg

SEQ ID NO: 329929 - DNA, 932 bp, Homo sapiens
ccgagaggcagcagaagcactgcctggccttcaggtgggttcctgcctcctcaccctcaccacctcctctatccttttctccagaggcctcctcttcctccctcccggactcctgcctcctccgttgtcgacctccacattcttagctgaatagagtcaccaggactcaagcctggcggcagagctaggtgcttaggtgctggtgcctgggagttccagaaaaggcatgttagttaccttcataggctttgactgggcccggggtttccaggttctttctggagccctccctttggtcctgccaggtcatggggagggagggttcaaggttaacacccggacgacagtgtagctttgtggaagaagctctggcacaaaggcaggagacttgggtttgattcccaggtccacttcttactagctgtgtgatcttggagaagacacttgccttctatgggtcattgcttgccaaattagtggttgtcaaacttttttttaatatatcatatataaaatagatatagagacttctgattgaagcggggtttggaaaaaatggctctagattatttctaaggctcctttcagtgttatgctgtatgtctaatcatttaagttgtagatataaaagcaatggttgggggcgcactgcaaatccccgtatgcttcacactagccagccaggcagcatagccttctgggaagtggaggtcctctaagatctccttcacagggactgggcagagccccacaaggaaccccaaatctcagcatgccatggcccccctgctggccaggagttggagccagcataatgaggactccgtcctatgagtgttggaaggtgagaggacctgttctttgtctaaagccccaagaccatagcaggcatcgcctcagctgtgatcctctttgttgctgtggttgccacc

SEQ ID NO: 329930 - DNA, 1938 bp, Homo sapiens
ccaggccgggggcgggtccaggacacagccaggcttccctggccgcagtgcccaactgcccgcagtgcccatggtggctcggatgggaggaaccaccgcggagccggggacagggggagcagggcagtgctctgctgggtgaggggcacccagctccagaggctagtgctggccggcgaggactgcctgtggtacctggaccggaatggctcctggcatccggggtttaactgcgagttcttcaccttctgctgcgggacctgctaccatcggtactgctgcagggacctgaccttgcttatcaccgagaggcagcagaagcactgcctggccttcagccccaagaccatagcaggcatcgcctcagctgtgatcctctttgttgctgtggttgccaccaccatctgctgcttcctctgttcctgttgctacctgtaccgccggcgccagcagctccagagcccatttgaaggccaggagattccaatgacaggcatcccagtgcagccagtatacccatacccccaggaccccaaagctggccctgcacccccacagcctggcttcatgtacccacctagtggtcctgctccccaatatccactctacccagctgggcccccagtctacaaccctgcagctcctcctccctatatgccaccacagccctcttacccgggagcctgaggaaccagccatgtctctgctgccccttcagtgatgccaaccttgggagatgccctcatcctgtacctgcatctggtcctgggggtggcaggagtcctccagccaccaggccccagaccaagccaagccctgggccctactggggacagagccccagggaagtggaacaggagctgaactagaactatgaggggttggggggagggcttggaattatgggctatttttactgggggcaagggagggagatgacagcctgggtcacagtgcctgttttcaaatagtccctctgctcccaagatcccagccaggaaggctggggccctactgtttgtcccctctgggctggggtggggggagggaggaggttccgtcagcagctggcagtagccctcctctctggctgccccactggccacatctctggcctgctagattaaagctgtaaagacataactcatatcagtcgcatcattggacccatccacaccttccaggaacaccgccttcagctgggcccagactgttgcccactccatattccaaaagtaggggagggccagcaccagcatcggagcacagcaccatcctcacccccatccacaagcagaccaaggcggactgttcctggcttcctaaaggcttcctaaagacaatgaggtgaattttgccacagctctgaagagatgctcgtttgcactacagatattccctgctagggatcaacagctctacaacagctgaggcactgctaactgtacaaaggcagttcccattcaggtacccttagattcattctgggccccaccactttctgaccttggccatgtctccaaaggttcccaagcctcaatgtccttatctatagaatggagataggacaggtgcggtagctcatgcctgtaatctcagtactttgagaggccaagggggggggatcgcctgaggtcaggagttcaagaccagcctggccaacatggtgaatccctgtctctgctaatatacaaaaaaaaattagccaggcattgtggcaggcgcctgtaatcccagctactcgggaggctaaggcaggagaatcgcttgaacccaggaggctggggttacattgagccgagattgcgccactgtactccagcctgggcaacagaaccaggatctgtctctaaataaataaataaaaataaataaataaataaatcaaatggggataataccccatggctgtcaggagggtgaaatagtatgtacatg

SEQ ID NO: 329931 - DNA, 1386 bp, Homo sapiens
ccaggccgggggcgggtccaggacacagccaggcttccctggccgcagtgcccaactgcccgcagtgcccatggtggctcggatgggaggaaccaccgcggagccggggacagggggagcagggcagtgctctgctgggtgaggggcacccagctccagaggctaggtgggcgtcgctggtgggtggactcctgggcgctgcgcggagccgcgccggctgggttagcgcgggcggggcgcttagtcccacccccagaggaggcggaagaggagcccgagcctggccgcgggctgggccccgccgcagctccagctggccggcttggtcctgcggtcccttctctgggaggcccgaccccggccgcgcccagcccccaccatgccacccgcggggctccgccgggccgcgccgctcaccgcaatcgctctgttggtgctgggggctcccctggtgctggccggcgaggactgcctgtggtacctggaccggaatggctcctggcatccggggtttaactgcgagttcttcaccttctgctgcgggacctgctaccatcggtactgctgcagggacctgaccttgcttatcaccgagaggcagcagaagcactgcctggccttcagccccaagaccatagcaggcatcgcctcagctgtgatcctctttgttgctgtggttgccaccaccatctgctgcttcctctgttcctgttgctacctgtaccgccggcgccagcagctccagagcccatttgaaggccaggagattccaatgacaggcatcccagtgcagccagtatacccatacccccaggaccccaaagctggccctgcacccccacagcctggcttcatgtacccacctagtggtcctgctccccaatatccactctacccagctgggcccccagtctacaaccctgcagctcctcctccctatatgccaccacagccctcttacccgggagcctgaggaaccagccatgtctctgctgccccttcagtgatgccaaccttgggagatgccctcatcctgtacctgcatctggtcctgggggtggcaggagtcctccagccaccaggccccagaccaagcctggggtggggggagggaggaggttccgtcagcagctggcagtagcccttccttgtgcatgcatttgctgtaatagtgtagatataaaaaaagggcgttaattctaggcagtagtacagttgtcaatgtctatgggagtgtattagtagagcggttaagtgtgatgaatgtatggatctggagacttttggtgtgctatggcaatactagaattagttaggtattaatttagtgttatgggtatagtgttgctggtgaagtgtctggttgtttgacattatcgatggtag

SEQ ID NO: 329932 - DNA, 1201 bp, Homo sapiens
gaaagaatttgtactttgaaaagccaagacaagtactacccctcaccatcagcctaaaaataaacttactgacatattacataaataagaaagggtgctcacaccgcacgctgagctctgtgatgtagccgcttgcggagactgcaagcagccgcggcgcgcccggccctccctcttccgctgccgccgtgggaatggaaacatctgccccacgtgccggaagccaagtggtggcgacaactgcgcgccactccgcggcctaccgcgcagatcctctacgtgtgtcctcgcgagacaagctcaccgaaatggccgcgtccagtcaaggaaactttgagggaaattttgagtcactggaccttgcggaatttgctaagaagcagccatggtggcgtaagctgttcgggcaggaatctggaccttcagcagaaaagtatagcgtggcaacccagctgttcattggaggtgtcactggatggtgcacaggtttcatattccagaaggttggaaagttggctgcaacagctgtgggaggtggattttttctccttcagcttgcaaaccatactgggtacatcaaagttgactggcaacgagtggagaaggacatgaagaaagccaaagagcagctgaagatccgtaagagcaatcagatacctactgaggtcaggagcaaagctgaggaggtggtgtcatttgtgaagaagaatgttctagtaactgggggatttttcggaggctttctgcttggcatggcatcctaaggaagatgacctcatgttcattgttcctggttttttccagccagcagcctctacactccatcataggacatcgagtccctcctcctcttctcccatgccttcttccctgccatggcaaatctgagtggcttctctaagcatctgctggtacaagtcaatgtggcaccatgagcttcatggtggcagaagagacaatagtccttagctctcctcccagtacaccccctacttggccagtctgtaggccaacaagaaggttcctttacccccatgcaagacacttatgagaacacattacaagatggctgaccgtggaggatgagtggatcctgaaaggttgtcccaaactgttgatttggaaaagaaataagcacatagataaccttattgtgtgctgcatggaaaggaactgaatacatttgcctttaagcatgaaa

SEQ ID NO: 329933 - DNA, 2027 bp, Homo sapiens
acgctttctggcacgctttttttggtgcatctgttgggcgggaccgcggggcctgtgacaccgcacgctgagctctgtgatgtagccgcttgcggagactgcaagcagccgcggcgcgcccggccctccctcttccgctgccgccgtgggaatggaaacatctgccccacgtgccggaagccaagtggtggcgacaactgcgcgccactccgcggcctaccgcgcagatcctctacgtgtgtcctcgcgagacaagctcaccgaaatggccgcgtccagtcaaggaaactttgagggaaattttgagtcactggaccttgcggaatttgctaagaagcagccatggtggcgtaagctgttcgggcaggaatctggaccttcagcagaaaagtatagcgtggcaacccagctgttcattggaggtgtcactggatggtgcacaggtttcatattccagaaggttggaaagttggctgcaacagctgtgggaggtggattttttctccttcagcttgcaaaccatactgggtacatcaaagttgactggcaacgagtggagaaggacatgaagaaagccaaagagcagctgaagatccgtaagagcaatcagatacctactgaggtcaggagcaaagctgaggaggtggtgtcatttgtgaagaagaatgttctagtaactgggggatttttcggaggctttctgcttggcatggcatcctaaggaagatgacctcatgttcattgttcctggttttttccagccagcagcctctacactccatcataggacatcgagtccctcctcctcttctcccatgccttcttccctgccatggcaaatctgagtggcttctctaagcatctgctggtacaagtcaatgtggcaccatgagcttcatggtggcagaagagacaatagtccttagctctcctcccagtacaccccctacttggccagtctgtaggccaacaagaaggttcctttacccccatgcaagacacttatgagaacacattacaagatggctgaccgtggaggatgagtggatcctgaaaggttgtcccaaactgttgatttggaaaagaaataagcacatagataaccttattgtgtgctgcatggaaaggaactgaatacatttgcctttaagcatgaaagattttggtatcttggtgtctactttcttttttagttggttttacattacagaaagctatttaaatgtgttataattatgccgacaaaattggcagcataattactgtaattgaaaaatctgatattgtccaggaatgctttctaccgtacaggataatgtatctcatggctgtttccaaagggtttatttattgtaaaacaagtgatttaggtgggaaagggaagattttggatttttattttgtagaaaaggttttaagctttgaaatgtgaatgaaatatccttatcaaaacattaggggtggccataactcctctgtgccacttctactatttttttttttaatctagttagtatgaaatacaacatttaaaccggaattttaaagaagtagctttccaggggattcagaattaagaaagatagtgataggacatgagaaataaatttccatcaagtgtaatctaccgtctcatgatgaccacaaccctgagaattattctttaaaagcttacacacacacacacacacgggcacacacgcacacacagaatcttaccacattttgctgtagtggcatgttaccatgtctacagtccctactagaatatcagtcagctttcagagggcaagacttctgtcttcaccattatactcacagggcctagcacttaataggtgctgagtatttgaataatgactttatagaaagaaaactcactattaaaggttagttttactcagaattgttaatcttggagatgatctcttgtgaaatatgagtgtgtttctaaggccatacatttaaaaatgtttgcattttaacccgtcttgagaatgatgtattgaatttgaaaatcaaaacta

SEQ ID NO: 329934 - DNA, 885 bp, Homo sapiens
gctgacgactactactactaaattcgcggccgctcagacgtccagtcaaggaaactttgagggaaattttgagtcactggaccttgcggaatttgctaagaagcagccatggtggcgtaagctgttcgggcaggaatctggaccttcagcagaaaagtatagcgtggcaacccagctgttcattggaggtgtcactggatggtgcacaggtttcatattccagaaggttggaaagttggctgcaacagctgtgggaggtggattttttctccttcagcttgcaaaccatactgggtacatcaaagttgactggcaacgagtggagaaggacatgaagaaagccaaagagcagctgaagatccgtaagagcaatcagatacctactgaggtcaggagcaaagctgaggaggtggtgtcatttgtgaagaagaatgttctagtaactgggggatttttcggaggctttctgcttggcatggcatcctaaggaagatgacctcatgttcattgttcctggttttttccagccagcagcctctacactccatcataggacatcgagtccctcctcctcttctcccatgccttcttccctgccatggcaaatctgagtggcttctctaagcatctgctggtacaagtcaatgtggcaccatgagcttcatggtggcagaagagacaatagtccttagctctcctcccagtacaccccctacttggccagtctgtaggccaacaagaaggttcctttacccccatgcaagacacttatgagaacctcacacatggtggccggggggagaggggcccgcaagggtccccccgtcttgtgggaaagccccatactctttggggggaggagcgacattgcgttcggggaaaaaa

SEQ ID NO: 329935 - DNA, 1158 bp, Homo sapiens
acgctttctggcacgctttttttggtgcatctgttgggcgggaccgcggggcctgtgacaccgcacgctgagctctgtgatgtagccgcttgcggagactgcaagcagccgcggcgcgcccggccctccctcttccgctgccgccgtgggaatggaaacatctgccccacgtgccggaagccaagtggtggcgacaactgcgcgccactccgcggcctaccgcgcagatcctctacgtgtgtcctcgcgagacaagctcaccgaaatggccgcgtccagtcaaggaaactttgagggaaattttgagtcactggaccttgcggaatttgctaagaagcagccatggtggcgtaagctgttcgggcaggaatctggaccttcagcagaaaagtatagcgtggcaacccagctgttcattggaggtgtcactggatggtgcacaggtttcatattccagaaggttggaaagttggctgcaacagctgtgggaggtggattttttctccttcagcttgcaaaccatactgggtacatcaaagttgactggcaacgagtggagaaggacatgaagaaagccaaagagcagctgaagatccgtaagagcaatcagatacctactgaggtcaggagcaaagctgaggaggtggtgtcatttgtgaagaagaatgttctagtaactgggggatttttcggaggctttctgcttggcatggcatcctaaggaagatgacctcatgttcattgttcctggttttttccagccagcagcctctacactccatcataggacatcgagtccctcctcctcttctcccatgccttcttccctgccatggcaaatctgagtggcttctctaagcatctgctggtacaagtcaatgtggcaccatgagcttcatggtggcagaagagacaatagtccttagctctcctcccagtacaccccctacttggccagtctgtaggccaacaagaaggttcctttacccccatgcaagacacttatgagaacacattacaagatggctgaccgtggaggatgagtggatcctgaaaggttgtcccaaactgttgatttggaaaagaaataagcacatagataaccttattgtgtgctgcatggaaaggaactgaatacatttgcctttaagcatgaaa

SEQ ID NO: 329936 - DNA, 1231 bp, Homo sapiens
acgctttctggcacgctttttttggtgcatctgttgggcgggaccgcggggcctgtgacaccgcacgctgagctctgtgatgtagccgcttgcggagactgcaagcagccgcggcgcgcccggccctccctcttccgctgccgccgtgggaatggaaacatctgccccacgtgccggaagccaagtggtggcgacaactgcgcgccactccgcggcctaccgcgcagatcctctacgtgtgtcctcgcgagacaagctcaccgaaatggccgcgtccagtcaaggaaactttgagggaaattttgagtcactggaccttgcggaatttgctaagaagcagccatggtggcgtaagctgttcgggcaggaatctggaccttcagcagaaaagtatagcgtggcaacccagctgttcattggaggtgtcactggatggtgcacaggtttcatattccagaaggttggaaagttggctgcaacagctgtgggaggtggattttttctccttcagcttgcaaaccatactgggtacatcaaagttgactggcaacgagtggagaaggacatgaagaaagccaaagagcagctgaagatccgtaagagcaatcagatacctactgaggtcaggagcaaagctgaggaggtggtgtcatttgtgaagaagaatgttctagtaactgggggatttttcggaggctttctgcttggcatggcatcctaaggaagatgacctcatgttcattgttcctggttttttccagccagcagcctctacactccatcataggacatcgagtccctcctcctcttctcccatgccttcttccctgccatggcaaatctgagtggcttctctaagcatctgctggtacaagtcaatgtggcaccatgagcttcatggtggcagaagagacaatagtccttagctctcctcccagtacaccccctacttggccagtctgtaggccaacaagaaggttcctttacccccatgcaagacacttatgagaacacattacaagatggctgaccgtggaggatgagtggatcctgaaaggttgtcccaaactgttgatttggaaaagaaataagcacatagataaccttattgtgtgctgcatggaaaggaactgaatacatttgcctttaagcatgaaaaaaaaataaataaaaactcgagggggggcccggtcccaattcggccttataggaatcggtttacaattcactg

SEQ ID NO: 329937 - DNA, 1119 bp, Homo sapiens
acgctttctggcacgctttttttggtgcatctgttgggcgggaccgcggggcctgtgacaccgcacgctgagctctgtgatgtagccgcttgcggagactgcaagcagccgcggcgcgcccggccctccctcttccgctgccgccgtgggaatggaaacatctgccccacgtgccggaagccaagtggtggcgacaactgcgcgccactccgcggcctaccgcgcagatcctctacgtgtgtcctcgcgagacaagctcaccgaaatggccgcgtccagtcaaggaaactttgagggaaattttgagtcactggaccttgcggaatttgctaagaagcagccatggtggcgtaagctgttcgggcaggaatctggaccttcagcagaaaagtatagcgtggcaacccagctgttcattggaggtgtcactggatggtgcacaggtttcatattccagaaggttggaaagttggctgcaacagctgtgggaggtggattttttctccttcagcttgcaaaccatactgggtacatcaaagttgactggcaacgagtggagaaggacatgaagaaagccaaagagcagctgaagatccgtaagagcaatcagatacctactgaggtcaggagcaaagctgaggaggtggtgtcatttgtgaagaagaatgttctagtaactgggggatttttcggaggctttctgcttggcatggcatcctaaggaagatgacctcatgttcattgttcctggttttttccagccagcagcctctacactccatcataggacatcgagtccctcctcctcttctcccatgccttcttccctgccatggcaaatctgagtggcttctctaagcatctgctggtacaagtcaatgtggcaccatgagcttcatggtggcagaagagacaatagtccttagctctcctcccagtacaccccctacttggccagtctgtaggccaacaagaaggttcctttacccccatgcaagacacttatgagaacctcacacatggtggccggggggagaggggcccgcaagggtccccccgtcttgtgggaaagccccatactctttggggggaggagcgacattgcgttcggggaaaaaa

SEQ ID NO: 329938 - DNA, 1116 bp, Homo sapiens
ggactacaggcggccgccaccatgcccggctaattttttgtatttttagtagagacggggtttcaccatgttagccaggatggcctcgatctcctgaccgcgtgatccgcccgcctcggcctccgaaactgctgaaattacaggcgtgagccaccgcgcccggccagataagtgagtcataggtaaaatattcttcaccaggcgaggattgagtcgcagtcgcgtcaggaactcgcctccaggaaactttgagggaaattttgagtcactggaccttgcggaatttgctaagaagcagccatggtggcgtaagctgttcgggcaggaatctggaccttcagcagaaaagtatagcgtggcaacccagctgttcattggaggtgtcactggatggtgcacaggtttcatattccagaaggttggaaagttggctgcaacagctgtgggaggtggattttttctccttcagcttgcaaaccatactgggtacatcaaagttgactggcaacgagtggagaaggacatgaagaaagccaaagagcagctgaagatccgtaagagcaatcagatacctactgaggtcaggagcaaagctgaggaggtggtgtcatttgtgaagaagaatgttctagtaactgggggatttttcggaggctttctgcttggcatggcatcctaaggaagatgacctcatgttcattgttcctggttttttccagccagcagcctctacactccatcataggacatcgagtccctcctcctcttctcccatgccttcttccctgccatggcaaatctgagtggcttctctaagcatctgctggtacaagtcaatgtggcaccatgagcttcatggtggcagaagagacaatagtccttagctctcctcccagtacaccccctacttggccagtctgtaggccaacaagaaggttcctttacccccatgcaagacacttatgagaacacattacaagatggctgaccgtggaggatgagtggatcctgaaaggttgtcccaaactgttgatttggaaaagaaataagcacatagataaccttattgtgtgctgcatggaaaggaactgaatacatttgcctttaagcatgaaa

SEQ ID NO: 329939 - DNA, 924 bp, Homo sapiens
gctgacgactactactactaaattcgcggccgctcagacgtccagtcaaggaaactttgagggaaattttgagtcactggaccttgcggaatttgctaagaagcagccatggtggcgtaagctgttcgggcaggaatctggaccttcagcagaaaagtatagcgtggcaacccagctgttcattggaggtgtcactggatggtgcacaggtttcatattccagaaggttggaaagttggctgcaacagctgtgggaggtggattttttctccttcagcttgcaaaccatactgggtacatcaaagttgactggcaacgagtggagaaggacatgaagaaagccaaagagcagctgaagatccgtaagagcaatcagatacctactgaggtcaggagcaaagctgaggaggtggtgtcatttgtgaagaagaatgttctagtaactgggggatttttcggaggctttctgcttggcatggcatcctaaggaagatgacctcatgttcattgttcctggttttttccagccagcagcctctacactccatcataggacatcgagtccctcctcctcttctcccatgccttcttccctgccatggcaaatctgagtggcttctctaagcatctgctggtacaagtcaatgtggcaccatgagcttcatggtggcagaagagacaatagtccttagctctcctcccagtacaccccctacttggccagtctgtaggccaacaagaaggttcctttacccccatgcaagacacttatgagaacacattacaagatggctgaccgtggaggatgagtggatcctgaaaggttgtcccaaactgttgatttggaaaagaaataagcacatagataaccttattgtgtgctgcatggaaaggaactgaatacatttgcctttaagcatgaaa

SEQ ID NO: 329940 - DNA, 1146 bp, Homo sapiens
gaaagaatttgtactttgaaaagccaagacaagtactacccctcaccatcagcctaaaaataaacttactgacatattacataaataagaaagggtgctcacaccgcacgctgagctctgtgatgtagccgcttgcggagactgcaagcagccgcggcgcgcccggccctccctcttccgctgccgccgtgggaatggaaacatctgccccacgtgccggaagccaagtggtggcgacaactgcgcgccactccgcggcctaccgcgcagatcctctacgtgtgtcctcgcgagacaagctcaccttgcggaatttgctaagaagcagccatggtggcgtaagctgttcgggcaggaatctggaccttcagcagaaaagtatagcgtggcaacccagctgttcattggaggtgtcactggatggtgcacaggtttcatattccagaaggttggaaagttggctgcaacagctgtgggaggtggattttttctccttcagcttgcaaaccatactgggtacatcaaagttgactggcaacgagtggagaaggacatgaagaaagccaaagagcagctgaagatccgtaagagcaatcagatacctactgaggtcaggagcaaagctgaggaggtggtgtcatttgtgaagaagaatgttctagtaactgggggatttttcggaggctttctgcttggcatggcatcctaaggaagatgacctcatgttcattgttcctggttttttccagccagcagcctctacactccatcataggacatcgagtccctcctcctcttctcccatgccttcttccctgccatggcaaatctgagtggcttctctaagcatctgctggtacaagtcaatgtggcaccatgagcttcatggtggcagaagagacaatagtccttagctctcctcccagtacaccccctacttggccagtctgtaggccaacaagaaggttcctttacccccatgcaagacacttatgagaacacattacaagatggctgaccgtggaggatgagtggatcctgaaaggttgtcccaaactgttgatttggaaaagaaataagcacatagataaccttattgtgtgctgcatggaaaggaactgaatacatttgcctttaagcatgaaa

SEQ ID NO: 329941 - DNA, 983 bp, Homo sapiens
tgagactgcttaggagagactaacaagcaagacttgaaaaagggagcagtttctccaaaaacaaaagaaaactgacatttgattgtattaggcatacatttcttagctctgtggcattggtattcaaatttggctccacattggaatcacctaggagtttttaaaagagccaacgtgtgccactcctgacccacagtctgatttcattggaaaacttaaaactcctgaggtgattctgctgtgctgtgggagccataacttgctgaatcatgccagagtctctgaattcacagccgtttgtctcttcccacagttggcaaccctcacttttgcaagcttgcaaaccatactgggtacatcaaagttgactggcaacgagtggagaaggacatgaagaaagccaaagagcagctgaagatccgtaagagcaatcagatacctactgaggtcaggagcaaagctgaggaggtggtgtcatttgtgaagaagaatgttctagtaactgggggatttttcggaggctttctgcttggcatggcatcctaaggaagatgacctcatgttcattgttcctggttttttccagccagcagcctctacactccatcataggacatcgagtccctcctcctcttctcccatgccttcttccctgccatggcaaatctgagtggcttctctaagcatctgctggtacaagtcaatgtggcaccatgagcttcatggtggcagaagagacaatagtccttagctctcctcccagtacaccccctacttggccagtctgtaggccaacaagaaggttcctttacccccatgcaagacacttatgagaacacattacaagatggctgaccgtggaggatgagtggatcctgaaaggttgtcccaaactgttgatttggaaaagaaataagcacatagataaccttattgtgtgctgcatggaaaggaactgaatacatttgcctttaagcatgaaa

SEQ ID NO: 329942 - DNA, 1098 bp, Homo sapiens
cgccagtcgcgaccgagctccccggggagtccaagcggcgcggggacggggagggcgctcggggatcgcccctggctcagccgctcccagggtccggccaaggtcacgcgcgtgtctggggcctaaccaccctggggtgtcgtctccagtggagctcacccagccttccggcgccgcccccggcgcagaagcccgaagacattctgtccccgttctcggaagcggaaactttgagggaaattttgagtcactggaccttgcggaatttgctaagaagcagccatggtggcgtaagctgttcgggcaggaatctggaccttcagcagaaaagtatagcgtggcaacccagctgttcattggaggtgtcactggatggtgcacaggtttcatattccagaaggttggaaagttggctgcaacagctgtgggaggtggattttttctccttcagcttgcaaaccatactgggtacatcaaagttgactggcaacgagtggagaaggacatgaagaaagccaaagagcagctgaagatccgtaagagcaatcagatacctactgaggtcaggagcaaagctgaggaggtggtgtcatttgtgaagaagaatgttctagtaactgggggatttttcggaggctttctgcttggcatggcatcctaaggaagatgacctcatgttcattgttcctggttttttccagccagcagcctctacactccatcataggacatcgagtccctcctcctcttctcccatgccttcttccctgccatggcaaatctgagtggcttctctaagcatctgctggtacaagtcaatgtggcaccatgagcttcatggtggcagaagagacaatagtccttagctctcctcccagtacaccccctacttggccagtctgtaggccaacaagaaggttcctttacccccatgcaagacacttatgagaacacattacaagatggctgaccgtggaggatgagtggatcctgaaaggttgtcccaaactgttgatttggaaaagaaataagcacatagataaccttattgtgtgctgcatggaaaggaactgaatacatttgcctttaagcatgaaa

SEQ ID NO: 329943 - DNA, 1153 bp, Homo sapiens
gaaagaatttgtactttgaaaagccaagacaagtactacccctcaccatcagcctaaaaataaacttactgacatattacataaataagaaagggtgctcacaccgcacgctgagctctgtgatgtagccgcttgcggagactgcaagcagccgcggcgcgcccggccctccctcttccgctgccgccgtgggaatggaaacatctgccccacgtgccggaagccaagtggtggcgacaactgcgcgccactccgcggcctaccgcgcagatcctctacgtgtgtcctcgcgagacaagctcaccgaaatggccgcgtccagtcaaggaaactttgagggaaattttgagtcactggaccttgcggaatttgctaagaagcagccatggtggcgtaagctgttcgggcaggaatctggaccttcagcagagtgcacaggtttcatattccagaaggttggaaagttggctgcaacagctgtgggaggtggattttttctccttcagcttgcaaaccatactgggtacatcaaagttgactggcaacgagtggagaaggacatgaagaaagccaaagagcagctgaagatccgtaagagcaatcagatacctactgaggtcaggagcaaagctgaggaggtggtgtcatttgtgaagaagaatgttctagtaactgggggatttttcggaggctttctgcttggcatggcatcctaaggaagatgacctcatgttcattgttcctggttttttccagccagcagcctctacactccatcataggacatcgagtccctcctcctcttctcccatgccttcttccctgccatggcaaatctgagtggcttctctaagcatctgctggtacaagtcaatgtggcaccatgagcttcatggtggcagaagagacaatagtccttagctctcctcccagtacaccccctacttggccagtctgtaggccaacaagaaggttcctttacccccatgcaagacacttatgagaacacattacaagatggctgaccgtggaggatgagtggatcctgaaaggttgtcccaaactgttgatttggaaaagaaataagcacatagataaccttattgtgtgctgcatggaaaggaactgaatacatttgcctttaagcatgaaa

SEQ ID NO: 329944 - DNA, 342 bp, Homo sapiens
caaggaagaagaatacaggcaggagaacagacacaggtgccatcaagggtgttcattctactgctccatgccgtcctgcaaaaggaaatctggtcctcctcctacacttgcatggccaacacatgggaaacacctgagctaaccctgacttggagaattgttccatgtggttactttcaatgctcctgcctctcttgaacaagacacagagatgtccagaacccagtataacttggtataatcctccagtcctgtatgtctccctttaagcctcctccttccactgagcctaaggcaaatcttttgacccggggtggacccggagggatgaggatgctgagg

SEQ ID NO: 329945 - DNA, 256 bp, Homo sapiens
tgcaggctcttgactactactttctgttcagcctctatgccttactttgaattgttgactaccttaaggatatataaggctcactttagtaagttttctctttactctgggattttattctctcaggtcctggctgtcttgtctgttctctgatgactttgcgcattgttttttaaattgttttttgtttttttgagatgaagtcttgctttatggccaggctagagtacagtggtaagatcacagctcaccacag

SEQ ID NO: 329946 - DNA, 515 bp, Homo sapiens
gatctcggctcactgcaacctccacccccctggattcaagcaattctcctgcctcagcctcctgagtagctgggattacaggcgcctgccaccatgcccagctaatttttgtatttttagtagagacagggtttcaccgtgttgcccaggctagtctcaaacttctgaccttaggtgatctgccgagctctgcttcccaaagtgctgggatttcaggcttcaggcatgagccactgcgcccagcctcgattcacttttcatcctgttcccagaattgccttctagaaacaatttgatgtgtgtgccttgcagacctatgctggttctctgttgtctgcaggataaagtccagactacgcagtggggccctaggacaccctcactgaccccacgatggtacagatgctcctcagcttacaatggagttacatcctggtagacccattgtaagctgaaaatagcataaatcgaaaataaatacatctaatgcacctaacctactgaacaccatagtt

SEQ ID NO: 329947 - DNA, 2434 bp, Homo sapiens
tctgattgacttcaagaaggagtcagagatcagcttaagggcaaaggctggaagcagagcgaactgggagcagagcacacagagccgtggagcgagagatgccggccctgggctgggccgtggctgccatcctgatgctgcagacggccatggcggagccctccccggggactctgcccaggaaggcaggggtgttttcagacctaagcaaccaagagctgaaggcagtgcacagcttcctctggtccaagaaggagctgaggctgcagccctccagtaccaccaccatggccaagaacaccgtgtttctcatcgagatgctgctgcccaagaagtaccatgtgctgaggtttctggataaaggtgaaaggcatcctgtgcgggaagcccgtgccgtcatcttctttggtgaccaggagcatcccaatgtcaccgagtttgctgtggggcccctgccagggccctgctacatgcgagcactgtcccccaggcctgggtaccagtcctcctgggcatcgaggcccatctccacagcagagtatgccctcctctaccacaccctgcaggaagccaccaagcccctgcatcagttcttcctcaataccacaggcttctcattccaagactgccatgacagatgcctggccttcaccgatgtggccccccggggtgtggcttctggccagcgccgcagttggcttatcatacagcgctatgtagaaggctactttctgcaccccactgggctggagctcctcgtggatcatgggagcacagatgctgggcactgggccgtggagcaggtgtggtacaacgggaagttctatgggagcccagaggaactggctcggaagtatgcagatggagaggtggacgtggtggtcctggaggacccgctgcctgggggcaaggggcatgacagcacagaggagccgcccctcttctcctcccacaagccccgcggggacttccccagccccatccatgtgagcggcccccgcttggtccagccccacggccctcgcttcaggctggagggcaacgctgtgctctacggcggctggagctttgccttccggctgcgctcctcctccgggctgcaggtcctgaacgtgcacttcggcggagagcgcattgcctatgaggtcagcgtgcaagaggcagtggcgctgtatggaggacacacacctgcaggcatgcagaccaagtacctcgatgtcggctggggcctgggcagcgtcactcatgagttagcccccggcatcgactgcccggagaccgccaccttcctggacactttccactactatgatgccgatgacccggtccattatccccgagccctctgcctctttgaaatgcccacaggggtgccccttcggcggcactttaattccaactttaaaggtggcttcaacttctatgcggggctgaagggccaggtgctggtgctgcggacaacttcaactgtctacaattatgattacatttgggactttatcttctaccccaacggggtgatggaggccaagatgcatgccactggctacgtccacgccaccttctacacccccgaggggctgcgccacggcactcgcctgcacacccacctgattggcaacatacacactcacttggtgcactaccgcgtagacctggatgtggcaggcaccaagaacagcttccagacactgcagatgaagctagaaaacatcaccaacccctggagcccaagacaccgcgtggtccagccaactctggagcagacgcagtactcctgggagcgccaggcggccttccgcttcaaaaggaagctgcctaagtacctgctctttaccagcccccaggagaacccctggggccacaagcgcagctaccgcctgcagatccactccatggccgaccaggtgctgcccccaggctggcaggaggagcaggccatcacctgggcaaggtaccccctggcagtgaccaagtaccgggagtcggagctgtgcagcagcagcatctaccaccagaacgacccctggcacccgcccgtggtctttgagcagtttcttcacaacaacgagaacattgaaaatgaggacctggtggcctgggtgacggtgggcttcctgcacatcccccactcagaggacattcccaacacagccacacctgggaactccgtgggcttcctgctccggccattcaacttcttcccagaggacccctccctggcatccagagacactgtgatcgtgtggcctcgggacaacggccccaactacgtccagcgctggatccctgaggacagggactgctcgatgcctcccccttttagctacaatgggacctatagacctgtgtgaccagcccccagttcctcccccagttcctcccaggaagcccaggagcctcactggggcagacaataaaccctcagagcctc

SEQ ID NO: 329948 - DNA, 1702 bp, Homo sapiens
cgaagctgcaggacacggccagagtgttcacactacgaaggagggcccgggtgtcctaacgccgggttcacacgtgtgttcacagagctacggccacacacacgccttccaaggtggcaagctacaacacctctgaactggcactttcacatttttacaaatgcagctgctgcttctcaaaaaaacaaacaaacaaacaaaaaaccctccaattcagtttttataaatattaagcatgaatattaaaaggtgcttctacttttggttgtaaaaacacctgaatgactctaagactgatatgtattttcaagtctaagctgtcttacagaagatcttttataaatgtttccttataaatatctcaccattacaacaaattgttttaactgtttttctattagctctagctgcatatttgatgtaaatgacaattactgaaaaaatgtcagaaaaaacattttcagtactaacattaaagtgccatatgtaaaaaagaaaaatgtgatttgtataactaaataacacacaaacatcaagaggctatttatacaaataatttatttccactagggaaagtgcattactggtgaaggtattatcaatttattctacttgcttataatgttacagtgaatgttctggcttactctgcctcactttccattccccaaaatgatgtgtatgttgctaattttccaataaactcatatgaaccataaggaaacataaaaaaaaaaaaaaaaaaaaaaaaaaaactcggggactttatcttctaccccaacggggtgatggaggccaagatgcatgccactggctacgtccacgccaccttctacacccccgaggggctgcgccacggcactcgcctgcacacccacctgattggcaacatacacactcacttggtgcactaccgcgtagacctggatgtggcaggcaccaagaacagcttccagacactgcagatgaagctagaaaacatcaccaacccctggagcccaagacaccgcgtggtccagccaactctggagcagacgcagtactcctgggagcgccaggcggccttccgcttcaaaaggaagctgcctaagtacctgctctttaccagcccccaggagaacccctggggccacaagcgcagctaccgcctgcagatccactccatggccgaccaggtgctgcccccaggctggcaggaggagcaggccatcacctgggcaaggtaccccctggcagtgaccaagtaccgggagtcggagctgtgcagcagcagcatctaccaccagaacgacccctggcacccgcccgtggtctttgagcagtttcttcacaacaacgagaacattgaaaatgaggacctggtggcctgggtgacggtgggcttcctgcacatcccccactcagaggacattcccaacacagccacacctgggaactccgtgggcttcctgctccggccattcaacttcttcccagaggacccctccctggcatccagagacactgtgatcgtgtggcctcgggacaacggccccaactacgtccagcgctggatccctgaggacagggactgctcgatgcctcccccttttagctacaatgggacctatagacctgtgtgaccagcccccagttcctcccccagttcctcccaggaagcccaggagcctcactggggcagacaataaaccctcagagcctc

SEQ ID NO: 329949 - DNA, 508 bp, Homo sapiens
gcaagttcagaggtcacaacagagctgctcatctctttaaaaaggggctggagaggaattcagcaagtttccaggcagaactgaaaatgaccaaaggctagagtggcctccagtggtcagtactcagccctgcccactgaagcccaccctgtctcctgcaggacctggtggcctgggtgacggtgggcttcctgcacatcccccactcagaggacattcccaacacagccacacctgggaactccgtgggcttcctgctccggccattcaacttcttcccagaggacccctccctggcatccagagacactgtgatcgtgtggcctcgggacaacggccccaactacgtccagcgctggatccctgaggacagggactgctcgatgcctcccccttttagctacaatgggacctatagacctgtgtgaccagcccccagttcctcccccagttcctcccaggaagcccaggagcctcactggggcagacaataaaccctcagagcctc

SEQ ID NO: 329950 - DNA, 2491 bp, Homo sapiens
tctgattgacttcaagaaggagtcagagatcagcttaagggcaaaggctggaagcagagcgaactgggagcagagcacacagagccgtggagcgagagatgccggccctgggctgggccgtggctgccatcctgatgctgcagacggccatggcggagccctccccggggactctgcccaggaaggcaggggtgttttcagacctaagcaaccaagagctgaaggcagtgcacagcttcctctggtccaagaaggagctgaggctgcagccctccagtaccaccaccatggccaagaacaccgtgtttctcatcgagatgctgctgcccaagaagtaccatgtgctgaggtttctggataaaggtgaaaggcatcctgtgcgggaagcccgtgccgtcatcttctttggtgaccaggagcatcccaatgtcaccgagtttgctgtggggcccctgccagggccctgctacatgcgagcactgtcccccaggcctgggtaccagtcctcctgggcatcgaggcccatctccacagcagagtatgccctcctctaccacaccctgcaggaagccaccaagcccctgcatcagttcttcctcaataccacaggcttctcattccaagactgccatgacagatgcctggccttcaccgatgtggccccccggggtgtggcttctggccagcgccgcagttggcttatcatacagcgctatgtagaaggctactttctgcaccccactgggctggagctcctcgtggatcatgggagcacagatgctgggcactgggccgtggagcaggtgtggtacaacgggaagttctatgggagcccagaggaactggctcggaagtatgcagatggagaggtggacgtggtggtcctggaggacccgctgcctgggggcaaggggcatgacagcacagaggagccgcccctcttctcctcccacaagccccgcggggacttccccagccccatccatgtgagcggcccccgcttggtccagccccacggccctcgcttcaggctggagggcaacgctgtgctctacggcggctggagctttgccttccggctgcgctcctcctccgggctgcaggtcctgaacgtgcacttcggcggagagcgcattgcctatgaggtcagcgtgcaagaggcagtggcgctgtatggaggacacacacctgcaggcatgcagaccaagtacctcgatgtcggctggggcctgggcagcgtcactcatgagttagcccccggcatcgactgcccggagaccgccaccttcctggacactttccactactatgatgccgatgacccggtccattatccccgagccctctgcctctttgaaatgcccacaggggtgccccttcggcggcactttaattccaactttaaaggtggcttcaacttctatgcggggctgaagggccaggtgctggtgctgcggacaacttcaactgtctacaattatgattacatttgggactttatcttctaccccaacggggtgatggaggccaagatgcatgccactggctacgtccacgccaccttctacacccccgaggggctgcgccacggcactcgcctgcacacccacctgattggcaacatacacactcacttggtgcactaccgcgtagacctggatgtggcaggcaccaagaacagcttccagacactgcagatgaagctagaaaacatcaccaacccctggagcccaagacaccgcgtggtccagccaactctggagcagacgcagtactcctgggagcgccaggcggccttccgcttcaaaaggaagctgcctaagtacctgctctttaccagcccccaggagaacccctggggccacaagcgcagctaccgcctgcagatccactccatggccgaccaggtgctgcccccaggctggcaggaggagcaggccatcacctgggcaaggactgaggggggccagcccagggccctgagccaagctgcttcgcctgtgcctggcaggtaccccctggcagtgaccaagtaccgggagtcggagctgtgcagcagcagcatctaccaccagaacgacccctggcacccgcccgtggtctttgagcagtttcttcacaacaacgagaacattgaaaatgaggacctggtggcctgggtgacggtgggcttcctgcacatcccccactcagaggacattcccaacacagccacacctgggaactccgtgggcttcctgctccggccattcaacttcttcccagaggacccctccctggcatccagagacactgtgatcgtgtggcctcgggacaacggccccaactacgtccagcgctggatccctgaggacagggactgctcgatgcctcccccttttagctacaatgggacctatagacctgtgtgaccagcccccagttcctcccccagttcctcccaggaagcccaggagcctcactggggcagacaataaaccctcagagcctc

SEQ ID NO: 329951 - DNA, 2923 bp, Homo sapiens
agcgactgggaagacatgaccttacacaccttggttctttaacttgaccttgggaagacagggccagccagcaaggtggctggggagaaggccgaggtccccgggccgcagacgggaattgagggtcaggagccgaagtgaaactggagccggcgccacgagatgcagccctgaagggcacctccacccagtggccctcccccaccccactcccggggccctcctggcccagcgtcaccctgctgcgctaggacctacaagggcggcctctgggagccctctgctttacctcctctcctgggtcaggctgcagaaagaacaagctcctccaccctgcctgctttcaaatctgtacctgttgatgagagaacctccaggtttgtcccctactaccaatgatgaggcaaacacagagagaggaacccctttgactaaagctgaattgtaaaggactaaagccctaacttctcttcgaatgacctgcattcaaatcaagagcggttgaattctctgttttgctgtgggtgccagcctctatcagcccctgccctggtccatctgtcagcttcagagccgtggagcgagagatgccggccctgggctgggccgtggctgccatcctgatgctgcagacggccatggcggagccctccccggggactctgcccaggaaggcaggggtgttttcagacctaagcaaccaagagctgaaggcagtgcacagcttcctctggtccaagaaggagctgaggctgcagccctccagtaccaccaccatggccaagaacaccgtgtttctcatcgagatgctgctgcccaagaagtaccatgtgctgaggtttctggataaaggtgaaaggcatcctgtgcgggaagcccgtgccgtcatcttctttggtgaccaggagcatcccaatgtcaccgagtttgctgtggggcccctgccagggccctgctacatgcgagcactgtcccccaggcctgggtaccagtcctcctgggcatcgaggcccatctccacagcagagtatgccctcctctaccacaccctgcaggaagccaccaagcccctgcatcagttcttcctcaataccacaggcttctcattccaagactgccatgacagatgcctggccttcaccgatgtggccccccggggtgtggcttctggccagcgccgcagttggcttatcatacagcgctatgtagaaggctactttctgcaccccactgggctggagctcctcgtggatcatgggagcacagatgctgggcactgggccgtggagcaggtgtggtacaacgggaagttctatgggagcccagaggaactggctcggaagtatgcagatggagaggtggacgtggtggtcctggaggacccgctgcctgggggcaaggggcatgacagcacagaggagccgcccctcttctcctcccacaagccccgcggggacttccccagccccatccatgtgagcggcccccgcttggtccagccccacggccctcgcttcaggctggagggcaacgctgtgctctacggcggctggagctttgccttccggctgcgctcctcctccgggctgcaggtcctgaacgtgcacttcggcggagagcgcattgcctatgaggtcagcgtgcaagaggcagtggcgctgtatggaggacacacacctgcaggcatgcagaccaagtacctcgatgtcggctggggcctgggcagcgtcactcatgagttagcccccggcatcgactgcccggagaccgccaccttcctggacactttccactactatgatgccgatgacccggtccattatccccgagccctctgcctctttgaaatgcccacaggggtgccccttcggcggcactttaattccaactttaaaggtggcttcaacttctatgcggggctgaagggccaggtgctggtgctgcggacaacttcaactgtctacaattatgattacatttgggactttatcttctaccccaacggggtgatggaggccaagatgcatgccactggctacgtccacgccaccttctacacccccgaggggctgcgccacggcactcgcctgcacacccacctgattggcaacatacacactcacttggtgcactaccgcgtagacctggatgtggcaggcaccaagaacagcttccagacactgcagatgaagctagaaaacatcaccaacccctggagcccaagacaccgcgtggtccagccaactctggagcagacgcagtactcctgggagcgccaggcggccttccgcttcaaaaggaagctgcctaagtacctgctctttaccagcccccaggagaacccctggggccacaagcgcagctaccgcctgcagatccactccatggccgaccaggtgctgcccccaggctggcaggaggagcaggccatcacctgggcaaggtaccccctggcagtgaccaagtaccgggagtcggagctgtgcagcagcagcatctaccaccagaacgacccctggcacccgcccgtggtctttgagcagtttcttcacaacaacgagaacattgaaaatgaggacctggtggcctgggtgacggtgggcttcctgcacatcccccactcagaggacattcccaacacagccacacctgggaactccgtgggcttcctgctccggccattcaacttcttcccagaggacccctccctggcatccagagacactgtgatcgtgtggcctcgggacaacggccccaactacgtccagcgctggatccctgaggacagggactgctcgatgcctcccccttttagctacaatgggacctatagacctgtgtgaccagcccccagttcctcccccagttcctcccaggaagcccaggagcctcactggggcagacaataaaccctcagagcctc

SEQ ID NO: 329952 - DNA, 1956 bp, Homo sapiens
tctgattgacttcaagaaggagtcagagatcagcttaagggcaaaggctggaagcagagcgaactgggagcagagcacacagagccgtggagcgagagatgccggccctgggctgggccgtggctgccatcctgatgctgcagacggccatggcggagccctccccggggactctgcccaggaaggcaggggtgttttcagacctaagcaaccaagagctgaaggcagtgcacagcttcctctggtccaagaaggagctgaggctgcagccctccagtaccaccaccatggccaagaacaccgtgtttctcatcgagatgctgctgcccaagaagtaccatgtgctgaggtttctggataaaggtgaaaggcatcctgtgcgggaagcccgtgccgtcatcttctttggtgaccaggagcatcccaatgtcaccgagtttgctgtggggcccctgccagggccctgctacatgcgagcactgtcccccaggcctgggtaccagtcctcctgggcatcgaggcccatctccacagcagagtatgccctcctctaccacaccctgcaggaagccaccaagcccctgcatcagttcttcctcaataccacaggcttctcattccaagactgccatgacagatgcctggccttcaccgatgtggccccccggggtgtggcttctggccagcgccgctgtatggaggacacacacctgcaggcatgcagaccaagtacctcgatgtcggctggggcctgggcagcgtcactcatgagttagcccccggcatcgactgcccggagaccgccaccttcctggacactttccactactatgatgccgatgacccggtccattatccccgagccctctgcctctttgaaatgcccacaggggtgccccttcggcggcactttaattccaactttaaaggtggcttcaacttctatgcggggctgaagggccaggtgctggtgctgcggacaacttcaactgtctacaattatgattacatttgggactttatcttctaccccaacggggtgatggaggccaagatgcatgccactggctacgtccacgccaccttctacacccccgaggggctgcgccacggcactcgcctgcacacccacctgattggcaacatacacactcacttggtgcactaccgcgtagacctggatgtggcaggcaccaagaacagcttccagacactgcagatgaagctagaaaacatcaccaacccctggagcccaagacaccgcgtggtccagccaactctggagcagacgcagtactcctgggagcgccaggcggccttccgcttcaaaaggaagctgcctaagtacctgctctttaccagcccccaggagaacccctggggccacaagcgcagctaccgcctgcagatccactccatggccgaccaggtgctgcccccaggctggcaggaggagcaggccatcacctgggcaaggtaccccctggcagtgaccaagtaccgggagtcggagctgtgcagcagcagcatctaccaccagaacgacccctggcacccgcccgtggtctttgagcagtttcttcacaacaacgagaacattgaaaatgaggacctggtggcctgggtgacggtgggcttcctgcacatcccccactcagaggacattcccaacacagccacacctgggaactccgtgggcttcctgctccggccattcaacttcttcccagaggacccctccctggcatccagagacactgtgatcgtgtggcctcgggacaacggccccaactacgtccagcgctggatccctgaggacagggactgctcgatgcctcccccttttagctacaatgggacctatagacctgtgtgaccagcccccagttcctcccccagttcctcccaggaagcccaggagcctcactggggcagacaataaaccctcagagcctc

SEQ ID NO: 329953 - DNA, 2573 bp, Homo sapiens
tctgattgacttcaagaaggagtcagagatcagcttaagggcaaaggctggaagcagagcgaactgggagcagagcacacagagccgtggagcgagagatgccggccctgggctgggccgtggctgccatcctgatgctgcagacggccatggcggagccctccccggggactctgcccaggaaggcaggggtgttttcagacctaagcaaccaagagctgaaggcagtgcacagcttcctctggtccaagaaggagctgaggctgcagccctccagtaccaccaccatggccaagaacaccgtgtttctcatcgagatgctgctgcccaagaagtaccatgtgctgaggtttctggataaaggtgaaaggcatcctgtgcgggaagcccgtgccgtcatcttctttggtgaccaggagcatcccaatgtcaccgagtttgctgtggggcccctgccagggccctgctacatgcgagcactgtcccccaggcctgggtaccagtcctcctgggcatcgaggcccatctccacagcagagtatgccctcctctaccacaccctgcaggaagccaccaagcccctgcatcagttcttcctcaataccacaggcttctcattccaagactgccatgacagatgcctggccttcaccgatgtggccccccggggtgtggcttctggccagcgccgcagttggcttatcatacagcgctatgtagaaggctactttctgcaccccactgggctggagctcctcgtggatcatgggagcacagatgctgggcactgggccgtggagcaggtgtggtacaacgggaagttctatgggagcccagaggaactggctcggaagtatgcagatggagaggtggacgtggtggtcctggaggacccgctgcctgggggcaaggggcatgacagcacagaggagccgcccctcttctcctcccacaagccccgcggggacttccccagccccatccatgtgagcggcccccgcttggtccagccccacggccctcgcttcaggctggagggcaacgctgtgctctacggcggctggagctttgccttccggctgcgctcctcctccgggctgcaggtcctgaacgtgcacttcggcggagagcgcattgcctatgaggtcagcgtgcaagaggcagtggcgctgtatggaggacacacacctgcaggcatgcagaccaagtacctcgatgtcggctggggcctgggcagcgtcactcatgagttagcccccggcatcgactgcccggagaccgccaccttcctggacactttccactactatgatgccgatgacccggtccattatccccgagccctctgcctctttgaaatgcccacaggggtgccccttcggcggcactttaattccaactttaaaggtggcttcaacttctatgcggggctgaagggccaggtgctggtgctgcggacaacttcaactgtctacaattatgattacatttgggactttatcttctaccccaacggggtgatggaggccaagatgcatgccactggctacgtccacgccaccttctacacccccgaggggctgcgccacggcactcgcctgcacacccacctgattggcaacatacacactcacttggtgcactaccgcgtagacctggatgtggcaggcaccaagaacagcttccagacactgcagatgaagctagaaaacatcaccaacccctggagcccaagacaccgcgtggtccagccaactctggagcagacgcagtactcctgggagcgccaggcggccttccgcttcaaaaggaagctgcctaagtacctgctctttaccagcccccaggagaacccctggggccacaagcgcagctaccgcctgcagatccactccatggccgaccaggtgctgcccccaggctggcaggaggagcaggccatcacctgggcaagtgggctgaggaagaggaggaggaggggctggtcttgctgtctcacggtggcagaggcggaagaaactccaaatgaaagtggacttgtgtgctgggcgcaggagctcacgcctgtaatcccagcactttgggaggccaaggtaccccctggcagtgaccaagtaccgggagtcggagctgtgcagcagcagcatctaccaccagaacgacccctggcacccgcccgtggtctttgagcagtttcttcacaacaacgagaacattgaaaatgaggacctggtggcctgggtgacggtgggcttcctgcacatcccccactcagaggacattcccaacacagccacacctgggaactccgtgggcttcctgctccggccattcaacttcttcccagaggacccctccctggcatccagagacactgtgatcgtgtggcctcgggacaacggccccaactacgtccagcgctggatccctgaggacagggactgctcgatgcctcccccttttagctacaatgggacctatagacctgtgtgaccagcccccagttcctcccccagttcctcccaggaagcccaggagcctcactggggcagacaataaaccctcagagcctc

SEQ ID NO: 329954 - DNA, 2183 bp, Homo sapiens
tctgattgacttcaagaaggagtcagagatcagcttaagggcaaaggctggaagcagagcgaactgggagcagagcacacagagccgtggagcgagagatgccggccctgggctgggccgtggctgccatcctgatgctgcagacggccatggcggagccctccccggggactctgcccaggaaggcaggggtgttttcagacctaagcaaccaagagctgaaggcagtgcacagcttcctctggtccaagaaggagctgaggctgcagccctccagtaccaccaccatggccaagaacaccgtgtttctcatcgagatgctgctgcccaagaagtaccatgtgctgaggtttctggataaaggtgaaaggcatcctgtgcgggaagcccgtgccgtcatcttctttggtgaccaggagcatcccaatgtcaccgagtttgctgtggggcccctgccagggccctgctacatgcgagcactgtcccccaggcctgggtaccagtcctcctgggcatcgaggcccatctccacagcagagtatgccctcctctaccacaccctgcaggaagccaccaagcccctgcatcagttcttcctcaataccacaggcttctcattccaagactgccatgacagatgcctggccttcaccgatgtggccccccggggtgtggcttctggccagcgccgcagttggcttatcatacagcgctatgtagaaggctactttctgcaccccactgggctggagctcctcgtggatcatgggagcacagatgctgggcactgggccgtggagcaggtgtggtacaacgggaagttctatgggagcccagaggaactggctcggaagtatgcagatggagaggtggacgtggtggtcctggaggacccgctgcctgggggcaaggggcatgacagcacagaggagccgcccctcttctcctcccacaagccccgcggggacttccccagccccatccatgtgagcggcccccgcttggtccagccccacggccctcgcttcaggctggagggcaacgctgtgctctacggcggctggagctttgccttccggctgcgctcctcctccgggctgcaggtcctgaacgtgcacttcggcggagagcgcattgcctatgaggtcagcgtgcaagaggcagtggcgctgtatggaggacacacacctgcaggcatgcagaccaagtacctcgatgtcggctggggcctgggcagcgtcactcatgagttagcccccggcatcgactgcccggagaccgccaccttcctggacactttccactactatgatgccgatgacccggtccattatccccgagccctctgcctctttgaaatgcccacaggggtgccccttcggcggcactttaattccaactttaaaggtggcttcaacttctatgcggggctgaagggccaggtgctggtgctgcggacaacttcaactgtctacaattatgattacatttgggactttatcttctaccccaacggggtgatggaggccaagatgcatgccactggctacgtccacgccaccttctacacccccgaggggctgcgccacggcactcgcctgcacacccacctgattggcaacatacacactcacttggtgcactaccgcgtagacctggatgtggcaggcaccaagaacagcttccagacactgcagatgaagctagaaaacatcaccaacccctggagcccaagacaccgcgtggtccagccaactctggagcagacgcagtactcctgggagcgccaggcggccttccgcttcaaaaggaagctgcctaagtacctgctctttaccagcccccaggagaacccctggggccacaagcgcagctaccgcctgcagatccactccatggccgaccaggtgctgcccccaggctggcaggaggagcaggccatcacctgggcaaggtaccccctggcagtgaccaagtaccgggagtcggagctgtgcagcagcagcatctaccaccagaacgacccctggcacccgcccgtggtctttgagcagtttcttcacaacaacgagaacattgaaaatgaggacctggtggcctgggtgacggtgggcttcctgcacatcccccactcagaggacattcccaacacagccacacctcagagcctcgctctgtgtgct

SEQ ID NO: 329955 - DNA, 2307 bp, Homo sapiens
tctgattgacttcaagaaggagtcagagatcagcttaagggcaaaggctggaagcagagcgaactgggagcagagcacacagagccgtggagcgagagatgccggccctgggctgggccgtggctgccatcctgatgctgcagacggccatggcggagccctccccggggactctgcccaggaaggcaggggtgttttcagacctaagcaaccaagagctgaaggcagtgcacagcttcctctggtccaagaaggagctgaggctgcagccctccagtaccaccaccatggccaagaacaccgtgtttctcatcgagatgctgctgcccaagaagtaccatgtgctgaggtttctggataaaggtgaaaggcatcctgtgcgggaagcccgtgccgtcatcttctttggtgaccaggagcatcccaatgtcaccgagtttgctgtggggcccctgccagggccctgctacatgcgagcactgtcccccaggcctgggtaccagtcctcctgggcatcgaggcccatctccacagcagagtatgccctcctctaccacaccctgcaggaagccaccaagcccctgcatcagttcttcctcaataccacaggcttctcattccaagactgccatgacagatgcctggccttcaccgatgtggccccccggggtgtggcttctggccagcgccgcagttggcttatcatacagcgctatgtagaaggctactttctgcaccccactgggctggagctcctcgtggatcatgggagcacagatgctgggcactgggccgtggagcaggtgtggtacaacgggaagttctatgggagcccagaggaactggctcggaagtatgcagatggagaggtggacgtggtggtcctggaggacccgctgcctgggggcaaggggcatgacagcacagaggagccgcccctcttctcctcccacaagccccgcggggacttccccagccccatccatgtgagcggcccccgcttggtccagccccacggccctcgcttcaggctggagggcaacgctgtgctctacggcggctggagctttgccttccggctgcgctcctcctccgggctgcaggtcctgaacgtgcacttcggcggagagcgcattgcctatgaggtcagcgtgcaagaggcagtggcgctgtatggaggacacacacctgcaggcatgcagaccaagtacctcgatgtcggctggggcctgggcagcgtcactcatgagttagcccccggcatcgactgcccggagaccgccaccttcctggacactttccactactatgatgccgatgacccggtccattatccccgagccctctgcctctttgaaatgcccacaggggtgccccttcggcggcactttaattccaactttaaaggtggcttcaacttctatgcggggctgaagggccaggtgctggtgctgcggacaacttcaactgtctacaattatgattacatttgggactttatcttctaccccaacggggtgatggaggccaagatgcatgccactggctacgtccacgccaccttctacacccccgaggggctgcgccacggcactcgcctgcacacccacctgattggcaacatacacactcacttggtgcactaccgcgtagacctggatgtggcaggcaccaagaacagcttccagacactgcagatgaagctagaaaacatcaccaacccctggagcccaagacaccgcgtggtccagccaactctggagcagacgcagtactcctgggagcgccaggcggccttccgcttcaaaaggaagctgcctaagtacctgctctttaccagcccccaggagaacccctggggccacaagcgcagctaccgcctgcagatccactccatggccgaccaggtgctgcccccaggctggcaggaggagcaggccatcacctgggcaaggtgaggaagacccagggggcctgggggagggtcagtggcttccctcagtgtgtgtgtctgtgtctgtctgtgtttgtgtctatggggttcctagtctatgtggatatacacatatacgtatgtgtatatctgtgtgtacaattgaccctgaacaatatggggggtaggggtgccaaccccccaaagcagtaaagaagccaagtgtaactatgactcccccacaacgtaactacgaatagcctactgttaaccggaagccttaccactaacagaaacattccgtgaacacatattttgtaggttctgtgtgtcagatactgtgttcttacaataaagtaagctagagaaaagaa

SEQ ID NO: 329956 - DNA, 536 bp, Homo sapiens
tacttggtcactgccagggggtaccttgcccaggtgatggcctgctcctcctgccagcctgggggcagcacctggtcggccatggagtcggagctgtgcagcagcagcatctaccaccagaacgacccctggcacccgcccgtggtctttgagcagtttcttcacaacaacgagaacattgaaaatgaggacctggtggcctgggtgacggtgggcttcctgcacatcccccactcagaggacattcccaacacagccacacctgggaactccgtgggcttcctgctccggccattcaacttcttcccagaggacccctccctggcatccagagacactgtgatcgtgtggcctcgggacaacggccccaactacgtccagcgctggatccctgaggacagggactgctcgatgcctcccccttttagctacaatgggacctatagacctgtgtgaccagcccccagttcctcccccagttcctcccaggaagcccaggagcctcactggggcagacaataaaccctcagagcctc

SEQ ID NO: 329957 - DNA, 424 bp, Homo sapiens
tctgattgacttcaagaaggagtcagagatcagcttaagggcaaaggctggaagcagagcgaactgggagcagagcacacagagccgtggagcgagagatgccggccctgggctgggccgtggctgccatcctgatgctgcagacggccatggcggagccctccccggggactctgcccaggaaggcaggggtgttttcagacctaagcaaccagagacactgtgatcgtgtggcctcgggacaacggccccaactacgtccagcgctggatccctgtcctcagggatcctctgggaagacaccgaaaacgagccgaaccaaggaggcaaaatcgaaaaaaaaaggcagagcacaggaacactcgagaacagaaacgaaaacaacgacaagagaaacaaaggcaaggaaaacaacggaggagaa

SEQ ID NO: 329958 - DNA, 299 bp, Homo sapiens
ggagccctctgctttacctcctctcctgggtcaggctgcagaaagaacaagctcctccaccctgcctggtaggcatggaaggagggcaagtgttggtagccatggtaactcggggtagccatattttcgtgcagtcactctgaccccatctcgatggacaaggattgtcccatctgtttctacaactgtttcccaaacaggcagtgctgtcctaaggaagcacccacctggcccaaacatgctgtgctttctttgtggctgccttgcctccccaaccaattgtaaccccttggaatcag

SEQ ID NO: 329959 - DNA, 2405 bp, Homo sapiens
aggctggtactggtctgagtcgtaggatagcgaactgggagcagagcacacagagccgtggagcgagagatgccggccctgggctgggccgtggctgccatcctgatgctgcagacggccatggcggagccctccccggggactctgcccaggaaggcaggggtgttttcagacctaagcaaccaagagctgaaggcagtgcacagcttcctctggtccaagaaggagctgaggctgcagccctccagtaccaccaccatggccaagaacaccgtgtttctcatcgagatgctgctgcccaagaagtaccatgtgctgaggtttctggataaaggtgaaaggcatcctgtgcgggaagcccgtgccgtcatcttctttggtgaccaggagcatcccaatgtcaccgagtttgctgtggggcccctgccagggccctgctacatgcgagcactgtcccccaggcctgggtaccagtcctcctgggcatcgaggcccatctccacagcagagtatgccctcctctaccacaccctgcaggaagccaccaagcccctgcatcagttcttcctcaataccacaggcttctcattccaagactgccatgacagatgcctggccttcaccgatgtggccccccggggtgtggcttctggccagcgccgcagttggcttatcatacagcgctatgtagaaggctactttctgcaccccactgggctggagctcctcgtggatcatgggagcacagatgctgggcactgggccgtggagcaggtgtggtacaacgggaagttctatgggagcccagaggaactggctcggaagtatgcagatggagaggtggacgtggtggtcctggaggacccgctgcctgggggcaaggggcatgacagcacagaggagccgcccctcttctcctcccacaagccccgcggggacttccccagccccatccatgtgagcggcccccgcttggtccagccccacggccctcgcttcaggctggagggcaacgctgtgctctacggcggctggagctttgccttccggctgcgctcctcctccgggctgcaggtcctgaacgtgcacttcggcggagagcgcattgcctatgaggtcagcgtgcaagaggcagtggcgctgtatggaggacacacacctgcaggcatgcagaccaagtacctcgatgtcggctggggcctgggcagcgtcactcatgagttagcccccggcatcgactgcccggagaccgccaccttcctggacactttccactactatgatgccgatgacccggtccattatccccgagccctctgcctctttgaaatgcccacaggggtgccccttcggcggcactttaattccaactttaaaggtggcttcaacttctatgcggggctgaagggccaggtgctggtgctgcggacaacttcaactgtctacaattatgattacatttgggactttatcttctaccccaacggggtgatggaggccaagatgcatgccactggctacgtccacgccaccttctacacccccgaggggctgcgccacggcactcgcctgcacacccacctgattggcaacatacacactcacttggtgcactaccgcgtagacctggatgtggcaggcaccaagaacagcttccagacactgcagatgaagctagaaaacatcaccaacccctggagcccaagacaccgcgtggtccagccaactctggagcagacgcagtactcctgggagcgccaggcggccttccgcttcaaaaggaagctgcctaagtacctgctctttaccagcccccaggagaacccctggggccacaagcgcagctaccgcctgcagatccactccatggccgaccaggtgctgcccccaggctggcaggaggagcaggccatcacctgggcaaggtaccccctggcagtgaccaagtaccgggagtcggagctgtgcagcagcagcatctaccaccagaacgacccctggcacccgcccgtggtctttgagcagtttcttcacaacaacgagaacattgaaaatgaggacctggtggcctgggtgacggtgggcttcctgcacatcccccactcagaggacattcccaacacagccacacctgggaactccgtgggcttcctgctccggccattcaacttcttcccagaggacccctccctggcatccagagacactgtgatcgtgtggcctcgggacaacggccccaactacgtccagcgctggatccctgaggacagggactgctcgatgcctcccccttttagctacaatgggacctatagacctgtgtgaccagcccccagttcctcccccagttcctcccaggaagcccaggagcctcactggggcagacaataaaccctcagagcctc

SEQ ID NO: 329960 - DNA, 2616 bp, Homo sapiens
  misc_feature (2444)..(2444): n is a, c, g, or t
  misc_feature (2449)..(2449): n is a, c, g, or t
tctgattgacttcaagaaggagtcagagatcagcttaagggcaaaggctggaagcagagcgaactgggagcagagcacacagagccgtggagcgagagatgccggccctgggctgggccgtggctgccatcctgatgctgcagacggccatggcggagccctccccggggactctgcccaggaaggcaggggtgttttcagacctaagcaaccaagagctgaaggcagtgcacagcttcctctggtccaagaaggagctgaggctgcagccctccagtaccaccaccatggccaagaacaccgtgtttctcatcgagatgctgctgcccaagaagtaccatgtgctgaggtttctggataaaggtgaaaggcatcctgtgcgggaagcccgtgccgtcatcttctttggtgaccaggagcatcccaatgtcaccgagtttgctgtggggcccctgccagggccctgctacatgcgagcactgtcccccaggcctgggtaccagtcctcctgggcatcgaggcccatctccacagcagagtatgccctcctctaccacaccctgcaggaagccaccaagcccctgcatcagttcttcctcaataccacaggcttctcattccaagactgccatgacagatgcctggccttcaccgatgtggccccccggggtgtggcttctggccagcgccgcagttggcttatcatacagcgctatgtagaaggctactttctgcaccccactgggctggagctcctcgtggatcatgggagcacagatgctgggcactgggccgtggagcaggtgtggtacaacgggaagttctatgggagcccagaggaactggctcggaagtatgcagatggagaggtggacgtggtggtcctggaggacccgctgcctgggggcaaggggcatgacagcacagaggagccgcccctcttctcctcccacaagccccgcggggacttccccagccccatccatgtgagcggcccccgcttggtccagccccacggccctcgcttcaggctggagggcaacgctgtgctctacggcggctggagctttgccttccggctgcgctcctcctccgggctgcaggtcctgaacgtgcacttcggcggagagcgcattgcctatgaggtcagcgtgcaagaggcagtggcgctgtatggaggacacacacctgcaggcatgcagaccaagtacctcgatgtcggctggggcctgggcagcgtcactcatgagttagcccccggcatcgactgcccggagaccgccaccttcctggacactttccactactatgatgccgatgacccggtccattatccccgagccctctgcctctttgaaatgcccacaggggtgccccttcggcggcactttaattccaactttaaaggtggcttcaacttctatgcggggctgaagggccaggtgctggtgctgcggacaacttcaactgtctacaattatgattacatttgggactttatcttctaccccaacggggtgatggaggccaagatgcatgccactggctacgtccacgccaccttctacacccccgaggggctgcgccacggcactcgcctgcacacccacctgattggcaacatacacactcacttggtgcactaccgcgtagacctggatgtggcaggcaccaagaacagcttccagacactgcagatgaagctagaaaacatcaccaacccctggagcccaagacaccgcgtggtccagccaactctggagcagacgcagtactcctgggagcgccaggcggccttccgcttcaaaaggaagctgcctaagtacctgctctttaccagcccccaggagaacccctggggccacaagcgcagctaccgcctgcagatccactccatggccgaccaggtgctgcccccaggctggcaggaggagcaggccatcacctgggcaaggtaccccctggcagtgaccaagtaccgggagtcggagctgtgcagcagcagcatctaccaccagaacgacccctggcacccgcccgtggtctttgagcagtttcttcacaacaacgagaacattgaaaatgaggacctggtggcctgggtgacggtgggcttcctgcacatcccccactcagaggacattcccaacacagccacacctgggaactccgtgggcttcctgctccggccattcaacttcttcccagaggacccctccctggcatccagagacactgtgatcgtgtggcctcgggacaacggccccaactacgtccagcgctggatccctgaggacagggactgctcgatgcctcccccttttagctacaatgggacctatagacctgtgtgaccagcccccagttcctcccccagttcctcccaggaagcccaggagcctcactggggcagacaataaaccctcagagcctcaaaaaaaaanaaaanaaaaaaaaaaaaaaaaaaaaaaaaaaaaaaacttgtgggccgctttgcccaagtgaattttagactggagcaagtttatcattgcggcccaatttggggctacctgggcaattcgccctatggggggggtataaattcaagggcccgggtttaaaagggtgggacgg

SEQ ID NO: 329961 - DNA, 2457 bp, Homo sapiens
tctgattgacttcaagaaggagtcagagatcagcttaagggcaaaggctggaagcagagcgaactgggagcagagcacacagagccgtggagcgagagatgccggccctgggctgggccgtggctgccatcctgatgctgcagacggccatggcggagccctccccggggactctgcccaggaaggcaggggtgttttcagacctaagcaaccaagagctgaaggcagtgcacagcttcctctggtccaagaaggagctgaggctgcagccctccagtaccaccaccatggccaagaacaccgtgtttctcatcgagatgctgctgcccaagaagtaccatgtgctgaggtttctggataaaggtgaaaggcatcctgtgcgggaagcccgtgccgtcatcttctttggtgaccaggagcatcccaatgtcaccgagtttgctgtggggcccctgccagggccctgctacatgcgagcactgtcccccaggcctgggtaccagtcctcctgggcatcgaggcccatctccacagcagagtatgccctcctctaccacaccctgcaggaagccaccaagcccctgcatcagttcttcctcaataccacaggcttctcattccaagactgccatgacagatgcctggccttcaccgatgtggccccccggggtgtggcttctggccagcgccgcagttggcttatcatacagcgctatgtagaaggctactttctgcaccccactgggctggagctcctcgtggatcatgggagcacagatgctgggcactgggccgtggagcaggtgtggtacaacgggaagttctatgggagcccagaggaactggctcggaagtatgcagatggagaggtggacgtggtggtcctggaggacccgctgcctgggggcaaggggcatgacagcacagaggagccgcccctcttctcctcccacaagccccgcggggacttccccagccccatccatgtgagcggcccccgcttggtccagccccacggccctcgcttcaggctggagggcaacgctgtgctctacggcggctggagctttgccttccggctgcgctcctcctccgggctgcaggtcctgaacgtgcacttcggcggagagcgcattgcctatgaggtcagcgtgcaagaggcagtggcgctgtatggaggacacacacctgcaggcatgcagaccaagtacctcgatgtcggctggggcctgggcagcgtcactcatgagttagcccccggcatcgactgcccggagaccgccaccttcctggacactttccactactatgatgccgatgacccggtccattatccccgagccctctgcctctttgaaatgcccacaggggtgccccttcggcggcactttaattccaactttaaaggtggcttcaacttctatgcggggctgaagggccaggtgctggtgctgcggacaacttcaactgtctacaattatgattacatttgggactttatcttctaccccaacggggtgatggaggccaagatgcatgccactggctacgtccacgccaccttctacacccccgaggggctgcgccacggcactcgcctgcacacccacctgattggcaacatacacactcacttggtgcactaccgcgtagacctggatgtggcaggcaccaagaacagcttccagacactgcagatgaagctagaaaacatcaccaacccctggagcccaagacaccgcgtggtccagccaactctggagcagacgcagtactcctgggagcgccaggcggccttccgcttcaaaaggaagctgcctaagtacctgctctttaccagcccccaggagaacccctggggccacaagcgcagctaccgcctgcagatccactccatggccgaccaggtgctgcccccaggctggcaggaggagcaggccatcacctgggcaaggtaccccctggcagtgaccaagtaccgggagtcggagctgtgcagcagcagcatctaccaccagaacgacccctggcacccgcccgtggtctttgagcagtttcttcacaacaacgagaacattgaaaatgaggacctggtggcctgggtgacggtgggcttcctgcacatcccccactcagaggacattcccaacacagccacacctgggaactccgtgggcttcctgctccggccattcaacttcttcccagaggacccctccctggcatccagagacactgtgatcgtgtggcctcgggacaacggccccaactacgtccagcgctggatccctgaggacagggactgctcgatgcctcccccttttagctacaatgggacctatagacctgtgtgaccagcccccagttcctcccccagttcctcccaggaagcccaggagcctcactggggcagacaataaaccctcagagcctcctcagagcctcgctctgtgtgct

SEQ ID NO: 329962 - DNA, 2342 bp, Homo sapiens
tctgattgacttcaagaaggagtcagagatcagcttaagggcaaaggctggaagcagagcgaactgggagcagagcacacagagccgtggagcgagagatgccggccctgggctgggccgtggctgccatcctgatgctgcagacggccatggcggagccctccccggggactctgcccaggaaggcaggggtgttttcagacctaagcaaccaagagctgaaggcagtgcacagcttcctctggtccaagaaggagctgaggctgcagccctccagtaccaccaccatggccaagaacaccgtgtttctcatcgagatgctgctgcccaagaagtaccatgtgctgaggtttctggataaaggtgaaaggcatcctgtgcgggaagcccgtgccgtcatcttctttggtgaccaggagcatcccaatgtcaccgagtttgctgtggggcccctgccagggccctgctacatgcgagcactgtcccccaggcctgggtaccagtcctcctgggcatcgaggcccatctccacagcagagtatgccctcctctaccacaccctgcaggaagccaccaagcccctgcatcagttcttcctcaataccacaggcttctcattccaagactgccatgacagatgcctggccttcaccgatgtggccccccggggtgtggcttctggccagcgccgcagttggcttatcatacagcgctatgtagaaggctactttctgcaccccactgggctggagctcctcgtggatcatgggagcacagatgctgggcactgggccgtggagcaggtgtggtacaacgggaagttctatgggagcccagaggaactggctcggaagtatgcagatggagaggtggacgtggtggtcctggaggacccgctgcctgggggcaaggggcatgacagcacagaggagccgcccctcttctcctcccacaagccccgcggggacttccccagccccatccatgtgagcggcccccgcttggtccagccccacggccctcgcttcaggctggagggcaacgctgtgctctacggcggctggagctttgccttccggctgcgctcctcctccgggctgcaggtcctgaacgtgcacttcggcggagagcgcattgcctatgaggtcagcgtgcaagaggcagtggcgctgtatggaggacacacacctgcaggcatgcagaccaagtacctcgatgtcggctggggcctgggcagcgtcactcatgagttagcccccggcatcgactgcccggagaccgccaccttcctggacactttccactactatgatgccgatgacccggtccattatccccgagccctctgcctctttgaaatgcccacaggggtgccccttcggcggcactttaattccaactttaaaggtggcttcaacttctatgcggggctgaagggccaggtgctggtgctgcggacaacttcaactgtctacaattatgattacatttgggactttatcttctaccccaacggggtgatggaggccaagatgcatgccactggctacgtccacgccaccttctacacccccgaggggctgcgccacggcactcgcctgcacacccacctgattggcaacatacacactcacttggtgcactaaccgcgtggtccagccaactctggagcagacgcagtactcctgggagcgccaggcggccttccgcttcaaaaggaagctgcctaagtacctgctctttaccagcccccaggagaacccctggggccacaagcgcagctaccgcctgcagatccactccatggccgaccaggtgctgcccccaggctggcaggaggagcaggccatcacctgggcaaggtaccccctggcagtgaccaagtaccgggagtcggagctgtgcagcagcagcatctaccaccagaacgacccctggcacccgcccgtggtctttgagcagtttcttcacaacaacgagaacattgaaaatgaggacctggtggcctgggtgacggtgggcttcctgcacatcccccactcagaggacattcccaacacagccacacctgggaactccgtgggcttcctgctccggccattcaacttcttcccagaggacccctccctggcatccagagacactgtgatcgtgtggcctcgggacaacggccccaactacgtccagcgctggatccctgaggacagggactgctcgatgcctcccccttttagctacaatgggacctatagacctgtgtgaccagcccccagttcctcccccagttcctcccaggaagcccaggagcctcactggggcagacaataaaccctcagagcctc

SEQ ID NO: 329963 - DNA, 2385 bp, Homo sapiens
tctgattgacttcaagaaggagtcagagatcagcttaagggcaaaggctggaagcagagcgaactgggagcagagcacacagagccgtggagcgagagatgccggccctgggctgggccgtggctgccatcctgatgctgcagacggccatggcggagccctccccggggactctgcccaggaaggcaggggtgttttcagacctaagcaaccaagagctgaaggcagtgcacagcttcctctggtccaagaaggagctgaggctgcagccctccagtaccaccaccatggccaagaacaccgtgtttctcatcgagatgctgctgcccaagaagtaccatgtgctgaggtttctggataaaggtgaaaggcatcctgtgcgggaagcccgtgccgtcatcttctttggtgaccaggagcatcccaatgtcaccgagtttgctgtggggcccctgccagggccctgctacatgcgagcactgtcccccaggcctgggtaccagtcctcctgggcatcgaggcccatctccacagcagagtatgccctcctctaccacaccctgcaggaagccaccaagcccctgcatcagttcttcctcaataccacaggcttctcattccaagactgccatgacagatgcctggccttcaccgatgtggccccccggggtgtggcttctggccagcgccgcagttggcttatcatacagcgctatgtagaaggctactttctgcaccccactgggctggagctcctcgtggatcatgggagcacagatgctgggcactgggccgtggagcaggtgtggtacaacgggaagttctatgggagcccagaggaactggctcggaagtatgcagatggagaggtggacgtggtggtcctggaggacccgctgcctgggggcaaggggcatgacagcacagaggagccgcccctcttctcctcccacaagccccgcggggacttccccagccccatccatgtgagcggcccccgcttggtccagccccacggccctcgcttcaggctggagggcaacgctgtgctctacggcggctggagctttgccttccggctgcgctcctcctccgggctgcaggtcctgaacgtgcacttcggcggagagcgcattgcctatgaggtcagcgtgcaagaggcagtggcgctgtatggaggacacacacctgcaggcatgcagaccaagtacctcgatgtcggctggggcctgggcagcgtcactcatgagttagcccccggcatcgactgcccggagaccgccaccttcctggacactttccactactatgatgccgatgacccggtccattatccccgagccctctgcctctttgaaatgcccacaggggtgccccttcggcggcactttaattccaactttaaaggtggcttcaacttctatgcggggctgaagggccaggtgctggtgctgcggacaacttcaactgtctacaattatgattacatttgggactttatcttctaccccaacggggtgatggaggccaagatgcatgccactggctacgtccacgccaccttctacacccccgaggggctgcgccacggcactcgcctgcacacccacctgattggcaacatacacactcacttggtgcactaccgcgtagacctggatgtggcaggcaccaagaacagcttccagacactgcagatgaagctagaaaacatcaccaacccctggagcccaagacaccgcgtggtccagccaactctggagcagacgcagtactcctgggagcgccaggcggccttccgcttcaaaaggaagctgcctaagtacctgctctttaccagcccccaggagaacccctggggccacaagcgcagctaccgcctgcagatccactccatggccgaccaggtgctgcccccaggctggcaggaggagcaggccatcacctgggcaaggtaccccctggcagtgaccaagtaccgggagtcggagctgtgcagcagcagcatctaccaccagaacgacccctggcacccgcccgtggtctttgagcagtttcttcacaacaacgagaacattgaaaatgaggacctggtggcctgggtgacggtgggcttcctgcacatcccccactcagaggacccctccctggcatccagagacactgtgatcgtgtggcctcgggacaacggccccaactacgtccagcgctggatccctgaggacagggactgctcgatgcctcccccttttagctacaatgggacctatagacctgtgtgaccagcccccagttcctcccccagttcctcccaggaagcccaggagcctcactggggcagacaataaaccctcagagcctcctcagagcctcgctctgtgtgct

SEQ ID NO: 329964 - DNA, 1963 bp, Homo sapiens
tctgattgacttcaagaaggagtcagagatcagcttaagggcaaaggctggaagcagagcgaactgggagcagagcacacagagccgtggagcgagagatgccggccctgggctgggccgtggctgccatcctgatgctgcagacggccatggcggagccctccccggggactctgcccaggaaggcaggggtgttttcagacctaagcaaccaagagctgaaggcagtgcacagcttcctctggtccaagaaggagctgaggctgcagccctccagtaccaccaccatggccaagaacaccgtgtttctcatcgagatgctgctgcccaagaagtaccatgtgctgaggtttctggataaaggtgaaaggcatcctgtgcgggaagcccgtgccgtcatcttctttggtgaccaggagcatcccaatgtcaccgagtttgctgtggggcccctgccagggccctgctacatgcgagcactgtcccccaggcctgggtaccagtcctcctgggcatcgaggcccatctccacagcagagtatgccctcctctaccacaccctgcaggaagccaccaagcccctgcatcagttcttcctcaataccacaggcttctcattccaagactgccatgacagatgcctggccttcaccgatgtggccccccggggtgtggcttctggccagcgccgcagttggcttatcatacagcgctatgtagaaggctactttctgcaccccactgggctggagctcctcgtggatcatgggagcacagatgctgggcactgggccgtggagcaggtgtggtacaacgggaagttctatgggagcccagaggaactggctcggaagtatgcagatggagaggtggacgtggtggtcctggaggacccgctgcctgggggcaaggggcatgacagcacagaggagccgcccctcttctcctcccacaagccccgcggggacttccccagccccatccatgtgagcggcccccgcttggtccagccccacggccctcgcttcaggctggagggcaacgctgtgctctacggcggctggagctttgccttccggctgcgctcctcctccgggctgcaggtcctgaacgtgcacttcggcggagagcgcattgcctatgaggtcagcgtgcaagaggcagtggcgctgtatggaggacacacacctgcaggcatgcagaccaagtacctcgatgtcggctggggcctgggcagcgtcactcatgagttagcccccggcatcgactgcccggagaccgccaccttcctggacactttccactactatgatgccgatgacccggtccattatccccgagccctctgcctctttgaaatgcccacaggggtgccccttcggcggcactttaattccaactttaaaggtggcttcaacttctatgcggggctgaagggccaggtgctggtgctgcggacaacttcaactgtctacaattatgattacatttgggactttatcttctaccccaacggggtgatggaggccaagatgcatgccactggctacgtccacgccaccttctacacccccgaggggctgcgccacggcactcgcctgcacacccacctgattggcaacatacacactcacttggtgcactaccgcgtagacctggatgtggcaggcaccaagaacagcttccagacactgcagatgaagctagaaaacatcaccaacccctggagcccaagacaccgcgtggtccagccaactctggagcagacgcagtactcctgggagcgccaggcggccttccgcttcaaaaggaagctgcctaagtacctgctctttaccagcccccaggagaacccctggggccacaagcgcagctaccgcctgcagatccactccatgccacaacgcagggttgcgcaactcaagaacgtcaaggaagacacaggccatcacaaagagcagaa

SEQ ID NO: 329965 - DNA, 1017 bp, Homo sapiens
  misc_feature (901)..(901): n is a, c, g, or t
  misc_feature (904)..(904): n is a, c, g, or t
  misc_feature (915)..(916): n is a, c, g, or t
  misc_feature (921)..(921): n is a, c, g, or t
  misc_feature (999)..(999): n is a, c, g, or t
agcgactgggaagacatgaccttacacaccttggttctttaacttgaccttgggaagacagggccagccagcaaggtggctggggagaaggccgaggtccccgggccgcagacgggaattgagggtcaggagccgaagtgaaactggagccggcgccacgagatgcagccctgaagggcacctccacccagtggccctcccccaccccactcccggggccctcctggcccagcgtcaccctgctgcgctaggacctacaagggcggcctctgggagccctctgctttacctcctctcctgggtcaggctgcagaaagaacaagctcctccaccctgcctgctttcaaatctgtacctgttgatgagagaacctccaggtttgtcccctactaccaatgatgaggcaaacacagagagaggaacccctttgactaaagctgaattgtaaaggactaaagccctaacttctcttcgaatgacctgcattcaaatcaagagcggttgaattctctgttttgctgtgggtgccagcctctatcagcccctgccctggtccatctgtcagcttcagagccgtggagcgagagatgccggccctgggctgggccgtggctgccatcctgatgctgcagacggccatggcggagccctccccggggactctgcccaggaaggcaggggtgttttcagacctaagcaaccaagagctgaaggcagtgcacagcttcctctggtccaagaaggagctgaggctgcagccctccagtaccaccaccatggccaagaacaccgtgtttctcatcgagatgctgctgcccaagaagtaccatgtgctgaggtttctggataaaggtgaaaggcatcctgtgcgggaagcccgtgccgtcatcttctttttttnggnttctgctgggnntttgnggtctttttgtttttttggggttggattatgggattgtcgcttgtctgaatttgggggcttggaaataaggcttggtngtattgatgtcatgggct

SEQ ID NO: 329966 - DNA, 124 bp, Homo sapiens
ggatgattggaggagagagactaattagtttattaagcatgaaagagttttttcttctttgggaagctttttttatatatagctcagtcttctaagaagtaagttcacaatttttcctttgttt

SEQ ID NO: 329967 - DNA, 616 bp, Homo sapiens
ggctggaaactcaggacgctgcagctgaaacgttccggctccggctctgctggccggtctaaagcggcagccgccggggcgcaatgcgagcggctggcgtaggcttggtggactgtcactgccacctctccgccccggactttgaccgcgtatgtgagggcgatacgggaccagagggagcagggaggcccccgtcctttcccctcgtgttatctttgctctcctcccttgggacgaaaccccatatcccccgcccagacccttgtttatggccatatgaccttgcccctcatttccctattccctatttaacctcagacataccgatttttttttcctgattcagtagcggtaagctatctccacaaggcttttgtttgctcttctgagttcctggaatcgttccctcactccccttggctggcctgtttttcccctcggggctctcacctcctggctgagatgccactctttgtgggaagcggtcctcgaaacgcgttcaaatcggggagaggtcgggcgcgggctcacgcccgtaatcccagcactttgggaggccgaggcgggcgctgcgcatctcctgtgtccaggagatcgtgaccagcctgggcaacat

SEQ ID NO: 329968 - DNA, 2466 bp, Homo sapiens
ggctggaaactcaggacgctgcagctgaaacgttccggctccggctctgctggccggtctaaagcggcagccgccggggcgcaatgcgagcggctggcgtaggcttggtggactgtcactgccacctctccgccccggactttgaccgcgatttggatgatgtgttggagaaagccaagaaggccaatgttgtggcccttgtggcagttgccgaacattcaggagaatttgaaaagattatgcaactttcagaaaggtataatgggtttgtcctgccatgcttgggtgttcatccagttcaaggacttccaccagaagaccaaagaagtgtcacactaaaggatttggatgtagctttgcccattattgagaattataaggatcggttgttggcaattggagaggttggactagatttctcccccagatttgctggcactggtgaacagaaggaagagcaaagacaagtcctaatcagacagatccagttagccaaaagactaaatttgcctgtaaatgtgcactcacgctctgctggaagacctaccatcaaccttttacaagagcaaggtgctgagaaggtactgctgcatgcatttgatggtcggccatctgtagccatggaaggagtaagagctgggtacttcttctcaattcccccttctatcataagaagtggacagcagaaacttgtgaaacaattgcctttaacttctatatgcttagaaacagattcacctgcactaggaccagaaaaacaggtacggaatgagccctggaacatttctatttcagcagaatatattgcccaggtgaaagggatctcagtggaagaagttatagaagtgacgacacagaatgcattaaaactgtttcctaagctccgacacttgctccagaaatagcttcaaaaccatccattacaaaatcgaatcaactgcagggggcagcatttgaaaaatagaaatgttctgatgaagaatctgaactgaagaagctgttttatagggttatagaagattgtaattgtagagaaatatttctcttagaaataaaactgggcttggatcctgaaaccctgggttctgattctagccttgtgctgcttttcaattagccgagttctggcaggatattgggaaaatactgctacttcttacattgcccttttatatagaaccaccacctgaactgaaaccattgctactgggaagggtggctcccacaggaagagtataagcactactgtgatgaggatggagtaagctaaagtatacttttttttttttttgatggagtttcgctgttgttgcccaggctggagtgcaatggcacgatcttggctcactgcaacctccacttcccaggttctagcgagtctcctccctcagcctcacaagtagctgggattacaggcatgtgccaccatgcccagctaattttgtatttttagtagagacagggtttctccatgttggtcaggctggtctcgaactcccgacctcaggtgatccgcccgcctcggcctcccaaagtgctgggattacaggcatgagccactgcgccagcctaaagtgtgttcttaccacctatttttcttcccataggagttagccagtgaagggagaatgtctggttttctatgctgtcagaaatctcttttctaggtttgtaaaattgaacttttagtacttcgaattatttctctttaagataaaaatgcatacgatttttacactgatcttagatttttgacttatgaggccagtggtttaaacaatcattattgaataccaagcccaaaagtttagttaatacaccaattgtaagttctggtctgaattttgtcaacatatttagaatgtaaatggcattattaaaaatgtatctgatttctctgtgaacagtaatatttcatatttttaagtttaaaaatgttagtgtaagccaggcacagtggcattcacctgtagtgccaaccactcaggaggctgagatgggagaccttttaagcctgagtttgagtcaggcctgggcaacatagatgtgagcacctatctctaaaaatgtaaataaataaaaatctcaaaaaaattaaaaatctcaagtgtaaaaacagttctgtagatagatggtagtgatggtagcacatcaatgtgaaggtatttaatgccactgaactgtacacttataacgaattaggataaattttatgttatgtgtatttactacaattttttaaaaatcgtatatgtagtttaacaggtgtggtcaatatcaaaacttaggtatttaatcttgttaaattatataagcagaaaatgctggaaaaagtacctgtcatagaaaaaaataaacttcctaaatcaaaaaaaaaacaaactcaaaaacaataaaatgacagatcagacaaagaacaaaaacccaacaacagactggaaaacggaaaacaaagaacaaaatggt

SEQ ID NO: 329969 - DNA, 2490 bp, Homo sapiens
ggctggaaactcaggacgctgcagctgaaacgttccggctccggctctgctggccggtctaaagcggcagccgccggggcgcaatgcgagcggctggcgtaggcttggtggactgtcactgccacctctccgccccggactttgaccgcgatttggatgatgtgttggagaaagccaagaaggccaatgttgtggcccttgtggcagttgccgaacattcaggagaatttgaaaagattatgcaactttcagaaaggtataatgggtttgtcctgccatgcttgggtgttcatccagttcaaggacttccaccagaagaccaaagaagtgtcacactaaaggatttggatgtagctttgcccattattgagaattataaggatcggttgttggcaattggagaggttggactagatttctcccccagatttgctggcactggtgaacagaaggaagagcaaagacaagtcctaatcagacagatccagttagccaaaagactaaatttgcctgtaaatgtgcactcacgctctgctggaagacctaccatcaaccttttacaagagcaaggtgctgagaaggtactgctgcatgcatttgatggtcggccatctgtagccatggaaggagtaagagctgggtacttcttctcaattcccccttctatcataagaagtggacagctgctttctcttttctctaagaagcagaaacttgtgaaacaattgcctttaacttctatatgcttagaaacagattcacctgcactaggaccagaaaaacaggtacggaatgagccctggaacatttctatttcagcagaatatattgcccaggtgaaagggatctcagtggaagaagttatagaagtgacgacacagaatgcattaaaactgtttcctaagctccgacacttgctccagaaatagcttcaaaaccatccattacaaaatcgaatcaactgcagggggcagcatttgaaaaatagaaatgttctgatgaagaatctgaactgaagaagctgttttatagggttatagaagattgtaattgtagagaaatatttctcttagaaataaaactgggcttggatcctgaaaccctgggttctgattctagccttgtgctgcttttcaattagccgagttctggcaggatattgggaaaatactgctacttcttacattgcccttttatatagaaccaccacctgaactgaaaccattgctactgggaagggtggctcccacaggaagagtataagcactactgtgatgaggatggagtaagctaaagtatacttttttttttttttgatggagtttcgctgttgttgcccaggctggagtgcaatggcacgatcttggctcactgcaacctccacttcccaggttctagcgagtctcctccctcagcctcacaagtagctgggattacaggcatgtgccaccatgcccagctaattttgtatttttagtagagacagggtttctccatgttggtcaggctggtctcgaactcccgacctcaggtgatccgcccgcctcggcctcccaaagtgctgggattacaggcatgagccactgcgccagcctaaagtgtgttcttaccacctatttttcttcccataggagttagccagtgaagggagaatgtctggttttctatgctgtcagaaatctcttttctaggtttgtaaaattgaacttttagtacttcgaattatttctctttaagataaaaatgcatacgatttttacactgatcttagatttttgacttatgaggccagtggtttaaacaatcattattgaataccaagcccaaaagtttagttaatacaccaattgtaagttctggtctgaattttgtcaacatatttagaatgtaaatggcattattaaaaatgtatctgatttctctgtgaacagtaatatttcatatttttaagtttaaaaatgttagtgtaagccaggcacagtggcattcacctgtagtgccaaccactcaggaggctgagatgggagaccttttaagcctgagtttgagtcaggcctgggcaacatagatgtgagcacctatctctaaaaatgtaaataaataaaaatctcaaaaaaattaaaaatctcaagtgtaaaaacagttctgtagatagatggtagtgatggtagcacatcaatgtgaaggtatttaatgccactgaactgtacacttataacgaattaggataaattttatgttatgtgtatttactacaattttttaaaaatcgtatatgtagtttaacaggtgtggtcaatatcaaaacttaggtatttaatcttgttaaattatataagcagaaaatgctggaaaaagtacctgtcatagaaaaaaataaacttcctaaatcaaaaaaaaaacaaactcaaaaacaataaaatgacagatcagacaaagaacaaaaacccaacaacagactggaaaacggaaaacaaagaacaaaatggt

SEQ ID NO: 329970 - DNA, 2353 bp, Homo sapiens
ggctggaaactcaggacgctgcagctgaaacgttccggctccggctctgctggccggtctaaagcggcagccgccggggcgcaatgcgagcggctggcgtaggcttggtggactgtcactgccacctctccgccccggactttgaccgcgatttggatgatgtgttggagaaagccaagaaggccaatgttgtggcccttgtggcagttgccgaacattcaggagaatttgaaaagattatgcaactttcagaaaggtataatgggtttgtcctgccatgcttgggtgttcatccagttcaaggacttccaccagaagaccaaagaagtgtcacactaaaggatttggatgtagctttgcccattattgagaattataaggatcggttgttggcaattggagaggttggactagatttctcccccagatttgctggcactggtgaacagaaggaagagcaaagacaagtcctaatcagacagatccagttagccaaaagactaaatttgcctgtaaatgtgcactcacgctctgctggaagacctaccatcaaccttttacaagagcaagcagaaacttgtgaaacaattgcctttaacttctatatgcttagaaacagattcacctgcactaggaccagaaaaacaggtacggaatgagccctggaacatttctatttcagcagaatatattgcccaggtgaaagggatctcagtggaagaagttatagaagtgacgacacagaatgcattaaaactgtttcctaagctccgacacttgctccagaaatagcttcaaaaccatccattacaaaatcgaatcaactgcagggggcagcatttgaaaaatagaaatgttctgatgaagaatctgaactgaagaagctgttttatagggttatagaagattgtaattgtagagaaatatttctcttagaaataaaactgggcttggatcctgaaaccctgggttctgattctagccttgtgctgcttttcaattagccgagttctggcaggatattgggaaaatactgctacttcttacattgcccttttatatagaaccaccacctgaactgaaaccattgctactgggaagggtggctcccacaggaagagtataagcactactgtgatgaggatggagtaagctaaagtatacttttttttttttttgatggagtttcgctgttgttgcccaggctggagtgcaatggcacgatcttggctcactgcaacctccacttcccaggttctagcgagtctcctccctcagcctcacaagtagctgggattacaggcatgtgccaccatgcccagctaattttgtatttttagtagagacagggtttctccatgttggtcaggctggtctcgaactcccgacctcaggtgatccgcccgcctcggcctcccaaagtgctgggattacaggcatgagccactgcgccagcctaaagtgtgttcttaccacctatttttcttcccataggagttagccagtgaagggagaatgtctggttttctatgctgtcagaaatctcttttctaggtttgtaaaattgaacttttagtacttcgaattatttctctttaagataaaaatgcatacgatttttacactgatcttagatttttgacttatgaggccagtggtttaaacaatcattattgaataccaagcccaaaagtttagttaatacaccaattgtaagttctggtctgaattttgtcaacatatttagaatgtaaatggcattattaaaaatgtatctgatttctctgtgaacagtaatatttcatatttttaagtttaaaaatgttagtgtaagccaggcacagtggcattcacctgtagtgccaaccactcaggaggctgagatgggagaccttttaagcctgagtttgagtcaggcctgggcaacatagatgtgagcacctatctctaaaaatgtaaataaataaaaatctcaaaaaaattaaaaatctcaagtgtaaaaacagttctgtagatagatggtagtgatggtagcacatcaatgtgaaggtatttaatgccactgaactgtacacttataacgaattaggataaattttatgttatgtgtatttactacaattttttaaaaatcgtatatgtagtttaacaggtgtggtcaatatcaaaacttaggtatttaatcttgttaaattatataagcagaaaatgctggaaaaagtacctgtcatagaaaaaaataaacttcctaaatcaaaaaaaaaacaaactcaaaaacaataaaatgacagatcagacaaagaacaaaaacccaacaacagactggaaaacggaaaacaaagaacaaaatggt

SEQ ID NO: 329971 - DNA, 194 bp, Homo sapiens
gttggactagatttctcccccagatttgctggcactggtgaacagaaggaagagcaaagacaagtcctaatcagacagatccagttagccaaaagactaaatttgcctgtgtaggttaattattttcctatgttaatagctatagagcaaattaaataatgatcagagttctcctgaaatggaactctacattt

SEQ ID NO: 329972 - DNA, 2376 bp, Homo sapiens
aatcctcccaggagctgacacttaaggctgaaaagacaaggagccacccaagcaagggggatttggatgatgtgttggagaaagccaagaaggccaatgttgtggcccttgtggcagttgccgaacattcaggagaatttgaaaagattatgcaactttcagaaaggtataatgggtttgtcctgccatgcttgggtgttcatccagttcaaggacttccaccagaagaccaaagaagtgtcacactaaaggatttggatgtagctttgcccattattgagaattataaggatcggttgttggcaattggagaggttggactagatttctcccccagatttgctggcactggtgaacagaaggaagagcaaagacaagtcctaatcagacagatccagttagccaaaagactaaatttgcctgtaaatgtgcactcacgctctgctggaagacctaccatcaaccttttacaagagcaaggtgctgagaaggtactgctgcatgcatttgatggtcggccatctgtagccatggaaggagtaagagctgggtacttcttctcaattcccccttctatcataagaagtggacagcagaaacttgtgaaacaattgcctttaacttctatatgcttagaaacagattcacctgcactaggaccagaaaaacaggtacggaatgagccctggaacatttctatttcagcagaatatattgcccaggtgaaagggatctcagtggaagaagttatagaagtgacgacacagaatgcattaaaactgtttcctaagctccgacacttgctccagaaatagcttcaaaaccatccattacaaaatcgaatcaactgcagggggcagcatttgaaaaatagaaatgttctgatgaagaatctgaactgaagaagctgttttatagggttatagaagattgtaattgtagagaaatatttctcttagaaataaaactgggcttggatcctgaaaccctgggttctgattctagccttgtgctgcttttcaattagccgagttctggcaggatattgggaaaatactgctacttcttacattgcccttttatatagaaccaccacctgaactgaaaccattgctactgggaagggtggctcccacaggaagagtataagcactactgtgatgaggatggagtaagctaaagtatacttttttttttttttgatggagtttcgctgttgttgcccaggctggagtgcaatggcacgatcttggctcactgcaacctccacttcccaggttctagcgagtctcctccctcagcctcacaagtagctgggattacaggcatgtgccaccatgcccagctaattttgtatttttagtagagacagggtttctccatgttggtcaggctggtctcgaactcccgacctcaggtgatccgcccgcctcggcctcccaaagtgctgggattacaggcatgagccactgcgccagcctaaagtgtgttcttaccacctatttttcttcccataggagttagccagtgaagggagaatgtctggttttctatgctgtcagaaatctcttttctaggtttgtaaaattgaacttttagtacttcgaattatttctctttaagataaaaatgcatacgatttttacactgatcttagatttttgacttatgaggccagtggtttaaacaatcattattgaataccaagcccaaaagtttagttaatacaccaattgtaagttctggtctgaattttgtcaacatatttagaatgtaaatggcattattaaaaatgtatctgatttctctgtgaacagtaatatttcatatttttaagtttaaaaatgttagtgtaagccaggcacagtggcattcacctgtagtgccaaccactcaggaggctgagatgggagaccttttaagcctgagtttgagtcaggcctgggcaacatagatgtgagcacctatctctaaaaatgtaaataaataaaaatctcaaaaaaattaaaaatctcaagtgtaaaaacagttctgtagatagatggtagtgatggtagcacatcaatgtgaaggtatttaatgccactgaactgtacacttataacgaattaggataaattttatgttatgtgtatttactacaattttttaaaaatcgtatatgtagtttaacaggtgtggtcaatatcaaaacttaggtatttaatcttgttaaattatataagcagaaaatgctggaaaaagtacctgtcatagaaaaaaataaacttcctaaatcaaaaaaaaaacaaactcaaaaacaataaaatgacagatcagacaaagaacaaaaacccaacaacagactggaaaacggaaaacaaagaacaaaatggt

SEQ ID NO: 329973 - DNA, 385 bp, Homo sapiens
tgcatgcggtggattaaaatatgttcaccctgacagaaatcttttagttgaagtgaaaaagcctccgtcaattctgattgcaacaaaggttgctgctgcgagtgagagggacttgccaagactgcaagtttttcaagctctattctggagatacgtttgttacttggttctcagctttgacttggttataatcttgtcttggcttgttctctttccagaatacactagttttcatttttctttggccttttctcaagatttatgaaagggggtatttagctttttgtctggcaaatagcaaaggctgtttgagttccctaatcaataattgtaaaataactagaaattgatctatgccagctgtaaacccatgcatgcatttatt

SEQ ID NO: 329974 - DNA, 672 bp, Homo sapiens
acagagtacgagtacatctggttgaaagagaaaaggcagagagaaaagcagactttttggagttgttgttctcaggcactaacagattcatcccttatatgcatatgaatggacaataagatttcttggatattttcatggcaaagggtaagagtgaagctatcctggacaagaactttgacaggacaatactattcactctgaaggaccaaaaaatgagcagaaaatttgggataaatgtcaacaagatttgaaccctaaagaaaagcaagcatcgagttagacagacgtccatattcattcaactgggaaaataaaactgcagtcccaacatcagaatttccttggtcagttggttattgcgggacagcattcttctgcatgacagtattgtctccttaccagccacagaggaggctgtgagagagaggatttgggaaattggtgcaaatgagaaatcttggaaatctagaactaaagcctttcagcaggaaatccagatgctcactaagtgactagagcagctgcatcatctttaagaagaaggtgctcaagaatcatcccaagctgaagaaaaaagtattgggaacaaaaaagacccttgaaatgtctagaaagaaaaattgagatcaaggactttttcaagagagattagacttggacaggaagaaa

SEQ ID NO: 329975 - DNA, 129 bp, Homo sapiens
cttctaggaagtggcgccagctggggtgagatcacttcctcacccgcctgcctggccccccttggcttcctctccccatggccccatttggcctgcccagggctcaatgaggggggagcttggccatgc

SEQ ID NO: 329976 - DNA, 144 bp, Homo sapiens
aacactggaaacactttgtcaattttttaaaagtttgacttgggaaacaaaccaatggaagagcccataagtgaggaaaagagtcagtgggagtgagctagagtattgcttgctttatgccagagtatatcaaccacaggcctc

SEQ ID NO: 329977 - DNA, 128 bp, Homo sapiens
tacctatgctttattttataataaagagattcacaaaaataaaatatggcaataatggcccatatccttctccagctccctccccaacccccttacccaataatcagctagacctccattttgcacag

SEQ ID NO: 329978 - DNA, 409 bp, Homo sapiens
gggtccccgaatgtggaggaggaggaagaggatggacggagtggagaagttcagggagacccgagagtagatgcagagtagatgactgaacaacagaatatgccaaatggtatttgacaaatgattgaggaatgttagcagttgcattagttatgaatcttgttgaaacaccagaaaccaactcaagatagcttaaacaagttgggggcagaggggaggatgaagagaggtgggttaaagggtacaaacatacagttagatagaaggcataaattcaatgtttgatagcagagtaaggtgactaccgttaataaaaatgtattgtattgggaggatggacaccctaaaaaccctgacttctttgttatgtattatatacatgtaataaaatttcacatgtaccccatgg

SEQ ID NO: 329979 - DNA, 218 bp, Homo sapiens
ggcagcaaagccaagaggaaacaggctcgacctcagccaactcctcgggtcgggatccccaagaggcttcccacacgcaacctgctgggactccggcacccatcatgcagaaacgcaagcaggaccctagaacagctaccctgagcctcagagtccagctctgccctcaggttgagagccctcagccctgtcctttctagattggaggactgtcctcc

SEQ ID NO: 329980 - DNA, 192 bp, Homo sapiens
gactatgctaattcttttacaaatataatctcatctaagccccatgacaatcctgaaaggtgagttttattgtcatcagcccatttagaggtagagaaactatggattagacagattagaaaactggtaggacatcatgcagctattaagtgtcgagctgggagtcctatttcggttggctctaaaactctt

SEQ ID NO: 329981 - DNA, 458 bp, Homo sapiens
catgggtggacagcggggaactgtggagagcacggggcttgcccttgtcagtaggaaggccctgagcatctagattccatctgaaactggaaaggcttgaggacgcgcagggcagggcctgggccttgaagagagggcctgttaacctccctgtggacagcaccaggcaagggctcttggaggaggaagtgctcattcctgggataaaaattcctttccaggatatgctggtttggaaggaagtctttgccgtcttcttggtctaacagtgtgtcctgccttcctctgggtggaagccttatattaatactaacgaggctaattttcttctcttaggcaggcagacagacccactgaggtttttgaccaaaggagagagtcaggatcccaggcatatgctaaactggttggcccaaatccaacagattgcaaagagtggcagggcctggcagctgtct

SEQ ID NO: 329982 - DNA, 560 bp, Homo sapiens
tgcagatcactgcactccagcctatgtgatagagggagacgccgtcttaaaaaaaaaaaaaatcaactcaacacggctgaaggaattaaatctaagatctgaaactgtaaaaattctgggagataacatcagaaaaaccattttaggcattggcttaggcaaagacttcatgaccaagaacccaaaagtaaatgcaacaaagacagataaatagatgggacttaattaaattgaaaagcttcagcacagcaaaagaaataatcagcaaagttaatagacaacccacagagtgggagaaagtttttgtagtctatacatctaacaatcaatgctcagactctacaaagaactcaaacaaattagcaagaagtaaacaaacaatactatcaaaaagtgggctaaagacatgaagagacagttttcaaaagaagatatagaaatggccaacaaacatatgaagaaatgctcaacatcactaatgatcagggaaatgcaaatcaaaaccacaatgtgataccatcctattccttcaagatcggccataatcacaaaatcaaaaa

SEQ ID NO: 329983 - DNA, 163 bp, Homo sapiens
cttggcttacgggaactttgcatctttaaaaaaaaaaataccatgaaaatccatcctttgcttcagacacactaggctaaaaatagctcagtcagccagtaagtgtgtgtaatttttcctttgtgcatctccctatccactgatttcttcctctcagcagaca

SEQ ID NO: 329984 - DNA, 113 bp, Homo sapiens
tgagaggctcttcctggatcccttattttctacaggagaggaggaaaacacctgggatgctccagtgctcttacgcagataatgatcattaacatcagcctctctgatcaaag

SEQ ID NO: 329985 - DNA, 2888 bp, Homo sapiens
gggttcgggcttgtcaggttctagctcatgttttttggctagacctatgaccattttcgctagacttcactgcacgttttctcaagtatcttctttgtccctaatgtgtgacacctcatcatggacacgctactttagctaaggcatgaccagcaatgaacagtagtaagagatggggtcgcgctttgttgcctaggctgatcttgaactcctgggctcaagcaatatgcctgctttggcctctcagagtgctgggattacagatatgtgctgattagaaggctcacttgtgcagtgtggaggataaccagtgccttacaaaatggggtttgggagtgacctgaagaattcacatgaagcagtgttaaaattgcaagactgggaattacggttactggaaacagtaaagaaatttatggccctgagaataaaaagtgataaagaatatgcatctactttacagaacctttgtaatcaagttgataaggaaagtactgtccaaatgaattatgtcagcaacgtatccaagtcttggctacttatgattcagcagacagaacaacttagtaggataatgaagacacatgcagaggacttgaactctggacctttacacaggctcaccatgatgattaaggacaagcagcaggtgaagaaaagttacataggtgttcatcagcagatagaggcagagatgatcaaggttaccaaaacagaattggagaagttaaaatgcagctatagacaattaataaaagaaatgaattctgccaaagagaaatataaagaagctttagctaaagggaaggaaactgaaaaggccaaggaacgatacgacaaagccacaatgaaacttcatatgttgcacaatcagtatgtattggcgttgaaaggggcacagctccatcagaatcagtattatgatatcacacttcccctgcttctggactccttacaaaagatgcaagaagaaatgataaaagcactcaaaggtatatttgatgaatacagccagataaccagtcttgtcacagaggaaatagtgaatgtccataaagagattcaaatgtcggttgaacagatagatcctagtacagaatacaataatttcatagatgttcacagaacaacggctgctaaagaacaagaaatagagtttgatacttccttactggaagaaaatgaaaatcttcaggcaaatgagatcatgtggaataacttaacagcagaaagtttgcaagtaatgttgaaaacgttagcggaagaacttatgcaaacacagcagatgcttttaaacaaggaggaggctgttttggagttagagaagagaattgaagaatcttctgaaacttgtgagaagaagtctgatattgtgcttctgctaagccaaaaacaggcacttgaagaactgaaacagtcagtccagcagctgagatgcactgaagcaaagttttcagcacagaaggaattactagagcaaaaagtgcaagaaaatgatgggaaagagccacctccagtagtaaattatgaagaagatgcacgatcagttacatctatggaaagaaaggagaggctatccaaatttgaatctattcgtcattcaattgctggaataattaggtctccaaaatctgcagtgggctcttcagcactttctgatatgatctccatcagtgagaagcctttggcagaacaggactggtaccatggtgcaattcccagaatagaagctcaagaactgttaaaaaaacaaggagactttttggtgcgagagagtcatgggaaacctggtgaatatgtcctttctgtatattctgatggacagaggagacattttatcatacaatatgttgataacatgtatcgattcgagggcactgggttttcaaacattcctcaacttatagatcatcactatacaacaaaacaggtcatcactaagaaatcaggtgtagttctgctgaatcctattcctaaggacaagaaatggattctcagtcatgaagatgtcatattgggagaattactgggcaagggaaattttggtgaagtatataagggcacattaaaggataaaacttctgttgctgttaaaacatgtaaagaagatcttcctcaggaattgaaaataaaatttttacaagaagccaaaattctcaagcaatatgatcatcccaatattgtcaaacttataggagtttgcacacaaagacagcctgtctacatcattatggaactggtttcaggaggtgatttcctcacctttctgagaaggaagaaggatgaactaaaactcaaacagttagtgaaattttcattagacgctgctgctggtatgttgtatctcgagagtaaaaactgtatacacagggaccttgctgcaagaaactgcctggtaggtgaaaataatgttctgaaaatcagtgactttggaatgtctcgtcaagaggatggtggagtgtattcatcttctggcttaaagcagattcccattaaatggacagcaccggaagctcttaattatgggagatacagttcagagagtgacgtgtggagctttggcatccttctctgggagaccttcagcttaggggtttgtccgtaccctggaatgacaaatcagcaagcaagagagcaagtagaaagaggataccggatgtcagctccccagcactgtccagaggatatttccaaaatcatgatgaagtgttgggattataaacctgaaaatcgccctaagttcagtgaacttcagaaagagctcactatcatcaagagaaaactcacatagtgacaggatggcgccaaactcagccttcaggactctgtcctccagcagagtaacattattgttctcattaacaatgaatttataccacattaccttc

SEQ ID NO: 329986 - DNA, 3835 bp, Homo sapiens
tttagtagacaaaacacttttattactgaataagcattaaacgagactgtgatacacatcacaggcaatttgctaagagattgcaaagacagaaatcttgcccttttgtatagccaagtatatacgacccattacatacacgttttcaagttgaacaataactagtcctcaagtaagaggacctgacatttgtgacattaactttacttaataattggggtgaccatctgtgttagttaattggttttatccagaggaaaaacaaacttctcctgtctttatgacggaaggtagttttgcaacacggagcaagttgctcaccgaagttacgctcctactctctcacagaaactgggagatagggaaggatgctactccgttgatatgtgcagcatttcaaaaaaaaaaaaaaaaaaaaggtccagagacattcctgactgagcatacagttgacaagacctatctagtcctcaagtggatttatacacatttcaaagagttgagaaagtacttaacaattaagaaagtacttaagttttctaagacaaatgctcggagagaaagggacgggaaatctcatcctccattttcaatagggagaattaagcctcttatttaaaatttttatgttggtttttgtttatttagctttaaaacagtagacttaaaaaaagtccaacttaagatttatgtttttttatgtgtagggctgttctctacggttaaataaataaccctgcttagagaaaatattcaccactcttctttggctcctatgtaactcagtttttgagagggaggggaaataccggattgacgctatgtggttcaaccaatgcaaaagataacaccgccttaaaaagtctactacaggaacatgggagggtcacaccctcgaataatgacgcatacctatcctactgttactgatcacctagtaataatcttgtagttcacattactcatttttcaccaaattcttttggtgaaggacgcttcagaaacggccatcactgaagagcagacccgtttgggttctccacgcattctagactcccgaagagctcatgttttttggctagacctatgaccattttcgctagacttcactgcacgttttctcaagtatcttctttgtccctaatgtgtgacacctcatcatggacacgctactttagctaaggcatgaccagcaatgaacagtagtaagatatgtgctgattagaaggctcacttgtgcagtgtggaggataaccagtgccttacaaaatggggtttgggagtgacctgaagaattcacatgaagcagtgttaaaattgcaagactgggaattacggttactggaaacagtaaagaaatttatggccctgagaataaaaagtgataaagaatatgcatctactttacagaacctttgtaatcaagttgataaggaaagtactgtccaaatgaattatgtcagcaacgtatccaagtcttggctacttatgattcagcagacagaacaacttagtaggataatgaagacacatgcagaggacttgaactctggacctttacacaggctcaccatgatgattaaggacaagcagcaggtgaagaaaagttacataggtgttcatcagcagatagaggcagagatgatcaaggttaccaaaacagaattggagaagttaaaatgcagctatagacaattaataaaagaaatgaattctgccaaagagaaatataaagaagctttagctaaagggaaggaaactgaaaaggccaaggaacgatacgacaaagccacaatgaaacttcatatgttgcacaatcagtatgtattggcgttgaaaggggcacagctccatcagaatcagtattatgatatcacacttcccctgcttctggactccttacaaaagatgcaagaagaaatgataaaagcactcaaaggtatatttgatgaatacagccagataaccagtcttgtcacagaggaaatagtgaatgtccataaagagattcaaatgtcggttgaacagatagatcctagtacagaatacaataatttcatagatgttcacagaacaacggctgctaaagaacaagaaatagagtttgatacttccttactggaagaaaatgaaaatcttcaggcaaatgagatcatgtggaataacttaacagcagaaagtttgcaagtaatgttgaaaacgttagcggaagaacttatgcaaacacagcagatgcttttaaacaaggaggaggctgttttggagttagagaagagaattgaagaatcttctgaaacttgtgagaagaagtctgatattgtgcttctgctaagccaaaaacaggcacttgaagaactgaaacagtcagtccagcagctgagatgcactgaagcaaagttttcagcacagaaggaattactagagcaaaaagtgcaagaaaatgatgggaaagagccacctccagtagtaaattatgaagaagatgcacgatcagttacatctatggaaagaaaggagaggctatccaaatttgaatctattcgtcattcaattgctggaataattaggtctccaaaatctgcagtgggctcttcagcactttctgatatgatctccatcagtgagaagcctttggcagaacaggactggtaccatggtgcaattcccagaatagaagctcaagaactgttaaaaaaacaaggagactttttggtgcgagagagtcatgggaaacctggtgaatatgtcctttctgtatattctgatggacagaggagacattttatcatacaatatgttgataacatgtatcgattcgagggcactgggttttcaaacattcctcaacttatagatcatcactatacaacaaaacaggtcatcactaagaaatcaggtgtagttctgctgaatcctattcctaaggacaagaaatggattctcagtcatgaagatgtcatattgggagaattactgggcaagggaaattttggtgaagtatataagggcacattaaaggataaaacttctgttgctgttaaaacatgtaaagaagatcttcctcaggaattgaaaataaaatttttacaagaagccaaaattctcaagcaatatgatcatcccaatattgtcaaacttataggagtttgcacacaaagacagcctgtctacatcattatggaactggtttcaggaggtgatttcctcacctttctgagaaggaagaaggatgaactaaaactcaaacagttagtgaaattttcattagacgctgctgctggtatgttgtatctcgagagtaaaaactgtatacacagggaccttgctgcaagaaactgcctggtaggtgaaaataatgttctgaaaatcagtgactttggaatgtctcgtcaagaggatggtggagtgtattcatcttctggcttaaagcagattcccattaaatggacagcaccggaagctcttaattatgggagatacagttcagagagtgacgtgtggagctttggcatccttctctgggagaccttcagcttaggggtttgtccgtaccctggaatgacaaatcagcaagcaagagagcaagtagaaagaggataccggatgtcagctccccagcactgtccagaggatatttccaaaatcatgatgaagtgttgggattataaacctgaaaatcgccctaagttcagtgaacttcagaaagagctcactatcatcaagagaaaactcacatagtgacaggatggcgccaaactcagccttcaggactctgtcctccagcagagtaacattattgttctcattaacaatgaatttataccacattaccttc

SEQ ID NO: 329987 - DNA, 633 bp, Homo sapiens
catgctgggacctcagtgacagaatccaatgggatggggtaaccagggtagcccgtgtctatcccaaagcctccaatctggaggttggggcaatgctttagggccataatgatgctcaacgtgaaatggggcttcacctgtacttgggcattgggctctggtcctcagggcaaagatcctaggcaagaggatcaatgactgggccccagccaagctgcttaaaagccagggcagcactagaggaccagttggaagtccagagtcttgggaaaaggaggcaaaatctcaacccctatgtatagagcaacatgacgctcggagggaaggaagaaggcaatgcagtggtcctgggcttctacgttaattctgagagtggccccgcaactcttcatctttctcttccctggctttaggcatgtatcttgcaactagcacttgcttaattgatttgacacacctccctacacttacccctttccatacaaagtgccaggtcctctgaaagctccctatatcacctggccaattggaattttcacagccaaggcagaaaacaggtgaggtttggttgtcaatctccatcttaggcattgaacaggatgtgtagccagttcatggaagacctttttcact

SEQ ID NO: 329988 - DNA, 997 bp, Homo sapiens
caacgggctacgagcggttaagagactacagctcccaggatgtacggtgatggcacccgtttggactccgcccctctgcgcgtctagagctgttctcccgtgcggaggggatcctggctgttcccaaatctcgcctgcctgcgaggagccagcgtggcccgggcagctgatctcaacctgtgattgtgacatcacccctacctgaggaagcctcttccagcctgctcaaggttgccgtagttaggtttaccctcccttccttccctcaccccgtcctttccctcatccctgccccttcctctgtcccacgcggctttcagacatgcatagtgcagcccctcagtaaaggtgcagctaatggcccgtgggcctagcagttgtcaggccttttgggagcccatgatgggagctccctggtaagtgaaaccgtcaattaactgcctaaaatgacaataccccgtctctggtatctttgcacttgcctcttcaaagccaccttttcctttctctctctctggactgtcacagatcctcctctgtaccccaagaacaccccattggatttccgggctggctgcttggcctacacacctgggtcaggcctctcgcagggatgcgcctgccactgtaataaagaggagaaaacgtcacacgggaaaggcctgactccttcgtacaatcagaatactcaactgcacagagaagggacccctttaagccactttgggagccacatccaccactctgtgactcccacacaggctggttcccaggtatcaggtgtcctagtgttaacacgggccaaaaggacaaaacaggaccctaggtccttcccaaaacattaggaaagtttgtgtactgaggtaatgtacaatgtctttttgccctgaatagggctcccttaaaaactcttttaataatcatttttaaatatatctctggaaccacttttagtaatttgctgaaggaacataaaagtaattaccttaattcatgt

SEQ ID NO: 329989 - DNA, 296 bp, Homo sapiens
ttattttccttctttattgcttaatttgggtttaattacattttcatttccttaagatgggaaaaaacaatttatactcttttaaaggagatggcttatctcattcttatttcctaaactgtgattctaaaagtcagatttatttcatcaataaaaagatacttatatttttcataatttatagacagcttccctgcctctagctatatcctagggtctccaaaccactctaaaaacatccagggctttagtcttcttgtgtgtgcactcccacatagaataatgtcaataaagaa

SEQ ID NO: 329990 - DNA, 803 bp, Homo sapiens
gtgactattagtttaataggactgccgcaacaaattaccacactctttggggggggagggaggcttagaaaaactgaaatttattatttgacagttctggaggctggaagtccaaactcagggtgtcagcagcagcatagattcctttttagaggctctagaagaatccattcttctggttttgccagtagcccttgaccttttttggcttgtagattcatcattttgatctctgcctctgtggacttctccctgagtgtctctgtccaacattgccttattttttttaataaggacacctgtcattgtattggggtcttccctgatccagtgtaacttcatcttaatttggttatctgcaaatacctcatttccaaagaaggttatattcacagattaggatttgaatttgtcttttggggggacacagctctacctgttagggtgacatttataaagttgagtattcaggaattgttattagtttgtttgtttgtttgtttgagacggagtctctccttgctctgttgcccaggctggagtgctgtggcgccatctctgctcactgcaaactccacctctcaggttcaagggattgtcctgcatcagcctcctgaacaacaggtgtgcaccaccacgcccagctaatttttctatttttagaagagatgggggtttccaccatgttgtccagaatggtctttaactcctgacctcaagtggtccacctgccttgtcctaccaaagtgctgggattacaagcgtgagccactgcacctggcctgttattcgcattcttaaat

SEQ ID NO: 329991 - DNA, 350 bp, Homo sapiens
tcaggagactgaggtgggaggatcacttgactctgggaggttgagctgcagtgagccatgattgcaccactgtactccagcctgagtgacagagcgagactgtgtctcaaaaaaagaaaaagagtaatggggtaaaggaattgttattattcatttgcaatataatttatgtcacagagtagtgagcttggaaatggaggggagaaaatgctatcccaaagcatatgcttcagttagagttgatgaagtggacctgaacaaagttaggacacacatgacctgggtactgggctataacaggacaaaactcaaaagccaagcaaatgtttataatagtaacagggtcaggg

SEQ ID NO: 329992 - DNA, 759 bp, Homo sapiens
ggaagcccttctctttcttactccccgttaggtgcatcctggcagatgcgttccttgggagaacaccatgcagggtgcattcccatcaactgtaagagtttgaaggactagagagacttcatcctaatccgttcttaagtagcaggtccttagaaattcacccaggttttccgttttgtttgttagtgttgttgtttgttttggaggggaggtccacaaagccattttcaatatgtcagtatgtctattggcgacgtcttgccttcctctaatgtggatagctggggagctgggattacatcatgtattgtggtcacactctggatctcatttgatcaaaagttccatttgccactggtgacatcactaagatatcagatggttgatggggtctagaaagtaattaaagggctctgaggacccatgggggtcaacgtcaacccttccatggctctttgatattaagaatcaacttgcagaccaggtgcggtggctcgtgcctgtaatcccagcactttgagaggccaaggtgggcagattgcctgagctcaggagttcaagaccagcctgggcaacatggtccgtgggctgctggacaccctggtgaccgacctgatggtcctggctgatgagctcagccccataaagaatgtcgaggaggctttgcgcctctgcaggtgactctcgggcccaagcaaccttctggaaaacgggttaataaataaatcaataaagaaccttcaagtttctactaaaacc

SEQ ID NO: 329993 - DNA, 1224 bp, Homo sapiens
  misc_feature (1072)..(1072): n is a, c, g, or t
ggcgtcacaggccgggcccgcagggctttctaggggtccgtcgctcttgaagccgccggcggcgggcgcgtgcgcggcccgatgaagaaggaggtttccaagccgtctccgcccaagttgatcggtggatgcgcgcccccgcgcggggcaccggttgctgtggacgcagtggcggccgttggctggcgggtgcggcgcagcctcggtgtctctgggccggcggtgcagggcaacgtttcatggtgccgggcggcaccatgaagtctctaaagaaggattcccgcctcagaataactccgaccagattattagaggcctcagagaatgtcaaagaaaagaagcgggcaaagggacctgaacaacccacacccacaattcaggaagagcctgaacctgttagcaatgtcctacaaggagatgacattcttgccttggccattaagaaggaagacttgaaggagcaacacattcctcgccttactgaaaaggaagataaacgtgtcatcacccagaaatttatcatccgtaaactcaaacccatggatcctaggaggaaggtctgccaccttgtagcacgtcctgcgaatcctgatgaagccacaaagcctctggactactccggtacacccagtctcagccctggcttcactgtctttcaactcatgggtcccggtgacagcttcgatggcagtgaccagatcctgccccaccacatcttggggagtctccaggattttaagagaattgcacttgctcgagggaacacccagctggctgagcggatacctacctcaccctgtctgatgaccctcatctctgctgaaggagagtcaaagcaaaaagccccaaaagaagagaagagacctccctgggccccacctcctcagcacaactttctgaaaaactggcagcgtaacacagccctgcggaagaagcagcaggaagccctcagcgaacacctaaagaaggcaggaagtggacactgctccatggccaaaccggggagaacctacagaacgcgacccaggacggaccggggacacccaattgcactgccacatatcaaaccccngggtgaaaggaaacaacggggagaaacaagcggggtccggggagcgagacggcgataactcgggaacagtaacataaaaggagtgggcatgacgcccaacagagaaaccaaggggtggcatagggacatcaaaacatagtgagccccacaca

SEQ ID NO: 329994 - DNA, 449 bp, Homo sapiens
gggagaatcacctgagccagggaagtcaaggctgcagtgagccatgatcacaccactggactccagcctgggtgacagagtgagatcctgtcaaaaaaaaaaaaaatctgcaaaaccaaaaattatttcacaagaactttgaacttgtgaaattctttcacaaacaactggtttctttcccctctccagctattctctcacagcatagttcatatataggtgcttcccacagagtaaactctgcctgtgatgttgtcccgttcttccaggtccgtgggctgctggacaccctggtgaccgacctgatggtcctggctgatgagctcagccccataaagaatgtcgaggaggctttgcgcctctgcaggtgactctcgggcccaagcaaccttctggaaaacgggttaataaataaatcaataaagaaccttcaagtttctactaaaacc

SEQ ID NO: 329995 - DNA, 775 bp, Homo sapiens
ggaagcccttctctttcttactccccgttaggtgcatcctggcagatgcgttccttgggagaacaccatgcagggtgcattcccatcaactgtaagagtttgaaggactagagagacttcatcctaatccgttcttaagtagcaggtccttagaaattcacccaggttttccgttttgtttgttagtgttgttgtttgttttggaggggaggtccacaaagccattttcaatatgtcagtatgtctattggcgacgtcttgccttcctctaatgtggatagctggggagctgggattacatcatgtattgtggtcacactctggatctcatttgatcaaaagttccatttgccactggtgacatcactaagatatcagatggttgatggggtctagaaagtaattaaagggctctgaggacccatgggggtcaacgtcaacccttccatggctctttgatattaagaatcaacttgcagaccaggtgcggtggctcgtgcctgtaatcccagcactttgagaggccaaggtgggcagattgcctgagctcaggagttcaagaccagcctgggcaacatggtaagatcccgtttctactaaaaattcaaaaaattagccaggcatggtgacactcacctgtagtcccagctacttgggtggctgaggcacaataatcgcttgaacccgggaagtggaggttgcagtgagccgagatcacgccatttcactccagcttgggtgacaagagtgagactcttacctccaaaaaaaaaga

SEQ ID NO: 329996 - DNA, 772 bp, Homo sapiens
ggcgtcacaggccgggcccgcagggctttctaggggtccgtcgctcttgaagccgccggcggcgggcgcgtgcgcggcccgatgaagaaggaggtttccaagccgtctccgcccaagttgatcggtggatgcgcgcccccgcgcggggcaccggttgctgtggacgcagtggcggccgttggctggcgggtgcggcgcagcctcggtgtctctgggccggcggtgcagggcaacgtttcatggtgccgggcggcaccatgaagtctctaaagaaggattcccgcctcagaataactccgaccagattattagaggcctcagagaatgtcaaagggtggcatgcaggaggcaggatccccggactggatgaagtgcagaagagccaggaaagagtttaagggtagaagggccaggaattggggtccttgggaagaggaaagaatgaagtgttgaaaccagccaccttgatgggattatttggtagaggagggtcggggagcggggcaggcgtcacttaggattcctgctggaaaaacccagaagaaaggccttgcttggctagttctctttttgactgccttttcctaccacgtgcactttccagctggatgacacttatccagctcctttagcctggaaagaatcgctagatatgactgcttcctaccctctacagctttcttctggttgcacctgggagagccacagggcgtctgatagcggactgacttccatggacatgttctcacttgcaacccacccccttttgatc

SEQ ID NO: 329997 - DNA, 3266 bp, Homo sapiens
ggcgtcacaggccgggcccgcagggctttctaggggtccgtcgctcttgaagccgccggcggcgggcgcgtgcgcggcccgatgaagaaggaggtttccaagccgtctccgcccaagttgatcggtggatgcgcgcccccgcgcggggcaccggttgctgtggacgcagtggcggccgttggctggcgggtgcggcgcagcctcggtgtctctgggccggcggtgcagggcaacgtttcatggtgccgggcggcaccatgaagtctctaaagaaggattcccgcctcagaataactccgaccagattattagaggcctcagagaatgtcaaagagcccagactggtcttgaactcctgggctcaagcgatctgcctgccttggcctcccaagatcttgcaactcttaatccattccttggcatgccattgcccatgggaaaagaagcgggcaaagggacctgaacaacccacacccacaattcaggaagagcctgaacctgttagcaatgtcctacaaggagatgacattcttgccttggccattaagaaggaagacttgaaggagcaacacattcctcgccttactgaaaaggaagataaacgtgtcatcacccagaaatttatcatccgtaaactcaaacccatggatcctaggaggaaggtctgccaccttgtagcacgtcctgcgaatcctgatgaagccacaaagcctctggactactccggtcccggtgacagcttcgatggcagtgaccagatcctgccccaccacatcttggggagtctccaggattttaagagaattgcacttgctcgagggaacacccagctggctgagcggatacctacctcaccctgtctgatgaccctcatctctgctgaaggagagtcaaagcaaaaagccccaaaagaagagaagagacctccctgggccccacctcctcagcacaactttctgaaaaactggcagcgtaacacagccctgcggaagaagcagcaggaagccctcagcgaacacctaaagaagccagtgagtgagctgctcatgcacaccggggagacctacagacggatccaggaggagcgggagctcattgactgcacacttccaacccggcgtgataggaaaagctgggagaacagtgggttctggagtcgactggaatacttgggagatgagatgacaggtctggtcatgaccaagacaaaaactcagcgtggcctcatggagcccatcactcatatcaggaagccccactccatccgggtggagacaggattaccagcccagagggacgcttcataccgctacacctgggatcggagtctgtttctgatctaccgacgcaaggagctgcagagaatcatggaagagctggatttcagccagcaggatattgatggcctggaggtggtgggcaaagggtggcccttctcggctgttactgtggaagactacacagtgtttgaaagaagtcagggaagctcctctgaagacacaacatacttaggcacattggccagttcctctgatgtctccatgcctattctcggcccttctctgctgttctgtgggaagccagcttgctggatcagaggcagtaatccacaggacaagaggcaggttgggattgctgctcacttgacctttgaaaccctagaaggcgagaaaacctcctcagaactgactgtggtcaataatggcaccgtggccatttggtatgactggcgacggcagcaccagccggacactttccaagaccttaagaaaaacaggatgcagcgattttactttgacaaccgggaaggtgtgattctgcctggagaaattaaaacatttaccttcttcttcaagtctttgactgctggggtcttcagggaattttgggagtttcgaacccatcctactctattaggaggtgctatactgcaggtcaatctccacgcggtctccctgacccaggacgtttttgaggatgagaggaaagtactggagagcaagctgactgcccatgaggcagtcaccgtcgttcgcgaagtgctgcaggagctgctgatgggggtcttgaccccggagcgcacaccatcacctgtggatgcctatctcaccgaggaagacttgttccggcacagaaatcctccgctgcattatgagcaccaagtggtgcaaagcctgcaccaactgtggcgccagtacatgaccctgcccgccaaggctgaggaggccaggccaggggacaaggagcacgtcagccccatagccacagagaaggcctctgtgaatgctgagctgttaccacgctttaggagccccatctccgaaactcaagtgccccggcctgagaacgaggccctcagggaatccgggtcccagaaggccagagtggggaccaagagtcctcagcggaagagcatcatggaggagatcctggtggaggaaagcccagatgtggacagcaccaagagcccctgggagccggatggccttcccctgctggagtggaacctctgcttggaggacttcagaaaggcagtgatggtgctccctgatgagaaccacagagaggatgcgttgatgaggctcaacaaagcagccctggagctgtgccagaagccaaggccattgcagtccaacctcctgcaccagatgtgtttgcagctgtggcgagatgtgattgacagcctggtgggccattccatgtggctgaggtctgtgctgggcctgcctgagaaggagaccatctatttgaatgtgcctgaagagcaagatcaaaaatcacctcctatcatggaagtgaaggtacctgtggggaaagctgggaaggaggagcggaaaggagcagcccaggaaaagaagcaactggggatcaaagacaaagaagacaagaaaggagccaagctgctcgggaaagaggaccgtcccaacagcaagaagcacaaggcaaaggatgacaagaaagtcataaaatctgcaagtcaggacaggttttctttggaagaccctacccctgacatcatcctctcttctcaagaacccatagaccccctggtcatggggaaatacacccagaggctgcacagtgaggtccgtgggctgctggacaccctggtgaccgacctgatggtcctggctgatgagctcagccccataaagaatgtcgaggaggctttgcgcctctgcaggtgactctcgggcccaagcaaccttctggaaaacgggttaataaataaatcaataaagaaccttcaagtttctactaaaacc

SEQ ID NO: 329998 - DNA, 2299 bp, Homo sapiens
ggcgtcacaggccgggcccgcagggctttctaggggtccgtcgctcttgaagccgccggcggcgggcgcgtgcgcggcccgatgaagaaggaggtttccaagccgtctccgcccaagttgatcggtggatgcgcgcccccgcgcggggcaccggttgctgtggacgcagtggcggccgttggctggcgggtgcggcgcagcctcggtgtctctgggccggcggtgcagggcaacgtttcatggtgccgggcggcaccatgaagtctctaaagaaggattcccgcctcagaataactccgaccagattattagaggcctcagagaatgtcaaagaaaagaagcgggcaaagggacctgaacaacccacacccacaattcaggaagagcctgaacctgttagcaatgtcctacaaggagatgacattcttgccttggccattaagaaggaagacttgaaggagcaacacattcctcgccttactgaaaaggaagataaacgtgtcatcacccagaaatttatcatccgtaaactcaaacccatggatcctaggaggaaggtctgccaccttgtagcacgtcctgcgaatcctgatgaagccacaaagcctctggactactccggtcccggtgacagcttcgatggcagtgaccagatcctgccccaccacatcttggggagtctccaggattttaagagaattgcacttgctcgagggaacacccagctggctgagcggatacctacctcaccctgtctgatgaccctcatctctgctgaaggagagtcaaagcaaaaagccccaaaagaagagaagagacctccctgggccccacctcctcagcacaactttctgaaaaactggcagcgtaacacagccctgcggaagaagcagcaggaagccctcagcgaacacctaaagaagccagtgagtgagctgctcatgcacaccggggagacctacagacggatccaggaggagcgggagctcattgactgcacacttccaacccggcgtgataggaaaagctgggagaacagtgggttctggagtcgactggaatacttgggagatgagatgacaggtctggtcatgaccaagacaaaaactcagcgtggcctcatggagcccatcactcatatcaggaagccccactccatccgggtggagacaggattaccagcccagagggacgcttcataccgctacacctgggatcggagtctgtttctgatctaccgacgcaaggagctgcagagaatcatggaagagctggatttcagccagcaggatattgatggcctggaggtggtgggcaaagggtggcccttctcggctgttactgtggaagactacacagtgtttgaaagaagtcagggaagctcctctgaagacacaacatacttaggcacattggccagttcctctgatgtctccatgcctattctcggcccttctctgctgttctgtgggaagccagcttgctggatcagaggcagtaatccacaggacaagaggcaggttgggattgctgctcacttgacctttgaaaccctagaaggcgagaaaacctcctcagaactgactgtggtcaataatggcaccgtggccatttggtatgactggcgacggcagcaccagccggacactttccaagaccttaagaaaaacaggatgcagcgattttactttgacaaccgggaaggtgtgattctgcctggagaaattaaaacatttaccttcttcttcaagtctttgactgctggggtcttcagggaattttgggagtttcgaacccatcctactctattaggaggtgctatactgcaggtcaatctccacgcggtctccctgacccaggacgtttttgaggatgagaggaaagtactggagagcaagctgactgcccatgaggcagtcaccgtcgttcgcgaagtgctgcaggagctgctgatgggggtcttgaccccggagcgcacaccatcacctgtggatgcctatctcaccgaggaagacttgttccggcacagaaatcctccggtgaggcccagcgccagcccctgccccctcatgtgtgccctgcgtcaagggtccccaacccgcaggccgcacagcggcaggtccgtgggctgctggacaccctggtgaccgacctgatggtcctggctgatgagctcagccccataaagaatgtcgaggaggctttgcgcctctgcaggtgactctcgggcccaagcaaccttctggaaaacgggttaataaataaatcaataaagaaccttcaagtttctactaaaacc

SEQ ID NO: 329999 - DNA, 2853 bp, Homo sapiens
  misc_feature (2723)..(2723): n is a, c, g, or t
ggcgtcacaggccgggcccgcagggctttctaggggtccgtcgctcttgaagccgccggcggcgggcgcgtgcgcggcccgatgaagaaggaggtttccaagccgtctccgcccaagttgatcggtggatgcgcgcccccgcgcggggcaccggttgctgtggacgcagtggcggccgttggctggcgggtgcggcgcagcctcggtgtctctgggccggcggtgcagggcaacgtttcatggtgccgggcggcaccatgaagtctctaaagaaggattcccgcctcagaataactccgaccagattattagaggcctcagagaatgtcaaagaaaagaagcgggcaaagggacctgaacaacccacacccacaattcaggaagagcctgaacctgttagcaatgtcctacaaggagatgacattcttgccttggccattaagaaggaagacttgaaggagcaacacattcctcgccttactgaaaaggaagataaacgtgtcatcacccagaaatttatcatccgtaaactcaaacccatggatcctaggaggaaggtctgccaccttgtagcacgtcctgcgaatcctgatgaagccacaaagcctctggactactccggtcccggtgacagcttcgatggcagtgaccagatcctgccccaccacatcttggggagtctccaggattttaagagaattgcacttgctcgagggaacacccagctggctgagcggatacctacctcaccctgtctgatgaccctcatctctgctgaaggagagtcaaagcaaaaagccccaaaagaagagaagagacctccctgggccccacctcctcagcacaactttctgaaaaactggcagcgtaacacagccctgcggaagaagcagcaggaagccctcagcgaacacctaaagaagccagtgagtgagctgctcatgcacaccggggagacctacagacggatccaggaggagcgggagctcattgactgcacacttccaacccggcgtgataggaaaagctgggagaacagtgggttctggagtcgactggaatacttgggagatgagatgacaggtctggtcatgaccaagacaaaaactcagcgtggcctcatggagcccatcactcatatcaggaagccccactccatccgggtggagacaggattaccagcccagagggacgcttcataccgctacacctgggatcggagtctgtttctgatctaccgacgcaaggagctgcagagaatcatggaagagctggatttcagccagcaggatattgatggcctggaggtggtgggcaaagggtggcccttctcggctgttactgtggaagactacacagtgtttgaaagaagtcagggaagctcctctgaagacacaacatacttaggcacattggccagttcctctgatgtctccatgcctattctcggcccttctctgctgttctgtgggaagccagcttgctggatcagaggcagtaatccacaggacaagaggcaggttgggattgctgctcacttgacctttgaaaccctagaaggcgagaaaacctcctcagaactgactgtggtcaataatggcaccgtggccatttggtatgactggcgacggcagcaccagccggacactttccaagaccttaagaaaaacaggatgcagcgattttactttgacaaccgggaaggtgtgattctgcctggagaaattaaaacatttaccttcttcttcaagtctttgactgctggggtcttcagggaattttgggagtttcgaacccatcctactctattaggaggtgctatactgcaggtcaatctccacgcggtctccctgacccaggacgtttttgaggatgagaggaaagtactggagagcaagctgactgcccatgaggcagtcaccgtcgttcgcgaagtgctgcaggagctgctgatgggggtcttgaccccggagcgcacaccatcacctgtggatgcctatctcaccgaggaagacttgttccggcacagaaatcctccgctgcattatgagcaccaagtggtgcaaagcctgcaccaactgtggcgccagtacatgaccctgcccgccaaggctgaggaggccaggccaggggacaaggagcacgtcagccccatagccacagagaaggcctctgtgaatgctgagctgttaccacgctttaggagccccatctccgaaactcaagtgccccggcctgagaacgaggccctcagggaatccgggtcccagaaggccagagtggggaccaagagtcctcagcggaagagcatcatggaggagatcctggtggaggaaagcccagatgtggacagcaccaagagcccctgggagccggatggccttcccctgctggagtggaacctctgcttggaggacttcagaaaggcagtgatggtgctccctgatgagaaccacagagaggatgcgttgatgaggctcaacaaagcagccctggagctgtgccagaagccaaggccattgcagtccaacctcctgcaccagatgtgtttgcagctgtggcgagatgtgattgacagcctggtgggccattccatgtggctgaggtctgtgctgggcctgcctgagaaggagaccatctatttgaatgtgcctgaagagcaagatcaaaaatcacctcctatcatggaagtgaaggtacctgcccgggcggccaagggcgtngtgcggagggcggtaccaagttgaacaggacaggggactggaagacgaacagcccgagacatcttttccagctactgcttaagctaggcaggccatgaagaaataacggtctcagtaacctccatgctcg

SEQ ID NO: 330000 - DNA, 3161 bp, Homo sapiens
ggcgtcacaggccgggcccgcagggctttctaggggtccgtcgctcttgaagccgccggcggcgggcgcgtgcgcggcccgatgaagaaggaggtttccaagccgtctccgcccaagttgatcggtggatgcgcgcccccgcgcggggcaccggttgctgtggacgcagtggcggccgttggctggcgggtgcggcgcagcctcggtgtctctgggccggcggtgcagggcaacgtttcatggtgccgggcggcaccatgaagtctctaaagaaggattcccgcctcagaataactccgaccagattattagaggcctcagagaatgtcaaagaaaagaagcgggcaaagggacctgaacaacccacacccacaattcaggaagagcctgaacctgttagcaatgtcctacaaggagatgacattcttgccttggccattaagaaggaagacttgaaggagcaacacattcctcgccttactgaaaaggaagataaacgtgtcatcacccagaaatttatcatccgtaaactcaaacccatggatcctaggaggaaggtctgccaccttgtagcacgtcctgcgaatcctgatgaagccacaaagcctctggactactccggtcccggtgacagcttcgatggcagtgaccagatcctgccccaccacatcttggggagtctccaggattttaagagaattgcacttgctcgagggaacacccagctggctgagcggatacctacctcaccctgtctgatgaccctcatctctgctgaaggagagtcaaagcaaaaagccccaaaagaagagaagagacctccctgggccccacctcctcagcacaactttctgaaaaactggcagcgtaacacagccctgcggaagaagcagcaggaagccctcagcgaacacctaaagaagccagtgagtgagctgctcatgcacaccggggagacctacagacggatccaggaggagcgggagctcattgactgcacacttccaacccggcgtgataggaaaagctgggagaacagtgggttctggagtcgactggaatacttgggagatgagatgacaggtctggtcatgaccaagacaaaaactcagcgtggcctcatggagcccatcactcatatcaggaagccccactccatccgggtggagacaggattaccagcccagagggacgcttcataccgctacacctgggatcggagtctgtttctgatctaccgacgcaaggagctgcagagaatcatggaagagctggatttcagccagcaggatattgatggcctggaggtggtgggcaaagggtggcccttctcggctgttactgtggaagactacacagtgtttgaaagaagtcagggaagctcctctgaagacacaacatacttaggcacattggccagttcctctgatgtctccatgcctattctcggcccttctctgctgttctgtgggaagccagcttgctggatcagaggcagtaatccacaggacaagaggcaggttgggattgctgctcacttgacctttgaaaccctagaaggcgagaaaacctcctcagaactgactgtggtcaataatggcaccgtggccatttggtatgactggcgacggcagcaccagccggacactttccaagaccttaagaaaaacaggatgcagcgattttactttgacaaccgggaaggtgtgattctgcctggagaaattaaaacatttaccttcttcttcaagtctttgactgctggggtcttcagggaattttgggagtttcgaacccatcctactctattaggaggtgctatactgcaggtcaatctccacgcggtctccctgacccaggacgtttttgaggatgagaggaaagtactggagagcaagctgactgcccatgaggcagtcaccgtcgttcgcgaagtgctgcaggagctgctgatgggggtcttgaccccggagcgcacaccatcacctgtggatgcctatctcaccgaggaagacttgttccggcacagaaatcctccgctgcattatgagcaccaagtggtgcaaagcctgcaccaactgtggcgccagtacatgaccctgcccgccaaggctgaggaggccaggccaggggacaaggagcacgtcagccccatagccacagagaaggcctctgtgaatgctgagctgttaccacgctttaggagccccatctccgaaactcaagtgccccggcctgagaacgaggccctcagggaatccgggtcccagaaggccagagtggggaccaagagtcctcagcggaagagcatcatggaggagatcctggtggaggaaagcccagatgtggacagcaccaagagcccctgggagccggatggccttcccctgctggagtggaacctctgcttggaggacttcagaaaggcagtgatggtgctccctgatgagaaccacagagaggatgcgttgatgaggctcaacaaagcagccctggagctgtgccagaagccaaggccattgcagtccaacctcctgcaccagatgtgtttgcagctgtggcgagatgtgattgacagcctggtgggccattccatgtggctgaggtctgtgctgggcctgcctgagaaggagaccatctatttgaatgtgcctgaagagcaagatcaaaaatcacctcctatcatggaagtgaaggtacctgtggggaaagctgggaaggaggagcggaaaggagcagcccaggaaaagaagcaactggggatcaaagacaaagaagacaagaaaggagccaagctgctcgggaaagaggaccgtcccaacagcaagaagcacaaggcaaaggatgacaagaaagtcataaaatctgcaagtcaggacaggttttctttggaagaccctacccctgacatcatcctctcttctcaagaacccatagaccccctggtcatggggaaatacacccagaggctgcacagtgaggtccgtgggctgctggacaccctggtgaccgacctgatggtcctggctgatgagctcagccccataaagaatgtcgaggaggctttgcgcctctgcaggtgactctcgggcccaagcaaccttctggaaaacgggttaataaataaatcaataaagaaccttcaagtttctactaaaacc

SEQ ID NO: 330001 - DNA, 275 bp, Homo sapiens
tttgcagctgtggcgagatgtgattgacagcctggtgggccattccatgtggctgaggtctgtgctgggcctgcctgagaaggagaccatctatttgaatgtgcctgaagagcaaggtcagatcttgtgcaaccaaccacacctctgcatagccctcctcatctctctgaatggacaagcagcagtgcctgggccagtcatactcctttggtggaagctctgctaggttgagcccatggagtaggccccttacccctttctgtccgctgccagga

SEQ ID NO: 330002 - DNA, 267 bp, Homo sapiens
tggctctgactaatgatacagtaggtagaattcagtagaagtgatgctgttccaggcctaggccctttttaaaaggcctgacagctgccatgttcactctcttgtaccctggccaccatgacagaaggaagtccaggctatcctgccgaaggccacatggaaagccctggagaaggtgccatcacctgtggagagagttgcttgaagaactgaggcctctagccgggcgtggtggctcacacctgcaatcccagcactttgggaggc

SEQ ID NO: 330003 - DNA, 322 bp, Homo sapiens
agcaagtatgtaatactgtgatagtacaaatgagttgtcaaagagagaaaggaaggaatgagggaggaaggagattgatgaacacttgtgctgccagggctttaactgctttaaatttaatagacaactgtctaaactgttctttcagtcaacaaaccgttattaagtatccaccaggtaccaagtgtcaggagcactaactctgcaacccagaacttacattctggcaggaagaatcaacaattactcacaagcagtgaggggtgttacaaagttagaacagggtcctaaagggcacactgcaaaggggcttacttgtaca

SEQ ID NO: 330004 - DNA, 387 bp, Homo sapiens
tgagtccttcatgccctctggacccgattaactatttctatcatgtcactgaggagcatgttattgctctcagttactaactccaaactccttgagggcaaggaaacctgactgatttatttattctacccagcaagtgcctgatgcatggtctcataaaattttttgaaagaatgaatgcatagtgcctatcacatattaacatagacttctgataagccagagagctcacatgaaaacaaattaattagaaacttctgcaacctaatgcagaagttctcaagctttgcgatgcattggaatcacctgggagcttttaaaaactgccactgtcgccaggtatggtagctcgcacctgtaatcccaacacattgggaggtaaaggtg

SEQ ID NO: 330005 - DNA, 339 bp, Homo sapiens
tgagcttggggatggggcagtcccgcagaagcggggtcttgtcgaggaccgagtcaaagaagggggcacgtggagtccgcccagtgacactgtgggaatgttgagggagggatgggaggttggggagagtcagccgatgggggcgtggtcagggtggttatcctaagaccagagaggcatcgacggggcgaggttagcagcgagaagagacagggatggggtcaaaacagaggggcgtggccaacgcagggtaggggcggggtcggctctggatggggcagcattcagatcctcatccccttccccaggtcttgagtccacagttagatcccgccgtcc

SEQ ID NO: 330006 - DNA, 357 bp, Homo sapiens
agagagagagagagagagagagagagagagagagagagaggaggagaggaggccaaaaaggacagtttaattttgtacagattatgcttacctcaggtttctttagtgtgcttgaatgcccttctttccatataacacttatcttcttcttaattcggcaatggaatatcttttaagttttaaaaaaactggaataattatatctatcttttttgccgtttatatttaggggtttttgttgataaaatcaagtcttggttgtggcttgctgaattaaatatttatgagtggtgcatttttaagtatagtgaacaagacaccatattaagtacagtgataaagcatctatattctgta

SEQ ID NO: 330007 - DNA, 407 bp, Homo sapiens
aagcatctatattctgtaaaaaaaaaaaaaatctgcctatgcatgttttttaagaaaaaaaaaatggctgtatcggcctgtatgggactgtaatgcgcttagtggtctgacatatactggaaatgtatgtatactggcgtactttatattctctaatgtgcttgaatgcccttctttccatataacacttatcttcttcttaattcggcaatggaatatcttttaagttttaaaaaaactggaataattatatctatcttttttgccgtttatatttaggggtttttgttgataaaatcaagtcttggttgtggcttgctgaattaaatatttatgagtggtgcatttttaagtatagtgaacaagacaccatattaagtacagtgataaagcatctatattctgta

SEQ ID NO: 330008 - DNA, 4464 bp, Homo sapiens
gcggccgcctctccgccgccggggacgccaaggtgcggctggtggcactgacatcggcggccctgcctctcctccctcgcccccggccttccccatgtgatcggtcttaatcctggccgtgtgtgcgcgcgtggggctccattccgcggtgctgggtctccgtgccggggtgggtgctcgtgtgtgcgcttctcctccccatcccccttcccccaagaataaaagaagaaccgggaggcgtgctcagaaaataaataaataaccaccacacacgcgcagcccggagcgagtcggcggggctggcggcagcggcggaggaggagtgaaggcggcggcggcggaggagggacgcgcggaaaaggcagcaactttaaagccagctcagagcctagacctccagccgagcggtttgcagcgcggcggcggcggcggcggcggcggcggcgttgagtgtctggcccgccggtccggtcggggtgtgcagtcggacggacgagcagcgcgtcgctgtcctccggcagctggagatgtccgagcccaaggcaattgatcccaagttgtcgacgaccgacagggtggtgaaagctgttccatttcctccaagtcaccggcttacagcaaaagaagtgtttgataatgatggaaaacctcgtgtggatatcttaaaggcgcatcttatgaaggagggaaggctggaagagagtgttgcattgagaataataacagagggtgcatcaattcttcgacaggaaaaaaatttgctggatattgatgcgccagtcactgtttgtggggacattcatggacaattctttgatttgatgaagctctttgaagtcgggggatctcctgccaacactcgctacctcttcttaggggactatgttgacagagggtacttcagtattgaatgtgtgctgtatttgtgggccttgaaaattctctaccccaaaacactgtttttacttcgtggaaatcatgaatgtagacatctaacagagtatttcacatttaaacaagaatgtaaaataaagtattcagaacgcgtatatgatgcctgtatggatgcctttgactgccttcccctggctgccctgatgaaccaacagttcctgtgtgtgcatggtggtttgtctccagagattaacactttagatgatatcagaaaattagaccgattcaaagaaccacctgcatatggacctatgtgtgatatcctgtggtcagaccccctggaagattttggaaatgagaagactcaggaacatttcactcacaacacagtcagggggtgttcatacttctacagttacccggctgtatgtgaattcttacagcacaataacttgttatctatactccgagcccacgaagcccaagatgcagggtaccgcatgtacaggaaaagccaaacaacaggcttcccttctctaattacaattttttcagcaccaaattacttagatgtatacaataacaaagctgcagtattgaagtatgagaacaatgttatgaatatcaggcaattcaactgttctcctcatccatactggcttccaaatttcatggatgtttttacttggtcccttccatttgttggggaaaaagtgactgagatgctggtaaatgtcctcaacatctgctcagatgatgaactagggtcagaagaagatggatttgatggtgcaacagctgcagcccggaaagaggtgataaggaacaagatccgagcaataggcaaaatggccagagtgttctcagtgctcagagaagagagtgagagtgtgctgacgctgaaaggcttgaccccaactggcatgctccccagcggagtactttctggagggaagcaaaccctgcaaagcgctactgttgaggctattgaggctgatgaagctatcaaaggattttcaccacaacataagatcactagcttcgaggaagccaagggcttagaccgaattaatgagaggatgccgcctcgcagagatgccatgccctctgacgccaaccttaactccatcaacaaggctctcacctcagagactaacggcacggacagcaatggcagtaatagcagcaatattcagtgaccacttcctgttcactttttttttttttttttttttttttttttgagctgcggggcatgatggggattgctgcatatcagcagttggatgttcttgcctctgacagtagcttatttgctctgggggccaggaattggattcagtttacactatcattaaaaaagagggagagagataataaactatattttggtggggatggtgattaaacacctcttttgggtatgccttttaaaaatgcttatagagaaaaaaaattttaaaaagaaagctaatgctagtatatactgcaatgttaggggaatgaacatgttttcctactgcattggggacttctagataggttaatgaaaggccttttattctgttactggacatgaaaactttgtctaatttcttactctattgtacgtttacagtcgcagcactaaaaatggatgacatcaaacatttttaacaaaatgatgtacaaactaaggactatttattgataatgttttgctactcttgtcagacaatggctataaactgaattaggcagtcttaaaaaaaaaaaaaaaacagaaaaagaaaaaaaagaacgttgcaaatttgttaaaatgccaaaaaggacagtttaattttgtacagattatgcttacctcaggtttctttagtgtgcttgaatgcccttctttccatataacacttatcttcttcttaattcggcaatggaatatcttttaagttttaaaaaaactggaataattatatctatcttttttgccgtttatatttaggggtttttgttgataaaatcaagtcttggttgtggcttgctgaattaaatatttatgagtggtgcatttttaagtatagtgaacaagacaccatattaagtacagtgataaagcatctatattctgtaaaaaaaaaaaaaatctgcctatgcatgttttttaagaaaaaaaaaatggctgtatcggcctgtatgggactgtaatgcgcttagtggtctgacatatactggaaatgtatgtatactggcgtactttatattctctaaaatgcttaatgcctttgaaattttgtaatcaaaaaaaagctttgaaaaaatctaaaggggagagtattctttaaagtttttaacataagcttgtcaatgcacatgtagatggttagcatgtttagcaaaccttgtgaaattataataagtttgtagttacatgtgaaactctaaatgcatggcaactgttaatgtcataacagtttagttattttgttctgttctgtcatgtgccacaaaatatgtacttttttcacttttttccctttgtatatcagttacgggttacaactggttcattctgaaaacaacaacaacaaaagtccattcatattttttaacaattgtataagtgcccaagtaattcactacagcctaaagccttgcctttgtaatttgacttctgacatgttggcaatcaaagcatgcacttgtaacaatgaaaaagaaaaagcattttatattactactcaataaaatgtgcatgaacttacagaattctcatccttccactgagtccgctgaagggatttatgtgcacaaccaccatgtgtcttctaggtgctggcccaccaccacacatcacaggctgatttccacaggcttcttcctaggggcctcgtgatctgaggggtggtgcctacttccactgtaagaaagaatcttggtggatttgtgtctcaaatcagataagagaagcctgtttaaagagcagatgccatcttctggcttcctcaaggagccagttaaaaaaccagagcattcctttttattgaaaaataaaattaatttgttatcagagaaaagagttgcatttgtattaacaagaaatttgtatacccacgcttcagctactatctaatcatcacccgaagatttaagatacaccaaatttcagtttgtttgtaacattgttcatctttagtgcactttgttttatataataaagtatgcctgttatattaaataataagaatatggcaattagcgatatagcatacccaaacaaagatgttctcgatacagtctggcaaagactatcccaaggttattttaatgaattcagacattttttcctgtggatatttctccatcctaaaaaaagtggcaaccaaggaaaatatttagatgcaacttactagagtgatgatgtgaaagaaatggtgattctggtatcatggtgtttattttctttcttataactgcagagaaaatatcctgactaaaaaaaattcatttttttggattcctttcttttacaaattgtgctgaggcaactatggcatagaaataaacatttgacattaaaataaaaaaacagttgat

SEQ ID NO: 330009 - DNA, 4511 bp, Homo sapiens
gcggccgcctctccgccgccggggacgccaaggtgcggctggtggcactgacatcggcggccctgcctctcctccctcgcccccggccttccccatgtgatcggtcttaatcctggccgtgtgtgcgcgcgtggggctccattccgcggtgctgggtctccgtgccggggtgggtgctcgtgtgtgcgcttctcctccccatcccccttcccccaagaataaaagaagaaccgggaggcgtgctcagaaaataaataaataaccaccacacacgcgcagcccggagcgagtcggcggggctggcggcagcggcggaggaggagtgaaggcggcggcggcggaggagggacgcgcggaaaaggcagcaactttaaagccagctcagagcctagacctccagccgagcggtttgcagcgcggcggcggcggcggcggcggcggcggcgttgagtgtctggcccgccggtccggtcggggtgtgcagtcggacggacgagcagcgcgtcgctgtcctccggcagctggagatgtccgagcccaaggcaattgatcccaagttgtcgacgaccgacagggtggtgaaagctgttccatttcctccaagtcaccggcttacagcaaaagaagtgtttgataatgatggaaaacctcgtgtggatatcttaaaggcgcatcttatgaaggagggaaggctggaagagagtgttgcattgagaataataacagagggtgcatcaattcttcgacaggaaaaaaatttgctggatattgatgcgccagtcactgtttgtggggacattcatggacaattctttgatttgatgaagctctttgaagtcgggggatctcctgccaacactcgctacctcttcttaggggactatgttgacagagggtacttcagtattgaatgtgtgctgtatttgtgggccttgaaaattctctaccccaaaacactgtttttacttcgtggaaatcatgaatgtagacatctaacagagtatttcacatttaaacaagaatgtaaaataaagtattcagaacgcgtatatgatgcctgtatggatgcctttgactgccttcccctggctgccctgatgaaccaacagttcctgtgtgtgcatggtggtttgtctccagagattaacactttagatgatatcagaaaattagaccgattcaaagaaccacctgcatatggacctatgtgtgatatcctgtggtcagaccccctggaagattttggaaatgagaagactcaggaacatttcactcacaacacagtcagggggtgttcatacttctacagttacccggctgtatgtgaattcttacagcacaataacttgttatctatactccgagcccacgaagcccaagatgcagggtaccgcatgtacaggaaaagccaaacaacaggcttcccttctctaattacaattttttcagcaccaaattacttagatgtatacaataacaaagctgcagtattgaagtatgagaacaatgttatgaatatcaggcaattcaactgttctcctcatccatactggcttccaaatttcatggatgtttttacttggtcccttccatttgttggggaaaaagtgactgagatgctggtaaatgtcctcaacatctgctcagatgatgaactagggtcagaagaagatggatttgatggtgcaacagctgcagcccggaaagaggtgataaggaacaagatccgagcaataggcaaaatggccagagtgttctcagtgctcagagaagagagtgagagtgtgctgacgctgaaaggcttgaccccaactggcatgctccccagcggagtactttctggagggaagcaaaccctgcaaagcgctatcaaaggattttcaccacaacataagatcactagcttcgaggaagccaagggcttagaccgaattaatgagaggatgccgcctcgcagagatgccatgccctctgacgccaaccttaactccatcaacaaggctctcacctcagagactaacggcacggacagcaatggcagtaatagcagcaatattcagtgaccacttcctgttcactttttttttttttttttttttttttttttgagctgcggggcatgatggggattgctgcatatcagcagttggatgttcttgcctctgacagtagcttatttgctctgggggccaggaattggattcagtttacactatcattaaaaaagagggagagagataataaactatattttggtggggatggtgattaaacacctcttttgggtatgccttttaaaaatgcttatagagaaaaaaaattttaaaaagaaagctaatgctagtatatactgcaatgttaggggaatgaacatgttttcctactgcattggggacttctagataggttaatgaaaggccttttattctgttactggacatgaaaactttgtctaatttcttactctattgtacgtttacagtcgcagcactaaaaatggatgacatcaaacatttttaacaaaatgatgtacaaactaaggactatttattgataatgttttgctactcttgtcagacaatggctataaactgaattaggcagtcttaaaaaaaaaaaaaaaacagaaaaagaaaaaaaagaacgttgcaaatttgttaaaatgccaaaaaggacagtttaattttgtacagattatgcttacctcaggtttctttagtgtgcttgaatgcccttctttccatataacacttatcttcttcttaattcggcaatggaatatcttttaagttttaaaaaaactggaataattatatctatcttttttgccgtttatatttaggggtttttgttgataaaatcaagtcttggttgtggcttgctgaattaaatatttatgagtggtgcatttttaagtatagtgaacaagacaccatattaagtacagtgataaagcatctatattctgtaaaaaaaaaaaaaatctgcctatgcatgttttttaagaaaaaaaaaatggctgtatcggcctgtatgggactgtaatgcgcttagtggtctgacatatactggaaatgtatgtatactggcgtactttatattctctaaaatgcttaatgcctttgaaattttgtaatcaaaaaaaagctttgaaaaaatctaaaggggagagtattctttaaagtttttaacataagcttgtcaatgcacatgtagatggttagcatgtttagcaaaccttgtgaaattataataagtttgtagttacatgtgaaactctaaatgcatggcaactgttaatgtcataacagtttagttattttgttctgttctgtcatgtgccacaaaatatgtacttttttcacttttttccctttgtatatcagttacgggttacaactggttcattctgaaaacaacaacaacaaaagtccattcatattttttaacaattgtataagtgcccaagtaattcactacagcctaaagccttgcctttgtaatttgacttctgacatgttggcaatcaaagcatgcacttgtaacaatgaaaaagaaaaagcattttatattactactcaataaaatgtgcatgaacttacagaattctcatccttccactgagtccgctgaagggatttatgtgcacaaccaccatgtgtcttctaggtgctggcccaccaccacacatcacaggctgatttccacaggcttcttcctaggggcctcgtgatctgaggggtggtgcctacttccactgtaagaaagaatcttggtggatttgtgtctcaaatcagataagagaagcctgtttaaagagcagatgccatcttctggcttcctcaaggagccagttaaaaaaccagagcattcctttttattgaaaaataaaattaatttgttatcaggttgtttcagttgtattggatgccctatctatctgctaaagcaaaaagtactaggctactaagtgcattttcatcacagaaaagagttgcatttgtattaacaagaaatttgtatacccacgcttcagctactatctaatcatcacccgaagatttaagatacaccaaatttcagtttgtttgtaacattgttcatctttagtgcactttgttttatataataaagtatgcctgttatattaaataataagaatatggcaattagcgatatagcatacccaaacaaagatgttctcgatacagtctggcaaagactatcccaaggttattttaatgaattcagacattttttcctgtggatatttctccatcctaaaaaaagtggcaaccaaggaaaatatttagatgcaacttactagagtgatgatgtgaaagaaatggtgattctggtatcatggtgtttattttctttcttataactgcagagaaaatatcctgactaaaaaaaattcatttttttggattcctttcttttacaaattgtgctgaggcaactatggcatagaaataaacatttgacattaaaataaaaaaacagttgat

SEQ ID NO: 330010 - DNA, 3927 bp, Homo sapiens
gcggccgcctctccgccgccggggacgccaaggtgcggctggtggcactgacatcggcggccctgcctctcctccctcgcccccggccttccccatgtgatcggtcttaatcctggccgtgtgtgcgcgcgtggggctccattccgcggtgctgggtctccgtgccggggtgggtgctcgtgtgtgcgcttctcctccccatcccccttcccccaagaataaaagaagaaccgggaggcgtgctcagaaaataaataaataaccaccacacacgcgcagcccggagcgagtcggcggggctggcggcagcggcggaggaggagtgaaggcggcggcggcggaggagggacgcgcggaaaaggcagcaactttaaagccagctcagagcctagacctccagccgagcggtttgcagcgcggcggcggcggcggcggcggcggcggcgttgagtgtctggcccgccggtccggtcggggtgtgcagtcggacggacgagcagcgcgtcgctgtcctccggcagctggagatgtccgagcccaaggcaattgatcccaagttgtcgacgaccgacagggtggtgaaagctgttccatttcctccaagtcaccggcttacagcaaaagaagtgtttgataatgatggaaaacctcgtgtggatatcttaaaggcgcatcttatgaaggagggaaggctggaagagagtgttgcattgagaataataacagagggtgcatcaattcttcgacaggaaaaaaatttgctggatattgatgcgccagtcactgtttgtggggacattcatggacaattctttgatttgatgaagctctttgaagtcgggggatctcctgccaacactcgctacctcttcttaggggactatgttgacagagggtacttcagtattgaatgtgtgctgtatttgtgggccttgaaaattctctaccccaaaacactgtttttacttcgtggaaatcatgaatgtagacatctaacagagtatttcacatttaaacaagaatgtaaaataaagtattcagaacgcgtatatgatgcctgtatggatgcctttgactgccttcccctggctgccctgatgaaccaacagttcctgtgtgtgcatggtggtttgtctccagagattaacactttagatgatatcagaaaattagaccgattcaaagaaccacctgcatatggacctatgtgtgatatcctgtggtcagaccccctggaagattttggaaatgagaagactcaggaacatttcactcacaacacagtcagggggtgttcatacttctacagttacccggctgtatgtgaattcttacagcacaataacttgttatctatactccgagcccacgaagcccaagatgcagggtaccgcatgtacaggaaaagccaaacaacaggcttcccttctctaattacaattttttcagcaccaaattacttagatgtatacaataacaaagctgcagtattgaagtatgagaacaatgttatgaatatcaggcaattcaactgttctcctcatccatactggcttccaaatttcatggatgtttttacttggtcccttccatttgttggggaaaaagtgactgagatgctggtaaatgtcctcaacatctgctcagatgatgaactagggtcagaagaagatggatttgatggtgcaacagctgcagcccggaaagaggtgataaggaacaagatccgagcaataggcaaaatggccagagtgttctcagtgctcagagaagagagtgagagtgtgctgacgctgaaaggcttgaccccaactggcatgctccccagcggagtactttctggagggaagcaaaccctgcaaagcgctactgttgaggctattgaggctgatgaagctatcaaaggattttcaccacaacataagatcactagcttcgaggaagccaagggcttagaccgaattaatgagaggatgccgcctcgcagagatgccatgccctctgacgccaaccttaactccatcaacaaggctctcacctcagagactaacggcacggacagcaatggcagtaatagcagcaatattcagtgaccacttcctgttcactttttttttttttttttttttttttttttgagctgcggggcatgatggggattgctgcatatcagcagttggatgttcttgcctctgacagtagcttatttgctctgggggccaggaattggattcagtttacactatcattaaaaaagagggagagagataataaactatattttggtggggatggtgattaaacacctcttttgggtatgccttttaaaaatgcttatagagaaaaaaaattttaaaaagaaagctaatgctagtatatactgcaatgttaggggaatgaacatgttttcctactgcattggggacttctagataggttaatgaaaggccttttattctgttactggacatgaaaactttgtctaatttcttactctattgtacgtttacagtcgcagcactaaaaatggatgacatcaaacatttttaacaaaatgatgtacaaactaaggactatttattgataatgttttgctactcttgtcagacaatggctataaactgaattaggcagtcttaaaaaaaaaaaaaaaacagaaaaagaaaaaaaagaacgttgcaaatttgttaaaatgccaaaaaggacagtttaattttgtacagattatgcttacctcaggtttctttagtgtgcttgaatgcccttctttccatataacacttatcttcttcttaattcggcaatggaatatcttttaagttttaaaaaaactggaataattatatctatcttttttgccgtttatatttaggggtttttgttgataaaatcaagtcttggttgtggcttgctgaattaaatatttatgagtggtgcatttttaagtatagtgaacaagacaccatattaagtacagtgataaagcatctatattctgtaaaaaaaaaaaaaatctgcctatgcatgttttttaagaaaaaaaaaatgggttggtcagacaatgggttataaactggaattacggcaggtcttaaaaaaaaaaaaaaccaagaaaaagagaaaaaaaaagaagtgtggcacaaattgttggttaacagtggcccaaaaggggacggcttaaacttgtgggtaccagcataagtgcctaaccccgagggtctactatacagggtgggcctggaaaagtgccccctttcttccccattattaaccctttcattcagtcctccaccaatttcctatttcatcagggggccattctcctgtaggaaacatctcggtgtgagcggccctttgattcccaaagggcctatacgggtcttcccaccacgtttagtatgttataagcgcccctttataacgtggggacacgagaacaagccaccgctttaacacttacagaagagataccgacatcatacactagataaccgcacaaacaagtttggtgggcggccgcccggcgggacccccgcagagaaagaagaagttctctgaaagaaaacacaacaggagattatgcgcagaaaggcgggaccccaaatgaggcaagcaagcgacagaccagcagtggggcaaacagtacgtaggtgcgcccaacagcaaaaaaaaccccggggcgacagacaaagcaaaaaaagtaggtggtacaagcagacagctaccagacaacaaataaagatcaaaagccagccgggggggaaacacaacccacgcagcaggtgcatggcagaaaacaacactaacgacgcaacgtaggagaaccgcgcagcgagagccaccacaatacagggggacaaacaaacaaacgagggagagagaacacacacaggagcaccgccgaaacattaaaaaatagccccgcgc

SEQ ID NO: 330011 - DNA, 2306 bp, Homo sapiens
gcggccgcctctccgccgccggggacgccaaggtgcggctggtggcactgacatcggcggccctgcctctcctccctcgcccccggccttccccatgtgatcggtcttaatcctggccgtgtgtgcgcgcgtggggctccattccgcggtgctgggtctccgtgccggggtgggtgctcgtgtgtgcgcttctcctccccatcccccttcccccaagaataaaagaagaaccgggaggcgtgctcagaaaataaataaataaccaccacacacgcgcagcccggagcgagtcggcggggctggcggcagcggcggaggaggagtgaaggcggcggcggcggaggagggacgcgcggaaaaggcagcaactttaaagccagctcagagcctagacctccagccgagcggtttgcagcgcggcggcggcggcggcggcggcggcggcgttgagtgtctggcccgccggtccggtcggggtgtgcagtcggacggacgagcagcgcgtcgctgtcctccggcagctggagatgtccgagcccaaggcaattgatcccaagttgtcgacgaccgacagggtggtgaaagctgttccatttcctccaagtcaccggcttacagcaaaagaagtgtttgataatgatggaaaacctcgtgtggatatcttaaaggcgcatcttatgaaggagggaaggctggaagagagtgttgcattgagaataataacagagggtgcatcaattcttcgacaggaaaaaaatttgctggatattgatgcgccagtcactgtttgtggggacattcatggacaattctttgatttgatgaagctctttgaagtcgggggatctcctgccaacactcgctacctcttcttaggggactatgttgacagagggtacttcagtattgaatgtgtgctgtatttgtgggccttgaaaattctctaccccaaaacactgtttttacttcgtggaaatcatgaatgtagacatctaacagagtatttcacatttaaacaagaatgtaaaataaagtattcagaacgcgtatatgatgcctgtatggatgcctttgactgccttcccctggctgccctgatgaaccaacagttcctgtgtgtgcatggtggtttgtctccagagattaacactttagatgatatcagaaaattagaccgattcaaagaaccacctgcatatggacctatgtgtgatatcctgtggtcagaccccctggaagattttggaaatgagaagactcaggaacatttcactcacaacacagtcagggggtgttcatacttctacagttacccggctgtatgtgaattcttacagcacaataacttgttatctatactccgagcccacgaagcccaagatgcagggtaccgcatgtacaggaaaagccaaacaacaggcttcccttctctaattacaattttttcagcaccaaattacttagatgtatacaataacaaagctgcagtattgaagtatgagaacaatgttatgaatatcaggcaattcaactgttctcctcatccatactggcttccaaatttcatggatgtttttacttggtcccttccatttgttggggaaaaagtgactgagatgctggtaaatgtcctcaacatctgctcagatgatgaactagggtcagaagaagatggatttgatggtgcaacagctgcagcccggaaagaggtgataaggaacaagatccgagcaataggcaaaatggccagagtgttctcagtgctcagagaagagagtgagagtgtgctgacgctgaaaggcttgaccccaactggcatgatggggattgctgcatatcagcagttggatgttcttgcctctgacagtagcttatttgctctgggggccaggaattggattcagtttacactatcattaaaaaagagggagagagataataaactatattttggtggggatggtgattaaacacctcttttgggtatgccttttaaaaatgcttatagagaaaaaaaattttaaaaagaaagctaatgctagtatatactgcaatgttaggggaatgaacatgttttcctactgcattggggacttctagataggttaatgaaaggccttttattctgttactggacatgaaaactttgtctaatttcttactctattgtacgtttacagtcgcagcactaaaaatggatgacatcaaacatttttaacaaaatgatgtacaaactaaggactatttattgataatgttttgctactcttgtcagacaatggctataaactgaattaggcagtctt

SEQ ID NO: 330012 - DNA, 600 bp, Homo sapiens
gtaagtcctgaggagggaggttgcccacttgtatacacattttgttgtttatagcatgaaatcaaaagtcctagttaccagtgagtcttcaaataccttacccatcataatcttttactgttgaatctatacattagagtagtaagtatattatacatatatacacatattttcatgtgttaaatatctgtaagattgcaatgctctaaaaagtggaatgcaacttagagatggtgatgatttctgaagtgatactttaagaagtgatattgtttttaagtagaaatactaagtggcacacaggatattcattgggaaagattagacaaagtatcccgagacttccacaatggttgagtaagggtataagttaaaacagtggttttcaaagtgtgatccccagactgatagtatcatcatcatcaccatttgaaacttgttaaaatatgcattcttaggccccactccagcctactgaatcacagtacctggggtgagacccaacaatctgtgtcttatccagccctctgtgtgattctgatgcacattaaagtttgagaagcactgaactttcggaagaaggacacatttttttctctt

SEQ ID NO: 330013 - DNA, 449 bp, Homo sapiens
agaagagagtgagagtgtgctgacgctgaaaggcttgaccccaactggcatgctccccagcggagtactttctggagggaagcaaaccctgcaaagcggtaagcaggctgatgggtatgactgtgtgctggggcatcgcagtcagctgtgtcattagagccctgatttattcattcatttaagctctgtcttggtcttcggttcttcttctcagctggcagaagggctgaaaccccaatcagtttgatcagtcatgtccaacataatagctccctcattctctggaatgtggtctttactccacctttcccccattccctcattcacatgttaatctacatattcagcctagctacaggacaactcatttaggttgcctacatgcacaataggtttgactactttgagccactccgttgtcaaaaacaactttttaatcacatttttaa

SEQ ID NO: 330014 - DNA, 482 bp, Homo sapiens
ggtttaagtccataagttgtataagcattctgggatgcctaaggtgtgagcctggatgttttggaacttcagtcaaatggttgaattttcttgatgagctaaagccatacatagaagcagaaatatgttctgtgttcctaacatcctcttttggttatttttagctgcagtattgaagtatgagaacaatgttatgaatatcaggcaattcaactgttctcctcatccatactggcttccaaatttcatggatgtttttacttggtcccttccatttgttggggaaaaaggtatgttgtggaatcctgagatgttcttcttaaaatagtttaggaaggaaggaaaggagattaaacactcagaaagagaagaactttggcccagccaataaaattcacaagttgtacaatgaaagatgtgatttggaagtggcagtgtgtcactctgtatcctattaacaggacacaattggtgaatgaggg

SEQ ID NO: 330015 - DNA, 4541 bp, Homo sapiens
gcggccgcctctccgccgccggggacgccaaggtgcggctggtggcactgacatcggcggccctgcctctcctccctcgcccccggccttccccatgtgatcggtcttaatcctggccgtgtgtgcgcgcgtggggctccattccgcggtgctgggtctccgtgccggggtgggtgctcgtgtgtgcgcttctcctccccatcccccttcccccaagaataaaagaagaaccgggaggcgtgctcagaaaataaataaataaccaccacacacgcgcagcccggagcgagtcggcggggctggcggcagcggcggaggaggagtgaaggcggcggcggcggaggagggacgcgcggaaaaggcagcaactttaaagccagctcagagcctagacctccagccgagcggtttgcagcgcggcggcggcggcggcggcggcggcggcgttgagtgtctggcccgccggtccggtcggggtgtgcagtcggacggacgagcagcgcgtcgctgtcctccggcagctggagatgtccgagcccaaggcaattgatcccaagttgtcgacgaccgacagggtggtgaaagctgttccatttcctccaagtcaccggcttacagcaaaagaagtgtttgataatgatggaaaacctcgtgtggatatcttaaaggcgcatcttatgaaggagggaaggctggaagagagtgttgcattgagaataataacagagggtgcatcaattcttcgacaggaaaaaaatttgctggatattgatgcgccagtcactgtttgtggggacattcatggacaattctttgatttgatgaagctctttgaagtcgggggatctcctgccaacactcgctacctcttcttaggggactatgttgacagagggtacttcagtattgaatgtgtgctgtatttgtgggccttgaaaattctctaccccaaaacactgtttttacttcgtggaaatcatgaatgtagacatctaacagagtatttcacatttaaacaagaatgtaaaataaagtattcagaacgcgtatatgatgcctgtatggatgcctttgactgccttcccctggctgccctgatgaaccaacagttcctgtgtgtgcatggtggtttgtctccagagattaacactttagatgatatcagaaaattagaccgattcaaagaaccacctgcatatggacctatgtgtgatatcctgtggtcagaccccctggaagattttggaaatgagaagactcaggaacatttcactcacaacacagtcagggggtgttcatacttctacagttacccggctgtatgtgaattcttacagcacaataacttgttatctatactccgagcccacgaagcccaagatgcagggtaccgcatgtacaggaaaagccaaacaacaggcttcccttctctaattacaattttttcagcaccaaattacttagatgtatacaataacaaagctgcagtattgaagtatgagaacaatgttatgaatatcaggcaattcaactgttctcctcatccatactggcttccaaatttcatggatgtttttacttggtcccttccatttgttggggaaaaagtgactgagatgctggtaaatgtcctcaacatctgctcagatgatgaactagggtcagaagaagatggatttgatggtgcaacagctgcagcccggaaagaggtgataaggaacaagatccgagcaataggcaaaatggccagagtgttctcagtgctcagagaagagagtgagagtgtgctgacgctgaaaggcttgaccccaactggcatgctccccagcggagtactttctggagggaagcaaaccctgcaaagcgctactgttgaggctattgaggctgatgaagctatcaaaggattttcaccacaacataagatcactagcttcgaggaagccaagggcttagaccgaattaatgagaggatgccgcctcgcagagatgccatgccctctgacgccaaccttaactccatcaacaaggctctcacctcagagactaacggcacggacagcaatggcagtaatagcagcaatattcagtgaccacttcctgttcactttttttttttttttttttttttttttttgagctgcggggcatgatggggattgctgcatatcagcagttggatgttcttgcctctgacagtagcttatttgctctgggggccaggaattggattcagtttacactatcattaaaaaagagggagagagataataaactatattttggtggggatggtgattaaacacctcttttgggtatgccttttaaaaatgcttatagagaaaaaaaattttaaaaagaaagctaatgctagtatatactgcaatgttaggggaatgaacatgttttcctactgcattggggacttctagataggttaatgaaaggccttttattctgttactggacatgaaaactttgtctaatttcttactctattgtacgtttacagtcgcagcactaaaaatggatgacatcaaacatttttaacaaaatgatgtacaaactaaggactatttattgataatgttttgctactcttgtcagacaatggctataaactgaattaggcagtcttaaaaaaaaaaaaaaaacagaaaaagaaaaaaaagaacgttgcaaatttgttaaaatgccaaaaaggacagtttaattttgtacagattatgcttacctcaggtttctttagtgtgcttgaatgcccttctttccatataacacttatcttcttcttaattcggcaatggaatatcttttaagttttaaaaaaactggaataattatatctatcttttttgccgtttatatttaggggtttttgttgataaaatcaagtcttggttgtggcttgctgaattaaatatttatgagtggtgcatttttaagtatagtgaacaagacaccatattaagtacagtgataaagcatctatattctgtaaaaaaaaaaaaaatctgcctatgcatgttttttaagaaaaaaaaaatggctgtatcggcctgtatgggactgtaatgcgcttagtggtctgacatatactggaaatgtatgtatactggcgtactttatattctctaaaatgcttaatgcctttgaaattttgtaatcaaaaaaaagctttgaaaaaatctaaaggggagagtattctttaaagtttttaacataagcttgtcaatgcacatgtagatggttagcatgtttagcaaaccttgtgaaattataataagtttgtagttacatgtgaaactctaaatgcatggcaactgttaatgtcataacagtttagttattttgttctgttctgtcatgtgccacaaaatatgtacttttttcacttttttccctttgtatatcagttacgggttacaactggttcattctgaaaacaacaacaacaaaagtccattcatattttttaacaattgtataagtgcccaagtaattcactacagcctaaagccttgcctttgtaatttgacttctgacatgttggcaatcaaagcatgcacttgtaacaatgaaaaagaaaaagcattttatattactactcaataaaatgtgcatgaacttacagaattctcatccttccactgagtccgctgaagggatttatgtgcacaaccaccatgtgtcttctaggtgctggcccaccaccacacatcacaggctgatttccacaggcttcttcctaggggcctcgtgatctgaggggtggtgcctacttccactgtaagaaagaatcttggtggatttgtgtctcaaatcagataagagaagcctgtttaaagagcagatgccatcttctggcttcctcaaggagccagttaaaaaaccagagcattcctttttattgaaaaataaaattaatttgttatcaggttgtttcagttgtattggatgccctatctatctgctaaagcaaaaagtactaggctactaagtgcattttcatcacagaaaagagttgcatttgtattaacaagaaatttgtatacccacgcttcagctactatctaatcatcacccgaagatttaagatacaccaaatttcagtttgtttgtaacattgttcatctttagtgcactttgttttatataataaagtatgcctgttatattaaataataagaatatggcaattagcgatatagcatacccaaacaaagatgttctcgatacagtctggcaaagactatcccaaggttattttaatgaattcagacattttttcctgtggatatttctccatcctaaaaaaagtggcaaccaaggaaaatatttagatgcaacttactagagtgatgatgtgaaagaaatggtgattctggtatcatggtgtttattttctttcttataactgcagagaaaatatcctgactaaaaaaaattcatttttttggattcctttcttttacaaattgtgctgaggcaactatggcatagaaataaacatttgacattaaaataaaaaaacagttgat

SEQ ID NO: 330016 - DNA, 3631 bp, Homo sapiens
gcggccgcctctccgccgccggggacgccaaggtgcggctggtggcactgacatcggcggccctgcctctcctccctcgcccccggccttccccatgtgatcggtcttaatcctggccgtgtgtgcgcgcgtggggctccattccgcggtgctgggtctccgtgccggggtgggtgctcgtgtgtgcgcttctcctccccatcccccttcccccaagaataaaagaagaaccgggaggcgtgctcagaaaataaataaataaccaccacacacgcgcagcccggagcgagtcggcggggctggcggcagcggcggaggaggagtgaaggcggcggcggcggaggagggacgcgcggaaaaggcagcaactttaaagccagctcagagcctagacctccagccgagcggtttgcagcgcggcggcggcggcggcggcggcggcggcgttgagtgtctggcccgccggtccggtcggggtgtgcagtcggacggacgagcagcgcgtcgctgtcctccggcagctggagatgtccgagcccaaggcaattgatcccaagttgtcgacgaccgacagggtggtgaaagctgttccatttcctccaagtcaccggcttacagcaaaagaagtgtttgataatgatggaaaacctcgtgtggatatcttaaaggcgcatcttatgaaggagggaaggctggaagagagtgttgcattgagaataataacagagggtgcatcaattcttcgacaggaaaaaaatttgctggatattgatgcgccagtcactgtttgtggggacattcatggacaattctttgatttgatgaagctctttgaagtcgggggatctcctgccaacactcgctacctcttcttaggggactatgttgacagagggtacttcagtattgaatgtgtgctgtatttgtgggccttgaaaattctctaccccaaaacactgtttttacttcgtggaaatcatgaatgtagacatctaacagagtatttcacatttaaacaagaatgtaaaataaagtattcagaacgcgtatatgatgcctgtatggatgcctttgactgccttcccctggctgccctgatgaaccaacagttcctgtgtgtgcatggtggtttgtctccagagattaacactttagatgatatcagaaaattagaccgattcaaagaaccacctgcatatggacctatgtgtgatatcctgtggtcagaccccctggaagattttggaaatgagaagactcaggaacatttcactcacaacacagtcagggggtgttcatacttctacagttacccggctgtatgtgaattcttacagcacaataacttgttatctatactccgagcccacgaagcccaagatgcagggtaccgcatgtacaggaaaagccaaacaacaggcttcccttctctaattacaattttttcagcaccaaattacttagatgtatacaataacaaagctgcagtattgaagtatgagaacaatgttatgaatatcaggcaattcaactgttctcctcatccatactggcttccaaatttcatggatgtttttacttggtcccttccatttgttggggaaaaagtgactgagatgctggtaaatgtcctcaacatctgctcagatgatgaactagggtcagaagaagatggatttgatggtgcaacagctgcagcccggaaagaggtgataaggaacaagatccgagcaataggcaaaatggccagagtgttctcagtgctcagagaagagagtgagagtgtgctgacgctgaaaggcttgaccccaactggcatgctccccagcggagtactttctggagggaagcaaaccctgcaaagcgctactgttgaggctattgaggctgatgaagctatcaaaggattttcaccacaacataagatcactagcttcgaggaagccaagggcttagaccgaattaatgagaggatgccgcctcgcagagatgccatgccctctgacgccaaccttaactccatcaacaaggctctcacctcagagactaacggcacggacagcaatggcagtaatagcagcaatattcagtgaccacttcctgttcactttttttttttttttttttttttttttttgagctgcggggcatgatggggattgctgcatatcagcagttggatgttcttgcctctgacagtagcttatttgctctgggggccaggaattggattcagtttacactatcattaaaaaagagggagagagataataaactatattttggtggggatggtgattaaacacctcttttgggtatgccttttaaaaatgcttatagagaaaaaaaattttaaaaagaaagctaatgctagtatatactgcaatgttaggggaatgaacatgttttcctactgcattggggacttctagataggttaatgaaaggccttttattctgttactggacatgaaaactttgtctaatttcttactctattgtacgtttacagtcgcagcactaaaaatggatgacatcaaacatttttaacaaaatgatgtacaaactaaggactatttattgataatgttttgctactcttgtcagacaatggctataaactgaattaggcagtcttaaaaaaaaaaaaaaaacagaaaaagaaaaaaaagaacgttgcaaatttgttaaaatgccaaaaaggacagtttaattttgtacagattatgcttacctcaggtttctttagtgtgcttgaatgcccttctttccatataacacttatcttcttcttaattcggcaatggaatatcttttaagttttaaaaaaactggaataattatatctatcttttttgccgtttatatttaggggtttttgttgataaaatcaagtcttggttgtggcttgctgaattaaatatttatgagtggtgcatttttaagtatagtgaacaagacaccatattaagtacagtgataaagcatctatattctgtaaaaaaaaaaaaaatctgcctatgcatgttttttaagaaaaaaaaaatggctgtatcggcctgtatgggactgtaatgcgcttagtggtctgacatatactggaaatgtatgtatactggcgtactttatattctctaaaatgcttaatgcctttgaaattttgtaatcaaaaaaaagctttgaaaaaatctaaaggggagagtattctttaaagtttttaacataagcttgtcaatgcacatgtagatggttagcatgtttagcaaaccttgtgaaattataataagtttgtagttacatgtgaaactctaaatgcatggcaactgttaatgtcataacagtttagttattttgttctgttctgtcatgtgccacaaaatatgtacttttttcacttttttccctttgtatatcagttacgggttacaactggttcattctgaaaacaacaacaacaaaagtccattcatattttttaacaattgtataagtgcccaagtaattcactacagcctaaagccttgcctttgtaatttgacttctgacatgttggcaatcaaagcatgcacttgtaacaatgaaaaagaaaaagcattttatattactactcaataaaatgtgcatgaactta

SEQ ID NO: 330017 - DNA, 3000 bp, Homo sapiens
gcggccgcctctccgccgccggggacgccaaggtgcggctggtggcactgacatcggcggccctgcctctcctccctcgcccccggccttccccatgtgatcggtcttaatcctggccgtgtgtgcgcgcgtggggctccattccgcggtgctgggtctccgtgccggggtgggtgctcgtgtgtgcgcttctcctccccatcccccttcccccaagaataaaagaagaaccgggaggcgtgctcagaaaataaataaataaccaccacacacgcgcagcccggagcgagtcggcggggctggcggcagcggcggaggaggagtgaaggcggcggcggcggaggagggacgcgcggaaaaggcagcaactttaaagccagctcagagcctagacctccagccgagcggtttgcagcgcggcggcggcggcggcggcggcggcggcgttgagtgtctggcccgccggtccggtcggggtgtgcagtcggacggacgagcagcgcgtcgctgtcctccggcagctggagatgtccgagcccaaggcaattgatcccaagttgtcgacgaccgacagggtggtgaaagctgttccatttcctccaagtcaccggcttacagcaaaagaagtgtttgataatgatggaaaacctcgtgtggatatcttaaaggcgcatcttatgaaggagggaaggctggaagagagtgttgcattgagaataataacagagggtgcatcaattcttcgacaggaaaaaaatttgctggatattgatgcgccagtcactgtttgtggggacattcatggacaattctttgatttgatgaagctctttgaagtcgggggatctcctgccaacactcgctacctcttcttaggggactatgttgacagagggtacttcagtattgaatgtgtgctgtatttgtgggccttgaaaattctctaccccaaaacactgtttttacttcgtggaaatcatgaatgtagacatctaacagagtatttcacatttaaacaagaatgtaaaataaagtattcagaacgcgtatatgatgcctgtatggatgcctttgactgccttcccctggctgccctgatgaaccaacagttcctgtgtgtgcatggtggtttgtctccagagattaacactttagatgatatcagaaaattagaccgattcaaagaaccacctgcatatggacctatgtgtgatatcctgtggtcagaccccctggaagattttggaaatgagaagactcaggaacatttcactcacaacacagtcagggggtgttcatacttctacagttacccggctgtatgtgaattcttacagcacaataacttgttatctatactccgagcccacgaagcccaagatgcagggtaccgcatgtacaggaaaagccaaacaacaggcttcccttctctaattacaattttttcagcaccaaattacttagatgtatacaataacaaagctgcagtattgaagtatgagaacaatgttatgaatatcaggcaattcaactgttctcctcatccatactggcttccaaatttcatggatgtttttacttggtcccttccatttgttggggaaaaagtgactgagatgctggtaaatgtcctcaacatctgctcagatgatgaactagggtcagaagaagatggatttgatggtgcaacagctgcagcccggaaagaggtgataaggaacaagatccgagcaataggcaaaatggccagagtgttctcagtgctcagagaagagagtgagagtgtgctgacgctgaaaggcttgaccccaactggcatgctccccagcggagtactttctggagggaagcaaaccctgcaaagcgctactgttgaggctattgaggctgatgaagctatcaaaggattttcaccacaacataagatcactagcttcgaggaagccaagggcttagaccgaattaatgagaggatgccgcctcgcagagatgccatgccctctgacgccaaccttaactccatcaacaaggctctcacctcagagactaacggcacggacagcaatggcagtaatagcagcaatattcagtgaccacttcctgttcactttttttttttttttttttttttttttttgagctgcggggcatgatggggattgctgcatatcagcagttggatgttcttgcctctgacagtagcttatttgctctgggggccaggaattggattcagtttacactatcattaaaaaagagggagagagataataaactatattttggtggggatggtgattaaacacctcttttgggtatgccttttaaaaatgcttatagagaaaaaaaattttaaaaagaaagctaatgctagtatatactgcaatgttaggggaatgaacatgttttcctactgcattggggacttctagataggttaatgaaaggccttttattctgttactggacatgaaaactttgtctaatttcttactctattgtacgtttacagtcgcagcactaaaaatggatgacatcaaacatttttaacaaaatgatgtacaaactaaggactatttattgataatgttttgctactcttgtcagacaatggctataaactgaattaggcagtcttaaaaaaaaaaaaaaaacagaaaaagaaaaaaaagaacgttgcaaatttgttaaaatgccaaaaaggacagtttaattttgtacagattatgcttacctcaggtttctttagtgtgcttgaatgcccttctttccatataacacttatcttcttcttaattcggcaatggaatatcttttaagttttaaaaaaactggaataattatatctatcttttttgccgtttatatttaggggtttttgttgataaaatcaagtcttggttgtggcttgctgaattaaatatttatgagtggtgcatttttaagtatagtgaacaagacaccatattaagtacagtgataaagcatctatattctgta

SEQ ID NO: 330018 - DNA, 2608 bp, Homo sapiens
gcggccgcctctccgccgccggggacgccaaggtgcggctggtggcactgacatcggcggccctgcctctcctccctcgcccccggccttccccatgtgatcggtcttaatcctggccgtgtgtgcgcgcgtggggctccattccgcggtgctgggtctccgtgccggggtgggtgctcgtgtgtgcgcttctcctccccatcccccttcccccaagaataaaagaagaaccgggaggcgtgctcagaaaataaataaataaccaccacacacgcgcagcccggagcgagtcggcggggctggcggcagcggcggaggaggagtgaaggcggcggcggcggaggagggacgcgcggaaaaggcagcaactttaaagccagctcagagcctagacctccagccgagcggtttgcagcgcggcggcggcggcggcggcggcggcggcgttgagtgtctggcccgccggtccggtcggggtgtgcagtcggacggacgagcagcgcgtcgctgtcctccggcagctggagatgtccgagcccaaggcaattgatcccaagttgtcgacgaccgacagggtggtgaaagctgttccatttcctccaagtcaccggcttacagcaaaagaagtgtttgataatgatggaaaacctcgtgtggatatcttaaaggcgcatcttatgaaggagggaaggctggaagagagtgttgcattgagaataataacagagggtgcatcaattcttcgacaggaaaaaaatttgctggatattgatgcgccagtcactgtttgtggggacattcatggacaattctttgatttgatgaagctctttgaagtcgggggatctcctgccaacactcgctacctcttcttaggggactatgttgacagagggtacttcagtattgaatgtgtgctgtatttgtgggccttgaaaattctctaccccaaaacactgtttttacttcgtggaaatcatgaatgtagacatctaacagagtatttcacatttaaacaagaatgtaaaataaagtattcagaacgcgtatatgatgcctgtatggatgcctttgactgccttcccctggctgccctgatgaaccaacagttcctgtgtgtgcatggtggtttgtctccagagattaacactttagatgatatcagaaaattagaccgattcaaagaaccacctgcatatggacctatgtgtgatatcctgtggtcagaccccctggaagattttggaaatgagaagactcaggaacatttcactcacaacacagtcagggggtgttcatacttctacagttacccggctgtatgtgaattcttacagcacaataacttgttatctatactccgagcccacgaagcccaagatgcagggtaccgcatgtacaggaaaagccaaacaacaggcttcccttctctaattacaattttttcagcaccaaattacttagatgtatacaataacaaagctgcagtattgaagtatgagaacaatgttatgaatatcaggcaattcaactgttctcctcatccatactggcttccaaatttcatggatgtttttacttggtcccttccatttgttggggaaaaagtgactgagatgctggtaaatgtcctcaacatctgctcagatgatgaactagggtcagaagaagatggatttgatggtgcaacagctgcagcccggaaagaggtgataaggaacaagatccgagcaataggcaaaatggccagagtgttctcagtgctcagagaagagagtgagagtgtgctgacgctgaaaggcttgaccccaactggcatgctccccagcggagtactttctggagggaagcaaaccctgcaaagcgctatcaaaggattttcaccacaacataagatcactagcttcgaggaagccaagggcttagaccgaattaatgagaggatgccgcctcgcagagatgccatgccctctgacgccaaccttaactccatcaacaaggctctcacctcagagactaacggcacggacagcaatggcagtaatagcagcaatattcagtgaccacttcctgttcactttttttttttttttttttttttttttttgagctgcggggcatgatggggattgctgcatatcagcagttggatgttcttgcctctgacagtagcttatttgctctgggggccaggaattggattcagtttacactatcattaaaaaagagggagagagataataaactatattttggtggggatggtgattaaacacctcttttgggtatgccttttaaaaatgcttatagagaaaaaaaattttaaaaagaaagctaatgctagtatatactgcaatgttaggggaatgaacatgttttcctactgcattggggacttctagataggttaatgaaaggccttttattctgttactggacatgaaaactttgtctaatttcttactctattgtacgtttacagtcgcagcactaaaaatggatgacatcaaacatttttaacaaaatgatgtacaaactaaggactatttattgataatgttttgctactcttgtcagacaatggctataaactgaattaggcagtctt

SEQ ID NO: 330019 - DNA, 325 bp, Homo sapiens
atagtaactaacttgataaacttggttctaggttaagttaaacagggccactatgaatcatgtgcagtactcaatctgtaatctttacagggtagctgtagctgattaggtcttcaaaagtttttcatacccacagatcagggggatgtcacatctggacaccaagaaggaacttttcttgctccaggagagaaagaaaagtgttaaaagtgactgtggtacctcaaaccatgaaatattaaacagcaataaaaacctgctatttagataatggctaatcctctatggtccttgaactaaatttaattactttctatttaacttc

SEQ ID NO: 330020 - DNA, 275 bp, Homo sapiens
tgcggggaggagccacacactttaaacaaccagatcacagaggaactgtatcacaagaacagcaatagggggtggcactaaaccatcagaaaccacccggatgatccggtcacctccctccaggccccacctccagcactggggatacattcaacatgagattgggtgaggacccagattcaaaccacatcaccttccttgcctcttcctgcttctgatgactcctggtgttccttggcttgtggcctcatctctcccatgtctgcctttctttc

SEQ ID NO: 330021 - DNA, 498 bp, Homo sapiens
tgcctgcacgcttagtttacctttaaagcagggtttaaagctgactcctgatttctgcaataggctcttaaagaattgaaagtcacacctttcccaaggatgagggacctccctatacatgaacaggagaccattcaagagaattcactcaagaaaaagagatccatgtggataagtgtggtgttcccagggttccttgtatagaagtggaatgtcttaagagattgcccagctggtggtgaatatgttgcctgtttgaactccaccaggtcaatgttgaagaggtttctgttccagcaggcactagaggcttcacattgctctgaaaatgtctgaaaccgagatacactcatgctttgcccatcctgtttcctttgcctggaatggccccttcaaagctctctattaaaattcacttcatcctccaaaggcccttttcaaatgctaccttctctacccagtttttcctcatttccccagatggatctccacagaacc

SEQ ID NO: 330022 - DNA, 4490 bp, Homo sapiens
  misc_feature (1)..(2): n is a, c, g, or t
  misc_feature (631)..(631): n is a, c, g, or t
  misc_feature (951)..(951): n is a, c, g, or t
  misc_feature (1094)..(1094): n is a, c, g, or t
  misc_feature (1298)..(1298): n is a, c, g, or t
nngggcttgagctgatgatagtggcaaagaatttcattttttaaaaatgcataccacctgccctttataaaaaaatttaaaccctaatgtatttaattttataattcataaaaatttaaatattggaactaagaacagagcaaagcaaagggaaaaagcactcctttgttttcaaattgcacaaactgtccctggagattctgatagtctctcatctctcttaactatcactgtaaacaacatagaaagcataagactgcaagaagtcagttatacacaaaacaaaatgaagcacagtggaattttctctttctttatctgtatatttctgaagttggtaaagcaactatcttctctattttacagaagagaaagctgagacccaaaaagctattcatagtgatagagctagaactaaaactcagatctcctcatctcagcccagtcttctcagtagctcagactgctttctataatgaacaagaaagaataattagggatttgtattttggcacaaaacagtatcaaatttttattgtaaaaatccacaaatctgacattttatcttttattctagccaggatgtattcttcatttgcatgtgtgtgtttctcttagaaagtggtgctcncaaacctttcaaagcacagaatttattgtaccctctttatttttaccaaattgaaacgtttcaggatttcagaagcaaagtgcaatccaattgtggctggagttttcctgatagaggatccgggtggttccctcccctccaacttctggctactgccctttatttcctttgtgcaatagaattccctgaaacagattatgtcgtaattatactgatttagtcaggataatgggaaaagcgacaaatcggatttatgtattaggtattatggagctttctttagcactctcctccaagtttaatctctgacatgtgtgatntagtaactttctgtctctgagaagcagtttggacccagctgaaaaattttatttatggagacttgtaatcagcctgatatacagagaacactctggactggaaatatagtcaggtaccaaggtctgctaatttggccattgcnagtgattcaaaaccacctccccaccctgagtaaaagatttgatatgaatatgaatgctatgagtctcctggtgatgttttgggtgtatatgttcctgtgtgtgtttggaaatcatagagggtatttaccttgagggctcttttgttgaccttatttatttgaaattcttattttatttgtaatggcatatgtatatttttgtgntgctacatgcaatctctgtgtatactttttgtatatatgtatacatatttgtaaatatattggtatgcagtgatacagtatgtgtatattatgtacccatacccattgtgggctgaatttatttaagttctgtgaggacatcctagtggcattgttcatgctgctgtaattaggttgtggctgtatctcattcataagcctctattttgagaggcttgtgtttggataaaatgggctaatttggagttgaaattaggatatgaagatcttaacagaaagctagatatttattcttagctttaaaatcacctgcaaatttttatttaaactgatgataaattagtgatataacctgaaaaacctaagtatgtgaaactgagacaccagcagattcttaggctgtagtagtcctttattttcttgatccatatttaagtattattactgagtagtaaattatgtatattggggcttaatagagaggctgtggaaaaaaattgctttaatcacatttaaaaacataggaaaatgtccattaaataggggaaatatattcccagttgtcatttttatgcctcatactgaattttgattttggaacaattcttttttcatcagtgttttatgtgtctctatgaggcagaaaagggggcattagctaagggatggcctaacctaagtaggataggatttagtgaggaacgggaggttgttaatttgtatatttgcagcagctatgattaatttagtcctgtcttggcatttccggctacagattttttcttactggacttgcatatcaaaggtgagtaggctcatctgagaaaatgcttccactgaataaaatgccttcactcgtattgctgtgtctctatgagaccacttgtgttctgcaagttgatgatatattcgcacatgaagtagagtttttaatattagatgcatggtgtgctataaaaatctgggccttcaaacctctcccaaggatgatagggttggggaggataagaggatagtaaatacgtgcaatgccaatttgtgaacctatagaatgttgccaagtatcaatgtttggttacttcagttgacatatttatttgcatgaaagagtgtaggagatgtttaatatacacttaaatacattcactgcagaaattaagtagaggttatttttgcatgataaaatataactgcaaagcaactttttacaccgtattctttggaagattaaatctatctgatccaatattatcttaaaatagagaaattatctcaggagtctgttttaccacccaaaaaaatgttacatttgctgattcattatattttaaataaaacagccaactattcataagacttttcaattatagtattaaattcagaaataattataacagcatttttcttgaataaatattaaaatttggtaatttattatttctgaaaaatcagtgaaaacatccataggatctgatggtttgttgtttgaataaccaaatcattgtttttgcactggagagtagtagagcagatattataccatttaaaattcatggaactgactcaggctccttgtggatattaatttgaggacagtagtggtaatcaaaagtacagtagaaaacacttgacattgtgaatgtgacctctgaccccaaccgttgtaaagccaataactttgagggtgaataaggtaacacttgcttagaaaacccagccctttcccccagtctcctgcgctcttatacattgatactttacaactatttttgctgtacctctcagtctttcctggataatgggaccacttaaaaaaaaaagtgattcatcttcctcaaactagaatttcaaagcctaatactacactatgttccagcttcactgagttttgaacaaaaagacttaagcatgccttgtgtttaaggaaaaataattgatgtgtgaatggaatcaatcacctattgacgggaagggtgtcaggatgatgtagggtgatatgcctttaattggataaagagaactgtattaagtataactaatttaataactgattgaagcaccattcttaattttaaaatatttttgttaatttcttttgtggttttaaaaattaataatttttttttttttgagatggagttttgctcgttgcccaggctggaatgcaatggcgcgatctcagctcactgcaacctccgcctcctgggttcaagagattctcctgcctcagcctcccaagtagctgggattacaggcgtgtgccaccacgaccagctaattttgtatttttagtagagatggggtttcaccatgttggccaggttggtctcgaactcctgacctcaagtgatccacccgcctcggcctcccaaagtgctgggattacaggtgtgagccactgtggccggcctaaaaaaaattctttttaatagttatcagactactttaaccagtgccatgtttaaacatacttggacaatagactcagtttttttaatagtttgaagtacattatattaaaactacaaactcacttattcaagcctaaatttcatcatagactataaattgggtatcaatttcctattttggtggacaattccagtctgtctactacgacaatcatctttttaggtgtaatattgtttaagacataggtaattttaggttttatacttttctcctaggcttatggaatgaaagctaataggatatcactttcagaatgaaatagggaattatggctagccttcttatagggctgccgtaaatgatacttaaatgtttgttatatcactgattttcttttctcttctgaagctgttgtgaatgtccactttgccatgattaaaagttgagatttgtaaacattacaatttgaaccataaattttctcaaacatgaaatcagtatgaataagtataaaatttgaaatgatcatacatgagaatcccaaaagtaaatacttccaaaccatagagggataaccactgtatttttaaaaagcttatttccacccttaaagaagcatgctactaattgctttttttctaaattaaaactatgtactgtggtaaattaaaaatctgcaggaaaaattgcttagtgttttagcacaataagaatttttattactcaggagttggagaccagtctgggcaatacagtgaaaccctgtcgctactaaaatac

SEQ ID NO: 330023 - DNA, 580 bp, Homo sapiens
  misc_feature (10)..(10): n is a, c, g, or t
ctagccggtncctctctccacattgtgttctaaattgcttaagccatacgttctcttaaacaggatgtttttttcttcctttccagcagcctttttcttctttgtctgttatggttaatactccatagattttagaaattgagaagttcttgaaacattttattttcttgagttcatcacttttgactcttgtatgagatgtgatttgtcataaaagatagccttccactacttcactaaatgaatttcagagtaaacactgtgattctgcagagcggattcagtaggctttccaatgttttctcctgctatacagtgcctaccaccttgagggcacttcagtactagaggatgaaaactgaaacgttgttttgatgtttattgaataacgagattagagaatatttgatttttgttgtcagtgtattaaagaaattttcacattgataaatgttctctaggaatgtgtctacattcatcaggtgtgaactcttgtacatgaattttgtaccttgaatccacatatatattaagtgtatcatcaatataaaaataaacattatttgcttaaaaaaattgg

SEQ ID NO: 330024 - DNA, 6381 bp, Homo sapiens
  misc_feature (1)..(2): n is a, c, g, or t
  misc_feature (631)..(631): n is a, c, g, or t
  misc_feature (951)..(951): n is a, c, g, or t
  misc_feature (1094)..(1094): n is a, c, g, or t
  misc_feature (1298)..(1298): n is a, c, g, or t
nngggcttgagctgatgatagtggcaaagaatttcattttttaaaaatgcataccacctgccctttataaaaaaatttaaaccctaatgtatttaattttataattcataaaaatttaaatattggaactaagaacagagcaaagcaaagggaaaaagcactcctttgttttcaaattgcacaaactgtccctggagattctgatagtctctcatctctcttaactatcactgtaaacaacatagaaagcataagactgcaagaagtcagttatacacaaaacaaaatgaagcacagtggaattttctctttctttatctgtatatttctgaagttggtaaagcaactatcttctctattttacagaagagaaagctgagacccaaaaagctattcatagtgatagagctagaactaaaactcagatctcctcatctcagcccagtcttctcagtagctcagactgctttctataatgaacaagaaagaataattagggatttgtattttggcacaaaacagtatcaaatttttattgtaaaaatccacaaatctgacattttatcttttattctagccaggatgtattcttcatttgcatgtgtgtgtttctcttagaaagtggtgctcncaaacctttcaaagcacagaatttattgtaccctctttatttttaccaaattgaaacgtttcaggatttcagaagcaaagtgcaatccaattgtggctggagttttcctgatagaggatccgggtggttccctcccctccaacttctggctactgccctttatttcctttgtgcaatagaattccctgaaacagattatgtcgtaattatactgatttagtcaggataatgggaaaagcgacaaatcggatttatgtattaggtattatggagctttctttagcactctcctccaagtttaatctctgacatgtgtgatntagtaactttctgtctctgagaagcagtttggacccagctgaaaaattttatttatggagacttgtaatcagcctgatatacagagaacactctggactggaaatatagtcaggtaccaaggtctgctaatttggccattgcnagtgattcaaaaccacctccccaccctgagtaaaagatttgatatgaatatgaatgctatgagtctcctggtgatgttttgggtgtatatgttcctgtgtgtgtttggaaatcatagagggtatttaccttgagggctcttttgttgaccttatttatttgaaattcttattttatttgtaatggcatatgtatatttttgtgntgctacatgcaatctctgtgtatactttttgtatatatgtatacatatttgtaaatatattggtatgcagtgatacagtatgtgtatattatgtacccatacccattgtgggctgaatttatttaagttctgtgaggacatcctagtggcattgttcatgctgctgtaattaggttgtggctgtatctcattcataagcctctattttgagaggcttgtgtttggataaaatgggctaatttggagttgaaattaggatatgaagatcttaacagaaagctagatatttattcttagctttaaaatcacctgcaaatttttatttaaactgatgataaattagtgatataacctgaaaaacctaagtatgtgaaactgagacaccagcagattcttaggctgtagtagtcctttattttcttgatccatatttaagtattattactgagtagtaaattatgtatattggggcttaatagagaggctgtggaaaaaaattgctttaatcacatttaaaaacataggaaaatgtccattaaataggggaaatatattcccagttgtcatttttatgcctcatactgaattttgattttggaacaattcttttttcatcagtgttttatgtgtctctatgaggcagaaaagggggcattagctaagggatggcctaacctaagtaggataggatttagtgaggaacgggaggttgttaatttgtatatttgcagcagctatgattaatttagtcctgtcttggcatttccggctacagattttttcttactggacttgcatatcaaaggtgagtaggctcatctgagaaaatgcttccactgaataaaatgccttcactcgtattgctgtgtctctatgagaccacttgtgttctgcaagttgatgatatattcgcacatgaagtagagtttttaatattagatgcatggtgtgctataaaaatctgggccttcaaacctctcccaaggatgatagggttggggaggataagaggatagtaaatacgtgcaatgccaatttgtgaacctatagaatgttgccaagtatcaatgtttggttacttcagttgacatatttatttgcatgaaagagtgtaggagatgtttaatatacacttaaatacattcactgcagaaattaagtagaggttatttttgcatgataaaatataactgcaaagcaactttttacaccgtattctttggaagattaaatctatctgatccaatattatcttaaaatagagaaattatctcaggagtctgttttaccacccaaaaaaatgttacatttgctgattcattatattttaaataaaacagccaactattcataagacttttcaattatagtattaaattcagaaataattataacagcatttttcttgaataaatattaaaatttggtaatttattatttctgaaaaatcagtgaaaacatccataggatctgatggtttgttgtttgaataaccaaatcattgtttttgcactggagagtagtagagcagatattataccatttaaaattcatggaactgactcaggctccttgtggatattaatttgaggacagtagtggtaatcaaaagtacagtagaaaacacttgacattgtgaatgtgacctctgaccccaaccgttgtaaagccaataactttgagggtgaataaggtaacacttgcttagaaaacccagccctttcccccagtctcctgcgctcttatacattgatactttacaactatttttgctgtacctctcagtctttcctggataatgggaccacttaaaaaaaaaagtgattcatcttcctcaaactagaatttcaaagcctaatactacactatgttccagcttcactgagttttgaacaaaaagacttaagcatgccttgtgtttaaggaaaaataattgatgtgtgaatggaatcaatcacctattgacgggaagggtgtcaggatgatgtagggtgatatgcctttaattggataaagagaactgtattaagtataactaatttaataactgattgaagcaccattcttaattttaaaatatttttgttaatttcttttgtggttttaaaaattaataatttttttttttttgagatggagttttgctcgttgcccaggctggaatgcaatggcgcgatctcagctcactgcaacctccgcctcctgggttcaagagattctcctgcctcagcctcccaagtagctgggattacaggcgtgtgccaccacgaccagctaattttgtatttttagtagagatggggtttcaccatgttggccaggttggtctcgaactcctgacctcaagtgatccacccgcctcggcctcccaaagtgctgggattacaggtgtgagccactgtggccggcctaaaaaaaattctttttaatagttatcagactactttaaccagtgccatgtttaaacatacttggacaatagactcagtttttttaatagtttgaagtacattatattaaaactacaaactcacttattcaagcctaaatttcatcatagactataaattgggtatcaatttcctattttggtggacaattccagtctgtctactacgacaatcatctttttaggtgtaatattgtttaagacataggtaattttaggttttatacttttctcctaggcttatggaatgaaagctaataggatatcactttcagaatgaaatagggaattatggctagccttcttatagggctgccgtaaatgatacttaaatgtttgttatatcactgattttcttttctcttctgaagctgttgtgaatgtccactttgccatgattaaaagttgagatttgtaaacattacaatttgaaccataaattttctcaaacatgaaatcagtatgaataagtataaaatttgaaatgatcatacatgagaatcccaaaagtaaatacttccaaaccatagagggataaccactgtatttttaaaaagcttatttccacccttaaagaagcatgctactaattgctttttttctaaattaaaactatgtactgtggtaaattaaaaatctgcaggaaaaattgcttagtgttttagcacaataagaatttttattactcaggagttggagaccagtctgggcaatacagtgaaaccctgtcgctactaaaatacaaaaaaaaaaaaaaaaaaaaaaaaattagccaggcatggtggtgtgcgcctgtaatcccagctacttgggaggctgaggcaggagaactgcttgtaacctgggaggcggaggttgcagtgagccgagatcgtgccattgcactccagtctgggtgacagagcaagactcattctcaaaaaaaaaaaaaaaaggaatttttattactatttcctgaagaatggtttttgttaacttgttactgtatcattaaaaagaccttctaatggttcagtacaataatctagaacttgatttatgtggctttttatagttatctgaatgcattccttttgccacatagaccatatggctagttctccaacttttttgcttatttttaataaaccttgctgttcaacaatcagagaaacctttaattttggatgattcttccagttgaggtagaaacatcttagataataggaaaggcaaatacaaagtcctaacattttcatagtagagtttacaagtaaaataacttatccatataggttatcttcgttgtgtagcaccagtataaatagtgatttcattaatcattgaatcagatgaagcagttataaatcactttttactttgtgctaagaattattgtaatttcaggacactttattatttcctctgagcagtttccattggaaggttgagtttcccttttttaagttctaatcatcactaaaggttaagataatcaaataggagttaaaataagttatgtttgatctttttcccttgaaaataatgctgaacttattgtctacattctgattattaggcagaaatgcacttgtttaaatcatagaagtaattcatttggaggatataattactcgattttctagtggtgtgaaatactttttaacaattgtgcttgtctgtaactgaaatgttatagaattttaacactatagggattatagagttatattagctctcctcaagagactgaagcacaatatttttcatgtaacaattcttatccaagtgctgctaatctgtcgtgcaaataatgaagctatttggttgcctatttagctattcacaaatcactgtaatctttgaaacaatcttgtcgttcatttgtattaatatttggatattgtgagttaatactttagaaaaaaatccatcaactcagccccgttagcaaaactgtttggattcatagtttttatatgtgttaacagtagaataaattttgaaggggctatttactaccaatgactaaggggaaaattatactgtcactatcatttgacttgaacatttgtggtattgtaaaagtcttgtcagttgtgttctaaattgcttaagccatacgttctcttaaacaggatgtttttttcttcctttccagcagcctttttcttctttgtctgttatggttaatactccatagattttagaaattgagaagttcttgaaacattttattttcttgagttcatcacttttgactcttgtatgagatgtgatttgtcataaaagatagccttccactacttcactaaatgaatttcagagtaaacactgtgattctgcagagcggattcagtaggctttccaatgttttctcctgctatacagtgcctaccaccttgagggcacttcagtactagaggatgaaaactgaaacgttgttttgatgtttattgaataacgagattagagaatatttgatttttgttgtcagtgtattaaagaaattttcacattgataaatgttctctaggaatgtgtctacattcatcaggtgtgaactcttgtacatgaattttgtaccttgaatccacatatatattaagtgtatcatcaatataaaaataaacattatttgcttaaaaaaattgg

SEQ ID NO: 330025 - DNA, 201 bp, Homo sapiens
attttctttttattgttagctttagacatagctgcttgctgtgcagttatacattagctatatgacctccagggcttttcttcctgtttttgtatatctcaagtcactctctattttaagtagcctgtgtgtgtgtgtgtgtgtgtgtgtatctgaatgaaataattgctagctataggcaaaaatgtatgtgtacacaag

SEQ ID NO: 330026 - DNA, 3306 bp, Homo sapiens
agcggacgcgcagcaccccatttaagtttctcgtctttgcagtggctttgcttagatccggtgccgccttgaaggcggggctgggtcccagccgtatccaatggagccccgggtgagggttgaggggtggaaggtgcctactagccggtgcaggtttcttctagcgcgtgtgctggggtacctggtcgtcatggaggcggtattgaccgaagagcttgatgaggaagagcagctgctgagaaggcatcgcaaagagaagaaggagttgcaagccaaaattcagggcatgaagaatgctgttcccaagaatgacaagaagaggaggaagcagctcaccgaagatgtggccaagttggaaaaagaaatggaacagaaacatagagaggaactggagcaattgaagctgactactaaggagaataagatagattctgttgctgttaacatttcaaacttggtgcttgagaatcagccacctcggatatcaaaagcacaaaagagacgggaaaagaaagctgcattggaaaaggagcgagaagaacggatagctgaagctgaaattgaaaacttaacaggagccagacatatggaaagtgagaaacttgctcaaatattggcagctagacagttagaaattaaacagattccatctgatggccactgtatgtataaagccattgaagatcaactgaaagaaaaggattgtgctctgactgtggttgccttgagaagtcagaccgctgagtatatgcaaagccatgtggaagactttctgccatttttaacaaaccctaatacaggagatatgtatactccagaagaatttcagaagtactgtgaagatattgtaaacacagctgcatggggaggtcagcttgagctaagagctctgtctcacattttacaaacaccaatagagataatacaggcagattctcctcccattatagttggtgaagaatattcaaaaaaaccactaatacttgtatatatgagacatgcatatggcttaggagaacattataattcggttacacggttggtaaacatagttactgaaaattgcagctaatttatacaatgttgtacaattatgttttaatacagtgtgctgaactgagtatttctaccaagtgttgggttgttctaaatgctactgaaaaacacaactaccttatatcagttttatggcaaagctactaacaggtgtttttagaaatatgtcagagataaactttaaccagtgtcttcttagtggaattttaaaaatttgttaagttcattgtagagaacaccattcatagaccaagatggtcccctattagctgatattttcatttatgtaagatcctggacattctgttttgtgttggaacaaattttcaatgtttttaattctcccttttctgcctgttcctaaaaactttcaaaataaccatttcaatgtaatttgtcttgaagaagtttacccaatatctttgtcattgcaataatgtagtatggtgatggtcaatttaattattgcttataaaatgaacttgattgcagtaaccatggtatcgatgagactaatgcagtgaagctttattactaatatatatagccttatcaaagcaagctaagaagcttgctttaataattaataatttaaaaatatttatttagatgggattcagttgtttaaagaagtgagataaattcaaaggtaaataggtattctctgtcaaatttaaatctctaaagaattagagattagttttttatttgtgtataatttaaaaaagacctaataggttactgtctttttaatgcatttgttattctttcgtattttttaagcatcggactggagttagtaccatcatctcttgagtctttcataactacacatttttatatttccttttgtgttttctactttgctttccttgaaggaacaagcattttgtggcctttaccttgtgcaattttagggagtagcagtgtaaaaggtccaagaccacatttacttgaaattcttcctcttttctgatttgtcttaccagatatttcccttcttgcctcattctctaggatttgaataaaacctttgccacttattttattagccttattaatgtcacctttccttcaactcaaatatttgagaaattttatgttacatatatgaatgaagttgaaagctactgtttggaagctaagacttgtatagagtagttttgtatatgaatggttgttctagctcagatttcaggttactcacaacagtattctttctaagaggatatatacaaatgtctctcataatttatgtaaggaaatattatgaaaatgagacttttttagtttgatgtgtgtttcccaaactagagataaaactagtaagatttagtatcgtttataacatttgaatttttgctccatgagtacaactaatttttataagtaaatattgggtttatatgaaaaatggggtgtcagtcttttcacacgcccagcaggtaacaatgtgggaagctggcagggtcattgatagcaagtaagtacttcctgaaggctttccagttcaaaagattacaagccattctgcctgccaaacaaattatattctgaagatgcctgttttgtaacccttgatgtgaattttttggtgtctgaaatttacaaaagaatgaaattgaaattgtaaaacactaaatgctttgggtttattttgaagtaatctgttactttaaaatgtcaacattaggaagccataaaacaagatattatgaaacccagtattataaatgttatctacatctaaagtattttaaaataacttattggcagctttattctttttttccttacaagatttagaatctttttggttatatgtctatttttcaattttgttatatttttaatttaagtggccaatgtggttatgaacaagatttgtatggtcagcttctgttctttcctaaaacttcagataaatatcattttagctataacctaaaaaagtgtttaaataaaatgacagatgttaatttaaaagcagcatatgctaatttactttttcatatgatgatggtctaatggaagttacatatgctttcttttgtcctaactctgaaaagtatatgtcagagttctggaatatgtctttagccaagaattttattcacttaaatttgtttacaacttgtataaagcaaaaaagaatgtgtgtaactatagtgaacgcatagttttgcttatattatgtgatgtttgccaaaaaaagaataaaaaatgaatgaattaaatcaaaaaaaaaat

SEQ ID NO: 330027 - DNA, 3233 bp, Homo sapiens
agcggacgcgcagcaccccatttaagtttctcgtctttgcagtggctttgcttagatccggtgccgccttgaaggcggggctgggtcccagccgtatccaatggagccccgggtgagggttgaggggtggaaggtgcctactagccggtgcaggtttcttctagcgcgtgtgctggggtacctggtcgtcatggaggcggtattgaccgaagagcttgatgaggaagagcagctgctgagaaggcatcgcaaagagaagaaggagttgcaagccaaaattcagggcatgaagaatgctgttcccaagaatgacaagaagaggaggaagcagctcaccgaagatgtggccaagttggaaaaagaaatggaacagaaacatagagaggaactggagcaattgaagctgactactaaggagaataagatagattctgttgctgttaacatttcaaacttggtgcttgagaatcagccacctcggatatcaaaagcacaaaagagacgggaaaagaaagctgcattggaaaaggagcgagaagaacggatagctgaagctgaaattgaaaacttaacaggagccagacatatggaaagtgagaaacttgctcaaatattggcagctagacagttagaaattaaacagattccatctgatggccactgtatgtataaagccattgaagatcaactgaaagaaaaggattgtgctctgactgtggttgccttgagaagtcagaccgctgagtatatgcaaagccatgtggaagactttctgccatttttaacaaaccctaatacaggagatatgtatactccagaagaatttcagaagtactgtgaagatattgtaaacacagctgcatggggaggtcagcttgagctaagagctctgtctcacattttacaaacaccaatagagataatacaggcagattctcctcccattatagttggtgaagaatattcaaaaaaaccactaatacttgtatatatgagacatgcatatggcttaggagaacattataattcggttacacggttggtaaacatagttactgaaaattgcagctaatttatacaatgttgtacaattatgttttaatacagtgtgctgaactgagtatttctaccaagtgttgggttgttctaaatgctactgaaaaacacaactaccttatatcagttttatggcaaagctactaacaggtgtttttagaaatatgtcagagataaactttaaccagtgtcttcttagtggaattttaaaaatttgttaagttcattgtagagaacaccattcatagaccaagatggtcccctattagctgatattttcatttatgtaagatcctggacattctgttttgtgttggaacaaattttcaatgtttttaattctcccttttctgcctgttcctaaaaactttcaaaataaccatttcaatgtaatttgtcttgaagaagtttacccaatatctttgtcattgcaataatgtagtatggtgatggtcaatttaattattgcttataaaatgaacttgattgcagtaaccatggtatcgatgagactaatgcagtgaagctttattactaatatatatagccttatcaaagcaagctaagaagcttgctttaataattaataatttaaaaatatttatttagatgggattcagttgtttaaagaagtgagataaattcaaaggtaaataggtattctctgtcaaatttaaatctctaaagaattagagattagttttttatttgtgtataatttaaaaaagacctaataggttactgtctttttaatgcatttgttattctttcgtattttttaagcatcggactggagttagtaccatcatctcttgagtctttcataactacacatttttatatttccttttgtgttttctactttgctttccttgaaggaacaagcattttgtggcctttaccttgtgcaattttagggagtagcagtgtaaaaggtccaagaccacatttacttgaaattcttcctcttttctgatttgtcttaccagatatttcccttcttgcctcattctctaggatttgaataaaacctttgccacttattttattagccttattaatgtcacctttccttcaactcaaatatttgagaaattttatgttacatatatgaatgaagttgaaagctactgtttggaagctaagacttgtatagagtagttttgtatatgaatggttgttctagctcagatttcaggttactcacaacagtattctttctaagaggatatatacaaatgtctctcataatttatgtaaggaaatattatgaaaatgagacttttttagtttgatgtgtgtttcccaaactagagataaaactagtaagatttagtatcgtttataacatttgaatttttgctccatgagtacaactaatttttataagtaaatattgggtttatatgaaaaatggggtgtcagtcttttcacacgcccagcaggtaacaatgtgggaagctggcagggtcattgatagcaagtaagtacttcctgaaggctttccagttcaaaagattacaagccattctgcctgccaaacaaattatattctgaagatgcctgttttgtaacccttgatgtgaattttttggtgtctgaaatttacaaaagaatgaaattgaaattgtaaaacactaaatgctttgggtttattttgaagtaatctgttactttaaaatgtcaacattaggaagccataaaacaagatattatgaaacccagtattataaatgttatctacatctaaagtattttaaaataacttattggcagctttattctttttttccttacaagatttagaatctttttggttatatgtctatttttcaattttgttatatttttaatttaagtggccaatgtggttatgaacaagatttgtatggtcagcttctgttctttcctaaaacttcagataaatatcatttactttaccttaaaagggttaataaatgccgatgtactaaaacactaacgtactacttttatttaagaggctaaggagtccaaggctccttggcaacttgaaggttttgaaatttgaattgtttgcagaattttcctaaattgtacactgttaacaaagaatgggaccttagacctaattgcttatttgaggttcaaaaaattaacggtggttactaaaaaagaaacggtccactatcctacca

SEQ ID NO: 330028 - DNA, 2761 bp, Homo sapiens
  misc_feature (2098)..(2098): n is a, c, g, or t
cgccggcgcgtagtcggggacgccgggccgaggctttgctagggaacactgttatcgccccgccccctcggagctttttctccagttaactgtcggagtagcgggggctccggcgccgggcgacatgccggtgcgcttcaaggggctgagtgaataccagaggaacttcctgtggaaaaagtcttatttgtcagagtcttgtaattcctccgtggggcgaaagtacccatgggctggacttagatcagatcaattaggaaatcaaggcagatgtagaaccaagatccagcacagtgacatctcatcccttctcatcttggtctgctccacataagagaagctttgtgaaaagttccaaattttgacagtaccagggcccattgttctgttaagtagcacaggaaagtaattagaaacgaggcagcatgtactgcctggcctgccaggtctatcacgttgcaattctagtgacttttgttaggataactggaacattttgtgaccccctgatttttaattttttgttatggtcaaatttttaatgcttttaaaagcaaaattaaatattttatgttgaaaagctgtacttttaaaatcctataatctgaaggatattgtgtgtatatataggtacatatatctgaactaaatttaaaatttcatttctcctccacaagtgttcttaaaagttgtctttgtaactttttgctttagtagctactatttttgtataccgtgttttgtaggcatcacgaaagagccaagttttatttcaaaaagaagagtcccttaccatgacccacagatttcaaaatctctggagtggaatggagctatctcagagagcaatgtggttgcatcaccagaaccagaagccccggaaacaccaaaatcacaagaagcagaacaaaaggatgttattcaagaaagagttcactcactagaagcttccagggttcccaaaagaaccagatctcactctgcagactccagagctgaaggggcttcagatgtggaaaataatgagggtgtaacaaaccatacaccagttaatgaaaatgtggaactggaacattctaccaaggttctttcagaaaatgtagataatggggtaggcatattcactgcatttcttttcaaaagcatagaattcttcattggtttcattgtcatttctgtaatattacattttgtgtttcagaattttccattgttgttttcttgtctaatgtctataagaatagttgataacaggctgttgactttagttattgtgaattagttctattctgactactcgctattttgtagtagttgtactatgataatctgtttattggatggacctcctgcgtctggattttattcatcatatattagcacctgagtcctaagggagagatcaagttgagacagagaagggaagtaggcccttacttctggcagggtgctgagctgacttctacctagccccttttcagtttcttatcgtgtacaagaagacaaacagaaattcaattgatgaaatgcaaaaggaaggagagctctggctgtctctcagagatcttgcatttctgctctcttatgtcacagctggcctgcagcaggtccctgtgagcacataagcagaggctgcaggaacttgtgtggggatctcaatgctttccacatttctttctccattctgttccactgctcttctctggttcatgtccaccactgactgggaccctgaagaggcatttcagagtgttggagaagaatctgtagcttgttgaaaaagctgggggtgaaagggaacaaggaaggtgatgtgtgagtctggcaggcaggagaaggggtgttcatagaagcagtgtgcaggtgaggcaaagtgctgggactttttggtaatagatttaattatgaatgattagtaggaaaggactgagagtattatatttttcctgggatgcctaatagtcctttgatagaaaggaattttaaatagtttgacacttgaaaaaagatactatttataagttgaagaaagtttgctgtaccacaatgcgcatgtagttaacaattttgcactgtagatttaacattttgttaagangatagatttcatgttatgcattttttaccacaatttttaaaaagtttgaatagaaatttttaatgtctttgagtggattttgttttttgaacagttggatagacttctgcgtaagaaagctggattgactgttgttccttcatataatgccttgagaaattctgaatatcaaaggcagtttgtttggaagacttctaaagaaactgctccagcttttgcagccaatcaggtagcttaatggatgtaatacatttctgagtaccattatcttatctagtaatgtagatttacatagaattaagagttgaaagaaattaagtacttaagtagcctggaggtaggttctagaaaaccaaaatgagagttttgctaaaatcatcctattacttatgatttatggtagtaatattatactgtcctaggcttctgatgatcattgttgccagatgcagcacatatactaaatatgagacagggtaatgaaaacttggggaactggtaagtttttgcatgctacaagatttttttacttattaaaaaattattaaattgattttattctaaaatgttgtgttttgttgactaatatattgcgtgtttcctgtattctaagaaaggcgtaactgctttgaatatttaataaatacaaaatatgttgacagt

SEQ ID NO: 330029 - DNA, 889 bp, Homo sapiens
atatattcaagatttcgcccattggaaagcaggatgccattccagttcctccacatgagccttattataagataaggcaaatgtttaaatgaggacagattgtctgagatttctgctcgctctgcagcttctagtctccgggcttttcaaactctggcacgagctaagaaaaggaaggagaatttctggggtaaaacataaacctagctgagttgcctttatctaaggaaacattggcataatttttctttattgcttactgtgttaaaattttttgagtgaagtttttcctaacattttctactttgaaatatttaatttccaatagaacagtttacttggaaattgttaacataggcttatacaaatttaacttttaaagaattctttttacatctatcccagagtacaaagacctagattattgaattcttcacatgtaactttcgtaataggtgtcatggatagattttcacctatccagagagtattctaaaaaaataaacaaagtgaagtaaaagttaagatcccagtgtgaagtatatattcccctaagatttgatatatgtatctttataattgatgatgttgtaaaatgaatttgttgttcctttaacctttgctgtagtgtttctttttattttagttccttctatacatgtttgcagtgttaagataattgtactttgaaaacaccagctgtatatatttttcttatttatgtaacaaagtttgctgaaagatatgtatatttttgatctttgagtgtattctatttgtgtaaggactttggcttacatttgaataatgtctagattttgaaaaattacctgtataatggagaattaaaactttgtagacattttgaaataaaaatggatcaagtgcg

SEQ ID NO: 330030 - DNA, 909 bp, Homo sapiens
  misc_feature (1)..(1): n is a, c, g, or t
  misc_feature (26)..(26): n is a, c, g, or t
  misc_feature (55)..(55): n is a, c, g, or t
  misc_feature (81)..(81): n is a, c, g, or t
  misc_feature (85)..(85): n is a, c, g, or t
  misc_feature (103)..(103): n is a, c, g, or t
ncaccctttcgcggattttgggtttntaaggatccaaagttcagcccattttggnaaagccaggatgaccaatttccagtncctnaacatgagccttttaatnataagatgaggacagattgtctgagatttctgctcgctctgcagcttctagtctccgggcttttcaaactctggcacgagctaagaaaaggaaggagaatttctggggtaaaacataaacctagctgagttgcctttatctaaggaaacattggcataatttttctttattgcttactgtgttaaaattttttgagtgaagtttttcctaacattttctactttgaaatatttaatttccaatagaacagtttacttggaaattgttaacataggcttatacaaatttaacttttaaagaattctttttacatctatcccagagtacaaagacctagattattgaattcttcacatgtaactttcgtaataggtgtcatggatagattttcacctatccagagagtattctaaaaaaataaacaaagtgaagtaaaagttaagatcccagtgtgaagtatatattcccctaagatttgatatatgtatctttataattgatgatgttgtaaaatgaatttgttgttcctttaacctttgctgtagtgtttctttttattttagttccttctatacatgtttgcagtgttaagataattgtactttgaaaacaccagctgtatatatttttcttatttatgtaacaaagtttgctgaaagatatgtatatttttgatctttgagtgtattctatttgtgtaaggactttggcttacatttgaataatgtctagattttgaaaaattacctgtataatggagaattaaaactttgtagacattttgaaataaaaatggatcaagtgcg

SEQ ID NO: 330031 - DNA, 897 bp, Homo sapiens
  misc_feature (2)..(2): n is a, c, g, or t
  misc_feature (11)..(11): n is a, c, g, or t
  misc_feature (19)..(19): n is a, c, g, or t
  misc_feature (22)..(22): n is a, c, g, or t
  misc_feature (24)..(25): n is a, c, g, or t
  misc_feature (41)..(41): n is a, c, g, or t
  misc_feature (57)..(57): n is a, c, g, or t
  misc_feature (86)..(86): n is a, c, g, or t
cnagggctttntaactccnagntnncgcccaattggaaaancaaggatgaccatttncggtccctcaccagaagcctttaataatnaaataaggcaatgaggacagattgtctgagatttctgctcgctctgcagcttctagtctccgggcttttcaaactctggcacgagctaagaaaaggaaggagaatttctggggtaaaacataaacctagctgagttgcctttatctaaggaaacattggcataatttttctttattgcttactgtgttaaaattttttgagtgaagtttttcctaacattttctactttgaaatatttaatttccaatagaacagtttacttggaaattgttaacataggcttatacaaatttaacttttaaagaattctttttacatctatcccagagtacaaagacctagattattgaattcttcacatgtaactttcgtaataggtgtcatggatagattttcacctatccagagagtattctaaaaaaataaacaaagtgaagtaaaagttaagatcccagtgtgaagtatatattcccctaagatttgatatatgtatctttataattgatgatgttgtaaaatgaatttgttgttcctttaacctttgctgtagtgtttctttttattttagttccttctatacatgtttgcagtgttaagataattgtactttgaaaacaccagctgtatatatttttcttatttatgtaacaaagtttgctgaaagatatgtatatttttgatctttgagtgtattctatttgtgtaaggactttggcttacatttgaataatgtctagattttgaaaaattacctgtataatggagaattaaaactttgtagacattttgaaataaaaatggatcaagtgcg

SEQ ID NO: 330032 - DNA, 920 bp, Homo sapiens
aaacccaaaaatcccgggcagttgctttccccccaaggtccatctaatggctccttctgaggaattaggggttttttagagttcaagagttcagcccattttaaggccaaatgttctaaatgaggacagattgtctgagatttctgctcgctctgcagcttctagtctccgggcttttcaaactctggcacgagctaagaaaaggaaggagaatttctggggtaaaacataaacctagctgagttgcctttatctaaggaaacattggcataatttttctttattgcttactgtgttaaaattttttgagtgaagtttttcctaacattttctactttgaaatatttaatttccaatagaacagtttacttggaaattgttaacataggcttatacaaatttaacttttaaagaattctttttacatctatcccagagtacaaagacctagattattgaattcttcacatgtaactttcgtaataggtgtcatggatagattttcacctatccagagagtattctaaaaaaataaacaaagtgaagtaaaagttaagatcccagtgtgaagtatatattcccctaagatttgatatatgtatctttataattgatgatgttgtaaaatgaatttgttgttcctttaacctttgctgtagtgtttctttttattttagttccttctatacatgtttgcagtgttaagataattgtactttgaaaacaccagctgtatatatttttcttatttatgtaacaaagtttgctgaaagatatgtatatttttgatctttgagtgtattctatttgtgtaaggactttggcttacatttgaataatgtctagattttgaaaaattacctgtataatggagaattaaaactttgtagacattttgaaataaaaatggatcaagtgcg

SEQ ID NO: 330033 - DNA, 891 bp, Homo sapiens
aggcctttccccaaatattctactgggcatccctggggaactacggctctgaaagaaccaaagtgcagcctatcaagggccactcttaacatgaggacagattgtctgagatttctgctcgctctgcagcttctagtctccgggcttttcaaactctggcacgagctaagaaaaggaaggagaatttctggggtaaaacataaacctagctgagttgcctttatctaaggaaacattggcataatttttctttattgcttactgtgttaaaattttttgagtgaagtttttcctaacattttctactttgaaatatttaatttccaatagaacagtttacttggaaattgttaacataggcttatacaaatttaacttttaaagaattctttttacatctatcccagagtacaaagacctagattattgaattcttcacatgtaactttcgtaataggtgtcatggatagattttcacctatccagagagtattctaaaaaaataaacaaagtgaagtaaaagttaagatcccagtgtgaagtatatattcccctaagatttgatatatgtatctttataattgatgatgttgtaaaatgaatttgttgttcctttaacctttgctgtagtgtttctttttattttagttccttctatacatgtttgcagtgttaagataattgtactttgaaaacaccagctgtatatatttttcttatttatgtaacaaagtttgctgaaagatatgtatatttttgatctttgagtgtattctatttgtgtaaggactttggcttacatttgaataatgtctagattttgaaaaattacctgtataatggagaattaaaactttgtagacattttgaaataaaaatggatcaagtgcg

SEQ ID NO: 330034 - DNA, 876 bp, Homo sapiens
gccaatgggctaaacaagaaaacaattgcaagtgcctggaaaggagcctttatatgaataaggtcaggatgtataatgaggacagattgtctgagatttctgctcgctctgcagcttctagtctccgggcttttcaaactctggcacgagctaagaaaaggaaggagaatttctggggtaaaacataaacctagctgagttgcctttatctaaggaaacattggcataatttttctttattgcttactgtgttaaaattttttgagtgaagtttttcctaacattttctactttgaaatatttaatttccaatagaacagtttacttggaaattgttaacataggcttatacaaatttaacttttaaagaattctttttacatctatcccagagtacaaagacctagattattgaattcttcacatgtaactttcgtaataggtgtcatggatagattttcacctatccagagagtattctaaaaaaataaacaaagtgaagtaaaagttaagatcccagtgtgaagtatatattcccctaagatttgatatatgtatctttataattgatgatgttgtaaaatgaatttgttgttcctttaacctttgctgtagtgtttctttttattttagttccttctatacatgtttgcagtgttaagataattgtactttgaaaacaccagctgtatatatttttcttatttatgtaacaaagtttgctgaaagatatgtatatttttgatctttgagtgtattctatttgtgtaaggactttggcttacatttgaataatgtctagattttgaaaaattacctgtataatggagaattaaaactttgtagacattttgaaataaaaatggatcaagtgcg

SEQ ID NO: 330035 - DNA, 893 bp, Homo sapiens
gacccttgtacgatttgagtttcttagattcaatattcagcctatggggctaactaggatgaccattttcgtttccccacagaggcctttataatgaaatgaggacgatttctggatttcgtccaatttgacgttttgtctccgggcttttcaaactctggcacgagctaagaaaaggaaggagaatttctggggtaaaacataaacctagctgagttgcctttatctaaggaaacattggcataatttttctttattgcttactgtgttaaaattttttgagtgaagtttttcctaacattttctactttgaaatatttaatttccaatagaacagtttacttggaaattgttaacataggcttatacaaatttaacttttaaagaattctttttacatctatcccagagtacaaagacctagattattgaattcttcacatgtaactttcgtaataggtgtcatggatagattttcacctatccagagagtattctaaaaaaataaacaaagtgaagtaaaagttaagatcccagtgtgaagtatatattcccctaagatttgatatatgtatctttataattgatgatgttgtaaaatgaatttgttgttcctttaacctttgctgtagtgtttctttttattttagttccttctatacatgtttgcagtgttaagataattgtactttgaaaacaccagctgtatatatttttcttatttatgtaacaaagtttgctgaaagatatgtatatttttgatctttgagtgtattctatttgtgtaaggactttggcttacatttgaataatgtctagattttgaaaaattacctgtataatggagaattaaaactttgtagacattttgaaataaaaatggatcaagtgcg

SEQ ID NO: 330036 - DNA, 878 bp, Homo sapiens
ttttaacactccacttttcgccctacggggaaagcaggatggcaatttccagtccctccacaaacacccttaataataaaatgaggccaggtgttttaaatttccgcccgtcccaggcttaagtctccgggcttttcaaactctggcacgagctaagaaaaggaaggagaatttctggggtaaaacataaacctagctgagttgcctttatctaaggaaacattggcataatttttctttattgcttactgtgttaaaattttttgagtgaagtttttcctaacattttctactttgaaatatttaatttccaatagaacagtttacttggaaattgttaacataggcttatacaaatttaacttttaaagaattctttttacatctatcccagagtacaaagacctagattattgaattcttcacatgtaactttcgtaataggtgtcatggatagattttcacctatccagagagtattctaaaaaaataaacaaagtgaagtaaaagttaagatcccagtgtgaagtatatattcccctaagatttgatatatgtatctttataattgatgatgttgtaaaatgaatttgttgttcctttaacctttgctgtagtgtttctttttattttagttccttctatacatgtttgcagtgttaagataattgtactttgaaaacaccagctgtatatatttttcttatttatgtaacaaagtttgctgaaagatatgtatatttttgatctttgagtgtattctatttgtgtaaggactttggcttacatttgaataatgtctagattttgaaaaattacctgtataatggagaattaaaactttgtagacattttgaaataaaaatggatcaagtgcg

SEQ ID NO: 330037 - DNA, 875 bp, Homo sapiens
cggatttttaaaatcgggtataacccaaattgggaagcaaggaagacaatttgcagtcccccccagtaccgttaatatgaaataagcccggttgttcaaattttgttgatcgcaggtgtatctccgggcttttcaaactctggcacgagctaagaaaaggaaggagaatttctggggtaaaacataaacctagctgagttgcctttatctaaggaaacattggcataatttttctttattgcttactgtgttaaaattttttgagtgaagtttttcctaacattttctactttgaaatatttaatttccaatagaacagtttacttggaaattgttaacataggcttatacaaatttaacttttaaagaattctttttacatctatcccagagtacaaagacctagattattgaattcttcacatgtaactttcgtaataggtgtcatggatagattttcacctatccagagagtattctaaaaaaataaacaaagtgaagtaaaagttaagatcccagtgtgaagtatatattcccctaagatttgatatatgtatctttataattgatgatgttgtaaaatgaatttgttgttcctttaacctttgctgtagtgtttctttttattttagttccttctatacatgtttgcagtgttaagataattgtactttgaaaacaccagctgtatatatttttcttatttatgtaacaaagtttgctgaaagatatgtatatttttgatctttgagtgtattctatttgtgtaaggactttggcttacatttgaataatgtctagattttgaaaaattacctgtataatggagaattaaaactttgtagacattttgaaataaaaatggatcaagtgcg

SEQ ID NO: 330038 - DNA, 874 bp, Homo sapiens
  misc_feature (2)..(2): n is a, c, g, or t
  misc_feature (11)..(11): n is a, c, g, or t
  misc_feature (19)..(19): n is a, c, g, or t
  misc_feature (22)..(22): n is a, c, g, or t
  misc_feature (24)..(25): n is a, c, g, or t
  misc_feature (41)..(41): n is a, c, g, or t
  misc_feature (57)..(57): n is a, c, g, or t
  misc_feature (86)..(86): n is a, c, g, or t
cnagggctttntaactccnagntnncgcccaattggaaaancaaggatgaccatttncggtccctcaccagaagcctttaataatnaaataaggcaaaattgttcaaatctccgcccctttccaggttttattttccgggctttttaacttcggcccccattaaaaatttctggggtaaaacataaacctagctgagttgcctttatctaaggaaacattggcataatttttctttattgcttactgtgttaaaattttttgagtgaagtttttcctaacattttctactttgaaatatttaatttccaatagaacagtttacttggaaattgttaacataggcttatacaaatttaacttttaaagaattctttttacatctatcccagagtacaaagacctagattattgaattcttcacatgtaactttcgtaataggtgtcatggatagattttcacctatccagagagtattctaaaaaaataaacaaagtgaagtaaaagttaagatcccagtgtgaagtatatattcccctaagatttgatatatgtatctttataattgatgatgttgtaaaatgaatttgttgttcctttaacctttgctgtagtgtttctttttattttagttccttctatacatgtttgcagtgttaagataattgtactttgaaaacaccagctgtatatatttttcttatttatgtaacaaagtttgctgaaagatatgtatatttttgatctttgagtgtattctatttgtgtaaggactttggcttacatttgaataatgtctagattttgaaaaattacctgtataatggagaattaaaactttgtagacattttgaaataaaaatggatcaagtgcg

SEQ ID NO: 330039 - DNA, 843 bp, Homo sapiens
cacgtgagctcaaaatataaacccttccaattataagaaggagtacgcaagtgttgatgatttgtgctcgcctcaacaaagttttagttctccgggcttttcaaactctggcacgagctaagaaaaggaaggagaatttctggggtaaaacataaacctagctgagttgcctttatctaaggaaacattggcataatttttctttattgcttactgtgttaaaattttttgagtgaagtttttcctaacattttctactttgaaatatttaatttccaatagaacagtttacttggaaattgttaacataggcttatacaaatttaacttttaaagaattctttttacatctatcccagagtacaaagacctagattattgaattcttcacatgtaactttcgtaataggtgtcatggatagattttcacctatccagagagtattctaaaaaaataaacaaagtgaagtaaaagttaagatcccagtgtgaagtatatattcccctaagatttgatatatgtatctttataattgatgatgttgtaaaatgaatttgttgttcctttaacctttgctgtagtgtttctttttattttagttccttctatacatgtttgcagtgttaagataattgtactttgaaaacaccagctgtatatatttttcttatttatgtaacaaagtttgctgaaagatatgtatatttttgatctttgagtgtattctatttgtgtaaggactttggcttacatttgaataatgtctagattttgaaaaattacctgtataatggagaattaaaactttgtagacattttgaaataaaaatggatcaagtgcg

SEQ ID NO: 330040 - DNA, 861 bp, Homo sapiens
ccctcccgacaacgagcctctgaatcaagtgttcgcccagtggaaaaccgaattacatctccgtcctcaccataaccctaatctaaaatggcaaaagtgtcagattttgctccctcccaatttaagttccggctttcaaatttggccgggctaatttctggggtaaaacataaacctagctgagttgcctttatctaaggaaacattggcataatttttctttattgcttactgtgttaaaattttttgagtgaagtttttcctaacattttctactttgaaatatttaatttccaatagaacagtttacttggaaattgttaacataggcttatacaaatttaacttttaaagaattctttttacatctatcccagagtacaaagacctagattattgaattcttcacatgtaactttcgtaataggtgtcatggatagattttcacctatccagagagtattctaaaaaaataaacaaagtgaagtaaaagttaagatcccagtgtgaagtatatattcccctaagatttgatatatgtatctttataattgatgatgttgtaaaatgaatttgttgttcctttaacctttgctgtagtgtttctttttattttagttccttctatacatgtttgcagtgttaagataattgtactttgaaaacaccagctgtatatatttttcttatttatgtaacaaagtttgctgaaagatatgtatatttttgatctttgagtgtattctatttgtgtaaggactttggcttacatttgaataatgtctagattttgaaaaattacctgtataatggagaattaaaactttgtagacattttgaaataaaaatggatcaagtgcg

SEQ ID NO: 330041 - DNA, 853 bp, Homo sapiens
cttatccagtggttataaaagtattatggttctgcgttgcctatctatataccctgaatacgtggatggctagcttggaacgcgtgatgccgatatacatgttaagtttcggggcttatcgtctgtggccggtgttaataaagcaatttctggggtaaaacataaacctagctgagttgcctttatctaaggaaacattggcataatttttctttattgcttactgtgttaaaattttttgagtgaagtttttcctaacattttctactttgaaatatttaatttccaatagaacagtttacttggaaattgttaacataggcttatacaaatttaacttttaaagaattctttttacatctatcccagagtacaaagacctagattattgaattcttcacatgtaactttcgtaataggtgtcatggatagattttcacctatccagagagtattctaaaaaaataaacaaagtgaagtaaaagttaagatcccagtgtgaagtatatattcccctaagatttgatatatgtatctttataattgatgatgttgtaaaatgaatttgttgttcctttaacctttgctgtagtgtttctttttattttagttccttctatacatgtttgcagtgttaagataattgtactttgaaaacaccagctgtatatatttttcttatttatgtaacaaagtttgctgaaagatatgtatatttttgatctttgagtgtattctatttgtgtaaggactttggcttacatttgaataatgtctagattttgaaaaattacctgtataatggagaattaaaactttgtagacattttgaaataaaaatggatcaagtgcg

SEQ ID NO: 330042 - DNA, 834 bp, Homo sapiens
tcagtggcctgaattatggcggcacctatactttctcagatatgcggtggtgctgagaaaacagtgcatgattcatggatgtccgaccggagctcttataagaatgaagagttctggtgactcataatttctggggtaaaacataaacctagctgagttgcctttatctaaggaaacattggcataatttttctttattgcttactgtgttaaaattttttgagtgaagtttttcctaacattttctactttgaaatatttaatttccaatagaacagtttacttggaaattgttaacataggcttatacaaatttaacttttaaagaattctttttacatctatcccagagtacaaagacctagattattgaattcttcacatgtaactttcgtaataggtgtcatggatagattttcacctatccagagagtattctaaaaaaataaacaaagtgaagtaaaagttaagatcccagtgtgaagtatatattcccctaagatttgatatatgtatctttataattgatgatgttgtaaaatgaatttgttgttcctttaacctttgctgtagtgtttctttttattttagttccttctatacatgtttgcagtgttaagataattgtactttgaaaacaccagctgtatatatttttcttatttatgtaacaaagtttgctgaaagatatgtatatttttgatctttgagtgtattctatttgtgtaaggactttggcttacatttgaataatgtctagattttgaaaaattacctgtataatggagaattaaaactttgtagacattttgaaataaaaatggatcaagtgcg

SEQ ID NO: 330043 - DNA, 906 bp, Homo sapiens
  misc_feature (1)..(1): n is a, c, g, or t
  misc_feature (137)..(137): n is a, c, g, or t
ncccccctctaccccctccgcccttttgatctccgccacctagtgccaaaccccgttctttttgttagagttccccccccatgtacgccttgttacgcatagcatttggtcccgctgtttcccactttatgcctccntagtacacttccagtcccccggccttttttacctttgtcccccgccttaatagaagcagccccctcttccgtggtccatcgtgtgccctagatgagtttcctttatctaaagccaacatggccacgtgtgtccttcactccccaacgaaattttttgagtgaagtttttcctaacattttctactttgaaatatttaatttccaatagaacagtttacttggaaattgttaacataggcttatacaaatttaacttttaaagaattctttttacatctatcccagagtacaaagacctagattattgaattcttcacatgtaactttcgtaataggtgtcatggatagattttcacctatccagagagtattctaaaaaaataaacaaagtgaagtaaaagttaagatcccagtgtgaagtatatattcccctaagatttgatatatgtatctttataattgatgatgttgtaaaatgaatttgttgttcctttaacctttgctgtagtgtttctttttattttagttccttctatacatgtttgcagtgttaagataattgtactttgaaaacaccagctgtatatatttttcttatttatgtaacaaagtttgctgaaagatatgtatatttttgatctttgagtgtattctatttgtgtaaggactttggcttacatttgaataatgtctagattttgaaaaattacctgtataatggagaattaaaactttgtagacattttgaaataaaaatggatcaagtgcg

SEQ ID NO: 330044 - DNA, 861 bp, Homo sapiens
  misc_feature (1)..(1): n is a, c, g, or t
nttaatatccaattcacccaattgacaaagaagaagataatttcaataccttgacatgacctttaataacaaggccggccaaccgtccagacttatgtccctccgcggcttatagttcccgactttcaaactaggccaaactaaaaaaagcgcgggtttttgtgggtaaaccttaaccttcgttattctccttatttaaggtccattggcataatttttctttattgcttactgtgttaaaattttttgagtgaagtttttcctaacattttctactttgaaatatttaatttccaatagaacagtttacttggaaattgttaacataggcttatacaaatttaacttttaaagaattctttttacatctatcccagagtacaaagacctagattattgaattcttcacatgtaactttcgtaataggtgtcatggatagattttcacctatccagagagtattctaaaaaaataaacaaagtgaagtaaaagttaagatcccagtgtgaagtatatattcccctaagatttgatatatgtatctttataattgatgatgttgtaaaatgaatttgttgttcctttaacctttgctgtagtgtttctttttattttagttccttctatacatgtttgcagtgttaagataattgtactttgaaaacaccagctgtatatatttttcttatttatgtaacaaagtttgctgaaagatatgtatatttttgatctttgagtgtattctatttgtgtaaggactttggcttacatttgaataatgtctagattttgaaaaattacctgtataatggagaattaaaactttgtagacattttgaaataaaaatggatcaagtgcg

SEQ ID NO: 330045 - DNA, 864 bp, Homo sapiens
cccagtagctacactgaggacccgctgtttgtgtacttttaatctaaccttttataagcagaatctgctaccatttttcgtgtacgtggctcccctcaggatctcagttctcgcccttttcaccacccgcgcagcagtttataaaacgaagccgccacttccgcggtaattcatagtccaattgagtgctccttatttaagccccgcattggcataatttttctttattgcttactgtgttaaaattttttgagtgaagtttttcctaacattttctactttgaaatatttaatttccaatagaacagtttacttggaaattgttaacataggcttatacaaatttaacttttaaagaattctttttacatctatcccagagtacaaagacctagattattgaattcttcacatgtaactttcgtaataggtgtcatggatagattttcacctatccagagagtattctaaaaaaataaacaaagtgaagtaaaagttaagatcccagtgtgaagtatatattcccctaagatttgatatatgtatctttataattgatgatgttgtaaaatgaatttgttgttcctttaacctttgctgtagtgtttctttttattttagttccttctatacatgtttgcagtgttaagataattgtactttgaaaacaccagctgtatatatttttcttatttatgtaacaaagtttgctgaaagatatgtatatttttgatctttgagtgtattctatttgtgtaaggactttggcttacatttgaataatgtctagattttgaaaaattacctgtataatggagaattaaaactttgtagacattttgaaataaaaatggatcaagtgcg

SEQ ID NO: 330046 - DNA, 876 bp, Homo sapiens
ccctactcatgttttccctaggctacaacaacagcacctcaagtttagaaaacactacagattgcgaagggtacacaacacgccattatccactaacatcatgctatatgacaacataaaggatgcggggactttaatacccgctacagataactaaagcaggtattatttttgcgtccaccataccccacacataattggccttttattaaaggttacacaggcaaaatttatctaacgtgcctaagaggtcataatttttgtaaagaagattttacgtcccatttctcctttgaaatatttaatttccaatagaacagtttacttggaaattgttaacataggcttatacaaatttaacttttaaagaattctttttacatctatcccagagtacaaagacctagattattgaattcttcacatgtaactttcgtaataggtgtcatggatagattttcacctatccagagagtattctaaaaaaataaacaaagtgaagtaaaagttaagatcccagtgtgaagtatatattcccctaagatttgatatatgtatctttataattgatgatgttgtaaaatgaatttgttgttcctttaacctttgctgtagtgtttctttttattttagttccttctatacatgtttgcagtgttaagataattgtactttgaaaacaccagctgtatatatttttcttatttatgtaacaaagtttgctgaaagatatgtatatttttgatctttgagtgtattctatttgtgtaaggactttggcttacatttgaataatgtctagattttgaaaaattacctgtataatggagaattaaaactttgtagacattttgaaataaaaatggatcaagtgcg

SEQ ID NO: 330047 - DNA, 828 bp, Homo sapiens
ttacccctattaaaaggtatttaacacctgggtacatccaaaacgcttttatatcatttaataacagtgttacatttcgctacgatggcgttgtgttccgggtttcaaagcttggcctgtctaaataagacgaaatattttggggacaaaaaattacagatattatctttttttagtaaaatggccaaatttactttacgccaacaaaattttttgagtgaagtttttcctaacattttctactttgaaatatttaatttccaatagaacagtttacttggaaattgttaacataggcttatacaaatttaacttttaaagaattctttttacatctatcccagagtacaaagacctagattattgaattcttcacatgtaactttcgtaataggtgtcatggatagattttcacctatccagagagtattctaaaaaaataaacaaagtgaagtaaaagttaagatcccagtgtgaagtatatattcccctaagatttgatatatgtatctttataattgatgatgttgtaaaatgaatttgttgttcctttaacctttgctgtagtgtttctttttattttagttccttctatacatgtttgcagtgttaagataattgtactttgaaaacaccagctgtatatatttttcttatttatgtaacaaagtttgctgaaagatatgtatatttttgatctttgagtgtattctatttgtgtaaggactttggcttacatttgaataatgtctagattttgaaaaattacctgtataatggagaattaaaactttgtagacattttgaaataaaaatggatcaagtgcg

SEQ ID NO: 330048 - DNA, 839 bp, Homo sapiens
agcgcgcgtccggttcctccgtttcccccacgatgcccctttctccataccaagacccgtgttttccccatttttcctccccttaagctccatttttcgcgtttctcccccttcgcccagtttaccaaagcagggggattccggccttatacataccctagttcaccgcttttttctagccaccgtgccaccatcttccctacttccgcactgcgttacaccttctgagggaggttttccctcccatttccacctttgaaatatttaatttccaatagaacagtttacttggaaattgttaacataggcttatacaaatttaacttttaaagaattctttttacatctatcccagagtacaaagacctagattattgaattcttcacatgtaactttcgtaataggtgtcatggatagattttcacctatccagagagtattctaaaaaaataaacaaagtgaagtaaaagttaagatcccagtgtgaagtatatattcccctaagatttgatatatgtatctttataattgatgatgttgtaaaatgaatttgttgttcctttaacctttgctgtagtgtttctttttattttagttccttctatacatgtttgcagtgttaagataattgtactttgaaaacaccagctgtatatatttttcttatttatgtaacaaagtttgctgaaagatatgtatatttttgatctttgagtgtattctatttgtgtaaggactttggcttacatttgaataatgtctagattttgaaaaattacctgtataatggagaattaaaactttgtagacattttgaaataaaaatggatcaagtgcg

SEQ ID NO: 330049 - DNA, 868 bp, Homo sapiens
ataactacatcgcccatacatagcaagccaattaaatcagtcatcgtaattgaaccccaactttattcactaaacagtcctcatgccaatcattcagctgatcagcacggctagattcttaactttaaaaagtgtgcttcctcgtatttaaaaaaacacaattatcggtaataaaatacactacattcgcttgcctaaatctatcgcccccttcgccaacattattctttatagtcccaatggttctaatttgctcagcccagtttttcccaaacacttagacattataaacatttcatttccaatagctcagccccttgcccattgtcgccataggcttatacaaatttaacttttaaagaattctttttacatctatcccagagtacaaagacctagattattgaattcttcacatgtaactttcgtaataggtgtcatggatagattttcacctatccagagagtattctaaaaaaataaacaaagtgaagtaaaagttaagatcccagtgtgaagtatatattcccctaagatttgatatatgtatctttataattgatgatgttgtaaaatgaatttgttgttcctttaacctttgctgtagtgtttctttttattttagttccttctatacatgtttgcagtgttaagataattgtactttgaaaacaccagctgtatatatttttcttatttatgtaacaaagtttgctgaaagatatgtatatttttgatctttgagtgtattctatttgtgtaaggactttggcttacatttgaataatgtctagattttgaaaaattacctgtataatggagaattaaaactttgtagacattttgaaataaaaatggatcaagtgcg

SEQ ID NO: 330050 - DNA, 915 bp, Homo sapiens
ctccaattcagcttttaaagtccaaggtcgcccaaggtgaaagccagattaccatttccattccctcaccataacctttaattataaattgaatgaggacagattgtctgagatttctgctcgctctgcagcttctagtctccgggcttttcaaactctggcacgagctaagaaaaggaaggagaatttctggggtaaaacataaacctagctgagttgcctttatctaaggaaacattggcataatttttctttattgcttactgtgttaaaattttttgagtgaagtttttcctaacattttctactttgaaatatttaatttccaatagaacagtttacttggaaattgttaacataggcttatacaaatttaacttttaaagaattctttttacatctatcccagagtacaaagacctagattattgaattcttcacatgtaactttcgtaataggtgtcatggatagattttcacctatccagagagtattctaaaaaaataaacaaagtgaagtaaaagttaagatcccagtgtgaagtatatattcccctaagatttgatatatgtatctttataattgatgatgttgtaaaatgaatttgttgttcctttaacctttgctgtagtgtttctttttattttagttccttctatacatgtttgcagtgttaagataattgtactttgaaaacaccagctgtatatatttttcttatttatgtaacaaagtttgctgaaagatatgtatatttttgatctttgagtgtattctatttgtgtaaggactttggcttacatttgaataatgtctagattttgaaaaattacctgtataatggagaattaaaactttgtagacattttgaaataaaaatggatcaagtgcgaaatggatcaagctgcagtttg

SEQ ID NO: 330051 - DNA, 953 bp, Homo sapiens
caaaccacaactctgccgcccttcccccagtccccacggaccttttcaatctgtttttgatgtcagagttcgccaatggaatgcacgtgcccattcagtcctcacataaacctcatacttaaatcgccacatttcggattccgctccttcccgctctatttccggcttttcaactctgcccacgtaaaaaagtaggagatttctgtgtaaccatcccccagtaatttctggggtaaaacataaacctagctgagttgcctttatctaaggaaacattggcataatttttctttattgcttactgtgttaaaattttttgagtgaagtttttcctaacattttctactttgaaatatttaatttccaatagaacagtttacttggaaattgttaacataggcttatacaaatttaacttttaaagaattctttttacatctatcccagagtacaaagacctagattattgaattcttcacatgtaactttcgtaataggtgtcatggatagattttcacctatccagagagtattctaaaaaaataaacaaagtgaagtaaaagttaagatcccagtgtgaagtatatattcccctaagatttgatatatgtatctttataattgatgatgttgtaaaatgaatttgttgttcctttaacctttgctgtagtgtttctttttattttagttccttctatacatgtttgcagtgttaagataattgtactttgaaaacaccagctgtatatatttttcttatttatgtaacaaagtttgctgaaagatatgtatatttttgatctttgagtgtattctatttgtgtaaggactttggcttacatttgaataatgtctagattttgaaaaattacctgtataatggagaattaaaactttgtagacattttgaaataaaaatggatcaagtgcgaaatggatcaagctgcagtttg

SEQ ID NO: 330052 - DNA, 892 bp, Homo sapiens
  misc_feature (43)..(43): n is a, c, g, or t
  misc_feature (45)..(47): n is a, c, g, or t
  misc_feature (68)..(68): n is a, c, g, or t
aggttttcaaggattattgattcgagttaagagaaagttaagntnnnctgcaacgactctcttaattntccaccgctacagaaagaaagtcgtgctgtatccctactgacttctccagctgctggtataaaaacagttgatcctctgcctttgcgggaagattctgaagacaatatccacaaatttgctgaggcaactcttccagtttcaaaaattccaaaatacccaacaaatccccctggacagttgccttctccaccacatgttccatcctactggcatccctctcgacgaattcagggctctcttagagatccagagtttcagcacaatgatgaggacagattgtctgagatttctgctcgctctgcagcttctagtctccgggcttttcaaactctggcacgagctaagaaaaggaaggagaatttctggggtaaaacataaacctagctgagttgcctttatctaaggaaacattggcataatttttctttattgcttactgtgttaaaattttttgagtgaagtttttcctaacattttctactttgaaatatttaatttccaatagaacagtttacttggaaattgttaacataggcttatacaaatttaacttttaaagaattctttttacatctatcccagagtacaaagacctagattattgaattcttcacatgtaactttcgtaataggtgtcatggatagattttcacctatccagagagtattaagatggaaaagaaaaacatatgaagtgaatctaaatccgcttcagagcataatgcctcaaaatgggtcataggtcttttacaccaagagggggaacggccaagtggctcctacccccgctcggcgtgtttatccaacggctgcaacccggagg

SEQ ID NO: 330053 - DNA, 891 bp, Homo sapiens
  misc_feature (844)..(844): n is a, c, g, or t
ccgtatctaccctcttaacctataagcttacatgcgcgtactattttttccattttttccccactcatactcgagctctcgagcctttcccattatgcagtacatatcataagaatctcaaattctaatagttatcattttctcttatttagattccttgagttaagccacactgaaaatcaattcgaataatagcttattggtttcaagacttttgaaggcaactattcataaccgtctccccctttcccacatttatttcccaatacaccaatatcctctgtatatttgtaaccataggcttatacaaatttaacttttaaagaattctttttacatctatcccagagtacaaagacctagattattgaattcttcacatgtaactttcgtaataggtgtcatggatagattttcacctatccagagagtattctaaaaaaataaacaaagtgaagtaaaagttaagatcccagtgtgaagtatatattcccctaagatttgatatatgtatctttataattgatgatgttgtaaaatgaatttgttgttcctttaacctttgctgtagtgtttctttttattttagttccttctatacatgtttgcagtgttaagataattgtactttgaaaacaccagctgtatatatttttcttatttatgtaacaaagtttgctgaaagatatgtatatttttgatctttgagtgtattctatttgtgtaaggactttggcttacatttgaataatgtctagattttgaaaaattacctgtataatggagaattaaaactttgtagacattttgaaataaaaatggatcaagtgcgtctgttacgcgncaagcgccgcctttcccctacctgaagtctcccgtccgctggacaat

SEQ ID NO: 330054 - DNA, 868 bp, Homo sapiens
  misc_feature (44)..(44): n is a, c, g, or t
ctcctcatctgtgtcactaacatttggttcaccaggtcggactnagtataagaggagactgacagcattttatgctcaacagcgttctttctttccctatcttactacttgtcccccgatcgttctcgtgactaacatcagataaaagaagtggctatatagaacacacattcttggtagcttcccgtattgagctccgctgcaaaattattatatattgcatctgaataacacggtagacgaaagttcccaaacacattctcgctcgaataattatatttcaaaattccgtagtcatggtaatgttttcataggcttatacaaatttaacttttaaagaattctttttacatctatcccagagtacaaagacctagattattgaattcttcacatgtaactttcgtaataggtgtcatggatagattttcacctatccagagagtattctaaaaaaataaacaaagtgaagtaaaagttaagatcccagtgtgaagtatatattcccctaagatttgatatatgtatctttataattgatgatgttgtaaaatgaatttgttgttcctttaacctttgctgtagtgtttctttttattttagttccttctatacatgtttgcagtgttaagataattgtactttgaaaacaccagctgtatatatttttcttatttatgtaacaaagtttgctgaaagatatgtatatttttgatctttgagtgtattctatttgtgtaaggactttggcttacatttgaataatgtctagattttgaaaaattacctgtataatggagaattaaaactttgtagacattttgaaataaaaatggatcaagtgcgaaatggatcaagctgcagtttg

SEQ ID NO: 330055 - DNA, 3179 bp, Homo sapiens
gtcagtgaaagcgttgtgtagaaacgttacttttataagagaaatcactagcgatatattcagtagttttactgctttctttaataagtgtttcacatactttttttagaaggaaatgctcatggttagttcaaagcatattgaattcagagtctatggattgaagagctttgagacagctttcaatgcttgttgataggaaacctctaaaagggttgttcatttcattttatcagacacctgctttctgaaaggatgtcttatattaatatgtaaaggagtcagaacagtttttggcagtaaagtccttgaggttatactgtactaaaaaagataaactgtttagatctgatctgtatgaagatgtactatccagcattacaaagcagtaatataacttgactgagttccccatcttttccatttgctttccttgtaatcagtggtaatatgccgtgaaatagaaaccatattgtgaagtagtaagtataaaaggaaatatttaacaatagaagtgtagtaattgctcagaacattttctttgccttaataaaatacgctgaaaataagccaagggaagaaaagctaaacaaattgaacatattgggtattcagaaatgtgaagaattttctattaaggcaggaagaaaaaaaatcatgtcagggaggaagaaaaaaacctgtagaactgacaacagagttgccttaaagctaatgtctatgtcatatgaaaatatgccaacgtttattttgattataagctatattttgattacaaaactgttattcaaaacatagtaatgagtacataaagttgacctttggatgttaataatatatgtgaaatgaaattaaaatcatatataactttgctatttttttgtcctgtaattcaactttatgttttgttaagtaattgaagaccaaagttccgcatatttaatcaacaaaactaaactaaaataatttttgttttaaggttttccacaataaaagccagtttgttccaccattcaaaggtaactcagtcatccatgaaactgaatacaaaagaaatttcaagggtttatctccagtgaaagaaccaaaattaagaaatgatttgagagaaaacagaaatcttgaaacagtgtctcctgaaaggaagagtaataaaatagacgatcgtttaaaattggaagcagagatggaattaaaagacttacaccagcctaaaaggaagcttactccttggaaacatcaaaggcttgggaaggtgaattccgaatatagagcaaaatttctgagcccagctcagtatttatataaagctggggcttggacacatgtaaagggaaacatgccaaatcaggttaaagaactccgagaaaaggctgagttttataggaagcgagttcaggggacgcatttttctcgggaccatctgaatcagattttatctgatagcaactgctgttgggatgtctcctcaaccacaagctcagaaggaaccgttagtagcaacatcagagcattagatcttgctggagatcctacaagccataagactttgcagaaatgtccttctacagaaccagaagaaaaaggaaatatcgtggaagaacagccccagaaaaataccacggagaaattgggtgtgtcagctcccaccatacccgttagaaggcggctggcttgggatacagagaacacaagtgaagacgtacagaaacagcccggggagaaagaggaggaggacgacaatgaagaggaaggggacaggaaaacgggcaagcaggcttttatgggagagcaagagaagttggatgtacatgagaaatctaaggcagataagatgaaagaagggtcagattcttctgtatcctcagaaaaaggaggccggcttcctactcccaagctgagagaacttggtggaatccagaggactcatcatgatctcactactccagctgttggtggtgctgttttagtgtctccatctaagatgaagcctccagccccagaacagaggaaaagaatgacctctcaggattgtttagaaacttcaaagaatgattttactaagaaagaaagtcgtgctgtatccctactgacttctccagctgctggtataaaaacagttgatcctctgcctttgcgggaagattctgaagacaatatccacaaatttgctgaggcaactcttccagtttcaaaaattccaaaatacccaacaaatccccctggacagttgccttctccaccacatgttccatcctactggcatccctctcgacgaattcagggctctcttagagatccagagtttcagcacaatgtgggaaaagcaaggatgaacaatttgcagttacctcaacatgaagcctttaatgatgaagatgaggacagattgtctgagatttctgctcgctctgcagcttctagtctccgggcttttcaaactctggcacgagctaagaaaaggaaggagaatttctggggtaaaacataaacctagctgagttgcctttatctaaggaaacattggcataatttttctttattgcttactgtgttaaaattttttgagtgaagtttttcctaacattttctactttgaaatatttaatttccaatagaacagtttacttggaaattgttaacataggcttatacaaatttaacttttaaagaattctttttacatctatcccagagtacaaagacctagattattgaattcttcacatgtaactttcgtaataggtgtcatggatagattttcacctatccagagagtattctaaaaaaataaacaaagtgaagtaaaagttaagatcccagtgtgaagtatatattcccctaagatttgatatatgtatctttataattgatgatgttgtaaaatgaatttgttgttcctttaacctttgctgtagtgtttctttttattttagttccttctatacatgtttgcagtgttaagataattgtactttgaaaacaccagctgtatatatttttcttatttatgtaacaaagtttgctgaaagatatgtatatttttgatctttgagtgtattctatttgtgtaaggactttggcttacatttgaataatgtctagattttgaaaaattacctgtataatggagaattaaaactttgtagacattttgaaataaaaatggatcaagtgcg

SEQ ID NO: 330056 - DNA, 2592 bp, Homo sapiens
cgccggcgcgtagtcggggacgccgggccgaggctttgctagggaacactgttatcgccccgccccctcggagctttttctccagttaactgtcggagtagcgggggctccggcgccgggcgacatgccggtgcgcttcaaggggctgagtgaataccagaggaacttcctgtggaaaaagtcttatttgtcagagtcttgtaattcctccgtggggcgaaagtacccatgggctggacttagatcagatcaattagttggatagacttctgcgtaagaaagctggattgactgttgttccttcatataatgccttgagaaattctgaatatcaaaggcagtttgtttggaagacttctaaagaaactgctccagcttttgcagccaatcaggttttccacaataaaagccagtttgttccaccattcaaaggtaactcagtcatccatgaaactgaatacaaaagaaatttcaagggtttatctccagtgaaagaaccaaaattaagaaatgatttgagagaaaacagaaatcttgaaacagtgtctcctgaaaggaagagtaataaaatagacgatcgtttaaaattggaagcagagatggaattaaaagacttacaccagcctaaaaggaagcttactccttggaaacatcaaaggcttgggaaggtgaattccgaatatagagcaaaatttctgagcccagctcagtatttatataaagctggggcttggacacatgtaaagggaaacatgccaaatcaggttaaagaactccgagaaaaggctgagttttataggaagcgagttcaggggacgcatttttctcgggaccatctgaatcagattttatctgatagcaactgctgttgggatgtctcctcaaccacaagctcagaaggaaccgttagtagcaacatcagagcattagatcttgctggagatcctacaagccataagactttgcagaaatgtccttctacagaaccagaagaaaaaggaaatatcgtggaagaacagccccagaaaaataccacggagaaattgggtgtgtcagctcccaccatacccgttagaaggcggctggcttgggatacagagaacacaagtgaagacgtacagaaacagcccggggagaaagaggaggaggacgacaatgaagaggaaggggacaggaaaacgggcaagcaggcttttatgggagagcaagagaagttggatgtacatgagaaatctaaggcagataagatgaaagaagggtcagattcttctgtatcctcagaaaaaggaggccggcttcctactcccaagctgagagaacttggtggaatccagaggactcatcatgatctcactactccagctgttggtggtgctgttttagtgtctccatctaagatgaagcctccagccccagaacagaggaaaagaatgacctctcaggattgtttagaaacttcaaagaatgattttactaagaaagaaagtcgtgctgtatccctactgacttctccagctgctggtataaaaacagttgatcctctgcctttgcgggaagattctgaagacaatatccacaaatttgctgaggcaactcttccagtttcaaaaattccaaaatacccaacaaatccccctggacagttgccttctccaccacatgttccatcctactggcatccctctcgacgaattcagggctctcttagagatccagagtttcagcacaatgtgggaaaagcaaggatgaacaatttgcagttacctcaacatgaagcctttaatgatgaagatgaggacagattgtctgagatttctgctcgctctgcagcttctagtctccgggcttttcaaactctggcacgagctaagaaaaggaaggagaatttctggggtaaaacataaacctagctgagttgcctttatctaaggaaacattggcataatttttctttattgcttactgtgttaaaattttttgagtgaagtttttcctaacattttctactttgaaatatttaatttccaatagaacagtttacttggaaattgttaacataggcttatacaaatttaacttttaaagaattctttttacatctatcccagagtacaaagacctagattattgaattcttcacatgtaactttcgtaataggtgtcatggatagattttcacctatccagagagtattctaaaaaaataaacaaagtgaagtaaaagttaagatcccagtgtgaagtatatattcccctaagatttgatatatgtatctttataattgatgatgttgtaaaatgaatttgttgttcctttaacctttgctgtagtgtttctttttattttagttccttctatacatgtttgcagtgttaagataattgtactttgaaaacaccagctgtatatatttttcttatttatgtaacaaagtttgctgaaagatatgtatatttttgatctttgagtgtattctatttgtgtaaggactttggcttacatttgaataatgtctagattttgaaaaattacctgtataatggagaattaaaactttgtagacattttgaaataaaaatggatcaagtgcg

SEQ ID NO: 330057 - DNA, 1195 bp, Homo sapiens
  misc_feature (43)..(43): n is a, c, g, or t
  misc_feature (45)..(47): n is a, c, g, or t
  misc_feature (68)..(68): n is a, c, g, or t
aggttttcaaggattattgattcgagttaagagaaagttaagntnnnctgcaacgactctcttaattntccaccgctacagaaagaaagtcgtgctgtatccctactgacttctccagctgctggtataaaaacagttgatcctctgcctttgcgggaagattctgaagacaatatccacaaatttgctgaggcaactcttccagtttcaaaaattccaaaatacccaacaaatccccctggacagttgccttctccaccacatgttccatcctactggcatccctctcgacgaattcagggctctcttagagatccagagtttcagcacaatgtgggaaaagcaaggatgaacaatttgcagttacctcaacatgaagcctttaatgatgaagatgaggacagattgtctgagatttctgctcgctctgcagcttctagtctccgggcttttcaaactctggcacgagctaagaaaaggaaggagaatttctggggtaaaacataaacctagctgagttgcctttatctaaggaaacattggcataatttttctttattgcttactgtgttaaaattttttgagtgaagtttttcctaacattttctactttgaaatatttaatttccaatagaacagtttacttggaaattgttaacataggcttatacaaatttaacttttaaagaattctttttacatctatcccagagtacaaagacctagattattgaattcttcacatgtaactttcgtaataggtgtcatggatagattttcacctatccagagagtattctaaaaaaataaacaaagtgaagtaaaagttaagatcccagtgtgaagtatatattcccctaagatttgatatatgtatctttataattgatgatgttgtaaaatgaatttgttgttcctttaacctttgctgtagtgtttctttttattttagttccttctatacatgtttgcagtgttaagataattgtactttgaaaacaccagctgtatatatttttcttatttatgtaacaaagtttgctgaaagatatgtatatttttgatctttgagtgtattctatttgtgtaaggactttggcttacatttgaataatgtctagattttgaaaaattacctgtataatggagaattaaaactttgtagacattttgaaataaaaatggatcaagtgcg

SEQ ID NO: 330058 - DNA, 2737 bp, Homo sapiens
cgccggcgcgtagtcggggacgccgggccgaggctttgctagggaacactgttatcgccccgccccctcggagctttttctccagttaactgtcggagtagcgggggctccggcgccgggcgacatgccggtgcgcttcaaggggctgagtgaataccagaggaacttcctgtggaaaaagtcttatttgtcagagtcttgtaattcctccgtggggcgaaagtacccatgggctggacttagatcagatcaattaggcatcacgaaagagccaagttttatttcaaaaagaagagtcccttaccatgacccacagatttcaaaatctctggagtggaatggagctatctcagagagcaatgtggttgcatcaccagaaccagaagccccggaaacaccaaaatcacaagaagcagaacaaaaggatgttattcaagaaagagttcactcactagaagcttccagggttcccaaaagaaccagatctcactctgcagactccagagctgaaggggcttcagatgtggaaaataatgagggtgtaacaaaccatacaccagttaatgaaaatgtggaactggaacattctaccaaggttctttcagaaaatgtagataatgggttggatagacttctgcgtaagaaagctggattgactgttgttccttcatataatgccttgagaaattctgaatatcaaaggcagtttgtttggaagacttctaaagaaactgctccagcttttgcagccaatcaggttttccacaataaaagccagtttgttccaccattcaaaggtaactcagtcatccatgaaactgaatacaaaagaaatttcaagggtttatctccagtgaaagaaccaaaattaagaaatgatttgagagaaaacagaaatcttgaaacagtgtctcctgaaaggaagagtaataaaatagacgatcgtttaaaattggaagcagagatggaattaaaagacttacaccagcctaaaaggaagcttactccttggaaacatcaaaggcttgggaaggtgaattccgaatatagagcaaaatttctgagcccagctcagtatttatataaagctggggcttggacacatgtaaagggaaacatgccaaatcaggttaaagaactccgagaaaaggctgagttttataggaagcgagttcaggggacgcatttttctcgggaccatctgaatcagattttatctgatagcaactgctgttgggatgtctcctcaaccacaagctcagaaggaaccgttagtagcaacatcagagcattagatcttgctggagatcctacaagccataagactttgcagaaatgtccttctacagaaccagaagaaaaaggaaatatcgtggaagaacagccccagaaaaataccacggagaaattgggtgtgtcagctcccaccatacccgttagaaggcggctggcttgggatacagagaacacaagtgaagacgtacagaaacagcccggggagaaagaggaggaggacgacaatgaagaggaaggggacaggaaaacgggcaagcaggcttttatgggagagcaagagaagttggatgtacatgagaaatctaaggcagataagatgaaagaagggtcagattcttctgtatcctcagaaaaaggaggccggcttcctactcccaagctgagagaacttggtggaatccagaggactcatcatgatctcactactccagctgttggtggtgctgttttagtgtctccatctaagatgaagcctccagccccagaacagaggaaaagaatgacctctcaggattgtttagaaacttcaaagaatgattttactaagaaagaaagtcgtgctgtatccctactgacttctccagctgctggtataaaaacagttgatcctctgcctttgcgggaagattctgaagacaatatccacaaatttgctgaggcaactcttccagtttcaaaaattccaaaatacccaacaaatccccctggacagttgccttctccaccacatgttccatcctactggcatccctctcgacgaattcagggctctcttagagatccagagtttcagcacaatgtgggaaaagcaaggatgaacaatttgcagttacctcaacatgaagcctttaatgatgaagatgaggacagattgtctgagatttctgctcgctctgcagcttctagtctccgggcttttcaaactctggcacgagctaagaaaaggaaggagaatttctggggtaaaacataaacctagctgagttgcctttatctaaggaaacattggcataatttttctttattgcttactgtgttaaaattttttgagtgaagtttttcctaacattttctactttgaaatatttaatttccaatagaacagtttacttggaaattgttaacataggcttatacaaatttaacttttaaagaattctttttacatctatcccagagtacaaagacctagattattgaattcttcacatgtaactttcgtaataggtgtcatggatagattttcacctatccagagagtattctaaaaaaataaacaaagtgaagtaaaagttaagatcccagtgtgaagtatatattcccctaagatttgatatatgtatctttatattggggaagggagaaggattggtggtccttaaccttgggtgaggggtcttttatttagtcctccataaagtggcggggaagatattgactt

SEQ ID NO: 330059 - DNA, 2897 bp, Homo sapiens
cgccggcgcgtagtcggggacgccgggccgaggctttgctagggaacactgttatcgccccgccccctcggagctttttctccagttaactgtcggagtagcgggggctccggcgccgggcgacatgccggtgcgcttcaaggggctgagtgaataccagaggaacttcctgtggaaaaagtcttatttgtcagagtcttgtaattcctccgtggggcgaaagtacccatgggctggacttagatcagatcaattaggcatcacgaaagagccaagttttatttcaaaaagaagagtcccttaccatgacccacagatttcaaaatctctggagtggaatggagctatctcagagagcaatgtggttgcatcaccagaaccagaagccccggaaacaccaaaatcacaagaagcagaacaaaaggatgttattcaagaaagagttcactcactagaagcttccagggttcccaaaagaaccagatctcactctgcagactccagagctgaaggggcttcagatgtggaaaataatgagggtgtaacaaaccatacaccagttaatgaaaatgtggaactggaacattctaccaaggttctttcagaaaatgtagataatgggttggatagacttctgcgtaagaaagctggattgactgttgttccttcatataatgccttgagaaattctgaatatcaaaggcagtttgtttggaagacttctaaagaaactgctccagcttttgcagccaatcaggttttccacaataaaagccagtttgttccaccattcaaaggtaactcagtcatccatgaaactgaatacaaaagaaatttcaagggtttatctccagtgaaagaaccaaaattaagaaatgatttgagagaaaacagaaatcttgaaacagtgtctcctgaaaggaagagtaataaaatagacgatcgtttaaaattggaagcagagatggaattaaaagacttacaccagcctaaaaggaagcttactccttggaaacatcaaaggcttgggaaggtgaattccgaatatagagcaaaatttctgagcccagctcagtatttatataaagctggggcttggacacatgtaaagggaaacatgccaaatcaggttaaagaactccgagaaaaggctgagttttataggaagcgagttcaggggacgcatttttctcgggaccatctgaatcagattttatctgatagcaactgctgttgggatgtctcctcaaccacaagctcagaaggaaccgttagtagcaacatcagagcattagatcttgctggagatcctacaagccataagactttgcagaaatgtccttctacagaaccagaagaaaaaggaaatatcgtggaagaacagccccagaaaaataccacggagaaattgggtgtgtcagctcccaccatacccgttagaaggcggctggcttgggatacagagaacacaagtgaagacgtacagaaacagcccggggagaaagaggaggaggacgacaatgaagaggaaggggacaggaaaacgggcaagcaggcttttatgggagagcaagagaagttggatgtacatgagaaatctaaggcagataagatgaaagaagggtcagattcttctgtatcctcagaaaaaggaggccggcttcctactcccaagctgagagaacttggtggaatccagaggactcatcatgatctcactactccagctgttggtggtgctgttttagtgtctccatctaagatgaagcctccagccccagaacagaggaaaagaatgacctctcaggattgtttagaaacttcaaagaatgattttactaagaaagaaagtcgtgctgtatccctactgacttctccagctgctggtataaaaacagttgatcctctgcctttgcgggaagattctgaagacaatatccacaaatttgctgaggcaactcttccagtttcaaaaattccaaaatacccaacaaatccccctggacagttgccttctccaccacatgttccatcctactggcatccctctcgacgaattcagggctctcttagagatccagagtttcagcacaatgatgaggacagattgtctgagatttctgctcgctctgcagcttctagtctccgggcttttcaaactctggcacgagctaagaaaaggaaggagaatttctggggtaaaacataaacctagctgagttgcctttatctaaggaaacattggcataatttttctttattgcttactgtgttaaaattttttgagtgaagtttttcctaacattttctactttgaaatatttaatttccaatagaacagtttacttggaaattgttaacataggcttatacaaatttaacttttaaagaattctttttacatctatcccagagtacaaagacctagattattgaattcttcacatgtaactttcgtaataggtgtcatggatagattttcacctatccagagagtattctaaaaaaataaacaaagtgaagtaaaagttaagatcccagtgtgaagtatatattcccctaagatttgatatatgtatctttataattgatgatgttgtaaaatgaatttgttgttcctttaacctttgctgtagtgtttctttttattttagttccttctatacatgtttgcagtgttaagataattgtactttgaaaacaccagctgtatatatttttcttatttatgtaacaaagtttgctgaaagatatgtatatttttgatctttgagtgtattctatttgtgtaaggactttggcttacatttgaataatgtctagattttgaaaaattacctgtataatggagaattaaaactttgtagacattttgaaataaaaatggatcaagtgcg

SEQ ID NO: 330060 - DNA, 2694 bp, Homo sapiens
cgccggcgcgtagtcggggacgccgggccgaggctttgctagggaacactgttatcgccccgccccctcggagctttttctccagttaactgtcggagtagcgggggctccggcgccgggcgacatgccggtgcgcttcaaggggctgagtgaataccagaggaacttcctgtggaaaaagtcttatttgtcagagtcttgtaattcctccgtggggcgaaagtacccatgggctggacttagatcagatcaattaggcatcacgaaagagccaagttttatttcaaaaagaagagtcccttaccatgacccacagatttcaaaatctctggagtggaatggagctatctcagagagcaatgtggttgcatcaccagaaccagaagccccggaaacaccaaaatcacaagaagcagaacaaaaggatgttattcaagaaagagttcactcactagaagcttccagggttcccaaaagaaccagatctcactctgcagactccagagctgaaggggcttcagatgtggaaaataatgagggtgtaacaaaccatacaccagttaatgaaaatgtggaactggaacattctaccaaggttctttcagaaaatgtagataatgggttggatagacttctgcgtaagaaagctggattgactgttgttccttcatataatgccttgagaaattctgaatatcaaaggcagtttgtttggaagacttctaaagaaactgctccagcttttgcagccaatcaggttttccacaataaaagccagtttgttccaccattcaaaggtaactcagtcatccatgaaactgaatacaaaagaaatttcaagggtttatctccagtgaaagaaccaaaattaagaaatgatttgagagaaaacagaaatcttgaaacagtgtctcctgaaaggaagagtaataaaatagacgatcgtttaaaattggaagcagagatggaattaaaagacttacaccagcctaaaaggaagcttactccttggaaacatcaaaggcttgggaaggtgaattccgaatatagagcaaaatttctgagcccagctcagtatttatataaagctggggcttggacacatgtaaagggaaacatgccaaatcaggttaaagaactccgagaaaaggctgagttttataggaagcgagttcaggggacgcatttttctcgggaccatctgaatcagattttatctgatagcaactgctgttgggatgtctcctcaaccacaagctcagaaggaaccgttagtagcaacatcagagcattagatcttgctggagatcctacaagccataagactttgcagaaatgtccttctacagaaccagaagaaaaaggaaatatcgtggaagaacagccccagaaaaataccacggagaaattgggtgtgtcagctcccaccatacccgttagaaggcggctggcttgggatacagagaacacaagtgaagacgtacagaaacagcccggggagaaagaggaggaggacgacaatgaagaggaaggggacaggaaaacgggcaagcaggcttttatgggagagcaagagaagttggatgtacatgagaaatctaaggcagataagatgaaagaagggtcagattcttctgtatcctcagaaaaaggaggccggcttcctactcccaagctgagagaacttggtggaatccagaggactcatcatgatctcactactccagctgttggtggtgctgttttagtgtctccatctaagatgaagcctccagccccagaacagaggaaaagaatgacctctcaggattgtttagaaacttcaaagaatgattttactaagaaagaaagtcgtgctgtatccctactgacttctccagctgctggtataaaaacagttgatcctctgcctttgcgggaagattctgaagacaatatccacaaatttgctgaggcaactcttccagtttcaaaaattccaaaatacccaacaaatccccctggacagttgccttctccaccacatgttccatcctactggcatccctctcgacgaattcagggctctcttagagatccagagtttcagcacaatgtgggaaaagcaaggatgaacaatttgcagttacctcaacatgaagcctttaatgatgaagatgaggacagattgtctgagatttctgctcgctctgcagcttctagtctccgggcttttcaaactctggcacgagctaagaaaaggaaggagaatttctggggtaaaacataaacctagctgagttgcctttatctaaggaaacattggcataatttttctttattgcttactgtgttaaaattttttgagtgaagtttttcctaacattttctactttgaaatatttaatttccaatagaacagtttacttggaaattgttaacataggcttatacaaatttaacttttaaagaattctttttacatctatcccagagtacaaagacctagattattgaattcttcacatgtaactttcgtaataggtgtcatggatagattttcacctatccagagagtatttaacatcgttatttaaccttagaaccacgttgaagatataatcccctagaccgtttatattcctataatgatatgtgccatgatttgtgtcacttccctggtggctgtccttttttaaccctcctaatgcatag

SEQ ID NO: 330061 - DNA, 2674 bp, Homo sapiens
cgccggcgcgtagtcggggacgccgggccgaggctttgctagggaacactgttatcgccccgccccctcggagctttttctccagttaactgtcggagtagcgggggctccggcgccgggcgacatgccggtgcgcttcaaggggctgagtgaataccagaggaacttcctgtggaaaaagtcttatttgtcagagtcttgtaattcctccgtggggcgaaagtacccatgggctggacttagatcagatcaattaggcatcacgaaagagccaagttttatttcaaaaagaagagtcccttaccatgacccacagatttcaaaatctctggagtggaatggagctatctcagagagcaatgtggttgcatcaccagaaccagaagccccggaaacaccaaaatcacaagaagcagaacaaaaggatgttattcaagaaagagttcactcactagaagcttccagggttcccaaaagaaccagatctcactctgcagactccagagctgaaggggcttcagatgtggaaaataatgagggtgtaacaaaccatacaccagttaatgaaaatgtggaactggaacattctaccaaggttctttcagaaaatgtagataatgggttggatagacttctgcgtaagaaagctggattgactgttgttccttcatataatgccttgagaaattctgaatatcaaaggcagtttgtttggaagacttctaaagaaactgctccagcttttgcagccaatcaggttttccacaataaaagccagtttgttccaccattcaaaggtaactcagtcatccatgaaactgaatacaaaagaaatttcaagggtttatctccagtgaaagaaccaaaattaagaaatgatttgagagaaaacagaaatcttgaaacagtgtctcctgaaaggaagagtaataaaatagacgatcgtttaaaattggaagcagagatggaattaaaagacttacaccagcctaaaaggaagcttactccttggaaacatcaaaggcttgggaaggtgaattccgaatatagagcaaaatttctgagcccagctcagtatttatataaagctggggcttggacacatgtaaagggaaacatgccaaatcaggttaaagaactccgagaaaaggctgagttttataggaagcgagttcaggggacgcatttttctcgggaccatctgaatcagattttatctgatagcaactgctgttgggatgtctcctcaaccacaagctcagaaggaaccgttagtagcaacatcagagcattagatcttgctggagatcctacaagccataagactttgcagaaatgtccttctacagaaccagaagaaaaaggaaatatcgtggaagaacagccccagaaaaataccacggagaaattgggtgtgtcagctcccaccatacccgttagaaggcggctggcttgggatacagagaacacaagtgaagacgtacagaaacagcccggggagaaagaggaggaggacgacaatgaagaggaaggggacaggaaaacgggcaagcaggcttttatgggagagcaagagaagttggatgtacatgagaaatctaaggcagataagatgaaagaagggtcagattcttctgtatcctcagaaaaaggaggccggcttcctactcccaagctgagagaacttggtggaatccagaggactcatcatgatctcactactccagctgttggtggtgctgttttagtgtctccatctaagatgaagcctccagccccagaacagaggaaaagaatgacctctcaggattgtttagaaacttcaaagaatgattttactaagaaagaaagtcgtgctgtatccctactgacttctccagctgctggtataaaaacagttgatcctctgcctttgcgggaagattctgaagacaatatccacaaatttgctgaggcaactcttccagtttcaaaaattccaaaatacccaacaaatccccctggacagttgccttctccaccacatgttccatcctactggcatccctctcgacgaattcagggctctcttagagatccagagtttcagcacaatgtgggaaaagcaaggatgaacaatttgcagttacctcaacatgaagcctttaatgatgaagatgaggacagattgtctgagatttctgctcgctctgcagcttctagtctccgggcttttcaaactctggcacgagctaagaaaaggaaggagaatttctggggtaaaacataaacctagctgagttgcctttatctaaggaaacattggcataatttttctttattgcttactgtgttaaaattttttgagtgaagtttttcctaacattttctactttgaaatatttaatttccaatagaacagtttacttggaaattgttaacataggcttatacaaatttaacttttaaagaattcttaacactttattccaaagatcaagggacctatcatgcttgccattctttcaatggcatcttgtgtatattgttgtctccgtataatattttcccctcccctacgggtcatttttacaaaactaaacccccgcgattttaatattatatagtcccttccgcgaagctcatatatgccttattattagcatatgtgcttctaatatcatcgctcatacgt

SEQ ID NO: 330062 - DNA, 1271 bp, Homo sapiens
  misc_feature (1)..(1): n is a, c, g, or t
nttccctcgcgtcccctctcgttttttatacctgcatcgccgtctttctaactccccaaaatgttctttaatagccatgggcaattacacggggccaccccggcattttttccgcgaacaagccttctccaggctctatctgtaaacccgcatgatcgttttccaccaccattttggcacctcaaccgcagggccctctttttactccccccctccccaaagaaagcccggcgtgatgcccctcggcttttcccccgccgggcaaaaaaaagttgatcctctgcctttgcgggaagattctgaagacaatatccacaaatttgctgaggcaactcttccagtttcaaaaattccaaaatacccaacaaatccccctggacagttgccttctccaccacatgttccatcctactggcatccctctcgacgaattcagggctctcttagagatccagagtttcagcacaatgatgaggacagattgtctgagatttctgctcgctctgcagcttctagtctccgggcttttcaaactctggcacgagctaagaaaaggaaggagaatttctggggtaaaacataaacctagctgagttgcctttatctaaggaaacattggcataatttttctttattgcttactgtgttaaaattttttgagtgaagtttttcctaacattttctactttgaaatatttaatttccaatagaacagtttacttggaaattgttaacataggcttatacaaatttaacttttaaagaattctttttacatctatcccagagtacaaagacctagattattgaattcttcacatgtaactttcgtaataggtgtcatggatagattttcacctatccagagagtattctaaaaaaataaacaaagtgaagtaaaagttaagatcccagtgtgaagtatatattcccctaagatttgatatatgtatctttataattgatgatgttgtaaaatgaatttgttgttcctttaacctttgctgtagtgtttctttttattttagttccttctatacatgtttgcagtgttaagataattgtactttgaaaacaccagctgtatatatttttcttatttatgtaacaaagtttgctgaaagatatgtatatttttgatctttgagtgtattctatttgtgtaaggactttggcttacatttgaataatgtctagattttgaaaaattacctgtataatggagaattaaaactttgtagacattttgaaataaaaatggatcaagtgcg

SEQ ID NO: 330063 - DNA, 2595 bp, Homo sapiens
cgccggcgcgtagtcggggacgccgggccgaggctttgctagggaacactgttatcgccccgccccctcggagctttttctccagttaactgtcggagtagcgggggctccggcgccgggcgacatgccggtgcgcttcaaggggctgagtgaataccagaggaacttcctgtggaaaaagtcttatttgtcagagtcttgtaattcctccgtggggcgaaagtacccatgggctggacttagatcagatcaattaggcatcacgaaagagccaagttttatttcaaaaagaagagtcccttaccatgacccacagatttcaaaatctctggagtggaatggagctatctcagagagcaatgtggttgcatcaccagaaccagaagccccggaaacaccaaaatcacaagaagcagaacaaaaggatgttattcaagaaagagttcactcactagaagcttccagggttcccaaaagaaccagatctcactctgcagactccagagctgaaggggcttcagatgtggaaaataatgagggtgtaacaaaccatacaccagttaatgaaaatgtggaactggaacattctaccaaggttctttcagaaaatgtagataatgggttggatagacttctgcgtaagaaagctggattgactgttgttccttcatataatgccttgagaaattctgaatatcaaaggcagtttgtttggaagacttctaaagaaactgctccagcttttgcagccaatcaggttttccacaataaaagccagtttgttccaccattcaaaggtaactcagtcatccatgaaactgaatacaaaagaaatttcaagggtttatctccagtgaaagaaccaaaattaagaaatgatttgagagaaaacagaaatcttgaaacagtgtctcctgaaaggaagagtaataaaatagacgatcgtttaaaattggaagcagagatggaattaaaagacttacaccagcctaaaaggaagcttactccttggaaacatcaaaggcttgggaaggtgaattccgaatatagagcaaaatttctgagcccagctcagtatttatataaagctggggcttggacacatgtaaagggaaacatgccaaatcaggttaaagaactccgagaaaaggctgagttttataggaagcgagttcaggggacgcatttttctcgggaccatctgaatcagattttatctgatagcaactgctgttgggatgtctcctcaaccacaagctcagaaggaaccgttagtagcaacatcagagcattagatcttgctggagatcctacaagccataagactttgcagaaatgtccttctacagaaccagaagaaaaaggaaatatcgtggaagaacagccccagaaaaataccacggagaaattgggtgtgtcagctcccaccatacccgttagaaggcggctggcttgggatacagagaacacaagtgaagacgtacagaaacagcccggggagaaagaggaggaggacgacaatgaagaggaaggggacaggaaaacgggcaagcaggcttttatgggagagcaagagaagttggatgtacatgagaaatctaaggcagataagatgaaagaagggtcagattcttctgtatcctcagaaaaaggaggccggcttcctactcccaagctgagagaacttggtggaatccagaggactcatcatgatctcactactccagctgttggtggtgctgttttagtgtctccatctaagatgaagcctccagccccagaacagaggaaaagaatgacctctcaggattgtttagaaacttcaaagaatgattttactaagaaagaaagtcgtgctgtatccctactgacttctccagctgctggtataaaaacagttgatcctctgcctttgcgggaagattctgaagacaatatccacaaatttgctgaggcaactcttccagtttcaaaaattccaaaatacccaacaaatccccctggacagttgccttctccaccacatgttccatcctactggcatccctctcgacgaattcagggctctcttagagatccagagtttcagcacaatgtgggaaaagcaaggatgaacaatttgcagttacctcaacatgaagcctttaatgatgaagatgaggacagattgtctgagatttctgctcgctctgcagcttctagtctccgggcttttcaaactctggcacgagctaagaaaaggaaggagaatttctggggtaaaacataaacctagctgagttgcctttatctaaggaaacattggcataatttttctttattgcttactgtgttaaaattttttgagtgaagtttttcctaacattttctactttgaaatatttaatttccaatagaacagtttacttggaaattgttaacataggcttatacaaatttaacttttaaagaattctttttacatctatcccagagtacaaagacctagattattgaatgatcaaaaaatctttggaataggtgtaaggtgaacttccccatccggaaggtgctaaaaataacaagtgaacgtcaggtaccacccaatggtaacta

SEQ ID NO: 330064 - DNA, 2578 bp, Homo sapiens
cgccggcgcgtagtcggggacgccgggccgaggctttgctagggaacactgttatcgccccgccccctcggagctttttctccagttaactgtcggagtagcgggggctccggcgccgggcgacatgccggtgcgcttcaaggggctgagtgaataccagaggaacttcctgtggaaaaagtcttatttgtcagagtcttgtaattcctccgtggggcgaaagtacccatgggctggacttagatcagatcaattaggcatcacgaaagagccaagttttatttcaaaaagaagagtcccttaccatgacccacagatttcaaaatctctggagtggaatggagctatctcagagagcaatgtggttgcatcaccagaaccagaagccccggaaacaccaaaatcacaagaagcagaacaaaaggatgttattcaagaaagagttcactcactagaagcttccagggttcccaaaagaaccagatctcactctgcagactccagagctgaaggggcttcagatgtggaaaataatgagggtgtaacaaaccatacaccagttaatgaaaatgtggaactggaacattctaccaaggttctttcagaaaatgtagataatgggttggatagacttctgcgtaagaaagctggattgactgttgttccttcatataatgccttgagaaattctgaatatcaaaggcagtttgtttggaagacttctaaagaaactgctccagcttttgcagccaatcaggttttccacaataaaagccagtttgttccaccattcaaaggtaactcagtcatccatgaaactgaatacaaaagaaatttcaagggtttatctccagtgaaagaaccaaaattaagaaatgatttgagagaaaacagaaatcttgaaacagtgtctcctgaaaggaagagtaataaaatagacgatcgtttaaaattggaagcagagatggaattaaaagacttacaccagcctaaaaggaagcttactccttggaaacatcaaaggcttgggaaggtgaattccgaatatagagcaaaatttctgagcccagctcagtatttatataaagctggggcttggacacatgtaaagggaaacatgccaaatcaggttaaagaactccgagaaaaggctgagttttataggaagcgagttcaggggacgcatttttctcgggaccatctgaatcagattttatctgatagcaactgctgttgggatgtctcctcaaccacaagctcagaaggaaccgttagtagcaacatcagagcattagatcttgctggagatcctacaagccataagactttgcagaaatgtccttctacagaaccagaagaaaaaggaaatatcgtggaagaacagccccagaaaaataccacggagaaattgggtgtgtcagctcccaccatacccgttagaaggcggctggcttgggatacagagaacacaagtgaagacgtacagaaacagcccggggagaaagaggaggaggacgacaatgaagaggaaggggacaggaaaacgggcaagcaggcttttatgggagagcaagagaagttggatgtacatgagaaatctaaggcagataagatgaaagaagggtcagattcttctgtatcctcagaaaaaggaggccggcttcctactcccaagctgagagaacttggtggaatccagaggactcatcatgatctcactactccagctgttggtggtgctgttttagtgtctccatctaagatgaagcctccagccccagaacagaggaaaagaatgacctctcaggattgtttagaaacttcaaagaatgattttactaagaaagaaagtcgtgctgtatccctactgacttctccagctgctggtataaaaacagttgatcctctgcctttgcgggaagattctgaagacaatatccacaaatttgctgaggcaactcttccagtttcaaaaattccaaaatacccaacaaatccccctggacagttgccttctccaccacatgttccatcctactggcatccctctcgacgaattcagggctctcttagagatccagagtttcagcacaatgtgggaaaagcaaggatgaacaatttgcagttacctcaacatgaagcctttaatgatgaagatgaggacagattgtctgagatttctgctcgctctgcagcttctagtctccgggcttttcaaactctggcacgagctaagaaaaggaaggagaatttctggggtaaaacataaacctagctgagttgcctttatctaaggaaacattggcataatttttctttattgcttactgtgttaacccgacccgaagcttttcctacatttcgtactttgcatcctcttaccctccccatcgaacctctacttgccaatcgtaccctagcctcaccacattcactctgaagaaccttttacccttattccgcagaccaaacctagcatttttcaattctcccatgcactcccccccccgggccctcgcaccgtttccccctctcgcaagtcttcccaccactctcagcgtcttgaccttaaaccgcg

SEQ ID NO: 330065 - DNA, 815 bp, Homo sapiens
ctaggtggctaagcaggaataatctttttaccctaaatgagcctttaatataaaattgtcagattattaatttcagtctcttaagcttttgttttcggtcttccaaaatttctggggtaaaacataaacctagctgagttgcctttatctaaggaaacattggcataatttttctttattgcttactgtgttaaaattttttgagtgaagtttttcctaacattttctactttgaaatatttaatttccaatagaacagtttacttggaaattgttaacataggcttatacaaatttaacttttaaagaattctttttacatctatcccagagtacaaagacctagattattgaattcttcacatgtaactttcgtaataggtgtcatggatagattttcacctatccagagagtattctaaaaaaataaacaaagtgaagtaaaagttaagatcccagtgtgaagtatatattcccctaagatttgatatatgtatctttataattgatgatgttgtaaaatgaatttgttgttcctttaacctttgctgtagtgtttctttttattttagttccttctatacatgtttgcagtgttaagataattgtactttgaaaacaccagctgtatatatttttcttatttatgtaacaaagtttgctgaaagatatgtatatttttgatctttgagtgtattctatttgtgtaaggactttggcttacatttgaataatgtctagattttgaaaaattacctgtataatggagaattaaaactttgtagacattttgaaataaaaatggatcaagtgcg

SEQ ID NO: 330066 - DNA, 886 bp, Homo sapiens
agcgggggagacatgccggtgcgcttcaaggggctgagtgaataccagaggaacttcctgtggaaaaagtcttatttgtcagagtcttgtaattcctccgtggggcgaaagtacccatgggctggacttagatcagatcaattaggcatcacgaaagagccaagttttatttcaaaaagaagagtcccttaccatgacccacagatttcaaaatctctggagtggaatggagctatctcagagagcaatgtggttgcatcaccagaaccagaagccccggaaacaccaaaatcacaagaagcagaacaaaaggatgttattcaagaaagagttcactcactagaagcttccagggttcccaaaagaaccagatctcactctgcagactccagagctgaaggggcttcagatgtggaaaataatgagggtgtaacaaaccatacaccagttaatgaaaatgtggaactggaacattctaccaaggttctttcagaaaatgtagataatgggttggatagacttctgcgtaagaaagctggattgactgttgttccttcatataatgccttgagaaattctgaatatcaaaggcagtttgtttggaagacttctaaagaaactgctccagcttttgcagccaatcaggcttctgatgatcattgttgccagatgcagcacatatactaaatatgagacagggtaatgaaaacttggggaactggtaagtttttgcatgctacaagatttttttacttattaaaaaattattaaattgattttattctaaaatgttgtgttttgttgactaatatattgcgtgtttcctgtattctaagaaaggcgtaactgctttgaatatttaataaatacaaaatatgttgacagt

SEQ ID NO: 330067 - DNA, 894 bp, Homo sapiens
ctttctttccgtttagcaggtttaggactttttgttataattcattgagctagaaatcaagttgtatgttttgaaatgcaaatgtctgacaactttgaatccagtccttttttctttctaatggaagaatagtgtctataaataaccttataaaagatttgcttactcagaatgaggaatttcagtattaaggaagggtagcatattaaaatcaaaaattatttctacatttagtgagattattttagaaatgtgatgtaaatgccatgttaaggtatggcattttgtttttaaaaagtttagaaaagctttttgctcagaatagctgtgctttttaaagtaggataaaacagtattatgatgaattattttcaagtaatactgaaatcataggccgtgtgctctgttaatgacgggatttcaagaaggaaaaaaatttaacgataaatgttaagattaaaaggtttgatttctatatatgataaacctggaaaactactgtgaggtatcatgagagtgttagtatcttacatttcagtagattactttttttcctgactaacttgacattgataacacagtttgatgcttttaattttctgttatataaaacacaatgtttatttaatagatatttttggcaatgaatataatctcgggattttttcattgcagatgatgaggacagattgtctgagatttctgctcgctctgcagcttctagtctccgggcttttcaaactctggcacgagctaagaaaaggaaggagaatttctggggtaaaacataaacctagctgagttgcctttatctaaggaaacattggcataatttttctttattgcttactgtgttaaaattttttgagtgaagtttttcctaacattttctac

SEQ ID NO: 330068 - DNA, 2957 bp, Homo sapiens
cgccggcgcgtagtcggggacgccgggccgaggctttgctagggaacactgttatcgccccgccccctcggagctttttctccagttaactgtcggagtagcgggggctccggcgccgggcgacatgccggtgcgcttcaaggggctgagtgaataccagaggaacttcctgtggaaaaagtcttatttgtcagagtcttgtaattcctccgtggggcgaaagtacccatgggctggacttagatcagatcaattaggcatcacgaaagagccaagttttatttcaaaaagaagagtcccttaccatgacccacagatttcaaaatctctggagtggaatggagctatctcagagagcaatgtggttgcatcaccagaaccagaagccccggaaacaccaaaatcacaagaagcagaacaaaaggatgttattcaagaaagagttcactcactagaagcttccagggttcccaaaagaaccagatctcactctgcagactccagagctgaaggggcttcagatgtggaaaataatgagggtgtaacaaaccatacaccagttaatgaaaatgtggaactggaacattctaccaaggttctttcagaaaatgtagataatgggttggatagacttctgcgtaagaaagctggattgactgttgttccttcatataatgccttgagaaattctgaatatcaaaggcagtttgtttggaagacttctaaagaaactgctccagcttttgcagccaatcaggttttccacaataaaagccagtttgttccaccattcaaaggtaactcagtcatccatgaaactgaatacaaaagaaatttcaagggtttatctccagtgaaagaaccaaaattaagaaatgatttgagagaaaacagaaatcttgaaacagtgtctcctgaaaggaagagtaataaaatagacgatcgtttaaaattggaagcagagatggaattaaaagacttacaccagcctaaaaggaagcttactccttggaaacatcaaaggcttgggaaggtgaattccgaatatagagcaaaatttctgagcccagctcagtatttatataaagctggggcttggacacatgtaaagggaaacatgccaaatcaggttaaagaactccgagaaaaggctgagttttataggaagcgagttcaggggacgcatttttctcgggaccatctgaatcagattttatctgatagcaactgctgttgggatgtctcctcaaccacaagctcagaaggaaccgttagtagcaacatcagagcattagatcttgctggagatcctacaagccataagactttgcagaaatgtccttctacagaaccagaagaaaaaggaaatatcgtggaagaacagccccagaaaaataccacggagaaattgggtgtgtcagctcccaccatacccgttagaaggcggctggcttgggatacagagaacacaagtgaagacgtacagaaacagcccggggagaaagaggaggaggacgacaatgaagaggaaggggacaggaaaacgggcaagcaggcttttatgggagagcaagagaagttggatgtacatgagaaatctaaggcagataagatgaaagaagggtcagattcttctgtatcctcagaaaaaggaggccggcttcctactcccaagctgagagaacttggtggaatccagaggactcatcatgatctcactactccagctgttggtggtgctgttttagtgtctccatctaagatgaagcctccagccccagaacagaggaaaagaatgacctctcaggattgtttagaaacttcaaagaatgattttactaagaaagaaagtcgtgctgtatccctactgacttctccagctgctggtataaaaacagttgatcctctgcctttgcgggaagattctgaagacaatatccacaaatttgctgaggcaactcttccagtttcaaaaattccaaaatacccaacaaatccccctggacagttgccttctccaccacatgttccatcctactggcatccctctcgacgaattcagggctctcttagagatccagagtttcagcacaatgtgggaaaagcaaggatgaacaatttgcagttacctcaacatgaagcctttaatgatgaagatgaggacagattgtctgagatttctgctcgctctgcagcttctagtctccgggcttttcaaactctggcacgagctaagaaaaggaaggagaatttctggggtaaaacataaacctagctgagttgcctttatctaaggaaacattggcataatttttctttattgcttactgtgttaaaattttttgagtgaagtttttcctaacattttctactttgaaatatttaatttccaatagaacagtttacttggaaattgttaacataggcttatacaaatttaacttttaaagaattctttttacatctatcccagagtacaaagacctagattattgaattcttcacatgtaactttcgtaataggtgtcatggatagattttcacctatccagagagtattctaaaaaaataaacaaagtgaagtaaaagttaagatcccagtgtgaagtatatattcccctaagatttgatatatgtatctttataattgatgatgttgtaaaatgaatttgttgttcctttaacctttgctgtagtgtttctttttattttagttccttctatacatgtttgcagtgttaagataattgtactttgaaaacaccagctgtatatatttttcttatttatgtaacaaagtttgctgaaagatatgtatatttttgatctttgagtgtattctatttgtgtaaggactttggcttacatttgaataatgtctagattttgaaaaattacctgtataatggagaattaaaactttgtagacattttgaaataaaaatggatcaagtgcg

SEQ ID NO: 330069 - DNA, 3446 bp, Homo sapiens
cgccggcgcgtagtcggggacgccgggccgaggctttgctagggaacactgttatcgccccgccccctcggagctttttctccagttaactgtcggagtagcgggggctccggcgccgggcgacatgccggtgcgcttcaaggggctgagtgaataccagaggaacttcctgtggaaaaagtcttatttgtcagagtcttgtaattcctccgtggggcgaaagtacccatgggctggacttagatcagatcaattaggaaatcaaggcagatgtagaaccaagatccagcacagtgacatctcatcccttctcatcttggtctgctccacataagagaagctttgtgaaaagttccaaattttgacagtaccagggcccattgttctgttaagtagcacaggaaagtaattagaaacgaggcagcatgtactgcctggcctgccaggtctatcacgttgcaattctagtgacttttgttaggataactggaacattttgtgaccccctgatttttaattttttgttatggtcaaatttttaatgcttttaaaagcaaaattaaatattttatgttgaaaagctgtacttttaaaatcctataatctgaaggatattgtgtgtatatataggtacatatatctgaactaaatttaaaatttcatttctcctccacaagtgttcttaaaagttgtctttgtaactttttgctttagtagctactatttttgtataccgtgttttgtaggcatcacgaaagagccaagttttatttcaaaaagaagagtcccttaccatgacccacagatttcaaaatctctggagtggaatggagctatctcagagagcaatgtggttgcatcaccagaaccagaagccccggaaacaccaaaatcacaagaagcagaacaaaaggatgttattcaagaaagagttcactcactagaagcttccagggttcccaaaagaaccagatctcactctgcagactccagagctgaaggggcttcagatgtggaaaataatgagggtgtaacaaaccatacaccagttaatgaaaatgtggaactggaacattctaccaaggttctttcagaaaatgtagataatgggttggatagacttctgcgtaagaaagctggattgactgttgttccttcatataatgccttgagaaattctgaatatcaaaggcagtttgtttggaagacttctaaagaaactgctccagcttttgcagccaatcaggttttccacaataaaagccagtttgttccaccattcaaaggtaactcagtcatccatgaaactgaatacaaaagaaatttcaagggtttatctccagtgaaagaaccaaaattaagaaatgatttgagagaaaacagaaatcttgaaacagtgtctcctgaaaggaagagtaataaaatagacgatcgtttaaaattggaagcagagatggaattaaaagacttacaccagcctaaaaggaagcttactccttggaaacatcaaaggcttgggaaggtgaattccgaatatagagcaaaatttctgagcccagctcagtatttatataaagctggggcttggacacatgtaaagggaaacatgccaaatcaggttaaagaactccgagaaaaggctgagttttataggaagcgagttcaggggacgcatttttctcgggaccatctgaatcagattttatctgatagcaactgctgttgggatgtctcctcaaccacaagctcagaaggaaccgttagtagcaacatcagagcattagatcttgctggagatcctacaagccataagactttgcagaaatgtccttctacagaaccagaagaaaaaggaaatatcgtggaagaacagccccagaaaaataccacggagaaattgggtgtgtcagctcccaccatacccgttagaaggcggctggcttgggatacagagaacacaagtgaagacgtacagaaacagcccggggagaaagaggaggaggacgacaatgaagaggaaggggacaggaaaacgggcaagcaggcttttatgggagagcaagagaagttggatgtacatgagaaatctaaggcagataagatgaaagaagggtcagattcttctgtatcctcagaaaaaggaggccggcttcctactcccaagctgagagaacttggtggaatccagaggactcatcatgatctcactactccagctgttggtggtgctgttttagtgtctccatctaagatgaagcctccagccccagaacagaggaaaagaatgacctctcaggattgtttagaaacttcaaagaatgattttactaagaaagaaagtcgtgctgtatccctactgacttctccagctgctggtataaaaacagttgatcctctgcctttgcgggaagattctgaagacaatatccacaaatttgctgaggcaactcttccagtttcaaaaattccaaaatacccaacaaatccccctggacagttgccttctccaccacatgttccatcctactggcatccctctcgacgaattcagggctctcttagagatccagagtttcagcacaatgtgggaaaagcaaggatgaacaatttgcagttacctcaacatgaagcctttaatgatgaagatgaggacagattgtctgagatttctgctcgctctgcagcttctagtctccgggcttttcaaactctggcacgagctaagaaaaggaaggagaatttctggggtaaaacataaacctagctgagttgcctttatctaaggaaacattggcataatttttctttattgcttactgtgttaaaattttttgagtgaagtttttcctaacattttctactttgaaatatttaatttccaatagaacagtttacttggaaattgttaacataggcttatacaaatttaacttttaaagaattctttttacatctatcccagagtacaaagacctagattattgaattcttcacatgtaactttcgtaataggtgtcatggatagattttcacctatccagagagtattctaaaaaaataaacaaagtgaagtaaaagttaagatcccagtgtgaagtatatattcccctaagatttgatatatgtatctttataattgatgatgttgtaaaatgaatttgttgttcctttaacctttgctgtagtgtttctttttattttagttccttctatacatgtttgcagtgttaagataattgtactttgaaaacaccagctgtatatatttttcttatttatgtaacaaagtttgctgaaagatatgtatatttttgatctttgagtgtattctatttgtgtaaggactttggcttacatttgaataatgtctagattttgaaaaattacctgtataatggagaattaaaactttgtagacattttgaaataaaaatggatcaagtgcg

SEQ ID NO: 330070 - DNA, 1927 bp, Homo sapiens
tctgatgactgtatgtggctaattttgccttcctttgtctttggtccctggctgtatttgtgcaatgtctttgatatgctacttggtgctgtttgtaaagaagcatttacaatagtatatgatgtctgaactctcctgaataggttaaagaactccgagaaaaggctgagttttataggaagcgagttcaggggacgcatttttctcgggaccatctgaatcagattttatctgatagcaactgctgttgggatgtctcctcaaccacaagctcagaaggaaccgttagtagcaacatcagagcattagatcttgctggaaccagaagaaaaaggaaatatcgtggaagaacagccccagaaaaataccacggagaaattgggtgtgtcagctcccaccatacccgttagaaggcggctggcttgggatacagagaacacaagtgaagacgtacagaaacagcccggggagaaagaggaggaggacgacaatgaagaggaaggggacaggaaaacgggcaagcaggcttttatgggagagcaagagaagttggatgtacatgagaaatctaaggcagataagatgaaagaagggtcagattcttctgtatcctcagaaaaaggaggccggcttcctactcccaagctgagagaacttggtggaatccagaggactcatcatgatctcactactccagctgttggtggtgctgttttagtgtctccatctaagatgaagcctccagccccagaacagaggaaaagaatgacctctcaggattgtttagaaacttcaaagaatgattttactaagaaagaaagtcgtgctgtatccctactgacttctccagctgctggtataaaaacagttgatcctctgcctttgcgggaagattctgaagacaatatccacaaatttgctgaggcaactcttccagtttcaaaaattccaaaatacccaacaaatccccctggacagttgccttctccaccacatgttccatcctactggcatccctctcgacgaattcagggctctcttagagatccagagtttcagcacaatgtgggaaaagcaaggatgaacaatttgcagttacctcaacatgaagcctttaatgatgaagatgaggacagattgtctgagatttctgctcgctctgcagcttctagtctccgggcttttcaaactctggcacgagctaagaaaaggaaggagaatttctggggtaaaacataaacctagctgagttgcctttatctaaggaaacattggcataatttttctttattgcttactgtgttaaaattttttgagtgaagtttttcctaacattttctactttgaaatatttaatttccaatagaacagtttacttggaaattgttaacataggcttatacaaatttaacttttaaagaattctttttacatctatcccagagtacaaagacctagattattgaattcttcacatgtaactttcgtaataggtgtcatggatagattttcacctatccagagagtattctaaaaaaataaacaaagtgaagtaaaagttaagatcccagtgtgaagtatatattcccctaagatttgatatatgtatctttataattgatgatgttgtaaaatgaatttgttgttcctttaacctttgctgtagtgtttctttttattttagttccttctatacatgtttgcagtgttaagataattgtactttgaaaacaccagctgtatatatttttcttatttatgtaacaaagtttgctgaaagatatgtatatttttgatctttgagtgtattctatttgtgtaaggactttggcttacatttgaataatgtctagattttgaaaaattacctgtataatggagaattaaaactttgtagacattttgaaataaaaatggatcaagtgcg

SEQ ID NO: 330071 - DNA, 2272 bp, Homo sapiens
  misc_feature (1609)..(1609): n is a, c, g, or t
cgccggcgcgtagtcggggacgccgggccgaggctttgctagggaacactgttatcgccccgccccctcggagctttttctccagttaactgtcggagtagcgggggctccggcgccgggcgacatgccggtgcgcttcaaggggctgagtgaataccagaggaacttcctgtggaaaaagtcttatttgtcagagtcttgtaattcctccgtggggcgaaagtacccatgggctggacttagatcagatcaattaggcatcacgaaagagccaagttttatttcaaaaagaagagtcccttaccatgacccacagatttcaaaatctctggagtggaatggagctatctcagagagcaatgtggttgcatcaccagaaccagaagccccggaaacaccaaaatcacaagaagcagaacaaaaggatgttattcaagaaagagttcactcactagaagcttccagggttcccaaaagaaccagatctcactctgcagactccagagctgaaggggcttcagatgtggaaaataatgagggtgtaacaaaccatacaccagttaatgaaaatgtggaactggaacattctaccaaggttctttcagaaaatgtagataatggggtaggcatattcactgcatttcttttcaaaagcatagaattcttcattggtttcattgtcatttctgtaatattacattttgtgtttcagaattttccattgttgttttcttgtctaatgtctataagaatagttgataacaggctgttgactttagttattgtgaattagttctattctgactactcgctattttgtagtagttgtactatgataatctgtttattggatggacctcctgcgtctggattttattcatcatatattagcacctgagtcctaagggagagatcaagttgagacagagaagggaagtaggcccttacttctggcagggtgctgagctgacttctacctagccccttttcagtttcttatcgtgtacaagaagacaaacagaaattcaattgatgaaatgcaaaaggaaggagagctctggctgtctctcagagatcttgcatttctgctctcttatgtcacagctggcctgcagcaggtccctgtgagcacataagcagaggctgcaggaacttgtgtggggatctcaatgctttccacatttctttctccattctgttccactgctcttctctggttcatgtccaccactgactgggaccctgaagaggcatttcagagtgttggagaagaatctgtagcttgttgaaaaagctgggggtgaaagggaacaaggaaggtgatgtgtgagtctggcaggcaggagaaggggtgttcatagaagcagtgtgcaggtgaggcaaagtgctgggactttttggtaatagatttaattatgaatgattagtaggaaaggactgagagtattatatttttcctgggatgcctaatagtcctttgatagaaaggaattttaaatagtttgacacttgaaaaaagatactatttataagttgaagaaagtttgctgtaccacaatgcgcatgtagttaacaattttgcactgtagatttaacattttgttaagangatagatttcatgttatgcattttttaccacaatttttaaaaagtttgaatagaaatttttaatgtctttgagtggattttgttttttgaacagttggatagacttctgcgtaagaaagctggattgactgttgttccttcatataatgccttgagaaattctgaatatcaaaggcagtttgtttggaagacttctaaagaaactgctccagcttttgcagccaatcaggtagcttaatggatgtaatacatttctgagtaccattatcttatctagtaatgtagatttacatagaattaagagttgaaagaaattaagtacttaagtagcctggaggtaggttctagaaaaccaaaatgagagttttgctaaaatcatcctattacttatgatttatggtagtaatattatactgtcctaggcttctgatgatcattgttgccagatgcagcacatatactaaatatgagacagggtaatgaaaacttggggaactggtaagtttttgcatgctacaagatttttttacttattaaaaaattattaaattgattttattctaaaatgttgtgttttgttgactaatatattgcgtgtttcctgtattctaagaaaggcgtaactgctttgaatatttaataaatacaaaatatgttgacagt

SEQ ID NO: 330072 - DNA, 2656 bp, Homo sapiens
cgccggcgcgtagtcggggacgccgggccgaggctttgctagggaacactgttatcgccccgccccctcggagctttttctccagttaactgtcggagtagcgggggctccggcgccgggcgacatgccggtgcgcttcaaggggctgagtgaataccagaggaacttcctgtggaaaaagtcttatttgtcagagtcttgtaattcctccgtggggcgaaagtacccatgggctggacttagatcagatcaattaggcatcacgaaagagccaagttttatttcaaaaagaagagtcccttaccatgacccacagatttcaaaatctctggagtggaatggagctatctcagagagcaatgtggttgcatcaccagaaccagaagccccggaaacaccaaaatcacaagaagcagaacaaaaggatgttattcaagaaagagttcactcactagaagcttccagggttcccaaaagaaccagatctcactctgcagactccagagctgaaggggcttcagatgtggaaaataatgagggtgtaacaaaccatacaccagttaatgaaaatgtggaactggaacattctaccaaggttctttcagaaaatgtagataatgggttggatagacttctgcgtaagaaagctggattgactgttgttccttcatataatgccttgagaaattctgaatatcaaaggcagtttgtttggaagacttctaaagaaactgctccagcttttgcagccaatcaggttttccacaataaaagccagtttgttccaccattcaaaggtaactcagtcatccatgaaactgaatacaaaagaaatttcaagggtttatctccagtgaaagaaccaaaattaagaaatgatttgagagaaaacagaaatcttgaaacagtgtctcctgaaaggaagagtaataaaatagacgatcgtttaaaattggaagcagagatggaattaaaagacttacaccagcctaaaaggaagcttactccttggaaacatcaaaggcttgggaaggtgaattccgaatatagagcaaaatttctgagcccagctcagtatttatataaagctggggcttggacacatgtaaagggaaacatgccaaatcaggttaaagaactccgagaaaaggctgagttttataggaagcgagttcaggggacgcatttttctcgggaccatctgaatcagattttatctgatagcaactgctgttgggatgtctcctcaaccacaagctcagaaggaaccgttagtagcaacatcagagcattagatcttgctggagatcctacaagccataagactttgcagaaatgtccttctacagaaccagaagaaaaaggaaatatcgtggaagaacagccccagaaaaataccacggagaaattgggtgtgtcagctcccaccatacccgttagaaggcggctggcttgggatacagagaacacaagtgaagacgtacagaaacagcccggggagaaagaggaggaggacgacaatgaagaggaaggggacaggaaaacgggcaagcaggcttttatgggagagcaagagaagttggatgtacatgagaaatctaaggcagataagatgaaagaagggtcagattcttctgtatcctcagaaaaaggaggccggcttcctactcccaagctgagagaacttggtggaatccagaggactcatcatgatctcactactccagctgttggtggtgctgttttagtgtctccatctaagatgaagcctccagccccagaacagaggaaaagaatgacctctcaggattgtttagaaacttcaaagaatgattttactaagaaagaaagtcgtgctgtatccctactgacttctccagctgctggtataaaaacagttgatcctctgcctttgcgggaagattctgaagacaatatccacaaatttgctgaggcaactcttccagtttcaaaaattccaaaatacccaacaaatccccctggacagttgccttctccaccacatgttccatcctactggcatccctctcgacgaattcagggctctcttagagatccagagtttcagcacaatgtgggaaaagcaaggatgaacaatttgcagttacctcaacatgaagcctttaatgatgaagatgaggacagattgtctgagatttctgctcgctctgcagcttctagtctccgggcttttcaaactctggcacgagctaagaaaaggaaggagaatttctggggtaaaacataaacctagctgagttgcctttatctaaggaaacattggcataatttttctttattgcttactgtgttaaaattttttgagtgaagtttttcctaacattttctactttgaaatatttaatttccaatagaacagtttacttggaaattgttaacataggcttatacaaatttaacttttaaagaattctttttacatctatcccagagtacaaagacctagattattgaattcttcacatgtaactttcgtaataggtgtcatggatagattttcacctatccagagagtattctaaaaaaataaacaaagtgaagtaaaagttaagatcccagcggcgagcatctaattcatcctaagatcggaatccggctctttaaaatgaggaag

SEQ ID NO: 330073 - DNA, 2652 bp, Homo sapiens
cgccggcgcgtagtcggggacgccgggccgaggctttgctagggaacactgttatcgccccgccccctcggagctttttctccagttaactgtcggagtagcgggggctccggcgccgggcgacatgccggtgcgcttcaaggggctgagtgaataccagaggaacttcctgtggaaaaagtcttatttgtcagagtcttgtaattcctccgtggggcgaaagtacccatgggctggacttagatcagatcaattaggcatcacgaaagagccaagttttatttcaaaaagaagagtcccttaccatgacccacagatttcaaaatctctggagtggaatggagctatctcagagagcaatgtggttgcatcaccagaaccagaagccccggaaacaccaaaatcacaagaagcagaacaaaaggatgttattcaagaaagagttcactcactagaagcttccagggttcccaaaagaaccagatctcactctgcagactccagagctgaaggggcttcagatgtggaaaataatgagggtgtaacaaaccatacaccagttaatgaaaatgtggaactggaacattctaccaaggttctttcagaaaatgtagataatgggttggatagacttctgcgtaagaaagctggattgactgttgttccttcatataatgccttgagaaattctgaatatcaaaggcagtttgtttggaagacttctaaagaaactgctccagcttttgcagccaatcaggttttccacaataaaagccagtttgttccaccattcaaaggtaactcagtcatccatgaaactgaatacaaaagaaatttcaagggtttatctccagtgaaagaaccaaaattaagaaatgatttgagagaaaacagaaatcttgaaacagtgtctcctgaaaggaagagtaataaaatagacgatcgtttaaaattggaagcagagatggaattaaaagacttacaccagcctaaaaggaagcttactccttggaaacatcaaaggcttgggaaggtgaattccgaatatagagcaaaatttctgagcccagctcagtatttatataaagctggggcttggacacatgtaaagggaaacatgccaaatcaggttaaagaactccgagaaaaggctgagttttataggaagcgagttcaggggacgcatttttctcgggaccatctgaatcagattttatctgatagcaactgctgttgggatgtctcctcaaccacaagctcagaaggaaccgttagtagcaacatcagagcattagatcttgctggagatcctacaagccataagactttgcagaaatgtccttctacagaaccagaagaaaaaggaaatatcgtggaagaacagccccagaaaaataccacggagaaattgggtgtgtcagctcccaccatacccgttagaaggcggctggcttgggatacagagaacacaagtgaagacgtacagaaacagcccggggagaaagaggaggaggacgacaatgaagaggaaggggacaggaaaacgggcaagcaggcttttatgggagagcaagagaagttggatgtacatgagaaatctaaggcagataagatgaaagaagggtcagattcttctgtatcctcagaaaaaggaggccggcttcctactcccaagctgagagaacttggtggaatccagaggactcatcatgatctcactactccagctgttggtggtgctgttttagtgtctccatctaagatgaagcctccagccccagaacagaggaaaagaatgacctctcaggattgtttagaaacttcaaagaatgattttactaagaaagaaagtcgtgctgtatccctactgacttctccagctgctggtataaaaacagttgatcctctgcctttgcgggaagattctgaagacaatatccacaaatttgctgaggcaactcttccagtttcaaaaattccaaaatacccaacaaatccccctggacagttgccttctccaccacatgttccatcctactggcatccctctcgacgaattcagggctctcttagagatccagagtttcagcacaatgtgggaaaagcaaggatgaacaatttgcagttacctcaacatgaagcctttaatgatgaagatgaggacagattgtctgagatttctgctcgctctgcagcttctagtctccgggcttttcaaactctggcacgagctaagaaaaggaaggagaatttctggggtaaaacataaacctagctgagttgcctttatctaaggaaacattggcataatttttctttattgcttactgtgttaaaattttttgagtgaagtttttcctaacattttctactttgaaatatttaatttccaatagaacagtttacttggaaattgttaacataggcttatacaaatttaacttttaaagaattctttttacatctatcccagagtacaaagacctagattattgaattcttcacatgtaactttcggaaaggggtggacgatgaattcaccccccccagagggtttaaaaaaaaacaaagggaaagaagtgaaacccggggagaagattaccccaaattgaaattgactttaagggggaggggaaaagaatgtggtccttg

SEQ ID NO: 330074 - DNA, 2618 bp, Homo sapiens
cgccggcgcgtagtcggggacgccgggccgaggctttgctagggaacactgttatcgccccgccccctcggagctttttctccagttaactgtcggagtagcgggggctccggcgccgggcgacatgccggtgcgcttcaaggggctgagtgaataccagaggaacttcctgtggaaaaagtcttatttgtcagagtcttgtaattcctccgtggggcgaaagtacccatgggctggacttagatcagatcaattaggcatcacgaaagagccaagttttatttcaaaaagaagagtcccttaccatgacccacagatttcaaaatctctggagtggaatggagctatctcagagagcaatgtggttgcatcaccagaaccagaagccccggaaacaccaaaatcacaagaagcagaacaaaaggatgttattcaagaaagagttcactcactagaagcttccagggttcccaaaagaaccagatctcactctgcagactccagagctgaaggggcttcagatgtggaaaataatgagggtgtaacaaaccatacaccagttaatgaaaatgtggaactggaacattctaccaaggttctttcagaaaatgtagataatgggttggatagacttctgcgtaagaaagctggattgactgttgttccttcatataatgccttgagaaattctgaatatcaaaggcagtttgtttggaagacttctaaagaaactgctccagcttttgcagccaatcaggttttccacaataaaagccagtttgttccaccattcaaaggtaactcagtcatccatgaaactgaatacaaaagaaatttcaagggtttatctccagtgaaagaaccaaaattaagaaatgatttgagagaaaacagaaatcttgaaacagtgtctcctgaaaggaagagtaataaaatagacgatcgtttaaaattggaagcagagatggaattaaaagacttacaccagcctaaaaggaagcttactccttggaaacatcaaaggcttgggaaggtgaattccgaatatagagcaaaatttctgagcccagctcagtatttatataaagctggggcttggacacatgtaaagggaaacatgccaaatcaggttaaagaactccgagaaaaggctgagttttataggaagcgagttcaggggacgcatttttctcgggaccatctgaatcagattttatctgatagcaactgctgttgggatgtctcctcaaccacaagctcagaaggaaccgttagtagcaacatcagagcattagatcttgctggagatcctacaagccataagactttgcagaaatgtccttctacagaaccagaagaaaaaggaaatatcgtggaagaacagccccagaaaaataccacggagaaattgggtgtgtcagctcccaccatacccgttagaaggcggctggcttgggatacagagaacacaagtgaagacgtacagaaacagcccggggagaaagaggaggaggacgacaatgaagaggaaggggacaggaaaacgggcaagcaggcttttatgggagagcaagagaagttggatgtacatgagaaatctaaggcagataagatgaaagaagggtcagattcttctgtatcctcagaaaaaggaggccggcttcctactcccaagctgagagaacttggtggaatccagaggactcatcatgatctcactactccagctgttggtggtgctgttttagtgtctccatctaagatgaagcctccagccccagaacagaggaaaagaatgacctctcaggattgtttagaaacttcaaagaatgattttactaagaaagaaagtcgtgctgtatccctactgacttctccagctgctggtataaaaacagttgatcctctgcctttgcgggaagattctgaagacaatatccacaaatttgctgaggcaactcttccagtttcaaaaattccaaaatacccaacaaatccccctggacagttgccttctccaccacatgttccatcctactggcatccctctcgacgaattcagggctctcttagagatccagagtttcagcacaatgtgggaaaagcaaggatgaacaatttgcagttacctcaacatgaagcctttaatgatgaagatgaggacagattgtctgagatttctgctcgctctgcagcttctagtctccgggcttttcaaactctggcacgagctaagaaaaggaaggagaatttctggggtaaaacataaacctagctgagttgcctttatctaaggaaacattggcataatttttctttattgcttactgtgttaaaattttttgagtgaagtttttcctaacattttctactttgaaatatttaatttccaatagaacagtttacttggaaattgttaacataggcttatacaaatttaacttttaaagaattcttctccatctttgcaaagtccaagacctacctcttggagtgctgaaatgtaacttgcgaatacgcgggaggatagattctcactacccgaagaggttcgtaaaaatgaacaagtggatgaacgctacgatccatgtgggagcctatcccctaaacttgaaatg

SEQ ID NO: 330075 - DNA, 2579 bp, Homo sapiens
  misc_feature (2375)..(2375): n is a, c, g, or t
  misc_feature (2488)..(2488): n is a, c, g, or t
  misc_feature (2497)..(2497): n is a, c, g, or t
cgccggcgcgtagtcggggacgccgggccgaggctttgctagggaacactgttatcgccccgccccctcggagctttttctccagttaactgtcggagtagcgggggctccggcgccgggcgacatgccggtgcgcttcaaggggctgagtgaataccagaggaacttcctgtggaaaaagtcttatttgtcagagtcttgtaattcctccgtggggcgaaagtacccatgggctggacttagatcagatcaattaggcatcacgaaagagccaagttttatttcaaaaagaagagtcccttaccatgacccacagatttcaaaatctctggagtggaatggagctatctcagagagcaatgtggttgcatcaccagaaccagaagccccggaaacaccaaaatcacaagaagcagaacaaaaggatgttattcaagaaagagttcactcactagaagcttccagggttcccaaaagaaccagatctcactctgcagactccagagctgaaggggcttcagatgtggaaaataatgagggtgtaacaaaccatacaccagttaatgaaaatgtggaactggaacattctaccaaggttctttcagaaaatgtagataatgggttggatagacttctgcgtaagaaagctggattgactgttgttccttcatataatgccttgagaaattctgaatatcaaaggcagtttgtttggaagacttctaaagaaactgctccagcttttgcagccaatcaggttttccacaataaaagccagtttgttccaccattcaaaggtaactcagtcatccatgaaactgaatacaaaagaaatttcaagggtttatctccagtgaaagaaccaaaattaagaaatgatttgagagaaaacagaaatcttgaaacagtgtctcctgaaaggaagagtaataaaatagacgatcgtttaaaattggaagcagagatggaattaaaagacttacaccagcctaaaaggaagcttactccttggaaacatcaaaggcttgggaaggtgaattccgaatatagagcaaaatttctgagcccagctcagtatttatataaagctggggcttggacacatgtaaagggaaacatgccaaatcaggttaaagaactccgagaaaaggctgagttttataggaagcgagttcaggggacgcatttttctcgggaccatctgaatcagattttatctgatagcaactgctgttgggatgtctcctcaaccacaagctcagaaggaaccgttagtagcaacatcagagcattagatcttgctggagatcctacaagccataagactttgcagaaatgtccttctacagaaccagaagaaaaaggaaatatcgtggaagaacagccccagaaaaataccacggagaaattgggtgtgtcagctcccaccatacccgttagaaggcggctggcttgggatacagagaacacaagtgaagacgtacagaaacagcccggggagaaagaggaggaggacgacaatgaagaggaaggggacaggaaaacgggcaagcaggcttttatgggagagcaagagaagttggatgtacatgagaaatctaaggcagataagatgaaagaagggtcagattcttctgtatcctcagaaaaaggaggccggcttcctactcccaagctgagagaacttggtggaatccagaggactcatcatgatctcactactccagctgttggtggtgctgttttagtgtctccatctaagatgaagcctccagccccagaacagaggaaaagaatgacctctcaggattgtttagaaacttcaaagaatgattttactaagaaagaaagtcgtgctgtatccctactgacttctccagctgctggtataaaaacagttgatcctctgcctttgcgggaagattctgaagacaatatccacaaatttgctgaggcaactcttccagtttcaaaaattccaaaatacccaacaaatccccctggacagttgccttctccaccacatgttccatcctactggcatccctctcgacgaattcagggctctcttagagatccagagtttcagcacaatgtgggaaaagcaaggatgaacaatttgcagttacctcaacatgaagcctttaatgatgaagatgaggacagattgtctgagatttctgctcgctctgcagcttctagtctccgggcttttcaaactctggcacgagctaagaaaaggaaggagaatttctggggtaaaacataaacctagctgagttgcctttatctaaggaaacattggcataatttttctttattgcttactgtgttacagaacattatgctctccctttatacctttacatctagcncttcaatactaccccttctcttcaaaatgcgtaccacatcccctacaaccctcacctcttcaatagcctattttgcatctatcccagaggccgaaatcctagccccccaaatnacccacagntcccattgtccacgctgcccggcctctcccgatctattccaacatgtttataccactaacctccccatatcaacctcactca

SEQ ID NO: 330076 - DNA, 2523 bp, Homo sapiens
cgccggcgcgtagtcggggacgccgggccgaggctttgctagggaacactgttatcgccccgccccctcggagctttttctccagttaactgtcggagtagcgggggctccggcgccgggcgacatgccggtgcgcttcaaggggctgagtgaataccagaggaacttcctgtggaaaaagtcttatttgtcagagtcttgtaattcctccgtggggcgaaagtacccatgggctggacttagatcagatcaattaggcatcacgaaagagccaagttttatttcaaaaagaagagtcccttaccatgacccacagatttcaaaatctctggagtggaatggagctatctcagagagcaatgtggttgcatcaccagaaccagaagccccggaaacaccaaaatcacaagaagcagaacaaaaggatgttattcaagaaagagttcactcactagaagcttccagggttcccaaaagaaccagatctcactctgcagactccagagctgaaggggcttcagatgtggaaaataatgagggtgtaacaaaccatacaccagttaatgaaaatgtggaactggaacattctaccaaggttctttcagaaaatgtagataatgggttggatagacttctgcgtaagaaagctggattgactgttgttccttcatataatgccttgagaaattctgaatatcaaaggcagtttgtttggaagacttctaaagaaactgctccagcttttgcagccaatcaggttttccacaataaaagccagtttgttccaccattcaaaggtaactcagtcatccatgaaactgaatacaaaagaaatttcaagggtttatctccagtgaaagaaccaaaattaagaaatgatttgagagaaaacagaaatcttgaaacagtgtctcctgaaaggaagagtaataaaatagacgatcgtttaaaattggaagcagagatggaattaaaagacttacaccagcctaaaaggaagcttactccttggaaacatcaaaggcttgggaaggtgaattccgaatatagagcaaaatttctgagcccagctcagtatttatataaagctggggcttggacacatgtaaagggaaacatgccaaatcaggttaaagaactccgagaaaaggctgagttttataggaagcgagttcaggggacgcatttttctcgggaccatctgaatcagattttatctgatagcaactgctgttgggatgtctcctcaaccacaagctcagaaggaaccgttagtagcaacatcagagcattagatcttgctggagatcctacaagccataagactttgcagaaatgtccttctacagaaccagaagaaaaaggaaatatcgtggaagaacagccccagaaaaataccacggagaaattgggtgtgtcagctcccaccatacccgttagaaggcggctggcttgggatacagagaacacaagtgaagacgtacagaaacagcccggggagaaagaggaggaggacgacaatgaagaggaaggggacaggaaaacgggcaagcaggcttttatgggagagcaagagaagttggatgtacatgagaaatctaaggcagataagatgaaagaagggtcagattcttctgtatcctcagaaaaaggaggccggcttcctactcccaagctgagagaacttggtggaatccagaggactcatcatgatctcactactccagctgttggtggtgctgttttagtgtctccatctaagatgaagcctccagccccagaacagaggaaaagaatgacctctcaggattgtttagaaacttcaaagaatgattttactaagaaagaaagtcgtgctgtatccctactgacttctccagctgctggtataaaaacagttgatcctctgcctttgcgggaagattctgaagacaatatccacaaatttgctgaggcaactcttccagtttcaaaaattccaaaatacccaacaaatccccctggacagttgccttctccaccacatgttccatcctactggcatccctctcgacgaattcagggctctcttagagatccagagtttcagcacaatgtgggaaaagcaaggatgaacaatttgcagttacctcaacatgaagcctttaatgatgaagatgaggacagattgtctgagatttctgctcgctctgcagcttctagtctccgggcttttcaaactctggcacgagctaagaaaaggaaggagatgaggaaactgaggtttacagaaactgagtaacttcgccaagtccatatccttcataaatggtgtagttggggctgcaagccatgcctaactggccttggagaccagattgctctgatgtttgaaggaagcttccatggctgttccggggtgtggcaggcgacctcacaaaacttgttctacatgttggccaaagatctgctaatttcctacttaggcaacattgtacaatccagttctaacagtaatagaattttctctataaactcttaaag

SEQ ID NO: 330077 - DNA, 373 bp, Homo sapiens
tgactcgttatgcaactttcggcaagtttccttacatcgccacgccccagtgctcttaactgtcagatgaaaatgagagaatgtgtttccggaggctgtttgagaattaaatgaggaggtatataaatatactcccccttggacagtgtcaggtctatgaagctcccagcacagcagctgcttcctcttttctttattctaagttgctgtaaacccatgtatctatggtgcaacgcaatgactcaatccttgcttatttaatgtggctatcctgcccaacctaagtcctgactatcaaggtactgaggtgctgtatgctgaagcagcaaataaacaattcacattggacaagaagatggaaacaagtgtgagg

SEQ ID NO: 330078 - DNA, 2069 bp, Homo sapiens
ggggggacgcgagcgggatccaaacttccggtgcctgcagagctcggagcggcggaggcagagaccgaggctgcaccggcagaggctgcggggcggacgcgcgggccggcgcagccatggtgaagattagcttccagcccgccgtggctggcatcaagggcgacaaggctgacaaggcgtcggcgtcggcccctgcgccggcctcggccaccgagatcctgctgacgccggctagggaggagcagcccccacaacatcgatccaagagggggagctcagtgggcggcgtgtgctacctgtcgatgggcatggtcgtgctgctcatgggcctcgtgttcgcctctgtctacatctacagatacttctttcttgcacagctggcccgagataacttcttccgctgtggtgtgctgtatgaggactccctgtcctcccaggtccggactcagatggagctggaagaggatgtgaaaatctacctcgacgagaactacgagcgcatcaacgtgcctgtgccccagtttggcggcggtgaccctgcagacatcatccatgacttccagcggggtctgactgcgtaccatgatatctccctggacaagtgctatgtcatcgaactcaacaccaccattgtgctgccccctcgcaacttctgggagctcctcatgaacgtgaagagggggacctacctgccgcagacgtacatcatccaggaggagatggtggtcacggagcatgtcagtgacaaggaggccctggggtccttcatctaccacctgtgcaacgggaaagacacctaccggctccggcgccgggcaacgcggaggcggatcaacaagcgtggggccaagaactgcaatgccatccgccacttcgagaacaccttcgtggtggagacgctcatctgcggggtggtgtgaggccctcctcccccagaaccccctgccgtgttcctcttttcttctttccggctgctctctggccctcctccttccccctgcttagcttgtactttggacgcgtttctatagaggtgacatgtctctccattcctctccaaccctgcccacctccctgtaccagagctgtgatctctcggtggggggcccatctctgctgacctgggtgtggcggagggagaggcgatgctgcaaagtgttttctgtgtcccactgtcttgaagctgggcctgccaaagcctgggcccacagctgcaccggcagcccaaggggaaggaccggttgggggagccgggcatgtgaggccctgggcaaggggatggggctgtgggggcggggcggcatgggcttcagaagtatctgcacaattagaaaagtcctcagaagctttttcttggagggtacactttcttcactgtccctattcctagacctggggcttgagctgaggatgggacgatgtgcccagggagggacccaccagagcacaagagaaggtggctacctgggggtgtcccagggactctgtcagtgccttcagcccaccagcaggagcttggagtttggggagtggggatgagtccgtcaagcacaactgttctctgagtggaaccaaagaagcaaggagctaggacccccagtcctgccccccaggagcacaagcagggtcccctcagtcaaggcagtgggatgggcggctgaggaacggggcaggcaaggtcactgctcagtcacgtccacgggggacgagccgtgggttctgctgagtaggtggagctcattgctttctccaagcttggaactgttttgaaagataacacagagggaaagggagagccacctggtacttgtccaccctgcctcctctgttctgaaattccatccccctcagcttaggggaatgcacctttttccctttccttctcacttttgcatgtttttactgatcattcgatatgctaaccgttctcagccctgagccttggagaggagggctgtaacgccttcagtcagtctctggggatgaaactcttaaatgctttgtatattttctcaattagatctcttttcagaagtgtctatagaacaataaaaatcttttacttctga

SEQ ID NO: 330079 - DNA, 242 bp, Homo sapiens
gcggccgcctactactactactactactgctcgaattcaagcttctaacgatgtacggggacttgcatgtttttactgatcattcgatatgctaaccgttctcagccctgagccttggagaggagggctgtaacgccttcagtcagtctctggggatgaaactcttaaatgctttgtatattttctcaattagatctcttttcagaagtgtctatagaacaataaaaatcttttacttctga

SEQ ID NO: 330080 - DNA, 2437 bp, Homo sapiens
ggggggacgcgagcgggatccaaacttccggtgcctgcagagctcggagcggcggaggcagagaccgaggctgcaccggcagaggctgcggggcggacgcgcgggccggcgcagccatggtgaagattagcttccagcccgccgtggctggcatcaagggcgacaaggctgacaaggcgtcggcgtcggcccctgcgccggcctcggccaccgagatcctgctgacgccggctagggaggagcagcccccacaacatcgatccaagagggggagctcagtgggcggcgtgtgctacctgtcgatgggcatggtcgtgctgctcatgggcctcgtgttcgcctctgtctacatctacagatacttctttcttgcacagctggcccgagataacttcttccgctgtggtgtgctgtatgaggactccctgtcctcccaggtccggactcagatggagctggaagaggatgtgaaaatctacctcgacgagaactacgagcgcatcaacgtgcctgtgccccagtttggcggcggtgaccctgcagacatcatccatgacttccagcggggtctgactgcgtaccatgatatctccctggacaagtgctatgtcatcgaactcaacaccaccattgtgctgccccctcgcaacttctgggagctcctcatgaacgtgaagagggggacctacctgccgcagacgtacatcatccaggaggagatggtggtcacggagcatgtcagtgacaaggaggccctggggtccttcatctaccacctgtgcaacgggaaagacacctaccggctccggcgccgggcaacgcggaggcggatcaacaagcgtggggccaagaactgcaatgccatccgccacttcgagaacaccttcgtggtggagacgctcatctgcggggtggtgtgaggccctcctcccccagaaccccctgccgtgttcctcttttcttctttccggctgctctctggccctcctccttccccctgcttagcttgtactttggacgcgtttctatagaggtgacatgtctctccattcctctccaaccctgcccacctccctgtaccagagctgtgatctctcggtggggggcccatctctgctgacctgggtgtggcggagggagaggcgatgctgcaaagtgttttctgtgtcccactgtcttgaagctgggcctgccaaagcctgggcccacagctgcaccggcagcccaaggggaaggaccggttgggggagccgggcatgtgaggccctgggcaaggggatggggctgtgggggcggggcggcatgggcttcagaagtatctgcacaattagaaaagtcctcagaagctttttcttggagggtacactttcttcactgtccctattcctagacctggggcttgagctgaggatgggacgatgtgcccagggagggacccaccagagcacaagagaaggtggctacctgggggtgtcccagggactctgtcagtgccttcagcccaccagcaggagcttggagtttggggagtggggatgagtccgtcaagcacaactgttctctgagtggaaccaaagaagcaaggagctaggacccccagtcctgccccccaggagcacaagcagggtcccctcagtcaaggcagtgggatgggcggctgaggaacggggcaggcaaggtcactgctcagtcacgtccacgggggacgagccgtgggttctgctgagtaggtggagctcattgctttctccaagcttggaactgttttgaaagataacacagagggaaagggagagccacctggtacttgtccaccctgcctcctctgttctgaaattccatccccctcagcttaggggaatgcacctttttccctttccttctcacttttgcatgtttttactgatcattcgatatgctaaccgttctcagccctgagccttggagaggagggctgtaacgccttcagtcagtctctggggatgaaactcttaaatgctttgtatattttctcaattagatctcttttcagaagtgtctatagaacaataaaaatcttttacttctgaaaaaaaagaaaaaccacccacaccaacacacacagaaaaaaccgcgggcggcacacaaaccggggcggcgaaaacgcgggacgaacaggggcacaggccacacacgggtatcgcgacacccacacttctgcacaccagggacaacacacgcggggacaccaataggacgcggcagcaataaaacgcacagaaaaaccggggagtacccccggcatcagagaggccggccacaacagaccacgacacgacgcgcaccgggaggcgagaccaccacaccaccacccagcccgcaggcgacacaaccacccaacccgcacaacaagccggcacgacagccacacgacaacaccagcgcaccaccacaagaa

SEQ ID NO: 330081 - DNA, 1969 bp, Homo sapiens
ggggggacgcgagcgggatccaaacttccggtgcctgcagagctcggagcggcggaggcagagaccgaggctgcaccggcagaggctgcggggcggacgcgcgggccggcgcagccatggtgaagattagcttccagcccgccgtggctggcatcaagggcgacaaggctgacaaggcgtcggcgtcggcccctgcgccggcctcggccaccgagatcctgctgacgccggctagggaggagcagcccccacaacatcgatccaagagggggagctcagtgggcggcgtgtgctacctgtcgatgggcatggtcgtgctgctcatgggcctcgtgttcgcctctgtctacatctacagatacttctttcttgcacagctggcccgagataacttcttccgctgtggtgtgctgtatgaggactccctgtcctcccaggtccggactcagatggagctggaagaggatgtgaaaatctacctcgacgagaactacgagcgcatcaacgtgcctgtgccccagtttggcggcggtgaccctgcagacatcatccatgacttccagcggggtctgactgcgtaccatgatatctccctggacaagtgctatgtcatcgaactcaacaccaccattgtgctgccccctcgcaacttctgggagctcctcatgaacgtgaagagggggacctacctgccgcagacgtacatcatccaggaggagatggtggtcacggagcatgtcagtgacaaggaggccctggggtccttcatctaccacctgtgcaacgggaaagacacctaccggctccggcgccgggcaacgcggaggcggatcaacaagcgtggggccaagaactgcaatgccatccgccacttcgagaacaccttcgtggtggagacgctcatctgcggggtggtgtgaggccctcctcccccagaaccccctgccgtgttcctcttttcttctttccggctgctctctggccctcctccttccccctgcttagcttgtactttggacgcgtttctatagaggtgacatgtctctccattcctctccaaccctgcccacctccctgtaccagagctgtgatctctcggtggggggcccatctctgctgacctgggtgtggcggagggagaggcgatgctgcaaagtgttttctgtgtcccactgtcttgaagctgggcctgccaaagcctgggcccacagctgcaccggcagcccaaggggaaggaccggttgggggagccgggcatgtgaggccctgggcaaggggatggggctgtgggggcggggcggcatgggcttcagaagtatctgcacaattagaaaagtcctcagaagctttttcttggagggtacactttcttcactgtccctattcctagacctggggcttgagctgaggatgggacgatgtgcccagggagggacccaccagagcacaagagaaggtggctacctgggggtgtcccagggactctgtcagtgccttcagcccaccagcaggagcttggagtttggggagtggggatgagtccgtcaagcacaactgttctctgagtggaaccaaagaatcactgctcagtcacgtccacgggggacgagccgtgggttctgctgagtaggtggagctcattgctttctccaagcttggaactgttttgaaagataacacagagggaaagggagagccacctggtacttgtccaccctgcctcctctgttctgaaattccatccccctcagcttaggggaatgcacctttttccctttccttctcacttttgcatgtttttactgatcattcgatatgctaaccgttctcagccctgagccttggagaggagggctgtaacgccttcagtcagtctctggggatgaaactcttaaatgctttgtatattttctcaattagatctcttttcagaagtgtctatagaacaataaaaatcttttacttctga

SEQ ID NO: 330082 - DNA, 1863 bp, Homo sapiens
ggggggacgcgagcgggatccaaacttccggtgcctgcagagctcggagcggcggaggcagagaccgaggctgcaccggcagaggctgcggggcggacgcgcgggccggcgcagccatggtgaagattagcttccagcccgccgtggctggcatcaagggcgacaaggctgacaaggcgtcggcgtcggcccctgcgccggcctcggccaccgagatcctgctgacgccggctagggaggagcagcccccacaacatcgatccaagagggggagctcagtgggcggcgtgtgctacctgtcgatgggcatggtcgtgctgctcatgggcctcgtgttcgcctctgtctacatctacagatacttctttcttgcacagctggcccgagataacttcttccgctgtggtgtgctgtatgaggactccctgtcctcccaggtccggactcagatggagctggaagaggatgtgaaaatctacctcgacgagaactacgagcgcatcaacgtgcctgtgccccagtttggcggcggtgaccctgcagacatcatccatgacttccagcggggtctgactgcgtaccatgatatctccctggacaagtgctatgtcatcgaactcaacaccaccattgtgctgccccctcgcaacttctgggagctcctcatgaacgtgaagagggggacctacctgccgcagacgtacatcatccaggaggagatggtggtcacggagcatgtcagtgacaaggaggccctggggtccttcatctaccacctgtgcaacgggaaagacacctaccggctccggcgccgggcaacgcggaggcggatcaacaagcgtggggccaagaactgcaatgccatccgccacttcgagaacaccttcgtggtggagacgctcatctgcggggtggtgtgaggccctcctcccccagaaccccctgccgtgttcctcttttcttctttccggctgctctctggccctcctccttccccctgcttagcttgtactttggacgcgtttctatagaggtgacatgtctctccattcctctccaaccctgcccacctccctgtaccagagctgtgatctctcggtggggggcccatctctgctgacctgggtgtggcggagggagaggcgatgctgcaaagtgttttctgtgtcccactgtcttgaagctgggcctgccaaagcctgggcccacagctgcaccggcagcccaaggggaaggaccggttgggggagccgggcatgtgaggccctgggcaaggggatggggctgtgggggcggggcggcatgggcttcagaagtatctgcacaattagaaaagtcctcagaagctttttcttggagggtacactttcttcactgtccctattcctagacctggggcttgagctgaggatgggacgatgtgcccagggagggacccaccagagcacaagagaaggtggctacctgggggtgtcccagggactctgtcagtgccttcagcccaccagcaggagcttggagtttggggagtggggatgagtccgtcaacttggaactgttttgaaagataacacagagggaaagggagagccacctggtacttgtccaccctgcctcctctgttctgaaattccatccccctcagcttaggggaatgcacctttttccctttccttctcacttttgcatgtttttactgatcattcgatatgctaaccgttctcagccctgagccttggagaggagggctgtaacgccttcagtcagtctctggggatgaaactcttaaatgctttgtatattttctcaattagatctcttttcagaagtgtctatagaacaataaaaatcttttacttctga

SEQ ID NO: 330083 - DNA, 1901 bp, Homo sapiens
ggctggtacaggtccggagatgttaaggatccggcctcggcaccgagatcctgctgacgccggctagggaggagcagcccccacaacatcgatccaagagggggagctcagtgggcggcgtgtgctacctgtcgatgggcatggtcgtgctgctcatgggcctcgtgttcgcctctgtctacatctacagatacttctttcttgcacagctggcccgagataacttcttccgctgtggtgtgctgtatgaggactccctgtcctcccaggtccggactcagatggagctggaagaggatgtgaaaatctacctcgacgagaactacgagcgcatcaacgtgcctgtgccccagtttggcggcggtgaccctgcagacatcatccatgacttccagcggggtctgactgcgtaccatgatatctccctggacaagtgctatgtcatcgaactcaacaccaccattgtgctgccccctcgcaacttctgggagctcctcatgaacgtgaagagggggacctacctgccgcagacgtacatcatccaggaggagatggtggtcacggagcatgtcagtgacaaggaggccctggggtccttcatctaccacctgtgcaacgggaaagacacctaccggctccggcgccgggcaacgcggaggcggatcaacaagcgtggggccaagaactgcaatgccatccgccacttcgagaacaccttcgtggtggagacgctcatctgcggggtggtgtgaggccctcctcccccagaaccccctgccgtgttcctcttttcttctttccggctgctctctggccctcctccttccccctgcttagcttgtactttggacgcgtttctatagaggtgacatgtctctccattcctctccaaccctgcccacctccctgtaccagagctgtgatctctcggtggggggcccatctctgctgacctgggtgtggcggagggagaggcgatgctgcaaagtgttttctgtgtcccactgtcttgaagctgggcctgccaaagcctgggcccacagctgcaccggcagcccaaggggaaggaccggttgggggagccgggcatgtgaggccctgggcaaggggatggggctgtgggggcggggcggcatgggcttcagaagtatctgcacaattagaaaagtcctcagaagctttttcttggagggtacactttcttcactgtccctattcctagacctggggcttgagctgaggatgggacgatgtgcccagggagggacccaccagagcacaagagaaggtggctacctgggggtgtcccagggactctgtcagtgccttcagcccaccagcaggagcttggagtttggggagtggggatgagtccgtcaagcacaactgttctctgagtggaaccaaagaagcaaggagctaggacccccagtcctgccccccaggagcacaagcagggtcccctcagtcaaggcagtgggatgggcggctgaggaacggggcaggcaaggtcactgctcagtcacgtccacgggggacgagccgtgggttctgctgagtaggtggagctcattgctttctccaagcttggaactgttttgaaagataacacagagggaaagggagagccacctggtacttgtccaccctgcctcctctgttctgaaattccatccccctcagcttaggggaatgcacctttttccctttccttctcacttttgcatgtttttactgatcattcgatatgctaaccgttctcagccctgagccttggagaggagggctgtaacgccttcagtcagtctctggggatgaaactcttaaatgctttgtatattttctcaattagatctcttttcagaagtgtctatagaacaataaaaatcttttacttctga

SEQ ID NO: 330084 - DNA, 1928 bp, Homo sapiens
ggggggacgcgagcgggatccaaacttccggtgcctgcagagctcggagcggcggaggcagagaccgaggctgcaccggcagaggctgcggggcggacgcgcgggccggcgcagccatggtgaagattagcttccagcccgccgtggctggcatcaagggcgacaaggctgacaaggcgtcggcgtcggcccctgcgccggcctcggccaccgagatcctgctgacgccggctaggctggcccgagataacttcttccgctgtggtgtgctgtatgaggactccctgtcctcccaggtccggactcagatggagctggaagaggatgtgaaaatctacctcgacgagaactacgagcgcatcaacgtgcctgtgccccagtttggcggcggtgaccctgcagacatcatccatgacttccagcggggtctgactgcgtaccatgatatctccctggacaagtgctatgtcatcgaactcaacaccaccattgtgctgccccctcgcaacttctgggagctcctcatgaacgtgaagagggggacctacctgccgcagacgtacatcatccaggaggagatggtggtcacggagcatgtcagtgacaaggaggccctggggtccttcatctaccacctgtgcaacgggaaagacacctaccggctccggcgccgggcaacgcggaggcggatcaacaagcgtggggccaagaactgcaatgccatccgccacttcgagaacaccttcgtggtggagacgctcatctgcggggtggtgtgaggccctcctcccccagaaccccctgccgtgttcctcttttcttctttccggctgctctctggccctcctccttccccctgcttagcttgtactttggacgcgtttctatagaggtgacatgtctctccattcctctccaaccctgcccacctccctgtaccagagctgtgatctctcggtggggggcccatctctgctgacctgggtgtggcggagggagaggcgatgctgcaaagtgttttctgtgtcccactgtcttgaagctgggcctgccaaagcctgggcccacagctgcaccggcagcccaaggggaaggaccggttgggggagccgggcatgtgaggccctgggcaaggggatggggctgtgggggcggggcggcatgggcttcagaagtatctgcacaattagaaaagtcctcagaagctttttcttggagggtacactttcttcactgtccctattcctagacctggggcttgagctgaggatgggacgatgtgcccagggagggacccaccagagcacaagagaaggtggctacctgggggtgtcccagggactctgtcagtgccttcagcccaccagcaggagcttggagtttggggagtggggatgagtccgtcaagcacaactgttctctgagtggaaccaaagaagcaaggagctaggacccccagtcctgccccccaggagcacaagcagggtcccctcagtcaaggcagtgggatgggcggctgaggaacggggcaggcaaggtcactgctcagtcacgtccacgggggacgagccgtgggttctgctgagtaggtggagctcattgctttctccaagcttggaactgttttgaaagataacacagagggaaagggagagccacctggtacttgtccaccctgcctcctctgttctgaaattccatccccctcagcttaggggaatgcacctttttccctttccttctcacttttgcatgtttttactgatcattcgatatgctaaccgttctcagccctgagccttggagaggagggctgtaacgccttcagtcagtctctggggatgaaactcttaaatgctttgtatattttctcaattagatctcttttcagaagtgtctatagaacaataaaaatcttttacttctga

SEQ ID NO: 330085 - DNA, 2004 bp, Homo sapiens
  misc_feature (41)..(41): n is a, c, g, or t
  misc_feature (44)..(44): n is a, c, g, or t
  misc_feature (72)..(72): n is a, c, g, or t
  misc_feature (93)..(93): n is a, c, g, or t
  misc_feature (219)..(219): n is a, c, g, or t
acccgcacacgctcccccccgcaccgcccccccccgcacantcnctcaacattaccttccacccccccctcnctcccatcaacccccacaacnctcacaacccctccccctccccccctccccccccctccgccacccacatcctcctcaccccccctacccaccaccaccccccacaacatccatccaacacccccacctcactcccccccctctccnacctctccatccccatcgtcctcctcctcatccccctcctcttcccctctctctacatctacacatacttctttcttccacacctccccccacctggcccgagataacttcttccgctgtggtgtgctgtatgaggactccctgtcctcccaggtccggactcagatggagctggaagaggatgtgaaaatctacctcgacgagaactacgagcgcatcaacgtgcctgtgccccagtttggcggcggtgaccctgcagacatcatccatgacttccagcggggtctgactgcgtaccatgatatctccctggacaagtgctatgtcatcgaactcaacaccaccattgtgctgccccctcgcaacttctgggagctcctcatgaacgtgaagagggggacctacctgccgcagacgtacatcatccaggaggagatggtggtcacggagcatgtcagtgacaaggaggccctggggtccttcatctaccacctgtgcaacgggaaagacacctaccggctccggcgccgggcaacgcggaggcggatcaacaagcgtggggccaagaactgcaatgccatccgccacttcgagaacaccttcgtggtggagacgctcatctgcggggtggtgtgaggccctcctcccccagaaccccctgccgtgttcctcttttcttctttccggctgctctctggccctcctccttccccctgcttagcttgtactttggacgcgtttctatagaggtgacatgtctctccattcctctccaaccctgcccacctccctgtaccagagctgtgatctctcggtggggggcccatctctgctgacctgggtgtggcggagggagaggcgatgctgcaaagtgttttctgtgtcccactgtcttgaagctgggcctgccaaagcctgggcccacagctgcaccggcagcccaaggggaaggaccggttgggggagccgggcatgtgaggccctgggcaaggggatggggctgtgggggcggggcggcatgggcttcagaagtatctgcacaattagaaaagtcctcagaagctttttcttggagggtacactttcttcactgtccctattcctagacctggggcttgagctgaggatgggacgatgtgcccagggagggacccaccagagcacaagagaaggtggctacctgggggtgtcccagggactctgtcagtgccttcagcccaccagcaggagcttggagtttggggagtggggatgagtccgtcaagcacaactgttctctgagtggaaccaaagaagcaaggagctaggacccccagtcctgccccccaggagcacaagcagggtcccctcagtcaaggcagtgggatgggcggctgaggaacggggcaggcaaggtcactgctcagtcacgtccacgggggacgagccgtgggttctgctgagtaggtggagctcattgctttctccaagcttggaactgttttgaaagataacacagagggaaagggagagccacctggtacttgtccaccctgcctcctctgttctgaaattccatccccctcagcttaggggaatgcacctttttccctttccttctcacttttgcatgtttttactgatcattcgatatgctaaccgttctcagccctgagccttggagaggagggctgtaacgccttcagtcagtctctggggatgaaactcttaaatgctttgtatattttctcaattagatctcttttcagaagtgtctatagaacaataaaaatcttttacttctga

SEQ ID NO: 330086 - DNA, 572 bp, Homo sapiens
cagaggaggtggacaagaaggaggtggtggaggctgtgaccattgtagagacaccacccatggtggttgtgggcattgtgggctacgtggaaacccctcgaggcctcctctgtgctgtcccagaggagggtcccctcagtcaaggcagtgggatgggcggctgaggaacggggcaggcaaggtcactgctcagtcacgtccacgggggacgagccgtgggttctgctgagtaggtggagctcattgctttctccaagcttggaactgttttgaaagataacacagagggaaagggagagccacctggtacttgtccaccctgcctcctctgttctgaaattccatccccctcagcttaggggaatgcacctttttccctttccttctcacttttgcatgtttttactgatcattcgatatgctaaccgttctcagccctgagccttggagaggagggctgtaacgccttcagtcagtctctggggatgaaactcttaaatgctttgtatattttctcaattagatctcttttcagaagtgtctatagaacaataaaaatcttttacttctga

SEQ ID NO: 330087 - DNA, 869 bp, Homo sapiens
ggggggacgcgagcgggatccaaacttccggtgcctgcagagctcggagcggcggaggcagagaccgaggctgcaccggcagaggctgcggggcggacgcgcgggccggcgcagccatggtgaagattagcttccagcccgccgtggctggcatcaagggcgacaaggctgacaaggcgtcggcgtcggcccctgcgccggcctcggccaccgagatcctgctgacgccggctagggaggagcagcccccacaacatcgatccaagagggggagctcagtgggcggcgtgtgctacctgtcgatgggcatggtcgtgctgctcatgggcctcgtgttcgcctctgtctacatctacagatacttctttcttgcacagctggcccgagataacttcttccgctgtggtgtgctgtatgaggactccctgtcctcccaggtccggactcagatggagctggaagaggatgtgaaaatctactcactgctcagtcacgtccacgggggacgagccgtgggttctgctgagtaggtggagctcattgctttctccaagcttggaactgttttgaaagataacacagagggaaagggagagccacctggtacttgtccaccctgcctcctctgttctgaaattccatccccctcagcttaggggaatgcacctttttccctttccttctcacttttgcatgtttttactgatcattcgatatgctaaccgttctcagccctgagccttggagaggagggctgtaacgccttcagtcagtctctggggatgaaactcttaaatgctttgtatattttctcaattagatctcttttcagaagtgtctatagaacaataaaaatcttttacttctga

SEQ ID NO: 330088 - DNA, 279 bp, Homo sapiens
acgaaagcctgaggggccgactcactgtggcggccaccttgttttgcagagggggacctacctgccgcagacgtacatcatccaggaggagatggtggtcacggagcatgtcagtgacaaggaggccctggggtccttcatctaccacctgtgcaacgggaaagacacctaccggctccggcgccgggcaacgcggaggcgtgagtggctggcttcacccacagtagcccctgtcccgtgccccagaccacagttatcttcacgcctagcccagctgtc

SEQ ID NO: 330089 - DNA, 2149 bp, Homo sapiens
  misc_feature (2134)..(2134): n is a, c, g, or t
ggggggacgcgagcgggatccaaacttccggtgcctgcagagctcggagcggcggaggcagagaccgaggctgcaccggcagaggctgcggggcggacgcgcgggccggcgcagccatggtgaagattagcttccagcccgccgtggctggcatcaagggcgacaaggctgacaaggcgtcggcgtcggcccctgcgccggcctcggccaccgagatcctgctgacgccggctagggaggagcagcccccacaacatcgatccaagagggggagctcagtgggcggcgtgtgctacctgtcgatgggcatggtcgtgctgctcatgggcctcgtgttcgcctctgtctacatctacagatacttctttcttgcacagctggcccgagataacttcttccgctgtggtgtgctgtatgaggactccctgtcctcccaggtccggactcagatggagctggaagaggatgtgaaaatctacctcgacgagaactacgagcgcatcaacgtgcctgtgccccagtttggcggcggtgaccctgcagacatcatccatgacttccagcggggtctgactgcgtaccatgatatctccctggacaagtgctatgtcatcgaactcaacaccaccattgtgctgccccctcgcaacttctgggagctcctcatgaacgtgaagagggggacctacctgccgcagacgtacatcatccaggaggagatggtggtcacggagcatgtcagtgacaaggaggccctggggtccttcatctaccacctgtgcaacgggaaagacacctaccggctccggcgccgggcaacgcggaggcggatcaacaagcgtggggccaagaactgcaatgccatccgccacttcgagaacaccttcgtggtggagacgctcatctgcggggtggtgtgaggccctcctcccccagaaccccctgccgtgttcctcttttcttctttccggctgctctctggccctcctccttccccctgcttagcttgtactttggacgcgtttctatagaggtgacatgtctctccattcctctccaaccctgcccacctccctgtaccagagctgtgatctctcggtggggggcccatctctgctgacctgggtgtggcggagggagaggcgatgctgcaaagtgttttctgtgtcccactgtcttgaagctgggcctgccaaagcctgggcccacagctgcaccggcagcccaaggggaaggaccggttgggggagccgggcatgtgaggccctgggcaaggggatggggctgtgggggcggggcggcatgggcttcagaagtatctgcacaattagaaaagtcctcagaagctttttcttggagggtacactttcttcactgtccctattcctagacctggggcttgagctgaggatgggacgatgtgcccagggagggacccaccagagcacaagagaaggtggctacctgggggtgtcccagggactctgtcagtgccttcagcccaccagcaggagcttggagtttggggagtggggatgagtccgtcaagcacaactgttctctgagtggaaccaaagaagcaaggagctaggacccccagtcctgccccccaggagcacaagcagggtcccctcagtcaaggcagtgggatgggcggctgaggaacggggcaggcaaggtcactgctcagtcacgtccacgggggacgagccgtgggttctgctgagtaggtggagctcattgctttctccaagcttggaactgttttgaaagataacacagagggaaagggagagccacctggtacttgtccaccctgcctcctctgttctgaaattccatccccctcagcttaggggaatgcacctttttccctttccttctcacttttgcatgtttttactgatcattcgatatgctaaccgttctcagccctgagccttggagaggagggctgtaacgccttcagtcagtctctggggatgaaactcttaaatgctttgtatattttctcaattagatctcttttcagaagtgtctatagaacaataaaaatcttttacttctgaaaaaaaaaaaaaaaaaaaaaaaaaaaaaaaaaaaaaaaaaaaaaaaaaaaaaaaaaaaaaaaaanagaggggggggggcc

SEQ ID NO: 330090 - DNA, 2269 bp, Homo sapiens
ggggggacgcgagcgggatccaaacttccggtgcctgcagagctcggagcggcggaggcagagaccgaggctgcaccggcagaggctgcggggcggacgcgcgggccggcgcagccatggtgaagattagcttccagcccgccgtggctggcatcaagggcgacaaggctgacaaggcgtcggcgtcggcccctgcgccggcctcggccaccgagatcctgctgacgccggctagggaggagcagcccccacaacatcgatccaagagggggagctcagtgggcggcgtgtgctacctgtcgatgggcatggtcgtgctgctcatgggcctcgtgttcgcctctgtctacatctacagatacttctttcttgcacagctggcccgagataacttcttccgctgtggtgtgctgtatgaggactccctgtcctcccaggtccggactcagatggagctggaagaggatgtgaaaatctacctcgacgagaactacgagcgcatcaacgtgcctgtgccccagtttggcggcggtgaccctgcagacatcatccatgacttccagcggggtctgactgcgtaccatgatatctccctggacaagtgctatgtcatcgaactcaacaccaccattgtgctgccccctcgcaacttctgggagctcctcatgaacgtgaagagggggacctacctgccgcagacgtacatcatccaggaggagatggtggtcacggagcatgtcagtgacaaggaggccctggggtccttcatctaccacctgtgcaacgggaaagacacctaccggctccggcgccgggcaacgcggaggcggatcaacaagcgtggggccaagaactgcaatgccatccgccacttcgagaacaccttcgtggtggagacgctcatctgcggggtggtgtgaggccctcctcccccagaaccccctgccgtgttcctcttttcttctttccggctgctctctggccctcctccttccccctgcttagcttgtactttggacgcgtttctatagaggtgacatgtctctccattcctctccaaccctgcccacctccctgtaccagagctgtgatctctcggtggggggcccatctctgctgacctgggtgtggcggagggagaggcgatgctgcaaagtgttttctgtgtcccactgtcttgaagctgggcctgccaaagcctgggcccacagctgcaccggcagcccaaggggaaggaccggttgggggagccgggcatgtgaggccctgggcaaggggatggggctgtgggggcggggcggcatgggcttcagaagtatctgcacaattagaaaagtcctcagaagctttttcttggagggtacactttcttcactgtccctattcctagacctggggcttgagctgaggatgggacgatgtgcccagggagggacccaccagagcacaagagaaggtggctacctgggggtgtcccagggactctgtcagtgccttcagcccaccagcaggagcttggagtttggggagtggggatgagtccgtcaagcacaactgttctctgagtggaaccaaagaagcaaggagctaggacccccagtcctgccccccaggagcacaagcagggtcccctcagtcaaggcagtgggatgggcggctgaggaacggggcaggcaaggtcactgctcagtcacgtccacgggggacgagccgtgggttctgctgagtaggtggagctcattgctttctccaagcttggaactgttttgaaagataacacagagggaaagggagagccacctggtacttgtccaccctgcctcctctgttctgaaattccatccccctcagcttaggggaatgcacctttttccctttccttctcacttttgcatgtttttactgatcattcgatatgctaaccgttctcagccctgagccttggagaggagggctgtaacgccttcagtcagtctctggggatgaaactcttaaatgctttgtatattttctcaattagatctcttttcagaagtgtctatagaacaataaaaatcttttacttctgaaaaccagacccgacacagagactcacaaaaacaacgaccaaaacaacaacaacaaagacaaggaacgacgaaaccgggggcggaccatgcctaaggagcgatccggcgcgtaacgcgcggaaccgggtcaaggacgtggaacccgtggagggtagaagccgcgtccaagggccagtagggcgatgcacgctgacctacgg

SEQ ID NO: 330091 - DNA, 1961 bp, Homo sapiens
gtctcgaatggttgcttatcccagaatgaggagggggcttaagtcccgtactaaagcggcagccaaaagctgaagtccgaagagtgggaggcgtctggttctggtcttcaggtggagaagtgctcgaggaggagcagcccccacaacatcgatccaagagggggagctcagtgggcggcgtgtgctacctgtcgatgggcatggtcgtgctgctcatgggcctcgtgttcgcctctgtctacatctacagatacttctttcttgcacagctggcccgagataacttcttccgctgtggtgtgctgtatgaggactccctgtcctcccaggtccggactcagatggagctggaagaggatgtgaaaatctacctcgacgagaactacgagcgcatcaacgtgcctgtgccccagtttggcggcggtgaccctgcagacatcatccatgacttccagcggggtctgactgcgtaccatgatatctccctggacaagtgctatgtcatcgaactcaacaccaccattgtgctgccccctcgcaacttctgggagctcctcatgaacgtgaagagggggacctacctgccgcagacgtacatcatccaggaggagatggtggtcacggagcatgtcagtgacaaggaggccctggggtccttcatctaccacctgtgcaacgggaaagacacctaccggctccggcgccgggcaacgcggaggcggatcaacaagcgtggggccaagaactgcaatgccatccgccacttcgagaacaccttcgtggtggagacgctcatctgcggggtggtgtgaggccctcctcccccagaaccccctgccgtgttcctcttttcttctttccggctgctctctggccctcctccttccccctgcttagcttgtactttggacgcgtttctatagaggtgacatgtctctccattcctctccaaccctgcccacctccctgtaccagagctgtgatctctcggtggggggcccatctctgctgacctgggtgtggcggagggagaggcgatgctgcaaagtgttttctgtgtcccactgtcttgaagctgggcctgccaaagcctgggcccacagctgcaccggcagcccaaggggaaggaccggttgggggagccgggcatgtgaggccctgggcaaggggatggggctgtgggggcggggcggcatgggcttcagaagtatctgcacaattagaaaagtcctcagaagctttttcttggagggtacactttcttcactgtccctattcctagacctggggcttgagctgaggatgggacgatgtgcccagggagggacccaccagagcacaagagaaggtggctacctgggggtgtcccagggactctgtcagtgccttcagcccaccagcaggagcttggagtttggggagtggggatgagtccgtcaagcacaactgttctctgagtggaaccaaagaagcaaggagctaggacccccagtcctgccccccaggagcacaagcagggtcccctcagtcaaggcagtgggatgggcggctgaggaacggggcaggcaaggtcactgctcagtcacgtccacgggggacgagccgtgggttctgctgagtaggtggagctcattgctttctccaagcttggaactgttttgaaagataacacagagggaaagggagagccacctggtacttgtccaccctgcctcctctgttctgaaattccatccccctcagcttaggggaatgcacctttttccctttccttctcacttttgcatgtttttactgatcattcgatatgctaaccgttctcagccctgagccttggagaggagggctgtaacgccttcagtcagtctctggggatgaaactcttaaatgctttgtatattttctcaattagatctcttttcagaagtgtctatagaacaataaaaatcttttacttctga

SEQ ID NO: 330092 - DNA, 1958 bp, Homo sapiens
ggggggacgcgagcgggatccaaacttccggtgcctgcagagctcggagcggcggaggcagagaccgaggctgcaccggcagaggctgcggggcggacgcgcgggccggcgcagccatggtgaagattagcttccagcccgccgtggctggcatcaagggcgacaaggctgacaaggcgtcggcgtcggcccctgcgccggcctcggccaccgagatcctgctgacgccggctagggaggagcagcccccacaacatcgatccaagagggggagctcagtgggcggcgtgtgctacctgtcgatgggcatggtcgtgctgctcatgggcctcgtgttcgcctctgtctacatctacagatacttctttcttgcacagctggcccgagataacttcttccgctgtggtgtgctgtatgaggactccctgtcctcccaggtccggactcagatggagctggaagaggatgtgaaaatctacctcgacgagaactacgagcgcatcaacgtgcctgtgccccagtttggcggcggtgaccctgcagacatcatccatgacttccagcggagggggacctacctgccgcagacgtacatcatccaggaggagatggtggtcacggagcatgtcagtgacaaggaggccctggggtccttcatctaccacctgtgcaacgggaaagacacctaccggctccggcgccgggcaacgcggaggcggatcaacaagcgtggggccaagaactgcaatgccatccgccacttcgagaacaccttcgtggtggagacgctcatctgcggggtggtgtgaggccctcctcccccagaaccccctgccgtgttcctcttttcttctttccggctgctctctggccctcctccttccccctgcttagcttgtactttggacgcgtttctatagaggtgacatgtctctccattcctctccaaccctgcccacctccctgtaccagagctgtgatctctcggtggggggcccatctctgctgacctgggtgtggcggagggagaggcgatgctgcaaagtgttttctgtgtcccactgtcttgaagctgggcctgccaaagcctgggcccacagctgcaccggcagcccaaggggaaggaccggttgggggagccgggcatgtgaggccctgggcaaggggatggggctgtgggggcggggcggcatgggcttcagaagtatctgcacaattagaaaagtcctcagaagctttttcttggagggtacactttcttcactgtccctattcctagacctggggcttgagctgaggatgggacgatgtgcccagggagggacccaccagagcacaagagaaggtggctacctgggggtgtcccagggactctgtcagtgccttcagcccaccagcaggagcttggagtttggggagtggggatgagtccgtcaagcacaactgttctctgagtggaaccaaagaagcaaggagctaggacccccagtcctgccccccaggagcacaagcagggtcccctcagtcaaggcagtgggatgggcggctgaggaacggggcaggcaaggtcactgctcagtcacgtccacgggggacgagccgtgggttctgctgagtaggtggagctcattgctttctccaagcttggaactgttttgaaagataacacagagggaaagggagagccacctggtacttgtccaccctgcctcctctgttctgaaattccatccccctcagcttaggggaatgcacctttttccctttccttctcacttttgcatgtttttactgatcattcgatatgctaaccgttctcagccctgagccttggagaggagggctgtaacgccttcagtcagtctctggggatgaaactcttaaatgctttgtatattttctcaattagatctcttttcagaagtgtctatagaacaataaaaatcttttacttctga

SEQ ID NO: 330093 - DNA, 1316 bp, Homo sapiens
ggggggacgcgagcgggatccaaacttccggtgcctgcagagctcggagcggcggaggcagagaccgaggctgcaccggcagaggctgcggggcggacgcgcgggccggcgcagccatggtgaagattagcttccagcccgccgtggctggcatcaagggcgacaaggctgacaaggcgtcggcgtcggcccctgcgccggcctcggccaccgagatcctgctgacgccggctagggaggagcagcccccacaacatcgatccaagagggggagctcagtgggcggcgtgtgctacctgtcgatgggcatggtcgtgctgctcatgggcctcgtgttcgcctctgtctacatctacagatacttctttcttgcacagctggcccgagataacttcttccgctgtggtgtgctgtatgaggactccctgtcctcccaggtccggactcagatggagctggaagaggatgtgaaaatctacctcgacgagaactacgagcgcatcaacgtgcctgtgccccagtttggcggcggtgaccctgcagacatcatccatgacttccagcggggtctgactgcgtaccatgatatctccctggacaagtgctatgtcatcgaactcaacaccaccattgtgctgccccctcgcaacttctgggagctcctcatgaacgtgaagagggggacctacctgccgcagacgtacatcatccaggaggagatggtggtcacggagcatgtcagtgacaaggaggccctggggtccttcatctaccacctgtgcaacgggaaagacacctaccggctccggcgccgggcaacgcggaggcggatcaacaagcgtggggccaagaactgcaatgccatccgccacttcgagaacaccttcgtggtggagacgctcatctgcggggtggtgtgaggccctcctcccccagaaccccctgccgtgttcctcttttcttctttccggctgctctctggccctcctccttccccctgcttagcttgtactttggacgcgtttctatagaggtgacatgtctctccattcctctccaacccctgcctcctctgttctgaaattccatccccctcagcttaggggaatgcacctttttccctttccttctcacttttgcatgtttttactgatcattcgatatgctaaccgttctcagccctgagccttggagaggagggctgtaacgccttcagtcagtctctggggatgaaactcttaaatgctttgtatattttctcaattagatctcttttcagaagtgtctatagaacaataaaaatcttttacttctga

SEQ ID NO: 330094 - DNA, 1287 bp, Homo sapiens
  misc_feature (24)..(24): n is a, c, g, or t
  misc_feature (33)..(33): n is a, c, g, or t
gggcaatcagcaggtaggcgcggngaatctaanctacaagcgtcggagcgccgagacgaacatgctaactgaccgagttccatccgccacttcgagaacaccttcgtggtggagacgctcatctgcggggtggtgtgaggccctcctcccccagaaccccctgccgtgttcctcttttcttctttccggctgctctctggccctcctccttccccctgcttagcttgtactttggacgcgtttctatagaggtgacatgtctctccattcctctccaaccctgcccacctccctgtaccagagctgtgatctctcggtggggggcccatctctgctgacctgggtgtggcggagggagaggcgatgctgcaaagtgttttctgtgtcccactgtcttgaagctgggcctgccaaagcctgggcccacagctgcaccggcagcccaaggggaaggaccggttgggggagccgggcatgtgaggccctgggcaaggggatggggctgtgggggcggggcggcatgggcttcagaagtatctgcacaattagaaaagtcctcagaagctttttcttggagggtacactttcttcactgtccctattcctagacctggggcttgagctgaggatgggacgatgtgcccagggagggacccaccagagcacaagagaaggtggctacctgggggtgtcccagggactctgtcagtgccttcagcccaccagcaggagcttggagtttggggagtggggatgagtccgtcaagcacaactgttctctgagtggaaccaaagaagcaaggagctaggacccccagtcctgccccccaggagcacaagcagggtcccctcagtcaaggcagtgggatgggcggctgaggaacggggcaggcaaggtcactgctcagtcacgtccacgggggacgagccgtgggttctgctgagtaggtggagctcattgctttctccaagcttggaactgttttgaaagataacacagagggaaagggagagccacctggtacttgtccaccctgcctcctctgttctgaaattccatccccctcagcttaggggaatgcacctttttccctttccttctcacttttgcatgtttttactgatcattcgatatgctaaccgttctcagccctgagccttggagaggagggctgtaacgccttcagtcagtctctggggatgaaactcttaaatgctttgtatattttctcaattagatctcttttcagaagtgtctatagaacaataaaaatcttttacttctga

SEQ ID NO: 330095 - DNA, 633 bp, Homo sapiens
ggggggacgcgagcgggatccaaacttccggtgcctgcagagctcggagcggcggaggcagagaccgaggctgcaccggcagaggctgcggggcggacgcgcgggccggcgcagccatggtgaagattagcttccagcccgccgtggctggcatcaagggcgacaaggctgacaaggcgtcggcgtcggcccctgcgccggcctcggccaccgagatcctgctgacgccggctagggaggagcagcccccacaacatcgatccaagagggggagctcagtgggcggcgtgtgctacctgtcgatgggcatggtcgtgctgctcatgggcctcgtgttcgcctctgtctacatctacagatacttctttcttgcacagctggcccgagataacttcttccgctgtggtgtgctgtatgaggactccctgtcctcccaggtccggactcagatggagctggaagaggatgtgaaaatctacctcgacgagaactacgagcgcatcaacgtgcctgtgccccagtttggcggcggtgaccctgcagacatcatccatgacttccagcggcggggtctgactgcgtaccatgatatggcactttcctttcctagtctacccaaactcccccacgtct

SEQ ID NO: 330096 - DNA, 465 bp, Homo sapiens
ccttccctctctttactggatcatcatatggaaatgtagtatgctttctggttattgtttaaaaaactttcattttgatcatagtaatattattaaagatacgtttttcagggctgggcacagtggctcacacctgtaatcctagcactttgggaggcagaggtgggtagatcacttgaggtcaggagttcgaggccagcctggccaacatggtgaaaccccgtctctactaaaaacacaaaaattagctgggcgtggtggcaggtgcctgtaatcccatctactcaggaggctgaggcaggagaatcgcttgaacccaggaggcggaggttgcagtgagccgagatcacaccagtgcactgcagcttgagtgacaagagcaaaactgtctcaaaagaaaaaaaaattttgagcagctgttgcttacccctgtgcacaattaagattatttaaccataccaccaa

SEQ ID NO: 330097 - DNA, 230 bp, Homo sapiens
tttccaagtaacatcacaccatcccagaacaaggctcaagaagatttatagaaatacaaaacatccagcagccaacaaggtaaaacttacaatgtgattaccaggtagtaaaacatatccaaaattaaaataatcgatcatgtgaaactgacttagaaccatcacagatgttagaattagacaaggacaataaatggttattatagttgtattccatatgttcaaaaaat

SEQ ID NO: 330098 - DNA, 744 bp, Homo sapiens
tcatgtcgtaaagtgtagttctgaaaaacagagcaaatgaaatgcaaagcaggtacttgggtttacatcccagtgccactgatgattctgttttctcatctgtggaagtttcactgttcttgtttcatggagaaattaactaagtgtcagctgtcaggcacactgaactcaggtgatgttcattaatagctgttgtacaatatgtttgtatttggattgctgcttattacttaacaacaggataaacctgaacaatggaaaagaccaacattagagagtattatctttccaaatacacacacctgtaagagaactggaaatgtgagaactacaacttcttcttatttaaacatttgaacaattgccggccctttcaccgaatttacctgtggaatgccttttgagagttagagaactgagaactggtattacttttcaggtcttttgctttccctaatccttgtgatactggagatttatcatctattaaaatggacctagtatttttaaatctgcatatcaaaagcaaattgaatgtctcttgcttccttttaatttcttttaacatataaatttctcttttagcatgtaaatttgttgaattaacagccctttgataatataattccttgcatataatatgtacaatgagagaatcaattaatttagaattacatactcctaatttaaaaaagaaactggtgtacttattgctgataactaggaagtcgaccggccgcgaat

SEQ ID NO: 330099 - DNA, 307 bp, Homo sapiens
gctactcagtagactgagggtgaaggattgtttgagcccagctgtataaaatttgccatttttaccatctttgagtgtactgttctctggtattatattcacattgtgtgaggccatcaccaacatccctctccagaacgtcttcatcttcccaggtgactctgtgtacctatcaaacacttaactcttcattgccttctccccataatccttggcaaccaccactctacttcctgtctcttaagaatttcactactccaggtacctctcctataagtggagtcataaaatagttgttctttgtgac

SEQ ID NO: 330100 - DNA, 719 bp, Homo sapiens
ttattcagcaatacaaagcaacaaactattgatacacacaacttaggtgaattttaaagttatccagaaggaaggaagccaaatccaaaaggtagtatactttatgattccattgatacataacattctttttatatttttattttgtggtttttctttgagacagggtcttgctctgtcacccaggctggagtgcagtagcatgatcatggctcattgcagcctcaaccttctgggctcaagcaatcctcccacctcagcctcccaagtggctggtaccataagcacatgccaccacgcccagcttttttttacttttgtaaagacaaggtctccctatgttgcccaggctggtctcgaacttctaggctcaaagtagaaagaagtagtctcccacctcagcctctcaaagtgctgacattacaggcatgagtcaccatgcccagcctatataatattatttttttatttttagatggagtgtcgctctgtcacccaggctggagtgcagtggcgcgatctgggctcactacaacctccgcctcctgggttcaagcaattctcctgccttagcctcccgagtaactgggattacaggtgtatgccaccacatccagctaatttttgtatttttagtagagatgaggtttcactatgtcagccaggctggtcttgaactcctgacctcgtgatcctcccgccttggcctcccaaagtgc

SEQ ID NO: 330101 - DNA, 615 bp, Homo sapiens
gcggccgcgtcgacgcggcggcggcagcggcgtcggctcggggttctccgggagagggggagtgcgcggcggccgcagctgccacaaaccaggtgaagctttgttctaagaatatttgtttcatctagtttatgagtccaaatgatatagactgtaaatgtcacagcagtggtgaaagactgctcggtcatgagcaccgacagtaactcactggcacgtgaatttctgaccgatgtcaaccggctttgcaatgcagtggtccagagggtggaggccagggaggaagaagaggaggagacgcacatggcaacccttggacagtaccttgtccatggtcgaggatttctattacttaccaagctaaattctataattgatcagtagagatggggtttcaccgtgttgaccagctgatcttaaactcctgacctcaagcagtctacccccgttggcctcccaaagtgctgggattacaggtgtgagccactgcacccagccaagtttatgtatttttattctttttcatgaatgtgatttgttaaatgagtgattaaatataatttttatatatttgtatgacttttctgtaaataaaatttaaaatcagaaaaaatc

SEQ ID NO: 330102 - DNA, 5288 bp, Homo sapiens
  misc_feature (2724)..(2724): n is a, c, g, or t
  misc_feature (5268)..(5268): n is a, c, g, or t
  misc_feature (5280)..(5282): n is a, c, g, or t
  misc_feature (5284)..(5284): n is a, c, g, or t
gagagagggccactcgccttcctggtgacacagagatttcctagccccgttaccaaacgaaaaagcaacgcaagggcttctaagaagccatcccaatgaccttttggctttgagaagagcagtcctcataccagagtgtttggggttttggcctctttcagtgtttattcattcttacgtgggaaagttgtattccgaggtttctgtggtgcatgaagcttttgccttcaccatctgttcccgtgtcttcctcgggtgacatcagagtacagcagtattttcccttgccatctaatggggtttgggctgtttgactcaaccgtgtgtgttcctcaatgccaggggaataatcctaccctaagtcagctgaacagaagccaggatctaactgcaaacaagagacccagcttgcttaacagcatggaagagaccagtttcgttgcagctacctgggaagacggttgctaattagcctgcaacaaagagttccttgctcatctaaaagaggcaatcaccgttcaggtgaagctttgttctaagaatatttgtttcatctagtttatgagtccaaatgatatagactgtaaatgtcacagcagtggtgaaagactgctcggtcatgagcaccgacagtaactcactggcacgtgaatttctgaccgatgtcaaccggctttgcaatgcagtggtccagagggtggaggccagggaggaagaagaggaggagacgcacatggcaacccttggacagtaccttgtccatggtcgaggatttctattacttaccaagctaaattctataattgatcaggcattgacatgtagagaagaactcctgactcttcttctgtctctccttccactggtatggaagatacctgtccaagaagaaaaggcaacagattttaacctaccgctctcagcagatataatcctgaccaaagaaaagaactcaagttcacaaagatccactcaggaaaaattacatttagaaggaagtgccctgtctagtcaggtttctgcaaaagtaaatgtttttcgaaaaagcagacgacagcgtaaaattacccatcgctattctgtaagagatgcaagaaagacacagctctccacctcagattcagaagccaattcagatgaaaaaggcatagcaatgaataagcatagaaggccccatctgctgcatcattttttaacatcgtttcctaaacaagaccaccccaaagctaaacttgaccgcttagcaaccaaagaacagactcctccagatgctatggctttggaaaattccagagagattattccaagacaggggtcaaacactgacattttaagtgagccagctgccttgtctgttatcagtaacatgaacaattctccatttgacttatgtcatgttttgttatctttattagaaaaagtttgtaagtttgacgttaccttgaatcataattctcctttagcagccagtgtagtgcccacactaactgaattcctagcaggctttggggactgctgcagtctgagcgacaacttggagagtcgagtagtttctgcaggttggaccgaagaaccggtggctttgattcaaaggatgctctttcgaacagtgttgcatcttctgtcagtagatgttagtactgcagagatgatgccagaaaatcttaggaaaaatttaactgaattgcttagagcagctttaaaaattagaatatgcctagaaaagcagcctgacccttttgcaccaagacaaaagaaaacactgcaggaggttcaggaagattttgtgttttcaaagtatcgtcatagagcccttcttttacctgagcttttggaaggagttcttcagattctgatctgttgtcttcaaagtgcagcttcaaatcccttctacttcagtcaagccatggatttggttcaagaattcattcagcatcatggatttaatttatttgaaacagcagttcttcaaatggaatggctggttttaagagatggagttcctcccgaggcctcagagcatttgaaagccctaataaatagtgtgatgaaaataatgagcactgtcaaaaaagtgaaatcagagcaacttcatcattcgatgtgtacaagaaaaaggcacagacgatgtgaatattctcattttatgcatcatcaccgagatctctcaggtcttctggtttcggcttttaaaaaccaggtttccaaaaacccatttgaagagactgcagatggagatgtttattatcctgagcggtgctgttgcattgcagtgtgtgcccatcagtgcttgcgcttactacagcaggcttccttgagcagcacttgtgtccagatcctatcgggtgttcataacattggaatatgctgttgtatggatcccaaatctgtaatcattcctttgctccatgcttttaaattgccagcactgaaaaattttcagcagcatatattgaatatccttaacaaacttattttggatcagttaggaggagcagagatatcaccaaaaattaaaaaagcagcttgtaatatttgtactgttgactctgaccaactagcccaattagaagagacactgcagggaaacttatgtgatgctgaactctcctcaagtttatccagtccttcttacagatttcaagggatcctgcccagcagtggatctgaagatttgttgtggaaatgggatgctttaaaggcttatcagaactttgtttttgnagaagacagattacatagtatacagattgcaaatcacatttgcaatttaatccagaaaggcaatatagttgttcagtggaaattatataattacatatttaatcctgtgctccaaagaggagttgaattagcacatcattgtcaacacctaagcgttacttcagctcaaagtcatgtatgtagccatcataaccagtgcttgcctcaggacgtgcttcagatttatgtaaaaactctgcctatcctgcttaaatccagggtaataagagatttgtttttgagttgtaatggagtaagtcaaataatcgaattaaattgcttaaatggtattcgaagtcattctctaaaagcatttgaaactctgataatcagcctaggggagcaacagaaagatgcctcagttccagatattgatgggatagacattgaacagaaggagttgtcctctgtacatgtgggtacttcttttcatcatcagcaagcttattcagattctcctcagagtctcagcaaattttatgctggcctcaaagaagcttatccaaagagacggaagactgttaaccaagatgttcatatcaacacaataaacctattcctctgtgtggcttttttatgcgtaagtaaagaagcagagtctgacagggagtcggccaatgactcagaagatacttctggctatgacagcacagccagcgagcctttaagtcatatgctgccatgtatatctctcgagagccttgtcttgccttctcctgaacatatgcaccaagcagcagacatttggtctatgtgtcgttggatctacatgttgagttcagtgttccagaaacagttttataggcttggtggtttccgagtatgccataagttaatatttatgataatacagaaactgttcagaagtcacaaagaggagcaaggaaaaaaggagggagatacaagtgtaaatgaaaaccaggatttaaacagaatttctcaacctaagagaactatgaaggaagatttattatctttggctataaaaagtgaccccataccatcagaactaggtagtctaaaaaagagtgctgacagtttaggtaaattagagttacagcatatttcttccataaatgtggaagaagtttcagctactgaagccgctcccgaggaagcaaagctatttacaagtcaagaaagtgagacctcacttcaaagtatacgacttttggaagcccttctggccatttgtcttcatggtgccagaactagtcaacagaagatggaattggagttacctaatcagaacttgtctgtggaaagtatattatttgaaatgagggaccatctttcccagtcaaaggtgattgaaacacaactagcaaagcctttatttgatgccctgcttcgagttgccctcgggaattattcagcagattttgaacataatgatgctatgactgagaagagtcatcaatctgcagaagaattgtcatcccagcctggtgatttttcagaagaagctgaggattctcagtgttgtagttttaaacttttagttgaagaagaaggttacgaagcagatagtgaaagcaatcctgaagatggcgaaacccaggatgatggggtagacttaaagtctgaaacagaaggtttcagtgcatcaagcagtccaaatgacttactcgaaaacctcactcaaggggaaataatttatcctgagatttgtatgctggaattaaatttgctttctgctagtaaagccaaacttgatgtgcttgcccatgtatttgagagttttttgaaaattattaggcagaaagaaaagaatgtttttctgctcatgcaacagggaactgtgaaaaatcttttaggagggttcttgagtattttaacacaggatgattctgattttcaagcatgccagagagtattggtggatcttttggtatctttgatgagttcaagaacatgttcagaagagctaacccttcttttgagaatatttctggagaaatctccttgtacaaaaattcttcttctgggtattctgaaaattattgaaagtgatactactatgagcccttcacagtatctaaccttccctttactgcacgctccaaatttaagcaacggtgtttcatcacaaaagtatcctgggattttaaacagtaaggccatgggtttattgagaagagcacgagtttcacggagcaagaaagaggctgatagagagagttttccccatcggctgctttcatcttggcacatagccccagtccacctgccgttgctggggcaaaactgctggccacacctatcagaaggtttcagtgtttccctgtggtttaatgtggagtgtatccatgaagctgagagtactacagaaaaaggaaagaagataaagaaaagaaacaaatcattaattttaccagatagcagttttgatggtacaggtatgatgacaggattatctgatttgtacacaaagattgttttcagactataattttccttgagccgtaaaaatgtggtagtgttcttaacactcttaacatgttnttcaccttaaannncntact

SEQ ID NO: 330103 - DNA, 931 bp, Homo sapiens
  misc_feature (795)..(796): n is a, c, g, or t
  misc_feature (798)..(798): n is a, c, g, or t
gagagagggccactcgccttcctggtgacacagagatttcctagccccgttaccaaacgaaaaagcaacgcaagggcttctaagaagccatcccaatgaccttttggctttgagaagagcagtcctcataccagagtgtttggggttttggcctctttcagtgtttattcattcttacgtgggaaagttgtattccgaggtttctgtggtgcatgaagcttttgccttcaccatctgttcccgtgtcttcctcgggtgacatcagagtacagcagtattttcccttgccatctaatggggtttgggctgtttgactcaaccgtgtgtgttcctcaatgccaggggaataatcctaccctaagtcagctgaacagaagccaggatctaactgcaaacaagagacccagcttgcttaacagcatggaagagaccagtttcgttgcagctacctgggaagacggttgctaattagcctgcaacaaagagttccttgctcatctaaaagaggcaatcaccgttcagtagagatggggtttcaccatgtttggccaggctggtctcgaactcctgaactcaagtgaactgtccacctctcaaagagctgggattacaggtcataagaccttcattccagaggcatcctgccctgtatccgggaagaaggaatgctgcacacagatgccgagaagaatcggaacagacaggcattgctggatcccccctcggtctattaccacgagatcaaactctttgtccaatcacatgtctacagtgctgtccattcttcatgattanngnaaaggggtgccgggtccggacatcgaagtcacggagaaaacaatttttggaaaaaacaccccgcggggaggggagagaacacaagaaaactctcccgcgaaaaccgcgcttttttctcgtgcgtcgctcccgc

SEQ ID NO: 330104 - DNA, 1045 bp, Homo sapiens
gagagagggccactcgccttcctggtgacacagagatttcctagccccgttaccaaacgaaaaagcaacgcaagggcttctaagaagccatcccaatgaccttttggctttgagaagagcagtcctcataccagagtgtttggggttttggcctctttcagtgtttattcattcttacgtgggaaagttgtattccgaggtttctgtggtgcatgaagcttttgccttcaccatctgttcccgtgtcttcctcgggtgacatcagagtacagcagtattttcccttgccatctaatggggtttgggctgtttgactcaaccgtgtgtgttcctcaatgccaggggaataatcctaccctaagtcagctgaacagaagccaggatctaactgcaaacaagagacccagcttgcttaacagcatggaagagaccagtttcgttgcagctacctgggaagacggttgctaattagcctgcaacaaagagttccttgctcatctaaaagaggcaatcaccgttcaggtgaagctttgttctaagaatatttgtttcatctagtttatgagtccaaatgatatagactgtaaatgtcacagcagtggtgaaagactgctcggtcatgagcaccgacagtaactcactggcacgtgaatttctgaccgatgtcaaccggctttgcaatgcagtggtccagagggtggaggccagggaggaagaagaggaggagacgcacatggcaacccttggacagtaccttgtccatggtcgaggatttctattacttaccaagctaaattctataattgatcagtagagatggggtttcaccgtgttgaccagctgatcttaaactcctgacctcaagcagtctacccccgttggcctcccaaagtgctgggattacaggtgtgagccactgcacccagccaagtttatgtatttttattctttttcatgaatgtgatttgttaaatgagtgattaaatataatttttatatatttgtatgacttttctgtaaataaaatttaaaatcagaaaaaatc

SEQ ID NO: 330105 - DNA, 794 bp, Homo sapiens
gagagagggccactcgccttcctggtgacacagagatttcctagccccgttaccaaacgaaaaagcaacgcaagggcttctaagaagccatcccaatgaccttttggctttgagaagagcagtcctcataccagagtgtttggggttttggcctctttcagtgtttattcattcttacgtgggaaagttgtattccgaggtttctgtggtgcatgaagcttttgccttcaccatctgttcccgtgtcttcctcgggtgacatcagagtacagcagtattttcccttgccatctaatggggtttgggctgtttgactcaaccgtgtgtgttcctcaatgccaggggaataatcctaccctaagtcagctgaacagaagccaggatctaactgcaaacaagagacccagcttgcttaacagcatggaagagaccagtttcgttgcagctacctgggaagacggttgctaattagcctgcaacaaagagttccttgctcatctaaaagaggcaatcaccgttcaggtcataagaccttcattccagaggcatcctgccctgtatccgggaagaaggaatgctgcacacagatgccgagaagaatcggaacagacaggcattgctggatcccccctcggtctattaccacgagatcaaactctttgtccaatcacatgtctacagtgctgtccattcttcattgaatctaagcagaaaaatgggcagttttccctgggtcttccggtcttcatttctgaagtcttccatgttacataaaacttttttttttttttttt

SEQ ID NO: 330106 - DNA, 794 bp, Homo sapiens
  misc_feature (332)..(332): n is a, c, g, or t
aaaaatagtaataaatgggggcgaggtgactatagctattatttataattttgaatttaaaaccgccgcaaagagataattacgattaagcacctaactgaaaagtgacaaaccgacggaaatataaaatgatgaatttgcggcattattatttacgttgatactattaagccaactctaaaataataaaataacgatataaatatctgttctatgctagaaagataataaatacgaaattgaatatgaagatgaataatgatatgggaatcttggtgtagtatgttctctcacgtgattttatttgtatttttttccgatgcggtatattntttttttttatgccttactctcagttttgtttattcacaagccttacataggtagagtatgagcattaaaaaaatactttgtagaaactaatggattgatgttacagaatggaagattatacatgttaaatttttactctcagcaaattgggagaaaactatatccacccatttttttttttaggttgttgaactcagtagctgtgaagaaactcaagcattagcactgcgagttatactctcattaattaaatacaaccaacaaagagtacatgaattagaaaattgtaatggactttctatgattcatcaggtgttgatcaaacaaaaatgcattgttgggttttacattttgaaggtatgtcttcataaaatttattcttatagtttcatatgcagtgatactcatctcgtcatcaaagtcttccaataatagtttgtatttcagttattcctgaagaa

SEQ ID NO: 330107 - DNA, 569 bp, Homo sapiens
gagagagggccactcgccttcctggtgacacagagatttcctagccccgttaccaaacgaaaaagcaacgcaagggcttctaagaagccatcccaatgaccttttggctttgagaagagcagtcctcataccagagtgtttggggttttggcctctttcagtgtttattcattcttacgtgggaaagttgtattccgaggtttctgtggtgcatgaagcttttgccttcaccatctgttcccgtgtcttcctcgggtgacatcagagtacagcagtattttcccttgccatctaatggggtttgggctgtttgactcaaccgtgtgtgttcctcaatgccaggggaataatcctaccctaagtcagctgaacagaagccaggatctaactgcaaacaagagacccagcttgcttaacagcatggaagagaccagtttcgttgcagctacctgggaagacggttgctaattagcctgcaacaaagagttccttgctcatctaaaagaggcaatcaccgttcagcttctggcgaccaccattctgtttcctgtctgtgcgaatttggctat

SEQ ID NO: 330108 - DNA, 711 bp, Homo sapiens
gcggccgcgtcgacgcggcggcggcagcggcgtcggctcggggttctccgggagagggggagtgcgcggcggccgcagctgccacaaaccaggtgaagctttgttctaagaatatttgtttcatctagtttatgagtccaaatgatatagactgtaaatgtcacagcagtggtgaaagactgctcggtcatgagcaccgacagtaactcactggcacgtgaatttctgaccgatgtcaaccggctttgcaatgcagtggtccagagggtggaggccagggaggaagaagaggaggagacgcacatggcaacccttggacagtaccttgtccatggtcgaggatttctattacttaccaagctaaattctataattgatcaggtaacatttttatatcaaatacttactttcatcaatatatgatagttaactgtagctacatggttttggattacatagtttctgaagcctccttgagataaagtccagtctttcacattattccactaaaaaaaaagtggacctatttataaccatattgtttatttgaatactttcaaaacgtctgaaatatcttagaattatgaattgcctaagaactaaatggtttcatatatactatgctttttatcgtaatatcagtgagataactatggttcttagtagaaatataagacataatcttatatccctgtatcttatgtcagaaac

SEQ ID NO: 330109 - DNA, 365 bp, Homo sapiens
gtgcagtggtgcaatctcggctgactgcaacctccacctccgggttcaagtgattcttgtgtctcagccacctaagtagccgggactacaagtgtgcatcaccacacccagtgaatttttgtattttcagttagagatggggtttcaccgtgttgaccagctgatcttaaactcctgacctcaagcagtctacccccgttggcctcccaaagtgctgggattacaggtgtgagccactgcacccagccaagtttatgtatttttattctttttcatgaatgtgatttgttaaatgagtgattaaatataatttttatatatttgtatgacttttctgtaaataaaatttaaaatcagaaaaaatc

SEQ ID NO: 330110 - DNA, 14402 bp, Homo sapiens
  misc_feature (2724)..(2724): n is a, c, g, or t
gagagagggccactcgccttcctggtgacacagagatttcctagccccgttaccaaacgaaaaagcaacgcaagggcttctaagaagccatcccaatgaccttttggctttgagaagagcagtcctcataccagagtgtttggggttttggcctctttcagtgtttattcattcttacgtgggaaagttgtattccgaggtttctgtggtgcatgaagcttttgccttcaccatctgttcccgtgtcttcctcgggtgacatcagagtacagcagtattttcccttgccatctaatggggtttgggctgtttgactcaaccgtgtgtgttcctcaatgccaggggaataatcctaccctaagtcagctgaacagaagccaggatctaactgcaaacaagagacccagcttgcttaacagcatggaagagaccagtttcgttgcagctacctgggaagacggttgctaattagcctgcaacaaagagttccttgctcatctaaaagaggcaatcaccgttcaggtgaagctttgttctaagaatatttgtttcatctagtttatgagtccaaatgatatagactgtaaatgtcacagcagtggtgaaagactgctcggtcatgagcaccgacagtaactcactggcacgtgaatttctgaccgatgtcaaccggctttgcaatgcagtggtccagagggtggaggccagggaggaagaagaggaggagacgcacatggcaacccttggacagtaccttgtccatggtcgaggatttctattacttaccaagctaaattctataattgatcaggcattgacatgtagagaagaactcctgactcttcttctgtctctccttccactggtatggaagatacctgtccaagaagaaaaggcaacagattttaacctaccgctctcagcagatataatcctgaccaaagaaaagaactcaagttcacaaagatccactcaggaaaaattacatttagaaggaagtgccctgtctagtcaggtttctgcaaaagtaaatgtttttcgaaaaagcagacgacagcgtaaaattacccatcgctattctgtaagagatgcaagaaagacacagctctccacctcagattcagaagccaattcagatgaaaaaggcatagcaatgaataagcatagaaggccccatctgctgcatcattttttaacatcgtttcctaaacaagaccaccccaaagctaaacttgaccgcttagcaaccaaagaacagactcctccagatgctatggctttggaaaattccagagagattattccaagacaggggtcaaacactgacattttaagtgagccagctgccttgtctgttatcagtaacatgaacaattctccatttgacttatgtcatgttttgttatctttattagaaaaagtttgtaagtttgacgttaccttgaatcataattctcctttagcagccagtgtagtgcccacactaactgaattcctagcaggctttggggactgctgcagtctgagcgacaacttggagagtcgagtagtttctgcaggttggaccgaagaaccggtggctttgattcaaaggatgctctttcgaacagtgttgcatcttctgtcagtagatgttagtactgcagagatgatgccagaaaatcttaggaaaaatttaactgaattgcttagagcagctttaaaaattagaatatgcctagaaaagcagcctgacccttttgcaccaagacaaaagaaaacactgcaggaggttcaggaagattttgtgttttcaaagtatcgtcatagagcccttcttttacctgagcttttggaaggagttcttcagattctgatctgttgtcttcaaagtgcagcttcaaatcccttctacttcagtcaagccatggatttggttcaagaattcattcagcatcatggatttaatttatttgaaacagcagttcttcaaatggaatggctggttttaagagatggagttcctcccgaggcctcagagcatttgaaagccctaataaatagtgtgatgaaaataatgagcactgtcaaaaaagtgaaatcagagcaacttcatcattcgatgtgtacaagaaaaaggcacagacgatgtgaatattctcattttatgcatcatcaccgagatctctcaggtcttctggtttcggcttttaaaaaccaggtttccaaaaacccatttgaagagactgcagatggagatgtttattatcctgagcggtgctgttgcattgcagtgtgtgcccatcagtgcttgcgcttactacagcaggcttccttgagcagcacttgtgtccagatcctatcgggtgttcataacattggaatatgctgttgtatggatcccaaatctgtaatcattcctttgctccatgcttttaaattgccagcactgaaaaattttcagcagcatatattgaatatccttaacaaacttattttggatcagttaggaggagcagagatatcaccaaaaattaaaaaagcagcttgtaatatttgtactgttgactctgaccaactagcccaattagaagagacactgcagggaaacttatgtgatgctgaactctcctcaagtttatccagtccttcttacagatttcaagggatcctgcccagcagtggatctgaagatttgttgtggaaatgggatgctttaaaggcttatcagaactttgtttttgnagaagacagattacatagtatacagattgcaaatcacatttgcaatttaatccagaaaggcaatatagttgttcagtggaaattatataattacatatttaatcctgtgctccaaagaggagttgaattagcacatcattgtcaacacctaagcgttacttcagctcaaagtcatgtatgtagccatcataaccagtgcttgcctcaggacgtgcttcagatttatgtaaaaactctgcctatcctgcttaaatccagggtaataagagatttgtttttgagttgtaatggagtaagtcaaataatcgaattaaattgcttaaatggtattcgaagtcattctctaaaagcatttgaaactctgataatcagcctaggggagcaacagaaagatgcctcagttccagatattgatgggatagacattgaacagaaggagttgtcctctgtacatgtgggtacttcttttcatcatcagcaagcttattcagattctcctcagagtctcagcaaattttatgctggcctcaaagaagcttatccaaagagacggaagactgttaaccaagatgttcatatcaacacaataaacctattcctctgtgtggcttttttatgcgtaagtaaagaagcagagtctgacagggagtcggccaatgactcagaagatacttctggctatgacagcacagccagcgagcctttaagtcatatgctgccatgtatatctctcgagagccttgtcttgccttctcctgaacatatgcaccaagcagcagacatttggtctatgtgtcgttggatctacatgttgagttcagtgttccagaaacagttttataggcttggtggtttccgagtatgccataagttaatatttatgataatacagaaactgttcagaagtcacaaagaggagcaaggaaaaaaggagggagatacaagtgtaaatgaaaaccaggatttaaacagaatttctcaacctaagagaactatgaaggaagatttattatctttggctataaaaagtgaccccataccatcagaactaggtagtctaaaaaagagtgctgacagtttaggtaaattagagttacagcatatttcttccataaatgtggaagaagtttcagctactgaagccgctcccgaggaagcaaagctatttacaagtcaagaaagtgagacctcacttcaaagtatacgacttttggaagcccttctggccatttgtcttcatggtgccagaactagtcaacagaagatggaattggagttacctaatcagaacttgtctgtggaaagtatattatttgaaatgagggaccatctttcccagtcaaaggtgattgaaacacaactagcaaagcctttatttgatgccctgcttcgagttgccctcgggaattattcagcagattttgaacataatgatgctatgactgagaagagtcatcaatctgcagaagaattgtcatcccagcctggtgatttttcagaagaagctgaggattctcagtgttgtagttttaaacttttagttgaagaagaaggttacgaagcagatagtgaaagcaatcctgaagatggcgaaacccaggatgatggggtagacttaaagtctgaaacagaaggtttcagtgcatcaagcagtccaaatgacttactcgaaaacctcactcaaggggaaataatttatcctgagatttgtatgctggaattaaatttgctttctgctagtaaagccaaacttgatgtgcttgcccatgtatttgagagttttttgaaaattattaggcagaaagaaaagaatgtttttctgctcatgcaacagggaactgtgaaaaatcttttaggagggttcttgagtattttaacacaggatgattctgattttcaagcatgccagagagtattggtggatcttttggtatctttgatgagttcaagaacatgttcagaagagctaacccttcttttgagaatatttctggagaaatctccttgtacaaaaattcttcttctgggtattctgaaaattattgaaagtgatactactatgagcccttcacagtatctaaccttccctttactgcacgctccaaatttaagcaacggtgtttcatcacaaaagtatcctgggattttaaacagtaaggccatgggtttattgagaagagcacgagtttcacggagcaagaaagaggctgatagagagagttttccccatcggctgctttcatcttggcacatagccccagtccacctgccgttgctggggcaaaactgctggccacacctatcagaaggtttcagtgtttccctgtggtttaatgtggagtgtatccatgaagctgagagtactacagaaaaaggaaagaagataaagaaaagaaacaaatcattaattttaccagatagcagttttgatggtacagagagcgacagaccagaaggtgcagagtacataaatcctggtgaaagactcatagaagaaggatgtattcatataatttcactgggatccaaagcgttgatgatccaagtgtgggctgatccccacaatgccactcttatctttcgtgtgtgcatggattcaaatgatgacatgaaagctgttttactagcacaggttgaatcacaggagaatattttcctcccaagcaaatggcaacatttagtactcacctacttacagcagccccaagggaaaaggaggattcatgggaaaatctccatatgggtctctggacagaggaagcctgatgttactttggattttatgcttccaagaaaaacaagtttgtcatctgatagcaataaaacattttgcatgattggccattgtttatcatcccaagaagagtttttgcagttggctggaaaatgggacctgggaaatttgcttctcttcaacggagctaaggttggttcacaagaggccttttatctgtatgcttgtggacccaaccatacatctgtaatgccatgtaagtatggcaagccagtcaatgactactccaaatatattaataaagaaattttgcgatgtgaacaaatcagagaactttttatgaccaagaaagatgtggatattggtctcttaattgaaagtctttcagttgtttatacaacttactgtcctgctcagtataccatctatgaaccagtgattagacttaaaggtcaaatgaaaacccaactctctcaaagacccttcagctcaaaagaagttcagagcatcttattagaacctcatcatctaaagaatctccaacctactgaatataaaactattcaaggcattctgcacgaaattggtggaactggcatatttgtttttctctttgccagggttgttgaactcagtagctgtgaagaaactcaagcattagcactgcgagttatactctcattaattaaatacaaccaacaaagagtacatgaattagaaaattgtaatggactttctatgattcatcaggtgttgatcaaacaaaaatgcattgttgggttttacattttgaagacccttcttgaaggatgctgtggtgaagatattatttatatgaatgagaatggagagtttaagttggatgtagactctaatgctataatccaagatgttaagctgttagaggaactattgcttgactggaagatatggagtaaagcagagcaaggtgtttgggaaactttgctagcagctctagaagtcctcatcagagcagatcaccaccagcagatgtttaatattaagcagttattgaaagctcaagtggttcatcactttctactgacttgtcaggttttgcaggaatacaaagaggggcaactcacacccatgccccgagagatggcaagatctttcaggagaaagtgcggtcaatcatgtacctgaggcattccagcagtggaggaaggtcccttatgagccctggatttatggtaataagcccatctggttttactgcttcaccatatgaaggagagaattcctctaatattattccacaacagatggccgcccatatgctgcgttctagaagcctaccagcattccctacttcttcactactaacgcaatcacaaaaactgactggaagtttgggttgtagtatcgacaggttacaaaatattgcagatacttatgttgccacccaatcaaagaaacaaaattctttggggagttccgacacactgaaaaaaggcaaagaggacgcattcatcagtagctgtgagtctgcaaaaactgtttgtgaaatggaagctgtcctctcagcccaggtctctgtcagtgatgtcccaaagggagtgctgggatttccagtggtcaaagcagatcataaacagttgggagcagaacccaggtcagaagatgacagtcctggggatgagtcctgcccacgccgacctgattacctaaagggattggcctccttccagcgaagccacagcactattgcaagccttgggctagcttttccttcacagaacggatctgcagctgttggccgttggccaagtcttgttgatagaaacactgatgattgggaaaatgtaactgaagactgtttggtacctatatgctgtggattatatgaactcctaagtggggttcttcttatcctgcctgatgttttgcttgaagatgtgatggacaagcttattcaagcagatacacttttggtcctcgttaaccacccatcaccagctatacaacaaggtgttattaaactattagatgcatattttgctagagcatctaaggaacaaaaagataaatttctgaagaatcgtggattttccttgctagccaaccagttgtatcttcatcgaggaactcaagaattgttagaatgcttcatcgaaatgttctttggtcgacatattggccttgatgaagaatttgatctggaagatgtgagaaacatgggattgtttcagaagtggtctgtcattcctattctgggactaatagagacctctctatatgacaacatactcttgcataatgctcttttacttcttctccaaattttaaattcttgttctaaggtagcagatatgttgctggataatggtctactctatgtgttatgtaatacagtagcagccctgaatggattagaaaagaacattcccatgagtgaatataaattgcttgcttgtgatatacagcaacttttcatagcagttacaattcatgcttgcagttcctcaggctcacaatattttagggttattgaagaccttattgtaatgcttggatatcttcaaaatagcaaaaacaagaggacacaaaatatggctgttgcactacagcttagagttctccaggctgctatggaatttataaggaccaccgcaaatcatgactctgaaaacctcacagattcactccagtcaccttctgctccccatcatgcagtagttcaaaagcggaaaagcattgctggtcctcgaaaatttccccttgctcaaactgaatcgcttctgatgaaaatgcgttcagtggcaaatgatgagcttcatgtgatgatgcaacggagaatgagccaagagaaccctagccaagcaactgaaacggaacttgcgcagagactacagaggctcactgttttagcagtcaacaggattatttatcaagaatttaattcagacattattgacattttgagaactccagaaaatgtaactcaaagcaagacctcagttttccagaccgaaatttctgaggaaaatattcatcatgaacagtcttctgttttcaatccatttcagaaagaaatttttacatatctggtagaaggattcaaagtatctattggttcaagtaaagccagtggttccaagcagcaatggactaaaattctgtggtcttgtaaggagaccttccgaatgcagcttgggagactactagtgcatattttgtcgccagcccacgctgcacaagagagaaagcaaatttttgaaatagttcatgaaccaaatcatcaggaaatactacgagactgtctcagcccatccctacaacatggagccaagttagttttgtatttgtcagagttgatacataatcaccaaggtgaattgactgaagaagagctaggcacagcagaactgcttatgaatgctttgaagttatgtggtcacaagtgcatccctcccagtgcatcaacaaaagcagaccttattaaaatgatcaaagaggaacaaaagaaatatgaaactgaagaaggagtgaataaagctgcttggcagaaaacagttaacaataatcaacaaagtctctttcagcgtctggattcaaaatcaaaggatatatctaaaatagctgcagatatcacccaggcagtgtctctctcccaaggaaatgagagaaaaaaggtgatccagcatattagaggaatgtataaagtagatttgagtgccagcagacattggcaggaacttattcagcagctgacacatgatagagcagtatggtatgaccccatctactatccaacctcatggcagttggatccaacagaagggccaaatcgagagaggagacgtttacagagatgttatttaactattccaaataagtatctccttagggatagacagaaatcagaagatgttgtcaaaccaccactctcttacctgtttgaagacaaaactcattcttctttctcttctactgtcaaagacaaagctgcaagtgaatctataagagtgaatcgaagatgcatcagtgttgcaccatctagagagacagctggtgaattgttactaggtaaatgtggaatgtattttgtggaagataatgcttctgatacagttgaaagttcgagccttcagggagagttggaaccagcatcattttcctggacatatgaagaaattaaagaagttcacaagcgttggtggcaattgagagataatgctgtagaaatctttctaacaaatggcagaacactcctgttggcatttgataacaccaaggttcgtgatgatgtataccacaatatactcacaaataacctccctaatcttctggaatatggtaacatcaccgctctgacaaatttatggtatactgggcaaattactaattttgaatatttgactcacttaaacaaacatgctggccgatccttcaatgatctcatgcagtatcctgtgttcccatttatacttgctgactacgttagtgagacacttgacctcaatgatctgttgatatacagaaatctctctaaacctatagctgttcagtataaagaaaaagaagatcgttatgtggacacatacaagtacttggaggaagagtaccgcaaaggagccagagaagatgaccccatgcctcccgtgcagccctatcactatggctcccactattccaatagcggcactgtgcttcacttcctggtcaggatgcctcctttcactaaaatgtttttagcctatcaagatcaaagttttgacattccagacagaacttttcattctacaaatacaacttggcgactctcatcttttgaatctatgactgatgtgaaagaacttatcccagagtttttctatcttccagagttcctagttaaccgtgaaggttttgattttggtgtgcgtcagaatggtgaacgggttaatcacgtcaaccttcccccttgggcgcgtaatgatcctcgtctttttatcctcatccatcggcaggctctagagtctgactacgtgtcgcagaacatctgtcagtggattgacttggtgtttgggtataagcaaaaggggaaggcttctgttcaagcgatcaatgtttttcatcctgctacatattttggaatggatgtctctgcagttgaagatccagttcagagacgagcgctagaaaccatgataaaaacctacgggcagactccccgtcagctgttccacatggcccatgtgagcagacctggagccaagctcaatattgaaggagagcttccagctgctgtggggttgctagtgcagtttgctttcagggagacccgagaacaggtcaaagaaatcacctatccgagtcctttgtcatggataaaaggcttgaaatggggggaatacgtgggttcccccagtgctccagtacctgtggtctgcttcagccagccccacggagaaagatttggctctctccaggctctgcccaccagagcaatctgtggtttgtcacggaatttctgtcttctgatgacatatagcaaggaacaaggtgtgagaagcatgaacagtacggacattcagtggtcagccatcctgagctggggatatgctgataatattttaaggttgaagagtaaacaaagtgagcctccagtaaactttattcaaagttcacaacagtaccaggtgactagttgtgcttgggtgcctgacagttgccagctgtttactggaagcaaatgcggtgtcatcacagcctacacaaacagatttacaagcagcacgccatcagaaatagaaatggagactcaaatacatctctatggtcacacagaagagataaccagcttatttgtttgcaaaccatacagtatactgataagtgtgagcagagacggaacctgcatcatatgggatttaaacaggttatgctatgtacaaagtctggcgggacacaaaagccctgtcacagctgtctctgccagtgaaacctcaggtgatattgctactgtgtgtgattcagctggcggaggcagtgacctcagactctggacggtgaacggggatctcgttggacatgtccactgcagggagatcatctgttccgtggctttctccaaccagcctgagggagtatctatcaatgtaatcgctgggggattagaaaatggaattgtaaggttatggagcacatgggacttaaagcctgtgagagaaattacatttcccaaatcaaataagcccatcatcagccttacattttcttgtgatggccaccatttgtacacagcaaacagtgatgggaccgtgattgcctggtgtcggaaggaccagcagcgcttgaaacagccaatgttctattccttccttagcagctatgcagccgggtgaatgcgaatgaacttcacgttctccaaagcactttaactccaaactagatttgttgacttcaccagttttaggaggttgaacctaaagaaatggatgactggacaaaccatccaaataatgataaagtctattcatctgcacaaaattctgaagagtcacatgatcctaagaggaaagttctgttctattttagtgataatctggaagattgtgtcaatatgcactagccaacaagttttaagcctcgcatggtacattaaaatgatattcttaaaattttttcccaccaaggtattccaaagaaaatattaaggtctcccctttttctatgattccaaaaggaccagtagaatttaaattggttggttgattgtttatataaaacacactaaaattatattttaaaagtttactgccatgaaatactcctcccaccacacacacatgctccaaaagaggaaagaaaaaaagataatttttaggacttgataattgctttctttgagaagcaaattattcagtaggtgcctctgtaccaaatattttatggaatatctaaatactaaaataaactatgaatgaatctcaaaattaggcagtttttgccagttgctttcttagctcaaaggagaaccagaatttttttgacagccacaaacaagaatacaggtatcttggatttcagacacattctgtttcttcataaaaattttacttaaaatctgtaacgctagatattgactatccttagttgagtcactgaggtttaaacacaatggtaagtcttaaagtctgctatttacagagcattgaatctgtaccaatttgcaatagaaagccttcagtatgcaagaagtttgcatgggtattaagaacacagcctaaataaggcatttgatctaatctgcaggaagaattttcttccccaaaacagaattataaaagcttactttaaacaggaggcagaataattcttttaggaaaccatttcattctgtttctactaacctataccatctgagaattctaggaagaataataaaatctcgtgtattccacagcaaacttacataccataaagacagaattcctaaacatcttggagccgtctgtctctcccatatgatggctgtctgtatatttttacttggggtgctgctttattggctttgaaaacactgtcagataagctcagtaatatgttaccatgggataaaaatatgtatccctgcctaagaataacttgtgcatttgttatggaaatttaattcatatggtgtttacagtactacttttgtaacttccagactttctaaaacattctgcttaaaaaccatataaaatataattccaaagtctctgctgtcaagatagattcgagagaaagcacgtggccatgtatgctttaaccttaaactgcatacacatgtagtgatacctaggctgcatttagatcaccgtgtgctcaggccaggtgtgaatcctgaggtccatggaggtgcagagatgagattactcctattcacgttgaagtgatttgctttgttaacaaaaaattgcagctattgtctagctttcatttttttactgagaactttaaattagtcccctattagaatagggttgctactcatctttttttaaaaaccgaatttcatcatttatctaaagagaaaatatgcagaataactggtcttgttaagagtgcaatattatatttttatgtaaaaataaaaattaatttggggggattatttattcagcatgaaacctaatatgtatatgtttgaaatacttcataatgtgcatgttgtagcaaacatttctgtaaattatcacaagctctgttacctttatatacactgcctcttcaatttggaaataaatttcataaaaatagaaaaaaaaaaaaacaaaaaacaaaaaaaaaaaatgtgtgcgcggcgcgcgccctgggcccccgcgagaagaggccttcttaagcaccctggggtgggggcgcgcggaggagccccacagataggtgaaaaagggacacaaatgggccacaaacgcgcggcaccccgaaggcgaaactcgcgcgacacgacaaccagagggcagcggacatcatccaccaataaaaaacacagccccgggggggaaacacggagacgcgtctgcacacaaaacactcacgacaggagagtcacgaagagagggcaacacaagcgcgggaactaactacacaacaggggaagcacaaaaagaagaaagccgagaaattcaacaaattaaacgcccgtaagcactcgtggataacaagaaaagacacagaagaagagaaaagaaaaaccagaagaacaaacaagacaacacacaagccaaaaacacgcagcaacaagaaagcgaaaggcagacggagcggagagcagcagaggacagagagtgaacggaagagacgaggagcgaagagagggggagggaggacggcgggagccgacagcaaggcccgcggagcgagagggggggacagacaagaagaaaggaagcagagagaagggacgagagacgagaggcaagagcgcgcggaggagcaggagcagacggggagc

SEQ ID NO: 330111 - DNA, 14348 bp, Homo sapiens
  misc_feature (2724)..(2724): n is a, c, g, or t
gagagagggccactcgccttcctggtgacacagagatttcctagccccgttaccaaacgaaaaagcaacgcaagggcttctaagaagccatcccaatgaccttttggctttgagaagagcagtcctcataccagagtgtttggggttttggcctctttcagtgtttattcattcttacgtgggaaagttgtattccgaggtttctgtggtgcatgaagcttttgccttcaccatctgttcccgtgtcttcctcgggtgacatcagagtacagcagtattttcccttgccatctaatggggtttgggctgtttgactcaaccgtgtgtgttcctcaatgccaggggaataatcctaccctaagtcagctgaacagaagccaggatctaactgcaaacaagagacccagcttgcttaacagcatggaagagaccagtttcgttgcagctacctgggaagacggttgctaattagcctgcaacaaagagttccttgctcatctaaaagaggcaatcaccgttcaggtgaagctttgttctaagaatatttgtttcatctagtttatgagtccaaatgatatagactgtaaatgtcacagcagtggtgaaagactgctcggtcatgagcaccgacagtaactcactggcacgtgaatttctgaccgatgtcaaccggctttgcaatgcagtggtccagagggtggaggccagggaggaagaagaggaggagacgcacatggcaacccttggacagtaccttgtccatggtcgaggatttctattacttaccaagctaaattctataattgatcaggcattgacatgtagagaagaactcctgactcttcttctgtctctccttccactggtatggaagatacctgtccaagaagaaaaggcaacagattttaacctaccgctctcagcagatataatcctgaccaaagaaaagaactcaagttcacaaagatccactcaggaaaaattacatttagaaggaagtgccctgtctagtcaggtttctgcaaaagtaaatgtttttcgaaaaagcagacgacagcgtaaaattacccatcgctattctgtaagagatgcaagaaagacacagctctccacctcagattcagaagccaattcagatgaaaaaggcatagcaatgaataagcatagaaggccccatctgctgcatcattttttaacatcgtttcctaaacaagaccaccccaaagctaaacttgaccgcttagcaaccaaagaacagactcctccagatgctatggctttggaaaattccagagagattattccaagacaggggtcaaacactgacattttaagtgagccagctgccttgtctgttatcagtaacatgaacaattctccatttgacttatgtcatgttttgttatctttattagaaaaagtttgtaagtttgacgttaccttgaatcataattctcctttagcagccagtgtagtgcccacactaactgaattcctagcaggctttggggactgctgcagtctgagcgacaacttggagagtcgagtagtttctgcaggttggaccgaagaaccggtggctttgattcaaaggatgctctttcgaacagtgttgcatcttctgtcagtagatgttagtactgcagagatgatgccagaaaatcttaggaaaaatttaactgaattgcttagagcagctttaaaaattagaatatgcctagaaaagcagcctgacccttttgcaccaagacaaaagaaaacactgcaggaggttcaggaagattttgtgttttcaaagtatcgtcatagagcccttcttttacctgagcttttggaaggagttcttcagattctgatctgttgtcttcaaagtgcagcttcaaatcccttctacttcagtcaagccatggatttggttcaagaattcattcagcatcatggatttaatttatttgaaacagcagttcttcaaatggaatggctggttttaagagatggagttcctcccgaggcctcagagcatttgaaagccctaataaatagtgtgatgaaaataatgagcactgtcaaaaaagtgaaatcagagcaacttcatcattcgatgtgtacaagaaaaaggcacagacgatgtgaatattctcattttatgcatcatcaccgagatctctcaggtcttctggtttcggcttttaaaaaccaggtttccaaaaacccatttgaagagactgcagatggagatgtttattatcctgagcggtgctgttgcattgcagtgtgtgcccatcagtgcttgcgcttactacagcaggcttccttgagcagcacttgtgtccagatcctatcgggtgttcataacattggaatatgctgttgtatggatcccaaatctgtaatcattcctttgctccatgcttttaaattgccagcactgaaaaattttcagcagcatatattgaatatccttaacaaacttattttggatcagttaggaggagcagagatatcaccaaaaattaaaaaagcagcttgtaatatttgtactgttgactctgaccaactagcccaattagaagagacactgcagggaaacttatgtgatgctgaactctcctcaagtttatccagtccttcttacagatttcaagggatcctgcccagcagtggatctgaagatttgttgtggaaatgggatgctttaaaggcttatcagaactttgtttttgnagaagacagattacatagtatacagattgcaaatcacatttgcaatttaatccagaaaggcaatatagttgttcagtggaaattatataattacatatttaatcctgtgctccaaagaggagttgaattagcacatcattgtcaacacctaagcgttacttcagctcaaagtcatgtatgtagccatcataaccagtgcttgcctcaggacgtgcttcagatttatgtaaaaactctgcctatcctgcttaaatccagggtaataagagatttgtttttgagttgtaatggagtaagtcaaataatcgaattaaattgcttaaatggtattcgaagtcattctctaaaagcatttgaaactctgataatcagcctaggggagcaacagaaagatgcctcagttccagatattgatgggatagacattgaacagaaggagttgtcctctgtacatgtgggtacttcttttcatcatcagcaagcttattcagattctcctcagagtctcagcaaattttatgctggcctcaaagaagcttatccaaagagacggaagactgttaaccaagatgttcatatcaacacaataaacctattcctctgtgtggcttttttatgcgtaagtaaagaagcagagtctgacagggagtcggccaatgactcagaagatacttctggctatgacagcacagccagcgagcctttaagtcatatgctgccatgtatatctctcgagagccttgtcttgccttctcctgaacatatgcaccaagcagcagacatttggtctatgtgtcgttggatctacatgttgagttcagtgttccagaaacagttttataggcttggtggtttccgagtatgccataagttaatatttatgataatacagaaactgttcagaagtcacaaagaggagcaaggaaaaaaggagggagatacaagtgtaaatgaaaaccaggatttaaacagaatttctcaacctaagagaactatgaaggaagatttattatctttggctataaaaagtgaccccataccatcagaactaggtagtctaaaaaagagtgctgacagtttaggtaaattagagttacagcatatttcttccataaatgtggaagaagtttcagctactgaagccgctcccgaggaagcaaagctatttacaagtcaagaaagtgagacctcacttcaaagtatacgacttttggaagcccttctggccatttgtcttcatggtgccagaactagtcaacagaagatggaattggagttacctaatcagaacttgtctgtggaaagtatattatttgaaatgagggaccatctttcccagtcaaaggtgattgaaacacaactagcaaagcctttatttgatgccctgcttcgagttgccctcgggaattattcagcagattttgaacataatgatgctatgactgagaagagtcatcaatctgcagaagaattgtcatcccagcctggtgatttttcagaagaagctgaggattctcagtgttgtagttttaaacttttagttgaagaagaaggttacgaagcagatagtgaaagcaatcctgaagatggcgaaacccaggatgatggggtagacttaaagtctgaaacagaaggtttcagtgcatcaagcagtccaaatgacttactcgaaaacctcactcaaggggaaataatttatcctgagatttgtatgctggaattaaatttgctttctgctagtaaagccaaacttgatgtgcttgcccatgtatttgagagttttttgaaaattattaggcagaaagaaaagaatgtttttctgctcatgcaacagggaactgtgaaaaatcttttaggagggttcttgagtattttaacacaggatgattctgattttcaagcatgccagagagtattggtggatcttttggtatctttgatgagttcaagaacatgttcagaagagctaacccttcttttgagaatatttctggagaaatctccttgtacaaaaattcttcttctgggtattctgaaaattattgaaagtgatactactatgagcccttcacagtatctaaccttccctttactgcacgctccaaatttaagcaacggtgtttcatcacaaaagtatcctgggattttaaacagtaaggccatgggtttattgagaagagcacgagtttcacggagcaagaaagaggctgatagagagagttttccccatcggctgctttcatcttggcacatagccccagtccacctgccgttgctggggcaaaactgctggccacacctatcagaaggtttcagtgtttccctgtggtttaatgtggagtgtatccatgaagctgagagtactacagaaaaaggaaagaagataaagaaaagaaacaaatcattaattttaccagatagcagttttgatggtacagagagcgacagaccagaaggtgcagagtacataaatcctggtgaaagactcatagaagaaggatgtattcatataatttcactgggatccaaagcgttgatgatccaagtgtgggctgatccccacaatgccactcttatctttcgtgtgtgcatggattcaaatgatgacatgaaagctgttttactagcacaggttgaatcacaggagaatattttcctcccaagcaaatggcaacatttagtactcacctacttacagcagccccaagggaaaaggaggattcatgggaaaatctccatatgggtctctggacagaggaagcctgatgttactttggattttatgcttccaagaaaaacaagtttgtcatctgatagcaataaaacattttgcatgattggccattgtttatcatcccaagaagagtttttgcagttggctggaaaatgggacctgggaaatttgcttctcttcaacggagctaaggttggttcacaagaggccttttatctgtatgcttgtggacccaaccatacatctgtaatgccatgtaagtatggcaagccagtcaatgactactccaaatatattaataaagaaattttgcgatgtgaacaaatcagagaactttttatgaccaagaaagatgtggatattggtctcttaattgaaagtctttcagttgtttatacaacttactgtcctgctcagtataccatctatgaaccagtgattagacttaaaggtcaaatgaaaacccaactctctcaaagacccttcagctcaaaagaagttcagagcatcttattagaacctcatcatctaaagaatctccaacctactgaatataaaactattcaaggcattctgcacgaaattggtggaactggcatatttgtttttctctttgccagggttgttgaactcagtagctgtgaagaaactcaagcattagcactgcgagttatactctcattaattaaatacaaccaacaaagagtacatgaattagaaaattgtaatggactttctatgattcatcaggtgttgatcaaacaaaaatgcattgttgggttttacattttgaagacccttcttgaaggatgctgtggtgaagatattatttatatgaatgagaatggagagtttaagttggatgtagactctaatgctataatccaagatgttaagctgttagaggaactattgcttgactggaagatatggagtaaagcagagcaaggtgtttgggaaactttgctagcagctctagaagtcctcatcagagcagatcaccaccagcagatgtttaatattaagcagttattgaaagctcaagtggttcatcactttctactgacttgtcaggttttgcaggaatacaaagaggggcaactcacacccatgccccgagagatggcaagatctttcaggagaaagtgcggtcaatcatgtacctgaggcattccagcagtggaggaaggtcccttatgagccctggatttatggtaataagcccatctggttttactgcttcaccatatgaaggagagaattcctctaatattattccacaacagatggccgcccatatgctgcgttctagaagcctaccagcattccctacttcttcactactaacgcaatcacaaaaactgactggaagtttgggttgtagtatcgacaggttacaaaatattgcagatacttatgttgccacccaatcaaagaaacaaaattctttggggagttccgacacactgaaaaaaggcaaagaggacgcattcatcagtagctgtgagtctgcaaaaactgtttgtgaaatggaagctgtcctctcagcccaggtctctgtcagtgatgtcccaaagggagtgctgggatttccagtggtcaaagcagatcataaacagttgggagcagaacccaggtcagaagatgacagtcctggggatgagtcctgcccacgccgacctgattacctaaagggattggcctccttccagcgaagccacagcactattgcaagccttgggctagcttttccttcacagaacggatctgcagctgttggccgttggccaagtcttgttgatagaaacactgatgattgggaaaatgtaactgaagactgtttggtacctatatgctgtggattatatgaactcctaagtggggttcttcttatcctgcctgatgttttgcttgaagatgtgatggacaagcttattcaagcagatacacttttggtcctcgttaaccacccatcaccagctatacaacaaggtgttattaaactattagatgcatattttgctagagcatctaaggaacaaaaagataaatttctgaagaatcgtggattttccttgctagccaaccagttgtatcttcatcgaggaactcaagaattgttagaatgcttcatcgaaatgttctttggtcgacatattggccttgatgaagaatttgatctggaagatgtgagaaacatgggattgtttcagaagtggtctgtcattcctattctgggactaatagagacctctctatatgacaacatactcttgcataatgctcttttacttcttctccaaattttaaattcttgttctaaggtagcagatatgttgctggataatggtctactctatgtgttatgtaatacagtagcagccctgaatggattagaaaagaacattcccatgagtgaatataaattgcttgcttgtgatatacagcaacttttcatagcagttacaattcatgcttgcagttcctcaggctcacaatattttagggttattgaagaccttattgtaatgcttggatatcttcaaaatagcaaaaacaagaggacacaaaatatggctgttgcactacagcttagagttctccaggctgctatggaatttataaggaccaccgcaaatcatgactctgaaaacctcacagattcactccagtcaccttctgctccccatcatgcagtagttcaaaagcggaaaagcattgctggtcctcgaaaatttccccttgctcaaactgaatcgcttctgatgaaaatgcgttcagtggcaaatgatgagcttcatgtgatgatgcaacggagaatgagccaagagaaccctagccaagcaactgaaacggaacttgcgcagagactacagaggctcactgttttagcagtcaacaggattatttatcaagaatttaattcagacattattgacattttgagaactccagaaaatgtaactcaaagcaagacctcagttttccagaccgaaatttctgaggaaaatattcatcatgaacagtcttctgttttcaatccatttcagaaagaaatttttacatatctggtagaaggattcaaagtatctattggttcaagtaaagccagtggttccaagcagcaatggactaaaattctgtggtcttgtaaggagaccttccgaatgcagcttgggagactactagtgcatattttgtcgccagcccacgctgcacaagagagaaagcaaatttttgaaatagttcatgaaccaaatcatcaggaaatactacgagactgtctcagcccatccctacaacatggagccaagttagttttgtatttgtcagagttgatacataatcaccaaggtgaattgactgaagaagagctaggcacagcagaactgcttatgaatgctttgaagttatgtggtcacaagtgcatccctcccagtgcatcaacaaaagcagaccttattaaaatgatcaaagaggaacaaaagaaatatgaaactgaagaaggagtgaataaagctgcttggcagaaaacagttaacaataatcaacaaagtctctttcagcgtctggattcaaaatcaaaggatatatctaaaatagctgcagatatcacccaggcagtgtctctctcccaaggaaatgagagaaaaaaggtgatccagcatattagaggaatgtataaagtagatttgagtgccagcagacattggcaggaacttattcagcagctgacacatgatagagcagtatggtatgaccccatctactatccaacctcatggcagttggatccaacagaagggccaaatcgagagaggagacgtttacagagatgttatttaactattccaaataagtatctccttagggatagacagaaatcagaagatgttgtcaaaccaccactctcttacctgtttgaagacaaaactcattcttctttctcttctactgtcaaagacaaagctgcaagtgaatctataagagtgaatcgaagatgcatcagtgttgcaccatctagagagacagctggtgaattgttactaggtaaatgtggaatgtattttgtggaagataatgcttctgatacagttgaaagttcgagccttcagggagagttggaaccagcatcattttcctggacatatgaagaaattaaagaagttcacaagcgttggtggcaattgagagataatgctgtagaaatctttctaacaaatggcagaacactcctgttggcatttgataacaccaaggttcgtgatgatgtataccacaatatactcacaaataacctccctaatcttctggaatatggtaacatcaccgctctgacaaatttatggtatactgggcaaattactaattttgaatatttgactcacttaaacaaacatgctggccgatccttcaatgatctcatgcagtatcctgtgttcccatttatacttgctgactacgttagtgagacacttgacctcaatgatctgttgatatacagaaatctctctaaacctatagctgttcagtataaagaaaaagaagatcgttatgtggacacatacaagtacttggaggaagagtaccgcaaaggagccagagaagatgaccccatgcctcccgtgcagccctatcactatggctcccactattccaatagcggcactgtgcttcacttcctggtcaggatgcctcctttcactaaaatgtttttagcctatcaagatcaaagttttgacattccagacagaacttttcattctacaaatacaacttggcgactctcatcttttgaatctatgactgatgtgaaagaacttatcccagagtttttctatcttccagagttcctagttaaccgtgaaggttttgattttggtgtgcgtcagaatggtgaacgggttaatcacgtcaaccttcccccttgggcgcgtaatgatcctcgtctttttatcctcatccatcggcaggctctagagtctgactacgtgtcgcagaacatctgtcagtggattgacttggtgtttgggtataagcaaaaggggaaggcttctgttcaagcgatcaatgtttttcatcctgctacatattttggaatggatgtctctgcagttgaagatccagttcagagacgagcgctagaaaccatgataaaaacctacgggcagactccccgtcagctgttccacatggcccatgtgagcagacctggagccaagctcaatattgaaggagagcttccagctgctgtggggttgctagtgcagtttgctttcagggagacccgagaacaggtcaaagaaatcacctatccgagtcctttgtcatggataaaaggcttgaaatggggggaatacgtgggttcccccagtgctccagtacctgtggtctgcttcagccagccccacggagaaagatttggctctctccaggctctgcccaccagagcaatctgtggtttgtcacggaatttctgtcttctgatgacatatagcaaggaacaaggtgtgagaagcatgaacagtacggacattcagtggtcagccatcctgagctggggatatgctgataatattttaaggttgaagagtaaacaaagtgagcctccagtaaactttattcaaagttcacaacagtaccaggtgactagttgtgcttgggtgcctgacagttgccagctgtttactggaagcaaatgcggtgtcatcacagcctacacaaacagatttacaagcagcacgccatcagaaatagaaatggagactcaaatacatctctatggtcacacagaagagataaccagcttatttgtttgcaaaccatacagtatactgataagtgtgagcagagacggaacctgcatcatatgggatttaaacaggttatgctatgtacaaagtctggcgggacacaaaagccctgtcacagctgtctctgccagtgaaacctcaggtgatattgctactgtgtgtgattcagctggcggaggcagtgacctcagactctggacggtgaacggggatctcgttggacatgtccactgcagggagatcatctgttccgtggctttctccaaccagcctgagggagtatctatcaatgtaatcgctgggggattagaaaatggaattgtaaggttatggagcacatgggacttaaagcctgtgagagaaattacatttcccaaatcaaataagcccatcatcagccttacattttcttgtgatggccaccatttgtacacagcaaacagtgatgggaccgtgattgcctggtgtcggaaggaccagcagcgcttgaaacagccaatgttctattccttccttagcagctatgcagccgggtgaatgcgaatgaacttcacgttctccaaagcactttaactccaaactagatttgttgacttcaccagttttaggaggttgaacctaaagaaatggatgactggacaaaccatccaaataatgataaagtctattcatctgcacaaaattctgaagagtcacatgatcctaagaggaaagttctgttctattttagtgataatctggaagattgtgtcaatatgcactagccaacaagttttaagcctcgcatggtacattaaaatgatattcttaaaattttttcccaccaaggtattccaaagaaaatattaaggtctcccctttttctatgattccaaaaggaccagtagaatttaaattggttggttgattgtttatataaaacacactaaaattatattttaaaagtttactgccatgaaatactcctcccaccacacacacatgctccaaaagaggaaagaaaaaaagataatttttaggacttgataattgctttctttgagaagcaaattattcagtaggtgcctctgtaccaaatattttatggaatatctaaatactaaaataaactatgaatgaatctcaaaattaggcagtttttgccagttgctttcttagctcaaaggagaaccagaatttttttgacagccacaaacaagaatacaggtatcttggatttcagacacattctgtttcttcataaaaattttacttaaaatctgtaacgctagatattgactatccttagttgagtcactgaggtttaaacacaatggtaagtcttaaagtctgctatttacagagcattgaatctgtaccaatttgcaatagaaagccttcagtatgcaagaagtttgcatgggtattaagaacacagcctaaataaggcatttgatctaatctgcaggaagaattttcttccccaaaacagaattataaaagcttactttaaacaggaggcagaataattcttttaggaaaccatttcattctgtttctactaacctataccatctgagaattctaggaagaataataaaatctcgtgtattccacagcaaacttacataccataaagacagaattcctaaacatcttggagccgtctgtctctcccatatgatggctgtctgtatatttttacttggggtgctgctttattggctttgaaaacactgtcagataagctcagtaatatgttaccatgggataaaaatatgtatccctgcctaagaataacttgtgcatttgttatggaaatttaattcatatggtgtttacagtactacttttgtaacttccagactttctaaaacattctgcttaaaaaccatatgccatgtatgctttaaccttaaactgcatacacatgtagtgatacctaggctgcatttagatcaccgtgtgctcaggccaggtgtgaatcctgaggtccatggaggtgcagagatgagattactcctattcacgttgaagtgatttgctttgttaacaaaaaattgcagctattgtctagctttcatttttttactgagaactttaaattagtcccctattagaatagggttgctactcatctttttttaaaaaccgaatttcatcatttatctaaagagaaaatatgcagaataactggtcttgttaagagtgcaatattatatttttatgtaaaaataaaaattaatttggggggattatttattcagcatgaaacctaatatgtatatgtttgaaatacttcataatgtgcatgttgtagcaaacatttctgtaaattatcacaagctctgttacctttatatacactgcctcttcaatttggaaataaatttcataaaaatagaaaaaaaaaaaaacaaaaaacaaaaaaaaaaaatgtgtgcgcggcgcgcgccctgggcccccgcgagaagaggccttcttaagcaccctggggtgggggcgcgcggaggagccccacagataggtgaaaaagggacacaaatgggccacaaacgcgcggcaccccgaaggcgaaactcgcgcgacacgacaaccagagggcagcggacatcatccaccaataaaaaacacagccccgggggggaaacacggagacgcgtctgcacacaaaacactcacgacaggagagtcacgaagagagggcaacacaagcgcgggaactaactacacaacaggggaagcacaaaaagaagaaagccgagaaattcaacaaattaaacgcccgtaagcactcgtggataacaagaaaagacacagaagaagagaaaagaaaaaccagaagaacaaacaagacaacacacaagccaaaaacacgcagcaacaagaaagcgaaaggcagacggagcggagagcagcagaggacagagagtgaacggaagagacgaggagcgaagagagggggagggaggacggcgggagccgacagcaaggcccgcggagcgagagggggggacagacaagaagaaaggaagcagagagaagggacgagagacgagaggcaagagcgcgcggaggagcaggagcagacggggagc

SEQ ID NO: 330112 - DNA, 10834 bp, Homo sapiens
  misc_feature (2724)..(2724): n is a, c, g, or t
gagagagggccactcgccttcctggtgacacagagatttcctagccccgttaccaaacgaaaaagcaacgcaagggcttctaagaagccatcccaatgaccttttggctttgagaagagcagtcctcataccagagtgtttggggttttggcctctttcagtgtttattcattcttacgtgggaaagttgtattccgaggtttctgtggtgcatgaagcttttgccttcaccatctgttcccgtgtcttcctcgggtgacatcagagtacagcagtattttcccttgccatctaatggggtttgggctgtttgactcaaccgtgtgtgttcctcaatgccaggggaataatcctaccctaagtcagctgaacagaagccaggatctaactgcaaacaagagacccagcttgcttaacagcatggaagagaccagtttcgttgcagctacctgggaagacggttgctaattagcctgcaacaaagagttccttgctcatctaaaagaggcaatcaccgttcaggtgaagctttgttctaagaatatttgtttcatctagtttatgagtccaaatgatatagactgtaaatgtcacagcagtggtgaaagactgctcggtcatgagcaccgacagtaactcactggcacgtgaatttctgaccgatgtcaaccggctttgcaatgcagtggtccagagggtggaggccagggaggaagaagaggaggagacgcacatggcaacccttggacagtaccttgtccatggtcgaggatttctattacttaccaagctaaattctataattgatcaggcattgacatgtagagaagaactcctgactcttcttctgtctctccttccactggtatggaagatacctgtccaagaagaaaaggcaacagattttaacctaccgctctcagcagatataatcctgaccaaagaaaagaactcaagttcacaaagatccactcaggaaaaattacatttagaaggaagtgccctgtctagtcaggtttctgcaaaagtaaatgtttttcgaaaaagcagacgacagcgtaaaattacccatcgctattctgtaagagatgcaagaaagacacagctctccacctcagattcagaagccaattcagatgaaaaaggcatagcaatgaataagcatagaaggccccatctgctgcatcattttttaacatcgtttcctaaacaagaccaccccaaagctaaacttgaccgcttagcaaccaaagaacagactcctccagatgctatggctttggaaaattccagagagattattccaagacaggggtcaaacactgacattttaagtgagccagctgccttgtctgttatcagtaacatgaacaattctccatttgacttatgtcatgttttgttatctttattagaaaaagtttgtaagtttgacgttaccttgaatcataattctcctttagcagccagtgtagtgcccacactaactgaattcctagcaggctttggggactgctgcagtctgagcgacaacttggagagtcgagtagtttctgcaggttggaccgaagaaccggtggctttgattcaaaggatgctctttcgaacagtgttgcatcttctgtcagtagatgttagtactgcagagatgatgccagaaaatcttaggaaaaatttaactgaattgcttagagcagctttaaaaattagaatatgcctagaaaagcagcctgacccttttgcaccaagacaaaagaaaacactgcaggaggttcaggaagattttgtgttttcaaagtatcgtcatagagcccttcttttacctgagcttttggaaggagttcttcagattctgatctgttgtcttcaaagtgcagcttcaaatcccttctacttcagtcaagccatggatttggttcaagaattcattcagcatcatggatttaatttatttgaaacagcagttcttcaaatggaatggctggttttaagagatggagttcctcccgaggcctcagagcatttgaaagccctaataaatagtgtgatgaaaataatgagcactgtcaaaaaagtgaaatcagagcaacttcatcattcgatgtgtacaagaaaaaggcacagacgatgtgaatattctcattttatgcatcatcaccgagatctctcaggtcttctggtttcggcttttaaaaaccaggtttccaaaaacccatttgaagagactgcagatggagatgtttattatcctgagcggtgctgttgcattgcagtgtgtgcccatcagtgcttgcgcttactacagcaggcttccttgagcagcacttgtgtccagatcctatcgggtgttcataacattggaatatgctgttgtatggatcccaaatctgtaatcattcctttgctccatgcttttaaattgccagcactgaaaaattttcagcagcatatattgaatatccttaacaaacttattttggatcagttaggaggagcagagatatcaccaaaaattaaaaaagcagcttgtaatatttgtactgttgactctgaccaactagcccaattagaagagacactgcagggaaacttatgtgatgctgaactctcctcaagtttatccagtccttcttacagatttcaagggatcctgcccagcagtggatctgaagatttgttgtggaaatgggatgctttaaaggcttatcagaactttgtttttgnagaagacagattacatagtatacagattgcaaatcacatttgcaatttaatccagaaaggcaatatagttgttcagtggaaattatataattacatatttaatcctgtgctccaaagaggagttgaattagcacatcattgtcaacacctaagcgttacttcagctcaaagtcatgtatgtagccatcataaccagtgcttgcctcaggacgtgcttcagatttatgtaaaaactctgcctatcctgcttaaatccagggtaataagagatttgtttttgagttgtaatggagtaagtcaaataatcgaattaaattgcttaaatggtattcgaagtcattctctaaaagcatttgaaactctgataatcagcctaggggagcaacagaaagatgcctcagttccagatattgatgggatagacattgaacagaaggagttgtcctctgtacatgtgggtacttcttttcatcatcagcaagcttattcagattctcctcagagtctcagcaaattttatgctggcctcaaagaagcttatccaaagagacggaagactgttaaccaagatgttcatatcaacacaataaacctattcctctgtgtggcttttttatgcgtaagtaaagaagcagagtctgacagggagtcggccaatgactcagaagatacttctggctatgacagcacagccagcgagcctttaagtcatatgctgccatgtatatctctcgagagccttgtcttgccttctcctgaacatatgcaccaagcagcagacatttggtctatgtgtcgttggatctacatgttgagttcagtgttccagaaacagttttataggcttggtggtttccgagtatgccataagttaatatttatgataatacagaaactgttcagaagtcacaaagaggagcaaggaaaaaaggagggagatacaagtgtaaatgaaaaccaggatttaaacagaatttctcaacctaagagaactatgaaggaagatttattatctttggctataaaaagtgaccccataccatcagaactaggtagtctaaaaaagagtgctgacagtttaggtaaattagagttacagcatatttcttccataaatgtggaagaagtttcagctactgaagccgctcccgaggaagcaaagctatttacaagtcaagaaagtgagacctcacttcaaagtatacgacttttggaagcccttctggccatttgtcttcatggtgccagaactagtcaacagaagatggaattggagttacctaatcagaacttgtctgtggaaagtatattatttgaaatgagggaccatctttcccagtcaaaggtgattgaaacacaactagcaaagcctttatttgatgccctgcttcgagttgccctcgggaattattcagcagattttgaacataatgatgctatgactgagaagagtcatcaatctgcagaagaattgtcatcccagcctggtgatttttcagaagaagctgaggattctcagtgttgtagttttaaacttttagttgaagaagaaggttacgaagcagatagtgaaagcaatcctgaagatggcgaaacccaggatgatggggtagacttaaagtctgaaacagaaggtttcagtgcatcaagcagtccaaatgacttactcgaaaacctcactcaaggggaaataatttatcctgagatttgtatgctggaattaaatttgctttctgctagtaaagccaaacttgatgtgcttgcccatgtatttgagagttttttgaaaattattaggcagaaagaaaagaatgtttttctgctcatgcaacagggaactgtgaaaaatcttttaggagggttcttgagtattttaacacaggatgattctgattttcaagcatgccagagagtattggtggatcttttggtatctttgatgagttcaagaacatgttcagaagagctaacccttcttttgagaatatttctggagaaatctccttgtacaaaaattcttcttctgggtattctgaaaattattgaaagtgatactactatgagcccttcacagtatctaaccttccctttactgcacgctccaaatttaagcaacggtgtttcatcacaaaagtatcctgggattttaaacagtaaggccatgggtttattgagaagagcacgagtttcacggagcaagaaagaggctgatagagagagttttccccatcggctgctttcatcttggcacatagccccagtccacctgccgttgctggggcaaaactgctggccacacctatcagaaggtttcagtgtttccctgtggtttaatgtggagtgtatccatgaagctgagagtactacagaaaaaggaaagaagataaagaaaagaaacaaatcattaattttaccagatagcagttttgatggtacagagagcgacagaccagaaggtgcagagtacataaatcctggtgaaagactcatagaagaaggatgtattcatataatttcactgggatccaaagcgttgatgatccaagtgtgggctgatccccacaatgccactcttatctttcgtgtgtgcatggattcaaatgatgacatgaaagctgttttactagcacaggttgaatcacaggagaatattttcctcccaagcaaatggcaacatttagtactcacctacttacagcagccccaagggaaaaggaggattcatgggaaaatctccatatgggtctctggacagaggaagcctgatgttactttggattttatgcttccaagaaaaacaagtttgtcatctgatagcaataaaacattttgcatgattggccattgtttatcatcccaagaagagtttttgcagttggctggaaaatgggacctgggaaatttgcttctcttcaacggagctaaggttggttcacaagaggccttttatctgtatgcttgtggacccaaccatacatctgtaatgccatgtaagtatggcaagccagtcaatgactactccaaatatattaataaagaaattttgcgatgtgaacaaatcagagaactttttatgaccaagaaagatgtggatattggtctcttaattgaaagtctttcagttgtttatacaacttactgtcctgctcagtataccatctatgaaccagtgattagacttaaaggtcaaatgaaaacccaactctctcaaagacccttcagctcaaaagaagttcagagcatcttattagaacctcatcatctaaagaatctccaacctactgaatataaaactattcaaggcattctgcacgaaattggtggaactggcatatttgtttttctctttgccagggttgttgaactcagtagctgtgaagaaactcaagcattagcactgcgagttatactctcattaattaaatacaaccaacaaagagtacatgaattagaaaattgtaatggactttctatgattcatcaggtgttgatcaaacaaaaatgcattgttgggttttacattttgaagacccttcttgaaggatgctgtggtgaagatattatttatatgaatgagaatggagagtttaagttggatgtagactctaatgctataatccaagatgttaagctgttagaggaactattgcttgactggaagatatggagtaaagcagagcaaggtgtttgggaaactttgctagcagctctagaagtcctcatcagagcagatcaccaccagcagatgtttaatattaagcagttattgaaagctcaagtggttcatcactttctactgacttgtcaggttttgcaggaatacaaagaggggcaactcacacccatgccccgagagatggcaagatctttcaggagaaagtgcggtcaatcatgtacctgaggcattccagcagtggaggaaggtcccttatgagccctggatttatggtaataagcccatctggttttactgcttcaccatatgaaggagagaattcctctaatattattccacaacagatggccgcccatatgctgcgttctagaagcctaccagcattccctacttcttcactactaacgcaatcacaaaaactgactggaagtttgggttgtagtatcgacaggttacaaaatattgcagatacttatgttgccacccaatcaaagaaacaaaattctttggggagttccgacacactgaaaaaaggcaaagaggacgcattcatcagtagctgtgagtctgcaaaaactgtttgtgaaatggaagctgtcctctcagcccaggtctctgtcagtgatgtcccaaagggagtgctgggatttccagtggtcaaagcagatcataaacagttgggagcagaacccaggtcagaagatgacagtcctggggatgagtcctgcccacgccgacctgattacctaaagggattggcctccttccagcgaagccacagcactattgcaagccttgggctagcttttccttcacagaacggatctgcagctgttggccgttggccaagtcttgttgatagaaacactgatgattgggaaaatgtaactgaagactgtttggtacctatatgctgtggattatatgaactcctaagtggggttcttcttatcctgcctgatgttttgcttgaagatgtgatggacaagcttattcaagcagatacacttttggtcctcgttaaccacccatcaccagctatacaacaaggtgttattaaactattagatgcatattttgctagagcatctaaggaacaaaaagataaatttctgaagaatcgtggattttccttgctagccaaccagttgtatcttcatcgaggaactcaagaattgttagaatgcttcatcgaaatgttctttggtcgacatattggccttgatgaagaatttgatctggaagatgtgagaaacatgggattgtttcagaagtggtctgtcattcctattctgggactaatagagacctctctatatgacaacatactcttgcataatgctcttttacttcttctccaaattttaaattcttgttctaaggtagcagatatgttgctggataatggtctactctatgtgttatgtaatacagtagcagccctgaatggattagaaaagaacattcccatgagtgaatataaattgcttgcttgtgatatacagcaacttttcatagcagttacaattcatgcttgcagttcctcaggctcacaatattttagggttattgaagaccttattgtaatgcttggatatcttcaaaatagcaaaaacaagaggacacaaaatatggctgttgcactacagcttagagttctccaggctgctatggaatttataaggaccaccgcaaatcatgactctgaaaacctcacagattcactccagtcaccttctgctccccatcatgcagtagttcaaaagcggaaaagcattgctggtcctcgaaaatttccccttgctcaaactgaatcgcttctgatgaaaatgcgttcagtggcaaatgatgagcttcatgtgatgatgcaacggagaatgagccaagagaaccctagccaagcaactgaaacggaacttgcgcagagactacagaggctcactgttttagcagtcaacaggattatttatcaagaatttaattcagacattattgacattttgagaactccagaaaatgtaactcaaagcaagacctcagttttccagaccgaaatttctgaggaaaatattcatcatgaacagtcttctgttttcaatccatttcagaaagaaatttttacatatctggtagaaggattcaaagtatctattggttcaagtaaagccagtggttccaagcagcaatggactaaaattctgtggtcttgtaaggagaccttccgaatgcagcttgggagactactagtgcatattttgtcgccagcccacgctgcacaagagagaaagcaaatttttgaaatagttcatgaaccaaatcatcaggaaatactacgagactgtctcagcccatccctacaacatggagccaagttagttttgtatttgtcagagttgatacataatcaccaaggtgaattgactgaagaagagctaggcacagcagaactgcttatgaatgctttgaagttatgtggtcacaagtgcatccctcccagtgcatcaacaaaagcagaccttattaaaatgatcaaagaggaacaaaagaaatatgaaactgaagaaggagtgaataaagctgcttggcagaaaacagttaacaataatcaacaaagtctctttcagcgtctggattcaaaatcaaaggatatatctaaaatagctgcagatatcacccaggcagtgtctctctcccaaggaaatgagagaaaaaaggtgatccagcatattagaggaatgtataaagtagatttgagtgccagcagacattggcaggaacttattcagcagctgacacatgatagagcagtatggtatgaccccatctactatccaacctcatggcagttggatccaacagaagggccaaatcgagagaggagacgtttacagagatgttatttaactattccaaataagtatctccttagggatagacagaaatcagaagatgttgtcaaaccaccactctcttacctgtttgaagacaaaactcattcttctttctcttctactgtcaaagacaaagctgcaagtgaatctataagagtgaatcgaagatgcatcagtgttgcaccatctagagagacagctggtgaattgttactaggtaaatgtggaatgtattttgtggaagataatgcttctgatacagttgaaagttcgagccttcagggagagttggaaccagcatcattttcctggacatatgaagaaattaaagaagttcacaagcgttggtggcaattgagagataatgctgtagaaatctttctaacaaatggcagaacactcctgttggcatttgataacaccaaggttcgtgatgatgtataccacaatatactcacaaataacctccctaatcttctggaatatggtaacatcaccgctctgacaaatttatggtatactgggcaaattactaattttgaatatttgactcacttaaacaaacatgctggccgatccttcaatgatctcatgcagtatcctgtgttcccatttatacttgctgactacgttagtgagacacttgacctcaatgatctgttgatatacagaaatctctctaaacctatagctgttcagtataaagaaaaagaagatcgttatgtggacacatacaagtacttggaggaagagtaccgcaaaggagccagagaagatgaccccatgcctcccgtgcagccctatcactatggctcccactattccaatagcggcactgtgcttcacttcctggtcaggatgcctcctttcactaaaatgtttttagcctatcaagattttttttagtggccagccaatgccaattgactcaacagaatagatgagaaagtaatacaagtgacagaagatgttgctcagcagagcaactaaggctgggagaagaaacctgatgctgcgatgtgtttgtggcagtctccaaatgaaaagatgtgttcaaatttcaacaagttcagaggagttttagatgatgcaatatggttcctaagaaacatgtaaactgctactgttttcagaggctagcttttggatatcatttaatattctaggcctttccctatggctagaaagtctgatcattgttggcagaaaagagagtccaaacttaattctttattattaatagtctaccctggaaaaaaaatgaacgaaagagtgactatgcttatttttattttcattcacaggaaattttactcaattctttagctcagagttagaacaccaaaaaacaatgcaccgtaacctacgcacccccccgaaaaaaaagaaagaaagaaaagaaaggagaaaaagtagtcttaacaattcaaagtgaaggaatcatgcttcctgatggggaaaaaactgtttgcctacttgaacttaaatcttccttcttcattattcattcattcaataaataaaccatgattgaatacccaaa

SEQ ID NO: 330113 - DNA, 9679 bp, Homo sapiens
  misc_feature (2724)..(2724): n is a, c, g, or t
gagagagggccactcgccttcctggtgacacagagatttcctagccccgttaccaaacgaaaaagcaacgcaagggcttctaagaagccatcccaatgaccttttggctttgagaagagcagtcctcataccagagtgtttggggttttggcctctttcagtgtttattcattcttacgtgggaaagttgtattccgaggtttctgtggtgcatgaagcttttgccttcaccatctgttcccgtgtcttcctcgggtgacatcagagtacagcagtattttcccttgccatctaatggggtttgggctgtttgactcaaccgtgtgtgttcctcaatgccaggggaataatcctaccctaagtcagctgaacagaagccaggatctaactgcaaacaagagacccagcttgcttaacagcatggaagagaccagtttcgttgcagctacctgggaagacggttgctaattagcctgcaacaaagagttccttgctcatctaaaagaggcaatcaccgttcaggtgaagctttgttctaagaatatttgtttcatctagtttatgagtccaaatgatatagactgtaaatgtcacagcagtggtgaaagactgctcggtcatgagcaccgacagtaactcactggcacgtgaatttctgaccgatgtcaaccggctttgcaatgcagtggtccagagggtggaggccagggaggaagaagaggaggagacgcacatggcaacccttggacagtaccttgtccatggtcgaggatttctattacttaccaagctaaattctataattgatcaggcattgacatgtagagaagaactcctgactcttcttctgtctctccttccactggtatggaagatacctgtccaagaagaaaaggcaacagattttaacctaccgctctcagcagatataatcctgaccaaagaaaagaactcaagttcacaaagatccactcaggaaaaattacatttagaaggaagtgccctgtctagtcaggtttctgcaaaagtaaatgtttttcgaaaaagcagacgacagcgtaaaattacccatcgctattctgtaagagatgcaagaaagacacagctctccacctcagattcagaagccaattcagatgaaaaaggcatagcaatgaataagcatagaaggccccatctgctgcatcattttttaacatcgtttcctaaacaagaccaccccaaagctaaacttgaccgcttagcaaccaaagaacagactcctccagatgctatggctttggaaaattccagagagattattccaagacaggggtcaaacactgacattttaagtgagccagctgccttgtctgttatcagtaacatgaacaattctccatttgacttatgtcatgttttgttatctttattagaaaaagtttgtaagtttgacgttaccttgaatcataattctcctttagcagccagtgtagtgcccacactaactgaattcctagcaggctttggggactgctgcagtctgagcgacaacttggagagtcgagtagtttctgcaggttggaccgaagaaccggtggctttgattcaaaggatgctctttcgaacagtgttgcatcttctgtcagtagatgttagtactgcagagatgatgccagaaaatcttaggaaaaatttaactgaattgcttagagcagctttaaaaattagaatatgcctagaaaagcagcctgacccttttgcaccaagacaaaagaaaacactgcaggaggttcaggaagattttgtgttttcaaagtatcgtcatagagcccttcttttacctgagcttttggaaggagttcttcagattctgatctgttgtcttcaaagtgcagcttcaaatcccttctacttcagtcaagccatggatttggttcaagaattcattcagcatcatggatttaatttatttgaaacagcagttcttcaaatggaatggctggttttaagagatggagttcctcccgaggcctcagagcatttgaaagccctaataaatagtgtgatgaaaataatgagcactgtcaaaaaagtgaaatcagagcaacttcatcattcgatgtgtacaagaaaaaggcacagacgatgtgaatattctcattttatgcatcatcaccgagatctctcaggtcttctggtttcggcttttaaaaaccaggtttccaaaaacccatttgaagagactgcagatggagatgtttattatcctgagcggtgctgttgcattgcagtgtgtgcccatcagtgcttgcgcttactacagcaggcttccttgagcagcacttgtgtccagatcctatcgggtgttcataacattggaatatgctgttgtatggatcccaaatctgtaatcattcctttgctccatgcttttaaattgccagcactgaaaaattttcagcagcatatattgaatatccttaacaaacttattttggatcagttaggaggagcagagatatcaccaaaaattaaaaaagcagcttgtaatatttgtactgttgactctgaccaactagcccaattagaagagacactgcagggaaacttatgtgatgctgaactctcctcaagtttatccagtccttcttacagatttcaagggatcctgcccagcagtggatctgaagatttgttgtggaaatgggatgctttaaaggcttatcagaactttgtttttgnagaagacagattacatagtatacagattgcaaatcacatttgcaatttaatccagaaaggcaatatagttgttcagtggaaattatataattacatatttaatcctgtgctccaaagaggagttgaattagcacatcattgtcaacacctaagcgttacttcagctcaaagtcatgtatgtagccatcataaccagtgcttgcctcaggacgtgcttcagatttatgtaaaaactctgcctatcctgcttaaatccagggtaataagagatttgtttttgagttgtaatggagtaagtcaaataatcgaattaaattgcttaaatggtattcgaagtcattctctaaaagcatttgaaactctgataatcagcctaggggagcaacagaaagatgcctcagttccagatattgatgggatagacattgaacagaaggagttgtcctctgtacatgtgggtacttcttttcatcatcagcaagcttattcagattctcctcagagtctcagcaaattttatgctggcctcaaagaagcttatccaaagagacggaagactgttaaccaagatgttcatatcaacacaataaacctattcctctgtgtggcttttttatgcgtaagtaaagaagcagagtctgacagggagtcggccaatgactcagaagatacttctggctatgacagcacagccagcgagcctttaagtcatatgctgccatgtatatctctcgagagccttgtcttgccttctcctgaacatatgcaccaagcagcagacatttggtctatgtgtcgttggatctacatgttgagttcagtgttccagaaacagttttataggcttggtggtttccgagtatgccataagttaatatttatgataatacagaaactgttcagaagtcacaaagaggagcaaggaaaaaaggagggagatacaagtgtaaatgaaaaccaggatttaaacagaatttctcaacctaagagaactatgaaggaagatttattatctttggctataaaaagtgaccccataccatcagaactaggtagtctaaaaaagagtgctgacagtttaggtaaattagagttacagcatatttcttccataaatgtggaagaagtttcagctactgaagccgctcccgaggaagcaaagctatttacaagtcaagaaagtgagacctcacttcaaagtatacgacttttggaagcccttctggccatttgtcttcatggtgccagaactagtcaacagaagatggaattggagttacctaatcagaacttgtctgtggaaagtatattatttgaaatgagggaccatctttcccagtcaaaggtgattgaaacacaactagcaaagcctttatttgatgccctgcttcgagttgccctcgggaattattcagcagattttgaacataatgatgctatgactgagaagagtcatcaatctgcagaagaattgtcatcccagcctggtgatttttcagaagaagctgaggattctcagtgttgtagttttaaacttttagttgaagaagaaggttacgaagcagatagtgaaagcaatcctgaagatggcgaaacccaggatgatggggtagacttaaagtctgaaacagaaggtttcagtgcatcaagcagtccaaatgacttactcgaaaacctcactcaaggggaaataatttatcctgagatttgtatgctggaattaaatttgctttctgctagtaaagccaaacttgatgtgcttgcccatgtatttgagagttttttgaaaattattaggcagaaagaaaagaatgtttttctgctcatgcaacagggaactgtgaaaaatcttttaggagggttcttgagtattttaacacaggatgattctgattttcaagcatgccagagagtattggtggatcttttggtatctttgatgagttcaagaacatgttcagaagagctaacccttcttttgagaatatttctggagaaatctccttgtacaaaaattcttcttctgggtattctgaaaattattgaaagtgatactactatgagcccttcacagtatctaaccttccctttactgcacgctccaaatttaagcaacggtgtttcatcacaaaagtatcctgggattttaaacagtaaggccatgggtttattgagaagagcacgagtttcacggagcaagaaagaggctgatagagagagttttccccatcggctgctttcatcttggcacatagccccagtccacctgccgttgctggggcaaaactgctggccacacctatcagaaggtttcagtgtttccctgtggtttaatgtggagtgtatccatgaagctgagagtactacagaaaaaggaaagaagataaagaaaagaaacaaatcattaattttaccagatagcagttttgatggtacagagagcgacagaccagaaggtgcagagtacataaatcctggtgaaagactcatagaagaaggatgtattcatataatttcactgggatccaaagcgttgatgatccaagtgtgggctgatccccacaatgccactcttatctttcgtgtgtgcatggattcaaatgatgacatgaaagctgttttactagcacaggttgaatcacaggagaatattttcctcccaagcaaatggcaacatttagtactcacctacttacagcagccccaagggaaaaggaggattcatgggaaaatctccatatgggtctctggacagaggaagcctgatgttactttggattttatgcttccaagaaaaacaagtttgtcatctgatagcaataaaacattttgcatgattggccattgtttatcatcccaagaagagtttttgcagttggctggaaaatgggacctgggaaatttgcttctcttcaacggagctaaggttggttcacaagaggccttttatctgtatgcttgtggacccaaccatacatctgtaatgccatgtaagtatggcaagccagtcaatgactactccaaatatattaataaagaaattttgcgatgtgaacaaatcagagaactttttatgaccaagaaagatgtggatattggtctcttaattgaaagtctttcagttgtttatacaacttactgtcctgctcagtataccatctatgaaccagtgattagacttaaaggtcaaatgaaaacccaactctctcaaagacccttcagctcaaaagaagttcagagcatcttattagaacctcatcatctaaagaatctccaacctactgaatataaaactattcaaggcattctgcacgaaattggtggaactggcatatttgtttttctctttgccagggttgttgaactcagtagctgtgaagaaactcaagcattagcactgcgagttatactctcattaattaaatacaaccaacaaagagtacatgaattagaaaattgtaatggactttctatgattcatcaggtgttgatcaaacaaaaatgcattgttgggttttacattttgaagacccttcttgaaggatgctgtggtgaagatattatttatatgaatgagaatggagagtttaagttggatgtagactctaatgctataatccaagatgttaagctgttagaggaactattgcttgactggaagatatggagtaaagcagagcaaggtgtttgggaaactttgctagcagctctagaagtcctcatcagagcagatcaccaccagcagatgtttaatattaagcagttattgaaagctcaagtggttcatcactttctactgacttgtcaggttttgcaggaatacaaagaggggcaactcacacccatgccccgagagatggcaagatctttcaggagaaagtgcggtcaatcatgtacctgaggcattccagcagtggaggaaggtcccttatgagccctggatttatggtaataagcccatctggttttactgcttcaccatatgaaggagagaattcctctaatattattccacaacagatggccgcccatatgctgcgttctagaagcctaccagcattccctacttcttcactactaacgcaatcacaaaaactgactggaagtttgggttgtagtatcgacaggttacaaaatattgcagatacttatgttgccacccaatcaaagaaacaaaattctttggggagttccgacacactgaaaaaaggcaaagaggacgcattcatcagtagctgtgagtctgcaaaaactgtttgtgaaatggaagctgtcctctcagcccaggtctctgtcagtgatgtcccaaagggagtgctgggatttccagtggtcaaagcagatcataaacagttgggagcagaacccaggtcagaagatgacagtcctggggatgagtcctgcccacgccgacctgattacctaaagggattggcctccttccagcgaagccacagcactattgcaagccttgggctagcttttccttcacagaacggatctgcagctgttggccgttggccaagtcttgttgatagaaacactgatgattgggaaaatgtaactgaagactgtttggtacctatatgctgtggattatatgaactcctaagtggggttcttcttatcctgcctgatgttttgcttgaagatgtgatggacaagcttattcaagcagatacacttttggtcctcgttaaccacccatcaccagctatacaacaaggtgttattaaactattagatgcatattttgctagagcatctaaggaacaaaaagataaatttctgaagaatcgtggattttccttgctagccaaccagttgtatcttcatcgaggaactcaagaattgttagaatgcttcatcgaaatgttctttggtcgacatattggccttgatgaagaatttgatctggaagatgtgagaaacatgggattgtttcagaagtggtctgtcattcctattctgggactaatagagacctctctatatgacaacatactcttgcataatgctcttttacttcttctccaaattttaaattcttgttctaaggtagcagatatgttgctggataatggtctactctatgtgttatgtaatacagtagcagccctgaatggattagaaaagaacattcccatgagtgaatataaattgcttgcttgtgatatacagcaacttttcatagcagttacaattcatgcttgcagttcctcaggctcacaatattttagggttattgaagaccttattgtaatgcttggatatcttcaaaatagcaaaaacaagaggacacaaaatatggctgttgcactacagcttagagttctccaggctgctatggaatttataaggaccaccgcaaatcatgactctgaaaacctcacagattcactccagtcaccttctgctccccatcatgcagtagttcaaaagcggaaaagcattgctggtcctcgaaaatttccccttgctcaaactgaatcgcttctgatgaaaatgcgttcagtggcaaatgatgagcttcatgtgatgatgcaacggagaatgagccaagagaaccctagccaagcaactgaaacggaacttgcgcagagactacagaggctcactgttttagcagtcaacaggattatttatcaagaatttaattcagacattattgacattttgagaactccagaaaatgtaactcaaagcaagacctcagttttccagaccgaaatttctgaggaaaatattcatcatgaacagtcttctgttttcaatccatttcagaaagaaatttttacatatctggtagaaggattcaaagtatctattggttcaagtaaagccagtggttccaagcagcaatggactaaaattctgtggtcttgtaaggagaccttccgaatgcagcttgggagactactagtgcatattttgtcgccagcccacgctgcacaagagagaaagcaaatttttgaaatagttcatgaaccaaatcatcaggaaatactacgagactgtctcagcccatccctacaagcacactagaatctccatgttccccaaggactcacccatgacagcttaatgtgtgaactcccagcctttcccccattgggtaacggaattgggctgagtccagattgcaaccacttccaataacatggtttttgggaaagccattatcttccaagccactataggtcaaagatatccactggatttgaaacaataagcaacttgcagttcgggctgtattttacaacattaggaatgatgaatttaaagatgttcacattacactggaccaaattaagatggctttctccctcttgcgatgtgcctcagccgtgatagtgaccagcttggagtttacagttacagtatagtctttgccagagacaatctttggtgttctaaggaaaaggctgccatggtggagatccatcatctcgcccttcaatttgtcttccatgacatcaacaagagcaagttcgcctgccaagtccttcattaagataccgatggcacaggccatgccaagagcaccaaccccaacaactgtaatcttattctggaggatctgttcttcctttagaagactgtgaataagctgatccttgagcgtatacttgagagtatattggacttggaaacaaaaggaatcgagaatgcacgtccggcgggtgttggggcacgcggcagtgagatccagactcgtcggcagcggctccagcaccttcgctacctttaaatacagtcagtcaaggaaaagcaggataaatgctgtttccttccctgtttattaatttttggaatgatgaattcatgcccctagtagcctctaattcttgtatttgtttttatttttggagtgtcattaggagctcaggtattttaaaataaatgttatgtgttttagtctattgcagtcattattcagtttgatattaaaatt

SEQ ID NO: 330114 - DNA, 8606 bp, Homo sapiens
  misc_feature (2724)..(2724): n is a, c, g, or t
gagagagggccactcgccttcctggtgacacagagatttcctagccccgttaccaaacgaaaaagcaacgcaagggcttctaagaagccatcccaatgaccttttggctttgagaagagcagtcctcataccagagtgtttggggttttggcctctttcagtgtttattcattcttacgtgggaaagttgtattccgaggtttctgtggtgcatgaagcttttgccttcaccatctgttcccgtgtcttcctcgggtgacatcagagtacagcagtattttcccttgccatctaatggggtttgggctgtttgactcaaccgtgtgtgttcctcaatgccaggggaataatcctaccctaagtcagctgaacagaagccaggatctaactgcaaacaagagacccagcttgcttaacagcatggaagagaccagtttcgttgcagctacctgggaagacggttgctaattagcctgcaacaaagagttccttgctcatctaaaagaggcaatcaccgttcaggtgaagctttgttctaagaatatttgtttcatctagtttatgagtccaaatgatatagactgtaaatgtcacagcagtggtgaaagactgctcggtcatgagcaccgacagtaactcactggcacgtgaatttctgaccgatgtcaaccggctttgcaatgcagtggtccagagggtggaggccagggaggaagaagaggaggagacgcacatggcaacccttggacagtaccttgtccatggtcgaggatttctattacttaccaagctaaattctataattgatcaggcattgacatgtagagaagaactcctgactcttcttctgtctctccttccactggtatggaagatacctgtccaagaagaaaaggcaacagattttaacctaccgctctcagcagatataatcctgaccaaagaaaagaactcaagttcacaaagatccactcaggaaaaattacatttagaaggaagtgccctgtctagtcaggtttctgcaaaagtaaatgtttttcgaaaaagcagacgacagcgtaaaattacccatcgctattctgtaagagatgcaagaaagacacagctctccacctcagattcagaagccaattcagatgaaaaaggcatagcaatgaataagcatagaaggccccatctgctgcatcattttttaacatcgtttcctaaacaagaccaccccaaagctaaacttgaccgcttagcaaccaaagaacagactcctccagatgctatggctttggaaaattccagagagattattccaagacaggggtcaaacactgacattttaagtgagccagctgccttgtctgttatcagtaacatgaacaattctccatttgacttatgtcatgttttgttatctttattagaaaaagtttgtaagtttgacgttaccttgaatcataattctcctttagcagccagtgtagtgcccacactaactgaattcctagcaggctttggggactgctgcagtctgagcgacaacttggagagtcgagtagtttctgcaggttggaccgaagaaccggtggctttgattcaaaggatgctctttcgaacagtgttgcatcttctgtcagtagatgttagtactgcagagatgatgccagaaaatcttaggaaaaatttaactgaattgcttagagcagctttaaaaattagaatatgcctagaaaagcagcctgacccttttgcaccaagacaaaagaaaacactgcaggaggttcaggaagattttgtgttttcaaagtatcgtcatagagcccttcttttacctgagcttttggaaggagttcttcagattctgatctgttgtcttcaaagtgcagcttcaaatcccttctacttcagtcaagccatggatttggttcaagaattcattcagcatcatggatttaatttatttgaaacagcagttcttcaaatggaatggctggttttaagagatggagttcctcccgaggcctcagagcatttgaaagccctaataaatagtgtgatgaaaataatgagcactgtcaaaaaagtgaaatcagagcaacttcatcattcgatgtgtacaagaaaaaggcacagacgatgtgaatattctcattttatgcatcatcaccgagatctctcaggtcttctggtttcggcttttaaaaaccaggtttccaaaaacccatttgaagagactgcagatggagatgtttattatcctgagcggtgctgttgcattgcagtgtgtgcccatcagtgcttgcgcttactacagcaggcttccttgagcagcacttgtgtccagatcctatcgggtgttcataacattggaatatgctgttgtatggatcccaaatctgtaatcattcctttgctccatgcttttaaattgccagcactgaaaaattttcagcagcatatattgaatatccttaacaaacttattttggatcagttaggaggagcagagatatcaccaaaaattaaaaaagcagcttgtaatatttgtactgttgactctgaccaactagcccaattagaagagacactgcagggaaacttatgtgatgctgaactctcctcaagtttatccagtccttcttacagatttcaagggatcctgcccagcagtggatctgaagatttgttgtggaaatgggatgctttaaaggcttatcagaactttgtttttgnagaagacagattacatagtatacagattgcaaatcacatttgcaatttaatccagaaaggcaatatagttgttcagtggaaattatataattacatatttaatcctgtgctccaaagaggagttgaattagcacatcattgtcaacacctaagcgttacttcagctcaaagtcatgtatgtagccatcataaccagtgcttgcctcaggacgtgcttcagatttatgtaaaaactctgcctatcctgcttaaatccagggtaataagagatttgtttttgagttgtaatggagtaagtcaaataatcgaattaaattgcttaaatggtattcgaagtcattctctaaaagcatttgaaactctgataatcagcctaggggagcaacagaaagatgcctcagttccagatattgatgggatagacattgaacagaaggagttgtcctctgtacatgtgggtacttcttttcatcatcagcaagcttattcagattctcctcagagtctcagcaaattttatgctggcctcaaagaagcttatccaaagagacggaagactgttaaccaagatgttcatatcaacacaataaacctattcctctgtgtggcttttttatgcgtaagtaaagaagcagagtctgacagggagtcggccaatgactcagaagatacttctggctatgacagcacagccagcgagcctttaagtcatatgctgccatgtatatctctcgagagccttgtcttgccttctcctgaacatatgcaccaagcagcagacatttggtctatgtgtcgttggatctacatgttgagttcagtgttccagaaacagttttataggcttggtggtttccgagtatgccataagttaatatttatgataatacagaaactgttcagaagtcacaaagaggagcaaggaaaaaaggagggagatacaagtgtaaatgaaaaccaggatttaaacagaatttctcaacctaagagaactatgaaggaagatttattatctttggctataaaaagtgaccccataccatcagaactaggtagtctaaaaaagagtgctgacagtttaggtaaattagagttacagcatatttcttccataaatgtggaagaagtttcagctactgaagccgctcccgaggaagcaaagctatttacaagtcaagaaagtgagacctcacttcaaagtatacgacttttggaagcccttctggccatttgtcttcatggtgccagaactagtcaacagaagatggaattggagttacctaatcagaacttgtctgtggaaagtatattatttgaaatgagggaccatctttcccagtcaaaggtgattgaaacacaactagcaaagcctttatttgatgccctgcttcgagttgccctcgggaattattcagcagattttgaacataatgatgctatgactgagaagagtcatcaatctgcagaagaattgtcatcccagcctggtgatttttcagaagaagctgaggattctcagtgttgtagttttaaacttttagttgaagaagaaggttacgaagcagatagtgaaagcaatcctgaagatggcgaaacccaggatgatggggtagacttaaagtctgaaacagaaggtttcagtgcatcaagcagtccaaatgacttactcgaaaacctcactcaaggggaaataatttatcctgagatttgtatgctggaattaaatttgctttctgctagtaaagccaaacttgatgtgcttgcccatgtatttgagagttttttgaaaattattaggcagaaagaaaagaatgtttttctgctcatgcaacagggaactgtgaaaaatcttttaggagggttcttgagtattttaacacaggatgattctgattttcaagcatgccagagagtattggtggatcttttggtatctttgatgagttcaagaacatgttcagaagagctaacccttcttttgagaatatttctggagaaatctccttgtacaaaaattcttcttctgggtattctgaaaattattgaaagtgatactactatgagcccttcacagtatctaaccttccctttactgcacgctccaaatttaagcaacggtgtttcatcacaaaagtatcctgggattttaaacagtaaggccatgggtttattgagaagagcacgagtttcacggagcaagaaagaggctgatagagagagttttccccatcggctgctttcatcttggcacatagccccagtccacctgccgttgctggggcaaaactgctggccacacctatcagaaggtttcagtgtttccctgtggtttaatgtggagtgtatccatgaagctgagagtactacagaaaaaggaaagaagataaagaaaagaaacaaatcattaattttaccagatagcagttttgatggtacagagagcgacagaccagaaggtgcagagtacataaatcctggtgaaagactcatagaagaaggatgtattcatataatttcactgggatccaaagcgttgatgatccaagtgtgggctgatccccacaatgccactcttatctttcgtgtgtgcatggattcaaatgatgacatgaaagctgttttactagcacaggttgaatcacaggagaatattttcctcccaagcaaatggcaacatttagtactcacctacttacagcagccccaagggaaaaggaggattcatgggaaaatctccatatgggtctctggacagaggaagcctgatgttactttggattttatgcttccaagaaaaacaagtttgtcatctgatagcaataaaacattttgcatgattggccattgtttatcatcccaagaagagtttttgcagttggctggaaaatgggacctgggaaatttgcttctcttcaacggagctaaggttggttcacaagaggccttttatctgtatgcttgtggacccaaccatacatctgtaatgccatgtaagtatggcaagccagtcaatgactactccaaatatattaataaagaaattttgcgatgtgaacaaatcagagaactttttatgaccaagaaagatgtggatattggtctcttaattgaaagtctttcagttgtttatacaacttactgtcctgctcagtataccatctatgaaccagtgattagacttaaaggtcaaatgaaaacccaactctctcaaagacccttcagctcaaaagaagttcagagcatcttattagaacctcatcatctaaagaatctccaacctactgaatataaaactattcaaggcattctgcacgaaattggtggaactggcatatttgtttttctctttgccagggttgttgaactcagtagctgtgaagaaactcaagcattagcactgcgagttatactctcattaattaaatacaaccaacaaagagtacatgaattagaaaattgtaatggactttctatgattcatcaggtgttgatcaaacaaaaatgcattgttgggttttacattttgaagacccttcttgaaggatgctgtggtgaagatattatttatatgaatgagaatggagagtttaagttggatgtagactctaatgctataatccaagatgttaagctgttagaggaactattgcttgactggaagatatggagtaaagcagagcaaggtgtttgggaaactttgctagcagctctagaagtcctcatcagagcagatcaccaccagcagatgtttaatattaagcagttattgaaagctcaagtggttcatcactttctactgacttgtcaggttttgcaggaatacaaagaggggcaactcacacccatgccccgagagatggcaagatctttcaggagaaagtgcggtcaatcatgtacctgaggcattccagcagtggaggaaggtcccttatgagccctggatttatggtaataagcccatctggttttactgcttcaccatatgaaggagagaattcctctaatattattccacaacagatggccgcccatatgctgcgttctagaagcctaccagcattccctacttcttcactactaacgcaatcacaaaaactgactggaagtttgggttgtagtatcgacaggttacaaaatattgcagatacttatgttgccacccaatcaaagaaacaaaattctttggggagttccgacacactgaaaaaaggcaaagaggacgcattcatcagtagctgtgagtctgcaaaaactgtttgtgaaatggaagctgtcctctcagcccaggtctctgtcagtgatgtcccaaagggagtgctgggatttccagtggtcaaagcagatcataaacagttgggagcagaacccaggtcagaagatgacagtcctggggatgagtcctgcccacgccgacctgattacctaaagggattggcctccttccagcgaagccacagcactattgcaagccttgggctagcttttccttcacagaacggatctgcagctgttggccgttggccaagtcttgttgatagaaacactgatgattgggaaaatgtaactgaagactgtttggtacctatatgctgtggattatatgaactcctaagtggggttcttcttatcctgcctgatgttttgcttgaagatgtgatggacaagcttattcaagcagatacacttttggtcctcgttaaccacccatcaccagctatacaacaaggtgttattaaactattagatgcatattttgctagagcatctaaggaacaaaaagataaatttctgaagaatcgtggattttccttgctagccaaccagttgtatcttcatcgaggaactcaagaattgttagaatgcttcatcgaaatgttctttggtcgacatattggccttgatgaagaatttgatctggaagatgtgagaaacatgggattgtttcagaagtggtctgtcattcctattctgggactaatagagacctctctatatgacaacatactcttgcataatgctcttttacttcttctccaaattttaaattcttgttctaaggtagcagatatgttgctggataatggtctactctatgtgttatgtaatacagtagcagccctgaatggattagaaaagaacattcccatgagtgaatataaattgcttgcttgtgatatacagcaacttttcatagcagttacaattcatgcttgcagttcctcaggctcacaatattttagggttattgaagaccttattgtaatgcttggatatcttcaaaatagcaaaaacaagaggacacaaaatatggctgttgcactacagcttagagttctccaggctgctatggaatttataaggaccaccgcaaatcatgactctgaaaacctcacagattcactccagtcaccttctgctccccatcatgcagtagttcaaaagcggaaaagcattgctggtcctcgaaaatttccccttgctcaaactgaatcgcttctgatgaaaatgcgttcagtggcaaatgatgagcttcatgtgatgatgcaacggagaatgagccaagagaaccctagccaagcaactgaaacggaacttgcgcagagactacagaggctcactgttttagcagtcaacaggattatttatcaagaatttaattcagacattattgacattttgagaactccagaaaatgtaactcaaagcaagacctcagttttccagaccgaaatttctgaggaaaatattcatcatgaacagtcttctgttttcaatccatttcagaaagaaatttttacatatctggtagaaggattcaaagtatctattggttcaagtgccagtggttccaagcagctggactgtgcatattttgtcgccgc

SEQ ID NO: 330115 - DNA, 7538 bp, Homo sapiens
  misc_feature (2724)..(2724): n is a, c, g, or t
gagagagggccactcgccttcctggtgacacagagatttcctagccccgttaccaaacgaaaaagcaacgcaagggcttctaagaagccatcccaatgaccttttggctttgagaagagcagtcctcataccagagtgtttggggttttggcctctttcagtgtttattcattcttacgtgggaaagttgtattccgaggtttctgtggtgcatgaagcttttgccttcaccatctgttcccgtgtcttcctcgggtgacatcagagtacagcagtattttcccttgccatctaatggggtttgggctgtttgactcaaccgtgtgtgttcctcaatgccaggggaataatcctaccctaagtcagctgaacagaagccaggatctaactgcaaacaagagacccagcttgcttaacagcatggaagagaccagtttcgttgcagctacctgggaagacggttgctaattagcctgcaacaaagagttccttgctcatctaaaagaggcaatcaccgttcaggtgaagctttgttctaagaatatttgtttcatctagtttatgagtccaaatgatatagactgtaaatgtcacagcagtggtgaaagactgctcggtcatgagcaccgacagtaactcactggcacgtgaatttctgaccgatgtcaaccggctttgcaatgcagtggtccagagggtggaggccagggaggaagaagaggaggagacgcacatggcaacccttggacagtaccttgtccatggtcgaggatttctattacttaccaagctaaattctataattgatcaggcattgacatgtagagaagaactcctgactcttcttctgtctctccttccactggtatggaagatacctgtccaagaagaaaaggcaacagattttaacctaccgctctcagcagatataatcctgaccaaagaaaagaactcaagttcacaaagatccactcaggaaaaattacatttagaaggaagtgccctgtctagtcaggtttctgcaaaagtaaatgtttttcgaaaaagcagacgacagcgtaaaattacccatcgctattctgtaagagatgcaagaaagacacagctctccacctcagattcagaagccaattcagatgaaaaaggcatagcaatgaataagcatagaaggccccatctgctgcatcattttttaacatcgtttcctaaacaagaccaccccaaagctaaacttgaccgcttagcaaccaaagaacagactcctccagatgctatggctttggaaaattccagagagattattccaagacaggggtcaaacactgacattttaagtgagccagctgccttgtctgttatcagtaacatgaacaattctccatttgacttatgtcatgttttgttatctttattagaaaaagtttgtaagtttgacgttaccttgaatcataattctcctttagcagccagtgtagtgcccacactaactgaattcctagcaggctttggggactgctgcagtctgagcgacaacttggagagtcgagtagtttctgcaggttggaccgaagaaccggtggctttgattcaaaggatgctctttcgaacagtgttgcatcttctgtcagtagatgttagtactgcagagatgatgccagaaaatcttaggaaaaatttaactgaattgcttagagcagctttaaaaattagaatatgcctagaaaagcagcctgacccttttgcaccaagacaaaagaaaacactgcaggaggttcaggaagattttgtgttttcaaagtatcgtcatagagcccttcttttacctgagcttttggaaggagttcttcagattctgatctgttgtcttcaaagtgcagcttcaaatcccttctacttcagtcaagccatggatttggttcaagaattcattcagcatcatggatttaatttatttgaaacagcagttcttcaaatggaatggctggttttaagagatggagttcctcccgaggcctcagagcatttgaaagccctaataaatagtgtgatgaaaataatgagcactgtcaaaaaagtgaaatcagagcaacttcatcattcgatgtgtacaagaaaaaggcacagacgatgtgaatattctcattttatgcatcatcaccgagatctctcaggtcttctggtttcggcttttaaaaaccaggtttccaaaaacccatttgaagagactgcagatggagatgtttattatcctgagcggtgctgttgcattgcagtgtgtgcccatcagtgcttgcgcttactacagcaggcttccttgagcagcacttgtgtccagatcctatcgggtgttcataacattggaatatgctgttgtatggatcccaaatctgtaatcattcctttgctccatgcttttaaattgccagcactgaaaaattttcagcagcatatattgaatatccttaacaaacttattttggatcagttaggaggagcagagatatcaccaaaaattaaaaaagcagcttgtaatatttgtactgttgactctgaccaactagcccaattagaagagacactgcagggaaacttatgtgatgctgaactctcctcaagtttatccagtccttcttacagatttcaagggatcctgcccagcagtggatctgaagatttgttgtggaaatgggatgctttaaaggcttatcagaactttgtttttgnagaagacagattacatagtatacagattgcaaatcacatttgcaatttaatccagaaaggcaatatagttgttcagtggaaattatataattacatatttaatcctgtgctccaaagaggagttgaattagcacatcattgtcaacacctaagcgttacttcagctcaaagtcatgtatgtagccatcataaccagtgcttgcctcaggacgtgcttcagatttatgtaaaaactctgcctatcctgcttaaatccagggtaataagagatttgtttttgagttgtaatggagtaagtcaaataatcgaattaaattgcttaaatggtattcgaagtcattctctaaaagcatttgaaactctgataatcagcctaggggagcaacagaaagatgcctcagttccagatattgatgggatagacattgaacagaaggagttgtcctctgtacatgtgggtacttcttttcatcatcagcaagcttattcagattctcctcagagtctcagcaaattttatgctggcctcaaagaagcttatccaaagagacggaagactgttaaccaagatgttcatatcaacacaataaacctattcctctgtgtggcttttttatgcgtaagtaaagaagcagagtctgacagggagtcggccaatgactcagaagatacttctggctatgacagcacagccagcgagcctttaagtcatatgctgccatgtatatctctcgagagccttgtcttgccttctcctgaacatatgcaccaagcagcagacatttggtctatgtgtcgttggatctacatgttgagttcagtgttccagaaacagttttataggcttggtggtttccgagtatgccataagttaatatttatgataatacagaaactgttcagaagtcacaaagaggagcaaggaaaaaaggagggagatacaagtgtaaatgaaaaccaggatttaaacagaatttctcaacctaagagaactatgaaggaagatttattatctttggctataaaaagtgaccccataccatcagaactaggtagtctaaaaaagagtgctgacagtttaggtaaattagagttacagcatatttcttccataaatgtggaagaagtttcagctactgaagccgctcccgaggaagcaaagctatttacaagtcaagaaagtgagacctcacttcaaagtatacgacttttggaagcccttctggccatttgtcttcatggtgccagaactagtcaacagaagatggaattggagttacctaatcagaacttgtctgtggaaagtatattatttgaaatgagggaccatctttcccagtcaaaggtgattgaaacacaactagcaaagcctttatttgatgccctgcttcgagttgccctcgggaattattcagcagattttgaacataatgatgctatgactgagaagagtcatcaatctgcagaagaattgtcatcccagcctggtgatttttcagaagaagctgaggattctcagtgttgtagttttaaacttttagttgaagaagaaggttacgaagcagatagtgaaagcaatcctgaagatggcgaaacccaggatgatggggtagacttaaagtctgaaacagaaggtttcagtgcatcaagcagtccaaatgacttactcgaaaacctcactcaaggggaaataatttatcctgagatttgtatgctggaattaaatttgctttctgctagtaaagccaaacttgatgtgcttgcccatgtatttgagagttttttgaaaattattaggcagaaagaaaagaatgtttttctgctcatgcaacagggaactgtgaaaaatcttttaggagggttcttgagtattttaacacaggatgattctgattttcaagcatgccagagagtattggtggatcttttggtatctttgatgagttcaagaacatgttcagaagagctaacccttcttttgagaatatttctggagaaatctccttgtacaaaaattcttcttctgggtattctgaaaattattgaaagtgatactactatgagcccttcacagtatctaaccttccctttactgcacgctccaaatttaagcaacggtgtttcatcacaaaagtatcctgggattttaaacagtaaggccatgggtttattgagaagagcacgagtttcacggagcaagaaagaggctgatagagagagttttccccatcggctgctttcatcttggcacatagccccagtccacctgccgttgctggggcaaaactgctggccacacctatcagaaggtttcagtgtttccctgtggtttaatgtggagtgtatccatgaagctgagagtactacagaaaaaggaaagaagataaagaaaagaaacaaatcattaattttaccagatagcagttttgatggtacagagagcgacagaccagaaggtgcagagtacataaatcctggtgaaagactcatagaagaaggatgtattcatataatttcactgggatccaaagcgttgatgatccaagtgtgggctgatccccacaatgccactcttatctttcgtgtgtgcatggattcaaatgatgacatgaaagctgttttactagcacaggttgaatcacaggagaatattttcctcccaagcaaatggcaacatttagtactcacctacttacagcagccccaagggaaaaggaggattcatgggaaaatctccatatgggtctctggacagaggaagcctgatgttactttggattttatgcttccaagaaaaacaagtttgtcatctgatagcaataaaacattttgcatgattggccattgtttatcatcccaagaagagtttttgcagttggctggaaaatgggacctgggaaatttgcttctcttcaacggagctaaggttggttcacaagaggccttttatctgtatgcttgtggacccaaccatacatctgtaatgccatgtaagtatggcaagccagtcaatgactactccaaatatattaataaagaaattttgcgatgtgaacaaatcagagaactttttatgaccaagaaagatgtggatattggtctcttaattgaaagtctttcagttgtttatacaacttactgtcctgctcagtataccatctatgaaccagtgattagacttaaaggtcaaatgaaaacccaactctctcaaagacccttcagctcaaaagaagttcagagcatcttattagaacctcatcatctaaagaatctccaacctactgaatataaaactattcaaggcattctgcacgaaattggtggaactggcatatttgtttttctctttgccagggttgttgaactcagtagctgtgaagaaactcaagcattagcactgcgagttatactctcattaattaaatacaaccaacaaagagtacatgaattagaaaattgtaatggactttctatgattcatcaggtgttgatcaaacaaaaatgcattgttgggttttacattttgaagacccttcttgaaggatgctgtggtgaagatattatttatatgaatgagaatggagagtttaagttggatgtagactctaatgctataatccaagatgttaagctgttagaggaactattgcttgactggaagatatggagtaaagcagagcaaggtgtttgggaaactttgctagcagctctagaagtcctcatcagagcagatcaccaccagcagatgtttaatattaagcagttattgaaagctcaagtggttcatcactttctactgacttgtcaggttttgcaggaatacaaagaggggcaactcacacccatgccccgagagatggcaagatctttcaggagaaagtgcggtcaatcatgtacctgaggcattccagcagtggaggaaggtcccttatgagccctggatttatggtaataagcccatctggttttactgcttcaccatatgaaggagagaattcctctaatattattccacaacagatggccgcccatatgctgcgttctagaagcctaccagcattccctacttcttcactactaacgcaatcacaaaaactgactggaagtttgggttgtagtatcgacaggttacaaaatattgcagatacttatgttgccacccaatcaaagaaacaaaattctttggggagttccgacacactgaaaaaaggcaaagaggacgcattcatcagtagctgtgagtctgcaaaaactgtttgtgaaatggaagctgtcctctcagcccaggtctctgtcagtgatgtcccaaagggagtgctgggatttccagtggtcaaagcagatcataaacagttgggagcagaacccaggtcagaagatgacagtcctggggatgagtcctgcccacgccgacctgattacctaaagggattggcctccttccagcgaagccacagcactattgcaagccttgggctagcttttccttcacagaacggatctgcagctgttggccgttggccaagtcttgttgatagaaacactgatgattgggaaaactttgcctattctcttggttatgagccaaattacaaccgaactgcaagtgctcacagtgtaactgaagactgtttggtacctatatgctgtggattatatgaactcctaagtggggttcttcttatcctgcctgatgttttgcttgaagatgtgatggacaagcttattcaagcagatacacttttggtcctcgttaaccacccatcaccagctatacaacaaggtgttattaaagtaagggcaaatactagata

SEQ ID NO: 330116 - DNA, 5611 bp, Homo sapiens
  misc_feature (2724)..(2724): n is a, c, g, or t
gagagagggccactcgccttcctggtgacacagagatttcctagccccgttaccaaacgaaaaagcaacgcaagggcttctaagaagccatcccaatgaccttttggctttgagaagagcagtcctcataccagagtgtttggggttttggcctctttcagtgtttattcattcttacgtgggaaagttgtattccgaggtttctgtggtgcatgaagcttttgccttcaccatctgttcccgtgtcttcctcgggtgacatcagagtacagcagtattttcccttgccatctaatggggtttgggctgtttgactcaaccgtgtgtgttcctcaatgccaggggaataatcctaccctaagtcagctgaacagaagccaggatctaactgcaaacaagagacccagcttgcttaacagcatggaagagaccagtttcgttgcagctacctgggaagacggttgctaattagcctgcaacaaagagttccttgctcatctaaaagaggcaatcaccgttcaggtgaagctttgttctaagaatatttgtttcatctagtttatgagtccaaatgatatagactgtaaatgtcacagcagtggtgaaagactgctcggtcatgagcaccgacagtaactcactggcacgtgaatttctgaccgatgtcaaccggctttgcaatgcagtggtccagagggtggaggccagggaggaagaagaggaggagacgcacatggcaacccttggacagtaccttgtccatggtcgaggatttctattacttaccaagctaaattctataattgatcaggcattgacatgtagagaagaactcctgactcttcttctgtctctccttccactggtatggaagatacctgtccaagaagaaaaggcaacagattttaacctaccgctctcagcagatataatcctgaccaaagaaaagaactcaagttcacaaagatccactcaggaaaaattacatttagaaggaagtgccctgtctagtcaggtttctgcaaaagtaaatgtttttcgaaaaagcagacgacagcgtaaaattacccatcgctattctgtaagagatgcaagaaagacacagctctccacctcagattcagaagccaattcagatgaaaaaggcatagcaatgaataagcatagaaggccccatctgctgcatcattttttaacatcgtttcctaaacaagaccaccccaaagctaaacttgaccgcttagcaaccaaagaacagactcctccagatgctatggctttggaaaattccagagagattattccaagacaggggtcaaacactgacattttaagtgagccagctgccttgtctgttatcagtaacatgaacaattctccatttgacttatgtcatgttttgttatctttattagaaaaagtttgtaagtttgacgttaccttgaatcataattctcctttagcagccagtgtagtgcccacactaactgaattcctagcaggctttggggactgctgcagtctgagcgacaacttggagagtcgagtagtttctgcaggttggaccgaagaaccggtggctttgattcaaaggatgctctttcgaacagtgttgcatcttctgtcagtagatgttagtactgcagagatgatgccagaaaatcttaggaaaaatttaactgaattgcttagagcagctttaaaaattagaatatgcctagaaaagcagcctgacccttttgcaccaagacaaaagaaaacactgcaggaggttcaggaagattttgtgttttcaaagtatcgtcatagagcccttcttttacctgagcttttggaaggagttcttcagattctgatctgttgtcttcaaagtgcagcttcaaatcccttctacttcagtcaagccatggatttggttcaagaattcattcagcatcatggatttaatttatttgaaacagcagttcttcaaatggaatggctggttttaagagatggagttcctcccgaggcctcagagcatttgaaagccctaataaatagtgtgatgaaaataatgagcactgtcaaaaaagtgaaatcagagcaacttcatcattcgatgtgtacaagaaaaaggcacagacgatgtgaatattctcattttatgcatcatcaccgagatctctcaggtcttctggtttcggcttttaaaaaccaggtttccaaaaacccatttgaagagactgcagatggagatgtttattatcctgagcggtgctgttgcattgcagtgtgtgcccatcagtgcttgcgcttactacagcaggcttccttgagcagcacttgtgtccagatcctatcgggtgttcataacattggaatatgctgttgtatggatcccaaatctgtaatcattcctttgctccatgcttttaaattgccagcactgaaaaattttcagcagcatatattgaatatccttaacaaacttattttggatcagttaggaggagcagagatatcaccaaaaattaaaaaagcagcttgtaatatttgtactgttgactctgaccaactagcccaattagaagagacactgcagggaaacttatgtgatgctgaactctcctcaagtttatccagtccttcttacagatttcaagggatcctgcccagcagtggatctgaagatttgttgtggaaatgggatgctttaaaggcttatcagaactttgtttttgnagaagacagattacatagtatacagattgcaaatcacatttgcaatttaatccagaaaggcaatatagttgttcagtggaaattatataattacatatttaatcctgtgctccaaagaggagttgaattagcacatcattgtcaacacctaagcgttacttcagctcaaagtcatgtatgtagccatcataaccagtgcttgcctcaggacgtgcttcagatttatgtaaaaactctgcctatcctgcttaaatccagggtaataagagatttgtttttgagttgtaatggagtaagtcaaataatcgaattaaattgcttaaatggtattcgaagtcattctctaaaagcatttgaaactctgataatcagcctaggggagcaacagaaagatgcctcagttccagatattgatgggatagacattgaacagaaggagttgtcctctgtacatgtgggtacttcttttcatcatcagcaagcttattcagattctcctcagagtctcagcaaattttatgctggcctcaaagaagcttatccaaagagacggaagactgttaaccaagatgttcatatcaacacaataaacctattcctctgtgtggcttttttatgcgtaagtaaagaagcagagtctgacagggagtcggccaatgactcagaagatacttctggctatgacagcacagccagcgagcctttaagtcatatgctgccatgtatatctctcgagagccttgtcttgccttctcctgaacatatgcaccaagcagcagacatttggtctatgtgtcgttggatctacatgttgagttcagtgttccagaaacagttttataggcttggtggtttccgagtatgccataagttaatatttatgataatacagaaactgttcagaagtcacaaagaggagcaaggaaaaaaggagggagatacaagtgtaaatgaaaaccaggatttaaacagaatttctcaacctaagagaactatgaaggaagatttattatctttggctataaaaagtgaccccataccatcagaactaggtagtctaaaaaagagtgctgacagtttaggtaaattagagttacagcatatttcttccataaatgtggaagaagtttcagctactgaagccgctcccgaggaagcaaagctatttacaagtcaagaaagtgagacctcacttcaaagtatacgacttttggaagcccttctggccatttgtcttcatggtgccagaactagtcaacagaagatggaattggagttacctaatcagaacttgtctgtggaaagtatattatttgaaatgagggaccatctttcccagtcaaaggtgattgaaacacaactagcaaagcctttatttgatgccctgcttcgagttgccctcgggaattattcagcagattttgaacataatgatgctatgactgagaagagtcatcaatctgcagaagaattgtcatcccagcctggtgatttttcagaagaagctgaggattctcagtgttgtagttttaaacttttagttgaagaagaaggttacgaagcagatagtgaaagcaatcctgaagatggcgaaacccaggatgatggggtagacttaaagtctgaaacagaaggtttcagtgcatcaagcagtccaaatgacttactcgaaaacctcactcaaggggaaataatttatcctgagatttgtatgctggaattaaatttgctttctgctagtaaagccaaacttgatgtgcttgcccatgtatttgagagttttttgaaaattattaggcagaaagaaaagaatgtttttctgctcatgcaacagggaactgtgaaaaatcttttaggagggttcttgagtattttaacacaggatgattctgattttcaagcatgccagagagtattggtggatcttttggtatctttgatgagttcaagaacatgttcagaagagctaacccttcttttgagaatatttctggagaaatctccttgtacaaaaattcttcttctgggtattctgaaaattattgaaagtgatactactatgagcccttcacagtatctaaccttccctttactgcacgctccaaatttaagcaacggtgtttcatcacaaaagtatcctgggattttaaacagtaaggccatgggtttattgagaagagcacgagtttcacggagcaagaaagaggctgatagagagagttttccccatcggctgctttcatcttggcacatagccccagtccacctgccgttgctggggcaaaactgctggccacacctatcagaaggtttcagtgtttccctgtggtttaatgtggagtgtatccatgaagctgagagtactacagaaaaaggaaagaagataaagaaaagaaacaaatcattaattttaccagatagcagttttgatggtacagagagcgacagaccagaaggtgcagagtacataaatcctggtgaaagactcatagaagaaggatgtattcatataatttcactgggatccaaagcgttgatgatccaagtgtgggctgatccccacaatgccactcttatctttcgtgtgtgcatggattcaaatgatgacatgaaagctgttttactagcacaggttgaatcacaggagaatattttcctcccaagcaaatggcaacatttagtactcacctacttacagcagccccaagggaaaaggaggattcatgggaaaatctccatatgggtctctggacagaggtaggaagcattttgagaaaatgcatctcaatctcagttacaatgttatgtttcattagtcaattatagcttctgaaacagaatacagaaacttctaggtttttactataataaaatttactatattttt

SEQ ID NO: 330117 - DNA, 6357 bp, Homo sapiens
  misc_feature (2724)..(2724): n is a, c, g, or t
gagagagggccactcgccttcctggtgacacagagatttcctagccccgttaccaaacgaaaaagcaacgcaagggcttctaagaagccatcccaatgaccttttggctttgagaagagcagtcctcataccagagtgtttggggttttggcctctttcagtgtttattcattcttacgtgggaaagttgtattccgaggtttctgtggtgcatgaagcttttgccttcaccatctgttcccgtgtcttcctcgggtgacatcagagtacagcagtattttcccttgccatctaatggggtttgggctgtttgactcaaccgtgtgtgttcctcaatgccaggggaataatcctaccctaagtcagctgaacagaagccaggatctaactgcaaacaagagacccagcttgcttaacagcatggaagagaccagtttcgttgcagctacctgggaagacggttgctaattagcctgcaacaaagagttccttgctcatctaaaagaggcaatcaccgttcaggtgaagctttgttctaagaatatttgtttcatctagtttatgagtccaaatgatatagactgtaaatgtcacagcagtggtgaaagactgctcggtcatgagcaccgacagtaactcactggcacgtgaatttctgaccgatgtcaaccggctttgcaatgcagtggtccagagggtggaggccagggaggaagaagaggaggagacgcacatggcaacccttggacagtaccttgtccatggtcgaggatttctattacttaccaagctaaattctataattgatcaggcattgacatgtagagaagaactcctgactcttcttctgtctctccttccactggtatggaagatacctgtccaagaagaaaaggcaacagattttaacctaccgctctcagcagatataatcctgaccaaagaaaagaactcaagttcacaaagatccactcaggaaaaattacatttagaaggaagtgccctgtctagtcaggtttctgcaaaagtaaatgtttttcgaaaaagcagacgacagcgtaaaattacccatcgctattctgtaagagatgcaagaaagacacagctctccacctcagattcagaagccaattcagatgaaaaaggcatagcaatgaataagcatagaaggccccatctgctgcatcattttttaacatcgtttcctaaacaagaccaccccaaagctaaacttgaccgcttagcaaccaaagaacagactcctccagatgctatggctttggaaaattccagagagattattccaagacaggggtcaaacactgacattttaagtgagccagctgccttgtctgttatcagtaacatgaacaattctccatttgacttatgtcatgttttgttatctttattagaaaaagtttgtaagtttgacgttaccttgaatcataattctcctttagcagccagtgtagtgcccacactaactgaattcctagcaggctttggggactgctgcagtctgagcgacaacttggagagtcgagtagtttctgcaggttggaccgaagaaccggtggctttgattcaaaggatgctctttcgaacagtgttgcatcttctgtcagtagatgttagtactgcagagatgatgccagaaaatcttaggaaaaatttaactgaattgcttagagcagctttaaaaattagaatatgcctagaaaagcagcctgacccttttgcaccaagacaaaagaaaacactgcaggaggttcaggaagattttgtgttttcaaagtatcgtcatagagcccttcttttacctgagcttttggaaggagttcttcagattctgatctgttgtcttcaaagtgcagcttcaaatcccttctacttcagtcaagccatggatttggttcaagaattcattcagcatcatggatttaatttatttgaaacagcagttcttcaaatggaatggctggttttaagagatggagttcctcccgaggcctcagagcatttgaaagccctaataaatagtgtgatgaaaataatgagcactgtcaaaaaagtgaaatcagagcaacttcatcattcgatgtgtacaagaaaaaggcacagacgatgtgaatattctcattttatgcatcatcaccgagatctctcaggtcttctggtttcggcttttaaaaaccaggtttccaaaaacccatttgaagagactgcagatggagatgtttattatcctgagcggtgctgttgcattgcagtgtgtgcccatcagtgcttgcgcttactacagcaggcttccttgagcagcacttgtgtccagatcctatcgggtgttcataacattggaatatgctgttgtatggatcccaaatctgtaatcattcctttgctccatgcttttaaattgccagcactgaaaaattttcagcagcatatattgaatatccttaacaaacttattttggatcagttaggaggagcagagatatcaccaaaaattaaaaaagcagcttgtaatatttgtactgttgactctgaccaactagcccaattagaagagacactgcagggaaacttatgtgatgctgaactctcctcaagtttatccagtccttcttacagatttcaagggatcctgcccagcagtggatctgaagatttgttgtggaaatgggatgctttaaaggcttatcagaactttgtttttgnagaagacagattacatagtatacagattgcaaatcacatttgcaatttaatccagaaaggcaatatagttgttcagtggaaattatataattacatatttaatcctgtgctccaaagaggagttgaattagcacatcattgtcaacacctaagcgttacttcagctcaaagtcatgtatgtagccatcataaccagtgcttgcctcaggacgtgcttcagatttatgtaaaaactctgcctatcctgcttaaatccagggtaataagagatttgtttttgagttgtaatggagtaagtcaaataatcgaattaaattgcttaaatggtattcgaagtcattctctaaaagcatttgaaactctgataatcagcctaggggagcaacagaaagatgcctcagttccagatattgatgggatagacattgaacagaaggagttgtcctctgtacatgtgggtacttcttttcatcatcagcaagcttattcagattctcctcagagtctcagcaaattttatgctggcctcaaagaagcttatccaaagagacggaagactgttaaccaagatgttcatatcaacacaataaacctattcctctgtgtggcttttttatgcgtaagtaaagaagcagagtctgacagggagtcggccaatgactcagaagatacttctggctatgacagcacagccagcgagcctttaagtcatatgctgccatgtatatctctcgagagccttgtcttgccttctcctgaacatatgcaccaagcagcagacatttggtctatgtgtcgttggatctacatgttgagttcagtgttccagaaacagttttataggcttggtggtttccgagtatgccataagttaatatttatgataatacagaaactgttcagaagtcacaaagaggagcaaggaaaaaaggagggagatacaagtgtaaatgaaaaccaggatttaaacagaatttctcaacctaagagaactatgaaggaagatttattatctttggctataaaaagtgaccccataccatcagaactaggtagtctaaaaaagagtgctgacagtttaggtaaattagagttacagcatatttcttccataaatgtggaagaagtttcagctactgaagccgctcccgaggaagcaaagctatttacaagtcaagaaagtgagacctcacttcaaagtatacgacttttggaagcccttctggccatttgtcttcatggtgccagaactagtcaacagaagatggaattggagttacctaatcagaacttgtctgtggaaagtatattatttgaaatgagggaccatctttcccagtcaaaggtgattgaaacacaactagcaaagcctttatttgatgccctgcttcgagttgccctcgggaattattcagcagattttgaacataatgatgctatgactgagaagagtcatcaatctgcagaagaattgtcatcccagcctggtgatttttcagaagaagctgaggattctcagtgttgtagttttaaacttttagttgaagaagaaggttacgaagcagatagtgaaagcaatcctgaagatggcgaaacccaggatgatggggtagacttaaagtctgaaacagaaggtttcagtgcatcaagcagtccaaatgacttactcgaaaacctcactcaaggggaaataatttatcctgagatttgtatgctggaattaaatttgctttctgctagtaaagccaaacttgatgtgcttgcccatgtatttgagagttttttgaaaattattaggcagaaagaaaagaatgtttttctgctcatgcaacagggaactgtgaaaaatcttttaggagggttcttgagtattttaacacaggatgattctgattttcaagcatgccagagagtattggtggatcttttggtatctttgatgagttcaagaacatgttcagaagagctaacccttcttttgagaatatttctggagaaatctccttgtacaaaaattcttcttctgggtattctgaaaattattgaaagtgatactactatgagcccttcacagtatctaaccttccctttactgcacgctccaaatttaagcaacggtgtttcatcacaaaagtatcctgggattttaaacagtaaggccatgggtttattgagaagagcacgagtttcacggagcaagaaagaggctgatagagagagttttccccatcggctgctttcatcttggcacatagccccagtccacctgccgttgctggggcaaaactgctggccacacctatcagaaggtttcagtgtttccctgtggtttaatgtggagtgtatccatgaagctgagagtactacagaaaaaggaaagaagataaagaaaagaaacaaatcattaattttaccagatagcagttttgatggtacagagagcgacagaccagaaggtgcagagtacataaatcctggtgaaagactcatagaagaaggatgtattcatataatttcactgggatccaaagcgttgatgatccaagtgtgggctgatccccacaatgccactcttatctttcgtgtgtgcatggattcaaatgatgacatgaaagctgttttactagcacaggttgaatcacaggagaatattttcctcccaagcaaatggcaacatttagtactcacctacttacagcagccccaagggaaaaggaggattcatgggaaaatctccatatgggtctctggacagaggaagcctgatgttactttggattttatgcttccaagaaaaacaagtttgtcatctgatagcaataaaacattttgcatgattggccattgtttatcatcccaagaagagtttttgcagttggctggaaaatgggacctgggaaatttgcttctcttcaacggagctaaggttggttcacaagaggccttttatctgtatgcttgtggacccaaccatacatctgtaatgccatgtaagtatggcaagccagtcaatgactactccaaatatattaataaagaaattttgcgatgtgaacaaatcagagaactttttatgaccaagaaagatgtggatattggtctcttaattgaaagtctttcagttgtttatacaacttactgtcctgctcagtataccatctatgaaccagtgattagacttaaaggtcaaatgaaaacccaactctctcaaagacccttcagctcaaaagaagttcagagcatcttattagaacctcatcatctaaagaatctccaacctactgaatataaaactattcaaggcattctgcacgaaattggtggaactggcatatttgtttttctctttgccagggttgttgaactcagtagctgtgaagaaactcaagcattagcactgcgagttatactctcattaattaaatacaaccaacaaagagtacatgaattagaaaattgtaatggactttctatgattcatcaggtgttgatcaaacaaaaatgcattgttgggttttacattttgaaggtatgtcttcataaaatttattcttatagtttcatatgcagtgatactcatctcgtcatcaaagtcttccaataatagtttgtatttcagttattcctgaagaa

SEQ ID NO: 330118 - DNA, 828 bp, Homo sapiens
gagagagggccactcgccttcctggtgacacagagatttcctagccccgttaccaaacgaaaaagcaacgcaagggcttctaagaagccatcccaatgaccttttggctttgagaagagcagtcctcataccagagtgtttggggttttggcctctttcagtgtttattcattcttacgtgggaaagttgtattccgaggtttctgtggtgcatgaagcttttgccttcaccatctgttcccgtgtcttcctcgggtgacatcagagtacagcagtattttcccttgccatctaatggggtttgggctgtttgactcaaccgtgtgtgttcctcaatgccaggggaataatcctaccctaagtcagctgaacagaagccaggatctaactgcaaacaagagacccagcttgcttaacagcatggaagagaccagtttcgttgcagctacctgggaagacggttgctaattagcctgcaacaaagagttccttgctcatctaaaagaggcaatcaccgttcaggtgaagctttgttctaagaatatttgtttcatctagtttatgagtccaaatgatatagactgtaaatgtcacagcagtggtgaaagactgctcggtcatgagcaccgacagtaactcactggcacgtgaatttctgaccgatgtcaaccggctttgcaatgcagtggtccagagggtggaggccagggaggaagaagaggaggtttgagaccagctgggccaacatggtgaaacccatctctactgaatatacaaaaattagctgggcatggtggcatgtgcctgtggtcccagctgctcatgagg

SEQ ID NO: 330119 - DNA, 584 bp, Homo sapiens
taaattgagtttcacttaattcacttaaattcagcacagtagaaccattaatcctaatgactttgaatcattcagtcaatactgtattttgttaagaagacaggaaaaaacatatgttttgggaagatattaataaaaagtggttaaaataaaaatagttttggcatttaagaattttaagcattaagccaggtgtggggtgcatgcctatagtcccagctgcttggagtctgaggtgggaggctgtcttgagtccaggagttagaggctgcagtaagctgtgattgtgtcactgcacttcagtaggtaagagagcaagaccctgtctcttaagaaaaagtaaaggaattttaagcattagttacttgtaaaattaacctatatggattttaacagtgctagataaatgggcttttgctgtggttgtgatttataatgcaaaagagaggtggttccacttaatagatttttaagtagtatttttgtatctactcttaccaggagagaattcctctaatattattccacaacagatggccgcccatatgctgcgttctagaagcctaccagcattccctacttct

SEQ ID NO: 330120 - DNA, 434 bp, Homo sapiens
cagcctctcttttgttgttttaaaaatcagtttgtatcctttgaagtaatgtcagctagtgtttagagtaagtataggtgtgcctctgttttgttgttttaaaaatcaatttgtatcctttgaactaatgtcagctagtgtttagagtaaggataagtgtgagaggaggtaacccagagatatgacataaatgaaggaaatcagccctgcagcaaaatacattgaggataaactcctttagtgggtttaagataaataagagggctgtcaccttaaaattgagttttaaaacatattgaggtattctaagccttcttttttcattccattagattttaacctaccgctctcagcagatataatcctgaccaaagaaaagaactcaagttcacaaagatccactcaggaaaaattacatttagaaggaagtgccc

SEQ ID NO: 330121 - DNA, 259 bp, Homo sapiens
ggtggcaattgagagataatgctgtagaaatctttctaacaaatggcagaacactcctgttggcatttgataacaccaaggtaaattcacccttattaattgatatatattgtttaagtgctcatgggccactgtaactatactcatactgattacatgaaggtttactgaaatcgaataaaattgccatgtttcttagtcctgattaaagtgaagcctttgttatatgaggattgtctttgacctccacagtgaggta

SEQ ID NO: 330122 - DNA, 268 bp, Homo sapiens
agttaagttgacaattctttaaatctaaagagatttttttttattttttcaggaatacaaagaggggcaactcacacccatgccccgagaggtttgtagatcatttgtgaaaattatagcagaagtccttggatctcctccagatttggaattattgacaattatcttcaatttccttttagcagttcaccctcctactaatacttacgtttgtcacaatcccacgaacttctacttttctttgcacataggtaggtataatcatttt

SEQ ID NO: 330123 - DNA, 509 bp, Homo sapiens
gcagattaattcaatttaaaacataaaaattgagtgctgtttgttttcaccccttgtttgaacctgagtactcacttaaaaatatttgtaagtttgggattttctacttatctgaattgttttacaaaacaagttaaagatactttgtgaagtgttaaattatttactagctttcctttgaatttaatgattgctaaaattgaaagcttaatgtttctgttgaacttcctgattaaccaattactaatgcatcttatattaatgctaattttctatagacccttcttgaaggatgctgtggtgaagatattatttatatgaatgagaatggagagtttaagttggatgtagactctaatgctataatccaagatgttaagctgttagaggaactattgcttgactggaagatatggagtaaagcagaggcatgtaatatgtactttttttccattttttattgtggtaaaatgcatataacacaaaatttaccatcttaagcattttta

SEQ ID NO: 330124 - DNA, 615 bp, Homo sapiens
atataaacatttggagtttttaaattaacagatcagttgtgacttacttactcaatctctataatgattttttttatagctacaagtcctggatggtcacttaaaacaccctttaatctttttacttgcagagcagtatggtatgaccccatctactatccaacctcatggcagttggatccaacagaagggccaaatcgagagaggagacgtttacagagatgttatttaactattccaaataagtatctccttagggatagacagaaatcagaaggtaatagtggcttcttgactcaacatataaatatagcagagaactatggtcattagataaagataatatttacttttctcctcaacagatgttgtcaaaccaccactctcttacctgtttgaagacaaaactcattcttctttctcttctactgtcaaagacaaagctgcaagtgaatctataaggtaactttgaatcaatagaccttcactctttcatgaatatacaacagcttattgtagtgtttatgtaatatttattttatataatgccatcattttcagaaaaatcctaaacaggaaaggctcaagggaggacaaggttatatggccaaaatc

SEQ ID NO: 330125 - DNA, 14126 bp, Homo sapiens
  misc_feature (2294)..(2294): n is a, c, g, or t
gcggccgcgtcgacgcggcggcggcagcggcgtcggctcggggttctccgggagagggggagtgcgcggcggccgcagctgccacaaaccaggtgaagctttgttctaagaatatttgtttcatctagtttatgagtccaaatgatatagactgtaaatgtcacagcagtggtgaaagactgctcggtcatgagcaccgacagtaactcactggcacgtgaatttctgaccgatgtcaaccggctttgcaatgcagtggtccagagggtggaggccagggaggaagaagaggaggagacgcacatggcaacccttggacagtaccttgtccatggtcgaggatttctattacttaccaagctaaattctataattgatcaggcattgacatgtagagaagaactcctgactcttcttctgtctctccttccactggtatggaagatacctgtccaagaagaaaaggcaacagattttaacctaccgctctcagcagatataatcctgaccaaagaaaagaactcaagttcacaaagatccactcaggaaaaattacatttagaaggaagtgccctgtctagtcaggtttctgcaaaagtaaatgtttttcgaaaaagcagacgacagcgtaaaattacccatcgctattctgtaagagatgcaagaaagacacagctctccacctcagattcagaagccaattcagatgaaaaaggcatagcaatgaataagcatagaaggccccatctgctgcatcattttttaacatcgtttcctaaacaagaccaccccaaagctaaacttgaccgcttagcaaccaaagaacagactcctccagatgctatggctttggaaaattccagagagattattccaagacaggggtcaaacactgacattttaagtgagccagctgccttgtctgttatcagtaacatgaacaattctccatttgacttatgtcatgttttgttatctttattagaaaaagtttgtaagtttgacgttaccttgaatcataattctcctttagcagccagtgtagtgcccacactaactgaattcctagcaggctttggggactgctgcagtctgagcgacaacttggagagtcgagtagtttctgcaggttggaccgaagaaccggtggctttgattcaaaggatgctctttcgaacagtgttgcatcttctgtcagtagatgttagtactgcagagatgatgccagaaaatcttaggaaaaatttaactgaattgcttagagcagctttaaaaattagaatatgcctagaaaagcagcctgacccttttgcaccaagacaaaagaaaacactgcaggaggttcaggaagattttgtgttttcaaagtatcgtcatagagcccttcttttacctgagcttttggaaggagttcttcagattctgatctgttgtcttcaaagtgcagcttcaaatcccttctacttcagtcaagccatggatttggttcaagaattcattcagcatcatggatttaatttatttgaaacagcagttcttcaaatggaatggctggttttaagagatggagttcctcccgaggcctcagagcatttgaaagccctaataaatagtgtgatgaaaataatgagcactgtcaaaaaagtgaaatcagagcaacttcatcattcgatgtgtacaagaaaaaggcacagacgatgtgaatattctcattttatgcatcatcaccgagatctctcaggtcttctggtttcggcttttaaaaaccaggtttccaaaaacccatttgaagagactgcagatggagatgtttattatcctgagcggtgctgttgcattgcagtgtgtgcccatcagtgcttgcgcttactacagcaggcttccttgagcagcacttgtgtccagatcctatcgggtgttcataacattggaatatgctgttgtatggatcccaaatctgtaatcattcctttgctccatgcttttaaattgccagcactgaaaaattttcagcagcatatattgaatatccttaacaaacttattttggatcagttaggaggagcagagatatcaccaaaaattaaaaaagcagcttgtaatatttgtactgttgactctgaccaactagcccaattagaagagacactgcagggaaacttatgtgatgctgaactctcctcaagtttatccagtccttcttacagatttcaagggatcctgcccagcagtggatctgaagatttgttgtggaaatgggatgctttaaaggcttatcagaactttgtttttgnagaagacagattacatagtatacagattgcaaatcacatttgcaatttaatccagaaaggcaatatagttgttcagtggaaattatataattacatatttaatcctgtgctccaaagaggagttgaattagcacatcattgtcaacacctaagcgttacttcagctcaaagtcatgtatgtagccatcataaccagtgcttgcctcaggacgtgcttcagatttatgtaaaaactctgcctatcctgcttaaatccagggtaataagagatttgtttttgagttgtaatggagtaagtcaaataatcgaattaaattgcttaaatggtattcgaagtcattctctaaaagcatttgaaactctgataatcagcctaggggagcaacagaaagatgcctcagttccagatattgatgggatagacattgaacagaaggagttgtcctctgtacatgtgggtacttcttttcatcatcagcaagcttattcagattctcctcagagtctcagcaaattttatgctggcctcaaagaagcttatccaaagagacggaagactgttaaccaagatgttcatatcaacacaataaacctattcctctgtgtggcttttttatgcgtaagtaaagaagcagagtctgacagggagtcggccaatgactcagaagatacttctggctatgacagcacagccagcgagcctttaagtcatatgctgccatgtatatctctcgagagccttgtcttgccttctcctgaacatatgcaccaagcagcagacatttggtctatgtgtcgttggatctacatgttgagttcagtgttccagaaacagttttataggcttggtggtttccgagtatgccataagttaatatttatgataatacagaaactgttcagaagtcacaaagaggagcaaggaaaaaaggagggagatacaagtgtaaatgaaaaccaggatttaaacagaatttctcaacctaagagaactatgaaggaagatttattatctttggctataaaaagtgaccccataccatcagaactaggtagtctaaaaaagagtgctgacagtttaggtaaattagagttacagcatatttcttccataaatgtggaagaagtttcagctactgaagccgctcccgaggaagcaaagctatttacaagtcaagaaagtgagacctcacttcaaagtatacgacttttggaagcccttctggccatttgtcttcatggtgccagaactagtcaacagaagatggaattggagttacctaatcagaacttgtctgtggaaagtatattatttgaaatgagggaccatctttcccagtcaaaggtgattgaaacacaactagcaaagcctttatttgatgccctgcttcgagttgccctcgggaattattcagcagattttgaacataatgatgctatgactgagaagagtcatcaatctgcagaagaattgtcatcccagcctggtgatttttcagaagaagctgaggattctcagtgttgtagttttaaacttttagttgaagaagaaggttacgaagcagatagtgaaagcaatcctgaagatggcgaaacccaggatgatggggtagacttaaagtctgaaacagaaggtttcagtgcatcaagcagtccaaatgacttactcgaaaacctcactcaaggggaaataatttatcctgagatttgtatgctggaattaaatttgctttctgctagtaaagccaaacttgatgtgcttgcccatgtatttgagagttttttgaaaattattaggcagaaagaaaagaatgtttttctgctcatgcaacagggaactgtgaaaaatcttttaggagggttcttgagtattttaacacaggatgattctgattttcaagcatgccagagagtattggtggatcttttggtatctttgatgagttcaagaacatgttcagaagagctaacccttcttttgagaatatttctggagaaatctccttgtacaaaaattcttcttctgggtattctgaaaattattgaaagtgatactactatgagcccttcacagtatctaaccttccctttactgcacgctccaaatttaagcaacggtgtttcatcacaaaagtatcctgggattttaaacagtaaggccatgggtttattgagaagagcacgagtttcacggagcaagaaagaggctgatagagagagttttccccatcggctgctttcatcttggcacatagccccagtccacctgccgttgctggggcaaaactgctggccacacctatcagaaggtttcagtgtttccctgtggtttaatgtggagtgtatccatgaagctgagagtactacagaaaaaggaaagaagataaagaaaagaaacaaatcattaattttaccagatagcagttttgatggtacagagagcgacagaccagaaggtgcagagtacataaatcctggtgaaagactcatagaagaaggatgtattcatataatttcactgggatccaaagcgttgatgatccaagtgtgggctgatccccacaatgccactcttatctttcgtgtgtgcatggattcaaatgatgacatgaaagctgttttactagcacaggttgaatcacaggagaatattttcctcccaagcaaatggcaacatttagtactcacctacttacagcagccccaagggaaaaggaggattcatgggaaaatctccatatgggtctctggacagaggaagcctgatgttactttggattttatgcttccaagaaaaacaagtttgtcatctgatagcaataaaacattttgcatgattggccattgtttatcatcccaagaagagtttttgcagttggctggaaaatgggacctgggaaatttgcttctcttcaacggagctaaggttggttcacaagaggccttttatctgtatgcttgtggacccaaccatacatctgtaatgccatgtaagtatggcaagccagtcaatgactactccaaatatattaataaagaaattttgcgatgtgaacaaatcagagaactttttatgaccaagaaagatgtggatattggtctcttaattgaaagtctttcagttgtttatacaacttactgtcctgctcagtataccatctatgaaccagtgattagacttaaaggtcaaatgaaaacccaactctctcaaagacccttcagctcaaaagaagttcagagcatcttattagaacctcatcatctaaagaatctccaacctactgaatataaaactattcaaggcattctgcacgaaattggtggaactggcatatttgtttttctctttgccagggttgttgaactcagtagctgtgaagaaactcaagcattagcactgcgagttatactctcattaattaaatacaaccaacaaagagtacatgaattagaaaattgtaatggactttctatgattcatcaggtgttgatcaaacaaaaatgcattgttgggttttacattttgaagacccttcttgaaggatgctgtggtgaagatattatttatatgaatgagaatggagagtttaagttggatgtagactctaatgctataatccaagatgttaagctgttagaggaactattgcttgactggaagatatggagtaaagcagagcaaggtgtttgggaaactttgctagcagctctagaagtcctcatcagagcagatcaccaccagcagatgtttaatattaagcagttattgaaagctcaagtggttcatcactttctactgacttgtcaggttttgcaggaatacaaagaggggcaactcacacccatgccccgagaggtttgtagatcatttgtgaaaattatagcagaagtccttggatctcctccagatttggaattattgacaattatcttcaatttccttttagcagttcaccctcctactaatacttacgtttgtcacaatcccacgaacttctacttttctttgcacatagatggcaagatctttcaggagaaagtgcggtcaatcatgtacctgaggcattccagcagtggaggaaggtcccttatgagccctggatttatggtaataagcccatctggttttactgcttcaccatatgaaggagagaattcctctaatattattccacaacagatggccgcccatatgctgcgttctagaagcctaccagcattccctacttcttcactactaacgcaatcacaaaaactgactggaagtttgggttgtagtatcgacaggttacaaaatattgcagatacttatgttgccacccaatcaaagaaacaaaattctttggggagttccgacacactgaaaaaaggcaaagaggacgcattcatcagtagctgtgagtctgcaaaaactgtttgtgaaatggaagctgtcctctcagcccaggtctctgtcagtgatgtcccaaagggagtgctgggatttccagtggtcaaagcagatcataaacagttgggagcagaacccaggtcagaagatgacagtcctggggatgagtcctgcccacgccgacctgattacctaaagggattggcctccttccagcgaagccacagcactattgcaagccttgggctagcttttccttcacagaacggatctgcagctgttggccgttggccaagtcttgttgatagaaacactgatgattgggaaaactttgcctattctcttggttatgagccaaattacaaccgaactgcaagtgctcacagtgtaactgaagactgtttggtacctatatgctgtggattatatgaactcctaagtggggttcttcttatcctgcctgatgttttgcttgaagatgtgatggacaagcttattcaagcagatacacttttggtcctcgttaaccacccatcaccagctatacaacaaggtgttattaaactattagatgcatattttgctagagcatctaaggaacaaaaagataaatttctgaagaatcgtggattttccttgctagccaaccagttgtatcttcatcgaggaactcaagaattgttagaatgcttcatcgaaatgttctttggtcgacatattggccttgatgaagaatttgatctggaagatgtgagaaacatgggattgtttcagaagtggtctgtcattcctattctgggactaatagagacctctctatatgacaacatactcttgcataatgctcttttacttcttctccaaattttaaattcttgttctaaggtagcagatatgttgctggataatggtctactctatgtgttatgtaatacagtagcagccctgaatggattagaaaagaacattcccatgagtgaatataaattgcttgcttgtgatatacagcaacttttcatagcagttacaattcatgcttgcagttcctcaggctcacaatattttagggttattgaagaccttattgtaatgcttggatatcttcaaaatagcaaaaacaagaggacacaaaatatggctgttgcactacagcttagagttctccaggctgctatggaatttataaggaccaccgcaaatcatgactctgaaaacctcacagattcactccagtcaccttctgctccccatcatgcagtagttcaaaagcggaaaagcattgctggtcctcgaaaatttccccttgctcaaactgaatcgcttctgatgaaaatgcgttcagtggcaaatgatgagcttcatgtgatgatgcaacggagaatgagccaagagaaccctagccaagcaactgaaacggaacttgcgcagagactacagaggctcactgttttagcagtcaacaggattatttatcaagaatttaattcagacattattgacattttgagaactccagaaaatgtaactcaaagcaagacctcagttttccagaccgaaatttctgaggaaaatattcatcatgaacagtcttctgttttcaatccatttcagaaagaaatttttacatatctggtagaaggattcaaagtatctattggttcaagtaaagccagtggttccaagcagcaatggactaaaattctgtggtcttgtaaggagaccttccgaatgcagcttgggagactactagtgcatattttgtcgccagcccacgctgcacaagagagaaagcaaatttttgaaatagttcatgaaccaaatcatcaggaaatactacgagactgtctcagcccatccctacaacatggagccaagttagttttgtatttgtcagagttgatacataatcaccaaggtgaattgactgaagaagagctaggcacagcagaactgcttatgaatgctttgaagttatgtggtcacaagtgcatccctcccagtgcatcaacaaaagcagaccttattaaaatgatcaaagaggaacaaaagaaatatgaaactgaagaaggagtgaataaagctgcttggcagaaaacagttaacaataatcaacaaagtctctttcagcgtctggattcaaaatcaaaggatatatctaaaatagctgcagatatcacccaggcagtgtctctctcccaaggaaatgagagaaaaaaggtgatccagcatattagaggaatgtataaagtagatttgagtgccagcagacattggcaggaacttattcagcagctgacacatgatagagcagtatggtatgaccccatctactatccaacctcatggcagttggatccaacagaagggccaaatcgagagaggagacgtttacagagatgttatttaactattccaaataagtatctccttagggatagacagaaatcagaagatgttgtcaaaccaccactctcttacctgtttgaagacaaaactcattcttctttctcttctactgtcaaagacaaagctgcaagtgaatctataagagtgaatcgaagatgcatcagtgttgcaccatctagagagacagctggtgaattgttactaggtaaatgtggaatgtattttgtggaagataatgcttctgatacagttgaaagttcgagccttcagggagagttggaaccagcatcattttcctggacatatgaagaaattaaagaagttcacaagcgttggtggcaattgagagataatgctgtagaaatctttctaacaaatggcagaacactcctgttggcatttgataacaccaaggttcgtgatgatgtataccacaatatactcacaaataacctccctaatcttctggaatatggtaacatcaccgctctgacaaatttatggtatactgggcaaattactaattttgaatatttgactcacttaaacaaacatgctggccgatccttcaatgatctcatgcagtatcctgtgttcccatttatacttgctgactacgttagtgagacacttgacctcaatgatctgttgatatacagaaatctctctaaacctatagctgttcagtataaagaaaaagaagatcgttatgtggacacatacaagtacttggaggaagagtaccgcaaaggagccagagaagatgaccccatgcctcccgtgcagccctatcactatggctcccactattccaatagcggcactgtgcttcacttcctggtcaggatgcctcctttcactaaaatgtttttagcctatcaagatcaaagttttgacattccagacagaacttttcattctacaaatacaacttggcgactctcatcttttgaatctatgactgatgtgaaagaacttatcccagagtttttctatcttccagagttcctagttaaccgtgaaggttttgattttggtgtgcgtcagaatggtgaacgggttaatcacgtcaaccttcccccttgggcgcgtaatgatcctcgtctttttatcctcatccatcggcaggctctagagtctgactacgtgtcgcagaacatctgtcagtggattgacttggtgtttgggtataagcaaaaggggaaggcttctgttcaagcgatcaatgtttttcatcctgctacatattttggaatggatgtctctgcagttgaagatccagttcagagacgagcgctagaaaccatgataaaaacctacgggcagactccccgtcagctgttccacatggcccatgtgagcagacctggagccaagctcaatattgaaggagagcttccagctgctgtggggttgctagtgcagtttgctttcagggagacccgagaacaggtcaaagaaatcacctatccgagtcctttgtcatggataaaaggcttgaaatggggggaatacgtgggttcccccagtgctccagtacctgtggtctgcttcagccagccccacggagaaagatttggctctctccaggctctgcccaccagagcaatctgtggtttgtcacggaatttctgtcttctgatgacatatagcaaggaacaaggtgtgagaagcatgaacagtacggacattcagtggtcagccatcctgagctggggatatgctgataatattttaaggttgaagagtaaacaaagtgagcctccagtaaactttattcaaagttcacaacagtaccaggtgactagttgtgcttgggtgcctgacagttgccagctgtttactggaagcaaatgcggtgtcatcacagcctacacaaacagatttacaagcagcacgccatcagaaatagaaatggagactcaaatacatctctatggtcacacagaagagataaccagcttatttgtttgcaaaccatacagtatactgataagtgtgagcagagacggaacctgcatcatatgggatttaaacaggttatgctatgtacaaagtctggcgggacacaaaagccctgtcacagctgtctctgccagtgaaacctcaggtgatattgctactgtgtgtgattcagctggcggaggcagtgacctcagactctggacggtgaacggggatctcgttggacatgtccactgcagggagatcatctgttccgtggctttctccaaccagcctgagggagtatctatcaatgtaatcgctgggggattagaaaatggaattgtaaggttatggagcacatgggacttaaagcctgtgagagaaattacatttcccaaatcaaataagcccatcatcagccttacattttcttgtgatggccaccatttgtacacagcaaacagtgatgggaccgtgattgcctggtgtcggaaggaccagcagcgcttgaaacagccaatgttctattccttccttagcagctatgcagccgggtgaatgcgaatgaacttcacgttctccaaagcactttaactccaaactagatttgttgacttcaccagttttaggaggttgaacctaaagaaatggatgactggacaaaccatccaaataatgataaagtctattcatctgcacaaaattctgaagagtcacatgatcctaagaggaaagttctgttctattttagtgataatctggaagattgtgtcaatatgcactagccaacaagttttaagcctcgcatggtacattaaaatgatattcttaaaattttttcccaccaaggtattccaaagaaaatattaaggtctcccctttttctatgattccaaaaggaccagtagaatttaaattggttggttgattgtttatataaaacacactaaaattatattttaaaagtttactgccatgaaatactcctcccaccacacacacatgctccaaaagaggaaagaaaaaaagataatttttaggacttgataattgctttctttgagaagcaaattattcagtaggtgcctctgtaccaaatattttatggaatatctaaatactaaaataaactatgaatgaatctcaaaattaggcagtttttgccagttgctttcttagctcaaaggagaaccagaatttttttgacagccacaaacaagaatacaggtatcttggatttcagacacattctgtttcttcataaaaattttacttaaaatctgtaacgctagatattgactatccttagttgagtcactgaggtttaaacacaatggtaagtcttaaagtctgctatttacagagcattgaatctgtaccaatttgcaatagaaagccttcagtatgcaagaagtttgcatgggtattaagaacacagcctaaataaggcatttgatctaatctgcaggaagaattttcttccccaaaacagaattataaaagcttactttaaacaggaggcagaataattcttttaggaaaccatttcattctgtttctactaacctataccatctgagaattcctaaacatcttggagccgtctgtctctcccatatgatggctgtctgtatatttttacttggggtgctgctttattggctttgaaaacactgtcagataagctcagtaatatgttaccatgggataaaaatatgtatccctgcctaagaataacttgtgcatttgttatggaaatttaattcatatggtgtttacagtactacttttgtaacttccagactttctaaaacattctgcttaaaaaccatataaaatataattccaaagtctctgctgtcaagatagattcgagagaaagcacgtggccatgtatgctttaaccttaaactgcatacacatgtagtgatacctaggctgcatttagatcaccgtgtgctcaggccaggtgtgaatcctgaggtccatggaggtgcagagatgagattactcctattcacgttgaagtgatttgctttgttaacaaaaaattgcagctattgtctagctttcatttttttactgagaactttaaattagtcccctattagaatagggttgctactcatctttttttaaaaaccgaatttcatcatttatctaaagagaaaatatgcagaataactggtcttgttaagagtgcaatattatatttttatgtaaaaataaaaattaatttggggggattatttattcagcatgaaacctaatatgtatatgtttgaaatacttcataatgtgcatgttgtagcaaacatttctgtaaattatcacaagctctgttacctttatatacactgcctcttcaatttggaaataaatttcataaaaatagaaaaaaaaaaaaacaaaaaacaaaaaaaaaaaatgtgtgcgcggcgcgcgccctgggcccccgcgagaagaggccttcttaagcaccctggggtgggggcgcgcggaggagccccacagataggtgaaaaagggacacaaatgggccacaaacgcgcggcaccccgaaggcgaaactcgcgcgacacgacaaccagagggcagcggacatcatccaccaataaaaaacacagccccgggggggaaacacggagacgcgtctgcacacaaaacactcacgacaggagagtcacgaagagagggcaacacaagcgcgggaactaactacacaacaggggaagcacaaaaagaagaaagccgagaaattcaacaaattaaacgcccgtaagcactcgtggataacaagaaaagacacagaagaagagaaaagaaaaaccagaagaacaaacaagacaacacacaagccaaaaacacgcagcaacaagaaagcgaaaggcagacggagcggagagcagcagaggacagagagtgaacggaagagacgaggagcgaagagagggggagggaggacggcgggagccgacagcaaggcccgcggagcgagagggggggacagacaagaagaaaggaagcagagagaagggacgagagacgagaggcaagagcgcgcggaggagcaggagcagacggggagc

SEQ ID NO: 330126 - DNA, 12284 bp, Homo sapiens
  misc_feature (2724)..(2724): n is a, c, g, or t
gagagagggccactcgccttcctggtgacacagagatttcctagccccgttaccaaacgaaaaagcaacgcaagggcttctaagaagccatcccaatgaccttttggctttgagaagagcagtcctcataccagagtgtttggggttttggcctctttcagtgtttattcattcttacgtgggaaagttgtattccgaggtttctgtggtgcatgaagcttttgccttcaccatctgttcccgtgtcttcctcgggtgacatcagagtacagcagtattttcccttgccatctaatggggtttgggctgtttgactcaaccgtgtgtgttcctcaatgccaggggaataatcctaccctaagtcagctgaacagaagccaggatctaactgcaaacaagagacccagcttgcttaacagcatggaagagaccagtttcgttgcagctacctgggaagacggttgctaattagcctgcaacaaagagttccttgctcatctaaaagaggcaatcaccgttcaggtgaagctttgttctaagaatatttgtttcatctagtttatgagtccaaatgatatagactgtaaatgtcacagcagtggtgaaagactgctcggtcatgagcaccgacagtaactcactggcacgtgaatttctgaccgatgtcaaccggctttgcaatgcagtggtccagagggtggaggccagggaggaagaagaggaggagacgcacatggcaacccttggacagtaccttgtccatggtcgaggatttctattacttaccaagctaaattctataattgatcaggcattgacatgtagagaagaactcctgactcttcttctgtctctccttccactggtatggaagatacctgtccaagaagaaaaggcaacagattttaacctaccgctctcagcagatataatcctgaccaaagaaaagaactcaagttcacaaagatccactcaggaaaaattacatttagaaggaagtgccctgtctagtcaggtttctgcaaaagtaaatgtttttcgaaaaagcagacgacagcgtaaaattacccatcgctattctgtaagagatgcaagaaagacacagctctccacctcagattcagaagccaattcagatgaaaaaggcatagcaatgaataagcatagaaggccccatctgctgcatcattttttaacatcgtttcctaaacaagaccaccccaaagctaaacttgaccgcttagcaaccaaagaacagactcctccagatgctatggctttggaaaattccagagagattattccaagacaggggtcaaacactgacattttaagtgagccagctgccttgtctgttatcagtaacatgaacaattctccatttgacttatgtcatgttttgttatctttattagaaaaagtttgtaagtttgacgttaccttgaatcataattctcctttagcagccagtgtagtgcccacactaactgaattcctagcaggctttggggactgctgcagtctgagcgacaacttggagagtcgagtagtttctgcaggttggaccgaagaaccggtggctttgattcaaaggatgctctttcgaacagtgttgcatcttctgtcagtagatgttagtactgcagagatgatgccagaaaatcttaggaaaaatttaactgaattgcttagagcagctttaaaaattagaatatgcctagaaaagcagcctgacccttttgcaccaagacaaaagaaaacactgcaggaggttcaggaagattttgtgttttcaaagtatcgtcatagagcccttcttttacctgagcttttggaaggagttcttcagattctgatctgttgtcttcaaagtgcagcttcaaatcccttctacttcagtcaagccatggatttggttcaagaattcattcagcatcatggatttaatttatttgaaacagcagttcttcaaatggaatggctggttttaagagatggagttcctcccgaggcctcagagcatttgaaagccctaataaatagtgtgatgaaaataatgagcactgtcaaaaaagtgaaatcagagcaacttcatcattcgatgtgtacaagaaaaaggcacagacgatgtgaatattctcattttatgcatcatcaccgagatctctcaggtcttctggtttcggcttttaaaaaccaggtttccaaaaacccatttgaagagactgcagatggagatgtttattatcctgagcggtgctgttgcattgcagtgtgtgcccatcagtgcttgcgcttactacagcaggcttccttgagcagcacttgtgtccagatcctatcgggtgttcataacattggaatatgctgttgtatggatcccaaatctgtaatcattcctttgctccatgcttttaaattgccagcactgaaaaattttcagcagcatatattgaatatccttaacaaacttattttggatcagttaggaggagcagagatatcaccaaaaattaaaaaagcagcttgtaatatttgtactgttgactctgaccaactagcccaattagaagagacactgcagggaaacttatgtgatgctgaactctcctcaagtttatccagtccttcttacagatttcaagggatcctgcccagcagtggatctgaagatttgttgtggaaatgggatgctttaaaggcttatcagaactttgtttttgnagaagacagattacatagtatacagattgcaaatcacatttgcaatttaatccagaaaggcaatatagttgttcagtggaaattatataattacatatttaatcctgtgctccaaagaggagttgaattagcacatcattgtcaacacctaagcgttacttcagctcaaagtcatgtatgtagccatcataaccagtgcttgcctcaggacgtgcttcagatttatgtaaaaactctgcctatcctgcttaaatccagggtaataagagatttgtttttgagttgtaatggagtaagtcaaataatcgaattaaattgcttaaatggtattcgaagtcattctctaaaagcatttgaaactctgataatcagcctaggggagcaacagaaagatgcctcagttccagatattgatgggatagacattgaacagaaggagttgtcctctgtacatgtgggtacttcttttcatcatcagcaagcttattcagattctcctcagagtctcagcaaattttatgctggcctcaaagaagcttatccaaagagacggaagactgttaaccaagatgttcatatcaacacaataaacctattcctctgtgtggcttttttatgcgtaagtaaagaagcagagtctgacagggagtcggccaatgactcagaagatacttctggctatgacagcacagccagcgagcctttaagtcatatgctgccatgtatatctctcgagagccttgtcttgccttctcctgaacatatgcaccaagcagcagacatttggtctatgtgtcgttggatctacatgttgagttcagtgttccagaaacagttttataggcttggtggtttccgagtatgccataagttaatatttatgataatacagaaactgttcagaagtcacaaagaggagcaaggaaaaaaggagggagatacaagtgtaaatgaaaaccaggatttaaacagaatttctcaacctaagagaactatgaaggaagatttattatctttggctataaaaagtgaccccataccatcagaactaggtagtctaaaaaagagtgctgacagtttaggtaaattagagttacagcatatttcttccataaatgtggaagaagtttcagctactgaagccgctcccgaggaagcaaagctatttacaagtcaagaaagtgagacctcacttcaaagtatacgacttttggaagcccttctggccatttgtcttcatggtgccagaactagtcaacagaagatggaattggagttacctaatcagaacttgtctgtggaaagtatattatttgaaatgagggaccatctttcccagtcaaaggtgattgaaacacaactagcaaagcctttatttgatgccctgcttcgagttgccctcgggaattattcagcagattttgaacataatgatgctatgactgagaagagtcatcaatctgcagaagaattgtcatcccagcctggtgatttttcagaagaagctgaggattctcagtgttgtagttttaaacttttagttgaagaagaaggttacgaagcagatagtgaaagcaatcctgaagatggcgaaacccaggatgatggggtagacttaaagtctgaaacagaaggtttcagtgcatcaagcagtccaaatgacttactcgaaaacctcactcaaggggaaataatttatcctgagatttgtatgctggaattaaatttgctttctgctagtaaagccaaacttgatgtgcttgcccatgtatttgagagttttttgaaaattattaggcagaaagaaaagaatgtttttctgctcatgcaacagggaactgtgaaaaatcttttaggagggttcttgagtattttaacacaggatgattctgattttcaagcatgccagagagtattggtggatcttttggtatctttgatgagttcaagaacatgttcagaagagctaacccttcttttgagaatatttctggagaaatctccttgtacaaaaattcttcttctgggtattctgaaaattattgaaagtgatactactatgagcccttcacagtatctaaccttccctttactgcacgctccaaatttaagcaacggtgtttcatcacaaaagtatcctgggattttaaacagtaaggccatgggtttattgagaagagcacgagtttcacggagcaagaaagaggctgatagagagagttttccccatcggctgctttcatcttggcacatagccccagtccacctgccgttgctggggcaaaactgctggccacacctatcagaaggtttcagtgtttccctgtggtttaatgtggagtgtatccatgaagctgagagtactacagaaaaaggaaagaagataaagaaaagaaacaaatcattaattttaccagatagcagttttgatggtacagagagcgacagaccagaaggtgcagagtacataaatcctggtgaaagactcatagaagaaggatgtattcatataatttcactgggatccaaagcgttgatgatccaagtgtgggctgatccccacaatgccactcttatctttcgtgtgtgcatggattcaaatgatgacatgaaagctgttttactagcacaggttgaatcacaggagaatattttcctcccaagcaaatggcaacatttagtactcacctacttacagcagccccaagggaaaaggaggattcatgggaaaatctccatatgggtctctggacagaggaagcctgatgttactttggattttatgcttccaagaaaaacaagtttgtcatctgatagcaataaaacattttgcatgattggccattgtttatcatcccaagaagagtttttgcagttggctggaaaatgggacctgggaaatttgcttctcttcaacggagctaaggttggttcacaagaggccttttatctgtatgcttgtggacccaaccatacatctgtaatgccatgtaagtatggcaagccagtcaatgactactccaaatatattaataaagaaattttgcgatgtgaacaaatcagagaactttttatgaccaagaaagatgtggatattggtctcttaattgaaagtctttcagttgtttatacaacttactgtcctgctcagtataccatctatgaaccagtgattagacttaaaggtcaaatgaaaacccaactctctcaaagacccttcagctcaaaagaagttcagagcatcttattagaacctcatcatctaaagaatctccaacctactgaatataaaactattcaaggcattctgcacgaaattggtggaactggcatatttgtttttctctttgccagggttgttgaactcagtagctgtgaagaaactcaagcattagcactgcgagttatactctcattaattaaatacaaccaacaaagagtacatgaattagaaaattgtaatggactttctatgattcatcaggtgttgatcaaacaaaaatgcattgttgggttttacattttgaagacccttcttgaaggatgctgtggtgaagatattatttatatgaatgagaatggagagtttaagttggatgtagactctaatgctataatccaagatgttaagctgttagaggaactattgcttgactggaagatatggagtaaagcagagcaaggtgtttgggaaactttgctagcagctctagaagtcctcatcagagcagatcaccaccagcagatgtttaatattaagcagttattgaaagctcaagtggttcatcactttctactgacttgtcaggttttgcaggaatacaaagaggggcaactcacacccatgccccgagagatggcaagatctttcaggagaaagtgcggtcaatcatgtacctgaggcattccagcagtggaggaaggtcccttatgagccctggatttatggtaataagcccatctggttttactgcttcaccatatgaaggagagaattcctctaatattattccacaacagatggccgcccatatgctgcgttctagaagcctaccagcattccctacttcttcactactaacgcaatcacaaaaactgactggaagtttgggttgtagtatcgacaggttacaaaatattgcagatacttatgttgccacccaatcaaagaaacaaaattctttggggagttccgacacactgaaaaaaggcaaagaggacgcattcatcagtagctgtgagtctgcaaaaactgtttgtgaaatggaagctgtcctctcagcccaggtctctgtcagtgatgtcccaaagggagtgctgggatttccagtggtcaaagcagatcataaacagttgggagcagaacccaggtcagaagatgacagtcctggggatgagtcctgcccacgccgacctgattacctaaagggattggcctccttccagcgaagccacagcactattgcaagccttgggctagcttttccttcacagaacggatctgcagctgttggccgttggccaagtcttgttgatagaaacactgatgattgggaaaatgtaactgaagactgtttggtacctatatgctgtggattatatgaactcctaagtggggttcttcttatcctgcctgatgttttgcttgaagatgtgatggacaagcttattcaagcagatacacttttggtcctcgttaaccacccatcaccagctatacaacaaggtgttattaaactattagatgcatattttgctagagcatctaaggaacaaaaagataaatttctgaagaatcgtggattttccttgctagccaaccagttgtatcttcatcgaggaactcaagaattgttagaatgcttcatcgaaatgttctttggtcgacatattggccttgatgaagaatttgatctggaagatgtgagaaacatgggattgtttcagaagtggtctgtcattcctattctgggactaatagagacctctctatatgacaacatactcttgcataatgctcttttacttcttctccaaattttaaattcttgttctaaggtagcagatatgttgctggataatggtctactctatgtgttatgtaatacagtagcagccctgaatggattagaaaagaacattcccatgagtgaatataaattgcttgcttgtgatatacagcaacttttcatagcagttacaattcatgcttgcagttcctcaggctcacaatattttagggttattgaagaccttattgtaatgcttggatatcttcaaaatagcaaaaacaagaggacacaaaatatggctgttgcactacagcttagagttctccaggctgctatggaatttataaggaccaccgcaaatcatgactctgaaaacctcacagattcactccagtcaccttctgctccccatcatgcagtagttcaaaagcggaaaagcattgctggtcctcgaaaatttccccttgctcaaactgaatcgcttctgatgaaaatgcgttcagtggcaaatgatgagcttcatgtgatgatgcaacggagaatgagccaagagaaccctagccaagcaactgaaacggaacttgcgcagagactacagaggctcactgttttagcagtcaacaggattatttatcaagaatttaattcagacattattgacattttgagaactccagaaaatgtaactcaaagcaagacctcagttttccagaccgaaatttctgaggaaaatattcatcatgaacagtcttctgttttcaatccatttcagaaagaaatttttacatatctggtagaaggattcaaagtatctattggttcaagtaaagccagtggttccaagcagcaatggactaaaattctgtggtcttgtaaggagaccttccgaatgcagcttgggagactactagtgcatattttgtcgccagcccacgctgcacaagagagaaagcaaatttttgaaatagttcatgaaccaaatcatcaggaaatactacgagactgtctcagcccatccctacaacatggagccaagttagttttgtatttgtcagagttgatacataatcaccaaggtgaattgactgaagaagagctaggcacagcagaactgcttatgaatgctttgaagttatgtggtcacaagtgcatccctcccagtgcatcaacaaaagcagaccttattaaaatgatcaaagaggaacaaaagaaatatgaaactgaagaaggagtgaataaagctgcttggcagaaaacagttaacaataatcaacaaagtctctttcagcgtctggattcaaaatcaaaggatatatctaaaatagctgcagatatcacccaggcagtgtctctctcccaaggaaatgagagaaaaaaggtgatccagcatattagaggaatgtataaagtagatttgagtgccagcagacattggcaggaacttattcagcagctgacacatgatagagcagtatggtatgaccccatctactatccaacctcatggcagttggatccaacagaagggccaaatcgagagaggagacgtttacagagatgttatttaactattccaaataagtatctccttagggatagacagaaatcagaagatgttgtcaaaccaccactctcttacctgtttgaagacaaaactcattcttctttctcttctactgtcaaagacaaagctgcaagtgaatctataagagtgaatcgaagatgcatcagtgttgcaccatctagagagacagctggtgaattgttactaggtaaatgtggaatgtattttgtggaagataatgcttctgatacagttgaaagttcgagccttcagggagagttggaaccagcatcattttcctggacatatgaagaaattaaagaagttcacaagcgttggtggcaattgagagataatgctgtagaaatctttctaacaaatggcagaacactcctgttggcatttgataacaccaaggttcgtgatgatgtataccacaatatactcacaaataacctccctaatcttctggaatatggtaacatcaccgctctgacaaatttatggtatactgggcaaattactaattttgaatatttgactcacttaaacaaacatgctggccgatccttcaatgatctcatgcagtatcctgtgttcccatttatacttgctgactacgttagtgagacacttgacctcaatgatctgttgatatacagaaatctctctaaacctatagctgttcagtataaagaaaaagaagatcgttatgtggacacatacaagtacttggaggaagagtaccgcaaaggagccagagaagatgaccccatgcctcccgtgcagccctatcactatggctcccactattccaatagcggcactgtgcttcacttcctggtcaggatgcctcctttcactaaaatgtttttagcctatcaagatcaaagttttgacattccagacagaacttttcattctacaaatacaacttggcgactctcatcttttgaatctatgactgatgtgaaagaacttatcccagagtttttctatcttccagagttcctagttaaccgtgaaggttttgattttggtgtgcgtcagaatggtgaacgggttaatcacgtcaaccttcccccttgggcgcgtaatgatcctcgtctttttatcctcatccatcggcaggctctagagtctgactacgtgtcgcagaacatctgtcagtggattgacttggtgtttgggtataagcaaaaggggaaggcttctgttcaagcgatcaatgtttttcatcctgctacatattttggaatggatgtctctgcagttgaagatccagttcagagacgagcgctagaaaccatgataaaaacctacgggcagactccccgtcagctgttccacatggcccatgtgagcagacctggagccaagctcaatattgaaggagagcttccagctgctgtggggttgctagtgcagtttgctttcagggagacccgagaacaggtcaaagaaatcacctatccgagtcctttgtcatggataaaaggcttgaaatggggggaatacgtgggttcccccagtgctccagtacctgtggtctgcttcagccagccccacggagaaagatttggctctctccaggctctgcccaccagagcaatctgtggtttgtcacggaatttctgtcttctgatgacatatagcaaggaacaaggtgtgagaagcatgaacagtacggacattcagtggtcagccatcctgagctggggatatgctgataatattttaaggttgaagagtaaacaaagtgagcctccagtaaactttattcaaagttcacaacagtaccaggtgactagttgtgcttgggtgcctgacagttgccagctgtttactggaagcaaatgcggtgtcatcacagcctacacaaacagatttacaagcagcacgccatcagaaatagaaatggagactcaaatacatctctatggtcacacagaagagataaccagcttatttgtttgcaaaccatacagtatactgataagtgtgagcagagacggaacctgcatcatatgggatttaaacaggttatgctatgtacaaagtctggcgggacacaaaagccctgtcacagctgtctctgccagtgaaacctcaggtgatattgctactgtgtgtgattcagctggcggaggcagtgacctcagactctggacggtgaacggggatctcgttggacatgtccactgcagggagatcatctgttccgtggctttctccaaccagcctgagggagtatctatcaatgtaatcgctgggggattagaaaatggaattgtaaggttatggagcacatgggacttaaagcctgtgagagaaattacatttcccaaatcaaataagcccatcatcagccttacattttcttgtgatggccaccatttgtacacagcaaacagtgatgggaccgtgattgcctggtgtcggaaggaccagcagcgcttgaaacagccaatgttctattccttccttagcagctatgcagccgggtgaatgcgaatgaacttcacgttctccaaagcactttaactccaaactagatttgttgacttcaccagttttaggaggttgaacctaaagaaatggatgactggacaaaccatccaaataatgataaagtctattcatctgcacaaaattctgaagagtcacatgatcctaagaggaaagttctgttctattttagtgataatctggaagattgtgtcaatatgcactagccaacaagttttaagcctcgcatggtacattaaaatgatattcttaaaattttttcccaccaaggtattccaaagaaaatattaaggtctcccctttttctatgattccaaaaggaccagtagaatttaaattggttggttgattgtttatataaaacacactaaaattatattttaaaagtttactgccatgaaatactcctcccaccacacacacatgctccgaagcctgttagggtaccgagctcc

SEQ ID NO: 330127 - DNA, 6819 bp, Homo sapiens
  misc_feature (2724)..(2724): n is a, c, g, or t
gagagagggccactcgccttcctggtgacacagagatttcctagccccgttaccaaacgaaaaagcaacgcaagggcttctaagaagccatcccaatgaccttttggctttgagaagagcagtcctcataccagagtgtttggggttttggcctctttcagtgtttattcattcttacgtgggaaagttgtattccgaggtttctgtggtgcatgaagcttttgccttcaccatctgttcccgtgtcttcctcgggtgacatcagagtacagcagtattttcccttgccatctaatggggtttgggctgtttgactcaaccgtgtgtgttcctcaatgccaggggaataatcctaccctaagtcagctgaacagaagccaggatctaactgcaaacaagagacccagcttgcttaacagcatggaagagaccagtttcgttgcagctacctgggaagacggttgctaattagcctgcaacaaagagttccttgctcatctaaaagaggcaatcaccgttcaggtgaagctttgttctaagaatatttgtttcatctagtttatgagtccaaatgatatagactgtaaatgtcacagcagtggtgaaagactgctcggtcatgagcaccgacagtaactcactggcacgtgaatttctgaccgatgtcaaccggctttgcaatgcagtggtccagagggtggaggccagggaggaagaagaggaggagacgcacatggcaacccttggacagtaccttgtccatggtcgaggatttctattacttaccaagctaaattctataattgatcaggcattgacatgtagagaagaactcctgactcttcttctgtctctccttccactggtatggaagatacctgtccaagaagaaaaggcaacagattttaacctaccgctctcagcagatataatcctgaccaaagaaaagaactcaagttcacaaagatccactcaggaaaaattacatttagaaggaagtgccctgtctagtcaggtttctgcaaaagtaaatgtttttcgaaaaagcagacgacagcgtaaaattacccatcgctattctgtaagagatgcaagaaagacacagctctccacctcagattcagaagccaattcagatgaaaaaggcatagcaatgaataagcatagaaggccccatctgctgcatcattttttaacatcgtttcctaaacaagaccaccccaaagctaaacttgaccgcttagcaaccaaagaacagactcctccagatgctatggctttggaaaattccagagagattattccaagacaggggtcaaacactgacattttaagtgagccagctgccttgtctgttatcagtaacatgaacaattctccatttgacttatgtcatgttttgttatctttattagaaaaagtttgtaagtttgacgttaccttgaatcataattctcctttagcagccagtgtagtgcccacactaactgaattcctagcaggctttggggactgctgcagtctgagcgacaacttggagagtcgagtagtttctgcaggttggaccgaagaaccggtggctttgattcaaaggatgctctttcgaacagtgttgcatcttctgtcagtagatgttagtactgcagagatgatgccagaaaatcttaggaaaaatttaactgaattgcttagagcagctttaaaaattagaatatgcctagaaaagcagcctgacccttttgcaccaagacaaaagaaaacactgcaggaggttcaggaagattttgtgttttcaaagtatcgtcatagagcccttcttttacctgagcttttggaaggagttcttcagattctgatctgttgtcttcaaagtgcagcttcaaatcccttctacttcagtcaagccatggatttggttcaagaattcattcagcatcatggatttaatttatttgaaacagcagttcttcaaatggaatggctggttttaagagatggagttcctcccgaggcctcagagcatttgaaagccctaataaatagtgtgatgaaaataatgagcactgtcaaaaaagtgaaatcagagcaacttcatcattcgatgtgtacaagaaaaaggcacagacgatgtgaatattctcattttatgcatcatcaccgagatctctcaggtcttctggtttcggcttttaaaaaccaggtttccaaaaacccatttgaagagactgcagatggagatgtttattatcctgagcggtgctgttgcattgcagtgtgtgcccatcagtgcttgcgcttactacagcaggcttccttgagcagcacttgtgtccagatcctatcgggtgttcataacattggaatatgctgttgtatggatcccaaatctgtaatcattcctttgctccatgcttttaaattgccagcactgaaaaattttcagcagcatatattgaatatccttaacaaacttattttggatcagttaggaggagcagagatatcaccaaaaattaaaaaagcagcttgtaatatttgtactgttgactctgaccaactagcccaattagaagagacactgcagggaaacttatgtgatgctgaactctcctcaagtttatccagtccttcttacagatttcaagggatcctgcccagcagtggatctgaagatttgttgtggaaatgggatgctttaaaggcttatcagaactttgtttttgnagaagacagattacatagtatacagattgcaaatcacatttgcaatttaatccagaaaggcaatatagttgttcagtggaaattatataattacatatttaatcctgtgctccaaagaggagttgaattagcacatcattgtcaacacctaagcgttacttcagctcaaagtcatgtatgtagccatcataaccagtgcttgcctcaggacgtgcttcagatttatgtaaaaactctgcctatcctgcttaaatccagggtaataagagatttgtttttgagttgtaatggagtaagtcaaataatcgaattaaattgcttaaatggtattcgaagtcattctctaaaagcatttgaaactctgataatcagcctaggggagcaacagaaagatgcctcagttccagatattgatgggatagacattgaacagaaggagttgtcctctgtacatgtgggtacttcttttcatcatcagcaagcttattcagattctcctcagagtctcagcaaattttatgctggcctcaaagaagcttatccaaagagacggaagactgttaaccaagatgttcatatcaacacaataaacctattcctctgtgtggcttttttatgcgtaagtaaagaagcagagtctgacagggagtcggccaatgactcagaagatacttctggctatgacagcacagccagcgagcctttaagtcatatgctgccatgtatatctctcgagagccttgtcttgccttctcctgaacatatgcaccaagcagcagacatttggtctatgtgtcgttggatctacatgttgagttcagtgttccagaaacagttttataggcttggtggtttccgagtatgccataagttaatatttatgataatacagaaactgttcagaagtcacaaagaggagcaaggaaaaaaggagggagatacaagtgtaaatgaaaaccaggatttaaacagaatttctcaacctaagagaactatgaaggaagatttattatctttggctataaaaagtgaccccataccatcagaactaggtagtctaaaaaagagtgctgacagtttaggtaaattagagttacagcatatttcttccataaatgtggaagaagtttcagctactgaagccgctcccgaggaagcaaagctatttacaagtcaagaaagtgagacctcacttcaaagtatacgacttttggaagcccttctggccatttgtcttcatggtgccagaactagtcaacagaagatggaattggagttacctaatcagaacttgtctgtggaaagtatattatttgaaatgagggaccatctttcccagtcaaaggtgattgaaacacaactagcaaagcctttatttgatgccctgcttcgagttgccctcgggaattattcagcagattttgaacataatgatgctatgactgagaagagtcatcaatctgcagaagaattgtcatcccagcctggtgatttttcagaagaagctgaggattctcagtgttgtagttttaaacttttagttgaagaagaaggttacgaagcagatagtgaaagcaatcctgaagatggcgaaacccaggatgatggggtagacttaaagtctgaaacagaaggtttcagtgcatcaagcagtccaaatgacttactcgaaaacctcactcaaggggaaataatttatcctgagatttgtatgctggaattaaatttgctttctgctagtaaagccaaacttgatgtgcttgcccatgtatttgagagttttttgaaaattattaggcagaaagaaaagaatgtttttctgctcatgcaacagggaactgtgaaaaatcttttaggagggttcttgagtattttaacacaggatgattctgattttcaagcatgccagagagtattggtggatcttttggtatctttgatgagttcaagaacatgttcagaagagctaacccttcttttgagaatatttctggagaaatctccttgtacaaaaattcttcttctgggtattctgaaaattattgaaagtgatactactatgagcccttcacagtatctaaccttccctttactgcacgctccaaatttaagcaacggtgtttcatcacaaaagtatcctgggattttaaacagtaaggccatgggtttattgagaagagcacgagtttcacggagcaagaaagaggctgatagagagagttttccccatcggctgctttcatcttggcacatagccccagtccacctgccgttgctggggcaaaactgctggccacacctatcagaaggtttcagtgtttccctgtggtttaatgtggagtgtatccatgaagctgagagtactacagaaaaaggaaagaagataaagaaaagaaacaaatcattaattttaccagatagcagttttgatggtacagagagcgacagaccagaaggtgcagagtacataaatcctggtgaaagactcatagaagaaggatgtattcatataatttcactgggatccaaagcgttgatgatccaagtgtgggctgatccccacaatgccactcttatctttcgtgtgtgcatggattcaaatgatgacatgaaagctgttttactagcacaggttgaatcacaggagaatattttcctcccaagcaaatggcaacatttagtactcacctacttacagcagccccaagggaaaaggaggattcatgggaaaatctccatatgggtctctggacagaggaagcctgatgttactttggattttatgcttccaagaaaaacaagtttgtcatctgatagcaataaaacattttgcatgattggccattgtttatcatcccaagaagagtttttgcagttggctggaaaatgggacctgggaaatttgcttctcttcaacggagctaaggttggttcacaagaggccttttatctgtatgcttgtggacccaaccatacatctgtaatgccatgtaagtatggcaagccagtcaatgactactccaaatatattaataaagaaattttgcgatgtgaacaaatcagagaactttttatgaccaagaaagatgtggatattggtctcttaattgaaagtctttcagttgtttatacaacttactgtcctgctcagtataccatctatgaaccagtgattagacttaaaggtcaaatgaaaacccaactctctcaaagacccttcagctcaaaagaagttcagagcatcttattagaacctcatcatctaaagaatctccaacctactgaatataaaactattcaaggcattctgcacgaaattggtggaactggcatatttgtttttctctttgccagggttgttgaactcagtagctgtgaagaaactcaagcattagcactgcgagttatactctcattaattaaatacaaccaacaaagagtacatgaattagaaaattgtaatggactttctatgattcatcaggtgttgatcaaacaaaaatgcattgttgggttttacattttgaagacccttcttgaaggatgctgtggtgaagatattatttatatgaatgagaatggagagtttaagttggatgtagactctaatgctataatccaagatgttaagctgttagaggaactattgcttgactggaagatatggagtaaagcagagcaaggtgtttgggaaactttgctagcagctctagaagtcctcatcagagcagatcaccaccagcagatgtttaatattaagcagttattgaaagctcaagtggttcatcactttctactgacttgtcaggttttgcaggaatacaaagaggggcaactcacacccatgccccgagaggtttgtagatcatttgtgaaaattatagcagaagtccttggatctcctccagatttggaattattgacaattatcttcaatttccttttagcagttcaccctcctactaatacttacgtttgtcacaatcccacgaacttctacttttctttgcacataggtaggtataatcatttttgttagatcatggctatttccacttttgttttattcttcccacttgattcacatttgtttga

SEQ ID NO: 330128 - DNA, 5158 bp, Homo sapiens
  misc_feature (2724)..(2724): n is a, c, g, or t
  misc_feature (5143)..(5143): n is a, c, g, or t
gagagagggccactcgccttcctggtgacacagagatttcctagccccgttaccaaacgaaaaagcaacgcaagggcttctaagaagccatcccaatgaccttttggctttgagaagagcagtcctcataccagagtgtttggggttttggcctctttcagtgtttattcattcttacgtgggaaagttgtattccgaggtttctgtggtgcatgaagcttttgccttcaccatctgttcccgtgtcttcctcgggtgacatcagagtacagcagtattttcccttgccatctaatggggtttgggctgtttgactcaaccgtgtgtgttcctcaatgccaggggaataatcctaccctaagtcagctgaacagaagccaggatctaactgcaaacaagagacccagcttgcttaacagcatggaagagaccagtttcgttgcagctacctgggaagacggttgctaattagcctgcaacaaagagttccttgctcatctaaaagaggcaatcaccgttcaggtgaagctttgttctaagaatatttgtttcatctagtttatgagtccaaatgatatagactgtaaatgtcacagcagtggtgaaagactgctcggtcatgagcaccgacagtaactcactggcacgtgaatttctgaccgatgtcaaccggctttgcaatgcagtggtccagagggtggaggccagggaggaagaagaggaggagacgcacatggcaacccttggacagtaccttgtccatggtcgaggatttctattacttaccaagctaaattctataattgatcaggcattgacatgtagagaagaactcctgactcttcttctgtctctccttccactggtatggaagatacctgtccaagaagaaaaggcaacagattttaacctaccgctctcagcagatataatcctgaccaaagaaaagaactcaagttcacaaagatccactcaggaaaaattacatttagaaggaagtgccctgtctagtcaggtttctgcaaaagtaaatgtttttcgaaaaagcagacgacagcgtaaaattacccatcgctattctgtaagagatgcaagaaagacacagctctccacctcagattcagaagccaattcagatgaaaaaggcatagcaatgaataagcatagaaggccccatctgctgcatcattttttaacatcgtttcctaaacaagaccaccccaaagctaaacttgaccgcttagcaaccaaagaacagactcctccagatgctatggctttggaaaattccagagagattattccaagacaggggtcaaacactgacattttaagtgagccagctgccttgtctgttatcagtaacatgaacaattctccatttgacttatgtcatgttttgttatctttattagaaaaagtttgtaagtttgacgttaccttgaatcataattctcctttagcagccagtgtagtgcccacactaactgaattcctagcaggctttggggactgctgcagtctgagcgacaacttggagagtcgagtagtttctgcaggttggaccgaagaaccggtggctttgattcaaaggatgctctttcgaacagtgttgcatcttctgtcagtagatgttagtactgcagagatgatgccagaaaatcttaggaaaaatttaactgaattgcttagagcagctttaaaaattagaatatgcctagaaaagcagcctgacccttttgcaccaagacaaaagaaaacactgcaggaggttcaggaagattttgtgttttcaaagtatcgtcatagagcccttcttttacctgagcttttggaaggagttcttcagattctgatctgttgtcttcaaagtgcagcttcaaatcccttctacttcagtcaagccatggatttggttcaagaattcattcagcatcatggatttaatttatttgaaacagcagttcttcaaatggaatggctggttttaagagatggagttcctcccgaggcctcagagcatttgaaagccctaataaatagtgtgatgaaaataatgagcactgtcaaaaaagtgaaatcagagcaacttcatcattcgatgtgtacaagaaaaaggcacagacgatgtgaatattctcattttatgcatcatcaccgagatctctcaggtcttctggtttcggcttttaaaaaccaggtttccaaaaacccatttgaagagactgcagatggagatgtttattatcctgagcggtgctgttgcattgcagtgtgtgcccatcagtgcttgcgcttactacagcaggcttccttgagcagcacttgtgtccagatcctatcgggtgttcataacattggaatatgctgttgtatggatcccaaatctgtaatcattcctttgctccatgcttttaaattgccagcactgaaaaattttcagcagcatatattgaatatccttaacaaacttattttggatcagttaggaggagcagagatatcaccaaaaattaaaaaagcagcttgtaatatttgtactgttgactctgaccaactagcccaattagaagagacactgcagggaaacttatgtgatgctgaactctcctcaagtttatccagtccttcttacagatttcaagggatcctgcccagcagtggatctgaagatttgttgtggaaatgggatgctttaaaggcttatcagaactttgtttttgnagaagacagattacatagtatacagattgcaaatcacatttgcaatttaatccagaaaggcaatatagttgttcagtggaaattatataattacatatttaatcctgtgctccaaagaggagttgaattagcacatcattgtcaacacctaagcgttacttcagctcaaagtcatgtatgtagccatcataaccagtgcttgcctcaggacgtgcttcagatttatgtaaaaactctgcctatcctgcttaaatccagggtaataagagatttgtttttgagttgtaatggagtaagtcaaataatcgaattaaattgcttaaatggtattcgaagtcattctctaaaagcatttgaaactctgataatcagcctaggggagcaacagaaagatgcctcagttccagatattgatgggatagacattgaacagaaggagttgtcctctgtacatgtgggtacttcttttcatcatcagcaagcttattcagattctcctcagagtctcagcaaattttatgctggcctcaaagaagcttatccaaagagacggaagactgttaaccaagatgttcatatcaacacaataaacctattcctctgtgtggcttttttatgcgtaagtaaagaagcagagtctgacagggagtcggccaatgactcagaagatacttctggctatgacagcacagccagcgagcctttaagtcatatgctgccatgtatatctctcgagagccttgtcttgccttctcctgaacatatgcaccaagcagcagacatttggtctatgtgtcgttggatctacatgttgagttcagtgttccagaaacagttttataggcttggtggtttccgagtatgccataagttaatatttatgataatacagaaactgttcagaagtcacaaagaggagcaaggaaaaaaggagggagatacaagtgtaaatgaaaaccaggatttaaacagaatttctcaacctaagagaactatgaaggaagatttattatctttggctataaaaagtgaccccataccatcagaactaggtagtctaaaaaagagtgctgacagtttaggtaaattagagttacagcatatttcttccataaatgtggaagaagtttcagctactgaagccgctcccgaggaagcaaagctatttacaagtcaagaaagtgagacctcacttcaaagtatacgacttttggaagcccttctggccatttgtcttcatggtgccagaactagtcaacagaagatggaattggagttacctaatcagaacttgtctgtggaaagtatattatttgaaatgagggaccatctttcccagtcaaaggtgattgaaacacaactagcaaagcctttatttgatgccctgcttcgagttgccctcgggaattattcagcagattttgaacataatgatgctatgactgagaagagtcatcaatctgcagaagaattgtcatcccagcctggtgatttttcagaagaagctgaggattctcagtgttgtagttttaaacttttagttgaagaagaaggttacgaagcagatagtgaaagcaatcctgaagatggcgaaacccaggatgatggggtagacttaaagtctgaaacagaaggtttcagtgcatcaagcagtccaaatgacttactcgaaaacctcactcaaggggaaataatttatcctgagatttgtatgctggaattaaatttgctttctgctagtaaagccaaacttgatgtgcttgcccatgtatttgagagttttttgaaaattattaggcagaaagaaaagaatgtttttctgctcatgcaacagggaactgtgaaaaatcttttaggagggttcttgagtattttaacacaggatgattctgattttcaagcatgccagagagtattggtggatcttttggtatctttgatgagttcaagaacatgttcagaagagctaacccttcttttgagaatatttctggagaaatctccttgtacaaaaattcttcttctgggtattctgaaaattattgaaagtgatactactatgagcccttcacagtatctaaccttccctttactgcacgctccaaatttaagcaacggtgtttcatcacaaaagtatcctgggattttaaacagtaaggccatgggtttattgagaagagcacgagtttcacggagcaagaaagaggctgatagagagagttttccccatcggctgctttcatcttggcacatagccccagtccacctgccgttgctggggcaaaactgctggccacacctatcagaaggtttcagtgtttccctgtggtttaatgtggagtgtatccatgaagctgagagtactacttacagcagccccaagggaaaaggaggattacagggaaatatgcctgaggtntcatggggtgcccgc

SEQ ID NO: 330129 - DNA, 8044 bp, Homo sapiens
gagatttttttttattttttcaggaatacaaagaggggcaactcacacccatgccccgagaggtttgtagatcatttgtgaaaattatagcagaagtccttggatctcctccagatttggaattattgacaattatcttcaatttccttttagcagttcaccctcctactaatacttacgtttgtcacaatcccacgaacttctacttttctttgcacatagatggcaagatctttcaggagaaagtgcggtcaatcatgtacctgaggcattccagcagtggaggaaggtcccttatgagccctggatttatggtaataagcccatctggttttactgcttcaccatatgaaggagagaattcctctaatattattccacaacagatggccgcccatatgctgcgttctagaagcctaccagcattccctacttcttcactactaacgcaatcacaaaaactgactggaagtttgggttgtagtatcgacaggttacaaaatattgcagatacttatgttgccacccaatcaaagaaacaaaattctttggggagttccgacacactgaaaaaaggcaaagaggacgcattcatcagtagctgtgagtctgcaaaaactgtttgtgaaatggaagctgtcctctcagcccaggtctctgtcagtgatgtcccaaagggagtgctgggatttccagtggtcaaagcagatcataaacagttgggagcagaacccaggtcagaagatgacagtcctggggatgagtcctgcccacgccgacctgattacctaaagggattggcctccttccagcgaagccacagcactattgcaagccttgggctagcttttccttcacagaacggatctgcagctgttggccgttggccaagtcttgttgatagaaacactgatgattgggaaaatgtaactgaagactgtttggtacctatatgctgtggattatatgaactcctaagtggggttcttcttatcctgcctgatgttttgcttgaagatgtgatggacaagcttattcaagcagatacacttttggtcctcgttaaccacccatcaccagctatacaacaaggtgttattaaactattagatgcatattttgctagagcatctaaggaacaaaaagataaatttctgaagaatcgtggattttccttgctagccaaccagttgtatcttcatcgaggaactcaagaattgttagaatgcttcatcgaaatgttctttggtcgacatattggccttgatgaagaatttgatctggaagatgtgagaaacatgggattgtttcagaagtggtctgtcattcctattctgggactaatagagacctctctatatgacaacatactcttgcataatgctcttttacttcttctccaaattttaaattcttgttctaaggtagcagatatgttgctggataatggtctactctatgtgttatgtaatacagtagcagccctgaatggattagaaaagaacattcccatgagtgaatataaattgcttgcttgtgatatacagcaacttttcatagcagttacaattcatgcttgcagttcctcaggctcacaatattttagggttattgaagaccttattgtaatgcttggatatcttcaaaatagcaaaaacaagaggacacaaaatatggctgttgcactacagcttagagttctccaggctgctatggaatttataaggaccaccgcaaatcatgactctgaaaacctcacagattcactccagtcaccttctgctccccatcatgcagtagttcaaaagcggaaaagcattgctggtcctcgaaaatttccccttgctcaaactgaatcgcttctgatgaaaatgcgttcagtggcaaatgatgagcttcatgtgatgatgcaacggagaatgagccaagagaaccctagccaagcaactgaaacggaacttgcgcagagactacagaggctcactgttttagcagtcaacaggattatttatcaagaatttaattcagacattattgacattttgagaactccagaaaatgtaactcaaagcaagacctcagttttccagaccgaaatttctgaggaaaatattcatcatgaacagtcttctgttttcaatccatttcagaaagaaatttttacatatctggtagaaggattcaaagtatctattggttcaagtaaagccagtggttccaagcagcaatggactaaaattctgtggtcttgtaaggagaccttccgaatgcagcttgggagactactagtgcatattttgtcgccagcccacgctgcacaagagagaaagcaaatttttgaaatagttcatgaaccaaatcatcaggaaatactacgagactgtctcagcccatccctacaacatggagccaagttagttttgtatttgtcagagttgatacataatcaccaaggtgaattgactgaagaagagctaggcacagcagaactgcttatgaatgctttgaagttatgtggtcacaagtgcatccctcccagtgcatcaacaaaagcagaccttattaaaatgatcaaagaggaacaaaagaaatatgaaactgaagaaggagtgaataaagctgcttggcagaaaacagttaacaataatcaacaaagtctctttcagcgtctggattcaaaatcaaaggatatatctaaaatagctgcagatatcacccaggcagtgtctctctcccaaggaaatgagagaaaaaaggtgatccagcatattagaggaatgtataaagtagatttgagtgccagcagacattggcaggaacttattcagcagctgacacatgatagagcagtatggtatgaccccatctactatccaacctcatggcagttggatccaacagaagggccaaatcgagagaggagacgtttacagagatgttatttaactattccaaataagtatctccttagggatagacagaaatcagaagatgttgtcaaaccaccactctcttacctgtttgaagacaaaactcattcttctttctcttctactgtcaaagacaaagctgcaagtgaatctataagagtgaatcgaagatgcatcagtgttgcaccatctagagagacagctggtgaattgttactaggtaaatgtggaatgtattttgtggaagataatgcttctgatacagttgaaagttcgagccttcagggagagttggaaccagcatcattttcctggacatatgaagaaattaaagaagttcacaagcgttggtggcaattgagagataatgctgtagaaatctttctaacaaatggcagaacactcctgttggcatttgataacaccaaggttcgtgatgatgtataccacaatatactcacaaataacctccctaatcttctggaatatggtaacatcaccgctctgacaaatttatggtatactgggcaaattactaattttgaatatttgactcacttaaacaaacatgctggccgatccttcaatgatctcatgcagtatcctgtgttcccatttatacttgctgactacgttagtgagacacttgacctcaatgatctgttgatatacagaaatctctctaaacctatagctgttcagtataaagaaaaagaagatcgttatgtggacacatacaagtacttggaggaagagtaccgcaaaggagccagagaagatgaccccatgcctcccgtgcagccctatcactatggctcccactattccaatagcggcactgtgcttcacttcctggtcaggatgcctcctttcactaaaatgtttttagcctatcaagatcaaagttttgacattccagacagaacttttcattctacaaatacaacttggcgactctcatcttttgaatctatgactgatgtgaaagaacttatcccagagtttttctatcttccagagttcctagttaaccgtgaaggttttgattttggtgtgcgtcagaatggtgaacgggttaatcacgtcaaccttcccccttgggcgcgtaatgatcctcgtctttttatcctcatccatcggcaggctctagagtctgactacgtgtcgcagaacatctgtcagtggattgacttggtgtttgggtataagcaaaaggggaaggcttctgttcaagcgatcaatgtttttcatcctgctacatattttggaatggatgtctctgcagttgaagatccagttcagagacgagcgctagaaaccatgataaaaacctacgggcagactccccgtcagctgttccacatggcccatgtgagcagacctggagccaagctcaatattgaaggagagcttccagctgctgtggggttgctagtgcagtttgctttcagggagacccgagaacaggtcaaagaaatcacctatccgagtcctttgtcatggataaaaggcttgaaatggggggaatacgtgggttcccccagtgctccagtacctgtggtctgcttcagccagccccacggagaaagatttggctctctccaggctctgcccaccagagcaatctgtggtttgtcacggaatttctgtcttctgatgacatatagcaaggaacaaggtgtgagaagcatgaacagtacggacattcagtggtcagccatcctgagctggggatatgctgataatattttaaggttgaagagtaaacaaagtgagcctccagtaaactttattcaaagttcacaacagtaccaggtgactagttgtgcttgggtgcctgacagttgccagctgtttactggaagcaaatgcggtgtcatcacagcctacacaaacagatttacaagcagcacgccatcagaaatagaaatggagactcaaatacatctctatggtcacacagaagagataaccagcttatttgtttgcaaaccatacagtatactgataagtgtgagcagagacggaacctgcatcatatgggatttaaacaggttatgctatgtacaaagtctggcgggacacaaaagccctgtcacagctgtctctgccagtgaaacctcaggtgatattgctactgtgtgtgattcagctggcggaggcagtgacctcagactctggacggtgaacggggatctcgttggacatgtccactgcagggagatcatctgttccgtggctttctccaaccagcctgagggagtatctatcaatgtaatcgctgggggattagaaaatggaattgtaaggttatggagcacatgggacttaaagcctgtgagagaaattacatttcccaaatcaaataagcccatcatcagccttacattttcttgtgatggccaccatttgtacacagcaaacagtgatgggaccgtgattgcctggtgtcggaaggaccagcagcgcttgaaacagccaatgttctattccttccttagcagctatgcagccgggtgaatgcgaatgaacttcacgttctccaaagcactttaactccaaactagatttgttgacttcaccagttttaggaggttgaacctaaagaaatggatgactggacaaaccatccaaataatgataaagtctattcatctgcacaaaattctgaagagtcacatgatcctaagaggaaagttctgttctattttagtgataatctggaagattgtgtcaatatgcactagccaacaagttttaagcctcgcatggtacattaaaatgatattcttaaaattttttcccaccaaggtattccaaagaaaatattaaggtctcccctttttctatgattccaaaaggaccagtagaatttaaattggttggttgattgtttatataaaacacactaaaattatattttaaaagtttactgccatgaaatactcctcccaccacacacacatgctccaaaagaggaaagaaaaaaagataatttttaggacttgataattgctttctttgagaagcaaattattcagtaggtgcctctgtaccaaatattttatggaatatctaaatactaaaataaactatgaatgaatctcaaaattaggcagtttttgccagttgctttcttagctcaaaggagaaccagaatttttttgacagccacaaacaagaatacaggtatcttggatttcagacacattctgtttcttcataaaaattttacttaaaatctgtaacgctagatattgactatccttagttgagtcactgaggtttaaacacaatggtaagtcttaaagtctgctatttacagagcattgaatctgtaccaatttgcaatagaaagccttcagtatgcaagaagtttgcatgggtattaagaacacagcctaaataaggcatttgatctaatctgcaggaagaattttcttccccaaaacagaattataaaagcttactttaaacaggaggcagaataattcttttaggaaaccatttcattctgtttctactaacctataccatctgagaattctaggaagaataataaaatctcgtgtattccacagcaaacttacataccataaagacagaattcctaaacatcttggagccgtctgtctctcccatatgatggctgtctgtatatttttacttggggtgctgctttattggctttgaaaacactgtcagataagctcagtaatatgttaccatgggataaaaatatgtatccctgcctaagaataacttgtgcatttgttatggaaatttaattcatatggtgtttacagtactacttttgtaacttccagactttctaaaacattctgcttaaaaaccatataaaatataattccaaagtctctgctgtcaagatagattcgagagaaagcacgtggccatgtatgctttaaccttaaactgcatacacatgtagtgatacctaggctgcatttagatcaccgtgtgctcaggccaggtgtgaatcctgaggtccatggaggtgcagagatgagattactcctattcacgttgaagtgatttgctttgttaacaaaaaattgcagctattgtctagctttcatttttttactgagaactttaaattagtcccctattagaatagggttgctactcatctttttttaaaaaccgaatttcatcatttatctaaagagaaaatatgcagaataactggtcttgttaagagtgcaatattatatttttatgtaaaaataaaaattaatttggggggattatttattcagcatgaaacctaatatgtatatgtttgaaatacttcataatgtgcatgttgtagcaaacatttctgtaaattatcacaagctctgttacctttatatacactgcctcttcaatttggaaataaatttcataaaaatagaaaaaaaaaaaaacaaaaaacaaaaaaaaaaaatgtgtgcgcggcgcgcgccctgggcccccgcgagaagaggccttcttaagcaccctggggtgggggcgcgcggaggagccccacagataggtgaaaaagggacacaaatgggccacaaacgcgcggcaccccgaaggcgaaactcgcgcgacacgacaaccagagggcagcggacatcatccaccaataaaaaacacagccccgggggggaaacacggagacgcgtctgcacacaaaacactcacgacaggagagtcacgaagagagggcaacacaagcgcgggaactaactacacaacaggggaagcacaaaaagaagaaagccgagaaattcaacaaattaaacgcccgtaagcactcgtggataacaagaaaagacacagaagaagagaaaagaaaaaccagaagaacaaacaagacaacacacaagccaaaaacacgcagcaacaagaaagcgaaaggcagacggagcggagagcagcagaggacagagagtgaacggaagagacgaggagcgaagagagggggagggaggacggcgggagccgacagcaaggcccgcggagcgagagggggggacagacaagaagaaaggaagcagagagaagggacgagagacgagaggcaagagcgcgcggaggagcaggagcagacggggagc

SEQ ID NO: 330130 - DNA, 2249 bp, Homo sapiens
aggaagagtccccaccctctcatgtaggtgagaggcggctgaagagttgctgtattctgggaatgggcagggtcactcgtccgaacagagtcctatcctacgcggcggaagagtgtgccctttgacttgcatcgtctacctacctctgccatcctctaccagccgcaactgcgagggctggagccaacttcaggactgattgatcatgacttctataaaggagcaggcagcaattagcaggctcttaagttttttacaggagtgggacaacgctggcaaagtcgcaaggagtcacatcctcgacaagttcattgaaaccaaccaaggcaagactgcccctgaactggagcaggagttttcccagggagccagtttgttcctggtacgcttgaccacctcgcttagaatcacctatatgactgactcatgtttagaaaagcttctcaggtccattggcatcttcttatcagctgtaagcagtaatcggtaccttatagaatttcttgaggttggaggtgtcctaaccctcttggaaatacttgggctagagaagatcaaggaggaggccaagaaggaatctgtcaaactacttcaggttattgcgaactctggcaggacatacaaggaactcatttgtgaaagctatggtgtacgatccatagcagaatttttggcaaagtctaagtcagaagagacccaggaggaagtgcaggttctgttggattctttggtccacggcaatcccaagtaccaaaatcaagtgtataaaggtctaatagctttgctgccctgcgagtccccaaaagcccagcagctgtccctgcagactctcaggactgcccagccaatcattgggaccacacaccccagcatcgtggactgcgtgctgaaggtgctgggcacgatgcacctggaagtccagtatgaagccatcgagttgatcaaagacctggtcggttacgatgtgcgccaggcgctgctcaagggcctcgtggcgctgctgataccgtcggtcaaggagatctccaaactgcaggccaagatcctcagtgacccctcggttctccagctcacccccagcctgccgatgtttttgcagcaggccgcggccgccaaggccatcgggtaagcgggcaggggttagtgggtagctgcagcaagcctggcttggcgctgccggcgggccccgggagcgctccgtgcgccgggtgggcgggggtgtgcgccgggtgagccccagggcgtcgccccagcccgaacccccggcccagggtcctggcgcgcaacgacatgagcatcgccgaggagctgctgtacctgcgcgtggtgcgtggcctaatggccgccatgggcaacacggaccacagcaacagccagcggctggccagcctcacgctggaggtgcgcgcggcggctggttagggggcgggaagggcggcggcacccgcagccccgtcgcccccgcagtcacgccgcctcgcccgcgcggcgcagtgcttcgtgcagatgttccccttggtggcggagcacgtgcgcaagtgcatgggggaggaactctaccagctcttcctggtaagtgcgcccttcctgccccgccgcaatgagcagatggcggctcggacagtgtgatgccccttcagacagtccccatcctggagcgcgccacatgcagagtggacctggccaccagctgcaggagggactgctctggcgtaggctcctccacccgccaccttcctgttccctttcctgccctttcggtcaggctgccgacccgccccccacctgcaacatccctctgccaagcccaactccaagtccagactgccctggcaccccagccgggtcccccttgctcctgtcctcagagcaacgctgaggacttgtacatgaaaatagacagcattcaggcggacatcttggcggccaacacagtcaatgttaccaaagccctgtgcctccatggcagctcctacagcatgaacactctctatggctcgcgcgattcggctcagatggcctacctcacacacttcgaggaggatgtagaatcaaaggagtaacagcccctgtggcaaaccaggaaggccaaggctgcggggcagggaagcctggcaagaggaaggcgcctggggtcaagctcagagccactccacttggctccaggggggagacggggattaggcatcccagaggggcagaggaagagccgctggctgcgaagagtcaataaacagccttgatacctg

SEQ ID NO: 330131 - DNA, 2151 bp, Homo sapiens
aggaagagtccccaccctctcatgtaggtgagaggcggctgaagagttgctgtattctgggaatgggcagggtcactcgtccgaacagagtcctatcctacgcggcggaagagtgtgccctttgacttgcatcgtctacctacctctgccatcctctaccagccgcaactgcgagggctggagccaacttcaggactgattgatcatgacttctataaaggagcaggcagcaattagcaggctcttaagttttttacaggagtgggacaacgctggcaaagtcgcaaggagtcacatcctcgacaagttcattgaaaccaaccaaggcaagactgcccctgaactggagcaggagttttcccagggagccagtttgttcctgtaatcggtaccttatagaatttcttgaggttggaggtgtcctaaccctcttggaaatacttgggctagagaagatcaaggaggaggccaagaaggaatctgtcaaactacttcaggttattgcgaactctggcaggacatacaaggaactcatttgtgaaagctatggtgtacgatccatagcagaatttttggcaaagtctaagtcagaagagacccaggaggaagtgcaggttctgttggattctttggtccacggcaatcccaagtaccaaaatcaagtgtataaaggtctaatagctttgctgccctgcgagtccccaaaagcccagcagctgtccctgcagactctcaggactgcccagccaatcattgggaccacacaccccagcatcgtggactgcgtgctgaaggtgctgggcacgatgcacctggaagtccagtatgaagccatcgagttgatcaaagacctggtcggttacgatgtgcgccaggcgctgctcaagggcctcgtggcgctgctgataccgtcggtcaaggagatctccaaactgcaggccaagatcctcagtgacccctcggttctccagctcacccccagcctgccgatgtttttgcagcaggccgcggccgccaaggccatcgggtaagcgggcaggggttagtgggtagctgcagcaagcctggcttggcgctgccggcgggccccgggagcgctccgtgcgccgggtgggcgggggtgtgcgccgggtgagccccagggcgtcgccccagcccgaacccccggcccagggtcctggcgcgcaacgacatgagcatcgccgaggagctgctgtacctgcgcgtggtgcgtggcctaatggccgccatgggcaacacggaccacagcaacagccagcggctggccagcctcacgctggaggtgcgcgcggcggctggttagggggcgggaagggcggcggcacccgcagccccgtcgcccccgcagtcacgccgcctcgcccgcgcggcgcagtgcttcgtgcagatgttccccttggtggcggagcacgtgcgcaagtgcatgggggaggaactctaccagctcttcctggtaagtgcgcccttcctgccccgccgcaatgagcagatggcggctcggacagtgtgatgccccttcagacagtccccatcctggagcgcgccacatgcagagtggacctggccaccagctgcaggagggactgctctggcgtaggctcctccacccgccaccttcctgttccctttcctgccctttcggtcaggctgccgacccgccccccacctgcaacatccctctgccaagcccaactccaagtccagactgccctggcaccccagccgggtcccccttgctcctgtcctcagagcaacgctgaggacttgtacatgaaaatagacagcattcaggcggacatcttggcggccaacacagtcaatgttaccaaagccctgtgcctccatggcagctcctacagcatgaacactctctatggctcgcgcgattcggctcagatggcctacctcacacacttcgaggaggatgtagaatcaaaggagtaacagcccctgtggcaaaccaggaaggccaaggctgcggggcagggaagcctggcaagaggaaggcgcctggggtcaagctcagagccactccacttggctccaggggggagacggggattaggcatcccagaggggcagaggaagagccgctggctgcgaagagtcaataaacagccttgatacctg

SEQ ID NO: 330132 - DNA, 2056 bp, Homo sapiens
aggaagagtccccaccctctcatgtaggtgagaggcggctgaagagttgctgtattctgggaatgggcagggtcactcgtccgaacagagtcctatcctacgcggcggaagagtgtgccctttgacttgcatcgtctacctacctctgccatcctctaccagccgcaactgcgagggctggagccaacttcaggactgattgatcatgacttctataaaggagcaggcagcaattagcaggctcttaagttttttacaggagtgggacaacgctggcaaagtcgcaaggagtcacatcctcgacaagttcattgaaaccaaccaaggcaagactgcccctgaactggagcaggagttttcccagggagccagtttgttcctggtacgcttgaccacctcgcttagaatcacctatatgactgactcatgtttagaaaagcttctcaggtccattggcatcttcttatcagctgtaagcagtaatcggtaccttatagaatttcttgaggttggaggtgtcctaaccctcttggaaatacttgggctagagaagatcaaggaggaggccaagaaggaatctgtcaaactacttcaggttattgcgaactctggcaggacatacaaggaactcatttgtgaaagctatggtgtacgatccatagcagaatttttggcaaagtctaagtcagaagagacccaggaggaagtgcaggttctgttggattctttggtccacggcaatcccaagtaccaaaatcaagtgtataaaggtctaatagctttgctgccctgcgagtccccaaaagcccagcagctgtccctgcagactctcaggactgcccagccaatcattgggaccacacaccccagcatcgtggactgcgtgctgaaggtgctgggcacgatgcacctggaagtccagtatgaagccatcgagttgatcaaagacctggtcggttacgatgtgcgccaggcgctgctcaagggcctcgtggcgctgctgataccgtcggtcaaggagatctccaaactgcaggccaagatcctcagtgacccctcggttctccagctcacccccagcctgccgatgtttttgcagcaggccgcggccgccaaggccatcgggtaagcgggcaggggttagtgggtagctgcagcaagcctggcttggcgctgccggcgggccccgggagcgctccgtgcgccgggtgggcgggggtgtgcgccgggtgagccccagggcgtcgccccagcccgaacccccggcccagggtcctggcgcgcaacgacatgagcatcgccgaggagctgctgtacctgcgcgtggtgcgtggcctaatggccgccatgggcaacacggaccacagcaacagccagcggctggccagcctcacgctggaggtgcgcgcggcggctggttagggggcgggaagggcggcggcacccgcagccccgtcgcccccgcagtcacgccgcctcgcccgcgcggcgcagtgcttcgtgcagatgttccccttggtggcggagcacgtgcgcaagtgcatgggggaggaactctaccagctcttcctggctgccgacccgccccccacctgcaacatccctctgccaagcccaactccaagtccagactgccctggcaccccagccgggtcccccttgctcctgtcctcagagcaacgctgaggacttgtacatgaaaatagacagcattcaggcggacatcttggcggccaacacagtcaatgttaccaaagccctgtgcctccatggcagctcctacagcatgaacactctctatggctcgcgcgattcggctcagatggcctacctcacacacttcgaggaggatgtagaatcaaaggagtaacagcccctgtggcaaaccaggaaggccaaggctgcggggcagggaagcctggcaagaggaaggcgcctggggtcaagctcagagccactccacttggctccaggggggagacggggattaggcatcccagaggggcagaggaagagccgctggctgcgaagagtcaataaacagccttgatacctg

SEQ ID NO: 330133 - DNA, 2156 bp, Homo sapiens
aggaagagtccccaccctctcatgtaggtgagaggcggctgaagagttgctgtattctgggaatgggcagggtcactcgtccgaacagagtcctatcctacgcggcggaagagtgtgccctttgacttgcatcgtctacctacctctgccatcctctaccagccgcaactgcgagggctggagccaacttcaggactgattgatcatgacttctataaaggagcaggcagcaattagcaggctcttaagttttttacaggagtgggacaacgctggcaaagtcgcaaggagtcacatcctcgacaagttcattgaaaccaaccaaggcaagactgcccctgaactggagcaggagttttcccagggagccagtttgttcctggtacgcttgaccacctcgcttagaatcacctatatgactgactcatgtttagaaaagcttctcaggtccattggcatcttcttatcagctgtaagcagtaatcggtaccttatagaatttcttgaggttggaggtgtcctaaccctcttggaaatacttgggctagagaagatcaaggaggaggccaagaaggaatctgtcaaactacttcaggttattgcgaactctggcaggacatacaaggaactcatttgtgaaagctatggtgtacgatccatagcagaatttttggcaaagtctaagtcagaagagacccaggaggaagtgcaggttctgttggattctttggtccacggcaatcccaagtaccaaaatcaagtgtataaaggtctaatagctttgctgccctgcgagtccccaaaagcccagcagctgtccctgcagactctcaggactgcccagccaatcattgggaccacacaccccagcatcgtggactgcgtgctgaaggtgctgggcacgatgcacctggaagtccagtatgaagccatcgagttgatcaaagacctggtcggttacgatgtgcgccaggcgctgctcaagggcctcgtggcgctgctgataccgtcggtcaaggagatctccaaactgcaggccaagatcctcagtgacccctcggttctccagctcacccccagcctgccgatgtttttgcagcaggccgcggccgccaaggccatcgggtaagcgggcaggggttagtgggtagctgcagcaagcctggcttggcgctgccggcgggccccgggagcgctccgtgcgccgggtgggcgggggtgtgcgccgggtgagccccagggcgtcgccccagcccgaacccccggcccagggtcctggcgcgcaacgacatgagcatcgccgaggagctgctgtacctgcgcgtggtgcgtggcctaatggccgccatgggcaacacggaccacagcaacagccagcggctggccagcctcacgctggagtgcttcgtgcagatgttccccttggtggcggagcacgtgcgcaagtgcatgggggaggaactctaccagctcttcctggtaagtgcgcccttcctgccccgccgcaatgagcagatggcggctcggacagtgtgatgccccttcagacagtccccatcctggagcgcgccacatgcagagtggacctggccaccagctgcaggagggactgctctggcgtaggctcctccacccgccaccttcctgttccctttcctgccctttcggtcaggctgccgacccgccccccacctgcaacatccctctgccaagcccaactccaagtccagactgccctggcaccccagccgggtcccccttgctcctgtcctcagagcaacgctgaggacttgtacatgaaaatagacagcattcaggcggacatcttggcggccaacacagtcaatgttaccaaagccctgtgcctccatggcagctcctacagcatgaacactctctatggctcgcgcgattcggctcagatggcctacctcacacacttcgaggaggatgtagaatcaaaggagtaacagcccctgtggcaaaccaggaaggccaaggctgcggggcagggaagcctggcaagaggaaggcgcctggggtcaagctcagagccactccacttggctccaggggggagacggggattaggcatcccagaggggcagaggaagagccgctggctgcgaagagtcaataaacagccttgatacctg

SEQ ID NO: 330134 - DNA, 1880 bp, Homo sapiens
aggaagagtccccaccctctcatgtaggtgagaggcggctgaagagttgctgtattctgggaatgggcagggtcactcgtccgaacagagtcctatcctacgcggcggaagagtgtgccctttgacttgcatcgtctacctacctctgccatcctctaccagccgcaactgcgagggctggagccaacttcaggactgattgatcatgacttctataaaggagcaggcagcaattagcaggctcttaagttttttacaggagtgggacaacgctggcaaagtcgcaaggagtcacatcctcgacaagttcattgaaaccaaccaaggcaagactgcccctgaactggagcaggagttttcccagggagccagtttgttcctgacacggggtcttgctatgttgcccaagctggtctcaaactcctggcctcatgcgatcttcccaccttagcctcccaaagtgctgggactacagccaatcattgggaccacacaccccagcatcgtggactgcgtgctgaaggtgctgggcacgatgcacctggaagtccagtatgaagccatcgagttgatcaaagacctggtcggttacgatgtgcgccaggcgctgctcaagggcctcgtggcgctgctgataccgtcggtcaaggagatctccaaactgcaggccaagatcctcagtgacccctcggttctccagctcacccccagcctgccgatgtttttgcagcaggccgcggccgccaaggccatcgggtaagcgggcaggggttagtgggtagctgcagcaagcctggcttggcgctgccggcgggccccgggagcgctccgtgcgccgggtgggcgggggtgtgcgccgggtgagccccagggcgtcgccccagcccgaacccccggcccagggtcctggcgcgcaacgacatgagcatcgccgaggagctgctgtacctgcgcgtggtgcgtggcctaatggccgccatgggcaacacggaccacagcaacagccagcggctggccagcctcacgctggaggtgcgcgcggcggctggttagggggcgggaagggcggcggcacccgcagccccgtcgcccccgcagtcacgccgcctcgcccgcgcggcgcagtgcttcgtgcagatgttccccttggtggcggagcacgtgcgcaagtgcatgggggaggaactctaccagctcttcctggtaagtgcgcccttcctgccccgccgcaatgagcagatggcggctcggacagtgtgatgccccttcagacagtccccatcctggagcgcgccacatgcagagtggacctggccaccagctgcaggagggactgctctggcgtaggctcctccacccgccaccttcctgttccctttcctgccctttcggtcaggctgccgacccgccccccacctgcaacatccctctgccaagcccaactccaagtccagactgccctggcaccccagccgggtcccccttgctcctgtcctcagagcaacgctgaggacttgtacatgaaaatagacagcattcaggcggacatcttggcggccaacacagtcaatgttaccaaagccctgtgcctccatggcagctcctacagcatgaacactctctatggctcgcgcgattcggctcagatggcctacctcacacacttcgaggaggatgtagaatcaaaggagtaacagcccctgtggcaaaccaggaaggccaaggctgcggggcagggaagcctggcaagaggaaggcgcctggggtcaagctcagagccactccacttggctccaggggggagacggggattaggcatcccagaggggcagaggaagagccgctggctgcgaagagtcaataaacagccttgatacctg

SEQ ID NO: 330135 - DNA, 1734 bp, Homo sapiens
atcttgtcttcccgtaaagacccagcccttccctcctccatgaaacctggattcctccaaggcgaaggcccccctctctggggtctcagcctccagcgctgacatcctaggccgcctcgacaggtgggctcaccatcaacccttcctcctcccccttcagccccctcctcctgctcttcaactgaggttcgccttcccagctcccccacgccctgcacagtgctgatcagtaaaagaggaggacactgacgagtggcgacttggttcacggggttctttgcttcctcggtggcggaggggcctggggcctctctccagcacctctgcccttccgcagccatcgagttgatcaaagacctggtcggttacgatgtgcgccaggcgctgctcaagggcctcgtggcgctgctgataccgtcggtcaaggagatctccaaactgcaggccaagatcctcagtggtaaggacctgctcaaatggggctgcctgggccacgggagggcggtctcttgcctcacggctgccccctcctcagacacccctcggttctccagctcacccccagcctgccgatgtttttgcagcaggccgcggccgccaaggccatcgggtaagcgggcaggggttagtgggtagctgcagcaagcctggcttggcgctgccggcgggccccgggagcgctccgtgcgccgggtgggcgggggtgtgcgccgggtgagccccagggcgtcgccccagcccgaacccccggcccagggtcctggcgcgcaacgacatgagcatcgccgaggagctgctgtacctgcgcgtggtgcgtggcctaatggccgccatgggcaacacggaccacagcaacagccagcggctggccagcctcacgctggaggtgcgcgcggcggctggttagggggcgggaagggcggcggcacccgcagccccgtcgcccccgcagtcacgccgcctcgcccgcgcggcgcagtgcttcgtgcagatgttccccttggtggcggagcacgtgcgcaagtgcatgggggaggaactctaccagctcttcctggtaagtgcgcccttcctgccccgccgcaatgagcagatggcggctcggacagtgtgatgccccttcagacagtccccatcctggagcgcgccacatgcagagtggacctggccaccagctgcaggagggactgctctggcgtaggctcctccacccgccaccttcctgttccctttcctgccctttcggtcaggctgccgacccgccccccacctgcaacatccctctgccaagcccaactccaagtccagactgccctggcaccccagccgggtcccccttgctcctgtcctcagagcaacgctgaggacttgtacatgaaaatagacagcattcaggcggacatcttggcggccaacacagtcaatgttaccaaagccctgtgcctccatggcagctcctacagcatgaacactctctatggctcgcgcgattcggctcagatggcctacctcacacacttcgaggaggatgtagaatcaaaggagtaacagcccctgtggcaaaccaggaaggccaaggctgcggggcagggaagcctggcaagaggaaggcgcctggggtcaagctcagagccactccacttggctccaggggggagacggggattaggcatcccagaggggcagaggaagagccgctggctgcgaagagtcaataaacagccttgatacctg

SEQ ID NO: 330136 - DNA, 1657 bp, Homo sapiens
atcttgtcttcccgtaaagacccagcccttccctcctccatgaaacctggattcctccaaggcgaaggcccccctctctggggtctcagcctccagcgctgacatcctaggccgcctcgacagctcccccacgccctgcacagtgctgatcagtaaaagaggaggacactgacgagtggcgacttggttcacggggttctttgcttcctcggtggcggaggggcctggggcctctctccagcacctctgcccttccgcagccatcgagttgatcaaagacctggtcggttacgatgtgcgccaggcgctgctcaagggcctcgtggcgctgctgataccgtcggtcaaggagatctccaaactgcaggccaagatcctcagtggtaaggacctgctcaaatggggctgcctgggccacgggagggcggtctcttgcctcacggctgccccctcctcagacacccctcggttctccagctcacccccagcctgccgatgtttttgcagcaggccgcggccgccaaggccatcgggtaagcgggcaggggttagtgggtagctgcagcaagcctggcttggcgctgccggcgggccccgggagcgctccgtgcgccgggtgggcgggggtgtgcgccgggtgagccccagggcgtcgccccagcccgaacccccggcccagggtcctggcgcgcaacgacatgagcatcgccgaggagctgctgtacctgcgcgtggtgcgtggcctaatggccgccatgggcaacacggaccacagcaacagccagcggctggccagcctcacgctggaggtgcgcgcggcggctggttagggggcgggaagggcggcggcacccgcagccccgtcgcccccgcagtcacgccgcctcgcccgcgcggcgcagtgcttcgtgcagatgttccccttggtggcggagcacgtgcgcaagtgcatgggggaggaactctaccagctcttcctggtaagtgcgcccttcctgccccgccgcaatgagcagatggcggctcggacagtgtgatgccccttcagacagtccccatcctggagcgcgccacatgcagagtggacctggccaccagctgcaggagggactgctctggcgtaggctcctccacccgccaccttcctgttccctttcctgccctttcggtcaggctgccgacccgccccccacctgcaacatccctctgccaagcccaactccaagtccagactgccctggcaccccagccgggtcccccttgctcctgtcctcagagcaacgctgaggacttgtacatgaaaatagacagcattcaggcggacatcttggcggccaacacagtcaatgttaccaaagccctgtgcctccatggcagctcctacagcatgaacactctctatggctcgcgcgattcggctcagatggcctacctcacacacttcgaggaggatgtagaatcaaaggagtaacagcccctgtggcaaaccaggaaggccaaggctgcggggcagggaagcctggcaagaggaaggcgcctggggtcaagctcagagccactccacttggctccaggggggagacggggattaggcatcccagaggggcagaggaagagccgctggctgcgaagagtcaataaacagccttgatacctg

SEQ ID NO: 330137 - DNA, 1580 bp, Homo sapiens
atcttgtcttcccgtaaagacccagcccttccctcctccatgaaacctggattcctccaaggcgaaggcccccctctctggggtctcagcctccagcgctgacatcctaggccgcctcgacagctcccccacgccctgcacagtgctgatcagtaaaagaggaggacactgacgagtggcgacttggttcacggggttctttgcttcctcggtggcggaggggcctggggcctctctccagcacctctgcccttccgcagccatcgagttgatcaaagacctggtcggttacgatgtgcgccaggcgctgctcaagggcctcgtggcgctgctgataccgtcggtcaaggagatctccaaactgcaggccaagatcctcagtgacccctcggttctccagctcacccccagcctgccgatgtttttgcagcaggccgcggccgccaaggccatcgggtaagcgggcaggggttagtgggtagctgcagcaagcctggcttggcgctgccggcgggccccgggagcgctccgtgcgccgggtgggcgggggtgtgcgccgggtgagccccagggcgtcgccccagcccgaacccccggcccagggtcctggcgcgcaacgacatgagcatcgccgaggagctgctgtacctgcgcgtggtgcgtggcctaatggccgccatgggcaacacggaccacagcaacagccagcggctggccagcctcacgctggaggtgcgcgcggcggctggttagggggcgggaagggcggcggcacccgcagccccgtcgcccccgcagtcacgccgcctcgcccgcgcggcgcagtgcttcgtgcagatgttccccttggtggcggagcacgtgcgcaagtgcatgggggaggaactctaccagctcttcctggtaagtgcgcccttcctgccccgccgcaatgagcagatggcggctcggacagtgtgatgccccttcagacagtccccatcctggagcgcgccacatgcagagtggacctggccaccagctgcaggagggactgctctggcgtaggctcctccacccgccaccttcctgttccctttcctgccctttcggtcaggctgccgacccgccccccacctgcaacatccctctgccaagcccaactccaagtccagactgccctggcaccccagccgggtcccccttgctcctgtcctcagagcaacgctgaggacttgtacatgaaaatagacagcattcaggcggacatcttggcggccaacacagtcaatgttaccaaagccctgtgcctccatggcagctcctacagcatgaacactctctatggctcgcgcgattcggctcagatggcctacctcacacacttcgaggaggatgtagaatcaaaggagtaacagcccctgtggcaaaccaggaaggccaaggctgcggggcagggaagcctggcaagaggaaggcgcctggggtcaagctcagagccactccacttggctccaggggggagacggggattaggcatcccagaggggcagaggaagagccgctggctgcgaagagtcaataaacagccttgatacctg

SEQ ID NO: 330138 - DNA, 1520 bp, Homo sapiens
atcttgtcttcccgtaaagacccagcccttccctcctccatgaaacctggattcctccaaggcgaaggcccccctctctggggtctcagcctccagcgctgacatcctaggccgcctcgacagccatcgagttgatcaaagacctggtcggttacgatgtgcgccaggcgctgctcaagggcctcgtggcgctgctgataccgtcggtcaaggagatctccaaactgcaggccaagatcctcagtggtaaggacctgctcaaatggggctgcctgggccacgggagggcggtctcttgcctcacggctgccccctcctcagacacccctcggttctccagctcacccccagcctgccgatgtttttgcagcaggccgcggccgccaaggccatcgggtaagcgggcaggggttagtgggtagctgcagcaagcctggcttggcgctgccggcgggccccgggagcgctccgtgcgccgggtgggcgggggtgtgcgccgggtgagccccagggcgtcgccccagcccgaacccccggcccagggtcctggcgcgcaacgacatgagcatcgccgaggagctgctgtacctgcgcgtggtgcgtggcctaatggccgccatgggcaacacggaccacagcaacagccagcggctggccagcctcacgctggaggtgcgcgcggcggctggttagggggcgggaagggcggcggcacccgcagccccgtcgcccccgcagtcacgccgcctcgcccgcgcggcgcagtgcttcgtgcagatgttccccttggtggcggagcacgtgcgcaagtgcatgggggaggaactctaccagctcttcctggtaagtgcgcccttcctgccccgccgcaatgagcagatggcggctcggacagtgtgatgccccttcagacagtccccatcctggagcgcgccacatgcagagtggacctggccaccagctgcaggagggactgctctggcgtaggctcctccacccgccaccttcctgttccctttcctgccctttcggtcaggctgccgacccgccccccacctgcaacatccctctgccaagcccaactccaagtccagactgccctggcaccccagccgggtcccccttgctcctgtcctcagagcaacgctgaggacttgtacatgaaaatagacagcattcaggcggacatcttggcggccaacacagtcaatgttaccaaagccctgtgcctccatggcagctcctacagcatgaacactctctatggctcgcgcgattcggctcagatggcctacctcacacacttcgaggaggatgtagaatcaaaggagtaacagcccctgtggcaaaccaggaaggccaaggctgcggggcagggaagcctggcaagaggaaggcgcctggggtcaagctcagagccactccacttggctccaggggggagacggggattaggcatcccagaggggcagaggaagagccgctggctgcgaagagtcaataaacagccttgatacctg

SEQ ID NO: 330139 - DNA, 350 bp, Homo sapiens
tcatatagcaataaaaaaatgcatgttttatttgtaaattgtgcagagccattttaaactttaaaacagattttgacatgcctatgctgaaataaaatcctccagccacataactctaaggtaaacaagacagtgatgcaacatgagaaccaggcctcaattttgctttggttgaacaggcttggttgaagagcttttaatcctattcatattatataatcttgagtggggattttttcataaatcccttccaatttagcatttcctctcttctttgctcaggtgtacgatccatagcagaatttttggcaaagtctaagtcagaagagacccaggaggaagtgcaggtt

SEQ ID NO: 330140 - DNA, 450 bp, Homo sapiens
gtccgcagtcattcacctggttcttaaggccagctagatttcgtggttatctccatcctggaggctgcgtggacgcccttctggaagcacgcatcccatgtcctctggggagtagtagaggttggtgtgtatgtatgtctgtctccgcatgcctcagattattgcttcctaataaaattctgatagctgggccccatcaatatctcaaatacatgtgaggaaatgttaatttagaatcaattttaggatgtttcagactgtaaagtccttttaactagatctctggcgaagatgtagaagcactttatgggactgtaaatttcatgttgaacagtcttcgtgaaatacacatctctcctacacacaagctgttctctccatatcaatcatggcccctgcaagtaatgtttcacaaatattctgtaaatcacagaaaactccatgataatg

SEQ ID NO: 330141 - DNA, 2637 bp, Homo sapiens
aggaagagtccccaccctctcatgtaggtgagaggcggctgaagagttgctgtattctgggaatgggcagggtcactcgtccgaacagagtcctatcctacgcggcggaagagtgtgccctttgacttgcatcgtctacctacctctgccatcctctaccagccgcaactgcgagggctggagtgacataaccccgctgaagaaatataaaaaagcattcagtcacaaaagttcatggaaggaggcaacaggagatgaaagaattcaacaaatatttggaaggcagaaggcaggtgcagggaggctaaccggcttgaagcagaggaaattgcaagcaactgccaacaaggggagcttaccaacaagaaaccagtcaattcagccagtttgacctctaagaggcttaatgcttgaaagcacaaattaccactgaaggtcagaaatgaggttggtccgcagtcattcacctggttcttaaggccagctagatttcgtggttatctccatcctggaggctgcgtggacgcccttctggaagcacgcatcccatgtcctctggggagtagtagagccaacttcaggactgattgatcatgacttctataaaggagcaggcagcaattagcaggctcttaagttttttacaggagtgggacaacgctggcaaagtcgcaaggagtcacatcctcgacaagttcattgaaaccaaccaaggcaagactgcccctgaactggagcaggagttttcccagggagccagtttgttcctggtacgcttgaccacctcgcttagaatcacctatatgactgactcatgtttagaaaagcttctcaggtccattggcatcttcttatcagctgtaagcagtaatcggtaccttatagaatttcttgaggttggaggtgtcctaaccctcttggaaatacttgggctagagaagatcaaggaggaggccaagaaggaatctgtcaaactacttcaggttattgcgaactctggcaggacatacaaggaactcatttgtgaaagctatggtgtacgatccatagcagaatttttggcaaagtctaagtcagaagagacccaggaggaagtgcaggttctgttggattctttggtccacggcaatcccaagtaccaaaatcaagtgtataaaggtctaatagctttgctgccctgcgagtccccaaaagcccagcagctgtccctgcagactctcaggactgcccagccaatcattgggaccacacaccccagcatcgtggactgcgtgctgaaggtgctgggcacgatgcacctggaagtccagtatgaagccatcgagttgatcaaagacctggtcggttacgatgtgcgccaggcgctgctcaagggcctcgtggcgctgctgataccgtcggtcaaggagatctccaaactgcaggccaagatcctcagtgacccctcggttctccagctcacccccagcctgccgatgtttttgcagcaggccgcggccgccaaggccatcgggtaagcgggcaggggttagtgggtagctgcagcaagcctggcttggcgctgccggcgggccccgggagcgctccgtgcgccgggtgggcgggggtgtgcgccgggtgagccccagggcgtcgccccagcccgaacccccggcccagggtcctggcgcgcaacgacatgagcatcgccgaggagctgctgtacctgcgcgtggtgcgtggcctaatggccgccatgggcaacacggaccacagcaacagccagcggctggccagcctcacgctggaggtgcgcgcggcggctggttagggggcgggaagggcggcggcacccgcagccccgtcgcccccgcagtcacgccgcctcgcccgcgcggcgcagtgcttcgtgcagatgttccccttggtggcggagcacgtgcgcaagtgcatgggggaggaactctaccagctcttcctggtaagtgcgcccttcctgccccgccgcaatgagcagatggcggctcggacagtgtgatgccccttcagacagtccccatcctggagcgcgccacatgcagagtggacctggccaccagctgcaggagggactgctctggcgtaggctcctccacccgccaccttcctgttccctttcctgccctttcggtcaggctgccgacccgccccccacctgcaacatccctctgccaagcccaactccaagtccagactgccctggcaccccagccgggtcccccttgctcctgtcctcagagcaacgctgaggacttgtacatgaaaatagacagcattcaggcggacatcttggcggccaacacagtcaatgttaccaaagccctgtgcctccatggcagctcctacagcatgaacactctctatggctcgcgcgattcggctcagatggcctacctcacacacttcgaggaggatgtagaatcaaaggagtaacagcccctgtggcaaaccaggaaggccaaggctgcggggcagggaagcctggcaagaggaaggcgcctggggtcaagctcagagccactccacttggctccaggggggagacggggattaggcatcccagaggggcagaggaagagccgctggctgcgaagagtcaataaacagccttgatacctg

SEQ ID NO: 330142 - DNA, 2365 bp, Homo sapiens
aggaagagtccccaccctctcatgtaggtgagaggcggctgaagagttgctgtattctgggaatgggcagggtcactcgtccgaacagagtcctatcctacgcggcggaagagtgtgccctttgacttgcatcgtctacctacctctgccatcctctaccagccgcaactgcgagggctggaggctagagtgcagtggcgcgatctcggctcactgcaacccgcctcccgggttcaagggatttctcctgcctcagcctcccaagagctgggattacaggtgcctgccaccacgcccagccaacttcaggactgattgatcatgacttctataaaggagcaggcagcaattagcaggctcttaagttttttacaggagtgggacaacgctggcaaagtcgcaaggagtcacatcctcgacaagttcattgaaaccaaccaaggcaagactgcccctgaactggagcaggagttttcccagggagccagtttgttcctggtacgcttgaccacctcgcttagaatcacctatatgactgactcatgtttagaaaagcttctcaggtccattggcatcttcttatcagctgtaagcagtaatcggtaccttatagaatttcttgaggttggaggtgtcctaaccctcttggaaatacttgggctagagaagatcaaggaggaggccaagaaggaatctgtcaaactacttcaggttattgcgaactctggcaggacatacaaggaactcatttgtgaaagctatggtgtacgatccatagcagaatttttggcaaagtctaagtcagaagagacccaggaggaagtgcaggttctgttggattctttggtccacggcaatcccaagtaccaaaatcaagtgtataaaggtctaatagctttgctgccctgcgagtccccaaaagcccagcagctgtccctgcagactctcaggactgcccagccaatcattgggaccacacaccccagcatcgtggactgcgtgctgaaggtgctgggcacgatgcacctggaagtccagtatgaagccatcgagttgatcaaagacctggtcggttacgatgtgcgccaggcgctgctcaagggcctcgtggcgctgctgataccgtcggtcaaggagatctccaaactgcaggccaagatcctcagtgacccctcggttctccagctcacccccagcctgccgatgtttttgcagcaggccgcggccgccaaggccatcgggtaagcgggcaggggttagtgggtagctgcagcaagcctggcttggcgctgccggcgggccccgggagcgctccgtgcgccgggtgggcgggggtgtgcgccgggtgagccccagggcgtcgccccagcccgaacccccggcccagggtcctggcgcgcaacgacatgagcatcgccgaggagctgctgtacctgcgcgtggtgcgtggcctaatggccgccatgggcaacacggaccacagcaacagccagcggctggccagcctcacgctggaggtgcgcgcggcggctggttagggggcgggaagggcggcggcacccgcagccccgtcgcccccgcagtcacgccgcctcgcccgcgcggcgcagtgcttcgtgcagatgttccccttggtggcggagcacgtgcgcaagtgcatgggggaggaactctaccagctcttcctggtaagtgcgcccttcctgccccgccgcaatgagcagatggcggctcggacagtgtgatgccccttcagacagtccccatcctggagcgcgccacatgcagagtggacctggccaccagctgcaggagggactgctctggcgtaggctcctccacccgccaccttcctgttccctttcctgccctttcggtcaggctgccgacccgccccccacctgcaacatccctctgccaagcccaactccaagtccagactgccctggcaccccagccgggtcccccttgctcctgtcctcagagcaacgctgaggacttgtacatgaaaatagacagcattcaggcggacatcttggcggccaacacagtcaatgttaccaaagccctgtgcctccatggcagctcctacagcatgaacactctctatggctcgcgcgattcggctcagatggcctacctcacacacttcgaggaggatgtagaatcaaaggagtaacagcccctgtggcaaaccaggaaggccaaggctgcggggcagggaagcctggcaagaggaaggcgcctggggtcaagctcagagccactccacttggctccaggggggagacggggattaggcatcccagaggggcagaggaagagccgctggctgcgaagagtcaataaacagccttgatacctg

SEQ ID NO: 330143 - DNA, 2552 bp, Homo sapiens
aggaagagtccccaccctctcatgtaggtgagaggcggctgaagagttgctgtattctgggaatgggcagggtcactcgtccgaacagagtcctatcctacgcggcggaagagtgtgccctttgacttgcatcgtctacctacctctgccatcctctaccagccgcaactgcgagggctggagtgacataaccccgctgaagaaatataaaaaagcattcagtcacaaaagttcatggaaggaggcaacaggagatgaaagaattcaacaaatatttggaaggcagaaggcaggtgcagggaggctaaccggcttgaagcagaggaaattgcaagcaactgccaacaaggggagcttaccaacaagaaaccagtcaattcagccagtttgacctctaagaggcttaatgcttgaaagcacaaattaccactgaaggtcagaaatgaggttggtccgcagtcattcacctggttcttaaggccagctagatttcgtggttatctccatcctggaggctgcgtggacgcccttctggaagcacgcatcccatgtcctctggggagtagtagagccaacttcaggactgattgatcatgacttctataaaggagcaggcagcaattagcaggctcttaagttttttacaggagtgggacaacgctggcaaagtcgcaaggagtcacatcctcgacaagttcattgaaaccaaccaaggcaagactgcccctgaactggagcaggagttttcccagggagccagtttgttcctggtacgcttgaccacctcgcttagaatcacctatatgactgactcatgtttagaaaagcttctcaggtccattggcatcttcttatcagctgtaagcagtaatcggtaccttatagaatttcttgaggttggaggtgtcctaaccctcttggaaatacttgggctagagaagatcaaggaggaggccaagaaggaatctgtcaaactacttcaggttattgcgaactctggcaggacatacaaggaactcatttgtgaaagctatggtgtacgatccatagcagaatttttggcaaagtctaagtcagaagagacccaggaggaagtgcaggttctgttggattctttggtccacggcaatcccaagtaccaaaatcaagtgtataaaggtctaatagctttgctgccctgcgagtccccaaaagcccagcagctgtccctgcagactctcaggactgcccagccatcgagttgatcaaagacctggtcggttacgatgtgcgccaggcgctgctcaagggcctcgtggcgctgctgataccgtcggtcaaggagatctccaaactgcaggccaagatcctcagtgacccctcggttctccagctcacccccagcctgccgatgtttttgcagcaggccgcggccgccaaggccatcgggtaagcgggcaggggttagtgggtagctgcagcaagcctggcttggcgctgccggcgggccccgggagcgctccgtgcgccgggtgggcgggggtgtgcgccgggtgagccccagggcgtcgccccagcccgaacccccggcccagggtcctggcgcgcaacgacatgagcatcgccgaggagctgctgtacctgcgcgtggtgcgtggcctaatggccgccatgggcaacacggaccacagcaacagccagcggctggccagcctcacgctggaggtgcgcgcggcggctggttagggggcgggaagggcggcggcacccgcagccccgtcgcccccgcagtcacgccgcctcgcccgcgcggcgcagtgcttcgtgcagatgttccccttggtggcggagcacgtgcgcaagtgcatgggggaggaactctaccagctcttcctggtaagtgcgcccttcctgccccgccgcaatgagcagatggcggctcggacagtgtgatgccccttcagacagtccccatcctggagcgcgccacatgcagagtggacctggccaccagctgcaggagggactgctctggcgtaggctcctccacccgccaccttcctgttccctttcctgccctttcggtcaggctgccgacccgccccccacctgcaacatccctctgccaagcccaactccaagtccagactgccctggcaccccagccgggtcccccttgctcctgtcctcagagcaacgctgaggacttgtacatgaaaatagacagcattcaggcggacatcttggcggccaacacagtcaatgttaccaaagccctgtgcctccatggcagctcctacagcatgaacactctctatggctcgcgcgattcggctcagatggcctacctcacacacttcgaggaggatgtagaatcaaaggagtaacagcccctgtggcaaaccaggaaggccaaggctgcggggcagggaagcctggcaagaggaaggcgcctggggtcaagctcagagccactccacttggctccaggggggagacggggattaggcatcccagaggggcagaggaagagccgctggctgcgaagagtcaataaacagccttgatacctg

SEQ ID NO: 330144 - DNA, 1785 bp, Homo sapiens
aggaagagtccccaccctctcatgtaggtgagaggcggctgaagagttgctgtattctgggaatgggcagggtcactcgtccgaacagagtcctatcctacgcggcggaagagtgtgccctttgacttgcatcgtctacctacctctgccatcctctaccagccgcaactgcgagggctggaggtgtacgatccatagcagaatttttggcaaagtctaagtcagaagagacccaggaggaagtgcaggttctgttggattctttggtccacggcaatcccaagtaccaaaatcaagtgtataaaggtctaatagctttgctgccctgcgagtccccaaaagcccagcagctgtccctgcagactctcaggactgcccagccaatcattgggaccacacaccccagcatcgtggactgcgtgctgaaggtgctgggcacgatgcacctggaagtccagtatgaagccatcgagttgatcaaagacctggtcggttacgatgtgcgccaggcgctgctcaagggcctcgtggcgctgctgataccgtcggtcaaggagatctccaaactgcaggccaagatcctcagtgacccctcggttctccagctcacccccagcctgccgatgtttttgcagcaggccgcggccgccaaggccatcgggtaagcgggcaggggttagtgggtagctgcagcaagcctggcttggcgctgccggcgggccccgggagcgctccgtgcgccgggtgggcgggggtgtgcgccgggtgagccccagggcgtcgccccagcccgaacccccggcccagggtcctggcgcgcaacgacatgagcatcgccgaggagctgctgtacctgcgcgtggtgcgtggcctaatggccgccatgggcaacacggaccacagcaacagccagcggctggccagcctcacgctggaggtgcgcgcggcggctggttagggggcgggaagggcggcggcacccgcagccccgtcgcccccgcagtcacgccgcctcgcccgcgcggcgcagtgcttcgtgcagatgttccccttggtggcggagcacgtgcgcaagtgcatgggggaggaactctaccagctcttcctggtaagtgcgcccttcctgccccgccgcaatgagcagatggcggctcggacagtgtgatgccccttcagacagtccccatcctggagcgcgccacatgcagagtggacctggccaccagctgcaggagggactgctctggcgtaggctcctccacccgccaccttcctgttccctttcctgccctttcggtcaggctgccgacccgccccccacctgcaacatccctctgccaagcccaactccaagtccagactgccctggcaccccagccgggtcccccttgctcctgtcctcagagcaacgctgaggacttgtacatgaaaatagacagcattcaggcggacatcttggcggccaacacagtcaatgttaccaaagccctgtgcctccatggcagctcctacagcatgaacactctctatggctcgcgcgattcggctcagatggcctacctcacacacttcgaggaggatgtagaatcaaaggagtaacagcccctgtggcaaaccaggaaggccaaggctgcggggcagggaagcctggcaagaggaaggcgcctggggtcaagctcagagccactccacttggctccaggggggagacggggattaggcatcccagaggggcagaggaagagccgctggctgcgaagagtcaataaacagccttgatacctg

SEQ ID NO: 330145 - DNA, 1657 bp, Homo sapiens
atcttgtcttcccgtaaagacccagcccttccctcctccatgaaacctggattcctccaaggcgaaggcccccctctctggggtctcagcctccagcgctgacatcctaggccgcctcgacaggtgggctcaccatcaacccttcctcctcccccttcagccccctcctcctgctcttcaactgaggttcgccttcccagctcccccacgccctgcacagtgctgatcagtaaaagaggaggacactgacgagtggcgacttggttcacggggttctttgcttcctcggtggcggaggggcctggggcctctctccagcacctctgcccttccgcagccatcgagttgatcaaagacctggtcggttacgatgtgcgccaggcgctgctcaagggcctcgtggcgctgctgataccgtcggtcaaggagatctccaaactgcaggccaagatcctcagtgacccctcggttctccagctcacccccagcctgccgatgtttttgcagcaggccgcggccgccaaggccatcgggtaagcgggcaggggttagtgggtagctgcagcaagcctggcttggcgctgccggcgggccccgggagcgctccgtgcgccgggtgggcgggggtgtgcgccgggtgagccccagggcgtcgccccagcccgaacccccggcccagggtcctggcgcgcaacgacatgagcatcgccgaggagctgctgtacctgcgcgtggtgcgtggcctaatggccgccatgggcaacacggaccacagcaacagccagcggctggccagcctcacgctggaggtgcgcgcggcggctggttagggggcgggaagggcggcggcacccgcagccccgtcgcccccgcagtcacgccgcctcgcccgcgcggcgcagtgcttcgtgcagatgttccccttggtggcggagcacgtgcgcaagtgcatgggggaggaactctaccagctcttcctggtaagtgcgcccttcctgccccgccgcaatgagcagatggcggctcggacagtgtgatgccccttcagacagtccccatcctggagcgcgccacatgcagagtggacctggccaccagctgcaggagggactgctctggcgtaggctcctccacccgccaccttcctgttccctttcctgccctttcggtcaggctgccgacccgccccccacctgcaacatccctctgccaagcccaactccaagtccagactgccctggcaccccagccgggtcccccttgctcctgtcctcagagcaacgctgaggacttgtacatgaaaatagacagcattcaggcggacatcttggcggccaacacagtcaatgttaccaaagccctgtgcctccatggcagctcctacagcatgaacactctctatggctcgcgcgattcggctcagatggcctacctcacacacttcgaggaggatgtagaatcaaaggagtaacagcccctgtggcaaaccaggaaggccaaggctgcggggcagggaagcctggcaagaggaaggcgcctggggtcaagctcagagccactccacttggctccaggggggagacggggattaggcatcccagaggggcagaggaagagccgctggctgcgaagagtcaataaacagccttgatacctg

SEQ ID NO: 330146 - DNA, 1443 bp, Homo sapiens
atcttgtcttcccgtaaagacccagcccttccctcctccatgaaacctggattcctccaaggcgaaggcccccctctctggggtctcagcctccagcgctgacatcctaggccgcctcgacagccatcgagttgatcaaagacctggtcggttacgatgtgcgccaggcgctgctcaagggcctcgtggcgctgctgataccgtcggtcaaggagatctccaaactgcaggccaagatcctcagtgacccctcggttctccagctcacccccagcctgccgatgtttttgcagcaggccgcggccgccaaggccatcgggtaagcgggcaggggttagtgggtagctgcagcaagcctggcttggcgctgccggcgggccccgggagcgctccgtgcgccgggtgggcgggggtgtgcgccgggtgagccccagggcgtcgccccagcccgaacccccggcccagggtcctggcgcgcaacgacatgagcatcgccgaggagctgctgtacctgcgcgtggtgcgtggcctaatggccgccatgggcaacacggaccacagcaacagccagcggctggccagcctcacgctggaggtgcgcgcggcggctggttagggggcgggaagggcggcggcacccgcagccccgtcgcccccgcagtcacgccgcctcgcccgcgcggcgcagtgcttcgtgcagatgttccccttggtggcggagcacgtgcgcaagtgcatgggggaggaactctaccagctcttcctggtaagtgcgcccttcctgccccgccgcaatgagcagatggcggctcggacagtgtgatgccccttcagacagtccccatcctggagcgcgccacatgcagagtggacctggccaccagctgcaggagggactgctctggcgtaggctcctccacccgccaccttcctgttccctttcctgccctttcggtcaggctgccgacccgccccccacctgcaacatccctctgccaagcccaactccaagtccagactgccctggcaccccagccgggtcccccttgctcctgtcctcagagcaacgctgaggacttgtacatgaaaatagacagcattcaggcggacatcttggcggccaacacagtcaatgttaccaaagccctgtgcctccatggcagctcctacagcatgaacactctctatggctcgcgcgattcggctcagatggcctacctcacacacttcgaggaggatgtagaatcaaaggagtaacagcccctgtggcaaaccaggaaggccaaggctgcggggcagggaagcctggcaagaggaaggcgcctggggtcaagctcagagccactccacttggctccaggggggagacggggattaggcatcccagaggggcagaggaagagccgctggctgcgaagagtcaataaacagccttgatacctg

SEQ ID NO: 330147 - DNA, 1860 bp, Homo sapiens
aggaagagtccccaccctctcatgtaggtgagaggcggctgaagagttgctgtattctgggaatgggcagggtcactcgtccgaacagagtcctatcctacgcggcggaagagtgtgccctttgacttgcatcgtctacctacctctgccatcctctaccagccgcaactgcgagggctggagccaacttcaggactgattgatcatgacttctataaaggagcaggcagcaattagcaggctcttaagttttttacaggagtgggacaacgctggcaaagtcgcaaggagtcacatcctcgacaagttcattgaaaccaaccaaggcaagactgcccctgaactggagcaggagttttcccagggagccagtttgttcctggtacgcttgaccacctcgcttagaatcacctatatgactgactcatgtttagaaaagcttctcaggtccattggcatcttcttatcagctgtaagcagtaatcggtaccttatagaatttcttgaggttggaggtgtcctaaccctcttggaaatacttgggctagagaagatcaaggaggaggccaagaaggaatctgtcaaactacttcaggttattgcgaactctggcaggacatacaaggaactcatttgtgaaagctatggtgtacgatccatagcagaatttttggcaaagtctaagtcagaagagacccaggaggaagtgcaggttctgttggattctttggtccacggcaatcccaagtaccaaaatcaagtgtataaaggtctaatagctttgctgccctgcgagtccccaaaagcccagcagctgtccctgcagactctcaggactgcccagccaatcattgggaccacacaccccagcatcgtggactgcgtgctgaaggtgctgggcacgatgcacctggaagtccagtatgaagccatcgagttgatcaaagacctggtcggttacgatgtgcgccaggcgctgctcaagggcctcgtggcgctgctgataccgtcggtcaaggagatctccaaactgcaggccaagatcctcagtgacccctcggttctccagctcacccccagcctgccgatgtttttgcagcaggccgcggccgccaaggccatcgggtaagcgggcaggggttagtgggtagctgcagcaagcctggcttggcgctgccggcgggccccgggagcgctccgtgcgccgggtgggcgggggtgtgcgccgggtgagccccagggcgtcgccccagcccgaacccccggcccagggtcctggcgcgcaacgacatgagcatcgccgaggagctgctgtacctgcgcgtggtgcgtggcctaatggccgccatgggcaacacggaccacagcaacagccagcggctggccagcctcacgctggagtgcttcgtgcagatgttccccttggtggcggagcacgtgcgcaagtgcatgggggaggaactctaccagctcttcctgagcaacgctgaggacttgtacatgaaaatagacagcattcaggcggacatcttggcggccaacacagtcaatgttaccaaagccctgtgcctccatggcagctcctacagcatgaacactctctatggctcgcgcgattcggctcagatggcctacctcacacacttcgaggaggatgtagaatcaaaggagtaacagcccctgtggcaaaccaggaaggccaaggctgcggggcagggaagcctggcaagaggaaggcgcctggggtcaagctcagagccactccacttggctccaggggggagacggggattaggcatcccagaggggcagaggaagagccgctggctgcgaagagtcaataaacagccttgatacctg

SEQ ID NO: 330148 - DNA, 363 bp, Homo sapiens
ttttttttagatggaatctcaccctgttgcccaggctggagtgtaatggcatgatctcggctcactgcaacctctgtctcccgggcctcagcctcccaagtagctggaaccacaggcatccaccactacgcccggctaattttttgtatttttagtagagacggggtttcaccttggccaggctgttctcgaactcctgatctcaagtgattcgccccacttcagcttcccaaagctaggattacaggcatgagccaccacgcctggcctgaagtttcttaagattccccatcttataagaaaaagacaaaccttgttggtaatgttaataccaataagtacaaattgcacgctccatatctc

SEQ ID NO: 330149 - DNA, 376 bp, Homo sapiens
ttccccctccgccggaacccgcgtctgcctccccggaacccacttccccgtcccccggaacatgcgtctgcctccccggaacccgcttccgtctccccggaacccacttccgcctccccaagacccgcttctgcctccccgggacccacttccgcctccccaagacccgcttccgcctccccaagacccgcttccgcctccccggaacctacttccgcctccccaagaccctcttctgcctccccgggaccggcttccgcctccccaggacccgcttccgcctccccgggacccacttccgcctcccccgggtctgtgcggatgccaggcctggttgggtctgttttccctggtggcatcgggccgccctcgccgt

SEQ ID NO: 330150 - DNA, 450 bp, Homo sapiens
cctcctctagctgggacaacaggtgttcacccttcctggctaagttttttgatttttagtagagatggagaatttcccaggatggtctcaaacttctaagcttaagcaatcctcctgcctcagcctcccaaggtgctgggattacaggcatgagccactatgcccggccactgtataactttgattctccaaaaatttaactactaatagtctactgttgaccagaagccttaccaataaaataagttgattaacacatttttaaaatatgtattattactgtgttcttacaatcaagtaagctagagaaaggaaaatgttatgatgaaaatcataaaaaaaaaaaaaagcccggcatggtggtgtgtgcccgtagtcttctgttactcaggaggctgaggtgagaggattgcttgagtccagaaattcaggctgtagtgagctatgatc

SEQ ID NO: 330151 - DNA, 389 bp, Homo sapiens
cctcctctagctgggacaacaggtgttcacccttcctggctaagttttttgatttttagtagagatggagaatttcccaggatggtctcaaacttctaagcttaagcaatcctcctacccaacacaaccaaacaaccactctacctacacacaacaccaatcaacacactcacaaacacacacaccacccacacccccccaacaccacaccatctacccactctcacaacacaaccccacccacacaaaccacccaacaccactaccacctcctacaaccacatacaaaccactccactcacacatcatcgcacttcttaacctgtgtctcttactaatcacagtacagctcagagcaaacggaaaatccttatgatgaaaatcataaa

SEQ ID NO: 330152 - DNA, 2783 bp, Homo sapiens
  misc_feature (1941)..(1941): n is a, c, g, or t
gcacgagggatgctgccagcgtgcgtgtccctacggaagctgagactgcacttcctgcgaggcccctgcagcagcagcggcgtggtcagagcgagcttcggagaagcagtggtgggttccatgtgatggtggagtaggaggcaggtctccgcggttcatctgtgttgctctaaatgacactgtttcattattttgatggctggagaatatttcctagtgtatgtatatgagagtttcttgatctctttatctgtggatgaacagctactttgaaacatatgatacatttgtgttaaggctagtcaccctgctgtggaatagaaggccagaattgatcagtctcatctgagagtaactttgtacccatcactgattccttctgagactgcctccacttccccagcagcctctggtttcttcatgtggctgcagatggcaggatttcccaaaggtttctggctgaaacatattccgtggtgtatctgtacagcagtttcctcatccctgcagctgtgtttgaacaggtcatttaccatgctgtcctccaggttcaacagtatggctccaaaggatgaaatttcattctgattttctggctgaagactattctctttgtgtatgtccaccacagttactttatcccttcatctgtggatgggcagtctcgctgtattgcccaggctggagtgcagtggcatgatctcagctcactgcaagctctgcttcctgggttcacgccattctcctgcctcagcctcctgagtagctgggattacaggcacccgccaccacgcccaggaaagaaaaaagaagaaaacaaacctccatacgagaatgggtctaaaggaacttcccaaacctccatgattttgcaggaaacaagataaaggtggtttccacaagaaaaatggcacaatgtttctcagaagacaattacataagaatcagcatacttcaaattcacagcaaataatcagacaattgatgaaaatacttacccaaacactaattgtagactatgccttctgaatatgtttgtcataaacttggagtaaggaatcctcacaggcactggacaattcaaaaaacgtaaagttgtttgttagaatactggtgcttttgggtagaaaccctcatccatatcctggtaaggcttgaagttgcacaggagttttcatttgtcaaaacccagaaaaccataagctttagatttgtgaattttatattgtattatatgtgacctttctttttaaaaaatgagctgtaagcagtctcccagacagtagctcagcctccagaactctctttctgcatagttgaagacccctcttcacacaagatggtagcaacaaatcataggtgcaattgcaccaaattcacagaagatcaattgaaaatcctcatcaataccttcactcaaaaaccttacccaggttatgctaccaaacaaaaacttgctttagcaatcaatgcagaagagtccagaatccaaatttggtttcagaatcaaagacctaggcatggattccagaaaacaccagaacctgactttagatttaagccacagccatggacaagattaacctggtgtggagtttcaaaatagagaagccagatggtgttgtaccacctatagcacctttcaattacacacagtcatccatgcatttatgaaaaacccataccctgggattgattccagagaacaacttgctgaagaaattggtgcttcagagtcaagagtccaaatttggttccaaaatcgaagatctagatttcatctccagagaaaaagagaacctgttatgtccttagaatgagaagaccagagaagaccaggggcaaggtttctgagggacttcaaggtacagaagatacacaaagtggcaccagcctcactagcactctcatttctcaagagccagaacatggtgaatacantcaagttcagtgtatttgataatatcaatttgggccccaaatctctctcacagtcttcctgggagtctattcttcttccaaaagtgcaagctaagccttctgaagatggtaaagaacttggccgggtgtggtggctcatgcctgtaatcccagcactttaggaggctgaggctggaagattgcttgagcctaggagtttgaaaccagtctgagcaacatagtaagaccctgtctctattctaaaaaacaaaataagtaaaaaggactgtaggaggccaagacaggtacaggaggcaccacactaccctgttgacacagcctggatccagagttcagcagaccttgagacaatgaaaacaaacttagtaataatcatttttcaatcattgcagtaattattgatttggacaaaaatcaattgacgtcaaaaccttaaagtgacgtttctctgcctatggagtggtcattcttttattcctttagtttcataataaattttcttttacttaaaaaaacttatagtttgatgaagagtgagatatatacctcatctcaaagaatcttcacacacacacttattaattacaacaaggaaaatcagtaattttgcagtggcagacatatggccaactccaaccttacccaagtggctgaaagtcactgcaccagtaatggcacaaaccaatgtgagatgattcctgatatgatacactaacaaagggcactgtctcttctgcatgttgcagacaaaaagtgggtaagctgaaactgaaactaataattaggcaatgtcaagcaaatacaaattcaggttgacagtctgcgaagtaacatccatgtac

SEQ ID NO: 330153 - DNA, 1485 bp, Homo sapiens
gttagagtggggcattttggttaatgcagacacagaggaatgttaaaatcaggatatttagagtctctgttatcacaaacagttgttaatttatttgtggtgaaaacatttggaatcttcttttccagattttgtgaaaaagctgtgatgttttgttaacctctggtcacagtgctgtggaacagagaggaacgattcattcctctcatctaagtgtaattttgtacctatttctgatccctgcccatgcccctgcttccttccaatctctggaaaccactgttgtgctctctagatctattgcaataaagccttttattttgggttctacatgagtgagatgtggcaatgtttttctttctctacctggttcaggtcatttaccatgctgtcctccaggttcaacagtatggctccaaaggatgaaatttcattctgattttctggctgaagactattctctttgtgtatgtccaccacagttactttatcccttcatctgtggatgggcaggaaactccaaactgtccaaggagatagttctgttgtgattacttcattgagaaatttaacttatgagcagttgaaaggaatgcaagttgctgcaaaatcagaatgaagagtgcaaaacgaccaagctacaatgttttgtcattattcactctgatgtgaaaaaggcagtgaatttaatagaaaataacttcgtagagtaaaatctcaggtgtgtttttttagtgccgcagtcttggatgatgggttcctagaagctctcaacatctcttcttaattggagaaagtgttaagccccacagtagctggagcagtacatcttcaatttttgacaagaaagcaggaacttgattactttgagtgctattcattagtttctgctttcattgagaatgcaacaaaagccaactaggctgctgctaactccttgctggacttcttctgccactgtcacaggaactgtaatctcactggacaattaactagggagtctttcatcttgagtgactgctgcacaaatgatcttcaaagcattttagccaccagaggaattctcttcaaatacccaaaatccatcagtatcttgaatcatgctggattttgaagaattcttaagaagccatgtaaagggggctctctggccttgaaatagtgatgttttttatacagaaaggagaatgcagaatggtcagactatcatgcactgttaaatttgatttcaagaaattacaggaaaactttccaaagttccatctcacagaaattatttttacaaagaattccaagataagtttagttttatggaagacttttatgtggtttttactcactcttcatctcagacatcgacagatgattacatcacttatttagctagtaaatttattaatataaaaactcagagacattccaatatccacattgcttacaccattaggcatagattcagtgtcagctatgacaattgaaaataag

SEQ ID NO: 330154 - DNA, 722 bp, Homo sapiens
ttcattttaacaatcaatccacccacctcctctctactcggaactggtggcacctggttggtggagaatttgaactggagatgaactctattatccaggatgctgagagtataatacgcatgacagagcttttagagcactgtgatgtaacatgtcaagcagaaatagggagcatgtttacagccattctatgaaaaagtgtttggaatgtacagactagcacagaagttgggctaattaaacaagtattgctgaaaatgagtgctgtagatgacatgagagcaggtatggggttgattgttagggaagtataacttaaaagtttataaagtttcacatacttctctttatattctataggtaatgtagatttgttgacactactttgatttaaaataaatggaaatgtatggaaattttactttttatattaatggaaaacctgaagagtgaaagaagaaaaatatacttactatagtagacaaatataattactaatgttgttttctaaattttagaaaatctcagtaccacggagtgctatgaaatctatcagaaaaataaacagtatctttttatgtagtatttcattaagcttttacataattaaaatgccacaataggtattacagttctgtataatgagcattttatcaaattcccctagttctgtgcccctcaatctggcatatatgcaactatgacaggaggtactaaaagcc

SEQ ID NO: 330155 - DNA, 666 bp, Homo sapiens
gctgaactcaggagtccctgatgccagcctttctgatgcggtccccctcccctcccccatgtgtctcgctccatagctccaggccaggagccccaactggctggtggaggatgtcttgctcctcagcagctgggatttgtaagtatttgtaggaacatggaacagatcagtggctgacaggcccaggaagcagacagtccccttcccataggtcaccagcttcacttccccttcctgcaccccatcctgatttgagggagcccaggatgacaaagagggagtagttgagcaaggtatggagtggcagcctctacaggagctcaaaggatgcatttgtccatctgccctgggctcagcttccacactcagagtcactcacatccctccaccgtcgccacagctcacctgtgtgcccacacggccaaggtcacactgaccccaaacgcacactgtttcaactctcagcacttcactgtcacactcgcgtgtgtacacacatgctttctgttctatgagtgtgatggtgtttgagaaaatgtggggctatggttcaggcgcacttcacatgtgcaaagatggagaaagcactcacctacacgtttaggctcagaatattgattgaaacattttgaatgatcaaaaataaaatgttatttttaaagtttc

SEQ ID NO: 330156 - DNA, 2648 bp, Homo sapiens
  misc_feature (1806)..(1806): n is a, c, g, or t
gcacgagggatgctgccagcgtgcgtgtccctacggaagctgagactgcacttcctgcgaggcccctgcagcagcagcggcgtggtcagagcgagcttcggagaagcagtggtgggttccatgtgatggtggagtaggaggcaggtctccgcgctactttgaaacatatgatacatttgtgttaaggctagtcaccctgctgtggaatagaaggccagaattgatcagtctcatctgagagtaactttgtacccatcactgattccttctgagactgcctccacttccccagcagcctctggtttcttcatgtggctgcagatggcaggatttcccaaaggtttctggctgaaacatattccgtggtgtatctgtacagcagtttcctcatccctgcagctgtgtttgaacaggttcaacagtatggctccaaaggatgaaatttcattctgattttctggctgaagactattctctttgtgtatgtccaccacagttactttatcccttcatctgtggatgggcagtctcgctgtattgcccaggctggagtgcagtggcatgatctcagctcactgcaagctctgcttcctgggttcacgccattctcctgcctcagcctcctgagtagctgggattacaggcacccgccaccacgcccaggaaagaaaaaagaagaaaacaaacctccatacgagaatgggtctaaaggaacttcccaaacctccatgattttgcaggaaacaagataaaggtggtttccacaagaaaaatggcacaatgtttctcagaagacaattacataagaatcagcatacttcaaattcacagcaaataatcagacaattgatgaaaatacttacccaaacactaattgtagactatgccttctgaatatgtttgtcataaacttggagtaaggaatcctcacaggcactggacaattcaaaaaacgtaaagttgtttgttagaatactggtgcttttgggtagaaaccctcatccatatcctggtaaggcttgaagttgcacaggagttttcatttgtcaaaacccagaaaaccataagctttagatttgtgaattttatattgtattatatgtgacctttctttttaaaaaatgagctgtaagcagtctcccagacagtagctcagcctccagaactctctttctgcatagttgaagacccctcttcacacaagatggtagcaacaaatcataggtgcaattgcaccaaattcacagaagatcaattgaaaatcctcatcaataccttcactcaaaaaccttacccaggttatgctaccaaacaaaaacttgctttagcaatcaatgcagaagagtccagaatccaaatttggtttcagaatcaaagacctaggcatggattccagaaaacaccagaacctgactttagatttaagccacagccatggacaagattaacctggtgtggagtttcaaaatagagaagccagatggtgttgtaccacctatagcacctttcaattacacacagtcatccatgcatttatgaaaaacccataccctgggattgattccagagaacaacttgctgaagaaattggtgcttcagagtcaagagtccaaatttggttccaaaatcgaagatctagatttcatctccagagaaaaagagaacctgttatgtccttagaatgagaagaccagagaagaccaggggcaaggtttctgagggacttcaaggtacagaagatacacaaagtggcaccagcctcactagcactctcatttctcaagagccagaacatggtgaatacantcaagttcagtgtatttgataatatcaatttgggccccaaatctctctcacagtcttcctgggagtctattcttcttccaaaagtgcaagctaagccttctgaagatggtaaagaacttggccgggtgtggtggctcatgcctgtaatcccagcactttaggaggctgaggctggaagattgcttgagcctaggagtttgaaaccagtctgagcaacatagtaagaccctgtctctattctaaaaaacaaaataagtaaaaaggactgtaggaggccaagacaggtacaggaggcaccacactaccctgttgacacagcctggatccagagttcagcagaccttgagacaatgaaaacaaacttagtaataatcatttttcaatcattgcagtaattattgatttggacaaaaatcaattgacgtcaaaaccttaaagtgacgtttctctgcctatggagtggtcattcttttattcctttagtttcataataaattttcttttacttaaaaaaacttatagtttgatgaagagtgagatatatacctcatctcaaagaatcttcacacacacacttattaattacaacaaggaaaatcagtaattttgcagtggcagacatatggccaactccaaccttacccaagtggctgaaagtcactgcaccagtaatggcacaaaccaatgtgagatgattcctgatatgatacactaacaaagggcactgtctcttctgcatgttgcagacaaaaagtgggtaagctgaaactgaaactaataattaggcaatgtcaagcaaatacaaattcaggttgacagtctgcgaagtaacatccatgtac

SEQ ID NO: 330157 - DNA, 2274 bp, Homo sapiens
  misc_feature (1432)..(1432): n is a, c, g, or t
gcacgagggatgctgccagcgtgcgtgtccctacggaagctgagactgcacttcctgcgaggcccctgcagcagcagcggcgtggtcagagcgagcttcggagaagcagtggtgggttccatgtgatggtggagtaggaggcaggtctccgcgtctcgctgtattgcccaggctggagtgcagtggcatgatctcagctcactgcaagctctgcttcctgggttcacgccattctcctgcctcagcctcctgagtagctgggattacaggcacccgccaccacgcccaggaaagaaaaaagaagaaaacaaacctccatacgagaatgggtctaaaggaacttcccaaacctccatgattttgcaggaaacaagataaaggtggtttccacaagaaaaatggcacaatgtttctcagaagacaattacataagaatcagcatacttcaaattcacagcaaataatcagacaattgatgaaaatacttacccaaacactaattgtagactatgccttctgaatatgtttgtcataaacttggagtaaggaatcctcacaggcactggacaattcaaaaaacgtaaagttgtttgttagaatactggtgcttttgggtagaaaccctcatccatatcctggtaaggcttgaagttgcacaggagttttcatttgtcaaaacccagaaaaccataagctttagatttgtgaattttatattgtattatatgtgacctttctttttaaaaaatgagctgtaagcagtctcccagacagtagctcagcctccagaactctctttctgcatagttgaagacccctcttcacacaagatggtagcaacaaatcataggtgcaattgcaccaaattcacagaagatcaattgaaaatcctcatcaataccttcactcaaaaaccttacccaggttatgctaccaaacaaaaacttgctttagcaatcaatgcagaagagtccagaatccaaatttggtttcagaatcaaagacctaggcatggattccagaaaacaccagaacctgactttagatttaagccacagccatggacaagattaacctggtgtggagtttcaaaatagagaagccagatggtgttgtaccacctatagcacctttcaattacacacagtcatccatgcatttatgaaaaacccataccctgggattgattccagagaacaacttgctgaagaaattggtgcttcagagtcaagagtccaaatttggttccaaaatcgaagatctagatttcatctccagagaaaaagagaacctgttatgtccttagaatgagaagaccagagaagaccaggggcaaggtttctgagggacttcaaggtacagaagatacacaaagtggcaccagcctcactagcactctcatttctcaagagccagaacatggtgaatacantcaagttcagtgtatttgataatatcaatttgggccccaaatctctctcacagtcttcctgggagtctattcttcttccaaaagtgcaagctaagccttctgaagatggtaaagaacttggccgggtgtggtggctcatgcctgtaatcccagcactttaggaggctgaggctggaagattgcttgagcctaggagtttgaaaccagtctgagcaacatagtaagaccctgtctctattctaaaaaacaaaataagtaaaaaggactgtaggaggccaagacaggtacaggaggcaccacactaccctgttgacacagcctggatccagagttcagcagaccttgagacaatgaaaacaaacttagtaataatcatttttcaatcattgcagtaattattgatttggacaaaaatcaattgacgtcaaaaccttaaagtgacgtttctctgcctatggagtggtcattcttttattcctttagtttcataataaattttcttttacttaaaaaaacttatagtttgatgaagagtgagatatatacctcatctcaaagaatcttcacacacacacttattaattacaacaaggaaaatcagtaattttgcagtggcagacatatggccaactccaaccttacccaagtggctgaaagtcactgcaccagtaatggcacaaaccaatgtgagatgattcctgatatgatacactaacaaagggcactgtctcttctgcatgttgcagacaaaaagtgggtaagctgaaactgaaactaataattaggcaatgtcaagcaaatacaaattcaggttgacagtctgcgaagtaacatccatgtac

SEQ ID NO: 330158 - DNA, 2750 bp, Homo sapiens
  misc_feature (1908)..(1908): n is a, c, g, or t
gcacgagggatgctgccagcgtgcgtgtccctacggaagctgagactgcacttcctgcgaggcccctgcagcagcagcggcgtggtcagagcgagcttcggagaagcagtggtgggttccatgtgatggtggagtaggaggcaggtctccgcggttcatctgtgttgctctaaatgacactgtttcattattttgatggctggagaatatttcctagtgtatgtatatgagagtttcttgatctctttatctgtggatgaacaggctagtcaccctgctgtggaatagaaggccagaattgatcagtctcatctgagagtaactttgtacccatcactgattccttctgagactgcctccacttccccagcagcctctggtttcttcatgtggctgcagatggcaggatttcccaaaggtttctggctgaaacatattccgtggtgtatctgtacagcagtttcctcatccctgcagctgtgtttgaacaggtcatttaccatgctgtcctccaggttcaacagtatggctccaaaggatgaaatttcattctgattttctggctgaagactattctctttgtgtatgtccaccacagttactttatcccttcatctgtggatgggcagtctcgctgtattgcccaggctggagtgcagtggcatgatctcagctcactgcaagctctgcttcctgggttcacgccattctcctgcctcagcctcctgagtagctgggattacaggcacccgccaccacgcccaggaaagaaaaaagaagaaaacaaacctccatacgagaatgggtctaaaggaacttcccaaacctccatgattttgcaggaaacaagataaaggtggtttccacaagaaaaatggcacaatgtttctcagaagacaattacataagaatcagcatacttcaaattcacagcaaataatcagacaattgatgaaaatacttacccaaacactaattgtagactatgccttctgaatatgtttgtcataaacttggagtaaggaatcctcacaggcactggacaattcaaaaaacgtaaagttgtttgttagaatactggtgcttttgggtagaaaccctcatccatatcctggtaaggcttgaagttgcacaggagttttcatttgtcaaaacccagaaaaccataagctttagatttgtgaattttatattgtattatatgtgacctttctttttaaaaaatgagctgtaagcagtctcccagacagtagctcagcctccagaactctctttctgcatagttgaagacccctcttcacacaagatggtagcaacaaatcataggtgcaattgcaccaaattcacagaagatcaattgaaaatcctcatcaataccttcactcaaaaaccttacccaggttatgctaccaaacaaaaacttgctttagcaatcaatgcagaagagtccagaatccaaatttggtttcagaatcaaagacctaggcatggattccagaaaacaccagaacctgactttagatttaagccacagccatggacaagattaacctggtgtggagtttcaaaatagagaagccagatggtgttgtaccacctatagcacctttcaattacacacagtcatccatgcatttatgaaaaacccataccctgggattgattccagagaacaacttgctgaagaaattggtgcttcagagtcaagagtccaaatttggttccaaaatcgaagatctagatttcatctccagagaaaaagagaacctgttatgtccttagaatgagaagaccagagaagaccaggggcaaggtttctgagggacttcaaggtacagaagatacacaaagtggcaccagcctcactagcactctcatttctcaagagccagaacatggtgaatacantcaagttcagtgtatttgataatatcaatttgggccccaaatctctctcacagtcttcctgggagtctattcttcttccaaaagtgcaagctaagccttctgaagatggtaaagaacttggccgggtgtggtggctcatgcctgtaatcccagcactttaggaggctgaggctggaagattgcttgagcctaggagtttgaaaccagtctgagcaacatagtaagaccctgtctctattctaaaaaacaaaataagtaaaaaggactgtaggaggccaagacaggtacaggaggcaccacactaccctgttgacacagcctggatccagagttcagcagaccttgagacaatgaaaacaaacttagtaataatcatttttcaatcattgcagtaattattgatttggacaaaaatcaattgacgtcaaaaccttaaagtgacgtttctctgcctatggagtggtcattcttttattcctttagtttcataataaattttcttttacttaaaaaaacttatagtttgatgaagagtgagatatatacctcatctcaaagaatcttcacacacacacttattaattacaacaaggaaaatcagtaattttgcagtggcagacatatggccaactccaaccttacccaagtggctgaaagtcactgcaccagtaatggcacaaaccaatgtgagatgattcctgatatgatacactaacaaagggcactgtctcttctgcatgttgcagacaaaaagtgggtaagctgaaactgaaactaataattaggcaatgtcaagcaaatacaaattcaggttgacagtctgcgaagtaacatccatgtac

SEQ ID NO: 330159 - DNA, 2500 bp, Homo sapiens
  misc_feature (1658)..(1658): n is a, c, g, or t
gcacgagggatgctgccagcgtgcgtgtccctacggaagctgagactgcacttcctgcgaggcccctgcagcagcagcggcgtggtcagagcgagcttcggagaagcagtggtgggttccatgtgatggtggagtaggaggcaggtctccgcggtttcttcatgtggctgcagatggcaggatttcccaaaggtttctggctgaaacatattccgtggtgtatctgtacagcagtttcctcatccctgcagctgtgtttgaacaggttcaacagtatggctccaaaggatgaaatttcattctgattttctggctgaagactattctctttgtgtatgtccaccacagttactttatcccttcatctgtggatgggcagtctcgctgtattgcccaggctggagtgcagtggcatgatctcagctcactgcaagctctgcttcctgggttcacgccattctcctgcctcagcctcctgagtagctgggattacaggcacccgccaccacgcccaggaaagaaaaaagaagaaaacaaacctccatacgagaatgggtctaaaggaacttcccaaacctccatgattttgcaggaaacaagataaaggtggtttccacaagaaaaatggcacaatgtttctcagaagacaattacataagaatcagcatacttcaaattcacagcaaataatcagacaattgatgaaaatacttacccaaacactaattgtagactatgccttctgaatatgtttgtcataaacttggagtaaggaatcctcacaggcactggacaattcaaaaaacgtaaagttgtttgttagaatactggtgcttttgggtagaaaccctcatccatatcctggtaaggcttgaagttgcacaggagttttcatttgtcaaaacccagaaaaccataagctttagatttgtgaattttatattgtattatatgtgacctttctttttaaaaaatgagctgtaagcagtctcccagacagtagctcagcctccagaactctctttctgcatagttgaagacccctcttcacacaagatggtagcaacaaatcataggtgcaattgcaccaaattcacagaagatcaattgaaaatcctcatcaataccttcactcaaaaaccttacccaggttatgctaccaaacaaaaacttgctttagcaatcaatgcagaagagtccagaatccaaatttggtttcagaatcaaagacctaggcatggattccagaaaacaccagaacctgactttagatttaagccacagccatggacaagattaacctggtgtggagtttcaaaatagagaagccagatggtgttgtaccacctatagcacctttcaattacacacagtcatccatgcatttatgaaaaacccataccctgggattgattccagagaacaacttgctgaagaaattggtgcttcagagtcaagagtccaaatttggttccaaaatcgaagatctagatttcatctccagagaaaaagagaacctgttatgtccttagaatgagaagaccagagaagaccaggggcaaggtttctgagggacttcaaggtacagaagatacacaaagtggcaccagcctcactagcactctcatttctcaagagccagaacatggtgaatacantcaagttcagtgtatttgataatatcaatttgggccccaaatctctctcacagtcttcctgggagtctattcttcttccaaaagtgcaagctaagccttctgaagatggtaaagaacttggccgggtgtggtggctcatgcctgtaatcccagcactttaggaggctgaggctggaagattgcttgagcctaggagtttgaaaccagtctgagcaacatagtaagaccctgtctctattctaaaaaacaaaataagtaaaaaggactgtaggaggccaagacaggtacaggaggcaccacactaccctgttgacacagcctggatccagagttcagcagaccttgagacaatgaaaacaaacttagtaataatcatttttcaatcattgcagtaattattgatttggacaaaaatcaattgacgtcaaaaccttaaagtgacgtttctctgcctatggagtggtcattcttttattcctttagtttcataataaattttcttttacttaaaaaaacttatagtttgatgaagagtgagatatatacctcatctcaaagaatcttcacacacacacttattaattacaacaaggaaaatcagtaattttgcagtggcagacatatggccaactccaaccttacccaagtggctgaaagtcactgcaccagtaatggcacaaaccaatgtgagatgattcctgatatgatacactaacaaagggcactgtctcttctgcatgttgcagacaaaaagtgggtaagctgaaactgaaactaataattaggcaatgtcaagcaaatacaaattcaggttgacagtctgcgaagtaacatccatgtac

SEQ ID NO: 330160 - DNA, 2634 bp, Homo sapiens
  misc_feature (1792)..(1792): n is a, c, g, or t
gttagagtggggcattttggttaatgcagacacagaggaatgttaaaatcaggatatttagagtctctgttatcacaaacagttgttaatttatttgtggtgaaaacatttggaatcttcttttccagattttgtgaaaaagctgtgatgttttgttaacctctggtcacagtgctgtggaacagagaggaacgattcattcctctcatctaagtgtaattttgtacctatttctgatccctgcccatgcccctgcttccttccaatctctggaaaccactgttgtgctctctagatctattgcaataaagccttttattttgggttctacatgagtgagatgtggcaatgtttttctttctctacctggttcaggtcatttaccatgctgtcctccaggttcaacagtatggctccaaaggatgaaatttcattctgattttctggctgaagactattctctttgtgtatgtccaccacagttactttatcccttcatctgtggatgggcagtctcgctgtattgcccaggctggagtgcagtggcatgatctcagctcactgcaagctctgcttcctgggttcacgccattctcctgcctcagcctcctgagtagctgggattacaggcacccgccaccacgcccaggaaagaaaaaagaagaaaacaaacctccatacgagaatgggtctaaaggaacttcccaaacctccatgattttgcaggaaacaagataaaggtggtttccacaagaaaaatggcacaatgtttctcagaagacaattacataagaatcagcatacttcaaattcacagcaaataatcagacaattgatgaaaatacttacccaaacactaattgtagactatgccttctgaatatgtttgtcataaacttggagtaaggaatcctcacaggcactggacaattcaaaaaacgtaaagttgtttgttagaatactggtgcttttgggtagaaaccctcatccatatcctggtaaggcttgaagttgcacaggagttttcatttgtcaaaacccagaaaaccataagctttagatttgtgaattttatattgtattatatgtgacctttctttttaaaaaatgagctgtaagcagtctcccagacagtagctcagcctccagaactctctttctgcatagttgaagacccctcttcacacaagatggtagcaacaaatcataggtgcaattgcaccaaattcacagaagatcaattgaaaatcctcatcaataccttcactcaaaaaccttacccaggttatgctaccaaacaaaaacttgctttagcaatcaatgcagaagagtccagaatccaaatttggtttcagaatcaaagacctaggcatggattccagaaaacaccagaacctgactttagatttaagccacagccatggacaagattaacctggtgtggagtttcaaaatagagaagccagatggtgttgtaccacctatagcacctttcaattacacacagtcatccatgcatttatgaaaaacccataccctgggattgattccagagaacaacttgctgaagaaattggtgcttcagagtcaagagtccaaatttggttccaaaatcgaagatctagatttcatctccagagaaaaagagaacctgttatgtccttagaatgagaagaccagagaagaccaggggcaaggtttctgagggacttcaaggtacagaagatacacaaagtggcaccagcctcactagcactctcatttctcaagagccagaacatggtgaatacantcaagttcagtgtatttgataatatcaatttgggccccaaatctctctcacagtcttcctgggagtctattcttcttccaaaagtgcaagctaagccttctgaagatggtaaagaacttggccgggtgtggtggctcatgcctgtaatcccagcactttaggaggctgaggctggaagattgcttgagcctaggagtttgaaaccagtctgagcaacatagtaagaccctgtctctattctaaaaaacaaaataagtaaaaaggactgtaggaggccaagacaggtacaggaggcaccacactaccctgttgacacagcctggatccagagttcagcagaccttgagacaatgaaaacaaacttagtaataatcatttttcaatcattgcagtaattattgatttggacaaaaatcaattgacgtcaaaaccttaaagtgacgtttctctgcctatggagtggtcattcttttattcctttagtttcataataaattttcttttacttaaaaaaacttatagtttgatgaagagtgagatatatacctcatctcaaagaatcttcacacacacacttattaattacaacaaggaaaatcagtaattttgcagtggcagacatatggccaactccaaccttacccaagtggctgaaagtcactgcaccagtaatggcacaaaccaatgtgagatgattcctgatatgatacactaacaaagggcactgtctcttctgcatgttgcagacaaaaagtgggtaagctgaaactgaaactaataattaggcaatgtcaagcaaatacaaattcaggttgacagtctgcgaagtaacatccatgtac

SEQ ID NO: 330161 - DNA, 2672 bp, Homo sapiens
  misc_feature (1830)..(1830): n is a, c, g, or t
gcacgagggatgctgccagcgtgcgtgtccctacggaagctgagactgcacttcctgcgaggcccctgcagcagcagcggcgtggtcagagcgagcttcggagaagcagtggtgggttccatgtgatggtggagtaggaggcaggtctccgcgctactttgaaacatatgatacatttgtgttaaggctagtcaccctgctgtggaatagaaggccagaattgatcagtctcatctgagagtaactttgtacccatcactgattccttctgagactgcctccacttccccagcagcctctggtttcttcatgtggctgcagatggcaggatttcccaaaggtttctggctgaaacatattccgtggtgtatctgtacagcagtttcctcatccctgcagctgtgtttgaacaggtcatttaccatgctgtcctccaggttcaacagtatggctccaaaggatgaaatttcattctgattttctggctgaagactattctctttgtgtatgtccaccacagttactttatcccttcatctgtggatgggcagtctcgctgtattgcccaggctggagtgcagtggcatgatctcagctcactgcaagctctgcttcctgggttcacgccattctcctgcctcagcctcctgagtagctgggattacaggcacccgccaccacgcccaggaaagaaaaaagaagaaaacaaacctccatacgagaatgggtctaaaggaacttcccaaacctccatgattttgcaggaaacaagataaaggtggtttccacaagaaaaatggcacaatgtttctcagaagacaattacataagaatcagcatacttcaaattcacagcaaataatcagacaattgatgaaaatacttacccaaacactaattgtagactatgccttctgaatatgtttgtcataaacttggagtaaggaatcctcacaggcactggacaattcaaaaaacgtaaagttgtttgttagaatactggtgcttttgggtagaaaccctcatccatatcctggtaaggcttgaagttgcacaggagttttcatttgtcaaaacccagaaaaccataagctttagatttgtgaattttatattgtattatatgtgacctttctttttaaaaaatgagctgtaagcagtctcccagacagtagctcagcctccagaactctctttctgcatagttgaagacccctcttcacacaagatggtagcaacaaatcataggtgcaattgcaccaaattcacagaagatcaattgaaaatcctcatcaataccttcactcaaaaaccttacccaggttatgctaccaaacaaaaacttgctttagcaatcaatgcagaagagtccagaatccaaatttggtttcagaatcaaagacctaggcatggattccagaaaacaccagaacctgactttagatttaagccacagccatggacaagattaacctggtgtggagtttcaaaatagagaagccagatggtgttgtaccacctatagcacctttcaattacacacagtcatccatgcatttatgaaaaacccataccctgggattgattccagagaacaacttgctgaagaaattggtgcttcagagtcaagagtccaaatttggttccaaaatcgaagatctagatttcatctccagagaaaaagagaacctgttatgtccttagaatgagaagaccagagaagaccaggggcaaggtttctgagggacttcaaggtacagaagatacacaaagtggcaccagcctcactagcactctcatttctcaagagccagaacatggtgaatacantcaagttcagtgtatttgataatatcaatttgggccccaaatctctctcacagtcttcctgggagtctattcttcttccaaaagtgcaagctaagccttctgaagatggtaaagaacttggccgggtgtggtggctcatgcctgtaatcccagcactttaggaggctgaggctggaagattgcttgagcctaggagtttgaaaccagtctgagcaacatagtaagaccctgtctctattctaaaaaacaaaataagtaaaaaggactgtaggaggccaagacaggtacaggaggcaccacactaccctgttgacacagcctggatccagagttcagcagaccttgagacaatgaaaacaaacttagtaataatcatttttcaatcattgcagtaattattgatttggacaaaaatcaattgacgtcaaaaccttaaagtgacgtttctctgcctatggagtggtcattcttttattcctttagtttcataataaattttcttttacttaaaaaaacttatagtttgatgaagagtgagatatatacctcatctcaaagaatcttcacacacacacttattaattacaacaaggaaaatcagtaattttgcagtggcagacatatggccaactccaaccttacccaagtggctgaaagtcactgcaccagtaatggcacaaaccaatgtgagatgattcctgatatgatacactaacaaagggcactgtctcttctgcatgttgcagacaaaaagtgggtaagctgaaactgaaactaataattaggcaatgtcaagcaaatacaaattcaggttgacagtctgcgaagtaacatccatgtac

SEQ ID NO: 330162 - DNA, 2094 bp, Homo sapiens
  misc_feature (1252)..(1252): n is a, c, g, or t
agaaagttttattttattaaaaaatgtagtctacaaacgagcctcaatttttggcaataaactcaaaaatgctacacaaaccatcacagaattcggtttgtccttgcaggaaagaaaaaagaagaaaacaaacctccatacgagaatgggtctaaaggaacttcccaaacctccatgattttgcaggaaacaagataaaggtggtttccacaagaaaaatggcacaatgtttctcagaagacaattacataagaatcagcatacttcaaattcacagcaaataatcagacaattgatgaaaatacttacccaaacactaattgtagactatgccttctgaatatgtttgtcataaacttggagtaaggaatcctcacaggcactggacaattcaaaaaacgtaaagttgtttgttagaatactggtgcttttgggtagaaaccctcatccatatcctggtaaggcttgaagttgcacaggagttttcatttgtcaaaacccagaaaaccataagctttagatttgtgaattttatattgtattatatgtgacctttctttttaaaaaatgagctgtaagcagtctcccagacagtagctcagcctccagaactctctttctgcatagttgaagacccctcttcacacaagatggtagcaacaaatcataggtgcaattgcaccaaattcacagaagatcaattgaaaatcctcatcaataccttcactcaaaaaccttacccaggttatgctaccaaacaaaaacttgctttagcaatcaatgcagaagagtccagaatccaaatttggtttcagaatcaaagacctaggcatggattccagaaaacaccagaacctgactttagatttaagccacagccatggacaagattaacctggtgtggagtttcaaaatagagaagccagatggtgttgtaccacctatagcacctttcaattacacacagtcatccatgcatttatgaaaaacccataccctgggattgattccagagaacaacttgctgaagaaattggtgcttcagagtcaagagtccaaatttggttccaaaatcgaagatctagatttcatctccagagaaaaagagaacctgttatgtccttagaatgagaagaccagagaagaccaggggcaaggtttctgagggacttcaaggtacagaagatacacaaagtggcaccagcctcactagcactctcatttctcaagagccagaacatggtgaatacantcaagttcagtgtatttgataatatcaatttgggccccaaatctctctcacagtcttcctgggagtctattcttcttccaaaagtgcaagctaagccttctgaagatggtaaagaacttggccgggtgtggtggctcatgcctgtaatcccagcactttaggaggctgaggctggaagattgcttgagcctaggagtttgaaaccagtctgagcaacatagtaagaccctgtctctattctaaaaaacaaaataagtaaaaaggactgtaggaggccaagacaggtacaggaggcaccacactaccctgttgacacagcctggatccagagttcagcagaccttgagacaatgaaaacaaacttagtaataatcatttttcaatcattgcagtaattattgatttggacaaaaatcaattgacgtcaaaaccttaaagtgacgtttctctgcctatggagtggtcattcttttattcctttagtttcataataaattttcttttacttaaaaaaacttatagtttgatgaagagtgagatatatacctcatctcaaagaatcttcacacacacacttattaattacaacaaggaaaatcagtaattttgcagtggcagacatatggccaactccaaccttacccaagtggctgaaagtcactgcaccagtaatggcacaaaccaatgtgagatgattcctgatatgatacactaacaaagggcactgtctcttctgcatgttgcagacaaaaagtgggtaagctgaaactgaaactaataattaggcaatgtcaagcaaatacaaattcaggttgacagtctgcgaagtaacatccatgtac

SEQ ID NO: 330163 - DNA, 1473 bp, Homo sapiens
gcacgagggatgctgccagcgtgcgtgtccctacggaagctgagactgcacttcctgcgaggcccctgcagcagcagcggcgtggtcagagcgagcttcggagaagcagtggtgggttccatgtgatggtggagtaggaggcaggtctccgcggttcatctgtgttgctctaaatgacactgtttcattattttgatggctggagaatatttcctagtgtatgtatatgagagtttcttgatctctttatctgtggatgaacaggctagtcaccctgctgtggaatagaaggccagaattgatcagtctcatctgagagtaactttgtacccatcactgattccttctgagactgcctccacttccccagcagcctctggtttcttcatgtggctgcagatggcaggatttcccaaaggtttctggctgaaacatattccgtggtgtatctgtacagcagtttcctcatccctgcagctgtgtttgaacaggtcatttaccatgctgtcctccaggttcaacagtatggctccaaaggatgaaatttcattctgattttctggctgaagactattctctttgtgtatgtccaccacagttactttatcccttcatctgtggatgggcagtctcgctgcactccagcctgggtgacaagagcaactccgtctcccaaaataaaaagaagaattgtcaacaagagggagtggcaattcagaagcatatttaagccaagtcctcaagactagaaagcatgaagcaggggaggcgttttgaaagcataagaacaatagaccatgggcatggatggccgagtctggggatcagcatcgtaatttgttgagaaggaggccgtggtgtgctgccagttattaattggtttaatcggttgatacacagccctactggcctaaccagtagcccagggccctggaggatttgcagttcgtgtcagaatttgattgcagttccttccacttggcataaggagacactatcagcctgattgggagggtgatggtgggatggagcctgccgaggtggcggcgctgagctgaccacaccaccggccatagagtgggagcctttcctgcccgcttaactgcagctaatatcaaaagcactggtatgggctgtctatctgtgctggaacctgagtttatctttgtctgcaattacgattcttctgggtttattttgccagctcattatccagccccctggaatcaggcctcccaaatttatcaggtgctggggaggaccctagggagtggtgtatgggggctagctggtgaaactgccctttcctttctgttctatgagtgtgatggtgtttgagaaaatgtggggctatggttcaggcgcacttcacatgtgcaaagatggagaaagcactcacctacacgtttaggctcagaatattgattgaaacattttgaatgatcaaaaataaaatgttatttttaaagtttc

SEQ ID NO: 330164 - DNA, 1715 bp, Homo sapiens
gcacgagggatgctgccagcgtgcgtgtccctacggaagctgagactgcacttcctgcgaggcccctgcagcagcagcggcgtggtcagagcgagcttcggagaagcagtggtgggttccatgtgatggtggagtaggaggcaggtctccgcggttcatctgtgttgctctaaatgacactgtttcattattttgatggctggagaatatttcctagtgtatgtatatgagagtttcttgatctctttatctgtggatgaacaggctagtcaccctgctgtggaatagaaggccagaattgatcagtctcatctgagagtaactttgtacccatcactgattccttctgagactgcctccacttccccagcagcctctggtttcttcatgtggctgcagatggcaggatttcccaaaggtttctggctgaaacatattccgtggtgtatctgtacagcagtttcctcatccctgcagctgtgtttgaacaggtcatttaccatgctgtcctccaggttcaacagtatggctccaaaggatgaaatttcattctgattttctggctgaagactattctctttgtgtatgtccaccacagttactttatcccttcatctgtggatgggcagtctcgctgcactccagcctgggtgacaagagcaactccgtctcccaaaataaaaagaagaattgtcaacaagagggagtggcaattcagaagcatatttaagccaagtcctcaagactagaaagcatgaagcaggggaggcgttttgaaagcataagaacaatagaccatgggcatggatggccgagtctggggatcagcatcgtaatttgttgagaaggaggccgtggtgtgctgccagttattaattggtttaatcggttgatacacagccctactggcctaaccagtagcccagggccctggaggatttgcagttcgtgtcagaatttgattgcagttccttccacttggcataaggagacactatcagcctgattgggagggtgatggtgggatggagcctgccgaggtggcggcgctgagctgaccacaccaccggccatagagtgggagcctttcctgcccgcttaactgcagctaatatcaaaagcactggtatgggctgtctatctgtgctggaacctgagtttatctttgtctgcaattacgattcttctgggtttattttgccagctcattatccagccccctggaatcaggcctcccaaatttatcaggtgctggggaggaccctagggagtggtgtatgggggctagctggtgaaactgccctttcctttctgttctatgagtgtgatggtgtttgagaaaatgtggggctatggttcaggcgcacttcacatgtgcaaagatggagaaagcactcacctacacgtttaggctcagaatattgattgaaacattttgaatgatcaaaaataaaatgttatttttaaagtttctctctgagattttgcttaagttttggtagatattcttaagttttagtgacctcagtttgggaattaagtaagctaaacattgtgtccttattattagttatataaaactatgctttagactttgttagaaacttctgccccaccttgactgactccttttccatttctggttgtacaaaatgaattcacactttaatgctatggccacctttaaataaagtacagcgtgactaaaaaaaaaa

SEQ ID NO: 330165 - DNA, 1588 bp, Homo sapiens
gctgaactcaggagtccctgatgccagcctttctgatgcggtccccctcccctcccccatgtgtctcgctccatagctccaggccaggagccccaactggctggtggaggatgtcttgctcctcagcagctgggatttgtaagtatttgtaggaacatggaacagatcagtggctgacaggcccaggaagcagacagtccccttcccataggtcaccagcttcacttccccttcctgcaccccatcctgatttgagggagcccaggatgacaaagagggagtagttgagcaaggtatggagtggcagcctctacaggagctcaaaggatgcatttgtccatctgccctgggctcagcttccacactcagagtcactcacatccctccaccgtcgccacagctcacctgtgtgcccacacggccaaggtcacactgaccccaaacgcacactgtttcaactctcagcacttcactgtcacactcgcgtgtgtacacacatgctttctaatttccacagccacatggatgctcacacactcacacctttgcacacacacacaagctggctcacagacacactgggggcccagatcctggtcattccccacaggtcttaataaaggttcatggaaggaaacctgtttcctaaggtagggtgggagtgtgtgtgagtgtgtgggggggagagggtgagagtgagtgtgtgcgtgtgttagtgtgtgtgtgtgtatgtaaggagcaggagtgactgggtcctgagtttagggagttgggaagaggaaggagagatggagacaagcctggaccaagagccactcagagctgcctggaagggaagccaggctgagataaaggcaaggcaaagaaataagacactgacaaggatcaagccagggttgggtagggactgggaacagagtctgcctccatgagaagctgtcacattgctgctctggtgccctgtgacagcggcaccatctccagctggagactcccctctctggatcttgtcattgtgactttgctttgttggacaaccaggagtggtgacaggcagggaatatggtgcccagggcagctagccatgccacgccagtccagctgccaacccacccgtcactggccatctcatcacctgcagagggagtggggtggtgcagatgaaaccagcgatcagcttggctgcccttgcttcgtagtgccacagtagaggctaggggagcaactggctttcctccccaaaaggcgggcagggttatccacactttgcccaggtccctgaagcctgcggctgagctcggggataacaggggccaagtcaccggtcccagacacctaggaactattagagacaggaaccagcatatgagacaggggctgttaagtaggaggttggagaacacacgtttttggtctaaaccgggggcccctctctttgcccactgagcccgcggcctgcgtggtgctgagactgcctctggccgcgtccgcttgggacaaggcctgagcggtggctgatcccacctggatgtcccgggccggctcccacccgaagcccgccatcccgggacgcggtggggagaagctg

SEQ ID NO: 330166 - DNA, 1423 bp, Homo sapiens
gcacgagggatgctgccagcgtgcgtgtccctacggaagctgagactgcacttcctgcgaggcccctgcagcagcagcggcgtggtcagagcgagcttcggagaagcagtggtgggttccatgtgatggtggagtaggaggcaggtctccgcgctactttgaaacatatgatacatttgtgttaaggctagtcaccctgctgtggaatagaaggccagaattgatcagtctcatctgagagtaactttgtacccatcactgattccttctgagactgcctccacttccccagcagcctctggtttcttcatgtggctgcagatggcaggatttcccaaaggtttctggctgaaacatattccgtggtgtatctgtacagcagtttcctcatccctgcagctgtgtttgaacaggttcaacagtatggctccaaaggatgaaatttcattctgattttctggctgaagactattctctttgtgtatgtccaccacagttactttatcccttcatctgtggatgggcagtctcgctgtattgcccaggctggagtgcagtggcatgatctcagctcactgcaagctctgcttcctgggttcacgccattctcctgcctcagcctcctgagtagctgggattacaggcacccgccaccacgcccaggaaagaaaaaagaagaaaacaaacctccatacgagaatgggtctaaaggaacttcccaaacctccatgattttgcaggaaacaagataaagctggttggtggagaatttgaactggagatgaactctattatccaggatgctgagagtataatacgcatgacagagcttttagagcactgtgatgtaacatgtcaagcagaaatagggagcatgtttacagccattctatgaaaaagtgtttggaatgtacagactagcacagaagttgggctaattaaacaagtattgctgaaaatgagtgctgtagatgacatgagagcaggtatggggttgattgttagggaagtataacttaaaagtttataaagtttcacatacttctctttatattctataggtaatgtagatttgttgacactactttgatttaaaataaatggaaatgtatggaaattttactttttatattaatggaaaacctgaagagtgaaagaagaaaaatatacttactatagtagacaaatataattactaatgttgttttctaaattttagaaaatctcagtaccacggagtgctatgaaatctatcagaaaaataaacagtatctttttatgtagtatttcattaagcttttacataattaaaatgccacaataggtattacagttctgtataatgagcattttatcaaattcccctagttctgtgcccctcaatctggcatatatgcaactatgacaggaggtactaaaagcc

SEQ ID NO: 330167 - DNA, 1383 bp, Homo sapiens
gcacgagggatgctgccagcgtgcgtgtccctacggaagctgagactgcacttcctgcgaggcccctgcagcagcagcggcgtggtcagagcgagcttcggagaagcagtggtgggttccatgtgatggtggagtaggaggcaggtctccgcggttcatctgtgttgctctaaatgacactgtttcattattttgatggctggagaatatttcctagtgtatgtatatgagagtttcttgatctctttatctgtggatgaacaggctagtcaccctgctgtggaatagaaggccagaattgatcagtctcatctgagagtaactttgtacccatcactgattccttctgagactgcctccacttccccagcagcctctggtttcttcatgtggctgcagatggcaggatttcccaaaggtttctggctgaaacatattccgtggtgtatctgtacagcagtttcctcatccctgcagctgtgtttgaacaggtcatttaccatgctgtcctccaggttcaacagtatggctccaaaggatgaaatttcattctgattttctggctgaagactattctctttgtgtatgtccaccacagttactttatcccttcatctgtggatgggcagtctcgctgcactccagcctgggtgacaagagcaactccgtctcccaaaataaaaagaagaattgtcaacaagagggagtggcaattcagaagcatatttaagccaagtcctcaagactagaaagcatgaagcaggggaggcgttttgaaagcataagaacaatagaccatgggcatggatggccgagtctggggatcagcatcgtaatttgttgagaaggaggccgtggtgtgctgccagttattaattggtttaatcggttgatacacagccctactggcctaaccagtagcccagggccctggaggatttgcagttcgtgtcagaatttgattgcagttccttccacttggcataaggagacactatcagcctgattgggagggtgatggtgggatggagcctgccgaggtggcggcgctgagctgaccacaccaccggccatagagtgggagcctttcctgcccgcttaactgcagctaatatcaaaagcactggtatgggctgtctatctgtgctggaacctgagtttatctttgtctgcaattacgattcttctgggtttattttgccagctcattatccagccccctggaatcaggcctcccaaatttatcaggtgctggggaggaccctagggagtggtgtatgggggctagctggtgaaactgccctttcgaatcgtaattgcagacaaagataaactcaggttccagcacagatagacagcccataccagtgcttttggtcgacg

SEQ ID NO: 330168 - DNA, 1167 bp, Homo sapiens
gctgaactcaggagtccctgatgccagcctttctgatgcggtccccctcccctcccccatgtgtctcgctccatagctccaggccaggagccccaactggctggtggaggatgtcttgctcctcagcagctgggatttgtaagtatttgtaggaacatggaacagatcagtggctgacaggcccaggaagcagacagtccccttcccataggtcaccagcttcacttccccttcctgcaccccatcctgatttgagggagcccaggatgacaaagagggagtagttgagcaaggtatggagtggcagcctctacaggagctcaaaggatgcatttgtccatctgccctgggctcagcttccacactcagagtcactcacatccctccaccgtcgccacagctcacctgtgtgcccacacggccaaggtcacactgaccccaaacgcacactgtttcaactctcagcacttcactgtcacactcgcgtgtgtacacacatgctttctaatttccacagccacatggatgctcacacactcacacctttgcacacacacacaagctggctcacagacacactgggggcccagatcctggtcattccccacaggtcttaataaaggttcatggaaggaaacctgtttcctaaggtagggtgggagtgtgtgtgagtgtgtgggggggagagggtgagagtgagtgtgtgcgtgtgttagtgtgtgtgtgtgtatgtaaggagcaggagtgactgggtcctgagtttagggagttgggaagaggaaggagagatggagacaagcctggaccaagagccactcagagctgcctggaagggaagccaggctgagataaaggcaaggcaaagaaataagacactgacaaggatcaagccagggttgggtagggactgggaacagatcagtggctgacaggcccaggaagcagacagtccccttcccataggtcaccagcttcacttccccttcctgcaccccatcctgatttgagggagcccaggatgacaaagagggagtagttgagcaaggtatggagtagcagcctctacaggagctcaaaggatgcatttgtccatctgccctgggctcagcttccacactcagagtcactcacatccctccaccgtcgccacagctcacctgtgtgccc

SEQ ID NO: 330169 - DNA, 1434 bp, Homo sapiens
gcacgagggatgctgccagcgtgcgtgtccctacggaagctgagactgcacttcctgcgaggcccctgcagcagcagcggcgtggtcagagcgagcttcggagaagcagtggtgggttccatgtgatggtggagtaggaggcaggtctccgcggttcatctgtgttgctctaaatgacactgtttcattattttgatggctggagaatatttcctagtgtatgtatatgagagtttcttgatctctttatctgtggatgaacaggctagtcaccctgctgtggaatagaaggccagaattgatcagtctcatctgagagtaactttgtacccatcactgattccttctgagactgcctccacttccccagcagcctctggtttcttcatgtggctgcagatggcaggatttcccaaaggtttctggctgaaacatattccgtggtgtatctgtacagcagtttcctcatccctgcagctgtgtttgaacaggtcatttaccatgctgtcctccaggttcaacagtatggctccaaaggatgaaatttcattctgattttctggctgaagactattctctttgtgtatgtccaccacagttactttatcccttcatctgtggatgggcagtctcgctgtattgcccaggctggagtgcagtggcatgatctcagctcactgcaagctctgcttcctgggttcacgccattctcctgcctcagcctcctgagtagctgggattacaggcacccgccaccacgcccagctggttggtggagaatttgaactggagatgaactctattatccaggatgctgagagtataatacgcatgacagagcttttagagcactgtgatgtaacatgtcaagcagaaatagggagcatgtttacagccattctatgaaaaagtgtttggaatgtacagactagcacagaagttgggctaattaaacaagtattgctgaaaatgagtgctgtagatgacatgagagcaggtatggggttgattgttagggaagtataacttaaaagtttataaagtttcacatacttctctttatattctataggtaatgtagatttgttgacactactttgatttaaaataaatggaaatgtatggaaattttactttttatattaatggaaaacctgaagagtgaaagaagaaaaatatacttactatagtagacaaatataattactaatgttgttttctaaattttagaaaatctcagtaccacggagtgctatgaaatctatcagaaaaataaacagtatctttttatgtagtatttcattaagcttttacataattaaaatgccacaataggtattacagttctgtataatgagcattttatcaaattcccctagttctgtgcccctcaatctggcatatatgcaactatgacaggaggtactaaaagcc

SEQ ID NO: 330170 - DNA, 952 bp, Homo sapiens
gcacgagggatgctgccagcgtgcgtgtccctacggaagctgagactgcacttcctgcgaggcccctgcagcagcagcggcgtggtcagagcgagcttcggagaagcagtggtgggttccatgtgatggtggagtaggaggcaggtctccgcggttcatctgtgttgctctaaatgacactgtttcattattttgatggctggagaatatttcctagtgtatgtatatgagagtttcttgatctctttatctgtggatgaacaggctagtcaccctgctgtggaatagaaggccagaattgatcagtctcatctgagagtaactttgtacccatcactgattccttctgagactgcctccacttccccagcagcctctggtttcttcatgtggctgcagatggcaggatttcccaaaggtttctggctgaaacatattccgtggtgtatctgtacagcagtttcctcatccctgcagctgtgtttgaacaggtcatttaccatgctgtcctccaggttcaacagtatggctccaaaggatgaaatttcattctgattttctggctgaagactattctctttgtgtatgtccaccacagttactttatcccttcatctgtggatgggcagtctcgctgtattgcccaggctggagtgcagtggcatgatctcagctcactgcaagctctgcttcctgggttcacgccattctcctgcctcagcctcctgagtagctgggattacaggcacccgccaccacgcccagaatgaaacatatatggaaatgttctgtgcaatcaaaacagcagtggtaacagaggagatgtaggctctgagtgtctcactggagactgaagtccacagatatgcaacaaagcctttgtctccctgatgtttttgcctcctgctggtcatgtgctttcacacatcaagagaggacatttaacatttga

SEQ ID NO: 330171 - DNA, 580 bp, Homo sapiens
gcacgagggatgctgccagcgtgcgtgtccctacggaagctgagactgcacttcctgcgaggcccctgcagcagcagcggcgtggtcagagcgagcttcggagaagcagtggtgggttccatgtgatggtggagtaggaggcaggtctccgcggtttcttcatgtggctgcagatggcaggatttcccaaaggtttctggctgaaacatattccgtggtgtatctgtacagcagtttcctcatccctgcagctgtgtttgaacaggaaagaaaaaagaagaaaacaaacctccatacgagaatgggtctaaaggaacttcccaaacctccatgattttgcaggaaacaagataaaggttatcacaaccagcccagctccagaagtgaaagagctggctgcagctgggcatgaggccaaatgaaaatgctttcactcccctcaagggctgcagagggggcccttgcaaagggagggtcaccgagctgcaatttcttctgcctccaatccagaaagagcctgaaggattgctcaaggtgtcctgggaaagattttgatttcaaagagacaatctcccccagg

SEQ ID NO: 330172 - DNA, 667 bp, Homo sapiens
tttggttaatgcagacacagaggaatgttaaaatcaggatatttagagtctctgttatcacaaacagttgttaatttatttgtggtgaaaacatttggaatcttcttttccagattttgtgaaaaagctgtgatgttttgttaacctctggtcacagtgctgtggaacagagaggaacgattcattcctctcatctaagtgtaattttgtacctatttctgatccctgcccatgcccctgcttccttccaatctctggaaaccactgttgtgctctctagatctattgcaataaagccttttattttgggttctacatgagtgagatgtggcaatgtttttctttctctacctggttcaggtcatttaccatgctgtcctccaggttcaacagtatggctccaaaggatgaaatttcattctgattttctggctgaagactattctctttgtgtatgtccaccacagttactttatcccttcatctgtggatgggcaggtaagtttattccttatcttggcgattgtgaatagtgctgcagtccacataggatggctgatacctcttgcataaactgatttctttggcactgaaagtatacttagtagtagaattgttagatgaagtggtagttgtaggtttaatttttggaggaacctcccactgg

SEQ ID NO: 330173 - DNA, 967 bp, Homo sapiens
gcacgagggatgctgccagcgtgcgtgtccctacggaagctgagactgcacttcctgcgaggcccctgcagcagcagcggcgtggtcagagcgagcttcggagaagcagtggtgggttccatgtgatggtggagtaggaggcaggtctccgcggttcatctgtgttgctctaaatgacactgtttcattattttgatggctggagaatatttcctagtgtatgtatatgagagtttcttgatctctttatctgtggatgaacagctactttgaaacatatgatacatttgtgttaaggctagtcaccctgctgtggaatagaaggccagaattgatcagtctcatctgagagtaactttgtacccatcactgattccttctgagactgcctccacttccccagcagcctctggtttcttcatgtggctgcagatggcaggatttcccaaaggtttctggctgaaacatattccgtggtgtatctgtacagcagtttcctcatccctgcagctgtgtttgaacaggtcatttaccatgctgtcctccaggttcaacagtatggctccaaaggatgaaatttcattctgattttctggctgaagactattctctttgtgtatgtccaccacagttactttatcccttcatctgtggatgggcagtccagcctgggtgacaagagcaactccgtctcccaaaaaagaactaagcgcaaaaccgaggtatttgcccccaaggggggggggcatctcggaggtttttttaggcccaggtcctaagagacctagaaaggcgcgtgaacgcaggggaaggggttttggacaacggtgtagacaccgtattaacaccgtggcccatggaaatgcgccagaatcgggggacccaggatccgaacatcggcggacaaaggaggcccggacgtggcgcgcgccgacaaacaaggggggaaaaccggcgtgataccagg

SEQ ID NO: 330174 - DNA, 1173 bp, Homo sapiens
gtcttgtcttctggttcactgccatataactatctagagtagtgatatacaggagttattcagtaaaataatttatatttgtgtggattgctcattaatactctacgtacattttactgtcttctaaggatctcttctggattaaggccattaactcatcgttataaattttctagtttatcatttgtcttcaaaccttgttcatagtgttttcttacgtagactatttacgtgaacaaataaacaggcaataggagtcatcagtctttgctttcttctgagttttgttgcattttgaaaatgtctgatttataccttttttctggtctgtataaatcgtttttcactgtacctgctgtttctctgttagaattgtttaaaaaatgatttttactttattttacttaaggcataagaagttctccgtggttaaaatattagtacgtgaactttgtcatctatgaacaagttcctttagaagctgagctctgatagtgatgtcaaatagccacctgttacttgaagacgatgtttgcatacctggcccctcctttatcactgctgttgctgccattgttgatgacatgatgtggaagggcagtgagaaatttgatacttgttcatctatctgttggactcaactagtagtgttgctttagtttttaatctttttatctgaaacggagagtctattataatttgtcattttattcattgcagcggttgtggaacaggaaatgaaaaaggactggctttttgcccctcattatcgatactatgtaagagaaatgagaattcatgcatacagtcagctgctggaatcatataggtcattaacccttggctatatggcagaagcgtttggtgttggtgtggaattcattgatcaggaactgtccaggtttattgctgccgggagactacactgcaaaatagataaagtgaatgaaatagtagaaaccaacagacctgatagcaagaactggcagtaccaagaaactatcaagaaaggagatctgctactaaacagagttcaaaaactttccagagtaattaatatgtaaagccatgtaactaacaaaggatttgctttagagataattatttggaatttttatagcttacttcacaatgtgcccaggtcagctgtataaaataaatactgcattgttg

SEQ ID NO: 330175 - DNA, 1577 bp, Homo sapiens
gtcttgtcttctggttcactgccatataactatctagagtagtgatatacaggagttattcagtaaaataatttatatttgtgtggattgctcattaatactctacgtacattttactgtcttctaaggatctcttctggattaaggccattaactcatcgttataaattttctagtttatcatttgtcttcaaaccttgttcatagtgttttcttacgtagactatttacgtgaacaaataaacaggcaataggagtcatcagtctttgctttcttctgagttttgttgcattttgaaaatgtctgatttataccttttttctggtctgtataaatcgtttttcactgtacctgctgtttctctgttagaattgtttaaaaaatgatttttactttattttacttaaggcataagaagttctccgtggttaaaatattagtacgtgaactttgtcatctatgaacaagttcctttagaagctgagctctgatagtgatgtcaaatagccacctgttacttgaagacgatgtttgcatacctggcccctcctttatcactgctgttgctgccattgttgatgacatgatgtggaagggcagtgagaaatttgatacttgttcatctatctgttggactcaactagtagtgttgctttagtttttaatctttttatctgaaacggagagtctattataatttgtcattttattcattgcagcggttgtggaacaggaaatgaaaaaggactggctttttgcccctcattatcgatactatgtaagagaaatgagaattcatgcatacagtcagctgctggaatcatataggtcattaacccttggctatatggcagaagcgtttggtgttggtgtggaattcattgatcagtaagtttgaataatgccatgttaattgaagttttaaagttgccttttaaaatatgtgaacttgtacaattttttacttgtttacattggttccctcaatcttaacggggaggggagaggtttttttcctcagtattatcaaaacattcgtatcctgttgcctctgccttcctcatgtcatgtctgccccttgcattaacagatgggaagatgagttgtagtgaggctaagtgatttgttaaaggtcattagaccagttgttatcaaaagttgtcttctgttacttctttgtagaccacactgcagctacggtaatgactcttagatctgatatttacagttggtcatattccctctgataattccttccagtttttaggttgctgctgcaattctggtcagattggttgttaaatgtgggacttttagtacttgcatcagtgattaaacaaataaatacttaatgagccattcattactatatgtttggtattgttttacagctcccttttcacactttcattgtagtagtagggaagagatggcaaggaagcaaataaatataaaacgtaatttcacatatagaaatgaacctatggagatgagaaaatgctatccttacgtacggcatgcttaaggaggtgaggtttgctctgagatttgaattgagaggagtcagccatatgga

SEQ ID NO: 330176 - DNA, 816 bp, Homo sapiens
ttttagatgaaatccccttttttaaaatgggcaaagcaataattctacatcatttctccccttcccttccacttgtttagactaagatatgttagagagggaaagggtcgttgttttagtaaatactattgctgttgacatgttaatactattgctgttgacatgtttactgatgggctgtgttccataattttgttttaggtcttttgtttgaaacagtttactgtttttatcagttttggtccctaatttttcctaacctacagtttttctctgagtacatatggtttcattgtttgatctactttctatctatctgaatatgaacttctaggatcatgtttattctagtagatgatgacttaaagcctgcagtataggagggacaacgtcaactactgcatgtgcaataacaagcttgaagggaagctaaatgtttgttacaaatttaagacagtattttaatgccgtttgcatttttctaagaattttctataaagctaattctgttattttttgtctctaaattaggggaactgtccaggtttattgctgccgggagactacactgcaaaatagataaagtgaatgaaatagtagaaaccaacagacctgatagcaagaactggcagtaccaagaaactatcaagaaaggagatctgctactaaacagagttcaaaaactttccagagtaattaatatgtaaagccatgtaactaacaaaggatttgctttagagataattatttggaatttttatagcttacttcacaatgtgcccaggtcagctgtataaaataaatactgcattgttg

SEQ ID NO: 330177 - DNA, 995 bp, Homo sapiens
gtcgtttccagttttgccctattataagcaaccctgttttgaacactccaacaatttatctttcccacttgttatttccttggggaaaaagtctaaaaaattgaactttccaaaggttaaatatattgtgtcttgaccactgttgccctccagagatatgtcagtttacatttacacaatttatacttctctcaatctatagcatttgagagaacctgtcccaccctctccatactctttgccagtctgagaggacagaaataattttattgatgttttatgcatttctcttattagtgagaatacgcaccatctcatggttagtggccattgatctccatgttgctaaatcatgtgttcccttgcttatctttatctgccttgatgttgaccatcctttgcttctcaccacagctttctcttggttctgcagtaacgtgctcttgttttctctggacctacctcctcatccactgttagacctctcagtgtctgactgccttagactgggttattgcccttgtttcttatcttcactttgtgccatcagatacatttggatggcagtgatggacaaattcatgtcgccagccccaaactggagcaccagactcatgcctcaatgcctccttagtgtcctcacttggctgtttaataggcatatccacttgaacactgccaaagtatgcttgaatcccaccctcacccccaacactaaaaacaaatattctccttctccagggatttccatcttgttgaaaccacaaacataagtatactctagagtctcttttcttgctcaccttctatataccaagaaactatcaagaaaggagatctgctactaaacagagttcaaaaactttccagagtaattaatatgtaaagccatgtaactaacaaaggatttgctttagagataattatttggaatttttatagcttacttcacaatgtgcccaggtcagctgtataaaataaatactgcattgttg

SEQ ID NO: 330178 - DNA, 336 bp, Homo sapiens
tatagggtcgcgccccaaggaggataagaaagaaaagttcaggaacacaccgggaactgtccaggtttattgctgccgggagactacactgcaaaatagataaagtgaatgaaatagtagaaaccaacagacctgatagcaagaactggcagtaccaagaaactatcaagaaaggagatctgctactaaacagagttcaaaaactttccagagtaattaatatgtaaagccatgtaactaacaaaggatttgctttagagataattatttggaatttttatagcttacttcacaatgtgcccaggtcagctgtataaaataaatactgcattgttg

SEQ ID NO: 330179 - DNA, 929 bp, Homo sapiens
ttttagatgaaatccccttttttaaaatgggcaaagcaataattctacatcatttctccccttcccttccacttgtttagactaagatatgttagagagggaaagggtcgttgttttagtaaatactattgctgttgacatgttaatactattgctgttgacatgtttactgatgggctgtgttccataattttgttttaggtcttttgtttgaaacagtttactgtttttatcagttttggtccctaatttttcctaacctacagtttttctctgagtacatatggtttcattgtttgatctactttctatctatctgaatatgaacttctaggatcatgtttattctagtagatgatgacttaaagcctgcagtataggagggacaacgtcaactactgcatgtgcaataacaagcttgaagggaagctaaatgtttgttacaaatttaagacagtattttaatgccgtttgcatttttctaagaattttctataaagctaattctgttattttttgtctctaaattaggggaactgtccaggtttattgctgccgggagactacactgcaaaatagataaagtgaatgaaatagtagaaaccaacaggtactctcatttctcagaataaggggcattcctaaattttaaaagtaggtcaactattgtcatggaataatgtgactggtaaataattcattttttcttgaatttatttatagacctgatagcaagaactggcagtaccaagaaactatcaagaaaggagatctgctactaaacagagttcaaaaactttccagagtaattaatatgtaaagccatgtaactaacaaaggatttgctttagagataattatttggaatttttatagcttacttcacaatgtgcccaggtcagctgtataaaataaatactgcattgttg

SEQ ID NO: 330180 - DNA, 1898 bp, Homo sapiens
accgcagaaagaatgtggattttagagttctagataggggttttcatttaggccttgcgacatggctgttacatgaccttggttggtctgtttccctaacctctttgtgcctcatttgtcttacctactaaataggctaatagtactacctcgcagcatgaagatgattttaataagatgaatgagagtaacgactcgacaaactatggtgattgtttttattaatgctgttattacattttcagttttcaaaaaattttaagctcccatcagttacaaacggaaagtaaaatagctaaaaagggagtgagaaagagattcaagaaattgggcttttgagttgggctgcacccactctgggactccgcagggggccttgagggtggaaaagcccccgtgaccacacaggggcgcaggcgcccaggccgggtgaggcgttcccggaggtgtccagcagaggacgctgccggcggagacgggaccggaagccgggccgcaggcggccgggcgtattcgccgactcctcccgcttccgctgccgcagccggtcgtaaccaagttgtgtcctgtcagccgctgtccccttcgccgcgatgccgctggagaacctggaggaggagggtctgcccaagaaccccgacttgcgtatcgcgcagctgcgcttcctgctcagcctgcccgagcaccgcggagacgctgccgtgcgcgacgagctgatggcggccgtccgcgataacaacatggctccttactatgaagccttgtgcaaatccctcgactggcagatagacgtggacctactcaataaaatgaagaaggcaaatgaagatgagttgaagcgtttggatgaggagctggaagatgcagagaagaatctaggagagagcgaaattcgcgatgcaatgatggcaaaggccgagtacctctgccggataggtgacaaagagggagctctgacagcctttcgcaagacatatgacaaaactgtggccctgggtcaccgattggatattgtattctatctccttaggattggcttattttatatggataatgatctcatcacacgaaacacagaaaaggccaaaagcttaatagaagaaggaggagactgggacaggagaaaccgcctaaaagtgtatcagggtctttattgtgtggctattcgtgatttcaaacaggcagctgaactcttccttgacactgtttcaacatttacatcctatgaactcatggattataaaacatttgtgacttatactgtctatgtcagtatgattgccttagaaagaccagatctcagggaaaaggtcattaaaggagcagagattcttgaagtgttgcacagtcttccagcagttcggcagtatctgttttcactctatgaatgccgttactctgttttcttccaatcattagcggttgtggaacaggaaatgaaaaaggactggctttttgcccctcattatcgatactatgtaagagaaatgagaattcatgcatacagtcagctgctggaatcatataggtcattaacccttggctatatggcagaagcgtttggtgttggtgtggaattcattgatcaggaactgtccaggtttattgctgccgggagactacactgcaaaatagataaagtgaatgaaatagtagaaaccaacagacctgatagcaagaactggcagtaccaagaaactatcaagaaaggagatctgctactaaacagagttcaaaaactttccagagtaattaatatgtaaagccatgtaactaacaaaggatttgctttagagataattatttggaatttttatagcttacttcacaatgtgcccaggtcagctgtataaaataaatactgcattgttgtttctttccaaaaatttttttcttaa

SEQ ID NO: 330181 - DNA, 1351 bp, Homo sapiens
  misc_feature (19)..(19): n is a, c, g, or t
taaggctaggtagcgaggnctgggtgtcgctgtccccttcgccgcgatgccgctggagaacctggaggaggagggtctgcccaagaaccccgacttgcgtatcgcgcagctgcgcttcctgctcagcctgcccgagcaccgcggagacgctgccgtgcgcgacgagctgatggcggccgtccgcgataacaacatggctccttactatgaagccttgtgcaaatccctcgactggcagatagacgtggacctactcaataaaatgaagaaggcaaatgaagatgagttgaagcgtttggatgaggagctggaagatgcagagaagaatctaggagagagcgaaattcgcgatgcaatgatggcaaaggccgagtacctctgccggataggtgacaaagagggagctctgacagcctttcgcaagacatatgacaaaactgtggccctgggtcaccgattggatattgtattctatctccttaggattggcttattttatatggataatgatctcatcacacgaaacacagaaaaggccaaaagcttaatagaagaaggaggagactgggacaggagaaaccgcctaaaagtgtatcagggtctttattgtgtggctattcgtgatttcaaacaggcagctgaactcttccttgacactgtttcaacatttacatcctatgaactcatggattataaaacatttgtgacttatactgtctatgtcagtatgattgccttagaaagaccagatctcagggaaaaggtcattaaaggagcagagattcttgaagtgttgcacagtcttccagcagttcggcagtatctgttttcactctatgaatgccgttactctgttttcttccaatcattagcggttgtggaacaggaaatgaaaaaggactggctttttgcccctcattatcgatactatgtaagagaaatgagaattcatgcatacagtcagctgctggaatcatataggtcattaacccttggctatatggcagaagcgtttggtgttggtgtggaattcattgatcaggaactgtccaggtttattgctgccgggagactacactgcaaaatagataaagtgaatgaaatagtagaaaccaacagacctgatagcaagaactggcagtaccaagaaactatcaagaaaggagatctgctactaaacagagttcaaaaactttccagagtaattaatatgtaaagccatgtaactaacaaaggatttgctttagagataattatttggaatttttatagcttacttcacaatgtgcccaggtcagctgtataaaataaatactgcattgttgtttctttccaaaaatttttttcttaa

SEQ ID NO: 330182 - DNA, 2276 bp, Homo sapiens
accgcagaaagaatgtggattttagagttctagataggggttttcatttaggccttgcgacatggctgttacatgaccttggttggtctgtttccctaacctctttgtgcctcatttgtcttacctactaaataggctaatagtactacctcgcagcatgaagatgattttaataagatgaatgagagtaacgactcgacaaactatggtgattgtttttattaatgctgttattacattttcagttttcaaaaaattttaagctcccatcagttacaaacggaaagtaaaatagctaaaaagggagtgagaaagagattcaagaaattgggcttttgagttgggctgcacccactctgggactccgcagggggccttgagggtggaaaagcccccgtgaccacacaggggcgcaggcgcccaggccgggtgaggcgttcccggaggtgtccagcagaggacgctgccggcggagacgggaccggaagccgggccgcaggcggccgggcgtattcgccgactcctcccgcttccgctgccgcagccggtcgtaaccaagttgtgtcctgtcagccgctgtccccttcgccgcgatgccgctggagaacctggaggaggagggtctgcccaagaaccccgacttgcgtatcgcgcagctgcgcttcctgctcagcctgcccgagcaccgcggagacgctgccgtgcgcgacgagctgatggcggccgtccgcgataacaacatggctccttactatgaagccttgtgcaaatccctcgactggcagatagacgtggacctactcaataaaatgaagaaggcaaatgaagatgagttgaagcgtttggatgaggagctggaagatgcagagaagaatctaggagagagcgaaattcgcgatgcaatgatggcaaaggccgagtacctctgccggataggtgacaaagagggagctctgacagcctttcgcaagacatatgacaaaactgtggccctgggtcaccgattggatattgtattctatctccttaggattggcttattttatatggataatgatctcatcacacgaaacacagaaaaggccaaaagcttaatagaagaaggaggagactgggacaggagaaaccgcctaaaagtgtatcagggtctttattgtgtggctattcgtgatttcaaacaggcagctgaactcttccttgacactgtttcaacatttacatcctatgaactcatggattataaaacatttgtgacttatactgtctatgtcagtatgattgccttagaaagaccagatctcagggaaaaggtcattaaaggagcagagattcttgaagtgttgcacagtcttccagcagttcggcagtatctgttttcactctatgaatgccgttactctgttttcttccaatcattagcggttgtggaacaggaaatgaaaaaggactggctttttgcccctcattatcgatactatgtaagagaaatgagaattcatgcatacagtcagctgctggaatcatataggtcattaacccttggctatatggcagaagcgtttggtgttggtgtggaattcattgatcagtaagtttgaataatgccatgttaattgaagttttaaagttgccttttaaaatatgtgaacttgtacaattttttacttgtttacattggttccctcaatcttaacggggaggggagaggtttttttcctcagtattatcaaaacattcgtatcctgttgcctctgccttcctcatgtcatgtctgccccttgcattaacagatgggaagatgagttgtagtgaggctaagtgatttgttaaaggtcattagaccagttgttatcaaaagttgtcttctgttacttctttgtagaccacactgcagctacggtaatgactcttagatctgatatttacagttggtcatattccctctgataattccttccagtttttaggttgctgctgcaattctggtcagattggttgttaaatgtgggacttttagtacttgcatcagtgattaaacaaataaatacttaatgagccattcattactatatgtttggtattgttttacagctcccttttcacactttcattgtagtagtagggaagagatggcaaggaagcaaataaatataaaacgtaatttcacatatagaaatgaacctatggagatgagaaaatgctatccttacgtacggcatgcttaaggaggtgaggtttgctctgagatttgaattgagaggagtcagccatatgga

SEQ ID NO: 330183 - DNA, 2057 bp, Homo sapiens
accgcagaaagaatgtggattttagagttctagataggggttttcatttaggccttgcgacatggctgttacatgaccttggttggtctgtttccctaacctctttgtgcctcatttgtcttacctactaaataggctaatagtactacctcgcagcatgaagatgattttaataagatgaatgagagtaacgactcgacaaactatggtgattgtttttattaatgctgttattacattttcagttttcaaaaaattttaagctcccatcagttacaaacggaaagtaaaatagctaaaaagggagtgagaaagagattcaagaaattgggcttttgagttgggctgcacccactctgggactccgcagggggccttgagggtggaaaagcccccgtgaccacacaggggcgcaggcgcccaggccgggtgaggcgttcccggaggtgtccagcagaggacgctgccggcggagacgggaccggaagccgggccgcaggcggccgggcgtattcgccgactcctcccgcttccgctgccgcagccggtcgtaaccaagttgtgtcctgtcagccgctgtccccttcgccgcgatgccgctggagaacctggaggaggagggtctgcccaagaaccccgacttgcgtatcgcgcagctgcgcttcctgctcagcctgcccgagcaccgcggagacgctgccgtgcgcgacgagctgatggcggccgtccgcgataacaacttttggaacagaatccggcaagagcaaaccgaggattgccctccctccagccctagtagaggttggcattgccaggattggccgtcacgcaaacctcccaccagcatacgtttatgttttgccaagccgattattaagcgccatcgcatgccttcctacatggctccttactatgaagccttgtgcaaatccctcgactggcagatagacgtggacctactcaataaaatgaagaaggcaaatgaagatgagttgaagcgtttggatgaggagctggaagatgcagagaagaatctaggagagagcgaaattcgcgatgcaatgatggcaaaggccgagtacctctgccggataggtgacaaagagggagctctgacagcctttcgcaagacatatgacaaaactgtggccctgggtcaccgattggatattgtattctatctccttaggattggcttattttatatggataatgatctcatcacacgaaacacagaaaaggccaaaagcttaatagaagaaggaggagactgggacaggagaaaccgcctaaaagtgtatcagggtctttattgtgtggctattcgtgatttcaaacaggcagctgaactcttccttgacactgtttcaacatttacatcctatgaactcatggattataaaacatttgtgacttatactgtctatgtcagtatgattgccttagaaagaccagatctcagggaaaaggtcattaaaggagcagagattcttgaagtgttgcacagtcttccagcagttcggcagtatctgttttcactctatgaatgccgttactctgttttcttccaatcattagcggttgtggaacaggaaatgaaaaaggactggctttttgcccctcattatcgatactatgtaagagaaatgagaattcatgcatacagtcagctgctggaatcatataggtcattaacccttggctatatggcagaagcgtttggtgttggtgtggaattcattgatcaggaactgtccaggtttattgctgccgggagactacactgcaaaatagataaagtgaatgaaatagtagaaaccaacagacctgatagcaagaactggcagtaccaagaaactatcaagaaaggagatctgctactaaacagagttcaaaaactttccagagtaattaatatgtaaagccatgtaactaacaaaggatttgctttagagataattatttggaatttttatagcttacttcacaatgtgcccaggtcagctgtataaaataaatactgcattgttgtttctttccaaaaatttttttcttaa

SEQ ID NO: 330184 - DNA, 2122 bp, Homo sapiens
accgcagaaagaatgtggattttagagttctagataggggttttcatttaggccttgcgacatggctgttacatgaccttggttggtctgtttccctaacctctttgtgcctcatttgtcttacctactaaataggctaatagtactacctcgcagcatgaagatgattttaataagatgaatgagagtaacgactcgacaaactatggtgattgtttttattaatgctgttattacattttcagttttcaaaaaattttaagctcccatcagttacaaacggaaagtaaaatagctaaaaagggagtgagaaagagattcaagaaattgggcttttgagttgggctgcacccactctgggactccgcagggggccttgagggtggaaaagcccccgtgaccacacaggggcgcaggcgcccaggccgggtgaggcgttcccggaggtgtccagcagaggacgctgccggcggagacgggaccggaagccgggccgcaggcggccgggcgtattcgccgactcctcccgcttccgctgccgcagccggtcgtaaccaagttgtgtcctgtcagccgctgtccccttcgccgcgatgccgctggagaacctggaggaggagggtctgcccaagaaccccgacttgcgtatcgcgcagctgcgcttcctgctcagcctgcccgagcaccgcggagacgctgccgtgcgcgacgagctgatggcggccgtccgcgataacagtgaggcccgcacgagcgccgagtcagcggcctaggcctgggccgtccccgcgttccggagcctgcggggactttttttgatggagctccagacccctctgacggggtctcagagaccaggcctggcttctccggcccttagggttttgctttggtttggggataccctgggggacctcgacttgcctcagcggggtctgcatctctctgtgccgccttcccctacatggctccttactatgaagccttgtgcaaatccctcgactggcagatagacgtggacctactcaataaaatgaagaaggcaaatgaagatgagttgaagcgtttggatgaggagctggaagatgcagagaagaatctaggagagagcgaaattcgcgatgcaatgatggcaaaggccgagtacctctgccggataggtgacaaagagggagctctgacagcctttcgcaagacatatgacaaaactgtggccctgggtcaccgattggatattgtattctatctccttaggattggcttattttatatggataatgatctcatcacacgaaacacagaaaaggccaaaagcttaatagaagaaggaggagactgggacaggagaaaccgcctaaaagtgtatcagggtctttattgtgtggctattcgtgatttcaaacaggcagctgaactcttccttgacactgtttcaacatttacatcctatgaactcatggattataaaacatttgtgacttatactgtctatgtcagtatgattgccttagaaagaccagatctcagggaaaaggtcattaaaggagcagagattcttgaagtgttgcacagtcttccagcagttcggcagtatctgttttcactctatgaatgccgttactctgttttcttccaatcattagcggttgtggaacaggaaatgaaaaaggactggctttttgcccctcattatcgatactatgtaagagaaatgagaattcatgcatacagtcagctgctggaatcatataggtcattaacccttggctatatggcagaagcgtttggtgttggtgtggaattcattgatcaggaactgtccaggtttattgctgccgggagactacactgcaaaatagataaagtgaatgaaatagtagaaaccaacagacctgatagcaagaactggcagtaccaagaaactatcaagaaaggagatctgctactaaacagagttcaaaaactttccagagtaattaatatgtaaagccatgtaactaacaaaggatttgctttagagataattatttggaatttttatagcttacttcacaatgtgcccaggtcagctgtataaaataaatactgcattgttgtttctttccaaaaatttttttcttaa

SEQ ID NO: 330185 - DNA, 1234 bp, Homo sapiens
  misc_feature (19)..(19): n is a, c, g, or t
taaggctaggtagcgaggnctgggtgtcgctgtccccttcgccgcgatgccgctggagaacctggaggaggaggacatggctccttactatgaagccttgtgcaaatccctcgactggcagatagacgtggacctactcaataaaatgaagaaggcaaatgaagatgagttgaagcgtttggatgaggagctggaagatgcagagaagaatctaggagagagcgaaattcgcgatgcaatgatggcaaaggccgagtacctctgccggataggtgacaaagagggagctctgacagcctttcgcaagacatatgacaaaactgtggccctgggtcaccgattggatattgtattctatctccttaggattggcttattttatatggataatgatctcatcacacgaaacacagaaaaggccaaaagcttaatagaagaaggaggagactgggacaggagaaaccgcctaaaagtgtatcagggtctttattgtgtggctattcgtgatttcaaacaggcagctgaactcttccttgacactgtttcaacatttacatcctatgaactcatggattataaaacatttgtgacttatactgtctatgtcagtatgattgccttagaaagaccagatctcagggaaaaggtcattaaaggagcagagattcttgaagtgttgcacagtcttccagcagttcggcagtatctgttttcactctatgaatgccgttactctgttttcttccaatcattagcggttgtggaacaggaaatgaaaaaggactggctttttgcccctcattatcgatactatgtaagagaaatgagaattcatgcatacagtcagctgctggaatcatataggtcattaacccttggctatatggcagaagcgtttggtgttggtgtggaattcattgatcaggaactgtccaggtttattgctgccgggagactacactgcaaaatagataaagtgaatgaaatagtagaaaccaacagacctgatagcaagaactggcagtaccaagaaactatcaagaaaggagatctgctactaaacagagttcaaaaactttccagagtaattaatatgtaaagccatgtaactaacaaaggatttgctttagagataattatttggaatttttatagcttacttcacaatgtgcccaggtcagctgtataaaataaatactgcattgttgtttctttccaaaaatttttttcttaa

SEQ ID NO: 330186 - DNA, 1703 bp, Homo sapiens
accgcagaaagaatgtggattttagagttctagataggggttttcatttaggccttgcgacatggctgttacatgaccttggttggtctgtttccctaacctctttgtgcctcatttgtcttacctactaaataggctaatagtactacctcgcagcatgaagatgattttaataagatgaatgagagtaacgactcgacaaactatggtgattgtttttattaatgctgttattacattttcagttttcaaaaaattttaagctcccatcagttacaaacggaaagtaaaatagctaaaaagggagtgagaaagagattcaagaaattgggcttttgagttgggctgcacccactctgggactccgcagggggccttgagggtggaaaagcccccgtgaccacacaggggcgcaggcgcccaggccgggtgaggcgttcccggaggtgtccagcagaggacgctgccggcggagacgggaccggaagccgggccgcaggcggccgggcgtattcgccgactcctcccgcttccgctgccgcagccggtcgtaaccaagttgtgtcctgtcagccgctgtccccttcgccgcgatgccgctggagaacctggaggaggagggtctgcccaagaaccccgacttgcgtatcgcgcagctgcgcttcctgctcagcctgcccgagcaccgcggagacgctgccgtgcgcgacgagctgatggcggccgtccgcgataacaacatggctccttactatgaagccttgtgcaaatccctcgactggcagatagacgtggacctactcaataaaatgaagaaggcaaatgaagatgagttgaagcgtttggatgaggagctggaagatgcagagaagaatctaggagagagcgaaattcgcgatgcaatgatggcaaaggccgagtacctctgccggataggtgacaaagagggagctctgacagcctttcgcaagacatatgacaaaactgtggccctgggtcaccgattggatattgtattctatctccttaggattggcttattttatatggataatgatctcatcacacgaaacacagaaaaggccaaaagcttaatagaagaaggaggagactgggacaggagaaaccgcctaaaagtgtatcagggtctttattgtgtggctattcgtgatttcaaacaggcagctgaactcttccttgacactgtttcaacatttacatcctatgaactcatggattataaaacatttgtgacttatactgtctatgtcagtatgattgccttagaaagaccagatctcagggaaaaggtcattaaaggagcagagattcttgaagtgttgcacagtcttccagcagttcggcagtatctgttttcactctatgaatgccgttactctgttttcttccaatcattagggaactgtccaggtttattgctgccgggagactacactgcaaaatagataaagtgaatgaaatagtagaaaccaacagacctgatagcaagaactggcagtaccaagaaactatcaagaaaggagatctgctactaaacagagttcaaaaactttccagagtaattaatatgtaaagccatgtaactaacaaaggatttgctttagagataattatttggaatttttatagcttacttcacaatgtgcccaggtcagctgtataaaataaatactgcattgttg

SEQ ID NO: 330187 - DNA, 1199 bp, Homo sapiens
gtcttgtcttctggttcactgccatataactatctagagtagtgatatacaggagttattcagtaaaataatttatatttgtgtggattgctcattaatactctacgtacattttactgtcttctaaggatctcttctggattaaggccattaactcatcgttataaattttctagtttatcatttgtcttcaaaccttgttcatagtgttttcttacgtagactatttacgtgaacaaataaacaggcaataggagtcatcagtctttgctttcttctgagttttgttgcattttgaaaatgtctgatttataccttttttctggtctgtataaatcgtttttcactgtacctgctgtttctctgttagaattgtttaaaaaatgatttttactttattttacttaaggcataagaagttctccgtggttaaaatattagtacgtgaactttgtcatctatgaacaagttcctttagaagctgagctctgatagtgatgtcaaatagccacctgttacttgaagacgatgtttgcatacctggcccctcctttatcactgctgttgctgccattgttgatgacatgatgtggaagggcagtgagaaatttgatacttgttcatctatctgttggactcaactagtagtgttgctttagtttttaatctttttatctgaaacggagagtctattataatttgtcattttattcattgcagcggttgtggaacaggaaatgaaaaaggactggctttttgcccctcattatcgatactatgtaagagaaatgagaattcatgcatacagtcagctgctggaatcatataggtcattaacccttggctatatggcagaagcgtttggtgttggtgtggaattcattgatcaggaactgtccaggtttattgctgccgggagactacactgcaaaatagataaagtgaatgaaatagtagaaaccaacagacctgatagcaagaactggcagtaccaagaaactatcaagaaaggagatctgctactaaacagagttcaaaaactttccagagtaattaatatgtaaagccatgtaactaacaaaggatttgctttagagataattatttggaatttttatagcttacttcacaatgtgcccaggtcagctgtataaaataaatactgcattgttgtttctttccaaaaatttttttcttaa

SEQ ID NO: 330188 - DNA, 715 bp, Homo sapiens
gcttccgctgccgcagccggtcgtaaccaagttgtgtcctgtcagccgctgtccccttcgccgcgatgccgctggagaacctggaggaggagggtctgcccaagaaccccgacttgcgtatcgcgcagctgcgcttcctgctcagcctgcccgagcaccgcggagacgctgccgtgcgcgacgagctgatggcggccgtccgcgataacagtgaggcccgcacgagcgccgagtcagcggcctaggcctgggccgtccccgcgttccggagcctgcggggactttttttgatggagctccagacccctctgacggggtctcagagaccaggcctggcttctccggcccttagggttttgctttggtttggggataccctgggggacctcgacttgcctcagcggggtctgcatctctctgtgccgccttcccctgtaagggcagcttgggggagaatcgtgaggcattaatatttacccctgtgctaggcacagagtaaaggccccgtgactttctgtcagtggggactgctcccgggcgcggggtattcctgtgggagagttcagcttgcctgtggaagggaaatttgggttcggttctttctggcccttctgtagtgaatgtgtatgtttgaacatatgtatgtgagtatgtgtgtataaaaagtctttccctgtttgaagacttttggaacagaatccggcaagagcaaacc

SEQ ID NO: 330189 - DNA, 1872 bp, Homo sapiens
accgcagaaagaatgtggattttagagttctagataggggttttcatttaggccttgcgacatggctgttacatgaccttggttggtctgtttccctaacctctttgtgcctcatttgtcttacctactaaataggctaatagtactacctcgcagcatgaagatgattttaataagatgaatgagagtaacgactcgacaaactatggtgattgtttttattaatgctgttattacattttcagttttcaaaaaattttaagctcccatcagttacaaacggaaagtaaaatagctaaaaagggagtgagaaagagattcaagaaattgggcttttgagttgggctgcacccactctgggactccgcagggggccttgagggtggaaaagcccccgtgaccacacaggggcgcaggcgcccaggccgggtgaggcgttcccggaggtgtccagcagaggacgctgccggcggagacgggaccggaagccgggccgcaggcggccgggcgtattcgccgactcctcccgcttccgctgccgcagccggtcgtaaccaagttgtgtcctgtcagccgctgtccccttcgccgcgatgccgctggagaacctggaggaggagggtctgcccaagaaccccgacttgcgtatcgcgcagctgcgcttcctgctcagcctgcccgagcaccgcggagacgctgccgtgcgcgacgagctgatggcggccgtccgcgataacaacatggctccttactatgaagccttgtgcaaatccctcgactggcagatagacgtggacctactcaataaaatgaagaaggcaaatgaagatgagttgaagcgtttggatgaggagctggaagatgcagagaagaatctaggagagagcgaaattcgcgatgcaatgatggcaaaggccgagtacctctgccggataggtgacaaagagggagctctgacagcctttcgcaagacatatgacaaaactgtggccctgggtcaccgattggatattgtattctatctccttaggattggcttattttatatggataatgatctcatcacacgaaacacagaaaaggccaaaagcttaatagaagaaggaggagactgggacaggagaaaccgcctaaaagtgtatcagggtctttattgtgtggctattcgtgatttcaaacaggcagctgaactcttccttgacactgtttcaacatttacatcctatgaactcatggattataaaacatttgtgacttatactgtctatgtcagtatgattgccttagaaagaccagatctcagggaaaaggtcattaaaggagcagagattcttgaagtgttgcacagtcttccagcagttcggcagtatctgttttcactctatgaatgccgttactctgttttcttccaatcattagcggttgtggaacaggaaatgaaaaaggactggctttttgcccctcattatcgatactatgtaagagaaatgagaattcatgcatacagtcagctgctggaatcatataggtcattaacccttggctatatggcagaagcgtttggtgttggtgtggaattcattgatcaggaactgtccaggtttattgctgccgggagactacactgcaaaatagataaagtgaatgaaatagtagaaaccaacagacctgatagcaagaactggcagtaccaagaaactatcaagaaaggagatctgctactaaacagagttcaaaaactttccagagtaattaatatgtaaagccatgtaactaacaaaggatttgctttagagataattatttggaatttttatagcttacttcacaatgtgcccaggtcagctgtataaaataaatactgcattgttg

SEQ ID NO: 330190 - DNA, 1905 bp, Homo sapiens
accgcagaaagaatgtggattttagagttctagataggggttttcatttaggccttgcgacatggctgttacatgaccttggttggtctgtttccctaacctctttgtgcctcatttgtcttacctactaaataggctaatagtactacctcgcagcatgaagatgattttaataagatgaatgagagtaacgactcgacaaactatggtgattgtttttattaatgctgttattacattttcagttttcaaaaaattttaagctcccatcagttacaaacggaaagtaaaatagctaaaaagggagtgagaaagagattcaagaaattgggcttttgagttgggctgcacccactctgggactccgcagggggccttgagggtggaaaagcccccgtgaccacacaggggcgcaggcgcccaggccgggtgaggcgttcccggaggtgtccagcagaggacgctgccggcggagacgggaccggaagccgggccgcaggcggccgggcgtattcgccgactcctcccgcttccgctgccgcagccggtcgtaaccaagttgtgtcctgtcagccgctgtccccttcgccgcgatgccgctggagaacctggaggaggagggtctgcccaagaaccccgacttgcgtatcgcgcagctgcgcttcctgctcagcctgcccgagcaccgcggagacgctgccgtgcgcgacgagctgatggcggccgtccgcgataacaacatggctccttactatgaagccttgtgcaaatccctcgactggcagatagacgtggacctactcaataaaatgaagaaggcaaatgaagatgagttgaagcgtttggatgaggagctggaagatgcagagaagaatctaggagagagcgaaattcgcgatgcaatgatggcaaaggccgagtacctctgccggataggtgacaaagagggagctctgacagcctttcgcaagacatatgacaaaactgtggccctgggtcaccgattggatattgtattctatctccttaggattggcttattttatatggataatgatctcatcacacgaaacacagaaaaggccaaaagcttaatagaagaaggaggagactgggacaggagaaaccgcctaaaagtgtatcagggtctttattgtgtggctattcgtgatttcaaacaggcagctgaactcttccttgacactgtttcaacatttacatcctatgaactcatggattataaaacatttgtgacttatactgtctatgtcagtatgattgccttagaaagaccagatctcagggaaaaggtcattaaaggagcagagattcttgaagtgttgcacagtcttccagcagttcggcagtatctgttttcactctatgaatgccgttactctgttttcttccaatcattagcggttgtggaacaggaaatgaaaaaggactggctttttgcccctcattatcgatactatgtaagagaaatgagaattcatgcatacagtcagctgctggaatcatataggtcattaacccttggctatatggcagaagcgtttggtgttggtgtggaattcattgatcaggaactgtccaggtttattgctgccgggagactacactgcaaaatagataaagtgaatgaaatagtagaaaccaacagacctgatagcaagaactggcagtaccaagaaactatcaagaaaggagatctgctactaaacagagttcaaaaactttccagagtaattaatatgtaaagccatgtaactaacaaaggatttgctttagagataattatttggaatttttatagcttacttcacaatgtgcccaggtcagctgtataaaataaatactgcattgttgaaaaaaaaaaaatttttggcctcgttggcctca

SEQ ID NO: 330191 - DNA, 1593 bp, Homo sapiens
accgcagaaagaatgtggattttagagttctagataggggttttcatttaggccttgcgacatggctgttacatgaccttggttggtctgtttccctaacctctttgtgcctcatttgtcttacctactaaataggctaatagtactacctcgcagcatgaagatgattttaataagatgaatgagagtaacgactcgacaaactatggtgattgtttttattaatgctgttattacattttcagttttcaaaaaattttaagctcccatcagttacaaacggaaagtaaaatagctaaaaagggagtgagaaagagattcaagaaattgggcttttgagttgggctgcacccactctgggactccgcagggggccttgagggtggaaaagcccccgtgaccacacaggggcgcaggcgcccaggccgggtgaggcgttcccggaggtgtccagcagaggacgctgccggcggagacgggaccggaagccgggccgcaggcggccgggcgtattcgccgactcctcccgcttccgctgccgcagccggtcgtaaccaagttgtgtcctgtcagccgctgtccccttcgccgcgatgccgctggagaacctggaggaggagggtctgcccaagaaccccgacttgcgtatcgcgcagctgcgcttcctgctcagcctgcccgagcaccgcggagacgctgccgtgcgcgacgagctgatggcggccgtccgcgataacaacatggctccttactatgaagccttgtgcaaatccctcgactggcagatagacgtggacctactcaataaaatgaagaaggcaaatgaagatgagttgaagcgtttggatgaggagctggaagatgcagagaagaatctaggagagagcgaaattcgcgatgcaatgatggcaaaggccgagtacctctgccggataggtgacaaagagggagctctgacagcctttcgcaagacatatgacaaaactgtggccctgggtcaccgattggatattgtattctatctccttaggattggcttattttatatggataatgatctcatcacacgaaacacagaaaaggccaaaagcttaatagaagaaggaggagactgggacaggagaaaccgcctaaaagtgtatcagggtctttattgtgtggctattcgtgatttcaaacaggcagctgaactcttccttgacactgtttcaacatttacatcctatgaactcatggattataaaacatttgtgacttatactgtctatgtcagtatgattgccttagaaagaccagatctcagggaaaaggtcattaaaggagcagagattcttgaagtgttgcacagtcttccagcagttcggcagtatctgttttcactctatgaatgccgttactctgttttcttccaatcattagcggttgtggaacaggaaatgaaaaaggactggctttttgcccctcattatcgatactatgtaagagaaatgagaattcatgcatacagtcagctgctggaatcatataggtcattaacccttggctatatggcagaagcgtttggtgtttactagcgagggacgggatcctcta

SEQ ID NO: 330192 - DNA, 1368 bp, Homo sapiens
accgcagaaagaatgtggattttagagttctagataggggttttcatttaggccttgcgacatggctgttacatgaccttggttggtctgtttccctaacctctttgtgcctcatttgtcttacctactaaataggctaatagtactacctcgcagcatgaagatgattttaataagatgaatgagagtaacgactcgacaaactatgacatggctccttactatgaagccttgtgcaaatccctcgactggcagatagacgtggacctactcaataaaatgaagaaggcaaatgaagatgagttgaagcgtttggatgaggagctggaagatgcagagaagaatctaggagagagcgaaattcgcgatgcaatgatggcaaaggccgagtacctctgccggataggtgacaaagagggagctctgacagcctttcgcaagacatatgacaaaactgtggccctgggtcaccgattggatattgtattctatctccttaggattggcttattttatatggataatgatctcatcacacgaaacacagaaaaggccaaaagcttaatagaagaaggaggagactgggacaggagaaaccgcctaaaagtgtatcagggtctttattgtgtggctattcgtgatttcaaacaggcagctgaactcttccttgacactgtttcaacatttacatcctatgaactcatggattataaaacatttgtgacttatactgtctatgtcagtatgattgccttagaaagaccagatctcagggaaaaggtcattaaaggagcagagattcttgaagtgttgcacagtcttccagcagttcggcagtatctgttttcactctatgaatgccgttactctgttttcttccaatcattagcggttgtggaacaggaaatgaaaaaggactggctttttgcccctcattatcgatactatgtaagagaaatgagaattcatgcatacagtcagctgctggaatcatataggtcattaacccttggctatatggcagaagcgtttggtgttggtgtggaattcattgatcaggaactgtccaggtttattgctgccgggagactacactgcaaaatagataaagtgaatgaaatagtagaaaccaacagacctgatagcaagaactggcagtaccaagaaactatcaagaaaggagatctgctactaaacagagttcaaaaactttccagagtaattaatatgtaaagccatgtaactaacaaaggatttgctttagagataattatttggaatttttatagcttacttcacaatgtgcccaggtcagctgtataaaataaatactgcattgttgtttctttccaaaaatttttttcttaa

SEQ ID NO: 330193 - DNA, 1940 bp, Homo sapiens
accgcagaaagaatgtggattttagagttctagataggggttttcatttaggccttgcgacatggctgttacatgaccttggttggtctgtttccctaacctctttgtgcctcatttgtcttacctactaaataggctaatagtactacctcgcagcatgaagatgattttaataagatgaatgagagtaacgactcgacaaactatggtgattgtttttattaatgctgttattacattttcagttttcaaaaaattttaagctcccatcagttacaaacggaaagtaaaatagctaaaaagggagtgagaaagagattcaagaaattgggcttttgagttgggctgcacccactctgggactccgcagggggccttgagggtggaaaagcccccgtgaccacacaggggcgcaggcgcccaggccgggtgaggcgttcccggaggtgtccagcagaggacgctgccggcggagacgggaccggaagccgggccgcaggcggccgggcgtattcgccgactcctcccgcttccgctgccgcagccggtcgtaaccaagttgtgtcctgtcagccgctgtccccttcgccgcgatgccgctggagaacctggaggaggaggacttttggaacagaatccggcaagagcaaaccgaggattgccctccctccagccctagtagaggttggcattgccaggattggccgtcacgcaaacctcccaccagcatacgtttatgttttgccaagccgattattaagcgccatcgcatgccttcctacatggctccttactatgaagccttgtgcaaatccctcgactggcagatagacgtggacctactcaataaaatgaagaaggcaaatgaagatgagttgaagcgtttggatgaggagctggaagatgcagagaagaatctaggagagagcgaaattcgcgatgcaatgatggcaaaggccgagtacctctgccggataggtgacaaagagggagctctgacagcctttcgcaagacatatgacaaaactgtggccctgggtcaccgattggatattgtattctatctccttaggattggcttattttatatggataatgatctcatcacacgaaacacagaaaaggccaaaagcttaatagaagaaggaggagactgggacaggagaaaccgcctaaaagtgtatcagggtctttattgtgtggctattcgtgatttcaaacaggcagctgaactcttccttgacactgtttcaacatttacatcctatgaactcatggattataaaacatttgtgacttatactgtctatgtcagtatgattgccttagaaagaccagatctcagggaaaaggtcattaaaggagcagagattcttgaagtgttgcacagtcttccagcagttcggcagtatctgttttcactctatgaatgccgttactctgttttcttccaatcattagcggttgtggaacaggaaatgaaaaaggactggctttttgcccctcattatcgatactatgtaagagaaatgagaattcatgcatacagtcagctgctggaatcatataggtcattaacccttggctatatggcagaagcgtttggtgttggtgtggaattcattgatcaggaactgtccaggtttattgctgccgggagactacactgcaaaatagataaagtgaatgaaatagtagaaaccaacagacctgatagcaagaactggcagtaccaagaaactatcaagaaaggagatctgctactaaacagagttcaaaaactttccagagtaattaatatgtaaagccatgtaactaacaaaggatttgctttagagataattatttggaatttttatagcttacttcacaatgtgcccaggtcagctgtataaaataaatactgcattgttgtttctttccaaaaatttttttcttaa

SEQ ID NO: 330194 - DNA, 2156 bp, Homo sapiens
accgcagaaagaatgtggattttagagttctagataggggttttcatttaggccttgcgacatggctgttacatgaccttggttggtctgtttccctaacctctttgtgcctcatttgtcttacctactaaataggctaatagtactacctcgcagcatgaagatgattttaataagatgaatgagagtaacgactcgacaaactatggtgattgtttttattaatgctgttattacattttcagttttcaaaaaattttaagctcccatcagttacaaacggaaagtaaaatagctaaaaagggagtgagaaagagattcaagaaattgggcttttgagttgggctgcacccactctgggactccgcagggggccttgagggtggaaaagcccccgtgaccacacaggggcgcaggcgcccaggccgggtgaggcgttcccggaggtgtccagcagaggacgctgccggcggagacgggaccggaagccgggccgcaggcggccgggcgtattcgccgactcctcccgcttccgctgccgcagccggtcgtaaccaagttgtgtcctgtcagccgctgtccccttcgccgcgatgccgctggagaacctggaggaggagggtctgcccaagaaccccgacttgcgtatcgcgcagctgcgcttcctgctcagcctgcccgagcaccgcggagacgctgccgtgcgcgacgagctgatggcggccgtccgcgataacaacatggctccttactatgaagccttgtgcaaatccctcgactggcagatagacgtggacctactcaataaaatgaagaaggcaaatgaagatgagttgaagcgtttggatgaggagctggaagatgcagagaagaatctaggagagagcgaaattcgcgatgcaatgatggcaaaggccgagtacctctgccggataggtgacaaagagggagctctgacagcctttcgcaagacatatgacaaaactgtggccctgggtcaccgattggatattgtattctatctccttaggattggcttattttatatggataatgatctcatcacacgaaacacagaaaaggccaaaaggtactttctaagggtgggattatattttctctaaattatgatgctacaaatgagaagctgatataagaaactgcctgttttgtttacagctagtaagtttggtcaaataattgatgtacttatttagtaaaataatttaaatatctcctttcggttcaagttgttaaaagttgttttctcatttcaaataacagacaagtttttaaaacgtggccttgtctgtttccagactatgatcttactgtttttatttcatagcttaatagaagaaggaggagactgggacaggagaaaccgcctaaaagtgtatcagggtctttattgtgtggctattcgtgatttcaaacaggcagctgaactcttccttgacactgtttcaacatttacatcctatgaactcatggattataaaacatttgtgacttatactgtctatgtcagtatgattgccttagaaagaccagatctcagggaaaaggtcattaaaggagcagagattcttgaagtgttgcacagtcttccagcagttcggcagtatctgttttcactctatgaatgccgttactctgttttcttccaatcattagcggttgtggaacaggaaatgaaaaaggactggctttttgcccctcattatcgatactatgtaagagaaatgagaattcatgcatacagtcagctgctggaatcatataggtcattaacccttggctatatggcagaagcgtttggtgttggtgtggaattcattgatcaggaactgtccaggtttattgctgccgggagactacactgcaaaatagataaagtgaatgaaatagtagaaaccaacagacctgatagcaagaactggcagtaccaagaaactatcaagaaaggagatctgctactaaacagagttcaaaaactttccagagtaattaatatgtaaagccatgtaactaacaaaggatttgctttagagataattatttggaatttttatagcttacttcacaatgtgcccaggtcagctgtataaaataaatactgcattgttgtttctttccaaaaatttttttcttaa

SEQ ID NO: 330195 - DNA, 1157 bp, Homo sapiens
tttttttacttataagtatttgacatttggctatatttttcttcttgttaggctgagggtgtattttgtatagatttatttattcttcttgttctgtatcgtttatgacggacatatgtagctgccattttattttattaccgcgaagtcctcacctattcactcttaaatctacctcattgaagccttcaataactatttgttgttggaagccataatgaaactgttgatcaaattacccaatccaaatcaaattaaccaaaaagactttcttcagtcttcatattaattaccttccctgcagaacagaacatggttgcccattatgtgaaattccttttacttctttggtggtcctgtctgttttcttatgcctaattgttgcttacggtatacttgctgtttgtttgtttgtttgtttgtttcttttatacactcattaagtgagttctccatctaaatatcccataaggcacttcagaatcaacatatccaaaaggaaacatattttactcatctccaaatcttttgtttctccagcaattcaagttttggtgaatgaagctatgaacaatccagtaatccaaaccagaaacttgagagtcatcttttttacacctcccactttgcatctctcacattgaataagcaatcatgccctgagccatatactttcttagcatctctgccatcctccctatcctctttggtatggcctctcttcagactgcctccttagctctcttctggatcactataacagcctaacaattgtatcaccttcacttttgctctttcttccatatgactatcagaattatttctctggaagatcatgtcaatcactccttctcagtggttcttcattgcctataggaagaaatccaaactccgtagcatgagagaaatgtttttcataacgactttatcctgcctttctattgtttctttcatatcatgcccagctcagccccccattcaatgaaaatcatactaaactactttaattccactaacatgttgtgctagttaagcctctttacctttgttcatgctgtttttactcagaccactccattccacaacatacacttgggggatacctactaattttgaagacccccttcagccctgatgttaaccttctttgtggaatc

SEQ ID NO: 330196 - DNA, 547 bp, Homo sapiens
tctgagaatgactggaggaaatggtcatgattaccccgcggtcccctccactcaccttggacatgactatcatctggctctgggctctgtctggccctgctgggactccccgagctcagttgccaccagcctgctgggacagttcgagctcttccattttcctaccctgaagcaagcctcagtcacagggtcgtgaaacatgaaccaaccagggcgacaaacagatgtcaacaagtcatcattcccctttccaatgggcagacctgcccctgtaacctgccagctgagaccccactgcacttcccccactgcagacaagaggcagagtgccactcctgcgtcgcctacaaggtgcccaactgtgtccctggccctgaggtccagcctgatgggatcaccttcgagacagcacaggcctaggcagggccttcccaccaggcctccctgaagggaaggttcaagaaaggggtcctgtgagccacagctcaggcctgggatttggagtagcaggggtctctagtggaaagcccaccaggagctcaccagg

SEQ ID NO: 330197 - DNA, 579 bp, Homo sapiens
catgtatcatatgattttttaaaacagggattttttaatttttaaaactttctgagcatgaaacatccttcccatacacacatttattttttgtacattcaactttaagaatgtatttggtacaaaagtagcagagtgcctatatatacatccctgaaaaattggcttaacatgaattggacatgtgaaactatttctctggggatggcagttaacaaaaagaaagggaacacatcgtgaaaaagtaagaggaaacagaattggaagacataaagaaggcaacaaatagtgtatcaccactgggacagcaactttccccacctatgtgaccaaccaataaaccaaatttcatgacagggcaattccaaattagctaattaaagtaataaaaactctgggattcgtttcaaaatatttaaggggttgaagggggagtgacagaagcacagatgaaagaagactggccatgaatggatcgttgttgaagctgaataagaagaacacccatctctctactttgatatatatttgaaattttccataacacaacatttaaataataacaatgataacaagttt

SEQ ID NO: 330198 - DNA, 449 bp, Homo sapiens
gataagtggcacacccaccataacagagtagacttcaaaacatacttaagaaaaaagaaatgtggtgtttactgagcaccttctctgtataaaggacagtgccaaatgtggcacaggagataaacaacgaatccacagtctgatcacagggataagcacctcaaatgcaaggcagggccaagtccagtcagtgacataaaagacgtactactgagttgggcacagtggctcacgcttgtgatcctaacactttgggaggccgaggcgggtggatcacgaggtcaggagatggagaccattctggctaacacagtgaaacccatctctactaaaaatacaaaaaattagccaggcgctttggcacatgcctatagtcccagctactcgggaggctgaggcaggagaatcgcttgaacccaggaggcggaagttgcagtgagccgggattg

SEQ ID NO: 330199 - DNA, 214 bp, Homo sapiens
ggaaatgggagctgagtgaacttgggagccaatgttggagttgggaaagcagtaggaatgcatggccagagcccagggatcgccagggagacagtgaatccaagaggatgtcaagtgtagaggtggaggaaggcacatgggtagaggaaaatgcataaatgagatgatacacagttaaaaattgacagggaggccaggtgcggtggctcacgcc

SEQ ID NO: 330200 - DNA, 3492 bp, Homo sapiens
aggagggagccagcgcgcccagcccagccaggctcggacagagggggcggggagagggtggagcgcggggagccaggcgaggggccgcgacgacgggactccattagccgctccggccacaggcagcgcttcgccagccgaggaaccggacgcggacaccgccgccccgcgagcctccagcccctcgcctgttgccgcgcgagtcccgggcccggagcgctaggagcgcgcggtgagggagcgggaccccgccgggacccgagggggcgcggcggggaggggaacggggagtcagcccgcgctgtgtctcggggccggccggcaggaaggagccatggctctggacgggataaggatgccagatggctgctacgcggacgggacgtgggaactgagtgtccatgtgacggacctgaaccgcgatgtcaccctgagagtgaccggcgaggtgcacattggaggcgtgatgcttaagctggtggagaaactcgatgtaaaaaaagattggtctgaccatgctctctggtgggaaaagaagagaacttggcttctgaagacacattggaccttagataagtatggtattcaggcagatgctaagcttcagttcacccctcagcacaaactgctccgcctgcagcttcccaacatgaagtatgtgaaggtgaaagtgaatttctctgatagagtcttcaaagctgtttctgacatctgtaagacttttaatatcagacaccccgaagaactttctctcttaaagaaacccagagatccaacaaagaaaaaaaagaagaagctagatgaccagtctgaagatgaggcacttgaattagaggggcctcttatcactcctggatcaggaagtatatattcaagcccaggactgtatagtaaaacaatgacccccacttatgatgctcatgatggaagccccttgtcaccaacttctgcttggtttggtgacagtgctttgtcagaaggcaatcctggtatacttgctgtcagtcaaccaatcacgtcaccagaaatcttggcaaaaatgttcaagcctcaagctcttcttgataaagcaaaaatcaaccaaggatggcttgattcctcaagatctctcatggaacaagatgtgaaggaaaatgaggccttgctgctccgattcaagtattacagcttttttgatttgaatccaaagtatgatgcaatcagaatcaatcagctttacgagcaggccaaatgggccattctcctggaagagattgaatgcacagaagaagaaatgatgatgtttgcagccctgcagtatcatatcaataagctgtcaatcatgacatcagagaatcatttgaacaacagtgacaaagaagttgatgaagttgatgctgccctttcagacctggagattactctggaagggggtaaaacgtcaacaattttgggtgacattacttccattcctgaacttgctgactacattaaagttttcaagccaaaaaagctgactctgaaaggttacaaacaatattggtgcaccttcaaagacacatccatttcttgttataagagcaaagaagaatccagtggcacaccagctcatcagatgaacctcaggggatgtgaagttaccccagatgtaaacatttcaggccaaaaatttaacattaaactcctgattccagttgcagaaggcatgaatgaaatctggcttcgttgtgacaatgaaaaacagtatgcacactggatggcagcctgcagattagcctccaaaggcaagaccatggcggacagttcttacaacttagaagttcagaatattctttcctttctgaagatgcagcatttaaacccagatcctcagttaataccagagcagatcacgactgatataactcctgaatgtttggtgtctccccgctatctaaaaaagtataagaacaagcagataacagcgagaatcttggaggcccatcagaatgtagctcagatgagtctaattgaagccaagatgagatttattcaagcttggcagtcactacctgaatttggcatcactcacttcattgcaaggttccaagggggcaaaaaagaagaacttattggaattgcatacaacagactgattcggatggatgccagcactggagatgcaattaaaacatggcgtttcagcaacatgaaacagtggaatgtcaactgggaaatcaaaatggtcaccgtagagtttgcagatgaagtacgattgtccttcatttgtactgaagtagattgcaaagtggttcatgaattcattggtggctacatatttctctcaacacgtgcaaaagaccaaaacgagagtttagatgaagagatgttctacaaacttaccagtggttgggtgtgaatagaaatactgtttaatgaaactccacggccataacaatatttaactttaaaagctgtttgttatatgctgcttaataaagtaagcttgaaatttatcattttatcatgaaaacttctttgccttaccagaccagttaatatgtgcactaaacaagcacgactattaatctatcatgttatgatataataaacttgaatttggcacacattccttagggccatgaattgaaaactgaaatagtgggcaaatcaggaacaaaccatcactgatttactgatttaagctagccaaactgtaagaaacaagccatctattttaaagctatccagggcttaacctatatgaactctatttatcatgtctaatgcatgtgatttaatgtatgtttaatttgatatcatgttttaaaatatcctacttctggtagccatttaattcctccccctacccccaaataaatcaggcatgcaggaggcctgatatttagtaatgtcattgtgtttgaccttgaaggaaaatgctattagtccgtcgtgcttgatttgtttttgtccttgaataagcatgttatgtatattgtctcgtgtttttatttttacaccatattgtattacacttttagtattcaccagcataatcactgtctgcctaaaatatgcaactctttgcattacaatatgaagtaaagttctatgaagtatgcattttgtgtaactaatgtaaaaacacaaattttataaaattgtacagttttttaaaaactactcacaactagcagatggcttaaatgtagcaatctctgcgttaattaaatgcctttaagagatataattaacgtgcagttttaatatctactaaattaagaatgacttcattatgatcatgatttgccacaatgtccttaactctaatgcctggactggccatgttctagtctgttgcgctgttacaatctgtattggtgctagtcagaaaattcctagctcacatagcccaaaagggtgcgagggagaggtggattaccagtattgttcaataatccatggttcaaagactgtataaatgcattttattttaaataaaagcaaaacttttatttaataaatattttt

SEQ ID NO: 330201 - DNA, 669 bp, Homo sapiens
ttgcaggtgaccgcaactttttctttgcttcgttgccattttttctgattgcctttttttttctttctgcttcctttttctttcctcgcattgccatctacagccaggctatataagagatttggtaagttctccatatttaccacaaaagaaaaagaataaataaaaattcatagccacaaccttccctcatggaatttaccccagtagtgaaatttaaatttaaaatagaaatgattatggtgatttcaagtaccttaaagctgctaacaaatattcctgctagaaacatgtattccaggtattcattctgattatagacatagtgctaaatttaattaaaactcgtgtatatgtggattagaatgtgctgttctgtaatagtagtaccgttaggtgtatgcatttggaatatgtctcaagtgtggcaactatgtactcctaatagtactttttgttgatatgaaaactgaaattaagacttattttgaaaaatccttatacattacattattacagtgtccaaatgtagcttcagatattttgatttcaactcttacaatatgattttggggtacggggtgcgtaattcaatcttttgatcttttgtctcagttctcccatgagagaataatgttcaatggtaaaggtgatgtttactcatgttta

SEQ ID NO: 330202 - DNA, 470 bp, Homo sapiens
ggctgcttgtattgacttgagatttcttaaaagtaaatttagccattttaataaaaattttttgttacaggatgtgaagttaccccagatgtaaacatttcaggccaaaaatttaacattaaactcctgattccagttgcagaaggcatgaatgaaatctggcttcgttgtgacaatgaaaaacagtatgcacactggatggcagcctgcagattagcctccaaaggcaagaccatggcggacagttcttacaacttagaagttcagaatattctttcctttctgaagatgcagcatttaaacccagatcctcagttaataccagagcagatcacgactgatataactcctgaatgtttggtgtctccccgctatctaaaaaagtataagaacaagcaggtacttacttcattttacttcatctactgtgctggtttgtttttataattttgtacataactttgtttttc

SEQ ID NO: 330203 - DNA, 3408 bp, Homo sapiens
agtgttctttacctccagtcaactcttgattatggtaatagttatatctcatttggggctcaagaggatcctaaaacaaaagtaaatggtacagagaattacaatattagcagagtacaaaagtatatatttatcagaaataagtcacgtgcccagaaaagttatctgtgcttataagtcacaatgacatgttgccttagcaaagattatctaatgtaaactttgcttctagtttatggacgtgtgagaatactaaacaaattttgcatttctttcctgaattagtactttaaaaatatgcaactagaaatttatcctccctaaaagtaatattttaacctcctcttcattccaaactctaagttgcttacttatttttaagatgtggttacttaaggtaagaaaaaatgtaaaaaaagattggtctgaccatgctctctggtgggaaaagaagagaacttggcttctgaagacacattggaccttagataagtatggtattcaggcagatgctaagcttcagttcacccctcagcacaaactgctccgcctgcagcttcccaacatgaagtatgtgaaggtgaaagtgaatttctctgatagagtcttcaaagctgtttctgacatctgtaagacttttaatatcagacaccccgaagaactttctctcttaaagaaacccagagatccaacaaagaaaaaaaagaagaagctagatgaccagtctgaagatgaggcacttgaattagaggggcctcttatcactcctggatcaggaagtatatattcaagcccaggactgtatagtaaaacaatgacccccacttatgatgctcatgatggaagccccttgtcaccaacttctgcttggtttggtgacagtgctttgtcagaaggcaatcctggtatacttgctgtcagtcaaccaatcacgtcaccagaaatcttggcaaaaatgttcaagcctcaagctcttcttgataaagcaaaaatcaaccaaggatggcttgattcctcaagatctctcatggaacaagatgtgaaggaaaatgaggccttgctgctccgattcaagtattacagcttttttgatttgaatccaaagtatgatgcaatcagaatcaatcagctttacgagcaggccaaatgggccattctcctggaagagattgaatgcacagaagaagaaatgatgatgtttgcagccctgcagtatcatatcaataagctgtcaatcatgacatcagagaatcatttgaacaacagtgacaaagaagttgatgaagttgatgctgccctttcagacctggagattactctggaagggggtaaaacgtcaacaattttgggtgacattacttccattcctgaacttgctgactacattaaagttttcaagccaaaaaagctgactctgaaaggttacaaacaatattggtgcaccttcaaagacacatccatttcttgttataagagcaaagaagaatccagtggcacaccagctcatcagatgaacctcaggggatgtgaagttaccccagatgtaaacatttcaggccaaaaatttaacattaaactcctgattccagttgcagaaggcatgaatgaaatctggcttcgttgtgacaatgaaaaacagtatgcacactggatggcagcctgcagattagcctccaaaggcaagaccatggcggacagttcttacaacttagaagttcagaatattctttcctttctgaagatgcagcatttaaacccagatcctcagttaataccagagcagatcacgactgatataactcctgaatgtttggtgtctccccgctatctaaaaaagtataagaacaagcagataacagcgagaatcttggaggcccatcagaatgtagctcagatgagtctaattgaagccaagatgagatttattcaagcttggcagtcactacctgaatttggcatcactcacttcattgcaaggttccaagggggcaaaaaagaagaacttattggaattgcatacaacagactgattcggatggatgccagcactggagatgcaattaaaacatggcgtttcagcaacatgaaacagtggaatgtcaactgggaaatcaaaatggtcaccgtagagtttgcagatgaagtacgattgtccttcatttgtactgaagtagattgcaaagtggttcatgaattcattggtggctacatatttctctcaacacgtgcaaaagaccaaaacgagagtttagatgaagagatgttctacaaacttaccagtggttgggtgtgaatagaaatactgtttaatgaaactccacggccataacaatatttaactttaaaagctgtttgttatatgctgcttaataaagtaagcttgaaatttatcattttatcatgaaaacttctttgccttaccagaccagttaatatgtgcactaaacaagcacgactattaatctatcatgttatgatataataaacttgaatttggcacacattccttagggccatgaattgaaaactgaaatagtgggcaaatcaggaacaaaccatcactgatttactgatttaagctagccaaactgtaagaaacaagccatctattttaaagctatccagggcttaacctatatgaactctatttatcatgtctaatgcatgtgatttaatgtatgtttaatttgatatcatgttttaaaatatcctacttctggtagccatttaattcctccccctacccccaaataaatcaggcatgcaggaggcctgatatttagtaatgtcattgtgtttgaccttgaaggaaaatgctattagtccgtcgtgcttgatttgtttttgtccttgaataagcatgttatgtatattgtctcgtgtttttatttttacaccatattgtattacacttttagtattcaccagcataatcactgtctgcctaaaatatgcaactctttgcattacaatatgaagtaaagttctatgaagtatgcattttgtgtaactaatgtaaaaacacaaattttataaaattgtacagttttttaaaaactactcacaactagcagatggcttaaatgtagcaatctctgcgttaattaaatgcctttaagagatataattaacgtgcagttttaatatctactaaattaagaatgacttcattatgatcatgatttgccacaatgtccttaactctaatgcctggactggccatgttctagtctgttgcgctgttacaatctgtattggtgctagtcagaaaattcctagctcacatagcccaaaagggtgcgagggagaggtggattaccagtattgttcaataatccatggttcaaagactgtataaatgcattttattttaaataaaagcaaaacttttatttaataaatattttt

SEQ ID NO: 330204 - DNA, 3512 bp, Homo sapiens
aggagggagccagcgcgcccagcccagccaggctcggacagagggggcggggagagggtggagcgcggggagccaggcgaggggccgcgacgacgggactccattagccgctccggccacaggcagcgcttcgccagccgaggaaccggacgcggacaccgccgccccgcgagcctccagcccctcgcctgttgccgcgcgagtcccgggcccggagcgctaggagcgcgcggtgagggagcgggaccccgccgggacccgagggggcgcggcggggaggggaacggggagtcagcccgcgctgtgtctcggggccggccggcaggaaggagccatggctctggacgggataaggatgccagatggctgctacgcggacgggacgtgggaactgagtgtccatgtgacggacctgaaccgcgatgtcaccctgagagtgaccggcgaggtgcacattggaggcgtgatgcttaagctggtggagaaactcggtgagtagcatcccagccgcatgtaaaaaaagattggtctgaccatgctctctggtgggaaaagaagagaacttggcttctgaagacacattggaccttagataagtatggtattcaggcagatgctaagcttcagttcacccctcagcacaaactgctccgcctgcagcttcccaacatgaagtatgtgaaggtgaaagtgaatttctctgatagagtcttcaaagctgtttctgacatctgtaagacttttaatatcagacaccccgaagaactttctctcttaaagaaacccagagatccaacaaagaaaaaaaagaagaagctagatgaccagtctgaagatgaggcacttgaattagaggggcctcttatcactcctggatcaggaagtatatattcaagcccaggactgtatagtaaaacaatgacccccacttatgatgctcatgatggaagccccttgtcaccaacttctgcttggtttggtgacagtgctttgtcagaaggcaatcctggtatacttgctgtcagtcaaccaatcacgtcaccagaaatcttggcaaaaatgttcaagcctcaagctcttcttgataaagcaaaaatcaaccaaggatggcttgattcctcaagatctctcatggaacaagatgtgaaggaaaatgaggccttgctgctccgattcaagtattacagcttttttgatttgaatccaaagtatgatgcaatcagaatcaatcagctttacgagcaggccaaatgggccattctcctggaagagattgaatgcacagaagaagaaatgatgatgtttgcagccctgcagtatcatatcaataagctgtcaatcatgacatcagagaatcatttgaacaacagtgacaaagaagttgatgaagttgatgctgccctttcagacctggagattactctggaagggggtaaaacgtcaacaattttgggtgacattacttccattcctgaacttgctgactacattaaagttttcaagccaaaaaagctgactctgaaaggttacaaacaatattggtgcaccttcaaagacacatccatttcttgttataagagcaaagaagaatccagtggcacaccagctcatcagatgaacctcaggggatgtgaagttaccccagatgtaaacatttcaggccaaaaatttaacattaaactcctgattccagttgcagaaggcatgaatgaaatctggcttcgttgtgacaatgaaaaacagtatgcacactggatggcagcctgcagattagcctccaaaggcaagaccatggcggacagttcttacaacttagaagttcagaatattctttcctttctgaagatgcagcatttaaacccagatcctcagttaataccagagcagatcacgactgatataactcctgaatgtttggtgtctccccgctatctaaaaaagtataagaacaagcagataacagcgagaatcttggaggcccatcagaatgtagctcagatgagtctaattgaagccaagatgagatttattcaagcttggcagtcactacctgaatttggcatcactcacttcattgcaaggttccaagggggcaaaaaagaagaacttattggaattgcatacaacagactgattcggatggatgccagcactggagatgcaattaaaacatggcgtttcagcaacatgaaacagtggaatgtcaactgggaaatcaaaatggtcaccgtagagtttgcagatgaagtacgattgtccttcatttgtactgaagtagattgcaaagtggttcatgaattcattggtggctacatatttctctcaacacgtgcaaaagaccaaaacgagagtttagatgaagagatgttctacaaacttaccagtggttgggtgtgaatagaaatactgtttaatgaaactccacggccataacaatatttaactttaaaagctgtttgttatatgctgcttaataaagtaagcttgaaatttatcattttatcatgaaaacttctttgccttaccagaccagttaatatgtgcactaaacaagcacgactattaatctatcatgttatgatataataaacttgaatttggcacacattccttagggccatgaattgaaaactgaaatagtgggcaaatcaggaacaaaccatcactgatttactgatttaagctagccaaactgtaagaaacaagccatctattttaaagctatccagggcttaacctatatgaactctatttatcatgtctaatgcatgtgatttaatgtatgtttaatttgatatcatgttttaaaatatcctacttctggtagccatttaattcctccccctacccccaaataaatcaggcatgcaggaggcctgatatttagtaatgtcattgtgtttgaccttgaaggaaaatgctattagtccgtcgtgcttgatttgtttttgtccttgaataagcatgttatgtatattgtctcgtgtttttatttttacaccatattgtattacacttttagtattcaccagcataatcactgtctgcctaaaatatgcaactctttgcattacaatatgaagtaaagttctatgaagtatgcattttgtgtaactaatgtaaaaacacaaattttataaaattgtacagttttttaaaaactactcacaactagcagatggcttaaatgtagcaatctctgcgttaattaaatgcctttaagagatataattaacgtgcagttttaatatctactaaattaagaatgacttcattatgatcatgatttgccacaatgtccttaactctaatgcctggactggccatgttctagtctgttgcgctgttacaatctgtattggtgctagtcagaaaattcctagctcacatagcccaaaagggtgcgagggagaggtggattaccagtattgttcaataatccatggttcaaagactgtataaatgcattttattttaaataaaagcaaaacttttatttaataaatattttt

SEQ ID NO: 330205 - DNA, 3345 bp, Homo sapiens
aggagggagccagcgcgcccagcccagccaggctcggacagagggggcggggagagggtggagcgcggggagccaggcgaggggccgcgacgacgggactccattagccgctccggccacaggcagcgcttcgccagccgaggaaccggacgcggacaccgccgccccgcgagcctccagcccctcgcctgttgccgcgcgagtcccgggcccggagcgctaggagcgcgcggaaggagccatggctctggacgggataaggatgccagatggctgctacgcggacgggacgtgggaactgagtgtccatgtgacggacctgaaccgcgatgtcaccctgagagtgaccggcgaggtgcacattggaggcgtgatgcttaagctggtggagaaactcgatgtaaaaaaagattggtctgaccatgctctctggtgggaaaagaagagaacttggcttctgaagacacattggaccttagataagtatggtattcaggcagatgctaagcttcagttcacccctcagcacaaactgctccgcctgcagcttcccaacatgaagtatgtgaaggtgaaagtgaatttctctgatagagtcttcaaagctgtttctgacatctgtaagacttttaatatcagacaccccgaagaactttctctcttaaagaaacccagagatccaacaaagaaaaaaaagaagaagctagatgaccagtctgaagatgaggcacttgaattagaggggcctcttatcactcctggatcaggaagtatatattcaagcccaggactgtatagtaaaacaatgacccccacttatgatgctcatgatggaagccccttgtcaccaacttctgcttggtttggtgacagtgctttgtcagaaggcaatcctggtatacttgctgtcagtcaaccaatcacgtcaccagaaatcttggcaaaaatgttcaagcctcaagctcttcttgataaagcaaaaatcaaccaaggatggcttgattcctcaagatctctcatggaacaagatgtgaaggaaaatgaggccttgctgctccgattcaagtattacagcttttttgatttgaatccaaagtatgatgcaatcagaatcaatcagctttacgagcaggccaaatgggccattctcctggaagagattgaatgcacagaagaagaaatgatgatgtttgcagccctgcagtatcatatcaataagctgtcaatcatgacatcagagaatcatttgaacaacagtgacaaagaagttgatgaagttgatgctgccctttcagacctggagattactctggaagggggtaaaacgtcaacaattttgggtgacattacttccattcctgaacttgctgactacattaaagttttcaagccaaaaaagctgactctgaaaggttacaaacaatattggtgcaccttcaaagacacatccatttcttgttataagagcaaagaagaatccagtggcacaccagctcatcagatgaacctcaggggatgtgaagttaccccagatgtaaacatttcaggccaaaaatttaacattaaactcctgattccagttgcagaaggcatgaatgaaatctggcttcgttgtgacaatgaaaaacagtatgcacactggatggcagcctgcagattagcctccaaaggcaagaccatggcggacagttcttacaacttagaagttcagaatattctttcctttctgaagatgcagcatttaaacccagatcctcagttaataccagagcagatcacgactgatataactcctgaatgtttggtgtctccccgctatctaaaaaagtataagaacaagcagataacagcgagaatcttggaggcccatcagaatgtagctcagatgagtctaattgaagccaagatgagatttattcaagcttggcagtcactacctgaatttggcatcactcacttcattgcaaggttccaagggggcaaaaaagaagaacttattggaattgcatacaacagactgattcggatggatgccagcactggagatgcaattaaaacatggcgtttcagcaacatgaaacagtggaatgtcaactgggaaatcaaaatggtcaccgtagagtttgcagatgaagtacgattgtccttcatttgtactgaagtagattgcaaagtggttcatgaattcattggtggctacatatttctctcaacacgtgcaaaagaccaaaacgagagtttagatgaagagatgttctacaaacttaccagtggttgggtgtgaatagaaatactgtttaatgaaactccacggccataacaatatttaactttaaaagctgtttgttatatgctgcttaataaagtaagcttgaaatttatcattttatcatgaaaacttctttgccttaccagaccagttaatatgtgcactaaacaagcacgactattaatctatcatgttatgatataataaacttgaatttggcacacattccttagggccatgaattgaactagccaaactgtaagaaacaagccatctattttaaagctatccagggcttaacctatatgaactctatttatcatgtctaatgcatgtgatttaatgtatgtttaatttgatatcatgttttaaaatatcctacttctggtagccatttaattcctccccctacccccaaataaatcaggcatgcaggaggcctgatatttagtaatgtcattgtgtttgaccttgaaggaaaatgctattagtccgtcgtgcttgatttgtttttgtccttgaataagcatgttatgtatattgtctcgtgtttttatttttacaccatattgtattacacttttagtattcaccagcataatcactgtctgcctaaaatatgcaactctttgcattacaatatgaagtaaagttctatgaagtatgcattttgtgtaactaatgtaaaaacacaaattttataaaattgtacagttttttaaaaactactcacaactagcagatggcttaaatgtagcaatctctgcgttaattaaatgcctttaagagatataattaacgtgcagttttaatatctactaaattaagaatgacttcattatgatcatgatttgccacaatgtccttaactctaatgcctggactggccatgttctagtctgttgcgctgttacaatctgtattggtgctagtcagaaaattcctagctcacatagcccaaaagggtgcgagggagaggtggattaccagtattgttcaataatccatggttcaaagactgtataaatgcattttattttaaataaaagcaaaacttttatttaataaatattttt

SEQ ID NO: 330206 - DNA, 2084 bp, Homo sapiens
acagaatcaagagagctcggcattaaggcagagaggagaaaaaggaaaaggaggccaaaaaagctgactctgaaaggttacaaacaatattggtgcaccttcaaagacacatccatttcttgttataagagcaaagaagaatccagtggcacaccagctcatcagatgaacctcaggggatgtgaagttaccccagatgtaaacatttcaggccaaaaatttaacattaaactcctgattccagttgcagaaggcatgaatgaaatctggcttcgttgtgacaatgaaaaacagtatgcacactggatggcagcctgcagattagcctccaaaggcaagaccatggcggacagttcttacaacttagaagttcagaatattctttcctttctgaagatgcagcatttaaacccagatcctcagttaataccagagcagatcacgactgatataactcctgaatgtttggtgtctccccgctatctaaaaaagtataagaacaagcagccaggctatataagagatttgataacagcgagaatcttggaggcccatcagaatgtagctcagatgagtctaattgaagccaagatgagatttattcaagcttggcagtcactacctgaatttggcatcactcacttcattgcaaggttccaagggggcaaaaaagaagaacttattggaattgcatacaacagactgattcggatggatgccagcactggagatgcaattaaaacatggcgtttcagcaacatgaaacagtggaatgtcaactgggaaatcaaaatggtcaccgtagagtttgcagatgaagtacgattgtccttcatttgtactgaagtagattgcaaagtggttcatgaattcattggtggctacatatttctctcaacacgtgcaaaagaccaaaacgagagtttagatgaagagatgttctacaaacttaccagtggttgggtgtgaatagaaatactgtttaatgaaactccacggccataacaatatttaactttaaaagctgtttgttatatgctgcttaataaagtaagcttgaaatttatcattttatcatgaaaacttctttgccttaccagaccagttaatatgtgcactaaacaagcacgactattaatctatcatgttatgatataataaacttgaatttggcacacattccttagggccatgaattgaaaactgaaatagtgggcaaatcaggaacaaaccatcactgatttactgatttaagctagccaaactgtaagaaacaagccatctattttaaagctatccagggcttaacctatatgaactctatttatcatgtctaatgcatgtgatttaatgtatgtttaatttgatatcatgttttaaaatatcctacttctggtagccatttaattcctccccctacccccaaataaatcaggcatgcaggaggcctgatatttagtaatgtcattgtgtttgaccttgaaggaaaatgctattagtccgtcgtgcttgatttgtttttgtccttgaataagcatgttatgtatattgtctcgtgtttttatttttacaccatattgtattacacttttagtattcaccagcataatcactgtctgcctaaaatatgcaactctttgcattacaatatgaagtaaagttctatgaagtatgcattttgtgtaactaatgtaaaaacacaaattttataaaattgtacagttttttaaaaactactcacaactagcagatggcttaaatgtagcaatctctgcgttaattaaatgcctttaagagatataattaacgtgcagttttaatatctactaaattaagaatgacttcattatgatcatgatttgccacaatgtccttaactctaatgcctggactggccatgttctagtctgttgcgctgttacaatctgtattggtgctagtcagaaaattcctagctcacatagcccaaaagggtgcgagggagaggtggattaccagtattgttcaataatccatggttcaaagactgtataaatgcattttattttaaataaaagcaaaacttttatttaataaatattttt

SEQ ID NO: 330207 - DNA, 2355 bp, Homo sapiens
aggagggagccagcgcgcccagcccagccaggctcggacagagggggcggggagagggtggagcgcggggagccaggcgaggggccgcgacgacgggactccattagccgctccggccacaggcagcgcttcgccagccgaggaaccggacgcggacaccgccgccccgcgagcctccagcccctcgcctgttgccgcgcgagtcccgggcccggagcgctaggagcgcgcggaaggagccatggctctggacgggataaggatgccagatggctgctacgcggacgggacgtgggaactgagtgtccatgtgacggacctgaaccgcgatgtcaccctgagagtgaccggcgaggtgcacattggaggcgtgatgcttaagctggtggagaaactcgatgtaaaaaaagattggtctgaccatgctctctggtgggaaaagaagagaacttggcttctgaagacacattggaccttagataagtatggtattcaggcagatgctaagcttcagttcacccctcagcacaaactgctccgcctgcagcttcccaacatgaagtatgtgaaggtgaaagtgaatttctctgatagagtcttcaaagctgtttctgacatctgtaagacttttaatatcagacaccccgaagaactttctctcttaaagaaacccagagatccaacaaagaaaaaaaagaagaagctagatgaccagtctgaagatgaggcacttgaattagaggggcctcttatcactcctggatcaggaagtatatattcaagcccaggactgtatagtaaaacaatgacccccacttatgatgctcatgatggaagccccttgtcaccaacttctgcttggtttggtgacagtgctttgtcagaaggcaatcctggtatacttgctgtcagtcaaccaatcacgtcaccagaaatcttggcaaaaatgttcaagcctcaagctcttcttgataaagcaaaaatcaaccaaggatggcttgattcctcaagatctctcatggaacaagatgtgaaggaaaatgaggccttgctgctccgattcaagtattacagcttttttgatttgaatccaaagtatgatgcaatcagaatcaatcagctttacgagcaggccaaatgggccattctcctggaagagattgaatgcacagaagaagaaatgatgatgtttgcagccctgcagtatcatatcaataagctgtcaatcatgacatcagagaatcatttgaacaacagtgacaaagaagttgatgaagttgatgctgccctttcagacctggagattactctggaagggggtaaaacgtcaacaattttgggtgacattacttccattcctgaacttgctgactacattaaagttttcaagccaaaaaagctgactctgaaaggttacaaacaatattggtgcaccttcaaagacacatccatttcttgttataagagcaaagaagaatccagtggcacaccagctcatcagatgaacctcaggggatgtgaagttaccccagatgtaaacatttcaggccaaaaatttaacattaaactcctgattccagttgcagaaggcatgaatgaaatctggcttcgttgtgacaatgaaaaacagtatgcacactggatggcagcctgcagattagcctccaaaggcaagaccatggcggacagttcttacaacttagaagttcagaatattctttcctttctgaagatgcagcatttaaacccagatcctcagttaataccagagcagatcacgactgatataactcctgaatgtttggtgtctccccgctatctaaaaaagtataagaacaagcagccaggctatataagagatttggtaagttctccatatttaccacaaaagaaaaagaataaataaaaattcatagccacaaccttccctcatggaatttaccccagtagtgaaatttaaatttaaaatagaaatgattatggtgatttcaagtaccttaaagctgctaacaaatattcctgctagaaacatgtattccaggtattcattctgattatagacatagtgctaaatttaattaaaactcgtgtatatgtggattagaatgtgctgttctgtaatagtagtaccgttaggtgtatgcatttggaatatgtctcaagtgtggcaactatgtactcctaatagtactttttgttgatatgaaaactgaaattaagacttattttgagatttcaactcttacaatatgattttggggtacggggtgcgtaattcaatcttttgatcttttgtctcagttctcccatgagagaataatgttcaatggtaaaggtgatgtttactcatgttta

SEQ ID NO: 330208 - DNA, 1897 bp, Homo sapiens
aggagggagccagcgcgcccagcccagccaggctcggacagagggggcggggagagggtggagcgcggggagccaggcgaggggccgcgacgacgggactccattagccgctccggccacaggcagcgcttcgccagccgaggaaccggacgcggacaccgccgccccgcgagcctccagcccctcgcctgttgccgcgcgagtcccgggcccggagcgctaggagcgcgcggaaggagccatggctctggacgggataaggatgccagatggctgctacgcggacgggacgtgggaactgagtgtccatgtgacggacctgaaccgcgatgtcaccctgagagtgaccggcgaggtgcacattggaggcgtgatgcttaagctggtggagaaactcgatgtaaaaaaagattggtctgaccatgctctctggtgggaaaagaagagaacttggcttctgaagacacattggaccttagataagtatggtattcaggcagatgctaagcttcagttcacccctcagcacaaactgctccgcctgcagcttcccaacatgaagtatgtgaaggtgaaagtgaatttctctgatagagtcttcaaagctgtttctgacatctgtaagacttttaatatcagacaccccgaagaactttctctcttaaagaaacccagagatccaacaaagaaaaaaaagaagaagctagatgaccagtctgaagatgaggcacttgaattagaggggcctcttatcactcctggatcaggaagtatatattcaagcccaggactgtatagtaaaacaatgacccccacttatgatgctcatgatggaagccccttgtcaccaacttctgcttggtttggtgacagtgctttgtcagaaggcaatcctggtatacttgctgtcagtcaaccaatcacgtcaccagaaatcttggcaaaaatgttcaagcctcaagctcttcttgataaagcaaaaatcaaccaaggatggcttgattcctcaagatctctcatggaacaagatgtgaaggaaaatgaggccttgctgctccgattcaagtattacagcttttttgatttgaatccaaagtatgatgcaatcagaatcaatcagctttacgagcaggccaaatgggccattctcctggaagagattgaatgcacagaagaagaaatgatgatgtttgcagccctgcagtatcatatcaataagctgtcaatcatgacatcagagaatcatttgaacaacagtgacaaagaagttgatgaagttgatgctgccctttcagacctggagattactctggaagggggtaaaacgtcaacaattttgggtgacattacttccattcctgaacttgctgactacattaaagttttcaagccaaaaaagctgactctgaaaggttacaaacaatattggtgcaccttcaaagacacatccatttcttgttataagagcaaagaagaatccagtggcacaccagctcatcagatgaacctcaggggatgtgaagttaccccagatgtaaacatttcaggccaaaaatttaacattaaactcctgattccagttgcagaaggcatgaatgaaatctggcttcgttgtgacaatgaaaaacagtatgcacactggatggcagcctgcagattagcctccaaaggcaagaccatggcggacagttcttacaacttagaagttcagaatattctttcctttctgaagatgcagcatttaaacccagatcctcagttaataccagagcagatcacgactgatataactcctgaatgtttggtgtctccaccctttgcttggtttaagtatttatggattgttattataggacatagtagtagcggtggtcagacatggaaatggttgggagac

SEQ ID NO: 330209 - DNA, 483 bp, Homo sapiens
tagcaattattttaataaaataattctggtttcagtatcatatcaataagctgtcaatcatgacatcagagaatcatttgaacaacagtgacaaagaagttgatgaagttgatgctgccctttcagacctggagattactctggaagggggtaaaacgtcaacaattttggtagggtgaatctttttttttacctactaatttagcttgaattgatgcattccattttgtggatttaggttcaaagtatttgggggtggtggagagaaatatttaatgctttagagagagaaatcagatgttaatttttcaggaactttgagcaaagtggtttattttgagacagggtctcgttctgttgcccaggctggagtgcagtggcacacgtcataggtcactgcattctcaaactccagggctcaagccatttcctacctcagcctcctgagtagctgagactacaaccatgcaccaccacacctgg

SEQ ID NO: 330210 - DNA, 3399 bp, Homo sapiens
aggagggagccagcgcgcccagcccagccaggctcggacagagggggcggggagagggtggagcgcggggagccaggcgaggggccgcgacgacgggactccattagccgctccggccacaggcagcgcttcgccagccgaggaaccggacgcggacaccgccgccccgcgagcctccagcccctcgcctgttgccgcgcgagtcccgggcccggagcgctaggagcgcgcggaaggagccatggctctggacgggataaggatgccagatggctgctacgcggacgggacgtgggaactgagtgtccatgtgacggacctgaaccgcgatgtcaccctgagagtgaccggcgaggtgcacattggaggcgtgatgcttaagctggtggagaaactcgatgtaaaaaaagattggtctgaccatgctctctggtgggaaaagaagagaacttggcttctgaagacacattggaccttagataagtatggtattcaggcagatgctaagcttcagttcacccctcagcacaaactgctccgcctgcagcttcccaacatgaagtatgtgaaggtgaaagtgaatttctctgatagagtcttcaaagctgtttctgacatctgtaagacttttaatatcagacaccccgaagaactttctctcttaaagaaacccagagatccaacaaagaaaaaaaagaagaagctagatgaccagtctgaagatgaggcacttgaattagaggggcctcttatcactcctggatcaggaagtatatattcaagcccaggactgtatagtaaaacaatgacccccacttatgatgctcatgatggaagccccttgtcaccaacttctgcttggtttggtgacagtgctttgtcagaaggcaatcctggtatacttgctgtcagtcaaccaatcacgtcaccagaaatcttggcaaaaatgttcaagcctcaagctcttcttgataaagcaaaaatcaaccaaggatggcttgattcctcaagatctctcatggaacaagatgtgaaggaaaatgaggccttgctgctccgattcaagtattacagcttttttgatttgaatccaaagtatgatgcaatcagaatcaatcagctttacgagcaggccaaatgggccattctcctggaagagattgaatgcacagaagaagaaatgatgatgtttgcagccctgcagtatcatatcaataagctgtcaatcatgacatcagagaatcatttgaacaacagtgacaaagaagttgatgaagttgatgctgccctttcagacctggagattactctggaagggggtaaaacgtcaacaattttgggtgacattacttccattcctgaacttgctgactacattaaagttttcaagccaaaaaagctgactctgaaaggttacaaacaatattggtgcaccttcaaagacacatccatttcttgttataagagcaaagaagaatccagtggcacaccagctcatcagatgaacctcaggggatgtgaagttaccccagatgtaaacatttcaggccaaaaatttaacattaaactcctgattccagttgcagaaggcatgaatgaaatctggcttcgttgtgacaatgaaaaacagtatgcacactggatggcagcctgcagattagcctccaaaggcaagaccatggcggacagttcttacaacttagaagttcagaatattctttcctttctgaagatgcagcatttaaacccagatcctcagttaataccagagcagatcacgactgatataactcctgaatgtttggtgtctccccgctatctaaaaaagtataagaacaagcagataacagcgagaatcttggaggcccatcagaatgtagctcagatgagtctaattgaagccaagatgagatttattcaagcttggcagtcactacctgaatttggcatcactcacttcattgcaaggttccaagggggcaaaaaagaagaacttattggaattgcatacaacagactgattcggatggatgccagcactggagatgcaattaaaacatggcgtttcagcaacatgaaacagtggaatgtcaactgggaaatcaaaatggtcaccgtagagtttgcagatgaagtacgattgtccttcatttgtactgaagtagattgcaaagtggttcatgaattcattggtggctacatatttctctcaacacgtgcaaaagaccaaaacgagagtttagatgaagagatgttctacaaacttaccagtggttgggtgtgaatagaaatactgtttaatgaaactccacggccataacaatatttaactttaaaagctgtttgttatatgctgcttaataaagtaagcttgaaatttatcattttatcatgaaaacttctttgccttaccagaccagttaatatgtgcactaaacaagcacgactattaatctatcatgttatgatataataaacttgaatttggcacacattccttagggccatgaattgaaaactgaaatagtgggcaaatcaggaacaaaccatcactgatttactgatttaagctagccaaactgtaagaaacaagccatctattttaaagctatccagggcttaacctatatgaactctatttatcatgtctaatgcatgtgatttaatgtatgtttaatttgatatcatgttttaaaatatcctacttctggtagccatttaattcctccccctacccccaaataaatcaggcatgcaggaggcctgatatttagtaatgtcattgtgtttgaccttgaaggaaaatgctattagtccgtcgtgcttgatttgtttttgtccttgaataagcatgttatgtatattgtctcgtgtttttatttttacaccatattgtattacacttttagtattcaccagcataatcactgtctgcctaaaatatgcaactctttgcattacaatatgaagtaaagttctatgaagtatgcattttgtgtaactaatgtaaaaacacaaattttataaaattgtacagttttttaaaaactactcacaactagcagatggcttaaatgtagcaatctctgcgttaattaaatgcctttaagagatataattaacgtgcagttttaatatctactaaattaagaatgacttcattatgatcatgatttgccacaatgtccttaactctaatgcctggactggccatgttctagtctgttgcgctgttacaatctgtattggtgctagtcagaaaattcctagctcacatagcccaaaagggtgcgagggagaggtggattaccagtattgttcaataatccatggttcaaagactgtataaatgcattttattttaaataaaagcaaaacttttatttaataaatattttt

SEQ ID NO: 330211 - DNA, 3082 bp, Homo sapiens
agtgttctttacctccagtcaactcttgattatggtaatagttatatctcatttggggctcaagaggatcctaaaacaaaaatgtaaaaaaagattggtctgaccatgctctctggtgggaaaagaagagaacttggcttctgaagacacattggaccttagataagtatggtattcaggcagatgctaagcttcagttcacccctcagcacaaactgctccgcctgcagcttcccaacatgaagtatgtgaaggtgaaagtgaatttctctgatagagtcttcaaagctgtttctgacatctgtaagacttttaatatcagacaccccgaagaactttctctcttaaagaaacccagagatccaacaaagaaaaaaaagaagaagctagatgaccagtctgaagatgaggcacttgaattagaggggcctcttatcactcctggatcaggaagtatatattcaagcccaggactgtatagtaaaacaatgacccccacttatgatgctcatgatggaagccccttgtcaccaacttctgcttggtttggtgacagtgctttgtcagaaggcaatcctggtatacttgctgtcagtcaaccaatcacgtcaccagaaatcttggcaaaaatgttcaagcctcaagctcttcttgataaagcaaaaatcaaccaaggatggcttgattcctcaagatctctcatggaacaagatgtgaaggaaaatgaggccttgctgctccgattcaagtattacagcttttttgatttgaatccaaagtatgatgcaatcagaatcaatcagctttacgagcaggccaaatgggccattctcctggaagagattgaatgcacagaagaagaaatgatgatgtttgcagccctgcagtatcatatcaataagctgtcaatcatgacatcagagaatcatttgaacaacagtgacaaagaagttgatgaagttgatgctgccctttcagacctggagattactctggaagggggtaaaacgtcaacaattttgggtgacattacttccattcctgaacttgctgactacattaaagttttcaagccaaaaaagctgactctgaaaggttacaaacaatattggtgcaccttcaaagacacatccatttcttgttataagagcaaagaagaatccagtggcacaccagctcatcagatgaacctcaggggatgtgaagttaccccagatgtaaacatttcaggccaaaaatttaacattaaactcctgattccagttgcagaaggcatgaatgaaatctggcttcgttgtgacaatgaaaaacagtatgcacactggatggcagcctgcagattagcctccaaaggcaagaccatggcggacagttcttacaacttagaagttcagaatattctttcctttctgaagatgcagcatttaaacccagatcctcagttaataccagagcagatcacgactgatataactcctgaatgtttggtgtctccccgctatctaaaaaagtataagaacaagcagataacagcgagaatcttggaggcccatcagaatgtagctcagatgagtctaattgaagccaagatgagatttattcaagcttggcagtcactacctgaatttggcatcactcacttcattgcaaggttccaagggggcaaaaaagaagaacttattggaattgcatacaacagactgattcggatggatgccagcactggagatgcaattaaaacatggcgtttcagcaacatgaaacagtggaatgtcaactgggaaatcaaaatggtcaccgtagagtttgcagatgaagtacgattgtccttcatttgtactgaagtagattgcaaagtggttcatgaattcattggtggctacatatttctctcaacacgtgcaaaagaccaaaacgagagtttagatgaagagatgttctacaaacttaccagtggttgggtgtgaatagaaatactgtttaatgaaactccacggccataacaatatttaactttaaaagctgtttgttatatgctgcttaataaagtaagcttgaaatttatcattttatcatgaaaacttctttgccttaccagaccagttaatatgtgcactaaacaagcacgactattaatctatcatgttatgatataataaacttgaatttggcacacattccttagggccatgaattgaaaactgaaatagtgggcaaatcaggaacaaaccatcactgatttactgatttaagctagccaaactgtaagaaacaagccatctattttaaagctatccagggcttaacctatatgaactctatttatcatgtctaatgcatgtgatttaatgtatgtttaatttgatatcatgttttaaaatatcctacttctggtagccatttaattcctccccctacccccaaataaatcaggcatgcaggaggcctgatatttagtaatgtcattgtgtttgaccttgaaggaaaatgctattagtccgtcgtgcttgatttgtttttgtccttgaataagcatgttatgtatattgtctcgtgtttttatttttacaccatattgtattacacttttagtattcaccagcataatcactgtctgcctaaaatatgcaactctttgcattacaatatgaagtaaagttctatgaagtatgcattttgtgtaactaatgtaaaaacacaaattttataaaattgtacagttttttaaaaactactcacaactagcagatggcttaaatgtagcaatctctgcgttaattaaatgcctttaagagatataattaacgtgcagttttaatatctactaaattaagaatgacttcattatgatcatgatttgccacaatgtccttaactctaatgcctggactggccatgttctagtctgttgcgctgttacaatctgtattggtgctagtcagaaaattcctagctcacatagcccaaaagggtgcgagggagaggtggattaccagtattgttcaataatccatggttcaaagactgtataaatgcattttattttaaataaaagcaaaacttttatttaataaatattttt

SEQ ID NO: 330212 - DNA, 3420 bp, Homo sapiens
aggagggagccagcgcgcccagcccagccaggctcggacagagggggcggggagagggtggagcgcggggagccaggcgaggggccgcgacgacgggactccattagccgctccggccacaggcagcgcttcgccagccgaggaaccggacgcggacaccgccgccccgcgagcctccagcccctcgcctgttgccgcgcgagtcccgggcccggagcgctaggagcgcgcggaaggagccatggctctggacgggataaggatgccagatggctgctacgcggacgggacgtgggaactgagtgtccatgtgacggacctgaaccgcgatgtcaccctgagagtgaccggcgaggtgcacattggaggcgtgatgcttaagctggtggagaaactcgatgtaaaaaaagattggtctgaccatgctctctggtgggaaaagaagagaacttggcttctgaagacacattggaccttagataagtatggtattcaggcagatgctaagcttcagttcacccctcagcacaaactgctccgcctgcagcttcccaacatgaagtatgtgaaggtgaaagtgaatttctctgatagagtcttcaaagctgtttctgacatctgtaagacttttaatatcagacaccccgaagaactttctctcttaaagaaacccagagatccaacaaagaaaaaaaagaagaagctagatgaccagtctgaagatgaggcacttgaattagaggggcctcttatcactcctggatcaggaagtatatattcaagcccaggactgtatagtaaaacaatgacccccacttatgatgctcatgatggaagccccttgtcaccaacttctgcttggtttggtgacagtgctttgtcagaaggcaatcctggtatacttgctgtcagtcaaccaatcacgtcaccagaaatcttggcaaaaatgttcaagcctcaagctcttcttgataaagcaaaaatcaaccaaggatggcttgattcctcaagatctctcatggaacaagatgtgaaggaaaatgaggccttgctgctccgattcaagtattacagcttttttgatttgaatccaaagtatgatgcaatcagaatcaatcagctttacgagcaggccaaatgggccattctcctggaagagattgaatgcacagaagaagaaatgatgatgtttgcagccctgcagtatcatatcaataagctgtcaatcatgacatcagagaatcatttgaacaacagtgacaaagaagttgatgaagttgatgctgccctttcagacctggagattactctggaagggggtaaaacgtcaacaattttgggtgacattacttccattcctgaacttgctgactacattaaagttttcaagccaaaaaagctgactctgaaaggttacaaacaatattggtgcaccttcaaagacacatccatttcttgttataagagcaaagaagaatccagtggcacaccagctcatcagatgaacctcaggggatgtgaagttaccccagatgtaaacatttcaggccaaaaatttaacattaaactcctgattccagttgcagaaggcatgaatgaaatctggcttcgttgtgacaatgaaaaacagtatgcacactggatggcagcctgcagattagcctccaaaggcaagaccatggcggacagttcttacaacttagaagttcagaatattctttcctttctgaagatgcagcatttaaacccagatcctcagttaataccagagcagatcacgactgatataactcctgaatgtttggtgtctccccgctatctaaaaaagtataagaacaagcagccaggctatataagagatttgataacagcgagaatcttggaggcccatcagaatgtagctcagatgagtctaattgaagccaagatgagatttattcaagcttggcagtcactacctgaatttggcatcactcacttcattgcaaggttccaagggggcaaaaaagaagaacttattggaattgcatacaacagactgattcggatggatgccagcactggagatgcaattaaaacatggcgtttcagcaacatgaaacagtggaatgtcaactgggaaatcaaaatggtcaccgtagagtttgcagatgaagtacgattgtccttcatttgtactgaagtagattgcaaagtggttcatgaattcattggtggctacatatttctctcaacacgtgcaaaagaccaaaacgagagtttagatgaagagatgttctacaaacttaccagtggttgggtgtgaatagaaatactgtttaatgaaactccacggccataacaatatttaactttaaaagctgtttgttatatgctgcttaataaagtaagcttgaaatttatcattttatcatgaaaacttctttgccttaccagaccagttaatatgtgcactaaacaagcacgactattaatctatcatgttatgatataataaacttgaatttggcacacattccttagggccatgaattgaaaactgaaatagtgggcaaatcaggaacaaaccatcactgatttactgatttaagctagccaaactgtaagaaacaagccatctattttaaagctatccagggcttaacctatatgaactctatttatcatgtctaatgcatgtgatttaatgtatgtttaatttgatatcatgttttaaaatatcctacttctggtagccatttaattcctccccctacccccaaataaatcaggcatgcaggaggcctgatatttagtaatgtcattgtgtttgaccttgaaggaaaatgctattagtccgtcgtgcttgatttgtttttgtccttgaataagcatgttatgtatattgtctcgtgtttttatttttacaccatattgtattacacttttagtattcaccagcataatcactgtctgcctaaaatatgcaactctttgcattacaatatgaagtaaagttctatgaagtatgcattttgtgtaactaatgtaaaaacacaaattttataaaattgtacagttttttaaaaactactcacaactagcagatggcttaaatgtagcaatctctgcgttaattaaatgcctttaagagatataattaacgtgcagttttaatatctactaaattaagaatgacttcattatgatcatgatttgccacaatgtccttaactctaatgcctggactggccatgttctagtctgttgcgctgttacaatctgtattggtgctagtcagaaaattcctagctcacatagcccaaaagggtgcgagggagaggtggattaccagtattgttcaataatccatggttcaaagactgtataaatgcattttattttaaataaaagcaaaacttttatttaataaatattttt

SEQ ID NO: 330213 - DNA, 1616 bp, Homo sapiens
tcgaggctgacctagaggatccccaaacaccgcaatctaaaaaagtataagaacaagcagataacagcgagaatcttggaggcccatcagaatgtagctcagatgagtctaattgaagccaagatgagatttattcaagcttggcagtcactacctgaatttggcatcactcacttcattgcaaggttccaagggggcaaaaaagaagaacttattggaattgcatacaacagactgattcggatggatgccagcactggagatgcaattaaaacatggcgtttcagcaacatgaaacagtggaatgtcaactgggaaatcaaaatggtcaccgtagagtttgcagatgaagtacgattgtccttcatttgtactgaagtagattgcaaagtggttcatgaattcattggtggctacatatttctctcaacacgtgcaaaagaccaaaacgagagtttagatgaagagatgttctacaaacttaccagtggttgggtgtgaatagaaatactgtttaatgaaactccacggccataacaatatttaactttaaaagctgtttgttatatgctgcttaataaagtaagcttgaaatttatcattttatcatgaaaacttctttgccttaccagaccagttaatatgtgcactaaacaagcacgactattaatctatcatgttatgatataataaacttgaatttggcacacattccttagggccatgaattgaaaactgaaatagtgggcaaatcaggaacaaaccatcactgatttactgatttaagctagccaaactgtaagaaacaagccatctattttaaagctatccagggcttaacctatatgaactctatttatcatgtctaatgcatgtgatttaatgtatgtttaatttgatatcatgttttaaaatatcctacttctggtagccatttaattcctccccctacccccaaataaatcaggcatgcaggaggcctgatatttagtaatgtcattgtgtttgaccttgaaggaaaatgctattagtccgtcgtgcttgatttgtttttgtccttgaataagcatgttatgtatattgtctcgtgtttttatttttacaccatattgtattacacttttagtattcaccagcataatcactgtctgcctaaaatatgcaactctttgcattacaatatgaagtaaagttctatgaagtatgcattttgtgtaactaatgtaaaaacacaaattttataaaattgtacagttttttaaaaactactcacaactagcagatggcttaaatgtagcaatctctgcgttaattaaatgcctttaagagatataattaacgtgcagttttaatatctactaaattaagaatgacttcattatgatcatgatttgccacaatgtccttaactctaatgcctggactggccatgttctagtctgttgcgctgttacaatctgtattggtgctagtcagaaaattcctagctcacatagcccaaaagggtgcgagggagaggtggattaccagtattgttcaataatccatggttcaaagactgtataaatgcattttattttaaataaaagcaaaacttttatttaataaatattttt

SEQ ID NO: 330214 - DNA, 2409 bp, Homo sapiens
aggagggagccagcgcgcccagcccagccaggctcggacagagggggcggggagagggtggagcgcggggagccaggcgaggggccgcgacgacgggactccattagccgctccggccacaggcagcgcttcgccagccgaggaaccggacgcggacaccgccgccccgcgagcctccagcccctcgcctgttgccgcgcgagtcccgggcccggagcgctaggagcgcgcggaaggagccatggctctggacgggataaggatgccagatggctgctacgcggacgggacgtgggaactgagtgtccatgtgacggacctgaaccgcgatgtcaccctgagagtgaccggcgaggtgcacattggaggcgtgatgcttaagctggtggagaaactcgatgtaaaaaaagattggtctgaccatgctctctggtgggaaaagaagagaacttggcttctgaagacacattggaccttagataagtatggtattcaggcagatgctaagcttcagttcacccctcagcacaaactgctccgcctgcagcttcccaacatgaagtatgtgaaggtgaaagtgaatttctctgatagagtcttcaaagctgtttctgacatctgtaagacttttaatatcagacaccccgaagaactttctctcttaaagaaacccagagatccaacaaagaaaaaaaagaagaagctagatgaccagtctgaagatgaggcacttgaattagaggggcctcttatcactcctggatcaggaagtatatattcaagcccaggactgtatagtaaaacaatgacccccacttatgatgctcatgatggaagccccttgtcaccaacttctgcttggtttggtgacagtgctttgtcagaaggcaatcctggtatacttgctgtcagtcaaccaatcacgtcaccagaaatcttggcaaaaatgttcaagcctcaagctcttcttgataaagcaaaaatcaaccaaggatggcttgattcctcaagatctctcatggaacaagatgtgaaggaaaatgaggccttgctgctccgattcaagtattacagcttttttgatttgaatccaaagtatgatgcaatcagaatcaatcagctttacgagcaggccaaatgggccattctcctggaagagattgaatgcacagaagaagaaatgatgatgtttgcagccctgcagtatcatatcaataagctgtcaatcatgacatcagagaatcatttgaacaacagtgacaaagaagttgatgaagttgatgctgccctttcagacctggagattactctggaagggggtaaaacgtcaacaattttgggtgacattacttccattcctgaacttgctgactacattaaagttttcaagccaaaaaagctgactctgaaaggttacaaacaatattggtgcaccttcaaagacacatccatttcttgttataagagcaaagaagaatccagtggcacaccagctcatcagatgaacctcaggggatgtgaagttaccccagatgtaaacatttcaggccaaaaatttaacattaaactcctgattccagttgcagaaggcatgaatgaaatctggcttcgttgtgacaatgaaaaacagtatgcacactggatggcagcctgcagattagcctccaaaggcaagaccatggcggacagttcttacaacttagaagttcagaatattctttcctttctgaagatgcagcatttaaacccagatcctcagttaataccagagcagatcacgactgatataactcctgaatgtttggtgtctccccgctatctaaaaaagtataagaacaagcagccaggctatataagagatttggtaagttctccatatttaccacaaaagaaaaagaataaataaaaattcatagccacaaccttccctcatggaatttaccccagtagtgaaatttaaatttaaaatagaaatgattatggtgatttcaagtaccttaaagctgctaacaaatattcctgctagaaacatgtattccaggtattcattctgattatagacatagtgctaaatttaattaaaactcgtgtatatgtggattagaatgtgctgttctgtaatagtagtaccgttaggtgtatgcatttggaatatgtctcaagtgtggcaactatgtactcctaatagtactttttgttgatatgaaaactgaaattaagacttattttgaaaaatccttatacattacattattacagtgtccaaatgtagcttcagatattttgatttcaactcttacaatatgattttggggtacggggtgcgtaattcaatcttttgatcttttgtctcagttctcccatgagagaataatgttcaatggtaaaggtgatgtttactcatgttta

SEQ ID NO: 330215 - DNA, 839 bp, Homo sapiens
aggagggagccagcgcgcccagcccagccaggctcggacagagggggcggggagagggtggagcgcggggagccaggcgaggggccgcgacgacgggactccattagccgctccggccacaggcagcgcttcgccagccgaggaaccggacgcggacaccgccgccccgcgagcctccagcccctcgcctgttgccgcgcgagtcccgggcccggagcgctaggagcgcgcggaaggagccatggctctggacgggataaggatgccagatggctgctacgcggacgggacgtgggaactgagtgtccatgtgacggacctgaaccgcgatgtcaccctgagagtgaccggcgaggtgcacattggaggcgtgatgcttaagctggtggagaaactcgatgtaaaaaaagattggtctgaccatgctctctggtgggaaaagaagagaacttggcttctgaagacacattggaccttagataagtatggtattcaggcagatgctaagcttcagttcacccctcagcacaaactgctccgcctgcagcttcccaacatgaagtatgtgaaggtgaaagtgaatttctctgatagagtcttcaaagctgtttctgacatctgtaagacttttaatatcagacaccccgaagaactttctctcttaaagaaacccagagatccaacaaagaaaaaaaagaagaagctagatgaccagtctgaagatgaggcacttgaattagaggggcctcttatcactcctggatcaggaagtatatattcagccccggactgtatgtaaccatgacccccaccgagagagctcggatcctcagatcgac

SEQ ID NO: 330216 - DNA, 793 bp, Homo sapiens
acagcacataccattataaacgccacacgtaacccattcatctcctgaaatttatgtcagaaagattggaaataaaatctatattaacagcaagtgcttaatatcaagatgcggtattaaaaataacaaaaattttcattcctgtaatactaagaggctctcttaactccatttaacagacacacagtgccacctatcagccatcctctgtaactgcaggtgcaaggtaaagaaccgctcatagacatgccttcccctctccctgctatttacatgccaaagaccaccacaggttaagaggacagccctattagaagcccctgctgtttctatattgtgttcttgaaaagttttacttccttaggaactggagctttttactgctgaactgaacccagagattgcaatcccagcgaagtctgaacaaatctatgtctaaaatacgggctgttatgatacccaacagtgtcctaggagaaatccaagccaatctccaggtccagccctcaacagccgcctgatgggaagagacataacaattaatggcaaatttcttacaaggattacccacacgtcttctttcctctaactacctcctcttcggcctgcaactgctgtgatttggcctctgcccagcttctctcacaaggctgctcacccctgtgtggtgaacccaagggctacctcttgaccctcatcctgtgtgacctctcagtgccacttaacagggccccctggcttctagagttttctttctcttctcaggcgactccttcttgacttccgtgacagt

SEQ ID NO: 330217 - DNA, 382 bp, Homo sapiens
ccctccaacaaacatgccttttcccttaccttgctttttttaaattgtattcatcactgtctagcatattatttattgtttgtcgtccctgcctgtagtaaccccactccatcctgcagccccaagaatgtaacctccatgaggccagagattatttttcttttattcactgctgtattccaagaacctggaacagtgtctgtagcaggtgctcaaatatgtttaccagaaggaatgataggtcatgtgggaccctcaagtttggggttcattttttagtcactcagaatagtactgatctgtctgcccatgttgtcatacacacagtcacagcatggcagcaatggggtactaactagaaagagccatgaatttaggtttt

SEQ ID NO: 330218 - DNA, 1917 bp, Homo sapiens
tccccgtgcgcacgcgcgaacgcggggtgggccgggcctcgcgtagcccatctcctcttcctcctcgcggtcgcggccggacggagggtggagggccctgcgcctgcgcggagctggagtccggctgggccgcagccgctgggagaccggcggttgccgtggggaccggtcgggcccctccctcctccggtcccccgccccaggtccttccccaccgagacgcgccggcggaccgcgggcgagtgcagccggtgacccggcgagaggcggcgccgctcccaagatgtcgcagacggccatgtccgaaacctacgattttttgtttaagttcttggttattggaaatgcaggaactggcaaatcttgcttacttcatcagtttattgaaaaaaaattcaaagatgactcaaatcatacaataggagtggaatttggttcaaagataataaatgttggtggtaaatatgtaaagttacaaatatgggatacagcaggacaagaacgattcaggtccgtgacgagaagttattaccgaggcgcggccggggctctcctcgtctatgatatcaccagccgagaaacctacaatgcgcttactaattggttaacagatgcccgaatgctagcgagccagaacattgtgatcatcctttgtggaaacaagaaggacctggatgcagatcgtgaagttaccttcttagaagcctccagatttgctcaagaaaatgagctgatgtttttggaaacaagtgcgctcacaggggagaatgtagaagaggcttttgtacagtgtgcaagaaaaatacttaacaaaatcgaatcaggtgagctggacccagaaagaatgggctcaggtattcagtacggagatgctgccttgagacagctgaggtcaccgcggcgcgcacaggccccgaacgctcaggagtgtggttgttaggagagcacacaggtgttcatacagtggcatttgggacacaatcgttggaacctgaagaatctgaagttttttttaccaccatctttttctactctgtatggaagtagatctttatggggaaaagagaatttggggtgttctgcaagccagtcaaagtggcacagcaaatcatataaatcgaattaaatggacaacaccgttagatgtgtatgtaaaaattttctgtttcatatttttcctttcactttcggtttaaaacatgctatatgtactgtatgtcctgtagcccagtgcggctccacagcatggaatctgatgtatgatatgatagaatgtggcactaaatgcagtttcagattttattttttttaatcatatgaactaaaattgtcaattgtgaggtgtgcttttctcatcatgttggttatattgcacaattggttatatttatgacctgatattcaaagactctggcattgatagccagtgtgttttcttatttaactccgtttactacattctacatggtgtttacgtgatccacacttgaaatactagatcagtagacattcactaatataccaaaataaaatgaaaaattgagtttttccgtgaactttatactgtccagctctgttgattttaaagcctcttcatccaggtcagttcaggaagtatatctggagtacctgctctgtttttggctgtgagactagcactaaggattctggtacctttacccaaacctactgggctactaatacttctctcagcagttgatcaaatacaatagaccatgtaagctggggccgctcatccacttccagtttgctggtctccctgctagaaaacacattgtactgtgctttttctggaattcagtataatggcatcactgcctgtttttcacatcttttgtttcctgttcattttaaggaaacctactaaatccagttaatattaaatggacaccactc

SEQ ID NO: 330219 - DNA, 2658 bp, Homo sapiens
tccccgtgcgcacgcgcgaacgcggggtgggccgggcctcgcgtagcccatctcctcttcctcctcgcggtcgcggccggacggagggtggagggccctgcgcctgcgcggagctggagtccggctgggccgcagccgctgggagaccggcggttgccgtggggaccggtcgggcccctccctcctccggtcccccgccccaggtccttccccaccgagacgcgccggcggaccgcgggcgagtgcagccggtgacccggcgagaggcggcgccgctcccaagatgtcgcagacggccatgtccgaaacctacgattttttgtttaagttcttggttattggaaatgcaggaactggcaaatcttgcttacttcatcagtttattgaaaaaaaattcaaagatgactcaaatcatacaataggagtggaatttggttcaaagataataaatgttggtggtaaatatgtaaagttacaaatatgggatacagcaggacaagaacgattcaggtccgtgacgagaagttattaccgaggcgcggccggggctctcctcgtctatgatatcaccagccgagaaacctacaatgcgcttactaattggttaacagatgcccgaatgctagcgagccagaacattgtgatcatcctttgtggaaacaagaaggacctggatgcagatcgtgaagttaccttcttagaagcctccagatttgctcaagaaaatgagctgatgtttttggaaacaagtgcgctcacaggggagaatgtagaagaggcttttgtacagtgtgcaagaaaaatacttaacaaaatcgaatcaggtgagctggacccagaaagaatgggctcaggtattcagtacggagatgctgccttgagacagctgaggtcaccgcggcgcgcacaggccccgaacgctcaggagtgtggttgttaggagagcacacaggtgttcatacagtggcatttgggacacaatcgttggaacctgaagaatctgaagttttttttaccaccatctttttctactctgtatggaagtagatctttatggggaaaagagaatttggggtgttctgcaagccagtcaaagtggcacagcaaatcatataaatcgaattaaatggacaacaccgttagatgtgtatgtaaaaattttctgtttcatatttttcctttcactttcggtttaaaacatgctatatgtactgtatgtcctgtagcccagtgcggctccacagcatggaatctgatgtatgatatgatagaatgtggcactaaatgcagtttcagattttattttttttaatcatatgaactaaaattgtcaattgtgaggtgtgcttttctcatcatgttggttatattgcacaattggttatatttatgacctgatattcaaagactctggcattgatagccagtgtgttttcttatttaactccgtttactacattctacatggtgtttacgtgatccacacttgaaatactagatcagtagacattcactaatataccaaaataaaatgaaaaattgagtttttccgtgaactttatactgtccagctctgttgattttaaagcctcttcatccaggtcagttcaggaagtatatctggagtacctgctctgtttttggctgtgagactagcactaaggattctggtacctttacccaaacctactgggctactaatacttctctcagcagttgatcaaatacaatagaccatgtaagctggggccgctcatccacttccagtttgctggtctccctgctagaaaacacattgtactgtgctttttctggaattcagtataatggcatcactgcctgtttttcacatcttttgtttcctgttcattttaaggaaacctactaaatccagttaatattaaatggacaccactcattaagaaatttctttatggcttctgctgaatacttaaatgccttactacagttatccagttgacatgtttttaattcatataaggtatattgggtatattgaagtatatattgtattacaaagacttgttcttgtattttaaaatgtcagtgcaaaaaatatatggtggaacctttctttaaagttgaaatgcagtattatttaaatctgaaaggttaaaaagctttcttcaccttatatatgttcttccactgtgactttttagttgaagactagtaaattaacttttagttagaagatgcctactgcttttgttgtttattttaatcagcagagcacagagacacataaaaactctgggaaatgactaggataaaaatatcagtatgtatctgttttagatattttgagttttgctttttttatgccttgaatattttatttcaaaaagtatctgaagcaaattctcagactgaactacttcttagacctcactgtaagaatattttattcaatgtctcatttatgatagatttgcaagctgctcatttttgaacagctttttgcatgggataggagcatgtctattctaacacatcagcttattcaaaagcaagaattttaaaaataagataaatgtaaagttgttttataaacgatcctgttaattaaaccacagacaccatatatccttctgcatcctttggccaataaaagttgctggagaaccaaaaaaaaat

SEQ ID NO: 330220 - DNA, 2734 bp, Homo sapiens
tccccgtgcgcacgcgcgaacgcggggtgggccgggcctcgcgtagcccatctcctcttcctcctcgcggtcgcggccggacggagggtggagggccctgcgcctgcgcggagctggagtccggctgggccgcagccgctgggagaccggcggttgccgtggggaccggtcgggcccctccctcctccggtcccccgccccaggtccttccccaccgagacgcgccggcggaccgcgggcgagtgcagccggtgacccggcgagaggcggcgccgctcccaagatgtcgcagacggccatgtccgaaacctacgagaactcctaccgattcttttgtttaacgttctttgcgcttactctgcgcaactgcacggaacctggcccaacactcttttggcctttacctttccctccacgctttttaccttttcgaaccacacaacaccttttcccacacggactgaccttccaaagttcactaccaacctagcgacgctgcgcactttggcttcaaaagcataataaatgttggtggtaaatatgtaaagttacaaatatgggatacagcaggacaagaacgattcaggtccgtgacgagaagttattaccgaggcgcggccggggctctcctcgtctatgatatcaccagccgagaaacctacaatgcgcttactaattggttaacagatgcccgaatgctagcgagccagaacattgtgatcatcctttgtggaaacaagaaggacctggatgcagatcgtgaagttaccttcttagaagcctccagatttgctcaagaaaatgagctgatgtttttggaaacaagtgcgctcacaggggagaatgtagaagaggcttttgtacagtgtgcaagaaaaatacttaacaaaatcgaatcaggtgagctggacccagaaagaatgggctcaggtattcagtacggagatgctgccttgagacagctgaggtcaccgcggcgcgcacaggccccgaacgctcaggagtgtggttgttaggagagcacacaggtgttcatacagtggcatttgggacacaatcgttggaacctgaagaatctgaagttttttttaccaccatctttttctactctgtatggaagtagatctttatggggaaaagagaatttggggtgttctgcaagccagtcaaagtggcacagcaaatcatataaatcgaattaaatggacaacaccgttagatgtgtatgtaaaaattttctgtttcatatttttcctttcactttcggtttaaaacatgctatatgtactgtatgtcctgtagcccagtgcggctccacagcatggaatctgatgtatgatatgatagaatgtggcactaaatgcagtttcagattttattttttttaatcatatgaactaaaattgtcaattgtgaggtgtgcttttctcatcatgttggttatattgcacaattggttatatttatgacctgatattcaaagactctggcattgatagccagtgtgttttcttatttaactccgtttactacattctacatggtgtttacgtgatccacacttgaaatactagatcagtagacattcactaatataccaaaataaaatgaaaaattgagtttttccgtgaactttatactgtccagctctgttgattttaaagcctcttcatccaggtcagttcaggaagtatatctggagtacctgctctgtttttggctgtgagactagcactaaggattctggtacctttacccaaacctactgggctactaatacttctctcagcagttgatcaaatacaatagaccatgtaagctggggccgctcatccacttccagtttgctggtctccctgctagaaaacacattgtactgtgctttttctggaattcagtataatggcatcactgcctgtttttcacatcttttgtttcctgttcattttaaggaaacctactaaatccagttaatattaaatggacaccactcattaagaaatttctttatggcttctgctgaatacttaaatgccttactacagttatccagttgacatgtttttaattcatataaggtatattgggtatattgaagtatatattgtattacaaagacttgttcttgtattttaaaatgtcagtgcaaaaaatatatggtggaacctttctttaaagttgaaatgcagtattatttaaatctgaaaggttaaaaagctttcttcaccttatatatgttcttccactgtgactttttagttgaagactagtaaattaacttttagttagaagatgcctactgcttttgttgtttattttaatcagcagagcacagagacacataaaaactctgggaaatgactaggataaaaatatcagtatgtatctgttttagatattttgagttttgctttttttatgccttgaatattttatttcaaaaagtatctgaagcaaattctcagactgaactacttcttagacctcactgtaagaatattttattcaatgtctcatttatgatagatttgcaagctgctcatttttgaacagctttttgcatgggataggagcatgtctattctaacacatcagcttattcaaaagcaagaattttaaaaataagataaatgtaaagttgttttataaacgatcctgttaattaaaccacagacaccatatatccttctgcatcctttggccaataaaagttgctggagaaccaaaaaaaaat

SEQ ID NO: 330221 - DNA, 2424 bp, Homo sapiens
tccccgtgcgcacgcgcgaacgcggggtgggccgggcctcgcgtagcccatctcctcttcctcctcgcggtcgcggccggacggagggtggagggccctgcgcctgcgcggagctggagtccggctgggccgcagccgctgggagaccggcggttgccgtggggaccggtcgggcccctccctcctccggtcccccgccccaggtccttccccaccgagacgcgccggcggaccgcgggcgagtgcagccggtgacccggcgagaggcggcgccgctcccaagatgtcgcagacggccatgtccgaaacctacggtccgtgacgagaagttattaccgaggcgcggccggggctctcctcgtctatgatatcaccagatgcccgaatgctagcgagccagaacattgtgatcatcctttgtggaaacaagaaggacctggatgcagatcgtgaagttaccttcttagaagcctccagatttgctcaagaaaatgagctgatgtttttggaaacaagtgcgctcacaggggagaatgtagaagaggcttttgtacagtgtgcaagaaaaatacttaacaaaatcgaatcaggtgagctggacccagaaagaatgggctcaggtattcagtacggagatgctgccttgagacagctgaggtcaccgcggcgcgcacaggccccgaacgctcaggagtgtggttgttaggagagcacacaggtgttcatacagtggcatttgggacacaatcgttggaacctgaagaatctgaagttttttttaccaccatctttttctactctgtatggaagtagatctttatggggaaaagagaatttggggtgttctgcaagccagtcaaagtggcacagcaaatcatataaatcgaattaaatggacaacaccgttagatgtgtatgtaaaaattttctgtttcatatttttcctttcactttcggtttaaaacatgctatatgtactgtatgtcctgtagcccagtgcggctccacagcatggaatctgatgtatgatatgatagaatgtggcactaaatgcagtttcagattttattttttttaatcatatgaactaaaattgtcaattgtgaggtgtgcttttctcatcatgttggttatattgcacaattggttatatttatgacctgatattcaaagactctggcattgatagccagtgtgttttcttatttaactccgtttactacattctacatggtgtttacgtgatccacacttgaaatactagatcagtagacattcactaatataccaaaataaaatgaaaaattgagtttttccgtgaactttatactgtccagctctgttgattttaaagcctcttcatccaggtcagttcaggaagtatatctggagtacctgctctgtttttggctgtgagactagcactaaggattctggtacctttacccaaacctactgggctactaatacttctctcagcagttgatcaaatacaatagaccatgtaagctggggccgctcatccacttccagtttgctggtctccctgctagaaaacacattgtactgtgctttttctggaattcagtataatggcatcactgcctgtttttcacatcttttgtttcctgttcattttaaggaaacctactaaatccagttaatattaaatggacaccactcattaagaaatttctttatggcttctgctgaatacttaaatgccttactacagttatccagttgacatgtttttaattcatataaggtatattgggtatattgaagtatatattgtattacaaagacttgttcttgtattttaaaatgtcagtgcaaaaaatatatggtggaacctttctttaaagttgaaatgcagtattatttaaatctgaaaggttaaaaagctttcttcaccttatatatgttcttccactgtgactttttagttgaagactagtaaattaacttttagttagaagatgcctactgcttttgttgtttattttaatcagcagagcacagagacacataaaaactctgggaaatgactaggataaaaatatcagtatgtatctgttttagatattttgagttttgctttttttatgccttgaatattttatttcaaaaagtatctgaagcaaattctcagactgaactacttcttagacctcactgtaagaatattttattcaatgtctcatttatgatagatttgcaagctgctcatttttgaacagctttttgcatgggataggagcatgtctattctaacacatcagcttattcaaaagcaagaattttaaaaataagataaatgtaaagttgttttataaacgatcctgttaattaaaccacagacaccatatatccttctgcatcctttggccaataaaagttgctggagaaccaaaaaaaaat

SEQ ID NO: 330222 - DNA, 1911 bp, Homo sapiens
caaatgtctccctttaactttttaaagcttcttcttttttcccatttaccacagtggacgttttatttatagtcgacatcatgtagtaggcacaggcaagtgttaaaagacaagatattcacgaattctcttttaggctttaagctgtatttacttttgcatttatagttatgcagattttgaaattgttcttaatattttttaggtgttcatacagtggcatttgggacacaatcgttggaacctgaagaatctgaagttttttttaccaccatctttttctactctgtatggaagtagatctttatggggaaaagagaatttggggtgttctgcaagccagtcaaagtggcacagcaaatcatataaatcgaattaaatggacaacaccgttagatgtgtatgtaaaaattttctgtttcatatttttcctttcactttcggtttaaaacatgctatatgtactgtatgtcctgtagcccagtgcggctccacagcatggaatctgatgtatgatatgatagaatgtggcactaaatgcagtttcagattttattttttttaatcatatgaactaaaattgtcaattgtgaggtgtgcttttctcatcatgttggttatattgcacaattggttatatttatgacctgatattcaaagactctggcattgatagccagtgtgttttcttatttaactccgtttactacattctacatggtgtttacgtgatccacacttgaaatactagatcagtagacattcactaatataccaaaataaaatgaaaaattgagtttttccgtgaactttatactgtccagctctgttgattttaaagcctcttcatccaggtcagttcaggaagtatatctggagtacctgctctgtttttggctgtgagactagcactaaggattctggtacctttacccaaacctactgggctactaatacttctctcagcagttgatcaaatacaatagaccatgtaagctggggccgctcatccacttccagtttgctggtctccctgctagaaaacacattgtactgtgctttttctggaattcagtataatggcatcactgcctgtttttcacatcttttgtttcctgttcattttaaggaaacctactaaatccagttaatattaaatggacaccactcattaagaaatttctttatggcttctgctgaatacttaaatgccttactacagttatccagttgacatgtttttaattcatataaggtatattgggtatattgaagtatatattgtattacaaagacttgttcttgtattttaaaatgtcagtgcaaaaaatatatggtggaacctttctttaaagttgaaatgcagtattatttaaatctgaaaggttaaaaagctttcttcaccttatatatgttcttccactgtgactttttagttgaagactagtaaattaacttttagttagaagatgcctactgcttttgttgtttattttaatcagcagagcacagagacacataaaaactctgggaaatgactaggataaaaatatcagtatgtatctgttttagatattttgagttttgctttttttatgccttgaatattttatttcaaaaagtatctgaagcaaattctcagactgaactacttcttagacctcactgtaagaatattttattcaatgtctcatttatgatagatttgcaagctgctcatttttgaacagctttttgcatgggataggagcatgtctattctaacacatcagcttattcaaaagcaagaattttaaaaataagataaatgtaaagttgttttataaacgatcctgttaattaaaccacagacaccatatatccttctgcatcctttggccaataaaagttgctggagaaccaaaaaaaaat

SEQ ID NO: 330223 - DNA, 973 bp, Homo sapiens
tccccgtgcgcacgcgcgaacgcggggtgggccgggcctcgcgtagcccatctcctcttcctcctcgcggtcgcggccggacggagggtggagggccctgcgcctgcgcggagctggagtccggctgggccgcagccgctgggagaccggcggttgccgtggggaccggtcgggcccctccctcctccggtcccccgccccaggtccttccccaccgagacgcgccggcggaccgcgggcgagtgcagccggtgacccggcgagaggcggcgccgctcccaagatgtcgcagacggccatgtccgaaacctacgattttttgtttaagttcttggttattggaaatgcaggaactggcaaatcttgcttacttcatcagtttattgaaaaaaaattcaaagatgactcaaatcatacaataggagtggaatttggttcaaagataataaatgttggtggtaaatatgtaaagttacaaatatgggatacagcaggacaagaacgattcaggtccgtgacgagaagttattaccgaggcgcggccggggctctcctcgtctatgatatcaccagccgagaaacctacaatgcgcttactaattggttaacagatgcccgaatgctagcgagccagaacattgtgatcatcctttgtggaaacaagaaggacctggatgcagatcgtgaagttaccttcttagaagcctccagatttgctcaagaaaatgagctgatgtttttggaaacaagtgcgctcacaggggagaatgtagaagaggcttttgtacagtgtgcaagaaaaatacttaacaaaatcgaatcaggtgagctggacccagaaagaatgggctcaggtattcagtacggagatgctgccttgagacagctgaggtcaccgcggcgcgcacaggccccgaacgctcaggagtgtggttgttaggagagcacacaggtgggtttggacacctccctg

SEQ ID NO: 330224 - DNA, 1204 bp, Homo sapiens
tccccgtgcgcacgcgcgaacgcggggtgggccgggcctcgcgtagcccatctcctcttcctcctcgcggtcgcggccggacggagggtggagggccctgcgcctgcgcggagctggagtccggctgggccgcagccgctgggagaccggcggttgccgtggggaccggtcgggcccctccctcctccggtcccccgccccaggtccttccccaccgagacgcgccggcggaccgcgggcgagtgcagccggtgacccggcgagaggcggcgccgctcccaagatgtcgcagacggccatgtccgaaacctacgattttttgtttaagttcttggttattggaaatgcaggaactggcaaatcttgcttacttcatcagtttattgaaaaaaaattcaaagatgactcaaatcatacaataggagtggaatttggttcaaagataataaatgttggtggtaaatatgtaaagttacaaatatgggatacagcaggacaagaacgattcagccgcgcctcggtaataacttctcgtgacggacctgcattcgattgtggttacgtagatgggaaagtcagtattgcgcaggactggcgtactggaggcctctacatacttgctgaattgcatactctatccggggcagaagaaaagacatagaactggcgactgactatctgggatatgattacgcattgctccaggaaatgccttaccagaagtcctgcataccatgagtgatgcaagtccgtattggttgtgatagagcaaagcacagggtagccgtgtgccatggaggagacggatagtagatgatgaacgcatgtgcctgtatgagatgaccatctcgatgactattggacatcaaatgaaattatgagactgtactgaattcatgggtgaagcataggatgcgatcaacaagaggtgagaattggtgtatgcaggctacggggtaactgcgtgccgctatagcaagaacaaagctacgagagacaaaacaagtggaagctcgacacgtgaggacccggacaccgcggcaaggaaagtgtgggtcagggcaagtgacaagcaacggaagagttgtatgacattagaggagcgacagttggggggatcaccaggtcggtggggcaacccgggaacgaagatcttgatcaggcggaatgtagccaggaaacgggagatcaacaccacaggtgt

SEQ ID NO: 330225 - DNA, 1555 bp, Homo sapiens
tccccgtgcgcacgcgcgaacgcggggtgggccgggcctcgcgtagcccatctcctcttcctcctcgcggtcgcggccggacggagggtggagggccctgcgcctgcgcggagctggagtccggctgggccgcagccgctgggagaccggcggttgccgtggggaccggtcgggcccctccctcctccggtcccccgccccaggtccttccccaccgagacgcgccggcggaccgcgggcgagtgcagccggtgacccggcgagaggcggcgccgctcccaagatgtcgcagacggccatgtccgaaacctacgattttttgtttaagttcttggttattggaaatgcaggaactggcaaatcttgcttacttcatcagtttattgaaaaaaaattcaaagatgactcaaatcatacaataggagtggaatttggttcaaagataataaatgttggtggtaaatatgtaaagttacaaatatgggatacagcaggacaagaacgattcaggtccgtgacgagaagttattaccgaggcgcggccggggctctcctcgtctatgatatcaccagccgagaaacctacaatgcgcttactaattggttaacagatgcccgaatgctagcgagccagaacattgtgatcatcctttgtggaaacaagaaggacctggatgcagatcgtgaagttaccttcttagaagcctccagatttgctcaagaaaatgagctgatgtttttggaaacaagtgcgctcacaggggagaatgtagaagaggcttttgtacagtgtgcaagaaaaatacttaacaaaatcgaatcaggtgagctggacccagaaagaatgggctcaggtattcagtacggagatgctgccttgagacagctgaggtcaccgcggcgcgcacaggccccgaacgctcaggagtgtggttgttaggagagcacacaggtgttcatacagtggcatttgggacacaatcgttggaacctgaagaatctgaagttttttttaccaccatctttttctactctgtatggaagtagatctttatggggaaaagagaatttggggtgttctgcaagccagtcaaagtggcacagcaaatcatataaatcgaattaaatggacaacaccgttagatgtgtatgtaaaaattttctgtttcatatttttcctttcactttcggtttaaaacatgctatatgtactgtatgtcctgtagcccagtgcggctccacagcatggaatctgatgtatgatatgatagaatgtggcactaaatgcagtttcagattttattttttttaatcatatgaactaaaattgtcaattgtgaggtgtgcttttctcatcatgttggttatattgcacaattggttatatttatgacctgatattcaaagactctggcattgatagccagtgtgttttcttatttaactccgtttactacattctacatggtgtttacgtgatccacacttgaaatactagatcagtagacattcactaatataccaaaataaaatgaaaaattgagtttttccgtga

SEQ ID NO: 330226 - DNA, 2602 bp, Homo sapiens
tccccgtgcgcacgcgcgaacgcggggtgggccgggcctcgcgtagcccatctcctcttcctcctcgcggtcgcggccggacggagggtggagggccctgcgcctgcgcggagctggagtccggctgggccgcagccgctgggagaccggcggttgccgtggggaccggtcgggcccctccctcctccggtcccccgccccaggtccttccccaccgagacgcgccggcggaccgcgggcgagtgcagccggtgacccggcgagaggcggcgccgctcccaagatgtcgcagacggccatgtccgaaacctacgattttttgtttaagttcttggttattggaaatgcaggaactggcaaatcttgcttacttcatcagtttattgaaaaaaaattcaaagatgactcaaatcatacaataggagtggaatttggttcaaagataataaatgttggtggtaaatatgtaaagttacaaatatgggatacagcaggacaagaacgattcaggtccgtgacgagaagttattaccgaggcgcggccggggctctcctcgtctatgatatcaccagccgagaaacctacaatgcgcttactaattggttaacagatgcccgaatgctagcgagccagaacattgtgatcatcctttgtggaaacaagaaggacctggatgcagatcgtgaagttaccttcttagaagcctccagatttgctcaagaaaatgagctgatgtttttggaaacaagtgcgctcacaggggagaatgtagaagaggcttttgtacagtgtgcaagaaaaatacttaacaaaatcgaatcaggtgagctggacccagaaagaatgggctcaggtattcagtacggagatgctgccttgagacagctgaggtcaccgcggcgcgcacaggccccgaacgctcaggagtgtggttgttaggagagcacacaggtgttcatacagtggcatttgggacacaatcgttggaacctgaagaatctgaagttttttttaccaccatctttttctactctgtatggaagtagatctttatggggaaaagagaatttggggtgttctgcaagccagtcaaagtggcacagcaaatcatataaatcgaattaaatggacaacaccgttagatgtgtatgtaaaaattttctgtttcatatttttcctttcactttcggtttaaaacatgctatatgtactgtatgtcctgtagcccagtgcggctccacagcatggaatctgatgtatgatatgatagaatgtggcactaaatgcagtttcagattttattttttttaatcatatgaattggttatatttatgacctgatattcaaagactctggcattgatagccagtgtgttttcttatttaactccgtttactacattctacatggtgtttacgtgatccacacttgaaatactagatcagtagacattcactaatataccaaaataaaatgaaaaattgagtttttccgtgaactttatactgtccagctctgttgattttaaagcctcttcatccaggtcagttcaggaagtatatctggagtacctgctctgtttttggctgtgagactagcactaaggattctggtacctttacccaaacctactgggctactaatacttctctcagcagttgatcaaatacaatagaccatgtaagctggggccgctcatccacttccagtttgctggtctccctgctagaaaacacattgtactgtgctttttctggaattcagtataatggcatcactgcctgtttttcacatcttttgtttcctgttcattttaaggaaacctactaaatccagttaatattaaatggacaccactcattaagaaatttctttatggcttctgctgaatacttaaatgccttactacagttatccagttgacatgtttttaattcatataaggtatattgggtatattgaagtatatattgtattacaaagacttgttcttgtattttaaaatgtcagtgcaaaaaatatatggtggaacctttctttaaagttgaaatgcagtattatttaaatctgaaaggttaaaaagctttcttcaccttatatatgttcttccactgtgactttttagttgaagactagtaaattaacttttagttagaagatgcctactgcttttgttgtttattttaatcagcagagcacagagacacataaaaactctgggaaatgactaggataaaaatatcagtatgtatctgttttagatattttgagttttgctttttttatgccttgaatattttatttcaaaaagtatctgaagcaaattctcagactgaactacttcttagacctcactgtaagaatattttattcaatgtctcatttatgatagatttgcaagctgctcatttttgaacagctttttgcatgggataggagcatgtctattctaacacatcagcttattcaaaagcaagaattttaaaaataagataaatgtaaagttgttttataaacgatcctgttaattaaaccacagacaccatatatccttctgcatcctttggccaataaaagttgctggagaaccaaaaaaaaat

SEQ ID NO: 330227 - DNA, 2620 bp, Homo sapiens
tccccgtgcgcacgcgcgaacgcggggtgggccgggcctcgcgtagcccatctcctcttcctcctcgcggtcgcggccggacggagggtggagggccctgcgcctgcgcggagctggagtccggctgggccgcagccgctgggagaccggcggttgccgtggggaccggtcgggcccctccctcctccggtcccccgccccaggtccttccccaccgagacgcgccggcggaccgcgggcgagtgcagccggtgacccggcgagaggcggcgccgctcccaagatgtcgcagacggccatgtccgaaacctacgattttttgtttaagttcttggttattggaaatgcaggaactggcaaatcttgcttacttcatcagtttattgaaaaaaaattcaaagatgactcaaatcatacaataggagtggaatttggttcaaagataataaatgttggtggtaaatatgtaaagttacaaatatgggatacagcaggacaagaacgattcaggtccgtgacgagaagttattaccgaggcgcggccggggctctcctcgtctatgatatcaccagatgcccgaatgctagcgagccagaacattgtgatcatcctttgtggaaacaagaaggacctggatgcagatcgtgaagttaccttcttagaagcctccagatttgctcaagaaaatgagctgatgtttttggaaacaagtgcgctcacaggggagaatgtagaagaggcttttgtacagtgtgcaagaaaaatacttaacaaaatcgaatcaggtgagctggacccagaaagaatgggctcaggtattcagtacggagatgctgccttgagacagctgaggtcaccgcggcgcgcacaggccccgaacgctcaggagtgtggttgttaggagagcacacaggtgttcatacagtggcatttgggacacaatcgttggaacctgaagaatctgaagttttttttaccaccatctttttctactctgtatggaagtagatctttatggggaaaagagaatttggggtgttctgcaagccagtcaaagtggcacagcaaatcatataaatcgaattaaatggacaacaccgttagatgtgtatgtaaaaattttctgtttcatatttttcctttcactttcggtttaaaacatgctatatgtactgtatgtcctgtagcccagtgcggctccacagcatggaatctgatgtatgatatgatagaatgtggcactaaatgcagtttcagattttattttttttaatcatatgaactaaaattgtcaattgtgaggtgtgcttttctcatcatgttggttatattgcacaattggttatatttatgacctgatattcaaagactctggcattgatagccagtgtgttttcttatttaactccgtttactacattctacatggtgtttacgtgatccacacttgaaatactagatcagtagacattcactaatataccaaaataaaatgaaaaattgagtttttccgtgaactttatactgtccagctctgttgattttaaagcctcttcatccaggtcagttcaggaagtatatctggagtacctgctctgtttttggctgtgagactagcactaaggattctggtacctttacccaaacctactgggctactaatacttctctcagcagttgatcaaatacaatagaccatgtaagctggggccgctcatccacttccagtttgctggtctccctgctagaaaacacattgtactgtgctttttctggaattcagtataatggcatcactgcctgtttttcacatcttttgtttcctgttcattttaaggaaacctactaaatccagttaatattaaatggacaccactcattaagaaatttctttatggcttctgctgaatacttaaatgccttactacagttatccagttgacatgtttttaattcatataaggtatattgggtatattgaagtatatattgtattacaaagacttgttcttgtattttaaaatgtcagtgcaaaaaatatatggtggaacctttctttaaagttgaaatgcagtattatttaaatctgaaaggttaaaaagctttcttcaccttatatatgttcttccactgtgactttttagttgaagactagtaaattaacttttagttagaagatgcctactgcttttgttgtttattttaatcagcagagcacagagacacataaaaactctgggaaatgactaggataaaaatatcagtatgtatctgttttagatattttgagttttgctttttttatgccttgaatattttatttcaaaaagtatctgaagcaaattctcagactgaactacttcttagacctcactgtaagaatattttattcaatgtctcatttatgatagatttgcaagctgctcatttttgaacagctttttgcatgggataggagcatgtctattctaacacatcagcttattcaaaagcaagaattttaaaaataagataaatgtaaagttgttttataaacgatcctgttaattaaaccacagacaccatatatccttctgcatcctttggccaataaaagttgctggagaaccaaaaaaaaat

SEQ ID NO: 330228 - DNA, 2530 bp, Homo sapiens
tccccgtgcgcacgcgcgaacgcggggtgggccgggcctcgcgtagcccatctcctcttcctcctcgcggtcgcggccggacggagggtggagggccctgcgcctgcgcggagctggagtccggctgggccgcagccgctgggagaccggcggttgccgtggggaccggtcgggcccctccctcctccggtcccccgccccaggtccttccccaccgagacgcgccggcggaccgcgggcgagtgcagccggtgacccggcgagaggcggcgccgctcccaagatgtcgcagacggccatgtccgaaacctacgattttttgtttaagttcttggttattggaaatgcaggaactggcaaatcttgcttacttcatcagtttattgaaaaaaaattcaaagatgactcaaatcatacaataggagtggaatttggttcaaagataataaatgttggtggtaaatatgtaaagttacaaatatgggatacagcaggacaagaacgattcaggtccgtgacgagaagttattaccgaggcgcggccggggctctcctcgtctatgatatcaccagccgagaaacctacaatgcgcttactaattggttaacagatgcccgaatgctagcgagccagaacattgtgatcatcctttgtggaaacaagaaggacctggatgcagatcgtgaagttaccttcttagaagcctccagatttgctcaagaaaatgagctgatgtttttggaaacaagtgcgctcacaggggagaatgtagaagaggcttttgtacagtgtgcaagaaaaatacttaacaaaatcgaatcaggtgttcatacagtggcatttgggacacaatcgttggaacctgaagaatctgaagttttttttaccaccatctttttctactctgtatggaagtagatctttatggggaaaagagaatttggggtgttctgcaagccagtcaaagtggcacagcaaatcatataaatcgaattaaatggacaacaccgttagatgtgtatgtaaaaattttctgtttcatatttttcctttcactttcggtttaaaacatgctatatgtactgtatgtcctgtagcccagtgcggctccacagcatggaatctgatgtatgatatgatagaatgtggcactaaatgcagtttcagattttattttttttaatcatatgaactaaaattgtcaattgtgaggtgtgcttttctcatcatgttggttatattgcacaattggttatatttatgacctgatattcaaagactctggcattgatagccagtgtgttttcttatttaactccgtttactacattctacatggtgtttacgtgatccacacttgaaatactagatcagtagacattcactaatataccaaaataaaatgaaaaattgagtttttccgtgaactttatactgtccagctctgttgattttaaagcctcttcatccaggtcagttcaggaagtatatctggagtacctgctctgtttttggctgtgagactagcactaaggattctggtacctttacccaaacctactgggctactaatacttctctcagcagttgatcaaatacaatagaccatgtaagctggggccgctcatccacttccagtttgctggtctccctgctagaaaacacattgtactgtgctttttctggaattcagtataatggcatcactgcctgtttttcacatcttttgtttcctgttcattttaaggaaacctactaaatccagttaatattaaatggacaccactcattaagaaatttctttatggcttctgctgaatacttaaatgccttactacagttatccagttgacatgtttttaattcatataaggtatattgggtatattgaagtatatattgtattacaaagacttgttcttgtattttaaaatgtcagtgcaaaaaatatatggtggaacctttctttaaagttgaaatgcagtattatttaaatctgaaaggttaaaaagctttcttcaccttatatatgttcttccactgtgactttttagttgaagactagtaaattaacttttagttagaagatgcctactgcttttgttgtttattttaatcagcagagcacagagacacataaaaactctgggaaatgactaggataaaaatatcagtatgtatctgttttagatattttgagttttgctttttttatgccttgaatattttatttcaaaaagtatctgaagcaaattctcagactgaactacttcttagacctcactgtaagaatattttattcaatgtctcatttatgatagatttgcaagctgctcatttttgaacagctttttgcatgggataggagcatgtctattctaacacatcagcttattcaaaagcaagaattttaaaaataagataaatgtaaagttgttttataaacgatcctgttaattaaaccacagacaccatatatccttctgcatcctttggccaataaaagttgctggagaaccaaaaaaaaat

SEQ ID NO: 330229 - DNA, 778 bp, Homo sapiens
tccccgtgcgcacgcgcgaacgcggggtgggccgggcctcgcgtagcccatctcctcttcctcctcgcggtcgcggccggacggagggtggagggccctgcgcctgcgcggagctggagtccggctgggccgcagccgctgggagaccggcggttgccgtggggaccggtcgggcccctccctcctccggtcccccgccccaggtccttccccaccgagacgcgccggcggaccgcgggcgagtgcagccggtgacccggcgagaggcggcgccgctcccaagatgtcgcagacggccatgtccgaaacctacgattttttgtttaagttcttggttattggaaatgcaggaactggcaaatcttgcttacttcatcagtttattgaaaaaaaattcaaagatgactcaaatcatacaataggagtggaatttggttcaaagataataaatgttggtggtaaatatgtaaagttacaaatatgggatacagcaggacaagaacgattcagaaacttcatttttggaaactttgattgacaagacagctaaaatttaggttagctctctgcagcatggattactaaagaatacaggaggatctccgcgcaactgcattataattcggaggctgacccattctcaggaggatgtggcactgtgtattgtacagtatgtttctagattcaaatcaaagcacaagcttgtttttctgtgttccttttttaaagaagaactttttaaaaccttgtgagggtttgttttgttttacattaacta

SEQ ID NO: 330230 - DNA, 525 bp, Homo sapiens
gtagcagccagcctaggattctttgttctgtccaaatagtccatgccaggatcatctatagccagcctcaactctgcctggcatctcagcgccagacggatcctggcctgtctagagtttccttaggtgccttcttctttaccttatgcctccaggcagccttccctggcttggtagccacttcactgcccaatgtatgagcccaaaaggaggagggcagaggccactcccaacttcagccagccaaggtaggattcctttgccatcttcagggcctcatagtgctgtgagaggtgcttctctcctggtcctgaaagtgagtcccacactactccatgctgtgcagcctctggacttgcctactgtttggattgctcatggctggccttagatttctctcctattggtccttaagaaacaagattgattgtgttttacacattttttcagtgaatcagaagacatcaaagaaggcataacatggtgtggcactgtgatgaagagcacaggttctaggatcacacc

SEQ ID NO: 330231 - DNA, 457 bp, Homo sapiens
cctcccaaagtgctgggattacaggtgtgagccatcgcacccagtctcagtgtagatttctaagttcaaattcacattctcagaacttttgcagttattattccattgtctctagtatccagtgttgctagtgagaagtctggtgccagtttgagtttgattccaattcttttatagatgacttgtattttcctttctgaaagcattgaggaatattctgtttatcttttgattacttgaaatttcaaaggatgtgtctgttgtgggacgtttgtcattcatcctttcaggactctaggacttttttaacctggagatttgagtacttctttagcttggggaaattttcctttgatatttctttgataatatcttccttttaattttttctattatctctggatttctgttcatcagatggtagacctcatagattggtcatctttttctcctatat

SEQ ID NO: 330232 - DNA, 370 bp, Homo sapiens
gctgtttcaaatccacatgctttgtgtatagattttgtctcctcctcctgtttaaaaaatattgaatcctttgtaaaatttatctctggagacaaaggctaatgagccattgtctaaaagagctgagcagaatcttgttatctgctcattcaaccccttcatgtcacaaatgggacagggggagaaatggcatatctgaaatttacaaagaaaaaaatggcacatctgaactttacataagaaatggcatatctgaaatttacaaacttacatttacatgagtggtgccacaaccaagatacattgactcacagcatcttttatgaatgaaggagaaaagagtgtctgctgtattctgtcacttccaccc

SEQ ID NO: 330233 - DNA, 2576 bp, Homo sapiens
  misc_feature (27)..(27): n is a, c, g, or t
  misc_feature (29)..(29): n is a, c, g, or t
  misc_feature (262)..(262): n is a, c, g, or t
  misc_feature (2570)..(2571): n is a, c, g, or t
aaagcttgctagattaactattgatananaagcttaaataggtagtaaaccactaaatatgcaaggaagtgattatcagggttgtgaaggagaagaacaggtaagttaaatgggcattctgaggagtagaaatttcctttacttcataattatttgttaattcatctttatatgtttaatgggcttttctctattattttatatttttcaataaaagaaaaaagaatttaaaaaatcttggagctcactgggagcaatgggnttgcagctgaagtccaatagtacaaatgatgtggtaagaggccggcagggctgtgaattacagcaacaaaggagaaaaggaagtgattggagaattaagcaacatgaatggtattattcaaagacagctcattataggacacggaactccctgggtaggagtttgaagctttcttaactcagaaagaaacttccaacacagtttcccaaagaaaaatgggcaccaagggcaaagttattaaatgcaaagcagccatcgcctgggaagcaggcaagcccctttgcattgaagaggttgaagtagctccccccaaggctcatgaagttcgcattcagatcattgctacctccctgtgccatactgatgccactgttatcgattctaaatttgagggcctagctttcccagtgatcgttggccatgaggctgcaggtattgtggaaagtattgggccaggagtgaccaacgtcaaaccaggtgacaaagtaattccactttatgcacctctatgtagaaaatgcaagttttgtctgagtccactcacaaatttgtgtgggaaaatcagtaatctcaaaagtcctgctagtgatcaacaactaatggaagacaaaaccagcaggtttacctgcaaaggaaaaccagtttaccatttctttggaaccagtacattctctcagtacactgtggtgtcagatatcaatcttgccaaaatagatgatgatgcaaatttagagagagtttgtctgcttggatgtgggttttcaactggctatggggctgcaatcaacaatgccaaggtcacccctggttcgacttgtgctgtctttggcctaggaggtgtgggtctttctgctgtaatgggttgtaaagcagcaggagcttccagaatcataggtattgacatcaacagtgagaagtttgtgaaggctaaagccctgggagccactgactgcctcaatcctagagacttacataaacctatccaggaagttatcattgaattgaccaagggaggtgtggattttgcccttgactgtgcaggtggatctgaaaccatgaaagcagccctggactgtacaaccgcaggctggggatcatgtactttcattggagtagctgctggtagcaaaggattgactgtttttccagaggagctaataatcggccgtactataaatggaacattctttggtggttggaaaagtgtagattctatcccaaagctggtcactgactataagaataagaaattcaatctggatgcactggtgacccataccctgccttttgacaaaatcagtgaggcatttgacctaatgaaccaaggaaaaagcatccgaacaatcctcatcttttgaagatgccaggagcaattcggaatactatctgattgaatgtgaacctgcctggttaatttattacctgatttgatgaaccaaggaaagccatgcgtttaaacaaatatttacatttaatatgggaacataaaagagctttaaatattatagactttgtacctgttatatatatgaatattccctatgttaaataataataataactagtgtttatgaatagaatcatatcatctttagaaattgtttaaaattagttctgggaagttgaaagtggggaatgaagagataataaataaaactagattggccatatgtttataatttttttagattgggtaatgaatacatggagtttcattatacttttctctccacttttgtctatgttgaaaattttctgggagctaaatgatgagaacacatggacacatgatggggaacaacacacactagggcctgttgagggcagggagtcggcagagagagagcatcaggaagaatagctaatggatgctgggcttcatacctgggtgatgagatgatctgtgcagcaaagcaccatggtacatgtttacctatgtaacaaacctgcacatcctgcacatgtaccctggaacttaataaaagttggaaatttttaaaaagaatgaataagacctggtatttgatagcacaacagggagactatagtcaacagcaatttaattgtatattttaatatgactaaaagagtataatggattgtttgtaacacaaataaatgcttgaggggatggacaccccatattacatgatgtgattattacacattgcatgcctatatcaaaacatctcatgtaccccataaatatatacacctaatacccacaaaacttaaaatataaaatgttttaaataaaaataaagaaaagatttccacaataaaaagatttttactggaaaaaatcacnntattt

SEQ ID NO: 330234 - DNA, 794 bp, Homo sapiens
  misc_feature (27)..(27): n is a, c, g, or t
  misc_feature (29)..(29): n is a, c, g, or t
  misc_feature (262)..(262): n is a, c, g, or t
aaagcttgctagattaactattgatananaagcttaaataggtagtaaaccactaaatatgcaaggaagtgattatcagggttgtgaaggagaagaacaggtaagttaaatgggcattctgaggagtagaaatttcctttacttcataattatttgttaattcatctttatatgtttaatgggcttttctctattattttatatttttcaataaaagaaaaaagaatttaaaaaatcttggagctcactgggagcaatgggnttgcagctgaagtccaatagtacaaatgatgtggtaagaggccggcagggctgtgaattacagcaacaaaggagaaaaggaagtgattggagaattaagcaacatgaatggtattattcaaagacagctcattataggacacggaactccctgggtaggagtttgaagctttcttaactcagaaagaaacttccaacacagtttcccaaagaacaggcaagcccctttgcattgaagaggttgaagtagctccccccaaggctcatgaagttcgcattcagatcattgctacctccctgtgccatactgatgccactgttatcgattctaaatttgagggcctagctttcccagtgatcgttggccatgaggctgcaggtattgcgcatcgaatcctcccaggagagagcatcgccataccagccgacacagtagttccactctacccgactctgtctagcacatgccccataaccccctatcagctcccctcatcatgctcgtaccccacgtgtattcttcacctcgccgc

SEQ ID NO: 330235 - DNA, 2522 bp, Homo sapiens
  misc_feature (27)..(27): n is a, c, g, or t
  misc_feature (29)..(29): n is a, c, g, or t
  misc_feature (262)..(262): n is a, c, g, or t
  misc_feature (2516)..(2517): n is a, c, g, or t
aaagcttgctagattaactattgatananaagcttaaataggtagtaaaccactaaatatgcaaggaagtgattatcagggttgtgaaggagaagaacaggtaagttaaatgggcattctgaggagtagaaatttcctttacttcataattatttgttaattcatctttatatgtttaatgggcttttctctattattttatatttttcaataaaagaaaaaagaatttaaaaaatcttggagctcactgggagcaatgggnttgcagctgaagtccaatagtacaaatgatgtggtaagaggccggcagggctgtgaattacagcaacaaaggagaaaaggaagtgattggagaattaagcaacatgaatggtattattcaaagacagctcattataggacacggaactccctgggtaggagtttgaagctttcttaactcagaaagaaacttccaacacagtttcccaaagaaaaatgggcaccaagggcaaagttattaaatgcaaagcagccatcgcctgggaagcaggcaagcccctttgcattgaagaggttgaagtagctccccccaaggctcatgaagttcgcattcagatcattgctacctccctgtgccatactgatgccactgttatcgattctaaatttgagggcctagctttcccagtgatcgttggccatgaggctgcaggtattgtggaaagtattgggccaggagtgaccaacgtcaaaccaggtgacaaagtaattccactttatgcacctctatgtagaaaatgcaagttttgtctgagtccactcacaaatttgtgtgggaaaatcagtaatctcaaaagtcctgctagtgatcaacaactaatggaagacaaaaccagcaggtttacctgcaaaggaaaaccagtttaccatttctttggaaccagtacattctctcagtacactgtggtgtcagatatcaatcttgcctcaactggctatggggctgcaatcaacaatgccaaggtcacccctggttcgacttgtgctgtctttggcctaggaggtgtgggtctttctgctgtaatgggttgtaaagcagcaggagcttccagaatcataggtattgacatcaacagtgagaagtttgtgaaggctaaagccctgggagccactgactgcctcaatcctagagacttacataaacctatccaggaagttatcattgaattgaccaagggaggtgtggattttgcccttgactgtgcaggtggatctgaaaccatgaaagcagccctggactgtacaaccgcaggctggggatcatgtactttcattggagtagctgctggtagcaaaggattgactgtttttccagaggagctaataatcggccgtactataaatggaacattctttggtggttggaaaagtgtagattctatcccaaagctggtcactgactataagaataagaaattcaatctggatgcactggtgacccataccctgccttttgacaaaatcagtgaggcatttgacctaatgaaccaaggaaaaagcatccgaacaatcctcatcttttgaagatgccaggagcaattcggaatactatctgattgaatgtgaacctgcctggttaatttattacctgatttgatgaaccaaggaaagccatgcgtttaaacaaatatttacatttaatatgggaacataaaagagctttaaatattatagactttgtacctgttatatatatgaatattccctatgttaaataataataataactagtgtttatgaatagaatcatatcatctttagaaattgtttaaaattagttctgggaagttgaaagtggggaatgaagagataataaataaaactagattggccatatgtttataatttttttagattgggtaatgaatacatggagtttcattatacttttctctccacttttgtctatgttgaaaattttctgggagctaaatgatgagaacacatggacacatgatggggaacaacacacactagggcctgttgagggcagggagtcggcagagagagagcatcaggaagaatagctaatggatgctgggcttcatacctgggtgatgagatgatctgtgcagcaaagcaccatggtacatgtttacctatgtaacaaacctgcacatcctgcacatgtaccctggaacttaataaaagttggaaatttttaaaaagaatgaataagacctggtatttgatagcacaacagggagactatagtcaacagcaatttaattgtatattttaatatgactaaaagagtataatggattgtttgtaacacaaataaatgcttgaggggatggacaccccatattacatgatgtgattattacacattgcatgcctatatcaaaacatctcatgtaccccataaatatatacacctaatacccacaaaacttaaaatataaaatgttttaaataaaaataaagaaaagatttccacaataaaaagatttttactggaaaaaatcacnntattt

SEQ ID NO: 330236 - DNA, 2472 bp, Homo sapiens
  misc_feature (27)..(27): n is a, c, g, or t
  misc_feature (29)..(29): n is a, c, g, or t
  misc_feature (262)..(262): n is a, c, g, or t
  misc_feature (2466)..(2467): n is a, c, g, or t
aaagcttgctagattaactattgatananaagcttaaataggtagtaaaccactaaatatgcaaggaagtgattatcagggttgtgaaggagaagaacaggtaagttaaatgggcattctgaggagtagaaatttcctttacttcataattatttgttaattcatctttatatgtttaatgggcttttctctattattttatatttttcaataaaagaaaaaagaatttaaaaaatcttggagctcactgggagcaatgggnttgcagctgaagtccaatagtacaaatgatgtggtaagaggccggcagggctgtgaattacagcaacaaaggagaaaaggaagtgattggagaattaagcaacatgaatggtattattcaaagacagctcattataggacacggaactccctgggtaggagtttgaagctttcttaactcagaaagaaacttccaacacagtttcccaaagaaaaatgggcaccaagggcaaagttattaaatgcaaagcagccatcgcctgggaagcaggcaagcccctttgcattgaagaggttgaagtagctccccccaaggctcatgaagttcgcattcagatcattgctacctccctgtgccatactgatgccactgttatcgattctaaatttgagggcctagctttcccagtgatcgttggccatgaggctgcaggtattgtggaaagtattgggccaggagtgaccaacgtcaaaccaggtgacaaagtaattccactttatgcacctctatgtagaaaatgcaagttttgtctgagtccactcacaaatttgtgtgggaaaatcagtaatctcaaaagtcctgctagtgatcaacaactaatggaagacaaaaccagcaggtttacctgcaaaggaaaaccagtttaccatttctttggaaccagtacattctctcagtacactgtggtgtcagatatcaatcttgcctcaactggctatggggctgcaatcaacaatgccaaggtcacccctggttcgacttgtgctgtctttggcctaggaggtgtgggtctttctgctgtaatgggttgtaaagcagcaggagcttccagaatcataggtattgacatcaacagtgagaagtttgtgaaggctaaagccctgggagccactgactgcctcaatcctagagacttacataaacctatccaggaagttatcattgaattgaccaagggaggtgtggattttgcccttgactgtgcaggtggatctgaaaccatgaaagcagccctggactgtacaaccgcaggctggggatcatgtactttcattggagtagctgctggtagcaaaggattgactgtttttccagaggagctaataatcggccgtactataaatggaacattctttggtggttggaaaagtgtagattctatcccaaagctggtcactgactataagaataagaaattcaatctggatgcactggtgacccataccctgccttttgacaaaatcagtgaggcatttgacctaatgaaccaaggaaaaagtatctgattgaatgtgaacctgcctggttaatttattacctgatttgatgaaccaaggaaagccatgcgtttaaacaaatatttacatttaatatgggaacataaaagagctttaaatattatagactttgtacctgttatatatatgaatattccctatgttaaataataataataactagtgtttatgaatagaatcatatcatctttagaaattgtttaaaattagttctgggaagttgaaagtggggaatgaagagataataaataaaactagattggccatatgtttataatttttttagattgggtaatgaatacatggagtttcattatacttttctctccacttttgtctatgttgaaaattttctgggagctaaatgatgagaacacatggacacatgatggggaacaacacacactagggcctgttgagggcagggagtcggcagagagagagcatcaggaagaatagctaatggatgctgggcttcatacctgggtgatgagatgatctgtgcagcaaagcaccatggtacatgtttacctatgtaacaaacctgcacatcctgcacatgtaccctggaacttaataaaagttggaaatttttaaaaagaatgaataagacctggtatttgatagcacaacagggagactatagtcaacagcaatttaattgtatattttaatatgactaaaagagtataatggattgtttgtaacacaaataaatgcttgaggggatggacaccccatattacatgatgtgattattacacattgcatgcctatatcaaaacatctcatgtaccccataaatatatacacctaatacccacaaaacttaaaatataaaatgttttaaataaaaataaagaaaagatttccacaataaaaagatttttactggaaaaaatcacnntattt

SEQ ID NO: 330237 - DNA, 2468 bp, Homo sapiens
  misc_feature (27)..(27): n is a, c, g, or t
  misc_feature (29)..(29): n is a, c, g, or t
  misc_feature (262)..(262): n is a, c, g, or t
  misc_feature (2462)..(2463): n is a, c, g, or t
aaagcttgctagattaactattgatananaagcttaaataggtagtaaaccactaaatatgcaaggaagtgattatcagggttgtgaaggagaagaacaggtaagttaaatgggcattctgaggagtagaaatttcctttacttcataattatttgttaattcatctttatatgtttaatgggcttttctctattattttatatttttcaataaaagaaaaaagaatttaaaaaatcttggagctcactgggagcaatgggnttgcagctgaagtccaatagtacaaatgatgtggtaagaggccggcagggctgtgaattacagcaacaaaggagaaaaggaagtgattggagaattaagcaacatgaatggtattattcaaagacagctcattataggacacggaactccctgggtaggagtttgaagctttcttaactcagaaagaaacttccaacacagtttcccaaagaaaaatgggcaccaagggcaaagttattaaatgcaaagcagccatcgcctgggaagcaggcaagcccctttgcattgaagaggttgaagtagctccccccaaggctcatgaagttcgcattcagatcattgctacctccctgtgccatactgatgccactgttatcgattctaaatttgagggcctagctttcccagtgatcgttggccatgaggctgcaggtattgtggaaagtattgggccaggagtgaccaacgtcaaaccaggtgacaaagtaattccactttatgcacctctatgtagaaaatgcaagttttgtctgagtccactcacaaatttgtgtgggaaaatcagtaatctcaaaagtcctgctagtgatcaacaactaatggaagacaaaaccagcaggtttacctgcaaaggaaaaccagtttaccatttctttggaaccagtacattctctcagtacactgtggtgtcagatatcaatcttgcctcaactggctatggggctgcaatcaacaatgccaaggtcacccctggttcgacttgtgctgtctttggcctaggaggtgtgggtctttctgctgtaatgggttgtaaagcagcaggagcttccagaatcataggtattgacatcaacagtgagaagtttgtgaaggctaaagccctgggagccactgactgcctcaatcctagagacttacataaacctatccaggaagttatcattgaattgaccaagggaggtgtggattttgcccttgactgtgcaggtggatctgaaaccatgaaagcagccctggactgtacaaccgcaggctggggatcatgtactttcattggagtagctgctggtagcaaaggattgactgtttttccagaggagctaataatcggccgtactataaatggaacattctttggtggttggaaaagtgtagattctatcccaaagctggtcactgactataagaataagaaattcaatctggatgcactggtgacccataccctgccttttgacaaaatcagtgaggcatttgacctaatgaaccaaggaaaaagcatccgaacaatcctcatcttttgaagatgccaggagcaattcggaatactatctgattgaatgtgaacctgcctggttaatttattacctgatttgatgaaccaaggaaagccatgcgtttaaacaaatatttacatttaatatgggaacattatgttaaataataataataactagtgtttatgaatagaatcatatcatctttagaaattgtttaaaattagttctgggaagttgaaagtggggaatgaagagataataaataaaactagattggccatatgtttataatttttttagattgggtaatgaatacatggagtttcattatacttttctctccacttttgtctatgttgaaaattttctgggagctaaatgatgagaacacatggacacatgatggggaacaacacacactagggcctgttgagggcagggagtcggcagagagagagcatcaggaagaatagctaatggatgctgggcttcatacctgggtgatgagatgatctgtgcagcaaagcaccatggtacatgtttacctatgtaacaaacctgcacatcctgcacatgtaccctggaacttaataaaagttggaaatttttaaaaagaatgaataagacctggtatttgatagcacaacagggagactatagtcaacagcaatttaattgtatattttaatatgactaaaagagtataatggattgtttgtaacacaaataaatgcttgaggggatggacaccccatattacatgatgtgattattacacattgcatgcctatatcaaaacatctcatgtaccccataaatatatacacctaatacccacaaaacttaaaatataaaatgttttaaataaaaataaagaaaagatttccacaataaaaagatttttactggaaaaaatcacnntattt

SEQ ID NO: 330238 - DNA, 2526 bp, Homo sapiens
  misc_feature (27)..(27): n is a, c, g, or t
  misc_feature (29)..(29): n is a, c, g, or t
  misc_feature (262)..(262): n is a, c, g, or t
  misc_feature (2520)..(2521): n is a, c, g, or t
aaagcttgctagattaactattgatananaagcttaaataggtagtaaaccactaaatatgcaaggaagtgattatcagggttgtgaaggagaagaacaggtaagttaaatgggcattctgaggagtagaaatttcctttacttcataattatttgttaattcatctttatatgtttaatgggcttttctctattattttatatttttcaataaaagaaaaaagaatttaaaaaatcttggagctcactgggagcaatgggnttgcagctgaagtccaatagtacaaatgatgtggtaagaggccggcagggctgtgaattacagcaacaaaggagaaaaggaagtgattggagaattaagcaacatgaatggtattattcaaagacagctcattataggacacggaactccctgggtaggagtttgaagctttcttaactcagaaagaaacttccaacacagtttcccaaagaaaaatgggcaccaagggcaaagttattaaatgcaaagcagccatcgcctgggaagcaggcaagcccctttgcattgaagaggttgaagtagctccccccaaggctcatgaagttcgcattcagatcattgctacctccctgtgccatactgatgccactgttatcgattctaaatttgagggcctagctttcccagtgatcgttggccatgaggctgcaggtattgtggaaagtattgggccaggagtgaccaacgtcaaaccaggtgacaaagtaattccactttatgcacctctatgtagaaaatgcaagttttgtctgagtccactcacaaatttgtgtgggaaaatcagtaatctcaaaagtcctgctagtgatcaacaactaatggaagacaaaaccagcaggtttacctgcaaaggaaaaccagtttaccatttctttggaaccagtacattctctcagtacactgtggtgtcagatatcaatcttgccaaaatagatgatgatgcaaatttagagagagtttgtctgcttggatgtgggttttcaactggctatggggctgcaatcaacaatgccaaggtcacccctggttcgacttgtgctgtctttggcctaggaggtgtgggtctttctgctgtaatgggttgtaaagcagcaggagcttccagaatcataggtattgacatcaacagtgagaagtttgtgaaggctaaagccctgggagccactgactgcctcaatcctagagacttacataaacctatccaggaagttatcattgaattgaccaagggaggtgtggattttgcccttgactgtgcaggtggatctgaaaccatgaaagcagccctggactgtacaaccgcaggctggggatcatgtactttcattggagtagctgctggtagcaaaggattgactgtttttccagaggagctaataatcggccgtactataaatggaacattctttggtggttggaaaagtgtagattctatcccaaagctggtcactgactataagaataagaaattcaatctggatgcactggtgacccataccctgccttttgacaaaatcagtgaggcatttgacctaatgaaccaaggaaaaagtatctgattgaatgtgaacctgcctggttaatttattacctgatttgatgaaccaaggaaagccatgcgtttaaacaaatatttacatttaatatgggaacataaaagagctttaaatattatagactttgtacctgttatatatatgaatattccctatgttaaataataataataactagtgtttatgaatagaatcatatcatctttagaaattgtttaaaattagttctgggaagttgaaagtggggaatgaagagataataaataaaactagattggccatatgtttataatttttttagattgggtaatgaatacatggagtttcattatacttttctctccacttttgtctatgttgaaaattttctgggagctaaatgatgagaacacatggacacatgatggggaacaacacacactagggcctgttgagggcagggagtcggcagagagagagcatcaggaagaatagctaatggatgctgggcttcatacctgggtgatgagatgatctgtgcagcaaagcaccatggtacatgtttacctatgtaacaaacctgcacatcctgcacatgtaccctggaacttaataaaagttggaaatttttaaaaagaatgaataagacctggtatttgatagcacaacagggagactatagtcaacagcaatttaattgtatattttaatatgactaaaagagtataatggattgtttgtaacacaaataaatgcttgaggggatggacaccccatattacatgatgtgattattacacattgcatgcctatatcaaaacatctcatgtaccccataaatatatacacctaatacccacaaaacttaaaatataaaatgttttaaataaaaataaagaaaagatttccacaataaaaagatttttactggaaaaaatcacnntattt

SEQ ID NO: 330239 - DNA, 2440 bp, Homo sapiens
  misc_feature (27)..(27): n is a, c, g, or t
  misc_feature (29)..(29): n is a, c, g, or t
  misc_feature (262)..(262): n is a, c, g, or t
  misc_feature (2434)..(2435): n is a, c, g, or t
aaagcttgctagattaactattgatananaagcttaaataggtagtaaaccactaaatatgcaaggaagtgattatcagggttgtgaaggagaagaacaggtaagttaaatgggcattctgaggagtagaaatttcctttacttcataattatttgttaattcatctttatatgtttaatgggcttttctctattattttatatttttcaataaaagaaaaaagaatttaaaaaatcttggagctcactgggagcaatgggnttgcagctgaagtccaatagtacaaatgatgtggtaagaggccggcagggctgtgaattacagcaacaaaggagaaaaggaagtgattggagaattaagcaacatgaatggtattattcaaagacagctcattataggacacggaactccctgggtaggagtttgaagctttcttaactcagaaagaaacttccaacacagtttcccaaagaaaaatgggcaccaagggcaaagttattaaatgcaaagcagccatcgcctgggaagcaggcaagcccctttgcattgaagaggttgaagtagctccccccaaggctcatgaagttcgcattcagatcattgctacctccctgtgccatactgatgccactgttatcgattctaaatttgagggcctagctttcccagtgatcgttggccatgaggctgcaggtattgtggaaagtattgggccaggagtgaccaacgtcaaaccaggtgacaaagtaattccactttatgcacctctatgtagaaaatgcaagttttgtctgagtccactcacaaatttgtgtgggaaaatcagtaatctcaaaagtcctgctagtgatcaacaactaatggaagacaaaaccagcaggtttacctgcaaaggaaaaccagtttaccatttctttggaaccagtacattctctcagtacactgtggtgtcagatatcaatcttgccaaaatagatgatgatgcaaatttagagagagtttgtctgcttggatgtgggttttcaactggctatggggctgcaatcaacaatgccaaggtcacccctggttcgacttgtgctgtctttggcctaggaggtgtgggtctttctgctgtaatgggttgtaaagcagcaggagcttccagaatcataggtattgacatcaacagtgagaagtttgtgaaggctaaagccctgggagccactgactgcctcaatcctagagacttacataaacctatccaggaagttatcattgaattgaccaagggaggtgtggattttgcccttgactgtgcaggtggatctgaaaccatggttggaaaagtgtagattctatcccaaagctggtcactgactataagaataagaaattcaatctggatgcactggtgacccataccctgccttttgacaaaatcagtgaggcatttgacctaatgaaccaaggaaaaagcatccgaacaatcctcatcttttgaagatgccaggagcaattcggaatactatctgattgaatgtgaacctgcctggttaatttattacctgatttgatgaaccaaggaaagccatgcgtttaaacaaatatttacatttaatatgggaacataaaagagctttaaatattatagactttgtacctgttatatatatgaatattccctatgttaaataataataataactagtgtttatgaatagaatcatatcatctttagaaattgtttaaaattagttctgggaagttgaaagtggggaatgaagagataataaataaaactagattggccatatgtttataatttttttagattgggtaatgaatacatggagtttcattatacttttctctccacttttgtctatgttgaaaattttctgggagctaaatgatgagaacacatggacacatgatggggaacaacacacactagggcctgttgagggcagggagtcggcagagagagagcatcaggaagaatagctaatggatgctgggcttcatacctgggtgatgagatgatctgtgcagcaaagcaccatggtacatgtttacctatgtaacaaacctgcacatcctgcacatgtaccctggaacttaataaaagttggaaatttttaaaaagaatgaataagacctggtatttgatagcacaacagggagactatagtcaacagcaatttaattgtatattttaatatgactaaaagagtataatggattgtttgtaacacaaataaatgcttgaggggatggacaccccatattacatgatgtgattattacacattgcatgcctatatcaaaacatctcatgtaccccataaatatatacacctaatacccacaaaacttaaaatataaaatgttttaaataaaaataaagaaaagatttccacaataaaaagatttttactggaaaaaatcacnntattt

SEQ ID NO: 330240 - DNA, 2056 bp, Homo sapiens
  misc_feature (2050)..(2051): n is a, c, g, or t
tctccctcttccttttctttctctctttcgttattaaatgcaaagcagccatcgcctgggaagcaggcaagcccctttgcattgaagaggttgaagtagctccccccaaggctcatgaagttcgcattcagatcattgctacctccctgtgccatactgatgccactgttatcgattctaaatttgagggcctagctttcccagtgatcgttggccatgaggctgcaggtattgtggaaagtattgggccaggagtgaccaacgtcaaaccaggtgacaaagtaattccactttatgcacctctatgtagaaaatgcaagttttgtctgagtccactcacaaatttgtgtgggaaaatcagtaatctcaaaagtcctgctagtgatcaacaactaatggaagacaaaaccagcaggtttacctgcaaaggaaaaccagtttaccatttctttggaaccagtacattctctcagtacactgtggtgtcagatatcaatcttgcctcaactggctatggggctgcaatcaacaatgccaaggtcacccctggttcgacttgtgctgtctttggcctaggaggtgtgggtctttctgctgtaatgggttgtaaagcagcaggagcttccagaatcataggtattgacatcaacagtgagaagtttgtgaaggctaaagccctgggagccactgactgcctcaatcctagagacttacataaacctatccaggaagttatcattgaattgaccaagggaggtgtggattttgcccttgactgtgcaggtggatctgaaaccatgaaagcagccctggactgtacaaccgcaggctggggatcatgtactttcattggagtagctgctggtagcaaaggattgactgtttttccagaggagctaataatcggccgtactataaatggaacattctttggtggttggaaaagtgtagattctatcccaaagctggtcactgactataagaataagaaattcaatctggatgcactggtgacccataccctgccttttgacaaaatcagtgaggcatttgacctaatgaaccaaggaaaaagcatccgaacaatcctcatcttttgaagatgccaggagcaattcggaatactatctgattgaatgtgaacctgcctggttaatttattacctgatttgatgaaccaaggaaagccatgcgtttaaacaaatatttacatttaatatgggaacataaaagagctttaaatattatagactttgtacctgttatatatatgaatattccctatgttaaataataataataactagtgtttatgaatagaatcatatcatctttagaaattgtttaaaattagttctgggaagttgaaagtggggaatgaagagataataaataaaactagattggccatatgtttataatttttttagattgggtaatgaatacatggagtttcattatacttttctctccacttttgtctatgttgaaaattttctgggagctaaatgatgagaacacatggacacatgatggggaacaacacacactagggcctgttgagggcagggagtcggcagagagagagcatcaggaagaatagctaatggatgctgggcttcatacctgggtgatgagatgatctgtgcagcaaagcaccatggtacatgtttacctatgtaacaaacctgcacatcctgcacatgtaccctggaacttaataaaagttggaaatttttaaaaagaatgaataagacctggtatttgatagcacaacagggagactatagtcaacagcaatttaattgtatattttaatatgactaaaagagtataatggattgtttgtaacacaaataaatgcttgaggggatggacaccccatattacatgatgtgattattacacattgcatgcctatatcaaaacatctcatgtaccccataaatatatacacctaatacccacaaaacttaaaatataaaatgttttaaataaaaataaagaaaagatttccacaataaaaagatttttactggaaaaaatcacnntattt

SEQ ID NO: 330241 - DNA, 2662 bp, Homo sapiens
  misc_feature (27)..(27): n is a, c, g, or t
  misc_feature (29)..(29): n is a, c, g, or t
  misc_feature (262)..(262): n is a, c, g, or t
  misc_feature (2656)..(2657): n is a, c, g, or t
aaagcttgctagattaactattgatananaagcttaaataggtagtaaaccactaaatatgcaaggaagtgattatcagggttgtgaaggagaagaacaggtaagttaaatgggcattctgaggagtagaaatttcctttacttcataattatttgttaattcatctttatatgtttaatgggcttttctctattattttatatttttcaataaaagaaaaaagaatttaaaaaatcttggagctcactgggagcaatgggnttgcagctgaagtccaatagtacaaatgatgtggtaagaggccggcagggctgtgaattacagcaacaaaggagaaaaggaagtgattggagaattaagcaacatgaatggtattattcaaagacagctcattataggacacggaactccctgggtaggagtttgaagctttcttaactcagaaagaaacttccaacacagtttcccaaagaaaaatgggcaccaagggcaaaattttgatttagtggatttgaggcagggctttcatctctaacaaattcccaagtgatgtgaataaatgcttgtccgaggaccacacttcgagttgcagagatgtaaaacacatctattctccagcaattatctgactcaggttattaaatgcaaagcagccatcgcctgggaagcaggcaagcccctttgcattgaagaggttgaagtagctccccccaaggctcatgaagttcgcattcagatcattgctacctccctgtgccatactgatgccactgttatcgattctaaatttgagggcctagctttcccagtgatcgttggccatgaggctgcaggtattgtggaaagtattgggccaggagtgaccaacgtcaaaccaggtgacaaagtaattccactttatgcacctctatgtagaaaatgcaagttttgtctgagtccactcacaaatttgtgtgggaaaatcagtaatctcaaaagtcctgctagtgatcaacaactaatggaagacaaaaccagcaggtttacctgcaaaggaaaaccagtttaccatttctttggaaccagtacattctctcagtacactgtggtgtcagatatcaatcttgcctcaactggctatggggctgcaatcaacaatgccaaggtcacccctggttcgacttgtgctgtctttggcctaggaggtgtgggtctttctgctgtaatgggttgtaaagcagcaggagcttccagaatcataggtattgacatcaacagtgagaagtttgtgaaggctaaagccctgggagccactgactgcctcaatcctagagacttacataaacctatccaggaagttatcattgaattgaccaagggaggtgtggattttgcccttgactgtgcaggtggatctgaaaccatgaaagcagccctggactgtacaaccgcaggctggggatcatgtactttcattggagtagctgctggtagcaaaggattgactgtttttccagaggagctaataatcggccgtactataaatggaacattctttggtggttggaaaagtgtagattctatcccaaagctggtcactgactataagaataagaaattcaatctggatgcactggtgacccataccctgccttttgacaaaatcagtgaggcatttgacctaatgaaccaaggaaaaagcatccgaacaatcctcatcttttgaagatgccaggagcaattcggaatactatctgattgaatgtgaacctgcctggttaatttattacctgatttgatgaaccaaggaaagccatgcgtttaaacaaatatttacatttaatatgggaacataaaagagctttaaatattatagactttgtacctgttatatatatgaatattccctatgttaaataataataataactagtgtttatgaatagaatcatatcatctttagaaattgtttaaaattagttctgggaagttgaaagtggggaatgaagagataataaataaaactagattggccatatgtttataatttttttagattgggtaatgaatacatggagtttcattatacttttctctccacttttgtctatgttgaaaattttctgggagctaaatgatgagaacacatggacacatgatggggaacaacacacactagggcctgttgagggcagggagtcggcagagagagagcatcaggaagaatagctaatggatgctgggcttcatacctgggtgatgagatgatctgtgcagcaaagcaccatggtacatgtttacctatgtaacaaacctgcacatcctgcacatgtaccctggaacttaataaaagttggaaatttttaaaaagaatgaataagacctggtatttgatagcacaacagggagactatagtcaacagcaatttaattgtatattttaatatgactaaaagagtataatggattgtttgtaacacaaataaatgcttgaggggatggacaccccatattacatgatgtgattattacacattgcatgcctatatcaaaacatctcatgtaccccataaatatatacacctaatacccacaaaacttaaaatataaaatgttttaaataaaaataaagaaaagatttccacaataaaaagatttttactggaaaaaatcacnntattt

SEQ ID NO: 330242 - DNA, 2243 bp, Homo sapiens
  misc_feature (2237)..(2238): n is a, c, g, or t
gatagtttcatggtgtgaggacccagactacttcttggggaagaaacctgaggaaatatccccactgacatgaactccccaatttgcaaacgtgtcagtcacaacatatcagaaggaagttcaataaaaagaaaatacaagcattattttttaagctacaccatgtaaacttagtatataagccctgcaatgtattatacaacttcaatatccccataaggaatactcctcaagttaggagatagaggttgaagtggggtttgagcctcacacccttctattcatatcctcgaacacaaaccttttctcctagaattctcaattatggaatacattcataaggaatgctaagtggcagccaggtggctggtaatcagcctaggggtagacaccagagtgaggcctcctgctccttctctggcccactgagaataccacctgactgcccacacagatggaaaggtggcaatgaggaaggcagaagttgggcctcatcaggtgtgtccaccatatgggcacaggaagcacaagagagggcaggcccttctaccacccaactgcaaagaagcaaggaagtggggggaaggggatgggatacaatgactgactagcctgttgaggtgtagtgatcctgccccagagtgaggaaaggacacagagattctccttccacaggtaggggtgtcttccagtcctgggtgaagaaaacatttatgcatagcaccctgctcatagcaggggttccacagttccagcagtaatgtttgagataaggactgctctgtcgttgaggcttatccccctctttgtgtctacatgtggagttacccagaaataagaacatctgggttcttaaaaagtagcatcccaacacaccaactttgatgcccactccctccttcgatgctcaactttgccctcagctataggagatccgagaacagtgactattccaagactaaaacctgactccctccttggtacattctaattctcctcaacagcaccactgagtaacaaggacgctgcctaaggtaagtaagggtcctcaattccccccaagtttactagcacatgcataaaatattattaacaccatgaatggaagaggatgacgggataaaagaaattaggcttaataaagtgaatgtctataaaggaagaccagatcctgaaatgaaaaggcaaaacttatttgtgagctttggttaaatttatcatgaaaattacacttattaatgttttattgttattaacagcatcatccgaacaatcctcatcttttgaagatgccaggagcaattcggaatactatctgattgaatgtgaacctgcctggttaatttattacctgatttgatgaaccaaggaaagccatgcgtttaaacaaatatttacatttaatatgggaacataaaagagctttaaatattatagactttgtacctgttatatatatgaatattccctatgttaaataataataataactagtgtttatgaatagaatcatatcatctttagaaattgtttaaaattagttctgggaagttgaaagtggggaatgaagagataataaataaaactagattggccatatgtttataatttttttagattgggtaatgaatacatggagtttcattatacttttctctccacttttgtctatgttgaaaattttctgggagctaaatgatgagaacacatggacacatgatggggaacaacacacactagggcctgttgagggcagggagtcggcagagagagagcatcaggaagaatagctaatggatgctgggcttcatacctgggtgatgagatgatctgtgcagcaaagcaccatggtacatgtttacctatgtaacaaacctgcacatcctgcacatgtaccctggaacttaataaaagttggaaatttttaaaaagaatgaataagacctggtatttgatagcacaacagggagactatagtcaacagcaatttaattgtatattttaatatgactaaaagagtataatggattgtttgtaacacaaataaatgcttgaggggatggacaccccatattacatgatgtgattattacacattgcatgcctatatcaaaacatctcatgtaccccataaatatatacacctaatacccacaaaacttaaaatataaaatgttttaaataaaaataaagaaaagatttccacaataaaaagatttttactggaaaaaatcacnntattt

SEQ ID NO: 330243 - DNA, 2189 bp, Homo sapiens
  misc_feature (2183)..(2184): n is a, c, g, or t
gatagtttcatggtgtgaggacccagactacttcttggggaagaaacctgaggaaatatccccactgacatgaactccccaatttgcaaacgtgtcagtcacaacatatcagaaggaagttcaataaaaagaaaatacaagcattattttttaagctacaccatgtaaacttagtatataagccctgcaatgtattatacaacttcaatatccccataaggaatactcctcaagttaggagatagaggttgaagtggggtttgagcctcacacccttctattcatatcctcgaacacaaaccttttctcctagaattctcaattatggaatacattcataaggaatgctaagtggcagccaggtggctggtaatcagcctaggggtagacaccagagtgaggcctcctgctccttctctggcccactgagaataccacctgactgcccacacagatggaaaggtggcaatgaggaaggcagaagttgggcctcatcaggtgtgtccaccatatgggcacaggaagcacaagagagggcaggcccttctaccacccaactgcaaagaagcaaggaagtggggggaaggggatgggatacaatgactgactagcctgttgaggtgtagtgatcctgccccagagtgaggaaaggacacagagattctccttccacaggtaggggtgtcttccagtcctgggtgaagtaatgtttgagataaggactgctctgtcgttgaggcttatccccctctttgtgtctacatgtggagttacccagaaataagaacatctgggttcttaaaaagtagcatcccaacacaccaactttgatgcccactccctccttcgatgctcaactttgccctcagctataggagatccgagaacagtgactattccaagactaaaacctgactccctccttggtacattctaattctcctcaacagcaccactgagtaacaaggacgctgcctaaggtaagtaagggtcctcaattccccccaagtttactagcacatgcataaaatattattaacaccatgaatggaagaggatgacgggataaaagaaattaggcttaataaagtgaatgtctataaaggaagaccagatcctgaaatgaaaaggcaaaacttatttgtgagctttggttaaatttatcatgaaaattacacttattaatgttttattgttattaacagcatcatccgaacaatcctcatcttttgaagatgccaggagcaattcggaatactatctgattgaatgtgaacctgcctggttaatttattacctgatttgatgaaccaaggaaagccatgcgtttaaacaaatatttacatttaatatgggaacataaaagagctttaaatattatagactttgtacctgttatatatatgaatattccctatgttaaataataataataactagtgtttatgaatagaatcatatcatctttagaaattgtttaaaattagttctgggaagttgaaagtggggaatgaagagataataaataaaactagattggccatatgtttataatttttttagattgggtaatgaatacatggagtttcattatacttttctctccacttttgtctatgttgaaaattttctgggagctaaatgatgagaacacatggacacatgatggggaacaacacacactagggcctgttgagggcagggagtcggcagagagagagcatcaggaagaatagctaatggatgctgggcttcatacctgggtgatgagatgatctgtgcagcaaagcaccatggtacatgtttacctatgtaacaaacctgcacatcctgcacatgtaccctggaacttaataaaagttggaaatttttaaaaagaatgaataagacctggtatttgatagcacaacagggagactatagtcaacagcaatttaattgtatattttaatatgactaaaagagtataatggattgtttgtaacacaaataaatgcttgaggggatggacaccccatattacatgatgtgattattacacattgcatgcctatatcaaaacatctcatgtaccccataaatatatacacctaatacccacaaaacttaaaatataaaatgttttaaataaaaataaagaaaagatttccacaataaaaagatttttactggaaaaaatcacnntattt

SEQ ID NO: 330244 - DNA, 2203 bp, Homo sapiens
  misc_feature (2197)..(2198): n is a, c, g, or t
gatagtttcatggtgtgaggacccagactacttcttggggaagaaacctgaggaaatatccccactgacatgaactccccaatttgcaaacgtgtcagtcacaacatatcagaaggaagttcaataaaaagaaaatacaagcattattttttaagctacaccatgtaaacttagtatataagccctgcaatgtattatacaacttcaatatccccataaggaatactcctcaagttaggagatagaggttgaagtggggtttgagcctcacacccttctattcatatcctcgaacacaaaccttttctcctagaattctcaattatggaatacattcataaggaatgctaagtggcagccaggtggctggtaatcagcctaggggtagacaccagagtgaggcctcctgctccttctctggcccactgagaataccacctgactgcccacacagatggaaaggtggcaatgaggaaggcagaagttgggcctcatcaggtgtgtccaccatatgggcacaggaagcacaagagagggcaggcccttctaccacccaactgcaaagaagcaaggaagtggggggaaggggatgggatacaatgactgactagcctgttgaggtgtagtgatcctgccccagagtgaggaaaggacacagagattctccttccacaggtaggggtgtcttccagtcctgggtgaagaaaacatttatgcatagcaccctgctcatagcaggggttccacagttccagcagtaatgtttgagataaggactgctctgtcgttgaggcttatccccctctttgtgtctacatgtggagttacccagaaataagaacatctgggttcttaaaaagtagcatcccaacacaccaactttgatgcccactccctccttcgatgctcaactttgccctcagctataggagatccgagaacagtgactattccaagactaaaacctgactccctccttggtacattctaattctcctcaacagcaccactgagtaacaaggacgctgcctaaggtaagtaagggtcctcaattccccccaagtttactagcacatgcataaaatattattaacaccatgaatggaagaggatgacgggataaaagaaattaggcttaataaagtgaatgtctataaaggaagaccagatcctgaaatgaaaaggcaaaacttatttgtgagctttggttaaatttatcatgcatccgaacaatcctcatcttttgaagatgccaggagcaattcggaatactatctgattgaatgtgaacctgcctggttaatttattacctgatttgatgaaccaaggaaagccatgcgtttaaacaaatatttacatttaatatgggaacataaaagagctttaaatattatagactttgtacctgttatatatatgaatattccctatgttaaataataataataactagtgtttatgaatagaatcatatcatctttagaaattgtttaaaattagttctgggaagttgaaagtggggaatgaagagataataaataaaactagattggccatatgtttataatttttttagattgggtaatgaatacatggagtttcattatacttttctctccacttttgtctatgttgaaaattttctgggagctaaatgatgagaacacatggacacatgatggggaacaacacacactagggcctgttgagggcagggagtcggcagagagagagcatcaggaagaatagctaatggatgctgggcttcatacctgggtgatgagatgatctgtgcagcaaagcaccatggtacatgtttacctatgtaacaaacctgcacatcctgcacatgtaccctggaacttaataaaagttggaaatttttaaaaagaatgaataagacctggtatttgatagcacaacagggagactatagtcaacagcaatttaattgtatattttaatatgactaaaagagtataatggattgtttgtaacacaaataaatgcttgaggggatggacaccccatattacatgatgtgattattacacattgcatgcctatatcaaaacatctcatgtaccccataaatatatacacctaatacccacaaaacttaaaatataaaatgttttaaataaaaataaagaaaagatttccacaataaaaagatttttactggaaaaaatcacnntattt

SEQ ID NO: 330245 - DNA, 1277 bp, Homo sapiens
  misc_feature (46)..(46): n is a, c, g, or t
  misc_feature (1271)..(1272): n is a, c, g, or t
gtagggcgggaatggggggggggggggctggtaggtagtgggtcgntctggcaggtggatctgaaaccatgaaagcagccctggactgtacaaccgcaggctggggatcatgtactttcattggagtagctgctggtagcaaaggattgactgtttttccagaggagctaataatcggccgtactataaatggaacattctttggtggttggaaaagtgtagattctatcccaaagctggtcactgactataagaataagaaattcaatctggatgcactggtgacccataccctgccttttgacaaaatcagtgaggcatttgacctaatgaaccaaggaaaaagtatctgattgaatgtgaacctgcctggttaatttattacctgatttgatgaaccaaggaaagccatgcgtttaaacaaatatttacatttaatatgggaacataaaagagctttaaatattatagactttgtacctgttatatatatgaatattccctatgttaaataataataataactagtgtttatgaatagaatcatatcatctttagaaattgtttaaaattagttctgggaagttgaaagtggggaatgaagagataataaataaaactagattggccatatgtttataatttttttagattgggtaatgaatacatggagtttcattatacttttctctccacttttgtctatgttgaaaattttctgggagctaaatgatgagaacacatggacacatgatggggaacaacacacactagggcctgttgagggcagggagtcggcagagagagagcatcaggaagaatagctaatggatgctgggcttcatacctgggtgatgagatgatctgtgcagcaaagcaccatggtacatgtttacctatgtaacaaacctgcacatcctgcacatgtaccctggaacttaataaaagttggaaatttttaaaaagaatgaataagacctggtatttgatagcacaacagggagactatagtcaacagcaatttaattgtatattttaatatgactaaaagagtataatggattgtttgtaacacaaataaatgcttgaggggatggacaccccatattacatgatgtgattattacacattgcatgcctatatcaaaacatctcatgtaccccataaatatatacacctaatacccacaaaacttaaaatataaaatgttttaaataaaaataaagaaaagatttccacaataaaaagatttttactggaaaaaatcacnntattt

SEQ ID NO: 330246 - DNA, 944 bp, Homo sapiens
  misc_feature (27)..(27): n is a, c, g, or t
  misc_feature (29)..(29): n is a, c, g, or t
  misc_feature (262)..(262): n is a, c, g, or t
aaagcttgctagattaactattgatananaagcttaaataggtagtaaaccactaaatatgcaaggaagtgattatcagggttgtgaaggagaagaacaggtaagttaaatgggcattctgaggagtagaaatttcctttacttcataattatttgttaattcatctttatatgtttaatgggcttttctctattattttatatttttcaataaaagaaaaaagaatttaaaaaatcttggagctcactgggagcaatgggnttgcagctgaagtccaatagtacaaatgatgtggtaagaggccggcagggctgtgaattacagcaacaaaggagaaaaggaagtgattggagaattaagcaacatgaatggtattattcaaagacagctcattataggacacggaactccctgggtaggagtttgaagctttcttaactcagaaagaaacttccaacacagtttcccaaagaaaaatgggcaccaagggcaaaattttgatttagtggatttgaggcagggctttcatctctaacaaattcccaagtgatgtgaataaatgcttgtccgaggaccacacttcgagttgcagagatgtaaaacacatctattctccagcaattatctgactcaggttattaaatgcaaagcagccatcgcctgggaagcaggcaagcccctttgcattgaagaggttgaagtagctccccccaaggctcatgaagttcgcattcagtaatctcaaaagtcctgctagtgatcaacaactaatggaagacaaaaccagcaggtttacctgcaaaggaaaaccagtttaccatttctttggaaccagtacattctctcagtacactgtggtgtcagatatcaatcttgcctcaactggctatggggctgcaatcaacaatgccggtcacccctggttcgcttgtgctgtctttgg

SEQ ID NO: 330247 - DNA, 2469 bp, Homo sapiens
  misc_feature (27)..(27): n is a, c, g, or t
  misc_feature (29)..(29): n is a, c, g, or t
  misc_feature (262)..(262): n is a, c, g, or t
  misc_feature (2463)..(2464): n is a, c, g, or t
aaagcttgctagattaactattgatananaagcttaaataggtagtaaaccactaaatatgcaaggaagtgattatcagggttgtgaaggagaagaacaggtaagttaaatgggcattctgaggagtagaaatttcctttacttcataattatttgttaattcatctttatatgtttaatgggcttttctctattattttatatttttcaataaaagaaaaaagaatttaaaaaatcttggagctcactgggagcaatgggnttgcagctgaagtccaatagtacaaatgatgtggtaagaggccggcagggctgtgaattacagcaacaaaggagaaaaggaagtgattggagaattaagcaacatgaatggtattattcaaagacagctcattataggacacggaactccctgggtaggagtttgaagctttcttaactcagaaagaaacttccaacacagtttcccaaagaaaaatgggcaccaagggcaaagttattaaatgcaaagcagccatcgcctgggaagcaggcaagcccctttgcattgaagaggttgaagtagctccccccaaggctcatgaagttcgcattcagatcattgctacctccctgtgccatactgatgccactgttatcgattctaaatttgagggcctagctttcccagtgatcgttggccatgaggctgcaggtattgtggaaagtattgggccaggagtgaccaacgtcaaaccaggtgacaaagtaattccactttatgcacctctatgtagaaaatgcaagttttgtctgagtccactcacaaatttgtgtgggaaaatcagtaatctcaaaagtcctgctagtgatcaacaactaatggaagacaaaaccagcaggtttacctgcaaaggaaaaccagtttaccatttctttggaaccagtacattctctcagtacactgtggtgtcagatatcaatcttgcctcaactggctatggggctgcaatcaacaatgccaaggtcacccctggttcgacttgtgctgtctttggcctaggaggtgtgggtctttctgctgtaatgggttgtaaagcagcaggagcttccagaatcataggtattgacatcaacagtgagaagtttgtgaaggctaaagccctgggagccactgactgcctcaatcctagagacttacataaacctatccaggaagttatcattgaattgaccaagggaggtgtggattttgcccttgactgtgcaggtggatctgaaaccatgaaagcagccctggactgtacaaccgcaggctggggatcatgtactttcattggagtagctgctggtagcaaaggattgactgtttttccagaggagctaataatcggccgtactataaatggaacattctttggtggttggaaaagtgtagattctatcccaaagctggtcactgactataagaataagaaattcaatctggatgcactggtgacccataccctgccttttgacaaaatcagtgaggcatttgacctaatgaaccaaggaaaaagcatccgaacaatcctcatcttttgaagatgccaggagcaattcggaatactatctgattgaatgtgaacctgcctggttaatttattacctgatttgatgaaccaaggaaagccatgcgtttaaacaaatatttacatttaatatgggaacataaaagagctttaaatattatagactttgtacctgttatatatatgaatattccctatgttaaataataataataactagtgtttatgaatagaatcatatcatctttagaaattgtttaaaattagttctgggaagttgaaagtggggaatgaagagataataaataaaactagattggccatatgtttataatttttttagattgggtaatgaatacatggagtttcattatacttttctctccacttttgtctatgttgaaaattttctgggagctaaatgatgagaacacatggacacatgatggggaacaacacacactagggcctgttgagggcagggagtcggcagagagagagcatcaggaagaatagctaatggatgctgggcttcatacctgggtgatgagatgatctgtgcagcaaagcaccatggtacatgtttacctatgtaacaaacctgcacatcctgcacatgtaccctggaacttaataaaaggagactatagtcaacagcaatttaattgtatattttaatatgactaaaagagtataatggattgtttgtaacacaaataaatgcttgaggggatggacaccccatattacatgatgtgattattacacattgcatgcctatatcaaaacatctcatgtaccccataaatatatacacctaatacccacaaaacttaaaatataaaatgttttaaataaaaataaagaaaagatttccacaataaaaagatttttactggaaaaaatcacnntattt

SEQ ID NO: 330248 - DNA, 2386 bp, Homo sapiens
  misc_feature (27)..(27): n is a, c, g, or t
  misc_feature (29)..(29): n is a, c, g, or t
  misc_feature (262)..(262): n is a, c, g, or t
  misc_feature (2380)..(2381): n is a, c, g, or t
aaagcttgctagattaactattgatananaagcttaaataggtagtaaaccactaaatatgcaaggaagtgattatcagggttgtgaaggagaagaacaggtaagttaaatgggcattctgaggagtagaaatttcctttacttcataattatttgttaattcatctttatatgtttaatgggcttttctctattattttatatttttcaataaaagaaaaaagaatttaaaaaatcttggagctcactgggagcaatgggnttgcagctgaagtccaatagtacaaatgatgtggtaagaggccggcagggctgtgaattacagcaacaaaggagaaaaggaagtgattggagaattaagcaacatgaatggtattattcaaagacagctcattataggacacggaactccctgggtaggagtttgaagctttcttaactcagaaagaaacttccaacacagtttcccaaagaaaaatgggcaccaagggcaaagttattaaatgcaaagcagccatcgcctgggaagcaggcaagcccctttgcattgaagaggttgaagtagctccccccaaggctcatgaagttcgcattcagatcattgctacctccctgtgccatactgatgccactgttatcgattctaaatttgagggcctagctttcccagtgatcgttggccatgaggctgcaggtattgtggaaagtattgggccaggagtgaccaacgtcaaaccaggtgacaaagtaattccactttatgcacctctatgtagaaaatgcaagttttgtctgagtccactcacaaatttgtgtgggaaaatcagtaatctcaaaagtcctgctagtgatcaacaactaatggaagacaaaaccagcaggtttacctgcaaaggaaaaccagtttaccatttctttggaaccagtacattctctcagtacactgtggtgtcagatatcaatcttgcctcaactggctatggggctgcaatcaacaatgccaaggtcacccctggttcgacttgtgctgtctttggcctaggaggtgtgggtctttctgctgtaatgggttgtaaagcagcaggagcttccagaatcataggtattgacatcaacagtgagaagtttgtgaaggctaaagccctgggagccactgactgcctcaatcctagagacttacataaacctatccaggaagttatcattgaattgaccaagggaggtgtggattttgcccttgactgtgcaggtggatctgaaaccatggttggaaaagtgtagattctatcccaaagctggtcactgactataagaataagaaattcaatctggatgcactggtgacccataccctgccttttgacaaaatcagtgaggcatttgacctaatgaaccaaggaaaaagcatccgaacaatcctcatcttttgaagatgccaggagcaattcggaatactatctgattgaatgtgaacctgcctggttaatttattacctgatttgatgaaccaaggaaagccatgcgtttaaacaaatatttacatttaatatgggaacataaaagagctttaaatattatagactttgtacctgttatatatatgaatattccctatgttaaataataataataactagtgtttatgaatagaatcatatcatctttagaaattgtttaaaattagttctgggaagttgaaagtggggaatgaagagataataaataaaactagattggccatatgtttataatttttttagattgggtaatgaatacatggagtttcattatacttttctctccacttttgtctatgttgaaaattttctgggagctaaatgatgagaacacatggacacatgatggggaacaacacacactagggcctgttgagggcagggagtcggcagagagagagcatcaggaagaatagctaatggatgctgggcttcatacctgggtgatgagatgatctgtgcagcaaagcaccatggtacatgtttacctatgtaacaaacctgcacatcctgcacatgtaccctggaacttaataaaagttggaaatttttaaaaagaatgaataagacctggtatttgatagcacaacagggagactatagtcaacagcaatttaattgtatattttaatatgactaaaagagtataatggattgtttgtaacacaaataaatgcttgaggggatggacaccccatattacatgatgtgattattacacattgcatgcctatatcaaaacatctcatgtaccccataaatatatacacctaatacccacaaaacttaaaatataaaatgttttaaataaaaataaagaaaagatttccacaataaaaagatttttactggaaaaaatcacnntattt

SEQ ID NO: 330249 - DNA, 2514 bp, Homo sapiens
  misc_feature (27)..(27): n is a, c, g, or t
  misc_feature (29)..(29): n is a, c, g, or t
  misc_feature (262)..(262): n is a, c, g, or t
  misc_feature (2508)..(2509): n is a, c, g, or t
aaagcttgctagattaactattgatananaagcttaaataggtagtaaaccactaaatatgcaaggaagtgattatcagggttgtgaaggagaagaacaggtaagttaaatgggcattctgaggagtagaaatttcctttacttcataattatttgttaattcatctttatatgtttaatgggcttttctctattattttatatttttcaataaaagaaaaaagaatttaaaaaatcttggagctcactgggagcaatgggnttgcagctgaagtccaatagtacaaatgatgtggtaagaggccggcagggctgtgaattacagcaacaaaggagaaaaggaagtgattggagaattaagcaacatgaatggtattattcaaagacagctcattataggacacggaactccctgggtaggagtttgaagctttcttaactcagaaagaaacttccaacacagtttcccaaagaaaaatgggcaccaagggcaaagttattaaatgcaaagcagccatcgcctgggaagcaggcaagcccctttgcattgaagaggttgaagtagctccccccaaggctcatgaagttcgcattcagatcattgctacctccctgtgccatactgatgccactgttatcgattctaaatttgagggcctagctttcccagtgatcgttggccatgaggctgcaggtattgtggaaagtattgggccaggagtgaccaacgtcaaaccaggtgacaaagtaattccactttatgcacctctatgtagaaaatgcaagttttgtctgagtccactcacaaatttgtgtgggaaaatcagtaatctcaaaagtcctgctagtgatcaacaactaatggaagacaaaaccatacactgtggtgtcagatatcaatcttgccaaaatagatgatgatgcaaatttagagagagtttgtctgcttggatgtgggttttcaactggctatggggctgcaatcaacaatgccaaggtcacccctggttcgacttgtgctgtctttggcctaggaggtgtgggtctttctgctgtaatgggttgtaaagcagcaggagcttccagaatcataggtattgacatcaacagtgagaagtttgtgaaggctaaagccctgggagccactgactgcctcaatcctagagacttacataaacctatccaggaagttatcattgaattgaccaagggaggtgtggattttgcccttgactgtgcaggtggatctgaaaccatgaaagcagccctggactgtacaaccgcaggctggggatcatgtactttcattggagtagctgctggtagcaaaggattgactgtttttccagaggagctaataatcggccgtactataaatggaacattctttggtggttggaaaagtgtagattctatcccaaagctggtcactgactataagaataagaaattcaatctggatgcactggtgacccataccctgccttttgacaaaatcagtgaggcatttgacctaatgaaccaaggaaaaagcatccgaacaatcctcatcttttgaagatgccaggagcaattcggaatactatctgattgaatgtgaacctgcctggttaatttattacctgatttgatgaaccaaggaaagccatgcgtttaaacaaatatttacatttaatatgggaacataaaagagctttaaatattatagactttgtacctgttatatatatgaatattccctatgttaaataataataataactagtgtttatgaatagaatcatatcatctttagaaattgtttaaaattagttctgggaagttgaaagtggggaatgaagagataataaataaaactagattggccatatgtttataatttttttagattgggtaatgaatacatggagtttcattatacttttctctccacttttgtctatgttgaaaattttctgggagctaaatgatgagaacacatggacacatgatggggaacaacacacactagggcctgttgagggcagggagtcggcagagagagagcatcaggaagaatagctaatggatgctgggcttcatacctgggtgatgagatgatctgtgcagcaaagcaccatggtacatgtttacctatgtaacaaacctgcacatcctgcacatgtaccctggaacttaataaaagttggaaatttttaaaaagaatgaataagacctggtatttgatagcacaacagggagactatagtcaacagcaatttaattgtatattttaatatgactaaaagagtataatggattgtttgtaacacaaataaatgcttgaggggatggacaccccatattacatgatgtgattattacacattgcatgcctatatcaaaacatctcatgtaccccataaatatatacacctaatacccacaaaacttaaaatataaaatgttttaaataaaaataaagaaaagatttccacaataaaaagatttttactggaaaaaatcacnntattt

SEQ ID NO: 330250 - DNA, 2133 bp, Homo sapiens
  misc_feature (27)..(27): n is a, c, g, or t
  misc_feature (29)..(29): n is a, c, g, or t
  misc_feature (262)..(262): n is a, c, g, or t
  misc_feature (2127)..(2128): n is a, c, g, or t
aaagcttgctagattaactattgatananaagcttaaataggtagtaaaccactaaatatgcaaggaagtgattatcagggttgtgaaggagaagaacaggtaagttaaatgggcattctgaggagtagaaatttcctttacttcataattatttgttaattcatctttatatgtttaatgggcttttctctattattttatatttttcaataaaagaaaaaagaatttaaaaaatcttggagctcactgggagcaatgggnttgcagctgaagtccaatagtacaaatgatgtggtaagaggccggcagggctgtgaattacagcaacaaaggagaaaaggaagtgattggagaattaagcaacatgaatggtattattcaaagacagctcattataggacacggaactccctgggtaggagtttgaagctttcttaactcagaaagaaacttccaacacagtttcccaaagaaaaatgggcaccaagggcaaagttattaaatgcaaagcagccatcgcctgggaagcaggcaagcccctttgcattgaagaggttgaagtagctccccccaaggctcatgaagttcgcattcagatcattgctacctccctgtgccatactgatgccactgttatcgattctaaatttgagggcctagctttcccagtgatcgttggccatgaggctgcaggtattgtggaaagtattgggccaggagtgaccaacgtcaaaccaggtgacaaagtaattccactttatgcacctctatgtagaaaatgcaagttttgtctgagtccactcacaaatttgtgtgggaaaatcagtaatctcaaaagtcctgctagtgatcaacaactaatggaagacaaaaccaaaagcagccctggactgtacaaccgcaggctggggatcatgtactttcattggagtagctgctggtagcaaaggattgactgtttttccagaggagctaataatcggccgtactataaatggaacattctttggtggttggaaaagtgtagattctatcccaaagctggtcactgactataagaataagaaattcaatctggatgcactggtgacccataccctgccttttgacaaaatcagtgaggcatttgacctaatgaaccaaggaaaaagcatccgaacaatcctcatcttttgaagatgccaggagcaattcggaatactatctgattgaatgtgaacctgcctggttaatttattacctgatttgatgaaccaaggaaagccatgcgtttaaacaaatatttacatttaatatgggaacataaaagagctttaaatattatagactttgtacctgttatatatatgaatattccctatgttaaataataataataactagtgtttatgaatagaatcatatcatctttagaaattgtttaaaattagttctgggaagttgaaagtggggaatgaagagataataaataaaactagattggccatatgtttataatttttttagattgggtaatgaatacatggagtttcattatacttttctctccacttttgtctatgttgaaaattttctgggagctaaatgatgagaacacatggacacatgatggggaacaacacacactagggcctgttgagggcagggagtcggcagagagagagcatcaggaagaatagctaatggatgctgggcttcatacctgggtgatgagatgatctgtgcagcaaagcaccatggtacatgtttacctatgtaacaaacctgcacatcctgcacatgtaccctggaacttaataaaagttggaaatttttaaaaagaatgaataagacctggtatttgatagcacaacagggagactatagtcaacagcaatttaattgtatattttaatatgactaaaagagtataatggattgtttgtaacacaaataaatgcttgaggggatggacaccccatattacatgatgtgattattacacattgcatgcctatatcaaaacatctcatgtaccccataaatatatacacctaatacccacaaaacttaaaatataaaatgttttaaataaaaataaagaaaagatttccacaataaaaagatttttactggaaaaaatcacnntattt

SEQ ID NO: 330251 - DNA, 2526 bp, Homo sapiens
  misc_feature (27)..(27): n is a, c, g, or t
  misc_feature (29)..(29): n is a, c, g, or t
  misc_feature (262)..(262): n is a, c, g, or t
  misc_feature (2520)..(2521): n is a, c, g, or t
aaagcttgctagattaactattgatananaagcttaaataggtagtaaaccactaaatatgcaaggaagtgattatcagggttgtgaaggagaagaacaggtaagttaaatgggcattctgaggagtagaaatttcctttacttcataattatttgttaattcatctttatatgtttaatgggcttttctctattattttatatttttcaataaaagaaaaaagaatttaaaaaatcttggagctcactgggagcaatgggnttgcagctgaagtccaatagtacaaatgatgtggtaagaggccggcagggctgtgaattacagcaacaaaggagaaaaggaagtgattggagaattaagcaacatgaatggtattattcaaagacagctcattataggacacggaactccctgggtaggagtttgaagctttcttaactcagaaagaaacttccaacacagtttcccaaagaaaaatgggcaccaagggcaaagttattaaatgcaaagcagccatcgcctgggaagcaggcaagcccctttgcattgaagaggttgaagtagctccccccaaggctcatgaagttcgcattcagatcattgctacctccctgtgccatactgatgccactgttatcgattctaaatttgagggcctagctttcccagtgatcgttggccatgaggctgcaggtattgtggaaagtattgggccaggagtgaccaacgtcaaaccaggtgacaaagtaattccactttatgcacctctatgtagaaaatgcaagttttgtctgagtccactcacaaatttgtgtgggaaaatcaggcaggtttacctgcaaaggaaaaccagtttaccatttctttggaaccagtacattctctcagtacactgtggtgtcagatatcaatcttgccaaaatagatgatgatgcaaatttagagagagtttgtctgcttggatgtgggttttcaactggctatggggctgcaatcaacaatgccaaggtcacccctggttcgacttgtgctgtctttggcctaggaggtgtgggtctttctgctgtaatgggttgtaaagcagcaggagcttccagaatcataggtattgacatcaacagtgagaagtttgtgaaggctaaagccctgggagccactgactgcctcaatcctagagacttacataaacctatccaggaagttatcattgaattgaccaagggaggtgtggattttgcccttgactgtgcaggtggatctgaaaccatgaaagcagccctggactgtacaaccgcaggctggggatcatgtactttcattggagtagctgctggtagcaaaggattgactgtttttccagaggagctaataatcggccgtactataaatggaacattctttggtggttggaaaagtgtagattctatcccaaagctggtcactgactataagaataagaaattcaatctggatgcactggtgacccataccctgccttttgacaaaatcagtgaggcatttgacctaatgaaccaaggaaaaagcatccgaacaatcctcatcttttgaagatgccaggagcaattcggaatactatctgattgaatgtgaacctgcctggttaatttattacctgatttgatgaaccaaggaaagccatgcgtttaaacaaatatttacatttaatatgggaacataaaagagctttaaatattatagactttgtacctgttatatatatgaatattccctatgttaaataataataataactagtgtttatgaatagaatcatatcatctttagaaattgtttaaaattagttctgggaagttgaaagtggggaatgaagagataataaataaaactagattggccatatgtttataatttttttagattgggtaatgaatacatggagtttcattatacttttctctccacttttgtctatgttgaaaattttctgggagctaaatgatgagaacacatggacacatgatggggaacaacacacactagggcctgttgagggcagggagtcggcagagagagagcatcaggaagaatagctaatggatgctgggcttcatacctgggtgatgagatgatctgtgcagcaaagcaccatggtacatgtttacctatgtaacaaacctgcacatcctgcacatgtaccctggaacttaataaaagttggaaatttttaaaaagaatgaataagacctggtatttgatagcacaacagggagactatagtcaacagcaatttaattgtatattttaatatgactaaaagagtataatggattgtttgtaacacaaataaatgcttgaggggatggacaccccatattacatgatgtgattattacacattgcatgcctatatcaaaacatctcatgtaccccataaatatatacacctaatacccacaaaacttaaaatataaaatgttttaaataaaaataaagaaaagatttccacaataaaaagatttttactggaaaaaatcacnntattt

SEQ ID NO: 330252 - DNA, 2092 bp, Homo sapiens
  misc_feature (27)..(27): n is a, c, g, or t
  misc_feature (29)..(29): n is a, c, g, or t
  misc_feature (262)..(262): n is a, c, g, or t
  misc_feature (2086)..(2087): n is a, c, g, or t
aaagcttgctagattaactattgatananaagcttaaataggtagtaaaccactaaatatgcaaggaagtgattatcagggttgtgaaggagaagaacaggtaagttaaatgggcattctgaggagtagaaatttcctttacttcataattatttgttaattcatctttatatgtttaatgggcttttctctattattttatatttttcaataaaagaaaaaagaatttaaaaaatcttggagctcactgggagcaatgggnttgcagctgaagtccaatagtacaaatgatgtggtaagaggccggcagggctgtgaattacagcaacaaaggagaaaaggaagtgattggagaattaagcaacatgaatggtattattcaaagacagctcattataggacacggaactccctgggtaggagtttgaagctttcttaactcagaaagaaacttccaacacagtttcccaaagaaaaatgggcaccaagggcaaagttattaaatgcaaagcagccatcgcctgggaagcaggcaagcccctttgcattgaagaggttgaagtagctccccccaaggctcatgaagttcgcattcagatcattgctacctccctgtgccatactgatgccactgttatcgattctaaatttgagggcctagctttcccagtgatcgttggccatgaggctgcaggtattgtggaaagtattgggccaggagtgaccaacgtcaaaccaggtgacaaagtaattccactttatgcacctctatgtagaaaatgcaagttttgtctgagtccactcacaaatttgtgtgggaaaatcagtaatctcaaaagtcctgctagtgatcaacaactaatggaagacaaaaccaaaagcagccctggactgtacaaccgcaggctggggatcatgtactttcattggagtagctgctggtagcaaaggattgactgtttttccagaggagctaataatcggccgtactataaatggaacattctttggtggttggaaaagtgtagattctatcccaaagctggtcactgactataagaataagaaattcaatctggatgcactggtgacccataccctgccttttgacaaaatcagtgaggcatttgacctaatgaaccaaggaaaaagcatccgaacaatcctcatcttttgaagatgccaggagcaattcggaatactatctgattgaatgtgaacctgcctggttaatttattacctgatttgatgaaccaaggaaagccatgcgtttaaacaaatatttacatttaatatgggaacataaaagagctttaaatattatagactttgtacctgttatatatatgaatattccctatgttaaataataataataactagtgtttatgaatagaatcatatcatctttagaaattagataataaataaaactagattggccatatgtttataatttttttagattgggtaatgaatacatggagtttcattatacttttctctccacttttgtctatgttgaaaattttctgggagctaaatgatgagaacacatggacacatgatggggaacaacacacactagggcctgttgagggcagggagtcggcagagagagagcatcaggaagaatagctaatggatgctgggcttcatacctgggtgatgagatgatctgtgcagcaaagcaccatggtacatgtttacctatgtaacaaacctgcacatcctgcacatgtaccctggaacttaataaaagttggaaatttttaaaaagaatgaataagacctggtatttgatagcacaacagggagactatagtcaacagcaatttaattgtatattttaatatgactaaaagagtataatggattgtttgtaacacaaataaatgcttgaggggatggacaccccatattacatgatgtgattattacacattgcatgcctatatcaaaacatctcatgtaccccataaatatatacacctaatacccacaaaacttaaaatataaaatgttttaaataaaaataaagaaaagatttccacaataaaaagatttttactggaaaaaatcacnntattt

SEQ ID NO: 330253 - DNA, 281 bp, Homo sapiens
caagtacttaaacttttgtgagggattctctaagtgttatcttttaagtgtagcatctctcgttcttaattggaggtaaagacatccactggggcaaaatgaattttgtagaaccagatgttttcattaggaggagattgtgtcagctgatctgccactgagaggcatgttcaggcttgttctgagacatagatttccttcatgtggaagattctggacttggacaaggtgggaggaagccagccctgttgagcaagccctgctctcaaagagtttcaacc

SEQ ID NO: 330254 - DNA, 1609 bp, Homo sapiens
  misc_feature (1)..(1): n is a, c, g, or t
ngagcctccaagtgtccacaccctgtgtgtcctctgtcctgccagcaccgagggctcatccatccacagagcagtgcagtgggaggagacgccatgacccccatcctcacggtcctgatctgtctcgggctgagcctggaccccaggacccacgtgcaggcagggcccctccccaagcccaccctctgggctgagccaggctctgtgatcacccaagggagtcctgtgaccctcaggtgtcaggggagcctggagacgcaggagtaccatctatatagagaaaagaaaacagcactctggattacacggatcccacaggagcttgtgaagaagggccagttccccatcctatccatcacctgggaacatgcagggcggtattgctgtatctatggcagccacactgcaggcctctcagagagcagtgaccccctggagctggtggtgacaggagcctacagcaaacccaccctctcagctctgcccagccctgtggtgacctcaggagggaatgtgaccatccagtgtgactcacaggtggcatttgatggcttcattctgtgtaaggaaggagaagatgaacacccacaatgcctgaactcccattcccatgcccgtgggtcatcccgggccatcttctccgtgggccccgtgagcccaagtcgcaggtggtcgtacaggtgctatggttatgactcgcgcgctccctatgtgtggtctctacccagtgatctcctggggctcctggtcccaggtgtttctaagaagccatcactctcagtgcagccgggtcctgtcgtggcccctggggagaagctgaccttccagtgtggctctgatgccggctacgacagatttgttctgtacaaggagtggggacgtgacttcctccagcgccctggccggcagccccaggctgggctctcccaggccaacttcaccctgggccctgtgagccgctcctacgggggccagtacacatgctccggtgcatacaacctctcctccgagtggtcggcccccagcgaccccctggacatcctgatcacaggacagatccgtgccagacccttcctctccgtgcggccgggccccacagtggcctcaggagagaacgtgaccctgctgtgtcagtcacagggagggatgcacactttccttttgaccaaggagggggcagctgattccccgctgcgtctaaaatcaaagcgccaatctcataagtaccaggctgaattccccatgagtcctgtgacctcggcccacgcggggacctacaggtgctacggctcactcagctccaacccctacctgctgactcaccccagtgaccccctggagctcgtggtctcaggagcagctgagaccctcagcccaccacaaaacaagtccgactccaaggctggtgagtgaggagatgcttgccgtgatgacgctgggcacagagggtcaggtcctgtcaagaggagctgggtgtcctgggtggacatttgaagaattatattcattccaacttgaagaattattcaacacctttaacaatgtatatgtgaagtactttattctttcatattttaaaaataaaagataattatccatgagaaaacta

SEQ ID NO: 330255 - DNA, 1417 bp, Homo sapiens
  misc_feature (1)..(1): n is a, c, g, or t
ngagcctccaagtgtccacaccctgtgtgtcctctgtcctgccagcaccgagggctcatccatccacagagcagtgcagtgggaggagacgccatgacccccatcctcacggtcctgatctgtctcgggctgagcctggaccccaggacccacgtgcaggcagggcccctccccaagcccaccctctgggctgagccaggctctgtgatcacccaagggagtcctgtgaccctcaggtgtcaggggagcctggagacgcaggagtaccatctatatagagaaaagaaaacagcactctggattacacggatcccacaggagcttgtgaagaagggccagttccccatcctatccatcacctgggaacatgcagggcggtattgctgtatctatggcagccacactgcaggcctctcagagagcagtgaccccctggagctggtggtgacaggagcctacagcaaacccaccctctcagctctgcccagccctgtggtgacctcaggagggaatgtgaccatccagtgtgactcacaggtggcatttgatggcttcattctgtgtgtttctaagaagccatcactctcagtgcagccgggtcctgtcgtggcccctggggagaagctgaccttccagtgtggctctgatgccggctacgacagatttgttctgtacaaggagtggggacgtgacttcctccagcgccctggccggcagccccaggctgggctctcccaggccaacttcaccctgggccctgtgagccgctcctacgggggccagtacacatgctccggtgcatacaacctctcctccgagtggtcggcccccagcgaccccctggacatcctgatcacaggacagatccgtgccagacccttcctctccgtgcggccgggccccacagtggcctcaggagagaacgtgaccctgctgtgtcagtcacagggagggatgcacactttccttttgaccaaggagggggcagctgattccccgctgcgtctaaaatcaaagcgccaatctcataagtaccaggctgaattccccatgagtcctgtgacctcggcccacgcggggacctacaggtgctacggctcactcagctccaacccctacctgctgactcaccccagtgaccccctggagctcgtggtctcaggagcagctgagaccctcagcccaccacaaaacaagtccgactccaaggctggtgagtgaggagatgcttgccgtgatgacgctgggcacagagggtcaggtcctgtcaagaggagctgggtgtcctgggtggacatttgaagaattatattcattccaacttgaagaattattcaacacctttaacaatgtatatgtgaagtactttattctttcatattttaaaaataaaagataattatccatgagaaaacta

SEQ ID NO: 330256 - DNA, 266 bp, Homo sapiens
catgggtcaggtcctttactgtagttttttcagaaagaaacaggcaaagcgaggtaggcagaattagaattggctaatttgaatattttcagtggactgtggtatgtagggattgcccttagttgccctgttacccctggccctggagtgatattacagaagagagatcccggctcaatctctgagagctaaaggaggtggttggtggctgtgtgctctggactgattggtttgcacaggaaaggcatgccgcagggagtcacttg

SEQ ID NO: 330257 - DNA, 891 bp, Homo sapiens
agcccccattccttggtctcgtctgagcagttaggttccgcctgtggttgcacatttggttcatctgaggatgttcaggttatgtgaccttcaacctgggagtccgtggcaactgaaaaacaactcaccattttattacacaaaattgaaccagaatgggctggttctgcggttacacctccaccaccatccctcctcttctcacacaggctggggctgctggtttgtttctacaatgacctggaattgctggatgccactgtggctcaagtcctgctttaccagatgatcaagtgcagccacctgaggggcttccaggctggcgtccagaagctcaaagcagaactcctggacattgccatggagaaccagaccctcaatgagaccctgggttctttgtcggatgcagttgtaggtttgacctacagccaactggaatccctctcccccgaggctgtgcacggagccatctccaccctcaaccaggtctcaggttgggccaagagccaggtcatcatcttgtctgccaaatacttggcccatgagaaggtgctgtctttctacaatgtcagccagatgggcgcactgctggctggggtcagcacccaggccttctgcagcatgaaacgcaaggacatctcgcaggtcctgagaagtgccgtctcccagtatgtattccgacttgtcacctgcccagcagcaaggtatcctcagcaagatggtccaagcggaagacactgccccaggcatcgtggagatacaaggggctttctttaaggaagtgtctctctttgatttaaggaggcaacctggattcaactctacagtcctgaaggataaggaacttggaaggagccaggtattaccatgaaacacagatcgatcctgtat

SEQ ID NO: 330258 - DNA, 627 bp, Homo sapiens
aggatcctctaaactgacgcgatacttgaaacataatgtgatcatgctctaacttcaatataccaataaaataatcagattgcaatttctgattatagcatctccttctgagtgtttgggactctggaatctgagacccatgttcacattgtaagaacatccaggaccccttctccttgatgtttccagcaagcttctttcctcctttatccttattaagtcatctgcctggggaaggagttccactgtttctttccttctctgtcttcttagctcgaatttaaattgcacaattattttcaggtcatttcctgatagtctagtcagcttatgaatgtaagcaaaacaggaccaatgaaagaaagtcccagaagctgagagaaactttaacaagtttgagagtaacttattttgttttctaggaaagtgagtatggttctatgcctgtattccccagaagccactagacctattttcccctattttatcactgatcagttctgtccctgcctatgattcttaccattcttaagaaaacctgaatggatttcatcaaggcggcagcataatttgaagggcaattgcgtgtgaaaattgatgtgacttgatttacacaatagtcagaaa

SEQ ID NO: 330259 - DNA, 923 bp, Homo sapiens
  misc_feature (67)..(67): n is a, c, g, or t
tgtcagccaagaagacgttcccttggtaatatcagatggaggagactctgagcagttcatagatgangagcgtcagggcccacctttgggaggacagcaatctcaaccctctgctggtgatgggaaccagaatgatggccctcagcagggaccaccccagcaaggaggccagcagcaacaaggtccaccacctcctcaggcaaagtcacaaagcgtgtaggttaaggcgctgtaggtagagcataaagttgggagtgacaccagagccttctgcaagatgcttctgattctgctgtcagtggccctgctggccttcagctcagctcaggacttagatgaagatgtcagccaagaagacgttcccttggtaatatcagatggaggagactctgagcagttcatagatgaggagcgtcagggaccacctttgggaggacagcaatctcaaccctctgctggtgatgggaaccagaatgatggccctcagcagggaccaccccaacaaggaggccagcagcaacaaggtccaccacctcctcagggaaagccacaaggaccaccccaacagggaggccatccccctcctcctcaaggaaggccacaaggaccaccccaacagggaggccatccccgtcctcctcgaggaaggccacaaggaccaccccaacagggaggccatcagcaaggtcctcccccacctcctcctggaaagccccagggaccacctccccaagggggccgcccacaaggacctccacaggggcagtctcctcagtaatctaggattcaatgacaggaagtgaataagaagatgacagtgtttcaaatgccttgaaacataatgtgatcatgctctaacttcaatataccaataaaataatcagattgcggtgtttgaagatcctgctagagtcacccacacg

SEQ ID NO: 330260 - DNA, 1433 bp, Homo sapiens
  misc_feature (67)..(67): n is a, c, g, or t
tgtcagccaagaagacgttcccttggtaatatcagatggaggagactctgagcagttcatagatgangagcgtcagggcccacctttgggaggacagcaatctcaaccctctgctggtgatgggaaccagaatgatggccctcagcagggaccaccccagcaaggaggccagcagcaacaaggtccaccacctcctcaggcaaagtcacaaagcgtgtaggttaaggcgctgtaggtagagcataaagttgggagtgacaccagagccttctgcaagatgcttctgattctgctgtcagtggccctgctggccttcagctcagctcaggacttagatgaagatgtcagccaagaagacgttcccttggtaatatcagatggaggagactctgagcagttcatagatgaggagcgtcagggaccacctttgggaggacagcaatctcaaccctctgctggtgatgggaaccagaatgatggccctcagcagggaccaccccaacaaggaggccagcagcaacaaggtccaccacctcctcagggaaagccacaaggaccaccccaacagggaggccatccccctcctcctcaaggaaggccacaaggaccaccccaacagggaggccatccccgtcctcctcgaggaaggccacaaggaccaccccaacagggaggccatcagcaaggtcctcccccacctcctcctggaaagccccagggaccacctccccaagggggccgcccacaaggacctccacaggggcagtctcctcagtaatctaggattcaatgacaggaagtgaataagaagatgacagtgtttcaaatgccttgaaacataatgtgatcatgctctaacttcaatataccaataaaataatcagattgcaatttctgattatagcatctccttctgagtgtttgggactctggaatctgagacccatgttcacattgtaagaacatccaggaccccttctccttgatgtttccagcaagcttctttcctcctttatccttattaagtcatctgcctggggaaggagttccactgtttctttccttctctgtcttcttagctcgaatttaaattgcacaattattttcaggtcatttcctgatagtctagtcagcttatgaatgtaagcaaaacaggaccaatgaaagaaagtcccagaagctgagagaaactttaacaagtttgagagtaacttattttgttttctaggaaagtgagtatggttctatgcctgtattccccagaagccactagacctattttcccctattttatcactgatcagttctgtccctgcctatgattcttaccattcttaagaaaacctgaatggatttcatcaaggcggcagcataatttgaagggcaattgcgtgtgaaaattgatgtgacttgatttacacaatagtcagaaa

SEQ ID NO: 330261 - DNA, 500 bp, Homo sapiens
tttgtgcctcgtaccccaacaccgaccctctgctggtgatgggaaccagaatgatggccctcagcagggaccaccccaacaaggaggccagcagcaacaaggtccaccacctcctcagggaaagccacaaggaccaccccaacagggaggccatccccctcctcctcaaggaaggccacaaggaccaccccaacagggaggccatccccgtcctcctcgaggaaggccacaaggaccaccccaacagggaggccatcagcaaggtcctcccccacctcctcctggaaagccccagggaccacctccccaagggggccgcccacaaggacctccacaggggcagtctcctcagtaatctaggattcaatgacaggaagtgaataagaagatgacagtgtttcaaatgccttgaaacataatgtgatcatgctctaacttcaatataccaataaaataatcagattgcggtgtttgaagatcctgctagagtcacccacacg

SEQ ID NO: 330262 - DNA, 506 bp, Homo sapiens
tagtcggtgactctgaggatcctaaacacgaccctctgctggtgatgggaaccagaatgatggccctcagcagggaccaccccaacaaggaggccagcagcaacaaggtccaccacctcctcagggaaagccacaaggaccaccccaacagggaggccatccccctcctcctcaaggaaggccacaaggaccaccccaacagggaggccatccccgtcctcctcgaggaaggccacaaggaccaccccaacagggaggccatcagcaaggtcctcccccacctcctcctggaaagccccagggaccacctccccaagggggccgcccacaaggacctccacaggggcagtctcctcagtaatctaggattcaatgacaggaagtgaataagaagatgacagtgtttcaaatgccttgaaacataatgtgatcatgctctaacttcaatataccaataaaataatcagattgcggtgtttgaagatcctgctagagtcacccacacg

SEQ ID NO: 330263 - DNA, 1435 bp, Homo sapiens
tgcagagttgggagtgactccagagcctccagcgagatgctgttgattctgctgtcagtggccctgctggccctgagctcagctgagagttcaagtgaagatgtcagccaggaagaatctctcttcctaatatcaggaaagccagaaggacgacgcccacaaggaggaaaccagccccaacgtcccccacctcctccaggaaagccacaaggaccacccccacaaggaggaaaccagtcccaaggtcccccacctcctccaggaaagccagaaggacgacccccacaaggaggcaaccagtcccaaggtcccccacctcatccaggaaagccagaaagaccacccccacaaggaggaaaccagtcccaaggtaccccacctcctccaggaaagccagaaagaccacccccacaaggaggcaaccagtcccaccgtcccccacctcctccaggaaagccagaaagaccacccccacaaggaggtaaccagtcccaaggtcccccacctcatccaggaaagccagaaggaccacccccacaggaaggaaacaagtcccgaagtgcccgatctcctccaggaaagccacaaggaccaccccaacaagaaggcaacaagcctcaaggtcccccacctcctggaaagccacaaggcccacccccagcaggaggcaatccccagcagcctcaggaccctcctgctggaaagccccaggggccacctccacctcctcaagggggcaggccacccagacctgcccagggacaacagcctccccagtaatctaggattcaatgacaggaagtgaataagaagatgacagtgtttcaaatgccttgaaacataatgtgatcatgctctaacttcaatataccaataaaataatcagattgcaatttctgattatagcatctccttctgagtgtttgggactctggaatctgagacccatgttcacattgtaagaacatccaggaccccttctccttgatgtttccagcaagcttctttcctcctttatccttattaagtcatctgcctggggaaggagttccactgtttctttccttctctgtcttcttagctcgaatttaaattgcacaattattttcaggtcatttcctgatagtctagtcagcttatgaatgtaagcaaaacaggaccaatgaaagaaagtcccagaagctgagagaaactttaacaagtttgagagtaacttattttgttttctaggaaagtgagtatggttctatgcctgtattccccagaagccactagacctattttcccctattttatcactgatcagttctgtccctgcctatgattcttaccattcttaagaaaacctgaatggatttcatcaaggcggcagcataatttgaagggcaattgcgtgtgaaaattgatgtgacttgatttacacaatagtcagaaa

SEQ ID NO: 330264 - DNA, 611 bp, Homo sapiens
  misc_feature (67)..(67): n is a, c, g, or t
tgtcagccaagaagacgttcccttggtaatatcagatggaggagactctgagcagttcatagatgangagcgtcagggcccacctttgggaggacagcaatctcaaccctctgctggtgatgggaaccagaatgatggccctcagcagggaccaccccagcaaggaggccagcagcaacaaggtccaccacctcctcaggcaaagtcacaaagcgtgtaggttaaggcgctgtaggtagagcataaagttgggagtgacaccagagccttctgcaagatgcttctgattctgctgtcagtggccctgctggccttcagctcagctcaggacttagatgaagatgtcagccaagaagacgttcccttggtaatatcagatggaggagactctgagcagttcatagatgaggagcgtcagggaccacctttgggaggacagcaatctcaaccctctgctggtgatgggaaccagaatgatggccctcagcagggaccaccccaacaaggaggccagcagcaacaaggtccaccacctcctcagggaaagccacaaggccgctcaggaggctcaggatgctctacagtcagtcggcagtcatgccagcgcgtcc

SEQ ID NO: 330265 - DNA, 537 bp, Homo sapiens
gctgatcgagaggagtcaccggtgagggatagtagatggaggagactctgagcagttcatagatgaggagcgtcagggaccacctttgggaggacagcaatctcaaccctctgctggtgatgggaaccagaatgatggccctcagcagggaccaccccaacaaggaggccagcagcaacaaggtccaccacctcctcagggaaagccacaagccacaaggaccaccccaacagggaggccatccccgtcctcctcgaggaaggccacaaggaccaccccaacagggaggccatcagcaaggtcctcccccacctcctcctggaaagccccagggaccacctccccaagggggccgcccacaaggacctccacaggggcagtctcctcagtaatctaggattcaatgacaggaagtgaataagaagatgacagtgtttcaaatgccttgaaacataatgtgatcatgctctaacttcaatataccaataaaataatcagattgcggtgtttgaagatcctgctagagtcacccacacg

SEQ ID NO: 330266 - DNA, 812 bp, Homo sapiens
aacaccgcaatctcaaacaccgaccctctgctggtgatgggaaccagaatgatggccctcagcagggaccaccccaacaaggaggccagcagcaacaaggtccaccacctcctcagggaaagccacaagacctccacaggggcagtctcctcagtaatctaggattcaatgacaggaagtgaataagaagatgacagtgtttcaaatgccttgaaacataatgtgatcatgctctaacttcaatataccaataaaataatcagattgcaatttctgattatagcatctccttctgagtgtttgggactctggaatctgagacccatgttcacattgtaagaacatccaggaccccttctccttgatgtttccagcaagcttctttcctcctttatccttattaagtcatctgcctggggaaggagttccactgtttctttccttctctgtcttcttagctcgaatttaaattgcacaattattttcaggtcatttcctgatagtctagtcagcttatgaatgtaagcaaaacaggaccaatgaaagaaagtcccagaagctgagagaaactttaacaagtttgagagtaacttattttgttttctaggaaagtgagtatggttctatgcctgtattccccagaagccactagacctattttcccctattttatcactgatcagttctgtccctgcctatgattcttaccattcttaagaaaacctgaatggatttcatcaaggcggcagcataatttgaagggcaattgcgtgtgaaaattgatgtgacttgatttacacaatagtcagaaa

SEQ ID NO: 330267 - DNA, 507 bp, Homo sapiens
  misc_feature (67)..(67): n is a, c, g, or t
tgtcagccaagaagacgttcccttggtaatatcagatggaggagactctgagcagttcatagatgangagcgtcagggcccacctttgggaggacagcaatctcaaccctctgctggtgatgggaaccagaatgatggccctcagcagggaccaccccagcaaggaggccagcagcaacaaggtccaccacctcctcaggcaaagtcacaaagcgtgtaggttaaggcgctgtaggtagagcataaagttgggagtgacaccagagccttctgcaagatgcttctgattctgctgtcagtggccctgctggccttcagctcagctcaggacttagatgaagatgtcagccaagaagacgttcccttggtaatatcagatggaggagactctgagcagttcatagatgaggagcgtcagggaccacctttgggaggacagcaatctcaaccttgttgctgctggcctccttgttggggtggtccctgctgagggccatcattctggtt

SEQ ID NO: 330268 - DNA, 645 bp, Homo sapiens
tagtcggtgactctgaggatcctaaacacgaccctctgctggtgatgggaaccagaatgatggccctcagcagggaccaccccaacaaggaggccagcagcaacaaggtccaccacctcctcagggaaagccacaaggaccaccccaacagggaggccatccccctcctcctcaaggaaggccacaaggaccaccccaacagggaggccatccccgtcctcctcgaggaaggccacaaggaccaccccaacagggaggccatcagcaaggtcctcccccacctcctcctggaaagccccagggaccacctccccaagggggccgcccacaaggacctccacaggggcagtctcctcagtaatctaggattcaatgacaggaagtgaataagaagatgacagtgtttcaaatgccttgaaacataatgtgatcatgctctaacttcaatataccaataaaataatcagattgcggtgtttgcaaacaccgcaatcttgtagttcacaccattgtcatggcaccatctagatgactcacatctgaaatgaccacttccaaagcctaagcactggcacaacaggttaaagcctgattcagacattcgttcccactcatctcccacggctaatgggaactggtaggggc

SEQ ID NO: 330269 - DNA, 679 bp, Homo sapiens
  misc_feature (17)..(17): n is a, c, g, or t
tgagcctccttggcacngtgagccttctgcaagatgcttctgattctgctgtcagtggccctgctggccttcagctcagctcaggacttagatgaagatgtcagccaagaagacgttcccttggtaatatcagatggaggagactctgagcagttcatagatgaggagcgtcagggaccacctttgggaggacagcaatctcaaccctctgctggtgatgggaaccagaatgatggccctcagcagggaccaccccaacaaggaggccagcagcaacaaggtccaccacctcctcagggaaagccacaaggaccaccccaacagggaggccatccccctcctcctcaaggaaggccacaaggaccaccccaacagggaggccatccccgtcctcctcgaggaaggccacaaggaccaccccaacagggaggccatcagcaaggtcctcccccacctcctcctggaaagccccagggaccacctccccaagggggccgcccacaaggacctccacaggggcagtctcctcagtaatctaggattcaatgacaggaagtgaataagaagatgacagtgtttcaaatgccttgaaacataatgtgatcatgctctaacttcaatataccaataaaataatcagattgcggtgtttgaagatcctgctagagtcacccacacg

SEQ ID NO: 330270 - DNA, 1062 bp, Homo sapiens
  misc_feature (67)..(67): n is a, c, g, or t
tgtcagccaagaagacgttcccttggtaatatcagatggaggagactctgagcagttcatagatgangagcgtcagggcccacctttgggaggacagcaatctcaaccctctgctggtgatgggaaccagaatgatggccctcagcagggaccaccccagcaaggaggccagcagcaacaaggtccaccacctcctcaggcaaagtcacaaagcgtgtaggttaaggcgctgtaggtagagcataaagttgggagtgacaccagagccttctgcaagatgcttctgattctgctgtcagtggccctgctggccttcagctcagctcaggacttagatgaagatgtcagccaagaagacgttcccttggtaatatcagatggaggagactctgagcagttcatagatgaggagcgtcagggaccacctttgggaggacagcaatctcaaccctctgctggtgatgggaaccagaatgatggccctcagcagggaccaccccaacaaggaggccagcagcaacaaggtccaccacctcctcagggaaagccacaaggaccaccccaacagggaggccatccccctcctcctcaaggaaggccacaaggaccaccccaacagggaggccatccccgtcctcctcgaggaaggccacaaggaccaccccaacagggaggccatcagcaaggtcctcccccacctcctcctggaaagccccagggaccacctccccaagggggccgcccacaaggacctccacaggggcagtctcctcagtaatctaggattcaatgacaggaagtgaataagaagatgacagtgtttcaaatgccttgaaacataatgtgatcatgctctaacttcaatataccaataaaataatcagattgcggtgtttgcaaacaccgcaatcttgtagttcacaccattgtcatggcaccatctagatgactcacatctgaaatgaccacttccaaagcctaagcactggcacaacaggttaaagcctgattcagacattcgttcccactcatctcccacggctaatgggaactggtaggggc

SEQ ID NO: 330271 - DNA, 510 bp, Homo sapiens
ggaagaattcctggtggtgatggagaattcctggaccctctgctggtgatgggaaccagaatgatggccctcagcagggaccaccccaacaaggaggccagcagcaacaaggtccaccacctcctcagggaaagccacaaggaccaccccaacagggaggccatccccctcctcctcaaggaaggccacaaggaccaccccaacagggaggccatccccgtcctcctcgaggaaggccacaaggaccaccccaacagggaggccatcagcaaggtcctcccccacctcctcctggaaagccccagggaccacctccccaagggggccgcccacaaggacctccacaggggcagtctcctcagtaatctaggattcaatgacaggaagtgaataagaagatgacagtgtttcaaatgccttgaaacataatgtgatcatgctctaacttcaatataccaataaaataatcagattgcggtgtttgaagatcctgctagagtcacccacacg

SEQ ID NO: 330272 - DNA, 879 bp, Homo sapiens
  misc_feature (67)..(67): n is a, c, g, or t
tgtcagccaagaagacgttcccttggtaatatcagatggaggagactctgagcagttcatagatgangagcgtcagggcccacctttgggaggacagcaatctcaaccctctgctggtgatgggaaccagaatgatggccctcagcagggaccaccccagcaaggaggccagcagcaacaaggtccaccacctcctcaggcaaagtcacaaagcgtgtaggttaaggcgctgtaggtagagcataaagttgggagtgacaccagagccttctgcaagatgcttctgattctgctgtcagtggccctgctggccttcagctcagctcaggacttagatgaagatgtcagccaagaagacgttcccttggtaatatcagatggaggagactctgagcagttcatagatgaggagcgtcagggaccacctttgggaggacagcaatctcaaccctctgctggtgatgggaaccagaatgatggccctcagcagggaccaccccaacaaggaggccagcagcaacaaggtccaccacctcctcagggaaagccacaagccacaaggaccaccccaacagggaggccatccccgtcctcctcgaggaaggccacaaggaccaccccaacagggaggccatcagcaaggtcctcccccacctcctcctggaaagccccagggaccacctccccaagggggccgcccacaaggacctccacaggggcagtctcctcagtaatctaggattcaatgacaggaagtgaataagaagatgacagtgtttcaaatgccttgaaacataatgtgatcatgctctaacttcaatataccaataaaataatcagattgcggtgtttgaagatcctgctagagtcacccacacg

SEQ ID NO: 330273 - DNA, 657 bp, Homo sapiens
  misc_feature (67)..(67): n is a, c, g, or t
tgtcagccaagaagacgttcccttggtaatatcagatggaggagactctgagcagttcatagatgangagcgtcagggcccacctttgggaggacagcaatctcaaccctctgctggtgatgggaaccagaatgatggccctcagcagggaccaccccagcaaggaggccagcagcaacaaggtccaccacctcctcaggcaaagtcacaaagcgtgtaggttaaggcgctgtaggtagagcataaagttgggagtgacaccagagccttctgcaagatgcttctgattctgctgtcagtggccctgctggccttcagctcagctcaggacttagatgaagatgtcagccaagaagacgttcccttggtaatatcagatggaggagactctgagcagttcatagatgaggagcgtcagggaccacctttgggaggacagcaatctcaaccctctgctggtgatgggaaccagaatgatggccctcagcagggaccaccccaacaaggaggccagcagcaacaaggaggcttgatatcatcctcccatcatcccctcagtgttccacgtgcctgccagccacagggacataatcccacctcctgcagccccaacacacacactgggtttgtgaactctttgaggggttcccggacagg

SEQ ID NO: 330274 - DNA, 1129 bp, Homo sapiens
gccagggccagcgggcttcaggagggggacgcgcctgtcccgggctccaggctacgggcaagaccacagggctcctgacctttttcggcatacatgtcaccagtgctatctggaatacacagcatctactcagcgtgggtcacctctgtgaacatcactgactgcaagcctccctcaatttctggtgcagcccatcagggacccacagcgcctgggaggatggtgcggatcttggccaatggggaaatcgtgcaggatgacgacccccgagtgaggaccactacccagccaccaagaggtagcattcctcgacagagcttcttcaataggggccatggtgctcccccagggggtcctggcccccgccagcagcaggcaggtgccaggctgggtgctgctcagtcccccttcaatgacctcaaccggcagctggtgaacatgggctttccgcagtggcatctcggcaaccatgctgtggagccggtgacctccatcctgctcctcttcctgctcatgatgcttggtgttcgtggcctcctcctggttggccttgtctacctggtgtcccacctgagtcagcggtgacctctgagggctgataggggtgggtttgttgagagggacttgctgggccttggtgtgagagcaggcatatttggaggggatctggtggtgccttgaaggtatgatcagagaggggaccacaggtgtgtgtttcccctttgtgttaagcgtgaggcagagggagacgttagtccagcatttccaaagtgtgggtgggtccgttggttcccgagatacttttaggtggtatggggcctgcattaagtggcacaaaatcagagcaagaaagcgatgcccttcccaattctctcaatccttttatgccgagaagatctcagctggatgccaacatgttccgatgcctgtggaagacatgccgacgtctcctctgcctagggagcaggacttgggcttagggcaggtggaaaaaattccagacttttttagcactgtttttgttttaatggtatatttttattggctactttattgtttaggacaagtggtagtggcattctatttattgtgaccttttcaataaatagatttaagtaaaaatgaaaaa

SEQ ID NO: 330275 - DNA, 954 bp, Homo sapiens
ggtgggaggaaaccgcctggagccgccgggagtggacgccgccgaggcccggagtcgcgcctgcagacacagcatctactcagcgtgggtcacctctgtgaacatcactgactgcaagcctccctcaatttctggtgcagcccatcagggacccacagcgcctgggaggatggtgcggatcttggccaatggggaaatcgtgcaggatgacgacccccgagtgaggaccactacccagccaccaagaggtagcattcctcgacagagcttcttcaataggggccatggtgctcccccagggggtcctggcccccgccagcagcaggcaggtgccaggctgggtgctgctcagtcccccttcaatgacctcaaccggcagctggtgaacatgggctttccgcagtggcatctcggcaaccatgctgtggagccggtgacctccatcctgctcctcttcctgctcatgatgcttggtgttcgtggcctcctcctggttggccttgtctacctggtgtcccacctgagtcagcggtgacctctgagggctgataggggtgggtttgttgagagggacttgctgggccttggtgtgagagcaggcatatttggaggggatctggtggtgccttgaaggtatgatcagagaggggaccacaggtgtgtgtttcccctttgtgttaagcgtgaggcagagggagacgttagtccagcatttccaaagtgtgggtgggtccgttggttcccgagatacttttaggtggtatggggcctgcattaagtggcacaaaatcagacttgggcttagggcaggtggaaaaaattccagacttttttagcactgtttttgttttaatggtatatttttattggctactttattgtttaggacaagtggtagtggcattctatttattgtgaccttttcaataaatagatttaagtaaaaatgaaaaa

SEQ ID NO: 330276 - DNA, 824 bp, Homo sapiens
ggtgggaggaaaccgcctggagccgccgggagtggacgccgccgaggcccggagtcgcgcctgcagacacagcatctactcagcgtgggtcacctctgtgaacatcactgactgcaagcctccctcaatttctggtgcagcccatcagggacccacagcgcctgggaggatggtgcggatcttggccaatggggaaatcgtgcaggatgacgacccccgagtgaggaccactacccagccaccaagaggtagcattcctcgacagagcttcttcaataggggccatggtgctcccccagggggtcctggcccccgccagcagcaggcaggtgccaggctgggtgctgctcagtcccccttcaatgacctcaaccggcagctggtgaacatgggctttccgcagtggcatctcggcaaccatgctgtggagccggtgacctccatcctgctcctcttcctgctcatgatgcttggtgttcgtggcctcctcctggttggccttgtctacctggtgtcccacctgagtcagcggtgacctctgagggctgataggggtgggtttgttgagacgttagtccagcatttccaaagtgtgggtgggtccgttggttcccgagatacttttaggtggtatggggcctgcattaagtggcacaaaatcagacttgggcttagggcaggtggaaaaaattccagacttttttagcactgtttttgttttaatggtatatttttattggctactttattgtttaggacaagtggtagtggcattctatttattgtgaccttttcaataaatagatttaagtaaaaatgaaaaa

SEQ ID NO: 330277 - DNA, 1079 bp, Homo sapiens
ggtgggaggaaaccgcctggagccgccgggagtggacgccgccgaggcccggagtcgcgcctgcagacacagcatctactcagcgtgggtcacctctgtgaacatcactgactgcaagcctccctcaatttctggtgcagcccatcagggacccacagcgcctgggaggatggtgcggatcttggccaatggggaaatcgtgcaggatgacgacccccgagtgaggaccactacccagccaccaagaggtagcattcctcgacagagcttcttcaataggggccatggtgctcccccagggggtcctggcccccgccagcagcaggcaggtgccaggctgggtgctgctcagtcccccttcaatgacctcaaccggcagctggtgaacatgggctttccgcagtggcatctcggcaaccatgctgtggagccggtgacctccatcctgctcctcttcctgctcatgatgcttggtgttcgtggcctcctcctggttggccttgtctacctggtgtcccacctgagtcagcggtgacctctgagggctgataggggtgggtttgttgagagggacttgctgggccttggtgtgagagcaggcatatttggaggggatctggtggtgccttgaaggtatgatcagagaggggaccacaggtgtgtgtttcccctttgtgttaagcgtgaggcagagggagacgttagtccagcatttccaaagtgtgggtgggtccgttggttcccgagatacttttaggtggtatggggcctgcattaagtggcacaaaatcagagcaagaaagcgatgcccttcccaattctctcaatccttttatgccgagaagatctcagctggatgccaacatgttccgatgcctgtggaagacatgccgacgtctcctctgcctagggagcaggacttgggcttagggcaggtggaaaaaattccagacttttttagcactgtttttgttttaatggtatatttttattggctactttattgtttaggacaagtggtagtggcattctatttattgtgaccttttcaataaatagatttaagtaaaaatgaaaaa

SEQ ID NO: 330278 - DNA, 1240 bp, Homo sapiens
ggtgggaggaaaccgcctggagccgccgggagtggacgccgccgaggcccggagtcgcgcctgcagacacagcatctactcagcgtgggtcacctctgtgaacatcactgactgcaagcctccctcaatttctggtaaattttttccttcaagctttttgaggtcagggggaaaatcctccacagatcttcacgagtctggtcccagatcactaacagctaaaggttttgtggtggggagaacttctgtgccacttggcttccattagcctgcccaccctgaccacacaatgcaggtgcagcccatcagggacccacagcgcctgggaggatggtgcggatcttggccaatggggaaatcgtgcaggatgacgacccccgagtgaggaccactacccagccaccaagaggtagcattcctcgacagagcttcttcaataggggccatggtgctcccccagggggtcctggcccccgccagcagcaggcaggtgccaggctgggtgctgctcagtcccccttcaatgacctcaaccggcagctggtgaacatgggctttccgcagtggcatctcggcaaccatgctgtggagccggtgacctccatcctgctcctcttcctgctcatgatgcttggtgttcgtggcctcctcctggttggccttgtctacctggtgtcccacctgagtcagcggtgacctctgagggctgataggggtgggtttgttgagagggacttgctgggccttggtgtgagagcaggcatatttggaggggatctggtggtgccttgaaggtatgatcagagaggggaccacaggtgtgtgtttcccctttgtgttaagcgtgaggcagagggagacgttagtccagcatttccaaagtgtgggtgggtccgttggttcccgagatacttttaggtggtatggggcctgcattaagtggcacaaaatcagagcaagaaagcgatgcccttcccaattctctcaatccttttatgccgagaagatctcagctggatgccaacatgttccgatgcctgtggaagacatgccgacgtctcctctgcctagggagcaggacttgggcttagggcaggtggaaaaaattccagacttttttagcactgtttttgttttaatggtatatttttattggctactttattgtttaggacaagtggtagtggcattctatttattgtgaccttttcaataaatagatttaagtaaaaatgaaaaa

SEQ ID NO: 330279 - DNA, 342 bp, Homo sapiens
cattcaacaccatcctgtacttaatgtgaaacttaaaagtattatatttgaaaaaaataaactattacattttcttattgatattaaacaccttaatgtgaaagaaatccataattagtatacatataaaattataagacagtttttctctcgtcattacaaaaacttctgtgacctggttggaattttaaaaatataatcgctaatataatatatatgttccataaaaatgcctaagctgcccgggcatggtggctcatgcctgtaataccagcactttgggaggccgaggcaggtagatcatgaggccaggagttcgagaccagcctggccaacatggtg

SEQ ID NO: 330280 - DNA, 622 bp, Homo sapiens
gaaactgcatatcttctggtttacatgaagatggagtgctaatggaaatgcccaaaaccttcagagattgacacgctgtcattttccatttccgttcctggatctacggagtcttctaagagattttgcaatgaggagaagcattgttttcaaactatataactgagccttatttataattagggatattatcaaaatatgtaaccatgaggcccctcaggtcctgatcagtcagaatggatgctttcaccagcagacccggccatgtggctgctcggtcctgggtgctcgctgctgtgcgagacattagccctttagttatgagcctgtgggaacttcaggggttcccagtggggagagcagtggcagtgggaggcatctgggggccaaaggtcagtggcagggggtatttcagtattatacaactgctgtgaccagacttgtatactggctgaatatcagtgctgtttgtaatttttcactttgagaaccaacattaattccatatgaatcaagtgttttgtaactgctattcatttattcagcaaatatttattgatcatctcttctccataagatagtgtgataaacacagtcatgaataaagttattttccacaaaa

SEQ ID NO: 330281 - DNA, 231 bp, Homo sapiens
gaaactgcatatcttctggtttacatgaagatggagtgctaatggaaatgcccaaaaccttcagagattgacacgctgtcattttccatttccgttcctggatctacggagtcttctaagagattttgcaatgaggagaagcattgttttcaaactatataactgagcaatccctcgggatgtcaacagagtcaggatgctcaaaacatctgtgccaagcctttcatagcc

SEQ ID NO: 330282 - DNA, 2235 bp, Homo sapiens
  misc_feature (12)..(12): n is a, c, g, or t
  misc_feature (23)..(23): n is a, c, g, or t
cgacggcagtanccccgtgttanaggtagcgaggctgcctggcgggcaccgtaaccagcgccgcggacaccggcaccggcgccacggactccgcaggaccccgcgcccgccgccgccgctatgctggggctgctggtggcgttgctggccctggggctcgctgtctttgcgctgctggacgtctggtacctggtgcgccttccgtgcgccgtgctgcgcgcgcgcctgctgcagccgcgcgtccgtgacctgctagctgagcagcgcttcccgggccgcgtgctgccctcggacttggacctgctgctgcacatgaacaacgcgcgctacctgcgcgaggccgactttgcgcgcgtcgcgcacctgacccgctgcggggtgctcggggcgctgagggagttgcgggcgcacacggtgctggcggcctcgtgcgcgcgccaccgccgctcgctgcgcctgctggagcccttcgaggtgcgcacccgcctgctgggctgggacgaccgcgcgttctacctggaggcgcgctttgtcagcctgcgggacggcttcgtgtgcgcgctgctgcgcttccggcagcacctgctgggcacctcacccgagcgcgtcgtgcagcacctgtgccagcgcagggtggagccccctgagctgcccgctgatctgcagcactggatctcctacaacgaggccagcagccagctgctccgcatggagagtgggctcagtgatgtcaccaaggaccagtgaccgccaccttcacaccgtctgccctggccaccatcctgggcctgggggctgcccacagatgggcagtctcagccatactctgttccagctggagtagcctcctgaccagcctggcccaccctgctccacccactgggcccccccagttattgatacccctctgtgctgggctccacgctaggcagaaggaggagtggcattggcatcctgacccagctctgccctcaaggtggggatggatgggcaaaggagagtcctgcctggccctacgatgaggccactcatgtgggcctaggtaggggaggatggtgcctggagcagagggacccacaagtgcctcccgagcctagatcctggctcggaccactgcaagggccgaggcagggccagaccagagcatcctgggtacaggcctgggctctccagggcctgggcctgattcaggtgcagtgggcactcctgaagggtcagagcggcatctgccaggcagcccctctggcttccgctgaggtggttgcaggcctggggcagagcctgggtggtcagaggccggggctagaggcagatggaagggaggcatttgctgacagaggacggggcacccgggctccccactgcagtcggccttgcctcctcctcctcctctacctccagtcaggctggacgggagggtagccttgtggctgagaggggtcagactaggtggcacaggggctcctggaaagacagcaggcttcctgctgggcgttcccttgttggagggaatagagtgggggtgggactctgcaggggtgtccttgtccactcgcacccctcgccgcccaccagggccatgctctgtgacttgggctgatccccaccctttctgggcctacagcaccacaggccgctgtacccccttagagctgcccctctctggcctggccggcaggcgtcttcttaactcctctgtcctctatattcagcatgttccttgtcagctgctgggccggccctgccttgcgctagcagagcctctcctggcagcttctcaggtctccctaatggagacaccaggctactaggacactggctggggccaccccctcctgcctaatgcctcaccttacagctggggaaactgaggcctggaatggcccagagtcaccaaggcaaagttggggctggtcccagcctgaggctccagctgatgccctcagctcccagagagggggtgccccatctagctgggtgcaggggtcactgcttgtcagctcagggccctgtgcccgcttgcctgttcccctacatctgtgcctgcacatccagaactgcctccttgccgctgcctccaggaagcccaccttgagccagagtcaagggctgcagcactgcccgatagaacacgcccgccctcactgctgttcttgccttacagccaccatgggaaagctgcaacctttctgttttatttaaagaaagcccaacattaaagggttttcattgcaa

SEQ ID NO: 330283 - DNA, 2319 bp, Homo sapiens
ctcggccgccctcgcgctgtggttcgctccgggcgcgctgcgctcgtgagttcccaggaggcctggcgggcaccgtaaccagcgccgcggacaccggcaccggcgccacggactccgcaggaccccgcgcccgccgccgccgctatgctggggctgctggtggcgttgctggccctggggctcgctgtctttgcgctgctggacgtctggtacctggtgcgccttccgtgcgccgtgctgcgcgcgcgcctgctgcagccgcgcgtccgtgacctgctagctgagcagcgcttcccgggccgcgtgctgccctcggacttggacctgctgctgcacatgaacaacgcgcgctacctgcgcgaggccgactttgcgcgcgtcgcgcacctgacccgctgcggggtgctcggggcgctgagggagttgcgggcgcacacggtgctggcggcctcgtgcgcgcgccaccgccgctcgctgcgcctgctggagcccttcgaggtgcgcacccgcctgctgggctgggacgaccgcgcgttctacctggaggcgcgctttgtcagcctgcgggacggcttcgtgtgcgcgctgctgcgcttccggcagcacctgctgggcacctcacccgagcgcgtcgtgcagcacctgtgccagcgcagggtggagccccctgagctgcccgctgatctgcagcactggatctcctacaacgaggccagcagccagctgctccgcatggagagtgggctcagtgatgtcaccaaggaccagtgaccgccaccttcacaccgtctgccctggccaccatcctgggcctgggggctgcccacagatgggcagtctcagccatactctgttccagctggagtagcctcctgaccagcctggcccaccctgctccacccactgggcccccccagttattgatacccctctgtgctgggctccacgctaggcagaaggaggagtggcattggcatcctgacccagctctgccctcaaggtggggatggatgggcaaaggagagtcctgcctggccctacgatgaggccactcatgtgggcctaggtaggggaggatggtgcctggagcagagggacccacaagtgcctcccgagcctagatcctggctcggaccactgcaagggccgaggcagggccagaccagagcatcctgggtacaggcctgggctctccagggcctgggcctgattcaggtgcagtgggcactcctgaagggtcagagcggcatctgccaggcagcccctctggcttccgctgaggtggttgcaggcctggggcagagcctgggtggtcagaggccggggctagaggcagatggaagggaggcatttgctgacagaggacggggcacccgggctccccactgcagtcggccttgcctcctcctcctcctctacctccagtcaggctggacgggagggtagccttgtggctgagaggggtcagactaggtggcacaggggctcctggaaagacagcaggcttcctgctgggcgttcccttgttggagggaatagagtgggggtgggactctgcaggggtgtccttgtccactcgcacccctcgccgcccaccagggccatgctctgtgacttgggctgatccccaccctttctgggcctacagcaccacaggccgctgtacccccttagagctgcccctctctggcctggccggcaggcgtcttcttaactcctctgtcctctatattcagcatgttccttgtcagctgctgggccggccctgccttgcgctagcagagcctctcctggcagcttctcaggtctccctaatggagacaccaggctactaggacactggctggggccaccccctcctgcctaatgcctcaccttacagctggggaaactgaggcctggaatggcccagagtcaccaaggcaaagttggggctggtcccagcctgaggctccagctgatgccctcagctcccagagagggggtgccccatctagctgggtgcaggggtcactgcttgtcagctcagggccctgtgcccgcttgcctgttcccctacatctgtgcctgcacatccagaactgcctccttgccgctgcctccaggaagcccaccttgagccagagtcaggtgagatgcgataagaaagcgctcatgtgtctgctaagcacaggaagtgactttgttattaagaagcaataaagttcatgaaaaaaaaaaacgggtttgggggaaggtgaagcgggtaggctgccttgaagggaggggccagggttatcgaacgcgtggtatagtatggagtgagaaggagaatatatt

SEQ ID NO: 330284 - DNA, 2100 bp, Homo sapiens
ctcggccgccctcgcgctgtggttcgctccgggcgcgctgcgctcgtgagttcccaggaggcctggcgggcaccgtaaccagcgccgcggacaccggcaccggcgccacggactccgcaggaccccgcgcccgccgccgccgctatgctggggctgctggtggcgttgctggccctggggctcgctgtctttgcgctgctggacgtctggtacctggtgcgccttccgtgcgccgtgctgcgcgcgcgcctgctgcagccgcgcgtccgtgacctgctagctgagcagcgcttcccgggccgcgtgctgccctcggacttggacctgctgctgcacatgaacaacgcgcgctacctgcgcgaggccgactttgcgcgcgtcgcgcacctgacccgctgcggggtgctcggggcgctgagggagttgcgggcgcacacggtgctggcggcctcgtgcgcgcgccaccgccgctcgctgcgcctgctggagcccttcgaggtggagccccctgagctgcccgctgatctgcagcactggatctcctacaacgaggccagcagccagctgctccgcatggagagtgggctcagtgatgtcaccaaggaccagtgaccgccaccttcacaccgtctgccctggccaccatcctgggcctgggggctgcccacagatgggcagtctcagccatactctgttccagctggagtagcctcctgaccagcctggcccaccctgctccacccactgggcccccccagttattgatacccctctgtgctgggctccacgctaggcagaaggaggagtggcattggcatcctgacccagctctgccctcaaggtggggatggatgggcaaaggagagtcctgcctggccctacgatgaggccactcatgtgggcctaggtaggggaggatggtgcctggagcagagggacccacaagtgcctcccgagcctagatcctggctcggaccactgcaagggccgaggcagggccagaccagagcatcctgggtacaggcctgggctctccagggcctgggcctgattcaggtgcagtgggcactcctgaagggtcagagcggcatctgccaggcagcccctctggcttccgctgaggtggttgcaggcctggggcagagcctgggtggtcagaggccggggctagaggcagatggaagggaggcatttgctgacagaggacggggcacccgggctccccactgcagtcggccttgcctcctcctcctcctctacctccagtcaggctggacgggagggtagccttgtggctgagaggggtcagactaggtggcacaggggctcctggaaagacagcaggcttcctgctgggcgttcccttgttggagggaatagagtgggggtgggactctgcaggggtgtccttgtccactcgcacccctcgccgcccaccagggccatgctctgtgacttgggctgatccccaccctttctgggcctacagcaccacaggccgctgtacccccttagagctgcccctctctggcctggccggcaggcgtcttcttaactcctctgtcctctatattcagcatgttccttgtcagctgctgggccggccctgccttgcgctagcagagcctctcctggcagcttctcaggtctccctaatggagacaccaggctactaggacactggctggggccaccccctcctgcctaatgcctcaccttacagctggggaaactgaggcctggaatggcccagagtcaccaaggcaaagttggggctggtcccagcctgaggctccagctgatgccctcagctcccagagagggggtgccccatctagctgggtgcaggggtcactgcttgtcagctcagggccctgtgcccgcttgcctgttcccctacatctgtgcctgcacatccagaactgcctccttgccgctgcctccaggaagcccaccttgagccagagtcaagggctgcagcactgcccgatagaacacgcccgccctcactgctgttcttgccttacagccaccatgggaaagctgcaacctttctgttttatttaaagaaagcccaacattaaagggttttcattgcaa

SEQ ID NO: 330285 - DNA, 1154 bp, Homo sapiens
ctcggccgccctcgcgctgtggttcgctccgggcgcgctgcgctcgtgagttcccaggaggcctggcgggcaccgtaaccagcgccgcggacaccggcaccggcgccacggactccgcaggaccccgcgcccgccgccgccgctatgctggggctgctggtggcgttgctggccctggggctcgctgtctttgcgctgctggacgtctggtacctggtgcgccttccgtgcgccgtgctgcgcgcgcgcctgctgcagccgcgcgtccgtgacctgctagctgagcagcgcttcccgggccgcgtgctgccctcggacttggacctgctgctgcacatgaacaacgcgcgctacctgcgcgaggccgactttgcgcgcgtcgcgcacctgacccgctgcggggtgctcggggcgctgagggagttgcgggcgcacacggtgctggcggcctcgtgcgcgcgccaccgccgctcgctgcgcctgctggagcccttcgaggtgcgcacccgcctgctgggctgggacgaccgcgcgttctacctggaggcgcgctttgtcagcctgcgggacggcttcgtgtgcgcgctgctgcgcttccggcagcacctgctgggcacctcacccgagcgcgtcgtgcagcacctgtgccagcgcagggtggagccccctgagctgcccgctgatctgcagcactggatctcctacaacgaggccagcagccagctgctccgcatggagagtgggctcagtgatgtcaccaaggaccagtgaccgccaccttcacaccgtctgccctggccaccatcctgggcctgggggctgcccacagatgggcagtctcagccatactctgttccagctggagtagcctcctgaccagcctggcccaccctgctccacccactgggcccccccagttattgatacccctctgtgctgggctccacgctaggcagaaggaggagtggcattggcatcctgacccagctctgccctcaaggtggggatggatgggcaaaggagagtcctgcctggccctacgatgaggcctcattgtggctagtgggagatgtgcctggccagggcccatgctcccggccaaatcggccgcctggggccggggccaccagctgggagcggggccaggggggaaa

SEQ ID NO: 330286 - DNA, 2259 bp, Homo sapiens
ctcggccgccctcgcgctgtggttcgctccgggcgcgctgcgctcgtgagttcccaggaggcctggcgggcaccgtaaccagcgccgcggacaccggcaccggcgccacggactccgcaggaccccgcgcccgccgccgccgctatgctggggctgctggtggcgttgctggccctggggctcgctgtctttgcgctgctggacgtctggtacctggtgcgccttccgtgcgccgtgctgcgcgcgcgcctgctgcagccgcgcgtccgtgacctgctagctgagcagcgcttcccgggccgcgtgctgccctcggacttggacctgctgctgcacatgaacaacgcgcgctacctgcgcgaggccgactttgcgcgcgtcgcgcacctgacccgctgcggggtgctcggggcgctgagggagttgcgggcgcacacggtgctggcggcctcgtgcgcgcgccaccgccgctcgctgcgcctgctggagcccttcgaggtgcgcacccgcctgctgggctgggacgaccgcgcgttctacctggaggcgcgctttgtcagcctgcgggacggcttcgtgtgcgcgctgctgcgcttccggcagcacctgctgggcacctcacccgagcgcgtcgtgcagcacctgtgccagcgcagggtggagccccctgagctgcccgctgatctgcagcactggatctcctacaacgaggccagcagccagctgctccgcatggagagtgggctcagtgatgtcaccaaggaccagtgaccgccaccttcacaccgtctgccctggccaccatcctgggcctgggggctgcccacagatgggcagtctcagccatactctgttccagctggagtagcctcctgaccagcctggcccaccctgctccacccactgggcccccccagttattgatacccctctgtgctgggctccacgctaggcagaaggaggagtggcattggcatcctgacccagctctgccctcaaggtggggatggatgggcaaaggagagtcctgcctggccctacgatgaggccactcatgtgggcctaggtaggggaggatggtgcctggagcagagggacccacaagtgcctcccgagcctagatcctggctcggaccactgcaagggccgaggcagggccagaccagagcatcctgggtacaggcctgggctctccagggcctgggcctgattcaggtgcagtgggcactcctgaagggtcagagcggcatctgccaggcagcccctctggcttccgctgaggtggttgcaggcctggggcagagcctgggtggtcagaggccggggctagaggcagatggaagggaggcatttgctgacagaggacggggcacccgggctccccactgcagtcggccttgcctcctcctcctcctctacctccagtcaggctggacgggagggtagccttgtggctgagaggggtcagactaggtggcacaggggctcctggaaagacagcaggcttcctgctgggcgttcccttgttggagggaatagagtgggggtgggactctgcaggggtgtccttgtccactcgcacccctcgccgcccaccagggccatgctctgtgacttgggctgatccccaccctttctgggcctacagcaccacaggccgctgtacccccttagagctgcccctctctggcctggccggcaggcgtcttcttaactcctctgtcctctatattcagcatgttccttgtcagctgctgggccggccctgccttgcgctagcagagcctctcctggcagcttctcaggtctccctaatggagacaccaggctactaggacactggctggggccaccccctcctgcctaatgcctcaccttacagctggggaaactgaggcctggaatggcccagagtcaccaaggcaaagttggggctggtcccagcctgaggctccagctgatgccctcagctcccagagagggggtgccccatctagctgggtgcaggggtcactgcttgtcagctcagggccctgtgcccgcttgcctgttcccctacatctgtgcctgcacatccagaactgcctccttgccgctgcctccaggaagcccaccttgagccagagtcaagggctgcagcactgcccgatagaacacgcccgccctcactgctgttcttgccttacagccaccatgggaaagctgcaacctttctgttttatttaaagaaagcccaacattaaagggttttcattgcaa

SEQ ID NO: 330287 - DNA, 2783 bp, Homo sapiens
ctcggccgccctcgcgctgtggttcgctccgggcgcgctgcgctcgtgagttcccaggaggcctggcgggcaccgtaaccagcgccgcggacaccggcaccggcgccacggactccgcaggaccccgcgcccgccgccgccgctatgctggggctgctggtggcgttgctggccctggggctcgctgtctttgcgctgctggacgtctggtacctggtgcgccttccgtgcgccgtgctgcgcgcgcgcctgctgcagccgcgcgtccgtgacctgctagctgagcagcgcttcccgggccgcgtgctgccctcggacttggacctgctgctgcacatgaacaacgcgcgctacctgcgcgaggccgactttgcgcgcgtcgcgcacctgacccgctgcggggtgctcggggcgctgagggagttgcgggcgcacacggtgctggcggcctcgtgcgcgcgccaccgccgctcgctgcgcctgctggagcccttcgaggtgcgcacccgcctgctgggctgggacgaccgcgcgttctacctggaggcgcgctttgtcagcctgcgggacggcttcgtgtgcgcgctgctgcgcttccggcagcacctgctgggcacctcacccgagcgcgtcgtgcagcacctgtgccagcgcagggtggagccccctgagctgcccgctgatctgcagcactggatctcctacaacgaggccagcagccagctgctccgcatggagagtgggctcagtgatgtcaccaaggaccagtgaccgccaccttcacaccgtctgccctggccaccatcctgggcctgggggctgcccacagatgggcagtctcagccatactctgttccagctggagtagcctcctgaccagcctggcccaccctgctccacccactgggcccccccagttattgatacccctctgtgctgggctccacgctaggcagaaggaggagtggcattggcatcctgacccagctctgccctcaaggtggggatggatgggcaaaggagagtcctgcctggccctacgatgaggccactcatgtgggcctaggtaggggaggatggtgcctggagcagagggacccacaagtgcctcccgagcctagatcctggctcggaccactgcaagggccgaggcagggccagaccagagcatcctgggtacaggcctgggctctccagggcctgggcctgattcaggtgcagtgggcactcctgaagggtcagagcggcatctgccaggcagcccctctggcttccgctgaggtggttgcaggcctggggcagagcctgggtggtcagaggccggggctagaggcagatggaagggaggcatttgctgacagaggacggggcacccgggctccccactgcagtcggccttgcctcctcctcctcctctacctccagtcaggctggacgggagggtagccttgtggctgagaggggtcagactaggtggcacaggggctcctggaaagacagcaggcttcctgctgggcgttcccttgttggagggaatagagtgggggtgggactctgcaggggtgtccttgtccactcgcacccctcgccgcccaccagggccatgctctgtgacttgggctgatccccaccctttctgggcctacagcaccacaggccgctgtacccccttagagctgcccctctctggcctggccggcaggcgtcttcttaactcctctgtcctctatattcagcatgttccttgtcagctgctgggccggccctgccttgcgctagcagagcctctcctggcagcttctcaggtctccctaatggagacaccaggctactaggacactggctggggccaccccctcctgcctaatgcctcaccttacagctggggaaactgaggcctggaatggcccagagtcaccaaggcaaagttggggctggtcccagcctgaggctccagctgatgccctcagctcccagagagggggtgccccatctagctgggtgcaggggtcactgcttgtcagctcagggccctgtgcccgcttgcctgttcccctacatctgtgcctgcacatccagaactgcctccttgccgctgcctccaggaagcccaccttgagccagagtcaagggctgcagcactgcccgatagaacacgcccgccctcactgctgttcttgccttacagccaccatgggaaagctgcaacctttctgttttatttaaagaaagcccaacattaaagggttttcattgcaaaaaaaaaaaaaaaaaaaaacaaaaaaaaaaaaaaaaaaaaaaaaaaaaaaaaaaaaaaaaaaaaaacaaaaaaaaaaaaaaaaaaaaaaaaaaaagggggggggcgcgcgccccaaaatccccccggggggcccccccattagtctgctccccacacccccgttttttgtataaaaaaaggggcgcccctcctacataatggtgggcttaatatattactaaccaccgcaccgcgccgcccgcactaataaaacacgacggcaggaagggagcgaaacaccactcgctgctagatgaatacttctagttgggagagaagcaccccctcactctcggcggggggcgggcacgcacaatttagggcgaccaccctccctccctccagagagtattcataagccccccgggagagagtacatattacccctgccacgggcatactgtgcggggaaaccacccaccgcatcatcgcgcgcggcaaaagttttctcccgcgctgtgtgtcgttagcaatattcccgcgg

SEQ ID NO: 330288 - DNA, 2195 bp, Homo sapiens
aacttcggctagtacgggcccggtgattcggccgagcggcgccacggactccgcaggaccccgcgcccgccgccgccgctatgctggggctgctggtggcgttgctggccctggggctcgctgtctttgcgctgctggacgtctggtacctggtgcgccttccgtgcgccgtgctgcgcgcgcgcctgctgcagccgcgcgtccgtgacctgctagctgagcagcgcttcccgggccgcgtgctgccctcggacttggacctgctgctgcacatgaacaacgcgcgctacctgcgcgaggccgactttgcgcgcgtcgcgcacctgacccgctgcggggtgctcggggcgctgagggagttgcgggcgcacacggtgctggcggcctcgtgcgcgcgccaccgccgctcgctgcgcctgctggagcccttcgaggtgcgcacccgcctgctgggctgggacgaccgcgcgttctacctggaggcgcgctttgtcagcctgcgggacggcttcgtgtgcgcgctgctgcgcttccggcagcacctgctgggcacctcacccgagcgcgtcgtgcagcacctgtgccagcgcagggtggagccccctgagctgcccgctgatctgcagcactggatctcctacaacgaggccagcagccagctgctccgcatggagagtgggctcagtgatgtcaccaaggaccagtgaccgccaccttcacaccgtctgccctggccaccatcctgggcctgggggctgcccacagatgggcagtctcagccatactctgttccagctggagtagcctcctgaccagcctggcccaccctgctccacccactgggcccccccagttattgatacccctctgtgctgggctccacgctaggcagaaggaggagtggcattggcatcctgacccagctctgccctcaaggtggggatggatgggcaaaggagagtcctgcctggccctacgatgaggccactcatgtgggcctaggtaggggaggatggtgcctggagcagagggacccacaagtgcctcccgagcctagatcctggctcggaccactgcaagggccgaggcagggccagaccagagcatcctgggtacaggcctgggctctccagggcctgggcctgattcaggtgcagtgggcactcctgaagggtcagagcggcatctgccaggcagcccctctggcttccgctgaggtggttgcaggcctggggcagagcctgggtggtcagaggccggggctagaggcagatggaagggaggcatttgctgacagaggacggggcacccgggctccccactgcagtcggccttgcctcctcctcctcctctacctccagtcaggctggacgggagggtagccttgtggctgagaggggtcagactaggtggcacaggggctcctggaaagacagcaggcttcctgctgggcgttcccttgttggagggaatagagtgggggtgggactctgcaggggtgtccttgtccactcgcacccctcgccgcccaccagggccatgctctgtgacttgggctgatccccaccctttctgggcctacagcaccacaggccgctgtacccccttagagctgcccctctctggcctggccggcaggcgtcttcttaactcctctgtcctctatattcagcatgttccttgtcagctgctgggccggccctgccttgcgctagcagagcctctcctggcagcttctcaggtctccctaatggagacaccaggctactaggacactggctggggccaccccctcctgcctaatgcctcaccttacagctggggaaactgaggcctggaatggcccagagtcaccaaggcaaagttggggctggtcccagcctgaggctccagctgatgccctcagctcccagagagggggtgccccatctagctgggtgcaggggtcactgcttgtcagctcagggccctgtgcccgcttgcctgttcccctacatctgtgcctgcacatccagaactgcctccttgccgctgcctccaggaagcccaccttgagccagagtcaagggctgcagcactgcccgatagaacacgcccgccctcactgctgttcttgccttacagccaccatgggaaagctgcaacctttctgttttatttaaagaaagcccaacattaaagggttttcattgcaa

SEQ ID NO: 330289 - DNA, 758 bp, Homo sapiens
ctcggccgccctcgcgctgtggttcgctccgggcgcgctgcgctcgtgagttcccaggaggcctggcgggcaccgtaaccagcgccgcggacaccggcaccggcgccacggactccgcaggaccccgcgcccgccgccgccgctatgctggggctgctggtggcgttgctggccctggggctcgctgtctttgcgctgctggacgtctggtacctggtgcgccttccgtgcgccgtgctgcgcgcgcgcctgctgcagccgcgcgtccgtgacctgctagctgagcagcgcttcccgggccgcgtgctgccctcggacttggacctgctgctgcacatgaacaacgcgcgctacctgcgcgaggccgactttgcgcgcgtcgcgcacctgacccgctgcggggtgctcggggcgctgagggagttgcgggcgcacacggtgctggcggcctcgtgcgcgcgccaccgccgctcgctgcgcctgctggagcccttcgaggtgcgcacccgcctgctgggctgggacgaccgcgcgttctacctggaggcgcgctttgtcagcctgcgggacggcttcgtgtgcgcgctgctgcgcttccggcagcacctgctgggcacctcacccgagcgcgtcgtgcagcacctgtgccagcgcaggacggattctcactctgtcgcccaggctggagtgcagtggcgtgatctcggctcactgcaacctccgccttccgggttcacgccattctcctgcttcagcct

SEQ ID NO: 330290 - DNA, 365 bp, Homo sapiens
gggtcacatgcctagtaagtggtagagccgggtttcaaacccaggcagtctggctcccaagtctgggctcttagctgcctctccttgccgccacctgctctgcagctattgaaagaacaaggcagttcaatgggaactgtcatgaccggctctcaaagcaaggtgcagacagtgctccctatatgttcccatttacagaaaccaacctccccaccaaaacgacgaaaaccacacttcactgtgtgtgtgtctacagatgcataaacggtctaggtgaacacacacactgttaaccatggtcccctctggaaaggggagtggaggtaaaggaagtgtgaaagggaatttttttttttttttttttt

SEQ ID NO: 330291 - DNA, 245 bp, Homo sapiens
ctgctacacaccactctggcttacgcttccagctaacagcggtttgtctgtgtttctggactgaagtgactgatgaaaaacagtagtcaagtctggagggtgattccctttcagttcacttgcctttcagttctggggaaattagaagatttgctctctctctctgcttcttagaatgggctgcaatttgtgcacttttcagaaaagagaggaacactacaaactgctgtatgaagtttcccagg

SEQ ID NO: 330292 - DNA, 261 bp, Homo sapiens
tcattaagaacctacccaaaacagcataattttttaaaaacaagcttagaatggcaaagggattctaatatatgtctcaaaactcaaaatatataaaacaaaagctggcttaatttgactccataaaacttaagacttaccgcatgaaaacaaatatcataaaaaaaatcaaaggagaacgtgaggaaaaaaacacgttcacagaatctggtacatggctaaatattcttagaaatagtcttagattcatgaccaggctgg

SEQ ID NO: 330293 - DNA, 1611 bp, Homo sapiens
cacgactctgggagtggggaaacagagagccggttcctctgctgcagaagtcctcggggttccttctcacaactctgcgaaggggaaagggttgtgagacccaaccagaccccaactccagctcccagcaggaggtggctgcgccacactcgggaggcctcttggtttcagggtctctctgtctctctctcaccctcttcctcgctttctctgtctctctgtctctctctctctctctccctcgtccactcccccaaacatgtccaccggctccctcagcgatgtggaggaccttcaagaggtggagatgttggaatgtgacgggttgaaaatggattcgaacaaggaatttgtgacttccaacgagagcaccgaggagagctccaactgcgagaatgggtctccccagaagggccgcggcggcctgggcaagaggaggaaggcgcccaccaagaagagccccctgagcggggtcagccaggaggggaagcaggtccagcgcaacgccgccaacgcgcgagagcgggcccgcatgcgagtgctgagcaaggccttctccagactcaagaccaccctgccctgggtgccccccgacaccaagctctccaagctggacacgctcaggctggcgtccagctacatcgcccacttgaggcagatcctggctaacgacaaatacgagaacgggtacattcacccggtcaacctgacgtggccctttatggtggccgggaaacccgagagtgacctgaaagaagtggtgaccgcgagccgcttatgtggaaccaccgcgtcctgaccttggagtttggtacctggagcgagagcttctccgcccttccaccaaccccacaggccgcttcgcgggtggagccctctgcctggccatggaggaaggatcccgctaggctggtcccgactggagaagctgctctgccaggtgtgctctctgtcagcaatagtgacctcattaccaaggggtggcgaccacattaccaagcgcaattccccattctccaagggctgagaacttcggtgacttcatccacctgtctatttgcacatggaggacttttcaagatgtcaggatgcccttccatcaccccaccaccgccaccccaacttgactttcaagaacacatttcaagctctggccagagtcccgttcctcaaattcatgtgttctctcctttctaccagagggatagagcccatgcctcaacctatccagagttcaaatcaaagagtccccagtgtgattcaattgtttgcctttcacgtttcgcaaattttccaatctcccactcacgtttttacaaaacgaatgctctaaattctgaggattccaggcaggccatccatagagaaataactttttcttgctcattcccttacaaccccaatctatacatggatttttagaaagtcttcatggctatctatagttccctaccaataatttgaagcctttgctttaggcaggaggcatgtggctatgaatagggaacacgtagatttgaccctgggttctgcatccaactagctgtttcttgaaagagcctggatcctcagttttcccatctctgcaagcagggataacggtaatgagaa

SEQ ID NO: 330294 - DNA, 561 bp, Homo sapiens
cacgactctgggagtggggaaacagagagccggttcctctgctgcagaagtcctcggggttccttctcacaactctgcgaaggggaaagggttgtgagacccaaccagaccccaactccagctcccagcaggaggtggctgcgccacactcgggaggcctcttggtttcagggtctctctgtctctctctcaccctcttcctcgctttctctgtctctctcccgcgagaacactttacaacgacgaggagattcgtttccaaaccagaggagatcaattgtacttacaaagattcccatctatttaactttattaacttctaccgtgaatgactctgcaagccttgctggtccaagtgcaatatgtaattataaatatataaatagataagagcctatcaatgtatcttttgtacaatatgttgtaaaatgtagatcataggatagctgactttgacagtcacatttataaagtaattcacttaaagatatatatttttttcaaacaagttttgctacttttgaaaataaatctttctttatattgctaaaagctctgata

SEQ ID NO: 330295 - DNA, 352 bp, Homo sapiens
ccccctcgcaatgctcctctctctgtcccaccccgcgagaacactttacaacgacgaggagattcgtttccaaaccagaggagatcaattgtacttacaaagattcccatctatttaactttattaacttctaccgtgaatgactctgcaagccttgctggtccaagtgcaatatgtaattataaatatataaatagataagagcctatcaatgtatcttttgtacaatatgttgtaaaatgtagatcataggatagctgactttgacagtcacatttataaagtaattcacttaaagatatatatttttttcaaacaagttttgctacttttgaaaataaatctttcttta

SEQ ID NO: 330296 - DNA, 388 bp, Homo sapiens
ctccaccctcttctttcccgcagacgtggccctttatggtggccgggaaacccgagagtgacctgaaagaagtggtgaccgcgagccgcttatgtggaaccaccgcgtcctgaccttggaggtgcgagtctgggaaaggcgcgctcccggggggagcgggccccgggaaggcgacccctgccctcagtgctctctgtctctgcttccccctcgcaatgctcctctctctgtcccaccccgcgagaacactttacaacgacgaggagattcgtttccaaaccagaggagatcaattgtacttacaaagattcccatctatttaactttattaacttctaccgtgaatgactctgcaagccttgctggtccaagtgcaatatgtaattat

SEQ ID NO: 330297 - DNA, 1263 bp, Homo sapiens
cacgactctgggagtggggaaacagagagccggttcctctgctgcagaagtcctcggggttccttctcacaactctgcgaaggggaaagggttgtgagacccaaccagaccccaactccagctcccagcaggaggtggctgcgccacactcgggaggcctcttggtttcagggtctctctgtctctctctcaccctcttcctcgctttctctgtctctctgtctctctctctctctctccctcgtccactcccccaaacatgtccaccggctccctcagcgatgtggaggaccttcaagaggtggagatgttggaatgtgacgggttgaaaatggattcgaacaaggaatttgtgacttccaacgagagcaccgaggagagctccaactgcgagaatgggtctccccagaagggccgcggcggcctgggcaagaggaggaaggcgcccaccaagaagagccccctgagcggggtcagccaggaggggaagcaggtccagcgcaacgccgccaacgcgcgagagcgggcccgcatgcgagtgctgagcaaggccttctccagactcaagaccaccctgccctgggtgccccccgacaccaagctctccaagctggacacgctcaggctggcgtccagctacatcgcccacttgaggcagatcctggctaacgacaaatacgagaacgggtacattcacccggtcaacctgacgtggccctttatggtggccgggaaacccgagagtgacctgaaagaagtggtgaccgcgagccgcttatgtggaaccaccgcgtcctgaccttggaggtgcgagtctgggaaaggcgcgctcccggggggagcgggccccgggaaggcgacccctgccctcagtgctctctgtctctgcttccccctcgcaatgctcctctctctgtcccaccccgcgagaacactttacaacgacgaggagattcgtttccaaaccagaggagatcaattgtacttacaaagattcccatctatttaactttattaacttctaccgtgaatgactctgcaagccttgctggtccaagtgcaatatgtaattataaatatataaatagataagagcctatcaatgtatcttttgtacaatatgttgtaaaatgtagatcataggatagctgactttgacagtcacatttataaagtaattcacttaaagatatatatttttttcaaacaagttttgctacttttgaaaataaatctttctttatattgctaaaagctctgata

SEQ ID NO: 330298 - DNA, 735 bp, Homo sapiens
cacgactctgggagtggggaaacagagagccggttcctctgctgcagaagtcctcggggttccttctcacaactctgcgaaggggaaagggttgtgagacccaaccagaccccaactccagctcccagcaggaggtggctgcgccacactcgggaggcctcttggtttcagggtctctctgtctctctctcaccctcttcctcgctttctctgtctctctgtctctctctctctctctccctcgtccactcccccaaacatgtccaccggctccctcagcgatgtggaggaccttcaagaggtggagatgttggaatgtgacgggttgaaaatggattcgaacaaggaatttgtgacttccaacgagagcaccgaggagagctccaactgcgagcccgcgagaacactttacaacgacgaggagattcgtttccaaaccagaggagatcaattgtacttacaaagattcccatctatttaactttattaacttctaccgtgaatgactctgcaagccttgctggtccaagtgcaatatgtaattataaatatataaatagataagagcctatcaatgtatcttttgtacaatatgttgtaaaatgtagatcataggatagctgactttgacagtcacatttataaagtaattcacttaaagatatatatttttttcaaacaagttttgctacttttgaaaataaatctttctttatattgctaaaagctctgata

SEQ ID NO: 330299 - DNA, 849 bp, Homo sapiens
cacgactctgggagtggggaaacagagagccggttcctctgctgcagaagtcctcggggttccttctcacaactctgcgaaggggaaagggttgtgagacccaaccagaccccaactccagctcccagcaggaggtggctgcgccacactcgggaggcctcttggtttcagggtctctctgtctctctctcaccctcttcctcgctttctctgtctctctgtctctctctctctctctccctcgtccactcccccaaacatgtccaccggctccctcagcgatgtggaggaccttcaagaggtggagatgttggaatgtgacgggttgaaaatggattcgaacaaggaatttgtgacttccaacgagagcaccgaggagagctccaactgcgagaatgggtctccccagaagggccgcggcggcctgggcaagaggaggaaggcgacccctgccctcagtgctctctgtctctgcttccccctcgcaatgctcctctctctgtcccaccccgcgagaacactttacaacgacgaggagattcgtttccaaaccagaggagatcaattgtacttacaaagattcccatctatttaactttattaacttctaccgtgaatgactctgcaagccttgctggtccaagtgcaatatgtaattataaatatataaatagataagagcctatcaatgtatcttttgtacaatatgttgtaaaatgtagatcataggatagctgactttgacagtcacatttataaagtaattcacttaaagatatatatttttttcaaacaagttttgctacttttgaaaataaatctttctttatattgctaaaagctctgata

SEQ ID NO: 330300 - DNA, 566 bp, Homo sapiens
atctagtgccttcagactgcagacccaagcaagtatcatcttcccaggcagatcttaaggggtggattaaggcttacactaatgagaaaggaagcctcaaagtgtctctgtgccccaccatgaagtgcagccatctaagtaaaggtaccgctgtgtcatttctttcatttagaggccaggttctctgaaccctgactagacccaccaccaaacccagaacttcccacccactggaaacggcaaaaggaaagaaagtgaagaaaacctggcattctctacacaaaccttggtgatgacacctcaagggttttctgccaccagggaggtgaagttcacctccagagtccaatttcagctgctctattctcccagcctctcatccacccacctccacccccagggaggtaaaggaaaggagaagaagagaggagtggatgaaatataaatgaatgtgtgcagtagcagtcagaggcggcatccaatgctctgggccatggcagggctgtgtgcaggtgtccagcaggaaaaggtaaacttccttcattgctctccagccctgtggtgac

SEQ ID NO: 330301 - DNA, 1215 bp, Homo sapiens
agacgaggtttcaccaggttgccgtggctgatctggaactcctggtctcaagtgatctacccaactcagcctcccaaagtgctgggattacaggcgtgagccaccgcacccggcctaatctagcattttctaaaaggaaggacccagcagtgaacggcaatatcaataatcatgttcaagactatcagacatgcaagctggggatgaatgggtggaaggggaaaatgatgaataaatgatgaacacaagtatagacccagtggatttgagatgcccaagatgccagtgagatattcaaagtttaactcaaaagccacttcccatatgaaatcctgacaaacactcctacgtccaactggaattaatttctcttctgggctcccacagcactctgtatttttctaatagcataacactattttgtttgtagatatttctctgatagcattactatctttcctctttatcacaactgtttgaagttcttttgcctcttgcatccactgttgcccaatcccactgctggaaggctcatcttattaagttctgtattcctagtgctaacacactgtctaccatagatgatgttcaataaatggttgctaaatgaattctcttgtgataatagcactatggcaacataatcgacggtaaaaatttcttctcaatgtttacttttagcagaatgcattcatttatcaactttcattgagaatatgctaatttccatgaccctgctaggaaataggaaaataaagatgaatgtaataaggtgctcattctactgaaagtcttgactagtggagaattatggatccaacttttcatgaaatgccttcagtggtaagaattctcatatttggaataaaaaatgttatgggttgtgccaagatacctacatacttcataattttgtagagggctgtccttactgcagaaatgtatactactatagtcatatgtggaaattctttttatgatgctaactgcatgctaaccagactttttaatttaatacttgcattaaataaaccatgctaggaatccaggaatctagcttggtttattttccatacaatgtactctttgtaatatgcatatactacataaaaattctattaatggcctcgtactaaagatgtgtctgttggggaatcagttattctgtataattttatcttaattgatatattaaaatctaccaaaaatataaac

SEQ ID NO: 330302 - DNA, 289 bp, Homo sapiens
tccagctaatttttttggtattttttgcagagacgaggtttcaccaggttgccgtggctgatctggaactcctggtctcaagtgatctacccaactcagcctcccaaagtgctgggattacaggcgtgagccaccgcacccggcctaatctagcattttctaaaaggaaggacccagcagtgaacggcaatatcaataatcatgttcaagactatcagacatgcaagctggggatgaatgggtggaaggggaaaatgatgaataaatgatgaacacaagtatagaccca

SEQ ID NO: 330303 - DNA, 1869 bp, Homo sapiens
  misc_feature (1)..(1): n is a, c, g, or t
  misc_feature (4)..(4): n is a, c, g, or t
nggnggggccacgccttttccggcccgcagcgcggcctgggctcccgcgtgtttaaaagtgcgcttgtggctgctgctgtcttaactcctgtgcttggcggacagacaggcgagatggcggcggaggtgttgccgagtgcgaggtggcagtattgtggggcgcccgacgggagccagagagctgtactggtccagttctccaacgggaagctacagagtccaggcaacatgcgctttaccttgtatgagaacaaagattccaccaaccccaggaagaggaatcaacggatcctggcagctgaaacagataggctctcctatgtgggaaacaattttgggactggagccctcaaatgcaacactttgtgcaggcactttgtgggaattttgaacaagacctctggccaaatggaagtatatgatgctgaattgttcaacatgcagccactattttcagatgtatcagttgagagtgaactggcgctagagagtcagaccaaaacttacagagaaaagatggattcttgtattgaagcctttggtaccaccaaacagaagcgagctctgaacaccaggagaatgaacagagttggcaatgaatctttgaatcgtgcagtggctaaagctgcagagactatcattgatacgaagggtgtgactgctctggtcagcgatgctatccacaatgacttgcaagatgactccctctaccttcctccctgctatgatgatgcagccaagcctgaagacgtgtataaatttgaagatcttctttcccctgcggagtatgaagctcttcagagcccatctgaagctttcaggaacgtcacgtcagaagaaatactgaagatgattgaggagaacagccattgcacctttgtcatagaagcgttgaagtctttgccatcagatgtggagagccgagaccgccaggcccgatgcatatggtttctggataccctcatcaaatttcgagctcatagggtagttaagcggaaaagtgctctgggacctggagttccccacatcatcaacaccaaactgctgaagcactttacttgcttgacctacaacaatggcagattacggaacttaatttcggattctatgaaggcgaagattactgcatatgtgatcatacttgccttgcacatacatgacttccaaattgacctgacagtgttacagagggacttgaagctcagtgagaaaaggatgatggagatagccaaagccatgaggctgaagatctccaaaagaagggtgtctgtggccgccggcagtgaagaagatcacaaactgggcaccctgtccctcccgctgcctccagcccagacctcagaccgcctggcaaagcggaggaagattacctagacgcatgctttccagacagggcgttttggctgcatcacagccactggctggtcctattcatttccatttttatgtatgttttgaaaagaaaaggtccggggatggtggctcacacctgaaatcccagcactttgggaggccgaggcaggaagatcattgagctcaggagtttgaaaccagtctggacaacatagggagaccccatctctaccggaggaaaaaaaaaagagtcaggcctggtggtgtgcgcctgtaatcccagctactcgggaggctgaggcaggacgattacttgagcttgggaaatcaaggttgcagtgagctatgattgtgtggccacactccatcctgggtcacagagtgagaccttgtctcaaaaaagtaacataaggaaaaaagaagccttgctttagcacaggtatgaagccagaagccagcatctcaactgtgcttgtcttatgcagaaatataaagcgatggccaggttggacttca

SEQ ID NO: 330304 - DNA, 2539 bp, Homo sapiens
gcactcaggcaagaactaggctcggggtagaggtgacagctctgtgatggggagctcaggctgcaccaggaggccatgctaggtttgacttcatttaaaaagcacactacacagctgacgggctcaggagctccatgaagggcaccctgcagaggtctggagggtagtgagaaggtaccaatggggcgagcatgcctgtgtcgggaggctgatccgggtaggaataagcccagcatgccccacatgagcccaccatgaggaagcatttggagagaaagcttgctctgtgttgtcagaagggagattgaagaaggtgggcccaggggtgctgttgacagtataggctcatgtgctgttccaaggctcatctctggctcttgcctggtctggccataccatgtccacatccgctgtacttaggacttcctctgggcaccagggcagtggcctcaccaagacctggaggcctagatgatgaaatcatactggtgtttgctgtgcttgtacattcccatcagcagacatccgtgtttgggcctgactggccaacagggaagtccagggaggacacagtataagctgcttgggtagaggtcagctggaacctcttgtgaactctgcaccagagtgaagccttcacccatggcagtattcctgtgggtgggagggaagctactgcagactgaaagcaaatgattccaaggaaacacagtactttagagaattctctttagatccgtgagtgctgcccatggagctgggccattcctcctgagatacaggacaggacgcctcaactctgcttctttgggctctcccagacctacccaggccactggagtgagtctagagaaatgaccagggtggtgaagagacaccctgcaaactggcacatacgagaggaacccaggagggcagcagaccccagggggatgagggtgctgcctgcaaatctctgaagagttgtcacagaacagagtgaagagatgtcctttgggggccccaggaggtagagattctgggaatgaggttgggtttgtttcctcatttgtctgcctgtctgtccgccatccatccaacacttagtgagctttgctctgtgctgggcatagagaatcaacagtgaacaagatgggcaaagtccctgccctcaaccaacagactgaaaagagaggattcagtgccatctgcaggtggcatgtggctgagtgggcacaggagcatggagaaggcgcagttaactgttatttgtagagacaggggaaggtgttccatagaagtagtgactaaggagcttctgaaggaggggtagaatttagcgagggagagagactttggctcaattaagtaaaaagttagatgggctcagttttcttgggcaagtctggcctgttgtgcaaagcacccgcactccctgactcttccccaaacacaagagctaaggtgggtgttctgttcctcccacttctgcctccaaatgacctggagggaatttgtgtcccagctgttcccttccctgccacctttgctccaggtaatagccctcctcacacctctccacatctgatagggaactttcccctgccggatctcaggagcatcagcactcccagcctccaaaatggggacaatgagctcaccaagtcaatgtttaatacattattgacagaacttacgatgattttaggtggctcagggatgtagtaaagtacttgtgttctgctggttaggctaagctgaagtgacaaatggccctcaaatgtctggtttcaacaaaagttcatttgcttttgttgaatgtctggcacatgtctgtcagccagcaggcacctgggaccctgctccgggttagcttcaccccgggactcgggctgccatgtctgacacgtggtggtccactggcagagggacacacgatcggggcaagttctgctggcccttaaagcttctacccagaagtgaccattaaccacttctgcctacattcactgggcaaatcaggtcccatggcaacgtgagagggcatgtactctccctgaggggcagcaaacagtaactaccaaaaccaatgaatattttcattttaatagtttaatgtatgtttatagtaatataaaaagtcttttcagtgtgtgaaaaaaagacatgttgtaggatgggatcctggaatggaaaaaggacattaggtaacaaactaaagaaatctgaggccaggcacagtggctcatgtttgtaatcccagcactttgggggattgaagcaggcggatcacttgagcccaggagtttgagaccaggctaggcaacatggcaaaaccccgtctctacaaaaaaatacataaattggccaggcgtggtggtgcatgcctgtagtcccagctgctcaggaggctgaggtgggaggatcacctgagtgagcctgaggaggtcaaggctgcggtgaaccatgatcacaccactgcactctagcctgggcaacagagtgagatcccgtttcaaaaagaaaaaaatctgaataaactatggactttagttaaaat

SEQ ID NO: 330305 - DNA, 804 bp, Homo sapiens
gcactcaggcaagaactaggctcggggtagaggtgacagctctgtgatggggagctcaggctgcaccaggaggccatgctaggtttgacttcatttaaaaagcacactacacagctgacgggctcaggagctccatgaagggcaccctgcagaggtctggagggtagtgagaaggtaccaatggggcgagcatgcctgtgtcgggaggctgatccgggtaggaataagcccagcatgccccacatgagcccaccatgaggaagcatttggagagaaagcttgctctgtgttgtcagaagggagattgaagaaggtgggcccaggggtgctgttgacagtataggctcatgtgctgttccaaggctcatctctggctcttgcctggtctggccataccatgtccacatccgctgtacttaggacttcctctgggcaccagggcagtggcctcaccaagacctggaggcctagatgatgaaatcatactggtgtttgctgtgcttgtacattcccatcagcagacatccgtgtttgggcctgactggccaacagggaagtccagggaggacacagtataagctgcttgggtagaggtcagctggaacctcttgtgaactctgcaccagagtgaagccttcacccatggcagtattcctgtgggtgggaggatcacctgagtgagcctgaggaggtcaaggctgcggtgaaccatgatcacaccactgcactctagcctgggcaacagagtgagatcccgtttcaaaaagaaaaaaatctgaataaactatggactttagttaaaat

SEQ ID NO: 330306 - DNA, 1886 bp, Homo sapiens
  misc_feature (1)..(1): n is a, c, g, or t
  misc_feature (4)..(4): n is a, c, g, or t
nggnggggccacgccttttccggcccgcagcgcggcctgggctcccgcgtgtttaaaagtgcgcttgtggctgctgctgtcttaactcctgtgcttggcggacagacaggcgagatggcggcggaggtgttgccgagtgcgaggtggcagtattgtggggcgcccgacgggagccagagagctgtactggtccagttctccaacgggaagctacagagtccaggcaacatgcgctttaccttgtatgagaacaaagattccaccaaccccaggaagaggaatcaacggatcctggcagctgaaacagataggctctcctatgtgggaaacaattttgggactggagccctcaaatgcaacactttgtgcaggcactttgtgggaattttgaacaagacctctggccaaatggaagtatatgatgctgaattgttcaacatgcagccactattttcagatgtatcagttgagagtgaactggcgctagagagtcagaccaaaacttacagagaaaagatggattcttgtattgaagcctttggtaccaccaaacagaagcgagctctgaacaccaggagaatgaacagagttggcaatgaatctttgaatcgtgcagtggctaaagctgcagagactatcattgatacgaagggtgtgactgctctggtcagcgatgctatccacaatgacttgcaagatgactccctctaccttcctccctgctatgatgatgcagccaagcctgaagacgtgtataaatttgaagatcttctttcccctgcggagtatgaagctcttcagagcccatctgaagctttcaggaacgtcacgtcagaagaaatactgaagatgattgaggagaacagccattgcacctttgtcatagaagcgttgaagtctttgccatcagatgtggagagccgagaccgccaggcccgatgcatatggtttctggataccctcatcaaatttcgagctcatagggtagttaagcggaaaagtgctctgggacctggagttccccacatcatcaacaccaaactgctgaagcactttacttgcttgacctacaacaatggcagattacggaacttaatttcggattctatgaaggcgaagattactgcatatgtgatcatacttgccttgcacatacatgacttccaaattgacctgacagtgttacagagggacttgaagctcagtgagaaaaggatgatggagatagccaaagccatgaggctgaagatctccaaaagaagggtgtctgtggccgccggcagtgaagaagatcacaaactgggcaccctgtccctcccgctgcctccagcccagacctcagaccgcctggcaaagcggaggaagattacctagacgcatgctttccagacagggcgttttggctgcatcacagccactggctggtcctattcatttccatttttatgtatgttttgaaaagaaaaggtccggggatggtggctcacacctgaaatcccagcactttgggaggccgaggcaggaagatcattgagctcaggagtttgaaaccagtctggacaacatagggagaccccatctctaccggaggaaaaaaaaaagagtcaggcctggtggtgtgcgcctgtaatcccagctactcgggaggctgaggcaggacgattacttgagcttgggaaatcaaggttgcagtgagctatgattgtgtggccacactccatcctgggtcacagagtgagaccttgtctcaaaaaagtaacataaggaaaaaagaagccttgctttagcacaggtatgaagccagaagccagcatctcaactgtgcataatacctccaggaaatataagcatgtcgtcttcccctccctgctccttcctctcctctc

SEQ ID NO: 330307 - DNA, 3204 bp, Homo sapiens
gctctaggtatcttaagaagaatggattttaatgtatggataaggtgctgtagaattgtgacaagggccagaggactgggaatcggaaggttgccgtcaggactgctgaattcaagaacacactgccggggttgccatcggggactcagaagccacttctgctccataactgctcctggaattcatgcagctgaagattcaacactgggctgctgatttcagctacccatgctttcttctttttctttttatttttttgagacagagtcttgctctgtggcccaggctggagtgcagtggcacgatctcgctcactgctacctccgcctcccatggcctggttcaagcaattctcctgcctcagcctcctgagtagctgggattacaggcatgcgccaccatgcccagctaatttttttgcatttttagtagagacagggtttcactgtgttggccaggctggtcttggactcctgacctcatgatccacccgccttggcctcccaaggtgctgggattacaggtatgagccaccgtgcccagcctacccgtgctttcaaaggtcctgtatttccaccactttgtcaccacagacagccagaaggtcaagcagctggcctccaccttgcttccttctggtgcgcatatataggagcctgattagcatgtagaatcctagcagaatgggagtctttgaaataggtttcagctcaccagcctctagttacaggaggcattctagaaggacatgagtggattataactgccaaccaattgtatgtgccactgaggagatggagaagctgtgtccagagcggtgctataaggacaggagtgtgacacaggaaggcttaggtacgtggcctgggcccagtctcacatctcagggtcctgcttcaagtgggagcagttgagatctgtgacactcagcacctgggaggccgggtcagtgaagggaggggtgcttctcctgcctcagcctcccgattacaggcatgcacaccatgcccggtaatttgtatttagtagagacagcgtttctccatgttaggctggtctcaatctcctgacctcaggtgatctgcccgcctcggtctcccaaagtgctggaattataggcgtgagccaccacgcccagccttttgtgattacttttaaaattcagctgggtttgacacttggaggcttaatttctgggaatgactggacacagcatgtggctgggaccctctgaacaacctctgacctagtggagaagcaggtggtaatgactgtaggtatggatagggaaagactaggcgggcaaatacttgtcgtgtgtcaacaggtgtattttgctaaatgtcggggacacattccaagaggctaaaaagcaaatttctgtacattaggagatttgtgagtccttaggaaaggctcagaagagggctccacctagcacaatacctgacatagaaagtggtcagtgtctgcagaatgagtcggcatgaaccgtactttccttggcagggttattaggtggtaaatacctgcagaataatgggattgtactagggtttcttctggctttagaaacccatttgtttactaatagattcccagaggataccttgatctcaccaagctatttgccagaatgtctcctgatggcctcattgaagaaagggggactatgagccagatgctggtgccctgaagatttgtagtttgtgggatagtcttaacttggcagggtttgattaacagaatgaagtctgttccttagagggaagtctttgcttgctgccctgacctgctggacactgttaattgggatgaggtcaaagaaggcatagttaccacatttgcaggagaccctaacctggaaatagtaaattacataacattctttcaagtgtctcctcttttaaaaaagtattttgatatagtttcacacagagaaaacttgcaagaactcttgtatatcctttacccagattctccaactgtcaatactttgtcccatttactatttgctttagacattttgagatttgtttttgaaccatttgaggaaaacatcctacccttctacccataagtactttttcagtgtgtacatcttaagaatcaggactttctcttccataaccacagtccatcagatgcaggaaataagacaataatgcaatactatgacttagcccacagttcatgttcaaatcttaccgatcaccatgcctctttggtcttgcttaatctgaaacagttcagatttttattggactttctcggctttgacattttggagagtgaggtgttattctttagggtgtctgtcagtttacatttggggctttcccgtgatcggattcaggatttacatttttggcaggaacagcacagaaatgatgctgtgacccacatgcatcacattaggggcccatgatgtgggactgcgctttccttgctgctgttaacttttatcagttaaggttgtgttttccgcattgtgaagatactgtttttccttttaataagtaatttctggagggatactttgaaactaagtatcctgttcctcatcaaactttcacctactagtttcagcctcaattgatgattcttgctgaatcaattaccaagatggttgcaaaatggtgattttgcaacattatcgtttcttctaattattggcatgctcttataaggcagtttgttttctcgaccttagaagttttgtgttcatttagttattggcatagactcaagagtcttgtgttctatgtggagtctgttactgtgattccttgtgatgtccagattgtatgtatttggccaatcttgagttccttcaggaaacctcctggatcccatcattttaagggtgcttccttactttctagcatgagatattccaggcctaccttgtactttccctgctgcagccctggagtcagtcttttgttgtggttttgctttttagagacagggtcttgctctgtcgctcaggctggagagcggtggtgcagtcagctcactccactcctgggctcaagccatcctcctgcctcagcctcctgagtagctaggactataggcatgcaccaccacgcccagctttgaatccgtcttttatccaaggagcttctagcctgggcaacagagtgagatcccgtttcaaaaagaaaaaaatctgaataaactatggactttagttaaaat

SEQ ID NO: 330308 - DNA, 3232 bp, Homo sapiens
gctctaggtatcttaagaagaatggattttaatgtatggataaggtgctgtagaattgtgacaagggccagaggactgggaatcggaaggttgccgtcaggactgctgaattcaagaacacactgccggggttgccatcggggactcagaagccacttctgctccataactgctcctggaattcatgcagctgaagattcaacactgggctgctgatttcagctacccatgctttcttctttttctttttatttttttgagacagagtcttgctctgtggcccaggctggagtgcagtggcacgatctcgctcactgctacctccgcctcccatggcctggttcaagcaattctcctgcctcagcctcctgagtagctgggattacaggcatgcgccaccatgcccagctaatttttttgcatttttagtagagacagggtttcactgtgttggccaggctggtcttggactcctgacctcatgatccacccgccttggcctcccaaggtgctgggattacaggtatgagccaccgtgcccagcctacccgtgctttcaaaggtcctgtatttccaccactttgtcaccacagacagccagaaggtcaagcagctggcctccaccttgcttccttctggtgcgcatatataggagcctgattagcatgtagaatcctagcagaatgggagtctttgaaataggtttcagctcaccagcctctagttacaggaggcattctagaaggacatgagtggattataactgccaaccaattgtatgtgccactgaggagatggagaagctgtgtccagagcggtgctataaggacaggagtgtgacacaggaaggcttaggtacgtggcctgggcccagtctcacatctcagggtcctgcttcaagtgggagcagttgagatctgtgacactcagcacctgggaggccgggtcagtgaagggaggggtgcttctcctgcctcagcctcccgattacaggcatgcacaccatgcccggtaatttgtatttagtagagacagcgtttctccatgttaggctggtctcaatctcctgacctcaggtgatctgcccgcctcggtctcccaaagtgctggaattataggcgtgagccaccacgcccagccttttgtgattacttttaaaattcagctgggtttgacacttggaggcttaatttctgggaatgactggacacagcatgtggctgggaccctctgaacaacctctgacctagtggagaagcaggtggtaatgactgtaggtatggatagggaaagactaggcgggcaaatacttgtcgtgtgtcaacaggtgtattttgctaaatgtcggggacacattccaagaggctaaaaagcaaatttctgtacattaggagatttgtgagtccttaggaaaggctcagaagagggctccacctagcacaatacctgacatagaaagtggtcagtgtctgcagaatgagtcggcatgaaccgtactttccttggcagggttattaggtggtaaatacctgcagaataatgggattgtactagggtttcttctggctttagaaacccatttgtttactaatagattcccagaggataccttgatctcaccaagctatttgccagaatgtctcctgatggcctcattgaagaaagggggactatgagccagatgctggtgccctgaagatttgtagtttgtgggatagtcttaacttggcagggtttgattaacagaatgaagtctgttccttagagggaagtctttgcttgctgccctgacctgctggacactgttaattgggatgaggtcaaagaaggcatagttaccacatttgcaggagaccctaacctggaaatagtaaattacataacattctttcaagtgtctcctcttttaaaaaagtattttgatatagtttcacacagagaaaacttgcaagaactcttgtatatcctttacccagattctccaactgtcaatactttgtcccatttactatttgctttagacattttgagatttgtttttgaaccatttgaggaaaacatcctacccttctacccataagtactttttcagtgtgtacatcttaagaatcaggactttctcttccataaccacagtccatcagatgcaggaaataagacaataatgcaatactatgacttagcccacagttcatgttcaaatcttaccgatcaccatgcctctttggtcttgcttaatctgaaacagttcagatttttattggactttctcggctttgacattttggagagtgaggtgttattctttagggtgtctgtcagtttacatttggggctttcccgtgatcggattcaggatttacatttttggcaggaacagcacagaaatgatgctgtgacccacatgcatcacattaggggcccatgatgtgggactgcgctttccttgctgctgttaacttttatcagttaaggttgtgttttccgcattgtgaagatactgtttttccttttaataagtaatttctggagggatactttgaaactaagtatcctgttcctcatcaaactttcacctactagtttcagcctcaattgatgattcttgctgaatcaattaccaagatggttgcaaaatggtgattttgcaacattatcgtttcttctaattattggcatgctcttataaggcagtttgttttctcgaccttagaagttttgtgttcatttagttattggcatagactcaagagtcttgtgttctatgtggagtctgttactgtgattccttgtgatgtccagattgtatgtatttggccaatcttgagttccttcaggaaacctcctggatcccatcattttaagggtgcttccttactttctagcatgagatattccaggcctaccttgtactttccctgctgcagccctggagtcagtcttttgttgtggttttgctttttagagacagggtcttgctctgtcgctcaggctggagagcggtggtgcagtcagctcactccactcctgggctcaagccatcctcctgcctcagcctcctgtagtcccagctgctcaggaggctgaggtgggaggatcacctgagtgagcctgaggaggtcaaggctgcggtgaaccatgatcacaccactgcactctagcctgggcaacagagtgagatcccgtttcaaaaagaaaaaaatctgaataaactatggactttagttaaaat

SEQ ID NO: 330309 - DNA, 2855 bp, Homo sapiens
  misc_feature (1)..(1): n is a, c, g, or t
  misc_feature (4)..(4): n is a, c, g, or t
nggnggggccacgccttttccggcccgcagcgcggcctgggctcccgcgtgtttaaaagtgcgcttgtggctgctgctgtcttaactcctgtgcttggcggacagacaggctggtcttggactcctgacctcatgatccacccgccttggcctcccaaggtgctgggattacaggtatgagccaccgtgcccagcctacccgtgctttcaaaggtcctgtatttccaccactttgtcaccacagacagccagaaggtcaagcagctggcctccaccttgcttccttctggtgcgcatatataggagcctgattagcatgtagaatcctagcagaatgggagtctttgaaataggtttcagctcaccagcctctagttacaggaggcattctagaaggacatgagtggattataactgccaaccaattgtatgtgccactgaggagatggagaagctgtgtccagagcggtgctataaggacaggagtgtgacacaggaaggcttaggtacgtggcctgggcccagtctcacatctcagggtcctgcttcaagtgggagcagttgagatctgtgacactcagcacctgggaggccgggtcagtgaagggaggggtgcttctcctgcctcagcctcccgattacaggcatgcacaccatgcccggtaatttgtatttagtagagacagcgtttctccatgttaggctggtctcaatctcctgacctcaggtgatctgcccgcctcggtctcccaaagtgctggaattataggcgtgagccaccacgcccagccttttgtgattacttttaaaattcagctgggtttgacacttggaggcttaatttctgggaatgactggacacagcatgtggctgggaccctctgaacaacctctgacctagtggagaagcaggtggtaatgactgtaggtatggatagggaaagactaggcgggcaaatacttgtcgtgtgtcaacaggtgtattttgctaaatgtcggggacacattccaagaggctaaaaagcaaatttctgtacattaggagatttgtgagtccttaggaaaggctcagaagagggctccacctagcacaatacctgacatagaaagtggtcagtgtctgcagaatgagtcggcatgaaccgtactttccttggcagggttattaggtggtaaatacctgcagaataatgggattgtactagggtttcttctggctttagaaacccatttgtttactaatagattcccagaggataccttgatctcaccaagctatttgccagaatgtctcctgatggcctcattgaagaaagggggactatgagccagatgctggtgccctgaagatttgtagtttgtgggatagtcttaacttggcagggtttgattaacagaatgaagtctgttccttagagggaagtctttgcttgctgccctgacctgctggacactgttaattgggatgaggtcaaagaaggcatagttaccacatttgcaggagaccctaacctggaaatagtaaattacataacattctttcaagtgtctcctcttttaaaaaagtattttgatatagtttcacacagagaaaacttgcaagaactcttgtatatcctttacccagattctccaactgtcaatactttgtcccatttactatttgctttagacattttgagatttgtttttgaaccatttgaggaaaacatcctacccttctacccataagtactttttcagtgtgtacatcttaagaatcaggactttctcttccataaccacagtccatcagatgcaggaaataagacaataatgcaatactatgacttagcccacagttcatgttcaaatcttaccgatcaccatgcctctttggtcttgcttaatctgaaacagttcagatttttattggactttctcggctttgacattttggagagtgaggtgttattctttagggtgtctgtcagtttacatttggggctttcccgtgatcggattcaggatttacatttttggcaggaacagcacagaaatgatgctgtgacccacatgcatcacattaggggcccatgatgtgggactgcgctttccttgctgctgttaacttttatcagttaaggttgtgttttccgcattgtgaagatactgtttttccttttaataagtaatttctggagggatactttgaaactaagtatcctgttcctcatcaaactttcacctactagtttcagcctcaattgatgattcttgctgaatcaattaccaagatggttgcaaaatggtgattttgcaacattatcgtttcttctaattattggcatgctcttataaggcagtttgttttctcgaccttagaagttttgtgttcatttagttattggcatagactcaagagtcttgtgttctatgtggagtctgttactgtgattccttgtgatgtccagattgtatgtatttggccaatcttgagttccttcaggaaacctcctggatcccatcattttaagggtgcttccttactttctagcatgagatattccaggcctaccttgtactttccctgctgcagccctggagtcagtcttttgttgtggttttgctttttagagacagggtcttgctctgtcgctcaggctggagagcggtggtgcagtcagctcactccactcctgggctcaagccatcctcctgcctcagcctcctgagtagctaggactataggcatgcaccaccacgcccagctttgaatccgtcttttatccaaggagcttctagcctgggcaacagagtgagatcccgtttcaaaaagaaaaaaatctgaataaactatggactttagttaaaat

SEQ ID NO: 330310 - DNA, 1678 bp, Homo sapiens
gcactcaggcaagaactaggctcggggtagaggtgacagctctgtgatggggagctcaggctgcaccaggaggccatgctaggtttgacttcatttaaaaagcacactacacagctgacgggctcaggagctccatgaagggcaccctgcagaggtctggagggtagtgagaaggtaccaatggggcgagcatgcctgtgtcgggaggctgatccgggtaggaataagcccagcatgccccacatgagcccaccatgaggaagcatttggagagaaagcttgctctgtgttgtcagaagggagattgaagaaggtgggcccaggggtgctgttgacagtataggctcatgtgctgttccaaggctcatctctggctcttgcctggtctggccataccatgtccacatccgctgtacttaggacttcctctgggcaccagggcagtggcctcaccaagacctggaggcctagatgatgaaatcatactggtgtttgctgtgcttgtacattcccatcagcagacatccgtgtttgggcctgactggccaacagggaagtccagggaggacacagtataagctgcttgggtagaggtcagctggaacctcttgtgaactctgcaccagagtgaagccttcacccatggcagtattcctgtgggtgggagggaagctactgcagactgaaagcaaatgattccaaggaaacacagtactttagagaattctctttagatccgtgagtgctgcccatggagctgggccattcctcctgagatacaggacaggacgcctcaactctgcttctttgggctctcccagacctacccaggccactggagtgagtctagagaaatgaccagggtggtgaagagacaccctgcaaactggcacatacgagaggaacccaggagggcagcagaccccagggggatgagggtgctgcctgcaaatctctgaagagttgtcacagaacagagtgaagagatgtcctttgggggccccaggaggtagagattctgggaatgaggttgggtttgtttcctcatttgtctgcctgtctgtccgccatccatccaacacttagtgagctttgctctgtgctgggcatagagaatcaacagtgaacaagatgggcaaagtccctgccctcaaccaacagactgaaaagagaggattcagtgccatctgcaggtggcatgtggctgagtgggcacaggagcatggagaaggcgcagttaactgttatttgtagagacaggggaaggtgttccatagaagtagtgactaaggagcttctgaaggaggggtagaatttagcgagggagagagactttggctcaattaagtaaaaagttagatgggctcagttttcttgggcaagtctggcctgttgtgcaaagcacccgcactccctgactcttccccaaacacaagagctaaggtgggtgttctgttcctcccacttctgcctccaaatgacctggagggaatttgtgtcccagctgttcccttccctgccacctttgctccaggtgggaggatcacctgagtgagcctgaggaggtcaaggctgcggtgaaccatgatcacaccactgcactctagcctgggcaacagagtgagatcccgtttcaaaaagaaaaaaatctgaataaactatggactttagttaaaat

SEQ ID NO: 330311 - DNA, 1328 bp, Homo sapiens
gctctaggtatcttaagaagaatggattttaatgtatggataaggtgctgtagaattgtgacaagggccagaggactgggaatcggaaggttgccgtcaggactgctgaattcaagaacacactgccggggttgccatcggggactcagaagccacttctgctccataactgctcctggaattcatgcagctgaagattcaacactgggctgctgatttcagctacccatgctttcttctttttctttttatttttttgagacagagtcttgctctgtggcccaggctggagtgcagtggcacgatctcgctcactgctacctccgcctcccatggcctggttcaagcaattctcctgcctcagcctcctgagtagctgggattacaggcatgcgccaccatgcccagctaatttttttgcatttttagtagagacagggtttcactgtgttggccaggctggtcttggactcctgacctcatgatccacccgccttggcctcccaaggtgctgggattacaggtatgagccaccgtgcccagcctacccgtgctttcaaaggtcctgtatttccaccactttgtcaccacagacagccagaaggtcaagcagctggcctccaccttgcttccttctggtgcgcatatataggagcctgattagcatgtagaatcctagcagaatgggagtctttgaaataggtttcagctcaccagcctctagttacaggaggcattctagaaggacatgagtggattataactgccaaccaattgtatgtgccactgaggagatggagaagctgtgtccagagcggtgctataaggacaggagtgtgacacaggaaggcttaggtacgtggcctgggcccagtctcacatctcagggtcctgcttcaagtgggagcagttgagatctgtgacactcagcacctgggaggccgggtcagtgaagggagggagacagaactcagctcctctgagaggagaagtttacacagcacctggggccctccatttgggagtcacagtggaaaggagtcttggctgagctttggggcaggtgcaccttattttctttgcggtctgggatgccctcagagctgtgctcctctgctttgtccccatctgcctctggccctgggtaggaggcacttggagcatactttgtcttccttcagcagaggtgtgggcagggaatctacttgtctcttgttttcctttaagccgttgtgaaaatcaagtatgtgactctagcctgggcaacagagtgagatcccgtttcaaaaagaaaaaaatctgaataaactatggactttagttaaaat

SEQ ID NO: 330312 - DNA, 567 bp, Homo sapiens
cacctggggccctccatttgggagtcacagtggaaaggagtcttggctgagctttggggcaggtgcaccttattttctttgcggtctgggatgccctcagagctgtgctcctctgctttgtccccatctgcctctggccctgggtaggaggcacttggagcatactttgtcttccttcagcagaggtgtgggcagggaatctacttgtctcttgttttcctttaagccgttgtgaaaatcaagtatgtgaccttccttggaaaaaataatctctcagaaaaggacttctaatacatcctcagggtagaatgtgtttccgtgattactttttttttttgagatggagtttcgctcttgttgcccaggctggagtgcaatggcgtgatcttagctcactgcaacctctgcctcccgggttcaagtgcttctcctgcctcagcctcccgattacaggcatgcacaccatgcccggtaatttgtatttagtagagacagcgtttctccatgttaggctggtctcaatctcctgacctcaggtgatctgcccgcctcggtctcccaaagtgc

SEQ ID NO: 330313 - DNA, 2092 bp, Homo sapiens
  misc_feature (1)..(1): n is a, c, g, or t
  misc_feature (4)..(4): n is a, c, g, or t
nggnggggccacgccttttccggcccgcagcgcggcctgggctcccgcgtgtttaaaagtgcgcttgtggctgctgctgtcttaactcctgtgcttggcggacagacaggcgagatggcggcggaggtgttgccgagtgcgaggtggcagtattgtggggcgcccgacgggagccagagagctgtactggtccagttctccaacgggaagctacagagtccaggcaacatgcgctttaccttgtatgagaacaaagattccaccaaccccaggaagaggaatcaacggatcctggcagctgaaacagataggctctcctatgtgggaaacaattttgggactggagccctcaaatgcaacactttgtgcaggcactttgtgggaattttgaacaagacctctggccaaatggaagtatatgatgctgaattgttcaacatgcagccactattttcagatgtatcagttgagagtgaactggcgctagagagtcagaccaaaacttacagagaaaagatggattcttgtattgaagcctttggtaccaccaaacagaagcgagctctgaacaccaggagaatgaacagagttggcaatgaatctttgaatcgtgcagtggctaaagctgcagagactatcattgatacgaagggtgtgactgctctggtcagcgatgctatccacaatgacttgcaagatgactccctctaccttcctccctgctatgatgatgcagccaagcctgaagacgtgtataaatttgaagatcttctttcccctgcggagtatgaagctcttcagagcccatctgaagctttcaggaacgtcacgtcagaagaaatactgaagatgattgaggagaacagccattgcacctttgtcatagaagcgttgaagtctttgccatcagatgtggagagccgagaccgccaggcccgatgcatatggtttctggataccctcatcaaatttcgagctcatagggtagttaagcggaaaagtgctctgggacctggagttccccacatcatcaacaccaaactgctgaagcactttacttgcttgacctacaacaatggcagattacggaacttaatttcggattctatgaaggcgaagattactgcatatgtgatcatacttgccttgcacatacatgacttccaaattgacctgacagtgttacagagggacttgaagctcagtgagaaaaggatgatggagatagccaaagccatgaggctgaagatctccaaaagaagggtgtctgtggccgccggcagtgaagaagatcacaaactgggcaccctgtccctcccgctgcctccagcccagacctcagaccgcctggcaaagcggaggaagattacctagacgcatgctttccagacagggcgttttggctgcatcacagccactggctggtcctattcatttccatttttatgtatgttttgaaaagaaaaggtccggggatggtggctcacacctgaaatcccagcactttgggaggccgaggcaggaagatcattgagctcaggagtttgaaaccagtctggacaacatagggagaccccatctctaccggaggaaaaaaaaaagagtcaggcctggtggtgtgcgcctgtaatcccagctactcgggaggctgaggcaggacgattacttgagcttgggaaatcaaggttgcagtgagctatgattgtgtggccacactccatcctgggtcacagagtgagaccttgtctcaaaaaagtaacataaggaaaaaagaagccttgctttagcacaggtatgaagccagaagccagcatctcaactgtgcttgtcttatgcagaaatataaagcgatggccaggttggacttcaaaaaaaaaataactgaaaataggcgcatagttgcgaacacagacacaaaaaaaaatttgtttggggcgttggccgaaaaaagctttcaaacactttgttgggggcggccacaatgttatgcacatgtgcaaagggtccaaaagattggctagacatgcgtggcttcacaaaaaagcggggacggggttttagacctcagtggtgggcatggatcagagacagg

SEQ ID NO: 330314 - DNA, 814 bp, Homo sapiens
tctcctttattgccactgattttctagattacggaacttaatttcggattctatgaaggcgaagattactgcatatgtgatcatacttgccttgcacatacatgacttccaaattgacctgacagtgttacagagggacttgaagctcagtgagaaaaggatgatggagatagccaaagccatgaggctgaagatctccaaaagaagggtgtctgtggccgccggcagtgaagaagatcacaaactgggcaccctgtccctcccgctgcctccagcccagacctcagaccgcctggcaaagcggaggaagattacctagacgcatgctttccagacagggcgttttggctgcatcacagccactggctggtcctattcatttccatttttatgtatgttttgaaaagaaaaggtccggggatggtggctcacacctgaaatcccagcactttgggaggccgaggcaggaagatcattgagctcaggagtttgaaaccagtctggacaacatagggagaccccatctctaccggaggaaaaaaaaaagagtcaggcctggtggtgtgcgcctgtaatcccagctactcgggaggctgaggcaggacgattacttgagcttgggaaatcaaggttgcagtgagctatgattgtgtggccacactccatcctgggtcacagagtgagaccttgtctcaaaaaagtaacataaggaaaaaagaagccttgctttagcacaggtatgaagccagaagccagcatctcaactgtgcttgtcttatgcagaaatataaagcgatggccaggttggacttca

SEQ ID NO: 330315 - DNA, 378 bp, Homo sapiens
tgctatcctttttactaactaatcctagtttaggacctttttattttgcctccttgtctctgggcttccagtgtatcattctgttaccaaacacaaatttaatagtcatcctcctgctaaaaagagactttctgtcaaaagtctatcccagactccttactatggcattcatggcttccccatcttaacatagctaatttttttcaatctcatctgcagttgttcctcatcccttatcacccccagttgcactgtttgtaattctttactgtgtaacacatatttgtgttttcatgcttttgttcatacttgtccctcttcttttgataccttttcttttctttctgtctctcttttttcttgagacagggtttttgc

SEQ ID NO: 330316 - DNA, 2833 bp, Homo sapiens
  misc_feature (969)..(969): n is a, c, g, or t
tttttgtgcaggaacagcccctcccgtctttgtcctggcggtgagcacccagggctaagcttttgaacactttctttgtgtttggattcagcccaggcaatgcatatttgctttcatttcttcttgagcttgaggagctcctgggtgcaaatcttggaaaatgaggatctctgagcctttccaggccagctctttgttttgtagcagacaattgaggctttgaaaaggaaagtgggtgggggcaccccacaggtggccctcatcacccaattgccagtgcctgcaggctgcttcagcagaggcccagagtcaaagaggacttaaaaccagctgtcgtttctcccttagcttctgtgtatgagagaaacgacttctgtttttcaaagtaagaacaaggaggaatttgtttctaaaagaacattaaaacacaggctcgtggtctaaaagcaaatggttcagcaggatgttcagggccttaaagcacagtcagcaggactcagcatctcccagcacctgctctccggttgtcatggtaacatcatccccaacccaaccaccttgtccagccgagagacagcaatcataaggagggacctcggtttcccccgaggatcctgggcttcctttctgaaacgcttgcttctgagctcagcaaccaggaacaccaggccagcccatccccagcacctctgtggagatgagggacaaagtcctacagtccctcttcctgttctgatgagaaagggagggaagaaaacataccccgagcgcctgcaatatggtcatgacactttcaaaaagcctgtgctatggagtcatgatcagaaaccagagtgtggagagggtcagcagcctgcctcagagcagccagctaggcggggagtggtaaatttgggacttgtacccaggcatgactggctccgagcccagtgctccactctatggaatgttccctgggcctcagttgcnttcctttcctttgcaggccgcgggctgctgccactctggcagctggtgagttagctggagggcaacattccaaagcaggggcagcatgctgctttcctcctgtgcccactcctgcggggaagtccgttgactcccaccgctgaagggagctggcaacaccaggatgaggtcccaggggacgggagcaggtacccactgtctgtctaccttcccactggaaaagcacggacaggccagcccttgcgggggcaggcagaggacagagttggctttgcgcggtctctgcctgctgagcagttccaattcctctcatgggagaaacaaggaggcagtcgcttgtgcatgttccagaagttttactggggaggaggaagcggacagaggaagctgtgtgtgcatgtgaaggggtgggcagggtgggagggatgcacgcgtatgtgagcatagcatgtgtgagtactacacacatctccatgcagaagcacaactgggcagccctggcttccagctctgggcttcagcacaacagacaccagcctgtggtctctcagaagccagggagaccacatcgggctcaggacgttttacccaaagtccagagtttttatgcctctccctggcattctccataaagaagggaaggtcagatgaccccttagatctgtgtcatctgggaatttccttgggctggtttagacacgatgccctctttttctcaggatagcagataacctgctttgaaagagggcttaattctgtgggtcctaaattttctcctttctctctctctttctgtgtgtgtgtgttgggaaaatggcaagtttccaataccagctttggaggaacgattacgttttccctccaatttcaagtccgaaagaccagagccctcattccaaagccccccacccagatggattttttcgtttcatttgtcatccgtcccatgggagggccccatgtctcctcagaacccatcctggaggcagcaggtcgggtagagtgagtttggcctgctcatgacctccacccctgagattgtgaacaaggatgtctggggcgatgctgagaatgtttttgaagctgctcccagatgacgctgatgatcacaccagattgagtgctgcgatcgccttgagtccaacctctgcataaacgaggttctcataaacaagttcactctaccctaagctaagtctatgtgagcaaacccacttcatcctttgtacctggagacctggttacactaacctgatactgacctgttcatgtagctggaatggtgtgtttcatgcagtgtggaccaagcaatggcatggggtgtgtgtgtgtgtgtgtgtgtgtctgtgtgtgtgtgtttgtgtatgcgttcacacttgtgtgtgtatatgtgcatgtagatgctgcataaatgatttttgatgtcaaagacaaacacattccattgttttaaatattctattatgtaaacaatacgcagagggaccatatctactcttgtcatattatttgtgatggtaaaacatgcatttgcaataaattaagctttctgggaaggcaagcagtattggagccaaacgactgtctcggaacatgtgtgtgttatctcggttcatatcaagtccaaagctaatggagccttccccgccatccagggaggaacaccaggaccccggagtttcttcttagtgctatattttaaagttgcattgacgttttcctccccttccttttgtgcaagttggaagtagcagtgttctaaaagatggtttgacgtttttgctgttgttttatgtttttaaaaatgtatctgctttgtgtttggaaataaaaatctctattttggtctatgaaaaaaaaagtg

SEQ ID NO: 330317 - DNA, 2779 bp, Homo sapiens
  misc_feature (969)..(969): n is a, c, g, or t
tttttgtgcaggaacagcccctcccgtctttgtcctggcggtgagcacccagggctaagcttttgaacactttctttgtgtttggattcagcccaggcaatgcatatttgctttcatttcttcttgagcttgaggagctcctgggtgcaaatcttggaaaatgaggatctctgagcctttccaggccagctctttgttttgtagcagacaattgaggctttgaaaaggaaagtgggtgggggcaccccacaggtggccctcatcacccaattgccagtgcctgcaggctgcttcagcagaggcccagagtcaaagaggacttaaaaccagctgtcgtttctcccttagcttctgtgtatgagagaaacgacttctgtttttcaaagtaagaacaaggaggaatttgtttctaaaagaacattaaaacacaggctcgtggtctaaaagcaaatggttcagcaggatgttcagggccttaaagcacagtcagcaggactcagcatctcccagcacctgctctccggttgtcatggtaacatcatccccaacccaaccaccttgtccagccgagagacagcaatcataaggagggacctcggtttcccccgaggatcctgggcttcctttctgaaacgcttgcttctgagctcagcaaccaggaacaccaggccagcccatccccagcacctctgtggagatgagggacaaagtcctacagtccctcttcctgttctgatgagaaagggagggaagaaaacataccccgagcgcctgcaatatggtcatgacactttcaaaaagcctgtgctatggagtcatgatcagaaaccagagtgtggagagggtcagcagcctgcctcagagcagccagctaggcggggagtggtaaatttgggacttgtacccaggcatgactggctccgagcccagtgctccactctatggaatgttccctgggcctcagttgcnttcctttcctttgcaggccgcgggctgctgccactctggcagctggtgagttagctggagggcaacattccaaagcaggggcagcatgctgctttcctcctgtgcccactcctgcggggaagtccgttgactcccaccgctgaagggagctggcaacaccaggatgaggtcccaggggacgggagcaggtacccactgtctgtctaccttcccactggaaaagcacggacaggccagcccttgcgggggcaggcagaggacagagttggctttgcgcggtctctgcctgctgagcagttccaattcctctcatgggagaaacaaggaggcagtcgcttgtgcatgttccagaagttttactggggaggaggaagcggacagaggaagctgtgtgtgcatgtgaaggggtgggcagggtgggagggatgcacgcgtatgtgagcatagcatgtgtgagtactacacacatctccatgcagaagcacaactgggcagccctggcttccagctctgggcttcagcacaacagacaccagcctgtggtctctcagaagccagggagaccacatcgggctcaggacgttttacccaaagtccagagtttttatgcctctccctggcattctccataaagaagggaaggtcagatgaccccttagatctgtgtcatctgggaatttccttgggctggtttagacacgatgccctctttttctcaggatagcagataacctgctttgaaagagggcttaattctgtgggtcctaaattttctcctttctctctctctttctgtgtgtgtgtgttgggaaaatggcaagtttccaataccagctttggaggaacgattacgttttccctccaatttcaagtccgaaagaccagagccctcattccaaagccccccacccagatggattttttcgtttcatttgtcatccgtcccatgggagggccccatgtctcctcagaacccatcctggaggcagcaggtcgggtagagtgagtttggcctgctcatgacctccacccctgagattgtgaacaaggatgtctggggcgatgctgagaatgtttttgaagctgctcccagatgacgctgatgatcacaccagattgagtgctgcgatcgccttgagtccaacctctgcataaacgaggttctcataaacaagttcactctaccctaagctaagtctatgtgagcaaacccacttcatcctttgtacctggagacctggttacactaacctgatactgacctgttcatgtagctggaatggtgtgtttcatgcagtgtggaccaagcaatggcatggggtgtgtgtgtgtgtgtgtgtgtgtctgtgtgtgtgtgtttgtgtatgcgttcacacttgtgtgtgtatatgtgcatgtagatgctgcataaatgatttttgatgtcaaagacaaacacattccattgttttaaatattctattatgtaaacaatacgcagagggaccatatctactcttgtcatattatttgtgatggtccaaacgactgtctcggaacatgtgtgtgttatctcggttcatatcaagtccaaagctaatggagccttccccgccatccagggaggaacaccaggaccccggagtttcttcttagtgctatattttaaagttgcattgacgttttcctccccttccttttgtgcaagttggaagtagcagtgttctaaaagatggtttgacgtttttgctgttgttttatgtttttaaaaatgtatctgctttgtgtttggaaataaaaatctctattttggtctatgaaaaaaaaagtg

SEQ ID NO: 330318 - DNA, 357 bp, Homo sapiens
caacatagggagacctcatctttaaaaaataaaaataaaaatacattagctaagcacagtaatgcacacctatagtcccagctactcaggaggttgagatggaaggactgtttgagcccagaaggtcaaggctgcagtaagccatagcacttcagcctgggcaacagactgagaccccatcccaaaaaaagaaagaaagcatttaggaaaaaaacaccctaactcaactttgagagaaacttctcccatggaactgagcattagagaataaacagcacgctcagtaccctcagtgacaccttttagttttaaaattgtagtaacagtcttcaaacattccctctctgctcaacttcc

SEQ ID NO: 330319 - DNA, 349 bp, Homo sapiens
ccaaggaaactgaagcttgaaagttaaccacagatgatggcagagcaaggacacagtctcaaactgtctgacttcagagcccaacttgggacttgctccatgaaccaaaaacccatccttgacttcaggatgctgactctggactgccaggaggcagcagagtgcatttttggctgcaaatgcgaaagagcctagaacgctcggctgtgcacaaacacagttcaggtcttcatttaccactttctggccatgggatgtcaggccagttacttaatctctcagagcctcgttttcttacataggaataatacagtgtagtgccaacctcaatgggctattatgaggatta

SEQ ID NO: 330320 - DNA, 985 bp, Homo sapiens
gggccttgttattcttgcttacagcaagtggaatattgcttaagccaaaacatattattgctaaataggtattgaataaacaaaggagtgtgtatgaggggcaggtaaatctggggttgtggcccctaacaaatttagccaggcatttttaggccaggcacggtggctcacgcctgtaatcccagcactttgggaggccgaggtgggcggatcacctgaggtcagcctggctaacatggcaacaccccgtctctactaaaaatatacaaattagccgggcgtggtggcgaacgcctataatcccagctactcgggaggttaagggaagagaatcgcttgaacccgggaggcagaggttgcagtgagccgagatggcgtcactgcactccaacctgggcaacagagtgagacttcgtctcaaaacaaacaaacaaacaaacaaacaaaaaacatacttagccagattttctcgctttttgttttgcaaattaggagtccatctggtggtcacagggggaaaggcattccaggaaaggatataaggatacagaaagcaatggaagaaacagcatgatcttttcttaggggttcttagtctcctgtccccaaacttcttagagttattcctgttggaccgggcgcggtggctcatgcctgtaatcccagcactttgggaggccgaggcaggcggatcacaaggtcaagagatagagaccatcctggccaacacggtgaaacccggtctctactaaaaatacaaaaattagcggggcggcgtcttggcgcgcgcctgtagtcccagctactcgggaggctgaggcaggagaatcgcttgaacccaggaggtggaggtagcagtgagccgagatcgcgccactgcgatgccgccactgggcgacagagtgagacttcgactcaaaaaataaaaataaaaaagaattatttctgtttgtatatgtcttcttctaaggtagggaggagtgtc

SEQ ID NO: 330321 - DNA, 390 bp, Homo sapiens
aaacagaaacggagtcatcagattgctcacagtggccaaatcttgccctaaagtcaaagctctgaagcactgcactaaagagctcttggaacacccgtggattcccaaggaaaggaatggataaagttaagccatgatgaccttgttgaatccagccattctgcaagtgcctgttttgactttagggatggaagtccttccaggcatgccaagagggaaggaaacatggcaggtgcactggctttgaagttgccgtggtggttgcaatcctgcatctgtctgttcctgatggggtgacctcaggtagaggaaaatgtgatttggagacatagacacacatggagtgtgacgatggaggcagcgagtggagcgatgcagctgccagctgag

SEQ ID NO: 330322 - DNA, 1514 bp, Homo sapiens
  misc_feature (1073)..(1073): n is a, c, g, or t
  misc_feature (1120)..(1120): n is a, c, g, or t
  misc_feature (1261)..(1261): n is a, c, g, or t
  misc_feature (1266)..(1266): n is a, c, g, or t
  misc_feature (1368)..(1368): n is a, c, g, or t
  misc_feature (1460)..(1460): n is a, c, g, or t
  misc_feature (1470)..(1470): n is a, c, g, or t
aggaggtggggcctggtgggcggggcctcagcgtaggccttaggtctcaggggagcagcacgcctgagcaccccaggacctgcgctcagggctcccacaaacggtttatcggtttatcgctgggggacagcctgcaggcttcaggaggggacacaagcatggagcggctttggggtctattccagagagcgcaacaactgtccccaagatcctctcagaccgtctaccagcgtgtggaaggcccccggaaagggcacctggaggaggaagaggaagacggggaggagggggcggagacattggcccacttctgccccatggagctgaggggccctgagcccctgggctctagacccaggcagccaaacctcattccctgggcggcagcaggacggagggctgccccctacctggtcctgacggccctgctgatcttcactggggccttcctactgggctacgtcgccttccgagggtcctgccaggcgtgcggagactctgtgttggtggtcagtgaggatgtcaactatgagcctgacctggatttccaccagggcagactctactggagcgacctccaggccatgttcctgcagttcctgggggaggggcgcctggaggacaccatcaggtagggatggccctgccccatcctgttctcgagtgtccctcccctcatccgctcagactgggcctccctgcctcctggcccaggcctctggtgtctgggtccccctcctgagtcctcccatctgccttcctggcccccctgttcagcggtcctgggaaggatggcaggcattcggagctgaggttccaggggactgaggctctgagggtggcatatttgggaggtgagggagctgactgtctgagatcagaggggtgcagcatccagtatcagactggacagacccagaaaagccttgaatgcctcacccaggcgcctagatttggagcagggagcgctgaggggttctgagaagccgcattctagggaatcagaaaaccaagcaagcaagcctgggcaatacgatgaaaccccgtctctaccaaagaaaacacaaaaattngctggggatgatggcgagtgcctgtagtcccagttacttgggagctngacgggggaggattgcctgagccggggaggcggaggttgcagtgagccgagattatgccactgcactccagcctgggagacagagcgagaccctgtttcaaaaacaaaataacggcagggtgcggtggctcaggcctgtantcccngcactttgggaggcggaggcgggcagatcactaggtcaggatatcgagaccatcttggctaacacggtgaaaccccgtctgtactaaaaacacaaaatattngccgggcatggtggcgggcgcctctagtcccagctattcgggaggctgaggcaggagaatggcttgaacccaggaggtggagcatgcattgngccgagatcncgccactgcacttcagcctgggcaacagagcgagactccatctc

SEQ ID NO: 330323 - DNA, 3288 bp, Homo sapiens
  misc_feature (1508)..(1508): n is a, c, g, or t
  misc_feature (1542)..(1542): n is a, c, g, or t
aggaggtggggcctggtgggcggggcctcagcgtaggccttaggtctcaggggagcagcacgcctgagcaccccaggacctgcgctcagggaggaggcaggcgtggggctgtggagagattggcaggggagagcacagccccttgtgctctggcctggacccgggggccacgtctggaaggctggactgaggccaggactgtgcccccacccttgggggtggtgaggagcagccttggttcaggctgcctgccaggactgataaggggccctcctagggctcccacaaacggtttatcggtttatcgctgggggacagcctgcaggcttcaggaggggacacaagcatggagcggctttggggtctattccagagagcgcaacaactgtccccaagatcctctcagaccgtctaccagcgtgtggaaggcccccggaaagggcacctggaggaggaagaggaagacggggaggagggggcggagacattggcccacttctgccccatggagctgaggggccctgagcccctgggctctagacccaggcagccaaacctcattccctgggcggcagcaggacggagggctgccccctacctggtcctgacggccctgctgatcttcactggggccttcctactgggctacgtcgccttccgagggtcctgccaggcgtgcggagactctgtgttggtggtcagtgaggatgtcaactatgagcctgacctggatttccaccagggcagactctactggagcgacctccaggccatgttcctgcagttcctgggggaggggcgcctggaggacaccatcaggcaaaccagccttcgggaacgggtggcaggctcggccgggatggccgctctgactcaggacattcgcgcggcgctctcccgccagaagctggaccacgtgtggaccgacacgcactacgtggggctgcaattcccggatccggctcaccccaacaccctgcactgggtcgatgaggccgggaaggtcggagagcagctgccgctggaggaccctgacgtctactgcccctacagcgccatcggcaacgtcacgggagagctggtgtacgcccactacgggcggcccgaagacctgcaggacctgcgggccaggggcgtggatccagtgggccgcctgctgctggtgcgcgtgggggtgatcagcttcgcccagaaggtgaccaatgctcaggacttcggggctcaaggagtgctcatatacccagagccagcggacttctcccaggacccacccaagccaagcctgtccagccagcaggcagtgtatggacatgtgcacctgggaactggagacccctacacacctggcttcccttccttcaatcaaacccagttccctccagttgcatcatcaggccttcccagcatcccacgcccagcccatcagtgcagacattgcctcccgcctgctgaggctggagtgcagtggtgcaatcttggctcactgcaacctccacctcccgggttcnagtgattcttctgcctcagactccagagtatctnggattacaggaagctcaaaggccctgtggccccccaagaatggcaggggagcctcctaggctccccttatcacctgggccccgggccacgactgcggctagtggtcaacaatcacaggacctccacccccatcaacaacatcttcggctgcatcgaaggccgctcagagccagatcactacgttgtcatcggggcccagagggatgcatggggcccaggagcagctaaatccgctgtggggacggctatactcctggagctggtgcggaccttttcctccatggtgagcaacggcttccggccccgcagaagtctcctcttcatcagctgggacggtggtgactttggaagcgtgggctccacggagtggctagagggctacctcagcgtgctgcacctcaaagccgtagtgtacgtgagcctggacaacgcagtgctgggggatgacaagtttcatgccaagaccagcccccttctgacaagtctcattgagagtgtcctgaagcaggtggattctcccaaccacagtgggcagactctctatgaacaggtggtgttcaccaatcccagctgggatgctgaggtgatccggcccctacccatggacagcagtgcctattccttcacggcctttgtgggagtccctgccgtcgagttctcctttatggaggacgaccaggcctacccattcctgcacacaaaggaggacacttatgagaacctgcataaggtgctgcaaggccgcctgcccgccgtggcccaggccgtggcccagctcgcagggcagctcctcatccggctcagccacgatcgcctgctgcccctcgacttcggccgctacggggacgtcgtcctcaggcacatcgggaacctcaacgagttctctggggacctcaaggcccgcgggctgaccctgcagtgggtgtactcggcgcggggggactacatccgggcggcggaaaagctgcggcaggagatctacagctcggaggagagagacgagcgactgacacgcatgtacaacgtgcgcataatgcgggtggagttctacttcctttcccagtacgtgtcgccagccgactccccgttccgccacatcttcatgggccgtggagaccacacgctgggcgccctgctggaccacctgcggctgctgcgctccaacagctccgggacccccggggccacctcctccactggcttccaggagagccgtttccggcgtcagctagccctgctcacctggacgctgcaaggggcagccaatgcgcttagcggggatgtctggaacattgataacaacttctgaggccctggggatcctcacatccccgtcccccagtcaagagctcctctgctcctcgcttgaatgattcagggtcagggaggtggctcagagtccacctctcattgctgatcaatttctcattacccctacacatctctccacggagcccagaccccagcacagatatccacacaccccagccctgcagtgtagctgaccctaatgtgacggtcatactgtcggttaatcagagagtagcatcccttcaatcacagccccttcccctttctggggtcctccatacctagagaccactctgggaggtttgctaggccctgggacctggccagctctgttagtgggagagatcgctggcaccatagccttatggccaacaggtggtctgtggtgaaaggggcgtggagtttcaatatcaataaaccacctgatatcaataa

SEQ ID NO: 330324 - DNA, 3126 bp, Homo sapiens
aggaggtggggcctggtgggcggggcctcagcgtaggccttaggtctcaggggagcagcacgcctgagcaccccaggacctgcgctcagggaggaggcaggcgtggggctgtggagagattggcaggggagagcacagccccttgtgctctggcctggacccgggggccacgtctggaaggctggactgaggccaggactgtgcccccacccttgggggtggtgaggagcagccttggttcaggctgcctgccaggactgataaggggccctcctagggctcccacaaacggtttatcggtttatcgctgggggacagcctgcaggcttcaggaggggacacaagcatggagcggctttggggtctattccagagagcgcaacaactgtccccaagatcctctcagaccgtctaccagcgtgtggaaggcccccggaaagggcacctggaggaggaagaggaagacggggaggagggggcggagacattggcccacttctgccccatggagctgaggggccctgagcccctgggctctagacccaggcagccaaacctcattccctgggcggcagcaggacggagggctgccccctacctggtcctgacggccctgctgatcttcactggggccttcctactgggctacgtcgccttccgagggtcctgccaggcgtgcggagactctgtgttggtggtcagtgaggatgtcaactatgagcctgacctggatttccaccagggcagactctactggagcgacctccaggccatgttcctgcagttcctgggggaggggcgcctggaggacaccatcaggcaaaccagccttcgggaacgggtggcaggctcggccgggatggccgctctgactcaggacattcgcgcggcgctctcccgccagaagctggaccacgtgtggaccgacacgcactacgtggggctgcaattcccggatccggctcaccccaacaccctgcactgggtcgatgaggccgggaaggtcggagagcagctgccgctggaggaccctgacgtctactgcccctacagcgccatcggcaacgtcacgggagagctggtgtacgcccactacgggcggcccgaagacctgcaggacctgcgggccaggggcgtggatccagtgggccgcctgctgctggtgcgcgtgggggtgatcagcttcgcccagaaggtgaccaatgctcaggacttcggggctcaaggagtgctcatatacccagagccagcggacttctcccaggacccacccaagccaagcctgtccagccagcaggcagtgtatggacatgtgcacctgggaactggagacccctacacacctggcttcccttccttcaatcaaacccagaagctcaaaggccctgtggccccccaagaatggcaggggagcctcctaggctccccttatcacctgggccccgggccacgactgcggctagtggtcaacaatcacaggacctccacccccatcaacaacatcttcggctgcatcgaaggccgctcagagccagatcactacgttgtcatcggggcccagagggatgcatggggcccaggagcagctaaatccgctgtggggacggctatactcctggagctggtgcggaccttttcctccatggtgagcaacggcttccggccccgcagaagtctcctcttcatcagctgggacggtggtgactttggaagcgtgggctccacggagtggctagagggctacctcagcgtgctgcacctcaaagccgtagtgtacgtgagcctggacaacgcagtgctgggggatgacaagtttcatgccaagaccagcccccttctgacaagtctcattgagagtgtcctgaagcaggtggattctcccaaccacagtgggcagactctctatgaacaggtggtgttcaccaatcccagctgggatgctgaggtgatccggcccctacccatggacagcagtgcctattccttcacggcctttgtgggagtccctgccgtcgagttctcctttatggaggacgaccaggcctacccattcctgcacacaaaggaggacacttatgagaacctgcataaggtgctgcaaggccgcctgcccgccgtggcccaggccgtggcccagctcgcagggcagctcctcatccggctcagccacgatcgcctgctgcccctcgacttcggccgctacggggacgtcgtcctcaggcacatcgggaacctcaacgagttctctggggacctcaaggcccgcgggctgaccctgcagtgggtgtactcggcgcggggggactacatccgggcggcggaaaagctgcggcaggagatctacagctcggaggagagagacgagcgactgacacgcatgtacaacgtgcgcataatgcggatccccctctctgcgcaggtggagttctacttcctttcccagtacgtgtcgccagccgactccccgttccgccacatcttcatgggccgtggagaccacacgctgggcgccctgctggaccacctgcggctgctgcgctccaacagctccgggacccccggggccacctcctccactggcttccaggagagccgtttccggcgtcagctagccctgctcacctggacgctgcaaggggcagccaatgcgcttagcggggatgtctggaacattgataacaacttctgaggccctggggatcctcacatccccgtcccccagtcaagagctcctctgctcctcgcttgaatgattcagggtcagggaggtggctcagagtccacctctcattgctgatcaatttctcattacccctacacatctctccacggagcccagaccccagcacagatatccacacaccccagccctgcagtgtagctgaccctaatgtgacggtcatactgtcggttaatcagagagtagcatcccttcaatcacagccccttcccctttctggggtcctccatacctagagaccactctgggaggtttgctaggccctgggacctggccagctctgttagtgggagagatcgctggcaccatagccttatggccaacaggtggtctgtggtgaaaggggcgtggagtttcaatatcaataaaccacctgatatcaataa

SEQ ID NO: 330325 - DNA, 2984 bp, Homo sapiens
aggaggtggggcctggtgggcggggcctcagcgtaggccttaggtctcaggggagcagcacgcctgagcaccccaggacctgcgctcagggaggaggcaggcgtggggctgtggagagattggcaggggagagcacagccccttgtgctctggcctggacccgggggccacgtctggaaggctggactgaggccaggactgtgcccccacccttgggggtggtgaggagcagccttggttcaggctgcctgccaggactgataaggggccctcctagggctcccacaaacggtttatcggtttatcgctgggggacagcctgcaggcttcaggaggggacacaagcatggagcggctttggggtctattccagagagcgcaacaactgtccccaagatcctctcagaccgtctaccagcgtgtggaaggcccccggaaagggcacctggaggaggaagaggaagacggggaggagggggcggagacattggcccacttctgccccatggagctgaggggccctgagcccctgggctctagacccaggcagccaaacctcattccctgggcggcagcaggacggagggctgccccctacctggtcctgacggccctgctgatcttcactggggccttcctactgggctacgtcgccttccgagggtcctgccaggcgtgcggagactctgtgttggtggtcagtgaggatgtcaactatgagcctgacctggatttccaccagggcagactctactggagcgacctccaggccatgttcctgcagttcctgggggaggggcgcctggaggacaccatcaggcaaaccagccttcgggaacgggtggcaggctcggccgggatggccgctctgactcaggacattcgcgcggcgctctcccgccagaagctggaccacgtgtggaccgacacgcactacgtggggctgcaattcccggatccggctcaccccaacaccctgcactgggtcgatgaggccgggaaggtcggagagcagctgccgctggaggaccctgacgtctactgcccctacagcgccatcggcaacgtcacgggagagctggtgtacgcccactacgggcggcccgaagacctgcaggacctgcgggccaggggcgtggatccagtgggccgcctgctgctggtgcgcgtgggggtgatcagcttcgcccagaaggaagctcaaaggccctgtggccccccaagaatggcaggggagcctcctaggctccccttatcacctgggccccgggccacgactgcggctagtggtcaacaatcacaggacctccacccccatcaacaacatcttcggctgcatcgaaggccgctcagagccaggcttccggccccgcagaagtctcctcttcatcagctgggacggtggtgactttggaagcgtgggctccacggagtggctagaggtgatacggggtcccgggcaggtcgttaggcattggggagaggtgggggtggggggttcccactccacactggtcacccacccacagggctacctcagcgtgctgcacctcaaagccgtagtgtacgtgagcctggacaacgcagtgctgggggatgacaagtttcatgccaagaccagcccccttctgacaagtctcattgagagtgtcctgaagcaggtggattctcccaaccacagtgggcagactctctatgaacaggtggtgttcaccaatcccagctgggatgctgaggtgatccggcccctacccatggacagcagtgcctattccttcacggcctttgtgggagtccctgccgtcgagttctcctttatggaggtgagacgtcctccccctgccccagacacagcgctagtccttcagcctgtctgcctccgccccagcgtccaccctgtcctggcaggacgaccaggcctacccattcctgcacacaaaggaggacacttatgagaacctgcataaggtgctgcaaggccgcctgcccgccgtggcccaggccgtggcccagctcgcagggcagctcctcatccggctcagccacgatcgcctgctgcccctcgacttcggccgctacggggacgtcgtcctcaggcacatcgggaacctcaacgagttctctggggacctcaaggcccgcgggctgaccctgcagtgggtgtactcggcgcggggggactacatccgggcggcggaaaagctgcggcaggagatctacagctcggaggagagagacgagcgactgacacgcatgtacaacgtgcgcataatgcgggtggagttctacttcctttcccagtacgtgtcgccagccgactccccgttccgccacatcttcatgggccgtggagaccacacgctgggcgccctgctggaccacctgcggctgctgcgctccaacagctccgggacccccggggccacctcctccactggcttccaggagagccgtttccggcgtcagctagccctgctcacctggacgctgcaaggggcagccaatgcgcttagcggggatgtctggaacattgataacaacttctgaggccctggggatcctcacatccccgtcccccagtcaagagctcctctgctcctcgcttgaatgattcagggtcagggaggtggctcagagtccacctctcattgctgatcaatttctcattacccctacacatctctccacggagcccagaccccagcacagatatccacacaccccagccctgcagtgtagctgaccctaatgtgacggtcatactgtcggttaatcagagagtagcatcccttcaatcacagccccttcccctttctggggtcctccatacctagagaccactctgggaggtttgctaggccctgggacctggccagctctgttagtgggagagatcgctggcaccatagccttatggccaacaggtggtctgtggtgaaaggggcgtggagtttcaatatcaataaaccacctgatatcaataa

SEQ ID NO: 330326 - DNA, 3017 bp, Homo sapiens
aggaggtggggcctggtgggcggggcctcagcgtaggccttaggtctcaggggagcagcacgcctgagcaccccaggacctgcgctcagggaggaggcaggcgtggggctgtggagagattggcaggggagagcacagccccttgtgctctggcctggacccgggggccacgtctggaaggctggactgaggccaggactgtgcccccacccttgggggtggtgaggagcagccttggttcaggctgcctgccaggactgataaggggccctcctagggctcccacaaacggtttatcggtttatcgctgggggacagcctgcaggcttcaggaggggacacaagcatggagcggctttggggtctattccagagagcgcaacaactgtccccaagatcctctcagaccgtctaccagcgtgtggaaggcccccggaaagggcacctggaggaggaagaggaagacggggaggagggggcggagacattggcccacttctgccccatggagctgaggggccctgagcccctgggctctagacccaggcagccaaacctcattccctgggcggcagcaggacggagggctgccccctacctggtcctgacggccctgctgatcttcactggggccttcctactgggctacgtcgccttccgagggtcctgccaggcgtgcggagactctgtgttggtggtcagtgaggatgtcaactatgagcctgacctggatttccaccagggcagactctactggagcgacctccaggccatgttcctgcagttcctgggggaggggcgcctggaggacaccatcaggcaaaccagccttcgggaacgggtggcaggctcggccgggatggccgctctgactcaggacattcgcgcggcgctctcccgccagaagctggaccacgtgtggaccgacacgcactacgtggggctgcaattcccggatccggctcaccccaacaccctgcactgggtcgatgaggccgggaaggtcggagagcagctgccgctggaggaccctgacgtctactgcccctacagcgccatcggcaacgtcacgggagagctggtgtacgcccactacgggcggcccgaagacctgcaggacctgcgggccaggggcgtggatccagtgggccgcctgctgctggtgcgcgtgggggtgatcagcttcgcccagaaggaagctcaaaggccctgtggccccccaagaatggcaggggagcctcctaggctccccttatcacctgggccccgggccacgactgcggctagtggtcaacaatcacaggacctccacccccatcaacaacatcttcggctgcatcgaaggccgctcagagccagatcactacgttgtcatcggggcccagagggatgcatggggcccaggagcagctaaatccgctgtggggacggctatactcctggagctggtgcggaccttttcctccatggtgagcaacggcttccggccccgcagaagtctcctcttcatcagctgggacggtggtgactttggaagcgtgggctccacggagtggctagagggctacctcagcgtgctgcacctcaaagccgtagtgtacgtgagcctggacaacgcagtgctgggggatgacaagtttcatgccaagaccagcccccttctgacaagtctcattgagagtgtcctgaagcaggtggattctcccaaccacagtgggcagactctctatgaacaggtggtgttcaccaatcccagctgggatgctgaggtgatccggcccctacccatggacagcagtgcctattccttcacggcctttgtgggagtccctgccgtcgagttctcctttatggaggtgagacgtcctccccctgccccagacacagcgctagtccttcagcctgtctgcctccgccccagcgtccaccctgtcctggcaggacgaccaggcctacccattcctgcacacaaaggaggacacttatgagaacctgcataaggtgctgcaaggccgcctgcccgccgtggcccaggccgtggcccagctcgcagggcagctcctcatccggctcagccacgatcgcctgctgcccctcgacttcggccgctacggggacgtcgtcctcaggcacatcgggaacctcaacgagttctctggggacctcaaggcccgcgggctgaccctgcagtgggtgtactcggcgcggggggactacatccgggcggcggaaaagctgcggcaggagatctacagctcggaggagagagacgagcgactgacacgcatgtacaacgtgcgcataatgcgggtggagttctacttcctttcccagtacgtgtcgccagccgactccccgttccgccacatcttcatgggccgtggagaccacacgctgggcgccctgctggaccacctgcggctgctgcgctccaacagctccgggacccccggggccacctcctccactggcttccaggagagccgtttccggcgtcagctagccctgctcacctggacgctgcaaggggcagccaatgcgcttagcggggatgtctggaacattgataacaacttctgaggccctggggatcctcacatccccgtcccccagtcaagagctcctctgctcctcgcttgaatgattcagggtcagggaggtggctcagagtccacctctcattgctgatcaatttctcattacccctacacatctctccacggagcccagaccccagcacagatatccacacaccccagccctgcagtgtagctgaccctaatgtgacggtcatactgtcggttaatcagagagtagcatcccttcaatcacagccccttcccctttctggggtcctccatacctagagaccactctgggaggtttgctaggccctgggacctggccagctctgttagtgggagagatcgctggcaccatagccttatggccaacaggtggtctgtggtgaaaggggcgtggagtttcaatatcaataaaccacctgatatcaataa

SEQ ID NO: 330327 - DNA, 2537 bp, Homo sapiens
  misc_feature (585)..(585): n is a, c, g, or t
  misc_feature (619)..(619): n is a, c, g, or t
gaaaaaagaaaatgttggctgggaacaaattgggtgttgggggaaatcagatggggaagggaacagaaacatggggtaccctggagcccggtggggtttgagggctgcctaggagctgctgaggttgggaagacacaggccaggtagtgcccccacatcctctccgtgggatggacagttgcaagcaaaggccttgccatttcctggtttctcctgcccttatgaatcgggtttttttctgggaggagtcctctagtcaccttcctccccaggtgaccaatgctcaggacttcggggctcaaggagtgctcatatacccagagccagcggacttctcccaggacccacccaagccaagcctgtccagccagcaggcagtgtatggacatgtgcacctgggaactggagacccctacacacctggcttcccttccttcaatcaaacccagttccctccagttgcatcatcaggccttcccagcatcccacgcccagcccatcagtgcagacattgcctcccgcctgctgaggctggagtgcagtggtgcaatcttggctcactgcaacctccacctcccgggttcnagtgattcttctgcctcagactccagagtatctnggattacaggaagctcaaaggccctgtggccccccaagaatggcaggggagcctcctaggctccccttatcacctgggccccgggccacgactgcggctagtggtcaacaatcacaggacctccacccccatcaacaacatcttcggctgcatcgaaggccgctcagagccagatcactacgttgtcatcggggcccagagggatgcatggggcccaggagcagctaaatccgctgtggggacggctatactcctggagctggtgcggaccttttcctccatggtgagcaacggcttccggccccgcagaagtctcctcttcatcagctgggacggtggtgactttggaagcgtgggctccacggagtggctagaggtgatacggggtcccgggcaggtcgttaggcattggggagaggtgggggtggggggttcccactccacactggtcacccacccacagggctacctcagcgtgctgcacctcaaagccgtagtgtacgtgagcctggacaacgcagtgctgggggatgacaagtttcatgccaagaccagcccccttctgacaagtctcattgagagtgtcctgaagcaggtggattctcccaaccacagtgggcagactctctatgaacaggtggtgttcaccaatcccagctgggatgctgaggtgatccggcccctacccatggacagcagtgcctattccttcacggcctttgtgggagtccctgccgtcgagttctcctttatggaggtgagacgtcctccccctgccccagacacagcgctagtccttcagcctgtctgcctccgccccagcgtccaccctgtcctggcaggacgaccaggcctacccattcctgcacacaaaggaggacacttatgagaacctgcataaggtgctgcaaggccgcctgcccgccgtggcccaggccgtggcccagctcgcagggcagctcctcatccggctcagccacgatcgcctgctgcccctcgacttcggccgctacggggacgtcgtcctcaggcacatcgggaacctcaacgagttctctggggacctcaaggcccgcgggctgaccctgcagtgggtgtactcggcgcggggggactacatccgggcggcggaaaagctgcggcaggagatctacagctcggaggagagagacgagcgactgacacgcatgtacaacgtgcgcataatgcgggtggagttctacttcctttcccagtacgtgtcgccagccgactccccgttccgccacatcttcatgggccgtggagaccacacgctgggcgccctgctggaccacctgcggctgctgcgctccaacagctccgggacccccggggccacctcctccactggcttccaggagagccgtttccggcgtcagctagccctgctcacctggacgctgcaaggggcagccaatgcgcttagcggggatgtctggaacattgataacaacttctgaggccctggggatcctcacatccccgtcccccagtcaagagctcctctgctcctcgcttgaatgattcagggtcagggaggtggctcagagtccacctctcattgctgatcaatttctcattacccctacacatctctccacggagcccagaccccagcacagatatccacacaccccagccctgcagtgtagctgaccctaatgtgacggtcatactgtcggttaatcagagagtagcatcccttcaatcacagccccttcccctttctggggtcctccatacctagagaccactctgggaggtttgctaggccctgggacctggccagctctgttagtgggagagatcgctggcaccatagccttatggccaacaggtggtctgtggtgaaaggggcgtggagtttcaatatcaataaaccacctgatatcaataa

SEQ ID NO: 330328 - DNA, 1920 bp, Homo sapiens
cgcgcgcgggcggggggcgcgcggggagggggacgcggctcggggcgctcaccagccccgctccccagggctcaccccaacaccctgcactgggtcgatgaggccgggaaggtcggagagcagctgccgctggaggaccctgacgtctactgcccctacagcgccatcggcaacgtcacgggagagctggtgtacgcccactacgggcggcccgaagacctgcaggacctgcgggccaggggcgtggatccagtgggccgcctgctgctggtgcgcgtgggggtgatcagcttcgcccagaaggaagctcaaaggccctgtggccccccaagaatggcaggggagcctcctaggctccccttatcacctgggccccgggccacgactgcggctagtggtcaacaatcacaggacctccacccccatcaacaacatcttcggctgcatcgaaggccgctcagagccaggcttccggccccgcagaagtctcctcttcatcagctgggacggtggtgactttggaagcgtgggctccacggagtggctagagggctacctcagcgtgctgcacctcaaagccgtagtgtacgtgagcctggacaacgcagtgctgggggatgacaagtttcatgccaagaccagcccccttctgacaagtctcattgagagtgtcctgaagcaggtggattctcccaaccacagtgggcagactctctatgaacaggtggtgttcaccaatcccagctgggatgctgaggtgatccggcccctacccatggacagcagtgcctattccttcacggcctttgtgggagtccctgccgtcgagttctcctttatggaggacgaccaggcctacccattcctgcacacaaaggaggacacttatgagaacctgcataaggtgctgcaaggccgcctgcccgccgtggcccaggccgtggcccagctcgcagggcagctcctcatccggctcagccacgatcgcctgctgcccctcgacttcggccgctacggggacgtcgtcctcaggcacatcgggaacctcaacgagttctctggggacctcaaggcccgcgggctgaccctgcagtgggtgtactcggcgcggggggactacatccgggcggcggaaaagctgcggcaggagatctacagctcggaggagagagacgagcgactgacacgcatgtacaacgtgcgcataatgcgggtggagttctacttcctttcccagtacgtgtcgccagccgactccccgttccgccacatcttcatgggccgtggagaccacacgctgggcgccctgctggaccacctgcggctgctgcgctccaacagctccgggacccccggggccacctcctccactggcttccaggagagccgtttccggcgtcagctagccctgctcacctggacgctgcaaggggcagccaatgcgcttagcggggatgtctggaacattgataacaacttctgaggccctggggatcctcacatccccgtcccccagtcaagagctcctctgctcctcgcttgaatgattcagggtcagggaggtggctcagagtccacctctcattgctgatcaatttctcattacccctacacatctctccacggagcccagaccccagcacagatatccacacaccccagccctgcagtgtagctgaccctaatgtgacggtcatactgtcggttaatcagagagtagcatcccttcaatcacagccccttcccctttctggggtcctccatacctagagaccactctgggaggtttgctaggccctgggacctggccagctctgttagtgggagagatcgctggcaccatagccttatggccaacaggtggtctgtggtgaaaggggcgtggagtttcaatatcaataaaccacctgatatcaataa

SEQ ID NO: 330329 - DNA, 1443 bp, Homo sapiens
aggaggtggggcctggtgggcggggcctcagcgtaggccttaggtctcaggggagcagcacgcctgagcaccccaggacctgcgctcagggaggaggcaggcgtggggctgtggagagattggcaggggagagcacagccccttgtgctctggcctggacccgggggccacgtctggaaggctggactgaggccaggactgtgcccccacccttgggggtggtgaggagcagccttggttcaggctgcctgccaggactgataaggggccctcctagggctcccacaaacggtttatcggtttatcgctgggggacagcctgcaggcttcaggaggggacacaagcatggagcggctttggggtctattccagagagcgcaacaactgtccccaagatcctctcagaccgtctaccagcgtgtggaaggcccccggaaagggcacctggaggaggaagaggaagacggggaggagggggcggagacattggcccacttctgccccatggagctgaggggccctgagcccctgggctctagacccaggcagccaaacctcattccctgggcggcagcaggacggagggctgccccctacctggtcctgacggccctgctgatcttcactggggccttcctactgggctacgtcgccttccgagggtcctgccaggcgtgcggagactctgtgttggtggtcagtgaggatgtcaactatgagcctgacctggatttccaccagggcagactctactggagcgacctccaggccatgttcctgcagttcctgggggaggggcgcctggaggacaccatcaggcaaaccagccttcgggaacgggtggcaggctcggccgggatggccgctctgactcaggacattcgcgcggcgctctcccgccagaagctggaccacgtgtggaccgacacgcactacgtggggctgcaattcccggatccggctcaccccaacaccctgcactgggtcgatgaggccgggaaggtcggagagcagctgccgctggaggaccctgacgtctactgcccctacagcgccatcggcaacgtcacgggagagctggtgtacgcccactacgggcggcccgaagacctgcaggacctgcgggccaggggcgtggatccagtgggccgcctgctgctggtgcgcgtgggggtgatcagcttcgcccagaaggtgaccaatgctcaggacttcggggctcaaggagtgctcatatacccagagccagcggacttctcccaggacccacccaagccaagcctgtccagccagcaggcagtgtatggacatgtgcacctgggaactggagacccctacacacctggcttcccttccttcaatcaaacccagttccctccagttgcatcatcaggccttcccagcatcccacgcccagccctatggagtctcaaaaaaaaaaa

SEQ ID NO: 330330 - DNA, 1427 bp, Homo sapiens
aggaggtggggcctggtgggcggggcctcagcgtaggccttaggtctcaggggagcagcacgcctgagcaccccaggacctgcgctcagggaggaggcaggcgtggggctgtggagagattggcaggggagagcacagccccttgtgctctggcctggacccgggggccacgtctggaaggctggactgaggccaggactgtgcccccacccttgggggtggtgaggagcagccttggttcaggctgcctgccaggactgataaggggccctcctagggctcccacaaacggtttatcggtttatcgctgggggacagcctgcaggcttcaggaggggacacaagcatggagcggctttggggtctattccagagagcgcaacaactgtccccaagatcctctcagaccgtctaccagcgtgtggaaggcccccggaaagggcacctggaggaggaagaggaagacggggaggagggggcggagacattggcccacttctgccccatggagctgaggggccctgagcccctgggctctagacccaggcagccaaacctcattccctgggcggcagcaggacggagggctgccccctacctggtcctgacggccctgctgatcttcactggggccttcctactgggctacgtcgccttccgagggtcctgccaggcgtgcggagactctgtgttggtggtcagtgaggatgtcaactatgagcctgacctggatttccaccagggcagactctactggagcgacctccaggccatgttcctgcagttcctgggggaggggcgcctggaggacaccatcaggcaaaccagccttcgggaacgggtggcaggctcggccgggatggccgctctgactcaggacattcgcgcggcgctctcccgccagaagctggaccacgtgtggaccgacacgcactacgtggggctgcaattcccggatccggctcaccccaacaccctgcactgggtcgatgaggccgggaaggtcggagagcagctgccgctggaggaccctgacgtctactgcccctacagcgccatcggcaacgtcacgggagagctggtgtacgcccactacgggcggcccgaagacctgcaggacctgcgggccaggggcgtggatccagtgggccgcctgctgctggtgcgcgtgggggtgatcagcttcgcccagaaggtaagtgtccctggacagagggagggcttgagcccgggaaccggagggtcggactgccagtgagaatcgttcagggtgctgtgagagggagacaggaaagaaccatgtggctggatggtaagaaaatataagctgggcacgatggttctcacctgcaatcccagcactttaggaggccaagacaggaggatcgcttgaggccaggaattcaaggcaacacggtgagaacccc

SEQ ID NO: 330331 - DNA, 384 bp, Homo sapiens
gggtctactgtctggcaactaaagttcccactggattgcacacctacctcagctgagaaccatccaaggcagccctgactgcactgccctacccaggcagcgtccagaggcagcgatctggagccagaaagggtgggagggaaagaaataaggaaaagagtgatttggactcttctgggtctctctacaacttccccctttctgccttcctcctctccaggaagctcaaaggccctgtggccccccaagaatggcaggggagcctcctaggctccccttatcacctgggccccgggccacgactgcggctagtggtcaacaatcacaggacctccacccccatcaacaacatcttcggctgcatcgaaggccgctcagagccag

SEQ ID NO: 330332 - DNA, 3190 bp, Homo sapiens
aggaggtggggcctggtgggcggggcctcagcgtaggccttaggtctcaggggagcagcacgcctgagcaccccaggacctgcgctcagggaggaggcaggcgtggggctgtggagagattggcaggggagagcacagccccttgtgctctggcctggacccgggggccacgtctggaaggctggactgaggccaggactgtgcccccacccttgggggtggtgaggagcagccttggttcaggctgcctgccaggactgataaggggccctcctagggctcccacaaacggtttatcggtttatcgctgggggacagcctgcaggcttcaggaggggacacaagcatggagcggctttggggtctattccagagagcgcaacaactgtccccaagatcctctcagaccgtctaccagcgtgtggaaggcccccggaaagggcacctggaggaggaagaggaagacggggaggagggggcggagacattggcccacttctgccccatggagctgaggggccctgagcccctgggctctagacccaggcagccaaacctcattccctgggcggcagcaggacggagggctgccccctacctggtcctgacggccctgctgatcttcactggggccttcctactgggctacgtcgccttccgagggtcctgccaggcgtgcggagactctgtgttggtggtcagtgaggatgtcaactatgagcctgacctggatttccaccagggcagactctactggagcgacctccaggccatgttcctgcagttcctgggggaggggcgcctggaggacaccatcaggcaaaccagccttcgggaacgggtggcaggctcggccgggatggccgctctgactcaggacattcgcgcggcgctctcccgccagaagctggaccacgtgtggaccgacacgcactacgtggggctgcaattcccggatccggctcaccccaacaccctgcactgggtcgatgaggccgggaaggtcggagagcagctgccgctggaggaccctgacgtctactgcccctacagcgccatcggcaacgtcacgggagagctggtgtacgcccactacgggcggcccgaagacctgcaggacctgcgggccaggggcgtggatccagtgggccgcctgctgctggtgcgcgtgggggtgatcagcttcgcccagaaggtgaccaatgctcaggacttcggggctcaaggagtgctcatatacccagagccagcggacttctcccaggacccacccaagccaagcctgtccagccagcaggcagtgtatggacatgtgcacctgggaactggagacccctacacacctggcttcccttccttcaatcaaacccagttccctccagttgcatcatcaggccttcccagcatcccacgcccagcccatcagtgcagacattgcctcccgcctgctgaggaagctcaaaggccctgtggccccccaagaatggcaggggagcctcctaggctccccttatcacctgggccccgggccacgactgcggctagtggtcaacaatcacaggacctccacccccatcaacaacatcttcggctgcatcgaaggccgctcagagccagatcactacgttgtcatcggggcccagagggatgcatggggcccaggagcagctaaatccgctgtggggacggctatactcctggagctggtgcggaccttttcctccatggtgagcaacggcttccggccccgcagaagtctcctcttcatcagctgggacggtggtgactttggaagcgtgggctccacggagtggctagagggctacctcagcgtgctgcacctcaaagccgtagtgtacgtgagcctggacaacgcagtgctgggggatgacaagtttcatgccaagaccagcccccttctgacaagtctcattgagagtgtcctgaagcaggtggattctcccaaccacagtgggcagactctctatgaacaggtggtgttcaccaatcccagctgggatgctgaggtgatccggcccctacccatggacagcagtgcctattccttcacggcctttgtgggagtccctgccgtcgagttctcctttatggaggacgaccaggcctacccattcctgcacacaaaggaggacacttatgagaacctgcataaggtgctgcaaggccgcctgcccgccgtggcccaggccgtggcccagctcgcagggcagctcctcatccggctcagccacgatcgcctgctgcccctcgacttcggccgctacggggacgtcgtcctcaggcacatcgggaacctcaacgagttctctggggacctcaaggcccgcgggctgaccctgcagtgggtgtactcggcgcggggggactacatccgggcggcggaaaagctgcggcaggagatctacagctcggaggagagagacgagcgactgacacgcatgtacaacgtgcgcataatgcgggtggagttctacttcctttcccagtacgtgtcgccagccgactccccgttccgccacatcttcatgggccgtggagaccacacgctgggcgccctgctggaccacctgcggctgctgcgctccaacagctccgggacccccggggccacctcctccactggcttccaggagagccgtttccggcgtcagctagccctgctcacctggacgctgcaaggggcagccaatgcgcttagcggggatgtctggaacattgataacaacttctgaggccctggggatcctcacatccccgtcccccagtcaagagctcctctgctcctcgcttgaatgattcagggtcagggaggtggctcagagtccacctctcattgctgatcaatttctcattacccctacacatctctccacggagcccagaccccagcacagatatccacacaccccagccctgcagtgtagctgaccctaatgtgacggtcatactgtcggttaatcagagagtagcatcccttcaatcacagccccttcccctttctggggtcctccatacctagagaccactctgggaggtttgctaggccctgggacctggccagctctgttagtgggagagatcgctggcaccatagccttatggccaacaggtggtctgtggtgaaaggggcgtggagtttcaatatcaataaaccacctgatatcaataa

SEQ ID NO: 330333 - DNA, 3460 bp, Homo sapiens
  misc_feature (1508)..(1508): n is a, c, g, or t
  misc_feature (1542)..(1542): n is a, c, g, or t
aggaggtggggcctggtgggcggggcctcagcgtaggccttaggtctcaggggagcagcacgcctgagcaccccaggacctgcgctcagggaggaggcaggcgtggggctgtggagagattggcaggggagagcacagccccttgtgctctggcctggacccgggggccacgtctggaaggctggactgaggccaggactgtgcccccacccttgggggtggtgaggagcagccttggttcaggctgcctgccaggactgataaggggccctcctagggctcccacaaacggtttatcggtttatcgctgggggacagcctgcaggcttcaggaggggacacaagcatggagcggctttggggtctattccagagagcgcaacaactgtccccaagatcctctcagaccgtctaccagcgtgtggaaggcccccggaaagggcacctggaggaggaagaggaagacggggaggagggggcggagacattggcccacttctgccccatggagctgaggggccctgagcccctgggctctagacccaggcagccaaacctcattccctgggcggcagcaggacggagggctgccccctacctggtcctgacggccctgctgatcttcactggggccttcctactgggctacgtcgccttccgagggtcctgccaggcgtgcggagactctgtgttggtggtcagtgaggatgtcaactatgagcctgacctggatttccaccagggcagactctactggagcgacctccaggccatgttcctgcagttcctgggggaggggcgcctggaggacaccatcaggcaaaccagccttcgggaacgggtggcaggctcggccgggatggccgctctgactcaggacattcgcgcggcgctctcccgccagaagctggaccacgtgtggaccgacacgcactacgtggggctgcaattcccggatccggctcaccccaacaccctgcactgggtcgatgaggccgggaaggtcggagagcagctgccgctggaggaccctgacgtctactgcccctacagcgccatcggcaacgtcacgggagagctggtgtacgcccactacgggcggcccgaagacctgcaggacctgcgggccaggggcgtggatccagtgggccgcctgctgctggtgcgcgtgggggtgatcagcttcgcccagaaggtgaccaatgctcaggacttcggggctcaaggagtgctcatatacccagagccagcggacttctcccaggacccacccaagccaagcctgtccagccagcaggcagtgtatggacatgtgcacctgggaactggagacccctacacacctggcttcccttccttcaatcaaacccagttccctccagttgcatcatcaggccttcccagcatcccacgcccagcccatcagtgcagacattgcctcccgcctgctgaggctggagtgcagtggtgcaatcttggctcactgcaacctccacctcccgggttcnagtgattcttctgcctcagactccagagtatctnggattacaggaagctcaaaggccctgtggccccccaagaatggcaggggagcctcctaggctccccttatcacctgggccccgggccacgactgcggctagtggtcaacaatcacaggacctccacccccatcaacaacatcttcggctgcatcgaaggccgctcagagccagatcactacgttgtcatcggggcccagagggatgcatggggcccaggagcagctaaatccgctgtggggacggctatactcctggagctggtgcggaccttttcctccatggtgagcaacggcttccggccccgcagaagtctcctcttcatcagctgggacggtggtgactttggaagcgtgggctccacggagtggctagaggtgatacggggtcccgggcaggtcgttaggcattggggagaggtgggggtggggggttcccactccacactggtcacccacccacagggctacctcagcgtgctgcacctcaaagccgtagtgtacgtgagcctggacaacgcagtgctgggggatgacaagtttcatgccaagaccagcccccttctgacaagtctcattgagagtgtcctgaagcaggtggattctcccaaccacagtgggcagactctctatgaacaggtggtgttcaccaatcccagctgggatgctgaggtgatccggcccctacccatggacagcagtgcctattccttcacggcctttgtgggagtccctgccgtcgagttctcctttatggaggtgagacgtcctccccctgccccagacacagcgctagtccttcagcctgtctgcctccgccccagcgtccaccctgtcctggcaggacgaccaggcctacccattcctgcacacaaaggaggacacttatgagaacctgcataaggtgctgcaaggccgcctgcccgccgtggcccaggccgtggcccagctcgcagggcagctcctcatccggctcagccacgatcgcctgctgcccctcgacttcggccgctacggggacgtcgtcctcaggcacatcgggaacctcaacgagttctctggggacctcaaggcccgcgggctgaccctgcagtgggtgtactcggcgcggggggactacatccgggcggcggaaaagctgcggcaggagatctacagctcggaggagagagacgagcgactgacacgcatgtacaacgtgcgcataatgcgggtggagttctacttcctttcccagtacgtgtcgccagccgactccccgttccgccacatcttcatgggccgtggagaccacacgctgggcgccctgctggaccacctgcggctgctgcgctccaacagctccgggacccccggggccacctcctccactggcttccaggagagccgtttccggcgtcagctagccctgctcacctggacgctgcaaggggcagccaatgcgcttagcggggatgtctggaacattgataacaacttctgaggccctggggatcctcacatccccgtcccccagtcaagagctcctctgctcctcgcttgaatgattcagggtcagggaggtggctcagagtccacctctcattgctgatcaatttctcattacccctacacatctctccacggagcccagaccccagcacagatatccacacaccccagccctgcagtgtagctgaccctaatgtgacggtcatactgtcggttaatcagagagtagcatcccttcaatcacagccccttcccctttctggggtcctccatacctagagaccactctgggaggtttgctaggccctgggacctggccagctctgttagtgggagagatcgctggcaccatagccttatggccaacaggtggtctgtggtgaaaggggcgtggagtttcaatatcaataaaccacctgatatcaataa

SEQ ID NO: 330334 - DNA, 2470 bp, Homo sapiens
cgcgcgcgggcggggggcgcgcggggagggggacgcggctcggggcgctcaccagccccgctccccagggctcaccccaacaccctgcactgggtcgatgaggccgggaaggtcggagagcagctgccgctggaggaccctgacgtctactgcccctacagcgccatcggcaacgtcacgggagagctggtgtacgcccactacgggcggcccgaagacctgcaggacctgcgggccaggggcgtggatccagtgggccgcctgctgctggtgcgcgtgggggtgatcagcttcgcccagaaggtgaccaatgctcaggacttcggggctcaaggagtgctcatatacccagagccagcggacttctcccaggacccacccaagccaagcctgtccagccagcaggcagtgtatggacatgtgcacctgggaactggagacccctacacacctggcttcccttccttcaatcaaacccagttccctccagttgcatcatcaggccttcccagcatcccacgcccagcccatcagtgcagacattgcctcccgcctgctgaggaagctcaaaggccctgtggccccccaagaatggcaggggagcctcctaggctccccttatcacctgggccccgggccacgactgcggctagtggtcaacaatcacaggacctccacccccatcaacaacatcttcggctgcatcgaaggccgctcagagccagatcactacgttgtcatcggggcccagagggatgcatggggcccaggagcagctaaatccgctgtggggacggctatactcctggagctggtgcggaccttttcctccatggtgagcaacggcttccggccccgcagaagtctcctcttcatcagctgggacggtggtgactttggaagcgtgggctccacggagtggctagaggtgatacggggtcccgggcaggtcgttaggcattggggagaggtgggggtggggggttcccactccacactggtcacccacccacagggctacctcagcgtgctgcacctcaaagccgtagtgtacgtgagcctggacaacgcagtgctgggggatgacaagtttcatgccaagaccagcccccttctgacaagtctcattgagagtgtcctgaagcaggtggattctcccaaccacagtgggcagactctctatgaacaggtggtgttcaccaatcccagctgggatgctgaggtgatccggcccctacccatggacagcagtgcctattccttcacggcctttgtgggagtccctgccgtcgagttctcctttatggaggtgagacgtcctccccctgccccagacacagcgctagtccttcagcctgtctgcctccgccccagcgtccaccctgtcctggcaggacgaccaggcctacccattcctgcacacaaaggaggacacttatgagaacctgcataaggtgctgcaaggccgcctgcccgccgtggcccaggccgtggcccagctcgcagggcagctcctcatccggctcagccacgatcgcctgctgcccctcgacttcggccgctacggggacgtcgtcctcaggcacatcgggaacctcaacgagttctctggggacctcaaggcccgcgggctgaccctgcagtgggtgtactcggcgcggggggactacatccgggcggcggaaaagctgcggcaggagatctacagctcggaggagagagacgagcgactgacacgcatgtacaacgtgcgcataatgcgggtggagttctacttcctttcccagtacgtgtcgccagccgactccccgttccgccacatcttcatgggccgtggagaccacacgctgggcgccctgctggaccacctgcggctgctgcgctccaacagctccgggacccccggggccacctcctccactggcttccaggagagccgtttccggcgtcagctagccctgctcacctggacgctgcaaggggcagccaatgcgcttagcggggatgtctggaacattgataacaacttctgaggccctggggatcctcacatccccgtcccccagtcaagagctcctctgctcctcgcttgaatgattcagggtcagggaggtggctcagagtccacctctcattgctgatcaatttctcattacccctacacatctctccacggagcccagaccccagcacagatatccacacaccccagccctgcagtgtagctgaccctaatgtgacggtcatactgtcggttaatcagagagtagcatcccttcaatcacagccccttcccctttctggggtcctccatacctagagaccactctgggaggtttgctaggccctgggacctggccagctctgttagtgggagagatcgctggcaccatagccttatggccaacaggtggtctgtggtgaaaggggcgtggagtttcaatatcaataaaccacctgatatcaataa

SEQ ID NO: 330335 - DNA, 1958 bp, Homo sapiens
gtgctgttcccaggtcccgaggccacaccttcttgctcagaatagggctggcatgtttttcgtttttcctggaagcccagctcgcagctttgcgtgggcacccctttccctgcaggtgcacctgggaactggagacccctacacacctggcttcccttccttcaatcaaacccagttccctccagttgcatcatcaggccttcccagcatcccacgcccagcccatcagtgcagacattgcctcccgcctgctgaggaagctcaaaggccctgtggccccccaagaatggcaggggagcctcctaggctccccttatcacctgggccccgggccacgactgcggctagtggtcaacaatcacaggacctccacccccatcaacaacatcttcggctgcatcgaaggccgctcagagccaggcttccggccccgcagaagtctcctcttcatcagctgggacggtggtgactttggaagcgtgggctccacggagtggctagagggctacctcagcgtgctgcacctcaaagccgtagtgtacgtgagcctggacaacgcagtgctgggggatgacaagtttcatgccaagaccagcccccttctgacaagtctcattgagagtgtcctgaagcaggtggattctcccaaccacagtgggcagactctctatgaacaggtggtgttcaccaatcccagctgggatgctgaggtgatccggcccctacccatggacagcagtgcctattccttcacggcctttgtgggagtccctgccgtcgagttctcctttatggaggtgagacgtcctccccctgccccagacacagcgctagtccttcagcctgtctgcctccgccccagcgtccaccctgtcctggcaggacgaccaggcctacccattcctgcacacaaaggaggacacttatgagaacctgcataaggtgctgcaaggccgcctgcccgccgtggcccaggccgtggcccagctcgcagggcagctcctcatccggctcagccacgatcgcctgctgcccctcgacttcggccgctacggggacgtcgtcctcaggcacatcgggaacctcaacgagttctctggggacctcaaggcccgcgggctgaccctgcagtgggtgtactcggcgcggggggactacatccgggcggcggaaaagctgcggcaggagatctacagctcggaggagagagacgagcgactgacacgcatgtacaacgtgcgcataatgcgggtggagttctacttcctttcccagtacgtgtcgccagccgactccccgttccgccacatcttcatgggccgtggagaccacacgctgggcgccctgctggaccacctgcggctgctgcgctccaacagctccgggacccccggggccacctcctccactggcttccaggagagccgtttccggcgtcagctagccctgctcacctggacgctgcaaggggcagccaatgcgcttagcggggatgtctggaacattgataacaacttctgaggccctggggatcctcacatccccgtcccccagtcaagagctcctctgctcctcgcttgaatgattcagggtcagggaggtggctcagagtccacctctcattgctgatcaatttctcattacccctacacatctctccacggagcccagaccccagcacagatatccacacaccccagccctgcagtgtagctgaccctaatgtgacggtcatactgtcggttaatcagagagtagcatcccttcaatcacagccccttcccctttctggggtcctccatacctagagaccactctgggaggtttgctaggccctgggacctggccagctctgttagtgggagagatcgctggcaccatagccttatggccaacaggtggtctgtggtgaaaggggcgtggagtttcaatatcaataaaccacctgatatcaataa

SEQ ID NO: 330336 - DNA, 3588 bp, Homo sapiens
  misc_feature (1508)..(1508): n is a, c, g, or t
  misc_feature (1542)..(1542): n is a, c, g, or t
aggaggtggggcctggtgggcggggcctcagcgtaggccttaggtctcaggggagcagcacgcctgagcaccccaggacctgcgctcagggaggaggcaggcgtggggctgtggagagattggcaggggagagcacagccccttgtgctctggcctggacccgggggccacgtctggaaggctggactgaggccaggactgtgcccccacccttgggggtggtgaggagcagccttggttcaggctgcctgccaggactgataaggggccctcctagggctcccacaaacggtttatcggtttatcgctgggggacagcctgcaggcttcaggaggggacacaagcatggagcggctttggggtctattccagagagcgcaacaactgtccccaagatcctctcagaccgtctaccagcgtgtggaaggcccccggaaagggcacctggaggaggaagaggaagacggggaggagggggcggagacattggcccacttctgccccatggagctgaggggccctgagcccctgggctctagacccaggcagccaaacctcattccctgggcggcagcaggacggagggctgccccctacctggtcctgacggccctgctgatcttcactggggccttcctactgggctacgtcgccttccgagggtcctgccaggcgtgcggagactctgtgttggtggtcagtgaggatgtcaactatgagcctgacctggatttccaccagggcagactctactggagcgacctccaggccatgttcctgcagttcctgggggaggggcgcctggaggacaccatcaggcaaaccagccttcgggaacgggtggcaggctcggccgggatggccgctctgactcaggacattcgcgcggcgctctcccgccagaagctggaccacgtgtggaccgacacgcactacgtggggctgcaattcccggatccggctcaccccaacaccctgcactgggtcgatgaggccgggaaggtcggagagcagctgccgctggaggaccctgacgtctactgcccctacagcgccatcggcaacgtcacgggagagctggtgtacgcccactacgggcggcccgaagacctgcaggacctgcgggccaggggcgtggatccagtgggccgcctgctgctggtgcgcgtgggggtgatcagcttcgcccagaaggtgaccaatgctcaggacttcggggctcaaggagtgctcatatacccagagccagcggacttctcccaggacccacccaagccaagcctgtccagccagcaggcagtgtatggacatgtgcacctgggaactggagacccctacacacctggcttcccttccttcaatcaaacccagttccctccagttgcatcatcaggccttcccagcatcccacgcccagcccatcagtgcagacattgcctcccgcctgctgaggctggagtgcagtggtgcaatcttggctcactgcaacctccacctcccgggttcnagtgattcttctgcctcagactccagagtatctnggattacaggaagctcaaaggccctgtggccccccaagaatggcaggggagcctcctaggctccccttatcacctgggccccgggccacgactgcggctagtggtcaacaatcacaggacctccacccccatcaacaacatcttcggctgcatcgaaggccgctcagagccagatcactacgttgtcatcggggcccagagggatgcatggggcccaggagcagctaaatccgctgtggggacggctatactcctggagctggtgcggaccttttcctccatggtgagcaacggcttccggccccgcagaagtctcctcttcatcagctgggacggtggtgactttggaagcgtgggctccacggagtggctagaggtgatacggggtcccgggcaggtcgttaggcattggggagaggtgggggtggggggttcccactccacactggtcacccacccacagggctacctcagcgtgctgcacctcaaagccgtagtgtacgtgagcctggacaacgcagtgctgggggatgacaagtttcatgccaagaccagcccccttctgacaagtctcattgagagtgtcctgaagcaggtggattctcccaaccacagtgggcagactctctatgaacaggtggtgttcaccaatcccagctgggatgctgaggtgatccggcccctacccatggacagcagtgcctattccttcacggcctttgtgggagtccctgccgtcgagttctcctttatggaggtgagacgtcctccccctgccccagacacagcgctagtccttcagcctgtctgcctccgccccagcgtccaccctgtcctggcaggacgaccaggcctacccattcctgcacacaaaggaggacacttatgagaacctgcataaggtgctgcaaggccgcctgcccgccgtggcccaggccgtggcccagctcgcagggcagctcctcatccggctcagccacgatcgcctgctgcccctcgacttcggccgctacggggacgtcgtcctcaggcacatcgggaacctcaacgagttctctggggacctcaaggcccgcgggctgaccctgcagtgggtgtactcggcgcggggggactacatccgggcggcggaaaagctgcggcaggagatctacagctcggaggagagagacgagcgactgacacgcatgtacaacgtgcgcataatgcgggtggagttctacttcctttcccagtacgtgtcgccagccgactccccgttccgccacatcttcatgggccgtggagaccacacgctgggcgccctgctggaccacctgcggctgctgcgctccaacagctccgggacccccggggccacctcctccactggcttccaggagagccgtttccggcgtcagctagccctgctcacctggacgctgcaaggggcagccaatgcgcttagcggggatgtctggaacattgataacaacttctgaggccctggggatcctcacatccccgtcccccagtcaagagctcctctgctcctcgcttgaatgattcagggtcagggaggtggctcagagtccacctctcattgctgatcaatttctcattacccctacacatctctccacggagcccagaccccagcacagatatccacacaccccagccctgcagtgtagctgaccctaatgtgacggtcatactgtcggttaatcagagagtagcatcccttcaatcacagccccttcccctttctggggtcctccatacctagagaccactctgggaggtttgctaggccctgggacctggccagctctgttagtgggagagatcgctggcaccatagccttatggccaacaggtggtctgtggtgaaaggggcgtggagtttcaatatcaataaaccacctgatatcaataatggcctcgttggccttagcgggggagctttgggcccgtccctttagggagggtaattagagccctcgtaactgactcgtggcctcgggcttcgggtgcgggaaccggataacttacttaaggggggat

SEQ ID NO: 330337 - DNA, 761 bp, Homo sapiens
gcgcggttggactacatccgggcggcgggcatgtacaacgtgcgcataatgcgggtggagttctacttcctttcccagtacgtgtcgccagccgactccccgttccgccacatcttcatgggccgtggagaccacacgctgggcgccctgctggaccacctgcggctgctgcgctccaacagctccgggacccccggggccacctcctccactggcttccaggagagccgtttccggcgtcagctagccctgctcacctggacgctgcaaggggcagccaatgcgcttagcggggatgtctggaacattgataacaacttctgaggccctggggatcctcacatccccgtcccccagtcaagagctcctctgctcctcgcttgaatgattcagggtcagggaggtggctcagagtccacctctcattgctgatcaatttctcattacccctacacatctctccacggagcccagaccccagcacagatatccacacaccccagccctgcagtgtagctgaccctaatgtgacggtcatactgtcggttaatcagagagtagcatcccttcaatcacagccccttcccctttctggggtcctccatacctagagaccactctgggaggtttgctaggccctgggacctggccagctctgttagtgggagagatcgctggcaccatagccttatggccaacaggtggtctgtggtgaaaggggcgtggagtttcaatatcaataaaccacctgatatcaataa

SEQ ID NO: 330338 - DNA, 1036 bp, Homo sapiens
ggccttgttgctgtgtcatccatgtcagaagagctgaagaacaagctagccaaatgctatgctaagcctcttttgtaagggccttaatgaggggggacccctcccggcctaatcacctcctaaaggctccacctcttaatatcatcacattggcaatgccttaattttggagggaacacactcaaactatagcattaagatatgggaaaggaacaagaaagagtctatttttctttggtgatctgtttaaggagtagatgtgtttcgtttgcatcacatctatgtacagtattaaaaataaaatgtatctctctctctctctctatatatatatatatatacactgaaacctttactatatatatatagatatatacactgaaacctttactgtctttcattgtctttctagtttttaaggataggaaattttagttaaaatgctagcctggcatttttcttattccccacttttatttcccccatggggaattgggttatgaaactggaaattttattaattttccagaaattgttctggtgggtttgtgtaaggaggagagtaataactggcatggcattgcagttactctttatttataattaagacatgctctttatttcaaaatattaagttaataatactcttaacttattgcacttaagtagattgagacaatttgcgatttattttgacatcctaataaagtggataaaaggagaagctgcttggaaaactttcccacttgggaattttttccacattcctaattttcctttgtggaatgtcactcaccatttcccatttggaactgctctttctagatagtagatggaatggagtggttgcagtggtggtggtggtgttactgtttacatcaacctagagaaaaatggaagcatcttaacttggttaaaatgtttctgttgtttatataattctttaagcctcattccagtgcttgctgctattaaaaaaaaaacaaaaaactaaaaacttgcatttcttttactgatcattttgtagacatagaaa

SEQ ID NO: 330339 - DNA, 999 bp, Homo sapiens
ggccttgttgctgtgtcatccatgtcagaagagctgaagaacaagctagccaaatgctatgctaagcctcttttgtaagggccttaatgaggggggacccctcccggcctaatcacctcctaaaggctccacctcttaatatcatcacattggcaatgccttaattttggagggaacacactcaaactatagcattaagatatgggaaaggaacaagaaagagtctatttttctttggtgatctgtttaaggagtagatgtgtttcgtttgcatcacatctatgtacagtattaaaaataaaatgtatctctctctctctatatatatatagatatatacactgaaacctttactgtctttcattgtctttctagtttttaaggataggaaattttagttaaaatgctagcctggcatttttcttattccccacttttatttcccccatggggaattgggttatgaaactggaaattttattaattttccagaaattgttctggtgggtttgtgtaaggaggagagtaataactggcatggcattgcagttactctttatttataattaagacatgctctttatttcaaaatattaagttaataatactcttaacttattgcacttaagtagattgagacaatttgcgatttattttgacatcctaataaagtggataaaaggagaagctgcttggaaaactttcccacttgggaattttttccacattcctaattttcctttgtggaatgtcactcaccatttcccatttggaactgctctttctagatagtagatggaatggagtggttgcagtggtggtggtggtgttactgtttacatcaacctagagaaaaatggaagcatcttaacttggttaaaatgtttctgttgtttatataattctttaagcctcattccagtgcttgctgctattaaaaaaaaaacaaaaaactaaaaacttgcatttcttttactgatcattttgtagacatagaaa

SEQ ID NO: 330340 - DNA, 532 bp, Homo sapiens
attgtatgtttcaatatttgaatattgaatgaatattcgatatcgaatattgaatgaatattgaaacattccactctctttaactttttgaaatagtttcggtagaattgatattagctcttctttaaatgttttgatagaattcagcaataaagacatcaagtgcagtgttttactttgatgggagattgtttgttattgttttaatcttgttgcctgttggtggtctattaaagttttctatttctttattattcaatcttggtaagttgtatgtgtccagaagtttatccctttcttctaggttttctaatttgttgacatatagttgtatttgtagtggtttgttataatcttttgtatttctgttatatcagttgtaatgtttccttttcatctctgattttatttgagttttctttgtttcttagttaatcttgctaaaggtttgctgattttgtttatcttcaaaaaaccagctctttgatatattaattttttgtgtgttttttaaaagtctctactaggttta

SEQ ID NO: 330341 - DNA, 530 bp, Homo sapiens
cctacattattataccttctgattaaccacaatgacatacaactccaaaaaagaaaaaggtgcattcttaggtcttgaaatttaagtcacattaattgcaatcctagataatggtacaacatgggttttgtgctacactgaaaaatttgttgtctcttgttactcaagagatccttgaggttacaggtgattctgtaaatgagaaagagtaagcagagagcatcactcaactatctagaaagaagtggaaaaggaaagatatcaggtcgattttttataccacatatgtaggagaaagctgaagatacgcaaaagagcatagatctttggcttatgacttatggtcagcctgcccagatgtccccagcaggaaagaagcatcagcaattgtgttaattatgcctctgtttgcacttctttcaaggctaattgtccgcttgcttcatttagtccttgatcagaagttagtctgggaaagcattcctggtatgaacacccatggaattcatcttgtgaaaatgcaaatccca

SEQ ID NO: 330342 - DNA, 815 bp, Homo sapiens
attgggtacccgggccccccccgcccgggagccacagcctgaggccctcaggtctctgcaggtgtcgtggaggaacctagcacctgccatcctcttccccaatttgccacttccagcagctttagcccatgaggaggatgtgaccgggactgagtcaggagccctctggaagcatggagactgtggtgattgttgccataggtgtgctggccaccatctttctggcttcgtttgcagccttggtgctggtttgcaggcagcgctactgccggccgcgagacctgctgcagcgctatgattctaagcccattgtggacctcattggtgccatggagacccagtctgagccctctgagttagaactggacgatgtcgttatcaccaacccccacattgaggccattctggagaatgaagactggatcgaagatgcctcgggtctcatgtcccactgcattgccatcttgaagatttgtcacactctgacagagaagcttgttgccatgacaatgggctctggggccaagatgaagacttcagccagtgtcagcgacatcattgtggtggccaagcggatcagccccaggtaaggagaccaaagcagaaagatcagtaaccctcctggagtctcacaattaatatgaatcagagcaggatcttcaactcctcaacttgtgtttttaactggcacatcttcctgcctgggtgcagcaggtgggaaatccatcatggaaaggaaagaacagacatgagagtcattccattctcttccagttcaaatctttttttgtgaaaaaaatggtagttgtgaccca

SEQ ID NO: 330343 - DNA, 1848 bp, Homo sapiens
taagctcgtgtaatcggacgaggctctccgtctgccgcccggacgggccaccgcgggggcgcgaggaaggggtgttgggtcgccaggcccgcctcccagctgccccggccgccggggggcctggcggtgacggcggcgcctggcggcggggatttggcgcgggccgggggccgggggccggggcgcgggggcgcgaggctggattcctagggccgcggcgcttcccggcatgctccgctgcaggcccgcgcccgcgcccggactttgccatcggcggggcagtcgcgggatgcgcccgggagccacagcctgagggtttaaaaagctattttaaggccgggctcggtgtctcacgcgtgtaatcccagcactttgggaggcccgaggccctcaggtctctgcaggtgtcgtggaggaacctagcacctgccatcctcttccccaatttgccacttccagcagctttagcccatgaggaggatgtgaccgggactgagtcaggagccctctggaagcatggagactgtggtgattgttgccataggtgtgctggccaccatctttctggcttcgtttgcagccttggtgctggtttgcaggcagcgctactgccggccgcgagacctgctgcagcgctatgattctaagcccattgtggacctcattggtgccatggagacccagtctgagccctctgagttagaactggacgatgtcgttatcaccaacccccacattgaggccattctggagaatgaagactggatcgaagatgcctcgggtctcatgtcccactgcattgccatcttgaagatttgtcacactctgacagagaagcttgttgccatgacaatgggctctggggccaagatgaagacttcagccagtgtcagcgacatcattgtggtggccaagcggatcagccccagggtggatgatgttgtgaagtcgatgtaccctccgttggaccccaaactcctggacgcacggacgactgccctgctcctgtctgtcagtcacctggtgctggtgacaaggaatgcctgccatctgacgggaggcctggactggattgaccagtctctgtcggctgctgaggagcatttggaagtccttcgagaagcagccctagcttctgagccagataaaggcctcccaggccctgaaggcttcctgcaggagcagtctgcaatttagtgcctacaggccagcagctagccatgaaggcccctgccgccatccctggatggctcagcttagccttctactttttcctatagagttagttgttctccatggctggagagttcagctgtgtgtgcatagtaaagcaggagatccccgtcagtttatgcctcttttgcagttgcaaactgtggctggtgagtggcagtctaatactacagttaggggagatgccattcactctctgcaagaggagtattgaaaactggtggactgtcagctttatttagctcacctagtgttttcaagaaaattgagccaccgtctaagaaatcaagaggtttcacattaaaattagaatttctggcctctctcgatcggtcagaatgtgtggcaattctgatctgcattttcagaagaggacaatcaattgaaactaagtaggggtttcttcttttggcaagacttgtactctctcacctggcctgtttcatttatttgtattatctgcctggtccctgaggcgtctgggtctctcctctcccttgcaggtttgggtttgaagctgaggaactacaaagttgatgatttcttttttatctttatgcctgcaattttacctagctaccactaggtggatagtaaatttatacttatgtttcc

SEQ ID NO: 330344 - DNA, 1739 bp, Homo sapiens
taagctcgtgtaatcggacgaggctctccgtctgccgcccggacgggccaccgcgggggcgcgaggaaggggtgttgggtcgccaggcccgcctcccagctgccccggccgccggggggcctggcggtgacggcggcgcctggcggcggggatttggcgcgggccgggggccgggggccggggcgcgggggcgcgaggctggattcctagggccgcggcgcttcccggcatgctccgctgcaggcccgcgcccgcgcccggactttgccatcggcggggcagtcgcgggatgcgcccgggagccacagcctgaggccctcaggtctctgcaggtgtcgtggaggaacctagcacctgccatcctcttccccaatttgccacttccagcagctttagcccatgaggaggatgtgaccgggactgagtcaggagccctctggaagcatggagactgtggtgattgttgccataggtgtgctggccaccatctttctggcttcgtttgcagccttggtgctggtttgcaggcagcgctactgccggccgcgagacctgctgcagcgctatgattctaagcccattgtggacctcattggtgccatggagacccagtctgagccctctgagttagaactggacgatgtcgttatcaccaacccccacattgaggccattctggagaatgaagactggatcgaagatgcctcgggtctcatgtcccactgcattgccatcttgaagatttgtcacactctgacagagaagcttgttgccatgacaatgggctctggggccaagatgaagacttcagccagtgtcagcgacatcattgtggtggccaagcggatcagccccagggtggatgatgttgtgaagtcgatgtaccctccgttggaccccaaactcctggacgcacggacgactgccctgctcctgtctgtcagtcacctggtgctggtgacaaggaatgcctgccatctgacgggaggcctggactggattgaccagtctctgtcggctgctgaggagcatttggaagtccttcgagaagcagccctagcttctgagccagataaaggcctcccaggccctgaaggcttcctgcaggagcagtctgcaatttagtgcctacaggccagcagctagccatgaaggcccctgccgccatccctggatggctcagcttagccttctactttttccctgtgtgtgcatagtaaagcaggagatccccgtcagtttatgcctcttttgcagttgcaaactgtggctggtgagtggcagtctaatactacagttaggggagatgccattcactctctgcaagaggagtattgaaaactggtggactgtcagctttatttagctcacctagtgttttcaagaaaattgagccaccgtctaagaaatcaagaggtttcacattaaaattagaatttctggcctctctcgatcggtcagaatgtgtggcaattctgatctgcattttcagaagaggacaatcaattgaaactaagtaggggtttcttcttttggcaagacttgtactctctcacctggcctgtttcatttatttgtattatctgcctggtccctgaggcgtctgggtctctcctctcccttgcaggtttgggtttgaagctgaggaactacaaagttgatgatttcttttttatctttatgcctgcaattttacctagctaccactaggtggatagtaaatttatacttatgtttcc

SEQ ID NO: 330345 - DNA, 1287 bp, Homo sapiens
  misc_feature (18)..(19): n is a, c, g, or t
ggcacgagtgcaaacgannccagaaagatggtttgcaggcagcgctactgccggccgcgagacctgctgcagcgctatgattctaagcccattgtggacctcattggtgccatggagacccagtctgagccctctgagttagaactggacgatgtcgttatcaccaacccccacattgaggccattctggagaatgaagactggatcgaagatgcctcgggtctcatgtcccactgcattgccatcttgaagatttgtcacactctgacagagaagcttgttgccatgacaatgggctctggggccaagatgaagacttcagccagtgtcagcgacatcattgtggtggccaagcggatcagccccagggtggatgatgttgtgaagtcgatgtaccctccgttggaccccaaactcctggacgcacggacgactgccctgctcctgtctgtcagtcacctggtgctggtgacaaggaatgcctgccatctgacgggaggcctggactggattgaccagtctctgtcggctgctgaggagcatttggaagtccttcgagaagcagccctagcttctgagccagataaaggcctcccaggccctgaaggcttcctgcaggagcagtctgcaatttagtgcctacaggccagcagctagccatgaaggcccctgccgccatccctggatggctcagcttagccttctactttttcctatagagttagttgttctccatggctggagagttcagctgtgtgtgcatagtaaagcaggagatccccgtcagtttatgcctcttttgcagttgcaaactgtggctggtgagtggcagtctaatactacagttaggggagatgccattcactctctgcaagaggagtattgaaaactggtggactgtcagctttatttagctcacctagtgttttcaagaaaattgagccaccgtctaagaaatcaagaggtttcacattaaaattagaatttctggcctctctcgatcggtcagaatgtgtggcaattctgatctgcattttcagaagaggacaatcaattgaaactaagtaggggtttcttcttttggcaagacttgtactctctcacctggcctgtttcatttatttgtattatctgcctggtccctgaggcgtctgggtctctcctctcccttgcaggtttgggtttgaagctgaggaactacaaagttgatgatttcttttttatctttatgcctgcaattttacctagctaccactaggtggatagtaaatttatacttatgtttcc

SEQ ID NO: 330346 - DNA, 1640 bp, Homo sapiens
taagctcgtgtaatcggacgaggctctccgtctgccgcccggacgggccaccgcgggggcgcgaggaaggggtgttgggtcgccaggcccgcctcccagctgccccggccgccggggggcctggcggtgacggcggcgcctggcggcggggatttggcgcgggccgggggccgggggccggggcgcgggggcgcgaggctggattcctagggccgcggcgcttcccggcatgctccgctgcaggcccgcgcccgcgcccggactttgccatcggcggggcagtcgcgggatgcgcccgggagccacagcctgagctttagcccatgaggaggatgtgaccgggactgagtcaggagccctctggaagcatggagactgtggtgattgttgccataggtgtgctggccaccatctttctggcttcgtttgcagccttggtgctggtttgcaggcagcgctactgccggccgcgagacctgctgcagcgctatgattctaagcccattgtggacctcattggtgccatggagacccagtctgagccctctgagttagaactggacgatgtcgttatcaccaacccccacattgaggccattctggagaatgaagactggatcgaagatgcctcgggtctcatgtcccactgcattgccatcttgaagatttgtcacactctgacagagaagcttgttgccatgacaatgggctctggggccaagatgaagacttcagccagtgtcagcgacatcattgtggtggccaagcggatcagccccaggacgactgccctgctcctgtctgtcagtcacctggtgctggtgacaaggaatgcctgccatctgacgggaggcctggactggattgaccagtctctgtcggctgctgaggagcatttggaagtccttcgagaagcagccctagcttctgagccagataaaggcctcccaggccctgaaggcttcctgcaggagcagtctgcaatttagtgcctacaggccagcagctagccatgaaggcccctgccgccatccctggatggctcagcttagccttctactttttcctatagagttagttgttctccatggctggagagttcagctgtgtgtgcatagtaaagcaggagatccccgtcagtttatgcctcttttgcagttgcaaactgtggctggtgagtggcagtctaatactacagttaggggagatgccattcactctctgcaagaggagtattgaaaactggtggactgtcagctttatttagctcacctagtgttttcaagaaaattgagccaccgtctaagaaatcaagaggtttcacattaaaattagaatttctggcctctctcgatcggtcagaatgtgtggcaattctgatctgcattttcagaagaggacaatcaattgaaactaagtaggggtttcttcttttggcaagacttgtactctctcacctggcctgtttcatttatttgtattatctgcctggtccctgaggcgtctgggtctctcctctcccttgcaggtttgggtttgaagctgaggaactacaaagttgatgatttcttttttatctttatgcctgcaattttacctagctaccactaggtggatagtaaatttatacttatgtttcc

SEQ ID NO: 330347 - DNA, 546 bp, Homo sapiens
ctgtgatctagaggatccctcataggtcgcaggagatccccgtcagtttatgcctcttttgcagttgcaaactgtggctggtgagtggcagtctaatactacagttaggggagatgccattcactctctgcaagaggagtattgaaaactggtggactgtcagctttatttagctcacctagtgttttcaagaaaattgagccaccgtctaagaaatcaagaggtttcacattaaaattagaatttctggcctctctcgatcggtcagaatgtgtggcaattctgatctgcattttcagaagaggacaatcaattgaaactaagtaggggtttcttcttttggcaagacttgtactctctcacctggcctgtttcatttatttgtattatctgcctggtccctgaggcgtctgggtctctcctctcccttgcaggtttgggtttgaagctgaggaactacaaagttgatgatttcttttttatctttatgcctgcaattttacctagctaccactaggtggatagtaaatttatacttatgtttcc

SEQ ID NO: 330348 - DNA, 473 bp, Homo sapiens
atggagccaactttaaattgcatacctaccaacatcctagggaagggtgtgcagtttggggaatactagtcaaaaagtctatctatttgggcttttgtgcaaagtccctcatttcctaggaaacctgaccctattttctttttttccctaggacgactgccctgctcctgtctgtcagtcacctggtgctggtgacaaggaatgcctgccatctgacgggaggcctggactggattgaccagtctctgtcggctgctgaggagcatttggaagtccttcgagaagcagccctagcttctgagccagataaaggcctcccaggccctgaaggcttcctgcaggagcagtctgcaatttagtgcctacaggccagcagctagccatgaaggcccctgccgccatccctggatggctcagcttagccttctactttttcctatagagttagttgttctccatggctggagagttca

SEQ ID NO: 330349 - DNA, 509 bp, Homo sapiens
tccccgtcagtttatgcctcttttgcagttgcaaactgtggctggtgagtggcagtctaatactacagttaggggagatgccattcactctctgcaagaggagtattgaaaactggtggactgtcagctttatttagctcacctagtgttttcaagaaaattgagccaccgtctaagaaatcaagaggtttcacattaaaattagaatttctggcctctctcgatcggtcagaatgtgtggcaattctgatctgcattttcagaagaggacaatcaattgaaactaagtaggggtttcttcttttggcaagacttgtactctctcacctggcctgtttcatttatttgtattatctgcctggtccctgaggcgtctgggtctctcctctcccttgcaggtttgggtttgaagctgaggaactacaaagttgatgatttcttttttatctttatgcctgcaattttacctagctaccactaggtggatagtaaatttatacttatgtttc

SEQ ID NO: 330350 - DNA, 1776 bp, Homo sapiens
taagctcgtgtaatcggacgaggctctccgtctgccgcccggacgggccaccgcgggggcgcgaggaaggggtgttgggtcgccaggcccgcctcccagctgccccggccgccggggggcctggcggtgacggcggcgcctggcggcggggatttggcgcgggccgggggccgggggccggggcgcgggggcgcgaggctggattcctagggccgcggcgcttcccggcatgctccgctgcaggcccgcgcccgcgcccggactttgccatcggcggggcagtcgcgggatgcgcccgggagccacagcctgaggccctcaggtctctgcaggtgtcgtggaggaacctagcacctgccatcctcttccccaatttgccacttccagcagctttagcccatgaggaggatgtgaccgggactgagtcaggagccctctggaagcatggagactgtggtgattgttgccataggtgtgctggccaccatctttctggcttcgtttgcagccttggtgctggtttgcaggcagcgctactgccggccgcgagacctgctgcagcgctatgattctaagcccattgtggacctcattggtgccatggagacccagtctgagccctctgagttagaactggacgatgtcgttatcaccaacccccacattgaggccattctggagaatgaagactggatcgaagatgcctcgggtctcatgtcccactgcattgccatcttgaagatttgtcacactctgacagagaagcttgttgccatgacaatgggctctggggccaagatgaagacttcagccagtgtcagcgacatcattgtggtggccaagcggatcagccccagggtggatgatgttgtgaagtcgatgtaccctccgttggaccccaaactcctggacgcacggacgactgccctgctcctgtctgtcagtcacctggtgctggtgacaaggaatgcctgccatctgacgggaggcctggactggattgaccagtctctgtcggctgctgaggagcatttggaagtccttcgagaagcagccctagcttctgagccagataaaggcctcccaggccctgaaggcttcctgcaggagcagtctgcaatttagtgcctacaggccagcagctagccatgaaggcccctgccgccatccctggatggctcagcttagccttctactttttcctatagagttagttgttctccatggctggagagttcagctgtgtgtgcatagtaaagcaggagatccccgtcagtttatgcctcttttgcagttgcaaactgtggctggtgagtggcagtctaatactacagttaggggagatgccattcactctctgcaagaggagtattgaaaactggtggactgtcagctttatttagctcacctagtgttttcaagaaaattgagccaccgtctaagaaatcaagaggtttcacattaaaattagaatttctggcctctctcgatcggtcagaatgtgtggcaattctgatctgcattttcagaagaggacaatcaattgaaactaagtaggggtttcttcttttggcaagacttgtactctctcacctggcctgtttcatttatttgtattatctgcctggtccctgaggcgtctgggtctctcctctcccttgcaggtttgggtttgaagctgaggaactacaaagttgatgatttcttttttatctttatgcctgcaattttacctagctaccactaggtggatagtaaatttatacttatgtttcc

SEQ ID NO: 330351 - DNA, 2009 bp, Homo sapiens
taagctcgtgtaatcggacgaggctctccgtctgccgcccggacgggccaccgcgggggcgcgaggaaggggtgttgggtcgccaggcccgcctcccagctgccccggccgccggggggcctggcggtgacggcggcgcctggcggcggggatttggcgcgggccgggggccgggggccggggcgcgggggcgcgaggctggattcctagggccgcggcgcttcccggcatgctccgctgcaggcccgcgcccgcgcccggactttgccatcggcggggcagtcgcgggatgcgcccgggagccacagcctgaggccctcaggtctctgcaggtgtcgtggaggaacctagcacctgccatcctcttccccaatttgccacttccagcagctttagcccatgaggaggatgtgaccgggactgagtcaggagccctctggaagcatggagactgtggtgattgttgccataggtgtgctggccaccatctttctggcttcgtttgcagccttggtgctggtttgcaggcagcgctactgccggccgcgagacctgctgcagcgctatgattctaagcccattgtggacctcattggtgccatggagacccagtctgagccctctgagttagaactggacgatgtcgttatcaccaacccccacattgaggccattctggagaatgaagactggatcgaagatgcctcgggtctcatgtcccactgcattgccatcttgaagatttgtcacactctgacagagaagcttgttgccatgacaatgggctctggggccaagatgaagacttcagccagtgtcagcgacatcattgtggtggccaagcggatcagccccagggtggatgatgttgtgaagtcgatgtaccctccgttggaccccaaactcctggacgcacggacgactgccctgctcctgtctgtcagtcacctggtgctggtgacaaggaatgcctgccatctgacgggaggcctggactggattgaccagtctctgtcggctgctgaggagcatttggaagtccttcgagaagcagccctagcttctgagccagataaaggcctcccaggccctgaaggcttcctgcaggagcagtctgcaatttagtgcctacaggccagcagctagccatgaaggcccctgccgccatccctggatggctcagcttagccttctactttttcctatagagttagttgttctccatggctggagagttcagctgtgtgtgcatagtaaagcaggagatccccgtcagtttatgcctcttttgcagttgcaaactgtggctggtgagtggcagtctaatactacagttaggggagatgccattcactctctgcaagaggagtattgaaaactggtggactgtcagctttatttagctcacctagtgttttcaagaaaattgagccaccgtctaagaaatcaagaggtttcacattaaaattagaatttctggcctctctcgatcggtcagaatgtgtggcaattctgatctgcattttcagaagaggacaatcaattgaaactaagtaggggtttcttcttttggcaagacttgtactctctcacctggcctgtttcatttatttgtattatctgcctggtccctgaggcgtctgggtctctcctctcccttgcaggtttgggtttgaagctgaggaactacaaagttgatgatttcttttttatctttatgcctgcaattttacctagctaccactaggtggatagtaaatttatacttatgtttccaaaaaaaaaaaagaaatgaaaaaacaaaaaacataaacaaacagcaaacaagaacaaaacaaaaacaaaaacagaaaaaagagaggggggggaacatattatccggggggacaaataacacccacttttttaaggggcccaatagaggttatattaaaagggggggcgataaaacgtgggggaaaaactgtgttttgtggagacccttctgggttgattggacacacagaaat

SEQ ID NO: 330352 - DNA, 1505 bp, Homo sapiens
attgggtacccgggccccccccgcccgggagccacagcctgaggccctcaggtctctgcaggtgtcgtggaggaacctagcacctgccatcctcttccccaatttgccacttccagcagctttagcccatgaggaggatgtgaccgggactgagtcaggagccctctggaagcatggagactgtggtgattgttgccataggtgtgctggccaccatctttctggcttcgtttgcagccttggtgctggtttgcaggcagcgctactgccggccgcgagacctgctgcagcgctatgattctaagcccattgtggacctcattggtgccatggagacccagtctgagccctctgagttagaactggacgatgtcgttatcaccaacccccacattgaggccattctggagaatgaagactggatcgaagatgcctcgggtctcatgtcccactgcattgccatcttgaagatttgtcacactctgacagagaagcttgttgccatgacaatgggctctggggccaagatgaagacttcagccagtgtcagcgacatcattgtggtggccaagcggatcagccccagggtggatgatgttgtgaagtcgatgtaccctccgttggaccccaaactcctggacgcacggacgactgccctgctcctgtctgtcagtcacctggtgctggtgacaaggaatgcctgccatctgacgggaggcctggactggattgaccagtctctgtcggctgctgaggagcatttggaagtccttcgagaagcagccctagcttctgagccagataaaggcctcccaggccctgaaggcttcctgcaggagcagtctgcaatttagtgcctacaggccagcagctagccatgaaggcccctgccgccatccctggatggctcagcttagccttctactttttcctatagagttagttgttctccatggctggagagttcagctgtgtgtgcatagtaaagcaggagatccccgtcagtttatgcctcttttgcagttgcaaactgtggctggtgagtggcagtctaatactacagttaggggagatgccattcactctctgcaagaggagtattgaaaactggtggactgtcagctttatttagctcacctagtgttttcaagaaaattgagccaccgtctaagaaatcaagaggtttcacattaaaattagaatttctggcctctctcgatcggtcagaatgtgtggcaattctgatctgcattttcagaagaggacaatcaattgaaactaagtaggggtttcttcttttggcaagacttgtactctctcacctggcctgtttcatttatttgtattatctgcctggtccctgaggcgtctgggtctctcctctcccttgcaggtttgggtttgaagctgaggaactacaaagttgatgatttcttttttatctttatgcctgcaattttacctagctaccactaggtggatagtaaatttatacttatgtttcc

SEQ ID NO: 330353 - DNA, 1700 bp, Homo sapiens
taagctcgtgtaatcggacgaggctctccgtctgccgcccggacgggccaccgcgggggcgcgaggaaggggtgttgggtcgccaggcccgcctcccagctgccccggccgccggggggcctggcggtgacggcggcgcctggcggcggggatttggcgcgggccgggggccgggggccggggcgcgggggcgcgaggctggattcctagggccgcggcgcttcccggcatgctccgctgcaggcccgcgcccgcgcccggactttgccatcggcggggcagtcgcgggatgcgcccgggagccacagcctgagctttagcccatgaggaggatgtgaccgggactgagtcaggagccctctggaagcatggagactgtggtgattgttgccataggtgtgctggccaccatctttctggcttcgtttgcagccttggtgctggtttgcaggcagcgctactgccggccgcgagacctgctgcagcgctatgattctaagcccattgtggacctcattggtgccatggagacccagtctgagccctctgagttagaactggacgatgtcgttatcaccaacccccacattgaggccattctggagaatgaagactggatcgaagatgcctcgggtctcatgtcccactgcattgccatcttgaagatttgtcacactctgacagagaagcttgttgccatgacaatgggctctggggccaagatgaagacttcagccagtgtcagcgacatcattgtggtggccaagcggatcagccccagggtggatgatgttgtgaagtcgatgtaccctccgttggaccccaaactcctggacgcacggacgactgccctgctcctgtctgtcagtcacctggtgctggtgacaaggaatgcctgccatctgacgggaggcctggactggattgaccagtctctgtcggctgctgaggagcatttggaagtccttcgagaagcagccctagcttctgagccagataaaggcctcccaggccctgaaggcttcctgcaggagcagtctgcaatttagtgcctacaggccagcagctagccatgaaggcccctgccgccatccctggatggctcagcttagccttctactttttcctatagagttagttgttctccatggctggagagttcagctgtgtgtgcatagtaaagcaggagatccccgtcagtttatgcctcttttgcagttgcaaactgtggctggtgagtggcagtctaatactacagttaggggagatgccattcactctctgcaagaggagtattgaaaactggtggactgtcagctttatttagctcacctagtgttttcaagaaaattgagccaccgtctaagaaatcaagaggtttcacattaaaattagaatttctggcctctctcgatcggtcagaatgtgtggcaattctgatctgcattttcagaagaggacaatcaattgaaactaagtaggggtttcttcttttggcaagacttgtactctctcacctggcctgtttcatttatttgtattatctgcctggtccctgaggcgtctgggtctctcctctcccttgcaggtttgggtttgaagctgaggaactacaaagttgatgatttcttttttatctttatgcctgcaattttacctagctaccactaggtggatagtaaatttatacttatgtttcc

SEQ ID NO: 330354 - DNA, 1124 bp, Homo sapiens
taagctcgtgtaatcggacgaggctctccgtctgccgcccggacgggccaccgcgggggcgcgaggaaggggtgttgggtcgccaggcccgcctcccagctgccccggccgccggggggcctggcggtgacggcggcgcctggcggcggggatttggcgcgggccgggggccgggggccggggcgcgggggcgcgaggctggattcctagggccgcggcgcttcccggcatgctccgctgcaggcccgcgcccgcgcccggacttgacgactgccctgctcctgtctgtcagtcacctggtgctggtgacaaggaatgcctgccatctgacgggaggcctggactggattgaccagtctctgtcggctgctgaggagcatttggaagtccttcgagaagcagccctagcttctgagccagataaaggcctcccaggccctgaaggcttcctgcaggagcagtctgcaatttagtgcctacaggccagcagctagccatgaaggcccctgccgccatccctggatggctcagcttagccttctactttttcctatagagttagttgttctccatggctggagagttcagctgtgtgtgcatagtaaagcaggagatccccgtcagtttatgcctcttttgcagttgcaaactgtggctggtgagtggcagtctaatactacagttaggggagatgccattcactctctgcaagaggagtattgaaaactggtggactgtcagctttatttagctcacctagtgttttcaagaaaattgagccaccgtctaagaaatcaagaggtttcacattaaaattagaatttctggcctctctcgatcggtcagaatgtgtggcaattctgatctgcattttcagaagaggacaatcaattgaaactaagtaggggtttcttcttttggcaagacttgtactctctcacctggcctgtttcatttatttgtattatctgcctggtccctgaggcgtctgggtctctcctctcccttgcaggtttgggtttgaagctgaggaactacaaagttgatgatttcttttttatctttatgcctgcaattttacctagctaccactaggtggatagtaaatttatacttatgtttcc

SEQ ID NO: 330355 - DNA, 343 bp, Homo sapiens
cagaacttccatgttgggtggaaggaagaatgaggacagcaccccgtcccttgcacagctcagcggcaagtggtcaggagtgtagcaagaagcacagatttgggaagcagtggaaagagttcagttttggatgtgtggggtgcatgtagaccatccatgtgacatttactgtgggttactagatacagaatctgatgtctggggaggctgagacaggagaatcgcttaaacctgggaggcggaggttgcagtgagctgagactgtgccactgcactccagcctgggcaaaagagcaagactccatctcaaaaagagagagagaggaaaaaatgaggtttatct

SEQ ID NO: 330356 - DNA, 89 bp, Homo sapiens
atgtgccacagtgaatgttaaattaaaaattttctggcaggagtatattaccagatagcaacctggatctgcaaaaagaaacaaaagca

SEQ ID NO: 330357 - DNA, 317 bp, Homo sapiens
ccaccacatccaccgtggttcgtttattattatgatactactttcagttcggggatacatatgcagagaggtacaggtttgttacgcaggtagtatatatgccagggtgggttggctgcaaacaaacaaacaaaaacaaaaaaacccacaaataagtcttgacttttaactcaaaccaggtagactgtaactgtaaatataaaaggcgaatgaaaaagcttctaaagataatcaaaaagaacatcttcatgaccttgggaaagagtaagatttcttacacatgacattaaaaaaccataacattttgataaactgga

SEQ ID NO: 330358 - DNA, 320 bp, Homo sapiens
tataaaaaagacaaacaaaatatattttccatcttatgcatattactaacatctttcaaaaccaacccatgaaggcaaatacaattaaaaagagcattgtttcataatattttaaggtatcggcaaaacactgtatttcacaacacagcaaccactagtttttgtttttgttttttttttgagatgaagtctcactctgttgcccgggcttgagtgcagtggcgcaatctcggctcactgcaagcttcgcgtcctgggttcacgccattctcctgcctcagcctcccgagtagctgggactacaggcgcctgccaccatg

SEQ ID NO: 330359 - DNA, 5916 bp, Homo sapiens
  misc_feature (28)..(28): n is a, c, g, or t
  misc_feature (30)..(30): n is a, c, g, or t
gcgctgcccgcctcgtccccaccccccnancccccgcgcccgccctcggacagtccctgctcgcccgcgcgctgcagccccatctcctagcggcagcccaggcgcggagggagcgagtccgccccgaggtaggtccaggacgggcgcacagcagcagccgaggctggccgggagagggaggaagaggatggcagggccacgccccagcccatgggccaggctgctcctggcagccttgatcagcgtcagcctctctgggaccttggcaaaccgctgcaagaaggccccagtgaagagctgcacggagtgtgtccgtgtggataaggactgcgcctactgcacagacgagatgttcagggaccggcgctgcaacacccaggcggagctgctggccgcgggctgccagcgggagagcatcgtggtcatggagagcagcttccaaatcacagaggagacccagattgacaccaccctgcggcgcagccagatgtccccccaaggcctgcgggtccgtctgcggcccggtgaggagcggcattttgagctggaggtgtttgagccactggagagccccgtggacctgtacatcctcatggacttctccaactccatgtccgatgatctggacaacctcaagaagatggggcagaacctggctcgggtcctgagccagctcaccagcgactacactattggatttggcaagtttgtggacaaagtcagcgtcccgcagacggacatgaggcctgagaagctgaaggagccctggcccaacagtgacccccccttctccttcaagaacgtcatcagcctgacagaagatgtggatgagttccggaataaactgcagggagagcggatctcaggcaacctggatgctcctgagggcggcttcgatgccatcctgcagacagctgtgtgcacgagggacattggctggcgcccggacagcacccacctgctggtcttctccaccgagtcagccttccactatgaggctgatggcgccaacgtgctggctggcatcatgagccgcaacgatgaacggtgccacctggacaccacgggcacctacacccagtacaggacacaggactacccgtcggtgcccaccctggtgcgcctgctcgccaagcacaacatcatccccatctttgctgtcaccaactactcctatagctactacgagaagcttcacacctatttccctgtctcctcactgggggtgctgcaggaggactcgtccaacatcgtggagctgctggaggaggccttcaatcggatccgctccaacctggacatccgggccctagacagcccccgaggccttcggacagaggtcacctccaagatgttccagaagacgaggactgggtcctttcacatccggcggggggaagtgggtatataccaggtgcagctgcgggcccttgagcacgtggatgggacgcacgtgtgccagctgccggaggaccagaagggcaacatccatctgaaaccttccttctccgacggcctcaagatggacgcgggcatcatctgtgatgtgtgcacctgcgagctgcaaaaagaggtgcggtcagctcgctgcagcttcaacggagacttcgtgtgcggacagtgtgtgtgcagcgagggctggagtggccagacctgcaactgctccaccggctctctgagtgacattcagccctgcctgcgggagggcgaggacaagccgtgctccggccgtggggagtgccagtgcgggcactgtgtgtgctacggcgaaggccgctacgagggtcagttctgcgagtatgacaacttccagtgtccccgcacttccgggttcctctgcaatgaccgaggacgctgctccatgggccagtgtgtgtgtgagcctggttggacaggcccaagctgtgactgtcccctcagcaatgccacctgcatcgacagcaatgggggcatctgtaatggacgtggccactgtgagtgtggccgctgccactgccaccagcagtcgctctacacggacaccatctgcgagatcaactactcggcgatccacccgggcctctgcgaggacctacgctcctgcgtgcagtgccaggcgtggggcaccggcgagaagaaggggcgcacgtgtgaggaatgcaacttcaaggtcaagatggtggacgagcttaagagagccgaggaggtggtggtgcgctgctccttccgggacgaggatgacgactgcacctacagctacaccatggaaggtgacggcgcccctgggcccaacagcactgtcctggtgcacaagaagaaggactgccctccgggctccttctggtggctcatccccctgctcctcctcctcctgccgctcctggccctgctactgctgctatgctggaagtactgtgcctgctgcaaggcctgcctggcacttctcccgtgctgcaaccgaggtcacatggtgggctttaaggaagaccactacatgctgcgggagaacctgatggcctctgaccacttggacacgcccatgctgcgcagcgggaacctcaagggccgtgacgtggtccgctggaaggtcaccaacaacatgcagcggcctggctttgccactcatgccgccagcatcaaccccacagagctggtgccctacgggctgtccttgcgcctggcccgcctttgcaccgagaacctgctgaagcctgacactcgggagtgcgcccagctgcgccaggaggtggaggagaacctgaacgaggtctacaggcagatctccggtgtacacaagctccagcagaccaagttccggcagcagcccaatgccgggaaaaagcaagaccacaccattgtggacacagtgctgatggcgccccgctcggccaagccggccctgctgaagcttacagagaagcaggtggaacagagggccttccacgacctcaaggtggcccccggctactacaccctcactgcagaccaggacgcccggggcatggtggagttccaggagggcgtggagctggtggacgtacgggtgcccctctttatccggcctgaggatgacgacgagaagcagctgctggtggaggccatcgacgtgcccgcaggcactgccaccctcggccgccgcctggtaaacatcaccatcatcaaggagcaagccagagacgtggtgtcctttgagcagcctgagttctcggtcagccgcggggaccaggtggcccgcatccctgtcatccggcgtgtcctggacggcgggaagtcccaggtctcctaccgcacacaggatggcaccgcgcagggcaaccgggactacatccccgtggagggtgagctgctgttccagcctggggaggcctggaaagagctgcaggtgaagctcctggagctgcaagaagttgactccctcctgcggggccgccaggtccgccgtttccacgtccagctcagcaaccctaagtttggggcccacctgggccagccccactccaccaccatcatcatcagggacccagatgaactggaccggagcttcacgagtcagatgttgtcatcacagccaccccctcacggcgacctgggcgccccgcagaaccccaatgctaaggccgctgggtccaggaagatccatttcaactggctgcccccttctggcaagccaatggggtacagggtaaagtactggattcagggtgactccgaatccgaagcccacctgctcgacagcaaggtgccctcagtggagctcaccaacctgtacccgtattgcgactatgagatgaaggtgtgcgcctacggggctcagggcgagggaccctacagctccctggtgtcctgccgcacccaccaggaagtgcccagcgagccagggcgtctggccttcaatgtcgtctcctccacggtgacccagctgagctgggctgagccggctgagaccaacggtgagatcacagcctacgaggtctgctatggcctggtcaacgatgacaaccgacctattgggcccatgaagaaagtgctggttgacaaccctaagaaccggatgctgcttattgagaaccttcgggagtcccagccctaccgctacacggtgaaggcgcgcaacggggccggctgggggcctgagcgggaggccatcatcaacctggccacccagcccaagaggcccatgtccatccccatcatccctgacatccctatcgtggacgcccagagcggggaggactacgacagcttccttatgtacagcgatgacgttctacgctctccatcgggcagccagaggcccagcgtctccgatgacactggctgcggctggaagttcgagcccctgctgggggaggagctggactgcggcgcgtcacgtggcggctgcccccggagctcatccccgcgtgtcggccagcagcgggcgctcctccgacgccgaggcccccacgggcccccggacgacggcggcgcgggcgggaagggcggcagcctgccccgcagtgcgacacccgggccccccggagagcacctggtgaatggccggatggactttgccttcccgggcagcaccaactccctgcacaggatgaccacgaccagtgctgctgcctatggcacccacctgagcccacacgtgccccaccgcgtgctaagcacatcctccaccctcacacgggactacaactcactgacccgctcagaacactcacactcgaccacactgcccagggactactccaccctcacctccgtctcctcccacgactctcgcctgactgctggtgtgcccgacacgcccacccgcctggtgttctctgccctggggcccacatctctcagagtgagctggcaggagccgcggtgcgagcggccgctgcagggctacagtgtggagtaccagctgctgaacggcggtgagctgcatcggctcaacatccccaaccctgcccagacctcggtggtggtggaagacctcctgcccaaccactcctacgtgttccgcgtgcgggcccagagccaggaaggctggggccgagagcgtgagggtgtcatcaccattgaatcccaggtgcacccgcagagcccactgtgtcccctgccaggctccgccttcactttgagcactcccagtgccccaggcccgctggtgttcactgccctgagcccagactcgctgcagctgagctgggagcggccacggaggcccaatggggatatcgtcggctacctggtgacctgtgagatggcccaaggaggagggccagccaccgcattccgggtggatggagacagccccgagagccggctgaccgtgccgggcctcagcgagaacgtgccctacaagttcaaggtgcaggccaggaccactgagggcttcgggccagagcgcgagggcatcatcaccatagagtcccaggatggaggacccttcccgcagctgggcagccgtgccgggctcttccagcacccgctgcaaagcgagtacagcagcatcaccaccacccacaccagcgccaccgagcccttcctagtggatgggccgaccctgggggcccagcacctggaggcaggcggctccctcacccggcatgtgacccaggagtttgtgagccggacactgaccaccagcggaacccttagcacccacatggaccaacagttcttccaaacttgaccgcaccctgccccacccccgccatgtcccactaggcgtcctcccgactcctctcccggagcctcctcagctactccatccttgcacccctgggggcccagcccacccgcatgcacagagcaggggctaggtgtctcctgggaggcatgaagggggcaaggtccgtcctctgtgggcccaaacctatttgtaaccaaagagctgggagcagcacaaggacccagcctttgttctgcacttaataaatggttttgctactgcta

SEQ ID NO: 330360 - DNA, 750 bp, Homo sapiens
gactctagagatcccccacacttcgatcgcgagaacaggaaggcttggggatctccccagggcagagctgactgcagacgcagcaaacccccgccactgccagggtcagcagtgctcacaccgatagagtggccggccagaggatatgggctgtggaagcctgggtggcccttgggctcctgcagggacagagggcctctgtccctagtggtttgagggaaactggttgtatttaagcaaaagccacccagagggtgggtgaccaggaatgtgcagggcccagcctgccccacggggcccgggtctggggcaggcctgaccaagggaccctgctctccccctgcagagcacctggtgaatggccggatggactttgccttcccgggcagcaccaactccctgcacaggatgaccacgaccagtgctgctgcctatggcacccacctgagcccacacgtgccccaccgcgtgctaagcacatcctccaccctcacacgggactacaactcactgacccgctcagaacactcacactcgaccacactgcccagggactactccaccctcacctccgtctcctcccacggtgagtgacctcagccaaccctgcctctcccactaacccttcctctcttccagctcctggagcctcgggcttctgtctgctgtccccaccgcccattctccaacatacacacacgcatgcacacatgcacgcacacacgtgcacacgcatgcacacatgtacac

SEQ ID NO: 330361 - DNA, 5746 bp, Homo sapiens
  misc_feature (28)..(28): n is a, c, g, or t
  misc_feature (30)..(30): n is a, c, g, or t
gcgctgcccgcctcgtccccaccccccnancccccgcgcccgccctcggacagtccctgctcgcccgcgcgctgcagccccatctcctagcggcagcccaggcgcggagggagcgagtccgccccgaggtaggtccaggacgggcgcacagcagcagccgaggctggccgggagagggaggaagaggatggcagggccacgccccagcccatgggccaggctgctcctggcagccttgatcagcgtcagcctctctgggaccttggcaaaccgctgcaagaaggccccagtgaagagctgcacggagtgtgtccgtgtggataaggactgcgcctactgcacagacgagatgttcagggaccggcgctgcaacacccaggcggagctgctggccgcgggctgccagcgggagagcatcgtggtcatggagagcagcttccaaatcacagaggagacccagattgacaccaccctgcggcgcagccagatgtccccccaaggcctgcgggtccgtctgcggcccggtgaggagcggcattttgagctggaggtgtttgagccactggagagccccgtggacctgtacatcctcatggacttctccaactccatgtccgatgatctggacaacctcaagaagatggggcagaacctggctcgggtcctgagccagctcaccagcgactacactattggatttggcaagtttgtggacaaagtcagcgtcccgcagacggacatgaggcctgagaagctgaaggagccctggcccaacagtgacccccccttctccttcaagaacgtcatcagcctgacagaagatgtggatgagttccggaataaactgcagggagagcggatctcaggcaacctggatgctcctgagggcggcttcgatgccatcctgcagacagctgtgtgcacgagggacattggctggcgcccggacagcacccacctgctggtcttctccaccgagtcagccttccactatgaggctgatggcgccaacgtgctggctggcatcatgagccgcaacgatgaacggtgccacctggacaccacgggcacctacacccagtacaggacacaggactacccgtcggtgcccaccctggtgcgcctgctcgccaagcacaacatcatccccatctttgctgtcaccaactactcctatagctactacgagaagcttcacacctatttccctgtctcctcactgggggtgctgcaggaggactcgtccaacatcgtggagctgctggaggaggccttcaatcggatccgctccaacctggacatccgggccctagacagcccccgaggccttcggacagaggtcacctccaagatgttccagaagacgaggactgggtcctttcacatccggcggggggaagtgggtatataccaggtgcagctgcgggcccttgagcacgtggatgggacgcacgtgtgccagctgccggaggaccagaagggcaacatccatctgaaaccttccttctccgacggcctcaagatggacgcgggcatcatctgtgatgtgtgcacctgcgagctgcaaaaagaggtgcggtcagctcgctgcagcttcaacggagacttcgtgtgcggacagtgtgtgtgcagcgagggctggagtggccagacctgcaactgctccaccggctctctgagtgacattcagccctgcctgcgggagggcgaggacaagccgtgctccggccgtggggagtgccagtgcgggcactgtgtgtgctacggcgaaggccgctacgagggtcagttctgcgagtatgacaacttccagtgtccccgcacttccgggttcctctgcaatgaccgaggacgctgctccatgggccagtgtgtgtgtgagcctggttggacaggcccaagctgtgactgtcccctcagcaatgccacctgcatcgacagcaatgggggcatctgtaatggacgtggccactgtgagtgtggccgctgccactgccaccagcagtcgctctacacggacaccatctgcgagatcaactactcggcgatccacccgggcctctgcgaggacctacgctcctgcgtgcagtgccaggcgtggggcaccggcgagaagaaggggcgcacgtgtgaggaatgcaacttcaaggtcaagatggtggacgagcttaagagagccgaggaggtggtggtgcgctgctccttccgggacgaggatgacgactgcacctacagctacaccatggaaggtgacggcgcccctgggcccaacagcactgtcctggtgcacaagaagaaggactgccctccgggctccttctggtggctcatccccctgctcctcctcctcctgccgctcctggccctgctactgctgctatgctggaagtactgtgcctgctgcaaggcctgcctggcacttctcccgtgctgcaaccgaggtcacatggtgggctttaaggaagaccactacatgctgcgggagaacctgatggcctctgaccacttggacacgcccatgctgcgcagcgggaacctcaagggccgtgacgtggtccgctggaaggtcaccaacaacatgcagcggcctggctttgccactcatgccgccagcatcaaccccacagagctggtgccctacgggctgtccttgcgcctggcccgcctttgcaccgagaacctgctgaagcctgacactcgggagtgcgcccagctgcgccaggaggtggaggagaacgtaaggacccaggaactaggcctggccggagatgtggctgaacgaggtctacaggcagatctccggtgtacacaagctccagcagaccaagttccggcagcagcccaatgccgggaaaaagcaagaccacaccattgtggacacagtgctgatggcgccccgctcggccaagccggccctgctgaagcttacagagaagcaggtggaacagagggccttccacgacctcaaggtggcccccggctactacaccctcactgcagaccaggacgcccggggcatggtggagttccaggagggcgtggagctggtggacgtacgggtgcccctctttatccggcctgaggatgacgacgagaagcagctgctggtggaggccatcgacgtgcccgcaggcactgccaccctcggccgccgcctggtaaacatcaccatcatcaaggagcaagccagagacgtggtgtcctttgagcagcctgagttctcggtcagccgcggggaccaggtggcccgcatccctgtcatccggcgtgtcctggacggcgggaagtcccaggtctcctaccgcacacaggatggcaccgcgcagggcaaccgggactacatccccgtggagggtgagctgctgttccagcctggggaggcctggaaagagctgcaggtgaagctcctggagctgcaagaagttgactccctcctgcggggccgccaggtccgccgtttccacgtccagctcagcaaccctaagtttggggcccacctgggccagccccactccaccaccatcatcatcagggacccagatgaactggaccggagcttcacgagtcagatgttgtcatcacagccaccccctcacggcgacctgggcgccccgcagaaccccaatgctaaggccgctgggtccaggaagatccatttcaactggctgcccccttctggcaagccaatggggtacagggtaaagtactggattcagggtgactccgaatccgaagcccacctgctcgacagcaaggtgccctcagtggagctcaccaacctgtacccgtattgcgactatgagatgaaggtgtgcgcctacggggctcagggcgagggaccctacagctccctggtgtcctgccgcacccaccaggaagtgcccagcgagccagggcgtctggccttcaatgtcgtctcctccacggtgacccagctgagctgggctgagccggctgagaccaacggtgagatcacagcctacgaggtctgctatggcctggtcaacgatgacaaccgacctattgggcccatgaagaaagtgctggttgacaaccctaagaaccggatgctgcttattgagaaccttcgggagtcccagccctaccgctacacggtgaaggcgcgcaacggggccggctgggggcctgagcgggaggccatcatcaacctggccacccagcccaagaggcccatgtccatccccatcatccctgacatccctatcgtggacgcccagagcggggaggactacgacagcttccttatgtacagcgatgacgttctacgctctccatcgggcagccagaggcccagcgtctccgatgacactgagcacctggtgaatggccggatggactttgccttcccgggcagcaccaactccctgcacaggatgaccacgaccagtgctgctgcctatggcacccacctgagcccacacgtgccccaccgcgtgctaagcacatcctccaccctcacacgggactacaactcactgacccgctcagaacactcacactcgaccacactgcccagggactactccaccctcacctccgtctcctcccacgactctcgcctgactgctggtgtgcccgacacgcccacccgcctggtgttctctgccctggggcccacatctctcagagtgagctggcaggagccgcggtgcgagcggccgctgcagggctacagtgtggagtaccagctgctgaacggcggtgagctgcatcggctcaacatccccaaccctgcccagacctcggtggtggtggaagacctcctgcccaaccactcctacgtgttccgcgtgcgggcccagagccaggaaggctggggccgagagcgtgagggtgtcatcaccattgaatcccaggtgcacccgcagagcccactgtgtcccctgccaggctccgccttcactttgagcactcccagtgccccaggcccgctggtgttcactgccctgagcccagactcgctgcagctgagctgggagcggccacggaggcccaatggggatatcgtcggctacctggtgacctgtgagatggcccaaggaggagggccagccaccgcattccgggtggatggagacagccccgagagccggctgaccgtgccgggcctcagcgagaacgtgccctacaagttcaaggtgcaggccaggaccactgagggcttcgggccagagcgcgagggcatcatcaccatagagtcccaggatggaggacccttcccgcagctgggcagccgtgccgggctcttccagcacccgctgcaaagcgagtacagcagcatcaccaccacccacaccagcgccaccgagcccttcctagtggatgggccgaccctgggggcccagcacctggaggcaggcggctccctcacccggcatgtgacccaggagtttgtgagccggacactgaccaccagcggaacccttagcacccacatggaccaacagttcttccaaacttgaccgcaccctgccccacccccgccatgtcccactaggcgtcctcccgactcctctcccggagcctcctcagctactccatccttgcacccctgggggcccagcccacccgcatgcacagagcaggggctaggtgtctcctgggaggcatgaagggggcaaggtccgtcctctgtgggcccaaacctatttgtaaccaaagagctgggagcagcacaaggacccagcctttgttctgcacttaataaatggttttgctactgcta

SEQ ID NO: 330362 - DNA, 5869 bp, Homo sapiens
  misc_feature (28)..(28): n is a, c, g, or t
  misc_feature (30)..(30): n is a, c, g, or t
gcgctgcccgcctcgtccccaccccccnancccccgcgcccgccctcggacagtccctgctcgcccgcgcgctgcagccccatctcctagcggcagcccaggcgcggagggagcgagtccgccccgaggtaggtccaggacgggcgcacagcagcagccgaggctggccgggagagggaggaagaggatggcagggccacgccccagcccatgggccaggctgctcctggcagccttgatcagcgtcagcctctctgggaccttggcaaaccgctgcaagaaggccccagtgaagagctgcacggagtgtgtccgtgtggataaggactgcgcctactgcacagacgagatgttcagggaccggcgctgcaacacccaggcggagctgctggccgcgggctgccagcgggagagcatcgtggtcatggagagcagcttccaaatcacagaggagacccagattgacaccaccctgcggcgcagccagatgtccccccaaggcctgcgggtccgtctgcggcccggtgaggagcggcattttgagctggaggtgtttgagccactggagagccccgtggacctgtacatcctcatggacttctccaactccatgtccgatgatctggacaacctcaagaagatggggcagaacctggctcgggtcctgagccagctcaccagcgactacactattggatttggcaagtttgtggacaaagtcagcgtcccgcagacggacatgaggcctgagaagctgaaggagccctggcccaacagtgacccccccttctccttcaagaacgtcatcagcctgacagaagatgtggatgagttccggaataaactgcagggagagcggatctcaggcaacctggatgctcctgagggcggcttcgatgccatcctgcagacagctgtgtgcacgagggacattggctggcgcccggacagcacccacctgctggtcttctccaccgagtcagccttccactatgaggctgatggcgccaacgtgctggctggcatcatgagccgcaacgatgaacggtgccacctggacaccacgggcacctacacccagtacaggacacaggactacccgtcggtgcccaccctggtgcgcctgctcgccaagcacaacatcatccccatctttgctgtcaccaactactcctatagctactacgagaagcttcacacctatttccctgtctcctcactgggggtgctgcaggaggactcgtccaacatcgtggagctgctggaggaggccttcaatcggatccgctccaacctggacatccgggccctagacagcccccgaggccttcggacagaggtcacctccaagatgttccagaagacgaggactgggtcctttcacatccggcggggggaagtgggtatataccaggtgcagctgcgggcccttgagcacgtggatgggacgcacgtgtgccagctgccggaggaccagaagggcaacatccatctgaaaccttccttctccgacggcctcaagatggacgcgggcatcatctgtgatgtgtgcacctgcgagctgcaaaaagaggtgcggtcagctcgctgcagcttcaacggagacttcgtgtgcggacagtgtgtgtgcagcgagggctggagtggccagacctgcaactgctccaccggctctctgagtgacattcagccctgcctgcgggagggcgaggacaagccgtgctccggccgtggggagtgccagtgcgggcactgtgtgtgctacggcgaaggccgctacgagggtcagttctgcgagtatgacaacttccagtgtccccgcacttccgggttcctctgcaatgaccgaggacgctgctccatgggccagtgtgtgtgtgagcctggttggacaggcccaagctgtgactgtcccctcagcaatgccacctgcatcgacagcaatgggggcatctgtaatggacgtggccactgtgagtgtggccgctgccactgccaccagcagtcgctctacacggacaccatctgcgagatcaactactcggcgatccacccgggcctctgcgaggacctacgctcctgcgtgcagtgccaggcgtggggcaccggcgagaagaaggggcgcacgtgtgaggaatgcaacttcaaggtcaagatggtggacgagcttaagagagccgaggaggtggtggtgcgctgctccttccgggacgaggatgacgactgcacctacagctacaccatggaaggtgacggcgcccctgggcccaacagcactgtcctggtgcacaagaagaaggactgccctccgggctccttctggtggctcatccccctgctcctcctcctcctgccgctcctggccctgctactgctgctatgctggaagtactgtgcctgctgcaaggcctgcctggcacttctcccgtgctgcaaccgaggtcacatggtgggctttaaggaagaccactacatgctgcgggagaacctgatggcctctgaccacttggacacgcccatgctgcgcagcgggaacctcaagggccgtgacgtggtccgctggaaggtcaccaacaacatgcagcggcctggctttgccactcatgccgccagcatcaaccccacagagctggtgccctacgggctgtccttgcgcctggcccgcctttgcaccgagaacctgctgaagcctgacactcgggagtgcgcccagctgcgccaggaggtggaggagaacgtaaggacccaggaactaggcctggccggagatgtggctgaacgaggtctacaggcagatctccggtgtacacaagctccagcagaccaagttccggcagcagcccaatgccgggaaaaagcaagaccacaccattgtggacacagtgctgatggcgccccgctcggccaagccggccctgctgaagcttacagagaagcaggtggaacagagggccttccacgacctcaaggtggcccccggctactacaccctcactgcagaccaggacgcccggggcatggtggagttccaggagggcgtggagctggtggacgtacgggtgcccctctttatccggcctgaggatgacgacgagaagcagctgctggtggaggccatcgacgtgcccgcaggcactgccaccctcggccgccgcctggtaaacatcaccatcatcaaggagcaagccagagacgtggtgtcctttgagcagcctgagttctcggtcagccgcggggaccaggtggcccgcatccctgtcatccggcgtgtcctggacggcgggaagtcccaggtctcctaccgcacacaggatggcaccgcgcagggcaaccggacagagtttcgctcttgttgcccaggctggagtgcaatggcacaatctcagctcaccgcaacctccacctctcgggttcaagcgattctgctgcctcagcctccctagtagctgggattacaggactacatccccgtggagggtgagctgctgttccagcctggggaggcctggaaagagctgcaggtgaagctcctggagctgcaagaagttgactccctcctgcggggccgccaggtccgccgtttccacgtccagctcagcaaccctaagtttggggcccacctgggccagccccactccaccaccatcatcatcagggacccagatgaactggaccggagcttcacgagtcagatgttgtcatcacagccaccccctcacggcgacctgggcgccccgcagaaccccaatgctaaggccgctgggtccaggaagatccatttcaactggctgcccccttctggcaagccaatggggtacagggtaaagtactggattcagggtgactccgaatccgaagcccacctgctcgacagcaaggtgccctcagtggagctcaccaacctgtacccgtattgcgactatgagatgaaggtgtgcgcctacggggctcagggcgagggaccctacagctccctggtgtcctgccgcacccaccaggaagtgcccagcgagccagggcgtctggccttcaatgtcgtctcctccacggtgacccagctgagctgggctgagccggctgagaccaacggtgagatcacagcctacgaggtctgctatggcctggtcaacgatgacaaccgacctattgggcccatgaagaaagtgctggttgacaaccctaagaaccggatgctgcttattgagaaccttcgggagtcccagccctaccgctacacggtgaaggcgcgcaacggggccggctgggggcctgagcgggaggccatcatcaacctggccacccagcccaagaggcccatgtccatccccatcatccctgacatccctatcgtggacgcccagagcggggaggactacgacagcttccttatgtacagcgatgacgttctacgctctccatcgggcagccagaggcccagcgtctccgatgacactgagcacctggtgaatggccggatggactttgccttcccgggcagcaccaactccctgcacaggatgaccacgaccagtgctgctgcctatggcacccacctgagcccacacgtgccccaccgcgtgctaagcacatcctccaccctcacacgggactacaactcactgacccgctcagaacactcacactcgaccacactgcccagggactactccaccctcacctccgtctcctcccacgactctcgcctgactgctggtgtgcccgacacgcccacccgcctggtgttctctgccctggggcccacatctctcagagtgagctggcaggagccgcggtgcgagcggccgctgcagggctacagtgtggagtaccagctgctgaacggcggtgagctgcatcggctcaacatccccaaccctgcccagacctcggtggtggtggaagacctcctgcccaaccactcctacgtgttccgcgtgcgggcccagagccaggaaggctggggccgagagcgtgagggtgtcatcaccattgaatcccaggtgcacccgcagagcccactgtgtcccctgccaggctccgccttcactttgagcactcccagtgccccaggcccgctggtgttcactgccctgagcccagactcgctgcagctgagctgggagcggccacggaggcccaatggggatatcgtcggctacctggtgacctgtgagatggcccaaggaggagggccagccaccgcattccgggtggatggagacagccccgagagccggctgaccgtgccgggcctcagcgagaacgtgccctacaagttcaaggtgcaggccaggaccactgagggcttcgggccagagcgcgagggcatcatcaccatagagtcccaggatggaggacccttcccgcagctgggcagccgtgccgggctcttccagcacccgctgcaaagcgagtacagcagcatcaccaccacccacaccagcgccaccgagcccttcctagtggatgggccgaccctgggggcccagcacctggaggcaggcggctccctcacccggcatgtgacccaggagtttgtgagccggacactgaccaccagcggaacccttagcacccacatggaccaacagttcttccaaacttgaccgcaccctgccccacccccgccatgtcccactaggcgtcctcccgactcctctcccggagcctcctcagctactccatccttgcacccctgggggcccagcccacccgcatgcacagagcaggggctaggtgtctcctgggaggcatgaagggggcaaggtccgtcctctgtgggcccaaacctatttgtaaccaaagagctgggagcagcacaaggacccagcctttgttctgcacttaataaatggttttgctactgcta

SEQ ID NO: 330363 - DNA, 5848 bp, Homo sapiens
  misc_feature (28)..(28): n is a, c, g, or t
  misc_feature (30)..(30): n is a, c, g, or t
  misc_feature (5770)..(5770): n is a, c, g, or t
  misc_feature (5787)..(5787): n is a, c, g, or t
  misc_feature (5830)..(5830): n is a, c, g, or t
gcgctgcccgcctcgtccccaccccccnancccccgcgcccgccctcggacagtccctgctcgcccgcgcgctgcagccccatctcctagcggcagcccaggcgcggagggagcgagtccgccccgaggtaggtccaggacgggcgcacagcagcagccgaggctggccgggagagggaggaagaggatggcagggccacgccccagcccatgggccaggctgctcctggcagccttgatcagcgtcagcctctctgggaccttggcaaaccgctgcaagaaggccccagtgaagagctgcacggagtgtgtccgtgtggataaggactgcgcctactgcacagacgagatgttcagggaccggcgctgcaacacccaggcggagctgctggccgcgggctgccagcgggagagcatcgtggtcatggagagcagcttccaaatcacagaggagacccagattgacaccaccctgcggcgcagccagatgtccccccaaggcctgcgggtccgtctgcggcccggtgaggagcggcattttgagctggaggtgtttgagccactggagagccccgtggacctgtacatcctcatggacttctccaactccatgtccgatgatctggacaacctcaagaagatggggcagaacctggctcgggtcctgagccagctcaccagcgactacactattggatttggcaagtttgtggacaaagtcagcgtcccgcagacggacatgaggcctgagaagctgaaggagccctggcccaacagtgacccccccttctccttcaagaacgtcatcagcctgacagaagatgtggatgagttccggaataaactgcagggagagcggatctcaggcaacctggatgctcctgagggcggcttcgatgccatcctgcagacagctgtgtgcacgagggacattggctggcgcccggacagcacccacctgctggtcttctccaccgagtcagccttccactatgaggctgatggcgccaacgtgctggctggcatcatgagccgcaacgatgaacggtgccacctggacaccacgggcacctacacccagtacaggacacaggactacccgtcggtgcccaccctggtgcgcctgctcgccaagcacaacatcatccccatctttgctgtcaccaactactcctatagctactacgagaagcttcacacctatttccctgtctcctcactgggggtgctgcaggaggactcgtccaacatcgtggagctgctggaggaggccttcaatcggatccgctccaacctggacatccgggccctagacagcccccgaggccttcggacagaggtcacctccaagatgttccagaagacgaggactgggtcctttcacatccggcggggggaagtgggtatataccaggtgcagctgcgggcccttgagcacgtggatgggacgcacgtgtgccagctgccggaggaccagaagggcaacatccatctgaaaccttccttctccgacggcctcaagatggacgcgggcatcatctgtgatgtgtgcacctgcgagctgcaaaaagaggtgcggtcagctcgctgcagcttcaacggagacttcgtgtgcggacagtgtgtgtgcagcgagggctggagtggccagacctgcaactgctccaccggctctctgagtgacattcagccctgcctgcgggagggcgaggacaagccgtgctccggccgtggggagtgccagtgcgggcactgtgtgtgctacggcgaaggccgctacgagggtcagttctgcgagtatgacaacttccagtgtccccgcacttccgggttcctctgcaatgaccgaggacgctgctccatgggccagtgtgtgtgtgagcctggttggacaggcccaagctgtgactgtcccctcagcaatgccacctgcatcgacagcaatgggggcatctgtaatggacgtggccactgtgagtgtggccgctgccactgccaccagcagtcgctctacacggacaccatctgcgagatcaactactcggcgatccacccgggcctctgcgaggacctacgctcctgcgtgcagtgccaggcgtggggcaccggcgagaagaaggggcgcacgtgtgaggaatgcaacttcaaggtcaagatggtggacgagcttaagagagccgaggaggtggtggtgcgctgctccttccgggacgaggatgacgactgcacctacagctacaccatggaaggtgacggcgcccctgggcccaacagcactgtcctggtgcacaagaagaaggactgccctccgggctccttctggtggctcatccccctgctcctcctcctcctgccgctcctggccctgctactgctgctatgctggaagtactgtgcctgctgcaaggcctgcctggcacttctcccgtgctgcaaccgaggtcacatggtgggctttaaggaagaccactacatgctgcgggagaacctgatggcctctgaccacttggacacgcccatgctgcgcagcgggaacctcaagggccgtgacgtggtccgctggaaggtcaccaacaacatgcagcggcctggctttgccactcatgccgccagcatcaaccccacagagctggtgccctacgggctgtccttgcgcctggcccgcctttgcaccgagaacctgctgaagcctgacactcgggagtgcgcccagctgcgccaggaggtggaggagaacgtaaggacccaggaactaggcctggccggagatgtggctgaacgaggtctacaggcagatctccggtgtacacaagctccagcagaccaagttccggcagcagcccaatgccgggaaaaagcaagaccacaccattgtggacacagtgctgatggcgccccgctcggccaagccggccctgctgaagcttacagagaagcaggtggaacagagggccttccacgacctcaaggtggcccccggctactacaccctcactgcagaccaggacgcccggggcatggtggagttccaggagggcgtggagctggtggacgtacgggtgcccctctttatccggcctgaggatgacgacgagaagcagctgctggtggaggccatcgacgtgcccgcaggcactgccaccctcggccgccgcctggtaaacatcaccatcatcaaggagcaagccagagacgtggtgtcctttgagcagcctgagttctcggtcagccgcggggaccaggtggcccgcatccctgtcatccggcgtgtcctggacggcgggaagtcccaggtctcctaccgcacacaggatggcaccgcgcagggcaaccgggactacatccccgtggagggtgagctgctgttccagcctggggaggcctggaaagagctgcaggtgaagctcctggagctgcaagaagttgactccctcctgcggggccgccaggtccgccgtttccacgtccagctcagcaaccctaagtttggggcccacctgggccagccccactccaccaccatcatcatcagggacccagatgaactggaccggagcttcacgagtcagatgttgtcatcacagccaccccctcacggcgacctgggcgccccgcagaaccccaatgctaaggccgctgggtccaggaagatccatttcaactggctgcccccttctggcaagccaatggggtacagggtaaagtactggattcagggtgactccgaatccgaagcccacctgctcgacagcaaggtgccctcagtggagctcaccaacctgtacccgtattgcgactatgagatgaaggtgtgcgcctacggggctcagggcgagggaccctacagctccctggtgtcctgccgcacccaccaggaagtgcccagcgagccagggcgtctggccttcaatgtcgtctcctccacggtgacccagctgagctgggctgagccggctgagaccaacggtgagatcacagcctacgaggtctgctatggcctggtcaacgatgacaaccgacctattgggcccatgaagaaagtgctggttgacaaccctaagaaccggatgctgcttattgagaaccttcgggagtcccagccctaccgctacacggtgaaggcgcgcaacggggccggctgggggcctgagcgggaggccatcatcaacctggccacccagcccaagaggcccatgtccatccccatcatccctgacatccctatcgtggacgcccagagcggggaggactacgacagcttccttatgtacagcgatgacgttctacgctctccatcgggcagccagaggcccagcgtctccgatgacactgagcacctggtgaatggccggatggactttgccttcccgggcagcaccaactccctgcacaggatgaccacgaccagtgctgctgcctatggcacccacctgagcccacacgtgccccaccgcgtgctaagcacatcctccaccctcacacgggactacaactcactgacccgctcagaacactcacactcgaccacactgcccagggactactccaccctcacctccgtctcctcccacgactctcgcctgactgctggtgtgcccgacacgcccacccgcctggtgttctctgccctggggcccacatctctcagagtgagctggcaggagccgcggtgcgagcggccgctgcagggctacagtgtggagtaccagctgctgaacggcggtgagctgcatcggctcaacatccccaaccctgcccagacctcggtggtggtggaagacctcctgcccaaccactcctacgtgttccgcgtgcgggcccagagccaggaaggctggggccgagagcgtgagggtgtcatcaccattgaatcccaggtgcacccgcagagcccactgtgtcccctgccaggctccgccttcactttgagcactcccagtgccccaggcccgctggtgttcactgccctgagcccagactcgctgcagctgagctgggagcggccacggaggcccaatggggatatcgtcggctacctggtgacctgtgagatggcccaaggaggagggccagccaccgcattccgggtggatggagacagccccgagagccggctgaccgtgccgggcctcagcgagaacgtgccctacaagttcaaggtgcaggccaggaccactgagggcttcgggccagagcgcgagggcatcatcaccatagagtcccaggatggaggacccttcccgcagctgggcagccgtgccgggctcttccagcacccgctgcaaagcgagtacagcagcatcaccaccacccacaccagcgccaccgagcccttcctagtggatgggccgaccctgggggcccagcacctggaggcaggcggctccctcacccggcatgtgacccaggagtttgtgagccggacactgaccaccagcggaacccttagcacccacatggaccaacagttcttccaaacttgaccgcaccctgccccacccccgccatgtcccactaggcgtcctcccgactcctctcccggagcctcctcagctactccatccttgcacccctgggggcccagcccacccgcatgcacagagcaggggctaggtgtctcctgggaggcatgaagggggcaaggtccgtcctctgtgggcccaaacctatttgtaaccaaagagctgggagcagcacaaggacccagcctttgttctgcacttaataaatggttttgctactgctaaaaaaaagaaaaaaaaaattcggnggggggggcccggttancccaatttcgggccctattaggtgaggtcgtatttacaatttnatttggcccgttggtttt

SEQ ID NO: 330364 - DNA, 5697 bp, Homo sapiens
  misc_feature (28)..(28): n is a, c, g, or t
  misc_feature (30)..(30): n is a, c, g, or t
gcgctgcccgcctcgtccccaccccccnancccccgcgcccgccctcggacagtccctgctcgcccgcgcgctgcagccccatctcctagcggcagcccaggcgcggagggagcgagtccgccccgaggtaggtccaggacgggcgcacagcagcagccgaggctggccgggagagggaggaagaggatggcagggccacgccccagcccatgggccaggctgctcctggcagccttgatcagcgtcagcctctctgggaccttggcaaaccgctgcaagaaggccccagtgaagagctgcacggagtgtgtccgtgtggataaggactgcgcctactgcacagacgagatgttcagggaccggcgctgcaacacccaggcggagctgctggccgcgggctgccagcgggagagcatcgtggtcatggagagcagcttccaaatcacagaggagacccagattgacaccaccctgcggcgcagccagatgtccccccaaggcctgcgggtccgtctgcggcccggtgaggagcggcattttgagctggaggtgtttgagccactggagagccccgtggacctgtacatcctcatggacttctccaactccatgtccgatgatctggacaacctcaagaagatggggcagaacctggctcgggtcctgagccagctcaccagcgactacactattggatttggcaagtttgtggacaaagtcagcgtcccgcagacggacatgaggcctgagaagctgaaggagccctggcccaacagtgacccccccttctccttcaagaacgtcatcagcctgacagaagatgtggatgagttccggaataaactgcagggagagcggatctcaggcaacctggatgctcctgagggcggcttcgatgccatcctgcagacagctgtgtgcacgagggacattggctggcgcccggacagcacccacctgctggtcttctccaccgagtcagccttccactatgaggctgatggcgccaacgtgctggctggcatcatgagccgcaacgatgaacggtgccacctggacaccacgggcacctacacccagtacaggacacaggactacccgtcggtgcccaccctggtgcgcctgctcgccaagcacaacatcatccccatctttgctgtcaccaactactcctatagctactacgagaagcttcacacctatttccctgtctcctcactgggggtgctgcaggaggactcgtccaacatcgtggagctgctggaggaggccttcaatcggatccgctccaacctggacatccgggccctagacagcccccgaggccttcggacagaggtcacctccaagatgttccagaagacgaggactgggtcctttcacatccggcggggggaagtgggtatataccaggtgcagctgcgggcccttgagcacgtggatgggacgcacgtgtgccagctgccggaggaccagaagggcaacatccatctgaaaccttccttctccgacggcctcaagatggacgcgggcatcatctgtgatgtgtgcacctgcgagctgcaaaaagaggtgcggtcagctcgctgcagcttcaacggagacttcgtgtgcggacagtgtgtgtgcagcgagggctggagtggccagacctgcaactgctccaccggctctctgagtgacattcagccctgcctgcgggagggcgaggacaagccgtgctccggccgtggggagtgccagtgcgggcactgtgtgtgctacggcgaaggccgctacgagggtcagttctgcgagtatgacaacttccagtgtccccgcacttccgggttcctctgcaatgaccgaggacgctgctccatgggccagtgtgtgtgtgagcctggttggacaggcccaagctgtgactgtcccctcagcaatgccacctgcatcgacagcaatgggggcatctgtaatggacgtggccactgtgagtgtggccgctgccactgccaccagcagtcgctctacacggacaccatctgcgagatcaactactcggcgatccacccgggcctctgcgaggacctacgctcctgcgtgcagtgccaggcgtggggcaccggcgagaagaaggggcgcacgtgtgaggaatgcaacttcaaggtcaagatggtggacgagcttaagagagccgaggaggtggtggtgcgctgctccttccgggacgaggatgacgactgcacctacagctacaccatggaaggtgacggcgcccctgggcccaacagcactgtcctggtgcacaagaagaaggactgccctccgggctccttctggtggctcatccccctgctcctcctcctcctgccgctcctggccctgctactgctgctatgctggaagtactgtgcctgctgcaaggcctgcctggcacttctcccgtgctgcaaccgaggtcacatggtgggctttaaggaagaccactacatgctgcgggagaacctgatggcctctgaccacttggacacgcccatgctgcgcagcgggaacctcaagggccgtgacgtggtccgctggaaggtcaccaacaacatgcagcggcctggctttgccactcatgccgccagcatcaaccccacagagctggtgccctacgggctgtccttgcgcctggcccgcctttgcaccgagaacctgctgaagcctgacactcgggagtgcgcccagctgcgccaggaggtggaggagaacgtaaggacccaggaactaggcctggccggagatgtggctgaacgaggtctacaggcagatctccggtgtacacaagctccagcagaccaagttccggcagcagcccaatgccgggaaaaagcaagaccacaccattgtggacacagtgctgatggcgccccgctcggccaagccggccctgctgaagcttacagagaagcaggtggaacagagggccttccacgacctcaaggtggcccccggctactacaccctcactgcagaccaggacgcccggggcatggtggagttccaggagggcgtggagctggtggacgtacgggtgcccctctttatccggcctgaggatgacgacgagaagcagctgctggtggaggccatcgacgtgcccgcaggcactgccaccctcggccgccgcctggtaaacatcaccatcatcaaggagcaagccagagacgtggtgtcctttgagcagcctgagttctcggtcagccgcggggaccaggtggcccgcatccctgtcatccggcgtgtcctggacggcgggaagtcccaggtctcctaccgcacacaggatggcaccgcgcagggcaaccgggactacatccccgtggagggtgagctgctgttccagcctggggaggcctggaaagagctgcaggtgaagctcctggagctgcaagaagttgactccctcctgcggggccgccaggtccgccgtttccacgtccagctcagcaaccctaagtttggggcccacctgggccagccccactccaccaccatcatcatcagggacccagatgaactggaccggagcttcacgagtcagatgttgtcatcacagccaccccctcacggcgacctgggcgccccgcagaaccccaatgctaaggccgctgggtccaggaagatccatttcaactggctgcccccttctggcaagccaatggggtacagggtaaagtactggattcagggtgactccgaatccgaagcccacctgctcgacagcaaggtgccctcagtggagctcaccaacctgtacccgtattgcgactatgagatgaaggtgtgcgcctacggggctcagggcgagggaccctacagctccctggtgtcctgccgcacccaccaggaagtgcccagcgagccagggcgtctggccttcaatgtcgtctcctccacggtgacccagctgagctgggctgagccggctgagaccaacggtgagatcacagcctacgaggtctgctatggcctggtcaacgatgacaaccgacctattgggcccatgaagaaagtgctggttgacaaccctaagaaccggatgctgcttattgagaaccttcgggagtcccagccctaccgctacacggtgaaggcgcgcaacggggccggctgggggcctgagcgggaggccatcatcaacctggccacccagcccaagaggcccatgtccatccccatcatccctgacatccctatcgtggacgcccagagcggggaggactacgacagcttccttatgtacagcgatgacgttctacgctctccatcgggcagccagaggcccagcgtctccgatgacactgagcacctggtgaatggccggatggactttgccttcccgggcagcaccaactccctgcacaggatgaccacgaccagtgctgctgcctatggcacccacctgagcccacacgtgccccaccgcgtgctaagcacatcctccaccctcacacgggactacaactcactgacccgctcagaacactcacactcgaccacactgcccagggactactccaccctcacctccgtctcctcccacgactctcgcctgactgctggtgtgcccgacacgcccacccgcctggtgttctctgccctggggcccacatctctcagagtgagctggcaggagccgcggtgcgagcggccgctgcagggctacagtgtggagtaccagctgctgaacggcggtgagctgcatcggctcaacatccccaaccctgcccagacctcggtggtggtggaagacctcctgcccaaccactcctacgtgttccgcgtgcgggcccagagccaggaaggctggggccgagagcgtgagggtgtcatcaccattgaatcccaggtgcacccgcagagcccactgtgtcccctgccaggctccgccttcactttgagcactcccagtgccccaggcccgctggtgttcactgccctgagcccagactcgctgcagctgagctgggagcggccacggaggcccaatggggatatcgtcggctacctggtgacctgtgagatggcccaaggaggagggccagccaccgcattccgggtggatggagacagccccgagagccggctgaccgtgccgggcctcagcgagaacgtgccctacaagttcaaggtgcaggccaggaccactgagggcttcgggccagagcgcgagggcatcatcaccatagagtcccaggatggaggacccttcccgcagctgggcagccgtgccgggctcttccagcacccgctgcaaagcgagtacagcagcatcaccaccacccacaccagcgccaccgagcccttcctagtggatgggccgaccctgggggcccagcacctggaggcaggcggctccctcacccggcatgtgacccaggagtttgtgagccggacactgaccaccagcggaacccttagcacccacatggaccaacagttcttccaaacttgaccgcaccctgccccacccccgccatgtcccactaggcgtcctcccgactcctctcccggagcctcctcagctactccatccttgcacccctgggggcccagcccacccgcatgcacagagcaggggctaggtgtctcctgggaggcatgaagggggcaaggtccgtcctctgggcccgtccagtctctgggccccgtccagtctctgggccccg

SEQ ID NO: 330365 - DNA, 2720 bp, Homo sapiens
ccggcactttggaaaggctgaagtggtttgatcacctgaggtccggagttcaaagaccagcctggtctacacagagcattattccctttctaattttttaccttacttatccattttaaaacttattttagcaaggaggcatactagagtaatatataacgtaaagaatccgcttgttagtgtaactactcccaaccttatctagtccgagagtcccaagttatttatgtggttgggagggagcgtgtggccatgactcttgcctcagcccccagccatgaccctgaccctgaccccctccactcccaggactacatccccgtggagggtgagctgctgttccagcctggggaggcctggaaagagctgcaggtgaagctcctggagctgcaagaagttgactccctcctgcggggccgccaggtccgccgtttccacgtccagctcagcaaccctaagtttggggcccacctgggccagccccactccaccaccatcatcatcagggacccagatgaactggaccggagcttcacgagtcagatgttgtcatcacagccaccccctcacggcgacctgggcgccccgcagaaccccaatgctaaggccgctgggtccaggaagatccatttcaactggctgcccccttctggcaagccaatggggtacagggtaaagtactggattcagggtgactccgaatccgaagcccacctgctcgacagcaaggtgccctcagtggagctcaccaacctgtacccgtattgcgactatgagatgaaggtgtgcgcctacggggctcagggcgagggaccctacagctccctggtgtcctgccgcacccaccaggaagtgcccagcgagccagggcgtctggccttcaatgtcgtctcctccacggtgacccagctgagctgggctgagccggctgagaccaacggtgagatcacagcctacgaggtctgctatggcctggtcaacgatgacaaccgacctattgggcccatgaagaaagtgctggttgacaaccctaagaaccggatgctgcttattgagaaccttcgggagtcccagccctaccgctacacggtgaaggcgcgcaacggggccggctgggggcctgagcgggaggccatcatcaacctggccacccagcccaagaggcccatgtccatccccatcatccctgacatccctatcgtggacgcccagagcggggaggactacgacagcttccttatgtacagcgatgacgttctacgctctccatcgggcagccagaggcccagcgtctccgatgacactgagcacctggtgaatggccggatggactttgccttcccgggcagcaccaactccctgcacaggatgaccacgaccagtgctgctgcctatggcacccacctgagcccacacgtgccccaccgcgtgctaagcacatcctccaccctcacacgggactacaactcactgacccgctcagaacactcacactcgaccacactgcccagggactactccaccctcacctccgtctcctcccacgactctcgcctgactgctggtgtgcccgacacgcccacccgcctggtgttctctgccctggggcccacatctctcagagtgagctggcaggagccgcggtgcgagcggccgctgcagggctacagtgtggagtaccagctgctgaacggcggtgagctgcatcggctcaacatccccaaccctgcccagacctcggtggtggtggaagacctcctgcccaaccactcctacgtgttccgcgtgcgggcccagagccaggaaggctggggccgagagcgtgagggtgtcatcaccattgaatcccaggtgcacccgcagagcccactgtgtcccctgccaggctccgccttcactttgagcactcccagtgccccaggcccgctggtgttcactgccctgagcccagactcgctgcagctgagctgggagcggccacggaggcccaatggggatatcgtcggctacctggtgacctgtgagatggcccaaggaggagggccagccaccgcattccgggtggatggagacagccccgagagccggctgaccgtgccgggcctcagcgagaacgtgccctacaagttcaaggtgcaggccaggaccactgagggcttcgggccagagcgcgagggcatcatcaccatagagtcccaggatggaggacccttcccgcagctgggcagccgtgccgggctcttccagcacccgctgcaaagcgagtacagcagcatcaccaccacccacaccagcgccaccgagcccttcctagtggatgggccgaccctgggggcccagcacctggaggcaggcggctccctcacccggcatgtgacccaggagtttgtgagccggacactgaccaccagcggaacccttagcacccacatggaccaacagttcttccaaacttgaccgcaccctgccccacccccgccatgtcccactaggcgtcctcccgactcctctcccggagcctcctcagctactccatccttgcacccctgggggcccagcccacccgcatgcacagagcaggggctaggtgtctcctgggaggcatgaagggggcaaggtccgtcctctgtgggcccaaacctatttgtaaccaaagagctgggagcagcacaaggacccagcctttgttctgcacttaataaatggttttgctactgcta

SEQ ID NO: 330366 - DNA, 5288 bp, Homo sapiens
  misc_feature (28)..(28): n is a, c, g, or t
  misc_feature (30)..(30): n is a, c, g, or t
gcgctgcccgcctcgtccccaccccccnancccccgcgcccgccctcggacagtccctgctcgcccgcgcgctgcagccccatctcctagcggcagcccaggcgcggagggagcgagtccgccccgaggtaggtccaggacgggcgcacagcagcagccgaggctggccgggagagggaggaagaggatggcagggccacgccccagcccatgggccaggctgctcctggcagccttgatcagcgtcagcctctctgggaccttggcaaaccgctgcaagaaggccccagtgaagagctgcacggagtgtgtccgtgtggataaggactgcgcctactgcacagacgagatgttcagggaccggcgctgcaacacccaggcggagctgctggccgcgggctgccagcgggagagcatcgtggtcatggagagcagcttccaaatcacagaggagacccagattgacaccaccctgcggcgcagccagatgtccccccaaggcctgcgggtccgtctgcggcccggtgaggagcggcattttgagctggaggtgtttgagccactggagagccccgtggacctgtacatcctcatggacttctccaactccatgtccgatgatctggacaacctcaagaagatggggcagaacctggctcgggtcctgagccagctcaccagcgactacactattggatttggcaagtttgtggacaaagtcagcgtcccgcagacggacatgaggcctgagaagctgaaggagccctggcccaacagtgacccccccttctccttcaagaacgtcatcagcctgacagaagatgtggatgagttccggaataaactgcagggagagcggatctcaggcaacctggatgctcctgagggcggcttcgatgccatcctgcagacagctgtgtgcacgagggacattggctggcgcccggacagcacccacctgctggtcttctccaccgagtcagccttccactatgaggctgatggcgccaacgtgctggctggcatcatgagccgcaacgatgaacggtgccacctggacaccacgggcacctacacccagtacaggacacaggactacccgtcggtgcccaccctggtgcgcctgctcgccaagcacaacatcatccccatctttgctgtcaccaactactcctatagctactacgagaagcttcacacctatttccctgtctcctcactgggggtgctgcaggaggactcgtccaacatcgtggagctgctggaggaggccttcaatcggatccgctccaacctggacatccgggccctagacagcccccgaggccttcggacagaggtcacctccaagatgttccagaagacgaggactgggtcctttcacatccggcggggggaagtgggtatataccaggtgcagctgcgggcccttgagcacgtggatgggacgcacgtgtgccagctgccggaggaccagaagggcaacatccatctgaaaccttccttctccgacggcctcaagatggacgcgggcatcatctgtgatgtgtgcacctgcgagctgcaaaaagaggtgcggtcagctcgctgcagcttcaacggagacttcgtgtgcggacagtgtgtgtgcagcgagggctggagtggccagacctgcaactgctccaccggctctctgagtgacattcagccctgcctgcgggagggcgaggacaagccgtgctccggccgtggggagtgccagtgcgggcactgtgtgtgctacggcgaaggccgctacgagggtcagttctgcgagtatgacaacttccagtgtccccgcacttccgggttcctctgcaatgaccgaggacgctgctccatgggccagtgtgtgtgtgagcctggttggacaggcccaagctgtgactgtcccctcagcaatgccacctgcatcgacagcaatgggggcatctgtaatggacgtggccactgtgagtgtggccgctgccactgccaccagcagtcgctctacacggacaccatctgcgagatcaactactcggcgatccacccgggcctctgcgaggacctacgctcctgcgtgcagtgccaggcgtggggcaccggcgagaagaaggggcgcacgtgtgaggaatgcaacttcaaggtcaagatggtggacgagcttaagagagccgaggaggtggtggtgcgctgctccttccgggacgaggatgacgactgcacctacagctacaccatggaaggtgacggcgcccctgggcccaacagcactgtcctggtgcacaagaagaaggactgccctccgggctccttctggtggctcatccccctgctcctcctcctcctgccgctcctggccctgctactgctgctatgctggaagtactgtgcctgctgcaaggcctgcctggcacttctcccgtgctgcaaccgaggtcacatggtgggctttaaggaagaccactacatgctgcgggagaacctgatggcctctgaccacttggacacgcccatgctgcgcagcgggaacctcaagggccgtgacgtggtccgctggaaggtcaccaacaacatgcagcggcctggctttgccactcatgccgccagcatcaaccccacagagctggtgccctacgggctgtccttgcgcctggcccgcctttgcaccgagaacctgctgaagcctgacactcgggagtgcgcccagctgcgccaggaggtggaggagaacgtaaggacccaggaactaggcctggccggagatgtggctgaacgaggtctacaggcagatctccggtgtacacaagctccagcagaccaagttccggcagcagcccaatgccgggaaaaagcaagaccacaccattgtggacacagtgctgatggcgccccgctcggccaagccggccctgctgaagcttacagagaagcaggtggaacagagggccttccacgacctcaaggtggcccccggctactacaccctcactgcagaccaggacgcccggggcatggtggagttccaggagggcgtggagctggtggacgtacgggtgcccctctttatccggcctgaggatgacgacgagaagcagctgctggtggaggccatcgacgtgcccgcaggcactgccaccctcggccgccgcctggtaaacatcaccatcatcaaggagcaagccagagacgtggtgtcctttgagcagcctgagttctcggtcagccgcggggaccaggtggcccgcatccctgtcatccggcgtgtcctggacggcgggaagtcccaggtctcctaccgcacacaggatggcaccgcgcagggcaaccgggactacatccccgtggagggtgagctgctgttccagcctggggaggcctggaaagagctgcaggtgaagctcctggagctgcaagaagttgactccctcctgcggggccgccaggtccgccgtttccacgtccagctcagcaaccctaagtttggggcccacctgggccagccccactccaccaccatcatcatcagggacccagatgaactggaccggagcttcacgagtcagatgttgtcatcacagccaccccctcacggcgacctgggcgccccgcagaaccccaatgctaaggccgctgggtccaggaagatccatttcaactggctgcccccttctggcaagccaatggggtacagggtaaagtactggattcagggtgactccgaatccgaagcccacctgctcgacagcaaggtgccctcagtggagctcaccaacctgtacccgtattgcgactatgagatgaaggtgtgcgcctacggggctcagggcgagggaccctacagctccctggtgtcctgccgcacccaccaggaagtgcccagcgagccagggcgtctggccttcaatgtcgtctcctccacggtgacccagctgagctgggctgagccggctgagaccaacggtgagatcacagcctacgaggtctgctatggcctggtcaacgatgacaaccgacctattgggcccatgaagaaagtgctggttgacaaccctaagaaccggatgctgcttattgagaaccttcgggagtcccagccctaccgctacacggtgaaggcgcgcaacggggccggctgggggcctgagcgggaggccatcatcaacctggccacccagcccaagaggcccatgtccatccccatcatccctgacatccctatcgtggacgcccagagcggggaggactacgacagcttccttatgtacagcgatgacgttctacgctctccatcgggcagccagaggcccagcgtctccgatgacactgagcacctggtgaatggccggatggactttgccttcccgggcagcaccaactccctgcacaggatgaccacgaccagtgctgctgcctatggcacccacctgagcccacacgtgccccaccgcgtgctaagcacatcctccaccctcacacgggactacaactcactgacccgctcagaacactcacactcgaccacactgcccagggactactccaccctcacctccgtctcctcccacgactctcgcctgactgctggtgtgcccgacacgcccacccgcctggtgttctctgccctggggcccacatctctcagagtgagctggcaggagccgcggtgcgagcggccgctgcagggctacagtgtggagtaccagctgctgaacggcggtgagctgcatcggctcaacatccccaaccctgcccagacctcggtggtggtggaagacctcctgcccaaccactcctacgtgttccgcgtgcgggcccagagccaggaaggctggggccgagagcgtgagggtgtcatcaccattgaatcccaggtgcacccgcagagcccactgtgtcccctgccaggctccgccttcactttgagcactcccagtgccccaggcccgctggtgttcactgccctgagcccagactcgctgcagctgagctgggagcggccacggaggcccaatggggatatcgtcggctacctggtgacctgtgagatggcccaaggaggagggccagccaccgcattccgggtggatggagacagccccgagagccggctgaccgtgccgggcctcagcgagaacgtgccctacaagttcaaggtgcaggccaggaccactgagggcttcgggccagagcgcgagggcatcatcaccatagagtcccaggatggaggacccttcccgcagctgggcagtcgtgcggcctctacggcaacggggtagagctgc

SEQ ID NO: 330367 - DNA, 5073 bp, Homo sapiens
  misc_feature (28)..(28): n is a, c, g, or t
  misc_feature (30)..(30): n is a, c, g, or t
gcgctgcccgcctcgtccccaccccccnancccccgcgcccgccctcggacagtccctgctcgcccgcgcgctgcagccccatctcctagcggcagcccaggcgcggagggagcgagtccgccccgaggtaggtccaggacgggcgcacagcagcagccgaggctggccgggagagggaggaagaggatggcagggccacgccccagcccatgggccaggctgctcctggcagccttgatcagcgtcagcctctctgggaccttggcaaaccgctgcaagaaggccccagtgaagagctgcacggagtgtgtccgtgtggataaggactgcgcctactgcacagacgagatgttcagggaccggcgctgcaacacccaggcggagctgctggccgcgggctgccagcgggagagcatcgtggtcatggagagcagcttccaaatcacagaggagacccagattgacaccaccctgcggcgcagccagatgtccccccaaggcctgcgggtccgtctgcggcccggtgaggagcggcattttgagctggaggtgtttgagccactggagagccccgtggacctgtacatcctcatggacttctccaactccatgtccgatgatctggacaacctcaagaagatggggcagaacctggctcgggtcctgagccagctcaccagcgactacactattggatttggcaagtttgtggacaaagtcagcgtcccgcagacggacatgaggcctgagaagctgaaggagccctggcccaacagtgacccccccttctccttcaagaacgtcatcagcctgacagaagatgtggatgagttccggaataaactgcagggagagcggatctcaggcaacctggatgctcctgagggcggcttcgatgccatcctgcagacagctgtgtgcacgagggacattggctggcgcccggacagcacccacctgctggtcttctccaccgagtcagccttccactatgaggctgatggcgccaacgtgctggctggcatcatgagccgcaacgatgaacggtgccacctggacaccacgggcacctacacccagtacaggacacaggactacccgtcggtgcccaccctggtgcgcctgctcgccaagcacaacatcatccccatctttgctgtcaccaactactcctatagctactacgagaagcttcacacctatttccctgtctcctcactgggggtgctgcaggaggactcgtccaacatcgtggagctgctggaggaggccttcaatcggatccgctccaacctggacatccgggccctagacagcccccgaggccttcggacagaggtcacctccaagatgttccagaagacgaggactgggtcctttcacatccggcggggggaagtgggtatataccaggtgcagctgcgggcccttgagcacgtggatgggacgcacgtgtgccagctgccggaggaccagaagggcaacatccatctgaaaccttccttctccgacggcctcaagatggacgcgggcatcatctgtgatgtgtgcacctgcgagctgcaaaaagaggtgcggtcagctcgctgcagcttcaacggagacttcgtgtgcggacagtgtgtgtgcagcgagggctggagtggccagacctgcaactgctccaccggctctctgagtgacattcagccctgcctgcgggagggcgaggacaagccgtgctccggccgtggggagtgccagtgcgggcactgtgtgtgctacggcgaaggccgctacgagggtcagttctgcgagtatgacaacttccagtgtccccgcacttccgggttcctctgcaatgaccgaggacgctgctccatgggccagtgtgtgtgtgagcctggttggacaggcccaagctgtgactgtcccctcagcaatgccacctgcatcgacagcaatgggggcatctgtaatggacgtggccactgtgagtgtggccgctgccactgccaccagcagtcgctctacacggacaccatctgcgagatcaactactcggcgatccacccgggcctctgcgaggacctacgctcctgcgtgcagtgccaggcgtggggcaccggcgagaagaaggggcgcacgtgtgaggaatgcaacttcaaggtcaagatggtggacgagcttaagagagccgaggaggtggtggtgcgctgctccttccgggacgaggatgacgactgcacctacagctacaccatggaaggtgacggcgcccctgggcccaacagcactgtcctggtgcacaagaagaaggactgccctccgggctccttctggtggctcatccccctgctcctcctcctcctgccgctcctggccctgctactgctgctatgctggaagtactgtgcctgctgcaaggcctgcctggcacttctcccgtgctgcaaccgaggtcacatggtgggctttaaggaagaccactacatgctgcgggagaacctgatggcctctgaccacttggacacgcccatgctgcgcagcgggaacctcaagggccgtgacgtggtccgctggaaggtcaccaacaacatgcagcggcctggctttgccactcatgccgccagcatcaaccccacagagctggtgccctacgggctgtccttgcgcctggcccgcctttgcaccgagaacctgctgaagcctgacactcgggagtgcgcccagctgcgccaggaggtggaggagaacgtaaggacccaggaactaggcctggccggagatgtggctgaacgaggtctacaggcagatctccggtgtacacaagctccagcagaccaagttccggcagcagcccaatgccgggaaaaagcaagaccacaccattgtggacacagtgctgatggcgccccgctcggccaagccggccctgctgaagcttacagagaagcaggtggaacagagggccttccacgacctcaaggtggcccccggctactacaccctcactgcagaccaggacgcccggggcatggtggagttccaggagggcgtggagctggtggacgtacgggtgcccctctttatccggcctgaggatgacgacgagaagcagctgctggtggaggccatcgacgtgcccgcaggcactgccaccctcggccgccgcctggtaaacatcaccatcatcaaggagcaagccagagacgtggtgtcctttgagcagcctgagttctcggtcagccgcggggaccaggtggcccgcatccctgtcatccggcgtgtcctggacggcgggaagtcccaggtctcctaccgcacacaggatggcaccgcgcagggcaaccgggactacatccccgtggagggtgagctgctgttccagcctggggaggcctggaaagagctgcaggtgaagctcctggagctgcaagaagttgactccctcctgcggggccgccaggtccgccgtttccacgtccagctcagcaaccctaagtttggggcccacctgggccagccccactccaccaccatcatcatcagggacccagatgaactggaccggagcttcacgagtcagatgttgtcatcacagccaccccctcacggcgacctgggcgccccgcagaaccccaatgctaaggccgctgggtccaggaagatccatttcaactggctgcccccttctggcaagccaatggggtacagggtaaagtactggattcagggtgactccgaatccgaagcccacctgctcgacagcaaggtgccctcagtggagctcaccaacctgtacccgtattgcgactatgagatgaaggtgtgcgcctacggggctcagggcgagggaccctacagctccctggtgtcctgccgcacccaccaggaagtgcccagcgagccagggcgtctggccttcaatgtcgtctcctccacggtgacccagctgagctgggctgagccggctgagaccaacggtgagatcacagcctacgaggtctgctatggcctggtcaacgatgacaaccgacctattgggcccatgaagaaagtgctggttgacaaccctaagaaccggatgctgcttattgagaaccttcgggagtcccagccctaccgctacacggtgaaggcgcgcaacggggccggctgggggcctgagcgggaggccatcatcaacctggccacccagcccaagaggcccatgtccatccccatcatccctgacatccctatcgtggacgcccagagcggggaggactacgacagcttccttatgtacagcgatgacgttctacgctctccatcgggcagccagaggcccagcgtctccgatgacactgagcacctggtgaatggccggatggactttgccttcccgggcagcaccaactccctgcacaggatgaccacgaccagtgctgctgcctatggcacccacctgagcccacacgtgccccaccgcgtgctaagcacatcctccaccctcacacgggactacaactcactgacccgctcagaacactcacactcgaccacactgcccagggactactccaccctcacctccgtctcctcccacgactctcgcctgactgctggtgtgcccgacacgcccacccgcctggtgttctctgccctggggcccacatctctcagagtgagctggcaggagccgcggtgcgagcggccgctgcagggctacagtgtggagtaccagctgctgaacggcggtgagctgcatcggctcaacatccccaaccctgcccagacctcggtggtggtggaagacctcctgcccaaccactcctacgtgttccgcgtgcgggcccagagccaggaaggctggggccgagagcgtgagggtgtcatcaccattgaatcccaggtgcacccgcagagcccactgtgtcccctgccagcccacccgcatgcacagagcaggggctaggtgtctcctgggaggcatgaagggggcaaggtccgtcctctgtgggcccaaacctatttgtaaccaaagagctgggagcagcacaaggacccagcctttgttctgcacttaataaatggttttgctactgcta

SEQ ID NO: 330368 - DNA, 1710 bp, Homo sapiens
aagacatgatcgatcgagccggtaccgaacgggtgatgcggttgagaaccttcgggagtcccagccctaccgctacacggtgaaggcgcgcaacggggccggctgggggcctgagcgggaggccatcatcaacctggccacccagcccaagaggcccatgtccatccccatcatccctgacatccctatcgtggacgcccagagcggggaggactacgacagcttccttatgtacagcgatgacgttctacgctctccatcgggcagccagaggcccagcgtctccgatgacactgagcacctggtgaatggccggatggactttgccttcccgggcagcaccaactccctgcacaggatgaccacgaccagtgctgctgcctatggcacccacctgagcccacacgtgccccaccgcgtgctaagcacatcctccaccctcacacgggactacaactcactgacccgctcagaacactcacactcgaccacactgcccagggactactccaccctcacctccgtctcctcccacgactctcgcctgactgctggtgtgcccgacacgcccacccgcctggtgttctctgccctggggcccacatctctcagagtgagctggcaggagccgcggtgcgagcggccgctgcagggctacagtgtggagtaccagctgctgaacggcggtgagctgcatcggctcaacatccccaaccctgcccagacctcggtggtggtggaagacctcctgcccaaccactcctacgtgttccgcgtgcgggcccagagccaggaaggctggggccgagagcgtgagggtgtcatcaccattgaatcccaggtgcacccgcagagcccactgtgtcccctgccaggctccgccttcactttgagcactcccagtgccccaggcccgctggtgttcactgccctgagcccagactcgctgcagctgagctgggagcggccacggaggcccaatggggatatcgtcggctacctggtgacctgtgagatggcccaaggaggagggccagccaccgcattccgggtggatggagacagccccgagagccggctgaccgtgccgggcctcagcgagaacgtgccctacaagttcaaggtgcaggccaggaccactgagggcttcgggccagagcgcgagggcatcatcaccatagagtcccaggatggaggacccttcccgcagctgggcagccgtgccgggctcttccagcacccgctgcaaagcgagtacagcagcatcaccaccacccacaccagcgccaccgagcccttcctagtggatgggccgaccctgggggcccagcacctggaggcaggcggctccctcacccggcatgtgacccaggagtttgtgagccggacactgaccaccagcggaacccttagcacccacatggaccaacagttcttccaaacttgaccgcaccctgccccacccccgccatgtcccactaggcgtcctcccgactcctctcccggagcctcctcagctactccatccttgcacccctgggggcccagcccacccgcatgcacagagcaggggctaggtgtctcctgggaggcatgaagggggcaaggtccgtcctctgtgggcccaaacctatttgtaaccaaagagctgggagcagcacaaggacccagcctttgttctgcacttaataaatggttttgctactgcta

SEQ ID NO: 330369 - DNA, 4782 bp, Homo sapiens
  misc_feature (28)..(28): n is a, c, g, or t
  misc_feature (30)..(30): n is a, c, g, or t
gcgctgcccgcctcgtccccaccccccnancccccgcgcccgccctcggacagtccctgctcgcccgcgcgctgcagccccatctcctagcggcagcccaggcgcggagggagcgagtccgccccgaggtaggtccaggacgggcgcacagcagcagccgaggctggccgggagagggaggaagaggatggcagggccacgccccagcccatgggccaggctgctcctggcagccttgatcagcgtcagcctctctgggaccttggcaaaccgctgcaagaaggccccagtgaagagctgcacggagtgtgtccgtgtggataaggactgcgcctactgcacagacgagatgttcagggaccggcgctgcaacacccaggcggagctgctggccgcgggctgccagcgggagagcatcgtggtcatggagagcagcttccaaatcacagaggagacccagattgacaccaccctgcggcgcagccagatgtccccccaaggcctgcgggtccgtctgcggcccggtgaggagcggcattttgagctggaggtgtttgagccactggagagccccgtggacctgtacatcctcatggacttctccaactccatgtccgatgatctggacaacctcaagaagatggggcagaacctggctcgggtcctgagccagctcaccagcgactacactattggatttggcaagtttgtggacaaagtcagcgtcccgcagacggacatgaggcctgagaagctgaaggagccctggcccaacagtgacccccccttctccttcaagaacgtcatcagcctgacagaagatgtggatgagttccggaataaactgcagggagagcggatctcaggcaacctggatgctcctgagggcggcttcgatgccatcctgcagacagctgtgtgcacgagggacattggctggcgcccggacagcacccacctgctggtcttctccaccgagtcagccttccactatgaggctgatggcgccaacgtgctggctggcatcatgagccgcaacgatgaacggtgccacctggacaccacgggcacctacacccagtacaggacacaggactacccgtcggtgcccaccctggtgcgcctgctcgccaagcacaacatcatccccatctttgctgtcaccaactactcctatagctactacgagaagcttcacacctatttccctgtctcctcactgggggtgctgcaggaggactcgtccaacatcgtggagctgctggaggaggccttcaatcggatccgctccaacctggacatccgggccctagacagcccccgaggccttcggacagaggtcacctccaagatgttccagaagacgaggactgggtcctttcacatccggcggggggaagtgggtatataccaggtgcagctgcgggcccttgagcacgtggatgggacgcacgtgtgccagctgccggaggaccagaagggcaacatccatctgaaaccttccttctccgacggcctcaagatggacgcgggcatcatctgtgatgtgtgcacctgcgagctgcaaaaagaggtgcggtcagctcgctgcagcttcaacggagacttcgtgtgcggacagtgtgtgtgcagcgagggctggagtggccagacctgcaactgctccaccggctctctgagtgacattcagccctgcctgcgggagggcgaggacaagccgtgctccggccgtggggagtgccagtgcgggcactgtgtgtgctacggcgaaggccgctacgagggtcagttctgcgagtatgacaacttccagtgtccccgcacttccgggttcctctgcaatgaccgaggacgctgctccatgggccagtgtgtgtgtgagcctggttggacaggcccaagctgtgactgtcccctcagcaatgccacctgcatcgacagcaatgggggcatctgtaatggacgtggccactgtgagtgtggccgctgccactgccaccagcagtcgctctacacggacaccatctgcgagatcaactactcggcgatccacccgggcctctgcgaggacctacgctcctgcgtgcagtgccaggcgtggggcaccggcgagaagaaggggcgcacgtgtgaggaatgcaacttcaaggtcaagatggtggacgagcttaagagagccgaggaggtggtggtgcgctgctccttccgggacgaggatgacgactgcacctacagctacaccatggaaggtgacggcgcccctgggcccaacagcactgtcctggtgcacaagaagaaggactgccctccgggctccttctggtggctcatccccctgctcctcctcctcctgccgctcctggccctgctactgctgctatgctggaagtactgtgcctgctgcaaggcctgcctggcacttctcccgtgctgcaaccgaggtcacatggtgggctttaaggaagaccactacatgctgcgggagaacctgatggcctctgaccacttggacacgcccatgctgcgcagcgggaacctcaagggccgtgacgtggtccgctggaaggtcaccaacaacatgcagcggcctggctttgccactcatgccgccagcatcaaccccacagagctggtgccctacgggctgtccttgcgcctggcccgcctttgcaccgagaacctgctgaagcctgacactcgggagtgcgcccagctgcgccaggaggtggaggagaacgtaaggacccaggaactaggcctggccggagatgtggctgaacgaggtctacaggcagatctccggtgtacacaagctccagcagaccaagttccggcagcagcccaatgccgggaaaaagcaagaccacaccattgtggacacagtgctgatggcgccccgctcggccaagccggccctgctgaagcttacagagaagcaggtggaacagagggccttccacgacctcaaggtggcccccggctactacaccctcactgcagaccaggacgcccggggcatggtggagttccaggagggcgtggagctggtggacgtacgggtgcccctctttatccggcctgaggatgacgacgagaagcagctgctggtggaggccatcgacgtgcccgcaggcactgccaccctcggccgccgcctggtaaacatcaccatcatcaaggagcaagccagagacgtggtgtcctttgagcagcctgagttctcggtcagccgcggggaccaggtggcccgcatccctgtcatccggcgtgtcctggacggcgggaagtcccaggtctcctaccgcacacaggatggcaccgcgcagggcaaccgggactacatccccgtggagggtgagctgctgttccagcctggggaggcctggaaagagctgcaggtgaagctcctggagctgcaagaagttgactccctcctgcggggccgccaggtccgccgtttccacgtccagctcagcaaccctaagtttggggcccacctgggccagccccactccaccaccatcatcatcagggacccagatgaactggaccggagcttcacgagtcagatgttgtcatcacagccaccccctcacggcgacctgggcgccccgcagaaccccaatgctaaggccgctgggtccaggaagatccatttcaactggctgcccccttctggcaagccaatggggtacagggtaaagtactggattcagggtgactccgaatccgaagcccacctgctcgacagcaaggtgccctcagtggagctcaccaacctgtacccgtattgcgactatgagatgaaggtgtgcgcctacggggctcagggcgagggaccctacagctccctggtgtcctgccgcacccaccaggaagtgcccagcgagccagggcgtctggccttcaatgtcgtctcctccacggtgacccagctgagctgggctgagccggctgagaccaacggtgagatcacagcctacgaggtctgctatggcctggtcaacgatgacaaccgacctattgggcccatgaagaaagtgctggttgacaaccctaagaaccggatgctgcttattgagaaccttcgggagtcccagccctaccgctacacggtgaaggcgcgcaacggggccggctgggggcctgagcgggaggccatcatcaacctggccacccagcccaagaggcccatgtccatccccatcatccctgacatccctatcgtggacgcccagagcggggaggactacgacagcttccttatgtacagcgatgacgttctacgctctccatcgggcagccagaggcccagcgtctccgatgacactgagcacctggtgaatggccggatggactttgccttcccgggcagcaccaactccctgcacaggatgaccacgaccagtgctgctgcctatggcacccacctgagcccacacgtgccccaccgcgtgctaagcacatcctccaccctcacacgggactacaactcactgacccgctcagaacactcacactcgaccacactgcccagggactactccaccctcacctccgtctcctcccacgactctcgcctgactgctggtgtgcccgacacgcccacccgcctggtgttctctgccctggggcccacatctctcagagtgagctggcaggagccgcggtgcgttggcccaacgttgggccacgcaccgtacagctgacacggtggctcatgcctgtaatcccagcactttgggaggaatggatgaatcagtgaattaatacgtgcgtgcc

SEQ ID NO: 330370 - DNA, 4429 bp, Homo sapiens
  misc_feature (28)..(28): n is a, c, g, or t
  misc_feature (30)..(30): n is a, c, g, or t
gcgctgcccgcctcgtccccaccccccnancccccgcgcccgccctcggacagtccctgctcgcccgcgcgctgcagccccatctcctagcggcagcccaggcgcggagggagcgagtccgccccgaggtaggtccaggacgggcgcacagcagcagccgaggctggccgggagagggaggaagaggatggcagggccacgccccagcccatgggccaggctgctcctggcagccttgatcagcgtcagcctctctgggaccttggcaaaccgctgcaagaaggccccagtgaagagctgcacggagtgtgtccgtgtggataaggactgcgcctactgcacagacgagatgttcagggaccggcgctgcaacacccaggcggagctgctggccgcgggctgccagcgggagagcatcgtggtcatggagagcagcttccaaatcacagaggagacccagattgacaccaccctgcggcgcagccagatgtccccccaaggcctgcgggtccgtctgcggcccggtgaggagcggcattttgagctggaggtgtttgagccactggagagccccgtggacctgtacatcctcatggacttctccaactccatgtccgatgatctggacaacctcaagaagatggggcagaacctggctcgggtcctgagccagctcaccagcgactacactattggatttggcaagtttgtggacaaagtcagcgtcccgcagacggacatgaggcctgagaagctgaaggagccctggcccaacagtgacccccccttctccttcaagaacgtcatcagcctgacagaagatgtggatgagttccggaataaactgcagggagagcggatctcaggcaacctggatgctcctgagggcggcttcgatgccatcctgcagacagctgtgtgcacgagggacattggctggcgcccggacagcacccacctgctggtcttctccaccgagtcagccttccactatgaggctgatggcgccaacgtgctggctggcatcatgagccgcaacgatgaacggtgccacctggacaccacgggcacctacacccagtacaggacacaggactacccgtcggtgcccaccctggtgcgcctgctcgccaagcacaacatcatccccatctttgctgtcaccaactactcctatagctactacgagaagcttcacacctatttccctgtctcctcactgggggtgctgcaggaggactcgtccaacatcgtggagctgctggaggaggccttcaatcggatccgctccaacctggacatccgggccctagacagcccccgaggccttcggacagaggtcacctccaagatgttccagaagacgaggactgggtcctttcacatccggcggggggaagtgggtatataccaggtgcagctgcgggcccttgagcacgtggatgggacgcacgtgtgccagctgccggaggaccagaagggcaacatccatctgaaaccttccttctccgacggcctcaagatggacgcgggcatcatctgtgatgtgtgcacctgcgagctgcaaaaagaggtgcggtcagctcgctgcagcttcaacggagacttcgtgtgcggacagtgtgtgtgcagcgagggctggagtggccagacctgcaactgctccaccggctctctgagtgacattcagccctgcctgcgggagggcgaggacaagccgtgctccggccgtggggagtgccagtgcgggcactgtgtgtgctacggcgaaggccgctacgagggtcagttctgcgagtatgacaacttccagtgtccccgcacttccgggttcctctgcaatgaccgaggacgctgctccatgggccagtgtgtgtgtgagcctggttggacaggcccaagctgtgactgtcccctcagcaatgccacctgcatcgacagcaatgggggcatctgtaatggacgtggccactgtgagtgtggccgctgccactgccaccagcagtcgctctacacggacaccatctgcgagatcaactactcggcgatccacccgggcctctgcgaggacctacgctcctgcgtgcagtgccaggcgtggggcaccggcgagaagaaggggcgcacgtgtgaggaatgcaacttcaaggtcaagatggtggacgagcttaagagagccgaggaggtggtggtgcgctgctccttccgggacgaggatgacgactgcacctacagctacaccatggaaggtgacggcgcccctgggcccaacagcactgtcctggtgcacaagaagaaggactgccctccgggctccttctggtggctcatccccctgctcctcctcctcctgccgctcctggccctgctactgctgctatgctggaagtactgtgcctgctgcaaggcctgcctggcacttctcccgtgctgcaaccgaggtcacatggtgggctttaaggaagaccactacatgctgcgggagaacctgatggcctctgaccacttggacacgcccatgctgcgcagcgggaacctcaagggccgtgacgtggtccgctggaaggtcaccaacaacatgcagcggcctggctttgccactcatgccgccagcatcaaccccacagagctggtgccctacgggctgtccttgcgcctggcccgcctttgcaccgagaacctgctgaagcctgacactcgggagtgcgcccagctgcgccaggaggtggaggagaacgtaaggacccaggaactaggcctggccggagatgtggctgaacgaggtctacaggcagatctccggtgtacacaagctccagcagaccaagttccggcagcagcccaatgccgggaaaaagcaagaccacaccattgtggacacagtgctgatggcgccccgctcggccaagccggccctgctgaagcttacagagaagcaggtggaacagagggccttccacgacctcaaggtggcccccggctactacaccctcactgcagaccaggacgcccggggcatggtggagttccaggagggcgtggagctggtggacgtacgggtgcccctctttatccggcctgagacgaccagtgctgctgcctatggcacccacctgagcccacacgtgccccaccgcgtgctaagcacatcctccaccctcacacgggactacaactcactgacccgctcagaacactcacactcgaccacactgcccagggactactccaccctcacctccgtctcctcccacgactctcgcctgactgctggtgtgcccgacacgcccacccgcctggtgttctctgccctggggcccacatctctcagagtgagctggcaggagccgcggtgcgagcggccgctgcagggctacagtgtggagtaccagctgctgaacggcggtgagctgcatcggctcaacatccccaaccctgcccagacctcggtggtggtggaagacctcctgcccaaccactcctacgtgttccgcgtgcgggcccagagccaggaaggctggggccgagagcgtgagggtgtcatcaccattgaatcccaggtgcacccgcagagcccactgtgtcccctgccaggctccgccttcactttgagcactcccagtgccccaggcccgctggtgttcactgccctgagcccagactcgctgcagctgagctgggagcggccacggaggcccaatggggatatcgtcggctacctggtgacctgtgagatggcccaaggaggagggccagccaccgcattccgggtggatggagacagccccgagagccggctgaccgtgccgggcctcagcgagaacgtgccctacaagttcaaggtgcaggccaggaccactgagggcttcgggccagagcgcgagggcatcatcaccatagagtcccaggatggaggacccttcccgcagctgggcagccgtgccgggctcttccagcacccgctgcaaagcgagtacagcagcatcaccaccacccacaccagcgccaccgagcccttcctagtggatgggccgaccctgggggcccagcacctggaggcaggcggctccctcacccggcatgtgacccaggagtttgtgagccggacactgaccaccagcggaacccttagcacccacatggaccaacagttcttccaaacttgaccgcaccctgccccacccccgccatgtcccactaggcgtcctcccgactcctctcccggagcctcctcagctactccatccttgcacccctgggggcccagcccacccgcatgcacagagcaggggctaggtgtctcctgggaggcatgaagggggcaaggtccgtcctctgtgggcccaaacctatttgtaaccaaagagctgggagcagcacaaggacccagcctttgttctgcacttaataaatggttttgctactgcta

SEQ ID NO: 330371 - DNA, 4392 bp, Homo sapiens
  misc_feature (28)..(28): n is a, c, g, or t
  misc_feature (30)..(30): n is a, c, g, or t
gcgctgcccgcctcgtccccaccccccnancccccgcgcccgccctcggacagtccctgctcgcccgcgcgctgcagccccatctcctagcggcagcccaggcgcggagggagcgagtccgccccgaggtaggtccaggacgggcgcacagcagcagccgaggctggccgggagagggaggaagaggatggcagggccacgccccagcccatgggccaggctgctcctggcagccttgatcagcgtcagcctctctgggaccttggcaaaccgctgcaagaaggccccagtgaagagctgcacggagtgtgtccgtgtggataaggactgcgcctactgcacagacgagatgttcagggaccggcgctgcaacacccaggcggagctgctggccgcgggctgccagcgggagagcatcgtggtcatggagagcagcttccaaatcacagaggagacccagattgacaccaccctgcggcgcagccagatgtccccccaaggcctgcgggtccgtctgcggcccggtgaggagcggcattttgagctggaggtgtttgagccactggagagccccgtggacctgtacatcctcatggacttctccaactccatgtccgatgatctggacaacctcaagaagatggggcagaacctggctcgggtcctgagccagctcaccagcgactacactattggatttggcaagtttgtggacaaagtcagcgtcccgcagacggacatgaggcctgagaagctgaaggagccctggcccaacagtgacccccccttctccttcaagaacgtcatcagcctgacagaagatgtggatgagttccggaataaactgcagggagagcggatctcaggcaacctggatgctcctgagggcggcttcgatgccatcctgcagacagctgtgtgcacgagggacattggctggcgcccggacagcacccacctgctggtcttctccaccgagtcagccttccactatgaggctgatggcgccaacgtgctggctggcatcatgagccgcaacgatgaacggtgccacctggacaccacgggcacctacacccagtacaggacacaggactacccgtcggtgcccaccctggtgcgcctgctcgccaagcacaacatcatccccatctttgctgtcaccaactactcctatagctactacgagaagcttcacacctatttccctgtctcctcactgggggtgctgcaggaggactcgtccaacatcgtggagctgctggaggaggccttcaatcggatccgctccaacctggacatccgggccctagacagcccccgaggccttcggacagaggtcacctccaagatgttccagaagacgaggactgggtcctttcacatccggcggggggaagtgggtatataccaggtgcagctgcgggcccttgagcacgtggatgggacgcacgtgtgccagctgccggaggaccagaagggcaacatccatctgaaaccttccttctccgacggcctcaagatggacgcgggcatcatctgtgatgtgtgcacctgcgagctgcaaaaagaggtgcggtcagctcgctgcagcttcaacggagacttcgtgtgcggacagtgtgtgtgcagcgagggctggagtggccagacctgcaactgctccaccggctctctgagtgacattcagccctgcctgcgggagggcgaggacaagccgtgctccggccgtggggagtgccagtgcgggcactgtgtgtgctacggcgaaggccgctacgagggtcagttctgcgagtatgacaacttccagtgtccccgcacttccgggttcctctgcaatgaccgaggacgctgctccatgggccagtgtgtgtgtgagcctggttggacaggcccaagctgtgactgtcccctcagcaatgccacctgcatcgacagcaatgggggcatctgtaatggacgtggccactgtgagtgtggccgctgccactgccaccagcagtcgctctacacggacaccatctgcgagatcaactactcggcgatccacccgggcctctgcgaggacctacgctcctgcgtgcagtgccaggcgtggggcaccggcgagaagaaggggcgcacgtgtgaggaatgcaacttcaaggtcaagatggtggacgagcttaagagagccgaggaggtggtggtgcgctgctccttccgggacgaggatgacgactgcacctacagctacaccatggaaggtgacggcgcccctgggcccaacagcactgtcctggtgcacaagaagaaggactgccctccgggctccttctggtggctcatccccctgctcctcctcctcctgccgctcctggccctgctactgctgctatgctggaagtactgtgcctgctgcaaggcctgcctggcacttctcccgtgctgcaaccgaggtcacatggtgggctttaaggaagaccactacatgctgcgggagaacctgatggcctctgaccacttggacacgcccatgctgcgcagcgggaacctcaagggccgtgacgtggtccgctggaaggtcaccaacaacatgcagcggcctggctttgccactcatgccgccagcatcaaccccacagagctggtgccctacgggctgtccttgcgcctggcccgcctttgcaccgagaacctgctgaagcctgacactcgggagtgcgcccagctgcgccaggaggtggaggagaacctgaacgaggtctacaggcagatctccggtgtacacaagctccagcagaccaagttccggcagcagcccaatgccgggaaaaagcaagaccacaccattgtggacacagtgctgatggcgccccgctcggccaagccggccctgctgaagcttacagagaagcaggtggaacagagggccttccacgacctcaaggtggcccccggctactacaccctcactgcagaccaggacgcccggggcatggtggagttccaggagggcgtggagctggtggacgtacgggtgcccctctttatccggcctgagacgaccagtgctgctgcctatggcacccacctgagcccacacgtgccccaccgcgtgctaagcacatcctccaccctcacacgggactacaactcactgacccgctcagaacactcacactcgaccacactgcccagggactactccaccctcacctccgtctcctcccacgactctcgcctgactgctggtgtgcccgacacgcccacccgcctggtgttctctgccctggggcccacatctctcagagtgagctggcaggagccgcggtgcgagcggccgctgcagggctacagtgtggagtaccagctgctgaacggcggtgagctgcatcggctcaacatccccaaccctgcccagacctcggtggtggtggaagacctcctgcccaaccactcctacgtgttccgcgtgcgggcccagagccaggaaggctggggccgagagcgtgagggtgtcatcaccattgaatcccaggtgcacccgcagagcccactgtgtcccctgccaggctccgccttcactttgagcactcccagtgccccaggcccgctggtgttcactgccctgagcccagactcgctgcagctgagctgggagcggccacggaggcccaatggggatatcgtcggctacctggtgacctgtgagatggcccaaggaggagggccagccaccgcattccgggtggatggagacagccccgagagccggctgaccgtgccgggcctcagcgagaacgtgccctacaagttcaaggtgcaggccaggaccactgagggcttcgggccagagcgcgagggcatcatcaccatagagtcccaggatggaggacccttcccgcagctgggcagccgtgccgggctcttccagcacccgctgcaaagcgagtacagcagcatcaccaccacccacaccagcgccaccgagcccttcctagtggatgggccgaccctgggggcccagcacctggaggcaggcggctccctcacccggcatgtgacccaggagtttgtgagccggacactgaccaccagcggaacccttagcacccacatggaccaacagttcttccaaacttgaccgcaccctgccccacccccgccatgtcccactaggcgtcctcccgactcctctcccggagcctcctcagctactccatccttgcacccctgggggcccagcccacccgcatgcacagagcaggggctaggtgtctcctgggaggcatgaagggggcaaggtccgtcctctgtgggcccaaacctatttgtaaccaaagagctgggagcagcacaaggacccagcctttgttctgcacttaataaatggttttgctactgcta

SEQ ID NO: 330372 - DNA, 1693 bp, Homo sapiens
tgggggtttggctgcgtctgcagtcagctctgccctggggagcagtgctcacaccgatagagtggccggccagaggatatgggctgtggaagcctgggtggcccttgggctcctgcagggacagagggcctctgtccctagtggtttgagggaaactggttgtatttaagcaaaagccacccagagggtgggtgaccaggaatgtgcagggcccagcctgccccacggggcccgggtctggggcaggcctgaccaagggaccctgctctccccctgcagagcacctggtgaatggccggatggactttgccttcccgggcagcaccaactccctgcacaggatgaccacgaccagtgctgctgcctatggcacccacctgagcccacacgtgccccaccgcgtgctaagcacatcctccaccctcacacgggactacaactcactgacccgctcagaacactcacactcgaccacactgcccagggactactccaccctcacctccgtctcctcccacgactctcgcctgactgctggtgtgcccgacacgcccacccgcctggtgttctctgccctggggcccacatctctcagagtgagctggcaggagccgcggtgcgagcggccgctgcagggctacagtgtggagtaccagctgctgaacggcggtgagctgcatcggctcaacatccccaaccctgcccagacctcggtggtggtggaagacctcctgcccaaccactcctacgtgttccgcgtgcgggcccagagccaggaaggctggggccgagagcgtgagggtgtcatcaccattgaatcccaggtgcacccgcagagcccactgtgtcccctgccaggctccgccttcactttgagcactcccagtgccccaggcccgctggtgttcactgccctgagcccagactcgctgcagctgagctgggagcggccacggaggcccaatggggatatcgtcggctacctggtgacctgtgagatggcccaaggaggagggccagccaccgcattccgggtggatggagacagccccgagagccggctgaccgtgccgggcctcagcgagaacgtgccctacaagttcaaggtgcaggccaggaccactgagggcttcgggccagagcgcgagggcatcatcaccatagagtcccaggatggaggacccttcccgcagctgggcagccgtgccgggctcttccagcacccgctgcaaagcgagtacagcagcatcaccaccacccacaccagcgccaccgagcccttcctagtggatgggccgaccctgggggcccagcacctggaggcaggcggctccctcacccggcatgtgacccaggagtttgtgagccggacactgaccaccagcggaacccttagcacccacatggaccaacagttcttccaaacttgaccgcaccctgccccacccccgccatgtcccactaggcgtcctcccgactcctctcccggagcctcctcagctactccatccttgcacccctgggggcccagcccacccgcatgcacagagcaggggctaggtgtctcctgggaggcatgaagggggcaaggtccgtcctctgtgggcccaaacctatttgtaaccaaagagctgggagcagcacaaggacccagcctttgttctgcacttaataaatggttttgctactgcta

SEQ ID NO: 330373 - DNA, 1406 bp, Homo sapiens
cccctggcacaggaatgaccacgaccaaggtgctgctgcccctatgggcacccccaacccttggaaggcccccccaaacaatcagttggcccccccccaccccgggcggtatgtcttaaagccacatcctccaccctcacacgggactacaactcactgacccgctcagaacactcacactcgaccacactgcccagggactactccaccctcacctccgtctcctcccacgactctcgcctgactgctggtgtgcccgacacgcccacccgcctggtgttctctgccctggggcccacatctctcagagtgagctggcaggagccgcggtgcgagcggccgctgcagggctacagtgtggagtaccagctgctgaacggcggtgagctgcatcggctcaacatccccaaccctgcccagacctcggtggtggtggaagacctcctgcccaaccactcctacgtgttccgcgtgcgggcccagagccaggaaggctggggccgagagcgtgagggtgtcatcaccattgaatcccaggtgcacccgcagagcccactgtgtcccctgccaggctccgccttcactttgagcactcccagtgccccaggcccgctggtgttcactgccctgagcccagactcgctgcagctgagctgggagcggccacggaggcccaatggggatatcgtcggctacctggtgacctgtgagatggcccaaggaggagggccagccaccgcattccgggtggatggagacagccccgagagccggctgaccgtgccgggcctcagcgagaacgtgccctacaagttcaaggtgcaggccaggaccactgagggcttcgggccagagcgcgagggcatcatcaccatagagtcccaggatggaggacccttcccgcagctgggcagccgtgccgggctcttccagcacccgctgcaaagcgagtacagcagcatcaccaccacccacaccagcgccaccgagcccttcctagtggatgggccgaccctgggggcccagcacctggaggcaggcggctccctcacccggcatgtgacccaggagtttgtgagccggacactgaccaccagcggaacccttagcacccacatggaccaacagttcttccaaacttgaccgcaccctgccccacccccgccatgtcccactaggcgtcctcccgactcctctcccggagcctcctcagctactccatccttgcacccctgggggcccagcccacccgcatgcacagagcaggggctaggtgtctcctgggaggcatgaagggggcaaggtccgtcctctgtgggcccaaacctatttgtaaccaaagagctgggagcagcacaaggacccagcctttgttctgcacttaataaatggttttgctactgcta

SEQ ID NO: 330374 - DNA, 1044 bp, Homo sapiens
gtaccgcagacgttaactatgtgagctgcatcggctcaacatccccaaccctgcccagacctcggtggtggtggaagacctcctgcccaaccactcctacgtgttccgcgtgcgggcccagagccaggaaggctggggccgagagcgtgagggtgtcatcaccattgaatcccaggtgcacccgcagagcccactgtgtcccctgccaggctccgccttcactttgagcactcccagtgccccaggcccgctggtgttcactgccctgagcccagactcgctgcagctgagctgggagcggccacggaggcccaatggggatatcgtcggctacctggtgacctgtgagatggcccaaggaggagggccagccaccgcattccgggtggatggagacagccccgagagccggctgaccgtgccgggcctcagcgagaacgtgccctacaagttcaaggtgcaggccaggaccactgagggcttcgggccagagcgcgagggcatcatcaccatagagtcccaggatggaggacccttcccgcagctgggcagccgtgccgggctcttccagcacccgctgcaaagcgagtacagcagcatcaccaccacccacaccagcgccaccgagcccttcctagtggatgggccgaccctgggggcccagcacctggaggcaggcggctccctcacccggcatgtgacccaggagtttgtgagccggacactgaccaccagcggaacccttagcacccacatggaccaacagttcttccaaacttgaccgcaccctgccccacccccgccatgtcccactaggcgtcctcccgactcctctcccggagcctcctcagctactccatccttgcacccctgggggcccagcccacccgcatgcacagagcaggggctaggtgtctcctgggaggcatgaagggggcaaggtccgtcctctgtgggcccaaacctatttgtaaccaaagagctgggagcagcacaaggacccagcctttgttctgcacttaataaatggttttgctactgcta

SEQ ID NO: 330375 - DNA, 1593 bp, Homo sapiens
  misc_feature (28)..(28): n is a, c, g, or t
  misc_feature (30)..(30): n is a, c, g, or t
gcgctgcccgcctcgtccccaccccccnancccccgcgcccgccctcggacagtccctgctcgcccgcgcgctgcagccccatctcctagcggcagcccaggcgcggagggagcgagtccgccccgaggtaggtccaggacgggcgcacagcagcagccgaggctggccgggagagggaggaagaggatggcagggccacgccccagcccatgggccaggctgctcctggcagccttgatcagcgtcagcctctctgggaccttggcaaaccgctgcaagaaggccccagtgaagagctgcacggagtgtgtccgtgtggataaggactgcgcctactgcacagacgagatgttcagggaccggcgctgcaacacccaggcggagctgctggccgcgggctgccagcgggagagcatcgtggtcatggagagcagcttccaaatcacagaggagacccagattgacaccaccctgcggcgcagccagatgtccccccaaggcctgcgggtccgtctgcggcccggtgaggagcggcattttgagctggaggtgtttgagccactggagagccccgtggacctgtacatcctcatggacttctccaactccatgtccgatgatctggacaacctcaagaagatggggcagaacctggctcgggtcctgagccagctcaccagcgactacactattggatttggcaagtttgtggacaaagtcagcgtcccgcagacggacatgaggcctgagaagctgaaggagccctggcccaacagtgacccccccttctccttcaagaacgtcatcagcctgacagaagatgtggatgagttccggaataaactgcagggagagcggatctcaggcaacctggatgctcctgagggcggcttcgatgccatcctgcagacagctgtgtgcacgagggacattggctggcgcccggacagcacccacctgctggtcttctccaccgagtcagccttccactatgaggctgatggcgccaacgtgctggctggcatcatgagccgcaacgatgaacggtgccacctggacaccacgggcacctacacccagtacaggacacaggactacccgtcggtgcccaccctggtgcgcctgctcgccaagcacaacatcatccccatctttgctgtcaccaactactcctatagctactacgagaagcttcacacctatttccctgtctcctcactgggggtgctgcaggaggactccggatccgctccaacctggacatccgggccctagacagcccccgaggccttcggacagaggtcacctccaagatgttccagaagacgaggactgggtcctttcacatccggcggggggaagtgggtatataccaggtgcagctgcgggcccttgagcacgtggatgggacgcacgtgtgccagctgccggaggaccagaagggcaacatccatctgaaaccttccttctccgacggcctcaagatggacgcgggcatcatctgtgatgtgtgcacctgcgagctgcaaaaagaggtgcggtcagctcgctgcagctcgcgcctgagttagcagctcgcacctagttggtcc

SEQ ID NO: 330376 - DNA, 550 bp, Homo sapiens
acacatataaggaaagtaagcccccccttagaaaccccccggcttaaccctttaagctacggatagatttgttgggtgaaacttgaagcgaataacattttcaccaggggaaccgccaagccccattattacgccaagctttaaacgacctcccaataggaaaagttggtacccctcaaggacccggcccgaatttccggggcgactacaactaaaaaattcgcgaccgggtcaacaccagcggaacccttagcacccacatggaccaacagttcttccaaacttgaccgcaccctgccccacccccgccatgtcccactaggcgtcctcccgactcctctcccggagcctcctcagctactccatccttgcacccctgggggcccagcccacccgcatgcacagagcaggggctaggtgtctcctgggaggcatgaagggggcaaggtccgtcctctgtgggcccaaacctatttgtaaccaaagagctgggagcagcacaaggacccagcctttgttctgcacttaataaatggttttgctactgcta

SEQ ID NO: 330377 - DNA, 1064 bp, Homo sapiens
  misc_feature (28)..(28): n is a, c, g, or t
  misc_feature (30)..(30): n is a, c, g, or t
gcgctgcccgcctcgtccccaccccccnancccccgcgcccgccctcggacagtccctgctcgcccgcgcgctgcagccccatctcctagcggcagcccaggcgcggagggagcgagtccgccccgaggtaggtccaggacgggcgcacagcagcagccgaggctggccgggagagggaggaagaggatggcagggccacgccccagcccatgggccaggctgctcctggcagccttgatcagcgtcagcctctctgggaccttggcaaaccgctgcaagaaggccccagtgaagagctgcacggagtgtgtccgtgtggataaggactgcgcctactgcacagacgagatgttcagggaccggcgctgcaacacccaggcggagctgctggccgcgggctgccagcgggagagcatcgtggtcatggagagcagcttccaaatcacagaggagacccagattgacaccaccctgcggcgcagccagatgtccccccaaggcctgcgggtccgtctgcggcccggtgaggagcggcattttgagctggaggtgtttgagccactggagagccccgtggacctgtacatcctcatggacttctccaactccatgtccgatgatctggacaacctcaagaagatggggcagaacctggctcgggtcctgagccagctcaccagcgactacactattggatttggcaagtttgtggacaaagtcagcgtcccgcagacggacatgaggcctgagaagctgaaggagccctggcccaacagtgacccccccttctccttcaagaacgtcatcagcctgacagaagatgtggatgagttccggaataaactgcagggagagcggatctcagctcagctactccatccttgcacccctgggggcccagcccacccgcatgcacagagcaggggctaggtgtctcctgggaggcatgaagggggcaaggtccgtcctctgtgggcccaaacctatttgtaaccaaagagctgggagcagcacaaggacccagcctttgttctgcacttaataaatggttttgctactgcta

SEQ ID NO: 330378 - DNA, 539 bp, Homo sapiens
gcccccatccagcctgagagggtctcccaccccattctccaccccacttctttgcctcccctcttctgaggtctcacccacctccctgggcctctctcctggtcattctctgctaggttttgcctaacaaggcccctttgggctgggatcctagggcctctgctggcctgagatgcctttgggggaacaaggaagtggcacttccctgggcaggcacattcaaagcagcatgaccaggatgcaggatgttgcctaaacatgagtgggattacaggctccactcttgtatagtacacaatctgaacaaccagccataccatactgtacccaacctgtacccaaaccacagctagtcctgggtgggtgataactaggtctcgatggcagcttagggacgaggaggatcaggccaggggtgggagtaacactgcactactgtgtgcccccacctgatccccccaggtgagctgcatcggctcaacatccccaaccctgcccagacctcggtggtggtggaagacctcctgcccaaccactcc

SEQ ID NO: 330379 - DNA, 5709 bp, Homo sapiens
  misc_feature (28)..(28): n is a, c, g, or t
  misc_feature (30)..(30): n is a, c, g, or t
gcgctgcccgcctcgtccccaccccccnancccccgcgcccgccctcggacagtccctgctcgcccgcgcgctgcagccccatctcctagcggcagcccaggcgcggagggagcgagtccgccccgaggtaggtccaggacgggcgcacagcagcagccgaggctggccgggagagggaggaagaggatggcagggccacgccccagcccatgggccaggctgctcctggcagccttgatcagcgtcagcctctctgggaccttggcaaaccgctgcaagaaggccccagtgaagagctgcacggagtgtgtccgtgtggataaggactgcgcctactgcacagacgagatgttcagggaccggcgctgcaacacccaggcggagctgctggccgcgggctgccagcgggagagcatcgtggtcatggagagcagcttccaaatcacagaggagacccagattgacaccaccctgcggcgcagccagatgtccccccaaggcctgcgggtccgtctgcggcccggtgaggagcggcattttgagctggaggtgtttgagccactggagagccccgtggacctgtacatcctcatggacttctccaactccatgtccgatgatctggacaacctcaagaagatggggcagaacctggctcgggtcctgagccagctcaccagcgactacactattggatttggcaagtttgtggacaaagtcagcgtcccgcagacggacatgaggcctgagaagctgaaggagccctggcccaacagtgacccccccttctccttcaagaacgtcatcagcctgacagaagatgtggatgagttccggaataaactgcagggagagcggatctcaggcaacctggatgctcctgagggcggcttcgatgccatcctgcagacagctgtgtgcacgagggacattggctggcgcccggacagcacccacctgctggtcttctccaccgagtcagccttccactatgaggctgatggcgccaacgtgctggctggcatcatgagccgcaacgatgaacggtgccacctggacaccacgggcacctacacccagtacaggacacaggactacccgtcggtgcccaccctggtgcgcctgctcgccaagcacaacatcatccccatctttgctgtcaccaactactcctatagctactacgagaagcttcacacctatttccctgtctcctcactgggggtgctgcaggaggactcgtccaacatcgtggagctgctggaggaggccttcaatcggatccgctccaacctggacatccgggccctagacagcccccgaggccttcggacagaggtcacctccaagatgttccagaagacgaggactgggtcctttcacatccggcggggggaagtgggtatataccaggtgcagctgcgggcccttgagcacgtggatgggacgcacgtgtgccagctgccggaggaccagaagggcaacatccatctgaaaccttccttctccgacggcctcaagatggacgcgggcatcatctgtgatgtgtgcacctgcgagctgcaaaaagaggtgcggtcagctcgctgcagcttcaacggagacttcgtgtgcggacagtgtgtgtgcagcgagggctggagtggccagacctgcaactgctccaccggctctctgagtgacattcagccctgcctgcgggagggcgaggacaagccgtgctccggccgtggggagtgccagtgcgggcactgtgtgtgctacggcgaaggccgctacgagggtcagttctgcgagtatgacaacttccagtgtccccgcacttccgggttcctctgcaatgaccgaggacgctgctccatgggccagtgtgtgtgtgagcctggttggacaggcccaagctgtgactgtcccctcagcaatgccacctgcatcgacagcaatgggggcatctgtaatggacgtggccactgtgagtgtggccgctgccactgccaccagcagtcgctctacacggacaccatctgcgagatcaactactcggcgatccacccgggcctctgcgaggacctacgctcctgcgtgcagtgccaggcgtggggcaccggcgagaagaaggggcgcacgtgtgaggaatgcaacttcaaggtcaagatggtggacgagcttaagagagccgaggaggtggtggtgcgctgctccttccgggacgaggatgacgactgcacctacagctacaccatggaaggtgacggcgcccctgggcccaacagcactgtcctggtgcacaagaagaaggactgccctccgggctccttctggtggctcatccccctgctcctcctcctcctgccgctcctggccctgctactgctgctatgctggaagtactgtgcctgctgcaaggcctgcctggcacttctcccgtgctgcaaccgaggtcacatggtgggctttaaggaagaccactacatgctgcgggagaacctgatggcctctgaccacttggacacgcccatgctgcgcagcgggaacctcaagggccgtgacgtggtccgctggaaggtcaccaacaacatgcagcggcctggctttgccactcatgccgccagcatcaaccccacagagctggtgccctacgggctgtccttgcgcctggcccgcctttgcaccgagaacctgctgaagcctgacactcgggagtgcgcccagctgcgccaggaggtggaggagaacctgaacgaggtctacaggcagatctccggtgtacacaagctccagcagaccaagttccggcagcagcccaatgccgggaaaaagcaagaccacaccattgtggacacagtgctgatggcgccccgctcggccaagccggccctgctgaagcttacagagaagcaggtggaacagagggccttccacgacctcaaggtggcccccggctactacaccctcactgcagaccaggacgcccggggcatggtggagttccaggagggcgtggagctggtggacgtacgggtgcccctctttatccggcctgaggatgacgacgagaagcagctgctggtggaggccatcgacgtgcccgcaggcactgccaccctcggccgccgcctggtaaacatcaccatcatcaaggagcaagccagagacgtggtgtcctttgagcagcctgagttctcggtcagccgcggggaccaggtggcccgcatccctgtcatccggcgtgtcctggacggcgggaagtcccaggtctcctaccgcacacaggatggcaccgcgcagggcaaccgggactacatccccgtggagggtgagctgctgttccagcctggggaggcctggaaagagctgcaggtgaagctcctggagctgcaagaagttgactccctcctgcggggccgccaggtccgccgtttccacgtccagctcagcaaccctaagtttggggcccacctgggccagccccactccaccaccatcatcatcagggacccagatgaactggaccggagcttcacgagtcagatgttgtcatcacagccaccccctcacggcgacctgggcgccccgcagaaccccaatgctaaggccgctgggtccaggaagatccatttcaactggctgcccccttctggcaagccaatggggtacagggtaaagtactggattcagggtgactccgaatccgaagcccacctgctcgacagcaaggtgccctcagtggagctcaccaacctgtacccgtattgcgactatgagatgaaggtgtgcgcctacggggctcagggcgagggaccctacagctccctggtgtcctgccgcacccaccaggaagtgcccagcgagccagggcgtctggccttcaatgtcgtctcctccacggtgacccagctgagctgggctgagccggctgagaccaacggtgagatcacagcctacgaggtctgctatggcctggtcaacgatgacaaccgacctattgggcccatgaagaaagtgctggttgacaaccctaagaaccggatgctgcttattgagaaccttcgggagtcccagccctaccgctacacggtgaaggcgcgcaacggggccggctgggggcctgagcgggaggccatcatcaacctggccacccagcccaagaggcccatgtccatccccatcatccctgacatccctatcgtggacgcccagagcggggaggactacgacagcttccttatgtacagcgatgacgttctacgctctccatcgggcagccagaggcccagcgtctccgatgacactgagcacctggtgaatggccggatggactttgccttcccgggcagcaccaactccctgcacaggatgaccacgaccagtgctgctgcctatggcacccacctgagcccacacgtgccccaccgcgtgctaagcacatcctccaccctcacacgggactacaactcactgacccgctcagaacactcacactcgaccacactgcccagggactactccaccctcacctccgtctcctcccacgactctcgcctgactgctggtgtgcccgacacgcccacccgcctggtgttctctgccctggggcccacatctctcagagtgagctggcaggagccgcggtgcgagcggccgctgcagggctacagtgtggagtaccagctgctgaacggcggtgagctgcatcggctcaacatccccaaccctgcccagacctcggtggtggtggaagacctcctgcccaaccactcctacgtgttccgcgtgcgggcccagagccaggaaggctggggccgagagcgtgagggtgtcatcaccattgaatcccaggtgcacccgcagagcccactgtgtcccctgccaggctccgccttcactttgagcactcccagtgccccaggcccgctggtgttcactgccctgagcccagactcgctgcagctgagctgggagcggccacggaggcccaatggggatatcgtcggctacctggtgacctgtgagatggcccaaggaggagggccagccaccgcattccgggtggatggagacagccccgagagccggctgaccgtgccgggcctcagcgagaacgtgccctacaagttcaaggtgcaggccaggaccactgagggcttcgggccagagcgcgagggcatcatcaccatagagtcccaggatggaggacccttcccgcagctgggcagccgtgccgggctcttccagcacccgctgcaaagcgagtacagcagcatcaccaccacccacaccagcgccaccgagcccttcctagtggatgggccgaccctgggggcccagcacctggaggcaggcggctccctcacccggcatgtgacccaggagtttgtgagccggacactgaccaccagcggaacccttagcacccacatggaccaacagttcttccaaacttgaccgcaccctgccccacccccgccatgtcccactaggcgtcctcccgactcctctcccggagcctcctcagctactccatccttgcacccctgggggcccagcccacccgcatgcacagagcaggggctaggtgtctcctgggaggcatgaagggggcaaggtccgtcctctgtgggcccaaacctatttgtaaccaaagagctgggagcagcacaaggacccagcctttgttctgcacttaataaatggttttgctactgcta

SEQ ID NO: 330380 - DNA, 399 bp, Homo sapiens
tgggccaaacgcaccgtcaagcagagtgcaagagccgcgtcacagcaatctccccatgtaaggccactaggagcagagagagagccgaggaggtggtggtgcgctgctccttccgggacgaggatgacgactgcacctacagctacaccatggaaggtgacggcgcccctgggcccaacagcactgtcctggtgcacaagaagaaggactgccctccgggctccttctggtggctcatccccctgctcctcctcctcctgccgctcctggccctgctactgctgctatgctggaagtactgtgcctgctgcaaggcctgcctggcacttctcccgtgctgcaaccgaggtcacatggtgggtcagaacatcagttgtatcctctagagtcagctagcag

SEQ ID NO: 330381 - DNA, 5868 bp, Homo sapiens
  misc_feature (28)..(28): n is a, c, g, or t
  misc_feature (30)..(30): n is a, c, g, or t
gcgctgcccgcctcgtccccaccccccnancccccgcgcccgccctcggacagtccctgctcgcccgcgcgctgcagccccatctcctagcggcagcccaggcgcggagggagcgagtccgccccgaggtaggtccaggacgggcgcacagcagcagccgaggctggccgggagagggaggaagaggatggcagggccacgccccagcccatgggccaggctgctcctggcagccttgatcagcgtcagcctctctgggaccttggcaaaccgctgcaagaaggccccagtgaagagctgcacggagtgtgtccgtgtggataaggactgcgcctactgcacagacgagatgttcagggaccggcgctgcaacacccaggcggagctgctggccgcgggctgccagcgggagagcatcgtggtcatggagagcagcttccaaatcacagaggagacccagattgacaccaccctgcggcgcagccagatgtccccccaaggcctgcgggtccgtctgcggcccggtgaggagcggcattttgagctggaggtgtttgagccactggagagccccgtggacctgtacatcctcatggacttctccaactccatgtccgatgatctggacaacctcaagaagatggggcagaacctggctcgggtcctgagccagctcaccagcgactacactattggatttggcaagtttgtggacaaagtcagcgtcccgcagacggacatgaggcctgagaagctgaaggagccctggcccaacagtgacccccccttctccttcaagaacgtcatcagcctgacagaagatgtggatgagttccggaataaactgcagggagagcggatctcaggcaacctggatgctcctgagggcggcttcgatgccatcctgcagacagctgtgtgcacgagggacattggctggcgcccggacagcacccacctgctggtcttctccaccgagtcagccttccactatgaggctgatggcgccaacgtgctggctggcatcatgagccgcaacgatgaacggtgccacctggacaccacgggcacctacacccagtacaggacacaggactacccgtcggtgcccaccctggtgcgcctgctcgccaagcacaacatcatccccatctttgctgtcaccaactactcctatagctactacgagaagcttcacacctatttccctgtctcctcactgggggtgctgcaggaggactcgtccaacatcgtggagctgctggaggaggccttcaatcggatccgctccaacctggacatccgggccctagacagcccccgaggccttcggacagaggtcacctccaagatgttccagaagacgaggactgggtcctttcacatccggcggggggaagtgggtatataccaggtgcagctgcgggcccttgagcacgtggatgggacgcacgtgtgccagctgccggaggaccagaagggcaacatccatctgaaaccttccttctccgacggcctcaagatggacgcgggcatcatctgtgatgtgtgcacctgcgagctgcaaaaagaggtgcggtcagctcgctgcagcttcaacggagacttcgtgtgcggacagtgtgtgtgcagcgagggctggagtggccagacctgcaactgctccaccggctctctgagtgacattcagccctgcctgcgggagggcgaggacaagccgtgctccggccgtggggagtgccagtgcgggcactgtgtgtgctacggcgaaggccgctacgagggtcagttctgcgagtatgacaacttccagtgtccccgcacttccgggttcctctgcaatgaccgaggacgctgctccatgggccagtgtgtgtgtgagcctggttggacaggcccaagctgtgactgtcccctcagcaatgccacctgcatcgacagcaatgggggcatctgtaatggacgtggccactgtgagtgtggccgctgccactgccaccagcagtcgctctacacggacaccatctgcgagatcaactactcggcgatccacccgggcctctgcgaggacctacgctcctgcgtgcagtgccaggcgtggggcaccggcgagaagaaggggcgcacgtgtgaggaatgcaacttcaaggtcaagatggtggacgagcttaagagagccgaggaggtggtggtgcgctgctccttccgggacgaggatgacgactgcacctacagctacaccatggaaggtgacggcgcccctgggcccaacagcactgtcctggtgcacaagaagaaggactgccctccgggctccttctggtggctcatccccctgctcctcctcctcctgccgctcctggccctgctactgctgctatgctggaagtactgtgcctgctgcaaggcctgcctggcacttctcccgtgctgcaaccgaggtcacatggtgggctttaaggaagaccactacatgctgcgggagaacctgatggcctctgaccacttggacacgcccatgctgcgcagcgggaacctcaagggccgtgacgtggtccgctggaaggtcaccaacaacatgcagcggcctggctttgccactcatgccgccagcatcaaccccacagagctggtgccctacgggctgtccttgcgcctggcccgcctttgcaccgagaacctgctgaagcctgacactcgggagtgcgcccagctgcgccaggaggtggaggagaacctgaacgaggtctacaggcagatctccggtgtacacaagctccagcagaccaagttccggcagcagcccaatgccgggaaaaagcaagaccacaccattgtggacacagtgctgatggcgccccgctcggccaagccggccctgctgaagcttacagagaagcaggtggaacagagggccttccacgacctcaaggtggcccccggctactacaccctcactgcagaccaggacgcccggggcatggtggagttccaggagggcgtggagctggtggacgtacgggtgcccctctttatccggcctgaggatgacgacgagaagcagctgctggtggaggccatcgacgtgcccgcaggcactgccaccctcggccgccgcctggtaaacatcaccatcatcaaggagcaagccagagacgtggtgtcctttgagcagcctgagttctcggtcagccgcggggaccaggtggcccgcatccctgtcatccggcgtgtcctggacggcgggaagtcccaggtctcctaccgcacacaggatggcaccgcgcagggcaaccgggactacatccccgtggagggtgagctgctgttccagcctggggaggcctggaaagagctgcaggtgaagctcctggagctgcaagaagttgactccctcctgcggggccgccaggtccgccgtttccacgtccagctcagcaaccctaagtttggggcccacctgggccagccccactccaccaccatcatcatcagggacccagatgaactggaccggagcttcacgagtcagatgttgtcatcacagccaccccctcacggcgacctgggcgccccgcagaaccccaatgctaaggccgctgggtccaggaagatccatttcaactggctgcccccttctggcaagccaatggggtacagggtaaagtactggattcagggtgactccgaatccgaagcccacctgctcgacagcaaggtgccctcagtggagctcaccaacctgtacccgtattgcgactatgagatgaaggtgtgcgcctacggggctcagggcgagggaccctacagctccctggtgtcctgccgcacccaccaggaagtgcccagcgagccagggcgtctggccttcaatgtcgtctcctccacggtgacccagctgagctgggctgagccggctgagaccaacggtgagatcacagcctacgaggtctgctatggcctggtcaacgatgacaaccgacctattgggcccatgaagaaagtgctggttgacaaccctaagaaccggatgctgcttattgagaaccttcgggagtcccagccctaccgctacacggtgaaggcgcgcaacggggccggctgggggcctgagcgggaggccatcatcaacctggccacccagcccaagaggcccatgtccatccccatcatccctgacatccctatcgtggacgcccagagcggggaggactacgacagcttccttatgtacagcgatgacgttctacgctctccatcgggcagccagaggcccagcgtctccgatgacactgagcacctggtgaatggccggatggactttgccttcccgggcagcaccaactccctgcacaggatgaccacgaccagtgctgctgcctatggcacccacctgagcccacacgtgccccaccgcgtgctaagcacatcctccaccctcacacgggactacaactcactgacccgctcagaacactcacactcgaccacactgcccagggactactccaccctcacctccgtctcctcccacggcctccctcccatctgggaacacgggaggagcaggcttccgctgtcctgggccctggggtcccggagtcgggctcagatgaaagggttccccccttccaggggcccacgagactctataatcctggctgggaggccagcagcgccctcctggggcccagactctcgcctgactgctggtgtgcccgacacgcccacccgcctggtgttctctgccctggggcccacatctctcagagtgagctggcaggagccgcggtgcgagcggccgctgcagggctacagtgtggagtaccagctgctgaacggcggtgagctgcatcggctcaacatccccaaccctgcccagacctcggtggtggtggaagacctcctgcccaaccactcctacgtgttccgcgtgcgggcccagagccaggaaggctggggccgagagcgtgagggtgtcatcaccattgaatcccaggtgcacccgcagagcccactgtgtcccctgccaggctccgccttcactttgagcactcccagtgccccaggcccgctggtgttcactgccctgagcccagactcgctgcagctgagctgggagcggccacggaggcccaatggggatatcgtcggctacctggtgacctgtgagatggcccaaggaggagggccagccaccgcattccgggtggatggagacagccccgagagccggctgaccgtgccgggcctcagcgagaacgtgccctacaagttcaaggtgcaggccaggaccactgagggcttcgggccagagcgcgagggcatcatcaccatagagtcccaggatggaggacccttcccgcagctgggcagccgtgccgggctcttccagcacccgctgcaaagcgagtacagcagcatcaccaccacccacaccagcgccaccgagcccttcctagtggatgggccgaccctgggggcccagcacctggaggcaggcggctccctcacccggcatgtgacccaggagtttgtgagccggacactgaccaccagcggaacccttagcacccacatggaccaacagttcttccaaacttgaccgcaccctgccccacccccgccatgtcccactaggcgtcctcccgactcctctcccggagcctcctcagctactccatccttgcacccctgggggcccagcccacccgcatgcacagagcaggggctaggtgtctcctgggaggcatgaagggggcaaggtccgtcctctgtgggcccaaacctatttgtaaccaaagagctgggagcagcacaaggacccagcctttgttctgcacttaataaatggttttgctactgcta

SEQ ID NO: 330382 - DNA, 5672 bp, Homo sapiens
  misc_feature (28)..(28): n is a, c, g, or t
  misc_feature (30)..(30): n is a, c, g, or t
gcgctgcccgcctcgtccccaccccccnancccccgcgcccgccctcggacagtccctgctcgcccgcgcgctgcagccccatctcctagcggcagcccaggcgcggagggagcgagtccgccccgaggtaggtccaggacgggcgcacagcagcagccgaggctggccgggagagggaggaagaggatggcagggccacgccccagcccatgggccaggctgctcctggcagccttgatcagcgtcagcctctctgggaccttggcaaaccgctgcaagaaggccccagtgaagagctgcacggagtgtgtccgtgtggataaggactgcgcctactgcacagacgagatgttcagggaccggcgctgcaacacccaggcggagctgctggccgcgggctgccagcgggagagcatcgtggtcatggagagcagcttccaaatcacagaggagacccagattgacaccaccctgcggcgcagccagatgtccccccaaggcctgcgggtccgtctgcggcccggtgaggagcggcattttgagctggaggtgtttgagccactggagagccccgtggacctgtacatcctcatggacttctccaactccatgtccgatgatctggacaacctcaagaagatggggcagaacctggctcgggtcctgagccagctcaccagcgactacactattggatttggcaagtttgtggacaaagtcagcgtcccgcagacggacatgaggcctgagaagctgaaggagccctggcccaacagtgacccccccttctccttcaagaacgtcatcagcctgacagaagatgtggatgagttccggaataaactgcagggagagcggatctcaggcaacctggatgctcctgagggcggcttcgatgccatcctgcagacagctgtgtgcacgagggacattggctggcgcccggacagcacccacctgctggtcttctccaccgagtcagccttccactatgaggctgatggcgccaacgtgctggctggcatcatgagccgcaacgatgaacggtgccacctggacaccacgggcacctacacccagtacaggacacaggactacccgtcggtgcccaccctggtgcgcctgctcgccaagcacaacatcatccccatctttgctgtcaccaactactcctatagctactacgagaagcttcacacctatttccctgtctcctcactgggggtgctgcaggaggactccggatccgctccaacctggacatccgggccctagacagcccccgaggccttcggacagaggtcacctccaagatgttccagaagacgaggactgggtcctttcacatccggcggggggaagtgggtatataccaggtgcagctgcgggcccttgagcacgtggatgggacgcacgtgtgccagctgccggaggaccagaagggcaacatccatctgaaaccttccttctccgacggcctcaagatggacgcgggcatcatctgtgatgtgtgcacctgcgagctgcaaaaagaggtgcggtcagctcgctgcagcttcaacggagacttcgtgtgcggacagtgtgtgtgcagcgagggctggagtggccagacctgcaactgctccaccggctctctgagtgacattcagccctgcctgcgggagggcgaggacaagccgtgctccggccgtggggagtgccagtgcgggcactgtgtgtgctacggcgaaggccgctacgagggtcagttctgcgagtatgacaacttccagtgtccccgcacttccgggttcctctgcaatgaccgaggacgctgctccatgggccagtgtgtgtgtgagcctggttggacaggcccaagctgtgactgtcccctcagcaatgccacctgcatcgacagcaatgggggcatctgtaatggacgtggccactgtgagtgtggccgctgccactgccaccagcagtcgctctacacggacaccatctgcgagatcaactactcggcgatccacccgggcctctgcgaggacctacgctcctgcgtgcagtgccaggcgtggggcaccggcgagaagaaggggcgcacgtgtgaggaatgcaacttcaaggtcaagatggtggacgagcttaagagagccgaggaggtggtggtgcgctgctccttccgggacgaggatgacgactgcacctacagctacaccatggaaggtgacggcgcccctgggcccaacagcactgtcctggtgcacaagaagaaggactgccctccgggctccttctggtggctcatccccctgctcctcctcctcctgccgctcctggccctgctactgctgctatgctggaagtactgtgcctgctgcaaggcctgcctggcacttctcccgtgctgcaaccgaggtcacatggtgggctttaaggaagaccactacatgctgcgggagaacctgatggcctctgaccacttggacacgcccatgctgcgcagcgggaacctcaagggccgtgacgtggtccgctggaaggtcaccaacaacatgcagcggcctggctttgccactcatgccgccagcatcaaccccacagagctggtgccctacgggctgtccttgcgcctggcccgcctttgcaccgagaacctgctgaagcctgacactcgggagtgcgcccagctgcgccaggaggtggaggagaacctgaacgaggtctacaggcagatctccggtgtacacaagctccagcagaccaagttccggcagcagcccaatgccgggaaaaagcaagaccacaccattgtggacacagtgctgatggcgccccgctcggccaagccggccctgctgaagcttacagagaagcaggtggaacagagggccttccacgacctcaaggtggcccccggctactacaccctcactgcagaccaggacgcccggggcatggtggagttccaggagggcgtggagctggtggacgtacgggtgcccctctttatccggcctgaggatgacgacgagaagcagctgctggtggaggccatcgacgtgcccgcaggcactgccaccctcggccgccgcctggtaaacatcaccatcatcaaggagcaagccagagacgtggtgtcctttgagcagcctgagttctcggtcagccgcggggaccaggtggcccgcatccctgtcatccggcgtgtcctggacggcgggaagtcccaggtctcctaccgcacacaggatggcaccgcgcagggcaaccgggactacatccccgtggagggtgagctgctgttccagcctggggaggcctggaaagagctgcaggtgaagctcctggagctgcaagaagttgactccctcctgcggggccgccaggtccgccgtttccacgtccagctcagcaaccctaagtttggggcccacctgggccagccccactccaccaccatcatcatcagggacccagatgaactggaccggagcttcacgagtcagatgttgtcatcacagccaccccctcacggcgacctgggcgccccgcagaaccccaatgctaaggccgctgggtccaggaagatccatttcaactggctgcccccttctggcaagccaatggggtacagggtaaagtactggattcagggtgactccgaatccgaagcccacctgctcgacagcaaggtgccctcagtggagctcaccaacctgtacccgtattgcgactatgagatgaaggtgtgcgcctacggggctcagggcgagggaccctacagctccctggtgtcctgccgcacccaccaggaagtgcccagcgagccagggcgtctggccttcaatgtcgtctcctccacggtgacccagctgagctgggctgagccggctgagaccaacggtgagatcacagcctacgaggtctgctatggcctggtcaacgatgacaaccgacctattgggcccatgaagaaagtgctggttgacaaccctaagaaccggatgctgcttattgagaaccttcgggagtcccagccctaccgctacacggtgaaggcgcgcaacggggccggctgggggcctgagcgggaggccatcatcaacctggccacccagcccaagaggcccatgtccatccccatcatccctgacatccctatcgtggacgcccagagcggggaggactacgacagcttccttatgtacagcgatgacgttctacgctctccatcgggcagccagaggcccagcgtctccgatgacactgagcacctggtgaatggccggatggactttgccttcccgggcagcaccaactccctgcacaggatgaccacgaccagtgctgctgcctatggcacccacctgagcccacacgtgccccaccgcgtgctaagcacatcctccaccctcacacgggactacaactcactgacccgctcagaacactcacactcgaccacactgcccagggactactccaccctcacctccgtctcctcccacgactctcgcctgactgctggtgtgcccgacacgcccacccgcctggtgttctctgccctggggcccacatctctcagagtgagctggcaggagccgcggtgcgagcggccgctgcagggctacagtgtggagtaccagctgctgaacggcggtgagctgcatcggctcaacatccccaaccctgcccagacctcggtggtggtggaagacctcctgcccaaccactcctacgtgttccgcgtgcgggcccagagccaggaaggctggggccgagagcgtgagggtgtcatcaccattgaatcccaggtgcacccgcagagcccactgtgtcccctgccaggctccgccttcactttgagcactcccagtgccccaggcccgctggtgttcactgccctgagcccagactcgctgcagctgagctgggagcggccacggaggcccaatggggatatcgtcggctacctggtgacctgtgagatggcccaaggaggagggccagccaccgcattccgggtggatggagacagccccgagagccggctgaccgtgccgggcctcagcgagaacgtgccctacaagttcaaggtgcaggccaggaccactgagggcttcgggccagagcgcgagggcatcatcaccatagagtcccaggatggaggacccttcccgcagctgggcagccgtgccgggctcttccagcacccgctgcaaagcgagtacagcagcatcaccaccacccacaccagcgccaccgagcccttcctagtggatgggccgaccctgggggcccagcacctggaggcaggcggctccctcacccggcatgtgacccaggagtttgtgagccggacactgaccaccagcggaacccttagcacccacatggaccaacagttcttccaaacttgaccgcaccctgccccacccccgccatgtcccactaggcgtcctcccgactcctctcccggagcctcctcagctactccatccttgcacccctgggggcccagcccacccgcatgcacagagcaggggctaggtgtctcctgggaggcatgaagggggcaaggtccgtcctctgtgggcccaaacctatttgtaaccaaagagctgggagcagcacaaggacccagcctttgttctgcacttaataaatggttttgctactgcta

SEQ ID NO: 330383 - DNA, 3616 bp, Homo sapiens
tgggccaaacgcaccgtcaagcagagtgcaagagccgcgtcacagcaatctccccatgtaaggccactaggagcagagagagagccgaggaggtggtggtgcgctgctccttccgggacgaggatgacgactgcacctacagctacaccatggaaggtgacggcgcccctgggcccaacagcactgtcctggtgcacaagaagaaggactgccctccgggctccttctggtggctcatccccctgctcctcctcctcctgccgctcctggccctgctactgctgctatgctggaagtactgtgcctgctgcaaggcctgcctggcacttctcccgtgctgcaaccgaggtcacatggtgggctttaaggaagaccactacatgctgcgggagaacctgatggcctctgaccacttggacacgcccatgctgcgcagcgggaacctcaagggccgtgacgtggtccgctggaaggtcaccaacaacatgcagcggcctggctttgccactcatgccgccagcatcaaccccacagagctggtgccctacgggctgtccttgcgcctggcccgcctttgcaccgagaacctgctgaagcctgacactcgggagtgcgcccagctgcgccaggaggtggaggagaacctgaacgaggtctacaggcagatctccggtgtacacaagctccagcagaccaagttccggcagcagcccaatgccgggaaaaagcaagaccacaccattgtggacacagtgctgatggcgccccgctcggccaagccggccctgctgaagcttacagagaagcaggtggaacagagggccttccacgacctcaaggtggcccccggctactacaccctcactgcagaccaggacgcccggggcatggtggagttccaggagggcgtggagctggtggacgtacgggtgcccctctttatccggcctgaggatgacgacgagaagcagctgctggtggaggccatcgacgtgcccgcaggcactgccaccctcggccgccgcctggtaaacatcaccatcatcaaggagcaagccagagacgtggtgtcctttgagcagcctgagttctcggtcagccgcggggaccaggtggcccgcatccctgtcatccggcgtgtcctggacggcgggaagtcccaggtctcctaccgcacacaggatggcaccgcgcagggcaaccgggactacatccccgtggagggtgagctgctgttccagcctggggaggcctggaaagagctgcaggtgaagctcctggagctgcaagaagttgactccctcctgcggggccgccaggtccgccgtttccacgtccagctcagcaaccctaagtttggggcccacctgggccagccccactccaccaccatcatcatcagggacccagatgaactggaccggagcttcacgagtcagatgttgtcatcacagccaccccctcacggcgacctgggcgccccgcagaaccccaatgctaaggccgctgggtccaggaagatccatttcaactggctgcccccttctggcaagccaatggggtacagggtaaagtactggattcagggtgactccgaatccgaagcccacctgctcgacagcaaggtgccctcagtggagctcaccaacctgtacccgtattgcgactatgagatgaaggtgtgcgcctacggggctcagggcgagggaccctacagctccctggtgtcctgccgcacccaccaggaagtgcccagcgagccagggcgtctggccttcaatgtcgtctcctccacggtgacccagctgagctgggctgagccggctgagaccaacggtgagatcacagcctacgaggtctgctatggcctggtcaacgatgacaaccgacctattgggcccatgaagaaagtgctggttgacaaccctaagaaccggatgctgcttattgagaaccttcgggagtcccagccctaccgctacacggtgaaggcgcgcaacggggccggctgggggcctgagcgggaggccatcatcaacctggccacccagcccaagaggcccatgtccatccccatcatccctgacatccctatcgtggacgcccagagcggggaggactacgacagcttccttatgtacagcgatgacgttctacgctctccatcgggcagccagaggcccagcgtctccgatgacactgagcacctggtgaatggccggatggactttgccttcccgggcagcaccaactccctgcacaggatgaccacgaccagtgctgctgcctatggcacccacctgagcccacacgtgccccaccgcgtgctaagcacatcctccaccctcacacgggactacaactcactgacccgctcagaacactcacactcgaccacactgcccagggactactccaccctcacctccgtctcctcccacgactctcgcctgactgctggtgtgcccgacacgcccacccgcctggtgttctctgccctggggcccacatctctcagagtgagctggcaggagccgcggtgcgagcggccgctgcagggctacagtgtggagtaccagctgctgaacggcggtgagctgcatcggctcaacatccccaaccctgcccagacctcggtggtggtggaagacctcctgcccaaccactcctacgtgttccgcgtgcgggcccagagccaggaaggctggggccgagagcgtgagggtgtcatcaccattgaatcccaggtgcacccgcagagcccactgtgtcccctgccaggctccgccttcactttgagcactcccagtgccccaggcccgctggtgttcactgccctgagcccagactcgctgcagctgagctgggagcggccacggaggcccaatggggatatcgtcggctacctggtgacctgtgagatggcccaaggaggagggccagccaccgcattccgggtggatggagacagccccgagagccggctgaccgtgccgggcctcagcgagaacgtgccctacaagttcaaggtgcaggccaggaccactgagggcttcgggccagagcgcgagggcatcatcaccatagagtcccaggatggaggacccttcccgcagctgggcagccgtgccgggctcttccagcacccgctgcaaagcgagtacagcagcatcaccaccacccacaccagcgccaccgagcccttcctagtggatgggccgaccctgggggcccagcacctggaggcaggcggctccctcacccggcatgtgacccaggagtttgtgagccggacactgaccaccagcggaacccttagcacccacatggaccaacagttcttccaaacttgaccgcaccctgccccacccccgccatgtcccactaggcgtcctcccgactcctctcccggagcctcctcagctactccatccttgcacccctgggggcccagcccacccgcatgcacagagcaggggctaggtgtctcctgggaggcatgaagggggcaaggtccgtcctctgtgggcccaaacctatttgtaaccaaagagctgggagcagcacaaggacccagcctttgttctgcacttaataaatggttttgctactgcta

SEQ ID NO: 330384 - DNA, 5308 bp, Homo sapiens
  misc_feature (28)..(28): n is a, c, g, or t
  misc_feature (30)..(30): n is a, c, g, or t
gcgctgcccgcctcgtccccaccccccnancccccgcgcccgccctcggacagtccctgctcgcccgcgcgctgcagccccatctcctagcggcagcccaggcgcggagggagcgagtccgccccgaggtaggtccaggacgggcgcacagcagcagccgaggctggccgggagagggaggaagaggatggcagggccacgccccagcccatgggccaggctgctcctggcagccttgatcagcgtcagcctctctgggaccttggcaaaccgctgcaagaaggccccagtgaagagctgcacggagtgtgtccgtgtggataaggactgcgcctactgcacagacgagatgttcagggaccggcgctgcaacacccaggcggagctgctggccgcgggctgccagcgggagagcatcgtggtcatggagagcagcttccaaatcacagaggagacccagattgacaccaccctgcggcgcagccagatgtccccccaaggcctgcgggtccgtctgcggcccggtgaggagcggcattttgagctggaggtgtttgagccactggagagccccgtggacctgtacatcctcatggacttctccaactccatgtccgatgatctggacaacctcaagaagatggggcagaacctggctcgggtcctgagccagctcaccagcgactacactattggatttggcaagtttgtggacaaagtcagcgtcccgcagacggacatgaggcctgagaagctgaaggagccctggcccaacagtgacccccccttctccttcaagaacgtcatcagcctgacagaagatgtggatgagttccggaataaactgcagggagagcggatctcaggcaacctggatgctcctgagggcggcttcgatgccatcctgcagacagctgtgtgcacgagggacattggctggcgcccggacagcacccacctgctggtcttctccaccgagtcagccttccactatgaggctgatggcgccaacgtgctggctggcatcatgagccgcaacgatgaacggtgccacctggacaccacgggcacctacacccagtacaggacacaggactacccgtcggtgcccaccctggtgcgcctgctcgccaagcacaacatcatccccatctttgctgtcaccaactactcctatagctactacgagaagcttcacacctatttccctgtctcctcactgggggtgctgcaggaggactcgtccaacatcgtggagctgctggaggaggccttcaatcggatccgctccaacctggacatccgggccctagacagcccccgaggccttcggacagaggtcacctccaagatgttccagaagacgaggactgggtcctttcacatccggcggggggaagtgggtatataccaggtgcagctgcgggcccttgagcacgtggatgggacgcacgtgtgccagctgccggaggaccagaagggcaacatccatctgaaaccttccttctccgacggcctcaagatggacgcgggcatcatctgtgatgtgtgcacctgcgagctgcaaaaagaggtgcggtcagctcgctgcagcttcaacggagacttcgtgtgcggacagtgtgtgtgcagcgagggctggagtggccagacctgcaactgctccaccggctctctgagtgacattcagccctgcctgcgggagggcgaggacaagccgtgctccggccgtggggagtgccagtgcgggcactgtgtgtgctacggcgaaggccgctacgagggtcagttctgcgagtatgacaacttccagtgtccccgcacttccgggttcctctgcaatgaccgaggacgctgctccatgggccagtgtgtgtgtgagcctggttggacaggcccaagctgtgactgtcccctcagcaatgccacctgcatcgacagcaatgggggcatctgtaatggacgtggccactgtgagtgtggccgctgccactgccaccagcagtcgctctacacggacaccatctgcgagatcaactactcggcgatccacccgggcctctgcgaggacctacgctcctgcgtgcagtgccaggcgtggggcaccggcgagaagaaggggcgcacgtgtgaggaatgcaacttcaaggtcaagatggtggacgagcttaagagagccgaggaggtggtggtgcgctgctccttccgggacgaggatgacgactgcacctacagctacaccatggaaggtgacggcgcccctgggcccaacagcactgtcctggtgcacaagaagaaggactgccctccgggctccttctggtggctcatccccctgctcctcctcctcctgccgctcctggccctgctactgctgctatgctggaagtactgtgcctgctgcaaggcctgcctggcacttctcccgtgctgcaaccgaggtcacatggtgggctttaaggaagaccactacatgctgcgggagaacctgatggcctctgaccacttggacacgcccatgctgcgcagcgggaacctcaagggccgtgacgtggtccgctggaaggtcaccaacaacatgcagcggcctggctttgccactcatgccgccagcatcaaccccacagagctggtgccctacgggctgtccttgcgcctggcccgcctttgcaccgagaacctgctgaagcctgacactcgggagtgcgcccagctgcgccaggaggtggaggagaacgtaaggacccaggaactaggcctggccggagatgtggctgaacgaggtctacaggcagatctccggtgtacacaagctccagcagaccaagttccggcagcagcccaatgccgggaaaaagcaagaccacaccattgtggacacagtgctgatggcgccccgctcggccaagccggccctgctgaagcttacagagaagcaggtggaacagagggccttccacgacctcaaggtggcccccggctactacaccctcactgcagaccaggacgcccggggcatggtggagttccaggagggcgtggagctggtggacgtacgggtgcccctctttatccggcctgaggatgacgacgagaagcagctgctggtggaggccatcgacgtgcccgcaggcactgccaccctcggccgccgcctggtaaacatcaccatcatcaaggagcaagccagagacgtggtgtcctttgagcagcctgagttctcggtcagccgcggggaccaggtggcccgcatccctgtcatccggcgtgtcctggacggcgggaagtcccaggtctcctaccgcacacaggatggcaccgcgcagggcaaccgggactacatccccgtggagggtgagctgctgttccagcctggggaggcctggaaagagctgcaggtgaagctcctggagctgcaagaagttgactccctcctgcggggccgccaggtccgccgtttccacgtccagctcagcaaccctaagtttggggcccacctgggccagccccactccaccaccatcatcatcagggacccagatgaactggaccggagcttcacgagtcagatgttgtcatcacagccaccccctcacggcgacctgggcgccccgcagaaccccaatgctaaggccgctgggtccaggaagatccatttcaactggctgcccccttctggcaagccaatggggtacagggtaaagtactggattcagggtgactccgaatccgaagcccacctgctcgacagcaaggtgccctcagtggagctcaccaacctgtacccgtattgcgactatgagatgaaggtgtgcgcctacggggctcagggcgagggaccctacagctccctggtgtcctgccgcacccaccaggaagtgcccagcgagccagggcgtctggccttcaatgtcgtctcctccacggtgacccagctgagctgggctgagccggctgagaccaacggtgagatcacagcctacgaggtctgctatggcctggtcaacgatgacaaccgacctattgggcccatgaagaaagtgctggttgacaaccctaagaaccggatgctgcttattgagaaccttcgggagtcccagccctaccgctacacggtgaaggcgcgcaacggggccggctgggggcctgagcgggaggccatcatcaacctggccacccagcccaagaggcccatgtccatccccatcatccctgacatccctatcgtggacgcccagagcggggaggactacgacagcttccttatgtacagcgatgacgttctacgctctccatcgggcagccagaggcccagcgtctccgatgacactgagcacctggtgaatggccggatggactttgccttcccgggcagcaccaactccctgcacaggatgaccacgaccagtgctgctgcctatggcacccacctgagcccacacgtgccccaccgcgtgctaagcacatcctccaccctcacacgggactacaactcactgacccgctcagaacactcacactcgaccacactgcccagggactactccaccctcacctccgtctcctcccacgactctcgcctgactgctggtgtgcccgacacgcccacccgcctggtgttctctgccctggggcccacatctctcagagtgagctggcaggagccgcggtgcgagcggccgctgcagggctacagtgtggagtaccagctgctgaacggcggtgagctgcatcggctcaacatccccaaccctgcccagacctcggtggtggtggaagacctcctgcccaaccactcctacgtgttccgcgtgcgggcccagagccaggaaggctggggccgagagcgtgagggtgtcatcaccattgaatcccaggtgcacccgcagagcccactgtgtcccctgccaggctccgccttcactttgagcactcccagtgccccaggcccgctggtgttcactgccctgagcccagactcgctgcagctgagctgggagcggccacggaggcccaatggggatatcgtcggctacctggtgacctgtgagatggcccaaggaggagggccagccaccgcattccgggtggatggagacagccccgagagctcagctactccatccttgcacccctgggggcccagcccacccgcatgcacagagcaggggctaggtgtctcctgggaggcatgaagggggcaaggtccgtcctctgtgggcccaaacctatttgtaaccaaagagctgggagcagcacaaggacccagcctttgttctgcacttaataaatggttttgctactgcta

SEQ ID NO: 330385 - DNA, 1773 bp, Homo sapiens
gcctagcagaacagttatttctccagtcctggaagggaggcagggacctattgggcccatgaagaaagtgctggttgacaaccctaagaaccggatgctgcttattgagaaccttcgggagtcccagccctaccgctacacggtgaaggcgcgcaacggggccggctgggggcctgagcgggaggccatcatcaacctggccacccagcccaagaggcccatgtccatccccatcatccctgacatccctatcgtggacgcccagagcggggaggactacgacagcttccttatgtacagcgatgacgttctacgctctccatcgggcagccagaggcccagcgtctccgatgacactgagcacctggtgaatggccggatggactttgccttcccgggcagcaccaactccctgcacaggatgaccacgaccagtgctgctgcctatggcacccacctgagcccacacgtgccccaccgcgtgctaagcacatcctccaccctcacacgggactacaactcactgacccgctcagaacactcacactcgaccacactgcccagggactactccaccctcacctccgtctcctcccacgactctcgcctgactgctggtgtgcccgacacgcccacccgcctggtgttctctgccctggggcccacatctctcagagtgagctggcaggagccgcggtgcgagcggccgctgcagggctacagtgtggagtaccagctgctgaacggcggtgagctgcatcggctcaacatccccaaccctgcccagacctcggtggtggtggaagacctcctgcccaaccactcctacgtgttccgcgtgcgggcccagagccaggaaggctggggccgagagcgtgagggtgtcatcaccattgaatcccaggtgcacccgcagagcccactgtgtcccctgccaggctccgccttcactttgagcactcccagtgccccaggcccgctggtgttcactgccctgagcccagactcgctgcagctgagctgggagcggccacggaggcccaatggggatatcgtcggctacctggtgacctgtgagatggcccaaggaggagggccagccaccgcattccgggtggatggagacagccccgagagccggctgaccgtgccgggcctcagcgagaacgtgccctacaagttcaaggtgcaggccaggaccactgagggcttcgggccagagcgcgagggcatcatcaccatagagtcccaggatggaggacccttcccgcagctgggcagccgtgccgggctcttccagcacccgctgcaaagcgagtacagcagcatcaccaccacccacaccagcgccaccgagcccttcctagtggatgggccgaccctgggggcccagcacctggaggcaggcggctccctcacccggcatgtgacccaggagtttgtgagccggacactgaccaccagcggaacccttagcacccacatggaccaacagttcttccaaacttgaccgcaccctgccccacccccgccatgtcccactaggcgtcctcccgactcctctcccggagcctcctcagctactccatccttgcacccctgggggcccagcccacccgcatgcacagagcaggggctaggtgtctcctgggaggcatgaagggggcaaggtccgtcctctgtgggcccaaacctatttgtaaccaaagagctgggagcagcacaaggacccagcctttgttctgcacttaataaatggttttgctactgcta

SEQ ID NO: 330386 - DNA, 4886 bp, Homo sapiens
  misc_feature (28)..(28): n is a, c, g, or t
  misc_feature (30)..(30): n is a, c, g, or t
gcgctgcccgcctcgtccccaccccccnancccccgcgcccgccctcggacagtccctgctcgcccgcgcgctgcagccccatctcctagcggcagcccaggcgcggagggagcgagtccgccccgaggtaggtccaggacgggcgcacagcagcagccgaggctggccgggagagggaggaagaggatggcagggccacgccccagcccatgggccaggctgctcctggcagccttgatcagcgtcagcctctctgggaccttggcaaaccgctgcaagaaggccccagtgaagagctgcacggagtgtgtccgtgtggataaggactgcgcctactgcacagacgagatgttcagggaccggcgctgcaacacccaggcggagctgctggccgcgggctgccagcgggagagcatcgtggtcatggagagcagcttccaaatcacagaggagacccagattgacaccaccctgcggcgcagccagatgtccccccaaggcctgcgggtccgtctgcggcccggtgaggagcggcattttgagctggaggtgtttgagccactggagagccccgtggacctgtacatcctcatggacttctccaactccatgtccgatgatctggacaacctcaagaagatggggcagaacctggctcgggtcctgagccagctcaccagcgactacactattggatttggcaagtttgtggacaaagtcagcgtcccgcagacggacatgaggcctgagaagctgaaggagccctggcccaacagtgacccccccttctccttcaagaacgtcatcagcctgacagaagatgtggatgagttccggaataaactgcagggagagcggatctcaggcaacctggatgctcctgagggcggcttcgatgccatcctgcagacagctgtgtgcacgagggacattggctggcgcccggacagcacccacctgctggtcttctccaccgagtcagccttccactatgaggctgatggcgccaacgtgctggctggcatcatgagccgcaacgatgaacggtgccacctggacaccacgggcacctacacccagtacaggacacaggactacccgtcggtgcccaccctggtgcgcctgctcgccaagcacaacatcatccccatctttgctgtcaccaactactcctatagctactacgagaagcttcacacctatttccctgtctcctcactgggggtgctgcaggaggactcgtccaacatcgtggagctgctggaggaggccttcaatcggatccgctccaacctggacatccgggccctagacagcccccgaggccttcggacagaggtcacctccaagatgttccagaagacgaggactgggtcctttcacatccggcggggggaagtgggtatataccaggtgcagctgcgggcccttgagcacgtggatgggacgcacgtgtgccagctgccggaggaccagaagggcaacatccatctgaaaccttccttctccgacggcctcaagatggacgcgggcatcatctgtgatgtgtgcacctgcgagctgcaaaaagaggtgcggtcagctcgctgcagcttcaacggagacttcgtgtgcggacagtgtgtgtgcagcgagggctggagtggccagacctgcaactgctccaccggctctctgagtgacattcagccctgcctgcgggagggcgaggacaagccgtgctccggccgtggggagtgccagtgcgggcactgtgtgtgctacggcgaaggccgctacgagggtcagttctgcgagtatgacaacttccagtgtccccgcacttccgggttcctctgcaatgaccgaggacgctgctccatgggccagtgtgtgtgtgagcctggttggacaggcccaagctgtgactgtcccctcagcaatgccacctgcatcgacagcaatgggggcatctgtaatggacgtggccactgtgagtgtggccgctgccactgccaccagcagtcgctctacacggacaccatctgcgagatcaactactcggcgatccacccgggcctctgcgaggacctacgctcctgcgtgcagtgccaggcgtggggcaccggcgagaagaaggggcgcacgtgtgaggaatgcaacttcaaggtcaagatggtggacgagcttaagagagccgaggaggtggtggtgcgctgctccttccgggacgaggatgacgactgcacctacagctacaccatggaaggtgacggcgcccctgggcccaacagcactgtcctggtgcacaagaagaaggactgccctccgggctccttctggtggctcatccccctgctcctcctcctcctgccgctcctggccctgctactgctgctatgctggaagtactgtgcctgctgcaaggcctgcctggcacttctcccgtgctgcaaccgaggtcacatggtgggctttaaggaagaccactacatgctgcgggagaacctgatggcctctgaccacttggacacgcccatgctgcgcagcgggaacctcaagggccgtgacgtggtccgctggaaggtcaccaacaacatgcagcggcctggctttgccactcatgccgccagcatcaaccccacagagctggtgccctacgggctgtccttgcgcctggcccgcctttgcaccgagaacctgctgaagcctgacactcgggagtgcgcccagctgcgccaggaggtggaggagaacgtaaggacccaggaactaggcctggccggagatgtggctgaacgaggtctacaggcagatctccggtgtacacaagctccagcagaccaagttccggcagcagcccaatgccgggaaaaagcaagaccacaccattgtggacacagtgctgatggcgccccgctcggccaagccggccctgctgaagcttacagagaagcaggtggaacagagggccttccacgacctcaaggtggcccccggctactacaccctcactgcagaccaggacgcccggggcatggtggagttccaggagggcgtggagctggtggacgtacgggtgcccctctttatccggcctgaggatgacgacgagaagcagctgctggtggaggccatcgacgtgcccgcaggcactgccaccctcggccgccgcctggtaaacatcaccatcatcaaggagcaagccagagacgtggtgtcctttgagcagcctgagttctcggtcagccgcggggaccaggtggcccgcatccctgtcatccggcgtgtcctggacggcgggaagtcccaggtctcctaccgcacacaggatggcaccgcgcagggcaaccgggactacatccccgtggagggtgagctgctgttccagcctggggaggcctggaaagagctgcaggtgaagctcctggagctgcaagaagttgactccctcctgcggggccgccaggtccgccgtttccacgtccagctcagcaaccctaagtttggggcccacctgggccagccccactccaccaccatcatcatcagggacccagacgaccagtgctgctgcctatggcacccacctgagcccacacgtgccccaccgcgtgctaagcacatcctccaccctcacacgggactacaactcactgacccgctcagaacactcacactcgaccacactgcccagggactactccaccctcacctccgtctcctcccacgactctcgcctgactgctggtgtgcccgacacgcccacccgcctggtgttctctgccctggggcccacatctctcagagtgagctggcaggagccgcggtgcgagcggccgctgcagggctacagtgtggagtaccagctgctgaacggcggtgagctgcatcggctcaacatccccaaccctgcccagacctcggtggtggtggaagacctcctgcccaaccactcctacgtgttccgcgtgcgggcccagagccaggaaggctggggccgagagcgtgagggtgtcatcaccattgaatcccaggtgcacccgcagagcccactgtgtcccctgccaggctccgccttcactttgagcactcccagtgccccaggcccgctggtgttcactgccctgagcccagactcgctgcagctgagctgggagcggccacggaggcccaatggggatatcgtcggctacctggtgacctgtgagatggcccaaggaggagggccagccaccgcattccgggtggatggagacagccccgagagccggctgaccgtgccgggcctcagcgagaacgtgccctacaagttcaaggtgcaggccaggaccactgagggcttcgggccagagcgcgagggcatcatcaccatagagtcccaggatggaggacccttcccgcagctgggcagccgtgccgggctcttccagcacccgctgcaaagcgagtacagcagcatcaccaccacccacaccagcgccaccgagcccttcctagtggatgggccgaccctgggggcccagcacctggaggcaggcggctccctcacccggcatgtgacccaggagtttgtgagccggacactgaccaccagcggaacccttagcacccacatggaccaacagttcttccaaacttgaccgcaccctgccccacccccgccatgtcccactaggcgtcctcccgactcctctcccggagcctcctcagctactccatccttgcacccctgggggcccagcccacccgcatgcacagagcaggggctaggtgtctcctgggaggcatgaagggggcaaggtccgtcctctgtgggcccaaacctatttgtaaccaaagagctgggagcagcacaaggacccagcctttgttctgcacttaataaatggttttgctactgcta

SEQ ID NO: 330387 - DNA, 4736 bp, Homo sapiens
  misc_feature (28)..(28): n is a, c, g, or t
  misc_feature (30)..(30): n is a, c, g, or t
gcgctgcccgcctcgtccccaccccccnancccccgcgcccgccctcggacagtccctgctcgcccgcgcgctgcagccccatctcctagcggcagcccaggcgcggagggagcgagtccgccccgaggtaggtccaggacgggcgcacagcagcagccgaggctggccgggagagggaggaagaggatggcagggccacgccccagcccatgggccaggctgctcctggcagccttgatcagcgtcagcctctctgggaccttggcaaaccgctgcaagaaggccccagtgaagagctgcacggagtgtgtccgtgtggataaggactgcgcctactgcacagacgagatgttcagggaccggcgctgcaacacccaggcggagctgctggccgcgggctgccagcgggagagcatcgtggtcatggagagcagcttccaaatcacagaggagacccagattgacaccaccctgcggcgcagccagatgtccccccaaggcctgcgggtccgtctgcggcccggtgaggagcggcattttgagctggaggtgtttgagccactggagagccccgtggacctgtacatcctcatggacttctccaactccatgtccgatgatctggacaacctcaagaagatggggcagaacctggctcgggtcctgagccagctcaccagcgactacactattggatttggcaagtttgtggacaaagtcagcgtcccgcagacggacatgaggcctgagaagctgaaggagccctggcccaacagtgacccccccttctccttcaagaacgtcatcagcctgacagaagatgtggatgagttccggaataaactgcagggagagcggatctcaggcaacctggatgctcctgagggcggcttcgatgccatcctgcagacagctgtgtgcacgagggacattggctggcgcccggacagcacccacctgctggtcttctccaccgagtcagccttccactatgaggctgatggcgccaacgtgctggctggcatcatgagccgcaacgatgaacggtgccacctggacaccacgggcacctacacccagtacaggacacaggactacccgtcggtgcccaccctggtgcgcctgctcgccaagcacaacatcatccccatctttgctgtcaccaactactcctatagctactacgagaagcttcacacctatttccctgtctcctcactgggggtgctgcaggaggactcgtccaacatcgtggagctgctggaggaggccttcaatcggatccgctccaacctggacatccgggccctagacagcccccgaggccttcggacagaggtcacctccaagatgttccagaagacgaggactgggtcctttcacatccggcggggggaagtgggtatataccaggtgcagctgcgggcccttgagcacgtggatgggacgcacgtgtgccagctgccggaggaccagaagggcaacatccatctgaaaccttccttctccgacggcctcaagatggacgcgggcatcatctgtgatgtgtgcacctgcgagctgcaaaaagaggtgcggtcagctcgctgcagcttcaacggagacttcgtgtgcggacagtgtgtgtgcagcgagggctggagtggccagacctgcaactgctccaccggctctctgagtgacattcagccctgcctgcgggagggcgaggacaagccgtgctccggccgtggggagtgccagtgcgggcactgtgtgtgctacggcgaaggccgctacgagggtcagttctgcgagtatgacaacttccagtgtccccgcacttccgggttcctctgcaatgaccgaggacgctgctccatgggccagtgtgtgtgtgagcctggttggacaggcccaagctgtgactgtcccctcagcaatgccacctgcatcgacagcaatgggggcatctgtaatggacgtggccactgtgagtgtggccgctgccactgccaccagcagtcgctctacacggacaccatctgcgagatcaactactcggcgatccacccgggcctctgcgaggacctacgctcctgcgtgcagtgccaggcgtggggcaccggcgagaagaaggggcgcacgtgtgaggaatgcaacttcaaggtcaagatggtggacgagcttaagagagccgaggaggtggtggtgcgctgctccttccgggacgaggatgacgactgcacctacagctacaccatggaaggtgacggcgcccctgggcccaacagcactgtcctggtgcacaagaagaaggactgccctccgggctccttctggtggctcatccccctgctcctcctcctcctgccgctcctggccctgctactgctgctatgctggaagtactgtgcctgctgcaaggcctgcctggcacttctcccgtgctgcaaccgaggtcacatggtgggctttaaggaagaccactacatgctgcgggagaacctgatggcctctgaccacttggacacgcccatgctgcgcagcgggaacctcaagggccgtgacgtggtccgctggaaggtcaccaacaacatgcagcggcctggctttgccactcatgccgccagcatcaaccccacagagctggtgccctacgggctgtccttgcgcctggcccgcctttgcaccgagaacctgctgaagcctgacactcgggagtgcgcccagctgcgccaggaggtggaggagaacgtaaggacccaggaactaggcctggccggagatgtggctgaacgaggtctacaggcagatctccggtgtacacaagctccagcagaccaagttccggcagcagcccaatgccgggaaaaagcaagaccacaccattgtggacacagtgctgatggcgccccgctcggccaagccggccctgctgaagcttacagagaagcaggtggaacagagggccttccacgacctcaaggtggcccccggctactacaccctcactgcagaccaggacgcccggggcatggtggagttccaggagggcgtggagctggtggacgtacgggtgcccctctttatccggcctgaggatgacgacgagaagcagctgctggtggaggccatcgacgtgcccgcaggcactgccaccctcggccgccgcctggtaaacatcaccatcatcaaggagcaagccagagacgtggtgtcctttgagcagcctgagttctcggtcagccgcggggaccaggtggcccgcatccctgtcatccggcgtgtcctggacggcgggaagtcccaggtctcctaccgcacacaggatggcaccgcgcagggcaaccgggactacatccccgtggagggtgagctgctgttccagcctggggaggcctggaaagagctgcaggtgaagctcctggagctgcaagaagttgactccctcctgcggggccgccaggtccgccgtttccacgtccagctcagcaaccctaagtttggggcccacctgggccagccccactccaccaccatcatcatcagggacccagatgaactggaccggagcttcacgagtcagatgttgtcatcacagccaccccctcacggcgacctgggcgccccgcagaaccccaatgctaaggccgctgggtccaggaagatccatttcaactggctgcccccttctggcaagccaatggggtacagggtaaagtactggattcagggtgactccgaatccgaagcccacctgctcgacagcaaggtgccctcagtggagctcaccaacctgtacccgtattgcgactatgagatgaaggtgtgcgcctacggggctcagggcgagggaccctacagctccctggtgtcctgccgcacccaccaggaagtgcccagcgagccagggcgtctggccttcaatgtcgtctcctccacggtgacccagctgagctgggctgagccggctgagaccaacggtgagatcacagcctacgaggtctgctatggcctggtcaacgatgacaaccgacctattgggcccatgaagaaagtgctggttgacaaccctaagaaccggatgctgcttattgagaaccttcgggagtcccagccctaccgctacacggtgaaggcgcgcaacggggccggctgggggcctgagcgggaggccatcatcaacctggccacccagcccaagaggcccatgtccatccccatcatccctgacatccctatcgtggacgcccagagcggggaggactacgacagcttccttatgtacagcgatgacgttctacgctctccatcgggcagccagaggcccagcgtctccgatgacactgagcacctggtgaatggccggatggactttgccttcccgggcagcaccaactccctgcacaggatgaccacgaccagtgctgctgcctatggcacccacctgagcccacacgtgccccaccgcgtgctaagcacatcctccaccctcacacgggactacaactcactgacccgctcagaacactcacactcgaccacactgcccagggactactccaccctcacctccgtctcctcccacggtgagtgacctcagccaaccctgcctctcccactaacccttcctctcttccagctcctggagcctcgggcttctgtctgctgtccccaccgcccattctccaacatacacacacgcatgcacacatgcacgcacacacgtgcacacgcatgcacacatgtacac

SEQ ID NO: 330388 - DNA, 1760 bp, Homo sapiens
gactctagagatcccccacacttcgatcgcgagaacaggaaggcttggggatctccccagggcagagctgactgcagacgcagcaaacccccgccactgccagggtcagcagtgctcacaccgatagagtggccggccagaggatatgggctgtggaagcctgggtggcccttgggctcctgcagggacagagggcctctgtccctagtggtttgagggaaactggttgtatttaagcaaaagccacccagagggtgggtgaccaggaatgtgcagggcccagcctgccccacggggcccgggtctggggcaggcctgaccaagggaccctgctctccccctgcagagcacctggtgaatggccggatggactttgccttcccgggcagcaccaactccctgcacaggatgaccacgaccagtgctgctgcctatggcacccacctgagcccacacgtgccccaccgcgtgctaagcacatcctccaccctcacacgggactacaactcactgacccgctcagaacactcacactcgaccacactgcccagggactactccaccctcacctccgtctcctcccacgactctcgcctgactgctggtgtgcccgacacgcccacccgcctggtgttctctgccctggggcccacatctctcagagtgagctggcaggagccgcggtgcgagcggccgctgcagggctacagtgtggagtaccagctgctgaacggcggtgagctgcatcggctcaacatccccaaccctgcccagacctcggtggtggtggaagacctcctgcccaaccactcctacgtgttccgcgtgcgggcccagagccaggaaggctggggccgagagcgtgagggtgtcatcaccattgaatcccaggtgcacccgcagagcccactgtgtcccctgccaggctccgccttcactttgagcactcccagtgccccaggcccgctggtgttcactgccctgagcccagactcgctgcagctgagctgggagcggccacggaggcccaatggggatatcgtcggctacctggtgacctgtgagatggcccaaggaggagggccagccaccgcattccgggtggatggagacagccccgagagccggctgaccgtgccgggcctcagcgagaacgtgccctacaagttcaaggtgcaggccaggaccactgagggcttcgggccagagcgcgagggcatcatcaccatagagtcccaggatggaggacccttcccgcagctgggcagccgtgccgggctcttccagcacccgctgcaaagcgagtacagcagcatcaccaccacccacaccagcgccaccgagcccttcctagtggatgggccgaccctgggggcccagcacctggaggcaggcggctccctcacccggcatgtgacccaggagtttgtgagccggacactgaccaccagcggaacccttagcacccacatggaccaacagttcttccaaacttgaccgcaccctgccccacccccgccatgtcccactaggcgtcctcccgactcctctcccggagcctcctcagctactccatccttgcacccctgggggcccagcccacccgcatgcacagagcaggggctaggtgtctcctgggaggcatgaagggggcaaggtccgtcctctgtgggcccaaacctatttgtaaccaaagagctgggagcagcacaaggacccagcctttgttctgcacttaataaatggttttgctactgcta

SEQ ID NO: 330389 - DNA, 1629 bp, Homo sapiens
ggaccaggctgggacctgggtgaccctctgaagcactctctctgccccaggacctattgggcccatgaagaaagtgctggttgacaaccctaagaaccggatgctgcttattgagaaccttcgggagtcccagccctaccgctacacggtgaaggcgcgcaacggggccggctgggggcctgagcgggaggccatcatcaacctggccacccagcccaagaggcccatgtccatccccatcatccctgacatccctatcgtggacgcccagagcggggaggactacgacagcttccttatgtacagcgatgacgttctacgctctccatcgggcagccagaggcccagcgtctccgatgacactgagcacctggtgaatggccggatggactttgccttcccgggcagcaccaactccctgcacaggatgaccacgaccagtgctgctgcctatggcacccacctgagcccacacgtgccccaccgcgtgctaagcacatcctccaccctcacacgggactacaactcactgacccgctcagaacactcacactcgaccacactgcccagggactactccaccctcacctccgtctcctcccacggtgagctgcatcggctcaacatccccaaccctgcccagacctcggtggtggtggaagacctcctgcccaaccactcctacgtgttccgcgtgcgggcccagagccaggaaggctggggccgagagcgtgagggtgtcatcaccattgaatcccaggtgcacccgcagagcccactgtgtcccctgccaggctccgccttcactttgagcactcccagtgccccaggcccgctggtgttcactgccctgagcccagactcgctgcagctgagctgggagcggccacggaggcccaatggggatatcgtcggctacctggtgacctgtgagatggcccaaggaggagggccagccaccgcattccgggtggatggagacagccccgagagccggctgaccgtgccgggcctcagcgagaacgtgccctacaagttcaaggtgcaggccaggaccactgagggcttcgggccagagcgcgagggcatcatcaccatagagtcccaggatggaggacccttcccgcagctgggcagccgtgccgggctcttccagcacccgctgcaaagcgagtacagcagcatcaccaccacccacaccagcgccaccgagcccttcctagtggatgggccgaccctgggggcccagcacctggaggcaggcggctccctcacccggcatgtgacccaggagtttgtgagccggacactgaccaccagcggaacccttagcacccacatggaccaacagttcttccaaacttgaccgcaccctgccccacccccgccatgtcccactaggcgtcctcccgactcctctcccggagcctcctcagctactccatccttgcacccctgggggcccagcccacccgcatgcacagagcaggggctaggtgtctcctgggaggcatgaagggggcaaggtccgtcctctgtgggcccaaacctatttgtaaccaaagagctgggagcagcacaaggacccagcctttgttctgcacttaataaatggttttgctactgcta

SEQ ID NO: 330390 - DNA, 1566 bp, Homo sapiens
tccattccatccacaggacccccgcctgcccacaggcgctaaccacctgccctaccatcagtgctgatgcctaactctgcctctgccctcccagggggcggggctggggctggggcaggagaggggccaggccagctgagcagttgagggggtggggctggcagactcacggggctcactctcttttggcacaagcagggcctgcaccctgctggaggatgtgcggtaggtgctgggcagcctggacagggtgttgcagggtgagtgagttgtccagccagcggtcagtgtagacatgccagctgagggagggaggtcagggggcagcactgtgactcccactgagaccctagcccctgcatctctggctgactgcggcctcctgtccccagactctcgcctgactgctggtgtgcccgacacgcccacccgcctggtgttctctgccctggggcccacatctctcagagtgagctggcaggagccgcggtgcgagcggccgctgcagggctacagtgtggagtaccagctgctgaacggcggtgagctgcatcggctcaacatccccaaccctgcccagacctcggtggtggtggaagacctcctgcccaaccactcctacgtgttccgcgtgcgggcccagagccaggaaggctggggccgagagcgtgagggtgtcatcaccattgaatcccaggtgcacccgcagagcccactgtgtcccctgccaggctccgccttcactttgagcactcccagtgccccaggcccgctggtgttcactgccctgagcccagactcgctgcagctgagctgggagcggccacggaggcccaatggggatatcgtcggctacctggtgacctgtgagatggcccaaggaggagggccagccaccgcattccgggtggatggagacagccccgagagccggctgaccgtgccgggcctcagcgagaacgtgccctacaagttcaaggtgcaggccaggaccactgagggcttcgggccagagcgcgagggcatcatcaccatagagtcccaggatggaggacccttcccgcagctgggcagccgtgccgggctcttccagcacccgctgcaaagcgagtacagcagcatcaccaccacccacaccagcgccaccgagcccttcctagtggatgggccgaccctgggggcccagcacctggaggcaggcggctccctcacccggcatgtgacccaggagtttgtgagccggacactgaccaccagcggaacccttagcacccacatggaccaacagttcttccaaacttgaccgcaccctgccccacccccgccatgtcccactaggcgtcctcccgactcctctcccggagcctcctcagctactccatccttgcacccctgggggcccagcccacccgcatgcacagagcaggggctaggtgtctcctgggaggcatgaagggggcaaggtccgtcctctgtgggcccaaacctatttgtaaccaaagagctgggagcagcacaaggacccagcctttgttctgcacttaataaatggttttgctactgcta

SEQ ID NO: 330391 - DNA, 2551 bp, Homo sapiens
  misc_feature (28)..(28): n is a, c, g, or t
  misc_feature (30)..(30): n is a, c, g, or t
gcgctgcccgcctcgtccccaccccccnancccccgcgcccgccctcggacagtccctgctcgcccgcgcgctgcagccccatctcctagcggcagcccaggcgcggagggagcgagtccgccccgaggtaggtccaggacgggcgcacagcagcagccgaggctggccgggagagggaggaagaggatggcagggccacgccccagcccatgggccaggctgctcctggcagccttgatcagcgtcagcctctctgggaccttggcaaaccgctgcaagaaggccccagtgaagagctgcacggagtgtgtccgtgtggataaggactgcgcctactgcacagacgagatgttcagggaccggcgctgcaacacccaggcggagctgctggccgcgggctgccagcgggagagcatcgtggtcatggagagcagcttccaaatcacagaggagacccagattgacaccaccctgcggcgcagccagatgtccccccaaggcctgcgggtccgtctgcggcccggtgaggagcggcattttgagctggaggtgtttgagccactggagagccccgtggacctgtacatcctcatggacttctccaactccatgtccgatgatctggacaacctcaagaagatggggcagaacctggctcgggtcctgagccagctcaccagcgactacactattggatttggcaagtttgtggacaaagtcagcgtcccgcagacggacatgaggcctgagaagctgaaggagccctggcccaacagtgacccccccttctccttcaagaacgtcatcagcctgacagaagatgtggatgagttccggaataaactgcagggagagcggatctcaggcaacctggatgctcctgagggcggcttcgatgccatcctgcagacagctgtgtgcacgagggacattggctggcgcccggacagcacccacctgctggtcttctccaccgagtcagccttccactatgaggctgatggcgccaacgtgctggctggcatcatgagccgcaacgatgaacggtgccacctggacaccacgggcacctacacccagtacaggacacaggactacccgtcggtgcccaccctggtgcgcctgctcgccaagcacaacatcatccccatctttgctgtcaccaactactcctatagctactacgagaagcttcacacctatttccctgtctcctcactgggggtgctgcaggaggactcgtccaacatcgtggagctgctggaggaggccttcaatcggatccgctccaacctggacatccgggccctagacagcccccgaggccttcggacagaggtcacctccaagatgttccagaagacgaggactgggtcctttcacatccggcggggggaagtgggtatataccaggtgcagctgcgggcccttgagcacgtggatgggacgcacgtgtgccagctgccggaggaccagaagggcaacatccatctgaaaccttccttctccgacggcctcaagatggacgcgggcatcatctgtgatgtgtgcacctgcgagctgcaaaaagaggtgcggtcagctcgctgcagcttcaacggagacttcgtgtgcggacagtgtgtgtgcagcgagggctggagtggccagacctgcaactgctccaccggctctctgagtgacattcagccctgcctgcgggagggcgaggacaagccgtgctccggccgtggggagtgccagtgcgggcactgtgtgtgctacggcgaaggccgctacgagggtcagttctgcgagtatgacaacttccagtgtccccgcacttccgggttcctctgcaatgaccgaggacgctgctccatgggccagtgtgtgtgtgagcctggttggacaggcccaagctgtgactgtcccctcagcaatgccacctgcatcgacagcaatgggggcatctgtaatggacgtggccactgtgagtgtggccgctgccactgccaccagcagtcgctctacacggacaccatctgcgagatcaactactcggcgatccacccgggcctctgcgaggacctacgctcctgcgtgcagtgccaggcgtggggcaccggcgagaagaaggggcgcacgtgtgaggaatgcaacttcaaggtcaagatggtggacgagcttaagagagccgaggaggtggtggtgcgctgctccttccgggacgaggatgacgactgcacctacagctacaccatggaaggtgacggcgcccatggaccaacagttcttccaaacttgaccgcaccctgccccacccccgccatgtcccactaggcgtcctcccgactcctctcccggagcctcctcagctactccatccttgcacccctgggggcccagcccacccgcatgcacagagcaggggctaggtgtctcctgggaggcatgaagggggcaaggtccgtcctctgtgggcccaaacctatttgtaaccaaagagctgggagcagcacaaggacccagcctttgttctgcacttaataaatggttttgctactgcta

SEQ ID NO: 330392 - DNA, 100 bp, Homo sapiens
cggctttcacatggaggagaggcatgaatctttcaaatgaaagacacatgtgttcttgctggaggagctaagatttccatgacttctcaggaagaccggg

SEQ ID NO: 330393 - DNA, 263 bp, Homo sapiens
taattaagactcgaggatttctcaagctatagttacatttttaatcctgggtaaaaaataagaagcaagtattctgagaaaactaataggttagctaggagttgtgtacagtatgacttaaaactcttcatttatgagaattgcagaataaagaaagtttagttgtttataatagcatttaatagcatttaatttcatggaaggagcttgttcctgaaaaatcaatttttcttggtcaggagataggaattagtggttaacat

SEQ ID NO: 330394 - DNA, 130 bp, Homo sapiens
ttgtgaaaacattcaagctctggctctgtgggcttagctttgatgagtctgatcactgattttgcttaagttaagtcatagctaaaggctcagcgtctccgaatgtgaaacaggctttatgtggccacca

SEQ ID NO: 330395 - DNA, 284 bp, Homo sapiens
atgtccattatatcttatccaagtatgccttcattctggcagttatcctgcattataactcttgcaggtctcagtcactggacaaagtactttaagtacagggaacaaatctgatccattttggtgtccaatatagtctgccacatagtgggtaatgcttcccttgaatcagcaccatcatccacgctatacactacatatggccagtaaacccagtaaaatgagttaaccaattatttcactaatgttagccttttaaatttatctccaggaactagtatgat

SEQ ID NO: 330396 - DNA, 1627 bp, Homo sapiens
ggtaaggctgggtgtgtaatcggccgaggccagatgaggactctgaagctcagagagcagtggccggtgtccagctgcctactttctgcccggatctctggctcctcatctctccggtctccgcagactaaagccctcgggatatgcagcagccatgcctgtgcacacgctgagccccggagccccgtccgcccccgccctaccttgccgcctgcggaccagggtccctggctacctgctacgggggccggcagatggtggagcccggaaaccgagcgctgtggagcgcctggaggccgacaaggccaagtacgtcaagagcctgcacgtggccaacacccgccaggagcctgtgcagcccctgctgtccaaacagccgctcttcagccctgagactcgccgcacagtgctcacgcccagccgccgagccctgcctggcccctgccgacggccccagctggacctggacatcctcagcagcctcatcgacttgtgtgacagccccgtgtcccctgccgaggccagccgcactcctggacgggccgagggagccggccgtcctcccccagccacccctccgcgaccgccgcccagtacctctgcggtccgccgggtggacgtccgccccctgcccgcctcgcctgcccggccctgcccatcacccggccctgccgccgcctccagcccagcccggccgccgggtttgcaacgctccaagtcggacttgagcgagcgcttttctagggcagccgctgatctcgagcgcttttttaacttctgcggcctggacccggaggaggcgagagggttgggtgtggcccacctggcacgggccagctcggatatcgtgtccctggcagggcccagtgctgggccgggcagctctgaagggggctgctcccgccgcagctcggtgactgttgaggagcgggcccgggagcgcgttccctatggcgtgtcggtggtggagcgcaatgcccgcgtgatcaagtggttgtatgggctaaggcaggctcgggagagcccagcagctgaaggctaggcgccactgggcctggaattcgccacaggacggatcttacagaggcaagtggtccctggacctctcttgcatccattctctagacggccgtgtcagaggctccaccctgttgtgaacttggtatggaggcaaaggcttagaggctggaccagcattcttgggcaaggactgactctccaagggttttgttcttggctttggacacctgagaaccccctcctcccctcccccaatacaaggtttttgacatgagtgtactcctgcttagttcctcttgtggggctgcatttgcggtgctttgccctccccactgtgagtgaggggccaagggatctcctcaatcctgtctccccagcggctctgtttcctccttccttccttggcctctgtcctttgctgacttcctcttccttacccagcagaactcaccctggggtcggggcagtggggaggggcctatccactgctcttcctagtccttggcagctggcctaggtgggcagactataggagggactggttaggagtctgcattgctttgacttccctctccttggttaataaacacaaatgcttgtttctcaa

SEQ ID NO: 330397 - DNA, 1784 bp, Homo sapiens
gggactgtccctgcggtgggggccttcgacagtgagggccacccgctcagctcgaccgcggagggcagctccaaaggggaccccaaaggtgcccacgcggggctggggcctcctgggcgtcgttgggagcggccactaccggcccgggtccgagctgtcagcctctccaaagcctgcgcgagaggagccgggacacgcctagcgcgggctccagcagtggccggtgtccagctgcctactttctgcccggatctctggctcctcatctctccggtctccgcagactaaagccctcgggatatgcagcagccatgcctgtgcacacgctgagccccggagccccgtccgcccccgccctaccttgccgcctgcggaccagggtccctggctacctgctacgggggccggcagatggtggagcccggaaaccgagcgctgtggagcgcctggaggccgacaaggccaagtacgtcaagagcctgcacgtggccaacacccgccaggagcctgtgcagcccctgctgtccaaacagccgctcttcagccctgagactcgccgcacagtgctcacgcccagccgccgagccctgcctggcccctgccgacggccccagctggacctggacatcctcagcagcctcatcgacttgtgtgacagccccgtgtcccctgccgaggccagccgcactcctggacgggccgagggagccggccgtcctcccccagccacccctccgcgaccgccgcccagtacctctgcggtccgccgggtggacgtccgccccctgcccgcctcgcctgcccggccctgcccatcacccggccctgccgccgcctccagcccagcccggccgccgggtttgcaacgctccaagtcggacttgagcgagcgcttttctagggcagccgctgatctcgagcgcttttttaacttctgcggcctggacccggaggaggcgagagggttgggtgtggcccacctggcacgggccagctcggatatcgtgtccctggcagggcccagtgctgggccgggcagctctgaagggggctgctcccgccgcagctcggtgactgttgaggagcgggcccgggagcgcgttccctatggcgtgtcggtggtggagcgcaatgcccgcgtgatcaagtggttgtatgggctaaggcaggctcgggagagcccagcagctgaaggctaggcgccactgggcctggaattcgccacaggacggatcttacagaggcaagtggtccctggacctctcttgcatccattctctagacggccgtgtcagaggctccaccctgttgtgaacttggtatggaggcaaaggcttagaggctggaccagcattcttgggcaaggactgactctccaagggttttgttcttggctttggacacctgagaaccccctcctcccctcccccaatacaaggtttttgacatgagtgtactcctgcttagttcctcttgtggggctgcatttgcggtgctttgccctccccactgtgagtgaggggccaagggatctcctcaatcctgtctccccagcggctctgtttcctccttccttccttggcctctgtcctttgctgacttcctcttccttacccagcagaactcaccctggggtcggggcagtggggaggggcctatccactgctcttcctagtccttggcagctggcctaggtgggcagactataggagggactggttaggagtctgcattgctttgacttccctctccttggttaataaacacaaatgcttgtttctcaa

SEQ ID NO: 330398 - DNA, 1838 bp, Homo sapiens
gggactgtccctgcggtgggggccttcgacagtgagggccacccgctcagctcgaccgcggagggcagctccaaaggggaccccaaaggtgcccacgcggggctggggcctcctgggcgtcgttgggagcggccactaccggcccgggtccgagctgtcagcctctccaaagcctgcgcgagaggagccgggacacgcctagcgcgggctccagcagtggccggtgtccagctgcctactttctgcccggatctctggctcctcatctctccggtctccgcagactaaagccctcgggatatgcagcagccatgcctgtgcacacgctgagccccggagccccgtccgcccccgccctaccttgccgcctgcggaccagggtccctggctacctgctacgggggccggcagatggtggagcccggaaaccgagcgctgtggagcgcctggaggccgacaaggccaagtacgtcaagagcctgcacgtggccaacacccgccaggagcctgtgcagcccctgctgtccaaacagccgctcttcagccctgagactcgccgcacagtgctcacgcccagccgccgagccctgcctggcccctgccgacggccccagctggacctggacatcctcagcagcctcatcgacttgtgtgacagccccgtgtcccctgccgaggccagccgcactcctggacgggccgagggagccggccgtcctcccccagccacccctccgcgaccgccgcccagtacctctgcggtccgccgggtggacgtccgccccctgcccgcctcgcctgcccggccctgcccatcacccggccctgccgccgcctccagcccagcccggccgccgggtttgcaacgctccaagtcggacttgagcgagcgcttttctagggcagccgctgatctcgagcgcttttttaacttctgcggcctggacccggaggaggcgagagggttgggtgtggcccacctggcacgggccagctcggatatcgtgtccctggcagggcccagtgctgggccgggcagctctgaagggggctgctcccgccgcagctcggtgactgttgaggagcgggcccgggagcgcgttccctatggcgtgtcggtggtggagcgcaatgcccgcgtgatcaagtggttgtatgggctaaggcaggctcgggagagcccagcagctgaaggctaggcgccactgggcctggaattcgccacaggacggatcttacagaggcaagtggtccctggacctctcttgcatccattctctagacggccgtgtcagaggctccaccctgttgtgaacttggtatggaggcaaaggcttagaggctggaccagcattcttgggcaaggactgactctccaagggttttgttcttggctttggacacctgagaaccccctcctcccctcccccaatacaaggtttttgacatgagtgtactcctgcttagttcctcttgtggggctgcatttgcggtgctttgccctccccactgtgagtgaggggccaagggatctcctcaatcctgtctccccagcggctctgtttcctccttccttccttggcctctgtcctttgctgacttcctcttccttacccagcagaactcaccctggggtcggggcagtggggaggggcctatccactgctcttcctagtccttggcagctggcctaggtgggcagactataggagggactggttaggagtctgcattgctttgacttccctctccttggttaataaacacaaatgcttgtttctcaaaaagcaaagaaaaaattcgcgggatatattgaggggggggaaaaaaggtacgga

SEQ ID NO: 330399 - DNA, 1825 bp, Homo sapiens
gggactgtccctgcggtgggggccttcgacagtgagggccacccgctcagctcgaccgcggagggcagctccaaaggggaccccaaaggtgcccacgcggggctggggcctcctgggcgtcgttgggagcggccactaccggcccgggtccgagctgtcagcctctccaaagcctgcgcgagaggagccgggacacgcctagcgcgggctccagcagtggccggtgtccagctgcctactttctgcccggatctctggctcctcatctctccggtctccgcagactaaagccctcgggatatgcagcagccatgcctgtgcacacgctgagccccggagccccgtccgcccccgccctaccttgccgcctgcggaccagggtccctggctacctgctacgggggccggcagatggtggagcccggaaaccgagcgctgtggagcgcctggaggccgacaaggccaagtacgtcaagagcctgcacgtggccaacacccgccaggagcctgtgcagcccctgctgtccaaacagccgctcttcagccctgagactcgccgcacagtgctcacgcccagccgccgagccctgcctggcccctgccgacggccccagctggacctggacatcctcagcagcctcatcgacttgtgtgacagccccgtgtcccctgccgaggccagccgcactcctggacgggccgagggagccggccgtcctcccccagccacccctccgcgaccgccgcccagtacctctgcggtccgccgggtggacgtccgccccctgcccgcctcgcctgcccggccctgcccatcacccggccctgccgccgcctccagcccagcccggccgccgggtttgcaacgctccaagtcggacttgagcgagcgcttttctagggcagccgctgatctcgagcgcttttttaacttctgcggcctggacccggaggaggcgagagggttgggtgtggcccacctggcacgggccagctcggatatcgtgtccctggcagggcccagtgctgggccgggcagctctgaagggggctgctcccgccgcagctcggtgactgttgaggagcgggcccgggagcgcgttccctatggcgtgtcggtggtggagcgcaatgcccgcgtgatcaagtggttgtatgggctaaggcaggctcgggagagcccagcagctgaaggctaggcgccactgggctggaattcgccacaggacggatcttacagaggcaagtggtcctggaattcgccacaggacggatcttacagaggcaagtggtccctggacctctcttgcatccattctctagacggccgtgtcagaggctccaccctgttgtgaacttggtatggaggcaaaggcttagaggctggaccagcattcttgggcaaggactgactctccaagggttttgttcttggctttggacacctgagaaccccctcctcccctcccccaatacaaggtttttgacatgagtgtactcctgcttagttcctcttgtggggctgcatttgcggtgctttgccctccccactgtgagtgaggggccaagggatctcctcaatcctgtctccccagcggctctgtttcctccttccttccttggcctctgtcctttgctgacttcctcttccttacccagcagaactcaccctggggtcggggcagtggggaggggcctatccactgctcttcctagtccttggcagctggcctaggtgggcagactataggagggactggttaggagtctgcattgctttgacttccctctccttggttaataaacacaaatgcttgtttctcaa

SEQ ID NO: 330400 - DNA, 748 bp, Homo sapiens
ttcgtggggaacctggcgctaaaccattcgtagacgacctgttgaggagcgggcccgggagcgcgttccctatggcgtgtcggtggtggagcgcaatgcccgcgtgatcaagtggttgtatgggctaaggcaggctcgggagagcccagcagctgaaggctaggcgccactgggcctggaattcgccacaggacggatcttacagaggcaagtggtccctggacctctcttgcatccattctctagacggccgtgtcagaggctccaccctgttgtgaacttggtatggaggcaaaggcttagaggctggaccagcattcttgggcaaggactgactctccaagggttttgttcttggctttggacacctgagaaccccctcctcccctcccccaatacaaggtttttgacatgagtgtactcctgcttagttcctcttgtggggctgcatttgcggtgctttgccctccccactgtgagtgaggggccaagggatctcctcaatcctgtctccccagcggctctgtttcctccttccttccttggcctctgtcctttgctgacttcctcttccttacccagcagaactcaccctggggtcggggcagtggggaggggcctatccactgctcttcctagtccttggcagctggcctaggtgggcagactataggagggactggttaggagtctgcattgctttgacttccctctccttggttaataaacacaaatgcttgtttctcaa

SEQ ID NO: 330401 - DNA, 447 bp, Homo sapiens
aacctcatgccacactgtgggctctgcccagcttggttttgtggctccaccctctacggtcatatttgggtttccacacacacagcacccaaaggaaatcccagctaacgcacatcaggttctgggctgggccacccgccaaggtggttggtgggcatgacaccgccccgggaatggcgtcgtccaaatgcctgagcaatgacacggcctcagatggaatgatgccactgcccacagtctcacaggccctcccatctcgcctttgttctgcagcctccaggtgggtgtatggacactccaaaacagccatccctgtcaatgaatcagcctgcagggactgaattcattccttcattcatcaatatccattgagcacctactgtgtgccaaacactcttctaggaactgaagatgcaacagaaaacaaaacagataaaaatccctgcc

SEQ ID NO: 330402 - DNA, 1628 bp, Homo sapiens
tgttctaagtactttacaagtatgaactcatttaattccctcaactctgtgatataagcagtggccggtgtccagctgcctactttctgcccggatctctggctcctcatctctccggtctccgcagactaaagccctcgggatatgcagcagccatgcctgtgcacacgctgagccccggagccccgtccgcccccgccctaccttgccgcctgcggaccagggtccctggctacctgctacgggggccggcagatggtggagcccggaaaccgagcgctgtggagcgcctggaggccgacaaggccaagtacgtcaagagcctgcacgtggccaacacccgccaggagcctgtgcagcccctgctgtccaaacagccgctcttcagccctgagactcgccgcacagtgctcacgcccagccgccgagccctgcctggcccctgccgacggccccagctggacctggacatcctcagcagcctcatcgacttgtgtgacagccccgtgtcccctgccgaggccagccgcactcctggacgggccgagggagccggccgtcctcccccagccacccctccgcgaccgccgcccagtacctctgcggtccgccgggtggacgtccgccccctgcccgcctcgcctgcccggccctgcccatcacccggccctgccgccgcctccagcccagcccggccgccgggtttgcaacgctccaagtcggacttgagcgagcgcttttctagggcagccgctgatctcgagcgcttttttaacttctgcggcctggacccggaggaggcgagagggttgggtgtggcccacctggcacgggccagctcggatatcgtgtccctggcagggcccagtgctgggccgggcagctctgaagggggctgctcccgccgcagctcggtgactgttgaggagcgggcccgggagcgcgttccctatggcgtgtcggtggtggagcgcaatgcccgcgtgatcaagtggttgtatgggctaaggcaggctcgggagagcccagcagctgaaggctaggcgccactgggcctggaattcgccacaggacggatcttacagaggcaagtggtccctggacctctcttgcatccattctctagacggccgtgtcagaggctccaccctgttgtgaacttggtatggaggcaaaggcttagaggctggaccagcattcttgggcaaggactgactctccaagggttttgttcttggctttggacacctgagaaccccctcctcccctcccccaatacaaggtttttgacatgagtgtactcctgcttagttcctcttgtggggctgcatttgcggtgctttgccctccccactgtgagtgaggggccaagggatctcctcaatcctgtctccccagcggctctgtttcctccttccttccttggcctctgtcctttgctgacttcctcttccttacccagcagaactcaccctggggtcggggcagtggggaggggcctatccactgctcttcctagtccttggcagctggcctaggtgggcagactataggagggactggttaggagtctgcattgctttgacttccctctccttggttaataaacacaaatgcttgtttctcaa

SEQ ID NO: 330403 - DNA, 945 bp, Homo sapiens
tcctgccctgcagctcgctccggggccccccggtgcctgttccaggtccgcctccctcgcgcgattaaagggtctgcctttaaaagtggcccggtctacttcttcaccgctgagcatgggttatctgcttcggccccccaactctgggtcaagggccccccactcccgcctcctggccgctgactaagacgtgtaccaccgggccttgttataattgtgagaatagagaccaggtctactatttgcccaggctgtcttgactcctggtttccaccatcctccccctggcccccctaaagctggattaccggggtggggccccccccccccccccgggggagagagaactttctcgagtttttttttgtttttttgttttttggctgtaagtttattcaatgcaaaagaatcctctccaattttactgaggtggctgaccacgtccacgaccaaatccgcctctaaactggaattcggttgctgacccagccccagcctcggctttcttgtcggcaccaggtggcacagcactccgtctgtaggtatctctgtcagcttcccctcttgtgagtctcgcaggtcgctcaccctccagacctttaggccgaggcctgccagtctctggacggctacggcgtagggtggcaggcacaatctccgggggcagatgaaggtaatcacggagatactggataccctcattggtaaggtaccagtagaaatgtctccaggcaaactgttccttcacgtagcctcgggacttgagagactgcatggccttcatgacatgaaggttgggcacattcttgtctgccagctccgggtgcttaggcatgtggacatccttcttggccaccatgactccctccttaaaaaggagttcataaatggcaatccggttcttcttaggcatcaacatctctgcggctgcagggtccggggctg

SEQ ID NO: 330404 - DNA, 1893 bp, Homo sapiens
gggactgtccctgcggtgggggccttcgacagtgagggccacccgctcagctcgaccgcggagggcagctccaaaggggaccccaaaggtgcccacgcggggctggggcctcctgggcgtcgttgggagcggccactaccggcccgggtccgagctgtcagcctctccaaagcctgcgcgagaggagccgggacacgcctagcgcgggctccaggtggctgaccacgtccacgaccaaatccgcctctaaactggaattcggttgctgacccagccccagcctcggctttcttgtcggcaccaggtggcacagcactccgtctcagtggccggtgtccagctgcctactttctgcccggatctctggctcctcatctctccggtctccgcagactaaagccctcgggatatgcagcagccatgcctgtgcacacgctgagccccggagccccgtccgcccccgccctaccttgccgcctgcggaccagggtccctggctacctgctacgggggccggcagatggtggagcccggaaaccgagcgctgtggagcgcctggaggccgacaaggccaagtacgtcaagagcctgcacgtggccaacacccgccaggagcctgtgcagcccctgctgtccaaacagccgctcttcagccctgagactcgccgcacagtgctcacgcccagccgccgagccctgcctggcccctgccgacggccccagctggacctggacatcctcagcagcctcatcgacttgtgtgacagccccgtgtcccctgccgaggccagccgcactcctggacgggccgagggagccggccgtcctcccccagccacccctccgcgaccgccgcccagtacctctgcggtccgccgggtggacgtccgccccctgcccgcctcgcctgcccggccctgcccatcacccggccctgccgccgcctccagcccagcccggccgccgggtttgcaacgctccaagtcggacttgagcgagcgcttttctagggcagccgctgatctcgagcgcttttttaacttctgcggcctggacccggaggaggcgagagggttgggtgtggcccacctggcacgggccagctcggatatcgtgtccctggcagggcccagtgctgggccgggcagctctgaagggggctgctcccgccgcagctcggtgactgttgaggagcgggcccgggagcgcgttccctatggcgtgtcggtggtggagcgcaatgcccgcgtgatcaagtggttgtatgggctaaggcaggctcgggagagcccagcagctgaaggctaggcgccactgggcctggaattcgccacaggacggatcttacagaggcaagtggtccctggacctctcttgcatccattctctagacggccgtgtcagaggctccaccctgttgtgaacttggtatggaggcaaaggcttagaggctggaccagcattcttgggcaaggactgactctccaagggttttgttcttggctttggacacctgagaaccccctcctcccctcccccaatacaaggtttttgacatgagtgtactcctgcttagttcctcttgtggggctgcatttgcggtgctttgccctccccactgtgagtgaggggccaagggatctcctcaatcctgtctccccagcggctctgtttcctccttccttccttggcctctgtcctttgctgacttcctcttccttacccagcagaactcaccctggggtcggggcagtggggaggggcctatccactgctcttcctagtccttggcagctggcctaggtgggcagactataggagggactggttaggagtctgcattgctttgacttccctctccttggttaataaacacaaatgcttgtttctcaa

SEQ ID NO: 330405 - DNA, 1983 bp, Homo sapiens
gggactgtccctgcggtgggggccttcgacagtgagggccacccgctcagctcgaccgcggagggcagctccaaaggggaccccaaaggtgcccacgcggggctggggcctcctgggcgtcgttgggagcggccactaccggcccgggtccgagctgtcagcctctccaaagcctgcgcgagaggagccgggacacgcctagcgcgggctccagcagtggccggtgtccagctgcctactttctgcccggatctctggctcctcatctctccggtctccgcagactaaagccctcgggatatgcagcagccatgcctgtgcacacgctgagccccggagccccgtccgcccccgccctaccttgccgcctgcggaccagggtccctggctacctgctacgggggccggcagatggtggagcccggaaaccgagcgctgtggagcgcctggaggccgacaaggccaagtacgtcaagagcctgcacgtggccaacacccgccaggagcctgtgcagcccctgctgtccaaacagccgctcttcagccctgagactcgccgcacagtgctcacgcccagccgccgagccctgcctggcccctgccgacggccccagctggacctggacatcctcagcagcctcatcgacttgtgtgacagccccgtgtcccctgccgaggccagccgcactcctggacgggccgagggagccggccgtcctcccccagccacccctccgcgaccgccgcccagtacctctgcggtccgccgggtggacgtccgccccctgcccgcctcgcctgcccggccctgcccatcacccggccctgccgccgcctccagcccagcccggccgccgggtttgcaacgctccaagtcggacttgagcgagcgcttttctagggcagccgctgatctcgagcgcttttttaacttctgcggcctggacccggaggaggcgagagggttgggtgtggcccacctggcacgggccagctcggatatcgtgtccctggcagggcccagtgctgggccgggcagctctgaagggggctgctcccgccgcagctcggtgactgttgaggagcgggcccgggagcgcgttccctatggcgtgtcggtggtggagcgcaatgcccgcgtgatcaagtggttgtatgggctaaggcaggctcgggagagcccagcagctgaaggctaggcgccactgggcctggaattcgccacaggacggatcttacagagcctccaggtgggtgtatggacactccaaaacagccatccctgtcaatgaatcagcctgcagggactgaattcattccttcattcatcaatatccattgagcacctactgtgtgccaaacactcttctaggaactgaagatgcaacagaaaacaaaacagataaaaatccctgccctcgaggagctgacattccagaggggacacagacaatacttgccagagtgaaaatgctaaggagaaaaatgaagcagggaaggatgggggactagagattttttttcctttttttattgaggttgaattgataaacaataaaattggcccattttaggtgtacagttggatgcattttgacagttgtatggcactacagacaagtgctagaattcctgtatcatcccaccatgttccttcacgccccccacagtcagcccctgactcccacccgctcccacccgaagaaactacagatcagttttctttcactgtagatcagctttgtctttcccagagttcatgcaaatggaatctggcttctctcagtcagcatcatggacttggttgagattcgcccgtgttgctgagtgtatctgtagcttgttcctttttactgacgagtagtattccacagtgtggatgcactgtattttgtttattcatccaacttgttgacggacatacaggttgttcccatttcttggctattacaaataaagctactataaacatttgtgaacaac

SEQ ID NO: 330406 - DNA, 160 bp, Homo sapiens
tgctgacattattcatttagacattcttttttttctctaaccttttttccttttttattgttttcttattttctgacagcgtcttgctctgtcactcagagtactggagtgcagtggcatgatcctcaacttcccaggccaagtgattctactaccttag

SEQ ID NO: 330407 - DNA, 90 bp, Homo sapiens
attgctattattctgaaatattatgttaggattaaatatgtaatatttcgatttttattgatgtataacatgcatacagaaatacatcca

SEQ ID NO: 330408 - DNA, 315 bp, Homo sapiens
ctacttgaatagtacctggcacctcttgcttcctccattaactactccctcgggcagcgacgtccctcctttccctcttctctcccgattagagccactacgggccgtgccttcctcttccacgggagctctatcttggtacacccagaaccacctccctccctaacccgctgccacactcgtgggggtctctacctgtctcctcttgatccaggtaagttatgtggacctgaataatagagtacagaaaagtcactcttatgcactcactatgaaaatgactgaacaactttctggagccgtgttgacataata

SEQ ID NO: 330409 - DNA, 709 bp, Homo sapiens
gaagaaagagaggaaggaaggaagaaagagagagagaaaggaaggaagagagaggaaggaaggaagaaagagagagaggaaggaaggaaggaaagaaagaaagaaagaaagaaagaaaggaagaggtaattgtgatctcaggctgaatgactacaagatgactgcagactggtgtccagatgaaggagtcaatggttcagaccacacaggaggagcgtgtttactccataagaggaacattggtaatatggagtgcatctgtggaggaaggctaggatgcttaagaaaggtacatacttccagaacagaagatcttggaggaacatgactgttaccttcaatatttaaagaactaccatgcagaagatggttggtcttacactgtgcaggcgagagtgctgaactaggacagagggtggaagggacagagagaccaatttcccctttatgtgagggagtcctactagtgagaaccaacccagaatgggagagctgccgtcaccaggagttgttaggagacaagaaaagcctctctaatcagagatgccatcacagcacggcagttaaaccaggtgacctccacggccccttccttctttctctttctttcgaaagaaagagaaagaaggaaggaaacaagaaagaaagaaaaagaaatcacagaaagggcaagaaaggacaagtgggagggaaactcaagctttggcac

SEQ ID NO: 330410 - DNA, 778 bp, Homo sapiens
ccggcctcgagtctcgctcaggctcggttttaccccggagtctattcgaagggggctgctacgtcagcgcgtctcagcgtaagacggcgctattccgctgtaacagcttccggcgggtcctggatgttgatgtcctgcatctaacgcggtgtaacccccgaagccgagcgagctccggaggaatttcagtatctgctacggtaacttcatcagcccgccaagatggcgatgcaagcggccaagagggcgaacattcgacttccacctgaagtaaatcggatattgtatataagaaatttgccatacaaaatcacagctgaagaaatgtatgatatatttgggaaatatggacctattcgtcaaatcagagtggggaacacacctgaaactagaggaacagcttatgtggtctatgaggacatctttgatgccaagaatgcatgtgatcacctatcgggattcaatgtttgtaacagataccttgtggttttgtactataatgccaacagggcatttcagaagatggacacaaagaagaaggaggaacagttgaagcttctcaaggagaaatatggcatcaacacagatccaccaaaataaatgttttctacattttcatttggactaaatcccacgaatgacaactaccacctttttttcctttttaattaatactaaatattgtgatttcttatttgaggttcaaaatgacctgcttgaaactttgatacatattggaatacattatgttaataaacttgtagctttttgtgaaaca

SEQ ID NO: 330411 - DNA, 819 bp, Homo sapiens
ccggcctcgagtctcgctcaggctcggttttaccccggagtctattcgaagggggctgctacgtcagcgcgtctcagcgtaagacggcgctattccgctgtaacagcttccggcgggtcctggatgttgatgtcctgcatctaacgcggtgtaacccccgaagccgagcgagctccggaggaatttcagtatctgctacggtaacttcatcagcccgccaagatggcgatgcaagcggccaagagggcgaacattcgacttccacctgaagtaaatcggatattgtatataagaaatttgccatacaaaatcacagctgaagaaatgtatgatatatttgggaaatatggacctattcgtcaaatcagagtggggaacacacctgaaactagaggaacagcttatgtggtctatgaggacatctttgatgccaagaatgcatgtgatcacctatcgggattcaatgtttgtaacagataccttgtggttttgtactataatgccaacagggcatttcagaagatggacacaaagaagaaggaggaacagttgaagcttctcaaggagaaatatggcatcaacacagatccaccaaaataaatgttttctacattttcatttggactaaatcccacgaatgacaactaccacctttttttcctttttaattaatactaaatattgtgatttcttatttgaggttcaaaatgacctgcttgaaactttgatacatattggaatacattatgttaataaacttgtagctttttgtgaaacaaaaaaaaaaagtcgacgcggccggcaatttagtagtagtag

SEQ ID NO: 330412 - DNA, 733 bp, Homo sapiens
ccggcctcgagtctcgctcaggctcggttttaccccggagtctattcgaagggggctgctacgtcagcgcgtctcagcgtaagacggcgctattccgctgtaacagcttccggcgggtcctggatgttgatgtcctgcatctaacgcggtgtaacccccgaagccgagcgagctccggaggaatttcagtatctgctacggtaacttcatcagcccgccaagatggcgatgcaagcggccaagagggcgaacattcgacttccacctgaagtaaatcggatattgtatataagaaatttgccatacaaaatcacagctgaagaaatggggaacacacctgaaactagaggaacagcttatgtggtctatgaggacatctttgatgccaagaatgcatgtgatcacctatcgggattcaatgtttgtaacagataccttgtggttttgtactataatgccaacagggcatttcagaagatggacacaaagaagaaggaggaacagttgaagcttctcaaggagaaatatggcatcaacacagatccaccaaaataaatgttttctacattttcatttggactaaatcccacgaatgacaactaccacctttttttcctttttaattaatactaaatattgtgatttcttatttgaggttcaaaatgacctgcttgaaactttgatacatattggaatacattatgttaataaacttgtagctttttgtgaaaca

SEQ ID NO: 330413 - DNA, 890 bp, Homo sapiens
ccggcctcgagtctcgctcaggctcggttttaccccggagtctattcgaagggggctgctacgtcagcgcgtctcagcgtaagacggcgctattccgctgtaacagcttccggcgggtcctggatgttgatgtcctgcatctaacgcggtgtaacccccgaagccgagcgagctccggaggaatttcagtatctgctacggtaacttcatcagcccgccaagatggcgatgcaagcggccaagagggcgaacattcgacttccacctgaagtaaatcggatattgtatataagaaatttgccatacaaaatcacagctgaagaaatgtatgatatatttgggaaatatggacctattcgtcaaatcagagtgtgagtcttactgagtcatttaaagaaaatgatagcataatctgtaatttcagaattatagctgacgatgaggccaccctgtgctgtgtgcagtgcgacaacccttaccaagagccttgagactagcagattgagatcagagagatgagatctttttgaaggggggagaaaacctactgagaccctaatgatccagctcaatgagagccaagaagaggatttgagtttcctcaaagcattcattgaagtagtaatgaatgctttgaggaaactggttgagaagggaaagaactaacatttattgcatacctgttatttgtaaagctagcttgttacactgtgttttttgtatgcagcagctctataattttctcaacaatcatcactgtctctttaaataaccccagaatttctgaataaactaagtaaaagagtataaaagtaacagaaaaaaatgatattttcaactacagctctttcaattgaagatgtaaaagtatagaggaaaacatctaatta

SEQ ID NO: 330414 - DNA, 1005 bp, Homo sapiens
atcagcgatgacaaatgcgcacatctgaataatccctttgtctaccacacatttttttccaagtaaaaaccagtgttccattaaacaaagtggctagtgtggctgagcgccggatgtaatcctaacacttggccaaggcaggagaatcgcttgaacccgggacccgggaggtggaggttgcagtgagccgatatcgtgtcattgcaccccagcctgggcgacagggcgagactccgtctcaaaaaaaaaaaacagagagacagagtctgggtatgtggccctgtctccaactccgtgggctcaagtgattctcctacttcagccccgggagtagctggagactggcaggcacacacacaccttgccgggctattaaagctaatttctttgggcactctgtagcctcccacattcagtatctgctacggtaacttcatcagcccgccaagatggcgatgcaagcggccaagagggcgaacattcgacttccacctgaagtaaatcggatattgtatataagaaatttgccatacaaaatcacagctgaagaaatgtatgatatatttgggaaatatggacctattcgtcaaatcagagtggggaacacacctgaaactagaggaacagcttatgtggtctatgaggacatctttgatgccaagaatgcatgtgatcacctatcgggattcaatgtttgtaacagataccttgtggttttgtactataatgccaacagggcatttcagaagatggacacaaagaagaaggaggaacagttgaagcttctcaaggagaaatatggcatcaacacagatccaccaaaataaatgttttctacattttcatttggactaaatcccacgaatgacaactaccacctttttttcctttttaattaatactaaatattgtgatttcttatttgaggttcaaaatgacctgcttgaaactttgatacatattggaatacattatgttaataaacttgtagctttttgtgaaaca

SEQ ID NO: 330415 - DNA, 1231 bp, Homo sapiens
ccggcctcgagtctcgctcaggctcggttttaccccggagtctattcgaagggggctgctacgtcagcgcgtctcagcgtaagacggcgctattccgctgtaacagcttccggcgggtcctggatgttgatgtcctgcatctaacgcggtgtaacccccgaagccgagcgagctccggaggaatttcagtatctgctacggtaacttcatcagcccgccaagatggcgatgcaagcggccaagagggcgaacattcgacttccacctgaagtaaatcggatattgtatataagaaatttgccatacaaaatcacagctgaagaaatgtatgatatatttgggaaatatggacctattcgtcaaatcagagtggggaacacacctgaaactagaggaacagcttatgtggtctatgaggacatctttgatgccaagaatgcatgtgatcacctatcgggattcaatgtttgtaacagataccttgtggttttgtactataatgccaacagggcatttcagaagatggacacaaagaagaaggaggaacagttgaagcttctcaaggagaaatatggcatcaacacagatccaccaaaataaatgttttctacattttcatttggactaaatcccacgaatgacaactaccacctttttttcctttttaattaatactaaatattgtgatttcttatttgaggttcaaaatgacctgcttgaaactttgatacatattggaatacattatgttaataaacttgtagctttttgtgaaacaaaaaaaaaaaaagggggggccgcccttttttttttttagccttttttatttttattttgtttttattatttttattatggaagagaaaacccggggaaatttaatgcggggtgtcagcagtgagatcaaagagaaaaaaggggggagaagatggggtgttattaaaaaacgaagggggaggttctacgcgacaggtagcaccagggctacatagggctgcaccaaaccgggggggggaagcaaacccccatgagagtggggcaaacaactaaggcggaggacacagaggaacgccaccaacacagtacgacacctagtcaacagaagagactcactattagacaagcaacaaggtttcacaggcggagaccagctcccgaaagagaaaaacaggaggggaaacaacaaaaacgaggctacaaagaccacgaaagccttgcgcggaaacaaagg

SEQ ID NO: 330416 - DNA, 378 bp, Homo sapiens
gaactgtactgtgatgatatatgtctactatgactttcttttttggctaatgctattgatgaaattcatttggctgtagattggtaatttaattttggtgcttaccacatttccaggcatttcagaagatggacacaaagaagaaggaggaacagttgaagcttctcaaggagaaatatggcatcaacacagatccaccaaaataaatgttttctacattttcatttggactaaatcccacgaatgacaactaccacctttttttcctttttaattaatactaaatattgtgatttcttatttgaggttcaaaatgacctgcttgaaactttgatacatattggaatacattatgttaataaacttgtagctttttgt

SEQ ID NO: 330417 - DNA, 662 bp, Homo sapiens
ccggcctcgagtctcgctcaggctcggttttaccccggagtctattcgaagggggctgctacgtcagcgcgtctcagcgtaagacggcgctattccgctgtaacagcttccggcgggtcctggatgttgatgtcctgcatctaacgcggtgtaacccccgaagccgagcgagctccggaggaatttcagtatctgctacggtaacttcatcagcccgccaagatggcgatgcaagcggccaagagggcgaacgtgagtatcgggtgttctgcggagggtgggagaacttcgggtttgactttcttagcggcgtggatcggagcattcttgctcctcctccgtccccagagcggagaactccagaattcctatcctgtcagcgaagacactatccggccccatcctcagagatatgctccttgagccacatttctgtccccaccccttttgagagttcctcagtctctaccctagtgtcagtgatagtgttacccctatagcctctttgcttgacccgcacctaaggacctggcgttaggattatctccttgacttaaagtcgatatctcagaagagtcctcaactaacttaatggttcaccaacaactaggacctgggattcccctcagatcatggtgcttttcggatccttcattaacaca

SEQ ID NO: 330418 - DNA, 455 bp, Homo sapiens
ccgggctgcaggaattcggcacgagggacctattcgtcaaatcagagtggggaacacacctgaaactagaggaacagcttatgtggtctatgaggacatctttgatgccaagaatgcatgtgatcacctatcgggattcaatgtttgtaacagataccttgtggttttgtactataatgccaacagggcatttcagaagatggacacaaagaagaaggaggaacagttgaagcttctcaaggagaaatatggcatcaacacagatccaccaaaataaatgttttctacattttcatttggactaaatcccacgaatgacaactaccacctttttttcctttttaattaatactaaatattgtgatttcttatttgaggttcaaaatgacctgcttgaaactttgatacatattggaatacattatgttaataaacttgtagctttttgtgaaaca

SEQ ID NO: 330419 - DNA, 461 bp, Homo sapiens
tttacgggtacggagcgtgatgacaaaaaaagaaaagaaggcgggcgcgcttgaggggaacacacctgaaactagaggaacagcttatgtggtctatgaggacatctttgatgccaagaatgcatgtgatcacctatcgggattcaatgtttgtaacagataccttgtggttttgtactataatgccaacagggcatttcagaagatggacacaaagaagaaggaggaacagttgaagcttctcaaggagaaatatggcatcaacacagatccaccaaaataaatgttttctacattttcatttggactaaatcccacgaatgacaactaccacctttttttcctttttaattaatactaaatattgtgatttcttatttgaggttcaaaatgacctgcttgaaactttgatacatattggaatacattatgttaataaacttgtagctttttgtgaaaca

SEQ ID NO: 330420 - DNA, 836 bp, Homo sapiens
ccggcctcgagtctcgctcaggctcggttttaccccggagtctattcgaagggggctgctacgtcagcgcgtctcagcgtaagacggcgctattccgctgtaacagcttccggcgggtcctggatgttgatgtcctgcatctaacgcggtgtaacccccgaagccgagcgagctccggaggaatttcagtatctgctacggtaacttcatcagcccgccaagatggcgatgcaagcggccaagagggcgaacattcgacttccacctgaagtaaatcggatattgtatataagaaatttgccatacaaaatcacagctgaagaaatgtatgatatatttgggaaatatggacctattcgtcaaatcagagtgtgagtcttactgagtcatttaaagtgtgctgtgtgcagtgcgacaacccttaccaagagccttgagactagcagattgagatcagagagatgagatctttttgaaggggggagaaaacctactgagaccctaatgatccagctcaatgagagccaagaagaggatttgagtttcctcaaagcattcattgaagtagtaatgaatgctttgaggaaactggttgagaagggaaagaactaacatttattgcatacctgttatttgtaaagctagcttgttacactgtgttttttgtatgcagcagctctataattttctcaacaatcatcactgtctctttaaataaccccagaatttctgaataaactaagtaaaagagtataaaagtaacagaaaaaaatgatattttcaactacagctctttcaattgaagatgtaaaagtatagaggaaaacatctaatta

SEQ ID NO: 330421 - DNA, 812 bp, Homo sapiens
ccggcctcgagtctcgctcaggctcggttttaccccggagtctattcgaagggggctgctacgtcagcgcgtctcagcgtaagacggcgctattccgctgtaacagcttccggcgggtcctggatgttgatgtcctgcatctaacgcggtgtaacccccgaagccgagcgagctccggaggaatttcagtatctgctacggtaacttcatcagcccgccaagatggcgatgcaagcggccaagagggcgaacattcgacttccacctgaagtaaatcggatattgtatataagaaatttgccatacaaaatcacagctgaagaaatgtatgatatatttgggaaatatggacctattcgtcaaatcagagtggggaacacacctgaaactagaggaacagcttatgtggtctatgaggacatctttgatgccaagaatgcatgtgatcacctatcgggattcaatgtttgtaacagataccttgtggttttgtactataatgccaacagggcatttcagaagatggacacaaagaagaaggaggaacagttgaagcttctcaaggagaaatatggcatcaacacagatccaccaaaataaatgttttctacattttcatttggactaaatcccacgaatgacaactaccacctttttttcctttttaattaatactaaatattgtgatttcttatttgaggttcaaaatgacctgcttgaaactttgatacatattggaatacattatgttaataaacttgtagctttttgtgaaacaaaacacaaaaaaaaatggcctagctggtctcaca

SEQ ID NO: 330422 - DNA, 815 bp, Homo sapiens
aaaaaaaaaaaaaaaaaaaaaaaaaggaagagacacaattacctgagggatgaatggcaaatgttctatttagaaacgcatttttaaagctcaccttgtagggtttcttgtcatgcatcatttaaaaaaataaattaaaaaccttgaatattaggctgaggattttctcttgaaagagacaaagagacatggtcaagtcactgggaatttcatgacttaggaggattctctcagaagactttctaagaataacttcaataatctccaataatctgcaacctacttttctttcattgaaacaaacaaagttagctatggaattaatatttggaaaatgaagaaagcttaaaggaaataaacatttcccataatcttaccatccactgaaaaccatggttaacttgacatgggagtgggcttgggttggaaaaaaatagggagagagttttatctctggaaagcattgctggctcccttccacactttacagcatgtattagcttagtgacactgtagggagaagcacaagccatgtaaagaggacttaatttgtcaagatttactgactagctaagggctaaaaagagatgagtggggtggaagcaatggtttccacaacacccccaagataaggggtatcacttgtgcaaatttagcaccagggagtggggccagcccagaacttcaactcaacatttgtcaagccctcagtataccttccaacccagaaaaacaataaaaatgttaatttttgaaatcactagcaaaatactaaatacaaggtcaatattttaaaccaaagtgccctgagagca

SEQ ID NO: 330423 - DNA, 236 bp, Homo sapiens
atatgaaactcggtgaactccctcacaatgaagtttccgtcaatccctcagcctctatggcaacccacctggggtagaggcagaggggagatcaccagcttctgatggggggagaatgaagccgttacctggaaatgcagtgatgagaacagtggttctcaactgggggtgattttgctccaaaggggacatttggcaatctctgaagacagtttctgttgtcacagctagggggg

SEQ ID NO: 330424 - DNA, 321 bp, Homo sapiens
caggcagaaacacatttggtcacaataacaggggggatgatatcaaaccggagtgttgtggctatgcagtgaagtgcggaattagaggtggagccttcgtggcatcactgaggtggaaggctttttcaagaccattggattcagttaaacaaatgagttgtagaatggggataagctgagggataagtaatcccatcctttacggaacatattttttggaggtggaactggatacagcaaattacagcatacagaataacataggtgctatcttgaggcaggtgtcatatccttgagcctgctgagggatcagagtggact

SEQ ID NO: 330425 - DNA, 601 bp, Homo sapiens
aatgttattaccataacccagctttcctttggtttagtatgtacttattgagaagggcactcaaaatactgccttattactttccaccagtggctttttacaactacaaattacttaaatgcttgacaacagacctttaacaaaaaagttaactgcaccaagtaaatgtcaataatactaagttcagaaagctgtatttttgataaatcaaattcatcttgtgggaaactgtcaacaaggaaaatgttcagttggtaattttcagttggtgtgtagagaaatgtaattagcagatcatttttaaaactggagattagagcagaaatatagctatgggattaaaacaagtcagctggtggcagtattttctcttgtaacttaggaaacagttaacctctcaaagtacctttacatccaataactcaaaaatgttactactatttgggcaatatgtagttgtggataaaatttactttaaaaacacaagatataaagtatgaatagtttatctgtataggacattgagcatttctggtgtgcttatccgcttaaagtttaaattaccagcagaatttgttatactttggggtcctgtgaaaaa

SEQ ID NO: 330426 - DNA, 471 bp, Homo sapiens
tgtgatccaatacaattttatttacaaaaatacaggttgggctgaatttggtccctgggcagtggtgtgctgacccatgcttgaaattatgatttcaattatgtacattttgagtgtgctatatactttaaaatgtgaatttcaagctgaaaaatgtattgtttaaagcgtaactagagtaaggtccttggagtgatgggcttgtcgggtattctccctagaggagtgcacattcaggtagggacagtcttcacatatttattccatgtaacaaatacgtagctctttgtatatgccaggtacagttctcggtgcttgtattagtctgtttttgcactgctccaaagaaatacctaggactgagtaatttataaggaaaagaggcttaattggctcatgttttcgcaggctgtacaggaagcatggcaccatcagctcggcttctggggaggcctcaggaaactgtaatca

SEQ ID NO: 330427 - DNA, 738 bp, Homo sapiens
cctctccgcccgctgcctgtgaatgatgcaatggaaggtgtgctggggtcgccctgtgtcccgtgcataggagcatctcagcctccaggtcctctcctttggggctcacggcacccccatgctacgaaccgcaggcagggacggcctctgtcgcctgtccacctacttggaagaactcgaggctgtggaactgaagaagttcaagttatacctggggaccgcgacagagctgggagaaggcaagatcccctggggaagcatggagaaggccggtcccctggaaatggcccagctgctcatcacccacttcgggccagaggaggcctggaggttggctctcagcacctttgagcggataaacaggaaggacctgtgggagagaggacagagagaggacctggtgagggataccccacctggtggcccgtcctcacttgggaaccagtcaacatgccttctggaagtctctcttgtcactccaagaaaagatccccaggaaacctacagggactatgtccgcaggaaattccggctcatggaagaccgcaatgcgcgcctaggggaatgtgtcaacctcagccaccggtacacccggctcctgctggtgaaggagcactcaaaccccatgcaggtccagcagcagcttctggacacaggccggggacacgcgaggaccgtgggacaccaggctagccccatcaagatagagaccctctttgagccagacgaggagcgccc

SEQ ID NO: 330428 - DNA, 672 bp, Homo sapiens
atgtatattaaagcaagagttgagatgacacttttccttataaaacagacagggattcagggacattgggactctaatgctgctggtaagacatgaataaatacataccatctctggcaatcaataccagaagctttaagcattgccttttgactttgaaattgtacctggaaatgtatgtttcagtaaccatcatgaatgtacacaaaatcctgaaactcttaaaactgatgtcacaggccaggcacagtggctcatgcctgtaatcccagcactttgggaggctgaggcgggtggatcacctgagatcaggagttcgagaccagcctgaccaatatggtgaaaccccgtctctactaaaaatacaaaacaattagctggtgtggtggcatgtgcctgtagtcccagctacttgggaggctgagacaggagaattgcatgaacccgggaggtggaggttgcggtgagccgagattgtgccactgtattccagcctgggtgacagagtgagactgtgtctcaaaaaaaaaaaaaaaaaaaaaaaaaaaactgatgtcaattaatattaaatgaagtattcatgatatattgttaagtaaaaatattacaaaacaatatgtacagtatgatcctatgtaaaatatatatttatgtattaaaaatactgaaaac

SEQ ID NO: 330429 - DNA, 483 bp, Homo sapiens
gagatggagttcgctcttgtccaggctggagtgcaatggcacgatcttggctcaccgcaaactctgcctcctgggttcaagcgattctcctgcctcagccttctgagtagctgggattacaggcatgcaccaccacagctgaccaatatggtgaaaccccgtctctactaaaaatacaaaacaattagctggtgtggtggcatgtgcctgtagtcccagctacttgggaggctgagacaggagaattgcatgaacccgggaggtggaggttgcggtgagccgagattgtgccactgtattccagcctgggtgacagagtgagactgtgtctcaaaaaaaaaaaaaaaaaaaaaaaaaaaactgatgtcaattaatattaaatgaagtattcatgatatattgttaagtaaaaatattacaaaacaatatgtacagtatgatcctatgtaaaatatatatttatgtattaaaaatactgaaaac

SEQ ID NO: 330430 - DNA, 1402 bp, Homo sapiens
gagatggagttcgctcttgtccaggctggagtgcaatggcacgatcttggctcaccgcaaactctgcctcctgggttcaagcgattctcctgcctcagccttctgagtagctgggattacaggcatgcaccaccacagctggctaattttgtatttttaggaaagacagggtttctccatgttggtcaggctggtctcgaattctcgatctcaggtgatccgcccgcctcggccccccaaagtgctgggattacaggcgtgagccatggcgcccaaccatcttttgcaaattttattaaagacaatgctaaaaggaagtgacaactgaaactaatggtcacagtcagtcaagacttcccttttctgaggggcctagcaggaagagaatatttagactgatgcttagtgtaagaaggaatgttgtacaggttaaccagcaacacaaagacatattcaaaagacctaataggtcagaagaataacataccacaccaaaaacaaatctgtatggaaatctagaatcatgtgcatagaaaaagaattttcatgaggataaaaagaagcaaagagaagtaatgctcttattggggcgtgcatcagtggacatgtgctaaccagtaagaacagcaggaggcctaaatgcccatgtttagggagagaatatggaaaaaatggatgggattatttggaaaagatgtaagagattaaaatacgtggtaagagctactcaactcttgtttttctccttttccatagataaagacctgaacaaactgaaaaggtaggacgtaaagtaggaattgtaaaacggaaatactctttatataagaaagctctactgtatgtcagaaagcaatgtaatagatagaccaagcacagtggctcacacctataatgccagcactttgggaggccaaggctggaggattgcttgagtctaggagttcaagccgagcctgggcagcatagtgagaccccatctctacaaaaaataaacagaatttgccagacgtggtagtgcatgcctgtagacccaagtatttgggaggctgaggtgagaggttcgcttgagccctggaagtcgaggcttcagtgaggcaagatcacaccactgcactccagcctgggagagcaagaccctgtctccaaaccaaaaaaaaaggaaaaaagtaaatgtaatagatacttgctaagggctttgtatatacttattattgttatttctcagcacgtatgtagcagatgcaggaaatgaaggctaaaggtcatatatctacaaagtggggaggtcagactttgaacccacaacctgactgtggagccacttcagtatactctctccccataagaaagttccaatagaaaaaaaatgctacttaagtagggaaatcacaaaataagt

SEQ ID NO: 330431 - DNA, 1311 bp, Homo sapiens
taatgctgctggtaagacatgaataaatacataccatctctggcaatcaataccagaagctttaagcattgccttttgactttgaaattgtacctggaaatgtatgtttcagtaaccatcatgaatgtacacaaaatcctgaaactcttaaaactgggattacaggcgtgagccatggcgcccaaccatcttttgcaaattttattaaagacaatgctaaaaggaagtgacaactgaaactaatggtcacagtcagtcaagacttcccttttctgaggggcctagcaggaagagaatatttagactgatgcttagtgtaagaaggaatgttgtacaggttaaccagcaacacaaagacatattcaaaagacctaataggtcagaagaataacataccacaccaaaaacaaatctgtatggaaatctagaatcatgtgcatagaaaaagaattttcatgaggataaaaagaagcaaagagaagtaatgctcttattggggcgtgcatcagtggacatgtgctaaccagtaagaacagcaggaggcctaaatgcccatgtttagggagagaatatggaaaaaatggatgggattatttggaaaagatgtaagagattaaaatacgtggtaagagctactcaactcttgtttttctccttttccatagataaagacctgaacaaactgaaaaggtaggacgtaaagtaggaattgtaaaacggaaatactctttatataagaaagctctactgtatgtcagaaagcaatgtaatagatagaccaagcacagtggctcacacctataatgccagcactttgggaggccaaggctggaggattgcttgagtctaggagttcaagccgagcctgggcagcatagtgagaccccatctctacaaaaaataaacagaatttgccagacgtggtagtgcatgcctgtagacccaagtatttgggaggctgaggtgagaggttcgcttgagccctggaagtcgaggcttcagtgaggcaagatcacaccactgcactccagcctgggagagcaagaccctgtctccaaaccaaaaaaaaaggaaaaaagtaaatgtaatagatacttgctaagggctttgtatatacttattattgttatttctcagcacgtatgtagcagatgcaggaaatgaaggctaaaggtcatatatctacaaagtggggaggtcagactttgaacccacaacctgactgtggagccacttcagtatactctctccccataagaaagttccaatagaaaaaaaatgctacttaagtagggaaatcacaaaataagt

SEQ ID NO: 330432 - DNA, 744 bp, Homo sapiens
tgatgccgtatatagtgaaggggtgaggatattctaaacaaacaaaaattgaataatttattcacagaaactattaagattgtattgtaaagctcacagcaagctcagtgggcagcagctgcaacatctcaccggggaaattattttatttaacgtgagtgagatgtgggccggagaaggtagctgaagctatttataaaacgttgtgtaccttcttccgagctctctcccctttgtgaagggcgcagcaactatacccttgatggatggagatttatgcaatgtgttttactgggtagagtgacagaccttggctgtccctggaattgagaatctggaccttatttccaggcagagaacactgtcctcagaaatgggacttctgataatgaaacaggttgtccaacattttctaatacgcattctacagaacacaggttccaggaggcatcaggttggtgtgatgcagactaagggttttgtggtcaaatatccttaagaaacaaagttaagtcagtttcctttctgcaaggacttttcagccttcaatgtgtgctgtgcatggtgaatccccaaaaataatccttgagtctgtagcatttcctgaacttacatgaccaggatactctattttgcagatcaccccacagagctagggttccaccgagtatactttgcttaggttgacttagcatatctgaggtcttcaaggataaaaactgccaccccaacacccttccatta

SEQ ID NO: 330433 - DNA, 2682 bp, Homo sapiens
tgatgccgtatatagtgaaggggtgaggatattctaaacaaacaaaaattgaataatttattcacagaaactattaagattgtattgtaaagctcacagcaagctcagtgggcagcagctgcaacatctcaccggggaaattattttatttaacgtgagtgagatgtgggccggagaaggtagctgaagctatttataaaacgttgtgtaccttcttccgagctctctcccctttgtgaagggcgcagcaactatacccttgatggatggagatttatgcaatgtgttttactgggtagagtgacagaccttggctgtccctggaattgagaatctggaccttatttccaggcagagaacactgtcctcagaaatgggacttctgataatgaaacaggttgtccaacattttctaatacgcattctacagaacacaggttccaggaggcatcaggttggtgtgatgcagactaagggttttgtggtcaaatatccttaagaaacaaagttaagtcagtttcctttctgcaaggacttttcagccttcaatgtgtgctgtgcatggtgaatccccaaaaataatccttgagtctgtagcatttcctgaacttacatgaccaggatactctattttgcagatcaccccacagagctagggttccaccgagtatactttgcttaggttgacttagcatatctgaggtcttcaaggataaaaactgccaccccaacacccttccattaaaaaaaaaaatacaaaatagcaccacagtctccatctggtttatagcaacagaggtactttatttaatgaagcaatggttctaatcctggatactgccacggactacaattctatccctcccagagggagtggaggaagtcttgggtggtgtggacagaaggaagagaggagagggtgagtggggtatagggcccagggtggctccctactcctcaggctcaaaaggatgctcagtgggaacagatgatctcttgatgagtgcttcttcagtttcatagtttggaatcgttcactgtgtgctttttggggggttttcaatggaaattcacgttgctttgcatttctgtgtccgtctttggtcagttgtgcaagcctgctcactgtcatgtgaagatggcctttcatctggcttctctctcttaagtgagaaagattgtccttcaggggacatgacatcaataggtttctggaatgagggactctttctccccgtgttttgctttgtgttcacattttcttttctaatggcattgaaactttaaaaaaaatggattcaactgtttttgcagaatgtagaaagtattctgtgtccttggttaaagaaatccacttgtgaagtgtgcctggaaaatgaaagtttgtgttttttaaagaggaatatttgaaactgctttctatgcatgcttagctggagaaaagtacaggcaggcgtcccatctcccagccacttctcaaaggtgctgctgtgttttaaagaccaggtacagccagggcagtatttgcaaggacattcctgcttactttatccctttggttggaaagctctagatgattcccgcagctcctccagaccccgcctccctgccctccccagctggtctgggaagaggtggtctgctgacctgtggtatctcagaggggacgttcctcctcctccctgtgcaccaggtgggctgcaccctcctgcctattcaggatgtggatgccacaggagagcagcaggcagtggaaacttcagttgcactggttctcctggtggcaaaggcatgaagcacaggggtcgattaatccaggctactagaaagctccagagcaaagtgtgcgggtcccacaaatgcttggctggtggggtctggatcagtgctgagatagagttggcagaagaagcagaggcactctgcttgctttcctagccagtcctcccctacacacacacacacacacacacacacacacacacacacaatctcagctgcgccattctgtgcaatcccagtgaccaaatcccttccttgcccacctctatgtcagcaggactgaccacatcactcccccgagttcccaccaccagcatttcctccaacctttttccatcacaaccagttagaaccctacaggcaacaaggccttctagaatccgcttaacccttggctgataacaggcaaatttcagtctgctacactttgttaggtccagaaggagctgcccatactactttcttatgagcatgctcagtatggcatatggacatgtaatgtcacatctttgtggagtgtgattttctttttttacatatttgtatgcagtagagagcctgttgtagaaaacgctccctgtatcttgctgtactgttaaagaaagctgaattccacattgccaacaaaagcgtgaaaatgttcatgaaccttcctccaggaaaagccattcaagcctgattatttttctaagtaacttcaattaaattgaagaaaaaaaaaaaaacaacaaaaacaaaaaaagacaagaaaaaaaaaaaaaaaggggggtttatttgtgtggggggagaaaaaggagattaagaaggggaaaggaattagttgtatccagaccgttttgtggtaaaggggaatatgaggcccaagagggggtatatatacggtcgttttgttgtctggat

SEQ ID NO: 330434 - DNA, 918 bp, Homo sapiens
gggtgacttagaggatcctgggatgaggaacgtcactgggattgacagaatggcgcagctgagattgtgtgtgtgtgtgtgtgcgggtcccacaaatgcttggctggtggggtctggatcagtgctgagatagagttggcagaagaagcagaggcactctgcttgctttcctagccagtcctcccctacacacacacacacacacacacacacacacacacacacaatctcagctgcgccattctgtgcaatcccagtgaccaaatcccttccttgcccacctctatgtcagcaggactgaccacatcactcccccgagttcccaccaccagcatttcctccaacctttttccatcacaaccagttagaaccctacaggcaacaaggccttctagaatccgcttaacccttggctgataacaggcaaatttcagtctgctacactttgttaggtccagaaggagctgcccatactactttcttatgagcatgctcagtatggcatatggacatgtaatgtcacatctttgtggagtgtgattttctttttttacatatttgtatgcagtagagagcctgttgtagaaaacgctccctgtatcttgctgtactgttaaagaaagctgaattccacattgccaacaaaagcgtgaaaatgttcatgaaccttcctccaggaaaagccattcaagcctgattatttttctaagtaacttcaattaaattgaagaaaaaaaaaaaaacaacaaaaacaaaaaaagacaagaaaaaaaaaaaaaaaggggggtttatttgtgtggggggagaaaaaggagattaagaaggggaaaggaattagttgtatccagaccgttttgtggtaaaggggaatatgaggcccaagagggggtatatatacggtcgttttgttgtctggat

SEQ ID NO: 330435 - DNA, 627 bp, Homo sapiens
tgcctgccaggtttggttactagaatagctgtgcatcagccacattcctcaaagtggctcaaaacgagagaataaagaggaccctgtagagataagtactacttaactggaaagaagtctgttaagcattgctgctgttccgttgtcctgtgaaagaaccaagacatgcttgtttactaagtgtatagttttataaaattccagtcatactcataagttcttaaactgggagtgtgagagaatggttctgttgagtttgttgatggtagaacataaggtgggtgttcacttattttgtaaaaatggtttgtaattgtagaataaccagttttcgtcaatgcacatattttaccatggatattaatatttatcaggcttttgatgaggccattgctgaacttgatacactgaatgaagactcatacaaagacagcaccctcatcatgcagttgcttagagacaacctaacagtgagttgtttactcttttaattttattttcttttcagaaacaaaagtatttatattttattttggacttcgtgtcttttagggaagatacatacgagctgaaagtatgagatacgtgttagtattttatgggacgaacattattttgtaggcaggt

SEQ ID NO: 330436 - DNA, 2246 bp, Homo sapiens
attgggcggtggaccgcccctcggccccggggtaggctgacacgggagggtcctcagctaaagccaaaagcagatcaaagtggtgggactcgcgtcgcggccgcggagacgtgaagctctcgaggctcctcccgctgcgggtcggcgctcgccctcgctctcctcgccctccgccccggccccggccccgcgcccgccatggagaagactgagctgatccagaaggccaagctggccgagcaggccgagcgctacgacgacatggccacctgcatgaaggcagtgaccgagcagggcgccgagctgtccaacgaggagcgcaacctgctctccgtggcctacaagaacgtggtcgggggccgcaggtccgcctggagggtcatctctagcatcgagcagaagaccgacacctccgacaagaagttgcagctgattaaggactatcgggagaaagtggagtccgagctgagatccatctgcaccacggtgctggaattgttggataaatatttaatagccaatgcaactaatccagagagtaaggtcttctatctgaaaatgaagggtgattacttccggtaccttgctgaagttgcgtgtggtgatgatcgaaaacaaacgatagataattcccaaggagcttaccaagaggcatttgatataagcaagaaagagatgcaacccacacacccaatccgcctggggcttgctcttaacttttctgtattttactatgagattcttaataacccagagcttgcctgcacgctggctaaaacggcttttgatgaggccattgctgaacttgatacactgaatgaagactcatacaaagacagcaccctcatcatgcagttgcttagagacaacctaacactttggacatcagacagtgcaggagaagaatgtgatgcggcagaaggggctgaaaactaaatccatacagggtgtcatccttctttccttcaagaaacctttttacacatctccattccttattccacttggatttcctatagcaaagaaacccattcatgtgtatggaatcaactgtttatagtcttttcacactgcagctttgggaaaacttcattccttgatttgtgtttgtcttggccttcctggtgtgcagtactgctgtagaaaagtattaatagcttcatttcatataaacataagtaactcccaaacacttatgtagaggactaaaaatgtatctggtatttaagtaatctgaaccagttctgcaagtgactgtgttttgtattactgtgaaaataagaaaatgtagttaattacaatttaaagagtattccacataacttcttaatttctacattccctcccttactcttcgggggtttcctttcagtaagcaacttttccatgctcttaatgtattcctttttagtaggaatccggaagtattagattgaatggaaaagcacttgccatctctgtctaggggtcacaaattgaaatggctcctgtatcacatacggaggtcttgtgtatctgtggcaacagggagtttccttattcactctttatttgctgctgtttaagttgccaacctcccctcccaataaaaattcacttacacctcctgcctttgtagttctggtattcactttactatgtgatagaagtagcatgttgctgccagaatacaagcattgcttttggcaaattaaagtgcatgtcatttcttaatacactagaaaggggaaataaattaaagtacacaagtccaagtctaaaactttagtacttttccatgcagatttgtgcacatgtgagagggtgtccagtttgtctagtgattgttatttagagagttggaccactattgtgtgttgctaatcattgactgtagtcccaaaaaagccttgtgaaaatgttatgccctatgtaacagcagagtaacataaaataaaagtacattttataaacccatttactatggctttgtaacaattgcatacccatattttaagggacaggtgaatttactactttctaaagtttattgatacttcccttttatgtaaaatgtagtagtgatacctatatttccacattgtgcattgtgacacacttgtctagggatgcctggaagtgtataaaattggactgcatttcttagagtgttttactatagatcagtctcatgggccatctcttcctcagatgtaaatgatatctggttaagtgttatatggaataaagtggacattttaaaacta

SEQ ID NO: 330437 - DNA, 2285 bp, Homo sapiens
  misc_feature (2249)..(2249): n is a, c, g, or t
attgggcggtggaccgcccctcggccccggggtaggctgacacgggagggtcctcagctaaagccaaaagcagatcaaagtggtgggactcgcgtcgcggccgcggagacgtgaagctctcgaggctcctcccgctgcgggtcggcgctcgccctcgctctcctcgccctccgccccggccccggccccgcgcccgccatggagaagactgagctgatccagaaggccaagctggccgagcaggccgagcgctacgacgacatggccacctgcatgaaggcagtgaccgagcagggcgccgagctgtccaacgaggagcgcaacctgctctccgtggcctacaagaacgtggtcgggggccgcaggtccgcctggagggtcatctctagcatcgagcagaagaccgacacctccgacaagaagttgcagctgattaaggactatcgggagaaagtggagtccgagctgagatccatctgcaccacggtgctggaattgttggataaatatttaatagccaatgcaactaatccagagagtaaggtcttctatctgaaaatgaagggtgattacttccggtaccttgctgaagttgcgtgtggtgatgatcgaaaacaaacgatagataattcccaaggagcttaccaagaggcatttgatataagcaagaaagagatgcaacccacacacccaatccgcctggggcttgctcttaacttttctgtattttactatgagattcttaataacccagagcttgcctgcacgctggctaaaacggcttttgatgaggccattgctgaacttgatacactgaatgaagactcatacaaagacagcaccctcatcatgcagttgcttagagacaacctaacactttggacatcagacagtgcaggagaagaatgtgatgcggcagaaggggctgaaaactaaatccatacagggtgtcatccttctttccttcaagaaacctttttacacatctccattccttattccacttggatttcctatagcaaagaaacccattcatgtgtatggaatcaactgtttatagtcttttcacactgcagctttgggaaaacttcattccttgatttgtgtttgtcttggccttcctggtgtgcagtactgctgtagaaaagtattaatagcttcatttcatataaacataagtaactcccaaacacttatgtagaggactaaaaatgtatctggtatttaagtaatctgaaccagttctgcaagtgactgtgttttgtattactgtgaaaataagaaaatgtagttaattacaatttaaagagtattccacataacttcttaatttctacattccctcccttactcttcgggggtttcctttcagtaagcaacttttccatgctcttaatgtattcctttttagtaggaatccggaagtattagattgaatggaaaagcacttgccatctctgtctaggggtcacaaattgaaatggctcctgtatcacatacggaggtcttgtgtatctgtggcaacagggagtttccttattcactctttatttgctgctgtttaagttgccaacctcccctcccaataaaaattcacttacacctcctgcctttgtagttctggtattcactttactatgtgatagaagtagcatgttgctgccagaatacaagcattgcttttggcaaattaaagtgcatgtcatttcttaatacactagaaaggggaaataaattaaagtacacaagtccaagtctaaaactttagtacttttccatgcagatttgtgcacatgtgagagggtgtccagtttgtctagtgattgttatttagagagttggaccactattgtgtgttgctaatcattgactgtagtcccaaaaaagccttgtgaaaatgttatgccctatgtaacagcagagtaacataaaataaaagtacattttataaacccatttactatggctttgtaacaattgcatacccatattttaagggacaggtgaatttactactttctaaagtttattgatacttcccttttatgtaaaatgtagtagtgatacctatatttccacattgtgcattgtgacacacttgtctagggatgcctggaagtgtataaaattggactgcatttcttagagtgttttactatagatcagtctcatgggccatctcttcctcagatgtaaatgatatctggttaagtgttatatggaataaagtggacattttaaaactaaanaaaaaaaaaaagggcgccgctcgcgatctagaacta

SEQ ID NO: 330438 - DNA, 2625 bp, Homo sapiens
attgggcggtggaccgcccctcggccccggggtaggctgacacgggagggtcctcagctaaagccaaaagcagatcaaagtggtgggactcgcgtcgcggccgcggagacgtgaagctctcgaggctcctcccgctgcgggtcggcgctcgccctcgctctcctcgccctccgccccggccccggccccgcgcccgccatggagaagactgagctgatccagaaggccaagctggccgagcaggccgagcgctacgacgacatggccacctgcatgaaggcagtgaccgagcagggcgccgagctgtccaacgaggagcgcaacctgctctccgtggcctacaagaacgtggtcgggggccgcaggtccgcctggagggtcatctctagcatcgagcagaagaccgacacctccgacaagaagttgcagctgattaaggactatcgggagaaagtggagtccgagctgagatccatctgcaccacggtgctggaattgttggataaatatttaatagccaatgcaactaatccagagagtaaggtcttctatctgaaaatgaagggtgattacttccggtaccttgctgaagttgcgtgtggtgatgatcgaaaacaaacgatagataattcccaaggagcttaccaagaggcatttgatataagcaagaaagagatgcaacccacacacccaatccgcctggggcttgctcttaacttttctgtattttactatgagattcttaataacccagagcttgcctgcacgctggctaaaacggcttttgatgaggccattgctgaacttgatacactgaatgaagactcatacaaagacagcaccctcatcatgcagttgcttagagacaacctaacactttggacatcagacagtgcaggagaagaatgtgatgcggcagaaggggctgaaaactaaatccatacagggtgtcatccttctttccttcaagaaacctttttacacatctccattccttattccacttggatttcctatagcaaagaaacccattcatgtgtatggaatcaactgtttatagtcttttcacactgcagctttgggaaaacttcattccttgatttgtgtttgtcttggccttcctggtgtgcagtactgctgtagaaaagtattaatagcttcatttcatataaacataagtaactcccaaacacttatgtagaggactaaaaatgtatctggtatttaagtaatctgaaccagttctgcaagtgactgtgttttgtattactgtgaaaataagaaaatgtagttaattacaatttaaagagtattccacataacttcttaatttctacattccctcccttactcttcgggggtttcctttcagtaagcaacttttccatgctcttaatgtattcctttttagtaggaatccggaagtattagattgaatggaaaagcacttgccatctctgtctaggggtcacaaattgaaatggctcctgtatcacatacggaggtcttgtgtatctgtggcaacagggagtttccttattcactctttatttgctgctgtttaagttgccaacctcccctcccaataaaaattcacttacacctcctgcctttgtagttctggtattcactttactatgtgatagaagtagcatgttgctgccagaatacaagcattgcttttggcaaattaaagtgcatgtcatttcttaatacactagaaaggggaaataaattaaagtacacaagtccaagtctaaaactttagtacttttccatgcagatttgtgcacatgtgagagggtgtccagtttgtctagtgattgttatttagagagttggaccactattgtgtgttgctaatcattgactgtagtcccaaaaaagccttgtgaaaatgttatgccctatgtaacagcagagtaacataaaataaaagtacattttataaacccatttactatggctttgtaacaattgcatacccatattttaagggacaggtgaatttactactttctaaagtttattgatacttcccttttatgtaaaatgtagtagtgatacctatatttccacattgtgcattgtgacacacttgtctagggatgcctggaagtgtataaaattggactgcatttcttagagtgttttactatagatcagtctcatgggccatctcttcctcagatgtaaatgatatctggttaagtgttatatggaataaagtggacattttaaaactatataaaaaaaaaaaaaagggggccgtcggggatttaaaatagggcgaagaaaaaaaatttttttcagccttagttgtttttgccggggggctttggagcaagaaagtgggttgggggggtaattggcctggatgtagcctgggggtggtggattcctccggtataaattgaccccaggatgattgttcttccctcagtaaacgtatagttcaaaaatcgagagtgatgcaaggtaaattgttcaacgggatgaaaggtggtacaaaaaagggggggataatactagggcatggacgtttaaggcatgggtaaagggggaaatgacgtgtgggattgggtagacacacgtattttttgtggtttttattttataggaggc

SEQ ID NO: 330439 - DNA, 2126 bp, Homo sapiens
attgggcggtggaccgcccctcggccccggggtaggctgacacgggagggtcctcagctaaagccaaaagcagatcaaagtggtgggactcgcgtcgcggccgcggagacgtgaagctctcgaggctcctcccgctgcgggtcggcgctcgccctcgctctcctcgccctccgccccggccccggccccgcgcccgccatggagaagactgagctgatccagaaggccaagctggccgagcaggccgagcgctacgacgacatggccacctgcatgaaggcagtgaccgagcagggcgccgagctgtccaacgaggagcgcaacctgctctccgtggcctacaagaacgtggtcgggggccgcaggtccgcctggagggtcatctctagcatcgagcagaagaccgacacctccgacaagaagttgcagctgattaaggactatcgggagaaagtggagtccgagctgagatccatctgcaccacggtgctggaattgttggataaatatttaatagccaatgcaactaatccagagagtaaggtcttctatctgaaaatgaagggtgattacttccggtaccttgctgaagttgcgtgtggtgatgatcgaaaacaaacgatagataattcccaaggagcttaccaagaggcatttgatataagcaagaaagagatgcaacccacacacccaatccgcctggggcttgctcttaacttttctgtattttactatgagattcttaataacccagagcttgcctgcacgctggctaaaacggcttttgatgaggccattgctgaacttgatacactgaatgaagactcatacaaagacagcaccctcatcatgcagttgcttagagacaacctaacactttggacatcagacagtgcaggagaagaatgtgatgcggcagaaggggctgaaaactaaatccatacagggtgtcatccttctttccttcaagaaacctttttacacatctccattccttattccacttggatttcctatagcaaagaaacccattcatgtgtatggaatcaactgtttatagtcttttcacactgcagctttgggaaaacttcattccttgatttgtgtttgtcttggccttcctggtgtgcagtactgctgtagaaaagtattaatagcttcatttcatataaacataagtaactcccaaacacttatgtagaggactaaaaatgtatctggtatttaagtaatctgaaccagttctgcaagtgactgtgttttgtattactgtgaaaataagaaaatgtagttaattacaatttaaagagtattccacataacttcttaatttctacattccctcccttactcttcgggggtttcctttcagtaagcaacttttccatgctcttaatgtattcctttttagtaggaatccggaagtattagattgaatggaaaagcacttgccatctctgtctaggggtcacaaattgaaatggctcctgtatcacatacggaggtcttgtgtatctgtggcaacagggagtttccttattcactctttatttgctgctgtttaagttgccaacctcccctcccaataaaaattcacttacacctcctgcctttgtagttctggtattcactttactatgtgatagaagtagcatgttgctgccagaatacaagcattgcttttggcaaattaaagtgcatgtcatttcttaatacactagaaaggggaaataaattaaagtacacaagtccaagtctaaaactttagtacttttccatgcagatttgtgcacatgtgagagggtgtccagtttgtctagtgattgttatttagagagttggaccactattgtgtgttgctaatcattgactgtagtcccaaaaaagccttgtgaaaatgttatgccctatgtaacagcagagtaacataaaataaaagtacattttataaacccaaaaaaaaaaaaaaaaaaaaaaattttggggcgctgcgcccagaaagtttataacctctttgggcgcgggccaggaatgaacgtgcacggttccaggaacccgcaacaaggtgttttcccaaaaaagcgggccggtctgaaaccacagggtgggtggtcaagcgtaagcgg

SEQ ID NO: 330440 - DNA, 2175 bp, Homo sapiens
  misc_feature (5)..(5): n is a, c, g, or t
  misc_feature (22)..(22): n is a, c, g, or t
  misc_feature (32)..(32): n is a, c, g, or t
gggangaaaattagcctaggtngggctgggtntgaattggcgaggctctcgaggctcctcccgctgcgggtcggcgctcgccctcgctctcctcgccctccgccccggccccggccccgcgcccgccatggagaagactgagctgatccagaaggccaagctggccgagcaggccgagcgctacgacgacatggccacctgcatgaaggcagtgaccgagcagggcgccgagctgtccaacgaggagcgcaacctgctctccgtggcctacaagaacgtggtcgggggccgcaggtccgcctggagggtcatctctagcatcgagcagaagaccgacacctccgacaagaagttgcagctgattaaggactatcgggagaaagtggagtccgagctgagatccatctgcaccacggtgctggaattgttggataaatatttaatagccaatgcaactaatccagagagtaaggtcttctatctgaaaatgaagggtgattacttccggtaccttgctgaagttgcgtgtggtgatgatcgaaaacaaacgatagataattcccaaggagcttaccaagaggcatttgatataagcaagaaagagatgcaacccacacacccaatccgcctggggcttgctcttaacttttctgtattttactatgagattcttaataacccagagcttgcctgcacgctggctaaaacggcttttgatgaggccattgctgaacttgatacactgaatgaagactcatacaaagacagcaccctcatcatgcagttgcttagagacaacctaacactttggacatcagacagtgcaggagaagaatgtgatgcggcagaaggggctgaaaactaaatccatacagggtgtcatccttctttccttcaagaaacctttttacacatctccattccttattccacttggatttcctatagcaaagaaacccattcatgtgtatggaatcaactgtttatagtcttttcacactgcagctttgggaaaacttcattccttgatttgtgtttgtcttggccttcctggtgtgcagtactgctgtagaaaagtattaatagcttcatttcatataaacataagtaactcccaaacacttatgtagaggactaaaaatgtatctggtatttaagtaatctgaaccagttctgcaagtgactgtgttttgtattactgtgaaaataagaaaatgtagttaattacaatttaaagagtattccacataacttcttaatttctacattccctcccttactcttcgggggtttcctttcagtaagcaacttttccatgctcttaatgtattcctttttagtaggaatccggaagtattagattgaatggaaaagcacttgccatctctgtctaggggtcacaaattgaaatggctcctgtatcacatacggaggtcttgtgtatctgtggcaacagggagtttccttattcactctttatttgctgctgtttaagttgccaacctcccctcccaataaaaattcacttacacctcctgcctttgtagttctggtattcactttactatgtgatagaagtagcatgttgctgccagaatacaagcattgcttttggcaaattaaagtgcatgtcatttcttaatacactagaaaggggaaataaattaaagtacacaagtccaagtctaaaactttagtacttttccatgcagatttgtgcacatgtgagagggtgtccagtttgtctagtgattgttatttagagagttggaccactattgtgtgttgctaatcattgactgtagtcccaaaaaagccttgtgaaaatgttatgccctatgtaacagcagagtaacataaaataaaagtacattttataaacccatttactatggctttgtaacaattgcatacccatattttaagggacaggtgaatttactactttctaaagtttattgatacttcccttttatgtaaaatgtagtagtgatacctatatttccacattgtgcattgtgacacacttgtctagggatgcctggaagtgtataaaattggactgcatttcttagagtgttttactatagatcagtctcatgggccatctcttcctcagatgtaaatgatatctggttaagtgttatatggaataaagtggacattttaaaacta

SEQ ID NO: 330441 - DNA, 2198 bp, Homo sapiens
attgggcggtggaccgcccctcggccccggggtaggctgacacgggagggtcctcagctaaagccaaaagcagatcaaagtggtgggactcgcgtcgcggccgcggagacgtgaagctctcgaggctcctcccgctgcgggtcggcgctcgccctcgctctcctcgccctccgccccggccccggccccgcgcccgccatggagaagactgagctgatccagaaggccaagctggccgagcaggccgagcgctacgacgacatggccacctgcatgaaggcagtgaccgagcagggcgccgagctgtccaacgaggagcgcaacctgctctccgtggcctacaagaacgtggtcgggggccgcaggtccgcctggagggtcatctctagcatcgagcagaagaccgacacctccgacaagaagttgcagctgattaaggactatcgggagaaagtggagtccgagctgagatccatctgcaccacggtgctggaattgttggataaatatttaatagccaatgcaactaatccagagagtaaggtcttctatctgaaaatgaagggtgattacttccggtaccttgctgaagttgcgtgtggtgatgatcgaaaacaaacgatagataattcccaaggagcttaccaagaggcatttgatataagcaagaaagagatgcaacccacacacccaatccgcctggggcttgctcttaacttttctgtattttactatgagattcttaataacccagagcttgcctgcacgctggctaaaacggcttttgatgaggccattgctgaacttgatacactgaatgaagactcatacaaagacagcaccctcatcatgcagttgcttagagacaacctaacactttggacatcagacagtgcaggagaagaatgtgatgcggcagaaggggctgaaaactaaatccatacagggtgtcatccttctttccttcaagaaacctttttacacatctccattccttattccacttggatttcctatagcaaagaaacccattcatgtgtatggaatcaactgtttatagtcttttcacactgcagctttgggaaaacttcattccttgatttgtgtttgtcttggccttcctggtgtgcagtactgctgtagaaaagtattaatagcttcatttcatataaacataagtaactcccaaacacttatgtagaggactaaaaatgtatctggtatttaagtaatctgaaccagttctgcaagtgactgtgttttgtattactgtgaaaataagaaaatgtagttaattacaatttaaagagtattccacataacttcttaatttctacattccctcccttactcttcgggggtttcctttcagtaagcaacttttccatgctcttaatgtattcctttttagtaggaatccggaagtattagattgaatggaaaagcacttgccatctctgtctaggggtcacaaattgaaatggctcctgtatcacatacggaggtcttgtgtatctgtggcaacagggagtttccttattcactctttatttgctgctgtttaagttgccaacctcccctcccaataaaaattcacttacacctcctgcctttgtagttctggtattcactttactatgtgatagaagtagcatgttgctgccagaatacaagcattgcttttggcaaattaaagtgcatgtcatttcttaatacactagaaaggggaaataaattaaagtacacaagtccaagtctaaaactttagtacttttccatgcagatttgtgcacatgtgagagggtgtccagtttgtctagtgattgttatttagagagttggaccactattgtgtgttgctaatcattgactgtagtcccaaaaaagccttgtgaaaatgttatgccctatgtaacagcagagtaacataaacatacccatattttaagggacaggtgaatttactactttctaaagtttattgatacttcccttttatgtaaaatgtagtagtgatacctatatttccacattgtgcattgtgacacacttgtctagggatgcctggaagtgtataaaattggactgcatttcttagagtgttttactatagatcagtctcatgggccatctcttcctcagatgtaaatgatatctggttaagtgttatatggaataaagtggacattttaaaacta

SEQ ID NO: 330442 - DNA, 2323 bp, Homo sapiens
attgggcggtggaccgcccctcggccccggggtaggctgacacgggagggtcctcagctaaagccaaaagcagatcaaagtggtgggactcgcgtcgcggccgcggagacgtgaagctctcgaggctcctcccgctgcgggtcggcgctcgccctcgctctcctcgccctccgccccggccccggccccgcgcccgccatggagaagactgagctgatccagaaggccaagctggccgagcaggccgagcgctacgacgacatggccacctgcatgaaggcagtgaccgagcagggcgccgagctgtccaacgaggagcgcaacctgctctccgtggcctacaagaacgtggtcgggggccgcaggtccgcctggagggtcatctctagcatcgagcagaagaccgacacctccgacaagaagttgcagctgattaaggactatcgggagaaagtggagtccgagctgagatccatctgcaccacggtgctggaattgttggataaatatttaatagccaatgcaactaatccagagagtaaggtcttctatctgaaaatgaagggtgattacttccggtaccttgctgaagttgcgtgtggtgatgatcgaaaacaaacgatagataattcccaaggagcttaccaagaggcatttgatataagcaagaaagagatgcaacccacacacccaatccgcctggggcttgctcttaacttttctgtattttactatgagattcttaataacccagagcttgcctgcacgctggctaaaacggcttttgatgaggccattgctgaacttgatacactgaatgaagactcatacaaagacagcaccctcatcatgcagttgcttagagacaacctaacactttggacatcagacagtgcaggagaagaatgtgatgcggcagaaggggctgaaaactaaatccatacagggtgtcatccttctttccttcaagaaacctttttacacatctccattccttattccacttggatttcctatagcaaagaaacccattcatgtgtatggaatcaactgtttatagtcttttcacactgcagctttgggaaaagactataaacagttgattccattcatgtgtatggaatcaactgtttatagtcttttcacactgcagctttgggaaaacttcattccttgatttgtgtttgtcttggccttcctggtgtgcagtactgctgtagaaaagtattaatagcttcatttcatataaacataagtaactcccaaacacttatgtagaggactaaaaatgtatctggtatttaagtaatctgaaccagttctgcaagtgactgtgttttgtattactgtgaaaataagaaaatgtagttaattacaatttaaagagtattccacataacttcttaatttctacattccctcccttactcttcgggggtttcctttcagtaagcaacttttccatgctcttaatgtattcctttttagtaggaatccggaagtattagattgaatggaaaagcacttgccatctctgtctaggggtcacaaattgaaatggctcctgtatcacatacggaggtcttgtgtatctgtggcaacagggagtttccttattcactctttatttgctgctgtttaagttgccaacctcccctcccaataaaaattcacttacacctcctgcctttgtagttctggtattcactttactatgtgatagaagtagcatgttgctgccagaatacaagcattgcttttggcaaattaaagtgcatgtcatttcttaatacactagaaaggggaaataaattaaagtacacaagtccaagtctaaaactttagtacttttccatgcagatttgtgcacatgtgagagggtgtccagtttgtctagtgattgttatttagagagttggaccactattgtgtgttgctaatcattgactgtagtcccaaaaaagccttgtgaaaatgttatgccctatgtaacagcagagtaacataaaataaaagtacattttataaacccatttactatggctttgtaacaattgcatacccatattttaagggacaggtgaatttactactttctaaagtttattgatacttcccttttatgtaaaatgtagtagtgatacctatatttccacattgtgcattgtgacacacttgtctagggatgcctggaagtgtataaaattggactgcatttcttagagtgttttactatagatcagtctcatgggccatctcttcctcagatgtaaatgatatctggttaagtgttatatggaataaagtggacattttaaaacta

SEQ ID NO: 330443 - DNA, 1931 bp, Homo sapiens
gactcgcgtcgcggcgcggagacgtgaagctctcgaggctcctcccgcaggtccgcctggagggtcatctctagcatcgagcagaagaccgacacctccgacaagaagttgcagctgattaaggactatcgggagaaagtggagtccgagctgagatccatctgcaccacggtgctggaattgttggataaatatttaatagccaatgcaactaatccagagagtaaggtcttctatctgaaaatgaagggtgattacttccggtaccttgctgaagttgcgtgtggtgatgatcgaaaacaaacgatagataattcccaaggagcttaccaagaggcatttgatataagcaagaaagagatgcaacccacacacccaatccgcctggggcttgctcttaacttttctgtattttactatgagattcttaataacccagagcttgcctgcacgctggctaaaacggcttttgatgaggccattgctgaacttgatacactgaatgaagactcatacaaagacagcaccctcatcatgcagttgcttagagacaacctaacactttggacatcagacagtgcaggagaagaatgtgatgcggcagaaggggctgaaaactaaatccatacagggtgtcatccttctttccttcaagaaacctttttacacatctccattccttattccacttggatttcctatagcaaagaaacccattcatgtgtatggaatcaactgtttatagtcttttcacactgcagctttgggaaaacttcattccttgatttgtgtttgtcttggccttcctggtgtgcagtactgctgtagaaaagtattaatagcttcatttcatataaacataagtaactcccaaacacttatgtagaggactaaaaatgtatctggtatttaagtaatctgaaccagttctgcaagtgactgtgttttgtattactgtgaaaataagaaaatgtagttaattacaatttaaagagtattccacataacttcttaatttctacattccctcccttactcttcgggggtttcctttcagtaagcaacttttccatgctcttaatgtattcctttttagtaggaatccggaagtattagattgaatggaaaagcacttgccatctctgtctaggggtcacaaattgaaatggctcctgtatcacatacggaggtcttgtgtatctgtggcaacagggagtttccttattcactctttatttgctgctgtttaagttgccaacctcccctcccaataaaaattcacttacacctcctgcctttgtagttctggtattcactttactatgtgatagaagtagcatgttgctgccagaatacaagcattgcttttggcaaattaaagtgcatgtcatttcttaatacactagaaaggggaaataaattaaagtacacaagtccaagtctaaaactttagtacttttccatgcagatttgtgcacatgtgagagggtgtccagtttgtctagtgattgttatttagagagttggaccactattgtgtgttgctaatcattgactgtagtcccaaaaaagccttgtgaaaatgttatgccctatgtaacagcagagtaacataaaataaaagtacattttataaacccatttactatggctttgtaacaattgcatacccatattttaagggacaggtgaatttactactttctaaagtttattgatacttcccttttatgtaaaatgtagtagtgatacctatatttccacattgtgcattgtgacacacttgtctagggatgcctggaagtgtataaaattggactgcatttcttagagtgttttactatagatcagtctcatgggccatctcttcctcagatgtaaatgatatctggttaagtgttatatggaataaagtggacattttaaaacta

SEQ ID NO: 330444 - DNA, 2105 bp, Homo sapiens
attgggcggtggaccgcccctcggccccggggtaggctgacacgggagggtcctcagctaaagccaaaagcagatcaaagtggtgggactcgcgtcgcggccgcggagacgtgaagctctcgaggctcctcccgctgcgggtcggcgctcgccctcgctctcctcgccctccgccccggccccggccccgcgcccgccatggagaagactgagctgatccgcaggtccgcctggagggtcatctctagcatcgagcagaagaccgacacctccgacaagaagttgcagctgattaaggactatcgggagaaagtggagtccgagctgagatccatctgcaccacggtgctggaattgttggataaatatttaatagccaatgcaactaatccagagagtaaggtcttctatctgaaaatgaagggtgattacttccggtaccttgctgaagttgcgtgtggtgatgatcgaaaacaaacgatagataattcccaaggagcttaccaagaggcatttgatataagcaagaaagagatgcaacccacacacccaatccgcctggggcttgctcttaacttttctgtattttactatgagattcttaataacccagagcttgcctgcacgctggctaaaacggcttttgatgaggccattgctgaacttgatacactgaatgaagactcatacaaagacagcaccctcatcatgcagttgcttagagacaacctaacactttggacatcagacagtgcaggagaagaatgtgatgcggcagaaggggctgaaaactaaatccatacagggtgtcatccttctttccttcaagaaacctttttacacatctccattccttattccacttggatttcctatagcaaagaaacccattcatgtgtatggaatcaactgtttatagtcttttcacactgcagctttgggaaaacttcattccttgatttgtgtttgtcttggccttcctggtgtgcagtactgctgtagaaaagtattaatagcttcatttcatataaacataagtaactcccaaacacttatgtagaggactaaaaatgtatctggtatttaagtaatctgaaccagttctgcaagtgactgtgttttgtattactgtgaaaataagaaaatgtagttaattacaatttaaagagtattccacataacttcttaatttctacattccctcccttactcttcgggggtttcctttcagtaagcaacttttccatgctcttaatgtattcctttttagtaggaatccggaagtattagattgaatggaaaagcacttgccatctctgtctaggggtcacaaattgaaatggctcctgtatcacatacggaggtcttgtgtatctgtggcaacagggagtttccttattcactctttatttgctgctgtttaagttgccaacctcccctcccaataaaaattcacttacacctcctgcctttgtagttctggtattcactttactatgtgatagaagtagcatgttgctgccagaatacaagcattgcttttggcaaattaaagtgcatgtcatttcttaatacactagaaaggggaaataaattaaagtacacaagtccaagtctaaaactttagtacttttccatgcagatttgtgcacatgtgagagggtgtccagtttgtctagtgattgttatttagagagttggaccactattgtgtgttgctaatcattgactgtagtcccaaaaaagccttgtgaaaatgttatgccctatgtaacagcagagtaacataaaataaaagtacattttataaacccatttactatggctttgtaacaattgcatacccatattttaagggacaggtgaatttactactttctaaagtttattgatacttcccttttatgtaaaatgtagtagtgatacctatatttccacattgtgcattgtgacacacttgtctagggatgcctggaagtgtataaaattggactgcatttcttagagtgttttactatagatcagtctcatgggccatctcttcctcagatgtaaatgatatctggttaagtgttatatggaataaagtggacattttaaaacta

SEQ ID NO: 330445 - DNA, 1924 bp, Homo sapiens
accaaccgcgacccaaagccaaggactaactgtatataacatacactcacaggaatccacactgtcacccgggctgcagtgcagtagcatgatctcggctcactgcaacctccacctcccaggttcaagcaattctcctgcctcagcctcctgagtagctgggattacaggaattgttggataaatatttaatagccaatgcaactaatccagagagtaaggtcttctatctgaaaatgaagggtgattacttccggtaccttgctgaagttgcgtgtggtgatgatcgaaaacaaacgatagataattcccaaggagcttaccaagaggcatttgatataagcaagaaagagatgcaacccacacacccaatccgcctggggcttgctcttaacttttctgtattttactatgagattcttaataacccagagcttgcctgcacgctggctaaaacggcttttgatgaggccattgctgaacttgatacactgaatgaagactcatacaaagacagcaccctcatcatgcagttgcttagagacaacctaacactttggacatcagacagtgcaggagaagaatgtgatgcggcagaaggggctgaaaactaaatccatacagggtgtcatccttctttccttcaagaaacctttttacacatctccattccttattccacttggatttcctatagcaaagaaacccattcatgtgtatggaatcaactgtttatagtcttttcacactgcagctttgggaaaacttcattccttgatttgtgtttgtcttggccttcctggtgtgcagtactgctgtagaaaagtattaatagcttcatttcatataaacataagtaactcccaaacacttatgtagaggactaaaaatgtatctggtatttaagtaatctgaaccagttctgcaagtgactgtgttttgtattactgtgaaaataagaaaatgtagttaattacaatttaaagagtattccacataacttcttaatttctacattccctcccttactcttcgggggtttcctttcagtaagcaacttttccatgctcttaatgtattcctttttagtaggaatccggaagtattagattgaatggaaaagcacttgccatctctgtctaggggtcacaaattgaaatggctcctgtatcacatacggaggtcttgtgtatctgtggcaacagggagtttccttattcactctttatttgctgctgtttaagttgccaacctcccctcccaataaaaattcacttacacctcctgcctttgtagttctggtattcactttactatgtgatagaagtagcatgttgctgccagaatacaagcattgcttttggcaaattaaagtgcatgtcatttcttaatacactagaaaggggaaataaattaaagtacacaagtccaagtctaaaactttagtacttttccatgcagatttgtgcacatgtgagagggtgtccagtttgtctagtgattgttatttagagagttggaccactattgtgtgttgctaatcattgactgtagtcccaaaaaagccttgtgaaaatgttatgccctatgtaacagcagagtaacataaaataaaagtacattttataaacccatttactatggctttgtaacaattgcatacccatattttaagggacaggtgaatttactactttctaaagtttattgatacttcccttttatgtaaaatgtagtagtgatacctatatttccacattgtgcattgtgacacacttgtctagggatgcctggaagtgtataaaattggactgcatttcttagagtgttttactatagatcagtctcatgggccatctcttcctcagatgtaaatgatatctggttaagtgttatatggaataaagtggacattttaaaacta

SEQ ID NO: 330446 - DNA, 1840 bp, Homo sapiens
atggttgttctcacgttttcttcgtccctttctctcctcttcgtcttctcgcattcacaccgcgtccgggcccctggtcggtcgacgaattgttggataaatatttaatagccaatgcaactaatccagagagtaaggtcttctatctgaaaatgaagggtgattacttccggtaccttgctgaagttgcgtgtggtgatgatcgaaaacaaacgatagataattcccaaggagcttaccaagaggcatttgatataagcaagaaagagatgcaacccacacacccaatccgcctggggcttgctcttaacttttctgtattttactatgagattcttaataacccagagcttgcctgcacgctggctaaaacggcttttgatgaggccattgctgaacttgatacactgaatgaagactcatacaaagacagcaccctcatcatgcagttgcttagagacaacctaacactttggacatcagacagtgcaggagaagaatgtgatgcggcagaaggggctgaaaactaaatccatacagggtgtcatccttctttccttcaagaaacctttttacacatctccattccttattccacttggatttcctatagcaaagaaacccattcatgtgtatggaatcaactgtttatagtcttttcacactgcagctttgggaaaacttcattccttgatttgtgtttgtcttggccttcctggtgtgcagtactgctgtagaaaagtattaatagcttcatttcatataaacataagtaactcccaaacacttatgtagaggactaaaaatgtatctggtatttaagtaatctgaaccagttctgcaagtgactgtgttttgtattactgtgaaaataagaaaatgtagttaattacaatttaaagagtattccacataacttcttaatttctacattccctcccttactcttcgggggtttcctttcagtaagcaacttttccatgctcttaatgtattcctttttagtaggaatccggaagtattagattgaatggaaaagcacttgccatctctgtctaggggtcacaaattgaaatggctcctgtatcacatacggaggtcttgtgtatctgtggcaacagggagtttccttattcactctttatttgctgctgtttaagttgccaacctcccctcccaataaaaattcacttacacctcctgcctttgtagttctggtattcactttactatgtgatagaagtagcatgttgctgccagaatacaagcattgcttttggcaaattaaagtgcatgtcatttcttaatacactagaaaggggaaataaattaaagtacacaagtccaagtctaaaactttagtacttttccatgcagatttgtgcacatgtgagagggtgtccagtttgtctagtgattgttatttagagagttggaccactattgtgtgttgctaatcattgactgtagtcccaaaaaagccttgtgaaaatgttatgccctatgtaacagcagagtaacataaaataaaagtacattttataaacccatttactatggctttgtaacaattgcatacccatattttaagggacaggtgaatttactactttctaaagtttattgatacttcccttttatgtaaaatgtagtagtgatacctatatttccacattgtgcattgtgacacacttgtctagggatgcctggaagtgtataaaattggactgcatttcttagagtgttttactatagatcagtctcatgggccatctcttcctcagatgtaaatgatatctggttaagtgttatatggaataaagtggacattttaaaacta

SEQ ID NO: 330447 - DNA, 2197 bp, Homo sapiens
attgggcggtggaccgcccctcggccccggggtaggctgacacgggagggtcctcagctaaagccaaaagcagatcaaagtggtgggactcgcgtcgcggccgcggagacgtgaagctctcgaggctcctcccgctgcgggtcggcgctcgccctcgctctcctcgccctccgccccggccccggccccgcgcccgccatggagaagactgagctgatccagaaggccaagctggccgagcaggccgagcgctacgacgacatggccacctgcatgaaggcagtgaccgagcagggcgccgagctgtccaacgaggagcgcaacctgctctccgtggcctacaagaacgtggtcgggggccgcaggtccgcctggagggtcatctctagcatcgagcagaagaccgacacctccgacaagaagttgcagctgattaaggactatcgggagaaagtggagtccgagctgagatccatctgcaccacggtgctggaattgttggataaatatttaatagccaatgcaactaatccagagagtaaggtcttctatctgaaaatgaagggtgattacttccggtaccttgctgaagttgcgtgtggtgatgatcgaaaaccaagaaagagatgcaacccacacacccaatccgcctggggcttgctcttaacttttctgtattttactatgagattcttaataacccagagcttgcctgcacgctggctaaaacggcttttgatgaggccattgctgaacttgatacactgaatgaagactcatacaaagacagcaccctcatcatgcagttgcttagagacaacctaacactttggacatcagacagtgcaggagaagaatgtgatgcggcagaaggggctgaaaactaaatccatacagggtgtcatccttctttccttcaagaaacctttttacacatctccattccttattccacttggatttcctatagcaaagaaacccattcatgtgtatggaatcaactgtttatagtcttttcacactgcagctttgggaaaacttcattccttgatttgtgtttgtcttggccttcctggtgtgcagtactgctgtagaaaagtattaatagcttcatttcatataaacataagtaactcccaaacacttatgtagaggactaaaaatgtatctggtatttaagtaatctgaaccagttctgcaagtgactgtgttttgtattactgtgaaaataagaaaatgtagttaattacaatttaaagagtattccacataacttcttaatttctacattccctcccttactcttcgggggtttcctttcagtaagcaacttttccatgctcttaatgtattcctttttagtaggaatccggaagtattagattgaatggaaaagcacttgccatctctgtctaggggtcacaaattgaaatggctcctgtatcacatacggaggtcttgtgtatctgtggcaacagggagtttccttattcactctttatttgctgctgtttaagttgccaacctcccctcccaataaaaattcacttacacctcctgcctttgtagttctggtattcactttactatgtgatagaagtagcatgttgctgccagaatacaagcattgcttttggcaaattaaagtgcatgtcatttcttaatacactagaaaggggaaataaattaaagtacacaagtccaagtctaaaactttagtacttttccatgcagatttgtgcacatgtgagagggtgtccagtttgtctagtgattgttatttagagagttggaccactattgtgtgttgctaatcattgactgtagtcccaaaaaagccttgtgaaaatgttatgccctatgtaacagcagagtaacataaaataaaagtacattttataaacccatttactatggctttgtaacaattgcatacccatattttaagggacaggtgaatttactactttctaaagtttattgatacttcccttttatgtaaaatgtagtagtgatacctatatttccacattgtgcattgtgacacacttgtctagggatgcctggaagtgtataaaattggactgcatttcttagagtgttttactatagatcagtctcatgggccatctcttcctcagatgtaaatgatatctggttaagtgttatatggaataaagtggacattttaaaacta

SEQ ID NO: 330448 - DNA, 1775 bp, Homo sapiens
attgggcggtggaccgcccctcggccccggggtaggctgacacgggagggtcctcagctaaagccaaaagcagatcaaagtggtgggactcgcgtcgcggccgcggagacgtgaagctctcgaggctcctcccgctgcgggtcggcgctcgccctcgctctcctcgccctccgccccggccccggccccgcgcccgccatggagaagactgagctgatccagaaggccaagctggccgagcaggccgagcgctacgacgacatggccacctgcatgaaggcagtgaccgagcagggcgccgagctgtccaacgaggagcgcaacctgctctccgtggcctacaagaacgtggtcgggggccgcaggtccgcctggagggtcatctctagcatcgagcagaagaccgacacctccgacaagaagttgcagctgattaaggactatcgggagaaagtggagtccgagctgagatccatctgcaccacggtgctggaattgttggataaatatttaatagccaatgcaactaatccagagagtaaggtcttctatctgaaaatgaagggtgattacttccggtaccttgctgaagttgcgtgtggtgatgatcgaaaacaaacgatagataattcccaaggagcttaccaagaggcatttgatataagcaagaaagagatgcaacccacacacccaatccgcctggggcttgctcttaacttttctgtattttactatgagattcttaataacccagagcttgcctgcacgctggctaaaacggcttttgatgaggccattgctgaacttgatacactgaatgaagactcatacaaagacagcaccctcatcatgcagttgcttagagacaacctaacactttggacatcagacagtgcaggagaagaatgtgatgcggcagaaggggctgaaaactaaatccatacagggtgtcatccttctttccttcaagaaacctttttacacatctccattccttattccacttggatttcctatagcaaagaaacccattcatgtgtatggaatcaactgtttatagtcttttcacactgcagctttgggaaaacttcattccttgatttgtgtttgtcttggccttcctggtgtgcagtactgctgtagaaaagtattaatagcttcatttcatataaacataagtaactcccaaacacttatgtagaggactaaaaatgtatctggtatttaagtaatctgaaccagttctgcaagtgactgtgttttgtattactgtgaaaataagaaaatgtagttaattacaatttaaagagtattccacataacttcttaatttctacattccctcccttactcttcgggggtttcctttcagtaagcaacttttccatgctcttaatgtattcctttttagtaggaatccggaagtattagattgaatggaaaagcacttgccatctctgtctaggggtcacaaattgaaatggctcctgtatcacatacggaggtcttgtgtatctgtggcaacagggagtttccttattcactctttatttgctgctgtttaagttgccaacctcccctcccaataaaaattcacttacacctaaaaaaaaaaaaaaaaaaaaaattttggggcgctgcgcccagaaagtttataacctctttgggcgcgggccaggaatgaacgtgcacggttccaggaacccgcaacaaggtgttttcccaaaaaagcgggccggtctgaaaccacagggtgggtggtcaagcgtaagcgg

SEQ ID NO: 330449 - DNA, 2082 bp, Homo sapiens
attgggcggtggaccgcccctcggccccggggtaggctgacacgggagggtcctcagctaaagccaaaagcagatcaaagtggtgggactcgcgtcgcggccgcggagacgtgaagctctcgaggctcctcccgctgcgggtcggcgctcgccctcgctctcctcgccctccgccccggccccggccccgcgcccgccatggagaagactgagctgatccagaaggccaagctggccgagcaggccgagcgctacgacgacatggccacctgcatgaaggcagtgaccgagcagggcgccgagctgtccaacgaggagcgcaacctgctctccgtggcctacaagaacgtggtcgggggccgcaggtccgcctggagggtcatctctagcatcgagcagaagaccgacacctccgacaagaagttgcagctgattaaggactatcgggagaaagtggagtccgagctgagatccatctgcaccacggtgctggaattgttggataaatatttaatagccaatgcaactaatccagagagtaaggtcttctatctgaaaatgaagggtgattacttccggtaccttgctgaagttgcgtgtggtgatgatcgaaaacgcttttgatgaggccattgctgaacttgatacactgaatgaagactcatacaaagacagcaccctcatcatgcagttgcttagagacaacctaacactttggacatcagacagtgcaggagaagaatgtgatgcggcagaaggggctgaaaactaaatccatacagggtgtcatccttctttccttcaagaaacctttttacacatctccattccttattccacttggatttcctatagcaaagaaacccattcatgtgtatggaatcaactgtttatagtcttttcacactgcagctttgggaaaacttcattccttgatttgtgtttgtcttggccttcctggtgtgcagtactgctgtagaaaagtattaatagcttcatttcatataaacataagtaactcccaaacacttatgtagaggactaaaaatgtatctggtatttaagtaatctgaaccagttctgcaagtgactgtgttttgtattactgtgaaaataagaaaatgtagttaattacaatttaaagagtattccacataacttcttaatttctacattccctcccttactcttcgggggtttcctttcagtaagcaacttttccatgctcttaatgtattcctttttagtaggaatccggaagtattagattgaatggaaaagcacttgccatctctgtctaggggtcacaaattgaaatggctcctgtatcacatacggaggtcttgtgtatctgtggcaacagggagtttccttattcactctttatttgctgctgtttaagttgccaacctcccctcccaataaaaattcacttacacctcctgcctttgtagttctggtattcactttactatgtgatagaagtagcatgttgctgccagaatacaagcattgcttttggcaaattaaagtgcatgtcatttcttaatacactagaaaggggaaataaattaaagtacacaagtccaagtctaaaactttagtacttttccatgcagatttgtgcacatgtgagagggtgtccagtttgtctagtgattgttatttagagagttggaccactattgtgtgttgctaatcattgactgtagtcccaaaaaagccttgtgaaaatgttatgccctatgtaacagcagagtaacataaaataaaagtacattttataaacccatttactatggctttgtaacaattgcatacccatattttaagggacaggtgaatttactactttctaaagtttattgatacttcccttttatgtaaaatgtagtagtgatacctatatttccacattgtgcattgtgacacacttgtctagggatgcctggaagtgtataaaattggactgcatttcttagagtgttttactatagatcagtctcatgggccatctcttcctcagatgtaaatgatatctggttaagtgttatatggaataaagtggacattttaaaacta

SEQ ID NO: 330450 - DNA, 1658 bp, Homo sapiens
cggacgcgtgggtcgacccacgcgtccgaaacgatagataattcccaaggagcttaccaagaggcatttgatataagcaagaaagagatgcaacccacacacccaatccgcctggggcttgctcttaacttttctgtattttactatgagattcttaataacccagagcttgcctgcacgctggctaaaacggcttttgatgaggccattgctgaacttgatacactgaatgaagactcatacaaagacagcaccctcatcatgcagttgcttagagacaacctaacactttggacatcagacagtgcaggagaagaatgtgatgcggcagaaggggctgaaaactaaatccatacagggtgtcatccttctttccttcaagaaacctttttacacatctccattccttattccacttggatttcctatagcaaagaaacccattcatgtgtatggaatcaactgtttatagtcttttcacactgcagctttgggaaaacttcattccttgatttgtgtttgtcttggccttcctggtgtgcagtactgctgtagaaaagtattaatagcttcatttcatataaacataagtaactcccaaacacttatgtagaggactaaaaatgtatctggtatttaagtaatctgaaccagttctgcaagtgactgtgttttgtattactgtgaaaataagaaaatgtagttaattacaatttaaagagtattccacataacttcttaatttctacattccctcccttactcttcgggggtttcctttcagtaagcaacttttccatgctcttaatgtattcctttttagtaggaatccggaagtattagattgaatggaaaagcacttgccatctctgtctaggggtcacaaattgaaatggctcctgtatcacatacggaggtcttgtgtatctgtggcaacagggagtttccttattcactctttatttgctgctgtttaagttgccaacctcccctcccaataaaaattcacttacacctcctgcctttgtagttctggtattcactttactatgtgatagaagtagcatgttgctgccagaatacaagcattgcttttggcaaattaaagtgcatgtcatttcttaatacactagaaaggggaaataaattaaagtacacaagtccaagtctaaaactttagtacttttccatgcagatttgtgcacatgtgagagggtgtccagtttgtctagtgattgttatttagagagttggaccactattgtgtgttgctaatcattgactgtagtcccaaaaaagccttgtgaaaatgttatgccctatgtaacagcagagtaacataaaataaaagtacattttataaacccatttactatggctttgtaacaattgcatacccatattttaagggacaggtgaatttactactttctaaagtttattgatacttcccttttatgtaaaatgtagtagtgatacctatatttccacattgtgcattgtgacacacttgtctagggatgcctggaagtgtataaaattggactgcatttcttagagtgttttactatagatcagtctcatgggccatctcttcctcagatgtaaatgatatctggttaagtgttatatggaataaagtggacattttaaaacta

SEQ ID NO: 330451 - DNA, 1796 bp, Homo sapiens
ctggccacgataatgttttttgttagctaccatgattttaaaagacccatacagagaaaaaatcttggttctaccaagagctagtagcatatgttcaagttgttaatgtactgtgtactggatggttatttttaatattgcacttcttatttttcgctcttcacagaaacgatagataattcccaaggagcttaccaagaggcatttgatataagcaagaaagagatgcaacccacacacccaatccgcctggggcttgctcttaacttttctgtattttactatgagattcttaataacccagagcttgcctgcacgctggctaaaacggcttttgatgaggccattgctgaacttgatacactgaatgaagactcatacaaagacagcaccctcatcatgcagttgcttagagacaacctaacactttggacatcagacagtgcaggagaagaatgtgatgcggcagaaggggctgaaaactaaatccatacagggtgtcatccttctttccttcaagaaacctttttacacatctccattccttattccacttggatttcctatagcaaagaaacccattcatgtgtatggaatcaactgtttatagtcttttcacactgcagctttgggaaaacttcattccttgatttgtgtttgtcttggccttcctggtgtgcagtactgctgtagaaaagtattaatagcttcatttcatataaacataagtaactcccaaacacttatgtagaggactaaaaatgtatctggtatttaagtaatctgaaccagttctgcaagtgactgtgttttgtattactgtgaaaataagaaaatgtagttaattacaatttaaagagtattccacataacttcttaatttctacattccctcccttactcttcgggggtttcctttcagtaagcaacttttccatgctcttaatgtattcctttttagtaggaatccggaagtattagattgaatggaaaagcacttgccatctctgtctaggggtcacaaattgaaatggctcctgtatcacatacggaggtcttgtgtatctgtggcaacagggagtttccttattcactctttatttgctgctgtttaagttgccaacctcccctcccaataaaaattcacttacacctcctgcctttgtagttctggtattcactttactatgtgatagaagtagcatgttgctgccagaatacaagcattgcttttggcaaattaaagtgcatgtcatttcttaatacactagaaaggggaaataaattaaagtacacaagtccaagtctaaaactttagtacttttccatgcagatttgtgcacatgtgagagggtgtccagtttgtctagtgattgttatttagagagttggaccactattgtgtgttgctaatcattgactgtagtcccaaaaaagccttgtgaaaatgttatgccctatgtaacagcagagtaacataaaataaaagtacattttataaacccatttactatggctttgtaacaattgcatacccatattttaagggacaggtgaatttactactttctaaagtttattgatacttcccttttatgtaaaatgtagtagtgatacctatatttccacattgtgcattgtgacacacttgtctagggatgcctggaagtgtataaaattggactgcatttcttagagtgttttactatagatcagtctcatgggccatctcttcctcagatgtaaatgatatctggttaagtgttatatggaataaagtggacattttaaaacta

SEQ ID NO: 330452 - DNA, 1601 bp, Homo sapiens
ttggctgggtgtcgctgtgcacatggatgcccgacaaaggctggtccatgtccgcggtcgggaggtcgaaaattttctgtattttactatgagattcttaataacccagagcttgcctgcacgctggctaaaacggcttttgatgaggccattgctgaacttgatacactgaatgaagactcatacaaagacagcaccctcatcatgcagttgcttagagacaacctaacactttggacatcagacagtgcaggagaagaatgtgatgcggcagaaggggctgaaaactaaatccatacagggtgtcatccttctttccttcaagaaacctttttacacatctccattccttattccacttggatttcctatagcaaagaaacccattcatgtgtatggaatcaactgtttatagtcttttcacactgcagctttgggaaaacttcattccttgatttgtgtttgtcttggccttcctggtgtgcagtactgctgtagaaaagtattaatagcttcatttcatataaacataagtaactcccaaacacttatgtagaggactaaaaatgtatctggtatttaagtaatctgaaccagttctgcaagtgactgtgttttgtattactgtgaaaataagaaaatgtagttaattacaatttaaagagtattccacataacttcttaatttctacattccctcccttactcttcgggggtttcctttcagtaagcaacttttccatgctcttaatgtattcctttttagtaggaatccggaagtattagattgaatggaaaagcacttgccatctctgtctaggggtcacaaattgaaatggctcctgtatcacatacggaggtcttgtgtatctgtggcaacagggagtttccttattcactctttatttgctgctgtttaagttgccaacctcccctcccaataaaaattcacttacacctcctgcctttgtagttctggtattcactttactatgtgatagaagtagcatgttgctgccagaatacaagcattgcttttggcaaattaaagtgcatgtcatttcttaatacactagaaaggggaaataaattaaagtacacaagtccaagtctaaaactttagtacttttccatgcagatttgtgcacatgtgagagggtgtccagtttgtctagtgattgttatttagagagttggaccactattgtgtgttgctaatcattgactgtagtcccaaaaaagccttgtgaaaatgttatgccctatgtaacagcagagtaacataaaataaaagtacattttataaacccatttactatggctttgtaacaattgcatacccatattttaagggacaggtgaatttactactttctaaagtttattgatacttcccttttatgtaaaatgtagtagtgatacctatatttccacattgtgcattgtgacacacttgtctagggatgcctggaagtgtataaaattggactgcatttcttagagtgttttactatagatcagtctcatgggccatctcttcctcagatgtaaatgatatctggttaagtgttatatggaataaagtggacattttaaaacta

SEQ ID NO: 330453 - DNA, 1581 bp, Homo sapiens
acataagtaccctagatccagcatggaatctggcgctatcagagctcgagtatgtaattatggatcatactctagtaacctcgatgatgcatatgcctgcacgctggctaaaacggcttttgatgaggccattgctgaacttgatacactgaatgaagactcatacaaagacagcaccctcatcatgcagttgcttagagacaacctaacactttggacatcagacagtgcaggagaagaatgtgatgcggcagaaggggctgaaaactaaatccatacagggtgtcatccttctttccttcaagaaacctttttacacatctccattccttattccacttggatttcctatagcaaagaaacccattcatgtgtatggaatcaactgtttatagtcttttcacactgcagctttgggaaaacttcattccttgatttgtgtttgtcttggccttcctggtgtgcagtactgctgtagaaaagtattaatagcttcatttcatataaacataagtaactcccaaacacttatgtagaggactaaaaatgtatctggtatttaagtaatctgaaccagttctgcaagtgactgtgttttgtattactgtgaaaataagaaaatgtagttaattacaatttaaagagtattccacataacttcttaatttctacattccctcccttactcttcgggggtttcctttcagtaagcaacttttccatgctcttaatgtattcctttttagtaggaatccggaagtattagattgaatggaaaagcacttgccatctctgtctaggggtcacaaattgaaatggctcctgtatcacatacggaggtcttgtgtatctgtggcaacagggagtttccttattcactctttatttgctgctgtttaagttgccaacctcccctcccaataaaaattcacttacacctcctgcctttgtagttctggtattcactttactatgtgatagaagtagcatgttgctgccagaatacaagcattgcttttggcaaattaaagtgcatgtcatttcttaatacactagaaaggggaaataaattaaagtacacaagtccaagtctaaaactttagtacttttccatgcagatttgtgcacatgtgagagggtgtccagtttgtctagtgattgttatttagagagttggaccactattgtgtgttgctaatcattgactgtagtcccaaaaaagccttgtgaaaatgttatgccctatgtaacagcagagtaacataaaataaaagtacattttataaacccatttactatggctttgtaacaattgcatacccatattttaagggacaggtgaatttactactttctaaagtttattgatacttcccttttatgtaaaatgtagtagtgatacctatatttccacattgtgcattgtgacacacttgtctagggatgcctggaagtgtataaaattggactgcatttcttagagtgttttactatagatcagtctcatgggccatctcttcctcagatgtaaatgatatctggttaagtgttatatggaataaagtggacattttaaaacta

SEQ ID NO: 330454 - DNA, 1494 bp, Homo sapiens
cggacgcgtgggtcgacccacgcgtccggcttttgatgaggccattgctgaacttgatacactgaatgaagactcatacaaagacagcaccctcatcatgcagttgcttagagacaacctaacactttggacatcagacagtgcaggagaagaatgtgatgcggcagaaggggctgaaaactaaatccatacagggtgtcatccttctttccttcaagaaacctttttacacatctccattccttattccacttggatttcctatagcaaagaaacccattcatgtgtatggaatcaactgtttatagtcttttcacactgcagctttgggaaaacttcattccttgatttgtgtttgtcttggccttcctggtgtgcagtactgctgtagaaaagtattaatagcttcatttcatataaacataagtaactcccaaacacttatgtagaggactaaaaatgtatctggtatttaagtaatctgaaccagttctgcaagtgactgtgttttgtattactgtgaaaataagaaaatgtagttaattacaatttaaagagtattccacataacttcttaatttctacattccctcccttactcttcgggggtttcctttcagtaagcaacttttccatgctcttaatgtattcctttttagtaggaatccggaagtattagattgaatggaaaagcacttgccatctctgtctaggggtcacaaattgaaatggctcctgtatcacatacggaggtcttgtgtatctgtggcaacagggagtttccttattcactctttatttgctgctgtttaagttgccaacctcccctcccaataaaaattcacttacacctcctgcctttgtagttctggtattcactttactatgtgatagaagtagcatgttgctgccagaatacaagcattgcttttggcaaattaaagtgcatgtcatttcttaatacactagaaaggggaaataaattaaagtacacaagtccaagtctaaaactttagtacttttccatgcagatttgtgcacatgtgagagggtgtccagtttgtctagtgattgttatttagagagttggaccactattgtgtgttgctaatcattgactgtagtcccaaaaaagccttgtgaaaatgttatgccctatgtaacagcagagtaacataaaataaaagtacattttataaacccatttactatggctttgtaacaattgcatacccatattttaagggacaggtgaatttactactttctaaagtttattgatacttcccttttatgtaaaatgtagtagtgatacctatatttccacattgtgcattgtgacacacttgtctagggatgcctggaagtgtataaaattggactgcatttcttagagtgttttactatagatcagtctcatgggccatctcttcctcagatgtaaatgatatctggttaagtgttatatggaataaagtggacattttaaaacta

SEQ ID NO: 330455 - DNA, 1840 bp, Homo sapiens
tgcctgccaggtttggttactagaatagctgtgcatcagccacattcctcaaagtggctcaaaacgagagaataaagaggaccctgtagagataagtactacttaactggaaagaagtctgttaagcattgctgctgttccgttgtcctgtgaaagaaccaagacatgcttgtttactaagtgtatagttttataaaattccagtcatactcataagttcttaaactgggagtgtgagagaatggttctgttgagtttgttgatggtagaacataaggtgggtgttcacttattttgtaaaaatggtttgtaattgtagaataaccagttttcgtcaatgcacatattttaccatggatattaatatttatcaggcttttgatgaggccattgctgaacttgatacactgaatgaagactcatacaaagacagcaccctcatcatgcagttgcttagagacaacctaacactttggacatcagacagtgcaggagaagaatgtgatgcggcagaaggggctgaaaactaaatccatacagggtgtcatccttctttccttcaagaaacctttttacacatctccattccttattccacttggatttcctatagcaaagaaacccattcatgtgtatggaatcaactgtttatagtcttttcacactgcagctttgggaaaacttcattccttgatttgtgtttgtcttggccttcctggtgtgcagtactgctgtagaaaagtattaatagcttcatttcatataaacataagtaactcccaaacacttatgtagaggactaaaaatgtatctggtatttaagtaatctgaaccagttctgcaagtgactgtgttttgtattactgtgaaaataagaaaatgtagttaattacaatttaaagagtattccacataacttcttaatttctacattccctcccttactcttcgggggtttcctttcagtaagcaacttttccatgctcttaatgtattcctttttagtaggaatccggaagtattagattgaatggaaaagcacttgccatctctgtctaggggtcacaaattgaaatggctcctgtatcacatacggaggtcttgtgtatctgtggcaacagggagtttccttattcactctttatttgctgctgtttaagttgccaacctcccctcccaataaaaattcacttacacctcctgcctttgtagttctggtattcactttactatgtgatagaagtagcatgttgctgccagaatacaagcattgcttttggcaaattaaagtgcatgtcatttcttaatacactagaaaggggaaataaattaaagtacacaagtccaagtctaaaactttagtacttttccatgcagatttgtgcacatgtgagagggtgtccagtttgtctagtgattgttatttagagagttggaccactattgtgtgttgctaatcattgactgtagtcccaaaaaagccttgtgaaaatgttatgccctatgtaacagcagagtaacataaaataaaagtacattttataaacccatttactatggctttgtaacaattgcatacccatattttaagggacaggtgaatttactactttctaaagtttattgatacttcccttttatgtaaaatgtagtagtgatacctatatttccacattgtgcattgtgacacacttgtctagggatgcctggaagtgtataaaattggactgcatttcttagagtgttttactatagatcagtctcatgggccatctcttcctcagatgtaaatgatatctggttaagtgttatatggaataaagtggacattttaaaacta

SEQ ID NO: 330456 - DNA, 1442 bp, Homo sapiens
  misc_feature (41)..(42): n is a, c, g, or t
  misc_feature (49)..(49): n is a, c, g, or t
  misc_feature (51)..(52): n is a, c, g, or t
  misc_feature (54)..(54): n is a, c, g, or t
cggacgcgtgggtcgacccacgcgtccgtcgacccacgcgnnccggacncnngngtcgacccacgcgtccgcctttggacatcagacagtgcaggagaagaatgtgatgcggcagaaggggctgaaaactaaatccatacagggtgtcatccttctttccttcaagaaacctttttacacatctccattccttattccacttggatttcctatagcaaagaaacccattcatgtgtatggaatcaactgtttatagtcttttcacactgcagctttgggaaaacttcattccttgatttgtgtttgtcttggccttcctggtgtgcagtactgctgtagaaaagtattaatagcttcatttcatataaacataagtaactcccaaacacttatgtagaggactaaaaatgtatctggtatttaagtaatctgaaccagttctgcaagtgactgtgttttgtattactgtgaaaataagaaaatgtagttaattacaatttaaagagtattccacataacttcttaatttctacattccctcccttactcttcgggggtttcctttcagtaagcaacttttccatgctcttaatgtattcctttttagtaggaatccggaagtattagattgaatggaaaagcacttgccatctctgtctaggggtcacaaattgaaatggctcctgtatcacatacggaggtcttgtgtatctgtggcaacagggagtttccttattcactctttatttgctgctgtttaagttgccaacctcccctcccaataaaaattcacttacacctcctgcctttgtagttctggtattcactttactatgtgatagaagtagcatgttgctgccagaatacaagcattgcttttggcaaattaaagtgcatgtcatttcttaatacactagaaaggggaaataaattaaagtacacaagtccaagtctaaaactttagtacttttccatgcagatttgtgcacatgtgagagggtgtccagtttgtctagtgattgttatttagagagttggaccactattgtgtgttgctaatcattgactgtagtcccaaaaaagccttgtgaaaatgttatgccctatgtaacagcagagtaacataaaataaaagtacattttataaacccatttactatggctttgtaacaattgcatacccatattttaagggacaggtgaatttactactttctaaagtttattgatacttcccttttatgtaaaatgtagtagtgatacctatatttccacattgtgcattgtgacacacttgtctagggatgcctggaagtgtataaaattggactgcatttcttagagtgttttactatagatcagtctcatgggccatctcttcctcagatgtaaatgatatctggttaagtgttatatggaataaagtggacattttaaaacta

SEQ ID NO: 330457 - DNA, 1338 bp, Homo sapiens
  misc_feature (41)..(42): n is a, c, g, or t
  misc_feature (49)..(49): n is a, c, g, or t
  misc_feature (51)..(52): n is a, c, g, or t
  misc_feature (54)..(54): n is a, c, g, or t
cggacgcgtgggtcgacccacgcgtccgtcgacccacgcgnnccggacncnngngtcgacccacgcgtccgcacacatctccattccttattccacttggatttcctatagcaaagaaacccattcatgtgtatggaatcaactgtttatagtcttttcacactgcagctttgggaaaacttcattccttgatttgtgtttgtcttggccttcctggtgtgcagtactgctgtagaaaagtattaatagcttcatttcatataaacataagtaactcccaaacacttatgtagaggactaaaaatgtatctggtatttaagtaatctgaaccagttctgcaagtgactgtgttttgtattactgtgaaaataagaaaatgtagttaattacaatttaaagagtattccacataacttcttaatttctacattccctcccttactcttcgggggtttcctttcagtaagcaacttttccatgctcttaatgtattcctttttagtaggaatccggaagtattagattgaatggaaaagcacttgccatctctgtctaggggtcacaaattgaaatggctcctgtatcacatacggaggtcttgtgtatctgtggcaacagggagtttccttattcactctttatttgctgctgtttaagttgccaacctcccctcccaataaaaattcacttacacctcctgcctttgtagttctggtattcactttactatgtgatagaagtagcatgttgctgccagaatacaagcattgcttttggcaaattaaagtgcatgtcatttcttaatacactagaaaggggaaataaattaaagtacacaagtccaagtctaaaactttagtacttttccatgcagatttgtgcacatgtgagagggtgtccagtttgtctagtgattgttatttagagagttggaccactattgtgtgttgctaatcattgactgtagtcccaaaaaagccttgtgaaaatgttatgccctatgtaacagcagagtaacataaaataaaagtacattttataaacccatttactatggctttgtaacaattgcatacccatattttaagggacaggtgaatttactactttctaaagtttattgatacttcccttttatgtaaaatgtagtagtgatacctatatttccacattgtgcattgtgacacacttgtctagggatgcctggaagtgtataaaattggactgcatttcttagagtgttttactatagatcagtctcatgggccatctcttcctcagatgtaaatgatatctggttaagtgttatatggaataaagtggacattttaaaacta

SEQ ID NO: 330458 - DNA, 1511 bp, Homo sapiens
  misc_feature (55)..(55): n is a, c, g, or t
  misc_feature (57)..(57): n is a, c, g, or t
  misc_feature (257)..(257): n is a, c, g, or t
tgaaaaggctatcttagtacacattccagtgttggccgtccgacggcgagtccangntagcgttaagatgaaacactcgtgatcaatatgtctggtatctactcctagagcagattgccatggatcaatgactatgtgcgcttggattctcgagcgcatgtaaaaatacgcccgtagaggagagtcgtagcgcttctgaacatattccaaatgcgagttcatgacgagtctctcattgcgtatctattcaactcagngatttccacatatcagagactacgaatatcaaattcatcgtcgccctgggactgacaactgtttatagtcttttcacactgcagctttgggaaaacttcattccttgatttgtgtttgtcttggccttcctggtgtgcagtactgctgtagaaaagtattaatagcttcatttcatataaacataagtaactcccaaacacttatgtagaggactaaaaatgtatctggtatttaagtaatctgaaccagttctgcaagtgactgtgttttgtattactgtgaaaataagaaaatgtagttaattacaatttaaagagtattccacataacttcttaatttctacattccctcccttactcttcgggggtttcctttcagtaagcaacttttccatgctcttaatgtattcctttttagtaggaatccggaagtattagattgaatggaaaagcacttgccatctctgtctaggggtcacaaattgaaatggctcctgtatcacatacggaggtcttgtgtatctgtggcaacagggagtttccttattcactctttatttgctgctgtttaagttgccaacctcccctcccaataaaaattcacttacacctcctgcctttgtagttctggtattcactttactatgtgatagaagtagcatgttgctgccagaatacaagcattgcttttggcaaattaaagtgcatgtcatttcttaatacactagaaaggggaaataaattaaagtacacaagtccaagtctaaaactttagtacttttccatgcagatttgtgcacatgtgagagggtgtccagtttgtctagtgattgttatttagagagttggaccactattgtgtgttgctaatcattgactgtagtcccaaaaaagccttgtgaaaatgttatgccctatgtaacagcagagtaacataaaataaaagtacattttataaacccatttactatggctttgtaacaattgcatacccatattttaagggacaggtgaatttactactttctaaagtttattgatacttcccttttatgtaaaatgtagtagtgatacctatatttccacattgtgcattgtgacacacttgtctagggatgcctggaagtgtataaaattggactgcatttcttagagtgttttactatagatcagtctcatgggccatctcttcctcagatgtaaatgatatctggttaagtgttatatggaataaagtggacattttaaaacta

SEQ ID NO: 330459 - DNA, 1181 bp, Homo sapiens
cgcactgcagctatgagaaaacttcaatcaatcgttcatgattgtggtgatgggccctccgtgcagtacatgctgtaaacccacagcaggagcttcatttcatataaacataagtaactcccaaacacttatgtagaggactaaaaatgtatctggtatttaagtaatctgaaccagttctgcaagtgactgtgttttgtattactgtgaaaataagaaaatgtagttaattacaatttaaagagtattccacataacttcttaatttctacattccctcccttactcttcgggggtttcctttcagtaagcaacttttccatgctcttaatgtattcctttttagtaggaatccggaagtattagattgaatggaaaagcacttgccatctctgtctaggggtcacaaattgaaatggctcctgtatcacatacggaggtcttgtgtatctgtggcaacagggagtttccttattcactctttatttgctgctgtttaagttgccaacctcccctcccaataaaaattcacttacacctcctgcctttgtagttctggtattcactttactatgtgatagaagtagcatgttgctgccagaatacaagcattgcttttggcaaattaaagtgcatgtcatttcttaatacactagaaaggggaaataaattaaagtacacaagtccaagtctaaaactttagtacttttccatgcagatttgtgcacatgtgagagggtgtccagtttgtctagtgattgttatttagagagttggaccactattgtgtgttgctaatcattgactgtagtcccaaaaaagccttgtgaaaatgttatgccctatgtaacagcagagtaacataaaataaaagtacattttataaacccatttactatggctttgtaacaattgcatacccatattttaagggacaggtgaatttactactttctaaagtttattgatacttcccttttatgtaaaatgtagtagtgatacctatatttccacattgtgcattgtgacacacttgtctagggatgcctggaagtgtataaaattggactgcatttcttagagtgttttactatagatcagtctcatgggccatctcttcctcagatgtaaatgatatctggttaagtgttatatggaataaagtggacattttaaaacta

SEQ ID NO: 330460 - DNA, 1337 bp, Homo sapiens
attgggcggtggaccgcccctcggccccggggtaggctgacacgggagggtcctcagctaaagccaaaagcagatcaaagtggtgggactcgcgtcgcggccgcggagacgtgaagctctcgaggctcctcccgctgcgggtcggcgctcgccctcgctctcctcgccctccgccccggccccggccccgcgcccgccatggagaagactgagctgatccagaaggccaagctggccgagcaggccgagcgctacgacgacatggccacctgcatgaaggcagtgaccgagcagggcgccgagctgtccaacgaggagcgcaacctgctctccgtggcctacaagaacgtggtcgggggccgcaggtccgcctggagggtcatctctagcatcgagcagaagaccgacacctccgacaagaagttgcagctgattaaggactatcgggagaaagtggagtccgagctgagatccatctgcaccacggtgctggaattgttggataaatatttaatagccaatgcaactaatccagagagtaaggtcttctatctgaaaatgaagggtgattacttccggtaccttgctgaagttgcgtgtggtgatgatcgaaaacaaacgatagataattcccaaggagcttaccaagaggcatttgatataagcaagaaagagatgcaacccacacacccaatccgcctggggcttgctcttaacttttctgtattttactatgagattcttaataacccagagcttgcctgcacgctggctaaaacggcttttgatgaggccattgctgaacttgatacactgaatgaagactcatacaaagacagcaccctcatcatgcagttgcttagagacaacctaacactttggacatcagacagtgcaggagaagaatgtgatgcggcagaaggggctgaaaactaaatccatacagggtgtcatccttctttccttcaagaaacctttttcgtctctactaaaaatacaaaaattagccaggcatggtggcacacgcctatagtcccagctactcaggaggctgaggcaggagaatcacttgaacccaggaggcagaggttgcagtgagctgagatcacgtcattgcactccatcctgagccacaagagcaaaactccgtctcaaaaaaaaaaaaagaagaaggtggatctccaaccaggccagagaatcttctctgggcctgggttgggcagaagattctcacagaaggtttggaactctaagaaataaatgggttgggtaataaatggcttcgggtcagataaaaaaaaaaaaaaaaaaaaaaaaaaaaaaaaaaaaaaaaagaa

SEQ ID NO: 330461 - DNA, 1033 bp, Homo sapiens
attgggcggtggaccgcccctcggccccggggtaggctgacacgggagggtcctcagctaaagccaaaagcagatcaaagtggtgggactcgcgtcgcggccgcggagacgtgaagctctcgaggctcctcccgctgcgggtcggcgctcgccctcgctctcctcgccctccgccccggccccggccccgcgcccgccatggagaagactgagctgatccagaaggccaagctggccgagcaggccgagcgctacgacgacatggccacctgcatgaaggcagtgaccgagcagggcgccgagctgtccaacgaggagcgcaacctgctctccgtggcctacaagaacgtggtcgggggccgcaggtccgcctggagggtcatctctagcatcgagcagaagaccgacacctccgacaagaagttgcagctgattaaggactatcgggagaaagtggagtccgagctgagatccatctgcaccacggtgctggaattgttggataaatatttaatagccaatgcaactaatccagagagtaaggtcttctatctgaaaatgaagggtgattacttccggtaccttgctgaagttgcgtgtggtgatgatcgaaaacaaacgatagataattcccaaggagcttaccaagaggcatttgatataagcaagaaagagatgcaacccacacacccaatccgcctggggcttgctcttaacttttctgtattttactatgagattcttaataacccagagcttgcctgcacgctggctaaaacggcttttgatgaggccattgctgaacttgatacactgaatgaagactcatacaaagacagcaccctcatcatgcagttgcttagagacaacctaacagtgagttgtttactcttttaattttattttcttttcagaaacaaaagtatttatattttattttggacttcgtgtcttttagggaagatacatacgagctgaaagtatgagatacgtgttagtattttatgggacgaacattattttgtaggcaggt

SEQ ID NO: 330462 - DNA, 965 bp, Homo sapiens
  misc_feature (831)..(831): n is a, c, g, or t
  misc_feature (857)..(857): n is a, c, g, or t
attgggcggtggaccgcccctcggccccggggtaggctgacacgggagggtcctcagctaaagccaaaagcagatcaaagtggtgggactcgcgtcgcggccgcggagacgtgaagctctcgaggctcctcccgctgcgggtcggcgctcgccctcgctctcctcgccctccgccccggccccggccccgcgcccgccatggagaagactgagctgatccagaaggccaagctggccgagcaggccgagcgctacgacgacatggccacctgcatgaaggcagtgaccgagcagggcgccgagctgtccaacgaggagcgcaacctgctctccgtggcctacaagaacgtggtcgggggccgcaggtccgcctggagggtcatctctagcatcgagcagaagaccgacacctccgacaagaagttgcagctgattaaggactatcgggagaaagtggagtccgagctgagatccatctgcaccacggtgctggaattgttggataaatatttaatagccaatgcaactaatccagagagtaaggtcttctatctgaaaatgaagggtgattacttccggtaccttgctgaagttgcgtgtggtgatgatcgaaaacaaacgatagataattcccaaggagcttaccaagaggcatttgatataagcaagaaagagatgcaacccacacacccaatccgcctggggcttgctcttaacttttctgtattttactatgagattcttaataacccagagcttgcctgcacgctggctaaaacggacagacctctcatgcagtgctagaacacctacattgcataacatcagaangatgtatgcgaagggtgactatcacngtgatcttttaactactcctctgttaacttgagagagtcgtgaatttgtcgtggcgagtactacacactgatgaaactgcttaaataagatatctggtaacagtagga

SEQ ID NO: 330463 - DNA, 848 bp, Homo sapiens
ctggaaggttctcaggtctttatttgctctctcaacttccaggaattgacttatttaattaatccatcaacctctcatagcaaatatttgagaaaacaaatttatattcagattcttattttcagtagggaagtaagaagttggagagagagagagagagagagaaagttgccaacctcccctcccaataaaaattcacttacacctcctgcctttgtagttctggtattcactttactatgtgatagaagtagcatgttgctgccagaatacaagcattgcttttggcaaattaaagtgcatgtcatttcttaatacactagaaaggggaaataaattaaagtacacaagtccaagtctaaaactttagtacttttccatgcagatttgtgcacatgtgagagggtgtccagtttgtctagtgattgttatttagagagttggaccactattgtgtgttgctaatcattgactgtagtcccaaaaaagccttgtgaaaatgttatgccctatgtaacagcagagtaacataaaataaaagtacattttataaacccatttactatggctttgtaacaattgcatacccatattttaagggacaggtgaatttactactttctaaagtttattgatacttcccttttatgtaaaatgtagtagtgatacctatatttccacattgtgcattgtgacacacttgtctagggatgcctggaagtgtataaaattggactgcatttcttagagtgttttactatagatcagtctcatgggccatctcttcctcagatgtaaatgatatctggttaagtgttatatggaataaagtggacattttaaaacta

SEQ ID NO: 330464 - DNA, 673 bp, Homo sapiens
attgggcggtggaccgcccctcggccccggggtaggctgacacgggagggtcctcagctaaagccaaaagcagatcaaagtggtgggactcgcgtcgcggccgcggagacgtgaagctctcgaggctcctcccgctgcgggtcggcgctcgccctcgctctcctcgccctccgccccggccccggccccgcgcccgccatggagaagactgagctgatccagaaggccaagctggccgagcaggccgagcgctacgacgacatggccacctgcatgaaggcagtgaccgagcagggcgccgagctgtccaacgaggagcgcaacctgctctccgtggcctacaagaacgtggtcgggggccgcaggtccgcctggagggtcatctctagcatcgagcagaagaccgacacctccgacaagaagttgcagctgattaaggactatcgggagaaagtggagtccgagctgagatccatctgcaccacggtgctggaattgttggataaatatttaatagccaatgcaactaatccagagagtaaggtcttctatctgaaaatgaagggtgattacttccggtaccttgctgaagttgcgtgtggtgatgatcgaaaaccgtaagtttatttgttatatgggcaaaagtagaatataaaaaaaagaaatggggata

SEQ ID NO: 330465 - DNA, 1298 bp, Homo sapiens
ctgttgctgtgtgtgcttgtttggtcgtgctgctgtctcttgtcgcgttcttttcctttgtcttttttgcggtgtcttttttttgttcttttttgttttgctgtggctgttaggtgtgtcgtctggtcttgtttcgcgtgtctcgcgactgctgtccatggcgttctctgttctgtcttttctgtgcttgtgtgttttggttcggtgtgtctgttgtgtatctggtttgttggtgggtgttgtagtctcgttcctgccgttcgttcgcttagccgttcgcgtctcagtgctgttcttgttgctttcgatgtccgcgtgtgctccgtgtcctatttctgctctcttgtgtagtctgccgtccttgtttgtcctcttgttctgtttttgttgggtgtttgctcgtgttgtgttcttttttgttgtggttttgcctgctgctgtctgtctttgcttgtttgtttttttttttctgcttgtgttttgttgtgtttagtagtatggtacgtgttatgttgtagtgttacttcttgctggtgtacattagggcgatcaccgttttcaaccaagggcttttttgtgggatctcctagtcaatgatttagctactacacgatagtggtccaactctctgtatacactatcaactagtctaactggacaccctctcacatgtgcacaaatctgtctatggataagtactaaagttttagacttggacttgtgtactttaatgtatttcccctttctagtgtattaagaaatgtacatgccactttaaatttgccataagcgaatgcttgtattctggctagcaacatgctacttctatcacatagtaatgataccagatacaaaggcaggaggtgtaatgaattttattgggaggggagttggaccactattgtgtgttgctaatcattgactgtagtcccaaaaaagccttgtgaaaatgttatgccctatgtaacagcagagtaacataaaataaaagtacattttataaacccatttactatggctttgtaacaattgcatacccatattttaagggacaggtgaatttactactttctaaagtttattgatacttcccttttatgtaaaatgtagtagtgatacctatatttccacattgtgcattgtgacacacttgtctagggatgcctggaagtgtataaaattggactgcatttcttagagtgttttactatagatcagtctcatgggccatctcttcctcagatgtaaatgatatctggttaagtgttatatggaataaagtggacattttaaaacta

SEQ ID NO: 330466 - DNA, 728 bp, Homo sapiens
attgggcggtggaccgcccctcggccccggggtaggctgacacgggagggtcctcagctaaagccaaaagcagatcaaagtggtgggactcgcgtcgcggccgcggagacgtgaagctctcgaggctcctcccgctgcgggtcggcgctcgccctcgctctcctcgccctccgccccggccccggccccgcgcccgccatggagaagactgagctgatccagaaggccaagctggccgagcaggccgagcgctacgacgacatggccacctgcatgaaggcagtgaccgagcagggcgccgagctgtccaacgaggagcgcaacctgctctccgtggcctacaagaacgtggtcgggggccgcaggtccgcctggagggtcatctctagcatcgagcagaagaccgacacctccgacaagaagttgcagctgattaaggactatcgggagaaagtggagtccgagctgagatccatctgcaccacggtgctggcgatccggacaaaatcatggctgatggaaataactggtaaagaggcaaagaaagtaatgcagacagtgtgtactaaagtggagaaaacttaagattatttactttatgaagtcaaaacttcgttgtattcttccgtgtgctcttagcttccagtccctgcttggcattgaagaagcacttgtaaaagctttttggactgaattgctcgtattaaaaaattttgccaacttgaaag

SEQ ID NO: 330467 - DNA, 856 bp, Homo sapiens
  misc_feature (12)..(12): n is a, c, g, or t
  misc_feature (14)..(14): n is a, c, g, or t
  misc_feature (36)..(36): n is a, c, g, or t
  misc_feature (38)..(38): n is a, c, g, or t
  misc_feature (570)..(570): n is a, c, g, or t
  misc_feature (778)..(778): n is a, c, g, or t
  misc_feature (824)..(824): n is a, c, g, or t
aagggggaaggngnaagggagtgggggaagggggtnantttgtatttttggaaattcagaattgttggataaatatttaatagccaatgcaactaatccagagagtaaggtcttctatctgaaaatgaagggtgattacttccggtaccttgctgaagttgcgtgtggtgatgatcgaaaacaaacgatagataattcccaaggagcttaccaagaggcatttgatataagcaagaaagagatgcaacccacacacccaatccgcctggggcttgctcttaacttttctgtattttactatgagattcttaataacccagagcttgcctgcacgctggctaaaacgatgtgtctgctcggttgcattgctttatatgatgtcattgctgcaccttatccattgcctgtagactcctcttatcatttccctccctctcactcactcgctactgaaactctctatccccttgttcatttatcaaggtaggagagtaagtatgggcggagataatgagcgtaaaaactatattagccaaagtatatctaaggtataaactctagagagagctnagtcaaaactttgtgaggtatagggatcaacgagagtatctatttcttactatcgtctttgttgcatccgtcatcccactccgcccccccccctccccaccgtagccacgcggacaaatcgcaccggccccacgcccgcccctagcgtctccgccctcctctgcgtgcacccccagcaagactatatttcatgccccttctttccccnccccttctcttcctggcatcattcccgtcatacgtcatcgttgccntagctcacgtgcgacattctcactaaaatgat

SEQ ID NO: 330468 - DNA, 2530 bp, Homo sapiens
attgggcggtggaccgcccctcggccccggggtaggctgacacgggagggtcctcagctaaagccaaaagcagatcaaagtggtgggactcgcgtcgcggccgcggagacgtgaagctctcgaggctcctcccgctgcgggtcggcgctcgccctcgctctcctcgccctccgccccggccccggccccgcgcccgccatggagaagactgagctgatccagaaggccaagctggccgagcaggccgagcgctacgacgacatggccacctgcatgaaggcagtgaccgagcagggcgccgagctgtccaacgaggagcgcaacctgctctccgtggcctacaagaacgtggtcgggggccgcaggtccgcctggagggtcatctctagcatcgagcagaagaccgacacctccgacaagaagttgcagctgattaaggactatcgggagaaagtggagtccgagctgagatccatctgcaccacggtgctggaattgttggataaatatttaatagccaatgcaactaatccagagagtaaggtcttctatctgaaaatgaagggtgattacttccggtaccttgctgaagttgcgtgtggtgatgatcgaaaacaaacgatagataattcccaaggagcttaccaagaggcatttgatataagcaagaaagagatgcaacccacacacccaatccgcctggggcttgctcttaacttttctgtattttactatgagattcttaataacccagagcttgcctgcacgctggctaaaacggcttttgatgaggccattgctgaacttgatacactgaatgaagactcatacaaagacagcaccctcatcatgcagttgcttagagacaacctaacactttggacatcagacagtgcaggagaagaatgtgatgcggcagaaggggctgaaaactaaatccatacagggtgtcatccttctttccttcaagaaacctttttacacatctccattccttattccacttggatttcctatagcaaagaaacccattcatgtgtatggaatcaactgtttatagtcttttcacactgcagctttgggaaaacttcattccttgatttgtgtttgtcttggccttcctggtgtgcagtactgctgtagaaaagtattaatagcttcatttcatataaacataagtaactcccaaacacttatgtagaggactaaaaatgtatctggtatttaagtaatctgaaccagttctgcaagtgactgtgttttgtattactgtgaaaataagaaaatgtagttaattacaatttaaagagtattccacataacttcttaatttctacattccctcccttactcttcgggggtttcctttcagtaagcaacttttccatgctcttaatgtattcctttttagtaggaatccggaagtattagattgaatggaaaagcacttgccatctctgtctaggggtcacaaattgaaatggctcctgtatcacatacggaggtcttgtgtatctgtggcaacagggagtttccttattcactctttatttgctgctgtttaagttgccaacctcccctcccaataaaaattcacttacacctcctgcctttgtagttctggtattcactttactatgtgatagaagtagcatgttgctgccagaatacaagcattgcttttggcaaattaaagtgcatgtcatttcttaatacactagaaaggggaaataaattaaagtacacaagtccaagtctaaaactttagtacttttccatgcagatttgtgcacatgtgagagggtgtccagtttgtctagtgattgttatttagagagttggaccactattgtgtgttgctaatcattgactgtagtcccaaaaaagccttgtgaaaatgttatgccctatgtaacagcagagtaacataaaataaaagtacattttataaacccatttactatggctttgtaacaattgcatacccatattttaagggacaggtgaatttactactttctaaagtttattgatacttcccttttatgtaaaatgtagtagtgatacctatatttccacattgtgcattgtgacacacttgtctagggatgcctggaagtgtataaaattggactgcatttcttagagtgttttactatagatcagtctcatgggccatctcttcctcagatgtaaatgatatctggttaagtgttatatggaataaagtggacattttaaaactaaaaaaaaagaagcacagacacaacaagccacagatcaaacaccacgacacaacaacaaaataagcaaaaacaaacacacagaaaccgaaaacacaaagaaaaccacaacaaagcagcaggaagcggccagcagaaaaaccaagaaaagcgagagcacaaaaaacacaacaatcacggaccgccagacaccaccgacacacaataaacaggaaaggcgcgcaaacagacagcgcgaccacgacagaatcaggcacaacccgtcgggcacaacagcaccaaaaaaa

SEQ ID NO: 330469 - DNA, 2290 bp, Homo sapiens
attgggcggtggaccgcccctcggccccggggtaggctgacacgggagggtcctcagctaaagccaaaagcagatcaaagtggtgggactcgcgtcgcggccgcggagacgtgaagctctcgaggctcctcccgctgcgggtcggcgctcgccctcgctctcctcgccctccgccccggccccggccccgcgcccgccatggagaagactgagctgatccagaaggccaagctggccgagcaggccgagcgctacgacgacatggccacctgcatgaaggcagtgaccgagcagggcgccgagctgtccaacgaggagcgcaacctgctctccgtggcctacaagaacgtggtcgggggccgcaggtccgcctggagggtcatctctagcatcgagcagaagaccgacacctccgacaagaagttgcagctgattaaggactatcgggagaaagtggagtccgagctgagatccatctgcaccacggtgctggaattgttggataaatatttaatagccaatgcaactaatccagagagtaaggtcttctatctgaaaatgaagggtgattacttccggtaccttgctgaagttgcgtgtggtgatgatcgaaaacaaacgatagataattcccaaggagcttaccaagaggcatttgatataagcaagaaagagatgcaacccacacacccaatccgcctggggcttgctcttaacttttctgtattttactatgagattcttaataacccagagcttgcctgcacgctggctaaaacggcttttgatgaggccattgctgaacttgatacactgaatgaagactcatacaaagacagcaccctcatcatgcagttgcttagagacaacctaacactttggacatcagacagtgcaggagaagaatgtgatgcggcagaaggggctgaaaactaaatccatacagggtgtcatccttctttccttcaagaaacctttttacacatctccattccttattccacttggatttcctatagcaaagaaacccattcatgtgtatggaatcaactgtttatagtcttttcacactgcagctttgggaaaacttcattccttgatttgtgtttgtcttggccttcctggtgtgcagtactgctgtagaaaagtattaatagcttcatttcatataaacataagtaactcccaaacacttatgtagaggactaaaaatgtatctggtatttaagtaatctgaaccagttctgcaagtgactgtgttttgtattactgtgaaaataagaaaatgtagttaattacaatttaaagagtattccacataacttcttaatttctacattccctcccttactcttcgggggtttcctttcagtaagcaacttttccatgctcttaatgtattcctttttagtaggaatccggaagtattagattgaatggaaaagcacttgccatctctgtctaggggtcacaaattgaaatggctcctgtatcacatacggaggtcttgtgtatctgtggcaacagggagtttccttattcactctttatttgctgctgtttaagttgccaacctcccctcccaataaaaattcacttacacctcctgcctttgtagttctggtattcactttactatgtgatagaagtagcatgttgctgccagaatacaagcattgcttttggcaaattaaagtgcatgtcatttcttaatacactagaaaggggaaataaattaaagtacacaagtccaagtctaaaactttagtacttttccatgcagatttgtgcacatgtgagagggtgtccagtttgtctagtgattgttatttagagagttggaccactattgtgtgttgctaatcattgactgtagtcccaaaaaagccttgtgaaaatgttatgccctatgtaacagcagagtaacataaaataaaagtacattttataaacccatttactatggctttgtaacaattgcatacccatattttaagggacaggtgaatttactactttctaaagtttattgatacttcccttttatgtaaaatgtagtagtgatacctatatttccacattgtgcattgtgacacacttgtctagggatgcctggaagtgtataaaattggactgcatttcttagagtgttttactatagatcagtctcatgggccatctcttcctcagatgtaaatgatatctggttaagtgttatatggaataaagtggacattttaaaactaaaaaaaaaaaaaaaaaaaaaaaaaaaaaaaaaaaaaaaaaagaa

SEQ ID NO: 330470 - DNA, 2359 bp, Homo sapiens
ggcgggagcggccgcggctcgggctccctgcgcgcggggcctccgcgccgcccccgcctcctccagccgcgggccgcggcctccccgggtgcccagcgggggagggggcgggggagagggaaattcaagcggccgcgtgtgcgggagacaaaagcgggcggcgggccgcattgtctgacggcgctccctctctgctttttgttctcgcctcgccgccccgcccctccgcctctcgaggctcctcccgctgcgggtcggcgctcgccctcgctctcctcgccctccgccccggccccggccccgcgcccgccatggagaagactgagctgatccagaaggccaagctggccgagcaggccgagcgctacgacgacatggccacctgcatgaaggcagtgaccgagcagggcgccgagctgtccaacgaggagcgcaacctgctctccgtggcctacaagaacgtggtcgggggccgcaggtccgcctggagggtcatctctagcatcgagcagaagaccgacacctccgacaagaagttgcagctgattaaggactatcgggagaaagtggagtccgagctgagatccatctgcaccacggtgctggaattgttggataaatatttaatagccaatgcaactaatccagagagtaaggtcttctatctgaaaatgaagggtgattacttccggtaccttgctgaagttgcgtgtggtgatgatcgaaaacaaacgatagataattcccaaggagcttaccaagaggcatttgatataagcaagaaagagatgcaacccacacacccaatccgcctggggcttgctcttaacttttctgtattttactatgagattcttaataacccagagcttgcctgcacgctggctaaaacggcttttgatgaggccattgctgaacttgatacactgaatgaagactcatacaaagacagcaccctcatcatgcagttgcttagagacaacctaacactttggacatcagacagtgcaggagaagaatgtgatgcggcagaaggggctgaaaactaaatccatacagggtgtcatccttctttccttcaagaaacctttttacacatctccattccttattccacttggatttcctatagcaaagaaacccattcatgtgtatggaatcaactgtttatagtcttttcacactgcagctttgggaaaacttcattccttgatttgtgtttgtcttggccttcctggtgtgcagtactgctgtagaaaagtattaatagcttcatttcatataaacataagtaactcccaaacacttatgtagaggactaaaaatgtatctggtatttaagtaatctgaaccagttctgcaagtgactgtgttttgtattactgtgaaaataagaaaatgtagttaattacaatttaaagagtattccacataacttcttaatttctacattccctcccttactcttcgggggtttcctttcagtaagcaacttttccatgctcttaatgtattcctttttagtaggaatccggaagtattagattgaatggaaaagcacttgccatctctgtctaggggtcacaaattgaaatggctcctgtatcacatacggaggtcttgtgtatctgtggcaacagggagtttccttattcactctttatttgctgctgtttaagttgccaacctcccctcccaataaaaattcacttacacctcctgcctttgtagttctggtattcactttactatgtgatagaagtagcatgttgctgccagaatacaagcattgcttttggcaaattaaagtgcatgtcatttcttaatacactagaaaggggaaataaattaaagtacacaagtccaagtctaaaactttagtacttttccatgcagatttgtgcacatgtgagagggtgtccagtttgtctagtgattgttatttagagagttggaccactattgtgtgttgctaatcattgactgtagtcccaaaaaagccttgtgaaaatgttatgccctatgtaacagcagagtaacataaaataaaagtacattttataaacccatttactatggctttgtaacaattgcatacccatattttaagggacaggtgaatttactactttctaaagtttattgatacttcccttttatgtaaaatgtagtagtgatacctatatttccacattgtgcattgtgacacacttgtctagggatgcctggaagtgtataaaattggactgcatttcttagagtgttttactatagatcagtctcatgggccatctcttcctcagatgtaaatgatatctggttaagtgttatatggaataaagtggacattttaaaacta

SEQ ID NO: 330471 - DNA, 2227 bp, Homo sapiens
ccggccgcgctcggattgagggccgggcggaggtgccgcccttgagagcagccggttgtcgatgccgctcccctcagggacggctccgggcgggaagctctcgaggctcctcccgctgcgggtcggcgctcgccctcgctctcctcgccctccgccccggccccggccccgcgcccgccatggagaagactgagctgatccagaaggccaagctggccgagcaggccgagcgctacgacgacatggccacctgcatgaaggcagtgaccgagcagggcgccgagctgtccaacgaggagcgcaacctgctctccgtggcctacaagaacgtggtcgggggccgcaggtccgcctggagggtcatctctagcatcgagcagaagaccgacacctccgacaagaagttgcagctgattaaggactatcgggagaaagtggagtccgagctgagatccatctgcaccacggtgctggaattgttggataaatatttaatagccaatgcaactaatccagagagtaaggtcttctatctgaaaatgaagggtgattacttccggtaccttgctgaagttgcgtgtggtgatgatcgaaaacaaacgatagataattcccaaggagcttaccaagaggcatttgatataagcaagaaagagatgcaacccacacacccaatccgcctggggcttgctcttaacttttctgtattttactatgagattcttaataacccagagcttgcctgcacgctggctaaaacggcttttgatgaggccattgctgaacttgatacactgaatgaagactcatacaaagacagcaccctcatcatgcagttgcttagagacaacctaacactttggacatcagacagtgcaggagaagaatgtgatgcggcagaaggggctgaaaactaaatccatacagggtgtcatccttctttccttcaagaaacctttttacacatctccattccttattccacttggatttcctatagcaaagaaacccattcatgtgtatggaatcaactgtttatagtcttttcacactgcagctttgggaaaacttcattccttgatttgtgtttgtcttggccttcctggtgtgcagtactgctgtagaaaagtattaatagcttcatttcatataaacataagtaactcccaaacacttatgtagaggactaaaaatgtatctggtatttaagtaatctgaaccagttctgcaagtgactgtgttttgtattactgtgaaaataagaaaatgtagttaattacaatttaaagagtattccacataacttcttaatttctacattccctcccttactcttcgggggtttcctttcagtaagcaacttttccatgctcttaatgtattcctttttagtaggaatccggaagtattagattgaatggaaaagcacttgccatctctgtctaggggtcacaaattgaaatggctcctgtatcacatacggaggtcttgtgtatctgtggcaacagggagtttccttattcactctttatttgctgctgtttaagttgccaacctcccctcccaataaaaattcacttacacctcctgcctttgtagttctggtattcactttactatgtgatagaagtagcatgttgctgccagaatacaagcattgcttttggcaaattaaagtgcatgtcatttcttaatacactagaaaggggaaataaattaaagtacacaagtccaagtctaaaactttagtacttttccatgcagatttgtgcacatgtgagagggtgtccagtttgtctagtgattgttatttagagagttggaccactattgtgtgttgctaatcattgactgtagtcccaaaaaagccttgtgaaaatgttatgccctatgtaacagcagagtaacataaaataaaagtacattttataaacccatttactatggctttgtaacaattgcatacccatattttaagggacaggtgaatttactactttctaaagtttattgatacttcccttttatgtaaaatgtagtagtgatacctatatttccacattgtgcattgtgacacacttgtctagggatgcctggaagtgtataaaattggactgcatttcttagagtgttttactatagatcagtctcatgggccatctcttcctcagatgtaaatgatatctggttaagtgttatatggaataaagtggacattttaaaacta

SEQ ID NO: 330472 - DNA, 2086 bp, Homo sapiens
  misc_feature (1951)..(1951): n is a, c, g, or t
  misc_feature (1962)..(1962): n is a, c, g, or t
  misc_feature (1969)..(1969): n is a, c, g, or t
attgggcggtggaccgcccctcggccccggggtaggctgacacgggagggtcctcagctaaagccaaaagcagatcaaagtggtgggactcgcgtcgcggccgcggagacgtgaagctctcgaggctcctcccgctgcgggtcggcgctcgccctcgctctcctcgccctccgccccggccccggccccgcgcccgccatggagaagactgagctgatccagaaggccaagctggccgagcaggccgagcgctacgacgacatggccacctgcatgaaggcagtgaccgagcagggcgccgagctgtccaacgaggagcgcaacctgctctccgtggcctacaagaacgtggtcgggggccgcaggtccgcctggagggtcatctctagcatcgagcagaagaccgacacctccgacaagaagttgcagctgattaaggactatcgggagaaagtggagtccgagctgagatccatctgcaccacggtgctggaattgttggataaatatttaatagccaatgcaactaatccagagagtaaggtcttctatctgaaaatgaagggtgattacttccggtaccttgctgaagttgcgtgtggtgatgatcgaaaacaaacgatagataattcccaaggagcttaccaagaggcatttgatataagcaagaaagagatgcaacccacacacccaatccgcctggggcttgctcttaacttttctgtattttactatgagattcttaataacccagagcttgcctgcacgctggctaaaacggcttttgatgaggccattgctgaacttgatacactgaatgaagactcatacaaagacagcaccctcatcatgcagttgcttagagacaacctaacactttggacatcagacagtgcaggagaagaatgtgatgcggcagaaggggctgaaaactaaatccatacagggtgtcatccttctttccttcaagaaacctttttacacatctccattccttattccacttggatttcctatagcaaagaaacccattcatgtgtatggaatcaactgtttatagtcttttcacactgcagctttgggaaaacttcattccttgatttgtgtttgtcttggccttcctggtgtgcagtactgctgtagaaaagtattaatagcttcatttcatataaacataagtaactcccaaacacttatgtagaggactaaaaatgtatctggtatttaagtaatctgaaccagttctgcaagtgactgtgttttgtattactgtgaaaataagaaaatgtagttaattacaatttaaagagtattccacataacttcttaatttctacattccctcccttactcttcgggggtttcctttcagtaagcaacttttccatgctcttaatgtattcctttttagtaggaatccggaagtattagattgaatggaaaagcacttgccatctctgtctaggggtcacaaattgaaatggctcctgtatcacatacggaggtcttgtgtatctgtggcaacagggagtttccttattcactctttatttgctgctgtttaagttgccaacctcccctcccaataaaaattcacttacacctcctgcctttgtagttctggtattcactttactatgtgatagaagtagcatgttgctgccagaatacaagcattgcttttggcaaattaaagtgcatgtcatttcttaatacactagaaaggggaaataaattaaagtacacaagtccaagtctaaaactttagtacttttccatgcagatttgtgcacatgtgagagggtgtccagtttgtctagtgattgttatttagagagttggaccactattgtgtgttgctaatcattgactgtagtcccaaaaaagccttgtgaaaatgttatgccctatgtaacagcagagtaacataaataagtcattttaacctttntgggtggtacntgctccntttaggcagggaattcactttaaggtttgaaatccttttaaggagggacatatcctggtgcacctgtgggcggagtaaacggcggcaggttaaacgggccaaaaaggtggagggaaa

SEQ ID NO: 330473 - DNA, 2542 bp, Homo sapiens
  misc_feature (2001)..(2001): n is a, c, g, or t
  misc_feature (2029)..(2029): n is a, c, g, or t
attgggcggtggaccgcccctcggccccggggtaggctgacacgggagggtcctcagctaaagccaaaagcagatcaaagtggtgggactcgcgtcgcggccgcggagacgtgaagctctcgaggctcctcccgctgcgggtcggcgctcgccctcgctctcctcgccctccgccccggccccggccccgcgcccgccatggagaagactgagctgatccagaaggccaagctggccgagcaggccgagcgctacgacgacatggccacctgcatgaaggcagtgaccgagcagggcgccgagctgtccaacgaggagcgcaacctgctctccgtggcctacaagaacgtggtcgggggccgcaggtccgcctggagggtcatctctagcatcgagcagaagaccgacacctccgacaagaagttgcagctgattaaggactatcgggagaaagtggagtccgagctgagatccatctgcaccacggtgctggaattgttggataaatatttaatagccaatgcaactaatccagagagtaaggtcttctatctgaaaatgaagggtgattacttccggtaccttgctgaagttgcgtgtggtgatgatcgaaaacaaacgatagataattcccaaggagcttaccaagaggcatttgatataagcaagaaagagatgcaacccacacacccaatccgcctggggcttgctcttaacttttctgtattttactatgagattcttaataacccagagcttgcctgcacgctggctaaaacggcttttgatgaggccattgctgaacttgatacactgaatgaagactcatacaaagacagcaccctcatcatgcagttgcttagagacaacctaacactttggacatcagacagtgcaggagaagaatgtgatgcggcagaaggggctgaaaactaaatccatacagggtgtcatccttctttccttcaagaaacctttttacacatctccattccttattccacttggatttcctatagcaaagaaacccattcatgtgtatggaatcaactgtttatagtcttttcacactgcagctttgggaaaacttcattccttgatttgtgtttgtcttggccttcctggtgtgcagtactgctgtagaaaagtattaatagcttcatttcatataaacataagtaactcccaaacacttatgtagaggactaaaaatgtatctggtatttaagtaatctgaaccagttctgcaagtgactgtgttttgtattactgtgaaaataagaaaatgtagttaattacaatttaaagagtattccacataacttcttaatttctacattccctcccttactcttcgggggtttcctttcagtaagcaacttttccatgctcttaatgtattcctttttagtaggaatccggaagtattagattgaatggaaaagcacttgccatctctgtctaggggtcacaaattgaaatggctcctgtatcacatacggaggtcttgtgtatctgtggcaacagggagtttccttattcactctttatttgctgctgtttaagttgccaacctcccctcccaataaaaattcacttacacctcctgcctttgtagttctggtattcactttactatgtgatagaagtagcatgttgctgccagaatacaagcattgcttttggcaaattaaagtgcatgtcatttcttaatacactagaaaggggaaataaattaaagtacacaagtccaagtctaaaactttagtacttttccatgcagatttgtgcacatgtgagagggtgtccagttgtctagtgattgttatttagagagtggaccactatgtgtgttgctaatcattgactgtagtcccaataaaaattcacttacacctcctgcctttgtagttctggtattcactttactatgtgatagaagtagcatgttgctgccagaatacaagcattgcttttggcaaattaaagtgcatgtcattntcttaatacactagaaaggggaaataanacttaaagtacacaagtccaagtctaaaactttagtacttttccatgcagatttgtgcacatgtgagagggtgtccagtttgtctagtgattgttatttagagagttggaccactattgtgtgttgctaatcattgactgtagtcccaaaaaagccttgtgaaaatgttatgccctatgtaacagcagagtaacataaaataaaagtacattttataaacccatttactatggctttgtaacaattgcatacccatattttaagggacaggtgaatttactactttctaaagtttattgatacttcccttttatgtaaaatgtagtagtgatacctatatttccacattgtgcattgtgacacacttgtctagggatgcctggaagtgtataaaattggactgcatttcttagagtgttttactatagatcagtctcatgggccatctcttcctcagatgtaaatgatatctggttaagtgttatatggaataaagtggacattttaaaacta

SEQ ID NO: 330474 - DNA, 2205 bp, Homo sapiens
attgggcggtggaccgcccctcggccccggggtaggctgacacgggagggtcctcagctaaagccaaaagcagatcaaagtggtgggactcgcgtcgcggccgcggagacgtgaagctctcgaggctcctcccgctgcgggtcggcgctcgccctcgctctcctcgccctccgccccggccccggccccgcgcccgccatggagaagactgagctgatccagaaggccaagctggccgagcaggccgagcgctacgacgacatggccacctgcatgaaggcagtgaccgagcagggcgccgagctgtccaacgaggagcgcaacctgctctccgtggcctacaagaacgtggtcgggggccgcaggtccgcctggagggtcatctctagcatcgagcagaagaccgacacctccgacaagaagttgcagctgattaaggactatcgggagaaagtggagtccgagctgagatccatctgcaccacggtgctggaattgttggataaatatttaatagccaatgcaactaatccagagagtaaggtcttctatctgaaaatgaagggtgattacttccggtaccttgctgaagttgcgtgtggtgatgatcgaaaacaaacgatagataattcccaaggagcttaccaagaggcatttgatataagcaagaaagagatgcaacccacacacccaatccgcctggggcttgctcttaacttttctgtattttactatgagattcttaataacccagagcttgcctgcacgctggctaaaacgagactcatacaaagacagcaccctcatcatgcagttgcttagagacaacctaacactttggacatcagacagtgcaggagaagaatgtgatgcggcagaaggggctgaaaactaaatccatacagggtgtcatccttctttccttcaagaaacctttttacacatctccattccttattccacttggatttcctatagcaaagaaacccattcatgtgtatggaatcaactgtttatagtcttttcacactgcagctttgggaaaacttcattccttgatttgtgtttgtcttggccttcctggtgtgcagtactgctgtagaaaagtattaatagcttcatttcatataaacataagtaactcccaaacacttatgtagaggactaaaaatgtatctggtatttaagtaatctgaaccagttctgcaagtgactgtgttttgtattactgtgaaaataagaaaatgtagttaattacaatttaaagagtattccacataacttcttaatttctacattccctcccttactcttcgggggtttcctttcagtaagcaacttttccatgctcttaatgtattcctttttagtaggaatccggaagtattagattgaatggaaaagcacttgccatctctgtctaggggtcacaaattgaaatggctcctgtatcacatacggaggtcttgtgtatctgtggcaacagggagtttccttattcactctttatttgctgctgtttaagttgccaacctcccctcccaataaaaattcacttacacctcctgcctttgtagttctggtattcactttactatgtgatagaagtagcatgttgctgccagaatacaagcattgcttttggcaaattaaagtgcatgtcatttcttaatacactagaaaggggaaataaattaaagtacacaagtccaagtctaaaactttagtacttttccatgcagatttgtgcacatgtgagagggtgtccagtttgtctagtgattgttatttagagagttggaccactattgtgtgttgctaatcattgactgtagtcccaaaaaagccttgtgaaaatgttatgccctatgtaacagcagagtaacataaaataaaagtacattttataaacccatttactatggctttgtaacaattgcatacccatattttaagggacaggtgaatttactactttctaaagtttattgatacttcccttttatgtaaaatgtagtagtgatacctatatttccacattgtgcattgtgacacacttgtctagggatgcctggaagtgtataaaattggactgcatttcttagagtgttttactatagatcagtctcatgggccatctcttcctcagatgtaaatgatatctggttaagtgttatatggaataaagtggacattttaaaacta

SEQ ID NO: 330475 - DNA, 1605 bp, Homo sapiens
attgggcggtggaccgcccctcggccccggggtaggctgacacgggagggtcctcagctaaagccaaaagcagatcaaagtggtgggactcgcgtcgcggccgcggagacgtgaagctctcgaggctcctcccgctgcgggtcggcgctcgccctcgctctcctcgccctccgccccggccccggccccgcgcccgccatggagaagactgagctgatccagaaggccaagctggccgagcaggccgagcgctacgacgacatggccacctgcatgaaggcagtgaccgagcagggcgccgagctgtccaacgaggagcgcaacctgctctccgtggcctacaagaacgtggtcgggggccgcaggtccgcctggagggtcatctctagcatcgagcagaagaccgacacctccgacaagaagttgcagctgattaaggactatcgggagaaagtggagtccgagctgagatccatctgcaccacggtgctggaattgttggataaatatttaatagccaatgcaactaatccagagagtaaggtcttctatctgaaaatgaagggtgattacttccggtaccttgctgaagttgcgtgtggtgatgatcgaaaacaaacgatagataattcccaaggagcttaccaagaggcatttgatataagcaagaaagagatgcaacccacacacccaatccgcctggggcttgctcttaacttttctgtattttactatgagattcttaataacccagagcttgcctgcacgctggctaaaacggcttttgatgaggccattgctgaacttgatacactgaatgaagactcatacaaagacagcaccctcatcatgcagttgcttagagacaacctaacactttggacatcagacagtgcaggagaagaatgtgatgcggcagaaggggctgaaaactaaatccatacagggtgtcatccttctttccttcaagaaacctttttacacatctccattccttattccacttggatttcctatagcaaagaaacccattcatgtgtatggaatcaactgtttatagtcttttcacactgcagctttgggaaaacttcattccttgatttgtgtttgtcttggccttcctggtgtgcagtactgctgtagaaaagtattaatagcttcatttcatataaacataagtaactcccaaacacttatgtagaggactaaaaatgtatctggtatttaagtaatctgaaccagttctgcaagtgactgtgttttgtattactgtgaaaataagaaaatgtagttaattacaatttaaagagtattccacataacttcttaatttctacattccctcccttactcttcgggggtttcctttcagtaagcaacttttccatgctcttaatgtattcctttttagtaggaatccggaagtattagattgaatggaaaagcacttgccatctctgtctaggggtcacaaattgaaatggctcctgtatcacatacggaggtcttgtgtatctgtggcaacagggagtttccttattcactctttatttgctgctgtttaagttgccaacctcccctcccaataaaaattcacttacacct

SEQ ID NO: 330476 - DNA, 2011 bp, Homo sapiens
  misc_feature (2011)..(2011): n is a, c, g, or t
attgggcggtggaccgcccctcggccccggggtaggctgacacgggagggtcctcagctaaagccaaaagcagatcaaagtggtgggactcgcgtcgcggccgcggagacgtgaagctctcgaggctcctcccgctgcgggtcggcgctcgccctcgctctcctcgccctccgccccggccccggccccgcgcccgccatggagaagactgagctgatccagaaggccaagctggccgagcaggccgagcgctacgacgacatggccacctgcatgaaggcagtgaccgagcagggcgccgagctgtccaacgaggagcgcaacctgctctccgtggcctacaagaacgtggtcgggggccgcaggtccgcctggagggtcatctctagcatcgagcagaagaccgacacctccgacaagaagttgcagctgattaaggactatcgggagaaagtggagtccgagctgagatccatctgcaccacggtgctggaattgttggataaatatttaatagccaatgcaactaatccagagagtaaggtcttctatctgaaaatgaagggtgattacttccggtaccttgctgaagttgcgtgtggtgatgatcgaaaacaaacgatagataattcccaaggagcttaccaagaggcatttgatataagcaagaaagagatgcaacccacacacccaatccgcctggggcttgctcttaacttttctgtattttactatgagattcttaataacccagagcttgcctgcacgctggctaaaacggcttttgatgaggccattgctgaacttgatacactgaatgaagactcatacaaagacagcaccctcatcatgcagttgcttagagacaacctaacactttggacatcagacagtgcaggagaagaatgtgatgcggcagaaggggctgaaaactaaatccatacagggtgtcatccttctttccttcaagaaacctttttacacatctccattccttattccacttggatttcctatagcaaagaaacccattcatgtgtatggaatcaactgtttatagtcttttcacactgcagctttgggaaaacttcattccttgatttgtgtttgtcttggccttcctggtgtgcagtactgctgtagaaaagtattaatagcttcatttcatataaacataagtaactcccaaacacttatgtagaggactaaaaatgtatctggtatttaagtaatctgaaccagttctgcaagtgactgtgttttgtattactgtgaaaataagaaaatgtagttaattacaatttaaagagtattccacataacttcttaatttctacattccctcccttactcttcgggggtttcctttcagtaagcaacttttccatgctcttaatgtattcctttttagtaggaatccggaagtattagattgaatggaaaagcacttgccatctctgtctaggggtcacaaattgaaatggctcctgtatcacatacggaggtcttgtgtatctgtggcaacagggagtttccttattcactctttatttgctgctgtttaagttgccaacctcccctcccaataaaaattcacttacacctaaaaaaaaaaaaaaaaaaaaaaaaaaaaaaaggggggggggctaaaaatttccccgggggggcccagtttggggtccccggcttttttctggttacaaggggggcgcccctatagtaggggaggcgccgttttattaacgcaagcgaccggggccggcggttaccacaccggctcgggcgactggggcgacaccgtggcgctggctggggagctctgggggagaagggacccctaccttccgggggcgtcgggccctccgttggggccaactctccctaccggaggttcaaccggccacggcgtccttatacacttttcacgtggtctctggggttacccaacgctgatatgcttgccggtagaagtcggtaccggtttggtttcgacctttttcgaggggtatan

SEQ ID NO: 330477 - DNA, 1695 bp, Homo sapiens
  misc_feature (1573)..(1573): n is a, c, g, or t
  misc_feature (1576)..(1576): n is a, c, g, or t
attgggcggtggaccgcccctcggccccggggtaggctgacacgggagggtcctcagctaaagccaaaagcagatcaaagtggtgggactcgcgtcgcggccgcggagacgtgaagctctcgaggctcctcccgctgcgggtcggcgctcgccctcgctctcctcgccctccgccccggccccggccccgcgcccgccatggagaagactgagctgatccagaaggccaagctggccgagcaggccgagcgctacgacgacatggccacctgcatgaaggcagtgaccgagcagggcgccgagctgtccaacgaggagcgcaacctgctctccgtggcctacaagaacgtggtcgggggccgcaggtccgcctggagggtcatctctagcatcgagcagaagaccgacacctccgacaagaagttgcagctgattaaggactatcgggagaaagtggagtccgagctgagatccatctgcaccacggtgctggaattgttggataaatatttaatagccaatgcaactaatccagagagtaaggtcttctatctgaaaatgaagggtgattacttccggtaccttgctgaagttgcgtgtggtgatgatcgaaaacaaacgatagataattcccaaggagcttaccaagaggcatttgatataagcaagaaagagatgcaacccacacacccaatccgcctggggcttgctcttaacttttctgtattttactatgagattcttaataacccagagcttgcctgcacgctggctaaaacggcttttgatgaggccattgctgaacttgatacactgaatgaagactcatacaaagacagcaccctcatcatgcagttgcttagagacaacctaacactttggacatcagacagtgcaggagaagaatgtgatgcggcagaaggggctgaaaactaaatccatacagggtgtcatccttctttccttcaagaaacctttttacacatctccattccttattccacttggatttcctatagcaaagaaacccattcatgtgtatggaatcaactgtttatagtcttttcacactgcagctttgggaaaacttcattccttgatttgtgtttgtcttggccttcctggtgtgcagtactgctgtagaaaagtattaatagcttcatttcatataaacataagtaactcccaaacacttatgtagaggactaaaaatgtatctggtatttaagtaatctgaaccagttctgcaagtgactgtgttttgtattactgtgaaaataagaaaatgtagttaattacaatttaaagagtattccacataacttcttaatttctacattccctcccttactcttcgggggtttcctttcagtaagcaacttttccatgctcttaatgtattcctttttagtaggaatccggaagtattagattgaatggaaaagcacttgccatctctgtctaggggtcacaaattgaaatggctcctgtatcacatacggaggtcttgtgtatctgtggcaacagggagtttccttattcactctttatttgctgctgtttatgggcggtnagntggcacccccccaaaaaatattacctggcttgggtggtactaatgtaagagggggggcaaaacgtgggagggggtcccaaggggaaacaccaaaacgagggagggggaaaaacacgaaa

SEQ ID NO: 330478 - DNA, 1407 bp, Homo sapiens
attgggcggtggaccgcccctcggccccggggtaggctgacacgggagggtcctcagctaaagccaaaagcagatcaaagtggtgggactcgcgtcgcggccgcggagacgtgaagctctcgaggctcctcccgctgcgggtcggcgctcgccctcgctctcctcgccctccgccccggccccggccccgcgcccgccatggagaagactgagctgatccagaaggccaagctggccgagcaggccgagcgctacgacgacatggccacctgcatgaaggcagtgaccgagcagggcgccgagctgtccaacgaggagcgcaacctgctctccgtggcctacaagaacgtggtcgggggccgcaggtccgcctggagggtcatctctagcatcgagcagaagaccgacacctccgacaagaagttgcagctgattaaggactatcgggagaaagtggagtccgagctgagatccatctgcaccacggtgctggaattgttggataaatatttaatagccaatgcaactaatccagagagtaaggtcttctatctgaaaatgaagggtgattacttccggtaccttgctgaagttgcgtgtggtgatgatcgaaaacaaacgatagataattcccaaggagcttaccaagaggcatttgatataagcaagaaagagatgcaacccacacacccaatccgcctggggcttgctcttaacttttctgtattttactatgagattcttaataacccagagcttgcctgcacgctggctaaaacggcttttgatgaggccattgctgaacttgatacactgaatgaagactcatacaaagacagcaccctcatcatgcagttgcttagagacaacctaacactttggacatcagacagtgcaggagaagaatgtgatgcggcagaaggggctgaaaactaaatccatacagggtgtcatccttctttccttcaagaaacctttttacacatctccattccttattccacttggatttcctatagcaaagaaacccattcatgtgtatggaatcaactgtttatagtcttttcacactgcagctttgggaaaacttcattccttgatttgtgtttgtcttggccttcctggtgtgcagtactgctgtagaaaagtattaatagcttcatttcatataaacataagtaactcccaaacacttatgtagaggactaaaaatgtatctggtatttaagtaatctgaaccagttctgcaagtgactgtgttttgtattactgtgaaaataagaaaatgtagttaattacaatttaaagagtattccacataacttcttaatttctacattccctccatgcctagctggattgcagagttaagtttatgattatgaaataaaaactaaataacaaaaa

SEQ ID NO: 330479 - DNA, 1244 bp, Homo sapiens
attgggcggtggaccgcccctcggccccggggtaggctgacacgggagggtcctcagctaaagccaaaagcagatcaaagtggtgggactcgcgtcgcggccgcggagacgtgaagctctcgaggctcctcccgctgcgggtcggcgctcgccctcgctctcctcgccctccgccccggccccggccccgcgcccgccatggagaagactgagctgatccagaaggccaagctggccgagcaggccgagcgctacgacgacatggccacctgcatgaaggcagtgaccgagcagggcgccgagctgtccaacgaggagcgcaacctgctctccgtggcctacaagaacgtggtcgggggccgcaggtccgcctggagggtcatctctagcatcgagcagaagaccgacacctccgacaagaagttgcagctgattaaggactatcgggagaaagtggagtccgagctgagatccatctgcaccacggtgctggaattgttggataaatatttaatagccaatgcaactaatccagagagtaaggtcttctatctgaaaatgaagggtgattacttccggtaccttgctgaagttgcgtgtggtgatgatcgaaaacaaacgatagataattcccaaggagcttaccaagaggcatttgatataagcaagaaagagatgcaacccacacacccaatccgcctggggcttgctcttaacttttctgtattttactatgagattcttaataacccagagcttgcctgcacgctggctaaaacggcttttgatgaggccattgctgaacttgatacactgaatgaagactcatacaaagacagcaccctcatcatgcagttgcttagagacaacctaacactttggacatcagacagtgcaggagaagaatgtgatgcggcagaaggggctgaaaactaaatccatacagggtgtcatccttctttccttcaagaaacctttttacacatctccattccttattccacttggatttcctatagcaaagaaacccattcatgtgtatggaatcaactgtttatagtcttttcacactgcagctttgggaaaacttcattccttgatttgtgtttgtcttggccttcctggtgtgcagtactgctgtagaaaagtattaatagcttcatttcatataaacataagtaactcccaaacacttatgtagaggactgggtcatgttctgtggggatcctctaggtcacctcga

SEQ ID NO: 330480 - DNA, 697 bp, Homo sapiens
  misc_feature (41)..(42): n is a, c, g, or t
  misc_feature (49)..(49): n is a, c, g, or t
  misc_feature (51)..(52): n is a, c, g, or t
  misc_feature (54)..(54): n is a, c, g, or t
cggacgcgtgggtcgacccacgcgtccgtcgacccacgcgnnccggacncnngngtcgacccacgcgtccgcacacatctccattccttattccacttggatttcctatagcaaagaaacccattcatgtgtatggaatcaactgtttatagtcttttcacactgcagctttgggaaaacttcattccttgatttgtgtttgtcttggccttcctggtgtgcagtactgctgtagaaaagtattaatagcttcatttcatataaacataagtaactcccaaacacttatgtagaggactaaaaatgtatctggtatttaagtaatctgaaccagttctgcaagtgactgtgttttgtattactgtgaaaataagaaaatgtagttaattacaatttaaagagtattccacataacttcttaatttctacattccctcccttactcttcgggggtttcctttcagtaagcaacttttccatgctcttaatgtattcctttttagtaggaatccggaagtattagattgaatggaaaagcacttgccatctctgtctaggggtcacaaattgaaatggctcctgtatcacatacggaggtcttgtgtatctgtggcaacagggagtttccttattcactctttatttgctgctgtttaagttgccaacctcccctcccaataaaaattcacttacacct

SEQ ID NO: 330481 - DNA, 316 bp, Homo sapiens
atgtatatggggacaattagaaacttctgcaacaagtttcctaagacaatgaactgtaagaataatggaagtattttgccttaagagcgaatgtaagtaaagcattctgaatcacttgagaaacactcaaacaagtaatatgtgtacttcttaccaaagctctacatctatttgttacaagatagaagattcttactcattaactccaggaatatttaaccaactgctaaataagagacactataataagttgggtattttaataaaagcaatgaggtacagaaaacgctttgtcatccacaagcctagattttct

SEQ ID NO: 330482 - DNA, 663 bp, Homo sapiens
tggaggttgcagtgagccgagattatgccattgcactccagccgggggagcaacaaagccagactccatctcaaaaaaaaaccaaaaaaaatcctatttagtacaaggtacattatttaggtaatgagtccattaaaagccaacactttccccactacactatatgtgtatgtaacacaactgcccttgtaacttcctaaacctataattaagaaacaataaaaggcaaattaagaatgcttttttaaaaggtgggggcattatgctaataagttactgtggatttcagagtgcagagtagaaagatcacaagaatttagtgtggtaggtgggaacagaaaatgggtgtataaattttattgacgtgggagtactggatattgtagagacagatatcatcagggcaaggagattaaagatttttgcattgacggtttgacactatattgtggtaataacactgtatgtgttgggagatagaacaggaaacatcttccctggaatatgtatactattaaatgttttatcaaacttttgatcaaacaagacagcacaatttataatttcatttctatttctatgttatgagaaactgatcatttattcaaatgtttaacaggcatgttcatgttactataaactcttctgtttcaccaaaaaaaa

SEQ ID NO: 330483 - DNA, 549 bp, Homo sapiens
ctgccgttcctagctcaggtccttatcatctttcatattgattattgtagtaacctaactgatctcccttattccagtctgtactccactttgtaacccaggaagaaatataaaatagtaattaagtttaagtgtgccagaaatagatgtcctgattttgagcttcagtcatagattagtcacttagtgtcttcaagtctaagttttctgagtttcctgtgaaatcgatatatattcttcagcacagtgcctcgcacatagaattagtaaaaatatgttaacgaggattatttatctttctgtcagatctcagcacaatgtagtataatcacatgtgcacttgttttatttttccatgtagaccatgaacttcattggggtggacactgaatcttactgattttttagtatacaacaattacccaggaaactaacagtatggtaaccgtaacaggatgtgataaatatttatcaggtactattagatagattttatttaccagacatttgtgaatattcttctcaatgctgatcccctgtggaaagtaa

SEQ ID NO: 330484 - DNA, 484 bp, Homo sapiens
ccaaacatccagaaacgcggtgtttattaaatcaattctttaaacaggcagccaacaccaagttttgacaatgcattacaaacagtgcaaagcctccggagccgaatgctctgtgaatatcagtgcagcactgataagctggaccctgaaccagtatcaccctctgaccacacagagccaggaacagccctatttattttcttcattccaccttctcctgccactttaaaatgggggagaggggaacggcctgtgtgctgttcttccagaagctggtggaaagacatgcccaaaaccgctgacttcgtccatgtagcttatcagcagggccattttgaacaagttatctaagctcagggcctcaatgtcctcacgcgtaagtgatggctccagagggagtgttcttctaagacctggtgaggtaagtgtgcttatgagtttggtacatcataagtactgcattaatattcgttgttggcggccg

SEQ ID NO: 330485 - DNA, 403 bp, Homo sapiens
ccagagcagggaggaatggtcccaaaaggaagaaactgtgcttgtcttcacaataaagagcagagaagtggggagaggtattgaaagctgtgggtggagttttgcaggtaagattgtgtgaaagaggtgagggaactacaatctgggggaatgtggataggagagtaaaagggaattctagagaacaatccctactgacttcacacaacttaagaaatgcaagtaaagggccgggcgcggtggcccacacctgtaatcccagtactttgggaggcagaggcaggtggatcacttgaagtcaggagttcaagaagagcctggccaacatggtgaaaccccatctgggttagtcaggcatggtggcatgtgtctgtaatcccagctacagaaagatagagaggtg

SEQ ID NO: 330486 - DNA, 904 bp, Homo sapiens
ttgtctttctttttaatagactttattttttgcaacacttttaagcacagcaaagttgagcggagggtacagatttccaagcctccccaccgccatcctccccgactgtcgagatcccagtcacccacagtgggacatacagctggggaacctacagggacatggcataatcccctggagcgcagattgacattagggctcactcgtagtgttacccattctatgaatttggacaaatacataatgacatccatccctcatcacagtgtcatacagaatagtttcactgccttaaaaagcctgtgttttccaccttttcatccctccctcccccagcccctgacaaccaccagtaatttaattccttcatattttgccctttccagaacaggtggaatcacacattatttggtctttgcaggttggcctctttcatttagcaataggcattcaagattccttccatgtcttgatagtgcatttctgtttagcactgactaatattctgttgttggttgtcaagatttactagtttattcaagttcattctttttcaaataaattctcaatcatattttattttattgcaggttcatacttataacacaatttagtatttctatcacttaagaactcttggcaacacatatcagaaacttgcatgtatcagacagtagcgaactcaaggcggtgtttatgtagcaggtctcgggtgggcctctgggaccgcgcctgttgaactcagtgctgctgatggctgcagtcccaactcctctggtcacacggggggtttgcatagatccagcaagtagagtgacccactttcctgatttgcccagtactgaggggttcccctttctgattttccactgattcattagacaactatgtattaagcatagac

SEQ ID NO: 330487 - DNA, 259 bp, Homo sapiens
gagtgaatggctggggatgaactcacaggggtgtctaaactgtctttgcatagctgagtcagtttccgggagggagtctcaggaccagggggtgtttctcagcctgccaaaatgccaaatctgaaacatatctcaaagaccagttacttaggttttacaatagtgatgttatctgtaggagtagttggggaagttatcgatcttgtgactcccttaattgctgaggcagtaagcaattaatacgaaaacaacagcagta

SEQ ID NO: 330488 - DNA, 399 bp, Homo sapiens
ccccaggggtggggagaagtcgggcactggagaggaacaggcatccggagtgatgtgatgccacatgggtggatggggcagagcccaccccgcctccagcatagcccagaagcctctggctgcttctctgagtgaggccattggaaggcttgggtggaatgttttagaggactgctggtttccatgtttgtgtagacaacagatgggaagggctgaaggaggagagtggtgaggtgtctgctcgggtccacgtgggagaggtgggcggttccggccacggagcagcctgtgcgaggagtgtcgggctctggatagactttgggtgtagagcctgagggatttgctcccaggtgagatgaggaaggtaggagaagagaggcgtgatcatgactcccaaag

SEQ ID NO: 330489 - DNA, 738 bp, Homo sapiens
ggagagctgggcttcgaggcgtcagtgtgaagggaaggctaaggacgcatcggtgctggagagttgagaatatgccttcccctccacccccaacccagtcaccttatttgaaaaaaaattaaaaaacaccttttatttaaaaacctaaccctggaagtttgctcgggaaggcattctcttcctcttcctccagctgcctgaaaatcatatgcgtggtttttcctgtttcctgctctgtagctgacatcaggggagcaacgtgaacacaggaaaatggaaatcaacatttgaaacttttaaatggaagctttattggggttccacatatggaaaactgcaaatagcagaagtatgtgactcaataaattattctggagtgaccacatcctctaactgcctcccaggacaagacggagaatgtgaacaatgctcctgaaggcccctttccctcaaagaatcactgcaattgaaggaaaaatgctccatgtcccctctgccagttggtgtttatcaaaggacaacggaggaagagagacaaagtgcctggatgtgtgtgttaatcaagagttgtcaggaccctgcctctaaaagaaagcgctaaaatgatgcttttgacaagacttttctcaaagtggatgcagtctaagggttggaaaacaaggcccaatcaggctaggtctgacttgtcgcctgcttttgtaaataaagttttattggctcacagacaaaaaaaaaagt

SEQ ID NO: 330490 - DNA, 710 bp, Homo sapiens
ggagagctgggcttcgaggcgtcagtgtgaagggaaggctaaggacgcatcggtgctggagagttgagaatatgccttcccctccacccccaacccagtcaccttatttgaaaaaaaattaaaaaacaccttttatttaaaaacctaaccctggaagtttgctcgctgcctgaaaatcatatgcgtggtttttcctgtttcctgctctgtagctgacatcaggggagcaacgtgaacacaggaaaatggaaatcaacatttgaaacttttaaatggaagctttattggggttccacatatggaaaactgcaaatagcagaagtatgtgactcaataaattattctggagtgaccacatcctctaactgcctcccaggacaagacggagaatgtgaacaatgctcctgaaggcccctttccctcaaagaatcactgcaattgaaggaaaaatgctccatgtcccctctgccagttggtgtttatcaaaggacaacggaggaagagagacaaagtgcctggatgtgtgtgttaatcaagagttgtcaggaccctgcctctaaaagaaagcgctaaaatgatgcttttgacaagacttttctcaaagtggatgcagtctaagggttggaaaacaaggcccaatcaggctaggtctgacttgtcgcctgcttttgtaaataaagttttattggctcacagacaaaaaaaaaagt

SEQ ID NO: 330491 - DNA, 663 bp, Homo sapiens
ggagagctgggcttcgaggcgtcagtgtgaagggaaggctaaggacgcatcggtgctggagagttgagaatatgccttcccctccacccccaacccagtcaccttatttgaaaaaaaattaaaaaacaccttttatttaaaaacctaaccctggaagtttgctcgctgacatcaggggagcaacgtgaacacaggaaaatggaaatcaacatttgaaacttttaaatggaagctttattggggttccacatatggaaaactgcaaatagcagaagtatgtgactcaataaattattctggagtgaccacatcctctaactgcctcccaggacaagacggagaatgtgaacaatgctcctgaaggcccctttccctcaaagaatcactgcaattgaaggaaaaatgctccatgtcccctctgccagttggtgtttatcaaaggacaacggaggaagagagacaaagtgcctggatgtgtgtgttaatcaagagttgtcaggaccctgcctctaaaagaaagcgctaaaatgatgcttttgacaagacttttctcaaagtggatgcagtctaagggttggaaaacaaggcccaatcaggctaggtctgacttgtcgcctgcttttgtaaataaagttttattggctcacagacaaaaaaaaaagt

SEQ ID NO: 330492 - DNA, 784 bp, Homo sapiens
ggagagctgggcttcgaggcgtcagtgtgaagggaaggctaaggacgcatcggtgctggagagttgagaatatgccttcccctccacccccaacccagtcaccttatttgaaaaaaaattaaaaaacaccttttatttaaaaacctaaccctggaagtttgctcgctgcctgaaaatcatatgcgtggtttttcctgtttcctgctctgtagctgacatcaggggagcaacgtgaacacaggaaaatggaaatcaacatttgaaacttttaaatggaagctttattggggttccacatatggaaaactgcaaatagcagaagtatgtgactcaataaattattctggagtgaccacatcctctaactgcctcccaggacaagacggagaatgtgaacaatgctcctgaaggcccctttccctcaaaggtaaccactggcctgacttctgacaccatacatttgttttgcttttttgaacttcatgtaaatggaatcatatgaatcactgcaattgaaggaaaaatgctccatgtcccctctgccagttggtgtttatcaaaggacaacggaggaagagagacaaagtgcctggatgtgtgtgttaatcaagagttgtcaggaccctgcctctaaaagaaagcgctaaaatgatgcttttgacaagacttttctcaaagtggatgcagtctaagggttggaaaacaaggcccaatcaggctaggtctgacttgtcgcctgcttttgtaaataaagttttattggctcacagacaaaaaaaaaagt

SEQ ID NO: 330493 - DNA, 448 bp, Homo sapiens
ggagagctgggcttcgaggcgtcagtgtgaagggaaggctaaggacgcatcggtgctggagagttgagaatatgccttcccctccacccccaacccagtcaccttatttgaaaaaaaattaaaaaacaccttttatttaaaaacctaaccctggaagtttgctcgaatcactgcaattgaaggaaaaatgctccatgtcccctctgccagttggtgtttatcaaaggacaacggaggaagagagacaaagtgcctggatgtgtgtgttaatcaagagttgtcaggaccctgcctctaaaagaaagcgctaaaatgatgcttttgacaagacttttctcaaagtggatgcagtctaagggttggaaaacaaggcccaatcaggctaggtctgacttgtcgcctgcttttgtaaataaagttttattggctcacagacaaaaaaaaaagt

SEQ ID NO: 330494 - DNA, 438 bp, Homo sapiens
acctggcccccataccctcactaaaagactattaagtgaaagaatagctctattttctttattaaggtataccgctagctcagtacaatttgaagaggggcacttgatatgccgagcatggcacaaagacctcgggtctggttttaatctctgccccggctttgtctttcagaatcactgcaattgaaggaaaaatgctccatgtcccctctgccagttggtgtttatcaaaggacaacggaggaagagagacaaagtgcctggatgtgtgtgttaatcaagagttgtcaggaccctgcctctaaaagaaagcgctaaaatgatgcttttgacaagacttttctcaaagtggatgcagtctaagggttggaaaacaaggcccaatcaggctaggtctgacttgtcgcctgcttttgtaaataaagttttattggctca

SEQ ID NO: 330495 - DNA, 294 bp, Homo sapiens
taacagatatctactcccaagtttggcatgctaacgccaggatgcagctgcctaagattactctgtgttcttgagggttttgagcacaagtttagtgtggctgtcgctcagagggttggattcagtactgcctgtggataccaattggccctgaggaacctgcagatataaaagtccgccctctgtagacgggagttttgcatgtatgaataccgtattttcttttctttctttctttctttttttttttggggtaacatataagggggggaaccgagcctcgaatccgaaacc

SEQ ID NO: 330496 - DNA, 183 bp, Homo sapiens
gaggttattatgatgaaaactttgaagaaattcttaaactttatcttcctctgtggattgaggagtaaaaatcacaattagagatgtttaaagaacttcttttaagaaataattcaaaaaaactactcatgtcattaagtaaaaaatataatacatattagaataattggtttgggtctgcta

SEQ ID NO: 330497 - DNA, 416 bp, Homo sapiens
atgattttgagggctccaaatttaaaggggaaagggtgggatactgagaaatacagttttcatgtgagagggtagcagggggaaaatagtcattcatgcctctgtctggcttagtcaatctgaatctgcatttttacgtaagataacatagacaaatggggcaggggaacaatcagatatgcatttgtgtcaggagggcagaggggtgactgtacctgaaaacagaagctatctatttacattgccatggtaaattttcatagaaacactttatggtaaagatcttggcgctcactgagaatttccttgtgggcaaaatatgagcgaggtgtgtagcttttcatctggtagccatctcatttaaaaaccaagaggcaaggcagttttgcgtgacccagttcccagcttaacttttc

SEQ ID NO: 330498 - DNA, 428 bp, Homo sapiens
acattaggatggctgaggcaacaagataggagaatgaaaagtaagatgtagtcgtgggatgagggctctgaaccccaggctcaggggtttgtcatcagtgatgccagttaaaaagggatccactgcattgaaataattaacaaaaggttaaaaaatccagaaaaagcatagagttagaagggacctgatcttgtccaatagccacatttttacagagaaggaaagtgatgaacagagtgcttagaaaacatactcagggttcaatttccatcgagaagcattccctgacctcggagctgggctgcagttggcatttcaaacccactgtccgcattaacctgaacgtaacacacaaccctgtgtatacctttaccatacaaaacacattaacaacacattaacatctctcacgttcaccctgacaattc

SEQ ID NO: 330499 - DNA, 1175 bp, Homo sapiens
agaaaaaggctctggagccagactgccagagttcaaatccaagctccagctttattagctgtgtgatcttgggcaagttatcagacctctctgtgaccggttttcttatgtgtgcattaatcacatgtaaagtgaatagagacaaacaagtgctcattgtgattctctctctttttttttttttttgagttggagtcttgctttgtcacccaggctggagtgcagtcgtactatcttggctcactgccatttccacttctggggtttaagtgatcctcctgcctcagcctcccaagtagctgggattacaggcatgcaccactaagcctggctaatttttgtatttttagtagagacggggtttcaccgtgttggccatgctggtctcaaactcctgaccttaagtgatctgccctacttaaaggcgtgagccactacgcccagcccattgtgatttttatgataactcatagtgaaatgaaatcacgtgcccacgctgtggtgactctgtccagcaacttctctgcagagccccctagattcatgcttctcagactttaaaatgtgcctgcaaatctcctggcatccttgttaaaatgcaggtttgatctggtgggtctttggggtggggcccaagactacatttgtgatgagctcccgatgctgtgggttttgctggttcaggagcacactttgaatttcaaggctcaggcctgtaggcattctcccctctgtggcttggtgccctcgccagaccatggctgatgtcagagctggtttcctagtgattgcccctcagggtcttcctgcttttctaccctaccctgccggtgagggacacctactcatgcaccacttgaagttgagttccagaaagaagacgccagggatgaggctggacagagggtctcacggatggccccgctgccaggagcagaactggttcggaggccactgcagctctaccgatacttgctgcgctgttgccagcagctgccgaccaagggcatccagcagcattacaagcatgctgtcaggcagagttttcgggttcattcagatgaagacaaccctgagagaatccagcagattattaaaagagccattgaagatgctgactggatcatgaacaaagtaggtgcttggcccctgggctctgcctgcgagctggggtg

SEQ ID NO: 330500 - DNA, 1087 bp, Homo sapiens
agaaaaaggctctggagccagactgccagagttcaaatccaagctccagctttattagctgtgtgatcttgggcaagttatcagacctctctgtgaccggttttcttatgtgtgcattaatcacatgtaaagtgaatagagacaaacaagtgctcattgtgattctctctctttttttttttttttgagttggagtcttgctttgtcacccaggctggagtgcagtcgtactatcttggctcactgccatttccacttctggggtttaagtgatcctcctgcctcagcctcccaagtagctgggattacaggcatgcaccactaagcctggctaatttttgtatttttagtagagacggggtttcaccgtgttggccatgctggtctcaaactcctgaccttaagtgatctgccctacttaaaggcgtgagccactacgcccagcccattgtgatttttatgataactcatagtgaaatgaaatcacgtgcccacgctgtggtgactctgtccagcaacttctctgcagagccccctagattcatgcttctcagactttaaaatgtgcctgcaaatctcctggcatccttgttaaaatgcaggtttgatctggtgggtctttggggtggggcccaagactacatttgtgatgagctcccgatgctgtgggttttgctggttcaggagcacactttgaatttcaaggctcaggcctgtaggcattctcccctctgtggcttggtgccctcgccagaccatggctgatgtcagagctggtttcctagtgattgcccctcagggtcttcctgcttttctaccctaccctgccggtgagggacacctactcatgcaccacttgaagttgagttccagaaagaagacgccagggatgaggctgtaagtctccctccacactcacctttggtcttgtgggcctgctctgggctagagcttctgttgaactgaatgcccaccccaccccaaggtgcaggctccatgggatgggacaggaggggcctctgcactgcaccaagcttgcttcccagagtactgggaactgggggtcagggctgagtactgaacttgg

SEQ ID NO: 330501 - DNA, 265 bp, Homo sapiens
attgggtgggaaatggtggcctcttaatgtctatcaactgtaaagactgcaaaaagggatccatggctgttggagcaattagatacccgattacgtagacagatccggaaagcgcattgtttccttagcaaaagggcactcagccacagggatgaactagtgtttgtttgtatccttgcagttatgtgacttaaagtgactcagagatatctatgtatgcgagtgtactccgctggcaatgaagtaaatatatcaatttgtggaa

SEQ ID NO: 330502 - DNA, 1942 bp, Homo sapiens
cgctcagtccccggggagcgggcactcgtcgccgcggcggcgtccggggctggcgttaccctggaggctgggacagagggtctcacggatggccccgctgccaggagcagaactggttcggaggccactgcagctctaccgatacttgctgcgctgttgccagcagctgccgaccaagggcatccagcagcattacaagcatgctgtcaggcagagttttcgggttcattcagatgaagacaaccctgagagaatccagcagattattaaaagagccattgaagatgctgactggatcatgaacaaatataaaaaacaaaactgagagctccgagggtgagccttcctggcctctggaagttgagaggcccctcttctggagctcagcagcagcagctggtttggaagatccattggccttgttggctgaaagccagaaatcaggggagaagctgaccttgctccagaggctcctcttgccgcggccatgttgctagcatcctttatgtttgcacttccagccacttacgatgtgaaatttggggagaatgtagtatttttttgcttcttttgtgtgttttttatttttgtgtttttgttcttttacttttctctgaaagtgattcatttattctggagatctctttatcattctctgagtcccagagcagatgtcccctcaggtagcaacctgtacagaagaaagcacgtgggttttagaaccagacagatctggatttgaatcccagatgcaataagatgaaggtgaagtgcctcacacaggatgtggcacatgacagtgcctgaagggctcccttcaaggaagccgtcctgccccgccccctcctctgctcctgcagcgccctgcacagctctgctccccgcatgcaccgcatcgggtctcagttttttgtttgcgagcttgccctgtccctgcttgtagcccctgagccctcacagttgtcacacacccagcagtctgccaaggagctgcttttcctgactactgtctctccatgcctagggaagtcaaagccctgggccttgccttcagggagttgacagtgtccttgaagtggtgaagtgcccaccacatgaaccaaggagagacgccaaagcagctgccatggactctggcctgtccaagcctctgtgcacctgcagtctctttccactggcacttccctgctttgctaccatcgtggaagaatggaagggagggggagaaggtgggtgggctcagggagaacggccagagtggccagaagatgcagagagaagccccactgggatctgagtattccccaagggcactcagccacagggatgaactagtgtttgtttgtatccttgcagttatgtgacttaaagtgactcagagatatctatgtatgcgagtgtactccgctggcaatgaagtaaatatatcaatttgtggaaaaaaaaaaaaaaaaaaaaacaaagaaacaatacaaaaaaacaaagaaagacgaggggggggccgcgccactaaaaatatacccccggagggggccccaaatttgggcgcttacaccacattttttttgtcaccgaggggcgcccctaatggggagcacagttatataaagctgaggcagcggtgcaccccaccttttttacacacaacagtggagagccgttggaaacaaactgtcacagcgtgggaacaactcgttggggagagaagaaaaacccattaattacttggggggggggggggggcaaaacataattttgggggacaccaattatcaccttcaaacaggaaaatttttaagaggcccctctgaggagagaacaatatgaaaacttctaagaggaggtaatagcggtcgttaaccacacaggagtagtgttattctcttggttgtctatgagaaatttggggactaacggaatatattctttgaaaaattttccc

SEQ ID NO: 330503 - DNA, 1491 bp, Homo sapiens
cgctcagtccccggggagcgggcactcgtcgccgcggcggcgtccggggctggcgttaccctggaggctgggacagagggtctcacggatggccccgctgccaggagcagaactggttcggaggccactgcagctctaccgatacttgctgcgctgttgccagcagctgccgaccaagggcatccagcagcattacaagcatgctgtcaggcagagttttcgggttcattcagatgaagacaaccctgagagaatccagcagattattaaaagagccattgaagatgctgactggatcatgaacaaatataaaaaacaaaactgagagctccgagggtgagccttcctggcctctggaagttgagaggcccctcttctggagctcagcagcagcagctggtttggaagatccattggccttgttggctgaaagccagaaatcaggggagaagctgaccttgctccagaggctcctcttgccgcggccatgttgctagcatcctttatgtttgcacttccagccacttacgatgtgaaatttggggagaatgtagtatttttttgcttcttttgtgtgttttttatttttgtgtttttgttcttttacttttctctgaaagtgattcatttattctggagatctctttatcattctctgagtcccagagcagatgtcccctcaggtagcaacctgtacagaagaaagcacgtgggttttagaaccagacagatctggatttgaatcccagatgcaataagatgaaggtgaagtgcctcacacaggatgtggcacatgacagtgcctgaagggctcccttcaaggaagccgtcctgccccgccccctcctctgctcctgcagcgccctgcacagctctgctccccgcatgcaccgcatcgggtctcagttttttgtttgcgagcttgccctgtccctgcttgtagcccctgagccctcacagttgtcacacacccagcagtctgccaaggagctgcttttcctgactactgtctctccatgcctagggaagtcaaagccctgggccttgccttcagggagttgacagtgtccttgaagtggtgaagtgcccaccacatgaaccaaggagagacgccaaagcagctgccatggactctggcctgtccaagcctctgtgcacctgcagtctctttccactggcacttccctgctttgctaccatcgtggaagaatggaagggagggggagaaggtgggtgggctcagggagaacggccagagtggccagaagatgcagagagaagccccactgggatctgagtattccccaagggcactcagccacagggatgaactagtgtttgtttgtatccttgcagttatgtgacttaaagtgactcagagatatctatgtatgcgagtgtactccgctggcaatgaagtaaatatatcaatttgtggaagctcgtgtgtcttctcaactgataaaccatacgttccctaagcaaaaaatg

SEQ ID NO: 330504 - DNA, 2769 bp, Homo sapiens
agaaaaaggctctggagccagactgccagagttcaaatccaagctccagctttattagctgtgtgatcttgggcaagttatcagacctctctgtgaccggttttcttatgtgtgcattaatcacatgtaaagtgaatagagacaaacaagtgctcattgtgattctctctctttttttttttttttgagttggagtcttgctttgtcacccaggctggagtgcagtcgtactatcttggctcactgccatttccacttctggggtttaagtgatcctcctgcctcagcctcccaagtagctgggattacaggcatgcaccactaagcctggctaatttttgtatttttagtagagacggggtttcaccgtgttggccatgctggtctcaaactcctgaccttaagtgatctgccctacttaaaggcgtgagccactacgcccagcccattgtgatttttatgataactcatagtgaaatgaaatcacgtgcccacgctgtggtgactctgtccagcaacttctctgcagagccccctagattcatgcttctcagactttaaaatgtgcctgcaaatctcctggcatccttgttaaaatgcaggtttgatctggtgggtctttggggtggggcccaagactacatttgtgatgagctcccgatgctgtgggttttgctggttcaggagcacactttgaatttcaaggctcaggcctgtaggcattctcccctctgtggcttggtgccctcgccagaccatggctgatgtcagagctggtttcctagtgattgcccctcagggtcttcctgcttttctaccctaccctgccggtgagggacacctactcatgcaccacttgaagttgagttccagaaagaagacgccagggatgaggctggacagagggtctcacggatggccccgctgccaggagcagaactggttcggaggccactgcagctctaccgatacttgctgcgctgttgccagcagctgccgaccaagggcatccagcagcattacaagcatgctgtcaggcagagttttcgggttcattcagatgaagacaaccctgagagaatccagcagattattaaaagagccattgaagatgctgactggatcatgaacaaatataaaaaacaaaactgagagctccgagggtgagccttcctggcctctggaagttgagaggcccctcttctggagctcagcagcagcagctggtttggaagatccattggccttgttggctgaaagccagaaatcaggggagaagctgaccttgctccagaggctcctcttgccgcggccatgttgctagcatcctttatgtttgcacttccagccacttacgatgtgaaatttggggagaatgtagtatttttttgcttcttttgtgtgttttttatttttgtgtttttgttcttttacttttctctgaaagtgattcatttattctggagatctctttatcattctctgagtcccagagcagatgtcccctcaggtagcaacctgtacagaagaaagcacgtgggttttagaaccagacagatctggatttgaatcccagatgcaataagatgaaggtgaagtgcctcacacaggatgtggcacatgacagtgcctgaagggctcccttcaaggaagccgtcctgccccgccccctcctctgctcctgcagcgccctgcacagctctgctccccgcatgcaccgcatcgggtctcagttttttgtttgcgagcttgccctgtccctgcttgtagcccctgagccctcacagttgtcacacacccagcagtctgccaaggagctgcttttcctgactactgtctctccatgcctagggaagtcaaagccctgggccttgccttcagggagttgacagtgtccttgaagtggtgaagtgcccaccacatgaaccaaggagagacgccaaagcagctgccatggactctggcctgtccaagcctctgtgcacctgcagtctctttccactggcacttccctgctttgctaccatcgtggaagaatggaagggagggggagaaggtgggtgggctcagggagaacggccagagtggccagaagatgcagagagaagccccactgggatctgagtattccccaagggcactcagccacagggatgaactagtgtttgtttgtatccttgcagttatgtgacttaaagtgactcagagatatctatgtatgcgagtgtactccgctggcaatgaagtaaatatatcaatttgtggaaaaaaaaaaaaaaaaaaaaacaaagaaacaatacaaaaaaacaaagaaagacgaggggggggccgcgccactaaaaatatacccccggagggggccccaaatttgggcgcttacaccacattttttttgtcaccgaggggcgcccctaatggggagcacagttatataaagctgaggcagcggtgcaccccaccttttttacacacaacagtggagagccgttggaaacaaactgtcacagcgtgggaacaactcgttggggagagaagaaaaacccattaattacttggggggggggggggggcaaaacataattttgggggacaccaattatcaccttcaaacaggaaaatttttaagaggcccctctgaggagagaacaatatgaaaacttctaagaggaggtaatagcggtcgttaaccacacaggagtagtgttattctcttggttgtctatgagaaatttggggactaacggaatatattctttgaaaaattttccc

SEQ ID NO: 330505 - DNA, 1364 bp, Homo sapiens
cgctcagtccccggggagcgggcactcgtcgccgcggcggcgtccggggctggcgttaccctggaggctgggacagagggtctcacggatggccccgctgccaggagcagaactggttcggaggccactgcagctctaccgatacttgctgcgctgttgccagcagctgccgaccaagggcatccagcagcattacaagcatgctgtcaggcagagttttcgggttcattcagatgaagacaaccctgagagaatccagcagattattaaaagagccattgaagatgctgactggatcatgaacaaatataaaaaacaaaactgagagctccgagggtgagccttcctggcctctggaagttgagaggcccctcttctggagctcagcagcagcagctggtttggaagatccattggccttgttggctgaaagccagaaatcaggggagaagctgaccttgctccagaggctcctcttgccgcggccatgttgctagcatcctttatgtttgcacttccagccacttacgatgtgaaatttggggagaatgtagtatttttttgcttcttttgtgtgttttttatttttgtgtttttgttcttttacttttctctgaaagtgattcatttattctggagatctctttatcattctctgagtcccagagcagatgtcccctcaggtagcaacctgtacagaagaaagcacgtgggttttagaaccagacagatctggatttgaatcccagatgcaataagatgaaggtgaagtgcctcacacaggatgtggcacatgacagtgcctgaagggctcccttcaaggaagccgtcctgccccgccccctcctctgctcctgcagcgccctgcacagctctgctccccgcatgcaccgcatcgggtctcagttttttgtttgcgagcttgccctgtccctgcttgtagcccctgagccctcacagttgtcacacacccagcagtctgccaaggagctgcttttcctgactactgtctctccacatgaaccaaggagagacgccaaagcagctgccatggactctggcctgtccaagcctctgtgcacctgcagtctctttccactggcacttccctgctttgctaccatcgtggaagaatggaagggagggggagaaggtgggtgggctcagggagaacggccagagtggccagaagatgcagagagaagccccactgggatctgagtattccccaagggcactcagccacagggatgaactagtgtttgtttgtatccttgcagttatgtgacttaaagtgactcagagatatctatgtatgcgagtgtactccgctggcaatgaagtaaatatatcaatttgtggaa

SEQ ID NO: 330506 - DNA, 2005 bp, Homo sapiens
cgctcagtccccggggagcgggcactcgtcgccgcggcggcgtccggggctggcgttaccctggaggctgggacagagggtctcacggatggccccgctgccaggagcagaactggttcggaggccactgcagctctaccgatacttgctgcgctgttgccagcagctgccgaccaagggcatccagcagcattacaagcatgctgtcaggcagagttttcgggttcattcagatgaagacaaccctgagagaatccagcagattattaaaagagccattgaagatgctgactggatcatgaacaaattgagaatggtccctgtggaggaggccaccagccagctgcttccctcctccagaagctgaaagtataaaaaacaaaactgagagctccgagggtgagccttcctggcctctggaagttgagaggcccctcttctggagctcagcagcagcagctggtttggaagatccattggccttgttggctgaaagccagaaatcaggggagaagctgaccttgctccagaggctcctcttgccgcggccatgttgctagcatcctttatgtttgcacttccagccacttacgatgtgaaatttggggagaatgtagtatttttttgcttcttttgtgtgttttttatttttgtgtttttgttcttttacttttctctgaaagtgattcatttattctggagatctctttatcattctctgagtcccagagcagatgtcccctcaggtagcaacctgtacagaagaaagcacgtgggttttagaaccagacagatctggatttgaatcccagatgcaataagatgaaggtgaagtgcctcacacaggatgtggcacatgacagtgcctgaagggctcccttcaaggaagccgtcctgccccgccccctcctctgctcctgcagcgccctgcacagctctgctccccgcatgcaccgcatcgggtctcagttttttgtttgcgagcttgccctgtccctgcttgtagcccctgagccctcacagttgtcacacacccagcagtctgccaaggagctgcttttcctgactactgtctctccatgcctagggaagtcaaagccctgggccttgccttcagggagttgacagtgtccttgaagtggtgaagtgcccaccacatgaaccaaggagagacgccaaagcagctgccatggactctggcctgtccaagcctctgtgcacctgcagtctctttccactggcacttccctgctttgctaccatcgtggaagaatggaagggagggggagaaggtgggtgggctcagggagaacggccagagtggccagaagatgcagagagaagccccactgggatctgagtattccccaagggcactcagccacagggatgaactagtgtttgtttgtatccttgcagttatgtgacttaaagtgactcagagatatctatgtatgcgagtgtactccgctggcaatgaagtaaatatatcaatttgtggaaaaaaaaaaaaaaaaaaaaacaaagaaacaatacaaaaaaacaaagaaagacgaggggggggccgcgccactaaaaatatacccccggagggggccccaaatttgggcgcttacaccacattttttttgtcaccgaggggcgcccctaatggggagcacagttatataaagctgaggcagcggtgcaccccaccttttttacacacaacagtggagagccgttggaaacaaactgtcacagcgtgggaacaactcgttggggagagaagaaaaacccattaattacttggggggggggggggggcaaaacataattttgggggacaccaattatcaccttcaaacaggaaaatttttaagaggcccctctgaggagagaacaatatgaaaacttctaagaggaggtaatagcggtcgttaaccacacaggagtagtgttattctcttggttgtctatgagaaatttggggactaacggaatatattctttgaaaaattttccc

SEQ ID NO: 330507 - DNA, 1440 bp, Homo sapiens
cgctcagtccccggggagcgggcactcgtcgccgcggcggcgtccggggctggcgttaccctggaggctgggacagagggtctcacggatggccccgctgccaggagcagaactggttcggaggccactgcagctctaccgatacttgctgcgctgttgccagcagctgccgaccaagggcatccagcagcattacaagcatgctgtcaggcagagttttcgggttcattcagatgaagacaaccctgagagaatccagcagattattaaaagagccattgaagatgctgactggatcatgaacaaatataaaaaacaaaactgagagctccgagggtgagccttcctggcctctggaagttgagaggcccctcttctggagctcagcagcagcagctggtttggaagatccattggccttgttggctgaaagccagaaatcaggggagaagctgaccttgctccagaggctcctcttgccgcggccatgttgctagcatcctttatgtttgcacttccagccacttacgatgtgaaatttggggagaatgtagtatttttttgcttcttttgtgtgttttttatttttgtgtttttgttcttttacttttctctgaaagtgattcatttattctggagatctctttatcattctctgagtcccagagcagatgtcccctcaggtagcaacctgtacagaagaaagcacgtgggttttagaaccagacagatctggatttgaatcccagatgcaataagatgaaggtgaagtgcctcacacaggatgtggcacatgacagtgcctgaagggctcccttcaaggaagccgtcctgccccgccccctcctctgctcctgcagcgccctgcacagctctgctccccgcatgcaccgcatcgggtctcagttttttgtttgcgagcttgccctgtccctgcttgtagcccctgagccctcacagttgtcacacacccagcagtctgccaaggagctgcttttcctgactactgtctctccatgcctagggaagtcaaagccctgggccttgccttcagggagttgacagtgtccttgaagtggtgaagtgcccaccacatgaaccaaggagagacgccaaagcagctgccatggactctggcctgtccaagcctctgtgcacctgcagtctctttccactggcacttccctgctttgctaccatcgtggaagaatggaagggagggggagaaggtgggtgggctcagggagaacggccagagtggccagaagatgcagagagaagccccactgggatctgagtattccccaagggcactcagccacagggatgaactagtgtttgtttgtatccttgcagttatgtgacttaaagtgactcagagatatctatgtatgcgagtgtactccgctggcaatgaagtaaatatatcaatttgtggaa

SEQ ID NO: 330508 - DNA, 1336 bp, Homo sapiens
  misc_feature (1233)..(1233): n is a, c, g, or t
cgctcagtccccggggagcgggcactcgtcgccgcggcggcgtccggggctggcgttaccctggaggctgggacagagggtctcacggatggccccgctgccaggagcagaactggttcggaggccactgcagctctaccgatacttgctgcgctgttgccagcagctgccgaccaagggcatccagcagcattacaagcatgctgtcaggcagagttttcgggttcattcagatgaagacaaccctgagagaatccagcagattattaaaagagccattgaagatgctgactggatcatgaacaaatataaaaaacaaaactgagagctccgagggtgagccttcctggcctctggaagttgagaggcccctcttctggagctcagcagcagcagctggtttggaagatccattggccttgttggctgaaagccagaaatcaggggagaagctgaccttgctccagaggctcctcttgccgcggccatgttgctagcatcctttatgtttgcacttccagccacttacgatgtgaaatttggggagaatgtagtatttttttgcttcttttgtgtgttttttatttttgtgtttttgttcttttacttttctctgaaagtgattcatttattctggagatctctttatcattctctgagtcccagagcagatgtcccctcaggtagcaacctgtacagaagaaagcacgtgggttttagaaccagacagatctggatttgaatcccagatgcaataagatgaaggtgaagtgcctcacacaggatgtggcacatgacagtgcctgaagggctcccttcaaggaagccgtcctgccccgccccctcctctgctcctgcagcgccctgcacagctctgctccccgcatgcaccgcatcgggtctcagttttttgtttgcgagcttgccctgtccctgcttgtagcccctgagccctcacagttgtcacacacccagcagtctgccaaggagctgcttttcctgactactgtctctccatgcctagggaagtcaaagccctgggccttgccttcagggagttgacagtgtccttgaagtggtgaagtgcccaccacatgaaccaaggagagacgccaaagcagctgccatggactctggcctgtccaagcctctgtgcacctgcagtctctttccactggcacttccctgctttgctaccatcgtggaagaatggaagggagggggagaatgttncttatacccctggtctccttgccccttttcctctctttgccttctcttaaggccctctttaagccctaaataattctaattatctgagtgtcttgtcttttag

SEQ ID NO: 330509 - DNA, 1882 bp, Homo sapiens
cgctcagtccccggggagcgggcactcgtcgccgcggcggcgtccggggctggcgttaccctggaggctgggacagagggtctcacggatggccccgctgccaggagcagaactggttcggaggccactgcagctctaccgatacttgctgcgctgttgccagcagctgccgaccaagggcatccagcagcattacaagcatgctgtcaggcagagttttcgggttcattcagatgaagacaaccctgagagaatccagcagattattaaaagagccattgaagatgctgactggatcatgaacaaatataaaaaacaaaactgagagctccgagggtgagccttcctggcctctggaagttgagaggcccctcttctggagctcagcagcagcagctggtttggaagatccattggccttgttggctgaaagccagaaatcaggggagaagctgaccttgctccagaggctcctcttgccgcggccatgttgctagcatcctttatgtttgcacttccagccacttacgatgtgaaatttggggagaatgtagtatttttttgcttcttttgtgtgttttttatttttgtgtttttgttcttttacttttctctgaaagtgattcatttattctggagatctctttatcattctctgagtcccagagcagatgtcccctcaggtagcaacctgtacagaagaaagcacgtgggttttagaaccagacagatctggatttgaatcccagatgcaataagatgaaggtgaagtgcctcacacaggatgtggcacatgacagtgccctgcacagctctgctccccgcatgcaccgcatcgggtctcagttttttgtttgcgagcttgccctgtccctgcttgtagcccctgagccctcacagttgtcacacacccagcagtctgccaaggagctgcttttcctgactactgtctctccatgcctagggaagtcaaagccctgggccttgccttcagggagttgacagtgtccttgaagtggtgaagtgcccaccacatgaaccaaggagagacgccaaagcagctgccatggactctggcctgtccaagcctctgtgcacctgcagtctctttccactggcacttccctgctttgctaccatcgtggaagaatggaagggagggggagaaggtgggtgggctcagggagaacggccagagtggccagaagatgcagagagaagccccactgggatctgagtattccccaagggcactcagccacagggatgaactagtgtttgtttgtatccttgcagttatgtgacttaaagtgactcagagatatctatgtatgcgagtgtactccgctggcaatgaagtaaatatatcaatttgtggaaaaaaaaaaaaaaaaaaaaacaaagaaacaatacaaaaaaacaaagaaagacgaggggggggccgcgccactaaaaatatacccccggagggggccccaaatttgggcgcttacaccacattttttttgtcaccgaggggcgcccctaatggggagcacagttatataaagctgaggcagcggtgcaccccaccttttttacacacaacagtggagagccgttggaaacaaactgtcacagcgtgggaacaactcgttggggagagaagaaaaacccattaattacttggggggggggggggggcaaaacataattttgggggacaccaattatcaccttcaaacaggaaaatttttaagaggcccctctgaggagagaacaatatgaaaacttctaagaggaggtaatagcggtcgttaaccacacaggagtagtgttattctcttggttgtctatgagaaatttggggactaacggaatatattctttgaaaaattttccc

SEQ ID NO: 330510 - DNA, 414 bp, Homo sapiens
ctgggaattgggatttggggaagactgggcagctgagcttacagcactctggtgaccatgactcaacacccccacctccaacccctagaagggccatgaacctggcgatgatgccaacaccagggggaccacttctctggtagccttcaacccgatctcttccaaccagcaagaaacatcctccaaacacaaggcacgtgagatacctctttaaacaagccctcagtcctccggtctagtaatcgtgggatatatcccgagagtctggtcctgattttatgtgactccccagagaccttttgcttgttgggtccctcgccctgctctgaaggctggtttcatttctggtagttagaaaacgggcctacttaagaagagaaactaagcacccagctccaatgcccaggtaaggcc

SEQ ID NO: 330511 - DNA, 277 bp, Homo sapiens
catcctatttgacaccactgcttatttgtatcagaaaattggaatgtaccaaagggattcagaaatgagaaaatgcccagtaggtaggagaaattggagaaagtcccgagaaggaagcaataaatgagttcatgcttgaagggtgaaggggaagagtgagggatcatatattttgggtaaagaggaggaagcaaggacaagaatgtttgggaaggagagagtagttgagtttggctgcagcagaggagccaaagactggagaagtacatggggtgtg

SEQ ID NO: 330512 - DNA, 319 bp, Homo sapiens
ggtattgatgaagagggggaaaatgagaaagggatgaaaagataataatttgatgaaaagaaaaggatgaaaagaggaacaactataaaacaagggatggagataggaaagatagacaagtgattctaatatattggcatcaattgttggagacagtggatcatatgatacaagccatataaaggtaaaaagaccagctcctgatcccaaggtgctttgagtcttacgtgtacagcacacactatattatctttattaaatggtctacattctcatcttgagcatgaaattattctattttagtctgatcacaaaatcc

SEQ ID NO: 330513 - DNA, 523 bp, Homo sapiens
ccatagtttcccaaaacccataatttggcaattatacttctgtttgtattcaactcattgatttaaatgaccaatcagaactggttttgctttgctggtaaagaataggaaaagtatgaagcaaaatttcatggggctagtttaatatacattattttcttcttttataaatttggaaaaaatttgatgtagacactagaaatctataaaggaaataggatatttgatttctagttcctaaattgttatgctatctggcaagctataaaatctctgtgccttaccttcttaaccttcttaatttctaaaattaaaaggctgctatactatcatcttgaaggataagttggcaatgccacttaaaatgtaaaatgcatttacgcttccctatgtatcccaaagaaggccaatacttatgcacaaggaggtgtgtgcattccagcatcattggtaacagaaaaaaaattaaaacaagccaaatatccatttaaggagaaagtgaaaaaaatgatggcgcatccat

SEQ ID NO: 330514 - DNA, 210 bp, Homo sapiens
ttttaatcaaaacggtggcaggaatgtacttttaagaaatattctctgcaaaaaaaattctttccataatgttgcatacaccataggtcaaatcctgccattctccaatatcttatcaatatgccttaaaaattctgatctgctgggattagactgttaagtgagtgttggccctgtcattctagtgccaatatcaccaagaggtttgtg

SEQ ID NO: 330515 - DNA, 293 bp, Homo sapiens
ggatactcctggtacttttgttatgaaattcttatacattattttcagttactcatcagatagtttttcatcaattgcaaaattatattatccaaagctgaattgagatttgtgggaatcagaattttgatagagtgattaggaagatccctggtatacaaaagtgaaatgtatacctatcataatttattatataaagcatgtgtattgaatcatcaagaatagatggctcctactgggatcgattgtactttattatattttgccttttctataatttttagttgtgtcgt

SEQ ID NO: 330516 - DNA, 377 bp, Homo sapiens
ccattgaaagcttccatgtagagattttgtatgaacatggagattccaattataaacttatctgatccactattgtattggaaatcttcaagaacaccctcagatttgatgattcactaggaggactcagaaaactcagcacatagttgtactcatggccgtgctttatcacagcaaagggatataaagcaaaatcagcaaaggaaaaaggtacatggggcaatgtccagagaaaaccaggcgcaagtgtccaagtcttctcccagtggagtcacacaagacatacttacttcctccagcaatgaattaaaacaacatgtgtaaaatgctgtctccaaggttcttcttagggggtgatcacataagcaccctctgcc

SEQ ID NO: 330517 - DNA, 333 bp, Homo sapiens
tcccctttcaatttcttgagtcggcctgcaatcaaacctttgtaattaaaccctcaaagaacctgttgaaattattccagactagttattctaaaccagtttttactctccttttcaaatgtctagtatataatggattctcaatgaatgtgatagagatataacagtttagttcacatgcaaaatcatgagaaaacctatgaaaaacttaaggtctatacccaaagaatgctatatcaagtattatcccactcacaccaaatattcagctattaaatgattgatagtctgtgttaaggaagtttagaggctttttttcatattcactctaag

SEQ ID NO: 330518 - DNA, 2122 bp, Homo sapiens
ttttgtatttttagtagagatggggtttcaccatgttgggcaggctggtctgtgaactcctgaccttgtgatccgcccacctcggtctcccaaagtgctgggattacgagcgtgagccacggcgcccgaccccctaatcctgattttcgaagatatgacgcatgtatcctgcccccgcgagcgccgtcgcgccgtcgcgccacatacgtcacacgctcttcggaaagcgttgctgcgtaaatggcgggggcgtgtcttttggctcctccgcgtgtagttacctgagaaacgcgggaagttgggcccaggcagtgttgctgcggttgcctaagttgttttactatttctggagagagccgtgagcttgtccaggggccccaatcctgaggccgacccggtttctggcgcggtgcgatggaggtagtggaggccgccgccgctcagctggaaactctgaaattcaatggcaccgactttggagttggggaaggtccggcggctccgtctccgggctctgcccctgtgccagggacacagccgccgctacagtcgtttgaggggtccccggacgctgggcagaccgtggaggttaagcctgccggggagcagcctctgcagcccgttctgaacgccgtcgcggccgggaccccggcgccgcagccacagccaccggctgaatcgccggcctgcggagactgcgtcacctccccaggagccgcagagcctgcgcgggcgccggactccttggagacctcggactcggattcggactcggacagtgaaacagattcagatagttcaagttcatcgtcttcctcttcatcttcctcatcgtcgtcttcttcctcttgtatatcacttcctccagtgctgtcagatggagatgatgatttacaagttgagaaggaaaataagaattttcctcttaaaacaaaagatgaattacttcttaatgaactgccttctgttgaagaactcactattattctgcctgaagatattgagttaaagcctcttgggatggtttcaagtattattgaacaactagtaataattgaatctatgactaacctacctccagttaatgaggagactgtaatttttaaaagtgatcgacaagcagcaggaaagatattcgagatatttggacctgttgcacatccattttatgtgttacggtttaattcttcagatcacattgagagtaaaggtattaaaataaaggagactatgtattttgctccatcaatgaaagatttcactcaatatatattcacagaaaaactaaaacaggataagggatcagatgcatcatggaagaatgatcaggaaccaccaccagaggccttagattttagtgatgatgaaaaagagaaggaagccaaacagaggaaaaaatctcagattcaaggccggaaaaaactcaaatctgaatttaatgagcctggtgaagattttactgaagtacatcagaattggaatgctcatagctctgcttcagagcatgcaaaaggatatcgtaacagagaattcacacgaggattttccagggccagataccctcgatcttgccatggcaggcctccacctcagcatttctataactcagaacatatggtatctcaggagacttcaggatttccttctcagagacaaaataatcccattatgccacaatacccctttcctcttccagtgtttgacatgcataattttcccctccgccctccacccccaccaccacccccacctgtaaacatgggttgggctacaccaaacatggctgctcatccattacttaacttaccatactccctacccccaccccctccccctccaccactgcctcctccaccctcttctggagatagtaattctcattttggaccttactattaggtgactatgcatttccagagaaatgtggacttttcatattatgtggtaaggattttttttttttcaagagtgattatggagctagatttttaaaaacactgtaaaatactaaatgattccttctgttgtaagttgatatatatttgtaacctttgtgaaattgtattcatatgaaaatgtcagctcaaattcttgggagaacattaaattatgtaatatttaa

SEQ ID NO: 330519 - DNA, 1072 bp, Homo sapiens
actgaaagttctttatataattttactttagaaagtcatcaatttactgatactcttttttgctcaataagccttcacaaatgcttgaaaagtcaacagtgttgtaaattataaatgttaccttttcagagggccacttttgacatattagcttcttccatttttgcattgaaagttttaggcacccattttttgactggtatgtctataacctcatttttaataggatggatttttaatgttatgtggtactcttttgaatattttgcttaactgaataaccttgtagaccatacagatgttagaaaattaaaatataataatcttacaaaacagacaataattgctctttcatggatattccagaagtgtggttaggatcttgcatttctttaatgccatcgttacgagtatctgttatcacagaagcacagtaatttttttattgggatctagtatataatttctgtattaatgtgttgtctttttgattacatgcagttggacatttaaattgtcgttagccatttgtgtaactgtttagaacttgtgctcagtttccttactattcgtaggtaagaaaaatgaaaccagaaagaaagagacttgtctgaagtcatattagtggggaggagcagatctgaactggtaatagatacattccaaactgctgtgtttttagtatttgtggagacctgcatagcaacgttggaatctggtcgtttggactttctcattatttggtttctgaataatcatgtagcatattttctcaaagtgaaggatgaatgtatcatctaatgtaagctttttaaaattgtatttgcttggattatattgcctctcaataaagcttttgacttggaactgtgtagtgtgtgggaaataaatggtggagcttctttagtatgttgaattttagtagttcatttgcgaaatgctgtggtgtttggggatgtttatttccatgcaagcttttcatttgctaatgatgtgaatgaaatagttttcttcctttcctttcctactctttgttatgtgtagaagtattgaataaatgagtccagaaaaa

SEQ ID NO: 330520 - DNA, 569 bp, Homo sapiens
ccttgttactgctggatgagggtagaagttctgacatcccacgaggtcttatgcctggtagggacaggagtactttgtcactcctccccatatggtatgcactgacaccagtggaggatggccttgttatcactggttggggacaaaaatcctaactctactccatcttctctgacattgccccagtgtaaaagagggaagaacactgggttgccgccagtggaggtggaagttcaggttccccatgtgatgttcattgtttgcagggaggcttgttactggcaccctgttcagcctgttcctgatgctactgtggtggaagggttggagtacctcattactgcctgtcaaggatagaagtctaggatctgtactcagcctttgagagtgtgtagggatggtgccacattttcttctgtggtgtttggctagagtagaatggttatcatctaagtgttttctgacttgctgggttctctttctttggcattaagttttgtcttttcagttcatttcaaatttaccattttatgtcttacacttttttaactgccacaagatatactgga

SEQ ID NO: 330521 - DNA, 383 bp, Homo sapiens
tccccttttctaattgattctcttttccctgtctcttaaggtaggagggtcacagagttcatgcttgatccatttatgttttttatgtacacatttctcttccagacacttggactcagaaatgcacaaactccctgacatctttatttaaatgactaatagaccatggttgactgaaggtaactgaaaccacgaaaagtgacagcacagatgaggggagagtactgtatcctcaaatgatggtatggctggtgatggtaacagcaagtctaccagcctagtcaagcattcttatccatagaagagttgccatgggaacctcatggcaacccacagatttcaagtactgtatgttctgcctaaataaataatgaaaagctatc

SEQ ID NO: 330522 - DNA, 2964 bp, Homo sapiens
ttttgtatttttagtagagatggggtttcaccatgttgggcaggctggtctgtgaactcctgaccttgtgatccgcccacctcggtctcccaaagtgctgggattacgagcgtgagccacggcgcccgaccccctaatcctgattttcgaagatatgacgcatgtatcctgcccccgcgagcgccgtcgcgccgtcgcgccacatacgtcacacgctcttcggaaagcgttgctgcgtaaatggcgggggcgtgtcttttggctcctccgcgtgtagttacctgagaaacgcgggaagttgggcccaggcagtgttgctgcggttgcctaagttgttttactatttctggagagagccgtgagcttgtccaggggccccaatcctgaggccgacccggtttctggcgcggtgcgatggaggtagtggaggccgccgccgctcagctggaaactctgaaattcaatggcaccgactttggagttggggaaggtccggcggctccgtctccgggctctgcccctgtgccagggacacagccgccgctacagtcgtttgaggggtccccggacgctgggcagaccgtggaggttaagcctgccggggagcagcctctgcagcccgttctgaacgccgtcgcggccgggaccccggcgccgcagccacagccaccggctgaatcgccggcctgcggagactgcgtcacctccccaggagccgcagagcctgcgcgggcgccggactccttggagacctcggactcggattcggactcggacagtgaaacagattcagatagttcaagttcatcgtcttcctcttcatcttcctcatcgtcgtcttcttcctcttgtatatcacttcctccagtgctgtcagatggagatgatgatttacaagttgagaaggaaaataagaattttcctcttaaaacaaaagatgaattacttcttaatgaactgccttctgttgaagaactcactattattctgcctgaagatattgagttaaagcctcttgggatggtttcaagtattattgaacaactagtaataattgaatctatgactaacctacctccagttaatgaggagactgtaatttttaaaagtgatcgacaagcagcaggaaagatattcgagatatttggacctgttgcacatccattttatgtgttacggtttaattcttcagatcacattgagagtaaaggtattaaaataaaggagactatgtattttgctccatcaatgaaagatttcactcaatatatattcacagaaaaactaaaacaggataagggatcagatgcatcatggaagaatgatcaggaaccaccaccagaggccttagattttagtgatgatgaaaaagagaaggaagccaaacagaggaaaaaatctcagattcaaggccggaaaaaactcaaatctgaatttaatgagcctggtgaagattttactgaagtacatcagaattggaatgctcatagctctgcttcagagcatgcaaaaggatatcgtaacagagaattcacacgaggattttccagggccagataccctcgatcttgccatggcaggcctccacctcagcatttctataactcagaacatatggtatctcaggagacttcaggatttccttctcagagacaaaataatcccattatgccacaatacccctttcctcttccagtgtttgacatgcataattttcccctccgccctccacccccaccaccacccccacctgtaaacatgggttgggctacaccaaacatggctgctcatccattacttaacttaccatactccctacccccaccccctccccctccaccactgcctcctccaccctcttctggagatagtaattctcattttggaccttactattaggtgactatgcatttccagagaaatgtggacttttcatattatgtggtaaggattttttttttttcaagagtgattatggagctagatttttaaaaacactgtaaaatactaaatgattccttctgttgtaagttgatatatatttgtaacctttgtgaaattgtattcatatgaaaatgtcagctcaaattcttgggagaacattaaattatgtaatatttaattaaaattttgaattcatgccttctccctcccaaccccacccagttaaactatatatatatatatatagtaatggatatgggacaagtttcatcatgggtaaaatatatggagcacattgattttcttgctataatctgaatataagatgaagtcctttgagagtctttaaactatttttataaatttatactttggaaatcaattttaattataaatgtaatttgtgagtaagtttaaatgaccataatttttctttttaaagcagttgagggatatagaggagaaaattcttatatattggtagaagctctgattatagctaaagtaaaaaatatttattatgcataggcaagcttccattatctgtgcaaaataattcctttatttgggcactgttcagaaggctttactatttaacctcctaaaagggatgcaaagattattcacaataagatctatttagggattttgtcttccatatttgttttccagatcctcacatgcagactaggttccataaataacaaatagttattgaatatctgaattaagagtttttaattaaatgagtaatgactactgctttatattatgaagtgtcaatgtaagggaaattatgagttttagaactagaagagaccattgaaatactccagttttcatttagtaaatgaggagcctaagtgttccaaagaggttaaaataatttaactaagatcactcagctagtgagttgacaaggagttgaacctagttcttctggttttcttattagcagtttccactaagtagatgtttcccaatcttacattcctttacacacttaggaaacagtatttg

SEQ ID NO: 330523 - DNA, 1565 bp, Homo sapiens
ttttgtatttttagtagagatggggtttcaccatgttgggcaggctggtctgtgaactcctgaccttgtgatccgcccacctcggtctcccaaagtgctgggattacgagcgtgagccacggcgcccgaccccctaatcctgattttcgaagatatgacgcatgtatcctgcccccgcgagcgccgtcgcgccgtcgcgccacatacgtcacacgctcttcggaaagcgttgctgcgtaaatggcgggggcgtgtcttttggctcctccgcgtgtagttacctgagaaacgcgggaagttgggcccaggcagtgttgctgcggttgcctaagttgttttactatttctggagagagccgtgagcttgtccaggggccccaatcctgaggccgacccggtttctggcgcggtgcgatggaggtagtggaggccgccgccgctcagctggaaactctgaaattcaatggcaccgactttggagttggggaaggtccggcggctccgtctccgggctctgcccctgtgccagggacacagccgccgctacagtcgtttgaggggtccccggacgctgggcagaccgtggaggttaagcctgccggggagcagcctctgcagcccgttctgaacgccgtcgcggccgggaccccggcgccgcagccacagccaccggctgaatcgccggcctgcggagactgcgtcacctccccaggagccgcagagcctgcgcgggcgccggactccttggagacctcggactcggattcggactcggacagtgaaacagattcagatagttcaagttcatcgtcttcctcttcatcttcctcatcgtcgtcttcttcctcttgtatatcacttcctccagtgctgtcagatggagatgatgatttacaagttgagaaggaaaataagaattttcctcttaaaacaaaagatgaattacttcttaatgaactgccttctgttgaagaactcactattattctgcctgaagatattgagttaaagcctcttgggatggtttcaagtattattgaacaactagtaataattgaatctatgactaacctacctccagttaatgaggagactgtaatttttaaaagtgatcgacaagcagcaggaaagatattcgagatatttggacctgttgcacatccattttatgtgttacggtttaattcttcagatcacattgagagtaaaggtattaaaataaaggagactatgtattttgctccatcaatgaaagatttcactcaatatatattcacagaaaaactaaaacaggataagggatcagatgcatcatggaagaatgatcaggaaccaccaccagagaccatggttgactgaaggtaactgaaaccacgaaaagtgacagcacagatgaggggagagtactgtatcctcaaatgatggtatggctggtgatggtaacagcaagtctaccagcctagtcaagcattcttatccatagaagagttgccatgggaacctcatggcaacccacagatttcaagtactgtatgttctgcctaaataaataatgaaaagctatc

SEQ ID NO: 330524 - DNA, 395 bp, Homo sapiens
tgtggtggaagggttggagtacctcattactgcctgtcaaggatagaagtctaggatctgtactcagcctttgagagtgtgtagggatggtgccacattttcttctgtggtgtttggctagagtagaatggttatcatctaagtgttttctgacttgctgggttctctttctttggcattaagttttgtcttttcagttcatttcaaatttaccattttatgtcttacacttttttaactgccacaagatatactggataataaaaatcataattgaaatttcaaacaatgctttttgatatattaaacttattttcctttttatgttttccctcccctcactcaaaggtgaagattttactgaagtacatcagaattggaatgctcatagctct

SEQ ID NO: 330525 - DNA, 202 bp, Homo sapiens
gactatgcatttccagagaaatgtggacttttcatattatgtggtaaggattttttttttttcaagagtgattatggagctagatttttaaaaacactgtaaaatactaaatgattccttctgttgtaagttgatatatatttgtaacctttgtgaaattgtattcatatgaaaatgtcagctcaaattcttgggagaacat

SEQ ID NO: 330526 - DNA, 1555 bp, Homo sapiens
ttttgtatttttagtagagatggggtttcaccatgttgggcaggctggtctgtgaactcctgaccttgtgatccgcccacctcggtctcccaaagtgctgggattacgagcgtgagccacggcgcccgaccccctaatcctgattttcgaagatatgacgcatgtatcctgcccccgcgagcgccgtcgcgccgtcgcgccacatacgtcacacgctcttcggaaagcgttgctgcgtaaatggcgggggcgtgtcttttggctcctccgcgtgtagttacctgagaaacgcgggaagttgggcccaggcagtgttgctgcggttgcctaagttgttttactatttctggagagagccgtgagcttgtccaggggccccaatcctgaggccgacccggtttctggcgcggtgcgatggaggtagtggaggccgccgccgctcagctggaaactctgaaattcaatggcaccgactttggagttggggaaggtccggcggctccgtctccgggctctgcccctgtgccagggacacagccgccgctacagtcgtttgaggggtccccggacgctgggcagaccgtggaggttaagcctgccggggagcagcctctgcagcccgttctgaacgccgtcgcggccgggaccccggcgccgcagccacagccaccggctgaatcgccggcctgcggagactgcgtcacctccccaggagccgcagagcctgcgcgggcgccggactccttggagacctcggactcggattcggactcggacagtgaaacagattcagatagttcaagttcatcgtcttcctcttcatcttcctcatcgtcgtcttcttcctcttgtatatcacttcctccagtgctgtcagatggagatgatgatttacaagttgagaaggaaaataagaattttcctcttaaaacaaaagatgaattacttcttaatctatagagaaaaaaaaaaattcagtcatggctctcagtactccagggattggatcctactttccaaccatatctgaaaagtgaaggctcacctaatagcatcaggtaagaaaaatgaaaccagaaagaaagagacttgtctgaagtcatattagtggggaggagcagatctgaactggtaatagatacattccaaactgctgtgtttttagtatttgtggagacctgcatagcaacgttggaatctggtcgtttggactttctcattatttggtttctgaataatcatgtagcatattttctcaaagtgaaggatgaatgtatcatctaatgtaagctttttaaaattgtatttgcttggattatattgcctctcaataaagcttttgacttggaactgtgtagtgtgtgggaaataaatggtggagcttctttagtatgttgaattttagtagttcatttgcgaaatgctgtggtgtttggggatgtttatttccatgcaagcttttcatttgctaatgatgtgaatgaaatagttttcttcctttcctttcctactctttgttatgtgtagaagtattgaataaatgagtccagaaaaa

SEQ ID NO: 330527 - DNA, 2821 bp, Homo sapiens
ttttgtatttttagtagagatggggtttcaccatgttgggcaggctggtctgtgaactcctgaccttgtgatccgcccacctcggtctcccaaagtgctgggattacgagcgtgagccacggcgcccgaccccctaatcctgattttcgaagatatgacgcatgtatcctgcccccgcgagcgccgtcgcgccgtcgcgccacatacgtcacacgctcttcggaaagcgttgctgcgtaaatggcgggggcgtgtcttttggctcctccgcgtgtagttacctgagaaacgcgggaagttgggcccaggcagtgttgctgcggttgcctaagttgttttactatttctggagagagccgtgagcttgtccaggggccccaatcctgaggccgacccggtttctggcgcggtgcgatggaggtagtggaggccgccgccgctcagctggaaactctgaaattcaatggcaccgactttggagttggggaaggtccggcggctccgtctccgggctctgcccctgtgccagggacacagccgccgctacagtcgtttgaggggtccccggacgctgggcagaccgtggaggttaagcctgccggggagcagcctctgcagcccgttctgaacgccgtcgcggccgggaccccggcgccgcagccacagccaccggctgaatcgccggcctgcggagactgcgtcacctccccaggagccgcagagcctgcgcgggcgccggactccttggagacctcggactcggattcggactcggacagtgaaacagattcagatagttcaagttcatcgtcttcctcttcatcttcctcatcgtcgtcttcttcctcttgtatatcacttcctccagtgctgtcagatggagatgatgatttacaagttgagaaggaaaataagaattttcctcttaaaacaaaagatgaattacttcttaatgaactgccttctgttgaagaactcactattattctgcctgaagatattgagttaaagcctcttgggatggtttcaagtattattgaacaactagtaataattgaatctatgactaacctacctccagttaatgaggagactgtaatttttaaaagtgatcgacaagcagcaggaaagatattcgagatatttggacctgttgcacatccattttatgtgttacggtttaattcttcagatcacattgagagtaaaggtattaaaataaaggagactatgtattttgctccatcaatgaaagatttcactcaatatatattcacagaaaaactaaaacaggataagggatcagatgcatcatggaagaatgatcaggaaccaccaccagaggccttagattttagtgatgatgaaaaagagaaggaagccaaacagaggaaaaaatctcagattcaaggccggaaaaaactcaaatctgaatttaatgagcctggtgaagattttactgaagtacatcagaattggaatgctcatagctctgcttcagagcatgcaaaaggatatcgtaacagagaattcacacgaggattttccagggccagataccctcgatcttgccatggcaggcctccacctcagcatttctataactcagaacatatggtatctcaggagacttcaggatttccttctcagagacaaaataatcccattatgccacaatacccctttcctcttccagtgtttgacatgcataattttcccctccgccctccacccccaccaccacccccacctgtaaacatgggttgggctacaccaaacatggctgctcatccattacttaacttaccatactccctacccccaccccctccccctccaccactgcctcctccaccctcttctggagatagtaattctcattttggaccttactattaggtgactatgcatttccagagaaatgtggacttttcatattatgtggtacaggtatatctcacagatattgtggcctcggatccagaccattgcagtcaagtgagtcacacaaactttttggtttccaaatgcatataaaagttacgtttacatgctactttagtttattaagtatgcaatagcattgtgtctaaaaaaaccaatgtgcatatctcaattggagaatactttactgttcaaaaaataataatgaccctttgagcctgcagtgagttacagtcttttagctgttggaaggtctggactcaagtgctgttggccgctgactaatcagggtagttgttgctaaaagtggcagtttctcctaatagatagcagtgaagtgtgctacattaattggctcttcctttcaccaaagatttctgtgtagcatgtgatgctacttgatagcattttattctctgtaaaactttgaaatttgggatcaagtcctctcaaaccctgccactgccttatcaactaagaaggtagcattctaagtcctttgttatcatttcaacagtgttcatagcgtcttcaccatgagtagcttttacttgagaaacctcatttttgcttatgcataagaagtaactcctcatctgttcaagttttttcgtgagattgcagcaattcagtcacatctttaggttccacttctaattctagttctcttcctatttctaccacatattcagttatttcctccagtgaagtcttaaacacctcaaaattattaatgagggttggaatcaaattatcaaacatccatgcttcaattctgcgtatcttgcaaaaaaaatatcaaaataataaagttaattaatgaaatattaaaatggatgaaataatttaaagcggtttaaagattctctttcgcaac

SEQ ID NO: 330528 - DNA, 420 bp, Homo sapiens
ttcacttcttcacactgtttctaccactggaaagtgggacagattgaatctgcctaaactgctagcagaatgaaatacgaccatgaatataaaaagaagtttccaaattctaaagaaacaaatgcctgtaagactattctagtgaacaatgaatatttcacttattttcaaaaaaagtattgtagtgcagtgacagccaccatcatagccatcgtgcaaatccttcaacatcatgatgtgcacagttgaacaaagcatgagaaatatagttctttcacggacttatgctaaaagtaaaatatagaaatactacgtggctgggcgtggcggcttatgcctgtaatccaaggagcacaagacaggaggatcactagagtccaggagttcgagaccagcctgaacaacataggaaaaccgtgt

SEQ ID NO: 330529 - DNA, 275 bp, Homo sapiens
tagaggcgaggtttcaccatgttggccaggctggtcttgaactcctgacctcaagtaatccgcccacatcagcctcccaaagtgctgggattacagatgtgagccaccgcgcccggccttatctgttctttagttggacaaccagagccactttcatgatggctaaaatttgaatatgattttatgagaattggcatgcattctttttaaactttagcgacttggaatgctttattataatctaagcacataaatggggtgtggaaaatggtcga

SEQ ID NO: 330530 - DNA, 2031 bp, Homo sapiens
gccgtcagctgatagtgggaagccagtcaagtgccgcgaaagcaggaggcggggccgcggccaacgtcattcccgcggccgcacgtcaccgccacttgccgcatccgcaagatctctctggaccagctcgggtgcagggcctctgcgggagccctcctagacctctgcggcttctcctctaacatggccgactcggaaaaccaggggcctgcggagcctagccaggcggcggcagcggcggaggcagcggcagaggaggtaatggcggaaggcggtgcgcagggtggagactgtgacagcgcggctggtgaccctgacagcgcggctggtcagatggctgaggagccccagacccctgcagagaatgccccaaagccgaaaaatgactttatcgagagcctgcctaattcggtgaaatgccgagtcctggccctcaaaaagctgcagaagcgatgcgataagatagaagccaaatttgataaggaatttcaggctctggaaaaaaagtataatgacatctataagcccctactcgccaagatccaagagctcaccggcgagatggaggggtgtgcatggaccttggagggggaggaggaggaggaagaggagtacgaggatgacgaggaggagggggaagacgaggaggaggaggaggctgcggcagaggctgccgcgggggccaaacatgacgatgcccacgccgagatgcctgatgacgccaagaagtaaggggggcagagatggatgaagagaaagcccacgaagaaaaaagcctggttttgtttttcccagaatatcgatggacttaaaaaggctcaggtttttgaccaaaatacaatgtgaatttattctgacattcctaaaatagattaaattaaagcaattagatcctggccagctcgattcaaatttgactttcattttgaacataataaatatatcaaaaggtgttaaagaaaactgaattaaacccaaaattatgttttcatggtctcttctctgaggattgaggtttacaaagggtgttagcagatgcgaagtaaagaacgtcactttgaaacccattcatcacacagcatacgctacacatggaacacccaagccatgactgaacacgttctcagtgcttaattcttaaatttctttactcatgacatttcgcagtgcagagaaggcagaacccaagaaaaacgtcatctttgagactttgcttttgtaacgcagacatcagctttacacttcacaggagattgatggcattgaggaagattgcaatggagatcatgacactactgttaataaggccaggaaaactgccatttcaagttctgaaaaatgttttgagtatttgaatttagagaaacaacatggttccaagaaggagggtgtaaaacctgtaaaatactgtcaacatatgtattcattagttacaatctcatgtttgtgttttcttagtactgtctatttacaaacacgtaaaaaataccccaaatatgtttaagtattaaatcactttacctagcgttttagaaatattaatttacttgaagagatgtagaatgtagcaaattatgtaaagcatgtgtatccagcgttatgtactttgcgccttgtgacgtctttctgtcatgtagcttttagggtgtagctgtgaaaatcatcagaactcttcactgaagctaatgtttggaaaaaatatatacttgaagaaccaatccaagtgtgtgcccctacccccagctcagaagtagaaagggtttaagtttgcttgtattagctgtgccttcattattttgctatgtaaatgtgacatattaattataaaatggtgcataatcaaattttactgcttgaggacagatgcatacagtaaggatttttaggaagaatatatttaatgtaaagactcttagcttctgtgtgggttttgaattatgtgtgagccagtgatctataaagaaacataagcttaaagttgtttatcactgtggtgttaataaaacagtattttcaaaaaatataaaaaaa

SEQ ID NO: 330531 - DNA, 2024 bp, Homo sapiens
gccgtcagctgatagtgggaagccagtcaagtgccgcgaaagcaggaggcggggccgcggccaacgtcattcccgcggccgcacgtcaccgccacttgccgcatccgcaagatctctctggaccagctcgggtgcagggcctctgcgggagccctcctagacctctgcggcttctcctctaacatggccgactcggaaaaccaggggcctgcggagcctagccaggcggcggcagcggcggaggcagcggcagaggaggtaatggcggaaggcggtgcgcagggtggagactgtgacagcgcggctggtgaccctgacagcgcggctggtcagatggctgaggagccccagacccctgcagagaatgccccaaagccgaaaaatgactttatcgagagcctgcctaattcggtgaaatgccgagtcctggccctcaaaaagctgcagaagcgatgcgataagatagaagccaaatttgataaggaatttcaggctctggaaaaaaagtataatgacatctataagcccctactcgccaagatccaagagctcaccggcgagatggaggggtgtgcatggaccttggagggggaggaggaggaggaagaggagtacgaggatgacgaggaggagggggaagacgaggaggaggaggaggctgcggcagaggctgccgcgggggccaaacatgacgatgcccacgccgagatgcctgatgacgccaagaagtaaggggggcagagatggatgaagagaaagcccacgaagaaaaaagcctggttttgtttttcccagaatatcgatggacttaaaaaggctcaggtttttgaccaaaatacaatgtgaatttattctgacattcctaaaatagattaaattaaagcaattagatcctggccagctcgattcaaatttgactttcattttgaacataataaatatatcaaaaggtgttaaagaaaactgaattaaacccaaaattatgttttcatggtctcttctctgaggattgaggtttacaaagggtgttagcagatgcgaagtaaagaacgtcactttgaaacccattcatcacacagcatacgctacacatggaacacccaagccatgactgaacacgttctcagtgcttaattcttaaatttctttactcatgacatttcgcagtgcagagaaggcagaacccaagaaaaacgtcatctttgagactttgcttttgtaacgcagacatcagctttacacttcacaggagattgatggcattgaggaagattgcaatggagatcatgacactactgttaataaggccaggaaaactgccatttcaagttctgaaaaatgttttgagtatttgaatttagagaaacaacatggttccaagaaggagggtgtaaaacctgtaaaatactgtcaacatatgtattcattagttacaatctcatgtttgtgttttcttagtactgtctatttacaaacacgtaaaaaataccccaaatatgtttaagtattaaatcactttacctagcgttttagaaatattaatttacttgaagagatgtagaatgtagcaaattatgtaaagcatgtgtatccagcgttatgtactttgcgccttgtgacgtctttctgtcatgtagcttttagggtgtagctgtgaaaatcatcagaactcttcactgaagctaatgtttggaaaaaatatatacttgaagaaccaatccaagtgtgtgcccctacccccagctcagaagtagaaagggtttaagtttgcttgtattagctgtgccttcattattttgctatgtaaatgtgacatattaattataaaatggtgcataatcaaattttactgcttgaggacagatgcatacagtaaggatttttaggaagaatatatttaatgtaaagactcttagctttcgtatggcatccgaatggtgtgagacccagtgtcctttaaattcaccttaagccatggtagggtgtgtgtatggggttctttgggcagtcctttcacaatatac

SEQ ID NO: 330532 - DNA, 1918 bp, Homo sapiens
gccgtcagctgatagtgggaagccagtcaagtgccgcgaaagcaggaggcggggccgcggccaacgtcattcccgcggccgcacgtcaccgccacttgccgcatccgcaagatctctctggaccagctcgggtgcagggcctctgcgggagccctcctagacctctgcggcttctcctctaacatggccgactcggaaaaccaggggcctgcggagcctagccaggcggcggcagcggcggaggcagcggcagaggaggtaatggcggaaggcggtgcgcagggtggagactgtgacagcgcggctggtgaccctgacagcgcggctggtcagatggctgaggagccccagacccctgcagagaatgccccaaagccgaaaaatgaaaaaaaagtataatgacatctataagcccctactcgccaagatccaagagctcaccggcgagatggaggggtgtgcatggaccttggagggggaggaggaggaggaagaggagtacgaggatgacgaggaggagggggaagacgaggaggaggaggaggctgcggcagaggctgccgcgggggccaaacatgacgatgcccacgccgagatgcctgatgacgccaagaagtaaggggggcagagatggatgaagagaaagcccacgaagaaaaaagcctggttttgtttttcccagaatatcgatggacttaaaaaggctcaggtttttgaccaaaatacaatgtgaatttattctgacattcctaaaatagattaaattaaagcaattagatcctggccagctcgattcaaatttgactttcattttgaacataataaatatatcaaaaggtgttaaagaaaactgaattaaacccaaaattatgttttcatggtctcttctctgaggattgaggtttacaaagggtgttagcagatgcgaagtaaagaacgtcactttgaaacccattcatcacacagcatacgctacacatggaacacccaagccatgactgaacacgttctcagtgcttaattcttaaatttctttactcatgacatttcgcagtgcagagaaggcagaacccaagaaaaacgtcatctttgagactttgcttttgtaacgcagacatcagctttacacttcacaggagattgatggcattgaggaagattgcaatggagatcatgacactactgttaataaggccaggaaaactgccatttcaagttctgaaaaatgttttgagtatttgaatttagagaaacaacatggttccaagaaggagggtgtaaaacctgtaaaatactgtcaacatatgtattcattagttacaatctcatgtttgtgttttcttagtactgtctatttacaaacacgtaaaaaataccccaaatatgtttaagtattaaatcactttacctagcgttttagaaatattaatttacttgaagagatgtagaatgtagcaaattatgtaaagcatgtgtatccagcgttatgtactttgcgccttgtgacgtctttctgtcatgtagcttttagggtgtagctgtgaaaatcatcagaactcttcactgaagctaatgtttggaaaaaatatatacttgaagaaccaatccaagtgtgtgcccctacccccagctcagaagtagaaagggtttaagtttgcttgtattagctgtgccttcattattttgctatgtaaatgtgacatattaattataaaatggtgcataatcaaattttactgcttgaggacagatgcatacagtaaggatttttaggaagaatatatttaatgtaaagactcttagcttctgtgtgggttttgaattatgtgtgagccagtgatctataaagaaacataagcttaaagttgtttatcactgtggtgttaataaaacagtattttcaaaaaatataaaaaaa

SEQ ID NO: 330533 - DNA, 1091 bp, Homo sapiens
tagtgatgttcagcattttttcatttacttattggccattcaaaattcatttcaataaatcaaaattatttttaaaccttctggggaaataggagcttgagaatagggtccagttgagttataaatgaattaaaaaacactgtagacatgtggctgcatgagccatatactttatgctggatagatatacatttgttgaaacatctgttgagtgactgtaagttgtaggctttatattttagaaacacagtgagtgaggaaggctgataagtaaatggacaagcaatataaaaaaggctgagaagcaagtctctgcataatgacagggaagttaagtctaaatctgaccctaaagggctgggacactggacagtggaagcagaagaaaaggtcaggaaacaaactatgaagaagacaatatctgacgtggatatcaaaggatgagaaaatattggatgcctgctggagaaagttgccaaataagaggcgagtattctagcaaaggaatccatctgcaacagcaaaagtctggtgacttgaaggaatgtgtcaggcactgggtactaagacagtatcaacagcaatgaagagaacaggaaagattcaagagataattagaaggtggaacaggctaggatagcaattaaatgaatgtagagcacttgggagaagtcaggatgactcctggattttggctttgaaatcctgagtgagtggtggctccattaataagataaagacaattagagaagaaatcattttctagatgtgttgagtttgaggttcttatgacacacataacatgaaatatctgaaatactgacttggagctcaggcaagaggtctgagttagatttaaagtttagattgactcatgggtagtagttgaagctctgggtggggatgagtttgcttaggaagaatgtataaaagaagagacaataattaaaatcctttaaaaaagcacttgaagggcaggccatgcaaagaagaataacagtggcctgagagggagaaaaacaaggaagccaggggaggagtgaggctggataagctgggaaaagtcaaaagtgtgggttgcaacacaagaa

SEQ ID NO: 330534 - DNA, 98 bp, Homo sapiens
ctttggtgaggctcgataaaaatattgtgatggatagggcacaggtagtgcctgaatgtatttcagatagttgggccaacaaccaatctatgcttaaa

SEQ ID NO: 330535 - DNA, 372 bp, Homo sapiens
gtgggcggattatatgaggtcaggagttcaagaccagcctggccaaaatggagaaaccctgtctctactaaaaatacaaaaattaggtgggtgtggtgtcacatgctggtagtcccagctactcgggaggctgacgcaggagaaccgcttgaacccaggagacagaggttgctgtgagccgaaatagtgctactgcagtcgagcttgggcgacagagtgagaatccatcttaaaaaaaaaaaaaaggaagtggagaaggtatggaattgagggaaaggacacagatgaaattctaaaaaggaggaagcctgcttcttctcatgagatacggaaaaaataataagtaaatcaagtttctacacagaatataat

SEQ ID NO: 330536 - DNA, 2297 bp, Homo sapiens
ggcacgaggatttctggcgctggcgcggctccaagaaggcatccgcatttgctaccagcggcggccgcggcggagccaggccggtcctcagcgcccagcaccgccgctcccggcaacccggagcgcgcaccgcaggccggcggccgagctcgcgcatcccagccatcactcttccacctgctccttagagaagggaagatgagtgagtcgagctcgaagtccagccagcccttggcctccaagcaggaaaaggacggcactgagaagcggggccggggcaggccgcgcaagcagcctccggtgagtcccgggacagcgctggtagggagtcagaaggagcccagcgaagtgccaacacctaagagacctcggggccgaccaaagggaagcaaaaacaagggtgctgccaagacccggaaaaccaccacaactccaggaaggaaaccaaggggcagacccaaaaaactggagaaggaggaagaggagggcatctcgcaggagtcctcggaggaggagcagtgacccatgcgtgccgcctgctcctcactggaggagcagcttccttctgggactggacagctttgctccgctcccaccgcccccgccccttccccaggcccaccatcaccaccgcctctggccgccacccccatcttccacctgtgccctcaccaccacactacacagcacaccagccgctgcagggctcccatgggctgagtggggagcagttttcccctggcctcagttcccagctccccccgcccacccacgcatacacacatgccctcctggacaaggctaacatcccacttagccgcaccctgcacctgctgcgtccccactcccttggtggtggggacattgctctctgggcttttggtttgggggcgccctctctgctccttcactgttccccacaacaagtctgacctcgtcttctacttctggaagtagtgataaggtctatgcccaccagatggttcgtacagattcccgggaacagaagcttgatgcatttctgcagcctctgagcaaacccctgtccagtcagccccaggccattgtcacagaggataagacagatatttctagtggcagggctaggcagcaagatgaggagatgcttgaactcccagcccctgctgaagtggctgccaaaaatcagagcttggagggggatacaacaaaggggacttcagaaatgtcagagaagagaggacctacttccagcaaccccagaaagagacatcgggaagattctgatgtggaaatggtggaagatgattcccgaaaggaaatgactgcagcttgtaccccccggagaaggatcattaacctcactagtgttttgagtctccaggaagaaattaatgagcagggacatgaggttctccgggagatgttgcataaccactccttcgtgggctgtgtgaatcctcagtgggccttggcacagcatcaaaccaagttataccttctcaacaccaccaagcttagtgaagaactgttctaccagatactcatttatgattttgccaattttggtgttctcaggttatcggagccagcaccgctctttgaccttgccatgcttgccttagatagtccagagagtggctggacagaggaagatggtcccaaagaaggacttgctgaatacattgttgagtttctgaagaagaaggctgagatgcttgcagactatttctctttggaaattgatgaggaagggaacctgattggattaccccttctgattgacaactatgtgccccctttggagggactgcctatcttcattcttcgactagccactgaggtgaattgggacgaagaaaaggaatgttttgaaagcctcagtaaagaatgcgctatgttctattccatccggaagcagtacatatctgaggagtcgaccctctcaggccagcagagtgaagtgcctggctccattccaaactcctggaagtggactgtggaacacattgtctataaagccttgcgctcacacattctgcctcctaaacatttcacagaagatggaaatatcctgcagcttgctaacctgcctgatctatacaaagtctttgagaggtgttaaatatggttatttatgcactgtgggatgtgttcttctttctctgtattccgatacaaagtgttgtatcaaagtgtgatatacaaagtgtaccaacataagtgttggtagcacttaagacttatacttgccttctgatagtattcctttatacacagtggattgattataaataaatagatgtgtcttaacataa

SEQ ID NO: 330537 - DNA, 952 bp, Homo sapiens
  misc_feature (58)..(58): n is a, c, g, or t
  misc_feature (60)..(60): n is a, c, g, or t
aagcccaaattttttcgagccttgggtattcacgtggtaatccagtattttttgccanangcctatcccgttaaatgctacccatcagggtttttacaccacagttttcgacttaactgccagtgactctcttaataaccaccgctaccaggagccagcaccgctctttgaccttgccatgcttgccttagatagtccagagagtggctggacagaggaagatggtcccaaagaaggacttgctgaatacattgttgagtttctgaagaagaaggctgagatgcttgcagactatttctctttggaaattgatgaggaagggaacctgattggattaccccttctgattgacaactatgtgccccctttggagggactgcctatcttcattcttcgactagccactgaggtgaattgggacgaagaaaaggaatgttttgaaagcctcagtaaagaatgcgctatgttctattccatccggaagcagtacatatctgaggagtcgaccctctcaggccagcagagtgaagtgcctggctccattccaaactcctggaagtggactgtggaacacattgtctataaagccttgcgctcacacattctgcctcctaaacatttcacagaagatggaaatatcctgcagcttgctaacctgcctgatctatacaaagtctttgagaggtgttaaatatggttatttatgcactgtgggatgtgttcttctttctctgtattccgatacaaagtgttgtatcaaagtgtgatatacaaagtgtaccaacataagtgttggtagcacttaagacttatacttgccttctgatagtattcctttatacacagtggattgattataaataaatagatgtgtcttaacataaaagatgcagacaagccccggctttctcttctcttctatttcaaatactctaaatatagagactcttac

SEQ ID NO: 330538 - DNA, 791 bp, Homo sapiens
  misc_feature (23)..(23): n is a, c, g, or t
  misc_feature (690)..(690): n is a, c, g, or t
  misc_feature (692)..(692): n is a, c, g, or t
  misc_feature (695)..(695): n is a, c, g, or t
  misc_feature (697)..(698): n is a, c, g, or t
  misc_feature (702)..(702): n is a, c, g, or t
  misc_feature (707)..(707): n is a, c, g, or t
taggtaggtacgaggctgggtgntgcgggttccctgacgagcggagtcaggccttctccttttccgcagaccgtgtgtttctttaccgctctcccccgagaccttttaagggttgtttggagttttagatgcaaaatccacaagtattcaagtgattgttaaagagggaggcctgaagttgattcagatccaagacaatggcaccgggatcaggaaagaagatctggatattgtatgtgaaaggttcactactagtaaactgcagtcctttgaggatttagccagtatttctacctatggctttcgaggtgaggctttggccagcataagccatgtggctcatgttactattacaacgaaaacagctgatggaaagtgtgcatacagagcaagttactcagatggaaaactgaaagcccctcctaaaccatgtgctggcaatcaagggacccagatcacggtggaggaccttttttacaacatagccacgaggagaaaagctttaaaaaatccaagtgaagaatatgggaaaattttggaagttgttggcaggtattcagtacacaatgcaggcattagtttctcagttaaaaaacaaggagagacagtagctgatgttaggacactacccaatgcctcaaccgtggacaatattcgctccatctttggaaatgctgttagtcgagaacngntgnanntggntgtgnggtaaaaccctaccttcaatgaatggtgctatccatgggactatcctgtgctcttctacctcacaccacgctgggacctccggg

SEQ ID NO: 330539 - DNA, 829 bp, Homo sapiens
ttgtcaccatttgggtagcgggggggggatttgaggctacgggactctctttagaagcccgacacaggagccagcaccgctctttgaccttgccatgcttgccttagatagtccagagagtggctggacagaggaagatggtcccaaagaaggacttgctgaatacattgttgagtttctgaagaagaaggctgagatgcttgcagactatttctctttggaaattgatgaggaagggaacctgattggattaccccttctgattgacaactatgtgccccctttggagggactgcctatcttcattcttcgactagccactgaggtgaattgggacgaagaaaaggaatgttttgaaagcctcagtaaagaatgcgctatgttctattccatccggaagcagtacatatctgaggagtcgaccctctcaggccagcagagtgaagtgcctggctccattccaaactcctggaagtggactgtggaacacattgtctataaagccttgcgctcacacattctgcctcctaaacatttcacagaagatggaaatatcctgcagcttgctaacctgcctgatctatacaaagtctttgagaggtgttaaatatggttatttatgcactgtgggatgtgttcttctttctctgtattccgatacaaagtgttgtatcaaagtgtgatatacaaagtgtaccaacataagtgttggtagcacttaagacttatacttgccttctgatagtattcctttatacacagtggattgattataaataaatagatgtgtcttaacataaatttatccctcacttagcggccaggtttc

SEQ ID NO: 330540 - DNA, 2292 bp, Homo sapiens
acgaggcactgaggtgattggctgaaggcacttccgttgagcatctagacgtttccttggctcttctggcgccaaaatgtcgttcgtggcaggggttattcggcggctggacgagacagtggtgaaccgcatcgcggcgggggaagttatccagcggccagctaatgctatcaaagagatgattgagaactgtttagatgcaaaatccacaagtattcaagtgattgttaaagagggaggcctgaagttgattcagatccaagacaatggcaccgggatcaggaaagaagatctggatattgtatgtgaaaggttcactactagtaaactgcagtcctttgaggatttagccagtatttctacctatggctttcgaggtgaggctttggccagcataagccatgtggctcatgttactattacaacgaaaacagctgatggaaagtgtgcatacagagcaagttactcagatggaaaactgaaagcccctcctaaaccatgtgctggcaatcaagggacccagatcacggtggaggaccttttttacaacatagccacgaggagaaaagctttaaaaaatccaagtgaagaatatgggaaaattttggaagttgttggcaggtattcagtacacaatgcaggcattagtttctcagttaaaaaacaaggagagacagtagctgatgttaggacactacccaatgcctcaaccgtggacaatattcgctccatctttggaaatgctgttagtcgagaactgatagaaattggatgtgaggataaaaccctagccttcaaaatgaatggttacatatccaatgcaaactactcagtgaagaagtgcatcttcttactcttcatcaaccactttgctaccaggacttgctggcccctctggggagatggttaaatccacaacaagtctgacctcgtcttctacttctggaagtagtgataaggtctatgcccaccagatggttcgtacagattcccgggaacagaagcttgatgcatttctgcagcctctgagcaaacccctgtccagtcagccccaggccattgtcacagaggataagacagatatttctagtggcagggctaggcagcaagatgaggagatgcttgaactcccagcccctgctgaagtggctgccaaaaatcagagcttggagggggatacaacaaaggggacttcagaaatgtcagagaagagaggacctacttccagcaaccccagaaagagacatcgggaagattctgatgtggaaatggtggaagatgattcccgaaaggaaatgactgcagcttgtaccccccggagaaggatcattaacctcactagtgttttgagtctccaggaagaaattaatgagcagggacatgaggttctccgggagatgttgcataaccactccttcgtgggctgtgtgaatcctcagtgggccttggcacagcatcaaaccaagttataccttctcaacaccaccaagcttagtgaagaactgttctaccagatactcatttatgattttgccaattttggtgttctcaggttatcggagccagcaccgctctttgaccttgccatgcttgccttagatagtccagagagtggctggacagaggaagatggtcccaaagaaggacttgctgaatacattgttgagtttctgaagaagaaggctgagatgcttgcagactatttctctttggaaattgatgaggaagggaacctgattggattaccccttctgattgacaactatgtgccccctttggagggactgcctatcttcattcttcgactagccactgaggtgaattgggacgaagaaaaggaatgttttgaaagcctcagtaaagaatgcgctatgttctattccatccggaagcagtacatatctgaggagtcgaccctctcaggccagcagagtgaagtgcctggctccattccaaactcctggaagtggactgtggaacacattgtctataaagccttgcgctcacacattctgcctcctaaacatttcacagaagatggaaatatcctgcagcttgctaacctgcctgatctatacaaagtctttgagaggtgttaaatatggttatttatgcactgtgggatgtgttcttctttctctgtattccgatacaaagtgttgtatcaaagtgtgatatacaaagtgtaccaacataagtgttggtagcacttaagacttatacttgccttctgatagtattcctttatacacagtggattgattataaataaatagatgtgtcttaacataa

SEQ ID NO: 330541 - DNA, 2441 bp, Homo sapiens
acgaggcactgaggtgattggctgaaggcacttccgttgagcatctagacgtttccttggctcttctggcgccaaaatgtcgttcgtggcaggggttattcggcggctggacgagacagtggtgaaccgcatcgcggcgggggaagttatccagcggccagctaatgctatcaaagagatgattgagaactgtttagatgcaaaatccacaagtattcaagtgattgttaaagagggaggcctgaagttgattcagatccaagacaatggcaccgggatcagggctttggccagcataagccatgtggctcatgttactattacaacgaaaacagctgatggaaagtgtgcatacagagcaagttactcagatggaaaactgaaagcccctcctaaaccatgtgctggcaatcaagggacccagatcacggtggaggaccttttttacaacatagccacgaggagaaaagctttaaaaaatccaagtgaagaatatgggaaaattttggaagttgttggcaggtattcagtacacaatgcaggcattagtttctcagttaaaaaacaaggagagacagtagctgatgttaggacactacccaatgcctcaaccgtggacaatattcgctccatctttggaaatgctgttagtcgagaactgatagaaattggatgtgaggataaaaccctagccttcaaaatgaatggttacatatccaatgcaaactactcagtgaagaagtgcatcttcttactcttcatcaaccatcgtctggtagaatcaacttccttgagaaaagccatagaaacagtgtatgcagcctatttgcccaaaaacacacacccattcctgtacctcagtttagaaatcagtccccagaatgtggatgttaatgtgcaccccacaaagcatgaagttcacttcctgcacgaggagagcatcctggagcgggtgcagcagcacatcgagagcaagctcctgggctccaattcctccaggatgtacttcacccagactttgctaccaggacttgctggcccctctggggagatggttaaatccacaacaagtctgacctcgtcttctacttctggaagtagtgataaggtctatgcccaccagatggttcgtacagattcccgggaacagaagcttgatgcatttctgcagcctctgagcaaacccctgtccagtcagccccaggccattgtcacagaggataagacagatatttctagtggcagggctaggcagcaagatgaggagatgcttgaactcccagcccctgctgaagtggctgccaaaaatcagagcttggagggggatacaacaaaggggacttcagaaatgtcagagaagagaggacctacttccagcaaccccagaaagagacatcgggaagattctgatgtggaaatggtggaagatgattcccgaaaggaaatgactgcagcttgtaccccccggagaaggatcattaacctcactagtgttttgagtctccaggaagaaattaatgagcagggacatgaggttctccgggagatgttgcataaccactccttcgtgggctgtgtgaatcctcagtgggccttggcacagcatcaaaccaagttataccttctcaacaccaccaagcttagtgaagaactgttctaccagatactcatttatgattttgccaattttggtgttctcaggttatcggagccagcaccgctctttgaccttgccatgcttgccttagatagtccagagagtggctggacagaggaagatggtcccaaagaaggacttgctgaatacattgttgagtttctgaagaagaaggctgagatgcttgcagactatttctctttggaaattgatgaggaagggaacctgattggattaccccttctgattgacaactatgtgccccctttggagggactgcctatcttcattcttcgactagccactgaggtgaattgggacgaagaaaaggaatgttttgaaagcctcagtaaagaatgcgctatgttctattccatccggaagcagtacatatctgaggagtcgaccctctcaggccagcagagtgaagtgcctggctccattccaaactcctggaagtggactgtggaacacattgtctataaagccttgcgctcacacattctgcctcctaaacatttcacagaagatggaaatatcctgcagcttgctaacctgcctgatctatacaaagtctttgagaggtgttaaatatggttatttatgcactgtgggatgtgttcttctttctctgtattccgatacaaagtgttgtatcaaagtgtgatatacaaagtgtaccaacataagtgttggtagcacttaagacttatacttgccttctgatagtattcctttatacacagtggattgattataaataaatagatgtgtcttaacataa

SEQ ID NO: 330542 - DNA, 2223 bp, Homo sapiens
  misc_feature (23)..(23): n is a, c, g, or t
taggtaggtacgaggctgggtgntgcgggttccctgacgagcggagtcaggccttctccttttccgcagaccgtgtgtttctttaccgctctcccccgagaccttttaagggttgtttggagttttagatgcaaaatccacaagtattcaagtgattgttaaagagggaggcctgaagttgattcagatccaagacaatggcaccgggatcaggaaagaagatctggatattgtatgtgaaaggttcactactagtaaactgcagtcctttgaggatttagccagtatttctacctatggctttcgaggtgaggctttggccagcataagccatgtggctcatgttactattacaacgaaaacagctgatggaaagtgtgcatacagagcaagttactcagatggaaaactgaaagcccctcctaaaccatgtgctggcaatcaagggacccagatcacggtggaggaccttttttacaacatagccacgaggagaaaagctttaaaaaatccaagtgaagaatatgggaaaattttggaagttgttggcaggtattcagtacacaatgcaggcattagtttctcagttaaaaaacaaggagagacagtagctgatgttaggacactacccaatgcctcaaccgtggacaatattcgctccatctttggaaatgctgttagtcgagaactgatagaaattggatgtgaggataaaaccctagccttcaaaatgaatggttacatatccaatgcaaactactcagtgaagaagtgcatcttcttactcttcatcaaccactttgctaccaggacttgctggcccctctggggagatggttaaatccacaacaagtctgacctcgtcttctacttctggaagtagtgataaggtctatgcccaccagatggttcgtacagattcccgggaacagaagcttgatgcatttctgcagcctctgagcaaacccctgtccagtcagccccaggccattgtcacagaggataagacagatatttctagtggcagggctaggcagcaagatgaggagatgcttgaactcccagcccctgctgaagtggctgccaaaaatcagagcttggagggggatacaacaaaggggacttcagaaatgtcagagaagagaggacctacttccagcaaccccagaaagagacatcgggaagattctgatgtggaaatggtggaagatgattcccgaaaggaaatgactgcagcttgtaccccccggagaaggatcattaacctcactagtgttttgagtctccaggaagaaattaatgagcagggacatgaggttctccgggagatgttgcataaccactccttcgtgggctgtgtgaatcctcagtgggccttggcacagcatcaaaccaagttataccttctcaacaccaccaagcttagtgaagaactgttctaccagatactcatttatgattttgccaattttggtgttctcaggttatcggagccagcaccgctctttgaccttgccatgcttgccttagatagtccagagagtggctggacagaggaagatggtcccaaagaaggacttgctgaatacattgttgagtttctgaagaagaaggctgagatgcttgcagactatttctctttggaaattgatgaggaagggaacctgattggattaccccttctgattgacaactatgtgccccctttggagggactgcctatcttcattcttcgactagccactgaggtgaattgggacgaagaaaaggaatgttttgaaagcctcagtaaagaatgcgctatgttctattccatccggaagcagtacatatctgaggagtcgaccctctcaggccagcagagtgaagtgcctggctccattccaaactcctggaagtggactgtggaacacattgtctataaagccttgcgctcacacattctgcctcctaaacatttcacagaagatggaaatatcctgcagcttgctaacctgcctgatctatacaaagtctttgagaggtgttaaatatggttatttatgcactgtgggatgtgttcttctttctctgtattccgatacaaagtgttgtatcaaagtgtgatatacaaagtgtaccaacataagtgttggtagcacttaagacttatacttgccttctgatagtattcctttatacacagtggattgattataaataaatagatgtgtcttaacataa

SEQ ID NO: 330543 - DNA, 2744 bp, Homo sapiens
acgaggcactgaggtgattggctgaaggcacttccgttgagcatctagacgtttccttggctcttctggcgccaaaatgtcgttcgtggcaggggttattcggcggctggacgagacagtggtgaaccgcatcgcggcgggggaagttatccagcggccagctaatgctatcaaagagatgattgagaactgtttagatgcaaaatccacaagtattcaagtgattgttaaagagggaggcctgaagttgattcagatccaagacaatggcaccgggatcaggaaagaagatctggatattgtatgtgaaaggttcactactagtaaactgcagtcctttgaggatttagccagtatttctacctatggctttcgaggtgaggctttggccagcataagccatgtggctcatgttactattacaacgaaaacagctgatggaaagtgtgcatacagagcaagttactcagatggaaaactgaaagcccctcctaaaccatgtgctggcaatcaagggacccagatcacggtggaggaccttttttacaacatagccacgaggagaaaagctttaaaaaatccaagtgaagaatatgggaaaattttggaagttgttggcaggtattcagtacacaatgcaggcattagtttctcagttaaaaaacaaggagagacagtagctgatgttaggacactacccaatgcctcaaccgtggacaatattcgctccatctttggaaatgctgttagtcgagaactgatagaaattggatgtgaggataaaaccctagccttcaaaatgaatggttacatatccaatgcaaactactcagtgaagaagtgcatcttcttactcttcatcaaccatcgtctggtagaatcaacttccttgagaaaagccatagaaacagtgtatgcagcctatttgcccaaaaacacacacccattcctgtacctcagtttagaaatcagtccccagaatgtggatgttaatgtgcaccccacaaagcatgaagttcacttcctgcacgaggagagcatcctggagcgggtgcagcagcacatcgagagcaagctcctgggctccaattcctccaggatgtacttcacccagactttgctaccaggacttgctggcccctctggggagatggttaaatccacaacaagtctgacctcgtcttctacttctggaagtagtgataaggtctatgcccaccagatggttcgtacagattcccgggaacagaagcttgatgcatttctgcagcctctgagcaaacccctgtccagtcagccccaggccattgtcacagaggataagacagatatttctagtggcagggctaggcagcaagatgaggagatgcttgaactcccagcccctgctgaagtggctgccaaaaatcagagcttggagggggatacaacaaaggggacttcagaaatgtcagagaagagaggacctacttccagcaaccccagaaagagacatcgggaagattctgatgtggaaatggtggaagatgattcccgaaaggaaatgactgcagcttgtaccccccggagaaggatcattaacctcactagtgttttgagtctccaggaagaaattaatgagcagggacatgaggttctccgggagatgttgcataaccactccttcgtgggctgtgtgaatcctcagtgggccttggcacagcatcaaaccaagttataccttctcaacaccaccaagcttagtgaagaactgttctaccagatactcatttatgattttgccaattttggtgttctcaggttatcggagccagcaccgctctttgaccttgccatgcttgccttagatagtccagagagtggctggacagaggaagatggtcccaaagaaggacttgctgaatacattgttgagtttctgaagaagaaggctgagatgcttgcagactatttctctttggaaattgatgaggaagggaacctgattggattaccccttctgattgacaactatgtgccccctttggagggactgcctatcttcattcttcgactagccactgaggtgaattgggacgaagaaaaggaatgttttgaaagcctcagtaaagaatgcgctatgttctattccatccggaagcagtacatatctgaggagtcgaccctctcaggccagcagagtgaagtgcctggctccattccaaactcctggaagtggactgtggaacacattgtctataaagccttgcgctcacacattctgcctcctaaacatttcacagaagatggaaatatcctgcagcttgctaacctgcctgatctatacaaagtctttgagaggtgttaaatatggttatttatgcactgtgggatgtgttcttctttctctgtattccgatacaaagtgttgtatcaaagtgtgatatacaaagtgtaccaacataagtgttggtagcacttaagacttatacttgccttctgatagtattcctttatacacagtggattgattataaataaatagatgtgtcttaacataaaaaaaaaaaaaaaaaacaaaaaaacaagaaacaagaaaaaacaaaagagaaaaaaacaaaacaaaaaaagaaacaaaaacaaaacacaagcacacgcaaacaaaaaaagaacgagagggggggcggcggccccgagaattacactacctcggcgggcgcacacagacagcgcagcgcccacggattgtaggacggcgcggcgac

SEQ ID NO: 330544 - DNA, 2608 bp, Homo sapiens
acgaggcactgaggtgattggctgaaggcacttccgttgagcatctagacgtttccttggctcttctggcgccaaaatgtcgttcgtggcaggggttattcggcggctggacgagacagtggtgaaccgcatcgcggcgggggaagttatccagcggccagctaatgctatcaaagagatgattgagaactgtttagatgcaaaatccacaagtattcaagtgattgttaaagagggaggcctgaagttgattcagatccaagacaatggcaccgggatcaggaaagaagatctggatattgtatgtgaaaggttcactactagtaaactgcagtcctttgaggatttagccagtatttctacctatggctttcgaggtgaggctttggccagcataagccatgtggctcatgttactattacaacgaaaacagctgatggaaagtgtgcatacagagcaagttactcagatggaaaactgaaagcccctcctaaaccatgtgctggcaatcaagggacccagatcacggtggaggaccttttttacaacatagccacgaggagaaaagctttaaaaaatccaagtgaagaatatgggaaaattttggaagttgttggcaggtattcagtacacaatgcaggcattagtttctcagttaaaaaacaaggagagacagtagctgatgttaggacactacccaatgcctcaaccgtggacaatattcgctccatctttggaaatgctgttagtcgagaactgatagaaattggatgtgaggataaaaccctagccttcaaaatgaatggttacatatccaatgcaaactactcagtgaagaagtgcatcttcttactcttcatcaaccatcgtctggtagaatcaacttccttgagaaaagccatagaaacagtgtatgcagcctatttgcccaaaaacacacacccattcctgtacctcagtttagaaatcagtccccagaatgtggatgttaatgtgcaccccacaaagcatgaagttcacttcctgcacgaggagagcatcctggagcgggtgcagcagcacatcgagagcaagctcctgggctccaattcctccaggatgtacttcacccagactttgctaccaggacttgctggcccctctggggagatggttaaatccacaacaagtctgacctcgtcttctacttctggaagtagtgataaggtctatgcccaccagatggttcgtacagattcccgggaacagaagcttgatgcatttctgcagcctctgagcaaacccctgtccagtcagccccaggccattgtcacagaggataagacagatatttctagtggcagggctaggcagcaagatgaggagatgcttgaactcccagcccctgctgaagtggctgccaaaaatcagagcttggagggggatacaacaaaggggacttcagaaatgtcagagaagagaggacctacttccagcaaccccagaaagagacatcgggaagattctgatgtggaaatggtggaagatgattcccgaaaggaaatgactgcagcttgtaccccccggagaaggatcattaacctcactagtgttttgagtctccaggaagaaattaatgagcagggacatgaggttctccgggagatgttgcataaccactccttcgtgggctgtgtgaatcctcagtgggccttggcacagcatcaaaccaagttataccttctcaacaccaccaagcttagtgaagaactgttctaccagatactcatttatgattttgccaattttggtgttctcaggttatcggagccagcaccgctctttgaccttgccatgcttgccttagatagtccagagagtggctggacagaggaagatggtcccaaagaaggacttgctgaatacattgttgagtttctgaagaagaaggctgagatgcttgcagactatttctctttggaaattgatgaggaagggaacctgattggattaccccttctgattgacaactatgtgccccctttggagggactgcctatcttcattcttcgactagccactgaggtgaattgggacgaagaaaaggaatgttttgaaagcctcagtaaagaatgcgctatgttctattccatccggaagcagtacatatctgaggagtcgaccctctcaggccagcagagtgaagtgcctggctccattccaaactcctggaagtggactgtggaacacattgtctataaagccttgcgctcacacattctgcctcctaaacatttcacagaagatggaaatatcctgcagcttgctaacctgcctgatctatacaaagtctttgagaggtgttaaatatggttatttatgcactgtgggatgtgttcttctttctctgtattccgatacaaagtgttgtatcaaagtgtgatatacaaagtgtaccaacataagtgttggtagcacttaagacttatacttgccttctgatagtattcctttatacacagtggattgattataaataaatagatgtgtcttaacataaaagatgcagacaagccccggctttctcttctcttctatttcaaatactctaaatatagagactcttac

SEQ ID NO: 330545 - DNA, 2211 bp, Homo sapiens
acgaggcactgaggtgattggctgaaggcacttccgttgagcatctagacgtttccttggctcttctggcgccaaaatgtcgttcgtggcaggggttattcggcggctggacgagacagtggtgaaccgcatcgcggcgggggaagttatccagcggccagctaatgctatcaaagagatgattgagaactgtttagatgcaaaatccacaagtattcaagtgattgttaaagagggaggcctgaagttgattcagatccaagacaatggcaccgggatcaggaaagaagatctggatattgtatgtgaaaggttcactactagtaaactgcagtcctttgaggatttagccagtatttctacctatggctttcgaggtgaggctttggccagcataagccatgtggctcatgttactattacaacgaaaacagctgatggaaagtgtgcatacagagcaagttactcagatggaaaactgaaagcccctcctaaaccatgtgctggcaatcaagggacccagatcacggtggaggaccttttttacaacatagccacgaggagaaaagctttaaaaaatccaagtgaagaatatgggaaaattttggaagttgttggcaggtattcagtacacaatgcaggcattagtttctcagttaaaaaacaaggagagacagtagctgatgttaggacactacccaatgcctcaaccgtggacaatattcgctccatctttggaaatgctgttagtcgagaactgatagaaattggatgtgaggataaaaccctagccttcaaaatgaatggttacatatccaatgcaaactactcagtgaagaagtgcatcttcttactcttcatcaaccatcgtctggtagaatcaacttccttgagaaaagccatagaaacagtgtatgcagcctatttgcccaaaaacacacacccattcctgtacctcagtttagaaatcagtccccagaatgtggatgttaatgtgcaccccacaaagcatgaagttcacttcctgcacgaggagagcatcctggagcgggtgcagcagcacatcgagagcaagctcctgggctccaattcctccaggatgtacttcacccagactttgctaccaggacttgctggcccctctggggagatggttaaatccacaacaagtctgacctcgtcttctacttctggaagtagtgataaggtctatgcccaccagatggttcgtacagattcccgggaacagaagcttgatgcatttctgcagcctctgagcaaacccctgtccagtcagccccaggccattgtcacagaggataagacagatatttctagtggcagggctaggcagcaagatgaggagatgcttgaactcccagcccctgctgaagtggctgccaaaaatcagagcttggagggggatacaacaaaggggacttcagaaatgtcagagaagagaggacctacttccagcaaccccagaaagagacatcgggaagattctgatgtggaaatggtggaagatgattcccgaaaggaaatgactgcagcttgtaccccccggagaaggatcattaacctcactagtgttttgagtctccaggaagaaattaatgagcagggacatgaggttctccgggagatgttgcataaccactccttcgtgggctgtgtgaatcctcagtgggccttggcacagcatcaaaccaagttataccttctcaacaccaccaagcttagtgaagaactgttctaccagatactcatttatgattttgccaattttggtgttctcaggttatcggagccagcaccgctctttgaccttgccatgcttgccttagatagtccagagagtggctggacagaggaagatggtcccaaagaaggacttgctgaatacattgttgagtttctgaagaagaaggctgagatgcttgcagactatttctctttggaaattgatgaggaagggaacctgattggattaccccttctgattgacaactatgtgccccctttggagggactgcctatcttcattcttcgactagccactgaggtgaattgggacgaagaaaaggaatgttttgaaagcctcagtaaagaatgcgctatgttctattccatccggaagtatgtagtcgactacatactggagccaagtgctaacatgccttggttcaagggatggaaagtcacccgtaa

SEQ ID NO: 330546 - DNA, 2005 bp, Homo sapiens
acgaggcactgaggtgattggctgaaggcacttccgttgagcatctagacgtttccttggctcttctggcgccaaaatgtcgttcgtggcaggggttattcggcggctggacgagacagtggtgaaccgcatcgcggcgggggaagttatccagcggccagctaatgctatcaaagagatgattgagaactgtttagatgcaaaatccacaagtattcaagtgattgttaaagagggaggcctgaagttgattcagatccaagacaatggcaccgggatcaggaaagaagatctggatattgtatgtgaaaggttcactactagtaaactgcagtcctttgaggatttagccagtatttctacctatggctttcgaggtgaggctttggccagcataagccatgtggctcatgttactattacaacgaaaacagctgatggaaagtgtgcatacagagcaagttactcagatggaaaactgaaagcccctcctaaaccatgtgctggcaatcaagggacccagatcacggtggaggaccttttttacaacatagccacgaggagaaaagctttaaaaaatccaagtgaagaatatgggaaaattttggaagttgttggcaggtattcagtacacaatgcaggcattagtttctcagttaaaaaacaaggagagacagtagctgatgttaggacactacccaatgcctcaaccgtggacaatattcgctccatctttggaaatgctgttagtcgagaactgatagaaattggatgtgaggataaaaccctagccttcaaaatgaatggttacatatccaatgcaaactactcagtgaagaagtgcatcttcttactcttcatcaaccatcgtctggtagaatcaacttccttgagaaaagccatagaaacagtgtatgcagcctatttgcccaaaaacacacacccattcctgtacctcagtttagaaatcagtccccagaatgtggatgttaatgtgcaccccacaaagcatgaagttcacttcctgcacgaggagagcatcctggagcgggtgcagcagcacatcgagagcaagctcctgggctccaattcctccaggatgtacttcacccagactttgctaccaggacttgctggcccctctggggagatggttaaatccacaacaagtctgacctcgtcttctacttctggaagtagtgataaggtctatgcccaccagatggttcgtacagattcccgggaacagaagcttgatgcatttctgcagcctctgagcaaacccctgtccagtcagccccaggccattgtcacagaggataagacagatatttctagtggcagggctaggcagcaagatgaggagatgcttgaactcccagcccctgctgaagtggctgccaaaaatcagagcttggagggggatacaacaaaggggacttcagaaatgtcagagaagagaggacctacttccagcaaccccagaaagagacatcgggaagattctgatgtggaaatggtggaagatgattcccgaaaggaaatgactgcagcttgtaccccccggagaaggatcattaacctcactagtgttttgagtctccaggaagaaattaatgagcagggacatgaggttctccgggagatgttgcataaccactccttcgtgggctgtgtgaatcctcagtgggccttggcacagcatcaaaccaagttataccttctcaacaccaccaagcttagtgaagaactgttctaccagatactcatttatgattttgccaattttggtgttctcaggttatcggagccagcaccgctctttgaccttgccatgcttgccttagatagtccagagagtggctggacagaggaagatggtcccaaagaaggacttgctgaatacattgttgagtttctgaagaagaaggctgagatgcttgcagactatttctctttggaaattgatgagagtgttaacgccctccgttccctctatagccca

SEQ ID NO: 330547 - DNA, 1632 bp, Homo sapiens
  misc_feature (1510)..(1510): n is a, c, g, or t
  misc_feature (1514)..(1514): n is a, c, g, or t
  misc_feature (1516)..(1516): n is a, c, g, or t
  misc_feature (1544)..(1544): n is a, c, g, or t
  misc_feature (1551)..(1551): n is a, c, g, or t
acgaggcactgaggtgattggctgaaggcacttccgttgagcatctagacgtttccttggctcttctggcgccaaaatgtcgttcgtggcaggggttattcggcggctggacgagacagtggtgaaccgcatcgcggcgggggaagttatccagcggccagctaatgctatcaaagagatgattgagaactgtttagatgcaaaatccacaagtattcaagtgattgttaaagagggaggcctgaagttgattcagatccaagacaatggcaccgggatcaggaaagaagatctggatattgtatgtgaaaggttcactactagtaaactgcagtcctttgaggatttagccagtatttctacctatggctttcgaggtgaggctttggccagcataagccatgtggctcatgttactattacaacgaaaacagctgatggaaagtgtgcatacagagcaagttactcagatggaaaactgaaagcccctcctaaaccatgtgctggcaatcaagggacccagatcacggtggaggaccttttttacaacatagccacgaggagaaaagctttaaaaaatccaagtgaagaatatgggaaaattttggaagttgttggcaggtattcagtacacaatgcaggcattagtttctcagttaaaaaacaaggagagacagtagctgatgttaggacactacccaatgcctcaaccgtggacaatattcgctccatctttggaaatgctgttagtcgagaactgatagaaattggatgtgaggataaaaccctagccttcaaaatgaatggttacatatccaatgcaaactactcagtgaagaagtgcatcttcttactcttcatcaaccatcgtctggtagaatcaacttccttgagaaaagccatagaaacagtgtatgcagcctatttgcccaaaaacacacacccattcctgtacctcagtttagaaatcagtccccagaatgtggatgttaatgtgcaccccacaaagcatgaagttcacttcctgcacgaggagagcatcctggagcgggtgcagcagcacatcgagagcaagctcctgggctccaattcctccaggatgtacttcacccagactttgctaccaggacttgctggcccctctggggagatggttaaatccacaacaagtctgacctcgtcttctacttctggaagtagtgataaggtctatgcccaccagatggttcgtacagattcccgggaacagaagcttgatgcatttctgcagcctctgagcaaacccctgtccagtcagccccaggccattgtcacagaggataagacagatatttctagtggcagggctaggcagcaagatgaggagatgcttgaactcccagcccctgctgaagtggctgccaaaaatcagagcttggagggggatacaacaaaggggacttcagaaatgtcagagaagagaggacctacttccagcaaccccagaaagagaatcgggaagatctgatgngganangggggagatgattccgaaggaatgatgngttgtanccccggaaaggtctaactccataggtagagttcggggagaataggggggacagaggtcgcgaaagtggtaccccctcgggg

SEQ ID NO: 330548 - DNA, 949 bp, Homo sapiens
acgaggcactgaggtgattggctgaaggcacttccgttgagcatctagacgtttccttggctcttctggcgccaaaatgtcgttcgtggcaggggttattcggcggctggacgagacagtggtgaaccgcatcgcggcgggggaagttatccagcggccagctaatgctatcaaagagatgattgagaactgtttagatgcaaaatccacaagtattcaagtgattgttaaagagggaggcctgaagttgattcagatccaagacaatggcaccgggatcaggaaagaagatctggatattgtatgtgaaaggttcactactagtaaactgcagtcctttgaggatttagccagtatttctacctatggctttcgaggtgaggctttggccagcataagccatgtggctcatgttactattacaacgaaaacagctgatggaaagtgtgcatacagagcaagttactcagatggaaaactgaaagcccctcctaaaccatgtgctggcaatcaagggacccagatcacggtggaggaccttttttacaacatagccacgaggagaaaagctttaaaaaatccaagtgaagaatatgggaaaattttggaagttgttggcaggtattcagtacacaatgcaggcattagtttctcagttaaaaaacaaggagagacagtagctgatgttaggacactacccaatgcctcaaccgtggacaatattcgctccatctttggaaatgctgttagtcgagaactgatagaaattggatgtgaggataaaaccctagccttcaaaatgaatggttacatatccaatgcaaactactcagtgaagaagtgcatcttcttactcttcatcaacccatcgctggtaaaatcactccttaaaaggctaaaacggtttggctattccaaaaaaaccatccgctcttaaatccccatgggt

SEQ ID NO: 330549 - DNA, 927 bp, Homo sapiens
  misc_feature (763)..(763): n is a, c, g, or t
  misc_feature (766)..(766): n is a, c, g, or t
  misc_feature (773)..(773): n is a, c, g, or t
acgaggcactgaggtgattggctgaaggcacttccgttgagcatctagacgtttccttggctcttctggcgccaaaatgtcgttcgtggcaggggttattcggcggctggacgagacagtggtgaaccgcatcgcggcgggggaagttatccagcggccagctaatgctatcaaagagatgattgagaactgtttagatgcaaaatccacaagtattcaagtgattgttaaagagggaggcctgaagttgattcagatccaagacaatggcaccgggatcaggaaagaagatctggatattgtatgtgaaaggttcactactagtaaactgcagtcctttgaggatttagccagtatttctacctatggctttcgaggtgaggctttggccagcataagccatgtggctcatgttactattacaacgaaaacagctgatggaaagtgtgcatacagagcaagttactcagatggaaaactgaaagcccctcctaaaccatgtgctggcaatcaagggacccagatcacggtggaggaccttttttacaacatagccacgaggagaaaagctttaaaaaatccaagtgaagaatatgggaaaattttggaagttgttggcaggtattcagtacacaatgcaggcattagtttctcagttaaaaaacaaggagagacagtagctgatgttaggacactacccaatgcctcaaccgtggacaatattcgctccatctttggaaatgctgttagtcgagaactgtanaantggtgtnagggttaaacccttacctttaaaagggaagggttccatttccagggcaaactcttaagggaaaaagggccttttttacctttaaattaccataggtcgggtaaaaaaaacttcttttgaaaaagcccttaaaaacatgttttgccccctttttg

SEQ ID NO: 330550 - DNA, 2540 bp, Homo sapiens
acgaggcactgaggtgattggctgaaggcacttccgttgagcatctagacgtttccttggctcttctggcgccaaaatgtcgttcgtggcaggggttattcggcggctggacgagacagtggtgaaccgcatcgcggcgggggaagttatccagcggccagctaatgctatcaaagagatgattgagaactgtttagatgcaaaatccacaagtattcaagtgattgttaaagagggaggcctgaagttgattcagatccaagacaatggcaccgggatcaggaaagaagatctggatattgtatgtgaaaggttcactactagtaaactgcagtcctttgaggatttagccagtatttctacctatggctttcgaggtgaggctttggccagcataagccatgtggctcatgttactattacaacgaaaacagctgatggaaagtgtgcatacagagcaagttactcagatggaaaactgaaagcccctcctaaaccatgtgctggcaatcaagggacccagatcacggtggaggaccttttttacaacatagccacgaggagaaaagctttaaaaaatccaagtgaagaatatgggaaaattttggaagttgttggcaggtattcagtacacaatgcaggcattagtttctcagttaaaaaacaaggagagacagtagctgatgttaggacactacccaatgcctcaaccgtggacaatattcgctccatctttggaaatgctgttagtcgagaactgatagaaattggatgtgaggataaaaccctagccttcaaaatgaatggttacatatccaatgcaaactactcagtgaagaagtgcatcttcttactcttcatcaaccatcgtctggtagaatcaacttccttgagaaaagccatagaaacagtgtatgcagcctatttgcccaaaaacacacacccattcctgtacctcagtttagaaatcagtccccagaatgtggatgttaatgtgcaccccacaaagcatgaagttcacttcctgcacgaggagagcatcctggagcgggtgcagcagcacatcgagagcaagctcctgggctccaattcctccaggatgtacttcacccagactttgctaccaggacttgctggcccctctggggagatggttaaatccacaacaagtctgacctcgtcttctacttctggaagtagtgataaggtctatgcccaccagatggttcgtacagattcccgggaacagaagcttgatgcatttctgcagcctctgagcaaacccctgtccagtcagccccaggccattgtcacagaggataagacagatatttctagtggcagggctaggcagcaagatgaggagatgcttgaactcccagcccctgctgaagtggctgccaaaaatcagagcttggagggggatacaacaaaggggacttcagaaatgtcagagaagagaggacctacttccagcaaccccagaaagagacatcgggaagattctgatgtggaaatggtggaagatgattcccgaaaggaaatgactgcagcttgtaccccccggagaaggatcattaacctcactagtgttttgagtctccaggaagaaattaatgagcagggacatgaggttctccgggagatgttgcataaccactccttcgtgggctgtgtgaatcctcagtgggccttggcacagcatcaaaccaagttataccttctcaacaccaccaagcttagtgaagaactgttctaccagatactcatttatgattttgccaattttggtgttctcaggttatcggagccagcaccgctctttgaccttgccatgcttgccttagatagtccagagagtggctggacagaggaagatggtcccaaagaaggacttgctgaatacattgttgagtttctgaagaagaaggctgagatgcttgcagactatttctctttggaaattgatgaggaagggaacctgattggattaccccttctgattgacaactatgtgccccctttggagggactgcctatcttcattcttcgactagccactgaggtgaattgggacgaagaaaaggaatgttttgaaagcctcagtaaagaatgcgctatgttctattccatccggaagcagtacatatctgaggagtcgaccctctcaggccagcagagtgaagtgcctggctccattccaaactcctggaagtggactgtggaacacattgtctataaagccttgcgctcacacattctgcctcctaaacatttcacagaagatggaaatatcctgcagcttgctaacctgcctgatctatacaaagtctttgagaggtgttaaatatggttatttatgcactgtgggatgtgttcttctttctctgtattccgatacaaagtgttgtatcaaagtgtgatatacaaagtgtaccaacataagtgttggtagcacttaagacttatacttgccttctgatagtattcctttatacacagtggattgattataaataaatagatgtgtcttaacataa

SEQ ID NO: 330551 - DNA, 2471 bp, Homo sapiens
  misc_feature (23)..(23): n is a, c, g, or t
taggtaggtacgaggctgggtgntgcgggttccctgacgagcggagtcaggccttctccttttccgcagaccgtgtgtttctttaccgctctcccccgagaccttttaagggttgtttggagttttagatgcaaaatccacaagtattcaagtgattgttaaagagggaggcctgaagttgattcagatccaagacaatggcaccgggatcaggaaagaagatctggatattgtatgtgaaaggttcactactagtaaactgcagtcctttgaggatttagccagtatttctacctatggctttcgaggtgaggctttggccagcataagccatgtggctcatgttactattacaacgaaaacagctgatggaaagtgtgcatacagagcaagttactcagatggaaaactgaaagcccctcctaaaccatgtgctggcaatcaagggacccagatcacggtggaggaccttttttacaacatagccacgaggagaaaagctttaaaaaatccaagtgaagaatatgggaaaattttggaagttgttggcaggtattcagtacacaatgcaggcattagtttctcagttaaaaaacaaggagagacagtagctgatgttaggacactacccaatgcctcaaccgtggacaatattcgctccatctttggaaatgctgttagtcgagaactgatagaaattggatgtgaggataaaaccctagccttcaaaatgaatggttacatatccaatgcaaactactcagtgaagaagtgcatcttcttactcttcatcaaccatcgtctggtagaatcaacttccttgagaaaagccatagaaacagtgtatgcagcctatttgcccaaaaacacacacccattcctgtacctcagtttagaaatcagtccccagaatgtggatgttaatgtgcaccccacaaagcatgaagttcacttcctgcacgaggagagcatcctggagcgggtgcagcagcacatcgagagcaagctcctgggctccaattcctccaggatgtacttcacccagactttgctaccaggacttgctggcccctctggggagatggttaaatccacaacaagtctgacctcgtcttctacttctggaagtagtgataaggtctatgcccaccagatggttcgtacagattcccgggaacagaagcttgatgcatttctgcagcctctgagcaaacccctgtccagtcagccccaggccattgtcacagaggataagacagatatttctagtggcagggctaggcagcaagatgaggagatgcttgaactcccagcccctgctgaagtggctgccaaaaatcagagcttggagggggatacaacaaaggggacttcagaaatgtcagagaagagaggacctacttccagcaaccccagaaagagacatcgggaagattctgatgtggaaatggtggaagatgattcccgaaaggaaatgactgcagcttgtaccccccggagaaggatcattaacctcactagtgttttgagtctccaggaagaaattaatgagcagggacatgaggttctccgggagatgttgcataaccactccttcgtgggctgtgtgaatcctcagtgggccttggcacagcatcaaaccaagttataccttctcaacaccaccaagcttagtgaagaactgttctaccagatactcatttatgattttgccaattttggtgttctcaggttatcggagccagcaccgctctttgaccttgccatgcttgccttagatagtccagagagtggctggacagaggaagatggtcccaaagaaggacttgctgaatacattgttgagtttctgaagaagaaggctgagatgcttgcagactatttctctttggaaattgatgaggaagggaacctgattggattaccccttctgattgacaactatgtgccccctttggagggactgcctatcttcattcttcgactagccactgaggtgaattgggacgaagaaaaggaatgttttgaaagcctcagtaaagaatgcgctatgttctattccatccggaagcagtacatatctgaggagtcgaccctctcaggccagcagagtgaagtgcctggctccattccaaactcctggaagtggactgtggaacacattgtctataaagccttgcgctcacacattctgcctcctaaacatttcacagaagatggaaatatcctgcagcttgctaacctgcctgatctatacaaagtctttgagaggtgttaaatatggttatttatgcactgtgggatgtgttcttctttctctgtattccgatacaaagtgttgtatcaaagtgtgatatacaaagtgtaccaacataagtgttggtagcacttaagacttatacttgccttctgatagtattcctttatacacagtggattgattataaataaatagatgtgtcttaacataa

SEQ ID NO: 330552 - DNA, 2545 bp, Homo sapiens
  misc_feature (23)..(23): n is a, c, g, or t
taggtaggtacgaggctgggtgntgcgggttccctgacgagcggagtcaggccttctccttttccgcagaccgtgtgtttctttaccgctctcccccgagaccttttaagggttgtttggagtacggagtctcactttgtcacccaggctggagtgcagtggcgcgatctcagctgactgcaacctcctcctcacagtttagatgcaaaatccacaagtattcaagtgattgttaaagagggaggcctgaagttgattcagatccaagacaatggcaccgggatcaggaaagaagatctggatattgtatgtgaaaggttcactactagtaaactgcagtcctttgaggatttagccagtatttctacctatggctttcgaggtgaggctttggccagcataagccatgtggctcatgttactattacaacgaaaacagctgatggaaagtgtgcatacagagcaagttactcagatggaaaactgaaagcccctcctaaaccatgtgctggcaatcaagggacccagatcacggtggaggaccttttttacaacatagccacgaggagaaaagctttaaaaaatccaagtgaagaatatgggaaaattttggaagttgttggcaggtattcagtacacaatgcaggcattagtttctcagttaaaaaacaaggagagacagtagctgatgttaggacactacccaatgcctcaaccgtggacaatattcgctccatctttggaaatgctgttagtcgagaactgatagaaattggatgtgaggataaaaccctagccttcaaaatgaatggttacatatccaatgcaaactactcagtgaagaagtgcatcttcttactcttcatcaaccatcgtctggtagaatcaacttccttgagaaaagccatagaaacagtgtatgcagcctatttgcccaaaaacacacacccattcctgtacctcagtttagaaatcagtccccagaatgtggatgttaatgtgcaccccacaaagcatgaagttcacttcctgcacgaggagagcatcctggagcgggtgcagcagcacatcgagagcaagctcctgggctccaattcctccaggatgtacttcacccagactttgctaccaggacttgctggcccctctggggagatggttaaatccacaacaagtctgacctcgtcttctacttctggaagtagtgataaggtctatgcccaccagatggttcgtacagattcccgggaacagaagcttgatgcatttctgcagcctctgagcaaacccctgtccagtcagccccaggccattgtcacagaggataagacagatatttctagtggcagggctaggcagcaagatgaggagatgcttgaactcccagcccctgctgaagtggctgccaaaaatcagagcttggagggggatacaacaaaggggacttcagaaatgtcagagaagagaggacctacttccagcaaccccagaaagagacatcgggaagattctgatgtggaaatggtggaagatgattcccgaaaggaaatgactgcagcttgtaccccccggagaaggatcattaacctcactagtgttttgagtctccaggaagaaattaatgagcagggacatgaggttctccgggagatgttgcataaccactccttcgtgggctgtgtgaatcctcagtgggccttggcacagcatcaaaccaagttataccttctcaacaccaccaagcttagtgaagaactgttctaccagatactcatttatgattttgccaattttggtgttctcaggttatcggagccagcaccgctctttgaccttgccatgcttgccttagatagtccagagagtggctggacagaggaagatggtcccaaagaaggacttgctgaatacattgttgagtttctgaagaagaaggctgagatgcttgcagactatttctctttggaaattgatgaggaagggaacctgattggattaccccttctgattgacaactatgtgccccctttggagggactgcctatcttcattcttcgactagccactgaggtgaattgggacgaagaaaaggaatgttttgaaagcctcagtaaagaatgcgctatgttctattccatccggaagcagtacatatctgaggagtcgaccctctcaggccagcagagtgaagtgcctggctccattccaaactcctggaagtggactgtggaacacattgtctataaagccttgcgctcacacattctgcctcctaaacatttcacagaagatggaaatatcctgcagcttgctaacctgcctgatctatacaaagtctttgagaggtgttaaatatggttatttatgcactgtgggatgtgttcttctttctctgtattccgatacaaagtgttgtatcaaagtgtgatatacaaagtgtaccaacataagtgttggtagcacttaagacttatacttgccttctgatagtattcctttatacacagtggattgattataaataaatagatgtgtcttaacataa

SEQ ID NO: 330553 - DNA, 1656 bp, Homo sapiens
  misc_feature (23)..(23): n is a, c, g, or t
taggtaggtacgaggctgggtgntgagtgtatgcagcctatttgcccaaaaacacacacccattcctgtacctcagtttagaaatcagtccccagaatgtggatgttaatgtgcaccccacaaagcatgaagttcacttcctgcacgaggagagcatcctggagcgggtgcagcagcacatcgagagcaagctcctgggctccaattcctccaggatgtacttcacccagactttgctaccaggacttgctggcccctctggggagatggttaaatccacaacaagtctgacctcgtcttctacttctggaagtagtgataaggtctatgcccaccagatggttcgtacagattcccgggaacagaagcttgatgcatttctgcagcctctgagcaaacccctgtccagtcagccccaggccattgtcacagaggataagacagatatttctagtggcagggctaggcagcaagatgaggagatgcttgaactcccagcccctgctgaagtggctgccaaaaatcagagcttggagggggatacaacaaaggggacttcagaaatgtcagagaagagaggacctacttccagcaaccccagaaagagacatcgggaagattctgatgtggaaatggtggaagatgattcccgaaaggaaatgactgcagcttgtaccccccggagaaggatcattaacctcactagtgttttgagtctccaggaagaaattaatgagcagggacatgaggttctccgggagatgttgcataaccactccttcgtgggctgtgtgaatcctcagtgggccttggcacagcatcaaaccaagttataccttctcaacaccaccaagcttagtgaagaactgttctaccagatactcatttatgattttgccaattttggtgttctcaggttatcggagccagcaccgctctttgaccttgccatgcttgccttagatagtccagagagtggctggacagaggaagatggtcccaaagaaggacttgctgaatacattgttgagtttctgaagaagaaggctgagatgcttgcagactatttctctttggaaattgatgaggaagggaacctgattggattaccccttctgattgacaactatgtgccccctttggagggactgcctatcttcattcttcgactagccactgaggtgaattgggacgaagaaaaggaatgttttgaaagcctcagtaaagaatgcgctatgttctattccatccggaagcagtacatatctgaggagtcgaccctctcaggccagcagagtgaagtgcctggctccattccaaactcctggaagtggactgtggaacacattgtctataaagccttgcgctcacacattctgcctcctaaacatttcacagaagatggaaatatcctgcagcttgctaacctgcctgatctatacaaagtctttgagaggtgttaaatatggttatttatgcactgtgggatgtgttcttctttctctgtattccgatacaaagtgttgtatcaaagtgtgatatacaaagtgtaccaacataagtgttggtagcacttaagacttatacttgccttctgatagtattcctttatacacagtggattgattataaataaatagatgtgtcttaacataa

SEQ ID NO: 330554 - DNA, 2447 bp, Homo sapiens
acgaggcactgaggtgattggctgaaggcacttccgttgagcatctagacgtttccttggctcttctggcgccaaaatgtcgttcgtggcaggggttattcggcggctggacgagacagtggtgaaccgcatcgcggcgggggaagttatccagcggccagctaatgctatcaaagagatgattgagaactgtttagatgcaaaatccacaagtattcaagtgattgttaaagagggaggcctgaagttgattcagatccaagacaatggcaccgggatcaggaaagaagatctggatattgtatgtgaaaggttcactactagtaaactgcagtcctttgaggatttagccagtatttctacctatggctttcgaggtgaggctttggccagcataagccatgtggctcatgttactattacaacgaaaacagctgatggaaagtgtgcatacagagcaagttactcagatggaaaactgaaagcccctcctaaaccatgtgctggcaatcaagggacccagatcacggtggaggaccttttttacaacatagccacgaggagaaaagctttaaaaaatccaagtgaagaatatgggaaaattttggaagttgttggcaggtattcagtacacaatgcaggcattagtttctcagttaaaaaacaaggagagacagtagctgatgttaggacactacccaatgcctcaaccgtggacaatattcgctccatctttggaaatgctgttagtcgagaactgatagaaattggatgtgaggataaaaccctagccttcaaaatgaatggttacatatccaatgcaaactactcagtgaagaagtgcatcttcttactcttcatcaaccatcgtctggtagaatcaacttccttgagaaaagccatagaaacagtgtatgcagcctatttgcccaaaaacacacacccattcctgtacctcagtttagaaatcagtccccagaatgtggatgttaatgtgcaccccacaaagcatgaagttcacttcctgcacgaggagagcatcctggagcgggtgcagcagcacatcgagagcaagctcctgggctccaattcctccaggatgtacttcacccagactttgctaccaggacttgctggcccctctggggagatggttaaatccacaacaagtctgacctcgtcttctacttctggaagtagtgataaggtctatgcccaccagatggttcgtacagattcccgggaacagaagcttgatgcatttctgcagcctctgagcaaacccctgtccagtcagccccaggccattgtcacagaggataagacagatatttctagtggcagggctaggcagcaagatgaggagatgcttgaactcccagcccctgctgaagtggctgccaaaaatcagagcttggagggggatacaacaaaggggacttcagaaatgtcagagaagagaggacctacttccagcaaccccagaaagagacatcgggaagattctgatgtggaaatggtggaagatgattcccgaaaggaaatgactgcagcttgtaccccccggagaaggatcattaacctcactagtgttttgagtctccaggaagaaattaatgagcagggacatgaggttctccgggagatgttgcataaccactccttcgtgggctgtgtgaatcctcagtgggccttggcacagcatcaaaccaagttataccttctcaacaccaccaagcttagtgaagaactgttctaccagatactcatttatgattttgccaattttggtgttctcaggttatcggagccagcaccgctctttgaccttgccatgcttgccttagatagtccagagagtggctggacagaggaagatggtcccaaagaaggacttgctgaatacattgttgagtttctgaagaagaaggctgagatgcttgcagactatttctctttggaaattgatgaggtgaattgggacgaagaaaaggaatgttttgaaagcctcagtaaagaatgcgctatgttctattccatccggaagcagtacatatctgaggagtcgaccctctcaggccagcagagtgaagtgcctggctccattccaaactcctggaagtggactgtggaacacattgtctataaagccttgcgctcacacattctgcctcctaaacatttcacagaagatggaaatatcctgcagcttgctaacctgcctgatctatacaaagtctttgagaggtgttaaatatggttatttatgcactgtgggatgtgttcttctttctctgtattccgatacaaagtgttgtatcaaagtgtgatatacaaagtgtaccaacataagtgttggtagcacttaagacttatacttgccttctgatagtattcctttatacacagtggattgattataaataaatagatgtgtcttaacataa

SEQ ID NO: 330555 - DNA, 800 bp, Homo sapiens
ttgtcaccatttgggtagcgggggggggatttgaggctacgggactctctttagaagcccgacacaggagccagcaccgctctttgaccttgccatgcttgccttagatagtccagagagtggctggacagaggaagatggtcccaaagaaggacttgctgaatacattgttgagtttctgaagaagaaggctgagatgcttgcagactatttctctttggaaattgatgaggaagggaacctgattggattaccccttctgattgacaactatgtgccccctttggagggactgcctatcttcattcttcgactagccactgaggtgaattgggacgaagaaaaggaatgttttgaaagcctcagtaaagaatgcgctatgttctattccatccggaagcagtacatatctgaggagtcgaccctctcaggccagcagagtgaagtgcctggctccattccaaactcctggaagtggactgtggaacacattgtctataaagccttgcgctcacacattctgcctcctaaacatttcacagaagatggaaatatcctgcagcttgctaacctgcctgatctatacaaagtctttgagaggtgttaaatatggttatttatgcactgtgggatgtgttcttctttctctgtattccgatacaaagtgttgtatcaaagtgtgatatacaaagtgtaccaacataagtgttggtagcacttaagacttatacttgccttctgatagtattcctttatacacagtggattgattataaataaatagatgtgtcttaacataa

SEQ ID NO: 330556 - DNA, 2608 bp, Homo sapiens
acgaggcactgaggtgattggctgaaggcacttccgttgagcatctagacgtttccttggctcttctggcgccaaaatgtcgttcgtggcaggggttattcggcggctggacgagacagtggtgaaccgcatcgcggcgggggaagttatccagcggccagctaatgctatcaaagagatgattgagaactgtttagatgcaaaatccacaagtattcaagtgattgttaaagagggaggcctgaagttgattcagatccaagacaatggcaccgggatcaggaaagaagatctggatattgtatgtgaaaggttcactactagtaaactgcagtcctttgaggatttagccagtatttctacctatggctttcgaggtgaggctttggccagcataagccatgtggctcatgttactattacaacgaaaacagctgatggaaagtgtgcatacagagcaagttactcagatggaaaactgaaagcccctcctaaaccatgtgctggcaatcaagggacccagatcacggtggaggaccttttttacaacatagccacgaggagaaaagctttaaaaaatccaagtgaagaatatgggaaaattttggaagttgttggcaggtattcagtacacaatgcaggcattagtttctcagttaaaaaacaaggagagacagtagctgatgttaggacactacccaatgcctcaaccgtggacaatattcgctccatctttggaaatgctgttagtcgagaactgatagaaattggatgtgaggataaaaccctagccttcaaaatgaatggttacatatccaatgcaaactactcagtgaagaagtgcatcttcttactcttcatcaaccatcgtctggtagaatcaacttccttgagaaaagccatagaaacagtgtatgcagcctatttgcccaaaaacacacacccattcctgtacctcagtttagaaatcagtccccagaatgtggatgttaatgtgcaccccacaaagcatgaagttcacttcctgcacgaggagagcatcctggagcgggtgcagcagcacatcgagagcaagctcctgggctccaattcctccaggatgtacttcacccagactttgctaccaggacttgctggcccctctggggagatggttaaatccacaacaagtctgacctcgtcttctacttctggaagtagtgataaggtctatgcccaccagatggttcgtacagattcccgggaacagaagcttgatgcatttctgcagcctctgagcaaacccctgtccagtcagccccaggccattgtcacagaggataagacagatatttctagtggcagggctaggcagcaagatgaggagatgcttgaactcccagcccctgctgaagtggctgccaaaaatcagagcttggagggggatacaacaaaggggacttcagaaatgtcagagaagagaggacctacttccagcaaccccagaaagagacatcgggaagattctgatgtggaaatggtggaagatgattcccgaaaggaaatgactgcagcttgtaccccccggagaaggatcattaacctcactagtgttttgagtctccaggaagaaattaatgagcagggacatgaggttctccgggagatgttgcataaccactccttcgtgggctgtgtgaatcctcagtgggccttggcacagcatcaaaccaagttataccttctcaacaccaccaagcttagtgaagaactgttctaccagatactcatttatgattttgccaattttggtgttctcaggttatcggagccagcaccgctctttgaccttgccatgcttgccttagatagtccagagagtggctggacagaggaagatggtcccaaagaaggacttgctgaatacattgttgagtttctgaagaagaaggctgagatgcttgcagactatttctctttggaaattgatgaggtgaattgggacgaagaaaaggaatgttttgaaagcctcagtaaagaatgcgctatgttctattccatccggaagcagtacatatctgaggagtcgaccctctcaggccagcagagtgaagtgcctggctccattccaaactcctggaagtggactgtggaacacattgtctataaagccttgcgctcacacattctgcctcctaaacatttcacagaagatggaaatatcctgcagcttgctaacctgcctgatctatacaaagtctttgagaggtgttaaatatggttatttatgcactgtgggatgtgttcttctttctctgtattccgatacaaagtgttgtatcaaagtgtgatatacaaagtgtaccaacataagtgttggtagcacttaagacttatacttgccttctgatagtattcctttatacacagtggattgattataaataaatagatgtgtcttaacataacgatgcggtcggttcccttaagtgaggttaaatcatgatcccgctcattgctcgctggctcgggcgttcggtgggggaagcgtttcacttactaaaggcgtaatccggtttccccaaatcggggtaccgggaagaactttgtgcaaagccagaaaggccag

SEQ ID NO: 330557 - DNA, 2031 bp, Homo sapiens
acgaggcactgaggtgattggctgaaggcacttccgttgagcatctagacgtttccttggctcttctggcgccaaaatgtcgttcgtggcaggggttattcggcggctggacgagacagtggtgaaccgcatcgcggcgggggaagttatccagcggccagctaatgctatcaaagagatgattgagaactgtttagatgcaaaatccacaagtattcaagtgattgttaaagagggaggcctgaagttgattcagatccaagacaatggcaccgggatcaggaaagaagatctggatattgtatgtgaaaggttcactactagtaaactgcagtcctttgaggatttagccagtatttctacctatggctttcgaggtgaggctttggccagcataagccatgtggctcatgttactattacaacgaaaacagctgatggaaagtgtgcatacagagcaagttactcagatggaaaactgaaagcccctcctaaaccatgtgctggcaatcaagggacccagatcacggtggaggaccttttttacaacatagccacgaggagaaaagctttaaaaaatccaagtgaagaatatgggaaaattttggaagttgttggcaggtattcagtacacaatgcaggcattagtttctcagttaaaaaacaaggagagacagtagctgatgttaggacactacccaatgcctcaaccgtggacaatattcgctccatctttggaaatgctgttagtcgagaactgatagaaattggatgtgaggataaaaccctagccttcaaaatgaatggttacatatccaatgcaaactactcagtgaagaagtgcatcttcttactcttcatcaaccatcgtctggtagaatcaacttccttgagaaaagccatagaaacagtgtatgcagcctatttgcccaaaaacacacacccattcctgtacctcagtttagaaatcagtccccagaatgtggatgttaatgtgcaccccacaaagcatgaagttcacttcctgcacgaggagagcatcctggagcgggtgcagcagcacatcgagagcaagctcctgggctccaattcctccaggatgtacttcacccagactttgctaccaggacttgctggcccctctggggagatggttaaatccacaacaagtctgacctcgtcttctacttctggaagtagtgataaggtctatgcccaccagatggttcgtacagattcccgggaacagaagcttgatgcatttctgcagcctctgagcaaacccctgtccagtcagccccaggccattgtcacagaggataagacagatatttctagtggcagggctaggcagcaagatgaggagatgcttgaactcccagcccctgctgaagtggctgccaaaaatcagagcttggagggggatacaacaaaggggacttcagaaatgtcagagaagagaggacctacttccagcaaccccagaaagagacatcgggaagattctgatgtggaaatggtggaagatgattcccgaaaggaaatgactgcagcttgtaccccccggagaaggatcattaacctcactagtgttttgagtctccaggaagaaattaatgagcagggacatgaggttctccgggagatgttgcataaccactccttcgtgggctgtgtgaatcctcagtgggccttggcacagcatcaaaccaagttataccttctcaacaccaccaagcttagtgaagaactgttctaccagatactcatttatgattttgccaattttggtgttctcaggttatcggagccagcaccgctctttgaccttgccatgcttgccttagatagtccagagagtggctggacagaggaagatggtcccaaagaaggacttgctgaatacattgttgagtttctgaagaagaaggctgagatgcttgcagactatttctctttggaaattgatgagaggtgtgacagccattcttatacttctgttgtattcttcaaataaaatttccagccggg

SEQ ID NO: 330558 - DNA, 1518 bp, Homo sapiens
  misc_feature (1498)..(1498): n is a, c, g, or t
acgaggcactgaggtgattggctgaaggcacttccgttgagcatctagacgtttccttggctcttctggcgccaaaatgtcgttcgtggcaggggttattcggcggctggacgagacagtggtgaaccgcatcgcggcgggggaagttatccagcggccagctaatgctatcaaagagatgattgagaactgtttagatgcaaaatccacaagtattcaagtgattgttaaagagggaggcctgaagttgattcagatccaagacaatggcaccgggatcaggaaagaagatctggatattgtatgtgaaaggttcactactagtaaactgcagtcctttgaggatttagccagtatttctacctatggctttcgaggtgaggctttggccagcataagccatgtggctcatgttactattacaacgaaaacagctgatggaaagtgtgcatacagagcaagttactcagatggaaaactgaaagcccctcctaaaccatgtgctggcaatcaagggacccagatcacggtggaggaccttttttacaacatagccacgaggagaaaagctttaaaaaatccaagtgaagaatatgggaaaattttggaagttgttggcaggtattcagtacacaatgcaggcattagtttctcagttaaaaaacaaggagagacagtagctgatgttaggacactacccaatgcctcaaccgtggacaatattcgctccatctttggaaatgctgttagtcgagaactgatagaaattggatgtgaggataaaaccctagccttcaaaatgaatggttacatatccaatgcaaactactcagtgaagaagtgcatcttcttactcttcatcaaccatcgtctggtagaatcaacttccttgagaaaagccatagaaacagtgtatgcagcctatttgcccaaaaacacacacccattcctgtacctcagtttagaaatcagtccccagaatgtggatgttaatgtgcaccccacaaagcatgaagttcacttcctgcacgaggagagcatcctggagcgggtgcagcagcacatcgagagcaagctcctgggctccaattcctccaggatgtacttcacccagactttgctaccaggacttgctggcccctctggggagatggttaaatccacaacaagtctgacctcgtcttctacttctggaagtagtgataaggtctatgcccaccagatggttcgtacagattcccgggaacagaagcttgatgcatttctgcagcctctgagcaaacccctgtccagtcagccccaggccattgtcacagaggataagacagatatttctagtggcagggctaggcagcaagatgaggagatgcttgaactcccagcccctgctgaagtggctgccaaaaatcagagcttggagggggatacaacaaaggggacttcagaaatgtcagagaagagaggacctacttccagcaaccccagaaaggagacattnggaaaattcctggatgttgg

SEQ ID NO: 330559 - DNA, 874 bp, Homo sapiens
acgaggcactgaggtgattggctgaaggcacttccgttgagcatctagacgtttccttggctcttctggcgccaaaatgtcgttcgtggcaggggttattcggcggctggacgagacagtggtgaaccgcatcgcggcgggggaagttatccagcggccagctaatgctatcaaagagatgattgagaactgtttagatgcaaaatccacaagtattcaagtgattgttaaagagggaggcctgaagttgattcagatccaagacaatggcaccgggatcaggaaagaagatctggatattgtatgtgaaaggttcactactagtaaactgcagtcctttgaggatttagccagtatttctacctatggctttcgaggtgaggctttggccagcataagccatgtggctcatgttactattacaacgaaaacagctgatggaaagtgtgcatacagagcaagttactcagatggaaaactgaaagcccctcctaaaccatgtgctggcaatcaagggacccagatcacggtgcaggacctttttcactacatacccacgaggagcaaaccttctacaatatccaactgaagtatatggtaaattactagaaattgttgtcgggtattcactactcgatgccagccttagtttctcagttaaatcacaaggaagttgattctaccagacgatggttgatgaagagtaagaagatgcacttcttcactgagtagtttgcattggatactgaagcctttagtcttttccagatgcaaccttaaaatcagtgacaagaaacattccaaacaagcaacagtctcagaaatgtaaactggccaagtggaaatgttaaagggatcctctaggtcgcccgcg

SEQ ID NO: 330560 - DNA, 855 bp, Homo sapiens
catatgtctgtattacaattcagagaaggaaaaaagtaacattcaaagaaggaaggaaggaaaaagggaaagagagagggagggagggaggcaggcaggcaggctgtaaaaggaatctgcatcacacagcactggggagaagacagggggctcttccgtgaggtgtggcgaagttgagtcctcatgatggctgcagacctgggtctctgcaaactaattctcggcacacaaagagcagaatctctagtccaagagttaaattcagaaaaccaatttattgattcataatgagaagtaaaaatggatatgaaaacttacataaattaatacatgaaataattaaaaggaaagtatgtgtgtagtttccaaaggttgtttcaataagaatttttttcaaatacaaggtaagactttttagtattgggctaaatgggttttaagatgaaaaacattatgatgccaaaaagcaatgttatatactgccaaaacagtgtgctagatcaagaagatagtagttatgaataaataagccctttaaaatagctcatcacaatatataaaataacaactgacagcattacaagagaacatagagacaacaaaatttattgcccaagattttcacaaagccctattagagactggtagattagagggacaaaaaaaaaaatcagaacaaaaaagcataaatgtatacaaaatttgattgacaagattaataaaaatcccagagcaaaatatatgtgtgtgtggagcgaagctttcacaaccacggatgatggacgaggttggaagctacaatgagcccaaacaatccacccagcttagtatgttccctgagcacaaagcagtgaa

SEQ ID NO: 330561 - DNA, 417 bp, Homo sapiens
ctgggctcctgggtctgagggaagaggggctgggggtctggactcctgggtctgagggaggaggggctggggtactggactcctgggtctgagggaaggagtgggctcaggaccaaaactctagtttcctgaagaggaaaggttcctaggatttctgggtctccagtggggcctggaactctacctaggccccttagttttaaccttgatttcttcctttcagactttgctgttccagccaacatgcgctgtggggtgcagacacccactgcctgatctcacttctgtcagatgctcccatccactattaatgcactaggtgggaggagagggcggcaatgacactgcacctctcctttcccaccgcattccctggagctccctaaataaaactttttttaacgtgaaaaaaaaaaa

SEQ ID NO: 330562 - DNA, 416 bp, Homo sapiens
  misc_feature (50)..(50): n is a, c, g, or t
  misc_feature (210)..(210): n is a, c, g, or t
  misc_feature (212)..(212): n is a, c, g, or t
cgtcaaagacacagcactctgtgggtactcaaatttaatcaatagttcancttatttacaaactctcaagcagctcattttatgttagttgcacaatctggaggtctggagttcttcacatgaaatttaataaattatcatgcaagctcatttttattcccattttttttacccagggagaatcagtctaccagggcaaataactggctntncgaattcggcactttgctgttccagccaacatgcgctgtggggtgcagacacccactgcctgatctcacttctgtcagatgctcccatccactattaatgcactaggtgggaggagagggcggcaatgacactgcacctctcctttcccaccgcattccctggagctccctaaataaaactttttttaacgtgaaaaaaaaaaa

SEQ ID NO: 330563 - DNA, 834 bp, Homo sapiens
tcccggggtcagtgccgtagcgcccggctcctgcaggcgctcggcctccgctcattcctgaccccgcagtgggcgcgatggcggaggctgtactgagggtcgcccggcggcagctgagccagcgcggcgggtctggagcccccatcctcctgcggcagatgttcgagcctgtgagctgcaccttcacgtacctgctgggtgacagagagtcccgggaggccgttctgatcgacccagtcctggaaacagcgcctcgggatgcccagctgatcaaggagctggggctgcggctgctctatgctggcgttggagaccagggccagccctggccacaccccaggctgtgtcaccttcgtcctgaatgaccacagcatggccttcactggagatgccctgttgatccgtgggtgtgggcggacagacttccagcaaggctgtgccaagaccttgtaccactcggtccatgaaaagatcttcacacttccaggagactgtctgatctaccctgctcacgattaccatgggttcacagtgtccaccgtggaggaggagaggactctgaaccctcggctcaccctcagctgtgaggagtttgtcaaaatcatgggcaacctgaacttgcctaaacctcagcagatagactttgctgttccagccaacatgcgctgtggggtgcagacacccactgcctgatctcacttctgtcagatgctcccatccactattaatgcactaggtgggaggagagggcggcaatgacactgcacctctcctttcccaccgcattccctggagctccctaaataaaactttttttaacgtgaaaaaaaaaaa

SEQ ID NO: 330564 - DNA, 983 bp, Homo sapiens
tcccggggtcagtgccgtagcgcccggctcctgcaggcgctcggcctccgctcattcctgaccccgcagtgggcgcgatggcggaggctgtactgagggtcgcccggcggcagctgagccagcgcggcgggtctggagcccccatcctcctgcggcagatgttcgagcctgtgagctgcaccttcacgtacctgctgggtgacagagagtcccgggaggccgttctgatcgacccagtcctggaaacagcgcctcgggatgcccagctgatcaaggagctggggctgcggctgctctatgctgtgaatacccactgccacgcggaccacattacaggctcggggctgctccgttccctcctccctggctgccagtctgtcatctcccgccttagtggggcccaggctgacttacacattgaggatggagactccatccgcttcgggcgcttcgcgttggagaccagggccagccctggccacaccccaggctgtgtcaccttcgtcctgaatgaccacagcatggccttcactggagatgccctgttgatccgtgggtgtgggcggacagacttccagcaaggctgtgccaagaccttgtaccactcggtccatgaaaagatcttcacacttccaggagactgtctgatctaccctgctcacgattaccatgggttcacagtgtccaccgtggaggaggagaggactctgaaccctcggctcaccctcagctgtgaggagtttgtcaaaatcatgggcaacctgaacttgcctaaacctcagcagatagactttgctgttccagccaacatgcgctgtggggtgcagacacccactgcctgatctcacttctgtcagatgctcccatccactattaatgcactaggtgggaggagagggcggcaatgacactgcacctctcctttcccaccgcattccctggagctccctaaataaaactttttttaacgtgaaaaaaaaaaa

SEQ ID NO: 330565 - DNA, 492 bp, Homo sapiens
ctaggagcaacaggctacagcataagtgtgcagtaggctatacctaggtttgtgtgagatgttcatacaactacaagatcacctaacgacatacttctcagaatgtatctccattgctaagcaacacatgaccgtacaaccagcataaacaaattcaagatgtatctactaatccttggtaagcacacaatggaactgaaggaacagaacggcatgggtagtaaatgctcggcagggaccaggcgcagtggctcacccctgtaatcccagcactttgggaggcggaggtggcaagatcatttgaggtcaggagtctgagaccagcctgaccgacatggtgaaatcccatctctactaaaaatagtaagaagtagctgggtgtatggtggcaaacgcctgtgatcccaaccactcgggaggctgatgcagaacaatcgcttgaacctgggaggcggaggttgcaatgagctgagacggcgccactgcactcca

SEQ ID NO: 330566 - DNA, 573 bp, Homo sapiens
gtgccatttgtgtctaacctcgcacctatggtagcactttatatgcctggcatgagggtagtgggctggtagtagccttgacctttgtgattcttgaaggccaggccacggagttctcacttccaagccagcatcaacaaaaagtcacacgcaacgaaaaaaattctctaatgaccaaagtaaaattgaaaagcttgatgccactgctaaatgaaaaatacattatctctctcttccctccttatcccttttctcctcctcaacccagaatcttatccatgcttagctaaatccactttcccttcctgcaagggaaaagacaggaatgctctttgtttcaaaggtctagagaaaggcgcaataaatttcactcctagaggccctgatgtgctgctggagacgagaatagggacaaagcaggccagcagcaatggagaccaggcccagaacagccgatgggagagaaactgggaggtgagcatttggcggaaggctacaaggaggacaaggacaagtgagattccaaaaacaatccatcagagatgcaatagaggatgaggtcatttgtatgac

SEQ ID NO: 330567 - DNA, 1031 bp, Homo sapiens
cttttccacaggggaaattatttcataataaaaagaaagcaagctggacaggtaggcaagcttgaggtccaatcataggacgcttaagttagtaaatttgaaatcctgaggtccttgaccagtggatggtgggtactgaaggagggtatgggaaatgctggtatagcaaatagtatgcatcccattttcctctgcctgccttttagctcctcaacactgagttatgttccagtgatccttttctccctaatttctcccatgagagccagtctgtagttggtttttcaacaaacatctgtgaaagaaaaccgaagttttaaatgacttctcatggttattttttttcctttctcttgcaggacattggggacacattgagcaggtatagttttctgtttccctagtgttaaatcaaatatgagaagactgtctccttcacatttgtaaatcctgaaaggagccctgagcctgaggatggacatcttatcaaattgacacatatccctgaagagagtcactagtatacaaagaattagatgaaccacagctctactcagtaaaattcaggaagtagggggttcatgtgggaggctgccggtggattaggggtatgaggacacttccatggagagggtgtggccttacagggacctgggctgaatataagggtagtttatgtctattgcttcctatacatttcagaatcctttcccccttcattatctcattttttttttttctgtaatgggggaaataaagcctaagaaaggtgtgactggcctgcatttacataattactgatgagccacctggattctggctcttattcttactcttgctatttctctatgttccatcaaaaaaaaaaaagtgaggaagaactccctggcagctggaacacgatcaaagagggagagcttggagggggcagtaagccagggcaaagttgttttgcaggatggatgacgaggcaagtgggatgggccttgggaagctcatgtttggtgtaagaatgccttcaggggtggaaa

SEQ ID NO: 330568 - DNA, 828 bp, Homo sapiens
gggtttacgctgccgccggcatccgctcggacgcggccacgttgtcttgcgcgctttgcccgcctggccctgggactctgaccctcggctaccctttcctgccccactagcgtggccgcgagcctcggtgagccggccgtattcccgctctcgcttagggggcacaggcgcaggcatcggcccggccactccaagccttcggtgtgctgctgtggctgctgtcttgggatactggtgccctgtgtgatggctgccatgccctcctgtcctgccctgtgtgcactctcatgtgaagcagctgaagcctgtgagatgatgctgcctggatgatgtttggtgctcatgttgcatgatgcttctgtgcatgccgtgtgtgtccctatgaccctgttgctgctccctctgcatgtgcctgtgctgctcattgtgcctctctgtgtgatgttgttgggccagatggtgctcttgcatgtcatggatgaaccatccttagccgcctgttgttgctcttgcaatggtatctttctgtcgagatgtcccattgtattgtctctgtactagctgtgccgagtatacgagtactggtatgctggctgtagcgctctgtccctgcttagctaggtgtgcaactgtgccatgatgatcgtagatctgttgttctgattgccctgtcatgttgccctgtgtgattgagccttatcctcttgtatgtatgtgtcacatttgcgtgcctcatgtctgtgcaccgtgtgtctcaatcttgtgactccaatcttgtgtaatacgctgcttgctgcacctgatgctgtgtctgtctgggtgcccctg

SEQ ID NO: 330569 - DNA, 569 bp, Homo sapiens
aaaggaagaaagaaaccatgtactgatcagcaatgtgcggttcctgagaaggcaggtggaaatgagaactaaagtacatatgccaggaattagtgtcagagagtcttctgttgtatgggaagaaatgattgtttcagagtatgggaaagacagttggtttgcgagaactagtaggagtatttggtcagtgaacatctatttatagtgtaaccattctgccctgggcaacaagcgaaactccatctcaaaaaaaaaaaaaatttactcatgttttttaaatttagggctgaaagaatcaggattcctgaaccttggatcacacctccagatttgcaagagaaaatccacatttttgcccaaaaatgtctattcttgacggagagtctaaagcagttcacagaaaaaatgcagacaacgctaaaccaacatacacgggcatgccaccagggtgtgtcatcgtcaccatgggtcggagcacacgaagtacaagaggaccatcctaccagtggggccacgtctcaacggtttatcctaccatttttctgcacgccatcctgaagacagcaggg

SEQ ID NO: 330570 - DNA, 3325 bp, Homo sapiens
gggtttacgctgccgccggcatccgctcggacgcggccacgttgtcttgcgcgctttgcccgcctggccctgggactctgaccctcggctaccctttcctgccccactagcgtggccgcgagcctcggtgagccggccgtattcccgctctcgcttagggggcacaggcgcaggcatcggcccggccactccaagccttcggtgcgcgggcgcgtctgggatacgggcccgggaggcgccgccctccgtccgcccggtgcctctcaggaacagcgaaccggagagagcgccggagagttgggctcagtgcggagctcggcgccggggcccatgcccgtgcgcccccgcaggccggcgccatggcctccgggagtgtggccgagtgcctgcagcaggagaccacctgccccgtgtgcctgcagtacttcgcagagcccatgatgctcgactgcggccataacatctgttgcgcgtgcctcgcccgctgctggggcacggcagagactaacgtgtcgtgcccgcagtgccgggagaccttcccgcagaggcacatgcggcccaaccggcacctggccaacgtgacccaactggtaaagcagctgcgcaccgagcggccgtcggggcccggcggcgagatgggcgtgtgcgagaagcaccgcgagcccctgaagctgtactgcgaggaggaccagatgcccatctgcgtggtgtgcgaccgctcccgcgagcaccgcggccacagcgtgctgccgctcgaggaggcggtggagggcttcaaggagcaaatccagaaccagctcgaccatttaaaaagagtgaaagatttaaagaagagacgtcgggcccagggggaacaggcacgagctgaactcttgagcctaacccagatggagagggagaagattgtttgggagtttgagcagctgtatcactccttaaaggagcatgagtatcgcctcctggcccgccttgaggagctagacttggccatctacaatagcatcaatggtgccatcacccagttctcttgcaacatctcccacctcagcagcctgatcgctcagctagaagagaagcagcagcagcccaccagggagctcctgcaggacattggggacacattgagcagggctgaaagaatcaggattcctgaaccttggatcacacctccagatttgcaagagaaaatccacatttttgcccaaaaatgtctattcttgacggagagtctaaagcagttcacagaaaaaatgcagtcagatatggagaaaatccaagaattaagagaggctcagttatactcagtggacgtgactctggacccagacacggcctaccccagcctgatcctctctgataatctgcggcaagtgcggtacagttacctccaacaggacctgcctgacaaccccgagaggttcaatctgtttccctgtgtcttgggctctccatgcttcatcgccgggagacattattgggaggtagaggtgggagataaagccaagtggaccataggtgtctgtgaagactcagtgtgcagaaaaggtggagtaacctcagccccccagaatggattctgggcagtgtctttgtggtatgggaaagaatattgggctcttacctccccaatgactgccctacccctgcggaccccgctccagcgggtggggattttcttggactatgatgctggtgaggtctccttctacaacgtgacagagaggtgtcacaccttcactttctctcatgctaccttttgtgggcctgtccggccctacttcagtctgagttactcgggagggaaaagtgcagctcctctgatcatctgccccatgagtgggatagatgggttttctggccatgttgggaatcatggtcattccatggagacctccccttgaggaggtgaattcaggccaaaagggctgttggctgtaatcctacgccaggcacaaggcatcttgttgccttgccacgtcctgtcacagctgggtatccttaccatgttccacgcccttgcagtgggagacaggatgtccatgttctctaccatccttttccttcccatgcagattgtgaaatgtaatgagatgtatcaagatatcctagaaataaaaaccagatgtccacctccagtgtttcatactttctggttttacacatcgctggagggataaagagtatggataatctttggatttggagagccgttcaagatacttccagcttcttggctcagcctggcttcctctggttcagccccacataatgattatggctatttgctgtcatttctgggctagggctcctttctaacaacctagactggaataaggccctgtcagcatggctccctttatcccagttttccgtctgggaacagtacctctgcccctgattcccaatgtgccatagttttattaactccattaaagaagcctgtatgtgttttggttagttacagttattttacaataatggtgggtaatggccccacctctgttatgagataatgttctaatcaatgtctctgcctttgtatcttttctgagggctttgtctgttctcttcattctaatgaaaggtgtattctagtgctgggtgcatatcatccaggataatattctgcccaactccatcctctgttactagatcccttaccagtcacatttgtggactggtggccagtcgtataccatccctggaaggattctgggacaatattccagggattcattgacttcttggctccttttctccatttcctttgggggaagggggaattgaccatgcttaagtgcatcctatcaaggggcagctccgtccccatggccattggatcatgagacactctgaagtcagaaggctggggcagatcacttcaagcaagcccccatgatggttctcagtcctgcttctctgtgggtacgtgcccctctgtttaaaaataaactgaatatggatgtttaaaaaaaaaaaaaaaaaaaaaaaaaaaaaccgcgggggcgccctatgggcgggggggggaaaaagaggggaaaggaaaggggcccggggggcacacagacgggattccacgaggacaccacagatttttctggtggacaacaaggggggggaaacatcgcggggggggccacacatagaggggagaggaggagaatacaatatcgcggaacaccgccgggggagacacccggggtgtaaggatcctcgggagaaaaacacaaaacaaacaaaacaacacagcaacaaacaacgagcacacacacaaccaagagacagacaagaacaacaacacacaacaaaaacacgacacaaacaa

SEQ ID NO: 330571 - DNA, 2491 bp, Homo sapiens
gggtttacgctgccgccggcatccgctcggacgcggccacgttgtcttgcgcgctttgcccgcctggccctgggactctgaccctcggctaccctttcctgccccactagcgtggccgcgagcctcggtgagccggccgtattcccgctctcgcttagggggcacaggcgcaggcatcggcccggccactccaagccttcggtgcgcgggcgcgtctgggatacgggcccgggaggcgccgccctccgtccgcccggtgcctctcaggaacagcgaaccggagagagcgccggagagttgggctcagtgcggagctcggcgccggggcccatgcccgtgcgcccccgcaggccggcgccatggcctccgggagtgtggccgagtgcctgcagcaggagaccacctgccccgtgtgcctgcagtacttcgcagagcccatgatgctcgactgcggccataacatctgttgcgcgtgcctcgcccgctgctggggcacggcagagactaacgtgtcgtgcccgcagtgccgggagaccttcccgcagaggcacatgcggcccaaccggcacctggccaacgtgacccaactggtaaagcagctgcgcaccgagcggccgtcggggcccggcggcgagatgggcgtgtgcgagaagcaccgcgagcccctgaagctgtactgcgaggaggaccagatgcccatctgcgtggtgtgcgaccgctcccgcgagcaccgcggccacagcgtgctgccgctcgaggaggcggtggagggcttcaaggagcaaatccagaaccagctcgaccatttaaaaagagtgaaagatttaaagaagagacgtcgggcccagggggaacaggcacgagctgaactcttgagcctaacccagatggagagggagaagattgtttgggagtttgagcagctgtatcactccttaaaggagcatgagtatcgcctcctggcccgccttgaggagctagacttggccatctacaatagcatcaatggtgccatcacccagttctcttgcaacatctcccacctcagcagcctgatcgctcagctagaagagaagcagcagcagcccaccagggagctcctgcaggacattggggacacattgagcagggctgaaagaatcaggattcctgaaccttggatcacacctccagatttgcaagagaaaatccacatttttgcccaaaaatgtctattcttgacggagagtctaaagcagttcacagaaaaaatgcagtcagatatggagaaaatccaagaattaagagaggctcagttatactcagtggacgtgactctggacccagacacggcctaccccagcctgatcctctctgataatctgcggcaagtgcggtacagttacctccaacaggacctgcctgacaaccccgagaggttcaatctgtttccctgtgtcttgggctctccatgcttcatcgccgggagacattattgggaggtagaggtgggagataaagccaagtggaccataggtgtctgtgaagactcagtgtgcagaaaaggtggagtaacctcagccccccagaatggattctgggcagtgtctttgtggtatgggaaagaatattgggctcttacctccccaatgactgccctacccctgcggaccccgctccagcgggtggggattttcttggactatgatgctggtgaggtctccttctacaacgtgacagagaggtgtcacaccttcactttctctcatgctaccttttgtgggcctgtccggccctacttcagtctgagttactcgggagggaaaagtgcagctcctctgatcatctgccccatgagtgggatagatgggttttctggccatgttgggaatcatggtcattccatggagacctccccttgaggaggtgaattcaggccaaaagggctgttggctgtaatcctacgccaggcacaaggcatcttgttgccttgccacgtcctgtcacagctgggtatccttaccatgttccacgcccttgcagtgggagacaggatgtccatgttctctaccatccttttccttcccatgcagattgtgaaatgtaatgagatgtatcaagatatcctagaaataaaaaccagatgtccacctccaaaaaaaaaaaaaaaaaaaaaaaaaaaaaccgcgggggcgccctatgggcgggggggggaaaaagaggggaaaggaaaggggcccggggggcacacagacgggattccacgaggacaccacagatttttctggtggacaacaaggggggggaaacatcgcggggggggccacacatagaggggagaggaggagaatacaatatcgcggaacaccgccgggggagacacccggggtgtaaggatcctcgggagaaaaacacaaaacaaacaaaacaacacagcaacaaacaacgagcacacacacaaccaagagacagacaagaacaacaacacacaacaaaaacacgacacaaacaa

SEQ ID NO: 330572 - DNA, 2689 bp, Homo sapiens
gggtttacgctgccgccggcatccgctcggacgcggccacgttgtcttgcgcgctttgcccgcctggccctgggactctgaccctcggctaccctttcctgccccactagcgtggccgcgagcctcggtgagccggccgtattcccgctctcgcttagggggcacaggcgcaggcatcggcccggccactccaagccttcggtgcgcgggcgcgtctgggatacgggcccgggaggcgccgccctccgtccgcccggtgcctctcaggaacagcgaaccggagagagcgccggagagttgggctcagtgcggagctcggcgccggggcccatgcccgtgcgcccccgcaggccggcgccatggcctccgggagtgtggccgagtgcctgcagcaggagaccacctgccccgtgtgcctgcagtacttcgcagagcccatgatgctcgactgcggccataacatctgttgcgcgtgcctcgcccgctgctggggcacggcagagactaacgtgtcgtgcccgcagtgccgggagaccttcccgcagaggcacatgcggcccaaccggcacctggccaacgtgacccaactggtaaagcagctgcgcaccgagcggccgtcggggcccggcggcgagatgggcgtgtgcgagaagcaccgcgagcccctgaagctgtactgcgaggaggaccagatgcccatctgcgtggtgtgcgaccgctcccgcgagcaccgcggccacagcgtgctgccgctcgaggaggcggtggagggcttcaaggagcaaatccagaaccagctcgaccatttaaaaagagtgaaagatttaaagaagagacgtcgggcccagggggaacaggcacgagctgaactcttgagcctaacccagatggagagggagaagattgtttgggagtttgagcagctgtatcactccttaaaggagcatgagtatcgcctcctggcccgccttgaggagctagacttggccatctacaatagcatcaatggtgccatcacccagttctcttgcaacatctcccacctcagcagcctgatcgctcagctagaagagaagcagcagcagcccaccagggagctcctgcaggacattggggacacattgagcagggctgaaagaatcaggattcctgaaccttggatcacacctccagatttgcaagagaaaatccacatttttgcccaaaaatgtctattcttgacggagagtctaaagcagttcacagaaaaaatgcagtcagatatggagaaaatccaagaattaagagaggctcagttatactcagtggacgtgactctggacccagacacggcctaccccagcctgatcctctctgataatctgcggcaagtgcggtacagttacctccaacaggacctgcctgacaaccccgagaggtctccttctacaacgtgacagagaggtgtcacaccttcactttctctcatgctaccttttgtgggcctgtccggccctacttcagtctgagttactcgggagggaaaagtgcagctcctctgatcatctgccccatgagtgggatagatgggttttctggccatgttgggaatcatggtcattccatggagacctccccttgaggaggtgaattcaggccaaaagggctgttggctgtaatcctacgccaggcacaaggcatcttgttgccttgccacgtcctgtcacagctgggtatccttaccatgttccacgcccttgcagtgggagacaggatgtccatgttctctaccatccttttccttcccatgcagattgtgaaatgtaatgagatgtatcaagatatcctagaaataaaaaccagatgtccacctccagtgtttcatactttctggttttacacatcgctggagggataaagagtatggataatctttggatttggagagccgttcaagatacttccagcttcttggctcagcctggcttcctctggttcagccccacataatgattatggctatttgctgtcatttctgggctagggctcctttctaacaacctagactggaataaggccctgtcagcatggctccctttatcccagttttccgtctgggaacagtacctctgcccctgattcccaatgtgccatagttttattaactccattaaagaagcctgtatgtgttttggttagttacagttattttacaataatggtgggtaatggccccacctctgttatgagataatgttctaatcaatgtctctgcctttgtatcttttctgagggctttgtctgttctcttcattctaatgaaaggtgtattctagtgctgggtgcatatcatccaggataatattctgcccaactccatcctctgttactagatcccttaccagtcacatttgtggactggtggccagtcgtataccatccctggaaggattctgggacaatattccagggattcattgacttcttggctccttttctccatttcctttgggggaagggggaattgaccatgcttaagtgcatcctatcaaggggcagctccgtccccatggccattggatcatgagacactctgaagtcagaaggctggggcagatcacttcaagcaagcccccatgatggttctcagtcctgcttctctgtgggtacgtgcccctctgtttaaaaataaactgaatatggatgttta

SEQ ID NO: 330573 - DNA, 2382 bp, Homo sapiens
tttttgagtacttagtatttgaaaagctgtgagctaggtgctttggggggtatgagaatgagtacagtatcctattttggtctagaggatcatagctcaggaagagaaggtgggaaaagctgtagtggctgattttaaagactgtccgtgtacgctagacagtttaacttagcccctgtcctagttcctggaaggtcatggaattgggaaaaagaatttacttgggccggacgtggtggctcacgcctgtaatcccagcactttgggaggccgaggcgggaggatcacctgaggtcaggagttcgagaccagcctgaccagtatggagaaaccccatctctactaaaaacacaaaattagctgggtatggtggcgcatgcctgtaatcccagctactcaggaggctgaggcaggagaatcgcttgaacctgggaggcagaggttgcggtgggccgagatggcgccattgcactccagcctgggcaacaagcgaaactccatctcaaaaaaaaaaaaaatttactcatgttttttaaatttagggctgaaagaatcaggattcctgaaccttggatcacacctccagatttgcaagagaaaatccacatttttgcccaaaaatgtctattcttgacggagagtctaaagcagttcacagaaaaaatgcagtcagatatggagaaaatccaagaattaagagaggctcagttatactcagtggacgtgactctggacccagacacggcctaccccagcctgatcctctctgataatctgcggcaagtgcggtacagttacctccaacaggacctgcctgacaaccccgagaggttcaatctgtttccctgtgtcttgggctctccatgcttcatcgccgggagacattattgggaggtagaggtgggagataaagccaagtggaccataggtgtctgtgaagactcagtgtgcagaaaaggtggagtaacctcagccccccagaatggattctgggcagtgtctttgtggtatgggaaagaatattgggctcttacctccccaatgactgccctacccctgcggaccccgctccagcgggtggggattttcttggactatgatgctggtgaggtctccttctacaacgtgacagagaggtgtcacaccttcactttctctcatgctaccttttgtgggcctgtccggccctacttcagtctgagttactcgggagggaaaagtgcagctcctctgatcatctgccccatgagtgggatagatgggttttctggccatgttgggaatcatggtcattccatggagacctccccttgaggaggtgaattcaggccaaaagggctgttggctgtaatcctacgccaggcacaaggcatcttgttgccttgccacgtcctgtcacagctgggtatccttaccatgttccacgcccttgcagtgggagacaggatgtccatgttctctaccatccttttccttcccatgcagattgtgaaatgtaatgagatgtatcaagatatcctagaaataaaaaccagatgtccacctccagtgtttcatactttctggttttacacatcgctggagggataaagagtatggataatctttggatttggagagccgttcaagatacttccagcttcttggctcagcctggcttcctctggttcagccccacataatgattatggctatttgctgtcatttctgggctagggctcctttctaacaacctagactggaataaggccctgtcagcatggctccctttatcccagttttccgtctgggaacagtacctctgcccctgattcccaatgtgccatagttttattaactccattaaagaagcctgtatgtgttttggttagttacagttattttacaataatggtgggtaatggccccacctctgttatgagataatgttctaatcaatgtctctgcctttgtatcttttctgagggctttgtctgttctcttcattctaatgaaaggtgtattctagtgctgggtgcatatcatccaggataatattctgcccaactccatcctctgttactagatcccttaccagtcacatttgtggactggtggccagtcgtataccatccctggaaggattctgggacaatattccagggattcattgacttcttggctccttttctccatttcctttgggggaagggggaattgaccatgcttaagtgcatcctatcaaggggcagctccgtccccatggccattggatcatgagacactctgaagtcagaaggctggggcagatcacttcaagcaagcccccatgatggttctcagtcctgcttctctgtgggtacgtgcccctctgtttaaaaataaactgaatatggatgttta

SEQ ID NO: 330574 - DNA, 2235 bp, Homo sapiens
gattgaatttggctatataagataggaaacccaaaattttattggcttaaggcttaaacataataaaagaaatgtgcaggttgggtgcggtggtcacgcctgtaatcccagcactttgggaggccgaggcgggaggatcacctgaggtcaggagttcgagaccagcctgaccagtatggagaaaccccatctctactaaaaacacaaaattagctgggtatggtggcgcatgcctgtaatcccagctactcaggaggctgaggcaggagaatcgcttgaacctgggaggcagaggttgcggtgggccgagatggcgccattgcactccagcctgggcaacaagcgaaactccatctcaaaaaaaaaaaaaatttactcatgttttttaaatttagggctgaaagaatcaggattcctgaaccttggatcacacctccagatttgcaagagaaaatccacatttttgcccaaaaatgtctattcttgacggagagtctaaagcagttcacagaaaaaatgcagtcagatatggagaaaatccaagaattaagagaggctcagttatactcagtggacgtgactctggacccagacacggcctaccccagcctgatcctctctgataatctgcggcaagtgcggtacagttacctccaacaggacctgcctgacaaccccgagaggttcaatctgtttccctgtgtcttgggctctccatgcttcatcgccgggagacattattgggaggtagaggtgggagataaagccaagtggaccataggtgtctgtgaagactcagtgtgcagaaaaggtggagtaacctcagccccccagaatggattctgggcagtgtctttgtggtatgggaaagaatattgggctcttacctccccaatgactgccctacccctgcggaccccgctccagcgggtggggattttcttggactatgatgctggtgaggtctccttctacaacgtgacagagaggtgtcacaccttcactttctctcatgctaccttttgtgggcctgtccggccctacttcagtctgagttactcgggagggaaaagtgcagctcctctgatcatctgccccatgagtgggatagatgggttttctggccatgttgggaatcatggtcattccatggagacctccccttgaggaggtgaattcaggccaaaagggctgttggctgtaatcctacgccaggcacaaggcatcttgttgccttgccacgtcctgtcacagctgggtatccttaccatgttccacgcccttgcagtgggagacaggatgtccatgttctctaccatccttttccttcccatgcagattgtgaaatgtaatgagatgtatcaagatatcctagaaataaaaaccagatgtccacctccagtgtttcatactttctggttttacacatcgctggagggataaagagtatggataatctttggatttggagagccgttcaagatacttccagcttcttggctcagcctggcttcctctggttcagccccacataatgattatggctatttgctgtcatttctgggctagggctcctttctaacaacctagactggaataaggccctgtcagcatggctccctttatcccagttttccgtctgggaacagtacctctgcccctgattcccaatgtgccatagttttattaactccattaaagaagcctgtatgtgttttggttagttacagttattttacaataatggtgggtaatggccccacctctgttatgagataatgttctaatcaatgtctctgcctttgtatcttttctgagggctttgtctgttctcttcattctaatgaaaggtgtattctagtgctgggtgcatatcatccaggataatattctgcccaactccatcctctgttactagatcccttaccagtcacatttgtggactggtggccagtcgtataccatccctggaaggattctgggacaatattccagggattcattgacttcttggctccttttctccatttcctttgggggaagggggaattgaccatgcttaagtgcatcctatcaaggggcagctccgtccccatggccattggatcatgagacactctgaagtcagaaggctggggcagatcacttcaagcaagcccccatgatggttctcagtcctgcttctctgtgggtacgtgcccctctgtttaaaaataaactgaatatggatgttta

SEQ ID NO: 330575 - DNA, 2222 bp, Homo sapiens
cttttccacaggggaaattatttcataataaaaagaaagcaagctggacaggtaggcaagcttgaggtccaatcataggacgcttaagttagtaaatttgaaatcctgaggtccttgaccagtggatggtgggtactgaaggagggtatgggaaatgctggtatagcaaatagtatgcatcccattttcctctgcctgccttttagctcctcaacactgagttatgttccagtgatccttttctccctaatttctcccatgagagccagtctgtagttggtttttcaacaaacatctgtgaaagaaaaccgaagttttaaatgacttctcatggttattttttttcctttctcttgcaggacattggggacacattgagcagggctgaaagaatcaggattcctgaaccttggatcacacctccagatttgcaagagaaaatccacatttttgcccaaaaatgtctattcttgacggagagtctaaagcagttcacagaaaaaatgcagtcagatatggagaaaatccaagaattaagagaggctcagttatactcagtggacgtgactctggacccagacacggcctaccccagcctgatcctctctgataatctgcggcaagtgcggtacagttacctccaacaggacctgcctgacaaccccgagaggttcaatctgtttccctgtgtcttgggctctccatgcttcatcgccgggagacattattgggaggtagaggtgggagataaagccaagtggaccataggtgtctgtgaagactcagtgtgcagaaaaggtggagtaacctcagccccccagaatggattctgggcagtgtctttgtggtatgggaaagaatattgggctcttacctccccaatgactgccctacccctgcggaccccgctccagcgggtggggattttcttggactatgatgctggtgaggtctccttctacaacgtgacagagaggtgtcacaccttcactttctctcatgctaccttttgtgggcctgtccggccctacttcagtctgagttactcgggagggaaaagtgcagctcctctgatcatctgccccatgagtgggatagatgggttttctggccatgttgggaatcatggtcattccatggagacctccccttgaggaggtgaattcaggccaaaagggctgttggctgtaatcctacgccaggcacaaggcatcttgttgccttgccacgtcctgtcacagctgggtatccttaccatgttccacgcccttgcagtgggagacaggatgtccatgttctctaccatccttttccttcccatgcagattgtgaaatgtaatgagatgtatcaagatatcctagaaataaaaaccagatgtccacctccagtgtttcatactttctggttttacacatcgctggagggataaagagtatggataatctttggatttggagagccgttcaagatacttccagcttcttggctcagcctggcttcctctggttcagccccacataatgattatggctatttgctgtcatttctgggctagggctcctttctaacaacctagactggaataaggccctgtcagcatggctccctttatcccagttttccgtctgggaacagtacctctgcccctgattcccaatgtgccatagttttattaactccattaaagaagcctgtatgtgttttggttagttacagttattttacaataatggtgggtaatggccccacctctgttatgagataatgttctaatcaatgtctctgcctttgtatcttttctgagggctttgtctgttctcttcattctaatgaaaggtgtattctagtgctgggtgcatatcatccaggataatattctgcccaactccatcctctgttactagatcccttaccagtcacatttgtggactggtggccagtcgtataccatccctggaaggattctgggacaatattccagggattcattgacttcttggctccttttctccatttcctttgggggaagggggaattgaccatgcttaagtgcatcctatcaaggggcagctccgtccccatggccattggatcatgagacactctgaagtcagaaggctggggcagatcacttcaagcaagcccccatgatggttctcagtcctgcttctctgtgggtacgtgcccctctgtttaaaaataaactgaatatggatgttta

SEQ ID NO: 330576 - DNA, 3220 bp, Homo sapiens
ttttttttattttttgggaaattaattatagcatcaaaacctgaatttatgtggtactgtttagagcctttatccttcattatgtaaacattcatgaatctcacagcagatctattaatacttcattatagaatgctgcctgtctaaaacctgtaatattctgaattctgtgaaacttggggcccctggaattttcagaataagggatgatgagcgtgtaagcaatcctcttgcctcagcttcccaaagtgctgagattacaggcatgagccacatatccagcccattatcagtgtttttgaagcaggaaaacacttgatgatagcaagatgctgtaatactaaatgccagaggagatgacatgggtcatacacagttttagatttcagaacagtaagtgtaatggcctgggcagattaagaaaaacttggaggatgtgtgttttggactggacattagaagaagatgaatagagcttcgatgtgcagagtaaagatcttatagaatggataaaagagtgatttgggctgggtgtagtggctcacacctgtagtcctaacactttggaaggctgaaatgggaagtctgcagtgagccatgattatgccactgtactacagtctgggtgacagagtgagacctcatctcaaaaaataaaaaaaagtaaaaaataattttaaaagagtgatttaaaaagtaagcatactgatacaggttcccagtcccttacccacagttctaaaatcccaaatctctgaaagccaaaacctttttcattattttgtgggaaattaattatagcatcaaaacctgaatttatgtggtactgtttagagcctttatccttcattatgtaaacattcatgaatctcacagcagatctattaatacttcattatagaatgctgcctgtctaaaacctgtaatattctgaattctgtgaaacttggggcccctggaattttcagaataagggatgatgagcgtgtaagaaaacctcaattcagcgtatctgccaggcacagtggctcatgcctgaaatcccattgctttgggaagttgaggtgggaggattgcttgaggccaagagttcgagaccatcctgagcaacatagtaagacctcatctctacaaaaaattttttaaaattagggtggtagtgcacacctatggtcccagctacttgggtgtcttaggcgggagaatcacctgagcccaggagtttggggttacaatgaactatgaccacaccactgcactccagcctaggcaacagagcaagaccctatctcttaaaatcagttcatgatggatattgtggcttcagatgtgaaagaaaagatacggggctaaaattctgtattttcagagtattctggtaaccagctaatccaagcagtaatttttgaaatgtgaagtttagaatatattctaaataaaatacgtgcaacctccagtgggaacctcttattattggggaggtagtagaaaggcgctgggtgttctaaaataggctctcctggcccacggctgactgtcttccttgtgtctctacatggacgtgactctggacccagacacggcctaccccagcctgatcctctctgataatctgcggcaagtgcggtacagttacctccaacaggacctgcctgacaaccccgagaggttcaatctgtttccctgtgtcttgggctctccatgcttcatcgccgggagacattattgggaggtagaggtgggagataaagccaagtggaccataggtgtctgtgaagactcagtgtgcagaaaaggtggagtaacctcagccccccagaatggattctgggcagtgtctttgtggtatgggaaagaatattgggctcttacctccccaatgactgccctacccctgcggaccccgctccagcgggtggggattttcttggactatgatgctggtgaggtctccttctacaacgtgacagagaggtgtcacaccttcactttctctcatgctaccttttgtgggcctgtccggccctacttcagtctgagttactcgggagggaaaagtgcagctcctctgatcatctgccccatgagtgggatagatgggttttctggccatgttgggaatcatggtcattccatggagacctccccttgaggaggtgaattcaggccaaaagggctgttggctgtaatcctacgccaggcacaaggcatcttgttgccttgccacgtcctgtcacagctgggtatccttaccatgttccacgcccttgcagtgggagacaggatgtccatgttctctaccatccttttccttcccatgcagattgtgaaatgtaatgagatgtatcaagatatcctagaaataaaaaccagatgtccacctccagtgtttcatactttctggttttacacatcgctggagggataaagagtatggataatctttggatttggagagccgttcaagatacttccagcttcttggctcagcctggcttcctctggttcagccccacataatgattatggctatttgctgtcatttctgggctagggctcctttctaacaacctagactggaataaggccctgtcagcatggctccctttatcccagttttccgtctgggaacagtacctctgcccctgattcccaatgtgccatagttttattaactccattaaagaagcctgtatgtgttttggttagttacagttattttacaataatggtgggtaatggccccacctctgttatgagataatgttctaatcaatgtctctgcctttgtatcttttctgagggctttgtctgttctcttcattctaatgaaaggtgtattctagtgctgggtgcatatcatccaggataatattctgcccaactccatcctctgttactagatcccttaccagtcacatttgtggactggtggccagtcgtataccatccctggaaggattctgggacaatattccagggattcattgacttcttggctccttttctccatttcctttgggggaagggggaattgaccatgcttaagtgcatcctatcaaggggcagctccgtccccatggccattggatcatgagacactctgaagtcagaaggctggggcagatcacttcaagcaagcccccatgatggttctcagtcctgcttctctgtgggtacgtgcccctctgtttaaaaataaactgaatatggatgttta

SEQ ID NO: 330577 - DNA, 2260 bp, Homo sapiens
gggtttacgctgccgccggcatccgctcggacgcggccacgttgtcttgcgcgctttgcccgcctggccctgggactctgaccctcggctaccctttcctgccccactagcgtggccgcgagcctcggtgagccggccgtattcccgctctcgcttagggggcacaggcgcaggcatcggcccggccactccaagccttcggtgcgcgggcgcgtctgggatacgggcccgggaggcgccgccctccgtccgcccggtgcctctcaggaacagcgaaccggagagagcgccggagagttgggctcagtgcggagctcggcgccggggcccatgcccgtgcgcccccgcaggccggcgccatggcctccgggagtgtggccgagtgcctgcagcaggagaccacctgccccgtgtgcctgcagtacttcgcagagcccatgatgctcgactgcggccataacatctgttgcgcgtgcctcgcccgctgctggggcacggcagagactaacgtgtcgtgcccgcagtgccgggagaccttcccgcagaggcacatgcggcccaaccggcacctggccaacgtgacccaactggtaaagcagctgcgcaccgagcggccgtcggggcccggcggcgagatgggcgtgtgcgagaagcaccgcgagcccctgaagctgtactgcgaggaggaccagatgcccatctgcgtggtgtgcgaccgctcccgcgagcaccgcggccacagcgtgctgccgctcgaggaggcggtggagggcttcaaggagcaaatccagaaccagctcgaccatttaaaaagagtgaaagatttaaagaagagacgtcgggcccagggggaacaggcacgagctgaactcttgagcctaacccagatggagagggagaagattgtttgggagtttgagcagctgtatcactccttaaaggagcatgagtatcgcctcctggcccgccttgaggagctagacttggccatctacaatagcatcaatggtgccatcacccagttctcttgcaacatctcccacctcagcagcctgatcgctcagctagaagagaagcagcagcagcccaccagggagctcctgcaggacattggggacacattgagcagggctgaaagaatcaggattcctgaaccttggatcacacctccagatttgcaagagaaaatccacatttttgcccaaaaatgtctattcttgacggagagtctaaagcagttcacagaaaaaatgcagtcagatatggagaaaatccaagaattaagagaggctcagttatactcagtggacgtgactctggacccagacacggcctaccccagcctgatcctctctgataatctgcggcaagtgcggtacagttacctccaacaggacctgcctgacaaccccgagagattgtgaaatgtaatgagatgtatcaagatatcctagaaatagagggataaagagtatggataatctttggatttggagagccgttcaagatacttccagcttcttggctcagcctggcttcctctggttcagccccacataatgattatggctatttgctgtcatttctgggctagggctcctttctaacaacctagactggaataaggccctgtcagcatggctccctttatcccagttttccgtctgggaacagtacctctgcccctgattcccaatgtgccatagttttattaactccattaaagaagcctgtatgtgttttggttagttacagttattttacaataatggtgggtaatggccccacctctgttatgagataatgttctaatcaatgtctctgcctttgtatcttttctgagggctttgtctgttctcttcattctaatgaaaggtgtattctagtgctgggtgcatatcatccaggataatattctgcccaactccatcctctgttactagatcccttaccagtcacatttgtggactggtggccagtcgtataccatccctggaaggattctgggacaatattccagggattcattgacttcttggctccttttctccatttcctttgggggaagggggaattgaccatgcttaagtgcatcctatcaaggggcagctccgtccccatggccattggatcatgagacactctgaagtcagaaggctggggcagatcacttcaagcaagcccccatgatggttctcagtcctgcttctctgtgggtacgtgcccctctgtttaaaaataaactgaatatggatgttta

SEQ ID NO: 330578 - DNA, 1778 bp, Homo sapiens
gggtttacgctgccgccggcatccgctcggacgcggccacgttgtcttgcgcgctttgcccgcctggccctgggactctgaccctcggctaccctttcctgccccactagcgtggccgcgagcctcggtgagccggccgtattcccgctctcgcttagggggcacaggcgcaggcatcggcccggccactccaagccttcggtgcgcgggcgcgtctgggatacgggcccgggaggcgccgccctccgtccgcccggtgcctctcaggaacagcgaaccggagagagcgccggagagttgggctcagtgcggagctcggcgccggggcccatgcccgtgcgcccccgcaggccggcgccatggcctccgggagtgtggccgagtgcctgcagcaggagaccacctgccccgtgtgcctgcagtacttcgcagagcccatgatgctcgactgcggccataacatctgttgcgcgtgcctcgcccgctgctggggcacggcagagactaacgtgtcgtgcccgcagtgccgggagaccttcccgcagaggcacatgcggcccaaccggcacctggccaacgtgacccaactggtaaagcagctgcgcaccgagcggccgtcggggcccggcggcgagatgggcgtgtgcgagaagcaccgcgagcccctgaagctgtactgcgaggaggaccagatgcccatctgcgtggtgtgcgaccgctcccgcgagcaccgcggccacagcgtgctgccgctcgaggaggcggtggagggcttcaaggagcaaatccagaaccagctcgaccatttaaaaagagtgaaagatttaaagaagagacgtcgggcccagggggaacaggcacgagctgaactcttgagcctaacccagatggagagggagaagattgtttgggagtttgagcagctgtatcactccttaaaggagcatgagtatcgcctcctggcccgccttgaggagctagacttggccatctacaatagcatcaatggtgccatcacccagttctcttgcaacatctcccacctcagcagcctgatcgctcagctagaagagaagcagcagcagcccaccagggagctcctgcaggacattggggacacattgagcaggtatagttttctgtttccctagtgttaaatcaaatatgagaagactgtctccttcacatttgtaaatcctgaaaggagccctgagcctgaggatggacatcttatcaaattgacacatatccctgaagagagtcactagtatacaaagaattagatgaaccacagctctactcagtaaaattcaggaagtagggggttcatgtgggaggctgccggtggattaggggtatgaggacacttccatggagagggtgtggccttacagggacctgggctgaatataagggtagtttatgtctattgcttcctatacatttcagaatcctttcccccttcattatctcattttttttttttctgtaatgggggaaataaagcctaagaaaggtgtgactggcctgcatttacataattactgatgagccacctggattctggctcttattcttactcttgctatttctctatgttccatcaaaaaaaaaaaagtgaggaagaactccctggcagctggaacacgatcaaagagggagagcttggagggggcagtaagccagggcaaagttgttttgcaggatggatgacgaggcaagtgggatgggccttgggaagctcatgtttggtgtaagaatgccttcaggggtggaaa

SEQ ID NO: 330579 - DNA, 672 bp, Homo sapiens
aaattttttattattcattttagaggcaggttctctgttgcccaggctggtgtgcagtggcatggtgatagcttgctgcagcctcatactcctgggctcaagtgatcctcctgcctcagcctcctgagtagctggaattacaggcatgcaccaccatgcttgcctaatttttttacttttattttttgtagagacagggtctcaaactcctgtatgcaagcaatcctcttgcctcagcttcccaaagtgctgagattacaggcatgagccacatatccagcccattatcagtgtttttgaagcaggaaaacacttgatgatagcaagatgctgtaatactaaatgccagaggagatgacatgggtcatacacagttttagatttcagaacagtaagtgtaatggcctgggcagattaagaaaaacttggaggatgtgtgttttggactggacattagaagaagatgaatagagcttcgatgtgcagagtaaagatcttatagaatggataaaagagtgatttgggctgggtgtagtggctcacacctgtagtcctaacactttggaaggctgaaatgggaagtctgcagtgagccatgattatgccactgtactacagtctgggtgacagagtgagacctcatctcaaaaaataaaaaaaagtaaaaaataa

SEQ ID NO: 330580 - DNA, 662 bp, Homo sapiens
aaaattcctgggcagtctggtggattctgaaatccttatatgtaggtaaacccttctcttaattattagaaattacaaacccccacaatctttgataattttctattttgtatatgctgggttcatatatgcattgcatctattcagatatatactttttggggcatctagcaacatagagctagcagatacatgtcctctacaagcaagacaaatggggagaaactccactcaatacagtggataataccagaagtggttagttcaggcatgactttccttgatctggctcttcttttcttgccacttaaaagtcttagtgggataatgtgtgagaaattctgtttcaactataaagtgccttataaatgaatggtcatgtttaccccagagtgtcagtgagtgtcacttgagccattcagctcttgtacacagatgacttatgcaactcaaaagttatgtatgacgtggggttggaaccgcgtttccctctgcagaatcagctgactcactggaaggtggaattcttgatcttggctcagttttatcccatattctaccagtctcaggcatgtggttatccctgtacttaagattcccaatccctctccccttaaagcttttggttggatgatagagccatacatcatatgaaaaaatta

SEQ ID NO: 330581 - DNA, 2969 bp, Homo sapiens
gggtttacgctgccgccggcatccgctcggacgcggccacgttgtcttgcgcgctttgcccgcctggccctgggactctgaccctcggctaccctttcctgccccactagcgtggccgcgagcctcggtgagccggccgtattcccgctctcgcttagggggcacaggcgcaggcatcggcccggccactccaagccttcggtgcgcgggcgcgtctgggatacgggcccgggaggcgccgccctccgtccgcccggtgcctctcaggaacagcgaaccggagagagcgccggagagttgggctcagtgcggagctcggcgccggggcccatgcccgtgcgcccccgcaggccggcgccatggcctccgggagtgtggccgagtgcctgcagcaggagaccacctgccccgtgtgcctgcagtacttcgcagagcccatgatgctcgactgcggccataacatctgttgcgcgtgcctcgcccgctgctggggcacggcagagactaacgtgtcgtgcccgcagtgccgggagaccttcccgcagaggcacatgcggcccaaccggcacctggccaacgtgacccaactggtaaagcagctgcgcaccgagcggccgtcggggcccggcggcgagatgggcgtgtgcgagaagcaccgcgagcccctgaagctgtactgcgaggaggaccagatgcccatctgcgtggtgtgcgaccgctcccgcgagcaccgcggccacagcgtgctgccgctcgaggaggcggtggagggcttcaaggagcaaatccagaaccagctcgaccatttaaaaagagtgaaagatttaaagaagagacgtcgggcccagggggaacaggcacgagctgaactcttgagcctaacccagatggagagggagaagattgtttgggagtttgagcagctgtatcactccttaaaggagcatgagtatcgcctcctggcccgccttgaggagctagacttggccatctacaatagcatcaatggtgccatcacccagttctcttgcaacatctcccacctcagcagcctgatcgctcagctagaagagaagcagcagcagcccaccagggagctcctgcaggacattggggacacattgagcagggctgaaagaatcaggattcctgaaccttggatcacacctccagatttgcaagagaaaatccacatttttgcccaaaaatgtctattcttgacggagagtctaaagcagttcacagaaaaaatgcagtcagatatggagaaaatccaagaattaagagaggctcagttatactcagtggacgtgactctggacccagacacggcctaccccagcctgatcctctctgataatctgcggcaagtgcggtacagttacctccaacaggacctgcctgacaaccccgagaggttcaatctgtttccctgtgtcttgggctctccatgcttcatcgccgggagacattattgggaggtagaggtgggagataaagccaagtggaccataggtgtctgtgaagactcagtgtgcagaaaaggtggagtaacctcagccccccagaatggattctgggcagtgtctttgtggtatgggaaagaatattgggctcttacctccccaatgactgccctacccctgcggaccccgctccagcgggtggggattttcttggactatgatgctggtgaggtctccttctacaacgtgacagagaggtgtcacaccttcactttctctcatgctaccttttgtgggcctgtccggccctacttcagtctgagttactcgggagggaaaagtgcagctcctctgatcatctgccccatgagtgggatagatgggttttctggccatgttgggaatcatggtcattccatggagacctccccttgaggaggtgaattcaggccaaaagggctgttggctgtaatcctacgccaggcacaaggcatcttgttgccttgccacgtcctgtcacagctgggtatccttaccatgttccacgcccttgcagtgggagacaggatgtccatgttctctaccatccttttccttcccatgcagattgtgaaatgtaatgagatgtatcaagatatcctagaaataaaaaccagatgtccacctccagtgtttcatactttctggttttacacatcgctggagggataaagagtatggataatctttggatttggagagccgttcaagatacttccagcttcttggctcagcctggcttcctctggttcagccccacataatgattatggctatttgctgtcatttctgggctagggctcctttctaacaacctagactggaataaggccctgtcagcatggctccctttatcccagttttccgtctgggaacagtacctctgcccctgattcccaatgtgccatagttttattaactccattaaagaagcctgtatgtgttttggttagttacagttattttacaataatggtgggtaatggccccacctctgttatgagataatgttctaatcaatgtctctgcctttgtatcttttctgagggctttgtctgttctcttcattctaatgaaaggtgtattctagtgctgggtgcatatcatccaggataatattctgcccaactccatcctctgttactagatcccttaccagtcacatttgtggactggtggccagtcgtataccatccctggaaggattctgggacaatattccagggattcattgacttcttggctccttttctccatttcctttgggggaagggggaattgaccatgcttaagtgcatcctatcaaggggcagctccgtccccatggccattggatcatgagacactctgaagtcagaaggctggggcagatcacttcaagcaagcccccatgatggttctcagtcctgcttctctgtgggtacgtgcccctctgtttaaaaataaactgaatatggatgttta

SEQ ID NO: 330582 - DNA, 2915 bp, Homo sapiens
gggtttacgctgccgccggcatccgctcggacgcggccacgttgtcttgcgcgctttgcccgcctggccctgggactctgaccctcggctaccctttcctgccccactagcgtggccgcgagcctcggtgagccggccgtattcccgctctcgcttagggggcacaggcgcaggcatcggcccggccactccaagccttcggtgcgcgggcgcgtctgggatacgggcccgggaggcgccgccctccgtccgcccggtgcctctcaggaacagcgaaccggagagagcgccggagagttgggctcagtgcggagctcggcgccggggcccatgcccgtgcgcccccgcaggccggcgccatggcctccgggagtgtggccgagtgcctgcagcaggagaccacctgccccgtgtgcctgcagtacttcgcagagcccatgatgctcgactgcggccataacatctgttgcgcgtgcctcgcccgctgctggggcacggcagagactaacgtgtcgtgcccgcagtgccgggagaccttcccgcagaggcacatgcggcccaaccggcacctggccaacgtgacccaactggtaaagcagctgcgcaccgagcggccgtcggggcccggcggcgagatgggcgtgtgcgagaagcaccgcgagcccctgaagctgtactgcgaggaggaccagatgcccatctgcgtggtgtgcgaccgctcccgcgagcaccgcggccacagcgtgctgccgctcgaggaggcggtggagggcttcaaggagcaaatccagaaccagctcgaccatttaaaaagagtgaaagatttaaagaagagacgtcgggcccagggggaacaggcacgagctgaactcttgagcctaacccagatggagagggagaagattgtttgggagtttgagcagctgtatcactccttaaaggagcatgagtatcgcctcctggcccgccttgaggagctagacttggccatctacaatagcatcaatggtgccatcacccagttctcttgcaacatctcccacctcagcagcctgatcgctcagctagaagagaagcagcagcagcccaccagggagctcctgcaggacattggggacacattgagcagggctgaaagaatcaggattcctgaaccttggatcacacctccagatttgcaagagaaaatccacatttttgcccaaaaatgtctattcttgacggagagtctaaagcagttcacagaaaaaatgcagtcagatatggagaaaatccaagaattaagagaggctcagttatactcagtggacgtgactctggacccagacacggcctaccccagcctgatcctctctgataatctgcggcaagtgcggtacagttacctccaacaggacctgcctgacaaccccgagaggttcaatctgtttccctgtgtcttgggctctccatgcttcatcgccgggagacattattgggaggtagaggtgggagataaagccaagtggaccataggtgtctgtgaagactcagtgtgcagaaaaggtggagtaacctcagccccccagaatggattctgggcagtgtctttgtggtatgggaaagaatattgggctcttacctccccaatgactgccctacccctgcggaccccgctccagcgggtggggattttcttggactatgatgctggtgaggtctccttctacaacgtgacagagaggtgtcacaccttcactttctctcatgctaccttttgtgggcctgtccggccctacttcagtctgagttactcgggagggaaaagtgcagctcctctgatcatctgccccatgagtgggatagatgggttttctggccatgttgggaatcatggtcattccatggagacctccccttgaggaggtgaattcaggccaaaagggctgttggctgtaatcctacgccaggcacaaggcatcttgttgccttgccacgtcctgtcacagctgggtatccttaccatgttccacgcccttgcagtgggagacaggatgtccatgttctctaccatccttttccttcccatgcagattgtgaaatgtaatgagatgtatcaagatatcctagaaatagagggataaagagtatggataatctttggatttggagagccgttcaagatacttccagcttcttggctcagcctggcttcctctggttcagccccacataatgattatggctatttgctgtcatttctgggctagggctcctttctaacaacctagactggaataaggccctgtcagcatggctccctttatcccagttttccgtctgggaacagtacctctgcccctgattcccaatgtgccatagttttattaactccattaaagaagcctgtatgtgttttggttagttacagttattttacaataatggtgggtaatggccccacctctgttatgagataatgttctaatcaatgtctctgcctttgtatcttttctgagggctttgtctgttctcttcattctaatgaaaggtgtattctagtgctgggtgcatatcatccaggataatattctgcccaactccatcctctgttactagatcccttaccagtcacatttgtggactggtggccagtcgtataccatccctggaaggattctgggacaatattccagggattcattgacttcttggctccttttctccatttcctttgggggaagggggaattgaccatgcttaagtgcatcctatcaaggggcagctccgtccccatggccattggatcatgagacactctgaagtcagaaggctggggcagatcacttcaagcaagcccccatgatggttctcagtcctgcttctctgtgggtacgtgcccctctgtttaaaaataaactgaatatggatgttta

SEQ ID NO: 330583 - DNA, 3041 bp, Homo sapiens
gggtttacgctgccgccggcatccgctcggacgcggccacgttgtcttgcgcgctttgcccgcctggccctgggactctgaccctcggctaccctttcctgccccactagcgtggccgcgagcctcggtgagccggccgtattcccgctctcgcttagggggcacaggcgcaggcatcggcccggccactccaagccttcggtgcgcgggcgcgtctgggatacgggcccgggaggcgccgccctccgtccgcccggtgcctctcaggaacagcgaaccggagagagcgccggagagttgggctcagtgcggagctcggcgccggggcccatgcccgtgcgcccccgcaggccggcgccatggcctccgggagtgtggccgagtgcctgcagcaggagaccacctgccccgtgtgcctgcagtacttcgcagagcccatgatgctcgactgcggccataacatctgttgcgcgtgcctcgcccgctgctggggcacggcagagactaacgtgtcgtgcccgcagtgccgggagaccttcccgcagaggcacatgcggcccaaccggcacctggccaacgtgacccaactggtaaagcagctgcgcaccgagcggccgtcggggcccggcggcgagatgggcgtgtgcgagaagcaccgcgagcccctgaagctgtactgcgaggaggaccagatgcccatctgcgtggtgtgcgaccgctcccgcgagcaccgcggccacagcgtgctgccgctcgaggaggcggtggagggcttcaaggagcaaatccagaaccagctcgaccatttaaaaagagtgaaagatttaaagaagagacgtcgggcccagggggaacaggcacgagctgaactcttgagcctaacccagatggagagggagaagattgtttgggagtttgagcagctgtatcactccttaaaggagcatgagtatcgcctcctggcccgccttgaggagctagacttggccatctacaatagcatcaatggtgccatcacccagttctcttgcaacatctcccacctcagcagcctgatcgctcagctagaagagaagcagcagcagcccaccagggagctcctgcaggacattggggacacattgagcagggctgaaagaatcaggattcctgaaccttggatcacacctccagatttgcaagagaaaatccacatttttgcccaaaaatgtctattcttgacggagagtctaaagcagttcacagaaaaaatgcagtcagatatggagaaaatccaagaatcagctgactcactggaaggtggaattcttgatcttggctcagttttatcccatattctaccagtctcagaattaagagaggctcagttatactcagtggacgtgactctggacccagacacggcctaccccagcctgatcctctctgataatctgcggcaagtgcggtacagttacctccaacaggacctgcctgacaaccccgagaggttcaatctgtttccctgtgtcttgggctctccatgcttcatcgccgggagacattattgggaggtagaggtgggagataaagccaagtggaccataggtgtctgtgaagactcagtgtgcagaaaaggtggagtaacctcagccccccagaatggattctgggcagtgtctttgtggtatgggaaagaatattgggctcttacctccccaatgactgccctacccctgcggaccccgctccagcgggtggggattttcttggactatgatgctggtgaggtctccttctacaacgtgacagagaggtgtcacaccttcactttctctcatgctaccttttgtgggcctgtccggccctacttcagtctgagttactcgggagggaaaagtgcagctcctctgatcatctgccccatgagtgggatagatgggttttctggccatgttgggaatcatggtcattccatggagacctccccttgaggaggtgaattcaggccaaaagggctgttggctgtaatcctacgccaggcacaaggcatcttgttgccttgccacgtcctgtcacagctgggtatccttaccatgttccacgcccttgcagtgggagacaggatgtccatgttctctaccatccttttccttcccatgcagattgtgaaatgtaatgagatgtatcaagatatcctagaaataaaaaccagatgtccacctccagtgtttcatactttctggttttacacatcgctggagggataaagagtatggataatctttggatttggagagccgttcaagatacttccagcttcttggctcagcctggcttcctctggttcagccccacataatgattatggctatttgctgtcatttctgggctagggctcctttctaacaacctagactggaataaggccctgtcagcatggctccctttatcccagttttccgtctgggaacagtacctctgcccctgattcccaatgtgccatagttttattaactccattaaagaagcctgtatgtgttttggttagttacagttattttacaataatggtgggtaatggccccacctctgttatgagataatgttctaatcaatgtctctgcctttgtatcttttctgagggctttgtctgttctcttcattctaatgaaaggtgtattctagtgctgggtgcatatcatccaggataatattctgcccaactccatcctctgttactagatcccttaccagtcacatttgtggactggtggccagtcgtataccatccctggaaggattctgggacaatattccagggattcattgacttcttggctccttttctccatttcctttgggggaagggggaattgaccatgcttaagtgcatcctatcaaggggcagctccgtccccatggccattggatcatgagacactctgaagtcagaaggctggggcagatcacttcaagcaagcccccatgatggttctcagtcctgcttctctgtgggtacgtgcccctctgtttaaaaataaactgaatatggatgttta

SEQ ID NO: 330584 - DNA, 2422 bp, Homo sapiens
gaagtcgctcagaggatcccgccaaagcgtagtgacccaactggtaaagcagctgcgcaccgagcggccgtcggggcccggcggcgagatgggcgtgtgcgagaagcaccgcgagcccctgaagctgtactgcgaggaggaccagatgcccatctgcgtggtgtgcgaccgctcccgcgagcaccgcggccacagcgtgctgccgctcgaggaggcggtggagggcttcaaggagcaaatccagaaccagctcgaccatttaaaaagagtgaaagatttaaagaagagacgtcgggcccagggggaacaggcacgagctgaactcttgagcctaacccagatggagagggagaagattgtttgggagtttgagcagctgtatcactccttaaaggagcatgagtatcgcctcctggcccgccttgaggagctagacttggccatctacaatagcatcaatggtgccatcacccagttctcttgcaacatctcccacctcagcagcctgatcgctcagctagaagagaagcagcagcagcccaccagggagctcctgcaggacattggggacacattgagcagggctgaaagaatcaggattcctgaaccttggatcacacctccagatttgcaagagaaaatccacatttttgcccaaaaatgtctattcttgacggagagtctaaagcagttcacagaaaaaatgcagtcagatatggagaaaatccaagaattaagagaggctcagttatactcagtggacgtgactctggacccagacacggcctaccccagcctgatcctctctgataatctgcggcaagtgcggtacagttacctccaacaggacctgcctgacaaccccgagaggttcaatctgtttccctgtgtcttgggctctccatgcttcatcgccgggagacattattgggaggtagaggtgggagataaagccaagtggaccataggtgtctgtgaagactcagtgtgcagaaaaggtggagtaacctcagccccccagaatggattctgggcagtgtctttgtggtatgggaaagaatattgggctcttacctccccaatgactgccctacccctgcggaccccgctccagcgggtggggattttcttggactatgatgctggtgaggtctccttctacaacgtgacagagaggtgtcacaccttcactttctctcatgctaccttttgtgggcctgtccggccctacttcagtctgagttactcgggagggaaaagtgcagctcctctgatcatctgccccatgagtgggatagatgggttttctggccatgttgggaatcatggtcattccatggagacctccccttgaggaggtgaattcaggccaaaagggctgttggctgtaatcctacgccaggcacaaggcatcttgttgccttgccacgtcctgtcacagctgggtatccttaccatgttccacgcccttgcagtgggagacaggatgtccatgttctctaccatccttttccttcccatgcagattgtgaaatgtaatgagatgtatcaagatatcctagaaataaaaaccagatgtccacctccagtgtttcatactttctggttttacacatcgctggagggataaagagtatggataatctttggatttggagagccgttcaagatacttccagcttcttggctcagcctggcttcctctggttcagccccacataatgattatggctatttgctgtcatttctgggctagggctcctttctaacaacctagactggaataaggccctgtcagcatggctccctttatcccagttttccgtctgggaacagtacctctgcccctgattcccaatgtgccatagttttattaactccattaaagaagcctgtatgtgttttggttagttacagttattttacaataatggtgggtaatggccccacctctgttatgagataatgttctaatcaatgtctctgcctttgtatcttttctgagggctttgtctgttctcttcattctaatgaaaggtgtattctagtgctgggtgcatatcatccaggataatattctgcccaactccatcctctgttactagatcccttaccagtcacatttgtggactggtggccagtcgtataccatccctggaaggattctgggacaatattccagggattcattgacttcttggctccttttctccatttcctttgggggaagggggaattgaccatgcttaagtgcatcctatcaaggggcagctccgtccccatggccattggatcatgagacactctgaagtcagaaggctggggcagatcacttcaagcaagcccccatgatggttctcagtcctgcttctctgtgggtacgtgcccctctgtttaaaaataaactgaatatggatgttta

SEQ ID NO: 330585 - DNA, 2124 bp, Homo sapiens
aaaggaagaaagaaaccatgtactgatcagcaatgtgcggttcctgagaaggcaggtggaaatgagaactaaagtacatatgccaggaattagtgtcagagagtcttctgttgtatgggaagaaatgattgtttcagagtatgggaaagacagttggtttgcgagaactagtaggagtatttggtcagtgaacatctatttatagtgtaaccattctgccctgggcaacaagcgaaactccatctcaaaaaaaaaaaaaatttactcatgttttttaaatttagggctgaaagaatcaggattcctgaaccttggatcacacctccagatttgcaagagaaaatccacatttttgcccaaaaatgtctattcttgacggagagtctaaagcagttcacagaaaaaatgcagtcagatatggagaaaatccaagaattaagagaggctcagttatactcagtggacgtgactctggacccagacacggcctaccccagcctgatcctctctgataatctgcggcaagtgcggtacagttacctccaacaggacctgcctgacaaccccgagaggttcaatctgtttccctgtgtcttgggctctccatgcttcatcgccgggagacattattgggaggtagaggtgggagataaagccaagtggaccataggtgtctgtgaagactcagtgtgcagaaaaggtggagtaacctcagccccccagaatggattctgggcagtgtctttgtggtatgggaaagaatattgggctcttacctccccaatgactgccctacccctgcggaccccgctccagcgggtggggattttcttggactatgatgctggtgaggtctccttctacaacgtgacagagaggtgtcacaccttcactttctctcatgctaccttttgtgggcctgtccggccctacttcagtctgagttactcgggagggaaaagtgcagctcctctgatcatctgccccatgagtgggatagatgggttttctggccatgttgggaatcatggtcattccatggagacctccccttgaggaggtgaattcaggccaaaagggctgttggctgtaatcctacgccaggcacaaggcatcttgttgccttgccacgtcctgtcacagctgggtatccttaccatgttccacgcccttgcagtgggagacaggatgtccatgttctctaccatccttttccttcccatgcagattgtgaaatgtaatgagatgtatcaagatatcctagaaataaaaaccagatgtccacctccagtgtttcatactttctggttttacacatcgctggagggataaagagtatggataatctttggatttggagagccgttcaagatacttccagcttcttggctcagcctggcttcctctggttcagccccacataatgattatggctatttgctgtcatttctgggctagggctcctttctaacaacctagactggaataaggccctgtcagcatggctccctttatcccagttttccgtctgggaacagtacctctgcccctgattcccaatgtgccatagttttattaactccattaaagaagcctgtatgtgttttggttagttacagttattttacaataatggtgggtaatggccccacctctgttatgagataatgttctaatcaatgtctctgcctttgtatcttttctgagggctttgtctgttctcttcattctaatgaaaggtgtattctagtgctgggtgcatatcatccaggataatattctgcccaactccatcctctgttactagatcccttaccagtcacatttgtggactggtggccagtcgtataccatccctggaaggattctgggacaatattccagggattcattgacttcttggctccttttctccatttcctttgggggaagggggaattgaccatgcttaagtgcatcctatcaaggggcagctccgtccccatggccattggatcatgagacactctgaagtcagaaggctggggcagatcacttcaagcaagcccccatgatggttctcagtcctgcttctctgtgggtacgtgcccctctgtttaaaaataaactgaatatggatgttta

SEQ ID NO: 330586 - DNA, 2322 bp, Homo sapiens
tttttgagtacttagtatttgaaaagctgtgagctaggtgctttggggggtatgagaatgagtacagtatcctattttggtctagaggatcatagctcaggaagagaaggtgggaaaagctgtagtggctgattttaaagactgtccgtgtacgctagacagtttaacttagcccctgtcctagttcctggaaggtcatggaattgggaaaaagaatttacttgggccggacgtggtggctcacgcctgtaatcccagcactttgggaggccgaggcgggaggatcacctgaggtcaggagttcgagaccagcctgaccagtatggagaaaccccatctctactaaaaacacaaaattagctgggtatggtggcgcatgcctgtaatcccagctactcaggaggctgaggcaggagaatcgcttgaacctgggaggcagaggttgcggtgggccgagatggcgccattgcactccagcctgggcaacaagcgaaactccatctcaaaaaaaaaaaaaatttactcatgttttttaaatttagggctgaaagaatcaggattcctgaaccttggatcacacctccagatttgcaagagaaaatccacatttttgcccaaaaatgtctattcttgacggagagtctaaagcagttcacagtggacgtgactctggacccagacacggcctaccccagcctgatcctctctgataatctgcggcaagtgcggtacagttacctccaacaggacctgcctgacaaccccgagaggttcaatctgtttccctgtgtcttgggctctccatgcttcatcgccgggagacattattgggaggtagaggtgggagataaagccaagtggaccataggtgtctgtgaagactcagtgtgcagaaaaggtggagtaacctcagccccccagaatggattctgggcagtgtctttgtggtatgggaaagaatattgggctcttacctccccaatgactgccctacccctgcggaccccgctccagcgggtggggattttcttggactatgatgctggtgaggtctccttctacaacgtgacagagaggtgtcacaccttcactttctctcatgctaccttttgtgggcctgtccggccctacttcagtctgagttactcgggagggaaaagtgcagctcctctgatcatctgccccatgagtgggatagatgggttttctggccatgttgggaatcatggtcattccatggagacctccccttgaggaggtgaattcaggccaaaagggctgttggctgtaatcctacgccaggcacaaggcatcttgttgccttgccacgtcctgtcacagctgggtatccttaccatgttccacgcccttgcagtgggagacaggatgtccatgttctctaccatccttttccttcccatgcagattgtgaaatgtaatgagatgtatcaagatatcctagaaataaaaaccagatgtccacctccagtgtttcatactttctggttttacacatcgctggagggataaagagtatggataatctttggatttggagagccgttcaagatacttccagcttcttggctcagcctggcttcctctggttcagccccacataatgattatggctatttgctgtcatttctgggctagggctcctttctaacaacctagactggaataaggccctgtcagcatggctccctttatcccagttttccgtctgggaacagtacctctgcccctgattcccaatgtgccatagttttattaactccattaaagaagcctgtatgtgttttggttagttacagttattttacaataatggtgggtaatggccccacctctgttatgagataatgttctaatcaatgtctctgcctttgtatcttttctgagggctttgtctgttctcttcattctaatgaaaggtgtattctagtgctgggtgcatatcatccaggataatattctgcccaactccatcctctgttactagatcccttaccagtcacatttgtggactggtggccagtcgtataccatccctggaaggattctgggacaatattccagggattcattgacttcttggctccttttctccatttcctttgggggaagggggaattgaccatgcttaagtgcatcctatcaaggggcagctccgtccccatggccattggatcatgagacactctgaagtcagaaggctggggcagatcacttcaagcaagcccccatgatggttctcagtcctgcttctctgtgggtacgtgcccctctgtttaaaaataaactgaatatggatgttta

SEQ ID NO: 330587 - DNA, 1591 bp, Homo sapiens
  misc_feature (82)..(82): n is a, c, g, or t
  misc_feature (90)..(90): n is a, c, g, or t
tcacaatcatggtttttcccacggtgttttgattcctataggtggactcctacacaaatgcttatcaattctgccccggggnaatggaanccattattgggaggtagaggtgggagataaagccaagtggaccataggtgtctgtgaagactcagtgtgcagaaaaggtggagtaacctcagccccccagaatggattctgggcagtgtctttgtggtatgggaaagaatattgggctcttacctccccaatgactgccctacccctgcggaccccgctccagcgggtggggattttcttggactatgatgctggtgaggtctccttctacaacgtgacagagaggtgtcacaccttcactttctctcatgctaccttttgtgggcctgtccggccctacttcagtctgagttactcgggagggaaaagtgcagctcctctgatcatctgccccatgagtgggatagatgggttttctggccatgttgggaatcatggtcattccatggagacctccccttgaggaggtgaattcaggccaaaagggctgttggctgtaatcctacgccaggcacaaggcatcttgttgccttgccacgtcctgtcacagctgggtatccttaccatgttccacgcccttgcagtgggagacaggatgtccatgttctctaccatccttttccttcccatgcagattgtgaaatgtaatgagatgtatcaagatatcctagaaataaaaaccagatgtccacctccagtgtttcatactttctggttttacacatcgctggagggataaagagtatggataatctttggatttggagagccgttcaagatacttccagcttcttggctcagcctggcttcctctggttcagccccacataatgattatggctatttgctgtcatttctgggctagggctcctttctaacaacctagactggaataaggccctgtcagcatggctccctttatcccagttttccgtctgggaacagtacctctgcccctgattcccaatgtgccatagttttattaactccattaaagaagcctgtatgtgttttggttagttacagttattttacaataatggtgggtaatggccccacctctgttatgagataatgttctaatcaatgtctctgcctttgtatcttttctgagggctttgtctgttctcttcattctaatgaaaggtgtattctagtgctgggtgcatatcatccaggataatattctgcccaactccatcctctgttactagatcccttaccagtcacatttgtggactggtggccagtcgtataccatccctggaaggattctgggacaatattccagggattcattgacttcttggctccttttctccatttcctttgggggaagggggaattgaccatgcttaagtgcatcctatcaaggggcagctccgtccccatggccattggatcatgagacactctgaagtcagaaggctggggcagatcacttcaagcaagcccccatgatggttctcagtcctgcttctctgtgggtacgtgcccctctgtttaaaaataaactgaatatggatgttta

SEQ ID NO: 330588 - DNA, 1217 bp, Homo sapiens
gtgggagcactaccacacccacgtgctgcccagccaccagagcctgctgctgcggcacccctacggctacactgggcctaggtgatggcagtccatgtggctgccaggccaaggcagtcacaggggccctgaccccaggccacacagacggacatgggcccacatgggagggtgagcaggagcaaggctgtgcttgcctagggcctctgtgatggacatctcgtaggacccagccagtctcatccagcaggttgggttctagggctgaaccaggcgccaggctccagaggacgaagggactctgttgccccacactaacttgccctgtcccaatcccagaaacccaggaccaagctgtgcctgggctccaaggacaggaacactggtccccccatcacactcacccctaagtgggctgggagccaggcagggccagggcagctgggtgggggccggggctggccctgggacccccaggaacgctaagacacaggctccagtaggggctgttgcctccaataaagcagcagtgagctttgccttggtggctggggcttgattgggaaggaggggattaccagcttactgggtgcccatgctgatgtctaagtggtgaccgcagcagtacccgggaaccccaacagttggttgtcttgtcttccagggtgcaggtcactgagtgacttccccagggtgcacagcgagtaacagatcaggacccaaacttgggcagtctgggctgggagcccacaccccactcaccagttctgctgcctcaggtcaggccagggcagtgctgctgcagagctagaaggccctgcagctacagctgcttcattccctgcattagtgcctggttactgggtacctcctgagtggctgtccccgttccagaacttgcatacactgagcgggctacagagctagaaggccctgcagctacagctgcttcattccctgcattagcgagcagttattgggtacctcctgcatgcctggtcccattccagacaggggcctctggcctggctgagttcacagcccagtctggggacagctgggtatgaggtgcttacggcacagtgtccagggcagctgggtgtgcagggactgggggctcccggaagattttttggaggaagtaacagctatgatgggatgggaacagtggaccctaagcaggccaagggtgcgtagggacggtggtacccagatgc

SEQ ID NO: 330589 - DNA, 540 bp, Homo sapiens
gtgggagcactaccacacccacgtgctgcccagccaccagagcctgctgctgcggcacccctacggctacactgggcctaggtgatggcagtccatgtggctgccaggccaaggcagtcacaggggccctgaccccaggccacacagacggacatgggcccacatgggagggtgagcaggagcaaggctgtgcttgcctagggcctctgtgatggacatctcgtaggacccagccagtctcatccagcaggttgggttctagggctgaaccaggcgccaggctccagaggacgaagggactctgttgccccacactaacttgccctgtcccaatcccagaaacccaggaccaagctgtgcctgggctccaaggacaggaacactggtccccccatcacactcacccctaagtgggctgggagccaggcagggccagggcagctgggtgggggccggggctggccctgggacccccaggaacgctaagacacaggctccagtaggggctgttgcctccaataaagcagcagtgagctttgc

SEQ ID NO: 330590 - DNA, 842 bp, Homo sapiens
attaagttctacaaattttgttcccatttacaacaatttcattaacacataatgagttaaatagagacacaatgtatccaataccctcattatgtgttaatgaaattgttgtaaatgggaaccaaatttgtagaacttaatttctactttttagagtgcttaatttcatttttgccttactaaatagtcaaagacttataaaacatttttaacaagttagaacttttttgttattcagtcatataaaatagcagaaaactaacatcaagtgacactgcactaaatactttttttgtattttactgctatcaaatcagaatgaaatatactttaccatagatatttttcttctatttttggttttccaaagctatatgaaagacaaatttttaaaggtacagcgttcaaaaagtgcttaatgaactccaacagctgcctcaaataaaaatctgtatatgaatacattttccctaagcggtgatacattatccaaagatgaagagtgctcctatttttaataggtagaatgtacctttgtcagtcttgcagaaactttaatggagaagaaatggactttatttttgaaaggtgaaatgaacaggcatttatattattagagaatggtagtcttattttggtggaacataatgtaacaaccttgaatttcagaggactctgagtgcttctatgtccactacctattgttctattcttcaataatgaaaaagaattcaacgagccgaccgtgattccctctactacaaatattatgtcttgtaagttagcatttttagcacacaggagaaattttatgtaataaaattactgtatcttttggattt

SEQ ID NO: 330591 - DNA, 1353 bp, Homo sapiens
attaagttctacaaattttgttcccatttacaacaatttcattaacacataatgagttaaatagagacacaatgtatccaataccctcattatgtgttaatgaaattgttgtaaatgggaaccaaatttgtagaacttaatttctactttttagagtgcttaatttcatttttgccttactaaatagtcaaagacttataaaacatttttaacaagttagaacttttttgttattcagtcatataaaatagcagaaaactaacatcaagtgacactgcactaaatactttttttgtattttactgctatcaaatcagaatgaaatatactttaccatagatatttttcttctatttttggttttccaaagctatatgaaagacaaatttttaaaggtacagcgttcaaaaagtgcttaatgaactccaacagctgcctcaaataaaaatctgtatatgaatacattttccctaagcggtgatacattatccaaagatgaagagtgctcctatttttaataggtagaatgtacctttgtcagtcttgcagaaactttaatggagaagaaatggactttatttttgaaaggtgaaatgaacaggcatttatattattagagaatggtagtcttattttggtggaacataatgtaacaaccttgaatttcagaggactctgagtgcttctatgtccactacctattgttctattcttcaataatgaaaaagaattcaacgagccgaccgtgattccctctactacaaatattatgtcttgtaagttagcatttttagcacacaggagaaattttatgtaataaaattactgtatcttttggatttaacaaatttgtatttgaaacacattctatgtctgataattcttaatggcacttttactaatttatttggggatcttgggtacattcttaatttgtgtttattcttcacgcttgacttgcaagtgggatattcccctgccacaagtgtcaaacagtgatattcttcctgtgttgtgactggacagttttccagatcttttttgggagattttcctacagcttggttgtatgtcttgagataacaccaccaaacagctctcagaaattcttttttgattgatcagtagctatgatgattctcctccatgacactaaggattagtttatatatttaagagaaataattgctaaaattaaaatgcctctatcaaggaatgctattataaattattgttaacattctcaagtattaattttttaatttcattggtgtagcaaactctaagcccagccactcattttacatggccatggttaatctttttattaataaaaattatacttagaataaa

SEQ ID NO: 330592 - DNA, 1308 bp, Homo sapiens
accatcatgagggtattggatacattgtgtctctatttaactcattatgtgttaatgaaattgttgtaaatgggaaccaaatttgtagaacttaatttctactttttagagtgcttaatttcatttttgccttactaaatagtcaaagacttataaaacatttttaacaagttagaacttttttgttattcagtcatataaaatagcagaaaactaacatcaagtgacactgcactaaatactttttttgtattttactgctatcaaatcagaatgaaatatactttaccatagatatttttcttctatttttggttttccaaagctatatgaaagacaaatttttaaaggtacagcgttcaaaaagtgcttaatgaactccaacagctgcctcaaataaaaatctgtatatgaatacattttccctaagcggtgatacattatccaaagatgaagagtgctcctatttttaataggtagaatgtacctttgtcagtcttgcagaaactttaatggagaagaaatggactttatttttgaaaggtgaaatgaacaggcatttatattattagagaatggtagtcttattttggtggaacataatgtaacaaccttgaatttcagaggactctgagtgcttctatgtccactacctattgttctattcttcaataatgaaaaagaattcaacgagccgaccgtgattccctctactacaaatattatgtcttgtaagttagcatttttagcacacaggagaaattttatgtaataaaattactgtatcttttggatttaacaaatttgtatttgaaacacattctatgtctgataattcttaatggcacttttactaatttatttggggatcttgggtacattcttaatttgtgtttattcttcacgcttgacttgcaagtgggatattcccctgccacaagtgtcaaacagtgatattcttcctgtgttgtgactggacagttttccagatcttttttgggagattttcctacagcttggttgtatgtcttgagataacaccaccaaacagctctcagaaattcttttttgattgatcagtagctatgatgattctcctccatgacactaaggattagtttatatatttaagagaaataattgctaaaattaaaatgcctctatcaaggaatgctattataaattattgttaacattctcaagtattaattttttaatttcattggtgtagcaaactctaagcccagccactcattttacatggccatggttaatctttttattaataaaaattatacttagaataaa

SEQ ID NO: 330593 - DNA, 1254 bp, Homo sapiens
accatcatgagggtattggatacattgtgtctctatttaactcattatgtgttaatgaaattgttgtaaatgggaaccaaatttgtagaacttaatttctactttttagagtgcttaatttcatttttgccttactaaatagtcaaagacttataaaacatttttaacaagttagaacttttttgttattcagtcatataaaatagcagaaaactaacatcaagtgacactgcactaaatactttttttgtattttactgctatcaaatcagaatgaaatatactttaccatagatatttttcttctatttttggttttccaaagctatatgaaagacaaatttttaaaggtacagcgttcaaaaagtgcttaatgaactccaacagctgcctcaaataaaaattgctcctatttttaataggtagaatgtacctttgtcagtcttgcagaaactttaatggagaagaaatggactttatttttgaaaggtgaaatgaacaggcatttatattattagagaatggtagtcttattttggtggaacataatgtaacaaccttgaatttcagaggactctgagtgcttctatgtccactacctattgttctattcttcaataatgaaaaagaattcaacgagccgaccgtgattccctctactacaaatattatgtcttgtaagttagcatttttagcacacaggagaaattttatgtaataaaattactgtatcttttggatttaacaaatttgtatttgaaacacattctatgtctgataattcttaatggcacttttactaatttatttggggatcttgggtacattcttaatttgtgtttattcttcacgcttgacttgcaagtgggatattcccctgccacaagtgtcaaacagtgatattcttcctgtgttgtgactggacagttttccagatcttttttgggagattttcctacagcttggttgtatgtcttgagataacaccaccaaacagctctcagaaattcttttttgattgatcagtagctatgatgattctcctccatgacactaaggattagtttatatatttaagagaaataattgctaaaattaaaatgcctctatcaaggaatgctattataaattattgttaacattctcaagtattaattttttaatttcattggtgtagcaaactctaagcccagccactcattttacatggccatggttaatctttttattaataaaaattatacttagaataaa

SEQ ID NO: 330594 - DNA, 348 bp, Homo sapiens
aaaactgtctgtttccattaaactggaatattcatcattgtccaaatttgcatcacacattgtgcttctgaatcttgattcacactatttctcatgcccgctattctcttgcttcaatccaacaatgctcacatctccctccctgcaagaagtattcctcatcaagaggctttgaagactgccatctttggtgattactatcatttataattttcacttgctaagatttttaaaagtctactctataccctccttcttcaatgagatctagtcaccagttctaaactgtacatttgattgtctccttgacattttcccttgaacatctcaaagtcaccctaatgtcaa

SEQ ID NO: 330595 - DNA, 727 bp, Homo sapiens
tatcactttttttctttcacatatttagatgtagtctgtcagcaataaaattaaggcaaatatatcagctgggttcacttaaatttttaaaattgtaccgggtaccctttaccaatcttcattaacatcaagaaaacataagtacactagttgtgctggagagaaggaaattacaaggaagacattgggttaaatctaacaacttattagtaaatgagttgaagatgtaaagtataatatataggcaaataagagttttcaggaggacagtacattcttgagaaaaccctaatgcatgaaaatttaagaaaaagttctaagatgaaatgggattaatagttgtctttgggccgggcatggtggctcacgcctgtaatcccagcactttggaaggctgaggcagatggatcacgaggccaggagttcaagaccagcctggccaacatagtgaaaccccgtctctactaaaaatataaacatttgctgggcatggtggcacacgcctgtagttccagttactcaggaggctgagggaggagaattgcttgaatccaggaggtgggaaatcacagtgagctgagatcacaccactggcactccagcctgggtgaacagagtgagactccatctcaaaaataatagatcgattgattcgctgttgttgttctatttgatgatgattggccggtcgggtccctccttgttccaccttgggggtcgggggtgc

SEQ ID NO: 330596 - DNA, 2095 bp, Homo sapiens
gtcttccgtcacgccccgcttcccgcaaacaaatcaccgccaccacttaggaaaccacgggaaagctgtgattgcagcgccacggtcgccagatttctgctcctgggcacattacccccaactccgaggccccctttttggcagggctagtctggactggccaatccaggtccctgcacgcctctcaccgcaacatccccgcagggcgctgcgcgcggggtactagccaggcggcgcggcccgatgacgcattgcgcctgcgcgcgcgaccgagccgggaggggtggggcgccaggtgcttgggggccggcggccgccgaggccggctaaacgcagaatggggaagaatcctgtgcgtcctccacgagctcttccacctgtgccaagtcaagatgatattccacttagtcgtcctaagaaaaagaagcccagaacaaaaaacacaccagcaagtgcttctttggaaggccttgctcagactgctggtcgaaggccctctgagggcaatgagccatcaactaaagaactcaaagagcacccagaggctcctgttcaaagaagacagaaaaagacaaggctacctcttgaattggagacttcctccacccaaaagaagtcatctagttcatctttattacgaaatgaaaatggtattgatgcggagccagctgaggaggcagttattcaaaaacctcggaggaagacaaagaaaacccagccagcagaattacagtatgccaatgagctaggagtagaagatgaagacataatcactgatgagcaaactactgtggaacagcagtctgtattcactgcacccactggcattagccagcctgtaggcaaagtatttgtggaaaaaagccggagattccaggctgctgatcgttcagagttgataaagaccacagaaaacatagatgtgtcaatggacgtgaagccttcctggaccaccagagatgtggcacttacagtgcaccgggctttcaggatgattggtctcttttctcatggattcttggctggctgtgctgtgtggaatattgttgtgatatatgttctagcaggagatcagctatccaacctctcaaaccttctgcaacaatacaagaccctagcgtatccattccagagtcttctgtacttgcttttggctctgagtacaatttcagcttttgacaggattgactttgctaaaatatcagtagcaatccgaaattttttggccctggatcctacagctttagcatctttcttgtactttactgctcttatactatctctgagtcagcaaatgacaagtgacagaatccacctttacacaccttcttctgttaatggtagcctctgggaagcaggaattgaggaacagattctccagccatggattgtggtgaatctcgtggtggctcttctggttggattatcttggctatttttgtcttataggccaggcatggatcttagtgaagagttaatgttctcctcagaggtggaagaatatcctgataaagagaaagaaatcaaagcctcttcataataccagctcacctttggaggaataatgacccagtatttgtcccatttttgtttttaaatgtatttttataagatgtatacatgtgtatttgtaatagattttttgattatataatactgaaacatctctcaatattatgaaaaatgttaaaattgtgtttgctgtttatgtctaaacattaatttgtctagcattatcatcttaatgacaaagggaataatgaactagaaaccagcaagtgaaagtgtttatttcctattttctcaaaacagttgtatttataactattaccttaaaaagcactggtttagaaaaagccataacttaaatagtgttataaaatatatatcaggtttaaacataaatttagcgaatatggtagaagggaaaaaagccttcatttttgacctccccttactgaataaattgaaatatgaagtttgtcttttctgaaactggcttagtgattgagtatcatgtaataattataatataatttagcttgaaagatgctctacattatgaccaataaaaagggaatgtatgttttgtttg

SEQ ID NO: 330597 - DNA, 987 bp, Homo sapiens
gtcttccgtcacgccccgcttcccgcaaacaaatcaccgccaccacttaggaaaccacgggaaagctgtgattgcagcgccacggtcgccagatttctgctcctgggcacattacccccaactccgaggccccctttttggcagggctagtctggactggccaatccaggtccctgcacgcctctcaccgcaacatccccgcagggcgctgcgcgcggggtactagccaggcggcgcggcccgatgacgcattgcgcctgcgcgcgcgaccgagccgggaggggtggggcgccaggtgcttgggggccggcggccgccgaggccggctaaacgcagaatggggaagaatcctgtgcgtcctccacgagctcttccacctgtgccaagtcaagatgatattccacttagtcgtcctaagaaaaagaagcccagaacaaaaaacacaccaggtaagacgttattctttgttgtgtgggatcacaagttttcccaggacctcaggcgtagtaaacatcacagataagggagaattaaggccccagcagccccgaatctccacttcattgaggatagaattaaggccagtttgaagcagtggaattcctggtggtggtgaggtacagggcagtgggcagcctgaggagtatctggacgcattcatggaatagaaggtggtgccatctaagctcctatttccatgatattcctggactctttaaggtcttttatccccagacaacatacatggttttaagctatgattgattccagacccttgaacaagatactgaatttagaaacacagagttcttaaatctcacttcaatcagaatatctctacattacagcatgagtctgaaggcatggccacatcatcatttaaatagtaaagcttcagtcatgagcagaactcgtttttgtcttagtcatccactgataatcctggaagttgcatccgtaactctaaactcagcacatctagaatcc

SEQ ID NO: 330598 - DNA, 1879 bp, Homo sapiens
ccccggcgtcccacaggtcccggaggccgctgcgtcgcggggagctgggctcgggccgccggcggttgcgccggggcagccccgcggggagagcaccatgaggactgactcgggggctcggctggaggagggccacctgcgtcctccacgagctcttccacctgtgccaagtcaagatgatattccacttagtcgtcctaagaaaaagaagcccagaacaaaaaacacaccagcaagtgcttctttggaaggccttgctcagactgctggtcgaaggccctctgagggcaatgagccatcaactaaagaactcaaagagcacccagaggctcctgttcaaagaagacagaaaaagacaaggctacctcttgaattggagacttcctccacccaaaagaagtcatctagttcatctttattacgaaatgaaaatggtattgatgcggagccagctgaggaggcagttattcaaaaacctcggaggaagacaaagaaaacccagccagcagaattacagtatgccaatgagctaggagtagaagatgaagacataatcactgatgagcaaactactgtggaacagcagtctgtattcactgcacccactggcattagccagcctgtaggcaaagtatttgtggaaaaaagccggagattccaggctgctgatcgttcagagttgataaagaccacagaaaacatagatgtgtcaatggacgtgaagccttcctggaccaccagagatgtggcacttacagtgcaccgggctttcaggatgattggtctcttttctcatggattcttggctggctgtgctgtgtggaatattgttgtgatatatgttctagcaggagatcagctatccaacctctcaaaccttctgcaacaatacaagaccctagcgtatccattccagagtcttctgtacttgcttttggctctgagtacaatttcagcttttgacaggattgactttgctaaaatatcagtagcaatccgaaattttttggccctggatcctacagctttagcatctttcttgtactttactgctcttatactatctctgagtcagcaaatgacaagtgacagaatccacctttacacaccttcttctgttaatggtagcctctgggaagcaggaattgaggaacagattctccagccatggattgtggtgaatctcgtggtggctcttctggttggattatcttggctatttttgtcttataggccaggcatggatcttagtgaagagttaatgttctcctcagaggtggaagaatatcctgataaagagaaagaaatcaaagcctcttcataataccagctcacctttggaggaataatgacccagtatttgtcccatttttgtttttaaatgtatttttataagatgtatacatgtgtatttgtaatagattttttgattatataatactgaaacatctctcaatattatgaaaaatgttaaaattgtgtttgctgtttatgtctaaacattaatttgtctagcattatcatcttaatgacaaagggaataatgaactagaaaccagcaagtgaaagtgtttatttcctattttctcaaaacagttgtatttataactattaccttaaaaagcactggtttagaaaaagccataacttaaatagtgttataaaatatatatcaggtttaaacataaatttagcgaatatggtagaagggaaaaaagccttcatttttgacctccccttactgaataaattgaaatatgaagtttgtcttttctgaaactggcttagtgattgagtatcatgtaataattataatataatttagcttgaaagatgctctacattatgaccaataaaaagggaatgtatgttttgtttg

SEQ ID NO: 330599 - DNA, 2026 bp, Homo sapiens
gtcttccgtcacgccccgcttcccgcaaacaaatcaccgccaccacttaggaaaccacgggaaagctgtgattgcagcgccacggtcgccagatttctgctcctgggcacattacccccaactccgaggccccctttttggcagggctagtctggactggccaatccaggtccctgcacgcctctcaccgcaacatccccgcagggcgctgcgcgcggggtactagccaggcggcgcggcccgatgacgcattgcgcctgcgcgcgcgaccgagccgggaggggtggggcgccaggtgcttgggggccggcggccgccgaggccggctaaacgcagaatggggaagaatcctgtgcgtcctccacgagctcttccacctgtgccaagtcaagatgatattccacttagtcgtcctaagaaaaagaagcccagaacaaaaaacacaccagcaagtgcttctttggaaggccttgctcagactgctggtcgaaggccctctgagggcaatgagccatcaactaaagaactcaaagagcacccagaggctcctgttcaaagaagacagaaaaagacaaggctacctcttgaattggagacttcctccacccaaaagaagtcatctagttcatctttattacgaaatgaaaatggtattgatgcggagccagctgaggaggcagttattcaaaaacctcggaggaagacaaagaaaacccagccagcagaattacagtatgccaatgagctaggagtagaagatgaagacataatcactgatgagcaaactactgtggaacagcagtctgtattcactgcacccactggcattagccagcctgtaggcaaagtatttgtggaaaaaagccggagattccaggctgctgatcgttcagagttgataaagaccacagaaaacatagatgtgtcaatggacgtgaagccttcctggaccaccagagatgtggcacttacagtgcaccgggctttcaggatgattggtctcttttctcatggattcttggctggctgtgctgtgtggaatattgttgtgatatatgttctagcaggagatcagctatccaacctctcaaaccttctgcaacaatacaagaccctagcgtatccattccagagtcttctgtacttgcttttggctctgagtacaatttcagcttttgacaggattgactttgctaaaatatcagtagcaatccgaaattttttggccctggatcctacagctttagcatctttcttgtactttactgctcttatactatctctgagtcagcaaatgacaagtgacagaatccacctttacacaccttcttctgttaatggtagcctctgggaagcaggaattgaggaacagattctccagccatggattgtggtgaatctcgtggtggctcttctggttggattatcttggctatttttgtcttataggccaggcatggatcttagtgaagagttaatgttctcctcagaggtggaagaatatcctgataaagagaaagaaatcaaagcctcttcataataccagctcacctttggaggaataatgacccagtatttgtcccatttttgtttttaaatgtatttttataagatgtatacatgtgtatttgtaatagattttttgattatataatactgaaacatctctcaatattatgaaaaatgttaaaattgtgtttgctgtttatgtctaaacattaatttgtctagcattatcatcttaatgacaaagggaataatgaactagaaaccagcaagtgaaagtgtttatttcctattttctcaaaacagttgtatttataactattaccttaaaaagcactggtttagaaaaagccataacttaaatagtgttataaaatatatatcaggtttaaacataaatttagcgaatatggtagaagggaaaaaagccttcatttttgacctccccttactgaataaataatgatgcagacaaggcccctttttttttatatttagtgtaggtgtatattacaacgaa

SEQ ID NO: 330600 - DNA, 1973 bp, Homo sapiens
ccccggcgtcccacaggtcccggaggccgctgcgtcgcggggagctgggctcgggccgccggcggttgcgccggggcagccccgcggggagagcaccatgaggactgactcgggggctcggctggaggagggccacctgcgtcctccacgagctcttccacctgtgccaagtcaagatgatattccacttagtcgtcctaagaaaaagaagcccagaacaaaaaacacaccagcaagtgcttctttggaaggccttgctcagactgctggtcgaaggccctctgagggcaatgagccatcaactaaagaactcaaagagcacccagaggctcctgttcaaagaagacagaaaaagacaaggctacctcttgaaaacggcgtgtcttgattggatggaagaattataggagtagaagggcaggaactagaaaagtcaggagaatggagcataattttggaaggcaaaattggagacttcctccacccaaaagaagtcatctagttcatctttattacgaaatgaaaatggtattgatgcggagccagctgaggaggcagttattcaaaaacctcggaggaagacaaagaaaacccagccagcagaattacagtatgccaatgagctaggagtagaagatgaagacataatcactgatgagcaaactactgtggaacagcagtctgtattcactgcacccactggcattagccagcctgtaggcaaagtatttgtggaaaaaagccggagattccaggctgctgatcgttcagagttgataaagaccacagaaaacatagatgtgtcaatggacgtgaagccttcctggaccaccagagatgtggcacttacagtgcaccgggctttcaggatgattggtctcttttctcatggattcttggctggctgtgctgtgtggaatattgttgtgatatatgttctagcaggagatcagctatccaacctctcaaaccttctgcaacaatacaagaccctagcgtatccattccagagtcttctgtacttgcttttggctctgagtacaatttcagcttttgacaggattgactttgctaaaatatcagtagcaatccgaaattttttggccctggatcctacagctttagcatctttcttgtactttactgctcttatactatctctgagtcagcaaatgacaagtgacagaatccacctttacacaccttcttctgttaatggtagcctctgggaagcaggaattgaggaacagattctccagccatggattgtggtgaatctcgtggtggctcttctggttggattatcttggctatttttgtcttataggccaggcatggatcttagtgaagagttaatgttctcctcagaggtggaagaatatcctgataaagagaaagaaatcaaagcctcttcataataccagctcacctttggaggaataatgacccagtatttgtcccatttttgtttttaaatgtatttttataagatgtatacatgtgtatttgtaatagattttttgattatataatactgaaacatctctcaatattatgaaaaatgttaaaattgtgtttgctgtttatgtctaaacattaatttgtctagcattatcatcttaatgacaaagggaataatgaactagaaaccagcaagtgaaagtgtttatttcctattttctcaaaacagttgtatttataactattaccttaaaaagcactggtttagaaaaagccataacttaaatagtgttataaaatatatatcaggtttaaacataaatttagcgaatatggtagaagggaaaaaagccttcatttttgacctccccttactgaataaattgaaatatgaagtttgtcttttctgaaactggcttagtgattgagtatcatgtaataattataatataatttagcttgaaagatgctctacattatgaccaataaaaagggaatgtatgttttgtttg

SEQ ID NO: 330601 - DNA, 1883 bp, Homo sapiens
gtgttctttatttttaactgctggaagtgttaaaacacacacacacacacacacacattttttttttgagaactccaaagtcctgaaaattttggtggacaatgatttttaaaaaactaactttgtataacctaatatttgtattctctcatctatatttttttattcactataatcatgatactcttctaatagacttaaaagttaatcattgacaacgaaaaataaaatgttattttaaaagaaaaaaaaagttttttttttttttttttgaacaggagccctctgagggcaatgagccatcaactaaagaactcaaagagcacccagaggctcctgttcaaagaagacagaaaaagacaaggctacctcttgaattggagacttcctccacccaaaagaagtcatctagttcatctttattacgaaatgaaaatggtattgatgcggagccagctgaggaggcagttattcaaaaacctcggaggaagacaaagaaaacccagccagcagaattacagtatgccaatgagctaggagtagaagatgaagacataatcactgatgagcaaactactgtggaacagcagtctgtattcactgcacccactggcattagccagcctgtaggcaaagtatttgtggaaaaaagccggagattccaggctgctgatcgttcagagttgataaagaccacagaaaacatagatgtgtcaatggacgtgaagccttcctggaccaccagagatgtggcacttacagtgcaccgggctttcaggatgattggtctcttttctcatggattcttggctggctgtgctgtgtggaatattgttgtgatatatgttctagcaggagatcagctatccaacctctcaaaccttctgcaacaatacaagaccctagcgtatccattccagagtcttctgtacttgcttttggctctgagtacaatttcagcttttgacaggattgactttgctaaaatatcagtagcaatccgaaattttttggccctggatcctacagctttagcatctttcttgtactttactgctcttatactatctctgagtcagcaaatgacaagtgacagaatccacctttacacaccttcttctgttaatggtagcctctgggaagcaggaattgaggaacagattctccagccatggattgtggtgaatctcgtggtggctcttctggttggattatcttggctatttttgtcttataggccaggcatggatcttagtgaagagttaatgttctcctcagaggtggaagaatatcctgataaagagaaagaaatcaaagcctcttcataataccagctcacctttggaggaataatgacccagtatttgtcccatttttgtttttaaatgtatttttataagatgtatacatgtgtatttgtaatagattttttgattatataatactgaaacatctctcaatattatgaaaaatgttaaaattgtgtttgctgtttatgtctaaacattaatttgtctagcattatcatcttaatgacaaagggaataatgaactagaaaccagcaagtgaaagtgtttatttcctattttctcaaaacagttgtatttataactattaccttaaaaagcactggtttagaaaaagccataacttaaatagtgttataaaatatatatcaggtttaaacataaatttagcgaatatggtagaagggaaaaaagccttcatttttgacctccccttactgaataaattgaaatatgaagtttgtcttttctgaaactggcttagtgattgagtatcatgtaataattataatataatttagcttgaaagatgctctacattatgaccaataaaaagggaatgtatgttttgtttg

SEQ ID NO: 330602 - DNA, 740 bp, Homo sapiens
atttgaccaactatttacaacctatctgcctcagaagccttagcatgcagaatttcgccaacatctatgctaagtaatagtttaaatgtagaaaatgtcagctaataacattctacattgtggctgggatcaaaactgcatctggattgtgcagtattcagtctaaatatttccagaatcctgttcttttaaggccatgttagtcatacaacatgtggatttaaaaagtaagtataaaatgagatgataatacctggcttcttgcgttgttttgatgattaaatgggatgacccatttaaaatatcctggcacacatctcttgttagttccaagtccttcctctgtatctgtcccctatgtttcagatgatctgatcactgtagaattagacattttagctgtttaatgatctttgattctctaagtgacttaaatttccaggtaggattgtgtatattgtctctattacattttacttttaaggggtctataatttaaaatttaaatattttaaaatgtaaaacttgtacatttgttatcagcttaccttttaaatcatatttcactgtcaagaaatcttacttgagggctttctattagtatatattatgtcaattttttaaaggactatttataaataagctatacaactctgttggaggtactgggaaacaattttaagtatgatctgttcattttcttctccagagttaatgttctcctcagaggtggaagaata

SEQ ID NO: 330603 - DNA, 1918 bp, Homo sapiens
ccccggcgtcccacaggtcccggaggccgctgcgtcgcggggagctgggctcgggccgccggcggttgcgccggggcagccccgcggggagagcaccatgaggactgactcgggggctcggctggaggagggccacctggtgagcggcgaggggcgcgtcggcctcgagaggtggcggcgtcctccacgagctcttccacctgtgccaagtcaagatgatattccacttagtcgtcctaagaaaaagaagcccagaacaaaaaacacaccagcaagtgcttctttggaaggccttgctcagactgctggtcgaaggccctctgagggcaatgagccatcaactaaagaactcaaagagcacccagaggctcctgttcaaagaagacagaaaaagacaaggctacctcttgaattggagacttcctccacccaaaagaagtcatctagttcatctttattacgaaatgaaaatggtattgatgcggagccagctgaggaggcagttattcaaaaacctcggaggaagacaaagaaaacccagccagcagaattacagtatgccaatgagctaggagtagaagatgaagacataatcactgatgagcaaactactgtggaacagcagtctgtattcactgcacccactggcattagccagcctgtaggcaaagtatttgtggaaaaaagccggagattccaggctgctgatcgttcagagttgataaagaccacagaaaacatagatgtgtcaatggacgtgaagccttcctggaccaccagagatgtggcacttacagtgcaccgggctttcaggatgattggtctcttttctcatggattcttggctggctgtgctgtgtggaatattgttgtgatatatgttctagcaggagatcagctatccaacctctcaaaccttctgcaacaatacaagaccctagcgtatccattccagagtcttctgtacttgcttttggctctgagtacaatttcagcttttgacaggattgactttgctaaaatatcagtagcaatccgaaattttttggccctggatcctacagctttagcatctttcttgtactttactgctcttatactatctctgagtcagcaaatgacaagtgacagaatccacctttacacaccttcttctgttaatggtagcctctgggaagcaggaattgaggaacagattctccagccatggattgtggtgaatctcgtggtggctcttctggttggattatcttggctatttttgtcttataggccaggcatggatcttagtgaagagttaatgttctcctcagaggtggaagaatatcctgataaagagaaagaaatcaaagcctcttcataataccagctcacctttggaggaataatgacccagtatttgtcccatttttgtttttaaatgtatttttataagatgtatacatgtgtatttgtaatagattttttgattatataatactgaaacatctctcaatattatgaaaaatgttaaaattgtgtttgctgtttatgtctaaacattaatttgtctagcattatcatcttaatgacaaagggaataatgaactagaaaccagcaagtgaaagtgtttatttcctattttctcaaaacagttgtatttataactattaccttaaaaagcactggtttagaaaaagccataacttaaatagtgttataaaatatatatcaggtttaaacataaatttagcgaatatggtagaagggaaaaaagccttcatttttgacctccccttactgaataaattgaaatatgaagtttgtcttttctgaaactggcttagtgattgagtatcatgtaataattataatataatttagcttgaaagatgctctacattatgaccaataaaaagggaatgtatgttttgtttg

SEQ ID NO: 330604 - DNA, 1785 bp, Homo sapiens
  misc_feature (15)..(15): n is a, c, g, or t
  misc_feature (17)..(17): n is a, c, g, or t
  misc_feature (19)..(19): n is a, c, g, or t
gcgaccgccgagccntnantacgcagaatggggaagaatcctgtgcgtcctccacgagctcttccacctgtgccaagtcaagatgatattccacttagtcgtcctaagaaaaagaagcccagaacaaaaaacacaccagcaagtgcttctttggaaggccttgctcagactgctggtcgaaggccctctgagggcaatgagccatcaactaaagaactcaaagagcacccagaggctcctgttcaaagaagacagaaaaagacaaggctacctcttgaattggagacttcctccacccaaaagaagtcatctagttcatctttattacgaaatgaaaatggtattgatgcggagccagctgaggaggcagttattcaaaaacctcggaggaagacaaagaaaacccagccagcagaattacagtatgccaatgagctaggagtagaagatgaagacataatcactgatgagcaaactactgtggaacagcagtctgtattcactgcacccactggcattagccagcctgtaggcaaagtatttgtggaaaaaagccggagattccaggctgctgatcgttcagagttgataaagaccacagaaaacatagatgtgtcaatggacgtgaagccttcctggaccaccagagatgtggcacttacagtgcaccgggctttcaggatgattggtctcttttctcatggattcttggctggctgtgctgtgtggaatattgttgtgatatatgttctagcaggagatcagctatccaacctctcaaaccttctgcaacaatacaagaccctagcgtatccattccagagtcttctgtacttgcttttggctctgagtacaatttcagcttttgacaggattgactttgctaaaatatcagtagcaatccgaaattttttggccctggatcctacagctttagcatctttcttgtactttactgctcttatactatctctgagtcagcaaatgacaagtgacagaatccacctttacacaccttcttctgttaatggtagcctctgggaagcaggaattgaggaacagattctccagccatggattgtggtgaatctcgtggtggctcttctggttggattatcttggctatttttgtcttataggccaggcatggatcttagtgaagagttaatgttctcctcagaggtggaagaatatcctgataaagagaaagaaatcaaagcctcttcataataccagctcacctttggaggaataatgacccagtatttgtcccatttttgtttttaaatgtatttttataagatgtatacatgtgtatttgtaatagattttttgattatataatactgaaacatctctcaatattatgaaaaatgttaaaattgtgtttgctgtttatgtctaaacattaatttgtctagcattatcatcttaatgacaaagggaataatgaactagaaaccagcaagtgaaagtgtttatttcctattttctcaaaacagttgtatttataactattaccttaaaaagcactggtttagaaaaagccataacttaaatagtgttataaaatatatatcaggtttaaacataaatttagcgaatatggtagaagggaaaaaagccttcatttttgacctccccttactgaataaattgaaatatgaagtttgtcttttctgaaactggcttagtgattgagtatcatgtaataattataatataatttagcttgaaagatgctctacattatgaccaataaaaagggaatgtatgttttgtttg

SEQ ID NO: 330605 - DNA, 2189 bp, Homo sapiens
gtcttccgtcacgccccgcttcccgcaaacaaatcaccgccaccacttaggaaaccacgggaaagctgtgattgcagcgccacggtcgccagatttctgctcctgggcacattacccccaactccgaggccccctttttggcagggctagtctggactggccaatccaggtccctgcacgcctctcaccgcaacatccccgcagggcgctgcgcgcggggtactagccaggcggcgcggcccgatgacgcattgcgcctgcgcgcgcgaccgagccgggaggggtggggcgccaggtgcttgggggccggcggccgccgaggccggctaaacgcagaatggggaagaatcctgtgcgtcctccacgagctcttccacctgtgccaagtcaagatgatattccacttagtcgtcctaagaaaaagaagcccagaacaaaaaacacaccagcaagtgcttctttggaaggccttgctcagactgctggtcgaaggccctctgagggcaatgagccatcaactaaagaactcaaagagcacccagaggctcctgttcaaagaagacagaaaaagacaaggctacctcttgaaaacggcgtgtcttgattggatggaagaattataggagtagaagggcaggaactagaaaagtcaggagaatggagcataattttggaaggcaaaattggagacttcctccacccaaaagaagtcatctagttcatctttattacgaaatgaaaatggtattgatgcggagccagctgaggaggcagttattcaaaaacctcggaggaagacaaagaaaacccagccagcagaattacagtatgccaatgagctaggagtagaagatgaagacataatcactgatgagcaaactactgtggaacagcagtctgtattcactgcacccactggcattagccagcctgtaggcaaagtatttgtggaaaaaagccggagattccaggctgctgatcgttcagagttgataaagaccacagaaaacatagatgtgtcaatggacgtgaagccttcctggaccaccagagatgtggcacttacagtgcaccgggctttcaggatgattggtctcttttctcatggattcttggctggctgtgctgtgtggaatattgttgtgatatatgttctagcaggagatcagctatccaacctctcaaaccttctgcaacaatacaagaccctagcgtatccattccagagtcttctgtacttgcttttggctctgagtacaatttcagcttttgacaggattgactttgctaaaatatcagtagcaatccgaaattttttggccctggatcctacagctttagcatctttcttgtactttactgctcttatactatctctgagtcagcaaatgacaagtgacagaatccacctttacacaccttcttctgttaatggtagcctctgggaagcaggaattgaggaacagattctccagccatggattgtggtgaatctcgtggtggctcttctggttggattatcttggctatttttgtcttataggccaggcatggatcttagtgaagagttaatgttctcctcagaggtggaagaatatcctgataaagagaaagaaatcaaagcctcttcataataccagctcacctttggaggaataatgacccagtatttgtcccatttttgtttttaaatgtatttttataagatgtatacatgtgtatttgtaatagattttttgattatataatactgaaacatctctcaatattatgaaaaatgttaaaattgtgtttgctgtttatgtctaaacattaatttgtctagcattatcatcttaatgacaaagggaataatgaactagaaaccagcaagtgaaagtgtttatttcctattttctcaaaacagttgtatttataactattaccttaaaaagcactggtttagaaaaagccataacttaaatagtgttataaaatatatatcaggtttaaacataaatttagcgaatatggtagaagggaaaaaagccttcatttttgacctccccttactgaataaattgaaatatgaagtttgtcttttctgaaactggcttagtgattgagtatcatgtaataattataatataatttagcttgaaagatgctctacattatgaccaataaaaagggaatgtatgttttgtttg

SEQ ID NO: 330606 - DNA, 2001 bp, Homo sapiens
gtcttccgtcacgccccgcttcccgcaaacaaatcaccgccaccacttaggaaaccacgggaaagctgtgattgcagcgccacggtcgccagatttctgctcctgggcacattacccccaactccgaggccccctttttggcagggctagtctggactggccaatccaggtccctgcacgcctctcaccgcaacatccccgcagggcgctgcgcgcggggtactagccaggcggcgcggcccgatgacgcattgcgcctgcgcgcgcgaccgagccgggaggggtggggcgccaggtgcttgggggccggcggccgccgaggccggctaaacgcagaatggggaagaatcctgtgcgtcctccacgagctcttccacctgtgccaagtcaagatgatattccacttagtcgtcctaagaaaaagaagcccagaacaaaaaacacaccagcaagtgcttctttggaaggccttgctcagactgctggtcgaaggccctctgagggcaatgagccatcaactaaagaactcaaagagcacccagaggctcctgttcaaagaagacagaaaaagacaaggctacctcttgaattggagacttcctccacccaaaagaagtcatctagttcatctttattacgaaatgaaaatggtattgatgcggagccagctgaggaggcagttattcaaaaacctcggaggaagacaaagaaaacccagccagcagaattacagtatgccaatgagctaggagtagaagatgaagacataatcactgatgagcaaactactgtggaacagcagtctgtattcactgcacccactggcattagccagcctgtaggcaaagtatttgtggaaaaaagccggagattccaggctgctgatcgttcagagttgataaagaccacagaaaacatagatgtgtcaatggacgtgaagccttcctggaccaccagagatgtggcacttacagtgcaccgggctttcaggatgattggtctcttttctcatggattcttggctggctgtgctgtgtggaatattgttgtgatatatgttctagcaggagatcagctatccaacctctcaaaccttctgcaacaatacaagaccctagcgtatccattccagagtcttctgtacttgcttttggctctgagtacaatttcagcttttgacaggattgactttgctaaaatatcagtagcaatccgaaattttttggccctggatcctacagctttagcatctttctggaagcaggaattgaggaacagattctccagccatggattgtggtgaatctcgtggtggctcttctggttggattatcttggctatttttgtcttataggccaggcatggatcttagtgaagagttaatgttctcctcagaggtggaagaatatcctgataaagagaaagaaatcaaagcctcttcataataccagctcacctttggaggaataatgacccagtatttgtcccatttttgtttttaaatgtatttttataagatgtatacatgtgtatttgtaatagattttttgattatataatactgaaacatctctcaatattatgaaaaatgttaaaattgtgtttgctgtttatgtctaaacattaatttgtctagcattatcatcttaatgacaaagggaataatgaactagaaaccagcaagtgaaagtgtttatttcctattttctcaaaacagttgtatttataactattaccttaaaaagcactggtttagaaaaagccataacttaaatagtgttataaaatatatatcaggtttaaacataaatttagcgaatatggtagaagggaaaaaagccttcatttttgacctccccttactgaataaattgaaatatgaagtttgtcttttctgaaactggcttagtgattgagtatcatgtaataattataatataatttagcttgaaagatgctctacattatgaccaataaaaagggaatgtatgttttgtttg

SEQ ID NO: 330607 - DNA, 201 bp, Homo sapiens
aaatccagagcaatattctctctacctctgtagttgacttcaacctggcaacagatggccttggaagtcagccggatgccagtatgaatccagttattactagatttccaagcttgagcaagttacttaactcgtcgaacctcactgatgccccttcttctccctggaccaattggctaggggtattaaaggaggctggct

SEQ ID NO: 330608 - DNA, 161 bp, Homo sapiens
gtttatttgttaatcttgataacctgcaatagtttacagccagaatggcagcttttatatatgtacactcatttaaatacagtttcataccgtaaatagccatggggcaaaatatctgcctctaggcacaaaaaaaaaatctttgccgctaaataaacacc

SEQ ID NO: 330609 - DNA, 289 bp, Homo sapiens
cccactagaccatagccagaggagacagagccttatttaaggctttatcctcaggctggtgcccaacaagcttaggaggtgcttgttgaactaacttgaaatgactccatcactgtcagccaagtcatcctccactatccttgggcctcagttttcccctctggataagccagacttagacggggtcatttccaaagacattctgcatctcctattctgggattctgtgatatgccccactccttatccatctctaatcttcaagtctccttccctaagctgcaagcct

SEQ ID NO: 330610 - DNA, 317 bp, Homo sapiens
ttttcagaaggctaattaaagctttgtacagagtctttgttttttgttaacttcttatccttgattttccaaagggtaaaattagcagtgttttttggtgttgtggtttggactgcaatccagtagatgatgcttgagagcaatgggtggtacataggctcatattcagtcatgtgactcctttgttcctctttgcatttgaagctgtgctctatgggacagggaggtgatctactcaccaggtccacttctgagctttcagggagccacctcagatcactagcactgggccctcaatttttttgttgctgttaaga

SEQ ID NO: 330611 - DNA, 170 bp, Homo sapiens
aatttaacttgaatggctaagattcgtgctttgggaaagttttttgttgtttaatctgttggttttcattgaaaaactgctgctagaaacaatgtgaattttggaatccaactcgcttggtttagaatactgggtctcgacttctcactgctctatgactttgagcaaat

SEQ ID NO: 330612 - DNA, 1591 bp, Homo sapiens
tgcgggtacggacagcgcatgagcttatgttgagggcggagcccagaccagcccttcgtcctatcctgcccttccagcacctctcagccgtaacttaaactacacttcccagaagcctcctcagccagggacttccgttgtcgtcagcggaagcggtgacagatcatcccaggccacacagaggccggcttggtcactatggaggagataggcatcttggtggagaaggctcaggatgagatcccagcactgtccgtgtcccggccccagaccggcctgtccttcctgggccctgagcctgaggacctggaggacctgtacagccgctacaagaagctgcagcaagagctggagttcctggaggtgcaggaggaatacatcaaagatgagcaaaagaacctgaaaaaggaatttctccatgcccaggaggaggtgaagcgaatccaaagcatcccgctggtcatcggacaatttctggaggctgtggatcagaatacagccatcgtgggctctaccacaggctccaactattatgtgcgcatcctgagcaccatcgatcgggagctgctcaagcccaacgcctcagtggccctccacaagcacagcaatgcactggtggacgtgctgccccccgaagccgacagcagcatcatgatgctcacctcagaccagaagccagatgtgatgtacgcggacatcggaggcatggacatccagaagcaggaggtgcgggaggccgtggagctcccgctcacgcatttcgagctctacaagcagatcggcatcgatcccccccgaggcgtcctcatgtatggcccacctggctgtgggaagaccatgttggcaaaggcggtggcacatcacacaacagctgcattcatccgggtcgtgggctcggagtttgtacagaagtatctgggtgagggcccccgcatggtccgggatgtgttccgcctggccaaggagaatgcacctgccatcatcttcatagacgagattgatgccatcgccaccaagagattcgatgctcagacaggggccgacagggaggttcagaggatcctgctggagctgctgaatcagatggatggatttgatcagaatgtcaatgtcaaggtaatcatggccacaaacagagcagacaccctggatccggccctgctacggccaggacggctggaccgtaaaattgaatttccacttcctgaccgccgccagaagagattgattttctccactatcactagcaagatgaacctctctgaggaggttgacttggaagactatgtggcccggccagataagatttcaggagctgatattaactccatctgtcaggagagtggaatgttggctgtccgtgaaaaccgctacattgtcctggccaaggacttcgagaaagcatacaagactgtcatcaagaaggacgagcaggagcatgagttttacaagtgacccttcccttccctccaccacaccactcaggggctggggcttctctcgcacccccagcacctctgtcccaaaacctcattcccttttttctttacccaggattggtttcttcaataaatagataagatcgaatcca

SEQ ID NO: 330613 - DNA, 178 bp, Homo sapiens
agggtggggacgcagcaccttggtcgccatcacccccatctgggccaccctgacccccgtctcaccactcaggggctggggcttctctcgcacccccagcacctctgtcccaaaacctcattcccttttttctttacccaggattggtttcttcaataaatagataagatcgaatcca

SEQ ID NO: 330614 - DNA, 1454 bp, Homo sapiens
  misc_feature (26)..(26): n is a, c, g, or t
aatgtcgctaggtacgaggctggtgntaatcggccgaggcacagaggccggcttggtcactatggaggagataggcatcttggtggagaaggctcaggatgagatcccagcactgtccgtgtcccggccccagaccggcctgtccttcctgggccctgagcctgaggacctggaggacctgtacagccgctacaagaagctgcagcaagagctggagttcctggaggtgcaggaggaatacatcaaagatgagcaaaagaacctgaaaaaggaatttctccatgcccaggaggaggtgaagcgaatccaaagcatcccgctggtcatcggacaatttctggaggctgtggatcagaatacagccatcgtgggctctaccacaggctccaactattatgtgcgcatcctgagcaccatcgatcgggagctgctcaagcccaacgcctcagtggccctccacaagcacagcaatgcactggtggacgtgctgccccccgaagccgacagcagcatcatgatgctcacctcagaccagaagccagatgtgatgtacgcggacatcggaggcatggacatccagaagcaggaggtgcgggaggccgtggagctcccgctcacgcatttcgagctctacaagcagatcggcatcgatcccccccgaggcgtcctcatgtatggcccacctggctgtgggaagaccatgttggcaaaggcggtggcacatcacacaacagctgcattcatccgggtcgtgggctcggagtttgtacagaagtatctgggtgagggcccccgcatggtccgggatgtgttccgcctggccaaggagaatgcacctgccatcatcttcatagacgagattgatgccatcgccaccaagagattcgatgctcagacaggggccgacagggaggttcagaggatcctgctggagctgctgaatcagatggatggatttgatcagaatgtcaatgtcaaggtaatcatggccacaaacagagcagacaccctggatccggccctgctacggccaggacggctggaccgtaaaattgaatttccacttcctgaccgccgccagaagagattgattttctccactatcactagcaagatgaacctctctgaggaggttgacttggaagactatgtggcccggccagataagatttcaggagctgatattaactccatctgtcaggagagtggaatgttggctgtccgtgaaaaccgctacattgtcctggccaaggacttcgagaaagcatacaagactgtcatcaagaaggacgagcaggagcatgagttttacaagtgacccttcccttccctccaccacaccactcaggggctggggcttctctcgcacccccagcacctctgtcccaaaacctcattcccttttttctttacccaggattggtttcttcaataaatagataagatcgaatcca

SEQ ID NO: 330615 - DNA, 2280 bp, Homo sapiens
  misc_feature (1607)..(1608): n is a, c, g, or t
tgcgggtacggacagcgcatgagcttatgttgagggcggagcccagaccagcccttcgtcctatcctgcccttccagcacctctcagccgtaacttaaactacacttcccagaagcctcctcagccagggacttccgttgtcgtcagcggaagcggtgacagatcatcccaggccacacagaggccggcttggtcactatggaggagataggcatcttggtggagaaggctcaggatgagatcccagcactgtccgtgtcccggccccagaccggcctgtccttcctgggccctgagcctgaggacctggaggacctgtacagccgctacaagaagctgcagcaagagctggagttcctggaggtgcaggaggaatacatcaaagatgagcaaaagaacctgaaaaaggaatttctccatgcccaggaggaggtgaagcgaatccaaagcatcccgctggtcatcggacaatttctggaggctgtggatcagaatacagccatcgtgggctctaccacaggctccaactattatgtgcgcatcctgagcaccatcgatcgggagctgctcaagcccaacgcctcagtggccctccacaagcacagcaatgcactggtggacgtgctgccccccgaagccgacagcagcatcatgatgctcacctcagaccagaagccagatgtgatgtacgcggacatcggaggcatggacatccagaagcaggaggtgcgggaggccgtggagctcccgctcacgcatttcgagctctacaagcagatcggcatcgatcccccccgaggcgtcctcatgtatggcccacctggctgtgggaagaccatgttggcaaaggcggtggcacatcacacaacagctgcattcatccgggtcgtgggctcggagtttgtacagaagtatctgggtgagggcccccgcatggtccgggatgtgttccgcctggccaaggagaatgcacctgccatcatcttcatagacgagattgatgccatcgccaccaagagattcgatgctcagacaggggccgacagggaggttcagaggatcctgctggagctgctgaatcagatggatggatttgatcagaatgtcaatgtcaaggtaatcatggccacaaacagagcagacaccctggatccggccctgctacggccaggacggctggaccgtaaaattgaatttccacttcctgaccgccgccagaagagattgattttctccactatcactagcaagatgaacctctctgaggaggttgacttggaagactatgtggcccggccagataagatttcaggagctgatattaactccatctgtcaggagagtggaatgttggctgtccgtgaaaaccgctacattgtcctggccaaggacttcgagaaagcatacaagactgtcatcaagaaggacgagcaggagcatgagttttacaagtgacccttcccttccctccaccacaccactcaggggctggggcttctctcgcacccccagcacctctgtcccaaaacctcattcccttttttctttacccaggattggtttcttcaataaatagataagatcgaatccaaaaaaaaaaaaaaaannaaaaaaaaaaaaaaaaaaaaaaaaaaaaaaaaaaaaaaaaaaaaaaaaaaaaaaaaaaaaaaaaaaaaaaaaaaaaaaaaaaaggagggggggcgcggcgcgaaacatatctctctctcccggggggcgcaccaacagcgccccccacattttgaggagaaacaaagggggcggccagccacagaagggcgggcgaagaataacaaaaacacacgccgagcgaggcggcgcgcgacggccgacaaacacaaagagagcgaggagggagagaaaacaagcggcgcacacgaggagaaaacacagcggcggagagcgaaccaccatcaccgagggggcggagggagcgaaaccacaacgcggagggaccaacaccacaccccacgccaaggagattaccaaacagcacgcacccaccgcgacgagcaacacaaaaaaaaacacaccccagagacaggacgataaacacaggcgcccgcagcacccacaaacacagcgacgcagataataccagagacggcggaacacggagacccagaaaggtcaaggcgaccacacggagaagaaacaaacaaaaacagtagcacgaaacacatccatttacccaccagcgaggcgccgaccgcaaccaaccacaaaaaccacgccgcgacaccaacaacgacgccacacccc

SEQ ID NO: 330616 - DNA, 1424 bp, Homo sapiens
  misc_feature (11)..(12): n is a, c, g, or t
  misc_feature (22)..(22): n is a, c, g, or t
catacgctagnncgagcctggntgaaatcggccgagggagataggcatcttggtggagaaggctcaggatgagatcccagcactgtccgtgtcccggccccagaccggcctgtccttcctgggccctgagcctgaggacctggaggacctgtacagccgctacaagaagctgcagcaagagctggagttcctggaggtgcaggaggaatacatcaaagatgagcaaaagaacctgaaaaaggaatttctccatgcccaggaggaggtgaagcgaatccaaagcatcccgctggtcatcggacaatttctggaggctgtggatcagaatacagccatcgtgggctctaccacaggctccaactattatgtgcgcatcctgagcaccatcgatcgggagctgctcaagcccaacgcctcagtggccctccacaagcacagcaatgcactggtggacgtgctgccccccgaagccgacagcagcatcatgatgctcacctcagaccagaagccagatgtgatgtacgcggacatcggaggcatggacatccagaagcaggaggtgcgggaggccgtggagctcccgctcacgcatttcgagctctacaagcagatcggcatcgatcccccccgaggcgtcctcatgtatggcccacctggctgtgggaagaccatgttggcaaaggcggtggcacatcacacaacagctgcattcatccgggtcgtgggctcggagtttgtacagaagtatctgggtgagggcccccgcatggtccgggatgtgttccgcctggccaaggagaatgcacctgccatcatcttcatagacgagattgatgccatcgccaccaagagattcgatgctcagacaggggccgacagggaggttcagaggatcctgctggagctgctgaatcagatggatggatttgatcagaatgtcaatgtcaaggtaatcatggccacaaacagagcagacaccctggatccggccctgctacggccaggacggctggaccgtaaaattgaatttccacttcctgaccgccgccagaagagattgattttctccactatcactagcaagatgaacctctctgaggaggttgacttggaagactatgtggcccggccagataagatttcaggagctgatattaactccatctgtcaggagagtggaatgttggctgtccgtgaaaaccgctacattgtcctggccaaggacttcgagaaagcatacaagactgtcatcaagaaggacgagcaggagcatgagttttacaagtgacccttcccttccctccaccacaccactcaggggctggggcttctctcgcacccccagcacctctgtcccaaaacctcattcccttttttctttacccaggattggtttcttcaataaatagataagatcgaatcca

SEQ ID NO: 330617 - DNA, 1592 bp, Homo sapiens
tgcgggtacggacagcgcatgagcttatgttgagggcggagcccagaccagcccttcgtcctatcctgcccttccagcacctctcagccgtaacttaaactacacttcccagaagcctcctcagccagggacttccgttgtcgtcagcggaagcggtgacagatcatcccaggccacacagaggccggcttggtcactatggaggagataggcatcttggtggagaaggctcaggatgagatcccagcactgtccgtgtcccggccccagaccggcctgtccttcctgggccctgagcctgaggacctggaggacctgtacagccgctacaagaagctgcagcaagagctggagttcctggaggtgcaggaggaatacatcaaagatgagcaaaagaacctgaaaaaggaatttctccatgcccaggaggaggtgaagcgaatccaaagcatcccgctggtcatcggacaatttctggaggctgtggatcagaatacagccatcgtgggctctaccacaggctccaactattatgtgcgcatcctgagcaccatcgatcgggagctgctcaagcccaacgcctcagtggccctccacaagcacagcaatgcactggtggacgtgctgccccccgaagccgacagcagcatcatgatgctcacctcagaccagaagccagatgtgatgtacgcggacatcggaggcatggacatccagaagcaggaggtgcgggaggccgtggagctcccgctcacgcatttcgagctctacaagcagatcggcatcgatcccccccgaggcgtcctcatgtatggcccacctggctgtgggaagaccatgttggcaaaggcggtggcacatcacacaacagctgcattcatccgggtcgtgggctcggagtttgtacagaagtatctgggtgagggcccccgcatggtccgggatgtgttccgcctggccaaggagaatgcacctgccatcatcttcatagacgagattgatgccatcgccaccaagagattcgatgctcagacaggggccgacagggaggttcagaggatcctgctggagctgctgaatcagatggatggatttgatcagaatgtcaatgtcaaggtaatcatggccacaaacagagcagacaccctggatccggccctgctacggccaggacggctggaccgtaaaattgaatttccacttcctgaccgccgccagaagagattgattttctccactatcactagcaagatgaacctctctgaggaggttgacttggaagactatgtggcccggccagataagatttcaggagctgatattaactccatctgtcaggagagtggaatgttggctgtccgtgaaaaccgctacattgtcctggccaaggacttcgagaaagcatacaagactgtcatcaagaaggacgagcaggagcatgagttttacaagtgacccttcccttccctccaccacaccactcaggggctggggcttctctcgcacccccagcacatcgtctaacactggtgccttttctttaacactctcaccttccggtggcttcaaaaaataagtaaacgtaactgcgt

SEQ ID NO: 330618 - DNA, 1731 bp, Homo sapiens
tgcgggtacggacagcgcatgagcttatgttgagggcggagcccagaccagcccttcgtcctatcctgcccttccagcacctctcagccgtaacttaaactacacttcccagaagcctcctcagccagggacttccgttgtcgtcagcggaagcggtgacagatcatcccaggccacacagaggccggcttggtcactatggaggagataggcatcttggtggagaaggctcaggatgagatcccagcactgtccgtgtcccggccccagaccggcctgtccttcctgggccctgagcctgaggacctggaggacctgtacagccgctacaagaagctgcagcaagagctggagttcctggaggtgcaggaggaatacatcaaagatgagcaaaagaacctgaaaaaggaatttctccatgcccaggaggaggtgaagcgaatccaaagcatcccgctggtcatcggacaatttctggaggctgtggatcagaatacagccatcgtgggctctaccacaggctccaactattatgtgcgcatcctgagcaccatcgatcgggagctgctcaagcccaacgcctcagtggccctccacaagcacagcaatgcactggtggacgtgctgccccccgaagccgacagcagcatcatgatgctcacctcagaccagaagccagatgtgatgtacgcggacatcggaggcatggacatccagaagcaggaggtgcgggaggccgtggagctcccgctcacgcatttcgagctctacaagcagatcggcatcgatcccccccgaggcgtcctcatgtatggcccacctggctgtgggaagaccatgttggcaaaggcggtggcacatcacacaacagctgcattcatccgggtcgtgggctcggagtttgtacagaagtatctgggtgagggcccccgcatggtccgggatgtgttccgcctggccaaggagaatgcacctgccatcatcttcatagacgagattgatgccatcgccaccaagagattcgatgctcagacaggggccgacagggaggttcagaggatcctgctggagctgctgaatcagatggatggatttgatcagaatgtcaatgtcaaggtttggggtttgggatggacaaggggaggtgtggtgtaggaactggggaaagttgggggctggcacctaaggggtggttatcgtgacaggaaggaggtaggagtgcagagatctgagctggcctgccccccaatgtcaaggtaatcatggccacaaacagagcagacaccctggatccggccctgctacggccaggacggctggaccgtaaaattgaatttccacttcctgaccgccgccagaagagattgattttctccactatcactagcaagatgaacctctctgaggaggttgacttggaagactatgtggcccggccagataagatttcaggagctgatattaactccatctgtcaggagagtggaatgttggctgtccgtgaaaaccgctacattgtcctggccaaggacttcgagaaagcatacaagactgtcatcaagaaggacgagcaggagcatgagttttacaagtgacccttcccttccctccaccacaccactcaggggctggggcttctctcgcacccccagcacctctgtcccaaaacctcattcccttttttctttacccaggattggtttcttcaataaatagataagatcgaatcca

SEQ ID NO: 330619 - DNA, 1798 bp, Homo sapiens
tgcgggtacggacagcgcatgagcttatgttgagggcggagcccagaccagcccttcgtcctatcctgcccttccagcacctctcagccgtaacttaaactacacttcccagaagcctcctcagccagggacttccgttgtcgtcagcggaagcggtgacagatcatcccaggccacacagaggccggcttggtcactatggaggagataggcatcttggtggagaaggctcaggatgagatcccagcactgtccgtgtcccggccccagaccggcctgtccttcctgggccctgagcctgaggacctggaggacctgtacagccgctacaagaagctgcagcaagagctggagttcctggaggtgcaggaggaatacatcaaagatgagcaaaagaacctgaaaaaggaatttctccatgcccaggaggaggtgaagcgaatccaaagcatcccgctggtcatcggacaatttctggaggctgtggatcagaatacagccatcgtgggctctaccacaggctccaactattatgtgcgcatcctgagcaccatcgatcgggagctgctcaagcccaacgcctcagtggccctccacaagcacagcaatgcactggtggacgtgctgccccccgaagccgacagcagcatcatgatgctcacctcagaccagaagccagatgtgatgtacgcggacatcggaggcatggacatccagaagcaggaggtgcgggaggccgtggagctcccgctcacgcatttcgagctctacaagcagatcggcatcgatcccccccgaggcgtcctcatgtatggcccacctggctgtgggaagaccatgttggcaaaggcggtggcacatcacacaacagctgcattcatccgggtcgtgggctcggagtttgtacagaagtatctgggtgagggcccccgcatggtccgggatgtgttccgcctggccaaggagaatgcacctgccatcatcttcatagacgagattgatgccatcgccaccaagagattcgatgctcagacaggggccgacagggaggttcagaggatcctgctggagctgctgaatcagatggatggatttgatcagaatgtcaatgtcaaggtaatcatggccacaaacagagcagacaccctggatccggccctgctacggccaggacggctggaccgtaaaattgaatttccacttcctgaccgccgccagaagagattgattttctccactatcactagcaagatgaacctctctgaggaggttgacttggaagactgtatcctgctccagaagtcagggaggggccctagttgggaacggggattagatcttcagctcaacttctgccagcaccacagcccagactgtgcaggtgggaccaaggtccagggaggaggggaggtgacagagatggccaaagatgacttccagccccaggcatttaccccatcacacagggaatagtttccttaactcgctgcagatgtggcccggccagataagatttcaggagctgatattaactccatctgtcaggagagtggaatgttggctgtccgtgaaaaccgctacattgtcctggccaaggacttcgagaaagcatacaagactgtcatcaagaaggacgagcaggagcatgagttttacaagtgacccttcccttccctccaccacaccactcaggggctggggcttctctcgcacccccagcacctctgtcccaaaacctcattcccttttttctttacccaggattggtttcttcaataaatagataagatcgaatcca

SEQ ID NO: 330620 - DNA, 1361 bp, Homo sapiens
  misc_feature (26)..(26): n is a, c, g, or t
aatgtcgctaggtacgaggctggtgntaatcggccgaggcacagaggccggcttggtcactatggaggagataggcatcttggtggagaaggctcaggatgagatcccagcactgtccgtgtcccggccccagaccggcctgtccttcctgggccctgagcctgaggacctggaggacctgtacagccgctacaaggaggaggtgaagcgaatccaaagcatcccgctggtcatcggacaatttctggaggctgtggatcagaatacagccatcgtgggctctaccacaggctccaactattatgtgcgcatcctgagcaccatcgatcgggagctgctcaagcccaacgcctcagtggccctccacaagcacagcaatgcactggtggacgtgctgccccccgaagccgacagcagcatcatgatgctcacctcagaccagaagccagatgtgatgtacgcggacatcggaggcatggacatccagaagcaggaggtgcgggaggccgtggagctcccgctcacgcatttcgagctctacaagcagatcggcatcgatcccccccgaggcgtcctcatgtatggcccacctggctgtgggaagaccatgttggcaaaggcggtggcacatcacacaacagctgcattcatccgggtcgtgggctcggagtttgtacagaagtatctgggtgagggcccccgcatggtccgggatgtgttccgcctggccaaggagaatgcacctgccatcatcttcatagacgagattgatgccatcgccaccaagagattcgatgctcagacaggggccgacagggaggttcagaggatcctgctggagctgctgaatcagatggatggatttgatcagaatgtcaatgtcaaggtaatcatggccacaaacagagcagacaccctggatccggccctgctacggccaggacggctggaccgtaaaattgaatttccacttcctgaccgccgccagaagagattgattttctccactatcactagcaagatgaacctctctgaggaggttgacttggaagactatgtggcccggccagataagatttcaggagctgatattaactccatctgtcaggagagtggaatgttggctgtccgtgaaaaccgctacattgtcctggccaaggacttcgagaaagcatacaagactgtcatcaagaaggacgagcaggagcatgagttttacaagtgacccttcccttccctccaccacaccactcaggggctggggcttctctcgcacccccagcacctctgtcccaaaacctcattcccttttttctttacccaggattggtttcttcaataaatagataagatcgaatcca

SEQ ID NO: 330621 - DNA, 1447 bp, Homo sapiens
tgcgggtacggacagcgcatgagcttatgttgagggcggagcccagaccagcccttcgtcctatcctgcccttccagcacctctcagccgtaacttaaactacacttcccagaagcctcctcagccagggacttccgttgtcgtcagcggaagcggtgacagatcatcccaggccacacagaggccggcttggtcactatggaggagataggcatcttggtggagaaggctcaggatgagatcccagcactgtccgtgtcccggccccagaccggcctgtccttcctgggccctgagcctgaggacctggaggacctgtacagccgctacaagaagctgcagcaagagctggagttcctggaggtgcaggaggaatacatcaaagatgagcaaaagatcctgagcaccatcgatcgggagctgctcaagcccaacgcctcagtggccctccacaagcacagcaatgcactggtggacgtgctgccccccgaagccgacagcagcatcatgatgctcacctcagaccagaagccagatgtgatgtacgcggacatcggaggcatggacatccagaagcaggaggtgcgggaggccgtggagctcccgctcacgcatttcgagctctacaagcagatcggcatcgatcccccccgaggcgtcctcatgtatggcccacctggctgtgggaagaccatgttggcaaaggcggtggcacatcacacaacagctgcattcatccgggtcgtgggctcggagtttgtacagaagtatctgggtgagggcccccgcatggtccgggatgtgttccgcctggccaaggagaatgcacctgccatcatcttcatagacgagattgatgccatcgccaccaagagattcgatgctcagacaggggccgacagggaggttcagaggatcctgctggagctgctgaatcagatggatggatttgatcagaatgtcaatgtcaaggtaatcatggccacaaacagagcagacaccctggatccggccctgctacggccaggacggctggaccgtaaaattgaatttccacttcctgaccgccgccagaagagattgattttctccactatcactagcaagatgaacctctctgaggaggttgacttggaagactatgtggcccggccagataagatttcaggagctgatattaactccatctgtcaggagagtggaatgttggctgtccgtgaaaaccgctacattgtcctggccaaggacttcgagaaagcatacaagactgtcatcaagaaggacgagcaggagcatgagttttacaagtgacccttcccttccctccaccacaccactcaggggctggggcttctctcgcacccccagcacctctgtcccaaaacctcattcccttttttctttacccaggattggtttcttcaataaatagataagatcgaatcca

SEQ ID NO: 330622 - DNA, 1674 bp, Homo sapiens
tgcgggtacggacagcgcatgagcttatgttgagggcggagcccagaccagcccttcgtcctatcctgcccttccagcacctctcagccgtaacttaaactacacttcccagaagcctcctcagccagggacttccgttgtcgtcagcggaagcggtgacagatcatcccaggccacacagaggccggcttggtcactatggaggagataggcatcttggtggagaaggctcaggatgagatcccagcactgtccgtgtcccggccccagaccggcctgtccttcctgggccctgagcctgaggacctggaggacctgtacagccgctacaagaagctgcagcaagagctggagttcctggaggtgcaggaggaatacatcaaagatgagcaaaagaacctgaaaaaggaatttctccatgcccaggaggaggtgaagcgaatccaaagcatcccgctggtcatcggacaatttctggaggctgtggatcagaatacagccatcgtgggctctaccacaggctccaactattatgtgcgcatcctgagcaccatcgatcgggagctgctcaagcccaacgcctcagtggccctccacaagcacagcaatgcactggtggacgtgctgccccccgaagccgacagcagcatcatgatgctcacctcaggtaaagggggagcctgcagctgggagggccccatggggaccttgaggacctggccaggagccccagctctgctctcccaccagaccagaagccagatgtgatgtacgcggacatcggaggcatggacatccagaagcaggaggtgcgggaggccgtggagctcccgctcacgcatttcgagctctacaagcagatcggcatcgatcccccccgaggcgtcctcatgtatggcccacctggctgtgggaagaccatgttggcaaaggcggtggcacatcacacaacagctgcattcatccgggtcgtgggctcggagtttgtacagaagtatctgggtgagggcccccgcatggtccgggatgtgttccgcctggccaaggagaatgcacctgccatcatcttcatagacgagattgatgccatcgccaccaagagattcgatgctcagacaggggccgacagggaggttcagaggatcctgctggagctgctgaatcagatggatggatttgatcagaatgtcaatgtcaaggtaatcatggccacaaacagagcagacaccctggatccggccctgctacggccaggacggctggaccgtaaaattgaatttccacttcctgaccgccgccagaagagattgattttctccactatcactagcaagatgaacctctctgaggaggttgacttggaagactatgtggcccggccagataagatttcaggagctgatattaactccatctgtcaggagagtggaatgttggctgtccgtgaaaaccgctacattgtcctggccaaggacttcgagaaagcatacaagactgtcatcaagaaggacgagcaggagcatgagttttacaagtgacccttcccttccctccaccacaccactcaggggctggggcttctctcgcacccccagcacctctgtcccaaaacctcattcccttttttctttacccaggattggtttcttcaataaatagataagatcgaatcca

SEQ ID NO: 330623 - DNA, 1369 bp, Homo sapiens
catttggttctcaggtttgttataattttttatttttatgggcttggtgagggaggtaggtgatggtttcgataataactagtatggggataaggggtgtaggtgtgccttgtggtaagaagtgggctagggcatttttaatcttagagcgaaagcctataatcactgcgcccgctcataaggggatggccatggctaggtttatagatagttgggtggttggtgtaaatgagtgaggcaggagtccgaggaggttagttgtggcaataaaaatgattaaggatactagtataagagatcaggttcgtcctttagtgttgtgtatggttatcatttgttttgaggttagttgattagtcattgtgggtggtgattagtcggttgttgatgagatatttggaggtggggatcaatagagggggaaatagaatgatcagtactgcggcgggtaggcctaggcacagaggccggcttggtcactatggaggagataggcatcttggtggagaaggctcaggatgagatcccagcactgtccgtgtcccggccccagaccggcctgtccttcctgggccctgagcctgaggacctggaggacctgtacagccgctacaagaagctgcagcaagagctggagttcctggaggtgcaggaggaatacatcaaagatgagcaaaagaacctgaaaaaggaatttctccatgcccaggaggaggtgaagcgaatccaaagcatcccgctggtcatcggacaatttctggaggctgtggatcagaatacagccatcgtgggctctaccacagtccgggatgtgttccgcctggccaaggagaatgcacctgccatcatcttcatagacgagattgatgccatcgccaccaagagattcgatgctcagacaggggccgacagggaggttcagaggatcctgctggagctgctgaatcagatggatggatttgatcagaatgtcaatgtcaaggtaatcatggccacaaacagagcagacaccctggatccggccctgctacggccaggacggctggaccgtaaaattgaatttccacttcctgaccgccgccagaagagattgattttctccactatcactagcaagatgaacctctctgaggaggttgacttggaagactatgtggcccggccagataagatttcaggagctgatattaactccatctgtcaggagagtgggactggtgggtgtccggtgaaaccgtacattgtcctgggcagacttcggaaagccatcagactggctcacgaaggcgcgcacggcctgatttcagtgaccttccctctcccaaacatcgggtgggttttcccccccctttccaaccttccctttttc

SEQ ID NO: 330624 - DNA, 683 bp, Homo sapiens
tgcgggtacggacagcgcatgagcttatgttgagggcggagcccagaccagcccttcgtcctatcctgcccttccagcacctctcagccgtaacttaaactacacttcccagaagcctcctcagccagggacttccgttgtcgtcagcggaagcggtgacagatcatcccaggccacacagaggccggcttggtcactatggaggagataggcatcttggtggagaaggctcaggatgagatcccagcactgtccgtgtcccggccccagaccggcctgtccttcctgggccctgagcctgaggacctggaggacctgtacagccgctacaagaagctgcagcaagagctggagttcctggaggtgcaggaggaatacatcaaagatgagcaaaagaacctgaaaaaggaatttctccatgcccaggaggaggtgaagcgaatccaaagcatcccgctggtcatcggacaatttctggaggctgtggatcagaatacagccatcgtgggctctaccacaggctccaactattatgtgcgcatcctgagcaccatcgatcgggagctgctcaagcccaacgcctcagtggccctcgcacccccagcacctctgtcccaaaacctcattcccttttttctttacccaggattggtttcttcaataaatagataagatcgaatcca

SEQ ID NO: 330625 - DNA, 886 bp, Homo sapiens
catttggttctcaggtttgttataattttttatttttatgggcttggtgagggaggtaggtgatggtttcgataataactagtatggggataaggggtgtaggtgtgccttgtggtaagaagtgggctagggcatttttaatcttagagcgaaagcctataatcactgcgcccgctcataaggggatggccatggctaggtttatagatagttgggtggttggtgtaaatgagtgaggcaggagtccgaggaggttagttgtggcaataaaaatgattaaggatactagtataagagatcaggttcgtcctttagtgttgtgtatggttatcatttgttttgaggttagttgattagtcattgtgggtggtgattagtcggttgttgatgagatatttggaggtggggatcaatagagggggaaatagaatgatcagtactgcggcgggtaggcctaggcacagaggccggcttggtcactatggaggagataggcatcttggtggagaaggctcaggatgagatcccagcactgtccgtgtcccggccccagaccggcctgtccttcctgggccctgagcctgaggacctggaggacctgtacagccgctacaagaagctgcagcaagagctggagttcctggaggtgcaggaggaatacatcaaagatgagcaaaagaacctgaaaaaggaatttctccatgcccaggaggaggtgaagcgaatccaaagcatcccgctggtcatcggacaatttctggaggctgtggatcagaatacagccatcgtgggctctaccacaggtgtgctaaggacacctcattcattcatctgtccacttaacaactatttcctaccatgtgctaggcagcagcaaacaaggcag

SEQ ID NO: 330626 - DNA, 649 bp, Homo sapiens
  misc_feature (16)..(16): n is a, c, g, or t
  misc_feature (24)..(24): n is a, c, g, or t
  misc_feature (94)..(94): n is a, c, g, or t
  misc_feature (117)..(117): n is a, c, g, or t
tggtgggcccccttgncgggtttnccccggccaagagatccctccttatcttaaagcggagttgttccttcccccccaagaaatcgtttctaanaaagggcccgcaggaggttaagngatcctcctggaccttttgaataagatggtggatttgatcaggatttcaatttcaaggtaatcatggccacaaacagagcagacaccctggatccggccctgctacggccaggacggctggaccgtaaaattgaatttccacttcctgaccgccgccagaagagattgattttctccactatcactagcaagatgaacctctctgaggaggttgacttggaagactatgtggcccggccagataagatttcaggagctgatattaactccatctgtcaggagagtggaatgttggctgtccgtgaaaaccgctacattgtcctggccaaggacttcgagaaagcatacaagactgtcatcaagaaggacgagcaggagcatgagttttacaagtgacccttcccttccctccaccacaccactcaggggctggggcttctctcgcacccccagcacctctgtcccaaaacctcattcccttttttctttacccaggattggtttcttcaataaatagataagatcgaatcca

SEQ ID NO: 330627 - DNA, 1874 bp, Homo sapiens
catttggttctcaggtttgttataattttttatttttatgggcttggtgagggaggtaggtgatggtttcgataataactagtatggggataaggggtgtaggtgtgccttgtggtaagaagtgggctagggcatttttaatcttagagcgaaagcctataatcactgcgcccgctcataaggggatggccatggctaggtttatagatagttgggtggttggtgtaaatgagtgaggcaggagtccgaggaggttagttgtggcaataaaaatgattaaggatactagtataagagatcaggttcgtcctttagtgttgtgtatggttatcatttgttttgaggttagttgattagtcattgtgggtggtgattagtcggttgttgatgagatatttggaggtggggatcaatagagggggaaatagaatgatcagtactgcggcgggtaggcctaggcacagaggccggcttggtcactatggaggagataggcatcttggtggagaaggctcaggatgagatcccagcactgtccgtgtcccggccccagaccggcctgtccttcctgggccctgagcctgaggacctggaggacctgtacagccgctacaagaagctgcagcaagagctggagttcctggaggtgcaggaggaatacatcaaagatgagcaaaagaacctgaaaaaggaatttctccatgcccaggaggaggtgaagcgaatccaaagcatcccgctggtcatcggacaatttctggaggctgtggatcagaatacagccatcgtgggctctaccacaggctccaactattatgtgcgcatcctgagcaccatcgatcgggagctgctcaagcccaacgcctcagtggccctccacaagcacagcaatgcactggtggacgtgctgccccccgaagccgacagcagcatcatgatgctcacctcagaccagaagccagatgtgatgtacgcggacatcggaggcatggacatccagaagcaggaggtgcgggaggccgtggagctcccgctcacgcatttcgagctctacaagcagatcggcatcgatcccccccgaggcgtcctcatgtatggcccacctggctgtgggaagaccatgttggcaaaggcggtggcacatcacacaacagctgcattcatccgggtcgtgggctcggagtttgtacagaagtatctgggtgagggcccccgcatggtccgggatgtgttccgcctggccaaggagaatgcacctgccatcatcttcatagacgagattgatgccatcgccaccaagagattcgatgctcagacaggggccgacagggaggttcagaggatcctgctggagctgctgaatcagatggatggatttgatcagaatgtcaatgtcaaggtaatcatggccacaaacagagcagacaccctggatccggccctgctacggccaggacggctggaccgtaaaattgaatttccacttcctgaccgccgccagaagagattgattttctccactatcactagcaagatgaacctctctgaggaggttgacttggaagactatgtggcccggccagataagatttcaggagctgatattaactccatctgtcaggagagtggaatgttggctgtccgtgaaaaccgctacattgtcctggccaaggacttcgagaaagcatacaagactgtcatcaagaaggacgagcaggagcatgagttttacaagtgacccttcccttccctccaccacaccactcaggggctggggcttctctcgcacccccagcacctctgtcccaaaacctcattcccttttttctttacccaggattggtttcttcaataaatagataagatcgaatcca

SEQ ID NO: 330628 - DNA, 2045 bp, Homo sapiens
  misc_feature (1598)..(1598): n is a, c, g, or t
  misc_feature (1601)..(1601): n is a, c, g, or t
tgcgggtacggacagcgcatgagcttatgttgagggcggagcccagaccagcccttcgtcctatcctgcccttccagcacctctcagccgtaacttaaactacacttcccagaagcctcctcagccagggacttccgttgtcgtcagcggaagcggtgacagatcatcccaggccacacagaggccggcttggtcactatggaggagataggcatcttggtggagaaggctcaggatgagatcccagcactgtccgtgtcccggccccagaccggcctgtccttcctgggccctgagcctgaggacctggaggacctgtacagccgctacaagaagctgcagcaagagctggagttcctggaggtgcaggaggaatacatcaaagatgagcaaaagaacctgaaaaaggaatttctccatgcccaggaggaggtgaagcgaatccaaagcatcccgctggtcatcggacaatttctggaggctgtggatcagaatacagccatcgtgggctctaccacaggctccaactattatgtgcgcatcctgagcaccatcgatcgggagctgctcaagcccaacgcctcagtggccctccacaagcacagcaatgcactggtggacgtgctgccccccgaagccgacagcagcatcatgatgctcacctcagaccagaagccagatgtgatgtacgcggacatcggaggcatggacatccagaagcaggaggtgcgggaggccgtggagctcccgctcacgcatttcgagctctacaagcagatcggcatcgatcccccccgaggcgtcctcatgtatggcccacctggctgtgggaagaccatgttggcaaaggcggtggcacatcacacaacagctgcattcatccgggtcgtgggctcggagtttgtacagaagtatctgggtgagggcccccgcatggtccgggatgtgttccgcctggccaaggagaatgcacctgccatcatcttcatagacgagattgatgccatcgccaccaagagattcgatgctcagacaggggccgacagggaggttcagaggatcctgctggagctgctgaatcagatggatggatttgatcagaatgtcaatgtcaaggtaatcatggccacaaacagagcagacaccctggatccggccctgctacggccaggacggctggaccgtaaaattgaatttccacttcctgaccgccgccagaagagattgattttctccactatcactagcaagatgaacctctctgaggaggttgacttggaagactatgtggcccggccagataagatttcaggagctgatattaactccatctgtcaggagagtggaatgttggctgtccgtgaaaaccgctacattgtcctggccaaggacttcgagaaagcatacaagactgtcatcaagaaggacgagcaggagcatgagttttacaagtgacccttcccttccctccaccacaccactcaggggctggggcttctctcgcacccccagcacctctgtcccaaaacctcattcccttttttctttacccaggattggtttcttcaataaatagataagatcgaatccaagaaaanganaaaaaaaagggagaaacaaacaaagggaaaaaaaacacctacaagaaacatgcgagagaccccaaaaggaaaacagggaagcacaaagcaaaaaaccgacaaactactgactatgcgcagtagggaaccacgcaacaaaagcacgacacggagaaaaccagtaaaggggactcaggcccgcacagactaccagtccctgtttgttttgaagggtagaaatagaataaggcttatcaccctcaaatgtgtgttgaggaagaagtaaagtgggagatagcggatgataatatggagagaaatatcagaatgcagataatgctaattgtagatgtaagatcaatgaaacagtagaaagaagagaaagttaggaacaagtgtataaatgataaaatgtgtgacaggaattattcagaatatatagaagaagtaagattggagaaacat

SEQ ID NO: 330629 - DNA, 2326 bp, Homo sapiens
tgcgggtacggacagcgcatgagcttatgttgagggcggagcccagaccagcccttcgtcctatcctgcccttccagcacctctcagccgtaacttaaactacacttcccagaagcctcctcagccagggacttccgttgtcgtcagcggaagcggtgacagatcatcccaggccacacagaggccggcttggtcactatggaggagataggcatcttggtggagaaggctcaggatgagatcccagcactgtccgtgtcccggccccagaccggcctgtccttcctgggccctgagcctgaggacctggaggacctgtacagccgctacaagaagctgcagcaagagctggagttcctggaggtgcaggaggaatacatcaaagatgagcaaaagaacctgaaaaaggaatttctccatgcccaggaggaggtgaagcgaatccaaagcatcccgctggtcatcggacaatttctggaggctgtggatcagaatacagccatcgtgggctctaccacaggctccaactattatgtgcgcatcctgagcaccatcgatcgggagctgctcaagcccaacgcctcagtggccctccacaagcacagcaatgcactggtggacgtgctgccccccgaagccgacagcagcatcatgatgctcacctcagaccagaagccagatgtgatgtacgcggacatcggaggcatggacatccagaagcaggaggtgcgggaggccgtggagctcccgctcacgcatttcgagctctacaagcagatcggcatcgatcccccccgaggcgtcctcatgtatggcccacctggctgtgggaagaccatgttggcaaaggcggtggcacatcacacaacagctgcattcatccgggtcgtgggctcggagtttgtacagaagtatctgggtgagggcccccgcatggtccgggatgtgttccgcctggccaaggagaatgcacctgccatcatcttcatagacgagattgatgccatcgccaccaagagattcgatgctcagacaggggccgacagggaggttcagaggatcctgctggagctgctgaatcagatggatggatttgatcagaatgtcaatgtcaaggtaatcatggccacaaacagagcagacaccctggatccggccctgctacggccaggacggctggaccgtaaaattgaatttccacttcctgaccgccgccagaagagattgattttctccactatcactagcaagatgaacctctctgaggaggttgacttggaagactatgtggcccggccagataagatttcaggagctgatattaactccatctgtcaggagagtggaatgttggctgtccgtgaaaaccgctacattgtcctggccaaggacttcgagaaagcatacaagactgtcatcaagaaggacgagcaggagcatgagttttacaagtgacccttcccttccctccaccacaccactcaggggctggggcttctctcgcacccccagcacctctgtcccaaaacctcattcccttttttctttacccaggattggtttcttcaataaatagataagatcgaatccaccatttaatttcttcttagaagtttaactcctttggagaatgtgggccttgaataggatcctctgggtccctcttaatctgacagatgagcagacgaggtgcatggcctgggttgcagcttgagagaaccaaaatattcaaaccagatgacttccaaaatgtggggaaagggatggaaaatgaacctgagatggagtccttaatcacgggataaagccctgtgcatctccctcatttcctacaggtaaaagacagtaaagaaattcaggtcacaggccttgggagttcataggaaggagatgtccagtgctgtccagtagaactttgcacaatgatggatatgttctgtgttctccagtatggtagctgctcgccacatgtggctaataagtacctgaaatatggctagcatgactgagaaactgaactttttttttttttttttttttttttttttttttttttttttttttttttttttttttttttttttttttaggggttttccccattttattttggcccccaagaaaaagggggggccccttttttttctttaaccaaaaaatttttaaaacctccccctttttccatttgggaaaaagtactttttgcccaaaacttgcatttgttggaaaattaccctgttcataaaccccggttttttttccaaaaatgggaaaagttttttttttttaagaaacccctctttttttcaaaaaccaattccccggg

SEQ ID NO: 330630 - DNA, 1753 bp, Homo sapiens
tgcgggtacggacagcgcatgagcttatgttgagggcggagcccagaccagcccttcgtcctatcctgcccttccagcacctctcagccgtaacttaaactacacttcccagaagcctcctcagccagggacttccgttgtcgtcagcggaagcggtgacagatcatcccaggccacacagaggccggcttggtcactatggaggagataggcatcttggtggagaaggctcaggatgagatcccagcactgtccgtgtcccggccccagaccggcctgtccttcctgggccctgagcctgaggacctggaggacctgtacagccgctacaagaagctgcagcaagagctggagttcctggaggtgcaggaggaatacatcaaagatgagcaaaagaacctgaaaaaggaatttctccatgcccaggaggaggtgaagcgaatccaaagcatcccgctggtcatcggacaatttctggaggctgtggatcagaatacagccatcgtgggctctaccacaggctccaactattatgtgcgcatcctgagcaccatcgatcgggagctgctcaagcccaacgcctcagtggccctccacaagcacagcaatgcactggtggacgtgctgccccccgaagccgacagcagcatcatgatgctcacctcagaccagaagccagatgtgatgtacgcggacatcggaggcatggacatccagaagcaggaggtgcgggaggccgtggagctcccgctcacgcatttcgagctctacaagcagatcggcatcgatcccccccgaggcgtcctcatgtatggcccacctggctgtgggaagaccatgttggcaaaggcggtggcacatcacacaacagctgcattcatccgggtcgtgggctcggagtttgtacagaagtatctgggtgagggcccccgcatggtccgggatgtgttccgcctggccaaggagaatgcacctgccatcatcttcatagacgagattgatgccatcgccaccaagagattcgatgctcagacaggggccgacagggaggttcagaggatcctgctggagctgctgaatcagatggatggatttgatcagaatgtcaatgtcaaggtaatcatggccacaaacagagcagacaccctggatccggccctgctacggccaggacggctggaccgtaaaattgaatttccacttcctgaccgccgccagaagagattgattttctccactatcactagcaagatgaacctctctgaggaggttgacttggaagactatgtggcccggccagataagatttcaggagctgatattaactccatctgtcaggagagtggaatgttggctgtccgtgaaaaccgctacattgtcctggccaaggacttcgagaaagcatacaagactgtcatcaagaaggacgagcaggagcatgagttttacaagtgacccttcccttccctccaccacaccactcaggggctggggcttctctcgcacccccagcacctctgtcccaaaacctcattcccttttttctttacccaggattggtttcttcaataaatagataagatcgaatccaaaaacagacgacacaacacaaagaaactcgggcatcattctcggggggcgcacacagttatggatggcaacaggcaaagatgtgtccgacgcacggtttcggtgacagaagtgaacatgacggcccaatacggcgtggaaacgagacccgtcgcgcaagcct

SEQ ID NO: 330631 - DNA, 1624 bp, Homo sapiens
tgcgggtacggacagcgcatgagcttatgttgagggcggagcccagaccagcccttcgtcctatcctgcccttccagcacctctcagccgtaacttaaactacacttcccagaagcctcctcagccagggacttccgttgtcgtcagcggaagcggtgacagatcatcccaggccacacagaggccggcttggtcactatggaggagataggcatcttggtggagaaggctcaggatgagatcccagcactgtccgtgtcccggccccagaccggcctgtccttcctgggccctgagcctgaggacctggaggacctgtacagccgctacaagaagctgcagcaagagctggagttcctggaggtgcaggaggaatacatcaaagatgagcaaaagaacctgaaaaaggaatttctccatgcccaggaggaggtgaagcgaatccaaagcatcccgctggtcatcggacaatttctggaggctgtggatcagaatacagccatcgtgggctctaccacaggctccaactattatgtgcgcatcctgagcaccatcgatcgggagctgctcaagcccaacgcctcagtggccctccacaagcacagcaatgcactggtggacgtgctgccccccgaagccgacagcagcatcatgatgctcacctcagaccagaagccagatgtgatgtacgcggacatcggaggcatggacatccagaagcaggaggtgcgggaggccgtggagctcccgctcacgcatttcgagctctacaagcagatcggcatcgatcccccccgaggcgtcctcatgtatggcccacctggctgtgggaagaccatgttggcaaaggcggtggcacatcacacaacagctgcattcatccgggtcgtgggctcggagtttgtacagaagtatctgggtgagggcccccgcatggtccgggatgtgttccgcctggccaaggagaatgcacctgccatcatcttcatagacgagattgatgccatcgccaccaagagattcgatgctcagacaggggccgacagggaggttcagaggatcctgctggagctgctgaatcagatggatggatttgatcagaatgtcaatgtcaaggtaatcatggccacaaacagagcagacaccctggatccggccctgctacggccaggacggctggaccgtaaaattgaatttccacttcctgaccgccgccagaagagattgattttctccactatcactagcaagatgaacctctctgaggaggttgacttggaagactatgtggcccggccagataagatttcaggagctgatattaactccatctgtcaggagagtggaatgttggctgtccgtgaaaaccgctacattgtcctggccaaggacttcgagaaagcatacaagactgtcatcaagaaggacgagcaggagcatgagttttacaagtgacccttcccttccctccaccacaccactcaggggctggggcttctctcgcacccccagcacctctgtcccaaaacctcattcccttttttctttacccaggaccatcatcgatagacggaaaaagtaaaaaaaaccggagggctcaattcgggcggaaaaagggacggaa

SEQ ID NO: 330632 - DNA, 1613 bp, Homo sapiens
  misc_feature (1585)..(1585): n is a, c, g, or t
tgcgggtacggacagcgcatgagcttatgttgagggcggagcccagaccagcccttcgtcctatcctgcccttccagcacctctcagccgtaacttaaactacacttcccagaagcctcctcagccagggacttccgttgtcgtcagcggaagcggtgacagatcatcccaggccacacagaggccggcttggtcactatggaggagataggcatcttggtggagaaggctcaggatgagatcccagcactgtccgtgtcccggccccagaccggcctgtccttcctgggccctgagcctgaggacctggaggacctgtacagccgctacaagaagctgcagcaagagctggagttcctggaggtgcaggaggaatacatcaaagatgagcaaaagaacctgaaaaaggaatttctccatgcccaggaggaggtgaagcgaatccaaagcatcccgctggtcatcggacaatttctggaggctgtggatcagaatacagccatcgtgggctctaccacaggctccaactattatgtgcgcatcctgagcaccatcgatcgggagctgctcaagcccaacgcctcagtggccctccacaagcacagcaatgcactggtggacgtgctgccccccgaagccgacagcagcatcatgatgctcacctcagaccagaagccagatgtgatgtacgcggacatcggaggcatggacatccagaagcaggaggtgcgggaggccgtggagctcccgctcacgcatttcgagctctacaagcagatcggcatcgatcccccccgaggcgtcctcatgtatggcccacctggctgtgggaagaccatgttggcaaaggcggtggcacatcacacaacagctgcattcatccgggtcgtgggctcggagtttgtacagaagtatctgggtgagggcccccgcatggtccgggatgtgttccgcctggccaaggagaatgcacctgccatcatcttcatagacgagattgatgccatcgccaccaagagattcgatgctcagacaggggccgacagggaggttcagaggatcctgctggagctgctgaatcagatggatggatttgatcagaatgtcaatgtcaaggtaatcatggccacaaacagagcagacaccctggatccggccctgctacggccaggacggctggaccgtaaaattgaatttccacttcctgaccgccgccagaagagattgattttctccactatcactagcaagatgaacctctctgaggaggttgacttggaagactatgtggcccggccagataagatttcaggagctgatattaactccatctgtcaggagagtggaatgttggctgtccgtgaaaaccgctacattgtcctggccaaggacttcgagaaagcatacaagactgtcatcaagaaggacgagcaggagcatgagttttacaagtgacccttcccttccctccaccacaccactcaggggctggggcttctctcgcacccccagcacctctgtcccaaaacctcattcccttttttctttacccaggacttttagcaataaccgcccttggtcttcntgtcaacatatattagttaaggtgacgc

SEQ ID NO: 330633 - DNA, 1128 bp, Homo sapiens
  misc_feature (1078)..(1078): n is a, c, g, or t
tgcgggtacggacagcgcatgagcttatgttgagggcggagcccagaccagcccttcgtcctatcctgcccttccagcacctctcagccgtaacttaaactacacttcccagaagcctcctcagccagggacttccgttgtcgtcagcggaagcggtgacagatcatcccaggccacacagaggccggcttggtcactatggaggagataggcatcttggtggagaaggctcaggatgagatcccagcactgtccgtgtcccggccccagaccggcctgtccttcctgggccctgagcctgaggacctggaggacctgtacagccgctacaagaagctgcagcaagagctggagttcctggaggtgcaggaggaatacatcaaagatgagcaaaagaacctgaaaaaggaatttctccatgcccaggaggaggtgaagcgaatccaaagcatcccgctggtcatcggacaatttctggaggctgtggatcagaatacagccatcgtgggctctaccacaggctccaactattatgtgcgcatcctgagcaccatcgatcgggagctgctcaagcccaacgcctcagtggccctccacaagcacagcaatgcactggtggacgtgctgccccccgaagccgacagcagcatcatgatgctcacctcagaccagaagccagatgtgatgtacgcggacatcggaggcatggacatccagaagcaggaggtgcgggaggccgtggagctcccgctcacgcatttcgagctctacaagcagatcggcatcgatcccccccgaggcgtcctcatgtatggcccacctggctgtgggaagaccatgttggcaaaggcggtggcacatcacacaacagctgcattcatccgggtcgtgggctcggagtttgtacagaagtatctgggtgagggcccccgcatggtccgggatgtgttccgcctggccaaggagaatgcacctgccatcatcttcatagacgagattgatgccatcgccaccaagagattcgatgctcagacaggggcgacggaggtccaaggaccgcggagtggaccatgggggnttgccagccgcggtactggcaaaaaaaccgattgcctggcgagggccata

SEQ ID NO: 330634 - DNA, 1530 bp, Homo sapiens
tgcgggtacggacagcgcatgagcttatgttgagggcggagcccagaccagcccttcgtcctatcctgcccttccagcacctctcagccgtaacttaaactacacttcccagaagcctcctcagccagggacttccgttgtcgtcagcggaagcggtgacagatcatcccaggccacacagaggccggcttggtcactatggaggagataggcatcttggtggagaaggctcaggatgagatcccagcactgtccgtgtcccggccccagaccggcctgtccttcctgggccctgagcctgaggacctggaggacctgtacagccgctacaagaagctgcagcaagagctggagttcctggaggtgcaggaggaatacatcaaagatgagcaaaagtggtcatcggacaatttctggaggctgtggatcagaatacagccatcgtgggctctaccacaggctccaactattatgtgcgcatcctgagcaccatcgatcgggagctgctcaagcccaacgcctcagtggccctccacaagcacagcaatgcactggtggacgtgctgccccccgaagccgacagcagcatcatgatgctcacctcagaccagaagccagatgtgatgtacgcggacatcggaggcatggacatccagaagcaggaggtgcgggaggccgtggagctcccgctcacgcatttcgagctctacaagcagatcggcatcgatcccccccgaggcgtcctcatgtatggcccacctggctgtgggaagaccatgttggcaaaggcggtggcacatcacacaacagctgcattcatccgggtcgtgggctcggagtttgtacagaagtatctgggtgagggcccccgcatggtccgggatgtgttccgcctggccaaggagaatgcacctgccatcatcttcatagacgagattgatgccatcgccaccaagagattcgatgctcagacaggggccgacagggaggttcagaggatcctgctggagctgctgaatcagatggatggatttgatcagaatgtcaatgtcaaggtaatcatggccacaaacagagcagacaccctggatccggccctgctacggccaggacggctggaccgtaaaattgaatttccacttcctgaccgccgccagaagagattgattttctccactatcactagcaagatgaacctctctgaggaggttgacttggaagactatgtggcccggccagataagatttcaggagctgatattaactccatctgtcaggagagtggaatgttggctgtccgtgaaaaccgctacattgtcctggccaaggacttcgagaaagcatacaagactgtcatcaagaaggacgagcaggagcatgagttttacaagtgacccttcccttccctccaccacaccactcaggggctggggcttctctcgcacccccagcacctctgtcccaaaacctcattcccttttttctttacccaggattggtttcttcaataaatagataagatcgaatcca

SEQ ID NO: 330635 - DNA, 1133 bp, Homo sapiens
aaggcagggagacggggtaaatcggacgaggcagaaccagccatttgtgggctctaccacaggctccaactattatgtgcgcatcctgagcaccatcgatcgggagctgctcaagcccaacgcctcagtggccctccacaagcacagcaatgcactggtggacgtgctgccccccgaagccgacagcagcatcatgatgctcacctcagaccagaagccagatgtgatgtacgcggacatcggaggcatggacatccagaagcaggaggtgcgggaggccgtggagctcccgctcacgcatttcgagctctacaagcagatcggcatcgatcccccccgaggcgtcctcatgtatggcccacctggctgtgggaagaccatgttggcaaaggcggtggcacatcacacaacagctgcattcatccgggtcgtgggctcggagtttgtacagaagtatctgggtgagggcccccgcatggtccgggatgtgttccgcctggccaaggagaatgcacctgccatcatcttcatagacgagattgatgccatcgccaccaagagattcgatgctcagacaggggccgacagggaggttcagaggatcctgctggagctgctgaatcagatggatggatttgatcagaatgtcaatgtcaaggtaatcatggccacaaacagagcagacaccctggatccggccctgctacggccaggacggctggaccgtaaaattgaatttccacttcctgaccgccgccagaagagattgattttctccactatcactagcaagatgaacctctctgaggaggttgacttggaagactatgtggcccggccagataagatttcaggagctgatattaactccatctgtcaggagagtggaatgttggctgtccgtgaaaaccgctacattgtcctggccaaggacttcgagaaagcatacaagactgtcatcaagaaggacgagcaggagcatgagttttacaagtgacccttcccttccctccaccacaccactcaggggctggggcttctctcgcacccccagcacctctgtcccaaaacctcattcccttttttctttacccaggattggtttcttcaataaatagataagatcgaatcca

SEQ ID NO: 330636 - DNA, 3330 bp, Homo sapiens
gcggccgctggaggcgttgccgccgcccgcccgaggagcccccggtggccgcccaggtcgcagcccaagtcgcggcgccggtcgctctcccgtccccgccgactccctccgatggcggcaccaagaggcccgggctgcgggcgctgaagaagatgggcctgacggaggacgaggacgtgcgcgccatgctgcggggctcccggctccgcaagatccgctcgcgcacgtggcacaaggagcggctgtaccggctgcaggaggacggcctgagcgtgtggttccagcggcgcatcccgcgtgcgccatcgcagcacatcttcttcgtgcagcacatcgaggcggtccgcgagggccaccagtccgagggcctgcggcgcttcgggggtgccttcgcgccagcgcgctgcctcaccatcgccttcaagggccgccgcaagaacctggacctggcggcgcccacggctgaggaagcgcagcgctgggtgcgcggtctgaccaagctccgcgcgcgcctggacgccatgagccagcgcgagcggctagaccactggatccactcctatctgcaccgggctgactccaaccaggacagcaagatgagcttcaaggagatcaagagcctgctgagaatggtcaacgtggacatgaacgacatgtacgcctacctcctcttcaaggagtgtgaccactccaacaacgaccgtctagagggggctgagatcgaggagttcctgcggcggctgctgaagcggccggagctggaggagatcttccatcagtactcgggcgaggaccgcgtgctgagtgcccctgagctgctggagttcctggaggaccagggcgaggagggcgccacactggcccgcgcccagcagctcattcagacctatgagctcaacgagacagccaagcagcatgagctgatgacactggatggcttcatgatgtacctgttgtcgccggagggggctgccttggacaacacccacacgtgtgtgttccaggacatgaaccagccccttgcccactacttcatctcttcctcccacaacacctatctgactgactcccagatcggggggcccagcagcaccgaggcctatgttagggcctttgcccagggatgccgctgcgtggagctggactgctgggaggggccaggaggggagcccgtcatctatcatggccataccctcacctccaagattctcttccgggacgtggtccaagccgtgcgcgaccatgccttcacgctgtccccttaccctgtcatcctatccctggagaaccactgcgggctggagcagcaggctgccatggcccgccacctctgcaccatcctgggggacatgctggtgacacaggcgctggactccccaaatcccgaggagctgccatccccagagcagctgaagggccgggtcctggtgaagggaaagaagttgcccgctgctcggagcgaggatggccgggctctgtcggatcgggaggaggaggaggaggatgacgaggaggaagaagaggaggtggaggctgcagcgcagaggcggctggccaagcagatctccccggagctgtcggccctggctgtgtactgccacgccacccgcctgcggaccctgcaccctgcccccaacgccccacaaccctgccaggtcagctccctcagcgagcgcaaagccaagaaactcattcgggaggcagggaacagctttgtcaggcacaatgcccgccagctgacccgcgtgtacccgctggggctgcggatgaactcagccaactacagtccccaggagatgtggaactcgggctgtcagctggtggccttgaacttccagacgccaggctacgagatggacctcaatgccgggcgcttcctagtcaatgggcagtgtggctacgtcctaaaacctgcctgcctgcggcaacctgactcgacctttgaccccgagtacccaggacctcccagaaccactctcagcatccaggtgctgactgcacagcagctgcccaagctgaatgccgagaagccacactccattgtggaccccctggtgcgcattgagatccatggggtgcccgcagactgtgcccggcaggagactgactacgtgctcaacaatggcttcaacccccgctgggggcagaccctgcagttccagctgcgggctccggagctggcactggtccggtttgtggtggaagattatgacgccacctcccccaatgactttgtgggccagtttacactgcctcttagcagcctaaagcaagggtaccgccacatacacctgctttccaaggacggggcctcactgtcaccagccacgctcttcatccaaatccgcatccagcgctcctgagggcccacctcactcgccttggggttctgcgagtgccagtccacatcccctgcagagccctctcctcctctggagtcaggtggtgggagtaccagccccccagcccacccacttggcccactcagcccattcaccaggcgctggtctcacctgggtgctgagggctgcctgggcccctcctgaagaacagaaaggtgttcatgtgacttcagtgagctccaaccctggggccctgagatggccccagctcctcttgtcctcagcccacccctcattgtgacttatgaggagcaagcctgttgctgccaggagacttggggagcaggacacttgtgggccctcagttcccctctgtcctcccgtgggccatcccagcctccttcccccagaggagcgcagtcactccacttggccccgaccccgagcttagcccctaagccctcctttaccccaggccttcctggactcctccctccagctccggaacctgagctccccttcccttctcaaagcaagaagggagcgctgaggcatgaagccctggggaaactggcagtaggttttggtttttattttttgagacagggtctcgctccgtcgcccaggctggagtgcaatgttgcaatcatggctcactgcagctttgaactcccaggctcaagcgatcctcccatctcagcctcctgagtagctgggactacaggcacaggccaccaaacctggctaatgtttaaattttatgtagagatggcggggggggcgggggtctccctatgttgcccaggctggtctcgagctcctgacctcaagtgatcctcctgccccagcattccaaagtgctgggattacaggtgtgagccactgcctggcctggccgtaggtttgtaactgtttcatagaagagccctggagaagacagtagaatgagcctatctagtttaaaaaataaagaagcacgttgatttca

SEQ ID NO: 330637 - DNA, 3281 bp, Homo sapiens
gcggccgctggaggcgttgccgccgcccgcccgaggagcccccggtggccgcccaggtcgcagcccaagtcgcggcgccggtcgctctcccgtccccgccgactccctccgatggcggcaccaagaggcccgggctgcgggcgctgaagaagatgggcctgacggaggacgaggacgtgcgcgccatgctgcggggctcccggctccgcaagatccgctcgcgcacgtggcacaaggagcggctgtaccggctgcaggaggacggcctgagcgtgtggttccagcggcgcatcccgcgtgcgccatcgcagcacatcttcttcgtgcagcacatcgaggcggtccgcgagggccaccagtccgagggcctgcggcgcttcgggggtgccttcgcgccagcgcgctgcctcaccatcgccttcaagggccgccgcaagaacctggacctggcggcgcccacggctgaggaagcgcagcgctgggtgcgcggtctgaccaagctccgcgcgcgcctggacgccatgagccagcgcgagcggctagaccactggatccactcctatctgcaccgggctgactccaaccaggacagcaagatgagcttcaaggagatcaagagcctgctgagaatggtcaacgtggacatgaacgacatgtacgcctacctcctcttcaaggagtgtgaccactccaacaacgaccgtctagagggggctgagatcgaggagttcctgcggcggctgctgaagcggccggagctggaggagatcttccatcagtactcgggcgaggaccgcgtgctgagtgcccctgagctgctggagttcctggaggaccagggcgaggagggcgccacactggcccgcgcccagcagctcattcagacctatgagctcaacgagacagccaagcagcatgagctgatgacactggatggcttcatgatgtacctgttgtcgccggagggggctgccttggacaacacccacacgtgtgtgttccaggacatgaaccagccccttgcccactacttcatctcttcctcccacaacacctatctgactgactcccagatcggggggcccagcagcaccgaggcctatgttagggcctttgcccagggatgccgctgcgtggagctggactgctgggaggggccaggaggggagcccgtcatctatcatggccataccctcacctccaagattctcttccgggacgtggtccaagccgtgcgcgaccatgccttcacgctgtccccttaccctgtcatcctatccctggagaaccactgcgggctggagcagcaggctgccatggcccgccacctctgcaccatcctgggggacatgctggtgacacaggcgctggactccccaaatcccgaggagctgccatccccagagcagctgaagggccgggtcctggtgaagggaaagaagttgcccgctgctcggagcgaggatggccgggctctgtcggatcgggaggaggaggaggaggatgacgaggaggaagaagaggaggtggaggctgcagcgcagaggcggctggccaagcagatctccccggagctgtcggccctggctgtgtactgccacgccacccgcctgcggaccctgcaccctgcccccaacgccccacaaccctgccagggaacagctttgtcaggcacaatgcccgccagctgacccgcgtgtacccgctggggctgcggatgaactcagccaactacagtccccaggagatgtggaactcgggctgtcagctggtggccttgaacttccagacgccaggctacgagatggacctcaatgccgggcgcttcctagtcaatgggcagtgtggctacgtcctaaaacctgcctgcctgcggcaacctgactcgacctttgaccccgagtacccaggacctcccagaaccactctcagcatccaggtgctgactgcacagcagctgcccaagctgaatgccgagaagccacactccattgtggaccccctggtgcgcattgagatccatggggtgcccgcagactgtgcccggcaggagactgactacgtgctcaacaatggcttcaacccccgctgggggcagaccctgcagttccagctgcgggctccggagctggcactggtccggtttgtggtggaagattatgacgccacctcccccaatgactttgtgggccagtttacactgcctcttagcagcctaaagcaagggtaccgccacatacacctgctttccaaggacggggcctcactgtcaccagccacgctcttcatccaaatccgcatccagcgctcctgagggcccacctcactcgccttggggttctgcgagtgccagtccacatcccctgcagagccctctcctcctctggagtcaggtggtgggagtaccagccccccagcccacccacttggcccactcagcccattcaccaggcgctggtctcacctgggtgctgagggctgcctgggcccctcctgaagaacagaaaggtgttcatgtgacttcagtgagctccaaccctggggccctgagatggccccagctcctcttgtcctcagcccacccctcattgtgacttatgaggagcaagcctgttgctgccaggagacttggggagcaggacacttgtgggccctcagttcccctctgtcctcccgtgggccatcccagcctccttcccccagaggagcgcagtcactccacttggccccgaccccgagcttagcccctaagccctcctttaccccaggccttcctggactcctccctccagctccggaacctgagctccccttcccttctcaaagcaagaagggagcgctgaggcatgaagccctggggaaactggcagtaggttttggtttttattttttgagacagggtctcgctccgtcgcccaggctggagtgcaatgttgcaatcatggctcactgcagctttgaactcccaggctcaagcgatcctcccatctcagcctcctgagtagctgggactacaggcacaggccaccaaacctggctaatgtttaaattttatgtagagatggcggggggggcgggggtctccctatgttgcccaggctggtctcgagctcctgacctcaagtgatcctcctgccccagcattccaaagtgctgggattacaggtgtgagccactgcctggcctggccgtaggtttgtaactgtttcatagaagagccctggagaagacagtagaatgagcctatctagtttaaaaaataaagaagcacgttgatttca

SEQ ID NO: 330638 - DNA, 3754 bp, Homo sapiens
gcggccgctggaggcgttgccgccgcccgcccgaggagcccccggtggccgcccaggtcgcagcccaagtcgcggcgccggtcgctctcccgtccccgccgactccctccgatggcggcaccaagaggcccgggctgcgggcgctgaagaagatgggcctgacggaggacgaggacgtgcgcgccatgctgcggggctcccggctccgcaagatccgctcgcgcacgtggcacaaggagcggctgtaccggctgcaggaggacggcctgagcgtgtggttccagcggcgcatcccgcgtgcgccatcgcagcacatcttcttcgtgcagcacatcgaggcggtccgcgagggccaccagtccgagggcctgcggcgcttcgggggtgccttcgcgccagcgcgctgcctcaccatcgccttcaagggccgccgcaagaacctggacctggcggcgcccacggctgaggaagcgcagcgctgggtgcgcggtctgaccaagctccgcgcgcgcctggacgccatgagccagcgcgagcggctagaccactggatccactcctatctgcaccgggctgactccaaccaggacagcaagatgagcttcaaggagatcaagagcctgctgagaatggtcaacgtggacatgaacgacatgtacgcctacctcctcttcaaggagtgtgaccactccaacaacgaccgtctagagggggctgagatcgaggagttcctgcggcggctgctgaagcggccggagctggaggagatcttccatcagtactcgggcgaggaccgcgtgctgagtgcccctgagctgctggagttcctggaggaccagggcgaggagggcgccacactggcccgcgcccagcagctcattcagacctatgagctcaacgagacagccaagcagcatgagctgatgacactggatggcttcatgatgtacctgttgtcgccggagggggctgccttggacaacacccacacgtgtgtgttccaggacatgaaccagccccttgcccactacttcatctcttcctcccacaacacctatctgactgactcccagatcggggggcccagcagcaccgaggcctatgttagggcctttgcccagggatgccgctgcgtggagctggactgctgggaggggccaggaggggagcccgtcatctatcatggccataccctcacctccaagattctcttccgggacgtggtccaagccgtgcgcgaccatgccttcacgctgtccccttaccctgtcatcctatccctggagaaccactgcgggctggagcagcaggctgccatggcccgccacctctgcaccatcctgggggacatgctggtgacacaggcgctggactccccaaatcccgaggagctgccatccccagagcagctgaagggccgggtcctggtgaagggaaagaagttgcccgctgctcggagcgaggatggccgggctctgtcggatcgggaggaggaggaggaggatgacgaggaggaagaagaggaggtggaggctgcagcgcagaggcggctggccaagcagatctccccggagctgtcggccctggctgtgtactgccacgccacccgcctgcggaccctgcaccctgcccccaacgccccacaaccctgccaggtcagctccctcagcgagcgcaaagccaagaaactcattcgggaggcagggaacagctttgtcaggcacaatgcccgccagctgacccgcgtgtacccgctggggctgcggatgaactcagccaactacagtccccaggagatgtggaactcgggctgtcagctggtggccttgaacttccagacgccaggctacgagatggacctcaatgccgggcgcttcctagtcaatgggcagtgtggctacgtcctaaaacctgcctgcctgcggcaacctgactcgacctttgaccccgagtacccaggacctcccagaaccactctcagcatccaggtgctgactgcacagcagctgcccaagctgaatgccgagaagccacactccattgtggaccccctggtgcgcattgagatccatggggtgcccgcagactgtgcccggcaggagactgactacgtgctcaacaatggcttcaacccccgctgggggcagaccctgcagttccagctgcgggctccggagctggcactggtccggtttgtggtggaagattatgacgccacctcccccaatgactttgtgggccagtttacactgcctcttagcagcctaaagcaagggtaccgccacatacacctgctttccaaggacggggcctcactgtcaccagccacgctcttcatccaaatccgcatccagcgctcctgagggcccacctcactcgccttggggttctgcgagtgccagtccacatcccctgcagagccctctcctcctctggagtcaggtggtgggagtaccagccccccagcccacccacttggcccactcagcccattcaccaggcgctggtctcacctgggtgctgagggctgcctgggcccctcctgaagaacagaaaggtgttcatgtgacttcagtgagctccaaccctggggccctgagatggccccagctcctcttgtcctcagcccacccctcattgtgacttatgaggagcaagcctgttgctgccaggagacttggggagcaggacacttgtgggccctcagttcccctctgtcctcccgtgggccatcccagcctccttcccccagaggagcgcagtcactccacttggccccgaccccgagcttagcccctaagccctcctttaccccaggccttcctggactcctccctccagctccggaacctgagctccccttcccttctcaaagcaagaagggagcgctgaggcatgaagccctggggaaactggcagtaggttttggtttttattttttgagacagggtctcgctccgtcgcccaggctggagtgcaatgttgcaatcatggctcactgcagctttgaactcccaggctcaagcgatcctcccatctcagcctcctgagtagctgggactacaggcacaggccaccaaacctggctaatgtttaaattttatgtagagatggcggggggggcgggggtctccctatgttgcccaggctggtctcgagctcctgacctcaagtgatcctcctgccccagcattccaaagtgctgggattacaggtgtgagccactgcctggcctggccgtaggtttgtaactgtttcatagaagagccctggagaagacagtagaatgagcctatctagtttaaaaaataaagaagcacgttgatttcaaacaaaaaaaaaaaaaactctcgagaatagttctctctctccccggaagagacctttgggcccggacattagcgggcgccccctctttcttcacccgggccacgtctccttgctggggagccccatccgcctggcccgggtggccctcgcgtggggtctcgggggaacgcaaagacttgtcatccctgtggcgaaaagccggagatgggccctaaacaccaagatcggcggccaggtccgagccggaaccgccgggtgacaggtgccaggccaagctcggggagcttggtgcacagccttgcggagcggagaagaaggaaagtcccctggcaaagaggccgcatcggacccaaactggtagatgtcaccacctcgggtgggtgaatacacagcaacaggggcgggcgaaatgtctcccggtagg

SEQ ID NO: 330639 - DNA, 3680 bp, Homo sapiens
gcggccgctggaggcgttgccgccgcccgcccgaggagcccccggtggccgcccaggtcgcagcccaagtcgcggcgccggtcgctctcccgtccccgccgactccctccgatggcggcaccaagaggcccgggctgcgggcgctgaagaagatgggcctgacggaggacgaggacgtgcgcgccatgctgcggggctcccggctccgcaagatccgctcgcgcacgtggcacaaggagcggctgtaccggctgcaggaggacggcctgagcgtgtggttccagcggcgcatcccgcgtgcgccatcgcagcacatcttcttcgtgcagcacatcgaggcggtccgcgagggccaccagtccgagggcctgcggcgcttcgggggtgccttcgcgccagcgcgctgcctcaccatcgccttcaagggccgccgcaagaacctggacctggcggcgcccacggctgaggaagcgcagcgctgggtgcgcggtctgaccaagctccgcgcgcgcctggacgccatgagccagcgcgagcggctagaccactggatccactcctatctgcaccgggctgactccaaccaggacagcaagatgagcttcaaggagatcaagagcctgctgagaatggtcaacgtggacatgaacgacatgtacgcctacctcctcttcaaggagtgtgaccactccaacaacgaccgtctagagggggctgagatcgaggagttcctgcggcggctgctgaagcggccggagctggaggagatcttccatcagtactcgggcgaggaccgcgtgctgagtgcccctgagctgctggagttcctggaggaccagggcgaggagggcgccacactggcccgcgcccagcagctcattcagacctatgagctcaacgagacagccaagcagcatgagctgatgacactggatggcttcatgatgtacctgttgtcgccggagggggctgccttggacaacacccacacgtgtgtgttccaggacatgaaccagccccttgcccactacttcatctcttcctcccacaacacctatctgactgactcccagatcggggggcccagcagcaccgaggcctatgttagggcctttgcccagggatgccgctgcgtggagctggactgctgggaggggccaggaggggagcccgtcatctatcatggccataccctcacctccaagattctcttccgggacgtggtccaagccgtgcgcgaccatgccttcacgctgtccccttaccctgtcatcctatccctggagaaccactgcgggctggagcagcaggctgccatggcccgccacctctgcaccatcctgggggacatgctggtgacacaggcgctggactccccaaatcccgaggagctgccatccccagagcagctgaagggccgggtcctggtgaagggaaagaagttgcccgctgctcggagcgaggatggccgggctctgtcggatcgggaggaggaggaggaggatgacgaggaggaagaagaggaggtggaggctgcagcgcagaggcggctggccaagcagatctccccggagctgtcggccctggctgtgtactgccacgccacccgcctgcggaccctgcaccctgcccccaacgccccacaaccctgccaggtcagctccctcagcgagcgcaaagccaagaaactcattcgggaggcagggaacagctttgtcaggcacaatgcccgccagctgacccgcgtgtacccgctggggctgcggatgaactcagccaactacagtccccaggagatgtggaactcgggctgtcagctggtggccttgaacttccagacgccaggctacgagatggacctcaatgccgggcgcttcctagtcaatgggcagtgtggctacgtcctaaaacctgcctgcctgcggcaacctgactcgacctttgaccccgagtacccaggacctcccagaaccactctcagcatccaggtgctgactgcacagcagctgcccaagctgaatgccgagaagccacactccattgtggaccccctggtgcgcattgagatccatggggtgcccgcagactgtgcccggcaggagactgactacgtgctcaacaatggcttcaacccccgctgggggcagaccctgcagttccagctgcgggctccggagctggcactggtccggtttgtggtggaagattatgacgccacctcccccaatgactttgtgggccagtttacactgcctcttagcagcctaaagcaagggtaccgccacatacacctgctttccaaggacggggcctcactgtcaccagccacgctcttcatccaaatccgcatccagcgctcctgagggcccacctcactcgccttggggttctgcgagtgccagtccacatcccctgcagagccctctcctcctctggagtcaggtggtgggagtaccagccccccagcccacccacttggcccactcagcccattcaccaggcgctggtctcacctgggtgctgagggctgcctgggcccctcctgaagaacagaaaggtgttcatgtgacttcagtgagctccaaccctggggccctgagatggccccagctcctcttgtcctcagcccacccctcattgtgacttatgaggagcaagcctgttgctgccaggagacttggggagcaggacacttgtgggccctcagttcccctctgtcctcccgtgggccatcccagcctccttcccccagaggagcgcagtcactccacttggccccgaccccgagcttagcccctaagccctcctttaccccaggccttcctggactcctccctccagctccggaacctgagctccccttcccttctcaaagcaagaagggagcgctgaggcatgaagccctggggaaactggcagtaggttttggtttttattttttgagacagggtctcgctccgtcgcccaggctggagtgcaatgttgcaatcatggctcactgcagctttgaactcccaggctcaagcgatcctcccatctcagcctcctgagtagctgggactacaggcacaggccaccaaacctggctaatgtttaaattttatgtagagatggcggggggggcgggggtctccctatgttgcccaggctggtctcgagctcctgacctcaagtgatcctcctgccccagcattccaaagtgctgggattacaggtgtgagccactgcctggcctggccgtaggtttgtaactgtttcatagaagagccctggagaagacagtagaatgagcctatctagtttaaaaaataaagaagcacgttgatttcaccaccgccactccctgagcacctctatgctgccacccccacaggcccatgaggagggacagggctggatgagtttcttgggcctctcccctcaacagggcatggacttggctaagacagccagggggtggcagcaggagatgccacagctctaaatagcccgatccctgctcctggcttaaagctgctgcgagtatcacaagactgtctgaggatgccaattcagcaggtcagcgcctccccacaacacacacacacacacacacacacacacactcacacatacacagaggggccttgaatgaggaggagacaggagtctgagggaccctcagactgccactctccagg

SEQ ID NO: 330640 - DNA, 3180 bp, Homo sapiens
gcggccgctggaggcgttgccgccgcccgcccgaggagcccccggtggccgcccaggtcgcagcccaagtcgcggcgccggtcgctctcccgtccccgccgactccctccgatggcggcaccaagaggcccgggctgcgggcgctgaagaagatgggcctgacggaggacgaggacgtgcgcgccatgctgcggggctcccggctccgcaagatccgctcgcgcacgtggcacaaggagcggctgtaccggctgcaggaggacggcctgagcgtgtggttccagcggcgcatcccgcgtgcgccatcgcagcacatcttcttcgtgcagcacatcgaggcggtccgcgagggccaccagtccgagggcctgcggcgcttcgggggtgccttcgcgccagcgcgctgcctcaccatcgccttcaagggccgccgcaagaacctggacctggcggcgcccacggctgaggaagcgcagcgctgggtgcgcggtctgaccaagctccgcgcgcgcctggacgccatgagccagcgcgagcggctagaccactggatccactcctatctgcaccgggctgactccaaccaggacagcaagatgagcttcaaggagatcaagagcctgctgagaatggtcaacgtggacatgaacgacatgtacgcctacctcctcttcaaggagtgtgaccactccaacaacgaccgtctagagggggctgagatcgaggagttcctgcggcggctgctgaagcggccggagctggaggagatcttccatcagtactcgggcgaggaccgcgtgctgagtgcccctgagctgctggagttcctggaggaccagggcgaggagggcgccacactggcccgcgcccagcagctcattcagacctatgagctcaacgagacagccaagcagcatgagctgatgacactggatggcttcatgatgtacctgttgtcgccggagggggctgccttggacaacacccacacgtgtgtgttccaggacatgaaccagccccttgcccactacttcatctcttcctcccacaacacctatctgactgactcccagatcggggggcccagcagcaccgaggcctatgttagggcctttgcccagggatgccgctgcgtggagctggactgctgggaggggccaggaggggagcccgtcatctatcatggccataccctcacctccaagattctcttccgggacgtggtccaagccgtgcgcgaccatgccttcacgctgtccccttaccctgtcatcctatccctggagaaccactgcgggctggagcagcaggctgccatggcccgccacctctgcaccatcctgggggacatgctggtgacacaggcgctggactccccaaatcccgaggagctgccatccccagagcagctgaagggccgggtcctggtgaagggaaagaagttgcccgctgctcggagcgaggatggccgggctctgtcggatcgggaggaggaggaggaggatgacgaggaggaagaagaggaggtggaggctgcagcgcagaggcggctggccaagcagatctccccggagctgtcggccctggctgtgtactgccacgccacccgcctgcggaccctgcaccctgcccccaacgccccacaaccctgccaggtcagctccctcagcgagcgcaaagccaagaaactcattcgggaggcagggaacagctttgtcaggcacaatgcccgccagctgacccgcgtgtacccgctggggctgcggatgaactcagccaactacagtccccaggagatgtggaactcgggctgtcagctggtggccttgaacttccagacgccaggctacgagatggacctcaatgccgggcgcttcctagtcaatgggcagtgtggctacgtcctaaaacctgcctgcctgcggcaacctgactcgacctttgaccccgagtacccaggacctcccagaaccactctcagcatccaggtgctgactgcacagcagctgcccaagctgaatgccgagaagccacactccattgtggaccccctggtgcgcattgagatccatggggtgcccgcagactgtgcccggcaggagactgactacgtgctcaacaatgggtaccgccacatacacctgctttccaaggacggggcctcactgtcaccagccacgctcttcatccaaatccgcatccagcgctcctgagggcccacctcactcgccttggggttctgcgagtgccagtccacatcccctgcagagccctctcctcctctggagtcaggtggtgggagtaccagccccccagcccacccacttggcccactcagcccattcaccaggcgctggtctcacctgggtgctgagggctgcctgggcccctcctgaagaacagaaaggtgttcatgtgacttcagtgagctccaaccctggggccctgagatggccccagctcctcttgtcctcagcccacccctcattgtgacttatgaggagcaagcctgttgctgccaggagacttggggagcaggacacttgtgggccctcagttcccctctgtcctcccgtgggccatcccagcctccttcccccagaggagcgcagtcactccacttggccccgaccccgagcttagcccctaagccctcctttaccccaggccttcctggactcctccctccagctccggaacctgagctccccttcccttctcaaagcaagaagggagcgctgaggcatgaagccctggggaaactggcagtaggttttggtttttattttttgagacagggtctcgctccgtcgcccaggctggagtgcaatgttgcaatcatggctcactgcagctttgaactcccaggctcaagcgatcctcccatctcagcctcctgagtagctgggactacaggcacaggccaccaaacctggctaatgtttaaattttatgtagagatggcggggggggcgggggtctccctatgttgcccaggctggtctcgagctcctgacctcaagtgatcctcctgccccagcattccaaagtgctgggattacaggtgtgagccactgcctggcctggccgtaggtttgtaactgtttcatagaagagccctggagaagacagtagaatgagcctatctagtttaaaaaataaagaagcacgttgatttca

SEQ ID NO: 330641 - DNA, 2988 bp, Homo sapiens
gcggccgctggaggcgttgccgccgcccgcccgaggagcccccggtggccgcccaggtcgcagcccaagtcgcggcgccggtcgctctcccgtccccgccgactccctccgatggcggcaccaagaggcccgggctgcgggcgctgaagaagatgggcctgacggaggacgaggacgtgcgcgccatgctgcggggctcccggctccgcaagatccgctcgcgcacgtggcacaaggagcggctgtaccggctgcaggaggacggcctgagcgtgtggttccagcggcgcatcccgcgtgcgccatcgcagcacatcttcttcgtgcagcacatcgaggcggtccgcgagggccaccagtccgagggcctgcggcgcttcgggggtgccttcgcgccagcgcgctgcctcaccatcgccttcaagggccgccgcaagaacctggacctggcggcgcccacggctgaggaagcgcagcgctgggtgcgcggtctgaccaagctccgcgcgcgcctggacgccatgagccagcgcgagcggctagaccactggatccactcctatctgcaccgggctgactccaaccaggacagcaagatgagcttcaaggagatcaagagcctgctgagaatggtcaacgtggacatgaacgacatgtacgcctacctcctcttcaaggagtgtgaccactccaacaacgaccgtctagagggggctgagatcgaggagttcctgcggcggctgctgaagcggccggagctggaggagatcttccatcagtactcgggcgaggaccgcgtgctgagtgcccctgagctgctggagttcctggaggaccagggcgaggagggcgccacactggcccgcgcccagcagctcattcagacctatgagctcaacgagacagccaagcagcatgagctgatgacactggatggcttcatgatgtacctgttgtcgccggagggggctgccttggacaacacccacacgtgtgtgttccaggacatgaaccagccccttgcccactacttcatctcttcctcccacaacacctatctgactgactcccagatcggggggcccagcagcaccgaggcctatgttagggcctttgcccagggatgccgctgcgtggagctggactgctgggaggggccaggaggggagcccgtcatctatcatggccataccctcacctccaagattctcttccgggacgtggtccaagccgtgcgcgaccatgccttcacgctgtccccttaccctgtcatcctatccctggagaaccactgcgggctggagcagcaggctgccatggcccgccacctctgcaccatcctgggggacatgctggtgacacaggcgctggactccccaaatcccgaggagctgccatccccagagcagctgaagggccgggtcctggtgaagggaaagaagttgcccgctgctcggagcgaggatggccgggctctgtcggatcgggaggaggaggaggaggatgacgaggaggaagaagaggaggtggaggctgcagcgcagaggcggctggccaagcagatctccccggagctgtcggccctggctgtgtactgccacgccacccgcctgcggaccctgcaccctgcccccaacgccccacaaccctgccaggtcagctccctcagcgagcgcaaagccaagaaactcattcgggaggcagggaacagctttgtcaggcacaatgcccgccagctgacccgcgtgtacccgctggggctgcggatgaactcagccaactacagtccccaggagatgtggaactcgggctgtcagctggtggccttgaacttccagacgccaggctacgagatggacctcaatgccgggcgcttcctagtcaatgggcagtgtggctacgtcctaaaacctgcctgcctgcggcaacctgactcgacctttgaccccgagtacccaggacctcccagaaccactctcagcatccaggtgctgactgcacagcagctgcccaagctgaatgccgagaagccacactccattgtggaccccctggtgcgcattgagatccatggggtgcccgcagactgtgcccggcaggagactgactacgtgctcaacaatggcttcaacccccgctgggggcagaccctgcagttccagctgcgggctccggagctggcactggtccggtttgtggtggaagattatgacgccacctcccccaatgactttgtgggccagtttacactgcctcttagcagcctaaagcaagggtaccgccacatacacctgctttccaaggacggggcctcactgtcaccagccacgctcttcatccaaatccgcatccagcgctccctcagttcccctctgtcctcccgtgggccatcccagcctccttcccccagaggagcgcagtcactccacttggccccgaccccgagcttagcccctaagccctcctttaccccaggccttcctggactcctccctccagctccggaacctgagctccccttcccttctcaaagcaagaagggagcgctgaggcatgaagccctggggaaactggcagtaggttttggtttttattttttgagacagggtctcgctccgtcgcccaggctggagtgcaatgttgcaatcatggctcactgcagctttgaactcccaggctcaagcgatcctcccatctcagcctcctgagtagctgggactacaggcacaggccaccaaacctggctaatgtttaaattttatgtagagatggcggggggggcgggggtctccctatgttgcccaggctggtctcgagctcctgacctcaagtgatcctcctgccccagcattccaaagtgctgggattacaggtgtgagccactgcctggcctggccgtaggtttgtaactgtttcatagaagagccctggagaagacagtagaatgagcctatctagtttaaaaaataaagaagcacgttgatttca

SEQ ID NO: 330642 - DNA, 1145 bp, Homo sapiens
gcggccgctggaggcgttgccgccgcccgcccgaggagcccccggtggccgcccaggtcgcagcccaagtcgcggcgccggtcgctctcccgtccccgccgactccctccgatggcggcaccaagaggcccgggctgcgggcgctgaagaagatgggcctgacggaggacgaggacgtgcgcgccatgctgcggggctcccggctccgcaagatccgctcgcgcacgtggcacaaggagcggctgtaccggctgcaggaggacggcctgagcgtgtggttccagcggcgcatcccgcgtgcgccatcgcagcacatcttcttcgtgcagcacatcgaggcggtccgcgagggccaccagtccgagggcctgcggcgcttcgggggtgccttcgcgccagcgcgctgcctcaccatcgccttcaagggccgccgcaagaacctggacctggcggcgcccacggctgaggaagcgcagcgctgggtgcgcggtctgaccaagctccgcgcgcgcctggacgccatgagccagcgcgagcggctagaccactggatccactcctatctgcaccgggctgactccaaccaggacagcaagatgagcttcaaggagatcaagagcctgctgagaatggtcaacgtggacatgaacgacatgtacgcctacctcctcttcaaggagtgtgaccactccaacaacgaccgtctagagggggctgagatcgaggagttcctgcggcggctgctgaagcggccggagctggaggagatcttccatcagtactcgggcgaggaccgcgtgctgagtgcccctgagctgctggagttcctggaggaccagggcgaggagggcgccacactggcccgcgcccagcagctcattcagacctatgagctcaacgagacagccaagcagcatgagctgatgacactggatggcttcatgatgtacctgttgtcgccggagggggctgccttggacaacacccacacgtgtgtgttccaggacatgaaccagccccttgcccactacttcatctcttcctcccacaacacctatctgactgactcccagatcggggggcccagcagcaccgaggcctatgttaggtactgtagcagggggtgaatgtttccgggagcccca

SEQ ID NO: 330643 - DNA, 132 bp, Homo sapiens
cctgcctttgcctgcctgtcctgaagggtctgggagccagatgttgggagatactggcagagggaggggagtggctctgagctgctgcccttccccccacagctgtccccttaccctgtcatcctatccctg

SEQ ID NO: 330644 - DNA, 3426 bp, Homo sapiens
gcggccgctggaggcgttgccgccgcccgcccgaggagcccccggtggccgcccaggtcgcagcccaagtcgcggcgccggtcgctctcccgtccccgccgactccctccgatggcggcaccaagaggcccgggctgcgggcgctgaagaagatgggcctgacggaggacgaggacgtgcgcgccatgctgcggggctcccggctccgcaagatccgctcgcgcacgtggcacaaggagcggctgtaccggctgcaggaggacggcctgagcgtgtggttccagcggcgcatcccgcgtgcgccatcgcagcacatcttcttcgtgcagcacatcgaggcggtccgcgagggccaccagtccgagggcctgcggcgcttcgggggtgccttcgcgccagcgcgctgcctcaccatcgccttcaagggccgccgcaagaacctggacctggcggcgcccacggctgaggaagcgcagcgctgggtgcgcggtctgaccaagctccgcgcgcgcctggacgccatgagccagcgcgagcggctagaccactggatccactcctatctgcaccgggctgactccaaccaggacagcaagatgagcttcaaggagatcaagagcctgctgagaatggtcaacgtggacatgaacgacatgtacgcctacctcctcttcaaggagtgtgaccactccaacaacgaccgtctagagggggctgagatcgaggagttcctgcggcggctgctgaagcggccggagctggaggagatcttccatcagtactcgggcgaggaccgcgtgctgagtgcccctgagctgctggagttcctggaggaccagggcgaggagggcgccacactggcccgcgcccagcagctcattcagacctatgagctcaacgagacagccaagcagcatgagctgatgacactggatggcttcatgatgtacctgttgtcgccggagggggctgccttggacaacacccacacgtgtgtgttccaggacatgaaccagccccttgcccactacttcatctcttcctcccacaacacctatctgactgactcccagatcggggggcccagcagcaccgaggcctatgttagggcctttgcccagggatgccgctgcgtggagctggactgctgggaggggccaggaggggagcccgtcatctatcatggccataccctcacctccaagattctcttccgggacgtggtccaagccgtgcgcgaccatgccttcacgctgtccccttaccctgtcatcctatccctggagaaccactgcgggctggagcagcaggctgccatggcccgccacctctgcaccatcctgggggacatgctggtgacacaggcgctggactccccaaatcccgaggagctgccatccccagagccagcccctcacaaggcggtggttgaataactgactgactggctgccacaggggcgagaaggcctaacccttcatcctccacgttggcccccacagcagctgaagggccgggtcctggtgaagggaaagaagttgcccgctgctcggagcgaggatggccgggctctgtcggatcgggaggaggaggaggaggatgacgaggaggaagaagaggaggtggaggctgcagcgcagaggcggctggccaagcagatctccccggagctgtcggccctggctgtgtactgccacgccacccgcctgcggaccctgcaccctgcccccaacgccccacaaccctgccaggtcagctccctcagcgagcgcaaagccaagaaactcattcgggaggcagggaacagctttgtcaggcacaatgcccgccagctgacccgcgtgtacccgctggggctgcggatgaactcagccaactacagtccccaggagatgtggaactcgggctgtcagctggtggccttgaacttccagacgccaggctacgagatggacctcaatgccgggcgcttcctagtcaatgggcagtgtggctacgtcctaaaacctgcctgcctgcggcaacctgactcgacctttgaccccgagtacccaggacctcccagaaccactctcagcatccaggtgctgactgcacagcagctgcccaagctgaatgccgagaagccacactccattgtggaccccctggtgcgcattgagatccatggggtgcccgcagactgtgcccggcaggagactgactacgtgctcaacaatggcttcaacccccgctgggggcagaccctgcagttccagctgcgggctccggagctggcactggtccggtttgtggtggaagattatgacgccacctcccccaatgactttgtgggccagtttacactgcctcttagcagcctaaagcaagggtaccgccacatacacctgctttccaaggacggggcctcactgtcaccagccacgctcttcatccaaatccgcatccagcgctcctgagggcccacctcactcgccttggggttctgcgagtgccagtccacatcccctgcagagccctctcctcctctggagtcaggtggtgggagtaccagccccccagcccacccacttggcccactcagcccattcaccaggcgctggtctcacctgggtgctgagggctgcctgggcccctcctgaagaacagaaaggtgttcatgtgacttcagtgagctccaaccctggggccctgagatggccccagctcctcttgtcctcagcccacccctcattgtgacttatgaggagcaagcctgttgctgccaggagacttggggagcaggacacttgtgggccctcagttcccctctgtcctcccgtgggccatcccagcctccttcccccagaggagcgcagtcactccacttggccccgaccccgagcttagcccctaagccctcctttaccccaggccttcctggactcctccctccagctccggaacctgagctccccttcccttctcaaagcaagaagggagcgctgaggcatgaagccctggggaaactggcagtaggttttggtttttattttttgagacagggtctcgctccgtcgcccaggctggagtgcaatgttgcaatcatggctcactgcagctttgaactcccaggctcaagcgatcctcccatctcagcctcctgagtagctgggactacaggcacaggccaccaaacctggctaatgtttaaattttatgtagagatggcggggggggcgggggtctccctatgttgcccaggctggtctcgagctcctgacctcaagtgatcctcctgccccagcattccaaagtgctgggattacaggtgtgagccactgcctggcctggccgtaggtttgtaactgtttcatagaagagccctggagaagacagtagaatgagcctatctagtttaaaaaataaagaagcacgttgatttca

SEQ ID NO: 330645 - DNA, 3232 bp, Homo sapiens
gcggccgctggaggcgttgccgccgcccgcccgaggagcccccggtggccgcccaggtcgcagcccaagtcgcggcgccggtcgctctcccgtccccgccgactccctccgatggcggcaccaagaggcccgggctgcgggcgctgaagaagatgggcctgacggaggacgaggacgtgcgcgccatgctgcggggctcccggctccgcaagatccgctcgcgcacgtggcacaaggagcggctgtaccggctgcaggaggacggcctgagcgtgtggttccagcggcgcatcccgcgtgcgccatcgcagcacatcttcttcgtgcagcacatcgaggcggtccgcgagggccaccagtccgagggcctgcggcgcttcgggggtgccttcgcgccagcgcgctgcctcaccatcgccttcaagggccgccgcaagaacctggacctggcggcgcccacggctgaggaagcgcagcgctgggtgcgcggtctgaccaagctccgcgcgcgcctggacgccatgagccagcgcgagcggctagaccactggatccactcctatctgcaccgggctgactccaaccaggacagcaagatgagcttcaaggagatcaagagcctgctgagaatggtcaacgtggacatgaacgacatgtacgcctacctcctcttcaaggagtgtgaccactccaacaacgaccgtctagagggggctgagatcgaggagttcctgcggcggctgctgaagcggccggagctggaggagatcttccatcagtactcgggcgaggaccgcgtgctgagtgcccctgagctgctggagttcctggaggaccagggcgaggagggcgccacactggcccgcgcccagcagctcattcagacctatgagctcaacgagacaggacatgaaccagccccttgcccactacttcatctcttcctcccacaacacctatctgactgactcccagatcggggggcccagcagcaccgaggcctatgttagggcctttgcccagggatgccgctgcgtggagctggactgctgggaggggccaggaggggagcccgtcatctatcatggccataccctcacctccaagattctcttccgggacgtggtccaagccgtgcgcgaccatgccttcacgctgtccccttaccctgtcatcctatccctggagaaccactgcgggctggagcagcaggctgccatggcccgccacctctgcaccatcctgggggacatgctggtgacacaggcgctggactccccaaatcccgaggagctgccatccccagagcagctgaagggccgggtcctggtgaagggaaagaagttgcccgctgctcggagcgaggatggccgggctctgtcggatcgggaggaggaggaggaggatgacgaggaggaagaagaggaggtggaggctgcagcgcagaggcggctggccaagcagatctccccggagctgtcggccctggctgtgtactgccacgccacccgcctgcggaccctgcaccctgcccccaacgccccacaaccctgccaggtcagctccctcagcgagcgcaaagccaagaaactcattcgggaggcagggaacagctttgtcaggcacaatgcccgccagctgacccgcgtgtacccgctggggctgcggatgaactcagccaactacagtccccaggagatgtggaactcgggctgtcagctggtggccttgaacttccagacgccaggctacgagatggacctcaatgccgggcgcttcctagtcaatgggcagtgtggctacgtcctaaaacctgcctgcctgcggcaacctgactcgacctttgaccccgagtacccaggacctcccagaaccactctcagcatccaggtgctgactgcacagcagctgcccaagctgaatgccgagaagccacactccattgtggaccccctggtgcgcattgagatccatggggtgcccgcagactgtgcccggcaggagactgactacgtgctcaacaatggcttcaacccccgctgggggcagaccctgcagttccagctgcgggctccggagctggcactggtccggtttgtggtggaagattatgacgccacctcccccaatgactttgtgggccagtttacactgcctcttagcagcctaaagcaagggtaccgccacatacacctgctttccaaggacggggcctcactgtcaccagccacgctcttcatccaaatccgcatccagcgctcctgagggcccacctcactcgccttggggttctgcgagtgccagtccacatcccctgcagagccctctcctcctctggagtcaggtggtgggagtaccagccccccagcccacccacttggcccactcagcccattcaccaggcgctggtctcacctgggtgctgagggctgcctgggcccctcctgaagaacagaaaggtgttcatgtgacttcagtgagctccaaccctggggccctgagatggccccagctcctcttgtcctcagcccacccctcattgtgacttatgaggagcaagcctgttgctgccaggagacttggggagcaggacacttgtgggccctcagttcccctctgtcctcccgtgggccatcccagcctccttcccccagaggagcgcagtcactccacttggccccgaccccgagcttagcccctaagccctcctttaccccaggccttcctggactcctccctccagctccggaacctgagctccccttcccttctcaaagcaagaagggagcgctgaggcatgaagccctggggaaactggcagtaggttttggtttttattttttgagacagggtctcgctccgtcgcccaggctggagtgcaatgttgcaatcatggctcactgcagctttgaactcccaggctcaagcgatcctcccatctcagcctcctgagtagctgggactacaggcacaggccaccaaacctggctaatgtttaaattttatgtagagatggcggggggggcgggggtctccctatgttgcccaggctggtctcgagctcctgacctcaagtgatcctcctgccccagcattccaaagtgctgggattacaggtgtgagccactgcctggcctggccgtaggtttgtaactgtttcatagaagagccctggagaagacagtagaatgagcctatctagtttaaaaaataaagaagcacgttgatttca

SEQ ID NO: 330646 - DNA, 1635 bp, Homo sapiens
tagcttagtagaaggcgcgtggttattggcgaggccgccagctgacccgcgtgtacccgctggggctgcggatgaactcagccaactacagtccccaggagatgtggaactcgggctgtcagctggtggccttgaacttccagacgccaggctacgagatggacctcaatgccgggcgcttcctagtcaatgggcagtgtggctacgtcctaaaacctgcctgcctgcggcaacctgactcgacctttgaccccgagtacccaggacctcccagaaccactctcagcatccaggtgctgactgcacagcagctgcccaagctgaatgccgagaagccacactccattgtggaccccctggtgcgcattgagatccatggggtgcccgcagactgtgcccggcaggagactgactacgtgctcaacaatggcttcaacccccgctgggggcagaccctgcagttccagctgcgggctccggagctggcactggtccggtttgtggtggaagattatgacgccacctcccccaatgactttgtgggccagtttacactgcctcttagcagcctaaagcaagggtaccgccacatacacctgctttccaaggacggggcctcactgtcaccagccacgctcttcatccaaatccgcatccagcgctcctgagggcccacctcactcgccttggggttctgcgagtgccagtccacatcccctgcagagccctctcctcctctggagtcaggtggtgggagtaccagccccccagcccacccacttggcccactcagcccattcaccaggcgctggtctcacctgggtgctgagggctgcctgggcccctcctgaagaacagaaaggtgttcatgtgacttcagtgagctccaaccctggggccctgagatggccccagctcctcttgtcctcagcccacccctcattgtgacttatgaggagcaagcctgttgctgccaggagacttggggagcaggacacttgtgggccctcagttcccctctgtcctcccgtgggccatcccagcctccttcccccagaggagcgcagtcactccacttggccccgaccccgagcttagcccctaagccctcctttaccccaggccttcctggactcctccctccagctccggaacctgagctccccttcccttctcaaagcaagaagggagcgctgaggcatgaagccctggggaaactggcagtaggttttggtttttattttttgagacagggtctcgctccgtcgcccaggctggagtgcaatgttgcaatcatggctcactgcagctttgaactcccaggctcaagcgatcctcccatctcagcctcctgagtagctgggactacaggcacaggccaccaaacctggctaatgtttaaattttatgtagagatggcggggggggcgggggtctccctatgttgcccaggctggtctcgagctcctgacctcaagtgatcctcctgccccagcattccaaagtgctgggattacaggtgtgagccactgcctggcctggccgtaggtttgtaactgtttcatagaagagccctggagaagacagtagaatgagcctatctagtttaaaaaataaagaagcacgttgatttca

SEQ ID NO: 330647 - DNA, 1158 bp, Homo sapiens
ttaggctaggtagaggcgggtggtgaatcggccgaggtgacgccacctcccccaatgactttgtgggccagtttacactgcctcttagcagcctaaagcaagggtaccgccacatacacctgctttccaaggacggggcctcactgtcaccagccacgctcttcatccaaatccgcatccagcgctcctgagggcccacctcactcgccttggggttctgcgagtgccagtccacatcccctgcagagccctctcctcctctggagtcaggtggtgggagtaccagccccccagcccacccacttggcccactcagcccattcaccaggcgctggtctcacctgggtgctgagggctgcctgggcccctcctgaagaacagaaaggtgttcatgtgacttcagtgagctccaaccctggggccctgagatggccccagctcctcttgtcctcagcccacccctcattgtgacttatgaggagcaagcctgttgctgccaggagacttggggagcaggacacttgtgggccctcagttcccctctgtcctcccgtgggccatcccagcctccttcccccagaggagcgcagtcactccacttggccccgaccccgagcttagcccctaagccctcctttaccccaggccttcctggactcctccctccagctccggaacctgagctccccttcccttctcaaagcaagaagggagcgctgaggcatgaagccctggggaaactggcagtaggttttggtttttattttttgagacagggtctcgctccgtcgcccaggctggagtgcaatgttgcaatcatggctcactgcagctttgaactcccaggctcaagcgatcctcccatctcagcctcctgagtagctgggactacaggcacaggccaccaaacctggctaatgtttaaattttatgtagagatggcggggggggcgggggtctccctatgttgcccaggctggtctcgagctcctgacctcaagtgatcctcctgccccagcattccaaagtgctgggattacaggtgtgagccactgcctggcctggccgtaggtttgtaactgtttcatagaagagccctggagaagacagtagaatgagcctatctagtttaaaaaataaagaagcacgttgatttca

SEQ ID NO: 330648 - DNA, 410 bp, Homo sapiens
ggaccccacttcaagtctaacgcttgcctgtggcccacagtgacggaaatactgagctttggaatgggcgagaccgaggccaaataatagatctttccacttatcattgtgtgaagttaggcaagatacctagcttctctcagcaccaatttcctcatctgtaaaatgaagaaacagcacccacttctcaatgttaccatcaggaataaatcagctaaaaaaaatagaaactgcttggctcagtgcctgacactgatcagttactacataaatgttagtttcctgcctttttgccaaaatgacattgaacagacagttctaatgatatttacagacacatacatctgtgttttcttttcagttctttacctgtattctactcttagacctaataaacttctttcatgttc

SEQ ID NO: 330649 - DNA, 530 bp, Homo sapiens
cttaacagagaggctttccctaaccaccttaaacaaaacagcaccctacaccccttctatgactctctctctctccttatcctgccttatttttctgcatagcacttatgactgacatatttttattaacttattagtttatcatctgtctttcctcacagaacgtaaacttcgtgagagtagggataaagatccaggcactcatatatgtattaaaaagaataagttttatgtatataggtgttatgttatatgcaataacataattgttagaatctttccaaatcagggaaatggaactcaaaattatcacatactaattgtgatggctaattttatatgtcaactttaataggccacgatactcaggtatctcatcaaatattattctagatgtttctgggaaggtattttttagaagagactaatatttaaattagtagactgagtacagcagatgaccctccacaatgggagtaggccccatcaaatcaggtgaatgaagaccttaacagaaaaagacagaagtg

SEQ ID NO: 330650 - DNA, 510 bp, Homo sapiens
cgcggctccagttcgtccctttccagttttacagtgaattgctcgatctgactacgcggctcgatctgactacgcggctcgatctgactacgcggctcgatctgactacgcggctcgatctgactacgcggctcgatctgactacgcggctcgatctgactacgcggctcatccctcacacatcatcaaaggattcatactgggagaaaccctaccattgtaacagatgtgggaagaccttttatgactgcacagacttcagtcaacatccaggaacttttattagggaaagagtttttgaatatcaccactgaagaaaatctgtggtgaaagggaacatcttaccatctggccattcacactgaagagaaacttcataagcatcctctctttgagaaaacgtgtaatagatgatcatttgtcgtctaaacaatcaagttagaaattgaaccagcctggagtcttattctccacctgagaattcacccatgagagagacccagtggttgc

SEQ ID NO: 330651 - DNA, 1485 bp, Homo sapiens
attacacagaaacaagtttcaacagaaggtgatctctatgaatgtgattcacatggaccagttacagatgccttgattcgcgaagagaaaaattcctataaatgtgaggaatgcgggaaagtgtttaaaaagaatgccctccttgttcagcatgaacggattcacactcaagtgaagccctatgaatgcacagagtgtgggaaaacctttagcaagagcactcatcttcttcagcacctcatcatccacactggggagaagccctataagtgcatggagtgtgggaaggcttttaaccgcaggtcacacctcacacggcaccagcggattcacagtggagagaagccttataagtgcagtgaatgtggaaaggccttcacccaccgctccacttttgtcttgcatcacaggagccacactggagaaaaaccctttgtgtgcaaagagtgtggcaaagcctttcgagataggccaggtttcattcgacactacatcatccacacgggagagaagccctatgagtgcattgagtgtgggaaggccttcaaccgccggtcatacctcacgtggcaccaacagattcacactggagtgaaaccctttgaatgcaacgagtgtggaaaagctttttgcgagagtgcagacctcattcaacactacattatccacactggggagaagccctataagtgcatggagtgtgggaaggcgttcaaccgtaggtcacacctcaagcagcatcaacggattcacactggggagaagccttatgaatgcagtgaatgtggaaaggccttcacccactgctccacttttgtcttgcataaaaggacccacacaggagaaaaaccctatgaatgcaaagaatgtggaaaagcctttagtgatagggcagacctcattcgccacttcagcatccacactggagagaaaccctatgagtgcgtggagtgtggaaaggccttcaaccgcagctcacacctcacgaggcaccaacagattcacactggagagaaaccctatgaatgcatccagtgtgggaaagccttttgccggagcgcaaaccttattcgacactccatcattcacactggagagaagccgtatgaatgcagtgagtgtggaaaggcttttaatcgcggctcatccctcacacatcatcaaaggattcatactgggagaaaccctaccattgtaacagatgtgggaagaccttttatgactgcacagacttcagtcaacatccaggaacttttattagggaaagagtttttgaatatcaccactgaagaaaatctgtggtgaaagggaacatcttaccatctggccattcacactgaagagaaacttcataagcatcctctctttgagaaaacgtgtaatagatgatcatttgtcgtctaaacaatcaagttagaaattgaaccagcctggagtcttattctccacctgagaattcacccatgagagagacccagtggttgc

SEQ ID NO: 330652 - DNA, 976 bp, Homo sapiens
cgctcgcctccctcgctccacgcgcgcccggactcggcggccaggcttgcgcgcggttcccctcccggtgggcggattcctgggcaagatgaagtgggtgtgggcgctcttgctgttggcggcgctgggcagcggccgcgcggagcgcgactgccgagtgagcagcttccgagtcaaggagaacttcgacaaggctcgcttctctgggacctggtacgccatggccaagaaggaccccgagggcctctttctgcaggacaacatcgtcgcggagttctccgtggacgagaccggccagatgagcgccacagccaagggccgagtccgtcttttgaataactgggacgtgtgcgcagacatggtgggcaccttcacagacaccgaggaccctgccaagttcaagatgaagtactggggcgtagcctcctttctccagaaaggaaatgatgaccactggatcgtcgacacagactacgacacgtatgccgtgcagtactcctgccgcctcctgaacctcgatggcacctgtgctgacagctactccttcgtgttttcccgggaccccaacggcctgcccccagaagcgcagaagattgtaaggcagcggcaggaggagctgtgcctggccaggcagtacaggctgatcgtccacaacggttactgcgatggcagatcagaaagaaaccttttgtagcaatatcaagaatctagtttcatctgagaacttctgattagctctcagtcttcagctctatttatcttaggagtttaatttgcccttctctccccatcttccctcagttcccataaaaccttcattacacataaagatacacgtgggggtcagtgaatctgcttgcctttcctgaaagtttctggggcttaagattccagactctgattcattaaactatagtcacccgtgaaaaaaaactcactttcgaacaatagagataaagaacgaagctcagtacac

SEQ ID NO: 330653 - DNA, 1290 bp, Homo sapiens
catcctttataaaatgaaaaactacttggatgaattattccaaaattcctgcacaagtggacctcagaaggcaggcggaggcgccaatttggcatggccagggcctgggcactcacgcaccagggagcctcgcgggtccgctctcgctctgtgaggccacggtcttcccgccaggttgactcgagcctcctgccagagccactggccccggaggccaccctagaccgcagctggcggccgctggcacgagtgcagggtaactgagccagggccgctggcgcatttggcctggccgaggccaccccgcgcggccgctccactgtgcccgaggctgtcctggaggtgaggccggcccacagggaccctgcccgtgcccgggctccgggcggattcctgggcaagatgaagtgggtgtgggcgctcttgctgttggcggcgctgggcagcggccgcgcggagcgcgactgccgagtgagcagcttccgagtcaaggagaacttcgacaaggctcgcttctctgggacctggtacgccatggccaagaaggaccccgagggcctctttctgcaggacaacatcgtcgcggagttctccgtggacgagaccggccagatgagcgccacagccaagggccgagtccgtcttttgaataactgggacgtgtgcgcagacatggtgggcaccttcacagacaccgaggaccctgccaagttcaagatgaagtactggggcgtagcctcctttctccagaaaggaaatgatgaccactggatcgtcgacacagactacgacacgtatgccgtgcagtactcctgccgcctcctgaacctcgatggcacctgtgctgacagctactccttcgtgttttcccgggaccccaacggcctgcccccagaagcgcagaagattgtaaggcagcggcaggaggagctgtgcctggccaggcagtacaggctgatcgtccacaacggttactgcgatggcagatcagaaagaaaccttttgtagcaatatcaagaatctagtttcatctgagaacttctgattagctctcagtcttcagctctatttatcttaggagtttaatttgcccttctctccccatcttccctcagttcccataaaaccttcattacacataaagatacacgtgggggtcagtgaatctgcttgcctttcctgaaagtttctggggcttaagattccagactctgattcattaaactatagtcacccgtgaaaaaaaactcactttcgaacaatagagataaagaacgaagctcagtacac

SEQ ID NO: 330654 - DNA, 906 bp, Homo sapiens
ttattcttttgcgttctctcatgccttctctttactgcttcttgttcactcatgctgggcagcggccgcgcggagcgcgactgccgagtgagcagcttccgagtcaaggagaacttcgacaaggctcgcttctctgggacctggtacgccatggccaagaaggaccccgagggcctctttctgcaggacaacatcgtcgcggagttctccgtggacgagaccggccagatgagcgccacagccaagggccgagtccgtcttttgaataactgggacgtgtgcgcagacatggtgggcaccttcacagacaccgaggaccctgccaagttcaagatgaagtactggggcgtagcctcctttctccagaaaggaaatgatgaccactggatcgtcgacacagactacgacacgtatgccgtgcagtactcctgccgcctcctgaacctcgatggcacctgtgctgacagctactccttcgtgttttcccgggaccccaacggcctgcccccagaagcgcagaagattgtaaggcagcggcaggaggagctgtgcctggccaggcagtacaggctgatcgtccacaacggttactgcgatggcagatcagaaagaaaccttttgtagcaatatcaagaatctagtttcatctgagaacttctgattagctctcagtcttcagctctatttatcttaggagtttaatttgcccttctctccccatcttccctcagttcccataaaaccttcattacacataaagatacacgtgggggtcagtgaatctgcttgcctttcctgaaagtttctggggcttaagattccagactctgattcattaaactatagtcacccgtgaaaaaaaactcactttcgaacaatagagataaagaacgaagctcagtacac

SEQ ID NO: 330655 - DNA, 911 bp, Homo sapiens
catcctttataaaatgaaaaactacttggatgaattattccaaaattcctgcacaagtggacctcagaaggcaggcggagcgcgactgccgagtgagcagcttccgagtcaaggagaacttcgacaaggctcgcttctctgggacctggtacgccatggccaagaaggaccccgagggcctctttctgcaggacaacatcgtcgcggagttctccgtggacgagaccggccagatgagcgccacagccaagggccgagtccgtcttttgaataactgggacgtgtgcgcagacatggtgggcaccttcacagacaccgaggaccctgccaagttcaagatgaagtactggggcgtagcctcctttctccagaaaggaaatgatgaccactggatcgtcgacacagactacgacacgtatgccgtgcagtactcctgccgcctcctgaacctcgatggcacctgtgctgacagctactccttcgtgttttcccgggaccccaacggcctgcccccagaagcgcagaagattgtaaggcagcggcaggaggagctgtgcctggccaggcagtacaggctgatcgtccacaacggttactgcgatggcagatcagaaagaaaccttttgtagcaatatcaagaatctagtttcatctgagaacttctgattagctctcagtcttcagctctatttatcttaggagtttaatttgcccttctctccccatcttccctcagttcccataaaaccttcattacacataaagatacacgtgggggtcagtgaatctgcttgcctttcctgaaagtttctggggcttaagattccagactctgattcattaaactatagtcacccgtgaaaaaaaactcactttcgaacaatagagataaagaacgaagctcagtacac

SEQ ID NO: 330656 - DNA, 912 bp, Homo sapiens
  misc_feature (35)..(35): n is a, c, g, or t
  misc_feature (40)..(40): n is a, c, g, or t
  misc_feature (64)..(64): n is a, c, g, or t
cccgggctgcaggattcggcacgagcccggactcngcggncagacttgcgcgcgggtcccctcncggggggcggattcctgggcaagatgaagtgggtgtgggcgctcttgctgttggcggcgctgggcagcggccgcgcggagcgcgactgccgagtgagcagcttccgagtcaaggagaacttcgacaaggctcgcttctctgggacctggtacgccatggccaagaaggaccccgagggcctctttctgcaggacaacatcgtcgcggataactgggacgtgtgcgcagacatggtgggcaccttcacagacaccgaggaccctgccaagttcaagatgaagtactggggcgtagcctcctttctccagaaaggaaatgatgaccactggatcgtcgacacagactacgacacgtatgccgtgcagtactcctgccgcctcctgaacctcgatggcacctgtgctgacagctactccttcgtgttttcccgggaccccaacggcctgcccccagaagcgcagaagattgtaaggcagcggcaggaggagctgtgcctggccaggcagtacaggctgatcgtccacaacggttactgcgatggcagatcagaaagaaaccttttgtagcaatatcaagaatctagtttcatctgagaacttctgattagctctcagtcttcagctctatttatcttaggagtttaatttgcccttctctccccatcttccctcagttcccataaaaccttcattacacataaagatacacgtgggggtcagtgaatctgcttgcctttcctgaaagtttctggggcttaagattccagactctgattcattaaactatagtcacccgtgaaaaaaaactcactttcgaacaatagagataaagaacgaagctcagtacac

SEQ ID NO: 330657 - DNA, 1245 bp, Homo sapiens
  misc_feature (885)..(885): n is a, c, g, or t
cgctcgcctccctcgctccacgcgcgcccggactcggcggccaggcttgcgcgcggttcccctcccggtgggcggattcctgggcaagatgaagtgggtgtgggcgctcttgctgttggcggcgctgggcagcggccgcgcggagcgcgactgccgagtgagcagcttccgagtcaaggagaacttcgacaaggctcgcttctctgggacctggtacgccatggccaagaaggaccccgagggcctctttctgcaggacaacatcgtcgcggagttctccgtggacgagaccggccagatgagcgccacagccaagggccgagtccgtcttttgaataactgggacgtgtgcgcagacatggtgggcaccttcacagacaccgaggaccctgccaagttcaagatgaagtactggggcgtagcctcctttctccagaaaggaaatgatgaccactggatcgtcgacacagactacgacacgtatgccgtgcagtactcctgccgcctcctgaacctcgatggcacctgtgctgacaagcgcagaagattgtaaggcagcggcaggaggagctgtgcctggccaggcagtacaggctgatcgtccacaacggttactgcgatggcagatcagaaagaaaccttttgtagcaatatcaagaatctagtttcatctgagaacttctgattagctctcagtcttcagctctatttatcttaggagtttaatttgcccttctctccccatcttccctcagttcccataaaaccttcattacacataaagatacacgtgggggtcagtgaatctgcttgcctttcctgaaagtttctggggcttaagattccagactctgattcattaaactatagtcacccgtgaaaaanaaaaaaggaaaaaaaaaaaaactcgagtttttttttttttttttttactttattaaaatactgagttttatttcacatgtatatttttgtctccccaccatttccatgtctgaccaccgctactactatgtcctatcataacattccatacatacttaaaaccaagcaaagggtggagttccatctttaaaaactaaacggcattttggacaacacattcttggcaatagaacctggacaacatttatcaaacacggtagggaaagttctcactctgcattataaaaaggacagccagatatcaactgttacagaaatgaaataagacggccagagatcttgaatagcctcttggtcagg

SEQ ID NO: 330658 - DNA, 1933 bp, Homo sapiens
  misc_feature (1573)..(1573): n is a, c, g, or t
caatgtagtaagctccaaagagaatgatttcaacgcaccttcttttttctatatgaaaccaaatagccatgacattgtctagctgggtttcctcagttgggggttttgagattctctggaacaaccataggatcttttaggagatattacccttgtctgatcttgattttaaagccaggaacattgtgcaggaaagagctccatttagtttgagtggacactcactcattgctatgggatactgggtttcaaaatccaaatacagtaatgctaaaatgtagagaaacaaaatgggccaggcatggtggctcacacctgaaatcccagcacttttggaggccgaggtgggctgatcacatgaggtcaggagttcaagattggcctggccaacatggcaaaaccccatctctactaaaaatacaaaaattagccaggcgtggtggcatgcgcctgtaatcccagctgctcacgaggttgaggcaggagaattacttgagcccgggaggcggaggctgcagtgagttgaggttgcaccactgcattccagcctgggcaacagagcaagattctgcctcaaaaaaataataataataataatcaaacaaaatggagcatttctgttggtcacgaactgacccactacaccaaacagatgggaacttagaccaaaatcaaattgattttgaagcttcacccttcaaaattaaatgtagggccagcaaggattccaccacagcagggcaccgtaggaagcagattatgcacattgtacagatgagaaaacagaggctgacaatgaggaagaaagttgccctaaatctttaataggtagctgagttggatgcaaacctagagttttgtgactctgaagtcccttgtgccacaccatctggtgacacatgacatgagacatagaagcactttataaaaccatcaccagtgtgtcccaggtcaggctgccttggctcccacttcctgaaagctgagggtggcccccgacactttgaaatgcaataaggcagacttaagagaaatcaaaggaagccctgttcatccagcaagtcatattctctccacccccattacgtccagagaaaattcagtgggtttcagaaacagccttgaaggtgtttatgaattacagccacctgtatccgtaagggttgcaatctgctgtgatgcatttgaattaagaagcatttgaatgaagccagctctaaggccatcatgatgttcattatctacataaaaactgggtccactttctgtcgttaatggctttgttttgtattttccaggttactgcgatggcagatcagaaagaaaccttttgtagcaatatcaagaatctagtttcatctgagaacttctgattagctctcagtcttcagctctatttatcttaggagtttaatttgcccttctctccccatcttccctcagttcccataaaaccttcattacacataaagatacacgtgggggtcagtgaatctgcttgcctttcctgaaagtttctggggcttaagattccagactctgattcattaaactatagtcacccgtgaaaaanaaaaaaggaaaaaaaaaaaaactcgagtttttttttttttttttttactttattaaaatactgagttttatttcacatgtatatttttgtctccccaccatttccatgtctgaccaccgctactactatgtcctatcataacattccatacatacttaaaaccaagcaaagggtggagttccatctttaaaaactaaacggcattttggacaacacattcttggcaatagaacctggacaacatttatcaaacacggtagggaaagttctcactctgcattataaaaaggacagccagatatcaactgttacagaaatgaaataagacggccagagatcttgaatagcctcttggtcagg

SEQ ID NO: 330659 - DNA, 1878 bp, Homo sapiens
  misc_feature (1518)..(1518): n is a, c, g, or t
caatgtagtaagctccaaagagaatgatttcaacgcaccttcttttttctatatgaaaccaaatagccatgacattgtctagctgggtttcctcagttgggggttttgagattctctggaacaaccataggatcttttaggagatattacccttgtctgatcttgattttaaagccaggaacattgtgcaggaaagagctccatttagtttgagtggacactcactcattgctatgggatactgggtttcaaaatccaaatacagtaatgctaaaatgtagagaaacaaaatgggccaggcatggtggctcacacctgaaatcccagcacttttggaggccgaggtgggctgatcacatgaggtcaggagttcaagattggcctggccaacatggcaaaaccccatctctactaaaaatacaaaaattagccaggcgtggtggcatgcgcctgtaatcccagctgctcacgaggttgaggcaggagaattacttgagcccgggaggcggaggctgcagtgagttgaggttgcaccactgcattccagcctgggcaacagagcaagattctgcctcaaaaaaataataataataataatcaaacaaaatggagcatttctgttggtcacgaactgacccactacaccaaacagatgggaacttagaccaaaatcaaattgattttgaagcttcacccttcaaaattaaatgtagggccagcaaggattccaccacagcagggcaccgtaggaagcagattatgcacattgtacagatgagaaaacagaggctgacaatgaggaagaaagttgccctaaatctttaataggtagctgagttggatgcaaacctagagttttgtgactctgaagtcccttgtgccacaccatctggtgacacatgacatgagacatagaagcactttatactgagggtggcccccgacactttgaaatgcaataaggcagacttaagagaaatcaaaggaagccctgttcatccagcaagtcatattctctccacccccattacgtccagagaaaattcagtgggtttcagaaacagccttgaaggtgtttatgaattacagccacctgtatccgtaagggttgcaatctgctgtgatgcatttgaattaagaagcatttgaatgaagccagctctaaggccatcatgatgttcattatctacataaaaactgggtccactttctgtcgttaatggctttgttttgtattttccaggttactgcgatggcagatcagaaagaaaccttttgtagcaatatcaagaatctagtttcatctgagaacttctgattagctctcagtcttcagctctatttatcttaggagtttaatttgcccttctctccccatcttccctcagttcccataaaaccttcattacacataaagatacacgtgggggtcagtgaatctgcttgcctttcctgaaagtttctggggcttaagattccagactctgattcattaaactatagtcacccgtgaaaaanaaaaaaggaaaaaaaaaaaaactcgagtttttttttttttttttttactttattaaaatactgagttttatttcacatgtatatttttgtctccccaccatttccatgtctgaccaccgctactactatgtcctatcataacattccatacatacttaaaaccaagcaaagggtggagttccatctttaaaaactaaacggcattttggacaacacattcttggcaatagaacctggacaacatttatcaaacacggtagggaaagttctcactctgcattataaaaaggacagccagatatcaactgttacagaaatgaaataagacggccagagatcttgaatagcctcttggtcagg

SEQ ID NO: 330660 - DNA, 1082 bp, Homo sapiens
cgctcgcctccctcgctccacgcgcgcccggactcggcggccaggcttgcgcgcggttcccctcccggtgggcggattcctgggcaagatgaagtgggtgtgggcgctcttgctgttggcggcgctgggcagcggccgcgcggagcgcgactgccgagtgagcagcttccgagtcaaggagaacttcgacaaggctcgcttctctgggacctggtacgccatggccaagaaggaccccgagggcctctttctgcaggacaacatcgtcgcggagttctccgtggacgagaccggccagatgagcgccacagccaagggccgagtccgtcttttgaataactgggacgtgtgcgcagacatggtgggcaccttcacagacaccgaggaccctgccaagttcaagatgaagtactggggcgtagcctcctttctccagaaaggaaatgatgaccactggatcgtcgacacagactacgacacgtatgccgtgcagtactcctgccgcctcctgaacctcgatggcacctgtgctgacagctactccttcgtgttttcccgggaccccaacggcctgcccccagaagcgcagaagattgtaaggcagcggcaggaggagctgtgcctggccaggcagtacaggctgatcgtccacaacggttactgcgatggcagatcagaaagaaaccttttgtagcaatatcaagaatctagtttcatctgagaacttctgattagctctcagtcttcagctctatttatcttaggagtttaatttgcccttctctccccatcttccctcagttcccataaaaccttcattacacataaagatacacgtgggggtcagtgaatctgcttgcctttcctgaaagtttctggggcttaagattccagactctgattcattaaactatagtcacccgtgtcctgtgattttagttttcatttgtgtttatgtctgtgctgcagacggatgggtggggtgcgcttctttataccaggagcacgtggctctttctgacctttggcctgttctagtgcctaatctccattattaaatactggcttctcccaactttctg

SEQ ID NO: 330661 - DNA, 1291 bp, Homo sapiens
  misc_feature (931)..(931): n is a, c, g, or t
cgctcgcctccctcgctccacgcgcgcccggactcggcggccaggcttgcgcgcggttcccctcccggtgggcggattcctgggcaagatgaagtgggtgtgggcgctcttgctgttggcggcgctgggcagcggccgcgcggagcgcgactgccgagtgagcagcttccgagtcaaggagaacttcgacaaggctcgcttctctgggacctggtacgccatggccaagaaggaccccgagggcctctttctgcaggacaacatcgtcgcggagttctccgtggacgagaccggccagatgagcgccacagccaagggccgagtccgtcttttgaataactgggacgtgtgcgcagacatggtgggcaccttcacagacaccgaggaccctgccaagttcaagatgaagtactggggcgtagcctcctttctccagaaaggaaatgatgaccactggatcgtcgacacagactacgacacgtatgccgtgcagtactcctgccgcctcctgaacctcgatggcacctgtgctgacagctactccttcgtgttttcccgggaccccaacggcctgcccccagaagcgcagaagattgtaaggcagcggcaggaggagctgtgcctggccaggcagtacaggctgatcgtccacaacggttactgcgatggcagatcagaaagaaaccttttgtagcaatatcaagaatctagtttcatctgagaacttctgattagctctcagtcttcagctctatttatcttaggagtttaatttgcccttctctccccatcttccctcagttcccataaaaccttcattacacataaagatacacgtgggggtcagtgaatctgcttgcctttcctgaaagtttctggggcttaagattccagactctgattcattaaactatagtcacccgtgaaaaanaaaaaaggaaaaaaaaaaaaactcgagtttttttttttttttttttactttattaaaatactgagttttatttcacatgtatatttttgtctccccaccatttccatgtctgaccaccgctactactatgtcctatcataacattccatacatacttaaaaccaagcaaagggtggagttccatctttaaaaactaaacggcattttggacaacacattcttggcaatagaacctggacaacatttatcaaacacggtagggaaagttctcactctgcattataaaaaggacagccagatatcaactgttacagaaatgaaataagacggccagagatcttgaatagcctcttggtcagg

SEQ ID NO: 330662 - DNA, 975 bp, Homo sapiens
  misc_feature (35)..(35): n is a, c, g, or t
  misc_feature (40)..(40): n is a, c, g, or t
  misc_feature (64)..(64): n is a, c, g, or t
cccgggctgcaggattcggcacgagcccggactcngcggncagacttgcgcgcgggtcccctcncggggggcggattcctgggcaagatgaagtgggtgtgggcgctcttgctgttggcggcgctgggcagcggccgcgcggagcgcgactgccgagtgagcagcttccgagtcaaggagaacttcgacaaggctcgcttctctgggacctggtacgccatggccaagaaggaccccgagggcctctttctgcaggacaacatcgtcgcggagttctccgtggacgagaccggccagatgagcgccacagccaagggccgagtccgtcttttgaataactgggacgtgtgcgcagacatggtgggcaccttcacagacaccgaggaccctgccaagttcaagatgaagtactggggcgtagcctcctttctccagaaaggaaatgatgaccactggatcgtcgacacagactacgacacgtatgccgtgcagtactcctgccgcctcctgaacctcgatggcacctgtgctgacagctactccttcgtgttttcccgggaccccaacggcctgcccccagaagcgcagaagattgtaaggcagcggcaggaggagctgtgcctggccaggcagtacaggctgatcgtccacaacggttactgcgatggcagatcagaaagaaaccttttgtagcaatatcaagaatctagtttcatctgagaacttctgattagctctcagtcttcagctctatttatcttaggagtttaatttgcccttctctccccatcttccctcagttcccataaaaccttcattacacataaagatacacgtgggggtcagtgaatctgcttgcctttcctgaaagtttctggggcttaagattccagactctgattcattaaactatagtcacccgtgaaaaaaaactcactttcgaacaatagagataaagaacgaagctcagtacac

SEQ ID NO: 330663 - DNA, 2281 bp, Homo sapiens
cgctcgcctccctcgctccacgcgcgcccggactcggcggccaggcttgcgcgcggttcccctcccggtgggcggattcctgggcaagatgaagtgggtgtgggcgctcttgctgttggcggcgctgggcagcggccgcgcggagcgcgactgccgagtgagcagcttccgagtcaaggagaacttcgacaaggctcgcttctctgggacctggtacgccatggccaagaaggaccccgagggcctctttctgcaggacaacatcgtcgcggagttctccgtggacgagaccggccagatgagcgccacagccaagggccgagtccgtcttttgaataactgggacgtgtgcgcagacatggtgggcaccttcacagacaccgaggaccctgccaagttcaagatgaagtactggggcgtagcctcctttctccagaaaggaaatgatgaccactggatcgtcgacacagactacgacacgtatgccgtgcagtactcctgccgcctcctgaacctcgatggcacctgtgctgacagctactccttcgtgttttcccgggaccccaacggcctgcccccagaagcgcagaagattgtaaggcagcggcaggaggagctgtgcctggccaggcagtacaggctgatcgtccacaacggttactgcgatggcagatcagaaagaaaccttttgtagcaatatcaagaatctagtttcatctgagaacttctgattagctctcagtcttcagctctatttatcttaggagtttaatttgcccttctctccccatcttccctcagttcccataaaaccttcattacacataaagatacacgtgggggtcagtgaatctgcttgcctttcctgaaagtttctggggcttaagattccagactctgatgtcccagctcaaagacagtggagcagaaacctttcttaacccatcatcttattcaagccgtccatgggttggatgaggcccacccacactcgggagggcaatctgcttcactcagtttactgattcaaatgtcaatctcttccagaaacaccctcaaagacacagtgagaaataatgtctaaccaaatgtctgggcacccccgacccaggcaaattgacacaaaaattaattttcacaaatactatcaatagaagtgactaataaatgtggcatcatgtcctgcctgtttatcccatgacaattagtatagtcgagcgtaacattggcttccgttcccttatagtagcaacatgtaggagtttcatttaaagtgaggataattttgaccttacagagtttctccctacccctatctaccattgccacttgtggattgtcattttgccatgactttcttttaaaaaatatcaataagctctatacttcagtaatgtaagtttgaatttcatcctggctgcataagtcactttccattttgacaaagtctagaaatatttttctccatctccttgaatatgggtaatggatacctattgtggggcccactctcaatctcatggttttattttaatttagttctcaatagatatgcctcagctgcttaaaaaccattgaaaatggcccatggccttgtccatctaacagagtccagtaaaatcctgacaatggaatggggagagagaaagtgagaaccaccaaactcagcacaaaacgactgagtttaaacctctgtgctaagagatgatcagagtctatcatggcttctagtagcatgagaccatgtctcacgaatgaccctaggctcccatgacaatgcctacctaagaaagctcaaggctgccaggggaacttactttagtctagccaatacttgatgatggcagtttcaggatctttctttcttatagcacttactaagaagggaatccttcctccatccctttgatatatgtgtgtatctcctagggacttcaatgtatctttgcccaggatctgaaaggcaatacttttgaggtgtagttctcaggaaggactgagcctctgtcttccagtctctgtgggaggttagaatcctaacttctaatattgccagctggcagacacagctgtcctgatgaggcagacatttaaaatgaccaatcttttgtaatgtttcacttgtgccctgccccctgccctctcccctgcctctctctcccattagaatgccatcacctctgcacaaatgcgaacagaaccagccccttcctctacggtcagtagttactgaataaaattggttttcatcgatttgactaatgtctgatatatctttgac

SEQ ID NO: 330664 - DNA, 1072 bp, Homo sapiens
cgctcgcctccctcgctccacgcgcgcccggactcggcggccaggcttgcgcgcggttcccctcccggtgggcggattcctgggcaagatgaagtgggtgtgggcgctcttgctgttggcggcgctgggcagcggccgcgcggagcgcgactgccgagtgagcagcttccgagtcaaggagaacttcgacaaggctcgcttctctgggacctggtacgccatggccaagaaggaccccgagggcctctttctgcaggacaacatcgtcgcggagttctccgtggacgagaccggccagatgagcgccacagccaagggccgagtccgtcttttgaataactgggacgtgtgcgcagacatggtgggcaccttcacagacaccgaggaccctgccaagttcaagatgaagtactggggcgtagcctcctttctccagaaaggaaccttgaggaatacatataatctaaattcagtggctcagctctgcctctgtgagttgtgaagaggacaaggtctgagaaggaatatctgatgccagatggtgggcctcttgtgtcctcaaggcaactacgacacgtatgccgtgcagtactcctgccgcctcctgaacctcgatggcacctgtgctgacagctactccttcgtgttttcccgggaccccaacggcctgcccccagaagcgcagaagattgtaaggcagcggcaggaggagctgtgcctggccaggcagtacaggctgatcgtccacaacggttactgcgatggcagatcagaaagaaaccttttgtagcaatatcaagaatctagtttcatctgagaacttctgattagctctcagtcttcagctctatttatcttaggagtttaatttgcccttctctccccatcttccctcagttcccataaaaccttcattacacataaagatacacgtgggggtcagtgaatctgcttgcctttcctgaaagtttctggggcttaagattccagactctgattcattaaactatagtcacccgtgaaaaaaaactcactttcgaacaatagagataaagaacgaagctcagtacac

SEQ ID NO: 330665 - DNA, 135 bp, Homo sapiens
cttcctggacatctgttggtaaagtctgagagttcactctgctccatcagtggtcagccagcataaacagccaggctccaggtttctttatttatggaggacttggatcagagattttgtcttggactctgggac

SEQ ID NO: 330666 - DNA, 397 bp, Homo sapiens
gctttgagtgccaagggcagagaccaagtcctccagtcttcgtgtcttcccacagctcgtcatgaaagtgggctctggtgggtgtttattgacttgaattgaccccaagtggacgttgctgagaactgtcatgcgatttgtccctacagcaacctaacatcaaacagaagtttgtggccctcctgaagcggtttaaagtttcagatgaggtatggcctcttactcccaaggttaatggtgagtagaattccccgggtttcacccagcatccctggagtacactctgtattgccactgagagtcaggattctaggattaatattcctgctccccgtggcatacctggtagagccctaagggagagggtggctaagaaggacttaagcaagcagaggag

SEQ ID NO: 330667 - DNA, 407 bp, Homo sapiens
cttatgttctgacccacccttatgttctgacactgagctccatcctcaggttctttgtcaagtccctggccaacaagacctccgactggcttggctacatgcgcttcctcatcatccccctcggttctcaccctgtggccaaatacttggggtcagtcgacagtaaatacagtagttccttcctggattctggttggagagatctgttcagtcgctcggagccaccagtgtcagagcaactggacgtggcagggcgggtgatgcagtacgtcaacggggcagccacgacacaccagcttcccgtggccgaagccatgctgacttgccggcataagttccctgatgaagactcctatcagaagtttattcccttcattggcgtgagtactgactccctctgcttggca

SEQ ID NO: 330668 - DNA, 4498 bp, Homo sapiens
cgccgccgccgccgcgggggaagcctgggagccagatcggcgtcgcctcggcctccgtaacccccgcctagccgggccatggcggaacgcggaggggcgggcggtggtcccggaggcgccgggggcggcagcggccagcggggatccggggtcgcccagtcccctcagcagccgccgccgcagcagcagcagcagcagccgccgcagcagccgacgccccccaagctggcccaggccacctcgtcgtcctcgtccacctcggcggcggctgcctcctcctcgtcctcgtctacctccacctccatggccgtggcggtggcctcgggctccgcgcctcccggtgtgtgcccggtgggtgcccagtgccggaactcccctgccaccggtgtgcatgatgcaaccttgtaccgccgaccctgtggaagtgtggcaccgggaagcctcgatcccagcgtgcggtgcactaggtgctaattcaggctattggacccgctgagaggaaacctctgtcgattgctaaagaagacaagtgtgacaagagattcttaaactcagcgtggtcatcggcttagtgaaggctaggaggggttcaaaaagaattcttcgctccaacgagatcgtccttccagctagtggactggtggaaacagagctccaattaaccttctcccttcagtaccctcatttccttaagcgagatgccaacaagctgcagatcatgctgcaaaggagaaaacgttacaagaatcggaccatcttgggctataagaccttggccgtgggactcatcaacatggcagaggtgatgcagcatcctaatgaaggcgcactggtgcttggcctacacagcaacgtgaaggatgtctctgtgcctgtggcagaaataaagatctactccctgtccagccaacccattgaccatgaaggaatcaaatccaagctttctgatcgttctcctgatattgacaattattctgaggaagaggaagagagtttctcatcagaacaggaaggcagtgatgatccattgcatgggcaggacttgttctacgaagacgaagatctccggaaagtgaagaagacccggaggaaactaacctcaacctctgccatcacaaggcaacctaacatcaaacagaagtttgtggccctcctgaagcggtttaaagtttcagatgaggtgggctttgggctggagcatgtgtcccgcgagcagatccgggaagtggaagaggacttggatgaattgtatgacagtctggagatgtacaaccccagcgacagtggccctgagatggaggagacagaaagcatcctcagcacgccaaagcccaagctcaagcctttctttgaggggatgtcgcagtccagctcccagacggagattggcagcctcaacagcaaaggcagcctcggaaaagacaccaccagccctatggaattggctgctctagaaaaaattaaatctacttggattaaaaaccaagatgacagcttgactgaaacagacactctggaaatcactgaccaggacatgtttggagatgccagcacgagtctggttgtgccggagaaagtcaaaactcccatgaagtccagtaaaacggatctccagggctctgcctcccccagcaaagtggagggggtgcacacaccccggcagaagaggagcacgcccctgaaggagcggcagctctccaagcccctaagtgagaggaccaacagttccgacagcgagcgctccccagatctgggccacagcacgcagattccaagaaaggtggtgtatgaccagctcaatcagatcctggtgtcagatgcagccctcccagaaaatgtcattctggtgaacaccactgactggcagggccagtatgtggctgagctgctccaggaccagcggaagcctgtggtgtgcacctgctccaccgtggaggtccaggccgtgctgtccgccctgctcacccggatccagcgctactgcaactgcaactcttccatgccgaggccagtgaaggtggctgctgtgggaggccagagctacctgagctccatcctcaggttctttgtcaagtccctggccaacaagacctccgactggcttggctacatgcgcttcctcatcatccccctcggttctcaccctgtggccaaatacttggggtcagtcgacagtaaatacagtagttccttcctggattctggttggagagatctgttcagtcgctcggagccaccagtgtcagagcaactggacgtggcagggcgggtgatgcagtacgtcaacggggcagccacgacacaccagcttcccgtggccgaagccatgctgacttgccggcataagttccctgatgaagactcctatcagaagtttattcccttcattggcgtggtgaaggtgggtctggttgaagactctccctccacagcaggcgatggggacgattctcctgtggtcagccttactgtgccctccacatcaccaccctccagctcgggcctgagccgagacgccacggccacccctccctcctccccatctatgagcagcgccctggccatcgtggggagccctaatagcccatatggggacgtgattggcctccaggtggactactggctgggccaccccggggagcggaggagggaaggcgacaagagggacgccagctcgaagaacaccctcaagagtgtcttccgctcagtgcaggtgtcccgcctgccccatagtggggaggcccagctttctggcaccatggccatgactgtggtcaccaaagaaaagaacaagaaagttcccaccatcttcctgagcaagaaaccccgagaaaaggaggtggattctaagagccaggtcattgaaggcatcagccgcctcatctgctcagccaagcagcagcagactatgctgagagtgtccatcgatggggtcgagtggagtgacatcaagttcttccagctggcagcccagtggcccacccatgtcaagcactttccagtgggactcttcagtggcagcaaggccacctgaggccctgtctcccagccactttccctcctggcactgccaccagcctcaccgcctgcgggcagggggaggccagcaggcccgggcccagcaccccttccctggcaccagggtctgcctctcactcgcccaggtcccgaaggacactgccacagggacgccttccctcccctcccctccagcccacccctgcacagcccctcctccttcccgcttttccccttctccctcctgctccaggcccaaggcgtgttggttttgccttctggtgcccatagtcccctggactgagtcccccaggccttccttcacccgacttccaaactcttccttgtggtatcagtttccttctcggaaatgagaaagctggaatcctggtccccagcaggagagcctagtcctcccccagcccctccagccaccagggtgtcctctaggatgcagctgccagatccactcactctgctgcctccagcaggacccaaggccactttcaactcttatggggttctccacctgccccagagcttctcaagggagggtaagggggcaccctgagcccacaggacccctacttcacagctcacaggggcaggaggcagctcccctgcctccaggaccctgttgctatggtgacacagcgtttctaggacagaggggcctcccagtctccccccaccacccgtgcacgacttcctcaccacccccaggttccctgcagatgtcgtgtgtgtcctgagtgtttctttggttctttgcacgccaagtctcttggttgtaccatgtgacacaccctgtgcactggtcgctgtcttcgtggcttccacccttgttaatgatgctcctgcctctgcctcccagcccctcacccagcacagctctgcctggacttggagagatgggaggcagacccccaccaccatacatgctgtctgtggcccctcagacattctgtttcatctcccattcatctccctcctcccaccgtgtcagtttttctgcctttccctgctctgttcttccccctccttaggccccagcctgggcccagacccatcctcccagccaggtttccctccagcaggctccttccctccctgtcacctccctctcaccaacccggggtctgagcccctcattcctgaccgtccgtgttctcaggagtggttgaggacacagggccccagcccagccctctgcaccccccagcccggccatctgcgccccacagcccctttggagcttttctcttgtcctctcactccttcccagaagtttttgcacagaacttcattttgaaagtgtttttctcattctccatacctcccccaagctctcctccagcccttcccagggctcagccctgctgtcctgagcgtctcctgggccagagagaggagatgggggtgggagggactgagttgatgttgggtttttcattcaataaattggtgatttcttaccgac

SEQ ID NO: 330669 - DNA, 4474 bp, Homo sapiens
cgccgccgccgccgcgggggaagcctgggagccagatcggcgtcgcctcggcctccgtaacccccgcctagccgggccatggcggaacgcggaggggcgggcggtggtcccggaggcgccgggggcggcagcggccagcggggatccggggtcgcccagtcccctcagcagccgccgccgcagcagcagcagcagcagccgccgcagcagccgacgccccccaagctggcccaggccacctcgtcgtcctcgtccacctcggcggcggctgcctcctcctcgtcctcgtctacctccacctccatggccgtggcggtggcctcgggctccgcgcctcccggtggcccggggccaggccgcacccccgccccggtgcagatgaacctgtacgccacctgggaggtggaccggagctcgtccagctgcgtgcctaggctattcagcttgaccctgaagaaactcgtcatgctaaaagaaatggacaaagatcttaactcagtggtcatcgctgtgaagctgcagggttcaaaaagaattcttcgctccaacgagatcgtccttccagctagtggactggtggaaacagagctccaattaaccttctcccttcagtaccctcatttccttaagcgagatgccaacaagctgcagatcatgctgcaaaggagaaaacgttacaagaatcggaccatcttgggctataagaccttggccgtgggactcatcaacatggcagaggtgatgcagcatcctaatgaaggcgcactggtgcttggcctacacagcaacgtgaaggatgtctctgtgcctgtggcagaaataaagatctactccctgtccagccaacccattgaccatgaaggaatcaaatccaagccaacccattgaccatgaaggaatcaaatccaagctttctgtttctgatcgttctcctgatattgacaattattctgaggaagaggaagagagtttctcatcagaacaggaaggcagtgatgatccattgcatgggcaggacttgttctacgaagacgaagatctccggaaagtgaagaagacccggaggaaactaacctcaacctctgccatcacaaggcaacctaacatcaaacagaagtttgtggccctcctgaagcggtttaaagtttcagatgaggtgggctttgggctggagcatgtgtcccgcgagcagatccgggaagtggaagaggacttggatgaattgtatgacagtctggagatgtacaaccccagcgacagtggccctgagatggaggagacagaaagcatcctcagcacgccaaagcccaagctcaagcctttctttgaggggatgtcgcagtccagctcccagacggagattggcagcctcaacagcaaaggcagcctcggaaaagacaccaccagccctatggaattggctgctctagaaaaaattaaatctacttggattaaaaaccaagatgacagcttgactgaaacagacactctggaaatcactgaccaggacatgtttggagatgccagcacgagtctggttgtgccggagaaagtcaaaactcccatgaagtccagtaaaacggatctccagggctctgcctcccccagcaaagtggagggggtgcacacaccccggcagaagaggagcacgcccctgaaggagcggcagctctccaagcccctaagtgagaggaccaacagttccgacagcgagcgctccccagatctgggccacagcacgcagattccaagaaaggtggtgtatgaccagctcaatcagatcctggtgtcagatgcagccctcccagaaaatgtcattctggtgaacaccactgactggcagggccagtatgtggctgagctgctccaggaccagcggaagcctgtggtgtgcacctgctccaccgtggaggtccaggccgtgctgtccgccctgctcacccggatccagcgctactgcaactgcaactcttccatgccgaggccagtgaaggtggctgctgtgggaggccagagctacctgagctccatcctcaggttctttgtcaagtccctggccaacaagacctccgactggcttggctacatgcgcttcctcatcatccccctcggttctcaccctgtggccaaatacttggggtcagtcgacagtaaatacagtagttccttcctggattctggttggagagatctgttcagtcgctcggagccaccagtgtcagagcaactggacgtggcagggcgggtgatgcagtacgtcaacggggcagccacgacacaccagcttcccgtggccgaagccatgctgacttgccggcataagttccctgatgaagactcctatcagaagtttattcccttcattggcgtggtgaaggtgggtctggttgaagactctccctccacagcaggcgatggggacgattctcctgtggtcagccttactgtgccctccacatcaccaccctccagctcgggcctgagccgagacgccacggccacccctccctcctccccatctatgagcagcgccctggccatcgtggggagccctaatagcccatatggggacgtgattggcctccaggtggactactggctgggccaccccggggagcggaggagggaaggcgacaagagggacgccagctcgaagaacaccctcaagagtgtcttccgctcagtgcaggtgtcccgcctgccccatagtggggaggcccagctttctggcaccatggccatgactgtggtcaccaaagaaaagaacaagaaagttcccaccatcttcctgagcaagaaaccccgagaaaaggaggtggattctaagagccaggtcattgaaggcatcagccgcctcatctgctcagccaagcagcagcagactatgctgagagtgtccatcgatggggtcgagtggagtgacatcaagttcttccagctggcagcccagtggcccacccatgtcaagcactttccagtgggactcttcagtggcagcaaggccacctgaggccctgtctcccagccactttccctcctggcactgccaccagcctcaccgcctgcgggcagggggaggccagcaggcccgggcccagcaccccttccctggcaccagggtctgcctctcactcgcccaggtcccgaaggacactgccacagggacgccttccctcccctcccctccagcccacccctgcacagcccctcctccttcccgcttttccccttctccctcctgctccaggcccaaggcgtgttggttttgccttctggtgcccatagtcccctggactgagtcccccaggccttccttcacccgacttccaaactcttccttgtggtatcagtttccttctcggaaatgagaaagctggaatcctggtccccagcaggagagcctagtcctcccccagcccctccagccaccagggtgtcctctaggatgcagctgccagatccactcactctgctgcctccagcaggacccaaggccactttcaactcttatggggttctccacctgccccagagcttctcaagggagggtaagggggcaccctgagcccacaggacccctacttcacagctcacaggggcaggaggcagctcccctgcctccaggaccctgttgctatggtgacacagcgtttctaggacagaggggcctcccagtctccccccaccacccgtgcacgacttcctcaccacccccaggttccctgcagatgtcgtgtgtgtcctgagtgtttctttggttctttgcacgccaagtctcttggttgtaccatgtgacacaccctgtgcactggtcgctgtcttcgtggcttccacccttgttaatgatgctcctgcctctgcctcccagcccctcacccagcacagctctgcctggacttggagagatgggaggcagacccccaccaccatacatgctgtctgtggcccctcagacattctgtttcatctcccattcatctccctcctcccaccgtgtcagtttttctgcctttccctgctctgttcttccccctccttaggccccagcctgggcccagacccatcctcccagccaggtttccctccagcaggctccttccctccctgtcacctccctctcaccaacccggggtctgagcccctcattcctgaccgtccgtgttctcaggagtggttgaggacacagggccccagcccagccctctgcaccccccagcccggccatctgcgccccacagcccctttggagcttttctcttgtcctctcactccttcccagaagtttttgcacagaacttcattttgaaagtgtttttctcattctccatacctcccccaagctctcctccagcccttcccagggctcagccctgctgtcctgagcgtctcctgggccagagagaggagatgggggtgggagggactgagttgatgttgggtttttcattcaataaattggtgatttcttaccgac

SEQ ID NO: 330670 - DNA, 3698 bp, Homo sapiens
agctgctctagagtatccctccggtcgcgagactgcttgcgatacacagcaacgtgaaggatgtctctgtgcctgtggcagaaataaagatctactccctgtccagccaacccattgaccatgaaggaatcaaatccaagctttctgatcgttctcctgatattgacaattattctgaggaagaggaagagagtttctcatcagaacaggaaggcagtgatgatccattgcatgggcaggacttgttctacgaagacgaagatctccggaaagtgaagaagacccggaggaaactaacctcaacctctgccatcacaaggcaacctaacatcaaacagaagtttgtggccctcctgaagcggtttaaagtttcagatgaggtgggctttgggctggagcatgtgtcccgcgagcagatccgggaagtggaagaggacttggatgaattgtatgacagtctggagatgtacaaccccagcgacagtggccctgagatggaggagacagaaagcatcctcagcacgccaaagcccaagctcaagcctttctttgaggggatgtcgcagtccagctcccagacggagattggcagcctcaacagcaaaggcagcctcggaaaagacaccaccagccctatggaattggctgctctagaaaaaattaaatctacttggattaaaaaccaagatgacagcttgactgaaacagacactctggaaatcactgaccaggacatgtttggagatgccagcacgagtctggttgtgccggagaaagtcaaaactcccatgaagtccagtaaaacggatctccagggctctgcctcccccagcaaagtggagggggtgcacacaccccggcagaagaggagcacgcccctgaaggagcggcagctctccaagcccctaagtgagaggaccaacagttccgacagcgagcgctccccagatctgggccacagcacgcagattccaagaaaggtggtgtatgaccagctcaatcagatcctggtgtcagatgcagccctcccagaaaatgtcattctggtgaacaccactgactggcagggccagtatgtggctgagctgctccaggaccagcggaagcctgtggtgtgcacctgctccaccgtggaggtccaggccgtgctgtccgccctgctcacccggatccagcgctactgcaactgcaactcttccatgccgaggccagtgaaggtggctgctgtgggaggccagagctacctgagctccatcctcaggttctttgtcaagtccctggccaacaagacctccgactggcttggctacatgcgcttcctcatcatccccctcggttctcaccctgtggccaaatacttggggtcagtcgacagtaaatacagtagttccttcctggattctggttggagagatctgttcagtcgctcggagccaccagtgtcagagcaactggacgtggcagggcgggtgatgcagtacgtcaacggggcagccacgacacaccagcttcccgtggccgaagccatgctgacttgccggcataagttccctgatgaagactcctatcagaagtttattcccttcattggcgtggtgaaggtgggtctggttgaagactctccctccacagcaggcgatggggacgattctcctgtggtcagccttactgtgccctccacatcaccaccctccagctcgggcctgagccgagacgccacggccacccctccctcctccccatctatgagcagcgccctggccatcgtggggagccctaatagcccatatggggacgtgattggcctccaggtggactactggctgggccaccccggggagcggaggagggaaggcgacaagagggacgccagctcgaagaacaccctcaagagtgtcttccgctcagtgcaggtgtcccgcctgccccatagtggggaggcccagctttctggcaccatggccatgactgtggtcaccaaagaaaagaacaagaaagttcccaccatcttcctgagcaagaaaccccgagaaaaggaggtggattctaagagccaggtcattgaaggcatcagccgcctcatctgctcagccaagcagcagcagactatgctgagagtgtccatcgatggggtcgagtggagtgacatcaagttcttccagctggcagcccagtggcccacccatgtcaagcactttccagtgggactcttcagtggcagcaaggccacctgaggccctgtctcccagccactttccctcctggcactgccaccagcctcaccgcctgcgggcagggggaggccagcaggcccgggcccagcaccccttccctggcaccagggtctgcctctcactcgcccaggtcccgaaggacactgccacagggacgccttccctcccctcccctccagcccacccctgcacagcccctcctccttcccgcttttccccttctccctcctgctccaggcccaaggcgtgttggttttgccttctggtgcccatagtcccctggactgagtcccccaggccttccttcacccgacttccaaactcttccttgtggtatcagtttccttctcggaaatgagaaagctggaatcctggtccccagcaggagagcctagtcctcccccagcccctccagccaccagggtgtcctctaggatgcagctgccagatccactcactctgctgcctccagcaggacccaaggccactttcaactcttatggggttctccacctgccccagagcttctcaagggagggtaagggggcaccctgagcccacaggacccctacttcacagctcacaggggcaggaggcagctcccctgcctccaggaccctgttgctatggtgacacagcgtttctaggacagaggggcctcccagtctccccccaccacccgtgcacgacttcctcaccacccccaggttccctgcagatgtcgtgtgtgtcctgagtgtttctttggttctttgcacgccaagtctcttggttgtaccatgtgacacaccctgtgcactggtcgctgtcttcgtggcttccacccttgttaatgatgctcctgcctctgcctcccagcccctcacccagcacagctctgcctggacttggagagatgggaggcagacccccaccaccatacatgctgtctgtggcccctcagacattctgtttcatctcccattcatctccctcctcccaccgtgtcagtttttctgcctttccctgctctgttcttccccctccttaggccccagcctgggcccagacccatcctcccagccaggtttccctccagcaggctccttccctccctgtcacctccctctcaccaacccggggtctgagcccctcattcctgaccgtccgtgttctcaggagtggttgaggacacagggccccagcccagccctctgcaccccccagcccggccatctgcgccccacagcccctttggagcttttctcttgtcctctcactccttcccagaagtttttgcacagaacttcattttgaaagtgtttttctcattctccatacctcccccaagctctcctccagcccttcccagggctcagccctgctgtcctgagcgtctcctgggccagagagaggagatgggggtgggagggactgagttgatgttgggtttttcattcaataaattggtgatttcttaccgac

SEQ ID NO: 330671 - DNA, 4182 bp, Homo sapiens
cgccgccgccgccgcgggggaagcctgggagccagatcggcgtcgcctcggcctccgtaacccccgcctagccgggccatggcggaacgcggaggggcgggcggtggtcccggaggcgccgggggcggcagcggccagcggggatccggggtcgcccagtcccctcagcagccgccgccgcagcagcagcagcagcagccgccgcagcagccgacgccccccaagctggcccaggccacctcgtcgtcctcgtccacctcggcggcggctgcctcctcctcgtcctcgtctacctccacctccatggccgtggcggtggcctcgggctccgcgcctcccggtggcccggggccaggccgcacccccgccccggtgcagatgaacctgtacgccacctgggaggtggaccggagctcgtccagctgcgtgcctaggctattcagcttgaccctgaagaaactcgtcatgctaaaagaaatggacaaagatcttaactcagtggtcatcgctgtgaagctgcagggttcaaaaagaattcttcgctccaacgagatcgtccttccagctagtggactggtggaaacagagctccaattaaccttctcccttcagtaccctcatttccttaagcgagatgccaacaagctgcagatcatgctgcaaaggagaaaacgttacaagaatcggaccatcttgggctataagaccttggccgtgggactcatcaacatggcagaggtgatgcagcatcctaatgaaggcgcactggtgcttggcctacacagcaacgtgaaggatgtctctgtgcctgtggcagaaataaagatctactccctgtccagccaacccattgaccatgaaggaatcaaatccaagctttctgatcgttctcctgatattgacaattattctgaggaagaggaagagagtttctcatcagaacaggaaggcagtgatgatccattgcatgggcaggacttgttctacgaagacgaagatctccggaaagtgaagaagacccggaggaaactaacctcaacctctgccatcacaaggcaacctaacatcaaacagaagtttgtggccctcctgaagcggtttaaagtttcagatgaggtgggctttgggctggagcatgtgtcccgcgagcagatccgggaagtggaagaggacttggatgaattgtatgacagtctggagatgtacaaccccagcgacagtggccctgagatggaggagacagaaagcatcctcagcacgccaaagcccaagctcaagcctttctttgaggggatgtcgcagtccagctcccagacggagattggcagcctcaacagcaaaggcagcctcggaaaagacaccaccagccctatggaattggctgctctagaaaaaattaaatctacttggattaaaaaccaagatgacagcttgactgaaacagacactctgattccaagaaaggtggtgtatgaccagctcaatcagatcctggtgtcagatgcagccctcccagaaaatgtcattctggtgaacaccactgactggcagggccagtatgtggctgagctgctccaggaccagcggaagcctgtggtgtgcacctgctccaccgtggaggtccaggccgtgctgtccgccctgctcacccggatccagcgctactgcaactgcaactcttccatgccgaggccagtgaaggtggctgctgtgggaggccagagctacctgagctccatcctcaggttctttgtcaagtccctggccaacaagacctccgactggcttggctacatgcgcttcctcatcatccccctcggttctcaccctgtggccaaatacttggggtcagtcgacagtaaatacagtagttccttcctggattctggttggagagatctgttcagtcgctcggagccaccagtgtcagagcaactggacgtggcagggcgggtgatgcagtacgtcaacggggcagccacgacacaccagcttcccgtggccgaagccatgctgacttgccggcataagttccctgatgaagactcctatcagaagtttattcccttcattggcgtggtgaaggtgggtctggttgaagactctccctccacagcaggcgatggggacgattctcctgtggtcagccttactgtgccctccacatcaccaccctccagctcgggcctgagccgagacgccacggccacccctccctcctccccatctatgagcagcgccctggccatcgtggggagccctaatagcccatatggggacgtgattggcctccaggtggactactggctgggccaccccggggagcggaggagggaaggcgacaagagggacgccagctcgaagaacaccctcaagagtgtcttccgctcagtgcaggtgtcccgcctgccccatagtggggaggcccagctttctggcaccatggccatgactgtggtcaccaaagaaaagaacaagaaagttcccaccatcttcctgagcaagaaaccccgagaaaaggaggtggattctaagagccaggtcattgaaggcatcagccgcctcatctgctcagccaagcagcagcagactatgctgagagtgtccatcgatggggtcgagtggagtgacatcaagttcttccagctggcagcccagtggcccacccatgtcaagcactttccagtgggactcttcagtggcagcaaggccacctgaggccctgtctcccagccactttccctcctggcactgccaccagcctcaccgcctgcgggcagggggaggccagcaggcccgggcccagcaccccttccctggcaccagggtctgcctctcactcgcccaggtcccgaaggacactgccacagggacgccttccctcccctcccctccagcccacccctgcacagcccctcctccttcccgcttttccccttctccctcctgctccaggcccaaggcgtgttggttttgccttctggtgcccatagtcccctggactgagtcccccaggccttccttcacccgacttccaaactcttccttgtggtatcagtttccttctcggaaatgagaaagctggaatcctggtccccagcaggagagcctagtcctcccccagcccctccagccaccagggtgtcctctaggatgcagctgccagatccactcactctgctgcctccagcaggacccaaggccactttcaactcttatggggttctccacctgccccagagcttctcaagggagggtaagggggcaccctgagcccacaggacccctacttcacagctcacaggggcaggaggcagctcccctgcctccaggaccctgttgctatggtgacacagcgtttctaggacagaggggcctcccagtctccccccaccacccgtgcacgacttcctcaccacccccaggttccctgcagatgtcgtgtgtgtcctgagtgtttctttggttctttgcacgccaagtctcttggttgtaccatgtgacacaccctgtgcactggtcgctgtcttcgtggcttccacccttgttaatgatgctcctgcctctgcctcccagcccctcacccagcacagctctgcctggacttggagagatgggaggcagacccccaccaccatacatgctgtctgtggcccctcagacattctgtttcatctcccattcatctccctcctcccaccgtgtcagtttttctgcctttccctgctctgttcttccccctccttaggccccagcctgggcccagacccatcctcccagccaggtttccctccagcaggctccttccctccctgtcacctccctctcaccaacccggggtctgagcccctcattcctgaccgtccgtgttctcaggagtggttgaggacacagggccccagcccagccctctgcaccccccagcccggccatctgcgccccacagcccctttggagcttttctcttgtcctctcactccttcccagaagtttttgcacagaacttcattttgaaagtgtttttctcattctccatacctcccccaagctctcctccagcccttcccagggctcagccctgctgtcctgagcgtctcctgggccagagagaggagatgggggtgggagggactgagttgatgttgggtttttcattcaataaattggtgatttcttaccgac

SEQ ID NO: 330672 - DNA, 3548 bp, Homo sapiens
cagcttcacagtgtggagcggtggcaggaactggggggaaggtggcctcaccatgtccccgccctcaggctggatcatggaaatgacgtgaaggttactccagccagtgtgaagctctggcatgtcccttaagcaggactataagggcagcccaggagaaaggagctgctcatcaaccaaaattgttaatagggatgaccctaaattcagagactcctttttccctgcaggtgggctttgggctggagcatgtgtcccgcgagcagatccgggaagtggaagaggacttggatgaattgtatgacagtctggagatgtacaaccccagcgacagtggccctgagatggaggagacagaaagcatcctcagcacgccaaagcccaagctcaagcctttctttgaggggatgtcgcagtccagctcccagacggagattggcagcctcaacagcaaaggcagcctcggaaaagacaccaccagccctatggaattggctgctctagaaaaaattaaatctacttggattaaaaaccaagatgacagcttgactgaaacagacactctggaaatcactgaccaggacatgtttggagatgccagcacgagtctggttgtgccggagaaagtcaaaactcccatgaagtccagtaaaacggatctccagggctctgcctcccccagcaaagtggagggggtgcacacaccccggcagaagaggagcacgcccctgaaggagcggcagctctccaagcccctaagtgagaggaccaacagttccgacagcgagcgctccccagatctgggccacagcacgcagattccaagaaaggtggtgtatgaccagctcaatcagatcctggtgtcagatgcagccctcccagaaaatgtcattctggtgaacaccactgactggcagggccagtatgtggctgagctgctccaggaccagcggaagcctgtggtgtgcacctgctccaccgtggaggtccaggccgtgctgtccgccctgctcacccggatccagcgctactgcaactgcaactcttccatgccgaggccagtgaaggtggctgctgtgggaggccagagctacctgagctccatcctcaggttctttgtcaagtccctggccaacaagacctccgactggcttggctacatgcgcttcctcatcatccccctcggttctcaccctgtggccaaatacttggggtcagtcgacagtaaatacagtagttccttcctggattctggttggagagatctgttcagtcgctcggagccaccagtgtcagagcaactggacgtggcagggcgggtgatgcagtacgtcaacggggcagccacgacacaccagcttcccgtggccgaagccatgctgacttgccggcataagttccctgatgaagactcctatcagaagtttattcccttcattggcgtggtgaaggtgggtctggttgaagactctccctccacagcaggcgatggggacgattctcctgtggtcagccttactgtgccctccacatcaccaccctccagctcgggcctgagccgagacgccacggccacccctccctcctccccatctatgagcagcgccctggccatcgtggggagccctaatagcccatatggggacgtgattggcctccaggtggactactggctgggccaccccggggagcggaggagggaaggcgacaagagggacgccagctcgaagaacaccctcaagagtgtcttccgctcagtgcaggtgtcccgcctgccccatagtggggaggcccagctttctggcaccatggccatgactgtggtcaccaaagaaaagaacaagaaagttcccaccatcttcctgagcaagaaaccccgagaaaaggaggtggattctaagagccaggtcattgaaggcatcagccgcctcatctgctcagccaagcagcagcagactatgctgagagtgtccatcgatggggtcgagtggagtgacatcaagttcttccagctggcagcccagtggcccacccatgtcaagcactttccagtgggactcttcagtggcagcaaggccacctgaggccctgtctcccagccactttccctcctggcactgccaccagcctcaccgcctgcgggcagggggaggccagcaggcccgggcccagcaccccttccctggcaccagggtctgcctctcactcgcccaggtcccgaaggacactgccacagggacgccttccctcccctcccctccagcccacccctgcacagcccctcctccttcccgcttttccccttctccctcctgctccaggcccaaggcgtgttggttttgccttctggtgcccatagtcccctggactgagtcccccaggccttccttcacccgacttccaaactcttccttgtggtatcagtttccttctcggaaatgagaaagctggaatcctggtccccagcaggagagcctagtcctcccccagcccctccagccaccagggtgtcctctaggatgcagctgccagatccactcactctgctgcctccagcaggacccaaggccactttcaactcttatggggttctccacctgccccagagcttctcaagggagggtaagggggcaccctgagcccacaggacccctacttcacagctcacaggggcaggaggcagctcccctgcctccaggaccctgttgctatggtgacacagcgtttctaggacagaggggcctcccagtctccccccaccacccgtgcacgacttcctcaccacccccaggttccctgcagatgtcgtgtgtgtcctgagtgtttctttggttctttgcacgccaagtctcttggttgtaccatgtgacacaccctgtgcactggtcgctgtcttcgtggcttccacccttgttaatgatgctcctgcctctgcctcccagcccctcacccagcacagctctgcctggacttggagagatgggaggcagacccccaccaccatacatgctgtctgtggcccctcagacattctgtttcatctcccattcatctccctcctcccaccgtgtcagtttttctgcctttccctgctctgttcttccccctccttaggccccagcctgggcccagacccatcctcccagccaggtttccctccagcaggctccttccctccctgtcacctccctctcaccaacccggggtctgagcccctcattcctgaccgtccgtgttctcaggagtggttgaggacacagggccccagcccagccctctgcaccccccagcccggccatctgcgccccacagcccctttggagcttttctcttgtcctctcactccttcccagaagtttttgcacagaacttcattttgaaagtgtttttctcattctccatacctcccccaagctctcctccagcccttcccagggctcagccctgctgtcctgagcgtctcctgggccagagagaggagatgggggtgggagggactgagttgatgttgggtttttcattcaataaattggtgatttcttaccgac

SEQ ID NO: 330673 - DNA, 2504 bp, Homo sapiens
taaaaaaaaaaaaaaaactcaacgctgagccgcctgtatcggcacgagggctgagctccatcctcaggttctttgtcaagtccctggccaacaagacctccgactggcttggctacatgcgcttcctcatcatccccctcggttctcaccctgtggccaaatacttggggtcagtcgacagtaaatacagtagttccttcctggattctggttggagagatctgttcagtcgctcggagccaccagtgtcagagcaactggacgtggcagggcgggtgatgcagtacgtcaacggggcagccacgacacaccagcttcccgtggccgaagccatgctgacttgccggcataagttccctgatgaagactcctatcagaagtttattcccttcattggcgtggtgaaggtgggtctggttgaagactctccctccacagcaggcgatggggacgattctcctgtggtcagccttactgtgccctccacatcaccaccctccagctcgggcctgagccgagacgccacggccacccctccctcctccccatctatgagcagcgccctggccatcgtggggagccctaatagcccatatggggacgtgattggcctccaggtggactactggctgggccaccccggggagcggaggagggaaggcgacaagagggacgccagctcgaagaacaccctcaagagtgtcttccgctcagtgcaggtgtcccgcctgccccatagtggggaggcccagctttctggcaccatggccatgactgtggtcaccaaagaaaagaacaagaaagttcccaccatcttcctgagcaagaaaccccgagaaaaggaggtggattctaagagccaggtcattgaaggcatcagccgcctcatctgctcagccaagcagcagcagactatgctgagagtgtccatcgatggggtcgagtggagtgacatcaagttcttccagctggcagcccagtggcccacccatgtcaagcactttccagtgggactcttcagtggcagcaaggccacctgaggccctgtctcccagccactttccctcctggcactgccaccagcctcaccgcctgcgggcagggggaggccagcaggcccgggcccagcaccccttccctggcaccagggtctgcctctcactcgcccaggtcccgaaggacactgccacagggacgccttccctcccctcccctccagcccacccctgcacagcccctcctccttcccgcttttccccttctccctcctgctccaggcccaaggcgtgttggttttgccttctggtgcccatagtcccctggactgagtcccccaggccttccttcacccgacttccaaactcttccttgtggtatcagtttccttctcggaaatgagaaagctggaatcctggtccccagcaggagagcctagtcctcccccagcccctccagccaccagggtgtcctctaggatgcagctgccagatccactcactctgctgcctccagcaggacccaaggccactttcaactcttatggggttctccacctgccccagagcttctcaagggagggtaagggggcaccctgagcccacaggacccctacttcacagctcacaggggcaggaggcagctcccctgcctccaggaccctgttgctatggtgacacagcgtttctaggacagaggggcctcccagtctccccccaccacccgtgcacgacttcctcaccacccccaggttccctgcagatgtcgtgtgtgtcctgagtgtttctttggttctttgcacgccaagtctcttggttgtaccatgtgacacaccctgtgcactggtcgctgtcttcgtggcttccacccttgttaatgatgctcctgcctctgcctcccagcccctcacccagcacagctctgcctggacttggagagatgggaggcagacccccaccaccatacatgctgtctgtggcccctcagacattctgtttcatctcccattcatctccctcctcccaccgtgtcagtttttctgcctttccctgctctgttcttccccctccttaggccccagcctgggcccagacccatcctcccagccaggtttccctccagcaggctccttccctccctgtcacctccctctcaccaacccggggtctgagcccctcattcctgaccgtccgtgttctcaggagtggttgaggacacagggccccagcccagccctctgcaccccccagcccggccatctgcgccccacagcccctttggagcttttctcttgtcctctcactccttcccagaagtttttgcacagaacttcattttgaaagtgtttttctcattctccatacctcccccaagctctcctccagcccttcccagggctcagccctgctgtcctgagcgtctcctgggccagagagaggagatgggggtgggagggactgagttgatgttgggtttttcattcaataaattggtgatttcttaccgac

SEQ ID NO: 330674 - DNA, 6060 bp, Homo sapiens
cgccgccgccgccgcgggggaagcctgggagccagatcggcgtcgcctcggcctccgtaacccccgcctagccgggccatggcggaacgcggaggggcgggcggtggtcccggaggcgccgggggcggcagcggccagcggggatccggggtcgcccagtcccctcagcagccgccgccgcagcagcagcagcagcagccgccgcagcagccgacgccccccaagctggcccaggccacctcgtcgtcctcgtccacctcggcggcggctgcctcctcctcgtcctcgtctacctccacctccatggccgtggcggtggcctcgggctccgcgcctcccggtggcccggggccaggccgcacccccgccccggtgcagatgaacctgtacgccacctgggaggtggaccggagctcgtccagctgcgtgcctaggctattcagcttgaccctgaagaaactcgtcatgctaaaagaaatggacaaagatcttaactcagtggtcatcgctgtgaagctgcagggttcaaaaagaattcttcgctccaacgagatcgtccttccagctagtggactggtggaaacagagctccaattaaccttctcccttcagtaccctcatttccttaagcgagatgccaacaagctgcagatcatgctgcaaaggagaaaacgttacaagaatcggaccatcttgggctataagaccttggccgtgggactcatcaacatggcagaggtgatgcagcatcctaatgaaggcgcactggtgcttggcctacacagcaacgtgaaggatgtctctgtgcctgtggcagaaataaagatctactccctgtccagccaacccattgaccatgaaggaatcaaatccaagctttctgatcgttctcctgatattgacaattattctgaggaagaggaagagagtttctcatcagaacaggaaggcagtgatgatccattgcatgggcaggacttgttctacgaagacgaagatctccggaaagtgaagaagacccggaggaaactaacctcaacctctgccatcacaaggcaacctaacatcaaacagaagtttgtggccctcctgaagcggtttaaagtttcagatgaggtgggctttgggctggagcatgtgtcccgcgagcagatccgggaagtggaagaggacttggatgaattgtatgacagtctggagatgtacaaccccagcgacagtggccctgagatggaggagacagaaagcatcctcagcacgccaaagcccaagctcaagcctttctttgaggggatgtcgcagtccagctcccagacggagattggcagcctcaacagcaaaggcagcctcggaaaagacaccaccagccctatggaattggctgctctagaaaaaattaaatctacttggattaaaaaccaagatgacagcttgactgaaacagacactctggaaatcactgaccaggacatgtttggagatgccagcacgagtctggttgtgccggagaaagtcaaaactcccatgaagtccagtaaaacggatctccagggctctgcctcccccagcaaagtggagggggtgcacacaccccggcagaagaggagcacgcccctgaaggagcggcagctctccaagcccctaagtgagaggaccaacagttccgacagcgagcgctccccagatctgggccacagcacgcagattccaagaaaggtggtgtatgaccagctcaatcagatcctggtgtcagatgcagccctcccagaaaatgtcattctggtgaacaccactgactggcagggccagtatgtggctgagctgctccaggaccagcggaagcctgtggtgtgcacctgctccaccgtggaggtccaggccgtgctgtccgccctgctcacccggatccagcgctactgcaactgcaactcttccatgccgaggccagtgaaggtggctgctgtgggaggccagagctacctgagctccatcctcaggttctttgtcaagtccctggccaacaagacctccgactggcttggctacatgcgcttcctcatcatccccctcggttctcaccctgtggccaaatacttggggtcagtcgacagtaaatacagtagttccttcctggattctggttggagagatctgttcagtcgctcggagccaccagtgtcagagcaactggacgtggcagggcgggtgatgcagtacgtcaacggggcagccacgacacaccagcttcccgtggccgaagccatgctgacttgccggcataagttccctgatgaagactcctatcagaagtttattcccttcattggcgtggtgaaggtgggtctggttgaagactctccctccacagcaggcgatggggacgattctcctgtggtcagccttactgtgccctccacatcaccaccctccagctcgggcctgagccgagacgccacggccacccctccctcctccccatctatgagcagcgccctggccatcgtggggagccctaatagcccatatggggacgtgattggcctccaggtggactactggctgggccaccccggggagcggaggagggaaggcgacaagagggacgccagctcgaagaacaccctcaagagtgtcttccgctcagtgcaggtgtcccgcctgccccatagtggggaggcccagctttctggcaccatggccatgactgtggtcaccaaagaaaagaacaagaaagttcccaccatcttcctgagcaagaaaccccgagaaaaggaggtggattctaagagccaggtcattgaaggcatcagccgcctcatctgctcagccaagcagcagcagactatgctgagagtgtccatcgatggggtcgagtggagtgacatcaagttcttccagctggcagcccagtggcccacccatgtcaagcactttccagtgggactcttcagtggcagcaaggccacctgaggccctgtctcccagccactttccctcctggcactgccaccagcctcaccgcctgcgggcagggggaggccagcaggcccgggcccagcaccccttccctggcaccagggtctgcctctcactcgcccaggtcccgaaggacactgccacagggacgccttccctcccctcccctccagcccacccctgcacagcccctcctccttcccgcttttccccttctccctcctgctccaggcccaaggcgtgttggttttgccttctggtgcccatagtcccctggactgagtcccccaggccttccttcacccgacttccaaactcttccttgtggtatcagtttccttctcggaaatgagaaagctggaatcctggtccccagcaggagagcctagtcctcccccagcccctccagccaccagggtgtcctctaggatgcagctgccagatccactcactctgctgcctccagcaggacccaaggccactttcaactcttatggggttctccacctgccccagagcttctcaagggagggtaagggggcaccctgagcccacaggacccctacttcacagctcacaggggcaggaggcagctcccctgcctccaggaccctgttgctatggtgacacagcgtttctaggacagaggggcctcccagtctccccccaccacccgtgcacgacttcctcaccacccccaggttccctgcagatgtcgtgtgtgtcctgagtgtttctttggttctttgcacgccaagtctcttggttgtaccatgtgacacaccctgtgcactggtcgctgtcttcgtggcttccacccttgttaatgatgctcctgcctctgcctcccagcccctcacccagcacagctctgcctggacttggagagatgggaggcagacccccaccaccatacatgctgtctgtggcccctcagacattctgtttcatctcccattcatctccctcctcccaccgtgtcagtttttctgcctttccctgctctgttcttccccctccttaggccccagcctgggcccagacccatcctcccagccaggtttccctccagcaggctccttccctccctgtcacctccctctcaccaacccggggtctgagcccctcattcctgaccgtccgtgttctcaggagtggttgaggacacagggccccagcccagccctctgcaccccccagcccggccatctgcgccccacagcccctttggagcttttctcttgtcctctcactccttcccagaagtttttgcacagaacttcattttgaaagtgtttttctcattctccatacctcccccaagctctcctccagcccttcccagggctcagccctgctgtcctgagcgtctcctgggccagagagaggagatgggggtgggagggactgagttgatgttgggtttttcattcaataaattggtgatttcttaccgactgccttgggcttctatgccccctcactgtgccacaggagctgcccaaccccttttccacagtgcagcccaactccagtgaaaatccaccaggaacgtaggtggaaagaagcgtactcccatgttctcaatcatggaaacaggcatgaaggtgtctcacctggcatgaggcaggcagaggtcggaaacaggaaagatgtcttttccacaccaaaagcccgtttttccccaggacccaccatccccaaatccacctcccaaggcagtgacgtgttgagtgtggcttccccatcttctgatcaaaggtcagaacttagcttctctcccctgctccaggttggtgaagtccgagccagtggggtctttgcctcttctaaatgaggtgatagcggggctggtgagaggaaaggccaggagaagcaaatcatacctagtgtgacctggatctagggtgtgagtgtggctgcagagcagggtgaagtgcccacgaggacttcccggagcacagccaggcgagggctgcagggcaggagctgtgcagagctgggggccagggagttccagtggagggggtgggacaagtagacttggatcccagcttctggcccccttaggttctggcttagagctaggagagagggtgaagggtgaactctcagcccgtctgcatctgacaccatatcctcagcctccccttctgtggcaataaatgccccaccctgctcccatcctcggggcccatccctcttcactccttgagggcttttctcctacagtcgccctctctcctgcactgcgggttctcccctctgccaggactttccacccacttacatgcatcccaagtgggtatagctcaatatcaaagaccagagacttccagattctcttcagctgccatgccttgtctctgctccccttagagcaaaactcttccaaagagctgtgtgtgttccccgtctccacttctgcccactcccttccagttttttcctcacaatcccaccaaaagtttcctttccacagttgccagtgacctgggttgcccagtcctatcagtagcattggatgcaaataatcacccgcttgagtctttccacctggcctgtggacagctctgtgctctcctctcacctccctggcctctcctttttggcctcccttgctatggtgtcctcagcttcccagcctcaaaaccctggaggactcggggctccagcctctaatatagcctcctctctccccacactcagccctaaagggagctcactcggccccatggtgtgaaatgtgctcccctggggagacttccctcctagtaaatgcaaactcggttcttcagttccgaggccgaaaactggggaatcctcctcgattcctgtttctcttgtacccaccatctaatccatgagcaaatcctccaggcttatcctgacagtgccttgccccttcctctactgcgattatctcttgtctggatattgcaataggctcctaattatccctgctcccaccctcttctccctgtagcctgttctccactcaatagccagagatttttcagagctgagcagatcgtgttggattgctgatccaaactgtgcatgggaccgggtaacggctcgatt

SEQ ID NO: 330675 - DNA, 2249 bp, Homo sapiens
cagcccagatttgcaaagattttaaagtcggcaataaaataatgtgtagtgatggctcttgtgccaccaatgtgtttctggttggatcagaacatgcctgctttaacaggaggatctaatgagtgcctcttctctccttgcaggtggtgaaggtgggtctggttgaagactctccctccacagcaggcgatggggacgattctcctgtggtcagccttactgtgccctccacatcaccaccctccagctcgggcctgagccgagacgccacggccacccctccctcctccccatctatgagcagcgccctggccatcgtggggagccctaatagcccatatggggacgtgattggcctccaggtggactactggctgggccaccccggggagcggaggagggaaggcgacaagagggacgccagctcgaagaacaccctcaagagtgtcttccgctcagtgcaggtgtcccgcctgccccatagtggggaggcccagctttctggcaccatggccatgactgtggtcaccaaagaaaagaacaagaaagttcccaccatcttcctgagcaagaaaccccgagaaaaggaggtggattctaagagccaggtcattgaaggcatcagccgcctcatctgctcagccaagcagcagcagactatgctgagagtgtccatcgatggggtcgagtggagtgacatcaagttcttccagctggcagcccagtggcccacccatgtcaagcactttccagtgggactcttcagtggcagcaaggccacctgaggccctgtctcccagccactttccctcctggcactgccaccagcctcaccgcctgcgggcagggggaggccagcaggcccgggcccagcaccccttccctggcaccagggtctgcctctcactcgcccaggtcccgaaggacactgccacagggacgccttccctcccctcccctccagcccacccctgcacagcccctcctccttcccgcttttccccttctccctcctgctccaggcccaaggcgtgttggttttgccttctggtgcccatagtcccctggactgagtcccccaggccttccttcacccgacttccaaactcttccttgtggtatcagtttccttctcggaaatgagaaagctggaatcctggtccccagcaggagagcctagtcctcccccagcccctccagccaccagggtgtcctctaggatgcagctgccagatccactcactctgctgcctccagcaggacccaaggccactttcaactcttatggggttctccacctgccccagagcttctcaagggagggtaagggggcaccctgagcccacaggacccctacttcacagctcacaggggcaggaggcagctcccctgcctccaggaccctgttgctatggtgacacagcgtttctaggacagaggggcctcccagtctccccccaccacccgtgcacgacttcctcaccacccccaggttccctgcagatgtcgtgtgtgtcctgagtgtttctttggttctttgcacgccaagtctcttggttgtaccatgtgacacaccctgtgcactggtcgctgtcttcgtggcttccacccttgttaatgatgctcctgcctctgcctcccagcccctcacccagcacagctctgcctggacttggagagatgggaggcagacccccaccaccatacatgctgtctgtggcccctcagacattctgtttcatctcccattcatctccctcctcccaccgtgtcagtttttctgcctttccctgctctgttcttccccctccttaggccccagcctgggcccagacccatcctcccagccaggtttccctccagcaggctccttccctccctgtcacctccctctcaccaacccggggtctgagcccctcattcctgaccgtccgtgttctcaggagtggttgaggacacagggccccagcccagccctctgcaccccccagcccggccatctgcgccccacagcccctttggagcttttctcttgtcctctcactccttcccagaagtttttgcacagaacttcattttgaaagtgtttttctcattctccatacctcccccaagctctcctccagcccttcccagggctcagccctgctgtcctgagcgtctcctgggccagagagaggagatgggggtgggagggactgagttgatgttgggtttttcattcaataaattggtgatttcttaccgac

SEQ ID NO: 330676 - DNA, 2054 bp, Homo sapiens
tgcaggtcgggtggcaccagctgctgtcctgaggctgcactggagccgcccgcaggggcttctgccgggctcaggccttctctccagctcgaggctcagtttggcccaggctttgcctgctgggcgtgagccctaatagcccatatggggacgtgattggcctccaggtggactactggctgggccaccccggggagcggaggagggaaggcgacaagagggacgccagctcgaagaacaccctcaagagtgtcttccgctcagtgcaggtgtcccgcctgccccatagtggggaggcccagctttctggcaccatggccatgactgtggtcaccaaagaaaagaacaagaaagttcccaccatcttcctgagcaagaaaccccgagaaaaggaggtggattctaagagccaggtcattgaaggcatcagccgcctcatctgctcagccaagcagcagcagactatgctgagagtgtccatcgatggggtcgagtggagtgacatcaagttcttccagctggcagcccagtggcccacccatgtcaagcactttccagtgggactcttcagtggcagcaaggccacctgaggccctgtctcccagccactttccctcctggcactgccaccagcctcaccgcctgcgggcagggggaggccagcaggcccgggcccagcaccccttccctggcaccagggtctgcctctcactcgcccaggtcccgaaggacactgccacagggacgccttccctcccctcccctccagcccacccctgcacagcccctcctccttcccgcttttccccttctccctcctgctccaggcccaaggcgtgttggttttgccttctggtgcccatagtcccctggactgagtcccccaggccttccttcacccgacttccaaactcttccttgtggtatcagtttccttctcggaaatgagaaagctggaatcctggtccccagcaggagagcctagtcctcccccagcccctccagccaccagggtgtcctctaggatgcagctgccagatccactcactctgctgcctccagcaggacccaaggccactttcaactcttatggggttctccacctgccccagagcttctcaagggagggtaagggggcaccctgagcccacaggacccctacttcacagctcacaggggcaggaggcagctcccctgcctccaggaccctgttgctatggtgacacagcgtttctaggacagaggggcctcccagtctccccccaccacccgtgcacgacttcctcaccacccccaggttccctgcagatgtcgtgtgtgtcctgagtgtttctttggttctttgcacgccaagtctcttggttgtaccatgtgacacaccctgtgcactggtcgctgtcttcgtggcttccacccttgttaatgatgctcctgcctctgcctcccagcccctcacccagcacagctctgcctggacttggagagatgggaggcagacccccaccaccatacatgctgtctgtggcccctcagacattctgtttcatctcccattcatctccctcctcccaccgtgtcagtttttctgcctttccctgctctgttcttccccctccttaggccccagcctgggcccagacccatcctcccagccaggtttccctccagcaggctccttccctccctgtcacctccctctcaccaacccggggtctgagcccctcattcctgaccgtccgtgttctcaggagtggttgaggacacagggccccagcccagccctctgcaccccccagcccggccatctgcgccccacagcccctttggagcttttctcttgtcctctcactccttcccagaagtttttgcacagaacttcattttgaaagtgtttttctcattctccatacctcccccaagctctcctccagcccttcccagggctcagccctgctgtcctgagcgtctcctgggccagagagaggagatgggggtgggagggactgagttgatgttgggtttttcattcaataaattggtgatttcttaccgac

SEQ ID NO: 330677 - DNA, 4218 bp, Homo sapiens
cgccgccgccgccgcgggggaagcctgggagccagatcggcgtcgcctcggcctccgtaacccccgcctagccgggccatggcggaacgcggaggggcgggcggtggtcccggaggcgccgggggcggcagcggccagcggggatccggggtcgcccagtcccctcagcagccgccgccgcagcagcagcagcagcagccgccgcagcagccgacgccccccaagctggcccaggccacctcgtcgtcctcgtccacctcggcggcggctgcctcctcctcgtcctcgtctacctccacctccatggccgtggcggtggcctcgggctccgcgcctcccggtggcccggggccaggccgcacccccgccccggtgcagatgaacctgtacgccacctgggaggtggaccggagctcgtccagctgcgtgcctaggctattcagcttgaccctgaagaaactcgtcatgctaaaagaaatggacaaagatcttaactcagtggtcatcgctgtgaagctgcagggttcaaaaagaattcttcgctccaacgagatcgtccttccagctagtggactggtggaaacagagctccaattaaccttctcccttcagtaccctcatttccttaagcgagatgccaacaagctgcagatcatgctgcaaaggagaaaacgttacaagaatcggaccatcttgggctataagaccttggccgtgggactcatcaacatggcagaggtgatgcagcatcctaatgaaggcgcactggtgcttggcctacacagcaacgtgaaggatgtctctgtgcctgtggcagaaataaagatctactccctgtccagccaacccattgaccatgaaggaatcaaatccaagctttctgatcgttctcctgatattgacaattattctgaggaagaggaagagagtttctcatcagaacaggaaggcagtgatgatccattgcatgggcaggacttgttctacgaagacgaagatctccggaaagtgaagaagacccggaggaaactaacctcaacctctgccatcacaaggcaacctaacatcaaacagaagtttgtggccctcctgaagcggtttaaagtttcagatgaggtgggctttgggctggagcatgtgtcccgcgagcagatccgggaagtggaagaggacttggatgaattgtatgacagtctggagatgtacaaccccagcgacagtggccctgagatggaggagacagaaagcatcctcagcacgccaaagcccaagctcaagcctttctttgaggggatgtcgcagtccagctcccagacggagattggcagcctcaacagcaaaggcagcctcggaaaagacaccaccagccctatggaattggctgctctagaaaaaattaaatctacttggattaaaaaccaagatgacagcttgactgaaacagacactctggaaatcactgaccaggacatgtttggagatgccagcacgagtctggttgtgccggagaaagtcaaaactcccatgaagtccagtaaaacggatctccagggctctgcctcccccagcaaagtggagggggtgcacacaccccggcagaagaggagcacgcccctgaaggagcggcagctctccaagcccctaagtgagaggaccaacagttccgacagcgagcgctccccagatctgggccacagcacgcagattccaagaaaggtggtgtatgaccagctcaatcagatcctggtgtcagatgcagccctcccagaaaatgtcattctggtgaacaccactgactggcagggccagtatgtggctgagctgctccaggaccagcggaagcctgtggtgtgcacctgctccaccgtggaggtccaggccgtgctgtccgccctgctcacccggatccagcgctactgcaactgcaactcttccatgccgaggccagtgaaggtggctgctgtgggaggccagagctacctgagctccatcctcaggttctttgtcaagtccctggccaacaagacctccgactggcttggctacatgcgcttcctcatcatccccctcggttctcaccctgtggccaaatacttggggtcagtcgacagtaaatacagtagttccttcctggattctggttggagagatctgttcagtcgctcggagccaccagtgtcagagcaactggacgtggcagggcgggtgatgcagtacgtcaacggggcagccacgacacaccagcttcccgtggccgaagccatgctgacttgccggcataagttccctgatgaagactcctatcagaagtttattcccttcattggcgtggtgaaggtgggtctggttgaagactctccctccacagcaggcgatggggacgattctcctgtggtcagccttactgtgccctccacatcaccaccctccagctcgggcctgagccgagacgccacggccacccctccctcctccccatctatgagcagcgccctggccatcgtggggagccctaatagcccatatggggacgtgattggcctccaggtggactactggctgggccaccccggggagcggaggagggaaggcgacaagagggacgccagctcgaagaacaccctcaagagtgtcttccgctcagtgcaggtgtcccgcctgccccatagtggggaggcccagctttctggcaccatggccatgactgtggtcaccaaagaaaagaacaagaaagttcccaccatcttcctgagcaagaaaccccgagaaaaggaggtggattctaagagccaggtcattgaaggcatcagccgcctcatctgctcagccaagcagcagcagactatgctgagagtgtccatcgatggggtcgagtggagtgacatcaagttcttccagctggcagcccagtggcccacccatgtcaagcactttccagtgggactcttcagtggcagcaaggccacctgaggccctgtctcccagccactttccctcctggcactgccaccagcctcaccgcctgcgggcagggggaggccagcaggcccgggcccagcaccccttccctggcaccagggtctgcctctcactcgcccaggtcccgaaggacactgccacagggacgccttccctcccctcccctccagcccacccctgcacagcccctcctccttcccgcttttccccttctccctcctgctccaggcccaaggcgtgttggttttgccttctggtgcccatagtcccctggactgagtcccccaggccttccttcacccgacttccaaactcttccttgtggtatcagtttccttctcggaaatgagaaagctggaatcctggtccccagcaggagagcctagtcctcccccagcccctccagccaccagggtgtcctctaggatgcagctgccagatccactcactctgctgcctccagcaggacccaaggccactttcaactcttatggggttctccacctgccccagagcttctcaagggagggtaagggggcaccctgagcccacaggacccctacttcacagctcacaggggcaggaggcagctcccctgcctccaggaccctgttgctatggtgacacagcgtttctaggacagaggggcctcccagtctccccccaccacccgtgcacgacttcctcaccaccatacatgctgtctgtggcccctcagacattctgtttcatctcccattcatctccctcctcccaccgtgtcagtttttctgcctttccctgctctgttcttccccctccttaggccccagcctgggcccagacccatcctcccagccaggtttccctccagcaggctccttccctccctgtcacctccctctcaccaacccggggtctgagcccctcattcctgaccgtccgtgttctcaggagtggttgaggacacagggccccagcccagccctctgcaccccccagcccggccatctgcgccccacagcccctttggagcttttctcttgtcctctcactccttcccagaagtttttgcacagaacttcattttgaaagtgtttttctcattctccatacctcccccaagctctcctccagcccttcccagggctcagccctgctgtcctgagcgtctcctgggccagagagaggagatgggggtgggagggactgagttgatgttgggtttttcattcaataaattggtgatttcttaccgac

SEQ ID NO: 330678 - DNA, 4191 bp, Homo sapiens
cgccgccgccgccgcgggggaagcctgggagccagatcggcgtcgcctcggcctccgtaacccccgcctagccgggccatggcggaacgcggaggggcgggcggtggtcccggaggcgccgggggcggcagcggccagcggggatccggggtcgcccagtcccctcagcagccgccgccgcagcagcagcagcagcagccgccgcagcagccgacgccccccaagctggcccaggccacctcgtcgtcctcgtccacctcggcggcggctgcctcctcctcgtcctcgtctacctccacctccatggccgtggcggtggcctcgggctccgcgcctcccggtggcccggggccaggccgcacccccgccccggtgcagatgaacctgtacgccacctgggaggtggaccggagctcgtccagctgcgtgcctaggctattcagcttgaccctgaagaaactcgtcatgctaaaagaaatggacaaagatcttaactcagtggtcatcgctgtgaagctgcagggttcaaaaagaattcttcgctccaacgagatcgtccttccagctagtggactggtggaaacagagctccaattaaccttctcccttcagtaccctcatttccttaagcgagatgccaacaagctgcagatcatgctgcaaaggagaaaacgttacaagaatcggaccatcttgggctataagaccttggccgtgggactcatcaacatggcagaggtgatgcagcatcctaatgaaggcgcactggtgcttggcctacacagcaacgtgaaggatgtctctgtgcctgtggcagaaataaagatctactccctgtccagccaacccattgaccatgaaggaatcaaatccaagctttctgatcgttctcctgatattgacaattattctgaggaagaggaagagagtttctcatcagaacaggaaggcagtgatgatccattgcatgggcaggacttgttctacgaagacgaagatctccggaaagtgaagaagacccggaggaaactaacctcaacctctgccatcacaaggcaacctaacatcaaacagaagtttgtggccctcctgaagcggtttaaagtttcagatgaggtgggctttgggctggagcatgtgtcccgcgagcagatccgggaagtggaagaggacttggatgaattgtatgacagtctggagatgtacaaccccagcgacagtggccctgagatggaggagacagaaagcatcctcagcacgccaaagcccaagctcaagcctttctttgaggggatgtcgcagtccagctcccagacggagattggcagcctcaacagcaaaggcagcctcggaaaagacaccaccagccctatggaattggctgctctagaaaaaattaaatctacttggattaaaaaccaagatgacagcttgactgaaacagacactctggaaatcactgaccaggacatgtttggagatgccagcacgagtctggttgtgccggagaaagtcaaaactcccatgaagtccagtaaaacggatctccagggctctgcctcccccagcaaagtggagggggtgcacacaccccggcagaagaggagcacgcccctgaaggagcggcagctctccaagcccctaagtgagaggaccaacagttccgacagcgagcgctccccagatctgggccacagcacgcagattccaagaaaggtggtgtatgaccagctcaatcagatcctggtgtcagatgcagccctcccagaaaatgtcattctggtgaacaccactgactggcagggccagtatgtggctgagctgctccaggaccagcggaagcctgtggtgtgcacctgctccaccgtggaggtccaggccgtgctgtccgccctgctcacccggatccagcgctactgcaactgcaactcttccatgccgaggccagtgaaggtggctgctgtgggaggccagagctacctgagctccatcctcaggttctttgtcaagtccctggccaacaagacctccgactggcttggctacatgcgcttcctcatcatccccctcggttctcaccctgtggccaaatacttggggtcagtcgacagtaaatacagtagttccttcctggattctggttggagagatctgttcagtcgctcggagccaccagtgtcagagcaactggacgtggcagggcgggtgatgcagtacgtcaacggggcagccacgacacaccagcttcccgtggccgaagccatgctgacttgccggcataagttccctgatgaagactcctatcagaagtttattcccttcattggcgtggtgaaggtgggtctggttgaagactctccctccacagcaggcgatggggacgattctcctgtggtcagccttactgtgccctccacatcaccaccctccagctcgggcctgagccgagacgccacggccacccctccctcctccccatctatgagcagcgccctggccatcgtggggagccctaatagcccatatggggacgtgattggcctccaggtggactactggctgggccaccccggggagcggaggagggaaggcgacaagagggacgccagctcgaagaacaccctcaagagtgtcttccgctcagtgcaggtgtcccgcctgccccatagtggggaggcccagctttctggcaccatggccatgactgtggtcaccaaagaaaagaacaagaaagttcccaccatcttcctgagcaagaaaccccgagaaaaggaggtggattctaagagccaggtcattgaaggcatcagccgcctcatctgctcagccaagcagcagcagactatgctgagagtgtccatcgatggggtcgagtggagtgacatcaagttcttccagctggcagcccagtggcccacccatgtcaagcactttccagtgggactcttcagtggcagcaaggccacctgaggccctgtctcccagccactttccctcctggcactgccaccagcctcaccgcctgcgggcagggggaggccagcaggcccgggcccagcaccccttccctggcaccagggtctgcctctcactcgcccaggtcccgaaggacactgccacagggacgccttccctcccctcccctccagcccacccctgcacagcccctcctccttcccgcttttccccttctccctcctgctccaggcccaaggcgtgttggttttgccttctggtgcccatagtcccctggactgagtcccccaggccttccttcacccgacttccaaactcttccttgtggtatcagtttccttctcggaaatgagaaagctggaatcctggtccccagcaggagagcctagtcctcccccagcccctccagccaccagggtgtcctctaggatgcagctgccagatccactcactctgctgcctccagcaggacccaaggccactttcaactcttatggggttctccacctgccccagagcttctcaagggagggtaagggggcaccctgagcccacaggacccctacttcacagctcacaggggcaggaggcagctcccctgcctccaggaccctgttgctatggtgacacagcgtttctaggacagaggggcctcccagtctccccccaccacccgtgcacgacttcctcaccacccccaggttccctgcagatgtcgtgtgtgtcctgagtgtttctttggttctttgcacgccaagtctcttggttgtaccatgtgacacaccctgtgcactggtcgctgtcttcgtggcttccacccttgttaatgatgctcctgcctctgcctcccagcccctcacccagcacagctctgcctggacttggagagatgggaggcagacccccaccaccatacatgctgtctgtggcccctcagacattctgtttcatctcccattcatctccctcctcccaccgtgtcagtttttctgcctttccctgctctgttctccttcccagaagtttttgcacagaacttcattttgaaagtgtttttctcattctccatacctcccccaagctctcctccagcccttcccagggctcagccctgctgtcctgagcgtctcctgggccagagagaggagatgggggtgggagggactgagttgatgttgggtttttcattcaataaattggtgatttcttaccgac

SEQ ID NO: 330679 - DNA, 3263 bp, Homo sapiens
  misc_feature (3074)..(3074): n is a, c, g, or t
  misc_feature (3210)..(3210): n is a, c, g, or t
cgccgccgccgccgcgggggaagcctgggagccagatcggcgtcgcctcggcctccgtaacccccgcctagccgggccatggcggaacgcggaggggcgggcggtggtcccggaggcgccgggggcggcagcggccagcggggatccggggtcgcccagtcccctcagcagccgccgccgcagcagcagcagcagcagccgccgcagcagccgacgccccccaagctggcccaggccacctcgtcgtcctcgtccacctcggcggcggctgcctcctcctcgtcctcgtctacctccacctccatggccgtggcggtggcctcgggctccgcgcctcccggtggcccggggccaggccgcacccccgccccggtgcagatgaacctgtacgccacctgggaggtggaccggagctcgtccagctgcgtgcctaggctattcagcttgaccctgaagaaactcgtcatgctaaaagaaatggacaaagatcttaactcagtggtcatcgctgtgaagctgcagggttcaaaaagaattcttcgctccaacgagatcgtccttccagctagtggactggtggaaacagagctccaattaaccttctcccttcagtaccctcatttccttaagcgagatgccaacaagctgcagatcatgctgcaaaggagaaaacgttacaagaatcggaccatcttgggctataagaccttggccgtgggactcatcaacatggcagaggtgatgcagcatcctaatgaaggcgcactggtgcttggcctacacagcaacgtgaaggatgtctctgtgcctgtggcagaaataaagatctactccctgtccagccaacccattgaccatgaaggaatcaaatccaagctttctgatcgttctcctgatattgacaattattctgaggaagaggaagagagtttctcatcagaacaggaaggcagtgatgatccattgcatgggcaggacttgttctacgaagacgaagatctccggaaagtgaagaagacccggaggaaactaacctcaacctctgccatcacaaggcaacctaacatcaaacagaagtttgtggccctcctgaagcggtttaaagtttcagatgaggtgggctttgggctggagcatgtgtcccgcgagcagatccgggaagtggaagaggacttggatgaattgtatgacagtctggagatgtacaaccccagcgacagtggccctgagatggaggagacagaaagcatcctcagcacgccaaagcccaagctcaagcctttctttgaggggatgtcgcagtccagctcccagacggagattggcagcctcaacagcaaaggcagcctcggaaaagacaccaccagccctatggaattggctgctctagaaaaaattaaatctacttggattaaaaaccaagatgacagcttgactgaaacagacactctggaaatcactgaccaggacatgtttggagatgccagcacgagtctggttgtgccggagaaagtcaaaactcccatgaagtccagtaaaacggatctccagggctctgcctcccccagcaaagtggagggggtgcacacaccccggcagaagaggagcacgcccctgaaggagcggcagctctccaagcccctaagtgagaggaccaacagttccgacagcgagcgctccccagatctgggccacagcacgcagattccaagaaaggtggtgtatgaccagctcaatcagatcctggtgtcagatgcagccctcccagaaaatgtcattctggtgaacaccactgactggcagggccagtatgtggctgagctgctccaggaccagcggaagcctgtggtgtgcacctgctccaccgtggaggtccaggccgtgctgtccgccctgctcacccggatccagcgctactgcaactgcaactcttccatgccgaggccagtgaaggtggctgctgtgggaggccagagctacctgagctccatcctcaggttctttgtcaagtccctggccaacaagacctccgactggcttggctacatgcgcttcctcatcatccccctcggttctcaccctgtggccaaatacttggggtcagtcgacagtaaatacagtagttccttcctggattctggttggagagatctgttcagtcgctcggagccaccagtgtcagagcaactggacgtggcagggcgggtgatgcagtacgtcaacggggcagccacgacacaccagcttcccgtggccgaagccatgctgacttgccggcataagttccctgatgaagactcctatcagaagtttattcccttcattggcgtggtgaaggtgggtctggttgaagactctccctccacagcaggcgatggggacgattctcctgtggtcagccttactgtgccctccacatcaccaccctccagctcgggcctgagccgagacgccacggccacccctccctcctccccatctatgagcagcgccctggccatcgtggggagccctaatagcccatatggggacgtgattggcctccaggtggactactggctgggccaccccggggagcggaggagggaaggcgacaagagggacgccagctcgaagaacaccctcaagagtgtcttccgctcagtgcaggtgtcccgcctgccccatagtggggaggcccagctttctggcaccatggccatgactgtggtcaccaaagaaaagaacaagaaagttcccaccatcttcctgagcaagaaaccccgagaaaaggaggtggattctaagagccaggtcattgaaggcatcagccgcctcatctgctcagccaagcagcagcagactatgctgagagtgtccatcgatggggtcgagtggagtgacatcaagttcttccagctggcagcccagtggcccacccatgtcaagcactttccagtgggactcttcagtggcagcaaggccacctgaggccctgtctcccagccactttccctcctggcactgccaccagcctcaccgagtggcgcgatctcggctcactgcagcctctgcctcccgggttcaagcaattntcctgcctcagcctcctgagtagctgggactatagccgcgtgccgccatgcccagctaatttttgtatttttagtagagacaggatttaactatgttggccaggctggtcttgatttcctgacctcgtgatccgtnctcctcaggcttccaaaaatgctgggattataggcatgagccaccacaaccgg

SEQ ID NO: 330680 - DNA, 2437 bp, Homo sapiens
cgccgccgccgccgcgggggaagcctgggagccagatcggcgtcgcctcggcctccgtaacccccgcctagccgggccatggcggaacgcggaggggcgggcggtggtcccggaggcgccgggggcggcagcggccagcggggatccggggtcgcccagtcccctcagcagccgccgccgcagcagcagcagcagcagccgccgcagcagccgacgccccccaagctggcccaggccacctcgtcgtcctcgtccacctcggcggcggctgcctcctcctcgtcctcgtctacctccacctccatggccgtggcggtggcctcgggctccgcgcctcccggtggcccggggccaggccgcacccccgccccggtgcagatgaacctgtacgccacctgggaggtggaccggagctcgtccagctgcgtgcctaggctattcagcttgaccctgaagaaactcgtcatgctaaaagaaatggacaaagatcttaactcagtggtcatcgctgtgaagctgcagggttcaaaaagaattcttcgctccaacgagatcgtccttccagctagtggactggtggaaacagagctccaattaaccttctcccttcagtaccctcatttccttaagcgagatgccaacaagctgcagatcatgctgcaaaggagaaaacgttacaagaatcggaccatcttgggctataagaccttggccgtgggactcatcaacatggcagaggtgatgcagcatcctaatgaaggcgcactggtgcttggcctacacagcaacgtgaaggatgtctctgtgcctgtggcagaaataaagatctactccctgtccagccaacccattgaccatgaaggaatcaaatccaagctttctgatcgttctcctgatattgacaattattctgaggaagaggaagagagtttctcatcagaacaggaaggcagtgatgatccattgcatgggcaggacttgttctacgaagacgaagatctccggaaagtgaagaagacccggaggaaactaacctcaacctctgccatcacaaggcaacctaacatcaaacagaagtttgtggccctcctgaagcggtttaaagtttcagatgaggtgggctttgggctggagcatgtgtcccgcgagcagatccgggaagtggaagaggacttggatgaattgtatgacagtctggagatgtacaaccccagcgacagtggccctgagatggaggagacagaaagcatcctcagcacgccaaagcccaagctcaagcctttctttgaggggatgtcgcagtccagctcccagacggagattggcagcctcaacagcaaaggcagcctcggaaaagacaccaccagccctatggaattggctgctctagaaaaaattaaatctacttggattaaaaaccaagatgacagcttgactgaaacagacactctggaaatcactgaccaggacatgtttggagatgccagcacgagtctggttgtgccggagaaagtcaaaactcccatgaagtccagtaaaacggatctccagggctctgcctcccccagcaaagtggagggggtgcacacaccccggcagaagaggagcacgcccctgaaggagcggcagctctccaagcccctaagtgagaggaccaacagttccgacagcgagcgctccccagatctgggccacagcacgcagattccaagaaaggtggtgtatgaccagctcaatcagatcctggtgtcagatgcagccctcccagaaaatgtcattctggtgaacaccactgactggcagggccagtatgtggctgagctgctccaggaccagcggaagcctgtggtgtgcacctgctccaccgtggaggtccaggccgtgctgtccgccctgctcacccggatccagcgctactgcaactgcaactcttccatgccgaggccagtgaaggtggctgctgtgggaggccagagctacctgagctccatcctcaggttctttgtcaagtccctggccaacaagacctccgactggcttggctacatgcgcttcctcatcatccccctcggttctcaccctgtggccaaatacttggggtcagtcgacagtaaatacagtagttccttcctggattctggttggagagatctgttcagtcgctcggagccaccagtgtcagagcaactggacgtggcagggcgggtgatgcagtacgtcaacggggcagccacgacacttcagaatgaccgggccctgacacacgtgaacgcgtgccagatagagttccacggaagtagactcatatcagaaggttaatacattgagaggcgtgatgaaggtgggtcgcgttgaagactctccctgcacagcaggcgagttgatacgagttgtcacgtgatcagccgatacatcgatgcagatatagtatcacaca

SEQ ID NO: 330681 - DNA, 1767 bp, Homo sapiens
cgccgccgccgccgcgggggaagcctgggagccagatcggcgtcgcctcggcctccgtaacccccgcctagccgggccatggcggaacgcggaggggcgggcggtggtcccggaggcgccgggggcggcagcggccagcggggatccggggtcgcccagtcccctcagcagccgccgccgcagcagcagcagcagcagccgccgcagcagccgacgccccccaagctggcccaggccacctcgtcgtcctcgtccacctcggcggcggctgcctcctcctcgtcctcgtctacctccacctccatggccgtggcggtggcctcgggctccgcgcctcccggtggcccggggccaggccgcacccccgccccggtgcagatgaacctgtacgccacctgggaggtggaccggagctcgtccagctgcgtgcctaggctattcagcttgaccctgaagaaactcgtcatgctaaaagaaatggacaaagatcttaactcagtggtcatcgctgtgaagctgcagggttcaaaaagaattcttcgctccaacgagatcgtccttccagctagtggactggtggaaacagagctccaattaaccttctcccttcagtaccctcatttccttaagcgagatgccaacaagctgcagatcatgctgcaaaggagaaaacgttacaagaatcggaccatcttgggctataagaccttggccgtgggactcatcaacatggcagaggtgatgcagcatcctaatgaaggcgcactggtgcttggcctacacagcaacgtgaaggatgtctctgtgcctgtggcagaaataaagatctactccctgtccagccaacccattgaccatgaaggaatcaaatccaagctttctgatcgttctcctgatattgacaattattctgaggaagaggaagagagtttctcatcagaacaggaaggcagtgatgatccattgcatgggcaggacttgttctacgaagacgaagatctccggaaagtgaagaagacccggaggaaactaacctcaacctctgccatcacaaggcaacctaacatcaaacagaagtttgtggccctcctgaagcggtttaaagtttcagatgaggtgggctttgggctggagcatgtgtcccgcgagcagatccgggaagtggaagaggacttggatgaattgtatgacagtctggagatgtacaaccccagcgacagtggccctgagatggaggagacagaaagcatcctcagcacgccaaagcccaagctcaagcctttctttgaggggatgtcgcagtccagctcccagacggagattggcagcctcaacagcaaaggcagcctcggaaaagacaccaccagccctgtgagcgcaaccgcgactgcggggcggggtgggaccgtggcatgtcagggctcgacgctctggccctctgcatctctgatcagggctcatgttgtgaccttagaaaagtggccccattggctgggcatggtggatcacaactgtaatcctggcactttgggaggtggagtcgggcagatcatgaggtcaagagattgagagcatcctggccaacatggtgacaccccatctctactaaaaatacaaaaattacctgggcgtgatggtgtgcacctgtagtcccagctactcaggaggatgaggcaggagaatcacttgaagccgggaggcggaggttgcagtgagccaagattgagccactgcactccagcctggcgacagagcgagattccctca

SEQ ID NO: 330682 - DNA, 1921 bp, Homo sapiens
agacgtggtattgagtggcatgtgaaggcttgcaggagaggcagcgcttggcatccttgccctacaggtatagccccagaggagtggatggccatccagagcttgctgtcactggcctcagtcttgggttccccaagccctgtgcccagacgacctcacatagagaggcttggggacccagctgtgtggccctgcgcaaactctctgagcctagaaaatgaaaatcatacctgccttctaaatgaggtgatagcggggctggtgagaggaaaggccaggagaagcaaatcatacctagtgtgacctggatctagggtgtgagtgtggctgcagagcagggtgaagtgcccacgaggacttcccggagcacagccaggcgagggctgcagggcaggagctgtgcagagctgggggccagggagttccagtggagggggtgggacaagtagacttggatcccagcttctggcccccttaggttctggcttagagctaggagagagggtgaagggtgaactctcagcccgtctgcatctgacaccatatcctcagcctccccttctgtggcaataaatgccccaccctgctcccatcctcggggcccatccctcttcactccttgagggcttttctcctacagtcgccctctctcctgcactgcgggttctcccctctgccaggactttccacccacttacatgcatcccaagtgggtatagctcaatatcaaagaccagagacttccagattctcttcagctgccatgccttgtctctgctccccttagagcaaaactcttccaaagagctgtgtgtgttccccgtctccacttctgcccactcccttccagttttttcctcacaatcccaccaaaagtttcctttccacagttgccagtgacctgggttgcccagtcctatcagtagcattggatgcaaataatcacccgcttgagtctttccacctggcctgtggacagctctgtgctctcctctcacctccctggcctctcctttttggcctcccttgctatggtgtcctcagcttcccagcctcaaaaccctggaggactcggggctccagcctctaatatagcctcctctctccccacactcagccctaaagggagctcactcggccccatggtgtgaaatgtgctcccctggggagacttccctcctagtaaatgcaaactcggttcttcagttccgaggccgaaaactggggaatcctcctcgattcctgtttctcttgtacccaccatctaatccatgagcaaatcctccaggcttatcctgacagtgccttgccccttcctctactgcgattatctcttgtctggatattgcaataggctcctaattatccctgctcccaccctcttctccctgtagcctgttctccactcaatagccagagatttttcagagctgagcagatcgtgttggattgctgatccaaactgtgcagagtgtcccacctacctaggtgtgtaagctgaagccttacctgtgaggggcccacatggtctgatctcccaggagctgctggatcttaattcctcttacgcttcccctcctcactggcctctcaacattcctcaaacaccactcagcctcagggcctttgcacggacctttggtcctgtccatcctgctgctgccctcaggcccgtgtggcttgctccatcattcaggtcttggctgaaatgtcacctcaggaggccttcccttctccaacccctcttttttttttttcttactcatatttcccactccttggcattaattattcatttgtctctcccacaagaatgcaagctccaagaaaagaggaaatgtttttccctgttgtatccttggcacccaaaatactgcttggcccatcacaggtgcacaataaatactcgtttgcagaatga

SEQ ID NO: 330683 - DNA, 358 bp, Homo sapiens
ggttagaggaatcttgagtcttccttgctttctcacattttccttctccacatgctatattccttcataggaacccaaaaggatatgagtggtttttaccaccacctccccagcactccttccttgcccaaggcctcccacccataggagcctgagttcatcagtttcctttcctgcccttcagtataaagcagcccatcctcatagctggaactcagacgtgggaagcagggagcgtagcttgcatgatcaggtcatttgccctcattttgtgagctccacatgcacagcaagtcccagaccttccccatgccaccccaggatgtgatgggcagaggcagcccagcatcctggactc

SEQ ID NO: 330684 - DNA, 4434 bp, Homo sapiens
cgccgccgccgccgcgggggaagcctgggagccagatcggcgtcgcctcggcctccgtaacccccgcctagccgggccatggcggaacgcggaggggcgggcggtggtcccggaggcgccgggggcggcagcggccagcggggatccggggtcgcccagtcccctcagcagccgccgccgcagcagcagcagcagcagccgccgcagcagccgacgccccccaagctggcccaggccacctcgtcgtcctcgtccacctcggcggcggctgcctcctcctcgtcctcgtctacctccacctccatggccgtggcggtggcctcgggctccgcgcctcccggtggcccggggccaggccgcacccccgccccggtgcagatgaacctgtacgccacctgggaggtggaccggagctcgtccagctgcgtgcctaggctattcagcttgaccctgaagaaactcgtcatgctaaaagaaatggacaaagatcttaactcagtggtcatcgctgtgaagctgcagggttcaaaaagaattcttcgctccaacgagatcgtccttccagctagtggactggtggaaacagagctccaattaaccttctcccttcagtaccctcatttccttaagcgagatgccaacaagctgcagatcatgctgcaaaggagaaaacgttacaagaatcggaccatcttgggctataagaccttggccgtgggactcatcaacatggcagaggtgatgcagcatcctaatgaaggcgcactggtgcttggcctacacagcaacgtgaaggatgtctctgtgcctgtggcagaaataaagatctactccctgtccagccaacccattgaccatgaaggaatcaaatccaagctttctgatcgttctcctgatattgacaattattctgaggaagaggaagagagtttctcatcagaacaggaaggcagtgatgatccattgcatgggcaggacttgttctacgaagacgaagatctccggaaagtgaagaagacccggaggaaactaacctcaacctctgccatcacaaggcaacctaacatcaaacagaagtttgtggccctcctgaagcggtttaaagtttcagatgaggtgggctttgggctggagcatgtgtcccgcgagcagatccgggaagtggaagaggacttggatgaattgtatgacagtctggagatgtacaaccccagcgacagtggccctgagatggaggagacagaaagcatcctcagcacgccaaagcccaagctcaagcctttctttgaggggatgtcgcagtccagctcccagacggagattggcagcctcaacagcaaaggcagcctcggaaaagacaccaccagccctatggaattggctgctctagaaaaaattaaatctacttggattaaaaaccaagatgacagcttgactgaaacagacactctggaaatcactgaccaggacatgtttggagatgccagcacgagtctggttgtgccggagaaagtcaaaactcccatgaagtccagtaaaacggatctccagggctctgcctcccccagcaaagtggagggggtgcacacaccccggcagaagaggagcacgcccctgaaggagcggcagctctccaagcccctaagtgagaggaccaacagttccgacagcgagcgctccccagatctgggccacagcacgcagattccaagaaaggtggtgtatgaccagctcaatcagatcctggtgtcagatgcagccctcccagaaaatgtcattctggtgaacaccactgactggcagggccagtatgtggctgagctgctccaggaccagcggaagcctgtggtgtgcacctgctccaccgtggaggtccaggccgtgctgtccgccctgctcacccggatccagcgctactgcaactgcaactcttccatgccgaggccagtgaaggtggctgctgtgggaggccagagctacctgagctccatcctcaggttctttgtcaagtccctggccaacaagacctccgactggcttggctacatgcgcttcctcatcatccccctcggttctcaccctgtggccaaatacttggggtcagtcgacagtaaatacagtagttccttcctggattctggttggagagatctgttcagtcgctcggagccaccagtgtcagagcaactggacgtggcagggcgggtgatgcagtacgtcaacggggcagccacgacacaccagcttcccgtggccgaagccatgctgacttgccggcataagttccctgatgaagactcctatcagaagtttattcccttcattggcgtggtgaaggtgggtctggttgaagactctccctccacagcaggcgatggggacgattctcctgtggtcagccttactgtgccctccacatcaccaccctccagctcgggcctgagccgagacgccacggccacccctccctcctccccatctatgagcagcgccctggccatcgtggggagccctaatagcccatatggggacgtgattggcctccaggtggactactggctgggccaccccggggagcggaggagggaaggcgacaagagggacgccagctcgaagaacaccctcaagagtgtcttccgctcagtgcaggtgtcccgcctgccccatagtggggaggcccagctttctggcaccatggccatgactgtggtcaccaaagaaaagaacaagaaagttcccaccatcttcctgagcaagaaaccccgagaaaaggaggtggattctaagagccaggtcattgaaggcatcagccgcctcatctgctcagccaagcagcagcagactatgctgagagtgtccatcgatggggtcgagtggagtgacatcaagttcttccagctggcagcccagtggcccacccatgtcaagcactttccagtgggactcttcagtggcagcaaggccacctgaggccctgtctcccagccactttccctcctggcactgccaccagcctcaccgcctgcgggcagggggaggccagcaggcccgggcccagcaccccttccctggcaccagggtctgcctctcactcgcccaggtcccgaaggacactgccacagggacgccttccctcccctcccctccagcccacccctgcacagcccctcctccttcccgcttttccccttctccctcctgctccaggcccaaggcgtgttggttttgccttctggtgcccatagtcccctggactgagtcccccaggccttccttcacccgacttccaaactcttccttgtggtatcagtttccttctcggaaatgagaaagctggaatcctggtccccagcaggagagcctagtcctcccccagcccctccagccaccagggtgtcctctaggatgcagctgccagatccactcactctgctgcctccagcaggacccaaggccactttcaactcttatggggttctccacctgccccagagcttctcaagggagggtaagggggcaccctgagcccacaggacccctacttcacagctcacaggggcaggaggcagctcccctgcctccaggaccctgttgctatggtgacacagcgtttctaggacagaggggcctcccagtctccccccaccacccgtgcacgacttcctcaccacccccaggttccctgcagatgtcgtgtgtgtcctgagtgtttctttggttctttgcacgccaagtctcttggttgtaccatgtgacacaccctgtgcactggtcgctgtcttcgtggcttccacccttgttaatgatgctcctgcctctgcctcccagcccctcacccagcacagctctgcctggacttggagagatgggaggcagacccccaccaccatacatgctgtctgtggcccctcagacattctgtttcatctcccattcatctccctcctcccaccgtgtcagtttttctgcctttccctgctctgttcttccccctccttaggccccagcctgggcccagacccatcctcccagccaggtttccctccagcaggctccttccctccctgtcacctccctctcaccaacccggggtctgagcccctcattcctgaccgtccgtgttctcaggagtggttgaggacacagggccccagcccagccctctgcaccccccagcccggccatctgcgccccacagcccctttggagcttttctcttgtcctctcactccttcccagaagtttttgcacagaacttcattttgaaagtgtttttctcattctccatacctcccccaagctctcctccagcccttcccagggctcagccctgctgtcctgagcgtctcctgggccagagagaggagatgggggtgggagggactgagttgatgttgggtttttcattcaataaattggtgatttcttaccgac

SEQ ID NO: 330685 - DNA, 4471 bp, Homo sapiens
cgccgccgccgccgcgggggaagcctgggagccagatcggcgtcgcctcggcctccgtaacccccgcctagccgggccatggcggaacgcggaggggcgggcggtggtcccggaggcgccgggggcggcagcggccagcggggatccggggtcgcccagtcccctcagcagccgccgccgcagcagcagcagcagcagccgccgcagcagccgacgccccccaagctggcccaggccacctcgtcgtcctcgtccacctcggcggcggctgcctcctcctcgtcctcgtctacctccacctccatggccgtggcggtggcctcgggctccgcgcctcccggtggcccggggccaggccgcacccccgccccggtgcagatgaacctgtacgccacctgggaggtggaccggagctcgtccagctgcgtgcctaggctattcagcttgaccctgaagaaactcgtcatgctaaaagaaatggacaaagatcttaactcagtggtcatcgctgtgaagctgcagggttcaaaaagaattcttcgctccaacgagatcgtccttccagctagtggactggtggaaacagagctccaattaaccttctcccttcagtaccctcatttccttaagcgagatgccaacaagctgcagatcatgctgcaaaggagaaaacgttacaagaatcggaccatcttgggctataagaccttggccgtgggactcatcaacatggcagaggtgatgcagcatcctaatgaaggcgcactggtgcttggcctacacagcaacgtgaaggatgtctctgtgcctgtggcagaaataaagatctactccctgtccagccaacccattgaccatgaaggaatcaaatccaagctttctgatcgttctcctgatattgacaattattctgaggaagaggaagagagtttctcatcagaacaggaaggcagtgatgatccattgcatgggcaggacttgttctacgaagacgaagatctccggaaagtgaagaagacccggaggaaactaacctcaacctctgccatcacaaggcaacctaacatcaaacagaagtttgtggccctcctgaagcggtttaaagtttcagatgaggtgggctttgggctggagcatgtgtcccgcgagcagatccgggaagtggaagaggacttggatgaattgtatgacagtctggagatgtacaaccccagcgacagtggccctgagatggaggagacagaaagcatcctcagcacgccaaagcccaagctcaagcctttctttgaggggatgtcgcagtccagctcccagacggagattggcagcctcaacagcaaaggcagcctcggaaaagacaccaccagccctatggaattggctgctctagaaaaaattaaatctacttggattaaaaaccaagatgacagcttgactgaaacagacactctggaaatcactgaccaggacatgtttggagatgccagcacgagtctggttgtgccggagaaagtcaaaactcccatgaagtccagtaaaacggatctccagggctctgcctcccccagcaaagtggagggggtgcacacaccccggcagaagaggagcacgcccctgaaggagcggcagctctccaagcccctaagtgagaggaccaacagttccgacagcgagcgctccccagatctgggccacagcacgcagattccaagaaaggtggtgtatgaccagctcaatcagatcctggtgtcagatgcagccctcccagaaaatgtcattctggtgaacaccactgactggcagggccagtatgtggctgagctgctccaggaccagcggaagcctgtggtgtgcacctgctccaccgtggaggtccaggccgtgctgtccgccctgctcacccggatccagcgctactgcaactgcaactcttccatgccgaggccagtgaaggtggctgctgtgggaggccagagctacctgagctccatcctcaggttctttgtcaagtccctggccaacaagacctccgactggcttggctacatgcgcttcctcatcatccccctcggttctcaccctgtggccaaatacttggggtcagtcgacagtaaatacagtagttccttcctggattctggttggagagatctgttcagtcgctcggagccaccagtgtcagagcaactggacgtggcagggcgggtgatgcagtacgtcaacggggcagccacgacacaccagcttcccgtggccgaagccatgctgacttgccggcataagttccctgatgaagactcctatcagaagtttattcccttcattggcgtggtgaaggtgggtctggttgaagactctccctccacagcaggcgatggggacgattctcctgtggtcagccttactgtgccctccacatcaccaccctccagctcgggcctgagccgagacgccacggccacccctccctcctccccatctatgagcagcgccctggccatcgtggggagccctaatagcccatatggggacgtgattggcctccaggtggactactggctgggccaccccggggagcggaggagggaaggcgacaagagggacgccagctcgaagaacaccctcaagagtgtcttccgctcagtgcaggtgtcccgcctgccccatagtggggaggcccagctttctggcaccatggccatgactgtggtcaccaaagaaaagaacaagaaagttcccaccatcttcctgagcaagaaaccccgagaaaaggaggtggattctaagagccaggtcattgaaggcatcagccgcctcatctgctcagccaagcagcagcagactatgctgagagtgtccatcgatggggtcgagtggagtgacatcaagttcttccagctggcagcccagtggcccacccatgtcaagcactttccagtgggactcttcagtggcagcaaggccacctgaggccctgtctcccagccactttccctcctggcactgccaccagcctcaccgcctgcgggcagggggaggccagcaggcccgggcccagcaccccttccctggcaccagggtctgcctctcactcgcccaggtcccgaaggacactgccacagggacgccttccctcccctcccctccagcccacccctgcacagcccctcctccttcccgcttttccccttctccctcctgctccaggcccaaggcgtgttggttttgccttctggtgcccatagtcccctggactgagtcccccaggccttccttcacccgacttccaaactcttccttgtggtatcagtttccttctcggaaatgagaaagctggaatcctggtccccagcaggagagcctagtcctcccccagcccctccagccaccagggtgtcctctaggatgcagctgccagatccactcactctgctgcctccagcaggacccaaggccactttcaactcttatggggttctccacctgccccagagcttctcaagggagggtaagggggcaccctgagcccacaggacccctacttcacagctcacaggggcaggaggcagctcccctgcctccaggaccctgttgctatggtgacacagcgtttctaggacagaggggcctcccagtctccccccaccacccgtgcacgacttcctcaccacccccaggttccctgcagatgtcgtgtgtgtcctgagtgtttctttggttctttgcacgccaagtctcttggttgtaccatgtgacacaccctgtgcactggtcgctgtcttcgtggcttccacccttgttaatgatgctcctgcctctgcctcccagcccctcacccagcacagctctgcctggacttggagagatgggaggcagacccccaccaccatacatgctgtctgtggcccctcagacattctgtttcatctcccattcatctccctcctcccaccgtgtcagtttttctgcctttccctgctctgttcttccccctccttaggccccagcctgggcccagacccatcctcccagccaggtttccctccagcaggctccttccctccctgtcacctccctctcaccaacccggggtctgagcccctcattcctgaccgtccgtgttctcaggagtggttgaggacacagggccccagcccagccctctgcaccccccagcccggccatctgcgccccacagcccctttggagcttttctcttgtcctctcactccttcccagaagtttttgcacagaacttcattttgaaagtgtttttctcattctccatacctcccccaagctctcctccagcccttcccagggctcagccctgctgtcctgagcgtctcctgggccagagagaggagatgggggtgggagggactgagttgatgttgggtttttcattcaataaattggtgatttcttaccgacaccaataaaaaagaataactcaagactagttctctcc

SEQ ID NO: 330686 - DNA, 6489 bp, Homo sapiens
cgccgccgccgccgcgggggaagcctgggagccagatcggcgtcgcctcggcctccgtaacccccgcctagccgggccatggcggaacgcggaggggcgggcggtggtcccggaggcgccgggggcggcagcggccagcggggatccggggtcgcccagtcccctcagcagccgccgccgcagcagcagcagcagcagccgccgcagcagccgacgccccccaagctggcccaggccacctcgtcgtcctcgtccacctcggcggcggctgcctcctcctcgtcctcgtctacctccacctccatggccgtggcggtggcctcgggctccgcgcctcccggtggcccggggccaggccgcacccccgccccggtgcagatgaacctgtacgccacctgggaggtggaccggagctcgtccagctgcgtgcctaggctattcagcttgaccctgaagaaactcgtcatgctaaaagaaatggacaaagatcttaactcagtggtcatcgctgtgaagctgcagggttcaaaaagaattcttcgctccaacgagatcgtccttccagctagtggactggtggaaacagagctccaattaaccttctcccttcagtaccctcatttccttaagcgagatgccaacaagctgcagatcatgctgcaaaggagaaaacgttacaagaatcggaccatcttgggctataagaccttggccgtgggactcatcaacatggcagaggtgatgcagcatcctaatgaaggcgcactggtgcttggcctacacagcaacgtgaaggatgtctctgtgcctgtggcagaaataaagatctactccctgtccagccaacccattgaccatgaaggaatcaaatccaagctttctgatcgttctcctgatattgacaattattctgaggaagaggaagagagtttctcatcagaacaggaaggcagtgatgatccattgcatgggcaggacttgttctacgaagacgaagatctccggaaagtgaagaagacccggaggaaactaacctcaacctctgccatcacaaggcaacctaacatcaaacagaagtttgtggccctcctgaagcggtttaaagtttcagatgaggtgggctttgggctggagcatgtgtcccgcgagcagatccgggaagtggaagaggacttggatgaattgtatgacagtctggagatgtacaaccccagcgacagtggccctgagatggaggagacagaaagcatcctcagcacgccaaagcccaagctcaagcctttctttgaggggatgtcgcagtccagctcccagacggagattggcagcctcaacagcaaaggcagcctcggaaaagacaccaccagccctatggaattggctgctctagaaaaaattaaatctacttggattaaaaaccaagatgacagcttgactgaaacagacactctggaaatcactgaccaggacatgtttggagatgccagcacgagtctggttgtgccggagaaagtcaaaactcccatgaagtccagtaaaacggatctccagggctctgcctcccccagcaaagtggagggggtgcacacaccccggcagaagaggagcacgcccctgaaggagcggcagctctccaagcccctaagtgagaggaccaacagttccgacagcgagcgctccccagatctgggccacagcacgcagattccaagaaaggtggtgtatgaccagctcaatcagatcctggtgtcagatgcagccctcccagaaaatgtcattctggtgaacaccactgactggcagggccagtatgtggctgagctgctccaggaccagcggaagcctgtggtgtgcacctgctccaccgtggaggtccaggccgtgctgtccgccctgctcacccggatccagcgctactgcaactgcaactcttccatgccgaggccagtgaaggtggctgctgtgggaggccagagctacctgagctccatcctcaggttctttgtcaagtccctggccaacaagacctccgactggcttggctacatgcgcttcctcatcatccccctcggttctcaccctgtggccaaatacttggggtcagtcgacagtaaatacagtagttccttcctggattctggttggagagatctgttcagtcgctcggagccaccagtgtcagagcaactggacgtggcagggcgggtgatgcagtacgtcaacggggcagccacgacacaccagcttcccgtggccgaagccatgctgacttgccggcataagttccctgatgaagactcctatcagaagtttattcccttcattggcgtggtgaaggtgggtctggttgaagactctccctccacagcaggcgatggggacgattctcctgtggtcagccttactgtgccctccacatcaccaccctccagctcgggcctgagccgagacgccacggccacccctccctcctccccatctatgagcagcgccctggccatcgtggggagccctaatagcccatatggggacgtgattggcctccaggtggactactggctgggccaccccggggagcggaggagggaaggcgacaagagggacgccagctcgaagaacaccctcaagagtgtcttccgctcagtgcaggtgtcccgcctgccccatagtggggaggcccagctttctggcaccatggccatgactgtggtcaccaaagaaaagaacaagaaagttcccaccatcttcctgagcaagaaaccccgagaaaaggaggtggattctaagagccaggtcattgaaggcatcagccgcctcatctgctcagccaagcagcagcagactatgctgagagtgtccatcgatggggtcgagtggagtgacatcaagttcttccagctggcagcccagtggcccacccatgtcaagcactttccagtgggactcttcagtggcagcaaggccacctgaggccctgtctcccagccactttccctcctggcactgccaccagcctcaccgcctgcgggcagggggaggccagcaggcccgggcccagcaccccttccctggcaccagggtctgcctctcactcgcccaggtcccgaaggacactgccacagggacgccttccctcccctcccctccagcccacccctgcacagcccctcctccttcccgcttttccccttctccctcctgctccaggcccaaggcgtgttggttttgccttctggtgcccatagtcccctggactgagtcccccaggccttccttcacccgacttccaaactcttccttgtggtatcagtttccttctcggaaatgagaaagctggaatcctggtccccagcaggagagcctagtcctcccccagcccctccagccaccagggtgtcctctaggatgcagctgccagatccactcactctgctgcctccagcaggacccaaggccactttcaactcttatggggttctccacctgccccagagcttctcaagggagggtaagggggcaccctgagcccacaggacccctacttcacagctcacaggggcaggaggcagctcccctgcctccaggaccctgttgctatggtgacacagcgtttctaggacagaggggcctcccagtctccccccaccacccgtgcacgacttcctcaccacccccaggttccctgcagatgtcgtgtgtgtcctgagtgtttctttggttctttgcacgccaagtctcttggttgtaccatgtgacacaccctgtgcactggtcgctgtcttcgtggcttccacccttgttaatgatgctcctgcctctgcctcccagcccctcacccagcacagctctgcctggacttggagagatgggaggcagacccccaccaccatacatgctgtctgtggcccctcagacattctgtttcatctcccattcatctccctcctcccaccgtgtcagtttttctgcctttccctgctctgttcttccccctccttaggccccagcctgggcccagacccatcctcccagccaggtttccctccagcaggctccttccctccctgtcacctccctctcaccaacccggggtctgagcccctcattcctgaccgtccgtgttctcaggagtggttgaggacacagggccccagcccagccctctgcaccccccagcccggccatctgcgccccacagcccctttggagcttttctcttgtcctctcactccttcccagaagtttttgcacagaacttcattttgaaagtgtttttctcattctccatacctcccccaagctctcctccagcccttcccagggctcagccctgctgtcctgagcgtctcctgggccagagagaggagatgggggtgggagggactgagttgatgttgggtttttcattcaataaattggtgatttcttaccgactgccttgggcttctatgccccctcactgtgccacaggagctgcccaaccccttttccacagtgcagcccaactccagtgaaaatccaccaggaacgtaggtggaaagaagcgtactcccatgttctcaatcatggaaacaggcatgaaggtgtctcacctggcatgaggcaggcagaggtcggaaacaggaaagatgtcttttccacaccaaaagcccgtttttccccaggacccaccatccccaaatccacctcccaaggcagtgacgtgttgagtgtggcttccccatcttctgatcaaaggtcagaacttagcttctctcccctgctccaggttggtgaagtccgagccagtggggtctttgcctcttctaaatgaggtgatagcggggctggtgagaggaaaggccaggagaagcaaatcatacctagtgtgacctggatctagggtgtgagtgtggctgcagagcagggtgaagtgcccacgaggacttcccggagcacagccaggcgagggctgcagggcaggagctgtgcagagctgggggccagggagttccagtggagggggtgggacaagtagacttggatcccagcttctggcccccttaggttctggcttagagctaggagagagggtgaagggtgaactctcagcccgtctgcatctgacaccatatcctcagcctccccttctgtggcaataaatgccccaccctgctcccatcctcggggcccatccctcttcactccttgagggcttttctcctacagtcgccctctctcctgcactgcgggttctcccctctgccaggactttccacccacttacatgcatcccaagtgggtatagctcaatatcaaagaccagagacttccagattctcttcagctgccatgccttgtctctgctccccttagagcaaaactcttccaaagagctgtgtgtgttccccgtctccacttctgcccactcccttccagttttttcctcacaatcccaccaaaagtttcctttccacagttgccagtgacctgggttgcccagtcctatcagtagcattggatgcaaataatcacccgcttgagtctttccacctggcctgtggacagctctgtgctctcctctcacctccctggcctctcctttttggcctcccttgctatggtgtcctcagcttcccagcctcaaaaccctggaggactcggggctccagcctctaatatagcctcctctctccccacactcagccctaaagggagctcactcggccccatggtgtgaaatgtgctcccctggggagacttccctcctagtaaatgcaaactcggttcttcagttccgaggccgaaaactggggaatcctcctcgattcctgtttctcttgtacccaccatctaatccatgagcaaatcctccaggcttatcctgacagtgccttgccccttcctctactgcgattatctcttgtctggatattgcaataggctcctaattatccctgctcccaccctcttctccctgtagcctgttctccactcaatagccagagatttttcagagctgagcagatcgtgttggattgctgatccaaactgtgcagagtgtcccacctacctaggtgtgtaagctgaagccttacctgtgaggggcccacatggtctgatctcccaggagctgctggatcttaattcctcttacgcttcccctcctcactggcctctcaacattcctcaaacaccactcagcctcagggcctttgcacggacctttggtcctgtccatcctgctgctgccctcaggcccgtgtggcttgctccatcattcaggtcttggctgaaatgtcacctcaggaggccttcccttctccaacccctcttttttttttttcttactcatatttcccactccttggcattaattattcatttgtctctcccacaagaatgcaagctccaagaaaagaggaaatgtttttccctgttgtatccttggcacccaaaatactgcttggcccatcacaggtgcacaataaatactcgtttgcagaatga

SEQ ID NO: 330687 - DNA, 4039 bp, Homo sapiens
cgccgccgccgccgcgggggaagcctgggagccagatcggcgtcgcctcggcctccgtaacccccgcctagccgggccatggcggaacgcggaggggcgggcggtggtcccggaggcgccgggggcggcagcggccagcggggatccggggtcgcccagtcccctcagcagccgccgccgcagcagcagcagcagcagccgccgcagcagccgacgccccccaagctggcccaggccacctcgtcgtcctcgtccacctcggcggcggctgcctcctcctcgtcctcgtctacctccacctccatggccgtggcggtggcctcgggctccgcgcctcccggtggcccggggccaggccgcacccccgccccggtgcagatgaacctgtacgccacctgggaggtggaccggagctcgtccagctgcgtgcctaggctattcagcttgaccctgaagaaactcgtcatgctaaaagaaatggacaaagatcttaactcagtggtcatcgctgtgaagctgcagggttcaaaaagaattcttcgctccaacgagatcgtccttccagctagtggactggtggaaacagagctccaattaaccttctcccttcagtaccctcatttccttaagcgagatgccaacaagctgcagatcatgctgcaaaggagaaaacgttacaagaatcggaccatcttgggctataagaccttggccgtgggactcatcaacatggcagaggtgatgcagcatcctaatgaaggcgcactggtgcttggcctacacagcaacgtgaaggatgtctctgtgcctgtggcagaaataaagatctactccctgtccagccaacccattgaccatgaaggaatcaaatccaagctttctgatcgttctcctgatattgacaattattctgaggaagaggaagagagtttctcatcagaacaggaaggcagtgatgatccattgcatgggcaggacttgttctacgaagacgaagatctccggaaagtgaagaagacccggaggaaactaacctcaacctctgccatcacaaggcaacctaacatcaaacagaagtttgtggccctcctgaagcggtttaaagtttcagatgaggtgggctttgggctggagcatgtgtcccgcgagcagatccgggaagtggaagaggacttggatgaattgtatgacagtctggagatgtacaaccccagcgacagtggccctgagatggaggagacagaaagcatcctcagcacgccaaagcccaagctcaagcctttctttgaggggatgtcgcagtccagctcccagacggagattggcagcctcaacagcaaaggcagcctcggaaaagacaccaccagccctatggaattggctgctctagaaaaaattaaatctacttggattaaaaaccaagatgacagcttgactgaaacagacactctggaaatcactgaccaggacatgtttggagatgccagcacgagtctggttgtgccggagaaagtcaaaactcccatgaagtccagtaaaacggatctccagggctctgcctcccccagcaaagtggagggggtgcacacaccccggcagaagaggagcacgcccctgaaggagcggcagctctccaagcccctaagtgagaggaccaacagttccgacagcgagcgctccccagatctgggccacagcacgcagattccaagaaaggtggtgtatgaccagctcaatcagatcctggtgtcagatgcagccctcccagaaaatgtcattctggtgaacaccactgactggcagggccagtatgtggctgagctgctccaggaccagcggaagcctgtggtgtgcacctgctccaccgtggaggtccaggccgtgctgtccgccctgctcacccggatccagcgctactgcaactgcaactcttccatgccgaggccagtgaaggtggctgctgtgggaggccagagctacctgagctccatcctcaggttctttgtcaagtccctggccaacaagacctccgactggcttggctacatgcgcttcctcatcatccccctcggttctcaccctgtggccaaatacttggggtcagtcgacagtaaatacagtagttccttcctggattctggttggagagatctgttcagtcgctcggagccaccagtgtcagagcaactggacgtggcagggcgggtgatgcagtacgtcaacggggcagccacgacacaccagcttcccgtggccgaagccatgctgacttgccggcataagttccctgatgaagactcctatcagaagtttattcccttcattggcgtggtgaaggtgggtctggttgaagactctccctccacagcaggcgatggggacgattctcctgtggtcagccttactgtgccctccacatcaccaccctccagctcgggcctgagccgagacgccacggccacccctccctcctccccatctatgagcagcgccctggccatcgtggggagccctaatagcccatatggggacgtgattggcctccaggtggactactggctgggccaccccggggagcggaggagggaaggcgacaagagggacgccagctcgaagaacaccctcaagagtgtcttccgctcagtgcaggtgtcccgcctgccccatagtggggaggcccagctttctggcaccatggccatgactgtggtcaccaaagaaaagaacaagaaagttccctcccctcccctccagcccacccctgcacagcccctcctccttcccgcttttccccttctccctcctgctccaggcccaaggcgtgttggttttgccttctggtgcccatagtcccctggactgagtcccccaggccttccttcacccgacttccaaactcttccttgtggtatcagtttccttctcggaaatgagaaagctggaatcctggtccccagcaggagagcctagtcctcccccagcccctccagccaccagggtgtcctctaggatgcagctgccagatccactcactctgctgcctccagcaggacccaaggccactttcaactcttatggggttctccacctgccccagagcttctcaagggagggtaagggggcaccctgagcccacaggacccctacttcacagctcacaggggcaggaggcagctcccctgcctccaggaccctgttgctatggtgacacagcgtttctaggacagaggggcctcccagtctccccccaccacccgtgcacgacttcctcaccacccccaggttccctgcagatgtcgtgtgtgtcctgagtgtttctttggttctttgcacgccaagtctcttggttgtaccatgtgacacaccctgtgcactggtcgctgtcttcgtggcttccacccttgttaatgatgctcctgcctctgcctcccagcccctcacccagcacagctctgcctggacttggagagatgggaggcagacccccaccaccatacatgctgtctgtggcccctcagacattctgtttcatctcccattcatctccctcctcccaccgtgtcagtttttctgcctttccctgctctgttcttccccctccttaggccccagcctgggcccagacccatcctcccagccaggtttccctccagcaggctccttccctccctgtcacctccctctcaccaacccggggtctgagcccctcattcctgaccgtccgtgttctcaggagtggttgaggacacagggccccagcccagccctctgcaccccccagcccggccatctgcgccccacagcccctttggagcttttctcttgtcctctcactccttcccagaagtttttgcacagaacttcattttgaaagtgtttttctcattctccatacctcccccaagctctcctccagcccttcccagggctcagccctgctgtcctgagcgtctcctgggccagagagaggagatgggggtgggagggactgagttgatgttgggtttttcattcaataaattggtgatttcttaccgac

SEQ ID NO: 330688 - DNA, 3799 bp, Homo sapiens
cgccgccgccgccgcgggggaagcctgggagccagatcggcgtcgcctcggcctccgtaacccccgcctagccgggccatggcggaacgcggaggggcgggcggtggtcccggaggcgccgggggcggcagcggccagcggggatccggggtcgcccagtcccctcagcagccgccgccgcagcagcagcagcagcagccgccgcagcagccgacgccccccaagctggcccaggccacctcgtcgtcctcgtccacctcggcggcggctgcctcctcctcgtcctcgtctacctccacctccatggccgtggcggtggcctcgggctccgcgcctcccggtggcccggggccaggccgcacccccgccccggtgcagatgaacctgtacgccacctgggaggtggaccggagctcgtccagctgcgtgcctaggctattcagcttgaccctgaagaaactcgtcatgctaaaagaaatggacaaagatcttaactcagtggtcatcgctgtgaagctgcagggttcaaaaagaattcttcgctccaacgagatcgtccttccagctagtggactggtggaaacagagctccaattaaccttctcccttcagtaccctcatttccttaagcgagatgccaacaagctgcagatcatgctgcaaaggagaaaacgttacaagaatcggaccatcttgggctataagaccttggccgtgggactcatcaacatggcagaggtgatgcagcatcctaatgaaggcgcactggtgcttggcctacacagcaacgtgaaggatgtctctgtgcctgtggcagaaataaagatctactccctgtccagccaacccattgaccatgaaggaatcaaatccaagctttctgatcgttctcctgatattgacaattattctgaggaagaggaagagagtttctcatcagaacaggaaggcagtgatgatccattgcatgggcaggacttgttctacgaagacgaagatctccggaaagtgaagaagacccggaggaaactaacctcaacctctgccatcacaaggcaacctaacatcaaacagaagtttgtggccctcctgaagcggtttaaagtttcagatgaggtgggctttgggctggagcatgtgtcccgcgagcagatccgggaagtggaagaggacttggatgaattgtatgacagtctggagatgtacaaccccagcgacagtggccctgagatggaggagacagaaagcatcctcagcacgccaaagcccaagctcaagcctttctttgaggggatgtcgcagtccagctcccagacggagattggcagcctcaacagcaaaggcagcctcggaaaagacaccaccagccctatggaattggctgctctagaaaaaattaaatctacttggattaaaaaccaagatgacagcttgactgaaacagacactctggaaatcactgaccaggacatgtttggagatgccagcacgagtctggttgtgccggagaaagtcaaaactcccatgaagtccagtaaaacggatctccagggctctgcctcccccagcaaagtggagggggtgcacacaccccggcagaagaggagcacgcccctgaaggagcggcagctctccaagcccctaagtgagaggaccaacagttccgacagcgagcgctccccagatctgggccacagcacgcagattccaagaaaggtggtgtatgaccagctcaatcagatcctggtgtcagatgcagccctcccagaaaatgtcattctggtgaacaccactgactggcagggccagtatgtggctgagctgctccaggaccagcggaagcctgtggtgtgcacctgctccaccgtggaggtccaggccgtgctgtccgccctgctcacccggatccagcgctactgcaactgcaactcttccatgccgaggccagtgaaggtggctgctgtgggaggccagagctacctgagctccatcctcaggttctttgtcaagtccctggccaacaagacctccgactggcttggctacatgcgcttcctcatcatccccctcggttctcaccctgtggccaaatacttggggtcagtcgacagtaaatacagtagttccttcctggattctggttggagagatctgttcagtcgctcggagccaccagtgtcagagcaactggacgtggcagggcgggtgatgcagtacgtcaacggggcagccacgacacaccagcttcccgtggccgaagccatgctgacttgccggcataagttccctgatgaagactcctatcagaagtttattcccttcattggcgtggtgaaggtgggtctggttgaagactctccctccacagcaggcgatggggacgattctcctgtggtcagccttactgtgccctccacatcaccacccccttccctggcaccagggtctgcctctcactcgcccaggtcccgaaggacactgccacagggacgccttccctcccctcccctccagcccacccctgcacagcccctcctccttcccgcttttccccttctccctcctgctccaggcccaaggcgtgttggttttgccttctggtgcccatagtcccctggactgagtcccccaggccttccttcacccgacttccaaactcttccttgtggtatcagtttccttctcggaaatgagaaagctggaatcctggtccccagcaggagagcctagtcctcccccagcccctccagccaccagggtgtcctctaggatgcagctgccagatccactcactctgctgcctccagcaggacccaaggccactttcaactcttatggggttctccacctgccccagagcttctcaagggagggtaagggggcaccctgagcccacaggacccctacttcacagctcacaggggcaggaggcagctcccctgcctccaggaccctgttgctatggtgacacagcgtttctaggacagaggggcctcccagtctccccccaccacccgtgcacgacttcctcaccacccccaggttccctgcagatgtcgtgtgtgtcctgagtgtttctttggttctttgcacgccaagtctcttggttgtaccatgtgacacaccctgtgcactggtcgctgtcttcgtggcttccacccttgttaatgatgctcctgcctctgcctcccagcccctcacccagcacagctctgcctggacttggagagatgggaggcagacccccaccaccatacatgctgtctgtggcccctcagacattctgtttcatctcccattcatctccctcctcccaccgtgtcagtttttctgcctttccctgctctgttcttccccctccttaggccccagcctgggcccagacccatcctcccagccaggtttccctccagcaggctccttccctccctgtcacctccctctcaccaacccggggtctgagcccctcattcctgaccgtccgtgttctcaggagtggttgaggacacagggccccagcccagccctctgcaccccccagcccggccatctgcgccccacagcccctttggagcttttctcttgtcctctcactccttcccagaagtttttgcacagaacttcattttgaaagtgtttttctcattctccatacctcccccaagctctcctccagcccttcccagggctcagccctgctgtcctgagcgtctcctgggccagagagaggagatgggggtgggagggactgagttgatgttgggtttttcattcaataaattggtgatttcttaccgac

SEQ ID NO: 330689 - DNA, 3267 bp, Homo sapiens
cgccgccgccgccgcgggggaagcctgggagccagatcggcgtcgcctcggcctccgtaacccccgcctagccgggccatggcggaacgcggaggggcgggcggtggtcccggaggcgccgggggcggcagcggccagcggggatccggggtcgcccagtcccctcagcagccgccgccgcagcagcagcagcagcagccgccgcagcagccgacgccccccaagctggcccaggccacctcgtcgtcctcgtccacctcggcggcggctgcctcctcctcgtcctcgtctacctccacctccatggccgtggcggtggcctcgggctccgcgcctcccggtggcccggggccaggccgcacccccgccccggtgcagatgaacctgtacgccacctgggaggtggaccggagctcgtccagctgcgtgcctaggctattcagcttgaccctgaagaaactcgtcatgctaaaagaaatggacaaagatcttaactcagtggtcatcgctgtgaagctgcagggttcaaaaagaattcttcgctccaacgagatcgtccttccagctagtggactggtggaaacagagctccaattaaccttctcccttcagtaccctcatttccttaagcgagatgccaacaagctgcagatcatgctgcaaaggagaaaacgttacaagaatcggaccatcttgggctataagaccttggccgtgggactcatcaacatggcagaggtgatgcagcatcctaatgaaggcgcactggtgcttggcctacacagcaacgtgaaggatgtctctgtgcctgtggcagaaataaagatctactccctgtccagccaacccattgaccatgaaggaatcaaatccaagctttctgatcgttctcctgatattgacaattattctgaggaagaggaagagagtttctcatcagaacaggaaggcagtgatgatccattgcatgggcaggacttgttctacgaagacgaagatctccggaaagtgaagaagacccggaggaaactaacctcaacctctgccatcacaaggcaacctaacatcaaacagaagtttgtggccctcctgaagcggtttaaagtttcagatgaggtgggctttgggctggagcatgtgtcccgcgagcagatccgggaagtggaagaggacttggatgaattgtatgacagtctggagatgtacaaccccagcgacagtggccctgagatggaggagacagaaagcatcctcagcacgccaaagcccaagctcaagcctttctttgaggggatgtcgcagtccagctcccagacggagattggcagcctcaacagcaaaggcagcctcggaaaagacaccaccagccctatggaattggctgctctagaaaaaattaaatctacttggattaaaaaccaagatgacagcttgactgaaacagacactctggaaatcactgaccaggacatgtttggagatgccagcacgagtctggttgtgccggagaaagtcaaaactcccatgaagtccagtaaaacggatctccagggctctgcctcccccagcaaagtggagggggtgcacacaccccggcagaagaggagcacgcccctgaaggagcggcagctctccaagcccctaagtgagaggaccaacagttccgacagcgagcgctccccagatctgggccacagcacgcagattccaagaaaggtggtgtatgaccagctcaatcagatcctggtgtcagatgcagccctcccagaaaatgtcattctggtgaacaccactgactggcagggccagtatgtggctgagctgctccaggaccagcggaagcctgtggtgtgcacctgctccaccgtggaggtccaggccgtgctgtccgccctgctcacccggatccagcgctactgcaactgcaactcttccatgccgaggccagtgaaggtggctgctgtgggaggccagagctacctgagctccatcctcaggttctttgtcaagtccctggccaacaagacctccgactggcttggctacatgcgcttcctcatcatccccctcggttctcaccctgtggccaaatacttggggtcagtcgacagtaaatacagtagttccttcctggattctggttggagagatctgttcagtcgctcggagccaccagtgtcagagcaactggacgtggcagggcgggtgatgcagtacgtcaacggggcagccacgacacaccagcttcccgtggccgaagccatgctgacttgccggcataagttccctgatgaagactcctatcagaagtttattcccttcattggcgtggtgaaggtgggtctggttgaagactctccctccacagcaggcgatggggacgattctcctgtggtcagccttactgtgccctccacatcaccaccctccagctcgggcctgagccgagacgccacggccacccctccctcctccccatctatgagcagcgccctggccatcgtggggagccctaatagcccatatggggacgtgattggcctccaggtggactactggctgggccaccccggggagcggaggagggaaggcgacaagagggacgccagctcgaagaacaccctcaagagtgtcttccgctcagtgcaggtgtcccgcctgccccatagtggggaggcccagctttctggcaccatggccatgactgtggtcaccaaagaaaagaacaagaaagttcccaccatcttcctgagcaagaaaccccgagaaaaggaggtggattctaagagccaggtcattgaaggcatcagccgcctcatttccccctccttaggccccagcctgggcccagacccatcctcccagccaggtttccctccagcaggctccttccctccctgtcacctccctctcaccaacccggggtctgagcccctcattcctgaccgtccgtgttctcaggagtggttgaggacacagggccccagcccagccctctgcaccccccagcccggccatctgcgccccacagcccctttggagcttttctcttgtcctctcactccttcccagaagtttttgcacagaacttcattttgaaagtgtttttctcattctccatacctcccccaagctctcctccagcccttcccagggctcagccctgctgtcctgagcgtctcctgggccagagagaggagatgggggtgggagggactgagttgatgttgggtttttcattcaataaattggtgatttcttaccgac

SEQ ID NO: 330690 - DNA, 1684 bp, Homo sapiens
  misc_feature (1)..(1): n is a, c, g, or t
ntatctagaggatccctgggaggcaggacactgtgggagccaggtcattgaaggcatcagccgcctcatctgctcagccaagcagcagcagactatgctgagagtgtccatcgatggggtcgagtggagtgacatcaagttcttccagctggcagcccagtggcccacccatgtcaagcactttccagtgggactcttcagtggcagcaaggccacctgaggccctgtctcccagccactttccctcctggcactgccaccagcctcaccgcctgcgggcagggggaggccagcaggcccgggcccagcaccccttccctggcaccagggtctgcctctcactcgcccaggtcccgaaggacactgccacagggacgccttccctcccctcccctccagcccacccctgcacagcccctcctccttcccgcttttccccttctccctcctgctccaggcccaaggcgtgttggttttgccttctggtgcccatagtcccctggactgagtcccccaggccttccttcacccgacttccaaactcttccttgtggtatcagtttccttctcggaaatgagaaagctggaatcctggtccccagcaggagagcctagtcctcccccagcccctccagccaccagggtgtcctctaggatgcagctgccagatccactcactctgctgcctccagcaggacccaaggccactttcaactcttatggggttctccacctgccccagagcttctcaagggagggtaagggggcaccctgagcccacaggacccctacttcacagctcacaggggcaggaggcagctcccctgcctccaggaccctgttgctatggtgacacagcgtttctaggacagaggggcctcccagtctccccccaccacccgtgcacgacttcctcaccacccccaggttccctgcagatgtcgtgtgtgtcctgagtgtttctttggttctttgcacgccaagtctcttggttgtaccatgtgacacaccctgtgcactggtcgctgtcttcgtggcttccacccttgttaatgatgctcctgcctctgcctcccagcccctcacccagcacagctctgcctggacttggagagatgggaggcagacccccaccaccatacatgctgtctgtggcccctcagacattctgtttcatctcccattcatctccctcctcccaccgtgtcagtttttctgcctttccctgctctgttcttccccctccttaggccccagcctgggcccagacccatcctcccagccaggtttccctccagcaggctccttccctccctgtcacctccctctcaccaacccggggtctgagcccctcattcctgaccgtccgtgttctcaggagtggttgaggacacagggccccagcccagccctctgcaccccccagcccggccatctgcgccccacagcccctttggagcttttctcttgtcctctcactccttcccagaagtttttgcacagaacttcattttgaaagtgtttttctcattctccatacctcccccaagctctcctccagcccttcccagggctcagccctgctgtcctgagcgtctcctgggccagagagaggagatgggggtgggagggactgagttgatgttgggtttttcattcaataaattggtgatttcttaccgac

SEQ ID NO: 330691 - DNA, 3998 bp, Homo sapiens
cgccgccgccgccgcgggggaagcctgggagccagatcggcgtcgcctcggcctccgtaacccccgcctagccgggccatggcggaacgcggaggggcgggcggtggtcccggaggcgccgggggcggcagcggccagcggggatccggggtcgcccagtcccctcagcagccgccgccgcagcagcagcagcagcagccgccgcagcagccgacgccccccaagctggcccaggccacctcgtcgtcctcgtccacctcggcggcggctgcctcctcctcgtcctcgtctacctccacctccatggccgtggcggtggcctcgggctccgcgcctcccggtggcccggggccaggccgcacccccgccccggtgcagatgaacctgtacgccacctgggaggtggaccggagctcgtccagctgcgtgcctaggctattcagcttgaccctgaagaaactcgtcatgctaaaagaaatggacaaagatcttaactcagtggtcatcgctgtgaagctgcagggttcaaaaagaattcttcgctccaacgagatcgtccttccagctagtggactggtggaaacagagctccaattaaccttctcccttcagtaccctcatttccttaagcgagatgccaacaagctgcagatcatgctgcaaaggagaaaacgttacaagaatcggaccatcttgggctataagaccttggccgtgggactcatcaacatggcagaggtgatgcagcatcctaatgaaggcgcactggtgcttggcctacacagcaacgtgaaggatgtctctgtgcctgtggcagaaataaagatctactccctgtccagccaacccattgaccatgaaggaatcaaatccaagctttctgatcgttctcctgatattgacaattattctgaggaagaggaagagagtttctcatcagaacaggaaggcagtgatgatccattgcatgggcaggacttgttctacgaagacgaagatctccggaaagtgaagaagacccggaggaaactaacctcaacctctgccatcacaaggcaacctaacatcaaacagaagtttgtggccctcctgaagcggtttaaagtttcagatgaggtgggctttgggctggagcatgtgtcccgcgagcagatccgggaagtggaagaggacttggatgaattgtatgacagtctggagatgtacaaccccagcgacagtggccctgagatggaggagacagaaagcatcctcagcacgccaaagcccaagctcaagcctttctttgaggggatgtcgcagtccagctcccagacggagattggcagcctcaacagcaaaggcagcctcggaaaagacaccaccagccctatggaattggctgctctagaaaaaattaaatctacttggattaaaaaccaagatgacagcttgactgaaacagacactctggaaatcactgaccaggacatgtttggagatgccagcacgagtctggttgtgccggagaaagtcaaaactcccatgaagtccagtaaaacggatctccagggctctgcctcccccagcaaagtggagggggtgcacacaccccggcagaagaggagcacgcccctgaaggagcggcagctctccaagcccctaagtgagaggaccaacagttccgacagcgagcgctccccagatctgggccacagcacgcagattccaagaaaggtggtgtatgaccagctcaatcagatcctggtgtcagatgcagccctcccagaaaatgtcattctggtgaacaccactgactggcagggccagtatgtggctgagctgctccaggaccagcggaagcctgtggtgtgcacctgctccaccgtggaggtccaggccgtgctgtccgccctgctcacccggatccagcgctactgcaactgcaactcttccatgccgaggccagtgaaggtggctgctgtgggaggccagagctacctgagctccatcctcaggttctttgtcaagtccctggccaacaagacctccgactggcttggctacatgcgcttcctcatcatccccctcggttctcaccctgtggccaaatacttggggtcagtcgacagtaaatacagtagttccttcctggattctggttggagagatctgttcagtcgctcggagccaccagtgtcagagcaactggacgtggcagggcgggtgatgcagtacgtcaacggggcagccacgacacaccagcttcccgtggccgaagccatgctgacttgccggcataagttccctgatgaagactcctatcagaagtttattcccttcattggcgtggtgaaggtgggtctggttgaagactctccctccacagcaggcgatggggacgattctcctgtggtcagccttactgtgccctccacatcaccaccctccagctcgggcctgagccgagacgccacggccacccctccctcctccccatctatgagcagcgccctggccatcgtggggagccctaatagcccatatggggacgtgattggcctccaggtggactactggctgggccaccccggggagcggaggagggaaggcgacaagagggacgccagctcgaagaacaccctcaagagtgtcttccgctcagtgcaggtgtcccgcctgccccatagtggggaggcccagctttctggcaccatggccatgactgtggtcaccaaagaaaagaacaagaaagttcccaccatcttcctgagcaagaaaccccgagaaaaggaggtggattctaagagccaggtcattgaaggcatcagccgcctcatctgctcagccaagcagcagcagactatgctgagagtgtccatcgatggggtcgagtggagtgacatcaagttcttccagctggcagcccagtggcccacccatgtcaagcactttccagtgggactcttcagtggcagcaaggccacctgaggccctgtctcccagccactttccctcctggcactgccaccagcctcaccgcctgcgggcagggggaggccagcaggcccgggcccagcaccccttccctggcaccagggtctgcctctcactcgcccaggtcccgaaggacactgccacagggacgccttccctcccctcccctccagcccacccctgcacagcccctcctccttcccgcttttccccttctccctcctgctccaggcccaaggcgtgttggttttgccttctggtgcccatagtcccctggactgagtcccccaggccttccttcacccgacttccaaactcttccttgtggtatcagtttccttctcggaaatgagaaagctggaatcctggtccccagcaggagagcctagtcctcccccagcccctccagccaccagggtgtcctctaggatgcagctgccagatccactcactctgctgcctccagcaggacccaaggccactttcaactcttatggggttctccacctgccccagagcttctcaagggagggtaagggggcaccctgagcccacaggacccctacttcacagctcacaggggcaggaggcagctcccctgcctccaggaccctgttgctatggtgacacagcgtttctaggacagaggggcctcccagtctccccccaccacccgtgcacgacttcctcaccacccccaggttccctgcagatgtcgtgtgtgtcctgagtgtttctttggttctttgcacgccaagtctcttggttgtaccatgtgacacaccctgtgcactggtcgctgtcttcgtggcttccacccttgttaatgatgctcctgcctctgcctcccagcccctcacccagcacagctctgcctggacttggagagatgggaggcagacccccaccaccatacatgctgtctgtggcccctcagacattctgtttcatctcccaatagtattccattgtgtagatgtaccacagtttgtttatccattcctcagatgaaaacctttgga

SEQ ID NO: 330692 - DNA, 743 bp, Homo sapiens
ggtactctagaggacccccccgactagcccgacagcacgcaagtctcttggttgtaccatgtgacacaccctgtgcactggtcgctgtcttcgtggcttccacccttgttaatgatgctcctgcctctgcctcccagcccctcacccagcacagctctgcctggacttggagagatgggaggcagacccccaccaccatacatgctgtctgtggcccctcagacattctgtttcatctcccattcatctccctcctcccaccgtgtcagtttttctgcctttccctgctctgttcttccccctccttaggccccagcctgggcccagacccatcctcccagccaggtttccctccagcaggctccttccctccctgtcacctccctctcaccaacccggggtctgagcccctcattcctgaccgtccgtgttctcaggagtggttgaggacacagggccccagcccagccctctgcaccccccagcccggccatctgcgccccacagcccctttggagcttttctcttgtcctctcactccttcccagaagtttttgcacagaacttcattttgaaagtgtttttctcattctccatacctcccccaagctctcctccagcccttcccagggctcagccctgctgtcctgagcgtctcctgggccagagagaggagatgggggtgggagggactgagttgatgttgggtttttcattcaataaattggtgatttcttaccgac

SEQ ID NO: 330693 - DNA, 672 bp, Homo sapiens
tggtgggggtctgcctcccatctctccaagtccaggcagagctgtgctgggtgaggggctgggaggcagaggcaggagcatcattaacaagggtggaagccacgaagacagcgaccagtgcacagggtgtgtcacatggtacaaccaagagacattctgtttcatctcccattcatctccctcctcccaccgtgtcagtttttctgcctttccctgctctgttcttccccctccttaggccccagcctgggcccagacccatcctcccagccaggtttccctccagcaggctccttccctccctgtcacctccctctcaccaacccggggtctgagcccctcattcctgaccgtccgtgttctcaggagtggttgaggacacagggccccagcccagccctctgcaccccccagcccggccatctgcgccccacagcccctttggagcttttctcttgtcctctcactccttcccagaagtttttgcacagaacttcattttgaaagtgtttttctcattctccatacctcccccaagctctcctccagcccttcccagggctcagccctgctgtcctgagcgtctcctgggccagagagaggagatgggggtgggagggactgagttgatgttgggtttttcattcaataaattggtgatttcttaccgac

SEQ ID NO: 330694 - DNA, 480 bp, Homo sapiens
tctgttttattttgtggattggtttgcttttcccctgtgggttgttgagatcacagaaagtcagctctgggcctcccccgggcaggatcctggcacccctgagcactgctatgacgctccccttcctccccagctgcaactgcaactcttccatgccgaggccagtgaaggtggctgctgtgggaggccagagctacctgagctccatcctcaggttctttgtcaagtccctggccaacaagacctccgactggcttggctacatgcgcttcctcatcatccccctcggtaaagacgggaggcaccaggagggcgtcgggcatgagggttccatagacagatgcctcatctggaacaggacggtggggttggggcctaggaagggacagtcaaggagaccaaggccgtggccagggacagctgctcccacactgtctcatctcctgacgaattcaccacctctggttttccatctaccag

SEQ ID NO: 330695 - DNA, 401 bp, Homo sapiens
gccctgaacacctcctcagccctgagctcccatctccgtgtcctcagcccttaggtctggtccccgcaccctcagccctgagctctgagctcccatctctgcgttctcagccctgagctccgttccccttagctccagttcccgcgccctcagcccttagctctggtccccacaccctcagctctgagctctggtccccgcgccctcagccctgagctctggtccccgcacccttagccctgagctcctgtccccatgtcctcagcctgtggtctgagccctgtctcctcatccttagcctgttgcttttccttccacacctgcagcctccaggacattcttgcttcctgaaggcccgtcctggctgctgctctccctcctcccgaatccctcctgctcct

SEQ ID NO: 330696 - DNA, 152 bp, Homo sapiens
gagcaatggcagtggggacgtctgcaacttcctgtgtggcctgtggacggccctgtgggtgcagcccaggcgccagcagccatcatgtgctccagactcccaggccgaccgggaggggtgcatactgcatgctcctgcctggacccctcccc

SEQ ID NO: 330697 - DNA, 98 bp, Homo sapiens
atctgtgccatcctctaccataaaaccagaattagtttccaaatctgatgctccctcagctgtataatttcacagctccataccactgcatttgctct

SEQ ID NO: 330698 - DNA, 628 bp, Homo sapiens
tggctgtaactgtttgcattttcattagtaatgaatgagagtttctgttgttccacatcctctccagcatttggtgtaagcatttagaattttagacattctactaggtgtatcatggtatctcctcgttgttttaatttataatttcctgatgacaaatgatgttgagcatattttatatcatatatatgtacacacacacacattctttggtcagatgtctgttcaggttttcagcccatattttaattgggttgttgctttgttcagtttaaagagttattcatacattttagagctcagtcctttatcagatatgtattttgcaaagattttcttccaatctgtggcttgtattttcattctcccaacagtgtctttcacagagcagaagtttttatttttaataaagtacacctaatcaatattttctttcatgtattgtgcttctggtgttgcatctagaaagtcatcaccaaacctaaggtcacctagactttctcccatagtatcttctattagttttatagtttttagctttaaatttaggtttatgattcattttaaattaattatttttgaaatgtttaagatctgtgtatagaatcttttttgcatatgaatatcc

SEQ ID NO: 330699 - DNA, 878 bp, Homo sapiens
gacaaaagggaagtcatcttccgttggtctatggggaccctgaggtagtaggagctcggtgataattctagggaccaccctgggttgtcaggtgggggagacagagaagcccacataggaggcaccaaatgcaactcactcgtgcccttttactcatgagagaacacggatccagagatgtcaagtgactcagacacagtctcacagcacacaggcggcagaggcaggtaggggactgggcttccctggcagcagtccccaagcctgcctgagaggcacatcagaatcgctttaggggatttgcaaaaccacacctgcccaggcccaaaccctagagattctgattccgcagtctgaggtaggaatggagaatcctccacagcctgaggtaggaactgggaatccagtgtttaaaactctctaggggcggtgatttcagaaaacctgctggctccatcacactttgctcagggactgagatgggatggcatttggaagacacagctgaaatttagcatcatattccatggcgattttccaccagtggaaatcacaggtgttctctggtatcacagcggggtcagggatgacctgaaatattgttcatgctcatcacaactgcatggcccaccgcggggtcttgtcactcagtgagttcttgaagaggcacagacaaatggagttcaacaaatggaaaacaactgcctttaattagctccgaggactacaaagggaacaacgttataatagcagcaactccaaggaagcagccacagcatctcagctctcagacctggggctgccgctcatcatcagctacagctaggtttgatgggagtgcccccatttcaggggacagcaggcccccttcactcccc

SEQ ID NO: 330700 - DNA, 662 bp, Homo sapiens
tgaaggaaaatttgtattatttcaattatttttatgtacagaaaactcaacagtgtacatttaacccagtttagtggcaagttctttagcctttgccttttcgagcttggcgatacgagccacagacttaggacccaggacattgccaccccagtgacggcggatctcatcgtatctgtcattgtaattggtcctgatagcttccaccagcttagccaaagcgcctttgtcttccgagttcacctgtgtgaaggcgacagtggtgcaggtcttcctgtggactagacgcccctcttccttccagctttcacttctgccggctccgcaactgagtgacacccagcgacaaccgactggggagtggtagaagcaactgaacggatgcgtgcgagctgaggacagggcgggaggagggggcacacatgccccaggggagcgaggagaactcttgaaatctccattttcaatcccttcgaaatcacgtatggtttccacaaagccgagtcgtgtcacgtggcaggtttacgtcaatagtccctctctctgctcctccattcgcaagtgtcttcctgggccagactcccctccacctcatgtacttgctatattgaggatgaagttttctatggtgggacactaaatataaagctatatagagaaag

SEQ ID NO: 330701 - DNA, 657 bp, Homo sapiens
tccgctcctcccccggcccccaccgcgcccgcggccggcccaggcagcactcgcgagcagcggcggccccgccggcggccgagttgggagaatgcggcggcgctcgcggatgctgctctgcttcgccttcctgtgggtgctgggcatcgcctactacatgtactcggggggcggctctgcgctggccgggggcgcgggcggcggcgccggcaggaagctccagactctgtgctctgttctgcagtgttggagctaggaccgcacatcccagctgctttgccagtggcttccgggccacctccatcagcaggaggcggtagaagcaccagcaagatggggctttggtccttcctgttggcttcctgttgccccagctgtagctgttgaattcagtcttcagttatcccagcactggccagccagcctcatcgtccacactccctgcagatcccaccactcctccaaggaagtctctacctcagggccctttggctacgcttctaaggttaagtctaaccggttccctcaggcctaggggtggtggctgcttcctgtcgttgctacttccctgatatctagaattttcctttttctacccagttacctggttactgactttctacccagttaacaatttatattaaagcccttctgttc

SEQ ID NO: 330702 - DNA, 4347 bp, Homo sapiens
gagtgtacacgaacgaaaagcactggctggagatcatctatgtggaatgtggacagggcaaggtgcccgtagcccctatggctgacagagaggactggaatgaaattgaccccattaaaaagaaagaccttcatcacagcaatggagaagagaaagcacaaagcatggagaccctccctccagggaaagtacggtggccagactttaaccaggaagcttatgttggagggacgatggtccgctccgggcaggacccttacgcccgcaacaagttcaaccaggtggagagtgataagcttcgaatggacagagccatccctgacacccggcatgaccagtgtcagcggaagcagtggcgggtggatctgccggccaccagcgtggtgatcacgtttcacaatgaagccaggtcggccctactcaggaccgtggtcagcgtgcttaagaaaagcccgccccatctcataaaagaaatcatcttggtggatgactacagcaatgatcctgaggacggggctctcttggggaaaattgagaaagtgcgagttcttagaaatgatcgacgagaaggcctcatgcgctcacgggttcggggggccgatgctgcccaagccaaggtcctgaccttcctggacagtcactgcgagtgtaatgagcactggctggagcccctcctggaaagggtggcggaggacaggactcgggttgtgtcacccatcatcgatgtcattaatatggacaactttcagtatgtgggggcatctgctgacttgaagggcggttttgattggaacttggtattcaagtgggattacatgacgcctgagcagagaaggtcccggcaggggaacccagtcgcccctataaaaacccccatgattgctggtgggctgtttgtgatggataagttctattttgaagaactggggaagtacgacatgatgatggatgtgtggggaggagagaacctagagatctcgttccgcgtgtggcagtgtggtggcagcctggagatcatcccgtgcagccgtgtgggacacgtgttccggaagcagcacccctacacgttcccgggtggcagtggcactgtctttgcccgaaacacccgccgggcagcagaggtctggatggatgaatacaaaaatttctattatgcagcagtgccttctgctagaaacgttccttatggaaatattcagagcagattggagcttaggaagaaactcagctgcaagcctttcaaatggtaccttgaaaatgtctatccagagttaagggttccagaccatcaggatatagcttttggggccttgcagcagggaactaactgcctcgacactttgggacactttgctgatggtgtggttggagtttatgaatgtcacaatgctgggggaaaccaggaatgggccttgacgaaggagaagtcggtgaagcacatggatttgtgccttactgtggtggaccgggcaccgggctctcttataaagctgcagggctgccgagaaaatgacagcagacagaaatgggaacagatcgagggcaactccaagctgaggcacgtgggcagcaacctgtgcctggacagtcgcacggccaagagcgggggcctaagcgtggaggtgtgtggcccggccctttcgcagcagtggaagttcacgctcaacctgcagcagtaggagggtccgggaggccctgccgtcctgtctcctgcaccattgggtggagtctggtgatcacattattgattatgtttcttaaactttccgcgaaactaatatacctcagtattccatcatggtctgaaagtcaaacttcggcaaggcacggacgactgtgcagacacagcagcggcaagaagcgagaactgccctccccctcctctcggtgcagcccagccgggcccccttccccaggccggagcgcccctcttccttccagctttcacttctgccggctccgcaactgagtgacacccagcgacaaccgactggggagtggtagaagcaactgaacggatgcgtgcgagctgaggacagggcgggaggagggggcacacatgccccaggggagcgaggagaactcttgaaatctccattttcaatcccttcgaaatcacgtatggtttccacaaagccgagtcgtgtcacgtggcaggtttacgtcaatagtccctctctctgctcctccattcgcaagtgtcttcctgggccagactcccctccacctcatgtacttgctatattgaggatgaagttttctatggtgggacactaaatataaagctatatagagaaagaatgtacggtcagttccctatggtttctgtagatcatcgtcatcttgtatattccccacaaagccgttcgcagcttccgggagaaggggccagagcccggtggggccagtttctcacagagggaggaggtggcctttgtcccctggagcccgatcagccagttggtgctactgctgtggccagctggggggcttcctccagaccaccggcctcggccccggcatccctgttgggcgtcagcctgagagtccctactgtgcgtcagaatccaccttgcgtgctgtgcgtatctgtgaacctggagcggttacttattttgacagatatcactttgggtctttttacattaaatttcttttctctaaggaatataagacataccccatagctctgtgtgagccagcaataccgctgccccctggcgacagggcagaccaatgatgccaggcagctgtcacacgctagtattggcttcattgtgatctgagccctgcacgctgggccttcagaattaatggccagcagtgtcagggatgagcccgtcagccagggcacaggcctggctcacagtcctgcacacctgctggcctggggagctccagccaggcagcgagtcctgccccgcccgcagctccctcccacaccccgcctggccaagatgactgcttcagggggctttggggaaagaattaggaagggtcagaaccaaacaatacctgctcatttacactgaggattcagggcgggagacaggagccttggggtcctgttaaaccacagacagttatgaactgaaagtcataacggggagaggtgcctggcttctacctgggtgctcaggaatgttcctcgtcacccctgccactctgtggtcggtgccctgcttcctcctccactcctggccgccttctccagcgccgcacacacagatgctcagtctcagagaggctggcacggcctggcagtctgagaaaagcgtcagttaggcacacctgcaggcccctcggtgggacagcggcggccttggagttaggagccaccctgggaggttgtgccggtgccatgctcctccctgtgtcttgtatgaaaggggccactgtgtgtcttcctccccggcgggagccccacatgtgtgcactgtaggacagcggccccgaggtggaagcctggctggagggctgccctataggtcttctcttcccgcctcccctgccatgcaaccagatgtgttgtgagtgggcagcgtgcccccacgctggagtaactccgcacgcttctgtctttcacggtgggcgctcggggggagcctgaggaaaacccccttaggtacctgtgcgaggctgtggagtgcaggccagagcagggtgtgcgtagcccccagcacccaggttcttctgtcagaccctgtgacctgcgagctgctactactgtaaggagggaaatggatgaatctggctcgttttaaaatcacgttttctgacgaatcctttgccccttcacctttaccccgcccgcacccctaggccctctcagccttcctatcatcccacgtgtctacccagacccttgtgcggcccatgccctgggggcggcgtcctgtccctgagctgggaggcggctttggatggtccgggcgtcaagagcaggggtgggccggggaggggtcctttgcggtgagctatgtttacatgacacagtgtgccaaagtgacttactgcggttgcgttagtttctagtcatcaggactatctcaccctcccactcctgtttttaaaactcagaattctttcctaagagcccttcgagcaaagcgtgccgaagttagttgtcttctctgtgctggtcctttcttatgtcctcataaaagctcagatgatggtatctgtgagtatgttttgcaaattcaaaatatagtttggtaatttttttttccagttgatttttaaaaagaactgctgtacagagcttgtactttgtccattttatagatggaaaccatccttgaaaattgtttaacttaaataaagagaagatactttctagatacc

SEQ ID NO: 330703 - DNA, 4148 bp, Homo sapiens
tccgctcctcccccggcccccaccgcgcccgcggccggcccaggcagcactcgcgagcagcggcggccccgccggcggccgagttgggagaatgcggcggcgctcgcggatgctgctctgcttcgccttcctgtgggtgctgggcatcgcctactacatgtactcggggggcggctctgcgctggccgggggcgcgggcggcggcgccggcaggaaggaggactggaatgaaattgaccccattaaaaagaaagaccttcatcacagcaatggagaagagaaagcacaaagcatggagaccctccctccagggaaagtacggtggccagactttaaccaggaagcttatgttggagggacgatggtccgctccgggcaggacccttacgcccgcaacaagttcaaccaggtggagagtgataagcttcgaatggacagagccatccctgacacccggcatgaccagtgtcagcggaagcagtggcgggtggatctgccggccaccagcgtggtgatcacgtttcacaatgaagccaggtcggccctactcaggaccgtggtcagcgtgcttaagaaaagcccgccccatctcataaaagaaatcatcttggtggatgactacagcaatgatcctgaggacggggctctcttggggaaaattgagaaagtgcgagttcttagaaatgatcgacgagaaggcctcatgcgctcacgggttcggggggccgatgctgcccaagccaaggtcctgaccttcctggacagtcactgcgagtgtaatgagcactggctggagcccctcctggaaagggtggcggaggacaggactcgggttgtgtcacccatcatcgatgtcattaatatggacaactttcagtatgtgggggcatctgctgacttgaagggcggttttgattggaacttggtattcaagtgggattacatgacgcctgagcagagaaggtcccggcaggggaacccagtcgcccctataaaaacccccatgattgctggtgggctgtttgtgatggataagttctattttgaagaactggggaagtacgacatgatgatggatgtgtggggaggagagaacctagagatctcgttccgcgtgtggcagtgtggtggcagcctggagatcatcccgtgcagccgtgtgggacacgtgttccggaagcagcacccctacacgttcccgggtggcagtggcactgtctttgcccgaaacacccgccgggcagcagaggtctggatggatgaatacaaaaatttctattatgcagcagtgccttctgctagaaacgttccttatggaaatattcagagcagattggagcttaggaagaaactcagctgcaagcctttcaaatggtaccttgaaaatgtctatccagagttaagggttccagaccatcaggatatagcttttggggccttgcagcagggaactaactgcctcgacactttgggacactttgctgatggtgtggttggagtttatgaatgtcacaatgctgggggaaaccaggaatgggccttgacgaaggagaagtcggtgaagcacatggatttgtgccttactgtggtggaccgggcaccgggctctcttataaagctgcagggctgccgagaaaatgacagcagacagaaatgggaacagatcgagggcaactccaagctgaggcacgtgggcagcaacctgtgcctggacagtcgcacggccaagagcgggggcctaagcgtggaggtgtgtggcccggccctttcgcagcagtggaagttcacgctcaacctgcagcagtaggagggtccgggaggccctgccgtcctgtctcctgcaccattgggtggagtctggtgatcacattattgattatgtttcttaaactttccgcgaaactaatatacctcagtattccatcatggtctgaaagtcaaacttcggcaaggcacggacgactgtgcagacacagcagcggcaagaagcgagaactgccctccccctcctctcggtgcagcccagccgggcccccttccccaggccggagcgcccctcttccttccagctttcacttctgccggctccgcaactgagtgacacccagcgacaaccgactggggagtggtagaagcaactgaacggatgcgtgcgagctgaggacagggcgggaggagggggcacacatgccccaggggagcgaggagaactcttgaaatctccattttcaatcccttcgaaatcacgtatggtttccacaaagccgagtcgtgtcacgtggcaggtttacgtcaatagtccctctctctgctcctccattcgcaagtgtcttcctgggccagactcccctccacctcatgtacttgctatattgaggatgaagttttctatggtgggacactaaatataaagctatatagagaaagaatgtacggtcagttccctatggtttctgtagatcatcgtcatcttgtatattccccacaaagccgttcgcagcttccgggagaaggggccagagcccggtggggccagtttctcacagagggaggaggtggcctttgtcccctggagcccgatcagccagttggtgctactgctgtggccagctggggggcttcctccagaccaccggcctcggccccggcatccctgttgggcgtcagcctgagagtccctactgtgcgtcagaatccaccttgcgtgctgtgcgtatctgtgaacctggagcggttacttattttgacagatatcactttgggtctttttacattaaatttcttttctctaaggaagggtcagaaccaaacaatacctgctcatttacactgaggattcagggcgggagacaggagccttggggtcctgttaaaccacagacagttatgaactgaaagtcataacggggagaggtgcctggcttctacctgggtgctcaggaatgttcctcgtcacccctgccactctgtggtcggtgccctgcttcctcctccactcctggccgccttctccagcgccgcacacacagatgctcagtctcagagaggctggcacggcctggcagtctgagaaaagcgtcagttaggcacacctgcaggcccctcggtgggacagcggcggccttggagttaggagccaccctgggaggttgtgccggtgccatgctcctccctgtgtcttgtatgaaaggggccactgtgtgtcttcctccccggcgggagccccacatgtgtgcactgtaggacagcggccccgaggtggaagcctggctggagggctgccctataggtcttctcttcccgcctcccctgccatgcaaccagatgtgttgtgagtgggcagcgtgcccccacgctggagtaactccgcacgcttctgtctttcacggtgggcgctcggggggagcctgaggaaaacccccttaggtacctgtgcgaggctgtggagtgcaggccagagcagggtgtgcgtagcccccagcacccaggttcttctgtcagaccctgtgacctgcgagctgctactactgtaaggagggaaatggatgaatctggctcgttttaaaatcacgttttctgacgaatcctttgccccttcacctttaccccgcccgcacccctaggccctctcagccttcctatcatcccacgtgtctacccagacccttgtgcggcccatgccctgggggcggcgtcctgtccctgagctgggaggcggctttggatggtccgggcgtcaagagcaggggtgggccggggaggggtcctttgcggtgagctatgtttacatgacacagtgtgccaaagtgacttactgcggttgcgttagtttctagtcatcaggactatctcaccctcccactcctgtttttaaaactcagaattctttcctaagagcccttcgagcaaagcgtgccgaagttagttgtcttctctgtgctggtcctttcttatgtcctcataaaagctcagatgatggtatctgtgagtatgttttgcaaattcaaaatatagtttggtaatttttttttccagttgatttttaaaaagaactgctgtacagagcttgtactttgtccattttatagatggaaaccatccttgaaaattgtttaacttaaataaagagaagatactttctagatacc

SEQ ID NO: 330704 - DNA, 1748 bp, Homo sapiens
aaggcctgggtgtctaatcggccgaggcactttgggtctttttacattaaatttcttttctctaaggaatataagacataccccatagctctgtgtgagccagcaataccgctgccccctggcgacagggcagaccaatgatgccaggcagctgtcacacgctagtattggcttcattgtgatctgagccctgcacgctgggccttcagaattaatggccagcagtgtcagggatgagcccgtcagccagggcacaggcctggctcacagtcctgcacacctgctggcctggggagctccagccaggcagcgagtcctgccccgcccgcagctccctcccacaccccgcctggccaagatgactgcttcagggggctttggggaaagaattaggaagggtcagaaccaaacaatacctgctcatttacactgaggattcagggcgggagacaggagccttggggtcctgttaaaccacagacagttatgaactgaaagtcataacggggagaggtgcctggcttctacctgggtgctcaggaatgttcctcgtcacccctgccactctgtggtcggtgccctgcttcctcctccactcctggccgccttctccagcgccgcacacacagatgctcagtctcagagaggctggcacggcctggcagtctgagaaaagcgtcagttaggcacacctgcaggcccctcggtgggacagcggcggccttggagttaggagccaccctgggaggttgtgccggtgccatgctcctccctgtgtcttgtatgaaaggggccactgtgtgtcttcctccccggcgggagccccacatgtgtgcactgtaggacagcggccccgaggtggaagcctggctggagggctgccctataggtcttctcttcccgcctcccctgccatgcaaccagatgtgttgtgagtgggcagcgtgcccccacgctggagtaactccgcacgcttctgtctttcacggtgggcgctcggggggagcctgaggaaaacccccttaggtacctgtgcgaggctgtggagtgcaggccagagcagggtgtgcgtagcccccagcacccaggttcttctgtcagaccctgtgacctgcgagctgctactactgtaaggagggaaatggatgaatctggctcgttttaaaatcacgttttctgacgaatcctttgccccttcacctttaccccgcccgcacccctaggccctctcagccttcctatcatcccacgtgtctacccagacccttgtgcggcccatgccctgggggcggcgtcctgtccctgagctgggaggcggctttggatggtccgggcgtcaagagcaggggtgggccggggaggggtcctttgcggtgagctatgtttacatgacacagtgtgccaaagtgacttactgcggttgcgttagtttctagtcatcaggactatctcaccctcccactcctgtttttaaaactcagaattctttcctaagagcccttcgagcaaagcgtgccgaagttagttgtcttctctgtgctggtcctttcttatgtcctcataaaagctcagatgatggtatctgtgagtatgttttgcaaattcaaaatatagtttggtaatttttttttccagttgatttttaaaaagaactgctgtacagagcttgtactttgtccattttatagatggaaaccatccttgaaaattgtttaacttaaataaagagaagatactttctagatacc

SEQ ID NO: 330705 - DNA, 1980 bp, Homo sapiens
  misc_feature (157)..(157): n is a, c, g, or t
cgtacacgttctctagtcccgctctctgcctacctccactatcgcacacgatgtcgttcctggcgcccgagctcccctccatctcatttacgttgctcatattgagagagtgcatctcactaatgtgcatgagagaagcaaacataccataggtcantcacaatgacataatactaaggacgcatacatgaatgtacggtcagttccctatggtttctgtagatcatcgtcatcttgtatattccccacaaagccgttcgcagcttccgggagaaggggccagagcccggtggggccacgatttccttcagcaaggaaggggggcacggccggaacgggggcttgggggggcccccccttttttatttggggtttccccccccccccctttggggaatggccccccgaattccagcccagttggtgctactgctgtggccagctggggggcttcctccagaccaccggcctcggccccggcatccctgttgggcgtcagcctgagagtccctactgtgcgtcagaatccaccttgcgtgctgtgcgtatctgtgaacctggagcggttacttattttgacagatatcactttgggtctttttacattaaatttcttttctctaaggaagggtcagaaccaaacaatacctgctcatttacactgaggattcagggcgggagacaggagccttggggtcctgttaaaccacagacagttatgaactgaaagtcataacggggagaggtgcctggcttctacctgggtgctcaggaatgttcctcgtcacccctgccactctgtggtcggtgccctgcttcctcctccactcctggccgccttctccagcgccgcacacacagatgctcagtctcagagaggctggcacggcctggcagtctgagaaaagcgtcagttaggcacacctgcaggcccctcggtgggacagcggcggccttggagttaggagccaccctgggaggttgtgccggtgccatgctcctccctgtgtcttgtatgaaaggggccactgtgtgtcttcctccccggcgggagccccacatgtgtgcactgtaggacagcggccccgaggtggaagcctggctggagggctgccctataggtcttctcttcccgcctcccctgccatgcaaccagatgtgttgtgagtgggcagcgtgcccccacgctggagtaactccgcacgcttctgtctttcacggtgggcgctcggggggagcctgaggaaaacccccttaggtacctgtgcgaggctgtggagtgcaggccagagcagggtgtgcgtagcccccagcacccaggttcttctgtcagaccctgtgacctgcgagctgctactactgtaaggagggaaatggatgaatctggctcgttttaaaatcacgttttctgacgaatcctttgccccttcacctttaccccgcccgcacccctaggccctctcagccttcctatcatcccacgtgtctacccagacccttgtgcggcccatgccctgggggcggcgtcctgtccctgagctgggaggcggctttggatggtccgggcgtcaagagcaggggtgggccggggaggggtcctttgcggtgagctatgtttacatgacacagtgtgccaaagtgacttactgcggttgcgttagtttctagtcatcaggactatctcaccctcccactcctgtttttaaaactcagaattctttcctaagagcccttcgagcaaagcgtgccgaagttagttgtcttctctgtgctggtcctttcttatgtcctcataaaagctcagatgatggtatctgtgagtatgttttgcaaattcaaaatatagtttggtaatttttttttccagttgatttttaaaaagaactgctgtacagagcttgtactttgtccattttatagatggaaaccatccttgaaaattgtttaacttaaataaagagaagatactttctagatacc

SEQ ID NO: 330706 - DNA, 1376 bp, Homo sapiens
tatgctaggtacaaggccggtggttaatcggccgaggacaatacctgctcatttacactgaggattcagggcgggagacaggagccttggggtcctgttaaaccacagacagttatgaactgaaagtcataacggggagaggtgcctggcttctacctgggtgctcaggaatgttcctcgtcacccctgccactctgtggtcggtgccctgcttcctcctccactcctggccgccttctccagcgccgcacacacagatgctcagtctcagagaggctggcacggcctggcagtctgagaaaagcgtcagttaggcacacctgcaggcccctcggtgggacagcggcggccttggagttaggagccaccctgggaggttgtgccggtgccatgctcctccctgtgtcttgtatgaaaggggccactgtgtgtcttcctccccggcgggagccccacatgtgtgcactgtaggacagcggccccgaggtggaagcctggctggagggctgccctataggtcttctcttcccgcctcccctgccatgcaaccagatgtgttgtgagtgggcagcgtgcccccacgctggagtaactccgcacgcttctgtctttcacggtgggcgctcggggggagcctgaggaaaacccccttaggtacctgtgcgaggctgtggagtgcaggccagagcagggtgtgcgtagcccccagcacccaggttcttctgtcagaccctgtgacctgcgagctgctactactgtaaggagggaaatggatgaatctggctcgttttaaaatcacgttttctgacgaatcctttgccccttcacctttaccccgcccgcacccctaggccctctcagccttcctatcatcccacgtgtctacccagacccttgtgcggcccatgccctgggggcggcgtcctgtccctgagctgggaggcggctttggatggtccgggcgtcaagagcaggggtgggccggggaggggtcctttgcggtgagctatgtttacatgacacagtgtgccaaagtgacttactgcggttgcgttagtttctagtcatcaggactatctcaccctcccactcctgtttttaaaactcagaattctttcctaagagcccttcgagcaaagcgtgccgaagttagttgtcttctctgtgctggtcctttcttatgtcctcataaaagctcagatgatggtatctgtgagtatgttttgcaaattcaaaatatagtttggtaatttttttttccagttgatttttaaaaagaactgctgtacagagcttgtactttgtccattttatagatggaaaccatccttgaaaattgtttaacttaaataaagagaagatactttctagatacc

SEQ ID NO: 330707 - DNA, 928 bp, Homo sapiens
cctgaggatcccttcgactagccgacagcggccccgaggtggaagcctggctggagggctgccctataggtcttctcttcccgcctcccctgccatgcaaccagatgtgttgtgagtgggcagcgtgcccccacgctggagtaactccgcacgcttctgtctttcacggtgggcgctcggggggagcctgaggaaaacccccttaggtacctgtgcgaggctgtggagtgcaggccagagcagggtgtgcgtagcccccagcacccaggttcttctgtcagaccctgtgacctgcgagctgctactactgtaaggagggaaatggatgaatctggctcgttttaaaatcacgttttctgacgaatcctttgccccttcacctttaccccgcccgcacccctaggccctctcagccttcctatcatcccacgtgtctacccagacccttgtgcggcccatgccctgggggcggcgtcctgtccctgagctgggaggcggctttggatggtccgggcgtcaagagcaggggtgggccggggaggggtcctttgcggtgagctatgtttacatgacacagtgtgccaaagtgacttactgcggttgcgttagtttctagtcatcaggactatctcaccctcccactcctgtttttaaaactcagaattctttcctaagagcccttcgagcaaagcgtgccgaagttagttgtcttctctgtgctggtcctttcttatgtcctcataaaagctcagatgatggtatctgtgagtatgttttgcaaattcaaaatatagtttggtaatttttttttccagttgatttttaaaaagaactgctgtacagagcttgtactttgtccattttatagatggaaaccatccttgaaaattgtttaacttaaataaagagaagatactttctagatacc

SEQ ID NO: 330708 - DNA, 410 bp, Homo sapiens
taaggaaatcacacctcaagatttattttctttctagaaacacccgccgggcagcagaggtctggatggatgaatacaaaaatttctattatgcagcagtgccttctgctagaaacgttccttatggaaagtaagtggcagttctgccttctcacaattactggggattcttggggtgtgggggtgggaggtaaggggctgcccccagcgttgaattcagctacccaggtgccaaggcgggaaggggttgtgggcacaggagcatgggcagtccacaccacaccacctgccccaaccctgttctcctcagcagattttcaagtttgatgtagaaagcccatctattcttaaaatttataaaggaatcttatttccctcttctccagtattcagagcagattggagcttag

SEQ ID NO: 330709 - DNA, 340 bp, Homo sapiens
agggacgatggtccgctccgggcaggacccttacgcccgcaacaagttcaaccaggtggagagtgataagcttcgaatggacagagccatccctgacacccggcatgaccagtaagtaccccactaagcacctgctgcagcttcatttgctttcacacaaaccagtacgtcgctttcacctgtgacactagaacttctccattactctgggaaattgaatgtgtgttgtaaaactaggaaaaatcctgaggtatatggcaatggaacttcatccataggcagtggaaggatggttctagattcagctctagtctttaggtgccctgtggcagtgtgcaga

SEQ ID NO: 330710 - DNA, 4602 bp, Homo sapiens
tccgctcctcccccggcccccaccgcgcccgcggccggcccaggcagcactcgcgagcagcggcggccccgccggcggccgagttgggagaatgcggcggcgctcgcggatgctgctctgcttcgccttcctgtgggtgctgggcatcgcctactacatgtactcggggggcggctctgcgctggccgggggcgcgggcggcggcgccggcaggaaggaggactggaatgaaattgaccccattaaaaagaaagaccttcatcacagcaatggagaagagaaagcacaaagcatggagaccctccctccagggaaagtacggtggccagactttaaccaggaagcttatgttggagggacgatggtccgctccgggcaggacccttacgcccgcaacaagttcaaccaggtggagagtgataagcttcgaatggacagagccatccctgacacccggcatgaccagtgtcagcggaagcagtggcgggtggatctgccggccaccagcgtggtgatcacgtttcacaatgaagccaggtcggccctactcaggaccgtggtcagcgtgcttaagaaaagcccgccccatctcataaaagaaatcatcttggtggatgactacagcaatgatcctgaggacggggctctcttggggaaaattgagaaagtgcgagttcttagaaatgatcgacgagaaggcctcatgcgctcacgggttcggggggccgatgctgcccaagccaaggtcctgaccttcctggacagtcactgcgagtgtaatgagcactggctggagcccctcctggaaagggtggcggaggacaggactcgggttgtgtcacccatcatcgatgtcattaatatggacaactttcagtatgtgggggcatctgctgacttgaagggcggttttgattggaacttggtattcaagtgggattacatgacgcctgagcagagaaggtcccggcaggggaacccagtcgcccctataaaaacccccatgattgctggtgggctgtttgtgatggataagttctattttgaagaactggggaagtacgacatgatgatggatgtgtggggaggagagaacctagagatctcgttccgcgtgtggcagtgtggtggcagcctggagatcatcccgtgcagccgtgtgggacacgtgttccggaagcagcacccctacacgttcccgggtggcagtggcactgtctttgcccgaaacacccgccgggcagcagaggtctggatggatgaatacaaaaatttctattatgcagcagtgccttctgctagaaacgttccttatggaaatattcagagcagattggagcttaggaagaaactcagctgcaagcctttcaaatggtaccttgaaaatgtctatccagagttaagggttccagaccatcaggatatagcttttggggccttgcagcagggaactaactgcctcgacactttgggacactttgctgatggtgtggttggagtttatgaatgtcacaatgctgggggaaaccaggaatgggccttgacgaaggagaagtcggtgaagcacatggatttgtgccttactgtggtggaccgggcaccgggctctcttataaagctgcagggctgccgagaaaatgacagcagacagaaatgggaacagatcgagggcaactccaagctgaggcacgtgggcagcaacctgtgcctggacagtcgcacggccaagagcgggggcctaagcgtggaggtgtgtggcccggccctttcgcagcagtggaagttcacgctcaacctgcagcagtaggagggtccgggaggccctgccgtcctgtctcctgcaccattgggtggagtctggtgatcacattattgattatgtttcttaaactttccgcgaaactaatatacctcagtattccatcatggtctgaaagtcaaacttcggcaaggcacggacgactgtgcagacacagcagcggcaagaagcgagaactgccctccccctcctctcggtgcagcccagccgggcccccttccccaggccggagcgcccctcttccttccagctttcacttctgccggctccgcaactgagtgacacccagcgacaaccgactggggagtggtagaagcaactgaacggatgcgtgcgagctgaggacagggcgggaggagggggcacacatgccccaggggagcgaggagaactcttgaaatctccattttcaatcccttcgaaatcacgtatggtttccacaaagccgagtcgtgtcacgtggcaggtttacgtcaatagtccctctctctgctcctccattcgcaagtgtcttcctgggccagactcccctccacctcatgtacttgctatattgaggatgaagttttctatggtgggacactaaatataaagctatatagagaaagaatgtacggtcagttccctatggtttctgtagatcatcgtcatcttgtatattccccacaaagccgttcgcagcttccgggagaaggggccagagcccggtggggccagtttctcacagagggaggaggtggcctttgtcccctggagcccgatcagccagttggtgctactgctgtggccagctggggggcttcctccagaccaccggcctcggccccggcatccctgttgggcgtcagcctgagagtccctactgtgcgtcagaatccaccttgcgtgctgtgcgtatctgtgaacctggagcggttacttattttgacagatatcactttgggtctttttacattaaatttcttttctctaaggaatataagacataccccatagctctgtgtgagccagcaataccgctgccccctggcgacagggcagaccaatgatgccaggcagctgtcacacgctagtattggcttcattgtgatctgagccctgcacgctgggccttcagaattaatggccagcagtgtcagggatgagcccgtcagccagggcacaggcctggctcacagtcctgcacacctgctggcctggggagctccagccaggcagcgagtcctgccccgcccgcagctccctcccacaccccgcctggccaagatgactgcttcagggggctttggggaaagaattaggaagggtcagaaccaaacaatacctgctcatttacactgaggattcagggcgggagacaggagccttggggtcctgttaaaccacagacagttatgaactgaaagtcataacggggagaggtgcctggcttctacctgggtgctcaggaatgttcctcgtcacccctgccactctgtggtcggtgccctgcttcctcctccactcctggccgccttctccagcgccgcacacacagatgctcagtctcagagaggctggcacggcctggcagtctgagaaaagcgtcagttaggcacacctgcaggcccctcggtgggacagcggcggccttggagttaggagccaccctgggaggttgtgccggtgccatgctcctccctgtgtcttgtatgaaaggggccactgtgtgtcttcctccccggcgggagccccacatgtgtgcactgtaggacagcggccccgaggtggaagcctggctggagggctgccctataggtcttctcttcccgcctcccctgccatgcaaccagatgtgttgtgagtgggcagcgtgcccccacgctggagtaactccgcacgcttctgtctttcacggtgggcgctcggggggagcctgaggaaaacccccttaggtacctgtgcgaggctgtggagtgcaggccagagcagggtgtgcgtagcccccagcacccaggttcttctgtcagaccctgtgacctgcgagctgctactactgtaaggagggaaatggatgaatctggctcgttttaaaatcacgttttctgacgaatcctttgccccttcacctttaccccgcccgcacccctaggccctctcagccttcctatcatcccacgtgtctacccagacccttgtgcggcccatgccctgggggcggcgtcctgtccctgagctgggaggcggctttggatggtccgggcgtcaagagcaggggtgggccggggaggggtcctttgcggtgagctatgtttacatgacacagtgtgccaaagtgacttactgcggttgcgttagtttctagtcatcaggactatctcaccctcccactcctgtttttaaaactcagaattctttcctaagagcccttcgagcaaagcgtgccgaagttagttgtcttctctgtgctggtcctttcttatgtcctcataaaagctcagatgatggtatctgtgagtatgttttgcaaattcaaaatatagtttggtaatttttttttccagttgatttttaaaaagaactgctgtacagagcttgtactttgtccattttatagatggaaaccatccttgaaaattgtttaacttaaataaagagaagatactttctagataccgctctttgctggccagagtctgtcctggtgtgtgagggctgggtggggtgggtgtggggactgggattggggtcagccttctgcagctcctgctcagtggctgtttcttatcaccttttgcagatgc

SEQ ID NO: 330711 - DNA, 4475 bp, Homo sapiens
tccgctcctcccccggcccccaccgcgcccgcggccggcccaggcagcactcgcgagcagcggcggccccgccggcggccgagttgggagaatgcggcggcgctcgcggatgctgctctgcttcgccttcctgtgggtgctgggcatcgcctactacatgtactcggggggcggctctgcgctggccgggggcgcgggcggcggcgccggcaggaaggaggactggaatgaaattgaccccattaaaaagaaagaccttcatcacagcaatggagaagagaaagcacaaagcatggagaccctccctccagggaaagtacggtggccagactttaaccaggaagcttatgttggagggacgatggtccgctccgggcaggacccttacgcccgcaacaagttcaaccaggtggagagtgataagcttcgaatggacagagccatccctgacacccggcatgaccagtgtcagcggaagcagtggcgggtggatctgccggccaccagcgtggtgatcacgtttcacaatgaagccaggtcggccctactcaggaccgtggtcagcgtgcttaagaaaagcccgccccatctcataaaagaaatcatcttggtggatgactacagcaatgatcctgaggacggggctctcttggggaaaattgagaaagtgcgagttcttagaaatgatcgacgagaaggcctcatgcgctcacgggttcggggggccgatgctgcccaagccaaggtcctgaccttcctggacagtcactgcgagtgtaatgagcactggctggagcccctcctggaaagggtggcggaggacaggactcgggttgtgtcacccatcatcgatgtcattaatatggacaactttcagtatgtgggggcatctgctgacttgaagggcggttttgattggaacttggtattcaagtgggattacatgacgcctgagcagagaaggtcccggcaggggaacccagtcgcccctataaaaacccccatgattgctggtgggctgtttgtgatggataagttctattttgaagaactggggaagtacgacatgatgatggatgtgtggggaggagagaacctagagatctcgttccgcgtgtggcagtgtggtggcagcctggagatcatcccgtgcagccgtgtgggacacgtgttccggaagcagcacccctacacgttcccgggtggcagtggcactgtctttgcccgaaacacccgccgggcagcagaggtctggatggatgaatacaaaaatttctattatgcagcagtgccttctgctagaaacgttccttatggaaatattcagagcagattggagcttaggaagaaactcagctgcaagcctttcaaatggtaccttgaaaatgtctatccagagttaagggttccagaccatcaggatatagcttttggggccttgcagcagggaactaactgcctcgacactttgggacactttgctgatggtgtggttggagtttatgaatgtcacaatgctgggggaaaccaggaatgggccttgacgaaggagaagtcggtgaagcacatggatttgtgccttactgtggtggaccgggcaccgggctctcttataaagctgcagggctgccgagaaaatgacagcagacagaaatgggaacagatcgagggcaactccaagctgaggcacgtgggcagcaacctgtgcctggacagtcgcacggccaagagcgggggcctaagcgtggaggtgtgtggcccggccctttcgcagcagtggaagttcacgctcaacctgcagcagtaggagggtccgggaggccctgccgtcctgtctcctgcaccattgggtggagtctggtgatcacattattgattatgtttcttaaactttccgcgaaactaatatacctcagtattccatcatggtctgaaagtcaaacttcggcaaggcacggacgactgtgcagacacagcagcggcaagaagcgagaactgccctccccctcctctcggtgcagcccagccgggcccccttccccaggccggagcgcccctcttccttccagctttcacttctgccggctccgcaactgagtgacacccagcgacaaccgactggggagtggtagaagcaactgaacggatgcgtgcgagctgaggacagggcgggaggagggggcacacatgccccaggggagcgaggagaactcttgaaatctccattttcaatcccttcgaaatcacgtatggtttccacaaagccgagtcgtgtcacgtggcaggtttacgtcaatagtccctctctctgctcctccattcgcaagtgtcttcctgggccagactcccctccacctcatgtacttgctatattgaggatgaagttttctatggtgggacactaaatataaagctatatagagaaagaatgtacggtcagttccctatggtttctgtagatcatcgtcatcttgtatattccccacaaagccgttcgcagcttccgggagaaggggccagagcccggtggggccagtttctcacagagggaggaggtggcctttgtcccctggagcccgatcagccagttggtgctactgctgtggccagctggggggcttcctccagaccaccggcctcggccccggcatccctgttgggcgtcagcctgagagtccctactgtgcgtcagaatccaccttgcgtgctgtgcgtatctgtgaacctggagcggttacttattttgacagatatcactttgggtctttttacattaaatttcttttctctaaggaatataagacataccccatagctctgtgtgagccagcaataccgctgccccctggcgacagggcagaccaatgatgccaggcagctgtcacacgctagtattggcttcattgtgatctgagccctgcacgctgggccttcagaattaatggccagcagtgtcagggatgagcccgtcagccagggcacaggcctggctcacagtcctgcacacctgctggcctggggagctccagccaggcagcgagtcctgccccgcccgcagctccctcccacaccccgcctggccaagatgactgcttcagggggctttggggaaagaattaggaagggtcagaaccaaacaatacctgctcatttacactgaggattcagggcgggagacaggagccttggggtcctgttaaaccacagacagttatgaactgaaagtcataacggggagaggtgcctggcttctacctgggtgctcaggaatgttcctcgtcacccctgccactctgtggtcggtgccctgcttcctcctccactcctggccgccttctccagcgccgcacacacagatgctcagtctcagagaggctggcacggcctggcagtctgagaaaagcgtcagttaggcacacctgcaggcccctcggtgggacagcggcggccttggagttaggagccaccctgggaggttgtgccggtgccatgctcctccctgtgtcttgtatgaaaggggccactgtgtgtcttcctccccggcgggagccccacatgtgtgcactgtaggacagcggccccgaggtggaagcctggctggagggctgccctataggtcttctcttcccgcctcccctgccatgcaaccagatgtgttgtgagtgggcagcgtgcccccacgctggagtaactccgcacgcttctgtctttcacggtgggcgctcggggggagcctgaggaaaacccccttaggtacctgtgcgaggctgtggagtgcaggccagagcagggtgtgcgtagcccccagcacccaggttcttctgtcagaccctgtgacctgcgagctgctactactgtaaggagggaaatggatgaatctggctcgttttaaaatcacgttttctgacgaatcctttgccccttcacctttaccccgcccgcacccctaggccctctcagccttcctatcatcccacgtgtctacccagacccttgtgcggcccatgccctgggggcggcgtcctgtccctgagctgggaggcggctttggatggtccgggcgtcaagagcaggggtgggccggggaggggtcctttgcggtgagctatgtttacatgacacagtgtgccaaagtgacttactgcggttgcgttagtttctagtcatcaggactatctcaccctcccactcctgtttttaaaactcagaattctttcctaagagcccttcgagcaaagcgtgccgaagttagttgtcttctctgtgctggtcctttcttatgtcctcataaaagctcagatgatggtatctgtgagtatgttttgcaaattcaaaatatagtttggtaatttttttttccagttgatttttaaaaagaactgctgtacagagcttgtactttgtccattttatagatggaaaccatccttgaaaattgtttaacttaaataaagagaagatactttctagatacc

SEQ ID NO: 330712 - DNA, 3126 bp, Homo sapiens
tctatgttgtcccccgcgtatgggatatcgtcgaccagcgcctcgcagagttaagggttccagaccatcaggatatagcttttggggccttgcagcagggaactaactgcctcgacactttgggacactttgctgatggtgtggttggagtttatgaatgtcacaatgctgggggaaaccaggaatgggccttgacgaaggagaagtcggtgaagcacatggatttgtgccttactgtggtggaccgggcaccgggctctcttataaagctgcagggctgccgagaaaatgacagcagacagaaatgggaacagatcgagggcaactccaagctgaggcacgtgggcagcaacctgtgcctggacagtcgcacggccaagagcgggggcctaagcgtggaggtgtgtggcccggccctttcgcagcagtggaagttcacgctcaacctgcagcagtaggagggtccgggaggccctgccgtcctgtctcctgcaccattgggtggagtctggtgatcacattattgattatgtttcttaaactttccgcgaaactaatatacctcagtattccatcatggtctgaaagtcaaacttcggcaaggcacggacgactgtgcagacacagcagcggcaagaagcgagaactgccctccccctcctctcggtgcagcccagccgggcccccttccccaggccggagcgcccctcttccttccagctttcacttctgccggctccgcaactgagtgacacccagcgacaaccgactggggagtggtagaagcaactgaacggatgcgtgcgagctgaggacagggcgggaggagggggcacacatgccccaggggagcgaggagaactcttgaaatctccattttcaatcccttcgaaatcacgtatggtttccacaaagccgagtcgtgtcacgtggcaggtttacgtcaatagtccctctctctgctcctccattcgcaagtgtcttcctgggccagactcccctccacctcatgtacttgctatattgaggatgaagttttctatggtgggacactaaatataaagctatatagagaaagaatgtacggtcagttccctatggtttctgtagatcatcgtcatcttgtatattccccacaaagccgttcgcagcttccgggagaaggggccagagcccggtggggccagtttctcacagagggaggaggtggcctttgtcccctggagcccgatcagccagttggtgctactgctgtggccagctggggggcttcctccagaccaccggcctcggccccggcatccctgttgggcgtcagcctgagagtccctactgtgcgtcagaatccaccttgcgtgctgtgcgtatctgtgaacctggagcggttacttattttgacagatatcactttgggtctttttacattaaatttcttttctctaaggaatataagacataccccatagctctgtgtgagccagcaataccgctgccccctggcgacagggcagaccaatgatgccaggcagctgtcacacgctagtattggcttcattgtgatctgagccctgcacgctgggccttcagaattaatggccagcagtgtcagggatgagcccgtcagccagggcacaggcctggctcacagtcctgcacacctgctggcctggggagctccagccaggcagcgagtcctgccccgcccgcagctccctcccacaccccgcctggccaagatgactgcttcagggggctttggggaaagaattaggaagggtcagaaccaaacaatacctgctcatttacactgaggattcagggcgggagacaggagccttggggtcctgttaaaccacagacagttatgaactgaaagtcataacggggagaggtgcctggcttctacctgggtgctcaggaatgttcctcgtcacccctgccactctgtggtcggtgccctgcttcctcctccactcctggccgccttctccagcgccgcacacacagatgctcagtctcagagaggctggcacggcctggcagtctgagaaaagcgtcagttaggcacacctgcaggcccctcggtgggacagcggcggccttggagttaggagccaccctgggaggttgtgccggtgccatgctcctccctgtgtcttgtatgaaaggggccactgtgtgtcttcctccccggcgggagccccacatgtgtgcactgtaggacagcggccccgaggtggaagcctggctggagggctgccctataggtcttctcttcccgcctcccctgccatgcaaccagatgtgttgtgagtgggcagcgtgcccccacgctggagtaactccgcacgcttctgtctttcacggtgggcgctcggggggagcctgaggaaaacccccttaggtacctgtgcgaggctgtggagtgcaggccagagcagggtgtgcgtagcccccagcacccaggttcttctgtcagaccctgtgacctgcgagctgctactactgtaaggagggaaatggatgaatctggctcgttttaaaatcacgttttctgacgaatcctttgccccttcacctttaccccgcccgcacccctaggccctctcagccttcctatcatcccacgtgtctacccagacccttgtgcggcccatgccctgggggcggcgtcctgtccctgagctgggaggcggctttggatggtccgggcgtcaagagcaggggtgggccggggaggggtcctttgcggtgagctatgtttacatgacacagtgtgccaaagtgacttactgcggttgcgttagtttctagtcatcaggactatctcaccctcccactcctgtttttaaaactcagaattctttcctaagagcccttcgagcaaagcgtgccgaagttagttgtcttctctgtgctggtcctttcttatgtcctcataaaagctcagatgatggtatctgtgagtatgttttgcaaattcaaaatatagtttggtaatttttttttccagttgatttttaaaaagaactgctgtacagagcttgtactttgtccattttatagatggaaaccatccttgaaaattgtttaacttaaataaagagaagatactttctagatacc

SEQ ID NO: 330713 - DNA, 2551 bp, Homo sapiens
  misc_feature (12)..(12): n is a, c, g, or t
ggcaccgtgagntgtacgtgttgcatgatgcacagcgatgcgtgctaaagaaaagccgaagaaacgtgcgccgttcctccccctcctctcggtgcagcccagccgggcccccttccccaggccggagcgcccctcttccttccagctttcacttctgccggctccgcaactgagtgacacccagcgacaaccgactggggagtggtagaagcaactgaacggatgcgtgcgagctgaggacagggcgggaggagggggcacacatgccccaggggagcgaggagaactcttgaaatctccattttcaatcccttcgaaatcacgtatggtttccacaaagccgagtcgtgtcacgtggcaggtttacgtcaatagtccctctctctgctcctccattcgcaagtgtcttcctgggccagactcccctccacctcatgtacttgctatattgaggatgaagttttctatggtgggacactaaatataaagctatatagagaaagaatgtacggtcagttccctatggtttctgtagatcatcgtcatcttgtatattccccacaaagccgttcgcagcttccgggagaaggggccagagcccggtggggccagtttctcacagagggaggaggtggcctttgtcccctggagcccgatcagccagttggtgctactgctgtggccagctggggggcttcctccagaccaccggcctcggccccggcatccctgttgggcgtcagcctgagagtccctactgtgcgtcagaatccaccttgcgtgctgtgcgtatctgtgaacctggagcggttacttattttgacagatatcactttgggtctttttacattaaatttcttttctctaaggaatataagacataccccatagctctgtgtgagccagcaataccgctgccccctggcgacagggcagaccaatgatgccaggcagctgtcacacgctagtattggcttcattgtgatctgagccctgcacgctgggccttcagaattaatggccagcagtgtcagggatgagcccgtcagccagggcacaggcctggctcacagtcctgcacacctgctggcctggggagctccagccaggcagcgagtcctgccccgcccgcagctccctcccacaccccgcctggccaagatgactgcttcagggggctttggggaaagaattaggaagggtcagaaccaaacaatacctgctcatttacactgaggattcagggcgggagacaggagccttggggtcctgttaaaccacagacagttatgaactgaaagtcataacggggagaggtgcctggcttctacctgggtgctcaggaatgttcctcgtcacccctgccactctgtggtcggtgccctgcttcctcctccactcctggccgccttctccagcgccgcacacacagatgctcagtctcagagaggctggcacggcctggcagtctgagaaaagcgtcagttaggcacacctgcaggcccctcggtgggacagcggcggccttggagttaggagccaccctgggaggttgtgccggtgccatgctcctccctgtgtcttgtatgaaaggggccactgtgtgtcttcctccccggcgggagccccacatgtgtgcactgtaggacagcggccccgaggtggaagcctggctggagggctgccctataggtcttctcttcccgcctcccctgccatgcaaccagatgtgttgtgagtgggcagcgtgcccccacgctggagtaactccgcacgcttctgtctttcacggtgggcgctcggggggagcctgaggaaaacccccttaggtacctgtgcgaggctgtggagtgcaggccagagcagggtgtgcgtagcccccagcacccaggttcttctgtcagaccctgtgacctgcgagctgctactactgtaaggagggaaatggatgaatctggctcgttttaaaatcacgttttctgacgaatcctttgccccttcacctttaccccgcccgcacccctaggccctctcagccttcctatcatcccacgtgtctacccagacccttgtgcggcccatgccctgggggcggcgtcctgtccctgagctgggaggcggctttggatggtccgggcgtcaagagcaggggtgggccggggaggggtcctttgcggtgagctatgtttacatgacacagtgtgccaaagtgacttactgcggttgcgttagtttctagtcatcaggactatctcaccctcccactcctgtttttaaaactcagaattctttcctaagagcccttcgagcaaagcgtgccgaagttagttgtcttctctgtgctggtcctttcttatgtcctcataaaagctcagatgatggtatctgtgagtatgttttgcaaattcaaaatatagtttggtaatttttttttccagttgatttttaaaaagaactgctgtacagagcttgtactttgtccattttatagatggaaaccatccttgaaaattgtttaacttaaataaagagaagatactttctagatacc

SEQ ID NO: 330714 - DNA, 2710 bp, Homo sapiens
tgaaggaaaatttgtattatttcaattatttttatgtacagaaaactcaacagtgtacatttaacccagtttagtggcaagttctttagcctttgccttttcgagcttggcgatacgagccacagacttaggacccaggacattgccaccccagtgacggcggatctcatcgtatctgtcattgtaattggtcctgatagcttccaccagcttagccaaagcgcctttgtcttccgagttcacctgtgtgaaggcgacagtggtgcaggtcttcctgtggactagacgcccctcttccttccagctttcacttctgccggctccgcaactgagtgacacccagcgacaaccgactggggagtggtagaagcaactgaacggatgcgtgcgagctgaggacagggcgggaggagggggcacacatgccccaggggagcgaggagaactcttgaaatctccattttcaatcccttcgaaatcacgtatggtttccacaaagccgagtcgtgtcacgtggcaggtttacgtcaatagtccctctctctgctcctccattcgcaagtgtcttcctgggccagactcccctccacctcatgtacttgctatattgaggatgaagttttctatggtgggacactaaatataaagctatatagagaaagaatgtacggtcagttccctatggtttctgtagatcatcgtcatcttgtatattccccacaaagccgttcgcagcttccgggagaaggggccagagcccggtggggccagtttctcacagagggaggaggtggcctttgtcccctggagcccgatcagccagttggtgctactgctgtggccagctggggggcttcctccagaccaccggcctcggccccggcatccctgttgggcgtcagcctgagagtccctactgtgcgtcagaatccaccttgcgtgctgtgcgtatctgtgaacctggagcggttacttattttgacagatatcactttgggtctttttacattaaatttcttttctctaaggaatataagacataccccatagctctgtgtgagccagcaataccgctgccccctggcgacagggcagaccaatgatgccaggcagctgtcacacgctagtattggcttcattgtgatctgagccctgcacgctgggccttcagaattaatggccagcagtgtcagggatgagcccgtcagccagggcacaggcctggctcacagtcctgcacacctgctggcctggggagctccagccaggcagcgagtcctgccccgcccgcagctccctcccacaccccgcctggccaagatgactgcttcagggggctttggggaaagaattaggaagggtcagaaccaaacaatacctgctcatttacactgaggattcagggcgggagacaggagccttggggtcctgttaaaccacagacagttatgaactgaaagtcataacggggagaggtgcctggcttctacctgggtgctcaggaatgttcctcgtcacccctgccactctgtggtcggtgccctgcttcctcctccactcctggccgccttctccagcgccgcacacacagatgctcagtctcagagaggctggcacggcctggcagtctgagaaaagcgtcagttaggcacacctgcaggcccctcggtgggacagcggcggccttggagttaggagccaccctgggaggttgtgccggtgccatgctcctccctgtgtcttgtatgaaaggggccactgtgtgtcttcctccccggcgggagccccacatgtgtgcactgtaggacagcggccccgaggtggaagcctggctggagggctgccctataggtcttctcttcccgcctcccctgccatgcaaccagatgtgttgtgagtgggcagcgtgcccccacgctggagtaactccgcacgcttctgtctttcacggtgggcgctcggggggagcctgaggaaaacccccttaggtacctgtgcgaggctgtggagtgcaggccagagcagggtgtgcgtagcccccagcacccaggttcttctgtcagaccctgtgacctgcgagctgctactactgtaaggagggaaatggatgaatctggctcgttttaaaatcacgttttctgacgaatcctttgccccttcacctttaccccgcccgcacccctaggccctctcagccttcctatcatcccacgtgtctacccagacccttgtgcggcccatgccctgggggcggcgtcctgtccctgagctgggaggcggctttggatggtccgggcgtcaagagcaggggtgggccggggaggggtcctttgcggtgagctatgtttacatgacacagtgtgccaaagtgacttactgcggttgcgttagtttctagtcatcaggactatctcaccctcccactcctgtttttaaaactcagaattctttcctaagagcccttcgagcaaagcgtgccgaagttagttgtcttctctgtgctggtcctttcttatgtcctcataaaagctcagatgatggtatctgtgagtatgttttgcaaattcaaaatatagtttggtaatttttttttccagttgatttttaaaaagaactgctgtacagagcttgtactttgtccattttatagatggaaaccatccttgaaaattgtttaacttaaataaagagaagatactttctagatacc

SEQ ID NO: 330715 - DNA, 4982 bp, Homo sapiens
tccgctcctcccccggcccccaccgcgcccgcggccggcccaggcagcactcgcgagcagcggcggccccgccggcggccgagttgggagaatgcggcggcgctcgcggatgctgctctgcttcgccttcctgtgggtgctgggcatcgcctactacatgtactcggggggcggctctgcgctggccgggggcgcgggcggcggcgccggcaggaaggaggactggaatgaaattgaccccattaaaaagaaagaccttcatcacagcaatggagaagagaaagcacaaagcatggagaccctccctccagggaaagtacggtggccagactttaaccaggaagcttatgttggagggacgatggtccgctccgggcaggacccttacgcccgcaacaagttcaaccaggtggagagtgataagcttcgaatggacagagccatccctgacacccggcatgaccagtgtcagcggaagcagtggcgggtggatctgccggccaccagcgtggtgatcacgtttcacaatgaagccaggtcggccctactcaggaccgtggtcagcgtgcttaagaaaagcccgccccatctcataaaagaaatcatcttggtggatgactacagcaatgatcctgaggacggggctctcttggggaaaattgagaaagtgcgagttcttagaaatgatcgacgagaaggcctcatgcgctcacgggttcggggggccgatgctgcccaagccaaggtcctgaccttcctggacagtcactgcgagtgtaatgagcactggctggagcccctcctggaaagggtggcggaggacaggactcgggttgtgtcacccatcatcgatgtcattaatatggacaactttcagtatgtgggggcatctgctgacttgaagggcggttttgattggaacttggtattcaagtgggattacatgacgcctgagcagagaaggtcccggcaggggaacccagtcgcccctataaaaacccccatgattgctggtgggctgtttgtgatggataagttctattttgaagaactggggaagtacgacatgatgatggatgtgtggggaggagagaacctagagatctcgttccgcgtgtggcagtgtggtggcagcctggagatcatcccgtgcagccgtgtgggacacgtgttccggaagcagcacccctacacgttcccgggtggcagtggcactgtctttgcccgaaacacccgccgggcagcagaggtctggatggatgaatacaaaaatttctattatgcagcagtgccttctgctagaaacgttccttatggaaatattcagagcagattggagcttaggaagaaactcagctgcaagcctttcaaatggtaccttgaaaatgtctatccagagttaagggttccagaccatcaggatatagcttttggggccttgcagcagggaactaactgcctcgacactttgggacactttgctgatggtgtggttggagtttatgaatgtcacaatgctgggggaaaccaggaatgggccttgacgaaggagaagtcggtgaagcacatggatttgtgccttactgtggtggaccgggcaccgggctctcttataaagctgcagggctgccgagaaaatgacagcagacagaaatgggaacagatcgagggcaactccaagctgaggcacgtgggcagcaacctgtgcctggacagtcgcacggccaagagcgggggcctaagcgtggaggtgtgtggcccggccctttcgcagcagtggaagttcacgctcaacctgcagcagtaggagggtccgggaggccctgccgtcctgtctcctgcaccattgggtggagtctggtgatcacattattgattatgtttcttaaactttccgcgaaactaatatacctcagtattccatcatggtctgaaagtcaaacttcggcaaggcacggacgactgtgcagacacagcagcggcaagaagcgagaactgccctccccctcctctcggtgcagcccagccgggcccccttccccaggccggagcgcccctcttccttccagctttcacttctgccggctccgcaactgagtgacacccagcgacaaccgactggggagtggtagaagcaactgaacggatgcgtgcgagctgaggacagggcgggaggagggggcacacatgccccaggggagcgaggagaactcttgaaatctccattttcaatcccttcgaaatcacgtatggtttccacaaagccgagtcgtgtcacgtggcaggtttacgtcaatagtccctctctctgctcctccattcgcaagtgtcttcctgggccagactcccctccacctcatgtacttgctatattgaggatgaagttttctatggtgggacactaaatataaagctatatagagaaagaatgtacggtcagttccctatggtttctgtagatcatcgtcatcttgtatattccccacaaagccgttcgcagcttccgggagaaggggccagagcccggtggggccagtttctcacagagggaggaggtggcctttgtcccctggagcccgatcagccagttggtgctactgctgtggccagctggggggcttcctccagaccaccggcctcggccccggcatccctgttgggcgtcagcctgagagtccctactgtgcgtcagaatccaccttgcgtgctgtgcgtatctgtgaacctggagcggttacttattttgacagatatcactttgggtctttttacattaaatttcttttctctaaggaatataagacataccccatagctctgtgtgagccagcaataccgctgccccctggcgacagggcagaccaatgatgccaggcagctgtcacacgctagtattggcttcattgtgatctgagccctgcacgctgggccttcagaattaatggccagcagtgtcagggatgagcccgtcagccagggcacaggcctggctcacagtcctgcacacctgctggcctggggagctccagccaggcagcgagtcctgccccgcccgcagctccctcccacaccccgcctggccaagatgactgcttcagggggctttggggaaagaattaggaagggtcagaaccaaacaatacctgctcatttacactgaggattcagggcgggagacaggagccttggggtcctgttaaaccacagacagttatgaactgaaagtcataacggggagaggtgcctggcttctacctgggtgctcaggaatgttcctcgtcacccctgccactctgtggtcggtgccctgcttcctcctccactcctggccgccttctccagcgccgcacacacagatgctcagtctcagagaggctggcacggcctggcagtctgagaaaagcgtcagttaggcacacctgcaggcccctcggtgggacagcggcggccttggagttaggagccaccctgggaggttgtgccggtgccatgctcctccctgtgtcttgtatgaaaggggccactgtgtgtcttcctccccggcgggagccccacatgtgtgcactgtaggacagcggccccgaggtggaagcctggctggagggctgccctataggtcttctcttcccgcctcccctgccatgcaaccagatgtgttgtgagtgggcagcgtgcccccacgctggagtaactccgcacgcttctgtctttcacggtgggcgctcggggggagcctgaggaaaacccccttaggtacctgtgcgaggctgtggagtgcaggccagagcagggtgtgcgtagcccccagcacccaggttcttctgtcagaccctgtgacctgcgagctgctactactgtaaggagggaaatggatgaatctggctcgttttaaaatcacgttttctgacgaatcctttgccccttcacctttaccccgcccgcacccctaggccctctcagccttcctatcatcccacgtgtctacccagacccttgtgcggcccatgccctgggggcggcgtcctgtccctgagctgggaggcggctttggatggtccgggcgtcaagagcaggggtgggccggggaggggtcctttgcggtgagctatgtttacatgacacagtgtgccaaagtgacttactgcggttgcgttagtttctagtcatcaggactatctcaccctcccactcctgtttttaaaactcagaattctttcctaagagcccttcgagcaaagcgtgccgaagttagttgtcttctctgtgctggtcctttcttatgtcctcataaaagctcagatgatggtatctgtgagtatgttttgcaaattcaaaatatagtttggtaatttttttttccagttgatttttaaaaagaactgctgtacagagcttgtactttgtccattttatagatggaaaccatccttgaaaattgtttaacttaaataaagagaagatactttctagataccaaaaaaaaaaaaaaaaaaaaaaaaaaaaaaaaaaaaaaaaaaaaaaaaaaaaaaaaaaaaaaaaaaaaaaagaaaaaaaaaaaaaaaaaaaaaaaaaaaaaagcaaagaaaaagcaaagaaacaaagaggcctggcgtgacagaacgaagacacaacgcggaagccgcgacaagacaagagaagaagacgacgaaagaaggacggagggacaaagacaggtcacgcagtataaggagtacgccgagaagcaagggggggacgagacccagacaaagcaaggacaggaacaaagagacgagaggagaggacggagcggtgaggagacaacaacaccaacgaagcagaccggagaacggcgcgggagaggaaacagaaggaagacaaagagaaaaagaggaaagaggacgagggatagaagagcgaaaaagcacgacagaccgagcaaagcaacgcacggagaaggaaaagaagagaggcagagacagaagcaacacagcgcgcgagag

SEQ ID NO: 330716 - DNA, 2427 bp, Homo sapiens
tccgctcctcccccggcccccaccgcgcccgcggccggcccaggcagcactcgcgagcagcggcggccccgccggcggccgagttgggagaatgcggcggcgctcgcggatgctgctctgcttcgccttcctgtgggtgctgggcatcgcctactacatgtactcggggggcggctctgcgctggccgggggcgcgggcggcggcgccggcaggaaggaggactggaatgaaattgaccccattaaaaagaaagaccttcatcacagcaatggagaagagaaagcacaaagcatggagaccctccctccagggaaagtacggtggccagactttaaccaggaagcttatgttggagggacgatggtccgctccgggcaggacccttacgcccgcaacaagttcaaccaggtggagagtgataagcttcgaatggacagagccatccctgacacccggcatgaccagtgtcagcggaagcagtggcgggtggatctgccggccaccagcgtggtgatcacgtttcacaatgaagccaggtcggccctactcaggaccgtggtcagcgtgcttaagaaaagcccgccccatctcataaaagaaatcatcttggtggatgactacagcaatgatcctgaggacggggctctcttggggaaaattgagaaagtgcgagttcttagaaatgatcgacgagaaggcctcatgcgctcacgggttcggggggccgatgctgcccaagccaaggtcctgaccttcctggacagtcactgcgagtgtaatgagcactggctggagcccctcctggaaagggtggcggaggacaggactcgggttgtgtcacccatcatcgatgtcattaatatggacaactttcagtatgtgggggcatctgctgacttgaagggcggttttgattggaacttggtattcaagtgggattacatgacgcctgagcagagaaggtcccggcaggggaacccagtcgcccctataaaaacccccatgattgctggtgggctgtttgtgatggataagttctattttgaagaactggggaagtacgacatgatgatggatgtgtggggaggagagaacctagagatctcgttccgcgtgtggcagtgtggtggcagcctggagatcatcccgtgcagccgtgtgggacacgtgttccggaagcagcacccctacacgttcccgggtggcagtggcactgtctttgcccgaaacacccgccgggcagcagaggtctggatggatgaatacaaaaatttctattatgcagcagtgccttctgctagaaacgttccttatggaaatattcagagcagattggagcttaggaagaaactcagctgcaagcctttcaaatggtaccttgaaaatgtctatccagagttaagggttccagaccatcaggatatagcttttggggccttgcagcagggaactaactgcctcgacactttgggacactttgctgatggtgtggttggagtttatgaatgtcacaatgctgggggaaaccaggaatgggccttgacgaaggagaagtcggtgaagcacatggatttgtgccttactgtggtggaccgggcaccgggctctcttataaagctgcagggctgccgagaaaatgacagcagacagaaatgggaacagatcgagggcaactccaagctgaggcacgtgggcagcaacctgtgcctggacagtcgcacggccaagagcgggggcctaagcgtggaggtgtgtggcccggccctttcgcagcagtggaagttcacgctcaacctgcagcagtaggagggtccgggaggccctgccgtcctgtctcctgcaccattgggtggagtctggtgatcacattattgattatgtttcttaaactttccgcgaaactaatatacctcagtattccatcatggtctgaaagtcaaacttcggcaaggcacggacgactgtgcagacacagcagcggcaagaagcgagaactgccctccccctcctctcggtgcagcccagccgggcccccttccccaggccggagcgcccctcttccttccagctttcacttctgccggctccgcaactgagtgacacccagcgacaaccgactggggagtggtagaagcaactgaacggatgcgtgcgagctgaggacagggcgggaggagggggcacacatgccccaggggagcgaggagaactcttgaaatctccattttcaatcccttcgaaatcacgtatggtttccacaaagccgagtcgtgtcacgtggcaggtttacgtcaatagtccctctctctgctcctccattcgcaagtgtcttcctgggccagactcccctccacctcatgtacttgctatattgaggatgaagttttctatggtgggacactaaatataaagctatatagagaaag

SEQ ID NO: 330717 - DNA, 2056 bp, Homo sapiens
tccgctcctcccccggcccccaccgcgcccgcggccggcccaggcagcactcgcgagcagcggcggccccgccggcggccgagttgggagaatgcggcggcgctcgcggatgctgctctgcttcgccttcctgtgggtgctgggcatcgcctactacatgtactcggggggcggctctgcgctggccgggggcgcgggcggcggcgccggcaggaaggaggactggaatgaaattgaccccattaaaaagaaagaccttcatcacagcaatggagaagagaaagcacaaagcatggagaccctccctccagggaaagtacggtggccagactttaaccaggaagcttatgttggagggacgatggtccgctccgggcaggacccttacgcccgcaacaagttcaaccaggtggagagtgataagcttcgaatggacagagccatccctgacacccggcatgaccagtgtcagcggaagcagtggcgggtggatctgccggccaccagcgtggtgatcacgtttcacaatgaagccaggtcggccctactcaggaccgtggtcagcgtgcttaagaaaagcccgccccatctcataaaagaaatcatcttggtggatgactacagcaatgatcctgaggacggggctctcttggggaaaattgagaaagtgcgagttcttagaaatgatcgacgagaaggcctcatgcgctcacgggttcggggggccgatgctgcccaagccaaggtcctgaccttcctggacagtcactgcgagtgtaatgagcactggctggagcccctcctggaaagggtggcggaggacaggactcgggttgtgtcacccatcatcgatgtcattaatatggacaactttcagtatgtgggggcatctgctgacttgaagggcggttttgattggaacttggtattcaagtgggattacatgacgcctgagcagagaaggtcccggcaggggaacccagtcgcccctataaaaacccccatgattgctggtgggctgtttgtgatggataagttctattttgaagaactggggaagtacgacatgatgatggatgtgtggggaggagagaacctagagatctcgttccgcgtgtggcagtgtggtggcagcctggagatcatcccgtgcagccgtgtgggacacgtgttccggaagcagcacccctacacgttcccgggtggcagtggcactgtctttgcccgaaacacccgccgggcagcagaggtctggatggatgaatacaaaaatttctattatgcagcagtgccttctgctagaaacgttccttatggaaatattcagagcagattggagcttaggaagaaactcagctgcaagcctttcaaatggtaccttgaaaatgtctatccagagttaagggttccagaccatcaggatatagcttttggggccttgcagcagggaactaactgcctcgacactttgggacactttgctgatggtgtggttggagtttatgaatgtcacaatgctgggggaaaccaggaatgggccttgacgaaggagaagtcggtgaagcacatggatttgtgccttactgtggtggaccgggcaccgggctctcttataaagctgcagggctgccgagaaaatgacagcagacagaaatgggaacagatcgagggcaactccaagctgaggcacgtgggcagcaacctgtgcctggacagtcgcaactgagtgacacccagcgacaaccgactggggagtggtagaagcaactgaacggatgcgtgcgagctgaggacagggcgggaggagggggcacacatgccccaggggagcgaggagaactcttgaaatctccattttcaatcccttcgaaatcacgtatggtttccacaaagccgagtcgtgtcacgtggcaggtttacgtcaatagtccctctctctgctcctccattcgcaagtgtcttcctgggccagactcccctccacctcatgtacttgctatattgaggatgaagttttctatggtgggacactaaatataaagctatatagagaaag

SEQ ID NO: 330718 - DNA, 284 bp, Homo sapiens
ccaaagtgctgggattacaggcatgagccaccgtggccggccactaatttcttattatgttacaactcttcttccttctacttgttattccagttctgccatttcccagcattatagcattgggaaaattacttcccttatttgagttcctcatttgcaaaatatggttaacaatttctaaggctatgttggatattatagtcaatataaataataaaagtgcttggtataggacctggtataaaatatcaggcagtaaatgttaaaggggttattataaaagg

SEQ ID NO: 330719 - DNA, 1426 bp, Homo sapiens
agagatggggtttcaccgtgttggccaggctgctcttgaactcctgacctcaggtgatccccacctcagcctcccaaagtgctgggattacagacatgagccaccgcacccagaacctaaggcccaagttctactttttggtgttcatttctctgcttccttttgatcgtggtgtctgatcatcttggaattcacattactcaaggcaaaataggaagccatctgcgtgatgtcacattccgaagaagtcagaaggttcggcgagttggagctttactcttgttgcccaggctagagtgcagtggtgcgatcttggctcattgcaagctccgcttcctgggtttaagctattctcctgccttggcctcccaagtagctgggattacaggcatgtgccgtcactcctggctaattttgtatttttagtagagatgcaatttcaccatgttggtcaggctggtctcgaactcctgacctcaagtgatctggccgcctcagcctcccaaagtgctgggattacaggcttgagaccccatgtctggccccttctgtggggtcttgattgagccccttcacttggagtctgacttcattacctcgtctgaaacaaggtgcctccaagctttgggttgatttccagaatcttgttgggttaaacataagtagaagtttgatcataaaggatgttattaagccggataggtaagcacggtgacaatggcaatagaaatctaatggaaaacgattgaatgacaactacaccaaagtttcatggatgaaactcaccccagaaacttagtgttcaaatcagagtgatacacaattcaaaatgtgattttaaacttctggaaatatgtgtgtttgtgaagatccaaatccaattcagcaacctccatcaggcagaaaccttctgcaatcctcacatgaggaactggttcacagtgtacacagcatggagccattagtgacgttatccaaaggatgagacaagacaaaagttactgtctaataaaaggaaaattaggaacaggaatgctctttaaactcaggaagatcttttggggtgtcaaactggacagcacagaatcattagaaaaattagcttggcgtgagaagagacattgaggtcttctctgtaaaatttacttagatacttgtgaataggactgaaatttatattttgggcactctttacctcagattcagagttcttaggattatttaaaattcatttgctggatgttttcaagtataaacaataagaaaactgcaacttcaacttaaaaggcactgctgtatttgcaccctatattttgacctgtcgttaggtactgttgaatatttttatctgtaagcatttatgaagtgcaaaataaacatgttattatatagaaagcgtctgctgcttagttttaatcaccagcta

SEQ ID NO: 330720 - DNA, 1391 bp, Homo sapiens
agagatggggtttcaccgtgttggccaggctgctcttgaactcctgacctcaggtgatccccacctcagcctcccaaagtgctgggattacagacatgagccaccgcacccagaacctaaggcccaagttctactttttggtgttcatttctctgcttccttttgatcgtggtgtctgatcatcttggaattcacattactcaaggcaaaataggaagccatctgcgtgatgtcacattccgaagaagtcagaaggttcggcgagttggagctttactcttgttgcccaggctagagtgcagtggtgcgatcttggctcattgcaagctccgcttcctgggtttaagctattctcctgccttggcctcccaagtagctgggattacaggcatgtgccgtcactcctggctaattttgtatttttagtagagatgcaatttcaccatgttggtcaggctggtctcgaactcctgacctcaagtgatctggccgcctcagcctcccaaagtgctgggattacaggcttgagaccccatgtctggccccttctgtggggtcttgattgagccccttcacttggagtctgacttcattacctcgtctgaaacaaggtgcctccaagctttgggttgatttccagaatcttgttgggttaaacataagtagaagtttgatcataaaggatgttattaagccggataggtaagcacggtgacaatggcaatagaaatctaatggaaaacgattgaatgacaactacaccaaagtttcatggatgaaactcaccccagaaacttagtgttcaaatcagagtgatacacaattcaaaatgtgattttaaacttctggaaatatgtgtgtttgtgaagatccaaatccaattcagcaacctccatcaggcagaaaccttctgcaatcctcacatgaggaactggttcacagtgtacacagcatggagccattagtgacgttatccaaaggatgagacaagacaaaagttactgtctaataaaaggaaaattaggaacaggaatgctctttaaactcaggaagatcttttggggtgtcaaactggacagcacagaatcattagaaaaattagcttggcgtgagaagagacattgaggtcttctctgtaaaatttacttagatacttgtgaataggactgaaatttatattttgggcactctttacctcagattcagagttcttaggattatttaaaattcatttgctggatgttttcaagtataaacaataagaaaactgcaacttcaacttaaaaggcactgctgtatttgcaccctatattttgacctgtcgttaggtactgttgaatatttttatctgtaagcatttatgaagtgcaaaataaacatgttattatata

SEQ ID NO: 330721 - DNA, 320 bp, Homo sapiens
ttgtattgagtctagctaagaccagtttttttacttactatgatttttaacttaaacacatttcaaaagaaaactttgtatcattatcaccattatcacttaccatttatggaaagcatcacaaaagataaatatggatctcctaaaactaggggaatcccattgggattctttctgttgtttatttctgttgtcctggtgtaattattaataacattgttttgactcacaaaatgtcccagtctagacaatcaatgatgtgatcaccctacctaaaatgatttgcgtacccccaggggtgcacataccatggggaaaca

SEQ ID NO: 330722 - DNA, 524 bp, Homo sapiens
tgcatgtatgtggatttggaagaatatacagcaaagtataacagcaaataacaatgctttggtgttagaattagtggtgacttttattttcgcctattgcacatctatgttttctaatttttccaattccttcattcatgtttattcattcattcaatagattgtgtgagtgtggctgacactgcctatcccctatagtacaatgggcagtgataacagaaaggtctctgcctttgtggagacaggaccacatcaggccacaaatgtgactctgagactgggagggtccctgcgcaggctccgggggtgctgagctctggagatggtaacctgggtcacgaggaactggaaggaatcccaggtagcagatgcagcacaggccaaggcctgggaggggcagccagggagcctgaggaactggataaggaggccttcccagaaagccactggaaaggtgaaggcatgaagacaggcatgatctgttttatactagacaaagatcacaccacttgccacgtagagaa

SEQ ID NO: 330723 - DNA, 293 bp, Homo sapiens
tcagcatggtgtgactaagcgtgacctgctgtaggtgttcagtactcaaggcttattaaatcctagtgtgtgactgtctgttaagcagggcttgcttgtaaacagttgatactcagttcataggaataagtatctgtaggctttaatttgatgacataaatctcagagggcttgcttggttttgagtttcaaataacaatttaaatgtcaccactaacatgtgagtgtctttgtaactcttgggacagtggaggtgaatttcaacatagctgttgtgtgatggaggaaaaact

SEQ ID NO: 330724 - DNA, 346 bp, Homo sapiens
tccccctgcgctctggtattaggcctggtccctggctctgaacttaggcctggctctgaacttaggcctggctctcctggctctgaacttaggcctggctctgaacttaggcatgggaccgacttacctttactgcagttctctcagcaactggcttttcccatttcctcagaactatccattttcacattttcttttttttgtttttgttttttgtttggttttgttttgtttttgttttttggagacggagttttgctctgtcacccaggctggagtgcagtggcatgatctgggctcactgcaacctccgcctcccgggttcaagcgattctcctgcctcagc

SEQ ID NO: 330725 - DNA, 5472 bp, Homo sapiens
  misc_feature (164)..(164): n is a, c, g, or t
  misc_feature (210)..(210): n is a, c, g, or t
gcggccgcggcgggagcggcggcgcactcggggggaagcaggccccactagacgggccgcgccgacgggctccgcgcactcgcagcccggggcgcccccacccccagcgcccgccgccgcgggcagggccggcccggagcgcggggggcggccggggagcgcgngccgggggcgcccgccgaagctcgctgctccgggtcggggtcgggnccggggccggccgcgcgccgcctttgacgcatcggagcgcggctcctgcaggatggagggctccgcgccgccagcggagttgtttgtgcgcaggcggctcgcggggctgggagcgctcaaggtctgaacttccctccggagccgcagctggaggaggcgagcgcgcgaggaggagaagccgcgcggcgcggaggccaccctcggggcgagaggcgcggaaggcgagcgagcaaagcggtcccggagccacggcggccacgcggcggggacccccgggcgttctaggtactggtgaccccggccggggcaggccccgggactcgacaacatggcttccccgccccaccagcagctgctgcatcaccacagcaccgaggtgagctgcgactccagcggggacagcaacagcgtgcgcgtcaagatcaaccccaagcagctgtcctccaacagccaccccaagcactgcaaatacagcatctcctctagctgcagcagctctggggactccgggggcgtcccccggcgagtgggcggcggaggccggctgcgcaggcagaagaagctgccccagctgttcgagagggcctccagccgctggtgggaccccaagttcgactcggtgaacctggaggaggcctgcctggagcgctgcttcccgcagacccagcgccggttccggtatgcgctcttctacatcggcttcgcctgccttctgtggagcatctattttgcggtccacatgagatccagactgatcgtcatggtcgcccccgcgctgtgcttcctcctggtgtgtgtgggcttctttctgtttaccttcaccaagctgtacgcccggcattacgcgtggacctcgctggctctcaccctgctggtgttcgccctgaccctggctgcgcagttccaggtcttgacgcctgtctcaggacgcggcgacagctccaaccttacggccacagcccggcccacagatacttgcttatctcaagtggggagcttctccatgtgcatcgaagtgctctttttgctctataccgtcatgcacttacctttgtacctgagtttgtgtctgggggtggcctactctgtccttttcgagacctttggctaccatttccgggatgaagcctgcttcccctcgcccggagccggggccctgcactgggagctgctgagcagggggctgctccacggctgcatccacgccatcggggtccacctgttcgtcatgtcccaggtgaggtccaggagcaccttcctcaaggtggggcaatccattatgcacgggaaggacctggaagtggaaaaagccctcaaagagaggatgattcattccgtgatgccaagaatcatagccgatgacttaatgaagcagggagatgaggagagtgagaattctgtcaagaggcatgccacctcgagccccaagaacaggaagaaaaagtcttccatccaaaaagctcctatagccttccgcccttttaagatgcagcagatcgaagaagtcagtattttatttgcagatatcgtgggcttcaccaagatgagtgccaacaagtctgcccacgccctggtgggtctcctgaacgatctgttcggtcgcttcgaccgcctgtgtgaggagaccaagtgtgagaaaatcagcaccctgggagactgttactactgcgtggcgggctgtcccgagccccgggccgaccatgcctactgctgcatcgagatgggcctgggcatgatcaaggccatcgagcagttctgccaggagaagaaggagatggtgaacatgagagtcggggtgcacacgggcaccgtcctttgcggcatcctgggcatgaggaggtttaaatttgacgtgtggtccaacgatgtgaacctggccaatctcatggagcagctgggagtggccggcaaagttcacatttctgaggccaccgcaaaatacttagatgaccggtacgaaatggaagatgggaaagttattgaacggctgggccagagcgtggttgctgaccagttgaaaggtttgaagacatacctgatatcgggtcagagagccaaggagtctcgctgcagctgtgcagaggccttgctttctggctttgaggtcattgacggctcacaggtgtcctcaggccctaggggacaggggacagcgtcatcagggaatgtcagtgacttggcgcagactgtcaaaacctttgataaccttaagacctgcccttcgtgcggaatcacatttgctcccaaatctgaagccggcgccgagggaggagcacctcaaaacggctgccaagacgagcataaaaacagcaccaaggcttctggaggacctaatcccaaaactcagaacgggctcctcagccctccccaagaggagaagctcaccaacagtcagacttctctgtgtgagatcttgcaggagaagggaaggtgggcaggggtgagcctggaccagtcggctctccttccgctgaggttcaagaacatccgggagaaaacggacgcccactttgtggacgttatcaaagaagacagcctgatgaaagattacttttttaagccgcccattaatcagttcagcctgaacttcctggatcaggagctggagcgatcctacaggaccagctatcaggaagaggtcataaagaactcccccgtgaagacgtttgctagtcccaccttcagctccctcctggatgtgtttctgtcgaccacagtgtttctgacgctgtccaccacctgcttcctgaagtacgaggcggccaccgtgcctcccccgcccgccgccctggcggtcttcagtgcagccctgctgctggaggtgctgtccctcgcggtgtccatcaggatggtgttcttcctggaggacgtcatggcctgcaccaagcgcctgctggagtggatcgccggctggctaccacgtcactgcatcggggccatcctggtgtcgcttcccgcactggccgtctactcccatgtcacctccgaatatgagaccaacatacacttcccagtgttcacaggctcggccgcgctgattgccgtcgtgcactactgtaacttctgccagctcagctcctggatgaggtcctccctcgccaccgtcgtgggggccgggccgctgctcctgctctacgtctccctgtgcccagacagttctgtattaacttcgccccttgacgcagtacagaatttcagttccgagaggaacccgtgcaatagttcggtgccgcgtgacctccggcggcccgccagcctcatcggccaggaggtggttctcgtcttctttctcctgctcttgttggtctggttcctgaatcgcgaatttgaagtcagctaccgcctccactaccacggagacgtggaagcggatcttcaccgcaccaagatccagagcatgcgggaccaggcagactggctgctgaggaacatcatcccctaccacgtggctgagcagctgaaggtgtcccagacctactccaagaaccacgacagcggaggggtgatcttcgccagcatcgtcaacttcagcgagttctacgaggagaactacgagggcggcaaggagtgctaccgggtcctcaacgagctcatcggggactttgacgagctcctaagcaagccggactacagcagcatcgagaagatcaagaccatcggagccacgtacatggcggcgtcagggctgaacaccgcgcaggcccaggacggcagccacccgcaggagcacctgcagatcctgttcgagttcgccaaggagatgatgcgcgtggtggacgacttcaacaacaacatgctgtggttcaacttcaagctccgcgtcggcttcaaccatgggcccctcacggccggggtcatcggcaccaccaagctgctgtacgacatctggggagacaccgtcaacatcgccagcaggatggacaccaccggcgtggagtgccgcatccaggtgagcgaagagagctaccgcgtcttgagcaagatgggctatgacttcgactacagagggaccgtgaatgtcaaggggaaaggccagatgaagacctacctgtacccaaagtgcacggatcacagggtcatcccacagcaccagctgtccatctccccagacatccgcgtccaggtggatggcagcatcggacggtctcccacagacgagattgccaacctggtgccttctgtccagtatgtggacaagacatctctgggttctgacagcagcacgcaggccaaggatgcccacctgtcccccaagagaccgtggaaggagcccgtcaaagccgaagaaaggggtcgatttggcaaagccatagagaaagacgactgtgacgaaacaggaatagaagaagccaacgaactcaccaagctcaacgtttcaaagagtgtgtgaggcggcgcccacccgctgcccgaggtgctctgtttgtcgaaacacagtaatatttgtatttggctgttgtgctttccaagcgccacagttgccctccccggacgtggtgttatgtggtcatttcagccctaacttctgtgtggatcacagttattcagggttcattttcatccattcttccctttcgctcccttccctggaaaccccgctgcctctgggtcatccgttcagcacgtggtggagaacaagtgccttcagggctggcctcggcctcgagtctcgggacagaggccgccagtggagatcatggctttgggtattatttgacttttagaacaaaagctgtggttaagatctcatttttattgctttttcccacgtcccacgagacactattttcggttctctggctaataccctgtttttgagtttattttgtttctgtctatgtcacagtgtccccctacgacccgacctctctatgtaagcacacatgcgcacacacacttgcattcatgaatctgatataaagtgccagtaatccgccaagagggggtgcgaagggggcatgtcacgacagctccgccaccccccattgcccacccgcactttcccgagcaccgcgccccgtgggctgtgggtgagccgcgctccctgcactgagcgggtttaggggctcgcccacatgcatgcaggccaagacagcaaatgccagccgggcacgacgcccgtgtgcccaggcctcgggggtctcagagccgcctctcacccccgaccctccacccaggggtctccccgtcgggagtggaggcgttggtcctggaagctgactcatcggagagggaaataccaaataaacatccgaggttgca

SEQ ID NO: 330726 - DNA, 7779 bp, Homo sapiens
  misc_feature (164)..(164): n is a, c, g, or t
  misc_feature (210)..(210): n is a, c, g, or t
gcggccgcggcgggagcggcggcgcactcggggggaagcaggccccactagacgggccgcgccgacgggctccgcgcactcgcagcccggggcgcccccacccccagcgcccgccgccgcgggcagggccggcccggagcgcggggggcggccggggagcgcgngccgggggcgcccgccgaagctcgctgctccgggtcggggtcgggnccggggccggccgcgcgccgcctttgacgcatcggagcgcggctcctgcaggatggagggctccgcgccgccagcggagttgtttgtgcgcaggcggctcgcggggctgggagcgctcaaggtctgaacttccctccggagccgcagctggaggaggcgagcgcgcgaggaggagaagccgcgcggcgcggaggccaccctcggggcgagaggcgcggaaggcgagcgagcaaagcggtcccggagccacggcggccacgcggcggggacccccgggcgttctaggtactggtgaccccggccggggcaggccccgggactcgacaacatggcttccccgccccaccagcagctgctgcatcaccacagcaccgaggtgagctgcgactccagcggggacagcaacagcgtgcgcgtcaagatcaaccccaagcagctgtcctccaacagccaccccaagcactgcaaatacagcatctcctctagctgcagcagctctggggactccgggggcgtcccccggcgagtgggcggcggaggccggctgcgcaggcagaagaagctgccccagctgttcgagagggcctccagccgctggtgggaccccaagttcgactcggtgaacctggaggaggcctgcctggagcgctgcttcccgcagacccagcgccggttccggtatgcgctcttctacatcggcttcgcctgccttctgtggagcatctattttgcggtccacatgagatccagactgatcgtcatggtcgcccccgcgctgtgcttcctcctggtgtgtgtgggcttctttctgtttaccttcaccaagctgtacgcccggcattacgcgtggacctcgctggctctcaccctgctggtgttcgccctgaccctggctgcgcagttccaggtcttgacgcctgtctcaggacgcggcgacagctccaaccttacggccacagcccggcccacagatacttgcttatctcaagtggggagcttctccatgtgcatcgaagtgctctttttgctctataccgtcatgcacttacctttgtacctgagtttgtgtctgggggtggcctactctgtccttttcgagacctttggctaccatttccgggatgaagcctgcttcccctcgcccggagccggggccctgcactgggagctgctgagcagggggctgctccacggctgcatccacgccatcggggtccacctgttcgtcatgtcccaggtgaggtccaggagcaccttcctcaaggtggggcaatccattatgcacgggaaggacctggaagtggaaaaagccctcaaagagaggatgattcattccgtgatgccaagaatcatagccgatgacttaatgaagcagggagatgaggagagtgagaattctgtcaagaggcatgccacctcgagccccaagaacaggaagaaaaagtcttccatccaaaaagctcctatagccttccgcccttttaagatgcagcagatcgaagaagtcagtattttatttgcagatatcgtgggcttcaccaagatgagtgccaacaagtctgcccacgccctggtgggtctcctgaacgatctgttcggtcgcttcgaccgcctgtgtgaggagaccaagtgtgagaaaatcagcaccctgggagactgttactactgcgtggcgggctgtcccgagccccgggccgaccatgcctactgctgcatcgagatgggcctgggcatgatcaaggccatcgagcagttctgccaggagaagaaggagatggtgaacatgagagtcggggtgcacacgggcaccgtcctttgcggcatcctgggcatgaggaggtttaaatttgacgtgtggtccaacgatgtgaacctggccaatctcatggagcagctgggagtggccggcaaagttcacatttctgaggccaccgcaaaatacttagatgaccggtacgaaatggaagatgggaaagttattgaacggctgggccagagcgtggttgctgaccagttgaaaggtttgaagacatacctgatatcgggtcagagagccaaggagtctcgctgcagctgtgcagaggccttgctttctggctttgaggtcattgacggctcacaggtgtcctcaggccctaggggacaggggacagcgtcatcagggaatgtcagtgacttggcgcagactgtcaaaacctttgataaccttaagacctgcccttcgtgcggaatcacatttgctcccaaatctgaagccggcgccgagggaggagcacctcaaaacggctgccaagacgagcataaaaacagcaccaaggtaacaagctcatggctgttgttcctgtcagttcctctcctggcgcatccacccaaggcttctggaggacctaatcccaaaactcagaacgggctcctcagccctccccaagaggagaagctcaccaacagtcagacttctctgtgtgagatcttgcaggagaagggaaggtgggcaggggtgagcctggaccagtcggctctccttccgctgaggttcaagaacatccgggagaaaacggacgcccactttgtggacgttatcaaagaagacagcctgatgaaagattacttttttaagccgcccattaatcagttcagcctgaacttcctggatcaggagctggagcgatcctacaggaccagctatcaggaagaggtcataaagaactcccccgtgaagacgtttgctagtcccaccttcagctccctcctggatgtgtttctgtcgaccacagtgtttctgacgctgtccaccacctgcttcctgaagtacgaggcggccaccgtgcctcccccgcccgccgccctggcggtcttcagtgcagccctgctgctggaggtgctgtccctcgcggtgtccatcaggatggtgttcttcctggaggacgtcatggcctgcaccaagcgcctgctggagtggatcgccggctggctaccacgtcactgcatcggggccatcctggtgtcgcttcccgcactggccgtctactcccatgtcacctccgaatatgagaccaacatacacttcccagtgttcacaggctcggccgcgctgattgccgtcgtgcactactgtaacttctgccagctcagctcctggatgaggtcctccctcgccaccgtcgtgggggccgggccgctgctcctgctctacgtctccctgtgcccagacagttctgtattaacttcgccccttgacgcagtacagaatttcagttccgagaggaacccgtgcaatagttcggtgccgcgtgacctccggcggcccgccagcctcatcggccaggaggtggttctcgtcttctttctcctgctcttgttggtctggttcctgaatcgcgaatttgaagtcagctaccgcctccactaccacggagacgtggaagcggatcttcaccgcaccaagatccagagcatgcgggaccaggcagactggctgctgaggaacatcatcccctaccacgtggctgagcagctgaaggtgtcccagacctactccaagaaccacgacagcggaggggtgatcttcgccagcatcgtcaacttcagcgagttctacgaggagaactacgagggcggcaaggagtgctaccgggtcctcaacgagctcatcggggactttgacgagctcctaagcaagccggactacagcagcatcgagaagatcaagaccatcggagccacgtacatggcggcgtcagggctgaacaccgcgcaggcccaggacggcagccacccgcaggagcacctgcagatcctgttcgagttcgccaaggagatgatgcgcgtggtggacgacttcaacaacaacatgctgtggttcaacttcaagctccgcgtcggcttcaaccatgggcccctcacggccggggtcatcggcaccaccaagctgctgtacgacatctggggagacaccgtcaacatcgccagcaggatggacaccaccggcgtggagtgccgcatccaggtgagcgaagagagctaccgcgtcttgagcaagatgggctatgacttcgactacagagggaccgtgaatgtcaaggggaaaggccagatgaagacctacctgtacccaaagtgcacggatcacagggtcatcccacagcaccagctgtccatctccccagacatccgcgtccaggtggatggcagcatcggacggtctcccacagacgagattgccaacctggtgccttctgtccagtatgtggacaagacatctctgggttctgacagcagcacgcaggccaaggatgcccacctgtcccccaagagaccgtggaaggagcccgtcaaagccgaagaaaggggtcgatttggcaaagccatagagaaagacgactgtgacgaaacaggaatagaagaagccaacgaactcaccaagctcaacgtttcaaagagtgtgtgaggcggcgcccacccgctgcccgaggtgctctgtttgtcgaaacacagtaatatttgtatttggctgttgtgctttccaagcgccacagttgccctccccggacgtggtgttatgtggtcatttcagccctaacttctgtgtggatcacagttattcagggttcattttcatccattcttccctttcgctcccttccctggaaaccccgctgcctctgggtcatccgttcagcacgtggtggagaacaagtgccttcagggctggcctcggcctcgagtctcgggacagaggccgccagtggagatcatggctttgggtattatttgacttttagaacaaaagctgtggttaagatctcatttttattgctttttcccacgtcccacgagacactattttcggttctctggctaataccctgtttttgagtttattttgtttctgtctatgtcacagtgtccccctacgacccgacctctctatgtaagcacacatgcgcacacacacttgcattcatgaatctgatataaagtgccagtaatccgccaagagggggtgcgaagggggcatgtcacgacagctccgccaccccccattgcccacccgcactttcccgagcaccgcgccccgtgggctgtgggtgagccgcgctccctgcactgagcgggtttaggggctcgcccacatgcatgcaggccaagacagcaaatgccagccgggcacgacgcccgtgtgcccaggcctcgggggtctcagagccgcctctcacccccgaccctccacccaggggtctccccgtcgggagtggaggcgttggtcctggaagctgactcatcggagagggaaataccaaataaacatccgaggttgcatttatttatttatttacccggaagcatgtgcgctcccgggaggggtgctgggtcctcagggtggggggtcatagccacaggggagggcagttcccaggaaggtaaccagatgtctcttttgtgttttggccacctggggccgcccccaacctccccaccccaagaggggtctgagtgggacctcaaagcatggccagtgcaattctgaggctaggggaataggagaagcccaccagctgcccctgccacccacgggggctcctccctgccggggtccagctcagaaccacgggggtctgtgccggcagcaccggtgccatcttggcttccacaaattccagaagtttcttggctgcctcccgctctcagatggcacagggcctatcagtggcaggatttaatctggggagcaaattccagctctgaaatggagttctcacaccgtatctagggacagaggcatctggatgcaaacgcggggtttgttaggggcggaatcccgagggtggtgtgggggagctccgtccgggcagttggctgctggtcctgtctgattatgttttgccatattgagtctgaagtttgtgtggaagtgagctcgcccgagttgtccggtcggagttgtagccagtctttcaggggaccccgggacgccgatgaggcccagggtgcactccttgtcagtcttgcccgttgtccctgtgcattttgctttccgctgtcaaatctcactgtctcgttttcacaccgcatcagtccccatcatcactactcctccccaaagacatacagattgccctccccggcatgaagaagtcacaattctgacccgccacctctccaggggcggtgcctgggatggccacccatcaggacagccagagccggggtcccggcgtcctgagagtccagggcacctccccccattagctgtaaggtttcctgtcaggtgtgactgtcagtttgctggtcttccaataccgaagaaagggtggttgtgacaatacctcttgcttctaaagaatgtattataaaacaccgcagatttttttttttccttaaaaaacactacctgatgctttccttgttcgtggggattgtggtcacatgaagctctttctgcatcagtattaaggtgtatatttgaatgtcctcccctcccctttcccctccaggctgtgtagctttgaggggctgggcgtttgctcacgaccttgctgtctcgctcagaacatgctccgcaaagttctccgcacacacttcttccccatcaagcccatttccttccccaaccacaaaggtgtttgtgattcctcaccccgggaaaccaaggagctgcaaagtggagtctggttcagccccgtgcagactcacccagagcttaacgttgtctttcaaacaccctgagccttcctaaacagccagtgcagacgttctctctgggccacgaagcccctcgggtcctccccgtcccctgctccgatgcatacctcagtgcagaaccacagaatctctgcagcggaaacgccgtgcatctcttgtctgttggcagcgagcacatcgtgctggagacacgagtttctaagcagctggcacgagggctgctgacggcatgggtcgtgcttcagggtggcaatacctcttaggaacttagggcaggaagcaatacttcagcattgaatgtgtgtaaatagttgctttgagttgcaattgctattttcttctcagtcccagctcagatcgaattatatatccatatatatatatatatatatatatatatatatatatatatggtaaacaagcacacacaattttatccaatgcaaacaaatgtagagcatcagttacaaaaccctcgaatagcttgagagccccacaggctctgccacacccgtgacttcatccacactgacgtcacccgcgggggctccccctgcacatttgcacacgatccggaggagccgaaggccgcgtgcttcctgtcacatgggctgtaatcatttgtagtttccaaagacacgtctgcatttgaatttctagattttcgaggtaaggagttttttttaattggttgtttggaaaatcacatcatgcctagaatctgaaattgaattagcaagaaccgactgtttgcattttccatatatccttttatctgctctttttaaattgttaattctaataatttcaaaatgcattcactgaagaaatggacattaaaatattctaaaatttaaataaaaaaag

SEQ ID NO: 330727 - DNA, 7763 bp, Homo sapiens
  misc_feature (164)..(164): n is a, c, g, or t
  misc_feature (210)..(210): n is a, c, g, or t
gcggccgcggcgggagcggcggcgcactcggggggaagcaggccccactagacgggccgcgccgacgggctccgcgcactcgcagcccggggcgcccccacccccagcgcccgccgccgcgggcagggccggcccggagcgcggggggcggccggggagcgcgngccgggggcgcccgccgaagctcgctgctccgggtcggggtcgggnccggggccggccgcgcgccgcctttgacgcatcggagcgcggctcctgcaggatggagggctccgcgccgccagcggagttgtttgtgcgcaggcggctcgcggggctgggagcgctcaaggtctgaacttccctccggagccgcagctggaggaggcgagcgcgcgaggaggagaagccgcgcggcgcggaggccaccctcggggcgagaggcgcggaaggcgagcgagcaaagcggtcccggagccacggcggccacgcggcggggacccccgggcgttctaggtactggtgaccccggccggggcaggccccgggactcgacaacatggcttccccgccccaccagcagctgctgcatcaccacagcaccgaggtgagctgcgactccagcggggacagcaacagcgtgcgcgtcaagatcaaccccaagcagctgtcctccaacagccaccccaagcactgcaaatacagcatctcctctagctgcagcagctctggggactccgggggcgtcccccggcgagtgggcggcggaggccggctgcgcaggcagaagaagctgccccagctgttcgagagggcctccagccgctggtgggaccccaagttcgactcggtgaacctggaggaggcctgcctggagcgctgcttcccgcagacccagcgccggttccggtatgcgctcttctacatcggcttcgcctgccttctgtggagcatctattttgcggtccacatgagatccagactgatcgtcatggtcgcccccgcgctgtgcttcctcctggtgtgtgtgggcttctttctgtttaccttcaccaagctgtacgcccggcattacgcgtggacctcgctggctctcaccctgctggtgttcgccctgaccctggctgcgcagttccaggtcttgacgcctgtctcaggacgcggcgacagctccaaccttacggccacagcccggcccacagatacttgcttatctcaagtggggagcttctccatgtgcatcgaagtgctctttttgctctataccgtcatgcacttacctttgtacctgagtttgtgtctgggggtggcctactctgtccttttcgagacctttggctaccatttccgggatgaagcctgcttcccctcgcccggagccggggccctgcactgggagctgctgagcagggggctgctccacggctgcatccacgccatcggggtccacctgttcgtcatgtcccaggtgaggtccaggagcaccttcctcaaggtggggcaatccattatgcacgggaaggacctggaagtggaaaaagccctcaaagagaggatgattcattccgtgatgccaagaatcatagccgatgacttaatgaagcagggagatgaggagagtgagaattctgtcaagaggcatgccacctcgagccccaagaacaggaagaaaaagtcttccatccaaaaagctcctatagccttccgcccttttaagatgcagcagatcgaagaagtcagtattttatttgcagatatcgtgggcttcaccaagatgagtgccaacaagtctgcccacgccctggtgggtctcctgaacgatctgttcggtcgcttcgaccgcctgtgtgaggagaccaagtgtgagaaaatcagcaccctgggagactgttactactgcgtggcgggctgtcccgagccccgggccgaccatgcctactgctgcatcgagatgggcctgggcatgatcaaggccatcgagcagttctgccaggagaagaaggagatggtgaacatgagagtcggggtgcacacgggcaccgtcctttgcggcatcctgggcatgaggaggtttaaatttgacgtgtggtccaacgatgtgaacctggccaatctcatggagcagctgggagtggccggcaaagttcacatttctgaggccaccgcaaaatacttagatgaccggtacgaaatggaagatgggaaagttattgaacggctgggccagagcgtggttgctgaccagttgaaaggtttgaagacatacctgatatcgggtcagagagccaaggagtctcgctgcagctgtgcagaggccttgctttctggctttgaggtcattgacggctcacaggtgtcctcaggccctaggggacaggggacagcgtcatcagggaatgtcagtgacttggcgcagactgtcaaaacctttgataaccttaagacctgcccttcgtgcggaatcacatttgctcccaaatctgaagccggcgccgagggaggagcacctcaaaacggctgccaagacgagcataaaaacagcaccaaggtaacaagctcatggctgttgttcctgtcagttcctctcctggcgcatccacccaaggcttctggaggacctaatcccaaaactcagaacgggctcctcagccctccccaagaggagaagctcaccaacagtcagacttctctgtgtgagatcttgcaggagaagggaaggtgggcaggggtgagcctggaccagtcggctctccttccgctgaggttcaagaacatccgggagaaaacggacgcccactttgtggacgttatcaaagaagacagcctgatgaaagattacttttttaagccgcccattaatcagttcagcctgaacttcctggatcaggagctggagcgatcctacaggaccagctatcaggaagaggtcataaagaactcccccgtgaagacgtttgctagtcccaccttcagctccctcctggatgtgtttctgtcgaccacagtgtttctgacgctgtccaccacctgcttcctgaagtacgaggcggccaccgtgcctcccccgcccgccgccctggcggtcttcagtgcagccctgctgctggaggtgctgtccctcgcggtgtccatcaggatggtgttcttcctggaggacgtcatggcctgcaccaagcgcctgctggagtggatcgccggctggctaccacgtcactgcatcggggccatcctggtgtcgcttcccgcactggccgtctactcccatgtcacctccgaatatgagaccaacatacacttcccagtgttcacaggctcggccgcgctgattgccgtcgtgcactactgtaacttctgccagctcagctcctggatgaggtcctccctcgccaccgtcgtgggggccgggccgctgctcctgctctacgtctccctgtgcccagacagttctgtattaacttcgccccttgacgcagtacagaatttcagttccgagaggaacccgtgcaatagttcggtgccgcgtgacctccggcggcccgccagcctcatcggccaggaggtggttctcgtcttctttctcctgctcttgttggtctggttcctgaatcgcgaatttgaagtcagctaccgcctccactaccacggagacgtggaagcggatcttcaccgcaccaagatccagagcatgcgggaccaggcagactggctgctgaggaacatcatcccctaccacgtggctgagcagctgaaggtgtcccagacctactccaagaaccacgacagcggaggggtgatcttcgccagcatcgtcaacttcagcgagttctacgaggagaactacgagggcggcaaggagtgctaccgggtcctcaacgagctcatcggggactttgacgagctcctaagcaagccggactacagcagcatcgagaagatcaagaccatcggagccacgtacatggcggcgtcagggctgaacaccgcgcaggcccaggacggcagccacccgcaggagcacctgcagatcctgttcgagttcgccaaggagatgatgcgcgtggtggacgacttcaacaacaacatgctgtggttcaacttcaagctccgcgtcggcttcaaccatgggcccctcacggccggggtcatcggcaccaccaagctgctgtacgacatctggggagacaccgtcaacatcgccagcaggatggacaccaccggcgtggagtgccgcatccaggtgagcgaagagagctaccgcgtcttgagcaagatgggctatgacttcgactacagagggaccgtgaatgtcaaggggaaaggccagatgaagacctacctgtacccaaagtgcacggatcacagggtcatcccacagcaccagctgtccatctccccagacatccgcgtccaggtggatggcagcatcggacggtctcccacagacgagattgccaacctggtgccttctgtccagtatgtggacaagacatctctgggttctgacagcagcacgcaggccaaggatgcccacctgtcccccaagagaccgtggaaggagcccgtcaaagccgaagaaaggggtcgatttggcaaagccatagagaaagacgactgtgacgaaacaggaatagaagaagccaacgaactcaccaagctcaacgtttcaaagagtgtgtgaggcggcgcccacccgctgcccgaggtgctctgtttgtcgaaacacagtaatatttgtatttggctgttgtgctttccaagcgccacagttgccctccccggacgtggtgttatgtggtcatttcagccctaacttctgtgtggatcacagttattcagggttcattttcatccattcttccctttcgctcccttccctggaaaccccgctgcctctgggtcatccgttcagcacgtggtggagaacaagtgccttcagggctggcctcggcctcgagtctcgggacagaggccgccagtggagatcatggctttgggtattatttgacttttagaacaaaagctgtggttaagatctcatttttattgctttttcccacgtcccacgagacactattttcggttctctggctaataccctgtttttgagtttattttgtttctgtctatgtcacagtgtccccctacgacccgacctctctatgtaagcacacatgcgcacacacacttgcattcatgaatctgatataaagtgccagtaatccgccaagagggggtgcgaagggggcatgtcacgacagctccgccaccccccattgcccacccgcactttcccgagcaccgcgccccgtgggctgtgggtgagccgcgctccctgcactgagcgggtttaggggctcgcccacatgcatgcaggccaagacagcaaatgccagccgggcacgacgcccgtgtgcccaggcctcgggggtctcagagccgcctctcacccccgaccctccacccaggggtctccccgtcgggagtggaggcgttggtcctggaagctgactcatcggagagggaaataccaaataaacatccgaggttgcatttatttatttatttacccggaagcatgtgcgctcccgggaggggtgctgggtcctcagggtggggggtcatagccacaggggagggcagttcccaggaaggtaaccagatgtctcttttgtgttttggccacctggggccgcccccaacctccccaccccaagaggggtctgagtgggacctcaaagcatggccagtgcaattctgaggctaggggaataggagaagcccaccagctgcccctgccacccacgggggctcctccctgccggggtccagctcagaaccacgggggtctgtgccggcagcaccggtgccatcttggcttccacaaattccagaagtttcttggctgcctcccgctctcagatggcacagggcctatcagtggcaggatttaatctggggagcaaattccagctctgaaatggagttctcacaccgtatctagggacagaggcatctggatgcaaacgcggggtttgttaggggcggaatcccgagggtggtgtgggggagctccgtccgggcagttggctgctggtcctgtctgattatgttttgccatattgagtctgaagtttgtgtggaagtgagctcgcccgagttgtccggtcggagttgtagccagtctttcaggggaccccgggacgccgatgaggcccagggtgcactccttgtcagtcttgcccgttgtccctgtgcattttgctttccgctgtcaaatctcactgtctcgttttcacaccgcatcagtccccatcatcactactcctccccaaagacatacagattgccctccccggcatgaagaagtcacaattctgacccgccacctctccaggggcggtgcctgggatggccacccatcaggacagccagagccggggtcccggcgtcctgagagtccagggcacctccccccattagctgtaaggtttcctgtcaggtgtgactgtcagtttgctggtcttccaataccgaagaaagggtggttgtgacaatacctcttgcttctaaagaatgtattataaaacaccgcagatttttttttttccttaaaaaacactacctgatgctttccttgttcgtggggattgtggtcacatgaagctctttctgcatcagtattaaggtgtatatttgaatgtcctcccctcccctttcccctccaggctgtgtagctttgaggggctgggcgtttgctcacgaccttgctgtctcgctcagaacatgctccgcaaagttctccgcacacacttcttccccatcaagcccatttccttccccaaccacaaaggtgtttgtgattcctcaccccgggaaaccaaggagctgcaaagtggagtctggttcagccccgtgcagactcacccagagcttaacgttgtctttcaaacaccctgagccttcctaaacagccagtgcagacgttctctctgggccacgaagcccctcgggtcctccccgtcccctgctccgatgcatacctcagtgcagaaccacagaatctctgcagcggaaacgccgtgcatctcttgtctgttggcagcgagcacatcgtgctggagacacgagtttctaagcagctggcacgagggctgctgacggcatgggtcgtgcttcagggtggcaatacctcttaggaacttagggcaggaagcaatacttcagcattgaatgtgtgtaaatagttgctttgagttgcaattgctattttcttctcagtcccagctcagatcgaattatatatccatatatatatatatatatatatatggtaaacaagcacacacaattttatccaatgcaaacaaatgtagagcatcagttacaaaaccctcgaatagcttgagagccccacaggctctgccacacccgtgacttcatccacactgacgtcacccgcgggggctccccctgcacatttgcacacgatccggaggagccgaaggccgcgtgcttcctgtcacatgggctgtaatcatttgtagtttccaaagacacgtctgcatttgaatttctagattttcgaggtaaggagttttttttaattggttgtttggaaaatcacatcatgcctagaatctgaaattgaattagcaagaaccgactgtttgcattttccatatatccttttatctgctctttttaaattgttaattctaataatttcaaaatgcattcactgaagaaatggacattaaaatattctaaaatttaaataaaaaaag

SEQ ID NO: 330728 - DNA, 7706 bp, Homo sapiens
  misc_feature (164)..(164): n is a, c, g, or t
  misc_feature (210)..(210): n is a, c, g, or t
gcggccgcggcgggagcggcggcgcactcggggggaagcaggccccactagacgggccgcgccgacgggctccgcgcactcgcagcccggggcgcccccacccccagcgcccgccgccgcgggcagggccggcccggagcgcggggggcggccggggagcgcgngccgggggcgcccgccgaagctcgctgctccgggtcggggtcgggnccggggccggccgcgcgccgcctttgacgcatcggagcgcggctcctgcaggatggagggctccgcgccgccagcggagttgtttgtgcgcaggcggctcgcggggctgggagcgctcaaggtctgaacttccctccggagccgcagctggaggaggcgagcgcgcgaggaggagaagccgcgcggcgcggaggccaccctcggggcgagaggcgcggaaggcgagcgagcaaagcggtcccggagccacggcggccacgcggcggggacccccgggcgttctaggtactggtgaccccggccggggcaggccccgggactcgacaacatggcttccccgccccaccagcagctgctgcatcaccacagcaccgaggtgagctgcgactccagcggggacagcaacagcgtgcgcgtcaagatcaaccccaagcagctgtcctccaacagccaccccaagcactgcaaatacagcatctcctctagctgcagcagctctggggactccgggggcgtcccccggcgagtgggcggcggaggccggctgcgcaggcagaagaagctgccccagctgttcgagagggcctccagccgctggtgggaccccaagttcgactcggtgaacctggaggaggcctgcctggagcgctgcttcccgcagacccagcgccggttccggtatgcgctcttctacatcggcttcgcctgccttctgtggagcatctattttgcggtccacatgagatccagactgatcgtcatggtcgcccccgcgctgtgcttcctcctggtgtgtgtgggcttctttctgtttaccttcaccaagctgtacgcccggcattacgcgtggacctcgctggctctcaccctgctggtgttcgccctgaccctggctgcgcagttccaggtcttgacgcctgtctcaggacgcggcgacagctccaaccttacggccacagcccggcccacagatacttgcttatctcaagtggggagcttctccatgtgcatcgaagtgctctttttgctctataccgtcatgcacttacctttgtacctgagtttgtgtctgggggtggcctactctgtccttttcgagacctttggctaccatttccgggatgaagcctgcttcccctcgcccggagccggggccctgcactgggagctgctgagcagggggctgctccacggctgcatccacgccatcggggtccacctgttcgtcatgtcccaggtgaggtccaggagcaccttcctcaaggtggggcaatccattatgcacgggaaggacctggaagtggaaaaagccctcaaagagaggatgattcattccgtgatgccaagaatcatagccgatgacttaatgaagcagggagatgaggagagtgagaattctgtcaagaggcatgccacctcgagccccaagaacaggaagaaaaagtcttccatccaaaaagctcctatagccttccgcccttttaagatgcagcagatcgaagaagtcagtattttatttgcagatatcgtgggcttcaccaagatgagtgccaacaagtctgcccacgccctggtgggtctcctgaacgatctgttcggtcgcttcgaccgcctgtgtgaggagaccaagtgtgagaaaatcagcaccctgggagactgttactactgcgtggcgggctgtcccgagccccgggccgaccatgcctactgctgcatcgagatgggcctgggcatgatcaaggccatcgagcagttctgccaggagaagaaggagatggtgaacatgagagtcggggtgcacacgggcaccgtcctttgcggcatcctgggcatgaggaggtttaaatttgacgtgtggtccaacgatgtgaacctggccaatctcatggagcagctgggagtggccggcaaagttcacatttctgaggccaccgcaaaatacttagatgaccggtacgaaatggaagatgggaaagttattgaacggctgggccagagcgtggttgctgaccagttgaaaggtttgaagacatacctgatatcgggtcagagagccaaggagtctcgctgcagctgtgcagaggccttgctttctggctttgaggtcattgacggctcacaggtgtcctcaggccctaggggacaggggacagcgtcatcagggaatgtcagtgacttggcgcagactgtcaaaacctttgataaccttaagacctgcccttcgtgcggaatcacatttgctcccaaatctgaagccggcgccgagggaggagcacctcaaaacggctgccaagacgagcataaaaacagcaccaaggtaacaagctcatggctgttgttcctgtcagttcctctcctggcgcatccacccaaggcttctggaggacctaatcccaaaactcagaacgggctcctcagccctccccaagaggagaagctcaccaacagtcagacttctctgtgtgagatcttgcaggagaagggaaggtgggcaggggtgagcctggaccagtcggctctccttccgctgaggttcaagaacatccgggagaaaacggacgcccactttgtggacgttatcaaagaagacagcctgatgaaagattacttttttaagccgcccattaatcagttcagcctgaacttcctggatcaggagctggagcgatcctacaggaccagctatcaggaagaggtcataaagaactcccccgtgaagacgtttgctagtcccaccttcagctccctcctggatgtgtttctgtcgaccacagtgtttctgacgctgtccaccacctgcttcctgaagtacgaggcggccaccgtgcctcccccgcccgccgccctggcggtcttcagtgcagccctgctgctggaggtgctgtccctcgcggtgtccatcaggatggtgttcttcctggaggacgtcatggcctgcaccaagcgcctgctggagtggatcgccggctggctaccacgtcactgcatcggggccatcctggtgtcgcttcccgcactggccgtctactcccatgtcacctccgaatatgagaccaacatacacttcccagtgttcacaggctcggccgcgctgattgccgtcgtgcactactgtaacttctgccagctcagctcctggatgaggtcctccctcgccaccgtcgtgggggccgggccgctgctcctgctctacgtctccctgtgcccagacagttctgtattaacttcgccccttgacgcagtacagaatttcagttccgagaggaacccgtgcaatagttcggtgccgcgtgacctccggcggcccgccagcctcatcggccaggaggtggttctcgtcttctttctcctgctcttgttggtctggttcctgaatcgcgaatttgaagtcagctaccgcctccactaccacggagacgtggaagcggatcttcaccgcaccaagatccagagcatgcgggaccaggcagactggctgctgaggaacatcatcccctaccacgtggctgagcagctgaaggtgtcccagacctactccaagaaccacgacagcggaggggtgatcttcgccagcatcgtcaacttcagcgagttctacgaggagaactacgagggcggcaaggagtgctaccgggtcctcaacgagctcatcggggactttgacgagctcctaagcaagccggactacagcagcatcgagaagatcaagaccatcggagccacgtacatggcggcgtcagggctgaacaccgcgcaggcccaggacggcagccacccgcaggagcacctgcagatcctgttcgagttcgccaaggagatgatgcgcgtggtggacgacttcaacaacaacatgctgtggttcaacttcaagctccgcgtcggcttcaaccatgggcccctcacggccggggtcatcggcaccaccaagctgctgtacgacatctggggagacaccgtcaacatcgccagcaggatggacaccaccggcgtggagtgccgcatccaggtgagcgaagagagctaccgcgtcttgagcaagatgggctatgacttcgactacagagggaccgtgaatgtcaaggggaaaggccagacatccgcgtccaggtggatggcagcatcggacggtctcccacagacgagattgccaacctggtgccttctgtccagtatgtggacaagacatctctgggttctgacagcagcacgcaggccaaggatgcccacctgtcccccaagagaccgtggaaggagcccgtcaaagccgaagaaaggggtcgatttggcaaagccatagagaaagacgactgtgacgaaacaggaatagaagaagccaacgaactcaccaagctcaacgtttcaaagagtgtgtgaggcggcgcccacccgctgcccgaggtgctctgtttgtcgaaacacagtaatatttgtatttggctgttgtgctttccaagcgccacagttgccctccccggacgtggtgttatgtggtcatttcagccctaacttctgtgtggatcacagttattcagggttcattttcatccattcttccctttcgctcccttccctggaaaccccgctgcctctgggtcatccgttcagcacgtggtggagaacaagtgccttcagggctggcctcggcctcgagtctcgggacagaggccgccagtggagatcatggctttgggtattatttgacttttagaacaaaagctgtggttaagatctcatttttattgctttttcccacgtcccacgagacactattttcggttctctggctaataccctgtttttgagtttattttgtttctgtctatgtcacagtgtccccctacgacccgacctctctatgtaagcacacatgcgcacacacacttgcattcatgaatctgatataaagtgccagtaatccgccaagagggggtgcgaagggggcatgtcacgacagctccgccaccccccattgcccacccgcactttcccgagcaccgcgccccgtgggctgtgggtgagccgcgctccctgcactgagcgggtttaggggctcgcccacatgcatgcaggccaagacagcaaatgccagccgggcacgacgcccgtgtgcccaggcctcgggggtctcagagccgcctctcacccccgaccctccacccaggggtctccccgtcgggagtggaggcgttggtcctggaagctgactcatcggagagggaaataccaaataaacatccgaggttgcatttatttatttatttacccggaagcatgtgcgctcccgggaggggtgctgggtcctcagggtggggggtcatagccacaggggagggcagttcccaggaaggtaaccagatgtctcttttgtgttttggccacctggggccgcccccaacctccccaccccaagaggggtctgagtgggacctcaaagcatggccagtgcaattctgaggctaggggaataggagaagcccaccagctgcccctgccacccacgggggctcctccctgccggggtccagctcagaaccacgggggtctgtgccggcagcaccggtgccatcttggcttccacaaattccagaagtttcttggctgcctcccgctctcagatggcacagggcctatcagtggcaggatttaatctggggagcaaattccagctctgaaatggagttctcacaccgtatctagggacagaggcatctggatgcaaacgcggggtttgttaggggcggaatcccgagggtggtgtgggggagctccgtccgggcagttggctgctggtcctgtctgattatgttttgccatattgagtctgaagtttgtgtggaagtgagctcgcccgagttgtccggtcggagttgtagccagtctttcaggggaccccgggacgccgatgaggcccagggtgcactccttgtcagtcttgcccgttgtccctgtgcattttgctttccgctgtcaaatctcactgtctcgttttcacaccgcatcagtccccatcatcactactcctccccaaagacatacagattgccctccccggcatgaagaagtcacaattctgacccgccacctctccaggggcggtgcctgggatggccacccatcaggacagccagagccggggtcccggcgtcctgagagtccagggcacctccccccattagctgtaaggtttcctgtcaggtgtgactgtcagtttgctggtcttccaataccgaagaaagggtggttgtgacaatacctcttgcttctaaagaatgtattataaaacaccgcagatttttttttttccttaaaaaacactacctgatgctttccttgttcgtggggattgtggtcacatgaagctctttctgcatcagtattaaggtgtatatttgaatgtcctcccctcccctttcccctccaggctgtgtagctttgaggggctgggcgtttgctcacgaccttgctgtctcgctcagaacatgctccgcaaagttctccgcacacacttcttccccatcaagcccatttccttccccaaccacaaaggtgtttgtgattcctcaccccgggaaaccaaggagctgcaaagtggagtctggttcagccccgtgcagactcacccagagcttaacgttgtctttcaaacaccctgagccttcctaaacagccagtgcagacgttctctctgggccacgaagcccctcgggtcctccccgtcccctgctccgatgcatacctcagtgcagaaccacagaatctctgcagcggaaacgccgtgcatctcttgtctgttggcagcgagcacatcgtgctggagacacgagtttctaagcagctggcacgagggctgctgacggcatgggtcgtgcttcagggtggcaatacctcttaggaacttagggcaggaagcaatacttcagcattgaatgtgtgtaaatagttgctttgagttgcaattgctattttcttctcagtcccagctcagatcgaattatatatccatatatatatatatatatatatatatatatatatatatatggtaaacaagcacacacaattttatccaatgcaaacaaatgtagagcatcagttacaaaaccctcgaatagcttgagagccccacaggctctgccacacccgtgacttcatccacactgacgtcacccgcgggggctccccctgcacatttgcacacgatccggaggagccgaaggccgcgtgcttcctgtcacatgggctgtaatcatttgtagtttccaaagacacgtctgcatttgaatttctagattttcgaggtaaggagttttttttaattggttgtttggaaaatcacatcatgcctagaatctgaaattgaattagcaagaaccgactgtttgcattttccatatatccttttatctgctctttttaaattgttaattctaataatttcaaaatgcattcactgaagaaatggacattaaaatattctaaaatttaaataaaaaaag

SEQ ID NO: 330729 - DNA, 2367 bp, Homo sapiens
  misc_feature (164)..(164): n is a, c, g, or t
  misc_feature (210)..(210): n is a, c, g, or t
gcggccgcggcgggagcggcggcgcactcggggggaagcaggccccactagacgggccgcgccgacgggctccgcgcactcgcagcccggggcgcccccacccccagcgcccgccgccgcgggcagggccggcccggagcgcggggggcggccggggagcgcgngccgggggcgcccgccgaagctcgctgctccgggtcggggtcgggnccggggccggccgcgcgccgcctttgacgcatcggagcgcggctcctgcaggatggagggctccgcgccgccagcggagttgtttgtgcgcaggcggctcgcggggctgggagcgctcaaggtctgaacttccctccggagccgcagctggaggaggcgagcgcgcgaggaggagaagccgcgcggcgcggaggccaccctcggggcgagaggcgcggaaggcgagcgagcaaagcggtcccggagccacggcggccacgcggcggggacccccgggcgttctaggtactggtgaccccggccggggcaggccccgggactcgacaacatggcttccccgccccaccagcagctgctgcatcaccacagcaccgaggtgagctgcgactccagcggggacagcaacagcgtgcgcgtcaagatcaaccccaagcagctgtcctccaacagccaccccaagcactgcaaatacagcatctcctctagctgcagcagctctggggactccgggggcgtcccccggcgagtgggcggcggaggccggctgcgcaggcagaagaagctgccccagctgttcgagagggcctccagccgctggtgggaccccaagttcgactcggtgaacctggaggaggcctgcctggagcgctgcttcccgcagacccagcgccggttccggtatgcgctcttctacatcggcttcgcctgccttctgtggagcatctattttgcggtccacatgagatccagactgatcgtcatggtcgcccccgcgctgtgcttcctcctggtgtgtgtgggcttctttctgtttaccttcaccaagctgtacgcccggcattacgcgtggacctcgctggctctcaccctgctggtgttcgccctgaccctggctgcgcagttccaggtcttgacgcctgtctcaggacgcggcgacagctccaaccttacggccacagcccggcccacagatacttgcttatctcaagtggggagcttctccatgtgcatcgaagtgctctttttgctctataccgtcatgcacttacctttgtacctgagtttgtgtctgggggtggcctactctgtccttttcgagacctttggctaccatttccgggatgaagcctgcttcccctcgcccggagccggggccctgcactgggagctgctgagcagggggctgctccacggctgcatccacgccatcggggtccacctgttcgtcatgtcccaggtgaggtccaggagcaccttcctcaaggtggggcaatccattatgcacgggaaggacctggaagtggaaaaagccctcaaagagaggatgattcattccgtgatgccaagaatcatagccgatgacttaatgaagcagggagatgaggagagtgagaattctgtcaagaggcatgccacctcgagccccaagaacaggaagaaaaagtcttccatccaaaaagctcctatagccttccgcccttttaagatgcagcagatcgaagaagtcagtattttatttgcagatatcgtgggcttcaccaagatgagtgccaacaagtctgcccacgccctggtgggtctcctgaacgatctgttcggtcgcttcgaccgcctgtgtgaggagaccaagtgtgagaaaatcagcaccctgggagactgttactactgcgtggcgggctgtcccgagccccgggccgaccatgcctactgctgcatcgagatgggcctgggcatgatcaaggccatcgagcagttctgccaggagaagaaggagatggtgaacatgagagtcggggtgcacacgggcaccgtcctttgcggcatcctgggcatgaggaggtttaaatttgacgtgtggtccaacgatgtgaacctggccaatctcatggagcagctgggagtggccggcaaagttcacatttctgaggccaccgcaaaatacttagatgaccggtacgaaatggaagatgggaaagttattgaacggctgggccagagcgtggttgctgaccagttgaaaggtatgtgcactgctttacctcggcatcccccctccctgatcctgattgtattaaattaaaaaaaaaagcttccagcctcagtgtctgcagacagctcaggtatctcagaatgccttaccatggggggatctcaggg

SEQ ID NO: 330730 - DNA, 2378 bp, Homo sapiens
  misc_feature (1436)..(1436): n is a, c, g, or t
  misc_feature (1482)..(1482): n is a, c, g, or t
  misc_feature (1571)..(1571): n is a, c, g, or t
  misc_feature (1663)..(1663): n is a, c, g, or t
atgtgtctatgagaatgtgctgggtcataatcagttgctctgtgaccctggcagggttttttttgtgtttttttgttttcggaagcggtataattctgcagtggtgtgatcatagttcactgcggcttcaaactcctgggctcaagcaatcctcccacctcagaccccaagtacctgggactacaggcacaaaccactatgcccagctaattattttattttttggtagacggggtctcgctatgttgcccaggctggagtgcagtggcatgattatagctcactgcggcctgaaactcctgggctcacacaatcctcctgcgtcatcctcctgagtagctgggaccacactcacgcactgccatgcctggctaattttaaagttttttgtagagatggagtctctctgtgttacgctggccgggaactcctgggctccagcgaccctcctacgtcagcctcccaaagtgtcgggattacaggcgtgagccaccgtgcccagccccctgggcaagtttaacttctctgtgccttggactccccagtgttaaatggggtagtagagggagacagccctccgagagccttcctgccctgtgcctggcccagagcagcagtgctccgcacgtgttgcctgtttctccatctgaactgcgctcctggccgcccatggcctcccagtcattctgctccactcctgctccacacaggtcataaagaactcccccgtgaagacgtttgctagtcccaccttcagctccctcctggatgtgtttctgtcgaccacagtgtttctgacgctgtccaccacctgcttcctgaagtacgaggcggccaccgtgcctcccccgcccgccgccctggcggtcttcagtgcagccctgctgctggaggtgctgtccctcgcggtgtccatcaggtaagcgccgcgtggactgggtctccagctctgagccgttagctccctcttctggctccatggcttatggctgagcggttggactggtccccagccagctgtccctgctggctgatttctggagatgggtccccgtgtcctccccgagccctgtgccccagcatcctccctccctgacgttggcccagatgcggggggaccacctcgctggagggggcggtgcctccacagccccaaccgctgccagcttgtccccagatttccaggttcagagactgcaaaggagaaggtgagaagataggaaacaatctggaggaaggaaaggaaaagacatgagcgggggtagtgggcctgggacagcaggcgcctcttcagagtaccggagccaaacagcatctccacgcacttgcctcaggcagtggtctcttggatgtgacgccaacagaagaaagaatagacaagcccaacttcctcagaagttaagctgttgcgctacaaagaacaccatcaagaaagngaaagaacccacagaacgggagggaacacttgcagatcaggcctcngacaaggtctaacatctagaatggataaagagcacacatagcctgataataaaaagacagctcattttaaaggggacagaggctccgantagaccacaggtgcgtcttgggaaagctgggccctcgggaccagcctggctccctgagggggctcgcagcggctctgtattcctgagcaggnaggtggccctgtgtggtccccgtcctgggcaccacaagccccttgggtggtcctgtcaccctcaacaggatggctgccggcctagcagagtcccactagcaacggtgccccggagctgggcttcaaacagacatggggaggcagccctgaccttgagcgtctgctgcccttatccaacatcccagggcagaaatgaatggctttgagtctggcgtgaggcgccggaatgctggcttctcccatctggggtgggcaggctgggattcctgccccctccttcccacctgcactgtacccaggaccctttcagcttcctccgaggccgccatgggccatgctgtctgtggcgtgtgctcagtgtttcccagaactccctgtgggctcatgccccatcacccccagcgagcagccctcttcctggcacagcctcccctcctgcctcagtgccctcctgtgcttctggggacccctcccaaaggagccgtcgcctgcaaaccctttcagggtccacttccccagaacccaaaccagacatcctcaggcccctggttggtttgtttttcctctttaaaaagatcagctttaggctgggcatggtggctcatgcctgtaatcccagcactttgggaggccaaggcaggtggatcacctgaggctgggagttcgagaccagcctggacagcatggtgaaaccccatctctactaaaaaatacc

SEQ ID NO: 330731 - DNA, 5584 bp, Homo sapiens
atgtgtctatgagaatgtgctgggtcataatcagttgctctgtgaccctggcagggttttttttgtgtttttttgttttcggaagcggtataattctgcagtggtgtgatcatagttcactgcggcttcaaactcctgggctcaagcaatcctcccacctcagaccccaagtacctgggactacaggcacaaaccactatgcccagctaattattttattttttggtagacggggtctcgctatgttgcccaggctggagtgcagtggcatgattatagctcactgcggcctgaaactcctgggctcacacaatcctcctgcgtcatcctcctgagtagctgggaccacactcacgcactgccatgcctggctaattttaaagttttttgtagagatggagtctctctgtgttacgctggccgggaactcctgggctccagcgaccctcctacgtcagcctcccaaagtgtcgggattacaggcgtgagccaccgtgcccagccccctgggcaagtttaacttctctgtgccttggactccccagtgttaaatggggtagtagagggagacagccctccgagagccttcctgccctgtgcctggcccagagcagcagtgctccgcacgtgttgcctgtttctccatctgaactgcgctcctggccgcccatggcctcccagtcattctgctccactcctgctccacacaggtcataaagaactcccccgtgaagacgtttgctagtcccaccttcagctccctcctggatgtgtttctgtcgaccacagtgtttctgacgctgtccaccacctgcttcctgaagtacgaggcggccaccgtgcctcccccgcccgccgccctggcggtcttcagtgcagccctgctgctggaggtgctgtccctcgcggtgtccatcaggatggtgttcttcctggaggacgtcatggcctgcaccaagcgcctgctggagtggatcgccggctggctaccacgtcactgcatcggggccatcctggtgtcgcttcccgcactggccgtctactcccatgtcacctccgaatatgagaccaacatacacttcccagtgttcacaggctcggccgcgctgattgccgtcgtgcactactgtaacttctgccagctcagctcctggatgaggtcctccctcgccaccgtcgtgggggccgggccgctgctcctgctctacgtctccctgtgcccagacagttctgtattaacttcgccccttgacgcagtacagaatttcagttccgagaggaacccgtgcaatagttcggtgccgcgtgacctccggcggcccgccagcctcatcggccaggaggtggttctcgtcttctttctcctgctcttgttggtctggttcctgaatcgcgaatttgaagtcagctaccgcctccactaccacggagacgtggaagcggatcttcaccgcaccaagatccagagcatgcgggaccaggcagactggctgctgaggaacatcatcccctaccacgtggctgagcagctgaaggtgtcccagacctactccaagaaccacgacagcggaggggtgatcttcgccagcatcgtcaacttcagcgagttctacgaggagaactacgagggcggcaaggagtgctaccgggtcctcaacgagctcatcggggactttgacgagctcctaagcaagccggactacagcagcatcgagaagatcaagaccatcggagccacgtacatggcggcgtcagggctgaacaccgcgcaggcccaggacggcagccacccgcaggagcacctgcagatcctgttcgagttcgccaaggagatgatgcgcgtggtggacgacttcaacaacaacatgctgtggttcaacttcaagctccgcgtcggcttcaaccatgggcccctcacggccggggtcatcggcaccaccaagctgctgtacgacatctggggagacaccgtcaacatcgccagcaggatggacaccaccggcgtggagtgccgcatccaggtgagcgaagagagctaccgcgtcttgagcaagatgggctatgacttcgactacagagggaccgtgaatgtcaaggggaaaggccagatgaagacctacctgtacccaaagtgcacggatcacagggtcatcccacagcaccagctgtccatctccccagacatccgcgtccaggtggatggcagcatcggacggtctcccacagacgagattgccaacctggtgccttctgtccagtatgtggacaagacatctctgggttctgacagcagcacgcaggccaaggatgcccacctgtcccccaagagaccgtggaaggagcccgtcaaagccgaagaaaggggtcgatttggcaaagccatagagaaagacgactgtgacgaaacaggaatagaagaagccaacgaactcaccaagctcaacgtttcaaagagtgtgtgaggcggcgcccacccgctgcccgaggtgctctgtttgtcgaaacacagtaatatttgtatttggctgttgtgctttccaagcgccacagttgccctccccggacgtggtgttatgtggtcatttcagccctaacttctgtgtggatcacagttattcagggttcattttcatccattcttccctttcgctcccttccctggaaaccccgctgcctctgggtcatccgttcagcacgtggtggagaacaagtgccttcagggctggcctcggcctcgagtctcgggacagaggccgccagtggagatcatggctttgggtattatttgacttttagaacaaaagctgtggttaagatctcatttttattgctttttcccacgtcccacgagacactattttcggttctctggctaataccctgtttttgagtttattttgtttctgtctatgtcacagtgtccccctacgacccgacctctctatgtaagcacacatgcgcacacacacttgcattcatgaatctgatataaagtgccagtaatccgccaagagggggtgcgaagggggcatgtcacgacagctccgccaccccccattgcccacccgcactttcccgagcaccgcgccccgtgggctgtgggtgagccgcgctccctgcactgagcgggtttaggggctcgcccacatgcatgcaggccaagacagcaaatgccagccgggcacgacgcccgtgtgcccaggcctcgggggtctcagagccgcctctcacccccgaccctccacccaggggtctccccgtcgggagtggaggcgttggtcctggaagctgactcatcggagagggaaataccaaataaacatccgaggttgcatttatttatttatttacccggaagcatgtgcgctcccgggaggggtgctgggtcctcagggtggggggtcatagccacaggggagggcagttcccaggaaggtaaccagatgtctcttttgtgttttggccacctggggccgcccccaacctccccaccccaagaggggtctgagtgggacctcaaagcatggccagtgcaattctgaggctaggggaataggagaagcccaccagctgcccctgccacccacgggggctcctccctgccggggtccagctcagaaccacgggggtctgtgccggcagcaccggtgccatcttggcttccacaaattccagaagtttcttggctgcctcccgctctcagatggcacagggcctatcagtggcaggatttaatctggggagcaaattccagctctgaaatggagttctcacaccgtatctagggacagaggcatctggatgcaaacgcggggtttgttaggggcggaatcccgagggtggtgtgggggagctccgtccgggcagttggctgctggtcctgtctgattatgttttgccatattgagtctgaagtttgtgtggaagtgagctcgcccgagttgtccggtcggagttgtagccagtctttcaggggaccccgggacgccgatgaggcccagggtgcactccttgtcagtcttgcccgttgtccctgtgcattttgctttccgctgtcaaatctcactgtctcgttttcacaccgcatcagtccccatcatcactactcctccccaaagacatacagattgccctccccggcatgaagaagtcacaattctgacccgccacctctccaggggcggtgcctgggatggccacccatcaggacagccagagccggggtcccggcgtcctgagagtccagggcacctccccccattagctgtaaggtttcctgtcaggtgtgactgtcagtttgctggtcttccaataccgaagaaagggtggttgtgacaatacctcttgcttctaaagaatgtattataaaacaccgcagatttttttttttccttaaaaaacactacctgatgctttccttgttcgtggggattgtggtcacatgaagctctttctgcatcagtattaaggtgtatatttgaatgtcctcccctcccctttcccctccaggctgtgtagctttgaggggctgggcgtttgctcacgaccttgctgtctcgctcagaacatgctccgcaaagttctccgcacacacttcttccccatcaagcccatttccttccccaaccacaaaggtgtttgtgattcctcaccccgggaaaccaaggagctgcaaagtggagtctggttcagccccgtgcagactcacccagagcttaacgttgtctttcaaacaccctgagccttcctaaacagccagtgcagacgttctctctgggccacgaagcccctcgggtcctccccgtcccctgctccgatgcatacctcagtgcagaaccacagaatctctgcagcggaaacgccgtgcatctcttgtctgttggcagcgagcacatcgtgctggagacacgagtttctaagcagctggcacgagggctgctgacggcatgggtcgtgcttcagggtggcaatacctcttaggaacttagggcaggaagcaatacttcagcattgaatgtgtgtaaatagttgctttgagttgcaattgctattttcttctcagtcccagctcagatcgaattatatatccatatatatatatatatatatatatatatatatatatatatggtaaacaagcacacacaattttatccaatgcaaacaaatgtagagcatcagttacaaaaccctcgaatagcttgagagccccacaggctctgccacacccgtgacttcatccacactgacgtcacccgcgggggctccccctgcacatttgcacacgatccggaggagccgaaggccgcgtgcttcctgtcacatgggctgtaatcatttgtagtttccaaagacacgtctgcatttgaatttctagattttcgaggtaaggagttttttttaattggttgtttggaaaatcacatcatgcctagaatctgaaattgaattagcaagaaccgactgtttgcattttccatatatccttttatctgctctttttaaattgttaattctaataatttcaaaatgcattcactgaagaaatggacattaaaatattctaaaatttaaataaaaaaag

SEQ ID NO: 330732 - DNA, 7724 bp, Homo sapiens
  misc_feature (164)..(164): n is a, c, g, or t
  misc_feature (210)..(210): n is a, c, g, or t
gcggccgcggcgggagcggcggcgcactcggggggaagcaggccccactagacgggccgcgccgacgggctccgcgcactcgcagcccggggcgcccccacccccagcgcccgccgccgcgggcagggccggcccggagcgcggggggcggccggggagcgcgngccgggggcgcccgccgaagctcgctgctccgggtcggggtcgggnccggggccggccgcgcgccgcctttgacgcatcggagcgcggctcctgcaggatggagggctccgcgccgccagcggagttgtttgtgcgcaggcggctcgcggggctgggagcgctcaaggtctgaacttccctccggagccgcagctggaggaggcgagcgcgcgaggaggagaagccgcgcggcgcggaggccaccctcggggcgagaggcgcggaaggcgagcgagcaaagcggtcccggagccacggcggccacgcggcggggacccccgggcgttctaggtactggtgaccccggccggggcaggccccgggactcgacaacatggcttccccgccccaccagcagctgctgcatcaccacagcaccgaggtgagctgcgactccagcggggacagcaacagcgtgcgcgtcaagatcaaccccaagcagctgtcctccaacagccaccccaagcactgcaaatacagcatctcctctagctgcagcagctctggggactccgggggcgtcccccggcgagtgggcggcggaggccggctgcgcaggcagaagaagctgccccagctgttcgagagggcctccagccgctggtgggaccccaagttcgactcggtgaacctggaggaggcctgcctggagcgctgcttcccgcagacccagcgccggttccggtatgcgctcttctacatcggcttcgcctgccttctgtggagcatctattttgcggtccacatgagatccagactgatcgtcatggtcgcccccgcgctgtgcttcctcctggtgtgtgtgggcttctttctgtttaccttcaccaagctgtacgcccggcattacgcgtggacctcgctggctctcaccctgctggtgttcgccctgaccctggctgcgcagttccaggtcttgacgcctgtctcaggacgcggcgacagctccaaccttacggccacagcccggcccacagatacttgcttatctcaagtggggagcttctccatgtgcatcgaagtgctctttttgctctataccgtcatgcacttacctttgtacctgagtttgtgtctgggggtggcctactctgtccttttcgagacctttggctaccatttccgggatgaagcctgcttcccctcgcccggagccggggccctgcactgggagctgctgagcagggggctgctccacggctgcatccacgccatcggggtccacctgttcgtcatgtcccaggtgaggtccaggagcaccttcctcaaggtggggcaatccattatgcacgggaaggacctggaagtggaaaaagccctcaaagagaggatgattcattccgtgatgccaagaatcatagccgatgacttaatgaagcagggagatgaggagagtgagaattctgtcaagaggcatgccacctcgagccccaagaacaggaagaaaaagtcttccatccaaaaagctcctatagccttccgcccttttaagatgcagcagatcgaagaagtcagtattttatttgcagatatcgtgggcttcaccaagatgagtgccaacaagtctgcccacgccctggtgggtctcctgaacgatctgttcggtcgcttcgaccgcctgtgtgaggagaccaagtgtgagaaaatcagcaccctgggagactgttactactgcgtggcgggctgtcccgagccccgggccgaccatgcctactgctgcatcgagatgggcctgggcatgatcaaggccatcgagcagttctgccaggagaagaaggagatggtgaacatgagagtcggggtgcacacgggcaccgtcctttgcggcatcctgggcatgaggaggtttaaatttgacgtgtggtccaacgatgtgaacctggccaatctcatggagcagctgggagtggccggcaaagttcacatttctgaggccaccgcaaaatacttagatgaccggtacgaaatggaagatgggaaagttattgaacggctgggccagagcgtggttgctgaccagttgaaaggtttgaagacatacctgatatcgggtcagagagccaaggagtctcgctgcagctgtgcagaggccttgctttctggctttgaggtcattgacggctcacaggtgtcctcaggccctaggggacaggggacagcgtcatcagggaatgtcagtgacttggcgcagactgtcaaaacctttgataaccttaagacctgcccttcgtgcggaatcacatttgctcccaaatctgaagccggcgccgagggaggagcacctcaaaacggctgccaagacgagcataaaaacagcaccaaggtaacaagctcatggctgttgttcctgtcagttcctctcctggcgcatccacccaaggcttctggaggacctaatcccaaaactcagaacgggctcctcagccctccccaagaggagaagctcaccaacagtcagacttctctgtgtgagatcttgcaggagaagggaaggtgggcaggggtgagcctggaccagtcggctctccttccgctgaggttcaagaacatccgggagaaaacggacgcccactttgtggacgttatcaaagaagacagcctgatgaaagattacttttttaagccgcccattaatcagttcagcctgaacttcctggatcaggagctggagcgatcctacaggaccagctatcaggaagaggtcataaagaactcccccgtgaagacgtttgctagtcccaccttcagctccctcctggatgtgtttctgtcgaccacagtgtttctgacgctgtccaccacctgcttcctgaagtacgaggcggccaccgtgcctcccccgcccgccgccctggcggtcttcagtgcagccctgctgctggaggtgctgtccctcgcggtgtccatcaggatggtgttcttcctggaggacgtcatggcctgcaccaagcgcctgctggagtggatcgccggctggctaccacgtcactgcatcggggccatcctggtgtcgcttcccgcactggccgtctactcccatgtcacctccgaatatgagaccaacatacacttcccagtgttcacaggctcggccgcgctgattgccgtcgtgcactactgtaacttctgccagctcagctcctggatgaggtcctccctcgccaccgtcgtgggggccgggccgctgctcctgctctacgtctccctgtgcccagacagttctgtattaacttcgccccttgacgcagtacagaatttcagttccgagaggaacccgtgcaatagttcggtgccgcgtgacctccggcggcccgccagcctcatcggccaggaggtggttctcgtcttctttctcctgctcttgttggtctggttcctgaatcgcgaatttgaagtcagctaccgcctccactaccacggagacgtggaagcggatcttcaccgcaccaagatccagagcatgcgggaccaggcagactggctgctgaggaacatcatcccctaccacgtggctgagcagctgaaggtgtcccagacctactccaagaaccacgacagcggaggggtgatcttcgccagcatcgtcaacttcagcgagttctacgaggagaactacgagggcggcaaggagtgctaccgggtcctcaacgagctcatcggggactttgacgagctcctaagcaagccggactacagcagcatcgagaagatcaagaccatcggagccacgtacatggcggcgtcagggctgaacaccgcgcaggcccaggacggcagccacccgcaggagcacctgcagatcctgttcgagttcgccaaggagatgatgcgcgtggtggacgacttcaacaacaacatgctgtggttcaacttcaagctccgcgtcggcttcaaccatgggcccctcacggccggggtcatcggcaccaccaagctgctgtacgacatctggggagacaccgtcaacatcgccagcaggatggacaccaccggcgtggagtgccgcatccaggtgagcgaagagagctaccgcgtcttgagcaagatgggctatgacttcgactacagagggaccgtgaatgtcaaggggaaaggccagatgaagacctacctgtacccaaagtgcacggatcacagggtcatcccacagcaccagctgtccatctccccagacatccgcgtccaggtggatggcagcatcggacggtctcccacagacgagattgccaacctggtgccttctgtccagtatgtggacaagacatctctgggttctgacagcagcacgcaggccaaggatgcccacctgtcccccaagagaccgtggaaggagcccgtcaaagccgaagaaaggggtcgatttggcaaagccatagagaaagacgactgtgacgaaacaggaatagaagaagccaacgaactcaccaagctcaacgtttcaaagagtgtgtgaggcggcgcccacccgctgcccgaggtgctctgtttgtcgaaacacagtaatatttgtatttggctgttgtgctttccaagcgccacagttgccctccccggacgtggtgttatgtggtcatttcagccctaacttctgtgtggatcacagttattcagggttcattttcatccattcttccctttcgctcccttccctggaaaccccgctgcctctgggtcatccgttcagcacgtggtggagaacaagtgccttcagggctggcctcggcctcgagtctcgggacagaggccgccagtggagatcatggctttgggtattatttgacttttagaacaaaagctgtggttaagatctcatttttattgctttttcccacgtcccacgagacactattttcggttctctggctaataccctgtttttgagtttattttgtttctgtctatgtcacagtgtccccctacgacccgacctctctatgtaagcacacatgcgcacacacacttgcattcatgaatctgatataaagtgccagtaatccgccaagagggggtgcgaagggggcatgtcacgacagctccgccaccccccattgcccacccgcactttcccgagcaccgcgccccgtgggctgtgggtgagccgcgctccctgcactgagcgggtttaggggctcgcccacatgcatgcaggccaagacagcaaatgccagccgggcacgacgcccgtgtgcccaggcctcgggggtctcagagccgcctctcacccccgaccctccacccaggggtctccccgtcgggagtggaggcgttggtcctggaagctgactcatcggagagggaaataccaaataaacatccgaggttgcatttatttatttatttacccggaagcatgtgcgctcccgggaggggtgctgggtcctcagggtggggggtcatagccacaggggagggcagttcccaggaaggtaaccagatgtctcttttgtgttttggccacctggggccgcccccaacctccccaccccaagaggggtctgagtgggacctcaaagcatggccagtgcaattctgaggctaggggaataggagaagcccaccagctgcccctgccacccacgggggctcctccctgccggggtccagctcagaaccacgggggtctgtgccggcagcaccggtgccatcttggcttccacaaattccagaagtttcttggctgcctcccgctctcagatggcacagggcctatcagtggcaggatttaatctggggagcaaattccagctctgaaatggagttctcacaccgtatctagggacagaggcatctggatgcaaacgcggggtttgttaggggcggaatcccgagggtggtgtgggggagctccgtccgggcagttggctgctggtcctgtctgattatgttttgccatattgagtctgaagtttgtgtggaagtgagctcgcccgagttgtccggtcggagttgtagccagtctttcaggggaccccgggacgccgatgaggcccagggtgcactccttgtcagtcttgcccgttgtccctgtgcattttgctttccgctgtcaaatctcactgtctcgttttcacaccgcatcagtccccatcatcactactcctccccaaagacatacagattgccctccccggcatgaagaagtcacaattctgacccgccacctctccaggggcggtgcctgggatggccacccatcaggacagccagagccggggtcccggcgtcctgagagtccagggcacctccccccattagctgtaaggtttcctgtcaggtgtgactgtcagtttgctggtcttccaataccgaagaaagggtggttgtgacaatacctcttgcttctaaagaatgtattataaaacaccgcagatttttttttttccttctttctgcatcagtattaaggtgtatatttgaatgtcctcccctcccctttcccctccaggctgtgtagctttgaggggctgggcgtttgctcacgaccttgctgtctcgctcagaacatgctccgcaaagttctccgcacacacttcttccccatcaagcccatttccttccccaaccacaaaggtgtttgtgattcctcaccccgggaaaccaaggagctgcaaagtggagtctggttcagccccgtgcagactcacccagagcttaacgttgtctttcaaacaccctgagccttcctaaacagccagtgcagacgttctctctgggccacgaagcccctcgggtcctccccgtcccctgctccgatgcatacctcagtgcagaaccacagaatctctgcagcggaaacgccgtgcatctcttgtctgttggcagcgagcacatcgtgctggagacacgagtttctaagcagctggcacgagggctgctgacggcatgggtcgtgcttcagggtggcaatacctcttaggaacttagggcaggaagcaatacttcagcattgaatgtgtgtaaatagttgctttgagttgcaattgctattttcttctcagtcccagctcagatcgaattatatatccatatatatatatatatatatatatatatatatatatatatggtaaacaagcacacacaattttatccaatgcaaacaaatgtagagcatcagttacaaaaccctcgaatagcttgagagccccacaggctctgccacacccgtgacttcatccacactgacgtcacccgcgggggctccccctgcacatttgcacacgatccggaggagccgaaggccgcgtgcttcctgtcacatgggctgtaatcatttgtagtttccaaagacacgtctgcatttgaatttctagattttcgaggtaaggagttttttttaattggttgtttggaaaatcacatcatgcctagaatctgaaattgaattagcaagaaccgactgtttgcattttccatatatccttttatctgctctttttaaattgttaattctaataatttcaaaatgcattcactgaagaaatggacattaaaatattctaaaatttaaataaaaaaag

SEQ ID NO: 330733 - DNA, 520 bp, Homo sapiens
cagcggaacaagcaaacaaacaaacaaaaaatgggggaaaaaagtaagttaaagagccatgaatcccctggagatagattctaagacagacccatctaggctttagatgattcaacctttagaaacttctccatacttctacccactggttccctgtcttctcaagccatatagaacaaacttaatctctcttctacatgagaactctgtaattatctgaagacagatttttctcttctctctcctccccatactaagctaagtatttctatttccattcaactcaatcaacttttattagctacctaccaagtgttgggaattaggctagccagtaaagacacaagggcaaatgagccatggattctatccctcaaggaatgcccagccttgcaggggagacagctatgtaaacaggccattacagttcttaaaatcaagtgcaaaaataaagtatattcaagataaggtatgatctaataagcacaaagccaactcaactgatcccccttgcttgttc

SEQ ID NO: 330734 - DNA, 375 bp, Homo sapiens
tcagggagcatgtcgcgaaggatagggaaggacagggggtctgcttccccagccgccctccagacccccagggctggtaggggccggcaaccctatgccccaacctggcctgctgcaggtgaggggggcacaccagggtaacacaggagcaggagggggagaaagcctggctagagcatccacctcataggcaccttccttgtgtccagggtgcagatgccagggctctgaggccctgaggtcctgtctggggcgagggggcttcctccatccactgcatccactgcccggctgagtctagaggccactgagcaagcagaccctccaaagccaggcacactcaggccctcacatggtcacggtgcttatgctctg

SEQ ID NO: 330735 - DNA, 446 bp, Homo sapiens
caacaaattacctcgtggaaatggggaaggcttcatgggaaataatgtttaacttagatttagacatttaactctacttggagtgtagagatttctgtgtagacagacaaaatgattatatgagagacagaagaaactgcacaaagcaagacaagtatgtaaaaggccatgacatctctaaggtagagtgaggtaccttttgtggctgaagcacagggtctgtgagagtgtaacacagatgacattggagaagaggtagaggtgagcctagggacactgggtgccacggtatagccaagaatgggacagagtcaggaagggtaagggcaactaatatatacaaagagcatcttatctttagaaagatcattccagcaacagtaagagaataaatgatagagccagaggctgctaagggatggcaattttgagttgttgctaccact

SEQ ID NO: 330736 - DNA, 189 bp, Homo sapiens
aattagtctctgtcagcaaagtggctaattggacatgctgttaaatatgcaaataatgtatttggtttccctactcattctttttcttgggactagtcctaggtgagatatagaggagttgttgatgatgctagtggataacgttttgtgccataactaaaagtggaacactcctgatgggcttctggt

SEQ ID NO: 330737 - DNA, 682 bp, Homo sapiens
ggggccggggggcggagccttgcgggctggagcgaaagaatgcgggggctgagcggagaagcggctcgaggctggaagaggatcctgggcgccgccagtctttagcaccagttggtgtaggagttgagacctacttcacagtagttctgtggacaatcacaatgggaatccaaggagggtctgtcctgttcgggctgctgctcgtcctggctgtcttctgccattcaggtcatagcctgcagtgctacaactgtcctaacccaactgctgactgcaaaacagccgtcaattgttcatctgattttgatgcgtgtctcattaccaaagctgggttacaagtgtataacaagtgttggaagtttgagcattgcaatttcaacgacgtcacaacccgcttgagggaaaatgagctaacgtactactgctgcaagaaggacctgtgtaactttaacgaacagcttgaaaatggtgggacatccttatcagagaaaacagttcttctgctggtgactccatttctggcagcagcctggagccttcatccctaagtcaacaccaggagagcttctcccaaactccccgttcctgcgtagtccgctttctcttgctgccacattctaaaggcttgatattttccaaatggatcctgttgggaaagaataaaattagcttgagcaacctg

SEQ ID NO: 330738 - DNA, 810 bp, Homo sapiens
aatttttgactcactgaccctgatggggaagatagtgttattcccacagtgtggtagtacacactggggcttatagggactgagcctactcaagggtatatggtgctgtgggtcagagctggggcatggcccagggattcagtgtgccttgactccccctgtaaatgttcctctcagaagccttcttggccttccagcccttggtttttgagacaaccagcagtcatttgttcgttcctgacattccttcctgtcccttccttccaggttcgttctgtggacaatcacaatgggaatccaaggagggtctgtcctgttcgggctgctgctcgtcctggctgtcttctgccattcaggtcatagcctgcagtgctacaactgtcctaacccaactgctgactgcaaaacagccgtcaattgttcatctgattttgatgcgtgtctcattaccaaagctgggttacaagtgtataacaagtgttggaagtttgagcattgcaatttcaacgacgtcacaacccgcttgagggaaaatgagctaacgtactactgctgcaagaaggacctgtgtaactttaacgaacagcttgaaaatggtgggacatccttatcagagaaaacagttcttctgctggtgactccatttctggcagcagcctggagccttcatccctaagtcaacaccaggagagcttctcccaaactccccgttcctgcgtagtccgctttctcttgctgccacattctaaaggcttgatattttccaaatggatcctgttgggaaagaataaaattagcttgagcaacctg

SEQ ID NO: 330739 - DNA, 575 bp, Homo sapiens
attatacttcttacagtgaggagccagagcttccaggttctgtggacaatcacaatgggaatccaaggagggtctgtcctgttcgggctgctgctcgtcctggctgtcttctgccattcaggtcatagcctgcagtgctacaactgtcctaacccaactgctgactgcaaaacagccgtcaattgttcatctgattttgatgcgtgtctcattaccaaagctgggttacaagtgtataacaagtgttggaagtttgagcattgcaatttcaacgacgtcacaacccgcttgagggaaaatgagctaacgtactactgctgcaagaaggacctgtgtaactttaacgaacagcttgaaaatggtgggacatccttatcagagaaaacagttcttctgctggtgactccatttctggcagcagcctggagccttcatccctaagtcaacaccaggagagcttctcccaaactccccgttcctgcgtagtccgctttctcttgctgccacattctaaaggcttgatattttccaaatggatcctgttgggaaagaataaaattagcttgagcaacctg

SEQ ID NO: 330740 - DNA, 814 bp, Homo sapiens
  misc_feature (774)..(774): n is a, c, g, or t
  misc_feature (792)..(792): n is a, c, g, or t
  misc_feature (814)..(814): n is a, c, g, or t
ggggccggggggcggagccttgcgggctggagcgaaagaatgcgggggctgagcggagaagcggctcgaggctggaagaggatcctgggcgccgccaggttctgtggacaatcacaatgggaatccaaggagggtctgtcctgttcgggctgctgctcgtcctggctgtcttctgccattcaggtcatagcctgcagtgctacaactgtcctaacccaactgctgactgcaaaacagccgtcaattgttcatctgattttgatgcgtgtctcattaccaaagctgggttacaagtgtataacaagtgttggaagtttgagcattgcaatttcaacgacgtcacaacccgcttgagggaaaatgagctaacgtactactgctgcaagaaggacctgtgtaactttaacgaacagcttgaaaatggtgggacatccttatcagagaaaacagttcttctgctggtgactccatttctggcagcagcctggagccttcatccctaagtcaacaccaggagagcttctcccaaactccccgttcctgcgtagtccgctttctcttgctgccacattctaaaggcttgatattttccaaatggatcctgttgggaaagaataaaattagcttgagcaacctggctaagatagaggggctctgggagactttgaagaccagtcctgtttgcagggaagccccacttgaaggaagaagtctaagagtgaagtaggtgtgacttgaactagatgctcttctctttgtttggaaacacttcantacactggtggtcttganctaatatttcttgtctgatgan

SEQ ID NO: 330741 - DNA, 743 bp, Homo sapiens
  misc_feature (10)..(10): n is a, c, g, or t
  misc_feature (25)..(25): n is a, c, g, or t
tggttcgatnatcgaccccttaggnatttgcctcgggcaagattcggcacgagcgaaggctggaagaggatcttgggcgccgccagagtctctctctgttgcccaagctggagtgcagtggcacagtcttggctcactgcaacctccacctcctgggtgcaagcgattctcgtgtctcagcctctcaagtagctgggattacaggttctgtggacaatcacaatgggaatccaaggagggtctgtcctgttcgggctgctgctcgtcctggctgtcttctgccattcaggtcatagcctgcagtgctacaactgtcctaacccaactgctgactgcaaaacagccgtcaattgttcatctgattttgatgcgtgtctcattaccaaagctgggttacaagtgtataacaagtgttggaagtttgagcattgcaatttcaacgacgtcacaacccgcttgagggaaaatgagctaacgtactactgctgcaagaaggacctgtgtaactttaacgaacagcttgaaaatggtgggacatccttatcagagaaaacagttcttctgctggtgactccatttctggcagcagcctggagccttcatccctaagtcaacaccaggagagcttctcccaaactccccgttcctgcgtagtccgctttctcttgctgccacattctaaaggcttgatattttccaaatggatcctgttgggaaagaataaaattagcttgagcaacctg

SEQ ID NO: 330742 - DNA, 905 bp, Homo sapiens
  misc_feature (31)..(32): n is a, c, g, or t
  misc_feature (46)..(46): n is a, c, g, or t
  misc_feature (50)..(50): n is a, c, g, or t
agtggaagataacaaagcccataaaaaattnnaaagacaaagaaanaacncgattttcagccacttgtacctctctaagttttcatgccctgctatctcttccactggaaaagtgtaatagcatacatcaatggtgtgttaaagctatttccttgccttttttttattggaatggtaggatatcttggctttgccacacacagttacagagtgaacactctactacatgtgactggcagtattaagtgtgcttattttaaatgttactggtagaaaggcagttcaggtatgtgtgtatatagtatgaatgcagtggggacaccctttgtggttacagtttgagacttccaaaggtcatccttaataacaacagatctgcaggggtatgttttaccatctgcatccagcctcctgctaactcctagctgactcagcatagattgtataaaatacctttgtaacggctcttagcacactcacagatgtttgaggctttcagaagctcttctaaaaaatgatacacacctttcacaagggcaaactttttccttttccctgtgtattctagtgaatgaatctcaagattcagtagacctaatgacatttgtattttatgatcttggctgtatttaatggcataggctgacttttgcagatggaggaatttcttgattaatgttgaaaaaaaacccttgattatactctgttggacaaaccgagtgcaatgaatgatgcttttctgaaaatgaaatataacaagtgggtgaatgtggttatggccgaaaaggatatgcagtatgcttaatggtagcaactgaaagaagacatcctgagcagtgccagctttcttctgttgatgccgttccctgaacataggaaaatagaaacttgcttatcaaaactca

SEQ ID NO: 330743 - DNA, 830 bp, Homo sapiens
  misc_feature (10)..(10): n is a, c, g, or t
  misc_feature (25)..(25): n is a, c, g, or t
  misc_feature (725)..(725): n is a, c, g, or t
tggttcgatnatcgaccccttaggnatttgcctcgggcaagattcggcacgagcgaaggctggaagaggatcttgggcgccgccagtctttagcaccagttggtgtaggagttgagacctacttcacagtagttctgtggacaatcacaatgggaatccaaggagggtctgtcctgttcgggctgctgctcgtcctggctgtcttctgccattcaggtcatagcctgcagtgctacaactgtcctaacccaactgctgactgcaaaacagccgtcaattgttcatctgattttgatgcgtgtctcattaccaaagctgggttacaagtgtataacaagtgttggaagtttgagcattgcaatttcaacgacgtcacaacccgcttgagggaaaatgagctaacgtactactgctgcaagaaggacctgtgtaactttaacgaacagcttgaaaatggtgggacatccttatcagagaaaacagttcttctgctggtgactccatttctggcagcagcctggagccttcatccctaagtcaacaccaggagagcttctcccaaactccccgttcctgcgtagtccgctttctcttgctgtgccgcctgctgctgatgctaccctctgtgggtacccgtgccccagaggacgccgagcttcagccccgacccctggacatctactctgccgtggatgatgcctccacgagaaggagctgaatcgacngcctgcagaagtcttggagagcctcaagagataacgttgttccatctattgtaagaagtttggccagatcccctgtgtgaagcccgttaacaatgtgccttgagg

SEQ ID NO: 330744 - DNA, 508 bp, Homo sapiens
  misc_feature (360)..(360): n is a, c, g, or t
tcagtgctggtgctgactctcaatagccccacccaagctggctataggtttacagatacattaattaggcaacctaaaatattgatgctggtgttggtgtgacataatgctatggccagaactgaaacttagagttataattcatgtattagggttctccagagggacagaattagtaggatatatgtatatatgaaagggaggttattagggagaactggctcccacagttagaaggcgaagtctaagagtgaagtaggtgtgacttgaactagattgcatgcttcctcctttgctcttaggaagaccagctttgcagtgacagcttgagtgggttctctgcagccctcagattatttntcctctggctccttggatgtagtcagttagcatcattagtacatctttggagggtggggcaggagtatatgagcatcctctctcacatggaacgcttgaggcatgccaaatgttccatatgtgggtgtcagtcagggacaacaagatc

SEQ ID NO: 330745 - DNA, 439 bp, Homo sapiens
gcttcttctactcaccgccgccggggcctgaggtggttgcctcgcccctggtcccctgcccctcgacccccaggctcgcctctgcctcccacccggaggagctctgcgagctggagatccggattaaggagctggagttgctcaccatcactggggacggcttcgactcccagagctacacattcctgaaggcgctaaaagacgaaaagttacaaggactgaagaccaagcaacctggaaagaagtcggcctctctctcctgaggagctgcctaccagagcttgggcagccacctccttaggtgttagtgcttagataatgtgtcccatttgttgtcatttcaaagatggttattttctgttctgtatttaccgctgttcttgttgctaccagcatgtacttcacatacagtgcccactttgtgtggtaaaaaacatgg

SEQ ID NO: 330746 - DNA, 2045 bp, Homo sapiens
ggggccggggggcggagccttgcgggctggagcgaaagaatgcgggggctgagcggagaagcggctcgaggctggaagaggatcctgggcgccgccaggttctgtggacaatcacaatgggaatccaaggagggtctgtcctgttcgggctgctgctcgtcctggctgtcttctgccattcaggtcatagcctgcagtgctacaactgtcctaacccaactgctgactgcaaaacagccgtcaattgttcatctgattttgatgcgtgtctcattaccaaagctgggttacaagtgtataacaagtgttggaagtttgagcattgcaatttcaacgacgtcacaacccgcttgagggaaaatgagctaacgtactactgctgcaagaaggacctgtgtaactttaacgaacagcttgaaaatggtgggacatccttatcagagaaaacagttcttctgctggtgactccatttctggcagcagcctggagccttcatccctaagtcaacaccaggagagcttctcccaaactccccgttcctgcgtagtccgctttctcttgctgccacattctaaaggcttgatattttccaaatggatcctgttgggaaagaataaaattagcttgagcaacctggctaagatagaggggctctgggagactttgaagaccagtcctgtttgcagggaagccccacttgaaggaagaagtctaagagtgaagtaggtgtgacttgaactagattgcatgcttcctcctttgctcttgggaagaccagctttgcagtgacagcttgagtgggttctctgcagccctcagattatttttcctctggctccttggatgtagtcagttagcatcattagtacatctttggagggtggggcaggagtatatgagcatcctctctcacatggaacgctttcataaacttcagggatcccgtgttgccatggaggcatgccaaatgttccatatgtgggtgtcagtcagggacaacaagatccttaatgcagagctagaggacttctggcagggaagtggggaagtgttccagatagcagggcatgaaaacttagagaggtacaagtggctgaaaatcgagtttttcctctgtctttaaattttatatgggctttgttatcttccactggaaaagtgtaatagcatacatcaatggtgtgttaaagctatttccttgccttttttttattggaatggtaggatatcttggctttgccacacacagttacagagtgaacactctactacatgtgactggcagtattaagtgtgcttattttaaatgttactggtagaaaggcagttcaggtatgtgtgtatatagtatgaatgcagtggggacaccctttgtggttacagtttgagacttccaaaggtcatccttaataacaacagatctgcaggggtatgttttaccatctgcatccagcctcctgctaactcctagctgactcagcatagattgtataaaatacctttgtaacggctcttagcacactcacagatgtttgaggctttcagaagctcttctaaaaaatgatacacacctttcacaagggcaaactttttccttttccctgtgtattctagtgaatgaatctcaagattcagtagacctaatgacatttgtattttatgatcttggctgtatttaatggcataggctgacttttgcagatggaggaatttcttgattaatgttgaaaaaaaacccttgattatactctgttggacaaaccgagtgcaatgaatgatgcttttctgaaaatgaaatataacaagtgggtgaatgtggttatggccgaaaaggatatgcagtatgcttaatggtagcaactgaaagaagacatcctgagcagtgccagctttcttctgttgatgccgttccctgaacataggaaaatagaaacttgcttatcaaaactcaaaacaccgaaccaataacaaacaacactgttgcgcccctccggccctcaaaagttttaaaaccctgttgggccgcggccccagggcatacaac

SEQ ID NO: 330747 - DNA, 2134 bp, Homo sapiens
ggggccggggggcggagccttgcgggctggagcgaaagaatgcgggggctgagcggagaagcggctcgaggctggaagaggatcctgggcgccgccaggttctgtggacaatcacaatgggaatccaaggagggtctgtcctgttcgggctgctgctcgtcctggctgtcttctgccattcaggtcatagcctgcagtgctacaactgtcctaacccaactgctgactgcaaaacagccgtcaattgttcatctgattttgatgcgtgtctcattaccaaagctgggttacaagtgtataacaagtgttggaagtttgagcattgcaatttcaacgacgtcacaacccgcttgagggaaaatgagctaacgtactactgctgcaagaaggacctgtgtaactttaacgaacagcttgaaaatggtgggacatccttatcagagaaaacagttcttctgctggtgactccatttctggcagcagcctggagccttcatccctaagtcaacaccaggagagcttctcccaaactccccgttcctgcgtagtccgctttctcttgctgccacattctaaaggcttgatattttccaaatggatcctgttgggaaagaataaaattagcttgagcaacctggctaagatagaggggctctgggagactttgaagaccagtcctgtttgcagggaagccccacttgaaggaagaagtctaagagtgaagtaggtgtgacttgaactagattgcatgcttcctcctttgctcttgggaagaccagctttgcagtgacagcttgagtgggttctctgcagccctcagattatttttcctctggctccttggatgtagtcagttagcatcattagtacatctttggagggtggggcaggagtatatgagcatcctctctcacatggaacgctttcataaacttcagggatcccgtgttgccatggaggcatgccaaatgttccatatgtgggtgtcagtcagggacaacaagatccttaatgcagagctagaggacttctggcagggaagtggggaagtgttccagatagcagggcatgaaaacttagagaggtacaagtggctgaaaatcgagtttttcctctgtctttaaattttatatgggctttgttatcttccactggaaaagtgtaatagcatacatcaatggtgtgttaaagctatttccttgccttttttttattggaatggtaggatatcttggctttgccacacacagttacagagtgaacactctactacatgtgactggcagtattaagtgtgcttattttaaatgttactggtagaaaggcagttcaggtatgtgtgtatatagtatgaatgcagtggggacaccctttgtggttacagtttgagacttccaaaggtcatccttaataacaacagatctgcaggggtatgttttaccatctgcatccagcctcctgctaactcctagctgactcagcatagattgtataaaatacctttgtaacggctcttagcacactcacagatgtttgaggctttcagaagctcttctaaaaaatgatacacacctttcacaagggcaaactttttccttttccctgtgtattctagtgaatgaatctcaagattcagtagacctaatgacatttgtattttatgatcttggctgtatttaatggcataggctgacttttgcagatggaggaatttcttgattaatgttgaaaaaaaacccttgattatactctgttggacaaaccgagtgcaatgaatgatgcttttctgaaaatgaaatataacaagtgggtgaatgtggttatggccgaaaaggatatgcagtatgcttaatggtagcaactgaaagaagacatcctgagcagtgccagctttcttctgttgatgccgttccctgaacataggaaaatagaaacttgcttatcaaaactcatagcattaccttggtgctctgtgttctctgttagctcagtgtctttccttacatcaataggtttttttttttttttttggcctgaggaagtactgaccatgcccacagccaccggctgagcaaagaagctcatttcatgtgagttctaaggaatgagaaacaattttgatgaatttaagcag
